United States Patent Application Publication US 2007/0031850 A1 - sequence listing, part 4

SEQ ID NO: 61415 - DNA, 25 bp, Probe sequence
aattatatcttatgtggcgttgtta

SEQ ID NO: 61416 - DNA, 25 bp, Probe sequence
ccacataagatgcgtaacaccaaat

SEQ ID NO: 61417 - DNA, 25 bp, Probe sequence
attatatcttatgtggcgttgttat

SEQ ID NO: 61418 - DNA, 25 bp, Probe sequence
atatcttatgtggcgttgttatatt

SEQ ID NO: 61419 - DNA, 25 bp, Probe sequence
cataagatgcgtaacaccaaattat

SEQ ID NO: 61420 - DNA, 25 bp, Probe sequence
caaattatatcttatgtggcgttgt

SEQ ID NO: 61421 - DNA, 25 bp, Probe sequence
gatgcgtaacaccaaattatatctt

SEQ ID NO: 61422 - DNA, 25 bp, Probe sequence
aatttggtgttacgcatcttatgtg

SEQ ID NO: 61423 - DNA, 25 bp, Probe sequence
taatttggtgttacgcatcttatgt

SEQ ID NO: 61424 - DNA, 25 bp, Probe sequence
taacaacgccacataagatataatt

SEQ ID NO: 61425 - DNA, 25 bp, Probe sequence
atttggtgttacgcatcttatgtgg

SEQ ID NO: 61426 - DNA, 25 bp, Probe sequence
ataacaacgccacataagatataat

SEQ ID NO: 61427 - DNA, 25 bp, Probe sequence
aatataacaacgccacataagatat

SEQ ID NO: 61428 - DNA, 25 bp, Probe sequence
ataatttggtgttacgcatcttatg

SEQ ID NO: 61429 - DNA, 25 bp, Probe sequence
acaacgccacataagatataatttg

SEQ ID NO: 61430 - DNA, 25 bp, Probe sequence
gatataatttggtgttacgcatctt

SEQ ID NO: 61431 - DNA, 25 bp, Probe sequence
gtgtgaatgatgaggtgagagtatt

SEQ ID NO: 61432 - DNA, 25 bp, Probe sequence
agtgtgaatgatgaggtgagagtat

SEQ ID NO: 61433 - DNA, 25 bp, Probe sequence
aatgatgaggtgagagtattcagtg

SEQ ID NO: 61434 - DNA, 25 bp, Probe sequence
gatgaggtgagagtattcagtgtaa

SEQ ID NO: 61435 - DNA, 25 bp, Probe sequence
tgatgaggtgagagtattcagtgta

SEQ ID NO: 61436 - DNA, 25 bp, Probe sequence
atgatgaggtgagagtattcagtgt

SEQ ID NO: 61437 - DNA, 25 bp, Probe sequence
cagtgtgaatgatgaggtgagagta

SEQ ID NO: 61438 - DNA, 25 bp, Probe sequence
gaatgatgaggtgagagtattcagt

SEQ ID NO: 61439 - DNA, 25 bp, Probe sequence
tgtgaatgatgaggtgagagtattc

SEQ ID NO: 61440 - DNA, 25 bp, Probe sequence
aatactctcacctcatcattcacac

SEQ ID NO: 61441 - DNA, 25 bp, Probe sequence
atactctcacctcatcattcacact

SEQ ID NO: 61442 - DNA, 25 bp, Probe sequence
cactgaatactctcacctcatcatt

SEQ ID NO: 61443 - DNA, 25 bp, Probe sequence
ttacactgaatactctcacctcatc

SEQ ID NO: 61444 - DNA, 25 bp, Probe sequence
tacactgaatactctcacctcatca

SEQ ID NO: 61445 - DNA, 25 bp, Probe sequence
acactgaatactctcacctcatcat

SEQ ID NO: 61446 - DNA, 25 bp, Probe sequence
tactctcacctcatcattcacactg

SEQ ID NO: 61447 - DNA, 25 bp, Probe sequence
gaatactctcacctcatcattcaca

SEQ ID NO: 61448 - DNA, 25 bp, Probe sequence
actgaatactctcacctcatcattc

SEQ ID NO: 61449 - DNA, 25 bp, Probe sequence
agacactacaacactatattggcag

SEQ ID NO: 61450 - DNA, 25 bp, Probe sequence
tagacactacaacactatattggca

SEQ ID NO: 61451 - DNA, 25 bp, Probe sequence
acactacaacactatattggcagta

SEQ ID NO: 61452 - DNA, 25 bp, Probe sequence
gacactacaacactatattggcagt

SEQ ID NO: 61453 - DNA, 25 bp, Probe sequence
ttagacactacaacactatattggc

SEQ ID NO: 61454 - DNA, 25 bp, Probe sequence
cactacaacactatattggcagtag

SEQ ID NO: 61455 - DNA, 25 bp, Probe sequence
cttagacactacaacactatattgg

SEQ ID NO: 61456 - DNA, 25 bp, Probe sequence
agtaattgtgactgagatgaacttt

SEQ ID NO: 61457 - DNA, 25 bp, Probe sequence
aaagtaattgtgactgagatgaact

SEQ ID NO: 61458 - DNA, 25 bp, Probe sequence
ctgccaatatagtgttgtagtgtct

SEQ ID NO: 61459 - DNA, 25 bp, Probe sequence
tgccaatatagtgttgtagtgtcta

SEQ ID NO: 61460 - DNA, 25 bp, Probe sequence
tactgccaatatagtgttgtagtgt

SEQ ID NO: 61461 - DNA, 25 bp, Probe sequence
actgccaatatagtgttgtagtgtc

SEQ ID NO: 61462 - DNA, 25 bp, Probe sequence
gccaatatagtgttgtagtgtctaa

SEQ ID NO: 61463 - DNA, 25 bp, Probe sequence
ctactgccaatatagtgttgtagtg

SEQ ID NO: 61464 - DNA, 25 bp, Probe sequence
ccaatatagtgttgtagtgtctaag

SEQ ID NO: 61465 - DNA, 25 bp, Probe sequence
ctcagtcacaattactttatagcct

SEQ ID NO: 61466 - DNA, 25 bp, Probe sequence
tctcagtcacaattactttatagcc

SEQ ID NO: 61467 - DNA, 25 bp, Probe sequence
ggatgaatgtgttaatctatggcag

SEQ ID NO: 61468 - DNA, 25 bp, Probe sequence
tcggatgaatgtgttaatctatggc

SEQ ID NO: 61469 - DNA, 25 bp, Probe sequence
cggatgaatgtgttaatctatggca

SEQ ID NO: 61470 - DNA, 25 bp, Probe sequence
atcggatgaatgtgttaatctatgg

SEQ ID NO: 61471 - DNA, 25 bp, Probe sequence
gatgaatgtgttaatctatggcaga

SEQ ID NO: 61472 - DNA, 25 bp, Probe sequence
cgaatataaggtgcgttgaatctta

SEQ ID NO: 61473 - DNA, 25 bp, Probe sequence
gcgttgaatcttatgattacactcc

SEQ ID NO: 61474 - DNA, 25 bp, Probe sequence
gtgcgttgaatcttatgattacact

SEQ ID NO: 61475 - DNA, 25 bp, Probe sequence
aaggtgcgttgaatcttatgattac

SEQ ID NO: 61476 - DNA, 25 bp, Probe sequence
ctgccatagattaacacattcatcc

SEQ ID NO: 61477 - DNA, 25 bp, Probe sequence
gccatagattaacacattcatccga

SEQ ID NO: 61478 - DNA, 25 bp, Probe sequence
ccatagattaacacattcatccgat

SEQ ID NO: 61479 - DNA, 25 bp, Probe sequence
tgccatagattaacacattcatccg

SEQ ID NO: 61480 - DNA, 25 bp, Probe sequence
tctgccatagattaacacattcatc

SEQ ID NO: 61481 - DNA, 25 bp, Probe sequence
taagattcaacgcaccttatattcg

SEQ ID NO: 61482 - DNA, 25 bp, Probe sequence
ggagtgtaatcataagattcaacgc

SEQ ID NO: 61483 - DNA, 25 bp, Probe sequence
gtaatcataagattcaacgcacctt

SEQ ID NO: 61484 - DNA, 25 bp, Probe sequence
agtgtaatcataagattcaacgcac

SEQ ID NO: 61485 - DNA, 25 bp, Probe sequence
gctgtctataacgagcatattaagc

SEQ ID NO: 61486 - DNA, 25 bp, Probe sequence
ctgtctataacgagcatattaagct

SEQ ID NO: 61487 - DNA, 25 bp, Probe sequence
agctgtctataacgagcatattaag

SEQ ID NO: 61488 - DNA, 25 bp, Probe sequence
agagtgggacgagaaaatatagtta

SEQ ID NO: 61489 - DNA, 25 bp, Probe sequence
tagagtgggacgagaaaatatagtt

SEQ ID NO: 61490 - DNA, 25 bp, Probe sequence
atagagtgggacgagaaaatatagt

SEQ ID NO: 61491 - DNA, 25 bp, Probe sequence
tagctgtctataacgagcatattaa

SEQ ID NO: 61492 - DNA, 25 bp, Probe sequence
atagctgtctataacgagcatatta

SEQ ID NO: 61493 - DNA, 25 bp, Probe sequence
tatagctgtctataacgagcatatt

SEQ ID NO: 61494 - DNA, 25 bp, Probe sequence
gcttaatatgctcgttatagacagc

SEQ ID NO: 61495 - DNA, 25 bp, Probe sequence
cttaatatgctcgttatagacagct

SEQ ID NO: 61496 - DNA, 25 bp, Probe sequence
agcttaatatgctcgttatagacag

SEQ ID NO: 61497 - DNA, 25 bp, Probe sequence
aactatattttctcgtcccactcta

SEQ ID NO: 61498 - DNA, 25 bp, Probe sequence
taactatattttctcgtcccactct

SEQ ID NO: 61499 - DNA, 25 bp, Probe sequence
actatattttctcgtcccactctat

SEQ ID NO: 61500 - DNA, 25 bp, Probe sequence
ttaatatgctcgttatagacagcta

SEQ ID NO: 61501 - DNA, 25 bp, Probe sequence
aatatgctcgttatagacagctata

SEQ ID NO: 61502 - DNA, 25 bp, Probe sequence
taatatgctcgttatagacagctat

SEQ ID NO: 61503 - DNA, 25 bp, Probe sequence
gacgttaaagtgcaataggtttcta

SEQ ID NO: 61504 - DNA, 25 bp, Probe sequence
tgtgccttatcaactaaatattcca

SEQ ID NO: 61505 - DNA, 25 bp, Probe sequence
tgacgttaaagtgcaataggtttct

SEQ ID NO: 61506 - DNA, 25 bp, Probe sequence
ttgacgttaaagtgcaataggtttc

SEQ ID NO: 61507 - DNA, 25 bp, Probe sequence
ccatcctttcttcccctaatacaat

SEQ ID NO: 61508 - DNA, 25 bp, Probe sequence
gccttatcaactaaatattccaaca

SEQ ID NO: 61509 - DNA, 25 bp, Probe sequence
tgccttatcaactaaatattccaac

SEQ ID NO: 61510 - DNA, 25 bp, Probe sequence
gtgccttatcaactaaatattccaa

SEQ ID NO: 61511 - DNA, 25 bp, Probe sequence
acgttaaagtgcaataggtttctat

SEQ ID NO: 61512 - DNA, 25 bp, Probe sequence
tggaatatttagttgataaggcaca

SEQ ID NO: 61513 - DNA, 25 bp, Probe sequence
tagaaacctattgcactttaacgtc

SEQ ID NO: 61514 - DNA, 25 bp, Probe sequence
agaaacctattgcactttaacgtca

SEQ ID NO: 61515 - DNA, 25 bp, Probe sequence
gaaacctattgcactttaacgtcaa

SEQ ID NO: 61516 - DNA, 25 bp, Probe sequence
attgtattaggggaagaaaggatgg

SEQ ID NO: 61517 - DNA, 25 bp, Probe sequence
ttggaatatttagttgataaggcac

SEQ ID NO: 61518 - DNA, 25 bp, Probe sequence
gttggaatatttagttgataaggca

SEQ ID NO: 61519 - DNA, 25 bp, Probe sequence
tgttggaatatttagttgataaggc

SEQ ID NO: 61520 - DNA, 25 bp, Probe sequence
atagaaacctattgcactttaacgt

SEQ ID NO: 61521 - DNA, 25 bp, Probe sequence
ttagtattggtgcctagttggaacg

SEQ ID NO: 61522 - DNA, 25 bp, Probe sequence
agactataatagactgtaccgaaca

SEQ ID NO: 61523 - DNA, 25 bp, Probe sequence
aagactataatagactgtaccgaac

SEQ ID NO: 61524 - DNA, 25 bp, Probe sequence
tcggaataatagggcattacacttt

SEQ ID NO: 61525 - DNA, 25 bp, Probe sequence
cgttctgtgtttatttgtcggaata

SEQ ID NO: 61526 - DNA, 25 bp, Probe sequence
atttagtattggtgcctagttggaa

SEQ ID NO: 61527 - DNA, 25 bp, Probe sequence
aatttagtattggtgcctagttgga

SEQ ID NO: 61528 - DNA, 25 bp, Probe sequence
gtcggaataatagggcattacactt

SEQ ID NO: 61529 - DNA, 25 bp, Probe sequence
atttgtcggaataatagggcattac

SEQ ID NO: 61530 - DNA, 25 bp, Probe sequence
cgttccaactaggcaccaatactaa

SEQ ID NO: 61531 - DNA, 25 bp, Probe sequence
tgttcggtacagtctattatagtct

SEQ ID NO: 61532 - DNA, 25 bp, Probe sequence
gttcggtacagtctattatagtctt

SEQ ID NO: 61533 - DNA, 25 bp, Probe sequence
tattccgacaaataaacacagaacg

SEQ ID NO: 61534 - DNA, 25 bp, Probe sequence
aaagtgtaatgccctattattccga

SEQ ID NO: 61535 - DNA, 25 bp, Probe sequence
tccaactaggcaccaatactaaatt

SEQ ID NO: 61536 - DNA, 25 bp, Probe sequence
ttccaactaggcaccaatactaaat

SEQ ID NO: 61537 - DNA, 25 bp, Probe sequence
aagtgtaatgccctattattccgac

SEQ ID NO: 61538 - DNA, 25 bp, Probe sequence
gtaatgccctattattccgacaaat

SEQ ID NO: 61539 - DNA, 25 bp, Probe sequence
aatgctgagataaccatagtaacca

SEQ ID NO: 61540 - DNA, 25 bp, Probe sequence
atgctgagataaccatagtaaccat

SEQ ID NO: 61541 - DNA, 25 bp, Probe sequence
caatgctgagataaccatagtaacc

SEQ ID NO: 61542 - DNA, 25 bp, Probe sequence
acaatgctgagataaccatagtaac

SEQ ID NO: 61543 - DNA, 25 bp, Probe sequence
gctgagataaccatagtaaccatgt

SEQ ID NO: 61544 - DNA, 25 bp, Probe sequence
tgctgagataaccatagtaaccatg

SEQ ID NO: 61545 - DNA, 25 bp, Probe sequence
aatacaatgctgagataaccatagt

SEQ ID NO: 61546 - DNA, 25 bp, Probe sequence
gagataaccatagtaaccatgttgt

SEQ ID NO: 61547 - DNA, 25 bp, Probe sequence
tgagataaccatagtaaccatgttg

SEQ ID NO: 61548 - DNA, 25 bp, Probe sequence
tggttactatggttatctcagcatt

SEQ ID NO: 61549 - DNA, 25 bp, Probe sequence
ggttactatggttatctcagcattg

SEQ ID NO: 61550 - DNA, 25 bp, Probe sequence
atggttactatggttatctcagcat

SEQ ID NO: 61551 - DNA, 25 bp, Probe sequence
gttactatggttatctcagcattgt

SEQ ID NO: 61552 - DNA, 25 bp, Probe sequence
catggttactatggttatctcagca

SEQ ID NO: 61553 - DNA, 25 bp, Probe sequence
acatggttactatggttatctcagc

SEQ ID NO: 61554 - DNA, 25 bp, Probe sequence
actatggttatctcagcattgtatt

SEQ ID NO: 61555 - DNA, 25 bp, Probe sequence
caacatggttactatggttatctca

SEQ ID NO: 61556 - DNA, 25 bp, Probe sequence
acaacatggttactatggttatctc

SEQ ID NO: 61557 - DNA, 25 bp, Probe sequence
ttattgagtaacattacaggaggaa

SEQ ID NO: 61558 - DNA, 25 bp, Probe sequence
attattgagtaacattacaggagga

SEQ ID NO: 61559 - DNA, 25 bp, Probe sequence
aacagctaatcatctggtctgaatt

SEQ ID NO: 61560 - DNA, 25 bp, Probe sequence
acagctaatcatctggtctgaatta

SEQ ID NO: 61561 - DNA, 25 bp, Probe sequence
actgctatgtctgtatttgtcaatt

SEQ ID NO: 61562 - DNA, 25 bp, Probe sequence
gactgctatgtctgtatttgtcaat

SEQ ID NO: 61563 - DNA, 25 bp, Probe sequence
ttgagtaacattacaggaggaaatt

SEQ ID NO: 61564 - DNA, 25 bp, Probe sequence
aattattgagtaacattacaggagg

SEQ ID NO: 61565 - DNA, 25 bp, Probe sequence
attgagtaacattacaggaggaaat

SEQ ID NO: 61566 - DNA, 25 bp, Probe sequence
ttcctcctgtaatgttactcaataa

SEQ ID NO: 61567 - DNA, 25 bp, Probe sequence
tcctcctgtaatgttactcaataat

SEQ ID NO: 61568 - DNA, 25 bp, Probe sequence
aattcagaccagatgattagctgtt

SEQ ID NO: 61569 - DNA, 25 bp, Probe sequence
taattcagaccagatgattagctgt

SEQ ID NO: 61570 - DNA, 25 bp, Probe sequence
aattgacaaatacagacatagcagt

SEQ ID NO: 61571 - DNA, 25 bp, Probe sequence
attgacaaatacagacatagcagtc

SEQ ID NO: 61572 - DNA, 25 bp, Probe sequence
aatttcctcctgtaatgttactcaa

SEQ ID NO: 61573 - DNA, 25 bp, Probe sequence
cctcctgtaatgttactcaataatt

SEQ ID NO: 61574 - DNA, 25 bp, Probe sequence
atttcctcctgtaatgttactcaat

SEQ ID NO: 61575 - DNA, 25 bp, Probe sequence
atgtaaagggaaatagcgattcgtt

SEQ ID NO: 61576 - DNA, 25 bp, Probe sequence
tgtaaagggaaatagcgattcgttt

SEQ ID NO: 61577 - DNA, 25 bp, Probe sequence
catgtaaagggaaatagcgattcgt

SEQ ID NO: 61578 - DNA, 25 bp, Probe sequence
attcgtttcgtcttgtctcctacat

SEQ ID NO: 61579 - DNA, 25 bp, Probe sequence
gtaaagggaaatagcgattcgtttc

SEQ ID NO: 61580 - DNA, 25 bp, Probe sequence
gattcgtttcgtcttgtctcctaca

SEQ ID NO: 61581 - DNA, 25 bp, Probe sequence
atgttgaaggtcttttctctatgct

SEQ ID NO: 61582 - DNA, 25 bp, Probe sequence
tgttgaaggtcttttctctatgctt

SEQ ID NO: 61583 - DNA, 25 bp, Probe sequence
taaagggaaatagcgattcgtttcg

SEQ ID NO: 61584 - DNA, 25 bp, Probe sequence
aacgaatcgctatttccctttacat

SEQ ID NO: 61585 - DNA, 25 bp, Probe sequence
aaacgaatcgctatttccctttaca

SEQ ID NO: 61586 - DNA, 25 bp, Probe sequence
acgaatcgctatttccctttacatg

SEQ ID NO: 61587 - DNA, 25 bp, Probe sequence
atgtaggagacaagacgaaacgaat

SEQ ID NO: 61588 - DNA, 25 bp, Probe sequence
gaaacgaatcgctatttccctttac

SEQ ID NO: 61589 - DNA, 25 bp, Probe sequence
tgtaggagacaagacgaaacgaatc

SEQ ID NO: 61590 - DNA, 25 bp, Probe sequence
agcatagagaaaagaccttcaacat

SEQ ID NO: 61591 - DNA, 25 bp, Probe sequence
aagcatagagaaaagaccttcaaca

SEQ ID NO: 61592 - DNA, 25 bp, Probe sequence
cgaaacgaatcgctatttcccttta

SEQ ID NO: 61593 - DNA, 25 bp, Probe sequence
ttcacatcaagcacacagattaagc

SEQ ID NO: 61594 - DNA, 25 bp, Probe sequence
tttcacatcaagcacacagattaag

SEQ ID NO: 61595 - DNA, 25 bp, Probe sequence
atttcacatcaagcacacagattaa

SEQ ID NO: 61596 - DNA, 25 bp, Probe sequence
atatttcacatcaagcacacagatt

SEQ ID NO: 61597 - DNA, 25 bp, Probe sequence
ttatatttcacatcaagcacacaga

SEQ ID NO: 61598 - DNA, 25 bp, Probe sequence
tatttcacatcaagcacacagatta

SEQ ID NO: 61599 - DNA, 25 bp, Probe sequence
tatatttcacatcaagcacacagat

SEQ ID NO: 61600 - DNA, 25 bp, Probe sequence
acatcaagcacacagattaagccaa

SEQ ID NO: 61601 - DNA, 25 bp, Probe sequence
tttatatttcacatcaagcacacag

SEQ ID NO: 61602 - DNA, 25 bp, Probe sequence
gcttaatctgtgtgcttgatgtgaa

SEQ ID NO: 61603 - DNA, 25 bp, Probe sequence
cttaatctgtgtgcttgatgtgaaa

SEQ ID NO: 61604 - DNA, 25 bp, Probe sequence
aatctgtgtgcttgatgtgaaatat

SEQ ID NO: 61605 - DNA, 25 bp, Probe sequence
ttaatctgtgtgcttgatgtgaaat

SEQ ID NO: 61606 - DNA, 25 bp, Probe sequence
tctgtgtgcttgatgtgaaatataa

SEQ ID NO: 61607 - DNA, 25 bp, Probe sequence
taatctgtgtgcttgatgtgaaata

SEQ ID NO: 61608 - DNA, 25 bp, Probe sequence
atctgtgtgcttgatgtgaaatata

SEQ ID NO: 61609 - DNA, 25 bp, Probe sequence
ttggcttaatctgtgtgcttgatgt

SEQ ID NO: 61610 - DNA, 25 bp, Probe sequence
ctgtgtgcttgatgtgaaatataaa

SEQ ID NO: 61611 - DNA, 25 bp, Probe sequence
cgtcaatcaatgtcctagactctaa

SEQ ID NO: 61612 - DNA, 25 bp, Probe sequence
aacaagttcatttcaataccagtgg

SEQ ID NO: 61613 - DNA, 25 bp, Probe sequence
gttaaaggtcttaatcattgctccc

SEQ ID NO: 61614 - DNA, 25 bp, Probe sequence
ggttaaaggtcttaatcattgctcc

SEQ ID NO: 61615 - DNA, 25 bp, Probe sequence
tggttaaaggtcttaatcattgctc

SEQ ID NO: 61616 - DNA, 25 bp, Probe sequence
gggaacaatggttaaaggtcttaat

SEQ ID NO: 61617 - DNA, 25 bp, Probe sequence
acaagttcatttcaataccagtggg

SEQ ID NO: 61618 - DNA, 25 bp, Probe sequence
atggttaaaggtcttaatcattgct

SEQ ID NO: 61619 - DNA, 25 bp, Probe sequence
gttgtcagtcgttggttgaatgaac

SEQ ID NO: 61620 - DNA, 25 bp, Probe sequence
ttagagtctaggacattgattgacg

SEQ ID NO: 61621 - DNA, 25 bp, Probe sequence
ccactggtattgaaatgaacttgtt

SEQ ID NO: 61622 - DNA, 25 bp, Probe sequence
ggagcaatgattaagacctttaacc

SEQ ID NO: 61623 - DNA, 25 bp, Probe sequence
gggagcaatgattaagacctttaac

SEQ ID NO: 61624 - DNA, 25 bp, Probe sequence
gagcaatgattaagacctttaacca

SEQ ID NO: 61625 - DNA, 25 bp, Probe sequence
attaagacctttaaccattgttccc

SEQ ID NO: 61626 - DNA, 25 bp, Probe sequence
agcaatgattaagacctttaaccat

SEQ ID NO: 61627 - DNA, 25 bp, Probe sequence
cccactggtattgaaatgaacttgt

SEQ ID NO: 61628 - DNA, 25 bp, Probe sequence
gttcattcaaccaacgactgacaac

SEQ ID NO: 61629 - DNA, 25 bp, Probe sequence
gtctgacccactccctataatgttt

SEQ ID NO: 61630 - DNA, 25 bp, Probe sequence
atgtctgacccactccctataatgt

SEQ ID NO: 61631 - DNA, 25 bp, Probe sequence
tatcatgtctgacccactccctata

SEQ ID NO: 61632 - DNA, 25 bp, Probe sequence
tgtctgacccactccctataatgtt

SEQ ID NO: 61633 - DNA, 25 bp, Probe sequence
gaagtggtgctttatcatgtctgac

SEQ ID NO: 61634 - DNA, 25 bp, Probe sequence
catgtctgacccactccctataatg

SEQ ID NO: 61635 - DNA, 25 bp, Probe sequence
tcatgtctgacccactccctataat

SEQ ID NO: 61636 - DNA, 25 bp, Probe sequence
atcatgtctgacccactccctataa

SEQ ID NO: 61637 - DNA, 25 bp, Probe sequence
ttatcatgtctgacccactccctat

SEQ ID NO: 61638 - DNA, 25 bp, Probe sequence
aaacattatagggagtgggtcagac

SEQ ID NO: 61639 - DNA, 25 bp, Probe sequence
acattatagggagtgggtcagacat

SEQ ID NO: 61640 - DNA, 25 bp, Probe sequence
tatagggagtgggtcagacatgata

SEQ ID NO: 61641 - DNA, 25 bp, Probe sequence
aacattatagggagtgggtcagaca

SEQ ID NO: 61642 - DNA, 25 bp, Probe sequence
gtcagacatgataaagcaccacttc

SEQ ID NO: 61643 - DNA, 25 bp, Probe sequence
cattatagggagtgggtcagacatg

SEQ ID NO: 61644 - DNA, 25 bp, Probe sequence
atagggagtgggtcagacatgataa

SEQ ID NO: 61645 - DNA, 25 bp, Probe sequence
ttatagggagtgggtcagacatgat

SEQ ID NO: 61646 - DNA, 25 bp, Probe sequence
attatagggagtgggtcagacatga

SEQ ID NO: 61647 - DNA, 25 bp, Probe sequence
ctcagtacatcctttctcatgtctt

SEQ ID NO: 61648 - DNA, 25 bp, Probe sequence
ttctcagtacatcctttctcatgtc

SEQ ID NO: 61649 - DNA, 25 bp, Probe sequence
tcagtacatcctttctcatgtcttt

SEQ ID NO: 61650 - DNA, 25 bp, Probe sequence
tctcagtacatcctttctcatgtct

SEQ ID NO: 61651 - DNA, 25 bp, Probe sequence
cagtacatcctttctcatgtcttta

SEQ ID NO: 61652 - DNA, 25 bp, Probe sequence
catttgcgaaaattgaaaagaaagt

SEQ ID NO: 61653 - DNA, 25 bp, Probe sequence
tcatttgcgaaaattgaaaagaaag

SEQ ID NO: 61654 - DNA, 25 bp, Probe sequence
agtacatcctttctcatgtctttaa

SEQ ID NO: 61655 - DNA, 25 bp, Probe sequence
ttgcgaaaattgaaaagaaagtatt

SEQ ID NO: 61656 - DNA, 25 bp, Probe sequence
aagacatgagaaaggatgtactgag

SEQ ID NO: 61657 - DNA, 25 bp, Probe sequence
gacatgagaaaggatgtactgagaa

SEQ ID NO: 61658 - DNA, 25 bp, Probe sequence
aaagacatgagaaaggatgtactga

SEQ ID NO: 61659 - DNA, 25 bp, Probe sequence
agacatgagaaaggatgtactgaga

SEQ ID NO: 61660 - DNA, 25 bp, Probe sequence
taaagacatgagaaaggatgtactg

SEQ ID NO: 61661 - DNA, 25 bp, Probe sequence
actttcttttcaattttcgcaaatg

SEQ ID NO: 61662 - DNA, 25 bp, Probe sequence
ctttcttttcaattttcgcaaatga

SEQ ID NO: 61663 - DNA, 25 bp, Probe sequence
ttaaagacatgagaaaggatgtact

SEQ ID NO: 61664 - DNA, 25 bp, Probe sequence
aatactttcttttcaattttcgcaa

SEQ ID NO: 61665 - DNA, 25 bp, Probe sequence
gtataatgaatctgttaaggagtgc

SEQ ID NO: 61666 - DNA, 25 bp, Probe sequence
aatgaatctgttaaggagtgcaatc

SEQ ID NO: 61667 - DNA, 25 bp, Probe sequence
taatgaatctgttaaggagtgcaat

SEQ ID NO: 61668 - DNA, 25 bp, Probe sequence
ataatgaatctgttaaggagtgcaa

SEQ ID NO: 61669 - DNA, 25 bp, Probe sequence
tataatgaatctgttaaggagtgca

SEQ ID NO: 61670 - DNA, 25 bp, Probe sequence
tgtataatgaatctgttaaggagtg

SEQ ID NO: 61671 - DNA, 25 bp, Probe sequence
aatcacgataaagtctggaatacta

SEQ ID NO: 61672 - DNA, 25 bp, Probe sequence
taatcacgataaagtctggaatact

SEQ ID NO: 61673 - DNA, 25 bp, Probe sequence
atcacgataaagtctggaatactat

SEQ ID NO: 61674 - DNA, 25 bp, Probe sequence
gcactccttaacagattcattatac

SEQ ID NO: 61675 - DNA, 25 bp, Probe sequence
gattgcactccttaacagattcatt

SEQ ID NO: 61676 - DNA, 25 bp, Probe sequence
ttgcactccttaacagattcattat

SEQ ID NO: 61677 - DNA, 25 bp, Probe sequence
attgcactccttaacagattcatta

SEQ ID NO: 61678 - DNA, 25 bp, Probe sequence
tgcactccttaacagattcattata

SEQ ID NO: 61679 - DNA, 25 bp, Probe sequence
cactccttaacagattcattataca

SEQ ID NO: 61680 - DNA, 25 bp, Probe sequence
agtattccagactttatcgtgatta

SEQ ID NO: 61681 - DNA, 25 bp, Probe sequence
tagtattccagactttatcgtgatt

SEQ ID NO: 61682 - DNA, 25 bp, Probe sequence
gtattccagactttatcgtgattaa

SEQ ID NO: 61683 - DNA, 25 bp, Probe sequence
gtcaacttactatgtgtataatggt

SEQ ID NO: 61684 - DNA, 25 bp, Probe sequence
tgtcaacttactatgtgtataatgg

SEQ ID NO: 61685 - DNA, 25 bp, Probe sequence
aaatgtcacgcagatgctatttaaa

SEQ ID NO: 61686 - DNA, 25 bp, Probe sequence
atgtcacgcagatgctatttaaatg

SEQ ID NO: 61687 - DNA, 25 bp, Probe sequence
aatgtcacgcagatgctatttaaat

SEQ ID NO: 61688 - DNA, 25 bp, Probe sequence
aaaatgtcacgcagatgctatttaa

SEQ ID NO: 61689 - DNA, 25 bp, Probe sequence
acgcagatgctatttaaatgtgata

SEQ ID NO: 61690 - DNA, 25 bp, Probe sequence
tcaacttactatgtgtataatggta

SEQ ID NO: 61691 - DNA, 25 bp, Probe sequence
tgtcacgcagatgctatttaaatgt

SEQ ID NO: 61692 - DNA, 25 bp, Probe sequence
ccattatacacatagtaagttgaca

SEQ ID NO: 61693 - DNA, 25 bp, Probe sequence
accattatacacatagtaagttgac

SEQ ID NO: 61694 - DNA, 25 bp, Probe sequence
tttaaatagcatctgcgtgacattt

SEQ ID NO: 61695 - DNA, 25 bp, Probe sequence
atttaaatagcatctgcgtgacatt

SEQ ID NO: 61696 - DNA, 25 bp, Probe sequence
catttaaatagcatctgcgtgacat

SEQ ID NO: 61697 - DNA, 25 bp, Probe sequence
ttaaatagcatctgcgtgacatttt

SEQ ID NO: 61698 - DNA, 25 bp, Probe sequence
tatcacatttaaatagcatctgcgt

SEQ ID NO: 61699 - DNA, 25 bp, Probe sequence
taccattatacacatagtaagttga

SEQ ID NO: 61700 - DNA, 25 bp, Probe sequence
acatttaaatagcatctgcgtgaca

SEQ ID NO: 61701 - DNA, 25 bp, Probe sequence
ttggctataatgatgttctgacctt

SEQ ID NO: 61702 - DNA, 25 bp, Probe sequence
tggctataatgatgttctgaccttt

SEQ ID NO: 61703 - DNA, 25 bp, Probe sequence
tttggctataatgatgttctgacct

SEQ ID NO: 61704 - DNA, 25 bp, Probe sequence
gtttggctataatgatgttctgacc

SEQ ID NO: 61705 - DNA, 25 bp, Probe sequence
agtttggctataatgatgttctgac

SEQ ID NO: 61706 - DNA, 25 bp, Probe sequence
gtgtgaatcagagtagtttggctat

SEQ ID NO: 61707 - DNA, 25 bp, Probe sequence
atgtcacctttagaagcagttaagt

SEQ ID NO: 61708 - DNA, 25 bp, Probe sequence
tgtcacctttagaagcagttaagtt

SEQ ID NO: 61709 - DNA, 25 bp, Probe sequence
tgtgaatcagagtagtttggctata

SEQ ID NO: 61710 - DNA, 25 bp, Probe sequence
aaggtcagaacatcattatagccaa

SEQ ID NO: 61711 - DNA, 25 bp, Probe sequence
ggtcagaacatcattatagccaaac

SEQ ID NO: 61712 - DNA, 25 bp, Probe sequence
aggtcagaacatcattatagccaaa

SEQ ID NO: 61713 - DNA, 25 bp, Probe sequence
aaaggtcagaacatcattatagcca

SEQ ID NO: 61714 - DNA, 25 bp, Probe sequence
atagccaaactactctgattcacac

SEQ ID NO: 61715 - DNA, 25 bp, Probe sequence
gtcagaacatcattatagccaaact

SEQ ID NO: 61716 - DNA, 25 bp, Probe sequence
acttaactgcttctaaaggtgacat

SEQ ID NO: 61717 - DNA, 25 bp, Probe sequence
tatagccaaactactctgattcaca

SEQ ID NO: 61718 - DNA, 25 bp, Probe sequence
aacttaactgcttctaaaggtgaca

SEQ ID NO: 61719 - DNA, 25 bp, Probe sequence
agaaggactaaattgatgatgctgt

SEQ ID NO: 61720 - DNA, 25 bp, Probe sequence
aagaaggactaaattgatgatgctg

SEQ ID NO: 61721 - DNA, 25 bp, Probe sequence
aaagaaggactaaattgatgatgct

SEQ ID NO: 61722 - DNA, 25 bp, Probe sequence
gaaggactaaattgatgatgctgtc

SEQ ID NO: 61723 - DNA, 25 bp, Probe sequence
aaggactaaattgatgatgctgtca

SEQ ID NO: 61724 - DNA, 25 bp, Probe sequence
taaagaaggactaaattgatgatgc

SEQ ID NO: 61725 - DNA, 25 bp, Probe sequence
tgatgctgtcatgatggttaataac

SEQ ID NO: 61726 - DNA, 25 bp, Probe sequence
ctatcattgcactgaatgttagcgt

SEQ ID NO: 61727 - DNA, 25 bp, Probe sequence
acgctatcattgcactgaatgttag

SEQ ID NO: 61728 - DNA, 25 bp, Probe sequence
acagcatcatcaatttagtccttct

SEQ ID NO: 61729 - DNA, 25 bp, Probe sequence
cagcatcatcaatttagtccttctt

SEQ ID NO: 61730 - DNA, 25 bp, Probe sequence
agcatcatcaatttagtccttcttt

SEQ ID NO: 61731 - DNA, 25 bp, Probe sequence
gacagcatcatcaatttagtccttc

SEQ ID NO: 61732 - DNA, 25 bp, Probe sequence
tgacagcatcatcaatttagtcctt

SEQ ID NO: 61733 - DNA, 25 bp, Probe sequence
gcatcatcaatttagtccttcttta

SEQ ID NO: 61734 - DNA, 25 bp, Probe sequence
gttattaaccatcatgacagcatca

SEQ ID NO: 61735 - DNA, 25 bp, Probe sequence
ctaacattcagtgcaatgatagcgt

SEQ ID NO: 61736 - DNA, 25 bp, Probe sequence
acgctaacattcagtgcaatgatag

SEQ ID NO: 61737 - DNA, 25 bp, Probe sequence
tcaattcacctccaatgatatgtgt

SEQ ID NO: 61738 - DNA, 25 bp, Probe sequence
caattcacctccaatgatatgtgtt

SEQ ID NO: 61739 - DNA, 25 bp, Probe sequence
tgttagtatgatgaacttgtatggt

SEQ ID NO: 61740 - DNA, 25 bp, Probe sequence
gtgttagtatgatgaacttgtatgg

SEQ ID NO: 61741 - DNA, 25 bp, Probe sequence
ttcacctccaatgatatgtgttatt

SEQ ID NO: 61742 - DNA, 25 bp, Probe sequence
aattcacctccaatgatatgtgtta

SEQ ID NO: 61743 - DNA, 25 bp, Probe sequence
attcacctccaatgatatgtgttat

SEQ ID NO: 61744 - DNA, 25 bp, Probe sequence
actttcaatagtgagactttgtgtt

SEQ ID NO: 61745 - DNA, 25 bp, Probe sequence
aactttcaatagtgagactttgtgt

SEQ ID NO: 61746 - DNA, 25 bp, Probe sequence
acacatatcattggaggtgaattga

SEQ ID NO: 61747 - DNA, 25 bp, Probe sequence
aacacatatcattggaggtgaattg

SEQ ID NO: 61748 - DNA, 25 bp, Probe sequence
accatacaagttcatcatactaaca

SEQ ID NO: 61749 - DNA, 25 bp, Probe sequence
ccatacaagttcatcatactaacac

SEQ ID NO: 61750 - DNA, 25 bp, Probe sequence
taacacatatcattggaggtgaatt

SEQ ID NO: 61751 - DNA, 25 bp, Probe sequence
aataacacatatcattggaggtgaa

SEQ ID NO: 61752 - DNA, 25 bp, Probe sequence
ataacacatatcattggaggtgaat

SEQ ID NO: 61753 - DNA, 25 bp, Probe sequence
acacaaagtctcactattgaaagtt

SEQ ID NO: 61754 - DNA, 25 bp, Probe sequence
aacacaaagtctcactattgaaagt

SEQ ID NO: 61755 - DNA, 25 bp, Probe sequence
atcgactcctttaattgaccactag

SEQ ID NO: 61756 - DNA, 25 bp, Probe sequence
aatcgactcctttaattgaccacta

SEQ ID NO: 61757 - DNA, 25 bp, Probe sequence
tctgaatcgactcctttaattgacc

SEQ ID NO: 61758 - DNA, 25 bp, Probe sequence
gaatcgactcctttaattgaccact

SEQ ID NO: 61759 - DNA, 25 bp, Probe sequence
ctgaatcgactcctttaattgacca

SEQ ID NO: 61760 - DNA, 25 bp, Probe sequence
tgaatcgactcctttaattgaccac

SEQ ID NO: 61761 - DNA, 25 bp, Probe sequence
tgttgccttaaatgatatgatgaaa

SEQ ID NO: 61762 - DNA, 25 bp, Probe sequence
atgttgccttaaatgatatgatgaa

SEQ ID NO: 61763 - DNA, 25 bp, Probe sequence
aatgttgccttaaatgatatgatga

SEQ ID NO: 61764 - DNA, 25 bp, Probe sequence
ctagtggtcaattaaaggagtcgat

SEQ ID NO: 61765 - DNA, 25 bp, Probe sequence
tagtggtcaattaaaggagtcgatt

SEQ ID NO: 61766 - DNA, 25 bp, Probe sequence
ggtcaattaaaggagtcgattcaga

SEQ ID NO: 61767 - DNA, 25 bp, Probe sequence
tggtcaattaaaggagtcgattcag

SEQ ID NO: 61768 - DNA, 25 bp, Probe sequence
agtggtcaattaaaggagtcgattc

SEQ ID NO: 61769 - DNA, 25 bp, Probe sequence
gtggtcaattaaaggagtcgattca

SEQ ID NO: 61770 - DNA, 25 bp, Probe sequence
tttcatcatatcatttaaggcaaca

SEQ ID NO: 61771 - DNA, 25 bp, Probe sequence
tcatcatatcatttaaggcaacatt

SEQ ID NO: 61772 - DNA, 25 bp, Probe sequence
ttcatcatatcatttaaggcaacat

SEQ ID NO: 61773 - DNA, 25 bp, Probe sequence
taacaatacgcaattagagttagcc

SEQ ID NO: 61774 - DNA, 25 bp, Probe sequence
gtaacaatacgcaattagagttagc

SEQ ID NO: 61775 - DNA, 25 bp, Probe sequence
gcaaagtaacaatacgcaattagag

SEQ ID NO: 61776 - DNA, 25 bp, Probe sequence
aacaatacgcaattagagttagccc

SEQ ID NO: 61777 - DNA, 25 bp, Probe sequence
acaatacgcaattagagttagccct

SEQ ID NO: 61778 - DNA, 25 bp, Probe sequence
caaagtaacaatacgcaattagagt

SEQ ID NO: 61779 - DNA, 25 bp, Probe sequence
caatacgcaattagagttagccctc

SEQ ID NO: 61780 - DNA, 25 bp, Probe sequence
agtaacaatacgcaattagagttag

SEQ ID NO: 61781 - DNA, 25 bp, Probe sequence
aatacgcaattagagttagccctcc

SEQ ID NO: 61782 - DNA, 25 bp, Probe sequence
ggctaactctaattgcgtattgtta

SEQ ID NO: 61783 - DNA, 25 bp, Probe sequence
gctaactctaattgcgtattgttac

SEQ ID NO: 61784 - DNA, 25 bp, Probe sequence
ctctaattgcgtattgttactttgc

SEQ ID NO: 61785 - DNA, 25 bp, Probe sequence
gggctaactctaattgcgtattgtt

SEQ ID NO: 61786 - DNA, 25 bp, Probe sequence
agggctaactctaattgcgtattgt

SEQ ID NO: 61787 - DNA, 25 bp, Probe sequence
actctaattgcgtattgttactttg

SEQ ID NO: 61788 - DNA, 25 bp, Probe sequence
gagggctaactctaattgcgtattg

SEQ ID NO: 61789 - DNA, 25 bp, Probe sequence
ctaactctaattgcgtattgttact

SEQ ID NO: 61790 - DNA, 25 bp, Probe sequence
ggagggctaactctaattgcgtatt

SEQ ID NO: 61791 - DNA, 25 bp, Probe sequence
tgactataaatcgtttgattgccat

SEQ ID NO: 61792 - DNA, 25 bp, Probe sequence
atgactataaatcgtttgattgcca

SEQ ID NO: 61793 - DNA, 25 bp, Probe sequence
gactataaatcgtttgattgccatt

SEQ ID NO: 61794 - DNA, 25 bp, Probe sequence
catgactataaatcgtttgattgcc

SEQ ID NO: 61795 - DNA, 25 bp, Probe sequence
actataaatcgtttgattgccattt

SEQ ID NO: 61796 - DNA, 25 bp, Probe sequence
acatgactataaatcgtttgattgc

SEQ ID NO: 61797 - DNA, 25 bp, Probe sequence
aatgacatgactataaatcgtttga

SEQ ID NO: 61798 - DNA, 25 bp, Probe sequence
gctatgagtatattttaggaggacg

SEQ ID NO: 61799 - DNA, 25 bp, Probe sequence
atgacatgactataaatcgtttgat

SEQ ID NO: 61800 - DNA, 25 bp, Probe sequence
tggcaatcaaacgatttatagtcat

SEQ ID NO: 61801 - DNA, 25 bp, Probe sequence
atggcaatcaaacgatttatagtca

SEQ ID NO: 61802 - DNA, 25 bp, Probe sequence
aatggcaatcaaacgatttatagtc

SEQ ID NO: 61803 - DNA, 25 bp, Probe sequence
ggcaatcaaacgatttatagtcatg

SEQ ID NO: 61804 - DNA, 25 bp, Probe sequence
aaatggcaatcaaacgatttatagt

SEQ ID NO: 61805 - DNA, 25 bp, Probe sequence
gcaatcaaacgatttatagtcatgt

SEQ ID NO: 61806 - DNA, 25 bp, Probe sequence
tcaaacgatttatagtcatgtcatt

SEQ ID NO: 61807 - DNA, 25 bp, Probe sequence
cgtcctcctaaaatatactcatagc

SEQ ID NO: 61808 - DNA, 25 bp, Probe sequence
atcaaacgatttatagtcatgtcat

SEQ ID NO: 61809 - DNA, 25 bp, Probe sequence
aattcatcctcatacttcacttact

SEQ ID NO: 61810 - DNA, 25 bp, Probe sequence
ttcatcctcatacttcacttactaa

SEQ ID NO: 61811 - DNA, 25 bp, Probe sequence
tcatcctcatacttcacttactaat

SEQ ID NO: 61812 - DNA, 25 bp, Probe sequence
attcatcctcatacttcacttacta

SEQ ID NO: 61813 - DNA, 25 bp, Probe sequence
catcctcatacttcacttactaatg

SEQ ID NO: 61814 - DNA, 25 bp, Probe sequence
aagcattaaacattacgggaaatta

SEQ ID NO: 61815 - DNA, 25 bp, Probe sequence
taagcattaaacattacgggaaatt

SEQ ID NO: 61816 - DNA, 25 bp, Probe sequence
taattcatcctcatacttcacttac

SEQ ID NO: 61817 - DNA, 25 bp, Probe sequence
ttaagcattaaacattacgggaaat

SEQ ID NO: 61818 - DNA, 25 bp, Probe sequence
agtaagtgaagtatgaggatgaatt

SEQ ID NO: 61819 - DNA, 25 bp, Probe sequence
ttagtaagtgaagtatgaggatgaa

SEQ ID NO: 61820 - DNA, 25 bp, Probe sequence
tagtaagtgaagtatgaggatgaat

SEQ ID NO: 61821 - DNA, 25 bp, Probe sequence
attagtaagtgaagtatgaggatga

SEQ ID NO: 61822 - DNA, 25 bp, Probe sequence
cattagtaagtgaagtatgaggatg

SEQ ID NO: 61823 - DNA, 25 bp, Probe sequence
aatttcccgtaatgtttaatgctta

SEQ ID NO: 61824 - DNA, 25 bp, Probe sequence
taatttcccgtaatgtttaatgctt

SEQ ID NO: 61825 - DNA, 25 bp, Probe sequence
gtaagtgaagtatgaggatgaatta

SEQ ID NO: 61826 - DNA, 25 bp, Probe sequence
atttcccgtaatgtttaatgcttaa

SEQ ID NO: 61827 - DNA, 25 bp, Probe sequence
ccaataaagaggtttaaggagagat

SEQ ID NO: 61828 - DNA, 25 bp, Probe sequence
accaataaagaggtttaaggagaga

SEQ ID NO: 61829 - DNA, 25 bp, Probe sequence
taccaataaagaggtttaaggagag

SEQ ID NO: 61830 - DNA, 25 bp, Probe sequence
agttaccaataaagaggtttaagga

SEQ ID NO: 61831 - DNA, 25 bp, Probe sequence
taaagaggtttaaggagagattact

SEQ ID NO: 61832 - DNA, 25 bp, Probe sequence
gttaccaataaagaggtttaaggag

SEQ ID NO: 61833 - DNA, 25 bp, Probe sequence
gagttaccaataaagaggtttaagg

SEQ ID NO: 61834 - DNA, 25 bp, Probe sequence
caataaagaggtttaaggagagatt

SEQ ID NO: 61835 - DNA, 25 bp, Probe sequence
ttaccaataaagaggtttaaggaga

SEQ ID NO: 61836 - DNA, 25 bp, Probe sequence
atctctccttaaacctctttattgg

SEQ ID NO: 61837 - DNA, 25 bp, Probe sequence
tctctccttaaacctctttattggt

SEQ ID NO: 61838 - DNA, 25 bp, Probe sequence
ctctccttaaacctctttattggta

SEQ ID NO: 61839 - DNA, 25 bp, Probe sequence
tccttaaacctctttattggtaact

SEQ ID NO: 61840 - DNA, 25 bp, Probe sequence
agtaatctctccttaaacctcttta

SEQ ID NO: 61841 - DNA, 25 bp, Probe sequence
ccttaaacctctttattggtaactc

SEQ ID NO: 61842 - DNA, 25 bp, Probe sequence
ctccttaaacctctttattggtaac

SEQ ID NO: 61843 - DNA, 25 bp, Probe sequence
aatctctccttaaacctctttattg

SEQ ID NO: 61844 - DNA, 25 bp, Probe sequence
tctccttaaacctctttattggtaa

SEQ ID NO: 61845 - DNA, 25 bp, Probe sequence
gtcagtctattgtatagtccgagtc

SEQ ID NO: 61846 - DNA, 25 bp, Probe sequence
tgtcagtctattgtatagtccgagt

SEQ ID NO: 61847 - DNA, 25 bp, Probe sequence
atgtcagtctattgtatagtccgag

SEQ ID NO: 61848 - DNA, 25 bp, Probe sequence
tgactatgctaatgttaatggatgt

SEQ ID NO: 61849 - DNA, 25 bp, Probe sequence
aggaagtataattgcgtattgagaa

SEQ ID NO: 61850 - DNA, 25 bp, Probe sequence
acaacagaatgtgaatgaagtatgt

SEQ ID NO: 61851 - DNA, 25 bp, Probe sequence
ttgacaacagaatgtgaatgaagta

SEQ ID NO: 61852 - DNA, 25 bp, Probe sequence
gtgactatgctaatgttaatggatg

SEQ ID NO: 61853 - DNA, 25 bp, Probe sequence
aacagaatgtgaatgaagtatgtca

SEQ ID NO: 61854 - DNA, 25 bp, Probe sequence
gactcggactatacaatagactgac

SEQ ID NO: 61855 - DNA, 25 bp, Probe sequence
actcggactatacaatagactgaca

SEQ ID NO: 61856 - DNA, 25 bp, Probe sequence
acatccattaacattagcatagtca

SEQ ID NO: 61857 - DNA, 25 bp, Probe sequence
ctcggactatacaatagactgacat

SEQ ID NO: 61858 - DNA, 25 bp, Probe sequence
ttctcaatacgcaattatacttcct

SEQ ID NO: 61859 - DNA, 25 bp, Probe sequence
tacttcattcacattctgttgtcaa

SEQ ID NO: 61860 - DNA, 25 bp, Probe sequence
acatacttcattcacattctgttgt

SEQ ID NO: 61861 - DNA, 25 bp, Probe sequence
catccattaacattagcatagtcac

SEQ ID NO: 61862 - DNA, 25 bp, Probe sequence
atacttcattcacattctgttgtca

SEQ ID NO: 61863 - DNA, 25 bp, Probe sequence
cgaaggctatggaattatcagaaat

SEQ ID NO: 61864 - DNA, 25 bp, Probe sequence
gcgaaggctatggaattatcagaaa

SEQ ID NO: 61865 - DNA, 25 bp, Probe sequence
ataggagcgaaggctatggaattat

SEQ ID NO: 61866 - DNA, 25 bp, Probe sequence
aataggagcgaaggctatggaatta

SEQ ID NO: 61867 - DNA, 25 bp, Probe sequence
aggctatggaattatcagaaatcaa

SEQ ID NO: 61868 - DNA, 25 bp, Probe sequence
aaggctatggaattatcagaaatca

SEQ ID NO: 61869 - DNA, 25 bp, Probe sequence
aactaattgtcagtgtgcttatatt

SEQ ID NO: 61870 - DNA, 25 bp, Probe sequence
aaagcataaactaattgtcagtgtg

SEQ ID NO: 61871 - DNA, 25 bp, Probe sequence
taggagcgaaggctatggaattatc

SEQ ID NO: 61872 - DNA, 25 bp, Probe sequence
atttctgataattccatagccttcg

SEQ ID NO: 61873 - DNA, 25 bp, Probe sequence
tttctgataattccatagccttcgc

SEQ ID NO: 61874 - DNA, 25 bp, Probe sequence
ataattccatagccttcgctcctat

SEQ ID NO: 61875 - DNA, 25 bp, Probe sequence
taattccatagccttcgctcctatt

SEQ ID NO: 61876 - DNA, 25 bp, Probe sequence
tgatttctgataattccatagcctt

SEQ ID NO: 61877 - DNA, 25 bp, Probe sequence
ttgatttctgataattccatagcct

SEQ ID NO: 61878 - DNA, 25 bp, Probe sequence
aatataagcacactgacaattagtt

SEQ ID NO: 61879 - DNA, 25 bp, Probe sequence
cacactgacaattagtttatgcttt

SEQ ID NO: 61880 - DNA, 25 bp, Probe sequence
gataattccatagccttcgctccta

SEQ ID NO: 61881 - DNA, 25 bp, Probe sequence
gtacaattcggtagatagagttaga

SEQ ID NO: 61882 - DNA, 25 bp, Probe sequence
agtacaattcggtagatagagttag

SEQ ID NO: 61883 - DNA, 25 bp, Probe sequence
aagtacaattcggtagatagagtta

SEQ ID NO: 61884 - DNA, 25 bp, Probe sequence
taagtacaattcggtagatagagtt

SEQ ID NO: 61885 - DNA, 25 bp, Probe sequence
ttaagtacaattcggtagatagagt

SEQ ID NO: 61886 - DNA, 25 bp, Probe sequence
tacaattcggtagatagagttagaa

SEQ ID NO: 61887 - DNA, 25 bp, Probe sequence
acaattcggtagatagagttagaat

SEQ ID NO: 61888 - DNA, 25 bp, Probe sequence
caattcggtagatagagttagaata

SEQ ID NO: 61889 - DNA, 25 bp, Probe sequence
tttaagtacaattcggtagatagag

SEQ ID NO: 61890 - DNA, 25 bp, Probe sequence
tctaactctatctaccgaattgtac

SEQ ID NO: 61891 - DNA, 25 bp, Probe sequence
ctaactctatctaccgaattgtact

SEQ ID NO: 61892 - DNA, 25 bp, Probe sequence
actctatctaccgaattgtacttaa

SEQ ID NO: 61893 - DNA, 25 bp, Probe sequence
aactctatctaccgaattgtactta

SEQ ID NO: 61894 - DNA, 25 bp, Probe sequence
taactctatctaccgaattgtactt

SEQ ID NO: 61895 - DNA, 25 bp, Probe sequence
ttctaactctatctaccgaattgta

SEQ ID NO: 61896 - DNA, 25 bp, Probe sequence
attctaactctatctaccgaattgt

SEQ ID NO: 61897 - DNA, 25 bp, Probe sequence
tattctaactctatctaccgaattg

SEQ ID NO: 61898 - DNA, 25 bp, Probe sequence
ctctatctaccgaattgtacttaaa

SEQ ID NO: 61899 - DNA, 25 bp, Probe sequence
aatactaacagcaaaggaatgacag

SEQ ID NO: 61900 - DNA, 25 bp, Probe sequence
aaatactaacagcaaaggaatgaca

SEQ ID NO: 61901 - DNA, 25 bp, Probe sequence
atactaacagcaaaggaatgacagc

SEQ ID NO: 61902 - DNA, 25 bp, Probe sequence
tactaacagcaaaggaatgacagca

SEQ ID NO: 61903 - DNA, 25 bp, Probe sequence
ctaacagcaaaggaatgacagcaag

SEQ ID NO: 61904 - DNA, 25 bp, Probe sequence
actaacagcaaaggaatgacagcaa

SEQ ID NO: 61905 - DNA, 25 bp, Probe sequence
aaaatactaacagcaaaggaatgac

SEQ ID NO: 61906 - DNA, 25 bp, Probe sequence
ttgttaaccatttgattacatcgtt

SEQ ID NO: 61907 - DNA, 25 bp, Probe sequence
attgttaaccatttgattacatcgt

SEQ ID NO: 61908 - DNA, 25 bp, Probe sequence
ctgtcattcctttgctgttagtatt

SEQ ID NO: 61909 - DNA, 25 bp, Probe sequence
tgtcattcctttgctgttagtattt

SEQ ID NO: 61910 - DNA, 25 bp, Probe sequence
gctgtcattcctttgctgttagtat

SEQ ID NO: 61911 - DNA, 25 bp, Probe sequence
tgctgtcattcctttgctgttagta

SEQ ID NO: 61912 - DNA, 25 bp, Probe sequence
cttgctgtcattcctttgctgttag

SEQ ID NO: 61913 - DNA, 25 bp, Probe sequence
ttgctgtcattcctttgctgttagt

SEQ ID NO: 61914 - DNA, 25 bp, Probe sequence
gtcattcctttgctgttagtatttt

SEQ ID NO: 61915 - DNA, 25 bp, Probe sequence
aacgatgtaatcaaatggttaacaa

SEQ ID NO: 61916 - DNA, 25 bp, Probe sequence
acgatgtaatcaaatggttaacaat

SEQ ID NO: 61917 - DNA, 25 bp, Probe sequence
atcaagacaagactatcctcttagc

SEQ ID NO: 61918 - DNA, 25 bp, Probe sequence
gtttaagtaacaggttgagaggatt

SEQ ID NO: 61919 - DNA, 25 bp, Probe sequence
aagacaagactatcctcttagcctg

SEQ ID NO: 61920 - DNA, 25 bp, Probe sequence
caagacaagactatcctcttagcct

SEQ ID NO: 61921 - DNA, 25 bp, Probe sequence
tcaagacaagactatcctcttagcc

SEQ ID NO: 61922 - DNA, 25 bp, Probe sequence
tttaagtaacaggttgagaggattt

SEQ ID NO: 61923 - DNA, 25 bp, Probe sequence
gactatcctcttagcctgtttaagt

SEQ ID NO: 61924 - DNA, 25 bp, Probe sequence
gacaagactatcctcttagcctgtt

SEQ ID NO: 61925 - DNA, 25 bp, Probe sequence
agactatcctcttagcctgtttaag

SEQ ID NO: 61926 - DNA, 25 bp, Probe sequence
gctaagaggatagtcttgtcttgat

SEQ ID NO: 61927 - DNA, 25 bp, Probe sequence
aatcctctcaacctgttacttaaac

SEQ ID NO: 61928 - DNA, 25 bp, Probe sequence
ggctaagaggatagtcttgtcttga

SEQ ID NO: 61929 - DNA, 25 bp, Probe sequence
aggctaagaggatagtcttgtcttg

SEQ ID NO: 61930 - DNA, 25 bp, Probe sequence
caggctaagaggatagtcttgtctt

SEQ ID NO: 61931 - DNA, 25 bp, Probe sequence
acttaaacaggctaagaggatagtc

SEQ ID NO: 61932 - DNA, 25 bp, Probe sequence
aaatcctctcaacctgttacttaaa

SEQ ID NO: 61933 - DNA, 25 bp, Probe sequence
aacaggctaagaggatagtcttgtc

SEQ ID NO: 61934 - DNA, 25 bp, Probe sequence
cttaaacaggctaagaggatagtct

SEQ ID NO: 61935 - DNA, 25 bp, Probe sequence
ttaaggcaagcatagttagcacaac

SEQ ID NO: 61936 - DNA, 25 bp, Probe sequence
gatttaaggcaagcatagttagcac

SEQ ID NO: 61937 - DNA, 25 bp, Probe sequence
tgatttaaggcaagcatagttagca

SEQ ID NO: 61938 - DNA, 25 bp, Probe sequence
atttaaggcaagcatagttagcaca

SEQ ID NO: 61939 - DNA, 25 bp, Probe sequence
ttgatttaaggcaagcatagttagc

SEQ ID NO: 61940 - DNA, 25 bp, Probe sequence
cgatttgatttaaggcaagcatagt

SEQ ID NO: 61941 - DNA, 25 bp, Probe sequence
acgatttgatttaaggcaagcatag

SEQ ID NO: 61942 - DNA, 25 bp, Probe sequence
aacgatttgatttaaggcaagcata

SEQ ID NO: 61943 - DNA, 25 bp, Probe sequence
taaacgatttgatttaaggcaagca

SEQ ID NO: 61944 - DNA, 25 bp, Probe sequence
gttgtgctaactatgcttgccttaa

SEQ ID NO: 61945 - DNA, 25 bp, Probe sequence
gtgctaactatgcttgccttaaatc

SEQ ID NO: 61946 - DNA, 25 bp, Probe sequence
tgctaactatgcttgccttaaatca

SEQ ID NO: 61947 - DNA, 25 bp, Probe sequence
tgtgctaactatgcttgccttaaat

SEQ ID NO: 61948 - DNA, 25 bp, Probe sequence
tgcttgccttaaatcaaatcgttta

SEQ ID NO: 61949 - DNA, 25 bp, Probe sequence
tatgcttgccttaaatcaaatcgtt

SEQ ID NO: 61950 - DNA, 25 bp, Probe sequence
ctatgcttgccttaaatcaaatcgt

SEQ ID NO: 61951 - DNA, 25 bp, Probe sequence
actatgcttgccttaaatcaaatcg

SEQ ID NO: 61952 - DNA, 25 bp, Probe sequence
gctaactatgcttgccttaaatcaa

SEQ ID NO: 61953 - DNA, 25 bp, Probe sequence
gagagtgggacagaaatgataaaga

SEQ ID NO: 61954 - DNA, 25 bp, Probe sequence
tgagagtgggacagaaatgataaag

SEQ ID NO: 61955 - DNA, 25 bp, Probe sequence
agagtgggacagaaatgataaagaa

SEQ ID NO: 61956 - DNA, 25 bp, Probe sequence
aaagaagtgaagggtgttgtaaatt

SEQ ID NO: 61957 - DNA, 25 bp, Probe sequence
gagtgggacagaaatgataaagaat

SEQ ID NO: 61958 - DNA, 25 bp, Probe sequence
agtgggacagaaatgataaagaatc

SEQ ID NO: 61959 - DNA, 25 bp, Probe sequence
atgtagtggttctttgtcattagcc

SEQ ID NO: 61960 - DNA, 25 bp, Probe sequence
tatgtagtggttctttgtcattagc

SEQ ID NO: 61961 - DNA, 25 bp, Probe sequence
ctgagagtgggacagaaatgataaa

SEQ ID NO: 61962 - DNA, 25 bp, Probe sequence
tctttatcatttctgtcccactctc

SEQ ID NO: 61963 - DNA, 25 bp, Probe sequence
ctttatcatttctgtcccactctca

SEQ ID NO: 61964 - DNA, 25 bp, Probe sequence
ttctttatcatttctgtcccactct

SEQ ID NO: 61965 - DNA, 25 bp, Probe sequence
aatttacaacacccttcacttcttt

SEQ ID NO: 61966 - DNA, 25 bp, Probe sequence
attctttatcatttctgtcccactc

SEQ ID NO: 61967 - DNA, 25 bp, Probe sequence
gattctttatcatttctgtcccact

SEQ ID NO: 61968 - DNA, 25 bp, Probe sequence
ggctaatgacaaagaaccactacat

SEQ ID NO: 61969 - DNA, 25 bp, Probe sequence
gctaatgacaaagaaccactacata

SEQ ID NO: 61970 - DNA, 25 bp, Probe sequence
tttatcatttctgtcccactctcag

SEQ ID NO: 61971 - DNA, 25 bp, Probe sequence
cattgtagagcttaggtcattgatt

SEQ ID NO: 61972 - DNA, 25 bp, Probe sequence
tcattgtagagcttaggtcattgat

SEQ ID NO: 61973 - DNA, 25 bp, Probe sequence
atcattgtagagcttaggtcattga

SEQ ID NO: 61974 - DNA, 25 bp, Probe sequence
tatcattgtagagcttaggtcattg

SEQ ID NO: 61975 - DNA, 25 bp, Probe sequence
tgataagaagagatgtaagagtagg

SEQ ID NO: 61976 - DNA, 25 bp, Probe sequence
tgaaccatgtaaattaagcaagcaa

SEQ ID NO: 61977 - DNA, 25 bp, Probe sequence
cttaggtcattgatttatggctcgg

SEQ ID NO: 61978 - DNA, 25 bp, Probe sequence
atgaaccatgtaaattaagcaagca

SEQ ID NO: 61979 - DNA, 25 bp, Probe sequence
ttaggtcattgatttatggctcgga

SEQ ID NO: 61980 - DNA, 25 bp, Probe sequence
aatcaatgacctaagctctacaatg

SEQ ID NO: 61981 - DNA, 25 bp, Probe sequence
tcaatgacctaagctctacaatgat

SEQ ID NO: 61982 - DNA, 25 bp, Probe sequence
atcaatgacctaagctctacaatga

SEQ ID NO: 61983 - DNA, 25 bp, Probe sequence
caatgacctaagctctacaatgata

SEQ ID NO: 61984 - DNA, 25 bp, Probe sequence
cctactcttacatctcttcttatca

SEQ ID NO: 61985 - DNA, 25 bp, Probe sequence
ccgagccataaatcaatgacctaag

SEQ ID NO: 61986 - DNA, 25 bp, Probe sequence
ttgcttgcttaatttacatggttca

SEQ ID NO: 61987 - DNA, 25 bp, Probe sequence
tgcttgcttaatttacatggttcat

SEQ ID NO: 61988 - DNA, 25 bp, Probe sequence
tccgagccataaatcaatgacctaa

SEQ ID NO: 61989 - DNA, 25 bp, Probe sequence
aatgattaataatgaggaggcgtta

SEQ ID NO: 61990 - DNA, 25 bp, Probe sequence
taatgattaataatgaggaggcgtt

SEQ ID NO: 61991 - DNA, 25 bp, Probe sequence
ataatgattaataatgaggaggcgt

SEQ ID NO: 61992 - DNA, 25 bp, Probe sequence
gcataatgattaataatgaggaggc

SEQ ID NO: 61993 - DNA, 25 bp, Probe sequence
atgattaataatgaggaggcgttaa

SEQ ID NO: 61994 - DNA, 25 bp, Probe sequence
cataatgattaataatgaggaggcg

SEQ ID NO: 61995 - DNA, 25 bp, Probe sequence
cgcataatgattaataatgaggagg

SEQ ID NO: 61996 - DNA, 25 bp, Probe sequence
tgattaataatgaggaggcgttaat

SEQ ID NO: 61997 - DNA, 25 bp, Probe sequence
gcgcataatgattaataatgaggag

SEQ ID NO: 61998 - DNA, 25 bp, Probe sequence
aacgcctcctcattattaatcatta

SEQ ID NO: 61999 - DNA, 25 bp, Probe sequence
taacgcctcctcattattaatcatt

SEQ ID NO: 62000 - DNA, 25 bp, Probe sequence
acgcctcctcattattaatcattat

SEQ ID NO: 62001 - DNA, 25 bp, Probe sequence
gcctcctcattattaatcattatgc

SEQ ID NO: 62002 - DNA, 25 bp, Probe sequence
ttaacgcctcctcattattaatcat

SEQ ID NO: 62003 - DNA, 25 bp, Probe sequence
cctcctcattattaatcattatgcg

SEQ ID NO: 62004 - DNA, 25 bp, Probe sequence
cgcctcctcattattaatcattatg

SEQ ID NO: 62005 - DNA, 25 bp, Probe sequence
attaacgcctcctcattattaatca

SEQ ID NO: 62006 - DNA, 25 bp, Probe sequence
ctcctcattattaatcattatgcgc

SEQ ID NO: 62007 - DNA, 25 bp, Probe sequence
cgaattaagatgttgagttgtaagt

SEQ ID NO: 62008 - DNA, 25 bp, Probe sequence
gaggtcgaattaagatgttgagttg

SEQ ID NO: 62009 - DNA, 25 bp, Probe sequence
aggtcgaattaagatgttgagttgt

SEQ ID NO: 62010 - DNA, 25 bp, Probe sequence
ggtcgaattaagatgttgagttgta

SEQ ID NO: 62011 - DNA, 25 bp, Probe sequence
cgaggtcgaattaagatgttgagtt

SEQ ID NO: 62012 - DNA, 25 bp, Probe sequence
tatgggagtgggacagaaatgataa

SEQ ID NO: 62013 - DNA, 25 bp, Probe sequence
ttatgggagtgggacagaaatgata

SEQ ID NO: 62014 - DNA, 25 bp, Probe sequence
tgtagtggttcttatacattagcca

SEQ ID NO: 62015 - DNA, 25 bp, Probe sequence
tataactttatgggagtgggacaga

SEQ ID NO: 62016 - DNA, 25 bp, Probe sequence
acttacaactcaacatcttaattcg

SEQ ID NO: 62017 - DNA, 25 bp, Probe sequence
caactcaacatcttaattcgacctc

SEQ ID NO: 62018 - DNA, 25 bp, Probe sequence
acaactcaacatcttaattcgacct

SEQ ID NO: 62019 - DNA, 25 bp, Probe sequence
tacaactcaacatcttaattcgacc

SEQ ID NO: 62020 - DNA, 25 bp, Probe sequence
aactcaacatcttaattcgacctcg

SEQ ID NO: 62021 - DNA, 25 bp, Probe sequence
tatcatttctgtcccactcccataa

SEQ ID NO: 62022 - DNA, 25 bp, Probe sequence
ttatcatttctgtcccactcccata

SEQ ID NO: 62023 - DNA, 25 bp, Probe sequence
tggctaatgtataagaaccactaca

SEQ ID NO: 62024 - DNA, 25 bp, Probe sequence
tctgtcccactcccataaagttata

SEQ ID NO: 62025 - DNA, 25 bp, Probe sequence
tcccaagctcctttaaatgatgtat

SEQ ID NO: 62026 - DNA, 25 bp, Probe sequence
gtcccaagctcctttaaatgatgta

SEQ ID NO: 62027 - DNA, 25 bp, Probe sequence
cccaagctcctttaaatgatgtata

SEQ ID NO: 62028 - DNA, 25 bp, Probe sequence
catcgttgcttaattttgtcataga

SEQ ID NO: 62029 - DNA, 25 bp, Probe sequence
tcgttgcttaattttgtcatagaac

SEQ ID NO: 62030 - DNA, 25 bp, Probe sequence
aaacatcgttgcttaattttgtcat

SEQ ID NO: 62031 - DNA, 25 bp, Probe sequence
cgttgcttaattttgtcatagaaca

SEQ ID NO: 62032 - DNA, 25 bp, Probe sequence
ccaagctcctttaaatgatgtatat

SEQ ID NO: 62033 - DNA, 25 bp, Probe sequence
acatcgttgcttaattttgtcatag

SEQ ID NO: 62034 - DNA, 25 bp, Probe sequence
atacatcatttaaaggagcttggga

SEQ ID NO: 62035 - DNA, 25 bp, Probe sequence
tacatcatttaaaggagcttgggac

SEQ ID NO: 62036 - DNA, 25 bp, Probe sequence
tatacatcatttaaaggagcttggg

SEQ ID NO: 62037 - DNA, 25 bp, Probe sequence
tctatgacaaaattaagcaacgatg

SEQ ID NO: 62038 - DNA, 25 bp, Probe sequence
gttctatgacaaaattaagcaacga

SEQ ID NO: 62039 - DNA, 25 bp, Probe sequence
atgacaaaattaagcaacgatgttt

SEQ ID NO: 62040 - DNA, 25 bp, Probe sequence
atatacatcatttaaaggagcttgg

SEQ ID NO: 62041 - DNA, 25 bp, Probe sequence
tgttctatgacaaaattaagcaacg

SEQ ID NO: 62042 - DNA, 25 bp, Probe sequence
ctatgacaaaattaagcaacgatgt

SEQ ID NO: 62043 - DNA, 25 bp, Probe sequence
agacagtggttctaaggtgaatcat

SEQ ID NO: 62044 - DNA, 25 bp, Probe sequence
cagtggttctaaggtgaatcatgtt

SEQ ID NO: 62045 - DNA, 25 bp, Probe sequence
atagacagtggttctaaggtgaatc

SEQ ID NO: 62046 - DNA, 25 bp, Probe sequence
gacagtggttctaaggtgaatcatg

SEQ ID NO: 62047 - DNA, 25 bp, Probe sequence
aatagacagtggttctaaggtgaat

SEQ ID NO: 62048 - DNA, 25 bp, Probe sequence
tagacagtggttctaaggtgaatca

SEQ ID NO: 62049 - DNA, 25 bp, Probe sequence
acagtggttctaaggtgaatcatgt

SEQ ID NO: 62050 - DNA, 25 bp, Probe sequence
agtggttctaaggtgaatcatgttt

SEQ ID NO: 62051 - DNA, 25 bp, Probe sequence
aaatagacagtggttctaaggtgaa

SEQ ID NO: 62052 - DNA, 25 bp, Probe sequence
atgattcaccttagaaccactgtct

SEQ ID NO: 62053 - DNA, 25 bp, Probe sequence
aacatgattcaccttagaaccactg

SEQ ID NO: 62054 - DNA, 25 bp, Probe sequence
gattcaccttagaaccactgtctat

SEQ ID NO: 62055 - DNA, 25 bp, Probe sequence
catgattcaccttagaaccactgtc

SEQ ID NO: 62056 - DNA, 25 bp, Probe sequence
attcaccttagaaccactgtctatt

SEQ ID NO: 62057 - DNA, 25 bp, Probe sequence
tgattcaccttagaaccactgtcta

SEQ ID NO: 62058 - DNA, 25 bp, Probe sequence
acatgattcaccttagaaccactgt

SEQ ID NO: 62059 - DNA, 25 bp, Probe sequence
aaacatgattcaccttagaaccact

SEQ ID NO: 62060 - DNA, 25 bp, Probe sequence
ttcaccttagaaccactgtctattt

SEQ ID NO: 62061 - DNA, 25 bp, Probe sequence
ttcaataaccaagcgttacctaatt

SEQ ID NO: 62062 - DNA, 25 bp, Probe sequence
aattcaataaccaagcgttacctaa

SEQ ID NO: 62063 - DNA, 25 bp, Probe sequence
attcaataaccaagcgttacctaat

SEQ ID NO: 62064 - DNA, 25 bp, Probe sequence
atcagcataaataagaatcccgact

SEQ ID NO: 62065 - DNA, 25 bp, Probe sequence
aatcagcataaataagaatcccgac

SEQ ID NO: 62066 - DNA, 25 bp, Probe sequence
tcagcataaataagaatcccgactt

SEQ ID NO: 62067 - DNA, 25 bp, Probe sequence
cataaataagaatcccgactttgcg

SEQ ID NO: 62068 - DNA, 25 bp, Probe sequence
agcataaataagaatcccgactttg

SEQ ID NO: 62069 - DNA, 25 bp, Probe sequence
cagcataaataagaatcccgacttt

SEQ ID NO: 62070 - DNA, 25 bp, Probe sequence
ttaggtaacgcttggttattgaatt

SEQ ID NO: 62071 - DNA, 25 bp, Probe sequence
aattaggtaacgcttggttattgaa

SEQ ID NO: 62072 - DNA, 25 bp, Probe sequence
attaggtaacgcttggttattgaat

SEQ ID NO: 62073 - DNA, 25 bp, Probe sequence
agtcgggattcttatttatgctgat

SEQ ID NO: 62074 - DNA, 25 bp, Probe sequence
gtcgggattcttatttatgctgatt

SEQ ID NO: 62075 - DNA, 25 bp, Probe sequence
aagtcgggattcttatttatgctga

SEQ ID NO: 62076 - DNA, 25 bp, Probe sequence
aaagtcgggattcttatttatgctg

SEQ ID NO: 62077 - DNA, 25 bp, Probe sequence
caaagtcgggattcttatttatgct

SEQ ID NO: 62078 - DNA, 25 bp, Probe sequence
cgcaaagtcgggattcttatttatg

SEQ ID NO: 62079 - DNA, 25 bp, Probe sequence
tgagtaacagttattacaaggagga

SEQ ID NO: 62080 - DNA, 25 bp, Probe sequence
gagtaacagttattacaaggaggaa

SEQ ID NO: 62081 - DNA, 25 bp, Probe sequence
atgagtaacagttattacaaggagg

SEQ ID NO: 62082 - DNA, 25 bp, Probe sequence
aaagcgtcaaacaatgtaactattt

SEQ ID NO: 62083 - DNA, 25 bp, Probe sequence
agcgtcaaacaatgtaactatttaa

SEQ ID NO: 62084 - DNA, 25 bp, Probe sequence
aagcgtcaaacaatgtaactattta

SEQ ID NO: 62085 - DNA, 25 bp, Probe sequence
aatgagtaacagttattacaaggag

SEQ ID NO: 62086 - DNA, 25 bp, Probe sequence
tttacaaaggaaagagaaaagcgtc

SEQ ID NO: 62087 - DNA, 25 bp, Probe sequence
agtttacaaaggaaagagaaaagcg

SEQ ID NO: 62088 - DNA, 25 bp, Probe sequence
tcctccttgtaataactgttactca

SEQ ID NO: 62089 - DNA, 25 bp, Probe sequence
cctccttgtaataactgttactcat

SEQ ID NO: 62090 - DNA, 25 bp, Probe sequence
ttcctccttgtaataactgttactc

SEQ ID NO: 62091 - DNA, 25 bp, Probe sequence
aaatagttacattgtttgacgcttt

SEQ ID NO: 62092 - DNA, 25 bp, Probe sequence
taaatagttacattgtttgacgctt

SEQ ID NO: 62093 - DNA, 25 bp, Probe sequence
ttaaatagttacattgtttgacgct

SEQ ID NO: 62094 - DNA, 25 bp, Probe sequence
ctccttgtaataactgttactcatt

SEQ ID NO: 62095 - DNA, 25 bp, Probe sequence
cgcttttctctttcctttgtaaact

SEQ ID NO: 62096 - DNA, 25 bp, Probe sequence
gacgcttttctctttcctttgtaaa

SEQ ID NO: 62097 - DNA, 25 bp, Probe sequence
atgattgaatgaagctagttgaacc

SEQ ID NO: 62098 - DNA, 25 bp, Probe sequence
attgaatgaagctagttgaaccgta

SEQ ID NO: 62099 - DNA, 25 bp, Probe sequence
ttgaatgaagctagttgaaccgtaa

SEQ ID NO: 62100 - DNA, 25 bp, Probe sequence
tgagcggaaatatgattgaatgaag

SEQ ID NO: 62101 - DNA, 25 bp, Probe sequence
ttgagcggaaatatgattgaatgaa

SEQ ID NO: 62102 - DNA, 25 bp, Probe sequence
tttgagcggaaatatgattgaatga

SEQ ID NO: 62103 - DNA, 25 bp, Probe sequence
gattgaatgaagctagttgaaccgt

SEQ ID NO: 62104 - DNA, 25 bp, Probe sequence
tgattgaatgaagctagttgaaccg

SEQ ID NO: 62105 - DNA, 25 bp, Probe sequence
actttgagcggaaatatgattgaat

SEQ ID NO: 62106 - DNA, 25 bp, Probe sequence
ggttcaactagcttcattcaatcat

SEQ ID NO: 62107 - DNA, 25 bp, Probe sequence
tacggttcaactagcttcattcaat

SEQ ID NO: 62108 - DNA, 25 bp, Probe sequence
ttacggttcaactagcttcattcaa

SEQ ID NO: 62109 - DNA, 25 bp, Probe sequence
cttcattcaatcatatttccgctca

SEQ ID NO: 62110 - DNA, 25 bp, Probe sequence
tcattcaatcatatttccgctcaaa

SEQ ID NO: 62111 - DNA, 25 bp, Probe sequence
ttcattcaatcatatttccgctcaa

SEQ ID NO: 62112 - DNA, 25 bp, Probe sequence
cggttcaactagcttcattcaatca

SEQ ID NO: 62113 - DNA, 25 bp, Probe sequence
acggttcaactagcttcattcaatc

SEQ ID NO: 62114 - DNA, 25 bp, Probe sequence
attcaatcatatttccgctcaaagt

SEQ ID NO: 62115 - DNA, 25 bp, Probe sequence
tacgagtgagtaatagtgaaggcag

SEQ ID NO: 62116 - DNA, 25 bp, Probe sequence
cgagtgagtaatagtgaaggcagtt

SEQ ID NO: 62117 - DNA, 25 bp, Probe sequence
ttacgagtgagtaatagtgaaggca

SEQ ID NO: 62118 - DNA, 25 bp, Probe sequence
gagtgagtaatagtgaaggcagttt

SEQ ID NO: 62119 - DNA, 25 bp, Probe sequence
taacacaacacttaaaccaatgctt

SEQ ID NO: 62120 - DNA, 25 bp, Probe sequence
aacacaacacttaaaccaatgcttt

SEQ ID NO: 62121 - DNA, 25 bp, Probe sequence
aaattagtttgaagtgagggagagt

SEQ ID NO: 62122 - DNA, 25 bp, Probe sequence
tgttaatggttgcgtgataatttct

SEQ ID NO: 62123 - DNA, 25 bp, Probe sequence
aatgaatccgatttacgagtgagta

SEQ ID NO: 62124 - DNA, 25 bp, Probe sequence
ctgccttcactattactcactcgta

SEQ ID NO: 62125 - DNA, 25 bp, Probe sequence
aactgccttcactattactcactcg

SEQ ID NO: 62126 - DNA, 25 bp, Probe sequence
tgccttcactattactcactcgtaa

SEQ ID NO: 62127 - DNA, 25 bp, Probe sequence
aaactgccttcactattactcactc

SEQ ID NO: 62128 - DNA, 25 bp, Probe sequence
aagcattggtttaagtgttgtgtta

SEQ ID NO: 62129 - DNA, 25 bp, Probe sequence
aaagcattggtttaagtgttgtgtt

SEQ ID NO: 62130 - DNA, 25 bp, Probe sequence
actctccctcacttcaaactaattt

SEQ ID NO: 62131 - DNA, 25 bp, Probe sequence
agaaattatcacgcaaccattaaca

SEQ ID NO: 62132 - DNA, 25 bp, Probe sequence
tactcactcgtaaatcggattcatt

SEQ ID NO: 62133 - DNA, 25 bp, Probe sequence
accagtatgacagacaacacaatta

SEQ ID NO: 62134 - DNA, 25 bp, Probe sequence
ccagtatgacagacaacacaattaa

SEQ ID NO: 62135 - DNA, 25 bp, Probe sequence
aaccagtatgacagacaacacaatt

SEQ ID NO: 62136 - DNA, 25 bp, Probe sequence
gaaccagtatgacagacaacacaat

SEQ ID NO: 62137 - DNA, 25 bp, Probe sequence
aatgaaccagtatgacagacaacac

SEQ ID NO: 62138 - DNA, 25 bp, Probe sequence
atgaaccagtatgacagacaacaca

SEQ ID NO: 62139 - DNA, 25 bp, Probe sequence
tgaaccagtatgacagacaacacaa

SEQ ID NO: 62140 - DNA, 25 bp, Probe sequence
aggttgtctcgaatattggttctta

SEQ ID NO: 62141 - DNA, 25 bp, Probe sequence
taggttgtctcgaatattggttctt

SEQ ID NO: 62142 - DNA, 25 bp, Probe sequence
taattgtgttgtctgtcatactggt

SEQ ID NO: 62143 - DNA, 25 bp, Probe sequence
ttaattgtgttgtctgtcatactgg

SEQ ID NO: 62144 - DNA, 25 bp, Probe sequence
aattgtgttgtctgtcatactggtt

SEQ ID NO: 62145 - DNA, 25 bp, Probe sequence
gtgttgtctgtcatactggttcatt

SEQ ID NO: 62146 - DNA, 25 bp, Probe sequence
attgtgttgtctgtcatactggttc

SEQ ID NO: 62147 - DNA, 25 bp, Probe sequence
tgtgttgtctgtcatactggttcat

SEQ ID NO: 62148 - DNA, 25 bp, Probe sequence
ttgtgttgtctgtcatactggttca

SEQ ID NO: 62149 - DNA, 25 bp, Probe sequence
agaaccaatattcgagacaacctaa

SEQ ID NO: 62150 - DNA, 25 bp, Probe sequence
aagaaccaatattcgagacaaccta

SEQ ID NO: 62151 - DNA, 25 bp, Probe sequence
ccactggttgtgacatatccttatt

SEQ ID NO: 62152 - DNA, 25 bp, Probe sequence
gattagcgagtcagtataagggtat

SEQ ID NO: 62153 - DNA, 25 bp, Probe sequence
aatgattagcgagtcagtataaggg

SEQ ID NO: 62154 - DNA, 25 bp, Probe sequence
agcaaatgattagcgagtcagtata

SEQ ID NO: 62155 - DNA, 25 bp, Probe sequence
taagcaaatgattagcgagtcagta

SEQ ID NO: 62156 - DNA, 25 bp, Probe sequence
aataagcaaatgattagcgagtcag

SEQ ID NO: 62157 - DNA, 25 bp, Probe sequence
tgattagcgagtcagtataagggta

SEQ ID NO: 62158 - DNA, 25 bp, Probe sequence
aagcaaatgattagcgagtcagtat

SEQ ID NO: 62159 - DNA, 25 bp, Probe sequence
ataagcaaatgattagcgagtcagt

SEQ ID NO: 62160 - DNA, 25 bp, Probe sequence
aataaggatatgtcacaaccagtgg

SEQ ID NO: 62161 - DNA, 25 bp, Probe sequence
atacccttatactgactcgctaatc

SEQ ID NO: 62162 - DNA, 25 bp, Probe sequence
tactgactcgctaatcatttgctta

SEQ ID NO: 62163 - DNA, 25 bp, Probe sequence
tatactgactcgctaatcatttgct

SEQ ID NO: 62164 - DNA, 25 bp, Probe sequence
cccttatactgactcgctaatcatt

SEQ ID NO: 62165 - DNA, 25 bp, Probe sequence
ctgactcgctaatcatttgcttatt

SEQ ID NO: 62166 - DNA, 25 bp, Probe sequence
tacccttatactgactcgctaatca

SEQ ID NO: 62167 - DNA, 25 bp, Probe sequence
actgactcgctaatcatttgcttat

SEQ ID NO: 62168 - DNA, 25 bp, Probe sequence
atactgactcgctaatcatttgctt

SEQ ID NO: 62169 - DNA, 25 bp, Probe sequence
aaatatcattttaaaggaggccatt

SEQ ID NO: 62170 - DNA, 25 bp, Probe sequence
aatatcattttaaaggaggccatta

SEQ ID NO: 62171 - DNA, 25 bp, Probe sequence
atatcattttaaaggaggccattat

SEQ ID NO: 62172 - DNA, 25 bp, Probe sequence
taaatatcattttaaaggaggccat

SEQ ID NO: 62173 - DNA, 25 bp, Probe sequence
tatcattttaaaggaggccattata

SEQ ID NO: 62174 - DNA, 25 bp, Probe sequence
ttaaatatcattttaaaggaggcca

SEQ ID NO: 62175 - DNA, 25 bp, Probe sequence
tttaaatatcattttaaaggaggcc

SEQ ID NO: 62176 - DNA, 25 bp, Probe sequence
aatggcctcctttaaaatgatattt

SEQ ID NO: 62177 - DNA, 25 bp, Probe sequence
taatggcctcctttaaaatgatatt

SEQ ID NO: 62178 - DNA, 25 bp, Probe sequence
ataatggcctcctttaaaatgatat

SEQ ID NO: 62179 - DNA, 25 bp, Probe sequence
atggcctcctttaaaatgatattta

SEQ ID NO: 62180 - DNA, 25 bp, Probe sequence
tataatggcctcctttaaaatgata

SEQ ID NO: 62181 - DNA, 25 bp, Probe sequence
tggcctcctttaaaatgatatttaa

SEQ ID NO: 62182 - DNA, 25 bp, Probe sequence
ggcctcctttaaaatgatatttaaa

SEQ ID NO: 62183 - DNA, 25 bp, Probe sequence
ttattcaaatacgctagtgctcaga

SEQ ID NO: 62184 - DNA, 25 bp, Probe sequence
tttattcaaatacgctagtgctcag

SEQ ID NO: 62185 - DNA, 25 bp, Probe sequence
tattcaaatacgctagtgctcagaa

SEQ ID NO: 62186 - DNA, 25 bp, Probe sequence
attcaaatacgctagtgctcagaac

SEQ ID NO: 62187 - DNA, 25 bp, Probe sequence
tacgctagtgctcagaactatttag

SEQ ID NO: 62188 - DNA, 25 bp, Probe sequence
aatacgctagtgctcagaactattt

SEQ ID NO: 62189 - DNA, 25 bp, Probe sequence
aaatacgctagtgctcagaactatt

SEQ ID NO: 62190 - DNA, 25 bp, Probe sequence
atacgctagtgctcagaactattta

SEQ ID NO: 62191 - DNA, 25 bp, Probe sequence
caaatacgctagtgctcagaactat

SEQ ID NO: 62192 - DNA, 25 bp, Probe sequence
tctgagcactagcgtatttgaataa

SEQ ID NO: 62193 - DNA, 25 bp, Probe sequence
ctgagcactagcgtatttgaataaa

SEQ ID NO: 62194 - DNA, 25 bp, Probe sequence
ttctgagcactagcgtatttgaata

SEQ ID NO: 62195 - DNA, 25 bp, Probe sequence
gttctgagcactagcgtatttgaat

SEQ ID NO: 62196 - DNA, 25 bp, Probe sequence
aatagttctgagcactagcgtattt

SEQ ID NO: 62197 - DNA, 25 bp, Probe sequence
aaatagttctgagcactagcgtatt

SEQ ID NO: 62198 - DNA, 25 bp, Probe sequence
ctaaatagttctgagcactagcgta

SEQ ID NO: 62199 - DNA, 25 bp, Probe sequence
taaatagttctgagcactagcgtat

SEQ ID NO: 62200 - DNA, 25 bp, Probe sequence
atagttctgagcactagcgtatttg

SEQ ID NO: 62201 - DNA, 25 bp, Probe sequence
agtaaacgcttaatgacacttattt

SEQ ID NO: 62202 - DNA, 25 bp, Probe sequence
tgttaagtaaacgcttaatgacact

SEQ ID NO: 62203 - DNA, 25 bp, Probe sequence
tgtaaaagatgttaagtaaacgctt

SEQ ID NO: 62204 - DNA, 25 bp, Probe sequence
ttgtaaaagatgttaagtaaacgct

SEQ ID NO: 62205 - DNA, 25 bp, Probe sequence
aagtaaacgcttaatgacacttatt

SEQ ID NO: 62206 - DNA, 25 bp, Probe sequence
gttaagtaaacgcttaatgacactt

SEQ ID NO: 62207 - DNA, 25 bp, Probe sequence
atgttaagtaaacgcttaatgacac

SEQ ID NO: 62208 - DNA, 25 bp, Probe sequence
gatgttaagtaaacgcttaatgaca

SEQ ID NO: 62209 - DNA, 25 bp, Probe sequence
agatgttaagtaaacgcttaatgac

SEQ ID NO: 62210 - DNA, 25 bp, Probe sequence
aaataagtgtcattaagcgtttact

SEQ ID NO: 62211 - DNA, 25 bp, Probe sequence
agtgtcattaagcgtttacttaaca

SEQ ID NO: 62212 - DNA, 25 bp, Probe sequence
agcgtttacttaacatcttttacaa

SEQ ID NO: 62213 - DNA, 25 bp, Probe sequence
aagcgtttacttaacatcttttaca

SEQ ID NO: 62214 - DNA, 25 bp, Probe sequence
aataagtgtcattaagcgtttactt

SEQ ID NO: 62215 - DNA, 25 bp, Probe sequence
gtgtcattaagcgtttacttaacat

SEQ ID NO: 62216 - DNA, 25 bp, Probe sequence
aagtgtcattaagcgtttacttaac

SEQ ID NO: 62217 - DNA, 25 bp, Probe sequence
tgtcattaagcgtttacttaacatc

SEQ ID NO: 62218 - DNA, 25 bp, Probe sequence
gtcattaagcgtttacttaacatct

SEQ ID NO: 62219 - DNA, 25 bp, Probe sequence
ttagttgaggattattatgtcggta

SEQ ID NO: 62220 - DNA, 25 bp, Probe sequence
agttgaggattattatgtcggtata

SEQ ID NO: 62221 - DNA, 25 bp, Probe sequence
tagttgaggattattatgtcggtat

SEQ ID NO: 62222 - DNA, 25 bp, Probe sequence
ttataacctgccacagagttgagac

SEQ ID NO: 62223 - DNA, 25 bp, Probe sequence
tataacctgccacagagttgagact

SEQ ID NO: 62224 - DNA, 25 bp, Probe sequence
tttagttgaggattattatgtcggt

SEQ ID NO: 62225 - DNA, 25 bp, Probe sequence
agttcacgcttgtatttataacctg

SEQ ID NO: 62226 - DNA, 25 bp, Probe sequence
gttcacgcttgtatttataacctgc

SEQ ID NO: 62227 - DNA, 25 bp, Probe sequence
aagttcacgcttgtatttataacct

SEQ ID NO: 62228 - DNA, 25 bp, Probe sequence
taccgacataataatcctcaactaa

SEQ ID NO: 62229 - DNA, 25 bp, Probe sequence
ataccgacataataatcctcaacta

SEQ ID NO: 62230 - DNA, 25 bp, Probe sequence
tataccgacataataatcctcaact

SEQ ID NO: 62231 - DNA, 25 bp, Probe sequence
gtctcaactctgtggcaggttataa

SEQ ID NO: 62232 - DNA, 25 bp, Probe sequence
accgacataataatcctcaactaaa

SEQ ID NO: 62233 - DNA, 25 bp, Probe sequence
agtctcaactctgtggcaggttata

SEQ ID NO: 62234 - DNA, 25 bp, Probe sequence
caggttataaatacaagcgtgaact

SEQ ID NO: 62235 - DNA, 25 bp, Probe sequence
gcaggttataaatacaagcgtgaac

SEQ ID NO: 62236 - DNA, 25 bp, Probe sequence
aggttataaatacaagcgtgaactt

SEQ ID NO: 62237 - DNA, 25 bp, Probe sequence
taagtatgcaaagggagcgttagat

SEQ ID NO: 62238 - DNA, 25 bp, Probe sequence
ttaagtatgcaaagggagcgttaga

SEQ ID NO: 62239 - DNA, 25 bp, Probe sequence
gttaagtatgcaaagggagcgttag

SEQ ID NO: 62240 - DNA, 25 bp, Probe sequence
atagcctagttaagtatgcaaaggg

SEQ ID NO: 62241 - DNA, 25 bp, Probe sequence
agttaagtatgcaaagggagcgtta

SEQ ID NO: 62242 - DNA, 25 bp, Probe sequence
tagttaagtatgcaaagggagcgtt

SEQ ID NO: 62243 - DNA, 25 bp, Probe sequence
tagcctagttaagtatgcaaaggga

SEQ ID NO: 62244 - DNA, 25 bp, Probe sequence
aagtatgcaaagggagcgttagatt

SEQ ID NO: 62245 - DNA, 25 bp, Probe sequence
agtatgcaaagggagcgttagattt

SEQ ID NO: 62246 - DNA, 25 bp, Probe sequence
atctaacgctccctttgcatactta

SEQ ID NO: 62247 - DNA, 25 bp, Probe sequence
ccctttgcatacttaactaggctat

SEQ ID NO: 62248 - DNA, 25 bp, Probe sequence
ctaacgctccctttgcatacttaac

SEQ ID NO: 62249 - DNA, 25 bp, Probe sequence
tctaacgctccctttgcatacttaa

SEQ ID NO: 62250 - DNA, 25 bp, Probe sequence
aacgctccctttgcatacttaacta

SEQ ID NO: 62251 - DNA, 25 bp, Probe sequence
taacgctccctttgcatacttaact

SEQ ID NO: 62252 - DNA, 25 bp, Probe sequence
tccctttgcatacttaactaggcta

SEQ ID NO: 62253 - DNA, 25 bp, Probe sequence
aatctaacgctccctttgcatactt

SEQ ID NO: 62254 - DNA, 25 bp, Probe sequence
aaatctaacgctccctttgcatact

SEQ ID NO: 62255 - DNA, 25 bp, Probe sequence
agttgcttaatcgggctatatttga

SEQ ID NO: 62256 - DNA, 25 bp, Probe sequence
gttgcttaatcgggctatatttgat

SEQ ID NO: 62257 - DNA, 25 bp, Probe sequence
tagttgcttaatcgggctatatttg

SEQ ID NO: 62258 - DNA, 25 bp, Probe sequence
ttagttgcttaatcgggctatattt

SEQ ID NO: 62259 - DNA, 25 bp, Probe sequence
tttagttgcttaatcgggctatatt

SEQ ID NO: 62260 - DNA, 25 bp, Probe sequence
atttagttgcttaatcgggctatat

SEQ ID NO: 62261 - DNA, 25 bp, Probe sequence
ttgcttaatcgggctatatttgata

SEQ ID NO: 62262 - DNA, 25 bp, Probe sequence
tgcttaatcgggctatatttgatat

SEQ ID NO: 62263 - DNA, 25 bp, Probe sequence
gatttagttgcttaatcgggctata

SEQ ID NO: 62264 - DNA, 25 bp, Probe sequence
tcaaatatagcccgattaagcaact

SEQ ID NO: 62265 - DNA, 25 bp, Probe sequence
atcaaatatagcccgattaagcaac

SEQ ID NO: 62266 - DNA, 25 bp, Probe sequence
caaatatagcccgattaagcaacta

SEQ ID NO: 62267 - DNA, 25 bp, Probe sequence
aatatagcccgattaagcaactaaa

SEQ ID NO: 62268 - DNA, 25 bp, Probe sequence
aaatatagcccgattaagcaactaa

SEQ ID NO: 62269 - DNA, 25 bp, Probe sequence
atatagcccgattaagcaactaaat

SEQ ID NO: 62270 - DNA, 25 bp, Probe sequence
tatcaaatatagcccgattaagcaa

SEQ ID NO: 62271 - DNA, 25 bp, Probe sequence
atatcaaatatagcccgattaagca

SEQ ID NO: 62272 - DNA, 25 bp, Probe sequence
tatagcccgattaagcaactaaatc

SEQ ID NO: 62273 - DNA, 25 bp, Probe sequence
gttgtgagtattgatatagcagtgt

SEQ ID NO: 62274 - DNA, 25 bp, Probe sequence
tgttgtgagtattgatatagcagtg

SEQ ID NO: 62275 - DNA, 25 bp, Probe sequence
ttgtgagtattgatatagcagtgtt

SEQ ID NO: 62276 - DNA, 25 bp, Probe sequence
ttgttgtgagtattgatatagcagt

SEQ ID NO: 62277 - DNA, 25 bp, Probe sequence
ggtgtttatttgatggaggaaagag

SEQ ID NO: 62278 - DNA, 25 bp, Probe sequence
aggtgtttatttgatggaggaaaga

SEQ ID NO: 62279 - DNA, 25 bp, Probe sequence
gtgtttatttgatggaggaaagagt

SEQ ID NO: 62280 - DNA, 25 bp, Probe sequence
tgatggaggaaagagtaataagtga

SEQ ID NO: 62281 - DNA, 25 bp, Probe sequence
taggtgtttatttgatggaggaaag

SEQ ID NO: 62282 - DNA, 25 bp, Probe sequence
cactgctatatcaatactcacaaca

SEQ ID NO: 62283 - DNA, 25 bp, Probe sequence
acactgctatatcaatactcacaac

SEQ ID NO: 62284 - DNA, 25 bp, Probe sequence
actgctatatcaatactcacaacaa

SEQ ID NO: 62285 - DNA, 25 bp, Probe sequence
aacactgctatatcaatactcacaa

SEQ ID NO: 62286 - DNA, 25 bp, Probe sequence
tctttcctccatcaaataaacacct

SEQ ID NO: 62287 - DNA, 25 bp, Probe sequence
ctctttcctccatcaaataaacacc

SEQ ID NO: 62288 - DNA, 25 bp, Probe sequence
actctttcctccatcaaataaacac

SEQ ID NO: 62289 - DNA, 25 bp, Probe sequence
tcacttattactctttcctccatca

SEQ ID NO: 62290 - DNA, 25 bp, Probe sequence
aataaacacctatacaaacactgct

SEQ ID NO: 62291 - DNA, 25 bp, Probe sequence
taagaacccaacatactacaaacga

SEQ ID NO: 62292 - DNA, 25 bp, Probe sequence
agaacccaacatactacaaacgaat

SEQ ID NO: 62293 - DNA, 25 bp, Probe sequence
aagaacccaacatactacaaacgaa

SEQ ID NO: 62294 - DNA, 25 bp, Probe sequence
gaacccaacatactacaaacgaatt

SEQ ID NO: 62295 - DNA, 25 bp, Probe sequence
ttaagaacccaacatactacaaacg

SEQ ID NO: 62296 - DNA, 25 bp, Probe sequence
aacccaacatactacaaacgaattt

SEQ ID NO: 62297 - DNA, 25 bp, Probe sequence
aactttacttaacctttctcattgc

SEQ ID NO: 62298 - DNA, 25 bp, Probe sequence
gtcagaacagactactcctctttat

SEQ ID NO: 62299 - DNA, 25 bp, Probe sequence
tcagaacagactactcctctttata

SEQ ID NO: 62300 - DNA, 25 bp, Probe sequence
tcgtttgtagtatgttgggttctta

SEQ ID NO: 62301 - DNA, 25 bp, Probe sequence
attcgtttgtagtatgttgggttct

SEQ ID NO: 62302 - DNA, 25 bp, Probe sequence
ttcgtttgtagtatgttgggttctt

SEQ ID NO: 62303 - DNA, 25 bp, Probe sequence
aattcgtttgtagtatgttgggttc

SEQ ID NO: 62304 - DNA, 25 bp, Probe sequence
cgtttgtagtatgttgggttcttaa

SEQ ID NO: 62305 - DNA, 25 bp, Probe sequence
aaattcgtttgtagtatgttgggtt

SEQ ID NO: 62306 - DNA, 25 bp, Probe sequence
gcaatgagaaaggttaagtaaagtt

SEQ ID NO: 62307 - DNA, 25 bp, Probe sequence
ataaagaggagtagtctgttctgac

SEQ ID NO: 62308 - DNA, 25 bp, Probe sequence
tataaagaggagtagtctgttctga

SEQ ID NO: 62309 - DNA, 25 bp, Probe sequence
gggactgatttctttaacaccatta

SEQ ID NO: 62310 - DNA, 25 bp, Probe sequence
tgaatgtaagacaatcaacaaacca

SEQ ID NO: 62311 - DNA, 25 bp, Probe sequence
ctgaatgtaagacaatcaacaaacc

SEQ ID NO: 62312 - DNA, 25 bp, Probe sequence
taactgaatgtaagacaatcaacaa

SEQ ID NO: 62313 - DNA, 25 bp, Probe sequence
gaatgtaagacaatcaacaaaccaa

SEQ ID NO: 62314 - DNA, 25 bp, Probe sequence
actgaatgtaagacaatcaacaaac

SEQ ID NO: 62315 - DNA, 25 bp, Probe sequence
tagtatcatgttggctaagctataa

SEQ ID NO: 62316 - DNA, 25 bp, Probe sequence
ttatagtatcatgttggctaagcta

SEQ ID NO: 62317 - DNA, 25 bp, Probe sequence
ataactgaatgtaagacaatcaaca

SEQ ID NO: 62318 - DNA, 25 bp, Probe sequence
taatggtgttaaagaaatcagtccc

SEQ ID NO: 62319 - DNA, 25 bp, Probe sequence
tggtttgttgattgtcttacattca

SEQ ID NO: 62320 - DNA, 25 bp, Probe sequence
ggtttgttgattgtcttacattcag

SEQ ID NO: 62321 - DNA, 25 bp, Probe sequence
ttgttgattgtcttacattcagtta

SEQ ID NO: 62322 - DNA, 25 bp, Probe sequence
ttggtttgttgattgtcttacattc

SEQ ID NO: 62323 - DNA, 25 bp, Probe sequence
gtttgttgattgtcttacattcagt

SEQ ID NO: 62324 - DNA, 25 bp, Probe sequence
tagcttagccaacatgatactataa

SEQ ID NO: 62325 - DNA, 25 bp, Probe sequence
ttatagcttagccaacatgatacta

SEQ ID NO: 62326 - DNA, 25 bp, Probe sequence
tgttgattgtcttacattcagttat

SEQ ID NO: 62327 - DNA, 25 bp, Probe sequence
ttaacatgtctcctttatttcgcaa

SEQ ID NO: 62328 - DNA, 25 bp, Probe sequence
taacatgtctcctttatttcgcaaa

SEQ ID NO: 62329 - DNA, 25 bp, Probe sequence
aacatgtctcctttatttcgcaaaa

SEQ ID NO: 62330 - DNA, 25 bp, Probe sequence
ttgcgaaataaaggagacatgttaa

SEQ ID NO: 62331 - DNA, 25 bp, Probe sequence
tttgcgaaataaaggagacatgtta

SEQ ID NO: 62332 - DNA, 25 bp, Probe sequence
ttttgcgaaataaaggagacatgtt

SEQ ID NO: 62333 - DNA, 25 bp, Probe sequence
agattgccgtaataataatcgtact

SEQ ID NO: 62334 - DNA, 25 bp, Probe sequence
tgaatatgtattgaagaagatgtgt

SEQ ID NO: 62335 - DNA, 25 bp, Probe sequence
tagattgccgtaataataatcgtac

SEQ ID NO: 62336 - DNA, 25 bp, Probe sequence
aatagattgccgtaataataatcgt

SEQ ID NO: 62337 - DNA, 25 bp, Probe sequence
tgagatgaatatgtattgaagaaga

SEQ ID NO: 62338 - DNA, 25 bp, Probe sequence
ggaaaatactggtcaaagatgggag

SEQ ID NO: 62339 - DNA, 25 bp, Probe sequence
gaatatgtattgaagaagatgtgtt

SEQ ID NO: 62340 - DNA, 25 bp, Probe sequence
ttggaaaatactggtcaaagatggg

SEQ ID NO: 62341 - DNA, 25 bp, Probe sequence
tggaaaatactggtcaaagatggga

SEQ ID NO: 62342 - DNA, 25 bp, Probe sequence
agtacgattattattacggcaatct

SEQ ID NO: 62343 - DNA, 25 bp, Probe sequence
acacatcttcttcaatacatattca

SEQ ID NO: 62344 - DNA, 25 bp, Probe sequence
gtacgattattattacggcaatcta

SEQ ID NO: 62345 - DNA, 25 bp, Probe sequence
acgattattattacggcaatctatt

SEQ ID NO: 62346 - DNA, 25 bp, Probe sequence
tcttcttcaatacatattcatctca

SEQ ID NO: 62347 - DNA, 25 bp, Probe sequence
ctcccatctttgaccagtattttcc

SEQ ID NO: 62348 - DNA, 25 bp, Probe sequence
aacacatcttcttcaatacatattc

SEQ ID NO: 62349 - DNA, 25 bp, Probe sequence
cccatctttgaccagtattttccaa

SEQ ID NO: 62350 - DNA, 25 bp, Probe sequence
tcccatctttgaccagtattttcca

SEQ ID NO: 62351 - DNA, 25 bp, Probe sequence
taagagggtagttgtttattgcgaa

SEQ ID NO: 62352 - DNA, 25 bp, Probe sequence
ttaagagggtagttgtttattgcga

SEQ ID NO: 62353 - DNA, 25 bp, Probe sequence
tttaagagggtagttgtttattgcg

SEQ ID NO: 62354 - DNA, 25 bp, Probe sequence
aagagggtagttgtttattgcgaaa

SEQ ID NO: 62355 - DNA, 25 bp, Probe sequence
atttaagagggtagttgtttattgc

SEQ ID NO: 62356 - DNA, 25 bp, Probe sequence
aattgatttaagagggtagttgttt

SEQ ID NO: 62357 - DNA, 25 bp, Probe sequence
aaattgatttaagagggtagttgtt

SEQ ID NO: 62358 - DNA, 25 bp, Probe sequence
ataagatagaactaaaaggaggggc

SEQ ID NO: 62359 - DNA, 25 bp, Probe sequence
taagatagaactaaaaggaggggca

SEQ ID NO: 62360 - DNA, 25 bp, Probe sequence
ttcgcaataaacaactaccctctta

SEQ ID NO: 62361 - DNA, 25 bp, Probe sequence
tcgcaataaacaactaccctcttaa

SEQ ID NO: 62362 - DNA, 25 bp, Probe sequence
cgcaataaacaactaccctcttaaa

SEQ ID NO: 62363 - DNA, 25 bp, Probe sequence
tttcgcaataaacaactaccctctt

SEQ ID NO: 62364 - DNA, 25 bp, Probe sequence
gcaataaacaactaccctcttaaat

SEQ ID NO: 62365 - DNA, 25 bp, Probe sequence
aaacaactaccctcttaaatcaatt

SEQ ID NO: 62366 - DNA, 25 bp, Probe sequence
aacaactaccctcttaaatcaattt

SEQ ID NO: 62367 - DNA, 25 bp, Probe sequence
gcccctccttttagttctatcttat

SEQ ID NO: 62368 - DNA, 25 bp, Probe sequence
tgcccctccttttagttctatctta

SEQ ID NO: 62369 - DNA, 25 bp, Probe sequence
gctaggattacattaggtagagttc

SEQ ID NO: 62370 - DNA, 25 bp, Probe sequence
agctaggattacattaggtagagtt

SEQ ID NO: 62371 - DNA, 25 bp, Probe sequence
aagctaggattacattaggtagagt

SEQ ID NO: 62372 - DNA, 25 bp, Probe sequence
ctaggattacattaggtagagttca

SEQ ID NO: 62373 - DNA, 25 bp, Probe sequence
aggattacattaggtagagttcata

SEQ ID NO: 62374 - DNA, 25 bp, Probe sequence
taggattacattaggtagagttcat

SEQ ID NO: 62375 - DNA, 25 bp, Probe sequence
aaagctaggattacattaggtagag

SEQ ID NO: 62376 - DNA, 25 bp, Probe sequence
ggattacattaggtagagttcatat

SEQ ID NO: 62377 - DNA, 25 bp, Probe sequence
agtgtataattccattaacagagat

SEQ ID NO: 62378 - DNA, 25 bp, Probe sequence
gaactctacctaatgtaatcctagc

SEQ ID NO: 62379 - DNA, 25 bp, Probe sequence
actctacctaatgtaatcctagctt

SEQ ID NO: 62380 - DNA, 25 bp, Probe sequence
aactctacctaatgtaatcctagct

SEQ ID NO: 62381 - DNA, 25 bp, Probe sequence
tgaactctacctaatgtaatcctag

SEQ ID NO: 62382 - DNA, 25 bp, Probe sequence
atgaactctacctaatgtaatccta

SEQ ID NO: 62383 - DNA, 25 bp, Probe sequence
tatgaactctacctaatgtaatcct

SEQ ID NO: 62384 - DNA, 25 bp, Probe sequence
ctctacctaatgtaatcctagcttt

SEQ ID NO: 62385 - DNA, 25 bp, Probe sequence
atatgaactctacctaatgtaatcc

SEQ ID NO: 62386 - DNA, 25 bp, Probe sequence
atctctgttaatggaattatacact

SEQ ID NO: 62387 - DNA, 25 bp, Probe sequence
ggtgtaaggtaggttgttaattagg

SEQ ID NO: 62388 - DNA, 25 bp, Probe sequence
aaatagggtgtaaggtaggttgtta

SEQ ID NO: 62389 - DNA, 25 bp, Probe sequence
aatagggtgtaaggtaggttgttaa

SEQ ID NO: 62390 - DNA, 25 bp, Probe sequence
tagggtgtaaggtaggttgttaatt

SEQ ID NO: 62391 - DNA, 25 bp, Probe sequence
atagggtgtaaggtaggttgttaat

SEQ ID NO: 62392 - DNA, 25 bp, Probe sequence
agggtgtaaggtaggttgttaatta

SEQ ID NO: 62393 - DNA, 25 bp, Probe sequence
tgtaaggtaggttgttaattaggga

SEQ ID NO: 62394 - DNA, 25 bp, Probe sequence
gtgtaaggtaggttgttaattaggg

SEQ ID NO: 62395 - DNA, 25 bp, Probe sequence
gggtgtaaggtaggttgttaattag

SEQ ID NO: 62396 - DNA, 25 bp, Probe sequence
cctaattaacaacctaccttacacc

SEQ ID NO: 62397 - DNA, 25 bp, Probe sequence
taacaacctaccttacaccctattt

SEQ ID NO: 62398 - DNA, 25 bp, Probe sequence
ttaacaacctaccttacaccctatt

SEQ ID NO: 62399 - DNA, 25 bp, Probe sequence
aattaacaacctaccttacacccta

SEQ ID NO: 62400 - DNA, 25 bp, Probe sequence
attaacaacctaccttacaccctat

SEQ ID NO: 62401 - DNA, 25 bp, Probe sequence
taattaacaacctaccttacaccct

SEQ ID NO: 62402 - DNA, 25 bp, Probe sequence
ctaattaacaacctaccttacaccc

SEQ ID NO: 62403 - DNA, 25 bp, Probe sequence
ccctaattaacaacctaccttacac

SEQ ID NO: 62404 - DNA, 25 bp, Probe sequence
tccctaattaacaacctaccttaca

SEQ ID NO: 62405 - DNA, 25 bp, Probe sequence
gcaatctagtatagtccacattcta

SEQ ID NO: 62406 - DNA, 25 bp, Probe sequence
tgcaatctagtatagtccacattct

SEQ ID NO: 62407 - DNA, 25 bp, Probe sequence
atgatgcaatctagtatagtccaca

SEQ ID NO: 62408 - DNA, 25 bp, Probe sequence
agtatagtccacattctaaacaggt

SEQ ID NO: 62409 - DNA, 25 bp, Probe sequence
tgatgcaatctagtatagtccacat

SEQ ID NO: 62410 - DNA, 25 bp, Probe sequence
tctaaacaggtgtggactattactt

SEQ ID NO: 62411 - DNA, 25 bp, Probe sequence
ttctaaacaggtgtggactattact

SEQ ID NO: 62412 - DNA, 25 bp, Probe sequence
tctggtatataatgctgttagtgaa

SEQ ID NO: 62413 - DNA, 25 bp, Probe sequence
ttctggtatataatgctgttagtga

SEQ ID NO: 62414 - DNA, 25 bp, Probe sequence
tagaatgtggactatactagattgc

SEQ ID NO: 62415 - DNA, 25 bp, Probe sequence
agaatgtggactatactagattgca

SEQ ID NO: 62416 - DNA, 25 bp, Probe sequence
tgtggactatactagattgcatcat

SEQ ID NO: 62417 - DNA, 25 bp, Probe sequence
acctgtttagaatgtggactatact

SEQ ID NO: 62418 - DNA, 25 bp, Probe sequence
atgtggactatactagattgcatca

SEQ ID NO: 62419 - DNA, 25 bp, Probe sequence
agtaatagtccacacctgtttagaa

SEQ ID NO: 62420 - DNA, 25 bp, Probe sequence
aagtaatagtccacacctgtttaga

SEQ ID NO: 62421 - DNA, 25 bp, Probe sequence
tcactaacagcattatataccagaa

SEQ ID NO: 62422 - DNA, 25 bp, Probe sequence
ttcactaacagcattatataccaga

SEQ ID NO: 62423 - DNA, 25 bp, Probe sequence
aatctatgtggttgtaggctgtatt

SEQ ID NO: 62424 - DNA, 25 bp, Probe sequence
caatctatgtggttgtaggctgtat

SEQ ID NO: 62425 - DNA, 25 bp, Probe sequence
atctatgtggttgtaggctgtattt

SEQ ID NO: 62426 - DNA, 25 bp, Probe sequence
ttggcactaagtttacgagatatga

SEQ ID NO: 62427 - DNA, 25 bp, Probe sequence
tggcactaagtttacgagatatgat

SEQ ID NO: 62428 - DNA, 25 bp, Probe sequence
aaacacccatcaacaaattataccg

SEQ ID NO: 62429 - DNA, 25 bp, Probe sequence
attggcactaagtttacgagatatg

SEQ ID NO: 62430 - DNA, 25 bp, Probe sequence
aacacccatcaacaaattataccgt

SEQ ID NO: 62431 - DNA, 25 bp, Probe sequence
cacccatcaacaaattataccgttt

SEQ ID NO: 62432 - DNA, 25 bp, Probe sequence
aatacagcctacaaccacatagatt

SEQ ID NO: 62433 - DNA, 25 bp, Probe sequence
atacagcctacaaccacatagattg

SEQ ID NO: 62434 - DNA, 25 bp, Probe sequence
aaatacagcctacaaccacatagat

SEQ ID NO: 62435 - DNA, 25 bp, Probe sequence
tcatatctcgtaaacttagtgccaa

SEQ ID NO: 62436 - DNA, 25 bp, Probe sequence
atcatatctcgtaaacttagtgcca

SEQ ID NO: 62437 - DNA, 25 bp, Probe sequence
cggtataatttgttgatgggtgttt

SEQ ID NO: 62438 - DNA, 25 bp, Probe sequence
catatctcgtaaacttagtgccaat

SEQ ID NO: 62439 - DNA, 25 bp, Probe sequence
acggtataatttgttgatgggtgtt

SEQ ID NO: 62440 - DNA, 25 bp, Probe sequence
aaacggtataatttgttgatgggtg

SEQ ID NO: 62441 - DNA, 25 bp, Probe sequence
tccgcatagatatagagacgctaat

SEQ ID NO: 62442 - DNA, 25 bp, Probe sequence
attccgcatagatatagagacgcta

SEQ ID NO: 62443 - DNA, 25 bp, Probe sequence
ccgcatagatatagagacgctaata

SEQ ID NO: 62444 - DNA, 25 bp, Probe sequence
ttccgcatagatatagagacgctaa

SEQ ID NO: 62445 - DNA, 25 bp, Probe sequence
aattccgcatagatatagagacgct

SEQ ID NO: 62446 - DNA, 25 bp, Probe sequence
cgcatagatatagagacgctaataa

SEQ ID NO: 62447 - DNA, 25 bp, Probe sequence
aaattccgcatagatatagagacgc

SEQ ID NO: 62448 - DNA, 25 bp, Probe sequence
caaattccgcatagatatagagacg

SEQ ID NO: 62449 - DNA, 25 bp, Probe sequence
ttgtctcgatatgatagtctgcaac

SEQ ID NO: 62450 - DNA, 25 bp, Probe sequence
tagcgtctctatatctatgcggaat

SEQ ID NO: 62451 - DNA, 25 bp, Probe sequence
attagcgtctctatatctatgcgga

SEQ ID NO: 62452 - DNA, 25 bp, Probe sequence
tattagcgtctctatatctatgcgg

SEQ ID NO: 62453 - DNA, 25 bp, Probe sequence
ttagcgtctctatatctatgcggaa

SEQ ID NO: 62454 - DNA, 25 bp, Probe sequence
agcgtctctatatctatgcggaatt

SEQ ID NO: 62455 - DNA, 25 bp, Probe sequence
ttattagcgtctctatatctatgcg

SEQ ID NO: 62456 - DNA, 25 bp, Probe sequence
cgtctctatatctatgcggaatttg

SEQ ID NO: 62457 - DNA, 25 bp, Probe sequence
gcgtctctatatctatgcggaattt

SEQ ID NO: 62458 - DNA, 25 bp, Probe sequence
gttgcagactatcatatcgagacaa

SEQ ID NO: 62459 - DNA, 25 bp, Probe sequence
agttaagtaataaagagcgtgaaga

SEQ ID NO: 62460 - DNA, 25 bp, Probe sequence
tgaaagttaagtaataaagagcgtg

SEQ ID NO: 62461 - DNA, 25 bp, Probe sequence
gttaagtaataaagagcgtgaagaa

SEQ ID NO: 62462 - DNA, 25 bp, Probe sequence
gaaagttaagtaataaagagcgtga

SEQ ID NO: 62463 - DNA, 25 bp, Probe sequence
aagttaagtaataaagagcgtgaag

SEQ ID NO: 62464 - DNA, 25 bp, Probe sequence
aaagttaagtaataaagagcgtgaa

SEQ ID NO: 62465 - DNA, 25 bp, Probe sequence
ttaagtaataaagagcgtgaagaaa

SEQ ID NO: 62466 - DNA, 25 bp, Probe sequence
atgaaagttaagtaataaagagcgt

SEQ ID NO: 62467 - DNA, 25 bp, Probe sequence
aatgaaagttaagtaataaagagcg

SEQ ID NO: 62468 - DNA, 25 bp, Probe sequence
tcttcacgctctttattacttaact

SEQ ID NO: 62469 - DNA, 25 bp, Probe sequence
cacgctctttattacttaactttca

SEQ ID NO: 62470 - DNA, 25 bp, Probe sequence
tcacgctctttattacttaactttc

SEQ ID NO: 62471 - DNA, 25 bp, Probe sequence
ttcttcacgctctttattacttaac

SEQ ID NO: 62472 - DNA, 25 bp, Probe sequence
cttcacgctctttattacttaactt

SEQ ID NO: 62473 - DNA, 25 bp, Probe sequence
ttcacgctctttattacttaacttt

SEQ ID NO: 62474 - DNA, 25 bp, Probe sequence
acgctctttattacttaactttcat

SEQ ID NO: 62475 - DNA, 25 bp, Probe sequence
tttcttcacgctctttattacttaa

SEQ ID NO: 62476 - DNA, 25 bp, Probe sequence
cgctctttattacttaactttcatt

SEQ ID NO: 62477 - DNA, 25 bp, Probe sequence
tcaaacagtccttattatagggctg

SEQ ID NO: 62478 - DNA, 25 bp, Probe sequence
ttcaaacagtccttattatagggct

SEQ ID NO: 62479 - DNA, 25 bp, Probe sequence
attcaaacagtccttattatagggc

SEQ ID NO: 62480 - DNA, 25 bp, Probe sequence
tgctttaaatcgataacagttggtg

SEQ ID NO: 62481 - DNA, 25 bp, Probe sequence
atgctttaaatcgataacagttggt

SEQ ID NO: 62482 - DNA, 25 bp, Probe sequence
gataacagttggtgtggtaaaagca

SEQ ID NO: 62483 - DNA, 25 bp, Probe sequence
tggtaaaagcactagccgttatttt

SEQ ID NO: 62484 - DNA, 25 bp, Probe sequence
taaatcgataacagttggtgtggta

SEQ ID NO: 62485 - DNA, 25 bp, Probe sequence
gctttaaatcgataacagttggtgt

SEQ ID NO: 62486 - DNA, 25 bp, Probe sequence
cagccctataataaggactgtttga

SEQ ID NO: 62487 - DNA, 25 bp, Probe sequence
agccctataataaggactgtttgaa

SEQ ID NO: 62488 - DNA, 25 bp, Probe sequence
gccctataataaggactgtttgaat

SEQ ID NO: 62489 - DNA, 25 bp, Probe sequence
caccaactgttatcgatttaaagca

SEQ ID NO: 62490 - DNA, 25 bp, Probe sequence
accaactgttatcgatttaaagcat

SEQ ID NO: 62491 - DNA, 25 bp, Probe sequence
tgcttttaccacaccaactgttatc

SEQ ID NO: 62492 - DNA, 25 bp, Probe sequence
aaaataacggctagtgcttttacca

SEQ ID NO: 62493 - DNA, 25 bp, Probe sequence
acaccaactgttatcgatttaaagc

SEQ ID NO: 62494 - DNA, 25 bp, Probe sequence
taccacaccaactgttatcgattta

SEQ ID NO: 62495 - DNA, 25 bp, Probe sequence
acaataataggataccacatcgcat

SEQ ID NO: 62496 - DNA, 25 bp, Probe sequence
aacaataataggataccacatcgca

SEQ ID NO: 62497 - DNA, 25 bp, Probe sequence
taacaataataggataccacatcgc

SEQ ID NO: 62498 - DNA, 25 bp, Probe sequence
accacatcgcataatatcttactac

SEQ ID NO: 62499 - DNA, 25 bp, Probe sequence
caataataggataccacatcgcata

SEQ ID NO: 62500 - DNA, 25 bp, Probe sequence
tctgtatatggcgataacaagaagt

SEQ ID NO: 62501 - DNA, 25 bp, Probe sequence
agtctgtatatggcgataacaagaa

SEQ ID NO: 62502 - DNA, 25 bp, Probe sequence
aagtctgtatatggcgataacaaga

SEQ ID NO: 62503 - DNA, 25 bp, Probe sequence
ccacatcgcataatatcttactact

SEQ ID NO: 62504 - DNA, 25 bp, Probe sequence
tgcgatgtggtatcctattattgtt

SEQ ID NO: 62505 - DNA, 25 bp, Probe sequence
atgcgatgtggtatcctattattgt

SEQ ID NO: 62506 - DNA, 25 bp, Probe sequence
gcgatgtggtatcctattattgtta

SEQ ID NO: 62507 - DNA, 25 bp, Probe sequence
gtagtaagatattatgcgatgtggt

SEQ ID NO: 62508 - DNA, 25 bp, Probe sequence
tatgcgatgtggtatcctattattg

SEQ ID NO: 62509 - DNA, 25 bp, Probe sequence
tcttgttatcgccatatacagactt

SEQ ID NO: 62510 - DNA, 25 bp, Probe sequence
ttcttgttatcgccatatacagact

SEQ ID NO: 62511 - DNA, 25 bp, Probe sequence
acttcttgttatcgccatatacaga

SEQ ID NO: 62512 - DNA, 25 bp, Probe sequence
aagatattatgcgatgtggtatcct

SEQ ID NO: 62513 - DNA, 25 bp, Probe sequence
aagtttatagttgagacattcatgt

SEQ ID NO: 62514 - DNA, 25 bp, Probe sequence
ttcactcctgctttaaaatagggtt

SEQ ID NO: 62515 - DNA, 25 bp, Probe sequence
tttcactcctgctttaaaatagggt

SEQ ID NO: 62516 - DNA, 25 bp, Probe sequence
tcactcctgctttaaaatagggtta

SEQ ID NO: 62517 - DNA, 25 bp, Probe sequence
ttttcactcctgctttaaaataggg

SEQ ID NO: 62518 - DNA, 25 bp, Probe sequence
cactcctgctttaaaatagggttaa

SEQ ID NO: 62519 - DNA, 25 bp, Probe sequence
aaagtttatagttgagacattcatg

SEQ ID NO: 62520 - DNA, 25 bp, Probe sequence
actcctgctttaaaatagggttaaa

SEQ ID NO: 62521 - DNA, 25 bp, Probe sequence
ctcctgctttaaaatagggttaaaa

SEQ ID NO: 62522 - DNA, 25 bp, Probe sequence
acatgaatgtctcaactataaactt

SEQ ID NO: 62523 - DNA, 25 bp, Probe sequence
accctattttaaagcaggagtgaaa

SEQ ID NO: 62524 - DNA, 25 bp, Probe sequence
aaccctattttaaagcaggagtgaa

SEQ ID NO: 62525 - DNA, 25 bp, Probe sequence
taaccctattttaaagcaggagtga

SEQ ID NO: 62526 - DNA, 25 bp, Probe sequence
ccctattttaaagcaggagtgaaaa

SEQ ID NO: 62527 - DNA, 25 bp, Probe sequence
ttaaccctattttaaagcaggagtg

SEQ ID NO: 62528 - DNA, 25 bp, Probe sequence
catgaatgtctcaactataaacttt

SEQ ID NO: 62529 - DNA, 25 bp, Probe sequence
tttaaccctattttaaagcaggagt

SEQ ID NO: 62530 - DNA, 25 bp, Probe sequence
ttttaaccctattttaaagcaggag

SEQ ID NO: 62531 - DNA, 25 bp, Probe sequence
gcctcctgaaatatcatttgtaatc

SEQ ID NO: 62532 - DNA, 25 bp, Probe sequence
cctcctgaaatatcatttgtaatct

SEQ ID NO: 62533 - DNA, 25 bp, Probe sequence
tattgggcctcctgaaatatcattt

SEQ ID NO: 62534 - DNA, 25 bp, Probe sequence
gggcctcctgaaatatcatttgtaa

SEQ ID NO: 62535 - DNA, 25 bp, Probe sequence
ggcctcctgaaatatcatttgtaat

SEQ ID NO: 62536 - DNA, 25 bp, Probe sequence
attgggcctcctgaaatatcatttg

SEQ ID NO: 62537 - DNA, 25 bp, Probe sequence
tgggcctcctgaaatatcatttgta

SEQ ID NO: 62538 - DNA, 25 bp, Probe sequence
atattgggcctcctgaaatatcatt

SEQ ID NO: 62539 - DNA, 25 bp, Probe sequence
aatattgggcctcctgaaatatcat

SEQ ID NO: 62540 - DNA, 25 bp, Probe sequence
gattacaaatgatatttcaggaggc

SEQ ID NO: 62541 - DNA, 25 bp, Probe sequence
agattacaaatgatatttcaggagg

SEQ ID NO: 62542 - DNA, 25 bp, Probe sequence
aaatgatatttcaggaggcccaata

SEQ ID NO: 62543 - DNA, 25 bp, Probe sequence
ttacaaatgatatttcaggaggccc

SEQ ID NO: 62544 - DNA, 25 bp, Probe sequence
attacaaatgatatttcaggaggcc

SEQ ID NO: 62545 - DNA, 25 bp, Probe sequence
caaatgatatttcaggaggcccaat

SEQ ID NO: 62546 - DNA, 25 bp, Probe sequence
tacaaatgatatttcaggaggccca

SEQ ID NO: 62547 - DNA, 25 bp, Probe sequence
atgatatttcaggaggcccaatatt

SEQ ID NO: 62548 - DNA, 25 bp, Probe sequence
aatgatatttcaggaggcccaatat

SEQ ID NO: 62549 - DNA, 25 bp, Probe sequence
aaagtatgagagtgtgaaatgtcta

SEQ ID NO: 62550 - DNA, 25 bp, Probe sequence
taaagtatgagagtgtgaaatgtct

SEQ ID NO: 62551 - DNA, 25 bp, Probe sequence
agtatgagagtgtgaaatgtctatt

SEQ ID NO: 62552 - DNA, 25 bp, Probe sequence
aagtatgagagtgtgaaatgtctat

SEQ ID NO: 62553 - DNA, 25 bp, Probe sequence
tgagagtgtgaaatgtctattaaga

SEQ ID NO: 62554 - DNA, 25 bp, Probe sequence
ttaaagtatgagagtgtgaaatgtc

SEQ ID NO: 62555 - DNA, 25 bp, Probe sequence
tgagacgtttcagactggatataaa

SEQ ID NO: 62556 - DNA, 25 bp, Probe sequence
ttgagacgtttcagactggatataa

SEQ ID NO: 62557 - DNA, 25 bp, Probe sequence
attgagacgtttcagactggatata

SEQ ID NO: 62558 - DNA, 25 bp, Probe sequence
agacatttcacactctcatacttta

SEQ ID NO: 62559 - DNA, 25 bp, Probe sequence
tagacatttcacactctcatacttt

SEQ ID NO: 62560 - DNA, 25 bp, Probe sequence
atagacatttcacactctcatactt

SEQ ID NO: 62561 - DNA, 25 bp, Probe sequence
aatagacatttcacactctcatact

SEQ ID NO: 62562 - DNA, 25 bp, Probe sequence
tcttaatagacatttcacactctca

SEQ ID NO: 62563 - DNA, 25 bp, Probe sequence
gacatttcacactctcatactttaa

SEQ ID NO: 62564 - DNA, 25 bp, Probe sequence
ttatatccagtctgaaacgtctcaa

SEQ ID NO: 62565 - DNA, 25 bp, Probe sequence
tttatatccagtctgaaacgtctca

SEQ ID NO: 62566 - DNA, 25 bp, Probe sequence
acatatatttcttcaacaaggagct

SEQ ID NO: 62567 - DNA, 25 bp, Probe sequence
caaacaagtgagcatatatagggat

SEQ ID NO: 62568 - DNA, 25 bp, Probe sequence
tcaaacaagtgagcatatataggga

SEQ ID NO: 62569 - DNA, 25 bp, Probe sequence
aaacaagtgagcatatatagggatg

SEQ ID NO: 62570 - DNA, 25 bp, Probe sequence
aacaagtgagcatatatagggatgt

SEQ ID NO: 62571 - DNA, 25 bp, Probe sequence
ttcaaacaagtgagcatatataggg

SEQ ID NO: 62572 - DNA, 25 bp, Probe sequence
acaagtgagcatatatagggatgta

SEQ ID NO: 62573 - DNA, 25 bp, Probe sequence
caagtgagcatatatagggatgtat

SEQ ID NO: 62574 - DNA, 25 bp, Probe sequence
attcaaacaagtgagcatatatagg

SEQ ID NO: 62575 - DNA, 25 bp, Probe sequence
gtgagcatatatagggatgtatagt

SEQ ID NO: 62576 - DNA, 25 bp, Probe sequence
atccctatatatgctcacttgtttg

SEQ ID NO: 62577 - DNA, 25 bp, Probe sequence
tccctatatatgctcacttgtttga

SEQ ID NO: 62578 - DNA, 25 bp, Probe sequence
catccctatatatgctcacttgttt

SEQ ID NO: 62579 - DNA, 25 bp, Probe sequence
acatccctatatatgctcacttgtt

SEQ ID NO: 62580 - DNA, 25 bp, Probe sequence
ccctatatatgctcacttgtttgaa

SEQ ID NO: 62581 - DNA, 25 bp, Probe sequence
tacatccctatatatgctcacttgt

SEQ ID NO: 62582 - DNA, 25 bp, Probe sequence
atacatccctatatatgctcacttg

SEQ ID NO: 62583 - DNA, 25 bp, Probe sequence
cctatatatgctcacttgtttgaat

SEQ ID NO: 62584 - DNA, 25 bp, Probe sequence
actatacatccctatatatgctcac

SEQ ID NO: 62585 - DNA, 25 bp, Probe sequence
aaattctgtactcttcattgcgttt

SEQ ID NO: 62586 - DNA, 25 bp, Probe sequence
gttttaccccgtcacattatctttt

SEQ ID NO: 62587 - DNA, 25 bp, Probe sequence
ttttaccccgtcacattatctttta

SEQ ID NO: 62588 - DNA, 25 bp, Probe sequence
cgttttaccccgtcacattatcttt

SEQ ID NO: 62589 - DNA, 25 bp, Probe sequence
ttctgtactcttcattgcgttttac

SEQ ID NO: 62590 - DNA, 25 bp, Probe sequence
aattctgtactcttcattgcgtttt

SEQ ID NO: 62591 - DNA, 25 bp, Probe sequence
aaaattctgtactcttcattgcgtt

SEQ ID NO: 62592 - DNA, 25 bp, Probe sequence
tttaccccgtcacattatcttttaa

SEQ ID NO: 62593 - DNA, 25 bp, Probe sequence
attctgtactcttcattgcgtttta

SEQ ID NO: 62594 - DNA, 25 bp, Probe sequence
aaacgcaatgaagagtacagaattt

SEQ ID NO: 62595 - DNA, 25 bp, Probe sequence
aaaagataatgtgacggggtaaaac

SEQ ID NO: 62596 - DNA, 25 bp, Probe sequence
aaagataatgtgacggggtaaaacg

SEQ ID NO: 62597 - DNA, 25 bp, Probe sequence
taaaagataatgtgacggggtaaaa

SEQ ID NO: 62598 - DNA, 25 bp, Probe sequence
aacgcaatgaagagtacagaatttt

SEQ ID NO: 62599 - DNA, 25 bp, Probe sequence
aaaacgcaatgaagagtacagaatt

SEQ ID NO: 62600 - DNA, 25 bp, Probe sequence
gtaaaacgcaatgaagagtacagaa

SEQ ID NO: 62601 - DNA, 25 bp, Probe sequence
ttaaaagataatgtgacggggtaaa

SEQ ID NO: 62602 - DNA, 25 bp, Probe sequence
acgcaatgaagagtacagaatttta

SEQ ID NO: 62603 - DNA, 25 bp, Probe sequence
agcgttatacatagacacaagtatg

SEQ ID NO: 62604 - DNA, 25 bp, Probe sequence
aagcgttatacatagacacaagtat

SEQ ID NO: 62605 - DNA, 25 bp, Probe sequence
taaagcgttatacatagacacaagt

SEQ ID NO: 62606 - DNA, 25 bp, Probe sequence
aaagcgttatacatagacacaagta

SEQ ID NO: 62607 - DNA, 25 bp, Probe sequence
ataaagcgttatacatagacacaag

SEQ ID NO: 62608 - DNA, 25 bp, Probe sequence
aataaagcgttatacatagacacaa

SEQ ID NO: 62609 - DNA, 25 bp, Probe sequence
aaataaagcgttatacatagacaca

SEQ ID NO: 62610 - DNA, 25 bp, Probe sequence
caagtatgtcttttgtataacgctt

SEQ ID NO: 62611 - DNA, 25 bp, Probe sequence
gcgttatacatagacacaagtatgt

SEQ ID NO: 62612 - DNA, 25 bp, Probe sequence
catacttgtgtctatgtataacgct

SEQ ID NO: 62613 - DNA, 25 bp, Probe sequence
atacttgtgtctatgtataacgctt

SEQ ID NO: 62614 - DNA, 25 bp, Probe sequence
acttgtgtctatgtataacgcttta

SEQ ID NO: 62615 - DNA, 25 bp, Probe sequence
tacttgtgtctatgtataacgcttt

SEQ ID NO: 62616 - DNA, 25 bp, Probe sequence
cttgtgtctatgtataacgctttat

SEQ ID NO: 62617 - DNA, 25 bp, Probe sequence
tgtgtctatgtataacgctttattt

SEQ ID NO: 62618 - DNA, 25 bp, Probe sequence
ttgtgtctatgtataacgctttatt

SEQ ID NO: 62619 - DNA, 25 bp, Probe sequence
aagcgttatacaaaagacatacttg

SEQ ID NO: 62620 - DNA, 25 bp, Probe sequence
acatacttgtgtctatgtataacgc

SEQ ID NO: 62621 - DNA, 25 bp, Probe sequence
tttgacacccctaaaacatagaata

SEQ ID NO: 62622 - DNA, 25 bp, Probe sequence
ctcaatagtagagtagttgtatgaa

SEQ ID NO: 62623 - DNA, 25 bp, Probe sequence
ttgacacccctaaaacatagaatat

SEQ ID NO: 62624 - DNA, 25 bp, Probe sequence
ttttgacacccctaaaacatagaat

SEQ ID NO: 62625 - DNA, 25 bp, Probe sequence
tgacacccctaaaacatagaatatt

SEQ ID NO: 62626 - DNA, 25 bp, Probe sequence
actcaatagtagagtagttgtatga

SEQ ID NO: 62627 - DNA, 25 bp, Probe sequence
tcaatagtagagtagttgtatgaaa

SEQ ID NO: 62628 - DNA, 25 bp, Probe sequence
agttttgacacccctaaaacataga

SEQ ID NO: 62629 - DNA, 25 bp, Probe sequence
gttttgacacccctaaaacatagaa

SEQ ID NO: 62630 - DNA, 25 bp, Probe sequence
tattctatgttttaggggtgtcaaa

SEQ ID NO: 62631 - DNA, 25 bp, Probe sequence
ttcatacaactactctactattgag

SEQ ID NO: 62632 - DNA, 25 bp, Probe sequence
atattctatgttttaggggtgtcaa

SEQ ID NO: 62633 - DNA, 25 bp, Probe sequence
attctatgttttaggggtgtcaaaa

SEQ ID NO: 62634 - DNA, 25 bp, Probe sequence
aatattctatgttttaggggtgtca

SEQ ID NO: 62635 - DNA, 25 bp, Probe sequence
tcatacaactactctactattgagt

SEQ ID NO: 62636 - DNA, 25 bp, Probe sequence
tttcatacaactactctactattga

SEQ ID NO: 62637 - DNA, 25 bp, Probe sequence
tctatgttttaggggtgtcaaaact

SEQ ID NO: 62638 - DNA, 25 bp, Probe sequence
ctatgttttaggggtgtcaaaactt

SEQ ID NO: 62639 - DNA, 25 bp, Probe sequence
atggaattggttattgatcgacact

SEQ ID NO: 62640 - DNA, 25 bp, Probe sequence
tatggaattggttattgatcgacac

SEQ ID NO: 62641 - DNA, 25 bp, Probe sequence
gaattggttattgatcgacactgga

SEQ ID NO: 62642 - DNA, 25 bp, Probe sequence
aattggttattgatcgacactggac

SEQ ID NO: 62643 - DNA, 25 bp, Probe sequence
tggaattggttattgatcgacactg

SEQ ID NO: 62644 - DNA, 25 bp, Probe sequence
ttatggaattggttattgatcgaca

SEQ ID NO: 62645 - DNA, 25 bp, Probe sequence
ggaattggttattgatcgacactgg

SEQ ID NO: 62646 - DNA, 25 bp, Probe sequence
attggttattgatcgacactggact

SEQ ID NO: 62647 - DNA, 25 bp, Probe sequence
ttggttattgatcgacactggactt

SEQ ID NO: 62648 - DNA, 25 bp, Probe sequence
agtgtcgatcaataaccaattccat

SEQ ID NO: 62649 - DNA, 25 bp, Probe sequence
gtgtcgatcaataaccaattccata

SEQ ID NO: 62650 - DNA, 25 bp, Probe sequence
tccagtgtcgatcaataaccaattc

SEQ ID NO: 62651 - DNA, 25 bp, Probe sequence
gtccagtgtcgatcaataaccaatt

SEQ ID NO: 62652 - DNA, 25 bp, Probe sequence
tgtcgatcaataaccaattccataa

SEQ ID NO: 62653 - DNA, 25 bp, Probe sequence
cagtgtcgatcaataaccaattcca

SEQ ID NO: 62654 - DNA, 25 bp, Probe sequence
ccagtgtcgatcaataaccaattcc

SEQ ID NO: 62655 - DNA, 25 bp, Probe sequence
agtccagtgtcgatcaataaccaat

SEQ ID NO: 62656 - DNA, 25 bp, Probe sequence
aagtccagtgtcgatcaataaccaa

SEQ ID NO: 62657 - DNA, 25 bp, Probe sequence
tcattttcagttaaatattgccaga

SEQ ID NO: 62658 - DNA, 25 bp, Probe sequence
ttcagttaaatattgccagaaattt

SEQ ID NO: 62659 - DNA, 25 bp, Probe sequence
tttcagttaaatattgccagaaatt

SEQ ID NO: 62660 - DNA, 25 bp, Probe sequence
cattttcagttaaatattgccagaa

SEQ ID NO: 62661 - DNA, 25 bp, Probe sequence
gggacaatcattttcagttaaatat

SEQ ID NO: 62662 - DNA, 25 bp, Probe sequence
atcattttcagttaaatattgccag

SEQ ID NO: 62663 - DNA, 25 bp, Probe sequence
aatcattttcagttaaatattgcca

SEQ ID NO: 62664 - DNA, 25 bp, Probe sequence
ttttcagttaaatattgccagaaat

SEQ ID NO: 62665 - DNA, 25 bp, Probe sequence
attttcagttaaatattgccagaaa

SEQ ID NO: 62666 - DNA, 25 bp, Probe sequence
tctggcaatatttaactgaaaatga

SEQ ID NO: 62667 - DNA, 25 bp, Probe sequence
aaatttctggcaatatttaactgaa

SEQ ID NO: 62668 - DNA, 25 bp, Probe sequence
aatttctggcaatatttaactgaaa

SEQ ID NO: 62669 - DNA, 25 bp, Probe sequence
ttctggcaatatttaactgaaaatg

SEQ ID NO: 62670 - DNA, 25 bp, Probe sequence
atatttaactgaaaatgattgtccc

SEQ ID NO: 62671 - DNA, 25 bp, Probe sequence
ctggcaatatttaactgaaaatgat

SEQ ID NO: 62672 - DNA, 25 bp, Probe sequence
tggcaatatttaactgaaaatgatt

SEQ ID NO: 62673 - DNA, 25 bp, Probe sequence
ggcaatatttaactgaaaatgattg

SEQ ID NO: 62674 - DNA, 25 bp, Probe sequence
tttctggcaatatttaactgaaaat

SEQ ID NO: 62675 - DNA, 25 bp, Probe sequence
aatacatttatgctttacccattcg

SEQ ID NO: 62676 - DNA, 25 bp, Probe sequence
tgagtatctgaaatgagggatttac

SEQ ID NO: 62677 - DNA, 25 bp, Probe sequence
aatgagtatctgaaatgagggattt

SEQ ID NO: 62678 - DNA, 25 bp, Probe sequence
aataatgagtatctgaaatgaggga

SEQ ID NO: 62679 - DNA, 25 bp, Probe sequence
tagcattgtttgattgaaggataaa

SEQ ID NO: 62680 - DNA, 25 bp, Probe sequence
tttatagcattgtttgattgaagga

SEQ ID NO: 62681 - DNA, 25 bp, Probe sequence
taatgagtatctgaaatgagggatt

SEQ ID NO: 62682 - DNA, 25 bp, Probe sequence
atacatttatgctttacccattcga

SEQ ID NO: 62683 - DNA, 25 bp, Probe sequence
atagcattgtttgattgaaggataa

SEQ ID NO: 62684 - DNA, 25 bp, Probe sequence
cgaatgggtaaagcataaatgtatt

SEQ ID NO: 62685 - DNA, 25 bp, Probe sequence
gtaaatccctcatttcagatactca

SEQ ID NO: 62686 - DNA, 25 bp, Probe sequence
tccttcaatcaaacaatgctataaa

SEQ ID NO: 62687 - DNA, 25 bp, Probe sequence
tttatccttcaatcaaacaatgcta

SEQ ID NO: 62688 - DNA, 25 bp, Probe sequence
tccctcatttcagatactcattatt

SEQ ID NO: 62689 - DNA, 25 bp, Probe sequence
aaatccctcatttcagatactcatt

SEQ ID NO: 62690 - DNA, 25 bp, Probe sequence
aatccctcatttcagatactcatta

SEQ ID NO: 62691 - DNA, 25 bp, Probe sequence
tcgaatgggtaaagcataaatgtat

SEQ ID NO: 62692 - DNA, 25 bp, Probe sequence
atccttcaatcaaacaatgctataa

SEQ ID NO: 62693 - DNA, 25 bp, Probe sequence
agtattatcattgttcgtggaggag

SEQ ID NO: 62694 - DNA, 25 bp, Probe sequence
aagtattatcattgttcgtggagga

SEQ ID NO: 62695 - DNA, 25 bp, Probe sequence
gaagtattatcattgttcgtggagg

SEQ ID NO: 62696 - DNA, 25 bp, Probe sequence
agaagtattatcattgttcgtggag

SEQ ID NO: 62697 - DNA, 25 bp, Probe sequence
gagaagtattatcattgttcgtgga

SEQ ID NO: 62698 - DNA, 25 bp, Probe sequence
gtattatcattgttcgtggaggagc

SEQ ID NO: 62699 - DNA, 25 bp, Probe sequence
tgagaagtattatcattgttcgtgg

SEQ ID NO: 62700 - DNA, 25 bp, Probe sequence
tattatcattgttcgtggaggagcg

SEQ ID NO: 62701 - DNA, 25 bp, Probe sequence
aagtgctgtcttataattgagaagt

SEQ ID NO: 62702 - DNA, 25 bp, Probe sequence
tcctccacgaacaatgataatactt

SEQ ID NO: 62703 - DNA, 25 bp, Probe sequence
ctcctccacgaacaatgataatact

SEQ ID NO: 62704 - DNA, 25 bp, Probe sequence
cctccacgaacaatgataatacttc

SEQ ID NO: 62705 - DNA, 25 bp, Probe sequence
tccacgaacaatgataatacttctc

SEQ ID NO: 62706 - DNA, 25 bp, Probe sequence
ctccacgaacaatgataatacttct

SEQ ID NO: 62707 - DNA, 25 bp, Probe sequence
gctcctccacgaacaatgataatac

SEQ ID NO: 62708 - DNA, 25 bp, Probe sequence
ccacgaacaatgataatacttctca

SEQ ID NO: 62709 - DNA, 25 bp, Probe sequence
cgctcctccacgaacaatgataata

SEQ ID NO: 62710 - DNA, 25 bp, Probe sequence
acttctcaattataagacagcactt

SEQ ID NO: 62711 - DNA, 25 bp, Probe sequence
gacatgaattgatggacatctatcg

SEQ ID NO: 62712 - DNA, 25 bp, Probe sequence
tgagacatgaattgatggacatcta

SEQ ID NO: 62713 - DNA, 25 bp, Probe sequence
ctgagacatgaattgatggacatct

SEQ ID NO: 62714 - DNA, 25 bp, Probe sequence
ttactagagtcggtacaatcacagt

SEQ ID NO: 62715 - DNA, 25 bp, Probe sequence
tactagagtcggtacaatcacagtc

SEQ ID NO: 62716 - DNA, 25 bp, Probe sequence
tgaattgatggacatctatcgagtt

SEQ ID NO: 62717 - DNA, 25 bp, Probe sequence
agacatgaattgatggacatctatc

SEQ ID NO: 62718 - DNA, 25 bp, Probe sequence
gagacatgaattgatggacatctat

SEQ ID NO: 62719 - DNA, 25 bp, Probe sequence
acatgaattgatggacatctatcga

SEQ ID NO: 62720 - DNA, 25 bp, Probe sequence
cgatagatgtccatcaattcatgtc

SEQ ID NO: 62721 - DNA, 25 bp, Probe sequence
tagatgtccatcaattcatgtctca

SEQ ID NO: 62722 - DNA, 25 bp, Probe sequence
agatgtccatcaattcatgtctcag

SEQ ID NO: 62723 - DNA, 25 bp, Probe sequence
actgtgattgtaccgactctagtaa

SEQ ID NO: 62724 - DNA, 25 bp, Probe sequence
gactgtgattgtaccgactctagta

SEQ ID NO: 62725 - DNA, 25 bp, Probe sequence
aactcgatagatgtccatcaattca

SEQ ID NO: 62726 - DNA, 25 bp, Probe sequence
atagatgtccatcaattcatgtctc

SEQ ID NO: 62727 - DNA, 25 bp, Probe sequence
gatagatgtccatcaattcatgtct

SEQ ID NO: 62728 - DNA, 25 bp, Probe sequence
tcgatagatgtccatcaattcatgt

SEQ ID NO: 62729 - DNA, 25 bp, Probe sequence
taaatacataaaggaggttgcagtc

SEQ ID NO: 62730 - DNA, 25 bp, Probe sequence
aaatacataaaggaggttgcagtcg

SEQ ID NO: 62731 - DNA, 25 bp, Probe sequence
ttaaatacataaaggaggttgcagt

SEQ ID NO: 62732 - DNA, 25 bp, Probe sequence
tttaaatacataaaggaggttgcag

SEQ ID NO: 62733 - DNA, 25 bp, Probe sequence
aatacataaaggaggttgcagtcgc

SEQ ID NO: 62734 - DNA, 25 bp, Probe sequence
aaagccttttgctatggaaaatgat

SEQ ID NO: 62735 - DNA, 25 bp, Probe sequence
atgaaagccttttgctatggaaaat

SEQ ID NO: 62736 - DNA, 25 bp, Probe sequence
aatgaaagccttttgctatggaaaa

SEQ ID NO: 62737 - DNA, 25 bp, Probe sequence
aaatgaaagccttttgctatggaaa

SEQ ID NO: 62738 - DNA, 25 bp, Probe sequence
gactgcaacctcctttatgtattta

SEQ ID NO: 62739 - DNA, 25 bp, Probe sequence
cgactgcaacctcctttatgtattt

SEQ ID NO: 62740 - DNA, 25 bp, Probe sequence
actgcaacctcctttatgtatttaa

SEQ ID NO: 62741 - DNA, 25 bp, Probe sequence
ctgcaacctcctttatgtatttaaa

SEQ ID NO: 62742 - DNA, 25 bp, Probe sequence
gcgactgcaacctcctttatgtatt

SEQ ID NO: 62743 - DNA, 25 bp, Probe sequence
ttccatagcaaaaggctttcatttt

SEQ ID NO: 62744 - DNA, 25 bp, Probe sequence
tttccatagcaaaaggctttcattt

SEQ ID NO: 62745 - DNA, 25 bp, Probe sequence
ttttccatagcaaaaggctttcatt

SEQ ID NO: 62746 - DNA, 25 bp, Probe sequence
attttccatagcaaaaggctttcat

SEQ ID NO: 62747 - DNA, 25 bp, Probe sequence
agttgaatagcatctagccttatgg

SEQ ID NO: 62748 - DNA, 25 bp, Probe sequence
tagttgaatagcatctagccttatg

SEQ ID NO: 62749 - DNA, 25 bp, Probe sequence
atagttgaatagcatctagccttat

SEQ ID NO: 62750 - DNA, 25 bp, Probe sequence
atatagttgaatagcatctagcctt

SEQ ID NO: 62751 - DNA, 25 bp, Probe sequence
aatatagttgaatagcatctagcct

SEQ ID NO: 62752 - DNA, 25 bp, Probe sequence
tatagttgaatagcatctagcctta

SEQ ID NO: 62753 - DNA, 25 bp, Probe sequence
gcatctagccttatggcatcattaa

SEQ ID NO: 62754 - DNA, 25 bp, Probe sequence
aaatatagttgaatagcatctagcc

SEQ ID NO: 62755 - DNA, 25 bp, Probe sequence
gaatagcatctagccttatggcatc

SEQ ID NO: 62756 - DNA, 25 bp, Probe sequence
ccataaggctagatgctattcaact

SEQ ID NO: 62757 - DNA, 25 bp, Probe sequence
cataaggctagatgctattcaacta

SEQ ID NO: 62758 - DNA, 25 bp, Probe sequence
aggctagatgctattcaactatatt

SEQ ID NO: 62759 - DNA, 25 bp, Probe sequence
aaggctagatgctattcaactatat

SEQ ID NO: 62760 - DNA, 25 bp, Probe sequence
ataaggctagatgctattcaactat

SEQ ID NO: 62761 - DNA, 25 bp, Probe sequence
taaggctagatgctattcaactata

SEQ ID NO: 62762 - DNA, 25 bp, Probe sequence
ggctagatgctattcaactatattt

SEQ ID NO: 62763 - DNA, 25 bp, Probe sequence
ttaatgatgccataaggctagatgc

SEQ ID NO: 62764 - DNA, 25 bp, Probe sequence
gatgccataaggctagatgctattc

SEQ ID NO: 62765 - DNA, 25 bp, Probe sequence
caccgtgtaactccttaatctaaga

SEQ ID NO: 62766 - DNA, 25 bp, Probe sequence
tcaccgtgtaactccttaatctaag

SEQ ID NO: 62767 - DNA, 25 bp, Probe sequence
accgtgtaactccttaatctaagat

SEQ ID NO: 62768 - DNA, 25 bp, Probe sequence
ccgtgtaactccttaatctaagatt

SEQ ID NO: 62769 - DNA, 25 bp, Probe sequence
cgtgtaactccttaatctaagattg

SEQ ID NO: 62770 - DNA, 25 bp, Probe sequence
gtaactccttaatctaagattgagg

SEQ ID NO: 62771 - DNA, 25 bp, Probe sequence
gtgtaactccttaatctaagattga

SEQ ID NO: 62772 - DNA, 25 bp, Probe sequence
tgtaactccttaatctaagattgag

SEQ ID NO: 62773 - DNA, 25 bp, Probe sequence
taactccttaatctaagattgagga

SEQ ID NO: 62774 - DNA, 25 bp, Probe sequence
cttagattaaggagttacacggtga

SEQ ID NO: 62775 - DNA, 25 bp, Probe sequence
tcttagattaaggagttacacggtg

SEQ ID NO: 62776 - DNA, 25 bp, Probe sequence
atcttagattaaggagttacacggt

SEQ ID NO: 62777 - DNA, 25 bp, Probe sequence
aatcttagattaaggagttacacgg

SEQ ID NO: 62778 - DNA, 25 bp, Probe sequence
caatcttagattaaggagttacacg

SEQ ID NO: 62779 - DNA, 25 bp, Probe sequence
cctcaatcttagattaaggagttac

SEQ ID NO: 62780 - DNA, 25 bp, Probe sequence
tcaatcttagattaaggagttacac

SEQ ID NO: 62781 - DNA, 25 bp, Probe sequence
ctcaatcttagattaaggagttaca

SEQ ID NO: 62782 - DNA, 25 bp, Probe sequence
tcctcaatcttagattaaggagtta

SEQ ID NO: 62783 - DNA, 25 bp, Probe sequence
tacgatgtttggtggatatgatgaa

SEQ ID NO: 62784 - DNA, 25 bp, Probe sequence
acgatgtttggtggatatgatgaat

SEQ ID NO: 62785 - DNA, 25 bp, Probe sequence
cgatgtttggtggatatgatgaatt

SEQ ID NO: 62786 - DNA, 25 bp, Probe sequence
atgtacgatgtttggtggatatgat

SEQ ID NO: 62787 - DNA, 25 bp, Probe sequence
aagatgtacgatgtttggtggatat

SEQ ID NO: 62788 - DNA, 25 bp, Probe sequence
ataagatgtacgatgtttggtggat

SEQ ID NO: 62789 - DNA, 25 bp, Probe sequence
taagatgtacgatgtttggtggata

SEQ ID NO: 62790 - DNA, 25 bp, Probe sequence
ttgataagatgtacgatgtttggtg

SEQ ID NO: 62791 - DNA, 25 bp, Probe sequence
gtacgatgtttggtggatatgatga

SEQ ID NO: 62792 - DNA, 25 bp, Probe sequence
ttcatcatatccaccaaacatcgta

SEQ ID NO: 62793 - DNA, 25 bp, Probe sequence
attcatcatatccaccaaacatcgt

SEQ ID NO: 62794 - DNA, 25 bp, Probe sequence
aattcatcatatccaccaaacatcg

SEQ ID NO: 62795 - DNA, 25 bp, Probe sequence
atccaccaaacatcgtacatcttat

SEQ ID NO: 62796 - DNA, 25 bp, Probe sequence
atatccaccaaacatcgtacatctt

SEQ ID NO: 62797 - DNA, 25 bp, Probe sequence
atcatatccaccaaacatcgtacat

SEQ ID NO: 62798 - DNA, 25 bp, Probe sequence
tatccaccaaacatcgtacatctta

SEQ ID NO: 62799 - DNA, 25 bp, Probe sequence
caccaaacatcgtacatcttatcaa

SEQ ID NO: 62800 - DNA, 25 bp, Probe sequence
tccaccaaacatcgtacatcttatc

SEQ ID NO: 62801 - DNA, 25 bp, Probe sequence
tagggagtgggacagaaatgatatt

SEQ ID NO: 62802 - DNA, 25 bp, Probe sequence
ctagggagtgggacagaaatgatat

SEQ ID NO: 62803 - DNA, 25 bp, Probe sequence
agggagtgggacagaaatgatattt

SEQ ID NO: 62804 - DNA, 25 bp, Probe sequence
tctagggagtgggacagaaatgata

SEQ ID NO: 62805 - DNA, 25 bp, Probe sequence
tatagatcaatctagggagtgggac

SEQ ID NO: 62806 - DNA, 25 bp, Probe sequence
atctagggagtgggacagaaatgat

SEQ ID NO: 62807 - DNA, 25 bp, Probe sequence
aatctagggagtgggacagaaatga

SEQ ID NO: 62808 - DNA, 25 bp, Probe sequence
caatctagggagtgggacagaaatg

SEQ ID NO: 62809 - DNA, 25 bp, Probe sequence
tcaatctagggagtgggacagaaat

SEQ ID NO: 62810 - DNA, 25 bp, Probe sequence
atatcatttctgtcccactccctag

SEQ ID NO: 62811 - DNA, 25 bp, Probe sequence
tatcatttctgtcccactccctaga

SEQ ID NO: 62812 - DNA, 25 bp, Probe sequence
gtcccactccctagattgatctata

SEQ ID NO: 62813 - DNA, 25 bp, Probe sequence
atcatttctgtcccactccctagat

SEQ ID NO: 62814 - DNA, 25 bp, Probe sequence
tttctgtcccactccctagattgat

SEQ ID NO: 62815 - DNA, 25 bp, Probe sequence
atttctgtcccactccctagattga

SEQ ID NO: 62816 - DNA, 25 bp, Probe sequence
catttctgtcccactccctagattg

SEQ ID NO: 62817 - DNA, 25 bp, Probe sequence
tcatttctgtcccactccctagatt

SEQ ID NO: 62818 - DNA, 25 bp, Probe sequence
tgtcccactccctagattgatctat

SEQ ID NO: 62819 - DNA, 25 bp, Probe sequence
tcataagccacagctaatgtgtatt

SEQ ID NO: 62820 - DNA, 25 bp, Probe sequence
ttcataagccacagctaatgtgtat

SEQ ID NO: 62821 - DNA, 25 bp, Probe sequence
cataagccacagctaatgtgtattt

SEQ ID NO: 62822 - DNA, 25 bp, Probe sequence
aagccacagctaatgtgtatttaaa

SEQ ID NO: 62823 - DNA, 25 bp, Probe sequence
taagccacagctaatgtgtatttaa

SEQ ID NO: 62824 - DNA, 25 bp, Probe sequence
ataagccacagctaatgtgtattta

SEQ ID NO: 62825 - DNA, 25 bp, Probe sequence
agccacagctaatgtgtatttaaaa

SEQ ID NO: 62826 - DNA, 25 bp, Probe sequence
atacacattagctgtggcttatgaa

SEQ ID NO: 62827 - DNA, 25 bp, Probe sequence
aatacacattagctgtggcttatga

SEQ ID NO: 62828 - DNA, 25 bp, Probe sequence
aaatacacattagctgtggcttatg

SEQ ID NO: 62829 - DNA, 25 bp, Probe sequence
tttaaatacacattagctgtggctt

SEQ ID NO: 62830 - DNA, 25 bp, Probe sequence
ttaaatacacattagctgtggctta

SEQ ID NO: 62831 - DNA, 25 bp, Probe sequence
taaatacacattagctgtggcttat

SEQ ID NO: 62832 - DNA, 25 bp, Probe sequence
ttttaaatacacattagctgtggct

SEQ ID NO: 62833 - DNA, 25 bp, Probe sequence
gcctttgtctgcttatgttaaatgt

SEQ ID NO: 62834 - DNA, 25 bp, Probe sequence
ttgtctgcttatgttaaatgttcca

SEQ ID NO: 62835 - DNA, 25 bp, Probe sequence
tttgtctgcttatgttaaatgttcc

SEQ ID NO: 62836 - DNA, 25 bp, Probe sequence
cctttgtctgcttatgttaaatgtt

SEQ ID NO: 62837 - DNA, 25 bp, Probe sequence
tgtgaaatgatacagtgacagatgt

SEQ ID NO: 62838 - DNA, 25 bp, Probe sequence
gtgaaatgatacagtgacagatgtt

SEQ ID NO: 62839 - DNA, 25 bp, Probe sequence
ttgtgaaatgatacagtgacagatg

SEQ ID NO: 62840 - DNA, 25 bp, Probe sequence
tgtctgcttatgttaaatgttccag

SEQ ID NO: 62841 - DNA, 25 bp, Probe sequence
tgaaatgatacagtgacagatgttt

SEQ ID NO: 62842 - DNA, 25 bp, Probe sequence
acatttaacataagcagacaaaggc

SEQ ID NO: 62843 - DNA, 25 bp, Probe sequence
tggaacatttaacataagcagacaa

SEQ ID NO: 62844 - DNA, 25 bp, Probe sequence
aacatttaacataagcagacaaagg

SEQ ID NO: 62845 - DNA, 25 bp, Probe sequence
ggaacatttaacataagcagacaaa

SEQ ID NO: 62846 - DNA, 25 bp, Probe sequence
acatctgtcactgtatcatttcaca

SEQ ID NO: 62847 - DNA, 25 bp, Probe sequence
catctgtcactgtatcatttcacaa

SEQ ID NO: 62848 - DNA, 25 bp, Probe sequence
aacatctgtcactgtatcatttcac

SEQ ID NO: 62849 - DNA, 25 bp, Probe sequence
ctggaacatttaacataagcagaca

SEQ ID NO: 62850 - DNA, 25 bp, Probe sequence
atctgtcactgtatcatttcacaaa

SEQ ID NO: 62851 - DNA, 25 bp, Probe sequence
tttattaagcaacacagggaggaat

SEQ ID NO: 62852 - DNA, 25 bp, Probe sequence
ttattaagcaacacagggaggaatc

SEQ ID NO: 62853 - DNA, 25 bp, Probe sequence
tattaagcaacacagggaggaatca

SEQ ID NO: 62854 - DNA, 25 bp, Probe sequence
ccgtcttatatagaaatggtgccaa

SEQ ID NO: 62855 - DNA, 25 bp, Probe sequence
cgtcttatatagaaatggtgccaat

SEQ ID NO: 62856 - DNA, 25 bp, Probe sequence
ttaaatgatgcgtaaactcttatcg

SEQ ID NO: 62857 - DNA, 25 bp, Probe sequence
aatggtgccaattcacataaagttt

SEQ ID NO: 62858 - DNA, 25 bp, Probe sequence
aaatggtgccaattcacataaagtt

SEQ ID NO: 62859 - DNA, 25 bp, Probe sequence
agaaatggtgccaattcacataaag

SEQ ID NO: 62860 - DNA, 25 bp, Probe sequence
attcctccctgtgttgcttaataaa

SEQ ID NO: 62861 - DNA, 25 bp, Probe sequence
gattcctccctgtgttgcttaataa

SEQ ID NO: 62862 - DNA, 25 bp, Probe sequence
tgattcctccctgtgttgcttaata

SEQ ID NO: 62863 - DNA, 25 bp, Probe sequence
ttggcaccatttctatataagacgg

SEQ ID NO: 62864 - DNA, 25 bp, Probe sequence
attggcaccatttctatataagacg

SEQ ID NO: 62865 - DNA, 25 bp, Probe sequence
cgataagagtttacgcatcatttaa

SEQ ID NO: 62866 - DNA, 25 bp, Probe sequence
aactttatgtgaattggcaccattt

SEQ ID NO: 62867 - DNA, 25 bp, Probe sequence
aaactttatgtgaattggcaccatt

SEQ ID NO: 62868 - DNA, 25 bp, Probe sequence
ctttatgtgaattggcaccatttct

SEQ ID NO: 62869 - DNA, 25 bp, Probe sequence
aggaatgagatgctattacggataa

SEQ ID NO: 62870 - DNA, 25 bp, Probe sequence
ttaggaatgagatgctattacggat

SEQ ID NO: 62871 - DNA, 25 bp, Probe sequence
taggaatgagatgctattacggata

SEQ ID NO: 62872 - DNA, 25 bp, Probe sequence
tttaggaatgagatgctattacgga

SEQ ID NO: 62873 - DNA, 25 bp, Probe sequence
tgcgtgctactcatttattcttatt

SEQ ID NO: 62874 - DNA, 25 bp, Probe sequence
atcatattaatggctcagtaacgtg

SEQ ID NO: 62875 - DNA, 25 bp, Probe sequence
cacatggatagtgactactacatca

SEQ ID NO: 62876 - DNA, 25 bp, Probe sequence
tattaatggctcagtaacgtgatgt

SEQ ID NO: 62877 - DNA, 25 bp, Probe sequence
tcatattaatggctcagtaacgtga

SEQ ID NO: 62878 - DNA, 25 bp, Probe sequence
atccgtaatagcatctcattcctaa

SEQ ID NO: 62879 - DNA, 25 bp, Probe sequence
ttatccgtaatagcatctcattcct

SEQ ID NO: 62880 - DNA, 25 bp, Probe sequence
tatccgtaatagcatctcattccta

SEQ ID NO: 62881 - DNA, 25 bp, Probe sequence
tccgtaatagcatctcattcctaaa

SEQ ID NO: 62882 - DNA, 25 bp, Probe sequence
aataagaataaatgagtagcacgca

SEQ ID NO: 62883 - DNA, 25 bp, Probe sequence
cacgttactgagccattaatatgat

SEQ ID NO: 62884 - DNA, 25 bp, Probe sequence
tgatgtagtagtcactatccatgtg

SEQ ID NO: 62885 - DNA, 25 bp, Probe sequence
tcacgttactgagccattaatatga

SEQ ID NO: 62886 - DNA, 25 bp, Probe sequence
acatcacgttactgagccattaata

SEQ ID NO: 62887 - DNA, 25 bp, Probe sequence
ttattcctaatacactgcacatgcc

SEQ ID NO: 62888 - DNA, 25 bp, Probe sequence
cttagtcggtataaccatcggctag

SEQ ID NO: 62889 - DNA, 25 bp, Probe sequence
atgccacttagtcggtataaccatc

SEQ ID NO: 62890 - DNA, 25 bp, Probe sequence
tattcctaatacactgcacatgcca

SEQ ID NO: 62891 - DNA, 25 bp, Probe sequence
acttagtcggtataaccatcggcta

SEQ ID NO: 62892 - DNA, 25 bp, Probe sequence
ctaatacactgcacatgccacttag

SEQ ID NO: 62893 - DNA, 25 bp, Probe sequence
tgcatatgattaacgagatactgaa

SEQ ID NO: 62894 - DNA, 25 bp, Probe sequence
ttgcatatgattaacgagatactga

SEQ ID NO: 62895 - DNA, 25 bp, Probe sequence
taatacactgcacatgccacttagt

SEQ ID NO: 62896 - DNA, 25 bp, Probe sequence
ggcatgtgcagtgtattaggaataa

SEQ ID NO: 62897 - DNA, 25 bp, Probe sequence
ctagccgatggttataccgactaag

SEQ ID NO: 62898 - DNA, 25 bp, Probe sequence
gatggttataccgactaagtggcat

SEQ ID NO: 62899 - DNA, 25 bp, Probe sequence
tggcatgtgcagtgtattaggaata

SEQ ID NO: 62900 - DNA, 25 bp, Probe sequence
tagccgatggttataccgactaagt

SEQ ID NO: 62901 - DNA, 25 bp, Probe sequence
ctaagtggcatgtgcagtgtattag

SEQ ID NO: 62902 - DNA, 25 bp, Probe sequence
tcagtatctcgttaatcatatgcaa

SEQ ID NO: 62903 - DNA, 25 bp, Probe sequence
ttcagtatctcgttaatcatatgca

SEQ ID NO: 62904 - DNA, 25 bp, Probe sequence
actaagtggcatgtgcagtgtatta

SEQ ID NO: 62905 - DNA, 25 bp, Probe sequence
aagagagcggattagagttgtactt

SEQ ID NO: 62906 - DNA, 25 bp, Probe sequence
ttaaagagagcggattagagttgta

SEQ ID NO: 62907 - DNA, 25 bp, Probe sequence
taaagagagcggattagagttgtac

SEQ ID NO: 62908 - DNA, 25 bp, Probe sequence
actgaacgcattattacaaagtctt

SEQ ID NO: 62909 - DNA, 25 bp, Probe sequence
aactgaacgcattattacaaagtct

SEQ ID NO: 62910 - DNA, 25 bp, Probe sequence
gcggattagagttgtactttagagt

SEQ ID NO: 62911 - DNA, 25 bp, Probe sequence
agcggattagagttgtactttagag

SEQ ID NO: 62912 - DNA, 25 bp, Probe sequence
gagcggattagagttgtactttaga

SEQ ID NO: 62913 - DNA, 25 bp, Probe sequence
agagcggattagagttgtactttag

SEQ ID NO: 62914 - DNA, 25 bp, Probe sequence
aagtacaactctaatccgctctctt

SEQ ID NO: 62915 - DNA, 25 bp, Probe sequence
tacaactctaatccgctctctttaa

SEQ ID NO: 62916 - DNA, 25 bp, Probe sequence
gtacaactctaatccgctctcttta

SEQ ID NO: 62917 - DNA, 25 bp, Probe sequence
agactttgtaataatgcgttcagtt

SEQ ID NO: 62918 - DNA, 25 bp, Probe sequence
aagactttgtaataatgcgttcagt

SEQ ID NO: 62919 - DNA, 25 bp, Probe sequence
taaagtacaactctaatccgctctc

SEQ ID NO: 62920 - DNA, 25 bp, Probe sequence
ctaaagtacaactctaatccgctct

SEQ ID NO: 62921 - DNA, 25 bp, Probe sequence
tctaaagtacaactctaatccgctc

SEQ ID NO: 62922 - DNA, 25 bp, Probe sequence
ctctaaagtacaactctaatccgct

SEQ ID NO: 62923 - DNA, 25 bp, Probe sequence
taatacagtatccatgagatgttca

SEQ ID NO: 62924 - DNA, 25 bp, Probe sequence
atacagtatccatgagatgttcatc

SEQ ID NO: 62925 - DNA, 25 bp, Probe sequence
acagtatccatgagatgttcatcta

SEQ ID NO: 62926 - DNA, 25 bp, Probe sequence
tacagtatccatgagatgttcatct

SEQ ID NO: 62927 - DNA, 25 bp, Probe sequence
aatacagtatccatgagatgttcat

SEQ ID NO: 62928 - DNA, 25 bp, Probe sequence
ttaatacagtatccatgagatgttc

SEQ ID NO: 62929 - DNA, 25 bp, Probe sequence
agtaaatttcatcaagtaggaggaa

SEQ ID NO: 62930 - DNA, 25 bp, Probe sequence
cagtatccatgagatgttcatctat

SEQ ID NO: 62931 - DNA, 25 bp, Probe sequence
tagtaaatttcatcaagtaggagga

SEQ ID NO: 62932 - DNA, 25 bp, Probe sequence
tgaacatctcatggatactgtatta

SEQ ID NO: 62933 - DNA, 25 bp, Probe sequence
gatgaacatctcatggatactgtat

SEQ ID NO: 62934 - DNA, 25 bp, Probe sequence
agatgaacatctcatggatactgta

SEQ ID NO: 62935 - DNA, 25 bp, Probe sequence
tagatgaacatctcatggatactgt

SEQ ID NO: 62936 - DNA, 25 bp, Probe sequence
atgaacatctcatggatactgtatt

SEQ ID NO: 62937 - DNA, 25 bp, Probe sequence
gaacatctcatggatactgtattaa

SEQ ID NO: 62938 - DNA, 25 bp, Probe sequence
atagatgaacatctcatggatactg

SEQ ID NO: 62939 - DNA, 25 bp, Probe sequence
ttcctcctacttgatgaaatttact

SEQ ID NO: 62940 - DNA, 25 bp, Probe sequence
tcctcctacttgatgaaatttacta

SEQ ID NO: 62941 - DNA, 25 bp, Probe sequence
tgtcatgtcattgttataatatggt

SEQ ID NO: 62942 - DNA, 25 bp, Probe sequence
cttacgcacgccgttgtaaatatat

SEQ ID NO: 62943 - DNA, 25 bp, Probe sequence
gtcatgtcattgttataatatggtt

SEQ ID NO: 62944 - DNA, 25 bp, Probe sequence
atgtcatgtcattgttataatatgg

SEQ ID NO: 62945 - DNA, 25 bp, Probe sequence
acttacgcacgccgttgtaaatata

SEQ ID NO: 62946 - DNA, 25 bp, Probe sequence
ttacgcacgccgttgtaaatatatt

SEQ ID NO: 62947 - DNA, 25 bp, Probe sequence
aacttacgcacgccgttgtaaatat

SEQ ID NO: 62948 - DNA, 25 bp, Probe sequence
aaacttacgcacgccgttgtaaata

SEQ ID NO: 62949 - DNA, 25 bp, Probe sequence
ttttataagatgtcatgtcattgtt

SEQ ID NO: 62950 - DNA, 25 bp, Probe sequence
accatattataacaatgacatgaca

SEQ ID NO: 62951 - DNA, 25 bp, Probe sequence
atatatttacaacggcgtgcgtaag

SEQ ID NO: 62952 - DNA, 25 bp, Probe sequence
aaccatattataacaatgacatgac

SEQ ID NO: 62953 - DNA, 25 bp, Probe sequence
ccatattataacaatgacatgacat

SEQ ID NO: 62954 - DNA, 25 bp, Probe sequence
tatatttacaacggcgtgcgtaagt

SEQ ID NO: 62955 - DNA, 25 bp, Probe sequence
aatatatttacaacggcgtgcgtaa

SEQ ID NO: 62956 - DNA, 25 bp, Probe sequence
atatttacaacggcgtgcgtaagtt

SEQ ID NO: 62957 - DNA, 25 bp, Probe sequence
tatttacaacggcgtgcgtaagttt

SEQ ID NO: 62958 - DNA, 25 bp, Probe sequence
aacaatgacatgacatcttataaaa

SEQ ID NO: 62959 - DNA, 25 bp, Probe sequence
gttgttaagccattcttgacttccg

SEQ ID NO: 62960 - DNA, 25 bp, Probe sequence
cgttgttaagccattcttgacttcc

SEQ ID NO: 62961 - DNA, 25 bp, Probe sequence
gcgttgttaagccattcttgacttc

SEQ ID NO: 62962 - DNA, 25 bp, Probe sequence
agcgttgttaagccattcttgactt

SEQ ID NO: 62963 - DNA, 25 bp, Probe sequence
cagcgttgttaagccattcttgact

SEQ ID NO: 62964 - DNA, 25 bp, Probe sequence
aactaaatcggattgatagataagc

SEQ ID NO: 62965 - DNA, 25 bp, Probe sequence
actaaatcggattgatagataagct

SEQ ID NO: 62966 - DNA, 25 bp, Probe sequence
acagcgttgttaagccattcttgac

SEQ ID NO: 62967 - DNA, 25 bp, Probe sequence
ttgttaagccattcttgacttccgg

SEQ ID NO: 62968 - DNA, 25 bp, Probe sequence
ggaagtcaagaatggcttaacaacg

SEQ ID NO: 62969 - DNA, 25 bp, Probe sequence
cggaagtcaagaatggcttaacaac

SEQ ID NO: 62970 - DNA, 25 bp, Probe sequence
gaagtcaagaatggcttaacaacgc

SEQ ID NO: 62971 - DNA, 25 bp, Probe sequence
aagtcaagaatggcttaacaacgct

SEQ ID NO: 62972 - DNA, 25 bp, Probe sequence
agtcaagaatggcttaacaacgctg

SEQ ID NO: 62973 - DNA, 25 bp, Probe sequence
gcttatctatcaatccgatttagtt

SEQ ID NO: 62974 - DNA, 25 bp, Probe sequence
agcttatctatcaatccgatttagt

SEQ ID NO: 62975 - DNA, 25 bp, Probe sequence
gtcaagaatggcttaacaacgctgt

SEQ ID NO: 62976 - DNA, 25 bp, Probe sequence
ccggaagtcaagaatggcttaacaa

SEQ ID NO: 62977 - DNA, 25 bp, Probe sequence
atatgacaataaggagactacacgc

SEQ ID NO: 62978 - DNA, 25 bp, Probe sequence
gatatgacaataaggagactacacg

SEQ ID NO: 62979 - DNA, 25 bp, Probe sequence
agatatgacaataaggagactacac

SEQ ID NO: 62980 - DNA, 25 bp, Probe sequence
cgtcgggaattaagtaactacaata

SEQ ID NO: 62981 - DNA, 25 bp, Probe sequence
aagatatgacaataaggagactaca

SEQ ID NO: 62982 - DNA, 25 bp, Probe sequence
acgtcgggaattaagtaactacaat

SEQ ID NO: 62983 - DNA, 25 bp, Probe sequence
aacgtcgggaattaagtaactacaa

SEQ ID NO: 62984 - DNA, 25 bp, Probe sequence
gagaacgtcgggaattaagtaacta

SEQ ID NO: 62985 - DNA, 25 bp, Probe sequence
agaacgtcgggaattaagtaactac

SEQ ID NO: 62986 - DNA, 25 bp, Probe sequence
gcgtgtagtctccttattgtcatat

SEQ ID NO: 62987 - DNA, 25 bp, Probe sequence
cgtgtagtctccttattgtcatatc

SEQ ID NO: 62988 - DNA, 25 bp, Probe sequence
gtgtagtctccttattgtcatatct

SEQ ID NO: 62989 - DNA, 25 bp, Probe sequence
tattgtagttacttaattcccgacg

SEQ ID NO: 62990 - DNA, 25 bp, Probe sequence
tgtagtctccttattgtcatatctt

SEQ ID NO: 62991 - DNA, 25 bp, Probe sequence
tagttacttaattcccgacgttctc

SEQ ID NO: 62992 - DNA, 25 bp, Probe sequence
ttgtagttacttaattcccgacgtt

SEQ ID NO: 62993 - DNA, 25 bp, Probe sequence
attgtagttacttaattcccgacgt

SEQ ID NO: 62994 - DNA, 25 bp, Probe sequence
gtagttacttaattcccgacgttct

SEQ ID NO: 62995 - DNA, 25 bp, Probe sequence
gctgaaggtcaccgaaatgattata

SEQ ID NO: 62996 - DNA, 25 bp, Probe sequence
ctgaaggtcaccgaaatgattataa

SEQ ID NO: 62997 - DNA, 25 bp, Probe sequence
cgagctaaagttcactgaaatgatt

SEQ ID NO: 62998 - DNA, 25 bp, Probe sequence
tatcgagctaaagttcactgaaatg

SEQ ID NO: 62999 - DNA, 25 bp, Probe sequence
aaattatcgagctaaagttcactga

SEQ ID NO: 63000 - DNA, 25 bp, Probe sequence
tcgagctaaagttcactgaaatgat

SEQ ID NO: 63001 - DNA, 25 bp, Probe sequence
atcgagctaaagttcactgaaatga

SEQ ID NO: 63002 - DNA, 25 bp, Probe sequence
ttatcgagctaaagttcactgaaat

SEQ ID NO: 63003 - DNA, 25 bp, Probe sequence
attatcgagctaaagttcactgaaa

SEQ ID NO: 63004 - DNA, 25 bp, Probe sequence
tataatcatttcggtgaccttcagc

SEQ ID NO: 63005 - DNA, 25 bp, Probe sequence
ttataatcatttcggtgaccttcag

SEQ ID NO: 63006 - DNA, 25 bp, Probe sequence
catttcagtgaactttagctcgata

SEQ ID NO: 63007 - DNA, 25 bp, Probe sequence
aatcatttcagtgaactttagctcg

SEQ ID NO: 63008 - DNA, 25 bp, Probe sequence
tcagtgaactttagctcgataattt

SEQ ID NO: 63009 - DNA, 25 bp, Probe sequence
tcatttcagtgaactttagctcgat

SEQ ID NO: 63010 - DNA, 25 bp, Probe sequence
atcatttcagtgaactttagctcga

SEQ ID NO: 63011 - DNA, 25 bp, Probe sequence
ttcagtgaactttagctcgataatt

SEQ ID NO: 63012 - DNA, 25 bp, Probe sequence
tttcagtgaactttagctcgataat

SEQ ID NO: 63013 - DNA, 25 bp, Probe sequence
ttatatggtatgatgacattggtga

SEQ ID NO: 63014 - DNA, 25 bp, Probe sequence
gttatatggtatgatgacattggtg

SEQ ID NO: 63015 - DNA, 25 bp, Probe sequence
agttatatggtatgatgacattggt

SEQ ID NO: 63016 - DNA, 25 bp, Probe sequence
atggtatgatgacattggtgatata

SEQ ID NO: 63017 - DNA, 25 bp, Probe sequence
tatggtatgatgacattggtgatat

SEQ ID NO: 63018 - DNA, 25 bp, Probe sequence
atatggtatgatgacattggtgata

SEQ ID NO: 63019 - DNA, 25 bp, Probe sequence
tatatggtatgatgacattggtgat

SEQ ID NO: 63020 - DNA, 25 bp, Probe sequence
tggtatgatgacattggtgatatat

SEQ ID NO: 63021 - DNA, 25 bp, Probe sequence
aagttatatggtatgatgacattgg

SEQ ID NO: 63022 - DNA, 25 bp, Probe sequence
aaagttatatggtatgatgacattg

SEQ ID NO: 63023 - DNA, 25 bp, Probe sequence
caccaatgtcatcataccatataac

SEQ ID NO: 63024 - DNA, 25 bp, Probe sequence
tcaccaatgtcatcataccatataa

SEQ ID NO: 63025 - DNA, 25 bp, Probe sequence
accaatgtcatcataccatataact

SEQ ID NO: 63026 - DNA, 25 bp, Probe sequence
atcaccaatgtcatcataccatata

SEQ ID NO: 63027 - DNA, 25 bp, Probe sequence
tatcaccaatgtcatcataccatat

SEQ ID NO: 63028 - DNA, 25 bp, Probe sequence
atatcaccaatgtcatcataccata

SEQ ID NO: 63029 - DNA, 25 bp, Probe sequence
tatatcaccaatgtcatcataccat

SEQ ID NO: 63030 - DNA, 25 bp, Probe sequence
atatatcaccaatgtcatcatacca

SEQ ID NO: 63031 - DNA, 25 bp, Probe sequence
ccaatgtcatcataccatataactt

SEQ ID NO: 63032 - DNA, 25 bp, Probe sequence
caatgtcatcataccatataacttt

SEQ ID NO: 63033 - DNA, 25 bp, Probe sequence
acgaacgtgtcatagaagtaatcat

SEQ ID NO: 63034 - DNA, 25 bp, Probe sequence
aacgaacgtgtcatagaagtaatca

SEQ ID NO: 63035 - DNA, 25 bp, Probe sequence
cgaacgtgtcatagaagtaatcatt

SEQ ID NO: 63036 - DNA, 25 bp, Probe sequence
tcattgtcatagataggtgaagaat

SEQ ID NO: 63037 - DNA, 25 bp, Probe sequence
aactgagcctttcattgtcatagat

SEQ ID NO: 63038 - DNA, 25 bp, Probe sequence
aaactgagcctttcattgtcataga

SEQ ID NO: 63039 - DNA, 25 bp, Probe sequence
actgagcctttcattgtcatagata

SEQ ID NO: 63040 - DNA, 25 bp, Probe sequence
gtataaactgagcctttcattgtca

SEQ ID NO: 63041 - DNA, 25 bp, Probe sequence
ctgagcctttcattgtcatagatag

SEQ ID NO: 63042 - DNA, 25 bp, Probe sequence
tgattacttctatgacacgttcgtt

SEQ ID NO: 63043 - DNA, 25 bp, Probe sequence
atgattacttctatgacacgttcgt

SEQ ID NO: 63044 - DNA, 25 bp, Probe sequence
aatgattacttctatgacacgttcg

SEQ ID NO: 63045 - DNA, 25 bp, Probe sequence
attcttcacctatctatgacaatga

SEQ ID NO: 63046 - DNA, 25 bp, Probe sequence
atctatgacaatgaaaggctcagtt

SEQ ID NO: 63047 - DNA, 25 bp, Probe sequence
tctatgacaatgaaaggctcagttt

SEQ ID NO: 63048 - DNA, 25 bp, Probe sequence
tatctatgacaatgaaaggctcagt

SEQ ID NO: 63049 - DNA, 25 bp, Probe sequence
tgacaatgaaaggctcagtttatac

SEQ ID NO: 63050 - DNA, 25 bp, Probe sequence
gacaatgaaaggctcagtttatact

SEQ ID NO: 63051 - DNA, 25 bp, Probe sequence
aagcatggacctgtaatctagttag

SEQ ID NO: 63052 - DNA, 25 bp, Probe sequence
caagcatggacctgtaatctagtta

SEQ ID NO: 63053 - DNA, 25 bp, Probe sequence
aattcaagcatggacctgtaatcta

SEQ ID NO: 63054 - DNA, 25 bp, Probe sequence
attcaagcatggacctgtaatctag

SEQ ID NO: 63055 - DNA, 25 bp, Probe sequence
caattcaagcatggacctgtaatct

SEQ ID NO: 63056 - DNA, 25 bp, Probe sequence
tcaagcatggacctgtaatctagtt

SEQ ID NO: 63057 - DNA, 25 bp, Probe sequence
ttcaagcatggacctgtaatctagt

SEQ ID NO: 63058 - DNA, 25 bp, Probe sequence
agcatggacctgtaatctagttagg

SEQ ID NO: 63059 - DNA, 25 bp, Probe sequence
gcaattcaagcatggacctgtaatc

SEQ ID NO: 63060 - DNA, 25 bp, Probe sequence
tagattacaggtccatgcttgaatt

SEQ ID NO: 63061 - DNA, 25 bp, Probe sequence
taactagattacaggtccatgcttg

SEQ ID NO: 63062 - DNA, 25 bp, Probe sequence
ctaactagattacaggtccatgctt

SEQ ID NO: 63063 - DNA, 25 bp, Probe sequence
ctagattacaggtccatgcttgaat

SEQ ID NO: 63064 - DNA, 25 bp, Probe sequence
agattacaggtccatgcttgaattg

SEQ ID NO: 63065 - DNA, 25 bp, Probe sequence
actagattacaggtccatgcttgaa

SEQ ID NO: 63066 - DNA, 25 bp, Probe sequence
aactagattacaggtccatgcttga

SEQ ID NO: 63067 - DNA, 25 bp, Probe sequence
cctaactagattacaggtccatgct

SEQ ID NO: 63068 - DNA, 25 bp, Probe sequence
gattacaggtccatgcttgaattgc

SEQ ID NO: 63069 - DNA, 25 bp, Probe sequence
gttatgcttgacttgcgaatgtata

SEQ ID NO: 63070 - DNA, 25 bp, Probe sequence
atatgttatgcttgacttgcgaatg

SEQ ID NO: 63071 - DNA, 25 bp, Probe sequence
aatatgttatgcttgacttgcgaat

SEQ ID NO: 63072 - DNA, 25 bp, Probe sequence
ttatgcttgacttgcgaatgtatat

SEQ ID NO: 63073 - DNA, 25 bp, Probe sequence
tgttatgcttgacttgcgaatgtat

SEQ ID NO: 63074 - DNA, 25 bp, Probe sequence
atgttatgcttgacttgcgaatgta

SEQ ID NO: 63075 - DNA, 25 bp, Probe sequence
tatgttatgcttgacttgcgaatgt

SEQ ID NO: 63076 - DNA, 25 bp, Probe sequence
tgcttgacttgcgaatgtatatatt

SEQ ID NO: 63077 - DNA, 25 bp, Probe sequence
atgcttgacttgcgaatgtatatat

SEQ ID NO: 63078 - DNA, 25 bp, Probe sequence
tatacattcgcaagtcaagcataac

SEQ ID NO: 63079 - DNA, 25 bp, Probe sequence
attcgcaagtcaagcataacatatt

SEQ ID NO: 63080 - DNA, 25 bp, Probe sequence
cattcgcaagtcaagcataacatat

SEQ ID NO: 63081 - DNA, 25 bp, Probe sequence
atatacattcgcaagtcaagcataa

SEQ ID NO: 63082 - DNA, 25 bp, Probe sequence
acattcgcaagtcaagcataacata

SEQ ID NO: 63083 - DNA, 25 bp, Probe sequence
tacattcgcaagtcaagcataacat

SEQ ID NO: 63084 - DNA, 25 bp, Probe sequence
atacattcgcaagtcaagcataaca

SEQ ID NO: 63085 - DNA, 25 bp, Probe sequence
aatatatacattcgcaagtcaagca

SEQ ID NO: 63086 - DNA, 25 bp, Probe sequence
atatatacattcgcaagtcaagcat

SEQ ID NO: 63087 - DNA, 25 bp, Probe sequence
agtaatatgtgcttggatatgtggc

SEQ ID NO: 63088 - DNA, 25 bp, Probe sequence
tagtaatatgtgcttggatatgtgg

SEQ ID NO: 63089 - DNA, 25 bp, Probe sequence
acaaatagcacataactcaacgatt

SEQ ID NO: 63090 - DNA, 25 bp, Probe sequence
tacaaatagcacataactcaacgat

SEQ ID NO: 63091 - DNA, 25 bp, Probe sequence
atacaaatagcacataactcaacga

SEQ ID NO: 63092 - DNA, 25 bp, Probe sequence
taactttcccatcagtccaatttga

SEQ ID NO: 63093 - DNA, 25 bp, Probe sequence
ataactttcccatcagtccaatttg

SEQ ID NO: 63094 - DNA, 25 bp, Probe sequence
aataactttcccatcagtccaattt

SEQ ID NO: 63095 - DNA, 25 bp, Probe sequence
aaataactttcccatcagtccaatt

SEQ ID NO: 63096 - DNA, 25 bp, Probe sequence
gccacatatccaagcacatattact

SEQ ID NO: 63097 - DNA, 25 bp, Probe sequence
ccacatatccaagcacatattacta

SEQ ID NO: 63098 - DNA, 25 bp, Probe sequence
aatcgttgagttatgtgctatttgt

SEQ ID NO: 63099 - DNA, 25 bp, Probe sequence
tcgttgagttatgtgctatttgtat

SEQ ID NO: 63100 - DNA, 25 bp, Probe sequence
atcgttgagttatgtgctatttgta

SEQ ID NO: 63101 - DNA, 25 bp, Probe sequence
tcaaattggactgatgggaaagtta

SEQ ID NO: 63102 - DNA, 25 bp, Probe sequence
caaattggactgatgggaaagttat

SEQ ID NO: 63103 - DNA, 25 bp, Probe sequence
aattggactgatgggaaagttattt

SEQ ID NO: 63104 - DNA, 25 bp, Probe sequence
aaattggactgatgggaaagttatt

SEQ ID NO: 63105 - DNA, 25 bp, Probe sequence
agcaatgtcagtaatagtgtgaact

SEQ ID NO: 63106 - DNA, 25 bp, Probe sequence
aagcaatgtcagtaatagtgtgaac

SEQ ID NO: 63107 - DNA, 25 bp, Probe sequence
agtaatagtgtgaactgacattgct

SEQ ID NO: 63108 - DNA, 25 bp, Probe sequence
gtaatagtgtgaactgacattgctt

SEQ ID NO: 63109 - DNA, 25 bp, Probe sequence
aaagcaatgtcagtaatagtgtgaa

SEQ ID NO: 63110 - DNA, 25 bp, Probe sequence
taatagtgtgaactgacattgcttt

SEQ ID NO: 63111 - DNA, 25 bp, Probe sequence
cagtaatagtgtgaactgacattgc

SEQ ID NO: 63112 - DNA, 25 bp, Probe sequence
gcaatgtcagtaatagtgtgaactg

SEQ ID NO: 63113 - DNA, 25 bp, Probe sequence
aaaagcaatgtcagtaatagtgtga

SEQ ID NO: 63114 - DNA, 25 bp, Probe sequence
aatagtgtgaactgacattgctttt

SEQ ID NO: 63115 - DNA, 25 bp, Probe sequence
agttcacactattactgacattgct

SEQ ID NO: 63116 - DNA, 25 bp, Probe sequence
gttcacactattactgacattgctt

SEQ ID NO: 63117 - DNA, 25 bp, Probe sequence
agcaatgtcagttcacactattact

SEQ ID NO: 63118 - DNA, 25 bp, Probe sequence
aagcaatgtcagttcacactattac

SEQ ID NO: 63119 - DNA, 25 bp, Probe sequence
ttcacactattactgacattgcttt

SEQ ID NO: 63120 - DNA, 25 bp, Probe sequence
aaagcaatgtcagttcacactatta

SEQ ID NO: 63121 - DNA, 25 bp, Probe sequence
cagttcacactattactgacattgc

SEQ ID NO: 63122 - DNA, 25 bp, Probe sequence
gcaatgtcagttcacactattactg

SEQ ID NO: 63123 - DNA, 25 bp, Probe sequence
tcacactattactgacattgctttt

SEQ ID NO: 63124 - DNA, 25 bp, Probe sequence
aaaagcaatgtcagttcacactatt

SEQ ID NO: 63125 - DNA, 25 bp, Probe sequence
aactaaggcactattacataactgg

SEQ ID NO: 63126 - DNA, 25 bp, Probe sequence
agttgttggtaattgagcacatcat

SEQ ID NO: 63127 - DNA, 25 bp, Probe sequence
atcagttgttggtaattgagcacat

SEQ ID NO: 63128 - DNA, 25 bp, Probe sequence
gttggtaattgagcacatcatgtta

SEQ ID NO: 63129 - DNA, 25 bp, Probe sequence
tcagttgttggtaattgagcacatc

SEQ ID NO: 63130 - DNA, 25 bp, Probe sequence
ttggtaattgagcacatcatgttaa

SEQ ID NO: 63131 - DNA, 25 bp, Probe sequence
cagttgttggtaattgagcacatca

SEQ ID NO: 63132 - DNA, 25 bp, Probe sequence
catcagttgttggtaattgagcaca

SEQ ID NO: 63133 - DNA, 25 bp, Probe sequence
acatcagttgttggtaattgagcac

SEQ ID NO: 63134 - DNA, 25 bp, Probe sequence
ccagttatgtaatagtgccttagtt

SEQ ID NO: 63135 - DNA, 25 bp, Probe sequence
atgtgctcaattaccaacaactgat

SEQ ID NO: 63136 - DNA, 25 bp, Probe sequence
atgatgtgctcaattaccaacaact

SEQ ID NO: 63137 - DNA, 25 bp, Probe sequence
taacatgatgtgctcaattaccaac

SEQ ID NO: 63138 - DNA, 25 bp, Probe sequence
gatgtgctcaattaccaacaactga

SEQ ID NO: 63139 - DNA, 25 bp, Probe sequence
ttaacatgatgtgctcaattaccaa

SEQ ID NO: 63140 - DNA, 25 bp, Probe sequence
gtgctcaattaccaacaactgatgt

SEQ ID NO: 63141 - DNA, 25 bp, Probe sequence
tgtgctcaattaccaacaactgatg

SEQ ID NO: 63142 - DNA, 25 bp, Probe sequence
tgatgtgctcaattaccaacaactg

SEQ ID NO: 63143 - DNA, 25 bp, Probe sequence
tgattagggacatatttgattatgt

SEQ ID NO: 63144 - DNA, 25 bp, Probe sequence
acataatcaaatatgtccctaatca

SEQ ID NO: 63145 - DNA, 25 bp, Probe sequence
gtaaaagtagtaatgaccagttgtt

SEQ ID NO: 63146 - DNA, 25 bp, Probe sequence
ggtaaaagtagtaatgaccagttgt

SEQ ID NO: 63147 - DNA, 25 bp, Probe sequence
tgactgaatcttgcttgaaaatata

SEQ ID NO: 63148 - DNA, 25 bp, Probe sequence
aaaagtagtaatgaccagttgttac

SEQ ID NO: 63149 - DNA, 25 bp, Probe sequence
cattgtggtaaaagtagtaatgacc

SEQ ID NO: 63150 - DNA, 25 bp, Probe sequence
ctgaatcttgcttgaaaatataaca

SEQ ID NO: 63151 - DNA, 25 bp, Probe sequence
actgaatcttgcttgaaaatataac

SEQ ID NO: 63152 - DNA, 25 bp, Probe sequence
aaagtagtaatgaccagttgttact

SEQ ID NO: 63153 - DNA, 25 bp, Probe sequence
ctagtaattatcagcatttggttaa

SEQ ID NO: 63154 - DNA, 25 bp, Probe sequence
aacaactggtcattactacttttac

SEQ ID NO: 63155 - DNA, 25 bp, Probe sequence
acaactggtcattactacttttacc

SEQ ID NO: 63156 - DNA, 25 bp, Probe sequence
tatattttcaagcaagattcagtca

SEQ ID NO: 63157 - DNA, 25 bp, Probe sequence
gtaacaactggtcattactactttt

SEQ ID NO: 63158 - DNA, 25 bp, Probe sequence
ggtcattactacttttaccacaatg

SEQ ID NO: 63159 - DNA, 25 bp, Probe sequence
gttatattttcaagcaagattcagt

SEQ ID NO: 63160 - DNA, 25 bp, Probe sequence
tgttatattttcaagcaagattcag

SEQ ID NO: 63161 - DNA, 25 bp, Probe sequence
agtaacaactggtcattactacttt

SEQ ID NO: 63162 - DNA, 25 bp, Probe sequence
ttaaccaaatgctgataattactag

SEQ ID NO: 63163 - DNA, 25 bp, Probe sequence
gctttaaataaagtttcagctaaac

SEQ ID NO: 63164 - DNA, 25 bp, Probe sequence
ttaaataaagtttcagctaaacaca

SEQ ID NO: 63165 - DNA, 25 bp, Probe sequence
ataaagtttcagctaaacacataaa

SEQ ID NO: 63166 - DNA, 25 bp, Probe sequence
aataaagtttcagctaaacacataa

SEQ ID NO: 63167 - DNA, 25 bp, Probe sequence
aaataaagtttcagctaaacacata

SEQ ID NO: 63168 - DNA, 25 bp, Probe sequence
taaataaagtttcagctaaacacat

SEQ ID NO: 63169 - DNA, 25 bp, Probe sequence
aagtttcagctaaacacataaaatt

SEQ ID NO: 63170 - DNA, 25 bp, Probe sequence
aaagtttcagctaaacacataaaat

SEQ ID NO: 63171 - DNA, 25 bp, Probe sequence
taaagtttcagctaaacacataaaa

SEQ ID NO: 63172 - DNA, 25 bp, Probe sequence
agtttcagctaaacacataaaatta

SEQ ID NO: 63173 - DNA, 25 bp, Probe sequence
gtttagctgaaactttatttaaagc

SEQ ID NO: 63174 - DNA, 25 bp, Probe sequence
tgtgtttagctgaaactttatttaa

SEQ ID NO: 63175 - DNA, 25 bp, Probe sequence
atgtgtttagctgaaactttattta

SEQ ID NO: 63176 - DNA, 25 bp, Probe sequence
tatgtgtttagctgaaactttattt

SEQ ID NO: 63177 - DNA, 25 bp, Probe sequence
ttatgtgtttagctgaaactttatt

SEQ ID NO: 63178 - DNA, 25 bp, Probe sequence
tttatgtgtttagctgaaactttat

SEQ ID NO: 63179 - DNA, 25 bp, Probe sequence
attttatgtgtttagctgaaacttt

SEQ ID NO: 63180 - DNA, 25 bp, Probe sequence
aattttatgtgtttagctgaaactt

SEQ ID NO: 63181 - DNA, 25 bp, Probe sequence
ttttatgtgtttagctgaaacttta

SEQ ID NO: 63182 - DNA, 25 bp, Probe sequence
taattttatgtgtttagctgaaact

SEQ ID NO: 63183 - DNA, 25 bp, Probe sequence
taaatcgcatatccttgtgagcata

SEQ ID NO: 63184 - DNA, 25 bp, Probe sequence
tataaatcgcatatccttgtgagca

SEQ ID NO: 63185 - DNA, 25 bp, Probe sequence
atcgcatatccttgtgagcataaat

SEQ ID NO: 63186 - DNA, 25 bp, Probe sequence
ataaatcgcatatccttgtgagcat

SEQ ID NO: 63187 - DNA, 25 bp, Probe sequence
agtttgctattgacaggtgttaaag

SEQ ID NO: 63188 - DNA, 25 bp, Probe sequence
aatcgcatatccttgtgagcataaa

SEQ ID NO: 63189 - DNA, 25 bp, Probe sequence
aaatcgcatatccttgtgagcataa

SEQ ID NO: 63190 - DNA, 25 bp, Probe sequence
atataaatcgcatatccttgtgagc

SEQ ID NO: 63191 - DNA, 25 bp, Probe sequence
cgatagagcgataaaggatggttat

SEQ ID NO: 63192 - DNA, 25 bp, Probe sequence
tgctcacaaggatatgcgatttata

SEQ ID NO: 63193 - DNA, 25 bp, Probe sequence
tatgctcacaaggatatgcgattta

SEQ ID NO: 63194 - DNA, 25 bp, Probe sequence
atgctcacaaggatatgcgatttat

SEQ ID NO: 63195 - DNA, 25 bp, Probe sequence
atttatgctcacaaggatatgcgat

SEQ ID NO: 63196 - DNA, 25 bp, Probe sequence
ctttaacacctgtcaatagcaaact

SEQ ID NO: 63197 - DNA, 25 bp, Probe sequence
ttatgctcacaaggatatgcgattt

SEQ ID NO: 63198 - DNA, 25 bp, Probe sequence
tttatgctcacaaggatatgcgatt

SEQ ID NO: 63199 - DNA, 25 bp, Probe sequence
gctcacaaggatatgcgatttatat

SEQ ID NO: 63200 - DNA, 25 bp, Probe sequence
ataaccatcctttatcgctctatcg

SEQ ID NO: 63201 - DNA, 25 bp, Probe sequence
atgagatattcataactacggctag

SEQ ID NO: 63202 - DNA, 25 bp, Probe sequence
tatgagatattcataactacggcta

SEQ ID NO: 63203 - DNA, 25 bp, Probe sequence
ctagctgaaatgttatgagatattc

SEQ ID NO: 63204 - DNA, 25 bp, Probe sequence
agctgaaatgttatgagatattcat

SEQ ID NO: 63205 - DNA, 25 bp, Probe sequence
tagctgaaatgttatgagatattca

SEQ ID NO: 63206 - DNA, 25 bp, Probe sequence
gctgaaatgttatgagatattcata

SEQ ID NO: 63207 - DNA, 25 bp, Probe sequence
ctagccgtagttatgaatatctcat

SEQ ID NO: 63208 - DNA, 25 bp, Probe sequence
tagccgtagttatgaatatctcata

SEQ ID NO: 63209 - DNA, 25 bp, Probe sequence
gaatatctcataacatttcagctag

SEQ ID NO: 63210 - DNA, 25 bp, Probe sequence
atgaatatctcataacatttcagct

SEQ ID NO: 63211 - DNA, 25 bp, Probe sequence
tgaatatctcataacatttcagcta

SEQ ID NO: 63212 - DNA, 25 bp, Probe sequence
tatgaatatctcataacatttcagc

SEQ ID NO: 63213 - DNA, 25 bp, Probe sequence
tcttactgctgtttgttgttgattt

SEQ ID NO: 63214 - DNA, 25 bp, Probe sequence
gaatcatcttactgctgtttgttgt

SEQ ID NO: 63215 - DNA, 25 bp, Probe sequence
tttggaatcatcttactgctgtttg

SEQ ID NO: 63216 - DNA, 25 bp, Probe sequence
atcatcttactgctgtttgttgttg

SEQ ID NO: 63217 - DNA, 25 bp, Probe sequence
aatcatcttactgctgtttgttgtt

SEQ ID NO: 63218 - DNA, 25 bp, Probe sequence
catcttactgctgtttgttgttgat

SEQ ID NO: 63219 - DNA, 25 bp, Probe sequence
atcttactgctgtttgttgttgatt

SEQ ID NO: 63220 - DNA, 25 bp, Probe sequence
ggaatcatcttactgctgtttgttg

SEQ ID NO: 63221 - DNA, 25 bp, Probe sequence
atttggaatcatcttactgctgttt

SEQ ID NO: 63222 - DNA, 25 bp, Probe sequence
caaacagcagtaagatgattccaaa

SEQ ID NO: 63223 - DNA, 25 bp, Probe sequence
acaacaaacagcagtaagatgattc

SEQ ID NO: 63224 - DNA, 25 bp, Probe sequence
aaatcaacaacaaacagcagtaaga

SEQ ID NO: 63225 - DNA, 25 bp, Probe sequence
caacaacaaacagcagtaagatgat

SEQ ID NO: 63226 - DNA, 25 bp, Probe sequence
aacaacaaacagcagtaagatgatt

SEQ ID NO: 63227 - DNA, 25 bp, Probe sequence
atcaacaacaaacagcagtaagatg

SEQ ID NO: 63228 - DNA, 25 bp, Probe sequence
caacaaacagcagtaagatgattcc

SEQ ID NO: 63229 - DNA, 25 bp, Probe sequence
aatcaacaacaaacagcagtaagat

SEQ ID NO: 63230 - DNA, 25 bp, Probe sequence
tttgactacatcttcgccctatcta

SEQ ID NO: 63231 - DNA, 25 bp, Probe sequence
ctccttgttgtgctttattttcaga

SEQ ID NO: 63232 - DNA, 25 bp, Probe sequence
actccttgttgtgctttattttcag

SEQ ID NO: 63233 - DNA, 25 bp, Probe sequence
tccttgttgtgctttattttcagaa

SEQ ID NO: 63234 - DNA, 25 bp, Probe sequence
ccttgttgtgctttattttcagaag

SEQ ID NO: 63235 - DNA, 25 bp, Probe sequence
cttgttgtgctttattttcagaagt

SEQ ID NO: 63236 - DNA, 25 bp, Probe sequence
cactccttgttgtgctttattttca

SEQ ID NO: 63237 - DNA, 25 bp, Probe sequence
acactccttgttgtgctttattttc

SEQ ID NO: 63238 - DNA, 25 bp, Probe sequence
ttgttgtgctttattttcagaagta

SEQ ID NO: 63239 - DNA, 25 bp, Probe sequence
tgttgtgctttattttcagaagtat

SEQ ID NO: 63240 - DNA, 25 bp, Probe sequence
ctgaaaataaagcacaacaaggagt

SEQ ID NO: 63241 - DNA, 25 bp, Probe sequence
tctgaaaataaagcacaacaaggag

SEQ ID NO: 63242 - DNA, 25 bp, Probe sequence
ttctgaaaataaagcacaacaagga

SEQ ID NO: 63243 - DNA, 25 bp, Probe sequence
cttctgaaaataaagcacaacaagg

SEQ ID NO: 63244 - DNA, 25 bp, Probe sequence
acttctgaaaataaagcacaacaag

SEQ ID NO: 63245 - DNA, 25 bp, Probe sequence
gaaaataaagcacaacaaggagtgt

SEQ ID NO: 63246 - DNA, 25 bp, Probe sequence
tgaaaataaagcacaacaaggagtg

SEQ ID NO: 63247 - DNA, 25 bp, Probe sequence
tacttctgaaaataaagcacaacaa

SEQ ID NO: 63248 - DNA, 25 bp, Probe sequence
atacttctgaaaataaagcacaaca

SEQ ID NO: 63249 - DNA, 25 bp, Probe sequence
atgtatcataacatgaatggagaat

SEQ ID NO: 63250 - DNA, 25 bp, Probe sequence
gctattttcctcccttaaaagtatg

SEQ ID NO: 63251 - DNA, 25 bp, Probe sequence
tgtatcataacatgaatggagaata

SEQ ID NO: 63252 - DNA, 25 bp, Probe sequence
tatgtatcataacatgaatggagaa

SEQ ID NO: 63253 - DNA, 25 bp, Probe sequence
atatgtatcataacatgaatggaga

SEQ ID NO: 63254 - DNA, 25 bp, Probe sequence
ctattttcctcccttaaaagtatgt

SEQ ID NO: 63255 - DNA, 25 bp, Probe sequence
tttcctcccttaaaagtatgttaat

SEQ ID NO: 63256 - DNA, 25 bp, Probe sequence
ttttcctcccttaaaagtatgttaa

SEQ ID NO: 63257 - DNA, 25 bp, Probe sequence
attttcctcccttaaaagtatgtta

SEQ ID NO: 63258 - DNA, 25 bp, Probe sequence
attctccattcatgttatgatacat

SEQ ID NO: 63259 - DNA, 25 bp, Probe sequence
catacttttaagggaggaaaatagc

SEQ ID NO: 63260 - DNA, 25 bp, Probe sequence
tattctccattcatgttatgataca

SEQ ID NO: 63261 - DNA, 25 bp, Probe sequence
ttctccattcatgttatgatacata

SEQ ID NO: 63262 - DNA, 25 bp, Probe sequence
tctccattcatgttatgatacatat

SEQ ID NO: 63263 - DNA, 25 bp, Probe sequence
acatacttttaagggaggaaaatag

SEQ ID NO: 63264 - DNA, 25 bp, Probe sequence
attaacatacttttaagggaggaaa

SEQ ID NO: 63265 - DNA, 25 bp, Probe sequence
ttaacatacttttaagggaggaaaa

SEQ ID NO: 63266 - DNA, 25 bp, Probe sequence
aacatacttttaagggaggaaaata

SEQ ID NO: 63267 - DNA, 25 bp, Probe sequence
ttgatttagataggagtttgttgct

SEQ ID NO: 63268 - DNA, 25 bp, Probe sequence
tgatttagataggagtttgttgcta

SEQ ID NO: 63269 - DNA, 25 bp, Probe sequence
tccaacgaaacaaataaactaacat

SEQ ID NO: 63270 - DNA, 25 bp, Probe sequence
ttccaacgaaacaaataaactaaca

SEQ ID NO: 63271 - DNA, 25 bp, Probe sequence
attgatttagataggagtttgttgc

SEQ ID NO: 63272 - DNA, 25 bp, Probe sequence
tctaaagataatagttgaggttgct

SEQ ID NO: 63273 - DNA, 25 bp, Probe sequence
accatttcgatttgtgctatgataa

SEQ ID NO: 63274 - DNA, 25 bp, Probe sequence
taattagtccaccatttcgatttgt

SEQ ID NO: 63275 - DNA, 25 bp, Probe sequence
ccaacgaaacaaataaactaacatg

SEQ ID NO: 63276 - DNA, 25 bp, Probe sequence
agcaacaaactcctatctaaatcaa

SEQ ID NO: 63277 - DNA, 25 bp, Probe sequence
tgttagtttatttgtttcgttggaa

SEQ ID NO: 63278 - DNA, 25 bp, Probe sequence
atgttagtttatttgtttcgttgga

SEQ ID NO: 63279 - DNA, 25 bp, Probe sequence
tagcaacaaactcctatctaaatca

SEQ ID NO: 63280 - DNA, 25 bp, Probe sequence
gcaacaaactcctatctaaatcaat

SEQ ID NO: 63281 - DNA, 25 bp, Probe sequence
agcaacctcaactattatctttaga

SEQ ID NO: 63282 - DNA, 25 bp, Probe sequence
ttatcatagcacaaatcgaaatggt

SEQ ID NO: 63283 - DNA, 25 bp, Probe sequence
acaaatcgaaatggtggactaatta

SEQ ID NO: 63284 - DNA, 25 bp, Probe sequence
catgttagtttatttgtttcgttgg

SEQ ID NO: 63285 - DNA, 25 bp, Probe sequence
tacaaagggtctgaaatgaaagttt

SEQ ID NO: 63286 - DNA, 25 bp, Probe sequence
catacaaagggtctgaaatgaaagt

SEQ ID NO: 63287 - DNA, 25 bp, Probe sequence
atacaaagggtctgaaatgaaagtt

SEQ ID NO: 63288 - DNA, 25 bp, Probe sequence
acaaatggtttaaggtgacatatcc

SEQ ID NO: 63289 - DNA, 25 bp, Probe sequence
cgtacaaatggtttaaggtgacata

SEQ ID NO: 63290 - DNA, 25 bp, Probe sequence
caaatggtttaaggtgacatatcca

SEQ ID NO: 63291 - DNA, 25 bp, Probe sequence
aggtgacatatccattatctttgtt

SEQ ID NO: 63292 - DNA, 25 bp, Probe sequence
aaggtgacatatccattatctttgt

SEQ ID NO: 63293 - DNA, 25 bp, Probe sequence
ggtttaaggtgacatatccattatc

SEQ ID NO: 63294 - DNA, 25 bp, Probe sequence
aaactttcatttcagaccctttgta

SEQ ID NO: 63295 - DNA, 25 bp, Probe sequence
actttcatttcagaccctttgtatg

SEQ ID NO: 63296 - DNA, 25 bp, Probe sequence
aactttcatttcagaccctttgtat

SEQ ID NO: 63297 - DNA, 25 bp, Probe sequence
ggatatgtcaccttaaaccatttgt

SEQ ID NO: 63298 - DNA, 25 bp, Probe sequence
tatgtcaccttaaaccatttgtacg

SEQ ID NO: 63299 - DNA, 25 bp, Probe sequence
tggatatgtcaccttaaaccatttg

SEQ ID NO: 63300 - DNA, 25 bp, Probe sequence
acaaagataatggatatgtcacctt

SEQ ID NO: 63301 - DNA, 25 bp, Probe sequence
aacaaagataatggatatgtcacct

SEQ ID NO: 63302 - DNA, 25 bp, Probe sequence
gataatggatatgtcaccttaaacc

SEQ ID NO: 63303 - DNA, 25 bp, Probe sequence
actgttaccactaatgatattgtgt

SEQ ID NO: 63304 - DNA, 25 bp, Probe sequence
aactgttaccactaatgatattgtg

SEQ ID NO: 63305 - DNA, 25 bp, Probe sequence
accactaatgatattgtgtatgcaa

SEQ ID NO: 63306 - DNA, 25 bp, Probe sequence
ttaccactaatgatattgtgtatgc

SEQ ID NO: 63307 - DNA, 25 bp, Probe sequence
tgtgtatgcaatttgttagtggttt

SEQ ID NO: 63308 - DNA, 25 bp, Probe sequence
taccactaatgatattgtgtatgca

SEQ ID NO: 63309 - DNA, 25 bp, Probe sequence
ttgtgtatgcaatttgttagtggtt

SEQ ID NO: 63310 - DNA, 25 bp, Probe sequence
ctgttaccactaatgatattgtgta

SEQ ID NO: 63311 - DNA, 25 bp, Probe sequence
taactgttaccactaatgatattgt

SEQ ID NO: 63312 - DNA, 25 bp, Probe sequence
acacaatatcattagtggtaacagt

SEQ ID NO: 63313 - DNA, 25 bp, Probe sequence
cacaatatcattagtggtaacagtt

SEQ ID NO: 63314 - DNA, 25 bp, Probe sequence
ttgcatacacaatatcattagtggt

SEQ ID NO: 63315 - DNA, 25 bp, Probe sequence
gcatacacaatatcattagtggtaa

SEQ ID NO: 63316 - DNA, 25 bp, Probe sequence
aaaccactaacaaattgcatacaca

SEQ ID NO: 63317 - DNA, 25 bp, Probe sequence
tgcatacacaatatcattagtggta

SEQ ID NO: 63318 - DNA, 25 bp, Probe sequence
aaccactaacaaattgcatacacaa

SEQ ID NO: 63319 - DNA, 25 bp, Probe sequence
tacacaatatcattagtggtaacag

SEQ ID NO: 63320 - DNA, 25 bp, Probe sequence
acaatatcattagtggtaacagtta

SEQ ID NO: 63321 - DNA, 25 bp, Probe sequence
gtaacaatcagtttgtaagggcttt

SEQ ID NO: 63322 - DNA, 25 bp, Probe sequence
agttgtaacaatcagtttgtaaggg

SEQ ID NO: 63323 - DNA, 25 bp, Probe sequence
aacaatcagtttgtaagggctttaa

SEQ ID NO: 63324 - DNA, 25 bp, Probe sequence
tgtaacaatcagtttgtaagggctt

SEQ ID NO: 63325 - DNA, 25 bp, Probe sequence
ttgtaacaatcagtttgtaagggct

SEQ ID NO: 63326 - DNA, 25 bp, Probe sequence
gttgtaacaatcagtttgtaagggc

SEQ ID NO: 63327 - DNA, 25 bp, Probe sequence
taacaatcagtttgtaagggcttta

SEQ ID NO: 63328 - DNA, 25 bp, Probe sequence
aggaatacgttatgttacaatatgt

SEQ ID NO: 63329 - DNA, 25 bp, Probe sequence
acaatcagtttgtaagggctttaaa

SEQ ID NO: 63330 - DNA, 25 bp, Probe sequence
aaagcccttacaaactgattgttac

SEQ ID NO: 63331 - DNA, 25 bp, Probe sequence
cccttacaaactgattgttacaact

SEQ ID NO: 63332 - DNA, 25 bp, Probe sequence
ttaaagcccttacaaactgattgtt

SEQ ID NO: 63333 - DNA, 25 bp, Probe sequence
gcccttacaaactgattgttacaac

SEQ ID NO: 63334 - DNA, 25 bp, Probe sequence
agcccttacaaactgattgttacaa

SEQ ID NO: 63335 - DNA, 25 bp, Probe sequence
aagcccttacaaactgattgttaca

SEQ ID NO: 63336 - DNA, 25 bp, Probe sequence
taaagcccttacaaactgattgtta

SEQ ID NO: 63337 - DNA, 25 bp, Probe sequence
acatattgtaacataacgtattcct

SEQ ID NO: 63338 - DNA, 25 bp, Probe sequence
tttaaagcccttacaaactgattgt

SEQ ID NO: 63339 - DNA, 25 bp, Probe sequence
atatgtgatttaacgagcttgggac

SEQ ID NO: 63340 - DNA, 25 bp, Probe sequence
catatgtgatttaacgagcttggga

SEQ ID NO: 63341 - DNA, 25 bp, Probe sequence
tgatttaacgagcttgggacagaaa

SEQ ID NO: 63342 - DNA, 25 bp, Probe sequence
tcatatgtgatttaacgagcttggg

SEQ ID NO: 63343 - DNA, 25 bp, Probe sequence
tatgtgatttaacgagcttgggaca

SEQ ID NO: 63344 - DNA, 25 bp, Probe sequence
aattttattttagcagcagttgact

SEQ ID NO: 63345 - DNA, 25 bp, Probe sequence
aacaaagccctaagctcgttaattt

SEQ ID NO: 63346 - DNA, 25 bp, Probe sequence
aaacaaagccctaagctcgttaatt

SEQ ID NO: 63347 - DNA, 25 bp, Probe sequence
tcgttaattttattttagcagcagt

SEQ ID NO: 63348 - DNA, 25 bp, Probe sequence
gtcccaagctcgttaaatcacatat

SEQ ID NO: 63349 - DNA, 25 bp, Probe sequence
tcccaagctcgttaaatcacatatg

SEQ ID NO: 63350 - DNA, 25 bp, Probe sequence
tttctgtcccaagctcgttaaatca

SEQ ID NO: 63351 - DNA, 25 bp, Probe sequence
cccaagctcgttaaatcacatatga

SEQ ID NO: 63352 - DNA, 25 bp, Probe sequence
tgtcccaagctcgttaaatcacata

SEQ ID NO: 63353 - DNA, 25 bp, Probe sequence
agtcaactgctgctaaaataaaatt

SEQ ID NO: 63354 - DNA, 25 bp, Probe sequence
aattaacgagcttagggctttgttt

SEQ ID NO: 63355 - DNA, 25 bp, Probe sequence
aaattaacgagcttagggctttgtt

SEQ ID NO: 63356 - DNA, 25 bp, Probe sequence
ttctgtcccaagctcgttaaatcac

SEQ ID NO: 63357 - DNA, 25 bp, Probe sequence
agcagtaggataatttcaatttgga

SEQ ID NO: 63358 - DNA, 25 bp, Probe sequence
cagcagtaggataatttcaatttgg

SEQ ID NO: 63359 - DNA, 25 bp, Probe sequence
aaagacagcagtaggataatttcaa

SEQ ID NO: 63360 - DNA, 25 bp, Probe sequence
agacagcagtaggataatttcaatt

SEQ ID NO: 63361 - DNA, 25 bp, Probe sequence
aagacagcagtaggataatttcaat

SEQ ID NO: 63362 - DNA, 25 bp, Probe sequence
caatttggaaatatcttactgctgt

SEQ ID NO: 63363 - DNA, 25 bp, Probe sequence
acagcagtaggataatttcaatttg

SEQ ID NO: 63364 - DNA, 25 bp, Probe sequence
gcagtaggataatttcaatttggaa

SEQ ID NO: 63365 - DNA, 25 bp, Probe sequence
tcaatttggaaatatcttactgctg

SEQ ID NO: 63366 - DNA, 25 bp, Probe sequence
ccaaattgaaattatcctactgctg

SEQ ID NO: 63367 - DNA, 25 bp, Probe sequence
tccaaattgaaattatcctactgct

SEQ ID NO: 63368 - DNA, 25 bp, Probe sequence
ttgaaattatcctactgctgtcttt

SEQ ID NO: 63369 - DNA, 25 bp, Probe sequence
attgaaattatcctactgctgtctt

SEQ ID NO: 63370 - DNA, 25 bp, Probe sequence
aattgaaattatcctactgctgtct

SEQ ID NO: 63371 - DNA, 25 bp, Probe sequence
caaattgaaattatcctactgctgt

SEQ ID NO: 63372 - DNA, 25 bp, Probe sequence
acagcagtaagatatttccaaattg

SEQ ID NO: 63373 - DNA, 25 bp, Probe sequence
ttccaaattgaaattatcctactgc

SEQ ID NO: 63374 - DNA, 25 bp, Probe sequence
aaattgaaattatcctactgctgtc

SEQ ID NO: 63375 - DNA, 25 bp, Probe sequence
ttcaacaagacgaagagagcattaa

SEQ ID NO: 63376 - DNA, 25 bp, Probe sequence
gttcaacaagacgaagagagcatta

SEQ ID NO: 63377 - DNA, 25 bp, Probe sequence
aatgtgatgttcaacaagacgaaga

SEQ ID NO: 63378 - DNA, 25 bp, Probe sequence
atgtgatgttcaacaagacgaagag

SEQ ID NO: 63379 - DNA, 25 bp, Probe sequence
agacattgtgggtaggtagattaac

SEQ ID NO: 63380 - DNA, 25 bp, Probe sequence
tcaacaagacgaagagagcattaaa

SEQ ID NO: 63381 - DNA, 25 bp, Probe sequence
gtgatgttcaacaagacgaagagag

SEQ ID NO: 63382 - DNA, 25 bp, Probe sequence
gacattgtgggtaggtagattaacg

SEQ ID NO: 63383 - DNA, 25 bp, Probe sequence
aatagacattgtgggtaggtagatt

SEQ ID NO: 63384 - DNA, 25 bp, Probe sequence
ttaatgctctcttcgtcttgttgaa

SEQ ID NO: 63385 - DNA, 25 bp, Probe sequence
taatgctctcttcgtcttgttgaac

SEQ ID NO: 63386 - DNA, 25 bp, Probe sequence
tcttcgtcttgttgaacatcacatt

SEQ ID NO: 63387 - DNA, 25 bp, Probe sequence
ctcttcgtcttgttgaacatcacat

SEQ ID NO: 63388 - DNA, 25 bp, Probe sequence
gttaatctacctacccacaatgtct

SEQ ID NO: 63389 - DNA, 25 bp, Probe sequence
tttaatgctctcttcgtcttgttga

SEQ ID NO: 63390 - DNA, 25 bp, Probe sequence
ctctcttcgtcttgttgaacatcac

SEQ ID NO: 63391 - DNA, 25 bp, Probe sequence
cgttaatctacctacccacaatgtc

SEQ ID NO: 63392 - DNA, 25 bp, Probe sequence
aatctacctacccacaatgtctatt

SEQ ID NO: 63393 - DNA, 25 bp, Probe sequence
atgcgatagagatagttagagttgt

SEQ ID NO: 63394 - DNA, 25 bp, Probe sequence
tgcgatagagatagttagagttgta

SEQ ID NO: 63395 - DNA, 25 bp, Probe sequence
aatgcgatagagatagttagagttg

SEQ ID NO: 63396 - DNA, 25 bp, Probe sequence
gcgatagagatagttagagttgtaa

SEQ ID NO: 63397 - DNA, 25 bp, Probe sequence
aaatgcgatagagatagttagagtt

SEQ ID NO: 63398 - DNA, 25 bp, Probe sequence
cgatagagatagttagagttgtaag

SEQ ID NO: 63399 - DNA, 25 bp, Probe sequence
aaaatgcgatagagatagttagagt

SEQ ID NO: 63400 - DNA, 25 bp, Probe sequence
agttagagttgtaagtataaatgct

SEQ ID NO: 63401 - DNA, 25 bp, Probe sequence
gttagagttgtaagtataaatgctt

SEQ ID NO: 63402 - DNA, 25 bp, Probe sequence
acaactctaactatctctatcgcat

SEQ ID NO: 63403 - DNA, 25 bp, Probe sequence
tacaactctaactatctctatcgca

SEQ ID NO: 63404 - DNA, 25 bp, Probe sequence
caactctaactatctctatcgcatt

SEQ ID NO: 63405 - DNA, 25 bp, Probe sequence
ttacaactctaactatctctatcgc

SEQ ID NO: 63406 - DNA, 25 bp, Probe sequence
aactctaactatctctatcgcattt

SEQ ID NO: 63407 - DNA, 25 bp, Probe sequence
cttacaactctaactatctctatcg

SEQ ID NO: 63408 - DNA, 25 bp, Probe sequence
actctaactatctctatcgcatttt

SEQ ID NO: 63409 - DNA, 25 bp, Probe sequence
agcatttatacttacaactctaact

SEQ ID NO: 63410 - DNA, 25 bp, Probe sequence
aagcatttatacttacaactctaac

SEQ ID NO: 63411 - DNA, 25 bp, Probe sequence
agatattaaatgaaacaggaggctt

SEQ ID NO: 63412 - DNA, 25 bp, Probe sequence
aagatattaaatgaaacaggaggct

SEQ ID NO: 63413 - DNA, 25 bp, Probe sequence
gatattaaatgaaacaggaggcttt

SEQ ID NO: 63414 - DNA, 25 bp, Probe sequence
tgaatcgcaaacgtaaacttagtaa

SEQ ID NO: 63415 - DNA, 25 bp, Probe sequence
attgaatcgcaaacgtaaacttagt

SEQ ID NO: 63416 - DNA, 25 bp, Probe sequence
tgaattgaatcgcaaacgtaaactt

SEQ ID NO: 63417 - DNA, 25 bp, Probe sequence
ttgaatcgcaaacgtaaacttagta

SEQ ID NO: 63418 - DNA, 25 bp, Probe sequence
ttgtgaattgaatcgcaaacgtaaa

SEQ ID NO: 63419 - DNA, 25 bp, Probe sequence
gaatcgcaaacgtaaacttagtaaa

SEQ ID NO: 63420 - DNA, 25 bp, Probe sequence
agcctcctgtttcatttaatatctt

SEQ ID NO: 63421 - DNA, 25 bp, Probe sequence
aagcctcctgtttcatttaatatct

SEQ ID NO: 63422 - DNA, 25 bp, Probe sequence
aaagcctcctgtttcatttaatatc

SEQ ID NO: 63423 - DNA, 25 bp, Probe sequence
ttactaagtttacgtttgcgattca

SEQ ID NO: 63424 - DNA, 25 bp, Probe sequence
actaagtttacgtttgcgattcaat

SEQ ID NO: 63425 - DNA, 25 bp, Probe sequence
aagtttacgtttgcgattcaattca

SEQ ID NO: 63426 - DNA, 25 bp, Probe sequence
tactaagtttacgtttgcgattcaa

SEQ ID NO: 63427 - DNA, 25 bp, Probe sequence
tttacgtttgcgattcaattcacaa

SEQ ID NO: 63428 - DNA, 25 bp, Probe sequence
tttactaagtttacgtttgcgattc

SEQ ID NO: 63429 - DNA, 25 bp, Probe sequence
gctaatgtgacaagatgttaagaga

SEQ ID NO: 63430 - DNA, 25 bp, Probe sequence
agctaatgtgacaagatgttaagag

SEQ ID NO: 63431 - DNA, 25 bp, Probe sequence
ctaatgtgacaagatgttaagagaa

SEQ ID NO: 63432 - DNA, 25 bp, Probe sequence
ggttactagctaatgtgacaagatg

SEQ ID NO: 63433 - DNA, 25 bp, Probe sequence
aggttactagctaatgtgacaagat

SEQ ID NO: 63434 - DNA, 25 bp, Probe sequence
taggttactagctaatgtgacaaga

SEQ ID NO: 63435 - DNA, 25 bp, Probe sequence
atatgcaagaactaggttactagct

SEQ ID NO: 63436 - DNA, 25 bp, Probe sequence
gttactagctaatgtgacaagatgt

SEQ ID NO: 63437 - DNA, 25 bp, Probe sequence
tatcttcaaccaaagaaagggattg

SEQ ID NO: 63438 - DNA, 25 bp, Probe sequence
tctcttaacatcttgtcacattagc

SEQ ID NO: 63439 - DNA, 25 bp, Probe sequence
ctcttaacatcttgtcacattagct

SEQ ID NO: 63440 - DNA, 25 bp, Probe sequence
ttctcttaacatcttgtcacattag

SEQ ID NO: 63441 - DNA, 25 bp, Probe sequence
catcttgtcacattagctagtaacc

SEQ ID NO: 63442 - DNA, 25 bp, Probe sequence
atcttgtcacattagctagtaacct

SEQ ID NO: 63443 - DNA, 25 bp, Probe sequence
tcttgtcacattagctagtaaccta

SEQ ID NO: 63444 - DNA, 25 bp, Probe sequence
agctagtaacctagttcttgcatat

SEQ ID NO: 63445 - DNA, 25 bp, Probe sequence
acatcttgtcacattagctagtaac

SEQ ID NO: 63446 - DNA, 25 bp, Probe sequence
caatccctttctttggttgaagata

SEQ ID NO: 63447 - DNA, 25 bp, Probe sequence
aaatatgtgtcaaaggaagtgaggg

SEQ ID NO: 63448 - DNA, 25 bp, Probe sequence
atatgtgtcaaaggaagtgagggtt

SEQ ID NO: 63449 - DNA, 25 bp, Probe sequence
aatatgtgtcaaaggaagtgagggt

SEQ ID NO: 63450 - DNA, 25 bp, Probe sequence
tatgtgtcaaaggaagtgagggttt

SEQ ID NO: 63451 - DNA, 25 bp, Probe sequence
catcgtttgtcggttttaatactga

SEQ ID NO: 63452 - DNA, 25 bp, Probe sequence
atcgtttgtcggttttaatactgat

SEQ ID NO: 63453 - DNA, 25 bp, Probe sequence
tcgtttgtcggttttaatactgata

SEQ ID NO: 63454 - DNA, 25 bp, Probe sequence
aaaatatgtgtcaaaggaagtgagg

SEQ ID NO: 63455 - DNA, 25 bp, Probe sequence
acatcgtttgtcggttttaatactg

SEQ ID NO: 63456 - DNA, 25 bp, Probe sequence
ccctcacttcctttgacacatattt

SEQ ID NO: 63457 - DNA, 25 bp, Probe sequence
accctcacttcctttgacacatatt

SEQ ID NO: 63458 - DNA, 25 bp, Probe sequence
aaccctcacttcctttgacacatat

SEQ ID NO: 63459 - DNA, 25 bp, Probe sequence
aaaccctcacttcctttgacacata

SEQ ID NO: 63460 - DNA, 25 bp, Probe sequence
tcagtattaaaaccgacaaacgatg

SEQ ID NO: 63461 - DNA, 25 bp, Probe sequence
atcagtattaaaaccgacaaacgat

SEQ ID NO: 63462 - DNA, 25 bp, Probe sequence
tatcagtattaaaaccgacaaacga

SEQ ID NO: 63463 - DNA, 25 bp, Probe sequence
cctcacttcctttgacacatatttt

SEQ ID NO: 63464 - DNA, 25 bp, Probe sequence
cagtattaaaaccgacaaacgatgt

SEQ ID NO: 63465 - DNA, 25 bp, Probe sequence
gataaagatgaggagttgagaatga

SEQ ID NO: 63466 - DNA, 25 bp, Probe sequence
agataaagatgaggagttgagaatg

SEQ ID NO: 63467 - DNA, 25 bp, Probe sequence
aagataaagatgaggagttgagaat

SEQ ID NO: 63468 - DNA, 25 bp, Probe sequence
taagataaagatgaggagttgagaa

SEQ ID NO: 63469 - DNA, 25 bp, Probe sequence
ttaagataaagatgaggagttgaga

SEQ ID NO: 63470 - DNA, 25 bp, Probe sequence
gtgaattaagataaagatgaggagt

SEQ ID NO: 63471 - DNA, 25 bp, Probe sequence
tgtgaattaagataaagatgaggag

SEQ ID NO: 63472 - DNA, 25 bp, Probe sequence
attaagataaagatgaggagttgag

SEQ ID NO: 63473 - DNA, 25 bp, Probe sequence
aattaagataaagatgaggagttga

SEQ ID NO: 63474 - DNA, 25 bp, Probe sequence
cattctcaactcctcatctttatct

SEQ ID NO: 63475 - DNA, 25 bp, Probe sequence
tcattctcaactcctcatctttatc

SEQ ID NO: 63476 - DNA, 25 bp, Probe sequence
attctcaactcctcatctttatctt

SEQ ID NO: 63477 - DNA, 25 bp, Probe sequence
ttctcaactcctcatctttatctta

SEQ ID NO: 63478 - DNA, 25 bp, Probe sequence
tctcaactcctcatctttatcttaa

SEQ ID NO: 63479 - DNA, 25 bp, Probe sequence
ctcctcatctttatcttaattcaca

SEQ ID NO: 63480 - DNA, 25 bp, Probe sequence
actcctcatctttatcttaattcac

SEQ ID NO: 63481 - DNA, 25 bp, Probe sequence
ctcaactcctcatctttatcttaat

SEQ ID NO: 63482 - DNA, 25 bp, Probe sequence
tcctcatctttatcttaattcacat

SEQ ID NO: 63483 - DNA, 25 bp, Probe sequence
atgattaaattacaagcaagtgggt

SEQ ID NO: 63484 - DNA, 25 bp, Probe sequence
ttcctctcaaatatagaagtgtggt

SEQ ID NO: 63485 - DNA, 25 bp, Probe sequence
tgattaaattacaagcaagtgggta

SEQ ID NO: 63486 - DNA, 25 bp, Probe sequence
tcctctcaaatatagaagtgtggta

SEQ ID NO: 63487 - DNA, 25 bp, Probe sequence
catgattaaattacaagcaagtggg

SEQ ID NO: 63488 - DNA, 25 bp, Probe sequence
cctctcaaatatagaagtgtggtag

SEQ ID NO: 63489 - DNA, 25 bp, Probe sequence
aaatgtcatgttcttcctctcaaat

SEQ ID NO: 63490 - DNA, 25 bp, Probe sequence
attacaagcaagtgggtattaatcc

SEQ ID NO: 63491 - DNA, 25 bp, Probe sequence
gattaaattacaagcaagtgggtat

SEQ ID NO: 63492 - DNA, 25 bp, Probe sequence
acccacttgcttgtaatttaatcat

SEQ ID NO: 63493 - DNA, 25 bp, Probe sequence
accacacttctatatttgagaggaa

SEQ ID NO: 63494 - DNA, 25 bp, Probe sequence
tacccacttgcttgtaatttaatca

SEQ ID NO: 63495 - DNA, 25 bp, Probe sequence
taccacacttctatatttgagagga

SEQ ID NO: 63496 - DNA, 25 bp, Probe sequence
cccacttgcttgtaatttaatcatg

SEQ ID NO: 63497 - DNA, 25 bp, Probe sequence
ctaccacacttctatatttgagagg

SEQ ID NO: 63498 - DNA, 25 bp, Probe sequence
atttgagaggaagaacatgacattt

SEQ ID NO: 63499 - DNA, 25 bp, Probe sequence
ggattaatacccacttgcttgtaat

SEQ ID NO: 63500 - DNA, 25 bp, Probe sequence
tatttgagaggaagaacatgacatt

SEQ ID NO: 63501 - DNA, 25 bp, Probe sequence
agtatatgacataaggcatggacaa

SEQ ID NO: 63502 - DNA, 25 bp, Probe sequence
gtatatgacataaggcatggacaat

SEQ ID NO: 63503 - DNA, 25 bp, Probe sequence
tagtatatgacataaggcatggaca

SEQ ID NO: 63504 - DNA, 25 bp, Probe sequence
atgacataaggcatggacaattatt

SEQ ID NO: 63505 - DNA, 25 bp, Probe sequence
acataaggcatggacaattattagt

SEQ ID NO: 63506 - DNA, 25 bp, Probe sequence
tgacataaggcatggacaattatta

SEQ ID NO: 63507 - DNA, 25 bp, Probe sequence
atatgacataaggcatggacaatta

SEQ ID NO: 63508 - DNA, 25 bp, Probe sequence
tatatgacataaggcatggacaatt

SEQ ID NO: 63509 - DNA, 25 bp, Probe sequence
tatgacataaggcatggacaattat

SEQ ID NO: 63510 - DNA, 25 bp, Probe sequence
ttgtccatgccttatgtcatatact

SEQ ID NO: 63511 - DNA, 25 bp, Probe sequence
tgtccatgccttatgtcatatacta

SEQ ID NO: 63512 - DNA, 25 bp, Probe sequence
attgtccatgccttatgtcatatac

SEQ ID NO: 63513 - DNA, 25 bp, Probe sequence
aataattgtccatgccttatgtcat

SEQ ID NO: 63514 - DNA, 25 bp, Probe sequence
taataattgtccatgccttatgtca

SEQ ID NO: 63515 - DNA, 25 bp, Probe sequence
actaataattgtccatgccttatgt

SEQ ID NO: 63516 - DNA, 25 bp, Probe sequence
aattgtccatgccttatgtcatata

SEQ ID NO: 63517 - DNA, 25 bp, Probe sequence
taattgtccatgccttatgtcatat

SEQ ID NO: 63518 - DNA, 25 bp, Probe sequence
ataattgtccatgccttatgtcata

SEQ ID NO: 63519 - DNA, 25 bp, Probe sequence
cgtaacttacctcctattgttttaa

SEQ ID NO: 63520 - DNA, 25 bp, Probe sequence
gtaacttacctcctattgttttaaa

SEQ ID NO: 63521 - DNA, 25 bp, Probe sequence
ttaaaacaataggaggtaagttacg

SEQ ID NO: 63522 - DNA, 25 bp, Probe sequence
tttaaaacaataggaggtaagttac

SEQ ID NO: 63523 - DNA, 25 bp, Probe sequence
ctctcctcataagttgcttagttca

SEQ ID NO: 63524 - DNA, 25 bp, Probe sequence
tctctcctcataagttgcttagttc

SEQ ID NO: 63525 - DNA, 25 bp, Probe sequence
ctctctcctcataagttgcttagtt

SEQ ID NO: 63526 - DNA, 25 bp, Probe sequence
tctctctcctcataagttgcttagt

SEQ ID NO: 63527 - DNA, 25 bp, Probe sequence
tctcctcataagttgcttagttcat

SEQ ID NO: 63528 - DNA, 25 bp, Probe sequence
atctctctcctcataagttgcttag

SEQ ID NO: 63529 - DNA, 25 bp, Probe sequence
ctcctcataagttgcttagttcata

SEQ ID NO: 63530 - DNA, 25 bp, Probe sequence
tcctcataagttgcttagttcatat

SEQ ID NO: 63531 - DNA, 25 bp, Probe sequence
cctcataagttgcttagttcatata

SEQ ID NO: 63532 - DNA, 25 bp, Probe sequence
tgaactaagcaacttatgaggagag

SEQ ID NO: 63533 - DNA, 25 bp, Probe sequence
aactaagcaacttatgaggagagag

SEQ ID NO: 63534 - DNA, 25 bp, Probe sequence
gaactaagcaacttatgaggagaga

SEQ ID NO: 63535 - DNA, 25 bp, Probe sequence
actaagcaacttatgaggagagaga

SEQ ID NO: 63536 - DNA, 25 bp, Probe sequence
atgaactaagcaacttatgaggaga

SEQ ID NO: 63537 - DNA, 25 bp, Probe sequence
ctaagcaacttatgaggagagagat

SEQ ID NO: 63538 - DNA, 25 bp, Probe sequence
tatgaactaagcaacttatgaggag

SEQ ID NO: 63539 - DNA, 25 bp, Probe sequence
atatgaactaagcaacttatgagga

SEQ ID NO: 63540 - DNA, 25 bp, Probe sequence
tatatgaactaagcaacttatgagg

SEQ ID NO: 63541 - DNA, 25 bp, Probe sequence
aatatgaattaagacagtgacttgc

SEQ ID NO: 63542 - DNA, 25 bp, Probe sequence
cgaagtaagaatcatcattggtaat

SEQ ID NO: 63543 - DNA, 25 bp, Probe sequence
tcgaagtaagaatcatcattggtaa

SEQ ID NO: 63544 - DNA, 25 bp, Probe sequence
atatgaattaagacagtgacttgca

SEQ ID NO: 63545 - DNA, 25 bp, Probe sequence
tatgaattaagacagtgacttgcac

SEQ ID NO: 63546 - DNA, 25 bp, Probe sequence
aattaagcatctaagaagaacagtt

SEQ ID NO: 63547 - DNA, 25 bp, Probe sequence
gggagccttatttatgttctaggtt

SEQ ID NO: 63548 - DNA, 25 bp, Probe sequence
agggagccttatttatgttctaggt

SEQ ID NO: 63549 - DNA, 25 bp, Probe sequence
ggagccttatttatgttctaggttc

SEQ ID NO: 63550 - DNA, 25 bp, Probe sequence
gcaagtcactgtcttaattcatatt

SEQ ID NO: 63551 - DNA, 25 bp, Probe sequence
attaccaatgatgattcttacttcg

SEQ ID NO: 63552 - DNA, 25 bp, Probe sequence
ttaccaatgatgattcttacttcga

SEQ ID NO: 63553 - DNA, 25 bp, Probe sequence
tgcaagtcactgtcttaattcatat

SEQ ID NO: 63554 - DNA, 25 bp, Probe sequence
gtgcaagtcactgtcttaattcata

SEQ ID NO: 63555 - DNA, 25 bp, Probe sequence
aactgttcttcttagatgcttaatt

SEQ ID NO: 63556 - DNA, 25 bp, Probe sequence
aacctagaacataaataaggctccc

SEQ ID NO: 63557 - DNA, 25 bp, Probe sequence
acctagaacataaataaggctccct

SEQ ID NO: 63558 - DNA, 25 bp, Probe sequence
tgtctactttgaagggagcttattc

SEQ ID NO: 63559 - DNA, 25 bp, Probe sequence
aaggtcaaagaaagtcaaagtcaaa

SEQ ID NO: 63560 - DNA, 25 bp, Probe sequence
taaggtcaaagaaagtcaaagtcaa

SEQ ID NO: 63561 - DNA, 25 bp, Probe sequence
ttaaggtcaaagaaagtcaaagtca

SEQ ID NO: 63562 - DNA, 25 bp, Probe sequence
gcaacttgaccaactctacaaatta

SEQ ID NO: 63563 - DNA, 25 bp, Probe sequence
attaaggtcaaagaaagtcaaagtc

SEQ ID NO: 63564 - DNA, 25 bp, Probe sequence
caacttgaccaactctacaaattag

SEQ ID NO: 63565 - DNA, 25 bp, Probe sequence
aattaaggtcaaagaaagtcaaagt

SEQ ID NO: 63566 - DNA, 25 bp, Probe sequence
agtctagttaatgtgtaacgtaaca

SEQ ID NO: 63567 - DNA, 25 bp, Probe sequence
aacttgaccaactctacaaattaga

SEQ ID NO: 63568 - DNA, 25 bp, Probe sequence
tttgactttgactttctttgacctt

SEQ ID NO: 63569 - DNA, 25 bp, Probe sequence
ttgactttgactttctttgacctta

SEQ ID NO: 63570 - DNA, 25 bp, Probe sequence
tgactttgactttctttgaccttaa

SEQ ID NO: 63571 - DNA, 25 bp, Probe sequence
taatttgtagagttggtcaagttgc

SEQ ID NO: 63572 - DNA, 25 bp, Probe sequence
gactttgactttctttgaccttaat

SEQ ID NO: 63573 - DNA, 25 bp, Probe sequence
ctaatttgtagagttggtcaagttg

SEQ ID NO: 63574 - DNA, 25 bp, Probe sequence
actttgactttctttgaccttaatt

SEQ ID NO: 63575 - DNA, 25 bp, Probe sequence
tgttacgttacacattaactagact

SEQ ID NO: 63576 - DNA, 25 bp, Probe sequence
tctaatttgtagagttggtcaagtt

SEQ ID NO: 63577 - DNA, 25 bp, Probe sequence
attgaaccaagaatgtgatgattaa

SEQ ID NO: 63578 - DNA, 25 bp, Probe sequence
aattgaaccaagaatgtgatgatta

SEQ ID NO: 63579 - DNA, 25 bp, Probe sequence
ttgaaccaagaatgtgatgattaat

SEQ ID NO: 63580 - DNA, 25 bp, Probe sequence
aaccaagaatgtgatgattaatcgc

SEQ ID NO: 63581 - DNA, 25 bp, Probe sequence
gtgatgattaatcgcattcttggtt

SEQ ID NO: 63582 - DNA, 25 bp, Probe sequence
atgtgatgattaatcgcattcttgg

SEQ ID NO: 63583 - DNA, 25 bp, Probe sequence
ccaagaatgtgatgattaatcgcat

SEQ ID NO: 63584 - DNA, 25 bp, Probe sequence
accaagaatgtgatgattaatcgca

SEQ ID NO: 63585 - DNA, 25 bp, Probe sequence
tgtgatgattaatcgcattcttggt

SEQ ID NO: 63586 - DNA, 25 bp, Probe sequence
ttaatcatcacattcttggttcaat

SEQ ID NO: 63587 - DNA, 25 bp, Probe sequence
taatcatcacattcttggttcaatt

SEQ ID NO: 63588 - DNA, 25 bp, Probe sequence
attaatcatcacattcttggttcaa

SEQ ID NO: 63589 - DNA, 25 bp, Probe sequence
gcgattaatcatcacattcttggtt

SEQ ID NO: 63590 - DNA, 25 bp, Probe sequence
atgcgattaatcatcacattcttgg

SEQ ID NO: 63591 - DNA, 25 bp, Probe sequence
ccaagaatgcgattaatcatcacat

SEQ ID NO: 63592 - DNA, 25 bp, Probe sequence
aaccaagaatgcgattaatcatcac

SEQ ID NO: 63593 - DNA, 25 bp, Probe sequence
tgcgattaatcatcacattcttggt

SEQ ID NO: 63594 - DNA, 25 bp, Probe sequence
accaagaatgcgattaatcatcaca

SEQ ID NO: 63595 - DNA, 25 bp, Probe sequence
atattatatcagaggttatcgaggg

SEQ ID NO: 63596 - DNA, 25 bp, Probe sequence
tattatatcagaggttatcgagggg

SEQ ID NO: 63597 - DNA, 25 bp, Probe sequence
aatattatatcagaggttatcgagg

SEQ ID NO: 63598 - DNA, 25 bp, Probe sequence
ccctcgataacctctgatataatat

SEQ ID NO: 63599 - DNA, 25 bp, Probe sequence
cccctcgataacctctgatataata

SEQ ID NO: 63600 - DNA, 25 bp, Probe sequence
cctcgataacctctgatataatatt

SEQ ID NO: 63601 - DNA, 25 bp, Probe sequence
tatatattaggtacggcgttcgcta

SEQ ID NO: 63602 - DNA, 25 bp, Probe sequence
tatattaggtacggcgttcgctata

SEQ ID NO: 63603 - DNA, 25 bp, Probe sequence
atatattaggtacggcgttcgctat

SEQ ID NO: 63604 - DNA, 25 bp, Probe sequence
atattaggtacggcgttcgctataa

SEQ ID NO: 63605 - DNA, 25 bp, Probe sequence
ttatatattaggtacggcgttcgct

SEQ ID NO: 63606 - DNA, 25 bp, Probe sequence
tattaggtacggcgttcgctataat

SEQ ID NO: 63607 - DNA, 25 bp, Probe sequence
atttatatattaggtacggcgttcg

SEQ ID NO: 63608 - DNA, 25 bp, Probe sequence
tttatatattaggtacggcgttcgc

SEQ ID NO: 63609 - DNA, 25 bp, Probe sequence
attaggtacggcgttcgctataatg

SEQ ID NO: 63610 - DNA, 25 bp, Probe sequence
tagcgaacgccgtacctaatatata

SEQ ID NO: 63611 - DNA, 25 bp, Probe sequence
tatagcgaacgccgtacctaatata

SEQ ID NO: 63612 - DNA, 25 bp, Probe sequence
atagcgaacgccgtacctaatatat

SEQ ID NO: 63613 - DNA, 25 bp, Probe sequence
agcgaacgccgtacctaatatataa

SEQ ID NO: 63614 - DNA, 25 bp, Probe sequence
ttatagcgaacgccgtacctaatat

SEQ ID NO: 63615 - DNA, 25 bp, Probe sequence
attatagcgaacgccgtacctaata

SEQ ID NO: 63616 - DNA, 25 bp, Probe sequence
cgaacgccgtacctaatatataaat

SEQ ID NO: 63617 - DNA, 25 bp, Probe sequence
gcgaacgccgtacctaatatataaa

SEQ ID NO: 63618 - DNA, 25 bp, Probe sequence
cattatagcgaacgccgtacctaat

SEQ ID NO: 63619 - DNA, 25 bp, Probe sequence
aagtgatgggttagaggttattgag

SEQ ID NO: 63620 - DNA, 25 bp, Probe sequence
aaagtgatgggttagaggttattga

SEQ ID NO: 63621 - DNA, 25 bp, Probe sequence
tgccttgatacaaagattactcgta

SEQ ID NO: 63622 - DNA, 25 bp, Probe sequence
ttgccttgatacaaagattactcgt

SEQ ID NO: 63623 - DNA, 25 bp, Probe sequence
attgccttgatacaaagattactcg

SEQ ID NO: 63624 - DNA, 25 bp, Probe sequence
gccttgatacaaagattactcgtaa

SEQ ID NO: 63625 - DNA, 25 bp, Probe sequence
agtgatgggttagaggttattgagc

SEQ ID NO: 63626 - DNA, 25 bp, Probe sequence
tgggttagaggttattgagctttaa

SEQ ID NO: 63627 - DNA, 25 bp, Probe sequence
gatgggttagaggttattgagcttt

SEQ ID NO: 63628 - DNA, 25 bp, Probe sequence
ctcaataacctctaacccatcactt

SEQ ID NO: 63629 - DNA, 25 bp, Probe sequence
tcaataacctctaacccatcacttt

SEQ ID NO: 63630 - DNA, 25 bp, Probe sequence
tacgagtaatctttgtatcaaggca

SEQ ID NO: 63631 - DNA, 25 bp, Probe sequence
cgagtaatctttgtatcaaggcaat

SEQ ID NO: 63632 - DNA, 25 bp, Probe sequence
acgagtaatctttgtatcaaggcaa

SEQ ID NO: 63633 - DNA, 25 bp, Probe sequence
ttacgagtaatctttgtatcaaggc

SEQ ID NO: 63634 - DNA, 25 bp, Probe sequence
gctcaataacctctaacccatcact

SEQ ID NO: 63635 - DNA, 25 bp, Probe sequence
ttaaagctcaataacctctaaccca

SEQ ID NO: 63636 - DNA, 25 bp, Probe sequence
aaagctcaataacctctaacccatc

SEQ ID NO: 63637 - DNA, 25 bp, Probe sequence
caatattcctacctctgacttgagt

SEQ ID NO: 63638 - DNA, 25 bp, Probe sequence
aatattcctacctctgacttgagtt

SEQ ID NO: 63639 - DNA, 25 bp, Probe sequence
attcctacctctgacttgagtttaa

SEQ ID NO: 63640 - DNA, 25 bp, Probe sequence
atattcctacctctgacttgagttt

SEQ ID NO: 63641 - DNA, 25 bp, Probe sequence
tattcctacctctgacttgagttta

SEQ ID NO: 63642 - DNA, 25 bp, Probe sequence
tcaatattcctacctctgacttgag

SEQ ID NO: 63643 - DNA, 25 bp, Probe sequence
ttcctacctctgacttgagtttaaa

SEQ ID NO: 63644 - DNA, 25 bp, Probe sequence
aactagtcaatattcctacctctga

SEQ ID NO: 63645 - DNA, 25 bp, Probe sequence
actgaaatttgacgataataaagca

SEQ ID NO: 63646 - DNA, 25 bp, Probe sequence
actcaagtcagaggtaggaatattg

SEQ ID NO: 63647 - DNA, 25 bp, Probe sequence
aactcaagtcagaggtaggaatatt

SEQ ID NO: 63648 - DNA, 25 bp, Probe sequence
ttaaactcaagtcagaggtaggaat

SEQ ID NO: 63649 - DNA, 25 bp, Probe sequence
aaactcaagtcagaggtaggaatat

SEQ ID NO: 63650 - DNA, 25 bp, Probe sequence
taaactcaagtcagaggtaggaata

SEQ ID NO: 63651 - DNA, 25 bp, Probe sequence
ctcaagtcagaggtaggaatattga

SEQ ID NO: 63652 - DNA, 25 bp, Probe sequence
tttaaactcaagtcagaggtaggaa

SEQ ID NO: 63653 - DNA, 25 bp, Probe sequence
tcagaggtaggaatattgactagtt

SEQ ID NO: 63654 - DNA, 25 bp, Probe sequence
tgctttattatcgtcaaatttcagt

SEQ ID NO: 63655 - DNA, 25 bp, Probe sequence
cgttgttttagttactgaagatttt

SEQ ID NO: 63656 - DNA, 25 bp, Probe sequence
acgttgttttagttactgaagattt

SEQ ID NO: 63657 - DNA, 25 bp, Probe sequence
aacgttgttttagttactgaagatt

SEQ ID NO: 63658 - DNA, 25 bp, Probe sequence
aatcttcagtaacgttgttttagtt

SEQ ID NO: 63659 - DNA, 25 bp, Probe sequence
aaatcttcagtaacgttgttttagt

SEQ ID NO: 63660 - DNA, 25 bp, Probe sequence
taacgttgttttagttactgaagat

SEQ ID NO: 63661 - DNA, 25 bp, Probe sequence
atcttcagtaacgttgttttagtta

SEQ ID NO: 63662 - DNA, 25 bp, Probe sequence
aaaatcttcagtaacgttgttttag

SEQ ID NO: 63663 - DNA, 25 bp, Probe sequence
gtaacgttgttttagttactgaaga

SEQ ID NO: 63664 - DNA, 25 bp, Probe sequence
tcttcagtaacgttgttttagttac

SEQ ID NO: 63665 - DNA, 25 bp, Probe sequence
aaaatcttcagtaactaaaacaacg

SEQ ID NO: 63666 - DNA, 25 bp, Probe sequence
aaatcttcagtaactaaaacaacgt

SEQ ID NO: 63667 - DNA, 25 bp, Probe sequence
actaaaacaacgttactgaagattt

SEQ ID NO: 63668 - DNA, 25 bp, Probe sequence
aactaaaacaacgttactgaagatt

SEQ ID NO: 63669 - DNA, 25 bp, Probe sequence
aatcttcagtaactaaaacaacgtt

SEQ ID NO: 63670 - DNA, 25 bp, Probe sequence
ctaaaacaacgttactgaagatttt

SEQ ID NO: 63671 - DNA, 25 bp, Probe sequence
taactaaaacaacgttactgaagat

SEQ ID NO: 63672 - DNA, 25 bp, Probe sequence
atcttcagtaactaaaacaacgtta

SEQ ID NO: 63673 - DNA, 25 bp, Probe sequence
gtaactaaaacaacgttactgaaga

SEQ ID NO: 63674 - DNA, 25 bp, Probe sequence
tcttcagtaactaaaacaacgttac

SEQ ID NO: 63675 - DNA, 25 bp, Probe sequence
agaaatcggaatttgttagaggagg

SEQ ID NO: 63676 - DNA, 25 bp, Probe sequence
gaaatcggaatttgttagaggaggg

SEQ ID NO: 63677 - DNA, 25 bp, Probe sequence
tagaaatcggaatttgttagaggag

SEQ ID NO: 63678 - DNA, 25 bp, Probe sequence
agggaatggaaatttagaaatcgga

SEQ ID NO: 63679 - DNA, 25 bp, Probe sequence
gggaatggaaatttagaaatcggaa

SEQ ID NO: 63680 - DNA, 25 bp, Probe sequence
aagggaatggaaatttagaaatcgg

SEQ ID NO: 63681 - DNA, 25 bp, Probe sequence
ttagaaatcggaatttgttagagga

SEQ ID NO: 63682 - DNA, 25 bp, Probe sequence
gaagggaatggaaatttagaaatcg

SEQ ID NO: 63683 - DNA, 25 bp, Probe sequence
tttagaaatcggaatttgttagagg

SEQ ID NO: 63684 - DNA, 25 bp, Probe sequence
cctcctctaacaaattccgatttct

SEQ ID NO: 63685 - DNA, 25 bp, Probe sequence
ccctcctctaacaaattccgatttc

SEQ ID NO: 63686 - DNA, 25 bp, Probe sequence
ctcctctaacaaattccgatttcta

SEQ ID NO: 63687 - DNA, 25 bp, Probe sequence
tccgatttctaaatttccattccct

SEQ ID NO: 63688 - DNA, 25 bp, Probe sequence
ccgatttctaaatttccattccctt

SEQ ID NO: 63689 - DNA, 25 bp, Probe sequence
ttccgatttctaaatttccattccc

SEQ ID NO: 63690 - DNA, 25 bp, Probe sequence
tcctctaacaaattccgatttctaa

SEQ ID NO: 63691 - DNA, 25 bp, Probe sequence
cgatttctaaatttccattcccttc

SEQ ID NO: 63692 - DNA, 25 bp, Probe sequence
cctctaacaaattccgatttctaaa

SEQ ID NO: 63693 - DNA, 25 bp, Probe sequence
tatgctttgtaaattaggctggaga

SEQ ID NO: 63694 - DNA, 25 bp, Probe sequence
atgctttgtaaattaggctggagac

SEQ ID NO: 63695 - DNA, 25 bp, Probe sequence
aaattagattgaaagtaggaggcat

SEQ ID NO: 63696 - DNA, 25 bp, Probe sequence
tgtaaattaggctggagacatatct

SEQ ID NO: 63697 - DNA, 25 bp, Probe sequence
gctttgtaaattaggctggagacat

SEQ ID NO: 63698 - DNA, 25 bp, Probe sequence
ctttgtaaattaggctggagacata

SEQ ID NO: 63699 - DNA, 25 bp, Probe sequence
ttgtaaattaggctggagacatatc

SEQ ID NO: 63700 - DNA, 25 bp, Probe sequence
aattagattgaaagtaggaggcata

SEQ ID NO: 63701 - DNA, 25 bp, Probe sequence
attagattgaaagtaggaggcatat

SEQ ID NO: 63702 - DNA, 25 bp, Probe sequence
tctccagcctaatttacaaagcata

SEQ ID NO: 63703 - DNA, 25 bp, Probe sequence
gtctccagcctaatttacaaagcat

SEQ ID NO: 63704 - DNA, 25 bp, Probe sequence
atgcctcctactttcaatctaattt

SEQ ID NO: 63705 - DNA, 25 bp, Probe sequence
agatatgtctccagcctaatttaca

SEQ ID NO: 63706 - DNA, 25 bp, Probe sequence
atgtctccagcctaatttacaaagc

SEQ ID NO: 63707 - DNA, 25 bp, Probe sequence
tatgtctccagcctaatttacaaag

SEQ ID NO: 63708 - DNA, 25 bp, Probe sequence
gatatgtctccagcctaatttacaa

SEQ ID NO: 63709 - DNA, 25 bp, Probe sequence
tatgcctcctactttcaatctaatt

SEQ ID NO: 63710 - DNA, 25 bp, Probe sequence
atatgcctcctactttcaatctaat

SEQ ID NO: 63711 - DNA, 25 bp, Probe sequence
tttgtcgaggtttacttatatgggg

SEQ ID NO: 63712 - DNA, 25 bp, Probe sequence
ttttgtcgaggtttacttatatggg

SEQ ID NO: 63713 - DNA, 25 bp, Probe sequence
attttgtcgaggtttacttatatgg

SEQ ID NO: 63714 - DNA, 25 bp, Probe sequence
gacgattttgtcgaggtttacttat

SEQ ID NO: 63715 - DNA, 25 bp, Probe sequence
acgattttgtcgaggtttacttata

SEQ ID NO: 63716 - DNA, 25 bp, Probe sequence
gattttgtcgaggtttacttatatg

SEQ ID NO: 63717 - DNA, 25 bp, Probe sequence
cgattttgtcgaggtttacttatat

SEQ ID NO: 63718 - DNA, 25 bp, Probe sequence
ccccatataagtaaacctcgacaaa

SEQ ID NO: 63719 - DNA, 25 bp, Probe sequence
cccatataagtaaacctcgacaaaa

SEQ ID NO: 63720 - DNA, 25 bp, Probe sequence
ccatataagtaaacctcgacaaaat

SEQ ID NO: 63721 - DNA, 25 bp, Probe sequence
ataagtaaacctcgacaaaatcgtc

SEQ ID NO: 63722 - DNA, 25 bp, Probe sequence
tataagtaaacctcgacaaaatcgt

SEQ ID NO: 63723 - DNA, 25 bp, Probe sequence
catataagtaaacctcgacaaaatc

SEQ ID NO: 63724 - DNA, 25 bp, Probe sequence
atataagtaaacctcgacaaaatcg

SEQ ID NO: 63725 - DNA, 25 bp, Probe sequence
tcattcaaataggagagtgagatgt

SEQ ID NO: 63726 - DNA, 25 bp, Probe sequence
ttcattcaaataggagagtgagatg

SEQ ID NO: 63727 - DNA, 25 bp, Probe sequence
attcattcaaataggagagtgagat

SEQ ID NO: 63728 - DNA, 25 bp, Probe sequence
tattcattcaaataggagagtgaga

SEQ ID NO: 63729 - DNA, 25 bp, Probe sequence
ttattcattcaaataggagagtgag

SEQ ID NO: 63730 - DNA, 25 bp, Probe sequence
cgtataacttactactaacaaagga

SEQ ID NO: 63731 - DNA, 25 bp, Probe sequence
atgtaagatgtgttagaatatacgt

SEQ ID NO: 63732 - DNA, 25 bp, Probe sequence
tttattcattcaaataggagagtga

SEQ ID NO: 63733 - DNA, 25 bp, Probe sequence
acgtataacttactactaacaaagg

SEQ ID NO: 63734 - DNA, 25 bp, Probe sequence
acatctcactctcctatttgaatga

SEQ ID NO: 63735 - DNA, 25 bp, Probe sequence
catctcactctcctatttgaatgaa

SEQ ID NO: 63736 - DNA, 25 bp, Probe sequence
atctcactctcctatttgaatgaat

SEQ ID NO: 63737 - DNA, 25 bp, Probe sequence
tctcactctcctatttgaatgaata

SEQ ID NO: 63738 - DNA, 25 bp, Probe sequence
ctcactctcctatttgaatgaataa

SEQ ID NO: 63739 - DNA, 25 bp, Probe sequence
tcctttgttagtagtaagttatacg

SEQ ID NO: 63740 - DNA, 25 bp, Probe sequence
acgtatattctaacacatcttacat

SEQ ID NO: 63741 - DNA, 25 bp, Probe sequence
tcactctcctatttgaatgaataaa

SEQ ID NO: 63742 - DNA, 25 bp, Probe sequence
cctttgttagtagtaagttatacgt

SEQ ID NO: 63743 - DNA, 25 bp, Probe sequence
tggatactattcatcgactgtaagg

SEQ ID NO: 63744 - DNA, 25 bp, Probe sequence
aatgtggatactattcatcgactgt

SEQ ID NO: 63745 - DNA, 25 bp, Probe sequence
acaatgtggatactattcatcgact

SEQ ID NO: 63746 - DNA, 25 bp, Probe sequence
ggatactattcatcgactgtaagga

SEQ ID NO: 63747 - DNA, 25 bp, Probe sequence
tgtggatactattcatcgactgtaa

SEQ ID NO: 63748 - DNA, 25 bp, Probe sequence
caatgtggatactattcatcgactg

SEQ ID NO: 63749 - DNA, 25 bp, Probe sequence
ctattcatcgactgtaaggagtgag

SEQ ID NO: 63750 - DNA, 25 bp, Probe sequence
atgtggatactattcatcgactgta

SEQ ID NO: 63751 - DNA, 25 bp, Probe sequence
gtggatactattcatcgactgtaag

SEQ ID NO: 63752 - DNA, 25 bp, Probe sequence
ccttacagtcgatgaatagtatcca

SEQ ID NO: 63753 - DNA, 25 bp, Probe sequence
agtcgatgaatagtatccacattgt

SEQ ID NO: 63754 - DNA, 25 bp, Probe sequence
acagtcgatgaatagtatccacatt

SEQ ID NO: 63755 - DNA, 25 bp, Probe sequence
tccttacagtcgatgaatagtatcc

SEQ ID NO: 63756 - DNA, 25 bp, Probe sequence
cagtcgatgaatagtatccacattg

SEQ ID NO: 63757 - DNA, 25 bp, Probe sequence
ttacagtcgatgaatagtatccaca

SEQ ID NO: 63758 - DNA, 25 bp, Probe sequence
tacagtcgatgaatagtatccacat

SEQ ID NO: 63759 - DNA, 25 bp, Probe sequence
ctcactccttacagtcgatgaatag

SEQ ID NO: 63760 - DNA, 25 bp, Probe sequence
cttacagtcgatgaatagtatccac

SEQ ID NO: 63761 - DNA, 25 bp, Probe sequence
aattaagcaacgcactatgaaagga

SEQ ID NO: 63762 - DNA, 25 bp, Probe sequence
attaagcaacgcactatgaaaggag

SEQ ID NO: 63763 - DNA, 25 bp, Probe sequence
taattaagcaacgcactatgaaagg

SEQ ID NO: 63764 - DNA, 25 bp, Probe sequence
ttaagcaacgcactatgaaaggaga

SEQ ID NO: 63765 - DNA, 25 bp, Probe sequence
caacgcactatgaaaggagactctt

SEQ ID NO: 63766 - DNA, 25 bp, Probe sequence
cactatgaaaggagactctttggag

SEQ ID NO: 63767 - DNA, 25 bp, Probe sequence
taagcaacgcactatgaaaggagac

SEQ ID NO: 63768 - DNA, 25 bp, Probe sequence
cgatattaattaagcaacgcactat

SEQ ID NO: 63769 - DNA, 25 bp, Probe sequence
gcactatgaaaggagactctttgga

SEQ ID NO: 63770 - DNA, 25 bp, Probe sequence
tcctttcatagtgcgttgcttaatt

SEQ ID NO: 63771 - DNA, 25 bp, Probe sequence
ctcctttcatagtgcgttgcttaat

SEQ ID NO: 63772 - DNA, 25 bp, Probe sequence
cctttcatagtgcgttgcttaatta

SEQ ID NO: 63773 - DNA, 25 bp, Probe sequence
tctcctttcatagtgcgttgcttaa

SEQ ID NO: 63774 - DNA, 25 bp, Probe sequence
aagagtctcctttcatagtgcgttg

SEQ ID NO: 63775 - DNA, 25 bp, Probe sequence
ctccaaagagtctcctttcatagtg

SEQ ID NO: 63776 - DNA, 25 bp, Probe sequence
gtctcctttcatagtgcgttgctta

SEQ ID NO: 63777 - DNA, 25 bp, Probe sequence
atagtgcgttgcttaattaatatcg

SEQ ID NO: 63778 - DNA, 25 bp, Probe sequence
aaagagtctcctttcatagtgcgtt

SEQ ID NO: 63779 - DNA, 25 bp, Probe sequence
cgcttacattatgaacagattgtga

SEQ ID NO: 63780 - DNA, 25 bp, Probe sequence
tcgcttacattatgaacagattgtg

SEQ ID NO: 63781 - DNA, 25 bp, Probe sequence
ttcgcttacattatgaacagattgt

SEQ ID NO: 63782 - DNA, 25 bp, Probe sequence
attcgcttacattatgaacagattg

SEQ ID NO: 63783 - DNA, 25 bp, Probe sequence
gcttacattatgaacagattgtgac

SEQ ID NO: 63784 - DNA, 25 bp, Probe sequence
gtattcgcttacattatgaacagat

SEQ ID NO: 63785 - DNA, 25 bp, Probe sequence
aaaggttgaaatggtagagatagca

SEQ ID NO: 63786 - DNA, 25 bp, Probe sequence
aaggttgaaatggtagagatagcat

SEQ ID NO: 63787 - DNA, 25 bp, Probe sequence
cttacattatgaacagattgtgaca

SEQ ID NO: 63788 - DNA, 25 bp, Probe sequence
cacaatctgttcataatgtaagcga

SEQ ID NO: 63789 - DNA, 25 bp, Probe sequence
tcacaatctgttcataatgtaagcg

SEQ ID NO: 63790 - DNA, 25 bp, Probe sequence
acaatctgttcataatgtaagcgaa

SEQ ID NO: 63791 - DNA, 25 bp, Probe sequence
caatctgttcataatgtaagcgaat

SEQ ID NO: 63792 - DNA, 25 bp, Probe sequence
gtcacaatctgttcataatgtaagc

SEQ ID NO: 63793 - DNA, 25 bp, Probe sequence
atctgttcataatgtaagcgaatac

SEQ ID NO: 63794 - DNA, 25 bp, Probe sequence
tgctatctctaccatttcaaccttt

SEQ ID NO: 63795 - DNA, 25 bp, Probe sequence
atgctatctctaccatttcaacctt

SEQ ID NO: 63796 - DNA, 25 bp, Probe sequence
tgtcacaatctgttcataatgtaag

SEQ ID NO: 63797 - DNA, 25 bp, Probe sequence
tttaaacatttggaagaaatatgca

SEQ ID NO: 63798 - DNA, 25 bp, Probe sequence
acatgattttaaacatttggaagaa

SEQ ID NO: 63799 - DNA, 25 bp, Probe sequence
aacatgattttaaacatttggaaga

SEQ ID NO: 63800 - DNA, 25 bp, Probe sequence
ttaaacatttggaagaaatatgcat

SEQ ID NO: 63801 - DNA, 25 bp, Probe sequence
catgattttaaacatttggaagaaa

SEQ ID NO: 63802 - DNA, 25 bp, Probe sequence
ttttaaacatttggaagaaatatgc

SEQ ID NO: 63803 - DNA, 25 bp, Probe sequence
tgcatatttcttccaaatgtttaaa

SEQ ID NO: 63804 - DNA, 25 bp, Probe sequence
tcttccaaatgtttaaaatcatgtt

SEQ ID NO: 63805 - DNA, 25 bp, Probe sequence
ttcttccaaatgtttaaaatcatgt

SEQ ID NO: 63806 - DNA, 25 bp, Probe sequence
atgcatatttcttccaaatgtttaa

SEQ ID NO: 63807 - DNA, 25 bp, Probe sequence
tttcttccaaatgtttaaaatcatg

SEQ ID NO: 63808 - DNA, 25 bp, Probe sequence
gcatatttcttccaaatgtttaaaa

SEQ ID NO: 63809 - DNA, 25 bp, Probe sequence
ttatggaataagaggaggattaagc

SEQ ID NO: 63810 - DNA, 25 bp, Probe sequence
aatgttatggaataagaggaggatt

SEQ ID NO: 63811 - DNA, 25 bp, Probe sequence
tgttatggaataagaggaggattaa

SEQ ID NO: 63812 - DNA, 25 bp, Probe sequence
atgttatggaataagaggaggatta

SEQ ID NO: 63813 - DNA, 25 bp, Probe sequence
gttatggaataagaggaggattaag

SEQ ID NO: 63814 - DNA, 25 bp, Probe sequence
aaatgttatggaataagaggaggat

SEQ ID NO: 63815 - DNA, 25 bp, Probe sequence
acacctcgtatcaaattcaatttat

SEQ ID NO: 63816 - DNA, 25 bp, Probe sequence
atacacctcgtatcaaattcaattt

SEQ ID NO: 63817 - DNA, 25 bp, Probe sequence
cacctcgtatcaaattcaatttatc

SEQ ID NO: 63818 - DNA, 25 bp, Probe sequence
gcttaatcctcctcttattccataa

SEQ ID NO: 63819 - DNA, 25 bp, Probe sequence
aatcctcctcttattccataacatt

SEQ ID NO: 63820 - DNA, 25 bp, Probe sequence
ttaatcctcctcttattccataaca

SEQ ID NO: 63821 - DNA, 25 bp, Probe sequence
taatcctcctcttattccataacat

SEQ ID NO: 63822 - DNA, 25 bp, Probe sequence
cttaatcctcctcttattccataac

SEQ ID NO: 63823 - DNA, 25 bp, Probe sequence
atcctcctcttattccataacattt

SEQ ID NO: 63824 - DNA, 25 bp, Probe sequence
ataaattgaatttgatacgaggtgt

SEQ ID NO: 63825 - DNA, 25 bp, Probe sequence
aaattgaatttgatacgaggtgtat

SEQ ID NO: 63826 - DNA, 25 bp, Probe sequence
gataaattgaatttgatacgaggtg

SEQ ID NO: 63827 - DNA, 25 bp, Probe sequence
gatacagaaaggactaaatcaaaca

SEQ ID NO: 63828 - DNA, 25 bp, Probe sequence
tcaagtttgatacagaaaggactaa

SEQ ID NO: 63829 - DNA, 25 bp, Probe sequence
caagtttgatacagaaaggactaaa

SEQ ID NO: 63830 - DNA, 25 bp, Probe sequence
acagaaaggactaaatcaaacattt

SEQ ID NO: 63831 - DNA, 25 bp, Probe sequence
tacagaaaggactaaatcaaacatt

SEQ ID NO: 63832 - DNA, 25 bp, Probe sequence
agtttgatacagaaaggactaaatc

SEQ ID NO: 63833 - DNA, 25 bp, Probe sequence
atacagaaaggactaaatcaaacat

SEQ ID NO: 63834 - DNA, 25 bp, Probe sequence
aagtttgatacagaaaggactaaat

SEQ ID NO: 63835 - DNA, 25 bp, Probe sequence
aatcaagtttgatacagaaaggact

SEQ ID NO: 63836 - DNA, 25 bp, Probe sequence
tgtttgatttagtcctttctgtatc

SEQ ID NO: 63837 - DNA, 25 bp, Probe sequence
ttagtcctttctgtatcaaacttga

SEQ ID NO: 63838 - DNA, 25 bp, Probe sequence
tttagtcctttctgtatcaaacttg

SEQ ID NO: 63839 - DNA, 25 bp, Probe sequence
aaatgtttgatttagtcctttctgt

SEQ ID NO: 63840 - DNA, 25 bp, Probe sequence
aatgtttgatttagtcctttctgta

SEQ ID NO: 63841 - DNA, 25 bp, Probe sequence
gatttagtcctttctgtatcaaact

SEQ ID NO: 63842 - DNA, 25 bp, Probe sequence
atgtttgatttagtcctttctgtat

SEQ ID NO: 63843 - DNA, 25 bp, Probe sequence
atttagtcctttctgtatcaaactt

SEQ ID NO: 63844 - DNA, 25 bp, Probe sequence
agtcctttctgtatcaaacttgatt

SEQ ID NO: 63845 - DNA, 25 bp, Probe sequence
acagctttgttcacgttatcatata

SEQ ID NO: 63846 - DNA, 25 bp, Probe sequence
tcggactgatggaaaattatttgat

SEQ ID NO: 63847 - DNA, 25 bp, Probe sequence
atcggactgatggaaaattatttga

SEQ ID NO: 63848 - DNA, 25 bp, Probe sequence
cagctttgttcacgttatcatatat

SEQ ID NO: 63849 - DNA, 25 bp, Probe sequence
aatcggactgatggaaaattatttg

SEQ ID NO: 63850 - DNA, 25 bp, Probe sequence
atctcctcaaaagctgtagtttcaa

SEQ ID NO: 63851 - DNA, 25 bp, Probe sequence
aatctcctcaaaagctgtagtttca

SEQ ID NO: 63852 - DNA, 25 bp, Probe sequence
aaatctcctcaaaagctgtagtttc

SEQ ID NO: 63853 - DNA, 25 bp, Probe sequence
aaaatctcctcaaaagctgtagttt

SEQ ID NO: 63854 - DNA, 25 bp, Probe sequence
tatatgataacgtgaacaaagctgt

SEQ ID NO: 63855 - DNA, 25 bp, Probe sequence
atcaaataattttccatcagtccga

SEQ ID NO: 63856 - DNA, 25 bp, Probe sequence
atatatgataacgtgaacaaagctg

SEQ ID NO: 63857 - DNA, 25 bp, Probe sequence
tcaaataattttccatcagtccgat

SEQ ID NO: 63858 - DNA, 25 bp, Probe sequence
caaataattttccatcagtccgatt

SEQ ID NO: 63859 - DNA, 25 bp, Probe sequence
tgaaactacagcttttgaggagatt

SEQ ID NO: 63860 - DNA, 25 bp, Probe sequence
ttgaaactacagcttttgaggagat

SEQ ID NO: 63861 - DNA, 25 bp, Probe sequence
gaaactacagcttttgaggagattt

SEQ ID NO: 63862 - DNA, 25 bp, Probe sequence
aaactacagcttttgaggagatttt

SEQ ID NO: 63863 - DNA, 25 bp, Probe sequence
aacagcaccagtttatatgaataac

SEQ ID NO: 63864 - DNA, 25 bp, Probe sequence
ggatcaaacagcaccagtttatatg

SEQ ID NO: 63865 - DNA, 25 bp, Probe sequence
tggatcaaacagcaccagtttatat

SEQ ID NO: 63866 - DNA, 25 bp, Probe sequence
gatcaaacagcaccagtttatatga

SEQ ID NO: 63867 - DNA, 25 bp, Probe sequence
ttggatcaaacagcaccagtttata

SEQ ID NO: 63868 - DNA, 25 bp, Probe sequence
tcaaacagcaccagtttatatgaat

SEQ ID NO: 63869 - DNA, 25 bp, Probe sequence
atcaaacagcaccagtttatatgaa

SEQ ID NO: 63870 - DNA, 25 bp, Probe sequence
attggatcaaacagcaccagtttat

SEQ ID NO: 63871 - DNA, 25 bp, Probe sequence
aattggatcaaacagcaccagttta

SEQ ID NO: 63872 - DNA, 25 bp, Probe sequence
gttattcatataaactggtgctgtt

SEQ ID NO: 63873 - DNA, 25 bp, Probe sequence
catataaactggtgctgtttgatcc

SEQ ID NO: 63874 - DNA, 25 bp, Probe sequence
atataaactggtgctgtttgatcca

SEQ ID NO: 63875 - DNA, 25 bp, Probe sequence
tataaactggtgctgtttgatccaa

SEQ ID NO: 63876 - DNA, 25 bp, Probe sequence
tcatataaactggtgctgtttgatc

SEQ ID NO: 63877 - DNA, 25 bp, Probe sequence
ttcatataaactggtgctgtttgat

SEQ ID NO: 63878 - DNA, 25 bp, Probe sequence
attcatataaactggtgctgtttga

SEQ ID NO: 63879 - DNA, 25 bp, Probe sequence
ataaactggtgctgtttgatccaat

SEQ ID NO: 63880 - DNA, 25 bp, Probe sequence
taaactggtgctgtttgatccaatt

SEQ ID NO: 63881 - DNA, 25 bp, Probe sequence
tgtctcttggtacaataacaataca

SEQ ID NO: 63882 - DNA, 25 bp, Probe sequence
gtgtctcttggtacaataacaatac

SEQ ID NO: 63883 - DNA, 25 bp, Probe sequence
agtgtctcttggtacaataacaata

SEQ ID NO: 63884 - DNA, 25 bp, Probe sequence
tagtgtctcttggtacaataacaat

SEQ ID NO: 63885 - DNA, 25 bp, Probe sequence
atagtgtctcttggtacaataacaa

SEQ ID NO: 63886 - DNA, 25 bp, Probe sequence
ctcttggtacaataacaatacaact

SEQ ID NO: 63887 - DNA, 25 bp, Probe sequence
tctcttggtacaataacaatacaac

SEQ ID NO: 63888 - DNA, 25 bp, Probe sequence
gtctcttggtacaataacaatacaa

SEQ ID NO: 63889 - DNA, 25 bp, Probe sequence
tatagtgtctcttggtacaataaca

SEQ ID NO: 63890 - DNA, 25 bp, Probe sequence
tgtattgttattgtaccaagagaca

SEQ ID NO: 63891 - DNA, 25 bp, Probe sequence
ttgttattgtaccaagagacactat

SEQ ID NO: 63892 - DNA, 25 bp, Probe sequence
attgttattgtaccaagagacacta

SEQ ID NO: 63893 - DNA, 25 bp, Probe sequence
tattgttattgtaccaagagacact

SEQ ID NO: 63894 - DNA, 25 bp, Probe sequence
gtattgttattgtaccaagagacac

SEQ ID NO: 63895 - DNA, 25 bp, Probe sequence
ttgtattgttattgtaccaagagac

SEQ ID NO: 63896 - DNA, 25 bp, Probe sequence
gttgtattgttattgtaccaagaga

SEQ ID NO: 63897 - DNA, 25 bp, Probe sequence
agttgtattgttattgtaccaagag

SEQ ID NO: 63898 - DNA, 25 bp, Probe sequence
tgttattgtaccaagagacactata

SEQ ID NO: 63899 - DNA, 25 bp, Probe sequence
agcaataggttaaacaaaggaggaa

SEQ ID NO: 63900 - DNA, 25 bp, Probe sequence
tagcaataggttaaacaaaggagga

SEQ ID NO: 63901 - DNA, 25 bp, Probe sequence
gcaataggttaaacaaaggaggaat

SEQ ID NO: 63902 - DNA, 25 bp, Probe sequence
atagcaataggttaaacaaaggagg

SEQ ID NO: 63903 - DNA, 25 bp, Probe sequence
caataggttaaacaaaggaggaatt

SEQ ID NO: 63904 - DNA, 25 bp, Probe sequence
aatagcaataggttaaacaaaggag

SEQ ID NO: 63905 - DNA, 25 bp, Probe sequence
gaattgtcttcatatagtttggtct

SEQ ID NO: 63906 - DNA, 25 bp, Probe sequence
taggttaaacaaaggaggaattcag

SEQ ID NO: 63907 - DNA, 25 bp, Probe sequence
taatagcaataggttaaacaaagga

SEQ ID NO: 63908 - DNA, 25 bp, Probe sequence
ttcctcctttgtttaacctattgct

SEQ ID NO: 63909 - DNA, 25 bp, Probe sequence
tcctcctttgtttaacctattgcta

SEQ ID NO: 63910 - DNA, 25 bp, Probe sequence
attcctcctttgtttaacctattgc

SEQ ID NO: 63911 - DNA, 25 bp, Probe sequence
cctcctttgtttaacctattgctat

SEQ ID NO: 63912 - DNA, 25 bp, Probe sequence
aattcctcctttgtttaacctattg

SEQ ID NO: 63913 - DNA, 25 bp, Probe sequence
ctcctttgtttaacctattgctatt

SEQ ID NO: 63914 - DNA, 25 bp, Probe sequence
agaccaaactatatgaagacaattc

SEQ ID NO: 63915 - DNA, 25 bp, Probe sequence
ctgaattcctcctttgtttaaccta

SEQ ID NO: 63916 - DNA, 25 bp, Probe sequence
tcctttgtttaacctattgctatta

SEQ ID NO: 63917 - DNA, 25 bp, Probe sequence
gtattgttaatcgtagtatgtttga

SEQ ID NO: 63918 - DNA, 25 bp, Probe sequence
agtattgttaatcgtagtatgtttg

SEQ ID NO: 63919 - DNA, 25 bp, Probe sequence
ttgttaatcgtagtatgtttgaatt

SEQ ID NO: 63920 - DNA, 25 bp, Probe sequence
attgttaatcgtagtatgtttgaat

SEQ ID NO: 63921 - DNA, 25 bp, Probe sequence
caaacatactacgattaacaatact

SEQ ID NO: 63922 - DNA, 25 bp, Probe sequence
tcaaacatactacgattaacaatac

SEQ ID NO: 63923 - DNA, 25 bp, Probe sequence
aattcaaacatactacgattaacaa

SEQ ID NO: 63924 - DNA, 25 bp, Probe sequence
attcaaacatactacgattaacaat

SEQ ID NO: 63925 - DNA, 25 bp, Probe sequence
cgcaaagtcgttacatttatagcaa

SEQ ID NO: 63926 - DNA, 25 bp, Probe sequence
tgctgattagtaggatataacagtg

SEQ ID NO: 63927 - DNA, 25 bp, Probe sequence
gcaaagtcgttacatttatagcaat

SEQ ID NO: 63928 - DNA, 25 bp, Probe sequence
gctgattagtaggatataacagtga

SEQ ID NO: 63929 - DNA, 25 bp, Probe sequence
atgctgattagtaggatataacagt

SEQ ID NO: 63930 - DNA, 25 bp, Probe sequence
taatagccaccctccgttagtttga

SEQ ID NO: 63931 - DNA, 25 bp, Probe sequence
caaagtcgttacatttatagcaatt

SEQ ID NO: 63932 - DNA, 25 bp, Probe sequence
aatgctgattagtaggatataacag

SEQ ID NO: 63933 - DNA, 25 bp, Probe sequence
aaagacgcaaagtcgttacatttat

SEQ ID NO: 63934 - DNA, 25 bp, Probe sequence
ttgctataaatgtaacgactttgcg

SEQ ID NO: 63935 - DNA, 25 bp, Probe sequence
cactgttatatcctactaatcagca

SEQ ID NO: 63936 - DNA, 25 bp, Probe sequence
attgctataaatgtaacgactttgc

SEQ ID NO: 63937 - DNA, 25 bp, Probe sequence
tcactgttatatcctactaatcagc

SEQ ID NO: 63938 - DNA, 25 bp, Probe sequence
actgttatatcctactaatcagcat

SEQ ID NO: 63939 - DNA, 25 bp, Probe sequence
tcaaactaacggagggtggctatta

SEQ ID NO: 63940 - DNA, 25 bp, Probe sequence
aattgctataaatgtaacgactttg

SEQ ID NO: 63941 - DNA, 25 bp, Probe sequence
ctgttatatcctactaatcagcatt

SEQ ID NO: 63942 - DNA, 25 bp, Probe sequence
aacgactttgcgtctttatttcttt

SEQ ID NO: 63943 - DNA, 25 bp, Probe sequence
tgcttagtgagacctttgctattta

SEQ ID NO: 63944 - DNA, 25 bp, Probe sequence
attgcttagtgagacctttgctatt

SEQ ID NO: 63945 - DNA, 25 bp, Probe sequence
ttgcttagtgagacctttgctattt

SEQ ID NO: 63946 - DNA, 25 bp, Probe sequence
ttaaattgcttagtgagacctttgc

SEQ ID NO: 63947 - DNA, 25 bp, Probe sequence
aattgcttagtgagacctttgctat

SEQ ID NO: 63948 - DNA, 25 bp, Probe sequence
gcttagtgagacctttgctatttat

SEQ ID NO: 63949 - DNA, 25 bp, Probe sequence
aaattgcttagtgagacctttgcta

SEQ ID NO: 63950 - DNA, 25 bp, Probe sequence
taaattgcttagtgagacctttgct

SEQ ID NO: 63951 - DNA, 25 bp, Probe sequence
tgtatcaaatgaataacctatggca

SEQ ID NO: 63952 - DNA, 25 bp, Probe sequence
taaatagcaaaggtctcactaagca

SEQ ID NO: 63953 - DNA, 25 bp, Probe sequence
aatagcaaaggtctcactaagcaat

SEQ ID NO: 63954 - DNA, 25 bp, Probe sequence
aaatagcaaaggtctcactaagcaa

SEQ ID NO: 63955 - DNA, 25 bp, Probe sequence
gcaaaggtctcactaagcaatttaa

SEQ ID NO: 63956 - DNA, 25 bp, Probe sequence
atagcaaaggtctcactaagcaatt

SEQ ID NO: 63957 - DNA, 25 bp, Probe sequence
agcaaaggtctcactaagcaattta

SEQ ID NO: 63958 - DNA, 25 bp, Probe sequence
tagcaaaggtctcactaagcaattt

SEQ ID NO: 63959 - DNA, 25 bp, Probe sequence
ataaatagcaaaggtctcactaagc

SEQ ID NO: 63960 - DNA, 25 bp, Probe sequence
tgccataggttattcatttgataca

SEQ ID NO: 63961 - DNA, 25 bp, Probe sequence
tgatgtgaagcggacaatcttaatt

SEQ ID NO: 63962 - DNA, 25 bp, Probe sequence
ttgatgtgaagcggacaatcttaat

SEQ ID NO: 63963 - DNA, 25 bp, Probe sequence
gtgaagcggacaatcttaatttagt

SEQ ID NO: 63964 - DNA, 25 bp, Probe sequence
tgaagcggacaatcttaatttagtt

SEQ ID NO: 63965 - DNA, 25 bp, Probe sequence
tgtgaagcggacaatcttaatttag

SEQ ID NO: 63966 - DNA, 25 bp, Probe sequence
gatgtgaagcggacaatcttaattt

SEQ ID NO: 63967 - DNA, 25 bp, Probe sequence
atgtgaagcggacaatcttaattta

SEQ ID NO: 63968 - DNA, 25 bp, Probe sequence
gaagcggacaatcttaatttagttt

SEQ ID NO: 63969 - DNA, 25 bp, Probe sequence
aagcggacaatcttaatttagttta

SEQ ID NO: 63970 - DNA, 25 bp, Probe sequence
attaagattgtccgcttcacatcaa

SEQ ID NO: 63971 - DNA, 25 bp, Probe sequence
aattaagattgtccgcttcacatca

SEQ ID NO: 63972 - DNA, 25 bp, Probe sequence
actaaattaagattgtccgcttcac

SEQ ID NO: 63973 - DNA, 25 bp, Probe sequence
aactaaattaagattgtccgcttca

SEQ ID NO: 63974 - DNA, 25 bp, Probe sequence
aaattaagattgtccgcttcacatc

SEQ ID NO: 63975 - DNA, 25 bp, Probe sequence
ctaaattaagattgtccgcttcaca

SEQ ID NO: 63976 - DNA, 25 bp, Probe sequence
taaattaagattgtccgcttcacat

SEQ ID NO: 63977 - DNA, 25 bp, Probe sequence
aaactaaattaagattgtccgcttc

SEQ ID NO: 63978 - DNA, 25 bp, Probe sequence
taaactaaattaagattgtccgctt

SEQ ID NO: 63979 - DNA, 25 bp, Probe sequence
aagcaaattaggtgttaatgtgtca

SEQ ID NO: 63980 - DNA, 25 bp, Probe sequence
agcaaattaggtgttaatgtgtcat

SEQ ID NO: 63981 - DNA, 25 bp, Probe sequence
aaagcaaattaggtgttaatgtgtc

SEQ ID NO: 63982 - DNA, 25 bp, Probe sequence
gcaaattaggtgttaatgtgtcata

SEQ ID NO: 63983 - DNA, 25 bp, Probe sequence
taaagcaaattaggtgttaatgtgt

SEQ ID NO: 63984 - DNA, 25 bp, Probe sequence
aggtgttaatgtgtcataatgataa

SEQ ID NO: 63985 - DNA, 25 bp, Probe sequence
ttaggtgttaatgtgtcataatgat

SEQ ID NO: 63986 - DNA, 25 bp, Probe sequence
attaggtgttaatgtgtcataatga

SEQ ID NO: 63987 - DNA, 25 bp, Probe sequence
gtgattttattgaatggagtggaca

SEQ ID NO: 63988 - DNA, 25 bp, Probe sequence
tgacacattaacacctaatttgctt

SEQ ID NO: 63989 - DNA, 25 bp, Probe sequence
atgacacattaacacctaatttgct

SEQ ID NO: 63990 - DNA, 25 bp, Probe sequence
gacacattaacacctaatttgcttt

SEQ ID NO: 63991 - DNA, 25 bp, Probe sequence
tatgacacattaacacctaatttgc

SEQ ID NO: 63992 - DNA, 25 bp, Probe sequence
acacattaacacctaatttgcttta

SEQ ID NO: 63993 - DNA, 25 bp, Probe sequence
tcattatgacacattaacacctaat

SEQ ID NO: 63994 - DNA, 25 bp, Probe sequence
atcattatgacacattaacacctaa

SEQ ID NO: 63995 - DNA, 25 bp, Probe sequence
ttatcattatgacacattaacacct

SEQ ID NO: 63996 - DNA, 25 bp, Probe sequence
tgtccactccattcaataaaatcac

SEQ ID NO: 63997 - DNA, 25 bp, Probe sequence
aactagtaacaatgagaggtgtaac

SEQ ID NO: 63998 - DNA, 25 bp, Probe sequence
agacgattggttttcaaaatggtaa

SEQ ID NO: 63999 - DNA, 25 bp, Probe sequence
aagacgattggttttcaaaatggta

SEQ ID NO: 64000 - DNA, 25 bp, Probe sequence
taagacgattggttttcaaaatggt

SEQ ID NO: 64001 - DNA, 25 bp, Probe sequence
tggtaaactagtaacaatgagaggt

SEQ ID NO: 64002 - DNA, 25 bp, Probe sequence
ggtaaactagtaacaatgagaggtg

SEQ ID NO: 64003 - DNA, 25 bp, Probe sequence
gacgattggttttcaaaatggtaaa

SEQ ID NO: 64004 - DNA, 25 bp, Probe sequence
ataagacgattggttttcaaaatgg

SEQ ID NO: 64005 - DNA, 25 bp, Probe sequence
atggtaaactagtaacaatgagagg

SEQ ID NO: 64006 - DNA, 25 bp, Probe sequence
gttacacctctcattgttactagtt

SEQ ID NO: 64007 - DNA, 25 bp, Probe sequence
accattttgaaaaccaatcgtctta

SEQ ID NO: 64008 - DNA, 25 bp, Probe sequence
taccattttgaaaaccaatcgtctt

SEQ ID NO: 64009 - DNA, 25 bp, Probe sequence
ttaccattttgaaaaccaatcgtct

SEQ ID NO: 64010 - DNA, 25 bp, Probe sequence
acctctcattgttactagtttacca

SEQ ID NO: 64011 - DNA, 25 bp, Probe sequence
cacctctcattgttactagtttacc

SEQ ID NO: 64012 - DNA, 25 bp, Probe sequence
tttaccattttgaaaaccaatcgtc

SEQ ID NO: 64013 - DNA, 25 bp, Probe sequence
ccattttgaaaaccaatcgtcttat

SEQ ID NO: 64014 - DNA, 25 bp, Probe sequence
cctctcattgttactagtttaccat

SEQ ID NO: 64015 - DNA, 25 bp, Probe sequence
agagaagattatctaggaaaggttt

SEQ ID NO: 64016 - DNA, 25 bp, Probe sequence
aagaacagtgaaattctcattcatt

SEQ ID NO: 64017 - DNA, 25 bp, Probe sequence
aaagaacagtgaaattctcattcat

SEQ ID NO: 64018 - DNA, 25 bp, Probe sequence
tagagaagattatctaggaaaggtt

SEQ ID NO: 64019 - DNA, 25 bp, Probe sequence
ttagagaagattatctaggaaaggt

SEQ ID NO: 64020 - DNA, 25 bp, Probe sequence
agaacagtgaaattctcattcatta

SEQ ID NO: 64021 - DNA, 25 bp, Probe sequence
cttagagaagattatctaggaaagg

SEQ ID NO: 64022 - DNA, 25 bp, Probe sequence
gagaagattatctaggaaaggtttt

SEQ ID NO: 64023 - DNA, 25 bp, Probe sequence
cctttcttagagaagattatctagg

SEQ ID NO: 64024 - DNA, 25 bp, Probe sequence
aaacctttcctagataatcttctct

SEQ ID NO: 64025 - DNA, 25 bp, Probe sequence
atgaatgagaatttcactgttcttt

SEQ ID NO: 64026 - DNA, 25 bp, Probe sequence
aatgaatgagaatttcactgttctt

SEQ ID NO: 64027 - DNA, 25 bp, Probe sequence
acctttcctagataatcttctctaa

SEQ ID NO: 64028 - DNA, 25 bp, Probe sequence
aacctttcctagataatcttctcta

SEQ ID NO: 64029 - DNA, 25 bp, Probe sequence
taatgaatgagaatttcactgttct

SEQ ID NO: 64030 - DNA, 25 bp, Probe sequence
cctttcctagataatcttctctaag

SEQ ID NO: 64031 - DNA, 25 bp, Probe sequence
aaaacctttcctagataatcttctc

SEQ ID NO: 64032 - DNA, 25 bp, Probe sequence
cctagataatcttctctaagaaagg

SEQ ID NO: 64033 - DNA, 25 bp, Probe sequence
ttgtatgtgtttgaatatcaagcac

SEQ ID NO: 64034 - DNA, 25 bp, Probe sequence
tttgtatgtgtttgaatatcaagca

SEQ ID NO: 64035 - DNA, 25 bp, Probe sequence
gtgtttgaatatcaagcacaaatat

SEQ ID NO: 64036 - DNA, 25 bp, Probe sequence
atttgtatgtgtttgaatatcaagc

SEQ ID NO: 64037 - DNA, 25 bp, Probe sequence
tgtatgtgtttgaatatcaagcaca

SEQ ID NO: 64038 - DNA, 25 bp, Probe sequence
gtatgtgtttgaatatcaagcacaa

SEQ ID NO: 64039 - DNA, 25 bp, Probe sequence
atgtgtttgaatatcaagcacaaat

SEQ ID NO: 64040 - DNA, 25 bp, Probe sequence
tgtgtttgaatatcaagcacaaata

SEQ ID NO: 64041 - DNA, 25 bp, Probe sequence
tatgtgtttgaatatcaagcacaaa

SEQ ID NO: 64042 - DNA, 25 bp, Probe sequence
gtgcttgatattcaaacacatacaa

SEQ ID NO: 64043 - DNA, 25 bp, Probe sequence
tgcttgatattcaaacacatacaaa

SEQ ID NO: 64044 - DNA, 25 bp, Probe sequence
gcttgatattcaaacacatacaaat

SEQ ID NO: 64045 - DNA, 25 bp, Probe sequence
atatttgtgcttgatattcaaacac

SEQ ID NO: 64046 - DNA, 25 bp, Probe sequence
tgtgcttgatattcaaacacataca

SEQ ID NO: 64047 - DNA, 25 bp, Probe sequence
ttgtgcttgatattcaaacacatac

SEQ ID NO: 64048 - DNA, 25 bp, Probe sequence
atttgtgcttgatattcaaacacat

SEQ ID NO: 64049 - DNA, 25 bp, Probe sequence
tttgtgcttgatattcaaacacata

SEQ ID NO: 64050 - DNA, 25 bp, Probe sequence
tatttgtgcttgatattcaaacaca

SEQ ID NO: 64051 - DNA, 25 bp, Probe sequence
agcaaaacctcgctttattaagttt

SEQ ID NO: 64052 - DNA, 25 bp, Probe sequence
agttgtcaagttattattttggtga

SEQ ID NO: 64053 - DNA, 25 bp, Probe sequence
tgagttgtcaagttattattttggt

SEQ ID NO: 64054 - DNA, 25 bp, Probe sequence
gagttgtcaagttattattttggtg

SEQ ID NO: 64055 - DNA, 25 bp, Probe sequence
cctcgctttattaagttttaaacca

SEQ ID NO: 64056 - DNA, 25 bp, Probe sequence
acctcgctttattaagttttaaacc

SEQ ID NO: 64057 - DNA, 25 bp, Probe sequence
ctgagttgtcaagttattattttgg

SEQ ID NO: 64058 - DNA, 25 bp, Probe sequence
gttgtcaagttattattttggtgaa

SEQ ID NO: 64059 - DNA, 25 bp, Probe sequence
taaattaaagaaaggtagtggtttc

SEQ ID NO: 64060 - DNA, 25 bp, Probe sequence
aaacttaataaagcgaggttttgct

SEQ ID NO: 64061 - DNA, 25 bp, Probe sequence
accaaaataataacttgacaactca

SEQ ID NO: 64062 - DNA, 25 bp, Probe sequence
tcaccaaaataataacttgacaact

SEQ ID NO: 64063 - DNA, 25 bp, Probe sequence
caccaaaataataacttgacaactc

SEQ ID NO: 64064 - DNA, 25 bp, Probe sequence
ggtttaaaacttaataaagcgaggt

SEQ ID NO: 64065 - DNA, 25 bp, Probe sequence
tggtttaaaacttaataaagcgagg

SEQ ID NO: 64066 - DNA, 25 bp, Probe sequence
ccaaaataataacttgacaactcag

SEQ ID NO: 64067 - DNA, 25 bp, Probe sequence
ttcaccaaaataataacttgacaac

SEQ ID NO: 64068 - DNA, 25 bp, Probe sequence
gaaaccactacctttctttaattta

SEQ ID NO: 64069 - DNA, 25 bp, Probe sequence
aggactattcttaacatctcataca

SEQ ID NO: 64070 - DNA, 25 bp, Probe sequence
ggactattcttaacatctcatacat

SEQ ID NO: 64071 - DNA, 25 bp, Probe sequence
aaggactattcttaacatctcatac

SEQ ID NO: 64072 - DNA, 25 bp, Probe sequence
ttcgaattccataacgcaatcataa

SEQ ID NO: 64073 - DNA, 25 bp, Probe sequence
ccataacgcaatcataaaaggacta

SEQ ID NO: 64074 - DNA, 25 bp, Probe sequence
tcgaattccataacgcaatcataaa

SEQ ID NO: 64075 - DNA, 25 bp, Probe sequence
aacgcaatcataaaaggactattct

SEQ ID NO: 64076 - DNA, 25 bp, Probe sequence
acgcaatcataaaaggactattctt

SEQ ID NO: 64077 - DNA, 25 bp, Probe sequence
aattccataacgcaatcataaaagg

SEQ ID NO: 64078 - DNA, 25 bp, Probe sequence
tgtatgagatgttaagaatagtcct

SEQ ID NO: 64079 - DNA, 25 bp, Probe sequence
atgtatgagatgttaagaatagtcc

SEQ ID NO: 64080 - DNA, 25 bp, Probe sequence
gtatgagatgttaagaatagtcctt

SEQ ID NO: 64081 - DNA, 25 bp, Probe sequence
ttatgattgcgttatggaattcgaa

SEQ ID NO: 64082 - DNA, 25 bp, Probe sequence
tagtccttttatgattgcgttatgg

SEQ ID NO: 64083 - DNA, 25 bp, Probe sequence
tttatgattgcgttatggaattcga

SEQ ID NO: 64084 - DNA, 25 bp, Probe sequence
agaatagtccttttatgattgcgtt

SEQ ID NO: 64085 - DNA, 25 bp, Probe sequence
aagaatagtccttttatgattgcgt

SEQ ID NO: 64086 - DNA, 25 bp, Probe sequence
ccttttatgattgcgttatggaatt

SEQ ID NO: 64087 - DNA, 25 bp, Probe sequence
tcacaaatcattctaaatatcggct

SEQ ID NO: 64088 - DNA, 25 bp, Probe sequence
ctcacaaatcattctaaatatcggc

SEQ ID NO: 64089 - DNA, 25 bp, Probe sequence
cacaaatcattctaaatatcggctt

SEQ ID NO: 64090 - DNA, 25 bp, Probe sequence
cttatttatgccttaactttgctca

SEQ ID NO: 64091 - DNA, 25 bp, Probe sequence
acttatttatgccttaactttgctc

SEQ ID NO: 64092 - DNA, 25 bp, Probe sequence
ttatttatgccttaactttgctcaa

SEQ ID NO: 64093 - DNA, 25 bp, Probe sequence
actcacaaatcattctaaatatcgg

SEQ ID NO: 64094 - DNA, 25 bp, Probe sequence
tatttatgccttaactttgctcaaa

SEQ ID NO: 64095 - DNA, 25 bp, Probe sequence
acaaatcattctaaatatcggctta

SEQ ID NO: 64096 - DNA, 25 bp, Probe sequence
agccgatatttagaatgatttgtga

SEQ ID NO: 64097 - DNA, 25 bp, Probe sequence
gccgatatttagaatgatttgtgag

SEQ ID NO: 64098 - DNA, 25 bp, Probe sequence
aagccgatatttagaatgatttgtg

SEQ ID NO: 64099 - DNA, 25 bp, Probe sequence
gagcaaagttaaggcataaataagt

SEQ ID NO: 64100 - DNA, 25 bp, Probe sequence
tgagcaaagttaaggcataaataag

SEQ ID NO: 64101 - DNA, 25 bp, Probe sequence
ttgagcaaagttaaggcataaataa

SEQ ID NO: 64102 - DNA, 25 bp, Probe sequence
ccgatatttagaatgatttgtgagt

SEQ ID NO: 64103 - DNA, 25 bp, Probe sequence
tttgagcaaagttaaggcataaata

SEQ ID NO: 64104 - DNA, 25 bp, Probe sequence
taagccgatatttagaatgatttgt

SEQ ID NO: 64105 - DNA, 25 bp, Probe sequence
ggcaagcagttattattgaggttat

SEQ ID NO: 64106 - DNA, 25 bp, Probe sequence
cggcaagcagttattattgaggtta

SEQ ID NO: 64107 - DNA, 25 bp, Probe sequence
ttaacggcaagcagttattattgag

SEQ ID NO: 64108 - DNA, 25 bp, Probe sequence
taacggcaagcagttattattgagg

SEQ ID NO: 64109 - DNA, 25 bp, Probe sequence
aagcaatacgaagattcaaggcatg

SEQ ID NO: 64110 - DNA, 25 bp, Probe sequence
gcaagcagttattattgaggttata

SEQ ID NO: 64111 - DNA, 25 bp, Probe sequence
aaagcaatacgaagattcaaggcat

SEQ ID NO: 64112 - DNA, 25 bp, Probe sequence
acggcaagcagttattattgaggtt

SEQ ID NO: 64113 - DNA, 25 bp, Probe sequence
aacggcaagcagttattattgaggt

SEQ ID NO: 64114 - DNA, 25 bp, Probe sequence
ataacctcaataataactgcttgcc

SEQ ID NO: 64115 - DNA, 25 bp, Probe sequence
taacctcaataataactgcttgccg

SEQ ID NO: 64116 - DNA, 25 bp, Probe sequence
ctcaataataactgcttgccgttaa

SEQ ID NO: 64117 - DNA, 25 bp, Probe sequence
cctcaataataactgcttgccgtta

SEQ ID NO: 64118 - DNA, 25 bp, Probe sequence
catgccttgaatcttcgtattgctt

SEQ ID NO: 64119 - DNA, 25 bp, Probe sequence
tataacctcaataataactgcttgc

SEQ ID NO: 64120 - DNA, 25 bp, Probe sequence
atgccttgaatcttcgtattgcttt

SEQ ID NO: 64121 - DNA, 25 bp, Probe sequence
acctcaataataactgcttgccgtt

SEQ ID NO: 64122 - DNA, 25 bp, Probe sequence
aacctcaataataactgcttgccgt

SEQ ID NO: 64123 - DNA, 25 bp, Probe sequence
tttccgtatattgcctgctaaacat

SEQ ID NO: 64124 - DNA, 25 bp, Probe sequence
ttccgtatattgcctgctaaacatg

SEQ ID NO: 64125 - DNA, 25 bp, Probe sequence
attttccgtatattgcctgctaaac

SEQ ID NO: 64126 - DNA, 25 bp, Probe sequence
agtattttccgtatattgcctgcta

SEQ ID NO: 64127 - DNA, 25 bp, Probe sequence
aagtattttccgtatattgcctgct

SEQ ID NO: 64128 - DNA, 25 bp, Probe sequence
gtattttccgtatattgcctgctaa

SEQ ID NO: 64129 - DNA, 25 bp, Probe sequence
actttgacatagaatgatggttaaa

SEQ ID NO: 64130 - DNA, 25 bp, Probe sequence
gaagtattttccgtatattgcctgc

SEQ ID NO: 64131 - DNA, 25 bp, Probe sequence
ttttccgtatattgcctgctaaaca

SEQ ID NO: 64132 - DNA, 25 bp, Probe sequence
atgtttagcaggcaatatacggaaa

SEQ ID NO: 64133 - DNA, 25 bp, Probe sequence
catgtttagcaggcaatatacggaa

SEQ ID NO: 64134 - DNA, 25 bp, Probe sequence
tagcaggcaatatacggaaaatact

SEQ ID NO: 64135 - DNA, 25 bp, Probe sequence
gtttagcaggcaatatacggaaaat

SEQ ID NO: 64136 - DNA, 25 bp, Probe sequence
agcaggcaatatacggaaaatactt

SEQ ID NO: 64137 - DNA, 25 bp, Probe sequence
ttagcaggcaatatacggaaaatac

SEQ ID NO: 64138 - DNA, 25 bp, Probe sequence
tttaaccatcattctatgtcaaagt

SEQ ID NO: 64139 - DNA, 25 bp, Probe sequence
gcaggcaatatacggaaaatacttc

SEQ ID NO: 64140 - DNA, 25 bp, Probe sequence
taaccatcattctatgtcaaagttt

SEQ ID NO: 64141 - DNA, 25 bp, Probe sequence
actttgacaacgaatgatggttaaa

SEQ ID NO: 64142 - DNA, 25 bp, Probe sequence
aactttgacaacgaatgatggttaa

SEQ ID NO: 64143 - DNA, 25 bp, Probe sequence
aaactttgacaacgaatgatggtta

SEQ ID NO: 64144 - DNA, 25 bp, Probe sequence
tgacaacgaatgatggttaaagaaa

SEQ ID NO: 64145 - DNA, 25 bp, Probe sequence
ttgacaacgaatgatggttaaagaa

SEQ ID NO: 64146 - DNA, 25 bp, Probe sequence
tttgacaacgaatgatggttaaaga

SEQ ID NO: 64147 - DNA, 25 bp, Probe sequence
atgttcctgcatgtcgtctatttat

SEQ ID NO: 64148 - DNA, 25 bp, Probe sequence
ctttgacaacgaatgatggttaaag

SEQ ID NO: 64149 - DNA, 25 bp, Probe sequence
tgttcctgcatgtcgtctatttatg

SEQ ID NO: 64150 - DNA, 25 bp, Probe sequence
taaccatcattcgttgtcaaagttt

SEQ ID NO: 64151 - DNA, 25 bp, Probe sequence
ttaaccatcattcgttgtcaaagtt

SEQ ID NO: 64152 - DNA, 25 bp, Probe sequence
tttaaccatcattcgttgtcaaagt

SEQ ID NO: 64153 - DNA, 25 bp, Probe sequence
tctttaaccatcattcgttgtcaaa

SEQ ID NO: 64154 - DNA, 25 bp, Probe sequence
ttctttaaccatcattcgttgtcaa

SEQ ID NO: 64155 - DNA, 25 bp, Probe sequence
tttctttaaccatcattcgttgtca

SEQ ID NO: 64156 - DNA, 25 bp, Probe sequence
ataaatagacgacatgcaggaacat

SEQ ID NO: 64157 - DNA, 25 bp, Probe sequence
ctttaaccatcattcgttgtcaaag

SEQ ID NO: 64158 - DNA, 25 bp, Probe sequence
cataaatagacgacatgcaggaaca

SEQ ID NO: 64159 - DNA, 25 bp, Probe sequence
acactccgtttgattggcttttata

SEQ ID NO: 64160 - DNA, 25 bp, Probe sequence
caatcaatgggaaatgttgacttca

SEQ ID NO: 64161 - DNA, 25 bp, Probe sequence
aatcaatgggaaatgttgacttcaa

SEQ ID NO: 64162 - DNA, 25 bp, Probe sequence
ccaatcaatgggaaatgttgacttc

SEQ ID NO: 64163 - DNA, 25 bp, Probe sequence
cactccgtttgattggcttttataa

SEQ ID NO: 64164 - DNA, 25 bp, Probe sequence
aacactccgtttgattggcttttat

SEQ ID NO: 64165 - DNA, 25 bp, Probe sequence
ccgtttgattggcttttataatgtg

SEQ ID NO: 64166 - DNA, 25 bp, Probe sequence
tccgtttgattggcttttataatgt

SEQ ID NO: 64167 - DNA, 25 bp, Probe sequence
actccgtttgattggcttttataat

SEQ ID NO: 64168 - DNA, 25 bp, Probe sequence
tataaaagccaatcaaacggagtgt

SEQ ID NO: 64169 - DNA, 25 bp, Probe sequence
tgaagtcaacatttcccattgattg

SEQ ID NO: 64170 - DNA, 25 bp, Probe sequence
ttgaagtcaacatttcccattgatt

SEQ ID NO: 64171 - DNA, 25 bp, Probe sequence
gaagtcaacatttcccattgattgg

SEQ ID NO: 64172 - DNA, 25 bp, Probe sequence
ttataaaagccaatcaaacggagtg

SEQ ID NO: 64173 - DNA, 25 bp, Probe sequence
ataaaagccaatcaaacggagtgtt

SEQ ID NO: 64174 - DNA, 25 bp, Probe sequence
acattataaaagccaatcaaacgga

SEQ ID NO: 64175 - DNA, 25 bp, Probe sequence
cacattataaaagccaatcaaacgg

SEQ ID NO: 64176 - DNA, 25 bp, Probe sequence
attataaaagccaatcaaacggagt

SEQ ID NO: 64177 - DNA, 25 bp, Probe sequence
attgtgcggtagaagaatttgaaat

SEQ ID NO: 64178 - DNA, 25 bp, Probe sequence
aattgtgcggtagaagaatttgaaa

SEQ ID NO: 64179 - DNA, 25 bp, Probe sequence
aaattaaattgtgcggtagaagaat

SEQ ID NO: 64180 - DNA, 25 bp, Probe sequence
ttgtgcggtagaagaatttgaaatt

SEQ ID NO: 64181 - DNA, 25 bp, Probe sequence
tgtgcggtagaagaatttgaaatta

SEQ ID NO: 64182 - DNA, 25 bp, Probe sequence
gtgcggtagaagaatttgaaattaa

SEQ ID NO: 64183 - DNA, 25 bp, Probe sequence
aattaaattgtgcggtagaagaatt

SEQ ID NO: 64184 - DNA, 25 bp, Probe sequence
tgcggtagaagaatttgaaattaaa

SEQ ID NO: 64185 - DNA, 25 bp, Probe sequence
ttgaaattaaattgaattggcttga

SEQ ID NO: 64186 - DNA, 25 bp, Probe sequence
atttcaaattcttctaccgcacaat

SEQ ID NO: 64187 - DNA, 25 bp, Probe sequence
tttcaaattcttctaccgcacaatt

SEQ ID NO: 64188 - DNA, 25 bp, Probe sequence
attcttctaccgcacaatttaattt

SEQ ID NO: 64189 - DNA, 25 bp, Probe sequence
aatttcaaattcttctaccgcacaa

SEQ ID NO: 64190 - DNA, 25 bp, Probe sequence
taatttcaaattcttctaccgcaca

SEQ ID NO: 64191 - DNA, 25 bp, Probe sequence
aattcttctaccgcacaatttaatt

SEQ ID NO: 64192 - DNA, 25 bp, Probe sequence
ttaatttcaaattcttctaccgcac

SEQ ID NO: 64193 - DNA, 25 bp, Probe sequence
tttaatttcaaattcttctaccgca

SEQ ID NO: 64194 - DNA, 25 bp, Probe sequence
tcaagccaattcaatttaatttcaa

SEQ ID NO: 64195 - DNA, 25 bp, Probe sequence
agtattattaaccagtgcgtcatct

SEQ ID NO: 64196 - DNA, 25 bp, Probe sequence
gagtattattaaccagtgcgtcatc

SEQ ID NO: 64197 - DNA, 25 bp, Probe sequence
attattaaccagtgcgtcatcttca

SEQ ID NO: 64198 - DNA, 25 bp, Probe sequence
gtattattaaccagtgcgtcatctt

SEQ ID NO: 64199 - DNA, 25 bp, Probe sequence
aatgagtattattaaccagtgcgtc

SEQ ID NO: 64200 - DNA, 25 bp, Probe sequence
ttattaaccagtgcgtcatcttcaa

SEQ ID NO: 64201 - DNA, 25 bp, Probe sequence
tattattaaccagtgcgtcatcttc

SEQ ID NO: 64202 - DNA, 25 bp, Probe sequence
tgagtattattaaccagtgcgtcat

SEQ ID NO: 64203 - DNA, 25 bp, Probe sequence
atgagtattattaaccagtgcgtca

SEQ ID NO: 64204 - DNA, 25 bp, Probe sequence
agatgacgcactggttaataatact

SEQ ID NO: 64205 - DNA, 25 bp, Probe sequence
gatgacgcactggttaataatactc

SEQ ID NO: 64206 - DNA, 25 bp, Probe sequence
tgaagatgacgcactggttaataat

SEQ ID NO: 64207 - DNA, 25 bp, Probe sequence
gacgcactggttaataatactcatt

SEQ ID NO: 64208 - DNA, 25 bp, Probe sequence
aagatgacgcactggttaataatac

SEQ ID NO: 64209 - DNA, 25 bp, Probe sequence
ttgaagatgacgcactggttaataa

SEQ ID NO: 64210 - DNA, 25 bp, Probe sequence
gaagatgacgcactggttaataata

SEQ ID NO: 64211 - DNA, 25 bp, Probe sequence
tgacgcactggttaataatactcat

SEQ ID NO: 64212 - DNA, 25 bp, Probe sequence
atgacgcactggttaataatactca

SEQ ID NO: 64213 - DNA, 25 bp, Probe sequence
tcttacgaactatatacccattcat

SEQ ID NO: 64214 - DNA, 25 bp, Probe sequence
atcttacgaactatatacccattca

SEQ ID NO: 64215 - DNA, 25 bp, Probe sequence
cttacgaactatatacccattcata

SEQ ID NO: 64216 - DNA, 25 bp, Probe sequence
tatcttacgaactatatacccattc

SEQ ID NO: 64217 - DNA, 25 bp, Probe sequence
tgaatgggtatatagttcgtaagat

SEQ ID NO: 64218 - DNA, 25 bp, Probe sequence
atgaatgggtatatagttcgtaaga

SEQ ID NO: 64219 - DNA, 25 bp, Probe sequence
tatgaatgggtatatagttcgtaag

SEQ ID NO: 64220 - DNA, 25 bp, Probe sequence
gaatgggtatatagttcgtaagata

SEQ ID NO: 64221 - DNA, 25 bp, Probe sequence
aataacgtaaaagggaatgatgaca

SEQ ID NO: 64222 - DNA, 25 bp, Probe sequence
ataacgtaaaagggaatgatgacat

SEQ ID NO: 64223 - DNA, 25 bp, Probe sequence
taacgtaaaagggaatgatgacata

SEQ ID NO: 64224 - DNA, 25 bp, Probe sequence
taataacgtaaaagggaatgatgac

SEQ ID NO: 64225 - DNA, 25 bp, Probe sequence
tgttaataacgtaaaagggaatgat

SEQ ID NO: 64226 - DNA, 25 bp, Probe sequence
atgttaataacgtaaaagggaatga

SEQ ID NO: 64227 - DNA, 25 bp, Probe sequence
ttaataacgtaaaagggaatgatga

SEQ ID NO: 64228 - DNA, 25 bp, Probe sequence
gttaataacgtaaaagggaatgatg

SEQ ID NO: 64229 - DNA, 25 bp, Probe sequence
aatgttaataacgtaaaagggaatg

SEQ ID NO: 64230 - DNA, 25 bp, Probe sequence
tgtcatcattcccttttacgttatt

SEQ ID NO: 64231 - DNA, 25 bp, Probe sequence
atgtcatcattcccttttacgttat

SEQ ID NO: 64232 - DNA, 25 bp, Probe sequence
tatgtcatcattcccttttacgtta

SEQ ID NO: 64233 - DNA, 25 bp, Probe sequence
gtcatcattcccttttacgttatta

SEQ ID NO: 64234 - DNA, 25 bp, Probe sequence
tcattcccttttacgttattaacat

SEQ ID NO: 64235 - DNA, 25 bp, Probe sequence
atcattcccttttacgttattaaca

SEQ ID NO: 64236 - DNA, 25 bp, Probe sequence
tcatcattcccttttacgttattaa

SEQ ID NO: 64237 - DNA, 25 bp, Probe sequence
catcattcccttttacgttattaac

SEQ ID NO: 64238 - DNA, 25 bp, Probe sequence
cattcccttttacgttattaacatt

SEQ ID NO: 64239 - DNA, 25 bp, Probe sequence
taagtcgattgccgagtagtatcat

SEQ ID NO: 64240 - DNA, 25 bp, Probe sequence
atgtaagtcgattgccgagtagtat

SEQ ID NO: 64241 - DNA, 25 bp, Probe sequence
aagtcgattgccgagtagtatcatt

SEQ ID NO: 64242 - DNA, 25 bp, Probe sequence
gtaagtcgattgccgagtagtatca

SEQ ID NO: 64243 - DNA, 25 bp, Probe sequence
tgtaagtcgattgccgagtagtatc

SEQ ID NO: 64244 - DNA, 25 bp, Probe sequence
gatgtaagtcgattgccgagtagta

SEQ ID NO: 64245 - DNA, 25 bp, Probe sequence
cgattgccgagtagtatcattttct

SEQ ID NO: 64246 - DNA, 25 bp, Probe sequence
gattgccgagtagtatcattttcta

SEQ ID NO: 64247 - DNA, 25 bp, Probe sequence
agtcgattgccgagtagtatcattt

SEQ ID NO: 64248 - DNA, 25 bp, Probe sequence
atgatactactcggcaatcgactta

SEQ ID NO: 64249 - DNA, 25 bp, Probe sequence
atactactcggcaatcgacttacat

SEQ ID NO: 64250 - DNA, 25 bp, Probe sequence
aatgatactactcggcaatcgactt

SEQ ID NO: 64251 - DNA, 25 bp, Probe sequence
tactactcggcaatcgacttacatc

SEQ ID NO: 64252 - DNA, 25 bp, Probe sequence
gatactactcggcaatcgacttaca

SEQ ID NO: 64253 - DNA, 25 bp, Probe sequence
tgatactactcggcaatcgacttac

SEQ ID NO: 64254 - DNA, 25 bp, Probe sequence
agaaaatgatactactcggcaatcg

SEQ ID NO: 64255 - DNA, 25 bp, Probe sequence
tagaaaatgatactactcggcaatc

SEQ ID NO: 64256 - DNA, 25 bp, Probe sequence
aaatgatactactcggcaatcgact

SEQ ID NO: 64257 - DNA, 25 bp, Probe sequence
aaagacgaagaaagaagtgaaatgg

SEQ ID NO: 64258 - DNA, 25 bp, Probe sequence
aagtttaagcaattcttgtaacaca

SEQ ID NO: 64259 - DNA, 25 bp, Probe sequence
gcaattcttgtaacacaattatcca

SEQ ID NO: 64260 - DNA, 25 bp, Probe sequence
agcaattcttgtaacacaattatcc

SEQ ID NO: 64261 - DNA, 25 bp, Probe sequence
aaaagacgaagaaagaagtgaaatg

SEQ ID NO: 64262 - DNA, 25 bp, Probe sequence
aatagaaagtagcataaaggtcaat

SEQ ID NO: 64263 - DNA, 25 bp, Probe sequence
atagaaagtagcataaaggtcaatt

SEQ ID NO: 64264 - DNA, 25 bp, Probe sequence
taagtttaagcaattcttgtaacac

SEQ ID NO: 64265 - DNA, 25 bp, Probe sequence
aagcaattcttgtaacacaattatc

SEQ ID NO: 64266 - DNA, 25 bp, Probe sequence
ccatttcacttctttcttcgtcttt

SEQ ID NO: 64267 - DNA, 25 bp, Probe sequence
tgtgttacaagaattgcttaaactt

SEQ ID NO: 64268 - DNA, 25 bp, Probe sequence
tggataattgtgttacaagaattgc

SEQ ID NO: 64269 - DNA, 25 bp, Probe sequence
ggataattgtgttacaagaattgct

SEQ ID NO: 64270 - DNA, 25 bp, Probe sequence
catttcacttctttcttcgtctttt

SEQ ID NO: 64271 - DNA, 25 bp, Probe sequence
attgacctttatgctactttctatt

SEQ ID NO: 64272 - DNA, 25 bp, Probe sequence
aattgacctttatgctactttctat

SEQ ID NO: 64273 - DNA, 25 bp, Probe sequence
gtgttacaagaattgcttaaactta

SEQ ID NO: 64274 - DNA, 25 bp, Probe sequence
gataattgtgttacaagaattgctt

SEQ ID NO: 64275 - DNA, 25 bp, Probe sequence
tatgatattaagtcacttgcgtcgt

SEQ ID NO: 64276 - DNA, 25 bp, Probe sequence
atatgatattaagtcacttgcgtcg

SEQ ID NO: 64277 - DNA, 25 bp, Probe sequence
atgatattaagtcacttgcgtcgtt

SEQ ID NO: 64278 - DNA, 25 bp, Probe sequence
aatatgatattaagtcacttgcgtc

SEQ ID NO: 64279 - DNA, 25 bp, Probe sequence
gaatatgatattaagtcacttgcgt

SEQ ID NO: 64280 - DNA, 25 bp, Probe sequence
tgaatatgatattaagtcacttgcg

SEQ ID NO: 64281 - DNA, 25 bp, Probe sequence
ttaagtcacttgcgtcgtttattag

SEQ ID NO: 64282 - DNA, 25 bp, Probe sequence
gatattaagtcacttgcgtcgttta

SEQ ID NO: 64283 - DNA, 25 bp, Probe sequence
attaagtcacttgcgtcgtttatta

SEQ ID NO: 64284 - DNA, 25 bp, Probe sequence
acgacgcaagtgacttaatatcata

SEQ ID NO: 64285 - DNA, 25 bp, Probe sequence
cgacgcaagtgacttaatatcatat

SEQ ID NO: 64286 - DNA, 25 bp, Probe sequence
aacgacgcaagtgacttaatatcat

SEQ ID NO: 64287 - DNA, 25 bp, Probe sequence
cgcaagtgacttaatatcatattca

SEQ ID NO: 64288 - DNA, 25 bp, Probe sequence
acgcaagtgacttaatatcatattc

SEQ ID NO: 64289 - DNA, 25 bp, Probe sequence
gacgcaagtgacttaatatcatatt

SEQ ID NO: 64290 - DNA, 25 bp, Probe sequence
ctaataaacgacgcaagtgacttaa

SEQ ID NO: 64291 - DNA, 25 bp, Probe sequence
taaacgacgcaagtgacttaatatc

SEQ ID NO: 64292 - DNA, 25 bp, Probe sequence
aataaacgacgcaagtgacttaata

SEQ ID NO: 64293 - DNA, 25 bp, Probe sequence
cgttgctaagactttgcttctattt

SEQ ID NO: 64294 - DNA, 25 bp, Probe sequence
tgctaagactttgcttctatttact

SEQ ID NO: 64295 - DNA, 25 bp, Probe sequence
gcgttgctaagactttgcttctatt

SEQ ID NO: 64296 - DNA, 25 bp, Probe sequence
ttgctaagactttgcttctatttac

SEQ ID NO: 64297 - DNA, 25 bp, Probe sequence
gttgctaagactttgcttctattta

SEQ ID NO: 64298 - DNA, 25 bp, Probe sequence
tgcgttgctaagactttgcttctat

SEQ ID NO: 64299 - DNA, 25 bp, Probe sequence
ttgcgttgctaagactttgcttcta

SEQ ID NO: 64300 - DNA, 25 bp, Probe sequence
gctaagactttgcttctatttacta

SEQ ID NO: 64301 - DNA, 25 bp, Probe sequence
atattttgcgttgctaagactttgc

SEQ ID NO: 64302 - DNA, 25 bp, Probe sequence
aaatagaagcaaagtcttagcaacg

SEQ ID NO: 64303 - DNA, 25 bp, Probe sequence
agtaaatagaagcaaagtcttagca

SEQ ID NO: 64304 - DNA, 25 bp, Probe sequence
aatagaagcaaagtcttagcaacgc

SEQ ID NO: 64305 - DNA, 25 bp, Probe sequence
taaatagaagcaaagtcttagcaac

SEQ ID NO: 64306 - DNA, 25 bp, Probe sequence
gtaaatagaagcaaagtcttagcaa

SEQ ID NO: 64307 - DNA, 25 bp, Probe sequence
atagaagcaaagtcttagcaacgca

SEQ ID NO: 64308 - DNA, 25 bp, Probe sequence
tagaagcaaagtcttagcaacgcaa

SEQ ID NO: 64309 - DNA, 25 bp, Probe sequence
tagtaaatagaagcaaagtcttagc

SEQ ID NO: 64310 - DNA, 25 bp, Probe sequence
gcaaagtcttagcaacgcaaaatat

SEQ ID NO: 64311 - DNA, 25 bp, Probe sequence
aaggagaggaatataactcggtagt

SEQ ID NO: 64312 - DNA, 25 bp, Probe sequence
aggagaggaatataactcggtagta

SEQ ID NO: 64313 - DNA, 25 bp, Probe sequence
ggagaggaatataactcggtagtat

SEQ ID NO: 64314 - DNA, 25 bp, Probe sequence
gagagcgaatggaaagtatttgttt

SEQ ID NO: 64315 - DNA, 25 bp, Probe sequence
attgagagcgaatggaaagtatttg

SEQ ID NO: 64316 - DNA, 25 bp, Probe sequence
gaattgagagcgaatggaaagtatt

SEQ ID NO: 64317 - DNA, 25 bp, Probe sequence
ataagaaaggaattgagagcgaatg

SEQ ID NO: 64318 - DNA, 25 bp, Probe sequence
agagcgaatggaaagtatttgttta

SEQ ID NO: 64319 - DNA, 25 bp, Probe sequence
tgagagcgaatggaaagtatttgtt

SEQ ID NO: 64320 - DNA, 25 bp, Probe sequence
actaccgagttatattcctctcctt

SEQ ID NO: 64321 - DNA, 25 bp, Probe sequence
tactaccgagttatattcctctcct

SEQ ID NO: 64322 - DNA, 25 bp, Probe sequence
atactaccgagttatattcctctcc

SEQ ID NO: 64323 - DNA, 25 bp, Probe sequence
caaatactttccattcgctctcaat

SEQ ID NO: 64324 - DNA, 25 bp, Probe sequence
aaacaaatactttccattcgctctc

SEQ ID NO: 64325 - DNA, 25 bp, Probe sequence
aatactttccattcgctctcaattc

SEQ ID NO: 64326 - DNA, 25 bp, Probe sequence
cattcgctctcaattcctttcttat

SEQ ID NO: 64327 - DNA, 25 bp, Probe sequence
acaaatactttccattcgctctcaa

SEQ ID NO: 64328 - DNA, 25 bp, Probe sequence
aacaaatactttccattcgctctca

SEQ ID NO: 64329 - DNA, 25 bp, Probe sequence
tggttacagttaatgtacttagaca

SEQ ID NO: 64330 - DNA, 25 bp, Probe sequence
ggttacagttaatgtacttagacac

SEQ ID NO: 64331 - DNA, 25 bp, Probe sequence
gtggttacagttaatgtacttagac

SEQ ID NO: 64332 - DNA, 25 bp, Probe sequence
agtggttacagttaatgtacttaga

SEQ ID NO: 64333 - DNA, 25 bp, Probe sequence
tgtgacacctcaaatataaatcaaa

SEQ ID NO: 64334 - DNA, 25 bp, Probe sequence
ttgtgacacctcaaatataaatcaa

SEQ ID NO: 64335 - DNA, 25 bp, Probe sequence
tgaataaagtggttacagttaatgt

SEQ ID NO: 64336 - DNA, 25 bp, Probe sequence
gttacagttaatgtacttagacact

SEQ ID NO: 64337 - DNA, 25 bp, Probe sequence
aagtggttacagttaatgtacttag

SEQ ID NO: 64338 - DNA, 25 bp, Probe sequence
tgtctaagtacattaactgtaacca

SEQ ID NO: 64339 - DNA, 25 bp, Probe sequence
gtctaagtacattaactgtaaccac

SEQ ID NO: 64340 - DNA, 25 bp, Probe sequence
gtgtctaagtacattaactgtaacc

SEQ ID NO: 64341 - DNA, 25 bp, Probe sequence
tctaagtacattaactgtaaccact

SEQ ID NO: 64342 - DNA, 25 bp, Probe sequence
ttgatttatatttgaggtgtcacaa

SEQ ID NO: 64343 - DNA, 25 bp, Probe sequence
tttgatttatatttgaggtgtcaca

SEQ ID NO: 64344 - DNA, 25 bp, Probe sequence
acattaactgtaaccactttattca

SEQ ID NO: 64345 - DNA, 25 bp, Probe sequence
agtgtctaagtacattaactgtaac

SEQ ID NO: 64346 - DNA, 25 bp, Probe sequence
ctaagtacattaactgtaaccactt

SEQ ID NO: 64347 - DNA, 25 bp, Probe sequence
tctcctttatgtccataagactctt

SEQ ID NO: 64348 - DNA, 25 bp, Probe sequence
atctcctttatgtccataagactct

SEQ ID NO: 64349 - DNA, 25 bp, Probe sequence
cctttatgtccataagactcttact

SEQ ID NO: 64350 - DNA, 25 bp, Probe sequence
tcctttatgtccataagactcttac

SEQ ID NO: 64351 - DNA, 25 bp, Probe sequence
ctcctttatgtccataagactctta

SEQ ID NO: 64352 - DNA, 25 bp, Probe sequence
ataatatgtagtggagtagatcaac

SEQ ID NO: 64353 - DNA, 25 bp, Probe sequence
tgtctattgtgtcgaatagtattgt

SEQ ID NO: 64354 - DNA, 25 bp, Probe sequence
tatctcctttatgtccataagactc

SEQ ID NO: 64355 - DNA, 25 bp, Probe sequence
ttatctcctttatgtccataagact

SEQ ID NO: 64356 - DNA, 25 bp, Probe sequence
aagagtcttatggacataaaggaga

SEQ ID NO: 64357 - DNA, 25 bp, Probe sequence
agagtcttatggacataaaggagat

SEQ ID NO: 64358 - DNA, 25 bp, Probe sequence
gtaagagtcttatggacataaagga

SEQ ID NO: 64359 - DNA, 25 bp, Probe sequence
agtaagagtcttatggacataaagg

SEQ ID NO: 64360 - DNA, 25 bp, Probe sequence
taagagtcttatggacataaaggag

SEQ ID NO: 64361 - DNA, 25 bp, Probe sequence
gttgatctactccactacatattat

SEQ ID NO: 64362 - DNA, 25 bp, Probe sequence
acaatactattcgacacaatagaca

SEQ ID NO: 64363 - DNA, 25 bp, Probe sequence
gagtcttatggacataaaggagata

SEQ ID NO: 64364 - DNA, 25 bp, Probe sequence
agtcttatggacataaaggagataa

SEQ ID NO: 64365 - DNA, 25 bp, Probe sequence
acttttgatcctatgttcatgttgc

SEQ ID NO: 64366 - DNA, 25 bp, Probe sequence
tgacttttgatcctatgttcatgtt

SEQ ID NO: 64367 - DNA, 25 bp, Probe sequence
gacttttgatcctatgttcatgttg

SEQ ID NO: 64368 - DNA, 25 bp, Probe sequence
atgacttttgatcctatgttcatgt

SEQ ID NO: 64369 - DNA, 25 bp, Probe sequence
gatgacttttgatcctatgttcatg

SEQ ID NO: 64370 - DNA, 25 bp, Probe sequence
gggatgacttttgatcctatgttca

SEQ ID NO: 64371 - DNA, 25 bp, Probe sequence
ggatgacttttgatcctatgttcat

SEQ ID NO: 64372 - DNA, 25 bp, Probe sequence
ggggatgacttttgatcctatgttc

SEQ ID NO: 64373 - DNA, 25 bp, Probe sequence
gcaacatgaacataggatcaaaagt

SEQ ID NO: 64374 - DNA, 25 bp, Probe sequence
aacatgaacataggatcaaaagtca

SEQ ID NO: 64375 - DNA, 25 bp, Probe sequence
caacatgaacataggatcaaaagtc

SEQ ID NO: 64376 - DNA, 25 bp, Probe sequence
acatgaacataggatcaaaagtcat

SEQ ID NO: 64377 - DNA, 25 bp, Probe sequence
catgaacataggatcaaaagtcatc

SEQ ID NO: 64378 - DNA, 25 bp, Probe sequence
tgaacataggatcaaaagtcatccc

SEQ ID NO: 64379 - DNA, 25 bp, Probe sequence
gaacataggatcaaaagtcatcccc

SEQ ID NO: 64380 - DNA, 25 bp, Probe sequence
atgaacataggatcaaaagtcatcc

SEQ ID NO: 64381 - DNA, 25 bp, Probe sequence
cctgtgcgtatttaaccaatttgta

SEQ ID NO: 64382 - DNA, 25 bp, Probe sequence
tacctgtgcgtatttaaccaatttg

SEQ ID NO: 64383 - DNA, 25 bp, Probe sequence
ctgtgcgtatttaaccaatttgtaa

SEQ ID NO: 64384 - DNA, 25 bp, Probe sequence
acctgtgcgtatttaaccaatttgt

SEQ ID NO: 64385 - DNA, 25 bp, Probe sequence
tgtgcgtatttaaccaatttgtaat

SEQ ID NO: 64386 - DNA, 25 bp, Probe sequence
atacctgtgcgtatttaaccaattt

SEQ ID NO: 64387 - DNA, 25 bp, Probe sequence
tatacctgtgcgtatttaaccaatt

SEQ ID NO: 64388 - DNA, 25 bp, Probe sequence
atatacctgtgcgtatttaaccaat

SEQ ID NO: 64389 - DNA, 25 bp, Probe sequence
ggtgacgtgacaaatcaaatagaat

SEQ ID NO: 64390 - DNA, 25 bp, Probe sequence
tacaaattggttaaatacgcacagg

SEQ ID NO: 64391 - DNA, 25 bp, Probe sequence
caaattggttaaatacgcacaggta

SEQ ID NO: 64392 - DNA, 25 bp, Probe sequence
ttacaaattggttaaatacgcacag

SEQ ID NO: 64393 - DNA, 25 bp, Probe sequence
acaaattggttaaatacgcacaggt

SEQ ID NO: 64394 - DNA, 25 bp, Probe sequence
attacaaattggttaaatacgcaca

SEQ ID NO: 64395 - DNA, 25 bp, Probe sequence
aaattggttaaatacgcacaggtat

SEQ ID NO: 64396 - DNA, 25 bp, Probe sequence
aattggttaaatacgcacaggtata

SEQ ID NO: 64397 - DNA, 25 bp, Probe sequence
attggttaaatacgcacaggtatat

SEQ ID NO: 64398 - DNA, 25 bp, Probe sequence
ctatttgatttgtcacgtcaccatt

SEQ ID NO: 64399 - DNA, 25 bp, Probe sequence
tcctccacatcctaacaaaatcatt

SEQ ID NO: 64400 - DNA, 25 bp, Probe sequence
ttcctccacatcctaacaaaatcat

SEQ ID NO: 64401 - DNA, 25 bp, Probe sequence
attcctccacatcctaacaaaatca

SEQ ID NO: 64402 - DNA, 25 bp, Probe sequence
cctccacatcctaacaaaatcattt

SEQ ID NO: 64403 - DNA, 25 bp, Probe sequence
aattcctccacatcctaacaaaatc

SEQ ID NO: 64404 - DNA, 25 bp, Probe sequence
aaaattcctccacatcctaacaaaa

SEQ ID NO: 64405 - DNA, 25 bp, Probe sequence
aaattcctccacatcctaacaaaat

SEQ ID NO: 64406 - DNA, 25 bp, Probe sequence
ccacatcctaacaaaatcatttaca

SEQ ID NO: 64407 - DNA, 25 bp, Probe sequence
tccacatcctaacaaaatcatttac

SEQ ID NO: 64408 - DNA, 25 bp, Probe sequence
tgattttgttaggatgtggaggaat

SEQ ID NO: 64409 - DNA, 25 bp, Probe sequence
atgattttgttaggatgtggaggaa

SEQ ID NO: 64410 - DNA, 25 bp, Probe sequence
aatgattttgttaggatgtggagga

SEQ ID NO: 64411 - DNA, 25 bp, Probe sequence
aaatgattttgttaggatgtggagg

SEQ ID NO: 64412 - DNA, 25 bp, Probe sequence
gattttgttaggatgtggaggaatt

SEQ ID NO: 64413 - DNA, 25 bp, Probe sequence
ttttgttaggatgtggaggaatttt

SEQ ID NO: 64414 - DNA, 25 bp, Probe sequence
attttgttaggatgtggaggaattt

SEQ ID NO: 64415 - DNA, 25 bp, Probe sequence
tgtaaatgattttgttaggatgtgg

SEQ ID NO: 64416 - DNA, 25 bp, Probe sequence
gtaaatgattttgttaggatgtgga

SEQ ID NO: 64417 - DNA, 25 bp, Probe sequence
tgtattattaggcatctaggttcaa

SEQ ID NO: 64418 - DNA, 25 bp, Probe sequence
ttgtattattaggcatctaggttca

SEQ ID NO: 64419 - DNA, 25 bp, Probe sequence
tgtagcgtaaagcataaatgaatga

SEQ ID NO: 64420 - DNA, 25 bp, Probe sequence
agttgtattattaggcatctaggtt

SEQ ID NO: 64421 - DNA, 25 bp, Probe sequence
aagttgtattattaggcatctaggt

SEQ ID NO: 64422 - DNA, 25 bp, Probe sequence
gttgtattattaggcatctaggttc

SEQ ID NO: 64423 - DNA, 25 bp, Probe sequence
tgaatacattgtgaggcaattatca

SEQ ID NO: 64424 - DNA, 25 bp, Probe sequence
atgtagcgtaaagcataaatgaatg

SEQ ID NO: 64425 - DNA, 25 bp, Probe sequence
caaatgttatgtcaaagttccttgt

SEQ ID NO: 64426 - DNA, 25 bp, Probe sequence
tgaacctagatgcctaataatacaa

SEQ ID NO: 64427 - DNA, 25 bp, Probe sequence
ttgaacctagatgcctaataataca

SEQ ID NO: 64428 - DNA, 25 bp, Probe sequence
tcattcatttatgctttacgctaca

SEQ ID NO: 64429 - DNA, 25 bp, Probe sequence
acctagatgcctaataatacaactt

SEQ ID NO: 64430 - DNA, 25 bp, Probe sequence
aacctagatgcctaataatacaact

SEQ ID NO: 64431 - DNA, 25 bp, Probe sequence
gaacctagatgcctaataatacaac

SEQ ID NO: 64432 - DNA, 25 bp, Probe sequence
tgataattgcctcacaatgtattca

SEQ ID NO: 64433 - DNA, 25 bp, Probe sequence
cattcatttatgctttacgctacat

SEQ ID NO: 64434 - DNA, 25 bp, Probe sequence
acaaggaactttgacataacatttg

SEQ ID NO: 64435 - DNA, 25 bp, Probe sequence
agtataaggttgaagaaggatgagt

SEQ ID NO: 64436 - DNA, 25 bp, Probe sequence
gtataaggttgaagaaggatgagtt

SEQ ID NO: 64437 - DNA, 25 bp, Probe sequence
aagtataaggttgaagaaggatgag

SEQ ID NO: 64438 - DNA, 25 bp, Probe sequence
atgtatatggcattaaggcatcgac

SEQ ID NO: 64439 - DNA, 25 bp, Probe sequence
catgtatatggcattaaggcatcga

SEQ ID NO: 64440 - DNA, 25 bp, Probe sequence
catcgaccttatctgaccagtatac

SEQ ID NO: 64441 - DNA, 25 bp, Probe sequence
gcatcgaccttatctgaccagtata

SEQ ID NO: 64442 - DNA, 25 bp, Probe sequence
accttatctgaccagtatacgagtt

SEQ ID NO: 64443 - DNA, 25 bp, Probe sequence
gaccttatctgaccagtatacgagt

SEQ ID NO: 64444 - DNA, 25 bp, Probe sequence
actcatccttcttcaaccttatact

SEQ ID NO: 64445 - DNA, 25 bp, Probe sequence
aactcatccttcttcaaccttatac

SEQ ID NO: 64446 - DNA, 25 bp, Probe sequence
ctcatccttcttcaaccttatactt

SEQ ID NO: 64447 - DNA, 25 bp, Probe sequence
tcgatgccttaatgccatatacatg

SEQ ID NO: 64448 - DNA, 25 bp, Probe sequence
gtcgatgccttaatgccatatacat

SEQ ID NO: 64449 - DNA, 25 bp, Probe sequence
tatactggtcagataaggtcgatgc

SEQ ID NO: 64450 - DNA, 25 bp, Probe sequence
gtatactggtcagataaggtcgatg

SEQ ID NO: 64451 - DNA, 25 bp, Probe sequence
aactcgtatactggtcagataaggt

SEQ ID NO: 64452 - DNA, 25 bp, Probe sequence
actcgtatactggtcagataaggtc

SEQ ID NO: 64453 - DNA, 25 bp, Probe sequence
tgacgtgaacaacattgagattatc

SEQ ID NO: 64454 - DNA, 25 bp, Probe sequence
gacgtgaacaacattgagattatct

SEQ ID NO: 64455 - DNA, 25 bp, Probe sequence
ttgacgtgaacaacattgagattat

SEQ ID NO: 64456 - DNA, 25 bp, Probe sequence
attgacgtgaacaacattgagatta

SEQ ID NO: 64457 - DNA, 25 bp, Probe sequence
tattgacgtgaacaacattgagatt

SEQ ID NO: 64458 - DNA, 25 bp, Probe sequence
ttattgacgtgaacaacattgagat

SEQ ID NO: 64459 - DNA, 25 bp, Probe sequence
acgtgaacaacattgagattatctt

SEQ ID NO: 64460 - DNA, 25 bp, Probe sequence
cgtgaacaacattgagattatcttt

SEQ ID NO: 64461 - DNA, 25 bp, Probe sequence
tttattgacgtgaacaacattgaga

SEQ ID NO: 64462 - DNA, 25 bp, Probe sequence
gataatctcaatgttgttcacgtca

SEQ ID NO: 64463 - DNA, 25 bp, Probe sequence
agataatctcaatgttgttcacgtc

SEQ ID NO: 64464 - DNA, 25 bp, Probe sequence
atctcaatgttgttcacgtcaataa

SEQ ID NO: 64465 - DNA, 25 bp, Probe sequence
aatctcaatgttgttcacgtcaata

SEQ ID NO: 64466 - DNA, 25 bp, Probe sequence
taatctcaatgttgttcacgtcaat

SEQ ID NO: 64467 - DNA, 25 bp, Probe sequence
ataatctcaatgttgttcacgtcaa

SEQ ID NO: 64468 - DNA, 25 bp, Probe sequence
aagataatctcaatgttgttcacgt

SEQ ID NO: 64469 - DNA, 25 bp, Probe sequence
aaagataatctcaatgttgttcacg

SEQ ID NO: 64470 - DNA, 25 bp, Probe sequence
tctcaatgttgttcacgtcaataaa

SEQ ID NO: 64471 - DNA, 25 bp, Probe sequence
acaatatttacaagggcttatggga

SEQ ID NO: 64472 - DNA, 25 bp, Probe sequence
cacaatatttacaagggcttatggg

SEQ ID NO: 64473 - DNA, 25 bp, Probe sequence
acacaatatttacaagggcttatgg

SEQ ID NO: 64474 - DNA, 25 bp, Probe sequence
caatatttacaagggcttatgggaa

SEQ ID NO: 64475 - DNA, 25 bp, Probe sequence
aatatttacaagggcttatgggaaa

SEQ ID NO: 64476 - DNA, 25 bp, Probe sequence
tacacaatatttacaagggcttatg

SEQ ID NO: 64477 - DNA, 25 bp, Probe sequence
ttgacctcctaatactacaaatgta

SEQ ID NO: 64478 - DNA, 25 bp, Probe sequence
atatttacaagggcttatgggaaaa

SEQ ID NO: 64479 - DNA, 25 bp, Probe sequence
aatgttgataaatcaaggtgtgacg

SEQ ID NO: 64480 - DNA, 25 bp, Probe sequence
cccataagcccttgtaaatattgtg

SEQ ID NO: 64481 - DNA, 25 bp, Probe sequence
tcccataagcccttgtaaatattgt

SEQ ID NO: 64482 - DNA, 25 bp, Probe sequence
ccataagcccttgtaaatattgtgt

SEQ ID NO: 64483 - DNA, 25 bp, Probe sequence
ttcccataagcccttgtaaatattg

SEQ ID NO: 64484 - DNA, 25 bp, Probe sequence
tttcccataagcccttgtaaatatt

SEQ ID NO: 64485 - DNA, 25 bp, Probe sequence
cataagcccttgtaaatattgtgta

SEQ ID NO: 64486 - DNA, 25 bp, Probe sequence
tacatttgtagtattaggaggtcaa

SEQ ID NO: 64487 - DNA, 25 bp, Probe sequence
ttttcccataagcccttgtaaatat

SEQ ID NO: 64488 - DNA, 25 bp, Probe sequence
cgtcacaccttgatttatcaacatt

SEQ ID NO: 64489 - DNA, 25 bp, Probe sequence
aagttgcagatgaagttggaataac

SEQ ID NO: 64490 - DNA, 25 bp, Probe sequence
gttgcagatgaagttggaataacaa

SEQ ID NO: 64491 - DNA, 25 bp, Probe sequence
agttgcagatgaagttggaataaca

SEQ ID NO: 64492 - DNA, 25 bp, Probe sequence
gcagatgaagttggaataacaaata

SEQ ID NO: 64493 - DNA, 25 bp, Probe sequence
gttaaagttgcagatgaagttggaa

SEQ ID NO: 64494 - DNA, 25 bp, Probe sequence
taggttaaagttgcagatgaagttg

SEQ ID NO: 64495 - DNA, 25 bp, Probe sequence
aaagttgcagatgaagttggaataa

SEQ ID NO: 64496 - DNA, 25 bp, Probe sequence
ttaaagttgcagatgaagttggaat

SEQ ID NO: 64497 - DNA, 25 bp, Probe sequence
ttaggttaaagttgcagatgaagtt

SEQ ID NO: 64498 - DNA, 25 bp, Probe sequence
gttattccaacttcatctgcaactt

SEQ ID NO: 64499 - DNA, 25 bp, Probe sequence
ttgttattccaacttcatctgcaac

SEQ ID NO: 64500 - DNA, 25 bp, Probe sequence
tgttattccaacttcatctgcaact

SEQ ID NO: 64501 - DNA, 25 bp, Probe sequence
tatttgttattccaacttcatctgc

SEQ ID NO: 64502 - DNA, 25 bp, Probe sequence
ttccaacttcatctgcaactttaac

SEQ ID NO: 64503 - DNA, 25 bp, Probe sequence
caacttcatctgcaactttaaccta

SEQ ID NO: 64504 - DNA, 25 bp, Probe sequence
attccaacttcatctgcaactttaa

SEQ ID NO: 64505 - DNA, 25 bp, Probe sequence
ttattccaacttcatctgcaacttt

SEQ ID NO: 64506 - DNA, 25 bp, Probe sequence
aacttcatctgcaactttaacctaa

SEQ ID NO: 64507 - DNA, 25 bp, Probe sequence
aatgtaacctccgaatgataagtca

SEQ ID NO: 64508 - DNA, 25 bp, Probe sequence
atgtaacctccgaatgataagtcat

SEQ ID NO: 64509 - DNA, 25 bp, Probe sequence
aagtcatttctgagttagctttact

SEQ ID NO: 64510 - DNA, 25 bp, Probe sequence
tgataagtcatttctgagttagctt

SEQ ID NO: 64511 - DNA, 25 bp, Probe sequence
agtcatttctgagttagctttacta

SEQ ID NO: 64512 - DNA, 25 bp, Probe sequence
gataagtcatttctgagttagcttt

SEQ ID NO: 64513 - DNA, 25 bp, Probe sequence
ttctgagttagctttactatacctt

SEQ ID NO: 64514 - DNA, 25 bp, Probe sequence
tttctgagttagctttactatacct

SEQ ID NO: 64515 - DNA, 25 bp, Probe sequence
taagtcatttctgagttagctttac

SEQ ID NO: 64516 - DNA, 25 bp, Probe sequence
tgacttatcattcggaggttacatt

SEQ ID NO: 64517 - DNA, 25 bp, Probe sequence
atgacttatcattcggaggttacat

SEQ ID NO: 64518 - DNA, 25 bp, Probe sequence
agtaaagctaactcagaaatgactt

SEQ ID NO: 64519 - DNA, 25 bp, Probe sequence
aagctaactcagaaatgacttatca

SEQ ID NO: 64520 - DNA, 25 bp, Probe sequence
tagtaaagctaactcagaaatgact

SEQ ID NO: 64521 - DNA, 25 bp, Probe sequence
aaagctaactcagaaatgacttatc

SEQ ID NO: 64522 - DNA, 25 bp, Probe sequence
gtaaagctaactcagaaatgactta

SEQ ID NO: 64523 - DNA, 25 bp, Probe sequence
aggtatagtaaagctaactcagaaa

SEQ ID NO: 64524 - DNA, 25 bp, Probe sequence
aaggtatagtaaagctaactcagaa

SEQ ID NO: 64525 - DNA, 25 bp, Probe sequence
cccttcaaagccttcatttattcaa

SEQ ID NO: 64526 - DNA, 25 bp, Probe sequence
ctcccttcaaagccttcatttattc

SEQ ID NO: 64527 - DNA, 25 bp, Probe sequence
tcccttcaaagccttcatttattca

SEQ ID NO: 64528 - DNA, 25 bp, Probe sequence
gtctactttgaagggagcatttgat

SEQ ID NO: 64529 - DNA, 25 bp, Probe sequence
atgtctactttgaagggagcatttg

SEQ ID NO: 64530 - DNA, 25 bp, Probe sequence
cagttattagggagtgggacagaaa

SEQ ID NO: 64531 - DNA, 25 bp, Probe sequence
tctactttgaagggagcatttgatc

SEQ ID NO: 64532 - DNA, 25 bp, Probe sequence
ccttcaaagccttcatttattcaat

SEQ ID NO: 64533 - DNA, 25 bp, Probe sequence
gttgagccaagaacaaagtgaaatg

SEQ ID NO: 64534 - DNA, 25 bp, Probe sequence
gaataaatgaaggctttgaagggag

SEQ ID NO: 64535 - DNA, 25 bp, Probe sequence
ttgaataaatgaaggctttgaaggg

SEQ ID NO: 64536 - DNA, 25 bp, Probe sequence
tgaataaatgaaggctttgaaggga

SEQ ID NO: 64537 - DNA, 25 bp, Probe sequence
atcaaatgctcccttcaaagtagac

SEQ ID NO: 64538 - DNA, 25 bp, Probe sequence
caaatgctcccttcaaagtagacat

SEQ ID NO: 64539 - DNA, 25 bp, Probe sequence
tttctgtcccactccctaataactg

SEQ ID NO: 64540 - DNA, 25 bp, Probe sequence
attgaataaatgaaggctttgaagg

SEQ ID NO: 64541 - DNA, 25 bp, Probe sequence
gatcaaatgctcccttcaaagtaga

SEQ ID NO: 64542 - DNA, 25 bp, Probe sequence
catttcactttgttcttggctcaac

SEQ ID NO: 64543 - DNA, 25 bp, Probe sequence
acttctcctcctattgtcaatatcc

SEQ ID NO: 64544 - DNA, 25 bp, Probe sequence
cttctcctcctattgtcaatatcct

SEQ ID NO: 64545 - DNA, 25 bp, Probe sequence
tcctcctattgtcaatatcctaact

SEQ ID NO: 64546 - DNA, 25 bp, Probe sequence
ctcctcctattgtcaatatcctaac

SEQ ID NO: 64547 - DNA, 25 bp, Probe sequence
tctcctcctattgtcaatatcctaa

SEQ ID NO: 64548 - DNA, 25 bp, Probe sequence
ttctcctcctattgtcaatatccta

SEQ ID NO: 64549 - DNA, 25 bp, Probe sequence
aacttctcctcctattgtcaatatc

SEQ ID NO: 64550 - DNA, 25 bp, Probe sequence
cctcctattgtcaatatcctaactt

SEQ ID NO: 64551 - DNA, 25 bp, Probe sequence
aaacttctcctcctattgtcaatat

SEQ ID NO: 64552 - DNA, 25 bp, Probe sequence
ggatattgacaataggaggagaagt

SEQ ID NO: 64553 - DNA, 25 bp, Probe sequence
aggatattgacaataggaggagaag

SEQ ID NO: 64554 - DNA, 25 bp, Probe sequence
agttaggatattgacaataggagga

SEQ ID NO: 64555 - DNA, 25 bp, Probe sequence
taggatattgacaataggaggagaa

SEQ ID NO: 64556 - DNA, 25 bp, Probe sequence
ttaggatattgacaataggaggaga

SEQ ID NO: 64557 - DNA, 25 bp, Probe sequence
gttaggatattgacaataggaggag

SEQ ID NO: 64558 - DNA, 25 bp, Probe sequence
gatattgacaataggaggagaagtt

SEQ ID NO: 64559 - DNA, 25 bp, Probe sequence
aagttaggatattgacaataggagg

SEQ ID NO: 64560 - DNA, 25 bp, Probe sequence
atattgacaataggaggagaagttt

SEQ ID NO: 64561 - DNA, 25 bp, Probe sequence
agttgtagagtctaggacattgatt

SEQ ID NO: 64562 - DNA, 25 bp, Probe sequence
ttagttgtagagtctaggacattga

SEQ ID NO: 64563 - DNA, 25 bp, Probe sequence
tagttgtagagtctaggacattgat

SEQ ID NO: 64564 - DNA, 25 bp, Probe sequence
tctaggacattgatttctgtaccaa

SEQ ID NO: 64565 - DNA, 25 bp, Probe sequence
gtctaggacattgatttctgtacca

SEQ ID NO: 64566 - DNA, 25 bp, Probe sequence
agtctaggacattgatttctgtacc

SEQ ID NO: 64567 - DNA, 25 bp, Probe sequence
aggacattgatttctgtaccaaatt

SEQ ID NO: 64568 - DNA, 25 bp, Probe sequence
agagtctaggacattgatttctgta

SEQ ID NO: 64569 - DNA, 25 bp, Probe sequence
tagagtctaggacattgatttctgt

SEQ ID NO: 64570 - DNA, 25 bp, Probe sequence
aatcaatgtcctagactctacaact

SEQ ID NO: 64571 - DNA, 25 bp, Probe sequence
tcaatgtcctagactctacaactaa

SEQ ID NO: 64572 - DNA, 25 bp, Probe sequence
atcaatgtcctagactctacaacta

SEQ ID NO: 64573 - DNA, 25 bp, Probe sequence
ttggtacagaaatcaatgtcctaga

SEQ ID NO: 64574 - DNA, 25 bp, Probe sequence
ggtacagaaatcaatgtcctagact

SEQ ID NO: 64575 - DNA, 25 bp, Probe sequence
tggtacagaaatcaatgtcctagac

SEQ ID NO: 64576 - DNA, 25 bp, Probe sequence
aatttggtacagaaatcaatgtcct

SEQ ID NO: 64577 - DNA, 25 bp, Probe sequence
agaaatcaatgtcctagactctaca

SEQ ID NO: 64578 - DNA, 25 bp, Probe sequence
acagaaatcaatgtcctagactcta

SEQ ID NO: 64579 - DNA, 25 bp, Probe sequence
aacttatgtcaataggttgtcttca

SEQ ID NO: 64580 - DNA, 25 bp, Probe sequence
acttatgtcaataggttgtcttcat

SEQ ID NO: 64581 - DNA, 25 bp, Probe sequence
ttgaagatgtagtaggaatgttagt

SEQ ID NO: 64582 - DNA, 25 bp, Probe sequence
cttatgtcaataggttgtcttcatg

SEQ ID NO: 64583 - DNA, 25 bp, Probe sequence
ccctagtgtgtgcgatttatttaat

SEQ ID NO: 64584 - DNA, 25 bp, Probe sequence
aggaaagttatgcgttcacaatata

SEQ ID NO: 64585 - DNA, 25 bp, Probe sequence
taggaaagttatgcgttcacaatat

SEQ ID NO: 64586 - DNA, 25 bp, Probe sequence
ataggaaagttatgcgttcacaata

SEQ ID NO: 64587 - DNA, 25 bp, Probe sequence
tagtaacactttcctacgctagttc

SEQ ID NO: 64588 - DNA, 25 bp, Probe sequence
tgaagacaacctattgacataagtt

SEQ ID NO: 64589 - DNA, 25 bp, Probe sequence
atgaagacaacctattgacataagt

SEQ ID NO: 64590 - DNA, 25 bp, Probe sequence
actaacattcctactacatcttcaa

SEQ ID NO: 64591 - DNA, 25 bp, Probe sequence
catgaagacaacctattgacataag

SEQ ID NO: 64592 - DNA, 25 bp, Probe sequence
attaaataaatcgcacacactaggg

SEQ ID NO: 64593 - DNA, 25 bp, Probe sequence
tattgtgaacgcataactttcctat

SEQ ID NO: 64594 - DNA, 25 bp, Probe sequence
atattgtgaacgcataactttccta

SEQ ID NO: 64595 - DNA, 25 bp, Probe sequence
tatattgtgaacgcataactttcct

SEQ ID NO: 64596 - DNA, 25 bp, Probe sequence
gaactagcgtaggaaagtgttacta

SEQ ID NO: 64597 - DNA, 25 bp, Probe sequence
taaatcttacccggttgtactttcg

SEQ ID NO: 64598 - DNA, 25 bp, Probe sequence
ataaatcttacccggttgtactttc

SEQ ID NO: 64599 - DNA, 25 bp, Probe sequence
cttacccggttgtactttcgttaaa

SEQ ID NO: 64600 - DNA, 25 bp, Probe sequence
cggttgtactttcgttaaacttttc

SEQ ID NO: 64601 - DNA, 25 bp, Probe sequence
atcttacccggttgtactttcgtta

SEQ ID NO: 64602 - DNA, 25 bp, Probe sequence
ttacccggttgtactttcgttaaac

SEQ ID NO: 64603 - DNA, 25 bp, Probe sequence
tcttacccggttgtactttcgttaa

SEQ ID NO: 64604 - DNA, 25 bp, Probe sequence
cccggttgtactttcgttaaacttt

SEQ ID NO: 64605 - DNA, 25 bp, Probe sequence
ggttgtactttcgttaaacttttct

SEQ ID NO: 64606 - DNA, 25 bp, Probe sequence
cgaaagtacaaccgggtaagattta

SEQ ID NO: 64607 - DNA, 25 bp, Probe sequence
gaaagtacaaccgggtaagatttat

SEQ ID NO: 64608 - DNA, 25 bp, Probe sequence
tttaacgaaagtacaaccgggtaag

SEQ ID NO: 64609 - DNA, 25 bp, Probe sequence
gaaaagtttaacgaaagtacaaccg

SEQ ID NO: 64610 - DNA, 25 bp, Probe sequence
taacgaaagtacaaccgggtaagat

SEQ ID NO: 64611 - DNA, 25 bp, Probe sequence
gtttaacgaaagtacaaccgggtaa

SEQ ID NO: 64612 - DNA, 25 bp, Probe sequence
ttaacgaaagtacaaccgggtaaga

SEQ ID NO: 64613 - DNA, 25 bp, Probe sequence
aaagtttaacgaaagtacaaccggg

SEQ ID NO: 64614 - DNA, 25 bp, Probe sequence
agaaaagtttaacgaaagtacaacc

SEQ ID NO: 64615 - DNA, 25 bp, Probe sequence
tcaggtgatgtgaattaagtattga

SEQ ID NO: 64616 - DNA, 25 bp, Probe sequence
caggtgatgtgaattaagtattgaa

SEQ ID NO: 64617 - DNA, 25 bp, Probe sequence
ttgatgtgtacgctataagttagat

SEQ ID NO: 64618 - DNA, 25 bp, Probe sequence
aactacaacgaaacacagaaaggaa

SEQ ID NO: 64619 - DNA, 25 bp, Probe sequence
aaactacaacgaaacacagaaagga

SEQ ID NO: 64620 - DNA, 25 bp, Probe sequence
ctacaacgaaacacagaaaggaagt

SEQ ID NO: 64621 - DNA, 25 bp, Probe sequence
actacaacgaaacacagaaaggaag

SEQ ID NO: 64622 - DNA, 25 bp, Probe sequence
gatttgattgattcaggtgatgtga

SEQ ID NO: 64623 - DNA, 25 bp, Probe sequence
agatttgattgattcaggtgatgtg

SEQ ID NO: 64624 - DNA, 25 bp, Probe sequence
tcaatacttaattcacatcacctga

SEQ ID NO: 64625 - DNA, 25 bp, Probe sequence
ttcaatacttaattcacatcacctg

SEQ ID NO: 64626 - DNA, 25 bp, Probe sequence
atctaacttatagcgtacacatcaa

SEQ ID NO: 64627 - DNA, 25 bp, Probe sequence
tcctttctgtgtttcgttgtagttt

SEQ ID NO: 64628 - DNA, 25 bp, Probe sequence
ttcctttctgtgtttcgttgtagtt

SEQ ID NO: 64629 - DNA, 25 bp, Probe sequence
cttcctttctgtgtttcgttgtagt

SEQ ID NO: 64630 - DNA, 25 bp, Probe sequence
acttcctttctgtgtttcgttgtag

SEQ ID NO: 64631 - DNA, 25 bp, Probe sequence
ccataaacttcattgacctgtatct

SEQ ID NO: 64632 - DNA, 25 bp, Probe sequence
tccataaacttcattgacctgtatc

SEQ ID NO: 64633 - DNA, 25 bp, Probe sequence
aggggtatagtaacttattgagaaa

SEQ ID NO: 64634 - DNA, 25 bp, Probe sequence
aaggggtatagtaacttattgagaa

SEQ ID NO: 64635 - DNA, 25 bp, Probe sequence
aaaggggtatagtaacttattgaga

SEQ ID NO: 64636 - DNA, 25 bp, Probe sequence
ggggtatagtaacttattgagaaaa

SEQ ID NO: 64637 - DNA, 25 bp, Probe sequence
aaaaggggtatagtaacttattgag

SEQ ID NO: 64638 - DNA, 25 bp, Probe sequence
tttctcaataagttactatacccct

SEQ ID NO: 64639 - DNA, 25 bp, Probe sequence
tctcaataagttactataccccttt

SEQ ID NO: 64640 - DNA, 25 bp, Probe sequence
ttctcaataagttactatacccctt

SEQ ID NO: 64641 - DNA, 25 bp, Probe sequence
ttttctcaataagttactatacccc

SEQ ID NO: 64642 - DNA, 25 bp, Probe sequence
ctcaataagttactatacccctttt

SEQ ID NO: 64643 - DNA, 25 bp, Probe sequence
tgaagattctaactatacgaaggag

SEQ ID NO: 64644 - DNA, 25 bp, Probe sequence
gaagattctaactatacgaaggaga

SEQ ID NO: 64645 - DNA, 25 bp, Probe sequence
ttgaagattctaactatacgaagga

SEQ ID NO: 64646 - DNA, 25 bp, Probe sequence
attgaagattctaactatacgaagg

SEQ ID NO: 64647 - DNA, 25 bp, Probe sequence
acgaattgaatttaaagcatggttt

SEQ ID NO: 64648 - DNA, 25 bp, Probe sequence
aaacgaattgaatttaaagcatggt

SEQ ID NO: 64649 - DNA, 25 bp, Probe sequence
aacgaattgaatttaaagcatggtt

SEQ ID NO: 64650 - DNA, 25 bp, Probe sequence
aagattctaactatacgaaggagaa

SEQ ID NO: 64651 - DNA, 25 bp, Probe sequence
tctaactatacgaaggagaaatgta

SEQ ID NO: 64652 - DNA, 25 bp, Probe sequence
ctccttcgtatagttagaatcttca

SEQ ID NO: 64653 - DNA, 25 bp, Probe sequence
tctccttcgtatagttagaatcttc

SEQ ID NO: 64654 - DNA, 25 bp, Probe sequence
tccttcgtatagttagaatcttcaa

SEQ ID NO: 64655 - DNA, 25 bp, Probe sequence
ccttcgtatagttagaatcttcaat

SEQ ID NO: 64656 - DNA, 25 bp, Probe sequence
accatgctttaaattcaattcgttt

SEQ ID NO: 64657 - DNA, 25 bp, Probe sequence
aaaccatgctttaaattcaattcgt

SEQ ID NO: 64658 - DNA, 25 bp, Probe sequence
aaccatgctttaaattcaattcgtt

SEQ ID NO: 64659 - DNA, 25 bp, Probe sequence
ttctccttcgtatagttagaatctt

SEQ ID NO: 64660 - DNA, 25 bp, Probe sequence
tacatttctccttcgtatagttaga

SEQ ID NO: 64661 - DNA, 25 bp, Probe sequence
tcaatggaatgttgttgctaactaa

SEQ ID NO: 64662 - DNA, 25 bp, Probe sequence
ttcaatggaatgttgttgctaacta

SEQ ID NO: 64663 - DNA, 25 bp, Probe sequence
caatggaatgttgttgctaactaat

SEQ ID NO: 64664 - DNA, 25 bp, Probe sequence
aatggaatgttgttgctaactaatt

SEQ ID NO: 64665 - DNA, 25 bp, Probe sequence
tttcaatggaatgttgttgctaact

SEQ ID NO: 64666 - DNA, 25 bp, Probe sequence
acccgaagtattcattgtgagtaat

SEQ ID NO: 64667 - DNA, 25 bp, Probe sequence
aacccgaagtattcattgtgagtaa

SEQ ID NO: 64668 - DNA, 25 bp, Probe sequence
aaacccgaagtattcattgtgagta

SEQ ID NO: 64669 - DNA, 25 bp, Probe sequence
taaacccgaagtattcattgtgagt

SEQ ID NO: 64670 - DNA, 25 bp, Probe sequence
tagttagcaacaacattccattgaa

SEQ ID NO: 64671 - DNA, 25 bp, Probe sequence
ttagttagcaacaacattccattga

SEQ ID NO: 64672 - DNA, 25 bp, Probe sequence
attagttagcaacaacattccattg

SEQ ID NO: 64673 - DNA, 25 bp, Probe sequence
aattagttagcaacaacattccatt

SEQ ID NO: 64674 - DNA, 25 bp, Probe sequence
agttagcaacaacattccattgaaa

SEQ ID NO: 64675 - DNA, 25 bp, Probe sequence
attactcacaatgaatacttcgggt

SEQ ID NO: 64676 - DNA, 25 bp, Probe sequence
actcacaatgaatacttcgggttta

SEQ ID NO: 64677 - DNA, 25 bp, Probe sequence
tactcacaatgaatacttcgggttt

SEQ ID NO: 64678 - DNA, 25 bp, Probe sequence
ttactcacaatgaatacttcgggtt

SEQ ID NO: 64679 - DNA, 25 bp, Probe sequence
aattaagttcattgtgttgtcatca

SEQ ID NO: 64680 - DNA, 25 bp, Probe sequence
attaagttcattgtgttgtcatcaa

SEQ ID NO: 64681 - DNA, 25 bp, Probe sequence
atgctccttcgtgctttattctaat

SEQ ID NO: 64682 - DNA, 25 bp, Probe sequence
gtgaacacattgtgaactgacataa

SEQ ID NO: 64683 - DNA, 25 bp, Probe sequence
ctccttcgtgctttattctaatgta

SEQ ID NO: 64684 - DNA, 25 bp, Probe sequence
gctccttcgtgctttattctaatgt

SEQ ID NO: 64685 - DNA, 25 bp, Probe sequence
tgctccttcgtgctttattctaatg

SEQ ID NO: 64686 - DNA, 25 bp, Probe sequence
tgtgaacacattgtgaactgacata

SEQ ID NO: 64687 - DNA, 25 bp, Probe sequence
tccttcgtgctttattctaatgtaa

SEQ ID NO: 64688 - DNA, 25 bp, Probe sequence
tgatgacaacacaatgaacttaatt

SEQ ID NO: 64689 - DNA, 25 bp, Probe sequence
ttgatgacaacacaatgaacttaat

SEQ ID NO: 64690 - DNA, 25 bp, Probe sequence
attagaataaagcacgaaggagcat

SEQ ID NO: 64691 - DNA, 25 bp, Probe sequence
ttatgtcagttcacaatgtgttcac

SEQ ID NO: 64692 - DNA, 25 bp, Probe sequence
tacattagaataaagcacgaaggag

SEQ ID NO: 64693 - DNA, 25 bp, Probe sequence
cattagaataaagcacgaaggagca

SEQ ID NO: 64694 - DNA, 25 bp, Probe sequence
acattagaataaagcacgaaggagc

SEQ ID NO: 64695 - DNA, 25 bp, Probe sequence
tatgtcagttcacaatgtgttcaca

SEQ ID NO: 64696 - DNA, 25 bp, Probe sequence
ttacattagaataaagcacgaagga

SEQ ID NO: 64697 - DNA, 25 bp, Probe sequence
cccaactttcatttacttgcattac

SEQ ID NO: 64698 - DNA, 25 bp, Probe sequence
acgataccccaactttcatttactt

SEQ ID NO: 64699 - DNA, 25 bp, Probe sequence
gagacgataccccaactttcattta

SEQ ID NO: 64700 - DNA, 25 bp, Probe sequence
gacgataccccaactttcatttact

SEQ ID NO: 64701 - DNA, 25 bp, Probe sequence
agacgataccccaactttcatttac

SEQ ID NO: 64702 - DNA, 25 bp, Probe sequence
ccaactttcatttacttgcattact

SEQ ID NO: 64703 - DNA, 25 bp, Probe sequence
cgataccccaactttcatttacttg

SEQ ID NO: 64704 - DNA, 25 bp, Probe sequence
gataccccaactttcatttacttgc

SEQ ID NO: 64705 - DNA, 25 bp, Probe sequence
caactttcatttacttgcattactg

SEQ ID NO: 64706 - DNA, 25 bp, Probe sequence
gtaatgcaagtaaatgaaagttggg

SEQ ID NO: 64707 - DNA, 25 bp, Probe sequence
aagtaaatgaaagttggggtatcgt

SEQ ID NO: 64708 - DNA, 25 bp, Probe sequence
taaatgaaagttggggtatcgtctc

SEQ ID NO: 64709 - DNA, 25 bp, Probe sequence
gtaaatgaaagttggggtatcgtct

SEQ ID NO: 64710 - DNA, 25 bp, Probe sequence
agtaaatgaaagttggggtatcgtc

SEQ ID NO: 64711 - DNA, 25 bp, Probe sequence
agtaatgcaagtaaatgaaagttgg

SEQ ID NO: 64712 - DNA, 25 bp, Probe sequence
caagtaaatgaaagttggggtatcg

SEQ ID NO: 64713 - DNA, 25 bp, Probe sequence
gcaagtaaatgaaagttggggtatc

SEQ ID NO: 64714 - DNA, 25 bp, Probe sequence
cagtaatgcaagtaaatgaaagttg

SEQ ID NO: 64715 - DNA, 25 bp, Probe sequence
ctaacaatgggtggtgagtttaatt

SEQ ID NO: 64716 - DNA, 25 bp, Probe sequence
actaacaatgggtggtgagtttaat

SEQ ID NO: 64717 - DNA, 25 bp, Probe sequence
tactaacaatgggtggtgagtttaa

SEQ ID NO: 64718 - DNA, 25 bp, Probe sequence
ctactaacaatgggtggtgagttta

SEQ ID NO: 64719 - DNA, 25 bp, Probe sequence
taacaatgggtggtgagtttaatta

SEQ ID NO: 64720 - DNA, 25 bp, Probe sequence
gctactaacaatgggtggtgagttt

SEQ ID NO: 64721 - DNA, 25 bp, Probe sequence
aaagctactaacaatgggtggtgag

SEQ ID NO: 64722 - DNA, 25 bp, Probe sequence
aacaatgggtggtgagtttaattaa

SEQ ID NO: 64723 - DNA, 25 bp, Probe sequence
acttcacttcaaagttagtagcttt

SEQ ID NO: 64724 - DNA, 25 bp, Probe sequence
aattaaactcaccacccattgttag

SEQ ID NO: 64725 - DNA, 25 bp, Probe sequence
taaactcaccacccattgttagtag

SEQ ID NO: 64726 - DNA, 25 bp, Probe sequence
ttaaactcaccacccattgttagta

SEQ ID NO: 64727 - DNA, 25 bp, Probe sequence
attaaactcaccacccattgttagt

SEQ ID NO: 64728 - DNA, 25 bp, Probe sequence
taattaaactcaccacccattgtta

SEQ ID NO: 64729 - DNA, 25 bp, Probe sequence
aaactcaccacccattgttagtagc

SEQ ID NO: 64730 - DNA, 25 bp, Probe sequence
ctcaccacccattgttagtagcttt

SEQ ID NO: 64731 - DNA, 25 bp, Probe sequence
ttaattaaactcaccacccattgtt

SEQ ID NO: 64732 - DNA, 25 bp, Probe sequence
aaagctactaactttgaagtgaagt

SEQ ID NO: 64733 - DNA, 25 bp, Probe sequence
aagcagtttatctcactagaaatct

SEQ ID NO: 64734 - DNA, 25 bp, Probe sequence
aaagcagtttatctcactagaaatc

SEQ ID NO: 64735 - DNA, 25 bp, Probe sequence
agcagtttatctcactagaaatcta

SEQ ID NO: 64736 - DNA, 25 bp, Probe sequence
aaagtttggtagaaaggtgaatata

SEQ ID NO: 64737 - DNA, 25 bp, Probe sequence
gcagtttatctcactagaaatctaa

SEQ ID NO: 64738 - DNA, 25 bp, Probe sequence
taaagcagtttatctcactagaaat

SEQ ID NO: 64739 - DNA, 25 bp, Probe sequence
aagtttggtagaaaggtgaatatat

SEQ ID NO: 64740 - DNA, 25 bp, Probe sequence
aaaagtttggtagaaaggtgaatat

SEQ ID NO: 64741 - DNA, 25 bp, Probe sequence
gtatttcgaataaatgtgcagttct

SEQ ID NO: 64742 - DNA, 25 bp, Probe sequence
agatttctagtgagataaactgctt

SEQ ID NO: 64743 - DNA, 25 bp, Probe sequence
gatttctagtgagataaactgcttt

SEQ ID NO: 64744 - DNA, 25 bp, Probe sequence
tagatttctagtgagataaactgct

SEQ ID NO: 64745 - DNA, 25 bp, Probe sequence
tatattcacctttctaccaaacttt

SEQ ID NO: 64746 - DNA, 25 bp, Probe sequence
ttagatttctagtgagataaactgc

SEQ ID NO: 64747 - DNA, 25 bp, Probe sequence
atttctagtgagataaactgcttta

SEQ ID NO: 64748 - DNA, 25 bp, Probe sequence
atatattcacctttctaccaaactt

SEQ ID NO: 64749 - DNA, 25 bp, Probe sequence
atattcacctttctaccaaactttt

SEQ ID NO: 64750 - DNA, 25 bp, Probe sequence
gaactgcacatttattcgaaatact

SEQ ID NO: 64751 - DNA, 25 bp, Probe sequence
ggttccaagcaatgatactttagaa

SEQ ID NO: 64752 - DNA, 25 bp, Probe sequence
aaccaactactgccaatgtttattt

SEQ ID NO: 64753 - DNA, 25 bp, Probe sequence
gtgttggttccaagcaatgatactt

SEQ ID NO: 64754 - DNA, 25 bp, Probe sequence
aagtgttggttccaagcaatgatac

SEQ ID NO: 64755 - DNA, 25 bp, Probe sequence
tggttccaagcaatgatactttaga

SEQ ID NO: 64756 - DNA, 25 bp, Probe sequence
taaccaactactgccaatgtttatt

SEQ ID NO: 64757 - DNA, 25 bp, Probe sequence
ttaaatagcaagtggaggtacaagt

SEQ ID NO: 64758 - DNA, 25 bp, Probe sequence
ttaaccaactactgccaatgtttat

SEQ ID NO: 64759 - DNA, 25 bp, Probe sequence
taaatagcaagtggaggtacaagta

SEQ ID NO: 64760 - DNA, 25 bp, Probe sequence
ttctaaagtatcattgcttggaacc

SEQ ID NO: 64761 - DNA, 25 bp, Probe sequence
aaataaacattggcagtagttggtt

SEQ ID NO: 64762 - DNA, 25 bp, Probe sequence
gtatcattgcttggaaccaacactt

SEQ ID NO: 64763 - DNA, 25 bp, Probe sequence
aagtatcattgcttggaaccaacac

SEQ ID NO: 64764 - DNA, 25 bp, Probe sequence
tctaaagtatcattgcttggaacca

SEQ ID NO: 64765 - DNA, 25 bp, Probe sequence
aataaacattggcagtagttggtta

SEQ ID NO: 64766 - DNA, 25 bp, Probe sequence
ataaacattggcagtagttggttaa

SEQ ID NO: 64767 - DNA, 25 bp, Probe sequence
acttgtacctccacttgctatttaa

SEQ ID NO: 64768 - DNA, 25 bp, Probe sequence
tacttgtacctccacttgctattta

SEQ ID NO: 64769 - DNA, 25 bp, Probe sequence
tatgggaaaggtatggtgaattgaa

SEQ ID NO: 64770 - DNA, 25 bp, Probe sequence
ttatgggaaaggtatggtgaattga

SEQ ID NO: 64771 - DNA, 25 bp, Probe sequence
acaattatgggaaaggtatggtgaa

SEQ ID NO: 64772 - DNA, 25 bp, Probe sequence
tacaattatgggaaaggtatggtga

SEQ ID NO: 64773 - DNA, 25 bp, Probe sequence
attatgggaaaggtatggtgaattg

SEQ ID NO: 64774 - DNA, 25 bp, Probe sequence
caattatgggaaaggtatggtgaat

SEQ ID NO: 64775 - DNA, 25 bp, Probe sequence
cagatggtaggaaacaactaataca

SEQ ID NO: 64776 - DNA, 25 bp, Probe sequence
acagatggtaggaaacaactaatac

SEQ ID NO: 64777 - DNA, 25 bp, Probe sequence
agatggtaggaaacaactaatacag

SEQ ID NO: 64778 - DNA, 25 bp, Probe sequence
ttcaccatacctttcccataattgt

SEQ ID NO: 64779 - DNA, 25 bp, Probe sequence
tcaattcaccatacctttcccataa

SEQ ID NO: 64780 - DNA, 25 bp, Probe sequence
ttcaattcaccatacctttcccata

SEQ ID NO: 64781 - DNA, 25 bp, Probe sequence
tcaccatacctttcccataattgta

SEQ ID NO: 64782 - DNA, 25 bp, Probe sequence
attcaccatacctttcccataattg

SEQ ID NO: 64783 - DNA, 25 bp, Probe sequence
caattcaccatacctttcccataat

SEQ ID NO: 64784 - DNA, 25 bp, Probe sequence
gtattagttgtttcctaccatctgt

SEQ ID NO: 64785 - DNA, 25 bp, Probe sequence
tgtattagttgtttcctaccatctg

SEQ ID NO: 64786 - DNA, 25 bp, Probe sequence
ctgtattagttgtttcctaccatct

SEQ ID NO: 64787 - DNA, 25 bp, Probe sequence
taatttacgaaatcttaggagggca

SEQ ID NO: 64788 - DNA, 25 bp, Probe sequence
atttacgaaatcttaggagggcaaa

SEQ ID NO: 64789 - DNA, 25 bp, Probe sequence
aatttacgaaatcttaggagggcaa

SEQ ID NO: 64790 - DNA, 25 bp, Probe sequence
ttaatttacgaaatcttaggagggc

SEQ ID NO: 64791 - DNA, 25 bp, Probe sequence
tttacgaaatcttaggagggcaaaa

SEQ ID NO: 64792 - DNA, 25 bp, Probe sequence
cgaagttagcgtattttagtctcat

SEQ ID NO: 64793 - DNA, 25 bp, Probe sequence
tttaatttacgaaatcttaggaggg

SEQ ID NO: 64794 - DNA, 25 bp, Probe sequence
agttagcgtattttagtctcattga

SEQ ID NO: 64795 - DNA, 25 bp, Probe sequence
aagttagcgtattttagtctcattg

SEQ ID NO: 64796 - DNA, 25 bp, Probe sequence
tgccctcctaagatttcgtaaatta

SEQ ID NO: 64797 - DNA, 25 bp, Probe sequence
ttgccctcctaagatttcgtaaatt

SEQ ID NO: 64798 - DNA, 25 bp, Probe sequence
tttgccctcctaagatttcgtaaat

SEQ ID NO: 64799 - DNA, 25 bp, Probe sequence
gccctcctaagatttcgtaaattaa

SEQ ID NO: 64800 - DNA, 25 bp, Probe sequence
ttttgccctcctaagatttcgtaaa

SEQ ID NO: 64801 - DNA, 25 bp, Probe sequence
atgagactaaaatacgctaacttcg

SEQ ID NO: 64802 - DNA, 25 bp, Probe sequence
ccctcctaagatttcgtaaattaaa

SEQ ID NO: 64803 - DNA, 25 bp, Probe sequence
tcaatgagactaaaatacgctaact

SEQ ID NO: 64804 - DNA, 25 bp, Probe sequence
caatgagactaaaatacgctaactt

SEQ ID NO: 64805 - DNA, 25 bp, Probe sequence
ttgagatatcgttaacatgtgacat

SEQ ID NO: 64806 - DNA, 25 bp, Probe sequence
acaaaagaattgaaatggagggttc

SEQ ID NO: 64807 - DNA, 25 bp, Probe sequence
aacaaaagaattgaaatggagggtt

SEQ ID NO: 64808 - DNA, 25 bp, Probe sequence
gcgatgctaacaaaagaattgaaat

SEQ ID NO: 64809 - DNA, 25 bp, Probe sequence
gctaacaaaagaattgaaatggagg

SEQ ID NO: 64810 - DNA, 25 bp, Probe sequence
taacaaaagaattgaaatggagggt

SEQ ID NO: 64811 - DNA, 25 bp, Probe sequence
ctaacaaaagaattgaaatggaggg

SEQ ID NO: 64812 - DNA, 25 bp, Probe sequence
tgctaacaaaagaattgaaatggag

SEQ ID NO: 64813 - DNA, 25 bp, Probe sequence
aggtaaagtaatgtaaggaaattga

SEQ ID NO: 64814 - DNA, 25 bp, Probe sequence
atgtcacatgttaacgatatctcaa

SEQ ID NO: 64815 - DNA, 25 bp, Probe sequence
aaccctccatttcaattcttttgtt

SEQ ID NO: 64816 - DNA, 25 bp, Probe sequence
gaaccctccatttcaattcttttgt

SEQ ID NO: 64817 - DNA, 25 bp, Probe sequence
atttcaattcttttgttagcatcgc

SEQ ID NO: 64818 - DNA, 25 bp, Probe sequence
cctccatttcaattcttttgttagc

SEQ ID NO: 64819 - DNA, 25 bp, Probe sequence
accctccatttcaattcttttgtta

SEQ ID NO: 64820 - DNA, 25 bp, Probe sequence
ccctccatttcaattcttttgttag

SEQ ID NO: 64821 - DNA, 25 bp, Probe sequence
ctccatttcaattcttttgttagca

SEQ ID NO: 64822 - DNA, 25 bp, Probe sequence
tcaatttccttacattactttacct

SEQ ID NO: 64823 - DNA, 25 bp, Probe sequence
gatacctttatcaagtgttaaacaa

SEQ ID NO: 64824 - DNA, 25 bp, Probe sequence
atacctttatcaagtgttaaacaaa

SEQ ID NO: 64825 - DNA, 25 bp, Probe sequence
tgatacctttatcaagtgttaaaca

SEQ ID NO: 64826 - DNA, 25 bp, Probe sequence
acctttatcaagtgttaaacaaaat

SEQ ID NO: 64827 - DNA, 25 bp, Probe sequence
cctttatcaagtgttaaacaaaatg

SEQ ID NO: 64828 - DNA, 25 bp, Probe sequence
tacctttatcaagtgttaaacaaaa

SEQ ID NO: 64829 - DNA, 25 bp, Probe sequence
ctttatcaagtgttaaacaaaatgt

SEQ ID NO: 64830 - DNA, 25 bp, Probe sequence
tcgaaattaacacaatttaatagga

SEQ ID NO: 64831 - DNA, 25 bp, Probe sequence
ttcgttcgaaattaacacaatttaa

SEQ ID NO: 64832 - DNA, 25 bp, Probe sequence
ttgtttaacacttgataaaggtatc

SEQ ID NO: 64833 - DNA, 25 bp, Probe sequence
tttgtttaacacttgataaaggtat

SEQ ID NO: 64834 - DNA, 25 bp, Probe sequence
tgtttaacacttgataaaggtatca

SEQ ID NO: 64835 - DNA, 25 bp, Probe sequence
attttgtttaacacttgataaaggt

SEQ ID NO: 64836 - DNA, 25 bp, Probe sequence
cattttgtttaacacttgataaagg

SEQ ID NO: 64837 - DNA, 25 bp, Probe sequence
ttttgtttaacacttgataaaggta

SEQ ID NO: 64838 - DNA, 25 bp, Probe sequence
acattttgtttaacacttgataaag

SEQ ID NO: 64839 - DNA, 25 bp, Probe sequence
tcctattaaattgtgttaatttcga

SEQ ID NO: 64840 - DNA, 25 bp, Probe sequence
ttaaattgtgttaatttcgaacgaa

SEQ ID NO: 64841 - DNA, 25 bp, Probe sequence
cgggataagtactataaggagttgt

SEQ ID NO: 64842 - DNA, 25 bp, Probe sequence
acgggataagtactataaggagttg

SEQ ID NO: 64843 - DNA, 25 bp, Probe sequence
aacgggataagtactataaggagtt

SEQ ID NO: 64844 - DNA, 25 bp, Probe sequence
taagtactataaggagttgtaacga

SEQ ID NO: 64845 - DNA, 25 bp, Probe sequence
taacgggataagtactataaggagt

SEQ ID NO: 64846 - DNA, 25 bp, Probe sequence
ataacgggataagtactataaggag

SEQ ID NO: 64847 - DNA, 25 bp, Probe sequence
ataagtactataaggagttgtaacg

SEQ ID NO: 64848 - DNA, 25 bp, Probe sequence
gggataagtactataaggagttgta

SEQ ID NO: 64849 - DNA, 25 bp, Probe sequence
aataacgggataagtactataagga

SEQ ID NO: 64850 - DNA, 25 bp, Probe sequence
caactccttatagtacttatcccgt

SEQ ID NO: 64851 - DNA, 25 bp, Probe sequence
acaactccttatagtacttatcccg

SEQ ID NO: 64852 - DNA, 25 bp, Probe sequence
aactccttatagtacttatcccgtt

SEQ ID NO: 64853 - DNA, 25 bp, Probe sequence
tcgttacaactccttatagtactta

SEQ ID NO: 64854 - DNA, 25 bp, Probe sequence
actccttatagtacttatcccgtta

SEQ ID NO: 64855 - DNA, 25 bp, Probe sequence
ctccttatagtacttatcccgttat

SEQ ID NO: 64856 - DNA, 25 bp, Probe sequence
cgttacaactccttatagtacttat

SEQ ID NO: 64857 - DNA, 25 bp, Probe sequence
tacaactccttatagtacttatccc

SEQ ID NO: 64858 - DNA, 25 bp, Probe sequence
tccttatagtacttatcccgttatt

SEQ ID NO: 64859 - DNA, 25 bp, Probe sequence
tgcgtatatctataggctcgtagta

SEQ ID NO: 64860 - DNA, 25 bp, Probe sequence
taatgtgcgtatatctataggctcg

SEQ ID NO: 64861 - DNA, 25 bp, Probe sequence
atgtgcgtatatctataggctcgta

SEQ ID NO: 64862 - DNA, 25 bp, Probe sequence
gacgatttctcattaccatacacct

SEQ ID NO: 64863 - DNA, 25 bp, Probe sequence
acgatttctcattaccatacaccta

SEQ ID NO: 64864 - DNA, 25 bp, Probe sequence
gcgtatatctataggctcgtagtat

SEQ ID NO: 64865 - DNA, 25 bp, Probe sequence
gtgcgtatatctataggctcgtagt

SEQ ID NO: 64866 - DNA, 25 bp, Probe sequence
tgtgcgtatatctataggctcgtag

SEQ ID NO: 64867 - DNA, 25 bp, Probe sequence
aatgtgcgtatatctataggctcgt

SEQ ID NO: 64868 - DNA, 25 bp, Probe sequence
tactacgagcctatagatatacgca

SEQ ID NO: 64869 - DNA, 25 bp, Probe sequence
cgagcctatagatatacgcacatta

SEQ ID NO: 64870 - DNA, 25 bp, Probe sequence
tacgagcctatagatatacgcacat

SEQ ID NO: 64871 - DNA, 25 bp, Probe sequence
aggtgtatggtaatgagaaatcgtc

SEQ ID NO: 64872 - DNA, 25 bp, Probe sequence
taggtgtatggtaatgagaaatcgt

SEQ ID NO: 64873 - DNA, 25 bp, Probe sequence
ctacgagcctatagatatacgcaca

SEQ ID NO: 64874 - DNA, 25 bp, Probe sequence
actacgagcctatagatatacgcac

SEQ ID NO: 64875 - DNA, 25 bp, Probe sequence
atactacgagcctatagatatacgc

SEQ ID NO: 64876 - DNA, 25 bp, Probe sequence
acgagcctatagatatacgcacatt

SEQ ID NO: 64877 - DNA, 25 bp, Probe sequence
ctcacctctacttcttatggacaat

SEQ ID NO: 64878 - DNA, 25 bp, Probe sequence
actcacctctacttcttatggacaa

SEQ ID NO: 64879 - DNA, 25 bp, Probe sequence
ttgactcacctctacttcttatgga

SEQ ID NO: 64880 - DNA, 25 bp, Probe sequence
gactcacctctacttcttatggaca

SEQ ID NO: 64881 - DNA, 25 bp, Probe sequence
tgactcacctctacttcttatggac

SEQ ID NO: 64882 - DNA, 25 bp, Probe sequence
tcacctctacttcttatggacaata

SEQ ID NO: 64883 - DNA, 25 bp, Probe sequence
cacctctacttcttatggacaatat

SEQ ID NO: 64884 - DNA, 25 bp, Probe sequence
tggatgtgattacgtgctctattat

SEQ ID NO: 64885 - DNA, 25 bp, Probe sequence
atggatgtgattacgtgctctatta

SEQ ID NO: 64886 - DNA, 25 bp, Probe sequence
attgtccataagaagtagaggtgag

SEQ ID NO: 64887 - DNA, 25 bp, Probe sequence
ttgtccataagaagtagaggtgagt

SEQ ID NO: 64888 - DNA, 25 bp, Probe sequence
tccataagaagtagaggtgagtcaa

SEQ ID NO: 64889 - DNA, 25 bp, Probe sequence
tgtccataagaagtagaggtgagtc

SEQ ID NO: 64890 - DNA, 25 bp, Probe sequence
gtccataagaagtagaggtgagtca

SEQ ID NO: 64891 - DNA, 25 bp, Probe sequence
tattgtccataagaagtagaggtga

SEQ ID NO: 64892 - DNA, 25 bp, Probe sequence
atattgtccataagaagtagaggtg

SEQ ID NO: 64893 - DNA, 25 bp, Probe sequence
taatagagcacgtaatcacatccat

SEQ ID NO: 64894 - DNA, 25 bp, Probe sequence
ataatagagcacgtaatcacatcca

SEQ ID NO: 64895 - DNA, 25 bp, Probe sequence
agagtacctcctgtatagtgtttaa

SEQ ID NO: 64896 - DNA, 25 bp, Probe sequence
gagtacctcctgtatagtgtttaaa

SEQ ID NO: 64897 - DNA, 25 bp, Probe sequence
aataaagatgttaggagatgatgtt

SEQ ID NO: 64898 - DNA, 25 bp, Probe sequence
taataaagatgttaggagatgatgt

SEQ ID NO: 64899 - DNA, 25 bp, Probe sequence
ggcttaagacgctctcattaaaatt

SEQ ID NO: 64900 - DNA, 25 bp, Probe sequence
atgttttatcaattgcggcttaaga

SEQ ID NO: 64901 - DNA, 25 bp, Probe sequence
ttaagacgctctcattaaaattagt

SEQ ID NO: 64902 - DNA, 25 bp, Probe sequence
tgttttatcaattgcggcttaagac

SEQ ID NO: 64903 - DNA, 25 bp, Probe sequence
cggcttaagacgctctcattaaaat

SEQ ID NO: 64904 - DNA, 25 bp, Probe sequence
ttaaacactatacaggaggtactct

SEQ ID NO: 64905 - DNA, 25 bp, Probe sequence
tttaaacactatacaggaggtactc

SEQ ID NO: 64906 - DNA, 25 bp, Probe sequence
aacatcatctcctaacatctttatt

SEQ ID NO: 64907 - DNA, 25 bp, Probe sequence
acatcatctcctaacatctttatta

SEQ ID NO: 64908 - DNA, 25 bp, Probe sequence
aattttaatgagagcgtcttaagcc

SEQ ID NO: 64909 - DNA, 25 bp, Probe sequence
tcttaagccgcaattgataaaacat

SEQ ID NO: 64910 - DNA, 25 bp, Probe sequence
actaattttaatgagagcgtcttaa

SEQ ID NO: 64911 - DNA, 25 bp, Probe sequence
gtcttaagccgcaattgataaaaca

SEQ ID NO: 64912 - DNA, 25 bp, Probe sequence
attttaatgagagcgtcttaagccg

SEQ ID NO: 64913 - DNA, 25 bp, Probe sequence
agcgtaatatgtagtcctaacaatt

SEQ ID NO: 64914 - DNA, 25 bp, Probe sequence
aagcgtaatatgtagtcctaacaat

SEQ ID NO: 64915 - DNA, 25 bp, Probe sequence
aaagcgtaatatgtagtcctaacaa

SEQ ID NO: 64916 - DNA, 25 bp, Probe sequence
gcgtaatatgtagtcctaacaatta

SEQ ID NO: 64917 - DNA, 25 bp, Probe sequence
aacaattaggtaacatattacgctt

SEQ ID NO: 64918 - DNA, 25 bp, Probe sequence
accaaaagcgtaatatgtagtccta

SEQ ID NO: 64919 - DNA, 25 bp, Probe sequence
taccaaaagcgtaatatgtagtcct

SEQ ID NO: 64920 - DNA, 25 bp, Probe sequence
taacaattaggtaacatattacgct

SEQ ID NO: 64921 - DNA, 25 bp, Probe sequence
ccaaaagcgtaatatgtagtcctaa

SEQ ID NO: 64922 - DNA, 25 bp, Probe sequence
attgttaggactacatattacgctt

SEQ ID NO: 64923 - DNA, 25 bp, Probe sequence
aattgttaggactacatattacgct

SEQ ID NO: 64924 - DNA, 25 bp, Probe sequence
ttgttaggactacatattacgcttt

SEQ ID NO: 64925 - DNA, 25 bp, Probe sequence
taattgttaggactacatattacgc

SEQ ID NO: 64926 - DNA, 25 bp, Probe sequence
aagcgtaatatgttacctaattgtt

SEQ ID NO: 64927 - DNA, 25 bp, Probe sequence
taggactacatattacgcttttggt

SEQ ID NO: 64928 - DNA, 25 bp, Probe sequence
aggactacatattacgcttttggta

SEQ ID NO: 64929 - DNA, 25 bp, Probe sequence
agcgtaatatgttacctaattgtta

SEQ ID NO: 64930 - DNA, 25 bp, Probe sequence
ttaggactacatattacgcttttgg

SEQ ID NO: 64931 - DNA, 25 bp, Probe sequence
tatccccaccttttgcttatctttt

SEQ ID NO: 64932 - DNA, 25 bp, Probe sequence
ctatccccaccttttgcttatcttt

SEQ ID NO: 64933 - DNA, 25 bp, Probe sequence
ccaccttttgcttatcttttctcaa

SEQ ID NO: 64934 - DNA, 25 bp, Probe sequence
cccaccttttgcttatcttttctca

SEQ ID NO: 64935 - DNA, 25 bp, Probe sequence
atccccaccttttgcttatcttttc

SEQ ID NO: 64936 - DNA, 25 bp, Probe sequence
ccccaccttttgcttatcttttctc

SEQ ID NO: 64937 - DNA, 25 bp, Probe sequence
caccttttgcttatcttttctcaat

SEQ ID NO: 64938 - DNA, 25 bp, Probe sequence
cctatccccaccttttgcttatctt

SEQ ID NO: 64939 - DNA, 25 bp, Probe sequence
tccccaccttttgcttatcttttct

SEQ ID NO: 64940 - DNA, 25 bp, Probe sequence
aaaagataagcaaaaggtggggata

SEQ ID NO: 64941 - DNA, 25 bp, Probe sequence
aaagataagcaaaaggtggggatag

SEQ ID NO: 64942 - DNA, 25 bp, Probe sequence
ttgagaaaagataagcaaaaggtgg

SEQ ID NO: 64943 - DNA, 25 bp, Probe sequence
tgagaaaagataagcaaaaggtggg

SEQ ID NO: 64944 - DNA, 25 bp, Probe sequence
gaaaagataagcaaaaggtggggat

SEQ ID NO: 64945 - DNA, 25 bp, Probe sequence
gagaaaagataagcaaaaggtgggg

SEQ ID NO: 64946 - DNA, 25 bp, Probe sequence
attgagaaaagataagcaaaaggtg

SEQ ID NO: 64947 - DNA, 25 bp, Probe sequence
aagataagcaaaaggtggggatagg

SEQ ID NO: 64948 - DNA, 25 bp, Probe sequence
agaaaagataagcaaaaggtgggga

SEQ ID NO: 64949 - DNA, 25 bp, Probe sequence
agacttgagaatttatatagagggg

SEQ ID NO: 64950 - DNA, 25 bp, Probe sequence
aagacttgagaatttatatagaggg

SEQ ID NO: 64951 - DNA, 25 bp, Probe sequence
ccctctatataaattctcaagtctt

SEQ ID NO: 64952 - DNA, 25 bp, Probe sequence
cccctctatataaattctcaagtct

SEQ ID NO: 64953 - DNA, 25 bp, Probe sequence
ggctgttatgttgtcttcttgatga

SEQ ID NO: 64954 - DNA, 25 bp, Probe sequence
tggctgttatgttgtcttcttgatg

SEQ ID NO: 64955 - DNA, 25 bp, Probe sequence
gtggctgttatgttgtcttcttgat

SEQ ID NO: 64956 - DNA, 25 bp, Probe sequence
aagtggctgttatgttgtcttcttg

SEQ ID NO: 64957 - DNA, 25 bp, Probe sequence
gctgttatgttgtcttcttgatgac

SEQ ID NO: 64958 - DNA, 25 bp, Probe sequence
agtggctgttatgttgtcttcttga

SEQ ID NO: 64959 - DNA, 25 bp, Probe sequence
tgattaaagtggctgttatgttgtc

SEQ ID NO: 64960 - DNA, 25 bp, Probe sequence
ctgattaaagtggctgttatgttgt

SEQ ID NO: 64961 - DNA, 25 bp, Probe sequence
gattaaagtggctgttatgttgtct

SEQ ID NO: 64962 - DNA, 25 bp, Probe sequence
tcatcaagaagacaacataacagcc

SEQ ID NO: 64963 - DNA, 25 bp, Probe sequence
atcaagaagacaacataacagccac

SEQ ID NO: 64964 - DNA, 25 bp, Probe sequence
catcaagaagacaacataacagcca

SEQ ID NO: 64965 - DNA, 25 bp, Probe sequence
caagaagacaacataacagccactt

SEQ ID NO: 64966 - DNA, 25 bp, Probe sequence
gtcatcaagaagacaacataacagc

SEQ ID NO: 64967 - DNA, 25 bp, Probe sequence
tcaagaagacaacataacagccact

SEQ ID NO: 64968 - DNA, 25 bp, Probe sequence
acaacataacagccactttaatcag

SEQ ID NO: 64969 - DNA, 25 bp, Probe sequence
gacaacataacagccactttaatca

SEQ ID NO: 64970 - DNA, 25 bp, Probe sequence
agacaacataacagccactttaatc

SEQ ID NO: 64971 - DNA, 25 bp, Probe sequence
agccaatatttagtacgagatgact

SEQ ID NO: 64972 - DNA, 25 bp, Probe sequence
gacttctgtcattaagcaatgctaa

SEQ ID NO: 64973 - DNA, 25 bp, Probe sequence
gccaatatttagtacgagatgactt

SEQ ID NO: 64974 - DNA, 25 bp, Probe sequence
tagccaatatttagtacgagatgac

SEQ ID NO: 64975 - DNA, 25 bp, Probe sequence
ctagccaatatttagtacgagatga

SEQ ID NO: 64976 - DNA, 25 bp, Probe sequence
tatttagtacgagatgacttctgtc

SEQ ID NO: 64977 - DNA, 25 bp, Probe sequence
atatttagtacgagatgacttctgt

SEQ ID NO: 64978 - DNA, 25 bp, Probe sequence
actagccaatatttagtacgagatg

SEQ ID NO: 64979 - DNA, 25 bp, Probe sequence
ccaatatttagtacgagatgacttc

SEQ ID NO: 64980 - DNA, 25 bp, Probe sequence
agtcatctcgtactaaatattggct

SEQ ID NO: 64981 - DNA, 25 bp, Probe sequence
ttagcattgcttaatgacagaagtc

SEQ ID NO: 64982 - DNA, 25 bp, Probe sequence
aagtcatctcgtactaaatattggc

SEQ ID NO: 64983 - DNA, 25 bp, Probe sequence
gtcatctcgtactaaatattggcta

SEQ ID NO: 64984 - DNA, 25 bp, Probe sequence
tcatctcgtactaaatattggctag

SEQ ID NO: 64985 - DNA, 25 bp, Probe sequence
gacagaagtcatctcgtactaaata

SEQ ID NO: 64986 - DNA, 25 bp, Probe sequence
acagaagtcatctcgtactaaatat

SEQ ID NO: 64987 - DNA, 25 bp, Probe sequence
catctcgtactaaatattggctagt

SEQ ID NO: 64988 - DNA, 25 bp, Probe sequence
gaagtcatctcgtactaaatattgg

SEQ ID NO: 64989 - DNA, 25 bp, Probe sequence
ctaatagtttgaggagtgtatcgct

SEQ ID NO: 64990 - DNA, 25 bp, Probe sequence
tctaatagtttgaggagtgtatcgc

SEQ ID NO: 64991 - DNA, 25 bp, Probe sequence
taaatgtggtggcgaaattagaatc

SEQ ID NO: 64992 - DNA, 25 bp, Probe sequence
aaattactaaatgtggtggcgaaat

SEQ ID NO: 64993 - DNA, 25 bp, Probe sequence
taatagtttgaggagtgtatcgcta

SEQ ID NO: 64994 - DNA, 25 bp, Probe sequence
attactaaatgtggtggcgaaatta

SEQ ID NO: 64995 - DNA, 25 bp, Probe sequence
attattatttctgaagcggaggttt

SEQ ID NO: 64996 - DNA, 25 bp, Probe sequence
aattattatttctgaagcggaggtt

SEQ ID NO: 64997 - DNA, 25 bp, Probe sequence
aaatgtggtggcgaaattagaatca

SEQ ID NO: 64998 - DNA, 25 bp, Probe sequence
gcgatacactcctcaaactattaga

SEQ ID NO: 64999 - DNA, 25 bp, Probe sequence
agcgatacactcctcaaactattag

SEQ ID NO: 65000 - DNA, 25 bp, Probe sequence
atttcgccaccacatttagtaattt

SEQ ID NO: 65001 - DNA, 25 bp, Probe sequence
gattctaatttcgccaccacattta

SEQ ID NO: 65002 - DNA, 25 bp, Probe sequence
tagcgatacactcctcaaactatta

SEQ ID NO: 65003 - DNA, 25 bp, Probe sequence
taatttcgccaccacatttagtaat

SEQ ID NO: 65004 - DNA, 25 bp, Probe sequence
aaacctccgcttcagaaataataat

SEQ ID NO: 65005 - DNA, 25 bp, Probe sequence
aacctccgcttcagaaataataatt

SEQ ID NO: 65006 - DNA, 25 bp, Probe sequence
tgattctaatttcgccaccacattt

SEQ ID NO: 65007 - DNA, 25 bp, Probe sequence
tgccattaaaattacggtttgcttt

SEQ ID NO: 65008 - DNA, 25 bp, Probe sequence
gtgccattaaaattacggtttgctt

SEQ ID NO: 65009 - DNA, 25 bp, Probe sequence
aaacgagattacacaacaattgacg

SEQ ID NO: 65010 - DNA, 25 bp, Probe sequence
gccattaaaattacggtttgctttt

SEQ ID NO: 65011 - DNA, 25 bp, Probe sequence
acaacaattgacgtgtaatctcgtt

SEQ ID NO: 65012 - DNA, 25 bp, Probe sequence
aacgagattacacaacaattgacgt

SEQ ID NO: 65013 - DNA, 25 bp, Probe sequence
cacaacaattgacgtgtaatctcgt

SEQ ID NO: 65014 - DNA, 25 bp, Probe sequence
acgagattacacaacaattgacgtg

SEQ ID NO: 65015 - DNA, 25 bp, Probe sequence
caacaattgacgtgtaatctcgttt

SEQ ID NO: 65016 - DNA, 25 bp, Probe sequence
aaagcaaaccgtaattttaatggca

SEQ ID NO: 65017 - DNA, 25 bp, Probe sequence
aagcaaaccgtaattttaatggcac

SEQ ID NO: 65018 - DNA, 25 bp, Probe sequence
cgtcaattgttgtgtaatctcgttt

SEQ ID NO: 65019 - DNA, 25 bp, Probe sequence
aaaagcaaaccgtaattttaatggc

SEQ ID NO: 65020 - DNA, 25 bp, Probe sequence
acgtcaattgttgtgtaatctcgtt

SEQ ID NO: 65021 - DNA, 25 bp, Probe sequence
aacgagattacacgtcaattgttgt

SEQ ID NO: 65022 - DNA, 25 bp, Probe sequence
cacgtcaattgttgtgtaatctcgt

SEQ ID NO: 65023 - DNA, 25 bp, Probe sequence
acgagattacacgtcaattgttgtg

SEQ ID NO: 65024 - DNA, 25 bp, Probe sequence
aaacgagattacacgtcaattgttg

SEQ ID NO: 65025 - DNA, 25 bp, Probe sequence
tttctcttgtcgttaatttgtcaca

SEQ ID NO: 65026 - DNA, 25 bp, Probe sequence
tctcttgtcgttaatttgtcacatt

SEQ ID NO: 65027 - DNA, 25 bp, Probe sequence
ttctcttgtcgttaatttgtcacat

SEQ ID NO: 65028 - DNA, 25 bp, Probe sequence
ctcttgtcgttaatttgtcacattt

SEQ ID NO: 65029 - DNA, 25 bp, Probe sequence
ttttctcttgtcgttaatttgtcac

SEQ ID NO: 65030 - DNA, 25 bp, Probe sequence
attttctcttgtcgttaatttgtca

SEQ ID NO: 65031 - DNA, 25 bp, Probe sequence
cattttctcttgtcgttaatttgtc

SEQ ID NO: 65032 - DNA, 25 bp, Probe sequence
tcttgtcgttaatttgtcacatttt

SEQ ID NO: 65033 - DNA, 25 bp, Probe sequence
acattttctcttgtcgttaatttgt

SEQ ID NO: 65034 - DNA, 25 bp, Probe sequence
tgtgacaaattaacgacaagagaaa

SEQ ID NO: 65035 - DNA, 25 bp, Probe sequence
atgtgacaaattaacgacaagagaa

SEQ ID NO: 65036 - DNA, 25 bp, Probe sequence
aatgtgacaaattaacgacaagaga

SEQ ID NO: 65037 - DNA, 25 bp, Probe sequence
aaatgtgacaaattaacgacaagag

SEQ ID NO: 65038 - DNA, 25 bp, Probe sequence
gtgacaaattaacgacaagagaaaa

SEQ ID NO: 65039 - DNA, 25 bp, Probe sequence
tgacaaattaacgacaagagaaaat

SEQ ID NO: 65040 - DNA, 25 bp, Probe sequence
gacaaattaacgacaagagaaaatg

SEQ ID NO: 65041 - DNA, 25 bp, Probe sequence
aaaatgtgacaaattaacgacaaga

SEQ ID NO: 65042 - DNA, 25 bp, Probe sequence
acaaattaacgacaagagaaaatgt

SEQ ID NO: 65043 - DNA, 25 bp, Probe sequence
gatgaagaatagtcggacagttgat

SEQ ID NO: 65044 - DNA, 25 bp, Probe sequence
atgaagaatagtcggacagttgatg

SEQ ID NO: 65045 - DNA, 25 bp, Probe sequence
ttgatgaagaatagtcggacagttg

SEQ ID NO: 65046 - DNA, 25 bp, Probe sequence
agaatagtcggacagttgatggtat

SEQ ID NO: 65047 - DNA, 25 bp, Probe sequence
aatagtcggacagttgatggtattc

SEQ ID NO: 65048 - DNA, 25 bp, Probe sequence
gaatagtcggacagttgatggtatt

SEQ ID NO: 65049 - DNA, 25 bp, Probe sequence
aagaatagtcggacagttgatggta

SEQ ID NO: 65050 - DNA, 25 bp, Probe sequence
tgatgaagaatagtcggacagttga

SEQ ID NO: 65051 - DNA, 25 bp, Probe sequence
tagtcggacagttgatggtattcat

SEQ ID NO: 65052 - DNA, 25 bp, Probe sequence
atcaactgtccgactattcttcatc

SEQ ID NO: 65053 - DNA, 25 bp, Probe sequence
catcaactgtccgactattcttcat

SEQ ID NO: 65054 - DNA, 25 bp, Probe sequence
caactgtccgactattcttcatcaa

SEQ ID NO: 65055 - DNA, 25 bp, Probe sequence
ataccatcaactgtccgactattct

SEQ ID NO: 65056 - DNA, 25 bp, Probe sequence
aataccatcaactgtccgactattc

SEQ ID NO: 65057 - DNA, 25 bp, Probe sequence
gaataccatcaactgtccgactatt

SEQ ID NO: 65058 - DNA, 25 bp, Probe sequence
taccatcaactgtccgactattctt

SEQ ID NO: 65059 - DNA, 25 bp, Probe sequence
tcaactgtccgactattcttcatca

SEQ ID NO: 65060 - DNA, 25 bp, Probe sequence
tgaataccatcaactgtccgactat

SEQ ID NO: 65061 - DNA, 25 bp, Probe sequence
attgaaaccactaactagcatctga

SEQ ID NO: 65062 - DNA, 25 bp, Probe sequence
ttgaaaccactaactagcatctgac

SEQ ID NO: 65063 - DNA, 25 bp, Probe sequence
gaaaccactaactagcatctgactc

SEQ ID NO: 65064 - DNA, 25 bp, Probe sequence
tgaaaccactaactagcatctgact

SEQ ID NO: 65065 - DNA, 25 bp, Probe sequence
tattgaaaccactaactagcatctg

SEQ ID NO: 65066 - DNA, 25 bp, Probe sequence
ttattgaaaccactaactagcatct

SEQ ID NO: 65067 - DNA, 25 bp, Probe sequence
accactaactagcatctgactcgat

SEQ ID NO: 65068 - DNA, 25 bp, Probe sequence
aaaccactaactagcatctgactcg

SEQ ID NO: 65069 - DNA, 25 bp, Probe sequence
aaccactaactagcatctgactcga

SEQ ID NO: 65070 - DNA, 25 bp, Probe sequence
tcagatgctagttagtggtttcaat

SEQ ID NO: 65071 - DNA, 25 bp, Probe sequence
gtcagatgctagttagtggtttcaa

SEQ ID NO: 65072 - DNA, 25 bp, Probe sequence
gagtcagatgctagttagtggtttc

SEQ ID NO: 65073 - DNA, 25 bp, Probe sequence
cagatgctagttagtggtttcaata

SEQ ID NO: 65074 - DNA, 25 bp, Probe sequence
agtcagatgctagttagtggtttca

SEQ ID NO: 65075 - DNA, 25 bp, Probe sequence
agatgctagttagtggtttcaataa

SEQ ID NO: 65076 - DNA, 25 bp, Probe sequence
atcgagtcagatgctagttagtggt

SEQ ID NO: 65077 - DNA, 25 bp, Probe sequence
cgagtcagatgctagttagtggttt

SEQ ID NO: 65078 - DNA, 25 bp, Probe sequence
tcgagtcagatgctagttagtggtt

SEQ ID NO: 65079 - DNA, 25 bp, Probe sequence
agtgatgctcttgagaattgaatta

SEQ ID NO: 65080 - DNA, 25 bp, Probe sequence
tagtgatgctcttgagaattgaatt

SEQ ID NO: 65081 - DNA, 25 bp, Probe sequence
atagtgatgctcttgagaattgaat

SEQ ID NO: 65082 - DNA, 25 bp, Probe sequence
gtgatgctcttgagaattgaattaa

SEQ ID NO: 65083 - DNA, 25 bp, Probe sequence
tatagtgatgctcttgagaattgaa

SEQ ID NO: 65084 - DNA, 25 bp, Probe sequence
atatagtgatgctcttgagaattga

SEQ ID NO: 65085 - DNA, 25 bp, Probe sequence
catatagtgatgctcttgagaattg

SEQ ID NO: 65086 - DNA, 25 bp, Probe sequence
tcatatagtgatgctcttgagaatt

SEQ ID NO: 65087 - DNA, 25 bp, Probe sequence
cagcgaaatgtgtggttaatcatat

SEQ ID NO: 65088 - DNA, 25 bp, Probe sequence
aattcaattctcaagagcatcacta

SEQ ID NO: 65089 - DNA, 25 bp, Probe sequence
taattcaattctcaagagcatcact

SEQ ID NO: 65090 - DNA, 25 bp, Probe sequence
attcaattctcaagagcatcactat

SEQ ID NO: 65091 - DNA, 25 bp, Probe sequence
ttaattcaattctcaagagcatcac

SEQ ID NO: 65092 - DNA, 25 bp, Probe sequence
ttcaattctcaagagcatcactata

SEQ ID NO: 65093 - DNA, 25 bp, Probe sequence
tcaattctcaagagcatcactatat

SEQ ID NO: 65094 - DNA, 25 bp, Probe sequence
caattctcaagagcatcactatatg

SEQ ID NO: 65095 - DNA, 25 bp, Probe sequence
aattctcaagagcatcactatatga

SEQ ID NO: 65096 - DNA, 25 bp, Probe sequence
atatgattaaccacacatttcgctg

SEQ ID NO: 65097 - DNA, 25 bp, Probe sequence
actaaatgaattggaagtgtgaaca

SEQ ID NO: 65098 - DNA, 25 bp, Probe sequence
taaatgaattggaagtgtgaacaac

SEQ ID NO: 65099 - DNA, 25 bp, Probe sequence
ctaaatgaattggaagtgtgaacaa

SEQ ID NO: 65100 - DNA, 25 bp, Probe sequence
aactaaatgaattggaagtgtgaac

SEQ ID NO: 65101 - DNA, 25 bp, Probe sequence
taactaaatgaattggaagtgtgaa

SEQ ID NO: 65102 - DNA, 25 bp, Probe sequence
ataactaaatgaattggaagtgtga

SEQ ID NO: 65103 - DNA, 25 bp, Probe sequence
aataactaaatgaattggaagtgtg

SEQ ID NO: 65104 - DNA, 25 bp, Probe sequence
aaataactaaatgaattggaagtgt

SEQ ID NO: 65105 - DNA, 25 bp, Probe sequence
tgttcacacttccaattcatttagt

SEQ ID NO: 65106 - DNA, 25 bp, Probe sequence
gttgttcacacttccaattcattta

SEQ ID NO: 65107 - DNA, 25 bp, Probe sequence
ttgttcacacttccaattcatttag

SEQ ID NO: 65108 - DNA, 25 bp, Probe sequence
gttcacacttccaattcatttagtt

SEQ ID NO: 65109 - DNA, 25 bp, Probe sequence
ttcacacttccaattcatttagtta

SEQ ID NO: 65110 - DNA, 25 bp, Probe sequence
tcacacttccaattcatttagttat

SEQ ID NO: 65111 - DNA, 25 bp, Probe sequence
cacacttccaattcatttagttatt

SEQ ID NO: 65112 - DNA, 25 bp, Probe sequence
acacttccaattcatttagttattt

SEQ ID NO: 65113 - DNA, 25 bp, Probe sequence
ggtttatcatggtttacaatcctaa

SEQ ID NO: 65114 - DNA, 25 bp, Probe sequence
ttaggtttatcatggtttacaatcc

SEQ ID NO: 65115 - DNA, 25 bp, Probe sequence
aggtttatcatggtttacaatccta

SEQ ID NO: 65116 - DNA, 25 bp, Probe sequence
taggtttatcatggtttacaatcct

SEQ ID NO: 65117 - DNA, 25 bp, Probe sequence
tttaggtttatcatggtttacaatc

SEQ ID NO: 65118 - DNA, 25 bp, Probe sequence
gtttatcatggtttacaatcctaaa

SEQ ID NO: 65119 - DNA, 25 bp, Probe sequence
tggtttacaatcctaaaatactgtt

SEQ ID NO: 65120 - DNA, 25 bp, Probe sequence
acagtattttaggtttatcatggtt

SEQ ID NO: 65121 - DNA, 25 bp, Probe sequence
atggtttacaatcctaaaatactgt

SEQ ID NO: 65122 - DNA, 25 bp, Probe sequence
ggattgtaaaccatgataaacctaa

SEQ ID NO: 65123 - DNA, 25 bp, Probe sequence
ttaggattgtaaaccatgataaacc

SEQ ID NO: 65124 - DNA, 25 bp, Probe sequence
aggattgtaaaccatgataaaccta

SEQ ID NO: 65125 - DNA, 25 bp, Probe sequence
taggattgtaaaccatgataaacct

SEQ ID NO: 65126 - DNA, 25 bp, Probe sequence
gattgtaaaccatgataaacctaaa

SEQ ID NO: 65127 - DNA, 25 bp, Probe sequence
tttaggattgtaaaccatgataaac

SEQ ID NO: 65128 - DNA, 25 bp, Probe sequence
aacagtattttaggattgtaaacca

SEQ ID NO: 65129 - DNA, 25 bp, Probe sequence
aaccatgataaacctaaaatactgt

SEQ ID NO: 65130 - DNA, 25 bp, Probe sequence
acagtattttaggattgtaaaccat

SEQ ID NO: 65131 - DNA, 25 bp, Probe sequence
atcttgacaacttgttcttagaaag

SEQ ID NO: 65132 - DNA, 25 bp, Probe sequence
aattttgtgcttgttagaggtgaag

SEQ ID NO: 65133 - DNA, 25 bp, Probe sequence
aatcttgacaacttgttcttagaaa

SEQ ID NO: 65134 - DNA, 25 bp, Probe sequence
aaatcttgacaacttgttcttagaa

SEQ ID NO: 65135 - DNA, 25 bp, Probe sequence
tcttgacaacttgttcttagaaagt

SEQ ID NO: 65136 - DNA, 25 bp, Probe sequence
aaattttgtgcttgttagaggtgaa

SEQ ID NO: 65137 - DNA, 25 bp, Probe sequence
taaattttgtgcttgttagaggtga

SEQ ID NO: 65138 - DNA, 25 bp, Probe sequence
ataaattttgtgcttgttagaggtg

SEQ ID NO: 65139 - DNA, 25 bp, Probe sequence
aataaattttgtgcttgttagaggt

SEQ ID NO: 65140 - DNA, 25 bp, Probe sequence
ctttctaagaacaagttgtcaagat

SEQ ID NO: 65141 - DNA, 25 bp, Probe sequence
cttcacctctaacaagcacaaaatt

SEQ ID NO: 65142 - DNA, 25 bp, Probe sequence
ttctaagaacaagttgtcaagattt

SEQ ID NO: 65143 - DNA, 25 bp, Probe sequence
tttctaagaacaagttgtcaagatt

SEQ ID NO: 65144 - DNA, 25 bp, Probe sequence
actttctaagaacaagttgtcaaga

SEQ ID NO: 65145 - DNA, 25 bp, Probe sequence
ttcacctctaacaagcacaaaattt

SEQ ID NO: 65146 - DNA, 25 bp, Probe sequence
tcacctctaacaagcacaaaattta

SEQ ID NO: 65147 - DNA, 25 bp, Probe sequence
cacctctaacaagcacaaaatttat

SEQ ID NO: 65148 - DNA, 25 bp, Probe sequence
acctctaacaagcacaaaatttatt

SEQ ID NO: 65149 - DNA, 25 bp, Probe sequence
tttcgtttataatctaaggaggata

SEQ ID NO: 65150 - DNA, 25 bp, Probe sequence
ttttcgtttataatctaaggaggat

SEQ ID NO: 65151 - DNA, 25 bp, Probe sequence
tatcctccttagattataaacgaaa

SEQ ID NO: 65152 - DNA, 25 bp, Probe sequence
atcctccttagattataaacgaaaa

SEQ ID NO: 65153 - DNA, 25 bp, Probe sequence
aaataattggcgaacgaggtaactg

SEQ ID NO: 65154 - DNA, 25 bp, Probe sequence
aataattggcgaacgaggtaactgg

SEQ ID NO: 65155 - DNA, 25 bp, Probe sequence
aattggcgaacgaggtaactggata

SEQ ID NO: 65156 - DNA, 25 bp, Probe sequence
taattggcgaacgaggtaactggat

SEQ ID NO: 65157 - DNA, 25 bp, Probe sequence
ataattggcgaacgaggtaactgga

SEQ ID NO: 65158 - DNA, 25 bp, Probe sequence
gatacctcatccgccaattaaaatt

SEQ ID NO: 65159 - DNA, 25 bp, Probe sequence
aaagtcccgcttaaaatgattgttt

SEQ ID NO: 65160 - DNA, 25 bp, Probe sequence
aaaagtcccgcttaaaatgattgtt

SEQ ID NO: 65161 - DNA, 25 bp, Probe sequence
aaaataattggcgaacgaggtaact

SEQ ID NO: 65162 - DNA, 25 bp, Probe sequence
cagttacctcgttcgccaattattt

SEQ ID NO: 65163 - DNA, 25 bp, Probe sequence
ccagttacctcgttcgccaattatt

SEQ ID NO: 65164 - DNA, 25 bp, Probe sequence
tccagttacctcgttcgccaattat

SEQ ID NO: 65165 - DNA, 25 bp, Probe sequence
atccagttacctcgttcgccaatta

SEQ ID NO: 65166 - DNA, 25 bp, Probe sequence
tatccagttacctcgttcgccaatt

SEQ ID NO: 65167 - DNA, 25 bp, Probe sequence
aacaatcattttaagcgggactttt

SEQ ID NO: 65168 - DNA, 25 bp, Probe sequence
aaacaatcattttaagcgggacttt

SEQ ID NO: 65169 - DNA, 25 bp, Probe sequence
aattttaattggcggatgaggtatc

SEQ ID NO: 65170 - DNA, 25 bp, Probe sequence
agttacctcgttcgccaattatttt

SEQ ID NO: 65171 - DNA, 25 bp, Probe sequence
attaagttatgagtgtgacgatgat

SEQ ID NO: 65172 - DNA, 25 bp, Probe sequence
tattaagttatgagtgtgacgatga

SEQ ID NO: 65173 - DNA, 25 bp, Probe sequence
atattaagttatgagtgtgacgatg

SEQ ID NO: 65174 - DNA, 25 bp, Probe sequence
gtacattgaaatggtagttaattgc

SEQ ID NO: 65175 - DNA, 25 bp, Probe sequence
tatattaagttatgagtgtgacgat

SEQ ID NO: 65176 - DNA, 25 bp, Probe sequence
atatattaagttatgagtgtgacga

SEQ ID NO: 65177 - DNA, 25 bp, Probe sequence
tacattgaaatggtagttaattgca

SEQ ID NO: 65178 - DNA, 25 bp, Probe sequence
ttgaaatggtagttaattgcaacat

SEQ ID NO: 65179 - DNA, 25 bp, Probe sequence
attgaaatggtagttaattgcaaca

SEQ ID NO: 65180 - DNA, 25 bp, Probe sequence
atcatcgtcacactcataacttaat

SEQ ID NO: 65181 - DNA, 25 bp, Probe sequence
tcatcgtcacactcataacttaata

SEQ ID NO: 65182 - DNA, 25 bp, Probe sequence
catcgtcacactcataacttaatat

SEQ ID NO: 65183 - DNA, 25 bp, Probe sequence
gcaattaactaccatttcaatgtac

SEQ ID NO: 65184 - DNA, 25 bp, Probe sequence
atcgtcacactcataacttaatata

SEQ ID NO: 65185 - DNA, 25 bp, Probe sequence
tcgtcacactcataacttaatatat

SEQ ID NO: 65186 - DNA, 25 bp, Probe sequence
tgcaattaactaccatttcaatgta

SEQ ID NO: 65187 - DNA, 25 bp, Probe sequence
ttgcaattaactaccatttcaatgt

SEQ ID NO: 65188 - DNA, 25 bp, Probe sequence
tgttgcaattaactaccatttcaat

SEQ ID NO: 65189 - DNA, 25 bp, Probe sequence
agcacatctatttccgtataacaat

SEQ ID NO: 65190 - DNA, 25 bp, Probe sequence
tagcacatctatttccgtataacaa

SEQ ID NO: 65191 - DNA, 25 bp, Probe sequence
ctagcacatctatttccgtataaca

SEQ ID NO: 65192 - DNA, 25 bp, Probe sequence
actagcacatctatttccgtataac

SEQ ID NO: 65193 - DNA, 25 bp, Probe sequence
tggttatcaattatactagcacatc

SEQ ID NO: 65194 - DNA, 25 bp, Probe sequence
ggttatcaattatactagcacatct

SEQ ID NO: 65195 - DNA, 25 bp, Probe sequence
attatactagcacatctatttccgt

SEQ ID NO: 65196 - DNA, 25 bp, Probe sequence
aatggttatcaattatactagcaca

SEQ ID NO: 65197 - DNA, 25 bp, Probe sequence
gcacatctatttccgtataacaata

SEQ ID NO: 65198 - DNA, 25 bp, Probe sequence
attgttatacggaaatagatgtgct

SEQ ID NO: 65199 - DNA, 25 bp, Probe sequence
ttgttatacggaaatagatgtgcta

SEQ ID NO: 65200 - DNA, 25 bp, Probe sequence
gttatacggaaatagatgtgctagt

SEQ ID NO: 65201 - DNA, 25 bp, Probe sequence
tgttatacggaaatagatgtgctag

SEQ ID NO: 65202 - DNA, 25 bp, Probe sequence
gatgtgctagtataattgataacca

SEQ ID NO: 65203 - DNA, 25 bp, Probe sequence
agatgtgctagtataattgataacc

SEQ ID NO: 65204 - DNA, 25 bp, Probe sequence
acggaaatagatgtgctagtataat

SEQ ID NO: 65205 - DNA, 25 bp, Probe sequence
tgtgctagtataattgataaccatt

SEQ ID NO: 65206 - DNA, 25 bp, Probe sequence
tattgttatacggaaatagatgtgc

SEQ ID NO: 65207 - DNA, 25 bp, Probe sequence
actggtttagtgatgactgaagaaa

SEQ ID NO: 65208 - DNA, 25 bp, Probe sequence
aactggtttagtgatgactgaagaa

SEQ ID NO: 65209 - DNA, 25 bp, Probe sequence
tacaacaactggtttagtgatgact

SEQ ID NO: 65210 - DNA, 25 bp, Probe sequence
aacaactggtttagtgatgactgaa

SEQ ID NO: 65211 - DNA, 25 bp, Probe sequence
caactggtttagtgatgactgaaga

SEQ ID NO: 65212 - DNA, 25 bp, Probe sequence
acaactggtttagtgatgactgaag

SEQ ID NO: 65213 - DNA, 25 bp, Probe sequence
caacaactggtttagtgatgactga

SEQ ID NO: 65214 - DNA, 25 bp, Probe sequence
acaacaactggtttagtgatgactg

SEQ ID NO: 65215 - DNA, 25 bp, Probe sequence
gtacaacaactggtttagtgatgac

SEQ ID NO: 65216 - DNA, 25 bp, Probe sequence
agtcatcactaaaccagttgttgta

SEQ ID NO: 65217 - DNA, 25 bp, Probe sequence
ttcttcagtcatcactaaaccagtt

SEQ ID NO: 65218 - DNA, 25 bp, Probe sequence
tttcttcagtcatcactaaaccagt

SEQ ID NO: 65219 - DNA, 25 bp, Probe sequence
ttcagtcatcactaaaccagttgtt

SEQ ID NO: 65220 - DNA, 25 bp, Probe sequence
tcttcagtcatcactaaaccagttg

SEQ ID NO: 65221 - DNA, 25 bp, Probe sequence
cttcagtcatcactaaaccagttgt

SEQ ID NO: 65222 - DNA, 25 bp, Probe sequence
tcagtcatcactaaaccagttgttg

SEQ ID NO: 65223 - DNA, 25 bp, Probe sequence
cagtcatcactaaaccagttgttgt

SEQ ID NO: 65224 - DNA, 25 bp, Probe sequence
gtcatcactaaaccagttgttgtac

SEQ ID NO: 65225 - DNA, 25 bp, Probe sequence
gggcgtatgatttatagtagtagta

SEQ ID NO: 65226 - DNA, 25 bp, Probe sequence
tttggggcgtatgatttatagtagt

SEQ ID NO: 65227 - DNA, 25 bp, Probe sequence
ggggcgtatgatttatagtagtagt

SEQ ID NO: 65228 - DNA, 25 bp, Probe sequence
tggggcgtatgatttatagtagtag

SEQ ID NO: 65229 - DNA, 25 bp, Probe sequence
aatgatattttggggcgtatgattt

SEQ ID NO: 65230 - DNA, 25 bp, Probe sequence
ttggggcgtatgatttatagtagta

SEQ ID NO: 65231 - DNA, 25 bp, Probe sequence
ttttggggcgtatgatttatagtag

SEQ ID NO: 65232 - DNA, 25 bp, Probe sequence
tgatattttggggcgtatgatttat

SEQ ID NO: 65233 - DNA, 25 bp, Probe sequence
atgatattttggggcgtatgattta

SEQ ID NO: 65234 - DNA, 25 bp, Probe sequence
tactactactataaatcatacgccc

SEQ ID NO: 65235 - DNA, 25 bp, Probe sequence
actactataaatcatacgccccaaa

SEQ ID NO: 65236 - DNA, 25 bp, Probe sequence
aaatcatacgccccaaaatatcatt

SEQ ID NO: 65237 - DNA, 25 bp, Probe sequence
ctactactataaatcatacgcccca

SEQ ID NO: 65238 - DNA, 25 bp, Probe sequence
actactactataaatcatacgcccc

SEQ ID NO: 65239 - DNA, 25 bp, Probe sequence
tactactataaatcatacgccccaa

SEQ ID NO: 65240 - DNA, 25 bp, Probe sequence
ctactataaatcatacgccccaaaa

SEQ ID NO: 65241 - DNA, 25 bp, Probe sequence
aatcatacgccccaaaatatcatta

SEQ ID NO: 65242 - DNA, 25 bp, Probe sequence
taaatcatacgccccaaaatatcat

SEQ ID NO: 65243 - DNA, 25 bp, Probe sequence
cgtgactgcaagttattccaattat

SEQ ID NO: 65244 - DNA, 25 bp, Probe sequence
ataatcgtgactgcaagttattcca

SEQ ID NO: 65245 - DNA, 25 bp, Probe sequence
gagaataatcgtgactgcaagttat

SEQ ID NO: 65246 - DNA, 25 bp, Probe sequence
tcgtgactgcaagttattccaatta

SEQ ID NO: 65247 - DNA, 25 bp, Probe sequence
taatcgtgactgcaagttattccaa

SEQ ID NO: 65248 - DNA, 25 bp, Probe sequence
ggagaataatcgtgactgcaagtta

SEQ ID NO: 65249 - DNA, 25 bp, Probe sequence
atcgtgactgcaagttattccaatt

SEQ ID NO: 65250 - DNA, 25 bp, Probe sequence
aatcgtgactgcaagttattccaat

SEQ ID NO: 65251 - DNA, 25 bp, Probe sequence
gtgactgcaagttattccaattatt

SEQ ID NO: 65252 - DNA, 25 bp, Probe sequence
ataattggaataacttgcagtcacg

SEQ ID NO: 65253 - DNA, 25 bp, Probe sequence
tggaataacttgcagtcacgattat

SEQ ID NO: 65254 - DNA, 25 bp, Probe sequence
ataacttgcagtcacgattattctc

SEQ ID NO: 65255 - DNA, 25 bp, Probe sequence
ttggaataacttgcagtcacgatta

SEQ ID NO: 65256 - DNA, 25 bp, Probe sequence
taattggaataacttgcagtcacga

SEQ ID NO: 65257 - DNA, 25 bp, Probe sequence
taacttgcagtcacgattattctcc

SEQ ID NO: 65258 - DNA, 25 bp, Probe sequence
attggaataacttgcagtcacgatt

SEQ ID NO: 65259 - DNA, 25 bp, Probe sequence
aattggaataacttgcagtcacgat

SEQ ID NO: 65260 - DNA, 25 bp, Probe sequence
aataattggaataacttgcagtcac

SEQ ID NO: 65261 - DNA, 25 bp, Probe sequence
gaatacagatgatgcttctcacaac

SEQ ID NO: 65262 - DNA, 25 bp, Probe sequence
aatacagatgatgcttctcacaact

SEQ ID NO: 65263 - DNA, 25 bp, Probe sequence
ggaatacagatgatgcttctcacaa

SEQ ID NO: 65264 - DNA, 25 bp, Probe sequence
cacagtggattacagatgatgcttc

SEQ ID NO: 65265 - DNA, 25 bp, Probe sequence
atagaggcacagtggattacagatg

SEQ ID NO: 65266 - DNA, 25 bp, Probe sequence
catagaggcacagtggattacagat

SEQ ID NO: 65267 - DNA, 25 bp, Probe sequence
atcatagaggcacagtggattacag

SEQ ID NO: 65268 - DNA, 25 bp, Probe sequence
atacagatgatgcttctcacaactg

SEQ ID NO: 65269 - DNA, 25 bp, Probe sequence
taaatcaaagaggaacagcggaata

SEQ ID NO: 65270 - DNA, 25 bp, Probe sequence
gttgtgagaagcatcatctgtattc

SEQ ID NO: 65271 - DNA, 25 bp, Probe sequence
agttgtgagaagcatcatctgtatt

SEQ ID NO: 65272 - DNA, 25 bp, Probe sequence
ttgtgagaagcatcatctgtattcc

SEQ ID NO: 65273 - DNA, 25 bp, Probe sequence
gaagcatcatctgtaatccactgtg

SEQ ID NO: 65274 - DNA, 25 bp, Probe sequence
atctgtaatccactgtgcctctatg

SEQ ID NO: 65275 - DNA, 25 bp, Probe sequence
catctgtaatccactgtgcctctat

SEQ ID NO: 65276 - DNA, 25 bp, Probe sequence
ctgtaatccactgtgcctctatgat

SEQ ID NO: 65277 - DNA, 25 bp, Probe sequence
cagttgtgagaagcatcatctgtat

SEQ ID NO: 65278 - DNA, 25 bp, Probe sequence
ttccgctgttcctctttgatttata

SEQ ID NO: 65279 - DNA, 25 bp, Probe sequence
caaattcagacaaactatccagtca

SEQ ID NO: 65280 - DNA, 25 bp, Probe sequence
atcaaattcagacaaactatccagt

SEQ ID NO: 65281 - DNA, 25 bp, Probe sequence
tcaaattcagacaaactatccagtc

SEQ ID NO: 65282 - DNA, 25 bp, Probe sequence
aaattcagacaaactatccagtcat

SEQ ID NO: 65283 - DNA, 25 bp, Probe sequence
gtatcaaattcagacaaactatcca

SEQ ID NO: 65284 - DNA, 25 bp, Probe sequence
tcagacaaactatccagtcatattt

SEQ ID NO: 65285 - DNA, 25 bp, Probe sequence
ttcagacaaactatccagtcatatt

SEQ ID NO: 65286 - DNA, 25 bp, Probe sequence
aattcagacaaactatccagtcata

SEQ ID NO: 65287 - DNA, 25 bp, Probe sequence
tatcaaattcagacaaactatccag

SEQ ID NO: 65288 - DNA, 25 bp, Probe sequence
tgactggatagtttgtctgaatttg

SEQ ID NO: 65289 - DNA, 25 bp, Probe sequence
actggatagtttgtctgaatttgat

SEQ ID NO: 65290 - DNA, 25 bp, Probe sequence
gactggatagtttgtctgaatttga

SEQ ID NO: 65291 - DNA, 25 bp, Probe sequence
atgactggatagtttgtctgaattt

SEQ ID NO: 65292 - DNA, 25 bp, Probe sequence
tggatagtttgtctgaatttgatac

SEQ ID NO: 65293 - DNA, 25 bp, Probe sequence
tatgactggatagtttgtctgaatt

SEQ ID NO: 65294 - DNA, 25 bp, Probe sequence
aatatgactggatagtttgtctgaa

SEQ ID NO: 65295 - DNA, 25 bp, Probe sequence
aaatatgactggatagtttgtctga

SEQ ID NO: 65296 - DNA, 25 bp, Probe sequence
ctggatagtttgtctgaatttgata

SEQ ID NO: 65297 - DNA, 25 bp, Probe sequence
attaatgatacgtcctggtcttctt

SEQ ID NO: 65298 - DNA, 25 bp, Probe sequence
ttatcataagaggtcaggacaaagg

SEQ ID NO: 65299 - DNA, 25 bp, Probe sequence
tattaatgatacgtcctggtcttct

SEQ ID NO: 65300 - DNA, 25 bp, Probe sequence
tcataagaggtcaggacaaaggtat

SEQ ID NO: 65301 - DNA, 25 bp, Probe sequence
atcataagaggtcaggacaaaggta

SEQ ID NO: 65302 - DNA, 25 bp, Probe sequence
tatcataagaggtcaggacaaaggt

SEQ ID NO: 65303 - DNA, 25 bp, Probe sequence
cataagaggtcaggacaaaggtata

SEQ ID NO: 65304 - DNA, 25 bp, Probe sequence
ataagaggtcaggacaaaggtatat

SEQ ID NO: 65305 - DNA, 25 bp, Probe sequence
atattaatgatacgtcctggtcttc

SEQ ID NO: 65306 - DNA, 25 bp, Probe sequence
aagaagaccaggacgtatcattaat

SEQ ID NO: 65307 - DNA, 25 bp, Probe sequence
cctttgtcctgacctcttatgataa

SEQ ID NO: 65308 - DNA, 25 bp, Probe sequence
acctttgtcctgacctcttatgata

SEQ ID NO: 65309 - DNA, 25 bp, Probe sequence
tacctttgtcctgacctcttatgat

SEQ ID NO: 65310 - DNA, 25 bp, Probe sequence
atacctttgtcctgacctcttatga

SEQ ID NO: 65311 - DNA, 25 bp, Probe sequence
agaagaccaggacgtatcattaata

SEQ ID NO: 65312 - DNA, 25 bp, Probe sequence
tatacctttgtcctgacctcttatg

SEQ ID NO: 65313 - DNA, 25 bp, Probe sequence
atatacctttgtcctgacctcttat

SEQ ID NO: 65314 - DNA, 25 bp, Probe sequence
gaagaccaggacgtatcattaatat

SEQ ID NO: 65315 - DNA, 25 bp, Probe sequence
aagcaacaagaatacatttcaaaca

SEQ ID NO: 65316 - DNA, 25 bp, Probe sequence
agcaacaagaatacatttcaaacat

SEQ ID NO: 65317 - DNA, 25 bp, Probe sequence
tgagcaaatagaaatacatgaagca

SEQ ID NO: 65318 - DNA, 25 bp, Probe sequence
ttgagcaaatagaaatacatgaagc

SEQ ID NO: 65319 - DNA, 25 bp, Probe sequence
aaagcaacaagaatacatttcaaac

SEQ ID NO: 65320 - DNA, 25 bp, Probe sequence
gcaacaagaatacatttcaaacatg

SEQ ID NO: 65321 - DNA, 25 bp, Probe sequence
gagcaaatagaaatacatgaagcat

SEQ ID NO: 65322 - DNA, 25 bp, Probe sequence
ataataattaaggaggattggcatt

SEQ ID NO: 65323 - DNA, 25 bp, Probe sequence
aataataattaaggaggattggcat

SEQ ID NO: 65324 - DNA, 25 bp, Probe sequence
tgtttgaaatgtattcttgttgctt

SEQ ID NO: 65325 - DNA, 25 bp, Probe sequence
atgtttgaaatgtattcttgttgct

SEQ ID NO: 65326 - DNA, 25 bp, Probe sequence
tgcttcatgtatttctatttgctca

SEQ ID NO: 65327 - DNA, 25 bp, Probe sequence
gtttgaaatgtattcttgttgcttt

SEQ ID NO: 65328 - DNA, 25 bp, Probe sequence
gcttcatgtatttctatttgctcaa

SEQ ID NO: 65329 - DNA, 25 bp, Probe sequence
catgtttgaaatgtattcttgttgc

SEQ ID NO: 65330 - DNA, 25 bp, Probe sequence
atgcttcatgtatttctatttgctc

SEQ ID NO: 65331 - DNA, 25 bp, Probe sequence
atgccaatcctccttaattattatt

SEQ ID NO: 65332 - DNA, 25 bp, Probe sequence
aatgccaatcctccttaattattat

SEQ ID NO: 65333 - DNA, 25 bp, Probe sequence
tttctttaatgaattgctccagttt

SEQ ID NO: 65334 - DNA, 25 bp, Probe sequence
atttctttaatgaattgctccagtt

SEQ ID NO: 65335 - DNA, 25 bp, Probe sequence
catttctttaatgaattgctccagt

SEQ ID NO: 65336 - DNA, 25 bp, Probe sequence
gcatttctttaatgaattgctccag

SEQ ID NO: 65337 - DNA, 25 bp, Probe sequence
ggcatttctttaatgaattgctcca

SEQ ID NO: 65338 - DNA, 25 bp, Probe sequence
gggcatttctttaatgaattgctcc

SEQ ID NO: 65339 - DNA, 25 bp, Probe sequence
ttctttaatgaattgctccagtttt

SEQ ID NO: 65340 - DNA, 25 bp, Probe sequence
atgacgactggggcatttctttaat

SEQ ID NO: 65341 - DNA, 25 bp, Probe sequence
actggggcatttctttaatgaattg

SEQ ID NO: 65342 - DNA, 25 bp, Probe sequence
aaactggagcaattcattaaagaaa

SEQ ID NO: 65343 - DNA, 25 bp, Probe sequence
aactggagcaattcattaaagaaat

SEQ ID NO: 65344 - DNA, 25 bp, Probe sequence
actggagcaattcattaaagaaatg

SEQ ID NO: 65345 - DNA, 25 bp, Probe sequence
ctggagcaattcattaaagaaatgc

SEQ ID NO: 65346 - DNA, 25 bp, Probe sequence
tggagcaattcattaaagaaatgcc

SEQ ID NO: 65347 - DNA, 25 bp, Probe sequence
ggagcaattcattaaagaaatgccc

SEQ ID NO: 65348 - DNA, 25 bp, Probe sequence
aaaactggagcaattcattaaagaa

SEQ ID NO: 65349 - DNA, 25 bp, Probe sequence
attaaagaaatgccccagtcgtcat

SEQ ID NO: 65350 - DNA, 25 bp, Probe sequence
aattcattaaagaaatgccccagtc

SEQ ID NO: 65351 - DNA, 25 bp, Probe sequence
tcgaagatgttgattatgagctaga

SEQ ID NO: 65352 - DNA, 25 bp, Probe sequence
cgaagatgttgattatgagctagaa

SEQ ID NO: 65353 - DNA, 25 bp, Probe sequence
tgatagatttgtagcagttggtttg

SEQ ID NO: 65354 - DNA, 25 bp, Probe sequence
gatagatttgtagcagttggtttga

SEQ ID NO: 65355 - DNA, 25 bp, Probe sequence
actcgaagatgttgattatgagcta

SEQ ID NO: 65356 - DNA, 25 bp, Probe sequence
tactcgaagatgttgattatgagct

SEQ ID NO: 65357 - DNA, 25 bp, Probe sequence
agatttgtagcagttggtttgataa

SEQ ID NO: 65358 - DNA, 25 bp, Probe sequence
tgattatgagctagaattagtggtg

SEQ ID NO: 65359 - DNA, 25 bp, Probe sequence
ctcgaagatgttgattatgagctag

SEQ ID NO: 65360 - DNA, 25 bp, Probe sequence
tctagctcataatcaacatcttcga

SEQ ID NO: 65361 - DNA, 25 bp, Probe sequence
ttctagctcataatcaacatcttcg

SEQ ID NO: 65362 - DNA, 25 bp, Probe sequence
caaaccaactgctacaaatctatca

SEQ ID NO: 65363 - DNA, 25 bp, Probe sequence
tcaaaccaactgctacaaatctatc

SEQ ID NO: 65364 - DNA, 25 bp, Probe sequence
agctcataatcaacatcttcgagta

SEQ ID NO: 65365 - DNA, 25 bp, Probe sequence
tagctcataatcaacatcttcgagt

SEQ ID NO: 65366 - DNA, 25 bp, Probe sequence
ttatcaaaccaactgctacaaatct

SEQ ID NO: 65367 - DNA, 25 bp, Probe sequence
caccactaattctagctcataatca

SEQ ID NO: 65368 - DNA, 25 bp, Probe sequence
ctagctcataatcaacatcttcgag

SEQ ID NO: 65369 - DNA, 25 bp, Probe sequence
tcgcttaatgataatgacaacgcta

SEQ ID NO: 65370 - DNA, 25 bp, Probe sequence
cgcttaatgataatgacaacgctag

SEQ ID NO: 65371 - DNA, 25 bp, Probe sequence
gcttaatgataatgacaacgctaga

SEQ ID NO: 65372 - DNA, 25 bp, Probe sequence
ttcgcttaatgataatgacaacgct

SEQ ID NO: 65373 - DNA, 25 bp, Probe sequence
tttcgcttaatgataatgacaacgc

SEQ ID NO: 65374 - DNA, 25 bp, Probe sequence
cttaatgataatgacaacgctagaa

SEQ ID NO: 65375 - DNA, 25 bp, Probe sequence
aatgataatgacaacgctagaaacg

SEQ ID NO: 65376 - DNA, 25 bp, Probe sequence
gtttcgcttaatgataatgacaacg

SEQ ID NO: 65377 - DNA, 25 bp, Probe sequence
tgataatgacaacgctagaaacgat

SEQ ID NO: 65378 - DNA, 25 bp, Probe sequence
tagcgttgtcattatcattaagcga

SEQ ID NO: 65379 - DNA, 25 bp, Probe sequence
ctagcgttgtcattatcattaagcg

SEQ ID NO: 65380 - DNA, 25 bp, Probe sequence
tctagcgttgtcattatcattaagc

SEQ ID NO: 65381 - DNA, 25 bp, Probe sequence
agcgttgtcattatcattaagcgaa

SEQ ID NO: 65382 - DNA, 25 bp, Probe sequence
gcgttgtcattatcattaagcgaaa

SEQ ID NO: 65383 - DNA, 25 bp, Probe sequence
ttctagcgttgtcattatcattaag

SEQ ID NO: 65384 - DNA, 25 bp, Probe sequence
cgttgtcattatcattaagcgaaac

SEQ ID NO: 65385 - DNA, 25 bp, Probe sequence
cgtttctagcgttgtcattatcatt

SEQ ID NO: 65386 - DNA, 25 bp, Probe sequence
tcgtttctagcgttgtcattatcat

SEQ ID NO: 65387 - DNA, 25 bp, Probe sequence
agattgaaaatttaggggagtgaaa

SEQ ID NO: 65388 - DNA, 25 bp, Probe sequence
tagattgaaaatttaggggagtgaa

SEQ ID NO: 65389 - DNA, 25 bp, Probe sequence
tcgcatttaacaaatatagattgaa

SEQ ID NO: 65390 - DNA, 25 bp, Probe sequence
acatcgcatttaacaaatatagatt

SEQ ID NO: 65391 - DNA, 25 bp, Probe sequence
atagattgaaaatttaggggagtga

SEQ ID NO: 65392 - DNA, 25 bp, Probe sequence
catcgcatttaacaaatatagattg

SEQ ID NO: 65393 - DNA, 25 bp, Probe sequence
atcgcatttaacaaatatagattga

SEQ ID NO: 65394 - DNA, 25 bp, Probe sequence
gattgaaaatttaggggagtgaaat

SEQ ID NO: 65395 - DNA, 25 bp, Probe sequence
tatagattgaaaatttaggggagtg

SEQ ID NO: 65396 - DNA, 25 bp, Probe sequence
tttcactcccctaaattttcaatct

SEQ ID NO: 65397 - DNA, 25 bp, Probe sequence
ttcactcccctaaattttcaatcta

SEQ ID NO: 65398 - DNA, 25 bp, Probe sequence
aatctatatttgttaaatgcgatgt

SEQ ID NO: 65399 - DNA, 25 bp, Probe sequence
ttcaatctatatttgttaaatgcga

SEQ ID NO: 65400 - DNA, 25 bp, Probe sequence
tcactcccctaaattttcaatctat

SEQ ID NO: 65401 - DNA, 25 bp, Probe sequence
caatctatatttgttaaatgcgatg

SEQ ID NO: 65402 - DNA, 25 bp, Probe sequence
tcaatctatatttgttaaatgcgat

SEQ ID NO: 65403 - DNA, 25 bp, Probe sequence
atttcactcccctaaattttcaatc

SEQ ID NO: 65404 - DNA, 25 bp, Probe sequence
cactcccctaaattttcaatctata

SEQ ID NO: 65405 - DNA, 25 bp, Probe sequence
tggagatacacaataacttggaagg

SEQ ID NO: 65406 - DNA, 25 bp, Probe sequence
tgaatggagatacacaataacttgg

SEQ ID NO: 65407 - DNA, 25 bp, Probe sequence
atggagatacacaataacttggaag

SEQ ID NO: 65408 - DNA, 25 bp, Probe sequence
gaatggagatacacaataacttgga

SEQ ID NO: 65409 - DNA, 25 bp, Probe sequence
aatggagatacacaataacttggaa

SEQ ID NO: 65410 - DNA, 25 bp, Probe sequence
tgacaatatgatagtgggctgattt

SEQ ID NO: 65411 - DNA, 25 bp, Probe sequence
atgacaatatgatagtgggctgatt

SEQ ID NO: 65412 - DNA, 25 bp, Probe sequence
ttgaatggagatacacaataacttg

SEQ ID NO: 65413 - DNA, 25 bp, Probe sequence
gagatacacaataacttggaaggga

SEQ ID NO: 65414 - DNA, 25 bp, Probe sequence
ccttccaagttattgtgtatctcca

SEQ ID NO: 65415 - DNA, 25 bp, Probe sequence
ccaagttattgtgtatctccattca

SEQ ID NO: 65416 - DNA, 25 bp, Probe sequence
tccaagttattgtgtatctccattc

SEQ ID NO: 65417 - DNA, 25 bp, Probe sequence
cttccaagttattgtgtatctccat

SEQ ID NO: 65418 - DNA, 25 bp, Probe sequence
ttccaagttattgtgtatctccatt

SEQ ID NO: 65419 - DNA, 25 bp, Probe sequence
aaatcagcccactatcatattgtca

SEQ ID NO: 65420 - DNA, 25 bp, Probe sequence
aatcagcccactatcatattgtcat

SEQ ID NO: 65421 - DNA, 25 bp, Probe sequence
caagttattgtgtatctccattcaa

SEQ ID NO: 65422 - DNA, 25 bp, Probe sequence
tcccttccaagttattgtgtatctc

SEQ ID NO: 65423 - DNA, 25 bp, Probe sequence
gatttaactaggaggtcgtgtcatg

SEQ ID NO: 65424 - DNA, 25 bp, Probe sequence
tgatttaactaggaggtcgtgtcat

SEQ ID NO: 65425 - DNA, 25 bp, Probe sequence
actgatttaactaggaggtcgtgtc

SEQ ID NO: 65426 - DNA, 25 bp, Probe sequence
tagactgatttaactaggaggtcgt

SEQ ID NO: 65427 - DNA, 25 bp, Probe sequence
atagactgatttaactaggaggtcg

SEQ ID NO: 65428 - DNA, 25 bp, Probe sequence
ctgatttaactaggaggtcgtgtca

SEQ ID NO: 65429 - DNA, 25 bp, Probe sequence
agactgatttaactaggaggtcgtg

SEQ ID NO: 65430 - DNA, 25 bp, Probe sequence
gactgatttaactaggaggtcgtgt

SEQ ID NO: 65431 - DNA, 25 bp, Probe sequence
ttaactaggaggtcgtgtcatgaat

SEQ ID NO: 65432 - DNA, 25 bp, Probe sequence
catgacacgacctcctagttaaatc

SEQ ID NO: 65433 - DNA, 25 bp, Probe sequence
gacacgacctcctagttaaatcagt

SEQ ID NO: 65434 - DNA, 25 bp, Probe sequence
atgacacgacctcctagttaaatca

SEQ ID NO: 65435 - DNA, 25 bp, Probe sequence
acgacctcctagttaaatcagtcta

SEQ ID NO: 65436 - DNA, 25 bp, Probe sequence
cgacctcctagttaaatcagtctat

SEQ ID NO: 65437 - DNA, 25 bp, Probe sequence
tgacacgacctcctagttaaatcag

SEQ ID NO: 65438 - DNA, 25 bp, Probe sequence
cacgacctcctagttaaatcagtct

SEQ ID NO: 65439 - DNA, 25 bp, Probe sequence
acacgacctcctagttaaatcagtc

SEQ ID NO: 65440 - DNA, 25 bp, Probe sequence
attcatgacacgacctcctagttaa

SEQ ID NO: 65441 - DNA, 25 bp, Probe sequence
tgaaattcagaaatgtagtgacaca

SEQ ID NO: 65442 - DNA, 25 bp, Probe sequence
gaaattcagaaatgtagtgacacaa

SEQ ID NO: 65443 - DNA, 25 bp, Probe sequence
ttgaaattcagaaatgtagtgacac

SEQ ID NO: 65444 - DNA, 25 bp, Probe sequence
aaattcagaaatgtagtgacacaaa

SEQ ID NO: 65445 - DNA, 25 bp, Probe sequence
cttgaaattcagaaatgtagtgaca

SEQ ID NO: 65446 - DNA, 25 bp, Probe sequence
tcttgaaattcagaaatgtagtgac

SEQ ID NO: 65447 - DNA, 25 bp, Probe sequence
aattcagaaatgtagtgacacaaat

SEQ ID NO: 65448 - DNA, 25 bp, Probe sequence
tgatggttaaaatatggagtagcaa

SEQ ID NO: 65449 - DNA, 25 bp, Probe sequence
ttgatggttaaaatatggagtagca

SEQ ID NO: 65450 - DNA, 25 bp, Probe sequence
tgtgtcactacatttctgaatttca

SEQ ID NO: 65451 - DNA, 25 bp, Probe sequence
ttgtgtcactacatttctgaatttc

SEQ ID NO: 65452 - DNA, 25 bp, Probe sequence
gtgtcactacatttctgaatttcaa

SEQ ID NO: 65453 - DNA, 25 bp, Probe sequence
tttgtgtcactacatttctgaattt

SEQ ID NO: 65454 - DNA, 25 bp, Probe sequence
gtcactacatttctgaatttcaaga

SEQ ID NO: 65455 - DNA, 25 bp, Probe sequence
tgtcactacatttctgaatttcaag

SEQ ID NO: 65456 - DNA, 25 bp, Probe sequence
atttgtgtcactacatttctgaatt

SEQ ID NO: 65457 - DNA, 25 bp, Probe sequence
tgctactccatattttaaccatcaa

SEQ ID NO: 65458 - DNA, 25 bp, Probe sequence
ttgctactccatattttaaccatca

SEQ ID NO: 65459 - DNA, 25 bp, Probe sequence
tattgtgtttatttgaatggtgagc

SEQ ID NO: 65460 - DNA, 25 bp, Probe sequence
tttgaatggtgagcttattgggata

SEQ ID NO: 65461 - DNA, 25 bp, Probe sequence
tatttgaatggtgagcttattggga

SEQ ID NO: 65462 - DNA, 25 bp, Probe sequence
ttgtgtttatttgaatggtgagctt

SEQ ID NO: 65463 - DNA, 25 bp, Probe sequence
ttatttgaatggtgagcttattggg

SEQ ID NO: 65464 - DNA, 25 bp, Probe sequence
attgtgtttatttgaatggtgagct

SEQ ID NO: 65465 - DNA, 25 bp, Probe sequence
atttgaatggtgagcttattgggat

SEQ ID NO: 65466 - DNA, 25 bp, Probe sequence
tgtgtttatttgaatggtgagctta

SEQ ID NO: 65467 - DNA, 25 bp, Probe sequence
tgaatggtgagcttattgggataaa

SEQ ID NO: 65468 - DNA, 25 bp, Probe sequence
gctcaccattcaaataaacacaata

SEQ ID NO: 65469 - DNA, 25 bp, Probe sequence
aagctcaccattcaaataaacacaa

SEQ ID NO: 65470 - DNA, 25 bp, Probe sequence
tcccaataagctcaccattcaaata

SEQ ID NO: 65471 - DNA, 25 bp, Probe sequence
tatcccaataagctcaccattcaaa

SEQ ID NO: 65472 - DNA, 25 bp, Probe sequence
agctcaccattcaaataaacacaat

SEQ ID NO: 65473 - DNA, 25 bp, Probe sequence
cccaataagctcaccattcaaataa

SEQ ID NO: 65474 - DNA, 25 bp, Probe sequence
atcccaataagctcaccattcaaat

SEQ ID NO: 65475 - DNA, 25 bp, Probe sequence
taagctcaccattcaaataaacaca

SEQ ID NO: 65476 - DNA, 25 bp, Probe sequence
ttatcccaataagctcaccattcaa

SEQ ID NO: 65477 - DNA, 25 bp, Probe sequence
agagtaggcattgagtattattggc

SEQ ID NO: 65478 - DNA, 25 bp, Probe sequence
gagtaggcattgagtattattggca

SEQ ID NO: 65479 - DNA, 25 bp, Probe sequence
agtaggcattgagtattattggcaa

SEQ ID NO: 65480 - DNA, 25 bp, Probe sequence
cgtcactcaactatgattggataat

SEQ ID NO: 65481 - DNA, 25 bp, Probe sequence
tagagtaggcattgagtattattgg

SEQ ID NO: 65482 - DNA, 25 bp, Probe sequence
ttactaatgcgagtacactgctatt

SEQ ID NO: 65483 - DNA, 25 bp, Probe sequence
cttactaatgcgagtacactgctat

SEQ ID NO: 65484 - DNA, 25 bp, Probe sequence
gcattgagtattattggcaatcact

SEQ ID NO: 65485 - DNA, 25 bp, Probe sequence
gtaggcattgagtattattggcaat

SEQ ID NO: 65486 - DNA, 25 bp, Probe sequence
gccaataatactcaatgcctactct

SEQ ID NO: 65487 - DNA, 25 bp, Probe sequence
tgccaataatactcaatgcctactc

SEQ ID NO: 65488 - DNA, 25 bp, Probe sequence
ttgccaataatactcaatgcctact

SEQ ID NO: 65489 - DNA, 25 bp, Probe sequence
attatccaatcatagttgagtgacg

SEQ ID NO: 65490 - DNA, 25 bp, Probe sequence
ccaataatactcaatgcctactcta

SEQ ID NO: 65491 - DNA, 25 bp, Probe sequence
aatagcagtgtactcgcattagtaa

SEQ ID NO: 65492 - DNA, 25 bp, Probe sequence
atagcagtgtactcgcattagtaag

SEQ ID NO: 65493 - DNA, 25 bp, Probe sequence
agtgattgccaataatactcaatgc

SEQ ID NO: 65494 - DNA, 25 bp, Probe sequence
attgccaataatactcaatgcctac

SEQ ID NO: 65495 - DNA, 25 bp, Probe sequence
aaacgactatgctatttaatgccag

SEQ ID NO: 65496 - DNA, 25 bp, Probe sequence
cgactatgctatttaatgccaggtt

SEQ ID NO: 65497 - DNA, 25 bp, Probe sequence
aacgactatgctatttaatgccagg

SEQ ID NO: 65498 - DNA, 25 bp, Probe sequence
gactatgctatttaatgccaggtta

SEQ ID NO: 65499 - DNA, 25 bp, Probe sequence
atgctatttaatgccaggttaatgt

SEQ ID NO: 65500 - DNA, 25 bp, Probe sequence
tgctatttaatgccaggttaatgta

SEQ ID NO: 65501 - DNA, 25 bp, Probe sequence
actatgctatttaatgccaggttaa

SEQ ID NO: 65502 - DNA, 25 bp, Probe sequence
acgactatgctatttaatgccaggt

SEQ ID NO: 65503 - DNA, 25 bp, Probe sequence
tgccaggttaatgtaactttcctaa

SEQ ID NO: 65504 - DNA, 25 bp, Probe sequence
ctggcattaaatagcatagtcgttt

SEQ ID NO: 65505 - DNA, 25 bp, Probe sequence
cctggcattaaatagcatagtcgtt

SEQ ID NO: 65506 - DNA, 25 bp, Probe sequence
aacctggcattaaatagcatagtcg

SEQ ID NO: 65507 - DNA, 25 bp, Probe sequence
taacctggcattaaatagcatagtc

SEQ ID NO: 65508 - DNA, 25 bp, Probe sequence
acattaacctggcattaaatagcat

SEQ ID NO: 65509 - DNA, 25 bp, Probe sequence
tacattaacctggcattaaatagca

SEQ ID NO: 65510 - DNA, 25 bp, Probe sequence
ttaacctggcattaaatagcatagt

SEQ ID NO: 65511 - DNA, 25 bp, Probe sequence
acctggcattaaatagcatagtcgt

SEQ ID NO: 65512 - DNA, 25 bp, Probe sequence
taggaaagttacattaacctggcat

SEQ ID NO: 65513 - DNA, 25 bp, Probe sequence
tgacatttaaaagtaggggagacaa

SEQ ID NO: 65514 - DNA, 25 bp, Probe sequence
atgacatttaaaagtaggggagaca

SEQ ID NO: 65515 - DNA, 25 bp, Probe sequence
gacatttaaaagtaggggagacaaa

SEQ ID NO: 65516 - DNA, 25 bp, Probe sequence
tggtcttaacctgttttcaatttgc

SEQ ID NO: 65517 - DNA, 25 bp, Probe sequence
aatgacatttaaaagtaggggagac

SEQ ID NO: 65518 - DNA, 25 bp, Probe sequence
tgaatgacatttaaaagtaggggag

SEQ ID NO: 65519 - DNA, 25 bp, Probe sequence
gaatgacatttaaaagtaggggaga

SEQ ID NO: 65520 - DNA, 25 bp, Probe sequence
gtcttaacctgttttcaatttgcat

SEQ ID NO: 65521 - DNA, 25 bp, Probe sequence
atggtcttaacctgttttcaatttg

SEQ ID NO: 65522 - DNA, 25 bp, Probe sequence
ttgtctcccctacttttaaatgtca

SEQ ID NO: 65523 - DNA, 25 bp, Probe sequence
tgtctcccctacttttaaatgtcat

SEQ ID NO: 65524 - DNA, 25 bp, Probe sequence
tttgtctcccctacttttaaatgtc

SEQ ID NO: 65525 - DNA, 25 bp, Probe sequence
gcaaattgaaaacaggttaagacca

SEQ ID NO: 65526 - DNA, 25 bp, Probe sequence
ctcccctacttttaaatgtcattca

SEQ ID NO: 65527 - DNA, 25 bp, Probe sequence
gtctcccctacttttaaatgtcatt

SEQ ID NO: 65528 - DNA, 25 bp, Probe sequence
tctcccctacttttaaatgtcattc

SEQ ID NO: 65529 - DNA, 25 bp, Probe sequence
atgcaaattgaaaacaggttaagac

SEQ ID NO: 65530 - DNA, 25 bp, Probe sequence
caaattgaaaacaggttaagaccat

SEQ ID NO: 65531 - DNA, 25 bp, Probe sequence
ttgttcaccaccttatacttctatt

SEQ ID NO: 65532 - DNA, 25 bp, Probe sequence
aggataatcgacgtaagaagaatca

SEQ ID NO: 65533 - DNA, 25 bp, Probe sequence
ggataatcgacgtaagaagaatcat

SEQ ID NO: 65534 - DNA, 25 bp, Probe sequence
aatccgcatcatttgttgttaataa

SEQ ID NO: 65535 - DNA, 25 bp, Probe sequence
taggataatcgacgtaagaagaatc

SEQ ID NO: 65536 - DNA, 25 bp, Probe sequence
tgcacagtatagaataattaaggct

SEQ ID NO: 65537 - DNA, 25 bp, Probe sequence
atccgcatcatttgttgttaataat

SEQ ID NO: 65538 - DNA, 25 bp, Probe sequence
tgttcaccaccttatacttctattt

SEQ ID NO: 65539 - DNA, 25 bp, Probe sequence
tttgttcaccaccttatacttctat

SEQ ID NO: 65540 - DNA, 25 bp, Probe sequence
aatagaagtataaggtggtgaacaa

SEQ ID NO: 65541 - DNA, 25 bp, Probe sequence
tgattcttcttacgtcgattatcct

SEQ ID NO: 65542 - DNA, 25 bp, Probe sequence
atgattcttcttacgtcgattatcc

SEQ ID NO: 65543 - DNA, 25 bp, Probe sequence
ttattaacaacaaatgatgcggatt

SEQ ID NO: 65544 - DNA, 25 bp, Probe sequence
gattcttcttacgtcgattatccta

SEQ ID NO: 65545 - DNA, 25 bp, Probe sequence
agccttaattattctatactgtgca

SEQ ID NO: 65546 - DNA, 25 bp, Probe sequence
attattaacaacaaatgatgcggat

SEQ ID NO: 65547 - DNA, 25 bp, Probe sequence
atagaagtataaggtggtgaacaaa

SEQ ID NO: 65548 - DNA, 25 bp, Probe sequence
aaatagaagtataaggtggtgaaca

SEQ ID NO: 65549 - DNA, 25 bp, Probe sequence
tttaagtcaggaaagcaaatcaagt

SEQ ID NO: 65550 - DNA, 25 bp, Probe sequence
ttaagtcaggaaagcaaatcaagta

SEQ ID NO: 65551 - DNA, 25 bp, Probe sequence
agtcaggaaagcaaatcaagtacat

SEQ ID NO: 65552 - DNA, 25 bp, Probe sequence
caggaaagcaaatcaagtacatagt

SEQ ID NO: 65553 - DNA, 25 bp, Probe sequence
gtcaggaaagcaaatcaagtacata

SEQ ID NO: 65554 - DNA, 25 bp, Probe sequence
taagtcaggaaagcaaatcaagtac

SEQ ID NO: 65555 - DNA, 25 bp, Probe sequence
aagtcaggaaagcaaatcaagtaca

SEQ ID NO: 65556 - DNA, 25 bp, Probe sequence
tcaggaaagcaaatcaagtacatag

SEQ ID NO: 65557 - DNA, 25 bp, Probe sequence
aggaaagcaaatcaagtacatagtt

SEQ ID NO: 65558 - DNA, 25 bp, Probe sequence
acttgatttgctttcctgacttaaa

SEQ ID NO: 65559 - DNA, 25 bp, Probe sequence
tacttgatttgctttcctgacttaa

SEQ ID NO: 65560 - DNA, 25 bp, Probe sequence
atgtacttgatttgctttcctgact

SEQ ID NO: 65561 - DNA, 25 bp, Probe sequence
gtacttgatttgctttcctgactta

SEQ ID NO: 65562 - DNA, 25 bp, Probe sequence
tatgtacttgatttgctttcctgac

SEQ ID NO: 65563 - DNA, 25 bp, Probe sequence
actatgtacttgatttgctttcctg

SEQ ID NO: 65564 - DNA, 25 bp, Probe sequence
tgtacttgatttgctttcctgactt

SEQ ID NO: 65565 - DNA, 25 bp, Probe sequence
ctatgtacttgatttgctttcctga

SEQ ID NO: 65566 - DNA, 25 bp, Probe sequence
aactatgtacttgatttgctttcct

SEQ ID NO: 65567 - DNA, 25 bp, Probe sequence
catttctgaagttatcggctaaagt

SEQ ID NO: 65568 - DNA, 25 bp, Probe sequence
atttctgaagttatcggctaaagtt

SEQ ID NO: 65569 - DNA, 25 bp, Probe sequence
acatcatttctgaagttatcggcta

SEQ ID NO: 65570 - DNA, 25 bp, Probe sequence
aaacatcatttctgaagttatcggc

SEQ ID NO: 65571 - DNA, 25 bp, Probe sequence
tcatttctgaagttatcggctaaag

SEQ ID NO: 65572 - DNA, 25 bp, Probe sequence
catcatttctgaagttatcggctaa

SEQ ID NO: 65573 - DNA, 25 bp, Probe sequence
aacatcatttctgaagttatcggct

SEQ ID NO: 65574 - DNA, 25 bp, Probe sequence
tttctgaagttatcggctaaagtta

SEQ ID NO: 65575 - DNA, 25 bp, Probe sequence
ttctgaagttatcggctaaagttat

SEQ ID NO: 65576 - DNA, 25 bp, Probe sequence
actttagccgataacttcagaaatg

SEQ ID NO: 65577 - DNA, 25 bp, Probe sequence
aactttagccgataacttcagaaat

SEQ ID NO: 65578 - DNA, 25 bp, Probe sequence
tagccgataacttcagaaatgatgt

SEQ ID NO: 65579 - DNA, 25 bp, Probe sequence
gccgataacttcagaaatgatgttt

SEQ ID NO: 65580 - DNA, 25 bp, Probe sequence
agccgataacttcagaaatgatgtt

SEQ ID NO: 65581 - DNA, 25 bp, Probe sequence
ttagccgataacttcagaaatgatg

SEQ ID NO: 65582 - DNA, 25 bp, Probe sequence
ctttagccgataacttcagaaatga

SEQ ID NO: 65583 - DNA, 25 bp, Probe sequence
taactttagccgataacttcagaaa

SEQ ID NO: 65584 - DNA, 25 bp, Probe sequence
ataactttagccgataacttcagaa

SEQ ID NO: 65585 - DNA, 25 bp, Probe sequence
aattactgagtgatgatgagtgatt

SEQ ID NO: 65586 - DNA, 25 bp, Probe sequence
tatgtttggaatttcgtcgggaata

SEQ ID NO: 65587 - DNA, 25 bp, Probe sequence
tactgagtgatgatgagtgattatt

SEQ ID NO: 65588 - DNA, 25 bp, Probe sequence
ttactgagtgatgatgagtgattat

SEQ ID NO: 65589 - DNA, 25 bp, Probe sequence
attactgagtgatgatgagtgatta

SEQ ID NO: 65590 - DNA, 25 bp, Probe sequence
tgtttggaatttcgtcgggaataat

SEQ ID NO: 65591 - DNA, 25 bp, Probe sequence
atgtttggaatttcgtcgggaataa

SEQ ID NO: 65592 - DNA, 25 bp, Probe sequence
ttatgtttggaatttcgtcgggaat

SEQ ID NO: 65593 - DNA, 25 bp, Probe sequence
attatgtttggaatttcgtcgggaa

SEQ ID NO: 65594 - DNA, 25 bp, Probe sequence
aatcactcatcatcactcagtaatt

SEQ ID NO: 65595 - DNA, 25 bp, Probe sequence
taatcactcatcatcactcagtaat

SEQ ID NO: 65596 - DNA, 25 bp, Probe sequence
ataatcactcatcatcactcagtaa

SEQ ID NO: 65597 - DNA, 25 bp, Probe sequence
aataatcactcatcatcactcagta

SEQ ID NO: 65598 - DNA, 25 bp, Probe sequence
tattcccgacgaaattccaaacata

SEQ ID NO: 65599 - DNA, 25 bp, Probe sequence
ttcccgacgaaattccaaacataat

SEQ ID NO: 65600 - DNA, 25 bp, Probe sequence
attcccgacgaaattccaaacataa

SEQ ID NO: 65601 - DNA, 25 bp, Probe sequence
ttattcccgacgaaattccaaacat

SEQ ID NO: 65602 - DNA, 25 bp, Probe sequence
attattcccgacgaaattccaaaca

SEQ ID NO: 65603 - DNA, 25 bp, Probe sequence
aagtgcatgaagtataagtcacctt

SEQ ID NO: 65604 - DNA, 25 bp, Probe sequence
tctgatttggaattaaagtgcatga

SEQ ID NO: 65605 - DNA, 25 bp, Probe sequence
attcctactcccaattccatttaaa

SEQ ID NO: 65606 - DNA, 25 bp, Probe sequence
gatttggaattaaagtgcatgaagt

SEQ ID NO: 65607 - DNA, 25 bp, Probe sequence
tgatttggaattaaagtgcatgaag

SEQ ID NO: 65608 - DNA, 25 bp, Probe sequence
ctgatttggaattaaagtgcatgaa

SEQ ID NO: 65609 - DNA, 25 bp, Probe sequence
atctgatttggaattaaagtgcatg

SEQ ID NO: 65610 - DNA, 25 bp, Probe sequence
agtgcatgaagtataagtcaccttc

SEQ ID NO: 65611 - DNA, 25 bp, Probe sequence
aaagtgcatgaagtataagtcacct

SEQ ID NO: 65612 - DNA, 25 bp, Probe sequence
aaggtgacttatacttcatgcactt

SEQ ID NO: 65613 - DNA, 25 bp, Probe sequence
tcatgcactttaattccaaatcaga

SEQ ID NO: 65614 - DNA, 25 bp, Probe sequence
tttaaatggaattgggagtaggaat

SEQ ID NO: 65615 - DNA, 25 bp, Probe sequence
ttcatgcactttaattccaaatcag

SEQ ID NO: 65616 - DNA, 25 bp, Probe sequence
cttcatgcactttaattccaaatca

SEQ ID NO: 65617 - DNA, 25 bp, Probe sequence
acttcatgcactttaattccaaatc

SEQ ID NO: 65618 - DNA, 25 bp, Probe sequence
catgcactttaattccaaatcagat

SEQ ID NO: 65619 - DNA, 25 bp, Probe sequence
gaaggtgacttatacttcatgcact

SEQ ID NO: 65620 - DNA, 25 bp, Probe sequence
aggtgacttatacttcatgcacttt

SEQ ID NO: 65621 - DNA, 25 bp, Probe sequence
cgaatttctcctttgagtattgttg

SEQ ID NO: 65622 - DNA, 25 bp, Probe sequence
cctttgagtattgttggaatgttta

SEQ ID NO: 65623 - DNA, 25 bp, Probe sequence
gaatttctcctttgagtattgttgg

SEQ ID NO: 65624 - DNA, 25 bp, Probe sequence
tctcctttgagtattgttggaatgt

SEQ ID NO: 65625 - DNA, 25 bp, Probe sequence
ctcctttgagtattgttggaatgtt

SEQ ID NO: 65626 - DNA, 25 bp, Probe sequence
ttctcctttgagtattgttggaatg

SEQ ID NO: 65627 - DNA, 25 bp, Probe sequence
tcctttgagtattgttggaatgttt

SEQ ID NO: 65628 - DNA, 25 bp, Probe sequence
tttctcctttgagtattgttggaat

SEQ ID NO: 65629 - DNA, 25 bp, Probe sequence
atttctcctttgagtattgttggaa

SEQ ID NO: 65630 - DNA, 25 bp, Probe sequence
caacaatactcaaaggagaaattcg

SEQ ID NO: 65631 - DNA, 25 bp, Probe sequence
taaacattccaacaatactcaaagg

SEQ ID NO: 65632 - DNA, 25 bp, Probe sequence
ccaacaatactcaaaggagaaattc

SEQ ID NO: 65633 - DNA, 25 bp, Probe sequence
acattccaacaatactcaaaggaga

SEQ ID NO: 65634 - DNA, 25 bp, Probe sequence
aacattccaacaatactcaaaggag

SEQ ID NO: 65635 - DNA, 25 bp, Probe sequence
cattccaacaatactcaaaggagaa

SEQ ID NO: 65636 - DNA, 25 bp, Probe sequence
aaacattccaacaatactcaaagga

SEQ ID NO: 65637 - DNA, 25 bp, Probe sequence
tccaacaatactcaaaggagaaatt

SEQ ID NO: 65638 - DNA, 25 bp, Probe sequence
ttccaacaatactcaaaggagaaat

SEQ ID NO: 65639 - DNA, 25 bp, Probe sequence
tgcgtgaattacccaaagtatataa

SEQ ID NO: 65640 - DNA, 25 bp, Probe sequence
gtatataagctattacaccgattcg

SEQ ID NO: 65641 - DNA, 25 bp, Probe sequence
ttgcgtgaattacccaaagtatata

SEQ ID NO: 65642 - DNA, 25 bp, Probe sequence
cttaataaagtaggcgggagttata

SEQ ID NO: 65643 - DNA, 25 bp, Probe sequence
cgtgaattacccaaagtatataagc

SEQ ID NO: 65644 - DNA, 25 bp, Probe sequence
gcgtgaattacccaaagtatataag

SEQ ID NO: 65645 - DNA, 25 bp, Probe sequence
cgacacgttacaattattctctaat

SEQ ID NO: 65646 - DNA, 25 bp, Probe sequence
aaatctcctttgcgtgaattaccca

SEQ ID NO: 65647 - DNA, 25 bp, Probe sequence
ttaataaagtaggcgggagttatat

SEQ ID NO: 65648 - DNA, 25 bp, Probe sequence
ttatatactttgggtaattcacgca

SEQ ID NO: 65649 - DNA, 25 bp, Probe sequence
cgaatcggtgtaatagcttatatac

SEQ ID NO: 65650 - DNA, 25 bp, Probe sequence
tatatactttgggtaattcacgcaa

SEQ ID NO: 65651 - DNA, 25 bp, Probe sequence
tataactcccgcctactttattaag

SEQ ID NO: 65652 - DNA, 25 bp, Probe sequence
cttatatactttgggtaattcacgc

SEQ ID NO: 65653 - DNA, 25 bp, Probe sequence
gcttatatactttgggtaattcacg

SEQ ID NO: 65654 - DNA, 25 bp, Probe sequence
attagagaataattgtaacgtgtcg

SEQ ID NO: 65655 - DNA, 25 bp, Probe sequence
tgggtaattcacgcaaaggagattt

SEQ ID NO: 65656 - DNA, 25 bp, Probe sequence
atataactcccgcctactttattaa

SEQ ID NO: 65657 - DNA, 25 bp, Probe sequence
ggtagaaatgctaggttaaatgtcg

SEQ ID NO: 65658 - DNA, 25 bp, Probe sequence
aggtagaaatgctaggttaaatgtc

SEQ ID NO: 65659 - DNA, 25 bp, Probe sequence
aaggtagaaatgctaggttaaatgt

SEQ ID NO: 65660 - DNA, 25 bp, Probe sequence
ctaggttaaatgtcgaaggagatga

SEQ ID NO: 65661 - DNA, 25 bp, Probe sequence
aggttaaatgtcgaaggagatgaaa

SEQ ID NO: 65662 - DNA, 25 bp, Probe sequence
gaaatgctaggttaaatgtcgaagg

SEQ ID NO: 65663 - DNA, 25 bp, Probe sequence
taggttaaatgtcgaaggagatgaa

SEQ ID NO: 65664 - DNA, 25 bp, Probe sequence
aaatgctaggttaaatgtcgaagga

SEQ ID NO: 65665 - DNA, 25 bp, Probe sequence
agaaatgctaggttaaatgtcgaag

SEQ ID NO: 65666 - DNA, 25 bp, Probe sequence
cgacatttaacctagcatttctacc

SEQ ID NO: 65667 - DNA, 25 bp, Probe sequence
gacatttaacctagcatttctacct

SEQ ID NO: 65668 - DNA, 25 bp, Probe sequence
acatttaacctagcatttctacctt

SEQ ID NO: 65669 - DNA, 25 bp, Probe sequence
tcatctccttcgacatttaacctag

SEQ ID NO: 65670 - DNA, 25 bp, Probe sequence
ccttcgacatttaacctagcatttc

SEQ ID NO: 65671 - DNA, 25 bp, Probe sequence
tttcatctccttcgacatttaacct

SEQ ID NO: 65672 - DNA, 25 bp, Probe sequence
tccttcgacatttaacctagcattt

SEQ ID NO: 65673 - DNA, 25 bp, Probe sequence
ttcatctccttcgacatttaaccta

SEQ ID NO: 65674 - DNA, 25 bp, Probe sequence
cttcgacatttaacctagcatttct

SEQ ID NO: 65675 - DNA, 25 bp, Probe sequence
agaaatactaaactaagcgaggtgc

SEQ ID NO: 65676 - DNA, 25 bp, Probe sequence
gcatctcgtaggtttgtagaaatac

SEQ ID NO: 65677 - DNA, 25 bp, Probe sequence
tagaaatactaaactaagcgaggtg

SEQ ID NO: 65678 - DNA, 25 bp, Probe sequence
gtagaaatactaaactaagcgaggt

SEQ ID NO: 65679 - DNA, 25 bp, Probe sequence
tgtagaaatactaaactaagcgagg

SEQ ID NO: 65680 - DNA, 25 bp, Probe sequence
catctcgtaggtttgtagaaatact

SEQ ID NO: 65681 - DNA, 25 bp, Probe sequence
ttgtaacacatgacacatatggttg

SEQ ID NO: 65682 - DNA, 25 bp, Probe sequence
tgtaacacatgacacatatggttgt

SEQ ID NO: 65683 - DNA, 25 bp, Probe sequence
atcgtggtaaatatgtatttgctgt

SEQ ID NO: 65684 - DNA, 25 bp, Probe sequence
gcacctcgcttagtttagtatttct

SEQ ID NO: 65685 - DNA, 25 bp, Probe sequence
gtatttctacaaacctacgagatgc

SEQ ID NO: 65686 - DNA, 25 bp, Probe sequence
cacctcgcttagtttagtatttcta

SEQ ID NO: 65687 - DNA, 25 bp, Probe sequence
cctcgcttagtttagtatttctaca

SEQ ID NO: 65688 - DNA, 25 bp, Probe sequence
acctcgcttagtttagtatttctac

SEQ ID NO: 65689 - DNA, 25 bp, Probe sequence
agtatttctacaaacctacgagatg

SEQ ID NO: 65690 - DNA, 25 bp, Probe sequence
caaccatatgtgtcatgtgttacaa

SEQ ID NO: 65691 - DNA, 25 bp, Probe sequence
acaaccatatgtgtcatgtgttaca

SEQ ID NO: 65692 - DNA, 25 bp, Probe sequence
acagcaaatacatatttaccacgat

SEQ ID NO: 65693 - DNA, 25 bp, Probe sequence
tgcgtgttaattcttggtaatagtg

SEQ ID NO: 65694 - DNA, 25 bp, Probe sequence
atgcgtgttaattcttggtaatagt

SEQ ID NO: 65695 - DNA, 25 bp, Probe sequence
ttattggtatattagccttggcgtt

SEQ ID NO: 65696 - DNA, 25 bp, Probe sequence
aatatgcgtgttaattcttggtaat

SEQ ID NO: 65697 - DNA, 25 bp, Probe sequence
tatgcgtgttaattcttggtaatag

SEQ ID NO: 65698 - DNA, 25 bp, Probe sequence
cttggcgtttgctgcttatatatta

SEQ ID NO: 65699 - DNA, 25 bp, Probe sequence
tggcgtttgctgcttatatattatt

SEQ ID NO: 65700 - DNA, 25 bp, Probe sequence
ttggcgtttgctgcttatatattat

SEQ ID NO: 65701 - DNA, 25 bp, Probe sequence
atatgcgtgttaattcttggtaata

SEQ ID NO: 65702 - DNA, 25 bp, Probe sequence
cactattaccaagaattaacacgca

SEQ ID NO: 65703 - DNA, 25 bp, Probe sequence
actattaccaagaattaacacgcat

SEQ ID NO: 65704 - DNA, 25 bp, Probe sequence
aacgccaaggctaatataccaataa

SEQ ID NO: 65705 - DNA, 25 bp, Probe sequence
attaccaagaattaacacgcatatt

SEQ ID NO: 65706 - DNA, 25 bp, Probe sequence
ctattaccaagaattaacacgcata

SEQ ID NO: 65707 - DNA, 25 bp, Probe sequence
taatatataagcagcaaacgccaag

SEQ ID NO: 65708 - DNA, 25 bp, Probe sequence
ataatatataagcagcaaacgccaa

SEQ ID NO: 65709 - DNA, 25 bp, Probe sequence
aataatatataagcagcaaacgcca

SEQ ID NO: 65710 - DNA, 25 bp, Probe sequence
tattaccaagaattaacacgcatat

SEQ ID NO: 65711 - DNA, 25 bp, Probe sequence
tggattgatagacacataattgaca

SEQ ID NO: 65712 - DNA, 25 bp, Probe sequence
ttggattgatagacacataattgac

SEQ ID NO: 65713 - DNA, 25 bp, Probe sequence
gccaattaataagaagagtgtgtac

SEQ ID NO: 65714 - DNA, 25 bp, Probe sequence
ggattgatagacacataattgacat

SEQ ID NO: 65715 - DNA, 25 bp, Probe sequence
taatgatatttgaggtatgctttgc

SEQ ID NO: 65716 - DNA, 25 bp, Probe sequence
ggccaattaataagaagagtgtgta

SEQ ID NO: 65717 - DNA, 25 bp, Probe sequence
attggattgatagacacataattga

SEQ ID NO: 65718 - DNA, 25 bp, Probe sequence
aatgatgattgaagatttacaaggg

SEQ ID NO: 65719 - DNA, 25 bp, Probe sequence
aagaagagtgtgtactattacgtta

SEQ ID NO: 65720 - DNA, 25 bp, Probe sequence
tgtcaattatgtgtctatcaatcca

SEQ ID NO: 65721 - DNA, 25 bp, Probe sequence
gtcaattatgtgtctatcaatccaa

SEQ ID NO: 65722 - DNA, 25 bp, Probe sequence
gtacacactcttcttattaattggc

SEQ ID NO: 65723 - DNA, 25 bp, Probe sequence
atgtcaattatgtgtctatcaatcc

SEQ ID NO: 65724 - DNA, 25 bp, Probe sequence
gcaaagcatacctcaaatatcatta

SEQ ID NO: 65725 - DNA, 25 bp, Probe sequence
tacacactcttcttattaattggcc

SEQ ID NO: 65726 - DNA, 25 bp, Probe sequence
tcaattatgtgtctatcaatccaat

SEQ ID NO: 65727 - DNA, 25 bp, Probe sequence
cccttgtaaatcttcaatcatcatt

SEQ ID NO: 65728 - DNA, 25 bp, Probe sequence
aacgtaatagtacacactcttctta

SEQ ID NO: 65729 - DNA, 25 bp, Probe sequence
tggtgacgcatcatactatattact

SEQ ID NO: 65730 - DNA, 25 bp, Probe sequence
ggtgacgcatcatactatattactg

SEQ ID NO: 65731 - DNA, 25 bp, Probe sequence
atcttggtgtagtgttggtgtagtt

SEQ ID NO: 65732 - DNA, 25 bp, Probe sequence
aatcttggtgtagtgttggtgtagt

SEQ ID NO: 65733 - DNA, 25 bp, Probe sequence
ttggtgacgcatcatactatattac

SEQ ID NO: 65734 - DNA, 25 bp, Probe sequence
gtgacgcatcatactatattactga

SEQ ID NO: 65735 - DNA, 25 bp, Probe sequence
tcttggtgtagtgttggtgtagttc

SEQ ID NO: 65736 - DNA, 25 bp, Probe sequence
ttggtgtagtgttggtgtagttcag

SEQ ID NO: 65737 - DNA, 25 bp, Probe sequence
cttggtgtagtgttggtgtagttca

SEQ ID NO: 65738 - DNA, 25 bp, Probe sequence
agtaatatagtatgatgcgtcacca

SEQ ID NO: 65739 - DNA, 25 bp, Probe sequence
cagtaatatagtatgatgcgtcacc

SEQ ID NO: 65740 - DNA, 25 bp, Probe sequence
actacaccaacactacaccaagatt

SEQ ID NO: 65741 - DNA, 25 bp, Probe sequence
aactacaccaacactacaccaagat

SEQ ID NO: 65742 - DNA, 25 bp, Probe sequence
gtaatatagtatgatgcgtcaccaa

SEQ ID NO: 65743 - DNA, 25 bp, Probe sequence
tcagtaatatagtatgatgcgtcac

SEQ ID NO: 65744 - DNA, 25 bp, Probe sequence
gaactacaccaacactacaccaaga

SEQ ID NO: 65745 - DNA, 25 bp, Probe sequence
tgaactacaccaacactacaccaag

SEQ ID NO: 65746 - DNA, 25 bp, Probe sequence
ctgaactacaccaacactacaccaa

SEQ ID NO: 65747 - DNA, 25 bp, Probe sequence
aattcaggcaacttaattgtgttaa

SEQ ID NO: 65748 - DNA, 25 bp, Probe sequence
aggttcaataagacttaaatgcgaa

SEQ ID NO: 65749 - DNA, 25 bp, Probe sequence
aaggttcaataagacttaaatgcga

SEQ ID NO: 65750 - DNA, 25 bp, Probe sequence
aaaggttcaataagacttaaatgcg

SEQ ID NO: 65751 - DNA, 25 bp, Probe sequence
ggttcaataagacttaaatgcgaat

SEQ ID NO: 65752 - DNA, 25 bp, Probe sequence
agtacattataagatgttgtgcgga

SEQ ID NO: 65753 - DNA, 25 bp, Probe sequence
aagtacattataagatgttgtgcgg

SEQ ID NO: 65754 - DNA, 25 bp, Probe sequence
ttcaggcaacttaattgtgttaaat

SEQ ID NO: 65755 - DNA, 25 bp, Probe sequence
attcaggcaacttaattgtgttaaa

SEQ ID NO: 65756 - DNA, 25 bp, Probe sequence
ttaacacaattaagttgcctgaatt

SEQ ID NO: 65757 - DNA, 25 bp, Probe sequence
tcgcatttaagtcttattgaacctt

SEQ ID NO: 65758 - DNA, 25 bp, Probe sequence
ttcgcatttaagtcttattgaacct

SEQ ID NO: 65759 - DNA, 25 bp, Probe sequence
cgcatttaagtcttattgaaccttt

SEQ ID NO: 65760 - DNA, 25 bp, Probe sequence
attcgcatttaagtcttattgaacc

SEQ ID NO: 65761 - DNA, 25 bp, Probe sequence
tccgcacaacatcttataatgtact

SEQ ID NO: 65762 - DNA, 25 bp, Probe sequence
tttaacacaattaagttgcctgaat

SEQ ID NO: 65763 - DNA, 25 bp, Probe sequence
atttaacacaattaagttgcctgaa

SEQ ID NO: 65764 - DNA, 25 bp, Probe sequence
ccgcacaacatcttataatgtactt

SEQ ID NO: 65765 - DNA, 25 bp, Probe sequence
tttcaaaggtgagggagagatttaa

SEQ ID NO: 65766 - DNA, 25 bp, Probe sequence
atttcaaaggtgagggagagattta

SEQ ID NO: 65767 - DNA, 25 bp, Probe sequence
tatttcaaaggtgagggagagattt

SEQ ID NO: 65768 - DNA, 25 bp, Probe sequence
ttatttcaaaggtgagggagagatt

SEQ ID NO: 65769 - DNA, 25 bp, Probe sequence
attatttcaaaggtgagggagagat

SEQ ID NO: 65770 - DNA, 25 bp, Probe sequence
tcagtattatttcaaaggtgaggga

SEQ ID NO: 65771 - DNA, 25 bp, Probe sequence
agtattatttcaaaggtgagggaga

SEQ ID NO: 65772 - DNA, 25 bp, Probe sequence
cagtattatttcaaaggtgagggag

SEQ ID NO: 65773 - DNA, 25 bp, Probe sequence
tattatttcaaaggtgagggagaga

SEQ ID NO: 65774 - DNA, 25 bp, Probe sequence
ttaaatctctccctcacctttgaaa

SEQ ID NO: 65775 - DNA, 25 bp, Probe sequence
aatctctccctcacctttgaaataa

SEQ ID NO: 65776 - DNA, 25 bp, Probe sequence
aaatctctccctcacctttgaaata

SEQ ID NO: 65777 - DNA, 25 bp, Probe sequence
taaatctctccctcacctttgaaat

SEQ ID NO: 65778 - DNA, 25 bp, Probe sequence
tccctcacctttgaaataatactga

SEQ ID NO: 65779 - DNA, 25 bp, Probe sequence
atctctccctcacctttgaaataat

SEQ ID NO: 65780 - DNA, 25 bp, Probe sequence
ctccctcacctttgaaataatactg

SEQ ID NO: 65781 - DNA, 25 bp, Probe sequence
tctccctcacctttgaaataatact

SEQ ID NO: 65782 - DNA, 25 bp, Probe sequence
ctctccctcacctttgaaataatac

SEQ ID NO: 65783 - DNA, 25 bp, Probe sequence
actgggtgagcatactttaatgtta

SEQ ID NO: 65784 - DNA, 25 bp, Probe sequence
aaactgggtgagcatactttaatgt

SEQ ID NO: 65785 - DNA, 25 bp, Probe sequence
aactgggtgagcatactttaatgtt

SEQ ID NO: 65786 - DNA, 25 bp, Probe sequence
ctgggtgagcatactttaatgttat

SEQ ID NO: 65787 - DNA, 25 bp, Probe sequence
taaactgggtgagcatactttaatg

SEQ ID NO: 65788 - DNA, 25 bp, Probe sequence
aataaactgggtgagcatactttaa

SEQ ID NO: 65789 - DNA, 25 bp, Probe sequence
aaataaactgggtgagcatacttta

SEQ ID NO: 65790 - DNA, 25 bp, Probe sequence
ataaactgggtgagcatactttaat

SEQ ID NO: 65791 - DNA, 25 bp, Probe sequence
tgggtgagcatactttaatgttatg

SEQ ID NO: 65792 - DNA, 25 bp, Probe sequence
taacattaaagtatgctcacccagt

SEQ ID NO: 65793 - DNA, 25 bp, Probe sequence
acattaaagtatgctcacccagttt

SEQ ID NO: 65794 - DNA, 25 bp, Probe sequence
aacattaaagtatgctcacccagtt

SEQ ID NO: 65795 - DNA, 25 bp, Probe sequence
ataacattaaagtatgctcacccag

SEQ ID NO: 65796 - DNA, 25 bp, Probe sequence
cattaaagtatgctcacccagttta

SEQ ID NO: 65797 - DNA, 25 bp, Probe sequence
taaagtatgctcacccagtttattt

SEQ ID NO: 65798 - DNA, 25 bp, Probe sequence
ttaaagtatgctcacccagtttatt

SEQ ID NO: 65799 - DNA, 25 bp, Probe sequence
attaaagtatgctcacccagtttat

SEQ ID NO: 65800 - DNA, 25 bp, Probe sequence
cataacattaaagtatgctcaccca

SEQ ID NO: 65801 - DNA, 25 bp, Probe sequence
tcatgctcgtagtgtcgaatattat

SEQ ID NO: 65802 - DNA, 25 bp, Probe sequence
ttcatgctcgtagtgtcgaatatta

SEQ ID NO: 65803 - DNA, 25 bp, Probe sequence
catgctcgtagtgtcgaatattatt

SEQ ID NO: 65804 - DNA, 25 bp, Probe sequence
tgctcgtagtgtcgaatattattat

SEQ ID NO: 65805 - DNA, 25 bp, Probe sequence
atgctcgtagtgtcgaatattatta

SEQ ID NO: 65806 - DNA, 25 bp, Probe sequence
gctcgtagtgtcgaatattattatc

SEQ ID NO: 65807 - DNA, 25 bp, Probe sequence
tttcatgctcgtagtgtcgaatatt

SEQ ID NO: 65808 - DNA, 25 bp, Probe sequence
ttttcatgctcgtagtgtcgaatat

SEQ ID NO: 65809 - DNA, 25 bp, Probe sequence
attttcatgctcgtagtgtcgaata

SEQ ID NO: 65810 - DNA, 25 bp, Probe sequence
taatattcgacactacgagcatgaa

SEQ ID NO: 65811 - DNA, 25 bp, Probe sequence
ataatattcgacactacgagcatga

SEQ ID NO: 65812 - DNA, 25 bp, Probe sequence
aataatattcgacactacgagcatg

SEQ ID NO: 65813 - DNA, 25 bp, Probe sequence
taataatattcgacactacgagcat

SEQ ID NO: 65814 - DNA, 25 bp, Probe sequence
ataataatattcgacactacgagca

SEQ ID NO: 65815 - DNA, 25 bp, Probe sequence
gataataatattcgacactacgagc

SEQ ID NO: 65816 - DNA, 25 bp, Probe sequence
aatattcgacactacgagcatgaaa

SEQ ID NO: 65817 - DNA, 25 bp, Probe sequence
tattcgacactacgagcatgaaaat

SEQ ID NO: 65818 - DNA, 25 bp, Probe sequence
atattcgacactacgagcatgaaaa

SEQ ID NO: 65819 - DNA, 25 bp, Probe sequence
tttcaagccgtaaaattgtcaatca

SEQ ID NO: 65820 - DNA, 25 bp, Probe sequence
ttcaagccgtaaaattgtcaatcac

SEQ ID NO: 65821 - DNA, 25 bp, Probe sequence
ttttcaagccgtaaaattgtcaatc

SEQ ID NO: 65822 - DNA, 25 bp, Probe sequence
ttgtaatcgcgtacttaaggagaaa

SEQ ID NO: 65823 - DNA, 25 bp, Probe sequence
tttgtaatcgcgtacttaaggagaa

SEQ ID NO: 65824 - DNA, 25 bp, Probe sequence
gtttgtaatcgcgtacttaaggaga

SEQ ID NO: 65825 - DNA, 25 bp, Probe sequence
tcaagccgtaaaattgtcaatcacc

SEQ ID NO: 65826 - DNA, 25 bp, Probe sequence
tagtttgtaatcgcgtacttaagga

SEQ ID NO: 65827 - DNA, 25 bp, Probe sequence
agtttgtaatcgcgtacttaaggag

SEQ ID NO: 65828 - DNA, 25 bp, Probe sequence
tgattgacaattttacggcttgaaa

SEQ ID NO: 65829 - DNA, 25 bp, Probe sequence
gtgattgacaattttacggcttgaa

SEQ ID NO: 65830 - DNA, 25 bp, Probe sequence
gattgacaattttacggcttgaaaa

SEQ ID NO: 65831 - DNA, 25 bp, Probe sequence
ttctccttaagtacgcgattacaaa

SEQ ID NO: 65832 - DNA, 25 bp, Probe sequence
tttctccttaagtacgcgattacaa

SEQ ID NO: 65833 - DNA, 25 bp, Probe sequence
tctccttaagtacgcgattacaaac

SEQ ID NO: 65834 - DNA, 25 bp, Probe sequence
ggtgattgacaattttacggcttga

SEQ ID NO: 65835 - DNA, 25 bp, Probe sequence
tccttaagtacgcgattacaaacta

SEQ ID NO: 65836 - DNA, 25 bp, Probe sequence
ccttaagtacgcgattacaaactat

SEQ ID NO: 65837 - DNA, 25 bp, Probe sequence
tgtataaatagtggtggatagtggg

SEQ ID NO: 65838 - DNA, 25 bp, Probe sequence
ggtttagcccgatttatcttaatga

SEQ ID NO: 65839 - DNA, 25 bp, Probe sequence
ttgtataaatagtggtggatagtgg

SEQ ID NO: 65840 - DNA, 25 bp, Probe sequence
gtttagcccgatttatcttaatgat

SEQ ID NO: 65841 - DNA, 25 bp, Probe sequence
tataaatagtggtggatagtgggga

SEQ ID NO: 65842 - DNA, 25 bp, Probe sequence
gtataaatagtggtggatagtgggg

SEQ ID NO: 65843 - DNA, 25 bp, Probe sequence
gatagtggggagatgtggtaaatta

SEQ ID NO: 65844 - DNA, 25 bp, Probe sequence
ataaatagtggtggatagtggggag

SEQ ID NO: 65845 - DNA, 25 bp, Probe sequence
aagggtttagcccgatttatcttaa

SEQ ID NO: 65846 - DNA, 25 bp, Probe sequence
cccactatccaccactatttataca

SEQ ID NO: 65847 - DNA, 25 bp, Probe sequence
tcattaagataaatcgggctaaacc

SEQ ID NO: 65848 - DNA, 25 bp, Probe sequence
ccactatccaccactatttatacaa

SEQ ID NO: 65849 - DNA, 25 bp, Probe sequence
atcattaagataaatcgggctaaac

SEQ ID NO: 65850 - DNA, 25 bp, Probe sequence
ccccactatccaccactatttatac

SEQ ID NO: 65851 - DNA, 25 bp, Probe sequence
tccccactatccaccactatttata

SEQ ID NO: 65852 - DNA, 25 bp, Probe sequence
taatttaccacatctccccactatc

SEQ ID NO: 65853 - DNA, 25 bp, Probe sequence
ctccccactatccaccactatttat

SEQ ID NO: 65854 - DNA, 25 bp, Probe sequence
ttaagataaatcgggctaaaccctt

SEQ ID NO: 65855 - DNA, 25 bp, Probe sequence
gtctggattaagaagaggagatagt

SEQ ID NO: 65856 - DNA, 25 bp, Probe sequence
agtctggattaagaagaggagatag

SEQ ID NO: 65857 - DNA, 25 bp, Probe sequence
gtagacgaggtcagattaacttgtt

SEQ ID NO: 65858 - DNA, 25 bp, Probe sequence
taaggtagacgaggtcagattaact

SEQ ID NO: 65859 - DNA, 25 bp, Probe sequence
ttaaggtagacgaggtcagattaac

SEQ ID NO: 65860 - DNA, 25 bp, Probe sequence
tctggattaagaagaggagatagtt

SEQ ID NO: 65861 - DNA, 25 bp, Probe sequence
aagtctggattaagaagaggagata

SEQ ID NO: 65862 - DNA, 25 bp, Probe sequence
aaggtagacgaggtcagattaactt

SEQ ID NO: 65863 - DNA, 25 bp, Probe sequence
aggtagacgaggtcagattaacttg

SEQ ID NO: 65864 - DNA, 25 bp, Probe sequence
actatctcctcttcttaatccagac

SEQ ID NO: 65865 - DNA, 25 bp, Probe sequence
ctatctcctcttcttaatccagact

SEQ ID NO: 65866 - DNA, 25 bp, Probe sequence
agttaatctgacctcgtctacctta

SEQ ID NO: 65867 - DNA, 25 bp, Probe sequence
aacaagttaatctgacctcgtctac

SEQ ID NO: 65868 - DNA, 25 bp, Probe sequence
gttaatctgacctcgtctaccttaa

SEQ ID NO: 65869 - DNA, 25 bp, Probe sequence
tatctcctcttcttaatccagactt

SEQ ID NO: 65870 - DNA, 25 bp, Probe sequence
aactatctcctcttcttaatccaga

SEQ ID NO: 65871 - DNA, 25 bp, Probe sequence
aagttaatctgacctcgtctacctt

SEQ ID NO: 65872 - DNA, 25 bp, Probe sequence
caagttaatctgacctcgtctacct

SEQ ID NO: 65873 - DNA, 25 bp, Probe sequence
taatagtaatttgtcaggaggtgcc

SEQ ID NO: 65874 - DNA, 25 bp, Probe sequence
tatagttcacaagccattcaacgta

SEQ ID NO: 65875 - DNA, 25 bp, Probe sequence
tttatagttcacaagccattcaacg

SEQ ID NO: 65876 - DNA, 25 bp, Probe sequence
atagttcacaagccattcaacgtat

SEQ ID NO: 65877 - DNA, 25 bp, Probe sequence
tagttcacaagccattcaacgtatt

SEQ ID NO: 65878 - DNA, 25 bp, Probe sequence
ttatagttcacaagccattcaacgt

SEQ ID NO: 65879 - DNA, 25 bp, Probe sequence
ttaatagtaatttgtcaggaggtgc

SEQ ID NO: 65880 - DNA, 25 bp, Probe sequence
gtttatagttcacaagccattcaac

SEQ ID NO: 65881 - DNA, 25 bp, Probe sequence
tgtttatagttcacaagccattcaa

SEQ ID NO: 65882 - DNA, 25 bp, Probe sequence
ggcacctcctgacaaattactatta

SEQ ID NO: 65883 - DNA, 25 bp, Probe sequence
tacgttgaatggcttgtgaactata

SEQ ID NO: 65884 - DNA, 25 bp, Probe sequence
cgttgaatggcttgtgaactataaa

SEQ ID NO: 65885 - DNA, 25 bp, Probe sequence
atacgttgaatggcttgtgaactat

SEQ ID NO: 65886 - DNA, 25 bp, Probe sequence
acgttgaatggcttgtgaactataa

SEQ ID NO: 65887 - DNA, 25 bp, Probe sequence
aatacgttgaatggcttgtgaacta

SEQ ID NO: 65888 - DNA, 25 bp, Probe sequence
gcacctcctgacaaattactattaa

SEQ ID NO: 65889 - DNA, 25 bp, Probe sequence
gttgaatggcttgtgaactataaac

SEQ ID NO: 65890 - DNA, 25 bp, Probe sequence
ttgaatggcttgtgaactataaaca

SEQ ID NO: 65891 - DNA, 25 bp, Probe sequence
ttcaacacaaatcatcagataacat

SEQ ID NO: 65892 - DNA, 25 bp, Probe sequence
attcaacacaaatcatcagataaca

SEQ ID NO: 65893 - DNA, 25 bp, Probe sequence
tttaaatgaaatgatggtgacgatc

SEQ ID NO: 65894 - DNA, 25 bp, Probe sequence
tcaacacaaatcatcagataacata

SEQ ID NO: 65895 - DNA, 25 bp, Probe sequence
acacaaataattcaacacaaatcat

SEQ ID NO: 65896 - DNA, 25 bp, Probe sequence
aattcaacacaaatcatcagataac

SEQ ID NO: 65897 - DNA, 25 bp, Probe sequence
acaaataattcaacacaaatcatca

SEQ ID NO: 65898 - DNA, 25 bp, Probe sequence
cacaaataattcaacacaaatcatc

SEQ ID NO: 65899 - DNA, 25 bp, Probe sequence
aaagtgtttaagtatcgtgtcaaaa

SEQ ID NO: 65900 - DNA, 25 bp, Probe sequence
tgttatctgatgatttgtgttgaat

SEQ ID NO: 65901 - DNA, 25 bp, Probe sequence
atgttatctgatgatttgtgttgaa

SEQ ID NO: 65902 - DNA, 25 bp, Probe sequence
gatcgtcaccatcatttcatttaaa

SEQ ID NO: 65903 - DNA, 25 bp, Probe sequence
tatgttatctgatgatttgtgttga

SEQ ID NO: 65904 - DNA, 25 bp, Probe sequence
atgatttgtgttgaattatttgtgt

SEQ ID NO: 65905 - DNA, 25 bp, Probe sequence
gttatctgatgatttgtgttgaatt

SEQ ID NO: 65906 - DNA, 25 bp, Probe sequence
tgatgatttgtgttgaattatttgt

SEQ ID NO: 65907 - DNA, 25 bp, Probe sequence
gatgatttgtgttgaattatttgtg

SEQ ID NO: 65908 - DNA, 25 bp, Probe sequence
tttgacacgatacttaaacactttt

SEQ ID NO: 65909 - DNA, 25 bp, Probe sequence
ggtacatgatactttagcctcgttt

SEQ ID NO: 65910 - DNA, 25 bp, Probe sequence
gaggcaagggtacatgatactttag

SEQ ID NO: 65911 - DNA, 25 bp, Probe sequence
gggtacatgatactttagcctcgtt

SEQ ID NO: 65912 - DNA, 25 bp, Probe sequence
caagggtacatgatactttagcctc

SEQ ID NO: 65913 - DNA, 25 bp, Probe sequence
ataacgaggcaagggtacatgatac

SEQ ID NO: 65914 - DNA, 25 bp, Probe sequence
cgaggcaagggtacatgatacttta

SEQ ID NO: 65915 - DNA, 25 bp, Probe sequence
cataacgaggcaagggtacatgata

SEQ ID NO: 65916 - DNA, 25 bp, Probe sequence
aggcaagggtacatgatactttagc

SEQ ID NO: 65917 - DNA, 25 bp, Probe sequence
aagggtacatgatactttagcctcg

SEQ ID NO: 65918 - DNA, 25 bp, Probe sequence
aaacgaggctaaagtatcatgtacc

SEQ ID NO: 65919 - DNA, 25 bp, Probe sequence
ctaaagtatcatgtacccttgcctc

SEQ ID NO: 65920 - DNA, 25 bp, Probe sequence
gaggctaaagtatcatgtacccttg

SEQ ID NO: 65921 - DNA, 25 bp, Probe sequence
aacgaggctaaagtatcatgtaccc

SEQ ID NO: 65922 - DNA, 25 bp, Probe sequence
gtatcatgtacccttgcctcgttat

SEQ ID NO: 65923 - DNA, 25 bp, Probe sequence
taaagtatcatgtacccttgcctcg

SEQ ID NO: 65924 - DNA, 25 bp, Probe sequence
tatcatgtacccttgcctcgttatg

SEQ ID NO: 65925 - DNA, 25 bp, Probe sequence
gctaaagtatcatgtacccttgcct

SEQ ID NO: 65926 - DNA, 25 bp, Probe sequence
cgaggctaaagtatcatgtaccctt

SEQ ID NO: 65927 - DNA, 25 bp, Probe sequence
acagcgaattaggtaatggtgagag

SEQ ID NO: 65928 - DNA, 25 bp, Probe sequence
tctaagttgagttaataagggtggt

SEQ ID NO: 65929 - DNA, 25 bp, Probe sequence
gcatgtatgttatatcactggcttt

SEQ ID NO: 65930 - DNA, 25 bp, Probe sequence
agcatgtatgttatatcactggctt

SEQ ID NO: 65931 - DNA, 25 bp, Probe sequence
aagcatgtatgttatatcactggct

SEQ ID NO: 65932 - DNA, 25 bp, Probe sequence
aaagcatgtatgttatatcactggc

SEQ ID NO: 65933 - DNA, 25 bp, Probe sequence
cacagcgaattaggtaatggtgaga

SEQ ID NO: 65934 - DNA, 25 bp, Probe sequence
ttaggtaatggtgagagcctagtaa

SEQ ID NO: 65935 - DNA, 25 bp, Probe sequence
attaggtaatggtgagagcctagta

SEQ ID NO: 65936 - DNA, 25 bp, Probe sequence
ctctcaccattacctaattcgctgt

SEQ ID NO: 65937 - DNA, 25 bp, Probe sequence
accacccttattaactcaacttaga

SEQ ID NO: 65938 - DNA, 25 bp, Probe sequence
gccagtgatataacatacatgcttt

SEQ ID NO: 65939 - DNA, 25 bp, Probe sequence
agccagtgatataacatacatgctt

SEQ ID NO: 65940 - DNA, 25 bp, Probe sequence
aagccagtgatataacatacatgct

SEQ ID NO: 65941 - DNA, 25 bp, Probe sequence
aaagccagtgatataacatacatgc

SEQ ID NO: 65942 - DNA, 25 bp, Probe sequence
tctcaccattacctaattcgctgtg

SEQ ID NO: 65943 - DNA, 25 bp, Probe sequence
ctaggctctcaccattacctaattc

SEQ ID NO: 65944 - DNA, 25 bp, Probe sequence
tactaggctctcaccattacctaat

SEQ ID NO: 65945 - DNA, 25 bp, Probe sequence
agttgctattctcaattatgttcgc

SEQ ID NO: 65946 - DNA, 25 bp, Probe sequence
tgcgttatagttgctattctcaatt

SEQ ID NO: 65947 - DNA, 25 bp, Probe sequence
aatgcgttatagttgctattctcaa

SEQ ID NO: 65948 - DNA, 25 bp, Probe sequence
atgcgttatagttgctattctcaat

SEQ ID NO: 65949 - DNA, 25 bp, Probe sequence
gctctcttcataatcatgttgtagt

SEQ ID NO: 65950 - DNA, 25 bp, Probe sequence
agctctcttcataatcatgttgtag

SEQ ID NO: 65951 - DNA, 25 bp, Probe sequence
tagttgctattctcaattatgttcg

SEQ ID NO: 65952 - DNA, 25 bp, Probe sequence
gcgttatagttgctattctcaatta

SEQ ID NO: 65953 - DNA, 25 bp, Probe sequence
aagctctcttcataatcatgttgta

SEQ ID NO: 65954 - DNA, 25 bp, Probe sequence
gcgaacataattgagaatagcaact

SEQ ID NO: 65955 - DNA, 25 bp, Probe sequence
ttgagaatagcaactataacgcatt

SEQ ID NO: 65956 - DNA, 25 bp, Probe sequence
aattgagaatagcaactataacgca

SEQ ID NO: 65957 - DNA, 25 bp, Probe sequence
attgagaatagcaactataacgcat

SEQ ID NO: 65958 - DNA, 25 bp, Probe sequence
actacaacatgattatgaagagagc

SEQ ID NO: 65959 - DNA, 25 bp, Probe sequence
ctacaacatgattatgaagagagct

SEQ ID NO: 65960 - DNA, 25 bp, Probe sequence
cgaacataattgagaatagcaacta

SEQ ID NO: 65961 - DNA, 25 bp, Probe sequence
taattgagaatagcaactataacgc

SEQ ID NO: 65962 - DNA, 25 bp, Probe sequence
tacaacatgattatgaagagagctt

SEQ ID NO: 65963 - DNA, 25 bp, Probe sequence
aatggacgaaccatataatgaatcg

SEQ ID NO: 65964 - DNA, 25 bp, Probe sequence
ttgaatggacgaaccatataatgaa

SEQ ID NO: 65965 - DNA, 25 bp, Probe sequence
tgaatggacgaaccatataatgaat

SEQ ID NO: 65966 - DNA, 25 bp, Probe sequence
gaatggacgaaccatataatgaatc

SEQ ID NO: 65967 - DNA, 25 bp, Probe sequence
tttgaatggacgaaccatataatga

SEQ ID NO: 65968 - DNA, 25 bp, Probe sequence
actttgaatggacgaaccatataat

SEQ ID NO: 65969 - DNA, 25 bp, Probe sequence
ctttgaatggacgaaccatataatg

SEQ ID NO: 65970 - DNA, 25 bp, Probe sequence
tactttgaatggacgaaccatataa

SEQ ID NO: 65971 - DNA, 25 bp, Probe sequence
atactttgaatggacgaaccatata

SEQ ID NO: 65972 - DNA, 25 bp, Probe sequence
cgattcattatatggttcgtccatt

SEQ ID NO: 65973 - DNA, 25 bp, Probe sequence
ttcattatatggttcgtccattcaa

SEQ ID NO: 65974 - DNA, 25 bp, Probe sequence
attcattatatggttcgtccattca

SEQ ID NO: 65975 - DNA, 25 bp, Probe sequence
gattcattatatggttcgtccattc

SEQ ID NO: 65976 - DNA, 25 bp, Probe sequence
attatatggttcgtccattcaaagt

SEQ ID NO: 65977 - DNA, 25 bp, Probe sequence
tcattatatggttcgtccattcaaa

SEQ ID NO: 65978 - DNA, 25 bp, Probe sequence
cattatatggttcgtccattcaaag

SEQ ID NO: 65979 - DNA, 25 bp, Probe sequence
ttatatggttcgtccattcaaagta

SEQ ID NO: 65980 - DNA, 25 bp, Probe sequence
atggttcgtccattcaaagtatata

SEQ ID NO: 65981 - DNA, 25 bp, Probe sequence
ccaattaagtgtagacgattcatgt

SEQ ID NO: 65982 - DNA, 25 bp, Probe sequence
tccaattaagtgtagacgattcatg

SEQ ID NO: 65983 - DNA, 25 bp, Probe sequence
gtccaattaagtgtagacgattcat

SEQ ID NO: 65984 - DNA, 25 bp, Probe sequence
caattaagtgtagacgattcatgtc

SEQ ID NO: 65985 - DNA, 25 bp, Probe sequence
aatttgtccaattaagtgtagacga

SEQ ID NO: 65986 - DNA, 25 bp, Probe sequence
gaatttgtccaattaagtgtagacg

SEQ ID NO: 65987 - DNA, 25 bp, Probe sequence
agaatttgtccaattaagtgtagac

SEQ ID NO: 65988 - DNA, 25 bp, Probe sequence
aagtgtagacgattcatgtcttatt

SEQ ID NO: 65989 - DNA, 25 bp, Probe sequence
attaagtgtagacgattcatgtctt

SEQ ID NO: 65990 - DNA, 25 bp, Probe sequence
acatgaatcgtctacacttaattgg

SEQ ID NO: 65991 - DNA, 25 bp, Probe sequence
catgaatcgtctacacttaattgga

SEQ ID NO: 65992 - DNA, 25 bp, Probe sequence
atgaatcgtctacacttaattggac

SEQ ID NO: 65993 - DNA, 25 bp, Probe sequence
gacatgaatcgtctacacttaattg

SEQ ID NO: 65994 - DNA, 25 bp, Probe sequence
tcgtctacacttaattggacaaatt

SEQ ID NO: 65995 - DNA, 25 bp, Probe sequence
cgtctacacttaattggacaaattc

SEQ ID NO: 65996 - DNA, 25 bp, Probe sequence
gtctacacttaattggacaaattct

SEQ ID NO: 65997 - DNA, 25 bp, Probe sequence
agacatgaatcgtctacacttaatt

SEQ ID NO: 65998 - DNA, 25 bp, Probe sequence
aagacatgaatcgtctacacttaat

SEQ ID NO: 65999 - DNA, 25 bp, Probe sequence
cttatggacgattgattggaggaac

SEQ ID NO: 66000 - DNA, 25 bp, Probe sequence
tcttatggacgattgattggaggaa

SEQ ID NO: 66001 - DNA, 25 bp, Probe sequence
gagttgtcttatggacgattgattg

SEQ ID NO: 66002 - DNA, 25 bp, Probe sequence
agagttgtcttatggacgattgatt

SEQ ID NO: 66003 - DNA, 25 bp, Probe sequence
ttgtcttatggacgattgattggag

SEQ ID NO: 66004 - DNA, 25 bp, Probe sequence
gttgtcttatggacgattgattgga

SEQ ID NO: 66005 - DNA, 25 bp, Probe sequence
agttgtcttatggacgattgattgg

SEQ ID NO: 66006 - DNA, 25 bp, Probe sequence
tagcgaagccattcaatacgaagta

SEQ ID NO: 66007 - DNA, 25 bp, Probe sequence
catagcgaagccattcaatacgaag

SEQ ID NO: 66008 - DNA, 25 bp, Probe sequence
ttcctccaatcaatcgtccataaga

SEQ ID NO: 66009 - DNA, 25 bp, Probe sequence
gttcctccaatcaatcgtccataag

SEQ ID NO: 66010 - DNA, 25 bp, Probe sequence
aatcaatcgtccataagacaactct

SEQ ID NO: 66011 - DNA, 25 bp, Probe sequence
caatcaatcgtccataagacaactc

SEQ ID NO: 66012 - DNA, 25 bp, Probe sequence
ctccaatcaatcgtccataagacaa

SEQ ID NO: 66013 - DNA, 25 bp, Probe sequence
ccaatcaatcgtccataagacaact

SEQ ID NO: 66014 - DNA, 25 bp, Probe sequence
tccaatcaatcgtccataagacaac

SEQ ID NO: 66015 - DNA, 25 bp, Probe sequence
tacttcgtattgaatggcttcgcta

SEQ ID NO: 66016 - DNA, 25 bp, Probe sequence
cttcgtattgaatggcttcgctatg

SEQ ID NO: 66017 - DNA, 25 bp, Probe sequence
tgtgttgtgctataattacgataac

SEQ ID NO: 66018 - DNA, 25 bp, Probe sequence
acgattcttctatgtaaataggctg

SEQ ID NO: 66019 - DNA, 25 bp, Probe sequence
ttgtgttgtgctataattacgataa

SEQ ID NO: 66020 - DNA, 25 bp, Probe sequence
cgattcttctatgtaaataggctga

SEQ ID NO: 66021 - DNA, 25 bp, Probe sequence
aagagtctttaattgagcgtccaga

SEQ ID NO: 66022 - DNA, 25 bp, Probe sequence
gtctttaattgagcgtccagagaga

SEQ ID NO: 66023 - DNA, 25 bp, Probe sequence
agtctttaattgagcgtccagagag

SEQ ID NO: 66024 - DNA, 25 bp, Probe sequence
gagtctttaattgagcgtccagaga

SEQ ID NO: 66025 - DNA, 25 bp, Probe sequence
agagtctttaattgagcgtccagag

SEQ ID NO: 66026 - DNA, 25 bp, Probe sequence
gttatcgtaattatagcacaacaca

SEQ ID NO: 66027 - DNA, 25 bp, Probe sequence
cagcctatttacatagaagaatcgt

SEQ ID NO: 66028 - DNA, 25 bp, Probe sequence
ttatcgtaattatagcacaacacaa

SEQ ID NO: 66029 - DNA, 25 bp, Probe sequence
tcagcctatttacatagaagaatcg

SEQ ID NO: 66030 - DNA, 25 bp, Probe sequence
tctggacgctcaattaaagactctt

SEQ ID NO: 66031 - DNA, 25 bp, Probe sequence
ctctggacgctcaattaaagactct

SEQ ID NO: 66032 - DNA, 25 bp, Probe sequence
tctctggacgctcaattaaagactc

SEQ ID NO: 66033 - DNA, 25 bp, Probe sequence
ctctctggacgctcaattaaagact

SEQ ID NO: 66034 - DNA, 25 bp, Probe sequence
tctctctggacgctcaattaaagac

SEQ ID NO: 66035 - DNA, 25 bp, Probe sequence
cctcatgttcgacaactataagtca

SEQ ID NO: 66036 - DNA, 25 bp, Probe sequence
ctcatgttcgacaactataagtcaa

SEQ ID NO: 66037 - DNA, 25 bp, Probe sequence
tcatgttcgacaactataagtcaat

SEQ ID NO: 66038 - DNA, 25 bp, Probe sequence
catgttcgacaactataagtcaatt

SEQ ID NO: 66039 - DNA, 25 bp, Probe sequence
gacttgtagcaacttgtcacacttt

SEQ ID NO: 66040 - DNA, 25 bp, Probe sequence
taccctcatgttcgacaactataag

SEQ ID NO: 66041 - DNA, 25 bp, Probe sequence
aataataccctcatgttcgacaact

SEQ ID NO: 66042 - DNA, 25 bp, Probe sequence
ataccctcatgttcgacaactataa

SEQ ID NO: 66043 - DNA, 25 bp, Probe sequence
aataccctcatgttcgacaactata

SEQ ID NO: 66044 - DNA, 25 bp, Probe sequence
tgacttatagttgtcgaacatgagg

SEQ ID NO: 66045 - DNA, 25 bp, Probe sequence
ttgacttatagttgtcgaacatgag

SEQ ID NO: 66046 - DNA, 25 bp, Probe sequence
attgacttatagttgtcgaacatga

SEQ ID NO: 66047 - DNA, 25 bp, Probe sequence
aattgacttatagttgtcgaacatg

SEQ ID NO: 66048 - DNA, 25 bp, Probe sequence
aaagtgtgacaagttgctacaagtc

SEQ ID NO: 66049 - DNA, 25 bp, Probe sequence
agttgtcgaacatgagggtattatt

SEQ ID NO: 66050 - DNA, 25 bp, Probe sequence
cttatagttgtcgaacatgagggta

SEQ ID NO: 66051 - DNA, 25 bp, Probe sequence
tagttgtcgaacatgagggtattat

SEQ ID NO: 66052 - DNA, 25 bp, Probe sequence
atagttgtcgaacatgagggtatta

SEQ ID NO: 66053 - DNA, 25 bp, Probe sequence
aagaagtttatattacagcctcatt

SEQ ID NO: 66054 - DNA, 25 bp, Probe sequence
aaagaagtttatattacagcctcat

SEQ ID NO: 66055 - DNA, 25 bp, Probe sequence
gggctgtaattaaccatttacttaa

SEQ ID NO: 66056 - DNA, 25 bp, Probe sequence
taaagaagtttatattacagcctca

SEQ ID NO: 66057 - DNA, 25 bp, Probe sequence
agaagtttatattacagcctcatta

SEQ ID NO: 66058 - DNA, 25 bp, Probe sequence
tggggctgtaattaaccatttactt

SEQ ID NO: 66059 - DNA, 25 bp, Probe sequence
ggggctgtaattaaccatttactta

SEQ ID NO: 66060 - DNA, 25 bp, Probe sequence
gtggggctgtaattaaccatttact

SEQ ID NO: 66061 - DNA, 25 bp, Probe sequence
ggtggggctgtaattaaccatttac

SEQ ID NO: 66062 - DNA, 25 bp, Probe sequence
aatgaggctgtaatataaacttctt

SEQ ID NO: 66063 - DNA, 25 bp, Probe sequence
atgaggctgtaatataaacttcttt

SEQ ID NO: 66064 - DNA, 25 bp, Probe sequence
ttaagtaaatggttaattacagccc

SEQ ID NO: 66065 - DNA, 25 bp, Probe sequence
tgaggctgtaatataaacttcttta

SEQ ID NO: 66066 - DNA, 25 bp, Probe sequence
taatgaggctgtaatataaacttct

SEQ ID NO: 66067 - DNA, 25 bp, Probe sequence
aagtaaatggttaattacagcccca

SEQ ID NO: 66068 - DNA, 25 bp, Probe sequence
taagtaaatggttaattacagcccc

SEQ ID NO: 66069 - DNA, 25 bp, Probe sequence
agtaaatggttaattacagccccac

SEQ ID NO: 66070 - DNA, 25 bp, Probe sequence
gtaaatggttaattacagccccacc

SEQ ID NO: 66071 - DNA, 25 bp, Probe sequence
aatccaaccaattaagaatacgagt

SEQ ID NO: 66072 - DNA, 25 bp, Probe sequence
tccaaccaattaagaatacgagtaa

SEQ ID NO: 66073 - DNA, 25 bp, Probe sequence
atccaaccaattaagaatacgagta

SEQ ID NO: 66074 - DNA, 25 bp, Probe sequence
gcttaaccgcatccgaatattacaa

SEQ ID NO: 66075 - DNA, 25 bp, Probe sequence
agaagttcgatctataggaggcata

SEQ ID NO: 66076 - DNA, 25 bp, Probe sequence
ggactaatactggaatcacataatg

SEQ ID NO: 66077 - DNA, 25 bp, Probe sequence
aggactaatactggaatcacataat

SEQ ID NO: 66078 - DNA, 25 bp, Probe sequence
aataggactaatactggaatcacat

SEQ ID NO: 66079 - DNA, 25 bp, Probe sequence
ccaaccaattaagaatacgagtaat

SEQ ID NO: 66080 - DNA, 25 bp, Probe sequence
actcgtattcttaattggttggatt

SEQ ID NO: 66081 - DNA, 25 bp, Probe sequence
ttactcgtattcttaattggttgga

SEQ ID NO: 66082 - DNA, 25 bp, Probe sequence
tactcgtattcttaattggttggat

SEQ ID NO: 66083 - DNA, 25 bp, Probe sequence
ttgtaatattcggatgcggttaagc

SEQ ID NO: 66084 - DNA, 25 bp, Probe sequence
tatgcctcctatagatcgaacttct

SEQ ID NO: 66085 - DNA, 25 bp, Probe sequence
cattatgtgattccagtattagtcc

SEQ ID NO: 66086 - DNA, 25 bp, Probe sequence
atgtgattccagtattagtcctatt

SEQ ID NO: 66087 - DNA, 25 bp, Probe sequence
attatgtgattccagtattagtcct

SEQ ID NO: 66088 - DNA, 25 bp, Probe sequence
attactcgtattcttaattggttgg

SEQ ID NO: 66089 - DNA, 25 bp, Probe sequence
agcgttgaatgataaagaaacactt

SEQ ID NO: 66090 - DNA, 25 bp, Probe sequence
cagcgttgaatgataaagaaacact

SEQ ID NO: 66091 - DNA, 25 bp, Probe sequence
acagcgttgaatgataaagaaacac

SEQ ID NO: 66092 - DNA, 25 bp, Probe sequence
cacagcgttgaatgataaagaaaca

SEQ ID NO: 66093 - DNA, 25 bp, Probe sequence
gcacagcgttgaatgataaagaaac

SEQ ID NO: 66094 - DNA, 25 bp, Probe sequence
gcgttgaatgataaagaaacacttt

SEQ ID NO: 66095 - DNA, 25 bp, Probe sequence
catgcgttttacctatgtatttcta

SEQ ID NO: 66096 - DNA, 25 bp, Probe sequence
tgcgttttacctatgtatttctatt

SEQ ID NO: 66097 - DNA, 25 bp, Probe sequence
atgcgttttacctatgtatttctat

SEQ ID NO: 66098 - DNA, 25 bp, Probe sequence
aagtgtttctttatcattcaacgct

SEQ ID NO: 66099 - DNA, 25 bp, Probe sequence
agtgtttctttatcattcaacgctg

SEQ ID NO: 66100 - DNA, 25 bp, Probe sequence
tgtttctttatcattcaacgctgtg

SEQ ID NO: 66101 - DNA, 25 bp, Probe sequence
gtgtttctttatcattcaacgctgt

SEQ ID NO: 66102 - DNA, 25 bp, Probe sequence
gtttctttatcattcaacgctgtgc

SEQ ID NO: 66103 - DNA, 25 bp, Probe sequence
aaagtgtttctttatcattcaacgc

SEQ ID NO: 66104 - DNA, 25 bp, Probe sequence
tagaaatacataggtaaaacgcatg

SEQ ID NO: 66105 - DNA, 25 bp, Probe sequence
aatagaaatacataggtaaaacgca

SEQ ID NO: 66106 - DNA, 25 bp, Probe sequence
atagaaatacataggtaaaacgcat

SEQ ID NO: 66107 - DNA, 25 bp, Probe sequence
cttatggtgaggtgtttatttgtcg

SEQ ID NO: 66108 - DNA, 25 bp, Probe sequence
tcttatggtgaggtgtttatttgtc

SEQ ID NO: 66109 - DNA, 25 bp, Probe sequence
ttcttatggtgaggtgtttatttgt

SEQ ID NO: 66110 - DNA, 25 bp, Probe sequence
tcctttcttatggtgaggtgtttat

SEQ ID NO: 66111 - DNA, 25 bp, Probe sequence
gtcctttcttatggtgaggtgttta

SEQ ID NO: 66112 - DNA, 25 bp, Probe sequence
tttcttatggtgaggtgtttatttg

SEQ ID NO: 66113 - DNA, 25 bp, Probe sequence
aagtagtcctttcttatggtgaggt

SEQ ID NO: 66114 - DNA, 25 bp, Probe sequence
cctttcttatggtgaggtgtttatt

SEQ ID NO: 66115 - DNA, 25 bp, Probe sequence
ctttcttatggtgaggtgtttattt

SEQ ID NO: 66116 - DNA, 25 bp, Probe sequence
cgacaaataaacacctcaccataag

SEQ ID NO: 66117 - DNA, 25 bp, Probe sequence
gacaaataaacacctcaccataaga

SEQ ID NO: 66118 - DNA, 25 bp, Probe sequence
acaaataaacacctcaccataagaa

SEQ ID NO: 66119 - DNA, 25 bp, Probe sequence
taaacacctcaccataagaaaggac

SEQ ID NO: 66120 - DNA, 25 bp, Probe sequence
ataaacacctcaccataagaaagga

SEQ ID NO: 66121 - DNA, 25 bp, Probe sequence
caaataaacacctcaccataagaaa

SEQ ID NO: 66122 - DNA, 25 bp, Probe sequence
acctcaccataagaaaggactactt

SEQ ID NO: 66123 - DNA, 25 bp, Probe sequence
aataaacacctcaccataagaaagg

SEQ ID NO: 66124 - DNA, 25 bp, Probe sequence
aacacctcaccataagaaaggacta

SEQ ID NO: 66125 - DNA, 25 bp, Probe sequence
ttccaccttcttcatatcattcgtt

SEQ ID NO: 66126 - DNA, 25 bp, Probe sequence
tcttccaccttcttcatatcattcg

SEQ ID NO: 66127 - DNA, 25 bp, Probe sequence
cttccaccttcttcatatcattcgt

SEQ ID NO: 66128 - DNA, 25 bp, Probe sequence
atcttccaccttcttcatatcattc

SEQ ID NO: 66129 - DNA, 25 bp, Probe sequence
tattgaaccatacattatgccacac

SEQ ID NO: 66130 - DNA, 25 bp, Probe sequence
tgaaccatacattatgccacacatt

SEQ ID NO: 66131 - DNA, 25 bp, Probe sequence
ttgaaccatacattatgccacacat

SEQ ID NO: 66132 - DNA, 25 bp, Probe sequence
attgaaccatacattatgccacaca

SEQ ID NO: 66133 - DNA, 25 bp, Probe sequence
ttattgaaccatacattatgccaca

SEQ ID NO: 66134 - DNA, 25 bp, Probe sequence
aacgaatgatatgaagaaggtggaa

SEQ ID NO: 66135 - DNA, 25 bp, Probe sequence
cgaatgatatgaagaaggtggaaga

SEQ ID NO: 66136 - DNA, 25 bp, Probe sequence
acgaatgatatgaagaaggtggaag

SEQ ID NO: 66137 - DNA, 25 bp, Probe sequence
gaatgatatgaagaaggtggaagat

SEQ ID NO: 66138 - DNA, 25 bp, Probe sequence
gtgtggcataatgtatggttcaata

SEQ ID NO: 66139 - DNA, 25 bp, Probe sequence
tgtgtggcataatgtatggttcaat

SEQ ID NO: 66140 - DNA, 25 bp, Probe sequence
atgtgtggcataatgtatggttcaa

SEQ ID NO: 66141 - DNA, 25 bp, Probe sequence
aatgtgtggcataatgtatggttca

SEQ ID NO: 66142 - DNA, 25 bp, Probe sequence
tgtggcataatgtatggttcaataa

SEQ ID NO: 66143 - DNA, 25 bp, Probe sequence
tatccaaatcaaacgcacctatgta

SEQ ID NO: 66144 - DNA, 25 bp, Probe sequence
atatccaaatcaaacgcacctatgt

SEQ ID NO: 66145 - DNA, 25 bp, Probe sequence
atccaaatcaaacgcacctatgtag

SEQ ID NO: 66146 - DNA, 25 bp, Probe sequence
atgatgatgtaaagcgtaaatgtca

SEQ ID NO: 66147 - DNA, 25 bp, Probe sequence
gatgtaaagcgtaaatgtcatagtg

SEQ ID NO: 66148 - DNA, 25 bp, Probe sequence
gcatatccaaatcaaacgcacctat

SEQ ID NO: 66149 - DNA, 25 bp, Probe sequence
tgtaaagcgtaaatgtcatagtgat

SEQ ID NO: 66150 - DNA, 25 bp, Probe sequence
atgtaaagcgtaaatgtcatagtga

SEQ ID NO: 66151 - DNA, 25 bp, Probe sequence
tgatgtaaagcgtaaatgtcatagt

SEQ ID NO: 66152 - DNA, 25 bp, Probe sequence
tacataggtgcgtttgatttggata

SEQ ID NO: 66153 - DNA, 25 bp, Probe sequence
acataggtgcgtttgatttggatat

SEQ ID NO: 66154 - DNA, 25 bp, Probe sequence
ctacataggtgcgtttgatttggat

SEQ ID NO: 66155 - DNA, 25 bp, Probe sequence
tgacatttacgctttacatcatcat

SEQ ID NO: 66156 - DNA, 25 bp, Probe sequence
cactatgacatttacgctttacatc

SEQ ID NO: 66157 - DNA, 25 bp, Probe sequence
ataggtgcgtttgatttggatatgc

SEQ ID NO: 66158 - DNA, 25 bp, Probe sequence
actatgacatttacgctttacatca

SEQ ID NO: 66159 - DNA, 25 bp, Probe sequence
tcactatgacatttacgctttacat

SEQ ID NO: 66160 - DNA, 25 bp, Probe sequence
atcactatgacatttacgctttaca

SEQ ID NO: 66161 - DNA, 25 bp, Probe sequence
cgagtatttgaaccagtgtttgaat

SEQ ID NO: 66162 - DNA, 25 bp, Probe sequence
tacgagtatttgaaccagtgtttga

SEQ ID NO: 66163 - DNA, 25 bp, Probe sequence
aacaagttcagtatgtacgagtatt

SEQ ID NO: 66164 - DNA, 25 bp, Probe sequence
acgagtatttgaaccagtgtttgaa

SEQ ID NO: 66165 - DNA, 25 bp, Probe sequence
tatgtacgagtatttgaaccagtgt

SEQ ID NO: 66166 - DNA, 25 bp, Probe sequence
gtatgtacgagtatttgaaccagtg

SEQ ID NO: 66167 - DNA, 25 bp, Probe sequence
agtatgtacgagtatttgaaccagt

SEQ ID NO: 66168 - DNA, 25 bp, Probe sequence
cagtatgtacgagtatttgaaccag

SEQ ID NO: 66169 - DNA, 25 bp, Probe sequence
gtacgagtatttgaaccagtgtttg

SEQ ID NO: 66170 - DNA, 25 bp, Probe sequence
attcaaacactggttcaaatactcg

SEQ ID NO: 66171 - DNA, 25 bp, Probe sequence
tcaaacactggttcaaatactcgta

SEQ ID NO: 66172 - DNA, 25 bp, Probe sequence
aatactcgtacatactgaacttgtt

SEQ ID NO: 66173 - DNA, 25 bp, Probe sequence
ttcaaacactggttcaaatactcgt

SEQ ID NO: 66174 - DNA, 25 bp, Probe sequence
acactggttcaaatactcgtacata

SEQ ID NO: 66175 - DNA, 25 bp, Probe sequence
actggttcaaatactcgtacatact

SEQ ID NO: 66176 - DNA, 25 bp, Probe sequence
cactggttcaaatactcgtacatac

SEQ ID NO: 66177 - DNA, 25 bp, Probe sequence
ctggttcaaatactcgtacatactg

SEQ ID NO: 66178 - DNA, 25 bp, Probe sequence
caaacactggttcaaatactcgtac

SEQ ID NO: 66179 - DNA, 25 bp, Probe sequence
aatcccgataaacaatcagcattac

SEQ ID NO: 66180 - DNA, 25 bp, Probe sequence
atcccgataaacaatcagcattact

SEQ ID NO: 66181 - DNA, 25 bp, Probe sequence
ataatcccgataaacaatcagcatt

SEQ ID NO: 66182 - DNA, 25 bp, Probe sequence
aataatcccgataaacaatcagcat

SEQ ID NO: 66183 - DNA, 25 bp, Probe sequence
actgcttatcatatagagttcgtaa

SEQ ID NO: 66184 - DNA, 25 bp, Probe sequence
ttactgcttatcatatagagttcgt

SEQ ID NO: 66185 - DNA, 25 bp, Probe sequence
taataatcccgataaacaatcagca

SEQ ID NO: 66186 - DNA, 25 bp, Probe sequence
cgcaataataatcccgataaacaat

SEQ ID NO: 66187 - DNA, 25 bp, Probe sequence
taatcccgataaacaatcagcatta

SEQ ID NO: 66188 - DNA, 25 bp, Probe sequence
gtaatgctgattgtttatcgggatt

SEQ ID NO: 66189 - DNA, 25 bp, Probe sequence
agtaatgctgattgtttatcgggat

SEQ ID NO: 66190 - DNA, 25 bp, Probe sequence
atgctgattgtttatcgggattatt

SEQ ID NO: 66191 - DNA, 25 bp, Probe sequence
aatgctgattgtttatcgggattat

SEQ ID NO: 66192 - DNA, 25 bp, Probe sequence
acgaactctatatgataagcagtaa

SEQ ID NO: 66193 - DNA, 25 bp, Probe sequence
ttacgaactctatatgataagcagt

SEQ ID NO: 66194 - DNA, 25 bp, Probe sequence
tgctgattgtttatcgggattatta

SEQ ID NO: 66195 - DNA, 25 bp, Probe sequence
attgtttatcgggattattattgcg

SEQ ID NO: 66196 - DNA, 25 bp, Probe sequence
taatgctgattgtttatcgggatta

SEQ ID NO: 66197 - DNA, 25 bp, Probe sequence
cgtaatgaatcacatgacaatcttc

SEQ ID NO: 66198 - DNA, 25 bp, Probe sequence
ttaggattacacttcagttgcattg

SEQ ID NO: 66199 - DNA, 25 bp, Probe sequence
cattctatgatgtaaggtcgcattt

SEQ ID NO: 66200 - DNA, 25 bp, Probe sequence
acgtaatgaatcacatgacaatctt

SEQ ID NO: 66201 - DNA, 25 bp, Probe sequence
taggattacacttcagttgcattgt

SEQ ID NO: 66202 - DNA, 25 bp, Probe sequence
acattctatgatgtaaggtcgcatt

SEQ ID NO: 66203 - DNA, 25 bp, Probe sequence
ggattacacttcagttgcattgtat

SEQ ID NO: 66204 - DNA, 25 bp, Probe sequence
aggattacacttcagttgcattgta

SEQ ID NO: 66205 - DNA, 25 bp, Probe sequence
tttaggattacacttcagttgcatt

SEQ ID NO: 66206 - DNA, 25 bp, Probe sequence
gaagattgtcatgtgattcattacg

SEQ ID NO: 66207 - DNA, 25 bp, Probe sequence
caatgcaactgaagtgtaatcctaa

SEQ ID NO: 66208 - DNA, 25 bp, Probe sequence
aaatgcgaccttacatcatagaatg

SEQ ID NO: 66209 - DNA, 25 bp, Probe sequence
aagattgtcatgtgattcattacgt

SEQ ID NO: 66210 - DNA, 25 bp, Probe sequence
acaatgcaactgaagtgtaatccta

SEQ ID NO: 66211 - DNA, 25 bp, Probe sequence
aatgcgaccttacatcatagaatgt

SEQ ID NO: 66212 - DNA, 25 bp, Probe sequence
tacaatgcaactgaagtgtaatcct

SEQ ID NO: 66213 - DNA, 25 bp, Probe sequence
atacaatgcaactgaagtgtaatcc

SEQ ID NO: 66214 - DNA, 25 bp, Probe sequence
tgcaactgaagtgtaatcctaaatt

SEQ ID NO: 66215 - DNA, 25 bp, Probe sequence
tctatcaattctgtatcactctcac

SEQ ID NO: 66216 - DNA, 25 bp, Probe sequence
gtctatcaattctgtatcactctca

SEQ ID NO: 66217 - DNA, 25 bp, Probe sequence
tgtctatcaattctgtatcactctc

SEQ ID NO: 66218 - DNA, 25 bp, Probe sequence
atcaattctgtatcactctcacaat

SEQ ID NO: 66219 - DNA, 25 bp, Probe sequence
ctatcaattctgtatcactctcaca

SEQ ID NO: 66220 - DNA, 25 bp, Probe sequence
ggtttctatttggaagtctcggtat

SEQ ID NO: 66221 - DNA, 25 bp, Probe sequence
ttgtctatcaattctgtatcactct

SEQ ID NO: 66222 - DNA, 25 bp, Probe sequence
tcaattctgtatcactctcacaata

SEQ ID NO: 66223 - DNA, 25 bp, Probe sequence
tatcaattctgtatcactctcacaa

SEQ ID NO: 66224 - DNA, 25 bp, Probe sequence
gagagtgatacagaattgatagaca

SEQ ID NO: 66225 - DNA, 25 bp, Probe sequence
tgagagtgatacagaattgatagac

SEQ ID NO: 66226 - DNA, 25 bp, Probe sequence
gtgagagtgatacagaattgataga

SEQ ID NO: 66227 - DNA, 25 bp, Probe sequence
attgtgagagtgatacagaattgat

SEQ ID NO: 66228 - DNA, 25 bp, Probe sequence
tgtgagagtgatacagaattgatag

SEQ ID NO: 66229 - DNA, 25 bp, Probe sequence
ataccgagacttccaaatagaaacc

SEQ ID NO: 66230 - DNA, 25 bp, Probe sequence
agagtgatacagaattgatagacaa

SEQ ID NO: 66231 - DNA, 25 bp, Probe sequence
ttgtgagagtgatacagaattgata

SEQ ID NO: 66232 - DNA, 25 bp, Probe sequence
tattgtgagagtgatacagaattga

SEQ ID NO: 66233 - DNA, 25 bp, Probe sequence
ggcgtgatttattattggaaggaaa

SEQ ID NO: 66234 - DNA, 25 bp, Probe sequence
atggcgtgatttattattggaagga

SEQ ID NO: 66235 - DNA, 25 bp, Probe sequence
tggcgtgatttattattggaaggaa

SEQ ID NO: 66236 - DNA, 25 bp, Probe sequence
tatggcgtgatttattattggaagg

SEQ ID NO: 66237 - DNA, 25 bp, Probe sequence
tccaatttgacagagaaccattatt

SEQ ID NO: 66238 - DNA, 25 bp, Probe sequence
agtccaatttgacagagaaccatta

SEQ ID NO: 66239 - DNA, 25 bp, Probe sequence
taagtccaatttgacagagaaccat

SEQ ID NO: 66240 - DNA, 25 bp, Probe sequence
ataagtccaatttgacagagaacca

SEQ ID NO: 66241 - DNA, 25 bp, Probe sequence
cataagtccaatttgacagagaacc

SEQ ID NO: 66242 - DNA, 25 bp, Probe sequence
tttccttccaataataaatcacgcc

SEQ ID NO: 66243 - DNA, 25 bp, Probe sequence
tccttccaataataaatcacgccat

SEQ ID NO: 66244 - DNA, 25 bp, Probe sequence
ccttccaataataaatcacgccata

SEQ ID NO: 66245 - DNA, 25 bp, Probe sequence
ttccttccaataataaatcacgcca

SEQ ID NO: 66246 - DNA, 25 bp, Probe sequence
aataatggttctctgtcaaattgga

SEQ ID NO: 66247 - DNA, 25 bp, Probe sequence
gttctctgtcaaattggacttatgg

SEQ ID NO: 66248 - DNA, 25 bp, Probe sequence
ggttctctgtcaaattggacttatg

SEQ ID NO: 66249 - DNA, 25 bp, Probe sequence
tggttctctgtcaaattggacttat

SEQ ID NO: 66250 - DNA, 25 bp, Probe sequence
atggttctctgtcaaattggactta

SEQ ID NO: 66251 - DNA, 25 bp, Probe sequence
agcgtaagtcattctgataagttgt

SEQ ID NO: 66252 - DNA, 25 bp, Probe sequence
aagcgtaagtcattctgataagttg

SEQ ID NO: 66253 - DNA, 25 bp, Probe sequence
gcgtaagtcattctgataagttgta

SEQ ID NO: 66254 - DNA, 25 bp, Probe sequence
taagcgtaagtcattctgataagtt

SEQ ID NO: 66255 - DNA, 25 bp, Probe sequence
ttaagcgtaagtcattctgataagt

SEQ ID NO: 66256 - DNA, 25 bp, Probe sequence
tcattctgataagttgtaccattga

SEQ ID NO: 66257 - DNA, 25 bp, Probe sequence
gtcattctgataagttgtaccattg

SEQ ID NO: 66258 - DNA, 25 bp, Probe sequence
agtcattctgataagttgtaccatt

SEQ ID NO: 66259 - DNA, 25 bp, Probe sequence
aagtcattctgataagttgtaccat

SEQ ID NO: 66260 - DNA, 25 bp, Probe sequence
acaacttatcagaatgacttacgct

SEQ ID NO: 66261 - DNA, 25 bp, Probe sequence
caacttatcagaatgacttacgctt

SEQ ID NO: 66262 - DNA, 25 bp, Probe sequence
tacaacttatcagaatgacttacgc

SEQ ID NO: 66263 - DNA, 25 bp, Probe sequence
acttatcagaatgacttacgcttaa

SEQ ID NO: 66264 - DNA, 25 bp, Probe sequence
aacttatcagaatgacttacgctta

SEQ ID NO: 66265 - DNA, 25 bp, Probe sequence
caatggtacaacttatcagaatgac

SEQ ID NO: 66266 - DNA, 25 bp, Probe sequence
tcaatggtacaacttatcagaatga

SEQ ID NO: 66267 - DNA, 25 bp, Probe sequence
atggtacaacttatcagaatgactt

SEQ ID NO: 66268 - DNA, 25 bp, Probe sequence
aatggtacaacttatcagaatgact

SEQ ID NO: 66269 - DNA, 25 bp, Probe sequence
acaatgtcatgttcaacttagtcat

SEQ ID NO: 66270 - DNA, 25 bp, Probe sequence
ttgctaacaatgtcatgttcaactt

SEQ ID NO: 66271 - DNA, 25 bp, Probe sequence
gagttgctaacaatgtcatgttcaa

SEQ ID NO: 66272 - DNA, 25 bp, Probe sequence
tgctaacaatgtcatgttcaactta

SEQ ID NO: 66273 - DNA, 25 bp, Probe sequence
aacaatgtcatgttcaacttagtca

SEQ ID NO: 66274 - DNA, 25 bp, Probe sequence
gctaacaatgtcatgttcaacttag

SEQ ID NO: 66275 - DNA, 25 bp, Probe sequence
caatgtcatgttcaacttagtcatg

SEQ ID NO: 66276 - DNA, 25 bp, Probe sequence
gttgctaacaatgtcatgttcaact

SEQ ID NO: 66277 - DNA, 25 bp, Probe sequence
agttgctaacaatgtcatgttcaac

SEQ ID NO: 66278 - DNA, 25 bp, Probe sequence
atgactaagttgaacatgacattgt

SEQ ID NO: 66279 - DNA, 25 bp, Probe sequence
aagttgaacatgacattgttagcaa

SEQ ID NO: 66280 - DNA, 25 bp, Probe sequence
ttgaacatgacattgttagcaactc

SEQ ID NO: 66281 - DNA, 25 bp, Probe sequence
taagttgaacatgacattgttagca

SEQ ID NO: 66282 - DNA, 25 bp, Probe sequence
tgactaagttgaacatgacattgtt

SEQ ID NO: 66283 - DNA, 25 bp, Probe sequence
ctaagttgaacatgacattgttagc

SEQ ID NO: 66284 - DNA, 25 bp, Probe sequence
catgactaagttgaacatgacattg

SEQ ID NO: 66285 - DNA, 25 bp, Probe sequence
gttgaacatgacattgttagcaact

SEQ ID NO: 66286 - DNA, 25 bp, Probe sequence
agttgaacatgacattgttagcaac

SEQ ID NO: 66287 - DNA, 25 bp, Probe sequence
agtgttatgatatgtgaggaatgtt

SEQ ID NO: 66288 - DNA, 25 bp, Probe sequence
aagtgttatgatatgtgaggaatgt

SEQ ID NO: 66289 - DNA, 25 bp, Probe sequence
acttcgttaattgagtgatatgaca

SEQ ID NO: 66290 - DNA, 25 bp, Probe sequence
cttcgttaattgagtgatatgacac

SEQ ID NO: 66291 - DNA, 25 bp, Probe sequence
gttgagtcggttaaatagaaagtgt

SEQ ID NO: 66292 - DNA, 25 bp, Probe sequence
tgttgagtcggttaaatagaaagtg

SEQ ID NO: 66293 - DNA, 25 bp, Probe sequence
atgtgaggaatgtttaagactaggt

SEQ ID NO: 66294 - DNA, 25 bp, Probe sequence
ttgagtcggttaaatagaaagtgtt

SEQ ID NO: 66295 - DNA, 25 bp, Probe sequence
ttgttgagtcggttaaatagaaagt

SEQ ID NO: 66296 - DNA, 25 bp, Probe sequence
acattcctcacatatcataacactt

SEQ ID NO: 66297 - DNA, 25 bp, Probe sequence
aacattcctcacatatcataacact

SEQ ID NO: 66298 - DNA, 25 bp, Probe sequence
tgtcatatcactcaattaacgaagt

SEQ ID NO: 66299 - DNA, 25 bp, Probe sequence
gtgtcatatcactcaattaacgaag

SEQ ID NO: 66300 - DNA, 25 bp, Probe sequence
cactttctatttaaccgactcaaca

SEQ ID NO: 66301 - DNA, 25 bp, Probe sequence
acactttctatttaaccgactcaac

SEQ ID NO: 66302 - DNA, 25 bp, Probe sequence
acctagtcttaaacattcctcacat

SEQ ID NO: 66303 - DNA, 25 bp, Probe sequence
actttctatttaaccgactcaacaa

SEQ ID NO: 66304 - DNA, 25 bp, Probe sequence
aacactttctatttaaccgactcaa

SEQ ID NO: 66305 - DNA, 25 bp, Probe sequence
ttgataagaagattagaggaacgct

SEQ ID NO: 66306 - DNA, 25 bp, Probe sequence
taagaagattagaggaacgcttgag

SEQ ID NO: 66307 - DNA, 25 bp, Probe sequence
ataagaagattagaggaacgcttga

SEQ ID NO: 66308 - DNA, 25 bp, Probe sequence
tgataagaagattagaggaacgctt

SEQ ID NO: 66309 - DNA, 25 bp, Probe sequence
gataagaagattagaggaacgcttg

SEQ ID NO: 66310 - DNA, 25 bp, Probe sequence
attgataagaagattagaggaacgc

SEQ ID NO: 66311 - DNA, 25 bp, Probe sequence
ctcaagataaagacgcagaaatcaa

SEQ ID NO: 66312 - DNA, 25 bp, Probe sequence
ctcaagataaagacgcagtaatcaa

SEQ ID NO: 66313 - DNA, 25 bp, Probe sequence
tcaagataaagacgcagaaatcaat

SEQ ID NO: 66314 - DNA, 25 bp, Probe sequence
agcgttcctctaatcttcttatcaa

SEQ ID NO: 66315 - DNA, 25 bp, Probe sequence
ctcaagcgttcctctaatcttctta

SEQ ID NO: 66316 - DNA, 25 bp, Probe sequence
aagcgttcctctaatcttcttatca

SEQ ID NO: 66317 - DNA, 25 bp, Probe sequence
tcaagcgttcctctaatcttcttat

SEQ ID NO: 66318 - DNA, 25 bp, Probe sequence
caagcgttcctctaatcttcttatc

SEQ ID NO: 66319 - DNA, 25 bp, Probe sequence
gcgttcctctaatcttcttatcaat

SEQ ID NO: 66320 - DNA, 25 bp, Probe sequence
ttgatttctgcgtctttatcttgag

SEQ ID NO: 66321 - DNA, 25 bp, Probe sequence
ttgattactgcgtctttatcttgag

SEQ ID NO: 66322 - DNA, 25 bp, Probe sequence
attgatttctgcgtctttatcttga

SEQ ID NO: 66323 - DNA, 25 bp, Probe sequence
aagatgattcaagagcaacacataa

SEQ ID NO: 66324 - DNA, 25 bp, Probe sequence
gattcaagagcaacacataaaggag

SEQ ID NO: 66325 - DNA, 25 bp, Probe sequence
tcaagagcaacacataaaggagata

SEQ ID NO: 66326 - DNA, 25 bp, Probe sequence
ttcaagagcaacacataaaggagat

SEQ ID NO: 66327 - DNA, 25 bp, Probe sequence
attcaagagcaacacataaaggaga

SEQ ID NO: 66328 - DNA, 25 bp, Probe sequence
caagagcaacacataaaggagataa

SEQ ID NO: 66329 - DNA, 25 bp, Probe sequence
tgattcaagagcaacacataaagga

SEQ ID NO: 66330 - DNA, 25 bp, Probe sequence
ttaaagatgattcaagagcaacaca

SEQ ID NO: 66331 - DNA, 25 bp, Probe sequence
atgattcaagagcaacacataaagg

SEQ ID NO: 66332 - DNA, 25 bp, Probe sequence
ttatgtgttgctcttgaatcatctt

SEQ ID NO: 66333 - DNA, 25 bp, Probe sequence
ctcctttatgtgttgctcttgaatc

SEQ ID NO: 66334 - DNA, 25 bp, Probe sequence
tatctcctttatgtgttgctcttga

SEQ ID NO: 66335 - DNA, 25 bp, Probe sequence
tctcctttatgtgttgctcttgaat

SEQ ID NO: 66336 - DNA, 25 bp, Probe sequence
atctcctttatgtgttgctcttgaa

SEQ ID NO: 66337 - DNA, 25 bp, Probe sequence
ttatctcctttatgtgttgctcttg

SEQ ID NO: 66338 - DNA, 25 bp, Probe sequence
tcctttatgtgttgctcttgaatca

SEQ ID NO: 66339 - DNA, 25 bp, Probe sequence
tgtgttgctcttgaatcatctttaa

SEQ ID NO: 66340 - DNA, 25 bp, Probe sequence
cctttatgtgttgctcttgaatcat

SEQ ID NO: 66341 - DNA, 25 bp, Probe sequence
taggtggtgaaggctactatgaatt

SEQ ID NO: 66342 - DNA, 25 bp, Probe sequence
gtaccattcatgtccttacgagata

SEQ ID NO: 66343 - DNA, 25 bp, Probe sequence
taccattcatgtccttacgagataa

SEQ ID NO: 66344 - DNA, 25 bp, Probe sequence
actctttacaaacattcatacacct

SEQ ID NO: 66345 - DNA, 25 bp, Probe sequence
ctctttacaaacattcatacacctg

SEQ ID NO: 66346 - DNA, 25 bp, Probe sequence
accattcatgtccttacgagataaa

SEQ ID NO: 66347 - DNA, 25 bp, Probe sequence
gcatcccgaaagttatactaaagaa

SEQ ID NO: 66348 - DNA, 25 bp, Probe sequence
aggtggtgaaggctactatgaattt

SEQ ID NO: 66349 - DNA, 25 bp, Probe sequence
attaacttaacacgtaggtggtgaa

SEQ ID NO: 66350 - DNA, 25 bp, Probe sequence
aattcatagtagccttcaccaccta

SEQ ID NO: 66351 - DNA, 25 bp, Probe sequence
tatctcgtaaggacatgaatggtac

SEQ ID NO: 66352 - DNA, 25 bp, Probe sequence
ttatctcgtaaggacatgaatggta

SEQ ID NO: 66353 - DNA, 25 bp, Probe sequence
aggtgtatgaatgtttgtaaagagt

SEQ ID NO: 66354 - DNA, 25 bp, Probe sequence
caggtgtatgaatgtttgtaaagag

SEQ ID NO: 66355 - DNA, 25 bp, Probe sequence
tttatctcgtaaggacatgaatggt

SEQ ID NO: 66356 - DNA, 25 bp, Probe sequence
ttctttagtataactttcgggatgc

SEQ ID NO: 66357 - DNA, 25 bp, Probe sequence
aaattcatagtagccttcaccacct

SEQ ID NO: 66358 - DNA, 25 bp, Probe sequence
tcaccacctacgtgttaagttaatt

SEQ ID NO: 66359 - DNA, 25 bp, Probe sequence
aaagcatagagttggaggtaataga

SEQ ID NO: 66360 - DNA, 25 bp, Probe sequence
ctgacagttattactcaatgatacg

SEQ ID NO: 66361 - DNA, 25 bp, Probe sequence
aagaataactcgtttacactgacag

SEQ ID NO: 66362 - DNA, 25 bp, Probe sequence
ttcaaagcatagagttggaggtaat

SEQ ID NO: 66363 - DNA, 25 bp, Probe sequence
gttcaaagcatagagttggaggtaa

SEQ ID NO: 66364 - DNA, 25 bp, Probe sequence
acactgacagttattactcaatgat

SEQ ID NO: 66365 - DNA, 25 bp, Probe sequence
tcaaagcatagagttggaggtaata

SEQ ID NO: 66366 - DNA, 25 bp, Probe sequence
tagaagtgttcaaagcatagagttg

SEQ ID NO: 66367 - DNA, 25 bp, Probe sequence
caaagcatagagttggaggtaatag

SEQ ID NO: 66368 - DNA, 25 bp, Probe sequence
cgtatcattgagtaataactgtcag

SEQ ID NO: 66369 - DNA, 25 bp, Probe sequence
tctattacctccaactctatgcttt

SEQ ID NO: 66370 - DNA, 25 bp, Probe sequence
ctgtcagtgtaaacgagttattctt

SEQ ID NO: 66371 - DNA, 25 bp, Probe sequence
attacctccaactctatgctttgaa

SEQ ID NO: 66372 - DNA, 25 bp, Probe sequence
ttacctccaactctatgctttgaac

SEQ ID NO: 66373 - DNA, 25 bp, Probe sequence
atcattgagtaataactgtcagtgt

SEQ ID NO: 66374 - DNA, 25 bp, Probe sequence
tattacctccaactctatgctttga

SEQ ID NO: 66375 - DNA, 25 bp, Probe sequence
caactctatgctttgaacacttcta

SEQ ID NO: 66376 - DNA, 25 bp, Probe sequence
ctattacctccaactctatgctttg

SEQ ID NO: 66377 - DNA, 25 bp, Probe sequence
aagaacataggttgaagaggagaat

SEQ ID NO: 66378 - DNA, 25 bp, Probe sequence
caagaacataggttgaagaggagaa

SEQ ID NO: 66379 - DNA, 25 bp, Probe sequence
agaacataggttgaagaggagaatt

SEQ ID NO: 66380 - DNA, 25 bp, Probe sequence
attgtgctaacatattctgagtgtg

SEQ ID NO: 66381 - DNA, 25 bp, Probe sequence
gtgctaacatattctgagtgtggaa

SEQ ID NO: 66382 - DNA, 25 bp, Probe sequence
ttgtgctaacatattctgagtgtgg

SEQ ID NO: 66383 - DNA, 25 bp, Probe sequence
tcactatgatccgctgctatatatt

SEQ ID NO: 66384 - DNA, 25 bp, Probe sequence
tgtgctaacatattctgagtgtgga

SEQ ID NO: 66385 - DNA, 25 bp, Probe sequence
gcaagaacataggttgaagaggaga

SEQ ID NO: 66386 - DNA, 25 bp, Probe sequence
attctcctcttcaacctatgttctt

SEQ ID NO: 66387 - DNA, 25 bp, Probe sequence
ttctcctcttcaacctatgttcttg

SEQ ID NO: 66388 - DNA, 25 bp, Probe sequence
aattctcctcttcaacctatgttct

SEQ ID NO: 66389 - DNA, 25 bp, Probe sequence
cacactcagaatatgttagcacaat

SEQ ID NO: 66390 - DNA, 25 bp, Probe sequence
ttccacactcagaatatgttagcac

SEQ ID NO: 66391 - DNA, 25 bp, Probe sequence
ccacactcagaatatgttagcacaa

SEQ ID NO: 66392 - DNA, 25 bp, Probe sequence
aatatatagcagcggatcatagtga

SEQ ID NO: 66393 - DNA, 25 bp, Probe sequence
tccacactcagaatatgttagcaca

SEQ ID NO: 66394 - DNA, 25 bp, Probe sequence
tctcctcttcaacctatgttcttgc

SEQ ID NO: 66395 - DNA, 25 bp, Probe sequence
tgccattgaaaaggacttagtagat

SEQ ID NO: 66396 - DNA, 25 bp, Probe sequence
atctactaagtgccattgaaaagga

SEQ ID NO: 66397 - DNA, 25 bp, Probe sequence
gtgccattgaaaaggacttagtaga

SEQ ID NO: 66398 - DNA, 25 bp, Probe sequence
tctactaagtgccattgaaaaggac

SEQ ID NO: 66399 - DNA, 25 bp, Probe sequence
aatctactaagtgccattgaaaagg

SEQ ID NO: 66400 - DNA, 25 bp, Probe sequence
gccattgaaaaggacttagtagatt

SEQ ID NO: 66401 - DNA, 25 bp, Probe sequence
agtgccattgaaaaggacttagtag

SEQ ID NO: 66402 - DNA, 25 bp, Probe sequence
ctactaagtgccattgaaaaggact

SEQ ID NO: 66403 - DNA, 25 bp, Probe sequence
aaatctactaagtgccattgaaaag

SEQ ID NO: 66404 - DNA, 25 bp, Probe sequence
tccttttcaatggcacttagtagat

SEQ ID NO: 66405 - DNA, 25 bp, Probe sequence
atctactaagtccttttcaatggca

SEQ ID NO: 66406 - DNA, 25 bp, Probe sequence
ccttttcaatggcacttagtagatt

SEQ ID NO: 66407 - DNA, 25 bp, Probe sequence
gtccttttcaatggcacttagtaga

SEQ ID NO: 66408 - DNA, 25 bp, Probe sequence
tctactaagtccttttcaatggcac

SEQ ID NO: 66409 - DNA, 25 bp, Probe sequence
aatctactaagtccttttcaatggc

SEQ ID NO: 66410 - DNA, 25 bp, Probe sequence
agtccttttcaatggcacttagtag

SEQ ID NO: 66411 - DNA, 25 bp, Probe sequence
ctactaagtccttttcaatggcact

SEQ ID NO: 66412 - DNA, 25 bp, Probe sequence
cttttcaatggcacttagtagattt

SEQ ID NO: 66413 - DNA, 25 bp, Probe sequence
tgtggaacagataccttatcatagt

SEQ ID NO: 66414 - DNA, 25 bp, Probe sequence
ataggtaaagacgaagatgactgtg

SEQ ID NO: 66415 - DNA, 25 bp, Probe sequence
gataggtaaagacgaagatgactgt

SEQ ID NO: 66416 - DNA, 25 bp, Probe sequence
tgataggtaaagacgaagatgactg

SEQ ID NO: 66417 - DNA, 25 bp, Probe sequence
gtggaacagataccttatcatagtt

SEQ ID NO: 66418 - DNA, 25 bp, Probe sequence
ttgataggtaaagacgaagatgact

SEQ ID NO: 66419 - DNA, 25 bp, Probe sequence
agttaatgaggttcttgataggtaa

SEQ ID NO: 66420 - DNA, 25 bp, Probe sequence
aaagaattgacgaaagtaaggtgaa

SEQ ID NO: 66421 - DNA, 25 bp, Probe sequence
cttgataggtaaagacgaagatgac

SEQ ID NO: 66422 - DNA, 25 bp, Probe sequence
actatgataaggtatctgttccaca

SEQ ID NO: 66423 - DNA, 25 bp, Probe sequence
cagtcatcttcgtctttacctatca

SEQ ID NO: 66424 - DNA, 25 bp, Probe sequence
acagtcatcttcgtctttacctatc

SEQ ID NO: 66425 - DNA, 25 bp, Probe sequence
cacagtcatcttcgtctttacctat

SEQ ID NO: 66426 - DNA, 25 bp, Probe sequence
aactatgataaggtatctgttccac

SEQ ID NO: 66427 - DNA, 25 bp, Probe sequence
agtcatcttcgtctttacctatcaa

SEQ ID NO: 66428 - DNA, 25 bp, Probe sequence
ttacctatcaagaacctcattaact

SEQ ID NO: 66429 - DNA, 25 bp, Probe sequence
ttcaccttactttcgtcaattcttt

SEQ ID NO: 66430 - DNA, 25 bp, Probe sequence
tacctatcaagaacctcattaactt

SEQ ID NO: 66431 - DNA, 25 bp, Probe sequence
cttaacctaagtaacaggaggatgg

SEQ ID NO: 66432 - DNA, 25 bp, Probe sequence
taacctaagtaacaggaggatggaa

SEQ ID NO: 66433 - DNA, 25 bp, Probe sequence
ttaacctaagtaacaggaggatgga

SEQ ID NO: 66434 - DNA, 25 bp, Probe sequence
aacctaagtaacaggaggatggaag

SEQ ID NO: 66435 - DNA, 25 bp, Probe sequence
agtagcatttaagtttacaatagcg

SEQ ID NO: 66436 - DNA, 25 bp, Probe sequence
ggaacttaacctaagtaacaggagg

SEQ ID NO: 66437 - DNA, 25 bp, Probe sequence
acttaacctaagtaacaggaggatg

SEQ ID NO: 66438 - DNA, 25 bp, Probe sequence
gaacttaacctaagtaacaggagga

SEQ ID NO: 66439 - DNA, 25 bp, Probe sequence
aacttaacctaagtaacaggaggat

SEQ ID NO: 66440 - DNA, 25 bp, Probe sequence
ccatcctcctgttacttaggttaag

SEQ ID NO: 66441 - DNA, 25 bp, Probe sequence
tccatcctcctgttacttaggttaa

SEQ ID NO: 66442 - DNA, 25 bp, Probe sequence
ttccatcctcctgttacttaggtta

SEQ ID NO: 66443 - DNA, 25 bp, Probe sequence
cttccatcctcctgttacttaggtt

SEQ ID NO: 66444 - DNA, 25 bp, Probe sequence
cgctattgtaaacttaaatgctact

SEQ ID NO: 66445 - DNA, 25 bp, Probe sequence
cctcctgttacttaggttaagttcc

SEQ ID NO: 66446 - DNA, 25 bp, Probe sequence
catcctcctgttacttaggttaagt

SEQ ID NO: 66447 - DNA, 25 bp, Probe sequence
tcctcctgttacttaggttaagttc

SEQ ID NO: 66448 - DNA, 25 bp, Probe sequence
atcctcctgttacttaggttaagtt

SEQ ID NO: 66449 - DNA, 25 bp, Probe sequence
ctatagcccattccatactttataa

SEQ ID NO: 66450 - DNA, 25 bp, Probe sequence
tatagcccattccatactttataaa

SEQ ID NO: 66451 - DNA, 25 bp, Probe sequence
atagcccattccatactttataaaa

SEQ ID NO: 66452 - DNA, 25 bp, Probe sequence
tagcccattccatactttataaaag

SEQ ID NO: 66453 - DNA, 25 bp, Probe sequence
agcccattccatactttataaaagt

SEQ ID NO: 66454 - DNA, 25 bp, Probe sequence
ttataaagtatggaatgggctatag

SEQ ID NO: 66455 - DNA, 25 bp, Probe sequence
tttataaagtatggaatgggctata

SEQ ID NO: 66456 - DNA, 25 bp, Probe sequence
ttttataaagtatggaatgggctat

SEQ ID NO: 66457 - DNA, 25 bp, Probe sequence
cttttataaagtatggaatgggcta

SEQ ID NO: 66458 - DNA, 25 bp, Probe sequence
acttttataaagtatggaatgggct

SEQ ID NO: 66459 - DNA, 25 bp, Probe sequence
tctttccaacatacttttcactttt

SEQ ID NO: 66460 - DNA, 25 bp, Probe sequence
ttctttccaacatacttttcacttt

SEQ ID NO: 66461 - DNA, 25 bp, Probe sequence
attctttccaacatacttttcactt

SEQ ID NO: 66462 - DNA, 25 bp, Probe sequence
aattctttccaacatacttttcact

SEQ ID NO: 66463 - DNA, 25 bp, Probe sequence
aaattctttccaacatacttttcac

SEQ ID NO: 66464 - DNA, 25 bp, Probe sequence
tccttaaaataacattacatcgaca

SEQ ID NO: 66465 - DNA, 25 bp, Probe sequence
actccttaaaataacattacatcga

SEQ ID NO: 66466 - DNA, 25 bp, Probe sequence
ctccttaaaataacattacatcgac

SEQ ID NO: 66467 - DNA, 25 bp, Probe sequence
taaattctttccaacatacttttca

SEQ ID NO: 66468 - DNA, 25 bp, Probe sequence
aaagtgaaaagtatgttggaaagaa

SEQ ID NO: 66469 - DNA, 25 bp, Probe sequence
aaaagtgaaaagtatgttggaaaga

SEQ ID NO: 66470 - DNA, 25 bp, Probe sequence
aagtgaaaagtatgttggaaagaat

SEQ ID NO: 66471 - DNA, 25 bp, Probe sequence
agtgaaaagtatgttggaaagaatt

SEQ ID NO: 66472 - DNA, 25 bp, Probe sequence
gtgaaaagtatgttggaaagaattt

SEQ ID NO: 66473 - DNA, 25 bp, Probe sequence
tgtcgatgtaatgttattttaagga

SEQ ID NO: 66474 - DNA, 25 bp, Probe sequence
tcgatgtaatgttattttaaggagt

SEQ ID NO: 66475 - DNA, 25 bp, Probe sequence
gtcgatgtaatgttattttaaggag

SEQ ID NO: 66476 - DNA, 25 bp, Probe sequence
tgaaaagtatgttggaaagaattta

SEQ ID NO: 66477 - DNA, 25 bp, Probe sequence
ataacgagttgcttcatatttcttt

SEQ ID NO: 66478 - DNA, 25 bp, Probe sequence
aataacgagttgcttcatatttctt

SEQ ID NO: 66479 - DNA, 25 bp, Probe sequence
tctttagtaattagattagcgaggg

SEQ ID NO: 66480 - DNA, 25 bp, Probe sequence
acgagttgcttcatatttcttttgt

SEQ ID NO: 66481 - DNA, 25 bp, Probe sequence
tgcttcatatttcttttgttaccct

SEQ ID NO: 66482 - DNA, 25 bp, Probe sequence
cgagttgcttcatatttcttttgtt

SEQ ID NO: 66483 - DNA, 25 bp, Probe sequence
aacgagttgcttcatatttcttttg

SEQ ID NO: 66484 - DNA, 25 bp, Probe sequence
tgacaaaagcaaaattaagcgttta

SEQ ID NO: 66485 - DNA, 25 bp, Probe sequence
ttgacaaaagcaaaattaagcgttt

SEQ ID NO: 66486 - DNA, 25 bp, Probe sequence
aaagaaatatgaagcaactcgttat

SEQ ID NO: 66487 - DNA, 25 bp, Probe sequence
aagaaatatgaagcaactcgttatt

SEQ ID NO: 66488 - DNA, 25 bp, Probe sequence
ccctcgctaatctaattactaaaga

SEQ ID NO: 66489 - DNA, 25 bp, Probe sequence
acaaaagaaatatgaagcaactcgt

SEQ ID NO: 66490 - DNA, 25 bp, Probe sequence
aacaaaagaaatatgaagcaactcg

SEQ ID NO: 66491 - DNA, 25 bp, Probe sequence
agggtaacaaaagaaatatgaagca

SEQ ID NO: 66492 - DNA, 25 bp, Probe sequence
caaaagaaatatgaagcaactcgtt

SEQ ID NO: 66493 - DNA, 25 bp, Probe sequence
taaacgcttaattttgcttttgtca

SEQ ID NO: 66494 - DNA, 25 bp, Probe sequence
aacgcttaattttgcttttgtcaac

SEQ ID NO: 66495 - DNA, 25 bp, Probe sequence
tgcggataatataaacataacaaca

SEQ ID NO: 66496 - DNA, 25 bp, Probe sequence
gtgcggataatataaacataacaac

SEQ ID NO: 66497 - DNA, 25 bp, Probe sequence
agtgcggataatataaacataacaa

SEQ ID NO: 66498 - DNA, 25 bp, Probe sequence
aagtgcggataatataaacataaca

SEQ ID NO: 66499 - DNA, 25 bp, Probe sequence
gcggataatataaacataacaacat

SEQ ID NO: 66500 - DNA, 25 bp, Probe sequence
tccctagagacattttaagattgtt

SEQ ID NO: 66501 - DNA, 25 bp, Probe sequence
ttccctagagacattttaagattgt

SEQ ID NO: 66502 - DNA, 25 bp, Probe sequence
taagtgcggataatataaacataac

SEQ ID NO: 66503 - DNA, 25 bp, Probe sequence
agacataaatgacaataaaaggagt

SEQ ID NO: 66504 - DNA, 25 bp, Probe sequence
tgttgttatgtttatattatccgca

SEQ ID NO: 66505 - DNA, 25 bp, Probe sequence
gttgttatgtttatattatccgcac

SEQ ID NO: 66506 - DNA, 25 bp, Probe sequence
tgttatgtttatattatccgcactt

SEQ ID NO: 66507 - DNA, 25 bp, Probe sequence
ttgttatgtttatattatccgcact

SEQ ID NO: 66508 - DNA, 25 bp, Probe sequence
atgttgttatgtttatattatccgc

SEQ ID NO: 66509 - DNA, 25 bp, Probe sequence
acaatcttaaaatgtctctagggaa

SEQ ID NO: 66510 - DNA, 25 bp, Probe sequence
aacaatcttaaaatgtctctaggga

SEQ ID NO: 66511 - DNA, 25 bp, Probe sequence
gttatgtttatattatccgcactta

SEQ ID NO: 66512 - DNA, 25 bp, Probe sequence
caatcttaaaatgtctctagggaat

SEQ ID NO: 66513 - DNA, 25 bp, Probe sequence
acaatgaaataataaatggcaaggc

SEQ ID NO: 66514 - DNA, 25 bp, Probe sequence
acgcaataagttgattgatgtaaca

SEQ ID NO: 66515 - DNA, 25 bp, Probe sequence
acacgcaataagttgattgatgtaa

SEQ ID NO: 66516 - DNA, 25 bp, Probe sequence
aacacgcaataagttgattgatgta

SEQ ID NO: 66517 - DNA, 25 bp, Probe sequence
taacacgcaataagttgattgatgt

SEQ ID NO: 66518 - DNA, 25 bp, Probe sequence
cacgcaataagttgattgatgtaac

SEQ ID NO: 66519 - DNA, 25 bp, Probe sequence
caatgaaataataaatggcaaggct

SEQ ID NO: 66520 - DNA, 25 bp, Probe sequence
ttaagtcatcaacgagtaagtaatg

SEQ ID NO: 66521 - DNA, 25 bp, Probe sequence
atgctacaattcttattgatggagg

SEQ ID NO: 66522 - DNA, 25 bp, Probe sequence
gccttgccatttattatttcattgt

SEQ ID NO: 66523 - DNA, 25 bp, Probe sequence
acatcaatcaacttattgcgtgtta

SEQ ID NO: 66524 - DNA, 25 bp, Probe sequence
tacatcaatcaacttattgcgtgtt

SEQ ID NO: 66525 - DNA, 25 bp, Probe sequence
ttacatcaatcaacttattgcgtgt

SEQ ID NO: 66526 - DNA, 25 bp, Probe sequence
tgttacatcaatcaacttattgcgt

SEQ ID NO: 66527 - DNA, 25 bp, Probe sequence
gttacatcaatcaacttattgcgtg

SEQ ID NO: 66528 - DNA, 25 bp, Probe sequence
agccttgccatttattatttcattg

SEQ ID NO: 66529 - DNA, 25 bp, Probe sequence
cattacttactcgttgatgacttaa

SEQ ID NO: 66530 - DNA, 25 bp, Probe sequence
cctccatcaataagaattgtagcat

SEQ ID NO: 66531 - DNA, 25 bp, Probe sequence
agagcacgataaataattacgacca

SEQ ID NO: 66532 - DNA, 25 bp, Probe sequence
cagagcacgataaataattacgacc

SEQ ID NO: 66533 - DNA, 25 bp, Probe sequence
gagcacgataaataattacgaccaa

SEQ ID NO: 66534 - DNA, 25 bp, Probe sequence
tcagagcacgataaataattacgac

SEQ ID NO: 66535 - DNA, 25 bp, Probe sequence
agcacgataaataattacgaccaat

SEQ ID NO: 66536 - DNA, 25 bp, Probe sequence
atcagagcacgataaataattacga

SEQ ID NO: 66537 - DNA, 25 bp, Probe sequence
gcacgataaataattacgaccaatt

SEQ ID NO: 66538 - DNA, 25 bp, Probe sequence
aatcagagcacgataaataattacg

SEQ ID NO: 66539 - DNA, 25 bp, Probe sequence
agttaaaagacggaggaatgaaatt

SEQ ID NO: 66540 - DNA, 25 bp, Probe sequence
ggtcgtaattatttatcgtgctctg

SEQ ID NO: 66541 - DNA, 25 bp, Probe sequence
tggtcgtaattatttatcgtgctct

SEQ ID NO: 66542 - DNA, 25 bp, Probe sequence
ttggtcgtaattatttatcgtgctc

SEQ ID NO: 66543 - DNA, 25 bp, Probe sequence
gtcgtaattatttatcgtgctctga

SEQ ID NO: 66544 - DNA, 25 bp, Probe sequence
attggtcgtaattatttatcgtgct

SEQ ID NO: 66545 - DNA, 25 bp, Probe sequence
tcgtaattatttatcgtgctctgat

SEQ ID NO: 66546 - DNA, 25 bp, Probe sequence
aattggtcgtaattatttatcgtgc

SEQ ID NO: 66547 - DNA, 25 bp, Probe sequence
cgtaattatttatcgtgctctgatt

SEQ ID NO: 66548 - DNA, 25 bp, Probe sequence
aatttcattcctccgtcttttaact

SEQ ID NO: 66549 - DNA, 25 bp, Probe sequence
gatgttatcttggcagtagtcaact

SEQ ID NO: 66550 - DNA, 25 bp, Probe sequence
cgatgttatcttggcagtagtcaac

SEQ ID NO: 66551 - DNA, 25 bp, Probe sequence
cataattcaatgtcctagtcgtgac

SEQ ID NO: 66552 - DNA, 25 bp, Probe sequence
acgatgttatcttggcagtagtcaa

SEQ ID NO: 66553 - DNA, 25 bp, Probe sequence
ataattcaatgtcctagtcgtgacg

SEQ ID NO: 66554 - DNA, 25 bp, Probe sequence
gtgacgatgttatcttggcagtagt

SEQ ID NO: 66555 - DNA, 25 bp, Probe sequence
gacgatgttatcttggcagtagtca

SEQ ID NO: 66556 - DNA, 25 bp, Probe sequence
tgacgatgttatcttggcagtagtc

SEQ ID NO: 66557 - DNA, 25 bp, Probe sequence
gatgagtctgggacataattcaatg

SEQ ID NO: 66558 - DNA, 25 bp, Probe sequence
agttgactactgccaagataacatc

SEQ ID NO: 66559 - DNA, 25 bp, Probe sequence
gttgactactgccaagataacatcg

SEQ ID NO: 66560 - DNA, 25 bp, Probe sequence
gtcacgactaggacattgaattatg

SEQ ID NO: 66561 - DNA, 25 bp, Probe sequence
ttgactactgccaagataacatcgt

SEQ ID NO: 66562 - DNA, 25 bp, Probe sequence
cgtcacgactaggacattgaattat

SEQ ID NO: 66563 - DNA, 25 bp, Probe sequence
actactgccaagataacatcgtcac

SEQ ID NO: 66564 - DNA, 25 bp, Probe sequence
gactactgccaagataacatcgtca

SEQ ID NO: 66565 - DNA, 25 bp, Probe sequence
tgactactgccaagataacatcgtc

SEQ ID NO: 66566 - DNA, 25 bp, Probe sequence
cattgaattatgtcccagactcatc

SEQ ID NO: 66567 - DNA, 25 bp, Probe sequence
aaagccaatacacacatatcaaacg

SEQ ID NO: 66568 - DNA, 25 bp, Probe sequence
tggaggtaattaaccaataggagga

SEQ ID NO: 66569 - DNA, 25 bp, Probe sequence
ggaggtaattaaccaataggaggaa

SEQ ID NO: 66570 - DNA, 25 bp, Probe sequence
atggaggtaattaaccaataggagg

SEQ ID NO: 66571 - DNA, 25 bp, Probe sequence
gctatggaggtaattaaccaatagg

SEQ ID NO: 66572 - DNA, 25 bp, Probe sequence
taaagccaatacacacatatcaaac

SEQ ID NO: 66573 - DNA, 25 bp, Probe sequence
ctttacaatagtttgctatggaggt

SEQ ID NO: 66574 - DNA, 25 bp, Probe sequence
tgctatggaggtaattaaccaatag

SEQ ID NO: 66575 - DNA, 25 bp, Probe sequence
tctttacaatagtttgctatggagg

SEQ ID NO: 66576 - DNA, 25 bp, Probe sequence
cgtttgatatgtgtgtattggcttt

SEQ ID NO: 66577 - DNA, 25 bp, Probe sequence
tcctcctattggttaattacctcca

SEQ ID NO: 66578 - DNA, 25 bp, Probe sequence
cctcctattggttaattacctccat

SEQ ID NO: 66579 - DNA, 25 bp, Probe sequence
ttcctcctattggttaattacctcc

SEQ ID NO: 66580 - DNA, 25 bp, Probe sequence
cctattggttaattacctccatagc

SEQ ID NO: 66581 - DNA, 25 bp, Probe sequence
gtttgatatgtgtgtattggcttta

SEQ ID NO: 66582 - DNA, 25 bp, Probe sequence
acctccatagcaaactattgtaaag

SEQ ID NO: 66583 - DNA, 25 bp, Probe sequence
ctattggttaattacctccatagca

SEQ ID NO: 66584 - DNA, 25 bp, Probe sequence
cctccatagcaaactattgtaaaga

SEQ ID NO: 66585 - DNA, 25 bp, Probe sequence
gaagaagacacctttaatgttgctt

SEQ ID NO: 66586 - DNA, 25 bp, Probe sequence
aagaagacacctttaatgttgcttt

SEQ ID NO: 66587 - DNA, 25 bp, Probe sequence
agaagacacctttaatgttgcttta

SEQ ID NO: 66588 - DNA, 25 bp, Probe sequence
ggaagaagacacctttaatgttgct

SEQ ID NO: 66589 - DNA, 25 bp, Probe sequence
aggaagaagacacctttaatgttgc

SEQ ID NO: 66590 - DNA, 25 bp, Probe sequence
gaagacacctttaatgttgctttat

SEQ ID NO: 66591 - DNA, 25 bp, Probe sequence
aagacacctttaatgttgctttatt

SEQ ID NO: 66592 - DNA, 25 bp, Probe sequence
aaagtaaaacaaggaagaagacacc

SEQ ID NO: 66593 - DNA, 25 bp, Probe sequence
agacacctttaatgttgctttatta

SEQ ID NO: 66594 - DNA, 25 bp, Probe sequence
aagcaacattaaaggtgtcttcttc

SEQ ID NO: 66595 - DNA, 25 bp, Probe sequence
aaagcaacattaaaggtgtcttctt

SEQ ID NO: 66596 - DNA, 25 bp, Probe sequence
taaagcaacattaaaggtgtcttct

SEQ ID NO: 66597 - DNA, 25 bp, Probe sequence
agcaacattaaaggtgtcttcttcc

SEQ ID NO: 66598 - DNA, 25 bp, Probe sequence
gcaacattaaaggtgtcttcttcct

SEQ ID NO: 66599 - DNA, 25 bp, Probe sequence
ataaagcaacattaaaggtgtcttc

SEQ ID NO: 66600 - DNA, 25 bp, Probe sequence
aataaagcaacattaaaggtgtctt

SEQ ID NO: 66601 - DNA, 25 bp, Probe sequence
ggtgtcttcttccttgttttacttt

SEQ ID NO: 66602 - DNA, 25 bp, Probe sequence
taataaagcaacattaaaggtgtct

SEQ ID NO: 66603 - DNA, 25 bp, Probe sequence
tgtcacatttctggtgtaaactgta

SEQ ID NO: 66604 - DNA, 25 bp, Probe sequence
gtcacatttctggtgtaaactgtac

SEQ ID NO: 66605 - DNA, 25 bp, Probe sequence
tgtatgtcacatttctggtgtaaac

SEQ ID NO: 66606 - DNA, 25 bp, Probe sequence
tatgtcacatttctggtgtaaactg

SEQ ID NO: 66607 - DNA, 25 bp, Probe sequence
gtatgtcacatttctggtgtaaact

SEQ ID NO: 66608 - DNA, 25 bp, Probe sequence
atgtcacatttctggtgtaaactgt

SEQ ID NO: 66609 - DNA, 25 bp, Probe sequence
tgccagtattaaacgataatgtaac

SEQ ID NO: 66610 - DNA, 25 bp, Probe sequence
gccagtattaaacgataatgtaaca

SEQ ID NO: 66611 - DNA, 25 bp, Probe sequence
aaatgccagtattaaacgataatgt

SEQ ID NO: 66612 - DNA, 25 bp, Probe sequence
tacagtttacaccagaaatgtgaca

SEQ ID NO: 66613 - DNA, 25 bp, Probe sequence
gtacagtttacaccagaaatgtgac

SEQ ID NO: 66614 - DNA, 25 bp, Probe sequence
gtttacaccagaaatgtgacataca

SEQ ID NO: 66615 - DNA, 25 bp, Probe sequence
agtttacaccagaaatgtgacatac

SEQ ID NO: 66616 - DNA, 25 bp, Probe sequence
cagtttacaccagaaatgtgacata

SEQ ID NO: 66617 - DNA, 25 bp, Probe sequence
acagtttacaccagaaatgtgacat

SEQ ID NO: 66618 - DNA, 25 bp, Probe sequence
gttacattatcgtttaatactggca

SEQ ID NO: 66619 - DNA, 25 bp, Probe sequence
tgttacattatcgtttaatactggc

SEQ ID NO: 66620 - DNA, 25 bp, Probe sequence
acattatcgtttaatactggcattt

SEQ ID NO: 66621 - DNA, 25 bp, Probe sequence
cgtaaagaggagttgctgagataat

SEQ ID NO: 66622 - DNA, 25 bp, Probe sequence
gtaaagaggagttgctgagataatt

SEQ ID NO: 66623 - DNA, 25 bp, Probe sequence
aggagttgctgagataatttaatga

SEQ ID NO: 66624 - DNA, 25 bp, Probe sequence
aagaggagttgctgagataatttaa

SEQ ID NO: 66625 - DNA, 25 bp, Probe sequence
aaagaggagttgctgagataattta

SEQ ID NO: 66626 - DNA, 25 bp, Probe sequence
taaagaggagttgctgagataattt

SEQ ID NO: 66627 - DNA, 25 bp, Probe sequence
gaggagttgctgagataatttaatg

SEQ ID NO: 66628 - DNA, 25 bp, Probe sequence
agaggagttgctgagataatttaat

SEQ ID NO: 66629 - DNA, 25 bp, Probe sequence
ggagttgctgagataatttaatgaa

SEQ ID NO: 66630 - DNA, 25 bp, Probe sequence
attatctcagcaactcctctttacg

SEQ ID NO: 66631 - DNA, 25 bp, Probe sequence
aattatctcagcaactcctctttac

SEQ ID NO: 66632 - DNA, 25 bp, Probe sequence
tcattaaattatctcagcaactcct

SEQ ID NO: 66633 - DNA, 25 bp, Probe sequence
ttaaattatctcagcaactcctctt

SEQ ID NO: 66634 - DNA, 25 bp, Probe sequence
aaattatctcagcaactcctcttta

SEQ ID NO: 66635 - DNA, 25 bp, Probe sequence
taaattatctcagcaactcctcttt

SEQ ID NO: 66636 - DNA, 25 bp, Probe sequence
cattaaattatctcagcaactcctc

SEQ ID NO: 66637 - DNA, 25 bp, Probe sequence
attaaattatctcagcaactcctct

SEQ ID NO: 66638 - DNA, 25 bp, Probe sequence
ttcattaaattatctcagcaactcc

SEQ ID NO: 66639 - DNA, 25 bp, Probe sequence
tgatgcttatgtcctgctcttatta

SEQ ID NO: 66640 - DNA, 25 bp, Probe sequence
ctgatgcttatgtcctgctcttatt

SEQ ID NO: 66641 - DNA, 25 bp, Probe sequence
tctgatgcttatgtcctgctcttat

SEQ ID NO: 66642 - DNA, 25 bp, Probe sequence
atctgatgcttatgtcctgctctta

SEQ ID NO: 66643 - DNA, 25 bp, Probe sequence
gatgcttatgtcctgctcttattat

SEQ ID NO: 66644 - DNA, 25 bp, Probe sequence
atgcttatgtcctgctcttattatt

SEQ ID NO: 66645 - DNA, 25 bp, Probe sequence
aatctgatgcttatgtcctgctctt

SEQ ID NO: 66646 - DNA, 25 bp, Probe sequence
gctgaaagaaatctgatgcttatgt

SEQ ID NO: 66647 - DNA, 25 bp, Probe sequence
aaagaaatctgatgcttatgtcctg

SEQ ID NO: 66648 - DNA, 25 bp, Probe sequence
taataagagcaggacataagcatca

SEQ ID NO: 66649 - DNA, 25 bp, Probe sequence
aataagagcaggacataagcatcag

SEQ ID NO: 66650 - DNA, 25 bp, Probe sequence
ataagagcaggacataagcatcaga

SEQ ID NO: 66651 - DNA, 25 bp, Probe sequence
taagagcaggacataagcatcagat

SEQ ID NO: 66652 - DNA, 25 bp, Probe sequence
ataataagagcaggacataagcatc

SEQ ID NO: 66653 - DNA, 25 bp, Probe sequence
aataataagagcaggacataagcat

SEQ ID NO: 66654 - DNA, 25 bp, Probe sequence
aagagcaggacataagcatcagatt

SEQ ID NO: 66655 - DNA, 25 bp, Probe sequence
acataagcatcagatttctttcagc

SEQ ID NO: 66656 - DNA, 25 bp, Probe sequence
ggacataagcatcagatttctttca

SEQ ID NO: 66657 - DNA, 25 bp, Probe sequence
ggtatttatttaatgcgtatggcgt

SEQ ID NO: 66658 - DNA, 25 bp, Probe sequence
aggtatttatttaatgcgtatggcg

SEQ ID NO: 66659 - DNA, 25 bp, Probe sequence
tttatttaatgcgtatggcgtagtt

SEQ ID NO: 66660 - DNA, 25 bp, Probe sequence
tgcgtatggcgtagttaaagaaata

SEQ ID NO: 66661 - DNA, 25 bp, Probe sequence
taatgcgtatggcgtagttaaagaa

SEQ ID NO: 66662 - DNA, 25 bp, Probe sequence
atttatttaatgcgtatggcgtagt

SEQ ID NO: 66663 - DNA, 25 bp, Probe sequence
atgcgtatggcgtagttaaagaaat

SEQ ID NO: 66664 - DNA, 25 bp, Probe sequence
ttatttaatgcgtatggcgtagtta

SEQ ID NO: 66665 - DNA, 25 bp, Probe sequence
ttaatgcgtatggcgtagttaaaga

SEQ ID NO: 66666 - DNA, 25 bp, Probe sequence
cgccatacgcattaaataaatacct

SEQ ID NO: 66667 - DNA, 25 bp, Probe sequence
acgccatacgcattaaataaatacc

SEQ ID NO: 66668 - DNA, 25 bp, Probe sequence
aactacgccatacgcattaaataaa

SEQ ID NO: 66669 - DNA, 25 bp, Probe sequence
actacgccatacgcattaaataaat

SEQ ID NO: 66670 - DNA, 25 bp, Probe sequence
ttctttaactacgccatacgcatta

SEQ ID NO: 66671 - DNA, 25 bp, Probe sequence
tatttctttaactacgccatacgca

SEQ ID NO: 66672 - DNA, 25 bp, Probe sequence
taactacgccatacgcattaaataa

SEQ ID NO: 66673 - DNA, 25 bp, Probe sequence
atttctttaactacgccatacgcat

SEQ ID NO: 66674 - DNA, 25 bp, Probe sequence
tctttaactacgccatacgcattaa

SEQ ID NO: 66675 - DNA, 25 bp, Probe sequence
ttctgttgaaatgcctatcttacgg

SEQ ID NO: 66676 - DNA, 25 bp, Probe sequence
agtgtctactttatagggagcatat

SEQ ID NO: 66677 - DNA, 25 bp, Probe sequence
gtgtctactttatagggagcatatt

SEQ ID NO: 66678 - DNA, 25 bp, Probe sequence
tatagggagcatatttgatactagc

SEQ ID NO: 66679 - DNA, 25 bp, Probe sequence
tttctgttgaaatgcctatcttacg

SEQ ID NO: 66680 - DNA, 25 bp, Probe sequence
tgtctactttatagggagcatattt

SEQ ID NO: 66681 - DNA, 25 bp, Probe sequence
gtctactttatagggagcatatttg

SEQ ID NO: 66682 - DNA, 25 bp, Probe sequence
agtatagttaagattgatatgctcc

SEQ ID NO: 66683 - DNA, 25 bp, Probe sequence
tctactttatagggagcatatttga

SEQ ID NO: 66684 - DNA, 25 bp, Probe sequence
ccgtaagataggcatttcaacagaa

SEQ ID NO: 66685 - DNA, 25 bp, Probe sequence
atatgctccctataaagtagacact

SEQ ID NO: 66686 - DNA, 25 bp, Probe sequence
aatatgctccctataaagtagacac

SEQ ID NO: 66687 - DNA, 25 bp, Probe sequence
gctagtatcaaatatgctccctata

SEQ ID NO: 66688 - DNA, 25 bp, Probe sequence
cgtaagataggcatttcaacagaaa

SEQ ID NO: 66689 - DNA, 25 bp, Probe sequence
aaatatgctccctataaagtagaca

SEQ ID NO: 66690 - DNA, 25 bp, Probe sequence
caaatatgctccctataaagtagac

SEQ ID NO: 66691 - DNA, 25 bp, Probe sequence
ggagcatatcaatcttaactatact

SEQ ID NO: 66692 - DNA, 25 bp, Probe sequence
tcaaatatgctccctataaagtaga

SEQ ID NO: 66693 - DNA, 25 bp, Probe sequence
tgttaggtatctggaaaatgtttga

SEQ ID NO: 66694 - DNA, 25 bp, Probe sequence
gtgttaggtatctggaaaatgtttg

SEQ ID NO: 66695 - DNA, 25 bp, Probe sequence
agtgttaggtatctggaaaatgttt

SEQ ID NO: 66696 - DNA, 25 bp, Probe sequence
tagtgttaggtatctggaaaatgtt

SEQ ID NO: 66697 - DNA, 25 bp, Probe sequence
ttagtgttaggtatctggaaaatgt

SEQ ID NO: 66698 - DNA, 25 bp, Probe sequence
gttaggtatctggaaaatgtttgat

SEQ ID NO: 66699 - DNA, 25 bp, Probe sequence
gaataaattcagttgatacgctatt

SEQ ID NO: 66700 - DNA, 25 bp, Probe sequence
tttagtgttaggtatctggaaaatg

SEQ ID NO: 66701 - DNA, 25 bp, Probe sequence
acagttaatacatagatgtgtagaa

SEQ ID NO: 66702 - DNA, 25 bp, Probe sequence
caaacattttccagatacctaacac

SEQ ID NO: 66703 - DNA, 25 bp, Probe sequence
tcaaacattttccagatacctaaca

SEQ ID NO: 66704 - DNA, 25 bp, Probe sequence
aaacattttccagatacctaacact

SEQ ID NO: 66705 - DNA, 25 bp, Probe sequence
acattttccagatacctaacactaa

SEQ ID NO: 66706 - DNA, 25 bp, Probe sequence
aacattttccagatacctaacacta

SEQ ID NO: 66707 - DNA, 25 bp, Probe sequence
atcaaacattttccagatacctaac

SEQ ID NO: 66708 - DNA, 25 bp, Probe sequence
aatagcgtatcaactgaatttattc

SEQ ID NO: 66709 - DNA, 25 bp, Probe sequence
cattttccagatacctaacactaaa

SEQ ID NO: 66710 - DNA, 25 bp, Probe sequence
tctacacatctatgtattaactgtt

SEQ ID NO: 66711 - DNA, 25 bp, Probe sequence
ttcttagtaggtcgaatctccaacg

SEQ ID NO: 66712 - DNA, 25 bp, Probe sequence
tcggattaaggagtattcaaacatt

SEQ ID NO: 66713 - DNA, 25 bp, Probe sequence
ctcggattaaggagtattcaaacat

SEQ ID NO: 66714 - DNA, 25 bp, Probe sequence
cggattaaggagtattcaaacattt

SEQ ID NO: 66715 - DNA, 25 bp, Probe sequence
tttcttagtaggtcgaatctccaac

SEQ ID NO: 66716 - DNA, 25 bp, Probe sequence
cctaactcggattaaggagtattca

SEQ ID NO: 66717 - DNA, 25 bp, Probe sequence
gcctaactcggattaaggagtattc

SEQ ID NO: 66718 - DNA, 25 bp, Probe sequence
atctccaacgcctaactcggattaa

SEQ ID NO: 66719 - DNA, 25 bp, Probe sequence
aatctccaacgcctaactcggatta

SEQ ID NO: 66720 - DNA, 25 bp, Probe sequence
cgttggagattcgacctactaagaa

SEQ ID NO: 66721 - DNA, 25 bp, Probe sequence
aatgtttgaatactccttaatccga

SEQ ID NO: 66722 - DNA, 25 bp, Probe sequence
atgtttgaatactccttaatccgag

SEQ ID NO: 66723 - DNA, 25 bp, Probe sequence
aaatgtttgaatactccttaatccg

SEQ ID NO: 66724 - DNA, 25 bp, Probe sequence
gttggagattcgacctactaagaaa

SEQ ID NO: 66725 - DNA, 25 bp, Probe sequence
gaatactccttaatccgagttaggc

SEQ ID NO: 66726 - DNA, 25 bp, Probe sequence
tgaatactccttaatccgagttagg

SEQ ID NO: 66727 - DNA, 25 bp, Probe sequence
ttaatccgagttaggcgttggagat

SEQ ID NO: 66728 - DNA, 25 bp, Probe sequence
taatccgagttaggcgttggagatt

SEQ ID NO: 66729 - DNA, 25 bp, Probe sequence
tatactgataagggtgggacgataa

SEQ ID NO: 66730 - DNA, 25 bp, Probe sequence
ttatactgataagggtgggacgata

SEQ ID NO: 66731 - DNA, 25 bp, Probe sequence
atactgataagggtgggacgataag

SEQ ID NO: 66732 - DNA, 25 bp, Probe sequence
tatttatactgataagggtgggacg

SEQ ID NO: 66733 - DNA, 25 bp, Probe sequence
tttatactgataagggtgggacgat

SEQ ID NO: 66734 - DNA, 25 bp, Probe sequence
atttatactgataagggtgggacga

SEQ ID NO: 66735 - DNA, 25 bp, Probe sequence
gggcatatttatgttccaaccttaa

SEQ ID NO: 66736 - DNA, 25 bp, Probe sequence
actattagattcaagagaggagatt

SEQ ID NO: 66737 - DNA, 25 bp, Probe sequence
aactattagattcaagagaggagat

SEQ ID NO: 66738 - DNA, 25 bp, Probe sequence
ttatcgtcccacccttatcagtata

SEQ ID NO: 66739 - DNA, 25 bp, Probe sequence
tatcgtcccacccttatcagtataa

SEQ ID NO: 66740 - DNA, 25 bp, Probe sequence
cttatcgtcccacccttatcagtat

SEQ ID NO: 66741 - DNA, 25 bp, Probe sequence
cgtcccacccttatcagtataaata

SEQ ID NO: 66742 - DNA, 25 bp, Probe sequence
tcgtcccacccttatcagtataaat

SEQ ID NO: 66743 - DNA, 25 bp, Probe sequence
atcgtcccacccttatcagtataaa

SEQ ID NO: 66744 - DNA, 25 bp, Probe sequence
ttaaggttggaacataaatatgccc

SEQ ID NO: 66745 - DNA, 25 bp, Probe sequence
aatagacttatcgtcccacccttat

SEQ ID NO: 66746 - DNA, 25 bp, Probe sequence
atctcctctcttgaatctaatagtt

SEQ ID NO: 66747 - DNA, 25 bp, Probe sequence
tgagtgcaactgttaattatcctgt

SEQ ID NO: 66748 - DNA, 25 bp, Probe sequence
ttgagtgcaactgttaattatcctg

SEQ ID NO: 66749 - DNA, 25 bp, Probe sequence
tgcaactgttaattatcctgtatgt

SEQ ID NO: 66750 - DNA, 25 bp, Probe sequence
gtgcaactgttaattatcctgtatg

SEQ ID NO: 66751 - DNA, 25 bp, Probe sequence
gagtgcaactgttaattatcctgta

SEQ ID NO: 66752 - DNA, 25 bp, Probe sequence
agtgcaactgttaattatcctgtat

SEQ ID NO: 66753 - DNA, 25 bp, Probe sequence
gcaactgttaattatcctgtatgta

SEQ ID NO: 66754 - DNA, 25 bp, Probe sequence
tttgagtgcaactgttaattatcct

SEQ ID NO: 66755 - DNA, 25 bp, Probe sequence
acgaagtgatccattttgaatttgt

SEQ ID NO: 66756 - DNA, 25 bp, Probe sequence
caggataattaacagttgcactcaa

SEQ ID NO: 66757 - DNA, 25 bp, Probe sequence
acaggataattaacagttgcactca

SEQ ID NO: 66758 - DNA, 25 bp, Probe sequence
acatacaggataattaacagttgca

SEQ ID NO: 66759 - DNA, 25 bp, Probe sequence
catacaggataattaacagttgcac

SEQ ID NO: 66760 - DNA, 25 bp, Probe sequence
tacaggataattaacagttgcactc

SEQ ID NO: 66761 - DNA, 25 bp, Probe sequence
atacaggataattaacagttgcact

SEQ ID NO: 66762 - DNA, 25 bp, Probe sequence
tacatacaggataattaacagttgc

SEQ ID NO: 66763 - DNA, 25 bp, Probe sequence
aggataattaacagttgcactcaaa

SEQ ID NO: 66764 - DNA, 25 bp, Probe sequence
acaaattcaaaatggatcacttcgt

SEQ ID NO: 66765 - DNA, 25 bp, Probe sequence
ttaactaaggcaacataaggaggtg

SEQ ID NO: 66766 - DNA, 25 bp, Probe sequence
attgttctaacctctttcatcgtct

SEQ ID NO: 66767 - DNA, 25 bp, Probe sequence
tttaactaaggcaacataaggaggt

SEQ ID NO: 66768 - DNA, 25 bp, Probe sequence
agaacaagtcaccgaaatataatgg

SEQ ID NO: 66769 - DNA, 25 bp, Probe sequence
ttgttctaacctctttcatcgtctg

SEQ ID NO: 66770 - DNA, 25 bp, Probe sequence
gtcagaacaagtcaccgaaatataa

SEQ ID NO: 66771 - DNA, 25 bp, Probe sequence
ttctaacctctttcatcgtctgttt

SEQ ID NO: 66772 - DNA, 25 bp, Probe sequence
tctaacctctttcatcgtctgtttg

SEQ ID NO: 66773 - DNA, 25 bp, Probe sequence
gttctaacctctttcatcgtctgtt

SEQ ID NO: 66774 - DNA, 25 bp, Probe sequence
cacctccttatgttgccttagttaa

SEQ ID NO: 66775 - DNA, 25 bp, Probe sequence
agacgatgaaagaggttagaacaat

SEQ ID NO: 66776 - DNA, 25 bp, Probe sequence
acctccttatgttgccttagttaaa

SEQ ID NO: 66777 - DNA, 25 bp, Probe sequence
ccattatatttcggtgacttgttct

SEQ ID NO: 66778 - DNA, 25 bp, Probe sequence
cagacgatgaaagaggttagaacaa

SEQ ID NO: 66779 - DNA, 25 bp, Probe sequence
ttatatttcggtgacttgttctgac

SEQ ID NO: 66780 - DNA, 25 bp, Probe sequence
aaacagacgatgaaagaggttagaa

SEQ ID NO: 66781 - DNA, 25 bp, Probe sequence
aacagacgatgaaagaggttagaac

SEQ ID NO: 66782 - DNA, 25 bp, Probe sequence
caaacagacgatgaaagaggttaga

SEQ ID NO: 66783 - DNA, 25 bp, Probe sequence
tgtgttgtagcatctgatacattga

SEQ ID NO: 66784 - DNA, 25 bp, Probe sequence
gtgttgtagcatctgatacattgaa

SEQ ID NO: 66785 - DNA, 25 bp, Probe sequence
gcaaatgtgttgtagcatctgatac

SEQ ID NO: 66786 - DNA, 25 bp, Probe sequence
tgttgtagcatctgatacattgaat

SEQ ID NO: 66787 - DNA, 25 bp, Probe sequence
tttaggcaaatgtgttgtagcatct

SEQ ID NO: 66788 - DNA, 25 bp, Probe sequence
gtagcatctgatacattgaatctaa

SEQ ID NO: 66789 - DNA, 25 bp, Probe sequence
gttgtagcatctgatacattgaatc

SEQ ID NO: 66790 - DNA, 25 bp, Probe sequence
ggcaaatgtgttgtagcatctgata

SEQ ID NO: 66791 - DNA, 25 bp, Probe sequence
ttgtagcatctgatacattgaatct

SEQ ID NO: 66792 - DNA, 25 bp, Probe sequence
tcaatgtatcagatgctacaacaca

SEQ ID NO: 66793 - DNA, 25 bp, Probe sequence
ttcaatgtatcagatgctacaacac

SEQ ID NO: 66794 - DNA, 25 bp, Probe sequence
gtatcagatgctacaacacatttgc

SEQ ID NO: 66795 - DNA, 25 bp, Probe sequence
attcaatgtatcagatgctacaaca

SEQ ID NO: 66796 - DNA, 25 bp, Probe sequence
agatgctacaacacatttgcctaaa

SEQ ID NO: 66797 - DNA, 25 bp, Probe sequence
ttagattcaatgtatcagatgctac

SEQ ID NO: 66798 - DNA, 25 bp, Probe sequence
tatcagatgctacaacacatttgcc

SEQ ID NO: 66799 - DNA, 25 bp, Probe sequence
gattcaatgtatcagatgctacaac

SEQ ID NO: 66800 - DNA, 25 bp, Probe sequence
agattcaatgtatcagatgctacaa

SEQ ID NO: 66801 - DNA, 25 bp, Probe sequence
tagcaatttcaattaggaggtctcg

SEQ ID NO: 66802 - DNA, 25 bp, Probe sequence
atagcaatttcaattaggaggtctc

SEQ ID NO: 66803 - DNA, 25 bp, Probe sequence
gatagcaatttcaattaggaggtct

SEQ ID NO: 66804 - DNA, 25 bp, Probe sequence
agatagcaatttcaattaggaggtc

SEQ ID NO: 66805 - DNA, 25 bp, Probe sequence
aagatagcaatttcaattaggaggt

SEQ ID NO: 66806 - DNA, 25 bp, Probe sequence
aaagatagcaatttcaattaggagg

SEQ ID NO: 66807 - DNA, 25 bp, Probe sequence
gcaatttcaattaggaggtctcgct

SEQ ID NO: 66808 - DNA, 25 bp, Probe sequence
agcaatttcaattaggaggtctcgc

SEQ ID NO: 66809 - DNA, 25 bp, Probe sequence
ttttgcgttttgatttcaagatttt

SEQ ID NO: 66810 - DNA, 25 bp, Probe sequence
cgagacctcctaattgaaattgcta

SEQ ID NO: 66811 - DNA, 25 bp, Probe sequence
gacctcctaattgaaattgctatct

SEQ ID NO: 66812 - DNA, 25 bp, Probe sequence
agacctcctaattgaaattgctatc

SEQ ID NO: 66813 - DNA, 25 bp, Probe sequence
gagacctcctaattgaaattgctat

SEQ ID NO: 66814 - DNA, 25 bp, Probe sequence
acctcctaattgaaattgctatctt

SEQ ID NO: 66815 - DNA, 25 bp, Probe sequence
cctcctaattgaaattgctatcttt

SEQ ID NO: 66816 - DNA, 25 bp, Probe sequence
gcgagacctcctaattgaaattgct

SEQ ID NO: 66817 - DNA, 25 bp, Probe sequence
agcgagacctcctaattgaaattgc

SEQ ID NO: 66818 - DNA, 25 bp, Probe sequence
aaaatcttgaaatcaaaacgcaaaa

SEQ ID NO: 66819 - DNA, 25 bp, Probe sequence
ttgacacttatctcctataaaccgt

SEQ ID NO: 66820 - DNA, 25 bp, Probe sequence
actttatgggatacactacaaatcg

SEQ ID NO: 66821 - DNA, 25 bp, Probe sequence
cttgacacttatctcctataaaccg

SEQ ID NO: 66822 - DNA, 25 bp, Probe sequence
tgacacttatctcctataaaccgta

SEQ ID NO: 66823 - DNA, 25 bp, Probe sequence
acacttatctcctataaaccgtaca

SEQ ID NO: 66824 - DNA, 25 bp, Probe sequence
gacacttatctcctataaaccgtac

SEQ ID NO: 66825 - DNA, 25 bp, Probe sequence
acttgacacttatctcctataaacc

SEQ ID NO: 66826 - DNA, 25 bp, Probe sequence
gaatttcatataaagagcaaaccct

SEQ ID NO: 66827 - DNA, 25 bp, Probe sequence
tatgggatacactacaaatcgagac

SEQ ID NO: 66828 - DNA, 25 bp, Probe sequence
acggtttataggagataagtgtcaa

SEQ ID NO: 66829 - DNA, 25 bp, Probe sequence
cgatttgtagtgtatcccataaagt

SEQ ID NO: 66830 - DNA, 25 bp, Probe sequence
cggtttataggagataagtgtcaag

SEQ ID NO: 66831 - DNA, 25 bp, Probe sequence
tacggtttataggagataagtgtca

SEQ ID NO: 66832 - DNA, 25 bp, Probe sequence
tgtacggtttataggagataagtgt

SEQ ID NO: 66833 - DNA, 25 bp, Probe sequence
ggtttataggagataagtgtcaagt

SEQ ID NO: 66834 - DNA, 25 bp, Probe sequence
gtacggtttataggagataagtgtc

SEQ ID NO: 66835 - DNA, 25 bp, Probe sequence
agggtttgctctttatatgaaattc

SEQ ID NO: 66836 - DNA, 25 bp, Probe sequence
gtctcgatttgtagtgtatcccata

SEQ ID NO: 66837 - DNA, 25 bp, Probe sequence
gtggttatttgaaagtaagacggac

SEQ ID NO: 66838 - DNA, 25 bp, Probe sequence
agtggttatttgaaagtaagacgga

SEQ ID NO: 66839 - DNA, 25 bp, Probe sequence
cagtggttatttgaaagtaagacgg

SEQ ID NO: 66840 - DNA, 25 bp, Probe sequence
acagtggttatttgaaagtaagacg

SEQ ID NO: 66841 - DNA, 25 bp, Probe sequence
gtaacacatcttctcttctgcaata

SEQ ID NO: 66842 - DNA, 25 bp, Probe sequence
agacagcactttatcggtaataact

SEQ ID NO: 66843 - DNA, 25 bp, Probe sequence
gttatttgaaagtaagacggacctt

SEQ ID NO: 66844 - DNA, 25 bp, Probe sequence
aacacatcttctcttctgcaatatt

SEQ ID NO: 66845 - DNA, 25 bp, Probe sequence
tgtaacacatcttctcttctgcaat

SEQ ID NO: 66846 - DNA, 25 bp, Probe sequence
ccgtcttactttcaaataaccactg

SEQ ID NO: 66847 - DNA, 25 bp, Probe sequence
tccgtcttactttcaaataaccact

SEQ ID NO: 66848 - DNA, 25 bp, Probe sequence
gtccgtcttactttcaaataaccac

SEQ ID NO: 66849 - DNA, 25 bp, Probe sequence
cgtcttactttcaaataaccactgt

SEQ ID NO: 66850 - DNA, 25 bp, Probe sequence
tattgcagaagagaagatgtgttac

SEQ ID NO: 66851 - DNA, 25 bp, Probe sequence
agttattaccgataaagtgctgtct

SEQ ID NO: 66852 - DNA, 25 bp, Probe sequence
aaggtccgtcttactttcaaataac

SEQ ID NO: 66853 - DNA, 25 bp, Probe sequence
aatattgcagaagagaagatgtgtt

SEQ ID NO: 66854 - DNA, 25 bp, Probe sequence
attgcagaagagaagatgtgttaca

SEQ ID NO: 66855 - DNA, 25 bp, Probe sequence
ctagtatttatgagaggatgaacaa

SEQ ID NO: 66856 - DNA, 25 bp, Probe sequence
tagtatttatgagaggatgaacaaa

SEQ ID NO: 66857 - DNA, 25 bp, Probe sequence
actagtatttatgagaggatgaaca

SEQ ID NO: 66858 - DNA, 25 bp, Probe sequence
gtatttatgagaggatgaacaaaac

SEQ ID NO: 66859 - DNA, 25 bp, Probe sequence
agtatttatgagaggatgaacaaaa

SEQ ID NO: 66860 - DNA, 25 bp, Probe sequence
acaactcctatttattttgatgtct

SEQ ID NO: 66861 - DNA, 25 bp, Probe sequence
ttgaagttttcagacaaagtaatgt

SEQ ID NO: 66862 - DNA, 25 bp, Probe sequence
aactagtatttatgagaggatgaac

SEQ ID NO: 66863 - DNA, 25 bp, Probe sequence
acatattgaagttttcagacaaagt

SEQ ID NO: 66864 - DNA, 25 bp, Probe sequence
ttgttcatcctctcataaatactag

SEQ ID NO: 66865 - DNA, 25 bp, Probe sequence
tttgttcatcctctcataaatacta

SEQ ID NO: 66866 - DNA, 25 bp, Probe sequence
tgttcatcctctcataaatactagt

SEQ ID NO: 66867 - DNA, 25 bp, Probe sequence
gttttgttcatcctctcataaatac

SEQ ID NO: 66868 - DNA, 25 bp, Probe sequence
ttttgttcatcctctcataaatact

SEQ ID NO: 66869 - DNA, 25 bp, Probe sequence
agacatcaaaataaataggagttgt

SEQ ID NO: 66870 - DNA, 25 bp, Probe sequence
acattactttgtctgaaaacttcaa

SEQ ID NO: 66871 - DNA, 25 bp, Probe sequence
gttcatcctctcataaatactagtt

SEQ ID NO: 66872 - DNA, 25 bp, Probe sequence
actttgtctgaaaacttcaatatgt

SEQ ID NO: 66873 - DNA, 25 bp, Probe sequence
accctatcgtccattagtatgaatt

SEQ ID NO: 66874 - DNA, 25 bp, Probe sequence
gaccctatcgtccattagtatgaat

SEQ ID NO: 66875 - DNA, 25 bp, Probe sequence
ccctatcgtccattagtatgaattt

SEQ ID NO: 66876 - DNA, 25 bp, Probe sequence
ttacatagtaaatcggtggttcttt

SEQ ID NO: 66877 - DNA, 25 bp, Probe sequence
tacatagtaaatcggtggttctttt

SEQ ID NO: 66878 - DNA, 25 bp, Probe sequence
cctatcgtccattagtatgaattta

SEQ ID NO: 66879 - DNA, 25 bp, Probe sequence
actgtttacatagtaaatcggtggt

SEQ ID NO: 66880 - DNA, 25 bp, Probe sequence
cactgtttacatagtaaatcggtgg

SEQ ID NO: 66881 - DNA, 25 bp, Probe sequence
ccactgtttacatagtaaatcggtg

SEQ ID NO: 66882 - DNA, 25 bp, Probe sequence
aattcatactaatggacgatagggt

SEQ ID NO: 66883 - DNA, 25 bp, Probe sequence
attcatactaatggacgatagggtc

SEQ ID NO: 66884 - DNA, 25 bp, Probe sequence
aaattcatactaatggacgataggg

SEQ ID NO: 66885 - DNA, 25 bp, Probe sequence
aaagaaccaccgatttactatgtaa

SEQ ID NO: 66886 - DNA, 25 bp, Probe sequence
aaaagaaccaccgatttactatgta

SEQ ID NO: 66887 - DNA, 25 bp, Probe sequence
taaattcatactaatggacgatagg

SEQ ID NO: 66888 - DNA, 25 bp, Probe sequence
accgatttactatgtaaacagtggt

SEQ ID NO: 66889 - DNA, 25 bp, Probe sequence
caccgatttactatgtaaacagtgg

SEQ ID NO: 66890 - DNA, 25 bp, Probe sequence
ccaccgatttactatgtaaacagtg

SEQ ID NO: 66891 - DNA, 25 bp, Probe sequence
gatgcttcgtgattatatggtatga

SEQ ID NO: 66892 - DNA, 25 bp, Probe sequence
agatgcttcgtgattatatggtatg

SEQ ID NO: 66893 - DNA, 25 bp, Probe sequence
tgcttcgtgattatatggtatgaat

SEQ ID NO: 66894 - DNA, 25 bp, Probe sequence
atgcttcgtgattatatggtatgaa

SEQ ID NO: 66895 - DNA, 25 bp, Probe sequence
ttaagatgcttcgtgattatatggt

SEQ ID NO: 66896 - DNA, 25 bp, Probe sequence
aagatgcttcgtgattatatggtat

SEQ ID NO: 66897 - DNA, 25 bp, Probe sequence
taagatgcttcgtgattatatggta

SEQ ID NO: 66898 - DNA, 25 bp, Probe sequence
tcgtgattatatggtatgaataggt

SEQ ID NO: 66899 - DNA, 25 bp, Probe sequence
gcttcgtgattatatggtatgaata

SEQ ID NO: 66900 - DNA, 25 bp, Probe sequence
tcataccatataatcacgaagcatc

SEQ ID NO: 66901 - DNA, 25 bp, Probe sequence
cataccatataatcacgaagcatct

SEQ ID NO: 66902 - DNA, 25 bp, Probe sequence
ttcataccatataatcacgaagcat

SEQ ID NO: 66903 - DNA, 25 bp, Probe sequence
attcataccatataatcacgaagca

SEQ ID NO: 66904 - DNA, 25 bp, Probe sequence
accatataatcacgaagcatcttaa

SEQ ID NO: 66905 - DNA, 25 bp, Probe sequence
ataccatataatcacgaagcatctt

SEQ ID NO: 66906 - DNA, 25 bp, Probe sequence
taccatataatcacgaagcatctta

SEQ ID NO: 66907 - DNA, 25 bp, Probe sequence
acctattcataccatataatcacga

SEQ ID NO: 66908 - DNA, 25 bp, Probe sequence
tattcataccatataatcacgaagc

SEQ ID NO: 66909 - DNA, 25 bp, Probe sequence
gcgtcataaataaattagtgcggat

SEQ ID NO: 66910 - DNA, 25 bp, Probe sequence
acatagaatagagacgggagatttc

SEQ ID NO: 66911 - DNA, 25 bp, Probe sequence
gctagtgtaggaatctctttgtctt

SEQ ID NO: 66912 - DNA, 25 bp, Probe sequence
atggcgtcataaataaattagtgcg

SEQ ID NO: 66913 - DNA, 25 bp, Probe sequence
ctgctagtgtaggaatctctttgtc

SEQ ID NO: 66914 - DNA, 25 bp, Probe sequence
tgctagtgtaggaatctctttgtct

SEQ ID NO: 66915 - DNA, 25 bp, Probe sequence
aaaccattgacaacgctttcatatc

SEQ ID NO: 66916 - DNA, 25 bp, Probe sequence
tacatagaatagagacgggagattt

SEQ ID NO: 66917 - DNA, 25 bp, Probe sequence
aatggcgtcataaataaattagtgc

SEQ ID NO: 66918 - DNA, 25 bp, Probe sequence
atccgcactaatttatttatgacgc

SEQ ID NO: 66919 - DNA, 25 bp, Probe sequence
gaaatctcccgtctctattctatgt

SEQ ID NO: 66920 - DNA, 25 bp, Probe sequence
cgcactaatttatttatgacgccat

SEQ ID NO: 66921 - DNA, 25 bp, Probe sequence
aagacaaagagattcctacactagc

SEQ ID NO: 66922 - DNA, 25 bp, Probe sequence
gacaaagagattcctacactagcag

SEQ ID NO: 66923 - DNA, 25 bp, Probe sequence
agacaaagagattcctacactagca

SEQ ID NO: 66924 - DNA, 25 bp, Probe sequence
gatatgaaagcgttgtcaatggttt

SEQ ID NO: 66925 - DNA, 25 bp, Probe sequence
aaatctcccgtctctattctatgta

SEQ ID NO: 66926 - DNA, 25 bp, Probe sequence
gcactaatttatttatgacgccatt

SEQ ID NO: 66927 - DNA, 25 bp, Probe sequence
ttcgaacatgtacaattgaaggatt

SEQ ID NO: 66928 - DNA, 25 bp, Probe sequence
tttgaatcgagaaacgagagatttg

SEQ ID NO: 66929 - DNA, 25 bp, Probe sequence
gaatcgagaaacgagagatttgttc

SEQ ID NO: 66930 - DNA, 25 bp, Probe sequence
tgaatcgagaaacgagagatttgtt

SEQ ID NO: 66931 - DNA, 25 bp, Probe sequence
ttgaatcgagaaacgagagatttgt

SEQ ID NO: 66932 - DNA, 25 bp, Probe sequence
atttgaatcgagaaacgagagattt

SEQ ID NO: 66933 - DNA, 25 bp, Probe sequence
tcgaacatgtacaattgaaggattg

SEQ ID NO: 66934 - DNA, 25 bp, Probe sequence
tatttgaatcgagaaacgagagatt

SEQ ID NO: 66935 - DNA, 25 bp, Probe sequence
aatatttgaatcgagaaacgagaga

SEQ ID NO: 66936 - DNA, 25 bp, Probe sequence
aatccttcaattgtacatgttcgaa

SEQ ID NO: 66937 - DNA, 25 bp, Probe sequence
caaatctctcgtttctcgattcaaa

SEQ ID NO: 66938 - DNA, 25 bp, Probe sequence
gaacaaatctctcgtttctcgattc

SEQ ID NO: 66939 - DNA, 25 bp, Probe sequence
acaaatctctcgtttctcgattcaa

SEQ ID NO: 66940 - DNA, 25 bp, Probe sequence
aacaaatctctcgtttctcgattca

SEQ ID NO: 66941 - DNA, 25 bp, Probe sequence
aaatctctcgtttctcgattcaaat

SEQ ID NO: 66942 - DNA, 25 bp, Probe sequence
caatccttcaattgtacatgttcga

SEQ ID NO: 66943 - DNA, 25 bp, Probe sequence
tctctcgtttctcgattcaaatatt

SEQ ID NO: 66944 - DNA, 25 bp, Probe sequence
aatctctcgtttctcgattcaaata

SEQ ID NO: 66945 - DNA, 25 bp, Probe sequence
tacaatcataaactggtgtcctgtt

SEQ ID NO: 66946 - DNA, 25 bp, Probe sequence
gtacaatcataaactggtgtcctgt

SEQ ID NO: 66947 - DNA, 25 bp, Probe sequence
acgttgttattaaaggtgtgagatg

SEQ ID NO: 66948 - DNA, 25 bp, Probe sequence
acaatcataaactggtgtcctgttt

SEQ ID NO: 66949 - DNA, 25 bp, Probe sequence
tgtacaatcataaactggtgtcctg

SEQ ID NO: 66950 - DNA, 25 bp, Probe sequence
gtcctgttttaagggcatcagtttt

SEQ ID NO: 66951 - DNA, 25 bp, Probe sequence
cataaactggtgtcctgttttaagg

SEQ ID NO: 66952 - DNA, 25 bp, Probe sequence
caatcataaactggtgtcctgtttt

SEQ ID NO: 66953 - DNA, 25 bp, Probe sequence
tcataaactggtgtcctgttttaag

SEQ ID NO: 66954 - DNA, 25 bp, Probe sequence
aacaggacaccagtttatgattgta

SEQ ID NO: 66955 - DNA, 25 bp, Probe sequence
acaggacaccagtttatgattgtac

SEQ ID NO: 66956 - DNA, 25 bp, Probe sequence
catctcacacctttaataacaacgt

SEQ ID NO: 66957 - DNA, 25 bp, Probe sequence
aaacaggacaccagtttatgattgt

SEQ ID NO: 66958 - DNA, 25 bp, Probe sequence
caggacaccagtttatgattgtaca

SEQ ID NO: 66959 - DNA, 25 bp, Probe sequence
aaaactgatgcccttaaaacaggac

SEQ ID NO: 66960 - DNA, 25 bp, Probe sequence
aaaacaggacaccagtttatgattg

SEQ ID NO: 66961 - DNA, 25 bp, Probe sequence
ccttaaaacaggacaccagtttatg

SEQ ID NO: 66962 - DNA, 25 bp, Probe sequence
cttaaaacaggacaccagtttatga

SEQ ID NO: 66963 - DNA, 25 bp, Probe sequence
tgacaagatacaatagaggaatgtt

SEQ ID NO: 66964 - DNA, 25 bp, Probe sequence
atgacaagatacaatagaggaatgt

SEQ ID NO: 66965 - DNA, 25 bp, Probe sequence
aatgacaagatacaatagaggaatg

SEQ ID NO: 66966 - DNA, 25 bp, Probe sequence
tcaaatgacaagatacaatagagga

SEQ ID NO: 66967 - DNA, 25 bp, Probe sequence
aaggtcgagtcaatatatgatacga

SEQ ID NO: 66968 - DNA, 25 bp, Probe sequence
cgcttcatataaaggtcgagtcaat

SEQ ID NO: 66969 - DNA, 25 bp, Probe sequence
aaacgcttcatataaaggtcgagtc

SEQ ID NO: 66970 - DNA, 25 bp, Probe sequence
gcttcatataaaggtcgagtcaata

SEQ ID NO: 66971 - DNA, 25 bp, Probe sequence
caaatgacaagatacaatagaggaa

SEQ ID NO: 66972 - DNA, 25 bp, Probe sequence
aacattcctctattgtatcttgtca

SEQ ID NO: 66973 - DNA, 25 bp, Probe sequence
acattcctctattgtatcttgtcat

SEQ ID NO: 66974 - DNA, 25 bp, Probe sequence
cattcctctattgtatcttgtcatt

SEQ ID NO: 66975 - DNA, 25 bp, Probe sequence
tcctctattgtatcttgtcatttga

SEQ ID NO: 66976 - DNA, 25 bp, Probe sequence
tcgtatcatatattgactcgacctt

SEQ ID NO: 66977 - DNA, 25 bp, Probe sequence
attgactcgacctttatatgaagcg

SEQ ID NO: 66978 - DNA, 25 bp, Probe sequence
gactcgacctttatatgaagcgttt

SEQ ID NO: 66979 - DNA, 25 bp, Probe sequence
tattgactcgacctttatatgaagc

SEQ ID NO: 66980 - DNA, 25 bp, Probe sequence
ttcctctattgtatcttgtcatttg

SEQ ID NO: 66981 - DNA, 25 bp, Probe sequence
accataaaatcgtgtaatagtcttt

SEQ ID NO: 66982 - DNA, 25 bp, Probe sequence
tgaatcatcctttcgatttacttaa

SEQ ID NO: 66983 - DNA, 25 bp, Probe sequence
tgtaccataaaatcgtgtaatagtc

SEQ ID NO: 66984 - DNA, 25 bp, Probe sequence
gtaccataaaatcgtgtaatagtct

SEQ ID NO: 66985 - DNA, 25 bp, Probe sequence
gagtaggattttattaaggagatgt

SEQ ID NO: 66986 - DNA, 25 bp, Probe sequence
tgagtaggattttattaaggagatg

SEQ ID NO: 66987 - DNA, 25 bp, Probe sequence
cttaaaatgtaccataaaatcgtgt

SEQ ID NO: 66988 - DNA, 25 bp, Probe sequence
acttaaaatgtaccataaaatcgtg

SEQ ID NO: 66989 - DNA, 25 bp, Probe sequence
taccataaaatcgtgtaatagtctt

SEQ ID NO: 66990 - DNA, 25 bp, Probe sequence
aaagactattacacgattttatggt

SEQ ID NO: 66991 - DNA, 25 bp, Probe sequence
ttaagtaaatcgaaaggatgattca

SEQ ID NO: 66992 - DNA, 25 bp, Probe sequence
gactattacacgattttatggtaca

SEQ ID NO: 66993 - DNA, 25 bp, Probe sequence
agactattacacgattttatggtac

SEQ ID NO: 66994 - DNA, 25 bp, Probe sequence
catctccttaataaaatcctactca

SEQ ID NO: 66995 - DNA, 25 bp, Probe sequence
acatctccttaataaaatcctactc

SEQ ID NO: 66996 - DNA, 25 bp, Probe sequence
cacgattttatggtacattttaagt

SEQ ID NO: 66997 - DNA, 25 bp, Probe sequence
acacgattttatggtacattttaag

SEQ ID NO: 66998 - DNA, 25 bp, Probe sequence
aagactattacacgattttatggta

SEQ ID NO: 66999 - DNA, 25 bp, Probe sequence
cctaaatgataatgtgtcttgggtg

SEQ ID NO: 67000 - DNA, 25 bp, Probe sequence
aaatgataatgtgtcttgggtgaaa

SEQ ID NO: 67001 - DNA, 25 bp, Probe sequence
aatgataatgtgtcttgggtgaaat

SEQ ID NO: 67002 - DNA, 25 bp, Probe sequence
ctaaatgataatgtgtcttgggtga

SEQ ID NO: 67003 - DNA, 25 bp, Probe sequence
atgataatgtgtcttgggtgaaatt

SEQ ID NO: 67004 - DNA, 25 bp, Probe sequence
taaatgataatgtgtcttgggtgaa

SEQ ID NO: 67005 - DNA, 25 bp, Probe sequence
cgaaatcgcagttatatcaatgttt

SEQ ID NO: 67006 - DNA, 25 bp, Probe sequence
caccctaaatgataatgtgtcttgg

SEQ ID NO: 67007 - DNA, 25 bp, Probe sequence
gtcgaaatcgcagttatatcaatgt

SEQ ID NO: 67008 - DNA, 25 bp, Probe sequence
cacccaagacacattatcatttagg

SEQ ID NO: 67009 - DNA, 25 bp, Probe sequence
tttcacccaagacacattatcattt

SEQ ID NO: 67010 - DNA, 25 bp, Probe sequence
atttcacccaagacacattatcatt

SEQ ID NO: 67011 - DNA, 25 bp, Probe sequence
tcacccaagacacattatcatttag

SEQ ID NO: 67012 - DNA, 25 bp, Probe sequence
aatttcacccaagacacattatcat

SEQ ID NO: 67013 - DNA, 25 bp, Probe sequence
ttcacccaagacacattatcattta

SEQ ID NO: 67014 - DNA, 25 bp, Probe sequence
aaacattgatataactgcgatttcg

SEQ ID NO: 67015 - DNA, 25 bp, Probe sequence
ccaagacacattatcatttagggtg

SEQ ID NO: 67016 - DNA, 25 bp, Probe sequence
acattgatataactgcgatttcgac

SEQ ID NO: 67017 - DNA, 25 bp, Probe sequence
gggaaatcagtaatatcaagggcta

SEQ ID NO: 67018 - DNA, 25 bp, Probe sequence
atgggaaatcagtaatatcaagggc

SEQ ID NO: 67019 - DNA, 25 bp, Probe sequence
gatgggaaatcagtaatatcaaggg

SEQ ID NO: 67020 - DNA, 25 bp, Probe sequence
aatcagtaatatcaagggctagagc

SEQ ID NO: 67021 - DNA, 25 bp, Probe sequence
tgggaaatcagtaatatcaagggct

SEQ ID NO: 67022 - DNA, 25 bp, Probe sequence
ggaaatcagtaatatcaagggctag

SEQ ID NO: 67023 - DNA, 25 bp, Probe sequence
agtaatatcaagggctagagcgttt

SEQ ID NO: 67024 - DNA, 25 bp, Probe sequence
atcagtaatatcaagggctagagcg

SEQ ID NO: 67025 - DNA, 25 bp, Probe sequence
aaatcagtaatatcaagggctagag

SEQ ID NO: 67026 - DNA, 25 bp, Probe sequence
tagcccttgatattactgatttccc

SEQ ID NO: 67027 - DNA, 25 bp, Probe sequence
gcccttgatattactgatttcccat

SEQ ID NO: 67028 - DNA, 25 bp, Probe sequence
cccttgatattactgatttcccatc

SEQ ID NO: 67029 - DNA, 25 bp, Probe sequence
gctctagcccttgatattactgatt

SEQ ID NO: 67030 - DNA, 25 bp, Probe sequence
agcccttgatattactgatttccca

SEQ ID NO: 67031 - DNA, 25 bp, Probe sequence
ctagcccttgatattactgatttcc

SEQ ID NO: 67032 - DNA, 25 bp, Probe sequence
aaacgctctagcccttgatattact

SEQ ID NO: 67033 - DNA, 25 bp, Probe sequence
cgctctagcccttgatattactgat

SEQ ID NO: 67034 - DNA, 25 bp, Probe sequence
tctagcccttgatattactgatttc

SEQ ID NO: 67035 - DNA, 25 bp, Probe sequence
gccatattcatattacttctcatcg

SEQ ID NO: 67036 - DNA, 25 bp, Probe sequence
tatatttggaggtgatgagatgagg

SEQ ID NO: 67037 - DNA, 25 bp, Probe sequence
gagggaccttactacgcattattaa

SEQ ID NO: 67038 - DNA, 25 bp, Probe sequence
agagggaccttactacgcattatta

SEQ ID NO: 67039 - DNA, 25 bp, Probe sequence
aagagggaccttactacgcattatt

SEQ ID NO: 67040 - DNA, 25 bp, Probe sequence
aaagagggaccttactacgcattat

SEQ ID NO: 67041 - DNA, 25 bp, Probe sequence
agggaccttactacgcattattaag

SEQ ID NO: 67042 - DNA, 25 bp, Probe sequence
atatttggaggtgatgagatgaggc

SEQ ID NO: 67043 - DNA, 25 bp, Probe sequence
agccatattcatattacttctcatc

SEQ ID NO: 67044 - DNA, 25 bp, Probe sequence
cgatgagaagtaatatgaatatggc

SEQ ID NO: 67045 - DNA, 25 bp, Probe sequence
cctcatctcatcacctccaaatata

SEQ ID NO: 67046 - DNA, 25 bp, Probe sequence
ttaataatgcgtagtaaggtccctc

SEQ ID NO: 67047 - DNA, 25 bp, Probe sequence
taataatgcgtagtaaggtccctct

SEQ ID NO: 67048 - DNA, 25 bp, Probe sequence
ataatgcgtagtaaggtccctcttt

SEQ ID NO: 67049 - DNA, 25 bp, Probe sequence
aataatgcgtagtaaggtccctctt

SEQ ID NO: 67050 - DNA, 25 bp, Probe sequence
cttaataatgcgtagtaaggtccct

SEQ ID NO: 67051 - DNA, 25 bp, Probe sequence
gcctcatctcatcacctccaaatat

SEQ ID NO: 67052 - DNA, 25 bp, Probe sequence
gatgagaagtaatatgaatatggct

SEQ ID NO: 67053 - DNA, 25 bp, Probe sequence
aggtgctcttagatggatgttaatc

SEQ ID NO: 67054 - DNA, 25 bp, Probe sequence
ggtgctcttagatggatgttaatca

SEQ ID NO: 67055 - DNA, 25 bp, Probe sequence
ttaggtgctcttagatggatgttaa

SEQ ID NO: 67056 - DNA, 25 bp, Probe sequence
taggtgctcttagatggatgttaat

SEQ ID NO: 67057 - DNA, 25 bp, Probe sequence
gtgctcttagatggatgttaatcat

SEQ ID NO: 67058 - DNA, 25 bp, Probe sequence
ggaggtggtatttatgacaagagaa

SEQ ID NO: 67059 - DNA, 25 bp, Probe sequence
tagggaggtggtatttatgacaaga

SEQ ID NO: 67060 - DNA, 25 bp, Probe sequence
atagggaggtggtatttatgacaag

SEQ ID NO: 67061 - DNA, 25 bp, Probe sequence
ctgtgacgagcttaataattcaagt

SEQ ID NO: 67062 - DNA, 25 bp, Probe sequence
gattaacatccatctaagagcacct

SEQ ID NO: 67063 - DNA, 25 bp, Probe sequence
tgattaacatccatctaagagcacc

SEQ ID NO: 67064 - DNA, 25 bp, Probe sequence
ttaacatccatctaagagcacctaa

SEQ ID NO: 67065 - DNA, 25 bp, Probe sequence
attaacatccatctaagagcaccta

SEQ ID NO: 67066 - DNA, 25 bp, Probe sequence
atgattaacatccatctaagagcac

SEQ ID NO: 67067 - DNA, 25 bp, Probe sequence
ttctcttgtcataaataccacctcc

SEQ ID NO: 67068 - DNA, 25 bp, Probe sequence
acttgaattattaagctcgtcacag

SEQ ID NO: 67069 - DNA, 25 bp, Probe sequence
cttgtcataaataccacctccctat

SEQ ID NO: 67070 - DNA, 25 bp, Probe sequence
tcttgtcataaataccacctcccta

SEQ ID NO: 67071 - DNA, 25 bp, Probe sequence
acgtagttactgcattaggattatt

SEQ ID NO: 67072 - DNA, 25 bp, Probe sequence
aacgtagttactgcattaggattat

SEQ ID NO: 67073 - DNA, 25 bp, Probe sequence
ttgaaatatcatggagtgagccttt

SEQ ID NO: 67074 - DNA, 25 bp, Probe sequence
tttgaaatatcatggagtgagcctt

SEQ ID NO: 67075 - DNA, 25 bp, Probe sequence
agtttatgaattaacaagtttggca

SEQ ID NO: 67076 - DNA, 25 bp, Probe sequence
caaagaaacaatgtattgctaaacg

SEQ ID NO: 67077 - DNA, 25 bp, Probe sequence
atgtattgctaaacgtagttactgc

SEQ ID NO: 67078 - DNA, 25 bp, Probe sequence
ttggcaactacaaagaaacaatgta

SEQ ID NO: 67079 - DNA, 25 bp, Probe sequence
tttatgaattaacaagtttggcaac

SEQ ID NO: 67080 - DNA, 25 bp, Probe sequence
aataatcctaatgcagtaactacgt

SEQ ID NO: 67081 - DNA, 25 bp, Probe sequence
ataatcctaatgcagtaactacgtt

SEQ ID NO: 67082 - DNA, 25 bp, Probe sequence
aaggctcactccatgatatttcaaa

SEQ ID NO: 67083 - DNA, 25 bp, Probe sequence
aaaggctcactccatgatatttcaa

SEQ ID NO: 67084 - DNA, 25 bp, Probe sequence
tgccaaacttgttaattcataaact

SEQ ID NO: 67085 - DNA, 25 bp, Probe sequence
cgtttagcaatacattgtttctttg

SEQ ID NO: 67086 - DNA, 25 bp, Probe sequence
gcagtaactacgtttagcaatacat

SEQ ID NO: 67087 - DNA, 25 bp, Probe sequence
ttgccaaacttgttaattcataaac

SEQ ID NO: 67088 - DNA, 25 bp, Probe sequence
gttgccaaacttgttaattcataaa

SEQ ID NO: 67089 - DNA, 25 bp, Probe sequence
tgtccacctcaataagataatctct

SEQ ID NO: 67090 - DNA, 25 bp, Probe sequence
ttgtccacctcaataagataatctc

SEQ ID NO: 67091 - DNA, 25 bp, Probe sequence
aagtgatgatattaaaggctgaaca

SEQ ID NO: 67092 - DNA, 25 bp, Probe sequence
gttaggttaggtggacaagaaatta

SEQ ID NO: 67093 - DNA, 25 bp, Probe sequence
tgttaggttaggtggacaagaaatt

SEQ ID NO: 67094 - DNA, 25 bp, Probe sequence
aggttaggtggacaagaaattaaat

SEQ ID NO: 67095 - DNA, 25 bp, Probe sequence
ctaatgatttcatggttgtctgtcc

SEQ ID NO: 67096 - DNA, 25 bp, Probe sequence
tctaatgatttcatggttgtctgtc

SEQ ID NO: 67097 - DNA, 25 bp, Probe sequence
aaaggctgaacacagtaaataagtt

SEQ ID NO: 67098 - DNA, 25 bp, Probe sequence
agagattatcttattgaggtggaca

SEQ ID NO: 67099 - DNA, 25 bp, Probe sequence
gagattatcttattgaggtggacaa

SEQ ID NO: 67100 - DNA, 25 bp, Probe sequence
tgttcagcctttaatatcatcactt

SEQ ID NO: 67101 - DNA, 25 bp, Probe sequence
taatttcttgtccacctaacctaac

SEQ ID NO: 67102 - DNA, 25 bp, Probe sequence
aatttcttgtccacctaacctaaca

SEQ ID NO: 67103 - DNA, 25 bp, Probe sequence
atttaatttcttgtccacctaacct

SEQ ID NO: 67104 - DNA, 25 bp, Probe sequence
ggacagacaaccatgaaatcattag

SEQ ID NO: 67105 - DNA, 25 bp, Probe sequence
gacagacaaccatgaaatcattaga

SEQ ID NO: 67106 - DNA, 25 bp, Probe sequence
ctgtgttcagcctttaatatcatca

SEQ ID NO: 67107 - DNA, 25 bp, Probe sequence
gagtgtaaagaatcgtgtggtaaac

SEQ ID NO: 67108 - DNA, 25 bp, Probe sequence
tgcaatctaataagaatgtgaggtt

SEQ ID NO: 67109 - DNA, 25 bp, Probe sequence
gtgtaaagaatcgtgtggtaaacat

SEQ ID NO: 67110 - DNA, 25 bp, Probe sequence
agtgtaaagaatcgtgtggtaaaca

SEQ ID NO: 67111 - DNA, 25 bp, Probe sequence
aatgaagatgactattaaagtgcga

SEQ ID NO: 67112 - DNA, 25 bp, Probe sequence
tgtaaagaatcgtgtggtaaacata

SEQ ID NO: 67113 - DNA, 25 bp, Probe sequence
tgatttcaattctggtaggactatt

SEQ ID NO: 67114 - DNA, 25 bp, Probe sequence
aaatgaagatgactattaaagtgcg

SEQ ID NO: 67115 - DNA, 25 bp, Probe sequence
gcaatctaataagaatgtgaggttt

SEQ ID NO: 67116 - DNA, 25 bp, Probe sequence
gtttaccacacgattctttacactc

SEQ ID NO: 67117 - DNA, 25 bp, Probe sequence
aacctcacattcttattagattgca

SEQ ID NO: 67118 - DNA, 25 bp, Probe sequence
atgtttaccacacgattctttacac

SEQ ID NO: 67119 - DNA, 25 bp, Probe sequence
tttcgcactttaatagtcatcttca

SEQ ID NO: 67120 - DNA, 25 bp, Probe sequence
tgtttaccacacgattctttacact

SEQ ID NO: 67121 - DNA, 25 bp, Probe sequence
tcgcactttaatagtcatcttcatt

SEQ ID NO: 67122 - DNA, 25 bp, Probe sequence
ttcgcactttaatagtcatcttcat

SEQ ID NO: 67123 - DNA, 25 bp, Probe sequence
tatgtttaccacacgattctttaca

SEQ ID NO: 67124 - DNA, 25 bp, Probe sequence
aatagtcctaccagaattgaaatca

SEQ ID NO: 67125 - DNA, 25 bp, Probe sequence
aactattatgaagtgatgatagcca

SEQ ID NO: 67126 - DNA, 25 bp, Probe sequence
actattatgaagtgatgatagccat

SEQ ID NO: 67127 - DNA, 25 bp, Probe sequence
tatttgagaaggctatatgactccg

SEQ ID NO: 67128 - DNA, 25 bp, Probe sequence
gtatttgagaaggctatatgactcc

SEQ ID NO: 67129 - DNA, 25 bp, Probe sequence
ctattatgaagtgatgatagccatt

SEQ ID NO: 67130 - DNA, 25 bp, Probe sequence
agtatttgagaaggctatatgactc

SEQ ID NO: 67131 - DNA, 25 bp, Probe sequence
attatgaagtgatgatagccattaa

SEQ ID NO: 67132 - DNA, 25 bp, Probe sequence
aaaggcgtaaggtataaaagcaatc

SEQ ID NO: 67133 - DNA, 25 bp, Probe sequence
gtaaaaggcgtaaggtataaaagca

SEQ ID NO: 67134 - DNA, 25 bp, Probe sequence
tggctatcatcacttcataatagtt

SEQ ID NO: 67135 - DNA, 25 bp, Probe sequence
atggctatcatcacttcataatagt

SEQ ID NO: 67136 - DNA, 25 bp, Probe sequence
cggagtcatatagccttctcaaata

SEQ ID NO: 67137 - DNA, 25 bp, Probe sequence
ggagtcatatagccttctcaaatac

SEQ ID NO: 67138 - DNA, 25 bp, Probe sequence
aatggctatcatcacttcataatag

SEQ ID NO: 67139 - DNA, 25 bp, Probe sequence
gagtcatatagccttctcaaatact

SEQ ID NO: 67140 - DNA, 25 bp, Probe sequence
ttaatggctatcatcacttcataat

SEQ ID NO: 67141 - DNA, 25 bp, Probe sequence
tgcttttataccttacgccttttac

SEQ ID NO: 67142 - DNA, 25 bp, Probe sequence
gattgcttttataccttacgccttt

SEQ ID NO: 67143 - DNA, 25 bp, Probe sequence
atagattggaatggatcgtcttgaa

SEQ ID NO: 67144 - DNA, 25 bp, Probe sequence
aatagattggaatggatcgtcttga

SEQ ID NO: 67145 - DNA, 25 bp, Probe sequence
ttaatcagtcaggagggaatttcac

SEQ ID NO: 67146 - DNA, 25 bp, Probe sequence
gttaatcagtcaggagggaatttca

SEQ ID NO: 67147 - DNA, 25 bp, Probe sequence
agtttaagaagatgagagtgaagga

SEQ ID NO: 67148 - DNA, 25 bp, Probe sequence
aataatacttgcttcaacactgtac

SEQ ID NO: 67149 - DNA, 25 bp, Probe sequence
cgttaatcagtcaggagggaatttc

SEQ ID NO: 67150 - DNA, 25 bp, Probe sequence
gtttaagaagatgagagtgaaggaa

SEQ ID NO: 67151 - DNA, 25 bp, Probe sequence
aagtttaagaagatgagagtgaagg

SEQ ID NO: 67152 - DNA, 25 bp, Probe sequence
tcaagacgatccattccaatctatt

SEQ ID NO: 67153 - DNA, 25 bp, Probe sequence
ttcaagacgatccattccaatctat

SEQ ID NO: 67154 - DNA, 25 bp, Probe sequence
tgaaattccctcctgactgattaac

SEQ ID NO: 67155 - DNA, 25 bp, Probe sequence
gtgaaattccctcctgactgattaa

SEQ ID NO: 67156 - DNA, 25 bp, Probe sequence
tccttcactctcatcttcttaaact

SEQ ID NO: 67157 - DNA, 25 bp, Probe sequence
gtacagtgttgaagcaagtattatt

SEQ ID NO: 67158 - DNA, 25 bp, Probe sequence
ccttcactctcatcttcttaaactt

SEQ ID NO: 67159 - DNA, 25 bp, Probe sequence
ttccttcactctcatcttcttaaac

SEQ ID NO: 67160 - DNA, 25 bp, Probe sequence
gaaattccctcctgactgattaacg

SEQ ID NO: 67161 - DNA, 25 bp, Probe sequence
aacacaactactcaactgatcttaa

SEQ ID NO: 67162 - DNA, 25 bp, Probe sequence
acacaactactcaactgatcttaat

SEQ ID NO: 67163 - DNA, 25 bp, Probe sequence
cacaactactcaactgatcttaatt

SEQ ID NO: 67164 - DNA, 25 bp, Probe sequence
atcaacggcttcaaatgagtagttt

SEQ ID NO: 67165 - DNA, 25 bp, Probe sequence
tttatatcatcaacggcttcaaatg

SEQ ID NO: 67166 - DNA, 25 bp, Probe sequence
tcaataaacacaactactcaactga

SEQ ID NO: 67167 - DNA, 25 bp, Probe sequence
tcaacggcttcaaatgagtagtttc

SEQ ID NO: 67168 - DNA, 25 bp, Probe sequence
catcaacggcttcaaatgagtagtt

SEQ ID NO: 67169 - DNA, 25 bp, Probe sequence
atcaataaacacaactactcaactg

SEQ ID NO: 67170 - DNA, 25 bp, Probe sequence
ttaagatcagttgagtagttgtgtt

SEQ ID NO: 67171 - DNA, 25 bp, Probe sequence
attaagatcagttgagtagttgtgt

SEQ ID NO: 67172 - DNA, 25 bp, Probe sequence
aattaagatcagttgagtagttgtg

SEQ ID NO: 67173 - DNA, 25 bp, Probe sequence
aaactactcatttgaagccgttgat

SEQ ID NO: 67174 - DNA, 25 bp, Probe sequence
catttgaagccgttgatgatataaa

SEQ ID NO: 67175 - DNA, 25 bp, Probe sequence
tcagttgagtagttgtgtttattga

SEQ ID NO: 67176 - DNA, 25 bp, Probe sequence
aactactcatttgaagccgttgatg

SEQ ID NO: 67177 - DNA, 25 bp, Probe sequence
gaaactactcatttgaagccgttga

SEQ ID NO: 67178 - DNA, 25 bp, Probe sequence
tgacgagatttgagaagtattatga

SEQ ID NO: 67179 - DNA, 25 bp, Probe sequence
gttaaagtttgtatcgcattatcgc

SEQ ID NO: 67180 - DNA, 25 bp, Probe sequence
gtgaattgttaaagtttgtatcgca

SEQ ID NO: 67181 - DNA, 25 bp, Probe sequence
tgtgaattgttaaagtttgtatcgc

SEQ ID NO: 67182 - DNA, 25 bp, Probe sequence
tgttaaagtttgtatcgcattatcg

SEQ ID NO: 67183 - DNA, 25 bp, Probe sequence
tgaattgttaaagtttgtatcgcat

SEQ ID NO: 67184 - DNA, 25 bp, Probe sequence
catgctggaacacatatattaatga

SEQ ID NO: 67185 - DNA, 25 bp, Probe sequence
tcatgctggaacacatatattaatg

SEQ ID NO: 67186 - DNA, 25 bp, Probe sequence
gaattgttaaagtttgtatcgcatt

SEQ ID NO: 67187 - DNA, 25 bp, Probe sequence
tgctggaacacatatattaatgatt

SEQ ID NO: 67188 - DNA, 25 bp, Probe sequence
gcgataatgcgatacaaactttaac

SEQ ID NO: 67189 - DNA, 25 bp, Probe sequence
gcgatacaaactttaacaattcaca

SEQ ID NO: 67190 - DNA, 25 bp, Probe sequence
tgcgatacaaactttaacaattcac

SEQ ID NO: 67191 - DNA, 25 bp, Probe sequence
cgataatgcgatacaaactttaaca

SEQ ID NO: 67192 - DNA, 25 bp, Probe sequence
atgcgatacaaactttaacaattca

SEQ ID NO: 67193 - DNA, 25 bp, Probe sequence
cattaatatatgtgttccagcatga

SEQ ID NO: 67194 - DNA, 25 bp, Probe sequence
tcattaatatatgtgttccagcatg

SEQ ID NO: 67195 - DNA, 25 bp, Probe sequence
aatgcgatacaaactttaacaattc

SEQ ID NO: 67196 - DNA, 25 bp, Probe sequence
attaatatatgtgttccagcatgaa

SEQ ID NO: 67197 - DNA, 25 bp, Probe sequence
taaggagtctcgattatagaggctc

SEQ ID NO: 67198 - DNA, 25 bp, Probe sequence
gtaaggagtctcgattatagaggct

SEQ ID NO: 67199 - DNA, 25 bp, Probe sequence
tgtaaggagtctcgattatagaggc

SEQ ID NO: 67200 - DNA, 25 bp, Probe sequence
ttgtaaggagtctcgattatagagg

SEQ ID NO: 67201 - DNA, 25 bp, Probe sequence
aggagtctcgattatagaggctctt

SEQ ID NO: 67202 - DNA, 25 bp, Probe sequence
aaggagtctcgattatagaggctct

SEQ ID NO: 67203 - DNA, 25 bp, Probe sequence
ggagtctcgattatagaggctcttt

SEQ ID NO: 67204 - DNA, 25 bp, Probe sequence
tttcaaatctatgacaaagtgttct

SEQ ID NO: 67205 - DNA, 25 bp, Probe sequence
tttgtaaggagtctcgattatagag

SEQ ID NO: 67206 - DNA, 25 bp, Probe sequence
gagcctctataatcgagactcctta

SEQ ID NO: 67207 - DNA, 25 bp, Probe sequence
agcctctataatcgagactccttac

SEQ ID NO: 67208 - DNA, 25 bp, Probe sequence
gcctctataatcgagactccttaca

SEQ ID NO: 67209 - DNA, 25 bp, Probe sequence
cctctataatcgagactccttacaa

SEQ ID NO: 67210 - DNA, 25 bp, Probe sequence
agagcctctataatcgagactcctt

SEQ ID NO: 67211 - DNA, 25 bp, Probe sequence
aagagcctctataatcgagactcct

SEQ ID NO: 67212 - DNA, 25 bp, Probe sequence
aaagagcctctataatcgagactcc

SEQ ID NO: 67213 - DNA, 25 bp, Probe sequence
agaacactttgtcatagatttgaaa

SEQ ID NO: 67214 - DNA, 25 bp, Probe sequence
ctctataatcgagactccttacaaa

SEQ ID NO: 67215 - DNA, 25 bp, Probe sequence
ttggtactcgcaatttagatttgtt

SEQ ID NO: 67216 - DNA, 25 bp, Probe sequence
tttggtactcgcaatttagatttgt

SEQ ID NO: 67217 - DNA, 25 bp, Probe sequence
tggtactcgcaatttagatttgtta

SEQ ID NO: 67218 - DNA, 25 bp, Probe sequence
cttggaaagtgagtcaataatcaaa

SEQ ID NO: 67219 - DNA, 25 bp, Probe sequence
ggtactcgcaatttagatttgttaa

SEQ ID NO: 67220 - DNA, 25 bp, Probe sequence
gatttaagagacttggaaagtgagt

SEQ ID NO: 67221 - DNA, 25 bp, Probe sequence
tgatttaagagacttggaaagtgag

SEQ ID NO: 67222 - DNA, 25 bp, Probe sequence
acttggaaagtgagtcaataatcaa

SEQ ID NO: 67223 - DNA, 25 bp, Probe sequence
agtgttttgatttaagagacttgga

SEQ ID NO: 67224 - DNA, 25 bp, Probe sequence
acaaatctaaattgcgagtaccaaa

SEQ ID NO: 67225 - DNA, 25 bp, Probe sequence
aacaaatctaaattgcgagtaccaa

SEQ ID NO: 67226 - DNA, 25 bp, Probe sequence
taacaaatctaaattgcgagtacca

SEQ ID NO: 67227 - DNA, 25 bp, Probe sequence
tttgattattgactcactttccaag

SEQ ID NO: 67228 - DNA, 25 bp, Probe sequence
ttaacaaatctaaattgcgagtacc

SEQ ID NO: 67229 - DNA, 25 bp, Probe sequence
ctcactttccaagtctcttaaatca

SEQ ID NO: 67230 - DNA, 25 bp, Probe sequence
actcactttccaagtctcttaaatc

SEQ ID NO: 67231 - DNA, 25 bp, Probe sequence
ttgattattgactcactttccaagt

SEQ ID NO: 67232 - DNA, 25 bp, Probe sequence
tccaagtctcttaaatcaaaacact

SEQ ID NO: 67233 - DNA, 25 bp, Probe sequence
cgagcgtaatggattattatgcctt

SEQ ID NO: 67234 - DNA, 25 bp, Probe sequence
ataataaccatagtgcgtatcgagc

SEQ ID NO: 67235 - DNA, 25 bp, Probe sequence
cataataaccatagtgcgtatcgag

SEQ ID NO: 67236 - DNA, 25 bp, Probe sequence
tatcgagcgtaatggattattatgc

SEQ ID NO: 67237 - DNA, 25 bp, Probe sequence
gcgtatcgagcgtaatggattatta

SEQ ID NO: 67238 - DNA, 25 bp, Probe sequence
cgtatcgagcgtaatggattattat

SEQ ID NO: 67239 - DNA, 25 bp, Probe sequence
atcgagcgtaatggattattatgcc

SEQ ID NO: 67240 - DNA, 25 bp, Probe sequence
gcgtaatggattattatgcctttga

SEQ ID NO: 67241 - DNA, 25 bp, Probe sequence
agcgtaatggattattatgcctttg

SEQ ID NO: 67242 - DNA, 25 bp, Probe sequence
aaggcataataatccattacgctcg

SEQ ID NO: 67243 - DNA, 25 bp, Probe sequence
ctcgatacgcactatggttattatg

SEQ ID NO: 67244 - DNA, 25 bp, Probe sequence
gctcgatacgcactatggttattat

SEQ ID NO: 67245 - DNA, 25 bp, Probe sequence
gcataataatccattacgctcgata

SEQ ID NO: 67246 - DNA, 25 bp, Probe sequence
taataatccattacgctcgatacgc

SEQ ID NO: 67247 - DNA, 25 bp, Probe sequence
ataataatccattacgctcgatacg

SEQ ID NO: 67248 - DNA, 25 bp, Probe sequence
ggcataataatccattacgctcgat

SEQ ID NO: 67249 - DNA, 25 bp, Probe sequence
caaaggcataataatccattacgct

SEQ ID NO: 67250 - DNA, 25 bp, Probe sequence
tcaaaggcataataatccattacgc

SEQ ID NO: 67251 - DNA, 25 bp, Probe sequence
gacagaattaggtcactcatagtat

SEQ ID NO: 67252 - DNA, 25 bp, Probe sequence
acagaattaggtcactcatagtatt

SEQ ID NO: 67253 - DNA, 25 bp, Probe sequence
tgatgttcaatgaatatgacgtgaa

SEQ ID NO: 67254 - DNA, 25 bp, Probe sequence
ttgatgttcaatgaatatgacgtga

SEQ ID NO: 67255 - DNA, 25 bp, Probe sequence
caatgaatatgacgtgaaagattcg

SEQ ID NO: 67256 - DNA, 25 bp, Probe sequence
atgtataatgatatttgtgaaagcg

SEQ ID NO: 67257 - DNA, 25 bp, Probe sequence
atgacagaattaggtcactcatagt

SEQ ID NO: 67258 - DNA, 25 bp, Probe sequence
tgacagaattaggtcactcatagta

SEQ ID NO: 67259 - DNA, 25 bp, Probe sequence
ataaactgacagatattgatgttca

SEQ ID NO: 67260 - DNA, 25 bp, Probe sequence
atactatgagtgacctaattctgtc

SEQ ID NO: 67261 - DNA, 25 bp, Probe sequence
aatactatgagtgacctaattctgt

SEQ ID NO: 67262 - DNA, 25 bp, Probe sequence
tcacgtcatattcattgaacatcaa

SEQ ID NO: 67263 - DNA, 25 bp, Probe sequence
ttcacgtcatattcattgaacatca

SEQ ID NO: 67264 - DNA, 25 bp, Probe sequence
cgaatctttcacgtcatattcattg

SEQ ID NO: 67265 - DNA, 25 bp, Probe sequence
cgctttcacaaatatcattatacat

SEQ ID NO: 67266 - DNA, 25 bp, Probe sequence
actatgagtgacctaattctgtcat

SEQ ID NO: 67267 - DNA, 25 bp, Probe sequence
tactatgagtgacctaattctgtca

SEQ ID NO: 67268 - DNA, 25 bp, Probe sequence
tgaacatcaatatctgtcagtttat

SEQ ID NO: 67269 - DNA, 25 bp, Probe sequence
gcagttgaatacatgtgttacgaat

SEQ ID NO: 67270 - DNA, 25 bp, Probe sequence
tgaatacatgtgttacgaattgctt

SEQ ID NO: 67271 - DNA, 25 bp, Probe sequence
ttgaatacatgtgttacgaattgct

SEQ ID NO: 67272 - DNA, 25 bp, Probe sequence
gttgaatacatgtgttacgaattgc

SEQ ID NO: 67273 - DNA, 25 bp, Probe sequence
cataacgcagttgaatacatgtgtt

SEQ ID NO: 67274 - DNA, 25 bp, Probe sequence
tcataacgcagttgaatacatgtgt

SEQ ID NO: 67275 - DNA, 25 bp, Probe sequence
agttgaatacatgtgttacgaattg

SEQ ID NO: 67276 - DNA, 25 bp, Probe sequence
cagttgaatacatgtgttacgaatt

SEQ ID NO: 67277 - DNA, 25 bp, Probe sequence
taacgcagttgaatacatgtgttac

SEQ ID NO: 67278 - DNA, 25 bp, Probe sequence
attcgtaacacatgtattcaactgc

SEQ ID NO: 67279 - DNA, 25 bp, Probe sequence
gcaattcgtaacacatgtattcaac

SEQ ID NO: 67280 - DNA, 25 bp, Probe sequence
agcaattcgtaacacatgtattcaa

SEQ ID NO: 67281 - DNA, 25 bp, Probe sequence
aagcaattcgtaacacatgtattca

SEQ ID NO: 67282 - DNA, 25 bp, Probe sequence
aacacatgtattcaactgcgttatg

SEQ ID NO: 67283 - DNA, 25 bp, Probe sequence
acacatgtattcaactgcgttatga

SEQ ID NO: 67284 - DNA, 25 bp, Probe sequence
aattcgtaacacatgtattcaactg

SEQ ID NO: 67285 - DNA, 25 bp, Probe sequence
caattcgtaacacatgtattcaact

SEQ ID NO: 67286 - DNA, 25 bp, Probe sequence
gtaacacatgtattcaactgcgtta

SEQ ID NO: 67287 - DNA, 25 bp, Probe sequence
aaaagcacaaacggaggtacataaa

SEQ ID NO: 67288 - DNA, 25 bp, Probe sequence
caaaagcacaaacggaggtacataa

SEQ ID NO: 67289 - DNA, 25 bp, Probe sequence
tcaaaagcacaaacggaggtacata

SEQ ID NO: 67290 - DNA, 25 bp, Probe sequence
tttctcaaaagcacaaacggaggta

SEQ ID NO: 67291 - DNA, 25 bp, Probe sequence
ttctcaaaagcacaaacggaggtac

SEQ ID NO: 67292 - DNA, 25 bp, Probe sequence
ctcaaaagcacaaacggaggtacat

SEQ ID NO: 67293 - DNA, 25 bp, Probe sequence
ttttctcaaaagcacaaacggaggt

SEQ ID NO: 67294 - DNA, 25 bp, Probe sequence
tctcaaaagcacaaacggaggtaca

SEQ ID NO: 67295 - DNA, 25 bp, Probe sequence
tttatgtacctccgtttgtgctttt

SEQ ID NO: 67296 - DNA, 25 bp, Probe sequence
ttatgtacctccgtttgtgcttttg

SEQ ID NO: 67297 - DNA, 25 bp, Probe sequence
tatgtacctccgtttgtgcttttga

SEQ ID NO: 67298 - DNA, 25 bp, Probe sequence
tacctccgtttgtgcttttgagaaa

SEQ ID NO: 67299 - DNA, 25 bp, Probe sequence
gtacctccgtttgtgcttttgagaa

SEQ ID NO: 67300 - DNA, 25 bp, Probe sequence
atgtacctccgtttgtgcttttgag

SEQ ID NO: 67301 - DNA, 25 bp, Probe sequence
acctccgtttgtgcttttgagaaaa

SEQ ID NO: 67302 - DNA, 25 bp, Probe sequence
tgtacctccgtttgtgcttttgaga

SEQ ID NO: 67303 - DNA, 25 bp, Probe sequence
cagaatagagaggagatttaatgcg

SEQ ID NO: 67304 - DNA, 25 bp, Probe sequence
agaatagagaggagatttaatgcga

SEQ ID NO: 67305 - DNA, 25 bp, Probe sequence
gaatagagaggagatttaatgcgat

SEQ ID NO: 67306 - DNA, 25 bp, Probe sequence
tgcagaatagagaggagatttaatg

SEQ ID NO: 67307 - DNA, 25 bp, Probe sequence
gcagaatagagaggagatttaatgc

SEQ ID NO: 67308 - DNA, 25 bp, Probe sequence
aatgcagaatagagaggagatttaa

SEQ ID NO: 67309 - DNA, 25 bp, Probe sequence
ttaaatgcagaatagagaggagatt

SEQ ID NO: 67310 - DNA, 25 bp, Probe sequence
atgcagaatagagaggagatttaat

SEQ ID NO: 67311 - DNA, 25 bp, Probe sequence
attaaatgcagaatagagaggagat

SEQ ID NO: 67312 - DNA, 25 bp, Probe sequence
cgcattaaatctcctctctattctg

SEQ ID NO: 67313 - DNA, 25 bp, Probe sequence
tcgcattaaatctcctctctattct

SEQ ID NO: 67314 - DNA, 25 bp, Probe sequence
atcgcattaaatctcctctctattc

SEQ ID NO: 67315 - DNA, 25 bp, Probe sequence
cattaaatctcctctctattctgca

SEQ ID NO: 67316 - DNA, 25 bp, Probe sequence
gcattaaatctcctctctattctgc

SEQ ID NO: 67317 - DNA, 25 bp, Probe sequence
aatctcctctctattctgcatttaa

SEQ ID NO: 67318 - DNA, 25 bp, Probe sequence
ttaaatctcctctctattctgcatt

SEQ ID NO: 67319 - DNA, 25 bp, Probe sequence
atctcctctctattctgcatttaat

SEQ ID NO: 67320 - DNA, 25 bp, Probe sequence
attaaatctcctctctattctgcat

SEQ ID NO: 67321 - DNA, 25 bp, Probe sequence
tgacttcagttatactatggaggat

SEQ ID NO: 67322 - DNA, 25 bp, Probe sequence
atgacttcagttatactatggagga

SEQ ID NO: 67323 - DNA, 25 bp, Probe sequence
aatgacttcagttatactatggagg

SEQ ID NO: 67324 - DNA, 25 bp, Probe sequence
agtcacggaaggtaggtaaataaat

SEQ ID NO: 67325 - DNA, 25 bp, Probe sequence
tagtcacggaaggtaggtaaataaa

SEQ ID NO: 67326 - DNA, 25 bp, Probe sequence
gacttcagttatactatggaggatt

SEQ ID NO: 67327 - DNA, 25 bp, Probe sequence
ctagtcacggaaggtaggtaaataa

SEQ ID NO: 67328 - DNA, 25 bp, Probe sequence
gtcacggaaggtaggtaaataaatt

SEQ ID NO: 67329 - DNA, 25 bp, Probe sequence
gtattaactagtcacggaaggtagg

SEQ ID NO: 67330 - DNA, 25 bp, Probe sequence
tcctccatagtataactgaagtcat

SEQ ID NO: 67331 - DNA, 25 bp, Probe sequence
atcctccatagtataactgaagtca

SEQ ID NO: 67332 - DNA, 25 bp, Probe sequence
cctccatagtataactgaagtcatt

SEQ ID NO: 67333 - DNA, 25 bp, Probe sequence
atttatttacctaccttccgtgact

SEQ ID NO: 67334 - DNA, 25 bp, Probe sequence
aatcctccatagtataactgaagtc

SEQ ID NO: 67335 - DNA, 25 bp, Probe sequence
tttatttacctaccttccgtgacta

SEQ ID NO: 67336 - DNA, 25 bp, Probe sequence
ttatttacctaccttccgtgactag

SEQ ID NO: 67337 - DNA, 25 bp, Probe sequence
aatttatttacctaccttccgtgac

SEQ ID NO: 67338 - DNA, 25 bp, Probe sequence
cctaccttccgtgactagttaatac

SEQ ID NO: 67339 - DNA, 25 bp, Probe sequence
ataatctaaagcatctgccgtgtaa

SEQ ID NO: 67340 - DNA, 25 bp, Probe sequence
gataatctaaagcatctgccgtgta

SEQ ID NO: 67341 - DNA, 25 bp, Probe sequence
taatctaaagcatctgccgtgtaag

SEQ ID NO: 67342 - DNA, 25 bp, Probe sequence
aagcatctgccgtgtaagaatttat

SEQ ID NO: 67343 - DNA, 25 bp, Probe sequence
aaagcatctgccgtgtaagaattta

SEQ ID NO: 67344 - DNA, 25 bp, Probe sequence
taaagcatctgccgtgtaagaattt

SEQ ID NO: 67345 - DNA, 25 bp, Probe sequence
ctaaagcatctgccgtgtaagaatt

SEQ ID NO: 67346 - DNA, 25 bp, Probe sequence
tctaaagcatctgccgtgtaagaat

SEQ ID NO: 67347 - DNA, 25 bp, Probe sequence
atctaaagcatctgccgtgtaagaa

SEQ ID NO: 67348 - DNA, 25 bp, Probe sequence
ttacacggcagatgctttagattat

SEQ ID NO: 67349 - DNA, 25 bp, Probe sequence
tacacggcagatgctttagattatc

SEQ ID NO: 67350 - DNA, 25 bp, Probe sequence
cttacacggcagatgctttagatta

SEQ ID NO: 67351 - DNA, 25 bp, Probe sequence
ataaattcttacacggcagatgctt

SEQ ID NO: 67352 - DNA, 25 bp, Probe sequence
aaattcttacacggcagatgcttta

SEQ ID NO: 67353 - DNA, 25 bp, Probe sequence
taaattcttacacggcagatgcttt

SEQ ID NO: 67354 - DNA, 25 bp, Probe sequence
aattcttacacggcagatgctttag

SEQ ID NO: 67355 - DNA, 25 bp, Probe sequence
tcttacacggcagatgctttagatt

SEQ ID NO: 67356 - DNA, 25 bp, Probe sequence
ttcttacacggcagatgctttagat

SEQ ID NO: 67357 - DNA, 25 bp, Probe sequence
aatcatcttgagcatgtttaattgt

SEQ ID NO: 67358 - DNA, 25 bp, Probe sequence
tcatcttgagcatgtttaattgtaa

SEQ ID NO: 67359 - DNA, 25 bp, Probe sequence
atcatcttgagcatgtttaattgta

SEQ ID NO: 67360 - DNA, 25 bp, Probe sequence
catcttgagcatgtttaattgtaat

SEQ ID NO: 67361 - DNA, 25 bp, Probe sequence
tgtttaattgtaattttgatggggt

SEQ ID NO: 67362 - DNA, 25 bp, Probe sequence
tcttgagcatgtttaattgtaattt

SEQ ID NO: 67363 - DNA, 25 bp, Probe sequence
taatcatcttgagcatgtttaattg

SEQ ID NO: 67364 - DNA, 25 bp, Probe sequence
atcttgagcatgtttaattgtaatt

SEQ ID NO: 67365 - DNA, 25 bp, Probe sequence
gtttaattgtaattttgatggggtt

SEQ ID NO: 67366 - DNA, 25 bp, Probe sequence
acaattaaacatgctcaagatgatt

SEQ ID NO: 67367 - DNA, 25 bp, Probe sequence
ttacaattaaacatgctcaagatga

SEQ ID NO: 67368 - DNA, 25 bp, Probe sequence
tacaattaaacatgctcaagatgat

SEQ ID NO: 67369 - DNA, 25 bp, Probe sequence
attacaattaaacatgctcaagatg

SEQ ID NO: 67370 - DNA, 25 bp, Probe sequence
accccatcaaaattacaattaaaca

SEQ ID NO: 67371 - DNA, 25 bp, Probe sequence
aaattacaattaaacatgctcaaga

SEQ ID NO: 67372 - DNA, 25 bp, Probe sequence
caattaaacatgctcaagatgatta

SEQ ID NO: 67373 - DNA, 25 bp, Probe sequence
aattacaattaaacatgctcaagat

SEQ ID NO: 67374 - DNA, 25 bp, Probe sequence
aaccccatcaaaattacaattaaac

SEQ ID NO: 67375 - DNA, 25 bp, Probe sequence
tagtttctatattgcgtagttgagc

SEQ ID NO: 67376 - DNA, 25 bp, Probe sequence
atcgtaaagattcctaacaagagag

SEQ ID NO: 67377 - DNA, 25 bp, Probe sequence
tgtagtttctatattgcgtagttga

SEQ ID NO: 67378 - DNA, 25 bp, Probe sequence
ttctatattgcgtagttgagcagtt

SEQ ID NO: 67379 - DNA, 25 bp, Probe sequence
taaagattcctaacaagagagggtg

SEQ ID NO: 67380 - DNA, 25 bp, Probe sequence
gtaaagattcctaacaagagagggt

SEQ ID NO: 67381 - DNA, 25 bp, Probe sequence
tcgtaaagattcctaacaagagagg

SEQ ID NO: 67382 - DNA, 25 bp, Probe sequence
cgtaaagattcctaacaagagaggg

SEQ ID NO: 67383 - DNA, 25 bp, Probe sequence
gtagtttctatattgcgtagttgag

SEQ ID NO: 67384 - DNA, 25 bp, Probe sequence
gctcaactacgcaatatagaaacta

SEQ ID NO: 67385 - DNA, 25 bp, Probe sequence
ctctcttgttaggaatctttacgat

SEQ ID NO: 67386 - DNA, 25 bp, Probe sequence
tcaactacgcaatatagaaactaca

SEQ ID NO: 67387 - DNA, 25 bp, Probe sequence
aactgctcaactacgcaatatagaa

SEQ ID NO: 67388 - DNA, 25 bp, Probe sequence
cctctcttgttaggaatctttacga

SEQ ID NO: 67389 - DNA, 25 bp, Probe sequence
accctctcttgttaggaatctttac

SEQ ID NO: 67390 - DNA, 25 bp, Probe sequence
caccctctcttgttaggaatcttta

SEQ ID NO: 67391 - DNA, 25 bp, Probe sequence
ccctctcttgttaggaatctttacg

SEQ ID NO: 67392 - DNA, 25 bp, Probe sequence
ctcaactacgcaatatagaaactac

SEQ ID NO: 67393 - DNA, 25 bp, Probe sequence
ctgttgaattatgtgaggattgtgt

SEQ ID NO: 67394 - DNA, 25 bp, Probe sequence
actgttgaattatgtgaggattgtg

SEQ ID NO: 67395 - DNA, 25 bp, Probe sequence
tgttgaattatgtgaggattgtgtt

SEQ ID NO: 67396 - DNA, 25 bp, Probe sequence
tactgttgaattatgtgaggattgt

SEQ ID NO: 67397 - DNA, 25 bp, Probe sequence
gtgaagagtgattaatggattgagt

SEQ ID NO: 67398 - DNA, 25 bp, Probe sequence
tgtgaagagtgattaatggattgag

SEQ ID NO: 67399 - DNA, 25 bp, Probe sequence
gttgaattatgtgaggattgtgtta

SEQ ID NO: 67400 - DNA, 25 bp, Probe sequence
ttgtgaagagtgattaatggattga

SEQ ID NO: 67401 - DNA, 25 bp, Probe sequence
ttactgttgaattatgtgaggattg

SEQ ID NO: 67402 - DNA, 25 bp, Probe sequence
cacaatcctcacataattcaacagt

SEQ ID NO: 67403 - DNA, 25 bp, Probe sequence
acacaatcctcacataattcaacag

SEQ ID NO: 67404 - DNA, 25 bp, Probe sequence
aacacaatcctcacataattcaaca

SEQ ID NO: 67405 - DNA, 25 bp, Probe sequence
acaatcctcacataattcaacagta

SEQ ID NO: 67406 - DNA, 25 bp, Probe sequence
ctcaatccattaatcactcttcaca

SEQ ID NO: 67407 - DNA, 25 bp, Probe sequence
actcaatccattaatcactcttcac

SEQ ID NO: 67408 - DNA, 25 bp, Probe sequence
taacacaatcctcacataattcaac

SEQ ID NO: 67409 - DNA, 25 bp, Probe sequence
tcaatccattaatcactcttcacaa

SEQ ID NO: 67410 - DNA, 25 bp, Probe sequence
caatcctcacataattcaacagtaa

SEQ ID NO: 67411 - DNA, 25 bp, Probe sequence
gcactttagcccatttacaatatca

SEQ ID NO: 67412 - DNA, 25 bp, Probe sequence
cgcactttagcccatttacaatatc

SEQ ID NO: 67413 - DNA, 25 bp, Probe sequence
tcgcactttagcccatttacaatat

SEQ ID NO: 67414 - DNA, 25 bp, Probe sequence
ttcgcactttagcccatttacaata

SEQ ID NO: 67415 - DNA, 25 bp, Probe sequence
tttcgcactttagcccatttacaat

SEQ ID NO: 67416 - DNA, 25 bp, Probe sequence
atttcgcactttagcccatttacaa

SEQ ID NO: 67417 - DNA, 25 bp, Probe sequence
aatttcgcactttagcccatttaca

SEQ ID NO: 67418 - DNA, 25 bp, Probe sequence
cactttagcccatttacaatatcaa

SEQ ID NO: 67419 - DNA, 25 bp, Probe sequence
aaatttcgcactttagcccatttac

SEQ ID NO: 67420 - DNA, 25 bp, Probe sequence
tgatattgtaaatgggctaaagtgc

SEQ ID NO: 67421 - DNA, 25 bp, Probe sequence
gatattgtaaatgggctaaagtgcg

SEQ ID NO: 67422 - DNA, 25 bp, Probe sequence
atattgtaaatgggctaaagtgcga

SEQ ID NO: 67423 - DNA, 25 bp, Probe sequence
tattgtaaatgggctaaagtgcgaa

SEQ ID NO: 67424 - DNA, 25 bp, Probe sequence
ttgtaaatgggctaaagtgcgaaat

SEQ ID NO: 67425 - DNA, 25 bp, Probe sequence
attgtaaatgggctaaagtgcgaaa

SEQ ID NO: 67426 - DNA, 25 bp, Probe sequence
tgtaaatgggctaaagtgcgaaatt

SEQ ID NO: 67427 - DNA, 25 bp, Probe sequence
ttgatattgtaaatgggctaaagtg

SEQ ID NO: 67428 - DNA, 25 bp, Probe sequence
taaatgggctaaagtgcgaaatttg

SEQ ID NO: 67429 - DNA, 25 bp, Probe sequence
ataataatggctcgctcctgtaaat

SEQ ID NO: 67430 - DNA, 25 bp, Probe sequence
aagggtaatgtttgtctgtaaggaa

SEQ ID NO: 67431 - DNA, 25 bp, Probe sequence
aaagggtaatgtttgtctgtaagga

SEQ ID NO: 67432 - DNA, 25 bp, Probe sequence
aataataatggctcgctcctgtaaa

SEQ ID NO: 67433 - DNA, 25 bp, Probe sequence
aaataataatggctcgctcctgtaa

SEQ ID NO: 67434 - DNA, 25 bp, Probe sequence
agggtaatgtttgtctgtaaggaag

SEQ ID NO: 67435 - DNA, 25 bp, Probe sequence
gggtaatgtttgtctgtaaggaagt

SEQ ID NO: 67436 - DNA, 25 bp, Probe sequence
aatggctcgctcctgtaaattatta

SEQ ID NO: 67437 - DNA, 25 bp, Probe sequence
taataatggctcgctcctgtaaatt

SEQ ID NO: 67438 - DNA, 25 bp, Probe sequence
tccttacagacaaacattacccttt

SEQ ID NO: 67439 - DNA, 25 bp, Probe sequence
ttccttacagacaaacattaccctt

SEQ ID NO: 67440 - DNA, 25 bp, Probe sequence
atttacaggagcgagccattattat

SEQ ID NO: 67441 - DNA, 25 bp, Probe sequence
cttccttacagacaaacattaccct

SEQ ID NO: 67442 - DNA, 25 bp, Probe sequence
ttacaggagcgagccattattattt

SEQ ID NO: 67443 - DNA, 25 bp, Probe sequence
tttacaggagcgagccattattatt

SEQ ID NO: 67444 - DNA, 25 bp, Probe sequence
acttccttacagacaaacattaccc

SEQ ID NO: 67445 - DNA, 25 bp, Probe sequence
aatttacaggagcgagccattatta

SEQ ID NO: 67446 - DNA, 25 bp, Probe sequence
taataatttacaggagcgagccatt

SEQ ID NO: 67447 - DNA, 25 bp, Probe sequence
acagtatatcattaattcacaacca

SEQ ID NO: 67448 - DNA, 25 bp, Probe sequence
cagtatatcattaattcacaaccaa

SEQ ID NO: 67449 - DNA, 25 bp, Probe sequence
ttaattcacaaccaaaacaaacatt

SEQ ID NO: 67450 - DNA, 25 bp, Probe sequence
cattaattcacaaccaaaacaaaca

SEQ ID NO: 67451 - DNA, 25 bp, Probe sequence
tcattaattcacaaccaaaacaaac

SEQ ID NO: 67452 - DNA, 25 bp, Probe sequence
attaattcacaaccaaaacaaacat

SEQ ID NO: 67453 - DNA, 25 bp, Probe sequence
atcattaattcacaaccaaaacaaa

SEQ ID NO: 67454 - DNA, 25 bp, Probe sequence
tatcattaattcacaaccaaaacaa

SEQ ID NO: 67455 - DNA, 25 bp, Probe sequence
atatcattaattcacaaccaaaaca

SEQ ID NO: 67456 - DNA, 25 bp, Probe sequence
tggttgtgaattaatgatatactgt

SEQ ID NO: 67457 - DNA, 25 bp, Probe sequence
ttggttgtgaattaatgatatactg

SEQ ID NO: 67458 - DNA, 25 bp, Probe sequence
aatgtttgttttggttgtgaattaa

SEQ ID NO: 67459 - DNA, 25 bp, Probe sequence
tgtttgttttggttgtgaattaatg

SEQ ID NO: 67460 - DNA, 25 bp, Probe sequence
gtttgttttggttgtgaattaatga

SEQ ID NO: 67461 - DNA, 25 bp, Probe sequence
atgtttgttttggttgtgaattaat

SEQ ID NO: 67462 - DNA, 25 bp, Probe sequence
tttgttttggttgtgaattaatgat

SEQ ID NO: 67463 - DNA, 25 bp, Probe sequence
ttgttttggttgtgaattaatgata

SEQ ID NO: 67464 - DNA, 25 bp, Probe sequence
tgttttggttgtgaattaatgatat

SEQ ID NO: 67465 - DNA, 25 bp, Probe sequence
tgaataaacaaattgaaggtaggtt

SEQ ID NO: 67466 - DNA, 25 bp, Probe sequence
ttgaataaacaaattgaaggtaggt

SEQ ID NO: 67467 - DNA, 25 bp, Probe sequence
attgaataaacaaattgaaggtagg

SEQ ID NO: 67468 - DNA, 25 bp, Probe sequence
atgattgaataaacaaattgaaggt

SEQ ID NO: 67469 - DNA, 25 bp, Probe sequence
tgattgaataaacaaattgaaggta

SEQ ID NO: 67470 - DNA, 25 bp, Probe sequence
gaataaacaaattgaaggtaggttt

SEQ ID NO: 67471 - DNA, 25 bp, Probe sequence
aatgattgaataaacaaattgaagg

SEQ ID NO: 67472 - DNA, 25 bp, Probe sequence
gattgaataaacaaattgaaggtag

SEQ ID NO: 67473 - DNA, 25 bp, Probe sequence
ttgctggtcttaaatttgttatatt

SEQ ID NO: 67474 - DNA, 25 bp, Probe sequence
aacctaccttcaatttgtttattca

SEQ ID NO: 67475 - DNA, 25 bp, Probe sequence
acctaccttcaatttgtttattcaa

SEQ ID NO: 67476 - DNA, 25 bp, Probe sequence
cctaccttcaatttgtttattcaat

SEQ ID NO: 67477 - DNA, 25 bp, Probe sequence
accttcaatttgtttattcaatcat

SEQ ID NO: 67478 - DNA, 25 bp, Probe sequence
taccttcaatttgtttattcaatca

SEQ ID NO: 67479 - DNA, 25 bp, Probe sequence
aaacctaccttcaatttgtttattc

SEQ ID NO: 67480 - DNA, 25 bp, Probe sequence
ccttcaatttgtttattcaatcatt

SEQ ID NO: 67481 - DNA, 25 bp, Probe sequence
ctaccttcaatttgtttattcaatc

SEQ ID NO: 67482 - DNA, 25 bp, Probe sequence
atataacaaatttaagaccagcaaa

SEQ ID NO: 67483 - DNA, 25 bp, Probe sequence
aattgaagaagggaagatacacaag

SEQ ID NO: 67484 - DNA, 25 bp, Probe sequence
aaattgaagaagggaagatacacaa

SEQ ID NO: 67485 - DNA, 25 bp, Probe sequence
aaaattgaagaagggaagatacaca

SEQ ID NO: 67486 - DNA, 25 bp, Probe sequence
taaaattgaagaagggaagatacac

SEQ ID NO: 67487 - DNA, 25 bp, Probe sequence
tttgataaaattgaagaagggaaga

SEQ ID NO: 67488 - DNA, 25 bp, Probe sequence
ttgataaaattgaagaagggaagat

SEQ ID NO: 67489 - DNA, 25 bp, Probe sequence
ataaaattgaagaagggaagataca

SEQ ID NO: 67490 - DNA, 25 bp, Probe sequence
tgataaaattgaagaagggaagata

SEQ ID NO: 67491 - DNA, 25 bp, Probe sequence
gataaaattgaagaagggaagatac

SEQ ID NO: 67492 - DNA, 25 bp, Probe sequence
cttgtgtatcttcccttcttcaatt

SEQ ID NO: 67493 - DNA, 25 bp, Probe sequence
ttgtgtatcttcccttcttcaattt

SEQ ID NO: 67494 - DNA, 25 bp, Probe sequence
tgtgtatcttcccttcttcaatttt

SEQ ID NO: 67495 - DNA, 25 bp, Probe sequence
gtgtatcttcccttcttcaatttta

SEQ ID NO: 67496 - DNA, 25 bp, Probe sequence
tcttcccttcttcaattttatcaaa

SEQ ID NO: 67497 - DNA, 25 bp, Probe sequence
atcttcccttcttcaattttatcaa

SEQ ID NO: 67498 - DNA, 25 bp, Probe sequence
tgtatcttcccttcttcaattttat

SEQ ID NO: 67499 - DNA, 25 bp, Probe sequence
tatcttcccttcttcaattttatca

SEQ ID NO: 67500 - DNA, 25 bp, Probe sequence
gtatcttcccttcttcaattttatc

SEQ ID NO: 67501 - DNA, 25 bp, Probe sequence
aagcgagtatgtttagaagtctagg

SEQ ID NO: 67502 - DNA, 25 bp, Probe sequence
gcgagtatgtttagaagtctaggat

SEQ ID NO: 67503 - DNA, 25 bp, Probe sequence
agcgagtatgtttagaagtctagga

SEQ ID NO: 67504 - DNA, 25 bp, Probe sequence
gagtatgtttagaagtctaggatgc

SEQ ID NO: 67505 - DNA, 25 bp, Probe sequence
aaagcgagtatgtttagaagtctag

SEQ ID NO: 67506 - DNA, 25 bp, Probe sequence
cgagtatgtttagaagtctaggatg

SEQ ID NO: 67507 - DNA, 25 bp, Probe sequence
ataaagcgagtatgtttagaagtct

SEQ ID NO: 67508 - DNA, 25 bp, Probe sequence
agtatgtttagaagtctaggatgca

SEQ ID NO: 67509 - DNA, 25 bp, Probe sequence
taaagcgagtatgtttagaagtcta

SEQ ID NO: 67510 - DNA, 25 bp, Probe sequence
cctagacttctaaacatactcgctt

SEQ ID NO: 67511 - DNA, 25 bp, Probe sequence
atcctagacttctaaacatactcgc

SEQ ID NO: 67512 - DNA, 25 bp, Probe sequence
tcctagacttctaaacatactcgct

SEQ ID NO: 67513 - DNA, 25 bp, Probe sequence
gcatcctagacttctaaacatactc

SEQ ID NO: 67514 - DNA, 25 bp, Probe sequence
ctagacttctaaacatactcgcttt

SEQ ID NO: 67515 - DNA, 25 bp, Probe sequence
catcctagacttctaaacatactcg

SEQ ID NO: 67516 - DNA, 25 bp, Probe sequence
agacttctaaacatactcgctttat

SEQ ID NO: 67517 - DNA, 25 bp, Probe sequence
tgcatcctagacttctaaacatact

SEQ ID NO: 67518 - DNA, 25 bp, Probe sequence
tagacttctaaacatactcgcttta

SEQ ID NO: 67519 - DNA, 25 bp, Probe sequence
aatgacgaatagactgagaaatgct

SEQ ID NO: 67520 - DNA, 25 bp, Probe sequence
aaatgacgaatagactgagaaatgc

SEQ ID NO: 67521 - DNA, 25 bp, Probe sequence
atgacgaatagactgagaaatgcta

SEQ ID NO: 67522 - DNA, 25 bp, Probe sequence
gtttatttaacgagaaggtgtctgc

SEQ ID NO: 67523 - DNA, 25 bp, Probe sequence
agtttatttaacgagaaggtgtctg

SEQ ID NO: 67524 - DNA, 25 bp, Probe sequence
gagtttatttaacgagaaggtgtct

SEQ ID NO: 67525 - DNA, 25 bp, Probe sequence
agagtttatttaacgagaaggtgtc

SEQ ID NO: 67526 - DNA, 25 bp, Probe sequence
gagagtttatttaacgagaaggtgt

SEQ ID NO: 67527 - DNA, 25 bp, Probe sequence
agagagtttatttaacgagaaggtg

SEQ ID NO: 67528 - DNA, 25 bp, Probe sequence
gcatttctcagtctattcgtcattt

SEQ ID NO: 67529 - DNA, 25 bp, Probe sequence
agcatttctcagtctattcgtcatt

SEQ ID NO: 67530 - DNA, 25 bp, Probe sequence
tagcatttctcagtctattcgtcat

SEQ ID NO: 67531 - DNA, 25 bp, Probe sequence
gcagacaccttctcgttaaataaac

SEQ ID NO: 67532 - DNA, 25 bp, Probe sequence
cagacaccttctcgttaaataaact

SEQ ID NO: 67533 - DNA, 25 bp, Probe sequence
acaccttctcgttaaataaactctc

SEQ ID NO: 67534 - DNA, 25 bp, Probe sequence
gacaccttctcgttaaataaactct

SEQ ID NO: 67535 - DNA, 25 bp, Probe sequence
agacaccttctcgttaaataaactc

SEQ ID NO: 67536 - DNA, 25 bp, Probe sequence
ccttctcgttaaataaactctctgt

SEQ ID NO: 67537 - DNA, 25 bp, Probe sequence
acaaatgttctatatggaggcagta

SEQ ID NO: 67538 - DNA, 25 bp, Probe sequence
acttctaaatcagtcaatgagtggt

SEQ ID NO: 67539 - DNA, 25 bp, Probe sequence
cttctaaatcagtcaatgagtggtt

SEQ ID NO: 67540 - DNA, 25 bp, Probe sequence
aacaaatgttctatatggaggcagt

SEQ ID NO: 67541 - DNA, 25 bp, Probe sequence
ttctaaatcagtcaatgagtggttt

SEQ ID NO: 67542 - DNA, 25 bp, Probe sequence
aaccacttgtgatcgacttctaaat

SEQ ID NO: 67543 - DNA, 25 bp, Probe sequence
aaaccacttgtgatcgacttctaaa

SEQ ID NO: 67544 - DNA, 25 bp, Probe sequence
accacttgtgatcgacttctaaatc

SEQ ID NO: 67545 - DNA, 25 bp, Probe sequence
tctaaatcagtcaatgagtggtttt

SEQ ID NO: 67546 - DNA, 25 bp, Probe sequence
tactgcctccatatagaacatttgt

SEQ ID NO: 67547 - DNA, 25 bp, Probe sequence
accactcattgactgatttagaagt

SEQ ID NO: 67548 - DNA, 25 bp, Probe sequence
aaccactcattgactgatttagaag

SEQ ID NO: 67549 - DNA, 25 bp, Probe sequence
actgcctccatatagaacatttgtt

SEQ ID NO: 67550 - DNA, 25 bp, Probe sequence
aaaccactcattgactgatttagaa

SEQ ID NO: 67551 - DNA, 25 bp, Probe sequence
atttagaagtcgatcacaagtggtt

SEQ ID NO: 67552 - DNA, 25 bp, Probe sequence
tttagaagtcgatcacaagtggttt

SEQ ID NO: 67553 - DNA, 25 bp, Probe sequence
gatttagaagtcgatcacaagtggt

SEQ ID NO: 67554 - DNA, 25 bp, Probe sequence
aaaaccactcattgactgatttaga

SEQ ID NO: 67555 - DNA, 25 bp, Probe sequence
ctataaaggtgcgtgagttattgaa

SEQ ID NO: 67556 - DNA, 25 bp, Probe sequence
ataaaggtgcgtgagttattgaata

SEQ ID NO: 67557 - DNA, 25 bp, Probe sequence
tataaaggtgcgtgagttattgaat

SEQ ID NO: 67558 - DNA, 25 bp, Probe sequence
aaaggtgcgtgagttattgaataaa

SEQ ID NO: 67559 - DNA, 25 bp, Probe sequence
taaaggtgcgtgagttattgaataa

SEQ ID NO: 67560 - DNA, 25 bp, Probe sequence
atcctataaaggtgcgtgagttatt

SEQ ID NO: 67561 - DNA, 25 bp, Probe sequence
tttgttatcctataaaggtgcgtga

SEQ ID NO: 67562 - DNA, 25 bp, Probe sequence
cctataaaggtgcgtgagttattga

SEQ ID NO: 67563 - DNA, 25 bp, Probe sequence
tcctataaaggtgcgtgagttattg

SEQ ID NO: 67564 - DNA, 25 bp, Probe sequence
ttcaataactcacgcacctttatag

SEQ ID NO: 67565 - DNA, 25 bp, Probe sequence
attcaataactcacgcacctttata

SEQ ID NO: 67566 - DNA, 25 bp, Probe sequence
tattcaataactcacgcacctttat

SEQ ID NO: 67567 - DNA, 25 bp, Probe sequence
tttattcaataactcacgcaccttt

SEQ ID NO: 67568 - DNA, 25 bp, Probe sequence
ttattcaataactcacgcaccttta

SEQ ID NO: 67569 - DNA, 25 bp, Probe sequence
tcacgcacctttataggataacaaa

SEQ ID NO: 67570 - DNA, 25 bp, Probe sequence
aataactcacgcacctttataggat

SEQ ID NO: 67571 - DNA, 25 bp, Probe sequence
ctcacgcacctttataggataacaa

SEQ ID NO: 67572 - DNA, 25 bp, Probe sequence
aactcacgcacctttataggataac

SEQ ID NO: 67573 - DNA, 25 bp, Probe sequence
acaagtagtatgtcattctagtagc

SEQ ID NO: 67574 - DNA, 25 bp, Probe sequence
gctaaagtgaagtacgacggtataa

SEQ ID NO: 67575 - DNA, 25 bp, Probe sequence
caagtagtatgtcattctagtagct

SEQ ID NO: 67576 - DNA, 25 bp, Probe sequence
ctaaagtgaagtacgacggtataaa

SEQ ID NO: 67577 - DNA, 25 bp, Probe sequence
tttgacaaagctaaagtgaagtacg

SEQ ID NO: 67578 - DNA, 25 bp, Probe sequence
aaagaggtttgacaaagctaaagtg

SEQ ID NO: 67579 - DNA, 25 bp, Probe sequence
gaaagaggtttgacaaagctaaagt

SEQ ID NO: 67580 - DNA, 25 bp, Probe sequence
ggtttgacaaagctaaagtgaagta

SEQ ID NO: 67581 - DNA, 25 bp, Probe sequence
agaaagaggtttgacaaagctaaag

SEQ ID NO: 67582 - DNA, 25 bp, Probe sequence
gctactagaatgacatactacttgt

SEQ ID NO: 67583 - DNA, 25 bp, Probe sequence
ttataccgtcgtacttcactttagc

SEQ ID NO: 67584 - DNA, 25 bp, Probe sequence
agctactagaatgacatactacttg

SEQ ID NO: 67585 - DNA, 25 bp, Probe sequence
tttataccgtcgtacttcactttag

SEQ ID NO: 67586 - DNA, 25 bp, Probe sequence
actttagctttgtcaaacctctttc

SEQ ID NO: 67587 - DNA, 25 bp, Probe sequence
cactttagctttgtcaaacctcttt

SEQ ID NO: 67588 - DNA, 25 bp, Probe sequence
cgtacttcactttagctttgtcaaa

SEQ ID NO: 67589 - DNA, 25 bp, Probe sequence
ctttagctttgtcaaacctctttct

SEQ ID NO: 67590 - DNA, 25 bp, Probe sequence
tacttcactttagctttgtcaaacc

SEQ ID NO: 67591 - DNA, 25 bp, Probe sequence
ttacaccttacctgtatgataagtt

SEQ ID NO: 67592 - DNA, 25 bp, Probe sequence
ttctaagcatgatgagttgtttatc

SEQ ID NO: 67593 - DNA, 25 bp, Probe sequence
attacaccttacctgtatgataagt

SEQ ID NO: 67594 - DNA, 25 bp, Probe sequence
acttattacaccttacctgtatgat

SEQ ID NO: 67595 - DNA, 25 bp, Probe sequence
tctgctcaatgaaataatacgtttg

SEQ ID NO: 67596 - DNA, 25 bp, Probe sequence
ccacaattttctttctgctcaatga

SEQ ID NO: 67597 - DNA, 25 bp, Probe sequence
acctaaattaagcgttttctaagca

SEQ ID NO: 67598 - DNA, 25 bp, Probe sequence
tttctaagcatgatgagttgtttat

SEQ ID NO: 67599 - DNA, 25 bp, Probe sequence
cacaattttctttctgctcaatgaa

SEQ ID NO: 67600 - DNA, 25 bp, Probe sequence
aacttatcatacaggtaaggtgtaa

SEQ ID NO: 67601 - DNA, 25 bp, Probe sequence
gataaacaactcatcatgcttagaa

SEQ ID NO: 67602 - DNA, 25 bp, Probe sequence
atcatacaggtaaggtgtaataagt

SEQ ID NO: 67603 - DNA, 25 bp, Probe sequence
acttatcatacaggtaaggtgtaat

SEQ ID NO: 67604 - DNA, 25 bp, Probe sequence
caaacgtattatttcattgagcaga

SEQ ID NO: 67605 - DNA, 25 bp, Probe sequence
tcattgagcagaaagaaaattgtgg

SEQ ID NO: 67606 - DNA, 25 bp, Probe sequence
tgcttagaaaacgcttaatttaggt

SEQ ID NO: 67607 - DNA, 25 bp, Probe sequence
ataaacaactcatcatgcttagaaa

SEQ ID NO: 67608 - DNA, 25 bp, Probe sequence
ttcattgagcagaaagaaaattgtg

SEQ ID NO: 67609 - DNA, 25 bp, Probe sequence
aatcggtatttgaggcactttgata

SEQ ID NO: 67610 - DNA, 25 bp, Probe sequence
atcggtatttgaggcactttgatag

SEQ ID NO: 67611 - DNA, 25 bp, Probe sequence
caatcggtatttgaggcactttgat

SEQ ID NO: 67612 - DNA, 25 bp, Probe sequence
tcggtatttgaggcactttgatagt

SEQ ID NO: 67613 - DNA, 25 bp, Probe sequence
aagttaaactgaaagaaggcttaaa

SEQ ID NO: 67614 - DNA, 25 bp, Probe sequence
aaagttaaactgaaagaaggcttaa

SEQ ID NO: 67615 - DNA, 25 bp, Probe sequence
ataaagttaaactgaaagaaggctt

SEQ ID NO: 67616 - DNA, 25 bp, Probe sequence
atttcaatcggtatttgaggcactt

SEQ ID NO: 67617 - DNA, 25 bp, Probe sequence
aatttcaatcggtatttgaggcact

SEQ ID NO: 67618 - DNA, 25 bp, Probe sequence
tatcaaagtgcctcaaataccgatt

SEQ ID NO: 67619 - DNA, 25 bp, Probe sequence
ctatcaaagtgcctcaaataccgat

SEQ ID NO: 67620 - DNA, 25 bp, Probe sequence
atcaaagtgcctcaaataccgattg

SEQ ID NO: 67621 - DNA, 25 bp, Probe sequence
actatcaaagtgcctcaaataccga

SEQ ID NO: 67622 - DNA, 25 bp, Probe sequence
ttaagccttctttcagtttaacttt

SEQ ID NO: 67623 - DNA, 25 bp, Probe sequence
tttaagccttctttcagtttaactt

SEQ ID NO: 67624 - DNA, 25 bp, Probe sequence
aagccttctttcagtttaactttat

SEQ ID NO: 67625 - DNA, 25 bp, Probe sequence
agtgcctcaaataccgattgaaatt

SEQ ID NO: 67626 - DNA, 25 bp, Probe sequence
aagtgcctcaaataccgattgaaat

SEQ ID NO: 67627 - DNA, 25 bp, Probe sequence
actgtaaatgtttggagaggcaata

SEQ ID NO: 67628 - DNA, 25 bp, Probe sequence
tactgtaaatgtttggagaggcaat

SEQ ID NO: 67629 - DNA, 25 bp, Probe sequence
ctgtaaatgtttggagaggcaatat

SEQ ID NO: 67630 - DNA, 25 bp, Probe sequence
gttactgtaaatgtttggagaggca

SEQ ID NO: 67631 - DNA, 25 bp, Probe sequence
ttactgtaaatgtttggagaggcaa

SEQ ID NO: 67632 - DNA, 25 bp, Probe sequence
catcagaatgtgtaaacaagttcgt

SEQ ID NO: 67633 - DNA, 25 bp, Probe sequence
catcagatgtgctaaaccaaagtac

SEQ ID NO: 67634 - DNA, 25 bp, Probe sequence
atcagaatgtgtaaacaagttcgtt

SEQ ID NO: 67635 - DNA, 25 bp, Probe sequence
taatgtaattagcgtgaagataagc

SEQ ID NO: 67636 - DNA, 25 bp, Probe sequence
attgcctctccaaacatttacagta

SEQ ID NO: 67637 - DNA, 25 bp, Probe sequence
tattgcctctccaaacatttacagt

SEQ ID NO: 67638 - DNA, 25 bp, Probe sequence
atattgcctctccaaacatttacag

SEQ ID NO: 67639 - DNA, 25 bp, Probe sequence
tgcctctccaaacatttacagtaac

SEQ ID NO: 67640 - DNA, 25 bp, Probe sequence
ttgcctctccaaacatttacagtaa

SEQ ID NO: 67641 - DNA, 25 bp, Probe sequence
acgaacttgtttacacattctgatg

SEQ ID NO: 67642 - DNA, 25 bp, Probe sequence
gtactttggtttagcacatctgatg

SEQ ID NO: 67643 - DNA, 25 bp, Probe sequence
aacgaacttgtttacacattctgat

SEQ ID NO: 67644 - DNA, 25 bp, Probe sequence
gcttatcttcacgctaattacatta

SEQ ID NO: 67645 - DNA, 25 bp, Probe sequence
tctcggtctcaaatgttcttgtaaa

SEQ ID NO: 67646 - DNA, 25 bp, Probe sequence
gtctcggtctcaaatgttcttgtaa

SEQ ID NO: 67647 - DNA, 25 bp, Probe sequence
atatgcaatgatggactaatgtcaa

SEQ ID NO: 67648 - DNA, 25 bp, Probe sequence
aatatgcaatgatggactaatgtca

SEQ ID NO: 67649 - DNA, 25 bp, Probe sequence
tatgcaatgatggactaatgtcaaa

SEQ ID NO: 67650 - DNA, 25 bp, Probe sequence
ctcggtctcaaatgttcttgtaaaa

SEQ ID NO: 67651 - DNA, 25 bp, Probe sequence
aaatatgcaatgatggactaatgtc

SEQ ID NO: 67652 - DNA, 25 bp, Probe sequence
atgcaatgatggactaatgtcaaaa

SEQ ID NO: 67653 - DNA, 25 bp, Probe sequence
aaaatatgcaatgatggactaatgt

SEQ ID NO: 67654 - DNA, 25 bp, Probe sequence
tttacaagaacatttgagaccgaga

SEQ ID NO: 67655 - DNA, 25 bp, Probe sequence
ttacaagaacatttgagaccgagac

SEQ ID NO: 67656 - DNA, 25 bp, Probe sequence
tgacattagtccatcattgcatatt

SEQ ID NO: 67657 - DNA, 25 bp, Probe sequence
ttgacattagtccatcattgcatat

SEQ ID NO: 67658 - DNA, 25 bp, Probe sequence
tttgacattagtccatcattgcata

SEQ ID NO: 67659 - DNA, 25 bp, Probe sequence
ttttacaagaacatttgagaccgag

SEQ ID NO: 67660 - DNA, 25 bp, Probe sequence
gacattagtccatcattgcatattt

SEQ ID NO: 67661 - DNA, 25 bp, Probe sequence
ttttgacattagtccatcattgcat

SEQ ID NO: 67662 - DNA, 25 bp, Probe sequence
acattagtccatcattgcatatttt

SEQ ID NO: 67663 - DNA, 25 bp, Probe sequence
aaaacggggattaatatatggaatt

SEQ ID NO: 67664 - DNA, 25 bp, Probe sequence
cggggattaatatatggaattaagc

SEQ ID NO: 67665 - DNA, 25 bp, Probe sequence
acacatcctttaatatcttaggact

SEQ ID NO: 67666 - DNA, 25 bp, Probe sequence
aaacggggattaatatatggaatta

SEQ ID NO: 67667 - DNA, 25 bp, Probe sequence
acggggattaatatatggaattaag

SEQ ID NO: 67668 - DNA, 25 bp, Probe sequence
ggggattaatatatggaattaagct

SEQ ID NO: 67669 - DNA, 25 bp, Probe sequence
tacacatcctttaatatcttaggac

SEQ ID NO: 67670 - DNA, 25 bp, Probe sequence
aacggggattaatatatggaattaa

SEQ ID NO: 67671 - DNA, 25 bp, Probe sequence
cacatcctttaatatcttaggacta

SEQ ID NO: 67672 - DNA, 25 bp, Probe sequence
aattccatatattaatccccgtttt

SEQ ID NO: 67673 - DNA, 25 bp, Probe sequence
gcttaattccatatattaatccccg

SEQ ID NO: 67674 - DNA, 25 bp, Probe sequence
agtcctaagatattaaaggatgtgt

SEQ ID NO: 67675 - DNA, 25 bp, Probe sequence
taattccatatattaatccccgttt

SEQ ID NO: 67676 - DNA, 25 bp, Probe sequence
cttaattccatatattaatccccgt

SEQ ID NO: 67677 - DNA, 25 bp, Probe sequence
agcttaattccatatattaatcccc

SEQ ID NO: 67678 - DNA, 25 bp, Probe sequence
gtcctaagatattaaaggatgtgta

SEQ ID NO: 67679 - DNA, 25 bp, Probe sequence
ttaattccatatattaatccccgtt

SEQ ID NO: 67680 - DNA, 25 bp, Probe sequence
tagtcctaagatattaaaggatgtg

SEQ ID NO: 67681 - DNA, 25 bp, Probe sequence
tagcgatagactttgaccaaactaa

SEQ ID NO: 67682 - DNA, 25 bp, Probe sequence
ttagcgatagactttgaccaaacta

SEQ ID NO: 67683 - DNA, 25 bp, Probe sequence
attagcgatagactttgaccaaact

SEQ ID NO: 67684 - DNA, 25 bp, Probe sequence
aattagcgatagactttgaccaaac

SEQ ID NO: 67685 - DNA, 25 bp, Probe sequence
cgttaaattagcgatagactttgac

SEQ ID NO: 67686 - DNA, 25 bp, Probe sequence
aaattagcgatagactttgaccaaa

SEQ ID NO: 67687 - DNA, 25 bp, Probe sequence
taaattagcgatagactttgaccaa

SEQ ID NO: 67688 - DNA, 25 bp, Probe sequence
ttaaattagcgatagactttgacca

SEQ ID NO: 67689 - DNA, 25 bp, Probe sequence
gttaaattagcgatagactttgacc

SEQ ID NO: 67690 - DNA, 25 bp, Probe sequence
tagtttggtcaaagtctatcgctaa

SEQ ID NO: 67691 - DNA, 25 bp, Probe sequence
ttagtttggtcaaagtctatcgcta

SEQ ID NO: 67692 - DNA, 25 bp, Probe sequence
gtttggtcaaagtctatcgctaatt

SEQ ID NO: 67693 - DNA, 25 bp, Probe sequence
agtttggtcaaagtctatcgctaat

SEQ ID NO: 67694 - DNA, 25 bp, Probe sequence
gtcaaagtctatcgctaatttaacg

SEQ ID NO: 67695 - DNA, 25 bp, Probe sequence
tttggtcaaagtctatcgctaattt

SEQ ID NO: 67696 - DNA, 25 bp, Probe sequence
tggtcaaagtctatcgctaatttaa

SEQ ID NO: 67697 - DNA, 25 bp, Probe sequence
ttggtcaaagtctatcgctaattta

SEQ ID NO: 67698 - DNA, 25 bp, Probe sequence
ggtcaaagtctatcgctaatttaac

SEQ ID NO: 67699 - DNA, 25 bp, Probe sequence
tcatataggataggcgtgtaataga

SEQ ID NO: 67700 - DNA, 25 bp, Probe sequence
tataggataggcgtgtaatagaaca

SEQ ID NO: 67701 - DNA, 25 bp, Probe sequence
atataggataggcgtgtaatagaac

SEQ ID NO: 67702 - DNA, 25 bp, Probe sequence
catataggataggcgtgtaatagaa

SEQ ID NO: 67703 - DNA, 25 bp, Probe sequence
atcatataggataggcgtgtaatag

SEQ ID NO: 67704 - DNA, 25 bp, Probe sequence
agttattccactttgagagacatcg

SEQ ID NO: 67705 - DNA, 25 bp, Probe sequence
agatttatttcctccattggtgtgc

SEQ ID NO: 67706 - DNA, 25 bp, Probe sequence
gagatttatttcctccattggtgtg

SEQ ID NO: 67707 - DNA, 25 bp, Probe sequence
tgagatttatttcctccattggtgt

SEQ ID NO: 67708 - DNA, 25 bp, Probe sequence
tctattacacgcctatcctatatga

SEQ ID NO: 67709 - DNA, 25 bp, Probe sequence
tgttctattacacgcctatcctata

SEQ ID NO: 67710 - DNA, 25 bp, Probe sequence
ttctattacacgcctatcctatatg

SEQ ID NO: 67711 - DNA, 25 bp, Probe sequence
gttctattacacgcctatcctatat

SEQ ID NO: 67712 - DNA, 25 bp, Probe sequence
ctattacacgcctatcctatatgat

SEQ ID NO: 67713 - DNA, 25 bp, Probe sequence
cgatgtctctcaaagtggaataact

SEQ ID NO: 67714 - DNA, 25 bp, Probe sequence
ccaatggaggaaataaatctcaacc

SEQ ID NO: 67715 - DNA, 25 bp, Probe sequence
acaccaatggaggaaataaatctca

SEQ ID NO: 67716 - DNA, 25 bp, Probe sequence
cacaccaatggaggaaataaatctc

SEQ ID NO: 67717 - DNA, 25 bp, Probe sequence
atattaagaagcactcataatcggc

SEQ ID NO: 67718 - DNA, 25 bp, Probe sequence
tattaagaagcactcataatcggct

SEQ ID NO: 67719 - DNA, 25 bp, Probe sequence
acgagtatttgccacttgattagta

SEQ ID NO: 67720 - DNA, 25 bp, Probe sequence
aaacgagtatttgccacttgattag

SEQ ID NO: 67721 - DNA, 25 bp, Probe sequence
gaaacgagtatttgccacttgatta

SEQ ID NO: 67722 - DNA, 25 bp, Probe sequence
taatgaaacgagtatttgccacttg

SEQ ID NO: 67723 - DNA, 25 bp, Probe sequence
cataatgaaacgagtatttgccact

SEQ ID NO: 67724 - DNA, 25 bp, Probe sequence
aacgagtatttgccacttgattagt

SEQ ID NO: 67725 - DNA, 25 bp, Probe sequence
ataatgaaacgagtatttgccactt

SEQ ID NO: 67726 - DNA, 25 bp, Probe sequence
gccgattatgagtgcttcttaatat

SEQ ID NO: 67727 - DNA, 25 bp, Probe sequence
agtggcaaatactcgtttcattatg

SEQ ID NO: 67728 - DNA, 25 bp, Probe sequence
caagtggcaaatactcgtttcatta

SEQ ID NO: 67729 - DNA, 25 bp, Probe sequence
taatcaagtggcaaatactcgtttc

SEQ ID NO: 67730 - DNA, 25 bp, Probe sequence
ctaatcaagtggcaaatactcgttt

SEQ ID NO: 67731 - DNA, 25 bp, Probe sequence
tactaatcaagtggcaaatactcgt

SEQ ID NO: 67732 - DNA, 25 bp, Probe sequence
agccgattatgagtgcttcttaata

SEQ ID NO: 67733 - DNA, 25 bp, Probe sequence
aagtggcaaatactcgtttcattat

SEQ ID NO: 67734 - DNA, 25 bp, Probe sequence
actaatcaagtggcaaatactcgtt

SEQ ID NO: 67735 - DNA, 25 bp, Probe sequence
agcccaatcagtttcatcaagtata

SEQ ID NO: 67736 - DNA, 25 bp, Probe sequence
attatcagcccaatcagtttcatca

SEQ ID NO: 67737 - DNA, 25 bp, Probe sequence
gcccaatcagtttcatcaagtataa

SEQ ID NO: 67738 - DNA, 25 bp, Probe sequence
ttatcagcccaatcagtttcatcaa

SEQ ID NO: 67739 - DNA, 25 bp, Probe sequence
agtgctaagaggtatacagttatgc

SEQ ID NO: 67740 - DNA, 25 bp, Probe sequence
aatccaagtgctaagaggtatacag

SEQ ID NO: 67741 - DNA, 25 bp, Probe sequence
ccaagtgctaagaggtatacagtta

SEQ ID NO: 67742 - DNA, 25 bp, Probe sequence
tatcagcccaatcagtttcatcaag

SEQ ID NO: 67743 - DNA, 25 bp, Probe sequence
tattatcagcccaatcagtttcatc

SEQ ID NO: 67744 - DNA, 25 bp, Probe sequence
tatacttgatgaaactgattgggct

SEQ ID NO: 67745 - DNA, 25 bp, Probe sequence
tgatgaaactgattgggctgataat

SEQ ID NO: 67746 - DNA, 25 bp, Probe sequence
ttatacttgatgaaactgattgggc

SEQ ID NO: 67747 - DNA, 25 bp, Probe sequence
ttgatgaaactgattgggctgataa

SEQ ID NO: 67748 - DNA, 25 bp, Probe sequence
ctgtatacctcttagcacttggatt

SEQ ID NO: 67749 - DNA, 25 bp, Probe sequence
gcataactgtatacctcttagcact

SEQ ID NO: 67750 - DNA, 25 bp, Probe sequence
taactgtatacctcttagcacttgg

SEQ ID NO: 67751 - DNA, 25 bp, Probe sequence
actgtatacctcttagcacttggat

SEQ ID NO: 67752 - DNA, 25 bp, Probe sequence
gatgaaactgattgggctgataata

SEQ ID NO: 67753 - DNA, 25 bp, Probe sequence
tgacatcctttcattagaccttagt

SEQ ID NO: 67754 - DNA, 25 bp, Probe sequence
tcctttcattagaccttagtacgat

SEQ ID NO: 67755 - DNA, 25 bp, Probe sequence
atcctttcattagaccttagtacga

SEQ ID NO: 67756 - DNA, 25 bp, Probe sequence
catcctttcattagaccttagtacg

SEQ ID NO: 67757 - DNA, 25 bp, Probe sequence
ttgacatcctttcattagaccttag

SEQ ID NO: 67758 - DNA, 25 bp, Probe sequence
cctttcattagaccttagtacgatt

SEQ ID NO: 67759 - DNA, 25 bp, Probe sequence
gacatcctttcattagaccttagta

SEQ ID NO: 67760 - DNA, 25 bp, Probe sequence
tttgacatcctttcattagacctta

SEQ ID NO: 67761 - DNA, 25 bp, Probe sequence
acatcctttcattagaccttagtac

SEQ ID NO: 67762 - DNA, 25 bp, Probe sequence
actaaggtctaatgaaaggatgtca

SEQ ID NO: 67763 - DNA, 25 bp, Probe sequence
cgtactaaggtctaatgaaaggatg

SEQ ID NO: 67764 - DNA, 25 bp, Probe sequence
tcgtactaaggtctaatgaaaggat

SEQ ID NO: 67765 - DNA, 25 bp, Probe sequence
atcgtactaaggtctaatgaaagga

SEQ ID NO: 67766 - DNA, 25 bp, Probe sequence
ctaaggtctaatgaaaggatgtcaa

SEQ ID NO: 67767 - DNA, 25 bp, Probe sequence
tactaaggtctaatgaaaggatgtc

SEQ ID NO: 67768 - DNA, 25 bp, Probe sequence
aatcgtactaaggtctaatgaaagg

SEQ ID NO: 67769 - DNA, 25 bp, Probe sequence
taaggtctaatgaaaggatgtcaaa

SEQ ID NO: 67770 - DNA, 25 bp, Probe sequence
gtactaaggtctaatgaaaggatgt

SEQ ID NO: 67771 - DNA, 25 bp, Probe sequence
aaggttcaagtaagggaggaataac

SEQ ID NO: 67772 - DNA, 25 bp, Probe sequence
aataaggttcaagtaagggaggaat

SEQ ID NO: 67773 - DNA, 25 bp, Probe sequence
ataataaggttcaagtaagggagga

SEQ ID NO: 67774 - DNA, 25 bp, Probe sequence
aggttcaagtaagggaggaataaca

SEQ ID NO: 67775 - DNA, 25 bp, Probe sequence
taaggttcaagtaagggaggaataa

SEQ ID NO: 67776 - DNA, 25 bp, Probe sequence
taataaggttcaagtaagggaggaa

SEQ ID NO: 67777 - DNA, 25 bp, Probe sequence
ataaggttcaagtaagggaggaata

SEQ ID NO: 67778 - DNA, 25 bp, Probe sequence
cgtgttcgtatataataaggttcaa

SEQ ID NO: 67779 - DNA, 25 bp, Probe sequence
tataataaggttcaagtaagggagg

SEQ ID NO: 67780 - DNA, 25 bp, Probe sequence
gttattcctcccttacttgaacctt

SEQ ID NO: 67781 - DNA, 25 bp, Probe sequence
attcctcccttacttgaaccttatt

SEQ ID NO: 67782 - DNA, 25 bp, Probe sequence
tcctcccttacttgaaccttattat

SEQ ID NO: 67783 - DNA, 25 bp, Probe sequence
tgttattcctcccttacttgaacct

SEQ ID NO: 67784 - DNA, 25 bp, Probe sequence
ttcctcccttacttgaaccttatta

SEQ ID NO: 67785 - DNA, 25 bp, Probe sequence
ttattcctcccttacttgaacctta

SEQ ID NO: 67786 - DNA, 25 bp, Probe sequence
ttgaaccttattatatacgaacacg

SEQ ID NO: 67787 - DNA, 25 bp, Probe sequence
tattcctcccttacttgaaccttat

SEQ ID NO: 67788 - DNA, 25 bp, Probe sequence
cctcccttacttgaaccttattata

SEQ ID NO: 67789 - DNA, 25 bp, Probe sequence
acggtttaaggaatatataactgtg

SEQ ID NO: 67790 - DNA, 25 bp, Probe sequence
cggtttaaggaatatataactgtga

SEQ ID NO: 67791 - DNA, 25 bp, Probe sequence
acatgggaatttatcaaaagagact

SEQ ID NO: 67792 - DNA, 25 bp, Probe sequence
catgggaatttatcaaaagagactt

SEQ ID NO: 67793 - DNA, 25 bp, Probe sequence
aaggaatatataactgtgattcgta

SEQ ID NO: 67794 - DNA, 25 bp, Probe sequence
taaggaatatataactgtgattcgt

SEQ ID NO: 67795 - DNA, 25 bp, Probe sequence
tacatgggaatttatcaaaagagac

SEQ ID NO: 67796 - DNA, 25 bp, Probe sequence
aggaatatataactgtgattcgtat

SEQ ID NO: 67797 - DNA, 25 bp, Probe sequence
tctaagaatacatgggaatttatca

SEQ ID NO: 67798 - DNA, 25 bp, Probe sequence
cacagttatatattccttaaaccgt

SEQ ID NO: 67799 - DNA, 25 bp, Probe sequence
tcacagttatatattccttaaaccg

SEQ ID NO: 67800 - DNA, 25 bp, Probe sequence
agtctcttttgataaattcccatgt

SEQ ID NO: 67801 - DNA, 25 bp, Probe sequence
aagtctcttttgataaattcccatg

SEQ ID NO: 67802 - DNA, 25 bp, Probe sequence
acgaatcacagttatatattcctta

SEQ ID NO: 67803 - DNA, 25 bp, Probe sequence
tacgaatcacagttatatattcctt

SEQ ID NO: 67804 - DNA, 25 bp, Probe sequence
gtctcttttgataaattcccatgta

SEQ ID NO: 67805 - DNA, 25 bp, Probe sequence
atacgaatcacagttatatattcct

SEQ ID NO: 67806 - DNA, 25 bp, Probe sequence
tgataaattcccatgtattcttaga

SEQ ID NO: 67807 - DNA, 25 bp, Probe sequence
agagtatagtaacacaatggcaacg

SEQ ID NO: 67808 - DNA, 25 bp, Probe sequence
aagagtatagtaacacaatggcaac

SEQ ID NO: 67809 - DNA, 25 bp, Probe sequence
gtatagtaacacaatggcaacggag

SEQ ID NO: 67810 - DNA, 25 bp, Probe sequence
gagtatagtaacacaatggcaacgg

SEQ ID NO: 67811 - DNA, 25 bp, Probe sequence
agtatagtaacacaatggcaacgga

SEQ ID NO: 67812 - DNA, 25 bp, Probe sequence
tatagtaacacaatggcaacggagg

SEQ ID NO: 67813 - DNA, 25 bp, Probe sequence
aaagagtatagtaacacaatggcaa

SEQ ID NO: 67814 - DNA, 25 bp, Probe sequence
taaagagtatagtaacacaatggca

SEQ ID NO: 67815 - DNA, 25 bp, Probe sequence
ataaagagtatagtaacacaatggc

SEQ ID NO: 67816 - DNA, 25 bp, Probe sequence
gttgccattgtgttactatactctt

SEQ ID NO: 67817 - DNA, 25 bp, Probe sequence
cgttgccattgtgttactatactct

SEQ ID NO: 67818 - DNA, 25 bp, Probe sequence
ccgttgccattgtgttactatactc

SEQ ID NO: 67819 - DNA, 25 bp, Probe sequence
ctccgttgccattgtgttactatac

SEQ ID NO: 67820 - DNA, 25 bp, Probe sequence
tccgttgccattgtgttactatact

SEQ ID NO: 67821 - DNA, 25 bp, Probe sequence
cctccgttgccattgtgttactata

SEQ ID NO: 67822 - DNA, 25 bp, Probe sequence
ttgccattgtgttactatactcttt

SEQ ID NO: 67823 - DNA, 25 bp, Probe sequence
tgccattgtgttactatactcttta

SEQ ID NO: 67824 - DNA, 25 bp, Probe sequence
gccattgtgttactatactctttat

SEQ ID NO: 67825 - DNA, 25 bp, Probe sequence
aggtatatgcgttatgtggtgtctt

SEQ ID NO: 67826 - DNA, 25 bp, Probe sequence
cttacaggtatatgcgttatgtggt

SEQ ID NO: 67827 - DNA, 25 bp, Probe sequence
ttacaggtatatgcgttatgtggtg

SEQ ID NO: 67828 - DNA, 25 bp, Probe sequence
tgatgtgaactaacaccgagattaa

SEQ ID NO: 67829 - DNA, 25 bp, Probe sequence
atgatgtgaactaacaccgagatta

SEQ ID NO: 67830 - DNA, 25 bp, Probe sequence
tccttacaggtatatgcgttatgtg

SEQ ID NO: 67831 - DNA, 25 bp, Probe sequence
gtccttacaggtatatgcgttatgt

SEQ ID NO: 67832 - DNA, 25 bp, Probe sequence
gatgatgtgaactaacaccgagatt

SEQ ID NO: 67833 - DNA, 25 bp, Probe sequence
caggtatatgcgttatgtggtgtct

SEQ ID NO: 67834 - DNA, 25 bp, Probe sequence
aagacaccacataacgcatatacct

SEQ ID NO: 67835 - DNA, 25 bp, Probe sequence
accacataacgcatatacctgtaag

SEQ ID NO: 67836 - DNA, 25 bp, Probe sequence
caccacataacgcatatacctgtaa

SEQ ID NO: 67837 - DNA, 25 bp, Probe sequence
ttaatctcggtgttagttcacatca

SEQ ID NO: 67838 - DNA, 25 bp, Probe sequence
acataacgcatatacctgtaaggac

SEQ ID NO: 67839 - DNA, 25 bp, Probe sequence
cacataacgcatatacctgtaagga

SEQ ID NO: 67840 - DNA, 25 bp, Probe sequence
taatctcggtgttagttcacatcat

SEQ ID NO: 67841 - DNA, 25 bp, Probe sequence
aatctcggtgttagttcacatcatc

SEQ ID NO: 67842 - DNA, 25 bp, Probe sequence
agacaccacataacgcatatacctg

SEQ ID NO: 67843 - DNA, 25 bp, Probe sequence
aaagtaatatgagcaaacccaaacg

SEQ ID NO: 67844 - DNA, 25 bp, Probe sequence
aagtaatatgagcaaacccaaacgt

SEQ ID NO: 67845 - DNA, 25 bp, Probe sequence
acaaaagtaatatgagcaaacccaa

SEQ ID NO: 67846 - DNA, 25 bp, Probe sequence
tacaaaagtaatatgagcaaaccca

SEQ ID NO: 67847 - DNA, 25 bp, Probe sequence
aaaagtaatatgagcaaacccaaac

SEQ ID NO: 67848 - DNA, 25 bp, Probe sequence
caaaagtaatatgagcaaacccaaa

SEQ ID NO: 67849 - DNA, 25 bp, Probe sequence
aaattaggcgaatactgtttgaaaa

SEQ ID NO: 67850 - DNA, 25 bp, Probe sequence
aaaattaggcgaatactgtttgaaa

SEQ ID NO: 67851 - DNA, 25 bp, Probe sequence
atacaaaagtaatatgagcaaaccc

SEQ ID NO: 67852 - DNA, 25 bp, Probe sequence
cgtttgggtttgctcatattacttt

SEQ ID NO: 67853 - DNA, 25 bp, Probe sequence
acgtttgggtttgctcatattactt

SEQ ID NO: 67854 - DNA, 25 bp, Probe sequence
ttgggtttgctcatattacttttgt

SEQ ID NO: 67855 - DNA, 25 bp, Probe sequence
tgggtttgctcatattacttttgta

SEQ ID NO: 67856 - DNA, 25 bp, Probe sequence
tttgggtttgctcatattacttttg

SEQ ID NO: 67857 - DNA, 25 bp, Probe sequence
gtttgggtttgctcatattactttt

SEQ ID NO: 67858 - DNA, 25 bp, Probe sequence
tttcaaacagtattcgcctaatttt

SEQ ID NO: 67859 - DNA, 25 bp, Probe sequence
ttttcaaacagtattcgcctaattt

SEQ ID NO: 67860 - DNA, 25 bp, Probe sequence
gggtttgctcatattacttttgtat

SEQ ID NO: 67861 - DNA, 25 bp, Probe sequence
tgtaaatgatgttagggcttatagt

SEQ ID NO: 67862 - DNA, 25 bp, Probe sequence
tgatgttagggcttatagttattga

SEQ ID NO: 67863 - DNA, 25 bp, Probe sequence
atgaaatgcaagtaagtgaggtagt

SEQ ID NO: 67864 - DNA, 25 bp, Probe sequence
agtatgaaatgcaagtaagtgaggt

SEQ ID NO: 67865 - DNA, 25 bp, Probe sequence
tgaaatgcaagtaagtgaggtagtt

SEQ ID NO: 67866 - DNA, 25 bp, Probe sequence
gagtatgaaatgcaagtaagtgagg

SEQ ID NO: 67867 - DNA, 25 bp, Probe sequence
tgagtatgaaatgcaagtaagtgag

SEQ ID NO: 67868 - DNA, 25 bp, Probe sequence
ctgagtatgaaatgcaagtaagtga

SEQ ID NO: 67869 - DNA, 25 bp, Probe sequence
tctgagtatgaaatgcaagtaagtg

SEQ ID NO: 67870 - DNA, 25 bp, Probe sequence
actataagccctaacatcatttaca

SEQ ID NO: 67871 - DNA, 25 bp, Probe sequence
tcaataactataagccctaacatca

SEQ ID NO: 67872 - DNA, 25 bp, Probe sequence
acctcacttacttgcatttcatact

SEQ ID NO: 67873 - DNA, 25 bp, Probe sequence
actacctcacttacttgcatttcat

SEQ ID NO: 67874 - DNA, 25 bp, Probe sequence
cctcacttacttgcatttcatactc

SEQ ID NO: 67875 - DNA, 25 bp, Probe sequence
aactacctcacttacttgcatttca

SEQ ID NO: 67876 - DNA, 25 bp, Probe sequence
cttgcatttcatactcagataacca

SEQ ID NO: 67877 - DNA, 25 bp, Probe sequence
acttgcatttcatactcagataacc

SEQ ID NO: 67878 - DNA, 25 bp, Probe sequence
cacttacttgcatttcatactcaga

SEQ ID NO: 67879 - DNA, 25 bp, Probe sequence
ttataggaagtaatgtgtgtgacgc

SEQ ID NO: 67880 - DNA, 25 bp, Probe sequence
attataggaagtaatgtgtgtgacg

SEQ ID NO: 67881 - DNA, 25 bp, Probe sequence
tataggaagtaatgtgtgtgacgca

SEQ ID NO: 67882 - DNA, 25 bp, Probe sequence
ataggaagtaatgtgtgtgacgcaa

SEQ ID NO: 67883 - DNA, 25 bp, Probe sequence
taggaagtaatgtgtgtgacgcaaa

SEQ ID NO: 67884 - DNA, 25 bp, Probe sequence
tattataggaagtaatgtgtgtgac

SEQ ID NO: 67885 - DNA, 25 bp, Probe sequence
cccttatggaatttcacattctagt

SEQ ID NO: 67886 - DNA, 25 bp, Probe sequence
catggtattatattgtttggagtga

SEQ ID NO: 67887 - DNA, 25 bp, Probe sequence
tcatggtattatattgtttggagtg

SEQ ID NO: 67888 - DNA, 25 bp, Probe sequence
gcgtcacacacattacttcctataa

SEQ ID NO: 67889 - DNA, 25 bp, Probe sequence
cgtcacacacattacttcctataat

SEQ ID NO: 67890 - DNA, 25 bp, Probe sequence
tgcgtcacacacattacttcctata

SEQ ID NO: 67891 - DNA, 25 bp, Probe sequence
ttgcgtcacacacattacttcctat

SEQ ID NO: 67892 - DNA, 25 bp, Probe sequence
tttgcgtcacacacattacttccta

SEQ ID NO: 67893 - DNA, 25 bp, Probe sequence
gtcacacacattacttcctataata

SEQ ID NO: 67894 - DNA, 25 bp, Probe sequence
actagaatgtgaaattccataaggg

SEQ ID NO: 67895 - DNA, 25 bp, Probe sequence
cactccaaacaatataataccatga

SEQ ID NO: 67896 - DNA, 25 bp, Probe sequence
tcactccaaacaatataataccatg

SEQ ID NO: 67897 - DNA, 25 bp, Probe sequence
ataacaagtctagaattatcgcatt

SEQ ID NO: 67898 - DNA, 25 bp, Probe sequence
taacaagtctagaattatcgcattc

SEQ ID NO: 67899 - DNA, 25 bp, Probe sequence
ttataacaagtctagaattatcgca

SEQ ID NO: 67900 - DNA, 25 bp, Probe sequence
tataacaagtctagaattatcgcat

SEQ ID NO: 67901 - DNA, 25 bp, Probe sequence
acaagtctagaattatcgcattctt

SEQ ID NO: 67902 - DNA, 25 bp, Probe sequence
aacaagtctagaattatcgcattct

SEQ ID NO: 67903 - DNA, 25 bp, Probe sequence
caagtctagaattatcgcattctta

SEQ ID NO: 67904 - DNA, 25 bp, Probe sequence
tttataacaagtctagaattatcgc

SEQ ID NO: 67905 - DNA, 25 bp, Probe sequence
aagtctagaattatcgcattcttaa

SEQ ID NO: 67906 - DNA, 25 bp, Probe sequence
aatgcgataattctagacttgttat

SEQ ID NO: 67907 - DNA, 25 bp, Probe sequence
gaatgcgataattctagacttgtta

SEQ ID NO: 67908 - DNA, 25 bp, Probe sequence
tgcgataattctagacttgttataa

SEQ ID NO: 67909 - DNA, 25 bp, Probe sequence
atgcgataattctagacttgttata

SEQ ID NO: 67910 - DNA, 25 bp, Probe sequence
agaatgcgataattctagacttgtt

SEQ ID NO: 67911 - DNA, 25 bp, Probe sequence
aagaatgcgataattctagacttgt

SEQ ID NO: 67912 - DNA, 25 bp, Probe sequence
taagaatgcgataattctagacttg

SEQ ID NO: 67913 - DNA, 25 bp, Probe sequence
gcgataattctagacttgttataaa

SEQ ID NO: 67914 - DNA, 25 bp, Probe sequence
ttaagaatgcgataattctagactt

SEQ ID NO: 67915 - DNA, 25 bp, Probe sequence
atagcactgtattccatctctttcg

SEQ ID NO: 67916 - DNA, 25 bp, Probe sequence
caactatagcactgtattccatctc

SEQ ID NO: 67917 - DNA, 25 bp, Probe sequence
actatagcactgtattccatctctt

SEQ ID NO: 67918 - DNA, 25 bp, Probe sequence
aactatagcactgtattccatctct

SEQ ID NO: 67919 - DNA, 25 bp, Probe sequence
acaactatagcactgtattccatct

SEQ ID NO: 67920 - DNA, 25 bp, Probe sequence
aacaactatagcactgtattccatc

SEQ ID NO: 67921 - DNA, 25 bp, Probe sequence
tatagcactgtattccatctctttc

SEQ ID NO: 67922 - DNA, 25 bp, Probe sequence
tagcactgtattccatctctttcga

SEQ ID NO: 67923 - DNA, 25 bp, Probe sequence
ctatagcactgtattccatctcttt

SEQ ID NO: 67924 - DNA, 25 bp, Probe sequence
cgaaagagatggaatacagtgctat

SEQ ID NO: 67925 - DNA, 25 bp, Probe sequence
gagatggaatacagtgctatagttg

SEQ ID NO: 67926 - DNA, 25 bp, Probe sequence
agagatggaatacagtgctatagtt

SEQ ID NO: 67927 - DNA, 25 bp, Probe sequence
aagagatggaatacagtgctatagt

SEQ ID NO: 67928 - DNA, 25 bp, Probe sequence
agatggaatacagtgctatagttgt

SEQ ID NO: 67929 - DNA, 25 bp, Probe sequence
gatggaatacagtgctatagttgtt

SEQ ID NO: 67930 - DNA, 25 bp, Probe sequence
gaaagagatggaatacagtgctata

SEQ ID NO: 67931 - DNA, 25 bp, Probe sequence
tcgaaagagatggaatacagtgcta

SEQ ID NO: 67932 - DNA, 25 bp, Probe sequence
aaagagatggaatacagtgctatag

SEQ ID NO: 67933 - DNA, 25 bp, Probe sequence
caatagcagtcagtttcaagcaata

SEQ ID NO: 67934 - DNA, 25 bp, Probe sequence
aatagcagtcagtttcaagcaatat

SEQ ID NO: 67935 - DNA, 25 bp, Probe sequence
tcgtaacattatcgtttaggagaca

SEQ ID NO: 67936 - DNA, 25 bp, Probe sequence
acaatagcagtcagtttcaagcaat

SEQ ID NO: 67937 - DNA, 25 bp, Probe sequence
cgtaacattatcgtttaggagacaa

SEQ ID NO: 67938 - DNA, 25 bp, Probe sequence
atcgtaacattatcgtttaggagac

SEQ ID NO: 67939 - DNA, 25 bp, Probe sequence
aacaatagcagtcagtttcaagcaa

SEQ ID NO: 67940 - DNA, 25 bp, Probe sequence
gacatggaaatcgtaacattatcgt

SEQ ID NO: 67941 - DNA, 25 bp, Probe sequence
ggaaatcgtaacattatcgtttagg

SEQ ID NO: 67942 - DNA, 25 bp, Probe sequence
tattgcttgaaactgactgctattg

SEQ ID NO: 67943 - DNA, 25 bp, Probe sequence
atattgcttgaaactgactgctatt

SEQ ID NO: 67944 - DNA, 25 bp, Probe sequence
tgtctcctaaacgataatgttacga

SEQ ID NO: 67945 - DNA, 25 bp, Probe sequence
attgcttgaaactgactgctattgt

SEQ ID NO: 67946 - DNA, 25 bp, Probe sequence
ttgtctcctaaacgataatgttacg

SEQ ID NO: 67947 - DNA, 25 bp, Probe sequence
gtctcctaaacgataatgttacgat

SEQ ID NO: 67948 - DNA, 25 bp, Probe sequence
ttgcttgaaactgactgctattgtt

SEQ ID NO: 67949 - DNA, 25 bp, Probe sequence
acgataatgttacgatttccatgtc

SEQ ID NO: 67950 - DNA, 25 bp, Probe sequence
cctaaacgataatgttacgatttcc

SEQ ID NO: 67951 - DNA, 25 bp, Probe sequence
cattactaattgtgagaatcttggt

SEQ ID NO: 67952 - DNA, 25 bp, Probe sequence
tgcgagacaatttatagtagaacaa

SEQ ID NO: 67953 - DNA, 25 bp, Probe sequence
atgcgagacaatttatagtagaaca

SEQ ID NO: 67954 - DNA, 25 bp, Probe sequence
acattactaattgtgagaatcttgg

SEQ ID NO: 67955 - DNA, 25 bp, Probe sequence
gatgcgagacaatttatagtagaac

SEQ ID NO: 67956 - DNA, 25 bp, Probe sequence
attactaattgtgagaatcttggtt

SEQ ID NO: 67957 - DNA, 25 bp, Probe sequence
gcgagacaatttatagtagaacaat

SEQ ID NO: 67958 - DNA, 25 bp, Probe sequence
ttactaattgtgagaatcttggttt

SEQ ID NO: 67959 - DNA, 25 bp, Probe sequence
tttgagggtttatgaatgatagaaa

SEQ ID NO: 67960 - DNA, 25 bp, Probe sequence
accaagattctcacaattagtaatg

SEQ ID NO: 67961 - DNA, 25 bp, Probe sequence
ttgttctactataaattgtctcgca

SEQ ID NO: 67962 - DNA, 25 bp, Probe sequence
tgttctactataaattgtctcgcat

SEQ ID NO: 67963 - DNA, 25 bp, Probe sequence
ccaagattctcacaattagtaatgt

SEQ ID NO: 67964 - DNA, 25 bp, Probe sequence
gttctactataaattgtctcgcatc

SEQ ID NO: 67965 - DNA, 25 bp, Probe sequence
aaccaagattctcacaattagtaat

SEQ ID NO: 67966 - DNA, 25 bp, Probe sequence
attgttctactataaattgtctcgc

SEQ ID NO: 67967 - DNA, 25 bp, Probe sequence
aaaccaagattctcacaattagtaa

SEQ ID NO: 67968 - DNA, 25 bp, Probe sequence
tttctatcattcataaaccctcaaa

SEQ ID NO: 67969 - DNA, 25 bp, Probe sequence
tcctccctgtatgaacaacaaatag

SEQ ID NO: 67970 - DNA, 25 bp, Probe sequence
atcctccctgtatgaacaacaaata

SEQ ID NO: 67971 - DNA, 25 bp, Probe sequence
tatcctccctgtatgaacaacaaat

SEQ ID NO: 67972 - DNA, 25 bp, Probe sequence
atatcctccctgtatgaacaacaaa

SEQ ID NO: 67973 - DNA, 25 bp, Probe sequence
aatatcctccctgtatgaacaacaa

SEQ ID NO: 67974 - DNA, 25 bp, Probe sequence
aaatatcctccctgtatgaacaaca

SEQ ID NO: 67975 - DNA, 25 bp, Probe sequence
cctccctgtatgaacaacaaatagt

SEQ ID NO: 67976 - DNA, 25 bp, Probe sequence
tgaaatatcctccctgtatgaacaa

SEQ ID NO: 67977 - DNA, 25 bp, Probe sequence
gaaatatcctccctgtatgaacaac

SEQ ID NO: 67978 - DNA, 25 bp, Probe sequence
tgttgttcatacagggaggatattt

SEQ ID NO: 67979 - DNA, 25 bp, Probe sequence
ttgttgttcatacagggaggatatt

SEQ ID NO: 67980 - DNA, 25 bp, Probe sequence
tttgttgttcatacagggaggatat

SEQ ID NO: 67981 - DNA, 25 bp, Probe sequence
atttgttgttcatacagggaggata

SEQ ID NO: 67982 - DNA, 25 bp, Probe sequence
tatttgttgttcatacagggaggat

SEQ ID NO: 67983 - DNA, 25 bp, Probe sequence
ctatttgttgttcatacagggagga

SEQ ID NO: 67984 - DNA, 25 bp, Probe sequence
actatttgttgttcatacagggagg

SEQ ID NO: 67985 - DNA, 25 bp, Probe sequence
ttgttcatacagggaggatatttca

SEQ ID NO: 67986 - DNA, 25 bp, Probe sequence
gttgttcatacagggaggatatttc

SEQ ID NO: 67987 - DNA, 25 bp, Probe sequence
cttaatgtcccagcctattcgtttg

SEQ ID NO: 67988 - DNA, 25 bp, Probe sequence
ttaatgtcccagcctattcgtttga

SEQ ID NO: 67989 - DNA, 25 bp, Probe sequence
acttaatgtcccagcctattcgttt

SEQ ID NO: 67990 - DNA, 25 bp, Probe sequence
taatgtcccagcctattcgtttgaa

SEQ ID NO: 67991 - DNA, 25 bp, Probe sequence
aacttaatgtcccagcctattcgtt

SEQ ID NO: 67992 - DNA, 25 bp, Probe sequence
cccagcctattcgtttgaattattt

SEQ ID NO: 67993 - DNA, 25 bp, Probe sequence
tcccagcctattcgtttgaattatt

SEQ ID NO: 67994 - DNA, 25 bp, Probe sequence
gaacttaatgtcccagcctattcgt

SEQ ID NO: 67995 - DNA, 25 bp, Probe sequence
gtcccagcctattcgtttgaattat

SEQ ID NO: 67996 - DNA, 25 bp, Probe sequence
caaacgaataggctgggacattaag

SEQ ID NO: 67997 - DNA, 25 bp, Probe sequence
aaacgaataggctgggacattaagt

SEQ ID NO: 67998 - DNA, 25 bp, Probe sequence
tcaaacgaataggctgggacattaa

SEQ ID NO: 67999 - DNA, 25 bp, Probe sequence
ttcaaacgaataggctgggacatta

SEQ ID NO: 68000 - DNA, 25 bp, Probe sequence
aacgaataggctgggacattaagtt

SEQ ID NO: 68001 - DNA, 25 bp, Probe sequence
aaataattcaaacgaataggctggg

SEQ ID NO: 68002 - DNA, 25 bp, Probe sequence
aataattcaaacgaataggctggga

SEQ ID NO: 68003 - DNA, 25 bp, Probe sequence
acgaataggctgggacattaagttc

SEQ ID NO: 68004 - DNA, 25 bp, Probe sequence
ataattcaaacgaataggctgggac

SEQ ID NO: 68005 - DNA, 25 bp, Probe sequence
tgtgtgagtcattctatcattacaa

SEQ ID NO: 68006 - DNA, 25 bp, Probe sequence
gtgtgagtcattctatcattacaac

SEQ ID NO: 68007 - DNA, 25 bp, Probe sequence
atgtgtgagtcattctatcattaca

SEQ ID NO: 68008 - DNA, 25 bp, Probe sequence
tgtgagtcattctatcattacaact

SEQ ID NO: 68009 - DNA, 25 bp, Probe sequence
attctccttcgattcttgtattctt

SEQ ID NO: 68010 - DNA, 25 bp, Probe sequence
catgtgtgagtcattctatcattac

SEQ ID NO: 68011 - DNA, 25 bp, Probe sequence
gtgagtcattctatcattacaactt

SEQ ID NO: 68012 - DNA, 25 bp, Probe sequence
tattctccttcgattcttgtattct

SEQ ID NO: 68013 - DNA, 25 bp, Probe sequence
aacttatatgaggtcgaaactgtga

SEQ ID NO: 68014 - DNA, 25 bp, Probe sequence
ttgtaatgatagaatgactcacaca

SEQ ID NO: 68015 - DNA, 25 bp, Probe sequence
tgtaatgatagaatgactcacacat

SEQ ID NO: 68016 - DNA, 25 bp, Probe sequence
gttgtaatgatagaatgactcacac

SEQ ID NO: 68017 - DNA, 25 bp, Probe sequence
agttgtaatgatagaatgactcaca

SEQ ID NO: 68018 - DNA, 25 bp, Probe sequence
aagaatacaagaatcgaaggagaat

SEQ ID NO: 68019 - DNA, 25 bp, Probe sequence
gtaatgatagaatgactcacacatg

SEQ ID NO: 68020 - DNA, 25 bp, Probe sequence
aagttgtaatgatagaatgactcac

SEQ ID NO: 68021 - DNA, 25 bp, Probe sequence
agaatacaagaatcgaaggagaata

SEQ ID NO: 68022 - DNA, 25 bp, Probe sequence
cacagtttcgacctcatataagttg

SEQ ID NO: 68023 - DNA, 25 bp, Probe sequence
tggcttactgtcaccttctatattg

SEQ ID NO: 68024 - DNA, 25 bp, Probe sequence
gttggcttactgtcaccttctatat

SEQ ID NO: 68025 - DNA, 25 bp, Probe sequence
ttggcttactgtcaccttctatatt

SEQ ID NO: 68026 - DNA, 25 bp, Probe sequence
ggcttactgtcaccttctatattgg

SEQ ID NO: 68027 - DNA, 25 bp, Probe sequence
agttggcttactgtcaccttctata

SEQ ID NO: 68028 - DNA, 25 bp, Probe sequence
aagttggcttactgtcaccttctat

SEQ ID NO: 68029 - DNA, 25 bp, Probe sequence
taagttggcttactgtcaccttcta

SEQ ID NO: 68030 - DNA, 25 bp, Probe sequence
cttactgtcaccttctatattggga

SEQ ID NO: 68031 - DNA, 25 bp, Probe sequence
gcttactgtcaccttctatattggg

SEQ ID NO: 68032 - DNA, 25 bp, Probe sequence
atatagaaggtgacagtaagccaac

SEQ ID NO: 68033 - DNA, 25 bp, Probe sequence
caatatagaaggtgacagtaagcca

SEQ ID NO: 68034 - DNA, 25 bp, Probe sequence
aatatagaaggtgacagtaagccaa

SEQ ID NO: 68035 - DNA, 25 bp, Probe sequence
ccaatatagaaggtgacagtaagcc

SEQ ID NO: 68036 - DNA, 25 bp, Probe sequence
tatagaaggtgacagtaagccaact

SEQ ID NO: 68037 - DNA, 25 bp, Probe sequence
atagaaggtgacagtaagccaactt

SEQ ID NO: 68038 - DNA, 25 bp, Probe sequence
tagaaggtgacagtaagccaactta

SEQ ID NO: 68039 - DNA, 25 bp, Probe sequence
cccaatatagaaggtgacagtaagc

SEQ ID NO: 68040 - DNA, 25 bp, Probe sequence
tcccaatatagaaggtgacagtaag

SEQ ID NO: 68041 - DNA, 25 bp, Probe sequence
taatagacattaactggtcgtgagg

SEQ ID NO: 68042 - DNA, 25 bp, Probe sequence
aatagacattaactggtcgtgaggc

SEQ ID NO: 68043 - DNA, 25 bp, Probe sequence
tcatgcccgagactatattcaattt

SEQ ID NO: 68044 - DNA, 25 bp, Probe sequence
ttcatgcccgagactatattcaatt

SEQ ID NO: 68045 - DNA, 25 bp, Probe sequence
attcatgcccgagactatattcaat

SEQ ID NO: 68046 - DNA, 25 bp, Probe sequence
attgattcatgcccgagactatatt

SEQ ID NO: 68047 - DNA, 25 bp, Probe sequence
gattcatgcccgagactatattcaa

SEQ ID NO: 68048 - DNA, 25 bp, Probe sequence
ttgattcatgcccgagactatattc

SEQ ID NO: 68049 - DNA, 25 bp, Probe sequence
tgcccgagactatattcaatttaat

SEQ ID NO: 68050 - DNA, 25 bp, Probe sequence
cctcacgaccagttaatgtctatta

SEQ ID NO: 68051 - DNA, 25 bp, Probe sequence
gcctcacgaccagttaatgtctatt

SEQ ID NO: 68052 - DNA, 25 bp, Probe sequence
aatatagtctcgggcatgaatcaat

SEQ ID NO: 68053 - DNA, 25 bp, Probe sequence
attgaatatagtctcgggcatgaat

SEQ ID NO: 68054 - DNA, 25 bp, Probe sequence
aattgaatatagtctcgggcatgaa

SEQ ID NO: 68055 - DNA, 25 bp, Probe sequence
aaattgaatatagtctcgggcatga

SEQ ID NO: 68056 - DNA, 25 bp, Probe sequence
gaatatagtctcgggcatgaatcaa

SEQ ID NO: 68057 - DNA, 25 bp, Probe sequence
ttgaatatagtctcgggcatgaatc

SEQ ID NO: 68058 - DNA, 25 bp, Probe sequence
ttaaattgaatatagtctcgggcat

SEQ ID NO: 68059 - DNA, 25 bp, Probe sequence
atagattaagagcaagttcgcattc

SEQ ID NO: 68060 - DNA, 25 bp, Probe sequence
tagattaagagcaagttcgcattcc

SEQ ID NO: 68061 - DNA, 25 bp, Probe sequence
tatagattaagagcaagttcgcatt

SEQ ID NO: 68062 - DNA, 25 bp, Probe sequence
atatagattaagagcaagttcgcat

SEQ ID NO: 68063 - DNA, 25 bp, Probe sequence
tatatagattaagagcaagttcgca

SEQ ID NO: 68064 - DNA, 25 bp, Probe sequence
gtatatagattaagagcaagttcgc

SEQ ID NO: 68065 - DNA, 25 bp, Probe sequence
tttattattgtgtgcccttcctaac

SEQ ID NO: 68066 - DNA, 25 bp, Probe sequence
ttacaaatacagttatcaccgcatt

SEQ ID NO: 68067 - DNA, 25 bp, Probe sequence
cctaagaacttaatatcccagcctc

SEQ ID NO: 68068 - DNA, 25 bp, Probe sequence
gaatgcgaacttgctcttaatctat

SEQ ID NO: 68069 - DNA, 25 bp, Probe sequence
ggaatgcgaacttgctcttaatcta

SEQ ID NO: 68070 - DNA, 25 bp, Probe sequence
aatgcgaacttgctcttaatctata

SEQ ID NO: 68071 - DNA, 25 bp, Probe sequence
atgcgaacttgctcttaatctatat

SEQ ID NO: 68072 - DNA, 25 bp, Probe sequence
tgcgaacttgctcttaatctatata

SEQ ID NO: 68073 - DNA, 25 bp, Probe sequence
gcgaacttgctcttaatctatatac

SEQ ID NO: 68074 - DNA, 25 bp, Probe sequence
gttaggaagggcacacaataataaa

SEQ ID NO: 68075 - DNA, 25 bp, Probe sequence
aatgcggtgataactgtatttgtaa

SEQ ID NO: 68076 - DNA, 25 bp, Probe sequence
gaggctgggatattaagttcttagg

SEQ ID NO: 68077 - DNA, 25 bp, Probe sequence
acgattatgtctcaaccttattgtt

SEQ ID NO: 68078 - DNA, 25 bp, Probe sequence
tcaaggttgagatacgattatgtct

SEQ ID NO: 68079 - DNA, 25 bp, Probe sequence
ttcaaggttgagatacgattatgtc

SEQ ID NO: 68080 - DNA, 25 bp, Probe sequence
tacgattatgtctcaaccttattgt

SEQ ID NO: 68081 - DNA, 25 bp, Probe sequence
agatacgattatgtctcaaccttat

SEQ ID NO: 68082 - DNA, 25 bp, Probe sequence
gatacgattatgtctcaaccttatt

SEQ ID NO: 68083 - DNA, 25 bp, Probe sequence
atacgattatgtctcaaccttattg

SEQ ID NO: 68084 - DNA, 25 bp, Probe sequence
cgattatgtctcaaccttattgttt

SEQ ID NO: 68085 - DNA, 25 bp, Probe sequence
tttcaaggttgagatacgattatgt

SEQ ID NO: 68086 - DNA, 25 bp, Probe sequence
aacaataaggttgagacataatcgt

SEQ ID NO: 68087 - DNA, 25 bp, Probe sequence
agacataatcgtatctcaaccttga

SEQ ID NO: 68088 - DNA, 25 bp, Probe sequence
gacataatcgtatctcaaccttgaa

SEQ ID NO: 68089 - DNA, 25 bp, Probe sequence
acaataaggttgagacataatcgta

SEQ ID NO: 68090 - DNA, 25 bp, Probe sequence
ataaggttgagacataatcgtatct

SEQ ID NO: 68091 - DNA, 25 bp, Probe sequence
aataaggttgagacataatcgtatc

SEQ ID NO: 68092 - DNA, 25 bp, Probe sequence
caataaggttgagacataatcgtat

SEQ ID NO: 68093 - DNA, 25 bp, Probe sequence
aaacaataaggttgagacataatcg

SEQ ID NO: 68094 - DNA, 25 bp, Probe sequence
acataatcgtatctcaaccttgaaa

SEQ ID NO: 68095 - DNA, 25 bp, Probe sequence
aagcatcatatacataccacacttt

SEQ ID NO: 68096 - DNA, 25 bp, Probe sequence
aaagcatcatatacataccacactt

SEQ ID NO: 68097 - DNA, 25 bp, Probe sequence
agcatcatatacataccacacttta

SEQ ID NO: 68098 - DNA, 25 bp, Probe sequence
taaagcatcatatacataccacact

SEQ ID NO: 68099 - DNA, 25 bp, Probe sequence
taccacactttaaacaagcatcatg

SEQ ID NO: 68100 - DNA, 25 bp, Probe sequence
cataccacactttaaacaagcatca

SEQ ID NO: 68101 - DNA, 25 bp, Probe sequence
acataccacactttaaacaagcatc

SEQ ID NO: 68102 - DNA, 25 bp, Probe sequence
ataccacactttaaacaagcatcat

SEQ ID NO: 68103 - DNA, 25 bp, Probe sequence
agccctattcaactaatttaaagca

SEQ ID NO: 68104 - DNA, 25 bp, Probe sequence
aagtgtggtatgtatatgatgcttt

SEQ ID NO: 68105 - DNA, 25 bp, Probe sequence
aaagtgtggtatgtatatgatgctt

SEQ ID NO: 68106 - DNA, 25 bp, Probe sequence
agtgtggtatgtatatgatgcttta

SEQ ID NO: 68107 - DNA, 25 bp, Probe sequence
taaagtgtggtatgtatatgatgct

SEQ ID NO: 68108 - DNA, 25 bp, Probe sequence
gatgcttgtttaaagtgtggtatgt

SEQ ID NO: 68109 - DNA, 25 bp, Probe sequence
tgatgcttgtttaaagtgtggtatg

SEQ ID NO: 68110 - DNA, 25 bp, Probe sequence
catgatgcttgtttaaagtgtggta

SEQ ID NO: 68111 - DNA, 25 bp, Probe sequence
atgatgcttgtttaaagtgtggtat

SEQ ID NO: 68112 - DNA, 25 bp, Probe sequence
tgctttaaattagttgaatagggct

SEQ ID NO: 68113 - DNA, 25 bp, Probe sequence
tacttcttggtaaggtgttagttaa

SEQ ID NO: 68114 - DNA, 25 bp, Probe sequence
ttacttcttggtaaggtgttagtta

SEQ ID NO: 68115 - DNA, 25 bp, Probe sequence
acttcttggtaaggtgttagttaaa

SEQ ID NO: 68116 - DNA, 25 bp, Probe sequence
cctcgtcgttgtacaccataattat

SEQ ID NO: 68117 - DNA, 25 bp, Probe sequence
ctcgtcgttgtacaccataattata

SEQ ID NO: 68118 - DNA, 25 bp, Probe sequence
acctcgtcgttgtacaccataatta

SEQ ID NO: 68119 - DNA, 25 bp, Probe sequence
tcgtcgttgtacaccataattatat

SEQ ID NO: 68120 - DNA, 25 bp, Probe sequence
cgtcgttgtacaccataattatatt

SEQ ID NO: 68121 - DNA, 25 bp, Probe sequence
cacctcgtcgttgtacaccataatt

SEQ ID NO: 68122 - DNA, 25 bp, Probe sequence
ttaactaacaccttaccaagaagta

SEQ ID NO: 68123 - DNA, 25 bp, Probe sequence
taactaacaccttaccaagaagtaa

SEQ ID NO: 68124 - DNA, 25 bp, Probe sequence
tttaactaacaccttaccaagaagt

SEQ ID NO: 68125 - DNA, 25 bp, Probe sequence
ataattatggtgtacaacgacgagg

SEQ ID NO: 68126 - DNA, 25 bp, Probe sequence
tataattatggtgtacaacgacgag

SEQ ID NO: 68127 - DNA, 25 bp, Probe sequence
taattatggtgtacaacgacgaggt

SEQ ID NO: 68128 - DNA, 25 bp, Probe sequence
atataattatggtgtacaacgacga

SEQ ID NO: 68129 - DNA, 25 bp, Probe sequence
aatataattatggtgtacaacgacg

SEQ ID NO: 68130 - DNA, 25 bp, Probe sequence
aattatggtgtacaacgacgaggtg

SEQ ID NO: 68131 - DNA, 25 bp, Probe sequence
tggaataatcatctgcttaacttgt

SEQ ID NO: 68132 - DNA, 25 bp, Probe sequence
atggaataatcatctgcttaacttg

SEQ ID NO: 68133 - DNA, 25 bp, Probe sequence
ggaataatcatctgcttaacttgta

SEQ ID NO: 68134 - DNA, 25 bp, Probe sequence
atctgcttaacttgtattatagtgc

SEQ ID NO: 68135 - DNA, 25 bp, Probe sequence
tatggaataatcatctgcttaactt

SEQ ID NO: 68136 - DNA, 25 bp, Probe sequence
aattcattcaatatgcttattcgca

SEQ ID NO: 68137 - DNA, 25 bp, Probe sequence
aaattcattcaatatgcttattcgc

SEQ ID NO: 68138 - DNA, 25 bp, Probe sequence
atatggaataatcatctgcttaact

SEQ ID NO: 68139 - DNA, 25 bp, Probe sequence
tgcaatatggaataatcatctgctt

SEQ ID NO: 68140 - DNA, 25 bp, Probe sequence
acaagttaagcagatgattattcca

SEQ ID NO: 68141 - DNA, 25 bp, Probe sequence
caagttaagcagatgattattccat

SEQ ID NO: 68142 - DNA, 25 bp, Probe sequence
tacaagttaagcagatgattattcc

SEQ ID NO: 68143 - DNA, 25 bp, Probe sequence
gcactataatacaagttaagcagat

SEQ ID NO: 68144 - DNA, 25 bp, Probe sequence
aagttaagcagatgattattccata

SEQ ID NO: 68145 - DNA, 25 bp, Probe sequence
tgcgaataagcatattgaatgaatt

SEQ ID NO: 68146 - DNA, 25 bp, Probe sequence
gcgaataagcatattgaatgaattt

SEQ ID NO: 68147 - DNA, 25 bp, Probe sequence
agttaagcagatgattattccatat

SEQ ID NO: 68148 - DNA, 25 bp, Probe sequence
aagcagatgattattccatattgca

SEQ ID NO: 68149 - DNA, 25 bp, Probe sequence
acgtataataacattatgaggtggt

SEQ ID NO: 68150 - DNA, 25 bp, Probe sequence
taaagaccccttccatacttcaaaa

SEQ ID NO: 68151 - DNA, 25 bp, Probe sequence
ttaaagaccccttccatacttcaaa

SEQ ID NO: 68152 - DNA, 25 bp, Probe sequence
attaaagaccccttccatacttcaa

SEQ ID NO: 68153 - DNA, 25 bp, Probe sequence
gacgacttgaaacaaacaaagtagt

SEQ ID NO: 68154 - DNA, 25 bp, Probe sequence
tgacgacttgaaacaaacaaagtag

SEQ ID NO: 68155 - DNA, 25 bp, Probe sequence
ttgacgacttgaaacaaacaaagta

SEQ ID NO: 68156 - DNA, 25 bp, Probe sequence
tttgacgacttgaaacaaacaaagt

SEQ ID NO: 68157 - DNA, 25 bp, Probe sequence
tattaaagaccccttccatacttca

SEQ ID NO: 68158 - DNA, 25 bp, Probe sequence
ttttgaagtatggaaggggtcttta

SEQ ID NO: 68159 - DNA, 25 bp, Probe sequence
accacctcataatgttattatacgt

SEQ ID NO: 68160 - DNA, 25 bp, Probe sequence
tttgaagtatggaaggggtctttaa

SEQ ID NO: 68161 - DNA, 25 bp, Probe sequence
ttgaagtatggaaggggtctttaat

SEQ ID NO: 68162 - DNA, 25 bp, Probe sequence
tactttgtttgtttcaagtcgtcaa

SEQ ID NO: 68163 - DNA, 25 bp, Probe sequence
ctactttgtttgtttcaagtcgtca

SEQ ID NO: 68164 - DNA, 25 bp, Probe sequence
actactttgtttgtttcaagtcgtc

SEQ ID NO: 68165 - DNA, 25 bp, Probe sequence
actttgtttgtttcaagtcgtcaaa

SEQ ID NO: 68166 - DNA, 25 bp, Probe sequence
tgaagtatggaaggggtctttaata

SEQ ID NO: 68167 - DNA, 25 bp, Probe sequence
cctacgattaaattggagatgcttc

SEQ ID NO: 68168 - DNA, 25 bp, Probe sequence
cgattaaattggagatgcttccttt

SEQ ID NO: 68169 - DNA, 25 bp, Probe sequence
tacgattaaattggagatgcttcct

SEQ ID NO: 68170 - DNA, 25 bp, Probe sequence
ctacgattaaattggagatgcttcc

SEQ ID NO: 68171 - DNA, 25 bp, Probe sequence
tcctacgattaaattggagatgctt

SEQ ID NO: 68172 - DNA, 25 bp, Probe sequence
atcctacgattaaattggagatgct

SEQ ID NO: 68173 - DNA, 25 bp, Probe sequence
agcatcctacgattaaattggagat

SEQ ID NO: 68174 - DNA, 25 bp, Probe sequence
aagcatcctacgattaaattggaga

SEQ ID NO: 68175 - DNA, 25 bp, Probe sequence
gaagcatcctacgattaaattggag

SEQ ID NO: 68176 - DNA, 25 bp, Probe sequence
gaagcatctccaatttaatcgtagg

SEQ ID NO: 68177 - DNA, 25 bp, Probe sequence
ctccaatttaatcgtaggatgcttc

SEQ ID NO: 68178 - DNA, 25 bp, Probe sequence
tctccaatttaatcgtaggatgctt

SEQ ID NO: 68179 - DNA, 25 bp, Probe sequence
atctccaatttaatcgtaggatgct

SEQ ID NO: 68180 - DNA, 25 bp, Probe sequence
agcatctccaatttaatcgtaggat

SEQ ID NO: 68181 - DNA, 25 bp, Probe sequence
aagcatctccaatttaatcgtagga

SEQ ID NO: 68182 - DNA, 25 bp, Probe sequence
ggaagcatctccaatttaatcgtag

SEQ ID NO: 68183 - DNA, 25 bp, Probe sequence
aggaagcatctccaatttaatcgta

SEQ ID NO: 68184 - DNA, 25 bp, Probe sequence
aaaggaagcatctccaatttaatcg

SEQ ID NO: 68185 - DNA, 25 bp, Probe sequence
gtgttgtttaaatcaaattatgcca

SEQ ID NO: 68186 - DNA, 25 bp, Probe sequence
tgtgttgtttaaatcaaattatgcc

SEQ ID NO: 68187 - DNA, 25 bp, Probe sequence
tgttgtttaaatcaaattatgccag

SEQ ID NO: 68188 - DNA, 25 bp, Probe sequence
gttgtttaaatcaaattatgccaga

SEQ ID NO: 68189 - DNA, 25 bp, Probe sequence
tgtttaaatcaaattatgccagaaa

SEQ ID NO: 68190 - DNA, 25 bp, Probe sequence
ttgtttaaatcaaattatgccagaa

SEQ ID NO: 68191 - DNA, 25 bp, Probe sequence
agtaactgatgacttttattcacaa

SEQ ID NO: 68192 - DNA, 25 bp, Probe sequence
atgtgttgtttaaatcaaattatgc

SEQ ID NO: 68193 - DNA, 25 bp, Probe sequence
ctgatgacttttattcacaatttca

SEQ ID NO: 68194 - DNA, 25 bp, Probe sequence
ggcataatttgatttaaacaacaca

SEQ ID NO: 68195 - DNA, 25 bp, Probe sequence
tggcataatttgatttaaacaacac

SEQ ID NO: 68196 - DNA, 25 bp, Probe sequence
ctggcataatttgatttaaacaaca

SEQ ID NO: 68197 - DNA, 25 bp, Probe sequence
tctggcataatttgatttaaacaac

SEQ ID NO: 68198 - DNA, 25 bp, Probe sequence
tttctggcataatttgatttaaaca

SEQ ID NO: 68199 - DNA, 25 bp, Probe sequence
ttctggcataatttgatttaaacaa

SEQ ID NO: 68200 - DNA, 25 bp, Probe sequence
ttgtgaataaaagtcatcagttact

SEQ ID NO: 68201 - DNA, 25 bp, Probe sequence
gcataatttgatttaaacaacacat

SEQ ID NO: 68202 - DNA, 25 bp, Probe sequence
gaaattgtgaataaaagtcatcagt

SEQ ID NO: 68203 - DNA, 25 bp, Probe sequence
atggaataagttcttcaaatgcctt

SEQ ID NO: 68204 - DNA, 25 bp, Probe sequence
acatggaataagttcttcaaatgcc

SEQ ID NO: 68205 - DNA, 25 bp, Probe sequence
catggaataagttcttcaaatgcct

SEQ ID NO: 68206 - DNA, 25 bp, Probe sequence
agttcttcaaatgccttagtttact

SEQ ID NO: 68207 - DNA, 25 bp, Probe sequence
aagttcttcaaatgccttagtttac

SEQ ID NO: 68208 - DNA, 25 bp, Probe sequence
gacatggaataagttcttcaaatgc

SEQ ID NO: 68209 - DNA, 25 bp, Probe sequence
tggaataagttcttcaaatgcctta

SEQ ID NO: 68210 - DNA, 25 bp, Probe sequence
ggaataagttcttcaaatgccttag

SEQ ID NO: 68211 - DNA, 25 bp, Probe sequence
gttcttcaaatgccttagtttacta

SEQ ID NO: 68212 - DNA, 25 bp, Probe sequence
aaggcatttgaagaacttattccat

SEQ ID NO: 68213 - DNA, 25 bp, Probe sequence
ggcatttgaagaacttattccatgt

SEQ ID NO: 68214 - DNA, 25 bp, Probe sequence
aggcatttgaagaacttattccatg

SEQ ID NO: 68215 - DNA, 25 bp, Probe sequence
agtaaactaaggcatttgaagaact

SEQ ID NO: 68216 - DNA, 25 bp, Probe sequence
gtaaactaaggcatttgaagaactt

SEQ ID NO: 68217 - DNA, 25 bp, Probe sequence
gcatttgaagaacttattccatgtc

SEQ ID NO: 68218 - DNA, 25 bp, Probe sequence
taaggcatttgaagaacttattcca

SEQ ID NO: 68219 - DNA, 25 bp, Probe sequence
ctaaggcatttgaagaacttattcc

SEQ ID NO: 68220 - DNA, 25 bp, Probe sequence
tagtaaactaaggcatttgaagaac

SEQ ID NO: 68221 - DNA, 25 bp, Probe sequence
tgttatggttgctattgagtatgtc

SEQ ID NO: 68222 - DNA, 25 bp, Probe sequence
ttgttatggttgctattgagtatgt

SEQ ID NO: 68223 - DNA, 25 bp, Probe sequence
gttatggttgctattgagtatgtca

SEQ ID NO: 68224 - DNA, 25 bp, Probe sequence
tggttgctattgagtatgtcattaa

SEQ ID NO: 68225 - DNA, 25 bp, Probe sequence
atggttgctattgagtatgtcatta

SEQ ID NO: 68226 - DNA, 25 bp, Probe sequence
tatggttgctattgagtatgtcatt

SEQ ID NO: 68227 - DNA, 25 bp, Probe sequence
ttatggttgctattgagtatgtcat

SEQ ID NO: 68228 - DNA, 25 bp, Probe sequence
attgttatggttgctattgagtatg

SEQ ID NO: 68229 - DNA, 25 bp, Probe sequence
acgccattccacctatatttctatt

SEQ ID NO: 68230 - DNA, 25 bp, Probe sequence
gacatactcaatagcaaccataaca

SEQ ID NO: 68231 - DNA, 25 bp, Probe sequence
acatactcaatagcaaccataacaa

SEQ ID NO: 68232 - DNA, 25 bp, Probe sequence
tgacatactcaatagcaaccataac

SEQ ID NO: 68233 - DNA, 25 bp, Probe sequence
ttaatgacatactcaatagcaacca

SEQ ID NO: 68234 - DNA, 25 bp, Probe sequence
atgacatactcaatagcaaccataa

SEQ ID NO: 68235 - DNA, 25 bp, Probe sequence
aatgacatactcaatagcaaccata

SEQ ID NO: 68236 - DNA, 25 bp, Probe sequence
taatgacatactcaatagcaaccat

SEQ ID NO: 68237 - DNA, 25 bp, Probe sequence
catactcaatagcaaccataacaat

SEQ ID NO: 68238 - DNA, 25 bp, Probe sequence
aatagaaatataggtggaatggcgt

SEQ ID NO: 68239 - DNA, 25 bp, Probe sequence
gttgttcttatacattagtcacagc

SEQ ID NO: 68240 - DNA, 25 bp, Probe sequence
acaacagaaatgataaagaaccact

SEQ ID NO: 68241 - DNA, 25 bp, Probe sequence
attgatcctatgactttgattgacg

SEQ ID NO: 68242 - DNA, 25 bp, Probe sequence
aaagcgttgattcttctaggtttat

SEQ ID NO: 68243 - DNA, 25 bp, Probe sequence
agcgttgattcttctaggtttatag

SEQ ID NO: 68244 - DNA, 25 bp, Probe sequence
tgggagtacaacagaaatgataaag

SEQ ID NO: 68245 - DNA, 25 bp, Probe sequence
gggagtacaacagaaatgataaaga

SEQ ID NO: 68246 - DNA, 25 bp, Probe sequence
ttgttcttatacattagtcacagct

SEQ ID NO: 68247 - DNA, 25 bp, Probe sequence
caacagaaatgataaagaaccactg

SEQ ID NO: 68248 - DNA, 25 bp, Probe sequence
gctgtgactaatgtataagaacaac

SEQ ID NO: 68249 - DNA, 25 bp, Probe sequence
agtggttctttatcatttctgttgt

SEQ ID NO: 68250 - DNA, 25 bp, Probe sequence
cgtcaatcaaagtcataggatcaat

SEQ ID NO: 68251 - DNA, 25 bp, Probe sequence
ataaacctagaagaatcaacgcttt

SEQ ID NO: 68252 - DNA, 25 bp, Probe sequence
ctataaacctagaagaatcaacgct

SEQ ID NO: 68253 - DNA, 25 bp, Probe sequence
ctttatcatttctgttgtactccca

SEQ ID NO: 68254 - DNA, 25 bp, Probe sequence
tctttatcatttctgttgtactccc

SEQ ID NO: 68255 - DNA, 25 bp, Probe sequence
agctgtgactaatgtataagaacaa

SEQ ID NO: 68256 - DNA, 25 bp, Probe sequence
tataaacctagaagaatcaacgctt

SEQ ID NO: 68257 - DNA, 25 bp, Probe sequence
aatggcattctgttaattctgattg

SEQ ID NO: 68258 - DNA, 25 bp, Probe sequence
gttaatggcattctgttaattctga

SEQ ID NO: 68259 - DNA, 25 bp, Probe sequence
agttaatggcattctgttaattctg

SEQ ID NO: 68260 - DNA, 25 bp, Probe sequence
cagttaatggcattctgttaattct

SEQ ID NO: 68261 - DNA, 25 bp, Probe sequence
tcagttaatggcattctgttaattc

SEQ ID NO: 68262 - DNA, 25 bp, Probe sequence
taatggcattctgttaattctgatt

SEQ ID NO: 68263 - DNA, 25 bp, Probe sequence
gccttaccgcaatattaattgttgt

SEQ ID NO: 68264 - DNA, 25 bp, Probe sequence
ttaatggcattctgttaattctgat

SEQ ID NO: 68265 - DNA, 25 bp, Probe sequence
atcagttaatggcattctgttaatt

SEQ ID NO: 68266 - DNA, 25 bp, Probe sequence
caatcagaattaacagaatgccatt

SEQ ID NO: 68267 - DNA, 25 bp, Probe sequence
cagaattaacagaatgccattaact

SEQ ID NO: 68268 - DNA, 25 bp, Probe sequence
tcagaattaacagaatgccattaac

SEQ ID NO: 68269 - DNA, 25 bp, Probe sequence
gaattaacagaatgccattaactga

SEQ ID NO: 68270 - DNA, 25 bp, Probe sequence
agaattaacagaatgccattaactg

SEQ ID NO: 68271 - DNA, 25 bp, Probe sequence
aatcagaattaacagaatgccatta

SEQ ID NO: 68272 - DNA, 25 bp, Probe sequence
acaacaattaatattgcggtaaggc

SEQ ID NO: 68273 - DNA, 25 bp, Probe sequence
atcagaattaacagaatgccattaa

SEQ ID NO: 68274 - DNA, 25 bp, Probe sequence
aacagaatgccattaactgattatt

SEQ ID NO: 68275 - DNA, 25 bp, Probe sequence
tacgacactttaggtttactgcttt

SEQ ID NO: 68276 - DNA, 25 bp, Probe sequence
ttacgacactttaggtttactgctt

SEQ ID NO: 68277 - DNA, 25 bp, Probe sequence
cttacgacactttaggtttactgct

SEQ ID NO: 68278 - DNA, 25 bp, Probe sequence
cccttacgacactttaggtttactg

SEQ ID NO: 68279 - DNA, 25 bp, Probe sequence
cagtaaacccttacgacactttagg

SEQ ID NO: 68280 - DNA, 25 bp, Probe sequence
ccttacgacactttaggtttactgc

SEQ ID NO: 68281 - DNA, 25 bp, Probe sequence
acccttacgacactttaggtttact

SEQ ID NO: 68282 - DNA, 25 bp, Probe sequence
agtaaacccttacgacactttaggt

SEQ ID NO: 68283 - DNA, 25 bp, Probe sequence
gcagtaaacccttacgacactttag

SEQ ID NO: 68284 - DNA, 25 bp, Probe sequence
aagcagtaaacctaaagtgtcgtaa

SEQ ID NO: 68285 - DNA, 25 bp, Probe sequence
aaagcagtaaacctaaagtgtcgta

SEQ ID NO: 68286 - DNA, 25 bp, Probe sequence
agcagtaaacctaaagtgtcgtaag

SEQ ID NO: 68287 - DNA, 25 bp, Probe sequence
cagtaaacctaaagtgtcgtaaggg

SEQ ID NO: 68288 - DNA, 25 bp, Probe sequence
cctaaagtgtcgtaagggtttactg

SEQ ID NO: 68289 - DNA, 25 bp, Probe sequence
gcagtaaacctaaagtgtcgtaagg

SEQ ID NO: 68290 - DNA, 25 bp, Probe sequence
ctaaagtgtcgtaagggtttactgc

SEQ ID NO: 68291 - DNA, 25 bp, Probe sequence
acctaaagtgtcgtaagggtttact

SEQ ID NO: 68292 - DNA, 25 bp, Probe sequence
agtaaacctaaagtgtcgtaagggt

SEQ ID NO: 68293 - DNA, 25 bp, Probe sequence
cgtcactccttatatcgttatgtta

SEQ ID NO: 68294 - DNA, 25 bp, Probe sequence
aggaagcgtgtcattaacataataa

SEQ ID NO: 68295 - DNA, 25 bp, Probe sequence
ttaggaagcgtgtcattaacataat

SEQ ID NO: 68296 - DNA, 25 bp, Probe sequence
taggaagcgtgtcattaacataata

SEQ ID NO: 68297 - DNA, 25 bp, Probe sequence
ggaagcgtgtcattaacataataat

SEQ ID NO: 68298 - DNA, 25 bp, Probe sequence
cagcgatgatagaaattgcgttatt

SEQ ID NO: 68299 - DNA, 25 bp, Probe sequence
ataaacacgcctcctaaattgctat

SEQ ID NO: 68300 - DNA, 25 bp, Probe sequence
aataaacacgcctcctaaattgcta

SEQ ID NO: 68301 - DNA, 25 bp, Probe sequence
taaacacgcctcctaaattgctatc

SEQ ID NO: 68302 - DNA, 25 bp, Probe sequence
taacataacgatataaggagtgacg

SEQ ID NO: 68303 - DNA, 25 bp, Probe sequence
attatgttaatgacacgcttcctaa

SEQ ID NO: 68304 - DNA, 25 bp, Probe sequence
ttattatgttaatgacacgcttcct

SEQ ID NO: 68305 - DNA, 25 bp, Probe sequence
tattatgttaatgacacgcttccta

SEQ ID NO: 68306 - DNA, 25 bp, Probe sequence
attattatgttaatgacacgcttcc

SEQ ID NO: 68307 - DNA, 25 bp, Probe sequence
aataacgcaatttctatcatcgctg

SEQ ID NO: 68308 - DNA, 25 bp, Probe sequence
atagcaatttaggaggcgtgtttat

SEQ ID NO: 68309 - DNA, 25 bp, Probe sequence
tagcaatttaggaggcgtgtttatt

SEQ ID NO: 68310 - DNA, 25 bp, Probe sequence
gatagcaatttaggaggcgtgttta

SEQ ID NO: 68311 - DNA, 25 bp, Probe sequence
gcatcaccctggttctaactattat

SEQ ID NO: 68312 - DNA, 25 bp, Probe sequence
catcaccctggttctaactattatt

SEQ ID NO: 68313 - DNA, 25 bp, Probe sequence
atcaccctggttctaactattattt

SEQ ID NO: 68314 - DNA, 25 bp, Probe sequence
cgcaccatatttcactataattgat

SEQ ID NO: 68315 - DNA, 25 bp, Probe sequence
tgcatcaccctggttctaactatta

SEQ ID NO: 68316 - DNA, 25 bp, Probe sequence
attgcatcaccctggttctaactat

SEQ ID NO: 68317 - DNA, 25 bp, Probe sequence
ttgcatcaccctggttctaactatt

SEQ ID NO: 68318 - DNA, 25 bp, Probe sequence
aattgcatcaccctggttctaacta

SEQ ID NO: 68319 - DNA, 25 bp, Probe sequence
aaaccaggataacgaattgcatcac

SEQ ID NO: 68320 - DNA, 25 bp, Probe sequence
ataatagttagaaccagggtgatgc

SEQ ID NO: 68321 - DNA, 25 bp, Probe sequence
aataatagttagaaccagggtgatg

SEQ ID NO: 68322 - DNA, 25 bp, Probe sequence
aaataatagttagaaccagggtgat

SEQ ID NO: 68323 - DNA, 25 bp, Probe sequence
atcaattatagtgaaatatggtgcg

SEQ ID NO: 68324 - DNA, 25 bp, Probe sequence
taatagttagaaccagggtgatgca

SEQ ID NO: 68325 - DNA, 25 bp, Probe sequence
atagttagaaccagggtgatgcaat

SEQ ID NO: 68326 - DNA, 25 bp, Probe sequence
tagttagaaccagggtgatgcaatt

SEQ ID NO: 68327 - DNA, 25 bp, Probe sequence
aatagttagaaccagggtgatgcaa

SEQ ID NO: 68328 - DNA, 25 bp, Probe sequence
gtgatgcaattcgttatcctggttt

SEQ ID NO: 68329 - DNA, 25 bp, Probe sequence
gtctataaaggattgaaatggaagt

SEQ ID NO: 68330 - DNA, 25 bp, Probe sequence
agtctataaaggattgaaatggaag

SEQ ID NO: 68331 - DNA, 25 bp, Probe sequence
tgaattacctcctctatctatctaa

SEQ ID NO: 68332 - DNA, 25 bp, Probe sequence
ggattgaaatggaagtaattaacac

SEQ ID NO: 68333 - DNA, 25 bp, Probe sequence
atgaattacctcctctatctatcta

SEQ ID NO: 68334 - DNA, 25 bp, Probe sequence
tgaaatggaagtaattaacactgaa

SEQ ID NO: 68335 - DNA, 25 bp, Probe sequence
ttgaaatggaagtaattaacactga

SEQ ID NO: 68336 - DNA, 25 bp, Probe sequence
aggattgaaatggaagtaattaaca

SEQ ID NO: 68337 - DNA, 25 bp, Probe sequence
attgaaatggaagtaattaacactg

SEQ ID NO: 68338 - DNA, 25 bp, Probe sequence
acttccatttcaatcctttatagac

SEQ ID NO: 68339 - DNA, 25 bp, Probe sequence
cttccatttcaatcctttatagact

SEQ ID NO: 68340 - DNA, 25 bp, Probe sequence
ttagatagatagaggaggtaattca

SEQ ID NO: 68341 - DNA, 25 bp, Probe sequence
tagatagatagaggaggtaattcat

SEQ ID NO: 68342 - DNA, 25 bp, Probe sequence
gtgttaattacttccatttcaatcc

SEQ ID NO: 68343 - DNA, 25 bp, Probe sequence
tcagtgttaattacttccatttcaa

SEQ ID NO: 68344 - DNA, 25 bp, Probe sequence
ttcagtgttaattacttccatttca

SEQ ID NO: 68345 - DNA, 25 bp, Probe sequence
tgttaattacttccatttcaatcct

SEQ ID NO: 68346 - DNA, 25 bp, Probe sequence
cagtgttaattacttccatttcaat

SEQ ID NO: 68347 - DNA, 25 bp, Probe sequence
tcctccttcttctatcatttcattt

SEQ ID NO: 68348 - DNA, 25 bp, Probe sequence
atcctccttcttctatcatttcatt

SEQ ID NO: 68349 - DNA, 25 bp, Probe sequence
ttatcctccttcttctatcatttca

SEQ ID NO: 68350 - DNA, 25 bp, Probe sequence
tatcctccttcttctatcatttcat

SEQ ID NO: 68351 - DNA, 25 bp, Probe sequence
attatcctccttcttctatcatttc

SEQ ID NO: 68352 - DNA, 25 bp, Probe sequence
cctccttcttctatcatttcatttt

SEQ ID NO: 68353 - DNA, 25 bp, Probe sequence
gcacttgaaaatactatgatgtcat

SEQ ID NO: 68354 - DNA, 25 bp, Probe sequence
tgcacttgaaaatactatgatgtca

SEQ ID NO: 68355 - DNA, 25 bp, Probe sequence
aattatcctccttcttctatcattt

SEQ ID NO: 68356 - DNA, 25 bp, Probe sequence
aaatgaaatgatagaagaaggagga

SEQ ID NO: 68357 - DNA, 25 bp, Probe sequence
aatgaaatgatagaagaaggaggat

SEQ ID NO: 68358 - DNA, 25 bp, Probe sequence
tgaaatgatagaagaaggaggataa

SEQ ID NO: 68359 - DNA, 25 bp, Probe sequence
atgaaatgatagaagaaggaggata

SEQ ID NO: 68360 - DNA, 25 bp, Probe sequence
gaaatgatagaagaaggaggataat

SEQ ID NO: 68361 - DNA, 25 bp, Probe sequence
aaaatgaaatgatagaagaaggagg

SEQ ID NO: 68362 - DNA, 25 bp, Probe sequence
atgacatcatagtattttcaagtgc

SEQ ID NO: 68363 - DNA, 25 bp, Probe sequence
tgacatcatagtattttcaagtgca

SEQ ID NO: 68364 - DNA, 25 bp, Probe sequence
aaatgatagaagaaggaggataatt

SEQ ID NO: 68365 - DNA, 25 bp, Probe sequence
aaaatgctgattaagtacctaccac

SEQ ID NO: 68366 - DNA, 25 bp, Probe sequence
taaaatgctgattaagtacctacca

SEQ ID NO: 68367 - DNA, 25 bp, Probe sequence
ataaaatgctgattaagtacctacc

SEQ ID NO: 68368 - DNA, 25 bp, Probe sequence
ccgttactttatttataaaatgctg

SEQ ID NO: 68369 - DNA, 25 bp, Probe sequence
tccgttactttatttataaaatgct

SEQ ID NO: 68370 - DNA, 25 bp, Probe sequence
gtggtaggtacttaatcagcatttt

SEQ ID NO: 68371 - DNA, 25 bp, Probe sequence
tggtaggtacttaatcagcatttta

SEQ ID NO: 68372 - DNA, 25 bp, Probe sequence
ggtaggtacttaatcagcattttat

SEQ ID NO: 68373 - DNA, 25 bp, Probe sequence
cagcattttataaataaagtaacgg

SEQ ID NO: 68374 - DNA, 25 bp, Probe sequence
agcattttataaataaagtaacgga

SEQ ID NO: 68375 - DNA, 25 bp, Probe sequence
tctctattttcaatgacagacacca

SEQ ID NO: 68376 - DNA, 25 bp, Probe sequence
ctctattttcaatgacagacaccat

SEQ ID NO: 68377 - DNA, 25 bp, Probe sequence
ttctctattttcaatgacagacacc

SEQ ID NO: 68378 - DNA, 25 bp, Probe sequence
aaagaggttaacacatgatttgaat

SEQ ID NO: 68379 - DNA, 25 bp, Probe sequence
attctctattttcaatgacagacac

SEQ ID NO: 68380 - DNA, 25 bp, Probe sequence
tctattttcaatgacagacaccatt

SEQ ID NO: 68381 - DNA, 25 bp, Probe sequence
aagaggttaacacatgatttgaata

SEQ ID NO: 68382 - DNA, 25 bp, Probe sequence
ctattttcaatgacagacaccattt

SEQ ID NO: 68383 - DNA, 25 bp, Probe sequence
agaggttaacacatgatttgaatat

SEQ ID NO: 68384 - DNA, 25 bp, Probe sequence
tggtgtctgtcattgaaaatagaga

SEQ ID NO: 68385 - DNA, 25 bp, Probe sequence
atggtgtctgtcattgaaaatagag

SEQ ID NO: 68386 - DNA, 25 bp, Probe sequence
ggtgtctgtcattgaaaatagagaa

SEQ ID NO: 68387 - DNA, 25 bp, Probe sequence
attcaaatcatgtgttaacctcttt

SEQ ID NO: 68388 - DNA, 25 bp, Probe sequence
gtgtctgtcattgaaaatagagaat

SEQ ID NO: 68389 - DNA, 25 bp, Probe sequence
aatggtgtctgtcattgaaaataga

SEQ ID NO: 68390 - DNA, 25 bp, Probe sequence
tattcaaatcatgtgttaacctctt

SEQ ID NO: 68391 - DNA, 25 bp, Probe sequence
aaatggtgtctgtcattgaaaatag

SEQ ID NO: 68392 - DNA, 25 bp, Probe sequence
atattcaaatcatgtgttaacctct

SEQ ID NO: 68393 - DNA, 25 bp, Probe sequence
tgaccctaagatttgaatgaaacct

SEQ ID NO: 68394 - DNA, 25 bp, Probe sequence
gcgacacttcctttattacttcaaa

SEQ ID NO: 68395 - DNA, 25 bp, Probe sequence
ttgaccctaagatttgaatgaaacc

SEQ ID NO: 68396 - DNA, 25 bp, Probe sequence
gaccctaagatttgaatgaaacctt

SEQ ID NO: 68397 - DNA, 25 bp, Probe sequence
tgagtaagttatttattgagcggtt

SEQ ID NO: 68398 - DNA, 25 bp, Probe sequence
accctaagatttgaatgaaaccttt

SEQ ID NO: 68399 - DNA, 25 bp, Probe sequence
atgagtaagttatttattgagcggt

SEQ ID NO: 68400 - DNA, 25 bp, Probe sequence
tttgaccctaagatttgaatgaaac

SEQ ID NO: 68401 - DNA, 25 bp, Probe sequence
gtaagttatttattgagcggtttct

SEQ ID NO: 68402 - DNA, 25 bp, Probe sequence
aggtttcattcaaatcttagggtca

SEQ ID NO: 68403 - DNA, 25 bp, Probe sequence
ggtttcattcaaatcttagggtcaa

SEQ ID NO: 68404 - DNA, 25 bp, Probe sequence
aaggtttcattcaaatcttagggtc

SEQ ID NO: 68405 - DNA, 25 bp, Probe sequence
aaccgctcaataaataacttactca

SEQ ID NO: 68406 - DNA, 25 bp, Probe sequence
aaaggtttcattcaaatcttagggt

SEQ ID NO: 68407 - DNA, 25 bp, Probe sequence
accgctcaataaataacttactcat

SEQ ID NO: 68408 - DNA, 25 bp, Probe sequence
gtttcattcaaatcttagggtcaaa

SEQ ID NO: 68409 - DNA, 25 bp, Probe sequence
aaaccgctcaataaataacttactc

SEQ ID NO: 68410 - DNA, 25 bp, Probe sequence
gaaaccgctcaataaataacttact

SEQ ID NO: 68411 - DNA, 25 bp, Probe sequence
atcatctttgaatcagcgagtattt

SEQ ID NO: 68412 - DNA, 25 bp, Probe sequence
aatcatctttgaatcagcgagtatt

SEQ ID NO: 68413 - DNA, 25 bp, Probe sequence
aaatcatctttgaatcagcgagtat

SEQ ID NO: 68414 - DNA, 25 bp, Probe sequence
agaaaatcatctttgaatcagcgag

SEQ ID NO: 68415 - DNA, 25 bp, Probe sequence
gaaaatcatctttgaatcagcgagt

SEQ ID NO: 68416 - DNA, 25 bp, Probe sequence
tcatctttgaatcagcgagtatttt

SEQ ID NO: 68417 - DNA, 25 bp, Probe sequence
aaaatcatctttgaatcagcgagta

SEQ ID NO: 68418 - DNA, 25 bp, Probe sequence
tagaaaatcatctttgaatcagcga

SEQ ID NO: 68419 - DNA, 25 bp, Probe sequence
ttagaaaatcatctttgaatcagcg

SEQ ID NO: 68420 - DNA, 25 bp, Probe sequence
atactcgctgattcaaagatgattt

SEQ ID NO: 68421 - DNA, 25 bp, Probe sequence
aatactcgctgattcaaagatgatt

SEQ ID NO: 68422 - DNA, 25 bp, Probe sequence
aaatactcgctgattcaaagatgat

SEQ ID NO: 68423 - DNA, 25 bp, Probe sequence
ctcgctgattcaaagatgattttct

SEQ ID NO: 68424 - DNA, 25 bp, Probe sequence
actcgctgattcaaagatgattttc

SEQ ID NO: 68425 - DNA, 25 bp, Probe sequence
tactcgctgattcaaagatgatttt

SEQ ID NO: 68426 - DNA, 25 bp, Probe sequence
aaaatactcgctgattcaaagatga

SEQ ID NO: 68427 - DNA, 25 bp, Probe sequence
tcgctgattcaaagatgattttcta

SEQ ID NO: 68428 - DNA, 25 bp, Probe sequence
cgctgattcaaagatgattttctaa

SEQ ID NO: 68429 - DNA, 25 bp, Probe sequence
aatcggtgctcctctatttatcaaa

SEQ ID NO: 68430 - DNA, 25 bp, Probe sequence
atcggtgctcctctatttatcaaag

SEQ ID NO: 68431 - DNA, 25 bp, Probe sequence
caatcggtgctcctctatttatcaa

SEQ ID NO: 68432 - DNA, 25 bp, Probe sequence
gtcaatcggtgctcctctatttatc

SEQ ID NO: 68433 - DNA, 25 bp, Probe sequence
cggtgctcctctatttatcaaagaa

SEQ ID NO: 68434 - DNA, 25 bp, Probe sequence
tcaatcggtgctcctctatttatca

SEQ ID NO: 68435 - DNA, 25 bp, Probe sequence
tgtcaatcggtgctcctctatttat

SEQ ID NO: 68436 - DNA, 25 bp, Probe sequence
atgtcaatcggtgctcctctattta

SEQ ID NO: 68437 - DNA, 25 bp, Probe sequence
ggtgctcctctatttatcaaagaaa

SEQ ID NO: 68438 - DNA, 25 bp, Probe sequence
tttgataaatagaggagcaccgatt

SEQ ID NO: 68439 - DNA, 25 bp, Probe sequence
ctttgataaatagaggagcaccgat

SEQ ID NO: 68440 - DNA, 25 bp, Probe sequence
ttgataaatagaggagcaccgattg

SEQ ID NO: 68441 - DNA, 25 bp, Probe sequence
gataaatagaggagcaccgattgac

SEQ ID NO: 68442 - DNA, 25 bp, Probe sequence
ttctttgataaatagaggagcaccg

SEQ ID NO: 68443 - DNA, 25 bp, Probe sequence
tgataaatagaggagcaccgattga

SEQ ID NO: 68444 - DNA, 25 bp, Probe sequence
taaatagaggagcaccgattgacat

SEQ ID NO: 68445 - DNA, 25 bp, Probe sequence
ataaatagaggagcaccgattgaca

SEQ ID NO: 68446 - DNA, 25 bp, Probe sequence
tttctttgataaatagaggagcacc

SEQ ID NO: 68447 - DNA, 25 bp, Probe sequence
ttgtagcgacttgtatgatttcaat

SEQ ID NO: 68448 - DNA, 25 bp, Probe sequence
attgtagcgacttgtatgatttcaa

SEQ ID NO: 68449 - DNA, 25 bp, Probe sequence
tgtagcgacttgtatgatttcaatt

SEQ ID NO: 68450 - DNA, 25 bp, Probe sequence
tattgtagcgacttgtatgatttca

SEQ ID NO: 68451 - DNA, 25 bp, Probe sequence
gtagcgacttgtatgatttcaattt

SEQ ID NO: 68452 - DNA, 25 bp, Probe sequence
atattgtagcgacttgtatgatttc

SEQ ID NO: 68453 - DNA, 25 bp, Probe sequence
agcgacttgtatgatttcaatttaa

SEQ ID NO: 68454 - DNA, 25 bp, Probe sequence
gttgaacaatttatttatgctccag

SEQ ID NO: 68455 - DNA, 25 bp, Probe sequence
tgaacaatttatttatgctccagaa

SEQ ID NO: 68456 - DNA, 25 bp, Probe sequence
ttgaaatcatacaagtcgctacaat

SEQ ID NO: 68457 - DNA, 25 bp, Probe sequence
attgaaatcatacaagtcgctacaa

SEQ ID NO: 68458 - DNA, 25 bp, Probe sequence
aattgaaatcatacaagtcgctaca

SEQ ID NO: 68459 - DNA, 25 bp, Probe sequence
tgaaatcatacaagtcgctacaata

SEQ ID NO: 68460 - DNA, 25 bp, Probe sequence
aaattgaaatcatacaagtcgctac

SEQ ID NO: 68461 - DNA, 25 bp, Probe sequence
gaaatcatacaagtcgctacaatat

SEQ ID NO: 68462 - DNA, 25 bp, Probe sequence
ttaaattgaaatcatacaagtcgct

SEQ ID NO: 68463 - DNA, 25 bp, Probe sequence
ctggagcataaataaattgttcaac

SEQ ID NO: 68464 - DNA, 25 bp, Probe sequence
tctggagcataaataaattgttcaa

SEQ ID NO: 68465 - DNA, 25 bp, Probe sequence
tacatccttccgttttgtaaatttt

SEQ ID NO: 68466 - DNA, 25 bp, Probe sequence
aataattacatccttccgttttgta

SEQ ID NO: 68467 - DNA, 25 bp, Probe sequence
attacatccttccgttttgtaaatt

SEQ ID NO: 68468 - DNA, 25 bp, Probe sequence
aattacatccttccgttttgtaaat

SEQ ID NO: 68469 - DNA, 25 bp, Probe sequence
ttacatccttccgttttgtaaattt

SEQ ID NO: 68470 - DNA, 25 bp, Probe sequence
taattacatccttccgttttgtaaa

SEQ ID NO: 68471 - DNA, 25 bp, Probe sequence
ataattacatccttccgttttgtaa

SEQ ID NO: 68472 - DNA, 25 bp, Probe sequence
aaaatttacaaaacggaaggatgta

SEQ ID NO: 68473 - DNA, 25 bp, Probe sequence
tacaaaacggaaggatgtaattatt

SEQ ID NO: 68474 - DNA, 25 bp, Probe sequence
atttacaaaacggaaggatgtaatt

SEQ ID NO: 68475 - DNA, 25 bp, Probe sequence
aatttacaaaacggaaggatgtaat

SEQ ID NO: 68476 - DNA, 25 bp, Probe sequence
aaatttacaaaacggaaggatgtaa

SEQ ID NO: 68477 - DNA, 25 bp, Probe sequence
tttacaaaacggaaggatgtaatta

SEQ ID NO: 68478 - DNA, 25 bp, Probe sequence
ttacaaaacggaaggatgtaattat

SEQ ID NO: 68479 - DNA, 25 bp, Probe sequence
actctgacatatccaaatacgcaaa

SEQ ID NO: 68480 - DNA, 25 bp, Probe sequence
cactctgacatatccaaatacgcaa

SEQ ID NO: 68481 - DNA, 25 bp, Probe sequence
ttcactctgacatatccaaatacgc

SEQ ID NO: 68482 - DNA, 25 bp, Probe sequence
attcactctgacatatccaaatacg

SEQ ID NO: 68483 - DNA, 25 bp, Probe sequence
tcactctgacatatccaaatacgca

SEQ ID NO: 68484 - DNA, 25 bp, Probe sequence
ttcgtcttatttattcactctgaca

SEQ ID NO: 68485 - DNA, 25 bp, Probe sequence
aaagactatttctaccttgcatcga

SEQ ID NO: 68486 - DNA, 25 bp, Probe sequence
tcgtcttatttattcactctgacat

SEQ ID NO: 68487 - DNA, 25 bp, Probe sequence
ctctgacatatccaaatacgcaaaa

SEQ ID NO: 68488 - DNA, 25 bp, Probe sequence
tttgcgtatttggatatgtcagagt

SEQ ID NO: 68489 - DNA, 25 bp, Probe sequence
ttgcgtatttggatatgtcagagtg

SEQ ID NO: 68490 - DNA, 25 bp, Probe sequence
gcgtatttggatatgtcagagtgaa

SEQ ID NO: 68491 - DNA, 25 bp, Probe sequence
cgtatttggatatgtcagagtgaat

SEQ ID NO: 68492 - DNA, 25 bp, Probe sequence
tgcgtatttggatatgtcagagtga

SEQ ID NO: 68493 - DNA, 25 bp, Probe sequence
tgtcagagtgaataaataagacgaa

SEQ ID NO: 68494 - DNA, 25 bp, Probe sequence
tcgatgcaaggtagaaatagtcttt

SEQ ID NO: 68495 - DNA, 25 bp, Probe sequence
atgtcagagtgaataaataagacga

SEQ ID NO: 68496 - DNA, 25 bp, Probe sequence
ttttgcgtatttggatatgtcagag

SEQ ID NO: 68497 - DNA, 25 bp, Probe sequence
cacagaattgacaccgtataatagc

SEQ ID NO: 68498 - DNA, 25 bp, Probe sequence
cagaattgacaccgtataatagcca

SEQ ID NO: 68499 - DNA, 25 bp, Probe sequence
acagaattgacaccgtataatagcc

SEQ ID NO: 68500 - DNA, 25 bp, Probe sequence
agaattgacaccgtataatagccaa

SEQ ID NO: 68501 - DNA, 25 bp, Probe sequence
tcacagaattgacaccgtataatag

SEQ ID NO: 68502 - DNA, 25 bp, Probe sequence
cctttggttcgttcacatagaaatg

SEQ ID NO: 68503 - DNA, 25 bp, Probe sequence
atggctcgcattgtattatgtttaa

SEQ ID NO: 68504 - DNA, 25 bp, Probe sequence
gaattgacaccgtataatagccaat

SEQ ID NO: 68505 - DNA, 25 bp, Probe sequence
ctttggttcgttcacatagaaatgc

SEQ ID NO: 68506 - DNA, 25 bp, Probe sequence
gctattatacggtgtcaattctgtg

SEQ ID NO: 68507 - DNA, 25 bp, Probe sequence
ggctattatacggtgtcaattctgt

SEQ ID NO: 68508 - DNA, 25 bp, Probe sequence
tggctattatacggtgtcaattctg

SEQ ID NO: 68509 - DNA, 25 bp, Probe sequence
ttggctattatacggtgtcaattct

SEQ ID NO: 68510 - DNA, 25 bp, Probe sequence
ctattatacggtgtcaattctgtga

SEQ ID NO: 68511 - DNA, 25 bp, Probe sequence
catttctatgtgaacgaaccaaagg

SEQ ID NO: 68512 - DNA, 25 bp, Probe sequence
ttaaacataatacaatgcgagccat

SEQ ID NO: 68513 - DNA, 25 bp, Probe sequence
attggctattatacggtgtcaattc

SEQ ID NO: 68514 - DNA, 25 bp, Probe sequence
gcatttctatgtgaacgaaccaaag

SEQ ID NO: 68515 - DNA, 25 bp, Probe sequence
aacgcataagaagataactctactt

SEQ ID NO: 68516 - DNA, 25 bp, Probe sequence
atgattctcgtctctctaattactt

SEQ ID NO: 68517 - DNA, 25 bp, Probe sequence
aatgattctcgtctctctaattact

SEQ ID NO: 68518 - DNA, 25 bp, Probe sequence
aaacgcataagaagataactctact

SEQ ID NO: 68519 - DNA, 25 bp, Probe sequence
cgggttctataataaatcgtactga

SEQ ID NO: 68520 - DNA, 25 bp, Probe sequence
tgattctcgtctctctaattactta

SEQ ID NO: 68521 - DNA, 25 bp, Probe sequence
acgcataagaagataactctacttc

SEQ ID NO: 68522 - DNA, 25 bp, Probe sequence
aaagcatctaaaacgcataagaaga

SEQ ID NO: 68523 - DNA, 25 bp, Probe sequence
aataaatcgtactgatggaaagttt

SEQ ID NO: 68524 - DNA, 25 bp, Probe sequence
aagtagagttatcttcttatgcgtt

SEQ ID NO: 68525 - DNA, 25 bp, Probe sequence
agtaattagagagacgagaatcatt

SEQ ID NO: 68526 - DNA, 25 bp, Probe sequence
aagtaattagagagacgagaatcat

SEQ ID NO: 68527 - DNA, 25 bp, Probe sequence
agtagagttatcttcttatgcgttt

SEQ ID NO: 68528 - DNA, 25 bp, Probe sequence
tcagtacgatttattatagaacccg

SEQ ID NO: 68529 - DNA, 25 bp, Probe sequence
taagtaattagagagacgagaatca

SEQ ID NO: 68530 - DNA, 25 bp, Probe sequence
gaagtagagttatcttcttatgcgt

SEQ ID NO: 68531 - DNA, 25 bp, Probe sequence
tcttcttatgcgttttagatgcttt

SEQ ID NO: 68532 - DNA, 25 bp, Probe sequence
aaactttccatcagtacgatttatt

SEQ ID NO: 68533 - DNA, 25 bp, Probe sequence
aattttagtcacgcattagaaacac

SEQ ID NO: 68534 - DNA, 25 bp, Probe sequence
attttagtcacgcattagaaacact

SEQ ID NO: 68535 - DNA, 25 bp, Probe sequence
taattttagtcacgcattagaaaca

SEQ ID NO: 68536 - DNA, 25 bp, Probe sequence
ctaattttagtcacgcattagaaac

SEQ ID NO: 68537 - DNA, 25 bp, Probe sequence
actaattttagtcacgcattagaaa

SEQ ID NO: 68538 - DNA, 25 bp, Probe sequence
tactaattttagtcacgcattagaa

SEQ ID NO: 68539 - DNA, 25 bp, Probe sequence
ttactaattttagtcacgcattaga

SEQ ID NO: 68540 - DNA, 25 bp, Probe sequence
ttattactaattttagtcacgcatt

SEQ ID NO: 68541 - DNA, 25 bp, Probe sequence
attattactaattttagtcacgcat

SEQ ID NO: 68542 - DNA, 25 bp, Probe sequence
gtgtttctaatgcgtgactaaaatt

SEQ ID NO: 68543 - DNA, 25 bp, Probe sequence
agtgtttctaatgcgtgactaaaat

SEQ ID NO: 68544 - DNA, 25 bp, Probe sequence
tgtttctaatgcgtgactaaaatta

SEQ ID NO: 68545 - DNA, 25 bp, Probe sequence
tttctaatgcgtgactaaaattagt

SEQ ID NO: 68546 - DNA, 25 bp, Probe sequence
gtttctaatgcgtgactaaaattag

SEQ ID NO: 68547 - DNA, 25 bp, Probe sequence
tctaatgcgtgactaaaattagtaa

SEQ ID NO: 68548 - DNA, 25 bp, Probe sequence
ttctaatgcgtgactaaaattagta

SEQ ID NO: 68549 - DNA, 25 bp, Probe sequence
aatgcgtgactaaaattagtaataa

SEQ ID NO: 68550 - DNA, 25 bp, Probe sequence
atgcgtgactaaaattagtaataat

SEQ ID NO: 68551 - DNA, 25 bp, Probe sequence
atacattaacgcatccgcttactat

SEQ ID NO: 68552 - DNA, 25 bp, Probe sequence
tacattaacgcatccgcttactatt

SEQ ID NO: 68553 - DNA, 25 bp, Probe sequence
gatacattaacgcatccgcttacta

SEQ ID NO: 68554 - DNA, 25 bp, Probe sequence
gataaccatctgtctacaccacttc

SEQ ID NO: 68555 - DNA, 25 bp, Probe sequence
taaccatctgtctacaccacttcat

SEQ ID NO: 68556 - DNA, 25 bp, Probe sequence
ataaccatctgtctacaccacttca

SEQ ID NO: 68557 - DNA, 25 bp, Probe sequence
tgataaccatctgtctacaccactt

SEQ ID NO: 68558 - DNA, 25 bp, Probe sequence
tcattatatcaagacaaggcgttaa

SEQ ID NO: 68559 - DNA, 25 bp, Probe sequence
taatcgctgatacattaacgcatcc

SEQ ID NO: 68560 - DNA, 25 bp, Probe sequence
atagtaagcggatgcgttaatgtat

SEQ ID NO: 68561 - DNA, 25 bp, Probe sequence
aatagtaagcggatgcgttaatgta

SEQ ID NO: 68562 - DNA, 25 bp, Probe sequence
tagtaagcggatgcgttaatgtatc

SEQ ID NO: 68563 - DNA, 25 bp, Probe sequence
gaagtggtgtagacagatggttatc

SEQ ID NO: 68564 - DNA, 25 bp, Probe sequence
tgaagtggtgtagacagatggttat

SEQ ID NO: 68565 - DNA, 25 bp, Probe sequence
atgaagtggtgtagacagatggtta

SEQ ID NO: 68566 - DNA, 25 bp, Probe sequence
aagtggtgtagacagatggttatca

SEQ ID NO: 68567 - DNA, 25 bp, Probe sequence
ttaacgccttgtcttgatataatga

SEQ ID NO: 68568 - DNA, 25 bp, Probe sequence
ggatgcgttaatgtatcagcgatta

SEQ ID NO: 68569 - DNA, 25 bp, Probe sequence
acatagtcattattagtaagacagt

SEQ ID NO: 68570 - DNA, 25 bp, Probe sequence
actgtcttactaataatgactatgt

SEQ ID NO: 68571 - DNA, 25 bp, Probe sequence
ttattgtgttaatgctgaaatcacg

SEQ ID NO: 68572 - DNA, 25 bp, Probe sequence
tgtgttaatgctgaaatcacgttaa

SEQ ID NO: 68573 - DNA, 25 bp, Probe sequence
ttgtgttaatgctgaaatcacgtta

SEQ ID NO: 68574 - DNA, 25 bp, Probe sequence
attgtgttaatgctgaaatcacgtt

SEQ ID NO: 68575 - DNA, 25 bp, Probe sequence
tattgtgttaatgctgaaatcacgt

SEQ ID NO: 68576 - DNA, 25 bp, Probe sequence
gtgttaatgctgaaatcacgttaaa

SEQ ID NO: 68577 - DNA, 25 bp, Probe sequence
tgtgtaaaattccaacattaacggt

SEQ ID NO: 68578 - DNA, 25 bp, Probe sequence
gtgtgtaaaattccaacattaacgg

SEQ ID NO: 68579 - DNA, 25 bp, Probe sequence
tgtgtgtaaaattccaacattaacg

SEQ ID NO: 68580 - DNA, 25 bp, Probe sequence
cgtgatttcagcattaacacaataa

SEQ ID NO: 68581 - DNA, 25 bp, Probe sequence
taacgtgatttcagcattaacacaa

SEQ ID NO: 68582 - DNA, 25 bp, Probe sequence
ttaacgtgatttcagcattaacaca

SEQ ID NO: 68583 - DNA, 25 bp, Probe sequence
acgtgatttcagcattaacacaata

SEQ ID NO: 68584 - DNA, 25 bp, Probe sequence
aacgtgatttcagcattaacacaat

SEQ ID NO: 68585 - DNA, 25 bp, Probe sequence
tttaacgtgatttcagcattaacac

SEQ ID NO: 68586 - DNA, 25 bp, Probe sequence
accgttaatgttggaattttacaca

SEQ ID NO: 68587 - DNA, 25 bp, Probe sequence
ccgttaatgttggaattttacacac

SEQ ID NO: 68588 - DNA, 25 bp, Probe sequence
cgttaatgttggaattttacacaca

SEQ ID NO: 68589 - DNA, 25 bp, Probe sequence
tgtaatgacacgacacctaacataa

SEQ ID NO: 68590 - DNA, 25 bp, Probe sequence
ttgtaatgacacgacacctaacata

SEQ ID NO: 68591 - DNA, 25 bp, Probe sequence
gttgtaatgacacgacacctaacat

SEQ ID NO: 68592 - DNA, 25 bp, Probe sequence
tctcatagtcatcttagacgctgtt

SEQ ID NO: 68593 - DNA, 25 bp, Probe sequence
ttctcatagtcatcttagacgctgt

SEQ ID NO: 68594 - DNA, 25 bp, Probe sequence
tgacacgacacctaacataaataca

SEQ ID NO: 68595 - DNA, 25 bp, Probe sequence
gacacgacacctaacataaatacaa

SEQ ID NO: 68596 - DNA, 25 bp, Probe sequence
tgaatttgaataagtggttgttccc

SEQ ID NO: 68597 - DNA, 25 bp, Probe sequence
gtaatgacacgacacctaacataaa

SEQ ID NO: 68598 - DNA, 25 bp, Probe sequence
tatgttaggtgtcgtgtcattacaa

SEQ ID NO: 68599 - DNA, 25 bp, Probe sequence
ttatgttaggtgtcgtgtcattaca

SEQ ID NO: 68600 - DNA, 25 bp, Probe sequence
atgttaggtgtcgtgtcattacaac

SEQ ID NO: 68601 - DNA, 25 bp, Probe sequence
acagcgtctaagatgactatgagaa

SEQ ID NO: 68602 - DNA, 25 bp, Probe sequence
aacagcgtctaagatgactatgaga

SEQ ID NO: 68603 - DNA, 25 bp, Probe sequence
tgtatttatgttaggtgtcgtgtca

SEQ ID NO: 68604 - DNA, 25 bp, Probe sequence
ttgtatttatgttaggtgtcgtgtc

SEQ ID NO: 68605 - DNA, 25 bp, Probe sequence
gggaacaaccacttattcaaattca

SEQ ID NO: 68606 - DNA, 25 bp, Probe sequence
tttatgttaggtgtcgtgtcattac

SEQ ID NO: 68607 - DNA, 25 bp, Probe sequence
atataagccgttatcaatcttcatt

SEQ ID NO: 68608 - DNA, 25 bp, Probe sequence
aatataagccgttatcaatcttcat

SEQ ID NO: 68609 - DNA, 25 bp, Probe sequence
gctattaatataggctggacgattc

SEQ ID NO: 68610 - DNA, 25 bp, Probe sequence
attaatataggctggacgattcttt

SEQ ID NO: 68611 - DNA, 25 bp, Probe sequence
taatataagccgttatcaatcttca

SEQ ID NO: 68612 - DNA, 25 bp, Probe sequence
tattaatataggctggacgattctt

SEQ ID NO: 68613 - DNA, 25 bp, Probe sequence
gcataaatcgcccagctattaatat

SEQ ID NO: 68614 - DNA, 25 bp, Probe sequence
ctattaatataggctggacgattct

SEQ ID NO: 68615 - DNA, 25 bp, Probe sequence
agctattaatataggctggacgatt

SEQ ID NO: 68616 - DNA, 25 bp, Probe sequence
atgaagattgataacggcttatatt

SEQ ID NO: 68617 - DNA, 25 bp, Probe sequence
aatgaagattgataacggcttatat

SEQ ID NO: 68618 - DNA, 25 bp, Probe sequence
gaatcgtccagcctatattaatagc

SEQ ID NO: 68619 - DNA, 25 bp, Probe sequence
aaagaatcgtccagcctatattaat

SEQ ID NO: 68620 - DNA, 25 bp, Probe sequence
tgaagattgataacggcttatatta

SEQ ID NO: 68621 - DNA, 25 bp, Probe sequence
aagaatcgtccagcctatattaata

SEQ ID NO: 68622 - DNA, 25 bp, Probe sequence
atattaatagctgggcgatttatgc

SEQ ID NO: 68623 - DNA, 25 bp, Probe sequence
agaatcgtccagcctatattaatag

SEQ ID NO: 68624 - DNA, 25 bp, Probe sequence
aatcgtccagcctatattaatagct

SEQ ID NO: 68625 - DNA, 25 bp, Probe sequence
tgatttacgcacagatttgaacatt

SEQ ID NO: 68626 - DNA, 25 bp, Probe sequence
aatgatttacgcacagatttgaaca

SEQ ID NO: 68627 - DNA, 25 bp, Probe sequence
atgatttacgcacagatttgaacat

SEQ ID NO: 68628 - DNA, 25 bp, Probe sequence
acaatacaatcatcagtttcagaca

SEQ ID NO: 68629 - DNA, 25 bp, Probe sequence
gatttacgcacagatttgaacatta

SEQ ID NO: 68630 - DNA, 25 bp, Probe sequence
taatgatttacgcacagatttgaac

SEQ ID NO: 68631 - DNA, 25 bp, Probe sequence
gacaatacaatcatcagtttcagac

SEQ ID NO: 68632 - DNA, 25 bp, Probe sequence
agacaatacaatcatcagtttcaga

SEQ ID NO: 68633 - DNA, 25 bp, Probe sequence
aattcttgtaacagaacatagcaca

SEQ ID NO: 68634 - DNA, 25 bp, Probe sequence
tgttcaaatctgtgcgtaaatcatt

SEQ ID NO: 68635 - DNA, 25 bp, Probe sequence
aatgttcaaatctgtgcgtaaatca

SEQ ID NO: 68636 - DNA, 25 bp, Probe sequence
atgttcaaatctgtgcgtaaatcat

SEQ ID NO: 68637 - DNA, 25 bp, Probe sequence
tgtctgaaactgatgattgtattgt

SEQ ID NO: 68638 - DNA, 25 bp, Probe sequence
gttcaaatctgtgcgtaaatcatta

SEQ ID NO: 68639 - DNA, 25 bp, Probe sequence
taatgttcaaatctgtgcgtaaatc

SEQ ID NO: 68640 - DNA, 25 bp, Probe sequence
gtctgaaactgatgattgtattgtc

SEQ ID NO: 68641 - DNA, 25 bp, Probe sequence
tctgaaactgatgattgtattgtct

SEQ ID NO: 68642 - DNA, 25 bp, Probe sequence
tgtgctatgttctgttacaagaatt

SEQ ID NO: 68643 - DNA, 25 bp, Probe sequence
cttgcccatcctttctttctatttc

SEQ ID NO: 68644 - DNA, 25 bp, Probe sequence
ttgcccatcctttctttctatttct

SEQ ID NO: 68645 - DNA, 25 bp, Probe sequence
gcccatcctttctttctatttctct

SEQ ID NO: 68646 - DNA, 25 bp, Probe sequence
tgcccatcctttctttctatttctc

SEQ ID NO: 68647 - DNA, 25 bp, Probe sequence
cccatcctttctttctatttctctt

SEQ ID NO: 68648 - DNA, 25 bp, Probe sequence
tattctcgatgcgtagataattgtt

SEQ ID NO: 68649 - DNA, 25 bp, Probe sequence
ttattctcgatgcgtagataattgt

SEQ ID NO: 68650 - DNA, 25 bp, Probe sequence
gcttgcccatcctttctttctattt

SEQ ID NO: 68651 - DNA, 25 bp, Probe sequence
tctctttctattattctcgatgcgt

SEQ ID NO: 68652 - DNA, 25 bp, Probe sequence
gaaatagaaagaaaggatgggcaag

SEQ ID NO: 68653 - DNA, 25 bp, Probe sequence
agaaatagaaagaaaggatgggcaa

SEQ ID NO: 68654 - DNA, 25 bp, Probe sequence
agagaaatagaaagaaaggatgggc

SEQ ID NO: 68655 - DNA, 25 bp, Probe sequence
gagaaatagaaagaaaggatgggca

SEQ ID NO: 68656 - DNA, 25 bp, Probe sequence
aagagaaatagaaagaaaggatggg

SEQ ID NO: 68657 - DNA, 25 bp, Probe sequence
acaattatctacgcatcgagaataa

SEQ ID NO: 68658 - DNA, 25 bp, Probe sequence
aacaattatctacgcatcgagaata

SEQ ID NO: 68659 - DNA, 25 bp, Probe sequence
aaatagaaagaaaggatgggcaagc

SEQ ID NO: 68660 - DNA, 25 bp, Probe sequence
acgcatcgagaataatagaaagaga

SEQ ID NO: 68661 - DNA, 25 bp, Probe sequence
ttagtgcaatctactgactctagct

SEQ ID NO: 68662 - DNA, 25 bp, Probe sequence
tagtgcaatctactgactctagcta

SEQ ID NO: 68663 - DNA, 25 bp, Probe sequence
agtgcaatctactgactctagctaa

SEQ ID NO: 68664 - DNA, 25 bp, Probe sequence
tttagtgcaatctactgactctagc

SEQ ID NO: 68665 - DNA, 25 bp, Probe sequence
atgtttagtgcaatctactgactct

SEQ ID NO: 68666 - DNA, 25 bp, Probe sequence
catgtttagtgcaatctactgactc

SEQ ID NO: 68667 - DNA, 25 bp, Probe sequence
tgtttagtgcaatctactgactcta

SEQ ID NO: 68668 - DNA, 25 bp, Probe sequence
gtttagtgcaatctactgactctag

SEQ ID NO: 68669 - DNA, 25 bp, Probe sequence
gcaatctactgactctagctaaact

SEQ ID NO: 68670 - DNA, 25 bp, Probe sequence
agctagagtcagtagattgcactaa

SEQ ID NO: 68671 - DNA, 25 bp, Probe sequence
tagctagagtcagtagattgcacta

SEQ ID NO: 68672 - DNA, 25 bp, Probe sequence
ttagctagagtcagtagattgcact

SEQ ID NO: 68673 - DNA, 25 bp, Probe sequence
gctagagtcagtagattgcactaaa

SEQ ID NO: 68674 - DNA, 25 bp, Probe sequence
gagtcagtagattgcactaaacatg

SEQ ID NO: 68675 - DNA, 25 bp, Probe sequence
agagtcagtagattgcactaaacat

SEQ ID NO: 68676 - DNA, 25 bp, Probe sequence
tagagtcagtagattgcactaaaca

SEQ ID NO: 68677 - DNA, 25 bp, Probe sequence
ctagagtcagtagattgcactaaac

SEQ ID NO: 68678 - DNA, 25 bp, Probe sequence
tttagctagagtcagtagattgcac

SEQ ID NO: 68679 - DNA, 25 bp, Probe sequence
tgtgattagctagttaataagtgtc

SEQ ID NO: 68680 - DNA, 25 bp, Probe sequence
gtgattagctagttaataagtgtct

SEQ ID NO: 68681 - DNA, 25 bp, Probe sequence
atgtgattagctagttaataagtgt

SEQ ID NO: 68682 - DNA, 25 bp, Probe sequence
aatgtgattagctagttaataagtg

SEQ ID NO: 68683 - DNA, 25 bp, Probe sequence
aaaactagcaatcacacaaaatgtg

SEQ ID NO: 68684 - DNA, 25 bp, Probe sequence
cacacaaaatgtgattagctagtta

SEQ ID NO: 68685 - DNA, 25 bp, Probe sequence
acacaaaatgtgattagctagttaa

SEQ ID NO: 68686 - DNA, 25 bp, Probe sequence
cacaaaatgtgattagctagttaat

SEQ ID NO: 68687 - DNA, 25 bp, Probe sequence
gacacttattaactagctaatcaca

SEQ ID NO: 68688 - DNA, 25 bp, Probe sequence
agacacttattaactagctaatcac

SEQ ID NO: 68689 - DNA, 25 bp, Probe sequence
acacttattaactagctaatcacat

SEQ ID NO: 68690 - DNA, 25 bp, Probe sequence
cacttattaactagctaatcacatt

SEQ ID NO: 68691 - DNA, 25 bp, Probe sequence
cacattttgtgtgattgctagtttt

SEQ ID NO: 68692 - DNA, 25 bp, Probe sequence
taactagctaatcacattttgtgtg

SEQ ID NO: 68693 - DNA, 25 bp, Probe sequence
ttaactagctaatcacattttgtgt

SEQ ID NO: 68694 - DNA, 25 bp, Probe sequence
attaactagctaatcacattttgtg

SEQ ID NO: 68695 - DNA, 25 bp, Probe sequence
atattttactgtcatttgccgtttt

SEQ ID NO: 68696 - DNA, 25 bp, Probe sequence
aatattttactgtcatttgccgttt

SEQ ID NO: 68697 - DNA, 25 bp, Probe sequence
aaatattttactgtcatttgccgtt

SEQ ID NO: 68698 - DNA, 25 bp, Probe sequence
taaatattttactgtcatttgccgt

SEQ ID NO: 68699 - DNA, 25 bp, Probe sequence
ataaatattttactgtcatttgccg

SEQ ID NO: 68700 - DNA, 25 bp, Probe sequence
aaaacggcaaatgacagtaaaatat

SEQ ID NO: 68701 - DNA, 25 bp, Probe sequence
aaacggcaaatgacagtaaaatatt

SEQ ID NO: 68702 - DNA, 25 bp, Probe sequence
aacggcaaatgacagtaaaatattt

SEQ ID NO: 68703 - DNA, 25 bp, Probe sequence
acggcaaatgacagtaaaatattta

SEQ ID NO: 68704 - DNA, 25 bp, Probe sequence
cggcaaatgacagtaaaatatttat

SEQ ID NO: 68705 - DNA, 25 bp, Probe sequence
cctttcatacttccgcaataacatt

SEQ ID NO: 68706 - DNA, 25 bp, Probe sequence
tcgtatcgcaactttagcaaataat

SEQ ID NO: 68707 - DNA, 25 bp, Probe sequence
atcgtatcgcaactttagcaaataa

SEQ ID NO: 68708 - DNA, 25 bp, Probe sequence
aatcgtatcgcaactttagcaaata

SEQ ID NO: 68709 - DNA, 25 bp, Probe sequence
taatcgtatcgcaactttagcaaat

SEQ ID NO: 68710 - DNA, 25 bp, Probe sequence
ataatcgtatcgcaactttagcaaa

SEQ ID NO: 68711 - DNA, 25 bp, Probe sequence
tcctttcatacttccgcaataacat

SEQ ID NO: 68712 - DNA, 25 bp, Probe sequence
ctcctttcatacttccgcaataaca

SEQ ID NO: 68713 - DNA, 25 bp, Probe sequence
tataatcgtatcgcaactttagcaa

SEQ ID NO: 68714 - DNA, 25 bp, Probe sequence
aatgttattgcggaagtatgaaagg

SEQ ID NO: 68715 - DNA, 25 bp, Probe sequence
atgttattgcggaagtatgaaagga

SEQ ID NO: 68716 - DNA, 25 bp, Probe sequence
tttgctaaagttgcgatacgattat

SEQ ID NO: 68717 - DNA, 25 bp, Probe sequence
atttgctaaagttgcgatacgatta

SEQ ID NO: 68718 - DNA, 25 bp, Probe sequence
tatttgctaaagttgcgatacgatt

SEQ ID NO: 68719 - DNA, 25 bp, Probe sequence
ttatttgctaaagttgcgatacgat

SEQ ID NO: 68720 - DNA, 25 bp, Probe sequence
attatttgctaaagttgcgatacga

SEQ ID NO: 68721 - DNA, 25 bp, Probe sequence
tgttattgcggaagtatgaaaggag

SEQ ID NO: 68722 - DNA, 25 bp, Probe sequence
ttgctaaagttgcgatacgattata

SEQ ID NO: 68723 - DNA, 25 bp, Probe sequence
aacaaaaccctttctacctttataa

SEQ ID NO: 68724 - DNA, 25 bp, Probe sequence
aataaatcgtaaaggtttacagttt

SEQ ID NO: 68725 - DNA, 25 bp, Probe sequence
aaataaatcgtaaaggtttacagtt

SEQ ID NO: 68726 - DNA, 25 bp, Probe sequence
acaaaaccctttctacctttataaa

SEQ ID NO: 68727 - DNA, 25 bp, Probe sequence
caaaaccctttctacctttataaat

SEQ ID NO: 68728 - DNA, 25 bp, Probe sequence
ttataaaggtagaaagggttttgtt

SEQ ID NO: 68729 - DNA, 25 bp, Probe sequence
aactgtaaacctttacgatttattt

SEQ ID NO: 68730 - DNA, 25 bp, Probe sequence
aaactgtaaacctttacgatttatt

SEQ ID NO: 68731 - DNA, 25 bp, Probe sequence
tttataaaggtagaaagggttttgt

SEQ ID NO: 68732 - DNA, 25 bp, Probe sequence
atttataaaggtagaaagggttttg

SEQ ID NO: 68733 - DNA, 25 bp, Probe sequence
gtctacacctcacgatattatcact

SEQ ID NO: 68734 - DNA, 25 bp, Probe sequence
cacctcacgatattatcactattca

SEQ ID NO: 68735 - DNA, 25 bp, Probe sequence
acacctcacgatattatcactattc

SEQ ID NO: 68736 - DNA, 25 bp, Probe sequence
tctacacctcacgatattatcacta

SEQ ID NO: 68737 - DNA, 25 bp, Probe sequence
ctacacctcacgatattatcactat

SEQ ID NO: 68738 - DNA, 25 bp, Probe sequence
acctcacgatattatcactattcat

SEQ ID NO: 68739 - DNA, 25 bp, Probe sequence
ttcaacgctaacaattaatctcatt

SEQ ID NO: 68740 - DNA, 25 bp, Probe sequence
tacacctcacgatattatcactatt

SEQ ID NO: 68741 - DNA, 25 bp, Probe sequence
attcaacgctaacaattaatctcat

SEQ ID NO: 68742 - DNA, 25 bp, Probe sequence
agtgataatatcgtgaggtgtagac

SEQ ID NO: 68743 - DNA, 25 bp, Probe sequence
tagtgataatatcgtgaggtgtaga

SEQ ID NO: 68744 - DNA, 25 bp, Probe sequence
gaatagtgataatatcgtgaggtgt

SEQ ID NO: 68745 - DNA, 25 bp, Probe sequence
tgaatagtgataatatcgtgaggtg

SEQ ID NO: 68746 - DNA, 25 bp, Probe sequence
atagtgataatatcgtgaggtgtag

SEQ ID NO: 68747 - DNA, 25 bp, Probe sequence
atgaatagtgataatatcgtgaggt

SEQ ID NO: 68748 - DNA, 25 bp, Probe sequence
aatgagattaattgttagcgttgaa

SEQ ID NO: 68749 - DNA, 25 bp, Probe sequence
aatagtgataatatcgtgaggtgta

SEQ ID NO: 68750 - DNA, 25 bp, Probe sequence
atgagattaattgttagcgttgaat

SEQ ID NO: 68751 - DNA, 25 bp, Probe sequence
acaagcattacataaatcgcaatca

SEQ ID NO: 68752 - DNA, 25 bp, Probe sequence
acacaagcattacataaatcgcaat

SEQ ID NO: 68753 - DNA, 25 bp, Probe sequence
cacaagcattacataaatcgcaatc

SEQ ID NO: 68754 - DNA, 25 bp, Probe sequence
aacacaagcattacataaatcgcaa

SEQ ID NO: 68755 - DNA, 25 bp, Probe sequence
taacacaagcattacataaatcgca

SEQ ID NO: 68756 - DNA, 25 bp, Probe sequence
caagcattacataaatcgcaatcat

SEQ ID NO: 68757 - DNA, 25 bp, Probe sequence
ttaacacaagcattacataaatcgc

SEQ ID NO: 68758 - DNA, 25 bp, Probe sequence
aagcattacataaatcgcaatcatt

SEQ ID NO: 68759 - DNA, 25 bp, Probe sequence
aaatcgcaatcatttatgtggcaaa

SEQ ID NO: 68760 - DNA, 25 bp, Probe sequence
attgcgatttatgtaatgcttgtgt

SEQ ID NO: 68761 - DNA, 25 bp, Probe sequence
tgattgcgatttatgtaatgcttgt

SEQ ID NO: 68762 - DNA, 25 bp, Probe sequence
ttgcgatttatgtaatgcttgtgtt

SEQ ID NO: 68763 - DNA, 25 bp, Probe sequence
gattgcgatttatgtaatgcttgtg

SEQ ID NO: 68764 - DNA, 25 bp, Probe sequence
tgcgatttatgtaatgcttgtgtta

SEQ ID NO: 68765 - DNA, 25 bp, Probe sequence
atgattgcgatttatgtaatgcttg

SEQ ID NO: 68766 - DNA, 25 bp, Probe sequence
gcgatttatgtaatgcttgtgttaa

SEQ ID NO: 68767 - DNA, 25 bp, Probe sequence
aatgattgcgatttatgtaatgctt

SEQ ID NO: 68768 - DNA, 25 bp, Probe sequence
tttgccacataaatgattgcgattt

SEQ ID NO: 68769 - DNA, 25 bp, Probe sequence
gtccacgttatcattccgagtatat

SEQ ID NO: 68770 - DNA, 25 bp, Probe sequence
tccacgttatcattccgagtatatt

SEQ ID NO: 68771 - DNA, 25 bp, Probe sequence
tgtccacgttatcattccgagtata

SEQ ID NO: 68772 - DNA, 25 bp, Probe sequence
ttgtccacgttatcattccgagtat

SEQ ID NO: 68773 - DNA, 25 bp, Probe sequence
taaatttgtccacgttatcattccg

SEQ ID NO: 68774 - DNA, 25 bp, Probe sequence
ccacgttatcattccgagtatattt

SEQ ID NO: 68775 - DNA, 25 bp, Probe sequence
aatactccacatgcaatcataaaca

SEQ ID NO: 68776 - DNA, 25 bp, Probe sequence
aaatttgtccacgttatcattccga

SEQ ID NO: 68777 - DNA, 25 bp, Probe sequence
atactccacatgcaatcataaacat

SEQ ID NO: 68778 - DNA, 25 bp, Probe sequence
atatactcggaatgataacgtggac

SEQ ID NO: 68779 - DNA, 25 bp, Probe sequence
aatatactcggaatgataacgtgga

SEQ ID NO: 68780 - DNA, 25 bp, Probe sequence
tatactcggaatgataacgtggaca

SEQ ID NO: 68781 - DNA, 25 bp, Probe sequence
atactcggaatgataacgtggacaa

SEQ ID NO: 68782 - DNA, 25 bp, Probe sequence
cggaatgataacgtggacaaattta

SEQ ID NO: 68783 - DNA, 25 bp, Probe sequence
aaatatactcggaatgataacgtgg

SEQ ID NO: 68784 - DNA, 25 bp, Probe sequence
tcggaatgataacgtggacaaattt

SEQ ID NO: 68785 - DNA, 25 bp, Probe sequence
tgtttatgattgcatgtggagtatt

SEQ ID NO: 68786 - DNA, 25 bp, Probe sequence
atgtttatgattgcatgtggagtat

SEQ ID NO: 68787 - DNA, 25 bp, Probe sequence
attcaaacaagtaataaagtccgct

SEQ ID NO: 68788 - DNA, 25 bp, Probe sequence
agtaagaagaccgtatatagtgcat

SEQ ID NO: 68789 - DNA, 25 bp, Probe sequence
atagtaagaagaccgtatatagtgc

SEQ ID NO: 68790 - DNA, 25 bp, Probe sequence
gtaagaagaccgtatatagtgcatc

SEQ ID NO: 68791 - DNA, 25 bp, Probe sequence
agtctgtcatttcattgttctctac

SEQ ID NO: 68792 - DNA, 25 bp, Probe sequence
ttcaaacaagtaataaagtccgcta

SEQ ID NO: 68793 - DNA, 25 bp, Probe sequence
caaacaagtaataaagtccgctatg

SEQ ID NO: 68794 - DNA, 25 bp, Probe sequence
tcaaacaagtaataaagtccgctat

SEQ ID NO: 68795 - DNA, 25 bp, Probe sequence
tagtaagaagaccgtatatagtgca

SEQ ID NO: 68796 - DNA, 25 bp, Probe sequence
agcggactttattacttgtttgaat

SEQ ID NO: 68797 - DNA, 25 bp, Probe sequence
atgcactatatacggtcttcttact

SEQ ID NO: 68798 - DNA, 25 bp, Probe sequence
gcactatatacggtcttcttactat

SEQ ID NO: 68799 - DNA, 25 bp, Probe sequence
gtagagaacaatgaaatgacagact

SEQ ID NO: 68800 - DNA, 25 bp, Probe sequence
gatgcactatatacggtcttcttac

SEQ ID NO: 68801 - DNA, 25 bp, Probe sequence
tagcggactttattacttgtttgaa

SEQ ID NO: 68802 - DNA, 25 bp, Probe sequence
catagcggactttattacttgtttg

SEQ ID NO: 68803 - DNA, 25 bp, Probe sequence
atagcggactttattacttgtttga

SEQ ID NO: 68804 - DNA, 25 bp, Probe sequence
tgcactatatacggtcttcttacta

SEQ ID NO: 68805 - DNA, 25 bp, Probe sequence
atttcccttccttgtcgttttatga

SEQ ID NO: 68806 - DNA, 25 bp, Probe sequence
tcatttcccttccttgtcgttttat

SEQ ID NO: 68807 - DNA, 25 bp, Probe sequence
tcccttccttgtcgttttatgaata

SEQ ID NO: 68808 - DNA, 25 bp, Probe sequence
ttcccttccttgtcgttttatgaat

SEQ ID NO: 68809 - DNA, 25 bp, Probe sequence
catttcccttccttgtcgttttatg

SEQ ID NO: 68810 - DNA, 25 bp, Probe sequence
cccttccttgtcgttttatgaataa

SEQ ID NO: 68811 - DNA, 25 bp, Probe sequence
tttcccttccttgtcgttttatgaa

SEQ ID NO: 68812 - DNA, 25 bp, Probe sequence
gtcatttcccttccttgtcgtttta

SEQ ID NO: 68813 - DNA, 25 bp, Probe sequence
ccttccttgtcgttttatgaataat

SEQ ID NO: 68814 - DNA, 25 bp, Probe sequence
ataaaacgacaaggaagggaaatga

SEQ ID NO: 68815 - DNA, 25 bp, Probe sequence
tcataaaacgacaaggaagggaaat

SEQ ID NO: 68816 - DNA, 25 bp, Probe sequence
tattcataaaacgacaaggaaggga

SEQ ID NO: 68817 - DNA, 25 bp, Probe sequence
cataaaacgacaaggaagggaaatg

SEQ ID NO: 68818 - DNA, 25 bp, Probe sequence
attcataaaacgacaaggaagggaa

SEQ ID NO: 68819 - DNA, 25 bp, Probe sequence
ttcataaaacgacaaggaagggaaa

SEQ ID NO: 68820 - DNA, 25 bp, Probe sequence
ttattcataaaacgacaaggaaggg

SEQ ID NO: 68821 - DNA, 25 bp, Probe sequence
taaaacgacaaggaagggaaatgac

SEQ ID NO: 68822 - DNA, 25 bp, Probe sequence
attattcataaaacgacaaggaagg

SEQ ID NO: 68823 - DNA, 25 bp, Probe sequence
gtacaataattagtcatcaacctca

SEQ ID NO: 68824 - DNA, 25 bp, Probe sequence
acaataattagtcatcaacctcatt

SEQ ID NO: 68825 - DNA, 25 bp, Probe sequence
catatcatgaatgtcagtcgttgta

SEQ ID NO: 68826 - DNA, 25 bp, Probe sequence
atatcatgaatgtcagtcgttgtaa

SEQ ID NO: 68827 - DNA, 25 bp, Probe sequence
tacaataattagtcatcaacctcat

SEQ ID NO: 68828 - DNA, 25 bp, Probe sequence
aatgtcagtcgttgtaaaactaagt

SEQ ID NO: 68829 - DNA, 25 bp, Probe sequence
tgaatgtcagtcgttgtaaaactaa

SEQ ID NO: 68830 - DNA, 25 bp, Probe sequence
atgaatgtcagtcgttgtaaaacta

SEQ ID NO: 68831 - DNA, 25 bp, Probe sequence
gaatgtcagtcgttgtaaaactaag

SEQ ID NO: 68832 - DNA, 25 bp, Probe sequence
tgaggttgatgactaattattgtac

SEQ ID NO: 68833 - DNA, 25 bp, Probe sequence
aatgaggttgatgactaattattgt

SEQ ID NO: 68834 - DNA, 25 bp, Probe sequence
tacaacgactgacattcatgatatg

SEQ ID NO: 68835 - DNA, 25 bp, Probe sequence
ttacaacgactgacattcatgatat

SEQ ID NO: 68836 - DNA, 25 bp, Probe sequence
atgaggttgatgactaattattgta

SEQ ID NO: 68837 - DNA, 25 bp, Probe sequence
ttagttttacaacgactgacattca

SEQ ID NO: 68838 - DNA, 25 bp, Probe sequence
acttagttttacaacgactgacatt

SEQ ID NO: 68839 - DNA, 25 bp, Probe sequence
tagttttacaacgactgacattcat

SEQ ID NO: 68840 - DNA, 25 bp, Probe sequence
atgatatgtcaaatgaggttgatga

SEQ ID NO: 68841 - DNA, 25 bp, Probe sequence
cgtttgtatatagcagttcagttac

SEQ ID NO: 68842 - DNA, 25 bp, Probe sequence
cacgtttgtatatagcagttcagtt

SEQ ID NO: 68843 - DNA, 25 bp, Probe sequence
gcacgtttgtatatagcagttcagt

SEQ ID NO: 68844 - DNA, 25 bp, Probe sequence
acgtttgtatatagcagttcagtta

SEQ ID NO: 68845 - DNA, 25 bp, Probe sequence
tgtatatagcagttcagttacaatt

SEQ ID NO: 68846 - DNA, 25 bp, Probe sequence
tatgcacgtttgtatatagcagttc

SEQ ID NO: 68847 - DNA, 25 bp, Probe sequence
ataagcgcaatttaagttctccaaa

SEQ ID NO: 68848 - DNA, 25 bp, Probe sequence
atgcacgtttgtatatagcagttca

SEQ ID NO: 68849 - DNA, 25 bp, Probe sequence
tataagcgcaatttaagttctccaa

SEQ ID NO: 68850 - DNA, 25 bp, Probe sequence
gtaactgaactgctatatacaaacg

SEQ ID NO: 68851 - DNA, 25 bp, Probe sequence
aactgaactgctatatacaaacgtg

SEQ ID NO: 68852 - DNA, 25 bp, Probe sequence
actgaactgctatatacaaacgtgc

SEQ ID NO: 68853 - DNA, 25 bp, Probe sequence
taactgaactgctatatacaaacgt

SEQ ID NO: 68854 - DNA, 25 bp, Probe sequence
aattgtaactgaactgctatataca

SEQ ID NO: 68855 - DNA, 25 bp, Probe sequence
gaactgctatatacaaacgtgcata

SEQ ID NO: 68856 - DNA, 25 bp, Probe sequence
tttggagaacttaaattgcgcttat

SEQ ID NO: 68857 - DNA, 25 bp, Probe sequence
tgaactgctatatacaaacgtgcat

SEQ ID NO: 68858 - DNA, 25 bp, Probe sequence
tggagaacttaaattgcgcttataa

SEQ ID NO: 68859 - DNA, 25 bp, Probe sequence
gccatcttcctttctattctattac

SEQ ID NO: 68860 - DNA, 25 bp, Probe sequence
agccatcttcctttctattctatta

SEQ ID NO: 68861 - DNA, 25 bp, Probe sequence
ccatcttcctttctattctattaca

SEQ ID NO: 68862 - DNA, 25 bp, Probe sequence
ttacataaaatatacccacatgaca

SEQ ID NO: 68863 - DNA, 25 bp, Probe sequence
acataaaatatacccacatgacata

SEQ ID NO: 68864 - DNA, 25 bp, Probe sequence
tacataaaatatacccacatgacat

SEQ ID NO: 68865 - DNA, 25 bp, Probe sequence
agcttgtcaattttcttttagtaaa

SEQ ID NO: 68866 - DNA, 25 bp, Probe sequence
gcttgtcaattttcttttagtaaag

SEQ ID NO: 68867 - DNA, 25 bp, Probe sequence
tttacataaaatatacccacatgac

SEQ ID NO: 68868 - DNA, 25 bp, Probe sequence
gtaatagaatagaaaggaagatggc

SEQ ID NO: 68869 - DNA, 25 bp, Probe sequence
taatagaatagaaaggaagatggct

SEQ ID NO: 68870 - DNA, 25 bp, Probe sequence
tgtaatagaatagaaaggaagatgg

SEQ ID NO: 68871 - DNA, 25 bp, Probe sequence
tgtcatgtgggtatattttatgtaa

SEQ ID NO: 68872 - DNA, 25 bp, Probe sequence
atgtcatgtgggtatattttatgta

SEQ ID NO: 68873 - DNA, 25 bp, Probe sequence
tatgtcatgtgggtatattttatgt

SEQ ID NO: 68874 - DNA, 25 bp, Probe sequence
tttactaaaagaaaattgacaagct

SEQ ID NO: 68875 - DNA, 25 bp, Probe sequence
ctttactaaaagaaaattgacaagc

SEQ ID NO: 68876 - DNA, 25 bp, Probe sequence
gtcatgtgggtatattttatgtaaa

SEQ ID NO: 68877 - DNA, 25 bp, Probe sequence
taaccctcactctgtaaaacggata

SEQ ID NO: 68878 - DNA, 25 bp, Probe sequence
ccctcactctgtaaaacggataatt

SEQ ID NO: 68879 - DNA, 25 bp, Probe sequence
cctcactctgtaaaacggataattt

SEQ ID NO: 68880 - DNA, 25 bp, Probe sequence
accctcactctgtaaaacggataat

SEQ ID NO: 68881 - DNA, 25 bp, Probe sequence
aaccctcactctgtaaaacggataa

SEQ ID NO: 68882 - DNA, 25 bp, Probe sequence
atttaaccctcactctgtaaaacgg

SEQ ID NO: 68883 - DNA, 25 bp, Probe sequence
ttaaccctcactctgtaaaacggat

SEQ ID NO: 68884 - DNA, 25 bp, Probe sequence
ctcactctgtaaaacggataatttg

SEQ ID NO: 68885 - DNA, 25 bp, Probe sequence
tcactctgtaaaacggataatttga

SEQ ID NO: 68886 - DNA, 25 bp, Probe sequence
tatccgttttacagagtgagggtta

SEQ ID NO: 68887 - DNA, 25 bp, Probe sequence
aattatccgttttacagagtgaggg

SEQ ID NO: 68888 - DNA, 25 bp, Probe sequence
aaattatccgttttacagagtgagg

SEQ ID NO: 68889 - DNA, 25 bp, Probe sequence
attatccgttttacagagtgagggt

SEQ ID NO: 68890 - DNA, 25 bp, Probe sequence
ttatccgttttacagagtgagggtt

SEQ ID NO: 68891 - DNA, 25 bp, Probe sequence
ccgttttacagagtgagggttaaat

SEQ ID NO: 68892 - DNA, 25 bp, Probe sequence
atccgttttacagagtgagggttaa

SEQ ID NO: 68893 - DNA, 25 bp, Probe sequence
caaattatccgttttacagagtgag

SEQ ID NO: 68894 - DNA, 25 bp, Probe sequence
tcaaattatccgttttacagagtga

SEQ ID NO: 68895 - DNA, 25 bp, Probe sequence
atcgtttattgatagtcacctgctt

SEQ ID NO: 68896 - DNA, 25 bp, Probe sequence
tcgtttattgatagtcacctgcttt

SEQ ID NO: 68897 - DNA, 25 bp, Probe sequence
tatcgtttattgatagtcacctgct

SEQ ID NO: 68898 - DNA, 25 bp, Probe sequence
gcaggcaagctatcgtttattgata

SEQ ID NO: 68899 - DNA, 25 bp, Probe sequence
cgtttattgatagtcacctgctttt

SEQ ID NO: 68900 - DNA, 25 bp, Probe sequence
aaagcaggcaagctatcgtttattg

SEQ ID NO: 68901 - DNA, 25 bp, Probe sequence
ctatcgtttattgatagtcacctgc

SEQ ID NO: 68902 - DNA, 25 bp, Probe sequence
gctatcgtttattgatagtcacctg

SEQ ID NO: 68903 - DNA, 25 bp, Probe sequence
agcaggcaagctatcgtttattgat

SEQ ID NO: 68904 - DNA, 25 bp, Probe sequence
aagcaggtgactatcaataaacgat

SEQ ID NO: 68905 - DNA, 25 bp, Probe sequence
aaagcaggtgactatcaataaacga

SEQ ID NO: 68906 - DNA, 25 bp, Probe sequence
agcaggtgactatcaataaacgata

SEQ ID NO: 68907 - DNA, 25 bp, Probe sequence
tatcaataaacgatagcttgcctgc

SEQ ID NO: 68908 - DNA, 25 bp, Probe sequence
aaaagcaggtgactatcaataaacg

SEQ ID NO: 68909 - DNA, 25 bp, Probe sequence
caataaacgatagcttgcctgcttt

SEQ ID NO: 68910 - DNA, 25 bp, Probe sequence
caggtgactatcaataaacgatagc

SEQ ID NO: 68911 - DNA, 25 bp, Probe sequence
gcaggtgactatcaataaacgatag

SEQ ID NO: 68912 - DNA, 25 bp, Probe sequence
atcaataaacgatagcttgcctgct

SEQ ID NO: 68913 - DNA, 25 bp, Probe sequence
attggagagtgatacattggtgatt

SEQ ID NO: 68914 - DNA, 25 bp, Probe sequence
ttattggagagtgatacattggtga

SEQ ID NO: 68915 - DNA, 25 bp, Probe sequence
tattggagagtgatacattggtgat

SEQ ID NO: 68916 - DNA, 25 bp, Probe sequence
attattggagagtgatacattggtg

SEQ ID NO: 68917 - DNA, 25 bp, Probe sequence
cattattggagagtgatacattggt

SEQ ID NO: 68918 - DNA, 25 bp, Probe sequence
acattattggagagtgatacattgg

SEQ ID NO: 68919 - DNA, 25 bp, Probe sequence
tctccttccattcatctcgtaagaa

SEQ ID NO: 68920 - DNA, 25 bp, Probe sequence
ttctccttccattcatctcgtaaga

SEQ ID NO: 68921 - DNA, 25 bp, Probe sequence
ctcgtaagaataggaggattattgc

SEQ ID NO: 68922 - DNA, 25 bp, Probe sequence
tcaccaatgtatcactctccaataa

SEQ ID NO: 68923 - DNA, 25 bp, Probe sequence
atcaccaatgtatcactctccaata

SEQ ID NO: 68924 - DNA, 25 bp, Probe sequence
ccaatgtatcactctccaataatgt

SEQ ID NO: 68925 - DNA, 25 bp, Probe sequence
accaatgtatcactctccaataatg

SEQ ID NO: 68926 - DNA, 25 bp, Probe sequence
caccaatgtatcactctccaataat

SEQ ID NO: 68927 - DNA, 25 bp, Probe sequence
tcttacgagatgaatggaaggagaa

SEQ ID NO: 68928 - DNA, 25 bp, Probe sequence
ttcttacgagatgaatggaaggaga

SEQ ID NO: 68929 - DNA, 25 bp, Probe sequence
gcaataatcctcctattcttacgag

SEQ ID NO: 68930 - DNA, 25 bp, Probe sequence
aatcctcctattcttacgagatgaa

SEQ ID NO: 68931 - DNA, 25 bp, Probe sequence
ccatctcccatttatgtgtttgttt

SEQ ID NO: 68932 - DNA, 25 bp, Probe sequence
cccatctcccatttatgtgtttgtt

SEQ ID NO: 68933 - DNA, 25 bp, Probe sequence
agcccatctcccatttatgtgtttg

SEQ ID NO: 68934 - DNA, 25 bp, Probe sequence
gcccatctcccatttatgtgtttgt

SEQ ID NO: 68935 - DNA, 25 bp, Probe sequence
aaacaaacacataaatgggagatgg

SEQ ID NO: 68936 - DNA, 25 bp, Probe sequence
aacaaacacataaatgggagatggg

SEQ ID NO: 68937 - DNA, 25 bp, Probe sequence
tctaaacaaacacataaatgggaga

SEQ ID NO: 68938 - DNA, 25 bp, Probe sequence
ttctaaacaaacacataaatgggag

SEQ ID NO: 68939 - DNA, 25 bp, Probe sequence
taaacaaacacataaatgggagatg

SEQ ID NO: 68940 - DNA, 25 bp, Probe sequence
ctaaacaaacacataaatgggagat

SEQ ID NO: 68941 - DNA, 25 bp, Probe sequence
attctaaacaaacacataaatggga

SEQ ID NO: 68942 - DNA, 25 bp, Probe sequence
caaacacataaatgggagatgggct

SEQ ID NO: 68943 - DNA, 25 bp, Probe sequence
acaaacacataaatgggagatgggc

SEQ ID NO: 68944 - DNA, 25 bp, Probe sequence
tattctaaacaaacacataaatggg

SEQ ID NO: 68945 - DNA, 25 bp, Probe sequence
ctcatcacccatttatgtgtttgta

SEQ ID NO: 68946 - DNA, 25 bp, Probe sequence
tcatcacccatttatgtgtttgtaa

SEQ ID NO: 68947 - DNA, 25 bp, Probe sequence
catcacccatttatgtgtttgtaaa

SEQ ID NO: 68948 - DNA, 25 bp, Probe sequence
gctcatcacccatttatgtgtttgt

SEQ ID NO: 68949 - DNA, 25 bp, Probe sequence
agctcatcacccatttatgtgtttg

SEQ ID NO: 68950 - DNA, 25 bp, Probe sequence
tctcaaagaaaacaagtagcattta

SEQ ID NO: 68951 - DNA, 25 bp, Probe sequence
atcacccatttatgtgtttgtaaaa

SEQ ID NO: 68952 - DNA, 25 bp, Probe sequence
ctcaaagaaaacaagtagcatttaa

SEQ ID NO: 68953 - DNA, 25 bp, Probe sequence
cacccatttatgtgtttgtaaaact

SEQ ID NO: 68954 - DNA, 25 bp, Probe sequence
tacaaacacataaatgggtgatgag

SEQ ID NO: 68955 - DNA, 25 bp, Probe sequence
ttacaaacacataaatgggtgatga

SEQ ID NO: 68956 - DNA, 25 bp, Probe sequence
tttacaaacacataaatgggtgatg

SEQ ID NO: 68957 - DNA, 25 bp, Probe sequence
acaaacacataaatgggtgatgagc

SEQ ID NO: 68958 - DNA, 25 bp, Probe sequence
caaacacataaatgggtgatgagct

SEQ ID NO: 68959 - DNA, 25 bp, Probe sequence
taaatgctacttgttttctttgaga

SEQ ID NO: 68960 - DNA, 25 bp, Probe sequence
ttttacaaacacataaatgggtgat

SEQ ID NO: 68961 - DNA, 25 bp, Probe sequence
ttaaatgctacttgttttctttgag

SEQ ID NO: 68962 - DNA, 25 bp, Probe sequence
gttttacaaacacataaatgggtga

SEQ ID NO: 68963 - DNA, 25 bp, Probe sequence
agagtctctaatcaataacatgcgt

SEQ ID NO: 68964 - DNA, 25 bp, Probe sequence
gtctctaatcaataacatgcgttct

SEQ ID NO: 68965 - DNA, 25 bp, Probe sequence
agtctctaatcaataacatgcgttc

SEQ ID NO: 68966 - DNA, 25 bp, Probe sequence
gagtctctaatcaataacatgcgtt

SEQ ID NO: 68967 - DNA, 25 bp, Probe sequence
tctctaatcaataacatgcgttctt

SEQ ID NO: 68968 - DNA, 25 bp, Probe sequence
ctctaatcaataacatgcgttctta

SEQ ID NO: 68969 - DNA, 25 bp, Probe sequence
tagagtctctaatcaataacatgcg

SEQ ID NO: 68970 - DNA, 25 bp, Probe sequence
tctaatcaataacatgcgttcttaa

SEQ ID NO: 68971 - DNA, 25 bp, Probe sequence
caataacatgcgttcttaaataact

SEQ ID NO: 68972 - DNA, 25 bp, Probe sequence
acgcatgttattgattagagactct

SEQ ID NO: 68973 - DNA, 25 bp, Probe sequence
aacgcatgttattgattagagactc

SEQ ID NO: 68974 - DNA, 25 bp, Probe sequence
gaacgcatgttattgattagagact

SEQ ID NO: 68975 - DNA, 25 bp, Probe sequence
agaacgcatgttattgattagagac

SEQ ID NO: 68976 - DNA, 25 bp, Probe sequence
aagaacgcatgttattgattagaga

SEQ ID NO: 68977 - DNA, 25 bp, Probe sequence
taagaacgcatgttattgattagag

SEQ ID NO: 68978 - DNA, 25 bp, Probe sequence
cgcatgttattgattagagactcta

SEQ ID NO: 68979 - DNA, 25 bp, Probe sequence
ttaagaacgcatgttattgattaga

SEQ ID NO: 68980 - DNA, 25 bp, Probe sequence
gttatttaagaacgcatgttattga

SEQ ID NO: 68981 - DNA, 25 bp, Probe sequence
tcccacacatgcttttctttacaaa

SEQ ID NO: 68982 - DNA, 25 bp, Probe sequence
aaaagtattatatcacaggaaagcg

SEQ ID NO: 68983 - DNA, 25 bp, Probe sequence
ctcccacacatgcttttctttacaa

SEQ ID NO: 68984 - DNA, 25 bp, Probe sequence
caggaaagcgcatacagttattaaa

SEQ ID NO: 68985 - DNA, 25 bp, Probe sequence
agtattatatcacaggaaagcgcat

SEQ ID NO: 68986 - DNA, 25 bp, Probe sequence
attatatcacaggaaagcgcataca

SEQ ID NO: 68987 - DNA, 25 bp, Probe sequence
aagtattatatcacaggaaagcgca

SEQ ID NO: 68988 - DNA, 25 bp, Probe sequence
aaagtattatatcacaggaaagcgc

SEQ ID NO: 68989 - DNA, 25 bp, Probe sequence
acaggaaagcgcatacagttattaa

SEQ ID NO: 68990 - DNA, 25 bp, Probe sequence
tttgtaaagaaaagcatgtgtggga

SEQ ID NO: 68991 - DNA, 25 bp, Probe sequence
cgctttcctgtgatataatactttt

SEQ ID NO: 68992 - DNA, 25 bp, Probe sequence
ttgtaaagaaaagcatgtgtgggag

SEQ ID NO: 68993 - DNA, 25 bp, Probe sequence
tttaataactgtatgcgctttcctg

SEQ ID NO: 68994 - DNA, 25 bp, Probe sequence
atgcgctttcctgtgatataatact

SEQ ID NO: 68995 - DNA, 25 bp, Probe sequence
gcgctttcctgtgatataatacttt

SEQ ID NO: 68996 - DNA, 25 bp, Probe sequence
tgcgctttcctgtgatataatactt

SEQ ID NO: 68997 - DNA, 25 bp, Probe sequence
tgtatgcgctttcctgtgatataat

SEQ ID NO: 68998 - DNA, 25 bp, Probe sequence
taaagaaaagcatgtgtgggaggta

SEQ ID NO: 68999 - DNA, 25 bp, Probe sequence
aaagccacaatagcacagacatttt

SEQ ID NO: 69000 - DNA, 25 bp, Probe sequence
aaaagccacaatagcacagacattt

SEQ ID NO: 69001 - DNA, 25 bp, Probe sequence
attgtgacttttaagttatggttca

SEQ ID NO: 69002 - DNA, 25 bp, Probe sequence
tcatgtgtattgtgacttttaagtt

SEQ ID NO: 69003 - DNA, 25 bp, Probe sequence
tgtattgtgacttttaagttatggt

SEQ ID NO: 69004 - DNA, 25 bp, Probe sequence
gtgtattgtgacttttaagttatgg

SEQ ID NO: 69005 - DNA, 25 bp, Probe sequence
tgtgtattgtgacttttaagttatg

SEQ ID NO: 69006 - DNA, 25 bp, Probe sequence
gtattgtgacttttaagttatggtt

SEQ ID NO: 69007 - DNA, 25 bp, Probe sequence
catgtgtattgtgacttttaagtta

SEQ ID NO: 69008 - DNA, 25 bp, Probe sequence
aaatgtctgtgctattgtggctttt

SEQ ID NO: 69009 - DNA, 25 bp, Probe sequence
aaaatgtctgtgctattgtggcttt

SEQ ID NO: 69010 - DNA, 25 bp, Probe sequence
tgaaccataacttaaaagtcacaat

SEQ ID NO: 69011 - DNA, 25 bp, Probe sequence
aacttaaaagtcacaatacacatga

SEQ ID NO: 69012 - DNA, 25 bp, Probe sequence
accataacttaaaagtcacaataca

SEQ ID NO: 69013 - DNA, 25 bp, Probe sequence
ccataacttaaaagtcacaatacac

SEQ ID NO: 69014 - DNA, 25 bp, Probe sequence
cataacttaaaagtcacaatacaca

SEQ ID NO: 69015 - DNA, 25 bp, Probe sequence
aaccataacttaaaagtcacaatac

SEQ ID NO: 69016 - DNA, 25 bp, Probe sequence
taacttaaaagtcacaatacacatg

SEQ ID NO: 69017 - DNA, 25 bp, Probe sequence
gatgtccactcccctactaataatt

SEQ ID NO: 69018 - DNA, 25 bp, Probe sequence
cgatgtccactcccctactaataat

SEQ ID NO: 69019 - DNA, 25 bp, Probe sequence
tgtccactcccctactaataattaa

SEQ ID NO: 69020 - DNA, 25 bp, Probe sequence
atgtccactcccctactaataatta

SEQ ID NO: 69021 - DNA, 25 bp, Probe sequence
gtccactcccctactaataattaaa

SEQ ID NO: 69022 - DNA, 25 bp, Probe sequence
acagttttctcaataaaatgcaagc

SEQ ID NO: 69023 - DNA, 25 bp, Probe sequence
cagttttctcaataaaatgcaagct

SEQ ID NO: 69024 - DNA, 25 bp, Probe sequence
tccactcccctactaataattaaaa

SEQ ID NO: 69025 - DNA, 25 bp, Probe sequence
actaacagttttctcaataaaatgc

SEQ ID NO: 69026 - DNA, 25 bp, Probe sequence
aattattagtaggggagtggacatc

SEQ ID NO: 69027 - DNA, 25 bp, Probe sequence
attattagtaggggagtggacatcg

SEQ ID NO: 69028 - DNA, 25 bp, Probe sequence
ttaattattagtaggggagtggaca

SEQ ID NO: 69029 - DNA, 25 bp, Probe sequence
taattattagtaggggagtggacat

SEQ ID NO: 69030 - DNA, 25 bp, Probe sequence
tttaattattagtaggggagtggac

SEQ ID NO: 69031 - DNA, 25 bp, Probe sequence
gcttgcattttattgagaaaactgt

SEQ ID NO: 69032 - DNA, 25 bp, Probe sequence
agcttgcattttattgagaaaactg

SEQ ID NO: 69033 - DNA, 25 bp, Probe sequence
ttttaattattagtaggggagtgga

SEQ ID NO: 69034 - DNA, 25 bp, Probe sequence
gcattttattgagaaaactgttagt

SEQ ID NO: 69035 - DNA, 25 bp, Probe sequence
agctaaagtgtatcgaaaggagaac

SEQ ID NO: 69036 - DNA, 25 bp, Probe sequence
taaagtgtatcgaaaggagaacaga

SEQ ID NO: 69037 - DNA, 25 bp, Probe sequence
aaagtgtatcgaaaggagaacagac

SEQ ID NO: 69038 - DNA, 25 bp, Probe sequence
ctaaagtgtatcgaaaggagaacag

SEQ ID NO: 69039 - DNA, 25 bp, Probe sequence
gctaaagtgtatcgaaaggagaaca

SEQ ID NO: 69040 - DNA, 25 bp, Probe sequence
tattgatacactatgcttgttagct

SEQ ID NO: 69041 - DNA, 25 bp, Probe sequence
atattgatacactatgcttgttagc

SEQ ID NO: 69042 - DNA, 25 bp, Probe sequence
tagctaaagtgtatcgaaaggagaa

SEQ ID NO: 69043 - DNA, 25 bp, Probe sequence
attgatacactatgcttgttagcta

SEQ ID NO: 69044 - DNA, 25 bp, Probe sequence
aatcacgttcctttaaattcatatt

SEQ ID NO: 69045 - DNA, 25 bp, Probe sequence
gttctcctttcgatacactttagct

SEQ ID NO: 69046 - DNA, 25 bp, Probe sequence
tctgttctcctttcgatacacttta

SEQ ID NO: 69047 - DNA, 25 bp, Probe sequence
ctgttctcctttcgatacactttag

SEQ ID NO: 69048 - DNA, 25 bp, Probe sequence
gtctgttctcctttcgatacacttt

SEQ ID NO: 69049 - DNA, 25 bp, Probe sequence
tgttctcctttcgatacactttagc

SEQ ID NO: 69050 - DNA, 25 bp, Probe sequence
agctaacaagcatagtgtatcaata

SEQ ID NO: 69051 - DNA, 25 bp, Probe sequence
gctaacaagcatagtgtatcaatat

SEQ ID NO: 69052 - DNA, 25 bp, Probe sequence
ttctcctttcgatacactttagcta

SEQ ID NO: 69053 - DNA, 25 bp, Probe sequence
tagctaacaagcatagtgtatcaat

SEQ ID NO: 69054 - DNA, 25 bp, Probe sequence
aatatgaatttaaaggaacgtgatt

SEQ ID NO: 69055 - DNA, 25 bp, Probe sequence
aacttctgccacttcatctcttaat

SEQ ID NO: 69056 - DNA, 25 bp, Probe sequence
acttctgccacttcatctcttaata

SEQ ID NO: 69057 - DNA, 25 bp, Probe sequence
cttctgccacttcatctcttaataa

SEQ ID NO: 69058 - DNA, 25 bp, Probe sequence
ttctgccacttcatctcttaataat

SEQ ID NO: 69059 - DNA, 25 bp, Probe sequence
tctgccacttcatctcttaataatt

SEQ ID NO: 69060 - DNA, 25 bp, Probe sequence
tcctcacgcatcagtatttagtaat

SEQ ID NO: 69061 - DNA, 25 bp, Probe sequence
gtcctcacgcatcagtatttagtaa

SEQ ID NO: 69062 - DNA, 25 bp, Probe sequence
aaatgccttactgctgttgtttatg

SEQ ID NO: 69063 - DNA, 25 bp, Probe sequence
aaacttctgccacttcatctcttaa

SEQ ID NO: 69064 - DNA, 25 bp, Probe sequence
attaagagatgaagtggcagaagtt

SEQ ID NO: 69065 - DNA, 25 bp, Probe sequence
tattaagagatgaagtggcagaagt

SEQ ID NO: 69066 - DNA, 25 bp, Probe sequence
ttattaagagatgaagtggcagaag

SEQ ID NO: 69067 - DNA, 25 bp, Probe sequence
attattaagagatgaagtggcagaa

SEQ ID NO: 69068 - DNA, 25 bp, Probe sequence
aattattaagagatgaagtggcaga

SEQ ID NO: 69069 - DNA, 25 bp, Probe sequence
ttactaaatactgatgcgtgaggac

SEQ ID NO: 69070 - DNA, 25 bp, Probe sequence
attactaaatactgatgcgtgagga

SEQ ID NO: 69071 - DNA, 25 bp, Probe sequence
cataaacaacagcagtaaggcattt

SEQ ID NO: 69072 - DNA, 25 bp, Probe sequence
ttaagagatgaagtggcagaagttt

SEQ ID NO: 69073 - DNA, 25 bp, Probe sequence
ttgagacaagttgattatctttcct

SEQ ID NO: 69074 - DNA, 25 bp, Probe sequence
ctctgtataattgagacaagttgat

SEQ ID NO: 69075 - DNA, 25 bp, Probe sequence
tgagacaagttgattatctttccta

SEQ ID NO: 69076 - DNA, 25 bp, Probe sequence
attgagacaagttgattatctttcc

SEQ ID NO: 69077 - DNA, 25 bp, Probe sequence
tctgtataattgagacaagttgatt

SEQ ID NO: 69078 - DNA, 25 bp, Probe sequence
agaatgcaatttatcgtctctgtat

SEQ ID NO: 69079 - DNA, 25 bp, Probe sequence
atagaatgcaatttatcgtctctgt

SEQ ID NO: 69080 - DNA, 25 bp, Probe sequence
gagacaagttgattatctttcctaa

SEQ ID NO: 69081 - DNA, 25 bp, Probe sequence
tagaatgcaatttatcgtctctgta

SEQ ID NO: 69082 - DNA, 25 bp, Probe sequence
aggaaagataatcaacttgtctcaa

SEQ ID NO: 69083 - DNA, 25 bp, Probe sequence
atcaacttgtctcaattatacagag

SEQ ID NO: 69084 - DNA, 25 bp, Probe sequence
taggaaagataatcaacttgtctca

SEQ ID NO: 69085 - DNA, 25 bp, Probe sequence
ggaaagataatcaacttgtctcaat

SEQ ID NO: 69086 - DNA, 25 bp, Probe sequence
aatcaacttgtctcaattatacaga

SEQ ID NO: 69087 - DNA, 25 bp, Probe sequence
acagagacgataaattgcattctat

SEQ ID NO: 69088 - DNA, 25 bp, Probe sequence
atacagagacgataaattgcattct

SEQ ID NO: 69089 - DNA, 25 bp, Probe sequence
tacagagacgataaattgcattcta

SEQ ID NO: 69090 - DNA, 25 bp, Probe sequence
ttaggaaagataatcaacttgtctc

SEQ ID NO: 69091 - DNA, 25 bp, Probe sequence
cccctccttttcttcaattcatttt

SEQ ID NO: 69092 - DNA, 25 bp, Probe sequence
atatgcccctccttttcttcaattc

SEQ ID NO: 69093 - DNA, 25 bp, Probe sequence
gcccctccttttcttcaattcattt

SEQ ID NO: 69094 - DNA, 25 bp, Probe sequence
tatgcccctccttttcttcaattca

SEQ ID NO: 69095 - DNA, 25 bp, Probe sequence
ccctccttttcttcaattcatttta

SEQ ID NO: 69096 - DNA, 25 bp, Probe sequence
atgcccctccttttcttcaattcat

SEQ ID NO: 69097 - DNA, 25 bp, Probe sequence
tgcccctccttttcttcaattcatt

SEQ ID NO: 69098 - DNA, 25 bp, Probe sequence
cctccttttcttcaattcattttat

SEQ ID NO: 69099 - DNA, 25 bp, Probe sequence
tccttttcttcaattcattttatca

SEQ ID NO: 69100 - DNA, 25 bp, Probe sequence
ctccttttcttcaattcattttatc

SEQ ID NO: 69101 - DNA, 25 bp, Probe sequence
aaaatgaattgaagaaaaggagggg

SEQ ID NO: 69102 - DNA, 25 bp, Probe sequence
gaattgaagaaaaggaggggcatat

SEQ ID NO: 69103 - DNA, 25 bp, Probe sequence
aaatgaattgaagaaaaggaggggc

SEQ ID NO: 69104 - DNA, 25 bp, Probe sequence
tgaattgaagaaaaggaggggcata

SEQ ID NO: 69105 - DNA, 25 bp, Probe sequence
taaaatgaattgaagaaaaggaggg

SEQ ID NO: 69106 - DNA, 25 bp, Probe sequence
atgaattgaagaaaaggaggggcat

SEQ ID NO: 69107 - DNA, 25 bp, Probe sequence
aatgaattgaagaaaaggaggggca

SEQ ID NO: 69108 - DNA, 25 bp, Probe sequence
ataaaatgaattgaagaaaaggagg

SEQ ID NO: 69109 - DNA, 25 bp, Probe sequence
tgataaaatgaattgaagaaaagga

SEQ ID NO: 69110 - DNA, 25 bp, Probe sequence
gataaaatgaattgaagaaaaggag

SEQ ID NO: 69111 - DNA, 25 bp, Probe sequence
aatgacctgctgaatggattatctt

SEQ ID NO: 69112 - DNA, 25 bp, Probe sequence
atattgaatgacctgctgaatggat

SEQ ID NO: 69113 - DNA, 25 bp, Probe sequence
ttgaatgacctgctgaatggattat

SEQ ID NO: 69114 - DNA, 25 bp, Probe sequence
attgaatgacctgctgaatggatta

SEQ ID NO: 69115 - DNA, 25 bp, Probe sequence
tattgaatgacctgctgaatggatt

SEQ ID NO: 69116 - DNA, 25 bp, Probe sequence
tgacctgctgaatggattatcttat

SEQ ID NO: 69117 - DNA, 25 bp, Probe sequence
atgacctgctgaatggattatctta

SEQ ID NO: 69118 - DNA, 25 bp, Probe sequence
gaatgacctgctgaatggattatct

SEQ ID NO: 69119 - DNA, 25 bp, Probe sequence
tgaatgacctgctgaatggattatc

SEQ ID NO: 69120 - DNA, 25 bp, Probe sequence
aagataatccattcagcaggtcatt

SEQ ID NO: 69121 - DNA, 25 bp, Probe sequence
atccattcagcaggtcattcaatat

SEQ ID NO: 69122 - DNA, 25 bp, Probe sequence
aatccattcagcaggtcattcaata

SEQ ID NO: 69123 - DNA, 25 bp, Probe sequence
taatccattcagcaggtcattcaat

SEQ ID NO: 69124 - DNA, 25 bp, Probe sequence
ataatccattcagcaggtcattcaa

SEQ ID NO: 69125 - DNA, 25 bp, Probe sequence
taagataatccattcagcaggtcat

SEQ ID NO: 69126 - DNA, 25 bp, Probe sequence
ataagataatccattcagcaggtca

SEQ ID NO: 69127 - DNA, 25 bp, Probe sequence
agataatccattcagcaggtcattc

SEQ ID NO: 69128 - DNA, 25 bp, Probe sequence
gataatccattcagcaggtcattca

SEQ ID NO: 69129 - DNA, 25 bp, Probe sequence
cgaatgacaaggattgattacgaat

SEQ ID NO: 69130 - DNA, 25 bp, Probe sequence
atgagcgaatgacaaggattgatta

SEQ ID NO: 69131 - DNA, 25 bp, Probe sequence
aatgagcgaatgacaaggattgatt

SEQ ID NO: 69132 - DNA, 25 bp, Probe sequence
tgagcgaatgacaaggattgattac

SEQ ID NO: 69133 - DNA, 25 bp, Probe sequence
gcgaatgacaaggattgattacgaa

SEQ ID NO: 69134 - DNA, 25 bp, Probe sequence
gagcgaatgacaaggattgattacg

SEQ ID NO: 69135 - DNA, 25 bp, Probe sequence
aataaatgagcgaatgacaaggatt

SEQ ID NO: 69136 - DNA, 25 bp, Probe sequence
aaataaatgagcgaatgacaaggat

SEQ ID NO: 69137 - DNA, 25 bp, Probe sequence
agcgaatgacaaggattgattacga

SEQ ID NO: 69138 - DNA, 25 bp, Probe sequence
attcgtaatcaatccttgtcattcg

SEQ ID NO: 69139 - DNA, 25 bp, Probe sequence
taatcaatccttgtcattcgctcat

SEQ ID NO: 69140 - DNA, 25 bp, Probe sequence
aatcaatccttgtcattcgctcatt

SEQ ID NO: 69141 - DNA, 25 bp, Probe sequence
gtaatcaatccttgtcattcgctca

SEQ ID NO: 69142 - DNA, 25 bp, Probe sequence
ttcgtaatcaatccttgtcattcgc

SEQ ID NO: 69143 - DNA, 25 bp, Probe sequence
cgtaatcaatccttgtcattcgctc

SEQ ID NO: 69144 - DNA, 25 bp, Probe sequence
atccttgtcattcgctcatttattt

SEQ ID NO: 69145 - DNA, 25 bp, Probe sequence
aatccttgtcattcgctcatttatt

SEQ ID NO: 69146 - DNA, 25 bp, Probe sequence
tcgtaatcaatccttgtcattcgct

SEQ ID NO: 69147 - DNA, 25 bp, Probe sequence
ggtctacaaatggccttagattcta

SEQ ID NO: 69148 - DNA, 25 bp, Probe sequence
taggtctacaaatggccttagattc

SEQ ID NO: 69149 - DNA, 25 bp, Probe sequence
tctataggtctacaaatggccttag

SEQ ID NO: 69150 - DNA, 25 bp, Probe sequence
caaatggccttagattctattaggg

SEQ ID NO: 69151 - DNA, 25 bp, Probe sequence
ataggtctacaaatggccttagatt

SEQ ID NO: 69152 - DNA, 25 bp, Probe sequence
ctataggtctacaaatggccttaga

SEQ ID NO: 69153 - DNA, 25 bp, Probe sequence
aggtctacaaatggccttagattct

SEQ ID NO: 69154 - DNA, 25 bp, Probe sequence
atctataggtctacaaatggcctta

SEQ ID NO: 69155 - DNA, 25 bp, Probe sequence
tatctataggtctacaaatggcctt

SEQ ID NO: 69156 - DNA, 25 bp, Probe sequence
gaatctaaggccatttgtagaccta

SEQ ID NO: 69157 - DNA, 25 bp, Probe sequence
tagaatctaaggccatttgtagacc

SEQ ID NO: 69158 - DNA, 25 bp, Probe sequence
ctaaggccatttgtagacctataga

SEQ ID NO: 69159 - DNA, 25 bp, Probe sequence
ccctaatagaatctaaggccatttg

SEQ ID NO: 69160 - DNA, 25 bp, Probe sequence
aatctaaggccatttgtagacctat

SEQ ID NO: 69161 - DNA, 25 bp, Probe sequence
tctaaggccatttgtagacctatag

SEQ ID NO: 69162 - DNA, 25 bp, Probe sequence
agaatctaaggccatttgtagacct

SEQ ID NO: 69163 - DNA, 25 bp, Probe sequence
aaggccatttgtagacctatagata

SEQ ID NO: 69164 - DNA, 25 bp, Probe sequence
taaggccatttgtagacctatagat

SEQ ID NO: 69165 - DNA, 25 bp, Probe sequence
cgcttccaacctctatataataaca

SEQ ID NO: 69166 - DNA, 25 bp, Probe sequence
acgcttccaacctctatataataac

SEQ ID NO: 69167 - DNA, 25 bp, Probe sequence
aacgcttccaacctctatataataa

SEQ ID NO: 69168 - DNA, 25 bp, Probe sequence
ttaatcacctcctgttaatttctgc

SEQ ID NO: 69169 - DNA, 25 bp, Probe sequence
gcttccaacctctatataataacag

SEQ ID NO: 69170 - DNA, 25 bp, Probe sequence
taatcacctcctgttaatttctgca

SEQ ID NO: 69171 - DNA, 25 bp, Probe sequence
aaacgcttccaacctctatataata

SEQ ID NO: 69172 - DNA, 25 bp, Probe sequence
atcacctcctgttaatttctgcatt

SEQ ID NO: 69173 - DNA, 25 bp, Probe sequence
aatcacctcctgttaatttctgcat

SEQ ID NO: 69174 - DNA, 25 bp, Probe sequence
gttattatatagaggttggaagcgt

SEQ ID NO: 69175 - DNA, 25 bp, Probe sequence
tgttattatatagaggttggaagcg

SEQ ID NO: 69176 - DNA, 25 bp, Probe sequence
ttattatatagaggttggaagcgtt

SEQ ID NO: 69177 - DNA, 25 bp, Probe sequence
gcagaaattaacaggaggtgattaa

SEQ ID NO: 69178 - DNA, 25 bp, Probe sequence
ctgttattatatagaggttggaagc

SEQ ID NO: 69179 - DNA, 25 bp, Probe sequence
tgcagaaattaacaggaggtgatta

SEQ ID NO: 69180 - DNA, 25 bp, Probe sequence
tattatatagaggttggaagcgttt

SEQ ID NO: 69181 - DNA, 25 bp, Probe sequence
atgcagaaattaacaggaggtgatt

SEQ ID NO: 69182 - DNA, 25 bp, Probe sequence
aatgcagaaattaacaggaggtgat

SEQ ID NO: 69183 - DNA, 25 bp, Probe sequence
ttgtagccacatagaacttcattaa

SEQ ID NO: 69184 - DNA, 25 bp, Probe sequence
agccacatagaacttcattaatcaa

SEQ ID NO: 69185 - DNA, 25 bp, Probe sequence
tttctatgtcaacttaactgggtgt

SEQ ID NO: 69186 - DNA, 25 bp, Probe sequence
tctatgtcaacttaactgggtgtag

SEQ ID NO: 69187 - DNA, 25 bp, Probe sequence
tgtagctcacattgtccattagaat

SEQ ID NO: 69188 - DNA, 25 bp, Probe sequence
ttctatgtcaacttaactgggtgta

SEQ ID NO: 69189 - DNA, 25 bp, Probe sequence
ctatgtcaacttaactgggtgtagc

SEQ ID NO: 69190 - DNA, 25 bp, Probe sequence
tagccacatagaacttcattaatca

SEQ ID NO: 69191 - DNA, 25 bp, Probe sequence
agtacatgctatcataacacagtaa

SEQ ID NO: 69192 - DNA, 25 bp, Probe sequence
ttaatgaagttctatgtggctacaa

SEQ ID NO: 69193 - DNA, 25 bp, Probe sequence
ttgattaatgaagttctatgtggct

SEQ ID NO: 69194 - DNA, 25 bp, Probe sequence
acacccagttaagttgacatagaaa

SEQ ID NO: 69195 - DNA, 25 bp, Probe sequence
ctacacccagttaagttgacataga

SEQ ID NO: 69196 - DNA, 25 bp, Probe sequence
attctaatggacaatgtgagctaca

SEQ ID NO: 69197 - DNA, 25 bp, Probe sequence
tacacccagttaagttgacatagaa

SEQ ID NO: 69198 - DNA, 25 bp, Probe sequence
gctacacccagttaagttgacatag

SEQ ID NO: 69199 - DNA, 25 bp, Probe sequence
tgattaatgaagttctatgtggcta

SEQ ID NO: 69200 - DNA, 25 bp, Probe sequence
ttactgtgttatgatagcatgtact

SEQ ID NO: 69201 - DNA, 25 bp, Probe sequence
aattcataaggtctcaggctcaatg

SEQ ID NO: 69202 - DNA, 25 bp, Probe sequence
attcataaggtctcaggctcaatgg

SEQ ID NO: 69203 - DNA, 25 bp, Probe sequence
aaattcataaggtctcaggctcaat

SEQ ID NO: 69204 - DNA, 25 bp, Probe sequence
ctaaattcataaggtctcaggctca

SEQ ID NO: 69205 - DNA, 25 bp, Probe sequence
taaattcataaggtctcaggctcaa

SEQ ID NO: 69206 - DNA, 25 bp, Probe sequence
acttaaacggacaaattctatgagg

SEQ ID NO: 69207 - DNA, 25 bp, Probe sequence
cttaaacggacaaattctatgagga

SEQ ID NO: 69208 - DNA, 25 bp, Probe sequence
acacttaaacggacaaattctatga

SEQ ID NO: 69209 - DNA, 25 bp, Probe sequence
ttaaacggacaaattctatgaggat

SEQ ID NO: 69210 - DNA, 25 bp, Probe sequence
cattgagcctgagaccttatgaatt

SEQ ID NO: 69211 - DNA, 25 bp, Probe sequence
ccattgagcctgagaccttatgaat

SEQ ID NO: 69212 - DNA, 25 bp, Probe sequence
tgagcctgagaccttatgaatttag

SEQ ID NO: 69213 - DNA, 25 bp, Probe sequence
attgagcctgagaccttatgaattt

SEQ ID NO: 69214 - DNA, 25 bp, Probe sequence
ttgagcctgagaccttatgaattta

SEQ ID NO: 69215 - DNA, 25 bp, Probe sequence
cctcatagaatttgtccgtttaagt

SEQ ID NO: 69216 - DNA, 25 bp, Probe sequence
tcctcatagaatttgtccgtttaag

SEQ ID NO: 69217 - DNA, 25 bp, Probe sequence
tcatagaatttgtccgtttaagtgt

SEQ ID NO: 69218 - DNA, 25 bp, Probe sequence
ctcatagaatttgtccgtttaagtg

SEQ ID NO: 69219 - DNA, 25 bp, Probe sequence
tcacaaaatagacatacactacact

SEQ ID NO: 69220 - DNA, 25 bp, Probe sequence
atcacaaaatagacatacactacac

SEQ ID NO: 69221 - DNA, 25 bp, Probe sequence
attacttacctcacttgttgatttt

SEQ ID NO: 69222 - DNA, 25 bp, Probe sequence
cacaaaatagacatacactacacta

SEQ ID NO: 69223 - DNA, 25 bp, Probe sequence
acaaaatagacatacactacactaa

SEQ ID NO: 69224 - DNA, 25 bp, Probe sequence
tatcacaaaatagacatacactaca

SEQ ID NO: 69225 - DNA, 25 bp, Probe sequence
gtatcacaaaatagacatacactac

SEQ ID NO: 69226 - DNA, 25 bp, Probe sequence
ttgtatcacaaaatagacatacact

SEQ ID NO: 69227 - DNA, 25 bp, Probe sequence
tgtatcacaaaatagacatacacta

SEQ ID NO: 69228 - DNA, 25 bp, Probe sequence
attgtatcacaaaatagacatacac

SEQ ID NO: 69229 - DNA, 25 bp, Probe sequence
agtgtagtgtatgtctattttgtga

SEQ ID NO: 69230 - DNA, 25 bp, Probe sequence
gtgtagtgtatgtctattttgtgat

SEQ ID NO: 69231 - DNA, 25 bp, Probe sequence
aaaatcaacaagtgaggtaagtaat

SEQ ID NO: 69232 - DNA, 25 bp, Probe sequence
tagtgtagtgtatgtctattttgtg

SEQ ID NO: 69233 - DNA, 25 bp, Probe sequence
ttagtgtagtgtatgtctattttgt

SEQ ID NO: 69234 - DNA, 25 bp, Probe sequence
tgtagtgtatgtctattttgtgata

SEQ ID NO: 69235 - DNA, 25 bp, Probe sequence
gtagtgtatgtctattttgtgatac

SEQ ID NO: 69236 - DNA, 25 bp, Probe sequence
agtgtatgtctattttgtgatacaa

SEQ ID NO: 69237 - DNA, 25 bp, Probe sequence
gtgtatgtctattttgtgatacaat

SEQ ID NO: 69238 - DNA, 25 bp, Probe sequence
tagtgtatgtctattttgtgataca

SEQ ID NO: 69239 - DNA, 25 bp, Probe sequence
tgaggaaaatgacataagcaaactt

SEQ ID NO: 69240 - DNA, 25 bp, Probe sequence
atgaggaaaatgacataagcaaact

SEQ ID NO: 69241 - DNA, 25 bp, Probe sequence
aatgaggaaaatgacataagcaaac

SEQ ID NO: 69242 - DNA, 25 bp, Probe sequence
tgacataagcaaacttactcatgtt

SEQ ID NO: 69243 - DNA, 25 bp, Probe sequence
atgacataagcaaacttactcatgt

SEQ ID NO: 69244 - DNA, 25 bp, Probe sequence
aatgacataagcaaacttactcatg

SEQ ID NO: 69245 - DNA, 25 bp, Probe sequence
gacataagcaaacttactcatgttt

SEQ ID NO: 69246 - DNA, 25 bp, Probe sequence
ggaaaatgacataagcaaacttact

SEQ ID NO: 69247 - DNA, 25 bp, Probe sequence
aggaaaatgacataagcaaacttac

SEQ ID NO: 69248 - DNA, 25 bp, Probe sequence
aagtttgcttatgtcattttcctca

SEQ ID NO: 69249 - DNA, 25 bp, Probe sequence
agtttgcttatgtcattttcctcat

SEQ ID NO: 69250 - DNA, 25 bp, Probe sequence
gtttgcttatgtcattttcctcatt

SEQ ID NO: 69251 - DNA, 25 bp, Probe sequence
aacatgagtaagtttgcttatgtca

SEQ ID NO: 69252 - DNA, 25 bp, Probe sequence
acatgagtaagtttgcttatgtcat

SEQ ID NO: 69253 - DNA, 25 bp, Probe sequence
catgagtaagtttgcttatgtcatt

SEQ ID NO: 69254 - DNA, 25 bp, Probe sequence
aaacatgagtaagtttgcttatgtc

SEQ ID NO: 69255 - DNA, 25 bp, Probe sequence
gtaagtttgcttatgtcattttcct

SEQ ID NO: 69256 - DNA, 25 bp, Probe sequence
agtaagtttgcttatgtcattttcc

SEQ ID NO: 69257 - DNA, 25 bp, Probe sequence
attactttcaaacatgggtcatacg

SEQ ID NO: 69258 - DNA, 25 bp, Probe sequence
caacgattactttcaaacatgggtc

SEQ ID NO: 69259 - DNA, 25 bp, Probe sequence
cgattactttcaaacatgggtcata

SEQ ID NO: 69260 - DNA, 25 bp, Probe sequence
catgggtcatacggatggattattt

SEQ ID NO: 69261 - DNA, 25 bp, Probe sequence
aacgattactttcaaacatgggtca

SEQ ID NO: 69262 - DNA, 25 bp, Probe sequence
acgattactttcaaacatgggtcat

SEQ ID NO: 69263 - DNA, 25 bp, Probe sequence
ttactttcaaacatgggtcatacgg

SEQ ID NO: 69264 - DNA, 25 bp, Probe sequence
acatgggtcatacggatggattatt

SEQ ID NO: 69265 - DNA, 25 bp, Probe sequence
aacatgggtcatacggatggattat

SEQ ID NO: 69266 - DNA, 25 bp, Probe sequence
gacccatgtttgaaagtaatcgttg

SEQ ID NO: 69267 - DNA, 25 bp, Probe sequence
cgtatgacccatgtttgaaagtaat

SEQ ID NO: 69268 - DNA, 25 bp, Probe sequence
tatgacccatgtttgaaagtaatcg

SEQ ID NO: 69269 - DNA, 25 bp, Probe sequence
tgacccatgtttgaaagtaatcgtt

SEQ ID NO: 69270 - DNA, 25 bp, Probe sequence
aaataatccatccgtatgacccatg

SEQ ID NO: 69271 - DNA, 25 bp, Probe sequence
atgacccatgtttgaaagtaatcgt

SEQ ID NO: 69272 - DNA, 25 bp, Probe sequence
ccgtatgacccatgtttgaaagtaa

SEQ ID NO: 69273 - DNA, 25 bp, Probe sequence
ataatccatccgtatgacccatgtt

SEQ ID NO: 69274 - DNA, 25 bp, Probe sequence
aataatccatccgtatgacccatgt

SEQ ID NO: 69275 - DNA, 25 bp, Probe sequence
aagttcaatcacctatccctttata

SEQ ID NO: 69276 - DNA, 25 bp, Probe sequence
agttcaatcacctatccctttatat

SEQ ID NO: 69277 - DNA, 25 bp, Probe sequence
gttcaatcacctatccctttatatt

SEQ ID NO: 69278 - DNA, 25 bp, Probe sequence
ttcaatcacctatccctttatattt

SEQ ID NO: 69279 - DNA, 25 bp, Probe sequence
tcacctatccctttatatttaaact

SEQ ID NO: 69280 - DNA, 25 bp, Probe sequence
tataaagggataggtgattgaactt

SEQ ID NO: 69281 - DNA, 25 bp, Probe sequence
atataaagggataggtgattgaact

SEQ ID NO: 69282 - DNA, 25 bp, Probe sequence
aatataaagggataggtgattgaac

SEQ ID NO: 69283 - DNA, 25 bp, Probe sequence
aaatataaagggataggtgattgaa

SEQ ID NO: 69284 - DNA, 25 bp, Probe sequence
agtttaaatataaagggataggtga

SEQ ID NO: 69285 - DNA, 25 bp, Probe sequence
aatacatccatcgacaagaacaaga

SEQ ID NO: 69286 - DNA, 25 bp, Probe sequence
atacatccatcgacaagaacaagat

SEQ ID NO: 69287 - DNA, 25 bp, Probe sequence
acatccatcgacaagaacaagataa

SEQ ID NO: 69288 - DNA, 25 bp, Probe sequence
tacatccatcgacaagaacaagata

SEQ ID NO: 69289 - DNA, 25 bp, Probe sequence
aacaagttgtcgatagatgtatcca

SEQ ID NO: 69290 - DNA, 25 bp, Probe sequence
agttgtcgatagatgtatccatgtt

SEQ ID NO: 69291 - DNA, 25 bp, Probe sequence
aagttgtcgatagatgtatccatgt

SEQ ID NO: 69292 - DNA, 25 bp, Probe sequence
acaagttgtcgatagatgtatccat

SEQ ID NO: 69293 - DNA, 25 bp, Probe sequence
caagttgtcgatagatgtatccatg

SEQ ID NO: 69294 - DNA, 25 bp, Probe sequence
tcttgttcttgtcgatggatgtatt

SEQ ID NO: 69295 - DNA, 25 bp, Probe sequence
atcttgttcttgtcgatggatgtat

SEQ ID NO: 69296 - DNA, 25 bp, Probe sequence
ttatcttgttcttgtcgatggatgt

SEQ ID NO: 69297 - DNA, 25 bp, Probe sequence
tatcttgttcttgtcgatggatgta

SEQ ID NO: 69298 - DNA, 25 bp, Probe sequence
tggatacatctatcgacaacttgtt

SEQ ID NO: 69299 - DNA, 25 bp, Probe sequence
atggatacatctatcgacaacttgt

SEQ ID NO: 69300 - DNA, 25 bp, Probe sequence
acatggatacatctatcgacaactt

SEQ ID NO: 69301 - DNA, 25 bp, Probe sequence
aacatggatacatctatcgacaact

SEQ ID NO: 69302 - DNA, 25 bp, Probe sequence
catggatacatctatcgacaacttg

SEQ ID NO: 69303 - DNA, 25 bp, Probe sequence
atgagtattcaacacactttggaaa

SEQ ID NO: 69304 - DNA, 25 bp, Probe sequence
aatgagtattcaacacactttggaa

SEQ ID NO: 69305 - DNA, 25 bp, Probe sequence
aaatgagtattcaacacactttgga

SEQ ID NO: 69306 - DNA, 25 bp, Probe sequence
tccataaatgagtattcaacacact

SEQ ID NO: 69307 - DNA, 25 bp, Probe sequence
taaatgagtattcaacacactttgg

SEQ ID NO: 69308 - DNA, 25 bp, Probe sequence
ccataaatgagtattcaacacactt

SEQ ID NO: 69309 - DNA, 25 bp, Probe sequence
atccataaatgagtattcaacacac

SEQ ID NO: 69310 - DNA, 25 bp, Probe sequence
aatccataaatgagtattcaacaca

SEQ ID NO: 69311 - DNA, 25 bp, Probe sequence
atgattgtctatttagtttgaatgc

SEQ ID NO: 69312 - DNA, 25 bp, Probe sequence
tccaaagtgtgttgaatactcattt

SEQ ID NO: 69313 - DNA, 25 bp, Probe sequence
ttccaaagtgtgttgaatactcatt

SEQ ID NO: 69314 - DNA, 25 bp, Probe sequence
tttccaaagtgtgttgaatactcat

SEQ ID NO: 69315 - DNA, 25 bp, Probe sequence
agtgtgttgaatactcatttatgga

SEQ ID NO: 69316 - DNA, 25 bp, Probe sequence
ccaaagtgtgttgaatactcattta

SEQ ID NO: 69317 - DNA, 25 bp, Probe sequence
aagtgtgttgaatactcatttatgg

SEQ ID NO: 69318 - DNA, 25 bp, Probe sequence
gtgtgttgaatactcatttatggat

SEQ ID NO: 69319 - DNA, 25 bp, Probe sequence
tgtgttgaatactcatttatggatt

SEQ ID NO: 69320 - DNA, 25 bp, Probe sequence
gcattcaaactaaatagacaatcat

SEQ ID NO: 69321 - DNA, 25 bp, Probe sequence
tcacattgatgtcacagatacgaat

SEQ ID NO: 69322 - DNA, 25 bp, Probe sequence
cacattgatgtcacagatacgaata

SEQ ID NO: 69323 - DNA, 25 bp, Probe sequence
acattgatgtcacagatacgaatat

SEQ ID NO: 69324 - DNA, 25 bp, Probe sequence
tgatgtcacagatacgaatattgtc

SEQ ID NO: 69325 - DNA, 25 bp, Probe sequence
gcactgatttacgactactaaacac

SEQ ID NO: 69326 - DNA, 25 bp, Probe sequence
actgatttacgactactaaacacct

SEQ ID NO: 69327 - DNA, 25 bp, Probe sequence
cactgatttacgactactaaacacc

SEQ ID NO: 69328 - DNA, 25 bp, Probe sequence
ttgatgtcacagatacgaatattgt

SEQ ID NO: 69329 - DNA, 25 bp, Probe sequence
tttacgactactaaacacctttacg

SEQ ID NO: 69330 - DNA, 25 bp, Probe sequence
attcgtatctgtgacatcaatgtga

SEQ ID NO: 69331 - DNA, 25 bp, Probe sequence
tattcgtatctgtgacatcaatgtg

SEQ ID NO: 69332 - DNA, 25 bp, Probe sequence
atattcgtatctgtgacatcaatgt

SEQ ID NO: 69333 - DNA, 25 bp, Probe sequence
gacaatattcgtatctgtgacatca

SEQ ID NO: 69334 - DNA, 25 bp, Probe sequence
gtgtttagtagtcgtaaatcagtgc

SEQ ID NO: 69335 - DNA, 25 bp, Probe sequence
ggtgtttagtagtcgtaaatcagtg

SEQ ID NO: 69336 - DNA, 25 bp, Probe sequence
aggtgtttagtagtcgtaaatcagt

SEQ ID NO: 69337 - DNA, 25 bp, Probe sequence
acaatattcgtatctgtgacatcaa

SEQ ID NO: 69338 - DNA, 25 bp, Probe sequence
cgtaaaggtgtttagtagtcgtaaa

SEQ ID NO: 69339 - DNA, 25 bp, Probe sequence
aagcctcatatcagcatataaccta

SEQ ID NO: 69340 - DNA, 25 bp, Probe sequence
agcctcatatcagcatataacctat

SEQ ID NO: 69341 - DNA, 25 bp, Probe sequence
tgagacaactcttcaattcaagcat

SEQ ID NO: 69342 - DNA, 25 bp, Probe sequence
tgttcatattgctggcgacattata

SEQ ID NO: 69343 - DNA, 25 bp, Probe sequence
gttcatattgctggcgacattataa

SEQ ID NO: 69344 - DNA, 25 bp, Probe sequence
ttcatattgctggcgacattataag

SEQ ID NO: 69345 - DNA, 25 bp, Probe sequence
tcatattgctggcgacattataagt

SEQ ID NO: 69346 - DNA, 25 bp, Probe sequence
aactcttcaattcaagcatgttcat

SEQ ID NO: 69347 - DNA, 25 bp, Probe sequence
caactcttcaattcaagcatgttca

SEQ ID NO: 69348 - DNA, 25 bp, Probe sequence
taggttatatgctgatatgaggctt

SEQ ID NO: 69349 - DNA, 25 bp, Probe sequence
ataggttatatgctgatatgaggct

SEQ ID NO: 69350 - DNA, 25 bp, Probe sequence
atgcttgaattgaagagttgtctca

SEQ ID NO: 69351 - DNA, 25 bp, Probe sequence
tataatgtcgccagcaatatgaaca

SEQ ID NO: 69352 - DNA, 25 bp, Probe sequence
ttataatgtcgccagcaatatgaac

SEQ ID NO: 69353 - DNA, 25 bp, Probe sequence
cttataatgtcgccagcaatatgaa

SEQ ID NO: 69354 - DNA, 25 bp, Probe sequence
acttataatgtcgccagcaatatga

SEQ ID NO: 69355 - DNA, 25 bp, Probe sequence
atgaacatgcttgaattgaagagtt

SEQ ID NO: 69356 - DNA, 25 bp, Probe sequence
tgaacatgcttgaattgaagagttg

SEQ ID NO: 69357 - DNA, 25 bp, Probe sequence
acgtttgtgcatttcaactttatac

SEQ ID NO: 69358 - DNA, 25 bp, Probe sequence
cgtttgtgcatttcaactttataca

SEQ ID NO: 69359 - DNA, 25 bp, Probe sequence
gtttgtgcatttcaactttatacat

SEQ ID NO: 69360 - DNA, 25 bp, Probe sequence
tttgtgcatttcaactttatacatt

SEQ ID NO: 69361 - DNA, 25 bp, Probe sequence
aacgtttgtgcatttcaactttata

SEQ ID NO: 69362 - DNA, 25 bp, Probe sequence
tgtgcatttcaactttatacattaa

SEQ ID NO: 69363 - DNA, 25 bp, Probe sequence
ttgtgcatttcaactttatacatta

SEQ ID NO: 69364 - DNA, 25 bp, Probe sequence
gtgcatttcaactttatacattaaa

SEQ ID NO: 69365 - DNA, 25 bp, Probe sequence
gtataaagttgaaatgcacaaacgt

SEQ ID NO: 69366 - DNA, 25 bp, Probe sequence
tgtataaagttgaaatgcacaaacg

SEQ ID NO: 69367 - DNA, 25 bp, Probe sequence
atgtataaagttgaaatgcacaaac

SEQ ID NO: 69368 - DNA, 25 bp, Probe sequence
aatgtataaagttgaaatgcacaaa

SEQ ID NO: 69369 - DNA, 25 bp, Probe sequence
tataaagttgaaatgcacaaacgtt

SEQ ID NO: 69370 - DNA, 25 bp, Probe sequence
taatgtataaagttgaaatgcacaa

SEQ ID NO: 69371 - DNA, 25 bp, Probe sequence
ttaatgtataaagttgaaatgcaca

SEQ ID NO: 69372 - DNA, 25 bp, Probe sequence
tttaatgtataaagttgaaatgcac

SEQ ID NO: 69373 - DNA, 25 bp, Probe sequence
aacggaagcacttgtaggtaaaata

SEQ ID NO: 69374 - DNA, 25 bp, Probe sequence
acggaagcacttgtaggtaaaatag

SEQ ID NO: 69375 - DNA, 25 bp, Probe sequence
aaacggaagcacttgtaggtaaaat

SEQ ID NO: 69376 - DNA, 25 bp, Probe sequence
aaaacggaagcacttgtaggtaaaa

SEQ ID NO: 69377 - DNA, 25 bp, Probe sequence
ggaagcacttgtaggtaaaatagtc

SEQ ID NO: 69378 - DNA, 25 bp, Probe sequence
cggaagcacttgtaggtaaaatagt

SEQ ID NO: 69379 - DNA, 25 bp, Probe sequence
gaagcacttgtaggtaaaatagtct

SEQ ID NO: 69380 - DNA, 25 bp, Probe sequence
taggtaaaatagtctacgtgcttcc

SEQ ID NO: 69381 - DNA, 25 bp, Probe sequence
ggtaaaatagtctacgtgcttccat

SEQ ID NO: 69382 - DNA, 25 bp, Probe sequence
tattttacctacaagtgcttccgtt

SEQ ID NO: 69383 - DNA, 25 bp, Probe sequence
ctattttacctacaagtgcttccgt

SEQ ID NO: 69384 - DNA, 25 bp, Probe sequence
attttacctacaagtgcttccgttt

SEQ ID NO: 69385 - DNA, 25 bp, Probe sequence
ttttacctacaagtgcttccgtttt

SEQ ID NO: 69386 - DNA, 25 bp, Probe sequence
gactattttacctacaagtgcttcc

SEQ ID NO: 69387 - DNA, 25 bp, Probe sequence
actattttacctacaagtgcttccg

SEQ ID NO: 69388 - DNA, 25 bp, Probe sequence
agactattttacctacaagtgcttc

SEQ ID NO: 69389 - DNA, 25 bp, Probe sequence
ggaagcacgtagactattttaccta

SEQ ID NO: 69390 - DNA, 25 bp, Probe sequence
atggaagcacgtagactattttacc

SEQ ID NO: 69391 - DNA, 25 bp, Probe sequence
attatcgtttaattagggaggatgc

SEQ ID NO: 69392 - DNA, 25 bp, Probe sequence
tatcgtttaattagggaggatgcaa

SEQ ID NO: 69393 - DNA, 25 bp, Probe sequence
ttatcgtttaattagggaggatgca

SEQ ID NO: 69394 - DNA, 25 bp, Probe sequence
atcgtttaattagggaggatgcaag

SEQ ID NO: 69395 - DNA, 25 bp, Probe sequence
tcaagaactcctatcagcaaaatgt

SEQ ID NO: 69396 - DNA, 25 bp, Probe sequence
ttcaagaactcctatcagcaaaatg

SEQ ID NO: 69397 - DNA, 25 bp, Probe sequence
caagaactcctatcagcaaaatgta

SEQ ID NO: 69398 - DNA, 25 bp, Probe sequence
attcaagaactcctatcagcaaaat

SEQ ID NO: 69399 - DNA, 25 bp, Probe sequence
aagaactcctatcagcaaaatgtat

SEQ ID NO: 69400 - DNA, 25 bp, Probe sequence
gcatcctccctaattaaacgataat

SEQ ID NO: 69401 - DNA, 25 bp, Probe sequence
tgcatcctccctaattaaacgataa

SEQ ID NO: 69402 - DNA, 25 bp, Probe sequence
ttgcatcctccctaattaaacgata

SEQ ID NO: 69403 - DNA, 25 bp, Probe sequence
cttgcatcctccctaattaaacgat

SEQ ID NO: 69404 - DNA, 25 bp, Probe sequence
acattttgctgataggagttcttga

SEQ ID NO: 69405 - DNA, 25 bp, Probe sequence
cattttgctgataggagttcttgaa

SEQ ID NO: 69406 - DNA, 25 bp, Probe sequence
tacattttgctgataggagttcttg

SEQ ID NO: 69407 - DNA, 25 bp, Probe sequence
attttgctgataggagttcttgaat

SEQ ID NO: 69408 - DNA, 25 bp, Probe sequence
atacattttgctgataggagttctt

SEQ ID NO: 69409 - DNA, 25 bp, Probe sequence
ttcaatacgattcaattaccgcaat

SEQ ID NO: 69410 - DNA, 25 bp, Probe sequence
caatacgattcaattaccgcaatct

SEQ ID NO: 69411 - DNA, 25 bp, Probe sequence
tcaatacgattcaattaccgcaatc

SEQ ID NO: 69412 - DNA, 25 bp, Probe sequence
atacgattcaattaccgcaatctaa

SEQ ID NO: 69413 - DNA, 25 bp, Probe sequence
aatacgattcaattaccgcaatcta

SEQ ID NO: 69414 - DNA, 25 bp, Probe sequence
tttcaatacgattcaattaccgcaa

SEQ ID NO: 69415 - DNA, 25 bp, Probe sequence
caaaccctaagagttattacttcgg

SEQ ID NO: 69416 - DNA, 25 bp, Probe sequence
ccaaaccctaagagttattacttcg

SEQ ID NO: 69417 - DNA, 25 bp, Probe sequence
ttcagcataataaagaaagttcagc

SEQ ID NO: 69418 - DNA, 25 bp, Probe sequence
attgcggtaattgaatcgtattgaa

SEQ ID NO: 69419 - DNA, 25 bp, Probe sequence
gattgcggtaattgaatcgtattga

SEQ ID NO: 69420 - DNA, 25 bp, Probe sequence
agattgcggtaattgaatcgtattg

SEQ ID NO: 69421 - DNA, 25 bp, Probe sequence
tagattgcggtaattgaatcgtatt

SEQ ID NO: 69422 - DNA, 25 bp, Probe sequence
ttagattgcggtaattgaatcgtat

SEQ ID NO: 69423 - DNA, 25 bp, Probe sequence
ttgcggtaattgaatcgtattgaaa

SEQ ID NO: 69424 - DNA, 25 bp, Probe sequence
cgaagtaataactcttagggtttgg

SEQ ID NO: 69425 - DNA, 25 bp, Probe sequence
ccgaagtaataactcttagggtttg

SEQ ID NO: 69426 - DNA, 25 bp, Probe sequence
gctgaactttctttattatgctgaa

SEQ ID NO: 69427 - DNA, 25 bp, Probe sequence
tttgcctgagagtttcgtaataaat

SEQ ID NO: 69428 - DNA, 25 bp, Probe sequence
ttgcctgagagtttcgtaataaatt

SEQ ID NO: 69429 - DNA, 25 bp, Probe sequence
tgcctgagagtttcgtaataaatta

SEQ ID NO: 69430 - DNA, 25 bp, Probe sequence
ttataaatcaccaattcaggaacgc

SEQ ID NO: 69431 - DNA, 25 bp, Probe sequence
agtattatccttttgcctgagagtt

SEQ ID NO: 69432 - DNA, 25 bp, Probe sequence
cttttgcctgagagtttcgtaataa

SEQ ID NO: 69433 - DNA, 25 bp, Probe sequence
taataaattacttgcaccttcggcg

SEQ ID NO: 69434 - DNA, 25 bp, Probe sequence
ttttgcctgagagtttcgtaataaa

SEQ ID NO: 69435 - DNA, 25 bp, Probe sequence
gtattatccttttgcctgagagttt

SEQ ID NO: 69436 - DNA, 25 bp, Probe sequence
atttattacgaaactctcaggcaaa

SEQ ID NO: 69437 - DNA, 25 bp, Probe sequence
aatttattacgaaactctcaggcaa

SEQ ID NO: 69438 - DNA, 25 bp, Probe sequence
taatttattacgaaactctcaggca

SEQ ID NO: 69439 - DNA, 25 bp, Probe sequence
gcgttcctgaattggtgatttataa

SEQ ID NO: 69440 - DNA, 25 bp, Probe sequence
aactctcaggcaaaaggataatact

SEQ ID NO: 69441 - DNA, 25 bp, Probe sequence
ttattacgaaactctcaggcaaaag

SEQ ID NO: 69442 - DNA, 25 bp, Probe sequence
tttattacgaaactctcaggcaaaa

SEQ ID NO: 69443 - DNA, 25 bp, Probe sequence
cgccgaaggtgcaagtaatttatta

SEQ ID NO: 69444 - DNA, 25 bp, Probe sequence
aaactctcaggcaaaaggataatac

SEQ ID NO: 69445 - DNA, 25 bp, Probe sequence
taagaacggagttacatatcctttt

SEQ ID NO: 69446 - DNA, 25 bp, Probe sequence
aaaaggatatgtaactccgttctta

SEQ ID NO: 69447 - DNA, 25 bp, Probe sequence
aacacctcctacatataatcacgta

SEQ ID NO: 69448 - DNA, 25 bp, Probe sequence
tacatataatcacgtaggaggtgtt

SEQ ID NO: 69449 - DNA, 25 bp, Probe sequence
aaacacctcctacatataatcacgt

SEQ ID NO: 69450 - DNA, 25 bp, Probe sequence
ctacatataatcacgtaggaggtgt

SEQ ID NO: 69451 - DNA, 25 bp, Probe sequence
acacctcctacatataatcacgtag

SEQ ID NO: 69452 - DNA, 25 bp, Probe sequence
acatataatcacgtaggaggtgttt

SEQ ID NO: 69453 - DNA, 25 bp, Probe sequence
aaaacacctcctacatataatcacg

SEQ ID NO: 69454 - DNA, 25 bp, Probe sequence
catataatcacgtaggaggtgtttt

SEQ ID NO: 69455 - DNA, 25 bp, Probe sequence
tacgtgattatatgtaggaggtgtt

SEQ ID NO: 69456 - DNA, 25 bp, Probe sequence
aacacctcctacgtgattatatgta

SEQ ID NO: 69457 - DNA, 25 bp, Probe sequence
acgtgattatatgtaggaggtgttt

SEQ ID NO: 69458 - DNA, 25 bp, Probe sequence
ctacgtgattatatgtaggaggtgt

SEQ ID NO: 69459 - DNA, 25 bp, Probe sequence
acacctcctacgtgattatatgtag

SEQ ID NO: 69460 - DNA, 25 bp, Probe sequence
aaacacctcctacgtgattatatgt

SEQ ID NO: 69461 - DNA, 25 bp, Probe sequence
cgtgattatatgtaggaggtgtttt

SEQ ID NO: 69462 - DNA, 25 bp, Probe sequence
aaaacacctcctacgtgattatatg

SEQ ID NO: 69463 - DNA, 25 bp, Probe sequence
tatgttgtcatgatgaattatgcga

SEQ ID NO: 69464 - DNA, 25 bp, Probe sequence
atgttgtcatgatgaattatgcgac

SEQ ID NO: 69465 - DNA, 25 bp, Probe sequence
tcatttcatacgtgtgcataattaa

SEQ ID NO: 69466 - DNA, 25 bp, Probe sequence
atcatttcatacgtgtgcataatta

SEQ ID NO: 69467 - DNA, 25 bp, Probe sequence
tatcatttcatacgtgtgcataatt

SEQ ID NO: 69468 - DNA, 25 bp, Probe sequence
tttatcatttcatacgtgtgcataa

SEQ ID NO: 69469 - DNA, 25 bp, Probe sequence
ttatcatttcatacgtgtgcataat

SEQ ID NO: 69470 - DNA, 25 bp, Probe sequence
acctcttattttgagatttcacctt

SEQ ID NO: 69471 - DNA, 25 bp, Probe sequence
aacctcttattttgagatttcacct

SEQ ID NO: 69472 - DNA, 25 bp, Probe sequence
tcgcataattcatcatgacaacata

SEQ ID NO: 69473 - DNA, 25 bp, Probe sequence
gtcgcataattcatcatgacaacat

SEQ ID NO: 69474 - DNA, 25 bp, Probe sequence
ttaattatgcacacgtatgaaatga

SEQ ID NO: 69475 - DNA, 25 bp, Probe sequence
ttatgcacacgtatgaaatgataaa

SEQ ID NO: 69476 - DNA, 25 bp, Probe sequence
aattatgcacacgtatgaaatgata

SEQ ID NO: 69477 - DNA, 25 bp, Probe sequence
taattatgcacacgtatgaaatgat

SEQ ID NO: 69478 - DNA, 25 bp, Probe sequence
attatgcacacgtatgaaatgataa

SEQ ID NO: 69479 - DNA, 25 bp, Probe sequence
aggtgaaatctcaaaataagaggtt

SEQ ID NO: 69480 - DNA, 25 bp, Probe sequence
aaggtgaaatctcaaaataagaggt

SEQ ID NO: 69481 - DNA, 25 bp, Probe sequence
cgctacacaatcgtcaggttaaatt

SEQ ID NO: 69482 - DNA, 25 bp, Probe sequence
cctccttatcatttctaaatacgac

SEQ ID NO: 69483 - DNA, 25 bp, Probe sequence
tcctccttatcatttctaaatacga

SEQ ID NO: 69484 - DNA, 25 bp, Probe sequence
ttcctccttatcatttctaaatacg

SEQ ID NO: 69485 - DNA, 25 bp, Probe sequence
ctccttatcatttctaaatacgact

SEQ ID NO: 69486 - DNA, 25 bp, Probe sequence
ggttattcctccttatcatttctaa

SEQ ID NO: 69487 - DNA, 25 bp, Probe sequence
tccttatcatttctaaatacgactt

SEQ ID NO: 69488 - DNA, 25 bp, Probe sequence
ccttatcatttctaaatacgacttt

SEQ ID NO: 69489 - DNA, 25 bp, Probe sequence
acgactttattattataccaacatc

SEQ ID NO: 69490 - DNA, 25 bp, Probe sequence
aatttaacctgacgattgtgtagcg

SEQ ID NO: 69491 - DNA, 25 bp, Probe sequence
tcgtatttagaaatgataaggagga

SEQ ID NO: 69492 - DNA, 25 bp, Probe sequence
gtcgtatttagaaatgataaggagg

SEQ ID NO: 69493 - DNA, 25 bp, Probe sequence
cgtatttagaaatgataaggaggaa

SEQ ID NO: 69494 - DNA, 25 bp, Probe sequence
agtcgtatttagaaatgataaggag

SEQ ID NO: 69495 - DNA, 25 bp, Probe sequence
ttagaaatgataaggaggaataacc

SEQ ID NO: 69496 - DNA, 25 bp, Probe sequence
aagtcgtatttagaaatgataagga

SEQ ID NO: 69497 - DNA, 25 bp, Probe sequence
aaagtcgtatttagaaatgataagg

SEQ ID NO: 69498 - DNA, 25 bp, Probe sequence
gatgttggtataataataaagtcgt

SEQ ID NO: 69499 - DNA, 25 bp, Probe sequence
taagagaccgaacaagtaatcatac

SEQ ID NO: 69500 - DNA, 25 bp, Probe sequence
ttaagagaccgaacaagtaatcata

SEQ ID NO: 69501 - DNA, 25 bp, Probe sequence
aagagaccgaacaagtaatcatact

SEQ ID NO: 69502 - DNA, 25 bp, Probe sequence
acctacctctattcaaagtctttca

SEQ ID NO: 69503 - DNA, 25 bp, Probe sequence
cctacctctattcaaagtctttcac

SEQ ID NO: 69504 - DNA, 25 bp, Probe sequence
tttaagagaccgaacaagtaatcat

SEQ ID NO: 69505 - DNA, 25 bp, Probe sequence
atttaagagaccgaacaagtaatca

SEQ ID NO: 69506 - DNA, 25 bp, Probe sequence
tcatttaagagaccgaacaagtaat

SEQ ID NO: 69507 - DNA, 25 bp, Probe sequence
catttaagagaccgaacaagtaatc

SEQ ID NO: 69508 - DNA, 25 bp, Probe sequence
gtatgattacttgttcggtctctta

SEQ ID NO: 69509 - DNA, 25 bp, Probe sequence
tatgattacttgttcggtctcttaa

SEQ ID NO: 69510 - DNA, 25 bp, Probe sequence
agtatgattacttgttcggtctctt

SEQ ID NO: 69511 - DNA, 25 bp, Probe sequence
tgaaagactttgaatagaggtaggt

SEQ ID NO: 69512 - DNA, 25 bp, Probe sequence
gtgaaagactttgaatagaggtagg

SEQ ID NO: 69513 - DNA, 25 bp, Probe sequence
attacttgttcggtctcttaaatga

SEQ ID NO: 69514 - DNA, 25 bp, Probe sequence
tgattacttgttcggtctcttaaat

SEQ ID NO: 69515 - DNA, 25 bp, Probe sequence
atgattacttgttcggtctcttaaa

SEQ ID NO: 69516 - DNA, 25 bp, Probe sequence
gattacttgttcggtctcttaaatg

SEQ ID NO: 69517 - DNA, 25 bp, Probe sequence
ataataacaagcagtgactggttca

SEQ ID NO: 69518 - DNA, 25 bp, Probe sequence
aataataacaagcagtgactggttc

SEQ ID NO: 69519 - DNA, 25 bp, Probe sequence
taataacaagcagtgactggttcaa

SEQ ID NO: 69520 - DNA, 25 bp, Probe sequence
gaacggagtatgaaatgaaccttta

SEQ ID NO: 69521 - DNA, 25 bp, Probe sequence
acggagtatgaaatgaacctttatc

SEQ ID NO: 69522 - DNA, 25 bp, Probe sequence
cggagtatgaaatgaacctttatct

SEQ ID NO: 69523 - DNA, 25 bp, Probe sequence
aacggagtatgaaatgaacctttat

SEQ ID NO: 69524 - DNA, 25 bp, Probe sequence
cgaacggagtatgaaatgaaccttt

SEQ ID NO: 69525 - DNA, 25 bp, Probe sequence
tacgaacggagtatgaaatgaacct

SEQ ID NO: 69526 - DNA, 25 bp, Probe sequence
gaaccagtcactgcttgttattatt

SEQ ID NO: 69527 - DNA, 25 bp, Probe sequence
tgaaccagtcactgcttgttattat

SEQ ID NO: 69528 - DNA, 25 bp, Probe sequence
ttgaaccagtcactgcttgttatta

SEQ ID NO: 69529 - DNA, 25 bp, Probe sequence
taaaggttcatttcatactccgttc

SEQ ID NO: 69530 - DNA, 25 bp, Probe sequence
gataaaggttcatttcatactccgt

SEQ ID NO: 69531 - DNA, 25 bp, Probe sequence
agataaaggttcatttcatactccg

SEQ ID NO: 69532 - DNA, 25 bp, Probe sequence
ataaaggttcatttcatactccgtt

SEQ ID NO: 69533 - DNA, 25 bp, Probe sequence
aaaggttcatttcatactccgttcg

SEQ ID NO: 69534 - DNA, 25 bp, Probe sequence
aggttcatttcatactccgttcgta

SEQ ID NO: 69535 - DNA, 25 bp, Probe sequence
ctcgcattcaactatacaactccta

SEQ ID NO: 69536 - DNA, 25 bp, Probe sequence
tattctcacctcgcattcaactata

SEQ ID NO: 69537 - DNA, 25 bp, Probe sequence
attctcacctcgcattcaactatac

SEQ ID NO: 69538 - DNA, 25 bp, Probe sequence
gtattctcacctcgcattcaactat

SEQ ID NO: 69539 - DNA, 25 bp, Probe sequence
tcgcattcaactatacaactcctag

SEQ ID NO: 69540 - DNA, 25 bp, Probe sequence
cacctcgcattcaactatacaactc

SEQ ID NO: 69541 - DNA, 25 bp, Probe sequence
ctcacctcgcattcaactatacaac

SEQ ID NO: 69542 - DNA, 25 bp, Probe sequence
tctcacctcgcattcaactatacaa

SEQ ID NO: 69543 - DNA, 25 bp, Probe sequence
ttctcacctcgcattcaactataca

SEQ ID NO: 69544 - DNA, 25 bp, Probe sequence
taggagttgtatagttgaatgcgag

SEQ ID NO: 69545 - DNA, 25 bp, Probe sequence
tatagttgaatgcgaggtgagaata

SEQ ID NO: 69546 - DNA, 25 bp, Probe sequence
atagttgaatgcgaggtgagaatac

SEQ ID NO: 69547 - DNA, 25 bp, Probe sequence
gtatagttgaatgcgaggtgagaat

SEQ ID NO: 69548 - DNA, 25 bp, Probe sequence
ctaggagttgtatagttgaatgcga

SEQ ID NO: 69549 - DNA, 25 bp, Probe sequence
gttgtatagttgaatgcgaggtgag

SEQ ID NO: 69550 - DNA, 25 bp, Probe sequence
gagttgtatagttgaatgcgaggtg

SEQ ID NO: 69551 - DNA, 25 bp, Probe sequence
tgtatagttgaatgcgaggtgagaa

SEQ ID NO: 69552 - DNA, 25 bp, Probe sequence
ttgtatagttgaatgcgaggtgaga

SEQ ID NO: 69553 - DNA, 25 bp, Probe sequence
gcctccttatatgttcatctttact

SEQ ID NO: 69554 - DNA, 25 bp, Probe sequence
ttggcctccttatatgttcatcttt

SEQ ID NO: 69555 - DNA, 25 bp, Probe sequence
tttggcctccttatatgttcatctt

SEQ ID NO: 69556 - DNA, 25 bp, Probe sequence
atttggcctccttatatgttcatct

SEQ ID NO: 69557 - DNA, 25 bp, Probe sequence
gatttggcctccttatatgttcatc

SEQ ID NO: 69558 - DNA, 25 bp, Probe sequence
tggcctccttatatgttcatcttta

SEQ ID NO: 69559 - DNA, 25 bp, Probe sequence
ggcctccttatatgttcatctttac

SEQ ID NO: 69560 - DNA, 25 bp, Probe sequence
cctccttatatgttcatctttacta

SEQ ID NO: 69561 - DNA, 25 bp, Probe sequence
ttcaaaatttagaaatcccgagatt

SEQ ID NO: 69562 - DNA, 25 bp, Probe sequence
agtaaagatgaacatataaggaggc

SEQ ID NO: 69563 - DNA, 25 bp, Probe sequence
aagatgaacatataaggaggccaaa

SEQ ID NO: 69564 - DNA, 25 bp, Probe sequence
aaagatgaacatataaggaggccaa

SEQ ID NO: 69565 - DNA, 25 bp, Probe sequence
agatgaacatataaggaggccaaat

SEQ ID NO: 69566 - DNA, 25 bp, Probe sequence
gatgaacatataaggaggccaaatc

SEQ ID NO: 69567 - DNA, 25 bp, Probe sequence
taaagatgaacatataaggaggcca

SEQ ID NO: 69568 - DNA, 25 bp, Probe sequence
gtaaagatgaacatataaggaggcc

SEQ ID NO: 69569 - DNA, 25 bp, Probe sequence
tagtaaagatgaacatataaggagg

SEQ ID NO: 69570 - DNA, 25 bp, Probe sequence
aatctcgggatttctaaattttgaa

SEQ ID NO: 69571 - DNA, 25 bp, Probe sequence
tattcaatgtaccaacctcactcaa

SEQ ID NO: 69572 - DNA, 25 bp, Probe sequence
ttattcaatgtaccaacctcactca

SEQ ID NO: 69573 - DNA, 25 bp, Probe sequence
aatgtaccaacctcactcaagttaa

SEQ ID NO: 69574 - DNA, 25 bp, Probe sequence
attcaatgtaccaacctcactcaag

SEQ ID NO: 69575 - DNA, 25 bp, Probe sequence
attattcaatgtaccaacctcactc

SEQ ID NO: 69576 - DNA, 25 bp, Probe sequence
caatgtaccaacctcactcaagtta

SEQ ID NO: 69577 - DNA, 25 bp, Probe sequence
cgcttattcatgtcttggtatcaat

SEQ ID NO: 69578 - DNA, 25 bp, Probe sequence
ttcaatgtaccaacctcactcaagt

SEQ ID NO: 69579 - DNA, 25 bp, Probe sequence
tcaatgtaccaacctcactcaagtt

SEQ ID NO: 69580 - DNA, 25 bp, Probe sequence
tgagtgaggttggtacattgaataa

SEQ ID NO: 69581 - DNA, 25 bp, Probe sequence
ttgagtgaggttggtacattgaata

SEQ ID NO: 69582 - DNA, 25 bp, Probe sequence
cttgagtgaggttggtacattgaat

SEQ ID NO: 69583 - DNA, 25 bp, Probe sequence
ttaacttgagtgaggttggtacatt

SEQ ID NO: 69584 - DNA, 25 bp, Probe sequence
gagtgaggttggtacattgaataat

SEQ ID NO: 69585 - DNA, 25 bp, Probe sequence
taacttgagtgaggttggtacattg

SEQ ID NO: 69586 - DNA, 25 bp, Probe sequence
attgataccaagacatgaataagcg

SEQ ID NO: 69587 - DNA, 25 bp, Probe sequence
acttgagtgaggttggtacattgaa

SEQ ID NO: 69588 - DNA, 25 bp, Probe sequence
aacttgagtgaggttggtacattga

SEQ ID NO: 69589 - DNA, 25 bp, Probe sequence
ttcaatagtgttgtttaaatgcggt

SEQ ID NO: 69590 - DNA, 25 bp, Probe sequence
tgttgtttaaatgcggtaactatca

SEQ ID NO: 69591 - DNA, 25 bp, Probe sequence
gtgttgtttaaatgcggtaactatc

SEQ ID NO: 69592 - DNA, 25 bp, Probe sequence
tcaatagtgttgtttaaatgcggta

SEQ ID NO: 69593 - DNA, 25 bp, Probe sequence
tttcaatagtgttgtttaaatgcgg

SEQ ID NO: 69594 - DNA, 25 bp, Probe sequence
agtgttgtttaaatgcggtaactat

SEQ ID NO: 69595 - DNA, 25 bp, Probe sequence
atagtgttgtttaaatgcggtaact

SEQ ID NO: 69596 - DNA, 25 bp, Probe sequence
aatagtgttgtttaaatgcggtaac

SEQ ID NO: 69597 - DNA, 25 bp, Probe sequence
caatagtgttgtttaaatgcggtaa

SEQ ID NO: 69598 - DNA, 25 bp, Probe sequence
accgcatttaaacaacactattgaa

SEQ ID NO: 69599 - DNA, 25 bp, Probe sequence
tgatagttaccgcatttaaacaaca

SEQ ID NO: 69600 - DNA, 25 bp, Probe sequence
taccgcatttaaacaacactattga

SEQ ID NO: 69601 - DNA, 25 bp, Probe sequence
gatagttaccgcatttaaacaacac

SEQ ID NO: 69602 - DNA, 25 bp, Probe sequence
ccgcatttaaacaacactattgaaa

SEQ ID NO: 69603 - DNA, 25 bp, Probe sequence
agttaccgcatttaaacaacactat

SEQ ID NO: 69604 - DNA, 25 bp, Probe sequence
atagttaccgcatttaaacaacact

SEQ ID NO: 69605 - DNA, 25 bp, Probe sequence
gttaccgcatttaaacaacactatt

SEQ ID NO: 69606 - DNA, 25 bp, Probe sequence
ttaccgcatttaaacaacactattg

SEQ ID NO: 69607 - DNA, 25 bp, Probe sequence
tcacctattaagcattagttatact

SEQ ID NO: 69608 - DNA, 25 bp, Probe sequence
agtataactaatgcttaataggtga

SEQ ID NO: 69609 - DNA, 25 bp, Probe sequence
tacagcgagttaaggatagtgtaag

SEQ ID NO: 69610 - DNA, 25 bp, Probe sequence
acagcgagttaaggatagtgtaagc

SEQ ID NO: 69611 - DNA, 25 bp, Probe sequence
gtacagcgagttaaggatagtgtaa

SEQ ID NO: 69612 - DNA, 25 bp, Probe sequence
accgatatttctttcatgtcacaaa

SEQ ID NO: 69613 - DNA, 25 bp, Probe sequence
ccgatatttctttcatgtcacaaac

SEQ ID NO: 69614 - DNA, 25 bp, Probe sequence
cgtacagcgagttaaggatagtgta

SEQ ID NO: 69615 - DNA, 25 bp, Probe sequence
taccgatatttctttcatgtcacaa

SEQ ID NO: 69616 - DNA, 25 bp, Probe sequence
ataccgatatttctttcatgtcaca

SEQ ID NO: 69617 - DNA, 25 bp, Probe sequence
aacgtacagcgagttaaggatagtg

SEQ ID NO: 69618 - DNA, 25 bp, Probe sequence
cttacactatccttaactcgctgta

SEQ ID NO: 69619 - DNA, 25 bp, Probe sequence
gcttacactatccttaactcgctgt

SEQ ID NO: 69620 - DNA, 25 bp, Probe sequence
ttacactatccttaactcgctgtac

SEQ ID NO: 69621 - DNA, 25 bp, Probe sequence
tttgtgacatgaaagaaatatcggt

SEQ ID NO: 69622 - DNA, 25 bp, Probe sequence
gtttgtgacatgaaagaaatatcgg

SEQ ID NO: 69623 - DNA, 25 bp, Probe sequence
tacactatccttaactcgctgtacg

SEQ ID NO: 69624 - DNA, 25 bp, Probe sequence
ttgtgacatgaaagaaatatcggta

SEQ ID NO: 69625 - DNA, 25 bp, Probe sequence
tgtgacatgaaagaaatatcggtat

SEQ ID NO: 69626 - DNA, 25 bp, Probe sequence
cactatccttaactcgctgtacgtt

SEQ ID NO: 69627 - DNA, 25 bp, Probe sequence
catctatgtggctacttgaatacct

SEQ ID NO: 69628 - DNA, 25 bp, Probe sequence
atctatgtggctacttgaatacctt

SEQ ID NO: 69629 - DNA, 25 bp, Probe sequence
acatctatgtggctacttgaatacc

SEQ ID NO: 69630 - DNA, 25 bp, Probe sequence
tctatgtggctacttgaataccttt

SEQ ID NO: 69631 - DNA, 25 bp, Probe sequence
ctatgtggctacttgaatacctttt

SEQ ID NO: 69632 - DNA, 25 bp, Probe sequence
ggttagtaaaattgccagtatctct

SEQ ID NO: 69633 - DNA, 25 bp, Probe sequence
atgtggctacttgaataccttttat

SEQ ID NO: 69634 - DNA, 25 bp, Probe sequence
tgccagtatctcttttctattcaaa

SEQ ID NO: 69635 - DNA, 25 bp, Probe sequence
tgtggctacttgaataccttttatt

SEQ ID NO: 69636 - DNA, 25 bp, Probe sequence
aggtattcaagtagccacatagatg

SEQ ID NO: 69637 - DNA, 25 bp, Probe sequence
aaggtattcaagtagccacatagat

SEQ ID NO: 69638 - DNA, 25 bp, Probe sequence
ggtattcaagtagccacatagatgt

SEQ ID NO: 69639 - DNA, 25 bp, Probe sequence
aaaggtattcaagtagccacataga

SEQ ID NO: 69640 - DNA, 25 bp, Probe sequence
aaaaggtattcaagtagccacatag

SEQ ID NO: 69641 - DNA, 25 bp, Probe sequence
agagatactggcaattttactaacc

SEQ ID NO: 69642 - DNA, 25 bp, Probe sequence
tttgaatagaaaagagatactggca

SEQ ID NO: 69643 - DNA, 25 bp, Probe sequence
ataaaaggtattcaagtagccacat

SEQ ID NO: 69644 - DNA, 25 bp, Probe sequence
aataaaaggtattcaagtagccaca

SEQ ID NO: 69645 - DNA, 25 bp, Probe sequence
aaacatctttgcattgacttactca

SEQ ID NO: 69646 - DNA, 25 bp, Probe sequence
acatctttgcattgacttactcatt

SEQ ID NO: 69647 - DNA, 25 bp, Probe sequence
aacatctttgcattgacttactcat

SEQ ID NO: 69648 - DNA, 25 bp, Probe sequence
ttcaccttgtcataaaagcagtttc

SEQ ID NO: 69649 - DNA, 25 bp, Probe sequence
tttcaccttgtcataaaagcagttt

SEQ ID NO: 69650 - DNA, 25 bp, Probe sequence
tgatttaaacatctttgcattgact

SEQ ID NO: 69651 - DNA, 25 bp, Probe sequence
catctttgcattgacttactcattt

SEQ ID NO: 69652 - DNA, 25 bp, Probe sequence
taaacatctttgcattgacttactc

SEQ ID NO: 69653 - DNA, 25 bp, Probe sequence
accttgtcataaaagcagtttcaat

SEQ ID NO: 69654 - DNA, 25 bp, Probe sequence
tgagtaagtcaatgcaaagatgttt

SEQ ID NO: 69655 - DNA, 25 bp, Probe sequence
atgagtaagtcaatgcaaagatgtt

SEQ ID NO: 69656 - DNA, 25 bp, Probe sequence
aatgagtaagtcaatgcaaagatgt

SEQ ID NO: 69657 - DNA, 25 bp, Probe sequence
agtcaatgcaaagatgtttaaatca

SEQ ID NO: 69658 - DNA, 25 bp, Probe sequence
aaactgcttttatgacaaggtgaaa

SEQ ID NO: 69659 - DNA, 25 bp, Probe sequence
gaaactgcttttatgacaaggtgaa

SEQ ID NO: 69660 - DNA, 25 bp, Probe sequence
aaatgagtaagtcaatgcaaagatg

SEQ ID NO: 69661 - DNA, 25 bp, Probe sequence
gagtaagtcaatgcaaagatgttta

SEQ ID NO: 69662 - DNA, 25 bp, Probe sequence
ttgaaactgcttttatgacaaggtg

SEQ ID NO: 69663 - DNA, 25 bp, Probe sequence
cctcgccctcacattaattatacat

SEQ ID NO: 69664 - DNA, 25 bp, Probe sequence
ctcgccctcacattaattatacatg

SEQ ID NO: 69665 - DNA, 25 bp, Probe sequence
aattaatattcgtgttgagggagtc

SEQ ID NO: 69666 - DNA, 25 bp, Probe sequence
gtcagacactaacttgtgatgttta

SEQ ID NO: 69667 - DNA, 25 bp, Probe sequence
cacctcgccctcacattaattatac

SEQ ID NO: 69668 - DNA, 25 bp, Probe sequence
tcacctcgccctcacattaattata

SEQ ID NO: 69669 - DNA, 25 bp, Probe sequence
attaatattcgtgttgagggagtca

SEQ ID NO: 69670 - DNA, 25 bp, Probe sequence
tcgccctcacattaattatacatga

SEQ ID NO: 69671 - DNA, 25 bp, Probe sequence
cgccctcacattaattatacatgaa

SEQ ID NO: 69672 - DNA, 25 bp, Probe sequence
atgtataattaatgtgagggcgagg

SEQ ID NO: 69673 - DNA, 25 bp, Probe sequence
catgtataattaatgtgagggcgag

SEQ ID NO: 69674 - DNA, 25 bp, Probe sequence
gactccctcaacacgaatattaatt

SEQ ID NO: 69675 - DNA, 25 bp, Probe sequence
taaacatcacaagttagtgtctgac

SEQ ID NO: 69676 - DNA, 25 bp, Probe sequence
tataattaatgtgagggcgaggtga

SEQ ID NO: 69677 - DNA, 25 bp, Probe sequence
gtataattaatgtgagggcgaggtg

SEQ ID NO: 69678 - DNA, 25 bp, Probe sequence
tcatgtataattaatgtgagggcga

SEQ ID NO: 69679 - DNA, 25 bp, Probe sequence
tgactccctcaacacgaatattaat

SEQ ID NO: 69680 - DNA, 25 bp, Probe sequence
ttcatgtataattaatgtgagggcg

SEQ ID NO: 69681 - DNA, 25 bp, Probe sequence
tacggaaccttatggtatgaatcaa

SEQ ID NO: 69682 - DNA, 25 bp, Probe sequence
acggaaccttatggtatgaatcaag

SEQ ID NO: 69683 - DNA, 25 bp, Probe sequence
atacggaaccttatggtatgaatca

SEQ ID NO: 69684 - DNA, 25 bp, Probe sequence
aatacggaaccttatggtatgaatc

SEQ ID NO: 69685 - DNA, 25 bp, Probe sequence
ttaatacggaaccttatggtatgaa

SEQ ID NO: 69686 - DNA, 25 bp, Probe sequence
taatacggaaccttatggtatgaat

SEQ ID NO: 69687 - DNA, 25 bp, Probe sequence
ccctccaaatatcaacggaacttta

SEQ ID NO: 69688 - DNA, 25 bp, Probe sequence
cctccaaatatcaacggaactttat

SEQ ID NO: 69689 - DNA, 25 bp, Probe sequence
acctatatctttaatacggaacctt

SEQ ID NO: 69690 - DNA, 25 bp, Probe sequence
ttgattcataccataaggttccgta

SEQ ID NO: 69691 - DNA, 25 bp, Probe sequence
cttgattcataccataaggttccgt

SEQ ID NO: 69692 - DNA, 25 bp, Probe sequence
tgattcataccataaggttccgtat

SEQ ID NO: 69693 - DNA, 25 bp, Probe sequence
gattcataccataaggttccgtatt

SEQ ID NO: 69694 - DNA, 25 bp, Probe sequence
ttcataccataaggttccgtattaa

SEQ ID NO: 69695 - DNA, 25 bp, Probe sequence
attcataccataaggttccgtatta

SEQ ID NO: 69696 - DNA, 25 bp, Probe sequence
taaagttccgttgatatttggaggg

SEQ ID NO: 69697 - DNA, 25 bp, Probe sequence
ataaagttccgttgatatttggagg

SEQ ID NO: 69698 - DNA, 25 bp, Probe sequence
aggttccgtattaaagatataggtt

SEQ ID NO: 69699 - DNA, 25 bp, Probe sequence
gccaatgttctattgactttgactt

SEQ ID NO: 69700 - DNA, 25 bp, Probe sequence
aagccaatgttctattgactttgac

SEQ ID NO: 69701 - DNA, 25 bp, Probe sequence
ccaaagccaatgttctattgacttt

SEQ ID NO: 69702 - DNA, 25 bp, Probe sequence
agccaatgttctattgactttgact

SEQ ID NO: 69703 - DNA, 25 bp, Probe sequence
aaagccaatgttctattgactttga

SEQ ID NO: 69704 - DNA, 25 bp, Probe sequence
aaagccaaagccaatgttctattga

SEQ ID NO: 69705 - DNA, 25 bp, Probe sequence
ccaatgttctattgactttgacttt

SEQ ID NO: 69706 - DNA, 25 bp, Probe sequence
gccaaagccaatgttctattgactt

SEQ ID NO: 69707 - DNA, 25 bp, Probe sequence
aagccaaagccaatgttctattgac

SEQ ID NO: 69708 - DNA, 25 bp, Probe sequence
aaagtcaatagaacattggctttgg

SEQ ID NO: 69709 - DNA, 25 bp, Probe sequence
gtcaaagtcaatagaacattggctt

SEQ ID NO: 69710 - DNA, 25 bp, Probe sequence
aagtcaaagtcaatagaacattggc

SEQ ID NO: 69711 - DNA, 25 bp, Probe sequence
tcaaagtcaatagaacattggcttt

SEQ ID NO: 69712 - DNA, 25 bp, Probe sequence
agtcaaagtcaatagaacattggct

SEQ ID NO: 69713 - DNA, 25 bp, Probe sequence
tcaatagaacattggctttggcttt

SEQ ID NO: 69714 - DNA, 25 bp, Probe sequence
aaagtcaaagtcaatagaacattgg

SEQ ID NO: 69715 - DNA, 25 bp, Probe sequence
gtcaatagaacattggctttggctt

SEQ ID NO: 69716 - DNA, 25 bp, Probe sequence
aagtcaatagaacattggctttggc

SEQ ID NO: 69717 - DNA, 25 bp, Probe sequence
ttaaacaatgtcttttcgccaaatt

SEQ ID NO: 69718 - DNA, 25 bp, Probe sequence
ttttaaacaatgtcttttcgccaaa

SEQ ID NO: 69719 - DNA, 25 bp, Probe sequence
tttaaacaatgtcttttcgccaaat

SEQ ID NO: 69720 - DNA, 25 bp, Probe sequence
attttaaacaatgtcttttcgccaa

SEQ ID NO: 69721 - DNA, 25 bp, Probe sequence
aattttaaacaatgtcttttcgcca

SEQ ID NO: 69722 - DNA, 25 bp, Probe sequence
acaatgtcttttcgccaaatttaag

SEQ ID NO: 69723 - DNA, 25 bp, Probe sequence
aacaatgtcttttcgccaaatttaa

SEQ ID NO: 69724 - DNA, 25 bp, Probe sequence
aaacaatgtcttttcgccaaattta

SEQ ID NO: 69725 - DNA, 25 bp, Probe sequence
taaacaatgtcttttcgccaaattt

SEQ ID NO: 69726 - DNA, 25 bp, Probe sequence
aatttggcgaaaagacattgtttaa

SEQ ID NO: 69727 - DNA, 25 bp, Probe sequence
tttggcgaaaagacattgtttaaaa

SEQ ID NO: 69728 - DNA, 25 bp, Probe sequence
tggcgaaaagacattgtttaaaatt

SEQ ID NO: 69729 - DNA, 25 bp, Probe sequence
ttggcgaaaagacattgtttaaaat

SEQ ID NO: 69730 - DNA, 25 bp, Probe sequence
atttggcgaaaagacattgtttaaa

SEQ ID NO: 69731 - DNA, 25 bp, Probe sequence
cttaaatttggcgaaaagacattgt

SEQ ID NO: 69732 - DNA, 25 bp, Probe sequence
aaatttggcgaaaagacattgttta

SEQ ID NO: 69733 - DNA, 25 bp, Probe sequence
taaatttggcgaaaagacattgttt

SEQ ID NO: 69734 - DNA, 25 bp, Probe sequence
ttaaatttggcgaaaagacattgtt

SEQ ID NO: 69735 - DNA, 25 bp, Probe sequence
cctcattagcactcacttatctcaa

SEQ ID NO: 69736 - DNA, 25 bp, Probe sequence
ttcacctcattagcactcacttatc

SEQ ID NO: 69737 - DNA, 25 bp, Probe sequence
cacctcattagcactcacttatctc

SEQ ID NO: 69738 - DNA, 25 bp, Probe sequence
acctcattagcactcacttatctca

SEQ ID NO: 69739 - DNA, 25 bp, Probe sequence
tcacctcattagcactcacttatct

SEQ ID NO: 69740 - DNA, 25 bp, Probe sequence
ctcattagcactcacttatctcaag

SEQ ID NO: 69741 - DNA, 25 bp, Probe sequence
tttcacctcattagcactcacttat

SEQ ID NO: 69742 - DNA, 25 bp, Probe sequence
tcattagcactcacttatctcaagt

SEQ ID NO: 69743 - DNA, 25 bp, Probe sequence
tggtcaaagtaagtcaatgttaaag

SEQ ID NO: 69744 - DNA, 25 bp, Probe sequence
ttgagataagtgagtgctaatgagg

SEQ ID NO: 69745 - DNA, 25 bp, Probe sequence
gataagtgagtgctaatgaggtgaa

SEQ ID NO: 69746 - DNA, 25 bp, Probe sequence
gagataagtgagtgctaatgaggtg

SEQ ID NO: 69747 - DNA, 25 bp, Probe sequence
agataagtgagtgctaatgaggtga

SEQ ID NO: 69748 - DNA, 25 bp, Probe sequence
tgagataagtgagtgctaatgaggt

SEQ ID NO: 69749 - DNA, 25 bp, Probe sequence
cttgagataagtgagtgctaatgag

SEQ ID NO: 69750 - DNA, 25 bp, Probe sequence
ataagtgagtgctaatgaggtgaaa

SEQ ID NO: 69751 - DNA, 25 bp, Probe sequence
acttgagataagtgagtgctaatga

SEQ ID NO: 69752 - DNA, 25 bp, Probe sequence
ctttaacattgacttactttgacca

SEQ ID NO: 69753 - DNA, 25 bp, Probe sequence
tgttggactatctgctgttattctt

SEQ ID NO: 69754 - DNA, 25 bp, Probe sequence
ctgttggactatctgctgttattct

SEQ ID NO: 69755 - DNA, 25 bp, Probe sequence
tggactatctgctgttattcttact

SEQ ID NO: 69756 - DNA, 25 bp, Probe sequence
cctgttggactatctgctgttattc

SEQ ID NO: 69757 - DNA, 25 bp, Probe sequence
ttggactatctgctgttattcttac

SEQ ID NO: 69758 - DNA, 25 bp, Probe sequence
gttggactatctgctgttattctta

SEQ ID NO: 69759 - DNA, 25 bp, Probe sequence
cattagccagatgtaatatgtcctt

SEQ ID NO: 69760 - DNA, 25 bp, Probe sequence
ggactatctgctgttattcttactt

SEQ ID NO: 69761 - DNA, 25 bp, Probe sequence
atcctgttggactatctgctgttat

SEQ ID NO: 69762 - DNA, 25 bp, Probe sequence
aagaataacagcagatagtccaaca

SEQ ID NO: 69763 - DNA, 25 bp, Probe sequence
agaataacagcagatagtccaacag

SEQ ID NO: 69764 - DNA, 25 bp, Probe sequence
agtaagaataacagcagatagtcca

SEQ ID NO: 69765 - DNA, 25 bp, Probe sequence
gaataacagcagatagtccaacagg

SEQ ID NO: 69766 - DNA, 25 bp, Probe sequence
taagaataacagcagatagtccaac

SEQ ID NO: 69767 - DNA, 25 bp, Probe sequence
gtaagaataacagcagatagtccaa

SEQ ID NO: 69768 - DNA, 25 bp, Probe sequence
aaggacatattacatctggctaatg

SEQ ID NO: 69769 - DNA, 25 bp, Probe sequence
aagtaagaataacagcagatagtcc

SEQ ID NO: 69770 - DNA, 25 bp, Probe sequence
ataacagcagatagtccaacaggat

SEQ ID NO: 69771 - DNA, 25 bp, Probe sequence
atataacattgtaaagcccaggacg

SEQ ID NO: 69772 - DNA, 25 bp, Probe sequence
aatataacattgtaaagcccaggac

SEQ ID NO: 69773 - DNA, 25 bp, Probe sequence
cgatgactgccaatataacattgta

SEQ ID NO: 69774 - DNA, 25 bp, Probe sequence
tgtcgatgactgccaatataacatt

SEQ ID NO: 69775 - DNA, 25 bp, Probe sequence
ctgtcgatgactgccaatataacat

SEQ ID NO: 69776 - DNA, 25 bp, Probe sequence
ctctgtcgatgactgccaatataac

SEQ ID NO: 69777 - DNA, 25 bp, Probe sequence
actctgtcgatgactgccaatataa

SEQ ID NO: 69778 - DNA, 25 bp, Probe sequence
aactctgtcgatgactgccaatata

SEQ ID NO: 69779 - DNA, 25 bp, Probe sequence
taactctgtcgatgactgccaatat

SEQ ID NO: 69780 - DNA, 25 bp, Probe sequence
gtcctgggctttacaatgttatatt

SEQ ID NO: 69781 - DNA, 25 bp, Probe sequence
cgtcctgggctttacaatgttatat

SEQ ID NO: 69782 - DNA, 25 bp, Probe sequence
tacaatgttatattggcagtcatcg

SEQ ID NO: 69783 - DNA, 25 bp, Probe sequence
aatgttatattggcagtcatcgaca

SEQ ID NO: 69784 - DNA, 25 bp, Probe sequence
atgttatattggcagtcatcgacag

SEQ ID NO: 69785 - DNA, 25 bp, Probe sequence
gttatattggcagtcatcgacagag

SEQ ID NO: 69786 - DNA, 25 bp, Probe sequence
atattggcagtcatcgacagagtta

SEQ ID NO: 69787 - DNA, 25 bp, Probe sequence
tatattggcagtcatcgacagagtt

SEQ ID NO: 69788 - DNA, 25 bp, Probe sequence
ttatattggcagtcatcgacagagt

SEQ ID NO: 69789 - DNA, 25 bp, Probe sequence
taaacccgtattatctttcgcatct

SEQ ID NO: 69790 - DNA, 25 bp, Probe sequence
ccgtattatctttcgcatctttgat

SEQ ID NO: 69791 - DNA, 25 bp, Probe sequence
aacccgtattatctttcgcatcttt

SEQ ID NO: 69792 - DNA, 25 bp, Probe sequence
aaacccgtattatctttcgcatctt

SEQ ID NO: 69793 - DNA, 25 bp, Probe sequence
ataaacccgtattatctttcgcatc

SEQ ID NO: 69794 - DNA, 25 bp, Probe sequence
cccgtattatctttcgcatctttga

SEQ ID NO: 69795 - DNA, 25 bp, Probe sequence
aaataaacccgtattatctttcgca

SEQ ID NO: 69796 - DNA, 25 bp, Probe sequence
acccgtattatctttcgcatctttg

SEQ ID NO: 69797 - DNA, 25 bp, Probe sequence
aataaacccgtattatctttcgcat

SEQ ID NO: 69798 - DNA, 25 bp, Probe sequence
agatgcgaaagataatacgggttta

SEQ ID NO: 69799 - DNA, 25 bp, Probe sequence
atcaaagatgcgaaagataatacgg

SEQ ID NO: 69800 - DNA, 25 bp, Probe sequence
aaagatgcgaaagataatacgggtt

SEQ ID NO: 69801 - DNA, 25 bp, Probe sequence
aagatgcgaaagataatacgggttt

SEQ ID NO: 69802 - DNA, 25 bp, Probe sequence
gatgcgaaagataatacgggtttat

SEQ ID NO: 69803 - DNA, 25 bp, Probe sequence
tcaaagatgcgaaagataatacggg

SEQ ID NO: 69804 - DNA, 25 bp, Probe sequence
tgcgaaagataatacgggtttattt

SEQ ID NO: 69805 - DNA, 25 bp, Probe sequence
atgcgaaagataatacgggtttatt

SEQ ID NO: 69806 - DNA, 25 bp, Probe sequence
caaagatgcgaaagataatacgggt

SEQ ID NO: 69807 - DNA, 25 bp, Probe sequence
cattacaccctttcattcgtttgac

SEQ ID NO: 69808 - DNA, 25 bp, Probe sequence
tcattacaccctttcattcgtttga

SEQ ID NO: 69809 - DNA, 25 bp, Probe sequence
attacaccctttcattcgtttgaca

SEQ ID NO: 69810 - DNA, 25 bp, Probe sequence
ttacaccctttcattcgtttgacac

SEQ ID NO: 69811 - DNA, 25 bp, Probe sequence
caccctttcattcgtttgacacatc

SEQ ID NO: 69812 - DNA, 25 bp, Probe sequence
tacaccctttcattcgtttgacaca

SEQ ID NO: 69813 - DNA, 25 bp, Probe sequence
accctttcattcgtttgacacatca

SEQ ID NO: 69814 - DNA, 25 bp, Probe sequence
cctttcattcgtttgacacatcaat

SEQ ID NO: 69815 - DNA, 25 bp, Probe sequence
acaccctttcattcgtttgacacat

SEQ ID NO: 69816 - DNA, 25 bp, Probe sequence
tcaaacgaatgaaagggtgtaatga

SEQ ID NO: 69817 - DNA, 25 bp, Probe sequence
gtcaaacgaatgaaagggtgtaatg

SEQ ID NO: 69818 - DNA, 25 bp, Probe sequence
tgtcaaacgaatgaaagggtgtaat

SEQ ID NO: 69819 - DNA, 25 bp, Probe sequence
gtgtcaaacgaatgaaagggtgtaa

SEQ ID NO: 69820 - DNA, 25 bp, Probe sequence
tgtgtcaaacgaatgaaagggtgta

SEQ ID NO: 69821 - DNA, 25 bp, Probe sequence
gatgtgtcaaacgaatgaaagggtg

SEQ ID NO: 69822 - DNA, 25 bp, Probe sequence
tgatgtgtcaaacgaatgaaagggt

SEQ ID NO: 69823 - DNA, 25 bp, Probe sequence
attgatgtgtcaaacgaatgaaagg

SEQ ID NO: 69824 - DNA, 25 bp, Probe sequence
atgtgtcaaacgaatgaaagggtgt

SEQ ID NO: 69825 - DNA, 25 bp, Probe sequence
gatgttcaccttccatacttaaaat

SEQ ID NO: 69826 - DNA, 25 bp, Probe sequence
atgttcaccttccatacttaaaatt

SEQ ID NO: 69827 - DNA, 25 bp, Probe sequence
tgttcaccttccatacttaaaattt

SEQ ID NO: 69828 - DNA, 25 bp, Probe sequence
tcaccttccatacttaaaatttagt

SEQ ID NO: 69829 - DNA, 25 bp, Probe sequence
gttcaccttccatacttaaaattta

SEQ ID NO: 69830 - DNA, 25 bp, Probe sequence
ttcaccttccatacttaaaatttag

SEQ ID NO: 69831 - DNA, 25 bp, Probe sequence
attttaagtatggaaggtgaacatc

SEQ ID NO: 69832 - DNA, 25 bp, Probe sequence
aattttaagtatggaaggtgaacat

SEQ ID NO: 69833 - DNA, 25 bp, Probe sequence
aaattttaagtatggaaggtgaaca

SEQ ID NO: 69834 - DNA, 25 bp, Probe sequence
actaaattttaagtatggaaggtga

SEQ ID NO: 69835 - DNA, 25 bp, Probe sequence
taaattttaagtatggaaggtgaac

SEQ ID NO: 69836 - DNA, 25 bp, Probe sequence
ctaaattttaagtatggaaggtgaa

SEQ ID NO: 69837 - DNA, 25 bp, Probe sequence
aattacatcaaccaatcgtgtcaag

SEQ ID NO: 69838 - DNA, 25 bp, Probe sequence
atcaattacatcaaccaatcgtgtc

SEQ ID NO: 69839 - DNA, 25 bp, Probe sequence
caattacatcaaccaatcgtgtcaa

SEQ ID NO: 69840 - DNA, 25 bp, Probe sequence
attacatcaaccaatcgtgtcaaga

SEQ ID NO: 69841 - DNA, 25 bp, Probe sequence
ttacatcaaccaatcgtgtcaagaa

SEQ ID NO: 69842 - DNA, 25 bp, Probe sequence
tcaattacatcaaccaatcgtgtca

SEQ ID NO: 69843 - DNA, 25 bp, Probe sequence
tatcaattacatcaaccaatcgtgt

SEQ ID NO: 69844 - DNA, 25 bp, Probe sequence
atatcaattacatcaaccaatcgtg

SEQ ID NO: 69845 - DNA, 25 bp, Probe sequence
catatcaattacatcaaccaatcgt

SEQ ID NO: 69846 - DNA, 25 bp, Probe sequence
gacacgattggttgatgtaattgat

SEQ ID NO: 69847 - DNA, 25 bp, Probe sequence
cttgacacgattggttgatgtaatt

SEQ ID NO: 69848 - DNA, 25 bp, Probe sequence
ttgacacgattggttgatgtaattg

SEQ ID NO: 69849 - DNA, 25 bp, Probe sequence
tcttgacacgattggttgatgtaat

SEQ ID NO: 69850 - DNA, 25 bp, Probe sequence
ttcttgacacgattggttgatgtaa

SEQ ID NO: 69851 - DNA, 25 bp, Probe sequence
tgacacgattggttgatgtaattga

SEQ ID NO: 69852 - DNA, 25 bp, Probe sequence
acacgattggttgatgtaattgata

SEQ ID NO: 69853 - DNA, 25 bp, Probe sequence
acgattggttgatgtaattgatatg

SEQ ID NO: 69854 - DNA, 25 bp, Probe sequence
cacgattggttgatgtaattgatat

SEQ ID NO: 69855 - DNA, 25 bp, Probe sequence
ttctaagtgttagcatccttactgc

SEQ ID NO: 69856 - DNA, 25 bp, Probe sequence
tttctaagtgttagcatccttactg

SEQ ID NO: 69857 - DNA, 25 bp, Probe sequence
cgtatcgaattcctgtgtgcattaa

SEQ ID NO: 69858 - DNA, 25 bp, Probe sequence
acacagttaatcatatttgtttcgt

SEQ ID NO: 69859 - DNA, 25 bp, Probe sequence
tcctgtgtgcattaaagataattct

SEQ ID NO: 69860 - DNA, 25 bp, Probe sequence
catccttactgctgttttcatttgt

SEQ ID NO: 69861 - DNA, 25 bp, Probe sequence
tgtcaggtactttatatttcactgt

SEQ ID NO: 69862 - DNA, 25 bp, Probe sequence
gtatcgaattcctgtgtgcattaaa

SEQ ID NO: 69863 - DNA, 25 bp, Probe sequence
cgaattcctgtgtgcattaaagata

SEQ ID NO: 69864 - DNA, 25 bp, Probe sequence
gcagtaaggatgctaacacttagaa

SEQ ID NO: 69865 - DNA, 25 bp, Probe sequence
cagtaaggatgctaacacttagaaa

SEQ ID NO: 69866 - DNA, 25 bp, Probe sequence
ttaatgcacacaggaattcgatacg

SEQ ID NO: 69867 - DNA, 25 bp, Probe sequence
acgaaacaaatatgattaactgtgt

SEQ ID NO: 69868 - DNA, 25 bp, Probe sequence
agaattatctttaatgcacacagga

SEQ ID NO: 69869 - DNA, 25 bp, Probe sequence
acaaatgaaaacagcagtaaggatg

SEQ ID NO: 69870 - DNA, 25 bp, Probe sequence
acagtgaaatataaagtacctgaca

SEQ ID NO: 69871 - DNA, 25 bp, Probe sequence
tttaatgcacacaggaattcgatac

SEQ ID NO: 69872 - DNA, 25 bp, Probe sequence
ctttaatgcacacaggaattcgata

SEQ ID NO: 69873 - DNA, 25 bp, Probe sequence
cctgttcgcaattattagttgagtt

SEQ ID NO: 69874 - DNA, 25 bp, Probe sequence
ctgttcgcaattattagttgagtta

SEQ ID NO: 69875 - DNA, 25 bp, Probe sequence
tgagttatatcaaccaatacagtgt

SEQ ID NO: 69876 - DNA, 25 bp, Probe sequence
gtgggacgacgataaagaaatactt

SEQ ID NO: 69877 - DNA, 25 bp, Probe sequence
taccctgttcgcaattattagttga

SEQ ID NO: 69878 - DNA, 25 bp, Probe sequence
ataccctgttcgcaattattagttg

SEQ ID NO: 69879 - DNA, 25 bp, Probe sequence
ttgaaataccctgttcgcaattatt

SEQ ID NO: 69880 - DNA, 25 bp, Probe sequence
tttgaaataccctgttcgcaattat

SEQ ID NO: 69881 - DNA, 25 bp, Probe sequence
atttgaaataccctgttcgcaatta

SEQ ID NO: 69882 - DNA, 25 bp, Probe sequence
aactcaactaataattgcgaacagg

SEQ ID NO: 69883 - DNA, 25 bp, Probe sequence
taactcaactaataattgcgaacag

SEQ ID NO: 69884 - DNA, 25 bp, Probe sequence
acactgtattggttgatataactca

SEQ ID NO: 69885 - DNA, 25 bp, Probe sequence
aagtatttctttatcgtcgtcccac

SEQ ID NO: 69886 - DNA, 25 bp, Probe sequence
tcaactaataattgcgaacagggta

SEQ ID NO: 69887 - DNA, 25 bp, Probe sequence
taattgcgaacagggtatttcaaat

SEQ ID NO: 69888 - DNA, 25 bp, Probe sequence
ataattgcgaacagggtatttcaaa

SEQ ID NO: 69889 - DNA, 25 bp, Probe sequence
aataattgcgaacagggtatttcaa

SEQ ID NO: 69890 - DNA, 25 bp, Probe sequence
caactaataattgcgaacagggtat

SEQ ID NO: 69891 - DNA, 25 bp, Probe sequence
ttgcagcctcctctactcatttaaa

SEQ ID NO: 69892 - DNA, 25 bp, Probe sequence
gcagcctcctctactcatttaaaat

SEQ ID NO: 69893 - DNA, 25 bp, Probe sequence
tgcagcctcctctactcatttaaaa

SEQ ID NO: 69894 - DNA, 25 bp, Probe sequence
agcctcctctactcatttaaaatgt

SEQ ID NO: 69895 - DNA, 25 bp, Probe sequence
cagcctcctctactcatttaaaatg

SEQ ID NO: 69896 - DNA, 25 bp, Probe sequence
gcctcctctactcatttaaaatgta

SEQ ID NO: 69897 - DNA, 25 bp, Probe sequence
tttgtccaataaatccattttcatt

SEQ ID NO: 69898 - DNA, 25 bp, Probe sequence
ttttgtccaataaatccattttcat

SEQ ID NO: 69899 - DNA, 25 bp, Probe sequence
tgtccaataaatccattttcattag

SEQ ID NO: 69900 - DNA, 25 bp, Probe sequence
tttaaatgagtagaggaggctgcaa

SEQ ID NO: 69901 - DNA, 25 bp, Probe sequence
attttaaatgagtagaggaggctgc

SEQ ID NO: 69902 - DNA, 25 bp, Probe sequence
ttttaaatgagtagaggaggctgca

SEQ ID NO: 69903 - DNA, 25 bp, Probe sequence
acattttaaatgagtagaggaggct

SEQ ID NO: 69904 - DNA, 25 bp, Probe sequence
cattttaaatgagtagaggaggctg

SEQ ID NO: 69905 - DNA, 25 bp, Probe sequence
tacattttaaatgagtagaggaggc

SEQ ID NO: 69906 - DNA, 25 bp, Probe sequence
atgaaaatggatttattggacaaaa

SEQ ID NO: 69907 - DNA, 25 bp, Probe sequence
aatgaaaatggatttattggacaaa

SEQ ID NO: 69908 - DNA, 25 bp, Probe sequence
ctaatgaaaatggatttattggaca

SEQ ID NO: 69909 - DNA, 25 bp, Probe sequence
acatttacagtgatgctattagtcg

SEQ ID NO: 69910 - DNA, 25 bp, Probe sequence
actaacaacatttacagtgatgcta

SEQ ID NO: 69911 - DNA, 25 bp, Probe sequence
tactaacaacatttacagtgatgct

SEQ ID NO: 69912 - DNA, 25 bp, Probe sequence
agtgatgctattagtcgaaatgtct

SEQ ID NO: 69913 - DNA, 25 bp, Probe sequence
cagtgatgctattagtcgaaatgtc

SEQ ID NO: 69914 - DNA, 25 bp, Probe sequence
gtgatgctattagtcgaaatgtctt

SEQ ID NO: 69915 - DNA, 25 bp, Probe sequence
atactaacaacatttacagtgatgc

SEQ ID NO: 69916 - DNA, 25 bp, Probe sequence
caacatttacagtgatgctattagt

SEQ ID NO: 69917 - DNA, 25 bp, Probe sequence
acaacatttacagtgatgctattag

SEQ ID NO: 69918 - DNA, 25 bp, Probe sequence
cgactaatagcatcactgtaaatgt

SEQ ID NO: 69919 - DNA, 25 bp, Probe sequence
agcatcactgtaaatgttgttagta

SEQ ID NO: 69920 - DNA, 25 bp, Probe sequence
tagcatcactgtaaatgttgttagt

SEQ ID NO: 69921 - DNA, 25 bp, Probe sequence
gacatttcgactaatagcatcactg

SEQ ID NO: 69922 - DNA, 25 bp, Probe sequence
agacatttcgactaatagcatcact

SEQ ID NO: 69923 - DNA, 25 bp, Probe sequence
aagacatttcgactaatagcatcac

SEQ ID NO: 69924 - DNA, 25 bp, Probe sequence
gcatcactgtaaatgttgttagtat

SEQ ID NO: 69925 - DNA, 25 bp, Probe sequence
atagcatcactgtaaatgttgttag

SEQ ID NO: 69926 - DNA, 25 bp, Probe sequence
ctaatagcatcactgtaaatgttgt

SEQ ID NO: 69927 - DNA, 25 bp, Probe sequence
agtatcattaacacacttcaatcgc

SEQ ID NO: 69928 - DNA, 25 bp, Probe sequence
cacgaccgaagtatcattaacacac

SEQ ID NO: 69929 - DNA, 25 bp, Probe sequence
ttaggttctgctatcattcggtctg

SEQ ID NO: 69930 - DNA, 25 bp, Probe sequence
gtatcattgagaagcacaagttgtt

SEQ ID NO: 69931 - DNA, 25 bp, Probe sequence
acgaccgaagtatcattaacacact

SEQ ID NO: 69932 - DNA, 25 bp, Probe sequence
tgtatcattgagaagcacaagttgt

SEQ ID NO: 69933 - DNA, 25 bp, Probe sequence
aagcacgaccgaagtatcattaaca

SEQ ID NO: 69934 - DNA, 25 bp, Probe sequence
atttaggttctgctatcattcggtc

SEQ ID NO: 69935 - DNA, 25 bp, Probe sequence
aatttaggttctgctatcattcggt

SEQ ID NO: 69936 - DNA, 25 bp, Probe sequence
gcgattgaagtgtgttaatgatact

SEQ ID NO: 69937 - DNA, 25 bp, Probe sequence
gtgtgttaatgatacttcggtcgtg

SEQ ID NO: 69938 - DNA, 25 bp, Probe sequence
cagaccgaatgatagcagaacctaa

SEQ ID NO: 69939 - DNA, 25 bp, Probe sequence
aacaacttgtgcttctcaatgatac

SEQ ID NO: 69940 - DNA, 25 bp, Probe sequence
agtgtgttaatgatacttcggtcgt

SEQ ID NO: 69941 - DNA, 25 bp, Probe sequence
acaacttgtgcttctcaatgataca

SEQ ID NO: 69942 - DNA, 25 bp, Probe sequence
tgttaatgatacttcggtcgtgctt

SEQ ID NO: 69943 - DNA, 25 bp, Probe sequence
gaccgaatgatagcagaacctaaat

SEQ ID NO: 69944 - DNA, 25 bp, Probe sequence
accgaatgatagcagaacctaaatt

SEQ ID NO: 69945 - DNA, 25 bp, Probe sequence
aaatactcttgcctacccatcttaa

SEQ ID NO: 69946 - DNA, 25 bp, Probe sequence
ttgccaaccaattaaatgactgatt

SEQ ID NO: 69947 - DNA, 25 bp, Probe sequence
tttgccaaccaattaaatgactgat

SEQ ID NO: 69948 - DNA, 25 bp, Probe sequence
gactgatttcttgttagacgcaaag

SEQ ID NO: 69949 - DNA, 25 bp, Probe sequence
aatgactgatttcttgttagacgca

SEQ ID NO: 69950 - DNA, 25 bp, Probe sequence
atgactgatttcttgttagacgcaa

SEQ ID NO: 69951 - DNA, 25 bp, Probe sequence
tgactgatttcttgttagacgcaaa

SEQ ID NO: 69952 - DNA, 25 bp, Probe sequence
aaatgactgatttcttgttagacgc

SEQ ID NO: 69953 - DNA, 25 bp, Probe sequence
tgccaaccaattaaatgactgattt

SEQ ID NO: 69954 - DNA, 25 bp, Probe sequence
ttaagatgggtaggcaagagtattt

SEQ ID NO: 69955 - DNA, 25 bp, Probe sequence
atcagtcatttaattggttggcaaa

SEQ ID NO: 69956 - DNA, 25 bp, Probe sequence
aatcagtcatttaattggttggcaa

SEQ ID NO: 69957 - DNA, 25 bp, Probe sequence
tgcgtctaacaagaaatcagtcatt

SEQ ID NO: 69958 - DNA, 25 bp, Probe sequence
ctttgcgtctaacaagaaatcagtc

SEQ ID NO: 69959 - DNA, 25 bp, Probe sequence
ttgcgtctaacaagaaatcagtcat

SEQ ID NO: 69960 - DNA, 25 bp, Probe sequence
tttgcgtctaacaagaaatcagtca

SEQ ID NO: 69961 - DNA, 25 bp, Probe sequence
aaatcagtcatttaattggttggca

SEQ ID NO: 69962 - DNA, 25 bp, Probe sequence
gcgtctaacaagaaatcagtcattt

SEQ ID NO: 69963 - DNA, 25 bp, Probe sequence
tgcgacactcctttaattacaaata

SEQ ID NO: 69964 - DNA, 25 bp, Probe sequence
ttgcgacactcctttaattacaaat

SEQ ID NO: 69965 - DNA, 25 bp, Probe sequence
gcgacactcctttaattacaaatat

SEQ ID NO: 69966 - DNA, 25 bp, Probe sequence
cactatcatcatacaatattatggc

SEQ ID NO: 69967 - DNA, 25 bp, Probe sequence
actatcatcatacaatattatggct

SEQ ID NO: 69968 - DNA, 25 bp, Probe sequence
cgacactcctttaattacaaatata

SEQ ID NO: 69969 - DNA, 25 bp, Probe sequence
tatttgtaattaaaggagtgtcgca

SEQ ID NO: 69970 - DNA, 25 bp, Probe sequence
atttgtaattaaaggagtgtcgcaa

SEQ ID NO: 69971 - DNA, 25 bp, Probe sequence
atatttgtaattaaaggagtgtcgc

SEQ ID NO: 69972 - DNA, 25 bp, Probe sequence
gccataatattgtatgatgatagtg

SEQ ID NO: 69973 - DNA, 25 bp, Probe sequence
agccataatattgtatgatgatagt

SEQ ID NO: 69974 - DNA, 25 bp, Probe sequence
tatatttgtaattaaaggagtgtcg

SEQ ID NO: 69975 - DNA, 25 bp, Probe sequence
tcaccaaccagtacatctctgataa

SEQ ID NO: 69976 - DNA, 25 bp, Probe sequence
ttcaccaaccagtacatctctgata

SEQ ID NO: 69977 - DNA, 25 bp, Probe sequence
gtagcgttcactaatgtttgttgta

SEQ ID NO: 69978 - DNA, 25 bp, Probe sequence
gcataaagtagcgttcactaatgtt

SEQ ID NO: 69979 - DNA, 25 bp, Probe sequence
aagtagcgttcactaatgtttgttg

SEQ ID NO: 69980 - DNA, 25 bp, Probe sequence
aaagtagcgttcactaatgtttgtt

SEQ ID NO: 69981 - DNA, 25 bp, Probe sequence
tagcgttcactaatgtttgttgtac

SEQ ID NO: 69982 - DNA, 25 bp, Probe sequence
gcgttcactaatgtttgttgtactt

SEQ ID NO: 69983 - DNA, 25 bp, Probe sequence
taaagtagcgttcactaatgtttgt

SEQ ID NO: 69984 - DNA, 25 bp, Probe sequence
tatcagagatgtactggttggtgaa

SEQ ID NO: 69985 - DNA, 25 bp, Probe sequence
ttatcagagatgtactggttggtga

SEQ ID NO: 69986 - DNA, 25 bp, Probe sequence
tacaacaaacattagtgaacgctac

SEQ ID NO: 69987 - DNA, 25 bp, Probe sequence
aacattagtgaacgctactttatgc

SEQ ID NO: 69988 - DNA, 25 bp, Probe sequence
aacaaacattagtgaacgctacttt

SEQ ID NO: 69989 - DNA, 25 bp, Probe sequence
caacaaacattagtgaacgctactt

SEQ ID NO: 69990 - DNA, 25 bp, Probe sequence
gtacaacaaacattagtgaacgcta

SEQ ID NO: 69991 - DNA, 25 bp, Probe sequence
aagtacaacaaacattagtgaacgc

SEQ ID NO: 69992 - DNA, 25 bp, Probe sequence
acaaacattagtgaacgctacttta

SEQ ID NO: 69993 - DNA, 25 bp, Probe sequence
gtatgtctcgaatcacttaacaacg

SEQ ID NO: 69994 - DNA, 25 bp, Probe sequence
tgtatgtctcgaatcacttaacaac

SEQ ID NO: 69995 - DNA, 25 bp, Probe sequence
ttacgaacctcatttctcatcaatt

SEQ ID NO: 69996 - DNA, 25 bp, Probe sequence
acgaacctcatttctcatcaattat

SEQ ID NO: 69997 - DNA, 25 bp, Probe sequence
attgtatgtctcgaatcacttaaca

SEQ ID NO: 69998 - DNA, 25 bp, Probe sequence
aattgtatgtctcgaatcacttaac

SEQ ID NO: 69999 - DNA, 25 bp, Probe sequence
tacgaacctcatttctcatcaatta

SEQ ID NO: 70000 - DNA, 25 bp, Probe sequence
tatgtctcgaatcacttaacaacga

SEQ ID NO: 70001 - DNA, 25 bp, Probe sequence
gtctcgaatcacttaacaacgaata

SEQ ID NO: 70002 - DNA, 25 bp, Probe sequence
cgttgttaagtgattcgagacatac

SEQ ID NO: 70003 - DNA, 25 bp, Probe sequence
gttgttaagtgattcgagacataca

SEQ ID NO: 70004 - DNA, 25 bp, Probe sequence
aattgatgagaaatgaggttcgtaa

SEQ ID NO: 70005 - DNA, 25 bp, Probe sequence
ataattgatgagaaatgaggttcgt

SEQ ID NO: 70006 - DNA, 25 bp, Probe sequence
tgttaagtgattcgagacatacaat

SEQ ID NO: 70007 - DNA, 25 bp, Probe sequence
gttaagtgattcgagacatacaatt

SEQ ID NO: 70008 - DNA, 25 bp, Probe sequence
taattgatgagaaatgaggttcgta

SEQ ID NO: 70009 - DNA, 25 bp, Probe sequence
tcgttgttaagtgattcgagacata

SEQ ID NO: 70010 - DNA, 25 bp, Probe sequence
tattcgttgttaagtgattcgagac

SEQ ID NO: 70011 - DNA, 25 bp, Probe sequence
cattagccaccactattatgtactt

SEQ ID NO: 70012 - DNA, 25 bp, Probe sequence
ttagccaccactattatgtacttaa

SEQ ID NO: 70013 - DNA, 25 bp, Probe sequence
attagccaccactattatgtactta

SEQ ID NO: 70014 - DNA, 25 bp, Probe sequence
ccacattagccaccactattatgta

SEQ ID NO: 70015 - DNA, 25 bp, Probe sequence
acattagccaccactattatgtact

SEQ ID NO: 70016 - DNA, 25 bp, Probe sequence
cacattagccaccactattatgtac

SEQ ID NO: 70017 - DNA, 25 bp, Probe sequence
tagccaccactattatgtacttaaa

SEQ ID NO: 70018 - DNA, 25 bp, Probe sequence
agccaccactattatgtacttaaaa

SEQ ID NO: 70019 - DNA, 25 bp, Probe sequence
aggaatacataattagattcatgca

SEQ ID NO: 70020 - DNA, 25 bp, Probe sequence
ggaatacataattagattcatgcat

SEQ ID NO: 70021 - DNA, 25 bp, Probe sequence
aagtacataatagtggtggctaatg

SEQ ID NO: 70022 - DNA, 25 bp, Probe sequence
ttaagtacataatagtggtggctaa

SEQ ID NO: 70023 - DNA, 25 bp, Probe sequence
taagtacataatagtggtggctaat

SEQ ID NO: 70024 - DNA, 25 bp, Probe sequence
tacataatagtggtggctaatgtgg

SEQ ID NO: 70025 - DNA, 25 bp, Probe sequence
gtacataatagtggtggctaatgtg

SEQ ID NO: 70026 - DNA, 25 bp, Probe sequence
agtacataatagtggtggctaatgt

SEQ ID NO: 70027 - DNA, 25 bp, Probe sequence
tttaagtacataatagtggtggcta

SEQ ID NO: 70028 - DNA, 25 bp, Probe sequence
ttttaagtacataatagtggtggct

SEQ ID NO: 70029 - DNA, 25 bp, Probe sequence
tgcatgaatctaattatgtattcct

SEQ ID NO: 70030 - DNA, 25 bp, Probe sequence
atgcatgaatctaattatgtattcc

SEQ ID NO: 70031 - DNA, 25 bp, Probe sequence
gccaatataacattgtagagcctag

SEQ ID NO: 70032 - DNA, 25 bp, Probe sequence
attgtgatgtcccagactctatcat

SEQ ID NO: 70033 - DNA, 25 bp, Probe sequence
cattgtgatgtcccagactctatca

SEQ ID NO: 70034 - DNA, 25 bp, Probe sequence
taacattgtagagcctaggacattg

SEQ ID NO: 70035 - DNA, 25 bp, Probe sequence
ataacattgtagagcctaggacatt

SEQ ID NO: 70036 - DNA, 25 bp, Probe sequence
acattgtgatgtcccagactctatc

SEQ ID NO: 70037 - DNA, 25 bp, Probe sequence
attgtagagcctaggacattgtgat

SEQ ID NO: 70038 - DNA, 25 bp, Probe sequence
ttgtgatgtcccagactctatcatc

SEQ ID NO: 70039 - DNA, 25 bp, Probe sequence
tataacattgtagagcctaggacat

SEQ ID NO: 70040 - DNA, 25 bp, Probe sequence
ctaggctctacaatgttatattggc

SEQ ID NO: 70041 - DNA, 25 bp, Probe sequence
atgatagagtctgggacatcacaat

SEQ ID NO: 70042 - DNA, 25 bp, Probe sequence
caatgtcctaggctctacaatgtta

SEQ ID NO: 70043 - DNA, 25 bp, Probe sequence
tgatagagtctgggacatcacaatg

SEQ ID NO: 70044 - DNA, 25 bp, Probe sequence
aatgtcctaggctctacaatgttat

SEQ ID NO: 70045 - DNA, 25 bp, Probe sequence
gatagagtctgggacatcacaatgt

SEQ ID NO: 70046 - DNA, 25 bp, Probe sequence
atcacaatgtcctaggctctacaat

SEQ ID NO: 70047 - DNA, 25 bp, Probe sequence
gatgatagagtctgggacatcacaa

SEQ ID NO: 70048 - DNA, 25 bp, Probe sequence
tgtcctaggctctacaatgttatat

SEQ ID NO: 70049 - DNA, 25 bp, Probe sequence
atcaatgttccaataatagcacctt

SEQ ID NO: 70050 - DNA, 25 bp, Probe sequence
caatgttccaataatagcaccttac

SEQ ID NO: 70051 - DNA, 25 bp, Probe sequence
tcaatgttccaataatagcacctta

SEQ ID NO: 70052 - DNA, 25 bp, Probe sequence
tatcaatgttccaataatagcacct

SEQ ID NO: 70053 - DNA, 25 bp, Probe sequence
gttccaataatagcaccttacatac

SEQ ID NO: 70054 - DNA, 25 bp, Probe sequence
aatgttccaataatagcaccttaca

SEQ ID NO: 70055 - DNA, 25 bp, Probe sequence
ttccaataatagcaccttacatact

SEQ ID NO: 70056 - DNA, 25 bp, Probe sequence
ttatcaatgttccaataatagcacc

SEQ ID NO: 70057 - DNA, 25 bp, Probe sequence
tgttccaataatagcaccttacata

SEQ ID NO: 70058 - DNA, 25 bp, Probe sequence
aaggtgctattattggaacattgat

SEQ ID NO: 70059 - DNA, 25 bp, Probe sequence
gtaaggtgctattattggaacattg

SEQ ID NO: 70060 - DNA, 25 bp, Probe sequence
taaggtgctattattggaacattga

SEQ ID NO: 70061 - DNA, 25 bp, Probe sequence
aggtgctattattggaacattgata

SEQ ID NO: 70062 - DNA, 25 bp, Probe sequence
tgtaaggtgctattattggaacatt

SEQ ID NO: 70063 - DNA, 25 bp, Probe sequence
gtatgtaaggtgctattattggaac

SEQ ID NO: 70064 - DNA, 25 bp, Probe sequence
agtatgtaaggtgctattattggaa

SEQ ID NO: 70065 - DNA, 25 bp, Probe sequence
ggtgctattattggaacattgataa

SEQ ID NO: 70066 - DNA, 25 bp, Probe sequence
tatgtaaggtgctattattggaaca

SEQ ID NO: 70067 - DNA, 25 bp, Probe sequence
actgtgttagtgtttatttgatggg

SEQ ID NO: 70068 - DNA, 25 bp, Probe sequence
cccttcaactttacactgtgttagt

SEQ ID NO: 70069 - DNA, 25 bp, Probe sequence
aaattctaaagcaaatatgaaagcg

SEQ ID NO: 70070 - DNA, 25 bp, Probe sequence
ctgtgttagtgtttatttgatgggg

SEQ ID NO: 70071 - DNA, 25 bp, Probe sequence
tgtgttagtgtttatttgatggggc

SEQ ID NO: 70072 - DNA, 25 bp, Probe sequence
tgtctttattgttcaatcatttgtt

SEQ ID NO: 70073 - DNA, 25 bp, Probe sequence
gtgttagtgtttatttgatggggcg

SEQ ID NO: 70074 - DNA, 25 bp, Probe sequence
aaactaagtgaaagtatgtatccat

SEQ ID NO: 70075 - DNA, 25 bp, Probe sequence
atgtctttattgttcaatcatttgt

SEQ ID NO: 70076 - DNA, 25 bp, Probe sequence
cccatcaaataaacactaacacagt

SEQ ID NO: 70077 - DNA, 25 bp, Probe sequence
actaacacagtgtaaagttgaaggg

SEQ ID NO: 70078 - DNA, 25 bp, Probe sequence
cgctttcatatttgctttagaattt

SEQ ID NO: 70079 - DNA, 25 bp, Probe sequence
ccccatcaaataaacactaacacag

SEQ ID NO: 70080 - DNA, 25 bp, Probe sequence
gccccatcaaataaacactaacaca

SEQ ID NO: 70081 - DNA, 25 bp, Probe sequence
aacaaatgattgaacaataaagaca

SEQ ID NO: 70082 - DNA, 25 bp, Probe sequence
cgccccatcaaataaacactaacac

SEQ ID NO: 70083 - DNA, 25 bp, Probe sequence
atggatacatactttcacttagttt

SEQ ID NO: 70084 - DNA, 25 bp, Probe sequence
acaaatgattgaacaataaagacat

SEQ ID NO: 70085 - DNA, 25 bp, Probe sequence
atataccactaaggaggttcgctaa

SEQ ID NO: 70086 - DNA, 25 bp, Probe sequence
tatataccactaaggaggttcgcta

SEQ ID NO: 70087 - DNA, 25 bp, Probe sequence
ttatataccactaaggaggttcgct

SEQ ID NO: 70088 - DNA, 25 bp, Probe sequence
actaaggaggttcgctaaacattat

SEQ ID NO: 70089 - DNA, 25 bp, Probe sequence
cactaaggaggttcgctaaacatta

SEQ ID NO: 70090 - DNA, 25 bp, Probe sequence
agtgaaacctccttggatgtatata

SEQ ID NO: 70091 - DNA, 25 bp, Probe sequence
ctaaggaggttcgctaaacattata

SEQ ID NO: 70092 - DNA, 25 bp, Probe sequence
gtgaaacctccttggatgtatatat

SEQ ID NO: 70093 - DNA, 25 bp, Probe sequence
tataccactaaggaggttcgctaaa

SEQ ID NO: 70094 - DNA, 25 bp, Probe sequence
ttagcgaacctccttagtggtatat

SEQ ID NO: 70095 - DNA, 25 bp, Probe sequence
tagcgaacctccttagtggtatata

SEQ ID NO: 70096 - DNA, 25 bp, Probe sequence
agcgaacctccttagtggtatataa

SEQ ID NO: 70097 - DNA, 25 bp, Probe sequence
ataatgtttagcgaacctccttagt

SEQ ID NO: 70098 - DNA, 25 bp, Probe sequence
taatgtttagcgaacctccttagtg

SEQ ID NO: 70099 - DNA, 25 bp, Probe sequence
tatatacatccaaggaggtttcact

SEQ ID NO: 70100 - DNA, 25 bp, Probe sequence
tataatgtttagcgaacctccttag

SEQ ID NO: 70101 - DNA, 25 bp, Probe sequence
atatatacatccaaggaggtttcac

SEQ ID NO: 70102 - DNA, 25 bp, Probe sequence
tttagcgaacctccttagtggtata

SEQ ID NO: 70103 - DNA, 25 bp, Probe sequence
agatagtataagaaaggtgtgacaa

SEQ ID NO: 70104 - DNA, 25 bp, Probe sequence
aagatagtataagaaaggtgtgaca

SEQ ID NO: 70105 - DNA, 25 bp, Probe sequence
gatagtataagaaaggtgtgacaaa

SEQ ID NO: 70106 - DNA, 25 bp, Probe sequence
atagtataagaaaggtgtgacaaat

SEQ ID NO: 70107 - DNA, 25 bp, Probe sequence
taagatagtataagaaaggtgtgac

SEQ ID NO: 70108 - DNA, 25 bp, Probe sequence
gttaagatagtataagaaaggtgtg

SEQ ID NO: 70109 - DNA, 25 bp, Probe sequence
attgatattcccattttagcatttt

SEQ ID NO: 70110 - DNA, 25 bp, Probe sequence
tattgatattcccattttagcattt

SEQ ID NO: 70111 - DNA, 25 bp, Probe sequence
cgaatattgatattcccattttagc

SEQ ID NO: 70112 - DNA, 25 bp, Probe sequence
tgtcacacctttcttatactatctt

SEQ ID NO: 70113 - DNA, 25 bp, Probe sequence
ttgtcacacctttcttatactatct

SEQ ID NO: 70114 - DNA, 25 bp, Probe sequence
tttgtcacacctttcttatactatc

SEQ ID NO: 70115 - DNA, 25 bp, Probe sequence
atttgtcacacctttcttatactat

SEQ ID NO: 70116 - DNA, 25 bp, Probe sequence
gtcacacctttcttatactatctta

SEQ ID NO: 70117 - DNA, 25 bp, Probe sequence
cacacctttcttatactatcttaac

SEQ ID NO: 70118 - DNA, 25 bp, Probe sequence
aaaatgctaaaatgggaatatcaat

SEQ ID NO: 70119 - DNA, 25 bp, Probe sequence
aaatgctaaaatgggaatatcaata

SEQ ID NO: 70120 - DNA, 25 bp, Probe sequence
gctaaaatgggaatatcaatattcg

SEQ ID NO: 70121 - DNA, 25 bp, Probe sequence
atattctactatgcttgcgaactag

SEQ ID NO: 70122 - DNA, 25 bp, Probe sequence
catattctactatgcttgcgaacta

SEQ ID NO: 70123 - DNA, 25 bp, Probe sequence
agtacacgaggcatattctactatg

SEQ ID NO: 70124 - DNA, 25 bp, Probe sequence
gactagtacacgaggcatattctac

SEQ ID NO: 70125 - DNA, 25 bp, Probe sequence
tgactagtacacgaggcatattcta

SEQ ID NO: 70126 - DNA, 25 bp, Probe sequence
ctgactagtacacgaggcatattct

SEQ ID NO: 70127 - DNA, 25 bp, Probe sequence
aactgactagtacacgaggcatatt

SEQ ID NO: 70128 - DNA, 25 bp, Probe sequence
ctagtacacgaggcatattctacta

SEQ ID NO: 70129 - DNA, 25 bp, Probe sequence
actgactagtacacgaggcatattc

SEQ ID NO: 70130 - DNA, 25 bp, Probe sequence
ctagttcgcaagcatagtagaatat

SEQ ID NO: 70131 - DNA, 25 bp, Probe sequence
tagttcgcaagcatagtagaatatg

SEQ ID NO: 70132 - DNA, 25 bp, Probe sequence
catagtagaatatgcctcgtgtact

SEQ ID NO: 70133 - DNA, 25 bp, Probe sequence
tagaatatgcctcgtgtactagtca

SEQ ID NO: 70134 - DNA, 25 bp, Probe sequence
gtagaatatgcctcgtgtactagtc

SEQ ID NO: 70135 - DNA, 25 bp, Probe sequence
agaatatgcctcgtgtactagtcag

SEQ ID NO: 70136 - DNA, 25 bp, Probe sequence
aatatgcctcgtgtactagtcagtt

SEQ ID NO: 70137 - DNA, 25 bp, Probe sequence
tagtagaatatgcctcgtgtactag

SEQ ID NO: 70138 - DNA, 25 bp, Probe sequence
gaatatgcctcgtgtactagtcagt

SEQ ID NO: 70139 - DNA, 25 bp, Probe sequence
atcgatagagtccgtattgccgtag

SEQ ID NO: 70140 - DNA, 25 bp, Probe sequence
ctacggcaatacggactctatcgat

SEQ ID NO: 70141 - DNA, 25 bp, Probe sequence
aacttacgaacaactcagatgacta

SEQ ID NO: 70142 - DNA, 25 bp, Probe sequence
acttacgaacaactcagatgactat

SEQ ID NO: 70143 - DNA, 25 bp, Probe sequence
cttacgaacaactcagatgactatc

SEQ ID NO: 70144 - DNA, 25 bp, Probe sequence
aaacttacgaacaactcagatgact

SEQ ID NO: 70145 - DNA, 25 bp, Probe sequence
caaacttacgaacaactcagatgac

SEQ ID NO: 70146 - DNA, 25 bp, Probe sequence
acgaacaactcagatgactatctta

SEQ ID NO: 70147 - DNA, 25 bp, Probe sequence
tacgaacaactcagatgactatctt

SEQ ID NO: 70148 - DNA, 25 bp, Probe sequence
ttacgaacaactcagatgactatct

SEQ ID NO: 70149 - DNA, 25 bp, Probe sequence
aagcaaacttacgaacaactcagat

SEQ ID NO: 70150 - DNA, 25 bp, Probe sequence
tagtcatctgagttgttcgtaagtt

SEQ ID NO: 70151 - DNA, 25 bp, Probe sequence
atagtcatctgagttgttcgtaagt

SEQ ID NO: 70152 - DNA, 25 bp, Probe sequence
gatagtcatctgagttgttcgtaag

SEQ ID NO: 70153 - DNA, 25 bp, Probe sequence
gtcatctgagttgttcgtaagtttg

SEQ ID NO: 70154 - DNA, 25 bp, Probe sequence
agtcatctgagttgttcgtaagttt

SEQ ID NO: 70155 - DNA, 25 bp, Probe sequence
agatagtcatctgagttgttcgtaa

SEQ ID NO: 70156 - DNA, 25 bp, Probe sequence
aagatagtcatctgagttgttcgta

SEQ ID NO: 70157 - DNA, 25 bp, Probe sequence
taagatagtcatctgagttgttcgt

SEQ ID NO: 70158 - DNA, 25 bp, Probe sequence
atctgagttgttcgtaagtttgctt

SEQ ID NO: 70159 - DNA, 25 bp, Probe sequence
acctcttcttgtgttcaatgtatat

SEQ ID NO: 70160 - DNA, 25 bp, Probe sequence
cacctcttcttgtgttcaatgtata

SEQ ID NO: 70161 - DNA, 25 bp, Probe sequence
gcacctcttcttgtgttcaatgtat

SEQ ID NO: 70162 - DNA, 25 bp, Probe sequence
agcacctcttcttgtgttcaatgta

SEQ ID NO: 70163 - DNA, 25 bp, Probe sequence
actactcagcataatctttcagtct

SEQ ID NO: 70164 - DNA, 25 bp, Probe sequence
agattgctacctatttcatttacca

SEQ ID NO: 70165 - DNA, 25 bp, Probe sequence
aactactcagcataatctttcagtc

SEQ ID NO: 70166 - DNA, 25 bp, Probe sequence
aaactactcagcataatctttcagt

SEQ ID NO: 70167 - DNA, 25 bp, Probe sequence
tcagcataatctttcagtctatgga

SEQ ID NO: 70168 - DNA, 25 bp, Probe sequence
atatacattgaacacaagaagaggt

SEQ ID NO: 70169 - DNA, 25 bp, Probe sequence
tatacattgaacacaagaagaggtg

SEQ ID NO: 70170 - DNA, 25 bp, Probe sequence
atacattgaacacaagaagaggtgc

SEQ ID NO: 70171 - DNA, 25 bp, Probe sequence
tacattgaacacaagaagaggtgct

SEQ ID NO: 70172 - DNA, 25 bp, Probe sequence
agactgaaagattatgctgagtagt

SEQ ID NO: 70173 - DNA, 25 bp, Probe sequence
tggtaaatgaaataggtagcaatct

SEQ ID NO: 70174 - DNA, 25 bp, Probe sequence
gactgaaagattatgctgagtagtt

SEQ ID NO: 70175 - DNA, 25 bp, Probe sequence
actgaaagattatgctgagtagttt

SEQ ID NO: 70176 - DNA, 25 bp, Probe sequence
tccatagactgaaagattatgctga

SEQ ID NO: 70177 - DNA, 25 bp, Probe sequence
aggtataatgctcaatcatctaaca

SEQ ID NO: 70178 - DNA, 25 bp, Probe sequence
cccattcatatttattacttcgcct

SEQ ID NO: 70179 - DNA, 25 bp, Probe sequence
tcttgttgaatagtatttgtcccac

SEQ ID NO: 70180 - DNA, 25 bp, Probe sequence
ctcttgttgaatagtatttgtccca

SEQ ID NO: 70181 - DNA, 25 bp, Probe sequence
tcctgtcgtcattaatcgtaatatt

SEQ ID NO: 70182 - DNA, 25 bp, Probe sequence
ttatcctgtcgtcattaatcgtaat

SEQ ID NO: 70183 - DNA, 25 bp, Probe sequence
atcctgtcgtcattaatcgtaatat

SEQ ID NO: 70184 - DNA, 25 bp, Probe sequence
cgatgttattaaggtataatgctca

SEQ ID NO: 70185 - DNA, 25 bp, Probe sequence
acgatgttattaaggtataatgctc

SEQ ID NO: 70186 - DNA, 25 bp, Probe sequence
tgttagatgattgagcattatacct

SEQ ID NO: 70187 - DNA, 25 bp, Probe sequence
aggcgaagtaataaatatgaatggg

SEQ ID NO: 70188 - DNA, 25 bp, Probe sequence
gtgggacaaatactattcaacaaga

SEQ ID NO: 70189 - DNA, 25 bp, Probe sequence
tgggacaaatactattcaacaagag

SEQ ID NO: 70190 - DNA, 25 bp, Probe sequence
attacgattaatgacgacaggataa

SEQ ID NO: 70191 - DNA, 25 bp, Probe sequence
aatattacgattaatgacgacagga

SEQ ID NO: 70192 - DNA, 25 bp, Probe sequence
atattacgattaatgacgacaggat

SEQ ID NO: 70193 - DNA, 25 bp, Probe sequence
gagcattataccttaataacatcgt

SEQ ID NO: 70194 - DNA, 25 bp, Probe sequence
tgagcattataccttaataacatcg

SEQ ID NO: 70195 - DNA, 25 bp, Probe sequence
gcggtatgtgaactctttattgttt

SEQ ID NO: 70196 - DNA, 25 bp, Probe sequence
aagcggtatgtgaactctttattgt

SEQ ID NO: 70197 - DNA, 25 bp, Probe sequence
agcggtatgtgaactctttattgtt

SEQ ID NO: 70198 - DNA, 25 bp, Probe sequence
ctctttattgtttcacataccgctt

SEQ ID NO: 70199 - DNA, 25 bp, Probe sequence
aactctttattgtttcacataccgc

SEQ ID NO: 70200 - DNA, 25 bp, Probe sequence
cggtatgtgaactctttattgtttc

SEQ ID NO: 70201 - DNA, 25 bp, Probe sequence
tgtttcacataccgcttaattcatt

SEQ ID NO: 70202 - DNA, 25 bp, Probe sequence
ttgtttcacataccgcttaattcat

SEQ ID NO: 70203 - DNA, 25 bp, Probe sequence
attgtttcacataccgcttaattca

SEQ ID NO: 70204 - DNA, 25 bp, Probe sequence
aaacaataaagagttcacataccgc

SEQ ID NO: 70205 - DNA, 25 bp, Probe sequence
acaataaagagttcacataccgctt

SEQ ID NO: 70206 - DNA, 25 bp, Probe sequence
aacaataaagagttcacataccgct

SEQ ID NO: 70207 - DNA, 25 bp, Probe sequence
gcggtatgtgaaacaataaagagtt

SEQ ID NO: 70208 - DNA, 25 bp, Probe sequence
aagcggtatgtgaaacaataaagag

SEQ ID NO: 70209 - DNA, 25 bp, Probe sequence
gaaacaataaagagttcacataccg

SEQ ID NO: 70210 - DNA, 25 bp, Probe sequence
tgaattaagcggtatgtgaaacaat

SEQ ID NO: 70211 - DNA, 25 bp, Probe sequence
atgaattaagcggtatgtgaaacaa

SEQ ID NO: 70212 - DNA, 25 bp, Probe sequence
aatgaattaagcggtatgtgaaaca

SEQ ID NO: 70213 - DNA, 25 bp, Probe sequence
acatattaacatactagagcaggga

SEQ ID NO: 70214 - DNA, 25 bp, Probe sequence
acgcaagttaaatctttcttacaaa

SEQ ID NO: 70215 - DNA, 25 bp, Probe sequence
catattaacatactagagcagggag

SEQ ID NO: 70216 - DNA, 25 bp, Probe sequence
aacgcaagttaaatctttcttacaa

SEQ ID NO: 70217 - DNA, 25 bp, Probe sequence
atattaacatactagagcagggagt

SEQ ID NO: 70218 - DNA, 25 bp, Probe sequence
ttaacatactagagcagggagtaaa

SEQ ID NO: 70219 - DNA, 25 bp, Probe sequence
attaacatactagagcagggagtaa

SEQ ID NO: 70220 - DNA, 25 bp, Probe sequence
tacatattaacatactagagcaggg

SEQ ID NO: 70221 - DNA, 25 bp, Probe sequence
tattaacatactagagcagggagta

SEQ ID NO: 70222 - DNA, 25 bp, Probe sequence
tccctgctctagtatgttaatatgt

SEQ ID NO: 70223 - DNA, 25 bp, Probe sequence
tttgtaagaaagatttaacttgcgt

SEQ ID NO: 70224 - DNA, 25 bp, Probe sequence
ctccctgctctagtatgttaatatg

SEQ ID NO: 70225 - DNA, 25 bp, Probe sequence
ttgtaagaaagatttaacttgcgtt

SEQ ID NO: 70226 - DNA, 25 bp, Probe sequence
actccctgctctagtatgttaatat

SEQ ID NO: 70227 - DNA, 25 bp, Probe sequence
tttactccctgctctagtatgttaa

SEQ ID NO: 70228 - DNA, 25 bp, Probe sequence
ttactccctgctctagtatgttaat

SEQ ID NO: 70229 - DNA, 25 bp, Probe sequence
ccctgctctagtatgttaatatgta

SEQ ID NO: 70230 - DNA, 25 bp, Probe sequence
tactccctgctctagtatgttaata

SEQ ID NO: 70231 - DNA, 25 bp, Probe sequence
attgctgatatttccgaataccaaa

SEQ ID NO: 70232 - DNA, 25 bp, Probe sequence
aattgctgatatttccgaataccaa

SEQ ID NO: 70233 - DNA, 25 bp, Probe sequence
actcaaattgctgatatttccgaat

SEQ ID NO: 70234 - DNA, 25 bp, Probe sequence
ttgctgatatttccgaataccaaat

SEQ ID NO: 70235 - DNA, 25 bp, Probe sequence
aaattgctgatatttccgaatacca

SEQ ID NO: 70236 - DNA, 25 bp, Probe sequence
caaattgctgatatttccgaatacc

SEQ ID NO: 70237 - DNA, 25 bp, Probe sequence
tactcaaattgctgatatttccgaa

SEQ ID NO: 70238 - DNA, 25 bp, Probe sequence
ttactcaaattgctgatatttccga

SEQ ID NO: 70239 - DNA, 25 bp, Probe sequence
tttactcaaattgctgatatttccg

SEQ ID NO: 70240 - DNA, 25 bp, Probe sequence
tttggtattcggaaatatcagcaat

SEQ ID NO: 70241 - DNA, 25 bp, Probe sequence
ttggtattcggaaatatcagcaatt

SEQ ID NO: 70242 - DNA, 25 bp, Probe sequence
attcggaaatatcagcaatttgagt

SEQ ID NO: 70243 - DNA, 25 bp, Probe sequence
tggtattcggaaatatcagcaattt

SEQ ID NO: 70244 - DNA, 25 bp, Probe sequence
atttggtattcggaaatatcagcaa

SEQ ID NO: 70245 - DNA, 25 bp, Probe sequence
ggtattcggaaatatcagcaatttg

SEQ ID NO: 70246 - DNA, 25 bp, Probe sequence
tcggaaatatcagcaatttgagtaa

SEQ ID NO: 70247 - DNA, 25 bp, Probe sequence
ttcggaaatatcagcaatttgagta

SEQ ID NO: 70248 - DNA, 25 bp, Probe sequence
cggaaatatcagcaatttgagtaaa

SEQ ID NO: 70249 - DNA, 25 bp, Probe sequence
ttcacttctggtgttaactagacaa

SEQ ID NO: 70250 - DNA, 25 bp, Probe sequence
attcacttctggtgttaactagaca

SEQ ID NO: 70251 - DNA, 25 bp, Probe sequence
gattcacttctggtgttaactagac

SEQ ID NO: 70252 - DNA, 25 bp, Probe sequence
agattcacttctggtgttaactaga

SEQ ID NO: 70253 - DNA, 25 bp, Probe sequence
aagattcacttctggtgttaactag

SEQ ID NO: 70254 - DNA, 25 bp, Probe sequence
tcacttctggtgttaactagacaaa

SEQ ID NO: 70255 - DNA, 25 bp, Probe sequence
gaagattcacttctggtgttaacta

SEQ ID NO: 70256 - DNA, 25 bp, Probe sequence
cacttctggtgttaactagacaaaa

SEQ ID NO: 70257 - DNA, 25 bp, Probe sequence
agtataacgtctaaaattcccattt

SEQ ID NO: 70258 - DNA, 25 bp, Probe sequence
ttgtctagttaacaccagaagtgaa

SEQ ID NO: 70259 - DNA, 25 bp, Probe sequence
tgtctagttaacaccagaagtgaat

SEQ ID NO: 70260 - DNA, 25 bp, Probe sequence
gtctagttaacaccagaagtgaatc

SEQ ID NO: 70261 - DNA, 25 bp, Probe sequence
tctagttaacaccagaagtgaatct

SEQ ID NO: 70262 - DNA, 25 bp, Probe sequence
ctagttaacaccagaagtgaatctt

SEQ ID NO: 70263 - DNA, 25 bp, Probe sequence
tttgtctagttaacaccagaagtga

SEQ ID NO: 70264 - DNA, 25 bp, Probe sequence
tagttaacaccagaagtgaatcttc

SEQ ID NO: 70265 - DNA, 25 bp, Probe sequence
ttttgtctagttaacaccagaagtg

SEQ ID NO: 70266 - DNA, 25 bp, Probe sequence
aaatgggaattttagacgttatact

SEQ ID NO: 70267 - DNA, 25 bp, Probe sequence
ctcctgtataataagtcacgccata

SEQ ID NO: 70268 - DNA, 25 bp, Probe sequence
ataataagtcacgccatacataggt

SEQ ID NO: 70269 - DNA, 25 bp, Probe sequence
cctcctgtataataagtcacgccat

SEQ ID NO: 70270 - DNA, 25 bp, Probe sequence
tataataagtcacgccatacatagg

SEQ ID NO: 70271 - DNA, 25 bp, Probe sequence
tcctgtataataagtcacgccatac

SEQ ID NO: 70272 - DNA, 25 bp, Probe sequence
taataagtcacgccatacataggtg

SEQ ID NO: 70273 - DNA, 25 bp, Probe sequence
cacctcctgtataataagtcacgcc

SEQ ID NO: 70274 - DNA, 25 bp, Probe sequence
ttgcacctcctgtataataagtcac

SEQ ID NO: 70275 - DNA, 25 bp, Probe sequence
cataggtgacatttcgttattgagt

SEQ ID NO: 70276 - DNA, 25 bp, Probe sequence
tatggcgtgacttattatacaggag

SEQ ID NO: 70277 - DNA, 25 bp, Probe sequence
acctatgtatggcgtgacttattat

SEQ ID NO: 70278 - DNA, 25 bp, Probe sequence
atggcgtgacttattatacaggagg

SEQ ID NO: 70279 - DNA, 25 bp, Probe sequence
cctatgtatggcgtgacttattata

SEQ ID NO: 70280 - DNA, 25 bp, Probe sequence
gtatggcgtgacttattatacagga

SEQ ID NO: 70281 - DNA, 25 bp, Probe sequence
cacctatgtatggcgtgacttatta

SEQ ID NO: 70282 - DNA, 25 bp, Probe sequence
ggcgtgacttattatacaggaggtg

SEQ ID NO: 70283 - DNA, 25 bp, Probe sequence
gtgacttattatacaggaggtgcaa

SEQ ID NO: 70284 - DNA, 25 bp, Probe sequence
ctcaataacgaaatgtcacctatgt

SEQ ID NO: 70285 - DNA, 25 bp, Probe sequence
ctatatttgagcggttgtatgtagc

SEQ ID NO: 70286 - DNA, 25 bp, Probe sequence
cctatatttgagcggttgtatgtag

SEQ ID NO: 70287 - DNA, 25 bp, Probe sequence
atgttcttgaacctatatttgagcg

SEQ ID NO: 70288 - DNA, 25 bp, Probe sequence
tgttcttgaacctatatttgagcgg

SEQ ID NO: 70289 - DNA, 25 bp, Probe sequence
acctatatttgagcggttgtatgta

SEQ ID NO: 70290 - DNA, 25 bp, Probe sequence
gttcttgaacctatatttgagcggt

SEQ ID NO: 70291 - DNA, 25 bp, Probe sequence
aatgttcttgaacctatatttgagc

SEQ ID NO: 70292 - DNA, 25 bp, Probe sequence
tatatttgagcggttgtatgtagct

SEQ ID NO: 70293 - DNA, 25 bp, Probe sequence
acttataactactcaactattgcat

SEQ ID NO: 70294 - DNA, 25 bp, Probe sequence
gctacatacaaccgctcaaatatag

SEQ ID NO: 70295 - DNA, 25 bp, Probe sequence
ctacatacaaccgctcaaatatagg

SEQ ID NO: 70296 - DNA, 25 bp, Probe sequence
cgctcaaatataggttcaagaacat

SEQ ID NO: 70297 - DNA, 25 bp, Probe sequence
ccgctcaaatataggttcaagaaca

SEQ ID NO: 70298 - DNA, 25 bp, Probe sequence
tacatacaaccgctcaaatataggt

SEQ ID NO: 70299 - DNA, 25 bp, Probe sequence
accgctcaaatataggttcaagaac

SEQ ID NO: 70300 - DNA, 25 bp, Probe sequence
gctcaaatataggttcaagaacatt

SEQ ID NO: 70301 - DNA, 25 bp, Probe sequence
agctacatacaaccgctcaaatata

SEQ ID NO: 70302 - DNA, 25 bp, Probe sequence
atgcaatagttgagtagttataagt

SEQ ID NO: 70303 - DNA, 25 bp, Probe sequence
agcactaactacgaattactttgaa

SEQ ID NO: 70304 - DNA, 25 bp, Probe sequence
ctactagcaaacattccagtcacta

SEQ ID NO: 70305 - DNA, 25 bp, Probe sequence
aaactactagcaaacattccagtca

SEQ ID NO: 70306 - DNA, 25 bp, Probe sequence
aagcactaactacgaattactttga

SEQ ID NO: 70307 - DNA, 25 bp, Probe sequence
aactactagcaaacattccagtcac

SEQ ID NO: 70308 - DNA, 25 bp, Probe sequence
gcactaactacgaattactttgaaa

SEQ ID NO: 70309 - DNA, 25 bp, Probe sequence
actcccattatgaaataaagcacta

SEQ ID NO: 70310 - DNA, 25 bp, Probe sequence
tactcccattatgaaataaagcact

SEQ ID NO: 70311 - DNA, 25 bp, Probe sequence
actactagcaaacattccagtcact

SEQ ID NO: 70312 - DNA, 25 bp, Probe sequence
ttcaaagtaattcgtagttagtgct

SEQ ID NO: 70313 - DNA, 25 bp, Probe sequence
tagtgactggaatgtttgctagtag

SEQ ID NO: 70314 - DNA, 25 bp, Probe sequence
tgactggaatgtttgctagtagttt

SEQ ID NO: 70315 - DNA, 25 bp, Probe sequence
tcaaagtaattcgtagttagtgctt

SEQ ID NO: 70316 - DNA, 25 bp, Probe sequence
gtgactggaatgtttgctagtagtt

SEQ ID NO: 70317 - DNA, 25 bp, Probe sequence
tttcaaagtaattcgtagttagtgc

SEQ ID NO: 70318 - DNA, 25 bp, Probe sequence
agtgctttatttcataatgggagta

SEQ ID NO: 70319 - DNA, 25 bp, Probe sequence
tagtgctttatttcataatgggagt

SEQ ID NO: 70320 - DNA, 25 bp, Probe sequence
agtgactggaatgtttgctagtagt

SEQ ID NO: 70321 - DNA, 25 bp, Probe sequence
tgaactacaccaaccttttaaattt

SEQ ID NO: 70322 - DNA, 25 bp, Probe sequence
ttgaactacaccaaccttttaaatt

SEQ ID NO: 70323 - DNA, 25 bp, Probe sequence
aatttattctagtgacaggataact

SEQ ID NO: 70324 - DNA, 25 bp, Probe sequence
attctagtgacaggataactaaaat

SEQ ID NO: 70325 - DNA, 25 bp, Probe sequence
gaactacaccaaccttttaaattta

SEQ ID NO: 70326 - DNA, 25 bp, Probe sequence
actacaccaaccttttaaatttatt

SEQ ID NO: 70327 - DNA, 25 bp, Probe sequence
aactacaccaaccttttaaatttat

SEQ ID NO: 70328 - DNA, 25 bp, Probe sequence
acaccaaccttttaaatttattcta

SEQ ID NO: 70329 - DNA, 25 bp, Probe sequence
tacaccaaccttttaaatttattct

SEQ ID NO: 70330 - DNA, 25 bp, Probe sequence
ctacaccaaccttttaaatttattc

SEQ ID NO: 70331 - DNA, 25 bp, Probe sequence
aatttaaaaggttggtgtagttcaa

SEQ ID NO: 70332 - DNA, 25 bp, Probe sequence
aaatttaaaaggttggtgtagttca

SEQ ID NO: 70333 - DNA, 25 bp, Probe sequence
agttatcctgtcactagaataaatt

SEQ ID NO: 70334 - DNA, 25 bp, Probe sequence
attttagttatcctgtcactagaat

SEQ ID NO: 70335 - DNA, 25 bp, Probe sequence
taaatttaaaaggttggtgtagttc

SEQ ID NO: 70336 - DNA, 25 bp, Probe sequence
ataaatttaaaaggttggtgtagtt

SEQ ID NO: 70337 - DNA, 25 bp, Probe sequence
aataaatttaaaaggttggtgtagt

SEQ ID NO: 70338 - DNA, 25 bp, Probe sequence
agaataaatttaaaaggttggtgta

SEQ ID NO: 70339 - DNA, 25 bp, Probe sequence
tagaataaatttaaaaggttggtgt

SEQ ID NO: 70340 - DNA, 25 bp, Probe sequence
gaataaatttaaaaggttggtgtag

SEQ ID NO: 70341 - DNA, 25 bp, Probe sequence
ttcctcagtcttcagccttaatcat

SEQ ID NO: 70342 - DNA, 25 bp, Probe sequence
ttcgcctccaatgtcttcatctaat

SEQ ID NO: 70343 - DNA, 25 bp, Probe sequence
cgcctccaatgtcttcatctaatta

SEQ ID NO: 70344 - DNA, 25 bp, Probe sequence
tcgcctccaatgtcttcatctaatt

SEQ ID NO: 70345 - DNA, 25 bp, Probe sequence
gcctccaatgtcttcatctaattat

SEQ ID NO: 70346 - DNA, 25 bp, Probe sequence
tcctcagtcttcagccttaatcatg

SEQ ID NO: 70347 - DNA, 25 bp, Probe sequence
tatatcttaggactgatgcacgttc

SEQ ID NO: 70348 - DNA, 25 bp, Probe sequence
atatatcttaggactgatgcacgtt

SEQ ID NO: 70349 - DNA, 25 bp, Probe sequence
gttcgcctccaatgtcttcatctaa

SEQ ID NO: 70350 - DNA, 25 bp, Probe sequence
atgattaaggctgaagactgaggaa

SEQ ID NO: 70351 - DNA, 25 bp, Probe sequence
attagatgaagacattggaggcgaa

SEQ ID NO: 70352 - DNA, 25 bp, Probe sequence
taattagatgaagacattggaggcg

SEQ ID NO: 70353 - DNA, 25 bp, Probe sequence
aattagatgaagacattggaggcga

SEQ ID NO: 70354 - DNA, 25 bp, Probe sequence
ataattagatgaagacattggaggc

SEQ ID NO: 70355 - DNA, 25 bp, Probe sequence
catgattaaggctgaagactgagga

SEQ ID NO: 70356 - DNA, 25 bp, Probe sequence
gaacgtgcatcagtcctaagatata

SEQ ID NO: 70357 - DNA, 25 bp, Probe sequence
aacgtgcatcagtcctaagatatat

SEQ ID NO: 70358 - DNA, 25 bp, Probe sequence
ttagatgaagacattggaggcgaac

SEQ ID NO: 70359 - DNA, 25 bp, Probe sequence
cacggatactacttgatgaacagat

SEQ ID NO: 70360 - DNA, 25 bp, Probe sequence
acggatactacttgatgaacagatt

SEQ ID NO: 70361 - DNA, 25 bp, Probe sequence
cggatactacttgatgaacagatta

SEQ ID NO: 70362 - DNA, 25 bp, Probe sequence
aagcacggatactacttgatgaaca

SEQ ID NO: 70363 - DNA, 25 bp, Probe sequence
gcacggatactacttgatgaacaga

SEQ ID NO: 70364 - DNA, 25 bp, Probe sequence
agcacggatactacttgatgaacag

SEQ ID NO: 70365 - DNA, 25 bp, Probe sequence
ttaatttggtttcaagcacggatac

SEQ ID NO: 70366 - DNA, 25 bp, Probe sequence
tttaatttggtttcaagcacggata

SEQ ID NO: 70367 - DNA, 25 bp, Probe sequence
ggatactacttgatgaacagattac

SEQ ID NO: 70368 - DNA, 25 bp, Probe sequence
atctgttcatcaagtagtatccgtg

SEQ ID NO: 70369 - DNA, 25 bp, Probe sequence
aatctgttcatcaagtagtatccgt

SEQ ID NO: 70370 - DNA, 25 bp, Probe sequence
taatctgttcatcaagtagtatccg

SEQ ID NO: 70371 - DNA, 25 bp, Probe sequence
tgttcatcaagtagtatccgtgctt

SEQ ID NO: 70372 - DNA, 25 bp, Probe sequence
ctgttcatcaagtagtatccgtgct

SEQ ID NO: 70373 - DNA, 25 bp, Probe sequence
tctgttcatcaagtagtatccgtgc

SEQ ID NO: 70374 - DNA, 25 bp, Probe sequence
tatccgtgcttgaaaccaaattaaa

SEQ ID NO: 70375 - DNA, 25 bp, Probe sequence
gtatccgtgcttgaaaccaaattaa

SEQ ID NO: 70376 - DNA, 25 bp, Probe sequence
gtaatctgttcatcaagtagtatcc

SEQ ID NO: 70377 - DNA, 25 bp, Probe sequence
aaccatgaagctctacctattgatt

SEQ ID NO: 70378 - DNA, 25 bp, Probe sequence
accatgaagctctacctattgatta

SEQ ID NO: 70379 - DNA, 25 bp, Probe sequence
taaccatgaagctctacctattgat

SEQ ID NO: 70380 - DNA, 25 bp, Probe sequence
ataaccatgaagctctacctattga

SEQ ID NO: 70381 - DNA, 25 bp, Probe sequence
ggatactttaacaacccattactgc

SEQ ID NO: 70382 - DNA, 25 bp, Probe sequence
atactttaacaacccattactgctc

SEQ ID NO: 70383 - DNA, 25 bp, Probe sequence
gatactttaacaacccattactgct

SEQ ID NO: 70384 - DNA, 25 bp, Probe sequence
ccatgaagctctacctattgattaa

SEQ ID NO: 70385 - DNA, 25 bp, Probe sequence
aataaccatgaagctctacctattg

SEQ ID NO: 70386 - DNA, 25 bp, Probe sequence
aatcaataggtagagcttcatggtt

SEQ ID NO: 70387 - DNA, 25 bp, Probe sequence
tcaataggtagagcttcatggttat

SEQ ID NO: 70388 - DNA, 25 bp, Probe sequence
atcaataggtagagcttcatggtta

SEQ ID NO: 70389 - DNA, 25 bp, Probe sequence
taatcaataggtagagcttcatggt

SEQ ID NO: 70390 - DNA, 25 bp, Probe sequence
gcagtaatgggttgttaaagtatcc

SEQ ID NO: 70391 - DNA, 25 bp, Probe sequence
agcagtaatgggttgttaaagtatc

SEQ ID NO: 70392 - DNA, 25 bp, Probe sequence
gagcagtaatgggttgttaaagtat

SEQ ID NO: 70393 - DNA, 25 bp, Probe sequence
ttaatcaataggtagagcttcatgg

SEQ ID NO: 70394 - DNA, 25 bp, Probe sequence
cgagcagtaatgggttgttaaagta

SEQ ID NO: 70395 - DNA, 25 bp, Probe sequence
accacctatattcaagaaggatgtt

SEQ ID NO: 70396 - DNA, 25 bp, Probe sequence
taccacctatattcaagaaggatgt

SEQ ID NO: 70397 - DNA, 25 bp, Probe sequence
gcctactattaatcacgttcagcta

SEQ ID NO: 70398 - DNA, 25 bp, Probe sequence
tagcctactattaatcacgttcagc

SEQ ID NO: 70399 - DNA, 25 bp, Probe sequence
acacgtcttagcctactattaatca

SEQ ID NO: 70400 - DNA, 25 bp, Probe sequence
atcataccaatactatcatcgtgaa

SEQ ID NO: 70401 - DNA, 25 bp, Probe sequence
aatcataccaatactatcatcgtga

SEQ ID NO: 70402 - DNA, 25 bp, Probe sequence
cacgtcttagcctactattaatcac

SEQ ID NO: 70403 - DNA, 25 bp, Probe sequence
gtaccacctatattcaagaaggatg

SEQ ID NO: 70404 - DNA, 25 bp, Probe sequence
aacatccttcttgaatataggtggt

SEQ ID NO: 70405 - DNA, 25 bp, Probe sequence
acatccttcttgaatataggtggta

SEQ ID NO: 70406 - DNA, 25 bp, Probe sequence
gctgaacgtgattaatagtaggcta

SEQ ID NO: 70407 - DNA, 25 bp, Probe sequence
tagctgaacgtgattaatagtaggc

SEQ ID NO: 70408 - DNA, 25 bp, Probe sequence
tgattaatagtaggctaagacgtgt

SEQ ID NO: 70409 - DNA, 25 bp, Probe sequence
tcacgatgatagtattggtatgatt

SEQ ID NO: 70410 - DNA, 25 bp, Probe sequence
ttcacgatgatagtattggtatgat

SEQ ID NO: 70411 - DNA, 25 bp, Probe sequence
catccttcttgaatataggtggtac

SEQ ID NO: 70412 - DNA, 25 bp, Probe sequence
gtgattaatagtaggctaagacgtg

SEQ ID NO: 70413 - DNA, 25 bp, Probe sequence
gcatcataaagtaaacgagacatca

SEQ ID NO: 70414 - DNA, 25 bp, Probe sequence
agcatcataaagtaaacgagacatc

SEQ ID NO: 70415 - DNA, 25 bp, Probe sequence
gttccaagttaatgcactgctaata

SEQ ID NO: 70416 - DNA, 25 bp, Probe sequence
agttccaagttaatgcactgctaat

SEQ ID NO: 70417 - DNA, 25 bp, Probe sequence
aagttccaagttaatgcactgctaa

SEQ ID NO: 70418 - DNA, 25 bp, Probe sequence
tccaagttaatgcactgctaatatt

SEQ ID NO: 70419 - DNA, 25 bp, Probe sequence
ttccaagttaatgcactgctaatat

SEQ ID NO: 70420 - DNA, 25 bp, Probe sequence
tagcatcataaagtaaacgagacat

SEQ ID NO: 70421 - DNA, 25 bp, Probe sequence
atagcatcataaagtaaacgagaca

SEQ ID NO: 70422 - DNA, 25 bp, Probe sequence
tgatgtctcgtttactttatgatgc

SEQ ID NO: 70423 - DNA, 25 bp, Probe sequence
gatgtctcgtttactttatgatgct

SEQ ID NO: 70424 - DNA, 25 bp, Probe sequence
tattagcagtgcattaacttggaac

SEQ ID NO: 70425 - DNA, 25 bp, Probe sequence
attagcagtgcattaacttggaact

SEQ ID NO: 70426 - DNA, 25 bp, Probe sequence
ttagcagtgcattaacttggaactt

SEQ ID NO: 70427 - DNA, 25 bp, Probe sequence
atattagcagtgcattaacttggaa

SEQ ID NO: 70428 - DNA, 25 bp, Probe sequence
aatattagcagtgcattaacttgga

SEQ ID NO: 70429 - DNA, 25 bp, Probe sequence
tgtctcgtttactttatgatgctat

SEQ ID NO: 70430 - DNA, 25 bp, Probe sequence
atgtctcgtttactttatgatgcta

SEQ ID NO: 70431 - DNA, 25 bp, Probe sequence
tcaggctctcaatttgtccgtatat

SEQ ID NO: 70432 - DNA, 25 bp, Probe sequence
ttcaggctctcaatttgtccgtata

SEQ ID NO: 70433 - DNA, 25 bp, Probe sequence
cgcccatgcctgatatacatttaaa

SEQ ID NO: 70434 - DNA, 25 bp, Probe sequence
gttcaggctctcaatttgtccgtat

SEQ ID NO: 70435 - DNA, 25 bp, Probe sequence
ccgcccatgcctgatatacatttaa

SEQ ID NO: 70436 - DNA, 25 bp, Probe sequence
aaagttcaggctctcaatttgtccg

SEQ ID NO: 70437 - DNA, 25 bp, Probe sequence
agttcaggctctcaatttgtccgta

SEQ ID NO: 70438 - DNA, 25 bp, Probe sequence
caaagttcaggctctcaatttgtcc

SEQ ID NO: 70439 - DNA, 25 bp, Probe sequence
gcccatgcctgatatacatttaaaa

SEQ ID NO: 70440 - DNA, 25 bp, Probe sequence
atatacggacaaattgagagcctga

SEQ ID NO: 70441 - DNA, 25 bp, Probe sequence
tatacggacaaattgagagcctgaa

SEQ ID NO: 70442 - DNA, 25 bp, Probe sequence
tttaaatgtatatcaggcatgggcg

SEQ ID NO: 70443 - DNA, 25 bp, Probe sequence
atacggacaaattgagagcctgaac

SEQ ID NO: 70444 - DNA, 25 bp, Probe sequence
ttaaatgtatatcaggcatgggcgg

SEQ ID NO: 70445 - DNA, 25 bp, Probe sequence
cggacaaattgagagcctgaacttt

SEQ ID NO: 70446 - DNA, 25 bp, Probe sequence
tacggacaaattgagagcctgaact

SEQ ID NO: 70447 - DNA, 25 bp, Probe sequence
ggacaaattgagagcctgaactttg

SEQ ID NO: 70448 - DNA, 25 bp, Probe sequence
ttttaaatgtatatcaggcatgggc

SEQ ID NO: 70449 - DNA, 25 bp, Probe sequence
tgtgtactaattaaaagtttcgtgc

SEQ ID NO: 70450 - DNA, 25 bp, Probe sequence
gtgtactaattaaaagtttcgtgct

SEQ ID NO: 70451 - DNA, 25 bp, Probe sequence
taaaatccaattaagtacgatgctt

SEQ ID NO: 70452 - DNA, 25 bp, Probe sequence
actaattaaaagtttcgtgcttaca

SEQ ID NO: 70453 - DNA, 25 bp, Probe sequence
tgtactaattaaaagtttcgtgctt

SEQ ID NO: 70454 - DNA, 25 bp, Probe sequence
ttaaaatccaattaagtacgatgct

SEQ ID NO: 70455 - DNA, 25 bp, Probe sequence
aatccaattaagtacgatgcttaaa

SEQ ID NO: 70456 - DNA, 25 bp, Probe sequence
aaatccaattaagtacgatgcttaa

SEQ ID NO: 70457 - DNA, 25 bp, Probe sequence
aaaatccaattaagtacgatgctta

SEQ ID NO: 70458 - DNA, 25 bp, Probe sequence
gcacgaaacttttaattagtacaca

SEQ ID NO: 70459 - DNA, 25 bp, Probe sequence
agcacgaaacttttaattagtacac

SEQ ID NO: 70460 - DNA, 25 bp, Probe sequence
aagcatcgtacttaattggatttta

SEQ ID NO: 70461 - DNA, 25 bp, Probe sequence
aagcacgaaacttttaattagtaca

SEQ ID NO: 70462 - DNA, 25 bp, Probe sequence
tgtaagcacgaaacttttaattagt

SEQ ID NO: 70463 - DNA, 25 bp, Probe sequence
agcatcgtacttaattggattttaa

SEQ ID NO: 70464 - DNA, 25 bp, Probe sequence
taagcatcgtacttaattggatttt

SEQ ID NO: 70465 - DNA, 25 bp, Probe sequence
ttaagcatcgtacttaattggattt

SEQ ID NO: 70466 - DNA, 25 bp, Probe sequence
tttaagcatcgtacttaattggatt

SEQ ID NO: 70467 - DNA, 25 bp, Probe sequence
agctccgatcaaagttaaactattt

SEQ ID NO: 70468 - DNA, 25 bp, Probe sequence
aagctccgatcaaagttaaactatt

SEQ ID NO: 70469 - DNA, 25 bp, Probe sequence
aaagctccgatcaaagttaaactat

SEQ ID NO: 70470 - DNA, 25 bp, Probe sequence
aactatttgagcgtcaactttgatt

SEQ ID NO: 70471 - DNA, 25 bp, Probe sequence
aaactatttgagcgtcaactttgat

SEQ ID NO: 70472 - DNA, 25 bp, Probe sequence
actatttgagcgtcaactttgattg

SEQ ID NO: 70473 - DNA, 25 bp, Probe sequence
gctccgatcaaagttaaactatttg

SEQ ID NO: 70474 - DNA, 25 bp, Probe sequence
taaactatttgagcgtcaactttga

SEQ ID NO: 70475 - DNA, 25 bp, Probe sequence
agttaaactatttgagcgtcaactt

SEQ ID NO: 70476 - DNA, 25 bp, Probe sequence
atagtttaactttgatcggagcttt

SEQ ID NO: 70477 - DNA, 25 bp, Probe sequence
aatagtttaactttgatcggagctt

SEQ ID NO: 70478 - DNA, 25 bp, Probe sequence
aaatagtttaactttgatcggagct

SEQ ID NO: 70479 - DNA, 25 bp, Probe sequence
atcaaagttgacgctcaaatagttt

SEQ ID NO: 70480 - DNA, 25 bp, Probe sequence
aatcaaagttgacgctcaaatagtt

SEQ ID NO: 70481 - DNA, 25 bp, Probe sequence
caatcaaagttgacgctcaaatagt

SEQ ID NO: 70482 - DNA, 25 bp, Probe sequence
caaatagtttaactttgatcggagc

SEQ ID NO: 70483 - DNA, 25 bp, Probe sequence
agttgacgctcaaatagtttaactt

SEQ ID NO: 70484 - DNA, 25 bp, Probe sequence
aagttgacgctcaaatagtttaact

SEQ ID NO: 70485 - DNA, 25 bp, Probe sequence
aaagaatagtagcagatacataagc

SEQ ID NO: 70486 - DNA, 25 bp, Probe sequence
ttacacccctattcgttaaagacta

SEQ ID NO: 70487 - DNA, 25 bp, Probe sequence
tttacacccctattcgttaaagact

SEQ ID NO: 70488 - DNA, 25 bp, Probe sequence
acacccctattcgttaaagactata

SEQ ID NO: 70489 - DNA, 25 bp, Probe sequence
tacacccctattcgttaaagactat

SEQ ID NO: 70490 - DNA, 25 bp, Probe sequence
tcgttaaagactatactagattgga

SEQ ID NO: 70491 - DNA, 25 bp, Probe sequence
cacccctattcgttaaagactatac

SEQ ID NO: 70492 - DNA, 25 bp, Probe sequence
acccctattcgttaaagactatact

SEQ ID NO: 70493 - DNA, 25 bp, Probe sequence
ttttacacccctattcgttaaagac

SEQ ID NO: 70494 - DNA, 25 bp, Probe sequence
gcttatgtatctgctactattcttt

SEQ ID NO: 70495 - DNA, 25 bp, Probe sequence
tagtctttaacgaataggggtgtaa

SEQ ID NO: 70496 - DNA, 25 bp, Probe sequence
agtctttaacgaataggggtgtaaa

SEQ ID NO: 70497 - DNA, 25 bp, Probe sequence
atagtctttaacgaataggggtgta

SEQ ID NO: 70498 - DNA, 25 bp, Probe sequence
tatagtctttaacgaataggggtgt

SEQ ID NO: 70499 - DNA, 25 bp, Probe sequence
tccaatctagtatagtctttaacga

SEQ ID NO: 70500 - DNA, 25 bp, Probe sequence
gtatagtctttaacgaataggggtg

SEQ ID NO: 70501 - DNA, 25 bp, Probe sequence
agtatagtctttaacgaataggggt

SEQ ID NO: 70502 - DNA, 25 bp, Probe sequence
gtctttaacgaataggggtgtaaaa

SEQ ID NO: 70503 - DNA, 25 bp, Probe sequence
tccctatacaaacattgaaatcaca

SEQ ID NO: 70504 - DNA, 25 bp, Probe sequence
ggtctattccctatacaaacattga

SEQ ID NO: 70505 - DNA, 25 bp, Probe sequence
ccctatacaaacattgaaatcacaa

SEQ ID NO: 70506 - DNA, 25 bp, Probe sequence
ttccctatacaaacattgaaatcac

SEQ ID NO: 70507 - DNA, 25 bp, Probe sequence
ctatacaaacattgaaatcacaacg

SEQ ID NO: 70508 - DNA, 25 bp, Probe sequence
aggtctattccctatacaaacattg

SEQ ID NO: 70509 - DNA, 25 bp, Probe sequence
cctatacaaacattgaaatcacaac

SEQ ID NO: 70510 - DNA, 25 bp, Probe sequence
attccctatacaaacattgaaatca

SEQ ID NO: 70511 - DNA, 25 bp, Probe sequence
gtctattccctatacaaacattgaa

SEQ ID NO: 70512 - DNA, 25 bp, Probe sequence
tgtgatttcaatgtttgtataggga

SEQ ID NO: 70513 - DNA, 25 bp, Probe sequence
tcaatgtttgtatagggaatagacc

SEQ ID NO: 70514 - DNA, 25 bp, Probe sequence
ttgtgatttcaatgtttgtataggg

SEQ ID NO: 70515 - DNA, 25 bp, Probe sequence
gtgatttcaatgtttgtatagggaa

SEQ ID NO: 70516 - DNA, 25 bp, Probe sequence
cgttgtgatttcaatgtttgtatag

SEQ ID NO: 70517 - DNA, 25 bp, Probe sequence
caatgtttgtatagggaatagacct

SEQ ID NO: 70518 - DNA, 25 bp, Probe sequence
gttgtgatttcaatgtttgtatagg

SEQ ID NO: 70519 - DNA, 25 bp, Probe sequence
tgatttcaatgtttgtatagggaat

SEQ ID NO: 70520 - DNA, 25 bp, Probe sequence
ttcaatgtttgtatagggaatagac

SEQ ID NO: 70521 - DNA, 25 bp, Probe sequence
actcctcactttaatgtttgttctc

SEQ ID NO: 70522 - DNA, 25 bp, Probe sequence
ctcctcactttaatgtttgttctct

SEQ ID NO: 70523 - DNA, 25 bp, Probe sequence
tcctcactttaatgtttgttctctt

SEQ ID NO: 70524 - DNA, 25 bp, Probe sequence
aactcctcactttaatgtttgttct

SEQ ID NO: 70525 - DNA, 25 bp, Probe sequence
cctcactttaatgtttgttctctta

SEQ ID NO: 70526 - DNA, 25 bp, Probe sequence
aaactcctcactttaatgtttgttc

SEQ ID NO: 70527 - DNA, 25 bp, Probe sequence
catattttagcgattaaatgtggca

SEQ ID NO: 70528 - DNA, 25 bp, Probe sequence
tcatattttagcgattaaatgtggc

SEQ ID NO: 70529 - DNA, 25 bp, Probe sequence
ctcactttaatgtttgttctcttaa

SEQ ID NO: 70530 - DNA, 25 bp, Probe sequence
gagaacaaacattaaagtgaggagt

SEQ ID NO: 70531 - DNA, 25 bp, Probe sequence
agagaacaaacattaaagtgaggag

SEQ ID NO: 70532 - DNA, 25 bp, Probe sequence
aagagaacaaacattaaagtgagga

SEQ ID NO: 70533 - DNA, 25 bp, Probe sequence
agaacaaacattaaagtgaggagtt

SEQ ID NO: 70534 - DNA, 25 bp, Probe sequence
taagagaacaaacattaaagtgagg

SEQ ID NO: 70535 - DNA, 25 bp, Probe sequence
gaacaaacattaaagtgaggagttt

SEQ ID NO: 70536 - DNA, 25 bp, Probe sequence
tgccacatttaatcgctaaaatatg

SEQ ID NO: 70537 - DNA, 25 bp, Probe sequence
gccacatttaatcgctaaaatatga

SEQ ID NO: 70538 - DNA, 25 bp, Probe sequence
ttaagagaacaaacattaaagtgag

SEQ ID NO: 70539 - DNA, 25 bp, Probe sequence
tatgtgtaatgtgattaacctgcca

SEQ ID NO: 70540 - DNA, 25 bp, Probe sequence
ttatgtgtaatgtgattaacctgcc

SEQ ID NO: 70541 - DNA, 25 bp, Probe sequence
atgtgtaatgtgattaacctgccaa

SEQ ID NO: 70542 - DNA, 25 bp, Probe sequence
tgtaatgtgattaacctgccaactg

SEQ ID NO: 70543 - DNA, 25 bp, Probe sequence
gtgtaatgtgattaacctgccaact

SEQ ID NO: 70544 - DNA, 25 bp, Probe sequence
tgtgtaatgtgattaacctgccaac

SEQ ID NO: 70545 - DNA, 25 bp, Probe sequence
gttatgtgtaatgtgattaacctgc

SEQ ID NO: 70546 - DNA, 25 bp, Probe sequence
cttctacttggttcgtttcgtattc

SEQ ID NO: 70547 - DNA, 25 bp, Probe sequence
gtaatgtgattaacctgccaactgc

SEQ ID NO: 70548 - DNA, 25 bp, Probe sequence
tggcaggttaatcacattacacata

SEQ ID NO: 70549 - DNA, 25 bp, Probe sequence
ggcaggttaatcacattacacataa

SEQ ID NO: 70550 - DNA, 25 bp, Probe sequence
ttggcaggttaatcacattacacat

SEQ ID NO: 70551 - DNA, 25 bp, Probe sequence
agttggcaggttaatcacattacac

SEQ ID NO: 70552 - DNA, 25 bp, Probe sequence
cagttggcaggttaatcacattaca

SEQ ID NO: 70553 - DNA, 25 bp, Probe sequence
gttggcaggttaatcacattacaca

SEQ ID NO: 70554 - DNA, 25 bp, Probe sequence
gcaggttaatcacattacacataac

SEQ ID NO: 70555 - DNA, 25 bp, Probe sequence
gaatacgaaacgaaccaagtagaag

SEQ ID NO: 70556 - DNA, 25 bp, Probe sequence
gcagttggcaggttaatcacattac

SEQ ID NO: 70557 - DNA, 25 bp, Probe sequence
gtaatatacaggattcatcacgcat

SEQ ID NO: 70558 - DNA, 25 bp, Probe sequence
atataaggtagcacatcacattctg

SEQ ID NO: 70559 - DNA, 25 bp, Probe sequence
aatatacaggattcatcacgcataa

SEQ ID NO: 70560 - DNA, 25 bp, Probe sequence
tataaggtagcacatcacattctgt

SEQ ID NO: 70561 - DNA, 25 bp, Probe sequence
atatacaggattcatcacgcataat

SEQ ID NO: 70562 - DNA, 25 bp, Probe sequence
ttcacttgttcaacttatgtaccat

SEQ ID NO: 70563 - DNA, 25 bp, Probe sequence
taatatacaggattcatcacgcata

SEQ ID NO: 70564 - DNA, 25 bp, Probe sequence
atacaggattcatcacgcataatca

SEQ ID NO: 70565 - DNA, 25 bp, Probe sequence
tacaggattcatcacgcataatcaa

SEQ ID NO: 70566 - DNA, 25 bp, Probe sequence
atgcgtgatgaatcctgtatattac

SEQ ID NO: 70567 - DNA, 25 bp, Probe sequence
cagaatgtgatgtgctaccttatat

SEQ ID NO: 70568 - DNA, 25 bp, Probe sequence
ttatgcgtgatgaatcctgtatatt

SEQ ID NO: 70569 - DNA, 25 bp, Probe sequence
acagaatgtgatgtgctaccttata

SEQ ID NO: 70570 - DNA, 25 bp, Probe sequence
attatgcgtgatgaatcctgtatat

SEQ ID NO: 70571 - DNA, 25 bp, Probe sequence
atggtacataagttgaacaagtgaa

SEQ ID NO: 70572 - DNA, 25 bp, Probe sequence
tatgcgtgatgaatcctgtatatta

SEQ ID NO: 70573 - DNA, 25 bp, Probe sequence
tgattatgcgtgatgaatcctgtat

SEQ ID NO: 70574 - DNA, 25 bp, Probe sequence
ttgattatgcgtgatgaatcctgta

SEQ ID NO: 70575 - DNA, 25 bp, Probe sequence
agggaatatatgacaccaacaaaca

SEQ ID NO: 70576 - DNA, 25 bp, Probe sequence
cagggaatatatgacaccaacaaac

SEQ ID NO: 70577 - DNA, 25 bp, Probe sequence
acagggaatatatgacaccaacaaa

SEQ ID NO: 70578 - DNA, 25 bp, Probe sequence
aacagggaatatatgacaccaacaa

SEQ ID NO: 70579 - DNA, 25 bp, Probe sequence
aaacagggaatatatgacaccaaca

SEQ ID NO: 70580 - DNA, 25 bp, Probe sequence
gggaatatatgacaccaacaaacat

SEQ ID NO: 70581 - DNA, 25 bp, Probe sequence
taaacagggaatatatgacaccaac

SEQ ID NO: 70582 - DNA, 25 bp, Probe sequence
acaccaacaaacatttatgtctgaa

SEQ ID NO: 70583 - DNA, 25 bp, Probe sequence
caccaacaaacatttatgtctgaaa

SEQ ID NO: 70584 - DNA, 25 bp, Probe sequence
tgttggtgtcatatattccctgttt

SEQ ID NO: 70585 - DNA, 25 bp, Probe sequence
ttgttggtgtcatatattccctgtt

SEQ ID NO: 70586 - DNA, 25 bp, Probe sequence
tttgttggtgtcatatattccctgt

SEQ ID NO: 70587 - DNA, 25 bp, Probe sequence
gtttgttggtgtcatatattccctg

SEQ ID NO: 70588 - DNA, 25 bp, Probe sequence
tgtttgttggtgtcatatattccct

SEQ ID NO: 70589 - DNA, 25 bp, Probe sequence
atgtttgttggtgtcatatattccc

SEQ ID NO: 70590 - DNA, 25 bp, Probe sequence
gttggtgtcatatattccctgttta

SEQ ID NO: 70591 - DNA, 25 bp, Probe sequence
ttcagacataaatgtttgttggtgt

SEQ ID NO: 70592 - DNA, 25 bp, Probe sequence
tttcagacataaatgtttgttggtg

SEQ ID NO: 70593 - DNA, 25 bp, Probe sequence
ttagatcatcttgtcttcaatcatt

SEQ ID NO: 70594 - DNA, 25 bp, Probe sequence
gattagatcatcttgtcttcaatca

SEQ ID NO: 70595 - DNA, 25 bp, Probe sequence
attagatcatcttgtcttcaatcat

SEQ ID NO: 70596 - DNA, 25 bp, Probe sequence
tggctttctgtgtaatattgattag

SEQ ID NO: 70597 - DNA, 25 bp, Probe sequence
catcttgtcttcaatcatttaaacg

SEQ ID NO: 70598 - DNA, 25 bp, Probe sequence
tcttgtcttcaatcatttaaacgat

SEQ ID NO: 70599 - DNA, 25 bp, Probe sequence
atcttgtcttcaatcatttaaacga

SEQ ID NO: 70600 - DNA, 25 bp, Probe sequence
tgattagatcatcttgtcttcaatc

SEQ ID NO: 70601 - DNA, 25 bp, Probe sequence
ggctttctgtgtaatattgattaga

SEQ ID NO: 70602 - DNA, 25 bp, Probe sequence
aatgattgaagacaagatgatctaa

SEQ ID NO: 70603 - DNA, 25 bp, Probe sequence
tgattgaagacaagatgatctaatc

SEQ ID NO: 70604 - DNA, 25 bp, Probe sequence
atgattgaagacaagatgatctaat

SEQ ID NO: 70605 - DNA, 25 bp, Probe sequence
ctaatcaatattacacagaaagcca

SEQ ID NO: 70606 - DNA, 25 bp, Probe sequence
cgtttaaatgattgaagacaagatg

SEQ ID NO: 70607 - DNA, 25 bp, Probe sequence
tcgtttaaatgattgaagacaagat

SEQ ID NO: 70608 - DNA, 25 bp, Probe sequence
atcgtttaaatgattgaagacaaga

SEQ ID NO: 70609 - DNA, 25 bp, Probe sequence
gattgaagacaagatgatctaatca

SEQ ID NO: 70610 - DNA, 25 bp, Probe sequence
tctaatcaatattacacagaaagcc

SEQ ID NO: 70611 - DNA, 25 bp, Probe sequence
ctccgaagtcagagttaggctataa

SEQ ID NO: 70612 - DNA, 25 bp, Probe sequence
ccgaagtcagagttaggctataaat

SEQ ID NO: 70613 - DNA, 25 bp, Probe sequence
tccgaagtcagagttaggctataaa

SEQ ID NO: 70614 - DNA, 25 bp, Probe sequence
cgaagtcagagttaggctataaatt

SEQ ID NO: 70615 - DNA, 25 bp, Probe sequence
caccctctttattttgattatgcct

SEQ ID NO: 70616 - DNA, 25 bp, Probe sequence
tccctcaatttaattcatttaacca

SEQ ID NO: 70617 - DNA, 25 bp, Probe sequence
tcaccctctttattttgattatgcc

SEQ ID NO: 70618 - DNA, 25 bp, Probe sequence
actccgaagtcagagttaggctata

SEQ ID NO: 70619 - DNA, 25 bp, Probe sequence
accctctttattttgattatgccta

SEQ ID NO: 70620 - DNA, 25 bp, Probe sequence
ttatagcctaactctgacttcggag

SEQ ID NO: 70621 - DNA, 25 bp, Probe sequence
atttatagcctaactctgacttcgg

SEQ ID NO: 70622 - DNA, 25 bp, Probe sequence
tttatagcctaactctgacttcgga

SEQ ID NO: 70623 - DNA, 25 bp, Probe sequence
aatttatagcctaactctgacttcg

SEQ ID NO: 70624 - DNA, 25 bp, Probe sequence
aggcataatcaaaataaagagggtg

SEQ ID NO: 70625 - DNA, 25 bp, Probe sequence
tggttaaatgaattaaattgaggga

SEQ ID NO: 70626 - DNA, 25 bp, Probe sequence
ggcataatcaaaataaagagggtga

SEQ ID NO: 70627 - DNA, 25 bp, Probe sequence
tatagcctaactctgacttcggagt

SEQ ID NO: 70628 - DNA, 25 bp, Probe sequence
taggcataatcaaaataaagagggt

SEQ ID NO: 70629 - DNA, 25 bp, Probe sequence
agtcattacttacatacatcaacgc

SEQ ID NO: 70630 - DNA, 25 bp, Probe sequence
tagtcattacttacatacatcaacg

SEQ ID NO: 70631 - DNA, 25 bp, Probe sequence
gtcattacttacatacatcaacgcg

SEQ ID NO: 70632 - DNA, 25 bp, Probe sequence
aaagcgttttccgttgatatattta

SEQ ID NO: 70633 - DNA, 25 bp, Probe sequence
tttgaaagcgttttccgttgatata

SEQ ID NO: 70634 - DNA, 25 bp, Probe sequence
aagcgttttccgttgatatatttat

SEQ ID NO: 70635 - DNA, 25 bp, Probe sequence
ttttgaaagcgttttccgttgatat

SEQ ID NO: 70636 - DNA, 25 bp, Probe sequence
attttgaaagcgttttccgttgata

SEQ ID NO: 70637 - DNA, 25 bp, Probe sequence
tatgaattttgaaagcgttttccgt

SEQ ID NO: 70638 - DNA, 25 bp, Probe sequence
gcgttgatgtatgtaagtaatgact

SEQ ID NO: 70639 - DNA, 25 bp, Probe sequence
cgttgatgtatgtaagtaatgacta

SEQ ID NO: 70640 - DNA, 25 bp, Probe sequence
cgcgttgatgtatgtaagtaatgac

SEQ ID NO: 70641 - DNA, 25 bp, Probe sequence
taaatatatcaacggaaaacgcttt

SEQ ID NO: 70642 - DNA, 25 bp, Probe sequence
tatatcaacggaaaacgctttcaaa

SEQ ID NO: 70643 - DNA, 25 bp, Probe sequence
ataaatatatcaacggaaaacgctt

SEQ ID NO: 70644 - DNA, 25 bp, Probe sequence
cggaaaacgctttcaaaattcatat

SEQ ID NO: 70645 - DNA, 25 bp, Probe sequence
acggaaaacgctttcaaaattcata

SEQ ID NO: 70646 - DNA, 25 bp, Probe sequence
tatcaacggaaaacgctttcaaaat

SEQ ID NO: 70647 - DNA, 25 bp, Probe sequence
attgttcttgatgagcactccataa

SEQ ID NO: 70648 - DNA, 25 bp, Probe sequence
gattgttcttgatgagcactccata

SEQ ID NO: 70649 - DNA, 25 bp, Probe sequence
atgattgttcttgatgagcactcca

SEQ ID NO: 70650 - DNA, 25 bp, Probe sequence
tgattgttcttgatgagcactccat

SEQ ID NO: 70651 - DNA, 25 bp, Probe sequence
catgattgttcttgatgagcactcc

SEQ ID NO: 70652 - DNA, 25 bp, Probe sequence
ttgttcttgatgagcactccataaa

SEQ ID NO: 70653 - DNA, 25 bp, Probe sequence
tgttcttgatgagcactccataaag

SEQ ID NO: 70654 - DNA, 25 bp, Probe sequence
gagcactccataaagtcaggttaaa

SEQ ID NO: 70655 - DNA, 25 bp, Probe sequence
ttcttgatgagcactccataaagtc

SEQ ID NO: 70656 - DNA, 25 bp, Probe sequence
ttatggagtgctcatcaagaacaat

SEQ ID NO: 70657 - DNA, 25 bp, Probe sequence
tatggagtgctcatcaagaacaatc

SEQ ID NO: 70658 - DNA, 25 bp, Probe sequence
tggagtgctcatcaagaacaatcat

SEQ ID NO: 70659 - DNA, 25 bp, Probe sequence
atggagtgctcatcaagaacaatca

SEQ ID NO: 70660 - DNA, 25 bp, Probe sequence
ggagtgctcatcaagaacaatcatg

SEQ ID NO: 70661 - DNA, 25 bp, Probe sequence
tttatggagtgctcatcaagaacaa

SEQ ID NO: 70662 - DNA, 25 bp, Probe sequence
ctttatggagtgctcatcaagaaca

SEQ ID NO: 70663 - DNA, 25 bp, Probe sequence
tttaacctgactttatggagtgctc

SEQ ID NO: 70664 - DNA, 25 bp, Probe sequence
gactttatggagtgctcatcaagaa

SEQ ID NO: 70665 - DNA, 25 bp, Probe sequence
tctatgacgaatgattacacttgtg

SEQ ID NO: 70666 - DNA, 25 bp, Probe sequence
ttctatgacgaatgattacacttgt

SEQ ID NO: 70667 - DNA, 25 bp, Probe sequence
ctatgacgaatgattacacttgtgt

SEQ ID NO: 70668 - DNA, 25 bp, Probe sequence
tgcttgattcacaacaatctattac

SEQ ID NO: 70669 - DNA, 25 bp, Probe sequence
gcttgattcacaacaatctattact

SEQ ID NO: 70670 - DNA, 25 bp, Probe sequence
attgcttgattcacaacaatctatt

SEQ ID NO: 70671 - DNA, 25 bp, Probe sequence
aattgcttgattcacaacaatctat

SEQ ID NO: 70672 - DNA, 25 bp, Probe sequence
ttgcttgattcacaacaatctatta

SEQ ID NO: 70673 - DNA, 25 bp, Probe sequence
gcatgtttcctcaatcaaattagat

SEQ ID NO: 70674 - DNA, 25 bp, Probe sequence
cacaagtgtaatcattcgtcataga

SEQ ID NO: 70675 - DNA, 25 bp, Probe sequence
acaagtgtaatcattcgtcatagaa

SEQ ID NO: 70676 - DNA, 25 bp, Probe sequence
acacaagtgtaatcattcgtcatag

SEQ ID NO: 70677 - DNA, 25 bp, Probe sequence
gtaatagattgttgtgaatcaagca

SEQ ID NO: 70678 - DNA, 25 bp, Probe sequence
agtaatagattgttgtgaatcaagc

SEQ ID NO: 70679 - DNA, 25 bp, Probe sequence
atagattgttgtgaatcaagcaatt

SEQ ID NO: 70680 - DNA, 25 bp, Probe sequence
aatagattgttgtgaatcaagcaat

SEQ ID NO: 70681 - DNA, 25 bp, Probe sequence
taatagattgttgtgaatcaagcaa

SEQ ID NO: 70682 - DNA, 25 bp, Probe sequence
atctaatttgattgaggaaacatgc

SEQ ID NO: 70683 - DNA, 25 bp, Probe sequence
acatcctacacattatctttacaca

SEQ ID NO: 70684 - DNA, 25 bp, Probe sequence
aacatcctacacattatctttacac

SEQ ID NO: 70685 - DNA, 25 bp, Probe sequence
ggtatgcctccctaacttataatta

SEQ ID NO: 70686 - DNA, 25 bp, Probe sequence
catcctacacattatctttacacat

SEQ ID NO: 70687 - DNA, 25 bp, Probe sequence
tcctacacattatctttacacattt

SEQ ID NO: 70688 - DNA, 25 bp, Probe sequence
atcctacacattatctttacacatt

SEQ ID NO: 70689 - DNA, 25 bp, Probe sequence
tttccttctatcatttgcatgactt

SEQ ID NO: 70690 - DNA, 25 bp, Probe sequence
ccttctatcatttgcatgacttact

SEQ ID NO: 70691 - DNA, 25 bp, Probe sequence
tccttctatcatttgcatgacttac

SEQ ID NO: 70692 - DNA, 25 bp, Probe sequence
tgtgtaaagataatgtgtaggatgt

SEQ ID NO: 70693 - DNA, 25 bp, Probe sequence
gtgtaaagataatgtgtaggatgtt

SEQ ID NO: 70694 - DNA, 25 bp, Probe sequence
taattataagttagggaggcatacc

SEQ ID NO: 70695 - DNA, 25 bp, Probe sequence
atgtgtaaagataatgtgtaggatg

SEQ ID NO: 70696 - DNA, 25 bp, Probe sequence
aaatgtgtaaagataatgtgtagga

SEQ ID NO: 70697 - DNA, 25 bp, Probe sequence
aatgtgtaaagataatgtgtaggat

SEQ ID NO: 70698 - DNA, 25 bp, Probe sequence
aagtcatgcaaatgatagaaggaaa

SEQ ID NO: 70699 - DNA, 25 bp, Probe sequence
gtaagtcatgcaaatgatagaagga

SEQ ID NO: 70700 - DNA, 25 bp, Probe sequence
agtaagtcatgcaaatgatagaagg

SEQ ID NO: 70701 - DNA, 25 bp, Probe sequence
tatcctgttgccaacttcaattcat

SEQ ID NO: 70702 - DNA, 25 bp, Probe sequence
ttctatcctgttgccaacttcaatt

SEQ ID NO: 70703 - DNA, 25 bp, Probe sequence
acataatcaatcattggtgactctt

SEQ ID NO: 70704 - DNA, 25 bp, Probe sequence
tctatcctgttgccaacttcaattc

SEQ ID NO: 70705 - DNA, 25 bp, Probe sequence
ctatcctgttgccaacttcaattca

SEQ ID NO: 70706 - DNA, 25 bp, Probe sequence
actacataatcaatcattggtgact

SEQ ID NO: 70707 - DNA, 25 bp, Probe sequence
atcctgttgccaacttcaattcatt

SEQ ID NO: 70708 - DNA, 25 bp, Probe sequence
tacataatcaatcattggtgactct

SEQ ID NO: 70709 - DNA, 25 bp, Probe sequence
acactacataatcaatcattggtga

SEQ ID NO: 70710 - DNA, 25 bp, Probe sequence
aagagtcaccaatgattgattatgt

SEQ ID NO: 70711 - DNA, 25 bp, Probe sequence
aattgaagttggcaacaggatagaa

SEQ ID NO: 70712 - DNA, 25 bp, Probe sequence
atgaattgaagttggcaacaggata

SEQ ID NO: 70713 - DNA, 25 bp, Probe sequence
gaattgaagttggcaacaggataga

SEQ ID NO: 70714 - DNA, 25 bp, Probe sequence
tgaattgaagttggcaacaggatag

SEQ ID NO: 70715 - DNA, 25 bp, Probe sequence
agtcaccaatgattgattatgtagt

SEQ ID NO: 70716 - DNA, 25 bp, Probe sequence
aatgaattgaagttggcaacaggat

SEQ ID NO: 70717 - DNA, 25 bp, Probe sequence
agagtcaccaatgattgattatgta

SEQ ID NO: 70718 - DNA, 25 bp, Probe sequence
tcaccaatgattgattatgtagtgt

SEQ ID NO: 70719 - DNA, 25 bp, Probe sequence
agaatagccacaaatagcaccatta

SEQ ID NO: 70720 - DNA, 25 bp, Probe sequence
gaatagccacaaatagcaccattaa

SEQ ID NO: 70721 - DNA, 25 bp, Probe sequence
atagccacaaatagcaccattaaag

SEQ ID NO: 70722 - DNA, 25 bp, Probe sequence
aatagccacaaatagcaccattaaa

SEQ ID NO: 70723 - DNA, 25 bp, Probe sequence
cagaatagccacaaatagcaccatt

SEQ ID NO: 70724 - DNA, 25 bp, Probe sequence
gtaaatgtcacagaatagccacaaa

SEQ ID NO: 70725 - DNA, 25 bp, Probe sequence
atgtaaatgtcacagaatagccaca

SEQ ID NO: 70726 - DNA, 25 bp, Probe sequence
aatgtcacagaatagccacaaatag

SEQ ID NO: 70727 - DNA, 25 bp, Probe sequence
tagccacaaatagcaccattaaagc

SEQ ID NO: 70728 - DNA, 25 bp, Probe sequence
taatggtgctatttgtggctattct

SEQ ID NO: 70729 - DNA, 25 bp, Probe sequence
ttaatggtgctatttgtggctattc

SEQ ID NO: 70730 - DNA, 25 bp, Probe sequence
ctttaatggtgctatttgtggctat

SEQ ID NO: 70731 - DNA, 25 bp, Probe sequence
tttaatggtgctatttgtggctatt

SEQ ID NO: 70732 - DNA, 25 bp, Probe sequence
aatggtgctatttgtggctattctg

SEQ ID NO: 70733 - DNA, 25 bp, Probe sequence
tttgtggctattctgtgacatttac

SEQ ID NO: 70734 - DNA, 25 bp, Probe sequence
tgtggctattctgtgacatttacat

SEQ ID NO: 70735 - DNA, 25 bp, Probe sequence
ctatttgtggctattctgtgacatt

SEQ ID NO: 70736 - DNA, 25 bp, Probe sequence
ttgtggctattctgtgacatttaca

SEQ ID NO: 70737 - DNA, 25 bp, Probe sequence
agattgccattcatacactatcatt

SEQ ID NO: 70738 - DNA, 25 bp, Probe sequence
tgccattcatacactatcattatca

SEQ ID NO: 70739 - DNA, 25 bp, Probe sequence
tagattgccattcatacactatcat

SEQ ID NO: 70740 - DNA, 25 bp, Probe sequence
gccattcatacactatcattatcaa

SEQ ID NO: 70741 - DNA, 25 bp, Probe sequence
ttgccattcatacactatcattatc

SEQ ID NO: 70742 - DNA, 25 bp, Probe sequence
gattgccattcatacactatcatta

SEQ ID NO: 70743 - DNA, 25 bp, Probe sequence
aaacgcctttccattgttgataaat

SEQ ID NO: 70744 - DNA, 25 bp, Probe sequence
atagattgccattcatacactatca

SEQ ID NO: 70745 - DNA, 25 bp, Probe sequence
agtgaaagtttgaaggtgataatgt

SEQ ID NO: 70746 - DNA, 25 bp, Probe sequence
aatgatagtgtatgaatggcaatct

SEQ ID NO: 70747 - DNA, 25 bp, Probe sequence
tgataatgatagtgtatgaatggca

SEQ ID NO: 70748 - DNA, 25 bp, Probe sequence
atgatagtgtatgaatggcaatcta

SEQ ID NO: 70749 - DNA, 25 bp, Probe sequence
gataatgatagtgtatgaatggcaa

SEQ ID NO: 70750 - DNA, 25 bp, Probe sequence
ttgataatgatagtgtatgaatggc

SEQ ID NO: 70751 - DNA, 25 bp, Probe sequence
taatgatagtgtatgaatggcaatc

SEQ ID NO: 70752 - DNA, 25 bp, Probe sequence
atttatcaacaatggaaaggcgttt

SEQ ID NO: 70753 - DNA, 25 bp, Probe sequence
acattatcaccttcaaactttcact

SEQ ID NO: 70754 - DNA, 25 bp, Probe sequence
tgatagtgtatgaatggcaatctat

SEQ ID NO: 70755 - DNA, 25 bp, Probe sequence
gacgacatacctttctataactgat

SEQ ID NO: 70756 - DNA, 25 bp, Probe sequence
accacaaattgatatgtcattccat

SEQ ID NO: 70757 - DNA, 25 bp, Probe sequence
ccacaaattgatatgtcattccatc

SEQ ID NO: 70758 - DNA, 25 bp, Probe sequence
taccacaaattgatatgtcattcca

SEQ ID NO: 70759 - DNA, 25 bp, Probe sequence
acgacatacctttctataactgatt

SEQ ID NO: 70760 - DNA, 25 bp, Probe sequence
ttaccacaaattgatatgtcattcc

SEQ ID NO: 70761 - DNA, 25 bp, Probe sequence
cgacatacctttctataactgattt

SEQ ID NO: 70762 - DNA, 25 bp, Probe sequence
agccacaattttgactactaatctt

SEQ ID NO: 70763 - DNA, 25 bp, Probe sequence
aagattagtagccacaattttgact

SEQ ID NO: 70764 - DNA, 25 bp, Probe sequence
atcagttatagaaaggtatgtcgtc

SEQ ID NO: 70765 - DNA, 25 bp, Probe sequence
atggaatgacatatcaatttgtggt

SEQ ID NO: 70766 - DNA, 25 bp, Probe sequence
gatggaatgacatatcaatttgtgg

SEQ ID NO: 70767 - DNA, 25 bp, Probe sequence
tggaatgacatatcaatttgtggta

SEQ ID NO: 70768 - DNA, 25 bp, Probe sequence
aatcagttatagaaaggtatgtcgt

SEQ ID NO: 70769 - DNA, 25 bp, Probe sequence
ggaatgacatatcaatttgtggtaa

SEQ ID NO: 70770 - DNA, 25 bp, Probe sequence
aaatcagttatagaaaggtatgtcg

SEQ ID NO: 70771 - DNA, 25 bp, Probe sequence
aagattagtagtcaaaattgtggct

SEQ ID NO: 70772 - DNA, 25 bp, Probe sequence
agtcaaaattgtggctactaatctt

SEQ ID NO: 70773 - DNA, 25 bp, Probe sequence
ttagagccttaaactgaacttgacc

SEQ ID NO: 70774 - DNA, 25 bp, Probe sequence
ctccaaataacctctgttctaacca

SEQ ID NO: 70775 - DNA, 25 bp, Probe sequence
acctccaaataacctctgttctaac

SEQ ID NO: 70776 - DNA, 25 bp, Probe sequence
tccaaataacctctgttctaaccat

SEQ ID NO: 70777 - DNA, 25 bp, Probe sequence
aacctccaaataacctctgttctaa

SEQ ID NO: 70778 - DNA, 25 bp, Probe sequence
aaacctccaaataacctctgttcta

SEQ ID NO: 70779 - DNA, 25 bp, Probe sequence
accatttagagccttaaactgaact

SEQ ID NO: 70780 - DNA, 25 bp, Probe sequence
cctccaaataacctctgttctaacc

SEQ ID NO: 70781 - DNA, 25 bp, Probe sequence
aaccatttagagccttaaactgaac

SEQ ID NO: 70782 - DNA, 25 bp, Probe sequence
ggtcaagttcagtttaaggctctaa

SEQ ID NO: 70783 - DNA, 25 bp, Probe sequence
gttagaacagaggttatttggaggt

SEQ ID NO: 70784 - DNA, 25 bp, Probe sequence
tggttagaacagaggttatttggag

SEQ ID NO: 70785 - DNA, 25 bp, Probe sequence
atggttagaacagaggttatttgga

SEQ ID NO: 70786 - DNA, 25 bp, Probe sequence
tagaacagaggttatttggaggttt

SEQ ID NO: 70787 - DNA, 25 bp, Probe sequence
ttagaacagaggttatttggaggtt

SEQ ID NO: 70788 - DNA, 25 bp, Probe sequence
agttcagtttaaggctctaaatggt

SEQ ID NO: 70789 - DNA, 25 bp, Probe sequence
ggttagaacagaggttatttggagg

SEQ ID NO: 70790 - DNA, 25 bp, Probe sequence
gttcagtttaaggctctaaatggtt

SEQ ID NO: 70791 - DNA, 25 bp, Probe sequence
actaatataaacgcaaactgatggt

SEQ ID NO: 70792 - DNA, 25 bp, Probe sequence
aactaatataaacgcaaactgatgg

SEQ ID NO: 70793 - DNA, 25 bp, Probe sequence
tgtaacacaaatagcgataaacgat

SEQ ID NO: 70794 - DNA, 25 bp, Probe sequence
atgtaacacaaatagcgataaacga

SEQ ID NO: 70795 - DNA, 25 bp, Probe sequence
ctaatataaacgcaaactgatggtt

SEQ ID NO: 70796 - DNA, 25 bp, Probe sequence
gtaacacaaatagcgataaacgata

SEQ ID NO: 70797 - DNA, 25 bp, Probe sequence
ttgggtaaatctgaatgagtaagaa

SEQ ID NO: 70798 - DNA, 25 bp, Probe sequence
aacacaaatagcgataaacgataat

SEQ ID NO: 70799 - DNA, 25 bp, Probe sequence
tgggtaaatctgaatgagtaagaat

SEQ ID NO: 70800 - DNA, 25 bp, Probe sequence
accatcagtttgcgtttatattagt

SEQ ID NO: 70801 - DNA, 25 bp, Probe sequence
tcgtttatcgctatttgtgttacat

SEQ ID NO: 70802 - DNA, 25 bp, Probe sequence
atcgtttatcgctatttgtgttaca

SEQ ID NO: 70803 - DNA, 25 bp, Probe sequence
ccatcagtttgcgtttatattagtt

SEQ ID NO: 70804 - DNA, 25 bp, Probe sequence
tatcgtttatcgctatttgtgttac

SEQ ID NO: 70805 - DNA, 25 bp, Probe sequence
aaccatcagtttgcgtttatattag

SEQ ID NO: 70806 - DNA, 25 bp, Probe sequence
ttcttactcattcagatttacccaa

SEQ ID NO: 70807 - DNA, 25 bp, Probe sequence
attatcgtttatcgctatttgtgtt

SEQ ID NO: 70808 - DNA, 25 bp, Probe sequence
tcttactcattcagatttacccaat

SEQ ID NO: 70809 - DNA, 25 bp, Probe sequence
tactgccatattaaactatttgccc

SEQ ID NO: 70810 - DNA, 25 bp, Probe sequence
tgccatattaaactatttgcccgtt

SEQ ID NO: 70811 - DNA, 25 bp, Probe sequence
ctgccatattaaactatttgcccgt

SEQ ID NO: 70812 - DNA, 25 bp, Probe sequence
actgccatattaaactatttgcccg

SEQ ID NO: 70813 - DNA, 25 bp, Probe sequence
ttactgccatattaaactatttgcc

SEQ ID NO: 70814 - DNA, 25 bp, Probe sequence
gccatattaaactatttgcccgttt

SEQ ID NO: 70815 - DNA, 25 bp, Probe sequence
gttactgccatattaaactatttgc

SEQ ID NO: 70816 - DNA, 25 bp, Probe sequence
tgttactgccatattaaactatttg

SEQ ID NO: 70817 - DNA, 25 bp, Probe sequence
ccatattaaactatttgcccgtttt

SEQ ID NO: 70818 - DNA, 25 bp, Probe sequence
gggcaaatagtttaatatggcagta

SEQ ID NO: 70819 - DNA, 25 bp, Probe sequence
aacgggcaaatagtttaatatggca

SEQ ID NO: 70820 - DNA, 25 bp, Probe sequence
cgggcaaatagtttaatatggcagt

SEQ ID NO: 70821 - DNA, 25 bp, Probe sequence
acgggcaaatagtttaatatggcag

SEQ ID NO: 70822 - DNA, 25 bp, Probe sequence
ggcaaatagtttaatatggcagtaa

SEQ ID NO: 70823 - DNA, 25 bp, Probe sequence
aaacgggcaaatagtttaatatggc

SEQ ID NO: 70824 - DNA, 25 bp, Probe sequence
gcaaatagtttaatatggcagtaac

SEQ ID NO: 70825 - DNA, 25 bp, Probe sequence
caaatagtttaatatggcagtaaca

SEQ ID NO: 70826 - DNA, 25 bp, Probe sequence
aaaacgggcaaatagtttaatatgg

SEQ ID NO: 70827 - DNA, 25 bp, Probe sequence
tgtgcgaaatctatcttatgcctat

SEQ ID NO: 70828 - DNA, 25 bp, Probe sequence
ttgtgcgaaatctatcttatgccta

SEQ ID NO: 70829 - DNA, 25 bp, Probe sequence
gtgcgaaatctatcttatgcctatt

SEQ ID NO: 70830 - DNA, 25 bp, Probe sequence
tttgtgcgaaatctatcttatgcct

SEQ ID NO: 70831 - DNA, 25 bp, Probe sequence
gtttgtgcgaaatctatcttatgcc

SEQ ID NO: 70832 - DNA, 25 bp, Probe sequence
cgtttgtgcgaaatctatcttatgc

SEQ ID NO: 70833 - DNA, 25 bp, Probe sequence
tgcgaaatctatcttatgcctattt

SEQ ID NO: 70834 - DNA, 25 bp, Probe sequence
acgtttgtgcgaaatctatcttatg

SEQ ID NO: 70835 - DNA, 25 bp, Probe sequence
tatgcctattttctctgctaagttc

SEQ ID NO: 70836 - DNA, 25 bp, Probe sequence
taggcataagatagatttcgcacaa

SEQ ID NO: 70837 - DNA, 25 bp, Probe sequence
ataggcataagatagatttcgcaca

SEQ ID NO: 70838 - DNA, 25 bp, Probe sequence
aataggcataagatagatttcgcac

SEQ ID NO: 70839 - DNA, 25 bp, Probe sequence
ggcataagatagatttcgcacaaac

SEQ ID NO: 70840 - DNA, 25 bp, Probe sequence
aggcataagatagatttcgcacaaa

SEQ ID NO: 70841 - DNA, 25 bp, Probe sequence
gcataagatagatttcgcacaaacg

SEQ ID NO: 70842 - DNA, 25 bp, Probe sequence
aaataggcataagatagatttcgca

SEQ ID NO: 70843 - DNA, 25 bp, Probe sequence
cataagatagatttcgcacaaacgt

SEQ ID NO: 70844 - DNA, 25 bp, Probe sequence
gaacttagcagagaaaataggcata

SEQ ID NO: 70845 - DNA, 25 bp, Probe sequence
tagaatgtaagtgaggagggatgta

SEQ ID NO: 70846 - DNA, 25 bp, Probe sequence
attagaatgtaagtgaggagggatg

SEQ ID NO: 70847 - DNA, 25 bp, Probe sequence
ttagaatgtaagtgaggagggatgt

SEQ ID NO: 70848 - DNA, 25 bp, Probe sequence
ttattagaatgtaagtgaggaggga

SEQ ID NO: 70849 - DNA, 25 bp, Probe sequence
tattagaatgtaagtgaggagggat

SEQ ID NO: 70850 - DNA, 25 bp, Probe sequence
aatgtaagtgaggagggatgtacta

SEQ ID NO: 70851 - DNA, 25 bp, Probe sequence
agaatgtaagtgaggagggatgtac

SEQ ID NO: 70852 - DNA, 25 bp, Probe sequence
tttattagaatgtaagtgaggaggg

SEQ ID NO: 70853 - DNA, 25 bp, Probe sequence
gaatgtaagtgaggagggatgtact

SEQ ID NO: 70854 - DNA, 25 bp, Probe sequence
tacatccctcctcacttacattcta

SEQ ID NO: 70855 - DNA, 25 bp, Probe sequence
catccctcctcacttacattctaat

SEQ ID NO: 70856 - DNA, 25 bp, Probe sequence
acatccctcctcacttacattctaa

SEQ ID NO: 70857 - DNA, 25 bp, Probe sequence
tccctcctcacttacattctaataa

SEQ ID NO: 70858 - DNA, 25 bp, Probe sequence
atccctcctcacttacattctaata

SEQ ID NO: 70859 - DNA, 25 bp, Probe sequence
gtacatccctcctcacttacattct

SEQ ID NO: 70860 - DNA, 25 bp, Probe sequence
tagtacatccctcctcacttacatt

SEQ ID NO: 70861 - DNA, 25 bp, Probe sequence
ccctcctcacttacattctaataaa

SEQ ID NO: 70862 - DNA, 25 bp, Probe sequence
agtacatccctcctcacttacattc

SEQ ID NO: 70863 - DNA, 25 bp, Probe sequence
ataacttccacatagattagcgagg

SEQ ID NO: 70864 - DNA, 25 bp, Probe sequence
atgattatgactgtggttctggatt

SEQ ID NO: 70865 - DNA, 25 bp, Probe sequence
aatgattatgactgtggttctggat

SEQ ID NO: 70866 - DNA, 25 bp, Probe sequence
cgataacttccacatagattagcga

SEQ ID NO: 70867 - DNA, 25 bp, Probe sequence
acgataacttccacatagattagcg

SEQ ID NO: 70868 - DNA, 25 bp, Probe sequence
gcagacgataacttccacatagatt

SEQ ID NO: 70869 - DNA, 25 bp, Probe sequence
gacgataacttccacatagattagc

SEQ ID NO: 70870 - DNA, 25 bp, Probe sequence
taacttccacatagattagcgaggt

SEQ ID NO: 70871 - DNA, 25 bp, Probe sequence
gataacttccacatagattagcgag

SEQ ID NO: 70872 - DNA, 25 bp, Probe sequence
atccagaaccacagtcataatcatt

SEQ ID NO: 70873 - DNA, 25 bp, Probe sequence
aatccagaaccacagtcataatcat

SEQ ID NO: 70874 - DNA, 25 bp, Probe sequence
cctcgctaatctatgtggaagttat

SEQ ID NO: 70875 - DNA, 25 bp, Probe sequence
tcgctaatctatgtggaagttatcg

SEQ ID NO: 70876 - DNA, 25 bp, Probe sequence
cgctaatctatgtggaagttatcgt

SEQ ID NO: 70877 - DNA, 25 bp, Probe sequence
aatctatgtggaagttatcgtctgc

SEQ ID NO: 70878 - DNA, 25 bp, Probe sequence
gctaatctatgtggaagttatcgtc

SEQ ID NO: 70879 - DNA, 25 bp, Probe sequence
ctcgctaatctatgtggaagttatc

SEQ ID NO: 70880 - DNA, 25 bp, Probe sequence
acctcgctaatctatgtggaagtta

SEQ ID NO: 70881 - DNA, 25 bp, Probe sequence
aataaccaaggagatgataacgtca

SEQ ID NO: 70882 - DNA, 25 bp, Probe sequence
atgatttcttcgcattgtttctagc

SEQ ID NO: 70883 - DNA, 25 bp, Probe sequence
tcattctttagtacgctgtaatcca

SEQ ID NO: 70884 - DNA, 25 bp, Probe sequence
tctttagtacgctgtaatccattcc

SEQ ID NO: 70885 - DNA, 25 bp, Probe sequence
gtcattctttagtacgctgtaatcc

SEQ ID NO: 70886 - DNA, 25 bp, Probe sequence
taataaccaaggagatgataacgtc

SEQ ID NO: 70887 - DNA, 25 bp, Probe sequence
gatgatttcttcgcattgtttctag

SEQ ID NO: 70888 - DNA, 25 bp, Probe sequence
ttctttagtacgctgtaatccattc

SEQ ID NO: 70889 - DNA, 25 bp, Probe sequence
cattctttagtacgctgtaatccat

SEQ ID NO: 70890 - DNA, 25 bp, Probe sequence
tgacgttatcatctccttggttatt

SEQ ID NO: 70891 - DNA, 25 bp, Probe sequence
gctagaaacaatgcgaagaaatcat

SEQ ID NO: 70892 - DNA, 25 bp, Probe sequence
tggattacagcgtactaaagaatga

SEQ ID NO: 70893 - DNA, 25 bp, Probe sequence
ggattacagcgtactaaagaatgac

SEQ ID NO: 70894 - DNA, 25 bp, Probe sequence
ggaatggattacagcgtactaaaga

SEQ ID NO: 70895 - DNA, 25 bp, Probe sequence
gacgttatcatctccttggttatta

SEQ ID NO: 70896 - DNA, 25 bp, Probe sequence
ctagaaacaatgcgaagaaatcatc

SEQ ID NO: 70897 - DNA, 25 bp, Probe sequence
atggattacagcgtactaaagaatg

SEQ ID NO: 70898 - DNA, 25 bp, Probe sequence
gaatggattacagcgtactaaagaa

SEQ ID NO: 70899 - DNA, 25 bp, Probe sequence
aattaagaaagaacaaggaggcact

SEQ ID NO: 70900 - DNA, 25 bp, Probe sequence
attaagaaagaacaaggaggcactt

SEQ ID NO: 70901 - DNA, 25 bp, Probe sequence
ttaagaaagaacaaggaggcactta

SEQ ID NO: 70902 - DNA, 25 bp, Probe sequence
taattaagaaagaacaaggaggcac

SEQ ID NO: 70903 - DNA, 25 bp, Probe sequence
taagaaagaacaaggaggcacttac

SEQ ID NO: 70904 - DNA, 25 bp, Probe sequence
aagaaagaacaaggaggcacttact

SEQ ID NO: 70905 - DNA, 25 bp, Probe sequence
ataattaagaaagaacaaggaggca

SEQ ID NO: 70906 - DNA, 25 bp, Probe sequence
aggttattacactgacttttccgaa

SEQ ID NO: 70907 - DNA, 25 bp, Probe sequence
aaggttattacactgacttttccga

SEQ ID NO: 70908 - DNA, 25 bp, Probe sequence
agtgcctccttgttctttcttaatt

SEQ ID NO: 70909 - DNA, 25 bp, Probe sequence
aagtgcctccttgttctttcttaat

SEQ ID NO: 70910 - DNA, 25 bp, Probe sequence
taagtgcctccttgttctttcttaa

SEQ ID NO: 70911 - DNA, 25 bp, Probe sequence
gtgcctccttgttctttcttaatta

SEQ ID NO: 70912 - DNA, 25 bp, Probe sequence
gtaagtgcctccttgttctttctta

SEQ ID NO: 70913 - DNA, 25 bp, Probe sequence
agtaagtgcctccttgttctttctt

SEQ ID NO: 70914 - DNA, 25 bp, Probe sequence
tgcctccttgttctttcttaattat

SEQ ID NO: 70915 - DNA, 25 bp, Probe sequence
ttcggaaaagtcagtgtaataacct

SEQ ID NO: 70916 - DNA, 25 bp, Probe sequence
tcggaaaagtcagtgtaataacctt

SEQ ID NO: 70917 - DNA, 25 bp, Probe sequence
agcgtctacctcctacatataattg

SEQ ID NO: 70918 - DNA, 25 bp, Probe sequence
catataattgtagcggagatagacg

SEQ ID NO: 70919 - DNA, 25 bp, Probe sequence
aagcgtctacctcctacatataatt

SEQ ID NO: 70920 - DNA, 25 bp, Probe sequence
gcgtctacctcctacatataattgt

SEQ ID NO: 70921 - DNA, 25 bp, Probe sequence
acatataattgtagcggagatagac

SEQ ID NO: 70922 - DNA, 25 bp, Probe sequence
aaagcgtctacctcctacatataat

SEQ ID NO: 70923 - DNA, 25 bp, Probe sequence
ttgatcattatgaaccaagtgcaac

SEQ ID NO: 70924 - DNA, 25 bp, Probe sequence
gatcattatgaaccaagtgcaactt

SEQ ID NO: 70925 - DNA, 25 bp, Probe sequence
cgtctacctcctacatataattgta

SEQ ID NO: 70926 - DNA, 25 bp, Probe sequence
caattatatgtaggaggtagacgct

SEQ ID NO: 70927 - DNA, 25 bp, Probe sequence
aattatatgtaggaggtagacgctt

SEQ ID NO: 70928 - DNA, 25 bp, Probe sequence
cgtctatctccgctacaattatatg

SEQ ID NO: 70929 - DNA, 25 bp, Probe sequence
acaattatatgtaggaggtagacgc

SEQ ID NO: 70930 - DNA, 25 bp, Probe sequence
gtctatctccgctacaattatatgt

SEQ ID NO: 70931 - DNA, 25 bp, Probe sequence
attatatgtaggaggtagacgcttt

SEQ ID NO: 70932 - DNA, 25 bp, Probe sequence
gttgcacttggttcataatgatcaa

SEQ ID NO: 70933 - DNA, 25 bp, Probe sequence
aagttgcacttggttcataatgatc

SEQ ID NO: 70934 - DNA, 25 bp, Probe sequence
tacaattatatgtaggaggtagacg

SEQ ID NO: 70935 - DNA, 25 bp, Probe sequence
gtaatgatcctccatcgtttgcttt

SEQ ID NO: 70936 - DNA, 25 bp, Probe sequence
agtaatgatcctccatcgtttgctt

SEQ ID NO: 70937 - DNA, 25 bp, Probe sequence
aagtaatgatcctccatcgtttgct

SEQ ID NO: 70938 - DNA, 25 bp, Probe sequence
taatgatcctccatcgtttgctttt

SEQ ID NO: 70939 - DNA, 25 bp, Probe sequence
aaagcaaacgatggaggatcattac

SEQ ID NO: 70940 - DNA, 25 bp, Probe sequence
agcaaacgatggaggatcattactt

SEQ ID NO: 70941 - DNA, 25 bp, Probe sequence
aagcaaacgatggaggatcattact

SEQ ID NO: 70942 - DNA, 25 bp, Probe sequence
aaaagcaaacgatggaggatcatta

SEQ ID NO: 70943 - DNA, 25 bp, Probe sequence
ttgacaacgatggacacgatgtata

SEQ ID NO: 70944 - DNA, 25 bp, Probe sequence
ttaatgctgttgacaacgatggaca

SEQ ID NO: 70945 - DNA, 25 bp, Probe sequence
tttaatgctgttgacaacgatggac

SEQ ID NO: 70946 - DNA, 25 bp, Probe sequence
gttgacaacgatggacacgatgtat

SEQ ID NO: 70947 - DNA, 25 bp, Probe sequence
tgacaacgatggacacgatgtatac

SEQ ID NO: 70948 - DNA, 25 bp, Probe sequence
taatgctgttgacaacgatggacac

SEQ ID NO: 70949 - DNA, 25 bp, Probe sequence
tctattttaatgctgttgacaacga

SEQ ID NO: 70950 - DNA, 25 bp, Probe sequence
attttaatgctgttgacaacgatgg

SEQ ID NO: 70951 - DNA, 25 bp, Probe sequence
tattttaatgctgttgacaacgatg

SEQ ID NO: 70952 - DNA, 25 bp, Probe sequence
tatacatcgtgtccatcgttgtcaa

SEQ ID NO: 70953 - DNA, 25 bp, Probe sequence
tgtccatcgttgtcaacagcattaa

SEQ ID NO: 70954 - DNA, 25 bp, Probe sequence
gtccatcgttgtcaacagcattaaa

SEQ ID NO: 70955 - DNA, 25 bp, Probe sequence
atacatcgtgtccatcgttgtcaac

SEQ ID NO: 70956 - DNA, 25 bp, Probe sequence
gtatacatcgtgtccatcgttgtca

SEQ ID NO: 70957 - DNA, 25 bp, Probe sequence
gtgtccatcgttgtcaacagcatta

SEQ ID NO: 70958 - DNA, 25 bp, Probe sequence
tcgttgtcaacagcattaaaataga

SEQ ID NO: 70959 - DNA, 25 bp, Probe sequence
ccatcgttgtcaacagcattaaaat

SEQ ID NO: 70960 - DNA, 25 bp, Probe sequence
cgttgtcaacagcattaaaatagaa

SEQ ID NO: 70961 - DNA, 25 bp, Probe sequence
acgacaatttatggtttgattacaa

SEQ ID NO: 70962 - DNA, 25 bp, Probe sequence
attctaactacatcatacgacaatt

SEQ ID NO: 70963 - DNA, 25 bp, Probe sequence
aattctaactacatcatacgacaat

SEQ ID NO: 70964 - DNA, 25 bp, Probe sequence
acatcatacgacaatttatggtttg

SEQ ID NO: 70965 - DNA, 25 bp, Probe sequence
actacatcatacgacaatttatggt

SEQ ID NO: 70966 - DNA, 25 bp, Probe sequence
catcatacgacaatttatggtttga

SEQ ID NO: 70967 - DNA, 25 bp, Probe sequence
tacgacaatttatggtttgattaca

SEQ ID NO: 70968 - DNA, 25 bp, Probe sequence
tcatacgacaatttatggtttgatt

SEQ ID NO: 70969 - DNA, 25 bp, Probe sequence
ctacatcatacgacaatttatggtt

SEQ ID NO: 70970 - DNA, 25 bp, Probe sequence
ttgtaatcaaaccataaattgtcgt

SEQ ID NO: 70971 - DNA, 25 bp, Probe sequence
attgtcgtatgatgtagttagaatt

SEQ ID NO: 70972 - DNA, 25 bp, Probe sequence
aattgtcgtatgatgtagttagaat

SEQ ID NO: 70973 - DNA, 25 bp, Probe sequence
caaaccataaattgtcgtatgatgt

SEQ ID NO: 70974 - DNA, 25 bp, Probe sequence
accataaattgtcgtatgatgtagt

SEQ ID NO: 70975 - DNA, 25 bp, Probe sequence
tcaaaccataaattgtcgtatgatg

SEQ ID NO: 70976 - DNA, 25 bp, Probe sequence
tgtaatcaaaccataaattgtcgta

SEQ ID NO: 70977 - DNA, 25 bp, Probe sequence
ccataaattgtcgtatgatgtagtt

SEQ ID NO: 70978 - DNA, 25 bp, Probe sequence
aaccataaattgtcgtatgatgtag

SEQ ID NO: 70979 - DNA, 25 bp, Probe sequence
tcaagcattatactattatccgaca

SEQ ID NO: 70980 - DNA, 25 bp, Probe sequence
actcaagcattatactattatccga

SEQ ID NO: 70981 - DNA, 25 bp, Probe sequence
ctcaagcattatactattatccgac

SEQ ID NO: 70982 - DNA, 25 bp, Probe sequence
caagcattatactattatccgacaa

SEQ ID NO: 70983 - DNA, 25 bp, Probe sequence
aagcattatactattatccgacaaa

SEQ ID NO: 70984 - DNA, 25 bp, Probe sequence
actatttcactctatttaaacagct

SEQ ID NO: 70985 - DNA, 25 bp, Probe sequence
gactatttcactctatttaaacagc

SEQ ID NO: 70986 - DNA, 25 bp, Probe sequence
agcattatactattatccgacaaaa

SEQ ID NO: 70987 - DNA, 25 bp, Probe sequence
aaaggttatagcgcaaaataatctt

SEQ ID NO: 70988 - DNA, 25 bp, Probe sequence
tgtcggataatagtataatgcttga

SEQ ID NO: 70989 - DNA, 25 bp, Probe sequence
tcggataatagtataatgcttgagt

SEQ ID NO: 70990 - DNA, 25 bp, Probe sequence
gtcggataatagtataatgcttgag

SEQ ID NO: 70991 - DNA, 25 bp, Probe sequence
ttgtcggataatagtataatgcttg

SEQ ID NO: 70992 - DNA, 25 bp, Probe sequence
tttgtcggataatagtataatgctt

SEQ ID NO: 70993 - DNA, 25 bp, Probe sequence
agctgtttaaatagagtgaaatagt

SEQ ID NO: 70994 - DNA, 25 bp, Probe sequence
gctgtttaaatagagtgaaatagtc

SEQ ID NO: 70995 - DNA, 25 bp, Probe sequence
ttttgtcggataatagtataatgct

SEQ ID NO: 70996 - DNA, 25 bp, Probe sequence
aagattattttgcgctataaccttt

SEQ ID NO: 70997 - DNA, 25 bp, Probe sequence
tccaatttgacagagtgctcatatt

SEQ ID NO: 70998 - DNA, 25 bp, Probe sequence
ccaatttgacagagtgctcatatta

SEQ ID NO: 70999 - DNA, 25 bp, Probe sequence
aaactcatcagtccaatttgacaga

SEQ ID NO: 71000 - DNA, 25 bp, Probe sequence
taaactcatcagtccaatttgacag

SEQ ID NO: 71001 - DNA, 25 bp, Probe sequence
aactcatcagtccaatttgacagag

SEQ ID NO: 71002 - DNA, 25 bp, Probe sequence
gtccaatttgacagagtgctcatat

SEQ ID NO: 71003 - DNA, 25 bp, Probe sequence
ttaaactcatcagtccaatttgaca

SEQ ID NO: 71004 - DNA, 25 bp, Probe sequence
ctcatcagtccaatttgacagagtg

SEQ ID NO: 71005 - DNA, 25 bp, Probe sequence
agtccaatttgacagagtgctcata

SEQ ID NO: 71006 - DNA, 25 bp, Probe sequence
aatatgagcactctgtcaaattgga

SEQ ID NO: 71007 - DNA, 25 bp, Probe sequence
taatatgagcactctgtcaaattgg

SEQ ID NO: 71008 - DNA, 25 bp, Probe sequence
tctgtcaaattggactgatgagttt

SEQ ID NO: 71009 - DNA, 25 bp, Probe sequence
ctgtcaaattggactgatgagttta

SEQ ID NO: 71010 - DNA, 25 bp, Probe sequence
ctctgtcaaattggactgatgagtt

SEQ ID NO: 71011 - DNA, 25 bp, Probe sequence
tgtcaaattggactgatgagtttaa

SEQ ID NO: 71012 - DNA, 25 bp, Probe sequence
atatgagcactctgtcaaattggac

SEQ ID NO: 71013 - DNA, 25 bp, Probe sequence
cactctgtcaaattggactgatgag

SEQ ID NO: 71014 - DNA, 25 bp, Probe sequence
tatgagcactctgtcaaattggact

SEQ ID NO: 71015 - DNA, 25 bp, Probe sequence
atgcttctcctcctaatttatcatt

SEQ ID NO: 71016 - DNA, 25 bp, Probe sequence
tgcttctcctcctaatttatcatta

SEQ ID NO: 71017 - DNA, 25 bp, Probe sequence
gcttctcctcctaatttatcattac

SEQ ID NO: 71018 - DNA, 25 bp, Probe sequence
cttctcctcctaatttatcattact

SEQ ID NO: 71019 - DNA, 25 bp, Probe sequence
aacgtaattttgcttaaggataaat

SEQ ID NO: 71020 - DNA, 25 bp, Probe sequence
taacgtaattttgcttaaggataaa

SEQ ID NO: 71021 - DNA, 25 bp, Probe sequence
ataacgtaattttgcttaaggataa

SEQ ID NO: 71022 - DNA, 25 bp, Probe sequence
ttataacgtaattttgcttaaggat

SEQ ID NO: 71023 - DNA, 25 bp, Probe sequence
attataacgtaattttgcttaagga

SEQ ID NO: 71024 - DNA, 25 bp, Probe sequence
acgtaattttgcttaaggataaatt

SEQ ID NO: 71025 - DNA, 25 bp, Probe sequence
aatgataaattaggaggagaagcat

SEQ ID NO: 71026 - DNA, 25 bp, Probe sequence
taatgataaattaggaggagaagca

SEQ ID NO: 71027 - DNA, 25 bp, Probe sequence
gtaatgataaattaggaggagaagc

SEQ ID NO: 71028 - DNA, 25 bp, Probe sequence
agtaatgataaattaggaggagaag

SEQ ID NO: 71029 - DNA, 25 bp, Probe sequence
atttatccttaagcaaaattacgtt

SEQ ID NO: 71030 - DNA, 25 bp, Probe sequence
tttatccttaagcaaaattacgtta

SEQ ID NO: 71031 - DNA, 25 bp, Probe sequence
atccttaagcaaaattacgttataa

SEQ ID NO: 71032 - DNA, 25 bp, Probe sequence
ttatccttaagcaaaattacgttat

SEQ ID NO: 71033 - DNA, 25 bp, Probe sequence
tccttaagcaaaattacgttataat

SEQ ID NO: 71034 - DNA, 25 bp, Probe sequence
aatttatccttaagcaaaattacgt

SEQ ID NO: 71035 - DNA, 25 bp, Probe sequence
agtagcagttgtatattattgagcg

SEQ ID NO: 71036 - DNA, 25 bp, Probe sequence
cgtaactgtcgctataaggtgaaga

SEQ ID NO: 71037 - DNA, 25 bp, Probe sequence
gtcgctataaggtgaagacacataa

SEQ ID NO: 71038 - DNA, 25 bp, Probe sequence
gtaactgtcgctataaggtgaagac

SEQ ID NO: 71039 - DNA, 25 bp, Probe sequence
ttgtgtgaattaacgaaagtagcag

SEQ ID NO: 71040 - DNA, 25 bp, Probe sequence
tttgtgtgaattaacgaaagtagca

SEQ ID NO: 71041 - DNA, 25 bp, Probe sequence
ataaagtgttgacagttagcaggaa

SEQ ID NO: 71042 - DNA, 25 bp, Probe sequence
aataaagtgttgacagttagcagga

SEQ ID NO: 71043 - DNA, 25 bp, Probe sequence
taaagtgttgacagttagcaggaaa

SEQ ID NO: 71044 - DNA, 25 bp, Probe sequence
cgctcaataatatacaactgctact

SEQ ID NO: 71045 - DNA, 25 bp, Probe sequence
tcttcaccttatagcgacagttacg

SEQ ID NO: 71046 - DNA, 25 bp, Probe sequence
ttatgtgtcttcaccttatagcgac

SEQ ID NO: 71047 - DNA, 25 bp, Probe sequence
gtcttcaccttatagcgacagttac

SEQ ID NO: 71048 - DNA, 25 bp, Probe sequence
ctgctactttcgttaattcacacaa

SEQ ID NO: 71049 - DNA, 25 bp, Probe sequence
tgctactttcgttaattcacacaaa

SEQ ID NO: 71050 - DNA, 25 bp, Probe sequence
tcctgctaactgtcaacactttatt

SEQ ID NO: 71051 - DNA, 25 bp, Probe sequence
ttcctgctaactgtcaacactttat

SEQ ID NO: 71052 - DNA, 25 bp, Probe sequence
tttcctgctaactgtcaacacttta

SEQ ID NO: 71053 - DNA, 25 bp, Probe sequence
tacgttcaatacaaacacccacaat

SEQ ID NO: 71054 - DNA, 25 bp, Probe sequence
acgttcaatacaaacacccacaatt

SEQ ID NO: 71055 - DNA, 25 bp, Probe sequence
cgttcaatacaaacacccacaattg

SEQ ID NO: 71056 - DNA, 25 bp, Probe sequence
gattcaaaattatggttcttcatct

SEQ ID NO: 71057 - DNA, 25 bp, Probe sequence
agattcaaaattatggttcttcatc

SEQ ID NO: 71058 - DNA, 25 bp, Probe sequence
ttcaaaattatggttcttcatcttt

SEQ ID NO: 71059 - DNA, 25 bp, Probe sequence
attcaaaattatggttcttcatctt

SEQ ID NO: 71060 - DNA, 25 bp, Probe sequence
attgtgggtgtttgtattgaacgta

SEQ ID NO: 71061 - DNA, 25 bp, Probe sequence
aattgtgggtgtttgtattgaacgt

SEQ ID NO: 71062 - DNA, 25 bp, Probe sequence
caattgtgggtgtttgtattgaacg

SEQ ID NO: 71063 - DNA, 25 bp, Probe sequence
agatgaagaaccataattttgaatc

SEQ ID NO: 71064 - DNA, 25 bp, Probe sequence
gatgaagaaccataattttgaatct

SEQ ID NO: 71065 - DNA, 25 bp, Probe sequence
aaagatgaagaaccataattttgaa

SEQ ID NO: 71066 - DNA, 25 bp, Probe sequence
aagatgaagaaccataattttgaat

SEQ ID NO: 71067 - DNA, 25 bp, Probe sequence
aattgcgatatacgaatcctcatcc

SEQ ID NO: 71068 - DNA, 25 bp, Probe sequence
tatacgaatcctcatccctctatca

SEQ ID NO: 71069 - DNA, 25 bp, Probe sequence
atacgaatcctcatccctctatcaa

SEQ ID NO: 71070 - DNA, 25 bp, Probe sequence
tacgaatcctcatccctctatcaaa

SEQ ID NO: 71071 - DNA, 25 bp, Probe sequence
cgaatcctcatccctctatcaaatt

SEQ ID NO: 71072 - DNA, 25 bp, Probe sequence
cgatatacgaatcctcatccctcta

SEQ ID NO: 71073 - DNA, 25 bp, Probe sequence
cctcatccctctatcaaattaccat

SEQ ID NO: 71074 - DNA, 25 bp, Probe sequence
tcctcatccctctatcaaattacca

SEQ ID NO: 71075 - DNA, 25 bp, Probe sequence
ccctctatcaaattaccattcatcg

SEQ ID NO: 71076 - DNA, 25 bp, Probe sequence
ggatgaggattcgtatatcgcaatt

SEQ ID NO: 71077 - DNA, 25 bp, Probe sequence
tgatagagggatgaggattcgtata

SEQ ID NO: 71078 - DNA, 25 bp, Probe sequence
ttgatagagggatgaggattcgtat

SEQ ID NO: 71079 - DNA, 25 bp, Probe sequence
tttgatagagggatgaggattcgta

SEQ ID NO: 71080 - DNA, 25 bp, Probe sequence
tagagggatgaggattcgtatatcg

SEQ ID NO: 71081 - DNA, 25 bp, Probe sequence
aatttgatagagggatgaggattcg

SEQ ID NO: 71082 - DNA, 25 bp, Probe sequence
tggtaatttgatagagggatgagga

SEQ ID NO: 71083 - DNA, 25 bp, Probe sequence
atggtaatttgatagagggatgagg

SEQ ID NO: 71084 - DNA, 25 bp, Probe sequence
ggtaatttgatagagggatgaggat

SEQ ID NO: 71085 - DNA, 25 bp, Probe sequence
attcgacaatatagcgttatcactt

SEQ ID NO: 71086 - DNA, 25 bp, Probe sequence
tattcgacaatatagcgttatcact

SEQ ID NO: 71087 - DNA, 25 bp, Probe sequence
ttattcgacaatatagcgttatcac

SEQ ID NO: 71088 - DNA, 25 bp, Probe sequence
ttcgacaatatagcgttatcacttt

SEQ ID NO: 71089 - DNA, 25 bp, Probe sequence
agtgaaatcttatttataggaggca

SEQ ID NO: 71090 - DNA, 25 bp, Probe sequence
cgtttattcgacaatatagcgttat

SEQ ID NO: 71091 - DNA, 25 bp, Probe sequence
gtgaaatcttatttataggaggcat

SEQ ID NO: 71092 - DNA, 25 bp, Probe sequence
tcgacaatatagcgttatcactttt

SEQ ID NO: 71093 - DNA, 25 bp, Probe sequence
tttattcgacaatatagcgttatca

SEQ ID NO: 71094 - DNA, 25 bp, Probe sequence
aagtgataacgctatattgtcgaat

SEQ ID NO: 71095 - DNA, 25 bp, Probe sequence
agtgataacgctatattgtcgaata

SEQ ID NO: 71096 - DNA, 25 bp, Probe sequence
gtgataacgctatattgtcgaataa

SEQ ID NO: 71097 - DNA, 25 bp, Probe sequence
aaagtgataacgctatattgtcgaa

SEQ ID NO: 71098 - DNA, 25 bp, Probe sequence
tgcctcctataaataagatttcact

SEQ ID NO: 71099 - DNA, 25 bp, Probe sequence
ataacgctatattgtcgaataaacg

SEQ ID NO: 71100 - DNA, 25 bp, Probe sequence
atgcctcctataaataagatttcac

SEQ ID NO: 71101 - DNA, 25 bp, Probe sequence
tgataacgctatattgtcgaataaa

SEQ ID NO: 71102 - DNA, 25 bp, Probe sequence
aaaagtgataacgctatattgtcga

SEQ ID NO: 71103 - DNA, 25 bp, Probe sequence
cattcacttcaagttatgctgtcaa

SEQ ID NO: 71104 - DNA, 25 bp, Probe sequence
atcattcacttcaagttatgctgtc

SEQ ID NO: 71105 - DNA, 25 bp, Probe sequence
ttggttcaatcattcacttcaagtt

SEQ ID NO: 71106 - DNA, 25 bp, Probe sequence
tcattcacttcaagttatgctgtca

SEQ ID NO: 71107 - DNA, 25 bp, Probe sequence
aatcattcacttcaagttatgctgt

SEQ ID NO: 71108 - DNA, 25 bp, Probe sequence
caatcattcacttcaagttatgctg

SEQ ID NO: 71109 - DNA, 25 bp, Probe sequence
tcaatcattcacttcaagttatgct

SEQ ID NO: 71110 - DNA, 25 bp, Probe sequence
tggttcaatcattcacttcaagtta

SEQ ID NO: 71111 - DNA, 25 bp, Probe sequence
ttcaatcattcacttcaagttatgc

SEQ ID NO: 71112 - DNA, 25 bp, Probe sequence
ttgacagcataacttgaagtgaatg

SEQ ID NO: 71113 - DNA, 25 bp, Probe sequence
aacttgaagtgaatgattgaaccaa

SEQ ID NO: 71114 - DNA, 25 bp, Probe sequence
gacagcataacttgaagtgaatgat

SEQ ID NO: 71115 - DNA, 25 bp, Probe sequence
tgacagcataacttgaagtgaatga

SEQ ID NO: 71116 - DNA, 25 bp, Probe sequence
acagcataacttgaagtgaatgatt

SEQ ID NO: 71117 - DNA, 25 bp, Probe sequence
agcataacttgaagtgaatgattga

SEQ ID NO: 71118 - DNA, 25 bp, Probe sequence
cagcataacttgaagtgaatgattg

SEQ ID NO: 71119 - DNA, 25 bp, Probe sequence
taacttgaagtgaatgattgaacca

SEQ ID NO: 71120 - DNA, 25 bp, Probe sequence
gcataacttgaagtgaatgattgaa

SEQ ID NO: 71121 - DNA, 25 bp, Probe sequence
aaaccctattgaagttagatttgcg

SEQ ID NO: 71122 - DNA, 25 bp, Probe sequence
cgcaaaccctattgaagttagattt

SEQ ID NO: 71123 - DNA, 25 bp, Probe sequence
caaaccctattgaagttagatttgc

SEQ ID NO: 71124 - DNA, 25 bp, Probe sequence
gcaaaccctattgaagttagatttg

SEQ ID NO: 71125 - DNA, 25 bp, Probe sequence
aatccccactccatttctgaaaatt

SEQ ID NO: 71126 - DNA, 25 bp, Probe sequence
atccccactccatttctgaaaattc

SEQ ID NO: 71127 - DNA, 25 bp, Probe sequence
ttagatttgcgctttagctgtttaa

SEQ ID NO: 71128 - DNA, 25 bp, Probe sequence
gttagatttgcgctttagctgttta

SEQ ID NO: 71129 - DNA, 25 bp, Probe sequence
cctattgaagttagatttgcgcttt

SEQ ID NO: 71130 - DNA, 25 bp, Probe sequence
cgcaaatctaacttcaatagggttt

SEQ ID NO: 71131 - DNA, 25 bp, Probe sequence
aaatctaacttcaatagggtttgcg

SEQ ID NO: 71132 - DNA, 25 bp, Probe sequence
caaatctaacttcaatagggtttgc

SEQ ID NO: 71133 - DNA, 25 bp, Probe sequence
gcaaatctaacttcaatagggtttg

SEQ ID NO: 71134 - DNA, 25 bp, Probe sequence
aattttcagaaatggagtggggatt

SEQ ID NO: 71135 - DNA, 25 bp, Probe sequence
gaattttcagaaatggagtggggat

SEQ ID NO: 71136 - DNA, 25 bp, Probe sequence
ttaaacagctaaagcgcaaatctaa

SEQ ID NO: 71137 - DNA, 25 bp, Probe sequence
taaacagctaaagcgcaaatctaac

SEQ ID NO: 71138 - DNA, 25 bp, Probe sequence
aaagcgcaaatctaacttcaatagg

SEQ ID NO: 71139 - DNA, 25 bp, Probe sequence
ttcgatactccgttatagtcaccta

SEQ ID NO: 71140 - DNA, 25 bp, Probe sequence
agaataactacttcgatactccgtt

SEQ ID NO: 71141 - DNA, 25 bp, Probe sequence
tcgatactccgttatagtcacctag

SEQ ID NO: 71142 - DNA, 25 bp, Probe sequence
tacttcgatactccgttatagtcac

SEQ ID NO: 71143 - DNA, 25 bp, Probe sequence
ctacttcgatactccgttatagtca

SEQ ID NO: 71144 - DNA, 25 bp, Probe sequence
cttcgatactccgttatagtcacct

SEQ ID NO: 71145 - DNA, 25 bp, Probe sequence
tagaataactacttcgatactccgt

SEQ ID NO: 71146 - DNA, 25 bp, Probe sequence
acttcgatactccgttatagtcacc

SEQ ID NO: 71147 - DNA, 25 bp, Probe sequence
ctagaataactacttcgatactccg

SEQ ID NO: 71148 - DNA, 25 bp, Probe sequence
aacggagtatcgaagtagttattct

SEQ ID NO: 71149 - DNA, 25 bp, Probe sequence
taggtgactataacggagtatcgaa

SEQ ID NO: 71150 - DNA, 25 bp, Probe sequence
ctaggtgactataacggagtatcga

SEQ ID NO: 71151 - DNA, 25 bp, Probe sequence
gtgactataacggagtatcgaagta

SEQ ID NO: 71152 - DNA, 25 bp, Probe sequence
tgactataacggagtatcgaagtag

SEQ ID NO: 71153 - DNA, 25 bp, Probe sequence
aggtgactataacggagtatcgaag

SEQ ID NO: 71154 - DNA, 25 bp, Probe sequence
acggagtatcgaagtagttattcta

SEQ ID NO: 71155 - DNA, 25 bp, Probe sequence
ggtgactataacggagtatcgaagt

SEQ ID NO: 71156 - DNA, 25 bp, Probe sequence
cggagtatcgaagtagttattctag

SEQ ID NO: 71157 - DNA, 25 bp, Probe sequence
tgtgccacctacttaacttatttgt

SEQ ID NO: 71158 - DNA, 25 bp, Probe sequence
gtgccacctacttaacttatttgtt

SEQ ID NO: 71159 - DNA, 25 bp, Probe sequence
tgccacctacttaacttatttgttt

SEQ ID NO: 71160 - DNA, 25 bp, Probe sequence
gccacctacttaacttatttgttta

SEQ ID NO: 71161 - DNA, 25 bp, Probe sequence
aagttgtatagtgtattactagcaa

SEQ ID NO: 71162 - DNA, 25 bp, Probe sequence
agttgtatagtgtattactagcaat

SEQ ID NO: 71163 - DNA, 25 bp, Probe sequence
ccacctacttaacttatttgtttat

SEQ ID NO: 71164 - DNA, 25 bp, Probe sequence
aaagttgtatagtgtattactagca

SEQ ID NO: 71165 - DNA, 25 bp, Probe sequence
agtctgaaaatacatctaaagttgt

SEQ ID NO: 71166 - DNA, 25 bp, Probe sequence
acaaataagttaagtaggtggcaca

SEQ ID NO: 71167 - DNA, 25 bp, Probe sequence
aacaaataagttaagtaggtggcac

SEQ ID NO: 71168 - DNA, 25 bp, Probe sequence
aaacaaataagttaagtaggtggca

SEQ ID NO: 71169 - DNA, 25 bp, Probe sequence
taaacaaataagttaagtaggtggc

SEQ ID NO: 71170 - DNA, 25 bp, Probe sequence
ttgctagtaatacactatacaactt

SEQ ID NO: 71171 - DNA, 25 bp, Probe sequence
attgctagtaatacactatacaact

SEQ ID NO: 71172 - DNA, 25 bp, Probe sequence
ataaacaaataagttaagtaggtgg

SEQ ID NO: 71173 - DNA, 25 bp, Probe sequence
tgctagtaatacactatacaacttt

SEQ ID NO: 71174 - DNA, 25 bp, Probe sequence
acaactttagatgtattttcagact

SEQ ID NO: 71175 - DNA, 25 bp, Probe sequence
tcttaggaatgaatatgagtaggct

SEQ ID NO: 71176 - DNA, 25 bp, Probe sequence
aggaatgaatatgagtaggctctaa

SEQ ID NO: 71177 - DNA, 25 bp, Probe sequence
ttaggaatgaatatgagtaggctct

SEQ ID NO: 71178 - DNA, 25 bp, Probe sequence
ttcttaggaatgaatatgagtaggc

SEQ ID NO: 71179 - DNA, 25 bp, Probe sequence
cttaggaatgaatatgagtaggctc

SEQ ID NO: 71180 - DNA, 25 bp, Probe sequence
taggaatgaatatgagtaggctcta

SEQ ID NO: 71181 - DNA, 25 bp, Probe sequence
acattaagagcctactcattacatt

SEQ ID NO: 71182 - DNA, 25 bp, Probe sequence
ggaatgaatatgagtaggctctaat

SEQ ID NO: 71183 - DNA, 25 bp, Probe sequence
gtacattaagagcctactcattaca

SEQ ID NO: 71184 - DNA, 25 bp, Probe sequence
agcctactcatattcattcctaaga

SEQ ID NO: 71185 - DNA, 25 bp, Probe sequence
agagcctactcatattcattcctaa

SEQ ID NO: 71186 - DNA, 25 bp, Probe sequence
ttagagcctactcatattcattcct

SEQ ID NO: 71187 - DNA, 25 bp, Probe sequence
gcctactcatattcattcctaagaa

SEQ ID NO: 71188 - DNA, 25 bp, Probe sequence
gagcctactcatattcattcctaag

SEQ ID NO: 71189 - DNA, 25 bp, Probe sequence
aatgtaatgagtaggctcttaatgt

SEQ ID NO: 71190 - DNA, 25 bp, Probe sequence
tagagcctactcatattcattccta

SEQ ID NO: 71191 - DNA, 25 bp, Probe sequence
attagagcctactcatattcattcc

SEQ ID NO: 71192 - DNA, 25 bp, Probe sequence
tgtaatgagtaggctcttaatgtac

SEQ ID NO: 71193 - DNA, 25 bp, Probe sequence
cgttaccaccaaacttaaacataat

SEQ ID NO: 71194 - DNA, 25 bp, Probe sequence
ccactagctctctgatgatttcaaa

SEQ ID NO: 71195 - DNA, 25 bp, Probe sequence
cacgttaccaccaaacttaaacata

SEQ ID NO: 71196 - DNA, 25 bp, Probe sequence
cactagctctctgatgatttcaaat

SEQ ID NO: 71197 - DNA, 25 bp, Probe sequence
acgttaccaccaaacttaaacataa

SEQ ID NO: 71198 - DNA, 25 bp, Probe sequence
accactagctctctgatgatttcaa

SEQ ID NO: 71199 - DNA, 25 bp, Probe sequence
ttaccaccaaacttaaacataatca

SEQ ID NO: 71200 - DNA, 25 bp, Probe sequence
gaccactagctctctgatgatttca

SEQ ID NO: 71201 - DNA, 25 bp, Probe sequence
gttcactctattaatgatacgttca

SEQ ID NO: 71202 - DNA, 25 bp, Probe sequence
attatgtttaagtttggtggtaacg

SEQ ID NO: 71203 - DNA, 25 bp, Probe sequence
tttgaaatcatcagagagctagtgg

SEQ ID NO: 71204 - DNA, 25 bp, Probe sequence
tatgtttaagtttggtggtaacgtg

SEQ ID NO: 71205 - DNA, 25 bp, Probe sequence
atttgaaatcatcagagagctagtg

SEQ ID NO: 71206 - DNA, 25 bp, Probe sequence
ttatgtttaagtttggtggtaacgt

SEQ ID NO: 71207 - DNA, 25 bp, Probe sequence
ttgaaatcatcagagagctagtggt

SEQ ID NO: 71208 - DNA, 25 bp, Probe sequence
tgattatgtttaagtttggtggtaa

SEQ ID NO: 71209 - DNA, 25 bp, Probe sequence
tgaaatcatcagagagctagtggtc

SEQ ID NO: 71210 - DNA, 25 bp, Probe sequence
gaacgtatcattaatagagtgaaca

SEQ ID NO: 71211 - DNA, 25 bp, Probe sequence
aaaggaaagccattaaaccaatcaa

SEQ ID NO: 71212 - DNA, 25 bp, Probe sequence
actctaaaggaaagccattaaacca

SEQ ID NO: 71213 - DNA, 25 bp, Probe sequence
aaggaaagccattaaaccaatcaat

SEQ ID NO: 71214 - DNA, 25 bp, Probe sequence
ctctaaaggaaagccattaaaccaa

SEQ ID NO: 71215 - DNA, 25 bp, Probe sequence
taaaggaaagccattaaaccaatca

SEQ ID NO: 71216 - DNA, 25 bp, Probe sequence
aggaaagccattaaaccaatcaata

SEQ ID NO: 71217 - DNA, 25 bp, Probe sequence
tctaaaggaaagccattaaaccaat

SEQ ID NO: 71218 - DNA, 25 bp, Probe sequence
ggaaagccattaaaccaatcaatag

SEQ ID NO: 71219 - DNA, 25 bp, Probe sequence
ctaaaggaaagccattaaaccaatc

SEQ ID NO: 71220 - DNA, 25 bp, Probe sequence
tggtttaatggctttcctttagagt

SEQ ID NO: 71221 - DNA, 25 bp, Probe sequence
ttgattggtttaatggctttccttt

SEQ ID NO: 71222 - DNA, 25 bp, Probe sequence
attgattggtttaatggctttcctt

SEQ ID NO: 71223 - DNA, 25 bp, Probe sequence
ttggtttaatggctttcctttagag

SEQ ID NO: 71224 - DNA, 25 bp, Probe sequence
tgattggtttaatggctttccttta

SEQ ID NO: 71225 - DNA, 25 bp, Probe sequence
tattgattggtttaatggctttcct

SEQ ID NO: 71226 - DNA, 25 bp, Probe sequence
attggtttaatggctttcctttaga

SEQ ID NO: 71227 - DNA, 25 bp, Probe sequence
ggtttaatggctttcctttagagta

SEQ ID NO: 71228 - DNA, 25 bp, Probe sequence
gattggtttaatggctttcctttag

SEQ ID NO: 71229 - DNA, 25 bp, Probe sequence
catctccaacagtccggtctattaa

SEQ ID NO: 71230 - DNA, 25 bp, Probe sequence
atctccaacagtccggtctattaaa

SEQ ID NO: 71231 - DNA, 25 bp, Probe sequence
ccaacagtccggtctattaaactat

SEQ ID NO: 71232 - DNA, 25 bp, Probe sequence
tccaacagtccggtctattaaacta

SEQ ID NO: 71233 - DNA, 25 bp, Probe sequence
caacagtccggtctattaaactatt

SEQ ID NO: 71234 - DNA, 25 bp, Probe sequence
tctccaacagtccggtctattaaac

SEQ ID NO: 71235 - DNA, 25 bp, Probe sequence
aacagtccggtctattaaactattt

SEQ ID NO: 71236 - DNA, 25 bp, Probe sequence
ctccaacagtccggtctattaaact

SEQ ID NO: 71237 - DNA, 25 bp, Probe sequence
gcatctccaacagtccggtctatta

SEQ ID NO: 71238 - DNA, 25 bp, Probe sequence
ttaatagaccggactgttggagatg

SEQ ID NO: 71239 - DNA, 25 bp, Probe sequence
tttaatagaccggactgttggagat

SEQ ID NO: 71240 - DNA, 25 bp, Probe sequence
atagtttaatagaccggactgttgg

SEQ ID NO: 71241 - DNA, 25 bp, Probe sequence
tagtttaatagaccggactgttgga

SEQ ID NO: 71242 - DNA, 25 bp, Probe sequence
aatagtttaatagaccggactgttg

SEQ ID NO: 71243 - DNA, 25 bp, Probe sequence
gtttaatagaccggactgttggaga

SEQ ID NO: 71244 - DNA, 25 bp, Probe sequence
agtttaatagaccggactgttggag

SEQ ID NO: 71245 - DNA, 25 bp, Probe sequence
aaatagtttaatagaccggactgtt

SEQ ID NO: 71246 - DNA, 25 bp, Probe sequence
taatagaccggactgttggagatgc

SEQ ID NO: 71247 - DNA, 25 bp, Probe sequence
atatgttgtcaccctttattcttcg

SEQ ID NO: 71248 - DNA, 25 bp, Probe sequence
tctacgaaatgatatgacacaagtt

SEQ ID NO: 71249 - DNA, 25 bp, Probe sequence
ttctacgaaatgatatgacacaagt

SEQ ID NO: 71250 - DNA, 25 bp, Probe sequence
tgatatgacacaagttaacagctct

SEQ ID NO: 71251 - DNA, 25 bp, Probe sequence
atgatatgacacaagttaacagctc

SEQ ID NO: 71252 - DNA, 25 bp, Probe sequence
gatatgacacaagttaacagctctt

SEQ ID NO: 71253 - DNA, 25 bp, Probe sequence
aatgatatgacacaagttaacagct

SEQ ID NO: 71254 - DNA, 25 bp, Probe sequence
tatgttgtcaccctttattcttcga

SEQ ID NO: 71255 - DNA, 25 bp, Probe sequence
tgaaatatgttgtcaccctttattc

SEQ ID NO: 71256 - DNA, 25 bp, Probe sequence
cgaagaataaagggtgacaacatat

SEQ ID NO: 71257 - DNA, 25 bp, Probe sequence
aacttgtgtcatatcatttcgtaga

SEQ ID NO: 71258 - DNA, 25 bp, Probe sequence
acttgtgtcatatcatttcgtagaa

SEQ ID NO: 71259 - DNA, 25 bp, Probe sequence
agagctgttaacttgtgtcatatca

SEQ ID NO: 71260 - DNA, 25 bp, Probe sequence
gagctgttaacttgtgtcatatcat

SEQ ID NO: 71261 - DNA, 25 bp, Probe sequence
agctgttaacttgtgtcatatcatt

SEQ ID NO: 71262 - DNA, 25 bp, Probe sequence
aagagctgttaacttgtgtcatatc

SEQ ID NO: 71263 - DNA, 25 bp, Probe sequence
tcgaagaataaagggtgacaacata

SEQ ID NO: 71264 - DNA, 25 bp, Probe sequence
gaataaagggtgacaacatatttca

SEQ ID NO: 71265 - DNA, 25 bp, Probe sequence
aatgaatttaatacaatcacgacgt

SEQ ID NO: 71266 - DNA, 25 bp, Probe sequence
acgctttctttctcaatattataca

SEQ ID NO: 71267 - DNA, 25 bp, Probe sequence
taatgaatttaatacaatcacgacg

SEQ ID NO: 71268 - DNA, 25 bp, Probe sequence
cccctttgttatgtgaaaacgcttt

SEQ ID NO: 71269 - DNA, 25 bp, Probe sequence
tgtgaaaacgctttctttctcaata

SEQ ID NO: 71270 - DNA, 25 bp, Probe sequence
atgtgaaaacgctttctttctcaat

SEQ ID NO: 71271 - DNA, 25 bp, Probe sequence
tatgtgaaaacgctttctttctcaa

SEQ ID NO: 71272 - DNA, 25 bp, Probe sequence
ttatgtgaaaacgctttctttctca

SEQ ID NO: 71273 - DNA, 25 bp, Probe sequence
tgttatgtgaaaacgctttctttct

SEQ ID NO: 71274 - DNA, 25 bp, Probe sequence
acgtcgtgattgtattaaattcatt

SEQ ID NO: 71275 - DNA, 25 bp, Probe sequence
tgtataatattgagaaagaaagcgt

SEQ ID NO: 71276 - DNA, 25 bp, Probe sequence
cgtcgtgattgtattaaattcatta

SEQ ID NO: 71277 - DNA, 25 bp, Probe sequence
aaagcgttttcacataacaaagggg

SEQ ID NO: 71278 - DNA, 25 bp, Probe sequence
agaaagaaagcgttttcacataaca

SEQ ID NO: 71279 - DNA, 25 bp, Probe sequence
tgagaaagaaagcgttttcacataa

SEQ ID NO: 71280 - DNA, 25 bp, Probe sequence
ttgagaaagaaagcgttttcacata

SEQ ID NO: 71281 - DNA, 25 bp, Probe sequence
attgagaaagaaagcgttttcacat

SEQ ID NO: 71282 - DNA, 25 bp, Probe sequence
tattgagaaagaaagcgttttcaca

SEQ ID NO: 71283 - DNA, 25 bp, Probe sequence
ataatttgggtcgttagatgaatgc

SEQ ID NO: 71284 - DNA, 25 bp, Probe sequence
gcattcttccaacacccatataatt

SEQ ID NO: 71285 - DNA, 25 bp, Probe sequence
ggcattcttccaacacccatataat

SEQ ID NO: 71286 - DNA, 25 bp, Probe sequence
taatttgggtcgttagatgaatgcc

SEQ ID NO: 71287 - DNA, 25 bp, Probe sequence
aggcattcttccaacacccatataa

SEQ ID NO: 71288 - DNA, 25 bp, Probe sequence
atttgggtcgttagatgaatgccta

SEQ ID NO: 71289 - DNA, 25 bp, Probe sequence
aaggcattcttccaacacccatata

SEQ ID NO: 71290 - DNA, 25 bp, Probe sequence
gggtcgttagatgaatgcctaattt

SEQ ID NO: 71291 - DNA, 25 bp, Probe sequence
cattcttccaacacccatataattt

SEQ ID NO: 71292 - DNA, 25 bp, Probe sequence
gcattcatctaacgacccaaattat

SEQ ID NO: 71293 - DNA, 25 bp, Probe sequence
aattatatgggtgttggaagaatgc

SEQ ID NO: 71294 - DNA, 25 bp, Probe sequence
attatatgggtgttggaagaatgcc

SEQ ID NO: 71295 - DNA, 25 bp, Probe sequence
ggcattcatctaacgacccaaatta

SEQ ID NO: 71296 - DNA, 25 bp, Probe sequence
ttatatgggtgttggaagaatgcct

SEQ ID NO: 71297 - DNA, 25 bp, Probe sequence
taggcattcatctaacgacccaaat

SEQ ID NO: 71298 - DNA, 25 bp, Probe sequence
tatatgggtgttggaagaatgcctt

SEQ ID NO: 71299 - DNA, 25 bp, Probe sequence
aaattaggcattcatctaacgaccc

SEQ ID NO: 71300 - DNA, 25 bp, Probe sequence
aaattatatgggtgttggaagaatg

SEQ ID NO: 71301 - DNA, 25 bp, Probe sequence
ttcatttcattttcatagtttacca

SEQ ID NO: 71302 - DNA, 25 bp, Probe sequence
tcatttcattttcatagtttaccat

SEQ ID NO: 71303 - DNA, 25 bp, Probe sequence
catgttttcatttcattttcatagt

SEQ ID NO: 71304 - DNA, 25 bp, Probe sequence
acatgttttcatttcattttcatag

SEQ ID NO: 71305 - DNA, 25 bp, Probe sequence
tggtaaactatgaaaatgaaatgaa

SEQ ID NO: 71306 - DNA, 25 bp, Probe sequence
atggtaaactatgaaaatgaaatga

SEQ ID NO: 71307 - DNA, 25 bp, Probe sequence
actatgaaaatgaaatgaaaacatg

SEQ ID NO: 71308 - DNA, 25 bp, Probe sequence
ctatgaaaatgaaatgaaaacatgt

SEQ ID NO: 71309 - DNA, 25 bp, Probe sequence
acaatcgttaagtgcagtatacctt

SEQ ID NO: 71310 - DNA, 25 bp, Probe sequence
aacaatcgttaagtgcagtatacct

SEQ ID NO: 71311 - DNA, 25 bp, Probe sequence
tatactcttagaatggctgtaagtt

SEQ ID NO: 71312 - DNA, 25 bp, Probe sequence
gtgaaattgaacaagtgtcgaagta

SEQ ID NO: 71313 - DNA, 25 bp, Probe sequence
tgaacaagtgtcgaagtattataac

SEQ ID NO: 71314 - DNA, 25 bp, Probe sequence
taacaatcgttaagtgcagtatacc

SEQ ID NO: 71315 - DNA, 25 bp, Probe sequence
atatactcttagaatggctgtaagt

SEQ ID NO: 71316 - DNA, 25 bp, Probe sequence
aattgaacaagtgtcgaagtattat

SEQ ID NO: 71317 - DNA, 25 bp, Probe sequence
tgaaattgaacaagtgtcgaagtat

SEQ ID NO: 71318 - DNA, 25 bp, Probe sequence
aaggtatactgcacttaacgattgt

SEQ ID NO: 71319 - DNA, 25 bp, Probe sequence
aggtatactgcacttaacgattgtt

SEQ ID NO: 71320 - DNA, 25 bp, Probe sequence
aacttacagccattctaagagtata

SEQ ID NO: 71321 - DNA, 25 bp, Probe sequence
tacttcgacacttgttcaatttcac

SEQ ID NO: 71322 - DNA, 25 bp, Probe sequence
gttataatacttcgacacttgttca

SEQ ID NO: 71323 - DNA, 25 bp, Probe sequence
ggtatactgcacttaacgattgtta

SEQ ID NO: 71324 - DNA, 25 bp, Probe sequence
acttacagccattctaagagtatat

SEQ ID NO: 71325 - DNA, 25 bp, Probe sequence
atacttcgacacttgttcaatttca

SEQ ID NO: 71326 - DNA, 25 bp, Probe sequence
ataatacttcgacacttgttcaatt

SEQ ID NO: 71327 - DNA, 25 bp, Probe sequence
tctcatacattcaacctaacgctta

SEQ ID NO: 71328 - DNA, 25 bp, Probe sequence
attctcatacattcaacctaacgct

SEQ ID NO: 71329 - DNA, 25 bp, Probe sequence
ttctcatacattcaacctaacgctt

SEQ ID NO: 71330 - DNA, 25 bp, Probe sequence
aattctcatacattcaacctaacgc

SEQ ID NO: 71331 - DNA, 25 bp, Probe sequence
ctcatacattcaacctaacgcttaa

SEQ ID NO: 71332 - DNA, 25 bp, Probe sequence
tcatacattcaacctaacgcttaat

SEQ ID NO: 71333 - DNA, 25 bp, Probe sequence
cgtcattgtaccttctaagattcat

SEQ ID NO: 71334 - DNA, 25 bp, Probe sequence
acgtcattgtaccttctaagattca

SEQ ID NO: 71335 - DNA, 25 bp, Probe sequence
catacattcaacctaacgcttaata

SEQ ID NO: 71336 - DNA, 25 bp, Probe sequence
taagcgttaggttgaatgtatgaga

SEQ ID NO: 71337 - DNA, 25 bp, Probe sequence
agcgttaggttgaatgtatgagaat

SEQ ID NO: 71338 - DNA, 25 bp, Probe sequence
aagcgttaggttgaatgtatgagaa

SEQ ID NO: 71339 - DNA, 25 bp, Probe sequence
gcgttaggttgaatgtatgagaatt

SEQ ID NO: 71340 - DNA, 25 bp, Probe sequence
ttaagcgttaggttgaatgtatgag

SEQ ID NO: 71341 - DNA, 25 bp, Probe sequence
attaagcgttaggttgaatgtatga

SEQ ID NO: 71342 - DNA, 25 bp, Probe sequence
atgaatcttagaaggtacaatgacg

SEQ ID NO: 71343 - DNA, 25 bp, Probe sequence
tattaagcgttaggttgaatgtatg

SEQ ID NO: 71344 - DNA, 25 bp, Probe sequence
tgaatcttagaaggtacaatgacgt

SEQ ID NO: 71345 - DNA, 25 bp, Probe sequence
ataagtaacaacctcatttaagtgc

SEQ ID NO: 71346 - DNA, 25 bp, Probe sequence
agtaacaacctcatttaagtgcatt

SEQ ID NO: 71347 - DNA, 25 bp, Probe sequence
aagtaacaacctcatttaagtgcat

SEQ ID NO: 71348 - DNA, 25 bp, Probe sequence
taagtaacaacctcatttaagtgca

SEQ ID NO: 71349 - DNA, 25 bp, Probe sequence
caacctcatttaagtgcatttgttt

SEQ ID NO: 71350 - DNA, 25 bp, Probe sequence
gtaacaacctcatttaagtgcattt

SEQ ID NO: 71351 - DNA, 25 bp, Probe sequence
tcctcctataacaaatgcacttaaa

SEQ ID NO: 71352 - DNA, 25 bp, Probe sequence
taacaacctcatttaagtgcatttg

SEQ ID NO: 71353 - DNA, 25 bp, Probe sequence
atcctcctataacaaatgcacttaa

SEQ ID NO: 71354 - DNA, 25 bp, Probe sequence
gcacttaaatgaggttgttacttat

SEQ ID NO: 71355 - DNA, 25 bp, Probe sequence
atgcacttaaatgaggttgttactt

SEQ ID NO: 71356 - DNA, 25 bp, Probe sequence
aatgcacttaaatgaggttgttact

SEQ ID NO: 71357 - DNA, 25 bp, Probe sequence
tgcacttaaatgaggttgttactta

SEQ ID NO: 71358 - DNA, 25 bp, Probe sequence
aaacaaatgcacttaaatgaggttg

SEQ ID NO: 71359 - DNA, 25 bp, Probe sequence
aaatgcacttaaatgaggttgttac

SEQ ID NO: 71360 - DNA, 25 bp, Probe sequence
tttaagtgcatttgttataggagga

SEQ ID NO: 71361 - DNA, 25 bp, Probe sequence
caaatgcacttaaatgaggttgtta

SEQ ID NO: 71362 - DNA, 25 bp, Probe sequence
ttaagtgcatttgttataggaggat

SEQ ID NO: 71363 - DNA, 25 bp, Probe sequence
acgcctcctaattaacatgtaataa

SEQ ID NO: 71364 - DNA, 25 bp, Probe sequence
aacgcctcctaattaacatgtaata

SEQ ID NO: 71365 - DNA, 25 bp, Probe sequence
cgcctcctaattaacatgtaataat

SEQ ID NO: 71366 - DNA, 25 bp, Probe sequence
aaacgcctcctaattaacatgtaat

SEQ ID NO: 71367 - DNA, 25 bp, Probe sequence
gcctcctaattaacatgtaataatg

SEQ ID NO: 71368 - DNA, 25 bp, Probe sequence
aaaacgcctcctaattaacatgtaa

SEQ ID NO: 71369 - DNA, 25 bp, Probe sequence
tattacatgttaattaggaggcgtt

SEQ ID NO: 71370 - DNA, 25 bp, Probe sequence
ttattacatgttaattaggaggcgt

SEQ ID NO: 71371 - DNA, 25 bp, Probe sequence
attattacatgttaattaggaggcg

SEQ ID NO: 71372 - DNA, 25 bp, Probe sequence
attacatgttaattaggaggcgttt

SEQ ID NO: 71373 - DNA, 25 bp, Probe sequence
cattattacatgttaattaggaggc

SEQ ID NO: 71374 - DNA, 25 bp, Probe sequence
ttacatgttaattaggaggcgtttt

SEQ ID NO: 71375 - DNA, 25 bp, Probe sequence
aacactcctaatttcgcaccttata

SEQ ID NO: 71376 - DNA, 25 bp, Probe sequence
taacactcctaatttcgcaccttat

SEQ ID NO: 71377 - DNA, 25 bp, Probe sequence
gtaacactcctaatttcgcacctta

SEQ ID NO: 71378 - DNA, 25 bp, Probe sequence
acactcctaatttcgcaccttataa

SEQ ID NO: 71379 - DNA, 25 bp, Probe sequence
cactcctaatttcgcaccttataat

SEQ ID NO: 71380 - DNA, 25 bp, Probe sequence
atgtaacactcctaatttcgcacct

SEQ ID NO: 71381 - DNA, 25 bp, Probe sequence
tgtaacactcctaatttcgcacctt

SEQ ID NO: 71382 - DNA, 25 bp, Probe sequence
tcctaatttcgcaccttataatagt

SEQ ID NO: 71383 - DNA, 25 bp, Probe sequence
actcctaatttcgcaccttataata

SEQ ID NO: 71384 - DNA, 25 bp, Probe sequence
ataaggtgcgaaattaggagtgtta

SEQ ID NO: 71385 - DNA, 25 bp, Probe sequence
tataaggtgcgaaattaggagtgtt

SEQ ID NO: 71386 - DNA, 25 bp, Probe sequence
taaggtgcgaaattaggagtgttac

SEQ ID NO: 71387 - DNA, 25 bp, Probe sequence
ttataaggtgcgaaattaggagtgt

SEQ ID NO: 71388 - DNA, 25 bp, Probe sequence
attataaggtgcgaaattaggagtg

SEQ ID NO: 71389 - DNA, 25 bp, Probe sequence
aggtgcgaaattaggagtgttacat

SEQ ID NO: 71390 - DNA, 25 bp, Probe sequence
aaggtgcgaaattaggagtgttaca

SEQ ID NO: 71391 - DNA, 25 bp, Probe sequence
tattataaggtgcgaaattaggagt

SEQ ID NO: 71392 - DNA, 25 bp, Probe sequence
actattataaggtgcgaaattagga

SEQ ID NO: 71393 - DNA, 25 bp, Probe sequence
agagataatagttgttattacccga

SEQ ID NO: 71394 - DNA, 25 bp, Probe sequence
tagagataatagttgttattacccg

SEQ ID NO: 71395 - DNA, 25 bp, Probe sequence
tcgggtaataacaactattatctct

SEQ ID NO: 71396 - DNA, 25 bp, Probe sequence
cgggtaataacaactattatctcta

SEQ ID NO: 71397 - DNA, 25 bp, Probe sequence
tgaatttgaaatcaagggagcataa

SEQ ID NO: 71398 - DNA, 25 bp, Probe sequence
atgaatttgaaatcaagggagcata

SEQ ID NO: 71399 - DNA, 25 bp, Probe sequence
tatgaatttgaaatcaagggagcat

SEQ ID NO: 71400 - DNA, 25 bp, Probe sequence
atatgaatttgaaatcaagggagca

SEQ ID NO: 71401 - DNA, 25 bp, Probe sequence
gatatgaatttgaaatcaagggagc

SEQ ID NO: 71402 - DNA, 25 bp, Probe sequence
gaatttgaaatcaagggagcataaa

SEQ ID NO: 71403 - DNA, 25 bp, Probe sequence
atttgaaatcaagggagcataaatg

SEQ ID NO: 71404 - DNA, 25 bp, Probe sequence
aatttgaaatcaagggagcataaat

SEQ ID NO: 71405 - DNA, 25 bp, Probe sequence
tgatatgaatttgaaatcaagggag

SEQ ID NO: 71406 - DNA, 25 bp, Probe sequence
cccttgatttcaaattcatatcatt

SEQ ID NO: 71407 - DNA, 25 bp, Probe sequence
aataacttataaggagtgagaactt

SEQ ID NO: 71408 - DNA, 25 bp, Probe sequence
ataacttataaggagtgagaacttt

SEQ ID NO: 71409 - DNA, 25 bp, Probe sequence
taacttataaggagtgagaactttt

SEQ ID NO: 71410 - DNA, 25 bp, Probe sequence
aattagtaagattggatgtggctca

SEQ ID NO: 71411 - DNA, 25 bp, Probe sequence
ttagtaagattggatgtggctcatt

SEQ ID NO: 71412 - DNA, 25 bp, Probe sequence
attagtaagattggatgtggctcat

SEQ ID NO: 71413 - DNA, 25 bp, Probe sequence
taattagtaagattggatgtggctc

SEQ ID NO: 71414 - DNA, 25 bp, Probe sequence
tagtaagattggatgtggctcattt

SEQ ID NO: 71415 - DNA, 25 bp, Probe sequence
agtaagattggatgtggctcatttt

SEQ ID NO: 71416 - DNA, 25 bp, Probe sequence
cctaattagtaagattggatgtggc

SEQ ID NO: 71417 - DNA, 25 bp, Probe sequence
ctaattagtaagattggatgtggct

SEQ ID NO: 71418 - DNA, 25 bp, Probe sequence
gagccacaccctaattagtaagatt

SEQ ID NO: 71419 - DNA, 25 bp, Probe sequence
tgagccacatccaatcttactaatt

SEQ ID NO: 71420 - DNA, 25 bp, Probe sequence
atgagccacatccaatcttactaat

SEQ ID NO: 71421 - DNA, 25 bp, Probe sequence
aatgagccacatccaatcttactaa

SEQ ID NO: 71422 - DNA, 25 bp, Probe sequence
gagccacatccaatcttactaatta

SEQ ID NO: 71423 - DNA, 25 bp, Probe sequence
aaatgagccacatccaatcttacta

SEQ ID NO: 71424 - DNA, 25 bp, Probe sequence
aaaatgagccacatccaatcttact

SEQ ID NO: 71425 - DNA, 25 bp, Probe sequence
gccacatccaatcttactaattagg

SEQ ID NO: 71426 - DNA, 25 bp, Probe sequence
agccacatccaatcttactaattag

SEQ ID NO: 71427 - DNA, 25 bp, Probe sequence
ttactaattagggtgtggctcattt

SEQ ID NO: 71428 - DNA, 25 bp, Probe sequence
acaagtaaaatgcaagctttattct

SEQ ID NO: 71429 - DNA, 25 bp, Probe sequence
caagtaaaatgcaagctttattctt

SEQ ID NO: 71430 - DNA, 25 bp, Probe sequence
tgcaagctttattcttttaaatcaa

SEQ ID NO: 71431 - DNA, 25 bp, Probe sequence
aagtaaaatgcaagctttattcttt

SEQ ID NO: 71432 - DNA, 25 bp, Probe sequence
agctttattcttttaaatcaaaggt

SEQ ID NO: 71433 - DNA, 25 bp, Probe sequence
atgcaagctttattcttttaaatca

SEQ ID NO: 71434 - DNA, 25 bp, Probe sequence
agtaaaatgcaagctttattctttt

SEQ ID NO: 71435 - DNA, 25 bp, Probe sequence
gcaagctttattcttttaaatcaaa

SEQ ID NO: 71436 - DNA, 25 bp, Probe sequence
aatgcaagctttattcttttaaatc

SEQ ID NO: 71437 - DNA, 25 bp, Probe sequence
agaataaagcttgcattttacttgt

SEQ ID NO: 71438 - DNA, 25 bp, Probe sequence
aagaataaagcttgcattttacttg

SEQ ID NO: 71439 - DNA, 25 bp, Probe sequence
aaagaataaagcttgcattttactt

SEQ ID NO: 71440 - DNA, 25 bp, Probe sequence
ttgatttaaaagaataaagcttgca

SEQ ID NO: 71441 - DNA, 25 bp, Probe sequence
acctttgatttaaaagaataaagct

SEQ ID NO: 71442 - DNA, 25 bp, Probe sequence
tgatttaaaagaataaagcttgcat

SEQ ID NO: 71443 - DNA, 25 bp, Probe sequence
aaaagaataaagcttgcattttact

SEQ ID NO: 71444 - DNA, 25 bp, Probe sequence
tttgatttaaaagaataaagcttgc

SEQ ID NO: 71445 - DNA, 25 bp, Probe sequence
gatttaaaagaataaagcttgcatt

SEQ ID NO: 71446 - DNA, 25 bp, Probe sequence
tcagtccgatttattatagaacctt

SEQ ID NO: 71447 - DNA, 25 bp, Probe sequence
catcagtccgatttattatagaacc

SEQ ID NO: 71448 - DNA, 25 bp, Probe sequence
ccatcagtccgatttattatagaac

SEQ ID NO: 71449 - DNA, 25 bp, Probe sequence
atcagtccgatttattatagaacct

SEQ ID NO: 71450 - DNA, 25 bp, Probe sequence
tccatcagtccgatttattatagaa

SEQ ID NO: 71451 - DNA, 25 bp, Probe sequence
ttccatcagtccgatttattataga

SEQ ID NO: 71452 - DNA, 25 bp, Probe sequence
cagtccgatttattatagaaccttt

SEQ ID NO: 71453 - DNA, 25 bp, Probe sequence
tttccatcagtccgatttattatag

SEQ ID NO: 71454 - DNA, 25 bp, Probe sequence
atcggacagatgaaaagtaaaatac

SEQ ID NO: 71455 - DNA, 25 bp, Probe sequence
aaggttctataataaatcggactga

SEQ ID NO: 71456 - DNA, 25 bp, Probe sequence
gttctataataaatcggactgatgg

SEQ ID NO: 71457 - DNA, 25 bp, Probe sequence
ggttctataataaatcggactgatg

SEQ ID NO: 71458 - DNA, 25 bp, Probe sequence
tctataataaatcggactgatggaa

SEQ ID NO: 71459 - DNA, 25 bp, Probe sequence
ttctataataaatcggactgatgga

SEQ ID NO: 71460 - DNA, 25 bp, Probe sequence
aggttctataataaatcggactgat

SEQ ID NO: 71461 - DNA, 25 bp, Probe sequence
aaaggttctataataaatcggactg

SEQ ID NO: 71462 - DNA, 25 bp, Probe sequence
ctataataaatcggactgatggaaa

SEQ ID NO: 71463 - DNA, 25 bp, Probe sequence
attttacttttcatctgtccgattt

SEQ ID NO: 71464 - DNA, 25 bp, Probe sequence
tttgaatctctgtaggcgataaact

SEQ ID NO: 71465 - DNA, 25 bp, Probe sequence
ttgaatctctgtaggcgataaactc

SEQ ID NO: 71466 - DNA, 25 bp, Probe sequence
gaatctctgtaggcgataaactcta

SEQ ID NO: 71467 - DNA, 25 bp, Probe sequence
caatgcctacattacacgactaatt

SEQ ID NO: 71468 - DNA, 25 bp, Probe sequence
tgaatctctgtaggcgataaactct

SEQ ID NO: 71469 - DNA, 25 bp, Probe sequence
ccaatgcctacattacacgactaat

SEQ ID NO: 71470 - DNA, 25 bp, Probe sequence
atctctgtaggcgataaactctagt

SEQ ID NO: 71471 - DNA, 25 bp, Probe sequence
aatctctgtaggcgataaactctag

SEQ ID NO: 71472 - DNA, 25 bp, Probe sequence
gtaaatcctcaaccaatgcctacat

SEQ ID NO: 71473 - DNA, 25 bp, Probe sequence
agtttatcgcctacagagattcaaa

SEQ ID NO: 71474 - DNA, 25 bp, Probe sequence
gagtttatcgcctacagagattcaa

SEQ ID NO: 71475 - DNA, 25 bp, Probe sequence
tagagtttatcgcctacagagattc

SEQ ID NO: 71476 - DNA, 25 bp, Probe sequence
aattagtcgtgtaatgtaggcattg

SEQ ID NO: 71477 - DNA, 25 bp, Probe sequence
agagtttatcgcctacagagattca

SEQ ID NO: 71478 - DNA, 25 bp, Probe sequence
attagtcgtgtaatgtaggcattgg

SEQ ID NO: 71479 - DNA, 25 bp, Probe sequence
actagagtttatcgcctacagagat

SEQ ID NO: 71480 - DNA, 25 bp, Probe sequence
atgtaggcattggttgaggatttac

SEQ ID NO: 71481 - DNA, 25 bp, Probe sequence
ctagagtttatcgcctacagagatt

SEQ ID NO: 71482 - DNA, 25 bp, Probe sequence
aacataattcacttacgaaagttga

SEQ ID NO: 71483 - DNA, 25 bp, Probe sequence
acataattcacttacgaaagttgat

SEQ ID NO: 71484 - DNA, 25 bp, Probe sequence
taacataattcacttacgaaagttg

SEQ ID NO: 71485 - DNA, 25 bp, Probe sequence
tctaaacaacacttttaagcttcgt

SEQ ID NO: 71486 - DNA, 25 bp, Probe sequence
attcacttacgaaagttgataaatt

SEQ ID NO: 71487 - DNA, 25 bp, Probe sequence
aattcacttacgaaagttgataaat

SEQ ID NO: 71488 - DNA, 25 bp, Probe sequence
cataattcacttacgaaagttgata

SEQ ID NO: 71489 - DNA, 25 bp, Probe sequence
ctaaacaacacttttaagcttcgtt

SEQ ID NO: 71490 - DNA, 25 bp, Probe sequence
ttctaaacaacacttttaagcttcg

SEQ ID NO: 71491 - DNA, 25 bp, Probe sequence
tcaactttcgtaagtgaattatgtt

SEQ ID NO: 71492 - DNA, 25 bp, Probe sequence
atcaactttcgtaagtgaattatgt

SEQ ID NO: 71493 - DNA, 25 bp, Probe sequence
caactttcgtaagtgaattatgtta

SEQ ID NO: 71494 - DNA, 25 bp, Probe sequence
acgaagcttaaaagtgttgtttaga

SEQ ID NO: 71495 - DNA, 25 bp, Probe sequence
aacgaagcttaaaagtgttgtttag

SEQ ID NO: 71496 - DNA, 25 bp, Probe sequence
tatcaactttcgtaagtgaattatg

SEQ ID NO: 71497 - DNA, 25 bp, Probe sequence
atttatcaactttcgtaagtgaatt

SEQ ID NO: 71498 - DNA, 25 bp, Probe sequence
aatttatcaactttcgtaagtgaat

SEQ ID NO: 71499 - DNA, 25 bp, Probe sequence
cgaagcttaaaagtgttgtttagaa

SEQ ID NO: 71500 - DNA, 25 bp, Probe sequence
taagtcaatgtactaggcacacaat

SEQ ID NO: 71501 - DNA, 25 bp, Probe sequence
ataagtcaatgtactaggcacacaa

SEQ ID NO: 71502 - DNA, 25 bp, Probe sequence
aagtcaatgtactaggcacacaatt

SEQ ID NO: 71503 - DNA, 25 bp, Probe sequence
tataagtcaatgtactaggcacaca

SEQ ID NO: 71504 - DNA, 25 bp, Probe sequence
tattgacagtaattaaccgaacgaa

SEQ ID NO: 71505 - DNA, 25 bp, Probe sequence
cgagatataagtcaatgtactaggc

SEQ ID NO: 71506 - DNA, 25 bp, Probe sequence
atattgacagtaattaaccgaacga

SEQ ID NO: 71507 - DNA, 25 bp, Probe sequence
atataagtcaatgtactaggcacac

SEQ ID NO: 71508 - DNA, 25 bp, Probe sequence
gatataagtcaatgtactaggcaca

SEQ ID NO: 71509 - DNA, 25 bp, Probe sequence
ttgtgtgcctagtacattgacttat

SEQ ID NO: 71510 - DNA, 25 bp, Probe sequence
attgtgtgcctagtacattgactta

SEQ ID NO: 71511 - DNA, 25 bp, Probe sequence
tgtgtgcctagtacattgacttata

SEQ ID NO: 71512 - DNA, 25 bp, Probe sequence
aattgtgtgcctagtacattgactt

SEQ ID NO: 71513 - DNA, 25 bp, Probe sequence
ttcgttcggttaattactgtcaata

SEQ ID NO: 71514 - DNA, 25 bp, Probe sequence
gcctagtacattgacttatatctcg

SEQ ID NO: 71515 - DNA, 25 bp, Probe sequence
tcgttcggttaattactgtcaatat

SEQ ID NO: 71516 - DNA, 25 bp, Probe sequence
gtgtgcctagtacattgacttatat

SEQ ID NO: 71517 - DNA, 25 bp, Probe sequence
tgtgcctagtacattgacttatatc

SEQ ID NO: 71518 - DNA, 25 bp, Probe sequence
agtggttctttatcatttctgtcct

SEQ ID NO: 71519 - DNA, 25 bp, Probe sequence
gctatgactaacgataaagaaccac

SEQ ID NO: 71520 - DNA, 25 bp, Probe sequence
tggttctttatcatttctgtcctac

SEQ ID NO: 71521 - DNA, 25 bp, Probe sequence
gtggttctttatcatttctgtccta

SEQ ID NO: 71522 - DNA, 25 bp, Probe sequence
tagtggttctttatcatttctgtcc

SEQ ID NO: 71523 - DNA, 25 bp, Probe sequence
ggttctttatcatttctgtcctact

SEQ ID NO: 71524 - DNA, 25 bp, Probe sequence
ctatgactaacgataaagaaccact

SEQ ID NO: 71525 - DNA, 25 bp, Probe sequence
gtttcacgcatgtattcttctttct

SEQ ID NO: 71526 - DNA, 25 bp, Probe sequence
agtttcacgcatgtattcttctttc

SEQ ID NO: 71527 - DNA, 25 bp, Probe sequence
aggacagaaatgataaagaaccact

SEQ ID NO: 71528 - DNA, 25 bp, Probe sequence
gtggttctttatcgttagtcatagc

SEQ ID NO: 71529 - DNA, 25 bp, Probe sequence
ggacagaaatgataaagaaccacta

SEQ ID NO: 71530 - DNA, 25 bp, Probe sequence
taggacagaaatgataaagaaccac

SEQ ID NO: 71531 - DNA, 25 bp, Probe sequence
gtaggacagaaatgataaagaacca

SEQ ID NO: 71532 - DNA, 25 bp, Probe sequence
agtaggacagaaatgataaagaacc

SEQ ID NO: 71533 - DNA, 25 bp, Probe sequence
agtggttctttatcgttagtcatag

SEQ ID NO: 71534 - DNA, 25 bp, Probe sequence
aaagaagaatacatgcgtgaaactc

SEQ ID NO: 71535 - DNA, 25 bp, Probe sequence
gaaagaagaatacatgcgtgaaact

SEQ ID NO: 71536 - DNA, 25 bp, Probe sequence
agatgaacatcgcataacagtagaa

SEQ ID NO: 71537 - DNA, 25 bp, Probe sequence
ttgagatgaacatcgcataacagta

SEQ ID NO: 71538 - DNA, 25 bp, Probe sequence
gagatgaacatcgcataacagtaga

SEQ ID NO: 71539 - DNA, 25 bp, Probe sequence
tgagatgaacatcgcataacagtag

SEQ ID NO: 71540 - DNA, 25 bp, Probe sequence
acgcattgtcattgaatactcgatt

SEQ ID NO: 71541 - DNA, 25 bp, Probe sequence
aacgcattgtcattgaatactcgat

SEQ ID NO: 71542 - DNA, 25 bp, Probe sequence
actactatttgagatgaacatcgca

SEQ ID NO: 71543 - DNA, 25 bp, Probe sequence
atttgagatgaacatcgcataacag

SEQ ID NO: 71544 - DNA, 25 bp, Probe sequence
gatgaacatcgcataacagtagaaa

SEQ ID NO: 71545 - DNA, 25 bp, Probe sequence
ttctactgttatgcgatgttcatct

SEQ ID NO: 71546 - DNA, 25 bp, Probe sequence
tactgttatgcgatgttcatctcaa

SEQ ID NO: 71547 - DNA, 25 bp, Probe sequence
tctactgttatgcgatgttcatctc

SEQ ID NO: 71548 - DNA, 25 bp, Probe sequence
ctactgttatgcgatgttcatctca

SEQ ID NO: 71549 - DNA, 25 bp, Probe sequence
atcgagtattcaatgacaatgcgtt

SEQ ID NO: 71550 - DNA, 25 bp, Probe sequence
aatcgagtattcaatgacaatgcgt

SEQ ID NO: 71551 - DNA, 25 bp, Probe sequence
tgcgatgttcatctcaaatagtagt

SEQ ID NO: 71552 - DNA, 25 bp, Probe sequence
ctgttatgcgatgttcatctcaaat

SEQ ID NO: 71553 - DNA, 25 bp, Probe sequence
tttctactgttatgcgatgttcatc

SEQ ID NO: 71554 - DNA, 25 bp, Probe sequence
tgtcgttatattaaggtcatttcgt

SEQ ID NO: 71555 - DNA, 25 bp, Probe sequence
gtgtcgttatattaaggtcatttcg

SEQ ID NO: 71556 - DNA, 25 bp, Probe sequence
gtcgttatattaaggtcatttcgtt

SEQ ID NO: 71557 - DNA, 25 bp, Probe sequence
tggttcgattctctttagtagatca

SEQ ID NO: 71558 - DNA, 25 bp, Probe sequence
agtgtcgttatattaaggtcatttc

SEQ ID NO: 71559 - DNA, 25 bp, Probe sequence
ggttcgattctctttagtagatcaa

SEQ ID NO: 71560 - DNA, 25 bp, Probe sequence
ttggttcgattctctttagtagatc

SEQ ID NO: 71561 - DNA, 25 bp, Probe sequence
aagtgtcgttatattaaggtcattt

SEQ ID NO: 71562 - DNA, 25 bp, Probe sequence
aaagtgtcgttatattaaggtcatt

SEQ ID NO: 71563 - DNA, 25 bp, Probe sequence
acgaaatgaccttaatataacgaca

SEQ ID NO: 71564 - DNA, 25 bp, Probe sequence
cgaaatgaccttaatataacgacac

SEQ ID NO: 71565 - DNA, 25 bp, Probe sequence
aacgaaatgaccttaatataacgac

SEQ ID NO: 71566 - DNA, 25 bp, Probe sequence
tgatctactaaagagaatcgaacca

SEQ ID NO: 71567 - DNA, 25 bp, Probe sequence
gaaatgaccttaatataacgacact

SEQ ID NO: 71568 - DNA, 25 bp, Probe sequence
gatctactaaagagaatcgaaccaa

SEQ ID NO: 71569 - DNA, 25 bp, Probe sequence
ttgatctactaaagagaatcgaacc

SEQ ID NO: 71570 - DNA, 25 bp, Probe sequence
aatgaccttaatataacgacacttt

SEQ ID NO: 71571 - DNA, 25 bp, Probe sequence
aaatgaccttaatataacgacactt

SEQ ID NO: 71572 - DNA, 25 bp, Probe sequence
ctgctgtgttgtttagaattatgct

SEQ ID NO: 71573 - DNA, 25 bp, Probe sequence
tgctgtgttgtttagaattatgcta

SEQ ID NO: 71574 - DNA, 25 bp, Probe sequence
tctgctgtgttgtttagaattatgc

SEQ ID NO: 71575 - DNA, 25 bp, Probe sequence
ctctgctgtgttgtttagaattatg

SEQ ID NO: 71576 - DNA, 25 bp, Probe sequence
tctctgctgtgttgtttagaattat

SEQ ID NO: 71577 - DNA, 25 bp, Probe sequence
gtctgttctctgctgtgttgtttag

SEQ ID NO: 71578 - DNA, 25 bp, Probe sequence
aacataacaagaacgctttagattg

SEQ ID NO: 71579 - DNA, 25 bp, Probe sequence
aaacataacaagaacgctttagatt

SEQ ID NO: 71580 - DNA, 25 bp, Probe sequence
tctgttctctgctgtgttgtttaga

SEQ ID NO: 71581 - DNA, 25 bp, Probe sequence
agcataattctaaacaacacagcag

SEQ ID NO: 71582 - DNA, 25 bp, Probe sequence
gcataattctaaacaacacagcaga

SEQ ID NO: 71583 - DNA, 25 bp, Probe sequence
tagcataattctaaacaacacagca

SEQ ID NO: 71584 - DNA, 25 bp, Probe sequence
ataattctaaacaacacagcagaga

SEQ ID NO: 71585 - DNA, 25 bp, Probe sequence
cataattctaaacaacacagcagag

SEQ ID NO: 71586 - DNA, 25 bp, Probe sequence
ctaaacaacacagcagagaacagac

SEQ ID NO: 71587 - DNA, 25 bp, Probe sequence
caatctaaagcgttcttgttatgtt

SEQ ID NO: 71588 - DNA, 25 bp, Probe sequence
tctaaacaacacagcagagaacaga

SEQ ID NO: 71589 - DNA, 25 bp, Probe sequence
aatctaaagcgttcttgttatgttt

SEQ ID NO: 71590 - DNA, 25 bp, Probe sequence
tatttacatagggacgacatttgcc

SEQ ID NO: 71591 - DNA, 25 bp, Probe sequence
ctatttacatagggacgacatttgc

SEQ ID NO: 71592 - DNA, 25 bp, Probe sequence
tctatttacatagggacgacatttg

SEQ ID NO: 71593 - DNA, 25 bp, Probe sequence
agtaagagatgtcattcattcaatt

SEQ ID NO: 71594 - DNA, 25 bp, Probe sequence
ttaacactagctctcagcatcacta

SEQ ID NO: 71595 - DNA, 25 bp, Probe sequence
acgatttacatttagtccttaacac

SEQ ID NO: 71596 - DNA, 25 bp, Probe sequence
taacactagctctcagcatcactag

SEQ ID NO: 71597 - DNA, 25 bp, Probe sequence
ttctatttacatagggacgacattt

SEQ ID NO: 71598 - DNA, 25 bp, Probe sequence
ttagtccttaacactagctctcagc

SEQ ID NO: 71599 - DNA, 25 bp, Probe sequence
ggcaaatgtcgtccctatgtaaata

SEQ ID NO: 71600 - DNA, 25 bp, Probe sequence
gcaaatgtcgtccctatgtaaatag

SEQ ID NO: 71601 - DNA, 25 bp, Probe sequence
caaatgtcgtccctatgtaaataga

SEQ ID NO: 71602 - DNA, 25 bp, Probe sequence
aattgaatgaatgacatctcttact

SEQ ID NO: 71603 - DNA, 25 bp, Probe sequence
tagtgatgctgagagctagtgttaa

SEQ ID NO: 71604 - DNA, 25 bp, Probe sequence
gtgttaaggactaaatgtaaatcgt

SEQ ID NO: 71605 - DNA, 25 bp, Probe sequence
ctagtgatgctgagagctagtgtta

SEQ ID NO: 71606 - DNA, 25 bp, Probe sequence
aaatgtcgtccctatgtaaatagaa

SEQ ID NO: 71607 - DNA, 25 bp, Probe sequence
gctgagagctagtgttaaggactaa

SEQ ID NO: 71608 - DNA, 25 bp, Probe sequence
tgttaaaatctgtacttagaactct

SEQ ID NO: 71609 - DNA, 25 bp, Probe sequence
agagttctaagtacagattttaaca

SEQ ID NO: 71610 - DNA, 25 bp, Probe sequence
aggattgagtagtcaacatttgaaa

SEQ ID NO: 71611 - DNA, 25 bp, Probe sequence
taggattgagtagtcaacatttgaa

SEQ ID NO: 71612 - DNA, 25 bp, Probe sequence
ttaggattgagtagtcaacatttga

SEQ ID NO: 71613 - DNA, 25 bp, Probe sequence
tttaggattgagtagtcaacatttg

SEQ ID NO: 71614 - DNA, 25 bp, Probe sequence
catttgctgcgctatactatttata

SEQ ID NO: 71615 - DNA, 25 bp, Probe sequence
atttaggattgagtagtcaacattt

SEQ ID NO: 71616 - DNA, 25 bp, Probe sequence
aatttaggattgagtagtcaacatt

SEQ ID NO: 71617 - DNA, 25 bp, Probe sequence
ggattgagtagtcaacatttgaaaa

SEQ ID NO: 71618 - DNA, 25 bp, Probe sequence
gcatttgctgcgctatactatttat

SEQ ID NO: 71619 - DNA, 25 bp, Probe sequence
tttcaaatgttgactactcaatcct

SEQ ID NO: 71620 - DNA, 25 bp, Probe sequence
tcaaatgttgactactcaatcctaa

SEQ ID NO: 71621 - DNA, 25 bp, Probe sequence
ttcaaatgttgactactcaatccta

SEQ ID NO: 71622 - DNA, 25 bp, Probe sequence
caaatgttgactactcaatcctaaa

SEQ ID NO: 71623 - DNA, 25 bp, Probe sequence
tataaatagtatagcgcagcaaatg

SEQ ID NO: 71624 - DNA, 25 bp, Probe sequence
aatgttgactactcaatcctaaatt

SEQ ID NO: 71625 - DNA, 25 bp, Probe sequence
aaatgttgactactcaatcctaaat

SEQ ID NO: 71626 - DNA, 25 bp, Probe sequence
ttttcaaatgttgactactcaatcc

SEQ ID NO: 71627 - DNA, 25 bp, Probe sequence
ataaatagtatagcgcagcaaatgc

SEQ ID NO: 71628 - DNA, 25 bp, Probe sequence
aaatcaaaccgaatgaggctaaatt

SEQ ID NO: 71629 - DNA, 25 bp, Probe sequence
aaattaaatcaaaccgaatgaggct

SEQ ID NO: 71630 - DNA, 25 bp, Probe sequence
caaattaaatcaaaccgaatgaggc

SEQ ID NO: 71631 - DNA, 25 bp, Probe sequence
aatcaaaccgaatgaggctaaattg

SEQ ID NO: 71632 - DNA, 25 bp, Probe sequence
ttaaatcaaaccgaatgaggctaaa

SEQ ID NO: 71633 - DNA, 25 bp, Probe sequence
taaatcaaaccgaatgaggctaaat

SEQ ID NO: 71634 - DNA, 25 bp, Probe sequence
attaaatcaaaccgaatgaggctaa

SEQ ID NO: 71635 - DNA, 25 bp, Probe sequence
ccgaatgaggctaaattggttattt

SEQ ID NO: 71636 - DNA, 25 bp, Probe sequence
aattaaatcaaaccgaatgaggcta

SEQ ID NO: 71637 - DNA, 25 bp, Probe sequence
gcctcattcggtttgatttaatttg

SEQ ID NO: 71638 - DNA, 25 bp, Probe sequence
agcctcattcggtttgatttaattt

SEQ ID NO: 71639 - DNA, 25 bp, Probe sequence
aatttagcctcattcggtttgattt

SEQ ID NO: 71640 - DNA, 25 bp, Probe sequence
caatttagcctcattcggtttgatt

SEQ ID NO: 71641 - DNA, 25 bp, Probe sequence
tttagcctcattcggtttgatttaa

SEQ ID NO: 71642 - DNA, 25 bp, Probe sequence
ttagcctcattcggtttgatttaat

SEQ ID NO: 71643 - DNA, 25 bp, Probe sequence
atttagcctcattcggtttgattta

SEQ ID NO: 71644 - DNA, 25 bp, Probe sequence
tagcctcattcggtttgatttaatt

SEQ ID NO: 71645 - DNA, 25 bp, Probe sequence
aaataaccaatttagcctcattcgg

SEQ ID NO: 71646 - DNA, 25 bp, Probe sequence
tcatgctaaacttattgtaaacaca

SEQ ID NO: 71647 - DNA, 25 bp, Probe sequence
taaacacaagggtttggaggagtag

SEQ ID NO: 71648 - DNA, 25 bp, Probe sequence
gtaaacacaagggtttggaggagta

SEQ ID NO: 71649 - DNA, 25 bp, Probe sequence
acttattgtaaacacaagggtttgg

SEQ ID NO: 71650 - DNA, 25 bp, Probe sequence
ttattgtaaacacaagggtttggag

SEQ ID NO: 71651 - DNA, 25 bp, Probe sequence
cttattgtaaacacaagggtttgga

SEQ ID NO: 71652 - DNA, 25 bp, Probe sequence
ttcatgctaaacttattgtaaacac

SEQ ID NO: 71653 - DNA, 25 bp, Probe sequence
tattgtaaacacaagggtttggagg

SEQ ID NO: 71654 - DNA, 25 bp, Probe sequence
gctaaacttattgtaaacacaaggg

SEQ ID NO: 71655 - DNA, 25 bp, Probe sequence
tgtgtttacaataagtttagcatga

SEQ ID NO: 71656 - DNA, 25 bp, Probe sequence
ctactcctccaaacccttgtgttta

SEQ ID NO: 71657 - DNA, 25 bp, Probe sequence
ccaaacccttgtgtttacaataagt

SEQ ID NO: 71658 - DNA, 25 bp, Probe sequence
tactcctccaaacccttgtgtttac

SEQ ID NO: 71659 - DNA, 25 bp, Probe sequence
tccaaacccttgtgtttacaataag

SEQ ID NO: 71660 - DNA, 25 bp, Probe sequence
ctccaaacccttgtgtttacaataa

SEQ ID NO: 71661 - DNA, 25 bp, Probe sequence
gtgtttacaataagtttagcatgaa

SEQ ID NO: 71662 - DNA, 25 bp, Probe sequence
cctccaaacccttgtgtttacaata

SEQ ID NO: 71663 - DNA, 25 bp, Probe sequence
cccttgtgtttacaataagtttagc

SEQ ID NO: 71664 - DNA, 25 bp, Probe sequence
taggagtctggaacaataatcaatg

SEQ ID NO: 71665 - DNA, 25 bp, Probe sequence
aggagtctggaacaataatcaatgt

SEQ ID NO: 71666 - DNA, 25 bp, Probe sequence
acaataatcaatgttctaggctcct

SEQ ID NO: 71667 - DNA, 25 bp, Probe sequence
ttaggagtctggaacaataatcaat

SEQ ID NO: 71668 - DNA, 25 bp, Probe sequence
caataatcaatgttctaggctccta

SEQ ID NO: 71669 - DNA, 25 bp, Probe sequence
gctcctaaatgttatattggcagtt

SEQ ID NO: 71670 - DNA, 25 bp, Probe sequence
ggctcctaaatgttatattggcagt

SEQ ID NO: 71671 - DNA, 25 bp, Probe sequence
aataatcaatgttctaggctcctaa

SEQ ID NO: 71672 - DNA, 25 bp, Probe sequence
aggctcctaaatgttatattggcag

SEQ ID NO: 71673 - DNA, 25 bp, Probe sequence
cattgattattgttccagactccta

SEQ ID NO: 71674 - DNA, 25 bp, Probe sequence
acattgattattgttccagactcct

SEQ ID NO: 71675 - DNA, 25 bp, Probe sequence
aggagcctagaacattgattattgt

SEQ ID NO: 71676 - DNA, 25 bp, Probe sequence
attgattattgttccagactcctaa

SEQ ID NO: 71677 - DNA, 25 bp, Probe sequence
taggagcctagaacattgattattg

SEQ ID NO: 71678 - DNA, 25 bp, Probe sequence
aactgccaatataacatttaggagc

SEQ ID NO: 71679 - DNA, 25 bp, Probe sequence
ttaggagcctagaacattgattatt

SEQ ID NO: 71680 - DNA, 25 bp, Probe sequence
actgccaatataacatttaggagcc

SEQ ID NO: 71681 - DNA, 25 bp, Probe sequence
ctgccaatataacatttaggagcct

SEQ ID NO: 71682 - DNA, 25 bp, Probe sequence
tcactagatcagccactaatatgaa

SEQ ID NO: 71683 - DNA, 25 bp, Probe sequence
cattctttctcccatccagacttta

SEQ ID NO: 71684 - DNA, 25 bp, Probe sequence
ttctttctcccatccagactttaac

SEQ ID NO: 71685 - DNA, 25 bp, Probe sequence
attctttctcccatccagactttaa

SEQ ID NO: 71686 - DNA, 25 bp, Probe sequence
attaacattctttctcccatccaga

SEQ ID NO: 71687 - DNA, 25 bp, Probe sequence
ttaacattctttctcccatccagac

SEQ ID NO: 71688 - DNA, 25 bp, Probe sequence
aattaacattctttctcccatccag

SEQ ID NO: 71689 - DNA, 25 bp, Probe sequence
aaatcaaaccttcaattcgtctcta

SEQ ID NO: 71690 - DNA, 25 bp, Probe sequence
taacattctttctcccatccagact

SEQ ID NO: 71691 - DNA, 25 bp, Probe sequence
ttcatattagtggctgatctagtga

SEQ ID NO: 71692 - DNA, 25 bp, Probe sequence
taaagtctggatgggagaaagaatg

SEQ ID NO: 71693 - DNA, 25 bp, Probe sequence
tctggatgggagaaagaatgttaat

SEQ ID NO: 71694 - DNA, 25 bp, Probe sequence
ttaaagtctggatgggagaaagaat

SEQ ID NO: 71695 - DNA, 25 bp, Probe sequence
gttaaagtctggatgggagaaagaa

SEQ ID NO: 71696 - DNA, 25 bp, Probe sequence
gtctggatgggagaaagaatgttaa

SEQ ID NO: 71697 - DNA, 25 bp, Probe sequence
ctggatgggagaaagaatgttaatt

SEQ ID NO: 71698 - DNA, 25 bp, Probe sequence
tagagacgaattgaaggtttgattt

SEQ ID NO: 71699 - DNA, 25 bp, Probe sequence
agtctggatgggagaaagaatgtta

SEQ ID NO: 71700 - DNA, 25 bp, Probe sequence
tacactcaagatatggctaatcacc

SEQ ID NO: 71701 - DNA, 25 bp, Probe sequence
cactcaagatatggctaatcacctt

SEQ ID NO: 71702 - DNA, 25 bp, Probe sequence
acactcaagatatggctaatcacct

SEQ ID NO: 71703 - DNA, 25 bp, Probe sequence
atacactcaagatatggctaatcac

SEQ ID NO: 71704 - DNA, 25 bp, Probe sequence
catacactcaagatatggctaatca

SEQ ID NO: 71705 - DNA, 25 bp, Probe sequence
tttcactttcacaaccattaaacca

SEQ ID NO: 71706 - DNA, 25 bp, Probe sequence
tcactttcacaaccattaaaccatt

SEQ ID NO: 71707 - DNA, 25 bp, Probe sequence
ttcactttcacaaccattaaaccat

SEQ ID NO: 71708 - DNA, 25 bp, Probe sequence
actcaagatatggctaatcaccttt

SEQ ID NO: 71709 - DNA, 25 bp, Probe sequence
ggtgattagccatatcttgagtgta

SEQ ID NO: 71710 - DNA, 25 bp, Probe sequence
aaggtgattagccatatcttgagtg

SEQ ID NO: 71711 - DNA, 25 bp, Probe sequence
aggtgattagccatatcttgagtgt

SEQ ID NO: 71712 - DNA, 25 bp, Probe sequence
gtgattagccatatcttgagtgtat

SEQ ID NO: 71713 - DNA, 25 bp, Probe sequence
tgattagccatatcttgagtgtatg

SEQ ID NO: 71714 - DNA, 25 bp, Probe sequence
tggtttaatggttgtgaaagtgaaa

SEQ ID NO: 71715 - DNA, 25 bp, Probe sequence
atggtttaatggttgtgaaagtgaa

SEQ ID NO: 71716 - DNA, 25 bp, Probe sequence
aatggtttaatggttgtgaaagtga

SEQ ID NO: 71717 - DNA, 25 bp, Probe sequence
aaaggtgattagccatatcttgagt

SEQ ID NO: 71718 - DNA, 25 bp, Probe sequence
tatttattgcgatagaaagcgtctt

SEQ ID NO: 71719 - DNA, 25 bp, Probe sequence
ctatttattgcgatagaaagcgtct

SEQ ID NO: 71720 - DNA, 25 bp, Probe sequence
atttattgcgatagaaagcgtcttt

SEQ ID NO: 71721 - DNA, 25 bp, Probe sequence
tctatttattgcgatagaaagcgtc

SEQ ID NO: 71722 - DNA, 25 bp, Probe sequence
tttattgcgatagaaagcgtctttt

SEQ ID NO: 71723 - DNA, 25 bp, Probe sequence
aaagacgctttctatttattgcgat

SEQ ID NO: 71724 - DNA, 25 bp, Probe sequence
gacgctttctatttattgcgataga

SEQ ID NO: 71725 - DNA, 25 bp, Probe sequence
agacgctttctatttattgcgatag

SEQ ID NO: 71726 - DNA, 25 bp, Probe sequence
aagacgctttctatttattgcgata

SEQ ID NO: 71727 - DNA, 25 bp, Probe sequence
aaaagacgctttctatttattgcga

SEQ ID NO: 71728 - DNA, 25 bp, Probe sequence
aagacgctttctatcgcaataaata

SEQ ID NO: 71729 - DNA, 25 bp, Probe sequence
agacgctttctatcgcaataaatag

SEQ ID NO: 71730 - DNA, 25 bp, Probe sequence
aaagacgctttctatcgcaataaat

SEQ ID NO: 71731 - DNA, 25 bp, Probe sequence
gacgctttctatcgcaataaataga

SEQ ID NO: 71732 - DNA, 25 bp, Probe sequence
aaaagacgctttctatcgcaataaa

SEQ ID NO: 71733 - DNA, 25 bp, Probe sequence
atcgcaataaatagaaagcgtcttt

SEQ ID NO: 71734 - DNA, 25 bp, Probe sequence
ctatcgcaataaatagaaagcgtct

SEQ ID NO: 71735 - DNA, 25 bp, Probe sequence
tctatcgcaataaatagaaagcgtc

SEQ ID NO: 71736 - DNA, 25 bp, Probe sequence
tatcgcaataaatagaaagcgtctt

SEQ ID NO: 71737 - DNA, 25 bp, Probe sequence
tcgcaataaatagaaagcgtctttt

SEQ ID NO: 71738 - DNA, 25 bp, Probe sequence
aggtcattgttgttatacattcagt

SEQ ID NO: 71739 - DNA, 25 bp, Probe sequence
cctcttaggtcattgttgttataca

SEQ ID NO: 71740 - DNA, 25 bp, Probe sequence
ggtcattgttgttatacattcagtt

SEQ ID NO: 71741 - DNA, 25 bp, Probe sequence
taggtcattgttgttatacattcag

SEQ ID NO: 71742 - DNA, 25 bp, Probe sequence
tgttatacattcagtttgactacga

SEQ ID NO: 71743 - DNA, 25 bp, Probe sequence
ctcttaggtcattgttgttatacat

SEQ ID NO: 71744 - DNA, 25 bp, Probe sequence
ttaggtcattgttgttatacattca

SEQ ID NO: 71745 - DNA, 25 bp, Probe sequence
ttgttatacattcagtttgactacg

SEQ ID NO: 71746 - DNA, 25 bp, Probe sequence
tcttaggtcattgttgttatacatt

SEQ ID NO: 71747 - DNA, 25 bp, Probe sequence
actgaatgtataacaacaatgacct

SEQ ID NO: 71748 - DNA, 25 bp, Probe sequence
tgtataacaacaatgacctaagagg

SEQ ID NO: 71749 - DNA, 25 bp, Probe sequence
aactgaatgtataacaacaatgacc

SEQ ID NO: 71750 - DNA, 25 bp, Probe sequence
ctgaatgtataacaacaatgaccta

SEQ ID NO: 71751 - DNA, 25 bp, Probe sequence
tcgtagtcaaactgaatgtataaca

SEQ ID NO: 71752 - DNA, 25 bp, Probe sequence
atgtataacaacaatgacctaagag

SEQ ID NO: 71753 - DNA, 25 bp, Probe sequence
tgaatgtataacaacaatgacctaa

SEQ ID NO: 71754 - DNA, 25 bp, Probe sequence
cgtagtcaaactgaatgtataacaa

SEQ ID NO: 71755 - DNA, 25 bp, Probe sequence
aatgtataacaacaatgacctaaga

SEQ ID NO: 71756 - DNA, 25 bp, Probe sequence
tttaacacttaatttagcgattacg

SEQ ID NO: 71757 - DNA, 25 bp, Probe sequence
tgttacctcccgattacaaattttg

SEQ ID NO: 71758 - DNA, 25 bp, Probe sequence
tgttctatctactatttagcaaagt

SEQ ID NO: 71759 - DNA, 25 bp, Probe sequence
acacttaatttagcgattacgcaaa

SEQ ID NO: 71760 - DNA, 25 bp, Probe sequence
aacacttaatttagcgattacgcaa

SEQ ID NO: 71761 - DNA, 25 bp, Probe sequence
taacacttaatttagcgattacgca

SEQ ID NO: 71762 - DNA, 25 bp, Probe sequence
ttaacacttaatttagcgattacgc

SEQ ID NO: 71763 - DNA, 25 bp, Probe sequence
gttacctcccgattacaaattttgt

SEQ ID NO: 71764 - DNA, 25 bp, Probe sequence
tacctcccgattacaaattttgttc

SEQ ID NO: 71765 - DNA, 25 bp, Probe sequence
cgtaatcgctaaattaagtgttaaa

SEQ ID NO: 71766 - DNA, 25 bp, Probe sequence
caaaatttgtaatcgggaggtaaca

SEQ ID NO: 71767 - DNA, 25 bp, Probe sequence
actttgctaaatagtagatagaaca

SEQ ID NO: 71768 - DNA, 25 bp, Probe sequence
ttgcgtaatcgctaaattaagtgtt

SEQ ID NO: 71769 - DNA, 25 bp, Probe sequence
tttgcgtaatcgctaaattaagtgt

SEQ ID NO: 71770 - DNA, 25 bp, Probe sequence
tgcgtaatcgctaaattaagtgtta

SEQ ID NO: 71771 - DNA, 25 bp, Probe sequence
gcgtaatcgctaaattaagtgttaa

SEQ ID NO: 71772 - DNA, 25 bp, Probe sequence
acaaaatttgtaatcgggaggtaac

SEQ ID NO: 71773 - DNA, 25 bp, Probe sequence
gaacaaaatttgtaatcgggaggta

SEQ ID NO: 71774 - DNA, 25 bp, Probe sequence
gtcgatgtgttagtgatgttgaaac

SEQ ID NO: 71775 - DNA, 25 bp, Probe sequence
aaatttcggtcgatgtgttagtgat

SEQ ID NO: 71776 - DNA, 25 bp, Probe sequence
ggtcgatgtgttagtgatgttgaaa

SEQ ID NO: 71777 - DNA, 25 bp, Probe sequence
aatttcggtcgatgtgttagtgatg

SEQ ID NO: 71778 - DNA, 25 bp, Probe sequence
cggtcgatgtgttagtgatgttgaa

SEQ ID NO: 71779 - DNA, 25 bp, Probe sequence
ttcggtcgatgtgttagtgatgttg

SEQ ID NO: 71780 - DNA, 25 bp, Probe sequence
gaaacaccctaacatcttcatataa

SEQ ID NO: 71781 - DNA, 25 bp, Probe sequence
atttcggtcgatgtgttagtgatgt

SEQ ID NO: 71782 - DNA, 25 bp, Probe sequence
gttgaaacaccctaacatcttcata

SEQ ID NO: 71783 - DNA, 25 bp, Probe sequence
gtttcaacatcactaacacatcgac

SEQ ID NO: 71784 - DNA, 25 bp, Probe sequence
atcactaacacatcgaccgaaattt

SEQ ID NO: 71785 - DNA, 25 bp, Probe sequence
tttcaacatcactaacacatcgacc

SEQ ID NO: 71786 - DNA, 25 bp, Probe sequence
catcactaacacatcgaccgaaatt

SEQ ID NO: 71787 - DNA, 25 bp, Probe sequence
caacatcactaacacatcgaccgaa

SEQ ID NO: 71788 - DNA, 25 bp, Probe sequence
ttcaacatcactaacacatcgaccg

SEQ ID NO: 71789 - DNA, 25 bp, Probe sequence
ttatatgaagatgttagggtgtttc

SEQ ID NO: 71790 - DNA, 25 bp, Probe sequence
acatcactaacacatcgaccgaaat

SEQ ID NO: 71791 - DNA, 25 bp, Probe sequence
aacatcactaacacatcgaccgaaa

SEQ ID NO: 71792 - DNA, 25 bp, Probe sequence
atgaatctagccttaaccatattgc

SEQ ID NO: 71793 - DNA, 25 bp, Probe sequence
tctagccttaaccatattgcattca

SEQ ID NO: 71794 - DNA, 25 bp, Probe sequence
tgaatctagccttaaccatattgca

SEQ ID NO: 71795 - DNA, 25 bp, Probe sequence
atctagccttaaccatattgcattc

SEQ ID NO: 71796 - DNA, 25 bp, Probe sequence
gaatctagccttaaccatattgcat

SEQ ID NO: 71797 - DNA, 25 bp, Probe sequence
ctagccttaaccatattgcattcaa

SEQ ID NO: 71798 - DNA, 25 bp, Probe sequence
aatctagccttaaccatattgcatt

SEQ ID NO: 71799 - DNA, 25 bp, Probe sequence
atttcatttatggtgatttgacgct

SEQ ID NO: 71800 - DNA, 25 bp, Probe sequence
tcatttatggtgatttgacgctaaa

SEQ ID NO: 71801 - DNA, 25 bp, Probe sequence
gcaatatggttaaggctagattcat

SEQ ID NO: 71802 - DNA, 25 bp, Probe sequence
tgcaatatggttaaggctagattca

SEQ ID NO: 71803 - DNA, 25 bp, Probe sequence
tgaatgcaatatggttaaggctaga

SEQ ID NO: 71804 - DNA, 25 bp, Probe sequence
atgcaatatggttaaggctagattc

SEQ ID NO: 71805 - DNA, 25 bp, Probe sequence
gaatgcaatatggttaaggctagat

SEQ ID NO: 71806 - DNA, 25 bp, Probe sequence
ttgaatgcaatatggttaaggctag

SEQ ID NO: 71807 - DNA, 25 bp, Probe sequence
aatgcaatatggttaaggctagatt

SEQ ID NO: 71808 - DNA, 25 bp, Probe sequence
agcgtcaaatcaccataaatgaaat

SEQ ID NO: 71809 - DNA, 25 bp, Probe sequence
tagcgtcaaatcaccataaatgaaa

SEQ ID NO: 71810 - DNA, 25 bp, Probe sequence
ttattgaacttgagtcaccacttaa

SEQ ID NO: 71811 - DNA, 25 bp, Probe sequence
attgaacttgagtcaccacttaaac

SEQ ID NO: 71812 - DNA, 25 bp, Probe sequence
ttgaacttgagtcaccacttaaact

SEQ ID NO: 71813 - DNA, 25 bp, Probe sequence
tattgaacttgagtcaccacttaaa

SEQ ID NO: 71814 - DNA, 25 bp, Probe sequence
tttattgaacttgagtcaccactta

SEQ ID NO: 71815 - DNA, 25 bp, Probe sequence
actcctgttgaatcaatttagactt

SEQ ID NO: 71816 - DNA, 25 bp, Probe sequence
ttgtactctaataagtatgtggctt

SEQ ID NO: 71817 - DNA, 25 bp, Probe sequence
tactcctgttgaatcaatttagact

SEQ ID NO: 71818 - DNA, 25 bp, Probe sequence
ctcctgttgaatcaatttagacttt

SEQ ID NO: 71819 - DNA, 25 bp, Probe sequence
ttaagtggtgactcaagttcaataa

SEQ ID NO: 71820 - DNA, 25 bp, Probe sequence
gtttaagtggtgactcaagttcaat

SEQ ID NO: 71821 - DNA, 25 bp, Probe sequence
agtttaagtggtgactcaagttcaa

SEQ ID NO: 71822 - DNA, 25 bp, Probe sequence
taagtggtgactcaagttcaataaa

SEQ ID NO: 71823 - DNA, 25 bp, Probe sequence
tttaagtggtgactcaagttcaata

SEQ ID NO: 71824 - DNA, 25 bp, Probe sequence
aagccacatacttattagagtacaa

SEQ ID NO: 71825 - DNA, 25 bp, Probe sequence
aagtctaaattgattcaacaggagt

SEQ ID NO: 71826 - DNA, 25 bp, Probe sequence
agtctaaattgattcaacaggagta

SEQ ID NO: 71827 - DNA, 25 bp, Probe sequence
gtctaaattgattcaacaggagtag

SEQ ID NO: 71828 - DNA, 25 bp, Probe sequence
gactttagcaaacattgtgtctaca

SEQ ID NO: 71829 - DNA, 25 bp, Probe sequence
tgactttagcaaacattgtgtctac

SEQ ID NO: 71830 - DNA, 25 bp, Probe sequence
atgactttagcaaacattgtgtcta

SEQ ID NO: 71831 - DNA, 25 bp, Probe sequence
aatgataatcatccaggaggtctag

SEQ ID NO: 71832 - DNA, 25 bp, Probe sequence
atgataatcatccaggaggtctagc

SEQ ID NO: 71833 - DNA, 25 bp, Probe sequence
aatgactttagcaaacattgtgtct

SEQ ID NO: 71834 - DNA, 25 bp, Probe sequence
aaatgactttagcaaacattgtgtc

SEQ ID NO: 71835 - DNA, 25 bp, Probe sequence
tgtaaatgataatcatccaggaggt

SEQ ID NO: 71836 - DNA, 25 bp, Probe sequence
gtaaatgataatcatccaggaggtc

SEQ ID NO: 71837 - DNA, 25 bp, Probe sequence
gtagacacaatgtttgctaaagtca

SEQ ID NO: 71838 - DNA, 25 bp, Probe sequence
tgtagacacaatgtttgctaaagtc

SEQ ID NO: 71839 - DNA, 25 bp, Probe sequence
tagacacaatgtttgctaaagtcat

SEQ ID NO: 71840 - DNA, 25 bp, Probe sequence
ctagacctcctggatgattatcatt

SEQ ID NO: 71841 - DNA, 25 bp, Probe sequence
gctagacctcctggatgattatcat

SEQ ID NO: 71842 - DNA, 25 bp, Probe sequence
agacacaatgtttgctaaagtcatt

SEQ ID NO: 71843 - DNA, 25 bp, Probe sequence
gacacaatgtttgctaaagtcattt

SEQ ID NO: 71844 - DNA, 25 bp, Probe sequence
acctcctggatgattatcatttaca

SEQ ID NO: 71845 - DNA, 25 bp, Probe sequence
gacctcctggatgattatcatttac

SEQ ID NO: 71846 - DNA, 25 bp, Probe sequence
tgcatctaatcgctatagttataca

SEQ ID NO: 71847 - DNA, 25 bp, Probe sequence
gcatctaatcgctatagttatacaa

SEQ ID NO: 71848 - DNA, 25 bp, Probe sequence
aatcataactatgcatctaatcgct

SEQ ID NO: 71849 - DNA, 25 bp, Probe sequence
aatgtcaatgtagcgttaatacaaa

SEQ ID NO: 71850 - DNA, 25 bp, Probe sequence
aaatgtcaatgtagcgttaatacaa

SEQ ID NO: 71851 - DNA, 25 bp, Probe sequence
aaagataaaatgtcaatgtagcgtt

SEQ ID NO: 71852 - DNA, 25 bp, Probe sequence
aaaagataaaatgtcaatgtagcgt

SEQ ID NO: 71853 - DNA, 25 bp, Probe sequence
aatcgctatagttatacaacaagat

SEQ ID NO: 71854 - DNA, 25 bp, Probe sequence
tcataactatgcatctaatcgctat

SEQ ID NO: 71855 - DNA, 25 bp, Probe sequence
tgtataactatagcgattagatgca

SEQ ID NO: 71856 - DNA, 25 bp, Probe sequence
ttgtataactatagcgattagatgc

SEQ ID NO: 71857 - DNA, 25 bp, Probe sequence
agcgattagatgcatagttatgatt

SEQ ID NO: 71858 - DNA, 25 bp, Probe sequence
ttgtattaacgctacattgacattt

SEQ ID NO: 71859 - DNA, 25 bp, Probe sequence
tttgtattaacgctacattgacatt

SEQ ID NO: 71860 - DNA, 25 bp, Probe sequence
acgctacattgacattttatctttt

SEQ ID NO: 71861 - DNA, 25 bp, Probe sequence
aacgctacattgacattttatcttt

SEQ ID NO: 71862 - DNA, 25 bp, Probe sequence
atcttgttgtataactatagcgatt

SEQ ID NO: 71863 - DNA, 25 bp, Probe sequence
tagcgattagatgcatagttatgat

SEQ ID NO: 71864 - DNA, 25 bp, Probe sequence
tcagcaaataggtaaattacgacac

SEQ ID NO: 71865 - DNA, 25 bp, Probe sequence
ttcagcaaataggtaaattacgaca

SEQ ID NO: 71866 - DNA, 25 bp, Probe sequence
taaattacgacaccttcctgaacga

SEQ ID NO: 71867 - DNA, 25 bp, Probe sequence
gtaaattacgacaccttcctgaacg

SEQ ID NO: 71868 - DNA, 25 bp, Probe sequence
attcagcaaataggtaaattacgac

SEQ ID NO: 71869 - DNA, 25 bp, Probe sequence
cattcagcaaataggtaaattacga

SEQ ID NO: 71870 - DNA, 25 bp, Probe sequence
tcattcagcaaataggtaaattacg

SEQ ID NO: 71871 - DNA, 25 bp, Probe sequence
gttgccgtttaaataatgtgaatgt

SEQ ID NO: 71872 - DNA, 25 bp, Probe sequence
tgttgccgtttaaataatgtgaatg

SEQ ID NO: 71873 - DNA, 25 bp, Probe sequence
gtgtcgtaatttacctatttgctga

SEQ ID NO: 71874 - DNA, 25 bp, Probe sequence
tgtcgtaatttacctatttgctgaa

SEQ ID NO: 71875 - DNA, 25 bp, Probe sequence
tcgttcaggaaggtgtcgtaattta

SEQ ID NO: 71876 - DNA, 25 bp, Probe sequence
cgttcaggaaggtgtcgtaatttac

SEQ ID NO: 71877 - DNA, 25 bp, Probe sequence
cgtaatttacctatttgctgaatga

SEQ ID NO: 71878 - DNA, 25 bp, Probe sequence
tcgtaatttacctatttgctgaatg

SEQ ID NO: 71879 - DNA, 25 bp, Probe sequence
gtcgtaatttacctatttgctgaat

SEQ ID NO: 71880 - DNA, 25 bp, Probe sequence
cattcacattatttaaacggcaaca

SEQ ID NO: 71881 - DNA, 25 bp, Probe sequence
acattcacattatttaaacggcaac

SEQ ID NO: 71882 - DNA, 25 bp, Probe sequence
agccctgacaattcatctaaccttt

SEQ ID NO: 71883 - DNA, 25 bp, Probe sequence
aagccctgacaattcatctaacctt

SEQ ID NO: 71884 - DNA, 25 bp, Probe sequence
caagccctgacaattcatctaacct

SEQ ID NO: 71885 - DNA, 25 bp, Probe sequence
tctaaccttttcatcagttgagtga

SEQ ID NO: 71886 - DNA, 25 bp, Probe sequence
ccctgacaattcatctaaccttttc

SEQ ID NO: 71887 - DNA, 25 bp, Probe sequence
cctgacaattcatctaaccttttca

SEQ ID NO: 71888 - DNA, 25 bp, Probe sequence
atctaaccttttcatcagttgagtg

SEQ ID NO: 71889 - DNA, 25 bp, Probe sequence
catctaaccttttcatcagttgagt

SEQ ID NO: 71890 - DNA, 25 bp, Probe sequence
tcatctaaccttttcatcagttgag

SEQ ID NO: 71891 - DNA, 25 bp, Probe sequence
aaggttagatgaattgtcagggctt

SEQ ID NO: 71892 - DNA, 25 bp, Probe sequence
aaaggttagatgaattgtcagggct

SEQ ID NO: 71893 - DNA, 25 bp, Probe sequence
aggttagatgaattgtcagggcttg

SEQ ID NO: 71894 - DNA, 25 bp, Probe sequence
tcactcaactgatgaaaaggttaga

SEQ ID NO: 71895 - DNA, 25 bp, Probe sequence
gaaaaggttagatgaattgtcaggg

SEQ ID NO: 71896 - DNA, 25 bp, Probe sequence
tgaaaaggttagatgaattgtcagg

SEQ ID NO: 71897 - DNA, 25 bp, Probe sequence
actcaactgatgaaaaggttagatg

SEQ ID NO: 71898 - DNA, 25 bp, Probe sequence
cactcaactgatgaaaaggttagat

SEQ ID NO: 71899 - DNA, 25 bp, Probe sequence
ctcaactgatgaaaaggttagatga

SEQ ID NO: 71900 - DNA, 25 bp, Probe sequence
cgaagtcacaacatatagtcatcac

SEQ ID NO: 71901 - DNA, 25 bp, Probe sequence
ccgaagtcacaacatatagtcatca

SEQ ID NO: 71902 - DNA, 25 bp, Probe sequence
cacaacatatagtcatcacttcagc

SEQ ID NO: 71903 - DNA, 25 bp, Probe sequence
caacatatagtcatcacttcagcct

SEQ ID NO: 71904 - DNA, 25 bp, Probe sequence
acaacatatagtcatcacttcagcc

SEQ ID NO: 71905 - DNA, 25 bp, Probe sequence
gccgaagtcacaacatatagtcatc

SEQ ID NO: 71906 - DNA, 25 bp, Probe sequence
tatagtcatcacttcagcctaacat

SEQ ID NO: 71907 - DNA, 25 bp, Probe sequence
atatagtcatcacttcagcctaaca

SEQ ID NO: 71908 - DNA, 25 bp, Probe sequence
acatatagtcatcacttcagcctaa

SEQ ID NO: 71909 - DNA, 25 bp, Probe sequence
tgatgactatatgttgtgacttcgg

SEQ ID NO: 71910 - DNA, 25 bp, Probe sequence
gtgatgactatatgttgtgacttcg

SEQ ID NO: 71911 - DNA, 25 bp, Probe sequence
gctgaagtgatgactatatgttgtg

SEQ ID NO: 71912 - DNA, 25 bp, Probe sequence
aggctgaagtgatgactatatgttg

SEQ ID NO: 71913 - DNA, 25 bp, Probe sequence
ggctgaagtgatgactatatgttgt

SEQ ID NO: 71914 - DNA, 25 bp, Probe sequence
gatgactatatgttgtgacttcggc

SEQ ID NO: 71915 - DNA, 25 bp, Probe sequence
taggctgaagtgatgactatatgtt

SEQ ID NO: 71916 - DNA, 25 bp, Probe sequence
ttaggctgaagtgatgactatatgt

SEQ ID NO: 71917 - DNA, 25 bp, Probe sequence
tgttaggctgaagtgatgactatat

SEQ ID NO: 71918 - DNA, 25 bp, Probe sequence
aaaagctaaagattttcgatacata

SEQ ID NO: 71919 - DNA, 25 bp, Probe sequence
agaaaagctaaagattttcgataca

SEQ ID NO: 71920 - DNA, 25 bp, Probe sequence
gaaaagctaaagattttcgatacat

SEQ ID NO: 71921 - DNA, 25 bp, Probe sequence
tagaaaagctaaagattttcgatac

SEQ ID NO: 71922 - DNA, 25 bp, Probe sequence
aatagaaaagctaaagattttcgat

SEQ ID NO: 71923 - DNA, 25 bp, Probe sequence
tatgtatcgaaaatctttagctttt

SEQ ID NO: 71924 - DNA, 25 bp, Probe sequence
tgtatcgaaaatctttagcttttct

SEQ ID NO: 71925 - DNA, 25 bp, Probe sequence
atgtatcgaaaatctttagcttttc

SEQ ID NO: 71926 - DNA, 25 bp, Probe sequence
gtatcgaaaatctttagcttttcta

SEQ ID NO: 71927 - DNA, 25 bp, Probe sequence
atcgaaaatctttagcttttctatt

SEQ ID NO: 71928 - DNA, 25 bp, Probe sequence
ctccaccactcaggataagagaatc

SEQ ID NO: 71929 - DNA, 25 bp, Probe sequence
aattatcgctttggagggatttagg

SEQ ID NO: 71930 - DNA, 25 bp, Probe sequence
gctcttatcgttcagacctatttgt

SEQ ID NO: 71931 - DNA, 25 bp, Probe sequence
cgctcttatcgttcagacctatttg

SEQ ID NO: 71932 - DNA, 25 bp, Probe sequence
tcgctcttatcgttcagacctattt

SEQ ID NO: 71933 - DNA, 25 bp, Probe sequence
aaattatcgctttggagggatttag

SEQ ID NO: 71934 - DNA, 25 bp, Probe sequence
ttaaattatcgctttggagggattt

SEQ ID NO: 71935 - DNA, 25 bp, Probe sequence
ctcttatcgttcagacctatttgtc

SEQ ID NO: 71936 - DNA, 25 bp, Probe sequence
tttaaattatcgctttggagggatt

SEQ ID NO: 71937 - DNA, 25 bp, Probe sequence
gattctcttatcctgagtggtggag

SEQ ID NO: 71938 - DNA, 25 bp, Probe sequence
acaaataggtctgaacgataagagc

SEQ ID NO: 71939 - DNA, 25 bp, Probe sequence
cctaaatccctccaaagcgataatt

SEQ ID NO: 71940 - DNA, 25 bp, Probe sequence
aaataggtctgaacgataagagcga

SEQ ID NO: 71941 - DNA, 25 bp, Probe sequence
caaataggtctgaacgataagagcg

SEQ ID NO: 71942 - DNA, 25 bp, Probe sequence
ctaaatccctccaaagcgataattt

SEQ ID NO: 71943 - DNA, 25 bp, Probe sequence
aaatccctccaaagcgataatttaa

SEQ ID NO: 71944 - DNA, 25 bp, Probe sequence
gacaaataggtctgaacgataagag

SEQ ID NO: 71945 - DNA, 25 bp, Probe sequence
attctcttatcctgagtggtggagg

SEQ ID NO: 71946 - DNA, 25 bp, Probe sequence
ttatagtctaacaatggttggctcc

SEQ ID NO: 71947 - DNA, 25 bp, Probe sequence
ctaacaatggttggctcctcttatt

SEQ ID NO: 71948 - DNA, 25 bp, Probe sequence
tatagtctaacaatggttggctcct

SEQ ID NO: 71949 - DNA, 25 bp, Probe sequence
tctaacaatggttggctcctcttat

SEQ ID NO: 71950 - DNA, 25 bp, Probe sequence
atagtctaacaatggttggctcctc

SEQ ID NO: 71951 - DNA, 25 bp, Probe sequence
gttatagtctaacaatggttggctc

SEQ ID NO: 71952 - DNA, 25 bp, Probe sequence
gtctaacaatggttggctcctctta

SEQ ID NO: 71953 - DNA, 25 bp, Probe sequence
agagccaaccgttgttatagtctaa

SEQ ID NO: 71954 - DNA, 25 bp, Probe sequence
aagagccaaccgttgttatagtcta

SEQ ID NO: 71955 - DNA, 25 bp, Probe sequence
ggagccaaccattgttagactataa

SEQ ID NO: 71956 - DNA, 25 bp, Probe sequence
aataagaggagccaaccattgttag

SEQ ID NO: 71957 - DNA, 25 bp, Probe sequence
aggagccaaccattgttagactata

SEQ ID NO: 71958 - DNA, 25 bp, Probe sequence
ataagaggagccaaccattgttaga

SEQ ID NO: 71959 - DNA, 25 bp, Probe sequence
gaggagccaaccattgttagactat

SEQ ID NO: 71960 - DNA, 25 bp, Probe sequence
gagccaaccattgttagactataac

SEQ ID NO: 71961 - DNA, 25 bp, Probe sequence
taagaggagccaaccattgttagac

SEQ ID NO: 71962 - DNA, 25 bp, Probe sequence
tagactataacaacggttggctctt

SEQ ID NO: 71963 - DNA, 25 bp, Probe sequence
ttagactataacaacggttggctct

SEQ ID NO: 71964 - DNA, 25 bp, Probe sequence
cctcattcaacgtatatcacacatc

SEQ ID NO: 71965 - DNA, 25 bp, Probe sequence
ctcattcaacgtatatcacacatct

SEQ ID NO: 71966 - DNA, 25 bp, Probe sequence
ttcaacgtatatcacacatcttcaa

SEQ ID NO: 71967 - DNA, 25 bp, Probe sequence
attcaacgtatatcacacatcttca

SEQ ID NO: 71968 - DNA, 25 bp, Probe sequence
tcattcaacgtatatcacacatctt

SEQ ID NO: 71969 - DNA, 25 bp, Probe sequence
cattcaacgtatatcacacatcttc

SEQ ID NO: 71970 - DNA, 25 bp, Probe sequence
acgtatatcacacatcttcaaagct

SEQ ID NO: 71971 - DNA, 25 bp, Probe sequence
aacgtatatcacacatcttcaaagc

SEQ ID NO: 71972 - DNA, 25 bp, Probe sequence
ccctcattcaacgtatatcacacat

SEQ ID NO: 71973 - DNA, 25 bp, Probe sequence
gatgtgtgatatacgttgaatgagg

SEQ ID NO: 71974 - DNA, 25 bp, Probe sequence
agatgtgtgatatacgttgaatgag

SEQ ID NO: 71975 - DNA, 25 bp, Probe sequence
ttgaagatgtgtgatatacgttgaa

SEQ ID NO: 71976 - DNA, 25 bp, Probe sequence
aagatgtgtgatatacgttgaatga

SEQ ID NO: 71977 - DNA, 25 bp, Probe sequence
tgaagatgtgtgatatacgttgaat

SEQ ID NO: 71978 - DNA, 25 bp, Probe sequence
gaagatgtgtgatatacgttgaatg

SEQ ID NO: 71979 - DNA, 25 bp, Probe sequence
gctttgaagatgtgtgatatacgtt

SEQ ID NO: 71980 - DNA, 25 bp, Probe sequence
agctttgaagatgtgtgatatacgt

SEQ ID NO: 71981 - DNA, 25 bp, Probe sequence
atgtgtgatatacgttgaatgaggg

SEQ ID NO: 71982 - DNA, 25 bp, Probe sequence
ttatgacattctagcagtggttatg

SEQ ID NO: 71983 - DNA, 25 bp, Probe sequence
atgacattctagcagtggttatgtt

SEQ ID NO: 71984 - DNA, 25 bp, Probe sequence
tatgacattctagcagtggttatgt

SEQ ID NO: 71985 - DNA, 25 bp, Probe sequence
tttatgacattctagcagtggttat

SEQ ID NO: 71986 - DNA, 25 bp, Probe sequence
acatatcgttatatcattcgtctac

SEQ ID NO: 71987 - DNA, 25 bp, Probe sequence
aagtagacgaattgattcattgata

SEQ ID NO: 71988 - DNA, 25 bp, Probe sequence
catatcgttatatcattcgtctact

SEQ ID NO: 71989 - DNA, 25 bp, Probe sequence
gtagacgaattgattcattgatatg

SEQ ID NO: 71990 - DNA, 25 bp, Probe sequence
agtagacgaattgattcattgatat

SEQ ID NO: 71991 - DNA, 25 bp, Probe sequence
cataaccactgctagaatgtcataa

SEQ ID NO: 71992 - DNA, 25 bp, Probe sequence
aacataaccactgctagaatgtcat

SEQ ID NO: 71993 - DNA, 25 bp, Probe sequence
acataaccactgctagaatgtcata

SEQ ID NO: 71994 - DNA, 25 bp, Probe sequence
ataaccactgctagaatgtcataaa

SEQ ID NO: 71995 - DNA, 25 bp, Probe sequence
gtagacgaatgatataacgatatgt

SEQ ID NO: 71996 - DNA, 25 bp, Probe sequence
tatcaatgaatcaattcgtctactt

SEQ ID NO: 71997 - DNA, 25 bp, Probe sequence
catatcaatgaatcaattcgtctac

SEQ ID NO: 71998 - DNA, 25 bp, Probe sequence
agtagacgaatgatataacgatatg

SEQ ID NO: 71999 - DNA, 25 bp, Probe sequence
atatcaatgaatcaattcgtctact

SEQ ID NO: 72000 - DNA, 25 bp, Probe sequence
attatgttgtcatgttcgtgtcatt

SEQ ID NO: 72001 - DNA, 25 bp, Probe sequence
aattatgttgtcatgttcgtgtcat

SEQ ID NO: 72002 - DNA, 25 bp, Probe sequence
tgattatgtgatatagtgaaagcgt

SEQ ID NO: 72003 - DNA, 25 bp, Probe sequence
ttatgttgtcatgttcgtgtcattt

SEQ ID NO: 72004 - DNA, 25 bp, Probe sequence
aaattatgttgtcatgttcgtgtca

SEQ ID NO: 72005 - DNA, 25 bp, Probe sequence
gattatgtgatatagtgaaagcgtt

SEQ ID NO: 72006 - DNA, 25 bp, Probe sequence
cacttaataactccctcttaaatgc

SEQ ID NO: 72007 - DNA, 25 bp, Probe sequence
taaattatgttgtcatgttcgtgtc

SEQ ID NO: 72008 - DNA, 25 bp, Probe sequence
atgattatgtgatatagtgaaagcg

SEQ ID NO: 72009 - DNA, 25 bp, Probe sequence
atgacacgaacatgacaacataatt

SEQ ID NO: 72010 - DNA, 25 bp, Probe sequence
aatgacacgaacatgacaacataat

SEQ ID NO: 72011 - DNA, 25 bp, Probe sequence
acgctttcactatatcacataatca

SEQ ID NO: 72012 - DNA, 25 bp, Probe sequence
tgacacgaacatgacaacataattt

SEQ ID NO: 72013 - DNA, 25 bp, Probe sequence
aaatgacacgaacatgacaacataa

SEQ ID NO: 72014 - DNA, 25 bp, Probe sequence
aacgctttcactatatcacataatc

SEQ ID NO: 72015 - DNA, 25 bp, Probe sequence
gcatttaagagggagttattaagtg

SEQ ID NO: 72016 - DNA, 25 bp, Probe sequence
gacacgaacatgacaacataattta

SEQ ID NO: 72017 - DNA, 25 bp, Probe sequence
cgctttcactatatcacataatcat

SEQ ID NO: 72018 - DNA, 25 bp, Probe sequence
cgcatacctatctataaacggacaa

SEQ ID NO: 72019 - DNA, 25 bp, Probe sequence
agttcacttagtggtatgtcaacat

SEQ ID NO: 72020 - DNA, 25 bp, Probe sequence
tagttcacttagtggtatgtcaaca

SEQ ID NO: 72021 - DNA, 25 bp, Probe sequence
gttcacttagtggtatgtcaacatt

SEQ ID NO: 72022 - DNA, 25 bp, Probe sequence
cacgcatacctatctataaacggac

SEQ ID NO: 72023 - DNA, 25 bp, Probe sequence
gaccacgcatacctatctataaacg

SEQ ID NO: 72024 - DNA, 25 bp, Probe sequence
agaccacgcatacctatctataaac

SEQ ID NO: 72025 - DNA, 25 bp, Probe sequence
acgcatacctatctataaacggaca

SEQ ID NO: 72026 - DNA, 25 bp, Probe sequence
gcatacctatctataaacggacaat

SEQ ID NO: 72027 - DNA, 25 bp, Probe sequence
ttgtccgtttatagataggtatgcg

SEQ ID NO: 72028 - DNA, 25 bp, Probe sequence
atgttgacataccactaagtgaact

SEQ ID NO: 72029 - DNA, 25 bp, Probe sequence
tgttgacataccactaagtgaacta

SEQ ID NO: 72030 - DNA, 25 bp, Probe sequence
cgtttatagataggtatgcgtggtc

SEQ ID NO: 72031 - DNA, 25 bp, Probe sequence
gtccgtttatagataggtatgcgtg

SEQ ID NO: 72032 - DNA, 25 bp, Probe sequence
aatgttgacataccactaagtgaac

SEQ ID NO: 72033 - DNA, 25 bp, Probe sequence
gtttatagataggtatgcgtggtct

SEQ ID NO: 72034 - DNA, 25 bp, Probe sequence
tgtccgtttatagataggtatgcgt

SEQ ID NO: 72035 - DNA, 25 bp, Probe sequence
attgtccgtttatagataggtatgc

SEQ ID NO: 72036 - DNA, 25 bp, Probe sequence
cagagaggaggtgtataaggtgatg

SEQ ID NO: 72037 - DNA, 25 bp, Probe sequence
agatgatataatagtagagtcgcct

SEQ ID NO: 72038 - DNA, 25 bp, Probe sequence
ttagacgcagagaggaggtgtataa

SEQ ID NO: 72039 - DNA, 25 bp, Probe sequence
gaggaggtgtataaggtgatgctta

SEQ ID NO: 72040 - DNA, 25 bp, Probe sequence
ttcacatcatagcaccagtcatcag

SEQ ID NO: 72041 - DNA, 25 bp, Probe sequence
tagacgcagagaggaggtgtataag

SEQ ID NO: 72042 - DNA, 25 bp, Probe sequence
gttcacatcatagcaccagtcatca

SEQ ID NO: 72043 - DNA, 25 bp, Probe sequence
agaggaggtgtataaggtgatgctt

SEQ ID NO: 72044 - DNA, 25 bp, Probe sequence
ttcttattggctaagtagacgcaat

SEQ ID NO: 72045 - DNA, 25 bp, Probe sequence
catcaccttatacacctcctctctg

SEQ ID NO: 72046 - DNA, 25 bp, Probe sequence
aggcgactctactattatatcatct

SEQ ID NO: 72047 - DNA, 25 bp, Probe sequence
ttatacacctcctctctgcgtctaa

SEQ ID NO: 72048 - DNA, 25 bp, Probe sequence
taagcatcaccttatacacctcctc

SEQ ID NO: 72049 - DNA, 25 bp, Probe sequence
cttatacacctcctctctgcgtcta

SEQ ID NO: 72050 - DNA, 25 bp, Probe sequence
ctgatgactggtgctatgatgtgaa

SEQ ID NO: 72051 - DNA, 25 bp, Probe sequence
tgatgactggtgctatgatgtgaac

SEQ ID NO: 72052 - DNA, 25 bp, Probe sequence
aagcatcaccttatacacctcctct

SEQ ID NO: 72053 - DNA, 25 bp, Probe sequence
attgcgtctacttagccaataagaa

SEQ ID NO: 72054 - DNA, 25 bp, Probe sequence
tgtcttgatgattgaatgactcagt

SEQ ID NO: 72055 - DNA, 25 bp, Probe sequence
ctgtcttgatgattgaatgactcag

SEQ ID NO: 72056 - DNA, 25 bp, Probe sequence
actgtcttgatgattgaatgactca

SEQ ID NO: 72057 - DNA, 25 bp, Probe sequence
ttgtccaactaagtgtagacgattc

SEQ ID NO: 72058 - DNA, 25 bp, Probe sequence
aactgtcttgatgattgaatgactc

SEQ ID NO: 72059 - DNA, 25 bp, Probe sequence
gctcttcagtctcttgtcacaataa

SEQ ID NO: 72060 - DNA, 25 bp, Probe sequence
tgtccaactaagtgtagacgattca

SEQ ID NO: 72061 - DNA, 25 bp, Probe sequence
gtcttgatgattgaatgactcagta

SEQ ID NO: 72062 - DNA, 25 bp, Probe sequence
gtccaactaagtgtagacgattcac

SEQ ID NO: 72063 - DNA, 25 bp, Probe sequence
tgagtcattcaatcatcaagacagt

SEQ ID NO: 72064 - DNA, 25 bp, Probe sequence
ctgagtcattcaatcatcaagacag

SEQ ID NO: 72065 - DNA, 25 bp, Probe sequence
actgagtcattcaatcatcaagaca

SEQ ID NO: 72066 - DNA, 25 bp, Probe sequence
gaatcgtctacacttagttggacaa

SEQ ID NO: 72067 - DNA, 25 bp, Probe sequence
gagtcattcaatcatcaagacagtt

SEQ ID NO: 72068 - DNA, 25 bp, Probe sequence
ttattgtgacaagagactgaagagc

SEQ ID NO: 72069 - DNA, 25 bp, Probe sequence
tactgagtcattcaatcatcaagac

SEQ ID NO: 72070 - DNA, 25 bp, Probe sequence
tgaatcgtctacacttagttggaca

SEQ ID NO: 72071 - DNA, 25 bp, Probe sequence
gtgaatcgtctacacttagttggac

SEQ ID NO: 72072 - DNA, 25 bp, Probe sequence
caggattgggtgaatgtctaagttt

SEQ ID NO: 72073 - DNA, 25 bp, Probe sequence
tcaggattgggtgaatgtctaagtt

SEQ ID NO: 72074 - DNA, 25 bp, Probe sequence
ttgtcaggattgggtgaatgtctaa

SEQ ID NO: 72075 - DNA, 25 bp, Probe sequence
tttgtcaggattgggtgaatgtcta

SEQ ID NO: 72076 - DNA, 25 bp, Probe sequence
gtcaggattgggtgaatgtctaagt

SEQ ID NO: 72077 - DNA, 25 bp, Probe sequence
tgtcaggattgggtgaatgtctaag

SEQ ID NO: 72078 - DNA, 25 bp, Probe sequence
aggattgggtgaatgtctaagtttt

SEQ ID NO: 72079 - DNA, 25 bp, Probe sequence
ggattgggtgaatgtctaagtttta

SEQ ID NO: 72080 - DNA, 25 bp, Probe sequence
agtatattttgtcaggattgggtga

SEQ ID NO: 72081 - DNA, 25 bp, Probe sequence
aaacttagacattcacccaatcctg

SEQ ID NO: 72082 - DNA, 25 bp, Probe sequence
aacttagacattcacccaatcctga

SEQ ID NO: 72083 - DNA, 25 bp, Probe sequence
tagacattcacccaatcctgacaaa

SEQ ID NO: 72084 - DNA, 25 bp, Probe sequence
ttagacattcacccaatcctgacaa

SEQ ID NO: 72085 - DNA, 25 bp, Probe sequence
cttagacattcacccaatcctgaca

SEQ ID NO: 72086 - DNA, 25 bp, Probe sequence
acttagacattcacccaatcctgac

SEQ ID NO: 72087 - DNA, 25 bp, Probe sequence
aaaacttagacattcacccaatcct

SEQ ID NO: 72088 - DNA, 25 bp, Probe sequence
taaaacttagacattcacccaatcc

SEQ ID NO: 72089 - DNA, 25 bp, Probe sequence
tcacccaatcctgacaaaatatact

SEQ ID NO: 72090 - DNA, 25 bp, Probe sequence
tgtgctcctctaagtattcgtataa

SEQ ID NO: 72091 - DNA, 25 bp, Probe sequence
ttgtgctcctctaagtattcgtata

SEQ ID NO: 72092 - DNA, 25 bp, Probe sequence
tttgtgctcctctaagtattcgtat

SEQ ID NO: 72093 - DNA, 25 bp, Probe sequence
gtgctcctctaagtattcgtataaa

SEQ ID NO: 72094 - DNA, 25 bp, Probe sequence
tgctcctctaagtattcgtataaat

SEQ ID NO: 72095 - DNA, 25 bp, Probe sequence
ttttgtgctcctctaagtattcgta

SEQ ID NO: 72096 - DNA, 25 bp, Probe sequence
cgaataaatagaatcacagagatgt

SEQ ID NO: 72097 - DNA, 25 bp, Probe sequence
catttatcaatgtatggatggatga

SEQ ID NO: 72098 - DNA, 25 bp, Probe sequence
tcatttatcaatgtatggatggatg

SEQ ID NO: 72099 - DNA, 25 bp, Probe sequence
tatacgaatacttagaggagcacaa

SEQ ID NO: 72100 - DNA, 25 bp, Probe sequence
ttatacgaatacttagaggagcaca

SEQ ID NO: 72101 - DNA, 25 bp, Probe sequence
atacgaatacttagaggagcacaaa

SEQ ID NO: 72102 - DNA, 25 bp, Probe sequence
tttatacgaatacttagaggagcac

SEQ ID NO: 72103 - DNA, 25 bp, Probe sequence
atttatacgaatacttagaggagca

SEQ ID NO: 72104 - DNA, 25 bp, Probe sequence
tacgaatacttagaggagcacaaaa

SEQ ID NO: 72105 - DNA, 25 bp, Probe sequence
acatctctgtgattctatttattcg

SEQ ID NO: 72106 - DNA, 25 bp, Probe sequence
catccatccatacattgataaatga

SEQ ID NO: 72107 - DNA, 25 bp, Probe sequence
tcatccatccatacattgataaatg

SEQ ID NO: 72108 - DNA, 25 bp, Probe sequence
aattattgaacacatgctcatggtg

SEQ ID NO: 72109 - DNA, 25 bp, Probe sequence
aaattattgaacacatgctcatggt

SEQ ID NO: 72110 - DNA, 25 bp, Probe sequence
ttttgtgctcctctgtttattcatg

SEQ ID NO: 72111 - DNA, 25 bp, Probe sequence
cacatgctcatggtgtatatttaaa

SEQ ID NO: 72112 - DNA, 25 bp, Probe sequence
tttatgttatattcgaccgatgttt

SEQ ID NO: 72113 - DNA, 25 bp, Probe sequence
ttgtgctcctctgtttattcatgat

SEQ ID NO: 72114 - DNA, 25 bp, Probe sequence
ctcctctgtttattcatgatgcttt

SEQ ID NO: 72115 - DNA, 25 bp, Probe sequence
tttgtgctcctctgtttattcatga

SEQ ID NO: 72116 - DNA, 25 bp, Probe sequence
tgaacacatgctcatggtgtatatt

SEQ ID NO: 72117 - DNA, 25 bp, Probe sequence
caccatgagcatgtgttcaataatt

SEQ ID NO: 72118 - DNA, 25 bp, Probe sequence
accatgagcatgtgttcaataattt

SEQ ID NO: 72119 - DNA, 25 bp, Probe sequence
catgaataaacagaggagcacaaaa

SEQ ID NO: 72120 - DNA, 25 bp, Probe sequence
tttaaatatacaccatgagcatgtg

SEQ ID NO: 72121 - DNA, 25 bp, Probe sequence
aaacatcggtcgaatataacataaa

SEQ ID NO: 72122 - DNA, 25 bp, Probe sequence
atcatgaataaacagaggagcacaa

SEQ ID NO: 72123 - DNA, 25 bp, Probe sequence
aaagcatcatgaataaacagaggag

SEQ ID NO: 72124 - DNA, 25 bp, Probe sequence
tcatgaataaacagaggagcacaaa

SEQ ID NO: 72125 - DNA, 25 bp, Probe sequence
atacaccatgagcatgtgttcaata

SEQ ID NO: 72126 - DNA, 25 bp, Probe sequence
tcaagctcctttacaattcgagata

SEQ ID NO: 72127 - DNA, 25 bp, Probe sequence
ttcaagctcctttacaattcgagat

SEQ ID NO: 72128 - DNA, 25 bp, Probe sequence
agctcctttacaattcgagatatgt

SEQ ID NO: 72129 - DNA, 25 bp, Probe sequence
tttcaagctcctttacaattcgaga

SEQ ID NO: 72130 - DNA, 25 bp, Probe sequence
caacgctcgtttaaagtcaatttgt

SEQ ID NO: 72131 - DNA, 25 bp, Probe sequence
tcctttacaattcgagatatgttgc

SEQ ID NO: 72132 - DNA, 25 bp, Probe sequence
aagctcctttacaattcgagatatg

SEQ ID NO: 72133 - DNA, 25 bp, Probe sequence
caagctcctttacaattcgagatat

SEQ ID NO: 72134 - DNA, 25 bp, Probe sequence
gctcctttacaattcgagatatgtt

SEQ ID NO: 72135 - DNA, 25 bp, Probe sequence
tatctcgaattgtaaaggagcttga

SEQ ID NO: 72136 - DNA, 25 bp, Probe sequence
atctcgaattgtaaaggagcttgaa

SEQ ID NO: 72137 - DNA, 25 bp, Probe sequence
tctcgaattgtaaaggagcttgaaa

SEQ ID NO: 72138 - DNA, 25 bp, Probe sequence
acatatctcgaattgtaaaggagct

SEQ ID NO: 72139 - DNA, 25 bp, Probe sequence
gcaacatatctcgaattgtaaagga

SEQ ID NO: 72140 - DNA, 25 bp, Probe sequence
acaaattgactttaaacgagcgttg

SEQ ID NO: 72141 - DNA, 25 bp, Probe sequence
atatctcgaattgtaaaggagcttg

SEQ ID NO: 72142 - DNA, 25 bp, Probe sequence
catatctcgaattgtaaaggagctt

SEQ ID NO: 72143 - DNA, 25 bp, Probe sequence
aacatatctcgaattgtaaaggagc

SEQ ID NO: 72144 - DNA, 25 bp, Probe sequence
tcaacttcacgaatgaattgatgat

SEQ ID NO: 72145 - DNA, 25 bp, Probe sequence
aacttcacgaatgaattgatgatac

SEQ ID NO: 72146 - DNA, 25 bp, Probe sequence
caacttcacgaatgaattgatgata

SEQ ID NO: 72147 - DNA, 25 bp, Probe sequence
tgtaaccgttttcttaatcactctt

SEQ ID NO: 72148 - DNA, 25 bp, Probe sequence
atgtaaccgttttcttaatcactct

SEQ ID NO: 72149 - DNA, 25 bp, Probe sequence
gtaaccgttttcttaatcactcttt

SEQ ID NO: 72150 - DNA, 25 bp, Probe sequence
tatgtaaccgttttcttaatcactc

SEQ ID NO: 72151 - DNA, 25 bp, Probe sequence
aaccgttttcttaatcactctttaa

SEQ ID NO: 72152 - DNA, 25 bp, Probe sequence
ttatgtaaccgttttcttaatcact

SEQ ID NO: 72153 - DNA, 25 bp, Probe sequence
atcatcaattcattcgtgaagttga

SEQ ID NO: 72154 - DNA, 25 bp, Probe sequence
tatcatcaattcattcgtgaagttg

SEQ ID NO: 72155 - DNA, 25 bp, Probe sequence
gtatcatcaattcattcgtgaagtt

SEQ ID NO: 72156 - DNA, 25 bp, Probe sequence
aagagtgattaagaaaacggttaca

SEQ ID NO: 72157 - DNA, 25 bp, Probe sequence
agagtgattaagaaaacggttacat

SEQ ID NO: 72158 - DNA, 25 bp, Probe sequence
aaagagtgattaagaaaacggttac

SEQ ID NO: 72159 - DNA, 25 bp, Probe sequence
gagtgattaagaaaacggttacata

SEQ ID NO: 72160 - DNA, 25 bp, Probe sequence
ttaaagagtgattaagaaaacggtt

SEQ ID NO: 72161 - DNA, 25 bp, Probe sequence
agtgattaagaaaacggttacataa

SEQ ID NO: 72162 - DNA, 25 bp, Probe sequence
atatatggcggaatggtgaacaatt

SEQ ID NO: 72163 - DNA, 25 bp, Probe sequence
aatatatggcggaatggtgaacaat

SEQ ID NO: 72164 - DNA, 25 bp, Probe sequence
tatatggcggaatggtgaacaattc

SEQ ID NO: 72165 - DNA, 25 bp, Probe sequence
aaatatatggcggaatggtgaacaa

SEQ ID NO: 72166 - DNA, 25 bp, Probe sequence
cggaatggtgaacaattcatgtatt

SEQ ID NO: 72167 - DNA, 25 bp, Probe sequence
gcggaatggtgaacaattcatgtat

SEQ ID NO: 72168 - DNA, 25 bp, Probe sequence
caatatgcagtcaatcaatgaaaca

SEQ ID NO: 72169 - DNA, 25 bp, Probe sequence
acaatatgcagtcaatcaatgaaac

SEQ ID NO: 72170 - DNA, 25 bp, Probe sequence
atatgcagtcaatcaatgaaacatg

SEQ ID NO: 72171 - DNA, 25 bp, Probe sequence
attgttcaccattccgccatatatt

SEQ ID NO: 72172 - DNA, 25 bp, Probe sequence
aattgttcaccattccgccatatat

SEQ ID NO: 72173 - DNA, 25 bp, Probe sequence
gaattgttcaccattccgccatata

SEQ ID NO: 72174 - DNA, 25 bp, Probe sequence
ttgttcaccattccgccatatattt

SEQ ID NO: 72175 - DNA, 25 bp, Probe sequence
aatacatgaattgttcaccattccg

SEQ ID NO: 72176 - DNA, 25 bp, Probe sequence
atacatgaattgttcaccattccgc

SEQ ID NO: 72177 - DNA, 25 bp, Probe sequence
gtttcattgattgactgcatattgt

SEQ ID NO: 72178 - DNA, 25 bp, Probe sequence
tgtttcattgattgactgcatattg

SEQ ID NO: 72179 - DNA, 25 bp, Probe sequence
catgtttcattgattgactgcatat

SEQ ID NO: 72180 - DNA, 25 bp, Probe sequence
acttagtatgacacctgctaattca

SEQ ID NO: 72181 - DNA, 25 bp, Probe sequence
cttagtatgacacctgctaattcaa

SEQ ID NO: 72182 - DNA, 25 bp, Probe sequence
tcatcaacaatctttcacatccaac

SEQ ID NO: 72183 - DNA, 25 bp, Probe sequence
ctcatcaacaatctttcacatccaa

SEQ ID NO: 72184 - DNA, 25 bp, Probe sequence
catcaacaatctttcacatccaaca

SEQ ID NO: 72185 - DNA, 25 bp, Probe sequence
tcaacaatctttcacatccaacatt

SEQ ID NO: 72186 - DNA, 25 bp, Probe sequence
tctcatcaacaatctttcacatcca

SEQ ID NO: 72187 - DNA, 25 bp, Probe sequence
ttctcatcaacaatctttcacatcc

SEQ ID NO: 72188 - DNA, 25 bp, Probe sequence
atcaacaatctttcacatccaacat

SEQ ID NO: 72189 - DNA, 25 bp, Probe sequence
tgaattagcaggtgtcatactaagt

SEQ ID NO: 72190 - DNA, 25 bp, Probe sequence
ttgaattagcaggtgtcatactaag

SEQ ID NO: 72191 - DNA, 25 bp, Probe sequence
ttggatgtgaaagattgttgatgag

SEQ ID NO: 72192 - DNA, 25 bp, Probe sequence
gttggatgtgaaagattgttgatga

SEQ ID NO: 72193 - DNA, 25 bp, Probe sequence
tgttggatgtgaaagattgttgatg

SEQ ID NO: 72194 - DNA, 25 bp, Probe sequence
ggatgtgaaagattgttgatgagaa

SEQ ID NO: 72195 - DNA, 25 bp, Probe sequence
tggatgtgaaagattgttgatgaga

SEQ ID NO: 72196 - DNA, 25 bp, Probe sequence
aatgttggatgtgaaagattgttga

SEQ ID NO: 72197 - DNA, 25 bp, Probe sequence
atgttggatgtgaaagattgttgat

SEQ ID NO: 72198 - DNA, 25 bp, Probe sequence
ctaaccctttcttacaaaccaccta

SEQ ID NO: 72199 - DNA, 25 bp, Probe sequence
aactaaccctttcttacaaaccacc

SEQ ID NO: 72200 - DNA, 25 bp, Probe sequence
taactaaccctttcttacaaaccac

SEQ ID NO: 72201 - DNA, 25 bp, Probe sequence
cttacaaaccacctagcccataata

SEQ ID NO: 72202 - DNA, 25 bp, Probe sequence
taaccctttcttacaaaccacctag

SEQ ID NO: 72203 - DNA, 25 bp, Probe sequence
ttacaaaccacctagcccataatat

SEQ ID NO: 72204 - DNA, 25 bp, Probe sequence
actaaccctttcttacaaaccacct

SEQ ID NO: 72205 - DNA, 25 bp, Probe sequence
acaaaccacctagcccataatatat

SEQ ID NO: 72206 - DNA, 25 bp, Probe sequence
tacaaaccacctagcccataatata

SEQ ID NO: 72207 - DNA, 25 bp, Probe sequence
taggtggtttgtaagaaagggttag

SEQ ID NO: 72208 - DNA, 25 bp, Probe sequence
gtggtttgtaagaaagggttagtta

SEQ ID NO: 72209 - DNA, 25 bp, Probe sequence
ggtggtttgtaagaaagggttagtt

SEQ ID NO: 72210 - DNA, 25 bp, Probe sequence
ctaggtggtttgtaagaaagggtta

SEQ ID NO: 72211 - DNA, 25 bp, Probe sequence
tattatgggctaggtggtttgtaag

SEQ ID NO: 72212 - DNA, 25 bp, Probe sequence
atattatgggctaggtggtttgtaa

SEQ ID NO: 72213 - DNA, 25 bp, Probe sequence
aggtggtttgtaagaaagggttagt

SEQ ID NO: 72214 - DNA, 25 bp, Probe sequence
tatattatgggctaggtggtttgta

SEQ ID NO: 72215 - DNA, 25 bp, Probe sequence
atatattatgggctaggtggtttgt

SEQ ID NO: 72216 - DNA, 25 bp, Probe sequence
taattaaccagacattgtcaatcgc

SEQ ID NO: 72217 - DNA, 25 bp, Probe sequence
tttatctgttctctttcctcccttt

SEQ ID NO: 72218 - DNA, 25 bp, Probe sequence
atttatctgttctctttcctccctt

SEQ ID NO: 72219 - DNA, 25 bp, Probe sequence
tatttatctgttctctttcctccct

SEQ ID NO: 72220 - DNA, 25 bp, Probe sequence
atatttatctgttctctttcctccc

SEQ ID NO: 72221 - DNA, 25 bp, Probe sequence
ctttgcacctaatattcatcgctta

SEQ ID NO: 72222 - DNA, 25 bp, Probe sequence
aaactttgcacctaatattcatcgc

SEQ ID NO: 72223 - DNA, 25 bp, Probe sequence
ttgcacctaatattcatcgcttaaa

SEQ ID NO: 72224 - DNA, 25 bp, Probe sequence
tttgcacctaatattcatcgcttaa

SEQ ID NO: 72225 - DNA, 25 bp, Probe sequence
gcgattgacaatgtctggttaatta

SEQ ID NO: 72226 - DNA, 25 bp, Probe sequence
aaagggaggaaagagaacagataaa

SEQ ID NO: 72227 - DNA, 25 bp, Probe sequence
aagggaggaaagagaacagataaat

SEQ ID NO: 72228 - DNA, 25 bp, Probe sequence
agggaggaaagagaacagataaata

SEQ ID NO: 72229 - DNA, 25 bp, Probe sequence
gggaggaaagagaacagataaatat

SEQ ID NO: 72230 - DNA, 25 bp, Probe sequence
gcgatgaatattaggtgcaaagttt

SEQ ID NO: 72231 - DNA, 25 bp, Probe sequence
taagcgatgaatattaggtgcaaag

SEQ ID NO: 72232 - DNA, 25 bp, Probe sequence
ttaagcgatgaatattaggtgcaaa

SEQ ID NO: 72233 - DNA, 25 bp, Probe sequence
tttaagcgatgaatattaggtgcaa

SEQ ID NO: 72234 - DNA, 25 bp, Probe sequence
atgtattgctaaacgattatgacgc

SEQ ID NO: 72235 - DNA, 25 bp, Probe sequence
attgctaaacgattatgacgctaaa

SEQ ID NO: 72236 - DNA, 25 bp, Probe sequence
gtattgctaaacgattatgacgcta

SEQ ID NO: 72237 - DNA, 25 bp, Probe sequence
tgtattgctaaacgattatgacgct

SEQ ID NO: 72238 - DNA, 25 bp, Probe sequence
tattgctaaacgattatgacgctaa

SEQ ID NO: 72239 - DNA, 25 bp, Probe sequence
ccattgtcatgtattgctaaacgat

SEQ ID NO: 72240 - DNA, 25 bp, Probe sequence
ttccattgtcatgtattgctaaacg

SEQ ID NO: 72241 - DNA, 25 bp, Probe sequence
tccattgtcatgtattgctaaacga

SEQ ID NO: 72242 - DNA, 25 bp, Probe sequence
catgtattgctaaacgattatgacg

SEQ ID NO: 72243 - DNA, 25 bp, Probe sequence
gcgtcataatcgtttagcaatacat

SEQ ID NO: 72244 - DNA, 25 bp, Probe sequence
tttagcgtcataatcgtttagcaat

SEQ ID NO: 72245 - DNA, 25 bp, Probe sequence
tagcgtcataatcgtttagcaatac

SEQ ID NO: 72246 - DNA, 25 bp, Probe sequence
agcgtcataatcgtttagcaataca

SEQ ID NO: 72247 - DNA, 25 bp, Probe sequence
ttagcgtcataatcgtttagcaata

SEQ ID NO: 72248 - DNA, 25 bp, Probe sequence
atcgtttagcaatacatgacaatgg

SEQ ID NO: 72249 - DNA, 25 bp, Probe sequence
cgtttagcaatacatgacaatggaa

SEQ ID NO: 72250 - DNA, 25 bp, Probe sequence
tcgtttagcaatacatgacaatgga

SEQ ID NO: 72251 - DNA, 25 bp, Probe sequence
cgtcataatcgtttagcaatacatg

SEQ ID NO: 72252 - DNA, 25 bp, Probe sequence
gcaaagtaatctacatttccctaac

SEQ ID NO: 72253 - DNA, 25 bp, Probe sequence
agcaaagtaatctacatttccctaa

SEQ ID NO: 72254 - DNA, 25 bp, Probe sequence
ttagcaaagtaatctacatttccct

SEQ ID NO: 72255 - DNA, 25 bp, Probe sequence
tttagcaaagtaatctacatttccc

SEQ ID NO: 72256 - DNA, 25 bp, Probe sequence
tagcaaagtaatctacatttcccta

SEQ ID NO: 72257 - DNA, 25 bp, Probe sequence
tgttagttctttaattccgtttgat

SEQ ID NO: 72258 - DNA, 25 bp, Probe sequence
atgttagttctttaattccgtttga

SEQ ID NO: 72259 - DNA, 25 bp, Probe sequence
tccgtttgataattgaaataattgc

SEQ ID NO: 72260 - DNA, 25 bp, Probe sequence
caaagtaatctacatttccctaact

SEQ ID NO: 72261 - DNA, 25 bp, Probe sequence
gttagggaaatgtagattactttgc

SEQ ID NO: 72262 - DNA, 25 bp, Probe sequence
agggaaatgtagattactttgctaa

SEQ ID NO: 72263 - DNA, 25 bp, Probe sequence
ttagggaaatgtagattactttgct

SEQ ID NO: 72264 - DNA, 25 bp, Probe sequence
gggaaatgtagattactttgctaaa

SEQ ID NO: 72265 - DNA, 25 bp, Probe sequence
tagggaaatgtagattactttgcta

SEQ ID NO: 72266 - DNA, 25 bp, Probe sequence
tcaaacggaattaaagaactaacat

SEQ ID NO: 72267 - DNA, 25 bp, Probe sequence
atcaaacggaattaaagaactaaca

SEQ ID NO: 72268 - DNA, 25 bp, Probe sequence
gcaattatttcaattatcaaacgga

SEQ ID NO: 72269 - DNA, 25 bp, Probe sequence
agttagggaaatgtagattactttg

SEQ ID NO: 72270 - DNA, 25 bp, Probe sequence
acaatttattcatttatgatgctga

SEQ ID NO: 72271 - DNA, 25 bp, Probe sequence
tattcatttatgatgctgaaaaccg

SEQ ID NO: 72272 - DNA, 25 bp, Probe sequence
attcatttatgatgctgaaaaccgg

SEQ ID NO: 72273 - DNA, 25 bp, Probe sequence
ttattcatttatgatgctgaaaacc

SEQ ID NO: 72274 - DNA, 25 bp, Probe sequence
tttattcatttatgatgctgaaaac

SEQ ID NO: 72275 - DNA, 25 bp, Probe sequence
tcagcatcataaatgaataaattgt

SEQ ID NO: 72276 - DNA, 25 bp, Probe sequence
cggttttcagcatcataaatgaata

SEQ ID NO: 72277 - DNA, 25 bp, Probe sequence
ccggttttcagcatcataaatgaat

SEQ ID NO: 72278 - DNA, 25 bp, Probe sequence
ggttttcagcatcataaatgaataa

SEQ ID NO: 72279 - DNA, 25 bp, Probe sequence
gttttcagcatcataaatgaataaa

SEQ ID NO: 72280 - DNA, 25 bp, Probe sequence
ggagaggattacttcgtatactgtt

SEQ ID NO: 72281 - DNA, 25 bp, Probe sequence
cggagaggattacttcgtatactgt

SEQ ID NO: 72282 - DNA, 25 bp, Probe sequence
taatgcctagtctcatagtaaacgg

SEQ ID NO: 72283 - DNA, 25 bp, Probe sequence
gcttctactctcatggcaatttata

SEQ ID NO: 72284 - DNA, 25 bp, Probe sequence
aactgattattaactattgtccgtt

SEQ ID NO: 72285 - DNA, 25 bp, Probe sequence
ataatgcctagtctcatagtaaacg

SEQ ID NO: 72286 - DNA, 25 bp, Probe sequence
agcttctactctcatggcaatttat

SEQ ID NO: 72287 - DNA, 25 bp, Probe sequence
cgcatggtcgttgacttatttatat

SEQ ID NO: 72288 - DNA, 25 bp, Probe sequence
cctagtctcatagtaaacggctact

SEQ ID NO: 72289 - DNA, 25 bp, Probe sequence
aacagtatacgaagtaatcctctcc

SEQ ID NO: 72290 - DNA, 25 bp, Probe sequence
acagtatacgaagtaatcctctccg

SEQ ID NO: 72291 - DNA, 25 bp, Probe sequence
ccgtttactatgagactaggcatta

SEQ ID NO: 72292 - DNA, 25 bp, Probe sequence
aacggacaatagttaataatcagtt

SEQ ID NO: 72293 - DNA, 25 bp, Probe sequence
tataaattgccatgagagtagaagc

SEQ ID NO: 72294 - DNA, 25 bp, Probe sequence
ataaattgccatgagagtagaagct

SEQ ID NO: 72295 - DNA, 25 bp, Probe sequence
cgtttactatgagactaggcattat

SEQ ID NO: 72296 - DNA, 25 bp, Probe sequence
atataaataagtcaacgaccatgcg

SEQ ID NO: 72297 - DNA, 25 bp, Probe sequence
agtagccgtttactatgagactagg

SEQ ID NO: 72298 - DNA, 25 bp, Probe sequence
taacactctcaatcttctcgaactg

SEQ ID NO: 72299 - DNA, 25 bp, Probe sequence
ttaacactctcaatcttctcgaact

SEQ ID NO: 72300 - DNA, 25 bp, Probe sequence
gcgaatacgatttaacactctcaat

SEQ ID NO: 72301 - DNA, 25 bp, Probe sequence
cactctcaatcttctcgaactgaat

SEQ ID NO: 72302 - DNA, 25 bp, Probe sequence
actctcaatcttctcgaactgaata

SEQ ID NO: 72303 - DNA, 25 bp, Probe sequence
tgcagaatcgtctacacatagttaa

SEQ ID NO: 72304 - DNA, 25 bp, Probe sequence
agataatgcagaatcgtctacacat

SEQ ID NO: 72305 - DNA, 25 bp, Probe sequence
atgcagaatcgtctacacatagtta

SEQ ID NO: 72306 - DNA, 25 bp, Probe sequence
taatgcagaatcgtctacacatagt

SEQ ID NO: 72307 - DNA, 25 bp, Probe sequence
agttcgagaagattgagagtgttaa

SEQ ID NO: 72308 - DNA, 25 bp, Probe sequence
cagttcgagaagattgagagtgtta

SEQ ID NO: 72309 - DNA, 25 bp, Probe sequence
attgagagtgttaaatcgtattcgc

SEQ ID NO: 72310 - DNA, 25 bp, Probe sequence
attcagttcgagaagattgagagtg

SEQ ID NO: 72311 - DNA, 25 bp, Probe sequence
tattcagttcgagaagattgagagt

SEQ ID NO: 72312 - DNA, 25 bp, Probe sequence
atgtgtagacgattctgcattatct

SEQ ID NO: 72313 - DNA, 25 bp, Probe sequence
ttaactatgtgtagacgattctgca

SEQ ID NO: 72314 - DNA, 25 bp, Probe sequence
actatgtgtagacgattctgcatta

SEQ ID NO: 72315 - DNA, 25 bp, Probe sequence
taactatgtgtagacgattctgcat

SEQ ID NO: 72316 - DNA, 25 bp, Probe sequence
tgaatcgtatacacttaggtagtca

SEQ ID NO: 72317 - DNA, 25 bp, Probe sequence
attagcggagaatgaatgatatctt

SEQ ID NO: 72318 - DNA, 25 bp, Probe sequence
aattagcggagaatgaatgatatct

SEQ ID NO: 72319 - DNA, 25 bp, Probe sequence
atgaatgaatcgtatacacttaggt

SEQ ID NO: 72320 - DNA, 25 bp, Probe sequence
gaatcgtatacacttaggtagtcaa

SEQ ID NO: 72321 - DNA, 25 bp, Probe sequence
atgaatcgtatacacttaggtagtc

SEQ ID NO: 72322 - DNA, 25 bp, Probe sequence
tgaatgaatcgtatacacttaggta

SEQ ID NO: 72323 - DNA, 25 bp, Probe sequence
attaaattagcggagaatgaatgat

SEQ ID NO: 72324 - DNA, 25 bp, Probe sequence
ttccattaaattagcggagaatgaa

SEQ ID NO: 72325 - DNA, 25 bp, Probe sequence
tgactacctaagtgtatacgattca

SEQ ID NO: 72326 - DNA, 25 bp, Probe sequence
agatatcattcattctccgctaatt

SEQ ID NO: 72327 - DNA, 25 bp, Probe sequence
aagatatcattcattctccgctaat

SEQ ID NO: 72328 - DNA, 25 bp, Probe sequence
acctaagtgtatacgattcattcat

SEQ ID NO: 72329 - DNA, 25 bp, Probe sequence
ttgactacctaagtgtatacgattc

SEQ ID NO: 72330 - DNA, 25 bp, Probe sequence
gactacctaagtgtatacgattcat

SEQ ID NO: 72331 - DNA, 25 bp, Probe sequence
tacctaagtgtatacgattcattca

SEQ ID NO: 72332 - DNA, 25 bp, Probe sequence
tcattctccgctaatttaatggaaa

SEQ ID NO: 72333 - DNA, 25 bp, Probe sequence
ttcattctccgctaatttaatggaa

SEQ ID NO: 72334 - DNA, 25 bp, Probe sequence
tcaaactaaataatttcgggtagcc

SEQ ID NO: 72335 - DNA, 25 bp, Probe sequence
atcaaactaaataatttcgggtagc

SEQ ID NO: 72336 - DNA, 25 bp, Probe sequence
caaactaaataatttcgggtagccc

SEQ ID NO: 72337 - DNA, 25 bp, Probe sequence
aatcaaactaaataatttcgggtag

SEQ ID NO: 72338 - DNA, 25 bp, Probe sequence
aaactaaataatttcgggtagcccc

SEQ ID NO: 72339 - DNA, 25 bp, Probe sequence
ggctacccgaaattatttagtttga

SEQ ID NO: 72340 - DNA, 25 bp, Probe sequence
gctacccgaaattatttagtttgat

SEQ ID NO: 72341 - DNA, 25 bp, Probe sequence
gggctacccgaaattatttagtttg

SEQ ID NO: 72342 - DNA, 25 bp, Probe sequence
ctacccgaaattatttagtttgatt

SEQ ID NO: 72343 - DNA, 25 bp, Probe sequence
ggggctacccgaaattatttagttt

SEQ ID NO: 72344 - DNA, 25 bp, Probe sequence
cggagaattcggattacctagatag

SEQ ID NO: 72345 - DNA, 25 bp, Probe sequence
ttaacggagaattcggattacctag

SEQ ID NO: 72346 - DNA, 25 bp, Probe sequence
acggagaattcggattacctagata

SEQ ID NO: 72347 - DNA, 25 bp, Probe sequence
taacggagaattcggattacctaga

SEQ ID NO: 72348 - DNA, 25 bp, Probe sequence
attaacggagaattcggattaccta

SEQ ID NO: 72349 - DNA, 25 bp, Probe sequence
aacggagaattcggattacctagat

SEQ ID NO: 72350 - DNA, 25 bp, Probe sequence
ggagaattcggattacctagataga

SEQ ID NO: 72351 - DNA, 25 bp, Probe sequence
tcggattacctagatagatttacct

SEQ ID NO: 72352 - DNA, 25 bp, Probe sequence
aattaacggagaattcggattacct

SEQ ID NO: 72353 - DNA, 25 bp, Probe sequence
ctaggtaatccgaattctccgttaa

SEQ ID NO: 72354 - DNA, 25 bp, Probe sequence
ctatctaggtaatccgaattctccg

SEQ ID NO: 72355 - DNA, 25 bp, Probe sequence
tatctaggtaatccgaattctccgt

SEQ ID NO: 72356 - DNA, 25 bp, Probe sequence
taggtaatccgaattctccgttaat

SEQ ID NO: 72357 - DNA, 25 bp, Probe sequence
tctaggtaatccgaattctccgtta

SEQ ID NO: 72358 - DNA, 25 bp, Probe sequence
atctaggtaatccgaattctccgtt

SEQ ID NO: 72359 - DNA, 25 bp, Probe sequence
tctatctaggtaatccgaattctcc

SEQ ID NO: 72360 - DNA, 25 bp, Probe sequence
aggtaaatctatctaggtaatccga

SEQ ID NO: 72361 - DNA, 25 bp, Probe sequence
aggtaatccgaattctccgttaatt

SEQ ID NO: 72362 - DNA, 25 bp, Probe sequence
tcacgcttatagatagttcaggttg

SEQ ID NO: 72363 - DNA, 25 bp, Probe sequence
cacgcttatagatagttcaggttgt

SEQ ID NO: 72364 - DNA, 25 bp, Probe sequence
ttcacgcttatagatagttcaggtt

SEQ ID NO: 72365 - DNA, 25 bp, Probe sequence
tagatagttcaggttgtagtgtgtc

SEQ ID NO: 72366 - DNA, 25 bp, Probe sequence
attcacgcttatagatagttcaggt

SEQ ID NO: 72367 - DNA, 25 bp, Probe sequence
acgcttatagatagttcaggttgta

SEQ ID NO: 72368 - DNA, 25 bp, Probe sequence
atagatagttcaggttgtagtgtgt

SEQ ID NO: 72369 - DNA, 25 bp, Probe sequence
cgcttatagatagttcaggttgtag

SEQ ID NO: 72370 - DNA, 25 bp, Probe sequence
aattcacgcttatagatagttcagg

SEQ ID NO: 72371 - DNA, 25 bp, Probe sequence
caacctgaactatctataagcgtga

SEQ ID NO: 72372 - DNA, 25 bp, Probe sequence
aacctgaactatctataagcgtgaa

SEQ ID NO: 72373 - DNA, 25 bp, Probe sequence
acaacctgaactatctataagcgtg

SEQ ID NO: 72374 - DNA, 25 bp, Probe sequence
gacacactacaacctgaactatcta

SEQ ID NO: 72375 - DNA, 25 bp, Probe sequence
acctgaactatctataagcgtgaat

SEQ ID NO: 72376 - DNA, 25 bp, Probe sequence
tacaacctgaactatctataagcgt

SEQ ID NO: 72377 - DNA, 25 bp, Probe sequence
acacactacaacctgaactatctat

SEQ ID NO: 72378 - DNA, 25 bp, Probe sequence
ctacaacctgaactatctataagcg

SEQ ID NO: 72379 - DNA, 25 bp, Probe sequence
cctgaactatctataagcgtgaatt

SEQ ID NO: 72380 - DNA, 25 bp, Probe sequence
gtacacattagccctagagacttta

SEQ ID NO: 72381 - DNA, 25 bp, Probe sequence
tacacattagccctagagactttaa

SEQ ID NO: 72382 - DNA, 25 bp, Probe sequence
cgtacacattagccctagagacttt

SEQ ID NO: 72383 - DNA, 25 bp, Probe sequence
acacattagccctagagactttaaa

SEQ ID NO: 72384 - DNA, 25 bp, Probe sequence
tttaacgtacacattagccctagag

SEQ ID NO: 72385 - DNA, 25 bp, Probe sequence
atttaacgtacacattagccctaga

SEQ ID NO: 72386 - DNA, 25 bp, Probe sequence
ttaacgtacacattagccctagaga

SEQ ID NO: 72387 - DNA, 25 bp, Probe sequence
taacgtacacattagccctagagac

SEQ ID NO: 72388 - DNA, 25 bp, Probe sequence
acagggaatatttaacgtacacatt

SEQ ID NO: 72389 - DNA, 25 bp, Probe sequence
taaagtctctagggctaatgtgtac

SEQ ID NO: 72390 - DNA, 25 bp, Probe sequence
ttaaagtctctagggctaatgtgta

SEQ ID NO: 72391 - DNA, 25 bp, Probe sequence
aaagtctctagggctaatgtgtacg

SEQ ID NO: 72392 - DNA, 25 bp, Probe sequence
tttaaagtctctagggctaatgtgt

SEQ ID NO: 72393 - DNA, 25 bp, Probe sequence
ctctagggctaatgtgtacgttaaa

SEQ ID NO: 72394 - DNA, 25 bp, Probe sequence
tctagggctaatgtgtacgttaaat

SEQ ID NO: 72395 - DNA, 25 bp, Probe sequence
tctctagggctaatgtgtacgttaa

SEQ ID NO: 72396 - DNA, 25 bp, Probe sequence
gtctctagggctaatgtgtacgtta

SEQ ID NO: 72397 - DNA, 25 bp, Probe sequence
aatgtgtacgttaaatattccctgt

SEQ ID NO: 72398 - DNA, 25 bp, Probe sequence
gaatcactattcgttcttcatcatt

SEQ ID NO: 72399 - DNA, 25 bp, Probe sequence
attcgttcttcatcatttactaagc

SEQ ID NO: 72400 - DNA, 25 bp, Probe sequence
ttgaatcactattcgttcttcatca

SEQ ID NO: 72401 - DNA, 25 bp, Probe sequence
cactattcgttcttcatcatttact

SEQ ID NO: 72402 - DNA, 25 bp, Probe sequence
tcactattcgttcttcatcatttac

SEQ ID NO: 72403 - DNA, 25 bp, Probe sequence
tgaatcactattcgttcttcatcat

SEQ ID NO: 72404 - DNA, 25 bp, Probe sequence
ttcgttcttcatcatttactaagct

SEQ ID NO: 72405 - DNA, 25 bp, Probe sequence
aatcactattcgttcttcatcattt

SEQ ID NO: 72406 - DNA, 25 bp, Probe sequence
cgttcttcatcatttactaagctac

SEQ ID NO: 72407 - DNA, 25 bp, Probe sequence
aatgatgaagaacgaatagtgattc

SEQ ID NO: 72408 - DNA, 25 bp, Probe sequence
gcttagtaaatgatgaagaacgaat

SEQ ID NO: 72409 - DNA, 25 bp, Probe sequence
tgatgaagaacgaatagtgattcaa

SEQ ID NO: 72410 - DNA, 25 bp, Probe sequence
atgatgaagaacgaatagtgattca

SEQ ID NO: 72411 - DNA, 25 bp, Probe sequence
gtaaatgatgaagaacgaatagtga

SEQ ID NO: 72412 - DNA, 25 bp, Probe sequence
agtaaatgatgaagaacgaatagtg

SEQ ID NO: 72413 - DNA, 25 bp, Probe sequence
aaatgatgaagaacgaatagtgatt

SEQ ID NO: 72414 - DNA, 25 bp, Probe sequence
agcttagtaaatgatgaagaacgaa

SEQ ID NO: 72415 - DNA, 25 bp, Probe sequence
tagcttagtaaatgatgaagaacga

SEQ ID NO: 72416 - DNA, 25 bp, Probe sequence
tcctacttactattgaacaaacaaa

SEQ ID NO: 72417 - DNA, 25 bp, Probe sequence
aatcctacttactattgaacaaaca

SEQ ID NO: 72418 - DNA, 25 bp, Probe sequence
attaagtgactcagataatagacaa

SEQ ID NO: 72419 - DNA, 25 bp, Probe sequence
aattaagtgactcagataatagaca

SEQ ID NO: 72420 - DNA, 25 bp, Probe sequence
aacaatcctacttactattgaacaa

SEQ ID NO: 72421 - DNA, 25 bp, Probe sequence
atcctacttactattgaacaaacaa

SEQ ID NO: 72422 - DNA, 25 bp, Probe sequence
ttaagtgactcagataatagacaaa

SEQ ID NO: 72423 - DNA, 25 bp, Probe sequence
cctacttactattgaacaaacaaat

SEQ ID NO: 72424 - DNA, 25 bp, Probe sequence
taacaatcctacttactattgaaca

SEQ ID NO: 72425 - DNA, 25 bp, Probe sequence
tttgtttgttcaatagtaagtagga

SEQ ID NO: 72426 - DNA, 25 bp, Probe sequence
tgtttgttcaatagtaagtaggatt

SEQ ID NO: 72427 - DNA, 25 bp, Probe sequence
ttgtctattatctgagtcacttaat

SEQ ID NO: 72428 - DNA, 25 bp, Probe sequence
tgtctattatctgagtcacttaatt

SEQ ID NO: 72429 - DNA, 25 bp, Probe sequence
ttgttcaatagtaagtaggattgtt

SEQ ID NO: 72430 - DNA, 25 bp, Probe sequence
ttgtttgttcaatagtaagtaggat

SEQ ID NO: 72431 - DNA, 25 bp, Probe sequence
tttgtctattatctgagtcacttaa

SEQ ID NO: 72432 - DNA, 25 bp, Probe sequence
atttgtttgttcaatagtaagtagg

SEQ ID NO: 72433 - DNA, 25 bp, Probe sequence
tgttcaatagtaagtaggattgtta

SEQ ID NO: 72434 - DNA, 25 bp, Probe sequence
agcgatatttcacttctgtttgtat

SEQ ID NO: 72435 - DNA, 25 bp, Probe sequence
aagcgatatttcacttctgtttgta

SEQ ID NO: 72436 - DNA, 25 bp, Probe sequence
gaagcgatatttcacttctgtttgt

SEQ ID NO: 72437 - DNA, 25 bp, Probe sequence
atacaaacagaagtgaaatatcgct

SEQ ID NO: 72438 - DNA, 25 bp, Probe sequence
tacaaacagaagtgaaatatcgctt

SEQ ID NO: 72439 - DNA, 25 bp, Probe sequence
acaaacagaagtgaaatatcgcttc

SEQ ID NO: 72440 - DNA, 25 bp, Probe sequence
cacataacacaatacatagcaacca

SEQ ID NO: 72441 - DNA, 25 bp, Probe sequence
acacataacacaatacatagcaacc

SEQ ID NO: 72442 - DNA, 25 bp, Probe sequence
gacacacataacacaatacatagca

SEQ ID NO: 72443 - DNA, 25 bp, Probe sequence
tgacacacataacacaatacatagc

SEQ ID NO: 72444 - DNA, 25 bp, Probe sequence
acataacacaatacatagcaaccaa

SEQ ID NO: 72445 - DNA, 25 bp, Probe sequence
acacacataacacaatacatagcaa

SEQ ID NO: 72446 - DNA, 25 bp, Probe sequence
cacacataacacaatacatagcaac

SEQ ID NO: 72447 - DNA, 25 bp, Probe sequence
tcgtactgacacacataacacaata

SEQ ID NO: 72448 - DNA, 25 bp, Probe sequence
cgtactgacacacataacacaatac

SEQ ID NO: 72449 - DNA, 25 bp, Probe sequence
ggttgctatgtattgtgttatgtgt

SEQ ID NO: 72450 - DNA, 25 bp, Probe sequence
tggttgctatgtattgtgttatgtg

SEQ ID NO: 72451 - DNA, 25 bp, Probe sequence
gctatgtattgtgttatgtgtgtca

SEQ ID NO: 72452 - DNA, 25 bp, Probe sequence
tgctatgtattgtgttatgtgtgtc

SEQ ID NO: 72453 - DNA, 25 bp, Probe sequence
ttgctatgtattgtgttatgtgtgt

SEQ ID NO: 72454 - DNA, 25 bp, Probe sequence
ttggttgctatgtattgtgttatgt

SEQ ID NO: 72455 - DNA, 25 bp, Probe sequence
gttgctatgtattgtgttatgtgtg

SEQ ID NO: 72456 - DNA, 25 bp, Probe sequence
tattgtgttatgtgtgtcagtacga

SEQ ID NO: 72457 - DNA, 25 bp, Probe sequence
gtattgtgttatgtgtgtcagtacg

SEQ ID NO: 72458 - DNA, 25 bp, Probe sequence
tctctcctttcaacttactacttct

SEQ ID NO: 72459 - DNA, 25 bp, Probe sequence
ctctcctttcaacttactacttctt

SEQ ID NO: 72460 - DNA, 25 bp, Probe sequence
ttctctcctttcaacttactacttc

SEQ ID NO: 72461 - DNA, 25 bp, Probe sequence
cattctctcctttcaacttactact

SEQ ID NO: 72462 - DNA, 25 bp, Probe sequence
tcattctctcctttcaacttactac

SEQ ID NO: 72463 - DNA, 25 bp, Probe sequence
ctcattctctcctttcaacttacta

SEQ ID NO: 72464 - DNA, 25 bp, Probe sequence
tctcctttcaacttactacttcttt

SEQ ID NO: 72465 - DNA, 25 bp, Probe sequence
attctctcctttcaacttactactt

SEQ ID NO: 72466 - DNA, 25 bp, Probe sequence
tcctttcaacttactacttcttttc

SEQ ID NO: 72467 - DNA, 25 bp, Probe sequence
agaagtagtaagttgaaaggagaga

SEQ ID NO: 72468 - DNA, 25 bp, Probe sequence
gtagtaagttgaaaggagagaatga

SEQ ID NO: 72469 - DNA, 25 bp, Probe sequence
agtagtaagttgaaaggagagaatg

SEQ ID NO: 72470 - DNA, 25 bp, Probe sequence
gaagtagtaagttgaaaggagagaa

SEQ ID NO: 72471 - DNA, 25 bp, Probe sequence
aagaagtagtaagttgaaaggagag

SEQ ID NO: 72472 - DNA, 25 bp, Probe sequence
tagtaagttgaaaggagagaatgag

SEQ ID NO: 72473 - DNA, 25 bp, Probe sequence
aaagaagtagtaagttgaaaggaga

SEQ ID NO: 72474 - DNA, 25 bp, Probe sequence
aagtagtaagttgaaaggagagaat

SEQ ID NO: 72475 - DNA, 25 bp, Probe sequence
gaaaagaagtagtaagttgaaagga

SEQ ID NO: 72476 - DNA, 25 bp, Probe sequence
tcatgtgcttcaatgtaatactatg

SEQ ID NO: 72477 - DNA, 25 bp, Probe sequence
catgtgcttcaatgtaatactatga

SEQ ID NO: 72478 - DNA, 25 bp, Probe sequence
ttcatgtgcttcaatgtaatactat

SEQ ID NO: 72479 - DNA, 25 bp, Probe sequence
ctttcatgtgcttcaatgtaatact

SEQ ID NO: 72480 - DNA, 25 bp, Probe sequence
tctttcatgtgcttcaatgtaatac

SEQ ID NO: 72481 - DNA, 25 bp, Probe sequence
aattatctttcatgtgcttcaatgt

SEQ ID NO: 72482 - DNA, 25 bp, Probe sequence
gaattatctttcatgtgcttcaatg

SEQ ID NO: 72483 - DNA, 25 bp, Probe sequence
ttatctttcatgtgcttcaatgtaa

SEQ ID NO: 72484 - DNA, 25 bp, Probe sequence
atctttcatgtgcttcaatgtaata

SEQ ID NO: 72485 - DNA, 25 bp, Probe sequence
catagtattacattgaagcacatga

SEQ ID NO: 72486 - DNA, 25 bp, Probe sequence
tcatagtattacattgaagcacatg

SEQ ID NO: 72487 - DNA, 25 bp, Probe sequence
atagtattacattgaagcacatgaa

SEQ ID NO: 72488 - DNA, 25 bp, Probe sequence
gtattacattgaagcacatgaaaga

SEQ ID NO: 72489 - DNA, 25 bp, Probe sequence
agtattacattgaagcacatgaaag

SEQ ID NO: 72490 - DNA, 25 bp, Probe sequence
acattgaagcacatgaaagataatt

SEQ ID NO: 72491 - DNA, 25 bp, Probe sequence
cattgaagcacatgaaagataattc

SEQ ID NO: 72492 - DNA, 25 bp, Probe sequence
ttacattgaagcacatgaaagataa

SEQ ID NO: 72493 - DNA, 25 bp, Probe sequence
tacattgaagcacatgaaagataat

SEQ ID NO: 72494 - DNA, 25 bp, Probe sequence
tctcgcaagattcattatagtaatt

SEQ ID NO: 72495 - DNA, 25 bp, Probe sequence
tcattacttctaaatatctcgcaag

SEQ ID NO: 72496 - DNA, 25 bp, Probe sequence
cattacttctaaatatctcgcaaga

SEQ ID NO: 72497 - DNA, 25 bp, Probe sequence
acttctaaatatctcgcaagattca

SEQ ID NO: 72498 - DNA, 25 bp, Probe sequence
atcattacttctaaatatctcgcaa

SEQ ID NO: 72499 - DNA, 25 bp, Probe sequence
atctcgcaagattcattatagtaat

SEQ ID NO: 72500 - DNA, 25 bp, Probe sequence
aatatctcgcaagattcattatagt

SEQ ID NO: 72501 - DNA, 25 bp, Probe sequence
cttctaaatatctcgcaagattcat

SEQ ID NO: 72502 - DNA, 25 bp, Probe sequence
ttctaaatatctcgcaagattcatt

SEQ ID NO: 72503 - DNA, 25 bp, Probe sequence
aattactataatgaatcttgcgaga

SEQ ID NO: 72504 - DNA, 25 bp, Probe sequence
cttgcgagatatttagaagtaatga

SEQ ID NO: 72505 - DNA, 25 bp, Probe sequence
tcttgcgagatatttagaagtaatg

SEQ ID NO: 72506 - DNA, 25 bp, Probe sequence
tgaatcttgcgagatatttagaagt

SEQ ID NO: 72507 - DNA, 25 bp, Probe sequence
ttgcgagatatttagaagtaatgat

SEQ ID NO: 72508 - DNA, 25 bp, Probe sequence
actataatgaatcttgcgagatatt

SEQ ID NO: 72509 - DNA, 25 bp, Probe sequence
attactataatgaatcttgcgagat

SEQ ID NO: 72510 - DNA, 25 bp, Probe sequence
atgaatcttgcgagatatttagaag

SEQ ID NO: 72511 - DNA, 25 bp, Probe sequence
aatgaatcttgcgagatatttagaa

SEQ ID NO: 72512 - DNA, 25 bp, Probe sequence
taatgtaatctgaacgccgtatcat

SEQ ID NO: 72513 - DNA, 25 bp, Probe sequence
ttacaacatacatgccaatggaagt

SEQ ID NO: 72514 - DNA, 25 bp, Probe sequence
ctaatgtaatctgaacgccgtatca

SEQ ID NO: 72515 - DNA, 25 bp, Probe sequence
tacaacatacatgccaatggaagtt

SEQ ID NO: 72516 - DNA, 25 bp, Probe sequence
gctaatgtaatctgaacgccgtatc

SEQ ID NO: 72517 - DNA, 25 bp, Probe sequence
tgctaatgtaatctgaacgccgtat

SEQ ID NO: 72518 - DNA, 25 bp, Probe sequence
atgctaatgtaatctgaacgccgta

SEQ ID NO: 72519 - DNA, 25 bp, Probe sequence
tagatgctaatgtaatctgaacgcc

SEQ ID NO: 72520 - DNA, 25 bp, Probe sequence
tatcatttggcgttcaacattacat

SEQ ID NO: 72521 - DNA, 25 bp, Probe sequence
atgatacggcgttcagattacatta

SEQ ID NO: 72522 - DNA, 25 bp, Probe sequence
acttccattggcatgtatgttgtaa

SEQ ID NO: 72523 - DNA, 25 bp, Probe sequence
tgatacggcgttcagattacattag

SEQ ID NO: 72524 - DNA, 25 bp, Probe sequence
aacttccattggcatgtatgttgta

SEQ ID NO: 72525 - DNA, 25 bp, Probe sequence
gatacggcgttcagattacattagc

SEQ ID NO: 72526 - DNA, 25 bp, Probe sequence
tacggcgttcagattacattagcat

SEQ ID NO: 72527 - DNA, 25 bp, Probe sequence
atacggcgttcagattacattagca

SEQ ID NO: 72528 - DNA, 25 bp, Probe sequence
ggcgttcagattacattagcatcta

SEQ ID NO: 72529 - DNA, 25 bp, Probe sequence
gcgttcagattacattagcatctat

SEQ ID NO: 72530 - DNA, 25 bp, Probe sequence
cacctccatgacttatattgtacca

SEQ ID NO: 72531 - DNA, 25 bp, Probe sequence
gcacctccatgacttatattgtacc

SEQ ID NO: 72532 - DNA, 25 bp, Probe sequence
ggcacctccatgacttatattgtac

SEQ ID NO: 72533 - DNA, 25 bp, Probe sequence
aggcacctccatgacttatattgta

SEQ ID NO: 72534 - DNA, 25 bp, Probe sequence
acctccatgacttatattgtaccaa

SEQ ID NO: 72535 - DNA, 25 bp, Probe sequence
agcgacaatgttataatgaatggta

SEQ ID NO: 72536 - DNA, 25 bp, Probe sequence
tagcgacaatgttataatgaatggt

SEQ ID NO: 72537 - DNA, 25 bp, Probe sequence
aaggcacctccatgacttatattgt

SEQ ID NO: 72538 - DNA, 25 bp, Probe sequence
gcgacaatgttataatgaatggtaa

SEQ ID NO: 72539 - DNA, 25 bp, Probe sequence
tggtacaatataagtcatggaggtg

SEQ ID NO: 72540 - DNA, 25 bp, Probe sequence
tacaatataagtcatggaggtgcct

SEQ ID NO: 72541 - DNA, 25 bp, Probe sequence
gtacaatataagtcatggaggtgcc

SEQ ID NO: 72542 - DNA, 25 bp, Probe sequence
ggtacaatataagtcatggaggtgc

SEQ ID NO: 72543 - DNA, 25 bp, Probe sequence
ttggtacaatataagtcatggaggt

SEQ ID NO: 72544 - DNA, 25 bp, Probe sequence
accattcattataacattgtcgcta

SEQ ID NO: 72545 - DNA, 25 bp, Probe sequence
taccattcattataacattgtcgct

SEQ ID NO: 72546 - DNA, 25 bp, Probe sequence
acaatataagtcatggaggtgcctt

SEQ ID NO: 72547 - DNA, 25 bp, Probe sequence
ttaccattcattataacattgtcgc

SEQ ID NO: 72548 - DNA, 25 bp, Probe sequence
tgaagtgataacatcaaggttagca

SEQ ID NO: 72549 - DNA, 25 bp, Probe sequence
gaagtgataacatcaaggttagcaa

SEQ ID NO: 72550 - DNA, 25 bp, Probe sequence
agtgataacatcaaggttagcaatt

SEQ ID NO: 72551 - DNA, 25 bp, Probe sequence
aagtgataacatcaaggttagcaat

SEQ ID NO: 72552 - DNA, 25 bp, Probe sequence
ttgaagtgataacatcaaggttagc

SEQ ID NO: 72553 - DNA, 25 bp, Probe sequence
aagctcgaacgggtataatatgatt

SEQ ID NO: 72554 - DNA, 25 bp, Probe sequence
ctaagctcgaacgggtataatatga

SEQ ID NO: 72555 - DNA, 25 bp, Probe sequence
tctaagctcgaacgggtataatatg

SEQ ID NO: 72556 - DNA, 25 bp, Probe sequence
ttaatctaagctcgaacgggtataa

SEQ ID NO: 72557 - DNA, 25 bp, Probe sequence
tgctaaccttgatgttatcacttca

SEQ ID NO: 72558 - DNA, 25 bp, Probe sequence
ttgctaaccttgatgttatcacttc

SEQ ID NO: 72559 - DNA, 25 bp, Probe sequence
attgctaaccttgatgttatcactt

SEQ ID NO: 72560 - DNA, 25 bp, Probe sequence
aattgctaaccttgatgttatcact

SEQ ID NO: 72561 - DNA, 25 bp, Probe sequence
gctaaccttgatgttatcacttcaa

SEQ ID NO: 72562 - DNA, 25 bp, Probe sequence
catattatacccgttcgagcttaga

SEQ ID NO: 72563 - DNA, 25 bp, Probe sequence
tcatattatacccgttcgagcttag

SEQ ID NO: 72564 - DNA, 25 bp, Probe sequence
aatcatattatacccgttcgagctt

SEQ ID NO: 72565 - DNA, 25 bp, Probe sequence
ttatacccgttcgagcttagattaa

SEQ ID NO: 72566 - DNA, 25 bp, Probe sequence
tgccaaataaacgagatgacattag

SEQ ID NO: 72567 - DNA, 25 bp, Probe sequence
gccaaataaacgagatgacattaga

SEQ ID NO: 72568 - DNA, 25 bp, Probe sequence
taaatgccaaataaacgagatgaca

SEQ ID NO: 72569 - DNA, 25 bp, Probe sequence
aaatgccaaataaacgagatgacat

SEQ ID NO: 72570 - DNA, 25 bp, Probe sequence
atgccaaataaacgagatgacatta

SEQ ID NO: 72571 - DNA, 25 bp, Probe sequence
cgttacgttctcgatcacaactatt

SEQ ID NO: 72572 - DNA, 25 bp, Probe sequence
ttaaatgccaaataaacgagatgac

SEQ ID NO: 72573 - DNA, 25 bp, Probe sequence
attaaatgccaaataaacgagatga

SEQ ID NO: 72574 - DNA, 25 bp, Probe sequence
ccaaataaacgagatgacattagaa

SEQ ID NO: 72575 - DNA, 25 bp, Probe sequence
ctaatgtcatctcgtttatttggca

SEQ ID NO: 72576 - DNA, 25 bp, Probe sequence
tctaatgtcatctcgtttatttggc

SEQ ID NO: 72577 - DNA, 25 bp, Probe sequence
tgtcatctcgtttatttggcattta

SEQ ID NO: 72578 - DNA, 25 bp, Probe sequence
atgtcatctcgtttatttggcattt

SEQ ID NO: 72579 - DNA, 25 bp, Probe sequence
taatgtcatctcgtttatttggcat

SEQ ID NO: 72580 - DNA, 25 bp, Probe sequence
aatagttgtgatcgagaacgtaacg

SEQ ID NO: 72581 - DNA, 25 bp, Probe sequence
gtcatctcgtttatttggcatttaa

SEQ ID NO: 72582 - DNA, 25 bp, Probe sequence
tcatctcgtttatttggcatttaat

SEQ ID NO: 72583 - DNA, 25 bp, Probe sequence
ttctaatgtcatctcgtttatttgg

SEQ ID NO: 72584 - DNA, 25 bp, Probe sequence
ttattagcaagaagatgtgttcgca

SEQ ID NO: 72585 - DNA, 25 bp, Probe sequence
ttgagccgaaccttatatacacatt

SEQ ID NO: 72586 - DNA, 25 bp, Probe sequence
attgagccgaaccttatatacacat

SEQ ID NO: 72587 - DNA, 25 bp, Probe sequence
agccgaaccttatatacacattaca

SEQ ID NO: 72588 - DNA, 25 bp, Probe sequence
tcattgagccgaaccttatatacac

SEQ ID NO: 72589 - DNA, 25 bp, Probe sequence
tgagccgaaccttatatacacatta

SEQ ID NO: 72590 - DNA, 25 bp, Probe sequence
cattgagccgaaccttatatacaca

SEQ ID NO: 72591 - DNA, 25 bp, Probe sequence
tattagcaagaagatgtgttcgcag

SEQ ID NO: 72592 - DNA, 25 bp, Probe sequence
gagccgaaccttatatacacattac

SEQ ID NO: 72593 - DNA, 25 bp, Probe sequence
tgcgaacacatcttcttgctaataa

SEQ ID NO: 72594 - DNA, 25 bp, Probe sequence
atgtgtatataaggttcggctcaat

SEQ ID NO: 72595 - DNA, 25 bp, Probe sequence
aatgtgtatataaggttcggctcaa

SEQ ID NO: 72596 - DNA, 25 bp, Probe sequence
tgtaatgtgtatataaggttcggct

SEQ ID NO: 72597 - DNA, 25 bp, Probe sequence
gtgtatataaggttcggctcaatga

SEQ ID NO: 72598 - DNA, 25 bp, Probe sequence
taatgtgtatataaggttcggctca

SEQ ID NO: 72599 - DNA, 25 bp, Probe sequence
tgtgtatataaggttcggctcaatg

SEQ ID NO: 72600 - DNA, 25 bp, Probe sequence
ctgcgaacacatcttcttgctaata

SEQ ID NO: 72601 - DNA, 25 bp, Probe sequence
gtaatgtgtatataaggttcggctc

SEQ ID NO: 72602 - DNA, 25 bp, Probe sequence
aacctaatgctctagtctgatgtca

SEQ ID NO: 72603 - DNA, 25 bp, Probe sequence
acctaatgctctagtctgatgtcat

SEQ ID NO: 72604 - DNA, 25 bp, Probe sequence
ctaatgctctagtctgatgtcatgg

SEQ ID NO: 72605 - DNA, 25 bp, Probe sequence
cctaatgctctagtctgatgtcatg

SEQ ID NO: 72606 - DNA, 25 bp, Probe sequence
aaacctaatgctctagtctgatgtc

SEQ ID NO: 72607 - DNA, 25 bp, Probe sequence
cctaaacctaatgctctagtctgat

SEQ ID NO: 72608 - DNA, 25 bp, Probe sequence
taaacctaatgctctagtctgatgt

SEQ ID NO: 72609 - DNA, 25 bp, Probe sequence
ccctaaacctaatgctctagtctga

SEQ ID NO: 72610 - DNA, 25 bp, Probe sequence
cacgatgattaacttacaaaggagt

SEQ ID NO: 72611 - DNA, 25 bp, Probe sequence
tgacatcagactagagcattaggtt

SEQ ID NO: 72612 - DNA, 25 bp, Probe sequence
atgacatcagactagagcattaggt

SEQ ID NO: 72613 - DNA, 25 bp, Probe sequence
catgacatcagactagagcattagg

SEQ ID NO: 72614 - DNA, 25 bp, Probe sequence
ccatgacatcagactagagcattag

SEQ ID NO: 72615 - DNA, 25 bp, Probe sequence
gacatcagactagagcattaggttt

SEQ ID NO: 72616 - DNA, 25 bp, Probe sequence
atcagactagagcattaggtttagg

SEQ ID NO: 72617 - DNA, 25 bp, Probe sequence
tcagactagagcattaggtttaggg

SEQ ID NO: 72618 - DNA, 25 bp, Probe sequence
acatcagactagagcattaggttta

SEQ ID NO: 72619 - DNA, 25 bp, Probe sequence
actcctttgtaagttaatcatcgtg

SEQ ID NO: 72620 - DNA, 25 bp, Probe sequence
gtatactcatctgtccgatatcttt

SEQ ID NO: 72621 - DNA, 25 bp, Probe sequence
agtatactcatctgtccgatatctt

SEQ ID NO: 72622 - DNA, 25 bp, Probe sequence
tcagtatactcatctgtccgatatc

SEQ ID NO: 72623 - DNA, 25 bp, Probe sequence
cagtatactcatctgtccgatatct

SEQ ID NO: 72624 - DNA, 25 bp, Probe sequence
ttcagtatactcatctgtccgatat

SEQ ID NO: 72625 - DNA, 25 bp, Probe sequence
actcatctgtccgatatcttttaat

SEQ ID NO: 72626 - DNA, 25 bp, Probe sequence
agctcatgtttcagtatactcatct

SEQ ID NO: 72627 - DNA, 25 bp, Probe sequence
ggagctcatgtttcagtatactcat

SEQ ID NO: 72628 - DNA, 25 bp, Probe sequence
gaggagctcatgtttcagtatactc

SEQ ID NO: 72629 - DNA, 25 bp, Probe sequence
aaagatatcggacagatgagtatac

SEQ ID NO: 72630 - DNA, 25 bp, Probe sequence
aagatatcggacagatgagtatact

SEQ ID NO: 72631 - DNA, 25 bp, Probe sequence
gatatcggacagatgagtatactga

SEQ ID NO: 72632 - DNA, 25 bp, Probe sequence
agatatcggacagatgagtatactg

SEQ ID NO: 72633 - DNA, 25 bp, Probe sequence
atatcggacagatgagtatactgaa

SEQ ID NO: 72634 - DNA, 25 bp, Probe sequence
attaaaagatatcggacagatgagt

SEQ ID NO: 72635 - DNA, 25 bp, Probe sequence
agatgagtatactgaaacatgagct

SEQ ID NO: 72636 - DNA, 25 bp, Probe sequence
atgagtatactgaaacatgagctcc

SEQ ID NO: 72637 - DNA, 25 bp, Probe sequence
gagtatactgaaacatgagctcctc

SEQ ID NO: 72638 - DNA, 25 bp, Probe sequence
aggtgtagtgattcattagctgatt

SEQ ID NO: 72639 - DNA, 25 bp, Probe sequence
taggtgtagtgattcattagctgat

SEQ ID NO: 72640 - DNA, 25 bp, Probe sequence
ataggtgtagtgattcattagctga

SEQ ID NO: 72641 - DNA, 25 bp, Probe sequence
cttataggtgtagtgattcattagc

SEQ ID NO: 72642 - DNA, 25 bp, Probe sequence
gtgctttagtcaaatcgtgatgttt

SEQ ID NO: 72643 - DNA, 25 bp, Probe sequence
tataggtgtagtgattcattagctg

SEQ ID NO: 72644 - DNA, 25 bp, Probe sequence
agtgctttagtcaaatcgtgatgtt

SEQ ID NO: 72645 - DNA, 25 bp, Probe sequence
aagtgctttagtcaaatcgtgatgt

SEQ ID NO: 72646 - DNA, 25 bp, Probe sequence
aaagtgctttagtcaaatcgtgatg

SEQ ID NO: 72647 - DNA, 25 bp, Probe sequence
aatcagctaatgaatcactacacct

SEQ ID NO: 72648 - DNA, 25 bp, Probe sequence
tcagctaatgaatcactacacctat

SEQ ID NO: 72649 - DNA, 25 bp, Probe sequence
atcagctaatgaatcactacaccta

SEQ ID NO: 72650 - DNA, 25 bp, Probe sequence
gctaatgaatcactacacctataag

SEQ ID NO: 72651 - DNA, 25 bp, Probe sequence
aaacatcacgatttgactaaagcac

SEQ ID NO: 72652 - DNA, 25 bp, Probe sequence
cagctaatgaatcactacacctata

SEQ ID NO: 72653 - DNA, 25 bp, Probe sequence
catcacgatttgactaaagcacttt

SEQ ID NO: 72654 - DNA, 25 bp, Probe sequence
acatcacgatttgactaaagcactt

SEQ ID NO: 72655 - DNA, 25 bp, Probe sequence
aacatcacgatttgactaaagcact

SEQ ID NO: 72656 - DNA, 25 bp, Probe sequence
ccgatacatgaccgaactaatagta

SEQ ID NO: 72657 - DNA, 25 bp, Probe sequence
tccgatacatgaccgaactaatagt

SEQ ID NO: 72658 - DNA, 25 bp, Probe sequence
gtccgatacatgaccgaactaatag

SEQ ID NO: 72659 - DNA, 25 bp, Probe sequence
agtccgatacatgaccgaactaata

SEQ ID NO: 72660 - DNA, 25 bp, Probe sequence
aactatcattgcacttaatacgcca

SEQ ID NO: 72661 - DNA, 25 bp, Probe sequence
actatcattgcacttaatacgccaa

SEQ ID NO: 72662 - DNA, 25 bp, Probe sequence
tgattactctactagatttgctcgg

SEQ ID NO: 72663 - DNA, 25 bp, Probe sequence
ctcggcagtaatgaccaattagaaa

SEQ ID NO: 72664 - DNA, 25 bp, Probe sequence
gattactctactagatttgctcggc

SEQ ID NO: 72665 - DNA, 25 bp, Probe sequence
tactattagttcggtcatgtatcgg

SEQ ID NO: 72666 - DNA, 25 bp, Probe sequence
actattagttcggtcatgtatcgga

SEQ ID NO: 72667 - DNA, 25 bp, Probe sequence
ctattagttcggtcatgtatcggac

SEQ ID NO: 72668 - DNA, 25 bp, Probe sequence
tattagttcggtcatgtatcggact

SEQ ID NO: 72669 - DNA, 25 bp, Probe sequence
tggcgtattaagtgcaatgatagtt

SEQ ID NO: 72670 - DNA, 25 bp, Probe sequence
ttggcgtattaagtgcaatgatagt

SEQ ID NO: 72671 - DNA, 25 bp, Probe sequence
ccgagcaaatctagtagagtaatca

SEQ ID NO: 72672 - DNA, 25 bp, Probe sequence
tttctaattggtcattactgccgag

SEQ ID NO: 72673 - DNA, 25 bp, Probe sequence
gccgagcaaatctagtagagtaatc

SEQ ID NO: 72674 - DNA, 25 bp, Probe sequence
ctaacttccgttatcaagctcatct

SEQ ID NO: 72675 - DNA, 25 bp, Probe sequence
tctaacttccgttatcaagctcatc

SEQ ID NO: 72676 - DNA, 25 bp, Probe sequence
ctctaacttccgttatcaagctcat

SEQ ID NO: 72677 - DNA, 25 bp, Probe sequence
taacttccgttatcaagctcatctg

SEQ ID NO: 72678 - DNA, 25 bp, Probe sequence
cctctaacttccgttatcaagctca

SEQ ID NO: 72679 - DNA, 25 bp, Probe sequence
acctctaacttccgttatcaagctc

SEQ ID NO: 72680 - DNA, 25 bp, Probe sequence
aacttccgttatcaagctcatctgc

SEQ ID NO: 72681 - DNA, 25 bp, Probe sequence
acttccgttatcaagctcatctgcc

SEQ ID NO: 72682 - DNA, 25 bp, Probe sequence
tccattctgagctaaagctaggaca

SEQ ID NO: 72683 - DNA, 25 bp, Probe sequence
atgagcttgataacggaagttagag

SEQ ID NO: 72684 - DNA, 25 bp, Probe sequence
gatgagcttgataacggaagttaga

SEQ ID NO: 72685 - DNA, 25 bp, Probe sequence
agatgagcttgataacggaagttag

SEQ ID NO: 72686 - DNA, 25 bp, Probe sequence
cagatgagcttgataacggaagtta

SEQ ID NO: 72687 - DNA, 25 bp, Probe sequence
gagcttgataacggaagttagaggt

SEQ ID NO: 72688 - DNA, 25 bp, Probe sequence
tgagcttgataacggaagttagagg

SEQ ID NO: 72689 - DNA, 25 bp, Probe sequence
gcagatgagcttgataacggaagtt

SEQ ID NO: 72690 - DNA, 25 bp, Probe sequence
ggcagatgagcttgataacggaagt

SEQ ID NO: 72691 - DNA, 25 bp, Probe sequence
ctagctttagctcagaatggacgac

SEQ ID NO: 72692 - DNA, 25 bp, Probe sequence
gtcggcagtctattcctctatttaa

SEQ ID NO: 72693 - DNA, 25 bp, Probe sequence
tgtcggcagtctattcctctattta

SEQ ID NO: 72694 - DNA, 25 bp, Probe sequence
tctgtcggcagtctattcctctatt

SEQ ID NO: 72695 - DNA, 25 bp, Probe sequence
ctctgtcggcagtctattcctctat

SEQ ID NO: 72696 - DNA, 25 bp, Probe sequence
tcggcagtctattcctctatttaaa

SEQ ID NO: 72697 - DNA, 25 bp, Probe sequence
cggcagtctattcctctatttaaag

SEQ ID NO: 72698 - DNA, 25 bp, Probe sequence
ctgtcggcagtctattcctctattt

SEQ ID NO: 72699 - DNA, 25 bp, Probe sequence
ggcagtctattcctctatttaaagg

SEQ ID NO: 72700 - DNA, 25 bp, Probe sequence
actctgtcggcagtctattcctcta

SEQ ID NO: 72701 - DNA, 25 bp, Probe sequence
ttaaatagaggaatagactgccgac

SEQ ID NO: 72702 - DNA, 25 bp, Probe sequence
taaatagaggaatagactgccgaca

SEQ ID NO: 72703 - DNA, 25 bp, Probe sequence
aatagaggaatagactgccgacaga

SEQ ID NO: 72704 - DNA, 25 bp, Probe sequence
atagaggaatagactgccgacagag

SEQ ID NO: 72705 - DNA, 25 bp, Probe sequence
tttaaatagaggaatagactgccga

SEQ ID NO: 72706 - DNA, 25 bp, Probe sequence
ctttaaatagaggaatagactgccg

SEQ ID NO: 72707 - DNA, 25 bp, Probe sequence
aaatagaggaatagactgccgacag

SEQ ID NO: 72708 - DNA, 25 bp, Probe sequence
cctttaaatagaggaatagactgcc

SEQ ID NO: 72709 - DNA, 25 bp, Probe sequence
tagaggaatagactgccgacagagt

SEQ ID NO: 72710 - DNA, 25 bp, Probe sequence
gatattactttaccacatctcgctt

SEQ ID NO: 72711 - DNA, 25 bp, Probe sequence
atattactttaccacatctcgcttt

SEQ ID NO: 72712 - DNA, 25 bp, Probe sequence
gttatagcactcctttgttgtgatg

SEQ ID NO: 72713 - DNA, 25 bp, Probe sequence
tatagcactcctttgttgtgatgtt

SEQ ID NO: 72714 - DNA, 25 bp, Probe sequence
ttatagcactcctttgttgtgatgt

SEQ ID NO: 72715 - DNA, 25 bp, Probe sequence
gcactcctttgttgtgatgtttatt

SEQ ID NO: 72716 - DNA, 25 bp, Probe sequence
tagcactcctttgttgtgatgttta

SEQ ID NO: 72717 - DNA, 25 bp, Probe sequence
ggttatagcactcctttgttgtgat

SEQ ID NO: 72718 - DNA, 25 bp, Probe sequence
agcactcctttgttgtgatgtttat

SEQ ID NO: 72719 - DNA, 25 bp, Probe sequence
aagcgagatgtggtaaagtaatatc

SEQ ID NO: 72720 - DNA, 25 bp, Probe sequence
aaagcgagatgtggtaaagtaatat

SEQ ID NO: 72721 - DNA, 25 bp, Probe sequence
catcacaacaaaggagtgctataac

SEQ ID NO: 72722 - DNA, 25 bp, Probe sequence
acatcacaacaaaggagtgctataa

SEQ ID NO: 72723 - DNA, 25 bp, Probe sequence
aacatcacaacaaaggagtgctata

SEQ ID NO: 72724 - DNA, 25 bp, Probe sequence
aataaacatcacaacaaaggagtgc

SEQ ID NO: 72725 - DNA, 25 bp, Probe sequence
taaacatcacaacaaaggagtgcta

SEQ ID NO: 72726 - DNA, 25 bp, Probe sequence
atcacaacaaaggagtgctataacc

SEQ ID NO: 72727 - DNA, 25 bp, Probe sequence
aaacatcacaacaaaggagtgctat

SEQ ID NO: 72728 - DNA, 25 bp, Probe sequence
aatcatttcactttctgctcaattt

SEQ ID NO: 72729 - DNA, 25 bp, Probe sequence
tgactcctttgtgacaacatagtta

SEQ ID NO: 72730 - DNA, 25 bp, Probe sequence
ttgactcctttgtgacaacatagtt

SEQ ID NO: 72731 - DNA, 25 bp, Probe sequence
tttgactcctttgtgacaacatagt

SEQ ID NO: 72732 - DNA, 25 bp, Probe sequence
ttaatcatttcactttctgctcaat

SEQ ID NO: 72733 - DNA, 25 bp, Probe sequence
tcatttcactttctgctcaatttat

SEQ ID NO: 72734 - DNA, 25 bp, Probe sequence
atcatttcactttctgctcaattta

SEQ ID NO: 72735 - DNA, 25 bp, Probe sequence
taatcatttcactttctgctcaatt

SEQ ID NO: 72736 - DNA, 25 bp, Probe sequence
gactcctttgtgacaacatagttat

SEQ ID NO: 72737 - DNA, 25 bp, Probe sequence
aaattgagcagaaagtgaaatgatt

SEQ ID NO: 72738 - DNA, 25 bp, Probe sequence
taactatgttgtcacaaaggagtca

SEQ ID NO: 72739 - DNA, 25 bp, Probe sequence
actatgttgtcacaaaggagtcaaa

SEQ ID NO: 72740 - DNA, 25 bp, Probe sequence
aactatgttgtcacaaaggagtcaa

SEQ ID NO: 72741 - DNA, 25 bp, Probe sequence
attgagcagaaagtgaaatgattaa

SEQ ID NO: 72742 - DNA, 25 bp, Probe sequence
aattgagcagaaagtgaaatgatta

SEQ ID NO: 72743 - DNA, 25 bp, Probe sequence
taaattgagcagaaagtgaaatgat

SEQ ID NO: 72744 - DNA, 25 bp, Probe sequence
ataaattgagcagaaagtgaaatga

SEQ ID NO: 72745 - DNA, 25 bp, Probe sequence
ataactatgttgtcacaaaggagtc

SEQ ID NO: 72746 - DNA, 25 bp, Probe sequence
tctgttatctacctttctgtttggg

SEQ ID NO: 72747 - DNA, 25 bp, Probe sequence
aaactgtataataaaccctatcgct

SEQ ID NO: 72748 - DNA, 25 bp, Probe sequence
cacatttcttgaaacacagattaca

SEQ ID NO: 72749 - DNA, 25 bp, Probe sequence
acacatttcttgaaacacagattac

SEQ ID NO: 72750 - DNA, 25 bp, Probe sequence
atgaagcgaaagtaaatgaagtaaa

SEQ ID NO: 72751 - DNA, 25 bp, Probe sequence
aatgaagcgaaagtaaatgaagtaa

SEQ ID NO: 72752 - DNA, 25 bp, Probe sequence
ataatgaagcgaaagtaaatgaagt

SEQ ID NO: 72753 - DNA, 25 bp, Probe sequence
tcaagtcaacaagagttaagtttac

SEQ ID NO: 72754 - DNA, 25 bp, Probe sequence
aactgtataataaaccctatcgcta

SEQ ID NO: 72755 - DNA, 25 bp, Probe sequence
cccaaacagaaaggtagataacaga

SEQ ID NO: 72756 - DNA, 25 bp, Probe sequence
agcgatagggtttattatacagttt

SEQ ID NO: 72757 - DNA, 25 bp, Probe sequence
gtaatctgtgtttcaagaaatgtgt

SEQ ID NO: 72758 - DNA, 25 bp, Probe sequence
tgtaatctgtgtttcaagaaatgtg

SEQ ID NO: 72759 - DNA, 25 bp, Probe sequence
ttacttcatttactttcgcttcatt

SEQ ID NO: 72760 - DNA, 25 bp, Probe sequence
tttacttcatttactttcgcttcat

SEQ ID NO: 72761 - DNA, 25 bp, Probe sequence
acttcatttactttcgcttcattat

SEQ ID NO: 72762 - DNA, 25 bp, Probe sequence
gtaaacttaactcttgttgacttga

SEQ ID NO: 72763 - DNA, 25 bp, Probe sequence
agtaaacttaactcttgttgacttg

SEQ ID NO: 72764 - DNA, 25 bp, Probe sequence
ttaggagaactgatttgtgatatga

SEQ ID NO: 72765 - DNA, 25 bp, Probe sequence
aggagaactgatttgtgatatgata

SEQ ID NO: 72766 - DNA, 25 bp, Probe sequence
taggagaactgatttgtgatatgat

SEQ ID NO: 72767 - DNA, 25 bp, Probe sequence
tttaggagaactgatttgtgatatg

SEQ ID NO: 72768 - DNA, 25 bp, Probe sequence
ggagaactgatttgtgatatgatat

SEQ ID NO: 72769 - DNA, 25 bp, Probe sequence
atttaggagaactgatttgtgatat

SEQ ID NO: 72770 - DNA, 25 bp, Probe sequence
atatttaggagaactgatttgtgat

SEQ ID NO: 72771 - DNA, 25 bp, Probe sequence
aaatcttagacgtgaacatgataaa

SEQ ID NO: 72772 - DNA, 25 bp, Probe sequence
tttaaatcttagacgtgaacatgat

SEQ ID NO: 72773 - DNA, 25 bp, Probe sequence
tcatatcacaaatcagttctcctaa

SEQ ID NO: 72774 - DNA, 25 bp, Probe sequence
atcatatcacaaatcagttctccta

SEQ ID NO: 72775 - DNA, 25 bp, Probe sequence
tatcatatcacaaatcagttctcct

SEQ ID NO: 72776 - DNA, 25 bp, Probe sequence
catatcacaaatcagttctcctaaa

SEQ ID NO: 72777 - DNA, 25 bp, Probe sequence
atatcatatcacaaatcagttctcc

SEQ ID NO: 72778 - DNA, 25 bp, Probe sequence
atcacaaatcagttctcctaaatat

SEQ ID NO: 72779 - DNA, 25 bp, Probe sequence
atatcacaaatcagttctcctaaat

SEQ ID NO: 72780 - DNA, 25 bp, Probe sequence
atcatgttcacgtctaagatttaaa

SEQ ID NO: 72781 - DNA, 25 bp, Probe sequence
tttatcatgttcacgtctaagattt

SEQ ID NO: 72782 - DNA, 25 bp, Probe sequence
acatccttggataatgacttgtagt

SEQ ID NO: 72783 - DNA, 25 bp, Probe sequence
aacatccttggataatgacttgtag

SEQ ID NO: 72784 - DNA, 25 bp, Probe sequence
tggctctatatcaaatcggacttat

SEQ ID NO: 72785 - DNA, 25 bp, Probe sequence
atggctctatatcaaatcggactta

SEQ ID NO: 72786 - DNA, 25 bp, Probe sequence
tggacaatacatgacatcataagat

SEQ ID NO: 72787 - DNA, 25 bp, Probe sequence
atggacaatacatgacatcataaga

SEQ ID NO: 72788 - DNA, 25 bp, Probe sequence
tgaacactataatgcccaaacttta

SEQ ID NO: 72789 - DNA, 25 bp, Probe sequence
cttgaacactataatgcccaaactt

SEQ ID NO: 72790 - DNA, 25 bp, Probe sequence
atctatggacaatacatgacatcat

SEQ ID NO: 72791 - DNA, 25 bp, Probe sequence
actacaagtcattatccaaggatgt

SEQ ID NO: 72792 - DNA, 25 bp, Probe sequence
ctacaagtcattatccaaggatgtt

SEQ ID NO: 72793 - DNA, 25 bp, Probe sequence
taagtccgatttgatatagagccat

SEQ ID NO: 72794 - DNA, 25 bp, Probe sequence
ataagtccgatttgatatagagcca

SEQ ID NO: 72795 - DNA, 25 bp, Probe sequence
tcttatgatgtcatgtattgtccat

SEQ ID NO: 72796 - DNA, 25 bp, Probe sequence
atcttatgatgtcatgtattgtcca

SEQ ID NO: 72797 - DNA, 25 bp, Probe sequence
aagtttgggcattatagtgttcaag

SEQ ID NO: 72798 - DNA, 25 bp, Probe sequence
taaagtttgggcattatagtgttca

SEQ ID NO: 72799 - DNA, 25 bp, Probe sequence
atgatgtcatgtattgtccatagat

SEQ ID NO: 72800 - DNA, 25 bp, Probe sequence
gatacggtcatacgattagtgtgtt

SEQ ID NO: 72801 - DNA, 25 bp, Probe sequence
tacggtcatacgattagtgtgttat

SEQ ID NO: 72802 - DNA, 25 bp, Probe sequence
atacggtcatacgattagtgtgtta

SEQ ID NO: 72803 - DNA, 25 bp, Probe sequence
cggtcatacgattagtgtgttatct

SEQ ID NO: 72804 - DNA, 25 bp, Probe sequence
acggtcatacgattagtgtgttatc

SEQ ID NO: 72805 - DNA, 25 bp, Probe sequence
attacagtgatacggtcatacgatt

SEQ ID NO: 72806 - DNA, 25 bp, Probe sequence
tacagtgatacggtcatacgattag

SEQ ID NO: 72807 - DNA, 25 bp, Probe sequence
ttacagtgatacggtcatacgatta

SEQ ID NO: 72808 - DNA, 25 bp, Probe sequence
ttattacagtgatacggtcatacga

SEQ ID NO: 72809 - DNA, 25 bp, Probe sequence
aacacactaatcgtatgaccgtatc

SEQ ID NO: 72810 - DNA, 25 bp, Probe sequence
taacacactaatcgtatgaccgtat

SEQ ID NO: 72811 - DNA, 25 bp, Probe sequence
ataacacactaatcgtatgaccgta

SEQ ID NO: 72812 - DNA, 25 bp, Probe sequence
agataacacactaatcgtatgaccg

SEQ ID NO: 72813 - DNA, 25 bp, Probe sequence
gataacacactaatcgtatgaccgt

SEQ ID NO: 72814 - DNA, 25 bp, Probe sequence
aatcgtatgaccgtatcactgtaat

SEQ ID NO: 72815 - DNA, 25 bp, Probe sequence
ctaatcgtatgaccgtatcactgta

SEQ ID NO: 72816 - DNA, 25 bp, Probe sequence
tcgtatgaccgtatcactgtaataa

SEQ ID NO: 72817 - DNA, 25 bp, Probe sequence
taatcgtatgaccgtatcactgtaa

SEQ ID NO: 72818 - DNA, 25 bp, Probe sequence
tcaatagcatatcataatcttggca

SEQ ID NO: 72819 - DNA, 25 bp, Probe sequence
caatagcatatcataatcttggcat

SEQ ID NO: 72820 - DNA, 25 bp, Probe sequence
ttcaatagcatatcataatcttggc

SEQ ID NO: 72821 - DNA, 25 bp, Probe sequence
aatagcatatcataatcttggcata

SEQ ID NO: 72822 - DNA, 25 bp, Probe sequence
cctctaatttcattcttcaatagca

SEQ ID NO: 72823 - DNA, 25 bp, Probe sequence
tagcatatcataatcttggcatatt

SEQ ID NO: 72824 - DNA, 25 bp, Probe sequence
agcatatcataatcttggcatatta

SEQ ID NO: 72825 - DNA, 25 bp, Probe sequence
tcctctaatttcattcttcaatagc

SEQ ID NO: 72826 - DNA, 25 bp, Probe sequence
atagcatatcataatcttggcatat

SEQ ID NO: 72827 - DNA, 25 bp, Probe sequence
tgccaagattatgatatgctattga

SEQ ID NO: 72828 - DNA, 25 bp, Probe sequence
atgccaagattatgatatgctattg

SEQ ID NO: 72829 - DNA, 25 bp, Probe sequence
gccaagattatgatatgctattgaa

SEQ ID NO: 72830 - DNA, 25 bp, Probe sequence
tatgccaagattatgatatgctatt

SEQ ID NO: 72831 - DNA, 25 bp, Probe sequence
tgctattgaagaatgaaattagagg

SEQ ID NO: 72832 - DNA, 25 bp, Probe sequence
aatatgccaagattatgatatgcta

SEQ ID NO: 72833 - DNA, 25 bp, Probe sequence
taatatgccaagattatgatatgct

SEQ ID NO: 72834 - DNA, 25 bp, Probe sequence
gctattgaagaatgaaattagagga

SEQ ID NO: 72835 - DNA, 25 bp, Probe sequence
atatgccaagattatgatatgctat

SEQ ID NO: 72836 - DNA, 25 bp, Probe sequence
tgctacctaacttcatattcaagat

SEQ ID NO: 72837 - DNA, 25 bp, Probe sequence
atgctacctaacttcatattcaaga

SEQ ID NO: 72838 - DNA, 25 bp, Probe sequence
aatgctacctaacttcatattcaag

SEQ ID NO: 72839 - DNA, 25 bp, Probe sequence
gctacctaacttcatattcaagata

SEQ ID NO: 72840 - DNA, 25 bp, Probe sequence
aaatgctacctaacttcatattcaa

SEQ ID NO: 72841 - DNA, 25 bp, Probe sequence
gtaacaaaatgctacctaacttcat

SEQ ID NO: 72842 - DNA, 25 bp, Probe sequence
acttcatattcaagataatcaatcc

SEQ ID NO: 72843 - DNA, 25 bp, Probe sequence
acaaaatgctacctaacttcatatt

SEQ ID NO: 72844 - DNA, 25 bp, Probe sequence
aacaaaatgctacctaacttcatat

SEQ ID NO: 72845 - DNA, 25 bp, Probe sequence
tcttgaatatgaagttaggtagcat

SEQ ID NO: 72846 - DNA, 25 bp, Probe sequence
atcttgaatatgaagttaggtagca

SEQ ID NO: 72847 - DNA, 25 bp, Probe sequence
cttgaatatgaagttaggtagcatt

SEQ ID NO: 72848 - DNA, 25 bp, Probe sequence
tatcttgaatatgaagttaggtagc

SEQ ID NO: 72849 - DNA, 25 bp, Probe sequence
ttgaatatgaagttaggtagcattt

SEQ ID NO: 72850 - DNA, 25 bp, Probe sequence
atgaagttaggtagcattttgttac

SEQ ID NO: 72851 - DNA, 25 bp, Probe sequence
ggattgattatcttgaatatgaagt

SEQ ID NO: 72852 - DNA, 25 bp, Probe sequence
atatgaagttaggtagcattttgtt

SEQ ID NO: 72853 - DNA, 25 bp, Probe sequence
aatatgaagttaggtagcattttgt

SEQ ID NO: 72854 - DNA, 25 bp, Probe sequence
gatttctacactcctcttagtttgc

SEQ ID NO: 72855 - DNA, 25 bp, Probe sequence
tctacactcctcttagtttgcattt

SEQ ID NO: 72856 - DNA, 25 bp, Probe sequence
ttctacactcctcttagtttgcatt

SEQ ID NO: 72857 - DNA, 25 bp, Probe sequence
tttctacactcctcttagtttgcat

SEQ ID NO: 72858 - DNA, 25 bp, Probe sequence
atttctacactcctcttagtttgca

SEQ ID NO: 72859 - DNA, 25 bp, Probe sequence
ccctaactttcaatatatcaaacca

SEQ ID NO: 72860 - DNA, 25 bp, Probe sequence
accctaactttcaatatatcaaacc

SEQ ID NO: 72861 - DNA, 25 bp, Probe sequence
cactcctcttagtttgcattttaca

SEQ ID NO: 72862 - DNA, 25 bp, Probe sequence
acactcctcttagtttgcattttac

SEQ ID NO: 72863 - DNA, 25 bp, Probe sequence
gcaaactaagaggagtgtagaaatc

SEQ ID NO: 72864 - DNA, 25 bp, Probe sequence
tgcaaactaagaggagtgtagaaat

SEQ ID NO: 72865 - DNA, 25 bp, Probe sequence
atgcaaactaagaggagtgtagaaa

SEQ ID NO: 72866 - DNA, 25 bp, Probe sequence
aatgcaaactaagaggagtgtagaa

SEQ ID NO: 72867 - DNA, 25 bp, Probe sequence
aaatgcaaactaagaggagtgtaga

SEQ ID NO: 72868 - DNA, 25 bp, Probe sequence
ggtttgatatattgaaagttagggt

SEQ ID NO: 72869 - DNA, 25 bp, Probe sequence
tggtttgatatattgaaagttaggg

SEQ ID NO: 72870 - DNA, 25 bp, Probe sequence
gtaaaatgcaaactaagaggagtgt

SEQ ID NO: 72871 - DNA, 25 bp, Probe sequence
tgtaaaatgcaaactaagaggagtg

SEQ ID NO: 72872 - DNA, 25 bp, Probe sequence
aacacaaccattattcatattgagg

SEQ ID NO: 72873 - DNA, 25 bp, Probe sequence
acacaaccattattcatattgaggt

SEQ ID NO: 72874 - DNA, 25 bp, Probe sequence
ttcatattgaggtttcatttcacat

SEQ ID NO: 72875 - DNA, 25 bp, Probe sequence
attcatattgaggtttcatttcaca

SEQ ID NO: 72876 - DNA, 25 bp, Probe sequence
cgcatcatatattcaagcttcgtta

SEQ ID NO: 72877 - DNA, 25 bp, Probe sequence
atatatgatataactttgtggtgcg

SEQ ID NO: 72878 - DNA, 25 bp, Probe sequence
gcatcatatattcaagcttcgttag

SEQ ID NO: 72879 - DNA, 25 bp, Probe sequence
tcatatattcaagcttcgttaggtt

SEQ ID NO: 72880 - DNA, 25 bp, Probe sequence
tcatattgaggtttcatttcacata

SEQ ID NO: 72881 - DNA, 25 bp, Probe sequence
cctcaatatgaataatggttgtgtt

SEQ ID NO: 72882 - DNA, 25 bp, Probe sequence
acctcaatatgaataatggttgtgt

SEQ ID NO: 72883 - DNA, 25 bp, Probe sequence
tgtgaaatgaaacctcaatatgaat

SEQ ID NO: 72884 - DNA, 25 bp, Probe sequence
atgtgaaatgaaacctcaatatgaa

SEQ ID NO: 72885 - DNA, 25 bp, Probe sequence
taacgaagcttgaatatatgatgcg

SEQ ID NO: 72886 - DNA, 25 bp, Probe sequence
cgcaccacaaagttatatcatatat

SEQ ID NO: 72887 - DNA, 25 bp, Probe sequence
ctaacgaagcttgaatatatgatgc

SEQ ID NO: 72888 - DNA, 25 bp, Probe sequence
aacctaacgaagcttgaatatatga

SEQ ID NO: 72889 - DNA, 25 bp, Probe sequence
tatgtgaaatgaaacctcaatatga

SEQ ID NO: 72890 - DNA, 25 bp, Probe sequence
tcttattgacagtaacgcctatatt

SEQ ID NO: 72891 - DNA, 25 bp, Probe sequence
atcttattgacagtaacgcctatat

SEQ ID NO: 72892 - DNA, 25 bp, Probe sequence
atatcttattgacagtaacgcctat

SEQ ID NO: 72893 - DNA, 25 bp, Probe sequence
aatatcttattgacagtaacgccta

SEQ ID NO: 72894 - DNA, 25 bp, Probe sequence
tatcttattgacagtaacgcctata

SEQ ID NO: 72895 - DNA, 25 bp, Probe sequence
acagccctccctaattaatattcat

SEQ ID NO: 72896 - DNA, 25 bp, Probe sequence
tacagccctccctaattaatattca

SEQ ID NO: 72897 - DNA, 25 bp, Probe sequence
ttgacagtaacgcctatatttatca

SEQ ID NO: 72898 - DNA, 25 bp, Probe sequence
tgacagtaacgcctatatttatcat

SEQ ID NO: 72899 - DNA, 25 bp, Probe sequence
aatataggcgttactgtcaataaga

SEQ ID NO: 72900 - DNA, 25 bp, Probe sequence
ataggcgttactgtcaataagatat

SEQ ID NO: 72901 - DNA, 25 bp, Probe sequence
atataggcgttactgtcaataagat

SEQ ID NO: 72902 - DNA, 25 bp, Probe sequence
taggcgttactgtcaataagatatt

SEQ ID NO: 72903 - DNA, 25 bp, Probe sequence
tataggcgttactgtcaataagata

SEQ ID NO: 72904 - DNA, 25 bp, Probe sequence
atgaatattaattagggagggctgt

SEQ ID NO: 72905 - DNA, 25 bp, Probe sequence
tgaatattaattagggagggctgta

SEQ ID NO: 72906 - DNA, 25 bp, Probe sequence
tgataaatataggcgttactgtcaa

SEQ ID NO: 72907 - DNA, 25 bp, Probe sequence
atgataaatataggcgttactgtca

SEQ ID NO: 72908 - DNA, 25 bp, Probe sequence
tctactcactaatcaatgtcatgct

SEQ ID NO: 72909 - DNA, 25 bp, Probe sequence
atctactcactaatcaatgtcatgc

SEQ ID NO: 72910 - DNA, 25 bp, Probe sequence
actcactaatcaatgtcatgctaat

SEQ ID NO: 72911 - DNA, 25 bp, Probe sequence
ctactcactaatcaatgtcatgcta

SEQ ID NO: 72912 - DNA, 25 bp, Probe sequence
tcactaatcaatgtcatgctaatct

SEQ ID NO: 72913 - DNA, 25 bp, Probe sequence
ctcactaatcaatgtcatgctaatc

SEQ ID NO: 72914 - DNA, 25 bp, Probe sequence
tactcactaatcaatgtcatgctaa

SEQ ID NO: 72915 - DNA, 25 bp, Probe sequence
cgacctccaatttgaacattaaact

SEQ ID NO: 72916 - DNA, 25 bp, Probe sequence
acgacctccaatttgaacattaaac

SEQ ID NO: 72917 - DNA, 25 bp, Probe sequence
agcatgacattgattagtgagtaga

SEQ ID NO: 72918 - DNA, 25 bp, Probe sequence
gcatgacattgattagtgagtagat

SEQ ID NO: 72919 - DNA, 25 bp, Probe sequence
attagcatgacattgattagtgagt

SEQ ID NO: 72920 - DNA, 25 bp, Probe sequence
tagcatgacattgattagtgagtag

SEQ ID NO: 72921 - DNA, 25 bp, Probe sequence
agattagcatgacattgattagtga

SEQ ID NO: 72922 - DNA, 25 bp, Probe sequence
gattagcatgacattgattagtgag

SEQ ID NO: 72923 - DNA, 25 bp, Probe sequence
ttagcatgacattgattagtgagta

SEQ ID NO: 72924 - DNA, 25 bp, Probe sequence
agtttaatgttcaaattggaggtcg

SEQ ID NO: 72925 - DNA, 25 bp, Probe sequence
gtttaatgttcaaattggaggtcgt

SEQ ID NO: 72926 - DNA, 25 bp, Probe sequence
tctattaaagcgtgtgccatttgag

SEQ ID NO: 72927 - DNA, 25 bp, Probe sequence
tattaaagcgtgtgccatttgagtc

SEQ ID NO: 72928 - DNA, 25 bp, Probe sequence
ctattaaagcgtgtgccatttgagt

SEQ ID NO: 72929 - DNA, 25 bp, Probe sequence
agtccacttttatggttcttcatct

SEQ ID NO: 72930 - DNA, 25 bp, Probe sequence
tgagtccacttttatggttcttcat

SEQ ID NO: 72931 - DNA, 25 bp, Probe sequence
ttgagtccacttttatggttcttca

SEQ ID NO: 72932 - DNA, 25 bp, Probe sequence
gagtccacttttatggttcttcatc

SEQ ID NO: 72933 - DNA, 25 bp, Probe sequence
catttgagtccacttttatggttct

SEQ ID NO: 72934 - DNA, 25 bp, Probe sequence
tttgagtccacttttatggttcttc

SEQ ID NO: 72935 - DNA, 25 bp, Probe sequence
ctcaaatggcacacgctttaataga

SEQ ID NO: 72936 - DNA, 25 bp, Probe sequence
actcaaatggcacacgctttaatag

SEQ ID NO: 72937 - DNA, 25 bp, Probe sequence
gactcaaatggcacacgctttaata

SEQ ID NO: 72938 - DNA, 25 bp, Probe sequence
atgaagaaccataaaagtggactca

SEQ ID NO: 72939 - DNA, 25 bp, Probe sequence
agatgaagaaccataaaagtggact

SEQ ID NO: 72940 - DNA, 25 bp, Probe sequence
tgaagaaccataaaagtggactcaa

SEQ ID NO: 72941 - DNA, 25 bp, Probe sequence
gatgaagaaccataaaagtggactc

SEQ ID NO: 72942 - DNA, 25 bp, Probe sequence
agaaccataaaagtggactcaaatg

SEQ ID NO: 72943 - DNA, 25 bp, Probe sequence
gaagaaccataaaagtggactcaaa

SEQ ID NO: 72944 - DNA, 25 bp, Probe sequence
aggtttctaataggttatgttatgt

SEQ ID NO: 72945 - DNA, 25 bp, Probe sequence
acaaggtttctaataggttatgtta

SEQ ID NO: 72946 - DNA, 25 bp, Probe sequence
tacaaggtttctaataggttatgtt

SEQ ID NO: 72947 - DNA, 25 bp, Probe sequence
ttacaaggtttctaataggttatgt

SEQ ID NO: 72948 - DNA, 25 bp, Probe sequence
tgttttacaaggtttctaataggtt

SEQ ID NO: 72949 - DNA, 25 bp, Probe sequence
gttttacaaggtttctaataggtta

SEQ ID NO: 72950 - DNA, 25 bp, Probe sequence
ttgttttacaaggtttctaataggt

SEQ ID NO: 72951 - DNA, 25 bp, Probe sequence
acataacataacctattagaaacct

SEQ ID NO: 72952 - DNA, 25 bp, Probe sequence
acataacctattagaaaccttgtaa

SEQ ID NO: 72953 - DNA, 25 bp, Probe sequence
aacataacctattagaaaccttgta

SEQ ID NO: 72954 - DNA, 25 bp, Probe sequence
taacataacctattagaaaccttgt

SEQ ID NO: 72955 - DNA, 25 bp, Probe sequence
aacctattagaaaccttgtaaaaca

SEQ ID NO: 72956 - DNA, 25 bp, Probe sequence
taacctattagaaaccttgtaaaac

SEQ ID NO: 72957 - DNA, 25 bp, Probe sequence
acctattagaaaccttgtaaaacaa

SEQ ID NO: 72958 - DNA, 25 bp, Probe sequence
agttaataccacttccgtagttaga

SEQ ID NO: 72959 - DNA, 25 bp, Probe sequence
gttaataccacttccgtagttagaa

SEQ ID NO: 72960 - DNA, 25 bp, Probe sequence
attagttaataccacttccgtagtt

SEQ ID NO: 72961 - DNA, 25 bp, Probe sequence
tagttaataccacttccgtagttag

SEQ ID NO: 72962 - DNA, 25 bp, Probe sequence
agttattagttaataccacttccgt

SEQ ID NO: 72963 - DNA, 25 bp, Probe sequence
ttaataccacttccgtagttagaat

SEQ ID NO: 72964 - DNA, 25 bp, Probe sequence
aataccacttccgtagttagaatat

SEQ ID NO: 72965 - DNA, 25 bp, Probe sequence
ttagttaataccacttccgtagtta

SEQ ID NO: 72966 - DNA, 25 bp, Probe sequence
tttcaatgttcgtttgtcacttaca

SEQ ID NO: 72967 - DNA, 25 bp, Probe sequence
tctaactacggaagtggtattaact

SEQ ID NO: 72968 - DNA, 25 bp, Probe sequence
ttctaactacggaagtggtattaac

SEQ ID NO: 72969 - DNA, 25 bp, Probe sequence
aactacggaagtggtattaactaat

SEQ ID NO: 72970 - DNA, 25 bp, Probe sequence
acggaagtggtattaactaataact

SEQ ID NO: 72971 - DNA, 25 bp, Probe sequence
ctaactacggaagtggtattaacta

SEQ ID NO: 72972 - DNA, 25 bp, Probe sequence
attctaactacggaagtggtattaa

SEQ ID NO: 72973 - DNA, 25 bp, Probe sequence
atattctaactacggaagtggtatt

SEQ ID NO: 72974 - DNA, 25 bp, Probe sequence
tgtaagtgacaaacgaacattgaaa

SEQ ID NO: 72975 - DNA, 25 bp, Probe sequence
taactacggaagtggtattaactaa

SEQ ID NO: 72976 - DNA, 25 bp, Probe sequence
gcgtgtcaatatttacatgatgatt

SEQ ID NO: 72977 - DNA, 25 bp, Probe sequence
cgtgtcaatatttacatgatgattt

SEQ ID NO: 72978 - DNA, 25 bp, Probe sequence
cgcgtgtcaatatttacatgatgat

SEQ ID NO: 72979 - DNA, 25 bp, Probe sequence
ataaatataactgtagtattgcgcg

SEQ ID NO: 72980 - DNA, 25 bp, Probe sequence
gcgcgtgtcaatatttacatgatga

SEQ ID NO: 72981 - DNA, 25 bp, Probe sequence
tgtcaatatttacatgatgatttca

SEQ ID NO: 72982 - DNA, 25 bp, Probe sequence
gtgtcaatatttacatgatgatttc

SEQ ID NO: 72983 - DNA, 25 bp, Probe sequence
tataaatataactgtagtattgcgc

SEQ ID NO: 72984 - DNA, 25 bp, Probe sequence
aatcatcatgtaaatattgacacgc

SEQ ID NO: 72985 - DNA, 25 bp, Probe sequence
aaatcatcatgtaaatattgacacg

SEQ ID NO: 72986 - DNA, 25 bp, Probe sequence
atcatcatgtaaatattgacacgcg

SEQ ID NO: 72987 - DNA, 25 bp, Probe sequence
cgcgcaatactacagttatatttat

SEQ ID NO: 72988 - DNA, 25 bp, Probe sequence
tcatcatgtaaatattgacacgcgc

SEQ ID NO: 72989 - DNA, 25 bp, Probe sequence
tgaaatcatcatgtaaatattgaca

SEQ ID NO: 72990 - DNA, 25 bp, Probe sequence
gaaatcatcatgtaaatattgacac

SEQ ID NO: 72991 - DNA, 25 bp, Probe sequence
gcgcaatactacagttatatttata

SEQ ID NO: 72992 - DNA, 25 bp, Probe sequence
aacaaatgctcacatagtagattca

SEQ ID NO: 72993 - DNA, 25 bp, Probe sequence
acaaatgctcacatagtagattcat

SEQ ID NO: 72994 - DNA, 25 bp, Probe sequence
aaacaaatgctcacatagtagattc

SEQ ID NO: 72995 - DNA, 25 bp, Probe sequence
cgtttaacttgatatgtcactatgt

SEQ ID NO: 72996 - DNA, 25 bp, Probe sequence
tctctgactaaagttttacatcgct

SEQ ID NO: 72997 - DNA, 25 bp, Probe sequence
acatcgctatcagtattatgtatga

SEQ ID NO: 72998 - DNA, 25 bp, Probe sequence
atctctgactaaagttttacatcgc

SEQ ID NO: 72999 - DNA, 25 bp, Probe sequence
ctctgactaaagttttacatcgcta

SEQ ID NO: 73000 - DNA, 25 bp, Probe sequence
tctgactaaagttttacatcgctat

SEQ ID NO: 73001 - DNA, 25 bp, Probe sequence
tgaatctactatgtgagcatttgtt

SEQ ID NO: 73002 - DNA, 25 bp, Probe sequence
atgaatctactatgtgagcatttgt

SEQ ID NO: 73003 - DNA, 25 bp, Probe sequence
gaatctactatgtgagcatttgttt

SEQ ID NO: 73004 - DNA, 25 bp, Probe sequence
acatagtgacatatcaagttaaacg

SEQ ID NO: 73005 - DNA, 25 bp, Probe sequence
agcgatgtaaaactttagtcagaga

SEQ ID NO: 73006 - DNA, 25 bp, Probe sequence
gcgatgtaaaactttagtcagagat

SEQ ID NO: 73007 - DNA, 25 bp, Probe sequence
tcatacataatactgatagcgatgt

SEQ ID NO: 73008 - DNA, 25 bp, Probe sequence
tagcgatgtaaaactttagtcagag

SEQ ID NO: 73009 - DNA, 25 bp, Probe sequence
atagcgatgtaaaactttagtcaga

SEQ ID NO: 73010 - DNA, 25 bp, Probe sequence
ccatcctgttacaaatcttccctac

SEQ ID NO: 73011 - DNA, 25 bp, Probe sequence
accatcctgttacaaatcttcccta

SEQ ID NO: 73012 - DNA, 25 bp, Probe sequence
agcaattcctgtaattaataccaca

SEQ ID NO: 73013 - DNA, 25 bp, Probe sequence
tcctgttacaaatcttccctacaag

SEQ ID NO: 73014 - DNA, 25 bp, Probe sequence
catcctgttacaaatcttccctaca

SEQ ID NO: 73015 - DNA, 25 bp, Probe sequence
atcctgttacaaatcttccctacaa

SEQ ID NO: 73016 - DNA, 25 bp, Probe sequence
gcaattcctgtaattaataccacaa

SEQ ID NO: 73017 - DNA, 25 bp, Probe sequence
aagcaattcctgtaattaataccac

SEQ ID NO: 73018 - DNA, 25 bp, Probe sequence
tcctgtaattaataccacaatgaga

SEQ ID NO: 73019 - DNA, 25 bp, Probe sequence
gtagggaagatttgtaacaggatgg

SEQ ID NO: 73020 - DNA, 25 bp, Probe sequence
tgtggtattaattacaggaattgct

SEQ ID NO: 73021 - DNA, 25 bp, Probe sequence
tagggaagatttgtaacaggatggt

SEQ ID NO: 73022 - DNA, 25 bp, Probe sequence
tgtagggaagatttgtaacaggatg

SEQ ID NO: 73023 - DNA, 25 bp, Probe sequence
cttgtagggaagatttgtaacagga

SEQ ID NO: 73024 - DNA, 25 bp, Probe sequence
ttgtagggaagatttgtaacaggat

SEQ ID NO: 73025 - DNA, 25 bp, Probe sequence
ttgtggtattaattacaggaattgc

SEQ ID NO: 73026 - DNA, 25 bp, Probe sequence
gtggtattaattacaggaattgctt

SEQ ID NO: 73027 - DNA, 25 bp, Probe sequence
tctcattgtggtattaattacagga

SEQ ID NO: 73028 - DNA, 25 bp, Probe sequence
tctcaacctctgtcatattcatgtg

SEQ ID NO: 73029 - DNA, 25 bp, Probe sequence
atctcaacctctgtcatattcatgt

SEQ ID NO: 73030 - DNA, 25 bp, Probe sequence
tcaacctctgtcatattcatgtgat

SEQ ID NO: 73031 - DNA, 25 bp, Probe sequence
ctcaacctctgtcatattcatgtga

SEQ ID NO: 73032 - DNA, 25 bp, Probe sequence
caacctctgtcatattcatgtgatt

SEQ ID NO: 73033 - DNA, 25 bp, Probe sequence
tatctcaacctctgtcatattcatg

SEQ ID NO: 73034 - DNA, 25 bp, Probe sequence
atatctcaacctctgtcatattcat

SEQ ID NO: 73035 - DNA, 25 bp, Probe sequence
ccctaatctattgccctatcctatt

SEQ ID NO: 73036 - DNA, 25 bp, Probe sequence
ctattgccctatcctattcataagc

SEQ ID NO: 73037 - DNA, 25 bp, Probe sequence
cacatgaatatgacagaggttgaga

SEQ ID NO: 73038 - DNA, 25 bp, Probe sequence
acatgaatatgacagaggttgagat

SEQ ID NO: 73039 - DNA, 25 bp, Probe sequence
tcacatgaatatgacagaggttgag

SEQ ID NO: 73040 - DNA, 25 bp, Probe sequence
atcacatgaatatgacagaggttga

SEQ ID NO: 73041 - DNA, 25 bp, Probe sequence
aatcacatgaatatgacagaggttg

SEQ ID NO: 73042 - DNA, 25 bp, Probe sequence
catgaatatgacagaggttgagata

SEQ ID NO: 73043 - DNA, 25 bp, Probe sequence
aataggatagggcaatagattaggg

SEQ ID NO: 73044 - DNA, 25 bp, Probe sequence
atgaatatgacagaggttgagatat

SEQ ID NO: 73045 - DNA, 25 bp, Probe sequence
gcttatgaataggatagggcaatag

SEQ ID NO: 73046 - DNA, 25 bp, Probe sequence
tccacaccaccttctgttaatttaa

SEQ ID NO: 73047 - DNA, 25 bp, Probe sequence
ctccacaccaccttctgttaattta

SEQ ID NO: 73048 - DNA, 25 bp, Probe sequence
actccacaccaccttctgttaattt

SEQ ID NO: 73049 - DNA, 25 bp, Probe sequence
cacaccaccttctgttaatttaacc

SEQ ID NO: 73050 - DNA, 25 bp, Probe sequence
ccacaccaccttctgttaatttaac

SEQ ID NO: 73051 - DNA, 25 bp, Probe sequence
caccaccttctgttaatttaaccat

SEQ ID NO: 73052 - DNA, 25 bp, Probe sequence
acaccaccttctgttaatttaacca

SEQ ID NO: 73053 - DNA, 25 bp, Probe sequence
accaccttctgttaatttaaccatt

SEQ ID NO: 73054 - DNA, 25 bp, Probe sequence
ccaccttctgttaatttaaccatta

SEQ ID NO: 73055 - DNA, 25 bp, Probe sequence
caccttctgttaatttaaccattat

SEQ ID NO: 73056 - DNA, 25 bp, Probe sequence
ttaaattaacagaaggtggtgtgga

SEQ ID NO: 73057 - DNA, 25 bp, Probe sequence
taaattaacagaaggtggtgtggag

SEQ ID NO: 73058 - DNA, 25 bp, Probe sequence
aaattaacagaaggtggtgtggagt

SEQ ID NO: 73059 - DNA, 25 bp, Probe sequence
gttaaattaacagaaggtggtgtgg

SEQ ID NO: 73060 - DNA, 25 bp, Probe sequence
ggttaaattaacagaaggtggtgtg

SEQ ID NO: 73061 - DNA, 25 bp, Probe sequence
tggttaaattaacagaaggtggtgt

SEQ ID NO: 73062 - DNA, 25 bp, Probe sequence
atggttaaattaacagaaggtggtg

SEQ ID NO: 73063 - DNA, 25 bp, Probe sequence
aatggttaaattaacagaaggtggt

SEQ ID NO: 73064 - DNA, 25 bp, Probe sequence
taatggttaaattaacagaaggtgg

SEQ ID NO: 73065 - DNA, 25 bp, Probe sequence
ataatggttaaattaacagaaggtg

SEQ ID NO: 73066 - DNA, 25 bp, Probe sequence
ttaatgtcactatgttttccgataa

SEQ ID NO: 73067 - DNA, 25 bp, Probe sequence
aaattaatgtcactatgttttccga

SEQ ID NO: 73068 - DNA, 25 bp, Probe sequence
aatgtcactatgttttccgataata

SEQ ID NO: 73069 - DNA, 25 bp, Probe sequence
taatgtcactatgttttccgataat

SEQ ID NO: 73070 - DNA, 25 bp, Probe sequence
aattaatgtcactatgttttccgat

SEQ ID NO: 73071 - DNA, 25 bp, Probe sequence
atgtcactatgttttccgataatat

SEQ ID NO: 73072 - DNA, 25 bp, Probe sequence
tccgataatattaccaatcatcgaa

SEQ ID NO: 73073 - DNA, 25 bp, Probe sequence
ttccgataatattaccaatcatcga

SEQ ID NO: 73074 - DNA, 25 bp, Probe sequence
tgtcactatgttttccgataatatt

SEQ ID NO: 73075 - DNA, 25 bp, Probe sequence
ttatcggaaaacatagtgacattaa

SEQ ID NO: 73076 - DNA, 25 bp, Probe sequence
tcggaaaacatagtgacattaattt

SEQ ID NO: 73077 - DNA, 25 bp, Probe sequence
attatcggaaaacatagtgacatta

SEQ ID NO: 73078 - DNA, 25 bp, Probe sequence
tattatcggaaaacatagtgacatt

SEQ ID NO: 73079 - DNA, 25 bp, Probe sequence
atcggaaaacatagtgacattaatt

SEQ ID NO: 73080 - DNA, 25 bp, Probe sequence
atattatcggaaaacatagtgacat

SEQ ID NO: 73081 - DNA, 25 bp, Probe sequence
tcgatgattggtaatattatcggaa

SEQ ID NO: 73082 - DNA, 25 bp, Probe sequence
ttcgatgattggtaatattatcgga

SEQ ID NO: 73083 - DNA, 25 bp, Probe sequence
tatcggaaaacatagtgacattaat

SEQ ID NO: 73084 - DNA, 25 bp, Probe sequence
aaaaccctttcctcaccaaaattaa

SEQ ID NO: 73085 - DNA, 25 bp, Probe sequence
ataaaaccctttcctcaccaaaatt

SEQ ID NO: 73086 - DNA, 25 bp, Probe sequence
tataaaaccctttcctcaccaaaat

SEQ ID NO: 73087 - DNA, 25 bp, Probe sequence
taaaaccctttcctcaccaaaatta

SEQ ID NO: 73088 - DNA, 25 bp, Probe sequence
aaaccctttcctcaccaaaattaat

SEQ ID NO: 73089 - DNA, 25 bp, Probe sequence
ttataaaaccctttcctcaccaaaa

SEQ ID NO: 73090 - DNA, 25 bp, Probe sequence
atttagttatttgcgaaattggatt

SEQ ID NO: 73091 - DNA, 25 bp, Probe sequence
tttagttatttgcgaaattggatta

SEQ ID NO: 73092 - DNA, 25 bp, Probe sequence
tgtaagttaatttagttatttgcga

SEQ ID NO: 73093 - DNA, 25 bp, Probe sequence
ttaattttggtgaggaaagggtttt

SEQ ID NO: 73094 - DNA, 25 bp, Probe sequence
aattttggtgaggaaagggttttat

SEQ ID NO: 73095 - DNA, 25 bp, Probe sequence
attttggtgaggaaagggttttata

SEQ ID NO: 73096 - DNA, 25 bp, Probe sequence
taattttggtgaggaaagggtttta

SEQ ID NO: 73097 - DNA, 25 bp, Probe sequence
attaattttggtgaggaaagggttt

SEQ ID NO: 73098 - DNA, 25 bp, Probe sequence
ttttggtgaggaaagggttttataa

SEQ ID NO: 73099 - DNA, 25 bp, Probe sequence
aatccaatttcgcaaataactaaat

SEQ ID NO: 73100 - DNA, 25 bp, Probe sequence
taatccaatttcgcaaataactaaa

SEQ ID NO: 73101 - DNA, 25 bp, Probe sequence
tcgcaaataactaaattaacttaca

SEQ ID NO: 73102 - DNA, 25 bp, Probe sequence
tgctaacaaactacctttaatgact

SEQ ID NO: 73103 - DNA, 25 bp, Probe sequence
gctaacaaactacctttaatgactc

SEQ ID NO: 73104 - DNA, 25 bp, Probe sequence
agattaatttacacaacaggtcagc

SEQ ID NO: 73105 - DNA, 25 bp, Probe sequence
ctaacaaactacctttaatgactcg

SEQ ID NO: 73106 - DNA, 25 bp, Probe sequence
gattaatttacacaacaggtcagct

SEQ ID NO: 73107 - DNA, 25 bp, Probe sequence
ttgctaacaaactacctttaatgac

SEQ ID NO: 73108 - DNA, 25 bp, Probe sequence
gttgctaacaaactacctttaatga

SEQ ID NO: 73109 - DNA, 25 bp, Probe sequence
acagattaatttacacaacaggtca

SEQ ID NO: 73110 - DNA, 25 bp, Probe sequence
tcacagattaatttacacaacaggt

SEQ ID NO: 73111 - DNA, 25 bp, Probe sequence
agtcattaaaggtagtttgttagca

SEQ ID NO: 73112 - DNA, 25 bp, Probe sequence
gagtcattaaaggtagtttgttagc

SEQ ID NO: 73113 - DNA, 25 bp, Probe sequence
gctgacctgttgtgtaaattaatct

SEQ ID NO: 73114 - DNA, 25 bp, Probe sequence
cgagtcattaaaggtagtttgttag

SEQ ID NO: 73115 - DNA, 25 bp, Probe sequence
agctgacctgttgtgtaaattaatc

SEQ ID NO: 73116 - DNA, 25 bp, Probe sequence
tcattaaaggtagtttgttagcaac

SEQ ID NO: 73117 - DNA, 25 bp, Probe sequence
gtcattaaaggtagtttgttagcaa

SEQ ID NO: 73118 - DNA, 25 bp, Probe sequence
acctgttgtgtaaattaatctgtga

SEQ ID NO: 73119 - DNA, 25 bp, Probe sequence
tgacctgttgtgtaaattaatctgt

SEQ ID NO: 73120 - DNA, 25 bp, Probe sequence
accttctacattatagttccaagca

SEQ ID NO: 73121 - DNA, 25 bp, Probe sequence
aaccttctacattatagttccaagc

SEQ ID NO: 73122 - DNA, 25 bp, Probe sequence
ccttctacattatagttccaagcat

SEQ ID NO: 73123 - DNA, 25 bp, Probe sequence
tagttccaagcatcttacacatgaa

SEQ ID NO: 73124 - DNA, 25 bp, Probe sequence
atagttccaagcatcttacacatga

SEQ ID NO: 73125 - DNA, 25 bp, Probe sequence
gttccaagcatcttacacatgaatg

SEQ ID NO: 73126 - DNA, 25 bp, Probe sequence
agttccaagcatcttacacatgaat

SEQ ID NO: 73127 - DNA, 25 bp, Probe sequence
ttatagttccaagcatcttacacat

SEQ ID NO: 73128 - DNA, 25 bp, Probe sequence
attatagttccaagcatcttacaca

SEQ ID NO: 73129 - DNA, 25 bp, Probe sequence
tgcttggaactataatgtagaaggt

SEQ ID NO: 73130 - DNA, 25 bp, Probe sequence
gcttggaactataatgtagaaggtt

SEQ ID NO: 73131 - DNA, 25 bp, Probe sequence
atgcttggaactataatgtagaagg

SEQ ID NO: 73132 - DNA, 25 bp, Probe sequence
tcatgtgtaagatgcttggaactat

SEQ ID NO: 73133 - DNA, 25 bp, Probe sequence
ttcatgtgtaagatgcttggaacta

SEQ ID NO: 73134 - DNA, 25 bp, Probe sequence
attcatgtgtaagatgcttggaact

SEQ ID NO: 73135 - DNA, 25 bp, Probe sequence
cattcatgtgtaagatgcttggaac

SEQ ID NO: 73136 - DNA, 25 bp, Probe sequence
tgtaagatgcttggaactataatgt

SEQ ID NO: 73137 - DNA, 25 bp, Probe sequence
tgtgtaagatgcttggaactataat

SEQ ID NO: 73138 - DNA, 25 bp, Probe sequence
attaaatgccaatagagacgacctt

SEQ ID NO: 73139 - DNA, 25 bp, Probe sequence
ttaaatgccaatagagacgaccttt

SEQ ID NO: 73140 - DNA, 25 bp, Probe sequence
aagaccatccctattaaatgccaat

SEQ ID NO: 73141 - DNA, 25 bp, Probe sequence
aaagaccatccctattaaatgccaa

SEQ ID NO: 73142 - DNA, 25 bp, Probe sequence
tattaaatgccaatagagacgacct

SEQ ID NO: 73143 - DNA, 25 bp, Probe sequence
agaccatccctattaaatgccaata

SEQ ID NO: 73144 - DNA, 25 bp, Probe sequence
cagtccaagggcttacaatcgtata

SEQ ID NO: 73145 - DNA, 25 bp, Probe sequence
gtactatcacaaataggctacactt

SEQ ID NO: 73146 - DNA, 25 bp, Probe sequence
tactatcacaaataggctacacttt

SEQ ID NO: 73147 - DNA, 25 bp, Probe sequence
aaggtcgtctctattggcatttaat

SEQ ID NO: 73148 - DNA, 25 bp, Probe sequence
aaaggtcgtctctattggcatttaa

SEQ ID NO: 73149 - DNA, 25 bp, Probe sequence
attggcatttaatagggatggtctt

SEQ ID NO: 73150 - DNA, 25 bp, Probe sequence
ttggcatttaatagggatggtcttt

SEQ ID NO: 73151 - DNA, 25 bp, Probe sequence
aggtcgtctctattggcatttaata

SEQ ID NO: 73152 - DNA, 25 bp, Probe sequence
tattggcatttaatagggatggtct

SEQ ID NO: 73153 - DNA, 25 bp, Probe sequence
tatacgattgtaagcccttggactg

SEQ ID NO: 73154 - DNA, 25 bp, Probe sequence
aagtgtagcctatttgtgatagtac

SEQ ID NO: 73155 - DNA, 25 bp, Probe sequence
aaagtgtagcctatttgtgatagta

SEQ ID NO: 73156 - DNA, 25 bp, Probe sequence
gcgatatctaactctaacacatctt

SEQ ID NO: 73157 - DNA, 25 bp, Probe sequence
cgcgatatctaactctaacacatct

SEQ ID NO: 73158 - DNA, 25 bp, Probe sequence
cgatatctaactctaacacatctta

SEQ ID NO: 73159 - DNA, 25 bp, Probe sequence
agacaagtaaatcagtgattaaaca

SEQ ID NO: 73160 - DNA, 25 bp, Probe sequence
gacaagtaaatcagtgattaaacat

SEQ ID NO: 73161 - DNA, 25 bp, Probe sequence
actatagacaagtaaatcagtgatt

SEQ ID NO: 73162 - DNA, 25 bp, Probe sequence
tagacaagtaaatcagtgattaaac

SEQ ID NO: 73163 - DNA, 25 bp, Probe sequence
aaatcagtgattaaacatacaagat

SEQ ID NO: 73164 - DNA, 25 bp, Probe sequence
ttactatagacaagtaaatcagtga

SEQ ID NO: 73165 - DNA, 25 bp, Probe sequence
aagatgtgttagagttagatatcgc

SEQ ID NO: 73166 - DNA, 25 bp, Probe sequence
agatgtgttagagttagatatcgcg

SEQ ID NO: 73167 - DNA, 25 bp, Probe sequence
taagatgtgttagagttagatatcg

SEQ ID NO: 73168 - DNA, 25 bp, Probe sequence
tgtttaatcactgatttacttgtct

SEQ ID NO: 73169 - DNA, 25 bp, Probe sequence
atgtttaatcactgatttacttgtc

SEQ ID NO: 73170 - DNA, 25 bp, Probe sequence
aatcactgatttacttgtctatagt

SEQ ID NO: 73171 - DNA, 25 bp, Probe sequence
gtttaatcactgatttacttgtcta

SEQ ID NO: 73172 - DNA, 25 bp, Probe sequence
atcttgtatgtttaatcactgattt

SEQ ID NO: 73173 - DNA, 25 bp, Probe sequence
tcactgatttacttgtctatagtaa

SEQ ID NO: 73174 - DNA, 25 bp, Probe sequence
gttacgagtgataatacgaagtggt

SEQ ID NO: 73175 - DNA, 25 bp, Probe sequence
tgttacgagtgataatacgaagtgg

SEQ ID NO: 73176 - DNA, 25 bp, Probe sequence
ttacgagtgataatacgaagtggta

SEQ ID NO: 73177 - DNA, 25 bp, Probe sequence
ttgttacgagtgataatacgaagtg

SEQ ID NO: 73178 - DNA, 25 bp, Probe sequence
acgagtgataatacgaagtggtatc

SEQ ID NO: 73179 - DNA, 25 bp, Probe sequence
tacgagtgataatacgaagtggtat

SEQ ID NO: 73180 - DNA, 25 bp, Probe sequence
acagaaattgcgttaaagcgatata

SEQ ID NO: 73181 - DNA, 25 bp, Probe sequence
tgcgttaaagcgatataatcttagc

SEQ ID NO: 73182 - DNA, 25 bp, Probe sequence
aacagaaattgcgttaaagcgatat

SEQ ID NO: 73183 - DNA, 25 bp, Probe sequence
ccacttcgtattatcactcgtaaca

SEQ ID NO: 73184 - DNA, 25 bp, Probe sequence
accacttcgtattatcactcgtaac

SEQ ID NO: 73185 - DNA, 25 bp, Probe sequence
taccacttcgtattatcactcgtaa

SEQ ID NO: 73186 - DNA, 25 bp, Probe sequence
cacttcgtattatcactcgtaacaa

SEQ ID NO: 73187 - DNA, 25 bp, Probe sequence
gataccacttcgtattatcactcgt

SEQ ID NO: 73188 - DNA, 25 bp, Probe sequence
ataccacttcgtattatcactcgta

SEQ ID NO: 73189 - DNA, 25 bp, Probe sequence
tatatcgctttaacgcaatttctgt

SEQ ID NO: 73190 - DNA, 25 bp, Probe sequence
gctaagattatatcgctttaacgca

SEQ ID NO: 73191 - DNA, 25 bp, Probe sequence
atatcgctttaacgcaatttctgtt

SEQ ID NO: 73192 - DNA, 25 bp, Probe sequence
acagttcaattcatccttaacaatc

SEQ ID NO: 73193 - DNA, 25 bp, Probe sequence
tcaattcatccttaacaatctgtct

SEQ ID NO: 73194 - DNA, 25 bp, Probe sequence
agttcaattcatccttaacaatctg

SEQ ID NO: 73195 - DNA, 25 bp, Probe sequence
cagttcaattcatccttaacaatct

SEQ ID NO: 73196 - DNA, 25 bp, Probe sequence
gttcaattcatccttaacaatctgt

SEQ ID NO: 73197 - DNA, 25 bp, Probe sequence
aacagttcaattcatccttaacaat

SEQ ID NO: 73198 - DNA, 25 bp, Probe sequence
caattcatccttaacaatctgtctt

SEQ ID NO: 73199 - DNA, 25 bp, Probe sequence
ttcaattcatccttaacaatctgtc

SEQ ID NO: 73200 - DNA, 25 bp, Probe sequence
taacagttcaattcatccttaacaa

SEQ ID NO: 73201 - DNA, 25 bp, Probe sequence
gattgttaaggatgaattgaactgt

SEQ ID NO: 73202 - DNA, 25 bp, Probe sequence
agacagattgttaaggatgaattga

SEQ ID NO: 73203 - DNA, 25 bp, Probe sequence
agattgttaaggatgaattgaactg

SEQ ID NO: 73204 - DNA, 25 bp, Probe sequence
cagattgttaaggatgaattgaact

SEQ ID NO: 73205 - DNA, 25 bp, Probe sequence
acagattgttaaggatgaattgaac

SEQ ID NO: 73206 - DNA, 25 bp, Probe sequence
attgttaaggatgaattgaactgtt

SEQ ID NO: 73207 - DNA, 25 bp, Probe sequence
gacagattgttaaggatgaattgaa

SEQ ID NO: 73208 - DNA, 25 bp, Probe sequence
aagacagattgttaaggatgaattg

SEQ ID NO: 73209 - DNA, 25 bp, Probe sequence
ttgttaaggatgaattgaactgtta

SEQ ID NO: 73210 - DNA, 25 bp, Probe sequence
tttcatttcctactcagcacctcaa

SEQ ID NO: 73211 - DNA, 25 bp, Probe sequence
tctcccaatctatactttaatcacg

SEQ ID NO: 73212 - DNA, 25 bp, Probe sequence
ttcatttcctactcagcacctcaaa

SEQ ID NO: 73213 - DNA, 25 bp, Probe sequence
atgtttcatttcctactcagcacct

SEQ ID NO: 73214 - DNA, 25 bp, Probe sequence
gtttcatttcctactcagcacctca

SEQ ID NO: 73215 - DNA, 25 bp, Probe sequence
tgtttcatttcctactcagcacctc

SEQ ID NO: 73216 - DNA, 25 bp, Probe sequence
catgtttcatttcctactcagcacc

SEQ ID NO: 73217 - DNA, 25 bp, Probe sequence
ctcccaatctatactttaatcacgt

SEQ ID NO: 73218 - DNA, 25 bp, Probe sequence
tttcctactcagcacctcaaaataa

SEQ ID NO: 73219 - DNA, 25 bp, Probe sequence
cgtgattaaagtatagattgggaga

SEQ ID NO: 73220 - DNA, 25 bp, Probe sequence
ttgaggtgctgagtaggaaatgaaa

SEQ ID NO: 73221 - DNA, 25 bp, Probe sequence
tttgaggtgctgagtaggaaatgaa

SEQ ID NO: 73222 - DNA, 25 bp, Probe sequence
aggtgctgagtaggaaatgaaacat

SEQ ID NO: 73223 - DNA, 25 bp, Probe sequence
gaggtgctgagtaggaaatgaaaca

SEQ ID NO: 73224 - DNA, 25 bp, Probe sequence
tgaggtgctgagtaggaaatgaaac

SEQ ID NO: 73225 - DNA, 25 bp, Probe sequence
ggtgctgagtaggaaatgaaacatg

SEQ ID NO: 73226 - DNA, 25 bp, Probe sequence
acgtgattaaagtatagattgggag

SEQ ID NO: 73227 - DNA, 25 bp, Probe sequence
ttattttgaggtgctgagtaggaaa

SEQ ID NO: 73228 - DNA, 25 bp, Probe sequence
tgctttcttattgtttaaagtcgct

SEQ ID NO: 73229 - DNA, 25 bp, Probe sequence
ctgctttcttattgtttaaagtcgc

SEQ ID NO: 73230 - DNA, 25 bp, Probe sequence
gtcgctataaaatggggatataact

SEQ ID NO: 73231 - DNA, 25 bp, Probe sequence
agtcgctataaaatggggatataac

SEQ ID NO: 73232 - DNA, 25 bp, Probe sequence
ttaaagtcgctataaaatggggata

SEQ ID NO: 73233 - DNA, 25 bp, Probe sequence
gctttcttattgtttaaagtcgcta

SEQ ID NO: 73234 - DNA, 25 bp, Probe sequence
tctgctttcttattgtttaaagtcg

SEQ ID NO: 73235 - DNA, 25 bp, Probe sequence
tgttcacctctaataatagttatgt

SEQ ID NO: 73236 - DNA, 25 bp, Probe sequence
aagtcgctataaaatggggatataa

SEQ ID NO: 73237 - DNA, 25 bp, Probe sequence
agcgactttaaacaataagaaagca

SEQ ID NO: 73238 - DNA, 25 bp, Probe sequence
gcgactttaaacaataagaaagcag

SEQ ID NO: 73239 - DNA, 25 bp, Probe sequence
gttatatccccattttatagcgact

SEQ ID NO: 73240 - DNA, 25 bp, Probe sequence
agttatatccccattttatagcgac

SEQ ID NO: 73241 - DNA, 25 bp, Probe sequence
cgactttaaacaataagaaagcaga

SEQ ID NO: 73242 - DNA, 25 bp, Probe sequence
tagcgactttaaacaataagaaagc

SEQ ID NO: 73243 - DNA, 25 bp, Probe sequence
tatccccattttatagcgactttaa

SEQ ID NO: 73244 - DNA, 25 bp, Probe sequence
acataactattattagaggtgaaca

SEQ ID NO: 73245 - DNA, 25 bp, Probe sequence
atatccccattttatagcgacttta

SEQ ID NO: 73246 - DNA, 25 bp, Probe sequence
tacatagagaaaggttaaggagtgc

SEQ ID NO: 73247 - DNA, 25 bp, Probe sequence
cattgtttcagtattgcctttgttt

SEQ ID NO: 73248 - DNA, 25 bp, Probe sequence
ctacattgtttcagtattgcctttg

SEQ ID NO: 73249 - DNA, 25 bp, Probe sequence
tttggtgtacgcctttcatagttat

SEQ ID NO: 73250 - DNA, 25 bp, Probe sequence
atttggtgtacgcctttcatagtta

SEQ ID NO: 73251 - DNA, 25 bp, Probe sequence
gtgtacgcctttcatagttatcatt

SEQ ID NO: 73252 - DNA, 25 bp, Probe sequence
ggtgtacgcctttcatagttatcat

SEQ ID NO: 73253 - DNA, 25 bp, Probe sequence
actacattgtttcagtattgccttt

SEQ ID NO: 73254 - DNA, 25 bp, Probe sequence
aactacattgtttcagtattgcctt

SEQ ID NO: 73255 - DNA, 25 bp, Probe sequence
gcactccttaacctttctctatgta

SEQ ID NO: 73256 - DNA, 25 bp, Probe sequence
aaacaaaggcaatactgaaacaatg

SEQ ID NO: 73257 - DNA, 25 bp, Probe sequence
caaaggcaatactgaaacaatgtag

SEQ ID NO: 73258 - DNA, 25 bp, Probe sequence
taactatgaaaggcgtacaccaaat

SEQ ID NO: 73259 - DNA, 25 bp, Probe sequence
ataactatgaaaggcgtacaccaaa

SEQ ID NO: 73260 - DNA, 25 bp, Probe sequence
atgataactatgaaaggcgtacacc

SEQ ID NO: 73261 - DNA, 25 bp, Probe sequence
aatgataactatgaaaggcgtacac

SEQ ID NO: 73262 - DNA, 25 bp, Probe sequence
gataactatgaaaggcgtacaccaa

SEQ ID NO: 73263 - DNA, 25 bp, Probe sequence
aaggcaatactgaaacaatgtagtt

SEQ ID NO: 73264 - DNA, 25 bp, Probe sequence
atgttatattgtgattggcgtaagt

SEQ ID NO: 73265 - DNA, 25 bp, Probe sequence
tgatgttatattgtgattggcgtaa

SEQ ID NO: 73266 - DNA, 25 bp, Probe sequence
ttgatgttatattgtgattggcgta

SEQ ID NO: 73267 - DNA, 25 bp, Probe sequence
gatgttatattgtgattggcgtaag

SEQ ID NO: 73268 - DNA, 25 bp, Probe sequence
tgttatattgtgattggcgtaagta

SEQ ID NO: 73269 - DNA, 25 bp, Probe sequence
tatattgtgattggcgtaagtaact

SEQ ID NO: 73270 - DNA, 25 bp, Probe sequence
atattgtgattggcgtaagtaactt

SEQ ID NO: 73271 - DNA, 25 bp, Probe sequence
ttatattgtgattggcgtaagtaac

SEQ ID NO: 73272 - DNA, 25 bp, Probe sequence
gttatattgtgattggcgtaagtaa

SEQ ID NO: 73273 - DNA, 25 bp, Probe sequence
tacgccaatcacaatataacatcaa

SEQ ID NO: 73274 - DNA, 25 bp, Probe sequence
ttacgccaatcacaatataacatca

SEQ ID NO: 73275 - DNA, 25 bp, Probe sequence
acttacgccaatcacaatataacat

SEQ ID NO: 73276 - DNA, 25 bp, Probe sequence
cttacgccaatcacaatataacatc

SEQ ID NO: 73277 - DNA, 25 bp, Probe sequence
tacttacgccaatcacaatataaca

SEQ ID NO: 73278 - DNA, 25 bp, Probe sequence
agttacttacgccaatcacaatata

SEQ ID NO: 73279 - DNA, 25 bp, Probe sequence
aagttacttacgccaatcacaatat

SEQ ID NO: 73280 - DNA, 25 bp, Probe sequence
ttacttacgccaatcacaatataac

SEQ ID NO: 73281 - DNA, 25 bp, Probe sequence
gttacttacgccaatcacaatataa

SEQ ID NO: 73282 - DNA, 25 bp, Probe sequence
tgacgcattgattgtgttcttaatt

SEQ ID NO: 73283 - DNA, 25 bp, Probe sequence
atgacgcattgattgtgttcttaat

SEQ ID NO: 73284 - DNA, 25 bp, Probe sequence
gacgcattgattgtgttcttaatta

SEQ ID NO: 73285 - DNA, 25 bp, Probe sequence
acgcattgattgtgttcttaattat

SEQ ID NO: 73286 - DNA, 25 bp, Probe sequence
aatgacgcattgattgtgttcttaa

SEQ ID NO: 73287 - DNA, 25 bp, Probe sequence
cagttccgaaaccaatatgaatagg

SEQ ID NO: 73288 - DNA, 25 bp, Probe sequence
aaacagttccgaaaccaatatgaat

SEQ ID NO: 73289 - DNA, 25 bp, Probe sequence
ttccgaaaccaatatgaataggctc

SEQ ID NO: 73290 - DNA, 25 bp, Probe sequence
acagttccgaaaccaatatgaatag

SEQ ID NO: 73291 - DNA, 25 bp, Probe sequence
aattaagaacacaatcaatgcgtca

SEQ ID NO: 73292 - DNA, 25 bp, Probe sequence
attaagaacacaatcaatgcgtcat

SEQ ID NO: 73293 - DNA, 25 bp, Probe sequence
taattaagaacacaatcaatgcgtc

SEQ ID NO: 73294 - DNA, 25 bp, Probe sequence
ataattaagaacacaatcaatgcgt

SEQ ID NO: 73295 - DNA, 25 bp, Probe sequence
ttaagaacacaatcaatgcgtcatt

SEQ ID NO: 73296 - DNA, 25 bp, Probe sequence
cctattcatattggtttcggaactg

SEQ ID NO: 73297 - DNA, 25 bp, Probe sequence
attcatattggtttcggaactgttt

SEQ ID NO: 73298 - DNA, 25 bp, Probe sequence
gagcctattcatattggtttcggaa

SEQ ID NO: 73299 - DNA, 25 bp, Probe sequence
ctattcatattggtttcggaactgt

SEQ ID NO: 73300 - DNA, 25 bp, Probe sequence
aagtgagtgagacatagtgtgataa

SEQ ID NO: 73301 - DNA, 25 bp, Probe sequence
tttggaaagtgagtgagacatagtg

SEQ ID NO: 73302 - DNA, 25 bp, Probe sequence
gaaagtgagtgagacatagtgtgat

SEQ ID NO: 73303 - DNA, 25 bp, Probe sequence
agtgagtgagacatagtgtgataaa

SEQ ID NO: 73304 - DNA, 25 bp, Probe sequence
aaagtgagtgagacatagtgtgata

SEQ ID NO: 73305 - DNA, 25 bp, Probe sequence
tgagtgagacatagtgtgataaaga

SEQ ID NO: 73306 - DNA, 25 bp, Probe sequence
gtgagtgagacatagtgtgataaag

SEQ ID NO: 73307 - DNA, 25 bp, Probe sequence
ttggaaagtgagtgagacatagtgt

SEQ ID NO: 73308 - DNA, 25 bp, Probe sequence
gagtgagacatagtgtgataaagaa

SEQ ID NO: 73309 - DNA, 25 bp, Probe sequence
ttatcacactatgtctcactcactt

SEQ ID NO: 73310 - DNA, 25 bp, Probe sequence
cactatgtctcactcactttccaaa

SEQ ID NO: 73311 - DNA, 25 bp, Probe sequence
atcacactatgtctcactcactttc

SEQ ID NO: 73312 - DNA, 25 bp, Probe sequence
tatcacactatgtctcactcacttt

SEQ ID NO: 73313 - DNA, 25 bp, Probe sequence
tttatcacactatgtctcactcact

SEQ ID NO: 73314 - DNA, 25 bp, Probe sequence
ctttatcacactatgtctcactcac

SEQ ID NO: 73315 - DNA, 25 bp, Probe sequence
tctttatcacactatgtctcactca

SEQ ID NO: 73316 - DNA, 25 bp, Probe sequence
acactatgtctcactcactttccaa

SEQ ID NO: 73317 - DNA, 25 bp, Probe sequence
ttctttatcacactatgtctcactc

SEQ ID NO: 73318 - DNA, 25 bp, Probe sequence
ggagcccagaactttgattaatgta

SEQ ID NO: 73319 - DNA, 25 bp, Probe sequence
gagcccagaactttgattaatgtat

SEQ ID NO: 73320 - DNA, 25 bp, Probe sequence
aatataacattgtggagcccagaac

SEQ ID NO: 73321 - DNA, 25 bp, Probe sequence
agcccagaactttgattaatgtata

SEQ ID NO: 73322 - DNA, 25 bp, Probe sequence
atataacattgtggagcccagaact

SEQ ID NO: 73323 - DNA, 25 bp, Probe sequence
caatataacattgtggagcccagaa

SEQ ID NO: 73324 - DNA, 25 bp, Probe sequence
tataacattgtggagcccagaactt

SEQ ID NO: 73325 - DNA, 25 bp, Probe sequence
gcccagaactttgattaatgtatat

SEQ ID NO: 73326 - DNA, 25 bp, Probe sequence
attgtggagcccagaactttgatta

SEQ ID NO: 73327 - DNA, 25 bp, Probe sequence
tacattaatcaaagttctgggctcc

SEQ ID NO: 73328 - DNA, 25 bp, Probe sequence
atacattaatcaaagttctgggctc

SEQ ID NO: 73329 - DNA, 25 bp, Probe sequence
gttctgggctccacaatgttatatt

SEQ ID NO: 73330 - DNA, 25 bp, Probe sequence
tatacattaatcaaagttctgggct

SEQ ID NO: 73331 - DNA, 25 bp, Probe sequence
agttctgggctccacaatgttatat

SEQ ID NO: 73332 - DNA, 25 bp, Probe sequence
ttctgggctccacaatgttatattg

SEQ ID NO: 73333 - DNA, 25 bp, Probe sequence
aagttctgggctccacaatgttata

SEQ ID NO: 73334 - DNA, 25 bp, Probe sequence
atatacattaatcaaagttctgggc

SEQ ID NO: 73335 - DNA, 25 bp, Probe sequence
taatcaaagttctgggctccacaat

SEQ ID NO: 73336 - DNA, 25 bp, Probe sequence
aaatatagccacacgcctaaactac

SEQ ID NO: 73337 - DNA, 25 bp, Probe sequence
caaatatagccacacgcctaaacta

SEQ ID NO: 73338 - DNA, 25 bp, Probe sequence
attcagactcaaatatagccacacg

SEQ ID NO: 73339 - DNA, 25 bp, Probe sequence
tattcagactcaaatatagccacac

SEQ ID NO: 73340 - DNA, 25 bp, Probe sequence
ctcaaatatagccacacgcctaaac

SEQ ID NO: 73341 - DNA, 25 bp, Probe sequence
tcaaatatagccacacgcctaaact

SEQ ID NO: 73342 - DNA, 25 bp, Probe sequence
actcaaatatagccacacgcctaaa

SEQ ID NO: 73343 - DNA, 25 bp, Probe sequence
aatatagccacacgcctaaactacg

SEQ ID NO: 73344 - DNA, 25 bp, Probe sequence
gactcaaatatagccacacgcctaa

SEQ ID NO: 73345 - DNA, 25 bp, Probe sequence
cgtgtggctatatttgagtctgaat

SEQ ID NO: 73346 - DNA, 25 bp, Probe sequence
tagtttaggcgtgtggctatatttg

SEQ ID NO: 73347 - DNA, 25 bp, Probe sequence
gtagtttaggcgtgtggctatattt

SEQ ID NO: 73348 - DNA, 25 bp, Probe sequence
gtgtggctatatttgagtctgaata

SEQ ID NO: 73349 - DNA, 25 bp, Probe sequence
gtttaggcgtgtggctatatttgag

SEQ ID NO: 73350 - DNA, 25 bp, Probe sequence
tttaggcgtgtggctatatttgagt

SEQ ID NO: 73351 - DNA, 25 bp, Probe sequence
agtttaggcgtgtggctatatttga

SEQ ID NO: 73352 - DNA, 25 bp, Probe sequence
ttaggcgtgtggctatatttgagtc

SEQ ID NO: 73353 - DNA, 25 bp, Probe sequence
cgtagtttaggcgtgtggctatatt

SEQ ID NO: 73354 - DNA, 25 bp, Probe sequence
ttaaatccattgatgcgatgttcag

SEQ ID NO: 73355 - DNA, 25 bp, Probe sequence
attaaatccattgatgcgatgttca

SEQ ID NO: 73356 - DNA, 25 bp, Probe sequence
taaatccattgatgcgatgttcaga

SEQ ID NO: 73357 - DNA, 25 bp, Probe sequence
tattaaatccattgatgcgatgttc

SEQ ID NO: 73358 - DNA, 25 bp, Probe sequence
aaatccattgatgcgatgttcagag

SEQ ID NO: 73359 - DNA, 25 bp, Probe sequence
atattaaatccattgatgcgatgtt

SEQ ID NO: 73360 - DNA, 25 bp, Probe sequence
aatattaaatccattgatgcgatgt

SEQ ID NO: 73361 - DNA, 25 bp, Probe sequence
caatattaaatccattgatgcgatg

SEQ ID NO: 73362 - DNA, 25 bp, Probe sequence
tcaatattaaatccattgatgcgat

SEQ ID NO: 73363 - DNA, 25 bp, Probe sequence
tgaacatcgcatcaatggatttaat

SEQ ID NO: 73364 - DNA, 25 bp, Probe sequence
ctgaacatcgcatcaatggatttaa

SEQ ID NO: 73365 - DNA, 25 bp, Probe sequence
tctgaacatcgcatcaatggattta

SEQ ID NO: 73366 - DNA, 25 bp, Probe sequence
gaacatcgcatcaatggatttaata

SEQ ID NO: 73367 - DNA, 25 bp, Probe sequence
ctctgaacatcgcatcaatggattt

SEQ ID NO: 73368 - DNA, 25 bp, Probe sequence
aacatcgcatcaatggatttaatat

SEQ ID NO: 73369 - DNA, 25 bp, Probe sequence
acatcgcatcaatggatttaatatt

SEQ ID NO: 73370 - DNA, 25 bp, Probe sequence
catcgcatcaatggatttaatattg

SEQ ID NO: 73371 - DNA, 25 bp, Probe sequence
atcgcatcaatggatttaatattga

SEQ ID NO: 73372 - DNA, 25 bp, Probe sequence
tcacaaattgatacagtgtttctaa

SEQ ID NO: 73373 - DNA, 25 bp, Probe sequence
cacaaattgatacagtgtttctaaa

SEQ ID NO: 73374 - DNA, 25 bp, Probe sequence
tgagaatgagtttgttatactaagt

SEQ ID NO: 73375 - DNA, 25 bp, Probe sequence
tgatacattttctcaattagagtgc

SEQ ID NO: 73376 - DNA, 25 bp, Probe sequence
gatacattttctcaattagagtgct

SEQ ID NO: 73377 - DNA, 25 bp, Probe sequence
acattttctcaattagagtgctaaa

SEQ ID NO: 73378 - DNA, 25 bp, Probe sequence
acaaattgatacagtgtttctaaat

SEQ ID NO: 73379 - DNA, 25 bp, Probe sequence
ctcaattagagtgctaaaataaggt

SEQ ID NO: 73380 - DNA, 25 bp, Probe sequence
tctcaattagagtgctaaaataagg

SEQ ID NO: 73381 - DNA, 25 bp, Probe sequence
ttagaaacactgtatcaatttgtga

SEQ ID NO: 73382 - DNA, 25 bp, Probe sequence
tttagaaacactgtatcaatttgtg

SEQ ID NO: 73383 - DNA, 25 bp, Probe sequence
gcactctaattgagaaaatgtatca

SEQ ID NO: 73384 - DNA, 25 bp, Probe sequence
acttagtataacaaactcattctca

SEQ ID NO: 73385 - DNA, 25 bp, Probe sequence
agcactctaattgagaaaatgtatc

SEQ ID NO: 73386 - DNA, 25 bp, Probe sequence
tttagcactctaattgagaaaatgt

SEQ ID NO: 73387 - DNA, 25 bp, Probe sequence
atttagaaacactgtatcaatttgt

SEQ ID NO: 73388 - DNA, 25 bp, Probe sequence
accttattttagcactctaattgag

SEQ ID NO: 73389 - DNA, 25 bp, Probe sequence
ccttattttagcactctaattgaga

SEQ ID NO: 73390 - DNA, 25 bp, Probe sequence
taggcatttgggtcacttacaataa

SEQ ID NO: 73391 - DNA, 25 bp, Probe sequence
ataggcatttgggtcacttacaata

SEQ ID NO: 73392 - DNA, 25 bp, Probe sequence
gataggcatttgggtcacttacaat

SEQ ID NO: 73393 - DNA, 25 bp, Probe sequence
aggcatttgggtcacttacaataac

SEQ ID NO: 73394 - DNA, 25 bp, Probe sequence
gtcacttacaataacccaatgtcta

SEQ ID NO: 73395 - DNA, 25 bp, Probe sequence
atgataggcatttgggtcacttaca

SEQ ID NO: 73396 - DNA, 25 bp, Probe sequence
tgataggcatttgggtcacttacaa

SEQ ID NO: 73397 - DNA, 25 bp, Probe sequence
ggtcacttacaataacccaatgtct

SEQ ID NO: 73398 - DNA, 25 bp, Probe sequence
catgataggcatttgggtcacttac

SEQ ID NO: 73399 - DNA, 25 bp, Probe sequence
tattgtaagtgacccaaatgcctat

SEQ ID NO: 73400 - DNA, 25 bp, Probe sequence
ttattgtaagtgacccaaatgccta

SEQ ID NO: 73401 - DNA, 25 bp, Probe sequence
attgtaagtgacccaaatgcctatc

SEQ ID NO: 73402 - DNA, 25 bp, Probe sequence
gttattgtaagtgacccaaatgcct

SEQ ID NO: 73403 - DNA, 25 bp, Probe sequence
tagacattgggttattgtaagtgac

SEQ ID NO: 73404 - DNA, 25 bp, Probe sequence
tgtaagtgacccaaatgcctatcat

SEQ ID NO: 73405 - DNA, 25 bp, Probe sequence
ttgtaagtgacccaaatgcctatca

SEQ ID NO: 73406 - DNA, 25 bp, Probe sequence
agacattgggttattgtaagtgacc

SEQ ID NO: 73407 - DNA, 25 bp, Probe sequence
gtaagtgacccaaatgcctatcatg

SEQ ID NO: 73408 - DNA, 25 bp, Probe sequence
tcagagttacatccaaatgatagat

SEQ ID NO: 73409 - DNA, 25 bp, Probe sequence
ttacatccaaatgatagatttcacg

SEQ ID NO: 73410 - DNA, 25 bp, Probe sequence
acatccaaatgatagatttcacgtt

SEQ ID NO: 73411 - DNA, 25 bp, Probe sequence
atgtatcgtttgtaagcaaatgact

SEQ ID NO: 73412 - DNA, 25 bp, Probe sequence
cagagttacatccaaatgatagatt

SEQ ID NO: 73413 - DNA, 25 bp, Probe sequence
tgtatcgtttgtaagcaaatgacta

SEQ ID NO: 73414 - DNA, 25 bp, Probe sequence
tacatccaaatgatagatttcacgt

SEQ ID NO: 73415 - DNA, 25 bp, Probe sequence
gatagatttcacgttataccttcac

SEQ ID NO: 73416 - DNA, 25 bp, Probe sequence
tgatagatttcacgttataccttca

SEQ ID NO: 73417 - DNA, 25 bp, Probe sequence
atctatcatttggatgtaactctga

SEQ ID NO: 73418 - DNA, 25 bp, Probe sequence
cgtgaaatctatcatttggatgtaa

SEQ ID NO: 73419 - DNA, 25 bp, Probe sequence
aacgtgaaatctatcatttggatgt

SEQ ID NO: 73420 - DNA, 25 bp, Probe sequence
agtcatttgcttacaaacgatacat

SEQ ID NO: 73421 - DNA, 25 bp, Probe sequence
aatctatcatttggatgtaactctg

SEQ ID NO: 73422 - DNA, 25 bp, Probe sequence
tagtcatttgcttacaaacgataca

SEQ ID NO: 73423 - DNA, 25 bp, Probe sequence
acgtgaaatctatcatttggatgta

SEQ ID NO: 73424 - DNA, 25 bp, Probe sequence
gtgaaggtataacgtgaaatctatc

SEQ ID NO: 73425 - DNA, 25 bp, Probe sequence
tgaaggtataacgtgaaatctatca

SEQ ID NO: 73426 - DNA, 25 bp, Probe sequence
atgtaaactttgcagggagctttat

SEQ ID NO: 73427 - DNA, 25 bp, Probe sequence
tgtaaactttgcagggagctttatt

SEQ ID NO: 73428 - DNA, 25 bp, Probe sequence
aatgtaaactttgcagggagcttta

SEQ ID NO: 73429 - DNA, 25 bp, Probe sequence
aaatgtaaactttgcagggagcttt

SEQ ID NO: 73430 - DNA, 25 bp, Probe sequence
ctcccttcaaaagtaagcattgtaa

SEQ ID NO: 73431 - DNA, 25 bp, Probe sequence
actcccttcaaaagtaagcattgta

SEQ ID NO: 73432 - DNA, 25 bp, Probe sequence
tcccttcaaaagtaagcattgtaaa

SEQ ID NO: 73433 - DNA, 25 bp, Probe sequence
cccttcaaaagtaagcattgtaaaa

SEQ ID NO: 73434 - DNA, 25 bp, Probe sequence
tactcccttcaaaagtaagcattgt

SEQ ID NO: 73435 - DNA, 25 bp, Probe sequence
ataaagctccctgcaaagtttacat

SEQ ID NO: 73436 - DNA, 25 bp, Probe sequence
taaagctccctgcaaagtttacatt

SEQ ID NO: 73437 - DNA, 25 bp, Probe sequence
aataaagctccctgcaaagtttaca

SEQ ID NO: 73438 - DNA, 25 bp, Probe sequence
aaagctccctgcaaagtttacattt

SEQ ID NO: 73439 - DNA, 25 bp, Probe sequence
ttacaatgcttacttttgaagggag

SEQ ID NO: 73440 - DNA, 25 bp, Probe sequence
tacaatgcttacttttgaagggagt

SEQ ID NO: 73441 - DNA, 25 bp, Probe sequence
tttacaatgcttacttttgaaggga

SEQ ID NO: 73442 - DNA, 25 bp, Probe sequence
ttttacaatgcttacttttgaaggg

SEQ ID NO: 73443 - DNA, 25 bp, Probe sequence
acaatgcttacttttgaagggagta

SEQ ID NO: 73444 - DNA, 25 bp, Probe sequence
tgatgatgaagacgattgagtaaga

SEQ ID NO: 73445 - DNA, 25 bp, Probe sequence
atgatgatgaagacgattgagtaag

SEQ ID NO: 73446 - DNA, 25 bp, Probe sequence
gatgatgaagacgattgagtaagaa

SEQ ID NO: 73447 - DNA, 25 bp, Probe sequence
gcacttagcgataactatattgaga

SEQ ID NO: 73448 - DNA, 25 bp, Probe sequence
ttaagcatgatgatgaagacgattg

SEQ ID NO: 73449 - DNA, 25 bp, Probe sequence
taagcatgatgatgaagacgattga

SEQ ID NO: 73450 - DNA, 25 bp, Probe sequence
catgatgatgaagacgattgagtaa

SEQ ID NO: 73451 - DNA, 25 bp, Probe sequence
gcatgatgatgaagacgattgagta

SEQ ID NO: 73452 - DNA, 25 bp, Probe sequence
aagcatgatgatgaagacgattgag

SEQ ID NO: 73453 - DNA, 25 bp, Probe sequence
tcttactcaatcgtcttcatcatca

SEQ ID NO: 73454 - DNA, 25 bp, Probe sequence
cttactcaatcgtcttcatcatcat

SEQ ID NO: 73455 - DNA, 25 bp, Probe sequence
ttcttactcaatcgtcttcatcatc

SEQ ID NO: 73456 - DNA, 25 bp, Probe sequence
tctcaatatagttatcgctaagtgc

SEQ ID NO: 73457 - DNA, 25 bp, Probe sequence
caatcgtcttcatcatcatgcttaa

SEQ ID NO: 73458 - DNA, 25 bp, Probe sequence
tcaatcgtcttcatcatcatgctta

SEQ ID NO: 73459 - DNA, 25 bp, Probe sequence
tactcaatcgtcttcatcatcatgc

SEQ ID NO: 73460 - DNA, 25 bp, Probe sequence
ttactcaatcgtcttcatcatcatg

SEQ ID NO: 73461 - DNA, 25 bp, Probe sequence
ctcaatcgtcttcatcatcatgctt

SEQ ID NO: 73462 - DNA, 25 bp, Probe sequence
acttctttcttcacttattaaggcg

SEQ ID NO: 73463 - DNA, 25 bp, Probe sequence
cttctttcttcacttattaaggcga

SEQ ID NO: 73464 - DNA, 25 bp, Probe sequence
ttctttcttcacttattaaggcgaa

SEQ ID NO: 73465 - DNA, 25 bp, Probe sequence
gacttctttcttcacttattaaggc

SEQ ID NO: 73466 - DNA, 25 bp, Probe sequence
cgacttctttcttcacttattaagg

SEQ ID NO: 73467 - DNA, 25 bp, Probe sequence
catatcaagaaagtaaattggctgt

SEQ ID NO: 73468 - DNA, 25 bp, Probe sequence
tcatatcaagaaagtaaattggctg

SEQ ID NO: 73469 - DNA, 25 bp, Probe sequence
ccgatcatgacattcttattcttct

SEQ ID NO: 73470 - DNA, 25 bp, Probe sequence
acgacttctttcttcacttattaag

SEQ ID NO: 73471 - DNA, 25 bp, Probe sequence
cgccttaataagtgaagaaagaagt

SEQ ID NO: 73472 - DNA, 25 bp, Probe sequence
tcgccttaataagtgaagaaagaag

SEQ ID NO: 73473 - DNA, 25 bp, Probe sequence
ttcgccttaataagtgaagaaagaa

SEQ ID NO: 73474 - DNA, 25 bp, Probe sequence
gccttaataagtgaagaaagaagtc

SEQ ID NO: 73475 - DNA, 25 bp, Probe sequence
ccttaataagtgaagaaagaagtcg

SEQ ID NO: 73476 - DNA, 25 bp, Probe sequence
acagccaatttactttcttgatatg

SEQ ID NO: 73477 - DNA, 25 bp, Probe sequence
cagccaatttactttcttgatatga

SEQ ID NO: 73478 - DNA, 25 bp, Probe sequence
agaagaataagaatgtcatgatcgg

SEQ ID NO: 73479 - DNA, 25 bp, Probe sequence
attacagccaatttactttcttgat

SEQ ID NO: 73480 - DNA, 25 bp, Probe sequence
cgcttcctaacctgccattatatat

SEQ ID NO: 73481 - DNA, 25 bp, Probe sequence
gcttcctaacctgccattatatatt

SEQ ID NO: 73482 - DNA, 25 bp, Probe sequence
cctaacctgccattatatatttcac

SEQ ID NO: 73483 - DNA, 25 bp, Probe sequence
tcctaacctgccattatatatttca

SEQ ID NO: 73484 - DNA, 25 bp, Probe sequence
ccaaaatgaacaggttaggaacaaa

SEQ ID NO: 73485 - DNA, 25 bp, Probe sequence
aacaggttaggaacaaaattatgcg

SEQ ID NO: 73486 - DNA, 25 bp, Probe sequence
gaacaggttaggaacaaaattatgc

SEQ ID NO: 73487 - DNA, 25 bp, Probe sequence
caaaatgaacaggttaggaacaaaa

SEQ ID NO: 73488 - DNA, 25 bp, Probe sequence
ctaacctgccattatatatttcact

SEQ ID NO: 73489 - DNA, 25 bp, Probe sequence
atatataatggcaggttaggaagcg

SEQ ID NO: 73490 - DNA, 25 bp, Probe sequence
aatatataatggcaggttaggaagc

SEQ ID NO: 73491 - DNA, 25 bp, Probe sequence
gtgaaatatataatggcaggttagg

SEQ ID NO: 73492 - DNA, 25 bp, Probe sequence
tgaaatatataatggcaggttagga

SEQ ID NO: 73493 - DNA, 25 bp, Probe sequence
tttgttcctaacctgttcattttgg

SEQ ID NO: 73494 - DNA, 25 bp, Probe sequence
cgcataattttgttcctaacctgtt

SEQ ID NO: 73495 - DNA, 25 bp, Probe sequence
gcataattttgttcctaacctgttc

SEQ ID NO: 73496 - DNA, 25 bp, Probe sequence
ttttgttcctaacctgttcattttg

SEQ ID NO: 73497 - DNA, 25 bp, Probe sequence
agtgaaatatataatggcaggttag

SEQ ID NO: 73498 - DNA, 25 bp, Probe sequence
ttaacttcatctttgtttcgtctaa

SEQ ID NO: 73499 - DNA, 25 bp, Probe sequence
tttaacttcatctttgtttcgtcta

SEQ ID NO: 73500 - DNA, 25 bp, Probe sequence
aacttcatctttgtttcgtctaata

SEQ ID NO: 73501 - DNA, 25 bp, Probe sequence
taacttcatctttgtttcgtctaat

SEQ ID NO: 73502 - DNA, 25 bp, Probe sequence
ttttaacttcatctttgtttcgtct

SEQ ID NO: 73503 - DNA, 25 bp, Probe sequence
attttaacttcatctttgtttcgtc

SEQ ID NO: 73504 - DNA, 25 bp, Probe sequence
tattttaacttcatctttgtttcgt

SEQ ID NO: 73505 - DNA, 25 bp, Probe sequence
tcttatccctctacttaaaattcat

SEQ ID NO: 73506 - DNA, 25 bp, Probe sequence
atcttatccctctacttaaaattca

SEQ ID NO: 73507 - DNA, 25 bp, Probe sequence
tagacgaaacaaagatgaagttaaa

SEQ ID NO: 73508 - DNA, 25 bp, Probe sequence
ttagacgaaacaaagatgaagttaa

SEQ ID NO: 73509 - DNA, 25 bp, Probe sequence
attagacgaaacaaagatgaagtta

SEQ ID NO: 73510 - DNA, 25 bp, Probe sequence
tattagacgaaacaaagatgaagtt

SEQ ID NO: 73511 - DNA, 25 bp, Probe sequence
agacgaaacaaagatgaagttaaaa

SEQ ID NO: 73512 - DNA, 25 bp, Probe sequence
gacgaaacaaagatgaagttaaaat

SEQ ID NO: 73513 - DNA, 25 bp, Probe sequence
acgaaacaaagatgaagttaaaata

SEQ ID NO: 73514 - DNA, 25 bp, Probe sequence
tgaattttaagtagagggataagat

SEQ ID NO: 73515 - DNA, 25 bp, Probe sequence
atgaattttaagtagagggataaga

SEQ ID NO: 73516 - DNA, 25 bp, Probe sequence
gccgttcttcattatatagacttcg

SEQ ID NO: 73517 - DNA, 25 bp, Probe sequence
tgccgttcttcattatatagacttc

SEQ ID NO: 73518 - DNA, 25 bp, Probe sequence
ccgttcttcattatatagacttcgt

SEQ ID NO: 73519 - DNA, 25 bp, Probe sequence
ttgccgttcttcattatatagactt

SEQ ID NO: 73520 - DNA, 25 bp, Probe sequence
tatagacttcgtcagttatgctatt

SEQ ID NO: 73521 - DNA, 25 bp, Probe sequence
cgttcttcattatatagacttcgtc

SEQ ID NO: 73522 - DNA, 25 bp, Probe sequence
atatagacttcgtcagttatgctat

SEQ ID NO: 73523 - DNA, 25 bp, Probe sequence
ttatatagacttcgtcagttatgct

SEQ ID NO: 73524 - DNA, 25 bp, Probe sequence
tatcgttaaagaccaacttgtatct

SEQ ID NO: 73525 - DNA, 25 bp, Probe sequence
cgaagtctatataatgaagaacggc

SEQ ID NO: 73526 - DNA, 25 bp, Probe sequence
gaagtctatataatgaagaacggca

SEQ ID NO: 73527 - DNA, 25 bp, Probe sequence
acgaagtctatataatgaagaacgg

SEQ ID NO: 73528 - DNA, 25 bp, Probe sequence
aagtctatataatgaagaacggcaa

SEQ ID NO: 73529 - DNA, 25 bp, Probe sequence
aatagcataactgacgaagtctata

SEQ ID NO: 73530 - DNA, 25 bp, Probe sequence
gacgaagtctatataatgaagaacg

SEQ ID NO: 73531 - DNA, 25 bp, Probe sequence
atagcataactgacgaagtctatat

SEQ ID NO: 73532 - DNA, 25 bp, Probe sequence
agcataactgacgaagtctatataa

SEQ ID NO: 73533 - DNA, 25 bp, Probe sequence
agatacaagttggtctttaacgata

SEQ ID NO: 73534 - DNA, 25 bp, Probe sequence
cgcttcctatattggtatgcaagta

SEQ ID NO: 73535 - DNA, 25 bp, Probe sequence
aagcctcctttaagtcattcatcac

SEQ ID NO: 73536 - DNA, 25 bp, Probe sequence
gcctcctttaagtcattcatcacta

SEQ ID NO: 73537 - DNA, 25 bp, Probe sequence
gcttcctatattggtatgcaagtat

SEQ ID NO: 73538 - DNA, 25 bp, Probe sequence
cctcctttaagtcattcatcactaa

SEQ ID NO: 73539 - DNA, 25 bp, Probe sequence
agcctcctttaagtcattcatcact

SEQ ID NO: 73540 - DNA, 25 bp, Probe sequence
aaagcctcctttaagtcattcatca

SEQ ID NO: 73541 - DNA, 25 bp, Probe sequence
ctcctttaagtcattcatcactaaa

SEQ ID NO: 73542 - DNA, 25 bp, Probe sequence
cttcctatattggtatgcaagtatt

SEQ ID NO: 73543 - DNA, 25 bp, Probe sequence
tacttgcataccaatataggaagcg

SEQ ID NO: 73544 - DNA, 25 bp, Probe sequence
gtgatgaatgacttaaaggaggctt

SEQ ID NO: 73545 - DNA, 25 bp, Probe sequence
tagtgatgaatgacttaaaggaggc

SEQ ID NO: 73546 - DNA, 25 bp, Probe sequence
atacttgcataccaatataggaagc

SEQ ID NO: 73547 - DNA, 25 bp, Probe sequence
agtgatgaatgacttaaaggaggct

SEQ ID NO: 73548 - DNA, 25 bp, Probe sequence
ttagtgatgaatgacttaaaggagg

SEQ ID NO: 73549 - DNA, 25 bp, Probe sequence
tgatgaatgacttaaaggaggcttt

SEQ ID NO: 73550 - DNA, 25 bp, Probe sequence
tttagtgatgaatgacttaaaggag

SEQ ID NO: 73551 - DNA, 25 bp, Probe sequence
tgaaattaaagtagcacctcataaa

SEQ ID NO: 73552 - DNA, 25 bp, Probe sequence
tcaaaattatgactaacattggtac

SEQ ID NO: 73553 - DNA, 25 bp, Probe sequence
aatcaaaattatgactaacattggt

SEQ ID NO: 73554 - DNA, 25 bp, Probe sequence
aattatgactaacattggtaccttt

SEQ ID NO: 73555 - DNA, 25 bp, Probe sequence
aaattatgactaacattggtacctt

SEQ ID NO: 73556 - DNA, 25 bp, Probe sequence
caaaattatgactaacattggtacc

SEQ ID NO: 73557 - DNA, 25 bp, Probe sequence
attatgactaacattggtacctttt

SEQ ID NO: 73558 - DNA, 25 bp, Probe sequence
aaaattatgactaacattggtacct

SEQ ID NO: 73559 - DNA, 25 bp, Probe sequence
accaatgttagtcataattttgatt

SEQ ID NO: 73560 - DNA, 25 bp, Probe sequence
gtaccaatgttagtcataattttga

SEQ ID NO: 73561 - DNA, 25 bp, Probe sequence
aaggtaccaatgttagtcataattt

SEQ ID NO: 73562 - DNA, 25 bp, Probe sequence
aaaggtaccaatgttagtcataatt

SEQ ID NO: 73563 - DNA, 25 bp, Probe sequence
ggtaccaatgttagtcataattttg

SEQ ID NO: 73564 - DNA, 25 bp, Probe sequence
aggtaccaatgttagtcataatttt

SEQ ID NO: 73565 - DNA, 25 bp, Probe sequence
aaaaggtaccaatgttagtcataat

SEQ ID NO: 73566 - DNA, 25 bp, Probe sequence
attagtgcagatagataaccattgt

SEQ ID NO: 73567 - DNA, 25 bp, Probe sequence
ttagtgcagatagataaccattgtt

SEQ ID NO: 73568 - DNA, 25 bp, Probe sequence
ccttattagtgcagatagataacca

SEQ ID NO: 73569 - DNA, 25 bp, Probe sequence
accttattagtgcagatagataacc

SEQ ID NO: 73570 - DNA, 25 bp, Probe sequence
tgattatctaccttattagtgcaga

SEQ ID NO: 73571 - DNA, 25 bp, Probe sequence
agtgcagatagataaccattgttta

SEQ ID NO: 73572 - DNA, 25 bp, Probe sequence
tagtgcagatagataaccattgttt

SEQ ID NO: 73573 - DNA, 25 bp, Probe sequence
caatgattatctaccttattagtgc

SEQ ID NO: 73574 - DNA, 25 bp, Probe sequence
tattagtgcagatagataaccattg

SEQ ID NO: 73575 - DNA, 25 bp, Probe sequence
acaatggttatctatctgcactaat

SEQ ID NO: 73576 - DNA, 25 bp, Probe sequence
aacaatggttatctatctgcactaa

SEQ ID NO: 73577 - DNA, 25 bp, Probe sequence
ggttatctatctgcactaataaggt

SEQ ID NO: 73578 - DNA, 25 bp, Probe sequence
tggttatctatctgcactaataagg

SEQ ID NO: 73579 - DNA, 25 bp, Probe sequence
tctgcactaataaggtagataatca

SEQ ID NO: 73580 - DNA, 25 bp, Probe sequence
gcactaataaggtagataatcattg

SEQ ID NO: 73581 - DNA, 25 bp, Probe sequence
aaacaatggttatctatctgcacta

SEQ ID NO: 73582 - DNA, 25 bp, Probe sequence
taaacaatggttatctatctgcact

SEQ ID NO: 73583 - DNA, 25 bp, Probe sequence
caatggttatctatctgcactaata

SEQ ID NO: 73584 - DNA, 25 bp, Probe sequence
acgcattaatctattaaagtgtagc

SEQ ID NO: 73585 - DNA, 25 bp, Probe sequence
gcattaatctattaaagtgtagcga

SEQ ID NO: 73586 - DNA, 25 bp, Probe sequence
cgaaacaacccctataattttattc

SEQ ID NO: 73587 - DNA, 25 bp, Probe sequence
attctttatgtcattttaacgcatt

SEQ ID NO: 73588 - DNA, 25 bp, Probe sequence
aacgcattaatctattaaagtgtag

SEQ ID NO: 73589 - DNA, 25 bp, Probe sequence
ttattctttatgtcattttaacgca

SEQ ID NO: 73590 - DNA, 25 bp, Probe sequence
tcgaaacaacccctataattttatt

SEQ ID NO: 73591 - DNA, 25 bp, Probe sequence
ttctttatgtcattttaacgcatta

SEQ ID NO: 73592 - DNA, 25 bp, Probe sequence
cattaatctattaaagtgtagcgat

SEQ ID NO: 73593 - DNA, 25 bp, Probe sequence
gctacactttaatagattaatgcgt

SEQ ID NO: 73594 - DNA, 25 bp, Probe sequence
tcgctacactttaatagattaatgc

SEQ ID NO: 73595 - DNA, 25 bp, Probe sequence
gaataaaattataggggttgtttcg

SEQ ID NO: 73596 - DNA, 25 bp, Probe sequence
aatgcgttaaaatgacataaagaat

SEQ ID NO: 73597 - DNA, 25 bp, Probe sequence
ctacactttaatagattaatgcgtt

SEQ ID NO: 73598 - DNA, 25 bp, Probe sequence
aataaaattataggggttgtttcga

SEQ ID NO: 73599 - DNA, 25 bp, Probe sequence
tgcgttaaaatgacataaagaataa

SEQ ID NO: 73600 - DNA, 25 bp, Probe sequence
taatgcgttaaaatgacataaagaa

SEQ ID NO: 73601 - DNA, 25 bp, Probe sequence
acactttaatagattaatgcgttaa

SEQ ID NO: 73602 - DNA, 25 bp, Probe sequence
ctcttcacagtttaacagaattggt

SEQ ID NO: 73603 - DNA, 25 bp, Probe sequence
gacataaattgactacgcttctttc

SEQ ID NO: 73604 - DNA, 25 bp, Probe sequence
tcttcacagtttaacagaattggtt

SEQ ID NO: 73605 - DNA, 25 bp, Probe sequence
agaaagacataaattgactacgctt

SEQ ID NO: 73606 - DNA, 25 bp, Probe sequence
actcttcacagtttaacagaattgg

SEQ ID NO: 73607 - DNA, 25 bp, Probe sequence
actctactcttcacagtttaacaga

SEQ ID NO: 73608 - DNA, 25 bp, Probe sequence
agacataaattgactacgcttcttt

SEQ ID NO: 73609 - DNA, 25 bp, Probe sequence
aaagacataaattgactacgcttct

SEQ ID NO: 73610 - DNA, 25 bp, Probe sequence
gaaagacataaattgactacgcttc

SEQ ID NO: 73611 - DNA, 25 bp, Probe sequence
accaattctgttaaactgtgaagag

SEQ ID NO: 73612 - DNA, 25 bp, Probe sequence
aaccaattctgttaaactgtgaaga

SEQ ID NO: 73613 - DNA, 25 bp, Probe sequence
gaaagaagcgtagtcaatttatgtc

SEQ ID NO: 73614 - DNA, 25 bp, Probe sequence
ccaattctgttaaactgtgaagagt

SEQ ID NO: 73615 - DNA, 25 bp, Probe sequence
aagcgtagtcaatttatgtctttct

SEQ ID NO: 73616 - DNA, 25 bp, Probe sequence
tctgttaaactgtgaagagtagagt

SEQ ID NO: 73617 - DNA, 25 bp, Probe sequence
agaagcgtagtcaatttatgtcttt

SEQ ID NO: 73618 - DNA, 25 bp, Probe sequence
aaagaagcgtagtcaatttatgtct

SEQ ID NO: 73619 - DNA, 25 bp, Probe sequence
gaagcgtagtcaatttatgtctttc

SEQ ID NO: 73620 - DNA, 25 bp, Probe sequence
agcctttcctcttcaaatagtcttt

SEQ ID NO: 73621 - DNA, 25 bp, Probe sequence
tagcctttcctcttcaaatagtctt

SEQ ID NO: 73622 - DNA, 25 bp, Probe sequence
atagcctttcctcttcaaatagtct

SEQ ID NO: 73623 - DNA, 25 bp, Probe sequence
aaactttgaatagcctttcctcttc

SEQ ID NO: 73624 - DNA, 25 bp, Probe sequence
gcctttcctcttcaaatagtcttta

SEQ ID NO: 73625 - DNA, 25 bp, Probe sequence
aatagcctttcctcttcaaatagtc

SEQ ID NO: 73626 - DNA, 25 bp, Probe sequence
ctcatacaatatggatcgagcatct

SEQ ID NO: 73627 - DNA, 25 bp, Probe sequence
tctcatacaatatggatcgagcatc

SEQ ID NO: 73628 - DNA, 25 bp, Probe sequence
catacaatatggatcgagcatcttg

SEQ ID NO: 73629 - DNA, 25 bp, Probe sequence
aaagactatttgaagaggaaaggct

SEQ ID NO: 73630 - DNA, 25 bp, Probe sequence
aagactatttgaagaggaaaggcta

SEQ ID NO: 73631 - DNA, 25 bp, Probe sequence
agactatttgaagaggaaaggctat

SEQ ID NO: 73632 - DNA, 25 bp, Probe sequence
gaagaggaaaggctattcaaagttt

SEQ ID NO: 73633 - DNA, 25 bp, Probe sequence
taaagactatttgaagaggaaaggc

SEQ ID NO: 73634 - DNA, 25 bp, Probe sequence
gactatttgaagaggaaaggctatt

SEQ ID NO: 73635 - DNA, 25 bp, Probe sequence
gatgctcgatccatattgtatgaga

SEQ ID NO: 73636 - DNA, 25 bp, Probe sequence
agatgctcgatccatattgtatgag

SEQ ID NO: 73637 - DNA, 25 bp, Probe sequence
atgctcgatccatattgtatgagaa

SEQ ID NO: 73638 - DNA, 25 bp, Probe sequence
aactgcttcaacctaaccttaatga

SEQ ID NO: 73639 - DNA, 25 bp, Probe sequence
tgaagtagtctagctgaatgtggtt

SEQ ID NO: 73640 - DNA, 25 bp, Probe sequence
tacactgaagtagtctagctgaatg

SEQ ID NO: 73641 - DNA, 25 bp, Probe sequence
aaataccaaactgcttcaacctaac

SEQ ID NO: 73642 - DNA, 25 bp, Probe sequence
aaactgcttcaacctaaccttaatg

SEQ ID NO: 73643 - DNA, 25 bp, Probe sequence
caaactgcttcaacctaaccttaat

SEQ ID NO: 73644 - DNA, 25 bp, Probe sequence
ctgaagtagtctagctgaatgtggt

SEQ ID NO: 73645 - DNA, 25 bp, Probe sequence
atacactgaagtagtctagctgaat

SEQ ID NO: 73646 - DNA, 25 bp, Probe sequence
aataccaaactgcttcaacctaacc

SEQ ID NO: 73647 - DNA, 25 bp, Probe sequence
tcattaaggttaggttgaagcagtt

SEQ ID NO: 73648 - DNA, 25 bp, Probe sequence
cattcagctagactacttcagtgta

SEQ ID NO: 73649 - DNA, 25 bp, Probe sequence
aaccacattcagctagactacttca

SEQ ID NO: 73650 - DNA, 25 bp, Probe sequence
gttaggttgaagcagtttggtattt

SEQ ID NO: 73651 - DNA, 25 bp, Probe sequence
attaaggttaggttgaagcagtttg

SEQ ID NO: 73652 - DNA, 25 bp, Probe sequence
cattaaggttaggttgaagcagttt

SEQ ID NO: 73653 - DNA, 25 bp, Probe sequence
attcagctagactacttcagtgtat

SEQ ID NO: 73654 - DNA, 25 bp, Probe sequence
accacattcagctagactacttcag

SEQ ID NO: 73655 - DNA, 25 bp, Probe sequence
ttaggttgaagcagtttggtattta

SEQ ID NO: 73656 - DNA, 25 bp, Probe sequence
actataatataaagcgaggtgttgt

SEQ ID NO: 73657 - DNA, 25 bp, Probe sequence
gactataatataaagcgaggtgttg

SEQ ID NO: 73658 - DNA, 25 bp, Probe sequence
agactataatataaagcgaggtgtt

SEQ ID NO: 73659 - DNA, 25 bp, Probe sequence
ctataatataaagcgaggtgttgtt

SEQ ID NO: 73660 - DNA, 25 bp, Probe sequence
tagactataatataaagcgaggtgt

SEQ ID NO: 73661 - DNA, 25 bp, Probe sequence
tgtagactataatataaagcgaggt

SEQ ID NO: 73662 - DNA, 25 bp, Probe sequence
agagccccttaatttccatactttt

SEQ ID NO: 73663 - DNA, 25 bp, Probe sequence
aagagccccttaatttccatacttt

SEQ ID NO: 73664 - DNA, 25 bp, Probe sequence
gtagactataatataaagcgaggtg

SEQ ID NO: 73665 - DNA, 25 bp, Probe sequence
acaacacctcgctttatattatagt

SEQ ID NO: 73666 - DNA, 25 bp, Probe sequence
caacacctcgctttatattatagtc

SEQ ID NO: 73667 - DNA, 25 bp, Probe sequence
aacacctcgctttatattatagtct

SEQ ID NO: 73668 - DNA, 25 bp, Probe sequence
aacaacacctcgctttatattatag

SEQ ID NO: 73669 - DNA, 25 bp, Probe sequence
acctcgctttatattatagtctaca

SEQ ID NO: 73670 - DNA, 25 bp, Probe sequence
acacctcgctttatattatagtcta

SEQ ID NO: 73671 - DNA, 25 bp, Probe sequence
aaaagtatggaaattaaggggctct

SEQ ID NO: 73672 - DNA, 25 bp, Probe sequence
aaagtatggaaattaaggggctctt

SEQ ID NO: 73673 - DNA, 25 bp, Probe sequence
cacctcgctttatattatagtctac

SEQ ID NO: 73674 - DNA, 25 bp, Probe sequence
attcttaatcctaatgtcatgcgaa

SEQ ID NO: 73675 - DNA, 25 bp, Probe sequence
ttatgacaagctacttcaactcact

SEQ ID NO: 73676 - DNA, 25 bp, Probe sequence
atgacaagctacttcaactcactat

SEQ ID NO: 73677 - DNA, 25 bp, Probe sequence
tattcttaatcctaatgtcatgcga

SEQ ID NO: 73678 - DNA, 25 bp, Probe sequence
ctattcttaatcctaatgtcatgcg

SEQ ID NO: 73679 - DNA, 25 bp, Probe sequence
tgacaagctacttcaactcactata

SEQ ID NO: 73680 - DNA, 25 bp, Probe sequence
tatgacaagctacttcaactcacta

SEQ ID NO: 73681 - DNA, 25 bp, Probe sequence
attatgacaagctacttcaactcac

SEQ ID NO: 73682 - DNA, 25 bp, Probe sequence
gattatgacaagctacttcaactca

SEQ ID NO: 73683 - DNA, 25 bp, Probe sequence
ttcgcatgacattaggattaagaat

SEQ ID NO: 73684 - DNA, 25 bp, Probe sequence
agtgagttgaagtagcttgtcataa

SEQ ID NO: 73685 - DNA, 25 bp, Probe sequence
atagtgagttgaagtagcttgtcat

SEQ ID NO: 73686 - DNA, 25 bp, Probe sequence
tcgcatgacattaggattaagaata

SEQ ID NO: 73687 - DNA, 25 bp, Probe sequence
cgcatgacattaggattaagaatag

SEQ ID NO: 73688 - DNA, 25 bp, Probe sequence
tagtgagttgaagtagcttgtcata

SEQ ID NO: 73689 - DNA, 25 bp, Probe sequence
tatagtgagttgaagtagcttgtca

SEQ ID NO: 73690 - DNA, 25 bp, Probe sequence
gtgagttgaagtagcttgtcataat

SEQ ID NO: 73691 - DNA, 25 bp, Probe sequence
gagttgaagtagcttgtcataatca

SEQ ID NO: 73692 - DNA, 25 bp, Probe sequence
attatttgttgattgcgtgatttgc

SEQ ID NO: 73693 - DNA, 25 bp, Probe sequence
tcgtgttaggttgatttagcagata

SEQ ID NO: 73694 - DNA, 25 bp, Probe sequence
cgtgttaggttgatttagcagatag

SEQ ID NO: 73695 - DNA, 25 bp, Probe sequence
atcgtgttaggttgatttagcagat

SEQ ID NO: 73696 - DNA, 25 bp, Probe sequence
ttatttgttgattgcgtgatttgct

SEQ ID NO: 73697 - DNA, 25 bp, Probe sequence
tatttgttgattgcgtgatttgctc

SEQ ID NO: 73698 - DNA, 25 bp, Probe sequence
gtgttaggttgatttagcagatagt

SEQ ID NO: 73699 - DNA, 25 bp, Probe sequence
atagtcataaatctcgtgatgccat

SEQ ID NO: 73700 - DNA, 25 bp, Probe sequence
tgttaggttgatttagcagatagtc

SEQ ID NO: 73701 - DNA, 25 bp, Probe sequence
tatctgctaaatcaacctaacacga

SEQ ID NO: 73702 - DNA, 25 bp, Probe sequence
gcaaatcacgcaatcaacaaataat

SEQ ID NO: 73703 - DNA, 25 bp, Probe sequence
ctatctgctaaatcaacctaacacg

SEQ ID NO: 73704 - DNA, 25 bp, Probe sequence
atctgctaaatcaacctaacacgat

SEQ ID NO: 73705 - DNA, 25 bp, Probe sequence
agcaaatcacgcaatcaacaaataa

SEQ ID NO: 73706 - DNA, 25 bp, Probe sequence
gagcaaatcacgcaatcaacaaata

SEQ ID NO: 73707 - DNA, 25 bp, Probe sequence
actatctgctaaatcaacctaacac

SEQ ID NO: 73708 - DNA, 25 bp, Probe sequence
atggcatcacgagatttatgactat

SEQ ID NO: 73709 - DNA, 25 bp, Probe sequence
gactatctgctaaatcaacctaaca

SEQ ID NO: 73710 - DNA, 25 bp, Probe sequence
caatttacaagggagatatttgaca

SEQ ID NO: 73711 - DNA, 25 bp, Probe sequence
acaatttacaagggagatatttgac

SEQ ID NO: 73712 - DNA, 25 bp, Probe sequence
aaagaatacaatttacaagggagat

SEQ ID NO: 73713 - DNA, 25 bp, Probe sequence
tacaatttacaagggagatatttga

SEQ ID NO: 73714 - DNA, 25 bp, Probe sequence
taaagaatacaatttacaagggaga

SEQ ID NO: 73715 - DNA, 25 bp, Probe sequence
aagaatacaatttacaagggagata

SEQ ID NO: 73716 - DNA, 25 bp, Probe sequence
agaatacaatttacaagggagatat

SEQ ID NO: 73717 - DNA, 25 bp, Probe sequence
atacaatttacaagggagatatttg

SEQ ID NO: 73718 - DNA, 25 bp, Probe sequence
ataaagaatacaatttacaagggag

SEQ ID NO: 73719 - DNA, 25 bp, Probe sequence
gtcaaatatctcccttgtaaattgt

SEQ ID NO: 73720 - DNA, 25 bp, Probe sequence
tgtcaaatatctcccttgtaaattg

SEQ ID NO: 73721 - DNA, 25 bp, Probe sequence
atctcccttgtaaattgtattcttt

SEQ ID NO: 73722 - DNA, 25 bp, Probe sequence
tctcccttgtaaattgtattcttta

SEQ ID NO: 73723 - DNA, 25 bp, Probe sequence
tcaaatatctcccttgtaaattgta

SEQ ID NO: 73724 - DNA, 25 bp, Probe sequence
tatctcccttgtaaattgtattctt

SEQ ID NO: 73725 - DNA, 25 bp, Probe sequence
atatctcccttgtaaattgtattct

SEQ ID NO: 73726 - DNA, 25 bp, Probe sequence
ctcccttgtaaattgtattctttat

SEQ ID NO: 73727 - DNA, 25 bp, Probe sequence
caaatatctcccttgtaaattgtat

SEQ ID NO: 73728 - DNA, 25 bp, Probe sequence
cctaacccacagattagtgatttct

SEQ ID NO: 73729 - DNA, 25 bp, Probe sequence
tcctaacccacagattagtgatttc

SEQ ID NO: 73730 - DNA, 25 bp, Probe sequence
atcctaacccacagattagtgattt

SEQ ID NO: 73731 - DNA, 25 bp, Probe sequence
ctatcctaacccacagattagtgat

SEQ ID NO: 73732 - DNA, 25 bp, Probe sequence
tatcctaacccacagattagtgatt

SEQ ID NO: 73733 - DNA, 25 bp, Probe sequence
gctatcctaacccacagattagtga

SEQ ID NO: 73734 - DNA, 25 bp, Probe sequence
cccacagattagtgatttctataca

SEQ ID NO: 73735 - DNA, 25 bp, Probe sequence
acccacagattagtgatttctatac

SEQ ID NO: 73736 - DNA, 25 bp, Probe sequence
ctaacccacagattagtgatttcta

SEQ ID NO: 73737 - DNA, 25 bp, Probe sequence
gaaatcactaatctgtgggttagga

SEQ ID NO: 73738 - DNA, 25 bp, Probe sequence
agaaatcactaatctgtgggttagg

SEQ ID NO: 73739 - DNA, 25 bp, Probe sequence
aaatcactaatctgtgggttaggat

SEQ ID NO: 73740 - DNA, 25 bp, Probe sequence
atcactaatctgtgggttaggatag

SEQ ID NO: 73741 - DNA, 25 bp, Probe sequence
tcactaatctgtgggttaggatagc

SEQ ID NO: 73742 - DNA, 25 bp, Probe sequence
aatcactaatctgtgggttaggata

SEQ ID NO: 73743 - DNA, 25 bp, Probe sequence
gtatagaaatcactaatctgtgggt

SEQ ID NO: 73744 - DNA, 25 bp, Probe sequence
tgtatagaaatcactaatctgtggg

SEQ ID NO: 73745 - DNA, 25 bp, Probe sequence
tagaaatcactaatctgtgggttag

SEQ ID NO: 73746 - DNA, 25 bp, Probe sequence
atcatataaggaggttcttttcatt

SEQ ID NO: 73747 - DNA, 25 bp, Probe sequence
aatcatataaggaggttcttttcat

SEQ ID NO: 73748 - DNA, 25 bp, Probe sequence
ccaaaataatcatataaggaggttc

SEQ ID NO: 73749 - DNA, 25 bp, Probe sequence
taatcatataaggaggttcttttca

SEQ ID NO: 73750 - DNA, 25 bp, Probe sequence
tccaaaataatcatataaggaggtt

SEQ ID NO: 73751 - DNA, 25 bp, Probe sequence
ttccaaaataatcatataaggaggt

SEQ ID NO: 73752 - DNA, 25 bp, Probe sequence
atgaaaagaacctccttatatgatt

SEQ ID NO: 73753 - DNA, 25 bp, Probe sequence
aatgaaaagaacctccttatatgat

SEQ ID NO: 73754 - DNA, 25 bp, Probe sequence
gaacctccttatatgattattttgg

SEQ ID NO: 73755 - DNA, 25 bp, Probe sequence
tgaaaagaacctccttatatgatta

SEQ ID NO: 73756 - DNA, 25 bp, Probe sequence
acctccttatatgattattttggaa

SEQ ID NO: 73757 - DNA, 25 bp, Probe sequence
aacctccttatatgattattttgga

SEQ ID NO: 73758 - DNA, 25 bp, Probe sequence
tgcttccataatttgatgttcttga

SEQ ID NO: 73759 - DNA, 25 bp, Probe sequence
gcttccataatttgatgttcttgaa

SEQ ID NO: 73760 - DNA, 25 bp, Probe sequence
atgcttccataatttgatgttcttg

SEQ ID NO: 73761 - DNA, 25 bp, Probe sequence
ccatgcttccataatttgatgttct

SEQ ID NO: 73762 - DNA, 25 bp, Probe sequence
accatgcttccataatttgatgttc

SEQ ID NO: 73763 - DNA, 25 bp, Probe sequence
aaaccatgcttccataatttgatgt

SEQ ID NO: 73764 - DNA, 25 bp, Probe sequence
aaccatgcttccataatttgatgtt

SEQ ID NO: 73765 - DNA, 25 bp, Probe sequence
catgcttccataatttgatgttctt

SEQ ID NO: 73766 - DNA, 25 bp, Probe sequence
taaaccatgcttccataatttgatg

SEQ ID NO: 73767 - DNA, 25 bp, Probe sequence
tcaagaacatcaaattatggaagca

SEQ ID NO: 73768 - DNA, 25 bp, Probe sequence
caagaacatcaaattatggaagcat

SEQ ID NO: 73769 - DNA, 25 bp, Probe sequence
ttcaagaacatcaaattatggaagc

SEQ ID NO: 73770 - DNA, 25 bp, Probe sequence
gaacatcaaattatggaagcatggt

SEQ ID NO: 73771 - DNA, 25 bp, Probe sequence
agaacatcaaattatggaagcatgg

SEQ ID NO: 73772 - DNA, 25 bp, Probe sequence
acatcaaattatggaagcatggttt

SEQ ID NO: 73773 - DNA, 25 bp, Probe sequence
aacatcaaattatggaagcatggtt

SEQ ID NO: 73774 - DNA, 25 bp, Probe sequence
aagaacatcaaattatggaagcatg

SEQ ID NO: 73775 - DNA, 25 bp, Probe sequence
catcaaattatggaagcatggttta

SEQ ID NO: 73776 - DNA, 25 bp, Probe sequence
ttacacgagcattaattattaacgc

SEQ ID NO: 73777 - DNA, 25 bp, Probe sequence
tgctgtgatatgtcattattcgatt

SEQ ID NO: 73778 - DNA, 25 bp, Probe sequence
ttgctgtgatatgtcattattcgat

SEQ ID NO: 73779 - DNA, 25 bp, Probe sequence
aagaactatttgctgtgatatgtca

SEQ ID NO: 73780 - DNA, 25 bp, Probe sequence
agaactatttgctgtgatatgtcat

SEQ ID NO: 73781 - DNA, 25 bp, Probe sequence
aaagaactatttgctgtgatatgtc

SEQ ID NO: 73782 - DNA, 25 bp, Probe sequence
atttgctgtgatatgtcattattcg

SEQ ID NO: 73783 - DNA, 25 bp, Probe sequence
caatcatttatcatttccttaacgc

SEQ ID NO: 73784 - DNA, 25 bp, Probe sequence
aatcatttatcatttccttaacgct

SEQ ID NO: 73785 - DNA, 25 bp, Probe sequence
gcgttaataattaatgctcgtgtaa

SEQ ID NO: 73786 - DNA, 25 bp, Probe sequence
atcgaataatgacatatcacagcaa

SEQ ID NO: 73787 - DNA, 25 bp, Probe sequence
aatcgaataatgacatatcacagca

SEQ ID NO: 73788 - DNA, 25 bp, Probe sequence
tgacatatcacagcaaatagttctt

SEQ ID NO: 73789 - DNA, 25 bp, Probe sequence
atgacatatcacagcaaatagttct

SEQ ID NO: 73790 - DNA, 25 bp, Probe sequence
gacatatcacagcaaatagttcttt

SEQ ID NO: 73791 - DNA, 25 bp, Probe sequence
cgaataatgacatatcacagcaaat

SEQ ID NO: 73792 - DNA, 25 bp, Probe sequence
gcgttaaggaaatgataaatgattg

SEQ ID NO: 73793 - DNA, 25 bp, Probe sequence
agcgttaaggaaatgataaatgatt

SEQ ID NO: 73794 - DNA, 25 bp, Probe sequence
ttatacataaggcacctcgttaatt

SEQ ID NO: 73795 - DNA, 25 bp, Probe sequence
aggcacctcgttaatttagtttagt

SEQ ID NO: 73796 - DNA, 25 bp, Probe sequence
acataaggcacctcgttaatttagt

SEQ ID NO: 73797 - DNA, 25 bp, Probe sequence
cataaggcacctcgttaatttagtt

SEQ ID NO: 73798 - DNA, 25 bp, Probe sequence
aaggcacctcgttaatttagtttag

SEQ ID NO: 73799 - DNA, 25 bp, Probe sequence
ataaggcacctcgttaatttagttt

SEQ ID NO: 73800 - DNA, 25 bp, Probe sequence
tacataaggcacctcgttaatttag

SEQ ID NO: 73801 - DNA, 25 bp, Probe sequence
ggtagtgtagttgggtcatgttata

SEQ ID NO: 73802 - DNA, 25 bp, Probe sequence
aaattataagaagggacccaacaca

SEQ ID NO: 73803 - DNA, 25 bp, Probe sequence
aattaacgaggtgccttatgtataa

SEQ ID NO: 73804 - DNA, 25 bp, Probe sequence
actaaactaaattaacgaggtgcct

SEQ ID NO: 73805 - DNA, 25 bp, Probe sequence
actaaattaacgaggtgccttatgt

SEQ ID NO: 73806 - DNA, 25 bp, Probe sequence
aactaaattaacgaggtgccttatg

SEQ ID NO: 73807 - DNA, 25 bp, Probe sequence
ctaaactaaattaacgaggtgcctt

SEQ ID NO: 73808 - DNA, 25 bp, Probe sequence
ctaaattaacgaggtgccttatgta

SEQ ID NO: 73809 - DNA, 25 bp, Probe sequence
aaactaaattaacgaggtgccttat

SEQ ID NO: 73810 - DNA, 25 bp, Probe sequence
tataacatgacccaactacactacc

SEQ ID NO: 73811 - DNA, 25 bp, Probe sequence
tgtgttgggtcccttcttataattt

SEQ ID NO: 73812 - DNA, 25 bp, Probe sequence
tttatgtcccagcctctaaatgtta

SEQ ID NO: 73813 - DNA, 25 bp, Probe sequence
atttatgtcccagcctctaaatgtt

SEQ ID NO: 73814 - DNA, 25 bp, Probe sequence
gatttatgtcccagcctctaaatgt

SEQ ID NO: 73815 - DNA, 25 bp, Probe sequence
ggatttatgtcccagcctctaaatg

SEQ ID NO: 73816 - DNA, 25 bp, Probe sequence
taacatttagaggctgggacataaa

SEQ ID NO: 73817 - DNA, 25 bp, Probe sequence
aacatttagaggctgggacataaat

SEQ ID NO: 73818 - DNA, 25 bp, Probe sequence
acatttagaggctgggacataaatc

SEQ ID NO: 73819 - DNA, 25 bp, Probe sequence
catttagaggctgggacataaatcc

SEQ ID NO: 73820 - DNA, 25 bp, Probe sequence
aacaatgactattatcgtgaatgct

SEQ ID NO: 73821 - DNA, 25 bp, Probe sequence
tgactattatcgtgaatgctaactt

SEQ ID NO: 73822 - DNA, 25 bp, Probe sequence
acaatgactattatcgtgaatgcta

SEQ ID NO: 73823 - DNA, 25 bp, Probe sequence
atgactattatcgtgaatgctaact

SEQ ID NO: 73824 - DNA, 25 bp, Probe sequence
cgtgacatgaccttatatgctaatg

SEQ ID NO: 73825 - DNA, 25 bp, Probe sequence
taacaatgactattatcgtgaatgc

SEQ ID NO: 73826 - DNA, 25 bp, Probe sequence
aatgactattatcgtgaatgctaac

SEQ ID NO: 73827 - DNA, 25 bp, Probe sequence
caatgactattatcgtgaatgctaa

SEQ ID NO: 73828 - DNA, 25 bp, Probe sequence
tgattgataagtcttatacaccgag

SEQ ID NO: 73829 - DNA, 25 bp, Probe sequence
agcattcacgataatagtcattgtt

SEQ ID NO: 73830 - DNA, 25 bp, Probe sequence
tagcattcacgataatagtcattgt

SEQ ID NO: 73831 - DNA, 25 bp, Probe sequence
aagttagcattcacgataatagtca

SEQ ID NO: 73832 - DNA, 25 bp, Probe sequence
agttagcattcacgataatagtcat

SEQ ID NO: 73833 - DNA, 25 bp, Probe sequence
cattagcatataaggtcatgtcacg

SEQ ID NO: 73834 - DNA, 25 bp, Probe sequence
gcattcacgataatagtcattgtta

SEQ ID NO: 73835 - DNA, 25 bp, Probe sequence
ttagcattcacgataatagtcattg

SEQ ID NO: 73836 - DNA, 25 bp, Probe sequence
gttagcattcacgataatagtcatt

SEQ ID NO: 73837 - DNA, 25 bp, Probe sequence
cggtgtataagacttatcaatcagt

SEQ ID NO: 73838 - DNA, 25 bp, Probe sequence
tatgcttcctaatatcggtgcttac

SEQ ID NO: 73839 - DNA, 25 bp, Probe sequence
ttatgcttcctaatatcggtgctta

SEQ ID NO: 73840 - DNA, 25 bp, Probe sequence
cttcctaatatcggtgcttacatcc

SEQ ID NO: 73841 - DNA, 25 bp, Probe sequence
attatgcttcctaatatcggtgctt

SEQ ID NO: 73842 - DNA, 25 bp, Probe sequence
tcctaatatcggtgcttacatcctt

SEQ ID NO: 73843 - DNA, 25 bp, Probe sequence
ttcctaatatcggtgcttacatcct

SEQ ID NO: 73844 - DNA, 25 bp, Probe sequence
aattatgcttcctaatatcggtgct

SEQ ID NO: 73845 - DNA, 25 bp, Probe sequence
gcttcctaatatcggtgcttacatc

SEQ ID NO: 73846 - DNA, 25 bp, Probe sequence
tgcttcctaatatcggtgcttacat

SEQ ID NO: 73847 - DNA, 25 bp, Probe sequence
taagcaccgatattaggaagcataa

SEQ ID NO: 73848 - DNA, 25 bp, Probe sequence
gtaagcaccgatattaggaagcata

SEQ ID NO: 73849 - DNA, 25 bp, Probe sequence
ggatgtaagcaccgatattaggaag

SEQ ID NO: 73850 - DNA, 25 bp, Probe sequence
aagcaccgatattaggaagcataat

SEQ ID NO: 73851 - DNA, 25 bp, Probe sequence
aggatgtaagcaccgatattaggaa

SEQ ID NO: 73852 - DNA, 25 bp, Probe sequence
aaggatgtaagcaccgatattagga

SEQ ID NO: 73853 - DNA, 25 bp, Probe sequence
agcaccgatattaggaagcataatt

SEQ ID NO: 73854 - DNA, 25 bp, Probe sequence
gatgtaagcaccgatattaggaagc

SEQ ID NO: 73855 - DNA, 25 bp, Probe sequence
tgtaagcaccgatattaggaagcat

SEQ ID NO: 73856 - DNA, 25 bp, Probe sequence
aggtcactcatcccaataaaattat

SEQ ID NO: 73857 - DNA, 25 bp, Probe sequence
ataggtcactcatcccaataaaatt

SEQ ID NO: 73858 - DNA, 25 bp, Probe sequence
taggtcactcatcccaataaaatta

SEQ ID NO: 73859 - DNA, 25 bp, Probe sequence
ggtcactcatcccaataaaattatt

SEQ ID NO: 73860 - DNA, 25 bp, Probe sequence
gtcactcatcccaataaaattattt

SEQ ID NO: 73861 - DNA, 25 bp, Probe sequence
aattttattgggatgagtgacctat

SEQ ID NO: 73862 - DNA, 25 bp, Probe sequence
ataattttattgggatgagtgacct

SEQ ID NO: 73863 - DNA, 25 bp, Probe sequence
taattttattgggatgagtgaccta

SEQ ID NO: 73864 - DNA, 25 bp, Probe sequence
aataattttattgggatgagtgacc

SEQ ID NO: 73865 - DNA, 25 bp, Probe sequence
aaataattttattgggatgagtgac

SEQ ID NO: 73866 - DNA, 25 bp, Probe sequence
aatgttgtaaatgctaaaggaggtt

SEQ ID NO: 73867 - DNA, 25 bp, Probe sequence
atgttgtaaatgctaaaggaggttt

SEQ ID NO: 73868 - DNA, 25 bp, Probe sequence
taatgttgtaaatgctaaaggaggt

SEQ ID NO: 73869 - DNA, 25 bp, Probe sequence
ataatgttgtaaatgctaaaggagg

SEQ ID NO: 73870 - DNA, 25 bp, Probe sequence
tgttgtaaatgctaaaggaggtttt

SEQ ID NO: 73871 - DNA, 25 bp, Probe sequence
ggtataatgttgtaaatgctaaagg

SEQ ID NO: 73872 - DNA, 25 bp, Probe sequence
aaattggtataatgttgtaaatgct

SEQ ID NO: 73873 - DNA, 25 bp, Probe sequence
tggtataatgttgtaaatgctaaag

SEQ ID NO: 73874 - DNA, 25 bp, Probe sequence
gtataatgttgtaaatgctaaagga

SEQ ID NO: 73875 - DNA, 25 bp, Probe sequence
aacctcctttagcatttacaacatt

SEQ ID NO: 73876 - DNA, 25 bp, Probe sequence
aaacctcctttagcatttacaacat

SEQ ID NO: 73877 - DNA, 25 bp, Probe sequence
acctcctttagcatttacaacatta

SEQ ID NO: 73878 - DNA, 25 bp, Probe sequence
cctcctttagcatttacaacattat

SEQ ID NO: 73879 - DNA, 25 bp, Probe sequence
aaaacctcctttagcatttacaaca

SEQ ID NO: 73880 - DNA, 25 bp, Probe sequence
cctttagcatttacaacattatacc

SEQ ID NO: 73881 - DNA, 25 bp, Probe sequence
agcatttacaacattataccaattt

SEQ ID NO: 73882 - DNA, 25 bp, Probe sequence
ctttagcatttacaacattatacca

SEQ ID NO: 73883 - DNA, 25 bp, Probe sequence
tcctttagcatttacaacattatac

SEQ ID NO: 73884 - DNA, 25 bp, Probe sequence
acaataagacaaactttgaggttgg

SEQ ID NO: 73885 - DNA, 25 bp, Probe sequence
ataagacaaactttgaggttgggaa

SEQ ID NO: 73886 - DNA, 25 bp, Probe sequence
aataagacaaactttgaggttggga

SEQ ID NO: 73887 - DNA, 25 bp, Probe sequence
caataagacaaactttgaggttggg

SEQ ID NO: 73888 - DNA, 25 bp, Probe sequence
taagacaaactttgaggttgggaaa

SEQ ID NO: 73889 - DNA, 25 bp, Probe sequence
tacaataagacaaactttgaggttg

SEQ ID NO: 73890 - DNA, 25 bp, Probe sequence
ttacaataagacaaactttgaggtt

SEQ ID NO: 73891 - DNA, 25 bp, Probe sequence
tttacaataagacaaactttgaggt

SEQ ID NO: 73892 - DNA, 25 bp, Probe sequence
gacaaactttgaggttgggaaaatt

SEQ ID NO: 73893 - DNA, 25 bp, Probe sequence
ccaacctcaaagtttgtcttattgt

SEQ ID NO: 73894 - DNA, 25 bp, Probe sequence
cccaacctcaaagtttgtcttattg

SEQ ID NO: 73895 - DNA, 25 bp, Probe sequence
tcccaacctcaaagtttgtcttatt

SEQ ID NO: 73896 - DNA, 25 bp, Probe sequence
ttcccaacctcaaagtttgtcttat

SEQ ID NO: 73897 - DNA, 25 bp, Probe sequence
tttcccaacctcaaagtttgtctta

SEQ ID NO: 73898 - DNA, 25 bp, Probe sequence
caacctcaaagtttgtcttattgta

SEQ ID NO: 73899 - DNA, 25 bp, Probe sequence
acctcaaagtttgtcttattgtaaa

SEQ ID NO: 73900 - DNA, 25 bp, Probe sequence
aacctcaaagtttgtcttattgtaa

SEQ ID NO: 73901 - DNA, 25 bp, Probe sequence
aattttcccaacctcaaagtttgtc

SEQ ID NO: 73902 - DNA, 25 bp, Probe sequence
aaccgtagcgtcaacataaacaatc

SEQ ID NO: 73903 - DNA, 25 bp, Probe sequence
caaccgtagcgtcaacataaacaat

SEQ ID NO: 73904 - DNA, 25 bp, Probe sequence
cgtagcgtcaacataaacaatcgtt

SEQ ID NO: 73905 - DNA, 25 bp, Probe sequence
gtagcgtcaacataaacaatcgttt

SEQ ID NO: 73906 - DNA, 25 bp, Probe sequence
cgaatgtctttaatctctacgtgac

SEQ ID NO: 73907 - DNA, 25 bp, Probe sequence
acaaccgtagcgtcaacataaacaa

SEQ ID NO: 73908 - DNA, 25 bp, Probe sequence
gtctttaatctctacgtgacaaccg

SEQ ID NO: 73909 - DNA, 25 bp, Probe sequence
ccgtagcgtcaacataaacaatcgt

SEQ ID NO: 73910 - DNA, 25 bp, Probe sequence
accgtagcgtcaacataaacaatcg

SEQ ID NO: 73911 - DNA, 25 bp, Probe sequence
gattgtttatgttgacgctacggtt

SEQ ID NO: 73912 - DNA, 25 bp, Probe sequence
attgtttatgttgacgctacggttg

SEQ ID NO: 73913 - DNA, 25 bp, Probe sequence
aacgattgtttatgttgacgctacg

SEQ ID NO: 73914 - DNA, 25 bp, Probe sequence
aaacgattgtttatgttgacgctac

SEQ ID NO: 73915 - DNA, 25 bp, Probe sequence
gtcacgtagagattaaagacattcg

SEQ ID NO: 73916 - DNA, 25 bp, Probe sequence
ttgtttatgttgacgctacggttgt

SEQ ID NO: 73917 - DNA, 25 bp, Probe sequence
cggttgtcacgtagagattaaagac

SEQ ID NO: 73918 - DNA, 25 bp, Probe sequence
cgattgtttatgttgacgctacggt

SEQ ID NO: 73919 - DNA, 25 bp, Probe sequence
acgattgtttatgttgacgctacgg

SEQ ID NO: 73920 - DNA, 25 bp, Probe sequence
atccacagaattatactacacaacc

SEQ ID NO: 73921 - DNA, 25 bp, Probe sequence
tcacctcaacatcgacattataaca

SEQ ID NO: 73922 - DNA, 25 bp, Probe sequence
cacctcaacatcgacattataacaa

SEQ ID NO: 73923 - DNA, 25 bp, Probe sequence
ttcacctcaacatcgacattataac

SEQ ID NO: 73924 - DNA, 25 bp, Probe sequence
tccacagaattatactacacaaccc

SEQ ID NO: 73925 - DNA, 25 bp, Probe sequence
tgattgcgatatattgtgttcaatg

SEQ ID NO: 73926 - DNA, 25 bp, Probe sequence
gattgcgatatattgtgttcaatga

SEQ ID NO: 73927 - DNA, 25 bp, Probe sequence
gggttatttatgtgtgtaggatcat

SEQ ID NO: 73928 - DNA, 25 bp, Probe sequence
tattgattgcgatatattgtgttca

SEQ ID NO: 73929 - DNA, 25 bp, Probe sequence
ggttgtgtagtataattctgtggat

SEQ ID NO: 73930 - DNA, 25 bp, Probe sequence
tgttataatgtcgatgttgaggtga

SEQ ID NO: 73931 - DNA, 25 bp, Probe sequence
ttgttataatgtcgatgttgaggtg

SEQ ID NO: 73932 - DNA, 25 bp, Probe sequence
gttataatgtcgatgttgaggtgaa

SEQ ID NO: 73933 - DNA, 25 bp, Probe sequence
gggttgtgtagtataattctgtgga

SEQ ID NO: 73934 - DNA, 25 bp, Probe sequence
cattgaacacaatatatcgcaatca

SEQ ID NO: 73935 - DNA, 25 bp, Probe sequence
tcattgaacacaatatatcgcaatc

SEQ ID NO: 73936 - DNA, 25 bp, Probe sequence
tgaacacaatatatcgcaatcaata

SEQ ID NO: 73937 - DNA, 25 bp, Probe sequence
atgatcctacacacataaataaccc

SEQ ID NO: 73938 - DNA, 25 bp, Probe sequence
ggatgacctacacctattctaacat

SEQ ID NO: 73939 - DNA, 25 bp, Probe sequence
attcgttaattcaccaacaacactt

SEQ ID NO: 73940 - DNA, 25 bp, Probe sequence
tattcgttaattcaccaacaacact

SEQ ID NO: 73941 - DNA, 25 bp, Probe sequence
ttattcgttaattcaccaacaacac

SEQ ID NO: 73942 - DNA, 25 bp, Probe sequence
tgaaggatgacctacacctattcta

SEQ ID NO: 73943 - DNA, 25 bp, Probe sequence
atactgaaggatgacctacacctat

SEQ ID NO: 73944 - DNA, 25 bp, Probe sequence
aggatgacctacacctattctaaca

SEQ ID NO: 73945 - DNA, 25 bp, Probe sequence
tactgaaggatgacctacacctatt

SEQ ID NO: 73946 - DNA, 25 bp, Probe sequence
aaggatgacctacacctattctaac

SEQ ID NO: 73947 - DNA, 25 bp, Probe sequence
atgttagaataggtgtaggtcatcc

SEQ ID NO: 73948 - DNA, 25 bp, Probe sequence
aagtgttgttggtgaattaacgaat

SEQ ID NO: 73949 - DNA, 25 bp, Probe sequence
agtgttgttggtgaattaacgaata

SEQ ID NO: 73950 - DNA, 25 bp, Probe sequence
gtgttgttggtgaattaacgaataa

SEQ ID NO: 73951 - DNA, 25 bp, Probe sequence
ataggtgtaggtcatccttcagtat

SEQ ID NO: 73952 - DNA, 25 bp, Probe sequence
tagaataggtgtaggtcatccttca

SEQ ID NO: 73953 - DNA, 25 bp, Probe sequence
aataggtgtaggtcatccttcagta

SEQ ID NO: 73954 - DNA, 25 bp, Probe sequence
tgttagaataggtgtaggtcatcct

SEQ ID NO: 73955 - DNA, 25 bp, Probe sequence
gttagaataggtgtaggtcatcctt

SEQ ID NO: 73956 - DNA, 25 bp, Probe sequence
acattcaagcatcacatctctacaa

SEQ ID NO: 73957 - DNA, 25 bp, Probe sequence
aacattcaagcatcacatctctaca

SEQ ID NO: 73958 - DNA, 25 bp, Probe sequence
caaccaataatctgatgagtatgac

SEQ ID NO: 73959 - DNA, 25 bp, Probe sequence
ccacgattgtgagatgccttattat

SEQ ID NO: 73960 - DNA, 25 bp, Probe sequence
cacgattgtgagatgccttattata

SEQ ID NO: 73961 - DNA, 25 bp, Probe sequence
acgattgtgagatgccttattataa

SEQ ID NO: 73962 - DNA, 25 bp, Probe sequence
ttcaaacattcaagcatcacatctc

SEQ ID NO: 73963 - DNA, 25 bp, Probe sequence
cattcaagcatcacatctctacaaa

SEQ ID NO: 73964 - DNA, 25 bp, Probe sequence
aaacattcaagcatcacatctctac

SEQ ID NO: 73965 - DNA, 25 bp, Probe sequence
tgtagagatgtgatgcttgaatgtt

SEQ ID NO: 73966 - DNA, 25 bp, Probe sequence
ttgtagagatgtgatgcttgaatgt

SEQ ID NO: 73967 - DNA, 25 bp, Probe sequence
gtcatactcatcagattattggttg

SEQ ID NO: 73968 - DNA, 25 bp, Probe sequence
ataataaggcatctcacaatcgtgg

SEQ ID NO: 73969 - DNA, 25 bp, Probe sequence
tataataaggcatctcacaatcgtg

SEQ ID NO: 73970 - DNA, 25 bp, Probe sequence
ttataataaggcatctcacaatcgt

SEQ ID NO: 73971 - DNA, 25 bp, Probe sequence
gagatgtgatgcttgaatgtttgaa

SEQ ID NO: 73972 - DNA, 25 bp, Probe sequence
tagagatgtgatgcttgaatgtttg

SEQ ID NO: 73973 - DNA, 25 bp, Probe sequence
gtagagatgtgatgcttgaatgttt

SEQ ID NO: 73974 - DNA, 25 bp, Probe sequence
gcaactttattatagccagactttc

SEQ ID NO: 73975 - DNA, 25 bp, Probe sequence
actttattatagccagactttctct

SEQ ID NO: 73976 - DNA, 25 bp, Probe sequence
tgcaactttattatagccagacttt

SEQ ID NO: 73977 - DNA, 25 bp, Probe sequence
caactttattatagccagactttct

SEQ ID NO: 73978 - DNA, 25 bp, Probe sequence
aactttattatagccagactttctc

SEQ ID NO: 73979 - DNA, 25 bp, Probe sequence
ctttattatagccagactttctcta

SEQ ID NO: 73980 - DNA, 25 bp, Probe sequence
cgtgattgcaactttattatagcca

SEQ ID NO: 73981 - DNA, 25 bp, Probe sequence
tcgtgattgcaactttattatagcc

SEQ ID NO: 73982 - DNA, 25 bp, Probe sequence
ttgcaactttattatagccagactt

SEQ ID NO: 73983 - DNA, 25 bp, Probe sequence
gaaagtctggctataataaagttgc

SEQ ID NO: 73984 - DNA, 25 bp, Probe sequence
agagaaagtctggctataataaagt

SEQ ID NO: 73985 - DNA, 25 bp, Probe sequence
aaagtctggctataataaagttgca

SEQ ID NO: 73986 - DNA, 25 bp, Probe sequence
agaaagtctggctataataaagttg

SEQ ID NO: 73987 - DNA, 25 bp, Probe sequence
gagaaagtctggctataataaagtt

SEQ ID NO: 73988 - DNA, 25 bp, Probe sequence
tagagaaagtctggctataataaag

SEQ ID NO: 73989 - DNA, 25 bp, Probe sequence
ggctataataaagttgcaatcacga

SEQ ID NO: 73990 - DNA, 25 bp, Probe sequence
tggctataataaagttgcaatcacg

SEQ ID NO: 73991 - DNA, 25 bp, Probe sequence
aagtctggctataataaagttgcaa

SEQ ID NO: 73992 - DNA, 25 bp, Probe sequence
ttttgcatctattttgttgtaagct

SEQ ID NO: 73993 - DNA, 25 bp, Probe sequence
tttgcatctattttgttgtaagcta

SEQ ID NO: 73994 - DNA, 25 bp, Probe sequence
attttgcatctattttgttgtaagc

SEQ ID NO: 73995 - DNA, 25 bp, Probe sequence
ttgcatctattttgttgtaagctat

SEQ ID NO: 73996 - DNA, 25 bp, Probe sequence
tgttgtaagctatataaaaggagtg

SEQ ID NO: 73997 - DNA, 25 bp, Probe sequence
gttgtaagctatataaaaggagtga

SEQ ID NO: 73998 - DNA, 25 bp, Probe sequence
tgcatctattttgttgtaagctata

SEQ ID NO: 73999 - DNA, 25 bp, Probe sequence
atcaattttgcatctattttgttgt

SEQ ID NO: 74000 - DNA, 25 bp, Probe sequence
ttgttgtaagctatataaaaggagt

SEQ ID NO: 74001 - DNA, 25 bp, Probe sequence
agcttacaacaaaatagatgcaaaa

SEQ ID NO: 74002 - DNA, 25 bp, Probe sequence
tagcttacaacaaaatagatgcaaa

SEQ ID NO: 74003 - DNA, 25 bp, Probe sequence
gcttacaacaaaatagatgcaaaat

SEQ ID NO: 74004 - DNA, 25 bp, Probe sequence
atagcttacaacaaaatagatgcaa

SEQ ID NO: 74005 - DNA, 25 bp, Probe sequence
cactccttttatatagcttacaaca

SEQ ID NO: 74006 - DNA, 25 bp, Probe sequence
tcactccttttatatagcttacaac

SEQ ID NO: 74007 - DNA, 25 bp, Probe sequence
acaacaaaatagatgcaaaattgat

SEQ ID NO: 74008 - DNA, 25 bp, Probe sequence
tatagcttacaacaaaatagatgca

SEQ ID NO: 74009 - DNA, 25 bp, Probe sequence
actccttttatatagcttacaacaa

SEQ ID NO: 74010 - DNA, 25 bp, Probe sequence
agtagacaactcagaattccaattt

SEQ ID NO: 74011 - DNA, 25 bp, Probe sequence
tgcttgacatatcaaactagatagt

SEQ ID NO: 74012 - DNA, 25 bp, Probe sequence
agagtagacaactcagaattccaat

SEQ ID NO: 74013 - DNA, 25 bp, Probe sequence
tagagtagacaactcagaattccaa

SEQ ID NO: 74014 - DNA, 25 bp, Probe sequence
ttagagtagacaactcagaattcca

SEQ ID NO: 74015 - DNA, 25 bp, Probe sequence
gagtagacaactcagaattccaatt

SEQ ID NO: 74016 - DNA, 25 bp, Probe sequence
tacaccccaaaagctagactgaaaa

SEQ ID NO: 74017 - DNA, 25 bp, Probe sequence
aagtaaaacagcataatatcaaggt

SEQ ID NO: 74018 - DNA, 25 bp, Probe sequence
agtaaaacagcataatatcaaggtt

SEQ ID NO: 74019 - DNA, 25 bp, Probe sequence
aaattggaattctgagttgtctact

SEQ ID NO: 74020 - DNA, 25 bp, Probe sequence
actatctagtttgatatgtcaagca

SEQ ID NO: 74021 - DNA, 25 bp, Probe sequence
attggaattctgagttgtctactct

SEQ ID NO: 74022 - DNA, 25 bp, Probe sequence
tggaattctgagttgtctactctaa

SEQ ID NO: 74023 - DNA, 25 bp, Probe sequence
ttggaattctgagttgtctactcta

SEQ ID NO: 74024 - DNA, 25 bp, Probe sequence
aattggaattctgagttgtctactc

SEQ ID NO: 74025 - DNA, 25 bp, Probe sequence
ttttcagtctagcttttggggtgta

SEQ ID NO: 74026 - DNA, 25 bp, Probe sequence
accttgatattatgctgttttactt

SEQ ID NO: 74027 - DNA, 25 bp, Probe sequence
aaccttgatattatgctgttttact

SEQ ID NO: 74028 - DNA, 25 bp, Probe sequence
attatgtatggacgcctatgactac

SEQ ID NO: 74029 - DNA, 25 bp, Probe sequence
gattatgtatggacgcctatgacta

SEQ ID NO: 74030 - DNA, 25 bp, Probe sequence
ctgattatgtatggacgcctatgac

SEQ ID NO: 74031 - DNA, 25 bp, Probe sequence
tgattatgtatggacgcctatgact

SEQ ID NO: 74032 - DNA, 25 bp, Probe sequence
gactaatgctgattatgtatggacg

SEQ ID NO: 74033 - DNA, 25 bp, Probe sequence
actaatgctgattatgtatggacgc

SEQ ID NO: 74034 - DNA, 25 bp, Probe sequence
tatggacgcctatgactacagttac

SEQ ID NO: 74035 - DNA, 25 bp, Probe sequence
gtatggacgcctatgactacagtta

SEQ ID NO: 74036 - DNA, 25 bp, Probe sequence
atgctgattatgtatggacgcctat

SEQ ID NO: 74037 - DNA, 25 bp, Probe sequence
tagtcataggcgtccatacataatc

SEQ ID NO: 74038 - DNA, 25 bp, Probe sequence
gtagtcataggcgtccatacataat

SEQ ID NO: 74039 - DNA, 25 bp, Probe sequence
gtcataggcgtccatacataatcag

SEQ ID NO: 74040 - DNA, 25 bp, Probe sequence
agtcataggcgtccatacataatca

SEQ ID NO: 74041 - DNA, 25 bp, Probe sequence
cgtccatacataatcagcattagtc

SEQ ID NO: 74042 - DNA, 25 bp, Probe sequence
gcgtccatacataatcagcattagt

SEQ ID NO: 74043 - DNA, 25 bp, Probe sequence
gtaactgtagtcataggcgtccata

SEQ ID NO: 74044 - DNA, 25 bp, Probe sequence
taactgtagtcataggcgtccatac

SEQ ID NO: 74045 - DNA, 25 bp, Probe sequence
ataggcgtccatacataatcagcat

SEQ ID NO: 74046 - DNA, 25 bp, Probe sequence
tgcttacctacttcccataaacaat

SEQ ID NO: 74047 - DNA, 25 bp, Probe sequence
cacatatacattgatttggaaagcg

SEQ ID NO: 74048 - DNA, 25 bp, Probe sequence
atgcttacctacttcccataaacaa

SEQ ID NO: 74049 - DNA, 25 bp, Probe sequence
aatgcttacctacttcccataaaca

SEQ ID NO: 74050 - DNA, 25 bp, Probe sequence
cgaaatgcttacctacttcccataa

SEQ ID NO: 74051 - DNA, 25 bp, Probe sequence
aaatgcttacctacttcccataaac

SEQ ID NO: 74052 - DNA, 25 bp, Probe sequence
gaaatgcttacctacttcccataaa

SEQ ID NO: 74053 - DNA, 25 bp, Probe sequence
gcttacctacttcccataaacaata

SEQ ID NO: 74054 - DNA, 25 bp, Probe sequence
acacatatacattgatttggaaagc

SEQ ID NO: 74055 - DNA, 25 bp, Probe sequence
attgtttatgggaagtaggtaagca

SEQ ID NO: 74056 - DNA, 25 bp, Probe sequence
cgctttccaaatcaatgtatatgtg

SEQ ID NO: 74057 - DNA, 25 bp, Probe sequence
tgtttatgggaagtaggtaagcatt

SEQ ID NO: 74058 - DNA, 25 bp, Probe sequence
ttgtttatgggaagtaggtaagcat

SEQ ID NO: 74059 - DNA, 25 bp, Probe sequence
ttatgggaagtaggtaagcatttcg

SEQ ID NO: 74060 - DNA, 25 bp, Probe sequence
gtttatgggaagtaggtaagcattt

SEQ ID NO: 74061 - DNA, 25 bp, Probe sequence
tttatgggaagtaggtaagcatttc

SEQ ID NO: 74062 - DNA, 25 bp, Probe sequence
tattgtttatgggaagtaggtaagc

SEQ ID NO: 74063 - DNA, 25 bp, Probe sequence
gctttccaaatcaatgtatatgtgt

SEQ ID NO: 74064 - DNA, 25 bp, Probe sequence
acatttcataacttgccaaaccttt

SEQ ID NO: 74065 - DNA, 25 bp, Probe sequence
gacatttcataacttgccaaacctt

SEQ ID NO: 74066 - DNA, 25 bp, Probe sequence
taaaggtttggcagacatttcataa

SEQ ID NO: 74067 - DNA, 25 bp, Probe sequence
ataaaggtttggcagacatttcata

SEQ ID NO: 74068 - DNA, 25 bp, Probe sequence
tataaaggtttggcagacatttcat

SEQ ID NO: 74069 - DNA, 25 bp, Probe sequence
atataaaggtttggcagacatttca

SEQ ID NO: 74070 - DNA, 25 bp, Probe sequence
aaaggtttggcagacatttcataac

SEQ ID NO: 74071 - DNA, 25 bp, Probe sequence
agacatttcataacttgccaaacct

SEQ ID NO: 74072 - DNA, 25 bp, Probe sequence
cagacatttcataacttgccaaacc

SEQ ID NO: 74073 - DNA, 25 bp, Probe sequence
aaaggtttggcaagttatgaaatgt

SEQ ID NO: 74074 - DNA, 25 bp, Probe sequence
aaggtttggcaagttatgaaatgtc

SEQ ID NO: 74075 - DNA, 25 bp, Probe sequence
ttatgaaatgtctgccaaaccttta

SEQ ID NO: 74076 - DNA, 25 bp, Probe sequence
atgaaatgtctgccaaacctttata

SEQ ID NO: 74077 - DNA, 25 bp, Probe sequence
tatgaaatgtctgccaaacctttat

SEQ ID NO: 74078 - DNA, 25 bp, Probe sequence
tgaaatgtctgccaaacctttatat

SEQ ID NO: 74079 - DNA, 25 bp, Probe sequence
gttatgaaatgtctgccaaaccttt

SEQ ID NO: 74080 - DNA, 25 bp, Probe sequence
ggtttggcaagttatgaaatgtctg

SEQ ID NO: 74081 - DNA, 25 bp, Probe sequence
aggtttggcaagttatgaaatgtct

SEQ ID NO: 74082 - DNA, 25 bp, Probe sequence
ctattatacgggaatgctaaagtca

SEQ ID NO: 74083 - DNA, 25 bp, Probe sequence
gggtgaacaaggatgtaaatagttg

SEQ ID NO: 74084 - DNA, 25 bp, Probe sequence
tgggtgaacaaggatgtaaatagtt

SEQ ID NO: 74085 - DNA, 25 bp, Probe sequence
ttgggtgaacaaggatgtaaatagt

SEQ ID NO: 74086 - DNA, 25 bp, Probe sequence
ggtgaacaaggatgtaaatagttga

SEQ ID NO: 74087 - DNA, 25 bp, Probe sequence
actattatacgggaatgctaaagtc

SEQ ID NO: 74088 - DNA, 25 bp, Probe sequence
gaacaaggatgtaaatagttgatgc

SEQ ID NO: 74089 - DNA, 25 bp, Probe sequence
ttatacgggaatgctaaagtcatat

SEQ ID NO: 74090 - DNA, 25 bp, Probe sequence
attatacgggaatgctaaagtcata

SEQ ID NO: 74091 - DNA, 25 bp, Probe sequence
tgactttagcattcccgtataatag

SEQ ID NO: 74092 - DNA, 25 bp, Probe sequence
actatttacatccttgttcacccaa

SEQ ID NO: 74093 - DNA, 25 bp, Probe sequence
aactatttacatccttgttcaccca

SEQ ID NO: 74094 - DNA, 25 bp, Probe sequence
caactatttacatccttgttcaccc

SEQ ID NO: 74095 - DNA, 25 bp, Probe sequence
tcaactatttacatccttgttcacc

SEQ ID NO: 74096 - DNA, 25 bp, Probe sequence
gactttagcattcccgtataatagt

SEQ ID NO: 74097 - DNA, 25 bp, Probe sequence
gcatcaactatttacatccttgttc

SEQ ID NO: 74098 - DNA, 25 bp, Probe sequence
atgactttagcattcccgtataata

SEQ ID NO: 74099 - DNA, 25 bp, Probe sequence
tatgactttagcattcccgtataat

SEQ ID NO: 74100 - DNA, 25 bp, Probe sequence
tcactacacatattcaatcaagaca

SEQ ID NO: 74101 - DNA, 25 bp, Probe sequence
cactacacatattcaatcaagacat

SEQ ID NO: 74102 - DNA, 25 bp, Probe sequence
ttcactacacatattcaatcaagac

SEQ ID NO: 74103 - DNA, 25 bp, Probe sequence
acacatattcaatcaagacattgct

SEQ ID NO: 74104 - DNA, 25 bp, Probe sequence
cacatattcaatcaagacattgctt

SEQ ID NO: 74105 - DNA, 25 bp, Probe sequence
actacacatattcaatcaagacatt

SEQ ID NO: 74106 - DNA, 25 bp, Probe sequence
tacacatattcaatcaagacattgc

SEQ ID NO: 74107 - DNA, 25 bp, Probe sequence
gcatgaatgagaatttgatgaaaga

SEQ ID NO: 74108 - DNA, 25 bp, Probe sequence
gtgcatgaatgagaatttgatgaaa

SEQ ID NO: 74109 - DNA, 25 bp, Probe sequence
tgtcttgattgaatatgtgtagtga

SEQ ID NO: 74110 - DNA, 25 bp, Probe sequence
gtcttgattgaatatgtgtagtgaa

SEQ ID NO: 74111 - DNA, 25 bp, Probe sequence
atgtcttgattgaatatgtgtagtg

SEQ ID NO: 74112 - DNA, 25 bp, Probe sequence
agcaatgtcttgattgaatatgtgt

SEQ ID NO: 74113 - DNA, 25 bp, Probe sequence
aagcaatgtcttgattgaatatgtg

SEQ ID NO: 74114 - DNA, 25 bp, Probe sequence
aatgtcttgattgaatatgtgtagt

SEQ ID NO: 74115 - DNA, 25 bp, Probe sequence
gcaatgtcttgattgaatatgtgta

SEQ ID NO: 74116 - DNA, 25 bp, Probe sequence
tctttcatcaaattctcattcatgc

SEQ ID NO: 74117 - DNA, 25 bp, Probe sequence
tttcatcaaattctcattcatgcac

SEQ ID NO: 74118 - DNA, 25 bp, Probe sequence
tcaacaacttcattttatattgaga

SEQ ID NO: 74119 - DNA, 25 bp, Probe sequence
tctcaatataaaatgaagttgttga

SEQ ID NO: 74120 - DNA, 25 bp, Probe sequence
ataaccatttaaccatcgaaaccag

SEQ ID NO: 74121 - DNA, 25 bp, Probe sequence
aataaccatttaaccatcgaaacca

SEQ ID NO: 74122 - DNA, 25 bp, Probe sequence
taaccatttaaccatcgaaaccagc

SEQ ID NO: 74123 - DNA, 25 bp, Probe sequence
atttaaccatcgaaaccagccaaag

SEQ ID NO: 74124 - DNA, 25 bp, Probe sequence
taataaccatttaaccatcgaaacc

SEQ ID NO: 74125 - DNA, 25 bp, Probe sequence
catttaaccatcgaaaccagccaaa

SEQ ID NO: 74126 - DNA, 25 bp, Probe sequence
tttaaccatcgaaaccagccaaagt

SEQ ID NO: 74127 - DNA, 25 bp, Probe sequence
taaccatcgaaaccagccaaagtta

SEQ ID NO: 74128 - DNA, 25 bp, Probe sequence
ttaaccatcgaaaccagccaaagtt

SEQ ID NO: 74129 - DNA, 25 bp, Probe sequence
ctggtttcgatggttaaatggttat

SEQ ID NO: 74130 - DNA, 25 bp, Probe sequence
tggtttcgatggttaaatggttatt

SEQ ID NO: 74131 - DNA, 25 bp, Probe sequence
gctggtttcgatggttaaatggtta

SEQ ID NO: 74132 - DNA, 25 bp, Probe sequence
ctttggctggtttcgatggttaaat

SEQ ID NO: 74133 - DNA, 25 bp, Probe sequence
ggtttcgatggttaaatggttatta

SEQ ID NO: 74134 - DNA, 25 bp, Probe sequence
tttggctggtttcgatggttaaatg

SEQ ID NO: 74135 - DNA, 25 bp, Probe sequence
actttggctggtttcgatggttaaa

SEQ ID NO: 74136 - DNA, 25 bp, Probe sequence
taactttggctggtttcgatggtta

SEQ ID NO: 74137 - DNA, 25 bp, Probe sequence
aactttggctggtttcgatggttaa

SEQ ID NO: 74138 - DNA, 25 bp, Probe sequence
tttcagattattctcgctttgttca

SEQ ID NO: 74139 - DNA, 25 bp, Probe sequence
actttcagattattctcgctttgtt

SEQ ID NO: 74140 - DNA, 25 bp, Probe sequence
ttcagattattctcgctttgttcaa

SEQ ID NO: 74141 - DNA, 25 bp, Probe sequence
ctttcagattattctcgctttgttc

SEQ ID NO: 74142 - DNA, 25 bp, Probe sequence
tactttcagattattctcgctttgt

SEQ ID NO: 74143 - DNA, 25 bp, Probe sequence
tcagattattctcgctttgttcaaa

SEQ ID NO: 74144 - DNA, 25 bp, Probe sequence
atactttcagattattctcgctttg

SEQ ID NO: 74145 - DNA, 25 bp, Probe sequence
attctcgctttgttcaaaactatct

SEQ ID NO: 74146 - DNA, 25 bp, Probe sequence
tgtatactttcagattattctcgct

SEQ ID NO: 74147 - DNA, 25 bp, Probe sequence
aacaaagcgagaataatctgaaagt

SEQ ID NO: 74148 - DNA, 25 bp, Probe sequence
tgaacaaagcgagaataatctgaaa

SEQ ID NO: 74149 - DNA, 25 bp, Probe sequence
ttgaacaaagcgagaataatctgaa

SEQ ID NO: 74150 - DNA, 25 bp, Probe sequence
gaacaaagcgagaataatctgaaag

SEQ ID NO: 74151 - DNA, 25 bp, Probe sequence
acaaagcgagaataatctgaaagta

SEQ ID NO: 74152 - DNA, 25 bp, Probe sequence
tttgaacaaagcgagaataatctga

SEQ ID NO: 74153 - DNA, 25 bp, Probe sequence
caaagcgagaataatctgaaagtat

SEQ ID NO: 74154 - DNA, 25 bp, Probe sequence
agatagttttgaacaaagcgagaat

SEQ ID NO: 74155 - DNA, 25 bp, Probe sequence
agcgagaataatctgaaagtataca

SEQ ID NO: 74156 - DNA, 25 bp, Probe sequence
tccatataaacttgttattatccga

SEQ ID NO: 74157 - DNA, 25 bp, Probe sequence
aagcataattccatataaacttgtt

SEQ ID NO: 74158 - DNA, 25 bp, Probe sequence
aaagcataattccatataaacttgt

SEQ ID NO: 74159 - DNA, 25 bp, Probe sequence
ccatataaacttgttattatccgaa

SEQ ID NO: 74160 - DNA, 25 bp, Probe sequence
ttccatataaacttgttattatccg

SEQ ID NO: 74161 - DNA, 25 bp, Probe sequence
tcggataataacaagtttatatgga

SEQ ID NO: 74162 - DNA, 25 bp, Probe sequence
acaagtttatatggaattatgcttt

SEQ ID NO: 74163 - DNA, 25 bp, Probe sequence
aacaagtttatatggaattatgctt

SEQ ID NO: 74164 - DNA, 25 bp, Probe sequence
cggataataacaagtttatatggaa

SEQ ID NO: 74165 - DNA, 25 bp, Probe sequence
ttcggataataacaagtttatatgg

SEQ ID NO: 74166 - DNA, 25 bp, Probe sequence
gcgtaatgctcataacttagtatag

SEQ ID NO: 74167 - DNA, 25 bp, Probe sequence
agcgtaatgctcataacttagtata

SEQ ID NO: 74168 - DNA, 25 bp, Probe sequence
ctaagaaagctatgagcgtaatgct

SEQ ID NO: 74169 - DNA, 25 bp, Probe sequence
tctaagaaagctatgagcgtaatgc

SEQ ID NO: 74170 - DNA, 25 bp, Probe sequence
ttctaagaaagctatgagcgtaatg

SEQ ID NO: 74171 - DNA, 25 bp, Probe sequence
tttctaagaaagctatgagcgtaat

SEQ ID NO: 74172 - DNA, 25 bp, Probe sequence
ctatactaagttatgagcattacgc

SEQ ID NO: 74173 - DNA, 25 bp, Probe sequence
tatactaagttatgagcattacgct

SEQ ID NO: 74174 - DNA, 25 bp, Probe sequence
cattacgctcatagctttcttagaa

SEQ ID NO: 74175 - DNA, 25 bp, Probe sequence
gcattacgctcatagctttcttaga

SEQ ID NO: 74176 - DNA, 25 bp, Probe sequence
agcattacgctcatagctttcttag

SEQ ID NO: 74177 - DNA, 25 bp, Probe sequence
attacgctcatagctttcttagaaa

SEQ ID NO: 74178 - DNA, 25 bp, Probe sequence
tttcaaataaaatagaggggttgcc

SEQ ID NO: 74179 - DNA, 25 bp, Probe sequence
ttttcaaataaaatagaggggttgc

SEQ ID NO: 74180 - DNA, 25 bp, Probe sequence
ttcaaataaaatagaggggttgccc

SEQ ID NO: 74181 - DNA, 25 bp, Probe sequence
attttcaaataaaatagaggggttg

SEQ ID NO: 74182 - DNA, 25 bp, Probe sequence
ggcaacccctctattttatttgaaa

SEQ ID NO: 74183 - DNA, 25 bp, Probe sequence
gcaacccctctattttatttgaaaa

SEQ ID NO: 74184 - DNA, 25 bp, Probe sequence
gggcaacccctctattttatttgaa

SEQ ID NO: 74185 - DNA, 25 bp, Probe sequence
caacccctctattttatttgaaaat

SEQ ID NO: 74186 - DNA, 25 bp, Probe sequence
ttgattagatggctctactacaaca

SEQ ID NO: 74187 - DNA, 25 bp, Probe sequence
tgattagatggctctactacaacat

SEQ ID NO: 74188 - DNA, 25 bp, Probe sequence
tgctatctggtatattaaccgactt

SEQ ID NO: 74189 - DNA, 25 bp, Probe sequence
atgctatctggtatattaaccgact

SEQ ID NO: 74190 - DNA, 25 bp, Probe sequence
gattagatggctctactacaacatt

SEQ ID NO: 74191 - DNA, 25 bp, Probe sequence
aatgctatctggtatattaaccgac

SEQ ID NO: 74192 - DNA, 25 bp, Probe sequence
tatattaaccgactttaccgcagtt

SEQ ID NO: 74193 - DNA, 25 bp, Probe sequence
taaatcgtatgtgtcgccaacttta

SEQ ID NO: 74194 - DNA, 25 bp, Probe sequence
aaatcgtatgtgtcgccaactttaa

SEQ ID NO: 74195 - DNA, 25 bp, Probe sequence
tgttgtagtagagccatctaatcaa

SEQ ID NO: 74196 - DNA, 25 bp, Probe sequence
atgttgtagtagagccatctaatca

SEQ ID NO: 74197 - DNA, 25 bp, Probe sequence
aagtcggttaatataccagatagca

SEQ ID NO: 74198 - DNA, 25 bp, Probe sequence
agtcggttaatataccagatagcat

SEQ ID NO: 74199 - DNA, 25 bp, Probe sequence
aatgttgtagtagagccatctaatc

SEQ ID NO: 74200 - DNA, 25 bp, Probe sequence
gtcggttaatataccagatagcatt

SEQ ID NO: 74201 - DNA, 25 bp, Probe sequence
aactgcggtaaagtcggttaatata

SEQ ID NO: 74202 - DNA, 25 bp, Probe sequence
taaagttggcgacacatacgattta

SEQ ID NO: 74203 - DNA, 25 bp, Probe sequence
aaagttggcgacacatacgatttaa

SEQ ID NO: 74204 - DNA, 25 bp, Probe sequence
ttaagtagtatcaagacgcatctat

SEQ ID NO: 74205 - DNA, 25 bp, Probe sequence
aagtagtatcaagacgcatctatac

SEQ ID NO: 74206 - DNA, 25 bp, Probe sequence
gcgtcgtattagcatttaataacct

SEQ ID NO: 74207 - DNA, 25 bp, Probe sequence
taagtagtatcaagacgcatctata

SEQ ID NO: 74208 - DNA, 25 bp, Probe sequence
ttaatgcggacttacatagggtaaa

SEQ ID NO: 74209 - DNA, 25 bp, Probe sequence
tttaatgcggacttacatagggtaa

SEQ ID NO: 74210 - DNA, 25 bp, Probe sequence
agacgcatctatacttgatgtgtag

SEQ ID NO: 74211 - DNA, 25 bp, Probe sequence
gacgcatctatacttgatgtgtagt

SEQ ID NO: 74212 - DNA, 25 bp, Probe sequence
aagacgcatctatacttgatgtgta

SEQ ID NO: 74213 - DNA, 25 bp, Probe sequence
atagatgcgtcttgatactacttaa

SEQ ID NO: 74214 - DNA, 25 bp, Probe sequence
gtatagatgcgtcttgatactactt

SEQ ID NO: 74215 - DNA, 25 bp, Probe sequence
aggttattaaatgctaatacgacgc

SEQ ID NO: 74216 - DNA, 25 bp, Probe sequence
tatagatgcgtcttgatactactta

SEQ ID NO: 74217 - DNA, 25 bp, Probe sequence
ttaccctatgtaagtccgcattaaa

SEQ ID NO: 74218 - DNA, 25 bp, Probe sequence
tttaccctatgtaagtccgcattaa

SEQ ID NO: 74219 - DNA, 25 bp, Probe sequence
ctacacatcaagtatagatgcgtct

SEQ ID NO: 74220 - DNA, 25 bp, Probe sequence
tacacatcaagtatagatgcgtctt

SEQ ID NO: 74221 - DNA, 25 bp, Probe sequence
actacacatcaagtatagatgcgtc

SEQ ID NO: 74222 - DNA, 25 bp, Probe sequence
ttaccacttgaaccagttgctattg

SEQ ID NO: 74223 - DNA, 25 bp, Probe sequence
gttaccacttgaaccagttgctatt

SEQ ID NO: 74224 - DNA, 25 bp, Probe sequence
agttaccacttgaaccagttgctat

SEQ ID NO: 74225 - DNA, 25 bp, Probe sequence
taccacttgaaccagttgctattgt

SEQ ID NO: 74226 - DNA, 25 bp, Probe sequence
cagttaccacttgaaccagttgcta

SEQ ID NO: 74227 - DNA, 25 bp, Probe sequence
tagcagttaccacttgaaccagttg

SEQ ID NO: 74228 - DNA, 25 bp, Probe sequence
gtagcagttaccacttgaaccagtt

SEQ ID NO: 74229 - DNA, 25 bp, Probe sequence
cacttgaaccagttgctattgtttc

SEQ ID NO: 74230 - DNA, 25 bp, Probe sequence
accacttgaaccagttgctattgtt

SEQ ID NO: 74231 - DNA, 25 bp, Probe sequence
aatagcaactggttcaagtggtaac

SEQ ID NO: 74232 - DNA, 25 bp, Probe sequence
caatagcaactggttcaagtggtaa

SEQ ID NO: 74233 - DNA, 25 bp, Probe sequence
atagcaactggttcaagtggtaact

SEQ ID NO: 74234 - DNA, 25 bp, Probe sequence
acaatagcaactggttcaagtggta

SEQ ID NO: 74235 - DNA, 25 bp, Probe sequence
aactggttcaagtggtaactgctac

SEQ ID NO: 74236 - DNA, 25 bp, Probe sequence
caactggttcaagtggtaactgcta

SEQ ID NO: 74237 - DNA, 25 bp, Probe sequence
tagcaactggttcaagtggtaactg

SEQ ID NO: 74238 - DNA, 25 bp, Probe sequence
aacaatagcaactggttcaagtggt

SEQ ID NO: 74239 - DNA, 25 bp, Probe sequence
gaaacaatagcaactggttcaagtg

SEQ ID NO: 74240 - DNA, 25 bp, Probe sequence
tctttcctttcgtgtataatgttgt

SEQ ID NO: 74241 - DNA, 25 bp, Probe sequence
ctttcctttcgtgtataatgttgtt

SEQ ID NO: 74242 - DNA, 25 bp, Probe sequence
atctttcctttcgtgtataatgttg

SEQ ID NO: 74243 - DNA, 25 bp, Probe sequence
cctttcgtgtataatgttgttatca

SEQ ID NO: 74244 - DNA, 25 bp, Probe sequence
tttcctttcgtgtataatgttgtta

SEQ ID NO: 74245 - DNA, 25 bp, Probe sequence
tcctttcgtgtataatgttgttatc

SEQ ID NO: 74246 - DNA, 25 bp, Probe sequence
ctatctttcctttcgtgtataatgt

SEQ ID NO: 74247 - DNA, 25 bp, Probe sequence
ttcctttcgtgtataatgttgttat

SEQ ID NO: 74248 - DNA, 25 bp, Probe sequence
tctatctttcctttcgtgtataatg

SEQ ID NO: 74249 - DNA, 25 bp, Probe sequence
acaacattatacacgaaaggaaaga

SEQ ID NO: 74250 - DNA, 25 bp, Probe sequence
aacaacattatacacgaaaggaaag

SEQ ID NO: 74251 - DNA, 25 bp, Probe sequence
caacattatacacgaaaggaaagat

SEQ ID NO: 74252 - DNA, 25 bp, Probe sequence
tgataacaacattatacacgaaagg

SEQ ID NO: 74253 - DNA, 25 bp, Probe sequence
taacaacattatacacgaaaggaaa

SEQ ID NO: 74254 - DNA, 25 bp, Probe sequence
gataacaacattatacacgaaagga

SEQ ID NO: 74255 - DNA, 25 bp, Probe sequence
acattatacacgaaaggaaagatag

SEQ ID NO: 74256 - DNA, 25 bp, Probe sequence
ataacaacattatacacgaaaggaa

SEQ ID NO: 74257 - DNA, 25 bp, Probe sequence
cattatacacgaaaggaaagataga

SEQ ID NO: 74258 - DNA, 25 bp, Probe sequence
attgtttgtgctcctttctgctata

SEQ ID NO: 74259 - DNA, 25 bp, Probe sequence
gctcctttctgctatactcctatta

SEQ ID NO: 74260 - DNA, 25 bp, Probe sequence
tgctcctttctgctatactcctatt

SEQ ID NO: 74261 - DNA, 25 bp, Probe sequence
gtgctcctttctgctatactcctat

SEQ ID NO: 74262 - DNA, 25 bp, Probe sequence
ttgtttgtgctcctttctgctatac

SEQ ID NO: 74263 - DNA, 25 bp, Probe sequence
gtttgtgctcctttctgctatactc

SEQ ID NO: 74264 - DNA, 25 bp, Probe sequence
tgtttgtgctcctttctgctatact

SEQ ID NO: 74265 - DNA, 25 bp, Probe sequence
tgtgctcctttctgctatactccta

SEQ ID NO: 74266 - DNA, 25 bp, Probe sequence
tttgtgctcctttctgctatactcc

SEQ ID NO: 74267 - DNA, 25 bp, Probe sequence
tatagcagaaaggagcacaaacaat

SEQ ID NO: 74268 - DNA, 25 bp, Probe sequence
aataggagtatagcagaaaggagca

SEQ ID NO: 74269 - DNA, 25 bp, Probe sequence
taataggagtatagcagaaaggagc

SEQ ID NO: 74270 - DNA, 25 bp, Probe sequence
ataggagtatagcagaaaggagcac

SEQ ID NO: 74271 - DNA, 25 bp, Probe sequence
gtatagcagaaaggagcacaaacaa

SEQ ID NO: 74272 - DNA, 25 bp, Probe sequence
gagtatagcagaaaggagcacaaac

SEQ ID NO: 74273 - DNA, 25 bp, Probe sequence
agtatagcagaaaggagcacaaaca

SEQ ID NO: 74274 - DNA, 25 bp, Probe sequence
ggagtatagcagaaaggagcacaaa

SEQ ID NO: 74275 - DNA, 25 bp, Probe sequence
taggagtatagcagaaaggagcaca

SEQ ID NO: 74276 - DNA, 25 bp, Probe sequence
aagaattgaagtattaatcatgctt

SEQ ID NO: 74277 - DNA, 25 bp, Probe sequence
aaagaattgaagtattaatcatgct

SEQ ID NO: 74278 - DNA, 25 bp, Probe sequence
atttattacctactacctcactttt

SEQ ID NO: 74279 - DNA, 25 bp, Probe sequence
acctcacttttaaatatatgtggat

SEQ ID NO: 74280 - DNA, 25 bp, Probe sequence
attacctactacctcacttttaaat

SEQ ID NO: 74281 - DNA, 25 bp, Probe sequence
acagaggttttaattatgaaacatg

SEQ ID NO: 74282 - DNA, 25 bp, Probe sequence
cagaggttttaattatgaaacatga

SEQ ID NO: 74283 - DNA, 25 bp, Probe sequence
aaaagcaatcttaactttaagtctt

SEQ ID NO: 74284 - DNA, 25 bp, Probe sequence
tacctcacttttaaatatatgtgga

SEQ ID NO: 74285 - DNA, 25 bp, Probe sequence
aagcatgattaatacttcaattctt

SEQ ID NO: 74286 - DNA, 25 bp, Probe sequence
agcatgattaatacttcaattcttt

SEQ ID NO: 74287 - DNA, 25 bp, Probe sequence
aaaagtgaggtagtaggtaataaat

SEQ ID NO: 74288 - DNA, 25 bp, Probe sequence
atccacatatatttaaaagtgaggt

SEQ ID NO: 74289 - DNA, 25 bp, Probe sequence
atttaaaagtgaggtagtaggtaat

SEQ ID NO: 74290 - DNA, 25 bp, Probe sequence
catgtttcataattaaaacctctgt

SEQ ID NO: 74291 - DNA, 25 bp, Probe sequence
tcatgtttcataattaaaacctctg

SEQ ID NO: 74292 - DNA, 25 bp, Probe sequence
aagacttaaagttaagattgctttt

SEQ ID NO: 74293 - DNA, 25 bp, Probe sequence
tccacatatatttaaaagtgaggta

SEQ ID NO: 74294 - DNA, 25 bp, Probe sequence
taaagtaagcaaaggagaaatgaaa

SEQ ID NO: 74295 - DNA, 25 bp, Probe sequence
ataaagtaagcaaaggagaaatgaa

SEQ ID NO: 74296 - DNA, 25 bp, Probe sequence
cgtattgattaatagcgcctatgtg

SEQ ID NO: 74297 - DNA, 25 bp, Probe sequence
gtattgattaatagcgcctatgtgg

SEQ ID NO: 74298 - DNA, 25 bp, Probe sequence
acgtattgattaatagcgcctatgt

SEQ ID NO: 74299 - DNA, 25 bp, Probe sequence
aacgtattgattaatagcgcctatg

SEQ ID NO: 74300 - DNA, 25 bp, Probe sequence
tataaagtaagcaaaggagaaatga

SEQ ID NO: 74301 - DNA, 25 bp, Probe sequence
atataaagtaagcaaaggagaaatg

SEQ ID NO: 74302 - DNA, 25 bp, Probe sequence
tgtgaaaacgtattgattaatagcg

SEQ ID NO: 74303 - DNA, 25 bp, Probe sequence
tttcatttctcctttgcttacttta

SEQ ID NO: 74304 - DNA, 25 bp, Probe sequence
ttcatttctcctttgcttactttat

SEQ ID NO: 74305 - DNA, 25 bp, Probe sequence
cacataggcgctattaatcaatacg

SEQ ID NO: 74306 - DNA, 25 bp, Probe sequence
acataggcgctattaatcaatacgt

SEQ ID NO: 74307 - DNA, 25 bp, Probe sequence
ccacataggcgctattaatcaatac

SEQ ID NO: 74308 - DNA, 25 bp, Probe sequence
cataggcgctattaatcaatacgtt

SEQ ID NO: 74309 - DNA, 25 bp, Probe sequence
tcatttctcctttgcttactttata

SEQ ID NO: 74310 - DNA, 25 bp, Probe sequence
catttctcctttgcttactttatat

SEQ ID NO: 74311 - DNA, 25 bp, Probe sequence
cgctattaatcaatacgttttcaca

SEQ ID NO: 74312 - DNA, 25 bp, Probe sequence
ttttgccaattttgaggagggaaca

SEQ ID NO: 74313 - DNA, 25 bp, Probe sequence
gtagctcgcctacccttattatttt

SEQ ID NO: 74314 - DNA, 25 bp, Probe sequence
tttgccaattttgaggagggaacac

SEQ ID NO: 74315 - DNA, 25 bp, Probe sequence
tgttccctcctcaaaattggcaaaa

SEQ ID NO: 74316 - DNA, 25 bp, Probe sequence
aaaataataagggtaggcgagctac

SEQ ID NO: 74317 - DNA, 25 bp, Probe sequence
gtgttccctcctcaaaattggcaaa

SEQ ID NO: 74318 - DNA, 25 bp, Probe sequence
tcaactaactaataactcgcttcgt

SEQ ID NO: 74319 - DNA, 25 bp, Probe sequence
gctcaactaactaataactcgcttc

SEQ ID NO: 74320 - DNA, 25 bp, Probe sequence
aaggacgaagcgagttatattgtta

SEQ ID NO: 74321 - DNA, 25 bp, Probe sequence
ctcaactaactaataactcgcttcg

SEQ ID NO: 74322 - DNA, 25 bp, Probe sequence
tgctcaactaactaataactcgctt

SEQ ID NO: 74323 - DNA, 25 bp, Probe sequence
aggacgaagcgagttatattgttaa

SEQ ID NO: 74324 - DNA, 25 bp, Probe sequence
actaactaataactcgcttcgttct

SEQ ID NO: 74325 - DNA, 25 bp, Probe sequence
caactaactaataactcgcttcgtt

SEQ ID NO: 74326 - DNA, 25 bp, Probe sequence
aactaactaataactcgcttcgttc

SEQ ID NO: 74327 - DNA, 25 bp, Probe sequence
gaagcgagttattagttagttgagc

SEQ ID NO: 74328 - DNA, 25 bp, Probe sequence
acgaagcgagttattagttagttga

SEQ ID NO: 74329 - DNA, 25 bp, Probe sequence
aagcgagttattagttagttgagca

SEQ ID NO: 74330 - DNA, 25 bp, Probe sequence
cgaagcgagttattagttagttgag

SEQ ID NO: 74331 - DNA, 25 bp, Probe sequence
taacaatataactcgcttcgtcctt

SEQ ID NO: 74332 - DNA, 25 bp, Probe sequence
ttaacaatataactcgcttcgtcct

SEQ ID NO: 74333 - DNA, 25 bp, Probe sequence
agaacgaagcgagttattagttagt

SEQ ID NO: 74334 - DNA, 25 bp, Probe sequence
aacgaagcgagttattagttagttg

SEQ ID NO: 74335 - DNA, 25 bp, Probe sequence
gaacgaagcgagttattagttagtt

SEQ ID NO: 74336 - DNA, 25 bp, Probe sequence
aacgaaatcaaataacacgctactt

SEQ ID NO: 74337 - DNA, 25 bp, Probe sequence
gaacgaaatcaaataacacgctact

SEQ ID NO: 74338 - DNA, 25 bp, Probe sequence
agaacgaaatcaaataacacgctac

SEQ ID NO: 74339 - DNA, 25 bp, Probe sequence
acgaaatcaaataacacgctacttt

SEQ ID NO: 74340 - DNA, 25 bp, Probe sequence
aatcaaataacacgctactttctgc

SEQ ID NO: 74341 - DNA, 25 bp, Probe sequence
catagaacgaaatcaaataacacgc

SEQ ID NO: 74342 - DNA, 25 bp, Probe sequence
atagaacgaaatcaaataacacgct

SEQ ID NO: 74343 - DNA, 25 bp, Probe sequence
tagaacgaaatcaaataacacgcta

SEQ ID NO: 74344 - DNA, 25 bp, Probe sequence
aaatcaaataacacgctactttctg

SEQ ID NO: 74345 - DNA, 25 bp, Probe sequence
gtagcgtgttatttgatttcgttct

SEQ ID NO: 74346 - DNA, 25 bp, Probe sequence
agtagcgtgttatttgatttcgttc

SEQ ID NO: 74347 - DNA, 25 bp, Probe sequence
aagtagcgtgttatttgatttcgtt

SEQ ID NO: 74348 - DNA, 25 bp, Probe sequence
aaagtagcgtgttatttgatttcgt

SEQ ID NO: 74349 - DNA, 25 bp, Probe sequence
gcagaaagtagcgtgttatttgatt

SEQ ID NO: 74350 - DNA, 25 bp, Probe sequence
gcgtgttatttgatttcgttctatg

SEQ ID NO: 74351 - DNA, 25 bp, Probe sequence
agcgtgttatttgatttcgttctat

SEQ ID NO: 74352 - DNA, 25 bp, Probe sequence
tagcgtgttatttgatttcgttcta

SEQ ID NO: 74353 - DNA, 25 bp, Probe sequence
cagaaagtagcgtgttatttgattt

SEQ ID NO: 74354 - DNA, 25 bp, Probe sequence
attgcgaattttaagttgatagaaa

SEQ ID NO: 74355 - DNA, 25 bp, Probe sequence
ttgcgaattttaagttgatagaaat

SEQ ID NO: 74356 - DNA, 25 bp, Probe sequence
tattgcgaattttaagttgatagaa

SEQ ID NO: 74357 - DNA, 25 bp, Probe sequence
ttattgcgaattttaagttgataga

SEQ ID NO: 74358 - DNA, 25 bp, Probe sequence
tgcgaattttaagttgatagaaata

SEQ ID NO: 74359 - DNA, 25 bp, Probe sequence
cgaattttaagttgatagaaatagc

SEQ ID NO: 74360 - DNA, 25 bp, Probe sequence
gcgaattttaagttgatagaaatag

SEQ ID NO: 74361 - DNA, 25 bp, Probe sequence
tttctatcaacttaaaattcgcaat

SEQ ID NO: 74362 - DNA, 25 bp, Probe sequence
atttctatcaacttaaaattcgcaa

SEQ ID NO: 74363 - DNA, 25 bp, Probe sequence
tctatcaacttaaaattcgcaataa

SEQ ID NO: 74364 - DNA, 25 bp, Probe sequence
ttctatcaacttaaaattcgcaata

SEQ ID NO: 74365 - DNA, 25 bp, Probe sequence
tatttctatcaacttaaaattcgca

SEQ ID NO: 74366 - DNA, 25 bp, Probe sequence
ctatttctatcaacttaaaattcgc

SEQ ID NO: 74367 - DNA, 25 bp, Probe sequence
gctatttctatcaacttaaaattcg

SEQ ID NO: 74368 - DNA, 25 bp, Probe sequence
cacatcagtaacatttctattttca

SEQ ID NO: 74369 - DNA, 25 bp, Probe sequence
acacatcagtaacatttctattttc

SEQ ID NO: 74370 - DNA, 25 bp, Probe sequence
acatcagtaacatttctattttcat

SEQ ID NO: 74371 - DNA, 25 bp, Probe sequence
gaaaatagaaatgttactgatgtgt

SEQ ID NO: 74372 - DNA, 25 bp, Probe sequence
tgaaaatagaaatgttactgatgtg

SEQ ID NO: 74373 - DNA, 25 bp, Probe sequence
atgaaaatagaaatgttactgatgt

SEQ ID NO: 74374 - DNA, 25 bp, Probe sequence
ttaatcaagcactcattcattcctg

SEQ ID NO: 74375 - DNA, 25 bp, Probe sequence
gcactctcatattatggcaatacca

SEQ ID NO: 74376 - DNA, 25 bp, Probe sequence
ataactcccgcaccataatgattta

SEQ ID NO: 74377 - DNA, 25 bp, Probe sequence
taactcccgcaccataatgatttaa

SEQ ID NO: 74378 - DNA, 25 bp, Probe sequence
tttaatcaagcactcattcattcct

SEQ ID NO: 74379 - DNA, 25 bp, Probe sequence
cataactcccgcaccataatgattt

SEQ ID NO: 74380 - DNA, 25 bp, Probe sequence
aataccataactcccgcaccataat

SEQ ID NO: 74381 - DNA, 25 bp, Probe sequence
ctatacctagttaaccgcttgtgat

SEQ ID NO: 74382 - DNA, 25 bp, Probe sequence
atacctagttaaccgcttgtgatta

SEQ ID NO: 74383 - DNA, 25 bp, Probe sequence
caggaatgaatgagtgcttgattaa

SEQ ID NO: 74384 - DNA, 25 bp, Probe sequence
tggtattgccataatatgagagtgc

SEQ ID NO: 74385 - DNA, 25 bp, Probe sequence
taaatcattatggtgcgggagttat

SEQ ID NO: 74386 - DNA, 25 bp, Probe sequence
ttaaatcattatggtgcgggagtta

SEQ ID NO: 74387 - DNA, 25 bp, Probe sequence
aggaatgaatgagtgcttgattaaa

SEQ ID NO: 74388 - DNA, 25 bp, Probe sequence
aaatcattatggtgcgggagttatg

SEQ ID NO: 74389 - DNA, 25 bp, Probe sequence
attatggtgcgggagttatggtatt

SEQ ID NO: 74390 - DNA, 25 bp, Probe sequence
atcacaagcggttaactaggtatag

SEQ ID NO: 74391 - DNA, 25 bp, Probe sequence
aatcacaagcggttaactaggtata

SEQ ID NO: 74392 - DNA, 25 bp, Probe sequence
attctctcagcatcttatatcacct

SEQ ID NO: 74393 - DNA, 25 bp, Probe sequence
gattctctcagcatcttatatcacc

SEQ ID NO: 74394 - DNA, 25 bp, Probe sequence
tctctcagcatcttatatcacctaa

SEQ ID NO: 74395 - DNA, 25 bp, Probe sequence
ttctctcagcatcttatatcaccta

SEQ ID NO: 74396 - DNA, 25 bp, Probe sequence
ttatgaccaccaattattacacaca

SEQ ID NO: 74397 - DNA, 25 bp, Probe sequence
ctcgtctatcatggaatgttctagt

SEQ ID NO: 74398 - DNA, 25 bp, Probe sequence
actcgtctatcatggaatgttctag

SEQ ID NO: 74399 - DNA, 25 bp, Probe sequence
tgaccaccaattattacacacataa

SEQ ID NO: 74400 - DNA, 25 bp, Probe sequence
tcatactcgtctatcatggaatgtt

SEQ ID NO: 74401 - DNA, 25 bp, Probe sequence
aggtgatataagatgctgagagaat

SEQ ID NO: 74402 - DNA, 25 bp, Probe sequence
ggtgatataagatgctgagagaatc

SEQ ID NO: 74403 - DNA, 25 bp, Probe sequence
taggtgatataagatgctgagagaa

SEQ ID NO: 74404 - DNA, 25 bp, Probe sequence
ttaggtgatataagatgctgagaga

SEQ ID NO: 74405 - DNA, 25 bp, Probe sequence
tgtgtgtaataattggtggtcataa

SEQ ID NO: 74406 - DNA, 25 bp, Probe sequence
ctagaacattccatgatagacgagt

SEQ ID NO: 74407 - DNA, 25 bp, Probe sequence
actagaacattccatgatagacgag

SEQ ID NO: 74408 - DNA, 25 bp, Probe sequence
ttatgtgtgtaataattggtggtca

SEQ ID NO: 74409 - DNA, 25 bp, Probe sequence
aacattccatgatagacgagtatga

SEQ ID NO: 74410 - DNA, 25 bp, Probe sequence
cactgtataaataaccgcactttct

SEQ ID NO: 74411 - DNA, 25 bp, Probe sequence
tcactgtataaataaccgcactttc

SEQ ID NO: 74412 - DNA, 25 bp, Probe sequence
gattcactgtataaataaccgcact

SEQ ID NO: 74413 - DNA, 25 bp, Probe sequence
agattcactgtataaataaccgcac

SEQ ID NO: 74414 - DNA, 25 bp, Probe sequence
ttcactgtataaataaccgcacttt

SEQ ID NO: 74415 - DNA, 25 bp, Probe sequence
attcactgtataaataaccgcactt

SEQ ID NO: 74416 - DNA, 25 bp, Probe sequence
actgtataaataaccgcactttcta

SEQ ID NO: 74417 - DNA, 25 bp, Probe sequence
tagattcactgtataaataaccgca

SEQ ID NO: 74418 - DNA, 25 bp, Probe sequence
ctgtataaataaccgcactttctat

SEQ ID NO: 74419 - DNA, 25 bp, Probe sequence
gaaagtgcggttatttatacagtga

SEQ ID NO: 74420 - DNA, 25 bp, Probe sequence
agaaagtgcggttatttatacagtg

SEQ ID NO: 74421 - DNA, 25 bp, Probe sequence
gtgcggttatttatacagtgaatct

SEQ ID NO: 74422 - DNA, 25 bp, Probe sequence
agtgcggttatttatacagtgaatc

SEQ ID NO: 74423 - DNA, 25 bp, Probe sequence
aaagtgcggttatttatacagtgaa

SEQ ID NO: 74424 - DNA, 25 bp, Probe sequence
aagtgcggttatttatacagtgaat

SEQ ID NO: 74425 - DNA, 25 bp, Probe sequence
tagaaagtgcggttatttatacagt

SEQ ID NO: 74426 - DNA, 25 bp, Probe sequence
tgcggttatttatacagtgaatcta

SEQ ID NO: 74427 - DNA, 25 bp, Probe sequence
gcggttatttatacagtgaatctaa

SEQ ID NO: 74428 - DNA, 25 bp, Probe sequence
cgaaggctaacttacgaatagatga

SEQ ID NO: 74429 - DNA, 25 bp, Probe sequence
ccgaaggctaacttacgaatagatg

SEQ ID NO: 74430 - DNA, 25 bp, Probe sequence
gaaggctaacttacgaatagatgaa

SEQ ID NO: 74431 - DNA, 25 bp, Probe sequence
atctcctttatccaacattcccaaa

SEQ ID NO: 74432 - DNA, 25 bp, Probe sequence
tatctcctttatccaacattcccaa

SEQ ID NO: 74433 - DNA, 25 bp, Probe sequence
ttatctcctttatccaacattccca

SEQ ID NO: 74434 - DNA, 25 bp, Probe sequence
acagaggatttctaagcatcttgaa

SEQ ID NO: 74435 - DNA, 25 bp, Probe sequence
aacagaggatttctaagcatcttga

SEQ ID NO: 74436 - DNA, 25 bp, Probe sequence
aaacagaggatttctaagcatcttg

SEQ ID NO: 74437 - DNA, 25 bp, Probe sequence
tcatctattcgtaagttagccttcg

SEQ ID NO: 74438 - DNA, 25 bp, Probe sequence
catctattcgtaagttagccttcgg

SEQ ID NO: 74439 - DNA, 25 bp, Probe sequence
ttcatctattcgtaagttagccttc

SEQ ID NO: 74440 - DNA, 25 bp, Probe sequence
tttgggaatgttggataaaggagat

SEQ ID NO: 74441 - DNA, 25 bp, Probe sequence
tgggaatgttggataaaggagataa

SEQ ID NO: 74442 - DNA, 25 bp, Probe sequence
ttgggaatgttggataaaggagata

SEQ ID NO: 74443 - DNA, 25 bp, Probe sequence
tcaagatgcttagaaatcctctgtt

SEQ ID NO: 74444 - DNA, 25 bp, Probe sequence
ttcaagatgcttagaaatcctctgt

SEQ ID NO: 74445 - DNA, 25 bp, Probe sequence
caagatgcttagaaatcctctgttt

SEQ ID NO: 74446 - DNA, 25 bp, Probe sequence
tcttctggatctatgtaacactcaa

SEQ ID NO: 74447 - DNA, 25 bp, Probe sequence
atcttctggatctatgtaacactca

SEQ ID NO: 74448 - DNA, 25 bp, Probe sequence
cttctggatctatgtaacactcaat

SEQ ID NO: 74449 - DNA, 25 bp, Probe sequence
tgaacagtgataatcttctggatct

SEQ ID NO: 74450 - DNA, 25 bp, Probe sequence
aatcttctggatctatgtaacactc

SEQ ID NO: 74451 - DNA, 25 bp, Probe sequence
ttctggatctatgtaacactcaatt

SEQ ID NO: 74452 - DNA, 25 bp, Probe sequence
ttgaacagtgataatcttctggatc

SEQ ID NO: 74453 - DNA, 25 bp, Probe sequence
cagtgataatcttctggatctatgt

SEQ ID NO: 74454 - DNA, 25 bp, Probe sequence
acagtgataatcttctggatctatg

SEQ ID NO: 74455 - DNA, 25 bp, Probe sequence
ttgagtgttacatagatccagaaga

SEQ ID NO: 74456 - DNA, 25 bp, Probe sequence
tgagtgttacatagatccagaagat

SEQ ID NO: 74457 - DNA, 25 bp, Probe sequence
attgagtgttacatagatccagaag

SEQ ID NO: 74458 - DNA, 25 bp, Probe sequence
agatccagaagattatcactgttca

SEQ ID NO: 74459 - DNA, 25 bp, Probe sequence
gagtgttacatagatccagaagatt

SEQ ID NO: 74460 - DNA, 25 bp, Probe sequence
aattgagtgttacatagatccagaa

SEQ ID NO: 74461 - DNA, 25 bp, Probe sequence
gatccagaagattatcactgttcaa

SEQ ID NO: 74462 - DNA, 25 bp, Probe sequence
tagatccagaagattatcactgttc

SEQ ID NO: 74463 - DNA, 25 bp, Probe sequence
catagatccagaagattatcactgt

SEQ ID NO: 74464 - DNA, 25 bp, Probe sequence
ctcttcttgcgttaatgttgctaat

SEQ ID NO: 74465 - DNA, 25 bp, Probe sequence
tcttcttgcgttaatgttgctaatt

SEQ ID NO: 74466 - DNA, 25 bp, Probe sequence
tctcttcttgcgttaatgttgctaa

SEQ ID NO: 74467 - DNA, 25 bp, Probe sequence
ttctcttcttgcgttaatgttgcta

SEQ ID NO: 74468 - DNA, 25 bp, Probe sequence
cttcttgcgttaatgttgctaatta

SEQ ID NO: 74469 - DNA, 25 bp, Probe sequence
tactcttatcctttctcttcttgcg

SEQ ID NO: 74470 - DNA, 25 bp, Probe sequence
tcttatcctttctcttcttgcgtta

SEQ ID NO: 74471 - DNA, 25 bp, Probe sequence
ctcttatcctttctcttcttgcgtt

SEQ ID NO: 74472 - DNA, 25 bp, Probe sequence
atcctttctcttcttgcgttaatgt

SEQ ID NO: 74473 - DNA, 25 bp, Probe sequence
attagcaacattaacgcaagaagag

SEQ ID NO: 74474 - DNA, 25 bp, Probe sequence
aattagcaacattaacgcaagaaga

SEQ ID NO: 74475 - DNA, 25 bp, Probe sequence
tagcaacattaacgcaagaagagaa

SEQ ID NO: 74476 - DNA, 25 bp, Probe sequence
ttagcaacattaacgcaagaagaga

SEQ ID NO: 74477 - DNA, 25 bp, Probe sequence
taattagcaacattaacgcaagaag

SEQ ID NO: 74478 - DNA, 25 bp, Probe sequence
cgcaagaagagaaaggataagagta

SEQ ID NO: 74479 - DNA, 25 bp, Probe sequence
taacgcaagaagagaaaggataaga

SEQ ID NO: 74480 - DNA, 25 bp, Probe sequence
aacgcaagaagagaaaggataagag

SEQ ID NO: 74481 - DNA, 25 bp, Probe sequence
acattaacgcaagaagagaaaggat

SEQ ID NO: 74482 - DNA, 25 bp, Probe sequence
aagatagattgaccagcgatgttta

SEQ ID NO: 74483 - DNA, 25 bp, Probe sequence
agatagattgaccagcgatgtttaa

SEQ ID NO: 74484 - DNA, 25 bp, Probe sequence
aaagatagattgaccagcgatgttt

SEQ ID NO: 74485 - DNA, 25 bp, Probe sequence
cgtttacacatttgaatgaaggaga

SEQ ID NO: 74486 - DNA, 25 bp, Probe sequence
ttaaatgaccactcacactttgttt

SEQ ID NO: 74487 - DNA, 25 bp, Probe sequence
caaagatagattgaccagcgatgtt

SEQ ID NO: 74488 - DNA, 25 bp, Probe sequence
tagattgaccagcgatgtttaaagt

SEQ ID NO: 74489 - DNA, 25 bp, Probe sequence
atagattgaccagcgatgtttaaag

SEQ ID NO: 74490 - DNA, 25 bp, Probe sequence
gatagattgaccagcgatgtttaaa

SEQ ID NO: 74491 - DNA, 25 bp, Probe sequence
taaacatcgctggtcaatctatctt

SEQ ID NO: 74492 - DNA, 25 bp, Probe sequence
ttaaacatcgctggtcaatctatct

SEQ ID NO: 74493 - DNA, 25 bp, Probe sequence
aaacatcgctggtcaatctatcttt

SEQ ID NO: 74494 - DNA, 25 bp, Probe sequence
tctccttcattcaaatgtgtaaacg

SEQ ID NO: 74495 - DNA, 25 bp, Probe sequence
aacatcgctggtcaatctatctttg

SEQ ID NO: 74496 - DNA, 25 bp, Probe sequence
aaacaaagtgtgagtggtcatttaa

SEQ ID NO: 74497 - DNA, 25 bp, Probe sequence
tttaaacatcgctggtcaatctatc

SEQ ID NO: 74498 - DNA, 25 bp, Probe sequence
ctttaaacatcgctggtcaatctat

SEQ ID NO: 74499 - DNA, 25 bp, Probe sequence
actttaaacatcgctggtcaatcta

SEQ ID NO: 74500 - DNA, 25 bp, Probe sequence
cctcactaactcaatatgataatcg

SEQ ID NO: 74501 - DNA, 25 bp, Probe sequence
actaatcctcactaactcaatatga

SEQ ID NO: 74502 - DNA, 25 bp, Probe sequence
ggagtccgttaattataataagcgt

SEQ ID NO: 74503 - DNA, 25 bp, Probe sequence
ctcactaactcaatatgataatcgt

SEQ ID NO: 74504 - DNA, 25 bp, Probe sequence
aactaatcctcactaactcaatatg

SEQ ID NO: 74505 - DNA, 25 bp, Probe sequence
ccgttaattataataagcgttctcc

SEQ ID NO: 74506 - DNA, 25 bp, Probe sequence
agtaaactaatcctcactaactcaa

SEQ ID NO: 74507 - DNA, 25 bp, Probe sequence
tcactaactcaatatgataatcgtt

SEQ ID NO: 74508 - DNA, 25 bp, Probe sequence
gtccgttaattataataagcgttct

SEQ ID NO: 74509 - DNA, 25 bp, Probe sequence
cgattatcatattgagttagtgagg

SEQ ID NO: 74510 - DNA, 25 bp, Probe sequence
tcatattgagttagtgaggattagt

SEQ ID NO: 74511 - DNA, 25 bp, Probe sequence
acgcttattataattaacggactcc

SEQ ID NO: 74512 - DNA, 25 bp, Probe sequence
acgattatcatattgagttagtgag

SEQ ID NO: 74513 - DNA, 25 bp, Probe sequence
catattgagttagtgaggattagtt

SEQ ID NO: 74514 - DNA, 25 bp, Probe sequence
ggagaacgcttattataattaacgg

SEQ ID NO: 74515 - DNA, 25 bp, Probe sequence
ttgagttagtgaggattagtttact

SEQ ID NO: 74516 - DNA, 25 bp, Probe sequence
aacgcttattataattaacggactc

SEQ ID NO: 74517 - DNA, 25 bp, Probe sequence
gaacgcttattataattaacggact

SEQ ID NO: 74518 - DNA, 25 bp, Probe sequence
acaaacagcgaacaaacttaacttt

SEQ ID NO: 74519 - DNA, 25 bp, Probe sequence
aacaaacagcgaacaaacttaactt

SEQ ID NO: 74520 - DNA, 25 bp, Probe sequence
gaacaaacagcgaacaaacttaact

SEQ ID NO: 74521 - DNA, 25 bp, Probe sequence
tttattaggagccacacactacatg

SEQ ID NO: 74522 - DNA, 25 bp, Probe sequence
cgaacaaacagcgaacaaacttaac

SEQ ID NO: 74523 - DNA, 25 bp, Probe sequence
ataacacgaacaaacagcgaacaaa

SEQ ID NO: 74524 - DNA, 25 bp, Probe sequence
aataacacgaacaaacagcgaacaa

SEQ ID NO: 74525 - DNA, 25 bp, Probe sequence
aaataacacgaacaaacagcgaaca

SEQ ID NO: 74526 - DNA, 25 bp, Probe sequence
acgaacaaacagcgaacaaacttaa

SEQ ID NO: 74527 - DNA, 25 bp, Probe sequence
aagttaagtttgttcgctgtttgtt

SEQ ID NO: 74528 - DNA, 25 bp, Probe sequence
aaagttaagtttgttcgctgtttgt

SEQ ID NO: 74529 - DNA, 25 bp, Probe sequence
agttaagtttgttcgctgtttgttc

SEQ ID NO: 74530 - DNA, 25 bp, Probe sequence
catgtagtgtgtggctcctaataaa

SEQ ID NO: 74531 - DNA, 25 bp, Probe sequence
gttaagtttgttcgctgtttgttcg

SEQ ID NO: 74532 - DNA, 25 bp, Probe sequence
tgttcgctgtttgttcgtgttattt

SEQ ID NO: 74533 - DNA, 25 bp, Probe sequence
ttgttcgctgtttgttcgtgttatt

SEQ ID NO: 74534 - DNA, 25 bp, Probe sequence
tttgttcgctgtttgttcgtgttat

SEQ ID NO: 74535 - DNA, 25 bp, Probe sequence
ttaagtttgttcgctgtttgttcgt

SEQ ID NO: 74536 - DNA, 25 bp, Probe sequence
tgtactatctgcatgtaactgttga

SEQ ID NO: 74537 - DNA, 25 bp, Probe sequence
gtgtactatctgcatgtaactgttg

SEQ ID NO: 74538 - DNA, 25 bp, Probe sequence
cttcgtgtactatctgcatgtaact

SEQ ID NO: 74539 - DNA, 25 bp, Probe sequence
tacttcgtgtactatctgcatgtaa

SEQ ID NO: 74540 - DNA, 25 bp, Probe sequence
ttcgtgtactatctgcatgtaactg

SEQ ID NO: 74541 - DNA, 25 bp, Probe sequence
acttcgtgtactatctgcatgtaac

SEQ ID NO: 74542 - DNA, 25 bp, Probe sequence
accatacacagttaaatacacacct

SEQ ID NO: 74543 - DNA, 25 bp, Probe sequence
cgtgtactatctgcatgtaactgtt

SEQ ID NO: 74544 - DNA, 25 bp, Probe sequence
tagcctcgtgataattagtacacaa

SEQ ID NO: 74545 - DNA, 25 bp, Probe sequence
caacagttacatgcagatagtacac

SEQ ID NO: 74546 - DNA, 25 bp, Probe sequence
tcaacagttacatgcagatagtaca

SEQ ID NO: 74547 - DNA, 25 bp, Probe sequence
agttacatgcagatagtacacgaag

SEQ ID NO: 74548 - DNA, 25 bp, Probe sequence
ttacatgcagatagtacacgaagta

SEQ ID NO: 74549 - DNA, 25 bp, Probe sequence
aggtgtgtatttaactgtgtatggt

SEQ ID NO: 74550 - DNA, 25 bp, Probe sequence
gttacatgcagatagtacacgaagt

SEQ ID NO: 74551 - DNA, 25 bp, Probe sequence
cagttacatgcagatagtacacgaa

SEQ ID NO: 74552 - DNA, 25 bp, Probe sequence
aacagttacatgcagatagtacacg

SEQ ID NO: 74553 - DNA, 25 bp, Probe sequence
ttgtgtactaattatcacgaggcta

SEQ ID NO: 74554 - DNA, 25 bp, Probe sequence
ttaatgaaacaacagagcaaagatg

SEQ ID NO: 74555 - DNA, 25 bp, Probe sequence
taatgaaacaacagagcaaagatgt

SEQ ID NO: 74556 - DNA, 25 bp, Probe sequence
cttaatgaaacaacagagcaaagat

SEQ ID NO: 74557 - DNA, 25 bp, Probe sequence
tttgcacctcttaatgaaacaacag

SEQ ID NO: 74558 - DNA, 25 bp, Probe sequence
ttgcacctcttaatgaaacaacaga

SEQ ID NO: 74559 - DNA, 25 bp, Probe sequence
tcttaatgaaacaacagagcaaaga

SEQ ID NO: 74560 - DNA, 25 bp, Probe sequence
cctcttaatgaaacaacagagcaaa

SEQ ID NO: 74561 - DNA, 25 bp, Probe sequence
aatgaaacaacagagcaaagatgtt

SEQ ID NO: 74562 - DNA, 25 bp, Probe sequence
tgaaacaacagagcaaagatgttat

SEQ ID NO: 74563 - DNA, 25 bp, Probe sequence
catctttgctctgttgtttcattaa

SEQ ID NO: 74564 - DNA, 25 bp, Probe sequence
acatctttgctctgttgtttcatta

SEQ ID NO: 74565 - DNA, 25 bp, Probe sequence
atctttgctctgttgtttcattaag

SEQ ID NO: 74566 - DNA, 25 bp, Probe sequence
ctgttgtttcattaagaggtgcaaa

SEQ ID NO: 74567 - DNA, 25 bp, Probe sequence
tctgttgtttcattaagaggtgcaa

SEQ ID NO: 74568 - DNA, 25 bp, Probe sequence
tctttgctctgttgtttcattaaga

SEQ ID NO: 74569 - DNA, 25 bp, Probe sequence
tttgctctgttgtttcattaagagg

SEQ ID NO: 74570 - DNA, 25 bp, Probe sequence
aacatctttgctctgttgtttcatt

SEQ ID NO: 74571 - DNA, 25 bp, Probe sequence
taacatctttgctctgttgtttcat

SEQ ID NO: 74572 - DNA, 25 bp, Probe sequence
tttctatgaccaaattacgaccacc

SEQ ID NO: 74573 - DNA, 25 bp, Probe sequence
atttctatgaccaaattacgaccac

SEQ ID NO: 74574 - DNA, 25 bp, Probe sequence
tacgaccacccaatattacaaactt

SEQ ID NO: 74575 - DNA, 25 bp, Probe sequence
ttacgaccacccaatattacaaact

SEQ ID NO: 74576 - DNA, 25 bp, Probe sequence
ccaaattacgaccacccaatattac

SEQ ID NO: 74577 - DNA, 25 bp, Probe sequence
accaaattacgaccacccaatatta

SEQ ID NO: 74578 - DNA, 25 bp, Probe sequence
attacgaccacccaatattacaaac

SEQ ID NO: 74579 - DNA, 25 bp, Probe sequence
caaattacgaccacccaatattaca

SEQ ID NO: 74580 - DNA, 25 bp, Probe sequence
cgaccacccaatattacaaacttta

SEQ ID NO: 74581 - DNA, 25 bp, Probe sequence
ggtggtcgtaatttggtcatagaaa

SEQ ID NO: 74582 - DNA, 25 bp, Probe sequence
gtggtcgtaatttggtcatagaaat

SEQ ID NO: 74583 - DNA, 25 bp, Probe sequence
taatattgggtggtcgtaatttggt

SEQ ID NO: 74584 - DNA, 25 bp, Probe sequence
gtaatattgggtggtcgtaatttgg

SEQ ID NO: 74585 - DNA, 25 bp, Probe sequence
agtttgtaatattgggtggtcgtaa

SEQ ID NO: 74586 - DNA, 25 bp, Probe sequence
aagtttgtaatattgggtggtcgta

SEQ ID NO: 74587 - DNA, 25 bp, Probe sequence
tgtaatattgggtggtcgtaatttg

SEQ ID NO: 74588 - DNA, 25 bp, Probe sequence
gtttgtaatattgggtggtcgtaat

SEQ ID NO: 74589 - DNA, 25 bp, Probe sequence
taaagtttgtaatattgggtggtcg

SEQ ID NO: 74590 - DNA, 25 bp, Probe sequence
cctccatttgtttagtcatatttca

SEQ ID NO: 74591 - DNA, 25 bp, Probe sequence
acctccatttgtttagtcatatttc

SEQ ID NO: 74592 - DNA, 25 bp, Probe sequence
aacctccatttgtttagtcatattt

SEQ ID NO: 74593 - DNA, 25 bp, Probe sequence
ctccatttgtttagtcatatttcat

SEQ ID NO: 74594 - DNA, 25 bp, Probe sequence
aaacctccatttgtttagtcatatt

SEQ ID NO: 74595 - DNA, 25 bp, Probe sequence
tgataaacctccatttgtttagtca

SEQ ID NO: 74596 - DNA, 25 bp, Probe sequence
tccatttgtttagtcatatttcatt

SEQ ID NO: 74597 - DNA, 25 bp, Probe sequence
gataaacctccatttgtttagtcat

SEQ ID NO: 74598 - DNA, 25 bp, Probe sequence
atgataaacctccatttgtttagtc

SEQ ID NO: 74599 - DNA, 25 bp, Probe sequence
gaaatatgactaaacaaatggaggt

SEQ ID NO: 74600 - DNA, 25 bp, Probe sequence
tgaaatatgactaaacaaatggagg

SEQ ID NO: 74601 - DNA, 25 bp, Probe sequence
aaatatgactaaacaaatggaggtt

SEQ ID NO: 74602 - DNA, 25 bp, Probe sequence
atgaaatatgactaaacaaatggag

SEQ ID NO: 74603 - DNA, 25 bp, Probe sequence
aatatgactaaacaaatggaggttt

SEQ ID NO: 74604 - DNA, 25 bp, Probe sequence
tgactaaacaaatggaggtttatca

SEQ ID NO: 74605 - DNA, 25 bp, Probe sequence
aatgaaatatgactaaacaaatgga

SEQ ID NO: 74606 - DNA, 25 bp, Probe sequence
gactaaacaaatggaggtttatcat

SEQ ID NO: 74607 - DNA, 25 bp, Probe sequence
atgactaaacaaatggaggtttatc

SEQ ID NO: 74608 - DNA, 25 bp, Probe sequence
acattaaagagtgctaacatacatt

SEQ ID NO: 74609 - DNA, 25 bp, Probe sequence
aacattaaagagtgctaacatacat

SEQ ID NO: 74610 - DNA, 25 bp, Probe sequence
acttaacattaaagagtgctaacat

SEQ ID NO: 74611 - DNA, 25 bp, Probe sequence
agtttagcacttaacattaaagagt

SEQ ID NO: 74612 - DNA, 25 bp, Probe sequence
taacattaaagagtgctaacataca

SEQ ID NO: 74613 - DNA, 25 bp, Probe sequence
cattaaagagtgctaacatacattt

SEQ ID NO: 74614 - DNA, 25 bp, Probe sequence
ttaacattaaagagtgctaacatac

SEQ ID NO: 74615 - DNA, 25 bp, Probe sequence
aacctaaagtttagcacttaacatt

SEQ ID NO: 74616 - DNA, 25 bp, Probe sequence
aaacctaaagtttagcacttaacat

SEQ ID NO: 74617 - DNA, 25 bp, Probe sequence
atgtatgttagcactctttaatgtt

SEQ ID NO: 74618 - DNA, 25 bp, Probe sequence
aatgtatgttagcactctttaatgt

SEQ ID NO: 74619 - DNA, 25 bp, Probe sequence
actctttaatgttaagtgctaaact

SEQ ID NO: 74620 - DNA, 25 bp, Probe sequence
atgttagcactctttaatgttaagt

SEQ ID NO: 74621 - DNA, 25 bp, Probe sequence
tgtatgttagcactctttaatgtta

SEQ ID NO: 74622 - DNA, 25 bp, Probe sequence
aaatgtatgttagcactctttaatg

SEQ ID NO: 74623 - DNA, 25 bp, Probe sequence
gtatgttagcactctttaatgttaa

SEQ ID NO: 74624 - DNA, 25 bp, Probe sequence
atgttaagtgctaaactttaggttt

SEQ ID NO: 74625 - DNA, 25 bp, Probe sequence
aatgttaagtgctaaactttaggtt

SEQ ID NO: 74626 - DNA, 25 bp, Probe sequence
cgtaaatattactttacaagtccga

SEQ ID NO: 74627 - DNA, 25 bp, Probe sequence
tcgtaaatattactttacaagtccg

SEQ ID NO: 74628 - DNA, 25 bp, Probe sequence
actttacaagtccgagtataaattt

SEQ ID NO: 74629 - DNA, 25 bp, Probe sequence
tactttacaagtccgagtataaatt

SEQ ID NO: 74630 - DNA, 25 bp, Probe sequence
ttactttacaagtccgagtataaat

SEQ ID NO: 74631 - DNA, 25 bp, Probe sequence
attactttacaagtccgagtataaa

SEQ ID NO: 74632 - DNA, 25 bp, Probe sequence
ctttactaaagaaggagcaataatt

SEQ ID NO: 74633 - DNA, 25 bp, Probe sequence
aaatattactttacaagtccgagta

SEQ ID NO: 74634 - DNA, 25 bp, Probe sequence
taaatattactttacaagtccgagt

SEQ ID NO: 74635 - DNA, 25 bp, Probe sequence
cggacttgtaaagtaatatttacga

SEQ ID NO: 74636 - DNA, 25 bp, Probe sequence
tcggacttgtaaagtaatatttacg

SEQ ID NO: 74637 - DNA, 25 bp, Probe sequence
aaatttatactcggacttgtaaagt

SEQ ID NO: 74638 - DNA, 25 bp, Probe sequence
tttatactcggacttgtaaagtaat

SEQ ID NO: 74639 - DNA, 25 bp, Probe sequence
atttatactcggacttgtaaagtaa

SEQ ID NO: 74640 - DNA, 25 bp, Probe sequence
aatttatactcggacttgtaaagta

SEQ ID NO: 74641 - DNA, 25 bp, Probe sequence
aattattgctccttctttagtaaag

SEQ ID NO: 74642 - DNA, 25 bp, Probe sequence
actcggacttgtaaagtaatattta

SEQ ID NO: 74643 - DNA, 25 bp, Probe sequence
tactcggacttgtaaagtaatattt

SEQ ID NO: 74644 - DNA, 25 bp, Probe sequence
gtagtagttcttacacattagccgc

SEQ ID NO: 74645 - DNA, 25 bp, Probe sequence
tagtagttcttacacattagccgct

SEQ ID NO: 74646 - DNA, 25 bp, Probe sequence
agtagttcttacacattagccgctg

SEQ ID NO: 74647 - DNA, 25 bp, Probe sequence
tgtagtagttcttacacattagccg

SEQ ID NO: 74648 - DNA, 25 bp, Probe sequence
agaatgggacagaaatgataaagaa

SEQ ID NO: 74649 - DNA, 25 bp, Probe sequence
aagaatgggacagaaatgataaaga

SEQ ID NO: 74650 - DNA, 25 bp, Probe sequence
ttgttaagaatgggacagaaatgat

SEQ ID NO: 74651 - DNA, 25 bp, Probe sequence
attgttaagaatgggacagaaatga

SEQ ID NO: 74652 - DNA, 25 bp, Probe sequence
gaatgggacagaaatgataaagaat

SEQ ID NO: 74653 - DNA, 25 bp, Probe sequence
gcggctaatgtgtaagaactactac

SEQ ID NO: 74654 - DNA, 25 bp, Probe sequence
agcggctaatgtgtaagaactacta

SEQ ID NO: 74655 - DNA, 25 bp, Probe sequence
cggctaatgtgtaagaactactaca

SEQ ID NO: 74656 - DNA, 25 bp, Probe sequence
cagcggctaatgtgtaagaactact

SEQ ID NO: 74657 - DNA, 25 bp, Probe sequence
tctttatcatttctgtcccattctt

SEQ ID NO: 74658 - DNA, 25 bp, Probe sequence
ttctttatcatttctgtcccattct

SEQ ID NO: 74659 - DNA, 25 bp, Probe sequence
tcatttctgtcccattcttaacaat

SEQ ID NO: 74660 - DNA, 25 bp, Probe sequence
atcatttctgtcccattcttaacaa

SEQ ID NO: 74661 - DNA, 25 bp, Probe sequence
attctttatcatttctgtcccattc

SEQ ID NO: 74662 - DNA, 25 bp, Probe sequence
taagatctatcaaggatgcgatgtt

SEQ ID NO: 74663 - DNA, 25 bp, Probe sequence
ataagatctatcaaggatgcgatgt

SEQ ID NO: 74664 - DNA, 25 bp, Probe sequence
tataagatctatcaaggatgcgatg

SEQ ID NO: 74665 - DNA, 25 bp, Probe sequence
atataagatctatcaaggatgcgat

SEQ ID NO: 74666 - DNA, 25 bp, Probe sequence
tttgcgtttcaacataacttttagt

SEQ ID NO: 74667 - DNA, 25 bp, Probe sequence
tatataagatctatcaaggatgcga

SEQ ID NO: 74668 - DNA, 25 bp, Probe sequence
tgcgtttcaacataacttttagtaa

SEQ ID NO: 74669 - DNA, 25 bp, Probe sequence
ttgcgtttcaacataacttttagta

SEQ ID NO: 74670 - DNA, 25 bp, Probe sequence
ttttgcgtttcaacataacttttag

SEQ ID NO: 74671 - DNA, 25 bp, Probe sequence
aacatcgcatccttgatagatctta

SEQ ID NO: 74672 - DNA, 25 bp, Probe sequence
acatcgcatccttgatagatcttat

SEQ ID NO: 74673 - DNA, 25 bp, Probe sequence
catcgcatccttgatagatcttata

SEQ ID NO: 74674 - DNA, 25 bp, Probe sequence
atcgcatccttgatagatcttatat

SEQ ID NO: 74675 - DNA, 25 bp, Probe sequence
actaaaagttatgttgaaacgcaaa

SEQ ID NO: 74676 - DNA, 25 bp, Probe sequence
tcgcatccttgatagatcttatata

SEQ ID NO: 74677 - DNA, 25 bp, Probe sequence
tactaaaagttatgttgaaacgcaa

SEQ ID NO: 74678 - DNA, 25 bp, Probe sequence
ttactaaaagttatgttgaaacgca

SEQ ID NO: 74679 - DNA, 25 bp, Probe sequence
ctaaaagttatgttgaaacgcaaaa

SEQ ID NO: 74680 - DNA, 25 bp, Probe sequence
cgcccgaaataatatttaacacatg

SEQ ID NO: 74681 - DNA, 25 bp, Probe sequence
gaagcgcccgaaataatatttaaca

SEQ ID NO: 74682 - DNA, 25 bp, Probe sequence
aagcgcccgaaataatatttaacac

SEQ ID NO: 74683 - DNA, 25 bp, Probe sequence
gcgcccgaaataatatttaacacat

SEQ ID NO: 74684 - DNA, 25 bp, Probe sequence
agcgcccgaaataatatttaacaca

SEQ ID NO: 74685 - DNA, 25 bp, Probe sequence
gcccgaaataatatttaacacatgt

SEQ ID NO: 74686 - DNA, 25 bp, Probe sequence
tgactaaacatagatttatgagaga

SEQ ID NO: 74687 - DNA, 25 bp, Probe sequence
cccgaaataatatttaacacatgtc

SEQ ID NO: 74688 - DNA, 25 bp, Probe sequence
ccgaaataatatttaacacatgtca

SEQ ID NO: 74689 - DNA, 25 bp, Probe sequence
catgtgttaaatattatttcgggcg

SEQ ID NO: 74690 - DNA, 25 bp, Probe sequence
tgttaaatattatttcgggcgcttc

SEQ ID NO: 74691 - DNA, 25 bp, Probe sequence
gtgttaaatattatttcgggcgctt

SEQ ID NO: 74692 - DNA, 25 bp, Probe sequence
atgtgttaaatattatttcgggcgc

SEQ ID NO: 74693 - DNA, 25 bp, Probe sequence
tgtgttaaatattatttcgggcgct

SEQ ID NO: 74694 - DNA, 25 bp, Probe sequence
acatgtgttaaatattatttcgggc

SEQ ID NO: 74695 - DNA, 25 bp, Probe sequence
tctctcataaatctatgtttagtca

SEQ ID NO: 74696 - DNA, 25 bp, Probe sequence
gacatgtgttaaatattatttcggg

SEQ ID NO: 74697 - DNA, 25 bp, Probe sequence
tgacatgtgttaaatattatttcgg

SEQ ID NO: 74698 - DNA, 25 bp, Probe sequence
ggctcacgaccatacttattattaa

SEQ ID NO: 74699 - DNA, 25 bp, Probe sequence
aatacatagcactgagtccaaggaa

SEQ ID NO: 74700 - DNA, 25 bp, Probe sequence
gggctcacgaccatacttattatta

SEQ ID NO: 74701 - DNA, 25 bp, Probe sequence
tgggatggcttaataactcatactt

SEQ ID NO: 74702 - DNA, 25 bp, Probe sequence
ttgggatggcttaataactcatact

SEQ ID NO: 74703 - DNA, 25 bp, Probe sequence
gttgggatggcttaataactcatac

SEQ ID NO: 74704 - DNA, 25 bp, Probe sequence
ccaaggaaactaactctactagcaa

SEQ ID NO: 74705 - DNA, 25 bp, Probe sequence
gtccaaggaaactaactctactagc

SEQ ID NO: 74706 - DNA, 25 bp, Probe sequence
tccaaggaaactaactctactagca

SEQ ID NO: 74707 - DNA, 25 bp, Probe sequence
ttaataataagtatggtcgtgagcc

SEQ ID NO: 74708 - DNA, 25 bp, Probe sequence
ttccttggactcagtgctatgtatt

SEQ ID NO: 74709 - DNA, 25 bp, Probe sequence
taataataagtatggtcgtgagccc

SEQ ID NO: 74710 - DNA, 25 bp, Probe sequence
agtatgagttattaagccatcccaa

SEQ ID NO: 74711 - DNA, 25 bp, Probe sequence
aagtatgagttattaagccatccca

SEQ ID NO: 74712 - DNA, 25 bp, Probe sequence
ttgctagtagagttagtttccttgg

SEQ ID NO: 74713 - DNA, 25 bp, Probe sequence
gtatgagttattaagccatcccaac

SEQ ID NO: 74714 - DNA, 25 bp, Probe sequence
gctagtagagttagtttccttggac

SEQ ID NO: 74715 - DNA, 25 bp, Probe sequence
tgctagtagagttagtttccttgga

SEQ ID NO: 74716 - DNA, 25 bp, Probe sequence
caactattttccatcacatctctgt

SEQ ID NO: 74717 - DNA, 25 bp, Probe sequence
agtatttatttcctacagttaggca

SEQ ID NO: 74718 - DNA, 25 bp, Probe sequence
gtatttatttcctacagttaggcaa

SEQ ID NO: 74719 - DNA, 25 bp, Probe sequence
aagtatttatttcctacagttaggc

SEQ ID NO: 74720 - DNA, 25 bp, Probe sequence
tttatttcctacagttaggcaatat

SEQ ID NO: 74721 - DNA, 25 bp, Probe sequence
atttatttcctacagttaggcaata

SEQ ID NO: 74722 - DNA, 25 bp, Probe sequence
tatttatttcctacagttaggcaat

SEQ ID NO: 74723 - DNA, 25 bp, Probe sequence
cacatctctgtgatctagttatatt

SEQ ID NO: 74724 - DNA, 25 bp, Probe sequence
tatttcctacagttaggcaatataa

SEQ ID NO: 74725 - DNA, 25 bp, Probe sequence
acagagatgtgatggaaaatagttg

SEQ ID NO: 74726 - DNA, 25 bp, Probe sequence
tgcctaactgtaggaaataaatact

SEQ ID NO: 74727 - DNA, 25 bp, Probe sequence
ttgcctaactgtaggaaataaatac

SEQ ID NO: 74728 - DNA, 25 bp, Probe sequence
gcctaactgtaggaaataaatactt

SEQ ID NO: 74729 - DNA, 25 bp, Probe sequence
attgcctaactgtaggaaataaata

SEQ ID NO: 74730 - DNA, 25 bp, Probe sequence
tattgcctaactgtaggaaataaat

SEQ ID NO: 74731 - DNA, 25 bp, Probe sequence
atattgcctaactgtaggaaataaa

SEQ ID NO: 74732 - DNA, 25 bp, Probe sequence
aatataactagatcacagagatgtg

SEQ ID NO: 74733 - DNA, 25 bp, Probe sequence
tatattgcctaactgtaggaaataa

SEQ ID NO: 74734 - DNA, 25 bp, Probe sequence
aagtcagttaacggcgtattcaatt

SEQ ID NO: 74735 - DNA, 25 bp, Probe sequence
cagttaacggcgtattcaattgtaa

SEQ ID NO: 74736 - DNA, 25 bp, Probe sequence
tcagttaacggcgtattcaattgta

SEQ ID NO: 74737 - DNA, 25 bp, Probe sequence
agtcagttaacggcgtattcaattg

SEQ ID NO: 74738 - DNA, 25 bp, Probe sequence
gtcagttaacggcgtattcaattgt

SEQ ID NO: 74739 - DNA, 25 bp, Probe sequence
agataataaagtcagttaacggcgt

SEQ ID NO: 74740 - DNA, 25 bp, Probe sequence
aagataataaagtcagttaacggcg

SEQ ID NO: 74741 - DNA, 25 bp, Probe sequence
ataaagtcagttaacggcgtattca

SEQ ID NO: 74742 - DNA, 25 bp, Probe sequence
taaagtcagttaacggcgtattcaa

SEQ ID NO: 74743 - DNA, 25 bp, Probe sequence
aattgaatacgccgttaactgactt

SEQ ID NO: 74744 - DNA, 25 bp, Probe sequence
ttacaattgaatacgccgttaactg

SEQ ID NO: 74745 - DNA, 25 bp, Probe sequence
tacaattgaatacgccgttaactga

SEQ ID NO: 74746 - DNA, 25 bp, Probe sequence
caattgaatacgccgttaactgact

SEQ ID NO: 74747 - DNA, 25 bp, Probe sequence
acaattgaatacgccgttaactgac

SEQ ID NO: 74748 - DNA, 25 bp, Probe sequence
acgccgttaactgactttattatct

SEQ ID NO: 74749 - DNA, 25 bp, Probe sequence
cgccgttaactgactttattatctt

SEQ ID NO: 74750 - DNA, 25 bp, Probe sequence
tgaatacgccgttaactgactttat

SEQ ID NO: 74751 - DNA, 25 bp, Probe sequence
ttgaatacgccgttaactgacttta

SEQ ID NO: 74752 - DNA, 25 bp, Probe sequence
aacagtgtagcacaagattcaactt

SEQ ID NO: 74753 - DNA, 25 bp, Probe sequence
tatttcactctacaatcctatggcg

SEQ ID NO: 74754 - DNA, 25 bp, Probe sequence
ctatttcactctacaatcctatggc

SEQ ID NO: 74755 - DNA, 25 bp, Probe sequence
gattcaacttgtttcctacactgtt

SEQ ID NO: 74756 - DNA, 25 bp, Probe sequence
agattcaacttgtttcctacactgt

SEQ ID NO: 74757 - DNA, 25 bp, Probe sequence
aagattcaacttgtttcctacactg

SEQ ID NO: 74758 - DNA, 25 bp, Probe sequence
attcaacttgtttcctacactgttt

SEQ ID NO: 74759 - DNA, 25 bp, Probe sequence
aaacagtgtagcacaagattcaact

SEQ ID NO: 74760 - DNA, 25 bp, Probe sequence
tctatttcactctacaatcctatgg

SEQ ID NO: 74761 - DNA, 25 bp, Probe sequence
aagttgaatcttgtgctacactgtt

SEQ ID NO: 74762 - DNA, 25 bp, Probe sequence
cgccataggattgtagagtgaaata

SEQ ID NO: 74763 - DNA, 25 bp, Probe sequence
gccataggattgtagagtgaaatag

SEQ ID NO: 74764 - DNA, 25 bp, Probe sequence
acagtgtaggaaacaagttgaatct

SEQ ID NO: 74765 - DNA, 25 bp, Probe sequence
aacagtgtaggaaacaagttgaatc

SEQ ID NO: 74766 - DNA, 25 bp, Probe sequence
cagtgtaggaaacaagttgaatctt

SEQ ID NO: 74767 - DNA, 25 bp, Probe sequence
aaacagtgtaggaaacaagttgaat

SEQ ID NO: 74768 - DNA, 25 bp, Probe sequence
agttgaatcttgtgctacactgttt

SEQ ID NO: 74769 - DNA, 25 bp, Probe sequence
ccataggattgtagagtgaaataga

SEQ ID NO: 74770 - DNA, 25 bp, Probe sequence
agttatatggtatcggttccacatt

SEQ ID NO: 74771 - DNA, 25 bp, Probe sequence
tagttatatggtatcggttccacat

SEQ ID NO: 74772 - DNA, 25 bp, Probe sequence
atagttatatggtatcggttccaca

SEQ ID NO: 74773 - DNA, 25 bp, Probe sequence
tatagttatatggtatcggttccac

SEQ ID NO: 74774 - DNA, 25 bp, Probe sequence
tatatggtatcggttccacatttgt

SEQ ID NO: 74775 - DNA, 25 bp, Probe sequence
atatggtatcggttccacatttgtt

SEQ ID NO: 74776 - DNA, 25 bp, Probe sequence
tatggtatcggttccacatttgttt

SEQ ID NO: 74777 - DNA, 25 bp, Probe sequence
ttatatggtatcggttccacatttg

SEQ ID NO: 74778 - DNA, 25 bp, Probe sequence
gttatatggtatcggttccacattt

SEQ ID NO: 74779 - DNA, 25 bp, Probe sequence
aatgtggaaccgataccatataact

SEQ ID NO: 74780 - DNA, 25 bp, Probe sequence
tgtggaaccgataccatataactat

SEQ ID NO: 74781 - DNA, 25 bp, Probe sequence
atgtggaaccgataccatataacta

SEQ ID NO: 74782 - DNA, 25 bp, Probe sequence
gtggaaccgataccatataactata

SEQ ID NO: 74783 - DNA, 25 bp, Probe sequence
acaaatgtggaaccgataccatata

SEQ ID NO: 74784 - DNA, 25 bp, Probe sequence
aacaaatgtggaaccgataccatat

SEQ ID NO: 74785 - DNA, 25 bp, Probe sequence
aaacaaatgtggaaccgataccata

SEQ ID NO: 74786 - DNA, 25 bp, Probe sequence
aaatgtggaaccgataccatataac

SEQ ID NO: 74787 - DNA, 25 bp, Probe sequence
caaatgtggaaccgataccatataa

SEQ ID NO: 74788 - DNA, 25 bp, Probe sequence
gtcccaacatcaacctttagttaaa

SEQ ID NO: 74789 - DNA, 25 bp, Probe sequence
cccaacatcaacctttagttaaatg

SEQ ID NO: 74790 - DNA, 25 bp, Probe sequence
tcccaacatcaacctttagttaaat

SEQ ID NO: 74791 - DNA, 25 bp, Probe sequence
tgtcccaacatcaacctttagttaa

SEQ ID NO: 74792 - DNA, 25 bp, Probe sequence
tcaacctttagttaaatgtcaggac

SEQ ID NO: 74793 - DNA, 25 bp, Probe sequence
catcaacctttagttaaatgtcagg

SEQ ID NO: 74794 - DNA, 25 bp, Probe sequence
atcaacctttagttaaatgtcagga

SEQ ID NO: 74795 - DNA, 25 bp, Probe sequence
caacctttagttaaatgtcaggaca

SEQ ID NO: 74796 - DNA, 25 bp, Probe sequence
aacctttagttaaatgtcaggacaa

SEQ ID NO: 74797 - DNA, 25 bp, Probe sequence
tttaactaaaggttgatgttgggac

SEQ ID NO: 74798 - DNA, 25 bp, Probe sequence
atttaactaaaggttgatgttggga

SEQ ID NO: 74799 - DNA, 25 bp, Probe sequence
catttaactaaaggttgatgttggg

SEQ ID NO: 74800 - DNA, 25 bp, Probe sequence
ttaactaaaggttgatgttgggaca

SEQ ID NO: 74801 - DNA, 25 bp, Probe sequence
gtcctgacatttaactaaaggttga

SEQ ID NO: 74802 - DNA, 25 bp, Probe sequence
cctgacatttaactaaaggttgatg

SEQ ID NO: 74803 - DNA, 25 bp, Probe sequence
tcctgacatttaactaaaggttgat

SEQ ID NO: 74804 - DNA, 25 bp, Probe sequence
tgtcctgacatttaactaaaggttg

SEQ ID NO: 74805 - DNA, 25 bp, Probe sequence
ttgtcctgacatttaactaaaggtt

SEQ ID NO: 74806 - DNA, 25 bp, Probe sequence
aattagcggaagtagccatagaatc

SEQ ID NO: 74807 - DNA, 25 bp, Probe sequence
gcggaagtagccatagaatctaata

SEQ ID NO: 74808 - DNA, 25 bp, Probe sequence
tagcggaagtagccatagaatctaa

SEQ ID NO: 74809 - DNA, 25 bp, Probe sequence
ttagcggaagtagccatagaatcta

SEQ ID NO: 74810 - DNA, 25 bp, Probe sequence
attagcggaagtagccatagaatct

SEQ ID NO: 74811 - DNA, 25 bp, Probe sequence
agcggaagtagccatagaatctaat

SEQ ID NO: 74812 - DNA, 25 bp, Probe sequence
cggaagtagccatagaatctaatat

SEQ ID NO: 74813 - DNA, 25 bp, Probe sequence
aaattagcggaagtagccatagaat

SEQ ID NO: 74814 - DNA, 25 bp, Probe sequence
taaattagcggaagtagccatagaa

SEQ ID NO: 74815 - DNA, 25 bp, Probe sequence
gattctatggctacttccgctaatt

SEQ ID NO: 74816 - DNA, 25 bp, Probe sequence
tattagattctatggctacttccgc

SEQ ID NO: 74817 - DNA, 25 bp, Probe sequence
tagattctatggctacttccgctaa

SEQ ID NO: 74818 - DNA, 25 bp, Probe sequence
ttagattctatggctacttccgcta

SEQ ID NO: 74819 - DNA, 25 bp, Probe sequence
agattctatggctacttccgctaat

SEQ ID NO: 74820 - DNA, 25 bp, Probe sequence
attagattctatggctacttccgct

SEQ ID NO: 74821 - DNA, 25 bp, Probe sequence
atattagattctatggctacttccg

SEQ ID NO: 74822 - DNA, 25 bp, Probe sequence
attctatggctacttccgctaattt

SEQ ID NO: 74823 - DNA, 25 bp, Probe sequence
tctatggctacttccgctaatttaa

SEQ ID NO: 74824 - DNA, 25 bp, Probe sequence
tctccttttccaatcacttttattt

SEQ ID NO: 74825 - DNA, 25 bp, Probe sequence
ttctccttttccaatcacttttatt

SEQ ID NO: 74826 - DNA, 25 bp, Probe sequence
tttctccttttccaatcacttttat

SEQ ID NO: 74827 - DNA, 25 bp, Probe sequence
atttctccttttccaatcactttta

SEQ ID NO: 74828 - DNA, 25 bp, Probe sequence
tatttctccttttccaatcactttt

SEQ ID NO: 74829 - DNA, 25 bp, Probe sequence
ttatttctccttttccaatcacttt

SEQ ID NO: 74830 - DNA, 25 bp, Probe sequence
tccttttccaatcacttttatttga

SEQ ID NO: 74831 - DNA, 25 bp, Probe sequence
ctccttttccaatcacttttatttg

SEQ ID NO: 74832 - DNA, 25 bp, Probe sequence
attatttctccttttccaatcactt

SEQ ID NO: 74833 - DNA, 25 bp, Probe sequence
aaagtgattggaaaaggagaaataa

SEQ ID NO: 74834 - DNA, 25 bp, Probe sequence
aaaagtgattggaaaaggagaaata

SEQ ID NO: 74835 - DNA, 25 bp, Probe sequence
taaaagtgattggaaaaggagaaat

SEQ ID NO: 74836 - DNA, 25 bp, Probe sequence
ataaaagtgattggaaaaggagaaa

SEQ ID NO: 74837 - DNA, 25 bp, Probe sequence
aataaaagtgattggaaaaggagaa

SEQ ID NO: 74838 - DNA, 25 bp, Probe sequence
aaataaaagtgattggaaaaggaga

SEQ ID NO: 74839 - DNA, 25 bp, Probe sequence
tcaaataaaagtgattggaaaagga

SEQ ID NO: 74840 - DNA, 25 bp, Probe sequence
caaataaaagtgattggaaaaggag

SEQ ID NO: 74841 - DNA, 25 bp, Probe sequence
aagtgattggaaaaggagaaataat

SEQ ID NO: 74842 - DNA, 25 bp, Probe sequence
ggaaggcgattaattacgattcatc

SEQ ID NO: 74843 - DNA, 25 bp, Probe sequence
gaaggcgattaattacgattcatca

SEQ ID NO: 74844 - DNA, 25 bp, Probe sequence
aggaaggcgattaattacgattcat

SEQ ID NO: 74845 - DNA, 25 bp, Probe sequence
aaggaaggcgattaattacgattca

SEQ ID NO: 74846 - DNA, 25 bp, Probe sequence
aggcgattaattacgattcatcatt

SEQ ID NO: 74847 - DNA, 25 bp, Probe sequence
aaggcgattaattacgattcatcat

SEQ ID NO: 74848 - DNA, 25 bp, Probe sequence
taaggaaggcgattaattacgattc

SEQ ID NO: 74849 - DNA, 25 bp, Probe sequence
ataaggaaggcgattaattacgatt

SEQ ID NO: 74850 - DNA, 25 bp, Probe sequence
tataaggaaggcgattaattacgat

SEQ ID NO: 74851 - DNA, 25 bp, Probe sequence
gatgaatcgtaattaatcgccttcc

SEQ ID NO: 74852 - DNA, 25 bp, Probe sequence
atgaatcgtaattaatcgccttcct

SEQ ID NO: 74853 - DNA, 25 bp, Probe sequence
tgatgaatcgtaattaatcgccttc

SEQ ID NO: 74854 - DNA, 25 bp, Probe sequence
tgaatcgtaattaatcgccttcctt

SEQ ID NO: 74855 - DNA, 25 bp, Probe sequence
atgatgaatcgtaattaatcgcctt

SEQ ID NO: 74856 - DNA, 25 bp, Probe sequence
aatgatgaatcgtaattaatcgcct

SEQ ID NO: 74857 - DNA, 25 bp, Probe sequence
gaatcgtaattaatcgccttcctta

SEQ ID NO: 74858 - DNA, 25 bp, Probe sequence
aatcgtaattaatcgccttccttat

SEQ ID NO: 74859 - DNA, 25 bp, Probe sequence
cgtaattaatcgccttccttatatg

SEQ ID NO: 74860 - DNA, 25 bp, Probe sequence
cgagttagagcgtaattgttagatt

SEQ ID NO: 74861 - DNA, 25 bp, Probe sequence
ctatgtattcaaacgagttagagcg

SEQ ID NO: 74862 - DNA, 25 bp, Probe sequence
tttgagaaagacgaaaggtgaagat

SEQ ID NO: 74863 - DNA, 25 bp, Probe sequence
atttgagaaagacgaaaggtgaaga

SEQ ID NO: 74864 - DNA, 25 bp, Probe sequence
aatttgagaaagacgaaaggtgaag

SEQ ID NO: 74865 - DNA, 25 bp, Probe sequence
ctatttcctccttcgtgtttgaatg

SEQ ID NO: 74866 - DNA, 25 bp, Probe sequence
tatttcctccttcgtgtttgaatga

SEQ ID NO: 74867 - DNA, 25 bp, Probe sequence
cctccttcgtgtttgaatgaattat

SEQ ID NO: 74868 - DNA, 25 bp, Probe sequence
tcctccttcgtgtttgaatgaatta

SEQ ID NO: 74869 - DNA, 25 bp, Probe sequence
aatctaacaattacgctctaactcg

SEQ ID NO: 74870 - DNA, 25 bp, Probe sequence
cgctctaactcgtttgaatacatag

SEQ ID NO: 74871 - DNA, 25 bp, Probe sequence
tcttcacctttcgtctttctcaaat

SEQ ID NO: 74872 - DNA, 25 bp, Probe sequence
atcttcacctttcgtctttctcaaa

SEQ ID NO: 74873 - DNA, 25 bp, Probe sequence
cttcacctttcgtctttctcaaatt

SEQ ID NO: 74874 - DNA, 25 bp, Probe sequence
cattcaaacacgaaggaggaaatag

SEQ ID NO: 74875 - DNA, 25 bp, Probe sequence
tcattcaaacacgaaggaggaaata

SEQ ID NO: 74876 - DNA, 25 bp, Probe sequence
taattcattcaaacacgaaggagga

SEQ ID NO: 74877 - DNA, 25 bp, Probe sequence
ataattcattcaaacacgaaggagg

SEQ ID NO: 74878 - DNA, 25 bp, Probe sequence
tgttgataagtacgcatgttctcta

SEQ ID NO: 74879 - DNA, 25 bp, Probe sequence
ccacagacttatcctagttatccac

SEQ ID NO: 74880 - DNA, 25 bp, Probe sequence
tccacagacttatcctagttatcca

SEQ ID NO: 74881 - DNA, 25 bp, Probe sequence
ttgttgataagtacgcatgttctct

SEQ ID NO: 74882 - DNA, 25 bp, Probe sequence
cacagacttatcctagttatccaca

SEQ ID NO: 74883 - DNA, 25 bp, Probe sequence
atccacagacttatcctagttatcc

SEQ ID NO: 74884 - DNA, 25 bp, Probe sequence
gctatccacagacttatcctagtta

SEQ ID NO: 74885 - DNA, 25 bp, Probe sequence
ataagtacgcatgttctctattgac

SEQ ID NO: 74886 - DNA, 25 bp, Probe sequence
tgataagtacgcatgttctctattg

SEQ ID NO: 74887 - DNA, 25 bp, Probe sequence
tggataactaggataagtctgtgga

SEQ ID NO: 74888 - DNA, 25 bp, Probe sequence
gtggataactaggataagtctgtgg

SEQ ID NO: 74889 - DNA, 25 bp, Probe sequence
tagagaacatgcgtacttatcaaca

SEQ ID NO: 74890 - DNA, 25 bp, Probe sequence
agagaacatgcgtacttatcaacaa

SEQ ID NO: 74891 - DNA, 25 bp, Probe sequence
tgtggataactaggataagtctgtg

SEQ ID NO: 74892 - DNA, 25 bp, Probe sequence
taactaggataagtctgtggatagc

SEQ ID NO: 74893 - DNA, 25 bp, Probe sequence
ggataactaggataagtctgtggat

SEQ ID NO: 74894 - DNA, 25 bp, Probe sequence
atagagaacatgcgtacttatcaac

SEQ ID NO: 74895 - DNA, 25 bp, Probe sequence
caatagagaacatgcgtacttatca

SEQ ID NO: 74896 - DNA, 25 bp, Probe sequence
catcaatcaatgttcaagtcgcaac

SEQ ID NO: 74897 - DNA, 25 bp, Probe sequence
cgcaacattgttatattgacagtct

SEQ ID NO: 74898 - DNA, 25 bp, Probe sequence
tcgcaacattgttatattgacagtc

SEQ ID NO: 74899 - DNA, 25 bp, Probe sequence
ttcaagtcgcaacattgttatattg

SEQ ID NO: 74900 - DNA, 25 bp, Probe sequence
gttcaagtcgcaacattgttatatt

SEQ ID NO: 74901 - DNA, 25 bp, Probe sequence
gtcgcaacattgttatattgacagt

SEQ ID NO: 74902 - DNA, 25 bp, Probe sequence
agtcgcaacattgttatattgacag

SEQ ID NO: 74903 - DNA, 25 bp, Probe sequence
aagtcgcaacattgttatattgaca

SEQ ID NO: 74904 - DNA, 25 bp, Probe sequence
caagtcgcaacattgttatattgac

SEQ ID NO: 74905 - DNA, 25 bp, Probe sequence
gttgcgacttgaacattgattgatg

SEQ ID NO: 74906 - DNA, 25 bp, Probe sequence
gactgtcaatataacaatgttgcga

SEQ ID NO: 74907 - DNA, 25 bp, Probe sequence
agactgtcaatataacaatgttgcg

SEQ ID NO: 74908 - DNA, 25 bp, Probe sequence
aatataacaatgttgcgacttgaac

SEQ ID NO: 74909 - DNA, 25 bp, Probe sequence
caatataacaatgttgcgacttgaa

SEQ ID NO: 74910 - DNA, 25 bp, Probe sequence
ctgtcaatataacaatgttgcgact

SEQ ID NO: 74911 - DNA, 25 bp, Probe sequence
actgtcaatataacaatgttgcgac

SEQ ID NO: 74912 - DNA, 25 bp, Probe sequence
tgtcaatataacaatgttgcgactt

SEQ ID NO: 74913 - DNA, 25 bp, Probe sequence
gtcaatataacaatgttgcgacttg

SEQ ID NO: 74914 - DNA, 25 bp, Probe sequence
acatgacagaagactatgaacagtt

SEQ ID NO: 74915 - DNA, 25 bp, Probe sequence
gctatcacatgacagaagactatga

SEQ ID NO: 74916 - DNA, 25 bp, Probe sequence
tcacatgacagaagactatgaacag

SEQ ID NO: 74917 - DNA, 25 bp, Probe sequence
atcacatgacagaagactatgaaca

SEQ ID NO: 74918 - DNA, 25 bp, Probe sequence
cacatgacagaagactatgaacagt

SEQ ID NO: 74919 - DNA, 25 bp, Probe sequence
cagctatcacatgacagaagactat

SEQ ID NO: 74920 - DNA, 25 bp, Probe sequence
agctatcacatgacagaagactatg

SEQ ID NO: 74921 - DNA, 25 bp, Probe sequence
tcagctatcacatgacagaagacta

SEQ ID NO: 74922 - DNA, 25 bp, Probe sequence
tatcacatgacagaagactatgaac

SEQ ID NO: 74923 - DNA, 25 bp, Probe sequence
tcatagtcttctgtcatgtgatagc

SEQ ID NO: 74924 - DNA, 25 bp, Probe sequence
aactgttcatagtcttctgtcatgt

SEQ ID NO: 74925 - DNA, 25 bp, Probe sequence
tgttcatagtcttctgtcatgtgat

SEQ ID NO: 74926 - DNA, 25 bp, Probe sequence
ctgttcatagtcttctgtcatgtga

SEQ ID NO: 74927 - DNA, 25 bp, Probe sequence
actgttcatagtcttctgtcatgtg

SEQ ID NO: 74928 - DNA, 25 bp, Probe sequence
atagtcttctgtcatgtgatagctg

SEQ ID NO: 74929 - DNA, 25 bp, Probe sequence
catagtcttctgtcatgtgatagct

SEQ ID NO: 74930 - DNA, 25 bp, Probe sequence
tagtcttctgtcatgtgatagctga

SEQ ID NO: 74931 - DNA, 25 bp, Probe sequence
gttcatagtcttctgtcatgtgata

SEQ ID NO: 74932 - DNA, 25 bp, Probe sequence
accattcacggaaggagtataataa

SEQ ID NO: 74933 - DNA, 25 bp, Probe sequence
tatactgaacatcaaccgacaactt

SEQ ID NO: 74934 - DNA, 25 bp, Probe sequence
atatactgaacatcaaccgacaact

SEQ ID NO: 74935 - DNA, 25 bp, Probe sequence
tcaatatactgaacatcaaccgaca

SEQ ID NO: 74936 - DNA, 25 bp, Probe sequence
aatatactgaacatcaaccgacaac

SEQ ID NO: 74937 - DNA, 25 bp, Probe sequence
caatatactgaacatcaaccgacaa

SEQ ID NO: 74938 - DNA, 25 bp, Probe sequence
taccattcacggaaggagtataata

SEQ ID NO: 74939 - DNA, 25 bp, Probe sequence
atcaatatactgaacatcaaccgac

SEQ ID NO: 74940 - DNA, 25 bp, Probe sequence
gatatataccattcacggaaggagt

SEQ ID NO: 74941 - DNA, 25 bp, Probe sequence
ttattatactccttccgtgaatggt

SEQ ID NO: 74942 - DNA, 25 bp, Probe sequence
tgtcggttgatgttcagtatattga

SEQ ID NO: 74943 - DNA, 25 bp, Probe sequence
agttgtcggttgatgttcagtatat

SEQ ID NO: 74944 - DNA, 25 bp, Probe sequence
aagttgtcggttgatgttcagtata

SEQ ID NO: 74945 - DNA, 25 bp, Probe sequence
ttgtcggttgatgttcagtatattg

SEQ ID NO: 74946 - DNA, 25 bp, Probe sequence
gttgtcggttgatgttcagtatatt

SEQ ID NO: 74947 - DNA, 25 bp, Probe sequence
tattatactccttccgtgaatggta

SEQ ID NO: 74948 - DNA, 25 bp, Probe sequence
gtcggttgatgttcagtatattgat

SEQ ID NO: 74949 - DNA, 25 bp, Probe sequence
actccttccgtgaatggtatatatc

SEQ ID NO: 74950 - DNA, 25 bp, Probe sequence
atatcataggctgctagttaacatc

SEQ ID NO: 74951 - DNA, 25 bp, Probe sequence
tatatcataggctgctagttaacat

SEQ ID NO: 74952 - DNA, 25 bp, Probe sequence
atatatcataggctgctagttaaca

SEQ ID NO: 74953 - DNA, 25 bp, Probe sequence
caatgatgcgctaattagttataga

SEQ ID NO: 74954 - DNA, 25 bp, Probe sequence
gatatatcataggctgctagttaac

SEQ ID NO: 74955 - DNA, 25 bp, Probe sequence
ggcaatgatgcgctaattagttata

SEQ ID NO: 74956 - DNA, 25 bp, Probe sequence
agatatatcataggctgctagttaa

SEQ ID NO: 74957 - DNA, 25 bp, Probe sequence
aggcaatgatgcgctaattagttat

SEQ ID NO: 74958 - DNA, 25 bp, Probe sequence
aaggcaatgatgcgctaattagtta

SEQ ID NO: 74959 - DNA, 25 bp, Probe sequence
gatgttaactagcagcctatgatat

SEQ ID NO: 74960 - DNA, 25 bp, Probe sequence
tgttaactagcagcctatgatatat

SEQ ID NO: 74961 - DNA, 25 bp, Probe sequence
atgttaactagcagcctatgatata

SEQ ID NO: 74962 - DNA, 25 bp, Probe sequence
tctataactaattagcgcatcattg

SEQ ID NO: 74963 - DNA, 25 bp, Probe sequence
gttaactagcagcctatgatatatc

SEQ ID NO: 74964 - DNA, 25 bp, Probe sequence
tataactaattagcgcatcattgcc

SEQ ID NO: 74965 - DNA, 25 bp, Probe sequence
ttaactagcagcctatgatatatct

SEQ ID NO: 74966 - DNA, 25 bp, Probe sequence
ataactaattagcgcatcattgcct

SEQ ID NO: 74967 - DNA, 25 bp, Probe sequence
taactaattagcgcatcattgcctt

SEQ ID NO: 74968 - DNA, 25 bp, Probe sequence
taagtttgctaccttcgtcgctaag

SEQ ID NO: 74969 - DNA, 25 bp, Probe sequence
gtaagtttgctaccttcgtcgctaa

SEQ ID NO: 74970 - DNA, 25 bp, Probe sequence
ctaccttcgtcgctaagaacctttc

SEQ ID NO: 74971 - DNA, 25 bp, Probe sequence
ttctactctagcggaacgtaagttt

SEQ ID NO: 74972 - DNA, 25 bp, Probe sequence
tagctctactaaactcgttgcactc

SEQ ID NO: 74973 - DNA, 25 bp, Probe sequence
ttagctctactaaactcgttgcact

SEQ ID NO: 74974 - DNA, 25 bp, Probe sequence
tctactctagcggaacgtaagtttg

SEQ ID NO: 74975 - DNA, 25 bp, Probe sequence
gctctactaaactcgttgcactctt

SEQ ID NO: 74976 - DNA, 25 bp, Probe sequence
gtttgctaccttcgtcgctaagaac

SEQ ID NO: 74977 - DNA, 25 bp, Probe sequence
cttagcgacgaaggtagcaaactta

SEQ ID NO: 74978 - DNA, 25 bp, Probe sequence
ttagcgacgaaggtagcaaacttac

SEQ ID NO: 74979 - DNA, 25 bp, Probe sequence
gaaaggttcttagcgacgaaggtag

SEQ ID NO: 74980 - DNA, 25 bp, Probe sequence
aaacttacgttccgctagagtagaa

SEQ ID NO: 74981 - DNA, 25 bp, Probe sequence
gagtgcaacgagtttagtagagcta

SEQ ID NO: 74982 - DNA, 25 bp, Probe sequence
caaacttacgttccgctagagtaga

SEQ ID NO: 74983 - DNA, 25 bp, Probe sequence
agtgcaacgagtttagtagagctaa

SEQ ID NO: 74984 - DNA, 25 bp, Probe sequence
aagagtgcaacgagtttagtagagc

SEQ ID NO: 74985 - DNA, 25 bp, Probe sequence
gttcttagcgacgaaggtagcaaac

SEQ ID NO: 74986 - DNA, 25 bp, Probe sequence
agacctttcttgacttgtgacaatc

SEQ ID NO: 74987 - DNA, 25 bp, Probe sequence
gacctttcttgacttgtgacaatcg

SEQ ID NO: 74988 - DNA, 25 bp, Probe sequence
gattgtcacaagtcaagaaaggtct

SEQ ID NO: 74989 - DNA, 25 bp, Probe sequence
cgattgtcacaagtcaagaaaggtc

SEQ ID NO: 74990 - DNA, 25 bp, Probe sequence
cattcagttttcaatgttcattaaa

SEQ ID NO: 74991 - DNA, 25 bp, Probe sequence
tttaatgaacattgaaaactgaatg

SEQ ID NO: 74992 - DNA, 25 bp, Probe sequence
gccgagattgcgaagtattaaatta

SEQ ID NO: 74993 - DNA, 25 bp, Probe sequence
caagtcacaatttatgccattacct

SEQ ID NO: 74994 - DNA, 25 bp, Probe sequence
tcaagtcacaatttatgccattacc

SEQ ID NO: 74995 - DNA, 25 bp, Probe sequence
tcctatcaagtcacaatttatgcca

SEQ ID NO: 74996 - DNA, 25 bp, Probe sequence
cctatcaagtcacaatttatgccat

SEQ ID NO: 74997 - DNA, 25 bp, Probe sequence
atcctatcaagtcacaatttatgcc

SEQ ID NO: 74998 - DNA, 25 bp, Probe sequence
aagccgagattgcgaagtattaaat

SEQ ID NO: 74999 - DNA, 25 bp, Probe sequence
cgagattgcgaagtattaaattacg

SEQ ID NO: 75000 - DNA, 25 bp, Probe sequence
agccgagattgcgaagtattaaatt

SEQ ID NO: 75001 - DNA, 25 bp, Probe sequence
tggcataaattgtgacttgatagga

SEQ ID NO: 75002 - DNA, 25 bp, Probe sequence
ggtaatggcataaattgtgacttga

SEQ ID NO: 75003 - DNA, 25 bp, Probe sequence
aggtaatggcataaattgtgacttg

SEQ ID NO: 75004 - DNA, 25 bp, Probe sequence
taatttaatacttcgcaatctcggc

SEQ ID NO: 75005 - DNA, 25 bp, Probe sequence
atggcataaattgtgacttgatagg

SEQ ID NO: 75006 - DNA, 25 bp, Probe sequence
ggcataaattgtgacttgataggat

SEQ ID NO: 75007 - DNA, 25 bp, Probe sequence
atttaatacttcgcaatctcggctt

SEQ ID NO: 75008 - DNA, 25 bp, Probe sequence
cgtaatttaatacttcgcaatctcg

SEQ ID NO: 75009 - DNA, 25 bp, Probe sequence
aatttaatacttcgcaatctcggct

SEQ ID NO: 75010 - DNA, 25 bp, Probe sequence
gacacaccatcatttctaaatttca

SEQ ID NO: 75011 - DNA, 25 bp, Probe sequence
tgacacaccatcatttctaaatttc

SEQ ID NO: 75012 - DNA, 25 bp, Probe sequence
acacaccatcatttctaaatttcat

SEQ ID NO: 75013 - DNA, 25 bp, Probe sequence
cgcactaagattattgaaaatgaca

SEQ ID NO: 75014 - DNA, 25 bp, Probe sequence
acgcactaagattattgaaaatgac

SEQ ID NO: 75015 - DNA, 25 bp, Probe sequence
agattattgaaaatgacacaccatc

SEQ ID NO: 75016 - DNA, 25 bp, Probe sequence
aacgcactaagattattgaaaatga

SEQ ID NO: 75017 - DNA, 25 bp, Probe sequence
gattattgaaaatgacacaccatca

SEQ ID NO: 75018 - DNA, 25 bp, Probe sequence
gcaatccacctatttaaaacgacaa

SEQ ID NO: 75019 - DNA, 25 bp, Probe sequence
tgaaatttagaaatgatggtgtgtc

SEQ ID NO: 75020 - DNA, 25 bp, Probe sequence
gaaatttagaaatgatggtgtgtca

SEQ ID NO: 75021 - DNA, 25 bp, Probe sequence
gtcattttcaataatcttagtgcgt

SEQ ID NO: 75022 - DNA, 25 bp, Probe sequence
tgtcattttcaataatcttagtgcg

SEQ ID NO: 75023 - DNA, 25 bp, Probe sequence
atgaaatttagaaatgatggtgtgt

SEQ ID NO: 75024 - DNA, 25 bp, Probe sequence
gatggtgtgtcattttcaataatct

SEQ ID NO: 75025 - DNA, 25 bp, Probe sequence
tcattttcaataatcttagtgcgtt

SEQ ID NO: 75026 - DNA, 25 bp, Probe sequence
tgatggtgtgtcattttcaataatc

SEQ ID NO: 75027 - DNA, 25 bp, Probe sequence
ttgtcgttttaaataggtggattgc

SEQ ID NO: 75028 - DNA, 25 bp, Probe sequence
cgctgtatccaccatatttatattt

SEQ ID NO: 75029 - DNA, 25 bp, Probe sequence
gctgtatccaccatatttatatttc

SEQ ID NO: 75030 - DNA, 25 bp, Probe sequence
gcgctgtatccaccatatttatatt

SEQ ID NO: 75031 - DNA, 25 bp, Probe sequence
acccatcgaaataatttctaatctt

SEQ ID NO: 75032 - DNA, 25 bp, Probe sequence
cccatcgaaataatttctaatcttc

SEQ ID NO: 75033 - DNA, 25 bp, Probe sequence
tacccatcgaaataatttctaatct

SEQ ID NO: 75034 - DNA, 25 bp, Probe sequence
ccatcgaaataatttctaatcttct

SEQ ID NO: 75035 - DNA, 25 bp, Probe sequence
atacccatcgaaataatttctaatc

SEQ ID NO: 75036 - DNA, 25 bp, Probe sequence
aaatatttatcttcattttaagcgc

SEQ ID NO: 75037 - DNA, 25 bp, Probe sequence
aaatataaatatggtggatacagcg

SEQ ID NO: 75038 - DNA, 25 bp, Probe sequence
gaaatataaatatggtggatacagc

SEQ ID NO: 75039 - DNA, 25 bp, Probe sequence
aatataaatatggtggatacagcgc

SEQ ID NO: 75040 - DNA, 25 bp, Probe sequence
aagattagaaattatttcgatgggt

SEQ ID NO: 75041 - DNA, 25 bp, Probe sequence
gaagattagaaattatttcgatggg

SEQ ID NO: 75042 - DNA, 25 bp, Probe sequence
agattagaaattatttcgatgggta

SEQ ID NO: 75043 - DNA, 25 bp, Probe sequence
agaagattagaaattatttcgatgg

SEQ ID NO: 75044 - DNA, 25 bp, Probe sequence
gattagaaattatttcgatgggtat

SEQ ID NO: 75045 - DNA, 25 bp, Probe sequence
gcgcttaaaatgaagataaatattt

SEQ ID NO: 75046 - DNA, 25 bp, Probe sequence
taggatggaatacctaaagcctaaa

SEQ ID NO: 75047 - DNA, 25 bp, Probe sequence
aggatggaatacctaaagcctaaaa

SEQ ID NO: 75048 - DNA, 25 bp, Probe sequence
tgaatatcataactggtatttgcta

SEQ ID NO: 75049 - DNA, 25 bp, Probe sequence
ttgcacttatcaattttgtcgtttg

SEQ ID NO: 75050 - DNA, 25 bp, Probe sequence
tcttcgtacagaatttagaaatagt

SEQ ID NO: 75051 - DNA, 25 bp, Probe sequence
caattttgctgtagatgatactttt

SEQ ID NO: 75052 - DNA, 25 bp, Probe sequence
atgaatatcataactggtatttgct

SEQ ID NO: 75053 - DNA, 25 bp, Probe sequence
actggtatttgctaaaatctatgtt

SEQ ID NO: 75054 - DNA, 25 bp, Probe sequence
aactggtatttgctaaaatctatgt

SEQ ID NO: 75055 - DNA, 25 bp, Probe sequence
tttaggctttaggtattccatccta

SEQ ID NO: 75056 - DNA, 25 bp, Probe sequence
ttttaggctttaggtattccatcct

SEQ ID NO: 75057 - DNA, 25 bp, Probe sequence
tagcaaataccagttatgatattca

SEQ ID NO: 75058 - DNA, 25 bp, Probe sequence
caaacgacaaaattgataagtgcaa

SEQ ID NO: 75059 - DNA, 25 bp, Probe sequence
actatttctaaattctgtacgaaga

SEQ ID NO: 75060 - DNA, 25 bp, Probe sequence
aaaagtatcatctacagcaaaattg

SEQ ID NO: 75061 - DNA, 25 bp, Probe sequence
agcaaataccagttatgatattcat

SEQ ID NO: 75062 - DNA, 25 bp, Probe sequence
acatagattttagcaaataccagtt

SEQ ID NO: 75063 - DNA, 25 bp, Probe sequence
aacatagattttagcaaataccagt

SEQ ID NO: 75064 - DNA, 25 bp, Probe sequence
atgagaacctccaattgattccaaa

SEQ ID NO: 75065 - DNA, 25 bp, Probe sequence
aacaaattttatatgcactgaccat

SEQ ID NO: 75066 - DNA, 25 bp, Probe sequence
gaacctccaattgattccaaaagtt

SEQ ID NO: 75067 - DNA, 25 bp, Probe sequence
taacaaattttatatgcactgacca

SEQ ID NO: 75068 - DNA, 25 bp, Probe sequence
agaacctccaattgattccaaaagt

SEQ ID NO: 75069 - DNA, 25 bp, Probe sequence
tgattccaaaagttattaaatgacc

SEQ ID NO: 75070 - DNA, 25 bp, Probe sequence
aacctccaattgattccaaaagtta

SEQ ID NO: 75071 - DNA, 25 bp, Probe sequence
gagaacctccaattgattccaaaag

SEQ ID NO: 75072 - DNA, 25 bp, Probe sequence
acctccaattgattccaaaagttat

SEQ ID NO: 75073 - DNA, 25 bp, Probe sequence
tttggaatcaattggaggttctcat

SEQ ID NO: 75074 - DNA, 25 bp, Probe sequence
atggtcagtgcatataaaatttgtt

SEQ ID NO: 75075 - DNA, 25 bp, Probe sequence
aacttttggaatcaattggaggttc

SEQ ID NO: 75076 - DNA, 25 bp, Probe sequence
acttttggaatcaattggaggttct

SEQ ID NO: 75077 - DNA, 25 bp, Probe sequence
tggtcagtgcatataaaatttgtta

SEQ ID NO: 75078 - DNA, 25 bp, Probe sequence
ggtcatttaataacttttggaatca

SEQ ID NO: 75079 - DNA, 25 bp, Probe sequence
cttttggaatcaattggaggttctc

SEQ ID NO: 75080 - DNA, 25 bp, Probe sequence
taacttttggaatcaattggaggtt

SEQ ID NO: 75081 - DNA, 25 bp, Probe sequence
ttttggaatcaattggaggttctca

SEQ ID NO: 75082 - DNA, 25 bp, Probe sequence
ttacttcctcctgtaattcccacac

SEQ ID NO: 75083 - DNA, 25 bp, Probe sequence
tacttcctcctgtaattcccacacg

SEQ ID NO: 75084 - DNA, 25 bp, Probe sequence
attacttcctcctgtaattcccaca

SEQ ID NO: 75085 - DNA, 25 bp, Probe sequence
tcctgtaattcccacacgttttaaa

SEQ ID NO: 75086 - DNA, 25 bp, Probe sequence
ctcctgtaattcccacacgttttaa

SEQ ID NO: 75087 - DNA, 25 bp, Probe sequence
ttcctcctgtaattcccacacgttt

SEQ ID NO: 75088 - DNA, 25 bp, Probe sequence
cctcctgtaattcccacacgtttta

SEQ ID NO: 75089 - DNA, 25 bp, Probe sequence
cttcctcctgtaattcccacacgtt

SEQ ID NO: 75090 - DNA, 25 bp, Probe sequence
cctgtaattcccacacgttttaaaa

SEQ ID NO: 75091 - DNA, 25 bp, Probe sequence
tcctcctgtaattcccacacgtttt

SEQ ID NO: 75092 - DNA, 25 bp, Probe sequence
gtgtgggaattacaggaggaagtaa

SEQ ID NO: 75093 - DNA, 25 bp, Probe sequence
cgtgtgggaattacaggaggaagta

SEQ ID NO: 75094 - DNA, 25 bp, Probe sequence
tgtgggaattacaggaggaagtaat

SEQ ID NO: 75095 - DNA, 25 bp, Probe sequence
tttaaaacgtgtgggaattacagga

SEQ ID NO: 75096 - DNA, 25 bp, Probe sequence
ttaaaacgtgtgggaattacaggag

SEQ ID NO: 75097 - DNA, 25 bp, Probe sequence
aaacgtgtgggaattacaggaggaa

SEQ ID NO: 75098 - DNA, 25 bp, Probe sequence
taaaacgtgtgggaattacaggagg

SEQ ID NO: 75099 - DNA, 25 bp, Probe sequence
aacgtgtgggaattacaggaggaag

SEQ ID NO: 75100 - DNA, 25 bp, Probe sequence
ttttaaaacgtgtgggaattacagg

SEQ ID NO: 75101 - DNA, 25 bp, Probe sequence
aaaacgtgtgggaattacaggagga

SEQ ID NO: 75102 - DNA, 25 bp, Probe sequence
ttatagcatatggaatatttcatgc

SEQ ID NO: 75103 - DNA, 25 bp, Probe sequence
gcatgaaatattccatatgctataa

SEQ ID NO: 75104 - DNA, 25 bp, Probe sequence
cgtaacaacttgtttatgagagaaa

SEQ ID NO: 75105 - DNA, 25 bp, Probe sequence
gtaacaacttgtttatgagagaaat

SEQ ID NO: 75106 - DNA, 25 bp, Probe sequence
tttctctcataaacaagttgttacg

SEQ ID NO: 75107 - DNA, 25 bp, Probe sequence
atttctctcataaacaagttgttac

SEQ ID NO: 75108 - DNA, 25 bp, Probe sequence
acacagaatgatataaccgcataca

SEQ ID NO: 75109 - DNA, 25 bp, Probe sequence
acagaatgatataaccgcatacaga

SEQ ID NO: 75110 - DNA, 25 bp, Probe sequence
cacagaatgatataaccgcatacag

SEQ ID NO: 75111 - DNA, 25 bp, Probe sequence
cagaatgatataaccgcatacagat

SEQ ID NO: 75112 - DNA, 25 bp, Probe sequence
tacacagaatgatataaccgcatac

SEQ ID NO: 75113 - DNA, 25 bp, Probe sequence
ttacacagaatgatataaccgcata

SEQ ID NO: 75114 - DNA, 25 bp, Probe sequence
agaatgatataaccgcatacagatc

SEQ ID NO: 75115 - DNA, 25 bp, Probe sequence
atttacacagaatgatataaccgca

SEQ ID NO: 75116 - DNA, 25 bp, Probe sequence
tttacacagaatgatataaccgcat

SEQ ID NO: 75117 - DNA, 25 bp, Probe sequence
tgtatgcggttatatcattctgtgt

SEQ ID NO: 75118 - DNA, 25 bp, Probe sequence
ctgtatgcggttatatcattctgtg

SEQ ID NO: 75119 - DNA, 25 bp, Probe sequence
tctgtatgcggttatatcattctgt

SEQ ID NO: 75120 - DNA, 25 bp, Probe sequence
gtatgcggttatatcattctgtgta

SEQ ID NO: 75121 - DNA, 25 bp, Probe sequence
atctgtatgcggttatatcattctg

SEQ ID NO: 75122 - DNA, 25 bp, Probe sequence
tatgcggttatatcattctgtgtaa

SEQ ID NO: 75123 - DNA, 25 bp, Probe sequence
gatctgtatgcggttatatcattct

SEQ ID NO: 75124 - DNA, 25 bp, Probe sequence
tgcggttatatcattctgtgtaaat

SEQ ID NO: 75125 - DNA, 25 bp, Probe sequence
atgcggttatatcattctgtgtaaa

SEQ ID NO: 75126 - DNA, 25 bp, Probe sequence
gctcaagacattacatctttaagct

SEQ ID NO: 75127 - DNA, 25 bp, Probe sequence
agctcaagacattacatctttaagc

SEQ ID NO: 75128 - DNA, 25 bp, Probe sequence
tcaagacattacatctttaagctct

SEQ ID NO: 75129 - DNA, 25 bp, Probe sequence
ctcaagacattacatctttaagctc

SEQ ID NO: 75130 - DNA, 25 bp, Probe sequence
caagacattacatctttaagctctt

SEQ ID NO: 75131 - DNA, 25 bp, Probe sequence
agacattacatctttaagctcttaa

SEQ ID NO: 75132 - DNA, 25 bp, Probe sequence
aagacattacatctttaagctctta

SEQ ID NO: 75133 - DNA, 25 bp, Probe sequence
acattacatctttaagctcttaatc

SEQ ID NO: 75134 - DNA, 25 bp, Probe sequence
gacattacatctttaagctcttaat

SEQ ID NO: 75135 - DNA, 25 bp, Probe sequence
gcttaaagatgtaatgtcttgagct

SEQ ID NO: 75136 - DNA, 25 bp, Probe sequence
agcttaaagatgtaatgtcttgagc

SEQ ID NO: 75137 - DNA, 25 bp, Probe sequence
agagcttaaagatgtaatgtcttga

SEQ ID NO: 75138 - DNA, 25 bp, Probe sequence
gagcttaaagatgtaatgtcttgag

SEQ ID NO: 75139 - DNA, 25 bp, Probe sequence
aagagcttaaagatgtaatgtcttg

SEQ ID NO: 75140 - DNA, 25 bp, Probe sequence
ttaagagcttaaagatgtaatgtct

SEQ ID NO: 75141 - DNA, 25 bp, Probe sequence
taagagcttaaagatgtaatgtctt

SEQ ID NO: 75142 - DNA, 25 bp, Probe sequence
attaagagcttaaagatgtaatgtc

SEQ ID NO: 75143 - DNA, 25 bp, Probe sequence
gattaagagcttaaagatgtaatgt

SEQ ID NO: 75144 - DNA, 25 bp, Probe sequence
ctagcattagataagatgtaagcgt

SEQ ID NO: 75145 - DNA, 25 bp, Probe sequence
agcattagataagatgtaagcgtta

SEQ ID NO: 75146 - DNA, 25 bp, Probe sequence
tagcattagataagatgtaagcgtt

SEQ ID NO: 75147 - DNA, 25 bp, Probe sequence
aaaccacctcttctttgtaatcttt

SEQ ID NO: 75148 - DNA, 25 bp, Probe sequence
gcattagataagatgtaagcgttac

SEQ ID NO: 75149 - DNA, 25 bp, Probe sequence
cattagataagatgtaagcgttacg

SEQ ID NO: 75150 - DNA, 25 bp, Probe sequence
cgtatatcgttaacattccacaaca

SEQ ID NO: 75151 - DNA, 25 bp, Probe sequence
gtatatcgttaacattccacaacaa

SEQ ID NO: 75152 - DNA, 25 bp, Probe sequence
gtatttacacacaaaaccacctctt

SEQ ID NO: 75153 - DNA, 25 bp, Probe sequence
acgcttacatcttatctaatgctag

SEQ ID NO: 75154 - DNA, 25 bp, Probe sequence
aacgcttacatcttatctaatgcta

SEQ ID NO: 75155 - DNA, 25 bp, Probe sequence
taacgcttacatcttatctaatgct

SEQ ID NO: 75156 - DNA, 25 bp, Probe sequence
aaagattacaaagaagaggtggttt

SEQ ID NO: 75157 - DNA, 25 bp, Probe sequence
gtaacgcttacatcttatctaatgc

SEQ ID NO: 75158 - DNA, 25 bp, Probe sequence
cgtaacgcttacatcttatctaatg

SEQ ID NO: 75159 - DNA, 25 bp, Probe sequence
tgttgtggaatgttaacgatatacg

SEQ ID NO: 75160 - DNA, 25 bp, Probe sequence
ttgttgtggaatgttaacgatatac

SEQ ID NO: 75161 - DNA, 25 bp, Probe sequence
aagaggtggttttgtgtgtaaatac

SEQ ID NO: 75162 - DNA, 25 bp, Probe sequence
acgaggacttatgtgtctgtatcta

SEQ ID NO: 75163 - DNA, 25 bp, Probe sequence
cgaggacttatgtgtctgtatctat

SEQ ID NO: 75164 - DNA, 25 bp, Probe sequence
aacgaggacttatgtgtctgtatct

SEQ ID NO: 75165 - DNA, 25 bp, Probe sequence
atgtgtctgtatctatgttgattca

SEQ ID NO: 75166 - DNA, 25 bp, Probe sequence
tgtgtctgtatctatgttgattcat

SEQ ID NO: 75167 - DNA, 25 bp, Probe sequence
aggacttatgtgtctgtatctatgt

SEQ ID NO: 75168 - DNA, 25 bp, Probe sequence
acttatgtgtctgtatctatgttga

SEQ ID NO: 75169 - DNA, 25 bp, Probe sequence
gaggacttatgtgtctgtatctatg

SEQ ID NO: 75170 - DNA, 25 bp, Probe sequence
ggacttatgtgtctgtatctatgtt

SEQ ID NO: 75171 - DNA, 25 bp, Probe sequence
tagatacagacacataagtcctcgt

SEQ ID NO: 75172 - DNA, 25 bp, Probe sequence
atagatacagacacataagtcctcg

SEQ ID NO: 75173 - DNA, 25 bp, Probe sequence
agatacagacacataagtcctcgtt

SEQ ID NO: 75174 - DNA, 25 bp, Probe sequence
tgaatcaacatagatacagacacat

SEQ ID NO: 75175 - DNA, 25 bp, Probe sequence
atgaatcaacatagatacagacaca

SEQ ID NO: 75176 - DNA, 25 bp, Probe sequence
acatagatacagacacataagtcct

SEQ ID NO: 75177 - DNA, 25 bp, Probe sequence
tcaacatagatacagacacataagt

SEQ ID NO: 75178 - DNA, 25 bp, Probe sequence
catagatacagacacataagtcctc

SEQ ID NO: 75179 - DNA, 25 bp, Probe sequence
aacatagatacagacacataagtcc

SEQ ID NO: 75180 - DNA, 25 bp, Probe sequence
taacaatccctctttgaagtacaca

SEQ ID NO: 75181 - DNA, 25 bp, Probe sequence
acaatccctctttgaagtacacatt

SEQ ID NO: 75182 - DNA, 25 bp, Probe sequence
aacaatccctctttgaagtacacat

SEQ ID NO: 75183 - DNA, 25 bp, Probe sequence
aatccctctttgaagtacacattgt

SEQ ID NO: 75184 - DNA, 25 bp, Probe sequence
ataacaatccctctttgaagtacac

SEQ ID NO: 75185 - DNA, 25 bp, Probe sequence
cgataataacaatccctctttgaag

SEQ ID NO: 75186 - DNA, 25 bp, Probe sequence
aataacaatccctctttgaagtaca

SEQ ID NO: 75187 - DNA, 25 bp, Probe sequence
gatagctttaacggtgtgtgattca

SEQ ID NO: 75188 - DNA, 25 bp, Probe sequence
gaatagtccgacgatagctttaacg

SEQ ID NO: 75189 - DNA, 25 bp, Probe sequence
tgtgtacttcaaagagggattgtta

SEQ ID NO: 75190 - DNA, 25 bp, Probe sequence
atgtgtacttcaaagagggattgtt

SEQ ID NO: 75191 - DNA, 25 bp, Probe sequence
aatgtgtacttcaaagagggattgt

SEQ ID NO: 75192 - DNA, 25 bp, Probe sequence
gtgtacttcaaagagggattgttat

SEQ ID NO: 75193 - DNA, 25 bp, Probe sequence
acaatgtgtacttcaaagagggatt

SEQ ID NO: 75194 - DNA, 25 bp, Probe sequence
cttcaaagagggattgttattatcg

SEQ ID NO: 75195 - DNA, 25 bp, Probe sequence
tgtacttcaaagagggattgttatt

SEQ ID NO: 75196 - DNA, 25 bp, Probe sequence
tgaatcacacaccgttaaagctatc

SEQ ID NO: 75197 - DNA, 25 bp, Probe sequence
gttaaagctatcgtcggactattcg

SEQ ID NO: 75198 - DNA, 25 bp, Probe sequence
ctcgtttggatcgctttcaatatta

SEQ ID NO: 75199 - DNA, 25 bp, Probe sequence
ccctattcgacatacctttactaca

SEQ ID NO: 75200 - DNA, 25 bp, Probe sequence
accctattcgacatacctttactac

SEQ ID NO: 75201 - DNA, 25 bp, Probe sequence
tcgtttggatcgctttcaatattat

SEQ ID NO: 75202 - DNA, 25 bp, Probe sequence
cgtttggatcgctttcaatattatc

SEQ ID NO: 75203 - DNA, 25 bp, Probe sequence
tattatcacctcgtttggatcgctt

SEQ ID NO: 75204 - DNA, 25 bp, Probe sequence
atcttaccctattcgacataccttt

SEQ ID NO: 75205 - DNA, 25 bp, Probe sequence
ttaccctattcgacatacctttact

SEQ ID NO: 75206 - DNA, 25 bp, Probe sequence
cttaccctattcgacatacctttac

SEQ ID NO: 75207 - DNA, 25 bp, Probe sequence
taatattgaaagcgatccaaacgag

SEQ ID NO: 75208 - DNA, 25 bp, Probe sequence
gtagtaaaggtatgtcgaatagggt

SEQ ID NO: 75209 - DNA, 25 bp, Probe sequence
tgtagtaaaggtatgtcgaataggg

SEQ ID NO: 75210 - DNA, 25 bp, Probe sequence
ataatattgaaagcgatccaaacga

SEQ ID NO: 75211 - DNA, 25 bp, Probe sequence
gataatattgaaagcgatccaaacg

SEQ ID NO: 75212 - DNA, 25 bp, Probe sequence
aagcgatccaaacgaggtgataata

SEQ ID NO: 75213 - DNA, 25 bp, Probe sequence
aaaggtatgtcgaatagggtaagat

SEQ ID NO: 75214 - DNA, 25 bp, Probe sequence
agtaaaggtatgtcgaatagggtaa

SEQ ID NO: 75215 - DNA, 25 bp, Probe sequence
gtaaaggtatgtcgaatagggtaag

SEQ ID NO: 75216 - DNA, 25 bp, Probe sequence
aatgtgacactaagtttcgctattg

SEQ ID NO: 75217 - DNA, 25 bp, Probe sequence
atgtgacactaagtttcgctattga

SEQ ID NO: 75218 - DNA, 25 bp, Probe sequence
gtataatgtgacactaagtttcgct

SEQ ID NO: 75219 - DNA, 25 bp, Probe sequence
cacatttgaaatcatcttactgctg

SEQ ID NO: 75220 - DNA, 25 bp, Probe sequence
gtgacactaagtttcgctattgaag

SEQ ID NO: 75221 - DNA, 25 bp, Probe sequence
tgtgacactaagtttcgctattgaa

SEQ ID NO: 75222 - DNA, 25 bp, Probe sequence
taatgtgacactaagtttcgctatt

SEQ ID NO: 75223 - DNA, 25 bp, Probe sequence
catttgaaatcatcttactgctgtt

SEQ ID NO: 75224 - DNA, 25 bp, Probe sequence
tcacatttgaaatcatcttactgct

SEQ ID NO: 75225 - DNA, 25 bp, Probe sequence
caatagcgaaacttagtgtcacatt

SEQ ID NO: 75226 - DNA, 25 bp, Probe sequence
tcaatagcgaaacttagtgtcacat

SEQ ID NO: 75227 - DNA, 25 bp, Probe sequence
agcgaaacttagtgtcacattatac

SEQ ID NO: 75228 - DNA, 25 bp, Probe sequence
cagcagtaagatgatttcaaatgtg

SEQ ID NO: 75229 - DNA, 25 bp, Probe sequence
cttcaatagcgaaacttagtgtcac

SEQ ID NO: 75230 - DNA, 25 bp, Probe sequence
ttcaatagcgaaacttagtgtcaca

SEQ ID NO: 75231 - DNA, 25 bp, Probe sequence
aatagcgaaacttagtgtcacatta

SEQ ID NO: 75232 - DNA, 25 bp, Probe sequence
aacagcagtaagatgatttcaaatg

SEQ ID NO: 75233 - DNA, 25 bp, Probe sequence
agcagtaagatgatttcaaatgtga

SEQ ID NO: 75234 - DNA, 25 bp, Probe sequence
ttccacctctatcattatattcaca

SEQ ID NO: 75235 - DNA, 25 bp, Probe sequence
tccacctctatcattatattcacat

SEQ ID NO: 75236 - DNA, 25 bp, Probe sequence
ccacctctatcattatattcacata

SEQ ID NO: 75237 - DNA, 25 bp, Probe sequence
tttccacctctatcattatattcac

SEQ ID NO: 75238 - DNA, 25 bp, Probe sequence
tgagtacgtatgaaacaataagtgg

SEQ ID NO: 75239 - DNA, 25 bp, Probe sequence
gagtacgtatgaaacaataagtgga

SEQ ID NO: 75240 - DNA, 25 bp, Probe sequence
agtacgtatgaaacaataagtggaa

SEQ ID NO: 75241 - DNA, 25 bp, Probe sequence
gtacgtatgaaacaataagtggaaa

SEQ ID NO: 75242 - DNA, 25 bp, Probe sequence
acctctatcattatattcacatagg

SEQ ID NO: 75243 - DNA, 25 bp, Probe sequence
tgtgaatataatgatagaggtggaa

SEQ ID NO: 75244 - DNA, 25 bp, Probe sequence
atgtgaatataatgatagaggtgga

SEQ ID NO: 75245 - DNA, 25 bp, Probe sequence
tatgtgaatataatgatagaggtgg

SEQ ID NO: 75246 - DNA, 25 bp, Probe sequence
gtgaatataatgatagaggtggaaa

SEQ ID NO: 75247 - DNA, 25 bp, Probe sequence
ccacttattgtttcatacgtactca

SEQ ID NO: 75248 - DNA, 25 bp, Probe sequence
tccacttattgtttcatacgtactc

SEQ ID NO: 75249 - DNA, 25 bp, Probe sequence
ttccacttattgtttcatacgtact

SEQ ID NO: 75250 - DNA, 25 bp, Probe sequence
tttccacttattgtttcatacgtac

SEQ ID NO: 75251 - DNA, 25 bp, Probe sequence
cctatgtgaatataatgatagaggt

SEQ ID NO: 75252 - DNA, 25 bp, Probe sequence
cccatcacttcaataactactttcc

SEQ ID NO: 75253 - DNA, 25 bp, Probe sequence
atgaaagtagtttgatggcaatgtt

SEQ ID NO: 75254 - DNA, 25 bp, Probe sequence
tgaaagtagtttgatggcaatgttg

SEQ ID NO: 75255 - DNA, 25 bp, Probe sequence
ccatcacttcaataactactttcct

SEQ ID NO: 75256 - DNA, 25 bp, Probe sequence
catgaaagtagtttgatggcaatgt

SEQ ID NO: 75257 - DNA, 25 bp, Probe sequence
acatgaaagtagtttgatggcaatg

SEQ ID NO: 75258 - DNA, 25 bp, Probe sequence
aacatgaaagtagtttgatggcaat

SEQ ID NO: 75259 - DNA, 25 bp, Probe sequence
caacatgaaagtagtttgatggcaa

SEQ ID NO: 75260 - DNA, 25 bp, Probe sequence
cttccaacatgaaagtagtttgatg

SEQ ID NO: 75261 - DNA, 25 bp, Probe sequence
ggaaagtagttattgaagtgatggg

SEQ ID NO: 75262 - DNA, 25 bp, Probe sequence
aacattgccatcaaactactttcat

SEQ ID NO: 75263 - DNA, 25 bp, Probe sequence
caacattgccatcaaactactttca

SEQ ID NO: 75264 - DNA, 25 bp, Probe sequence
aggaaagtagttattgaagtgatgg

SEQ ID NO: 75265 - DNA, 25 bp, Probe sequence
attgccatcaaactactttcatgtt

SEQ ID NO: 75266 - DNA, 25 bp, Probe sequence
cattgccatcaaactactttcatgt

SEQ ID NO: 75267 - DNA, 25 bp, Probe sequence
acattgccatcaaactactttcatg

SEQ ID NO: 75268 - DNA, 25 bp, Probe sequence
ttgccatcaaactactttcatgttg

SEQ ID NO: 75269 - DNA, 25 bp, Probe sequence
catcaaactactttcatgttggaag

SEQ ID NO: 75270 - DNA, 25 bp, Probe sequence
tgttgctcagttgtattattatctt

SEQ ID NO: 75271 - DNA, 25 bp, Probe sequence
ttgttgctcagttgtattattatct

SEQ ID NO: 75272 - DNA, 25 bp, Probe sequence
attgttgctcagttgtattattatc

SEQ ID NO: 75273 - DNA, 25 bp, Probe sequence
ccccgatatattccgatctaaaagt

SEQ ID NO: 75274 - DNA, 25 bp, Probe sequence
aaagaccggaacatatcgagaattc

SEQ ID NO: 75275 - DNA, 25 bp, Probe sequence
tccccgatatattccgatctaaaag

SEQ ID NO: 75276 - DNA, 25 bp, Probe sequence
ttccccgatatattccgatctaaaa

SEQ ID NO: 75277 - DNA, 25 bp, Probe sequence
attccccgatatattccgatctaaa

SEQ ID NO: 75278 - DNA, 25 bp, Probe sequence
aattccccgatatattccgatctaa

SEQ ID NO: 75279 - DNA, 25 bp, Probe sequence
agataataatacaactgagcaacaa

SEQ ID NO: 75280 - DNA, 25 bp, Probe sequence
aagataataatacaactgagcaaca

SEQ ID NO: 75281 - DNA, 25 bp, Probe sequence
gataataatacaactgagcaacaat

SEQ ID NO: 75282 - DNA, 25 bp, Probe sequence
gaattctcgatatgttccggtcttt

SEQ ID NO: 75283 - DNA, 25 bp, Probe sequence
acttttagatcggaatatatcgggg

SEQ ID NO: 75284 - DNA, 25 bp, Probe sequence
cttttagatcggaatatatcgggga

SEQ ID NO: 75285 - DNA, 25 bp, Probe sequence
ttttagatcggaatatatcggggaa

SEQ ID NO: 75286 - DNA, 25 bp, Probe sequence
ttagatcggaatatatcggggaatt

SEQ ID NO: 75287 - DNA, 25 bp, Probe sequence
tttagatcggaatatatcggggaat

SEQ ID NO: 75288 - DNA, 25 bp, Probe sequence
ttacacagtgattacaacgaaatcc

SEQ ID NO: 75289 - DNA, 25 bp, Probe sequence
aagacgacctacacaacagtactag

SEQ ID NO: 75290 - DNA, 25 bp, Probe sequence
caacagtactagtcatgtaagtcgt

SEQ ID NO: 75291 - DNA, 25 bp, Probe sequence
acaacagtactagtcatgtaagtcg

SEQ ID NO: 75292 - DNA, 25 bp, Probe sequence
tacacagtgattacaacgaaatccc

SEQ ID NO: 75293 - DNA, 25 bp, Probe sequence
aacagtactagtcatgtaagtcgtt

SEQ ID NO: 75294 - DNA, 25 bp, Probe sequence
acacaacagtactagtcatgtaagt

SEQ ID NO: 75295 - DNA, 25 bp, Probe sequence
gacctacacaacagtactagtcatg

SEQ ID NO: 75296 - DNA, 25 bp, Probe sequence
acctacacaacagtactagtcatgt

SEQ ID NO: 75297 - DNA, 25 bp, Probe sequence
ggatttcgttgtaatcactgtgtaa

SEQ ID NO: 75298 - DNA, 25 bp, Probe sequence
ctagtactgttgtgtaggtcgtctt

SEQ ID NO: 75299 - DNA, 25 bp, Probe sequence
cgacttacatgactagtactgttgt

SEQ ID NO: 75300 - DNA, 25 bp, Probe sequence
acgacttacatgactagtactgttg

SEQ ID NO: 75301 - DNA, 25 bp, Probe sequence
gggatttcgttgtaatcactgtgta

SEQ ID NO: 75302 - DNA, 25 bp, Probe sequence
aacgacttacatgactagtactgtt

SEQ ID NO: 75303 - DNA, 25 bp, Probe sequence
acttacatgactagtactgttgtgt

SEQ ID NO: 75304 - DNA, 25 bp, Probe sequence
catgactagtactgttgtgtaggtc

SEQ ID NO: 75305 - DNA, 25 bp, Probe sequence
acatgactagtactgttgtgtaggt

SEQ ID NO: 75306 - DNA, 25 bp, Probe sequence
tgattcacctcctatgcctatatct

SEQ ID NO: 75307 - DNA, 25 bp, Probe sequence
gattcacctcctatgcctatatctt

SEQ ID NO: 75308 - DNA, 25 bp, Probe sequence
ttcacctcctatgcctatatcttaa

SEQ ID NO: 75309 - DNA, 25 bp, Probe sequence
attcacctcctatgcctatatctta

SEQ ID NO: 75310 - DNA, 25 bp, Probe sequence
tcacctcctatgcctatatcttaat

SEQ ID NO: 75311 - DNA, 25 bp, Probe sequence
cacctcctatgcctatatcttaatt

SEQ ID NO: 75312 - DNA, 25 bp, Probe sequence
gtgattcacctcctatgcctatatc

SEQ ID NO: 75313 - DNA, 25 bp, Probe sequence
tgtgattcacctcctatgcctatat

SEQ ID NO: 75314 - DNA, 25 bp, Probe sequence
gtgtgattcacctcctatgcctata

SEQ ID NO: 75315 - DNA, 25 bp, Probe sequence
agatataggcataggaggtgaatca

SEQ ID NO: 75316 - DNA, 25 bp, Probe sequence
aagatataggcataggaggtgaatc

SEQ ID NO: 75317 - DNA, 25 bp, Probe sequence
ttaagatataggcataggaggtgaa

SEQ ID NO: 75318 - DNA, 25 bp, Probe sequence
taagatataggcataggaggtgaat

SEQ ID NO: 75319 - DNA, 25 bp, Probe sequence
attaagatataggcataggaggtga

SEQ ID NO: 75320 - DNA, 25 bp, Probe sequence
aattaagatataggcataggaggtg

SEQ ID NO: 75321 - DNA, 25 bp, Probe sequence
gatataggcataggaggtgaatcac

SEQ ID NO: 75322 - DNA, 25 bp, Probe sequence
atataggcataggaggtgaatcaca

SEQ ID NO: 75323 - DNA, 25 bp, Probe sequence
tataggcataggaggtgaatcacac

SEQ ID NO: 75324 - DNA, 25 bp, Probe sequence
aacattcaaagattatgccaacaca

SEQ ID NO: 75325 - DNA, 25 bp, Probe sequence
acattcaaagattatgccaacacat

SEQ ID NO: 75326 - DNA, 25 bp, Probe sequence
aaacattcaaagattatgccaacac

SEQ ID NO: 75327 - DNA, 25 bp, Probe sequence
cattcaaagattatgccaacacatt

SEQ ID NO: 75328 - DNA, 25 bp, Probe sequence
atgccaacacattaaatctttgaat

SEQ ID NO: 75329 - DNA, 25 bp, Probe sequence
tcaaagattatgccaacacattaaa

SEQ ID NO: 75330 - DNA, 25 bp, Probe sequence
ttcaaagattatgccaacacattaa

SEQ ID NO: 75331 - DNA, 25 bp, Probe sequence
tatgccaacacattaaatctttgaa

SEQ ID NO: 75332 - DNA, 25 bp, Probe sequence
ttatgccaacacattaaatctttga

SEQ ID NO: 75333 - DNA, 25 bp, Probe sequence
tgtgttggcataatctttgaatgtt

SEQ ID NO: 75334 - DNA, 25 bp, Probe sequence
atgtgttggcataatctttgaatgt

SEQ ID NO: 75335 - DNA, 25 bp, Probe sequence
gtgttggcataatctttgaatgttt

SEQ ID NO: 75336 - DNA, 25 bp, Probe sequence
aatgtgttggcataatctttgaatg

SEQ ID NO: 75337 - DNA, 25 bp, Probe sequence
attcaaagatttaatgtgttggcat

SEQ ID NO: 75338 - DNA, 25 bp, Probe sequence
ttaatgtgttggcataatctttgaa

SEQ ID NO: 75339 - DNA, 25 bp, Probe sequence
tttaatgtgttggcataatctttga

SEQ ID NO: 75340 - DNA, 25 bp, Probe sequence
tcaaagatttaatgtgttggcataa

SEQ ID NO: 75341 - DNA, 25 bp, Probe sequence
ttcaaagatttaatgtgttggcata

SEQ ID NO: 75342 - DNA, 25 bp, Probe sequence
tagtgttgtatttggcagtagttga

SEQ ID NO: 75343 - DNA, 25 bp, Probe sequence
atagtgttgtatttggcagtagttg

SEQ ID NO: 75344 - DNA, 25 bp, Probe sequence
tattcttgggagtcggacataaatc

SEQ ID NO: 75345 - DNA, 25 bp, Probe sequence
ctattcttgggagtcggacataaat

SEQ ID NO: 75346 - DNA, 25 bp, Probe sequence
aatggttctttatcaattccttccc

SEQ ID NO: 75347 - DNA, 25 bp, Probe sequence
agtgttgtatttggcagtagttgac

SEQ ID NO: 75348 - DNA, 25 bp, Probe sequence
gactgtagatagtggtgaaggaaat

SEQ ID NO: 75349 - DNA, 25 bp, Probe sequence
actgtagatagtggtgaaggaaatt

SEQ ID NO: 75350 - DNA, 25 bp, Probe sequence
attcttgggagtcggacataaatca

SEQ ID NO: 75351 - DNA, 25 bp, Probe sequence
tcaactactgccaaatacaacacta

SEQ ID NO: 75352 - DNA, 25 bp, Probe sequence
caactactgccaaatacaacactat

SEQ ID NO: 75353 - DNA, 25 bp, Probe sequence
atttatgtccgactcccaagaatag

SEQ ID NO: 75354 - DNA, 25 bp, Probe sequence
gatttatgtccgactcccaagaata

SEQ ID NO: 75355 - DNA, 25 bp, Probe sequence
gggaaggaattgataaagaaccatt

SEQ ID NO: 75356 - DNA, 25 bp, Probe sequence
gtcaactactgccaaatacaacact

SEQ ID NO: 75357 - DNA, 25 bp, Probe sequence
atttccttcaccactatctacagtc

SEQ ID NO: 75358 - DNA, 25 bp, Probe sequence
aatttccttcaccactatctacagt

SEQ ID NO: 75359 - DNA, 25 bp, Probe sequence
tgatttatgtccgactcccaagaat

SEQ ID NO: 75360 - DNA, 25 bp, Probe sequence
aggacctactgaatttatgcgatag

SEQ ID NO: 75361 - DNA, 25 bp, Probe sequence
catggtgcattcatatctcaactat

SEQ ID NO: 75362 - DNA, 25 bp, Probe sequence
ttaggacctactgaatttatgcgat

SEQ ID NO: 75363 - DNA, 25 bp, Probe sequence
gttaggacctactgaatttatgcga

SEQ ID NO: 75364 - DNA, 25 bp, Probe sequence
atggtgcattcatatctcaactatt

SEQ ID NO: 75365 - DNA, 25 bp, Probe sequence
taggacctactgaatttatgcgata

SEQ ID NO: 75366 - DNA, 25 bp, Probe sequence
ggttaggacctactgaatttatgcg

SEQ ID NO: 75367 - DNA, 25 bp, Probe sequence
tggtgcattcatatctcaactattt

SEQ ID NO: 75368 - DNA, 25 bp, Probe sequence
gcatggtgcattcatatctcaacta

SEQ ID NO: 75369 - DNA, 25 bp, Probe sequence
ctatcgcataaattcagtaggtcct

SEQ ID NO: 75370 - DNA, 25 bp, Probe sequence
atagttgagatatgaatgcaccatg

SEQ ID NO: 75371 - DNA, 25 bp, Probe sequence
tcgcataaattcagtaggtcctaac

SEQ ID NO: 75372 - DNA, 25 bp, Probe sequence
atcgcataaattcagtaggtcctaa

SEQ ID NO: 75373 - DNA, 25 bp, Probe sequence
aatagttgagatatgaatgcaccat

SEQ ID NO: 75374 - DNA, 25 bp, Probe sequence
tatcgcataaattcagtaggtccta

SEQ ID NO: 75375 - DNA, 25 bp, Probe sequence
cgcataaattcagtaggtcctaacc

SEQ ID NO: 75376 - DNA, 25 bp, Probe sequence
aaatagttgagatatgaatgcacca

SEQ ID NO: 75377 - DNA, 25 bp, Probe sequence
tagttgagatatgaatgcaccatgc

SEQ ID NO: 75378 - DNA, 25 bp, Probe sequence
gcatagttagacacaatttagacac

SEQ ID NO: 75379 - DNA, 25 bp, Probe sequence
agcatagttagacacaatttagaca

SEQ ID NO: 75380 - DNA, 25 bp, Probe sequence
aagcatagttagacacaatttagac

SEQ ID NO: 75381 - DNA, 25 bp, Probe sequence
gacacaatttagacacaattagaca

SEQ ID NO: 75382 - DNA, 25 bp, Probe sequence
catagttagacacaatttagacaca

SEQ ID NO: 75383 - DNA, 25 bp, Probe sequence
agacacaatttagacacaattagac

SEQ ID NO: 75384 - DNA, 25 bp, Probe sequence
acacaatttagacacaattagacaa

SEQ ID NO: 75385 - DNA, 25 bp, Probe sequence
agttagacacaatttagacacaatt

SEQ ID NO: 75386 - DNA, 25 bp, Probe sequence
tagttagacacaatttagacacaat

SEQ ID NO: 75387 - DNA, 25 bp, Probe sequence
gtgtctaaattgtgtctaactatgc

SEQ ID NO: 75388 - DNA, 25 bp, Probe sequence
tgtctaaattgtgtctaactatgct

SEQ ID NO: 75389 - DNA, 25 bp, Probe sequence
gtctaaattgtgtctaactatgctt

SEQ ID NO: 75390 - DNA, 25 bp, Probe sequence
tgtctaattgtgtctaaattgtgtc

SEQ ID NO: 75391 - DNA, 25 bp, Probe sequence
tgtgtctaaattgtgtctaactatg

SEQ ID NO: 75392 - DNA, 25 bp, Probe sequence
gtctaattgtgtctaaattgtgtct

SEQ ID NO: 75393 - DNA, 25 bp, Probe sequence
ttgtctaattgtgtctaaattgtgt

SEQ ID NO: 75394 - DNA, 25 bp, Probe sequence
aattgtgtctaaattgtgtctaact

SEQ ID NO: 75395 - DNA, 25 bp, Probe sequence
ttgtgtctaaattgtgtctaactat

SEQ ID NO: 75396 - DNA, 25 bp, Probe sequence
gtgctacactcctctattataactt

SEQ ID NO: 75397 - DNA, 25 bp, Probe sequence
tgctacactcctctattataactta

SEQ ID NO: 75398 - DNA, 25 bp, Probe sequence
agtgctacactcctctattataact

SEQ ID NO: 75399 - DNA, 25 bp, Probe sequence
gctacactcctctattataacttat

SEQ ID NO: 75400 - DNA, 25 bp, Probe sequence
aagtgctacactcctctattataac

SEQ ID NO: 75401 - DNA, 25 bp, Probe sequence
gcaaagtgctacactcctctattat

SEQ ID NO: 75402 - DNA, 25 bp, Probe sequence
caaagtgctacactcctctattata

SEQ ID NO: 75403 - DNA, 25 bp, Probe sequence
aaagtgctacactcctctattataa

SEQ ID NO: 75404 - DNA, 25 bp, Probe sequence
aagttataatagaggagtgtagcac

SEQ ID NO: 75405 - DNA, 25 bp, Probe sequence
taagttataatagaggagtgtagca

SEQ ID NO: 75406 - DNA, 25 bp, Probe sequence
agttataatagaggagtgtagcact

SEQ ID NO: 75407 - DNA, 25 bp, Probe sequence
gttataatagaggagtgtagcactt

SEQ ID NO: 75408 - DNA, 25 bp, Probe sequence
ataagttataatagaggagtgtagc

SEQ ID NO: 75409 - DNA, 25 bp, Probe sequence
ataatagaggagtgtagcactttgc

SEQ ID NO: 75410 - DNA, 25 bp, Probe sequence
tataatagaggagtgtagcactttg

SEQ ID NO: 75411 - DNA, 25 bp, Probe sequence
ttataatagaggagtgtagcacttt

SEQ ID NO: 75412 - DNA, 25 bp, Probe sequence
acaacatggtattgagtcacttctt

SEQ ID NO: 75413 - DNA, 25 bp, Probe sequence
aacaacatggtattgagtcacttct

SEQ ID NO: 75414 - DNA, 25 bp, Probe sequence
taacaacatggtattgagtcacttc

SEQ ID NO: 75415 - DNA, 25 bp, Probe sequence
ttaacaacatggtattgagtcactt

SEQ ID NO: 75416 - DNA, 25 bp, Probe sequence
attaacaacatggtattgagtcact

SEQ ID NO: 75417 - DNA, 25 bp, Probe sequence
tgcagacagcttaacgattactata

SEQ ID NO: 75418 - DNA, 25 bp, Probe sequence
atgcagacagcttaacgattactat

SEQ ID NO: 75419 - DNA, 25 bp, Probe sequence
tgtctacaattccattataggatgc

SEQ ID NO: 75420 - DNA, 25 bp, Probe sequence
gatgcagacagcttaacgattacta

SEQ ID NO: 75421 - DNA, 25 bp, Probe sequence
agaagtgactcaataccatgttgtt

SEQ ID NO: 75422 - DNA, 25 bp, Probe sequence
aagaagtgactcaataccatgttgt

SEQ ID NO: 75423 - DNA, 25 bp, Probe sequence
gaagtgactcaataccatgttgtta

SEQ ID NO: 75424 - DNA, 25 bp, Probe sequence
aagtgactcaataccatgttgttaa

SEQ ID NO: 75425 - DNA, 25 bp, Probe sequence
agtgactcaataccatgttgttaat

SEQ ID NO: 75426 - DNA, 25 bp, Probe sequence
atagtaatcgttaagctgtctgcat

SEQ ID NO: 75427 - DNA, 25 bp, Probe sequence
tatagtaatcgttaagctgtctgca

SEQ ID NO: 75428 - DNA, 25 bp, Probe sequence
gcatcctataatggaattgtagaca

SEQ ID NO: 75429 - DNA, 25 bp, Probe sequence
cgttaagctgtctgcatcctataat

SEQ ID NO: 75430 - DNA, 25 bp, Probe sequence
ctggaacagagttatttgtgagttt

SEQ ID NO: 75431 - DNA, 25 bp, Probe sequence
ctgaaccatctggaacagagttatt

SEQ ID NO: 75432 - DNA, 25 bp, Probe sequence
taattcaaaacgcaagcccctatat

SEQ ID NO: 75433 - DNA, 25 bp, Probe sequence
ttaattcaaaacgcaagcccctata

SEQ ID NO: 75434 - DNA, 25 bp, Probe sequence
ttcaaaacgcaagcccctatataat

SEQ ID NO: 75435 - DNA, 25 bp, Probe sequence
attcaaaacgcaagcccctatataa

SEQ ID NO: 75436 - DNA, 25 bp, Probe sequence
aattcaaaacgcaagcccctatata

SEQ ID NO: 75437 - DNA, 25 bp, Probe sequence
aacgcaagcccctatataatgttta

SEQ ID NO: 75438 - DNA, 25 bp, Probe sequence
cctgaaccatctggaacagagttat

SEQ ID NO: 75439 - DNA, 25 bp, Probe sequence
aaactcacaaataactctgttccag

SEQ ID NO: 75440 - DNA, 25 bp, Probe sequence
aataactctgttccagatggttcag

SEQ ID NO: 75441 - DNA, 25 bp, Probe sequence
atataggggcttgcgttttgaatta

SEQ ID NO: 75442 - DNA, 25 bp, Probe sequence
tataggggcttgcgttttgaattaa

SEQ ID NO: 75443 - DNA, 25 bp, Probe sequence
tatataggggcttgcgttttgaatt

SEQ ID NO: 75444 - DNA, 25 bp, Probe sequence
ttatataggggcttgcgttttgaat

SEQ ID NO: 75445 - DNA, 25 bp, Probe sequence
attatataggggcttgcgttttgaa

SEQ ID NO: 75446 - DNA, 25 bp, Probe sequence
taaacattatataggggcttgcgtt

SEQ ID NO: 75447 - DNA, 25 bp, Probe sequence
ataactctgttccagatggttcagg

SEQ ID NO: 75448 - DNA, 25 bp, Probe sequence
agtaagtaatagataggcatgacaa

SEQ ID NO: 75449 - DNA, 25 bp, Probe sequence
gtaagtaatagataggcatgacaat

SEQ ID NO: 75450 - DNA, 25 bp, Probe sequence
tagtaagtaatagataggcatgaca

SEQ ID NO: 75451 - DNA, 25 bp, Probe sequence
taagtaatagataggcatgacaatg

SEQ ID NO: 75452 - DNA, 25 bp, Probe sequence
cattatgctaatccccaacctttta

SEQ ID NO: 75453 - DNA, 25 bp, Probe sequence
ccattatgctaatccccaacctttt

SEQ ID NO: 75454 - DNA, 25 bp, Probe sequence
attatgctaatccccaaccttttaa

SEQ ID NO: 75455 - DNA, 25 bp, Probe sequence
caatcccattatgctaatccccaac

SEQ ID NO: 75456 - DNA, 25 bp, Probe sequence
ttagtaagtaatagataggcatgac

SEQ ID NO: 75457 - DNA, 25 bp, Probe sequence
ttgtcatgcctatctattacttact

SEQ ID NO: 75458 - DNA, 25 bp, Probe sequence
tgtcatgcctatctattacttacta

SEQ ID NO: 75459 - DNA, 25 bp, Probe sequence
attgtcatgcctatctattacttac

SEQ ID NO: 75460 - DNA, 25 bp, Probe sequence
cattgtcatgcctatctattactta

SEQ ID NO: 75461 - DNA, 25 bp, Probe sequence
taaaaggttggggattagcataatg

SEQ ID NO: 75462 - DNA, 25 bp, Probe sequence
aaaaggttggggattagcataatgg

SEQ ID NO: 75463 - DNA, 25 bp, Probe sequence
ttaaaaggttggggattagcataat

SEQ ID NO: 75464 - DNA, 25 bp, Probe sequence
gttggggattagcataatgggattg

SEQ ID NO: 75465 - DNA, 25 bp, Probe sequence
catgcctatctattacttactaact

SEQ ID NO: 75466 - DNA, 25 bp, Probe sequence
taactattcccacatcatcgcaaat

SEQ ID NO: 75467 - DNA, 25 bp, Probe sequence
ataactattcccacatcatcgcaaa

SEQ ID NO: 75468 - DNA, 25 bp, Probe sequence
aataactattcccacatcatcgcaa

SEQ ID NO: 75469 - DNA, 25 bp, Probe sequence
aaataactattcccacatcatcgca

SEQ ID NO: 75470 - DNA, 25 bp, Probe sequence
tattcccacatcatcgcaaataatg

SEQ ID NO: 75471 - DNA, 25 bp, Probe sequence
ctattcccacatcatcgcaaataat

SEQ ID NO: 75472 - DNA, 25 bp, Probe sequence
actattcccacatcatcgcaaataa

SEQ ID NO: 75473 - DNA, 25 bp, Probe sequence
aactattcccacatcatcgcaaata

SEQ ID NO: 75474 - DNA, 25 bp, Probe sequence
aaaataactattcccacatcatcgc

SEQ ID NO: 75475 - DNA, 25 bp, Probe sequence
tttgcgatgatgtgggaatagttat

SEQ ID NO: 75476 - DNA, 25 bp, Probe sequence
atttgcgatgatgtgggaatagtta

SEQ ID NO: 75477 - DNA, 25 bp, Probe sequence
tgcgatgatgtgggaatagttattt

SEQ ID NO: 75478 - DNA, 25 bp, Probe sequence
ttgcgatgatgtgggaatagttatt

SEQ ID NO: 75479 - DNA, 25 bp, Probe sequence
cattatttgcgatgatgtgggaata

SEQ ID NO: 75480 - DNA, 25 bp, Probe sequence
attatttgcgatgatgtgggaatag

SEQ ID NO: 75481 - DNA, 25 bp, Probe sequence
tatttgcgatgatgtgggaatagtt

SEQ ID NO: 75482 - DNA, 25 bp, Probe sequence
ttatttgcgatgatgtgggaatagt

SEQ ID NO: 75483 - DNA, 25 bp, Probe sequence
gcgatgatgtgggaatagttatttt

SEQ ID NO: 75484 - DNA, 25 bp, Probe sequence
tttagaatgtaaacgaacacccttt

SEQ ID NO: 75485 - DNA, 25 bp, Probe sequence
atttagaatgtaaacgaacaccctt

SEQ ID NO: 75486 - DNA, 25 bp, Probe sequence
aatttagaatgtaaacgaacaccct

SEQ ID NO: 75487 - DNA, 25 bp, Probe sequence
aaatttagaatgtaaacgaacaccc

SEQ ID NO: 75488 - DNA, 25 bp, Probe sequence
ttagaatgtaaacgaacaccctttt

SEQ ID NO: 75489 - DNA, 25 bp, Probe sequence
taaatttagaatgtaaacgaacacc

SEQ ID NO: 75490 - DNA, 25 bp, Probe sequence
cttcacctctcatcaataaatttag

SEQ ID NO: 75491 - DNA, 25 bp, Probe sequence
tcacctctcatcaataaatttagaa

SEQ ID NO: 75492 - DNA, 25 bp, Probe sequence
ttcacctctcatcaataaatttaga

SEQ ID NO: 75493 - DNA, 25 bp, Probe sequence
aaagggtgttcgtttacattctaaa

SEQ ID NO: 75494 - DNA, 25 bp, Probe sequence
agggtgttcgtttacattctaaatt

SEQ ID NO: 75495 - DNA, 25 bp, Probe sequence
aagggtgttcgtttacattctaaat

SEQ ID NO: 75496 - DNA, 25 bp, Probe sequence
gggtgttcgtttacattctaaattt

SEQ ID NO: 75497 - DNA, 25 bp, Probe sequence
aaaagggtgttcgtttacattctaa

SEQ ID NO: 75498 - DNA, 25 bp, Probe sequence
ggtgttcgtttacattctaaattta

SEQ ID NO: 75499 - DNA, 25 bp, Probe sequence
ctaaatttattgatgagaggtgaag

SEQ ID NO: 75500 - DNA, 25 bp, Probe sequence
tctaaatttattgatgagaggtgaa

SEQ ID NO: 75501 - DNA, 25 bp, Probe sequence
ttctaaatttattgatgagaggtga

SEQ ID NO: 75502 - DNA, 25 bp, Probe sequence
tcatttatctcctttgtccattact

SEQ ID NO: 75503 - DNA, 25 bp, Probe sequence
tggtctaaagtctgattattcaact

SEQ ID NO: 75504 - DNA, 25 bp, Probe sequence
catttatctcctttgtccattactt

SEQ ID NO: 75505 - DNA, 25 bp, Probe sequence
atcatttatctcctttgtccattac

SEQ ID NO: 75506 - DNA, 25 bp, Probe sequence
atggtctaaagtctgattattcaac

SEQ ID NO: 75507 - DNA, 25 bp, Probe sequence
atttatctcctttgtccattacttt

SEQ ID NO: 75508 - DNA, 25 bp, Probe sequence
ctaatatatgctgttcttccccact

SEQ ID NO: 75509 - DNA, 25 bp, Probe sequence
actaatatatgctgttcttccccac

SEQ ID NO: 75510 - DNA, 25 bp, Probe sequence
taatatatgctgttcttccccactt

SEQ ID NO: 75511 - DNA, 25 bp, Probe sequence
agtaatggacaaaggagataaatga

SEQ ID NO: 75512 - DNA, 25 bp, Probe sequence
agttgaataatcagactttagacca

SEQ ID NO: 75513 - DNA, 25 bp, Probe sequence
aagtaatggacaaaggagataaatg

SEQ ID NO: 75514 - DNA, 25 bp, Probe sequence
gtaatggacaaaggagataaatgat

SEQ ID NO: 75515 - DNA, 25 bp, Probe sequence
gttgaataatcagactttagaccat

SEQ ID NO: 75516 - DNA, 25 bp, Probe sequence
aaagtaatggacaaaggagataaat

SEQ ID NO: 75517 - DNA, 25 bp, Probe sequence
gtggggaagaacagcatatattagt

SEQ ID NO: 75518 - DNA, 25 bp, Probe sequence
agtggggaagaacagcatatattag

SEQ ID NO: 75519 - DNA, 25 bp, Probe sequence
aagtggggaagaacagcatatatta

SEQ ID NO: 75520 - DNA, 25 bp, Probe sequence
taagccgttgcataatatgtagtca

SEQ ID NO: 75521 - DNA, 25 bp, Probe sequence
agccgttgcataatatgtagtcatt

SEQ ID NO: 75522 - DNA, 25 bp, Probe sequence
aagccgttgcataatatgtagtcat

SEQ ID NO: 75523 - DNA, 25 bp, Probe sequence
ttaagccgttgcataatatgtagtc

SEQ ID NO: 75524 - DNA, 25 bp, Probe sequence
gccgttgcataatatgtagtcatta

SEQ ID NO: 75525 - DNA, 25 bp, Probe sequence
ccgttgcataatatgtagtcattaa

SEQ ID NO: 75526 - DNA, 25 bp, Probe sequence
tttaagccgttgcataatatgtagt

SEQ ID NO: 75527 - DNA, 25 bp, Probe sequence
caatttaagccgttgcataatatgt

SEQ ID NO: 75528 - DNA, 25 bp, Probe sequence
acaatttaagccgttgcataatatg

SEQ ID NO: 75529 - DNA, 25 bp, Probe sequence
tgactacatattatgcaacggctta

SEQ ID NO: 75530 - DNA, 25 bp, Probe sequence
gactacatattatgcaacggcttaa

SEQ ID NO: 75531 - DNA, 25 bp, Probe sequence
atgactacatattatgcaacggctt

SEQ ID NO: 75532 - DNA, 25 bp, Probe sequence
aatgactacatattatgcaacggct

SEQ ID NO: 75533 - DNA, 25 bp, Probe sequence
taatgactacatattatgcaacggc

SEQ ID NO: 75534 - DNA, 25 bp, Probe sequence
ttaatgactacatattatgcaacgg

SEQ ID NO: 75535 - DNA, 25 bp, Probe sequence
actacatattatgcaacggcttaaa

SEQ ID NO: 75536 - DNA, 25 bp, Probe sequence
catattatgcaacggcttaaattgt

SEQ ID NO: 75537 - DNA, 25 bp, Probe sequence
acatattatgcaacggcttaaattg

SEQ ID NO: 75538 - DNA, 25 bp, Probe sequence
tcaatgtttaacaatgaaagtaccg

SEQ ID NO: 75539 - DNA, 25 bp, Probe sequence
cggtactttcaatgtttaacaatga

SEQ ID NO: 75540 - DNA, 25 bp, Probe sequence
ttgttatttcataccttgtcactaa

SEQ ID NO: 75541 - DNA, 25 bp, Probe sequence
gttatttcataccttgtcactaaca

SEQ ID NO: 75542 - DNA, 25 bp, Probe sequence
tgttatttcataccttgtcactaac

SEQ ID NO: 75543 - DNA, 25 bp, Probe sequence
attgttatttcataccttgtcacta

SEQ ID NO: 75544 - DNA, 25 bp, Probe sequence
tattgttatttcataccttgtcact

SEQ ID NO: 75545 - DNA, 25 bp, Probe sequence
actattgttatttcataccttgtca

SEQ ID NO: 75546 - DNA, 25 bp, Probe sequence
tcactattgttatttcataccttgt

SEQ ID NO: 75547 - DNA, 25 bp, Probe sequence
tcattgttaaacattgaaagtaccg

SEQ ID NO: 75548 - DNA, 25 bp, Probe sequence
cggtactttcattgttaaacattga

SEQ ID NO: 75549 - DNA, 25 bp, Probe sequence
ttagtgacaaggtatgaaataacaa

SEQ ID NO: 75550 - DNA, 25 bp, Probe sequence
gttagtgacaaggtatgaaataaca

SEQ ID NO: 75551 - DNA, 25 bp, Probe sequence
tgttagtgacaaggtatgaaataac

SEQ ID NO: 75552 - DNA, 25 bp, Probe sequence
acaaggtatgaaataacaatagtga

SEQ ID NO: 75553 - DNA, 25 bp, Probe sequence
tgacaaggtatgaaataacaatagt

SEQ ID NO: 75554 - DNA, 25 bp, Probe sequence
agtgacaaggtatgaaataacaata

SEQ ID NO: 75555 - DNA, 25 bp, Probe sequence
tagtgacaaggtatgaaataacaat

SEQ ID NO: 75556 - DNA, 25 bp, Probe sequence
actgctatgtcactatgtatatcat

SEQ ID NO: 75557 - DNA, 25 bp, Probe sequence
ttccatactgctatgtcactatgta

SEQ ID NO: 75558 - DNA, 25 bp, Probe sequence
tccatactgctatgtcactatgtat

SEQ ID NO: 75559 - DNA, 25 bp, Probe sequence
tttacttaccgtttccatactgcta

SEQ ID NO: 75560 - DNA, 25 bp, Probe sequence
ctgtttacttaccgtttccatactg

SEQ ID NO: 75561 - DNA, 25 bp, Probe sequence
tctgtttacttaccgtttccatact

SEQ ID NO: 75562 - DNA, 25 bp, Probe sequence
ttacttaccgtttccatactgctat

SEQ ID NO: 75563 - DNA, 25 bp, Probe sequence
tactgctatgtcactatgtatatca

SEQ ID NO: 75564 - DNA, 25 bp, Probe sequence
ttctgtttacttaccgtttccatac

SEQ ID NO: 75565 - DNA, 25 bp, Probe sequence
atgatatacatagtgacatagcagt

SEQ ID NO: 75566 - DNA, 25 bp, Probe sequence
tacatagtgacatagcagtatggaa

SEQ ID NO: 75567 - DNA, 25 bp, Probe sequence
atacatagtgacatagcagtatgga

SEQ ID NO: 75568 - DNA, 25 bp, Probe sequence
agtatggaaacggtaagtaaacaga

SEQ ID NO: 75569 - DNA, 25 bp, Probe sequence
cagtatggaaacggtaagtaaacag

SEQ ID NO: 75570 - DNA, 25 bp, Probe sequence
tagcagtatggaaacggtaagtaaa

SEQ ID NO: 75571 - DNA, 25 bp, Probe sequence
atagcagtatggaaacggtaagtaa

SEQ ID NO: 75572 - DNA, 25 bp, Probe sequence
tgatatacatagtgacatagcagta

SEQ ID NO: 75573 - DNA, 25 bp, Probe sequence
gtatggaaacggtaagtaaacagaa

SEQ ID NO: 75574 - DNA, 25 bp, Probe sequence
acaatatcatatttcgcaatcactg

SEQ ID NO: 75575 - DNA, 25 bp, Probe sequence
gacaatatcatatttcgcaatcact

SEQ ID NO: 75576 - DNA, 25 bp, Probe sequence
tgacaatatcatatttcgcaatcac

SEQ ID NO: 75577 - DNA, 25 bp, Probe sequence
atgacaatatcatatttcgcaatca

SEQ ID NO: 75578 - DNA, 25 bp, Probe sequence
aatgacaatatcatatttcgcaatc

SEQ ID NO: 75579 - DNA, 25 bp, Probe sequence
aaatgacaatatcatatttcgcaat

SEQ ID NO: 75580 - DNA, 25 bp, Probe sequence
taaatgacaatatcatatttcgcaa

SEQ ID NO: 75581 - DNA, 25 bp, Probe sequence
ataaatgacaatatcatatttcgca

SEQ ID NO: 75582 - DNA, 25 bp, Probe sequence
cagtgattgcgaaatatgatattgt

SEQ ID NO: 75583 - DNA, 25 bp, Probe sequence
gtgattgcgaaatatgatattgtca

SEQ ID NO: 75584 - DNA, 25 bp, Probe sequence
agtgattgcgaaatatgatattgtc

SEQ ID NO: 75585 - DNA, 25 bp, Probe sequence
tgattgcgaaatatgatattgtcat

SEQ ID NO: 75586 - DNA, 25 bp, Probe sequence
gattgcgaaatatgatattgtcatt

SEQ ID NO: 75587 - DNA, 25 bp, Probe sequence
attgcgaaatatgatattgtcattt

SEQ ID NO: 75588 - DNA, 25 bp, Probe sequence
ttgcgaaatatgatattgtcattta

SEQ ID NO: 75589 - DNA, 25 bp, Probe sequence
tgcgaaatatgatattgtcatttat

SEQ ID NO: 75590 - DNA, 25 bp, Probe sequence
tgtgctattcctcattactcatcat

SEQ ID NO: 75591 - DNA, 25 bp, Probe sequence
tgcgtcactaactaacaatcctata

SEQ ID NO: 75592 - DNA, 25 bp, Probe sequence
gcgtcactaactaacaatcctatac

SEQ ID NO: 75593 - DNA, 25 bp, Probe sequence
atgtgctattcctcattactcatca

SEQ ID NO: 75594 - DNA, 25 bp, Probe sequence
gtgctattcctcattactcatcatt

SEQ ID NO: 75595 - DNA, 25 bp, Probe sequence
ttgcgtcactaactaacaatcctat

SEQ ID NO: 75596 - DNA, 25 bp, Probe sequence
cgtcactaactaacaatcctataca

SEQ ID NO: 75597 - DNA, 25 bp, Probe sequence
attgcgtcactaactaacaatccta

SEQ ID NO: 75598 - DNA, 25 bp, Probe sequence
tattgcgtcactaactaacaatcct

SEQ ID NO: 75599 - DNA, 25 bp, Probe sequence
atgatgagtaatgaggaatagcaca

SEQ ID NO: 75600 - DNA, 25 bp, Probe sequence
tataggattgttagttagtgacgca

SEQ ID NO: 75601 - DNA, 25 bp, Probe sequence
gtataggattgttagttagtgacgc

SEQ ID NO: 75602 - DNA, 25 bp, Probe sequence
tgatgagtaatgaggaatagcacat

SEQ ID NO: 75603 - DNA, 25 bp, Probe sequence
aatgatgagtaatgaggaatagcac

SEQ ID NO: 75604 - DNA, 25 bp, Probe sequence
ataggattgttagttagtgacgcaa

SEQ ID NO: 75605 - DNA, 25 bp, Probe sequence
tgtataggattgttagttagtgacg

SEQ ID NO: 75606 - DNA, 25 bp, Probe sequence
aggattgttagttagtgacgcaata

SEQ ID NO: 75607 - DNA, 25 bp, Probe sequence
taggattgttagttagtgacgcaat

SEQ ID NO: 75608 - DNA, 25 bp, Probe sequence
aggatagacattaataatgaggtgg

SEQ ID NO: 75609 - DNA, 25 bp, Probe sequence
ggatagacattaataatgaggtggg

SEQ ID NO: 75610 - DNA, 25 bp, Probe sequence
gacattaataatgaggtgggaatct

SEQ ID NO: 75611 - DNA, 25 bp, Probe sequence
agacattaataatgaggtgggaatc

SEQ ID NO: 75612 - DNA, 25 bp, Probe sequence
acattaataatgaggtgggaatctt

SEQ ID NO: 75613 - DNA, 25 bp, Probe sequence
gatagacattaataatgaggtggga

SEQ ID NO: 75614 - DNA, 25 bp, Probe sequence
aaggatagacattaataatgaggtg

SEQ ID NO: 75615 - DNA, 25 bp, Probe sequence
tagacattaataatgaggtgggaat

SEQ ID NO: 75616 - DNA, 25 bp, Probe sequence
atagacattaataatgaggtgggaa

SEQ ID NO: 75617 - DNA, 25 bp, Probe sequence
ccacctcattattaatgtctatcct

SEQ ID NO: 75618 - DNA, 25 bp, Probe sequence
cccacctcattattaatgtctatcc

SEQ ID NO: 75619 - DNA, 25 bp, Probe sequence
gattcccacctcattattaatgtct

SEQ ID NO: 75620 - DNA, 25 bp, Probe sequence
agattcccacctcattattaatgtc

SEQ ID NO: 75621 - DNA, 25 bp, Probe sequence
aagattcccacctcattattaatgt

SEQ ID NO: 75622 - DNA, 25 bp, Probe sequence
tcccacctcattattaatgtctatc

SEQ ID NO: 75623 - DNA, 25 bp, Probe sequence
cacctcattattaatgtctatcctt

SEQ ID NO: 75624 - DNA, 25 bp, Probe sequence
ttcccacctcattattaatgtctat

SEQ ID NO: 75625 - DNA, 25 bp, Probe sequence
attcccacctcattattaatgtcta

SEQ ID NO: 75626 - DNA, 25 bp, Probe sequence
cgtattgttccatttattatcactt

SEQ ID NO: 75627 - DNA, 25 bp, Probe sequence
gccttttattttatggtctacgtgt

SEQ ID NO: 75628 - DNA, 25 bp, Probe sequence
acgtattgttccatttattatcact

SEQ ID NO: 75629 - DNA, 25 bp, Probe sequence
ttttatggtctacgtgttttggaat

SEQ ID NO: 75630 - DNA, 25 bp, Probe sequence
attttatggtctacgtgttttggaa

SEQ ID NO: 75631 - DNA, 25 bp, Probe sequence
ttatggtctacgtgttttggaatac

SEQ ID NO: 75632 - DNA, 25 bp, Probe sequence
tttatggtctacgtgttttggaata

SEQ ID NO: 75633 - DNA, 25 bp, Probe sequence
tattttatggtctacgtgttttgga

SEQ ID NO: 75634 - DNA, 25 bp, Probe sequence
aataaacgctatataaatggccttt

SEQ ID NO: 75635 - DNA, 25 bp, Probe sequence
aagtgataataaatggaacaatacg

SEQ ID NO: 75636 - DNA, 25 bp, Probe sequence
acacgtagaccataaaataaaaggc

SEQ ID NO: 75637 - DNA, 25 bp, Probe sequence
agtgataataaatggaacaatacgt

SEQ ID NO: 75638 - DNA, 25 bp, Probe sequence
ttccaaaacacgtagaccataaaat

SEQ ID NO: 75639 - DNA, 25 bp, Probe sequence
attccaaaacacgtagaccataaaa

SEQ ID NO: 75640 - DNA, 25 bp, Probe sequence
gtattccaaaacacgtagaccataa

SEQ ID NO: 75641 - DNA, 25 bp, Probe sequence
aaggccatttatatagcgtttattt

SEQ ID NO: 75642 - DNA, 25 bp, Probe sequence
aaaggccatttatatagcgtttatt

SEQ ID NO: 75643 - DNA, 25 bp, Probe sequence
tccaaaacacgtagaccataaaata

SEQ ID NO: 75644 - DNA, 25 bp, Probe sequence
ctccaacaagttagtcaattagaca

SEQ ID NO: 75645 - DNA, 25 bp, Probe sequence
actccaacaagttagtcaattagac

SEQ ID NO: 75646 - DNA, 25 bp, Probe sequence
tccaacaagttagtcaattagacat

SEQ ID NO: 75647 - DNA, 25 bp, Probe sequence
atacacaaattcggtctataacacg

SEQ ID NO: 75648 - DNA, 25 bp, Probe sequence
atggcaactcttataacatagtgaa

SEQ ID NO: 75649 - DNA, 25 bp, Probe sequence
aatggcaactcttataacatagtga

SEQ ID NO: 75650 - DNA, 25 bp, Probe sequence
cggtctataacacgaaacatatcta

SEQ ID NO: 75651 - DNA, 25 bp, Probe sequence
ccaacaagttagtcaattagacata

SEQ ID NO: 75652 - DNA, 25 bp, Probe sequence
tagtaaatgactccaacaagttagt

SEQ ID NO: 75653 - DNA, 25 bp, Probe sequence
gtctaattgactaacttgttggagt

SEQ ID NO: 75654 - DNA, 25 bp, Probe sequence
tgtctaattgactaacttgttggag

SEQ ID NO: 75655 - DNA, 25 bp, Probe sequence
atgtctaattgactaacttgttgga

SEQ ID NO: 75656 - DNA, 25 bp, Probe sequence
cgtgttatagaccgaatttgtgtat

SEQ ID NO: 75657 - DNA, 25 bp, Probe sequence
tcactatgttataagagttgccatt

SEQ ID NO: 75658 - DNA, 25 bp, Probe sequence
ttcactatgttataagagttgccat

SEQ ID NO: 75659 - DNA, 25 bp, Probe sequence
tagatatgtttcgtgttatagaccg

SEQ ID NO: 75660 - DNA, 25 bp, Probe sequence
tatgtctaattgactaacttgttgg

SEQ ID NO: 75661 - DNA, 25 bp, Probe sequence
actaacttgttggagtcatttacta

SEQ ID NO: 75662 - DNA, 25 bp, Probe sequence
agaaacacaacttacaacaaactta

SEQ ID NO: 75663 - DNA, 25 bp, Probe sequence
tagaaacacaacttacaacaaactt

SEQ ID NO: 75664 - DNA, 25 bp, Probe sequence
ttagaaacacaacttacaacaaact

SEQ ID NO: 75665 - DNA, 25 bp, Probe sequence
gttagaaacacaacttacaacaaac

SEQ ID NO: 75666 - DNA, 25 bp, Probe sequence
gaaacacaacttacaacaaacttaa

SEQ ID NO: 75667 - DNA, 25 bp, Probe sequence
tatctcccttttaccctacactcat

SEQ ID NO: 75668 - DNA, 25 bp, Probe sequence
ctcccttttaccctacactcatttt

SEQ ID NO: 75669 - DNA, 25 bp, Probe sequence
tactatctcccttttaccctacact

SEQ ID NO: 75670 - DNA, 25 bp, Probe sequence
accctacactcattttaatcatcca

SEQ ID NO: 75671 - DNA, 25 bp, Probe sequence
agtttgttgtaagttgtgtttctaa

SEQ ID NO: 75672 - DNA, 25 bp, Probe sequence
aagtttgttgtaagttgtgtttcta

SEQ ID NO: 75673 - DNA, 25 bp, Probe sequence
taagtttgttgtaagttgtgtttct

SEQ ID NO: 75674 - DNA, 25 bp, Probe sequence
gtttgttgtaagttgtgtttctaac

SEQ ID NO: 75675 - DNA, 25 bp, Probe sequence
ttaagtttgttgtaagttgtgtttc

SEQ ID NO: 75676 - DNA, 25 bp, Probe sequence
atgagtgtagggtaaaagggagata

SEQ ID NO: 75677 - DNA, 25 bp, Probe sequence
agtgtagggtaaaagggagatagta

SEQ ID NO: 75678 - DNA, 25 bp, Probe sequence
aaaatgagtgtagggtaaaagggag

SEQ ID NO: 75679 - DNA, 25 bp, Probe sequence
gagtgtagggtaaaagggagatagt

SEQ ID NO: 75680 - DNA, 25 bp, Probe sequence
atttgtccgatttatttgagaacca

SEQ ID NO: 75681 - DNA, 25 bp, Probe sequence
catttgtccgatttatttgagaacc

SEQ ID NO: 75682 - DNA, 25 bp, Probe sequence
acatttgtccgatttatttgagaac

SEQ ID NO: 75683 - DNA, 25 bp, Probe sequence
aacatttgtccgatttatttgagaa

SEQ ID NO: 75684 - DNA, 25 bp, Probe sequence
gaacaatgatgttacaatcgccatt

SEQ ID NO: 75685 - DNA, 25 bp, Probe sequence
taacatttgtccgatttatttgaga

SEQ ID NO: 75686 - DNA, 25 bp, Probe sequence
tcttagtcaatcaagttaatcagaa

SEQ ID NO: 75687 - DNA, 25 bp, Probe sequence
cagtcgaacaatgatgttacaatcg

SEQ ID NO: 75688 - DNA, 25 bp, Probe sequence
atcaagttaatcagaaaagcagtcg

SEQ ID NO: 75689 - DNA, 25 bp, Probe sequence
tggttctcaaataaatcggacaaat

SEQ ID NO: 75690 - DNA, 25 bp, Probe sequence
ggttctcaaataaatcggacaaatg

SEQ ID NO: 75691 - DNA, 25 bp, Probe sequence
gttctcaaataaatcggacaaatgt

SEQ ID NO: 75692 - DNA, 25 bp, Probe sequence
ttctcaaataaatcggacaaatgtt

SEQ ID NO: 75693 - DNA, 25 bp, Probe sequence
aatggcgattgtaacatcattgttc

SEQ ID NO: 75694 - DNA, 25 bp, Probe sequence
tctcaaataaatcggacaaatgtta

SEQ ID NO: 75695 - DNA, 25 bp, Probe sequence
ttctgattaacttgattgactaaga

SEQ ID NO: 75696 - DNA, 25 bp, Probe sequence
cgactgcttttctgattaacttgat

SEQ ID NO: 75697 - DNA, 25 bp, Probe sequence
cgattgtaacatcattgttcgactg

SEQ ID NO: 75698 - DNA, 25 bp, Probe sequence
catggcatttatgatgtcttaaagc

SEQ ID NO: 75699 - DNA, 25 bp, Probe sequence
atcacaatttcaatgcgatgttatt

SEQ ID NO: 75700 - DNA, 25 bp, Probe sequence
aatatcacaatttcaatgcgatgtt

SEQ ID NO: 75701 - DNA, 25 bp, Probe sequence
tggcatttatgatgtcttaaagctg

SEQ ID NO: 75702 - DNA, 25 bp, Probe sequence
ggcatttatgatgtcttaaagctga

SEQ ID NO: 75703 - DNA, 25 bp, Probe sequence
tcacaatttcaatgcgatgttatta

SEQ ID NO: 75704 - DNA, 25 bp, Probe sequence
atggcatttatgatgtcttaaagct

SEQ ID NO: 75705 - DNA, 25 bp, Probe sequence
attatcttagaatcatcatggcatt

SEQ ID NO: 75706 - DNA, 25 bp, Probe sequence
aattatcttagaatcatcatggcat

SEQ ID NO: 75707 - DNA, 25 bp, Probe sequence
gctttaagacatcataaatgccatg

SEQ ID NO: 75708 - DNA, 25 bp, Probe sequence
aacatcgcattgaaattgtgatatt

SEQ ID NO: 75709 - DNA, 25 bp, Probe sequence
aataacatcgcattgaaattgtgat

SEQ ID NO: 75710 - DNA, 25 bp, Probe sequence
cagctttaagacatcataaatgcca

SEQ ID NO: 75711 - DNA, 25 bp, Probe sequence
tcagctttaagacatcataaatgcc

SEQ ID NO: 75712 - DNA, 25 bp, Probe sequence
taataacatcgcattgaaattgtga

SEQ ID NO: 75713 - DNA, 25 bp, Probe sequence
agctttaagacatcataaatgccat

SEQ ID NO: 75714 - DNA, 25 bp, Probe sequence
atgccatgatgattctaagataatt

SEQ ID NO: 75715 - DNA, 25 bp, Probe sequence
aatgccatgatgattctaagataat

SEQ ID NO: 75716 - DNA, 25 bp, Probe sequence
cattatgaacgatgacttgacaaca

SEQ ID NO: 75717 - DNA, 25 bp, Probe sequence
attatgaacgatgacttgacaacaa

SEQ ID NO: 75718 - DNA, 25 bp, Probe sequence
aattagttgattgagcgtcaggttc

SEQ ID NO: 75719 - DNA, 25 bp, Probe sequence
tagttgattgagcgtcaggttcatt

SEQ ID NO: 75720 - DNA, 25 bp, Probe sequence
ttagttgattgagcgtcaggttcat

SEQ ID NO: 75721 - DNA, 25 bp, Probe sequence
attagttgattgagcgtcaggttca

SEQ ID NO: 75722 - DNA, 25 bp, Probe sequence
ggttgtaaattagttgattgagcgt

SEQ ID NO: 75723 - DNA, 25 bp, Probe sequence
acggttgtaaattagttgattgagc

SEQ ID NO: 75724 - DNA, 25 bp, Probe sequence
gttgtaaattagttgattgagcgtc

SEQ ID NO: 75725 - DNA, 25 bp, Probe sequence
tgttgtcaagtcatcgttcataatg

SEQ ID NO: 75726 - DNA, 25 bp, Probe sequence
ttgttgtcaagtcatcgttcataat

SEQ ID NO: 75727 - DNA, 25 bp, Probe sequence
gaacctgacgctcaatcaactaatt

SEQ ID NO: 75728 - DNA, 25 bp, Probe sequence
tgaacctgacgctcaatcaactaat

SEQ ID NO: 75729 - DNA, 25 bp, Probe sequence
atgaacctgacgctcaatcaactaa

SEQ ID NO: 75730 - DNA, 25 bp, Probe sequence
aatgaacctgacgctcaatcaacta

SEQ ID NO: 75731 - DNA, 25 bp, Probe sequence
gctcaatcaactaatttacaaccgt

SEQ ID NO: 75732 - DNA, 25 bp, Probe sequence
acgctcaatcaactaatttacaacc

SEQ ID NO: 75733 - DNA, 25 bp, Probe sequence
gacgctcaatcaactaatttacaac

SEQ ID NO: 75734 - DNA, 25 bp, Probe sequence
actttaattgctctttaacaatgcg

SEQ ID NO: 75735 - DNA, 25 bp, Probe sequence
ctttaattgctctttaacaatgcga

SEQ ID NO: 75736 - DNA, 25 bp, Probe sequence
tgctctttaacaatgcgattaaact

SEQ ID NO: 75737 - DNA, 25 bp, Probe sequence
aattgctctttaacaatgcgattaa

SEQ ID NO: 75738 - DNA, 25 bp, Probe sequence
ttaattgctctttaacaatgcgatt

SEQ ID NO: 75739 - DNA, 25 bp, Probe sequence
tttaattgctctttaacaatgcgat

SEQ ID NO: 75740 - DNA, 25 bp, Probe sequence
gctctttaacaatgcgattaaactc

SEQ ID NO: 75741 - DNA, 25 bp, Probe sequence
ttgctctttaacaatgcgattaaac

SEQ ID NO: 75742 - DNA, 25 bp, Probe sequence
attgctctttaacaatgcgattaaa

SEQ ID NO: 75743 - DNA, 25 bp, Probe sequence
cgcattgttaaagagcaattaaagt

SEQ ID NO: 75744 - DNA, 25 bp, Probe sequence
tcgcattgttaaagagcaattaaag

SEQ ID NO: 75745 - DNA, 25 bp, Probe sequence
agtttaatcgcattgttaaagagca

SEQ ID NO: 75746 - DNA, 25 bp, Probe sequence
atcgcattgttaaagagcaattaaa

SEQ ID NO: 75747 - DNA, 25 bp, Probe sequence
aatcgcattgttaaagagcaattaa

SEQ ID NO: 75748 - DNA, 25 bp, Probe sequence
ttaatcgcattgttaaagagcaatt

SEQ ID NO: 75749 - DNA, 25 bp, Probe sequence
gagtttaatcgcattgttaaagagc

SEQ ID NO: 75750 - DNA, 25 bp, Probe sequence
gtttaatcgcattgttaaagagcaa

SEQ ID NO: 75751 - DNA, 25 bp, Probe sequence
gcattgttaaagagcaattaaagtc

SEQ ID NO: 75752 - DNA, 25 bp, Probe sequence
taatctaaatgtaaggtgttccgct

SEQ ID NO: 75753 - DNA, 25 bp, Probe sequence
ctaatctaaatgtaaggtgttccgc

SEQ ID NO: 75754 - DNA, 25 bp, Probe sequence
atctaaatgtaaggtgttccgcttt

SEQ ID NO: 75755 - DNA, 25 bp, Probe sequence
aatctaaatgtaaggtgttccgctt

SEQ ID NO: 75756 - DNA, 25 bp, Probe sequence
tctaatctaaatgtaaggtgttccg

SEQ ID NO: 75757 - DNA, 25 bp, Probe sequence
tccattatcaattagcaagtatgtt

SEQ ID NO: 75758 - DNA, 25 bp, Probe sequence
atccattatcaattagcaagtatgt

SEQ ID NO: 75759 - DNA, 25 bp, Probe sequence
aaattgtctacgtcttgcttgttta

SEQ ID NO: 75760 - DNA, 25 bp, Probe sequence
aattgtctacgtcttgcttgtttat

SEQ ID NO: 75761 - DNA, 25 bp, Probe sequence
gcggaacaccttacatttagattag

SEQ ID NO: 75762 - DNA, 25 bp, Probe sequence
agcggaacaccttacatttagatta

SEQ ID NO: 75763 - DNA, 25 bp, Probe sequence
aagcggaacaccttacatttagatt

SEQ ID NO: 75764 - DNA, 25 bp, Probe sequence
aaagcggaacaccttacatttagat

SEQ ID NO: 75765 - DNA, 25 bp, Probe sequence
cggaacaccttacatttagattaga

SEQ ID NO: 75766 - DNA, 25 bp, Probe sequence
aacatacttgctaattgataatgga

SEQ ID NO: 75767 - DNA, 25 bp, Probe sequence
acatacttgctaattgataatggat

SEQ ID NO: 75768 - DNA, 25 bp, Probe sequence
taaacaagcaagacgtagacaattt

SEQ ID NO: 75769 - DNA, 25 bp, Probe sequence
ataaacaagcaagacgtagacaatt

SEQ ID NO: 75770 - DNA, 25 bp, Probe sequence
tggtcattcgtcttattcaacatac

SEQ ID NO: 75771 - DNA, 25 bp, Probe sequence
ttggtcattcgtcttattcaacata

SEQ ID NO: 75772 - DNA, 25 bp, Probe sequence
ttagcgtttggtcattcgtcttatt

SEQ ID NO: 75773 - DNA, 25 bp, Probe sequence
tattaacttagcgtttggtcattcg

SEQ ID NO: 75774 - DNA, 25 bp, Probe sequence
gtttggtcattcgtcttattcaaca

SEQ ID NO: 75775 - DNA, 25 bp, Probe sequence
cttagcgtttggtcattcgtcttat

SEQ ID NO: 75776 - DNA, 25 bp, Probe sequence
tagcgtttggtcattcgtcttattc

SEQ ID NO: 75777 - DNA, 25 bp, Probe sequence
tttggtcattcgtcttattcaacat

SEQ ID NO: 75778 - DNA, 25 bp, Probe sequence
cgtttggtcattcgtcttattcaac

SEQ ID NO: 75779 - DNA, 25 bp, Probe sequence
gtatgttgaataagacgaatgacca

SEQ ID NO: 75780 - DNA, 25 bp, Probe sequence
tatgttgaataagacgaatgaccaa

SEQ ID NO: 75781 - DNA, 25 bp, Probe sequence
aataagacgaatgaccaaacgctaa

SEQ ID NO: 75782 - DNA, 25 bp, Probe sequence
cgaatgaccaaacgctaagttaata

SEQ ID NO: 75783 - DNA, 25 bp, Probe sequence
tgttgaataagacgaatgaccaaac

SEQ ID NO: 75784 - DNA, 25 bp, Probe sequence
ataagacgaatgaccaaacgctaag

SEQ ID NO: 75785 - DNA, 25 bp, Probe sequence
gaataagacgaatgaccaaacgcta

SEQ ID NO: 75786 - DNA, 25 bp, Probe sequence
atgttgaataagacgaatgaccaaa

SEQ ID NO: 75787 - DNA, 25 bp, Probe sequence
gttgaataagacgaatgaccaaacg

SEQ ID NO: 75788 - DNA, 25 bp, Probe sequence
accactatgcttgcttatctctata

SEQ ID NO: 75789 - DNA, 25 bp, Probe sequence
taccactatgcttgcttatctctat

SEQ ID NO: 75790 - DNA, 25 bp, Probe sequence
ataccactatgcttgcttatctcta

SEQ ID NO: 75791 - DNA, 25 bp, Probe sequence
gataccactatgcttgcttatctct

SEQ ID NO: 75792 - DNA, 25 bp, Probe sequence
tgataccactatgcttgcttatctc

SEQ ID NO: 75793 - DNA, 25 bp, Probe sequence
atgataccactatgcttgcttatct

SEQ ID NO: 75794 - DNA, 25 bp, Probe sequence
agtgagaggttatgttgatgtgctt

SEQ ID NO: 75795 - DNA, 25 bp, Probe sequence
aagtgagaggttatgttgatgtgct

SEQ ID NO: 75796 - DNA, 25 bp, Probe sequence
atatgataccactatgcttgcttat

SEQ ID NO: 75797 - DNA, 25 bp, Probe sequence
tagagataagcaagcatagtggtat

SEQ ID NO: 75798 - DNA, 25 bp, Probe sequence
atagagataagcaagcatagtggta

SEQ ID NO: 75799 - DNA, 25 bp, Probe sequence
tatagagataagcaagcatagtggt

SEQ ID NO: 75800 - DNA, 25 bp, Probe sequence
agagataagcaagcatagtggtatc

SEQ ID NO: 75801 - DNA, 25 bp, Probe sequence
gagataagcaagcatagtggtatca

SEQ ID NO: 75802 - DNA, 25 bp, Probe sequence
agataagcaagcatagtggtatcat

SEQ ID NO: 75803 - DNA, 25 bp, Probe sequence
agcacatcaacataacctctcactt

SEQ ID NO: 75804 - DNA, 25 bp, Probe sequence
aagcacatcaacataacctctcact

SEQ ID NO: 75805 - DNA, 25 bp, Probe sequence
ataagcaagcatagtggtatcatat

SEQ ID NO: 75806 - DNA, 25 bp, Probe sequence
aatagttgtgccatacattgttcaa

SEQ ID NO: 75807 - DNA, 25 bp, Probe sequence
taatagttgtgccatacattgttca

SEQ ID NO: 75808 - DNA, 25 bp, Probe sequence
ttaatagttgtgccatacattgttc

SEQ ID NO: 75809 - DNA, 25 bp, Probe sequence
gtgccatacattgttcaaattcttt

SEQ ID NO: 75810 - DNA, 25 bp, Probe sequence
tgtgccatacattgttcaaattctt

SEQ ID NO: 75811 - DNA, 25 bp, Probe sequence
ttgtgccatacattgttcaaattct

SEQ ID NO: 75812 - DNA, 25 bp, Probe sequence
gttgtgccatacattgttcaaattc

SEQ ID NO: 75813 - DNA, 25 bp, Probe sequence
cgtaacccgcttcaaatcatattta

SEQ ID NO: 75814 - DNA, 25 bp, Probe sequence
agttgtgccatacattgttcaaatt

SEQ ID NO: 75815 - DNA, 25 bp, Probe sequence
ttgaacaatgtatggcacaactatt

SEQ ID NO: 75816 - DNA, 25 bp, Probe sequence
tgaacaatgtatggcacaactatta

SEQ ID NO: 75817 - DNA, 25 bp, Probe sequence
gaacaatgtatggcacaactattaa

SEQ ID NO: 75818 - DNA, 25 bp, Probe sequence
aaagaatttgaacaatgtatggcac

SEQ ID NO: 75819 - DNA, 25 bp, Probe sequence
gaatttgaacaatgtatggcacaac

SEQ ID NO: 75820 - DNA, 25 bp, Probe sequence
agaatttgaacaatgtatggcacaa

SEQ ID NO: 75821 - DNA, 25 bp, Probe sequence
aagaatttgaacaatgtatggcaca

SEQ ID NO: 75822 - DNA, 25 bp, Probe sequence
aatttgaacaatgtatggcacaact

SEQ ID NO: 75823 - DNA, 25 bp, Probe sequence
taaatatgatttgaagcgggttacg

SEQ ID NO: 75824 - DNA, 25 bp, Probe sequence
tattattctctatgccataccactt

SEQ ID NO: 75825 - DNA, 25 bp, Probe sequence
ttattattctctatgccataccact

SEQ ID NO: 75826 - DNA, 25 bp, Probe sequence
ctctatgccataccactttatgaga

SEQ ID NO: 75827 - DNA, 25 bp, Probe sequence
tctctatgccataccactttatgag

SEQ ID NO: 75828 - DNA, 25 bp, Probe sequence
tgccataccactttatgagatatgt

SEQ ID NO: 75829 - DNA, 25 bp, Probe sequence
ttctctatgccataccactttatga

SEQ ID NO: 75830 - DNA, 25 bp, Probe sequence
tctatgccataccactttatgagat

SEQ ID NO: 75831 - DNA, 25 bp, Probe sequence
attattctctatgccataccacttt

SEQ ID NO: 75832 - DNA, 25 bp, Probe sequence
atgccataccactttatgagatatg

SEQ ID NO: 75833 - DNA, 25 bp, Probe sequence
agtggtatggcatagagaataataa

SEQ ID NO: 75834 - DNA, 25 bp, Probe sequence
aagtggtatggcatagagaataata

SEQ ID NO: 75835 - DNA, 25 bp, Probe sequence
ctcataaagtggtatggcatagaga

SEQ ID NO: 75836 - DNA, 25 bp, Probe sequence
tctcataaagtggtatggcatagag

SEQ ID NO: 75837 - DNA, 25 bp, Probe sequence
acatatctcataaagtggtatggca

SEQ ID NO: 75838 - DNA, 25 bp, Probe sequence
tcataaagtggtatggcatagagaa

SEQ ID NO: 75839 - DNA, 25 bp, Probe sequence
atctcataaagtggtatggcataga

SEQ ID NO: 75840 - DNA, 25 bp, Probe sequence
aaagtggtatggcatagagaataat

SEQ ID NO: 75841 - DNA, 25 bp, Probe sequence
cataaagtggtatggcatagagaat

SEQ ID NO: 75842 - DNA, 25 bp, Probe sequence
ttaaacttttcaatggcagtaggtt

SEQ ID NO: 75843 - DNA, 25 bp, Probe sequence
attaaacttttcaatggcagtaggt

SEQ ID NO: 75844 - DNA, 25 bp, Probe sequence
cgattaaacttttcaatggcagtag

SEQ ID NO: 75845 - DNA, 25 bp, Probe sequence
gattaaacttttcaatggcagtagg

SEQ ID NO: 75846 - DNA, 25 bp, Probe sequence
tcgattaaacttttcaatggcagta

SEQ ID NO: 75847 - DNA, 25 bp, Probe sequence
aaacttttcaatggcagtaggtttt

SEQ ID NO: 75848 - DNA, 25 bp, Probe sequence
taaacttttcaatggcagtaggttt

SEQ ID NO: 75849 - DNA, 25 bp, Probe sequence
taacctactgccattgcatcgatta

SEQ ID NO: 75850 - DNA, 25 bp, Probe sequence
aacctactgccattgcatcgattaa

SEQ ID NO: 75851 - DNA, 25 bp, Probe sequence
aacctactgccattgaaaagtttaa

SEQ ID NO: 75852 - DNA, 25 bp, Probe sequence
ctactgccattgaaaagtttaatcg

SEQ ID NO: 75853 - DNA, 25 bp, Probe sequence
acctactgccattgaaaagtttaat

SEQ ID NO: 75854 - DNA, 25 bp, Probe sequence
cctactgccattgaaaagtttaatc

SEQ ID NO: 75855 - DNA, 25 bp, Probe sequence
tactgccattgaaaagtttaatcga

SEQ ID NO: 75856 - DNA, 25 bp, Probe sequence
aaaacctactgccattgaaaagttt

SEQ ID NO: 75857 - DNA, 25 bp, Probe sequence
aaacctactgccattgaaaagttta

SEQ ID NO: 75858 - DNA, 25 bp, Probe sequence
taatcgatgcaatggcagtaggtta

SEQ ID NO: 75859 - DNA, 25 bp, Probe sequence
aatcgatgcaatggcagtaggttaa

SEQ ID NO: 75860 - DNA, 25 bp, Probe sequence
atatatgaagaggtctccaatactt

SEQ ID NO: 75861 - DNA, 25 bp, Probe sequence
tgattatgttcagaactacaattca

SEQ ID NO: 75862 - DNA, 25 bp, Probe sequence
tttctgctgtatggaaagttggttt

SEQ ID NO: 75863 - DNA, 25 bp, Probe sequence
ctgctgtatggaaagttggttttat

SEQ ID NO: 75864 - DNA, 25 bp, Probe sequence
tttagttgttaggggcttctttcta

SEQ ID NO: 75865 - DNA, 25 bp, Probe sequence
tgttcagaactacaattcataagaa

SEQ ID NO: 75866 - DNA, 25 bp, Probe sequence
tgctgtatggaaagttggttttatt

SEQ ID NO: 75867 - DNA, 25 bp, Probe sequence
tctgctgtatggaaagttggtttta

SEQ ID NO: 75868 - DNA, 25 bp, Probe sequence
ctttagttgttaggggcttctttct

SEQ ID NO: 75869 - DNA, 25 bp, Probe sequence
aagtattggagacctcttcatatat

SEQ ID NO: 75870 - DNA, 25 bp, Probe sequence
aaaccaactttccatacagcagaaa

SEQ ID NO: 75871 - DNA, 25 bp, Probe sequence
tgaattgtagttctgaacataatca

SEQ ID NO: 75872 - DNA, 25 bp, Probe sequence
ataaaaccaactttccatacagcag

SEQ ID NO: 75873 - DNA, 25 bp, Probe sequence
tagaaagaagcccctaacaactaaa

SEQ ID NO: 75874 - DNA, 25 bp, Probe sequence
taaaaccaactttccatacagcaga

SEQ ID NO: 75875 - DNA, 25 bp, Probe sequence
aataaaaccaactttccatacagca

SEQ ID NO: 75876 - DNA, 25 bp, Probe sequence
ttcttatgaattgtagttctgaaca

SEQ ID NO: 75877 - DNA, 25 bp, Probe sequence
cataagagcccctaacaactaaagt

SEQ ID NO: 75878 - DNA, 25 bp, Probe sequence
ccggtcaaagcgaatagaaggttat

SEQ ID NO: 75879 - DNA, 25 bp, Probe sequence
aaatgccggtcaaagcgaatagaag

SEQ ID NO: 75880 - DNA, 25 bp, Probe sequence
aaaatgccggtcaaagcgaatagaa

SEQ ID NO: 75881 - DNA, 25 bp, Probe sequence
aatagccttcaaaatgccggtcaaa

SEQ ID NO: 75882 - DNA, 25 bp, Probe sequence
aaatagccttcaaaatgccggtcaa

SEQ ID NO: 75883 - DNA, 25 bp, Probe sequence
aaaatagccttcaaaatgccggtca

SEQ ID NO: 75884 - DNA, 25 bp, Probe sequence
ttcaaaatgccggtcaaagcgaata

SEQ ID NO: 75885 - DNA, 25 bp, Probe sequence
atagccttcaaaatgccggtcaaag

SEQ ID NO: 75886 - DNA, 25 bp, Probe sequence
caaaatgccggtcaaagcgaataga

SEQ ID NO: 75887 - DNA, 25 bp, Probe sequence
ataaccttctattcgctttgaccgg

SEQ ID NO: 75888 - DNA, 25 bp, Probe sequence
cttctattcgctttgaccggcattt

SEQ ID NO: 75889 - DNA, 25 bp, Probe sequence
tgaccggcattttgaaggctatttt

SEQ ID NO: 75890 - DNA, 25 bp, Probe sequence
ttgaccggcattttgaaggctattt

SEQ ID NO: 75891 - DNA, 25 bp, Probe sequence
tttgaccggcattttgaaggctatt

SEQ ID NO: 75892 - DNA, 25 bp, Probe sequence
ttctattcgctttgaccggcatttt

SEQ ID NO: 75893 - DNA, 25 bp, Probe sequence
ctttgaccggcattttgaaggctat

SEQ ID NO: 75894 - DNA, 25 bp, Probe sequence
tattcgctttgaccggcattttgaa

SEQ ID NO: 75895 - DNA, 25 bp, Probe sequence
ctattcgctttgaccggcattttga

SEQ ID NO: 75896 - DNA, 25 bp, Probe sequence
accatctatccaacttgctcaataa

SEQ ID NO: 75897 - DNA, 25 bp, Probe sequence
caccatctatccaacttgctcaata

SEQ ID NO: 75898 - DNA, 25 bp, Probe sequence
gattagccaccatctatccaacttg

SEQ ID NO: 75899 - DNA, 25 bp, Probe sequence
ataaacagttgagtgacataccctt

SEQ ID NO: 75900 - DNA, 25 bp, Probe sequence
gataaacagttgagtgacataccct

SEQ ID NO: 75901 - DNA, 25 bp, Probe sequence
ccaccatctatccaacttgctcaat

SEQ ID NO: 75902 - DNA, 25 bp, Probe sequence
ccctgttatcgtttgttcatcatat

SEQ ID NO: 75903 - DNA, 25 bp, Probe sequence
taaacagttgagtgacatacccttg

SEQ ID NO: 75904 - DNA, 25 bp, Probe sequence
attagccaccatctatccaacttgc

SEQ ID NO: 75905 - DNA, 25 bp, Probe sequence
ttattgagcaagttggatagatggt

SEQ ID NO: 75906 - DNA, 25 bp, Probe sequence
tattgagcaagttggatagatggtg

SEQ ID NO: 75907 - DNA, 25 bp, Probe sequence
caagttggatagatggtggctaatc

SEQ ID NO: 75908 - DNA, 25 bp, Probe sequence
aagggtatgtcactcaactgtttat

SEQ ID NO: 75909 - DNA, 25 bp, Probe sequence
attgagcaagttggatagatggtgg

SEQ ID NO: 75910 - DNA, 25 bp, Probe sequence
agggtatgtcactcaactgtttatc

SEQ ID NO: 75911 - DNA, 25 bp, Probe sequence
caagggtatgtcactcaactgttta

SEQ ID NO: 75912 - DNA, 25 bp, Probe sequence
atatgatgaacaaacgataacaggg

SEQ ID NO: 75913 - DNA, 25 bp, Probe sequence
gcaagttggatagatggtggctaat

SEQ ID NO: 75914 - DNA, 25 bp, Probe sequence
attaatgcttaccaagacgaattgc

SEQ ID NO: 75915 - DNA, 25 bp, Probe sequence
aattaatgcttaccaagacgaattg

SEQ ID NO: 75916 - DNA, 25 bp, Probe sequence
tgaaattaatgcttaccaagacgaa

SEQ ID NO: 75917 - DNA, 25 bp, Probe sequence
atgaaattaatgcttaccaagacga

SEQ ID NO: 75918 - DNA, 25 bp, Probe sequence
gatgaaattaatgcttaccaagacg

SEQ ID NO: 75919 - DNA, 25 bp, Probe sequence
gaaattaatgcttaccaagacgaat

SEQ ID NO: 75920 - DNA, 25 bp, Probe sequence
agacgaattgcatttggaagagatt

SEQ ID NO: 75921 - DNA, 25 bp, Probe sequence
aagacgaattgcatttggaagagat

SEQ ID NO: 75922 - DNA, 25 bp, Probe sequence
agatgaaattaatgcttaccaagac

SEQ ID NO: 75923 - DNA, 25 bp, Probe sequence
gcaattcgtcttggtaagcattaat

SEQ ID NO: 75924 - DNA, 25 bp, Probe sequence
caattcgtcttggtaagcattaatt

SEQ ID NO: 75925 - DNA, 25 bp, Probe sequence
ttcgtcttggtaagcattaatttca

SEQ ID NO: 75926 - DNA, 25 bp, Probe sequence
tcgtcttggtaagcattaatttcat

SEQ ID NO: 75927 - DNA, 25 bp, Probe sequence
cgtcttggtaagcattaatttcatc

SEQ ID NO: 75928 - DNA, 25 bp, Probe sequence
attcgtcttggtaagcattaatttc

SEQ ID NO: 75929 - DNA, 25 bp, Probe sequence
atctcttccaaatgcaattcgtctt

SEQ ID NO: 75930 - DNA, 25 bp, Probe sequence
aatctcttccaaatgcaattcgtct

SEQ ID NO: 75931 - DNA, 25 bp, Probe sequence
gtcttggtaagcattaatttcatct

SEQ ID NO: 75932 - DNA, 25 bp, Probe sequence
tggaatgaaatgtttgattatccca

SEQ ID NO: 75933 - DNA, 25 bp, Probe sequence
ggaatgaaatgtttgattatcccaa

SEQ ID NO: 75934 - DNA, 25 bp, Probe sequence
atggaatgaaatgtttgattatccc

SEQ ID NO: 75935 - DNA, 25 bp, Probe sequence
taacgcaaatacacccctacttaaa

SEQ ID NO: 75936 - DNA, 25 bp, Probe sequence
attatcccaaaatcacaaatgcgat

SEQ ID NO: 75937 - DNA, 25 bp, Probe sequence
ctaacgcaaatacacccctacttaa

SEQ ID NO: 75938 - DNA, 25 bp, Probe sequence
acgcaaatacacccctacttaaaat

SEQ ID NO: 75939 - DNA, 25 bp, Probe sequence
cgcaaatacacccctacttaaaata

SEQ ID NO: 75940 - DNA, 25 bp, Probe sequence
aacgcaaatacacccctacttaaaa

SEQ ID NO: 75941 - DNA, 25 bp, Probe sequence
tgggataatcaaacatttcattcca

SEQ ID NO: 75942 - DNA, 25 bp, Probe sequence
ttgggataatcaaacatttcattcc

SEQ ID NO: 75943 - DNA, 25 bp, Probe sequence
gggataatcaaacatttcattccat

SEQ ID NO: 75944 - DNA, 25 bp, Probe sequence
atcgcatttgtgattttgggataat

SEQ ID NO: 75945 - DNA, 25 bp, Probe sequence
tttaagtaggggtgtatttgcgtta

SEQ ID NO: 75946 - DNA, 25 bp, Probe sequence
ttaagtaggggtgtatttgcgttag

SEQ ID NO: 75947 - DNA, 25 bp, Probe sequence
attttaagtaggggtgtatttgcgt

SEQ ID NO: 75948 - DNA, 25 bp, Probe sequence
ttttaagtaggggtgtatttgcgtt

SEQ ID NO: 75949 - DNA, 25 bp, Probe sequence
tattttaagtaggggtgtatttgcg

SEQ ID NO: 75950 - DNA, 25 bp, Probe sequence
catacaaaggagcagtaagacattt

SEQ ID NO: 75951 - DNA, 25 bp, Probe sequence
tctggattactagcatacaaaggag

SEQ ID NO: 75952 - DNA, 25 bp, Probe sequence
gcatacaaaggagcagtaagacatt

SEQ ID NO: 75953 - DNA, 25 bp, Probe sequence
tagcatacaaaggagcagtaagaca

SEQ ID NO: 75954 - DNA, 25 bp, Probe sequence
ggattactagcatacaaaggagcag

SEQ ID NO: 75955 - DNA, 25 bp, Probe sequence
ctggattactagcatacaaaggagc

SEQ ID NO: 75956 - DNA, 25 bp, Probe sequence
atctggattactagcatacaaagga

SEQ ID NO: 75957 - DNA, 25 bp, Probe sequence
ctagcatacaaaggagcagtaagac

SEQ ID NO: 75958 - DNA, 25 bp, Probe sequence
gattactagcatacaaaggagcagt

SEQ ID NO: 75959 - DNA, 25 bp, Probe sequence
aaatgtcttactgctcctttgtatg

SEQ ID NO: 75960 - DNA, 25 bp, Probe sequence
ctcctttgtatgctagtaatccaga

SEQ ID NO: 75961 - DNA, 25 bp, Probe sequence
aatgtcttactgctcctttgtatgc

SEQ ID NO: 75962 - DNA, 25 bp, Probe sequence
tgtcttactgctcctttgtatgcta

SEQ ID NO: 75963 - DNA, 25 bp, Probe sequence
tcctttgtatgctagtaatccagat

SEQ ID NO: 75964 - DNA, 25 bp, Probe sequence
gctcctttgtatgctagtaatccag

SEQ ID NO: 75965 - DNA, 25 bp, Probe sequence
ctgctcctttgtatgctagtaatcc

SEQ ID NO: 75966 - DNA, 25 bp, Probe sequence
gtcttactgctcctttgtatgctag

SEQ ID NO: 75967 - DNA, 25 bp, Probe sequence
actgctcctttgtatgctagtaatc

SEQ ID NO: 75968 - DNA, 25 bp, Probe sequence
ccctccactgtccattttatcttaa

SEQ ID NO: 75969 - DNA, 25 bp, Probe sequence
cctccactgtccattttatcttaat

SEQ ID NO: 75970 - DNA, 25 bp, Probe sequence
gccctccactgtccattttatctta

SEQ ID NO: 75971 - DNA, 25 bp, Probe sequence
ctccactgtccattttatcttaatt

SEQ ID NO: 75972 - DNA, 25 bp, Probe sequence
attgccctccactgtccattttatc

SEQ ID NO: 75973 - DNA, 25 bp, Probe sequence
tgccctccactgtccattttatctt

SEQ ID NO: 75974 - DNA, 25 bp, Probe sequence
ttgccctccactgtccattttatct

SEQ ID NO: 75975 - DNA, 25 bp, Probe sequence
tccactgtccattttatcttaatta

SEQ ID NO: 75976 - DNA, 25 bp, Probe sequence
ccactgtccattttatcttaattaa

SEQ ID NO: 75977 - DNA, 25 bp, Probe sequence
ttaagataaaatggacagtggaggg

SEQ ID NO: 75978 - DNA, 25 bp, Probe sequence
attaagataaaatggacagtggagg

SEQ ID NO: 75979 - DNA, 25 bp, Probe sequence
taagataaaatggacagtggagggc

SEQ ID NO: 75980 - DNA, 25 bp, Probe sequence
gataaaatggacagtggagggcaat

SEQ ID NO: 75981 - DNA, 25 bp, Probe sequence
aattaagataaaatggacagtggag

SEQ ID NO: 75982 - DNA, 25 bp, Probe sequence
agataaaatggacagtggagggcaa

SEQ ID NO: 75983 - DNA, 25 bp, Probe sequence
aagataaaatggacagtggagggca

SEQ ID NO: 75984 - DNA, 25 bp, Probe sequence
taattaagataaaatggacagtgga

SEQ ID NO: 75985 - DNA, 25 bp, Probe sequence
ttaattaagataaaatggacagtgg

SEQ ID NO: 75986 - DNA, 25 bp, Probe sequence
ccctttattgctactccatacttct

SEQ ID NO: 75987 - DNA, 25 bp, Probe sequence
cctttattgctactccatacttctc

SEQ ID NO: 75988 - DNA, 25 bp, Probe sequence
tattgctactccatacttctcataa

SEQ ID NO: 75989 - DNA, 25 bp, Probe sequence
ttattgctactccatacttctcata

SEQ ID NO: 75990 - DNA, 25 bp, Probe sequence
acataacacccttaattgtcagact

SEQ ID NO: 75991 - DNA, 25 bp, Probe sequence
ctttattgctactccatacttctca

SEQ ID NO: 75992 - DNA, 25 bp, Probe sequence
aacataacacccttaattgtcagac

SEQ ID NO: 75993 - DNA, 25 bp, Probe sequence
attgctactccatacttctcataaa

SEQ ID NO: 75994 - DNA, 25 bp, Probe sequence
tttattgctactccatacttctcat

SEQ ID NO: 75995 - DNA, 25 bp, Probe sequence
agaagtatggagtagcaataaaggg

SEQ ID NO: 75996 - DNA, 25 bp, Probe sequence
gagaagtatggagtagcaataaagg

SEQ ID NO: 75997 - DNA, 25 bp, Probe sequence
tatgagaagtatggagtagcaataa

SEQ ID NO: 75998 - DNA, 25 bp, Probe sequence
ttatgagaagtatggagtagcaata

SEQ ID NO: 75999 - DNA, 25 bp, Probe sequence
tgagaagtatggagtagcaataaag

SEQ ID NO: 76000 - DNA, 25 bp, Probe sequence
agtctgacaattaagggtgttatgt

SEQ ID NO: 76001 - DNA, 25 bp, Probe sequence
gtctgacaattaagggtgttatgtt

SEQ ID NO: 76002 - DNA, 25 bp, Probe sequence
atgagaagtatggagtagcaataaa

SEQ ID NO: 76003 - DNA, 25 bp, Probe sequence
tttatgagaagtatggagtagcaat

SEQ ID NO: 76004 - DNA, 25 bp, Probe sequence
gctattatcgcattcatccataaca

SEQ ID NO: 76005 - DNA, 25 bp, Probe sequence
cactatcctcctcgtctacaaatac

SEQ ID NO: 76006 - DNA, 25 bp, Probe sequence
tcactatcctcctcgtctacaaata

SEQ ID NO: 76007 - DNA, 25 bp, Probe sequence
actatcctcctcgtctacaaataca

SEQ ID NO: 76008 - DNA, 25 bp, Probe sequence
ctattatcgcattcatccataacaa

SEQ ID NO: 76009 - DNA, 25 bp, Probe sequence
atcactatcctcctcgtctacaaat

SEQ ID NO: 76010 - DNA, 25 bp, Probe sequence
ctatcctcctcgtctacaaatacat

SEQ ID NO: 76011 - DNA, 25 bp, Probe sequence
cgcattcatccataacaaattaagc

SEQ ID NO: 76012 - DNA, 25 bp, Probe sequence
atcctcctcgtctacaaatacatat

SEQ ID NO: 76013 - DNA, 25 bp, Probe sequence
tgttatggatgaatgcgataatagc

SEQ ID NO: 76014 - DNA, 25 bp, Probe sequence
tatttgtagacgaggaggatagtga

SEQ ID NO: 76015 - DNA, 25 bp, Probe sequence
gtatttgtagacgaggaggatagtg

SEQ ID NO: 76016 - DNA, 25 bp, Probe sequence
tgtatttgtagacgaggaggatagt

SEQ ID NO: 76017 - DNA, 25 bp, Probe sequence
ttgttatggatgaatgcgataatag

SEQ ID NO: 76018 - DNA, 25 bp, Probe sequence
atttgtagacgaggaggatagtgat

SEQ ID NO: 76019 - DNA, 25 bp, Probe sequence
atgtatttgtagacgaggaggatag

SEQ ID NO: 76020 - DNA, 25 bp, Probe sequence
gcttaatttgttatggatgaatgcg

SEQ ID NO: 76021 - DNA, 25 bp, Probe sequence
atatgtatttgtagacgaggaggat

SEQ ID NO: 76022 - DNA, 25 bp, Probe sequence
caagtaacgtctctatacactatat

SEQ ID NO: 76023 - DNA, 25 bp, Probe sequence
atatagtgtatagagacgttacttg

SEQ ID NO: 76024 - DNA, 25 bp, Probe sequence
ccttcaacatagacacttaacttgt

SEQ ID NO: 76025 - DNA, 25 bp, Probe sequence
tgtagtagttccgttgaattaacaa

SEQ ID NO: 76026 - DNA, 25 bp, Probe sequence
atgtagtagttccgttgaattaaca

SEQ ID NO: 76027 - DNA, 25 bp, Probe sequence
cagtaataatgtagtagttccgttg

SEQ ID NO: 76028 - DNA, 25 bp, Probe sequence
agtaataatgtagtagttccgttga

SEQ ID NO: 76029 - DNA, 25 bp, Probe sequence
tcagtaataatgtagtagttccgtt

SEQ ID NO: 76030 - DNA, 25 bp, Probe sequence
ctcccttcaacatagacacttaact

SEQ ID NO: 76031 - DNA, 25 bp, Probe sequence
aatactcccttcaacatagacactt

SEQ ID NO: 76032 - DNA, 25 bp, Probe sequence
aaatactcccttcaacatagacact

SEQ ID NO: 76033 - DNA, 25 bp, Probe sequence
acaagttaagtgtctatgttgaagg

SEQ ID NO: 76034 - DNA, 25 bp, Probe sequence
ttgttaattcaacggaactactaca

SEQ ID NO: 76035 - DNA, 25 bp, Probe sequence
tgttaattcaacggaactactacat

SEQ ID NO: 76036 - DNA, 25 bp, Probe sequence
caacggaactactacattattactg

SEQ ID NO: 76037 - DNA, 25 bp, Probe sequence
aacggaactactacattattactga

SEQ ID NO: 76038 - DNA, 25 bp, Probe sequence
tcaacggaactactacattattact

SEQ ID NO: 76039 - DNA, 25 bp, Probe sequence
agtgtctatgttgaagggagtattt

SEQ ID NO: 76040 - DNA, 25 bp, Probe sequence
aagtgtctatgttgaagggagtatt

SEQ ID NO: 76041 - DNA, 25 bp, Probe sequence
agttaagtgtctatgttgaagggag

SEQ ID NO: 76042 - DNA, 25 bp, Probe sequence
cctggttgattattctcgctgttaa

SEQ ID NO: 76043 - DNA, 25 bp, Probe sequence
aagtcatcctcctggttgattattc

SEQ ID NO: 76044 - DNA, 25 bp, Probe sequence
gtcatcctcctggttgattattctc

SEQ ID NO: 76045 - DNA, 25 bp, Probe sequence
taagtcatcctcctggttgattatt

SEQ ID NO: 76046 - DNA, 25 bp, Probe sequence
agtcatcctcctggttgattattct

SEQ ID NO: 76047 - DNA, 25 bp, Probe sequence
tcctggttgattattctcgctgtta

SEQ ID NO: 76048 - DNA, 25 bp, Probe sequence
tcatcctcctggttgattattctcg

SEQ ID NO: 76049 - DNA, 25 bp, Probe sequence
ctcctggttgattattctcgctgtt

SEQ ID NO: 76050 - DNA, 25 bp, Probe sequence
ctggttgattattctcgctgttaaa

SEQ ID NO: 76051 - DNA, 25 bp, Probe sequence
ttaacagcgagaataatcaaccagg

SEQ ID NO: 76052 - DNA, 25 bp, Probe sequence
gaataatcaaccaggaggatgactt

SEQ ID NO: 76053 - DNA, 25 bp, Probe sequence
gagaataatcaaccaggaggatgac

SEQ ID NO: 76054 - DNA, 25 bp, Probe sequence
aataatcaaccaggaggatgactta

SEQ ID NO: 76055 - DNA, 25 bp, Probe sequence
agaataatcaaccaggaggatgact

SEQ ID NO: 76056 - DNA, 25 bp, Probe sequence
taacagcgagaataatcaaccagga

SEQ ID NO: 76057 - DNA, 25 bp, Probe sequence
cgagaataatcaaccaggaggatga

SEQ ID NO: 76058 - DNA, 25 bp, Probe sequence
aacagcgagaataatcaaccaggag

SEQ ID NO: 76059 - DNA, 25 bp, Probe sequence
tttaacagcgagaataatcaaccag

SEQ ID NO: 76060 - DNA, 25 bp, Probe sequence
ttacatcactgtcatacgaacatat

SEQ ID NO: 76061 - DNA, 25 bp, Probe sequence
acatcactgtcatacgaacatatat

SEQ ID NO: 76062 - DNA, 25 bp, Probe sequence
tacatcactgtcatacgaacatata

SEQ ID NO: 76063 - DNA, 25 bp, Probe sequence
catttacatcactgtcatacgaaca

SEQ ID NO: 76064 - DNA, 25 bp, Probe sequence
tcatttacatcactgtcatacgaac

SEQ ID NO: 76065 - DNA, 25 bp, Probe sequence
atttacatcactgtcatacgaacat

SEQ ID NO: 76066 - DNA, 25 bp, Probe sequence
atcatttacatcactgtcatacgaa

SEQ ID NO: 76067 - DNA, 25 bp, Probe sequence
aatcatttacatcactgtcatacga

SEQ ID NO: 76068 - DNA, 25 bp, Probe sequence
caatcatttacatcactgtcatacg

SEQ ID NO: 76069 - DNA, 25 bp, Probe sequence
atatgttcgtatgacagtgatgtaa

SEQ ID NO: 76070 - DNA, 25 bp, Probe sequence
atatatgttcgtatgacagtgatgt

SEQ ID NO: 76071 - DNA, 25 bp, Probe sequence
tatatgttcgtatgacagtgatgta

SEQ ID NO: 76072 - DNA, 25 bp, Probe sequence
tgttcgtatgacagtgatgtaaatg

SEQ ID NO: 76073 - DNA, 25 bp, Probe sequence
gttcgtatgacagtgatgtaaatga

SEQ ID NO: 76074 - DNA, 25 bp, Probe sequence
atgttcgtatgacagtgatgtaaat

SEQ ID NO: 76075 - DNA, 25 bp, Probe sequence
cgtatgacagtgatgtaaatgattg

SEQ ID NO: 76076 - DNA, 25 bp, Probe sequence
tcgtatgacagtgatgtaaatgatt

SEQ ID NO: 76077 - DNA, 25 bp, Probe sequence
ttcgtatgacagtgatgtaaatgat

SEQ ID NO: 76078 - DNA, 25 bp, Probe sequence
tcatttgtttcttgaagtcaataac

SEQ ID NO: 76079 - DNA, 25 bp, Probe sequence
catttgtttcttgaagtcaataact

SEQ ID NO: 76080 - DNA, 25 bp, Probe sequence
tttgtttcttgaagtcaataacttt

SEQ ID NO: 76081 - DNA, 25 bp, Probe sequence
atttgtttcttgaagtcaataactt

SEQ ID NO: 76082 - DNA, 25 bp, Probe sequence
ttcatttgtttcttgaagtcaataa

SEQ ID NO: 76083 - DNA, 25 bp, Probe sequence
ttgtttcttgaagtcaataactttt

SEQ ID NO: 76084 - DNA, 25 bp, Probe sequence
cattcagttttcaatgttcattaat

SEQ ID NO: 76085 - DNA, 25 bp, Probe sequence
gttattgacttcaagaaacaaatga

SEQ ID NO: 76086 - DNA, 25 bp, Probe sequence
agttattgacttcaagaaacaaatg

SEQ ID NO: 76087 - DNA, 25 bp, Probe sequence
aaagttattgacttcaagaaacaaa

SEQ ID NO: 76088 - DNA, 25 bp, Probe sequence
ttattgacttcaagaaacaaatgaa

SEQ ID NO: 76089 - DNA, 25 bp, Probe sequence
aagttattgacttcaagaaacaaat

SEQ ID NO: 76090 - DNA, 25 bp, Probe sequence
aaaagttattgacttcaagaaacaa

SEQ ID NO: 76091 - DNA, 25 bp, Probe sequence
attaatgaacattgaaaactgaatg

SEQ ID NO: 76092 - DNA, 25 bp, Probe sequence
ttaccagcattccaaaacaaatcaa

SEQ ID NO: 76093 - DNA, 25 bp, Probe sequence
tttaccagcattccaaaacaaatca

SEQ ID NO: 76094 - DNA, 25 bp, Probe sequence
taccagcattccaaaacaaatcaac

SEQ ID NO: 76095 - DNA, 25 bp, Probe sequence
cagcattccaaaacaaatcaacata

SEQ ID NO: 76096 - DNA, 25 bp, Probe sequence
ccagcattccaaaacaaatcaacat

SEQ ID NO: 76097 - DNA, 25 bp, Probe sequence
agaacttattttaccagcattccaa

SEQ ID NO: 76098 - DNA, 25 bp, Probe sequence
aagaacttattttaccagcattcca

SEQ ID NO: 76099 - DNA, 25 bp, Probe sequence
agcattccaaaacaaatcaacataa

SEQ ID NO: 76100 - DNA, 25 bp, Probe sequence
gaacttattttaccagcattccaaa

SEQ ID NO: 76101 - DNA, 25 bp, Probe sequence
tgatttgttttggaatgctggtaaa

SEQ ID NO: 76102 - DNA, 25 bp, Probe sequence
ttgatttgttttggaatgctggtaa

SEQ ID NO: 76103 - DNA, 25 bp, Probe sequence
gttgatttgttttggaatgctggta

SEQ ID NO: 76104 - DNA, 25 bp, Probe sequence
tatgttgatttgttttggaatgctg

SEQ ID NO: 76105 - DNA, 25 bp, Probe sequence
atgttgatttgttttggaatgctgg

SEQ ID NO: 76106 - DNA, 25 bp, Probe sequence
tggaatgctggtaaaataagttctt

SEQ ID NO: 76107 - DNA, 25 bp, Probe sequence
ttggaatgctggtaaaataagttct

SEQ ID NO: 76108 - DNA, 25 bp, Probe sequence
ttatgttgatttgttttggaatgct

SEQ ID NO: 76109 - DNA, 25 bp, Probe sequence
tttggaatgctggtaaaataagttc

SEQ ID NO: 76110 - DNA, 25 bp, Probe sequence
gacatctacatcatagcaaataaca

SEQ ID NO: 76111 - DNA, 25 bp, Probe sequence
agacatctacatcatagcaaataac

SEQ ID NO: 76112 - DNA, 25 bp, Probe sequence
acatctacatcatagcaaataacaa

SEQ ID NO: 76113 - DNA, 25 bp, Probe sequence
tttaagacatctacatcatagcaaa

SEQ ID NO: 76114 - DNA, 25 bp, Probe sequence
aagacatctacatcatagcaaataa

SEQ ID NO: 76115 - DNA, 25 bp, Probe sequence
ttaagacatctacatcatagcaaat

SEQ ID NO: 76116 - DNA, 25 bp, Probe sequence
catctacatcatagcaaataacaat

SEQ ID NO: 76117 - DNA, 25 bp, Probe sequence
taagacatctacatcatagcaaata

SEQ ID NO: 76118 - DNA, 25 bp, Probe sequence
ttttaagacatctacatcatagcaa

SEQ ID NO: 76119 - DNA, 25 bp, Probe sequence
tgttatttgctatgatgtagatgtc

SEQ ID NO: 76120 - DNA, 25 bp, Probe sequence
gttatttgctatgatgtagatgtct

SEQ ID NO: 76121 - DNA, 25 bp, Probe sequence
ttgttatttgctatgatgtagatgt

SEQ ID NO: 76122 - DNA, 25 bp, Probe sequence
tttgctatgatgtagatgtcttaaa

SEQ ID NO: 76123 - DNA, 25 bp, Probe sequence
ttatttgctatgatgtagatgtctt

SEQ ID NO: 76124 - DNA, 25 bp, Probe sequence
atttgctatgatgtagatgtcttaa

SEQ ID NO: 76125 - DNA, 25 bp, Probe sequence
attgttatttgctatgatgtagatg

SEQ ID NO: 76126 - DNA, 25 bp, Probe sequence
tatttgctatgatgtagatgtctta

SEQ ID NO: 76127 - DNA, 25 bp, Probe sequence
ttgctatgatgtagatgtcttaaaa

SEQ ID NO: 76128 - DNA, 25 bp, Probe sequence
tattggttcttacacattaggcaca

SEQ ID NO: 76129 - DNA, 25 bp, Probe sequence
ttattggttcttacacattaggcac

SEQ ID NO: 76130 - DNA, 25 bp, Probe sequence
attggttcttacacattaggcacag

SEQ ID NO: 76131 - DNA, 25 bp, Probe sequence
attattggttcttacacattaggca

SEQ ID NO: 76132 - DNA, 25 bp, Probe sequence
cattattggttcttacacattaggc

SEQ ID NO: 76133 - DNA, 25 bp, Probe sequence
ttctcagactcatacaatggttatt

SEQ ID NO: 76134 - DNA, 25 bp, Probe sequence
tttaccacaaattgagcactaagac

SEQ ID NO: 76135 - DNA, 25 bp, Probe sequence
ttaccacaaattgagcactaagact

SEQ ID NO: 76136 - DNA, 25 bp, Probe sequence
gagcactaagactcactattatcga

SEQ ID NO: 76137 - DNA, 25 bp, Probe sequence
tgtgcctaatgtgtaagaaccaata

SEQ ID NO: 76138 - DNA, 25 bp, Probe sequence
gtgcctaatgtgtaagaaccaataa

SEQ ID NO: 76139 - DNA, 25 bp, Probe sequence
ctgtgcctaatgtgtaagaaccaat

SEQ ID NO: 76140 - DNA, 25 bp, Probe sequence
tgcctaatgtgtaagaaccaataat

SEQ ID NO: 76141 - DNA, 25 bp, Probe sequence
gcctaatgtgtaagaaccaataatg

SEQ ID NO: 76142 - DNA, 25 bp, Probe sequence
aataaccattgtatgagtctgagaa

SEQ ID NO: 76143 - DNA, 25 bp, Probe sequence
gtcttagtgctcaatttgtggtaaa

SEQ ID NO: 76144 - DNA, 25 bp, Probe sequence
agtcttagtgctcaatttgtggtaa

SEQ ID NO: 76145 - DNA, 25 bp, Probe sequence
tcgataatagtgagtcttagtgctc

SEQ ID NO: 76146 - DNA, 25 bp, Probe sequence
tgaacgatttatctagtatctagga

SEQ ID NO: 76147 - DNA, 25 bp, Probe sequence
ttgaacgatttatctagtatctagg

SEQ ID NO: 76148 - DNA, 25 bp, Probe sequence
gaacgatttatctagtatctaggaa

SEQ ID NO: 76149 - DNA, 25 bp, Probe sequence
tcctagatactagataaatcgttca

SEQ ID NO: 76150 - DNA, 25 bp, Probe sequence
cctagatactagataaatcgttcaa

SEQ ID NO: 76151 - DNA, 25 bp, Probe sequence
ttcctagatactagataaatcgttc

SEQ ID NO: 76152 - DNA, 25 bp, Probe sequence
acaatacaatcccctattagaatga

SEQ ID NO: 76153 - DNA, 25 bp, Probe sequence
tgactttcaaatcttaacgataatt

SEQ ID NO: 76154 - DNA, 25 bp, Probe sequence
actttcaaatcttaacgataattct

SEQ ID NO: 76155 - DNA, 25 bp, Probe sequence
gactttcaaatcttaacgataattc

SEQ ID NO: 76156 - DNA, 25 bp, Probe sequence
caatacaatcccctattagaatgat

SEQ ID NO: 76157 - DNA, 25 bp, Probe sequence
tacaatacaatcccctattagaatg

SEQ ID NO: 76158 - DNA, 25 bp, Probe sequence
aattctattacaatacaatccccta

SEQ ID NO: 76159 - DNA, 25 bp, Probe sequence
ttgactttcaaatcttaacgataat

SEQ ID NO: 76160 - DNA, 25 bp, Probe sequence
ttacaatacaatcccctattagaat

SEQ ID NO: 76161 - DNA, 25 bp, Probe sequence
tcattctaataggggattgtattgt

SEQ ID NO: 76162 - DNA, 25 bp, Probe sequence
aattatcgttaagatttgaaagtca

SEQ ID NO: 76163 - DNA, 25 bp, Probe sequence
agaattatcgttaagatttgaaagt

SEQ ID NO: 76164 - DNA, 25 bp, Probe sequence
gaattatcgttaagatttgaaagtc

SEQ ID NO: 76165 - DNA, 25 bp, Probe sequence
atcattctaataggggattgtattg

SEQ ID NO: 76166 - DNA, 25 bp, Probe sequence
cattctaataggggattgtattgta

SEQ ID NO: 76167 - DNA, 25 bp, Probe sequence
attatcgttaagatttgaaagtcaa

SEQ ID NO: 76168 - DNA, 25 bp, Probe sequence
taggggattgtattgtaatagaatt

SEQ ID NO: 76169 - DNA, 25 bp, Probe sequence
aataggggattgtattgtaatagaa

SEQ ID NO: 76170 - DNA, 25 bp, Probe sequence
tcacattttaccacatccctaacaa

SEQ ID NO: 76171 - DNA, 25 bp, Probe sequence
aatactcacattttaccacatccct

SEQ ID NO: 76172 - DNA, 25 bp, Probe sequence
cacattttaccacatccctaacaaa

SEQ ID NO: 76173 - DNA, 25 bp, Probe sequence
tactcacattttaccacatccctaa

SEQ ID NO: 76174 - DNA, 25 bp, Probe sequence
ctcacattttaccacatccctaaca

SEQ ID NO: 76175 - DNA, 25 bp, Probe sequence
actcacattttaccacatccctaac

SEQ ID NO: 76176 - DNA, 25 bp, Probe sequence
atactcacattttaccacatcccta

SEQ ID NO: 76177 - DNA, 25 bp, Probe sequence
taatactcacattttaccacatccc

SEQ ID NO: 76178 - DNA, 25 bp, Probe sequence
ttgttctcctttaatactcacattt

SEQ ID NO: 76179 - DNA, 25 bp, Probe sequence
agggatgtggtaaaatgtgagtatt

SEQ ID NO: 76180 - DNA, 25 bp, Probe sequence
ttgttagggatgtggtaaaatgtga

SEQ ID NO: 76181 - DNA, 25 bp, Probe sequence
tttgttagggatgtggtaaaatgtg

SEQ ID NO: 76182 - DNA, 25 bp, Probe sequence
ttagggatgtggtaaaatgtgagta

SEQ ID NO: 76183 - DNA, 25 bp, Probe sequence
gttagggatgtggtaaaatgtgagt

SEQ ID NO: 76184 - DNA, 25 bp, Probe sequence
tgttagggatgtggtaaaatgtgag

SEQ ID NO: 76185 - DNA, 25 bp, Probe sequence
tagggatgtggtaaaatgtgagtat

SEQ ID NO: 76186 - DNA, 25 bp, Probe sequence
gggatgtggtaaaatgtgagtatta

SEQ ID NO: 76187 - DNA, 25 bp, Probe sequence
aatgtgagtattaaaggagaacaaa

SEQ ID NO: 76188 - DNA, 25 bp, Probe sequence
aaatacaaaaggacaactgttctca

SEQ ID NO: 76189 - DNA, 25 bp, Probe sequence
caaaaggacaactgttctcataatt

SEQ ID NO: 76190 - DNA, 25 bp, Probe sequence
acaaaaggacaactgttctcataat

SEQ ID NO: 76191 - DNA, 25 bp, Probe sequence
aatacaaaaggacaactgttctcat

SEQ ID NO: 76192 - DNA, 25 bp, Probe sequence
tacaaaaggacaactgttctcataa

SEQ ID NO: 76193 - DNA, 25 bp, Probe sequence
aaaatacaaaaggacaactgttctc

SEQ ID NO: 76194 - DNA, 25 bp, Probe sequence
atacaaaaggacaactgttctcata

SEQ ID NO: 76195 - DNA, 25 bp, Probe sequence
aaaggacaactgttctcataatttt

SEQ ID NO: 76196 - DNA, 25 bp, Probe sequence
aaaaggacaactgttctcataattt

SEQ ID NO: 76197 - DNA, 25 bp, Probe sequence
tgagaacagttgtccttttgtattt

SEQ ID NO: 76198 - DNA, 25 bp, Probe sequence
aattatgagaacagttgtccttttg

SEQ ID NO: 76199 - DNA, 25 bp, Probe sequence
atgagaacagttgtccttttgtatt

SEQ ID NO: 76200 - DNA, 25 bp, Probe sequence
attatgagaacagttgtccttttgt

SEQ ID NO: 76201 - DNA, 25 bp, Probe sequence
ttatgagaacagttgtccttttgta

SEQ ID NO: 76202 - DNA, 25 bp, Probe sequence
gagaacagttgtccttttgtatttt

SEQ ID NO: 76203 - DNA, 25 bp, Probe sequence
tatgagaacagttgtccttttgtat

SEQ ID NO: 76204 - DNA, 25 bp, Probe sequence
aaattatgagaacagttgtcctttt

SEQ ID NO: 76205 - DNA, 25 bp, Probe sequence
aaaattatgagaacagttgtccttt

SEQ ID NO: 76206 - DNA, 25 bp, Probe sequence
tcaatccatttctctatgtattcgt

SEQ ID NO: 76207 - DNA, 25 bp, Probe sequence
caatccatttctctatgtattcgtt

SEQ ID NO: 76208 - DNA, 25 bp, Probe sequence
acaattactgatttcgtacttaacc

SEQ ID NO: 76209 - DNA, 25 bp, Probe sequence
caattactgatttcgtacttaacct

SEQ ID NO: 76210 - DNA, 25 bp, Probe sequence
atcaatccatttctctatgtattcg

SEQ ID NO: 76211 - DNA, 25 bp, Probe sequence
aatccatttctctatgtattcgttt

SEQ ID NO: 76212 - DNA, 25 bp, Probe sequence
ggttaagtacaattactgatttcgt

SEQ ID NO: 76213 - DNA, 25 bp, Probe sequence
attactgatttcgtacttaaccttt

SEQ ID NO: 76214 - DNA, 25 bp, Probe sequence
aattactgatttcgtacttaacctt

SEQ ID NO: 76215 - DNA, 25 bp, Probe sequence
acgaatacatagagaaatggattga

SEQ ID NO: 76216 - DNA, 25 bp, Probe sequence
aacgaatacatagagaaatggattg

SEQ ID NO: 76217 - DNA, 25 bp, Probe sequence
ggttaagtacgaaatcagtaattgt

SEQ ID NO: 76218 - DNA, 25 bp, Probe sequence
aggttaagtacgaaatcagtaattg

SEQ ID NO: 76219 - DNA, 25 bp, Probe sequence
cgaatacatagagaaatggattgat

SEQ ID NO: 76220 - DNA, 25 bp, Probe sequence
aaacgaatacatagagaaatggatt

SEQ ID NO: 76221 - DNA, 25 bp, Probe sequence
acgaaatcagtaattgtacttaacc

SEQ ID NO: 76222 - DNA, 25 bp, Probe sequence
aaggttaagtacgaaatcagtaatt

SEQ ID NO: 76223 - DNA, 25 bp, Probe sequence
aaaggttaagtacgaaatcagtaat

SEQ ID NO: 76224 - DNA, 25 bp, Probe sequence
aattatcattgtcaagtagcgttca

SEQ ID NO: 76225 - DNA, 25 bp, Probe sequence
attatcattgtcaagtagcgttcaa

SEQ ID NO: 76226 - DNA, 25 bp, Probe sequence
tatcattgtcaagtagcgttcaatc

SEQ ID NO: 76227 - DNA, 25 bp, Probe sequence
cgttccactccttaatatgtataac

SEQ ID NO: 76228 - DNA, 25 bp, Probe sequence
atcattgtcaagtagcgttcaatct

SEQ ID NO: 76229 - DNA, 25 bp, Probe sequence
acaattagcacatttccttagacaa

SEQ ID NO: 76230 - DNA, 25 bp, Probe sequence
ttatcattgtcaagtagcgttcaat

SEQ ID NO: 76231 - DNA, 25 bp, Probe sequence
tcattgtcaagtagcgttcaatctt

SEQ ID NO: 76232 - DNA, 25 bp, Probe sequence
caattatcattgtcaagtagcgttc

SEQ ID NO: 76233 - DNA, 25 bp, Probe sequence
tgaacgctacttgacaatgataatt

SEQ ID NO: 76234 - DNA, 25 bp, Probe sequence
ttgaacgctacttgacaatgataat

SEQ ID NO: 76235 - DNA, 25 bp, Probe sequence
gttatacatattaaggagtggaacg

SEQ ID NO: 76236 - DNA, 25 bp, Probe sequence
gattgaacgctacttgacaatgata

SEQ ID NO: 76237 - DNA, 25 bp, Probe sequence
agattgaacgctacttgacaatgat

SEQ ID NO: 76238 - DNA, 25 bp, Probe sequence
attgaacgctacttgacaatgataa

SEQ ID NO: 76239 - DNA, 25 bp, Probe sequence
ttgtctaaggaaatgtgctaattgt

SEQ ID NO: 76240 - DNA, 25 bp, Probe sequence
aagattgaacgctacttgacaatga

SEQ ID NO: 76241 - DNA, 25 bp, Probe sequence
gaacgctacttgacaatgataattg

SEQ ID NO: 76242 - DNA, 25 bp, Probe sequence
cacccgcattctgttgataataaga

SEQ ID NO: 76243 - DNA, 25 bp, Probe sequence
tacacccgcattctgttgataataa

SEQ ID NO: 76244 - DNA, 25 bp, Probe sequence
ttacacccgcattctgttgataata

SEQ ID NO: 76245 - DNA, 25 bp, Probe sequence
acacccgcattctgttgataataag

SEQ ID NO: 76246 - DNA, 25 bp, Probe sequence
cttacacccgcattctgttgataat

SEQ ID NO: 76247 - DNA, 25 bp, Probe sequence
acttacacccgcattctgttgataa

SEQ ID NO: 76248 - DNA, 25 bp, Probe sequence
aacttacacccgcattctgttgata

SEQ ID NO: 76249 - DNA, 25 bp, Probe sequence
acccgcattctgttgataataagaa

SEQ ID NO: 76250 - DNA, 25 bp, Probe sequence
aaacttacacccgcattctgttgat

SEQ ID NO: 76251 - DNA, 25 bp, Probe sequence
tcttattatcaacagaatgcgggtg

SEQ ID NO: 76252 - DNA, 25 bp, Probe sequence
tattatcaacagaatgcgggtgtaa

SEQ ID NO: 76253 - DNA, 25 bp, Probe sequence
ttattatcaacagaatgcgggtgta

SEQ ID NO: 76254 - DNA, 25 bp, Probe sequence
attatcaacagaatgcgggtgtaag

SEQ ID NO: 76255 - DNA, 25 bp, Probe sequence
cttattatcaacagaatgcgggtgt

SEQ ID NO: 76256 - DNA, 25 bp, Probe sequence
tatcaacagaatgcgggtgtaagtt

SEQ ID NO: 76257 - DNA, 25 bp, Probe sequence
ttatcaacagaatgcgggtgtaagt

SEQ ID NO: 76258 - DNA, 25 bp, Probe sequence
ttcttattatcaacagaatgcgggt

SEQ ID NO: 76259 - DNA, 25 bp, Probe sequence
atcaacagaatgcgggtgtaagttt

SEQ ID NO: 76260 - DNA, 25 bp, Probe sequence
agctcaaggattacattaacttatt

SEQ ID NO: 76261 - DNA, 25 bp, Probe sequence
gctcaaggattacattaacttatta

SEQ ID NO: 76262 - DNA, 25 bp, Probe sequence
gagctcaaggattacattaacttat

SEQ ID NO: 76263 - DNA, 25 bp, Probe sequence
cactaaaatggtgtgccgagctttt

SEQ ID NO: 76264 - DNA, 25 bp, Probe sequence
aaaagctcggcactaaaatggtgtg

SEQ ID NO: 76265 - DNA, 25 bp, Probe sequence
atagaattttattaatcgtgagctc

SEQ ID NO: 76266 - DNA, 25 bp, Probe sequence
aataagttaatgtaatccttgagct

SEQ ID NO: 76267 - DNA, 25 bp, Probe sequence
taataagttaatgtaatccttgagc

SEQ ID NO: 76268 - DNA, 25 bp, Probe sequence
ataagttaatgtaatccttgagctc

SEQ ID NO: 76269 - DNA, 25 bp, Probe sequence
cacaccattttagtgccgagctttt

SEQ ID NO: 76270 - DNA, 25 bp, Probe sequence
aaaagctcggcacaccattttagtg

SEQ ID NO: 76271 - DNA, 25 bp, Probe sequence
gagctcacgattaataaaattctat

SEQ ID NO: 76272 - DNA, 25 bp, Probe sequence
acgacacctccttagttaaagttaa

SEQ ID NO: 76273 - DNA, 25 bp, Probe sequence
aacgacacctccttagttaaagtta

SEQ ID NO: 76274 - DNA, 25 bp, Probe sequence
cgacacctccttagttaaagttaat

SEQ ID NO: 76275 - DNA, 25 bp, Probe sequence
ctaacgacacctccttagttaaagt

SEQ ID NO: 76276 - DNA, 25 bp, Probe sequence
taacgacacctccttagttaaagtt

SEQ ID NO: 76277 - DNA, 25 bp, Probe sequence
cctaacgacacctccttagttaaag

SEQ ID NO: 76278 - DNA, 25 bp, Probe sequence
ccctaacgacacctccttagttaaa

SEQ ID NO: 76279 - DNA, 25 bp, Probe sequence
gacacctccttagttaaagttaatt

SEQ ID NO: 76280 - DNA, 25 bp, Probe sequence
acacctccttagttaaagttaattt

SEQ ID NO: 76281 - DNA, 25 bp, Probe sequence
ttaactttaactaaggaggtgtcgt

SEQ ID NO: 76282 - DNA, 25 bp, Probe sequence
taactttaactaaggaggtgtcgtt

SEQ ID NO: 76283 - DNA, 25 bp, Probe sequence
attaactttaactaaggaggtgtcg

SEQ ID NO: 76284 - DNA, 25 bp, Probe sequence
actttaactaaggaggtgtcgttag

SEQ ID NO: 76285 - DNA, 25 bp, Probe sequence
aactttaactaaggaggtgtcgtta

SEQ ID NO: 76286 - DNA, 25 bp, Probe sequence
ctttaactaaggaggtgtcgttagg

SEQ ID NO: 76287 - DNA, 25 bp, Probe sequence
tttaactaaggaggtgtcgttaggg

SEQ ID NO: 76288 - DNA, 25 bp, Probe sequence
aattaactttaactaaggaggtgtc

SEQ ID NO: 76289 - DNA, 25 bp, Probe sequence
aaattaactttaactaaggaggtgt

SEQ ID NO: 76290 - DNA, 25 bp, Probe sequence
tagaatcaatagtcgctagacacaa

SEQ ID NO: 76291 - DNA, 25 bp, Probe sequence
ttagaatcaatagtcgctagacaca

SEQ ID NO: 76292 - DNA, 25 bp, Probe sequence
ttgatttgatacctgtaaagttgcc

SEQ ID NO: 76293 - DNA, 25 bp, Probe sequence
gatttgatacctgtaaagttgccat

SEQ ID NO: 76294 - DNA, 25 bp, Probe sequence
ctgtaaagttgccatatttccgttt

SEQ ID NO: 76295 - DNA, 25 bp, Probe sequence
tgatttgatacctgtaaagttgcca

SEQ ID NO: 76296 - DNA, 25 bp, Probe sequence
agacacaattaataatgcctcatct

SEQ ID NO: 76297 - DNA, 25 bp, Probe sequence
ttccgtttagaatcaatagtcgcta

SEQ ID NO: 76298 - DNA, 25 bp, Probe sequence
gttgccatatttccgtttagaatca

SEQ ID NO: 76299 - DNA, 25 bp, Probe sequence
tgtgtctagcgactattgattctaa

SEQ ID NO: 76300 - DNA, 25 bp, Probe sequence
ttgtgtctagcgactattgattcta

SEQ ID NO: 76301 - DNA, 25 bp, Probe sequence
ggcaactttacaggtatcaaatcaa

SEQ ID NO: 76302 - DNA, 25 bp, Probe sequence
atggcaactttacaggtatcaaatc

SEQ ID NO: 76303 - DNA, 25 bp, Probe sequence
aaacggaaatatggcaactttacag

SEQ ID NO: 76304 - DNA, 25 bp, Probe sequence
tggcaactttacaggtatcaaatca

SEQ ID NO: 76305 - DNA, 25 bp, Probe sequence
agatgaggcattattaattgtgtct

SEQ ID NO: 76306 - DNA, 25 bp, Probe sequence
tgattctaaacggaaatatggcaac

SEQ ID NO: 76307 - DNA, 25 bp, Probe sequence
tagcgactattgattctaaacggaa

SEQ ID NO: 76308 - DNA, 25 bp, Probe sequence
agacttatttctaccatgttactga

SEQ ID NO: 76309 - DNA, 25 bp, Probe sequence
atcgtttcacctcatttatgaactt

SEQ ID NO: 76310 - DNA, 25 bp, Probe sequence
acttatttctaccatgttactgaac

SEQ ID NO: 76311 - DNA, 25 bp, Probe sequence
tcgtttcacctcatttatgaactta

SEQ ID NO: 76312 - DNA, 25 bp, Probe sequence
gacttatttctaccatgttactgaa

SEQ ID NO: 76313 - DNA, 25 bp, Probe sequence
tatacaaaatagaagccatgtgtgc

SEQ ID NO: 76314 - DNA, 25 bp, Probe sequence
cgtttcacctcatttatgaacttat

SEQ ID NO: 76315 - DNA, 25 bp, Probe sequence
tcacctcatttatgaacttatttct

SEQ ID NO: 76316 - DNA, 25 bp, Probe sequence
aatagaagccatgtgtgcttatacc

SEQ ID NO: 76317 - DNA, 25 bp, Probe sequence
tcagtaacatggtagaaataagtct

SEQ ID NO: 76318 - DNA, 25 bp, Probe sequence
aagttcataaatgaggtgaaacgat

SEQ ID NO: 76319 - DNA, 25 bp, Probe sequence
gttcagtaacatggtagaaataagt

SEQ ID NO: 76320 - DNA, 25 bp, Probe sequence
taagttcataaatgaggtgaaacga

SEQ ID NO: 76321 - DNA, 25 bp, Probe sequence
ttcagtaacatggtagaaataagtc

SEQ ID NO: 76322 - DNA, 25 bp, Probe sequence
gcacacatggcttctattttgtata

SEQ ID NO: 76323 - DNA, 25 bp, Probe sequence
ataagttcataaatgaggtgaaacg

SEQ ID NO: 76324 - DNA, 25 bp, Probe sequence
agaaataagttcataaatgaggtga

SEQ ID NO: 76325 - DNA, 25 bp, Probe sequence
ggtataagcacacatggcttctatt

SEQ ID NO: 76326 - DNA, 25 bp, Probe sequence
taattgtgtcttcgtgatgtctgta

SEQ ID NO: 76327 - DNA, 25 bp, Probe sequence
aattgtgtcttcgtgatgtctgtat

SEQ ID NO: 76328 - DNA, 25 bp, Probe sequence
ttaattgtgtcttcgtgatgtctgt

SEQ ID NO: 76329 - DNA, 25 bp, Probe sequence
attgtgtcttcgtgatgtctgtatg

SEQ ID NO: 76330 - DNA, 25 bp, Probe sequence
tttaattgtgtcttcgtgatgtctg

SEQ ID NO: 76331 - DNA, 25 bp, Probe sequence
ttgtgtcttcgtgatgtctgtatgc

SEQ ID NO: 76332 - DNA, 25 bp, Probe sequence
agcactgattcatttaacttcaagt

SEQ ID NO: 76333 - DNA, 25 bp, Probe sequence
aagcactgattcatttaacttcaag

SEQ ID NO: 76334 - DNA, 25 bp, Probe sequence
tcttcgtgatgtctgtatgcaaata

SEQ ID NO: 76335 - DNA, 25 bp, Probe sequence
tacagacatcacgaagacacaatta

SEQ ID NO: 76336 - DNA, 25 bp, Probe sequence
atacagacatcacgaagacacaatt

SEQ ID NO: 76337 - DNA, 25 bp, Probe sequence
acagacatcacgaagacacaattaa

SEQ ID NO: 76338 - DNA, 25 bp, Probe sequence
catacagacatcacgaagacacaat

SEQ ID NO: 76339 - DNA, 25 bp, Probe sequence
cagacatcacgaagacacaattaaa

SEQ ID NO: 76340 - DNA, 25 bp, Probe sequence
gcatacagacatcacgaagacacaa

SEQ ID NO: 76341 - DNA, 25 bp, Probe sequence
acttgaagttaaatgaatcagtgct

SEQ ID NO: 76342 - DNA, 25 bp, Probe sequence
cttgaagttaaatgaatcagtgctt

SEQ ID NO: 76343 - DNA, 25 bp, Probe sequence
tatttgcatacagacatcacgaaga

SEQ ID NO: 76344 - DNA, 25 bp, Probe sequence
ataaataaagacctaccagcactcg

SEQ ID NO: 76345 - DNA, 25 bp, Probe sequence
tataaataaagacctaccagcactc

SEQ ID NO: 76346 - DNA, 25 bp, Probe sequence
ctataaataaagacctaccagcact

SEQ ID NO: 76347 - DNA, 25 bp, Probe sequence
tctataaataaagacctaccagcac

SEQ ID NO: 76348 - DNA, 25 bp, Probe sequence
cttctttagctttcaatggtgtgtc

SEQ ID NO: 76349 - DNA, 25 bp, Probe sequence
ttctttagctttcaatggtgtgtca

SEQ ID NO: 76350 - DNA, 25 bp, Probe sequence
taaataaagacctaccagcactcga

SEQ ID NO: 76351 - DNA, 25 bp, Probe sequence
cgtttgttaattgattgcttcttta

SEQ ID NO: 76352 - DNA, 25 bp, Probe sequence
ttctataaataaagacctaccagca

SEQ ID NO: 76353 - DNA, 25 bp, Probe sequence
cgagtgctggtaggtctttatttat

SEQ ID NO: 76354 - DNA, 25 bp, Probe sequence
agtgctggtaggtctttatttatag

SEQ ID NO: 76355 - DNA, 25 bp, Probe sequence
gagtgctggtaggtctttatttata

SEQ ID NO: 76356 - DNA, 25 bp, Probe sequence
gtgctggtaggtctttatttataga

SEQ ID NO: 76357 - DNA, 25 bp, Probe sequence
gacacaccattgaaagctaaagaag

SEQ ID NO: 76358 - DNA, 25 bp, Probe sequence
tgacacaccattgaaagctaaagaa

SEQ ID NO: 76359 - DNA, 25 bp, Probe sequence
tcgagtgctggtaggtctttattta

SEQ ID NO: 76360 - DNA, 25 bp, Probe sequence
taaagaagcaatcaattaacaaacg

SEQ ID NO: 76361 - DNA, 25 bp, Probe sequence
tgctggtaggtctttatttatagaa

SEQ ID NO: 76362 - DNA, 25 bp, Probe sequence
tcaaacaataagtgaacattcctat

SEQ ID NO: 76363 - DNA, 25 bp, Probe sequence
tttcaaacaataagtgaacattcct

SEQ ID NO: 76364 - DNA, 25 bp, Probe sequence
tgtttataacctgtttgtttatgac

SEQ ID NO: 76365 - DNA, 25 bp, Probe sequence
gtttataacctgtttgtttatgaca

SEQ ID NO: 76366 - DNA, 25 bp, Probe sequence
ttcaaacaataagtgaacattccta

SEQ ID NO: 76367 - DNA, 25 bp, Probe sequence
taacctgtttgtttatgacatattt

SEQ ID NO: 76368 - DNA, 25 bp, Probe sequence
atgtttataacctgtttgtttatga

SEQ ID NO: 76369 - DNA, 25 bp, Probe sequence
cctgtttgtttatgacatattttca

SEQ ID NO: 76370 - DNA, 25 bp, Probe sequence
acctgtttgtttatgacatattttc

SEQ ID NO: 76371 - DNA, 25 bp, Probe sequence
ataggaatgttcacttattgtttga

SEQ ID NO: 76372 - DNA, 25 bp, Probe sequence
aggaatgttcacttattgtttgaaa

SEQ ID NO: 76373 - DNA, 25 bp, Probe sequence
gtcataaacaaacaggttataaaca

SEQ ID NO: 76374 - DNA, 25 bp, Probe sequence
tgtcataaacaaacaggttataaac

SEQ ID NO: 76375 - DNA, 25 bp, Probe sequence
taggaatgttcacttattgtttgaa

SEQ ID NO: 76376 - DNA, 25 bp, Probe sequence
aaatatgtcataaacaaacaggtta

SEQ ID NO: 76377 - DNA, 25 bp, Probe sequence
tcataaacaaacaggttataaacat

SEQ ID NO: 76378 - DNA, 25 bp, Probe sequence
gaaaatatgtcataaacaaacaggt

SEQ ID NO: 76379 - DNA, 25 bp, Probe sequence
tgaaaatatgtcataaacaaacagg

SEQ ID NO: 76380 - DNA, 25 bp, Probe sequence
ttatttaggcgatgggtcattatcc

SEQ ID NO: 76381 - DNA, 25 bp, Probe sequence
cgatgggtcattatcctttatgttt

SEQ ID NO: 76382 - DNA, 25 bp, Probe sequence
tttatttaggcgatgggtcattatc

SEQ ID NO: 76383 - DNA, 25 bp, Probe sequence
ctttatttaggcgatgggtcattat

SEQ ID NO: 76384 - DNA, 25 bp, Probe sequence
gcgatgggtcattatcctttatgtt

SEQ ID NO: 76385 - DNA, 25 bp, Probe sequence
cctttatttaggcgatgggtcatta

SEQ ID NO: 76386 - DNA, 25 bp, Probe sequence
taggcgatgggtcattatcctttat

SEQ ID NO: 76387 - DNA, 25 bp, Probe sequence
tatttaggcgatgggtcattatcct

SEQ ID NO: 76388 - DNA, 25 bp, Probe sequence
ttaggcgatgggtcattatccttta

SEQ ID NO: 76389 - DNA, 25 bp, Probe sequence
ggataatgacccatcgcctaaataa

SEQ ID NO: 76390 - DNA, 25 bp, Probe sequence
aaacataaaggataatgacccatcg

SEQ ID NO: 76391 - DNA, 25 bp, Probe sequence
ataatgacccatcgcctaaataaag

SEQ ID NO: 76392 - DNA, 25 bp, Probe sequence
gataatgacccatcgcctaaataaa

SEQ ID NO: 76393 - DNA, 25 bp, Probe sequence
aacataaaggataatgacccatcgc

SEQ ID NO: 76394 - DNA, 25 bp, Probe sequence
taatgacccatcgcctaaataaagg

SEQ ID NO: 76395 - DNA, 25 bp, Probe sequence
aggataatgacccatcgcctaaata

SEQ ID NO: 76396 - DNA, 25 bp, Probe sequence
ataaaggataatgacccatcgccta

SEQ ID NO: 76397 - DNA, 25 bp, Probe sequence
taaaggataatgacccatcgcctaa

SEQ ID NO: 76398 - DNA, 25 bp, Probe sequence
gttgggatgctactttataacattt

SEQ ID NO: 76399 - DNA, 25 bp, Probe sequence
tataacattttcaatcgctaaaggc

SEQ ID NO: 76400 - DNA, 25 bp, Probe sequence
tgttgggatgctactttataacatt

SEQ ID NO: 76401 - DNA, 25 bp, Probe sequence
gctactttataacattttcaatcgc

SEQ ID NO: 76402 - DNA, 25 bp, Probe sequence
gggatgctactttataacattttca

SEQ ID NO: 76403 - DNA, 25 bp, Probe sequence
tgggatgctactttataacattttc

SEQ ID NO: 76404 - DNA, 25 bp, Probe sequence
ataacattttcaatcgctaaaggcc

SEQ ID NO: 76405 - DNA, 25 bp, Probe sequence
gtaaatcttatgcttacaactcatt

SEQ ID NO: 76406 - DNA, 25 bp, Probe sequence
ttgggatgctactttataacatttt

SEQ ID NO: 76407 - DNA, 25 bp, Probe sequence
aaatgttataaagtagcatcccaac

SEQ ID NO: 76408 - DNA, 25 bp, Probe sequence
gcctttagcgattgaaaatgttata

SEQ ID NO: 76409 - DNA, 25 bp, Probe sequence
aatgttataaagtagcatcccaaca

SEQ ID NO: 76410 - DNA, 25 bp, Probe sequence
gcgattgaaaatgttataaagtagc

SEQ ID NO: 76411 - DNA, 25 bp, Probe sequence
gaaaatgttataaagtagcatccca

SEQ ID NO: 76412 - DNA, 25 bp, Probe sequence
tgaaaatgttataaagtagcatccc

SEQ ID NO: 76413 - DNA, 25 bp, Probe sequence
ggcctttagcgattgaaaatgttat

SEQ ID NO: 76414 - DNA, 25 bp, Probe sequence
aatgagttgtaagcataagatttac

SEQ ID NO: 76415 - DNA, 25 bp, Probe sequence
aaaatgttataaagtagcatcccaa

SEQ ID NO: 76416 - DNA, 25 bp, Probe sequence
taacttatttgcttgctccattcac

SEQ ID NO: 76417 - DNA, 25 bp, Probe sequence
caagtttcaggttagcgtaatgtaa

SEQ ID NO: 76418 - DNA, 25 bp, Probe sequence
cttatttgcttgctccattcacttt

SEQ ID NO: 76419 - DNA, 25 bp, Probe sequence
ataacttatttgcttgctccattca

SEQ ID NO: 76420 - DNA, 25 bp, Probe sequence
aagtttcaggttagcgtaatgtaaa

SEQ ID NO: 76421 - DNA, 25 bp, Probe sequence
ccaagtttcaggttagcgtaatgta

SEQ ID NO: 76422 - DNA, 25 bp, Probe sequence
agtttcaggttagcgtaatgtaaat

SEQ ID NO: 76423 - DNA, 25 bp, Probe sequence
atccaagtttcaggttagcgtaatg

SEQ ID NO: 76424 - DNA, 25 bp, Probe sequence
catccaagtttcaggttagcgtaat

SEQ ID NO: 76425 - DNA, 25 bp, Probe sequence
gtgaatggagcaagcaaataagtta

SEQ ID NO: 76426 - DNA, 25 bp, Probe sequence
ttacattacgctaacctgaaacttg

SEQ ID NO: 76427 - DNA, 25 bp, Probe sequence
aaagtgaatggagcaagcaaataag

SEQ ID NO: 76428 - DNA, 25 bp, Probe sequence
tgaatggagcaagcaaataagttat

SEQ ID NO: 76429 - DNA, 25 bp, Probe sequence
tttacattacgctaacctgaaactt

SEQ ID NO: 76430 - DNA, 25 bp, Probe sequence
tacattacgctaacctgaaacttgg

SEQ ID NO: 76431 - DNA, 25 bp, Probe sequence
atttacattacgctaacctgaaact

SEQ ID NO: 76432 - DNA, 25 bp, Probe sequence
attacgctaacctgaaacttggatg

SEQ ID NO: 76433 - DNA, 25 bp, Probe sequence
cattacgctaacctgaaacttggat

SEQ ID NO: 76434 - DNA, 25 bp, Probe sequence
aacctcctttatcttgtatgtccac

SEQ ID NO: 76435 - DNA, 25 bp, Probe sequence
gaacctcctttatcttgtatgtcca

SEQ ID NO: 76436 - DNA, 25 bp, Probe sequence
tgaacctcctttatcttgtatgtcc

SEQ ID NO: 76437 - DNA, 25 bp, Probe sequence
cctcctttatcttgtatgtccacta

SEQ ID NO: 76438 - DNA, 25 bp, Probe sequence
acctcctttatcttgtatgtccact

SEQ ID NO: 76439 - DNA, 25 bp, Probe sequence
atgaacctcctttatcttgtatgtc

SEQ ID NO: 76440 - DNA, 25 bp, Probe sequence
aatgaacctcctttatcttgtatgt

SEQ ID NO: 76441 - DNA, 25 bp, Probe sequence
ctcctttatcttgtatgtccactat

SEQ ID NO: 76442 - DNA, 25 bp, Probe sequence
tcttgtatgtccactataaaccatg

SEQ ID NO: 76443 - DNA, 25 bp, Probe sequence
ggacatacaagataaaggaggttca

SEQ ID NO: 76444 - DNA, 25 bp, Probe sequence
tggacatacaagataaaggaggttc

SEQ ID NO: 76445 - DNA, 25 bp, Probe sequence
gtggacatacaagataaaggaggtt

SEQ ID NO: 76446 - DNA, 25 bp, Probe sequence
tagtggacatacaagataaaggagg

SEQ ID NO: 76447 - DNA, 25 bp, Probe sequence
agtggacatacaagataaaggaggt

SEQ ID NO: 76448 - DNA, 25 bp, Probe sequence
gacatacaagataaaggaggttcat

SEQ ID NO: 76449 - DNA, 25 bp, Probe sequence
acatacaagataaaggaggttcatt

SEQ ID NO: 76450 - DNA, 25 bp, Probe sequence
atagtggacatacaagataaaggag

SEQ ID NO: 76451 - DNA, 25 bp, Probe sequence
catggtttatagtggacatacaaga

SEQ ID NO: 76452 - DNA, 25 bp, Probe sequence
tcctttcagttatatttgggcatct

SEQ ID NO: 76453 - DNA, 25 bp, Probe sequence
atcctttcagttatatttgggcatc

SEQ ID NO: 76454 - DNA, 25 bp, Probe sequence
tgccatctttgtttgaatacttctt

SEQ ID NO: 76455 - DNA, 25 bp, Probe sequence
ttgccatctttgtttgaatacttct

SEQ ID NO: 76456 - DNA, 25 bp, Probe sequence
ttgggcatctaaagtaatgttgttt

SEQ ID NO: 76457 - DNA, 25 bp, Probe sequence
tttgggcatctaaagtaatgttgtt

SEQ ID NO: 76458 - DNA, 25 bp, Probe sequence
atttgggcatctaaagtaatgttgt

SEQ ID NO: 76459 - DNA, 25 bp, Probe sequence
cctttcagttatatttgggcatcta

SEQ ID NO: 76460 - DNA, 25 bp, Probe sequence
ctatcctttcagttatatttgggca

SEQ ID NO: 76461 - DNA, 25 bp, Probe sequence
agatgcccaaatataactgaaagga

SEQ ID NO: 76462 - DNA, 25 bp, Probe sequence
gatgcccaaatataactgaaaggat

SEQ ID NO: 76463 - DNA, 25 bp, Probe sequence
aacaacattactttagatgcccaaa

SEQ ID NO: 76464 - DNA, 25 bp, Probe sequence
aaacaacattactttagatgcccaa

SEQ ID NO: 76465 - DNA, 25 bp, Probe sequence
agaagtattcaaacaaagatggcaa

SEQ ID NO: 76466 - DNA, 25 bp, Probe sequence
aagaagtattcaaacaaagatggca

SEQ ID NO: 76467 - DNA, 25 bp, Probe sequence
acaacattactttagatgcccaaat

SEQ ID NO: 76468 - DNA, 25 bp, Probe sequence
tgcccaaatataactgaaaggatag

SEQ ID NO: 76469 - DNA, 25 bp, Probe sequence
tagatgcccaaatataactgaaagg

SEQ ID NO: 76470 - DNA, 25 bp, Probe sequence
gcaagaaaatctcgacactatacca

SEQ ID NO: 76471 - DNA, 25 bp, Probe sequence
caagaaaatctcgacactataccat

SEQ ID NO: 76472 - DNA, 25 bp, Probe sequence
aagaaaatctcgacactataccatt

SEQ ID NO: 76473 - DNA, 25 bp, Probe sequence
agaaaatctcgacactataccattt

SEQ ID NO: 76474 - DNA, 25 bp, Probe sequence
tgtcgagattttataagtatcgcca

SEQ ID NO: 76475 - DNA, 25 bp, Probe sequence
gtgtcgagattttataagtatcgcc

SEQ ID NO: 76476 - DNA, 25 bp, Probe sequence
agtgtcgagattttataagtatcgc

SEQ ID NO: 76477 - DNA, 25 bp, Probe sequence
gaaaatctcgacactataccatttt

SEQ ID NO: 76478 - DNA, 25 bp, Probe sequence
tagtgtcgagattttataagtatcg

SEQ ID NO: 76479 - DNA, 25 bp, Probe sequence
tggtatagtgtcgagattttcttgc

SEQ ID NO: 76480 - DNA, 25 bp, Probe sequence
atggtatagtgtcgagattttcttg

SEQ ID NO: 76481 - DNA, 25 bp, Probe sequence
aatggtatagtgtcgagattttctt

SEQ ID NO: 76482 - DNA, 25 bp, Probe sequence
aaatggtatagtgtcgagattttct

SEQ ID NO: 76483 - DNA, 25 bp, Probe sequence
tggcgatacttataaaatctcgaca

SEQ ID NO: 76484 - DNA, 25 bp, Probe sequence
ggcgatacttataaaatctcgacac

SEQ ID NO: 76485 - DNA, 25 bp, Probe sequence
gcgatacttataaaatctcgacact

SEQ ID NO: 76486 - DNA, 25 bp, Probe sequence
aaaatggtatagtgtcgagattttc

SEQ ID NO: 76487 - DNA, 25 bp, Probe sequence
cgatacttataaaatctcgacacta

SEQ ID NO: 76488 - DNA, 25 bp, Probe sequence
gctacctgaatcgtctacacttaat

SEQ ID NO: 76489 - DNA, 25 bp, Probe sequence
cctgaatcgtctacacttaattgga

SEQ ID NO: 76490 - DNA, 25 bp, Probe sequence
acctgaatcgtctacacttaattgg

SEQ ID NO: 76491 - DNA, 25 bp, Probe sequence
tacctgaatcgtctacacttaattg

SEQ ID NO: 76492 - DNA, 25 bp, Probe sequence
ctacctgaatcgtctacacttaatt

SEQ ID NO: 76493 - DNA, 25 bp, Probe sequence
ctgaatcgtctacacttaattggac

SEQ ID NO: 76494 - DNA, 25 bp, Probe sequence
cgctacctgaatcgtctacacttaa

SEQ ID NO: 76495 - DNA, 25 bp, Probe sequence
ggtatcaattctttctccagttcct

SEQ ID NO: 76496 - DNA, 25 bp, Probe sequence
cgtctacacttaattggacaaatca

SEQ ID NO: 76497 - DNA, 25 bp, Probe sequence
attaagtgtagacgattcaggtagc

SEQ ID NO: 76498 - DNA, 25 bp, Probe sequence
tccaattaagtgtagacgattcagg

SEQ ID NO: 76499 - DNA, 25 bp, Probe sequence
ccaattaagtgtagacgattcaggt

SEQ ID NO: 76500 - DNA, 25 bp, Probe sequence
caattaagtgtagacgattcaggta

SEQ ID NO: 76501 - DNA, 25 bp, Probe sequence
aattaagtgtagacgattcaggtag

SEQ ID NO: 76502 - DNA, 25 bp, Probe sequence
gtccaattaagtgtagacgattcag

SEQ ID NO: 76503 - DNA, 25 bp, Probe sequence
ttaagtgtagacgattcaggtagcg

SEQ ID NO: 76504 - DNA, 25 bp, Probe sequence
aggaactggagaaagaattgatacc

SEQ ID NO: 76505 - DNA, 25 bp, Probe sequence
caggaactggagaaagaattgatac

SEQ ID NO: 76506 - DNA, 25 bp, Probe sequence
cacttttcaaaatacacgggtcata

SEQ ID NO: 76507 - DNA, 25 bp, Probe sequence
ttttcaaaatacacgggtcatatcc

SEQ ID NO: 76508 - DNA, 25 bp, Probe sequence
tgcttaccacttttcaaaatacacg

SEQ ID NO: 76509 - DNA, 25 bp, Probe sequence
cttaccacttttcaaaatacacggg

SEQ ID NO: 76510 - DNA, 25 bp, Probe sequence
acttttcaaaatacacgggtcatat

SEQ ID NO: 76511 - DNA, 25 bp, Probe sequence
gcttaccacttttcaaaatacacgg

SEQ ID NO: 76512 - DNA, 25 bp, Probe sequence
cttttcaaaatacacgggtcatatc

SEQ ID NO: 76513 - DNA, 25 bp, Probe sequence
aaacattgcttaccacttttcaaaa

SEQ ID NO: 76514 - DNA, 25 bp, Probe sequence
ttgcttaccacttttcaaaatacac

SEQ ID NO: 76515 - DNA, 25 bp, Probe sequence
tatgacccgtgtattttgaaaagtg

SEQ ID NO: 76516 - DNA, 25 bp, Probe sequence
ggatatgacccgtgtattttgaaaa

SEQ ID NO: 76517 - DNA, 25 bp, Probe sequence
cgtgtattttgaaaagtggtaagca

SEQ ID NO: 76518 - DNA, 25 bp, Probe sequence
cccgtgtattttgaaaagtggtaag

SEQ ID NO: 76519 - DNA, 25 bp, Probe sequence
atatgacccgtgtattttgaaaagt

SEQ ID NO: 76520 - DNA, 25 bp, Probe sequence
ccgtgtattttgaaaagtggtaagc

SEQ ID NO: 76521 - DNA, 25 bp, Probe sequence
gatatgacccgtgtattttgaaaag

SEQ ID NO: 76522 - DNA, 25 bp, Probe sequence
ttttgaaaagtggtaagcaatgttt

SEQ ID NO: 76523 - DNA, 25 bp, Probe sequence
gtgtattttgaaaagtggtaagcaa

SEQ ID NO: 76524 - DNA, 25 bp, Probe sequence
ttcttattgattgcttctactgaca

SEQ ID NO: 76525 - DNA, 25 bp, Probe sequence
tcttattgattgcttctactgacaa

SEQ ID NO: 76526 - DNA, 25 bp, Probe sequence
tctactgacaatagattagatcggc

SEQ ID NO: 76527 - DNA, 25 bp, Probe sequence
agcaaatctcaaatatctggaacct

SEQ ID NO: 76528 - DNA, 25 bp, Probe sequence
gcaaatctcaaatatctggaaccta

SEQ ID NO: 76529 - DNA, 25 bp, Probe sequence
aaccgtcattatatttctggattca

SEQ ID NO: 76530 - DNA, 25 bp, Probe sequence
cagcaaatctcaaatatctggaacc

SEQ ID NO: 76531 - DNA, 25 bp, Probe sequence
acagcaaatctcaaatatctggaac

SEQ ID NO: 76532 - DNA, 25 bp, Probe sequence
tgattgcttctactgacaatagatt

SEQ ID NO: 76533 - DNA, 25 bp, Probe sequence
tgtcagtagaagcaatcaataagaa

SEQ ID NO: 76534 - DNA, 25 bp, Probe sequence
ttgtcagtagaagcaatcaataaga

SEQ ID NO: 76535 - DNA, 25 bp, Probe sequence
gccgatctaatctattgtcagtaga

SEQ ID NO: 76536 - DNA, 25 bp, Probe sequence
aggttccagatatttgagatttgct

SEQ ID NO: 76537 - DNA, 25 bp, Probe sequence
taggttccagatatttgagatttgc

SEQ ID NO: 76538 - DNA, 25 bp, Probe sequence
tgaatccagaaatataatgacggtt

SEQ ID NO: 76539 - DNA, 25 bp, Probe sequence
ggttccagatatttgagatttgctg

SEQ ID NO: 76540 - DNA, 25 bp, Probe sequence
gttccagatatttgagatttgctgt

SEQ ID NO: 76541 - DNA, 25 bp, Probe sequence
tctattgtcagtagaagcaatcaat

SEQ ID NO: 76542 - DNA, 25 bp, Probe sequence
ccttccaattgtgatgtatagatgt

SEQ ID NO: 76543 - DNA, 25 bp, Probe sequence
tccttccaattgtgatgtatagatg

SEQ ID NO: 76544 - DNA, 25 bp, Probe sequence
ttccaattgtgatgtatagatgtgt

SEQ ID NO: 76545 - DNA, 25 bp, Probe sequence
cttccaattgtgatgtatagatgtg

SEQ ID NO: 76546 - DNA, 25 bp, Probe sequence
ttccttccaattgtgatgtatagat

SEQ ID NO: 76547 - DNA, 25 bp, Probe sequence
ttgtaatctaatgatagttacgcaa

SEQ ID NO: 76548 - DNA, 25 bp, Probe sequence
tccaattgtgatgtatagatgtgta

SEQ ID NO: 76549 - DNA, 25 bp, Probe sequence
attcatttccttccaattgtgatgt

SEQ ID NO: 76550 - DNA, 25 bp, Probe sequence
ccaattgtgatgtatagatgtgtat

SEQ ID NO: 76551 - DNA, 25 bp, Probe sequence
acatctatacatcacaattggaagg

SEQ ID NO: 76552 - DNA, 25 bp, Probe sequence
catctatacatcacaattggaagga

SEQ ID NO: 76553 - DNA, 25 bp, Probe sequence
acacatctatacatcacaattggaa

SEQ ID NO: 76554 - DNA, 25 bp, Probe sequence
cacatctatacatcacaattggaag

SEQ ID NO: 76555 - DNA, 25 bp, Probe sequence
atctatacatcacaattggaaggaa

SEQ ID NO: 76556 - DNA, 25 bp, Probe sequence
ttgcgtaactatcattagattacaa

SEQ ID NO: 76557 - DNA, 25 bp, Probe sequence
tacacatctatacatcacaattgga

SEQ ID NO: 76558 - DNA, 25 bp, Probe sequence
acatcacaattggaaggaaatgaat

SEQ ID NO: 76559 - DNA, 25 bp, Probe sequence
tacatcacaattggaaggaaatgaa

SEQ ID NO: 76560 - DNA, 25 bp, Probe sequence
ccttgaaccactatgattagaacac

SEQ ID NO: 76561 - DNA, 25 bp, Probe sequence
cttgaaccactatgattagaacaca

SEQ ID NO: 76562 - DNA, 25 bp, Probe sequence
aattaaggctcttgagttatcgtcc

SEQ ID NO: 76563 - DNA, 25 bp, Probe sequence
ttagaacacaatcgtctggttatcg

SEQ ID NO: 76564 - DNA, 25 bp, Probe sequence
attagaacacaatcgtctggttatc

SEQ ID NO: 76565 - DNA, 25 bp, Probe sequence
tgaaccactatgattagaacacaat

SEQ ID NO: 76566 - DNA, 25 bp, Probe sequence
ttgaaccactatgattagaacacaa

SEQ ID NO: 76567 - DNA, 25 bp, Probe sequence
tagaacacaatcgtctggttatcgt

SEQ ID NO: 76568 - DNA, 25 bp, Probe sequence
tgattagaacacaatcgtctggtta

SEQ ID NO: 76569 - DNA, 25 bp, Probe sequence
gtgttctaatcatagtggttcaagg

SEQ ID NO: 76570 - DNA, 25 bp, Probe sequence
tgtgttctaatcatagtggttcaag

SEQ ID NO: 76571 - DNA, 25 bp, Probe sequence
ggacgataactcaagagccttaatt

SEQ ID NO: 76572 - DNA, 25 bp, Probe sequence
cgataaccagacgattgtgttctaa

SEQ ID NO: 76573 - DNA, 25 bp, Probe sequence
gataaccagacgattgtgttctaat

SEQ ID NO: 76574 - DNA, 25 bp, Probe sequence
attgtgttctaatcatagtggttca

SEQ ID NO: 76575 - DNA, 25 bp, Probe sequence
ttgtgttctaatcatagtggttcaa

SEQ ID NO: 76576 - DNA, 25 bp, Probe sequence
acgataaccagacgattgtgttcta

SEQ ID NO: 76577 - DNA, 25 bp, Probe sequence
acgattgtgttctaatcatagtggt

SEQ ID NO: 76578 - DNA, 25 bp, Probe sequence
ggaaagtccatttatactctacaca

SEQ ID NO: 76579 - DNA, 25 bp, Probe sequence
aggaaagtccatttatactctacac

SEQ ID NO: 76580 - DNA, 25 bp, Probe sequence
gtccatttatactctacacatttca

SEQ ID NO: 76581 - DNA, 25 bp, Probe sequence
tacacatttcatattccccacacaa

SEQ ID NO: 76582 - DNA, 25 bp, Probe sequence
ctctacacatttcatattccccaca

SEQ ID NO: 76583 - DNA, 25 bp, Probe sequence
actctacacatttcatattccccac

SEQ ID NO: 76584 - DNA, 25 bp, Probe sequence
tctacacatttcatattccccacac

SEQ ID NO: 76585 - DNA, 25 bp, Probe sequence
cacatttcatattccccacacaaac

SEQ ID NO: 76586 - DNA, 25 bp, Probe sequence
ctacacatttcatattccccacaca

SEQ ID NO: 76587 - DNA, 25 bp, Probe sequence
tgtgtagagtataaatggactttcc

SEQ ID NO: 76588 - DNA, 25 bp, Probe sequence
gtgtagagtataaatggactttcct

SEQ ID NO: 76589 - DNA, 25 bp, Probe sequence
tgaaatgtgtagagtataaatggac

SEQ ID NO: 76590 - DNA, 25 bp, Probe sequence
gtggggaatatgaaatgtgtagagt

SEQ ID NO: 76591 - DNA, 25 bp, Probe sequence
tgtggggaatatgaaatgtgtagag

SEQ ID NO: 76592 - DNA, 25 bp, Probe sequence
ttgtgtggggaatatgaaatgtgta

SEQ ID NO: 76593 - DNA, 25 bp, Probe sequence
gtgtggggaatatgaaatgtgtaga

SEQ ID NO: 76594 - DNA, 25 bp, Probe sequence
tgtgtggggaatatgaaatgtgtag

SEQ ID NO: 76595 - DNA, 25 bp, Probe sequence
gtttgtgtggggaatatgaaatgtg

SEQ ID NO: 76596 - DNA, 25 bp, Probe sequence
gcatatactgtcttaaggcatgata

SEQ ID NO: 76597 - DNA, 25 bp, Probe sequence
atagttgcatatactgtcttaaggc

SEQ ID NO: 76598 - DNA, 25 bp, Probe sequence
tttgatagtattgggtttcctctaa

SEQ ID NO: 76599 - DNA, 25 bp, Probe sequence
ttgatagtattgggtttcctctaat

SEQ ID NO: 76600 - DNA, 25 bp, Probe sequence
tgatagtattgggtttcctctaatt

SEQ ID NO: 76601 - DNA, 25 bp, Probe sequence
actttaggatttcgtatagttgcat

SEQ ID NO: 76602 - DNA, 25 bp, Probe sequence
tgcatatactgtcttaaggcatgat

SEQ ID NO: 76603 - DNA, 25 bp, Probe sequence
ttgcatatactgtcttaaggcatga

SEQ ID NO: 76604 - DNA, 25 bp, Probe sequence
gttgcatatactgtcttaaggcatg

SEQ ID NO: 76605 - DNA, 25 bp, Probe sequence
tatcatgccttaagacagtatatgc

SEQ ID NO: 76606 - DNA, 25 bp, Probe sequence
gccttaagacagtatatgcaactat

SEQ ID NO: 76607 - DNA, 25 bp, Probe sequence
ttagaggaaacccaatactatcaaa

SEQ ID NO: 76608 - DNA, 25 bp, Probe sequence
attagaggaaacccaatactatcaa

SEQ ID NO: 76609 - DNA, 25 bp, Probe sequence
aattagaggaaacccaatactatca

SEQ ID NO: 76610 - DNA, 25 bp, Probe sequence
atgcaactatacgaaatcctaaagt

SEQ ID NO: 76611 - DNA, 25 bp, Probe sequence
atgccttaagacagtatatgcaact

SEQ ID NO: 76612 - DNA, 25 bp, Probe sequence
catgccttaagacagtatatgcaac

SEQ ID NO: 76613 - DNA, 25 bp, Probe sequence
tcatgccttaagacagtatatgcaa

SEQ ID NO: 76614 - DNA, 25 bp, Probe sequence
caactcttgctaaaccatcttcttt

SEQ ID NO: 76615 - DNA, 25 bp, Probe sequence
cgcttatcagacactcttgctcatt

SEQ ID NO: 76616 - DNA, 25 bp, Probe sequence
aattcttagataagacgactcgctt

SEQ ID NO: 76617 - DNA, 25 bp, Probe sequence
attcttagataagacgactcgctta

SEQ ID NO: 76618 - DNA, 25 bp, Probe sequence
taattcttagataagacgactcgct

SEQ ID NO: 76619 - DNA, 25 bp, Probe sequence
ttaattcttagataagacgactcgc

SEQ ID NO: 76620 - DNA, 25 bp, Probe sequence
taagacgactcgcttatcagacact

SEQ ID NO: 76621 - DNA, 25 bp, Probe sequence
tcgcttatcagacactcttgctcat

SEQ ID NO: 76622 - DNA, 25 bp, Probe sequence
ttcttagataagacgactcgcttat

SEQ ID NO: 76623 - DNA, 25 bp, Probe sequence
aaagaagatggtttagcaagagttg

SEQ ID NO: 76624 - DNA, 25 bp, Probe sequence
aatgagcaagagtgtctgataagcg

SEQ ID NO: 76625 - DNA, 25 bp, Probe sequence
aagcgagtcgtcttatctaagaatt

SEQ ID NO: 76626 - DNA, 25 bp, Probe sequence
agcgagtcgtcttatctaagaatta

SEQ ID NO: 76627 - DNA, 25 bp, Probe sequence
taagcgagtcgtcttatctaagaat

SEQ ID NO: 76628 - DNA, 25 bp, Probe sequence
gcgagtcgtcttatctaagaattaa

SEQ ID NO: 76629 - DNA, 25 bp, Probe sequence
agtgtctgataagcgagtcgtctta

SEQ ID NO: 76630 - DNA, 25 bp, Probe sequence
atgagcaagagtgtctgataagcga

SEQ ID NO: 76631 - DNA, 25 bp, Probe sequence
ataagcgagtcgtcttatctaagaa

SEQ ID NO: 76632 - DNA, 25 bp, Probe sequence
actcaccacacagtgtattatatta

SEQ ID NO: 76633 - DNA, 25 bp, Probe sequence
tactcaccacacagtgtattatatt

SEQ ID NO: 76634 - DNA, 25 bp, Probe sequence
atactcaccacacagtgtattatat

SEQ ID NO: 76635 - DNA, 25 bp, Probe sequence
acagtgtattatattaagaacagca

SEQ ID NO: 76636 - DNA, 25 bp, Probe sequence
cacagtgtattatattaagaacagc

SEQ ID NO: 76637 - DNA, 25 bp, Probe sequence
caccacacagtgtattatattaaga

SEQ ID NO: 76638 - DNA, 25 bp, Probe sequence
tcaccacacagtgtattatattaag

SEQ ID NO: 76639 - DNA, 25 bp, Probe sequence
ctcaccacacagtgtattatattaa

SEQ ID NO: 76640 - DNA, 25 bp, Probe sequence
accacacagtgtattatattaagaa

SEQ ID NO: 76641 - DNA, 25 bp, Probe sequence
aatataatacactgtgtggtgagta

SEQ ID NO: 76642 - DNA, 25 bp, Probe sequence
taatataatacactgtgtggtgagt

SEQ ID NO: 76643 - DNA, 25 bp, Probe sequence
atataatacactgtgtggtgagtat

SEQ ID NO: 76644 - DNA, 25 bp, Probe sequence
tgctgttcttaatataatacactgt

SEQ ID NO: 76645 - DNA, 25 bp, Probe sequence
gctgttcttaatataatacactgtg

SEQ ID NO: 76646 - DNA, 25 bp, Probe sequence
ttaatataatacactgtgtggtgag

SEQ ID NO: 76647 - DNA, 25 bp, Probe sequence
cttaatataatacactgtgtggtga

SEQ ID NO: 76648 - DNA, 25 bp, Probe sequence
tcttaatataatacactgtgtggtg

SEQ ID NO: 76649 - DNA, 25 bp, Probe sequence
ttcttaatataatacactgtgtggt

SEQ ID NO: 76650 - DNA, 25 bp, Probe sequence
gcttccttgaaacatcactatcttc

SEQ ID NO: 76651 - DNA, 25 bp, Probe sequence
aaattcctagcttccttgaaacatc

SEQ ID NO: 76652 - DNA, 25 bp, Probe sequence
agcttccttgaaacatcactatctt

SEQ ID NO: 76653 - DNA, 25 bp, Probe sequence
cctagcttccttgaaacatcactat

SEQ ID NO: 76654 - DNA, 25 bp, Probe sequence
aattcctagcttccttgaaacatca

SEQ ID NO: 76655 - DNA, 25 bp, Probe sequence
tagcttccttgaaacatcactatct

SEQ ID NO: 76656 - DNA, 25 bp, Probe sequence
ctagcttccttgaaacatcactatc

SEQ ID NO: 76657 - DNA, 25 bp, Probe sequence
attcctagcttccttgaaacatcac

SEQ ID NO: 76658 - DNA, 25 bp, Probe sequence
tcctagcttccttgaaacatcacta

SEQ ID NO: 76659 - DNA, 25 bp, Probe sequence
gaagatagtgatgtttcaaggaagc

SEQ ID NO: 76660 - DNA, 25 bp, Probe sequence
gatgtttcaaggaagctaggaattt

SEQ ID NO: 76661 - DNA, 25 bp, Probe sequence
atagtgatgtttcaaggaagctagg

SEQ ID NO: 76662 - DNA, 25 bp, Probe sequence
aagatagtgatgtttcaaggaagct

SEQ ID NO: 76663 - DNA, 25 bp, Probe sequence
tgatgtttcaaggaagctaggaatt

SEQ ID NO: 76664 - DNA, 25 bp, Probe sequence
agatagtgatgtttcaaggaagcta

SEQ ID NO: 76665 - DNA, 25 bp, Probe sequence
gatagtgatgtttcaaggaagctag

SEQ ID NO: 76666 - DNA, 25 bp, Probe sequence
gtgatgtttcaaggaagctaggaat

SEQ ID NO: 76667 - DNA, 25 bp, Probe sequence
tagtgatgtttcaaggaagctagga

SEQ ID NO: 76668 - DNA, 25 bp, Probe sequence
attatatcggttgtctgtgaatcgt

SEQ ID NO: 76669 - DNA, 25 bp, Probe sequence
ttatatcggttgtctgtgaatcgtc

SEQ ID NO: 76670 - DNA, 25 bp, Probe sequence
aattatatcggttgtctgtgaatcg

SEQ ID NO: 76671 - DNA, 25 bp, Probe sequence
atatcggttgtctgtgaatcgtcta

SEQ ID NO: 76672 - DNA, 25 bp, Probe sequence
tatatcggttgtctgtgaatcgtct

SEQ ID NO: 76673 - DNA, 25 bp, Probe sequence
tatcggttgtctgtgaatcgtctac

SEQ ID NO: 76674 - DNA, 25 bp, Probe sequence
gtgaatcgtctacatttagttggat

SEQ ID NO: 76675 - DNA, 25 bp, Probe sequence
actacacttgaatgatgcaatatcc

SEQ ID NO: 76676 - DNA, 25 bp, Probe sequence
tgaatcgtctacatttagttggatg

SEQ ID NO: 76677 - DNA, 25 bp, Probe sequence
acgattcacagacaaccgatataat

SEQ ID NO: 76678 - DNA, 25 bp, Probe sequence
gacgattcacagacaaccgatataa

SEQ ID NO: 76679 - DNA, 25 bp, Probe sequence
cgattcacagacaaccgatataatt

SEQ ID NO: 76680 - DNA, 25 bp, Probe sequence
agacgattcacagacaaccgatata

SEQ ID NO: 76681 - DNA, 25 bp, Probe sequence
tagacgattcacagacaaccgatat

SEQ ID NO: 76682 - DNA, 25 bp, Probe sequence
gtagacgattcacagacaaccgata

SEQ ID NO: 76683 - DNA, 25 bp, Probe sequence
atccaactaaatgtagacgattcac

SEQ ID NO: 76684 - DNA, 25 bp, Probe sequence
ggatattgcatcattcaagtgtagt

SEQ ID NO: 76685 - DNA, 25 bp, Probe sequence
catccaactaaatgtagacgattca

SEQ ID NO: 76686 - DNA, 25 bp, Probe sequence
catactcgtgcttcactattattcg

SEQ ID NO: 76687 - DNA, 25 bp, Probe sequence
taagatacacgttcatagcttcagg

SEQ ID NO: 76688 - DNA, 25 bp, Probe sequence
cataagatacacgttcatagcttca

SEQ ID NO: 76689 - DNA, 25 bp, Probe sequence
ataagatacacgttcatagcttcag

SEQ ID NO: 76690 - DNA, 25 bp, Probe sequence
tcataagatacacgttcatagcttc

SEQ ID NO: 76691 - DNA, 25 bp, Probe sequence
cttcataagatacacgttcatagct

SEQ ID NO: 76692 - DNA, 25 bp, Probe sequence
atacacgttcatagcttcaggcata

SEQ ID NO: 76693 - DNA, 25 bp, Probe sequence
agtgatataaagacgactatggaca

SEQ ID NO: 76694 - DNA, 25 bp, Probe sequence
ttcataagatacacgttcatagctt

SEQ ID NO: 76695 - DNA, 25 bp, Probe sequence
cgaataatagtgaagcacgagtatg

SEQ ID NO: 76696 - DNA, 25 bp, Probe sequence
cctgaagctatgaacgtgtatctta

SEQ ID NO: 76697 - DNA, 25 bp, Probe sequence
tgaagctatgaacgtgtatcttatg

SEQ ID NO: 76698 - DNA, 25 bp, Probe sequence
agctatgaacgtgtatcttatgaag

SEQ ID NO: 76699 - DNA, 25 bp, Probe sequence
gaagctatgaacgtgtatcttatga

SEQ ID NO: 76700 - DNA, 25 bp, Probe sequence
ctgaagctatgaacgtgtatcttat

SEQ ID NO: 76701 - DNA, 25 bp, Probe sequence
tatgcctgaagctatgaacgtgtat

SEQ ID NO: 76702 - DNA, 25 bp, Probe sequence
tgtccatagtcgtctttatatcact

SEQ ID NO: 76703 - DNA, 25 bp, Probe sequence
aagctatgaacgtgtatcttatgaa

SEQ ID NO: 76704 - DNA, 25 bp, Probe sequence
cgacataatatcgaggtgttttgta

SEQ ID NO: 76705 - DNA, 25 bp, Probe sequence
gacataatatcgaggtgttttgtat

SEQ ID NO: 76706 - DNA, 25 bp, Probe sequence
tatcgaggtgttttgtatatatcgt

SEQ ID NO: 76707 - DNA, 25 bp, Probe sequence
taattttaaaacacacaaacgcaaa

SEQ ID NO: 76708 - DNA, 25 bp, Probe sequence
ataattttaaaacacacaaacgcaa

SEQ ID NO: 76709 - DNA, 25 bp, Probe sequence
aataattttaaaacacacaaacgca

SEQ ID NO: 76710 - DNA, 25 bp, Probe sequence
aattttaaaacacacaaacgcaaaa

SEQ ID NO: 76711 - DNA, 25 bp, Probe sequence
acataatatcgaggtgttttgtata

SEQ ID NO: 76712 - DNA, 25 bp, Probe sequence
atatcgaggtgttttgtatatatcg

SEQ ID NO: 76713 - DNA, 25 bp, Probe sequence
tacaaaacacctcgatattatgtcg

SEQ ID NO: 76714 - DNA, 25 bp, Probe sequence
atacaaaacacctcgatattatgtc

SEQ ID NO: 76715 - DNA, 25 bp, Probe sequence
acgatatatacaaaacacctcgata

SEQ ID NO: 76716 - DNA, 25 bp, Probe sequence
tttgcgtttgtgtgttttaaaatta

SEQ ID NO: 76717 - DNA, 25 bp, Probe sequence
tgcgtttgtgtgttttaaaattatt

SEQ ID NO: 76718 - DNA, 25 bp, Probe sequence
ttgcgtttgtgtgttttaaaattat

SEQ ID NO: 76719 - DNA, 25 bp, Probe sequence
ttttgcgtttgtgtgttttaaaatt

SEQ ID NO: 76720 - DNA, 25 bp, Probe sequence
tatacaaaacacctcgatattatgt

SEQ ID NO: 76721 - DNA, 25 bp, Probe sequence
cgatatatacaaaacacctcgatat

SEQ ID NO: 76722 - DNA, 25 bp, Probe sequence
ttaactgttgttcgtttctgcttat

SEQ ID NO: 76723 - DNA, 25 bp, Probe sequence
aactgttgttcgtttctgcttatat

SEQ ID NO: 76724 - DNA, 25 bp, Probe sequence
taactgttgttcgtttctgcttata

SEQ ID NO: 76725 - DNA, 25 bp, Probe sequence
actgttgttcgtttctgcttatata

SEQ ID NO: 76726 - DNA, 25 bp, Probe sequence
tgttgttcgtttctgcttatatatc

SEQ ID NO: 76727 - DNA, 25 bp, Probe sequence
ctgttgttcgtttctgcttatatat

SEQ ID NO: 76728 - DNA, 25 bp, Probe sequence
gttcgtttctgcttatatatcttgt

SEQ ID NO: 76729 - DNA, 25 bp, Probe sequence
tgttcgtttctgcttatatatcttg

SEQ ID NO: 76730 - DNA, 25 bp, Probe sequence
gttgttcgtttctgcttatatatct

SEQ ID NO: 76731 - DNA, 25 bp, Probe sequence
ataagcagaaacgaacaacagttaa

SEQ ID NO: 76732 - DNA, 25 bp, Probe sequence
atataagcagaaacgaacaacagtt

SEQ ID NO: 76733 - DNA, 25 bp, Probe sequence
tataagcagaaacgaacaacagtta

SEQ ID NO: 76734 - DNA, 25 bp, Probe sequence
tatataagcagaaacgaacaacagt

SEQ ID NO: 76735 - DNA, 25 bp, Probe sequence
atatataagcagaaacgaacaacag

SEQ ID NO: 76736 - DNA, 25 bp, Probe sequence
gatatataagcagaaacgaacaaca

SEQ ID NO: 76737 - DNA, 25 bp, Probe sequence
agatatataagcagaaacgaacaac

SEQ ID NO: 76738 - DNA, 25 bp, Probe sequence
caagatatataagcagaaacgaaca

SEQ ID NO: 76739 - DNA, 25 bp, Probe sequence
acaagatatataagcagaaacgaac

SEQ ID NO: 76740 - DNA, 25 bp, Probe sequence
taagtttgttgagttcacgctttaa

SEQ ID NO: 76741 - DNA, 25 bp, Probe sequence
ataagtttgttgagttcacgcttta

SEQ ID NO: 76742 - DNA, 25 bp, Probe sequence
cataagtttgttgagttcacgcttt

SEQ ID NO: 76743 - DNA, 25 bp, Probe sequence
tggttcaacgataatactttcactt

SEQ ID NO: 76744 - DNA, 25 bp, Probe sequence
cccatcataagtttgttgagttcac

SEQ ID NO: 76745 - DNA, 25 bp, Probe sequence
ccatcataagtttgttgagttcacg

SEQ ID NO: 76746 - DNA, 25 bp, Probe sequence
ggttcaacgataatactttcacttc

SEQ ID NO: 76747 - DNA, 25 bp, Probe sequence
ttggttcaacgataatactttcact

SEQ ID NO: 76748 - DNA, 25 bp, Probe sequence
atcataagtttgttgagttcacgct

SEQ ID NO: 76749 - DNA, 25 bp, Probe sequence
ttaaagcgtgaactcaacaaactta

SEQ ID NO: 76750 - DNA, 25 bp, Probe sequence
taaagcgtgaactcaacaaacttat

SEQ ID NO: 76751 - DNA, 25 bp, Probe sequence
aaagcgtgaactcaacaaacttatg

SEQ ID NO: 76752 - DNA, 25 bp, Probe sequence
aagtgaaagtattatcgttgaacca

SEQ ID NO: 76753 - DNA, 25 bp, Probe sequence
gtgaactcaacaaacttatgatggg

SEQ ID NO: 76754 - DNA, 25 bp, Probe sequence
cgtgaactcaacaaacttatgatgg

SEQ ID NO: 76755 - DNA, 25 bp, Probe sequence
gaagtgaaagtattatcgttgaacc

SEQ ID NO: 76756 - DNA, 25 bp, Probe sequence
agtgaaagtattatcgttgaaccaa

SEQ ID NO: 76757 - DNA, 25 bp, Probe sequence
gcgtgaactcaacaaacttatgatg

SEQ ID NO: 76758 - DNA, 25 bp, Probe sequence
agtgacctgtaacaataccatcata

SEQ ID NO: 76759 - DNA, 25 bp, Probe sequence
gtgacctgtaacaataccatcataa

SEQ ID NO: 76760 - DNA, 25 bp, Probe sequence
cagtgacctgtaacaataccatcat

SEQ ID NO: 76761 - DNA, 25 bp, Probe sequence
ctcagtgacctgtaacaataccatc

SEQ ID NO: 76762 - DNA, 25 bp, Probe sequence
tcagtgacctgtaacaataccatca

SEQ ID NO: 76763 - DNA, 25 bp, Probe sequence
gctcagtgacctgtaacaataccat

SEQ ID NO: 76764 - DNA, 25 bp, Probe sequence
ttgctcagtgacctgtaacaatacc

SEQ ID NO: 76765 - DNA, 25 bp, Probe sequence
tttgctcagtgacctgtaacaatac

SEQ ID NO: 76766 - DNA, 25 bp, Probe sequence
gtttgctcagtgacctgtaacaata

SEQ ID NO: 76767 - DNA, 25 bp, Probe sequence
tatgatggtattgttacaggtcact

SEQ ID NO: 76768 - DNA, 25 bp, Probe sequence
ttatgatggtattgttacaggtcac

SEQ ID NO: 76769 - DNA, 25 bp, Probe sequence
atgatggtattgttacaggtcactg

SEQ ID NO: 76770 - DNA, 25 bp, Probe sequence
gatggtattgttacaggtcactgag

SEQ ID NO: 76771 - DNA, 25 bp, Probe sequence
tgatggtattgttacaggtcactga

SEQ ID NO: 76772 - DNA, 25 bp, Probe sequence
atggtattgttacaggtcactgagc

SEQ ID NO: 76773 - DNA, 25 bp, Probe sequence
ggtattgttacaggtcactgagcaa

SEQ ID NO: 76774 - DNA, 25 bp, Probe sequence
tattgttacaggtcactgagcaaac

SEQ ID NO: 76775 - DNA, 25 bp, Probe sequence
gtattgttacaggtcactgagcaaa

SEQ ID NO: 76776 - DNA, 25 bp, Probe sequence
atcgttaattgccactctcatctat

SEQ ID NO: 76777 - DNA, 25 bp, Probe sequence
ttatcgttaattgccactctcatct

SEQ ID NO: 76778 - DNA, 25 bp, Probe sequence
cgttaattgccactctcatctatct

SEQ ID NO: 76779 - DNA, 25 bp, Probe sequence
tcgttaattgccactctcatctatc

SEQ ID NO: 76780 - DNA, 25 bp, Probe sequence
tatcgttaattgccactctcatcta

SEQ ID NO: 76781 - DNA, 25 bp, Probe sequence
attatcgttaattgccactctcatc

SEQ ID NO: 76782 - DNA, 25 bp, Probe sequence
gttaattgccactctcatctatcta

SEQ ID NO: 76783 - DNA, 25 bp, Probe sequence
ttgccactctcatctatctaatatg

SEQ ID NO: 76784 - DNA, 25 bp, Probe sequence
gcaatagtaaggtaatcgtcaatag

SEQ ID NO: 76785 - DNA, 25 bp, Probe sequence
agatgagagtggcaattaacgataa

SEQ ID NO: 76786 - DNA, 25 bp, Probe sequence
atagatgagagtggcaattaacgat

SEQ ID NO: 76787 - DNA, 25 bp, Probe sequence
gatagatgagagtggcaattaacga

SEQ ID NO: 76788 - DNA, 25 bp, Probe sequence
agatagatgagagtggcaattaacg

SEQ ID NO: 76789 - DNA, 25 bp, Probe sequence
tagatgagagtggcaattaacgata

SEQ ID NO: 76790 - DNA, 25 bp, Probe sequence
gatgagagtggcaattaacgataat

SEQ ID NO: 76791 - DNA, 25 bp, Probe sequence
tagatagatgagagtggcaattaac

SEQ ID NO: 76792 - DNA, 25 bp, Probe sequence
catattagatagatgagagtggcaa

SEQ ID NO: 76793 - DNA, 25 bp, Probe sequence
ctattgacgattaccttactattgc

SEQ ID NO: 76794 - DNA, 25 bp, Probe sequence
attagtcataagaacggtggtgaat

SEQ ID NO: 76795 - DNA, 25 bp, Probe sequence
aattagtcataagaacggtggtgaa

SEQ ID NO: 76796 - DNA, 25 bp, Probe sequence
ttagtcataagaacggtggtgaatg

SEQ ID NO: 76797 - DNA, 25 bp, Probe sequence
ataattagtcataagaacggtggtg

SEQ ID NO: 76798 - DNA, 25 bp, Probe sequence
taattagtcataagaacggtggtga

SEQ ID NO: 76799 - DNA, 25 bp, Probe sequence
tttccctccttattcgtctacattt

SEQ ID NO: 76800 - DNA, 25 bp, Probe sequence
ccctccttattcgtctacatttagt

SEQ ID NO: 76801 - DNA, 25 bp, Probe sequence
tccctccttattcgtctacatttag

SEQ ID NO: 76802 - DNA, 25 bp, Probe sequence
ttccctccttattcgtctacattta

SEQ ID NO: 76803 - DNA, 25 bp, Probe sequence
attcaccaccgttcttatgactaat

SEQ ID NO: 76804 - DNA, 25 bp, Probe sequence
ttcaccaccgttcttatgactaatt

SEQ ID NO: 76805 - DNA, 25 bp, Probe sequence
cattcaccaccgttcttatgactaa

SEQ ID NO: 76806 - DNA, 25 bp, Probe sequence
caccaccgttcttatgactaattat

SEQ ID NO: 76807 - DNA, 25 bp, Probe sequence
tcaccaccgttcttatgactaatta

SEQ ID NO: 76808 - DNA, 25 bp, Probe sequence
aaatgtagacgaataaggagggaaa

SEQ ID NO: 76809 - DNA, 25 bp, Probe sequence
actaaatgtagacgaataaggaggg

SEQ ID NO: 76810 - DNA, 25 bp, Probe sequence
ctaaatgtagacgaataaggaggga

SEQ ID NO: 76811 - DNA, 25 bp, Probe sequence
taaatgtagacgaataaggagggaa

SEQ ID NO: 76812 - DNA, 25 bp, Probe sequence
attgctttatgttatttcgcttctt

SEQ ID NO: 76813 - DNA, 25 bp, Probe sequence
ttgctttatgttatttcgcttctta

SEQ ID NO: 76814 - DNA, 25 bp, Probe sequence
tgctttatgttatttcgcttcttat

SEQ ID NO: 76815 - DNA, 25 bp, Probe sequence
tattgctttatgttatttcgcttct

SEQ ID NO: 76816 - DNA, 25 bp, Probe sequence
atagaagaaacacgtccaacaattt

SEQ ID NO: 76817 - DNA, 25 bp, Probe sequence
tatagaagaaacacgtccaacaatt

SEQ ID NO: 76818 - DNA, 25 bp, Probe sequence
aatatagaagaaacacgtccaacaa

SEQ ID NO: 76819 - DNA, 25 bp, Probe sequence
atatagaagaaacacgtccaacaat

SEQ ID NO: 76820 - DNA, 25 bp, Probe sequence
atattgctttatgttatttcgcttc

SEQ ID NO: 76821 - DNA, 25 bp, Probe sequence
aagaagcgaaataacataaagcaat

SEQ ID NO: 76822 - DNA, 25 bp, Probe sequence
taagaagcgaaataacataaagcaa

SEQ ID NO: 76823 - DNA, 25 bp, Probe sequence
agaagcgaaataacataaagcaata

SEQ ID NO: 76824 - DNA, 25 bp, Probe sequence
ataagaagcgaaataacataaagca

SEQ ID NO: 76825 - DNA, 25 bp, Probe sequence
aaattgttggacgtgtttcttctat

SEQ ID NO: 76826 - DNA, 25 bp, Probe sequence
ttgttggacgtgtttcttctatatt

SEQ ID NO: 76827 - DNA, 25 bp, Probe sequence
aattgttggacgtgtttcttctata

SEQ ID NO: 76828 - DNA, 25 bp, Probe sequence
attgttggacgtgtttcttctatat

SEQ ID NO: 76829 - DNA, 25 bp, Probe sequence
gaagcgaaataacataaagcaatat

SEQ ID NO: 76830 - DNA, 25 bp, Probe sequence
tttctgattcaactttgttcgattt

SEQ ID NO: 76831 - DNA, 25 bp, Probe sequence
ttctgattcaactttgttcgatttt

SEQ ID NO: 76832 - DNA, 25 bp, Probe sequence
ttttctgattcaactttgttcgatt

SEQ ID NO: 76833 - DNA, 25 bp, Probe sequence
tctgattcaactttgttcgatttta

SEQ ID NO: 76834 - DNA, 25 bp, Probe sequence
ctgattcaactttgttcgattttat

SEQ ID NO: 76835 - DNA, 25 bp, Probe sequence
aaacaataccaaaagcgaacttttc

SEQ ID NO: 76836 - DNA, 25 bp, Probe sequence
aaaacaataccaaaagcgaactttt

SEQ ID NO: 76837 - DNA, 25 bp, Probe sequence
ataccaaaagcgaacttttcgtttt

SEQ ID NO: 76838 - DNA, 25 bp, Probe sequence
aataccaaaagcgaacttttcgttt

SEQ ID NO: 76839 - DNA, 25 bp, Probe sequence
aaatcgaacaaagttgaatcagaaa

SEQ ID NO: 76840 - DNA, 25 bp, Probe sequence
aatcgaacaaagttgaatcagaaaa

SEQ ID NO: 76841 - DNA, 25 bp, Probe sequence
aaaatcgaacaaagttgaatcagaa

SEQ ID NO: 76842 - DNA, 25 bp, Probe sequence
taaaatcgaacaaagttgaatcaga

SEQ ID NO: 76843 - DNA, 25 bp, Probe sequence
ataaaatcgaacaaagttgaatcag

SEQ ID NO: 76844 - DNA, 25 bp, Probe sequence
gaaaagttcgcttttggtattgttt

SEQ ID NO: 76845 - DNA, 25 bp, Probe sequence
aaaagttcgcttttggtattgtttt

SEQ ID NO: 76846 - DNA, 25 bp, Probe sequence
aaacgaaaagttcgcttttggtatt

SEQ ID NO: 76847 - DNA, 25 bp, Probe sequence
aaaacgaaaagttcgcttttggtat

SEQ ID NO: 76848 - DNA, 25 bp, Probe sequence
tacttcattagcatgtattgtgggt

SEQ ID NO: 76849 - DNA, 25 bp, Probe sequence
cttcattagcatgtattgtgggttt

SEQ ID NO: 76850 - DNA, 25 bp, Probe sequence
gtacttcattagcatgtattgtggg

SEQ ID NO: 76851 - DNA, 25 bp, Probe sequence
acttcattagcatgtattgtgggtt

SEQ ID NO: 76852 - DNA, 25 bp, Probe sequence
aataacatgcaagtgtcaattaagg

SEQ ID NO: 76853 - DNA, 25 bp, Probe sequence
acaataacatgcaagtgtcaattaa

SEQ ID NO: 76854 - DNA, 25 bp, Probe sequence
ttacaataacatgcaagtgtcaatt

SEQ ID NO: 76855 - DNA, 25 bp, Probe sequence
agtacttcattagcatgtattgtgg

SEQ ID NO: 76856 - DNA, 25 bp, Probe sequence
caataacatgcaagtgtcaattaag

SEQ ID NO: 76857 - DNA, 25 bp, Probe sequence
acccacaatacatgctaatgaagta

SEQ ID NO: 76858 - DNA, 25 bp, Probe sequence
cccacaatacatgctaatgaagtac

SEQ ID NO: 76859 - DNA, 25 bp, Probe sequence
aaacccacaatacatgctaatgaag

SEQ ID NO: 76860 - DNA, 25 bp, Probe sequence
aacccacaatacatgctaatgaagt

SEQ ID NO: 76861 - DNA, 25 bp, Probe sequence
ccttaattgacacttgcatgttatt

SEQ ID NO: 76862 - DNA, 25 bp, Probe sequence
aattgacacttgcatgttattgtaa

SEQ ID NO: 76863 - DNA, 25 bp, Probe sequence
ttaattgacacttgcatgttattgt

SEQ ID NO: 76864 - DNA, 25 bp, Probe sequence
ccacaatacatgctaatgaagtact

SEQ ID NO: 76865 - DNA, 25 bp, Probe sequence
cttaattgacacttgcatgttattg

SEQ ID NO: 76866 - DNA, 25 bp, Probe sequence
cgttgaatgttcctctatatgtcct

SEQ ID NO: 76867 - DNA, 25 bp, Probe sequence
gttgaatgttcctctatatgtccta

SEQ ID NO: 76868 - DNA, 25 bp, Probe sequence
acgttgaatgttcctctatatgtcc

SEQ ID NO: 76869 - DNA, 25 bp, Probe sequence
ttgaatgttcctctatatgtcctag

SEQ ID NO: 76870 - DNA, 25 bp, Probe sequence
tacgttgaatgttcctctatatgtc

SEQ ID NO: 76871 - DNA, 25 bp, Probe sequence
ttacgttgaatgttcctctatatgt

SEQ ID NO: 76872 - DNA, 25 bp, Probe sequence
tttacgttgaatgttcctctatatg

SEQ ID NO: 76873 - DNA, 25 bp, Probe sequence
tttcgggaattttacgttgaatgtt

SEQ ID NO: 76874 - DNA, 25 bp, Probe sequence
ttttcgggaattttacgttgaatgt

SEQ ID NO: 76875 - DNA, 25 bp, Probe sequence
aggacatatagaggaacattcaacg

SEQ ID NO: 76876 - DNA, 25 bp, Probe sequence
taggacatatagaggaacattcaac

SEQ ID NO: 76877 - DNA, 25 bp, Probe sequence
ggacatatagaggaacattcaacgt

SEQ ID NO: 76878 - DNA, 25 bp, Probe sequence
ctaggacatatagaggaacattcaa

SEQ ID NO: 76879 - DNA, 25 bp, Probe sequence
gacatatagaggaacattcaacgta

SEQ ID NO: 76880 - DNA, 25 bp, Probe sequence
acatatagaggaacattcaacgtaa

SEQ ID NO: 76881 - DNA, 25 bp, Probe sequence
catatagaggaacattcaacgtaaa

SEQ ID NO: 76882 - DNA, 25 bp, Probe sequence
acattcaacgtaaaattcccgaaaa

SEQ ID NO: 76883 - DNA, 25 bp, Probe sequence
aacattcaacgtaaaattcccgaaa

SEQ ID NO: 76884 - DNA, 25 bp, Probe sequence
gggctctcattttctacgaatacta

SEQ ID NO: 76885 - DNA, 25 bp, Probe sequence
ggctctcattttctacgaatactaa

SEQ ID NO: 76886 - DNA, 25 bp, Probe sequence
caactatgtcataaataaaagcccc

SEQ ID NO: 76887 - DNA, 25 bp, Probe sequence
ggggctctcattttctacgaatact

SEQ ID NO: 76888 - DNA, 25 bp, Probe sequence
acaactatgtcataaataaaagccc

SEQ ID NO: 76889 - DNA, 25 bp, Probe sequence
gctctcattttctacgaatactaaa

SEQ ID NO: 76890 - DNA, 25 bp, Probe sequence
caatatgcatttacatgttgtggta

SEQ ID NO: 76891 - DNA, 25 bp, Probe sequence
aacaactatgtcataaataaaagcc

SEQ ID NO: 76892 - DNA, 25 bp, Probe sequence
tttcacaatatgcatttacatgttg

SEQ ID NO: 76893 - DNA, 25 bp, Probe sequence
tagtattcgtagaaaatgagagccc

SEQ ID NO: 76894 - DNA, 25 bp, Probe sequence
ttagtattcgtagaaaatgagagcc

SEQ ID NO: 76895 - DNA, 25 bp, Probe sequence
ggggcttttatttatgacatagttg

SEQ ID NO: 76896 - DNA, 25 bp, Probe sequence
agtattcgtagaaaatgagagcccc

SEQ ID NO: 76897 - DNA, 25 bp, Probe sequence
gggcttttatttatgacatagttgt

SEQ ID NO: 76898 - DNA, 25 bp, Probe sequence
tttagtattcgtagaaaatgagagc

SEQ ID NO: 76899 - DNA, 25 bp, Probe sequence
taccacaacatgtaaatgcatattg

SEQ ID NO: 76900 - DNA, 25 bp, Probe sequence
ggcttttatttatgacatagttgtt

SEQ ID NO: 76901 - DNA, 25 bp, Probe sequence
caacatgtaaatgcatattgtgaaa

SEQ ID NO: 76902 - DNA, 25 bp, Probe sequence
tttagaagtctactgtttcatgcta

SEQ ID NO: 76903 - DNA, 25 bp, Probe sequence
agaagtctactgtttcatgctataa

SEQ ID NO: 76904 - DNA, 25 bp, Probe sequence
ttagaagtctactgtttcatgctat

SEQ ID NO: 76905 - DNA, 25 bp, Probe sequence
agtctactgtttcatgctataatct

SEQ ID NO: 76906 - DNA, 25 bp, Probe sequence
aagtctactgtttcatgctataatc

SEQ ID NO: 76907 - DNA, 25 bp, Probe sequence
tagaagtctactgtttcatgctata

SEQ ID NO: 76908 - DNA, 25 bp, Probe sequence
gaagtctactgtttcatgctataat

SEQ ID NO: 76909 - DNA, 25 bp, Probe sequence
tgttatcccttctttcaataatctt

SEQ ID NO: 76910 - DNA, 25 bp, Probe sequence
tcccttctttcaataatcttcataa

SEQ ID NO: 76911 - DNA, 25 bp, Probe sequence
tagcatgaaacagtagacttctaaa

SEQ ID NO: 76912 - DNA, 25 bp, Probe sequence
atagcatgaaacagtagacttctaa

SEQ ID NO: 76913 - DNA, 25 bp, Probe sequence
ttatagcatgaaacagtagacttct

SEQ ID NO: 76914 - DNA, 25 bp, Probe sequence
agattatagcatgaaacagtagact

SEQ ID NO: 76915 - DNA, 25 bp, Probe sequence
tatagcatgaaacagtagacttcta

SEQ ID NO: 76916 - DNA, 25 bp, Probe sequence
gattatagcatgaaacagtagactt

SEQ ID NO: 76917 - DNA, 25 bp, Probe sequence
attatagcatgaaacagtagacttc

SEQ ID NO: 76918 - DNA, 25 bp, Probe sequence
aagattattgaaagaagggataaca

SEQ ID NO: 76919 - DNA, 25 bp, Probe sequence
ttatgaagattattgaaagaaggga

SEQ ID NO: 76920 - DNA, 25 bp, Probe sequence
tcattaacaacatacacgcatatct

SEQ ID NO: 76921 - DNA, 25 bp, Probe sequence
taacaacatacacgcatatctatcc

SEQ ID NO: 76922 - DNA, 25 bp, Probe sequence
ttcattaacaacatacacgcatatc

SEQ ID NO: 76923 - DNA, 25 bp, Probe sequence
cattaacaacatacacgcatatcta

SEQ ID NO: 76924 - DNA, 25 bp, Probe sequence
ttaacaacatacacgcatatctatc

SEQ ID NO: 76925 - DNA, 25 bp, Probe sequence
tgttgtcgtgttatgatttagtgtt

SEQ ID NO: 76926 - DNA, 25 bp, Probe sequence
aacatacacgcatatctatcccaac

SEQ ID NO: 76927 - DNA, 25 bp, Probe sequence
caacatacacgcatatctatcccaa

SEQ ID NO: 76928 - DNA, 25 bp, Probe sequence
aacaacatacacgcatatctatccc

SEQ ID NO: 76929 - DNA, 25 bp, Probe sequence
agatatgcgtgtatgttgttaatga

SEQ ID NO: 76930 - DNA, 25 bp, Probe sequence
ggatagatatgcgtgtatgttgtta

SEQ ID NO: 76931 - DNA, 25 bp, Probe sequence
gatatgcgtgtatgttgttaatgaa

SEQ ID NO: 76932 - DNA, 25 bp, Probe sequence
tagatatgcgtgtatgttgttaatg

SEQ ID NO: 76933 - DNA, 25 bp, Probe sequence
gatagatatgcgtgtatgttgttaa

SEQ ID NO: 76934 - DNA, 25 bp, Probe sequence
aacactaaatcataacacgacaaca

SEQ ID NO: 76935 - DNA, 25 bp, Probe sequence
gggatagatatgcgtgtatgttgtt

SEQ ID NO: 76936 - DNA, 25 bp, Probe sequence
ttgggatagatatgcgtgtatgttg

SEQ ID NO: 76937 - DNA, 25 bp, Probe sequence
gttgggatagatatgcgtgtatgtt

SEQ ID NO: 76938 - DNA, 25 bp, Probe sequence
tatcgtacatgttgaatgccagtat

SEQ ID NO: 76939 - DNA, 25 bp, Probe sequence
ttatcgtacatgttgaatgccagta

SEQ ID NO: 76940 - DNA, 25 bp, Probe sequence
tattatcgtacatgttgaatgccag

SEQ ID NO: 76941 - DNA, 25 bp, Probe sequence
atcgtacatgttgaatgccagtatt

SEQ ID NO: 76942 - DNA, 25 bp, Probe sequence
attatcgtacatgttgaatgccagt

SEQ ID NO: 76943 - DNA, 25 bp, Probe sequence
tgaccgcttttatggcttttatatt

SEQ ID NO: 76944 - DNA, 25 bp, Probe sequence
ttattatcgtacatgttgaatgcca

SEQ ID NO: 76945 - DNA, 25 bp, Probe sequence
atgaccgcttttatggcttttatat

SEQ ID NO: 76946 - DNA, 25 bp, Probe sequence
gtacatgttgaatgccagtattgtt

SEQ ID NO: 76947 - DNA, 25 bp, Probe sequence
tactggcattcaacatgtacgataa

SEQ ID NO: 76948 - DNA, 25 bp, Probe sequence
atactggcattcaacatgtacgata

SEQ ID NO: 76949 - DNA, 25 bp, Probe sequence
ctggcattcaacatgtacgataata

SEQ ID NO: 76950 - DNA, 25 bp, Probe sequence
actggcattcaacatgtacgataat

SEQ ID NO: 76951 - DNA, 25 bp, Probe sequence
aatactggcattcaacatgtacgat

SEQ ID NO: 76952 - DNA, 25 bp, Probe sequence
tggcattcaacatgtacgataataa

SEQ ID NO: 76953 - DNA, 25 bp, Probe sequence
aatataaaagccataaaagcggtca

SEQ ID NO: 76954 - DNA, 25 bp, Probe sequence
atataaaagccataaaagcggtcat

SEQ ID NO: 76955 - DNA, 25 bp, Probe sequence
aacaatactggcattcaacatgtac

SEQ ID NO: 76956 - DNA, 25 bp, Probe sequence
atgacagtcttatgagcgttcagat

SEQ ID NO: 76957 - DNA, 25 bp, Probe sequence
tgacagtcttatgagcgttcagatt

SEQ ID NO: 76958 - DNA, 25 bp, Probe sequence
aatgacagtcttatgagcgttcaga

SEQ ID NO: 76959 - DNA, 25 bp, Probe sequence
tcttatgagcgttcagatttcagtc

SEQ ID NO: 76960 - DNA, 25 bp, Probe sequence
agtcttatgagcgttcagatttcag

SEQ ID NO: 76961 - DNA, 25 bp, Probe sequence
gagcgttcagatttcagtcgttaat

SEQ ID NO: 76962 - DNA, 25 bp, Probe sequence
tgaacgcaaatgacagtcttatgag

SEQ ID NO: 76963 - DNA, 25 bp, Probe sequence
gtcttatgagcgttcagatttcagt

SEQ ID NO: 76964 - DNA, 25 bp, Probe sequence
cagtcttatgagcgttcagatttca

SEQ ID NO: 76965 - DNA, 25 bp, Probe sequence
atctgaacgctcataagactgtcat

SEQ ID NO: 76966 - DNA, 25 bp, Probe sequence
tctgaacgctcataagactgtcatt

SEQ ID NO: 76967 - DNA, 25 bp, Probe sequence
aatctgaacgctcataagactgtca

SEQ ID NO: 76968 - DNA, 25 bp, Probe sequence
ctgaaatctgaacgctcataagact

SEQ ID NO: 76969 - DNA, 25 bp, Probe sequence
gactgaaatctgaacgctcataaga

SEQ ID NO: 76970 - DNA, 25 bp, Probe sequence
attaacgactgaaatctgaacgctc

SEQ ID NO: 76971 - DNA, 25 bp, Probe sequence
ctcataagactgtcatttgcgttca

SEQ ID NO: 76972 - DNA, 25 bp, Probe sequence
gaaatctgaacgctcataagactgt

SEQ ID NO: 76973 - DNA, 25 bp, Probe sequence
tgaaatctgaacgctcataagactg

SEQ ID NO: 76974 - DNA, 25 bp, Probe sequence
aatgtccatgctccaattaatagtt

SEQ ID NO: 76975 - DNA, 25 bp, Probe sequence
cttatagtgtcgattcagagcttgt

SEQ ID NO: 76976 - DNA, 25 bp, Probe sequence
tgtcaataatctaacaatgaggtgt

SEQ ID NO: 76977 - DNA, 25 bp, Probe sequence
ttatagtgtcgattcagagcttgtg

SEQ ID NO: 76978 - DNA, 25 bp, Probe sequence
tcttatagtgtcgattcagagcttg

SEQ ID NO: 76979 - DNA, 25 bp, Probe sequence
atcttatagtgtcgattcagagctt

SEQ ID NO: 76980 - DNA, 25 bp, Probe sequence
gaaccaacttgacttcaatgaataa

SEQ ID NO: 76981 - DNA, 25 bp, Probe sequence
gtcgattcagagcttgtgtaagatt

SEQ ID NO: 76982 - DNA, 25 bp, Probe sequence
atagtgtcgattcagagcttgtgta

SEQ ID NO: 76983 - DNA, 25 bp, Probe sequence
aactattaattggagcatggacatt

SEQ ID NO: 76984 - DNA, 25 bp, Probe sequence
acaagctctgaatcgacactataag

SEQ ID NO: 76985 - DNA, 25 bp, Probe sequence
cacaagctctgaatcgacactataa

SEQ ID NO: 76986 - DNA, 25 bp, Probe sequence
acacctcattgttagattattgaca

SEQ ID NO: 76987 - DNA, 25 bp, Probe sequence
caagctctgaatcgacactataaga

SEQ ID NO: 76988 - DNA, 25 bp, Probe sequence
aagctctgaatcgacactataagat

SEQ ID NO: 76989 - DNA, 25 bp, Probe sequence
ttattcattgaagtcaagttggttc

SEQ ID NO: 76990 - DNA, 25 bp, Probe sequence
aatcttacacaagctctgaatcgac

SEQ ID NO: 76991 - DNA, 25 bp, Probe sequence
acacaagctctgaatcgacactata

SEQ ID NO: 76992 - DNA, 25 bp, Probe sequence
tattgatttctaattgctcccgttt

SEQ ID NO: 76993 - DNA, 25 bp, Probe sequence
atattgatttctaattgctcccgtt

SEQ ID NO: 76994 - DNA, 25 bp, Probe sequence
tatattgatttctaattgctcccgt

SEQ ID NO: 76995 - DNA, 25 bp, Probe sequence
atatattgatttctaattgctcccg

SEQ ID NO: 76996 - DNA, 25 bp, Probe sequence
attgatttctaattgctcccgtttt

SEQ ID NO: 76997 - DNA, 25 bp, Probe sequence
ttgatttctaattgctcccgtttta

SEQ ID NO: 76998 - DNA, 25 bp, Probe sequence
tgatttctaattgctcccgttttat

SEQ ID NO: 76999 - DNA, 25 bp, Probe sequence
actattttgtcttaggagatgtcac

SEQ ID NO: 77000 - DNA, 25 bp, Probe sequence
ctattttgtcttaggagatgtcact

SEQ ID NO: 77001 - DNA, 25 bp, Probe sequence
aaacgggagcaattagaaatcaata

SEQ ID NO: 77002 - DNA, 25 bp, Probe sequence
aacgggagcaattagaaatcaatat

SEQ ID NO: 77003 - DNA, 25 bp, Probe sequence
acgggagcaattagaaatcaatata

SEQ ID NO: 77004 - DNA, 25 bp, Probe sequence
cgggagcaattagaaatcaatatat

SEQ ID NO: 77005 - DNA, 25 bp, Probe sequence
aaaacgggagcaattagaaatcaat

SEQ ID NO: 77006 - DNA, 25 bp, Probe sequence
taaaacgggagcaattagaaatcaa

SEQ ID NO: 77007 - DNA, 25 bp, Probe sequence
ataaaacgggagcaattagaaatca

SEQ ID NO: 77008 - DNA, 25 bp, Probe sequence
gtgacatctcctaagacaaaatagt

SEQ ID NO: 77009 - DNA, 25 bp, Probe sequence
agtgacatctcctaagacaaaatag

SEQ ID NO: 77010 - DNA, 25 bp, Probe sequence
tctctattcatcatttgtctgtccc

SEQ ID NO: 77011 - DNA, 25 bp, Probe sequence
tgccaatctctattcatcatttgtc

SEQ ID NO: 77012 - DNA, 25 bp, Probe sequence
gccaatctctattcatcatttgtct

SEQ ID NO: 77013 - DNA, 25 bp, Probe sequence
atctctattcatcatttgtctgtcc

SEQ ID NO: 77014 - DNA, 25 bp, Probe sequence
caagacgcaaatatgatgtactgat

SEQ ID NO: 77015 - DNA, 25 bp, Probe sequence
atgccaatctctattcatcatttgt

SEQ ID NO: 77016 - DNA, 25 bp, Probe sequence
aagacgcaaatatgatgtactgatt

SEQ ID NO: 77017 - DNA, 25 bp, Probe sequence
gcaaatatgatgtactgattggcat

SEQ ID NO: 77018 - DNA, 25 bp, Probe sequence
ccaagacgcaaatatgatgtactga

SEQ ID NO: 77019 - DNA, 25 bp, Probe sequence
gggacagacaaatgatgaatagaga

SEQ ID NO: 77020 - DNA, 25 bp, Probe sequence
gacaaatgatgaatagagattggca

SEQ ID NO: 77021 - DNA, 25 bp, Probe sequence
agacaaatgatgaatagagattggc

SEQ ID NO: 77022 - DNA, 25 bp, Probe sequence
ggacagacaaatgatgaatagagat

SEQ ID NO: 77023 - DNA, 25 bp, Probe sequence
atcagtacatcatatttgcgtcttg

SEQ ID NO: 77024 - DNA, 25 bp, Probe sequence
acaaatgatgaatagagattggcat

SEQ ID NO: 77025 - DNA, 25 bp, Probe sequence
aatcagtacatcatatttgcgtctt

SEQ ID NO: 77026 - DNA, 25 bp, Probe sequence
atgccaatcagtacatcatatttgc

SEQ ID NO: 77027 - DNA, 25 bp, Probe sequence
tcagtacatcatatttgcgtcttgg

SEQ ID NO: 77028 - DNA, 25 bp, Probe sequence
tgatgcctcctatgtttcttcttag

SEQ ID NO: 77029 - DNA, 25 bp, Probe sequence
atgatgcctcctatgtttcttctta

SEQ ID NO: 77030 - DNA, 25 bp, Probe sequence
tatgatgcctcctatgtttcttctt

SEQ ID NO: 77031 - DNA, 25 bp, Probe sequence
atatgatgcctcctatgtttcttct

SEQ ID NO: 77032 - DNA, 25 bp, Probe sequence
gcctcctatgtttcttcttagatgt

SEQ ID NO: 77033 - DNA, 25 bp, Probe sequence
tgcctcctatgtttcttcttagatg

SEQ ID NO: 77034 - DNA, 25 bp, Probe sequence
gatgcctcctatgtttcttcttaga

SEQ ID NO: 77035 - DNA, 25 bp, Probe sequence
aatatgatgcctcctatgtttcttc

SEQ ID NO: 77036 - DNA, 25 bp, Probe sequence
atgcctcctatgtttcttcttagat

SEQ ID NO: 77037 - DNA, 25 bp, Probe sequence
ctaagaagaaacataggaggcatca

SEQ ID NO: 77038 - DNA, 25 bp, Probe sequence
aagaagaaacataggaggcatcata

SEQ ID NO: 77039 - DNA, 25 bp, Probe sequence
taagaagaaacataggaggcatcat

SEQ ID NO: 77040 - DNA, 25 bp, Probe sequence
agaagaaacataggaggcatcatat

SEQ ID NO: 77041 - DNA, 25 bp, Probe sequence
tctaagaagaaacataggaggcatc

SEQ ID NO: 77042 - DNA, 25 bp, Probe sequence
catctaagaagaaacataggaggca

SEQ ID NO: 77043 - DNA, 25 bp, Probe sequence
acatctaagaagaaacataggaggc

SEQ ID NO: 77044 - DNA, 25 bp, Probe sequence
gaagaaacataggaggcatcatatt

SEQ ID NO: 77045 - DNA, 25 bp, Probe sequence
atctaagaagaaacataggaggcat

SEQ ID NO: 77046 - DNA, 25 bp, Probe sequence
aatgatttaatatgtagtggtccct

SEQ ID NO: 77047 - DNA, 25 bp, Probe sequence
atgatttaatatgtagtggtcccta

SEQ ID NO: 77048 - DNA, 25 bp, Probe sequence
taatgatttaatatgtagtggtccc

SEQ ID NO: 77049 - DNA, 25 bp, Probe sequence
tgatttaatatgtagtggtccctac

SEQ ID NO: 77050 - DNA, 25 bp, Probe sequence
tgtattttagggagtaagacagaaa

SEQ ID NO: 77051 - DNA, 25 bp, Probe sequence
ttgtattttagggagtaagacagaa

SEQ ID NO: 77052 - DNA, 25 bp, Probe sequence
attgtattttagggagtaagacaga

SEQ ID NO: 77053 - DNA, 25 bp, Probe sequence
ctaatgatttaatatgtagtggtcc

SEQ ID NO: 77054 - DNA, 25 bp, Probe sequence
gtattttagggagtaagacagaaat

SEQ ID NO: 77055 - DNA, 25 bp, Probe sequence
agggaccactacatattaaatcatt

SEQ ID NO: 77056 - DNA, 25 bp, Probe sequence
tagggaccactacatattaaatcat

SEQ ID NO: 77057 - DNA, 25 bp, Probe sequence
gggaccactacatattaaatcatta

SEQ ID NO: 77058 - DNA, 25 bp, Probe sequence
gtagggaccactacatattaaatca

SEQ ID NO: 77059 - DNA, 25 bp, Probe sequence
ttctgtcttactccctaaaatacaa

SEQ ID NO: 77060 - DNA, 25 bp, Probe sequence
tttctgtcttactccctaaaataca

SEQ ID NO: 77061 - DNA, 25 bp, Probe sequence
tctgtcttactccctaaaatacaat

SEQ ID NO: 77062 - DNA, 25 bp, Probe sequence
ggaccactacatattaaatcattag

SEQ ID NO: 77063 - DNA, 25 bp, Probe sequence
atttctgtcttactccctaaaatac

SEQ ID NO: 77064 - DNA, 25 bp, Probe sequence
atgatatactagatgcactaggagg

SEQ ID NO: 77065 - DNA, 25 bp, Probe sequence
catgatatactagatgcactaggag

SEQ ID NO: 77066 - DNA, 25 bp, Probe sequence
tgatatactagatgcactaggaggg

SEQ ID NO: 77067 - DNA, 25 bp, Probe sequence
tcatgatatactagatgcactagga

SEQ ID NO: 77068 - DNA, 25 bp, Probe sequence
ttcatgatatactagatgcactagg

SEQ ID NO: 77069 - DNA, 25 bp, Probe sequence
tatactagatgcactaggaggggta

SEQ ID NO: 77070 - DNA, 25 bp, Probe sequence
gatatactagatgcactaggagggg

SEQ ID NO: 77071 - DNA, 25 bp, Probe sequence
atatactagatgcactaggaggggt

SEQ ID NO: 77072 - DNA, 25 bp, Probe sequence
atactagatgcactaggaggggtaa

SEQ ID NO: 77073 - DNA, 25 bp, Probe sequence
cctcctagtgcatctagtatatcat

SEQ ID NO: 77074 - DNA, 25 bp, Probe sequence
ctcctagtgcatctagtatatcatg

SEQ ID NO: 77075 - DNA, 25 bp, Probe sequence
ccctcctagtgcatctagtatatca

SEQ ID NO: 77076 - DNA, 25 bp, Probe sequence
tcctagtgcatctagtatatcatga

SEQ ID NO: 77077 - DNA, 25 bp, Probe sequence
cctagtgcatctagtatatcatgaa

SEQ ID NO: 77078 - DNA, 25 bp, Probe sequence
cccctcctagtgcatctagtatatc

SEQ ID NO: 77079 - DNA, 25 bp, Probe sequence
tacccctcctagtgcatctagtata

SEQ ID NO: 77080 - DNA, 25 bp, Probe sequence
acccctcctagtgcatctagtatat

SEQ ID NO: 77081 - DNA, 25 bp, Probe sequence
ttacccctcctagtgcatctagtat

SEQ ID NO: 77082 - DNA, 25 bp, Probe sequence
cgttctaaactctttaatggcaaat

SEQ ID NO: 77083 - DNA, 25 bp, Probe sequence
acgttctaaactctttaatggcaaa

SEQ ID NO: 77084 - DNA, 25 bp, Probe sequence
tacgttctaaactctttaatggcaa

SEQ ID NO: 77085 - DNA, 25 bp, Probe sequence
atacgttctaaactctttaatggca

SEQ ID NO: 77086 - DNA, 25 bp, Probe sequence
aatacgttctaaactctttaatggc

SEQ ID NO: 77087 - DNA, 25 bp, Probe sequence
aaactctttaatggcaaataaatga

SEQ ID NO: 77088 - DNA, 25 bp, Probe sequence
gttctaaactctttaatggcaaata

SEQ ID NO: 77089 - DNA, 25 bp, Probe sequence
tctaaactctttaatggcaaataaa

SEQ ID NO: 77090 - DNA, 25 bp, Probe sequence
ttctaaactctttaatggcaaataa

SEQ ID NO: 77091 - DNA, 25 bp, Probe sequence
atttgccattaaagagtttagaacg

SEQ ID NO: 77092 - DNA, 25 bp, Probe sequence
tttgccattaaagagtttagaacgt

SEQ ID NO: 77093 - DNA, 25 bp, Probe sequence
ttgccattaaagagtttagaacgta

SEQ ID NO: 77094 - DNA, 25 bp, Probe sequence
tgccattaaagagtttagaacgtat

SEQ ID NO: 77095 - DNA, 25 bp, Probe sequence
gccattaaagagtttagaacgtatt

SEQ ID NO: 77096 - DNA, 25 bp, Probe sequence
tatttgccattaaagagtttagaac

SEQ ID NO: 77097 - DNA, 25 bp, Probe sequence
tcatttatttgccattaaagagttt

SEQ ID NO: 77098 - DNA, 25 bp, Probe sequence
ttatttgccattaaagagtttagaa

SEQ ID NO: 77099 - DNA, 25 bp, Probe sequence
tttatttgccattaaagagtttaga

SEQ ID NO: 77100 - DNA, 25 bp, Probe sequence
accgttgcctgtttatatattgatt

SEQ ID NO: 77101 - DNA, 25 bp, Probe sequence
gaaccgttgcctgtttatatattga

SEQ ID NO: 77102 - DNA, 25 bp, Probe sequence
agaaccgttgcctgtttatatattg

SEQ ID NO: 77103 - DNA, 25 bp, Probe sequence
aaccgttgcctgtttatatattgat

SEQ ID NO: 77104 - DNA, 25 bp, Probe sequence
aagaaccgttgcctgtttatatatt

SEQ ID NO: 77105 - DNA, 25 bp, Probe sequence
aaagaaccgttgcctgtttatatat

SEQ ID NO: 77106 - DNA, 25 bp, Probe sequence
ccgttgcctgtttatatattgattc

SEQ ID NO: 77107 - DNA, 25 bp, Probe sequence
tcaaacagattgctcgctattaatt

SEQ ID NO: 77108 - DNA, 25 bp, Probe sequence
atcaaacagattgctcgctattaat

SEQ ID NO: 77109 - DNA, 25 bp, Probe sequence
aatcaatatataaacaggcaacggt

SEQ ID NO: 77110 - DNA, 25 bp, Probe sequence
caatatataaacaggcaacggttct

SEQ ID NO: 77111 - DNA, 25 bp, Probe sequence
tcaatatataaacaggcaacggttc

SEQ ID NO: 77112 - DNA, 25 bp, Probe sequence
atcaatatataaacaggcaacggtt

SEQ ID NO: 77113 - DNA, 25 bp, Probe sequence
atatataaacaggcaacggttcttt

SEQ ID NO: 77114 - DNA, 25 bp, Probe sequence
aatatataaacaggcaacggttctt

SEQ ID NO: 77115 - DNA, 25 bp, Probe sequence
gaatcaatatataaacaggcaacgg

SEQ ID NO: 77116 - DNA, 25 bp, Probe sequence
aattaatagcgagcaatctgtttga

SEQ ID NO: 77117 - DNA, 25 bp, Probe sequence
attaatagcgagcaatctgtttgat

SEQ ID NO: 77118 - DNA, 25 bp, Probe sequence
agtgtgtcataatgaacgatattct

SEQ ID NO: 77119 - DNA, 25 bp, Probe sequence
tgtgtcataatgaacgatattctac

SEQ ID NO: 77120 - DNA, 25 bp, Probe sequence
gtgtgtcataatgaacgatattcta

SEQ ID NO: 77121 - DNA, 25 bp, Probe sequence
tagtgtgtcataatgaacgatattc

SEQ ID NO: 77122 - DNA, 25 bp, Probe sequence
acatgaatcaacaatttaaacgcac

SEQ ID NO: 77123 - DNA, 25 bp, Probe sequence
catgaatcaacaatttaaacgcact

SEQ ID NO: 77124 - DNA, 25 bp, Probe sequence
gtgtcataatgaacgatattctaca

SEQ ID NO: 77125 - DNA, 25 bp, Probe sequence
aaagcagtaagttgatttctactcg

SEQ ID NO: 77126 - DNA, 25 bp, Probe sequence
gaacgatattctacatgaatcaaca

SEQ ID NO: 77127 - DNA, 25 bp, Probe sequence
agaatatcgttcattatgacacact

SEQ ID NO: 77128 - DNA, 25 bp, Probe sequence
gaatatcgttcattatgacacacta

SEQ ID NO: 77129 - DNA, 25 bp, Probe sequence
tagaatatcgttcattatgacacac

SEQ ID NO: 77130 - DNA, 25 bp, Probe sequence
gtagaatatcgttcattatgacaca

SEQ ID NO: 77131 - DNA, 25 bp, Probe sequence
gtgcgtttaaattgttgattcatgt

SEQ ID NO: 77132 - DNA, 25 bp, Probe sequence
agtgcgtttaaattgttgattcatg

SEQ ID NO: 77133 - DNA, 25 bp, Probe sequence
tgtagaatatcgttcattatgacac

SEQ ID NO: 77134 - DNA, 25 bp, Probe sequence
cgagtagaaatcaacttactgcttt

SEQ ID NO: 77135 - DNA, 25 bp, Probe sequence
gttgattcatgtagaatatcgttca

SEQ ID NO: 77136 - DNA, 25 bp, Probe sequence
tgacacctactcctttcacttttat

SEQ ID NO: 77137 - DNA, 25 bp, Probe sequence
gacacctactcctttcacttttata

SEQ ID NO: 77138 - DNA, 25 bp, Probe sequence
ttcaaagcaacttattcaattactt

SEQ ID NO: 77139 - DNA, 25 bp, Probe sequence
tttcaaagcaacttattcaattact

SEQ ID NO: 77140 - DNA, 25 bp, Probe sequence
acacctactcctttcacttttataa

SEQ ID NO: 77141 - DNA, 25 bp, Probe sequence
atttcaaagcaacttattcaattac

SEQ ID NO: 77142 - DNA, 25 bp, Probe sequence
tcaaagcaacttattcaattacttt

SEQ ID NO: 77143 - DNA, 25 bp, Probe sequence
aaatttcaaagcaacttattcaatt

SEQ ID NO: 77144 - DNA, 25 bp, Probe sequence
cacctactcctttcacttttataaa

SEQ ID NO: 77145 - DNA, 25 bp, Probe sequence
ataaaagtgaaaggagtaggtgtca

SEQ ID NO: 77146 - DNA, 25 bp, Probe sequence
tataaaagtgaaaggagtaggtgtc

SEQ ID NO: 77147 - DNA, 25 bp, Probe sequence
agtaattgaataagttgctttgaaa

SEQ ID NO: 77148 - DNA, 25 bp, Probe sequence
aagtaattgaataagttgctttgaa

SEQ ID NO: 77149 - DNA, 25 bp, Probe sequence
ttataaaagtgaaaggagtaggtgt

SEQ ID NO: 77150 - DNA, 25 bp, Probe sequence
gtaattgaataagttgctttgaaat

SEQ ID NO: 77151 - DNA, 25 bp, Probe sequence
aaagtaattgaataagttgctttga

SEQ ID NO: 77152 - DNA, 25 bp, Probe sequence
aattgaataagttgctttgaaattt

SEQ ID NO: 77153 - DNA, 25 bp, Probe sequence
tttataaaagtgaaaggagtaggtg

SEQ ID NO: 77154 - DNA, 25 bp, Probe sequence
atgaccattattatagcaccattgt

SEQ ID NO: 77155 - DNA, 25 bp, Probe sequence
tgaccattattatagcaccattgta

SEQ ID NO: 77156 - DNA, 25 bp, Probe sequence
catgaccattattatagcaccattg

SEQ ID NO: 77157 - DNA, 25 bp, Probe sequence
gaccattattatagcaccattgtaa

SEQ ID NO: 77158 - DNA, 25 bp, Probe sequence
agcaccattgtaaactttaagaaat

SEQ ID NO: 77159 - DNA, 25 bp, Probe sequence
tagcaccattgtaaactttaagaaa

SEQ ID NO: 77160 - DNA, 25 bp, Probe sequence
atagcaccattgtaaactttaagaa

SEQ ID NO: 77161 - DNA, 25 bp, Probe sequence
tcatgaccattattatagcaccatt

SEQ ID NO: 77162 - DNA, 25 bp, Probe sequence
ttcatgaccattattatagcaccat

SEQ ID NO: 77163 - DNA, 25 bp, Probe sequence
acaatggtgctataataatggtcat

SEQ ID NO: 77164 - DNA, 25 bp, Probe sequence
tacaatggtgctataataatggtca

SEQ ID NO: 77165 - DNA, 25 bp, Probe sequence
caatggtgctataataatggtcatg

SEQ ID NO: 77166 - DNA, 25 bp, Probe sequence
ttacaatggtgctataataatggtc

SEQ ID NO: 77167 - DNA, 25 bp, Probe sequence
atttcttaaagtttacaatggtgct

SEQ ID NO: 77168 - DNA, 25 bp, Probe sequence
tttcttaaagtttacaatggtgcta

SEQ ID NO: 77169 - DNA, 25 bp, Probe sequence
ttcttaaagtttacaatggtgctat

SEQ ID NO: 77170 - DNA, 25 bp, Probe sequence
atggtgctataataatggtcatgaa

SEQ ID NO: 77171 - DNA, 25 bp, Probe sequence
aatggtgctataataatggtcatga

SEQ ID NO: 77172 - DNA, 25 bp, Probe sequence
gaacgataacaacggcacttattat

SEQ ID NO: 77173 - DNA, 25 bp, Probe sequence
aacgataacaacggcacttattatt

SEQ ID NO: 77174 - DNA, 25 bp, Probe sequence
tgaacgataacaacggcacttatta

SEQ ID NO: 77175 - DNA, 25 bp, Probe sequence
attgaacgataacaacggcacttat

SEQ ID NO: 77176 - DNA, 25 bp, Probe sequence
ttgaacgataacaacggcacttatt

SEQ ID NO: 77177 - DNA, 25 bp, Probe sequence
aattgaacgataacaacggcactta

SEQ ID NO: 77178 - DNA, 25 bp, Probe sequence
acgataacaacggcacttattattt

SEQ ID NO: 77179 - DNA, 25 bp, Probe sequence
attaaattgaacgataacaacggca

SEQ ID NO: 77180 - DNA, 25 bp, Probe sequence
tgtttcagactctcatttcactaac

SEQ ID NO: 77181 - DNA, 25 bp, Probe sequence
ataataagtgccgttgttatcgttc

SEQ ID NO: 77182 - DNA, 25 bp, Probe sequence
aataataagtgccgttgttatcgtt

SEQ ID NO: 77183 - DNA, 25 bp, Probe sequence
taataagtgccgttgttatcgttca

SEQ ID NO: 77184 - DNA, 25 bp, Probe sequence
ataagtgccgttgttatcgttcaat

SEQ ID NO: 77185 - DNA, 25 bp, Probe sequence
aataagtgccgttgttatcgttcaa

SEQ ID NO: 77186 - DNA, 25 bp, Probe sequence
taagtgccgttgttatcgttcaatt

SEQ ID NO: 77187 - DNA, 25 bp, Probe sequence
aaataataagtgccgttgttatcgt

SEQ ID NO: 77188 - DNA, 25 bp, Probe sequence
tgccgttgttatcgttcaatttaat

SEQ ID NO: 77189 - DNA, 25 bp, Probe sequence
gttagtgaaatgagagtctgaaaca

SEQ ID NO: 77190 - DNA, 25 bp, Probe sequence
tttcatctctttatgccaatcaacg

SEQ ID NO: 77191 - DNA, 25 bp, Probe sequence
tcatctctttatgccaatcaacgat

SEQ ID NO: 77192 - DNA, 25 bp, Probe sequence
ttcatctctttatgccaatcaacga

SEQ ID NO: 77193 - DNA, 25 bp, Probe sequence
catctctttatgccaatcaacgatc

SEQ ID NO: 77194 - DNA, 25 bp, Probe sequence
atttcatctctttatgccaatcaac

SEQ ID NO: 77195 - DNA, 25 bp, Probe sequence
aatttcatctctttatgccaatcaa

SEQ ID NO: 77196 - DNA, 25 bp, Probe sequence
cgtcaaatttcatctctttatgcca

SEQ ID NO: 77197 - DNA, 25 bp, Probe sequence
acgtcaaatttcatctctttatgcc

SEQ ID NO: 77198 - DNA, 25 bp, Probe sequence
ccgaacgtcaaatttcatctcttta

SEQ ID NO: 77199 - DNA, 25 bp, Probe sequence
cgttgattggcataaagagatgaaa

SEQ ID NO: 77200 - DNA, 25 bp, Probe sequence
atcgttgattggcataaagagatga

SEQ ID NO: 77201 - DNA, 25 bp, Probe sequence
tcgttgattggcataaagagatgaa

SEQ ID NO: 77202 - DNA, 25 bp, Probe sequence
gatcgttgattggcataaagagatg

SEQ ID NO: 77203 - DNA, 25 bp, Probe sequence
gttgattggcataaagagatgaaat

SEQ ID NO: 77204 - DNA, 25 bp, Probe sequence
ttgattggcataaagagatgaaatt

SEQ ID NO: 77205 - DNA, 25 bp, Probe sequence
tggcataaagagatgaaatttgacg

SEQ ID NO: 77206 - DNA, 25 bp, Probe sequence
taaagagatgaaatttgacgttcgg

SEQ ID NO: 77207 - DNA, 25 bp, Probe sequence
ggcataaagagatgaaatttgacgt

SEQ ID NO: 77208 - DNA, 25 bp, Probe sequence
cgctgtatggtttaaggtgatattc

SEQ ID NO: 77209 - DNA, 25 bp, Probe sequence
tcgctgtatggtttaaggtgatatt

SEQ ID NO: 77210 - DNA, 25 bp, Probe sequence
ttcgctgtatggtttaaggtgatat

SEQ ID NO: 77211 - DNA, 25 bp, Probe sequence
attcgctgtatggtttaaggtgata

SEQ ID NO: 77212 - DNA, 25 bp, Probe sequence
acaccttaaactatacaattcgctg

SEQ ID NO: 77213 - DNA, 25 bp, Probe sequence
aattcgctgtatggtttaaggtgat

SEQ ID NO: 77214 - DNA, 25 bp, Probe sequence
caattcgctgtatggtttaaggtga

SEQ ID NO: 77215 - DNA, 25 bp, Probe sequence
gctgtatggtttaaggtgatattca

SEQ ID NO: 77216 - DNA, 25 bp, Probe sequence
caccttaaactatacaattcgctgt

SEQ ID NO: 77217 - DNA, 25 bp, Probe sequence
tatcaccttaaaccatacagcgaat

SEQ ID NO: 77218 - DNA, 25 bp, Probe sequence
atatcaccttaaaccatacagcgaa

SEQ ID NO: 77219 - DNA, 25 bp, Probe sequence
aatatcaccttaaaccatacagcga

SEQ ID NO: 77220 - DNA, 25 bp, Probe sequence
gaatatcaccttaaaccatacagcg

SEQ ID NO: 77221 - DNA, 25 bp, Probe sequence
cagcgaattgtatagtttaaggtgt

SEQ ID NO: 77222 - DNA, 25 bp, Probe sequence
atcaccttaaaccatacagcgaatt

SEQ ID NO: 77223 - DNA, 25 bp, Probe sequence
tcaccttaaaccatacagcgaattg

SEQ ID NO: 77224 - DNA, 25 bp, Probe sequence
tgaatatcaccttaaaccatacagc

SEQ ID NO: 77225 - DNA, 25 bp, Probe sequence
acagcgaattgtatagtttaaggtg

SEQ ID NO: 77226 - DNA, 25 bp, Probe sequence
cacctttcctttgaatcattactca

SEQ ID NO: 77227 - DNA, 25 bp, Probe sequence
tcacctttcctttgaatcattactc

SEQ ID NO: 77228 - DNA, 25 bp, Probe sequence
acctttcctttgaatcattactcat

SEQ ID NO: 77229 - DNA, 25 bp, Probe sequence
cctttcctttgaatcattactcatt

SEQ ID NO: 77230 - DNA, 25 bp, Probe sequence
attgtttgcttcaatagcggatatg

SEQ ID NO: 77231 - DNA, 25 bp, Probe sequence
gattgtttgcttcaatagcggatat

SEQ ID NO: 77232 - DNA, 25 bp, Probe sequence
attagattgtttgcttcaatagcgg

SEQ ID NO: 77233 - DNA, 25 bp, Probe sequence
gattagattgtttgcttcaatagcg

SEQ ID NO: 77234 - DNA, 25 bp, Probe sequence
cgattagattgtttgcttcaatagc

SEQ ID NO: 77235 - DNA, 25 bp, Probe sequence
tgagtaatgattcaaaggaaaggtg

SEQ ID NO: 77236 - DNA, 25 bp, Probe sequence
gagtaatgattcaaaggaaaggtga

SEQ ID NO: 77237 - DNA, 25 bp, Probe sequence
atgagtaatgattcaaaggaaaggt

SEQ ID NO: 77238 - DNA, 25 bp, Probe sequence
aatgagtaatgattcaaaggaaagg

SEQ ID NO: 77239 - DNA, 25 bp, Probe sequence
ccgctattgaagcaaacaatctaat

SEQ ID NO: 77240 - DNA, 25 bp, Probe sequence
atatccgctattgaagcaaacaatc

SEQ ID NO: 77241 - DNA, 25 bp, Probe sequence
catatccgctattgaagcaaacaat

SEQ ID NO: 77242 - DNA, 25 bp, Probe sequence
gctattgaagcaaacaatctaatcg

SEQ ID NO: 77243 - DNA, 25 bp, Probe sequence
cgctattgaagcaaacaatctaatc

SEQ ID NO: 77244 - DNA, 25 bp, Probe sequence
cccaatgctgaataaataacttcgt

SEQ ID NO: 77245 - DNA, 25 bp, Probe sequence
tcccaatgctgaataaataacttcg

SEQ ID NO: 77246 - DNA, 25 bp, Probe sequence
tgtcccaatgctgaataaataactt

SEQ ID NO: 77247 - DNA, 25 bp, Probe sequence
atgtcccaatgctgaataaataact

SEQ ID NO: 77248 - DNA, 25 bp, Probe sequence
gctgaaataaggtatggctagtctt

SEQ ID NO: 77249 - DNA, 25 bp, Probe sequence
gtcccaatgctgaataaataacttc

SEQ ID NO: 77250 - DNA, 25 bp, Probe sequence
ccaatgctgaataaataacttcgtt

SEQ ID NO: 77251 - DNA, 25 bp, Probe sequence
ctgaaataaggtatggctagtcttt

SEQ ID NO: 77252 - DNA, 25 bp, Probe sequence
tatgtcccaatgctgaataaataac

SEQ ID NO: 77253 - DNA, 25 bp, Probe sequence
acgaagttatttattcagcattggg

SEQ ID NO: 77254 - DNA, 25 bp, Probe sequence
cgaagttatttattcagcattggga

SEQ ID NO: 77255 - DNA, 25 bp, Probe sequence
aagttatttattcagcattgggaca

SEQ ID NO: 77256 - DNA, 25 bp, Probe sequence
agttatttattcagcattgggacat

SEQ ID NO: 77257 - DNA, 25 bp, Probe sequence
aagactagccataccttatttcagc

SEQ ID NO: 77258 - DNA, 25 bp, Probe sequence
gaagttatttattcagcattgggac

SEQ ID NO: 77259 - DNA, 25 bp, Probe sequence
aacgaagttatttattcagcattgg

SEQ ID NO: 77260 - DNA, 25 bp, Probe sequence
aaagactagccataccttatttcag

SEQ ID NO: 77261 - DNA, 25 bp, Probe sequence
gttatttattcagcattgggacata

SEQ ID NO: 77262 - DNA, 25 bp, Probe sequence
atattaattggatggcttgctcaca

SEQ ID NO: 77263 - DNA, 25 bp, Probe sequence
tatattaattggatggcttgctcac

SEQ ID NO: 77264 - DNA, 25 bp, Probe sequence
ttatattaattggatggcttgctca

SEQ ID NO: 77265 - DNA, 25 bp, Probe sequence
tattaattggatggcttgctcacaa

SEQ ID NO: 77266 - DNA, 25 bp, Probe sequence
aactcttcttatcaacctacataca

SEQ ID NO: 77267 - DNA, 25 bp, Probe sequence
actcttcttatcaacctacatacat

SEQ ID NO: 77268 - DNA, 25 bp, Probe sequence
tcattcaaactcttcttatcaacct

SEQ ID NO: 77269 - DNA, 25 bp, Probe sequence
ttcaaactcttcttatcaacctaca

SEQ ID NO: 77270 - DNA, 25 bp, Probe sequence
tcaaactcttcttatcaacctacat

SEQ ID NO: 77271 - DNA, 25 bp, Probe sequence
gtgagcaagccatccaattaatata

SEQ ID NO: 77272 - DNA, 25 bp, Probe sequence
tgtgagcaagccatccaattaatat

SEQ ID NO: 77273 - DNA, 25 bp, Probe sequence
tgagcaagccatccaattaatataa

SEQ ID NO: 77274 - DNA, 25 bp, Probe sequence
ttgtgagcaagccatccaattaata

SEQ ID NO: 77275 - DNA, 25 bp, Probe sequence
tgtatgtaggttgataagaagagtt

SEQ ID NO: 77276 - DNA, 25 bp, Probe sequence
atgtatgtaggttgataagaagagt

SEQ ID NO: 77277 - DNA, 25 bp, Probe sequence
aggttgataagaagagtttgaatga

SEQ ID NO: 77278 - DNA, 25 bp, Probe sequence
tgtaggttgataagaagagtttgaa

SEQ ID NO: 77279 - DNA, 25 bp, Probe sequence
atgtaggttgataagaagagtttga

SEQ ID NO: 77280 - DNA, 25 bp, Probe sequence
tccctcccacttaaaactataaact

SEQ ID NO: 77281 - DNA, 25 bp, Probe sequence
atccctcccacttaaaactataaac

SEQ ID NO: 77282 - DNA, 25 bp, Probe sequence
ccctcccacttaaaactataaacta

SEQ ID NO: 77283 - DNA, 25 bp, Probe sequence
tatccctcccacttaaaactataaa

SEQ ID NO: 77284 - DNA, 25 bp, Probe sequence
atatccctcccacttaaaactataa

SEQ ID NO: 77285 - DNA, 25 bp, Probe sequence
aatatccctcccacttaaaactata

SEQ ID NO: 77286 - DNA, 25 bp, Probe sequence
cctcccacttaaaactataaactat

SEQ ID NO: 77287 - DNA, 25 bp, Probe sequence
tcataggtatatgaaatacaagtga

SEQ ID NO: 77288 - DNA, 25 bp, Probe sequence
agtttatagttttaagtgggaggga

SEQ ID NO: 77289 - DNA, 25 bp, Probe sequence
gtttatagttttaagtgggagggat

SEQ ID NO: 77290 - DNA, 25 bp, Probe sequence
tagtttatagttttaagtgggaggg

SEQ ID NO: 77291 - DNA, 25 bp, Probe sequence
tttatagttttaagtgggagggata

SEQ ID NO: 77292 - DNA, 25 bp, Probe sequence
tatagttttaagtgggagggatatt

SEQ ID NO: 77293 - DNA, 25 bp, Probe sequence
ttatagttttaagtgggagggatat

SEQ ID NO: 77294 - DNA, 25 bp, Probe sequence
atagtttatagttttaagtgggagg

SEQ ID NO: 77295 - DNA, 25 bp, Probe sequence
tcacttgtatttcatatacctatga

SEQ ID NO: 77296 - DNA, 25 bp, Probe sequence
ttcactaccaattatatcgccacat

SEQ ID NO: 77297 - DNA, 25 bp, Probe sequence
attcactaccaattatatcgccaca

SEQ ID NO: 77298 - DNA, 25 bp, Probe sequence
tattcactaccaattatatcgccac

SEQ ID NO: 77299 - DNA, 25 bp, Probe sequence
tcactaccaattatatcgccacatg

SEQ ID NO: 77300 - DNA, 25 bp, Probe sequence
atattcactaccaattatatcgcca

SEQ ID NO: 77301 - DNA, 25 bp, Probe sequence
gatttactcctgtttgtctttctca

SEQ ID NO: 77302 - DNA, 25 bp, Probe sequence
tgatttactcctgtttgtctttctc

SEQ ID NO: 77303 - DNA, 25 bp, Probe sequence
caaggacgctaatttctgttatagt

SEQ ID NO: 77304 - DNA, 25 bp, Probe sequence
ttgatttactcctgtttgtctttct

SEQ ID NO: 77305 - DNA, 25 bp, Probe sequence
tgtggcgatataattggtagtgaat

SEQ ID NO: 77306 - DNA, 25 bp, Probe sequence
atgtggcgatataattggtagtgaa

SEQ ID NO: 77307 - DNA, 25 bp, Probe sequence
gtggcgatataattggtagtgaata

SEQ ID NO: 77308 - DNA, 25 bp, Probe sequence
catgtggcgatataattggtagtga

SEQ ID NO: 77309 - DNA, 25 bp, Probe sequence
tggcgatataattggtagtgaatat

SEQ ID NO: 77310 - DNA, 25 bp, Probe sequence
gagaaagacaaacaggagtaaatca

SEQ ID NO: 77311 - DNA, 25 bp, Probe sequence
tgagaaagacaaacaggagtaaatc

SEQ ID NO: 77312 - DNA, 25 bp, Probe sequence
actataacagaaattagcgtccttg

SEQ ID NO: 77313 - DNA, 25 bp, Probe sequence
agaaagacaaacaggagtaaatcaa

SEQ ID NO: 77314 - DNA, 25 bp, Probe sequence
tttaggcatgtcaaatcggctatac

SEQ ID NO: 77315 - DNA, 25 bp, Probe sequence
atttaggcatgtcaaatcggctata

SEQ ID NO: 77316 - DNA, 25 bp, Probe sequence
aatttaggcatgtcaaatcggctat

SEQ ID NO: 77317 - DNA, 25 bp, Probe sequence
acaaatatacttgccttcaaattct

SEQ ID NO: 77318 - DNA, 25 bp, Probe sequence
ttaggcatgtcaaatcggctataca

SEQ ID NO: 77319 - DNA, 25 bp, Probe sequence
aatatacttgccttcaaattctcaa

SEQ ID NO: 77320 - DNA, 25 bp, Probe sequence
aaatatacttgccttcaaattctca

SEQ ID NO: 77321 - DNA, 25 bp, Probe sequence
cacccaaatttaggcatgtcaaatc

SEQ ID NO: 77322 - DNA, 25 bp, Probe sequence
tacttgccttcaaattctcaattaa

SEQ ID NO: 77323 - DNA, 25 bp, Probe sequence
gtatagccgatttgacatgcctaaa

SEQ ID NO: 77324 - DNA, 25 bp, Probe sequence
tatagccgatttgacatgcctaaat

SEQ ID NO: 77325 - DNA, 25 bp, Probe sequence
atagccgatttgacatgcctaaatt

SEQ ID NO: 77326 - DNA, 25 bp, Probe sequence
agaatttgaaggcaagtatatttgt

SEQ ID NO: 77327 - DNA, 25 bp, Probe sequence
tgtatagccgatttgacatgcctaa

SEQ ID NO: 77328 - DNA, 25 bp, Probe sequence
gatttgacatgcctaaatttgggtg

SEQ ID NO: 77329 - DNA, 25 bp, Probe sequence
tgagaatttgaaggcaagtatattt

SEQ ID NO: 77330 - DNA, 25 bp, Probe sequence
ttgagaatttgaaggcaagtatatt

SEQ ID NO: 77331 - DNA, 25 bp, Probe sequence
tttgaaggcaagtatatttgtaagt

SEQ ID NO: 77332 - DNA, 25 bp, Probe sequence
tcgcttattgatgagaaacctcttt

SEQ ID NO: 77333 - DNA, 25 bp, Probe sequence
ttcgcttattgatgagaaacctctt

SEQ ID NO: 77334 - DNA, 25 bp, Probe sequence
cttcgcttattgatgagaaacctct

SEQ ID NO: 77335 - DNA, 25 bp, Probe sequence
ccttcgcttattgatgagaaacctc

SEQ ID NO: 77336 - DNA, 25 bp, Probe sequence
cccttcgcttattgatgagaaacct

SEQ ID NO: 77337 - DNA, 25 bp, Probe sequence
tccttttctatcttcaagccatcat

SEQ ID NO: 77338 - DNA, 25 bp, Probe sequence
atccttttctatcttcaagccatca

SEQ ID NO: 77339 - DNA, 25 bp, Probe sequence
cgcttattgatgagaaacctctttt

SEQ ID NO: 77340 - DNA, 25 bp, Probe sequence
tatccttttctatcttcaagccatc

SEQ ID NO: 77341 - DNA, 25 bp, Probe sequence
aagaggtttctcatcaataagcgaa

SEQ ID NO: 77342 - DNA, 25 bp, Probe sequence
aaagaggtttctcatcaataagcga

SEQ ID NO: 77343 - DNA, 25 bp, Probe sequence
agaggtttctcatcaataagcgaag

SEQ ID NO: 77344 - DNA, 25 bp, Probe sequence
gaggtttctcatcaataagcgaagg

SEQ ID NO: 77345 - DNA, 25 bp, Probe sequence
aggtttctcatcaataagcgaaggg

SEQ ID NO: 77346 - DNA, 25 bp, Probe sequence
tgatggcttgaagatagaaaaggat

SEQ ID NO: 77347 - DNA, 25 bp, Probe sequence
atgatggcttgaagatagaaaagga

SEQ ID NO: 77348 - DNA, 25 bp, Probe sequence
aaaagaggtttctcatcaataagcg

SEQ ID NO: 77349 - DNA, 25 bp, Probe sequence
gatggcttgaagatagaaaaggata

SEQ ID NO: 77350 - DNA, 25 bp, Probe sequence
aaacaaccctctttctatctttggt

SEQ ID NO: 77351 - DNA, 25 bp, Probe sequence
aaattaacctatttaaacgccgacg

SEQ ID NO: 77352 - DNA, 25 bp, Probe sequence
taaattaacctatttaaacgccgac

SEQ ID NO: 77353 - DNA, 25 bp, Probe sequence
aattaacctatttaaacgccgacgt

SEQ ID NO: 77354 - DNA, 25 bp, Probe sequence
ccctctttctatctttggttaaaat

SEQ ID NO: 77355 - DNA, 25 bp, Probe sequence
accctctttctatctttggttaaaa

SEQ ID NO: 77356 - DNA, 25 bp, Probe sequence
aacaaccctctttctatctttggtt

SEQ ID NO: 77357 - DNA, 25 bp, Probe sequence
acaaccctctttctatctttggtta

SEQ ID NO: 77358 - DNA, 25 bp, Probe sequence
caaccctctttctatctttggttaa

SEQ ID NO: 77359 - DNA, 25 bp, Probe sequence
accaaagatagaaagagggttgttt

SEQ ID NO: 77360 - DNA, 25 bp, Probe sequence
cgtcggcgtttaaataggttaattt

SEQ ID NO: 77361 - DNA, 25 bp, Probe sequence
gtcggcgtttaaataggttaattta

SEQ ID NO: 77362 - DNA, 25 bp, Probe sequence
acgtcggcgtttaaataggttaatt

SEQ ID NO: 77363 - DNA, 25 bp, Probe sequence
attttaaccaaagatagaaagaggg

SEQ ID NO: 77364 - DNA, 25 bp, Probe sequence
aaccaaagatagaaagagggttgtt

SEQ ID NO: 77365 - DNA, 25 bp, Probe sequence
ttttaaccaaagatagaaagagggt

SEQ ID NO: 77366 - DNA, 25 bp, Probe sequence
taaccaaagatagaaagagggttgt

SEQ ID NO: 77367 - DNA, 25 bp, Probe sequence
ttaaccaaagatagaaagagggttg

SEQ ID NO: 77368 - DNA, 25 bp, Probe sequence
aagatatagaactttggaggacttt

SEQ ID NO: 77369 - DNA, 25 bp, Probe sequence
tgtcatcaattcgagatgtgagaat

SEQ ID NO: 77370 - DNA, 25 bp, Probe sequence
attgtcatcaattcgagatgtgaga

SEQ ID NO: 77371 - DNA, 25 bp, Probe sequence
ttgtcatcaattcgagatgtgagaa

SEQ ID NO: 77372 - DNA, 25 bp, Probe sequence
actattgtcatcaattcgagatgtg

SEQ ID NO: 77373 - DNA, 25 bp, Probe sequence
agtaactattgtcatcaattcgaga

SEQ ID NO: 77374 - DNA, 25 bp, Probe sequence
tattgtcatcaattcgagatgtgag

SEQ ID NO: 77375 - DNA, 25 bp, Probe sequence
ctattgtcatcaattcgagatgtga

SEQ ID NO: 77376 - DNA, 25 bp, Probe sequence
gtcatcaattcgagatgtgagaata

SEQ ID NO: 77377 - DNA, 25 bp, Probe sequence
aaagtcctccaaagttctatatctt

SEQ ID NO: 77378 - DNA, 25 bp, Probe sequence
tctcacatctcgaattgatgacaat

SEQ ID NO: 77379 - DNA, 25 bp, Probe sequence
attctcacatctcgaattgatgaca

SEQ ID NO: 77380 - DNA, 25 bp, Probe sequence
ttctcacatctcgaattgatgacaa

SEQ ID NO: 77381 - DNA, 25 bp, Probe sequence
tctcgaattgatgacaatagttact

SEQ ID NO: 77382 - DNA, 25 bp, Probe sequence
cacatctcgaattgatgacaatagt

SEQ ID NO: 77383 - DNA, 25 bp, Probe sequence
tcacatctcgaattgatgacaatag

SEQ ID NO: 77384 - DNA, 25 bp, Probe sequence
ctcacatctcgaattgatgacaata

SEQ ID NO: 77385 - DNA, 25 bp, Probe sequence
cttgtggggaatgttattgatttgt

SEQ ID NO: 77386 - DNA, 25 bp, Probe sequence
gcctaagttatatcacctccatcaa

SEQ ID NO: 77387 - DNA, 25 bp, Probe sequence
ttcatagttctacagtgcctaagtt

SEQ ID NO: 77388 - DNA, 25 bp, Probe sequence
attcatagttctacagtgcctaagt

SEQ ID NO: 77389 - DNA, 25 bp, Probe sequence
tgcctaagttatatcacctccatca

SEQ ID NO: 77390 - DNA, 25 bp, Probe sequence
tcatagttctacagtgcctaagtta

SEQ ID NO: 77391 - DNA, 25 bp, Probe sequence
aattcatagttctacagtgcctaag

SEQ ID NO: 77392 - DNA, 25 bp, Probe sequence
cgcttacatcattgatacacaagac

SEQ ID NO: 77393 - DNA, 25 bp, Probe sequence
gcttacatcattgatacacaagaca

SEQ ID NO: 77394 - DNA, 25 bp, Probe sequence
catagttctacagtgcctaagttat

SEQ ID NO: 77395 - DNA, 25 bp, Probe sequence
ttgatggaggtgatataacttaggc

SEQ ID NO: 77396 - DNA, 25 bp, Probe sequence
aacttaggcactgtagaactatgaa

SEQ ID NO: 77397 - DNA, 25 bp, Probe sequence
acttaggcactgtagaactatgaat

SEQ ID NO: 77398 - DNA, 25 bp, Probe sequence
tgatggaggtgatataacttaggca

SEQ ID NO: 77399 - DNA, 25 bp, Probe sequence
taacttaggcactgtagaactatga

SEQ ID NO: 77400 - DNA, 25 bp, Probe sequence
cttaggcactgtagaactatgaatt

SEQ ID NO: 77401 - DNA, 25 bp, Probe sequence
gtcttgtgtatcaatgatgtaagcg

SEQ ID NO: 77402 - DNA, 25 bp, Probe sequence
tgtcttgtgtatcaatgatgtaagc

SEQ ID NO: 77403 - DNA, 25 bp, Probe sequence
ataacttaggcactgtagaactatg

SEQ ID NO: 77404 - DNA, 25 bp, Probe sequence
cccatatgttgagctctcgtttcaa

SEQ ID NO: 77405 - DNA, 25 bp, Probe sequence
ccccatatgttgagctctcgtttca

SEQ ID NO: 77406 - DNA, 25 bp, Probe sequence
ttgagctctcgtttcaacatacggg

SEQ ID NO: 77407 - DNA, 25 bp, Probe sequence
ttgaaacgagagctcaacatatggg

SEQ ID NO: 77408 - DNA, 25 bp, Probe sequence
tgaaacgagagctcaacatatgggg

SEQ ID NO: 77409 - DNA, 25 bp, Probe sequence
cccgtatgttgaaacgagagctcaa

SEQ ID NO: 77410 - DNA, 25 bp, Probe sequence
atttaactaacacactcagaatgcg

SEQ ID NO: 77411 - DNA, 25 bp, Probe sequence
tgtaacaatgatgtgggatatagca

SEQ ID NO: 77412 - DNA, 25 bp, Probe sequence
tccatttaactaacacactcagaat

SEQ ID NO: 77413 - DNA, 25 bp, Probe sequence
atccatttaactaacacactcagaa

SEQ ID NO: 77414 - DNA, 25 bp, Probe sequence
aatccatttaactaacacactcaga

SEQ ID NO: 77415 - DNA, 25 bp, Probe sequence
aagtgtattatctgcaccattgtac

SEQ ID NO: 77416 - DNA, 25 bp, Probe sequence
gtaacaatgatgtgggatatagcat

SEQ ID NO: 77417 - DNA, 25 bp, Probe sequence
ttaagtgtattatctgcaccattgt

SEQ ID NO: 77418 - DNA, 25 bp, Probe sequence
tgatgtgggatatagcatatttgat

SEQ ID NO: 77419 - DNA, 25 bp, Probe sequence
cgcattctgagtgtgttagttaaat

SEQ ID NO: 77420 - DNA, 25 bp, Probe sequence
tgctatatcccacatcattgttaca

SEQ ID NO: 77421 - DNA, 25 bp, Probe sequence
tctgagtgtgttagttaaatggatt

SEQ ID NO: 77422 - DNA, 25 bp, Probe sequence
ttctgagtgtgttagttaaatggat

SEQ ID NO: 77423 - DNA, 25 bp, Probe sequence
attctgagtgtgttagttaaatgga

SEQ ID NO: 77424 - DNA, 25 bp, Probe sequence
gtacaatggtgcagataatacactt

SEQ ID NO: 77425 - DNA, 25 bp, Probe sequence
atgctatatcccacatcattgttac

SEQ ID NO: 77426 - DNA, 25 bp, Probe sequence
acaatggtgcagataatacacttaa

SEQ ID NO: 77427 - DNA, 25 bp, Probe sequence
tcaaatatgctatatcccacatcat

SEQ ID NO: 77428 - DNA, 25 bp, Probe sequence
cctgtcgatgattgattcacaatag

SEQ ID NO: 77429 - DNA, 25 bp, Probe sequence
ctgtcgatgattgattcacaatagc

SEQ ID NO: 77430 - DNA, 25 bp, Probe sequence
gtcgatgattgattcacaatagcac

SEQ ID NO: 77431 - DNA, 25 bp, Probe sequence
tgtcgatgattgattcacaatagca

SEQ ID NO: 77432 - DNA, 25 bp, Probe sequence
gcctgtcgatgattgattcacaata

SEQ ID NO: 77433 - DNA, 25 bp, Probe sequence
tcgatgattgattcacaatagcacg

SEQ ID NO: 77434 - DNA, 25 bp, Probe sequence
cgatgattgattcacaatagcacgt

SEQ ID NO: 77435 - DNA, 25 bp, Probe sequence
cactgcttgcatgtagaaacacttt

SEQ ID NO: 77436 - DNA, 25 bp, Probe sequence
acactgcttgcatgtagaaacactt

SEQ ID NO: 77437 - DNA, 25 bp, Probe sequence
ctattgtgaatcaatcatcgacagg

SEQ ID NO: 77438 - DNA, 25 bp, Probe sequence
gctattgtgaatcaatcatcgacag

SEQ ID NO: 77439 - DNA, 25 bp, Probe sequence
gtgctattgtgaatcaatcatcgac

SEQ ID NO: 77440 - DNA, 25 bp, Probe sequence
tgctattgtgaatcaatcatcgaca

SEQ ID NO: 77441 - DNA, 25 bp, Probe sequence
tattgtgaatcaatcatcgacaggc

SEQ ID NO: 77442 - DNA, 25 bp, Probe sequence
cgtgctattgtgaatcaatcatcga

SEQ ID NO: 77443 - DNA, 25 bp, Probe sequence
acgtgctattgtgaatcaatcatcg

SEQ ID NO: 77444 - DNA, 25 bp, Probe sequence
aaagtgtttctacatgcaagcagtg

SEQ ID NO: 77445 - DNA, 25 bp, Probe sequence
aagtgtttctacatgcaagcagtgt

SEQ ID NO: 77446 - DNA, 25 bp, Probe sequence
acaatacttaataatcacctcacct

SEQ ID NO: 77447 - DNA, 25 bp, Probe sequence
gacaatacttaataatcacctcacc

SEQ ID NO: 77448 - DNA, 25 bp, Probe sequence
caccttctatttacgggctattagt

SEQ ID NO: 77449 - DNA, 25 bp, Probe sequence
gttatcaccttctatttacgggcta

SEQ ID NO: 77450 - DNA, 25 bp, Probe sequence
tcaccttctatttacgggctattag

SEQ ID NO: 77451 - DNA, 25 bp, Probe sequence
accttctatttacgggctattagtt

SEQ ID NO: 77452 - DNA, 25 bp, Probe sequence
tttccaattatctgtttcacgcttt

SEQ ID NO: 77453 - DNA, 25 bp, Probe sequence
atcaccttctatttacgggctatta

SEQ ID NO: 77454 - DNA, 25 bp, Probe sequence
tatcaccttctatttacgggctatt

SEQ ID NO: 77455 - DNA, 25 bp, Probe sequence
aggtgaggtgattattaagtattgt

SEQ ID NO: 77456 - DNA, 25 bp, Probe sequence
ggtgaggtgattattaagtattgtc

SEQ ID NO: 77457 - DNA, 25 bp, Probe sequence
tagcccgtaaatagaaggtgataac

SEQ ID NO: 77458 - DNA, 25 bp, Probe sequence
actaatagcccgtaaatagaaggtg

SEQ ID NO: 77459 - DNA, 25 bp, Probe sequence
ctaatagcccgtaaatagaaggtga

SEQ ID NO: 77460 - DNA, 25 bp, Probe sequence
aactaatagcccgtaaatagaaggt

SEQ ID NO: 77461 - DNA, 25 bp, Probe sequence
aaagcgtgaaacagataattggaaa

SEQ ID NO: 77462 - DNA, 25 bp, Probe sequence
atagcccgtaaatagaaggtgataa

SEQ ID NO: 77463 - DNA, 25 bp, Probe sequence
aatagcccgtaaatagaaggtgata

SEQ ID NO: 77464 - DNA, 25 bp, Probe sequence
caccactcctttactattccttaca

SEQ ID NO: 77465 - DNA, 25 bp, Probe sequence
ccaccactcctttactattccttac

SEQ ID NO: 77466 - DNA, 25 bp, Probe sequence
accactcctttactattccttacat

SEQ ID NO: 77467 - DNA, 25 bp, Probe sequence
cccaccactcctttactattcctta

SEQ ID NO: 77468 - DNA, 25 bp, Probe sequence
tcccaccactcctttactattcctt

SEQ ID NO: 77469 - DNA, 25 bp, Probe sequence
ccactcctttactattccttacata

SEQ ID NO: 77470 - DNA, 25 bp, Probe sequence
actattccttacatactttgtctgt

SEQ ID NO: 77471 - DNA, 25 bp, Probe sequence
cactcctttactattccttacatac

SEQ ID NO: 77472 - DNA, 25 bp, Probe sequence
actcctttactattccttacatact

SEQ ID NO: 77473 - DNA, 25 bp, Probe sequence
gtaaggaatagtaaaggagtggtgg

SEQ ID NO: 77474 - DNA, 25 bp, Probe sequence
tgtaaggaatagtaaaggagtggtg

SEQ ID NO: 77475 - DNA, 25 bp, Probe sequence
atgtaaggaatagtaaaggagtggt

SEQ ID NO: 77476 - DNA, 25 bp, Probe sequence
taaggaatagtaaaggagtggtggg

SEQ ID NO: 77477 - DNA, 25 bp, Probe sequence
aaggaatagtaaaggagtggtggga

SEQ ID NO: 77478 - DNA, 25 bp, Probe sequence
tatgtaaggaatagtaaaggagtgg

SEQ ID NO: 77479 - DNA, 25 bp, Probe sequence
acagacaaagtatgtaaggaatagt

SEQ ID NO: 77480 - DNA, 25 bp, Probe sequence
gtatgtaaggaatagtaaaggagtg

SEQ ID NO: 77481 - DNA, 25 bp, Probe sequence
agtatgtaaggaatagtaaaggagt

SEQ ID NO: 77482 - DNA, 25 bp, Probe sequence
cgtccaccacttctcatatcattat

SEQ ID NO: 77483 - DNA, 25 bp, Probe sequence
atgtcctcattgtcactcttatgtt

SEQ ID NO: 77484 - DNA, 25 bp, Probe sequence
tccaccacttctcatatcattatca

SEQ ID NO: 77485 - DNA, 25 bp, Probe sequence
tgtcctcattgtcactcttatgtta

SEQ ID NO: 77486 - DNA, 25 bp, Probe sequence
gatgttgtgatgtaacttgaacgat

SEQ ID NO: 77487 - DNA, 25 bp, Probe sequence
aagatgttgtgatgtaacttgaacg

SEQ ID NO: 77488 - DNA, 25 bp, Probe sequence
tcgtccaccacttctcatatcatta

SEQ ID NO: 77489 - DNA, 25 bp, Probe sequence
atgttgtgatgtaacttgaacgatt

SEQ ID NO: 77490 - DNA, 25 bp, Probe sequence
gtccaccacttctcatatcattatc

SEQ ID NO: 77491 - DNA, 25 bp, Probe sequence
ataatgatatgagaagtggtggacg

SEQ ID NO: 77492 - DNA, 25 bp, Probe sequence
aacataagagtgacaatgaggacat

SEQ ID NO: 77493 - DNA, 25 bp, Probe sequence
tgataatgatatgagaagtggtgga

SEQ ID NO: 77494 - DNA, 25 bp, Probe sequence
taacataagagtgacaatgaggaca

SEQ ID NO: 77495 - DNA, 25 bp, Probe sequence
cgttcaagttacatcacaacatctt

SEQ ID NO: 77496 - DNA, 25 bp, Probe sequence
atcgttcaagttacatcacaacatc

SEQ ID NO: 77497 - DNA, 25 bp, Probe sequence
taatgatatgagaagtggtggacga

SEQ ID NO: 77498 - DNA, 25 bp, Probe sequence
aatcgttcaagttacatcacaacat

SEQ ID NO: 77499 - DNA, 25 bp, Probe sequence
gataatgatatgagaagtggtggac

SEQ ID NO: 77500 - DNA, 25 bp, Probe sequence
atattgcgttaaagtggagtgatta

SEQ ID NO: 77501 - DNA, 25 bp, Probe sequence
tatattgcgttaaagtggagtgatt

SEQ ID NO: 77502 - DNA, 25 bp, Probe sequence
ggaatatacagtatgacttacggta

SEQ ID NO: 77503 - DNA, 25 bp, Probe sequence
gggaatatacagtatgacttacggt

SEQ ID NO: 77504 - DNA, 25 bp, Probe sequence
tgggaatatacagtatgacttacgg

SEQ ID NO: 77505 - DNA, 25 bp, Probe sequence
tattgcgttaaagtggagtgattaa

SEQ ID NO: 77506 - DNA, 25 bp, Probe sequence
ttcattctcttacgttacaagttgt

SEQ ID NO: 77507 - DNA, 25 bp, Probe sequence
atatattgcgttaaagtggagtgat

SEQ ID NO: 77508 - DNA, 25 bp, Probe sequence
attgcgttaaagtggagtgattaat

SEQ ID NO: 77509 - DNA, 25 bp, Probe sequence
taccgtaagtcatactgtatattcc

SEQ ID NO: 77510 - DNA, 25 bp, Probe sequence
aatcactccactttaacgcaatata

SEQ ID NO: 77511 - DNA, 25 bp, Probe sequence
taatcactccactttaacgcaatat

SEQ ID NO: 77512 - DNA, 25 bp, Probe sequence
ccgtaagtcatactgtatattccca

SEQ ID NO: 77513 - DNA, 25 bp, Probe sequence
accgtaagtcatactgtatattccc

SEQ ID NO: 77514 - DNA, 25 bp, Probe sequence
ttaatcactccactttaacgcaata

SEQ ID NO: 77515 - DNA, 25 bp, Probe sequence
acaacttgtaacgtaagagaatgaa

SEQ ID NO: 77516 - DNA, 25 bp, Probe sequence
atcactccactttaacgcaatatat

SEQ ID NO: 77517 - DNA, 25 bp, Probe sequence
attaatcactccactttaacgcaat

SEQ ID NO: 77518 - DNA, 25 bp, Probe sequence
aacgcagttgattacaggattcatt

SEQ ID NO: 77519 - DNA, 25 bp, Probe sequence
acgcagttgattacaggattcattc

SEQ ID NO: 77520 - DNA, 25 bp, Probe sequence
cagttgattacaggattcattccat

SEQ ID NO: 77521 - DNA, 25 bp, Probe sequence
gcagttgattacaggattcattcca

SEQ ID NO: 77522 - DNA, 25 bp, Probe sequence
cctactcataacattctttggctat

SEQ ID NO: 77523 - DNA, 25 bp, Probe sequence
cgcagttgattacaggattcattcc

SEQ ID NO: 77524 - DNA, 25 bp, Probe sequence
agttgattacaggattcattccata

SEQ ID NO: 77525 - DNA, 25 bp, Probe sequence
aaacgcagttgattacaggattcat

SEQ ID NO: 77526 - DNA, 25 bp, Probe sequence
aacaaacgcagttgattacaggatt

SEQ ID NO: 77527 - DNA, 25 bp, Probe sequence
aatgaatcctgtaatcaactgcgtt

SEQ ID NO: 77528 - DNA, 25 bp, Probe sequence
gaatgaatcctgtaatcaactgcgt

SEQ ID NO: 77529 - DNA, 25 bp, Probe sequence
atggaatgaatcctgtaatcaactg

SEQ ID NO: 77530 - DNA, 25 bp, Probe sequence
tggaatgaatcctgtaatcaactgc

SEQ ID NO: 77531 - DNA, 25 bp, Probe sequence
atagccaaagaatgttatgagtagg

SEQ ID NO: 77532 - DNA, 25 bp, Probe sequence
ggaatgaatcctgtaatcaactgcg

SEQ ID NO: 77533 - DNA, 25 bp, Probe sequence
tatggaatgaatcctgtaatcaact

SEQ ID NO: 77534 - DNA, 25 bp, Probe sequence
atgaatcctgtaatcaactgcgttt

SEQ ID NO: 77535 - DNA, 25 bp, Probe sequence
atcctgtaatcaactgcgtttgttt

SEQ ID NO: 77536 - DNA, 25 bp, Probe sequence
acaacttcagctattctcggtaatt

SEQ ID NO: 77537 - DNA, 25 bp, Probe sequence
catacaacttcagctattctcggta

SEQ ID NO: 77538 - DNA, 25 bp, Probe sequence
tacaacttcagctattctcggtaat

SEQ ID NO: 77539 - DNA, 25 bp, Probe sequence
atacaacttcagctattctcggtaa

SEQ ID NO: 77540 - DNA, 25 bp, Probe sequence
gtcacatacaacttcagctattctc

SEQ ID NO: 77541 - DNA, 25 bp, Probe sequence
tcacatacaacttcagctattctcg

SEQ ID NO: 77542 - DNA, 25 bp, Probe sequence
caacttcagctattctcggtaatta

SEQ ID NO: 77543 - DNA, 25 bp, Probe sequence
tgagtcacatacaacttcagctatt

SEQ ID NO: 77544 - DNA, 25 bp, Probe sequence
ttgagtcacatacaacttcagctat

SEQ ID NO: 77545 - DNA, 25 bp, Probe sequence
aattaccgagaatagctgaagttgt

SEQ ID NO: 77546 - DNA, 25 bp, Probe sequence
taccgagaatagctgaagttgtatg

SEQ ID NO: 77547 - DNA, 25 bp, Probe sequence
gagaatagctgaagttgtatgtgac

SEQ ID NO: 77548 - DNA, 25 bp, Probe sequence
ttaccgagaatagctgaagttgtat

SEQ ID NO: 77549 - DNA, 25 bp, Probe sequence
attaccgagaatagctgaagttgta

SEQ ID NO: 77550 - DNA, 25 bp, Probe sequence
cgagaatagctgaagttgtatgtga

SEQ ID NO: 77551 - DNA, 25 bp, Probe sequence
taattaccgagaatagctgaagttg

SEQ ID NO: 77552 - DNA, 25 bp, Probe sequence
atagctgaagttgtatgtgactcaa

SEQ ID NO: 77553 - DNA, 25 bp, Probe sequence
aatagctgaagttgtatgtgactca

SEQ ID NO: 77554 - DNA, 25 bp, Probe sequence
aaccaccctatctcatacataaaca

SEQ ID NO: 77555 - DNA, 25 bp, Probe sequence
accaccctatctcatacataaacat

SEQ ID NO: 77556 - DNA, 25 bp, Probe sequence
aaaccaccctatctcatacataaac

SEQ ID NO: 77557 - DNA, 25 bp, Probe sequence
gtcgtccatttaatgaggtaaggtg

SEQ ID NO: 77558 - DNA, 25 bp, Probe sequence
ccaccctatctcatacataaacatg

SEQ ID NO: 77559 - DNA, 25 bp, Probe sequence
tccatttaatgaggtaaggtggttt

SEQ ID NO: 77560 - DNA, 25 bp, Probe sequence
gtccatttaatgaggtaaggtggtt

SEQ ID NO: 77561 - DNA, 25 bp, Probe sequence
ggtcgtccatttaatgaggtaaggt

SEQ ID NO: 77562 - DNA, 25 bp, Probe sequence
acgttctgccatttcacatacatat

SEQ ID NO: 77563 - DNA, 25 bp, Probe sequence
tgtttatgtatgagatagggtggtt

SEQ ID NO: 77564 - DNA, 25 bp, Probe sequence
atgtttatgtatgagatagggtggt

SEQ ID NO: 77565 - DNA, 25 bp, Probe sequence
gtttatgtatgagatagggtggttt

SEQ ID NO: 77566 - DNA, 25 bp, Probe sequence
caccttacctcattaaatggacgac

SEQ ID NO: 77567 - DNA, 25 bp, Probe sequence
catgtttatgtatgagatagggtgg

SEQ ID NO: 77568 - DNA, 25 bp, Probe sequence
aaaccaccttacctcattaaatgga

SEQ ID NO: 77569 - DNA, 25 bp, Probe sequence
aaccaccttacctcattaaatggac

SEQ ID NO: 77570 - DNA, 25 bp, Probe sequence
accttacctcattaaatggacgacc

SEQ ID NO: 77571 - DNA, 25 bp, Probe sequence
atatgtatgtgaaatggcagaacgt

SEQ ID NO: 77572 - DNA, 25 bp, Probe sequence
cttaacatagtccgatgaccacttc

SEQ ID NO: 77573 - DNA, 25 bp, Probe sequence
ttaacatagtccgatgaccacttca

SEQ ID NO: 77574 - DNA, 25 bp, Probe sequence
gcttaacatagtccgatgaccactt

SEQ ID NO: 77575 - DNA, 25 bp, Probe sequence
ccgatgaccacttcattctattagt

SEQ ID NO: 77576 - DNA, 25 bp, Probe sequence
tccgatgaccacttcattctattag

SEQ ID NO: 77577 - DNA, 25 bp, Probe sequence
gtccgatgaccacttcattctatta

SEQ ID NO: 77578 - DNA, 25 bp, Probe sequence
tagtccgatgaccacttcattctat

SEQ ID NO: 77579 - DNA, 25 bp, Probe sequence
atagtccgatgaccacttcattcta

SEQ ID NO: 77580 - DNA, 25 bp, Probe sequence
taacatagtccgatgaccacttcat

SEQ ID NO: 77581 - DNA, 25 bp, Probe sequence
gaagtggtcatcggactatgttaag

SEQ ID NO: 77582 - DNA, 25 bp, Probe sequence
tgaagtggtcatcggactatgttaa

SEQ ID NO: 77583 - DNA, 25 bp, Probe sequence
aagtggtcatcggactatgttaagc

SEQ ID NO: 77584 - DNA, 25 bp, Probe sequence
taatagaatgaagtggtcatcggac

SEQ ID NO: 77585 - DNA, 25 bp, Probe sequence
ctaatagaatgaagtggtcatcgga

SEQ ID NO: 77586 - DNA, 25 bp, Probe sequence
actaatagaatgaagtggtcatcgg

SEQ ID NO: 77587 - DNA, 25 bp, Probe sequence
tagaatgaagtggtcatcggactat

SEQ ID NO: 77588 - DNA, 25 bp, Probe sequence
atagaatgaagtggtcatcggacta

SEQ ID NO: 77589 - DNA, 25 bp, Probe sequence
atgaagtggtcatcggactatgtta

SEQ ID NO: 77590 - DNA, 25 bp, Probe sequence
gtatttaatgccatgtattcctcgg

SEQ ID NO: 77591 - DNA, 25 bp, Probe sequence
cgtgtatttaatgccatgtattcct

SEQ ID NO: 77592 - DNA, 25 bp, Probe sequence
tatttaatgccatgtattcctcggg

SEQ ID NO: 77593 - DNA, 25 bp, Probe sequence
tgtatttaatgccatgtattcctcg

SEQ ID NO: 77594 - DNA, 25 bp, Probe sequence
gtgtatttaatgccatgtattcctc

SEQ ID NO: 77595 - DNA, 25 bp, Probe sequence
acgtgtatttaatgccatgtattcc

SEQ ID NO: 77596 - DNA, 25 bp, Probe sequence
aacgtgtatttaatgccatgtattc

SEQ ID NO: 77597 - DNA, 25 bp, Probe sequence
aaacgtgtatttaatgccatgtatt

SEQ ID NO: 77598 - DNA, 25 bp, Probe sequence
atttaatgccatgtattcctcggga

SEQ ID NO: 77599 - DNA, 25 bp, Probe sequence
ccgaggaatacatggcattaaatac

SEQ ID NO: 77600 - DNA, 25 bp, Probe sequence
aggaatacatggcattaaatacacg

SEQ ID NO: 77601 - DNA, 25 bp, Probe sequence
cgaggaatacatggcattaaataca

SEQ ID NO: 77602 - DNA, 25 bp, Probe sequence
cccgaggaatacatggcattaaata

SEQ ID NO: 77603 - DNA, 25 bp, Probe sequence
gaggaatacatggcattaaatacac

SEQ ID NO: 77604 - DNA, 25 bp, Probe sequence
ggaatacatggcattaaatacacgt

SEQ ID NO: 77605 - DNA, 25 bp, Probe sequence
gaatacatggcattaaatacacgtt

SEQ ID NO: 77606 - DNA, 25 bp, Probe sequence
aatacatggcattaaatacacgttt

SEQ ID NO: 77607 - DNA, 25 bp, Probe sequence
tcccgaggaatacatggcattaaat

SEQ ID NO: 77608 - DNA, 25 bp, Probe sequence
atgattgcgtatagtgatgtgtctt

SEQ ID NO: 77609 - DNA, 25 bp, Probe sequence
aatgattgcgtatagtgatgtgtct

SEQ ID NO: 77610 - DNA, 25 bp, Probe sequence
caatgattgcgtatagtgatgtgtc

SEQ ID NO: 77611 - DNA, 25 bp, Probe sequence
tacaatgattgcgtatagtgatgtg

SEQ ID NO: 77612 - DNA, 25 bp, Probe sequence
acaatgattgcgtatagtgatgtgt

SEQ ID NO: 77613 - DNA, 25 bp, Probe sequence
ttacaatgattgcgtatagtgatgt

SEQ ID NO: 77614 - DNA, 25 bp, Probe sequence
tgattgcgtatagtgatgtgtcttt

SEQ ID NO: 77615 - DNA, 25 bp, Probe sequence
tttacaatgattgcgtatagtgatg

SEQ ID NO: 77616 - DNA, 25 bp, Probe sequence
gattgcgtatagtgatgtgtctttt

SEQ ID NO: 77617 - DNA, 25 bp, Probe sequence
agacacatcactatacgcaatcatt

SEQ ID NO: 77618 - DNA, 25 bp, Probe sequence
aagacacatcactatacgcaatcat

SEQ ID NO: 77619 - DNA, 25 bp, Probe sequence
gacacatcactatacgcaatcattg

SEQ ID NO: 77620 - DNA, 25 bp, Probe sequence
cacatcactatacgcaatcattgta

SEQ ID NO: 77621 - DNA, 25 bp, Probe sequence
acacatcactatacgcaatcattgt

SEQ ID NO: 77622 - DNA, 25 bp, Probe sequence
acatcactatacgcaatcattgtaa

SEQ ID NO: 77623 - DNA, 25 bp, Probe sequence
aaagacacatcactatacgcaatca

SEQ ID NO: 77624 - DNA, 25 bp, Probe sequence
catcactatacgcaatcattgtaaa

SEQ ID NO: 77625 - DNA, 25 bp, Probe sequence
aaaagacacatcactatacgcaatc

SEQ ID NO: 77626 - DNA, 25 bp, Probe sequence
cttacacacctacaacgacattgac

SEQ ID NO: 77627 - DNA, 25 bp, Probe sequence
ccctccatatcatctttcctaacaa

SEQ ID NO: 77628 - DNA, 25 bp, Probe sequence
tccctccatatcatctttcctaaca

SEQ ID NO: 77629 - DNA, 25 bp, Probe sequence
ttccctccatatcatctttcctaac

SEQ ID NO: 77630 - DNA, 25 bp, Probe sequence
ctattccctccatatcatctttcct

SEQ ID NO: 77631 - DNA, 25 bp, Probe sequence
tctattccctccatatcatctttcc

SEQ ID NO: 77632 - DNA, 25 bp, Probe sequence
attccctccatatcatctttcctaa

SEQ ID NO: 77633 - DNA, 25 bp, Probe sequence
cctccatatcatctttcctaacaat

SEQ ID NO: 77634 - DNA, 25 bp, Probe sequence
tattccctccatatcatctttccta

SEQ ID NO: 77635 - DNA, 25 bp, Probe sequence
gtcaatgtcgttgtaggtgtgtaag

SEQ ID NO: 77636 - DNA, 25 bp, Probe sequence
ttgttaggaaagatgatatggaggg

SEQ ID NO: 77637 - DNA, 25 bp, Probe sequence
gttaggaaagatgatatggagggaa

SEQ ID NO: 77638 - DNA, 25 bp, Probe sequence
tgttaggaaagatgatatggaggga

SEQ ID NO: 77639 - DNA, 25 bp, Probe sequence
ggaaagatgatatggagggaataga

SEQ ID NO: 77640 - DNA, 25 bp, Probe sequence
aggaaagatgatatggagggaatag

SEQ ID NO: 77641 - DNA, 25 bp, Probe sequence
ttaggaaagatgatatggagggaat

SEQ ID NO: 77642 - DNA, 25 bp, Probe sequence
attgttaggaaagatgatatggagg

SEQ ID NO: 77643 - DNA, 25 bp, Probe sequence
taggaaagatgatatggagggaata

SEQ ID NO: 77644 - DNA, 25 bp, Probe sequence
gccttgagcctatcataacttcctt

SEQ ID NO: 77645 - DNA, 25 bp, Probe sequence
ccttgagcctatcataacttccttt

SEQ ID NO: 77646 - DNA, 25 bp, Probe sequence
aagttatgatttaatggccttgagc

SEQ ID NO: 77647 - DNA, 25 bp, Probe sequence
ggaagttatgatttaatggccttga

SEQ ID NO: 77648 - DNA, 25 bp, Probe sequence
cttgagcctatcataacttcctttt

SEQ ID NO: 77649 - DNA, 25 bp, Probe sequence
gaagttatgatttaatggccttgag

SEQ ID NO: 77650 - DNA, 25 bp, Probe sequence
aggaagttatgatttaatggccttg

SEQ ID NO: 77651 - DNA, 25 bp, Probe sequence
agcctatcataacttccttttatca

SEQ ID NO: 77652 - DNA, 25 bp, Probe sequence
ttgagcctatcataacttcctttta

SEQ ID NO: 77653 - DNA, 25 bp, Probe sequence
aaggaagttatgataggctcaaggc

SEQ ID NO: 77654 - DNA, 25 bp, Probe sequence
aaaggaagttatgataggctcaagg

SEQ ID NO: 77655 - DNA, 25 bp, Probe sequence
gctcaaggccattaaatcataactt

SEQ ID NO: 77656 - DNA, 25 bp, Probe sequence
tcaaggccattaaatcataacttcc

SEQ ID NO: 77657 - DNA, 25 bp, Probe sequence
aaaaggaagttatgataggctcaag

SEQ ID NO: 77658 - DNA, 25 bp, Probe sequence
ctcaaggccattaaatcataacttc

SEQ ID NO: 77659 - DNA, 25 bp, Probe sequence
caaggccattaaatcataacttcct

SEQ ID NO: 77660 - DNA, 25 bp, Probe sequence
aggccattaaatcataacttccttt

SEQ ID NO: 77661 - DNA, 25 bp, Probe sequence
taaaaggaagttatgataggctcaa

SEQ ID NO: 77662 - DNA, 25 bp, Probe sequence
tatacggtgagtacaacatgatctg

SEQ ID NO: 77663 - DNA, 25 bp, Probe sequence
ttatacggtgagtacaacatgatct

SEQ ID NO: 77664 - DNA, 25 bp, Probe sequence
gttatacggtgagtacaacatgatc

SEQ ID NO: 77665 - DNA, 25 bp, Probe sequence
atacggtgagtacaacatgatctgt

SEQ ID NO: 77666 - DNA, 25 bp, Probe sequence
ttgctcagttccaaacatagatgat

SEQ ID NO: 77667 - DNA, 25 bp, Probe sequence
aagattagcgttatacggtgagtac

SEQ ID NO: 77668 - DNA, 25 bp, Probe sequence
gattagcgttatacggtgagtacaa

SEQ ID NO: 77669 - DNA, 25 bp, Probe sequence
tgctcagttccaaacatagatgatc

SEQ ID NO: 77670 - DNA, 25 bp, Probe sequence
attagcgttatacggtgagtacaac

SEQ ID NO: 77671 - DNA, 25 bp, Probe sequence
cagatcatgttgtactcaccgtata

SEQ ID NO: 77672 - DNA, 25 bp, Probe sequence
agatcatgttgtactcaccgtataa

SEQ ID NO: 77673 - DNA, 25 bp, Probe sequence
gatcatgttgtactcaccgtataac

SEQ ID NO: 77674 - DNA, 25 bp, Probe sequence
acagatcatgttgtactcaccgtat

SEQ ID NO: 77675 - DNA, 25 bp, Probe sequence
atcatctatgtttggaactgagcaa

SEQ ID NO: 77676 - DNA, 25 bp, Probe sequence
gtactcaccgtataacgctaatctt

SEQ ID NO: 77677 - DNA, 25 bp, Probe sequence
ttgtactcaccgtataacgctaatc

SEQ ID NO: 77678 - DNA, 25 bp, Probe sequence
gatcatctatgtttggaactgagca

SEQ ID NO: 77679 - DNA, 25 bp, Probe sequence
gttgtactcaccgtataacgctaat

SEQ ID NO: 77680 - DNA, 25 bp, Probe sequence
attacggttactggaattggcacat

SEQ ID NO: 77681 - DNA, 25 bp, Probe sequence
ctttacctgcttatcttcaaaccat

SEQ ID NO: 77682 - DNA, 25 bp, Probe sequence
gtgctttacctgcttatcttcaaac

SEQ ID NO: 77683 - DNA, 25 bp, Probe sequence
ttacggttactggaattggcacatt

SEQ ID NO: 77684 - DNA, 25 bp, Probe sequence
tttacctgcttatcttcaaaccatt

SEQ ID NO: 77685 - DNA, 25 bp, Probe sequence
tacctgcttatcttcaaaccattac

SEQ ID NO: 77686 - DNA, 25 bp, Probe sequence
acctgcttatcttcaaaccattacg

SEQ ID NO: 77687 - DNA, 25 bp, Probe sequence
gctttacctgcttatcttcaaacca

SEQ ID NO: 77688 - DNA, 25 bp, Probe sequence
tgctttacctgcttatcttcaaacc

SEQ ID NO: 77689 - DNA, 25 bp, Probe sequence
atgtgccaattccagtaaccgtaat

SEQ ID NO: 77690 - DNA, 25 bp, Probe sequence
gtttgaagataagcaggtaaagcac

SEQ ID NO: 77691 - DNA, 25 bp, Probe sequence
atggtttgaagataagcaggtaaag

SEQ ID NO: 77692 - DNA, 25 bp, Probe sequence
aatggtttgaagataagcaggtaaa

SEQ ID NO: 77693 - DNA, 25 bp, Probe sequence
aatgtgccaattccagtaaccgtaa

SEQ ID NO: 77694 - DNA, 25 bp, Probe sequence
gtaatggtttgaagataagcaggta

SEQ ID NO: 77695 - DNA, 25 bp, Probe sequence
cgtaatggtttgaagataagcaggt

SEQ ID NO: 77696 - DNA, 25 bp, Probe sequence
ggtttgaagataagcaggtaaagca

SEQ ID NO: 77697 - DNA, 25 bp, Probe sequence
tggtttgaagataagcaggtaaagc

SEQ ID NO: 77698 - DNA, 25 bp, Probe sequence
aacgctccttatgacagagtattaa

SEQ ID NO: 77699 - DNA, 25 bp, Probe sequence
gttgtcctgacatcctcattaagaa

SEQ ID NO: 77700 - DNA, 25 bp, Probe sequence
ttgttgtcctgacatcctcattaag

SEQ ID NO: 77701 - DNA, 25 bp, Probe sequence
aataagccgataaagatacacacct

SEQ ID NO: 77702 - DNA, 25 bp, Probe sequence
agatacacacctttaccgactattt

SEQ ID NO: 77703 - DNA, 25 bp, Probe sequence
gttgttgtcctgacatcctcattaa

SEQ ID NO: 77704 - DNA, 25 bp, Probe sequence
aaataagccgataaagatacacacc

SEQ ID NO: 77705 - DNA, 25 bp, Probe sequence
atttaactttcttccactaaccgtc

SEQ ID NO: 77706 - DNA, 25 bp, Probe sequence
ataagccgataaagatacacacctt

SEQ ID NO: 77707 - DNA, 25 bp, Probe sequence
ttaatactctgtcataaggagcgtt

SEQ ID NO: 77708 - DNA, 25 bp, Probe sequence
ttcttaatgaggatgtcaggacaac

SEQ ID NO: 77709 - DNA, 25 bp, Probe sequence
cttaatgaggatgtcaggacaacaa

SEQ ID NO: 77710 - DNA, 25 bp, Probe sequence
aggtgtgtatctttatcggcttatt

SEQ ID NO: 77711 - DNA, 25 bp, Probe sequence
aaatagtcggtaaaggtgtgtatct

SEQ ID NO: 77712 - DNA, 25 bp, Probe sequence
ttaatgaggatgtcaggacaacaac

SEQ ID NO: 77713 - DNA, 25 bp, Probe sequence
ggtgtgtatctttatcggcttattt

SEQ ID NO: 77714 - DNA, 25 bp, Probe sequence
gacggttagtggaagaaagttaaat

SEQ ID NO: 77715 - DNA, 25 bp, Probe sequence
aaggtgtgtatctttatcggcttat

SEQ ID NO: 77716 - DNA, 25 bp, Probe sequence
acatctccttattcgcttaatggtt

SEQ ID NO: 77717 - DNA, 25 bp, Probe sequence
aacatctccttattcgcttaatggt

SEQ ID NO: 77718 - DNA, 25 bp, Probe sequence
catctccttattcgcttaatggtta

SEQ ID NO: 77719 - DNA, 25 bp, Probe sequence
taacatctccttattcgcttaatgg

SEQ ID NO: 77720 - DNA, 25 bp, Probe sequence
tctccttattcgcttaatggttatt

SEQ ID NO: 77721 - DNA, 25 bp, Probe sequence
atctccttattcgcttaatggttat

SEQ ID NO: 77722 - DNA, 25 bp, Probe sequence
ttaacatctccttattcgcttaatg

SEQ ID NO: 77723 - DNA, 25 bp, Probe sequence
ctccttattcgcttaatggttatta

SEQ ID NO: 77724 - DNA, 25 bp, Probe sequence
tccttattcgcttaatggttattat

SEQ ID NO: 77725 - DNA, 25 bp, Probe sequence
accattaagcgaataaggagatgtt

SEQ ID NO: 77726 - DNA, 25 bp, Probe sequence
aaccattaagcgaataaggagatgt

SEQ ID NO: 77727 - DNA, 25 bp, Probe sequence
ccattaagcgaataaggagatgtta

SEQ ID NO: 77728 - DNA, 25 bp, Probe sequence
taaccattaagcgaataaggagatg

SEQ ID NO: 77729 - DNA, 25 bp, Probe sequence
aataaccattaagcgaataaggaga

SEQ ID NO: 77730 - DNA, 25 bp, Probe sequence
ataaccattaagcgaataaggagat

SEQ ID NO: 77731 - DNA, 25 bp, Probe sequence
cattaagcgaataaggagatgttaa

SEQ ID NO: 77732 - DNA, 25 bp, Probe sequence
taataaccattaagcgaataaggag

SEQ ID NO: 77733 - DNA, 25 bp, Probe sequence
ataataaccattaagcgaataagga

SEQ ID NO: 77734 - DNA, 25 bp, Probe sequence
atgatatgttgtctaccctacgatg

SEQ ID NO: 77735 - DNA, 25 bp, Probe sequence
gatatgttgtctaccctacgatgat

SEQ ID NO: 77736 - DNA, 25 bp, Probe sequence
tgatatgttgtctaccctacgatga

SEQ ID NO: 77737 - DNA, 25 bp, Probe sequence
aatgatatgttgtctaccctacgat

SEQ ID NO: 77738 - DNA, 25 bp, Probe sequence
ctttcgctaatgatagacagttgtt

SEQ ID NO: 77739 - DNA, 25 bp, Probe sequence
tttcgctaatgatagacagttgttt

SEQ ID NO: 77740 - DNA, 25 bp, Probe sequence
caatgatatgttgtctaccctacga

SEQ ID NO: 77741 - DNA, 25 bp, Probe sequence
tcaatgatatgttgtctaccctacg

SEQ ID NO: 77742 - DNA, 25 bp, Probe sequence
aagtcaatgatatgttgtctaccct

SEQ ID NO: 77743 - DNA, 25 bp, Probe sequence
catcgtagggtagacaacatatcat

SEQ ID NO: 77744 - DNA, 25 bp, Probe sequence
atcatcgtagggtagacaacatatc

SEQ ID NO: 77745 - DNA, 25 bp, Probe sequence
tcatcgtagggtagacaacatatca

SEQ ID NO: 77746 - DNA, 25 bp, Probe sequence
atcgtagggtagacaacatatcatt

SEQ ID NO: 77747 - DNA, 25 bp, Probe sequence
aacaactgtctatcattagcgaaag

SEQ ID NO: 77748 - DNA, 25 bp, Probe sequence
tcgtagggtagacaacatatcattg

SEQ ID NO: 77749 - DNA, 25 bp, Probe sequence
aaacaactgtctatcattagcgaaa

SEQ ID NO: 77750 - DNA, 25 bp, Probe sequence
cgtagggtagacaacatatcattga

SEQ ID NO: 77751 - DNA, 25 bp, Probe sequence
agggtagacaacatatcattgactt

SEQ ID NO: 77752 - DNA, 25 bp, Probe sequence
aactaattatccatagcttgaacct

SEQ ID NO: 77753 - DNA, 25 bp, Probe sequence
actaattatccatagcttgaaccta

SEQ ID NO: 77754 - DNA, 25 bp, Probe sequence
aaactaattatccatagcttgaacc

SEQ ID NO: 77755 - DNA, 25 bp, Probe sequence
ctaattatccatagcttgaacctat

SEQ ID NO: 77756 - DNA, 25 bp, Probe sequence
aaaattcgctcctgttcttttaaga

SEQ ID NO: 77757 - DNA, 25 bp, Probe sequence
aattatccatagcttgaacctataa

SEQ ID NO: 77758 - DNA, 25 bp, Probe sequence
aaacgcttacattattatcttcaat

SEQ ID NO: 77759 - DNA, 25 bp, Probe sequence
gcttgaacctataaataaaaggagc

SEQ ID NO: 77760 - DNA, 25 bp, Probe sequence
cttgaacctataaataaaaggagca

SEQ ID NO: 77761 - DNA, 25 bp, Probe sequence
aggttcaagctatggataattagtt

SEQ ID NO: 77762 - DNA, 25 bp, Probe sequence
taggttcaagctatggataattagt

SEQ ID NO: 77763 - DNA, 25 bp, Probe sequence
ggttcaagctatggataattagttt

SEQ ID NO: 77764 - DNA, 25 bp, Probe sequence
ataggttcaagctatggataattag

SEQ ID NO: 77765 - DNA, 25 bp, Probe sequence
tcttaaaagaacaggagcgaatttt

SEQ ID NO: 77766 - DNA, 25 bp, Probe sequence
ttataggttcaagctatggataatt

SEQ ID NO: 77767 - DNA, 25 bp, Probe sequence
attgaagataataatgtaagcgttt

SEQ ID NO: 77768 - DNA, 25 bp, Probe sequence
gctccttttatttataggttcaagc

SEQ ID NO: 77769 - DNA, 25 bp, Probe sequence
tgctccttttatttataggttcaag

SEQ ID NO: 77770 - DNA, 25 bp, Probe sequence
ctcttatgcagttgctcagatcatc

SEQ ID NO: 77771 - DNA, 25 bp, Probe sequence
tgcagttgctcagatcatcgtataa

SEQ ID NO: 77772 - DNA, 25 bp, Probe sequence
gcagttgctcagatcatcgtataaa

SEQ ID NO: 77773 - DNA, 25 bp, Probe sequence
atgcagttgctcagatcatcgtata

SEQ ID NO: 77774 - DNA, 25 bp, Probe sequence
tatgcagttgctcagatcatcgtat

SEQ ID NO: 77775 - DNA, 25 bp, Probe sequence
ttatgcagttgctcagatcatcgta

SEQ ID NO: 77776 - DNA, 25 bp, Probe sequence
cctcttatgcagttgctcagatcat

SEQ ID NO: 77777 - DNA, 25 bp, Probe sequence
tattagagcctcttatgcagttgcg

SEQ ID NO: 77778 - DNA, 25 bp, Probe sequence
tcttatgcagttgctcagatcatcg

SEQ ID NO: 77779 - DNA, 25 bp, Probe sequence
gatgatctgagcaactgcataagag

SEQ ID NO: 77780 - DNA, 25 bp, Probe sequence
ttatacgatgatctgagcaactgca

SEQ ID NO: 77781 - DNA, 25 bp, Probe sequence
tttatacgatgatctgagcaactgc

SEQ ID NO: 77782 - DNA, 25 bp, Probe sequence
atacgatgatctgagcaactgcata

SEQ ID NO: 77783 - DNA, 25 bp, Probe sequence
tatacgatgatctgagcaactgcat

SEQ ID NO: 77784 - DNA, 25 bp, Probe sequence
tacgatgatctgagcaactgcataa

SEQ ID NO: 77785 - DNA, 25 bp, Probe sequence
atgatctgagcaactgcataagagg

SEQ ID NO: 77786 - DNA, 25 bp, Probe sequence
cgcaactgcataagaggctctaata

SEQ ID NO: 77787 - DNA, 25 bp, Probe sequence
cgatgatctgagcaactgcataaga

SEQ ID NO: 77788 - DNA, 25 bp, Probe sequence
ataagcagtaagatgactacaactt

SEQ ID NO: 77789 - DNA, 25 bp, Probe sequence
aataagcagtaagatgactacaact

SEQ ID NO: 77790 - DNA, 25 bp, Probe sequence
aagcagtaagatgactacaacttaa

SEQ ID NO: 77791 - DNA, 25 bp, Probe sequence
taagcagtaagatgactacaactta

SEQ ID NO: 77792 - DNA, 25 bp, Probe sequence
gcagtaagatgactacaacttaaga

SEQ ID NO: 77793 - DNA, 25 bp, Probe sequence
agcagtaagatgactacaacttaag

SEQ ID NO: 77794 - DNA, 25 bp, Probe sequence
gcaatgcaaatctcgtcacatataa

SEQ ID NO: 77795 - DNA, 25 bp, Probe sequence
ttaagaaatactcacattctgccct

SEQ ID NO: 77796 - DNA, 25 bp, Probe sequence
aaataagcagtaagatgactacaac

SEQ ID NO: 77797 - DNA, 25 bp, Probe sequence
agttgtagtcatcttactgcttatt

SEQ ID NO: 77798 - DNA, 25 bp, Probe sequence
aagttgtagtcatcttactgcttat

SEQ ID NO: 77799 - DNA, 25 bp, Probe sequence
ttaagttgtagtcatcttactgctt

SEQ ID NO: 77800 - DNA, 25 bp, Probe sequence
taagttgtagtcatcttactgctta

SEQ ID NO: 77801 - DNA, 25 bp, Probe sequence
cttaagttgtagtcatcttactgct

SEQ ID NO: 77802 - DNA, 25 bp, Probe sequence
tcttaagttgtagtcatcttactgc

SEQ ID NO: 77803 - DNA, 25 bp, Probe sequence
ttatatgtgacgagatttgcattgc

SEQ ID NO: 77804 - DNA, 25 bp, Probe sequence
gttgtagtcatcttactgcttattt

SEQ ID NO: 77805 - DNA, 25 bp, Probe sequence
agggcagaatgtgagtatttcttaa

SEQ ID NO: 77806 - DNA, 25 bp, Probe sequence
tctctcggcttgtaatatgtataat

SEQ ID NO: 77807 - DNA, 25 bp, Probe sequence
atctctcggcttgtaatatgtataa

SEQ ID NO: 77808 - DNA, 25 bp, Probe sequence
ttatctctcggcttgtaatatgtat

SEQ ID NO: 77809 - DNA, 25 bp, Probe sequence
ctcggcttgtaatatgtataattgt

SEQ ID NO: 77810 - DNA, 25 bp, Probe sequence
acatagacaatttatctctcggctt

SEQ ID NO: 77811 - DNA, 25 bp, Probe sequence
gacatagacaatttatctctcggct

SEQ ID NO: 77812 - DNA, 25 bp, Probe sequence
tgacatagacaatttatctctcggc

SEQ ID NO: 77813 - DNA, 25 bp, Probe sequence
catagacaatttatctctcggcttg

SEQ ID NO: 77814 - DNA, 25 bp, Probe sequence
tctcggcttgtaatatgtataattg

SEQ ID NO: 77815 - DNA, 25 bp, Probe sequence
atacatattacaagccgagagataa

SEQ ID NO: 77816 - DNA, 25 bp, Probe sequence
ttatacatattacaagccgagagat

SEQ ID NO: 77817 - DNA, 25 bp, Probe sequence
attatacatattacaagccgagaga

SEQ ID NO: 77818 - DNA, 25 bp, Probe sequence
acaattatacatattacaagccgag

SEQ ID NO: 77819 - DNA, 25 bp, Probe sequence
aagccgagagataaattgtctatgt

SEQ ID NO: 77820 - DNA, 25 bp, Probe sequence
agccgagagataaattgtctatgtc

SEQ ID NO: 77821 - DNA, 25 bp, Probe sequence
gccgagagataaattgtctatgtca

SEQ ID NO: 77822 - DNA, 25 bp, Probe sequence
caagccgagagataaattgtctatg

SEQ ID NO: 77823 - DNA, 25 bp, Probe sequence
caattatacatattacaagccgaga

SEQ ID NO: 77824 - DNA, 25 bp, Probe sequence
ggtagcctcccatatttatgtaatc

SEQ ID NO: 77825 - DNA, 25 bp, Probe sequence
gaaggtagcctcccatatttatgta

SEQ ID NO: 77826 - DNA, 25 bp, Probe sequence
aaggtagcctcccatatttatgtaa

SEQ ID NO: 77827 - DNA, 25 bp, Probe sequence
aggtagcctcccatatttatgtaat

SEQ ID NO: 77828 - DNA, 25 bp, Probe sequence
gtagcctcccatatttatgtaatct

SEQ ID NO: 77829 - DNA, 25 bp, Probe sequence
agcctcccatatttatgtaatctat

SEQ ID NO: 77830 - DNA, 25 bp, Probe sequence
tgactcgtataaattaacataccct

SEQ ID NO: 77831 - DNA, 25 bp, Probe sequence
aataatactcgttaaggagaatgat

SEQ ID NO: 77832 - DNA, 25 bp, Probe sequence
tagcctcccatatttatgtaatcta

SEQ ID NO: 77833 - DNA, 25 bp, Probe sequence
gattacataaatatgggaggctacc

SEQ ID NO: 77834 - DNA, 25 bp, Probe sequence
tacataaatatgggaggctaccttc

SEQ ID NO: 77835 - DNA, 25 bp, Probe sequence
ttacataaatatgggaggctacctt

SEQ ID NO: 77836 - DNA, 25 bp, Probe sequence
attacataaatatgggaggctacct

SEQ ID NO: 77837 - DNA, 25 bp, Probe sequence
agattacataaatatgggaggctac

SEQ ID NO: 77838 - DNA, 25 bp, Probe sequence
atagattacataaatatgggaggct

SEQ ID NO: 77839 - DNA, 25 bp, Probe sequence
agggtatgttaatttatacgagtca

SEQ ID NO: 77840 - DNA, 25 bp, Probe sequence
atcattctccttaacgagtattatt

SEQ ID NO: 77841 - DNA, 25 bp, Probe sequence
tagattacataaatatgggaggcta

SEQ ID NO: 77842 - DNA, 25 bp, Probe sequence
taaccactgatgctattgattcctt

SEQ ID NO: 77843 - DNA, 25 bp, Probe sequence
ataaccactgatgctattgattcct

SEQ ID NO: 77844 - DNA, 25 bp, Probe sequence
tataaccactgatgctattgattcc

SEQ ID NO: 77845 - DNA, 25 bp, Probe sequence
agtcttatctataaccactgatgct

SEQ ID NO: 77846 - DNA, 25 bp, Probe sequence
tctataaccactgatgctattgatt

SEQ ID NO: 77847 - DNA, 25 bp, Probe sequence
ctataaccactgatgctattgattc

SEQ ID NO: 77848 - DNA, 25 bp, Probe sequence
gtcttatctataaccactgatgcta

SEQ ID NO: 77849 - DNA, 25 bp, Probe sequence
atctataaccactgatgctattgat

SEQ ID NO: 77850 - DNA, 25 bp, Probe sequence
aaccactgatgctattgattccttt

SEQ ID NO: 77851 - DNA, 25 bp, Probe sequence
aaggaatcaatagcatcagtggtta

SEQ ID NO: 77852 - DNA, 25 bp, Probe sequence
aggaatcaatagcatcagtggttat

SEQ ID NO: 77853 - DNA, 25 bp, Probe sequence
ggaatcaatagcatcagtggttata

SEQ ID NO: 77854 - DNA, 25 bp, Probe sequence
agcatcagtggttatagataagact

SEQ ID NO: 77855 - DNA, 25 bp, Probe sequence
aatcaatagcatcagtggttataga

SEQ ID NO: 77856 - DNA, 25 bp, Probe sequence
tagcatcagtggttatagataagac

SEQ ID NO: 77857 - DNA, 25 bp, Probe sequence
gaatcaatagcatcagtggttatag

SEQ ID NO: 77858 - DNA, 25 bp, Probe sequence
atcaatagcatcagtggttatagat

SEQ ID NO: 77859 - DNA, 25 bp, Probe sequence
aaaggaatcaatagcatcagtggtt

SEQ ID NO: 77860 - DNA, 25 bp, Probe sequence
tgctatcaataatctatcggctaca

SEQ ID NO: 77861 - DNA, 25 bp, Probe sequence
gctatcaataatctatcggctacat

SEQ ID NO: 77862 - DNA, 25 bp, Probe sequence
ttgctatcaataatctatcggctac

SEQ ID NO: 77863 - DNA, 25 bp, Probe sequence
aatcactccatcacacatttgctat

SEQ ID NO: 77864 - DNA, 25 bp, Probe sequence
tcaataatctatcggctacatatca

SEQ ID NO: 77865 - DNA, 25 bp, Probe sequence
atcactccatcacacatttgctatc

SEQ ID NO: 77866 - DNA, 25 bp, Probe sequence
ctccatcacacatttgctatcaata

SEQ ID NO: 77867 - DNA, 25 bp, Probe sequence
actccatcacacatttgctatcaat

SEQ ID NO: 77868 - DNA, 25 bp, Probe sequence
tccatcacacatttgctatcaataa

SEQ ID NO: 77869 - DNA, 25 bp, Probe sequence
tgtagccgatagattattgatagca

SEQ ID NO: 77870 - DNA, 25 bp, Probe sequence
atgtagccgatagattattgatagc

SEQ ID NO: 77871 - DNA, 25 bp, Probe sequence
gtagccgatagattattgatagcaa

SEQ ID NO: 77872 - DNA, 25 bp, Probe sequence
atagcaaatgtgtgatggagtgatt

SEQ ID NO: 77873 - DNA, 25 bp, Probe sequence
tgatatgtagccgatagattattga

SEQ ID NO: 77874 - DNA, 25 bp, Probe sequence
gatagcaaatgtgtgatggagtgat

SEQ ID NO: 77875 - DNA, 25 bp, Probe sequence
attgatagcaaatgtgtgatggagt

SEQ ID NO: 77876 - DNA, 25 bp, Probe sequence
tattgatagcaaatgtgtgatggag

SEQ ID NO: 77877 - DNA, 25 bp, Probe sequence
ttattgatagcaaatgtgtgatgga

SEQ ID NO: 77878 - DNA, 25 bp, Probe sequence
cccatacctttattgccttatttgt

SEQ ID NO: 77879 - DNA, 25 bp, Probe sequence
tcccatacctttattgccttatttg

SEQ ID NO: 77880 - DNA, 25 bp, Probe sequence
catttcccatacctttattgcctta

SEQ ID NO: 77881 - DNA, 25 bp, Probe sequence
ttcccatacctttattgccttattt

SEQ ID NO: 77882 - DNA, 25 bp, Probe sequence
tttcccatacctttattgccttatt

SEQ ID NO: 77883 - DNA, 25 bp, Probe sequence
atttcccatacctttattgccttat

SEQ ID NO: 77884 - DNA, 25 bp, Probe sequence
catcattgtgccgagatatttatat

SEQ ID NO: 77885 - DNA, 25 bp, Probe sequence
ccatacctttattgccttatttgta

SEQ ID NO: 77886 - DNA, 25 bp, Probe sequence
tcattgtgccgagatatttatatca

SEQ ID NO: 77887 - DNA, 25 bp, Probe sequence
acaaataaggcaataaaggtatggg

SEQ ID NO: 77888 - DNA, 25 bp, Probe sequence
taaggcaataaaggtatgggaaatg

SEQ ID NO: 77889 - DNA, 25 bp, Probe sequence
caaataaggcaataaaggtatggga

SEQ ID NO: 77890 - DNA, 25 bp, Probe sequence
aataaggcaataaaggtatgggaaa

SEQ ID NO: 77891 - DNA, 25 bp, Probe sequence
aaataaggcaataaaggtatgggaa

SEQ ID NO: 77892 - DNA, 25 bp, Probe sequence
ataaggcaataaaggtatgggaaat

SEQ ID NO: 77893 - DNA, 25 bp, Probe sequence
atataaatatctcggcacaatgatg

SEQ ID NO: 77894 - DNA, 25 bp, Probe sequence
tacaaataaggcaataaaggtatgg

SEQ ID NO: 77895 - DNA, 25 bp, Probe sequence
tgatataaatatctcggcacaatga

SEQ ID NO: 77896 - DNA, 25 bp, Probe sequence
aatatgtcatactgcaatgttcacg

SEQ ID NO: 77897 - DNA, 25 bp, Probe sequence
atatgtcatactgcaatgttcacgt

SEQ ID NO: 77898 - DNA, 25 bp, Probe sequence
tatgtcatactgcaatgttcacgtt

SEQ ID NO: 77899 - DNA, 25 bp, Probe sequence
ttaatcatataattgcgaggagaat

SEQ ID NO: 77900 - DNA, 25 bp, Probe sequence
tcatactgcaatgttcacgtttaaa

SEQ ID NO: 77901 - DNA, 25 bp, Probe sequence
gtcatactgcaatgttcacgtttaa

SEQ ID NO: 77902 - DNA, 25 bp, Probe sequence
aatcatataattgcgaggagaatat

SEQ ID NO: 77903 - DNA, 25 bp, Probe sequence
tgtcatactgcaatgttcacgttta

SEQ ID NO: 77904 - DNA, 25 bp, Probe sequence
atgtcatactgcaatgttcacgttt

SEQ ID NO: 77905 - DNA, 25 bp, Probe sequence
cgtgaacattgcagtatgacatatt

SEQ ID NO: 77906 - DNA, 25 bp, Probe sequence
acgtgaacattgcagtatgacatat

SEQ ID NO: 77907 - DNA, 25 bp, Probe sequence
aacgtgaacattgcagtatgacata

SEQ ID NO: 77908 - DNA, 25 bp, Probe sequence
attctcctcgcaattatatgattaa

SEQ ID NO: 77909 - DNA, 25 bp, Probe sequence
tttaaacgtgaacattgcagtatga

SEQ ID NO: 77910 - DNA, 25 bp, Probe sequence
ttaaacgtgaacattgcagtatgac

SEQ ID NO: 77911 - DNA, 25 bp, Probe sequence
atattctcctcgcaattatatgatt

SEQ ID NO: 77912 - DNA, 25 bp, Probe sequence
taaacgtgaacattgcagtatgaca

SEQ ID NO: 77913 - DNA, 25 bp, Probe sequence
gtgaacattgcagtatgacatattt

SEQ ID NO: 77914 - DNA, 25 bp, Probe sequence
tttagggagagggatattcaacaag

SEQ ID NO: 77915 - DNA, 25 bp, Probe sequence
gcttatttagggagagggatattca

SEQ ID NO: 77916 - DNA, 25 bp, Probe sequence
atttagggagagggatattcaacaa

SEQ ID NO: 77917 - DNA, 25 bp, Probe sequence
ttagggagagggatattcaacaagg

SEQ ID NO: 77918 - DNA, 25 bp, Probe sequence
tatttagggagagggatattcaaca

SEQ ID NO: 77919 - DNA, 25 bp, Probe sequence
ttatttagggagagggatattcaac

SEQ ID NO: 77920 - DNA, 25 bp, Probe sequence
agcttatttagggagagggatattc

SEQ ID NO: 77921 - DNA, 25 bp, Probe sequence
cttatttagggagagggatattcaa

SEQ ID NO: 77922 - DNA, 25 bp, Probe sequence
tagggagagggatattcaacaaggg

SEQ ID NO: 77923 - DNA, 25 bp, Probe sequence
cttgttgaatatccctctccctaaa

SEQ ID NO: 77924 - DNA, 25 bp, Probe sequence
tgaatatccctctccctaaataagc

SEQ ID NO: 77925 - DNA, 25 bp, Probe sequence
ttgttgaatatccctctccctaaat

SEQ ID NO: 77926 - DNA, 25 bp, Probe sequence
ccttgttgaatatccctctccctaa

SEQ ID NO: 77927 - DNA, 25 bp, Probe sequence
tgttgaatatccctctccctaaata

SEQ ID NO: 77928 - DNA, 25 bp, Probe sequence
gttgaatatccctctccctaaataa

SEQ ID NO: 77929 - DNA, 25 bp, Probe sequence
gaatatccctctccctaaataagct

SEQ ID NO: 77930 - DNA, 25 bp, Probe sequence
ttgaatatccctctccctaaataag

SEQ ID NO: 77931 - DNA, 25 bp, Probe sequence
cccttgttgaatatccctctcccta

SEQ ID NO: 77932 - DNA, 25 bp, Probe sequence
cccctaaataacgaattctctatta

SEQ ID NO: 77933 - DNA, 25 bp, Probe sequence
taatagagaattcgttatttagggg

SEQ ID NO: 77934 - DNA, 25 bp, Probe sequence
gcatgaaatcgtaactgggtcaatt

SEQ ID NO: 77935 - DNA, 25 bp, Probe sequence
aaatcgtaactgggtcaattgtatg

SEQ ID NO: 77936 - DNA, 25 bp, Probe sequence
aatcgtaactgggtcaattgtatgt

SEQ ID NO: 77937 - DNA, 25 bp, Probe sequence
gaaatcgtaactgggtcaattgtat

SEQ ID NO: 77938 - DNA, 25 bp, Probe sequence
catcttgcatgaaatcgtaactggg

SEQ ID NO: 77939 - DNA, 25 bp, Probe sequence
atcgtaactgggtcaattgtatgtt

SEQ ID NO: 77940 - DNA, 25 bp, Probe sequence
tttcatgtcaaatatcatcttgcat

SEQ ID NO: 77941 - DNA, 25 bp, Probe sequence
atcttgcatgaaatcgtaactgggt

SEQ ID NO: 77942 - DNA, 25 bp, Probe sequence
tgaaatcgtaactgggtcaattgta

SEQ ID NO: 77943 - DNA, 25 bp, Probe sequence
aattgacccagttacgatttcatgc

SEQ ID NO: 77944 - DNA, 25 bp, Probe sequence
catacaattgacccagttacgattt

SEQ ID NO: 77945 - DNA, 25 bp, Probe sequence
acatacaattgacccagttacgatt

SEQ ID NO: 77946 - DNA, 25 bp, Probe sequence
atacaattgacccagttacgatttc

SEQ ID NO: 77947 - DNA, 25 bp, Probe sequence
cccagttacgatttcatgcaagatg

SEQ ID NO: 77948 - DNA, 25 bp, Probe sequence
atgcaagatgatatttgacatgaaa

SEQ ID NO: 77949 - DNA, 25 bp, Probe sequence
aacatacaattgacccagttacgat

SEQ ID NO: 77950 - DNA, 25 bp, Probe sequence
acccagttacgatttcatgcaagat

SEQ ID NO: 77951 - DNA, 25 bp, Probe sequence
tacaattgacccagttacgatttca

SEQ ID NO: 77952 - DNA, 25 bp, Probe sequence
tatgtatccaatgattgtctatccc

SEQ ID NO: 77953 - DNA, 25 bp, Probe sequence
catcattataacagacaactagaca

SEQ ID NO: 77954 - DNA, 25 bp, Probe sequence
acagacaactagacatattgataag

SEQ ID NO: 77955 - DNA, 25 bp, Probe sequence
ttatgtatccaatgattgtctatcc

SEQ ID NO: 77956 - DNA, 25 bp, Probe sequence
cagacaactagacatattgataagt

SEQ ID NO: 77957 - DNA, 25 bp, Probe sequence
tcatcattataacagacaactagac

SEQ ID NO: 77958 - DNA, 25 bp, Probe sequence
aacagacaactagacatattgataa

SEQ ID NO: 77959 - DNA, 25 bp, Probe sequence
aaagaattttatacggaggtgcctt

SEQ ID NO: 77960 - DNA, 25 bp, Probe sequence
atgtatccaatgattgtctatcccc

SEQ ID NO: 77961 - DNA, 25 bp, Probe sequence
gggatagacaatcattggatacata

SEQ ID NO: 77962 - DNA, 25 bp, Probe sequence
tgtctagttgtctgttataatgatg

SEQ ID NO: 77963 - DNA, 25 bp, Probe sequence
cttatcaatatgtctagttgtctgt

SEQ ID NO: 77964 - DNA, 25 bp, Probe sequence
ggatagacaatcattggatacataa

SEQ ID NO: 77965 - DNA, 25 bp, Probe sequence
acttatcaatatgtctagttgtctg

SEQ ID NO: 77966 - DNA, 25 bp, Probe sequence
gtctagttgtctgttataatgatga

SEQ ID NO: 77967 - DNA, 25 bp, Probe sequence
ttatcaatatgtctagttgtctgtt

SEQ ID NO: 77968 - DNA, 25 bp, Probe sequence
aaggcacctccgtataaaattcttt

SEQ ID NO: 77969 - DNA, 25 bp, Probe sequence
ggggatagacaatcattggatacat

SEQ ID NO: 77970 - DNA, 25 bp, Probe sequence
ataaccatatttggcaccgatactt

SEQ ID NO: 77971 - DNA, 25 bp, Probe sequence
accatatttggcaccgatactttaa

SEQ ID NO: 77972 - DNA, 25 bp, Probe sequence
aaccatatttggcaccgatacttta

SEQ ID NO: 77973 - DNA, 25 bp, Probe sequence
taaccatatttggcaccgatacttt

SEQ ID NO: 77974 - DNA, 25 bp, Probe sequence
gataaccatatttggcaccgatact

SEQ ID NO: 77975 - DNA, 25 bp, Probe sequence
cgataaccatatttggcaccgatac

SEQ ID NO: 77976 - DNA, 25 bp, Probe sequence
ccatatttggcaccgatactttaaa

SEQ ID NO: 77977 - DNA, 25 bp, Probe sequence
gacctactacgtcaatgccaaattt

SEQ ID NO: 77978 - DNA, 25 bp, Probe sequence
attaatgacctactacgtcaatgcc

SEQ ID NO: 77979 - DNA, 25 bp, Probe sequence
aagtatcggtgccaaatatggttat

SEQ ID NO: 77980 - DNA, 25 bp, Probe sequence
aaagtatcggtgccaaatatggtta

SEQ ID NO: 77981 - DNA, 25 bp, Probe sequence
taaagtatcggtgccaaatatggtt

SEQ ID NO: 77982 - DNA, 25 bp, Probe sequence
ttaaagtatcggtgccaaatatggt

SEQ ID NO: 77983 - DNA, 25 bp, Probe sequence
agtatcggtgccaaatatggttatc

SEQ ID NO: 77984 - DNA, 25 bp, Probe sequence
gtatcggtgccaaatatggttatcg

SEQ ID NO: 77985 - DNA, 25 bp, Probe sequence
tttaaagtatcggtgccaaatatgg

SEQ ID NO: 77986 - DNA, 25 bp, Probe sequence
aaatttggcattgacgtagtaggtc

SEQ ID NO: 77987 - DNA, 25 bp, Probe sequence
ggcattgacgtagtaggtcattaat

SEQ ID NO: 77988 - DNA, 25 bp, Probe sequence
gaaacatttcctcctatttgctttt

SEQ ID NO: 77989 - DNA, 25 bp, Probe sequence
tgttggttaaaattcacaaaggtgt

SEQ ID NO: 77990 - DNA, 25 bp, Probe sequence
gtgttggttaaaattcacaaaggtg

SEQ ID NO: 77991 - DNA, 25 bp, Probe sequence
agtgttggttaaaattcacaaaggt

SEQ ID NO: 77992 - DNA, 25 bp, Probe sequence
gagtgttggttaaaattcacaaagg

SEQ ID NO: 77993 - DNA, 25 bp, Probe sequence
aaacatttcctcctatttgctttta

SEQ ID NO: 77994 - DNA, 25 bp, Probe sequence
aacatttcctcctatttgcttttaa

SEQ ID NO: 77995 - DNA, 25 bp, Probe sequence
gttggttaaaattcacaaaggtgta

SEQ ID NO: 77996 - DNA, 25 bp, Probe sequence
agagtgttggttaaaattcacaaag

SEQ ID NO: 77997 - DNA, 25 bp, Probe sequence
aaaagcaaataggaggaaatgtttc

SEQ ID NO: 77998 - DNA, 25 bp, Probe sequence
acacctttgtgaattttaaccaaca

SEQ ID NO: 77999 - DNA, 25 bp, Probe sequence
acctttgtgaattttaaccaacact

SEQ ID NO: 78000 - DNA, 25 bp, Probe sequence
cacctttgtgaattttaaccaacac

SEQ ID NO: 78001 - DNA, 25 bp, Probe sequence
cctttgtgaattttaaccaacactc

SEQ ID NO: 78002 - DNA, 25 bp, Probe sequence
taaaagcaaataggaggaaatgttt

SEQ ID NO: 78003 - DNA, 25 bp, Probe sequence
ttaaaagcaaataggaggaaatgtt

SEQ ID NO: 78004 - DNA, 25 bp, Probe sequence
ctttgtgaattttaaccaacactct

SEQ ID NO: 78005 - DNA, 25 bp, Probe sequence
tacacctttgtgaattttaaccaac

SEQ ID NO: 78006 - DNA, 25 bp, Probe sequence
tttccacataataatctcggcattt

SEQ ID NO: 78007 - DNA, 25 bp, Probe sequence
atttccacataataatctcggcatt

SEQ ID NO: 78008 - DNA, 25 bp, Probe sequence
aatgccgagatttccacataataat

SEQ ID NO: 78009 - DNA, 25 bp, Probe sequence
aaatgccgagatttccacataataa

SEQ ID NO: 78010 - DNA, 25 bp, Probe sequence
cataggtctatgaatagctcaagtt

SEQ ID NO: 78011 - DNA, 25 bp, Probe sequence
gatttccacataataatctcggcat

SEQ ID NO: 78012 - DNA, 25 bp, Probe sequence
atgccgagatttccacataataatc

SEQ ID NO: 78013 - DNA, 25 bp, Probe sequence
atatgttacggtgctatcaatataa

SEQ ID NO: 78014 - DNA, 25 bp, Probe sequence
ttccacataataatctcggcatttt

SEQ ID NO: 78015 - DNA, 25 bp, Probe sequence
aaatgccgagattattatgtggaaa

SEQ ID NO: 78016 - DNA, 25 bp, Probe sequence
aatgccgagattattatgtggaaat

SEQ ID NO: 78017 - DNA, 25 bp, Probe sequence
attattatgtggaaatctcggcatt

SEQ ID NO: 78018 - DNA, 25 bp, Probe sequence
ttattatgtggaaatctcggcattt

SEQ ID NO: 78019 - DNA, 25 bp, Probe sequence
aacttgagctattcatagacctatg

SEQ ID NO: 78020 - DNA, 25 bp, Probe sequence
gattattatgtggaaatctcggcat

SEQ ID NO: 78021 - DNA, 25 bp, Probe sequence
atgccgagattattatgtggaaatc

SEQ ID NO: 78022 - DNA, 25 bp, Probe sequence
ttatattgatagcaccgtaacatat

SEQ ID NO: 78023 - DNA, 25 bp, Probe sequence
aaaatgccgagattattatgtggaa

SEQ ID NO: 78024 - DNA, 25 bp, Probe sequence
attagcattactcacaagtttcatg

SEQ ID NO: 78025 - DNA, 25 bp, Probe sequence
aactatcacgaacagaaactaaatt

SEQ ID NO: 78026 - DNA, 25 bp, Probe sequence
taactatcacgaacagaaactaaat

SEQ ID NO: 78027 - DNA, 25 bp, Probe sequence
ataactatcacgaacagaaactaaa

SEQ ID NO: 78028 - DNA, 25 bp, Probe sequence
tattagcattactcacaagtttcat

SEQ ID NO: 78029 - DNA, 25 bp, Probe sequence
atattagcattactcacaagtttca

SEQ ID NO: 78030 - DNA, 25 bp, Probe sequence
actatcacgaacagaaactaaattt

SEQ ID NO: 78031 - DNA, 25 bp, Probe sequence
tttataactatcacgaacagaaact

SEQ ID NO: 78032 - DNA, 25 bp, Probe sequence
ttagcattactcacaagtttcatga

SEQ ID NO: 78033 - DNA, 25 bp, Probe sequence
catgaaacttgtgagtaatgctaat

SEQ ID NO: 78034 - DNA, 25 bp, Probe sequence
aatttagtttctgttcgtgatagtt

SEQ ID NO: 78035 - DNA, 25 bp, Probe sequence
tttagtttctgttcgtgatagttat

SEQ ID NO: 78036 - DNA, 25 bp, Probe sequence
atttagtttctgttcgtgatagtta

SEQ ID NO: 78037 - DNA, 25 bp, Probe sequence
tgaaacttgtgagtaatgctaatat

SEQ ID NO: 78038 - DNA, 25 bp, Probe sequence
atgaaacttgtgagtaatgctaata

SEQ ID NO: 78039 - DNA, 25 bp, Probe sequence
aaatttagtttctgttcgtgatagt

SEQ ID NO: 78040 - DNA, 25 bp, Probe sequence
agtttctgttcgtgatagttataaa

SEQ ID NO: 78041 - DNA, 25 bp, Probe sequence
tcatgaaacttgtgagtaatgctaa

SEQ ID NO: 78042 - DNA, 25 bp, Probe sequence
cacctcaattctgttcctcttcaat

SEQ ID NO: 78043 - DNA, 25 bp, Probe sequence
acctcaattctgttcctcttcaatt

SEQ ID NO: 78044 - DNA, 25 bp, Probe sequence
tcacctcaattctgttcctcttcaa

SEQ ID NO: 78045 - DNA, 25 bp, Probe sequence
ttcacctcaattctgttcctcttca

SEQ ID NO: 78046 - DNA, 25 bp, Probe sequence
tttcacctcaattctgttcctcttc

SEQ ID NO: 78047 - DNA, 25 bp, Probe sequence
ctttcacctcaattctgttcctctt

SEQ ID NO: 78048 - DNA, 25 bp, Probe sequence
actttcacctcaattctgttcctct

SEQ ID NO: 78049 - DNA, 25 bp, Probe sequence
agaaggtgttcaatacatacatatt

SEQ ID NO: 78050 - DNA, 25 bp, Probe sequence
aagaaggtgttcaatacatacatat

SEQ ID NO: 78051 - DNA, 25 bp, Probe sequence
attgaagaggaacagaattgaggtg

SEQ ID NO: 78052 - DNA, 25 bp, Probe sequence
aattgaagaggaacagaattgaggt

SEQ ID NO: 78053 - DNA, 25 bp, Probe sequence
tgaagaggaacagaattgaggtgaa

SEQ ID NO: 78054 - DNA, 25 bp, Probe sequence
ttgaagaggaacagaattgaggtga

SEQ ID NO: 78055 - DNA, 25 bp, Probe sequence
aagaggaacagaattgaggtgaaag

SEQ ID NO: 78056 - DNA, 25 bp, Probe sequence
gaagaggaacagaattgaggtgaaa

SEQ ID NO: 78057 - DNA, 25 bp, Probe sequence
agaggaacagaattgaggtgaaagt

SEQ ID NO: 78058 - DNA, 25 bp, Probe sequence
catttcttgaattgtattcttggga

SEQ ID NO: 78059 - DNA, 25 bp, Probe sequence
tcatttcttgaattgtattcttggg

SEQ ID NO: 78060 - DNA, 25 bp, Probe sequence
agtatcctcagcaatcattgtatcg

SEQ ID NO: 78061 - DNA, 25 bp, Probe sequence
aagtatcctcagcaatcattgtatc

SEQ ID NO: 78062 - DNA, 25 bp, Probe sequence
agcaatcattgtatcgcacatctaa

SEQ ID NO: 78063 - DNA, 25 bp, Probe sequence
gtatcctcagcaatcattgtatcgc

SEQ ID NO: 78064 - DNA, 25 bp, Probe sequence
cagcaatcattgtatcgcacatcta

SEQ ID NO: 78065 - DNA, 25 bp, Probe sequence
tatcctcagcaatcattgtatcgca

SEQ ID NO: 78066 - DNA, 25 bp, Probe sequence
ctgcgttctccttgctttaataaat

SEQ ID NO: 78067 - DNA, 25 bp, Probe sequence
tgcgttctccttgctttaataaatt

SEQ ID NO: 78068 - DNA, 25 bp, Probe sequence
ctcagcaatcattgtatcgcacatc

SEQ ID NO: 78069 - DNA, 25 bp, Probe sequence
cgatacaatgattgctgaggatact

SEQ ID NO: 78070 - DNA, 25 bp, Probe sequence
gatacaatgattgctgaggatactt

SEQ ID NO: 78071 - DNA, 25 bp, Probe sequence
ttagatgtgcgatacaatgattgct

SEQ ID NO: 78072 - DNA, 25 bp, Probe sequence
gcgatacaatgattgctgaggatac

SEQ ID NO: 78073 - DNA, 25 bp, Probe sequence
tagatgtgcgatacaatgattgctg

SEQ ID NO: 78074 - DNA, 25 bp, Probe sequence
tgcgatacaatgattgctgaggata

SEQ ID NO: 78075 - DNA, 25 bp, Probe sequence
atttattaaagcaaggagaacgcag

SEQ ID NO: 78076 - DNA, 25 bp, Probe sequence
aatttattaaagcaaggagaacgca

SEQ ID NO: 78077 - DNA, 25 bp, Probe sequence
gatgtgcgatacaatgattgctgag

SEQ ID NO: 78078 - DNA, 25 bp, Probe sequence
ttaacatttagcgtctttacaagcc

SEQ ID NO: 78079 - DNA, 25 bp, Probe sequence
taacatttagcgtctttacaagcca

SEQ ID NO: 78080 - DNA, 25 bp, Probe sequence
ttgtaaacccaaatcgtattctgtt

SEQ ID NO: 78081 - DNA, 25 bp, Probe sequence
attaacatttagcgtctttacaagc

SEQ ID NO: 78082 - DNA, 25 bp, Probe sequence
aaacccaaatcgtattctgttatct

SEQ ID NO: 78083 - DNA, 25 bp, Probe sequence
tgtaaacccaaatcgtattctgtta

SEQ ID NO: 78084 - DNA, 25 bp, Probe sequence
acccaaatcgtattctgttatctaa

SEQ ID NO: 78085 - DNA, 25 bp, Probe sequence
aacccaaatcgtattctgttatcta

SEQ ID NO: 78086 - DNA, 25 bp, Probe sequence
aggttgtttctaatattgcgtcaaa

SEQ ID NO: 78087 - DNA, 25 bp, Probe sequence
ggcttgtaaagacgctaaatgttaa

SEQ ID NO: 78088 - DNA, 25 bp, Probe sequence
tggcttgtaaagacgctaaatgtta

SEQ ID NO: 78089 - DNA, 25 bp, Probe sequence
aacagaatacgatttgggtttacaa

SEQ ID NO: 78090 - DNA, 25 bp, Probe sequence
gcttgtaaagacgctaaatgttaat

SEQ ID NO: 78091 - DNA, 25 bp, Probe sequence
taacagaatacgatttgggtttaca

SEQ ID NO: 78092 - DNA, 25 bp, Probe sequence
agataacagaatacgatttgggttt

SEQ ID NO: 78093 - DNA, 25 bp, Probe sequence
ttagataacagaatacgatttgggt

SEQ ID NO: 78094 - DNA, 25 bp, Probe sequence
tagataacagaatacgatttgggtt

SEQ ID NO: 78095 - DNA, 25 bp, Probe sequence
tttgacgcaatattagaaacaacct

SEQ ID NO: 78096 - DNA, 25 bp, Probe sequence
ccctatttcttctttagcgtcagta

SEQ ID NO: 78097 - DNA, 25 bp, Probe sequence
cgattcacttctccctatttcttct

SEQ ID NO: 78098 - DNA, 25 bp, Probe sequence
cttctccctatttcttctttagcgt

SEQ ID NO: 78099 - DNA, 25 bp, Probe sequence
acttctccctatttcttctttagcg

SEQ ID NO: 78100 - DNA, 25 bp, Probe sequence
ttctccctatttcttctttagcgtc

SEQ ID NO: 78101 - DNA, 25 bp, Probe sequence
cacttctccctatttcttctttagc

SEQ ID NO: 78102 - DNA, 25 bp, Probe sequence
ctccctatttcttctttagcgtcag

SEQ ID NO: 78103 - DNA, 25 bp, Probe sequence
cttctttagcgtcagtataaggttg

SEQ ID NO: 78104 - DNA, 25 bp, Probe sequence
tcttctttagcgtcagtataaggtt

SEQ ID NO: 78105 - DNA, 25 bp, Probe sequence
agaagaaatagggagaagtgaatcg

SEQ ID NO: 78106 - DNA, 25 bp, Probe sequence
tactgacgctaaagaagaaataggg

SEQ ID NO: 78107 - DNA, 25 bp, Probe sequence
cgctaaagaagaaatagggagaagt

SEQ ID NO: 78108 - DNA, 25 bp, Probe sequence
acgctaaagaagaaatagggagaag

SEQ ID NO: 78109 - DNA, 25 bp, Probe sequence
gacgctaaagaagaaatagggagaa

SEQ ID NO: 78110 - DNA, 25 bp, Probe sequence
gctaaagaagaaatagggagaagtg

SEQ ID NO: 78111 - DNA, 25 bp, Probe sequence
ctgacgctaaagaagaaatagggag

SEQ ID NO: 78112 - DNA, 25 bp, Probe sequence
accttatactgacgctaaagaagaa

SEQ ID NO: 78113 - DNA, 25 bp, Probe sequence
aaccttatactgacgctaaagaaga

SEQ ID NO: 78114 - DNA, 25 bp, Probe sequence
gccacttaacatttaatttctacca

SEQ ID NO: 78115 - DNA, 25 bp, Probe sequence
agccacttaacatttaatttctacc

SEQ ID NO: 78116 - DNA, 25 bp, Probe sequence
cgctttctagccacttaacatttaa

SEQ ID NO: 78117 - DNA, 25 bp, Probe sequence
tggtttaataattttgaaggaggca

SEQ ID NO: 78118 - DNA, 25 bp, Probe sequence
gctttctagccacttaacatttaat

SEQ ID NO: 78119 - DNA, 25 bp, Probe sequence
ggtttaataattttgaaggaggcat

SEQ ID NO: 78120 - DNA, 25 bp, Probe sequence
atggtttaataattttgaaggaggc

SEQ ID NO: 78121 - DNA, 25 bp, Probe sequence
tctagccacttaacatttaatttct

SEQ ID NO: 78122 - DNA, 25 bp, Probe sequence
aataattttgaaggaggcattaacc

SEQ ID NO: 78123 - DNA, 25 bp, Probe sequence
tggtagaaattaaatgttaagtggc

SEQ ID NO: 78124 - DNA, 25 bp, Probe sequence
ggtagaaattaaatgttaagtggct

SEQ ID NO: 78125 - DNA, 25 bp, Probe sequence
ttaaatgttaagtggctagaaagcg

SEQ ID NO: 78126 - DNA, 25 bp, Probe sequence
tgcctccttcaaaattattaaacca

SEQ ID NO: 78127 - DNA, 25 bp, Probe sequence
attaaatgttaagtggctagaaagc

SEQ ID NO: 78128 - DNA, 25 bp, Probe sequence
gcctccttcaaaattattaaaccat

SEQ ID NO: 78129 - DNA, 25 bp, Probe sequence
atgcctccttcaaaattattaaacc

SEQ ID NO: 78130 - DNA, 25 bp, Probe sequence
agaaattaaatgttaagtggctaga

SEQ ID NO: 78131 - DNA, 25 bp, Probe sequence
ggttaatgcctccttcaaaattatt

SEQ ID NO: 78132 - DNA, 25 bp, Probe sequence
atcaataagtgtctcaataggttcc

SEQ ID NO: 78133 - DNA, 25 bp, Probe sequence
tggtgatgctctattactatctact

SEQ ID NO: 78134 - DNA, 25 bp, Probe sequence
ttgattgctgattactcactattca

SEQ ID NO: 78135 - DNA, 25 bp, Probe sequence
tgattgctgattactcactattcat

SEQ ID NO: 78136 - DNA, 25 bp, Probe sequence
atggtgatgctctattactatctac

SEQ ID NO: 78137 - DNA, 25 bp, Probe sequence
caataagtgtctcaataggttccca

SEQ ID NO: 78138 - DNA, 25 bp, Probe sequence
tcaataagtgtctcaataggttccc

SEQ ID NO: 78139 - DNA, 25 bp, Probe sequence
aataagtgtctcaataggttcccat

SEQ ID NO: 78140 - DNA, 25 bp, Probe sequence
gattgctgattactcactattcatt

SEQ ID NO: 78141 - DNA, 25 bp, Probe sequence
ggaacctattgagacacttattgat

SEQ ID NO: 78142 - DNA, 25 bp, Probe sequence
agtagatagtaatagagcatcacca

SEQ ID NO: 78143 - DNA, 25 bp, Probe sequence
tgaatagtgagtaatcagcaatcaa

SEQ ID NO: 78144 - DNA, 25 bp, Probe sequence
atgaatagtgagtaatcagcaatca

SEQ ID NO: 78145 - DNA, 25 bp, Probe sequence
gtagatagtaatagagcatcaccat

SEQ ID NO: 78146 - DNA, 25 bp, Probe sequence
gggaacctattgagacacttattga

SEQ ID NO: 78147 - DNA, 25 bp, Probe sequence
tgggaacctattgagacacttattg

SEQ ID NO: 78148 - DNA, 25 bp, Probe sequence
atgggaacctattgagacacttatt

SEQ ID NO: 78149 - DNA, 25 bp, Probe sequence
aatgaatagtgagtaatcagcaatc

SEQ ID NO: 78150 - DNA, 25 bp, Probe sequence
acgatgagaaatggaagttatagca

SEQ ID NO: 78151 - DNA, 25 bp, Probe sequence
ggaagatactacgatgagaaatgga

SEQ ID NO: 78152 - DNA, 25 bp, Probe sequence
aggaagatactacgatgagaaatgg

SEQ ID NO: 78153 - DNA, 25 bp, Probe sequence
acagaacagtgagattaatgtgatt

SEQ ID NO: 78154 - DNA, 25 bp, Probe sequence
tacgatgagaaatggaagttatagc

SEQ ID NO: 78155 - DNA, 25 bp, Probe sequence
aataaggaagatactacgatgagaa

SEQ ID NO: 78156 - DNA, 25 bp, Probe sequence
agatactacgatgagaaatggaagt

SEQ ID NO: 78157 - DNA, 25 bp, Probe sequence
aagatactacgatgagaaatggaag

SEQ ID NO: 78158 - DNA, 25 bp, Probe sequence
gaagatactacgatgagaaatggaa

SEQ ID NO: 78159 - DNA, 25 bp, Probe sequence
tgctataacttccatttctcatcgt

SEQ ID NO: 78160 - DNA, 25 bp, Probe sequence
ccatttctcatcgtagtatcttcct

SEQ ID NO: 78161 - DNA, 25 bp, Probe sequence
tccatttctcatcgtagtatcttcc

SEQ ID NO: 78162 - DNA, 25 bp, Probe sequence
aatcacattaatctcactgttctgt

SEQ ID NO: 78163 - DNA, 25 bp, Probe sequence
gctataacttccatttctcatcgta

SEQ ID NO: 78164 - DNA, 25 bp, Probe sequence
ttctcatcgtagtatcttccttatt

SEQ ID NO: 78165 - DNA, 25 bp, Probe sequence
acttccatttctcatcgtagtatct

SEQ ID NO: 78166 - DNA, 25 bp, Probe sequence
catttctcatcgtagtatcttcctt

SEQ ID NO: 78167 - DNA, 25 bp, Probe sequence
ttccatttctcatcgtagtatcttc

SEQ ID NO: 78168 - DNA, 25 bp, Probe sequence
ttaaatttctcagtggctgtgaatg

SEQ ID NO: 78169 - DNA, 25 bp, Probe sequence
gtttaaatttctcagtggctgtgaa

SEQ ID NO: 78170 - DNA, 25 bp, Probe sequence
tttaaatttctcagtggctgtgaat

SEQ ID NO: 78171 - DNA, 25 bp, Probe sequence
taaatttctcagtggctgtgaatga

SEQ ID NO: 78172 - DNA, 25 bp, Probe sequence
tgtttaaatttctcagtggctgtga

SEQ ID NO: 78173 - DNA, 25 bp, Probe sequence
tcagtggctgtgaatgaggtttaaa

SEQ ID NO: 78174 - DNA, 25 bp, Probe sequence
aaacggtaaaccctaattcatatta

SEQ ID NO: 78175 - DNA, 25 bp, Probe sequence
ctgtgaatgaggtttaaaagtgcta

SEQ ID NO: 78176 - DNA, 25 bp, Probe sequence
tgtgaatgaggtttaaaagtgctat

SEQ ID NO: 78177 - DNA, 25 bp, Probe sequence
ttcacagccactgagaaatttaaac

SEQ ID NO: 78178 - DNA, 25 bp, Probe sequence
cattcacagccactgagaaatttaa

SEQ ID NO: 78179 - DNA, 25 bp, Probe sequence
attcacagccactgagaaatttaaa

SEQ ID NO: 78180 - DNA, 25 bp, Probe sequence
tcattcacagccactgagaaattta

SEQ ID NO: 78181 - DNA, 25 bp, Probe sequence
tcacagccactgagaaatttaaaca

SEQ ID NO: 78182 - DNA, 25 bp, Probe sequence
tttaaacctcattcacagccactga

SEQ ID NO: 78183 - DNA, 25 bp, Probe sequence
taatatgaattagggtttaccgttt

SEQ ID NO: 78184 - DNA, 25 bp, Probe sequence
tagcacttttaaacctcattcacag

SEQ ID NO: 78185 - DNA, 25 bp, Probe sequence
atagcacttttaaacctcattcaca

SEQ ID NO: 78186 - DNA, 25 bp, Probe sequence
tttagcatttcaaggcatacacaat

SEQ ID NO: 78187 - DNA, 25 bp, Probe sequence
atttagcatttcaaggcatacacaa

SEQ ID NO: 78188 - DNA, 25 bp, Probe sequence
catttagcatttcaaggcatacaca

SEQ ID NO: 78189 - DNA, 25 bp, Probe sequence
tcattacgcatttagcatttcaagg

SEQ ID NO: 78190 - DNA, 25 bp, Probe sequence
ttagcatttcaaggcatacacaata

SEQ ID NO: 78191 - DNA, 25 bp, Probe sequence
ttcattacgcatttagcatttcaag

SEQ ID NO: 78192 - DNA, 25 bp, Probe sequence
tagcatttcaaggcatacacaatat

SEQ ID NO: 78193 - DNA, 25 bp, Probe sequence
tacgcatttagcatttcaaggcata

SEQ ID NO: 78194 - DNA, 25 bp, Probe sequence
gcatttagcatttcaaggcatacac

SEQ ID NO: 78195 - DNA, 25 bp, Probe sequence
ttgtgtatgccttgaaatgctaaat

SEQ ID NO: 78196 - DNA, 25 bp, Probe sequence
attgtgtatgccttgaaatgctaaa

SEQ ID NO: 78197 - DNA, 25 bp, Probe sequence
tgtgtatgccttgaaatgctaaatg

SEQ ID NO: 78198 - DNA, 25 bp, Probe sequence
ccttgaaatgctaaatgcgtaatga

SEQ ID NO: 78199 - DNA, 25 bp, Probe sequence
cttgaaatgctaaatgcgtaatgaa

SEQ ID NO: 78200 - DNA, 25 bp, Probe sequence
tattgtgtatgccttgaaatgctaa

SEQ ID NO: 78201 - DNA, 25 bp, Probe sequence
atattgtgtatgccttgaaatgcta

SEQ ID NO: 78202 - DNA, 25 bp, Probe sequence
tatgccttgaaatgctaaatgcgta

SEQ ID NO: 78203 - DNA, 25 bp, Probe sequence
gtgtatgccttgaaatgctaaatgc

SEQ ID NO: 78204 - DNA, 25 bp, Probe sequence
taaatcctccaataaacagtgatcg

SEQ ID NO: 78205 - DNA, 25 bp, Probe sequence
atcctccaataaacagtgatcgaat

SEQ ID NO: 78206 - DNA, 25 bp, Probe sequence
aatcctccaataaacagtgatcgaa

SEQ ID NO: 78207 - DNA, 25 bp, Probe sequence
aaatcctccaataaacagtgatcga

SEQ ID NO: 78208 - DNA, 25 bp, Probe sequence
tcctccaataaacagtgatcgaatc

SEQ ID NO: 78209 - DNA, 25 bp, Probe sequence
aattgtattgattgtgtgtaacatc

SEQ ID NO: 78210 - DNA, 25 bp, Probe sequence
attgtattgattgtgtgtaacatca

SEQ ID NO: 78211 - DNA, 25 bp, Probe sequence
ataaatcctccaataaacagtgatc

SEQ ID NO: 78212 - DNA, 25 bp, Probe sequence
caaattgtattgattgtgtgtaaca

SEQ ID NO: 78213 - DNA, 25 bp, Probe sequence
cgatcactgtttattggaggattta

SEQ ID NO: 78214 - DNA, 25 bp, Probe sequence
tcgatcactgtttattggaggattt

SEQ ID NO: 78215 - DNA, 25 bp, Probe sequence
ttcgatcactgtttattggaggatt

SEQ ID NO: 78216 - DNA, 25 bp, Probe sequence
attcgatcactgtttattggaggat

SEQ ID NO: 78217 - DNA, 25 bp, Probe sequence
gattcgatcactgtttattggagga

SEQ ID NO: 78218 - DNA, 25 bp, Probe sequence
gatgttacacacaatcaatacaatt

SEQ ID NO: 78219 - DNA, 25 bp, Probe sequence
tgatgttacacacaatcaatacaat

SEQ ID NO: 78220 - DNA, 25 bp, Probe sequence
gatcactgtttattggaggatttat

SEQ ID NO: 78221 - DNA, 25 bp, Probe sequence
tgttacacacaatcaatacaatttg

SEQ ID NO: 78222 - DNA, 25 bp, Probe sequence
acaatgttcctttgaaagatgtgta

SEQ ID NO: 78223 - DNA, 25 bp, Probe sequence
aacaatgttcctttgaaagatgtgt

SEQ ID NO: 78224 - DNA, 25 bp, Probe sequence
acaacaatgttcctttgaaagatgt

SEQ ID NO: 78225 - DNA, 25 bp, Probe sequence
caacaatgttcctttgaaagatgtg

SEQ ID NO: 78226 - DNA, 25 bp, Probe sequence
caatgttcctttgaaagatgtgtat

SEQ ID NO: 78227 - DNA, 25 bp, Probe sequence
acacctttcaaagtaagaaacaaca

SEQ ID NO: 78228 - DNA, 25 bp, Probe sequence
acacacctttcaaagtaagaaacaa

SEQ ID NO: 78229 - DNA, 25 bp, Probe sequence
aacacacctttcaaagtaagaaaca

SEQ ID NO: 78230 - DNA, 25 bp, Probe sequence
cacacctttcaaagtaagaaacaac

SEQ ID NO: 78231 - DNA, 25 bp, Probe sequence
tacacatctttcaaaggaacattgt

SEQ ID NO: 78232 - DNA, 25 bp, Probe sequence
acatctttcaaaggaacattgttgt

SEQ ID NO: 78233 - DNA, 25 bp, Probe sequence
acacatctttcaaaggaacattgtt

SEQ ID NO: 78234 - DNA, 25 bp, Probe sequence
cacatctttcaaaggaacattgttg

SEQ ID NO: 78235 - DNA, 25 bp, Probe sequence
atacacatctttcaaaggaacattg

SEQ ID NO: 78236 - DNA, 25 bp, Probe sequence
tgtttcttactttgaaaggtgtgtt

SEQ ID NO: 78237 - DNA, 25 bp, Probe sequence
ttgtttcttactttgaaaggtgtgt

SEQ ID NO: 78238 - DNA, 25 bp, Probe sequence
tgttgtttcttactttgaaaggtgt

SEQ ID NO: 78239 - DNA, 25 bp, Probe sequence
gttgtttcttactttgaaaggtgtg

SEQ ID NO: 78240 - DNA, 25 bp, Probe sequence
ccctcaccttttcattatatccgat

SEQ ID NO: 78241 - DNA, 25 bp, Probe sequence
cctccctcaccttttcattatatcc

SEQ ID NO: 78242 - DNA, 25 bp, Probe sequence
tcctccctcaccttttcattatatc

SEQ ID NO: 78243 - DNA, 25 bp, Probe sequence
ctccctcaccttttcattatatccg

SEQ ID NO: 78244 - DNA, 25 bp, Probe sequence
aatcctccctcaccttttcattata

SEQ ID NO: 78245 - DNA, 25 bp, Probe sequence
gaatcctccctcaccttttcattat

SEQ ID NO: 78246 - DNA, 25 bp, Probe sequence
tccctcaccttttcattatatccga

SEQ ID NO: 78247 - DNA, 25 bp, Probe sequence
atcctccctcaccttttcattatat

SEQ ID NO: 78248 - DNA, 25 bp, Probe sequence
cctcaccttttcattatatccgatt

SEQ ID NO: 78249 - DNA, 25 bp, Probe sequence
atcggatataatgaaaaggtgaggg

SEQ ID NO: 78250 - DNA, 25 bp, Probe sequence
gatataatgaaaaggtgagggagga

SEQ ID NO: 78251 - DNA, 25 bp, Probe sequence
ggatataatgaaaaggtgagggagg

SEQ ID NO: 78252 - DNA, 25 bp, Probe sequence
cggatataatgaaaaggtgagggag

SEQ ID NO: 78253 - DNA, 25 bp, Probe sequence
tataatgaaaaggtgagggaggatt

SEQ ID NO: 78254 - DNA, 25 bp, Probe sequence
ataatgaaaaggtgagggaggattc

SEQ ID NO: 78255 - DNA, 25 bp, Probe sequence
tcggatataatgaaaaggtgaggga

SEQ ID NO: 78256 - DNA, 25 bp, Probe sequence
atataatgaaaaggtgagggaggat

SEQ ID NO: 78257 - DNA, 25 bp, Probe sequence
aatcggatataatgaaaaggtgagg

SEQ ID NO: 78258 - DNA, 25 bp, Probe sequence
ctataccatgacgctcgctacaaac

SEQ ID NO: 78259 - DNA, 25 bp, Probe sequence
tataccatgacgctcgctacaaacg

SEQ ID NO: 78260 - DNA, 25 bp, Probe sequence
gctataccatgacgctcgctacaaa

SEQ ID NO: 78261 - DNA, 25 bp, Probe sequence
ctcgctacaaacgtcttgtatagct

SEQ ID NO: 78262 - DNA, 25 bp, Probe sequence
tcgctacaaacgtcttgtatagcta

SEQ ID NO: 78263 - DNA, 25 bp, Probe sequence
cgctcgctacaaacgtcttgtatag

SEQ ID NO: 78264 - DNA, 25 bp, Probe sequence
gctcgctacaaacgtcttgtatagc

SEQ ID NO: 78265 - DNA, 25 bp, Probe sequence
tagctataccatgacgctcgctaca

SEQ ID NO: 78266 - DNA, 25 bp, Probe sequence
acgctcgctacaaacgtcttgtata

SEQ ID NO: 78267 - DNA, 25 bp, Probe sequence
gtttgtagcgagcgtcatggtatag

SEQ ID NO: 78268 - DNA, 25 bp, Probe sequence
tttgtagcgagcgtcatggtatagc

SEQ ID NO: 78269 - DNA, 25 bp, Probe sequence
cgtttgtagcgagcgtcatggtata

SEQ ID NO: 78270 - DNA, 25 bp, Probe sequence
agctatacaagacgtttgtagcgag

SEQ ID NO: 78271 - DNA, 25 bp, Probe sequence
tagctatacaagacgtttgtagcga

SEQ ID NO: 78272 - DNA, 25 bp, Probe sequence
ctatacaagacgtttgtagcgagcg

SEQ ID NO: 78273 - DNA, 25 bp, Probe sequence
gctatacaagacgtttgtagcgagc

SEQ ID NO: 78274 - DNA, 25 bp, Probe sequence
tgtagcgagcgtcatggtatagcta

SEQ ID NO: 78275 - DNA, 25 bp, Probe sequence
tatacaagacgtttgtagcgagcgt

SEQ ID NO: 78276 - DNA, 25 bp, Probe sequence
acctccttattagacaatgtgttga

SEQ ID NO: 78277 - DNA, 25 bp, Probe sequence
cctccttattagacaatgtgttgaa

SEQ ID NO: 78278 - DNA, 25 bp, Probe sequence
acaatacacaatgttcatcaatacg

SEQ ID NO: 78279 - DNA, 25 bp, Probe sequence
tacctccttattagacaatgtgttg

SEQ ID NO: 78280 - DNA, 25 bp, Probe sequence
ttacctccttattagacaatgtgtt

SEQ ID NO: 78281 - DNA, 25 bp, Probe sequence
attacctccttattagacaatgtgt

SEQ ID NO: 78282 - DNA, 25 bp, Probe sequence
acacaatgttcatcaatacgttcat

SEQ ID NO: 78283 - DNA, 25 bp, Probe sequence
tacacaatgttcatcaatacgttca

SEQ ID NO: 78284 - DNA, 25 bp, Probe sequence
ctccttattagacaatgtgttgaat

SEQ ID NO: 78285 - DNA, 25 bp, Probe sequence
tcaacacattgtctaataaggaggt

SEQ ID NO: 78286 - DNA, 25 bp, Probe sequence
ttcaacacattgtctaataaggagg

SEQ ID NO: 78287 - DNA, 25 bp, Probe sequence
caacacattgtctaataaggaggta

SEQ ID NO: 78288 - DNA, 25 bp, Probe sequence
cgtattgatgaacattgtgtattgt

SEQ ID NO: 78289 - DNA, 25 bp, Probe sequence
aacacattgtctaataaggaggtaa

SEQ ID NO: 78290 - DNA, 25 bp, Probe sequence
acacattgtctaataaggaggtaat

SEQ ID NO: 78291 - DNA, 25 bp, Probe sequence
atgaacgtattgatgaacattgtgt

SEQ ID NO: 78292 - DNA, 25 bp, Probe sequence
tgaacgtattgatgaacattgtgta

SEQ ID NO: 78293 - DNA, 25 bp, Probe sequence
attcaacacattgtctaataaggag

SEQ ID NO: 78294 - DNA, 25 bp, Probe sequence
gcaatgactgatactttgattactg

SEQ ID NO: 78295 - DNA, 25 bp, Probe sequence
acagcttaaagtttcatcctattgc

SEQ ID NO: 78296 - DNA, 25 bp, Probe sequence
actttgattactgtcatacctcttt

SEQ ID NO: 78297 - DNA, 25 bp, Probe sequence
cagcttaaagtttcatcctattgca

SEQ ID NO: 78298 - DNA, 25 bp, Probe sequence
agcttaaagtttcatcctattgcat

SEQ ID NO: 78299 - DNA, 25 bp, Probe sequence
aaaggtatgacagcttaaagtttca

SEQ ID NO: 78300 - DNA, 25 bp, Probe sequence
gacagcttaaagtttcatcctattg

SEQ ID NO: 78301 - DNA, 25 bp, Probe sequence
taaagtttcatcctattgcatttgc

SEQ ID NO: 78302 - DNA, 25 bp, Probe sequence
tactttgattactgtcatacctctt

SEQ ID NO: 78303 - DNA, 25 bp, Probe sequence
cagtaatcaaagtatcagtcattgc

SEQ ID NO: 78304 - DNA, 25 bp, Probe sequence
gcaataggatgaaactttaagctgt

SEQ ID NO: 78305 - DNA, 25 bp, Probe sequence
aaagaggtatgacagtaatcaaagt

SEQ ID NO: 78306 - DNA, 25 bp, Probe sequence
tgcaataggatgaaactttaagctg

SEQ ID NO: 78307 - DNA, 25 bp, Probe sequence
atgcaataggatgaaactttaagct

SEQ ID NO: 78308 - DNA, 25 bp, Probe sequence
tgaaactttaagctgtcataccttt

SEQ ID NO: 78309 - DNA, 25 bp, Probe sequence
caataggatgaaactttaagctgtc

SEQ ID NO: 78310 - DNA, 25 bp, Probe sequence
gcaaatgcaataggatgaaacttta

SEQ ID NO: 78311 - DNA, 25 bp, Probe sequence
aatgcaataggatgaaactttaagc

SEQ ID NO: 78312 - DNA, 25 bp, Probe sequence
tgttgattcttagatgttagtgcga

SEQ ID NO: 78313 - DNA, 25 bp, Probe sequence
atgttgattcttagatgttagtgcg

SEQ ID NO: 78314 - DNA, 25 bp, Probe sequence
tgttaattcattgatgtgtgctgtt

SEQ ID NO: 78315 - DNA, 25 bp, Probe sequence
gttgattcttagatgttagtgcgat

SEQ ID NO: 78316 - DNA, 25 bp, Probe sequence
gtgttaattcattgatgtgtgctgt

SEQ ID NO: 78317 - DNA, 25 bp, Probe sequence
aaggtgttaattcattgatgtgtgc

SEQ ID NO: 78318 - DNA, 25 bp, Probe sequence
tgcctgtcttgatgaagttatctat

SEQ ID NO: 78319 - DNA, 25 bp, Probe sequence
atgcctgtcttgatgaagttatcta

SEQ ID NO: 78320 - DNA, 25 bp, Probe sequence
gatgcctgtcttgatgaagttatct

SEQ ID NO: 78321 - DNA, 25 bp, Probe sequence
tcgcactaacatctaagaatcaaca

SEQ ID NO: 78322 - DNA, 25 bp, Probe sequence
cgcactaacatctaagaatcaacat

SEQ ID NO: 78323 - DNA, 25 bp, Probe sequence
aacagcacacatcaatgaattaaca

SEQ ID NO: 78324 - DNA, 25 bp, Probe sequence
atcgcactaacatctaagaatcaac

SEQ ID NO: 78325 - DNA, 25 bp, Probe sequence
gcacacatcaatgaattaacacctt

SEQ ID NO: 78326 - DNA, 25 bp, Probe sequence
acagcacacatcaatgaattaacac

SEQ ID NO: 78327 - DNA, 25 bp, Probe sequence
tagataacttcatcaagacaggcat

SEQ ID NO: 78328 - DNA, 25 bp, Probe sequence
atagataacttcatcaagacaggca

SEQ ID NO: 78329 - DNA, 25 bp, Probe sequence
agataacttcatcaagacaggcatc

SEQ ID NO: 78330 - DNA, 25 bp, Probe sequence
gtcctcttgtgtttagtttcttacg

SEQ ID NO: 78331 - DNA, 25 bp, Probe sequence
agtcctcttgtgtttagtttcttac

SEQ ID NO: 78332 - DNA, 25 bp, Probe sequence
cagtcctcttgtgtttagtttctta

SEQ ID NO: 78333 - DNA, 25 bp, Probe sequence
acagtcctcttgtgtttagtttctt

SEQ ID NO: 78334 - DNA, 25 bp, Probe sequence
tcctcttgtgtttagtttcttacgt

SEQ ID NO: 78335 - DNA, 25 bp, Probe sequence
cctcttgtgtttagtttcttacgtt

SEQ ID NO: 78336 - DNA, 25 bp, Probe sequence
gtgtttagtttcttacgttaaaggc

SEQ ID NO: 78337 - DNA, 25 bp, Probe sequence
tgtttagtttcttacgttaaaggct

SEQ ID NO: 78338 - DNA, 25 bp, Probe sequence
tgtgtttagtttcttacgttaaagg

SEQ ID NO: 78339 - DNA, 25 bp, Probe sequence
cgtaagaaactaaacacaagaggac

SEQ ID NO: 78340 - DNA, 25 bp, Probe sequence
taagaaactaaacacaagaggactg

SEQ ID NO: 78341 - DNA, 25 bp, Probe sequence
gtaagaaactaaacacaagaggact

SEQ ID NO: 78342 - DNA, 25 bp, Probe sequence
aagaaactaaacacaagaggactgt

SEQ ID NO: 78343 - DNA, 25 bp, Probe sequence
acgtaagaaactaaacacaagagga

SEQ ID NO: 78344 - DNA, 25 bp, Probe sequence
aacgtaagaaactaaacacaagagg

SEQ ID NO: 78345 - DNA, 25 bp, Probe sequence
gcctttaacgtaagaaactaaacac

SEQ ID NO: 78346 - DNA, 25 bp, Probe sequence
agcctttaacgtaagaaactaaaca

SEQ ID NO: 78347 - DNA, 25 bp, Probe sequence
cctttaacgtaagaaactaaacaca

SEQ ID NO: 78348 - DNA, 25 bp, Probe sequence
aactcgctataattaaagtgtttaa

SEQ ID NO: 78349 - DNA, 25 bp, Probe sequence
tgttaaatacttaaaataactcgct

SEQ ID NO: 78350 - DNA, 25 bp, Probe sequence
ttaaacactttaattatagcgagtt

SEQ ID NO: 78351 - DNA, 25 bp, Probe sequence
agcgagttattttaagtatttaaca

SEQ ID NO: 78352 - DNA, 25 bp, Probe sequence
aaagcagcagtaagatgttttctaa

SEQ ID NO: 78353 - DNA, 25 bp, Probe sequence
aagcagcagtaagatgttttctaat

SEQ ID NO: 78354 - DNA, 25 bp, Probe sequence
gcagcagtaagatgttttctaattg

SEQ ID NO: 78355 - DNA, 25 bp, Probe sequence
agcagcagtaagatgttttctaatt

SEQ ID NO: 78356 - DNA, 25 bp, Probe sequence
aaaagcagcagtaagatgttttcta

SEQ ID NO: 78357 - DNA, 25 bp, Probe sequence
taaaagcagcagtaagatgttttct

SEQ ID NO: 78358 - DNA, 25 bp, Probe sequence
ttgaaaattatcttactgctgcttt

SEQ ID NO: 78359 - DNA, 25 bp, Probe sequence
gggctttaaatgtcagatagtattt

SEQ ID NO: 78360 - DNA, 25 bp, Probe sequence
aggggctttaaatgtcagatagtat

SEQ ID NO: 78361 - DNA, 25 bp, Probe sequence
ttagaaaacatcttactgctgcttt

SEQ ID NO: 78362 - DNA, 25 bp, Probe sequence
attagaaaacatcttactgctgctt

SEQ ID NO: 78363 - DNA, 25 bp, Probe sequence
aattagaaaacatcttactgctgct

SEQ ID NO: 78364 - DNA, 25 bp, Probe sequence
caattagaaaacatcttactgctgc

SEQ ID NO: 78365 - DNA, 25 bp, Probe sequence
agaaaacatcttactgctgctttta

SEQ ID NO: 78366 - DNA, 25 bp, Probe sequence
tagaaaacatcttactgctgctttt

SEQ ID NO: 78367 - DNA, 25 bp, Probe sequence
aaagcagcagtaagataattttcaa

SEQ ID NO: 78368 - DNA, 25 bp, Probe sequence
aaatactatctgacatttaaagccc

SEQ ID NO: 78369 - DNA, 25 bp, Probe sequence
acatcttactgctgcttttaatatc

SEQ ID NO: 78370 - DNA, 25 bp, Probe sequence
ccttcatctgacatcactcaattat

SEQ ID NO: 78371 - DNA, 25 bp, Probe sequence
cccttcatctgacatcactcaatta

SEQ ID NO: 78372 - DNA, 25 bp, Probe sequence
catctgacatcactcaattatatca

SEQ ID NO: 78373 - DNA, 25 bp, Probe sequence
cttcatctgacatcactcaattata

SEQ ID NO: 78374 - DNA, 25 bp, Probe sequence
tcatctgacatcactcaattatatc

SEQ ID NO: 78375 - DNA, 25 bp, Probe sequence
ttcatctgacatcactcaattatat

SEQ ID NO: 78376 - DNA, 25 bp, Probe sequence
aaattgaaggcactaaactgtttca

SEQ ID NO: 78377 - DNA, 25 bp, Probe sequence
aattgaaggcactaaactgtttcac

SEQ ID NO: 78378 - DNA, 25 bp, Probe sequence
aaaattgaaggcactaaactgtttc

SEQ ID NO: 78379 - DNA, 25 bp, Probe sequence
ataattgagtgatgtcagatgaagg

SEQ ID NO: 78380 - DNA, 25 bp, Probe sequence
taattgagtgatgtcagatgaaggg

SEQ ID NO: 78381 - DNA, 25 bp, Probe sequence
tataattgagtgatgtcagatgaag

SEQ ID NO: 78382 - DNA, 25 bp, Probe sequence
tgatataattgagtgatgtcagatg

SEQ ID NO: 78383 - DNA, 25 bp, Probe sequence
gatataattgagtgatgtcagatga

SEQ ID NO: 78384 - DNA, 25 bp, Probe sequence
atataattgagtgatgtcagatgaa

SEQ ID NO: 78385 - DNA, 25 bp, Probe sequence
tgaaacagtttagtgccttcaattt

SEQ ID NO: 78386 - DNA, 25 bp, Probe sequence
gtgaaacagtttagtgccttcaatt

SEQ ID NO: 78387 - DNA, 25 bp, Probe sequence
gaaacagtttagtgccttcaatttt

SEQ ID NO: 78388 - DNA, 25 bp, Probe sequence
gtacttgacaactattacacttcat

SEQ ID NO: 78389 - DNA, 25 bp, Probe sequence
tcaataattgcgatgaaatcagtac

SEQ ID NO: 78390 - DNA, 25 bp, Probe sequence
acttgacaactattacacttcataa

SEQ ID NO: 78391 - DNA, 25 bp, Probe sequence
tgcttatctattcagtatgaacgaa

SEQ ID NO: 78392 - DNA, 25 bp, Probe sequence
ttgcttatctattcagtatgaacga

SEQ ID NO: 78393 - DNA, 25 bp, Probe sequence
agtacttgacaactattacacttca

SEQ ID NO: 78394 - DNA, 25 bp, Probe sequence
tcagtacttgacaactattacactt

SEQ ID NO: 78395 - DNA, 25 bp, Probe sequence
cagtacttgacaactattacacttc

SEQ ID NO: 78396 - DNA, 25 bp, Probe sequence
atcagtacttgacaactattacact

SEQ ID NO: 78397 - DNA, 25 bp, Probe sequence
atgaagtgtaatagttgtcaagtac

SEQ ID NO: 78398 - DNA, 25 bp, Probe sequence
gtactgatttcatcgcaattattga

SEQ ID NO: 78399 - DNA, 25 bp, Probe sequence
ttatgaagtgtaatagttgtcaagt

SEQ ID NO: 78400 - DNA, 25 bp, Probe sequence
tcgttcatactgaatagataagcaa

SEQ ID NO: 78401 - DNA, 25 bp, Probe sequence
ttcgttcatactgaatagataagca

SEQ ID NO: 78402 - DNA, 25 bp, Probe sequence
aagtgtaatagttgtcaagtactga

SEQ ID NO: 78403 - DNA, 25 bp, Probe sequence
tgaagtgtaatagttgtcaagtact

SEQ ID NO: 78404 - DNA, 25 bp, Probe sequence
gaagtgtaatagttgtcaagtactg

SEQ ID NO: 78405 - DNA, 25 bp, Probe sequence
agtgtaatagttgtcaagtactgat

SEQ ID NO: 78406 - DNA, 25 bp, Probe sequence
cttatcaggcacaaatctacccatt

SEQ ID NO: 78407 - DNA, 25 bp, Probe sequence
tcaggcacaaatctacccatttata

SEQ ID NO: 78408 - DNA, 25 bp, Probe sequence
atcaggcacaaatctacccatttat

SEQ ID NO: 78409 - DNA, 25 bp, Probe sequence
tatcaggcacaaatctacccattta

SEQ ID NO: 78410 - DNA, 25 bp, Probe sequence
ttatcaggcacaaatctacccattt

SEQ ID NO: 78411 - DNA, 25 bp, Probe sequence
attccttatcaggcacaaatctacc

SEQ ID NO: 78412 - DNA, 25 bp, Probe sequence
tgtataaatctcgatgctcagttct

SEQ ID NO: 78413 - DNA, 25 bp, Probe sequence
attgcttgtataaatctcgatgctc

SEQ ID NO: 78414 - DNA, 25 bp, Probe sequence
ttgcttgtataaatctcgatgctca

SEQ ID NO: 78415 - DNA, 25 bp, Probe sequence
aatgggtagatttgtgcctgataag

SEQ ID NO: 78416 - DNA, 25 bp, Probe sequence
taaatgggtagatttgtgcctgata

SEQ ID NO: 78417 - DNA, 25 bp, Probe sequence
ataaatgggtagatttgtgcctgat

SEQ ID NO: 78418 - DNA, 25 bp, Probe sequence
tataaatgggtagatttgtgcctga

SEQ ID NO: 78419 - DNA, 25 bp, Probe sequence
aaatgggtagatttgtgcctgataa

SEQ ID NO: 78420 - DNA, 25 bp, Probe sequence
ggtagatttgtgcctgataaggaat

SEQ ID NO: 78421 - DNA, 25 bp, Probe sequence
gagcatcgagatttatacaagcaat

SEQ ID NO: 78422 - DNA, 25 bp, Probe sequence
agaactgagcatcgagatttataca

SEQ ID NO: 78423 - DNA, 25 bp, Probe sequence
tgagcatcgagatttatacaagcaa

SEQ ID NO: 78424 - DNA, 25 bp, Probe sequence
taatgtcatgctacgaatattgtgc

SEQ ID NO: 78425 - DNA, 25 bp, Probe sequence
gccttaatgtcatgctacgaatatt

SEQ ID NO: 78426 - DNA, 25 bp, Probe sequence
ccttaatgtcatgctacgaatattg

SEQ ID NO: 78427 - DNA, 25 bp, Probe sequence
ttaatgtcatgctacgaatattgtg

SEQ ID NO: 78428 - DNA, 25 bp, Probe sequence
cttaatgtcatgctacgaatattgt

SEQ ID NO: 78429 - DNA, 25 bp, Probe sequence
cactactaaagccttaatgtcatgc

SEQ ID NO: 78430 - DNA, 25 bp, Probe sequence
agccttaatgtcatgctacgaatat

SEQ ID NO: 78431 - DNA, 25 bp, Probe sequence
aagccttaatgtcatgctacgaata

SEQ ID NO: 78432 - DNA, 25 bp, Probe sequence
acactactaaagccttaatgtcatg

SEQ ID NO: 78433 - DNA, 25 bp, Probe sequence
gcacaatattcgtagcatgacatta

SEQ ID NO: 78434 - DNA, 25 bp, Probe sequence
aatattcgtagcatgacattaaggc

SEQ ID NO: 78435 - DNA, 25 bp, Probe sequence
caatattcgtagcatgacattaagg

SEQ ID NO: 78436 - DNA, 25 bp, Probe sequence
cacaatattcgtagcatgacattaa

SEQ ID NO: 78437 - DNA, 25 bp, Probe sequence
acaatattcgtagcatgacattaag

SEQ ID NO: 78438 - DNA, 25 bp, Probe sequence
gcatgacattaaggctttagtagtg

SEQ ID NO: 78439 - DNA, 25 bp, Probe sequence
atattcgtagcatgacattaaggct

SEQ ID NO: 78440 - DNA, 25 bp, Probe sequence
tattcgtagcatgacattaaggctt

SEQ ID NO: 78441 - DNA, 25 bp, Probe sequence
catgacattaaggctttagtagtgt

SEQ ID NO: 78442 - DNA, 25 bp, Probe sequence
actctgcctatatattagaggtcaa

SEQ ID NO: 78443 - DNA, 25 bp, Probe sequence
cgtttcaccttcatcaaaatcattt

SEQ ID NO: 78444 - DNA, 25 bp, Probe sequence
tactctgcctatatattagaggtca

SEQ ID NO: 78445 - DNA, 25 bp, Probe sequence
acgtttcaccttcatcaaaatcatt

SEQ ID NO: 78446 - DNA, 25 bp, Probe sequence
atactctgcctatatattagaggtc

SEQ ID NO: 78447 - DNA, 25 bp, Probe sequence
gtttcaccttcatcaaaatcattta

SEQ ID NO: 78448 - DNA, 25 bp, Probe sequence
aatactctgcctatatattagaggt

SEQ ID NO: 78449 - DNA, 25 bp, Probe sequence
caatactctgcctatatattagagg

SEQ ID NO: 78450 - DNA, 25 bp, Probe sequence
ttcaccttcatcaaaatcatttatt

SEQ ID NO: 78451 - DNA, 25 bp, Probe sequence
ttgacctctaatatataggcagagt

SEQ ID NO: 78452 - DNA, 25 bp, Probe sequence
aaatgattttgatgaaggtgaaacg

SEQ ID NO: 78453 - DNA, 25 bp, Probe sequence
tgacctctaatatataggcagagta

SEQ ID NO: 78454 - DNA, 25 bp, Probe sequence
aatgattttgatgaaggtgaaacgt

SEQ ID NO: 78455 - DNA, 25 bp, Probe sequence
gacctctaatatataggcagagtat

SEQ ID NO: 78456 - DNA, 25 bp, Probe sequence
taaatgattttgatgaaggtgaaac

SEQ ID NO: 78457 - DNA, 25 bp, Probe sequence
acctctaatatataggcagagtatt

SEQ ID NO: 78458 - DNA, 25 bp, Probe sequence
cctctaatatataggcagagtattg

SEQ ID NO: 78459 - DNA, 25 bp, Probe sequence
ataaatgattttgatgaaggtgaaa

SEQ ID NO: 78460 - DNA, 25 bp, Probe sequence
gtgatttaccctatacaatgtccct

SEQ ID NO: 78461 - DNA, 25 bp, Probe sequence
agtgatttaccctatacaatgtccc

SEQ ID NO: 78462 - DNA, 25 bp, Probe sequence
tttagacacttattcgccatcattt

SEQ ID NO: 78463 - DNA, 25 bp, Probe sequence
cctatacaatgtccctttaagatgc

SEQ ID NO: 78464 - DNA, 25 bp, Probe sequence
atgctgacaacataaggaggtttat

SEQ ID NO: 78465 - DNA, 25 bp, Probe sequence
tgatttaccctatacaatgtccctt

SEQ ID NO: 78466 - DNA, 25 bp, Probe sequence
tgctgacaacataaggaggtttatc

SEQ ID NO: 78467 - DNA, 25 bp, Probe sequence
accctatacaatgtccctttaagat

SEQ ID NO: 78468 - DNA, 25 bp, Probe sequence
ccctatacaatgtccctttaagatg

SEQ ID NO: 78469 - DNA, 25 bp, Probe sequence
gggacattgtatagggtaaatcact

SEQ ID NO: 78470 - DNA, 25 bp, Probe sequence
agggacattgtatagggtaaatcac

SEQ ID NO: 78471 - DNA, 25 bp, Probe sequence
aaatgatggcgaataagtgtctaaa

SEQ ID NO: 78472 - DNA, 25 bp, Probe sequence
gcatcttaaagggacattgtatagg

SEQ ID NO: 78473 - DNA, 25 bp, Probe sequence
ataaacctccttatgttgtcagcat

SEQ ID NO: 78474 - DNA, 25 bp, Probe sequence
aagggacattgtatagggtaaatca

SEQ ID NO: 78475 - DNA, 25 bp, Probe sequence
atcttaaagggacattgtatagggt

SEQ ID NO: 78476 - DNA, 25 bp, Probe sequence
gataaacctccttatgttgtcagca

SEQ ID NO: 78477 - DNA, 25 bp, Probe sequence
catcttaaagggacattgtataggg

SEQ ID NO: 78478 - DNA, 25 bp, Probe sequence
gctacaacactgaatacaccaacta

SEQ ID NO: 78479 - DNA, 25 bp, Probe sequence
ctacaacactgaatacaccaactaa

SEQ ID NO: 78480 - DNA, 25 bp, Probe sequence
aagcgaattagtataggttaccgaa

SEQ ID NO: 78481 - DNA, 25 bp, Probe sequence
gatgctacaacactgaatacaccaa

SEQ ID NO: 78482 - DNA, 25 bp, Probe sequence
atgctacaacactgaatacaccaac

SEQ ID NO: 78483 - DNA, 25 bp, Probe sequence
agatgctacaacactgaatacacca

SEQ ID NO: 78484 - DNA, 25 bp, Probe sequence
tcatacagatgctacaacactgaat

SEQ ID NO: 78485 - DNA, 25 bp, Probe sequence
tacagatgctacaacactgaataca

SEQ ID NO: 78486 - DNA, 25 bp, Probe sequence
ctcatacagatgctacaacactgaa

SEQ ID NO: 78487 - DNA, 25 bp, Probe sequence
tagttggtgtattcagtgttgtagc

SEQ ID NO: 78488 - DNA, 25 bp, Probe sequence
ttagttggtgtattcagtgttgtag

SEQ ID NO: 78489 - DNA, 25 bp, Probe sequence
ttcggtaacctatactaattcgctt

SEQ ID NO: 78490 - DNA, 25 bp, Probe sequence
ttggtgtattcagtgttgtagcatc

SEQ ID NO: 78491 - DNA, 25 bp, Probe sequence
gttggtgtattcagtgttgtagcat

SEQ ID NO: 78492 - DNA, 25 bp, Probe sequence
tggtgtattcagtgttgtagcatct

SEQ ID NO: 78493 - DNA, 25 bp, Probe sequence
attcagtgttgtagcatctgtatga

SEQ ID NO: 78494 - DNA, 25 bp, Probe sequence
tgtattcagtgttgtagcatctgta

SEQ ID NO: 78495 - DNA, 25 bp, Probe sequence
ttcagtgttgtagcatctgtatgag

SEQ ID NO: 78496 - DNA, 25 bp, Probe sequence
acaatcatgtatggtcgtgcttatt

SEQ ID NO: 78497 - DNA, 25 bp, Probe sequence
aatcatgtatggtcgtgcttattgc

SEQ ID NO: 78498 - DNA, 25 bp, Probe sequence
gacaaataaggcttcaacacgaata

SEQ ID NO: 78499 - DNA, 25 bp, Probe sequence
acaaataaggcttcaacacgaatat

SEQ ID NO: 78500 - DNA, 25 bp, Probe sequence
gcttattgccaatctaaatcgttca

SEQ ID NO: 78501 - DNA, 25 bp, Probe sequence
tgcttattgccaatctaaatcgttc

SEQ ID NO: 78502 - DNA, 25 bp, Probe sequence
cacaatcatgtatggtcgtgcttat

SEQ ID NO: 78503 - DNA, 25 bp, Probe sequence
aaatgcccaagactattgctttaat

SEQ ID NO: 78504 - DNA, 25 bp, Probe sequence
gtgcttattgccaatctaaatcgtt

SEQ ID NO: 78505 - DNA, 25 bp, Probe sequence
aataagcacgaccatacatgattgt

SEQ ID NO: 78506 - DNA, 25 bp, Probe sequence
gcaataagcacgaccatacatgatt

SEQ ID NO: 78507 - DNA, 25 bp, Probe sequence
tattcgtgttgaagccttatttgtc

SEQ ID NO: 78508 - DNA, 25 bp, Probe sequence
atattcgtgttgaagccttatttgt

SEQ ID NO: 78509 - DNA, 25 bp, Probe sequence
ataagcacgaccatacatgattgtg

SEQ ID NO: 78510 - DNA, 25 bp, Probe sequence
gaacgatttagattggcaataagca

SEQ ID NO: 78511 - DNA, 25 bp, Probe sequence
tgaacgatttagattggcaataagc

SEQ ID NO: 78512 - DNA, 25 bp, Probe sequence
attaaagcaatagtcttgggcattt

SEQ ID NO: 78513 - DNA, 25 bp, Probe sequence
aacgatttagattggcaataagcac

SEQ ID NO: 78514 - DNA, 25 bp, Probe sequence
aaaatatgcccctttactccataat

SEQ ID NO: 78515 - DNA, 25 bp, Probe sequence
aaatatgcccctttactccataata

SEQ ID NO: 78516 - DNA, 25 bp, Probe sequence
atgcccctttactccataatattta

SEQ ID NO: 78517 - DNA, 25 bp, Probe sequence
tgcccctttactccataatatttat

SEQ ID NO: 78518 - DNA, 25 bp, Probe sequence
aatatgcccctttactccataatat

SEQ ID NO: 78519 - DNA, 25 bp, Probe sequence
tatgcccctttactccataatattt

SEQ ID NO: 78520 - DNA, 25 bp, Probe sequence
atatgcccctttactccataatatt

SEQ ID NO: 78521 - DNA, 25 bp, Probe sequence
gcccctttactccataatatttatt

SEQ ID NO: 78522 - DNA, 25 bp, Probe sequence
attatggagtaaaggggcatatttt

SEQ ID NO: 78523 - DNA, 25 bp, Probe sequence
tattatggagtaaaggggcatattt

SEQ ID NO: 78524 - DNA, 25 bp, Probe sequence
taaatattatggagtaaaggggcat

SEQ ID NO: 78525 - DNA, 25 bp, Probe sequence
ataaatattatggagtaaaggggca

SEQ ID NO: 78526 - DNA, 25 bp, Probe sequence
atattatggagtaaaggggcatatt

SEQ ID NO: 78527 - DNA, 25 bp, Probe sequence
aaatattatggagtaaaggggcata

SEQ ID NO: 78528 - DNA, 25 bp, Probe sequence
aatattatggagtaaaggggcatat

SEQ ID NO: 78529 - DNA, 25 bp, Probe sequence
aataaatattatggagtaaaggggc

SEQ ID NO: 78530 - DNA, 25 bp, Probe sequence
tcggtcgcttgtagtgtatattatt

SEQ ID NO: 78531 - DNA, 25 bp, Probe sequence
atcggtcgcttgtagtgtatattat

SEQ ID NO: 78532 - DNA, 25 bp, Probe sequence
atatcggtcgcttgtagtgtatatt

SEQ ID NO: 78533 - DNA, 25 bp, Probe sequence
tatcggtcgcttgtagtgtatatta

SEQ ID NO: 78534 - DNA, 25 bp, Probe sequence
tatatcggtcgcttgtagtgtatat

SEQ ID NO: 78535 - DNA, 25 bp, Probe sequence
cggtcgcttgtagtgtatattatta

SEQ ID NO: 78536 - DNA, 25 bp, Probe sequence
aatatatcggtcgcttgtagtgtat

SEQ ID NO: 78537 - DNA, 25 bp, Probe sequence
atatatcggtcgcttgtagtgtata

SEQ ID NO: 78538 - DNA, 25 bp, Probe sequence
caatatatcggtcgcttgtagtgta

SEQ ID NO: 78539 - DNA, 25 bp, Probe sequence
aataatatacactacaagcgaccga

SEQ ID NO: 78540 - DNA, 25 bp, Probe sequence
ataatatacactacaagcgaccgat

SEQ ID NO: 78541 - DNA, 25 bp, Probe sequence
aatatacactacaagcgaccgatat

SEQ ID NO: 78542 - DNA, 25 bp, Probe sequence
taatatacactacaagcgaccgata

SEQ ID NO: 78543 - DNA, 25 bp, Probe sequence
atatacactacaagcgaccgatata

SEQ ID NO: 78544 - DNA, 25 bp, Probe sequence
taataatatacactacaagcgaccg

SEQ ID NO: 78545 - DNA, 25 bp, Probe sequence
atacactacaagcgaccgatatatt

SEQ ID NO: 78546 - DNA, 25 bp, Probe sequence
tacactacaagcgaccgatatattg

SEQ ID NO: 78547 - DNA, 25 bp, Probe sequence
tatacactacaagcgaccgatatat

SEQ ID NO: 78548 - DNA, 25 bp, Probe sequence
tcatctgaatacaccaatactctca

SEQ ID NO: 78549 - DNA, 25 bp, Probe sequence
tgcttcatctgaatacaccaatact

SEQ ID NO: 78550 - DNA, 25 bp, Probe sequence
gcttcatctgaatacaccaatactc

SEQ ID NO: 78551 - DNA, 25 bp, Probe sequence
atgcttcatctgaatacaccaatac

SEQ ID NO: 78552 - DNA, 25 bp, Probe sequence
catctgaatacaccaatactctcat

SEQ ID NO: 78553 - DNA, 25 bp, Probe sequence
agtatgcttcatctgaatacaccaa

SEQ ID NO: 78554 - DNA, 25 bp, Probe sequence
aagtatgcttcatctgaatacacca

SEQ ID NO: 78555 - DNA, 25 bp, Probe sequence
ttcatctgaatacaccaatactctc

SEQ ID NO: 78556 - DNA, 25 bp, Probe sequence
cttcatctgaatacaccaatactct

SEQ ID NO: 78557 - DNA, 25 bp, Probe sequence
agtattggtgtattcagatgaagca

SEQ ID NO: 78558 - DNA, 25 bp, Probe sequence
tgagagtattggtgtattcagatga

SEQ ID NO: 78559 - DNA, 25 bp, Probe sequence
gagtattggtgtattcagatgaagc

SEQ ID NO: 78560 - DNA, 25 bp, Probe sequence
gtattggtgtattcagatgaagcat

SEQ ID NO: 78561 - DNA, 25 bp, Probe sequence
atgagagtattggtgtattcagatg

SEQ ID NO: 78562 - DNA, 25 bp, Probe sequence
tggtgtattcagatgaagcatactt

SEQ ID NO: 78563 - DNA, 25 bp, Probe sequence
ttggtgtattcagatgaagcatact

SEQ ID NO: 78564 - DNA, 25 bp, Probe sequence
agagtattggtgtattcagatgaag

SEQ ID NO: 78565 - DNA, 25 bp, Probe sequence
gagagtattggtgtattcagatgaa

SEQ ID NO: 78566 - DNA, 25 bp, Probe sequence
gcgtgattggctaatatctttatga

SEQ ID NO: 78567 - DNA, 25 bp, Probe sequence
tgatttaagatattacgacgctcat

SEQ ID NO: 78568 - DNA, 25 bp, Probe sequence
atgatttaagatattacgacgctca

SEQ ID NO: 78569 - DNA, 25 bp, Probe sequence
gatttaagatattacgacgctcatt

SEQ ID NO: 78570 - DNA, 25 bp, Probe sequence
atttaagatattacgacgctcattt

SEQ ID NO: 78571 - DNA, 25 bp, Probe sequence
cgtgattggctaatatctttatgat

SEQ ID NO: 78572 - DNA, 25 bp, Probe sequence
tatgatttaagatattacgacgctc

SEQ ID NO: 78573 - DNA, 25 bp, Probe sequence
cgctcattttatctcgctttatgta

SEQ ID NO: 78574 - DNA, 25 bp, Probe sequence
gacgctcattttatctcgctttatg

SEQ ID NO: 78575 - DNA, 25 bp, Probe sequence
tcataaagatattagccaatcacgc

SEQ ID NO: 78576 - DNA, 25 bp, Probe sequence
tgagcgtcgtaatatcttaaatcat

SEQ ID NO: 78577 - DNA, 25 bp, Probe sequence
atgagcgtcgtaatatcttaaatca

SEQ ID NO: 78578 - DNA, 25 bp, Probe sequence
aatgagcgtcgtaatatcttaaatc

SEQ ID NO: 78579 - DNA, 25 bp, Probe sequence
atcataaagatattagccaatcacg

SEQ ID NO: 78580 - DNA, 25 bp, Probe sequence
aaatgagcgtcgtaatatcttaaat

SEQ ID NO: 78581 - DNA, 25 bp, Probe sequence
gagcgtcgtaatatcttaaatcata

SEQ ID NO: 78582 - DNA, 25 bp, Probe sequence
tacataaagcgagataaaatgagcg

SEQ ID NO: 78583 - DNA, 25 bp, Probe sequence
cataaagcgagataaaatgagcgtc

SEQ ID NO: 78584 - DNA, 25 bp, Probe sequence
ctattaacagttgagtagagtgtgc

SEQ ID NO: 78585 - DNA, 25 bp, Probe sequence
gctattaacagttgagtagagtgtg

SEQ ID NO: 78586 - DNA, 25 bp, Probe sequence
cagctattaacagttgagtagagtg

SEQ ID NO: 78587 - DNA, 25 bp, Probe sequence
acacactctattcagctattaacag

SEQ ID NO: 78588 - DNA, 25 bp, Probe sequence
tcagctattaacagttgagtagagt

SEQ ID NO: 78589 - DNA, 25 bp, Probe sequence
agctattaacagttgagtagagtgt

SEQ ID NO: 78590 - DNA, 25 bp, Probe sequence
ccctctgttgaaattgataactacg

SEQ ID NO: 78591 - DNA, 25 bp, Probe sequence
aacacactctattcagctattaaca

SEQ ID NO: 78592 - DNA, 25 bp, Probe sequence
cacactctattcagctattaacagt

SEQ ID NO: 78593 - DNA, 25 bp, Probe sequence
cacactctactcaactgttaatagc

SEQ ID NO: 78594 - DNA, 25 bp, Probe sequence
gcacactctactcaactgttaatag

SEQ ID NO: 78595 - DNA, 25 bp, Probe sequence
cactctactcaactgttaatagctg

SEQ ID NO: 78596 - DNA, 25 bp, Probe sequence
ctgttaatagctgaatagagtgtgt

SEQ ID NO: 78597 - DNA, 25 bp, Probe sequence
actctactcaactgttaatagctga

SEQ ID NO: 78598 - DNA, 25 bp, Probe sequence
acactctactcaactgttaatagct

SEQ ID NO: 78599 - DNA, 25 bp, Probe sequence
cgtagttatcaatttcaacagaggg

SEQ ID NO: 78600 - DNA, 25 bp, Probe sequence
tgttaatagctgaatagagtgtgtt

SEQ ID NO: 78601 - DNA, 25 bp, Probe sequence
actgttaatagctgaatagagtgtg

SEQ ID NO: 78602 - DNA, 25 bp, Probe sequence
agtcaccctcctaaatagtaatctt

SEQ ID NO: 78603 - DNA, 25 bp, Probe sequence
gtcaccctcctaaatagtaatcttt

SEQ ID NO: 78604 - DNA, 25 bp, Probe sequence
accctcctaaatagtaatctttacg

SEQ ID NO: 78605 - DNA, 25 bp, Probe sequence
tcaccctcctaaatagtaatcttta

SEQ ID NO: 78606 - DNA, 25 bp, Probe sequence
ccctcctaaatagtaatctttacgt

SEQ ID NO: 78607 - DNA, 25 bp, Probe sequence
caccctcctaaatagtaatctttac

SEQ ID NO: 78608 - DNA, 25 bp, Probe sequence
cgaatcatactttaggtatttacca

SEQ ID NO: 78609 - DNA, 25 bp, Probe sequence
accacttttcgttttatctaataca

SEQ ID NO: 78610 - DNA, 25 bp, Probe sequence
actttaggtatttaccacttttcgt

SEQ ID NO: 78611 - DNA, 25 bp, Probe sequence
aagattactatttaggagggtgact

SEQ ID NO: 78612 - DNA, 25 bp, Probe sequence
aaagattactatttaggagggtgac

SEQ ID NO: 78613 - DNA, 25 bp, Probe sequence
cgtaaagattactatttaggagggt

SEQ ID NO: 78614 - DNA, 25 bp, Probe sequence
taaagattactatttaggagggtga

SEQ ID NO: 78615 - DNA, 25 bp, Probe sequence
acgtaaagattactatttaggaggg

SEQ ID NO: 78616 - DNA, 25 bp, Probe sequence
gtaaagattactatttaggagggtg

SEQ ID NO: 78617 - DNA, 25 bp, Probe sequence
tggtaaatacctaaagtatgattcg

SEQ ID NO: 78618 - DNA, 25 bp, Probe sequence
tgtattagataaaacgaaaagtggt

SEQ ID NO: 78619 - DNA, 25 bp, Probe sequence
acgaaaagtggtaaatacctaaagt

SEQ ID NO: 78620 - DNA, 25 bp, Probe sequence
tcaatacctatcctgtactgattcc

SEQ ID NO: 78621 - DNA, 25 bp, Probe sequence
agaatcaatacctatcctgtactga

SEQ ID NO: 78622 - DNA, 25 bp, Probe sequence
aagaatcaatacctatcctgtactg

SEQ ID NO: 78623 - DNA, 25 bp, Probe sequence
aaactactaatcaagatttcgcacg

SEQ ID NO: 78624 - DNA, 25 bp, Probe sequence
gaagaatcaatacctatcctgtact

SEQ ID NO: 78625 - DNA, 25 bp, Probe sequence
ggaagaatcaatacctatcctgtac

SEQ ID NO: 78626 - DNA, 25 bp, Probe sequence
cctatcctgtactgattccctacta

SEQ ID NO: 78627 - DNA, 25 bp, Probe sequence
tacctatcctgtactgattccctac

SEQ ID NO: 78628 - DNA, 25 bp, Probe sequence
aatacctatcctgtactgattccct

SEQ ID NO: 78629 - DNA, 25 bp, Probe sequence
ggaatcagtacaggataggtattga

SEQ ID NO: 78630 - DNA, 25 bp, Probe sequence
tcagtacaggataggtattgattct

SEQ ID NO: 78631 - DNA, 25 bp, Probe sequence
cagtacaggataggtattgattctt

SEQ ID NO: 78632 - DNA, 25 bp, Probe sequence
cgtgcgaaatcttgattagtagttt

SEQ ID NO: 78633 - DNA, 25 bp, Probe sequence
agtacaggataggtattgattcttc

SEQ ID NO: 78634 - DNA, 25 bp, Probe sequence
gtacaggataggtattgattcttcc

SEQ ID NO: 78635 - DNA, 25 bp, Probe sequence
gggaatcagtacaggataggtattg

SEQ ID NO: 78636 - DNA, 25 bp, Probe sequence
agggaatcagtacaggataggtatt

SEQ ID NO: 78637 - DNA, 25 bp, Probe sequence
gtagggaatcagtacaggataggta

SEQ ID NO: 78638 - DNA, 25 bp, Probe sequence
cactcctactatcaacttccaacta

SEQ ID NO: 78639 - DNA, 25 bp, Probe sequence
tcctactatcaacttccaactaact

SEQ ID NO: 78640 - DNA, 25 bp, Probe sequence
actcctactatcaacttccaactaa

SEQ ID NO: 78641 - DNA, 25 bp, Probe sequence
ccactcctactatcaacttccaact

SEQ ID NO: 78642 - DNA, 25 bp, Probe sequence
ctcctactatcaacttccaactaac

SEQ ID NO: 78643 - DNA, 25 bp, Probe sequence
cctactatcaacttccaactaactt

SEQ ID NO: 78644 - DNA, 25 bp, Probe sequence
ttacagttcaattcagagagggatg

SEQ ID NO: 78645 - DNA, 25 bp, Probe sequence
attacagttcaattcagagagggat

SEQ ID NO: 78646 - DNA, 25 bp, Probe sequence
tcaattcagagagggatgggataaa

SEQ ID NO: 78647 - DNA, 25 bp, Probe sequence
tagttggaagttgatagtaggagtg

SEQ ID NO: 78648 - DNA, 25 bp, Probe sequence
ttagttggaagttgatagtaggagt

SEQ ID NO: 78649 - DNA, 25 bp, Probe sequence
agttagttggaagttgatagtagga

SEQ ID NO: 78650 - DNA, 25 bp, Probe sequence
agttggaagttgatagtaggagtgg

SEQ ID NO: 78651 - DNA, 25 bp, Probe sequence
gttagttggaagttgatagtaggag

SEQ ID NO: 78652 - DNA, 25 bp, Probe sequence
aagttagttggaagttgatagtagg

SEQ ID NO: 78653 - DNA, 25 bp, Probe sequence
catccctctctgaattgaactgtaa

SEQ ID NO: 78654 - DNA, 25 bp, Probe sequence
atccctctctgaattgaactgtaat

SEQ ID NO: 78655 - DNA, 25 bp, Probe sequence
ttatcccatccctctctgaattgaa

SEQ ID NO: 78656 - DNA, 25 bp, Probe sequence
atatcgctccaagattatgacaaca

SEQ ID NO: 78657 - DNA, 25 bp, Probe sequence
aatatcgctccaagattatgacaac

SEQ ID NO: 78658 - DNA, 25 bp, Probe sequence
tatcgctccaagattatgacaacat

SEQ ID NO: 78659 - DNA, 25 bp, Probe sequence
atcgctccaagattatgacaacata

SEQ ID NO: 78660 - DNA, 25 bp, Probe sequence
gcatcatgtatatggcatcatcacc

SEQ ID NO: 78661 - DNA, 25 bp, Probe sequence
cgcatcatgtatatggcatcatcac

SEQ ID NO: 78662 - DNA, 25 bp, Probe sequence
cacgcatcatgtatatggcatcatc

SEQ ID NO: 78663 - DNA, 25 bp, Probe sequence
catcatgtatatggcatcatcacca

SEQ ID NO: 78664 - DNA, 25 bp, Probe sequence
acgcatcatgtatatggcatcatca

SEQ ID NO: 78665 - DNA, 25 bp, Probe sequence
tgttgtcataatcttggagcgatat

SEQ ID NO: 78666 - DNA, 25 bp, Probe sequence
gttgtcataatcttggagcgatatt

SEQ ID NO: 78667 - DNA, 25 bp, Probe sequence
atgttgtcataatcttggagcgata

SEQ ID NO: 78668 - DNA, 25 bp, Probe sequence
tatgttgtcataatcttggagcgat

SEQ ID NO: 78669 - DNA, 25 bp, Probe sequence
ggtgatgatgccatatacatgatgc

SEQ ID NO: 78670 - DNA, 25 bp, Probe sequence
gatgatgccatatacatgatgcgtg

SEQ ID NO: 78671 - DNA, 25 bp, Probe sequence
gtgatgatgccatatacatgatgcg

SEQ ID NO: 78672 - DNA, 25 bp, Probe sequence
tggtgatgatgccatatacatgatg

SEQ ID NO: 78673 - DNA, 25 bp, Probe sequence
tgatgatgccatatacatgatgcgt

SEQ ID NO: 78674 - DNA, 25 bp, Probe sequence
gaaatgccggataagtcaatatgtt

SEQ ID NO: 78675 - DNA, 25 bp, Probe sequence
tttaatctgaaatgccggataagtc

SEQ ID NO: 78676 - DNA, 25 bp, Probe sequence
aaatgccggataagtcaatatgttg

SEQ ID NO: 78677 - DNA, 25 bp, Probe sequence
ctgaaatgccggataagtcaatatg

SEQ ID NO: 78678 - DNA, 25 bp, Probe sequence
tctgaaatgccggataagtcaatat

SEQ ID NO: 78679 - DNA, 25 bp, Probe sequence
atctgaaatgccggataagtcaata

SEQ ID NO: 78680 - DNA, 25 bp, Probe sequence
taatctgaaatgccggataagtcaa

SEQ ID NO: 78681 - DNA, 25 bp, Probe sequence
ttaatctgaaatgccggataagtca

SEQ ID NO: 78682 - DNA, 25 bp, Probe sequence
tgaaatgccggataagtcaatatgt

SEQ ID NO: 78683 - DNA, 25 bp, Probe sequence
aacatattgacttatccggcatttc

SEQ ID NO: 78684 - DNA, 25 bp, Probe sequence
gacttatccggcatttcagattaaa

SEQ ID NO: 78685 - DNA, 25 bp, Probe sequence
caacatattgacttatccggcattt

SEQ ID NO: 78686 - DNA, 25 bp, Probe sequence
tgacttatccggcatttcagattaa

SEQ ID NO: 78687 - DNA, 25 bp, Probe sequence
ttgacttatccggcatttcagatta

SEQ ID NO: 78688 - DNA, 25 bp, Probe sequence
tattgacttatccggcatttcagat

SEQ ID NO: 78689 - DNA, 25 bp, Probe sequence
atattgacttatccggcatttcaga

SEQ ID NO: 78690 - DNA, 25 bp, Probe sequence
catattgacttatccggcatttcag

SEQ ID NO: 78691 - DNA, 25 bp, Probe sequence
acatattgacttatccggcatttca

SEQ ID NO: 78692 - DNA, 25 bp, Probe sequence
agcacgactttattacaatttcttt

SEQ ID NO: 78693 - DNA, 25 bp, Probe sequence
tagcacgactttattacaatttctt

SEQ ID NO: 78694 - DNA, 25 bp, Probe sequence
ttagcacgactttattacaatttct

SEQ ID NO: 78695 - DNA, 25 bp, Probe sequence
gcacgactttattacaatttcttta

SEQ ID NO: 78696 - DNA, 25 bp, Probe sequence
attagcacgactttattacaatttc

SEQ ID NO: 78697 - DNA, 25 bp, Probe sequence
tttacatatgagtagttatcggtca

SEQ ID NO: 78698 - DNA, 25 bp, Probe sequence
aattagcacgactttattacaattt

SEQ ID NO: 78699 - DNA, 25 bp, Probe sequence
aaattagcacgactttattacaatt

SEQ ID NO: 78700 - DNA, 25 bp, Probe sequence
ttacatatgagtagttatcggtcat

SEQ ID NO: 78701 - DNA, 25 bp, Probe sequence
aaagaaattgtaataaagtcgtgct

SEQ ID NO: 78702 - DNA, 25 bp, Probe sequence
agaaattgtaataaagtcgtgctaa

SEQ ID NO: 78703 - DNA, 25 bp, Probe sequence
aagaaattgtaataaagtcgtgcta

SEQ ID NO: 78704 - DNA, 25 bp, Probe sequence
taaagaaattgtaataaagtcgtgc

SEQ ID NO: 78705 - DNA, 25 bp, Probe sequence
gaaattgtaataaagtcgtgctaat

SEQ ID NO: 78706 - DNA, 25 bp, Probe sequence
aattgtaataaagtcgtgctaattt

SEQ ID NO: 78707 - DNA, 25 bp, Probe sequence
aaattgtaataaagtcgtgctaatt

SEQ ID NO: 78708 - DNA, 25 bp, Probe sequence
tgaccgataactactcatatgtaaa

SEQ ID NO: 78709 - DNA, 25 bp, Probe sequence
atgaccgataactactcatatgtaa

SEQ ID NO: 78710 - DNA, 25 bp, Probe sequence
ttaagagctgcatatacactcactc

SEQ ID NO: 78711 - DNA, 25 bp, Probe sequence
taagagctgcatatacactcactcc

SEQ ID NO: 78712 - DNA, 25 bp, Probe sequence
tccctagctcgttaatataaactct

SEQ ID NO: 78713 - DNA, 25 bp, Probe sequence
tttaagagctgcatatacactcact

SEQ ID NO: 78714 - DNA, 25 bp, Probe sequence
ttacttcacatatttaagagctgca

SEQ ID NO: 78715 - DNA, 25 bp, Probe sequence
atttaagagctgcatatacactcac

SEQ ID NO: 78716 - DNA, 25 bp, Probe sequence
gagctgcatatacactcactccttg

SEQ ID NO: 78717 - DNA, 25 bp, Probe sequence
agagctgcatatacactcactcctt

SEQ ID NO: 78718 - DNA, 25 bp, Probe sequence
aagagctgcatatacactcactcct

SEQ ID NO: 78719 - DNA, 25 bp, Probe sequence
gagtgagtgtatatgcagctcttaa

SEQ ID NO: 78720 - DNA, 25 bp, Probe sequence
ggagtgagtgtatatgcagctctta

SEQ ID NO: 78721 - DNA, 25 bp, Probe sequence
agagtttatattaacgagctaggga

SEQ ID NO: 78722 - DNA, 25 bp, Probe sequence
agtgagtgtatatgcagctcttaaa

SEQ ID NO: 78723 - DNA, 25 bp, Probe sequence
tgcagctcttaaatatgtgaagtaa

SEQ ID NO: 78724 - DNA, 25 bp, Probe sequence
gtgagtgtatatgcagctcttaaat

SEQ ID NO: 78725 - DNA, 25 bp, Probe sequence
aggagtgagtgtatatgcagctctt

SEQ ID NO: 78726 - DNA, 25 bp, Probe sequence
aaggagtgagtgtatatgcagctct

SEQ ID NO: 78727 - DNA, 25 bp, Probe sequence
caaggagtgagtgtatatgcagctc

SEQ ID NO: 78728 - DNA, 25 bp, Probe sequence
tgaatcaataaccacctaataacaa

SEQ ID NO: 78729 - DNA, 25 bp, Probe sequence
atcatattatacacctttgttcgct

SEQ ID NO: 78730 - DNA, 25 bp, Probe sequence
atgaatcaataaccacctaataaca

SEQ ID NO: 78731 - DNA, 25 bp, Probe sequence
aatctttaggacgttatttcaggga

SEQ ID NO: 78732 - DNA, 25 bp, Probe sequence
tcatattatacacctttgttcgcta

SEQ ID NO: 78733 - DNA, 25 bp, Probe sequence
atctttaggacgttatttcagggat

SEQ ID NO: 78734 - DNA, 25 bp, Probe sequence
aatcatattatacacctttgttcgc

SEQ ID NO: 78735 - DNA, 25 bp, Probe sequence
tctttaggacgttatttcagggata

SEQ ID NO: 78736 - DNA, 25 bp, Probe sequence
aaacgcctcctcagatatttatata

SEQ ID NO: 78737 - DNA, 25 bp, Probe sequence
ttgttattaggtggttattgattca

SEQ ID NO: 78738 - DNA, 25 bp, Probe sequence
agcgaacaaaggtgtataatatgat

SEQ ID NO: 78739 - DNA, 25 bp, Probe sequence
tgttattaggtggttattgattcat

SEQ ID NO: 78740 - DNA, 25 bp, Probe sequence
tccctgaaataacgtcctaaagatt

SEQ ID NO: 78741 - DNA, 25 bp, Probe sequence
tagcgaacaaaggtgtataatatga

SEQ ID NO: 78742 - DNA, 25 bp, Probe sequence
atccctgaaataacgtcctaaagat

SEQ ID NO: 78743 - DNA, 25 bp, Probe sequence
gcgaacaaaggtgtataatatgatt

SEQ ID NO: 78744 - DNA, 25 bp, Probe sequence
tatccctgaaataacgtcctaaaga

SEQ ID NO: 78745 - DNA, 25 bp, Probe sequence
ccctgaaataacgtcctaaagatta

SEQ ID NO: 78746 - DNA, 25 bp, Probe sequence
cgttgaaccaccttgaattagtata

SEQ ID NO: 78747 - DNA, 25 bp, Probe sequence
gcgttgaaccaccttgaattagtat

SEQ ID NO: 78748 - DNA, 25 bp, Probe sequence
gaagctatctaatgtcgtgacctaa

SEQ ID NO: 78749 - DNA, 25 bp, Probe sequence
agctatctaatgtcgtgacctaatt

SEQ ID NO: 78750 - DNA, 25 bp, Probe sequence
aagctatctaatgtcgtgacctaat

SEQ ID NO: 78751 - DNA, 25 bp, Probe sequence
ttgaaccaccttgaattagtatagt

SEQ ID NO: 78752 - DNA, 25 bp, Probe sequence
gttgaaccaccttgaattagtatag

SEQ ID NO: 78753 - DNA, 25 bp, Probe sequence
tttctactctaccaaactctcttcg

SEQ ID NO: 78754 - DNA, 25 bp, Probe sequence
gctatctaatgtcgtgacctaatta

SEQ ID NO: 78755 - DNA, 25 bp, Probe sequence
tatactaattcaaggtggttcaacg

SEQ ID NO: 78756 - DNA, 25 bp, Probe sequence
atactaattcaaggtggttcaacgc

SEQ ID NO: 78757 - DNA, 25 bp, Probe sequence
ttaggtcacgacattagatagcttc

SEQ ID NO: 78758 - DNA, 25 bp, Probe sequence
attaggtcacgacattagatagctt

SEQ ID NO: 78759 - DNA, 25 bp, Probe sequence
aattaggtcacgacattagatagct

SEQ ID NO: 78760 - DNA, 25 bp, Probe sequence
actatactaattcaaggtggttcaa

SEQ ID NO: 78761 - DNA, 25 bp, Probe sequence
ctatactaattcaaggtggttcaac

SEQ ID NO: 78762 - DNA, 25 bp, Probe sequence
cgaagagagtttggtagagtagaaa

SEQ ID NO: 78763 - DNA, 25 bp, Probe sequence
taattaggtcacgacattagatagc

SEQ ID NO: 78764 - DNA, 25 bp, Probe sequence
aatttccatttgtattctcatgtga

SEQ ID NO: 78765 - DNA, 25 bp, Probe sequence
atttccatttgtattctcatgtgat

SEQ ID NO: 78766 - DNA, 25 bp, Probe sequence
tccatttgtattctcatgtgataaa

SEQ ID NO: 78767 - DNA, 25 bp, Probe sequence
ttccatttgtattctcatgtgataa

SEQ ID NO: 78768 - DNA, 25 bp, Probe sequence
tttccatttgtattctcatgtgata

SEQ ID NO: 78769 - DNA, 25 bp, Probe sequence
taatttccatttgtattctcatgtg

SEQ ID NO: 78770 - DNA, 25 bp, Probe sequence
tctcatgtgataaattctaaaagca

SEQ ID NO: 78771 - DNA, 25 bp, Probe sequence
ccatttgtattctcatgtgataaat

SEQ ID NO: 78772 - DNA, 25 bp, Probe sequence
ttaatttccatttgtattctcatgt

SEQ ID NO: 78773 - DNA, 25 bp, Probe sequence
tcacatgagaatacaaatggaaatt

SEQ ID NO: 78774 - DNA, 25 bp, Probe sequence
atcacatgagaatacaaatggaaat

SEQ ID NO: 78775 - DNA, 25 bp, Probe sequence
tatcacatgagaatacaaatggaaa

SEQ ID NO: 78776 - DNA, 25 bp, Probe sequence
ttatcacatgagaatacaaatggaa

SEQ ID NO: 78777 - DNA, 25 bp, Probe sequence
tttatcacatgagaatacaaatgga

SEQ ID NO: 78778 - DNA, 25 bp, Probe sequence
cacatgagaatacaaatggaaatta

SEQ ID NO: 78779 - DNA, 25 bp, Probe sequence
atttatcacatgagaatacaaatgg

SEQ ID NO: 78780 - DNA, 25 bp, Probe sequence
tgcttttagaatttatcacatgaga

SEQ ID NO: 78781 - DNA, 25 bp, Probe sequence
acatgagaatacaaatggaaattaa

SEQ ID NO: 78782 - DNA, 25 bp, Probe sequence
ctcttccactacaagcaccataatt

SEQ ID NO: 78783 - DNA, 25 bp, Probe sequence
tcttccactacaagcaccataatta

SEQ ID NO: 78784 - DNA, 25 bp, Probe sequence
cttccactacaagcaccataattaa

SEQ ID NO: 78785 - DNA, 25 bp, Probe sequence
cctcttccactacaagcaccataat

SEQ ID NO: 78786 - DNA, 25 bp, Probe sequence
aatccattcctcttccactacaagc

SEQ ID NO: 78787 - DNA, 25 bp, Probe sequence
aatgtttcttcgctatttgtcagtc

SEQ ID NO: 78788 - DNA, 25 bp, Probe sequence
gctatttgtcagtccacttctttac

SEQ ID NO: 78789 - DNA, 25 bp, Probe sequence
tatttgtcagtccacttctttacct

SEQ ID NO: 78790 - DNA, 25 bp, Probe sequence
ctatttgtcagtccacttctttacc

SEQ ID NO: 78791 - DNA, 25 bp, Probe sequence
aattatggtgcttgtagtggaagag

SEQ ID NO: 78792 - DNA, 25 bp, Probe sequence
taattatggtgcttgtagtggaaga

SEQ ID NO: 78793 - DNA, 25 bp, Probe sequence
ttaattatggtgcttgtagtggaag

SEQ ID NO: 78794 - DNA, 25 bp, Probe sequence
attatggtgcttgtagtggaagagg

SEQ ID NO: 78795 - DNA, 25 bp, Probe sequence
gcttgtagtggaagaggaatggatt

SEQ ID NO: 78796 - DNA, 25 bp, Probe sequence
gactgacaaatagcgaagaaacatt

SEQ ID NO: 78797 - DNA, 25 bp, Probe sequence
gtaaagaagtggactgacaaatagc

SEQ ID NO: 78798 - DNA, 25 bp, Probe sequence
aggtaaagaagtggactgacaaata

SEQ ID NO: 78799 - DNA, 25 bp, Probe sequence
ggtaaagaagtggactgacaaatag

SEQ ID NO: 78800 - DNA, 25 bp, Probe sequence
ttacaactgtcaacaataccaaggt

SEQ ID NO: 78801 - DNA, 25 bp, Probe sequence
tacaactgtcaacaataccaaggtt

SEQ ID NO: 78802 - DNA, 25 bp, Probe sequence
tttacaactgtcaacaataccaagg

SEQ ID NO: 78803 - DNA, 25 bp, Probe sequence
gtttacaactgtcaacaataccaag

SEQ ID NO: 78804 - DNA, 25 bp, Probe sequence
aggttaaattgaacggaattatggc

SEQ ID NO: 78805 - DNA, 25 bp, Probe sequence
ggttaaattgaacggaattatggca

SEQ ID NO: 78806 - DNA, 25 bp, Probe sequence
acaactgtcaacaataccaaggttt

SEQ ID NO: 78807 - DNA, 25 bp, Probe sequence
gttaaattgaacggaattatggcat

SEQ ID NO: 78808 - DNA, 25 bp, Probe sequence
taaattgaacggaattatggcattt

SEQ ID NO: 78809 - DNA, 25 bp, Probe sequence
accttggtattgttgacagttgtaa

SEQ ID NO: 78810 - DNA, 25 bp, Probe sequence
aaccttggtattgttgacagttgta

SEQ ID NO: 78811 - DNA, 25 bp, Probe sequence
ccttggtattgttgacagttgtaaa

SEQ ID NO: 78812 - DNA, 25 bp, Probe sequence
cttggtattgttgacagttgtaaac

SEQ ID NO: 78813 - DNA, 25 bp, Probe sequence
gccataattccgttcaatttaacct

SEQ ID NO: 78814 - DNA, 25 bp, Probe sequence
tgccataattccgttcaatttaacc

SEQ ID NO: 78815 - DNA, 25 bp, Probe sequence
aaaccttggtattgttgacagttgt

SEQ ID NO: 78816 - DNA, 25 bp, Probe sequence
atgccataattccgttcaatttaac

SEQ ID NO: 78817 - DNA, 25 bp, Probe sequence
ccataattccgttcaatttaacctt

SEQ ID NO: 78818 - DNA, 25 bp, Probe sequence
attgtgacgaccgtgttttgattta

SEQ ID NO: 78819 - DNA, 25 bp, Probe sequence
taattgtgacgaccgtgttttgatt

SEQ ID NO: 78820 - DNA, 25 bp, Probe sequence
gtaattgtgacgaccgtgttttgat

SEQ ID NO: 78821 - DNA, 25 bp, Probe sequence
aattgtgacgaccgtgttttgattt

SEQ ID NO: 78822 - DNA, 25 bp, Probe sequence
caacagtaattgtgacgaccgtgtt

SEQ ID NO: 78823 - DNA, 25 bp, Probe sequence
agtaattgtgacgaccgtgttttga

SEQ ID NO: 78824 - DNA, 25 bp, Probe sequence
cagtaattgtgacgaccgtgttttg

SEQ ID NO: 78825 - DNA, 25 bp, Probe sequence
taaaacacggtcgccaacagtaatt

SEQ ID NO: 78826 - DNA, 25 bp, Probe sequence
aacagtaattgtgacgaccgtgttt

SEQ ID NO: 78827 - DNA, 25 bp, Probe sequence
aatcaaaacacggtcgtcacaatta

SEQ ID NO: 78828 - DNA, 25 bp, Probe sequence
taaatcaaaacacggtcgtcacaat

SEQ ID NO: 78829 - DNA, 25 bp, Probe sequence
atcaaaacacggtcgtcacaattac

SEQ ID NO: 78830 - DNA, 25 bp, Probe sequence
aaatcaaaacacggtcgtcacaatt

SEQ ID NO: 78831 - DNA, 25 bp, Probe sequence
aacacggtcgtcacaattactgttg

SEQ ID NO: 78832 - DNA, 25 bp, Probe sequence
caaaacacggtcgtcacaattactg

SEQ ID NO: 78833 - DNA, 25 bp, Probe sequence
tcaaaacacggtcgtcacaattact

SEQ ID NO: 78834 - DNA, 25 bp, Probe sequence
aattactgttggcgaccgtgtttta

SEQ ID NO: 78835 - DNA, 25 bp, Probe sequence
aaacacggtcgtcacaattactgtt

SEQ ID NO: 78836 - DNA, 25 bp, Probe sequence
aataagcacctcaatccgaatgtaa

SEQ ID NO: 78837 - DNA, 25 bp, Probe sequence
ataagcacctcaatccgaatgtaaa

SEQ ID NO: 78838 - DNA, 25 bp, Probe sequence
aaataagcacctcaatccgaatgta

SEQ ID NO: 78839 - DNA, 25 bp, Probe sequence
tgctattgaaatgactaaggcttct

SEQ ID NO: 78840 - DNA, 25 bp, Probe sequence
ttgctattgaaatgactaaggcttc

SEQ ID NO: 78841 - DNA, 25 bp, Probe sequence
cttgctattgaaatgactaaggctt

SEQ ID NO: 78842 - DNA, 25 bp, Probe sequence
gctattgaaatgactaaggcttctt

SEQ ID NO: 78843 - DNA, 25 bp, Probe sequence
atttgggcagatataaacagcgatt

SEQ ID NO: 78844 - DNA, 25 bp, Probe sequence
tgaccttgctattgaaatgactaag

SEQ ID NO: 78845 - DNA, 25 bp, Probe sequence
ttacattcggattgaggtgcttatt

SEQ ID NO: 78846 - DNA, 25 bp, Probe sequence
tacattcggattgaggtgcttattt

SEQ ID NO: 78847 - DNA, 25 bp, Probe sequence
tttacattcggattgaggtgcttat

SEQ ID NO: 78848 - DNA, 25 bp, Probe sequence
agaagccttagtcatttcaatagca

SEQ ID NO: 78849 - DNA, 25 bp, Probe sequence
aagccttagtcatttcaatagcaag

SEQ ID NO: 78850 - DNA, 25 bp, Probe sequence
gaagccttagtcatttcaatagcaa

SEQ ID NO: 78851 - DNA, 25 bp, Probe sequence
aagaagccttagtcatttcaatagc

SEQ ID NO: 78852 - DNA, 25 bp, Probe sequence
aatcgctgtttatatctgcccaaat

SEQ ID NO: 78853 - DNA, 25 bp, Probe sequence
ttagtcatttcaatagcaaggtcaa

SEQ ID NO: 78854 - DNA, 25 bp, Probe sequence
gaggggatttattttgctgttgatt

SEQ ID NO: 78855 - DNA, 25 bp, Probe sequence
tagtgaggggatttattttgctgtt

SEQ ID NO: 78856 - DNA, 25 bp, Probe sequence
tgctgttgattatctatcacccttt

SEQ ID NO: 78857 - DNA, 25 bp, Probe sequence
ttgctgttgattatctatcaccctt

SEQ ID NO: 78858 - DNA, 25 bp, Probe sequence
tttgctgttgattatctatcaccct

SEQ ID NO: 78859 - DNA, 25 bp, Probe sequence
tgaggggatttattttgctgttgat

SEQ ID NO: 78860 - DNA, 25 bp, Probe sequence
aggggatttattttgctgttgatta

SEQ ID NO: 78861 - DNA, 25 bp, Probe sequence
ctagtgaggggatttattttgctgt

SEQ ID NO: 78862 - DNA, 25 bp, Probe sequence
gtgaggggatttattttgctgttga

SEQ ID NO: 78863 - DNA, 25 bp, Probe sequence
aatcaacagcaaaataaatcccctc

SEQ ID NO: 78864 - DNA, 25 bp, Probe sequence
aacagcaaaataaatcccctcacta

SEQ ID NO: 78865 - DNA, 25 bp, Probe sequence
agggtgatagataatcaacagcaaa

SEQ ID NO: 78866 - DNA, 25 bp, Probe sequence
aagggtgatagataatcaacagcaa

SEQ ID NO: 78867 - DNA, 25 bp, Probe sequence
aaagggtgatagataatcaacagca

SEQ ID NO: 78868 - DNA, 25 bp, Probe sequence
atcaacagcaaaataaatcccctca

SEQ ID NO: 78869 - DNA, 25 bp, Probe sequence
taatcaacagcaaaataaatcccct

SEQ ID NO: 78870 - DNA, 25 bp, Probe sequence
acagcaaaataaatcccctcactag

SEQ ID NO: 78871 - DNA, 25 bp, Probe sequence
caacagcaaaataaatcccctcact

SEQ ID NO: 78872 - DNA, 25 bp, Probe sequence
gcagaaatgataaagagccactaat

SEQ ID NO: 78873 - DNA, 25 bp, Probe sequence
atgattctttatccttagccacagc

SEQ ID NO: 78874 - DNA, 25 bp, Probe sequence
aatgattctttatccttagccacag

SEQ ID NO: 78875 - DNA, 25 bp, Probe sequence
taatgattctttatccttagccaca

SEQ ID NO: 78876 - DNA, 25 bp, Probe sequence
tgtaatgattctttatccttagcca

SEQ ID NO: 78877 - DNA, 25 bp, Probe sequence
gtaatgattctttatccttagccac

SEQ ID NO: 78878 - DNA, 25 bp, Probe sequence
gccgcttatattatttatttcactg

SEQ ID NO: 78879 - DNA, 25 bp, Probe sequence
atgtaatgattctttatccttagcc

SEQ ID NO: 78880 - DNA, 25 bp, Probe sequence
gttatggggcagaaatgataaagag

SEQ ID NO: 78881 - DNA, 25 bp, Probe sequence
attagtggctctttatcatttctgc

SEQ ID NO: 78882 - DNA, 25 bp, Probe sequence
gctgtggctaaggataaagaatcat

SEQ ID NO: 78883 - DNA, 25 bp, Probe sequence
ctgtggctaaggataaagaatcatt

SEQ ID NO: 78884 - DNA, 25 bp, Probe sequence
tggctaaggataaagaatcattaca

SEQ ID NO: 78885 - DNA, 25 bp, Probe sequence
tgtggctaaggataaagaatcatta

SEQ ID NO: 78886 - DNA, 25 bp, Probe sequence
gtggctaaggataaagaatcattac

SEQ ID NO: 78887 - DNA, 25 bp, Probe sequence
cagtgaaataaataatataagcggc

SEQ ID NO: 78888 - DNA, 25 bp, Probe sequence
ggctaaggataaagaatcattacat

SEQ ID NO: 78889 - DNA, 25 bp, Probe sequence
tttatcatttctgccccataacctt

SEQ ID NO: 78890 - DNA, 25 bp, Probe sequence
cctgagtatagccttgtagagtcta

SEQ ID NO: 78891 - DNA, 25 bp, Probe sequence
tgagtatagccttgtagagtctagt

SEQ ID NO: 78892 - DNA, 25 bp, Probe sequence
ctgagtatagccttgtagagtctag

SEQ ID NO: 78893 - DNA, 25 bp, Probe sequence
agtatagccttgtagagtctagtac

SEQ ID NO: 78894 - DNA, 25 bp, Probe sequence
gagtatagccttgtagagtctagta

SEQ ID NO: 78895 - DNA, 25 bp, Probe sequence
ttgatttgtatcccaatgtccctat

SEQ ID NO: 78896 - DNA, 25 bp, Probe sequence
gccttgtagagtctagtacattgat

SEQ ID NO: 78897 - DNA, 25 bp, Probe sequence
agccttgtagagtctagtacattga

SEQ ID NO: 78898 - DNA, 25 bp, Probe sequence
tagccttgtagagtctagtacattg

SEQ ID NO: 78899 - DNA, 25 bp, Probe sequence
tagactctacaaggctatactcagg

SEQ ID NO: 78900 - DNA, 25 bp, Probe sequence
actagactctacaaggctatactca

SEQ ID NO: 78901 - DNA, 25 bp, Probe sequence
ctagactctacaaggctatactcag

SEQ ID NO: 78902 - DNA, 25 bp, Probe sequence
gtactagactctacaaggctatact

SEQ ID NO: 78903 - DNA, 25 bp, Probe sequence
tactagactctacaaggctatactc

SEQ ID NO: 78904 - DNA, 25 bp, Probe sequence
atagggacattgggatacaaatcaa

SEQ ID NO: 78905 - DNA, 25 bp, Probe sequence
atcaatgtactagactctacaaggc

SEQ ID NO: 78906 - DNA, 25 bp, Probe sequence
tcaatgtactagactctacaaggct

SEQ ID NO: 78907 - DNA, 25 bp, Probe sequence
caatgtactagactctacaaggcta

SEQ ID NO: 78908 - DNA, 25 bp, Probe sequence
aataagagcgacaacagtaatgaga

SEQ ID NO: 78909 - DNA, 25 bp, Probe sequence
caataagagcgacaacagtaatgag

SEQ ID NO: 78910 - DNA, 25 bp, Probe sequence
ataagagcgacaacagtaatgagag

SEQ ID NO: 78911 - DNA, 25 bp, Probe sequence
acaataagagcgacaacagtaatga

SEQ ID NO: 78912 - DNA, 25 bp, Probe sequence
tcctctcatccttatacgccattat

SEQ ID NO: 78913 - DNA, 25 bp, Probe sequence
cctctcatccttatacgccattata

SEQ ID NO: 78914 - DNA, 25 bp, Probe sequence
tacaataagagcgacaacagtaatg

SEQ ID NO: 78915 - DNA, 25 bp, Probe sequence
ttcctctcatccttatacgccatta

SEQ ID NO: 78916 - DNA, 25 bp, Probe sequence
atacaataagagcgacaacagtaat

SEQ ID NO: 78917 - DNA, 25 bp, Probe sequence
ctcattactgttgtcgctcttattg

SEQ ID NO: 78918 - DNA, 25 bp, Probe sequence
tctcattactgttgtcgctcttatt

SEQ ID NO: 78919 - DNA, 25 bp, Probe sequence
tcattactgttgtcgctcttattgt

SEQ ID NO: 78920 - DNA, 25 bp, Probe sequence
ctctcattactgttgtcgctcttat

SEQ ID NO: 78921 - DNA, 25 bp, Probe sequence
ataatggcgtataaggatgagagga

SEQ ID NO: 78922 - DNA, 25 bp, Probe sequence
tataatggcgtataaggatgagagg

SEQ ID NO: 78923 - DNA, 25 bp, Probe sequence
cattactgttgtcgctcttattgta

SEQ ID NO: 78924 - DNA, 25 bp, Probe sequence
taatggcgtataaggatgagaggaa

SEQ ID NO: 78925 - DNA, 25 bp, Probe sequence
attactgttgtcgctcttattgtat

SEQ ID NO: 78926 - DNA, 25 bp, Probe sequence
atcatcagctttattatttgcagtt

SEQ ID NO: 78927 - DNA, 25 bp, Probe sequence
aatcatcagctttattatttgcagt

SEQ ID NO: 78928 - DNA, 25 bp, Probe sequence
gcagttaaaacttgaatgaggtgaa

SEQ ID NO: 78929 - DNA, 25 bp, Probe sequence
tcatcagctttattatttgcagtta

SEQ ID NO: 78930 - DNA, 25 bp, Probe sequence
ttaaaacttgaatgaggtgaaaccc

SEQ ID NO: 78931 - DNA, 25 bp, Probe sequence
agttaaaacttgaatgaggtgaaac

SEQ ID NO: 78932 - DNA, 25 bp, Probe sequence
cagttaaaacttgaatgaggtgaaa

SEQ ID NO: 78933 - DNA, 25 bp, Probe sequence
gttaaaacttgaatgaggtgaaacc

SEQ ID NO: 78934 - DNA, 25 bp, Probe sequence
catcagctttattatttgcagttaa

SEQ ID NO: 78935 - DNA, 25 bp, Probe sequence
actgcaaataataaagctgatgatt

SEQ ID NO: 78936 - DNA, 25 bp, Probe sequence
aactgcaaataataaagctgatgat

SEQ ID NO: 78937 - DNA, 25 bp, Probe sequence
ttcacctcattcaagttttaactgc

SEQ ID NO: 78938 - DNA, 25 bp, Probe sequence
taactgcaaataataaagctgatga

SEQ ID NO: 78939 - DNA, 25 bp, Probe sequence
gggtttcacctcattcaagttttaa

SEQ ID NO: 78940 - DNA, 25 bp, Probe sequence
tttcacctcattcaagttttaactg

SEQ ID NO: 78941 - DNA, 25 bp, Probe sequence
gtttcacctcattcaagttttaact

SEQ ID NO: 78942 - DNA, 25 bp, Probe sequence
ggtttcacctcattcaagttttaac

SEQ ID NO: 78943 - DNA, 25 bp, Probe sequence
ttaactgcaaataataaagctgatg

SEQ ID NO: 78944 - DNA, 25 bp, Probe sequence
attacacctgctttgatgataaaca

SEQ ID NO: 78945 - DNA, 25 bp, Probe sequence
acacctgctttgatgataaacatta

SEQ ID NO: 78946 - DNA, 25 bp, Probe sequence
tacacctgctttgatgataaacatt

SEQ ID NO: 78947 - DNA, 25 bp, Probe sequence
ttacacctgctttgatgataaacat

SEQ ID NO: 78948 - DNA, 25 bp, Probe sequence
cacctgctttgatgataaacattaa

SEQ ID NO: 78949 - DNA, 25 bp, Probe sequence
tattacacctgctttgatgataaac

SEQ ID NO: 78950 - DNA, 25 bp, Probe sequence
cgttattcgtgatgatgcattaaga

SEQ ID NO: 78951 - DNA, 25 bp, Probe sequence
ttattacacctgctttgatgataaa

SEQ ID NO: 78952 - DNA, 25 bp, Probe sequence
cgtgatgatgcattaagagtatagg

SEQ ID NO: 78953 - DNA, 25 bp, Probe sequence
tgtttatcatcaaagcaggtgtaat

SEQ ID NO: 78954 - DNA, 25 bp, Probe sequence
atgtttatcatcaaagcaggtgtaa

SEQ ID NO: 78955 - DNA, 25 bp, Probe sequence
aatgtttatcatcaaagcaggtgta

SEQ ID NO: 78956 - DNA, 25 bp, Probe sequence
taatgtttatcatcaaagcaggtgt

SEQ ID NO: 78957 - DNA, 25 bp, Probe sequence
ttaatgtttatcatcaaagcaggtg

SEQ ID NO: 78958 - DNA, 25 bp, Probe sequence
gtttatcatcaaagcaggtgtaata

SEQ ID NO: 78959 - DNA, 25 bp, Probe sequence
tcttaatgcatcatcacgaataacg

SEQ ID NO: 78960 - DNA, 25 bp, Probe sequence
tttatcatcaaagcaggtgtaataa

SEQ ID NO: 78961 - DNA, 25 bp, Probe sequence
cctatactcttaatgcatcatcacg

SEQ ID NO: 78962 - DNA, 25 bp, Probe sequence
tcactccattaattttattcactca

SEQ ID NO: 78963 - DNA, 25 bp, Probe sequence
cactccattaattttattcactcat

SEQ ID NO: 78964 - DNA, 25 bp, Probe sequence
ctccattaattttattcactcatgt

SEQ ID NO: 78965 - DNA, 25 bp, Probe sequence
actccattaattttattcactcatg

SEQ ID NO: 78966 - DNA, 25 bp, Probe sequence
atcactccattaattttattcactc

SEQ ID NO: 78967 - DNA, 25 bp, Probe sequence
tgagtgaataaaattaatggagtga

SEQ ID NO: 78968 - DNA, 25 bp, Probe sequence
atgagtgaataaaattaatggagtg

SEQ ID NO: 78969 - DNA, 25 bp, Probe sequence
catgagtgaataaaattaatggagt

SEQ ID NO: 78970 - DNA, 25 bp, Probe sequence
acatgagtgaataaaattaatggag

SEQ ID NO: 78971 - DNA, 25 bp, Probe sequence
gagtgaataaaattaatggagtgat

SEQ ID NO: 78972 - DNA, 25 bp, Probe sequence
tactcgcgtgtgtaaaacataaaat

SEQ ID NO: 78973 - DNA, 25 bp, Probe sequence
actcgcgtgtgtaaaacataaaatg

SEQ ID NO: 78974 - DNA, 25 bp, Probe sequence
ttactcgcgtgtgtaaaacataaaa

SEQ ID NO: 78975 - DNA, 25 bp, Probe sequence
cattactcgcgtgtgtaaaacataa

SEQ ID NO: 78976 - DNA, 25 bp, Probe sequence
attactcgcgtgtgtaaaacataaa

SEQ ID NO: 78977 - DNA, 25 bp, Probe sequence
acattactcgcgtgtgtaaaacata

SEQ ID NO: 78978 - DNA, 25 bp, Probe sequence
ctcgcgtgtgtaaaacataaaatgc

SEQ ID NO: 78979 - DNA, 25 bp, Probe sequence
cacattactcgcgtgtgtaaaacat

SEQ ID NO: 78980 - DNA, 25 bp, Probe sequence
tcgcgtgtgtaaaacataaaatgcg

SEQ ID NO: 78981 - DNA, 25 bp, Probe sequence
cgcgtgtgtaaaacataaaatgcgc

SEQ ID NO: 78982 - DNA, 25 bp, Probe sequence
attttatgttttacacacgcgagta

SEQ ID NO: 78983 - DNA, 25 bp, Probe sequence
cattttatgttttacacacgcgagt

SEQ ID NO: 78984 - DNA, 25 bp, Probe sequence
ttatgttttacacacgcgagtaatg

SEQ ID NO: 78985 - DNA, 25 bp, Probe sequence
ttttatgttttacacacgcgagtaa

SEQ ID NO: 78986 - DNA, 25 bp, Probe sequence
tttatgttttacacacgcgagtaat

SEQ ID NO: 78987 - DNA, 25 bp, Probe sequence
tatgttttacacacgcgagtaatgt

SEQ ID NO: 78988 - DNA, 25 bp, Probe sequence
gcattttatgttttacacacgcgag

SEQ ID NO: 78989 - DNA, 25 bp, Probe sequence
atgttttacacacgcgagtaatgtg

SEQ ID NO: 78990 - DNA, 25 bp, Probe sequence
cgcattttatgttttacacacgcga

SEQ ID NO: 78991 - DNA, 25 bp, Probe sequence
gcgcattttatgttttacacacgcg

SEQ ID NO: 78992 - DNA, 25 bp, Probe sequence
acccataccttctttactcaaatta

SEQ ID NO: 78993 - DNA, 25 bp, Probe sequence
tcatacccttacctatcaaatgttt

SEQ ID NO: 78994 - DNA, 25 bp, Probe sequence
atcatacccttacctatcaaatgtt

SEQ ID NO: 78995 - DNA, 25 bp, Probe sequence
agttatcatacccttacctatcaaa

SEQ ID NO: 78996 - DNA, 25 bp, Probe sequence
cccataccttctttactcaaattaa

SEQ ID NO: 78997 - DNA, 25 bp, Probe sequence
tatcatacccttacctatcaaatgt

SEQ ID NO: 78998 - DNA, 25 bp, Probe sequence
taagaaaacgcttacacacaacttt

SEQ ID NO: 78999 - DNA, 25 bp, Probe sequence
ttaagaaaacgcttacacacaactt

SEQ ID NO: 79000 - DNA, 25 bp, Probe sequence
attaagaaaacgcttacacacaact

SEQ ID NO: 79001 - DNA, 25 bp, Probe sequence
taatttgagtaaagaaggtatgggt

SEQ ID NO: 79002 - DNA, 25 bp, Probe sequence
aaacatttgataggtaagggtatga

SEQ ID NO: 79003 - DNA, 25 bp, Probe sequence
aacatttgataggtaagggtatgat

SEQ ID NO: 79004 - DNA, 25 bp, Probe sequence
tttgataggtaagggtatgataact

SEQ ID NO: 79005 - DNA, 25 bp, Probe sequence
ttaatttgagtaaagaaggtatggg

SEQ ID NO: 79006 - DNA, 25 bp, Probe sequence
acatttgataggtaagggtatgata

SEQ ID NO: 79007 - DNA, 25 bp, Probe sequence
aagttgtgtgtaagcgttttcttaa

SEQ ID NO: 79008 - DNA, 25 bp, Probe sequence
aaagttgtgtgtaagcgttttctta

SEQ ID NO: 79009 - DNA, 25 bp, Probe sequence
agttgtgtgtaagcgttttcttaat

SEQ ID NO: 79010 - DNA, 25 bp, Probe sequence
catctcgctctagtatcagttcaac

SEQ ID NO: 79011 - DNA, 25 bp, Probe sequence
acatctcgctctagtatcagttcaa

SEQ ID NO: 79012 - DNA, 25 bp, Probe sequence
aacatctcgctctagtatcagttca

SEQ ID NO: 79013 - DNA, 25 bp, Probe sequence
atctcgctctagtatcagttcaacc

SEQ ID NO: 79014 - DNA, 25 bp, Probe sequence
tatcagttcaaccgatactagagtt

SEQ ID NO: 79015 - DNA, 25 bp, Probe sequence
cgctctagtatcagttcaaccgata

SEQ ID NO: 79016 - DNA, 25 bp, Probe sequence
ttaaacatctcgctctagtatcagt

SEQ ID NO: 79017 - DNA, 25 bp, Probe sequence
aaacatctcgctctagtatcagttc

SEQ ID NO: 79018 - DNA, 25 bp, Probe sequence
taaacatctcgctctagtatcagtt

SEQ ID NO: 79019 - DNA, 25 bp, Probe sequence
gttgaactgatactagagcgagatg

SEQ ID NO: 79020 - DNA, 25 bp, Probe sequence
ttgaactgatactagagcgagatgt

SEQ ID NO: 79021 - DNA, 25 bp, Probe sequence
tgaactgatactagagcgagatgtt

SEQ ID NO: 79022 - DNA, 25 bp, Probe sequence
ggttgaactgatactagagcgagat

SEQ ID NO: 79023 - DNA, 25 bp, Probe sequence
aactctagtatcggttgaactgata

SEQ ID NO: 79024 - DNA, 25 bp, Probe sequence
tatcggttgaactgatactagagcg

SEQ ID NO: 79025 - DNA, 25 bp, Probe sequence
actgatactagagcgagatgtttaa

SEQ ID NO: 79026 - DNA, 25 bp, Probe sequence
gaactgatactagagcgagatgttt

SEQ ID NO: 79027 - DNA, 25 bp, Probe sequence
aactgatactagagcgagatgttta

SEQ ID NO: 79028 - DNA, 25 bp, Probe sequence
agtcattatcatctcatatgtacgg

SEQ ID NO: 79029 - DNA, 25 bp, Probe sequence
gtcattatcatctcatatgtacggg

SEQ ID NO: 79030 - DNA, 25 bp, Probe sequence
aagtcattatcatctcatatgtacg

SEQ ID NO: 79031 - DNA, 25 bp, Probe sequence
cccatacatatgagacaaagtcatt

SEQ ID NO: 79032 - DNA, 25 bp, Probe sequence
cattatcatctcatatgtacggggt

SEQ ID NO: 79033 - DNA, 25 bp, Probe sequence
tcattatcatctcatatgtacgggg

SEQ ID NO: 79034 - DNA, 25 bp, Probe sequence
tatcatctcatatgtacggggtttt

SEQ ID NO: 79035 - DNA, 25 bp, Probe sequence
ttatcatctcatatgtacggggttt

SEQ ID NO: 79036 - DNA, 25 bp, Probe sequence
attatcatctcatatgtacggggtt

SEQ ID NO: 79037 - DNA, 25 bp, Probe sequence
ccgtacatatgagatgataatgact

SEQ ID NO: 79038 - DNA, 25 bp, Probe sequence
cccgtacatatgagatgataatgac

SEQ ID NO: 79039 - DNA, 25 bp, Probe sequence
cgtacatatgagatgataatgactt

SEQ ID NO: 79040 - DNA, 25 bp, Probe sequence
aatgactttgtctcatatgtatggg

SEQ ID NO: 79041 - DNA, 25 bp, Probe sequence
accccgtacatatgagatgataatg

SEQ ID NO: 79042 - DNA, 25 bp, Probe sequence
ccccgtacatatgagatgataatga

SEQ ID NO: 79043 - DNA, 25 bp, Probe sequence
aaaccccgtacatatgagatgataa

SEQ ID NO: 79044 - DNA, 25 bp, Probe sequence
aaaaccccgtacatatgagatgata

SEQ ID NO: 79045 - DNA, 25 bp, Probe sequence
aaccccgtacatatgagatgataat

SEQ ID NO: 79046 - DNA, 25 bp, Probe sequence
atcactatacgcctatctttccaaa

SEQ ID NO: 79047 - DNA, 25 bp, Probe sequence
tatcactatacgcctatctttccaa

SEQ ID NO: 79048 - DNA, 25 bp, Probe sequence
atatcactatacgcctatctttcca

SEQ ID NO: 79049 - DNA, 25 bp, Probe sequence
gatggatatcactatacgcctatct

SEQ ID NO: 79050 - DNA, 25 bp, Probe sequence
atggatatcactatacgcctatctt

SEQ ID NO: 79051 - DNA, 25 bp, Probe sequence
tgatggatatcactatacgcctatc

SEQ ID NO: 79052 - DNA, 25 bp, Probe sequence
tcactatacgcctatctttccaaaa

SEQ ID NO: 79053 - DNA, 25 bp, Probe sequence
ttgatggatatcactatacgcctat

SEQ ID NO: 79054 - DNA, 25 bp, Probe sequence
tggatatcactatacgcctatcttt

SEQ ID NO: 79055 - DNA, 25 bp, Probe sequence
tttggaaagataggcgtatagtgat

SEQ ID NO: 79056 - DNA, 25 bp, Probe sequence
ttggaaagataggcgtatagtgata

SEQ ID NO: 79057 - DNA, 25 bp, Probe sequence
tggaaagataggcgtatagtgatat

SEQ ID NO: 79058 - DNA, 25 bp, Probe sequence
agataggcgtatagtgatatccatc

SEQ ID NO: 79059 - DNA, 25 bp, Probe sequence
aagataggcgtatagtgatatccat

SEQ ID NO: 79060 - DNA, 25 bp, Probe sequence
gataggcgtatagtgatatccatca

SEQ ID NO: 79061 - DNA, 25 bp, Probe sequence
ttttggaaagataggcgtatagtga

SEQ ID NO: 79062 - DNA, 25 bp, Probe sequence
ataggcgtatagtgatatccatcaa

SEQ ID NO: 79063 - DNA, 25 bp, Probe sequence
aaagataggcgtatagtgatatcca

SEQ ID NO: 79064 - DNA, 25 bp, Probe sequence
aatatatcatccacgattcgaccaa

SEQ ID NO: 79065 - DNA, 25 bp, Probe sequence
atatatcatccacgattcgaccaag

SEQ ID NO: 79066 - DNA, 25 bp, Probe sequence
taatatatcatccacgattcgacca

SEQ ID NO: 79067 - DNA, 25 bp, Probe sequence
tatatcatccacgattcgaccaagt

SEQ ID NO: 79068 - DNA, 25 bp, Probe sequence
ataatatatcatccacgattcgacc

SEQ ID NO: 79069 - DNA, 25 bp, Probe sequence
atatcatccacgattcgaccaagtc

SEQ ID NO: 79070 - DNA, 25 bp, Probe sequence
gataatatatcatccacgattcgac

SEQ ID NO: 79071 - DNA, 25 bp, Probe sequence
cgattcgaccaagtctttattcttt

SEQ ID NO: 79072 - DNA, 25 bp, Probe sequence
acgattcgaccaagtctttattctt

SEQ ID NO: 79073 - DNA, 25 bp, Probe sequence
ttggtcgaatcgtggatgatatatt

SEQ ID NO: 79074 - DNA, 25 bp, Probe sequence
cttggtcgaatcgtggatgatatat

SEQ ID NO: 79075 - DNA, 25 bp, Probe sequence
tggtcgaatcgtggatgatatatta

SEQ ID NO: 79076 - DNA, 25 bp, Probe sequence
acttggtcgaatcgtggatgatata

SEQ ID NO: 79077 - DNA, 25 bp, Probe sequence
ggtcgaatcgtggatgatatattat

SEQ ID NO: 79078 - DNA, 25 bp, Probe sequence
gacttggtcgaatcgtggatgatat

SEQ ID NO: 79079 - DNA, 25 bp, Probe sequence
gtcgaatcgtggatgatatattatc

SEQ ID NO: 79080 - DNA, 25 bp, Probe sequence
aaagaataaagacttggtcgaatcg

SEQ ID NO: 79081 - DNA, 25 bp, Probe sequence
aagaataaagacttggtcgaatcgt

SEQ ID NO: 79082 - DNA, 25 bp, Probe sequence
aatcattcgcttaatatgcacacag

SEQ ID NO: 79083 - DNA, 25 bp, Probe sequence
cataataacttgctttcatttcggt

SEQ ID NO: 79084 - DNA, 25 bp, Probe sequence
acataataacttgctttcatttcgg

SEQ ID NO: 79085 - DNA, 25 bp, Probe sequence
tccctacataataacttgctttcat

SEQ ID NO: 79086 - DNA, 25 bp, Probe sequence
atccctacataataacttgctttca

SEQ ID NO: 79087 - DNA, 25 bp, Probe sequence
ccctcttcatcgttgttgttcattt

SEQ ID NO: 79088 - DNA, 25 bp, Probe sequence
ataataacttgctttcatttcggtt

SEQ ID NO: 79089 - DNA, 25 bp, Probe sequence
ccctacataataacttgctttcatt

SEQ ID NO: 79090 - DNA, 25 bp, Probe sequence
gaacacacctaacattaaacgtcaa

SEQ ID NO: 79091 - DNA, 25 bp, Probe sequence
ctgtgtgcatattaagcgaatgatt

SEQ ID NO: 79092 - DNA, 25 bp, Probe sequence
ccgaaatgaaagcaagttattatgt

SEQ ID NO: 79093 - DNA, 25 bp, Probe sequence
accgaaatgaaagcaagttattatg

SEQ ID NO: 79094 - DNA, 25 bp, Probe sequence
aaatgaacaacaacgatgaagaggg

SEQ ID NO: 79095 - DNA, 25 bp, Probe sequence
tgaaagcaagttattatgtagggat

SEQ ID NO: 79096 - DNA, 25 bp, Probe sequence
atgaaagcaagttattatgtaggga

SEQ ID NO: 79097 - DNA, 25 bp, Probe sequence
aaccgaaatgaaagcaagttattat

SEQ ID NO: 79098 - DNA, 25 bp, Probe sequence
aatgaaagcaagttattatgtaggg

SEQ ID NO: 79099 - DNA, 25 bp, Probe sequence
gacgtttaatgttaggtgtgttctt

SEQ ID NO: 79100 - DNA, 25 bp, Probe sequence
gtaaacgcatacaaacacaacctat

SEQ ID NO: 79101 - DNA, 25 bp, Probe sequence
aacgcatacaaacacaacctataaa

SEQ ID NO: 79102 - DNA, 25 bp, Probe sequence
aaacgcatacaaacacaacctataa

SEQ ID NO: 79103 - DNA, 25 bp, Probe sequence
taaacgcatacaaacacaacctata

SEQ ID NO: 79104 - DNA, 25 bp, Probe sequence
agataagcctcctatgtttaagaaa

SEQ ID NO: 79105 - DNA, 25 bp, Probe sequence
tgtaaacgcatacaaacacaaccta

SEQ ID NO: 79106 - DNA, 25 bp, Probe sequence
acgcatacaaacacaacctataaaa

SEQ ID NO: 79107 - DNA, 25 bp, Probe sequence
tagataagcctcctatgtttaagaa

SEQ ID NO: 79108 - DNA, 25 bp, Probe sequence
ttagataagcctcctatgtttaaga

SEQ ID NO: 79109 - DNA, 25 bp, Probe sequence
ataggttgtgtttgtatgcgtttac

SEQ ID NO: 79110 - DNA, 25 bp, Probe sequence
ttataggttgtgtttgtatgcgttt

SEQ ID NO: 79111 - DNA, 25 bp, Probe sequence
tttataggttgtgtttgtatgcgtt

SEQ ID NO: 79112 - DNA, 25 bp, Probe sequence
tataggttgtgtttgtatgcgttta

SEQ ID NO: 79113 - DNA, 25 bp, Probe sequence
tttcttaaacataggaggcttatct

SEQ ID NO: 79114 - DNA, 25 bp, Probe sequence
taggttgtgtttgtatgcgtttaca

SEQ ID NO: 79115 - DNA, 25 bp, Probe sequence
tcttaaacataggaggcttatctaa

SEQ ID NO: 79116 - DNA, 25 bp, Probe sequence
ttcttaaacataggaggcttatcta

SEQ ID NO: 79117 - DNA, 25 bp, Probe sequence
ttttataggttgtgtttgtatgcgt

SEQ ID NO: 79118 - DNA, 25 bp, Probe sequence
cgctatgtatgttgaatttctaccg

SEQ ID NO: 79119 - DNA, 25 bp, Probe sequence
gctatgtatgttgaatttctaccga

SEQ ID NO: 79120 - DNA, 25 bp, Probe sequence
aatttctaccgattactttgtttgc

SEQ ID NO: 79121 - DNA, 25 bp, Probe sequence
gttaaacaagtacacatcatggtct

SEQ ID NO: 79122 - DNA, 25 bp, Probe sequence
agttaaacaagtacacatcatggtc

SEQ ID NO: 79123 - DNA, 25 bp, Probe sequence
aagttaaacaagtacacatcatggt

SEQ ID NO: 79124 - DNA, 25 bp, Probe sequence
gttgaatttctaccgattactttgt

SEQ ID NO: 79125 - DNA, 25 bp, Probe sequence
tgttgaatttctaccgattactttg

SEQ ID NO: 79126 - DNA, 25 bp, Probe sequence
ttaaacaagtacacatcatggtctt

SEQ ID NO: 79127 - DNA, 25 bp, Probe sequence
cggtagaaattcaacatacatagcg

SEQ ID NO: 79128 - DNA, 25 bp, Probe sequence
tcggtagaaattcaacatacatagc

SEQ ID NO: 79129 - DNA, 25 bp, Probe sequence
gcaaacaaagtaatcggtagaaatt

SEQ ID NO: 79130 - DNA, 25 bp, Probe sequence
gaccatgatgtgtacttgtttaact

SEQ ID NO: 79131 - DNA, 25 bp, Probe sequence
agaccatgatgtgtacttgtttaac

SEQ ID NO: 79132 - DNA, 25 bp, Probe sequence
accatgatgtgtacttgtttaactt

SEQ ID NO: 79133 - DNA, 25 bp, Probe sequence
caaagtaatcggtagaaattcaaca

SEQ ID NO: 79134 - DNA, 25 bp, Probe sequence
acaaagtaatcggtagaaattcaac

SEQ ID NO: 79135 - DNA, 25 bp, Probe sequence
aagaccatgatgtgtacttgtttaa

SEQ ID NO: 79136 - DNA, 25 bp, Probe sequence
atcttcatcattcattgtagacacc

SEQ ID NO: 79137 - DNA, 25 bp, Probe sequence
ttcatcattcattgtagacaccctt

SEQ ID NO: 79138 - DNA, 25 bp, Probe sequence
cttcatcattcattgtagacaccct

SEQ ID NO: 79139 - DNA, 25 bp, Probe sequence
tcatcattcattgtagacacccttg

SEQ ID NO: 79140 - DNA, 25 bp, Probe sequence
tcttcatcattcattgtagacaccc

SEQ ID NO: 79141 - DNA, 25 bp, Probe sequence
gccactcacaaagtcatccttatat

SEQ ID NO: 79142 - DNA, 25 bp, Probe sequence
ccactcacaaagtcatccttatatt

SEQ ID NO: 79143 - DNA, 25 bp, Probe sequence
tatcttcatcattcattgtagacac

SEQ ID NO: 79144 - DNA, 25 bp, Probe sequence
catcattcattgtagacacccttgc

SEQ ID NO: 79145 - DNA, 25 bp, Probe sequence
ggtgtctacaatgaatgatgaagat

SEQ ID NO: 79146 - DNA, 25 bp, Probe sequence
aagggtgtctacaatgaatgatgaa

SEQ ID NO: 79147 - DNA, 25 bp, Probe sequence
agggtgtctacaatgaatgatgaag

SEQ ID NO: 79148 - DNA, 25 bp, Probe sequence
caagggtgtctacaatgaatgatga

SEQ ID NO: 79149 - DNA, 25 bp, Probe sequence
gggtgtctacaatgaatgatgaaga

SEQ ID NO: 79150 - DNA, 25 bp, Probe sequence
atataaggatgactttgtgagtggc

SEQ ID NO: 79151 - DNA, 25 bp, Probe sequence
aatataaggatgactttgtgagtgg

SEQ ID NO: 79152 - DNA, 25 bp, Probe sequence
gtgtctacaatgaatgatgaagata

SEQ ID NO: 79153 - DNA, 25 bp, Probe sequence
gcaagggtgtctacaatgaatgatg

SEQ ID NO: 79154 - DNA, 25 bp, Probe sequence
aatgtggcgagagtgatattgtaat

SEQ ID NO: 79155 - DNA, 25 bp, Probe sequence
ataacaatgtggcgagagtgatatt

SEQ ID NO: 79156 - DNA, 25 bp, Probe sequence
gtggcgagagtgatattgtaatgaa

SEQ ID NO: 79157 - DNA, 25 bp, Probe sequence
atgtggcgagagtgatattgtaatg

SEQ ID NO: 79158 - DNA, 25 bp, Probe sequence
cacacacattaaccaaccattgatt

SEQ ID NO: 79159 - DNA, 25 bp, Probe sequence
cataacaatgtggcgagagtgatat

SEQ ID NO: 79160 - DNA, 25 bp, Probe sequence
aattgtcttgttatacttgtcacct

SEQ ID NO: 79161 - DNA, 25 bp, Probe sequence
tgtggcgagagtgatattgtaatga

SEQ ID NO: 79162 - DNA, 25 bp, Probe sequence
acacacacattaaccaaccattgat

SEQ ID NO: 79163 - DNA, 25 bp, Probe sequence
attacaatatcactctcgccacatt

SEQ ID NO: 79164 - DNA, 25 bp, Probe sequence
aatatcactctcgccacattgttat

SEQ ID NO: 79165 - DNA, 25 bp, Probe sequence
cattacaatatcactctcgccacat

SEQ ID NO: 79166 - DNA, 25 bp, Probe sequence
ttcattacaatatcactctcgccac

SEQ ID NO: 79167 - DNA, 25 bp, Probe sequence
aatcaatggttggttaatgtgtgtg

SEQ ID NO: 79168 - DNA, 25 bp, Probe sequence
atatcactctcgccacattgttatg

SEQ ID NO: 79169 - DNA, 25 bp, Probe sequence
aggtgacaagtataacaagacaatt

SEQ ID NO: 79170 - DNA, 25 bp, Probe sequence
atcaatggttggttaatgtgtgtgt

SEQ ID NO: 79171 - DNA, 25 bp, Probe sequence
tcattacaatatcactctcgccaca

SEQ ID NO: 79172 - DNA, 25 bp, Probe sequence
aaagcacacctgaatttgatagcag

SEQ ID NO: 79173 - DNA, 25 bp, Probe sequence
aaaagcacacctgaatttgatagca

SEQ ID NO: 79174 - DNA, 25 bp, Probe sequence
aagcacacctgaatttgatagcagg

SEQ ID NO: 79175 - DNA, 25 bp, Probe sequence
ctgctatcaaattcaggtgtgcttt

SEQ ID NO: 79176 - DNA, 25 bp, Probe sequence
tgctatcaaattcaggtgtgctttt

SEQ ID NO: 79177 - DNA, 25 bp, Probe sequence
cctgctatcaaattcaggtgtgctt

SEQ ID NO: 79178 - DNA, 25 bp, Probe sequence
aatgaatagcgatactatatgtgcg

SEQ ID NO: 79179 - DNA, 25 bp, Probe sequence
acttcagtttcaacaatgtcttcaa

SEQ ID NO: 79180 - DNA, 25 bp, Probe sequence
tacttcagtttcaacaatgtcttca

SEQ ID NO: 79181 - DNA, 25 bp, Probe sequence
gataactgactacaaagtatgcgtg

SEQ ID NO: 79182 - DNA, 25 bp, Probe sequence
agataactgactacaaagtatgcgt

SEQ ID NO: 79183 - DNA, 25 bp, Probe sequence
cttcagtttcaacaatgtcttcaaa

SEQ ID NO: 79184 - DNA, 25 bp, Probe sequence
gctgtgttaatgaatagcgatacta

SEQ ID NO: 79185 - DNA, 25 bp, Probe sequence
ataactgactacaaagtatgcgtgc

SEQ ID NO: 79186 - DNA, 25 bp, Probe sequence
cagataactgactacaaagtatgcg

SEQ ID NO: 79187 - DNA, 25 bp, Probe sequence
cgcacatatagtatcgctattcatt

SEQ ID NO: 79188 - DNA, 25 bp, Probe sequence
ttgaagacattgttgaaactgaagt

SEQ ID NO: 79189 - DNA, 25 bp, Probe sequence
tgaagacattgttgaaactgaagta

SEQ ID NO: 79190 - DNA, 25 bp, Probe sequence
cacgcatactttgtagtcagttatc

SEQ ID NO: 79191 - DNA, 25 bp, Probe sequence
acgcatactttgtagtcagttatct

SEQ ID NO: 79192 - DNA, 25 bp, Probe sequence
tttgaagacattgttgaaactgaag

SEQ ID NO: 79193 - DNA, 25 bp, Probe sequence
tagtatcgctattcattaacacagc

SEQ ID NO: 79194 - DNA, 25 bp, Probe sequence
gcacgcatactttgtagtcagttat

SEQ ID NO: 79195 - DNA, 25 bp, Probe sequence
cgcatactttgtagtcagttatctg

SEQ ID NO: 79196 - DNA, 25 bp, Probe sequence
caccgctcctcatgtaatatatcag

SEQ ID NO: 79197 - DNA, 25 bp, Probe sequence
cgctcctcatgtaatatatcaggta

SEQ ID NO: 79198 - DNA, 25 bp, Probe sequence
gcaccgctcctcatgtaatatatca

SEQ ID NO: 79199 - DNA, 25 bp, Probe sequence
ccgctcctcatgtaatatatcaggt

SEQ ID NO: 79200 - DNA, 25 bp, Probe sequence
accgctcctcatgtaatatatcagg

SEQ ID NO: 79201 - DNA, 25 bp, Probe sequence
ttgcaccgctcctcatgtaatatat

SEQ ID NO: 79202 - DNA, 25 bp, Probe sequence
acatggatactgtctaatgactaag

SEQ ID NO: 79203 - DNA, 25 bp, Probe sequence
tgcaccgctcctcatgtaatatatc

SEQ ID NO: 79204 - DNA, 25 bp, Probe sequence
catggatactgtctaatgactaaga

SEQ ID NO: 79205 - DNA, 25 bp, Probe sequence
ctgatatattacatgaggagcggtg

SEQ ID NO: 79206 - DNA, 25 bp, Probe sequence
tacctgatatattacatgaggagcg

SEQ ID NO: 79207 - DNA, 25 bp, Probe sequence
tgatatattacatgaggagcggtgc

SEQ ID NO: 79208 - DNA, 25 bp, Probe sequence
cctgatatattacatgaggagcggt

SEQ ID NO: 79209 - DNA, 25 bp, Probe sequence
acctgatatattacatgaggagcgg

SEQ ID NO: 79210 - DNA, 25 bp, Probe sequence
atatattacatgaggagcggtgcaa

SEQ ID NO: 79211 - DNA, 25 bp, Probe sequence
cttagtcattagacagtatccatgt

SEQ ID NO: 79212 - DNA, 25 bp, Probe sequence
gatatattacatgaggagcggtgca

SEQ ID NO: 79213 - DNA, 25 bp, Probe sequence
tcttagtcattagacagtatccatg

SEQ ID NO: 79214 - DNA, 25 bp, Probe sequence
ttcatcctcctgtatttcaacttaa

SEQ ID NO: 79215 - DNA, 25 bp, Probe sequence
tcatcctcctgtatttcaacttaaa

SEQ ID NO: 79216 - DNA, 25 bp, Probe sequence
attcatcctcctgtatttcaactta

SEQ ID NO: 79217 - DNA, 25 bp, Probe sequence
tattcatcctcctgtatttcaactt

SEQ ID NO: 79218 - DNA, 25 bp, Probe sequence
ttattcatcctcctgtatttcaact

SEQ ID NO: 79219 - DNA, 25 bp, Probe sequence
gttattcatcctcctgtatttcaac

SEQ ID NO: 79220 - DNA, 25 bp, Probe sequence
tcctcctgtatttcaacttaaaact

SEQ ID NO: 79221 - DNA, 25 bp, Probe sequence
aactattgtatcactaactttcaga

SEQ ID NO: 79222 - DNA, 25 bp, Probe sequence
actattgtatcactaactttcagaa

SEQ ID NO: 79223 - DNA, 25 bp, Probe sequence
ttaagttgaaatacaggaggatgaa

SEQ ID NO: 79224 - DNA, 25 bp, Probe sequence
tttaagttgaaatacaggaggatga

SEQ ID NO: 79225 - DNA, 25 bp, Probe sequence
agttgaaatacaggaggatgaataa

SEQ ID NO: 79226 - DNA, 25 bp, Probe sequence
aagttgaaatacaggaggatgaata

SEQ ID NO: 79227 - DNA, 25 bp, Probe sequence
taagttgaaatacaggaggatgaat

SEQ ID NO: 79228 - DNA, 25 bp, Probe sequence
gttgaaatacaggaggatgaataac

SEQ ID NO: 79229 - DNA, 25 bp, Probe sequence
agttttaagttgaaatacaggagga

SEQ ID NO: 79230 - DNA, 25 bp, Probe sequence
tctgaaagttagtgatacaatagtt

SEQ ID NO: 79231 - DNA, 25 bp, Probe sequence
ttttaagttgaaatacaggaggatg

SEQ ID NO: 79232 - DNA, 25 bp, Probe sequence
gtgtagagataacaacgcattaacg

SEQ ID NO: 79233 - DNA, 25 bp, Probe sequence
agtgtagagataacaacgcattaac

SEQ ID NO: 79234 - DNA, 25 bp, Probe sequence
aagtgtagagataacaacgcattaa

SEQ ID NO: 79235 - DNA, 25 bp, Probe sequence
aaagtgtagagataacaacgcatta

SEQ ID NO: 79236 - DNA, 25 bp, Probe sequence
gtagagataacaacgcattaacgtc

SEQ ID NO: 79237 - DNA, 25 bp, Probe sequence
taatttcaatttgtttagtcttgcg

SEQ ID NO: 79238 - DNA, 25 bp, Probe sequence
tgtagagataacaacgcattaacgt

SEQ ID NO: 79239 - DNA, 25 bp, Probe sequence
tagagataacaacgcattaacgtcg

SEQ ID NO: 79240 - DNA, 25 bp, Probe sequence
ataacaacgcattaacgtcgctatt

SEQ ID NO: 79241 - DNA, 25 bp, Probe sequence
cgttaatgcgttgttatctctacac

SEQ ID NO: 79242 - DNA, 25 bp, Probe sequence
gttaatgcgttgttatctctacact

SEQ ID NO: 79243 - DNA, 25 bp, Probe sequence
ttaatgcgttgttatctctacactt

SEQ ID NO: 79244 - DNA, 25 bp, Probe sequence
taatgcgttgttatctctacacttt

SEQ ID NO: 79245 - DNA, 25 bp, Probe sequence
gacgttaatgcgttgttatctctac

SEQ ID NO: 79246 - DNA, 25 bp, Probe sequence
cgcaagactaaacaaattgaaatta

SEQ ID NO: 79247 - DNA, 25 bp, Probe sequence
acgttaatgcgttgttatctctaca

SEQ ID NO: 79248 - DNA, 25 bp, Probe sequence
cgacgttaatgcgttgttatctcta

SEQ ID NO: 79249 - DNA, 25 bp, Probe sequence
aatagcgacgttaatgcgttgttat

SEQ ID NO: 79250 - DNA, 25 bp, Probe sequence
atacctatatgctatcgtacacaag

SEQ ID NO: 79251 - DNA, 25 bp, Probe sequence
aatacctatatgctatcgtacacaa

SEQ ID NO: 79252 - DNA, 25 bp, Probe sequence
tacctatatgctatcgtacacaagc

SEQ ID NO: 79253 - DNA, 25 bp, Probe sequence
taatacctatatgctatcgtacaca

SEQ ID NO: 79254 - DNA, 25 bp, Probe sequence
ctcctttgttttctgttacgctaat

SEQ ID NO: 79255 - DNA, 25 bp, Probe sequence
gtacgcacttgagtacgtcaatatt

SEQ ID NO: 79256 - DNA, 25 bp, Probe sequence
tcctttgttttctgttacgctaatt

SEQ ID NO: 79257 - DNA, 25 bp, Probe sequence
cctcctttgttttctgttacgctaa

SEQ ID NO: 79258 - DNA, 25 bp, Probe sequence
ttaatacctatatgctatcgtacac

SEQ ID NO: 79259 - DNA, 25 bp, Probe sequence
cttgtgtacgatagcatataggtat

SEQ ID NO: 79260 - DNA, 25 bp, Probe sequence
ttgtgtacgatagcatataggtatt

SEQ ID NO: 79261 - DNA, 25 bp, Probe sequence
gcttgtgtacgatagcatataggta

SEQ ID NO: 79262 - DNA, 25 bp, Probe sequence
tgtgtacgatagcatataggtatta

SEQ ID NO: 79263 - DNA, 25 bp, Probe sequence
attagcgtaacagaaaacaaaggag

SEQ ID NO: 79264 - DNA, 25 bp, Probe sequence
aatattgacgtactcaagtgcgtac

SEQ ID NO: 79265 - DNA, 25 bp, Probe sequence
aattagcgtaacagaaaacaaagga

SEQ ID NO: 79266 - DNA, 25 bp, Probe sequence
ttagcgtaacagaaaacaaaggagg

SEQ ID NO: 79267 - DNA, 25 bp, Probe sequence
gtgtacgatagcatataggtattaa

SEQ ID NO: 79268 - DNA, 25 bp, Probe sequence
ataatacaaatatcgaaagaaggcg

SEQ ID NO: 79269 - DNA, 25 bp, Probe sequence
aatacaaatatcgaaagaaggcgac

SEQ ID NO: 79270 - DNA, 25 bp, Probe sequence
atacaaatatcgaaagaaggcgact

SEQ ID NO: 79271 - DNA, 25 bp, Probe sequence
tacaaatatcgaaagaaggcgactg

SEQ ID NO: 79272 - DNA, 25 bp, Probe sequence
taatacaaatatcgaaagaaggcga

SEQ ID NO: 79273 - DNA, 25 bp, Probe sequence
aaatatcgaaagaaggcgactgact

SEQ ID NO: 79274 - DNA, 25 bp, Probe sequence
caaatatcgaaagaaggcgactgac

SEQ ID NO: 79275 - DNA, 25 bp, Probe sequence
acaaatatcgaaagaaggcgactga

SEQ ID NO: 79276 - DNA, 25 bp, Probe sequence
tataatacaaatatcgaaagaaggc

SEQ ID NO: 79277 - DNA, 25 bp, Probe sequence
cgccttctttcgatatttgtattat

SEQ ID NO: 79278 - DNA, 25 bp, Probe sequence
gtcgccttctttcgatatttgtatt

SEQ ID NO: 79279 - DNA, 25 bp, Probe sequence
agtcgccttctttcgatatttgtat

SEQ ID NO: 79280 - DNA, 25 bp, Probe sequence
cagtcgccttctttcgatatttgta

SEQ ID NO: 79281 - DNA, 25 bp, Probe sequence
tcgccttctttcgatatttgtatta

SEQ ID NO: 79282 - DNA, 25 bp, Probe sequence
gtcagtcgccttctttcgatatttg

SEQ ID NO: 79283 - DNA, 25 bp, Probe sequence
agtcagtcgccttctttcgatattt

SEQ ID NO: 79284 - DNA, 25 bp, Probe sequence
tcagtcgccttctttcgatatttgt

SEQ ID NO: 79285 - DNA, 25 bp, Probe sequence
gccttctttcgatatttgtattata

SEQ ID NO: 79286 - DNA, 25 bp, Probe sequence
atgccctcagataagactaaggata

SEQ ID NO: 79287 - DNA, 25 bp, Probe sequence
aatgccctcagataagactaaggat

SEQ ID NO: 79288 - DNA, 25 bp, Probe sequence
tcagataagactaaggatacaaacc

SEQ ID NO: 79289 - DNA, 25 bp, Probe sequence
gccctcagataagactaaggataca

SEQ ID NO: 79290 - DNA, 25 bp, Probe sequence
tgccctcagataagactaaggatac

SEQ ID NO: 79291 - DNA, 25 bp, Probe sequence
aaatgccctcagataagactaagga

SEQ ID NO: 79292 - DNA, 25 bp, Probe sequence
ccctcagataagactaaggatacaa

SEQ ID NO: 79293 - DNA, 25 bp, Probe sequence
cagataagactaaggatacaaacct

SEQ ID NO: 79294 - DNA, 25 bp, Probe sequence
ctcagataagactaaggatacaaac

SEQ ID NO: 79295 - DNA, 25 bp, Probe sequence
tatccttagtcttatctgagggcat

SEQ ID NO: 79296 - DNA, 25 bp, Probe sequence
atccttagtcttatctgagggcatt

SEQ ID NO: 79297 - DNA, 25 bp, Probe sequence
tccttagtcttatctgagggcattt

SEQ ID NO: 79298 - DNA, 25 bp, Probe sequence
gtatccttagtcttatctgagggca

SEQ ID NO: 79299 - DNA, 25 bp, Probe sequence
tgtatccttagtcttatctgagggc

SEQ ID NO: 79300 - DNA, 25 bp, Probe sequence
ggtttgtatccttagtcttatctga

SEQ ID NO: 79301 - DNA, 25 bp, Probe sequence
ttgtatccttagtcttatctgaggg

SEQ ID NO: 79302 - DNA, 25 bp, Probe sequence
aggtttgtatccttagtcttatctg

SEQ ID NO: 79303 - DNA, 25 bp, Probe sequence
gtttgtatccttagtcttatctgag

SEQ ID NO: 79304 - DNA, 25 bp, Probe sequence
caaagtaatatgtgctaaagtatct

SEQ ID NO: 79305 - DNA, 25 bp, Probe sequence
catacaatacaaagtaatatgtgct

SEQ ID NO: 79306 - DNA, 25 bp, Probe sequence
acaaagtaatatgtgctaaagtatc

SEQ ID NO: 79307 - DNA, 25 bp, Probe sequence
acaatacaaagtaatatgtgctaaa

SEQ ID NO: 79308 - DNA, 25 bp, Probe sequence
acatacaatacaaagtaatatgtgc

SEQ ID NO: 79309 - DNA, 25 bp, Probe sequence
agatactttagcacatattactttg

SEQ ID NO: 79310 - DNA, 25 bp, Probe sequence
agcacatattactttgtattgtatg

SEQ ID NO: 79311 - DNA, 25 bp, Probe sequence
gatactttagcacatattactttgt

SEQ ID NO: 79312 - DNA, 25 bp, Probe sequence
tttagcacatattactttgtattgt

SEQ ID NO: 79313 - DNA, 25 bp, Probe sequence
gcacatattactttgtattgtatgt

SEQ ID NO: 79314 - DNA, 25 bp, Probe sequence
gccatatagagagcctgagacataa

SEQ ID NO: 79315 - DNA, 25 bp, Probe sequence
agccatatagagagcctgagacata

SEQ ID NO: 79316 - DNA, 25 bp, Probe sequence
ccatatagagagcctgagacataaa

SEQ ID NO: 79317 - DNA, 25 bp, Probe sequence
gagccatatagagagcctgagacat

SEQ ID NO: 79318 - DNA, 25 bp, Probe sequence
agagagcctgagacataaatcaatg

SEQ ID NO: 79319 - DNA, 25 bp, Probe sequence
tagagagcctgagacataaatcaat

SEQ ID NO: 79320 - DNA, 25 bp, Probe sequence
atagagagcctgagacataaatcaa

SEQ ID NO: 79321 - DNA, 25 bp, Probe sequence
gcgtgctttatttagatatactgtc

SEQ ID NO: 79322 - DNA, 25 bp, Probe sequence
cgtgctttatttagatatactgtcg

SEQ ID NO: 79323 - DNA, 25 bp, Probe sequence
ttatgtctcaggctctctatatggc

SEQ ID NO: 79324 - DNA, 25 bp, Probe sequence
tatgtctcaggctctctatatggct

SEQ ID NO: 79325 - DNA, 25 bp, Probe sequence
tttatgtctcaggctctctatatgg

SEQ ID NO: 79326 - DNA, 25 bp, Probe sequence
atgtctcaggctctctatatggctc

SEQ ID NO: 79327 - DNA, 25 bp, Probe sequence
cattgatttatgtctcaggctctct

SEQ ID NO: 79328 - DNA, 25 bp, Probe sequence
ttgatttatgtctcaggctctctat

SEQ ID NO: 79329 - DNA, 25 bp, Probe sequence
attgatttatgtctcaggctctcta

SEQ ID NO: 79330 - DNA, 25 bp, Probe sequence
gacagtatatctaaataaagcacgc

SEQ ID NO: 79331 - DNA, 25 bp, Probe sequence
cgacagtatatctaaataaagcacg

SEQ ID NO: 79332 - DNA, 25 bp, Probe sequence
atgaatcgccatgctcaatatacct

SEQ ID NO: 79333 - DNA, 25 bp, Probe sequence
tgaatcgccatgctcaatatacctt

SEQ ID NO: 79334 - DNA, 25 bp, Probe sequence
gaatcgccatgctcaatataccttt

SEQ ID NO: 79335 - DNA, 25 bp, Probe sequence
catgaatcgccatgctcaatatacc

SEQ ID NO: 79336 - DNA, 25 bp, Probe sequence
ccatgaatcgccatgctcaatatac

SEQ ID NO: 79337 - DNA, 25 bp, Probe sequence
atcgccatgctcaatatacctttta

SEQ ID NO: 79338 - DNA, 25 bp, Probe sequence
tcgccatgctcaatataccttttaa

SEQ ID NO: 79339 - DNA, 25 bp, Probe sequence
aatcgccatgctcaatatacctttt

SEQ ID NO: 79340 - DNA, 25 bp, Probe sequence
cgccatgctcaatataccttttaaa

SEQ ID NO: 79341 - DNA, 25 bp, Probe sequence
aggtatattgagcatggcgattcat

SEQ ID NO: 79342 - DNA, 25 bp, Probe sequence
aaggtatattgagcatggcgattca

SEQ ID NO: 79343 - DNA, 25 bp, Probe sequence
aaaggtatattgagcatggcgattc

SEQ ID NO: 79344 - DNA, 25 bp, Probe sequence
gtatattgagcatggcgattcatgg

SEQ ID NO: 79345 - DNA, 25 bp, Probe sequence
ggtatattgagcatggcgattcatg

SEQ ID NO: 79346 - DNA, 25 bp, Probe sequence
taaaaggtatattgagcatggcgat

SEQ ID NO: 79347 - DNA, 25 bp, Probe sequence
ttaaaaggtatattgagcatggcga

SEQ ID NO: 79348 - DNA, 25 bp, Probe sequence
aaaaggtatattgagcatggcgatt

SEQ ID NO: 79349 - DNA, 25 bp, Probe sequence
tttaaaaggtatattgagcatggcg

SEQ ID NO: 79350 - DNA, 25 bp, Probe sequence
tcctctttctaaattgataagttgc

SEQ ID NO: 79351 - DNA, 25 bp, Probe sequence
cctctttctaaattgataagttgca

SEQ ID NO: 79352 - DNA, 25 bp, Probe sequence
agttgcattacttaatcaaatcgta

SEQ ID NO: 79353 - DNA, 25 bp, Probe sequence
ttgcttttcctctttctaaattgat

SEQ ID NO: 79354 - DNA, 25 bp, Probe sequence
aagttgcattacttaatcaaatcgt

SEQ ID NO: 79355 - DNA, 25 bp, Probe sequence
tgcttttcctctttctaaattgata

SEQ ID NO: 79356 - DNA, 25 bp, Probe sequence
ttcctctttctaaattgataagttg

SEQ ID NO: 79357 - DNA, 25 bp, Probe sequence
gttgcattacttaatcaaatcgtaa

SEQ ID NO: 79358 - DNA, 25 bp, Probe sequence
ctctttctaaattgataagttgcat

SEQ ID NO: 79359 - DNA, 25 bp, Probe sequence
gcaacttatcaatttagaaagagga

SEQ ID NO: 79360 - DNA, 25 bp, Probe sequence
tgcaacttatcaatttagaaagagg

SEQ ID NO: 79361 - DNA, 25 bp, Probe sequence
tacgatttgattaagtaatgcaact

SEQ ID NO: 79362 - DNA, 25 bp, Probe sequence
atcaatttagaaagaggaaaagcaa

SEQ ID NO: 79363 - DNA, 25 bp, Probe sequence
acgatttgattaagtaatgcaactt

SEQ ID NO: 79364 - DNA, 25 bp, Probe sequence
tatcaatttagaaagaggaaaagca

SEQ ID NO: 79365 - DNA, 25 bp, Probe sequence
caacttatcaatttagaaagaggaa

SEQ ID NO: 79366 - DNA, 25 bp, Probe sequence
ttacgatttgattaagtaatgcaac

SEQ ID NO: 79367 - DNA, 25 bp, Probe sequence
atgcaacttatcaatttagaaagag

SEQ ID NO: 79368 - DNA, 25 bp, Probe sequence
ttcccatctattaggtaagtcatgc

SEQ ID NO: 79369 - DNA, 25 bp, Probe sequence
ccatctattaggtaagtcatgctaa

SEQ ID NO: 79370 - DNA, 25 bp, Probe sequence
tcccatctattaggtaagtcatgct

SEQ ID NO: 79371 - DNA, 25 bp, Probe sequence
cccatctattaggtaagtcatgcta

SEQ ID NO: 79372 - DNA, 25 bp, Probe sequence
atctattaggtaagtcatgctaacc

SEQ ID NO: 79373 - DNA, 25 bp, Probe sequence
catctattaggtaagtcatgctaac

SEQ ID NO: 79374 - DNA, 25 bp, Probe sequence
tttcccatctattaggtaagtcatg

SEQ ID NO: 79375 - DNA, 25 bp, Probe sequence
ctattaggtaagtcatgctaacccg

SEQ ID NO: 79376 - DNA, 25 bp, Probe sequence
tctattaggtaagtcatgctaaccc

SEQ ID NO: 79377 - DNA, 25 bp, Probe sequence
gcatgacttacctaatagatgggaa

SEQ ID NO: 79378 - DNA, 25 bp, Probe sequence
ttagcatgacttacctaatagatgg

SEQ ID NO: 79379 - DNA, 25 bp, Probe sequence
agcatgacttacctaatagatggga

SEQ ID NO: 79380 - DNA, 25 bp, Probe sequence
tagcatgacttacctaatagatggg

SEQ ID NO: 79381 - DNA, 25 bp, Probe sequence
ggttagcatgacttacctaatagat

SEQ ID NO: 79382 - DNA, 25 bp, Probe sequence
gttagcatgacttacctaatagatg

SEQ ID NO: 79383 - DNA, 25 bp, Probe sequence
catgacttacctaatagatgggaaa

SEQ ID NO: 79384 - DNA, 25 bp, Probe sequence
gggttagcatgacttacctaataga

SEQ ID NO: 79385 - DNA, 25 bp, Probe sequence
cgggttagcatgacttacctaatag

SEQ ID NO: 79386 - DNA, 25 bp, Probe sequence
aaaagaacctaatattttcccatct

SEQ ID NO: 79387 - DNA, 25 bp, Probe sequence
aaagaacctaatattttcccatcta

SEQ ID NO: 79388 - DNA, 25 bp, Probe sequence
agaacctaatattttcccatctatt

SEQ ID NO: 79389 - DNA, 25 bp, Probe sequence
aagaacctaatattttcccatctat

SEQ ID NO: 79390 - DNA, 25 bp, Probe sequence
agatgggaaaatattaggttctttt

SEQ ID NO: 79391 - DNA, 25 bp, Probe sequence
tagatgggaaaatattaggttcttt

SEQ ID NO: 79392 - DNA, 25 bp, Probe sequence
atagatgggaaaatattaggttctt

SEQ ID NO: 79393 - DNA, 25 bp, Probe sequence
aatagatgggaaaatattaggttct

SEQ ID NO: 79394 - DNA, 25 bp, Probe sequence
aacatcgtattctcagcacattcaa

SEQ ID NO: 79395 - DNA, 25 bp, Probe sequence
atcgtattctcagcacattcaagtc

SEQ ID NO: 79396 - DNA, 25 bp, Probe sequence
catcgtattctcagcacattcaagt

SEQ ID NO: 79397 - DNA, 25 bp, Probe sequence
acatcgtattctcagcacattcaag

SEQ ID NO: 79398 - DNA, 25 bp, Probe sequence
cgtattctcagcacattcaagtctt

SEQ ID NO: 79399 - DNA, 25 bp, Probe sequence
tcgtattctcagcacattcaagtct

SEQ ID NO: 79400 - DNA, 25 bp, Probe sequence
ttccataaacatcgtattctcagca

SEQ ID NO: 79401 - DNA, 25 bp, Probe sequence
cataaacatcgtattctcagcacat

SEQ ID NO: 79402 - DNA, 25 bp, Probe sequence
taaacatcgtattctcagcacattc

SEQ ID NO: 79403 - DNA, 25 bp, Probe sequence
ttgaatgtgctgagaatacgatgtt

SEQ ID NO: 79404 - DNA, 25 bp, Probe sequence
gacttgaatgtgctgagaatacgat

SEQ ID NO: 79405 - DNA, 25 bp, Probe sequence
cttgaatgtgctgagaatacgatgt

SEQ ID NO: 79406 - DNA, 25 bp, Probe sequence
acttgaatgtgctgagaatacgatg

SEQ ID NO: 79407 - DNA, 25 bp, Probe sequence
aagacttgaatgtgctgagaatacg

SEQ ID NO: 79408 - DNA, 25 bp, Probe sequence
agacttgaatgtgctgagaatacga

SEQ ID NO: 79409 - DNA, 25 bp, Probe sequence
tgctgagaatacgatgtttatggaa

SEQ ID NO: 79410 - DNA, 25 bp, Probe sequence
atgtgctgagaatacgatgtttatg

SEQ ID NO: 79411 - DNA, 25 bp, Probe sequence
gctgagaatacgatgtttatggaaa

SEQ ID NO: 79412 - DNA, 25 bp, Probe sequence
atacattgcctacttcatgccaaat

SEQ ID NO: 79413 - DNA, 25 bp, Probe sequence
tacattgcctacttcatgccaaatt

SEQ ID NO: 79414 - DNA, 25 bp, Probe sequence
attgcctacttcatgccaaattctt

SEQ ID NO: 79415 - DNA, 25 bp, Probe sequence
ttgcctacttcatgccaaattcttt

SEQ ID NO: 79416 - DNA, 25 bp, Probe sequence
catacattgcctacttcatgccaaa

SEQ ID NO: 79417 - DNA, 25 bp, Probe sequence
cattgcctacttcatgccaaattct

SEQ ID NO: 79418 - DNA, 25 bp, Probe sequence
acattgcctacttcatgccaaattc

SEQ ID NO: 79419 - DNA, 25 bp, Probe sequence
cctatttcatatgtctgtcattgcg

SEQ ID NO: 79420 - DNA, 25 bp, Probe sequence
ccctatttcatatgtctgtcattgc

SEQ ID NO: 79421 - DNA, 25 bp, Probe sequence
atttggcatgaagtaggcaatgtat

SEQ ID NO: 79422 - DNA, 25 bp, Probe sequence
aatttggcatgaagtaggcaatgta

SEQ ID NO: 79423 - DNA, 25 bp, Probe sequence
aagaatttggcatgaagtaggcaat

SEQ ID NO: 79424 - DNA, 25 bp, Probe sequence
aaagaatttggcatgaagtaggcaa

SEQ ID NO: 79425 - DNA, 25 bp, Probe sequence
tttggcatgaagtaggcaatgtatg

SEQ ID NO: 79426 - DNA, 25 bp, Probe sequence
agaatttggcatgaagtaggcaatg

SEQ ID NO: 79427 - DNA, 25 bp, Probe sequence
gaatttggcatgaagtaggcaatgt

SEQ ID NO: 79428 - DNA, 25 bp, Probe sequence
gcaatgacagacatatgaaataggg

SEQ ID NO: 79429 - DNA, 25 bp, Probe sequence
cgcaatgacagacatatgaaatagg

SEQ ID NO: 79430 - DNA, 25 bp, Probe sequence
taatagataagtctccaggcagtct

SEQ ID NO: 79431 - DNA, 25 bp, Probe sequence
ctaatagataagtctccaggcagtc

SEQ ID NO: 79432 - DNA, 25 bp, Probe sequence
aatagataagtctccaggcagtctt

SEQ ID NO: 79433 - DNA, 25 bp, Probe sequence
tcagtcactcctatacaacatatct

SEQ ID NO: 79434 - DNA, 25 bp, Probe sequence
atagataagtctccaggcagtctta

SEQ ID NO: 79435 - DNA, 25 bp, Probe sequence
tagataagtctccaggcagtcttag

SEQ ID NO: 79436 - DNA, 25 bp, Probe sequence
aacctaatagataagtctccaggca

SEQ ID NO: 79437 - DNA, 25 bp, Probe sequence
cagtcactcctatacaacatatctt

SEQ ID NO: 79438 - DNA, 25 bp, Probe sequence
cctaatagataagtctccaggcagt

SEQ ID NO: 79439 - DNA, 25 bp, Probe sequence
gactgcctggagacttatctattag

SEQ ID NO: 79440 - DNA, 25 bp, Probe sequence
agactgcctggagacttatctatta

SEQ ID NO: 79441 - DNA, 25 bp, Probe sequence
aagactgcctggagacttatctatt

SEQ ID NO: 79442 - DNA, 25 bp, Probe sequence
agatatgttgtataggagtgactga

SEQ ID NO: 79443 - DNA, 25 bp, Probe sequence
taagactgcctggagacttatctat

SEQ ID NO: 79444 - DNA, 25 bp, Probe sequence
ctaagactgcctggagacttatcta

SEQ ID NO: 79445 - DNA, 25 bp, Probe sequence
tgcctggagacttatctattaggtt

SEQ ID NO: 79446 - DNA, 25 bp, Probe sequence
aagatatgttgtataggagtgactg

SEQ ID NO: 79447 - DNA, 25 bp, Probe sequence
ctgcctggagacttatctattaggt

SEQ ID NO: 79448 - DNA, 25 bp, Probe sequence
tgttatgatatagcgttcgagatga

SEQ ID NO: 79449 - DNA, 25 bp, Probe sequence
ttgttatgatatagcgttcgagatg

SEQ ID NO: 79450 - DNA, 25 bp, Probe sequence
gttatgatatagcgttcgagatgaa

SEQ ID NO: 79451 - DNA, 25 bp, Probe sequence
aatgccactatacaagatttgacct

SEQ ID NO: 79452 - DNA, 25 bp, Probe sequence
caagatttgacctgtatagtggcat

SEQ ID NO: 79453 - DNA, 25 bp, Probe sequence
atgccactatacaagatttgacctg

SEQ ID NO: 79454 - DNA, 25 bp, Probe sequence
acctgtatagtggcatgatttgtta

SEQ ID NO: 79455 - DNA, 25 bp, Probe sequence
atttgacctgtatagtggcatgatt

SEQ ID NO: 79456 - DNA, 25 bp, Probe sequence
tttgacctgtatagtggcatgattt

SEQ ID NO: 79457 - DNA, 25 bp, Probe sequence
tcatctcgaacgctatatcataaca

SEQ ID NO: 79458 - DNA, 25 bp, Probe sequence
catctcgaacgctatatcataacaa

SEQ ID NO: 79459 - DNA, 25 bp, Probe sequence
ttcatctcgaacgctatatcataac

SEQ ID NO: 79460 - DNA, 25 bp, Probe sequence
aggtcaaatcttgtatagtggcatt

SEQ ID NO: 79461 - DNA, 25 bp, Probe sequence
caggtcaaatcttgtatagtggcat

SEQ ID NO: 79462 - DNA, 25 bp, Probe sequence
atgccactatacaggtcaaatcttg

SEQ ID NO: 79463 - DNA, 25 bp, Probe sequence
taacaaatcatgccactatacaggt

SEQ ID NO: 79464 - DNA, 25 bp, Probe sequence
aatcatgccactatacaggtcaaat

SEQ ID NO: 79465 - DNA, 25 bp, Probe sequence
ggtcaaatcttgtatagtggcattt

SEQ ID NO: 79466 - DNA, 25 bp, Probe sequence
tcatcgccattgttattcggtatat

SEQ ID NO: 79467 - DNA, 25 bp, Probe sequence
ggaagtattggtgatgatgaagtga

SEQ ID NO: 79468 - DNA, 25 bp, Probe sequence
gtattggtgatgatgaagtgattga

SEQ ID NO: 79469 - DNA, 25 bp, Probe sequence
agtattggtgatgatgaagtgattg

SEQ ID NO: 79470 - DNA, 25 bp, Probe sequence
gaagtattggtgatgatgaagtgat

SEQ ID NO: 79471 - DNA, 25 bp, Probe sequence
gtcatcgccattgttattcggtata

SEQ ID NO: 79472 - DNA, 25 bp, Probe sequence
aagtattggtgatgatgaagtgatt

SEQ ID NO: 79473 - DNA, 25 bp, Probe sequence
attggtgatgatgaagtgattgata

SEQ ID NO: 79474 - DNA, 25 bp, Probe sequence
tattggtgatgatgaagtgattgat

SEQ ID NO: 79475 - DNA, 25 bp, Probe sequence
atataccgaataacaatggcgatga

SEQ ID NO: 79476 - DNA, 25 bp, Probe sequence
tcacttcatcatcaccaatacttcc

SEQ ID NO: 79477 - DNA, 25 bp, Probe sequence
caatcacttcatcatcaccaatact

SEQ ID NO: 79478 - DNA, 25 bp, Probe sequence
tcaatcacttcatcatcaccaatac

SEQ ID NO: 79479 - DNA, 25 bp, Probe sequence
tataccgaataacaatggcgatgac

SEQ ID NO: 79480 - DNA, 25 bp, Probe sequence
atcacttcatcatcaccaatacttc

SEQ ID NO: 79481 - DNA, 25 bp, Probe sequence
aatcacttcatcatcaccaatactt

SEQ ID NO: 79482 - DNA, 25 bp, Probe sequence
gtacagtacattaacacaagcgaac

SEQ ID NO: 79483 - DNA, 25 bp, Probe sequence
atcaatcacttcatcatcaccaata

SEQ ID NO: 79484 - DNA, 25 bp, Probe sequence
aacgaaatattgcgggtataaagtg

SEQ ID NO: 79485 - DNA, 25 bp, Probe sequence
gaaatattgcgggtataaagtggtt

SEQ ID NO: 79486 - DNA, 25 bp, Probe sequence
caacgaaatattgcgggtataaagt

SEQ ID NO: 79487 - DNA, 25 bp, Probe sequence
tcaacgaaatattgcgggtataaag

SEQ ID NO: 79488 - DNA, 25 bp, Probe sequence
agatcaacgaaatattgcgggtata

SEQ ID NO: 79489 - DNA, 25 bp, Probe sequence
gatcaacgaaatattgcgggtataa

SEQ ID NO: 79490 - DNA, 25 bp, Probe sequence
taagatcaacgaaatattgcgggta

SEQ ID NO: 79491 - DNA, 25 bp, Probe sequence
tataagatcaacgaaatattgcggg

SEQ ID NO: 79492 - DNA, 25 bp, Probe sequence
atcaacgaaatattgcgggtataaa

SEQ ID NO: 79493 - DNA, 25 bp, Probe sequence
cactttatacccgcaatatttcgtt

SEQ ID NO: 79494 - DNA, 25 bp, Probe sequence
aaccactttatacccgcaatatttc

SEQ ID NO: 79495 - DNA, 25 bp, Probe sequence
actttatacccgcaatatttcgttg

SEQ ID NO: 79496 - DNA, 25 bp, Probe sequence
tatacccgcaatatttcgttgatct

SEQ ID NO: 79497 - DNA, 25 bp, Probe sequence
ctttatacccgcaatatttcgttga

SEQ ID NO: 79498 - DNA, 25 bp, Probe sequence
tacccgcaatatttcgttgatctta

SEQ ID NO: 79499 - DNA, 25 bp, Probe sequence
ttatacccgcaatatttcgttgatc

SEQ ID NO: 79500 - DNA, 25 bp, Probe sequence
cccgcaatatttcgttgatcttata

SEQ ID NO: 79501 - DNA, 25 bp, Probe sequence
tttatacccgcaatatttcgttgat

SEQ ID NO: 79502 - DNA, 25 bp, Probe sequence
cctcatgtcattattgccttactaa

SEQ ID NO: 79503 - DNA, 25 bp, Probe sequence
gtcgccttcattaacttgattgtta

SEQ ID NO: 79504 - DNA, 25 bp, Probe sequence
cgtcgccttcattaacttgattgtt

SEQ ID NO: 79505 - DNA, 25 bp, Probe sequence
acaaggaataattgcctattatgcc

SEQ ID NO: 79506 - DNA, 25 bp, Probe sequence
ctcatgtcattattgccttactaac

SEQ ID NO: 79507 - DNA, 25 bp, Probe sequence
tcatgtcattattgccttactaaca

SEQ ID NO: 79508 - DNA, 25 bp, Probe sequence
ccctcatgtcattattgccttacta

SEQ ID NO: 79509 - DNA, 25 bp, Probe sequence
attaaatgtctatctcccacacctc

SEQ ID NO: 79510 - DNA, 25 bp, Probe sequence
taaatgtctatctcccacacctcaa

SEQ ID NO: 79511 - DNA, 25 bp, Probe sequence
ttagtaaggcaataatgacatgagg

SEQ ID NO: 79512 - DNA, 25 bp, Probe sequence
taacaatcaagttaatgaaggcgac

SEQ ID NO: 79513 - DNA, 25 bp, Probe sequence
aacaatcaagttaatgaaggcgacg

SEQ ID NO: 79514 - DNA, 25 bp, Probe sequence
ggcataataggcaattattccttgt

SEQ ID NO: 79515 - DNA, 25 bp, Probe sequence
gttagtaaggcaataatgacatgag

SEQ ID NO: 79516 - DNA, 25 bp, Probe sequence
tgttagtaaggcaataatgacatga

SEQ ID NO: 79517 - DNA, 25 bp, Probe sequence
tagtaaggcaataatgacatgaggg

SEQ ID NO: 79518 - DNA, 25 bp, Probe sequence
gaggtgtgggagatagacatttaat

SEQ ID NO: 79519 - DNA, 25 bp, Probe sequence
ataatgacatgagggcataataggc

SEQ ID NO: 79520 - DNA, 25 bp, Probe sequence
taacggtcataataactcgcttcat

SEQ ID NO: 79521 - DNA, 25 bp, Probe sequence
ataacggtcataataactcgcttca

SEQ ID NO: 79522 - DNA, 25 bp, Probe sequence
aacggtcataataactcgcttcatt

SEQ ID NO: 79523 - DNA, 25 bp, Probe sequence
tataacggtcataataactcgcttc

SEQ ID NO: 79524 - DNA, 25 bp, Probe sequence
catataacggtcataataactcgct

SEQ ID NO: 79525 - DNA, 25 bp, Probe sequence
tcatataacggtcataataactcgc

SEQ ID NO: 79526 - DNA, 25 bp, Probe sequence
atataacggtcataataactcgctt

SEQ ID NO: 79527 - DNA, 25 bp, Probe sequence
cgattgaatgattagagggaggaat

SEQ ID NO: 79528 - DNA, 25 bp, Probe sequence
acggtcataataactcgcttcattt

SEQ ID NO: 79529 - DNA, 25 bp, Probe sequence
tgaagcgagttattatgaccgttat

SEQ ID NO: 79530 - DNA, 25 bp, Probe sequence
atgaagcgagttattatgaccgtta

SEQ ID NO: 79531 - DNA, 25 bp, Probe sequence
aatgaagcgagttattatgaccgtt

SEQ ID NO: 79532 - DNA, 25 bp, Probe sequence
gaagcgagttattatgaccgttata

SEQ ID NO: 79533 - DNA, 25 bp, Probe sequence
gcgagttattatgaccgttatatga

SEQ ID NO: 79534 - DNA, 25 bp, Probe sequence
agcgagttattatgaccgttatatg

SEQ ID NO: 79535 - DNA, 25 bp, Probe sequence
aagcgagttattatgaccgttatat

SEQ ID NO: 79536 - DNA, 25 bp, Probe sequence
attcctccctctaatcattcaatcg

SEQ ID NO: 79537 - DNA, 25 bp, Probe sequence
aaatgaagcgagttattatgaccgt

SEQ ID NO: 79538 - DNA, 25 bp, Probe sequence
gggtagtaatcattggcaataagaa

SEQ ID NO: 79539 - DNA, 25 bp, Probe sequence
gcaagttacatcaatcacacttcaa

SEQ ID NO: 79540 - DNA, 25 bp, Probe sequence
ggcaagttacatcaatcacacttca

SEQ ID NO: 79541 - DNA, 25 bp, Probe sequence
caagttacatcaatcacacttcaat

SEQ ID NO: 79542 - DNA, 25 bp, Probe sequence
gagggcaagttacatcaatcacact

SEQ ID NO: 79543 - DNA, 25 bp, Probe sequence
aagttacatcaatcacacttcaatt

SEQ ID NO: 79544 - DNA, 25 bp, Probe sequence
ggggtagtaatcattggcaataaga

SEQ ID NO: 79545 - DNA, 25 bp, Probe sequence
aggggtagtaatcattggcaataag

SEQ ID NO: 79546 - DNA, 25 bp, Probe sequence
ctaggggtagtaatcattggcaata

SEQ ID NO: 79547 - DNA, 25 bp, Probe sequence
ttcttattgccaatgattactaccc

SEQ ID NO: 79548 - DNA, 25 bp, Probe sequence
ttgaagtgtgattgatgtaacttgc

SEQ ID NO: 79549 - DNA, 25 bp, Probe sequence
tgaagtgtgattgatgtaacttgcc

SEQ ID NO: 79550 - DNA, 25 bp, Probe sequence
attgaagtgtgattgatgtaacttg

SEQ ID NO: 79551 - DNA, 25 bp, Probe sequence
agtgtgattgatgtaacttgccctc

SEQ ID NO: 79552 - DNA, 25 bp, Probe sequence
aattgaagtgtgattgatgtaactt

SEQ ID NO: 79553 - DNA, 25 bp, Probe sequence
ggcaattgaagtgtgattgatgtaa

SEQ ID NO: 79554 - DNA, 25 bp, Probe sequence
tattgccaatgattactacccctag

SEQ ID NO: 79555 - DNA, 25 bp, Probe sequence
cttattgccaatgattactacccct

SEQ ID NO: 79556 - DNA, 25 bp, Probe sequence
taatatcatccagttcattcttcgc

SEQ ID NO: 79557 - DNA, 25 bp, Probe sequence
aatatcatccagttcattcttcgcc

SEQ ID NO: 79558 - DNA, 25 bp, Probe sequence
atatcatccagttcattcttcgcct

SEQ ID NO: 79559 - DNA, 25 bp, Probe sequence
tgaggttcctgtatcacattagaag

SEQ ID NO: 79560 - DNA, 25 bp, Probe sequence
tatcatccagttcattcttcgcctt

SEQ ID NO: 79561 - DNA, 25 bp, Probe sequence
ttaataatggcatgaatgaacgcat

SEQ ID NO: 79562 - DNA, 25 bp, Probe sequence
atgaggttcctgtatcacattagaa

SEQ ID NO: 79563 - DNA, 25 bp, Probe sequence
attaataatggcatgaatgaacgca

SEQ ID NO: 79564 - DNA, 25 bp, Probe sequence
gaggttcctgtatcacattagaagc

SEQ ID NO: 79565 - DNA, 25 bp, Probe sequence
gcgaagaatgaactggatgatatta

SEQ ID NO: 79566 - DNA, 25 bp, Probe sequence
ggcgaagaatgaactggatgatatt

SEQ ID NO: 79567 - DNA, 25 bp, Probe sequence
aggcgaagaatgaactggatgatat

SEQ ID NO: 79568 - DNA, 25 bp, Probe sequence
cttctaatgtgatacaggaacctca

SEQ ID NO: 79569 - DNA, 25 bp, Probe sequence
aaggcgaagaatgaactggatgata

SEQ ID NO: 79570 - DNA, 25 bp, Probe sequence
atgcgttcattcatgccattattaa

SEQ ID NO: 79571 - DNA, 25 bp, Probe sequence
ttctaatgtgatacaggaacctcat

SEQ ID NO: 79572 - DNA, 25 bp, Probe sequence
tgcgttcattcatgccattattaat

SEQ ID NO: 79573 - DNA, 25 bp, Probe sequence
gcttctaatgtgatacaggaacctc

SEQ ID NO: 79574 - DNA, 25 bp, Probe sequence
acagtttgaagtcatatttaccaat

SEQ ID NO: 79575 - DNA, 25 bp, Probe sequence
accaattgtaaatgacgactagatg

SEQ ID NO: 79576 - DNA, 25 bp, Probe sequence
ccaattgtaaatgacgactagatga

SEQ ID NO: 79577 - DNA, 25 bp, Probe sequence
tacagtttgaagtcatatttaccaa

SEQ ID NO: 79578 - DNA, 25 bp, Probe sequence
tgacgactagatgatatatagttca

SEQ ID NO: 79579 - DNA, 25 bp, Probe sequence
atacagtttgaagtcatatttacca

SEQ ID NO: 79580 - DNA, 25 bp, Probe sequence
agttcaagaaacatcaaaattcgtt

SEQ ID NO: 79581 - DNA, 25 bp, Probe sequence
catacagtttgaagtcatatttacc

SEQ ID NO: 79582 - DNA, 25 bp, Probe sequence
cagtttgaagtcatatttaccaatt

SEQ ID NO: 79583 - DNA, 25 bp, Probe sequence
attggtaaatatgacttcaaactgt

SEQ ID NO: 79584 - DNA, 25 bp, Probe sequence
catctagtcgtcatttacaattggt

SEQ ID NO: 79585 - DNA, 25 bp, Probe sequence
tcatctagtcgtcatttacaattgg

SEQ ID NO: 79586 - DNA, 25 bp, Probe sequence
ttggtaaatatgacttcaaactgta

SEQ ID NO: 79587 - DNA, 25 bp, Probe sequence
tggtaaatatgacttcaaactgtat

SEQ ID NO: 79588 - DNA, 25 bp, Probe sequence
tgaactatatatcatctagtcgtca

SEQ ID NO: 79589 - DNA, 25 bp, Probe sequence
aacgaattttgatgtttcttgaact

SEQ ID NO: 79590 - DNA, 25 bp, Probe sequence
ggtaaatatgacttcaaactgtatg

SEQ ID NO: 79591 - DNA, 25 bp, Probe sequence
aattggtaaatatgacttcaaactg

SEQ ID NO: 79592 - DNA, 25 bp, Probe sequence
gccacttatagtcgagattatgaac

SEQ ID NO: 79593 - DNA, 25 bp, Probe sequence
agccacttatagtcgagattatgaa

SEQ ID NO: 79594 - DNA, 25 bp, Probe sequence
tagccacttatagtcgagattatga

SEQ ID NO: 79595 - DNA, 25 bp, Probe sequence
ccacttatagtcgagattatgaact

SEQ ID NO: 79596 - DNA, 25 bp, Probe sequence
atagccacttatagtcgagattatg

SEQ ID NO: 79597 - DNA, 25 bp, Probe sequence
ctaatagccacttatagtcgagatt

SEQ ID NO: 79598 - DNA, 25 bp, Probe sequence
gctaatagccacttatagtcgagat

SEQ ID NO: 79599 - DNA, 25 bp, Probe sequence
aatagccacttatagtcgagattat

SEQ ID NO: 79600 - DNA, 25 bp, Probe sequence
taatagccacttatagtcgagatta

SEQ ID NO: 79601 - DNA, 25 bp, Probe sequence
cacttatagtcgagattatgaacta

SEQ ID NO: 79602 - DNA, 25 bp, Probe sequence
gttcataatctcgactataagtggc

SEQ ID NO: 79603 - DNA, 25 bp, Probe sequence
ttcataatctcgactataagtggct

SEQ ID NO: 79604 - DNA, 25 bp, Probe sequence
tcataatctcgactataagtggcta

SEQ ID NO: 79605 - DNA, 25 bp, Probe sequence
agttcataatctcgactataagtgg

SEQ ID NO: 79606 - DNA, 25 bp, Probe sequence
aatctcgactataagtggctattag

SEQ ID NO: 79607 - DNA, 25 bp, Probe sequence
cataatctcgactataagtggctat

SEQ ID NO: 79608 - DNA, 25 bp, Probe sequence
atctcgactataagtggctattagc

SEQ ID NO: 79609 - DNA, 25 bp, Probe sequence
ataatctcgactataagtggctatt

SEQ ID NO: 79610 - DNA, 25 bp, Probe sequence
taatctcgactataagtggctatta

SEQ ID NO: 79611 - DNA, 25 bp, Probe sequence
tagttcataatctcgactataagtg

SEQ ID NO: 79612 - DNA, 25 bp, Probe sequence
acctagtgctttatggaattttcat

SEQ ID NO: 79613 - DNA, 25 bp, Probe sequence
tacctagtgctttatggaattttca

SEQ ID NO: 79614 - DNA, 25 bp, Probe sequence
tcttttacctagtgctttatggaat

SEQ ID NO: 79615 - DNA, 25 bp, Probe sequence
atcttttacctagtgctttatggaa

SEQ ID NO: 79616 - DNA, 25 bp, Probe sequence
aatcttttacctagtgctttatgga

SEQ ID NO: 79617 - DNA, 25 bp, Probe sequence
cctagtgctttatggaattttcatt

SEQ ID NO: 79618 - DNA, 25 bp, Probe sequence
ttacctagtgctttatggaattttc

SEQ ID NO: 79619 - DNA, 25 bp, Probe sequence
cttttacctagtgctttatggaatt

SEQ ID NO: 79620 - DNA, 25 bp, Probe sequence
tcgttataatcttttacctagtgct

SEQ ID NO: 79621 - DNA, 25 bp, Probe sequence
atgaaaattccataaagcactaggt

SEQ ID NO: 79622 - DNA, 25 bp, Probe sequence
tgaaaattccataaagcactaggta

SEQ ID NO: 79623 - DNA, 25 bp, Probe sequence
tccataaagcactaggtaaaagatt

SEQ ID NO: 79624 - DNA, 25 bp, Probe sequence
ttccataaagcactaggtaaaagat

SEQ ID NO: 79625 - DNA, 25 bp, Probe sequence
attccataaagcactaggtaaaaga

SEQ ID NO: 79626 - DNA, 25 bp, Probe sequence
aatgaaaattccataaagcactagg

SEQ ID NO: 79627 - DNA, 25 bp, Probe sequence
aattccataaagcactaggtaaaag

SEQ ID NO: 79628 - DNA, 25 bp, Probe sequence
gaaaattccataaagcactaggtaa

SEQ ID NO: 79629 - DNA, 25 bp, Probe sequence
agcactaggtaaaagattataacga

SEQ ID NO: 79630 - DNA, 25 bp, Probe sequence
actgactcaatctttaatttacaca

SEQ ID NO: 79631 - DNA, 25 bp, Probe sequence
tttaatttacacaactaaagcgaaa

SEQ ID NO: 79632 - DNA, 25 bp, Probe sequence
tgactcaatctttaatttacacaac

SEQ ID NO: 79633 - DNA, 25 bp, Probe sequence
gactcaatctttaatttacacaact

SEQ ID NO: 79634 - DNA, 25 bp, Probe sequence
ctgactcaatctttaatttacacaa

SEQ ID NO: 79635 - DNA, 25 bp, Probe sequence
tctttaatttacacaactaaagcga

SEQ ID NO: 79636 - DNA, 25 bp, Probe sequence
tactgactcaatctttaatttacac

SEQ ID NO: 79637 - DNA, 25 bp, Probe sequence
ttaatttacacaactaaagcgaaaa

SEQ ID NO: 79638 - DNA, 25 bp, Probe sequence
ctttaatttacacaactaaagcgaa

SEQ ID NO: 79639 - DNA, 25 bp, Probe sequence
atctttaatttacacaactaaagcg

SEQ ID NO: 79640 - DNA, 25 bp, Probe sequence
tgtgtaaattaaagattgagtcagt

SEQ ID NO: 79641 - DNA, 25 bp, Probe sequence
tttcgctttagttgtgtaaattaaa

SEQ ID NO: 79642 - DNA, 25 bp, Probe sequence
gttgtgtaaattaaagattgagtca

SEQ ID NO: 79643 - DNA, 25 bp, Probe sequence
ttgtgtaaattaaagattgagtcag

SEQ ID NO: 79644 - DNA, 25 bp, Probe sequence
agttgtgtaaattaaagattgagtc

SEQ ID NO: 79645 - DNA, 25 bp, Probe sequence
tcgctttagttgtgtaaattaaaga

SEQ ID NO: 79646 - DNA, 25 bp, Probe sequence
gtgtaaattaaagattgagtcagta

SEQ ID NO: 79647 - DNA, 25 bp, Probe sequence
ttttcgctttagttgtgtaaattaa

SEQ ID NO: 79648 - DNA, 25 bp, Probe sequence
ttcgctttagttgtgtaaattaaag

SEQ ID NO: 79649 - DNA, 25 bp, Probe sequence
cgctttagttgtgtaaattaaagat

SEQ ID NO: 79650 - DNA, 25 bp, Probe sequence
gatgcaaagttaagttcaaattcca

SEQ ID NO: 79651 - DNA, 25 bp, Probe sequence
tgcaaagttaagttcaaattccaat

SEQ ID NO: 79652 - DNA, 25 bp, Probe sequence
atgcaaagttaagttcaaattccaa

SEQ ID NO: 79653 - DNA, 25 bp, Probe sequence
tgatgcaaagttaagttcaaattcc

SEQ ID NO: 79654 - DNA, 25 bp, Probe sequence
gcaaagttaagttcaaattccaata

SEQ ID NO: 79655 - DNA, 25 bp, Probe sequence
ttgatgcaaagttaagttcaaattc

SEQ ID NO: 79656 - DNA, 25 bp, Probe sequence
aattttatgattaaatcctcgtgga

SEQ ID NO: 79657 - DNA, 25 bp, Probe sequence
aaattttatgattaaatcctcgtgg

SEQ ID NO: 79658 - DNA, 25 bp, Probe sequence
ggaaattttatgattaaatcctcgt

SEQ ID NO: 79659 - DNA, 25 bp, Probe sequence
tggaatttgaacttaactttgcatc

SEQ ID NO: 79660 - DNA, 25 bp, Probe sequence
ttggaatttgaacttaactttgcat

SEQ ID NO: 79661 - DNA, 25 bp, Probe sequence
attggaatttgaacttaactttgca

SEQ ID NO: 79662 - DNA, 25 bp, Probe sequence
ggaatttgaacttaactttgcatca

SEQ ID NO: 79663 - DNA, 25 bp, Probe sequence
tattggaatttgaacttaactttgc

SEQ ID NO: 79664 - DNA, 25 bp, Probe sequence
gaatttgaacttaactttgcatcaa

SEQ ID NO: 79665 - DNA, 25 bp, Probe sequence
tccacgaggatttaatcataaaatt

SEQ ID NO: 79666 - DNA, 25 bp, Probe sequence
ccacgaggatttaatcataaaattt

SEQ ID NO: 79667 - DNA, 25 bp, Probe sequence
acgaggatttaatcataaaatttcc

SEQ ID NO: 79668 - DNA, 25 bp, Probe sequence
acactgaaacttcaatgtctttact

SEQ ID NO: 79669 - DNA, 25 bp, Probe sequence
cactgaaacttcaatgtctttactt

SEQ ID NO: 79670 - DNA, 25 bp, Probe sequence
aacactgaaacttcaatgtctttac

SEQ ID NO: 79671 - DNA, 25 bp, Probe sequence
ataacactgaaacttcaatgtcttt

SEQ ID NO: 79672 - DNA, 25 bp, Probe sequence
aataacactgaaacttcaatgtctt

SEQ ID NO: 79673 - DNA, 25 bp, Probe sequence
taacactgaaacttcaatgtcttta

SEQ ID NO: 79674 - DNA, 25 bp, Probe sequence
actgaaacttcaatgtctttactta

SEQ ID NO: 79675 - DNA, 25 bp, Probe sequence
taataacactgaaacttcaatgtct

SEQ ID NO: 79676 - DNA, 25 bp, Probe sequence
ataataacactgaaacttcaatgtc

SEQ ID NO: 79677 - DNA, 25 bp, Probe sequence
agtaaagacattgaagtttcagtgt

SEQ ID NO: 79678 - DNA, 25 bp, Probe sequence
aagtaaagacattgaagtttcagtg

SEQ ID NO: 79679 - DNA, 25 bp, Probe sequence
gtaaagacattgaagtttcagtgtt

SEQ ID NO: 79680 - DNA, 25 bp, Probe sequence
aagacattgaagtttcagtgttatt

SEQ ID NO: 79681 - DNA, 25 bp, Probe sequence
aaagacattgaagtttcagtgttat

SEQ ID NO: 79682 - DNA, 25 bp, Probe sequence
taaagacattgaagtttcagtgtta

SEQ ID NO: 79683 - DNA, 25 bp, Probe sequence
taagtaaagacattgaagtttcagt

SEQ ID NO: 79684 - DNA, 25 bp, Probe sequence
agacattgaagtttcagtgttatta

SEQ ID NO: 79685 - DNA, 25 bp, Probe sequence
gacattgaagtttcagtgttattat

SEQ ID NO: 79686 - DNA, 25 bp, Probe sequence
agactcacccttcaatttaaaatca

SEQ ID NO: 79687 - DNA, 25 bp, Probe sequence
actcacccttcaatttaaaatcatc

SEQ ID NO: 79688 - DNA, 25 bp, Probe sequence
gactcacccttcaatttaaaatcat

SEQ ID NO: 79689 - DNA, 25 bp, Probe sequence
aagactcacccttcaatttaaaatc

SEQ ID NO: 79690 - DNA, 25 bp, Probe sequence
ctcacccttcaatttaaaatcatct

SEQ ID NO: 79691 - DNA, 25 bp, Probe sequence
tcacccttcaatttaaaatcatctt

SEQ ID NO: 79692 - DNA, 25 bp, Probe sequence
cacccttcaatttaaaatcatctta

SEQ ID NO: 79693 - DNA, 25 bp, Probe sequence
acccttcaatttaaaatcatcttaa

SEQ ID NO: 79694 - DNA, 25 bp, Probe sequence
tgattttaaattgaagggtgagtct

SEQ ID NO: 79695 - DNA, 25 bp, Probe sequence
atgattttaaattgaagggtgagtc

SEQ ID NO: 79696 - DNA, 25 bp, Probe sequence
gatgattttaaattgaagggtgagt

SEQ ID NO: 79697 - DNA, 25 bp, Probe sequence
gattttaaattgaagggtgagtctt

SEQ ID NO: 79698 - DNA, 25 bp, Probe sequence
agatgattttaaattgaagggtgag

SEQ ID NO: 79699 - DNA, 25 bp, Probe sequence
aagatgattttaaattgaagggtga

SEQ ID NO: 79700 - DNA, 25 bp, Probe sequence
taagatgattttaaattgaagggtg

SEQ ID NO: 79701 - DNA, 25 bp, Probe sequence
ttaagatgattttaaattgaagggt

SEQ ID NO: 79702 - DNA, 25 bp, Probe sequence
cgttttgaaggggctaatttgtaat

SEQ ID NO: 79703 - DNA, 25 bp, Probe sequence
agcccttttgaaactagaatcctta

SEQ ID NO: 79704 - DNA, 25 bp, Probe sequence
gcccttttgaaactagaatccttat

SEQ ID NO: 79705 - DNA, 25 bp, Probe sequence
cagcccttttgaaactagaatcctt

SEQ ID NO: 79706 - DNA, 25 bp, Probe sequence
acttatcagcccttttgaaactaga

SEQ ID NO: 79707 - DNA, 25 bp, Probe sequence
atcagcccttttgaaactagaatcc

SEQ ID NO: 79708 - DNA, 25 bp, Probe sequence
cttatcagcccttttgaaactagaa

SEQ ID NO: 79709 - DNA, 25 bp, Probe sequence
tatcagcccttttgaaactagaatc

SEQ ID NO: 79710 - DNA, 25 bp, Probe sequence
gttttgaaggggctaatttgtaata

SEQ ID NO: 79711 - DNA, 25 bp, Probe sequence
attacaaattagccccttcaaaacg

SEQ ID NO: 79712 - DNA, 25 bp, Probe sequence
taaggattctagtttcaaaagggct

SEQ ID NO: 79713 - DNA, 25 bp, Probe sequence
ataaggattctagtttcaaaagggc

SEQ ID NO: 79714 - DNA, 25 bp, Probe sequence
aaggattctagtttcaaaagggctg

SEQ ID NO: 79715 - DNA, 25 bp, Probe sequence
tctagtttcaaaagggctgataagt

SEQ ID NO: 79716 - DNA, 25 bp, Probe sequence
ttctagtttcaaaagggctgataag

SEQ ID NO: 79717 - DNA, 25 bp, Probe sequence
ggattctagtttcaaaagggctgat

SEQ ID NO: 79718 - DNA, 25 bp, Probe sequence
gattctagtttcaaaagggctgata

SEQ ID NO: 79719 - DNA, 25 bp, Probe sequence
tattacaaattagccccttcaaaac

SEQ ID NO: 79720 - DNA, 25 bp, Probe sequence
acattatattctatcaggaaggtgc

SEQ ID NO: 79721 - DNA, 25 bp, Probe sequence
tatattctatcaggaaggtgcaaca

SEQ ID NO: 79722 - DNA, 25 bp, Probe sequence
ttatattctatcaggaaggtgcaac

SEQ ID NO: 79723 - DNA, 25 bp, Probe sequence
cattatattctatcaggaaggtgca

SEQ ID NO: 79724 - DNA, 25 bp, Probe sequence
attatattctatcaggaaggtgcaa

SEQ ID NO: 79725 - DNA, 25 bp, Probe sequence
ttttcataaccccattcattcaact

SEQ ID NO: 79726 - DNA, 25 bp, Probe sequence
ttcataaccccattcattcaactaa

SEQ ID NO: 79727 - DNA, 25 bp, Probe sequence
tttcataaccccattcattcaacta

SEQ ID NO: 79728 - DNA, 25 bp, Probe sequence
tacattatattctatcaggaaggtg

SEQ ID NO: 79729 - DNA, 25 bp, Probe sequence
gcaccttcctgatagaatataatgt

SEQ ID NO: 79730 - DNA, 25 bp, Probe sequence
tgttgcaccttcctgatagaatata

SEQ ID NO: 79731 - DNA, 25 bp, Probe sequence
gttgcaccttcctgatagaatataa

SEQ ID NO: 79732 - DNA, 25 bp, Probe sequence
tgcaccttcctgatagaatataatg

SEQ ID NO: 79733 - DNA, 25 bp, Probe sequence
ttgcaccttcctgatagaatataat

SEQ ID NO: 79734 - DNA, 25 bp, Probe sequence
agttgaatgaatggggttatgaaaa

SEQ ID NO: 79735 - DNA, 25 bp, Probe sequence
tagttgaatgaatggggttatgaaa

SEQ ID NO: 79736 - DNA, 25 bp, Probe sequence
ttagttgaatgaatggggttatgaa

SEQ ID NO: 79737 - DNA, 25 bp, Probe sequence
attagttgaatgaatggggttatga

SEQ ID NO: 79738 - DNA, 25 bp, Probe sequence
tgtgttggttagatttattgatgcg

SEQ ID NO: 79739 - DNA, 25 bp, Probe sequence
tgcgatagtgtgttggttagattta

SEQ ID NO: 79740 - DNA, 25 bp, Probe sequence
gcgatagtgtgttggttagatttat

SEQ ID NO: 79741 - DNA, 25 bp, Probe sequence
gtgtgttggttagatttattgatgc

SEQ ID NO: 79742 - DNA, 25 bp, Probe sequence
ttgcgatagtgtgttggttagattt

SEQ ID NO: 79743 - DNA, 25 bp, Probe sequence
tttgcgatagtgtgttggttagatt

SEQ ID NO: 79744 - DNA, 25 bp, Probe sequence
gctgtcattaagtaattgtttgcga

SEQ ID NO: 79745 - DNA, 25 bp, Probe sequence
ctgtcattaagtaattgtttgcgaa

SEQ ID NO: 79746 - DNA, 25 bp, Probe sequence
gtttgcgatagtgtgttggttagat

SEQ ID NO: 79747 - DNA, 25 bp, Probe sequence
cgcatcaataaatctaaccaacaca

SEQ ID NO: 79748 - DNA, 25 bp, Probe sequence
taaatctaaccaacacactatcgca

SEQ ID NO: 79749 - DNA, 25 bp, Probe sequence
ataaatctaaccaacacactatcgc

SEQ ID NO: 79750 - DNA, 25 bp, Probe sequence
aatctaaccaacacactatcgcaaa

SEQ ID NO: 79751 - DNA, 25 bp, Probe sequence
aaatctaaccaacacactatcgcaa

SEQ ID NO: 79752 - DNA, 25 bp, Probe sequence
gcatcaataaatctaaccaacacac

SEQ ID NO: 79753 - DNA, 25 bp, Probe sequence
tcgcaaacaattacttaatgacagc

SEQ ID NO: 79754 - DNA, 25 bp, Probe sequence
ttcgcaaacaattacttaatgacag

SEQ ID NO: 79755 - DNA, 25 bp, Probe sequence
atctaaccaacacactatcgcaaac

SEQ ID NO: 79756 - DNA, 25 bp, Probe sequence
actacttgaaacaccatacataccc

SEQ ID NO: 79757 - DNA, 25 bp, Probe sequence
tcattctcatcatattctaggttgt

SEQ ID NO: 79758 - DNA, 25 bp, Probe sequence
tactacttgaaacaccatacatacc

SEQ ID NO: 79759 - DNA, 25 bp, Probe sequence
acatactacttgaaacaccatacat

SEQ ID NO: 79760 - DNA, 25 bp, Probe sequence
cattctcatcatattctaggttgtt

SEQ ID NO: 79761 - DNA, 25 bp, Probe sequence
tgactactcagaggttatattctac

SEQ ID NO: 79762 - DNA, 25 bp, Probe sequence
gactactcagaggttatattctact

SEQ ID NO: 79763 - DNA, 25 bp, Probe sequence
aatgactactcagaggttatattct

SEQ ID NO: 79764 - DNA, 25 bp, Probe sequence
tacatactacttgaaacaccataca

SEQ ID NO: 79765 - DNA, 25 bp, Probe sequence
gggtatgtatggtgtttcaagtagt

SEQ ID NO: 79766 - DNA, 25 bp, Probe sequence
acaacctagaatatgatgagaatga

SEQ ID NO: 79767 - DNA, 25 bp, Probe sequence
ggtatgtatggtgtttcaagtagta

SEQ ID NO: 79768 - DNA, 25 bp, Probe sequence
atgtatggtgtttcaagtagtatgt

SEQ ID NO: 79769 - DNA, 25 bp, Probe sequence
aacaacctagaatatgatgagaatg

SEQ ID NO: 79770 - DNA, 25 bp, Probe sequence
gtagaatataacctctgagtagtca

SEQ ID NO: 79771 - DNA, 25 bp, Probe sequence
agtagaatataacctctgagtagtc

SEQ ID NO: 79772 - DNA, 25 bp, Probe sequence
tgtatggtgtttcaagtagtatgta

SEQ ID NO: 79773 - DNA, 25 bp, Probe sequence
agaatataacctctgagtagtcatt

SEQ ID NO: 79774 - DNA, 25 bp, Probe sequence
ggagttgcacaatggaatataacac

SEQ ID NO: 79775 - DNA, 25 bp, Probe sequence
aggagttgcacaatggaatataaca

SEQ ID NO: 79776 - DNA, 25 bp, Probe sequence
gcacaatggaatataacacttatct

SEQ ID NO: 79777 - DNA, 25 bp, Probe sequence
acaataggagttgcacaatggaata

SEQ ID NO: 79778 - DNA, 25 bp, Probe sequence
tacaataggagttgcacaatggaat

SEQ ID NO: 79779 - DNA, 25 bp, Probe sequence
atacaataggagttgcacaatggaa

SEQ ID NO: 79780 - DNA, 25 bp, Probe sequence
aatacaataggagttgcacaatgga

SEQ ID NO: 79781 - DNA, 25 bp, Probe sequence
caataggagttgcacaatggaatat

SEQ ID NO: 79782 - DNA, 25 bp, Probe sequence
gagttgcacaatggaatataacact

SEQ ID NO: 79783 - DNA, 25 bp, Probe sequence
tgttatattccattgtgcaactcct

SEQ ID NO: 79784 - DNA, 25 bp, Probe sequence
gtgttatattccattgtgcaactcc

SEQ ID NO: 79785 - DNA, 25 bp, Probe sequence
agataagtgttatattccattgtgc

SEQ ID NO: 79786 - DNA, 25 bp, Probe sequence
tccattgtgcaactcctattgtatt

SEQ ID NO: 79787 - DNA, 25 bp, Probe sequence
ttccattgtgcaactcctattgtat

SEQ ID NO: 79788 - DNA, 25 bp, Probe sequence
attccattgtgcaactcctattgta

SEQ ID NO: 79789 - DNA, 25 bp, Probe sequence
tattccattgtgcaactcctattgt

SEQ ID NO: 79790 - DNA, 25 bp, Probe sequence
atattccattgtgcaactcctattg

SEQ ID NO: 79791 - DNA, 25 bp, Probe sequence
agtgttatattccattgtgcaactc

SEQ ID NO: 79792 - DNA, 25 bp, Probe sequence
tttgtcatttgttattccgtgattt

SEQ ID NO: 79793 - DNA, 25 bp, Probe sequence
atttgtcatttgttattccgtgatt

SEQ ID NO: 79794 - DNA, 25 bp, Probe sequence
aatttgtcatttgttattccgtgat

SEQ ID NO: 79795 - DNA, 25 bp, Probe sequence
tgaatttgtcatttgttattccgtg

SEQ ID NO: 79796 - DNA, 25 bp, Probe sequence
gaatttgtcatttgttattccgtga

SEQ ID NO: 79797 - DNA, 25 bp, Probe sequence
ttgggacatcagaaaatagtaggag

SEQ ID NO: 79798 - DNA, 25 bp, Probe sequence
tgggacatcagaaaatagtaggaga

SEQ ID NO: 79799 - DNA, 25 bp, Probe sequence
gggacatcagaaaatagtaggagaa

SEQ ID NO: 79800 - DNA, 25 bp, Probe sequence
attgggacatcagaaaatagtagga

SEQ ID NO: 79801 - DNA, 25 bp, Probe sequence
aaatcacggaataacaaatgacaaa

SEQ ID NO: 79802 - DNA, 25 bp, Probe sequence
aatcacggaataacaaatgacaaat

SEQ ID NO: 79803 - DNA, 25 bp, Probe sequence
atcacggaataacaaatgacaaatt

SEQ ID NO: 79804 - DNA, 25 bp, Probe sequence
cacggaataacaaatgacaaattca

SEQ ID NO: 79805 - DNA, 25 bp, Probe sequence
tcacggaataacaaatgacaaattc

SEQ ID NO: 79806 - DNA, 25 bp, Probe sequence
ctcctactattttctgatgtcccaa

SEQ ID NO: 79807 - DNA, 25 bp, Probe sequence
tctcctactattttctgatgtccca

SEQ ID NO: 79808 - DNA, 25 bp, Probe sequence
ttctcctactattttctgatgtccc

SEQ ID NO: 79809 - DNA, 25 bp, Probe sequence
tcctactattttctgatgtcccaat

SEQ ID NO: 79810 - DNA, 25 bp, Probe sequence
cattcaatttagttcaccatttcgt

SEQ ID NO: 79811 - DNA, 25 bp, Probe sequence
gacactcattcaatttagttcacca

SEQ ID NO: 79812 - DNA, 25 bp, Probe sequence
tgacactcattcaatttagttcacc

SEQ ID NO: 79813 - DNA, 25 bp, Probe sequence
tcattcaatttagttcaccatttcg

SEQ ID NO: 79814 - DNA, 25 bp, Probe sequence
acactcattcaatttagttcaccat

SEQ ID NO: 79815 - DNA, 25 bp, Probe sequence
aatttagttcaccatttcgtgttcc

SEQ ID NO: 79816 - DNA, 25 bp, Probe sequence
tcaatttagttcaccatttcgtgtt

SEQ ID NO: 79817 - DNA, 25 bp, Probe sequence
ttcaatttagttcaccatttcgtgt

SEQ ID NO: 79818 - DNA, 25 bp, Probe sequence
caatttagttcaccatttcgtgttc

SEQ ID NO: 79819 - DNA, 25 bp, Probe sequence
acgaaatggtgaactaaattgaatg

SEQ ID NO: 79820 - DNA, 25 bp, Probe sequence
ggtgaactaaattgaatgagtgtca

SEQ ID NO: 79821 - DNA, 25 bp, Probe sequence
tggtgaactaaattgaatgagtgtc

SEQ ID NO: 79822 - DNA, 25 bp, Probe sequence
cgaaatggtgaactaaattgaatga

SEQ ID NO: 79823 - DNA, 25 bp, Probe sequence
atggtgaactaaattgaatgagtgt

SEQ ID NO: 79824 - DNA, 25 bp, Probe sequence
acacgaaatggtgaactaaattgaa

SEQ ID NO: 79825 - DNA, 25 bp, Probe sequence
aacacgaaatggtgaactaaattga

SEQ ID NO: 79826 - DNA, 25 bp, Probe sequence
ggaacacgaaatggtgaactaaatt

SEQ ID NO: 79827 - DNA, 25 bp, Probe sequence
gaacacgaaatggtgaactaaattg

SEQ ID NO: 79828 - DNA, 25 bp, Probe sequence
attagaacgccttcatagtgtcatt

SEQ ID NO: 79829 - DNA, 25 bp, Probe sequence
aattagaacgccttcatagtgtcat

SEQ ID NO: 79830 - DNA, 25 bp, Probe sequence
ttagaacgccttcatagtgtcattg

SEQ ID NO: 79831 - DNA, 25 bp, Probe sequence
taattagaacgccttcatagtgtca

SEQ ID NO: 79832 - DNA, 25 bp, Probe sequence
gccttcatagtgtcattgagtatgt

SEQ ID NO: 79833 - DNA, 25 bp, Probe sequence
acgccttcatagtgtcattgagtat

SEQ ID NO: 79834 - DNA, 25 bp, Probe sequence
tagaacgccttcatagtgtcattga

SEQ ID NO: 79835 - DNA, 25 bp, Probe sequence
aacgccttcatagtgtcattgagta

SEQ ID NO: 79836 - DNA, 25 bp, Probe sequence
cgccttcatagtgtcattgagtatg

SEQ ID NO: 79837 - DNA, 25 bp, Probe sequence
aatgacactatgaaggcgttctaat

SEQ ID NO: 79838 - DNA, 25 bp, Probe sequence
atgacactatgaaggcgttctaatt

SEQ ID NO: 79839 - DNA, 25 bp, Probe sequence
caatgacactatgaaggcgttctaa

SEQ ID NO: 79840 - DNA, 25 bp, Probe sequence
tgacactatgaaggcgttctaatta

SEQ ID NO: 79841 - DNA, 25 bp, Probe sequence
acatactcaatgacactatgaaggc

SEQ ID NO: 79842 - DNA, 25 bp, Probe sequence
tcaatgacactatgaaggcgttcta

SEQ ID NO: 79843 - DNA, 25 bp, Probe sequence
atactcaatgacactatgaaggcgt

SEQ ID NO: 79844 - DNA, 25 bp, Probe sequence
tactcaatgacactatgaaggcgtt

SEQ ID NO: 79845 - DNA, 25 bp, Probe sequence
catactcaatgacactatgaaggcg

SEQ ID NO: 79846 - DNA, 25 bp, Probe sequence
tgaagaacctaattatttcttggga

SEQ ID NO: 79847 - DNA, 25 bp, Probe sequence
gaagaacctaattatttcttgggaa

SEQ ID NO: 79848 - DNA, 25 bp, Probe sequence
atgaagaacctaattatttcttggg

SEQ ID NO: 79849 - DNA, 25 bp, Probe sequence
agaacctaattatttcttgggaaat

SEQ ID NO: 79850 - DNA, 25 bp, Probe sequence
aagaacctaattatttcttgggaaa

SEQ ID NO: 79851 - DNA, 25 bp, Probe sequence
gaacctaattatttcttgggaaatt

SEQ ID NO: 79852 - DNA, 25 bp, Probe sequence
acctaattatttcttgggaaatttg

SEQ ID NO: 79853 - DNA, 25 bp, Probe sequence
cctaattatttcttgggaaatttga

SEQ ID NO: 79854 - DNA, 25 bp, Probe sequence
aacctaattatttcttgggaaattt

SEQ ID NO: 79855 - DNA, 25 bp, Probe sequence
tcccaagaaataattaggttcttca

SEQ ID NO: 79856 - DNA, 25 bp, Probe sequence
cccaagaaataattaggttcttcat

SEQ ID NO: 79857 - DNA, 25 bp, Probe sequence
ttcccaagaaataattaggttcttc

SEQ ID NO: 79858 - DNA, 25 bp, Probe sequence
atttcccaagaaataattaggttct

SEQ ID NO: 79859 - DNA, 25 bp, Probe sequence
tttcccaagaaataattaggttctt

SEQ ID NO: 79860 - DNA, 25 bp, Probe sequence
aatttcccaagaaataattaggttc

SEQ ID NO: 79861 - DNA, 25 bp, Probe sequence
caaatttcccaagaaataattaggt

SEQ ID NO: 79862 - DNA, 25 bp, Probe sequence
tcaaatttcccaagaaataattagg

SEQ ID NO: 79863 - DNA, 25 bp, Probe sequence
aaatttcccaagaaataattaggtt

SEQ ID NO: 79864 - DNA, 25 bp, Probe sequence
attaacaagtcactgaaatgccttt

SEQ ID NO: 79865 - DNA, 25 bp, Probe sequence
tgattatttatacagaaacagccgt

SEQ ID NO: 79866 - DNA, 25 bp, Probe sequence
gtaatcaatcatcagacataaagcg

SEQ ID NO: 79867 - DNA, 25 bp, Probe sequence
atgattatttatacagaaacagccg

SEQ ID NO: 79868 - DNA, 25 bp, Probe sequence
gattatttatacagaaacagccgta

SEQ ID NO: 79869 - DNA, 25 bp, Probe sequence
ttaacaagtcactgaaatgcctttc

SEQ ID NO: 79870 - DNA, 25 bp, Probe sequence
atcattaacaagtcactgaaatgcc

SEQ ID NO: 79871 - DNA, 25 bp, Probe sequence
cattaacaagtcactgaaatgcctt

SEQ ID NO: 79872 - DNA, 25 bp, Probe sequence
atacagaaacagccgtatttcaaga

SEQ ID NO: 79873 - DNA, 25 bp, Probe sequence
aaaggcatttcagtgacttgttaat

SEQ ID NO: 79874 - DNA, 25 bp, Probe sequence
acggctgtttctgtataaataatca

SEQ ID NO: 79875 - DNA, 25 bp, Probe sequence
cgctttatgtctgatgattgattac

SEQ ID NO: 79876 - DNA, 25 bp, Probe sequence
cggctgtttctgtataaataatcat

SEQ ID NO: 79877 - DNA, 25 bp, Probe sequence
tacggctgtttctgtataaataatc

SEQ ID NO: 79878 - DNA, 25 bp, Probe sequence
ggcatttcagtgacttgttaatgat

SEQ ID NO: 79879 - DNA, 25 bp, Probe sequence
gaaaggcatttcagtgacttgttaa

SEQ ID NO: 79880 - DNA, 25 bp, Probe sequence
aaggcatttcagtgacttgttaatg

SEQ ID NO: 79881 - DNA, 25 bp, Probe sequence
tcttgaaatacggctgtttctgtat

SEQ ID NO: 79882 - DNA, 25 bp, Probe sequence
ttcaatagaatgtaacaccgtcgtc

SEQ ID NO: 79883 - DNA, 25 bp, Probe sequence
tatagtagtcatggcacaacaactt

SEQ ID NO: 79884 - DNA, 25 bp, Probe sequence
atatagtagtcatggcacaacaact

SEQ ID NO: 79885 - DNA, 25 bp, Probe sequence
tatatagtagtcatggcacaacaac

SEQ ID NO: 79886 - DNA, 25 bp, Probe sequence
ttatctaagatgcttgagtgacgta

SEQ ID NO: 79887 - DNA, 25 bp, Probe sequence
tatctaagatgcttgagtgacgtat

SEQ ID NO: 79888 - DNA, 25 bp, Probe sequence
tcaatagaatgtaacaccgtcgtcg

SEQ ID NO: 79889 - DNA, 25 bp, Probe sequence
atatatagtagtcatggcacaacaa

SEQ ID NO: 79890 - DNA, 25 bp, Probe sequence
aatatatagtagtcatggcacaaca

SEQ ID NO: 79891 - DNA, 25 bp, Probe sequence
gacgacggtgttacattctattgaa

SEQ ID NO: 79892 - DNA, 25 bp, Probe sequence
aagttgttgtgccatgactactata

SEQ ID NO: 79893 - DNA, 25 bp, Probe sequence
agttgttgtgccatgactactatat

SEQ ID NO: 79894 - DNA, 25 bp, Probe sequence
gttgttgtgccatgactactatata

SEQ ID NO: 79895 - DNA, 25 bp, Probe sequence
tacgtcactcaagcatcttagataa

SEQ ID NO: 79896 - DNA, 25 bp, Probe sequence
atacgtcactcaagcatcttagata

SEQ ID NO: 79897 - DNA, 25 bp, Probe sequence
cgacgacggtgttacattctattga

SEQ ID NO: 79898 - DNA, 25 bp, Probe sequence
tgttgtgccatgactactatatatt

SEQ ID NO: 79899 - DNA, 25 bp, Probe sequence
ttgttgtgccatgactactatatat

SEQ ID NO: 79900 - DNA, 25 bp, Probe sequence
attccacctcctacaatcaccatag

SEQ ID NO: 79901 - DNA, 25 bp, Probe sequence
cacctcctacaatcaccatagttga

SEQ ID NO: 79902 - DNA, 25 bp, Probe sequence
tccacctcctacaatcaccatagtt

SEQ ID NO: 79903 - DNA, 25 bp, Probe sequence
ttccacctcctacaatcaccatagt

SEQ ID NO: 79904 - DNA, 25 bp, Probe sequence
ccacctcctacaatcaccatagttg

SEQ ID NO: 79905 - DNA, 25 bp, Probe sequence
actcaaattaagcaacactcctact

SEQ ID NO: 79906 - DNA, 25 bp, Probe sequence
cactcaaattaagcaacactcctac

SEQ ID NO: 79907 - DNA, 25 bp, Probe sequence
tcactcaaattaagcaacactccta

SEQ ID NO: 79908 - DNA, 25 bp, Probe sequence
aatcactcaaattaagcaacactcc

SEQ ID NO: 79909 - DNA, 25 bp, Probe sequence
ctatggtgattgtaggaggtggaat

SEQ ID NO: 79910 - DNA, 25 bp, Probe sequence
tcaactatggtgattgtaggaggtg

SEQ ID NO: 79911 - DNA, 25 bp, Probe sequence
actatggtgattgtaggaggtggaa

SEQ ID NO: 79912 - DNA, 25 bp, Probe sequence
aactatggtgattgtaggaggtgga

SEQ ID NO: 79913 - DNA, 25 bp, Probe sequence
caactatggtgattgtaggaggtgg

SEQ ID NO: 79914 - DNA, 25 bp, Probe sequence
ggagtgttgcttaatttgagtgatt

SEQ ID NO: 79915 - DNA, 25 bp, Probe sequence
taggagtgttgcttaatttgagtga

SEQ ID NO: 79916 - DNA, 25 bp, Probe sequence
gtaggagtgttgcttaatttgagtg

SEQ ID NO: 79917 - DNA, 25 bp, Probe sequence
agtaggagtgttgcttaatttgagt

SEQ ID NO: 79918 - DNA, 25 bp, Probe sequence
ccgttatataggtacaagtgcttaa

SEQ ID NO: 79919 - DNA, 25 bp, Probe sequence
ggtacaagtgcttaattgatagaga

SEQ ID NO: 79920 - DNA, 25 bp, Probe sequence
aggtacaagtgcttaattgatagag

SEQ ID NO: 79921 - DNA, 25 bp, Probe sequence
acaaagaaactcaaacaatccgaat

SEQ ID NO: 79922 - DNA, 25 bp, Probe sequence
aacagcacaaagaaactcaaacaat

SEQ ID NO: 79923 - DNA, 25 bp, Probe sequence
cacaaagaaactcaaacaatccgaa

SEQ ID NO: 79924 - DNA, 25 bp, Probe sequence
aaacagcacaaagaaactcaaacaa

SEQ ID NO: 79925 - DNA, 25 bp, Probe sequence
acagcacaaagaaactcaaacaatc

SEQ ID NO: 79926 - DNA, 25 bp, Probe sequence
accgttatataggtacaagtgctta

SEQ ID NO: 79927 - DNA, 25 bp, Probe sequence
ttaagcacttgtacctatataacgg

SEQ ID NO: 79928 - DNA, 25 bp, Probe sequence
ctctatcaattaagcacttgtacct

SEQ ID NO: 79929 - DNA, 25 bp, Probe sequence
tctctatcaattaagcacttgtacc

SEQ ID NO: 79930 - DNA, 25 bp, Probe sequence
attcggattgtttgagtttctttgt

SEQ ID NO: 79931 - DNA, 25 bp, Probe sequence
attgtttgagtttctttgtgctgtt

SEQ ID NO: 79932 - DNA, 25 bp, Probe sequence
ttgtttgagtttctttgtgctgttt

SEQ ID NO: 79933 - DNA, 25 bp, Probe sequence
ttcggattgtttgagtttctttgtg

SEQ ID NO: 79934 - DNA, 25 bp, Probe sequence
gattgtttgagtttctttgtgctgt

SEQ ID NO: 79935 - DNA, 25 bp, Probe sequence
taagcacttgtacctatataacggt

SEQ ID NO: 79936 - DNA, 25 bp, Probe sequence
cccgtcataataacttcagacaaac

SEQ ID NO: 79937 - DNA, 25 bp, Probe sequence
tcccgtcataataacttcagacaaa

SEQ ID NO: 79938 - DNA, 25 bp, Probe sequence
ctcccgtcataataacttcagacaa

SEQ ID NO: 79939 - DNA, 25 bp, Probe sequence
tagactcccgtcataataacttcag

SEQ ID NO: 79940 - DNA, 25 bp, Probe sequence
gactcccgtcataataacttcagac

SEQ ID NO: 79941 - DNA, 25 bp, Probe sequence
agactcccgtcataataacttcaga

SEQ ID NO: 79942 - DNA, 25 bp, Probe sequence
ttagactcccgtcataataacttca

SEQ ID NO: 79943 - DNA, 25 bp, Probe sequence
actcccgtcataataacttcagaca

SEQ ID NO: 79944 - DNA, 25 bp, Probe sequence
tttagactcccgtcataataacttc

SEQ ID NO: 79945 - DNA, 25 bp, Probe sequence
tttgtctgaagttattatgacggga

SEQ ID NO: 79946 - DNA, 25 bp, Probe sequence
gtttgtctgaagttattatgacggg

SEQ ID NO: 79947 - DNA, 25 bp, Probe sequence
ttgtctgaagttattatgacgggag

SEQ ID NO: 79948 - DNA, 25 bp, Probe sequence
ctgaagttattatgacgggagtcta

SEQ ID NO: 79949 - DNA, 25 bp, Probe sequence
tctgaagttattatgacgggagtct

SEQ ID NO: 79950 - DNA, 25 bp, Probe sequence
gtctgaagttattatgacgggagtc

SEQ ID NO: 79951 - DNA, 25 bp, Probe sequence
tgaagttattatgacgggagtctaa

SEQ ID NO: 79952 - DNA, 25 bp, Probe sequence
tgtctgaagttattatgacgggagt

SEQ ID NO: 79953 - DNA, 25 bp, Probe sequence
gaagttattatgacgggagtctaaa

SEQ ID NO: 79954 - DNA, 25 bp, Probe sequence
ttacaagcgttacctgactaatgtt

SEQ ID NO: 79955 - DNA, 25 bp, Probe sequence
acttcccgttcatcttaaaccatat

SEQ ID NO: 79956 - DNA, 25 bp, Probe sequence
ttcccgttcatcttaaaccatatct

SEQ ID NO: 79957 - DNA, 25 bp, Probe sequence
aacttcccgttcatcttaaaccata

SEQ ID NO: 79958 - DNA, 25 bp, Probe sequence
taacttcccgttcatcttaaaccat

SEQ ID NO: 79959 - DNA, 25 bp, Probe sequence
ataacttcccgttcatcttaaacca

SEQ ID NO: 79960 - DNA, 25 bp, Probe sequence
tcccgttcatcttaaaccatatctg

SEQ ID NO: 79961 - DNA, 25 bp, Probe sequence
cttcccgttcatcttaaaccatatc

SEQ ID NO: 79962 - DNA, 25 bp, Probe sequence
cccgttcatcttaaaccatatctgt

SEQ ID NO: 79963 - DNA, 25 bp, Probe sequence
aacattagtcaggtaacgcttgtaa

SEQ ID NO: 79964 - DNA, 25 bp, Probe sequence
atatggtttaagatgaacgggaagt

SEQ ID NO: 79965 - DNA, 25 bp, Probe sequence
tggtttaagatgaacgggaagttat

SEQ ID NO: 79966 - DNA, 25 bp, Probe sequence
atggtttaagatgaacgggaagtta

SEQ ID NO: 79967 - DNA, 25 bp, Probe sequence
tatggtttaagatgaacgggaagtt

SEQ ID NO: 79968 - DNA, 25 bp, Probe sequence
agatatggtttaagatgaacgggaa

SEQ ID NO: 79969 - DNA, 25 bp, Probe sequence
cagatatggtttaagatgaacggga

SEQ ID NO: 79970 - DNA, 25 bp, Probe sequence
gatatggtttaagatgaacgggaag

SEQ ID NO: 79971 - DNA, 25 bp, Probe sequence
acagatatggtttaagatgaacggg

SEQ ID NO: 79972 - DNA, 25 bp, Probe sequence
cgcatacgacatcattcattattca

SEQ ID NO: 79973 - DNA, 25 bp, Probe sequence
gcatacgacatcattcattattcat

SEQ ID NO: 79974 - DNA, 25 bp, Probe sequence
atggaaagcgtttacaatagaatct

SEQ ID NO: 79975 - DNA, 25 bp, Probe sequence
tcgcatacgacatcattcattattc

SEQ ID NO: 79976 - DNA, 25 bp, Probe sequence
catcgcatacgacatcattcattat

SEQ ID NO: 79977 - DNA, 25 bp, Probe sequence
acatcgcatacgacatcattcatta

SEQ ID NO: 79978 - DNA, 25 bp, Probe sequence
atcgcatacgacatcattcattatt

SEQ ID NO: 79979 - DNA, 25 bp, Probe sequence
gacatggaaagcgtttacaatagaa

SEQ ID NO: 79980 - DNA, 25 bp, Probe sequence
attatcagacatggaaagcgtttac

SEQ ID NO: 79981 - DNA, 25 bp, Probe sequence
tgaataatgaatgatgtcgtatgcg

SEQ ID NO: 79982 - DNA, 25 bp, Probe sequence
atgaataatgaatgatgtcgtatgc

SEQ ID NO: 79983 - DNA, 25 bp, Probe sequence
agattctattgtaaacgctttccat

SEQ ID NO: 79984 - DNA, 25 bp, Probe sequence
ataatgaatgatgtcgtatgcgatg

SEQ ID NO: 79985 - DNA, 25 bp, Probe sequence
gaataatgaatgatgtcgtatgcga

SEQ ID NO: 79986 - DNA, 25 bp, Probe sequence
taatgaatgatgtcgtatgcgatgt

SEQ ID NO: 79987 - DNA, 25 bp, Probe sequence
aataatgaatgatgtcgtatgcgat

SEQ ID NO: 79988 - DNA, 25 bp, Probe sequence
ttctattgtaaacgctttccatgtc

SEQ ID NO: 79989 - DNA, 25 bp, Probe sequence
gtaaacgctttccatgtctgataat

SEQ ID NO: 79990 - DNA, 25 bp, Probe sequence
attccgcaaacttatctcacaaatc

SEQ ID NO: 79991 - DNA, 25 bp, Probe sequence
caaagttcagttccctcagtatgta

SEQ ID NO: 79992 - DNA, 25 bp, Probe sequence
gcaaacttatctcacaaatccatct

SEQ ID NO: 79993 - DNA, 25 bp, Probe sequence
cattccgcaaacttatctcacaaat

SEQ ID NO: 79994 - DNA, 25 bp, Probe sequence
atcaaagttcagttccctcagtatg

SEQ ID NO: 79995 - DNA, 25 bp, Probe sequence
catcaaagttcagttccctcagtat

SEQ ID NO: 79996 - DNA, 25 bp, Probe sequence
atacattccgcaaacttatctcaca

SEQ ID NO: 79997 - DNA, 25 bp, Probe sequence
aaagttcagttccctcagtatgtat

SEQ ID NO: 79998 - DNA, 25 bp, Probe sequence
cgcaaacttatctcacaaatccatc

SEQ ID NO: 79999 - DNA, 25 bp, Probe sequence
tacatactgagggaactgaactttg

SEQ ID NO: 80000 - DNA, 25 bp, Probe sequence
gatttgtgagataagtttgcggaat

SEQ ID NO: 80001 - DNA, 25 bp, Probe sequence
atttgtgagataagtttgcggaatg

SEQ ID NO: 80002 - DNA, 25 bp, Probe sequence
agatggatttgtgagataagtttgc

SEQ ID NO: 80003 - DNA, 25 bp, Probe sequence
atactgagggaactgaactttgatg

SEQ ID NO: 80004 - DNA, 25 bp, Probe sequence
catactgagggaactgaactttgat

SEQ ID NO: 80005 - DNA, 25 bp, Probe sequence
atacatactgagggaactgaacttt

SEQ ID NO: 80006 - DNA, 25 bp, Probe sequence
tgtgagataagtttgcggaatgtat

SEQ ID NO: 80007 - DNA, 25 bp, Probe sequence
ttgtgagataagtttgcggaatgta

SEQ ID NO: 80008 - DNA, 25 bp, Probe sequence
acacacatattccatcgtaattcaa

SEQ ID NO: 80009 - DNA, 25 bp, Probe sequence
tacacacatattccatcgtaattca

SEQ ID NO: 80010 - DNA, 25 bp, Probe sequence
ttcaaatcccttcacccaaataatg

SEQ ID NO: 80011 - DNA, 25 bp, Probe sequence
tttcaaatcccttcacccaaataat

SEQ ID NO: 80012 - DNA, 25 bp, Probe sequence
atacacacatattccatcgtaattc

SEQ ID NO: 80013 - DNA, 25 bp, Probe sequence
cacacatattccatcgtaattcaaa

SEQ ID NO: 80014 - DNA, 25 bp, Probe sequence
aatacacacatattccatcgtaatt

SEQ ID NO: 80015 - DNA, 25 bp, Probe sequence
tcaaatcccttcacccaaataatgg

SEQ ID NO: 80016 - DNA, 25 bp, Probe sequence
caaatcccttcacccaaataatggt

SEQ ID NO: 80017 - DNA, 25 bp, Probe sequence
ttgaattacgatggaatatgtgtgt

SEQ ID NO: 80018 - DNA, 25 bp, Probe sequence
tgaattacgatggaatatgtgtgta

SEQ ID NO: 80019 - DNA, 25 bp, Probe sequence
cattatttgggtgaagggatttgaa

SEQ ID NO: 80020 - DNA, 25 bp, Probe sequence
attatttgggtgaagggatttgaaa

SEQ ID NO: 80021 - DNA, 25 bp, Probe sequence
gaattacgatggaatatgtgtgtat

SEQ ID NO: 80022 - DNA, 25 bp, Probe sequence
tttgaattacgatggaatatgtgtg

SEQ ID NO: 80023 - DNA, 25 bp, Probe sequence
aattacgatggaatatgtgtgtatt

SEQ ID NO: 80024 - DNA, 25 bp, Probe sequence
ccattatttgggtgaagggatttga

SEQ ID NO: 80025 - DNA, 25 bp, Probe sequence
accattatttgggtgaagggatttg

SEQ ID NO: 80026 - DNA, 25 bp, Probe sequence
tgaaatatactacaggagtgacacg

SEQ ID NO: 80027 - DNA, 25 bp, Probe sequence
cgtttgaaatatactacaggagtga

SEQ ID NO: 80028 - DNA, 25 bp, Probe sequence
ttgaaatatactacaggagtgacac

SEQ ID NO: 80029 - DNA, 25 bp, Probe sequence
tttgaaatatactacaggagtgaca

SEQ ID NO: 80030 - DNA, 25 bp, Probe sequence
gaaatatactacaggagtgacacgt

SEQ ID NO: 80031 - DNA, 25 bp, Probe sequence
gtttgaaatatactacaggagtgac

SEQ ID NO: 80032 - DNA, 25 bp, Probe sequence
aaatatactacaggagtgacacgta

SEQ ID NO: 80033 - DNA, 25 bp, Probe sequence
acgtttgaaatatactacaggagtg

SEQ ID NO: 80034 - DNA, 25 bp, Probe sequence
aacgtttgaaatatactacaggagt

SEQ ID NO: 80035 - DNA, 25 bp, Probe sequence
cgtgtcactcctgtagtatatttca

SEQ ID NO: 80036 - DNA, 25 bp, Probe sequence
tcactcctgtagtatatttcaaacg

SEQ ID NO: 80037 - DNA, 25 bp, Probe sequence
gtgtcactcctgtagtatatttcaa

SEQ ID NO: 80038 - DNA, 25 bp, Probe sequence
tgtcactcctgtagtatatttcaaa

SEQ ID NO: 80039 - DNA, 25 bp, Probe sequence
acgtgtcactcctgtagtatatttc

SEQ ID NO: 80040 - DNA, 25 bp, Probe sequence
gtcactcctgtagtatatttcaaac

SEQ ID NO: 80041 - DNA, 25 bp, Probe sequence
tacgtgtcactcctgtagtatattt

SEQ ID NO: 80042 - DNA, 25 bp, Probe sequence
cactcctgtagtatatttcaaacgt

SEQ ID NO: 80043 - DNA, 25 bp, Probe sequence
actcctgtagtatatttcaaacgtt

SEQ ID NO: 80044 - DNA, 25 bp, Probe sequence
tggtgtatctatgctaattcctgtt

SEQ ID NO: 80045 - DNA, 25 bp, Probe sequence
ttggtgtatctatgctaattcctgt

SEQ ID NO: 80046 - DNA, 25 bp, Probe sequence
attggtgtatctatgctaattcctg

SEQ ID NO: 80047 - DNA, 25 bp, Probe sequence
gattggtgtatctatgctaattcct

SEQ ID NO: 80048 - DNA, 25 bp, Probe sequence
ggtgtatctatgctaattcctgtta

SEQ ID NO: 80049 - DNA, 25 bp, Probe sequence
ggattggtgtatctatgctaattcc

SEQ ID NO: 80050 - DNA, 25 bp, Probe sequence
cctcgcttctacttcaatttaacaa

SEQ ID NO: 80051 - DNA, 25 bp, Probe sequence
gggattggtgtatctatgctaattc

SEQ ID NO: 80052 - DNA, 25 bp, Probe sequence
ccctcgcttctacttcaatttaaca

SEQ ID NO: 80053 - DNA, 25 bp, Probe sequence
acaggaattagcatagatacaccaa

SEQ ID NO: 80054 - DNA, 25 bp, Probe sequence
aacaggaattagcatagatacacca

SEQ ID NO: 80055 - DNA, 25 bp, Probe sequence
caggaattagcatagatacaccaat

SEQ ID NO: 80056 - DNA, 25 bp, Probe sequence
aggaattagcatagatacaccaatc

SEQ ID NO: 80057 - DNA, 25 bp, Probe sequence
taacaggaattagcatagatacacc

SEQ ID NO: 80058 - DNA, 25 bp, Probe sequence
ggaattagcatagatacaccaatcc

SEQ ID NO: 80059 - DNA, 25 bp, Probe sequence
ttgttaaattgaagtagaagcgagg

SEQ ID NO: 80060 - DNA, 25 bp, Probe sequence
gaattagcatagatacaccaatccc

SEQ ID NO: 80061 - DNA, 25 bp, Probe sequence
tgttaaattgaagtagaagcgaggg

SEQ ID NO: 80062 - DNA, 25 bp, Probe sequence
ttccatctgtccgcttcttaataga

SEQ ID NO: 80063 - DNA, 25 bp, Probe sequence
tttccatctgtccgcttcttaatag

SEQ ID NO: 80064 - DNA, 25 bp, Probe sequence
atctgtccgcttcttaatagaactg

SEQ ID NO: 80065 - DNA, 25 bp, Probe sequence
catctgtccgcttcttaatagaact

SEQ ID NO: 80066 - DNA, 25 bp, Probe sequence
ccatctgtccgcttcttaatagaac

SEQ ID NO: 80067 - DNA, 25 bp, Probe sequence
tccatctgtccgcttcttaatagaa

SEQ ID NO: 80068 - DNA, 25 bp, Probe sequence
ttttccatctgtccgcttcttaata

SEQ ID NO: 80069 - DNA, 25 bp, Probe sequence
cttttccatctgtccgcttcttaat

SEQ ID NO: 80070 - DNA, 25 bp, Probe sequence
atcttttccatctgtccgcttctta

SEQ ID NO: 80071 - DNA, 25 bp, Probe sequence
tctattaagaagcggacagatggaa

SEQ ID NO: 80072 - DNA, 25 bp, Probe sequence
ctattaagaagcggacagatggaaa

SEQ ID NO: 80073 - DNA, 25 bp, Probe sequence
agttctattaagaagcggacagatg

SEQ ID NO: 80074 - DNA, 25 bp, Probe sequence
cagttctattaagaagcggacagat

SEQ ID NO: 80075 - DNA, 25 bp, Probe sequence
ttctattaagaagcggacagatgga

SEQ ID NO: 80076 - DNA, 25 bp, Probe sequence
gttctattaagaagcggacagatgg

SEQ ID NO: 80077 - DNA, 25 bp, Probe sequence
tattaagaagcggacagatggaaaa

SEQ ID NO: 80078 - DNA, 25 bp, Probe sequence
attaagaagcggacagatggaaaag

SEQ ID NO: 80079 - DNA, 25 bp, Probe sequence
taagaagcggacagatggaaaagat

SEQ ID NO: 80080 - DNA, 25 bp, Probe sequence
tttagtgtatttatctcgaaatcga

SEQ ID NO: 80081 - DNA, 25 bp, Probe sequence
ttttagtgtatttatctcgaaatcg

SEQ ID NO: 80082 - DNA, 25 bp, Probe sequence
tcgatttcgagataaatacactaaa

SEQ ID NO: 80083 - DNA, 25 bp, Probe sequence
cgatttcgagataaatacactaaaa

SEQ ID NO: 80084 - DNA, 25 bp, Probe sequence
tgaatggatttaatgtcaagatacg

SEQ ID NO: 80085 - DNA, 25 bp, Probe sequence
gctgaatggatttaatgtcaagata

SEQ ID NO: 80086 - DNA, 25 bp, Probe sequence
tggatttaatgtcaagatacgtgtt

SEQ ID NO: 80087 - DNA, 25 bp, Probe sequence
agctgaatggatttaatgtcaagat

SEQ ID NO: 80088 - DNA, 25 bp, Probe sequence
atggatttaatgtcaagatacgtgt

SEQ ID NO: 80089 - DNA, 25 bp, Probe sequence
aaacgactacataaatgcggcaatg

SEQ ID NO: 80090 - DNA, 25 bp, Probe sequence
tagctgaatggatttaatgtcaaga

SEQ ID NO: 80091 - DNA, 25 bp, Probe sequence
ggatttaatgtcaagatacgtgttt

SEQ ID NO: 80092 - DNA, 25 bp, Probe sequence
aatggatttaatgtcaagatacgtg

SEQ ID NO: 80093 - DNA, 25 bp, Probe sequence
tatcttgacattaaatccattcagc

SEQ ID NO: 80094 - DNA, 25 bp, Probe sequence
cgtatcttgacattaaatccattca

SEQ ID NO: 80095 - DNA, 25 bp, Probe sequence
atcttgacattaaatccattcagct

SEQ ID NO: 80096 - DNA, 25 bp, Probe sequence
aacacgtatcttgacattaaatcca

SEQ ID NO: 80097 - DNA, 25 bp, Probe sequence
acacgtatcttgacattaaatccat

SEQ ID NO: 80098 - DNA, 25 bp, Probe sequence
tcttgacattaaatccattcagcta

SEQ ID NO: 80099 - DNA, 25 bp, Probe sequence
cattgccgcatttatgtagtcgttt

SEQ ID NO: 80100 - DNA, 25 bp, Probe sequence
aaacacgtatcttgacattaaatcc

SEQ ID NO: 80101 - DNA, 25 bp, Probe sequence
cacgtatcttgacattaaatccatt

SEQ ID NO: 80102 - DNA, 25 bp, Probe sequence
tttcaaactttatgctatcaattca

SEQ ID NO: 80103 - DNA, 25 bp, Probe sequence
gctatcaattcattttcttttctgg

SEQ ID NO: 80104 - DNA, 25 bp, Probe sequence
tcaaactttatgctatcaattcatt

SEQ ID NO: 80105 - DNA, 25 bp, Probe sequence
ttcaaactttatgctatcaattcat

SEQ ID NO: 80106 - DNA, 25 bp, Probe sequence
tgctatcaattcattttcttttctg

SEQ ID NO: 80107 - DNA, 25 bp, Probe sequence
caaactttatgctatcaattcattt

SEQ ID NO: 80108 - DNA, 25 bp, Probe sequence
catttcaaactttatgctatcaatt

SEQ ID NO: 80109 - DNA, 25 bp, Probe sequence
ctatcaattcattttcttttctggt

SEQ ID NO: 80110 - DNA, 25 bp, Probe sequence
tttgttcgcatcaatataaaattgc

SEQ ID NO: 80111 - DNA, 25 bp, Probe sequence
tgaattgatagcataaagtttgaaa

SEQ ID NO: 80112 - DNA, 25 bp, Probe sequence
ccagaaaagaaaatgaattgatagc

SEQ ID NO: 80113 - DNA, 25 bp, Probe sequence
atgaattgatagcataaagtttgaa

SEQ ID NO: 80114 - DNA, 25 bp, Probe sequence
aatgaattgatagcataaagtttga

SEQ ID NO: 80115 - DNA, 25 bp, Probe sequence
cagaaaagaaaatgaattgatagca

SEQ ID NO: 80116 - DNA, 25 bp, Probe sequence
aattgatagcataaagtttgaaatg

SEQ ID NO: 80117 - DNA, 25 bp, Probe sequence
aaatgaattgatagcataaagtttg

SEQ ID NO: 80118 - DNA, 25 bp, Probe sequence
accagaaaagaaaatgaattgatag

SEQ ID NO: 80119 - DNA, 25 bp, Probe sequence
gcaattttatattgatgcgaacaaa

SEQ ID NO: 80120 - DNA, 25 bp, Probe sequence
attcatttatgtaatcgcaggcttt

SEQ ID NO: 80121 - DNA, 25 bp, Probe sequence
gattcatttatgtaatcgcaggctt

SEQ ID NO: 80122 - DNA, 25 bp, Probe sequence
aaacctgcgattcatttatgtaatc

SEQ ID NO: 80123 - DNA, 25 bp, Probe sequence
ttcatttatgtaatcgcaggctttt

SEQ ID NO: 80124 - DNA, 25 bp, Probe sequence
aaaacctgcgattcatttatgtaat

SEQ ID NO: 80125 - DNA, 25 bp, Probe sequence
aaagcctgcgattacataaatgaat

SEQ ID NO: 80126 - DNA, 25 bp, Probe sequence
aagcctgcgattacataaatgaatc

SEQ ID NO: 80127 - DNA, 25 bp, Probe sequence
gattacataaatgaatcgcaggttt

SEQ ID NO: 80128 - DNA, 25 bp, Probe sequence
aaaagcctgcgattacataaatgaa

SEQ ID NO: 80129 - DNA, 25 bp, Probe sequence
attacataaatgaatcgcaggtttt

SEQ ID NO: 80130 - DNA, 25 bp, Probe sequence
aaaagactaaagtaatccgtttgca

SEQ ID NO: 80131 - DNA, 25 bp, Probe sequence
gtaatccgtttgcaattcgctataa

SEQ ID NO: 80132 - DNA, 25 bp, Probe sequence
actaaagtaatccgtttgcaattcg

SEQ ID NO: 80133 - DNA, 25 bp, Probe sequence
aaagactaaagtaatccgtttgcaa

SEQ ID NO: 80134 - DNA, 25 bp, Probe sequence
agactaaagtaatccgtttgcaatt

SEQ ID NO: 80135 - DNA, 25 bp, Probe sequence
aagactaaagtaatccgtttgcaat

SEQ ID NO: 80136 - DNA, 25 bp, Probe sequence
gactaaagtaatccgtttgcaattc

SEQ ID NO: 80137 - DNA, 25 bp, Probe sequence
agtaatccgtttgcaattcgctata

SEQ ID NO: 80138 - DNA, 25 bp, Probe sequence
aaacacacttttgaattttggaaaa

SEQ ID NO: 80139 - DNA, 25 bp, Probe sequence
tgcaaacggattactttagtctttt

SEQ ID NO: 80140 - DNA, 25 bp, Probe sequence
ttatagcgaattgcaaacggattac

SEQ ID NO: 80141 - DNA, 25 bp, Probe sequence
cgaattgcaaacggattactttagt

SEQ ID NO: 80142 - DNA, 25 bp, Probe sequence
ttgcaaacggattactttagtcttt

SEQ ID NO: 80143 - DNA, 25 bp, Probe sequence
attgcaaacggattactttagtctt

SEQ ID NO: 80144 - DNA, 25 bp, Probe sequence
aattgcaaacggattactttagtct

SEQ ID NO: 80145 - DNA, 25 bp, Probe sequence
gaattgcaaacggattactttagtc

SEQ ID NO: 80146 - DNA, 25 bp, Probe sequence
tatagcgaattgcaaacggattact

SEQ ID NO: 80147 - DNA, 25 bp, Probe sequence
gttatagcgaattgcaaacggatta

SEQ ID NO: 80148 - DNA, 25 bp, Probe sequence
catctattcaactgattgtagtgcg

SEQ ID NO: 80149 - DNA, 25 bp, Probe sequence
tcatctattcaactgattgtagtgc

SEQ ID NO: 80150 - DNA, 25 bp, Probe sequence
cattattgcctaacctgtttgagat

SEQ ID NO: 80151 - DNA, 25 bp, Probe sequence
ttattgcctaacctgtttgagatat

SEQ ID NO: 80152 - DNA, 25 bp, Probe sequence
attattgcctaacctgtttgagata

SEQ ID NO: 80153 - DNA, 25 bp, Probe sequence
ttgcctaacctgtttgagatatatt

SEQ ID NO: 80154 - DNA, 25 bp, Probe sequence
tattgcctaacctgtttgagatata

SEQ ID NO: 80155 - DNA, 25 bp, Probe sequence
attgcctaacctgtttgagatatat

SEQ ID NO: 80156 - DNA, 25 bp, Probe sequence
tgatagccgcttcattgatgatgtg

SEQ ID NO: 80157 - DNA, 25 bp, Probe sequence
cgcactacaatcagttgaatagatg

SEQ ID NO: 80158 - DNA, 25 bp, Probe sequence
gcactacaatcagttgaatagatga

SEQ ID NO: 80159 - DNA, 25 bp, Probe sequence
atctcaaacaggttaggcaataatg

SEQ ID NO: 80160 - DNA, 25 bp, Probe sequence
tatctcaaacaggttaggcaataat

SEQ ID NO: 80161 - DNA, 25 bp, Probe sequence
atatctcaaacaggttaggcaataa

SEQ ID NO: 80162 - DNA, 25 bp, Probe sequence
aatatatctcaaacaggttaggcaa

SEQ ID NO: 80163 - DNA, 25 bp, Probe sequence
tatatctcaaacaggttaggcaata

SEQ ID NO: 80164 - DNA, 25 bp, Probe sequence
atatatctcaaacaggttaggcaat

SEQ ID NO: 80165 - DNA, 25 bp, Probe sequence
cacatcatcaatgaagcggctatca

SEQ ID NO: 80166 - DNA, 25 bp, Probe sequence
attacactggatatagcattcggag

SEQ ID NO: 80167 - DNA, 25 bp, Probe sequence
cattacactggatatagcattcgga

SEQ ID NO: 80168 - DNA, 25 bp, Probe sequence
cacattacactggatatagcattcg

SEQ ID NO: 80169 - DNA, 25 bp, Probe sequence
acattacactggatatagcattcgg

SEQ ID NO: 80170 - DNA, 25 bp, Probe sequence
acacattacactggatatagcattc

SEQ ID NO: 80171 - DNA, 25 bp, Probe sequence
ttacactggatatagcattcggagg

SEQ ID NO: 80172 - DNA, 25 bp, Probe sequence
aacacattacactggatatagcatt

SEQ ID NO: 80173 - DNA, 25 bp, Probe sequence
aaacacattacactggatatagcat

SEQ ID NO: 80174 - DNA, 25 bp, Probe sequence
tacactggatatagcattcggaggc

SEQ ID NO: 80175 - DNA, 25 bp, Probe sequence
ctccgaatgctatatccagtgtaat

SEQ ID NO: 80176 - DNA, 25 bp, Probe sequence
cgaatgctatatccagtgtaatgtg

SEQ ID NO: 80177 - DNA, 25 bp, Probe sequence
tccgaatgctatatccagtgtaatg

SEQ ID NO: 80178 - DNA, 25 bp, Probe sequence
ccgaatgctatatccagtgtaatgt

SEQ ID NO: 80179 - DNA, 25 bp, Probe sequence
gaatgctatatccagtgtaatgtgt

SEQ ID NO: 80180 - DNA, 25 bp, Probe sequence
aatgctatatccagtgtaatgtgtt

SEQ ID NO: 80181 - DNA, 25 bp, Probe sequence
cctccgaatgctatatccagtgtaa

SEQ ID NO: 80182 - DNA, 25 bp, Probe sequence
atgctatatccagtgtaatgtgttt

SEQ ID NO: 80183 - DNA, 25 bp, Probe sequence
gcctccgaatgctatatccagtgta

SEQ ID NO: 80184 - DNA, 25 bp, Probe sequence
actcaatatattcatccattagcgt

SEQ ID NO: 80185 - DNA, 25 bp, Probe sequence
ttacaatctccaccaatgacacgtc

SEQ ID NO: 80186 - DNA, 25 bp, Probe sequence
cactcaatatattcatccattagcg

SEQ ID NO: 80187 - DNA, 25 bp, Probe sequence
caatcaagactgttttccactcaat

SEQ ID NO: 80188 - DNA, 25 bp, Probe sequence
ccactcaatatattcatccattagc

SEQ ID NO: 80189 - DNA, 25 bp, Probe sequence
aatcaagactgttttccactcaata

SEQ ID NO: 80190 - DNA, 25 bp, Probe sequence
atcaagactgttttccactcaatat

SEQ ID NO: 80191 - DNA, 25 bp, Probe sequence
ttttacaatctccaccaatgacacg

SEQ ID NO: 80192 - DNA, 25 bp, Probe sequence
tttacaatctccaccaatgacacgt

SEQ ID NO: 80193 - DNA, 25 bp, Probe sequence
acgctaatggatgaatatattgagt

SEQ ID NO: 80194 - DNA, 25 bp, Probe sequence
gacgtgtcattggtggagattgtaa

SEQ ID NO: 80195 - DNA, 25 bp, Probe sequence
cgctaatggatgaatatattgagtg

SEQ ID NO: 80196 - DNA, 25 bp, Probe sequence
attgagtggaaaacagtcttgattg

SEQ ID NO: 80197 - DNA, 25 bp, Probe sequence
gctaatggatgaatatattgagtgg

SEQ ID NO: 80198 - DNA, 25 bp, Probe sequence
tattgagtggaaaacagtcttgatt

SEQ ID NO: 80199 - DNA, 25 bp, Probe sequence
atattgagtggaaaacagtcttgat

SEQ ID NO: 80200 - DNA, 25 bp, Probe sequence
cgtgtcattggtggagattgtaaaa

SEQ ID NO: 80201 - DNA, 25 bp, Probe sequence
acgtgtcattggtggagattgtaaa

SEQ ID NO: 80202 - DNA, 25 bp, Probe sequence
tgcacatatattgtcacgttagatt

SEQ ID NO: 80203 - DNA, 25 bp, Probe sequence
ttgcacatatattgtcacgttagat

SEQ ID NO: 80204 - DNA, 25 bp, Probe sequence
ttgtcacgttagatttcattacaca

SEQ ID NO: 80205 - DNA, 25 bp, Probe sequence
tttgcacatatattgtcacgttaga

SEQ ID NO: 80206 - DNA, 25 bp, Probe sequence
tgtcacgttagatttcattacacat

SEQ ID NO: 80207 - DNA, 25 bp, Probe sequence
aaatttgcacatatattgtcacgtt

SEQ ID NO: 80208 - DNA, 25 bp, Probe sequence
atttgcacatatattgtcacgttag

SEQ ID NO: 80209 - DNA, 25 bp, Probe sequence
attgtcacgttagatttcattacac

SEQ ID NO: 80210 - DNA, 25 bp, Probe sequence
gcacatatattgtcacgttagattt

SEQ ID NO: 80211 - DNA, 25 bp, Probe sequence
atctaacgtgacaatatatgtgcaa

SEQ ID NO: 80212 - DNA, 25 bp, Probe sequence
aatctaacgtgacaatatatgtgca

SEQ ID NO: 80213 - DNA, 25 bp, Probe sequence
tgtgtaatgaaatctaacgtgacaa

SEQ ID NO: 80214 - DNA, 25 bp, Probe sequence
tctaacgtgacaatatatgtgcaaa

SEQ ID NO: 80215 - DNA, 25 bp, Probe sequence
atgtgtaatgaaatctaacgtgaca

SEQ ID NO: 80216 - DNA, 25 bp, Probe sequence
aacgtgacaatatatgtgcaaattt

SEQ ID NO: 80217 - DNA, 25 bp, Probe sequence
ctaacgtgacaatatatgtgcaaat

SEQ ID NO: 80218 - DNA, 25 bp, Probe sequence
gtgtaatgaaatctaacgtgacaat

SEQ ID NO: 80219 - DNA, 25 bp, Probe sequence
aaatctaacgtgacaatatatgtgc

SEQ ID NO: 80220 - DNA, 25 bp, Probe sequence
acaagacaaccatgttaattcactt

SEQ ID NO: 80221 - DNA, 25 bp, Probe sequence
caagacaaccatgttaattcactta

SEQ ID NO: 80222 - DNA, 25 bp, Probe sequence
ttcacttaacataacatgctaacat

SEQ ID NO: 80223 - DNA, 25 bp, Probe sequence
attcacttaacataacatgctaaca

SEQ ID NO: 80224 - DNA, 25 bp, Probe sequence
aacctcttagggacaatttacatcg

SEQ ID NO: 80225 - DNA, 25 bp, Probe sequence
cctcttagggacaatttacatcgtc

SEQ ID NO: 80226 - DNA, 25 bp, Probe sequence
aaacctcttagggacaatttacatc

SEQ ID NO: 80227 - DNA, 25 bp, Probe sequence
aagacaaccatgttaattcacttaa

SEQ ID NO: 80228 - DNA, 25 bp, Probe sequence
acctcttagggacaatttacatcgt

SEQ ID NO: 80229 - DNA, 25 bp, Probe sequence
aagtgaattaacatggttgtcttgt

SEQ ID NO: 80230 - DNA, 25 bp, Probe sequence
taagtgaattaacatggttgtcttg

SEQ ID NO: 80231 - DNA, 25 bp, Probe sequence
tgttagcatgttatgttaagtgaat

SEQ ID NO: 80232 - DNA, 25 bp, Probe sequence
atgttagcatgttatgttaagtgaa

SEQ ID NO: 80233 - DNA, 25 bp, Probe sequence
cgatgtaaattgtccctaagaggtt

SEQ ID NO: 80234 - DNA, 25 bp, Probe sequence
gacgatgtaaattgtccctaagagg

SEQ ID NO: 80235 - DNA, 25 bp, Probe sequence
gatgtaaattgtccctaagaggttt

SEQ ID NO: 80236 - DNA, 25 bp, Probe sequence
ttaagtgaattaacatggttgtctt

SEQ ID NO: 80237 - DNA, 25 bp, Probe sequence
acgatgtaaattgtccctaagaggt

SEQ ID NO: 80238 - DNA, 25 bp, Probe sequence
gcaatcactattttgattagcatgt

SEQ ID NO: 80239 - DNA, 25 bp, Probe sequence
gcgcttttgcaatcactattttgat

SEQ ID NO: 80240 - DNA, 25 bp, Probe sequence
tgcaatcactattttgattagcatg

SEQ ID NO: 80241 - DNA, 25 bp, Probe sequence
ggcgcttttgcaatcactattttga

SEQ ID NO: 80242 - DNA, 25 bp, Probe sequence
gggcgcttttgcaatcactattttg

SEQ ID NO: 80243 - DNA, 25 bp, Probe sequence
cgcttttgcaatcactattttgatt

SEQ ID NO: 80244 - DNA, 25 bp, Probe sequence
ggggcgcttttgcaatcactatttt

SEQ ID NO: 80245 - DNA, 25 bp, Probe sequence
caatcactattttgattagcatgta

SEQ ID NO: 80246 - DNA, 25 bp, Probe sequence
tttgcaatcactattttgattagca

SEQ ID NO: 80247 - DNA, 25 bp, Probe sequence
acatgctaatcaaaatagtgattgc

SEQ ID NO: 80248 - DNA, 25 bp, Probe sequence
atcaaaatagtgattgcaaaagcgc

SEQ ID NO: 80249 - DNA, 25 bp, Probe sequence
catgctaatcaaaatagtgattgca

SEQ ID NO: 80250 - DNA, 25 bp, Probe sequence
tcaaaatagtgattgcaaaagcgcc

SEQ ID NO: 80251 - DNA, 25 bp, Probe sequence
caaaatagtgattgcaaaagcgccc

SEQ ID NO: 80252 - DNA, 25 bp, Probe sequence
aatcaaaatagtgattgcaaaagcg

SEQ ID NO: 80253 - DNA, 25 bp, Probe sequence
aaaatagtgattgcaaaagcgcccc

SEQ ID NO: 80254 - DNA, 25 bp, Probe sequence
tacatgctaatcaaaatagtgattg

SEQ ID NO: 80255 - DNA, 25 bp, Probe sequence
tgctaatcaaaatagtgattgcaaa

SEQ ID NO: 80256 - DNA, 25 bp, Probe sequence
aatggctggttatactgaagatgaa

SEQ ID NO: 80257 - DNA, 25 bp, Probe sequence
caatggctggttatactgaagatga

SEQ ID NO: 80258 - DNA, 25 bp, Probe sequence
acaatggctggttatactgaagatg

SEQ ID NO: 80259 - DNA, 25 bp, Probe sequence
aacaatggctggttatactgaagat

SEQ ID NO: 80260 - DNA, 25 bp, Probe sequence
ttacatcaacttaacaatggctggt

SEQ ID NO: 80261 - DNA, 25 bp, Probe sequence
tacatcaacttaacaatggctggtt

SEQ ID NO: 80262 - DNA, 25 bp, Probe sequence
tagtataacttagtggaggcgataa

SEQ ID NO: 80263 - DNA, 25 bp, Probe sequence
ttagtataacttagtggaggcgata

SEQ ID NO: 80264 - DNA, 25 bp, Probe sequence
acttaacaatggctggttatactga

SEQ ID NO: 80265 - DNA, 25 bp, Probe sequence
ttcatcttcagtataaccagccatt

SEQ ID NO: 80266 - DNA, 25 bp, Probe sequence
tcatcttcagtataaccagccattg

SEQ ID NO: 80267 - DNA, 25 bp, Probe sequence
catcttcagtataaccagccattgt

SEQ ID NO: 80268 - DNA, 25 bp, Probe sequence
atcttcagtataaccagccattgtt

SEQ ID NO: 80269 - DNA, 25 bp, Probe sequence
accagccattgttaagttgatgtaa

SEQ ID NO: 80270 - DNA, 25 bp, Probe sequence
aaccagccattgttaagttgatgta

SEQ ID NO: 80271 - DNA, 25 bp, Probe sequence
tatcgcctccactaagttatactaa

SEQ ID NO: 80272 - DNA, 25 bp, Probe sequence
ttatcgcctccactaagttatacta

SEQ ID NO: 80273 - DNA, 25 bp, Probe sequence
ataaccagccattgttaagttgatg

SEQ ID NO: 80274 - DNA, 25 bp, Probe sequence
gtttcaacattcatttcccatatcg

SEQ ID NO: 80275 - DNA, 25 bp, Probe sequence
tcctctgtgtttcaacattcatttc

SEQ ID NO: 80276 - DNA, 25 bp, Probe sequence
ctgtgtttcaacattcatttcccat

SEQ ID NO: 80277 - DNA, 25 bp, Probe sequence
tgtgtttcaacattcatttcccata

SEQ ID NO: 80278 - DNA, 25 bp, Probe sequence
atcctctgtgtttcaacattcattt

SEQ ID NO: 80279 - DNA, 25 bp, Probe sequence
ctctgtgtttcaacattcatttccc

SEQ ID NO: 80280 - DNA, 25 bp, Probe sequence
cctctgtgtttcaacattcatttcc

SEQ ID NO: 80281 - DNA, 25 bp, Probe sequence
tttatcctctgtgtttcaacattca

SEQ ID NO: 80282 - DNA, 25 bp, Probe sequence
tttcaacattcatttcccatatcga

SEQ ID NO: 80283 - DNA, 25 bp, Probe sequence
cgatatgggaaatgaatgttgaaac

SEQ ID NO: 80284 - DNA, 25 bp, Probe sequence
gaaatgaatgttgaaacacagagga

SEQ ID NO: 80285 - DNA, 25 bp, Probe sequence
atgggaaatgaatgttgaaacacag

SEQ ID NO: 80286 - DNA, 25 bp, Probe sequence
aaatgaatgttgaaacacagaggat

SEQ ID NO: 80287 - DNA, 25 bp, Probe sequence
tatgggaaatgaatgttgaaacaca

SEQ ID NO: 80288 - DNA, 25 bp, Probe sequence
ggaaatgaatgttgaaacacagagg

SEQ ID NO: 80289 - DNA, 25 bp, Probe sequence
gggaaatgaatgttgaaacacagag

SEQ ID NO: 80290 - DNA, 25 bp, Probe sequence
tgaatgttgaaacacagaggataaa

SEQ ID NO: 80291 - DNA, 25 bp, Probe sequence
tcgatatgggaaatgaatgttgaaa

SEQ ID NO: 80292 - DNA, 25 bp, Probe sequence
aaactctgataatcactttagcaag

SEQ ID NO: 80293 - DNA, 25 bp, Probe sequence
aactctgataatcactttagcaagt

SEQ ID NO: 80294 - DNA, 25 bp, Probe sequence
actctgataatcactttagcaagta

SEQ ID NO: 80295 - DNA, 25 bp, Probe sequence
gaaaactctgataatcactttagca

SEQ ID NO: 80296 - DNA, 25 bp, Probe sequence
ctgataatcactttagcaagtaact

SEQ ID NO: 80297 - DNA, 25 bp, Probe sequence
tctgataatcactttagcaagtaac

SEQ ID NO: 80298 - DNA, 25 bp, Probe sequence
ctctgataatcactttagcaagtaa

SEQ ID NO: 80299 - DNA, 25 bp, Probe sequence
aaaactctgataatcactttagcaa

SEQ ID NO: 80300 - DNA, 25 bp, Probe sequence
tgataatcactttagcaagtaacta

SEQ ID NO: 80301 - DNA, 25 bp, Probe sequence
aatcactttagcaagtaactatttt

SEQ ID NO: 80302 - DNA, 25 bp, Probe sequence
cttgctaaagtgattatcagagttt

SEQ ID NO: 80303 - DNA, 25 bp, Probe sequence
acttgctaaagtgattatcagagtt

SEQ ID NO: 80304 - DNA, 25 bp, Probe sequence
tacttgctaaagtgattatcagagt

SEQ ID NO: 80305 - DNA, 25 bp, Probe sequence
tgctaaagtgattatcagagttttc

SEQ ID NO: 80306 - DNA, 25 bp, Probe sequence
gttacttgctaaagtgattatcaga

SEQ ID NO: 80307 - DNA, 25 bp, Probe sequence
agttacttgctaaagtgattatcag

SEQ ID NO: 80308 - DNA, 25 bp, Probe sequence
ttacttgctaaagtgattatcagag

SEQ ID NO: 80309 - DNA, 25 bp, Probe sequence
ttgctaaagtgattatcagagtttt

SEQ ID NO: 80310 - DNA, 25 bp, Probe sequence
tagttacttgctaaagtgattatca

SEQ ID NO: 80311 - DNA, 25 bp, Probe sequence
aaaatagttacttgctaaagtgatt

SEQ ID NO: 80312 - DNA, 25 bp, Probe sequence
accatgctgattcttattactacca

SEQ ID NO: 80313 - DNA, 25 bp, Probe sequence
gttctactgtaccatgctgattctt

SEQ ID NO: 80314 - DNA, 25 bp, Probe sequence
ttctactgtaccatgctgattctta

SEQ ID NO: 80315 - DNA, 25 bp, Probe sequence
tctactgtaccatgctgattcttat

SEQ ID NO: 80316 - DNA, 25 bp, Probe sequence
actgtaccatgctgattcttattac

SEQ ID NO: 80317 - DNA, 25 bp, Probe sequence
tagttctactgtaccatgctgattc

SEQ ID NO: 80318 - DNA, 25 bp, Probe sequence
ccatgctgattcttattactaccaa

SEQ ID NO: 80319 - DNA, 25 bp, Probe sequence
atagttctactgtaccatgctgatt

SEQ ID NO: 80320 - DNA, 25 bp, Probe sequence
ctactgtaccatgctgattcttatt

SEQ ID NO: 80321 - DNA, 25 bp, Probe sequence
tggtagtaataagaatcagcatggt

SEQ ID NO: 80322 - DNA, 25 bp, Probe sequence
aagaatcagcatggtacagtagaac

SEQ ID NO: 80323 - DNA, 25 bp, Probe sequence
taagaatcagcatggtacagtagaa

SEQ ID NO: 80324 - DNA, 25 bp, Probe sequence
ataagaatcagcatggtacagtaga

SEQ ID NO: 80325 - DNA, 25 bp, Probe sequence
gaatcagcatggtacagtagaacta

SEQ ID NO: 80326 - DNA, 25 bp, Probe sequence
gtaataagaatcagcatggtacagt

SEQ ID NO: 80327 - DNA, 25 bp, Probe sequence
ttggtagtaataagaatcagcatgg

SEQ ID NO: 80328 - DNA, 25 bp, Probe sequence
aatcagcatggtacagtagaactat

SEQ ID NO: 80329 - DNA, 25 bp, Probe sequence
aataagaatcagcatggtacagtag

SEQ ID NO: 80330 - DNA, 25 bp, Probe sequence
tgacaaatctccttatcttacaaat

SEQ ID NO: 80331 - DNA, 25 bp, Probe sequence
atgacaaatctccttatcttacaaa

SEQ ID NO: 80332 - DNA, 25 bp, Probe sequence
aatgacaaatctccttatcttacaa

SEQ ID NO: 80333 - DNA, 25 bp, Probe sequence
ttgtaagataaggagatttgtcatt

SEQ ID NO: 80334 - DNA, 25 bp, Probe sequence
tttgtaagataaggagatttgtcat

SEQ ID NO: 80335 - DNA, 25 bp, Probe sequence
atttgtaagataaggagatttgtca

SEQ ID NO: 80336 - DNA, 25 bp, Probe sequence
ttatcatcaacacacctgctataca

SEQ ID NO: 80337 - DNA, 25 bp, Probe sequence
acttattatcatcaacacacctgct

SEQ ID NO: 80338 - DNA, 25 bp, Probe sequence
atcaacacacctgctatacatcatt

SEQ ID NO: 80339 - DNA, 25 bp, Probe sequence
tatcatcaacacacctgctatacat

SEQ ID NO: 80340 - DNA, 25 bp, Probe sequence
aacttattatcatcaacacacctgc

SEQ ID NO: 80341 - DNA, 25 bp, Probe sequence
atcatcaacacacctgctatacatc

SEQ ID NO: 80342 - DNA, 25 bp, Probe sequence
catcaacacacctgctatacatcat

SEQ ID NO: 80343 - DNA, 25 bp, Probe sequence
cttattatcatcaacacacctgcta

SEQ ID NO: 80344 - DNA, 25 bp, Probe sequence
attatcatcaacacacctgctatac

SEQ ID NO: 80345 - DNA, 25 bp, Probe sequence
agcaggtgtgttgatgataataagt

SEQ ID NO: 80346 - DNA, 25 bp, Probe sequence
tgtatagcaggtgtgttgatgataa

SEQ ID NO: 80347 - DNA, 25 bp, Probe sequence
aatgatgtatagcaggtgtgttgat

SEQ ID NO: 80348 - DNA, 25 bp, Probe sequence
gcaggtgtgttgatgataataagtt

SEQ ID NO: 80349 - DNA, 25 bp, Probe sequence
atgtatagcaggtgtgttgatgata

SEQ ID NO: 80350 - DNA, 25 bp, Probe sequence
gatgtatagcaggtgtgttgatgat

SEQ ID NO: 80351 - DNA, 25 bp, Probe sequence
atgatgtatagcaggtgtgttgatg

SEQ ID NO: 80352 - DNA, 25 bp, Probe sequence
tagcaggtgtgttgatgataataag

SEQ ID NO: 80353 - DNA, 25 bp, Probe sequence
gtatagcaggtgtgttgatgataat

SEQ ID NO: 80354 - DNA, 25 bp, Probe sequence
ttatcatcaattcagtacgatcatt

SEQ ID NO: 80355 - DNA, 25 bp, Probe sequence
atcatcaattcagtacgatcatttg

SEQ ID NO: 80356 - DNA, 25 bp, Probe sequence
tatcatcaattcagtacgatcattt

SEQ ID NO: 80357 - DNA, 25 bp, Probe sequence
tttatcatcaattcagtacgatcat

SEQ ID NO: 80358 - DNA, 25 bp, Probe sequence
catatttgtaaaagcgttttcaaca

SEQ ID NO: 80359 - DNA, 25 bp, Probe sequence
acatatttgtaaaagcgttttcaac

SEQ ID NO: 80360 - DNA, 25 bp, Probe sequence
ttttatcatcaattcagtacgatca

SEQ ID NO: 80361 - DNA, 25 bp, Probe sequence
ttgtaaaagcgttttcaacaacttt

SEQ ID NO: 80362 - DNA, 25 bp, Probe sequence
tttgtaaaagcgttttcaacaactt

SEQ ID NO: 80363 - DNA, 25 bp, Probe sequence
aatgatcgtactgaattgatgataa

SEQ ID NO: 80364 - DNA, 25 bp, Probe sequence
caaatgatcgtactgaattgatgat

SEQ ID NO: 80365 - DNA, 25 bp, Probe sequence
atgatcgtactgaattgatgataaa

SEQ ID NO: 80366 - DNA, 25 bp, Probe sequence
aaatgatcgtactgaattgatgata

SEQ ID NO: 80367 - DNA, 25 bp, Probe sequence
gttgaaaacgcttttacaaatatgt

SEQ ID NO: 80368 - DNA, 25 bp, Probe sequence
tgttgaaaacgcttttacaaatatg

SEQ ID NO: 80369 - DNA, 25 bp, Probe sequence
tgatcgtactgaattgatgataaaa

SEQ ID NO: 80370 - DNA, 25 bp, Probe sequence
aagttgttgaaaacgcttttacaaa

SEQ ID NO: 80371 - DNA, 25 bp, Probe sequence
aaagttgttgaaaacgcttttacaa

SEQ ID NO: 80372 - DNA, 25 bp, Probe sequence
aatagcctccctttcttagtgtcta

SEQ ID NO: 80373 - DNA, 25 bp, Probe sequence
taatagcctccctttcttagtgtct

SEQ ID NO: 80374 - DNA, 25 bp, Probe sequence
cctccctttcttagtgtctatcatt

SEQ ID NO: 80375 - DNA, 25 bp, Probe sequence
tagcctccctttcttagtgtctatc

SEQ ID NO: 80376 - DNA, 25 bp, Probe sequence
gcctccctttcttagtgtctatcat

SEQ ID NO: 80377 - DNA, 25 bp, Probe sequence
atagcctccctttcttagtgtctat

SEQ ID NO: 80378 - DNA, 25 bp, Probe sequence
ctccctttcttagtgtctatcattt

SEQ ID NO: 80379 - DNA, 25 bp, Probe sequence
ctaatagcctccctttcttagtgtc

SEQ ID NO: 80380 - DNA, 25 bp, Probe sequence
agcctccctttcttagtgtctatca

SEQ ID NO: 80381 - DNA, 25 bp, Probe sequence
agacactaagaaagggaggctatta

SEQ ID NO: 80382 - DNA, 25 bp, Probe sequence
tagacactaagaaagggaggctatt

SEQ ID NO: 80383 - DNA, 25 bp, Probe sequence
aatgatagacactaagaaagggagg

SEQ ID NO: 80384 - DNA, 25 bp, Probe sequence
gatagacactaagaaagggaggcta

SEQ ID NO: 80385 - DNA, 25 bp, Probe sequence
atgatagacactaagaaagggaggc

SEQ ID NO: 80386 - DNA, 25 bp, Probe sequence
atagacactaagaaagggaggctat

SEQ ID NO: 80387 - DNA, 25 bp, Probe sequence
aaatgatagacactaagaaagggag

SEQ ID NO: 80388 - DNA, 25 bp, Probe sequence
gacactaagaaagggaggctattag

SEQ ID NO: 80389 - DNA, 25 bp, Probe sequence
tgatagacactaagaaagggaggct

SEQ ID NO: 80390 - DNA, 25 bp, Probe sequence
cgccatccctttctaaatatgtcta

SEQ ID NO: 80391 - DNA, 25 bp, Probe sequence
ttctatggaaacgctctctcaattt

SEQ ID NO: 80392 - DNA, 25 bp, Probe sequence
acgctctctcaatttcacttcattt

SEQ ID NO: 80393 - DNA, 25 bp, Probe sequence
aacgctctctcaatttcacttcatt

SEQ ID NO: 80394 - DNA, 25 bp, Probe sequence
aaacgctctctcaatttcacttcat

SEQ ID NO: 80395 - DNA, 25 bp, Probe sequence
gccatccctttctaaatatgtctaa

SEQ ID NO: 80396 - DNA, 25 bp, Probe sequence
tttctatggaaacgctctctcaatt

SEQ ID NO: 80397 - DNA, 25 bp, Probe sequence
tctatggaaacgctctctcaatttc

SEQ ID NO: 80398 - DNA, 25 bp, Probe sequence
ctatggaaacgctctctcaatttca

SEQ ID NO: 80399 - DNA, 25 bp, Probe sequence
tagacatatttagaaagggatggcg

SEQ ID NO: 80400 - DNA, 25 bp, Probe sequence
aaattgagagagcgtttccatagaa

SEQ ID NO: 80401 - DNA, 25 bp, Probe sequence
atgaagtgaaattgagagagcgttt

SEQ ID NO: 80402 - DNA, 25 bp, Probe sequence
aatgaagtgaaattgagagagcgtt

SEQ ID NO: 80403 - DNA, 25 bp, Probe sequence
aaatgaagtgaaattgagagagcgt

SEQ ID NO: 80404 - DNA, 25 bp, Probe sequence
ttagacatatttagaaagggatggc

SEQ ID NO: 80405 - DNA, 25 bp, Probe sequence
aattgagagagcgtttccatagaaa

SEQ ID NO: 80406 - DNA, 25 bp, Probe sequence
gaaattgagagagcgtttccataga

SEQ ID NO: 80407 - DNA, 25 bp, Probe sequence
tgaaattgagagagcgtttccatag

SEQ ID NO: 80408 - DNA, 25 bp, Probe sequence
ttaatggctcaagtttgttattcga

SEQ ID NO: 80409 - DNA, 25 bp, Probe sequence
caagtttgttattcgaggtgaggta

SEQ ID NO: 80410 - DNA, 25 bp, Probe sequence
attaatggctcaagtttgttattcg

SEQ ID NO: 80411 - DNA, 25 bp, Probe sequence
taatggctcaagtttgttattcgag

SEQ ID NO: 80412 - DNA, 25 bp, Probe sequence
aatggctcaagtttgttattcgagg

SEQ ID NO: 80413 - DNA, 25 bp, Probe sequence
tcaagtttgttattcgaggtgaggt

SEQ ID NO: 80414 - DNA, 25 bp, Probe sequence
tggtattatattaatggctcaagtt

SEQ ID NO: 80415 - DNA, 25 bp, Probe sequence
atggtattatattaatggctcaagt

SEQ ID NO: 80416 - DNA, 25 bp, Probe sequence
atggctcaagtttgttattcgaggt

SEQ ID NO: 80417 - DNA, 25 bp, Probe sequence
tcgaataacaaacttgagccattaa

SEQ ID NO: 80418 - DNA, 25 bp, Probe sequence
tacctcacctcgaataacaaacttg

SEQ ID NO: 80419 - DNA, 25 bp, Probe sequence
cgaataacaaacttgagccattaat

SEQ ID NO: 80420 - DNA, 25 bp, Probe sequence
ctcgaataacaaacttgagccatta

SEQ ID NO: 80421 - DNA, 25 bp, Probe sequence
cctcgaataacaaacttgagccatt

SEQ ID NO: 80422 - DNA, 25 bp, Probe sequence
acctcacctcgaataacaaacttga

SEQ ID NO: 80423 - DNA, 25 bp, Probe sequence
aacttgagccattaatataatacca

SEQ ID NO: 80424 - DNA, 25 bp, Probe sequence
acttgagccattaatataataccat

SEQ ID NO: 80425 - DNA, 25 bp, Probe sequence
acctcgaataacaaacttgagccat

SEQ ID NO: 80426 - DNA, 25 bp, Probe sequence
ccactaatatccgctgttaatcaat

SEQ ID NO: 80427 - DNA, 25 bp, Probe sequence
atatccgctgttaatcaattctgac

SEQ ID NO: 80428 - DNA, 25 bp, Probe sequence
ctgacatccttgtatcactatgaca

SEQ ID NO: 80429 - DNA, 25 bp, Probe sequence
tcaattctgacatccttgtatcact

SEQ ID NO: 80430 - DNA, 25 bp, Probe sequence
tatccgctgttaatcaattctgaca

SEQ ID NO: 80431 - DNA, 25 bp, Probe sequence
tctgacatccttgtatcactatgac

SEQ ID NO: 80432 - DNA, 25 bp, Probe sequence
gctgttaatcaattctgacatcctt

SEQ ID NO: 80433 - DNA, 25 bp, Probe sequence
atccgctgttaatcaattctgacat

SEQ ID NO: 80434 - DNA, 25 bp, Probe sequence
ttctgacatccttgtatcactatga

SEQ ID NO: 80435 - DNA, 25 bp, Probe sequence
attgattaacagcggatattagtgg

SEQ ID NO: 80436 - DNA, 25 bp, Probe sequence
gtcagaattgattaacagcggatat

SEQ ID NO: 80437 - DNA, 25 bp, Probe sequence
tgtcatagtgatacaaggatgtcag

SEQ ID NO: 80438 - DNA, 25 bp, Probe sequence
tgtcagaattgattaacagcggata

SEQ ID NO: 80439 - DNA, 25 bp, Probe sequence
agtgatacaaggatgtcagaattga

SEQ ID NO: 80440 - DNA, 25 bp, Probe sequence
aaggatgtcagaattgattaacagc

SEQ ID NO: 80441 - DNA, 25 bp, Probe sequence
gtcatagtgatacaaggatgtcaga

SEQ ID NO: 80442 - DNA, 25 bp, Probe sequence
atgtcagaattgattaacagcggat

SEQ ID NO: 80443 - DNA, 25 bp, Probe sequence
tcagaattgattaacagcggatatt

SEQ ID NO: 80444 - DNA, 25 bp, Probe sequence
aacttctatcacgaacgcttcaatt

SEQ ID NO: 80445 - DNA, 25 bp, Probe sequence
ttcctgtatgcgtgtgatagaagtt

SEQ ID NO: 80446 - DNA, 25 bp, Probe sequence
gctacgatggactgacttaaacttt

SEQ ID NO: 80447 - DNA, 25 bp, Probe sequence
aatttcctgtatgcgtgtgatagaa

SEQ ID NO: 80448 - DNA, 25 bp, Probe sequence
atttcctgtatgcgtgtgatagaag

SEQ ID NO: 80449 - DNA, 25 bp, Probe sequence
cttctatcacgaacgcttcaatttc

SEQ ID NO: 80450 - DNA, 25 bp, Probe sequence
caatttcctgtatgcgtgtgataga

SEQ ID NO: 80451 - DNA, 25 bp, Probe sequence
aaacttctatcacgaacgcttcaat

SEQ ID NO: 80452 - DNA, 25 bp, Probe sequence
ttcaatttcctgtatgcgtgtgata

SEQ ID NO: 80453 - DNA, 25 bp, Probe sequence
aattgaagcgttcgtgatagaagtt

SEQ ID NO: 80454 - DNA, 25 bp, Probe sequence
aacttctatcacacgcatacaggaa

SEQ ID NO: 80455 - DNA, 25 bp, Probe sequence
aaagtttaagtcagtccatcgtagc

SEQ ID NO: 80456 - DNA, 25 bp, Probe sequence
ttctatcacacgcatacaggaaatt

SEQ ID NO: 80457 - DNA, 25 bp, Probe sequence
cttctatcacacgcatacaggaaat

SEQ ID NO: 80458 - DNA, 25 bp, Probe sequence
gaaattgaagcgttcgtgatagaag

SEQ ID NO: 80459 - DNA, 25 bp, Probe sequence
tctatcacacgcatacaggaaattg

SEQ ID NO: 80460 - DNA, 25 bp, Probe sequence
attgaagcgttcgtgatagaagttt

SEQ ID NO: 80461 - DNA, 25 bp, Probe sequence
aaattgaagcgttcgtgatagaagt

SEQ ID NO: 80462 - DNA, 25 bp, Probe sequence
ttctgatatgatacaagtgttgctt

SEQ ID NO: 80463 - DNA, 25 bp, Probe sequence
attctgatatgatacaagtgttgct

SEQ ID NO: 80464 - DNA, 25 bp, Probe sequence
tattctgatatgatacaagtgttgc

SEQ ID NO: 80465 - DNA, 25 bp, Probe sequence
tctgatatgatacaagtgttgcttt

SEQ ID NO: 80466 - DNA, 25 bp, Probe sequence
gcttacaagaaacgtcaaatcattt

SEQ ID NO: 80467 - DNA, 25 bp, Probe sequence
cgcttacaagaaacgtcaaatcatt

SEQ ID NO: 80468 - DNA, 25 bp, Probe sequence
ctgatatgatacaagtgttgctttt

SEQ ID NO: 80469 - DNA, 25 bp, Probe sequence
gcaaggtaaattaaaacgcttacaa

SEQ ID NO: 80470 - DNA, 25 bp, Probe sequence
gcatattctgatatgatacaagtgt

SEQ ID NO: 80471 - DNA, 25 bp, Probe sequence
aagcaacacttgtatcatatcagaa

SEQ ID NO: 80472 - DNA, 25 bp, Probe sequence
agcaacacttgtatcatatcagaat

SEQ ID NO: 80473 - DNA, 25 bp, Probe sequence
gcaacacttgtatcatatcagaata

SEQ ID NO: 80474 - DNA, 25 bp, Probe sequence
aaagcaacacttgtatcatatcaga

SEQ ID NO: 80475 - DNA, 25 bp, Probe sequence
aatgatttgacgtttcttgtaagcg

SEQ ID NO: 80476 - DNA, 25 bp, Probe sequence
aaatgatttgacgtttcttgtaagc

SEQ ID NO: 80477 - DNA, 25 bp, Probe sequence
aaaagcaacacttgtatcatatcag

SEQ ID NO: 80478 - DNA, 25 bp, Probe sequence
ttgtaagcgttttaatttaccttgc

SEQ ID NO: 80479 - DNA, 25 bp, Probe sequence
acacttgtatcatatcagaatatgc

SEQ ID NO: 80480 - DNA, 25 bp, Probe sequence
aatcgtcttactgctgttctctatt

SEQ ID NO: 80481 - DNA, 25 bp, Probe sequence
atcgtcttactgctgttctctattt

SEQ ID NO: 80482 - DNA, 25 bp, Probe sequence
aaatcgtcttactgctgttctctat

SEQ ID NO: 80483 - DNA, 25 bp, Probe sequence
tcgtcttactgctgttctctattta

SEQ ID NO: 80484 - DNA, 25 bp, Probe sequence
gaaatcgtcttactgctgttctcta

SEQ ID NO: 80485 - DNA, 25 bp, Probe sequence
cttctcattgaaatcgtcttactgc

SEQ ID NO: 80486 - DNA, 25 bp, Probe sequence
gcttctcattgaaatcgtcttactg

SEQ ID NO: 80487 - DNA, 25 bp, Probe sequence
tcattgaaatcgtcttactgctgtt

SEQ ID NO: 80488 - DNA, 25 bp, Probe sequence
ttctcattgaaatcgtcttactgct

SEQ ID NO: 80489 - DNA, 25 bp, Probe sequence
aatagagaacagcagtaagacgatt

SEQ ID NO: 80490 - DNA, 25 bp, Probe sequence
atagagaacagcagtaagacgattt

SEQ ID NO: 80491 - DNA, 25 bp, Probe sequence
aaatagagaacagcagtaagacgat

SEQ ID NO: 80492 - DNA, 25 bp, Probe sequence
taaatagagaacagcagtaagacga

SEQ ID NO: 80493 - DNA, 25 bp, Probe sequence
tagagaacagcagtaagacgatttc

SEQ ID NO: 80494 - DNA, 25 bp, Probe sequence
cagtaagacgatttcaatgagaagc

SEQ ID NO: 80495 - DNA, 25 bp, Probe sequence
gcagtaagacgatttcaatgagaag

SEQ ID NO: 80496 - DNA, 25 bp, Probe sequence
agcagtaagacgatttcaatgagaa

SEQ ID NO: 80497 - DNA, 25 bp, Probe sequence
aacagcagtaagacgatttcaatga

SEQ ID NO: 80498 - DNA, 25 bp, Probe sequence
ttctaatcatacgccttaattgtta

SEQ ID NO: 80499 - DNA, 25 bp, Probe sequence
tctaatcatacgccttaattgttaa

SEQ ID NO: 80500 - DNA, 25 bp, Probe sequence
ataaacacgtaataccagctatccc

SEQ ID NO: 80501 - DNA, 25 bp, Probe sequence
ttgctgcaatatacagttacataac

SEQ ID NO: 80502 - DNA, 25 bp, Probe sequence
taaacacgtaataccagctatccct

SEQ ID NO: 80503 - DNA, 25 bp, Probe sequence
cgtgctaacctattactttgtaaac

SEQ ID NO: 80504 - DNA, 25 bp, Probe sequence
tttctaatcatacgccttaattgtt

SEQ ID NO: 80505 - DNA, 25 bp, Probe sequence
tgctaacctattactttgtaaacca

SEQ ID NO: 80506 - DNA, 25 bp, Probe sequence
gtgctaacctattactttgtaaacc

SEQ ID NO: 80507 - DNA, 25 bp, Probe sequence
taacaattaaggcgtatgattagaa

SEQ ID NO: 80508 - DNA, 25 bp, Probe sequence
ttaacaattaaggcgtatgattaga

SEQ ID NO: 80509 - DNA, 25 bp, Probe sequence
gggatagctggtattacgtgtttat

SEQ ID NO: 80510 - DNA, 25 bp, Probe sequence
gttatgtaactgtatattgcagcaa

SEQ ID NO: 80511 - DNA, 25 bp, Probe sequence
agggatagctggtattacgtgttta

SEQ ID NO: 80512 - DNA, 25 bp, Probe sequence
gtttacaaagtaataggttagcacg

SEQ ID NO: 80513 - DNA, 25 bp, Probe sequence
aacaattaaggcgtatgattagaaa

SEQ ID NO: 80514 - DNA, 25 bp, Probe sequence
tggtttacaaagtaataggttagca

SEQ ID NO: 80515 - DNA, 25 bp, Probe sequence
ggtttacaaagtaataggttagcac

SEQ ID NO: 80516 - DNA, 25 bp, Probe sequence
acactttaacatatcgcgcatcaaa

SEQ ID NO: 80517 - DNA, 25 bp, Probe sequence
gacactttaacatatcgcgcatcaa

SEQ ID NO: 80518 - DNA, 25 bp, Probe sequence
cactttaacatatcgcgcatcaaaa

SEQ ID NO: 80519 - DNA, 25 bp, Probe sequence
cgacactttaacatatcgcgcatca

SEQ ID NO: 80520 - DNA, 25 bp, Probe sequence
tttgatgcgcgatatgttaaagtgt

SEQ ID NO: 80521 - DNA, 25 bp, Probe sequence
ttgatgcgcgatatgttaaagtgtc

SEQ ID NO: 80522 - DNA, 25 bp, Probe sequence
ttttgatgcgcgatatgttaaagtg

SEQ ID NO: 80523 - DNA, 25 bp, Probe sequence
tgatgcgcgatatgttaaagtgtcg

SEQ ID NO: 80524 - DNA, 25 bp, Probe sequence
taaactacacacaaaggagaaatgt

SEQ ID NO: 80525 - DNA, 25 bp, Probe sequence
ttaaactacacacaaaggagaaatg

SEQ ID NO: 80526 - DNA, 25 bp, Probe sequence
attaaactacacacaaaggagaaat

SEQ ID NO: 80527 - DNA, 25 bp, Probe sequence
aaactacacacaaaggagaaatgta

SEQ ID NO: 80528 - DNA, 25 bp, Probe sequence
tagtatctatccccgacctcttaaa

SEQ ID NO: 80529 - DNA, 25 bp, Probe sequence
agtatctatccccgacctcttaaag

SEQ ID NO: 80530 - DNA, 25 bp, Probe sequence
tattaaactacacacaaaggagaaa

SEQ ID NO: 80531 - DNA, 25 bp, Probe sequence
tatctatccccgacctcttaaagaa

SEQ ID NO: 80532 - DNA, 25 bp, Probe sequence
atctatccccgacctcttaaagaat

SEQ ID NO: 80533 - DNA, 25 bp, Probe sequence
acatttctcctttgtgtgtagttta

SEQ ID NO: 80534 - DNA, 25 bp, Probe sequence
catttctcctttgtgtgtagtttaa

SEQ ID NO: 80535 - DNA, 25 bp, Probe sequence
atttctcctttgtgtgtagtttaat

SEQ ID NO: 80536 - DNA, 25 bp, Probe sequence
tacatttctcctttgtgtgtagttt

SEQ ID NO: 80537 - DNA, 25 bp, Probe sequence
tttaagaggtcggggatagatacta

SEQ ID NO: 80538 - DNA, 25 bp, Probe sequence
ctttaagaggtcggggatagatact

SEQ ID NO: 80539 - DNA, 25 bp, Probe sequence
ttctttaagaggtcggggatagata

SEQ ID NO: 80540 - DNA, 25 bp, Probe sequence
tttctcctttgtgtgtagtttaata

SEQ ID NO: 80541 - DNA, 25 bp, Probe sequence
attctttaagaggtcggggatagat

SEQ ID NO: 80542 - DNA, 25 bp, Probe sequence
tgagcgttaccaacattcataataa

SEQ ID NO: 80543 - DNA, 25 bp, Probe sequence
catgagcgttaccaacattcataat

SEQ ID NO: 80544 - DNA, 25 bp, Probe sequence
atgagcgttaccaacattcataata

SEQ ID NO: 80545 - DNA, 25 bp, Probe sequence
gagcgttaccaacattcataataaa

SEQ ID NO: 80546 - DNA, 25 bp, Probe sequence
aatgaattcgtgtactactatcgtt

SEQ ID NO: 80547 - DNA, 25 bp, Probe sequence
taatgaattcgtgtactactatcgt

SEQ ID NO: 80548 - DNA, 25 bp, Probe sequence
cgttaatgaattcgtgtactactat

SEQ ID NO: 80549 - DNA, 25 bp, Probe sequence
ttaatgaattcgtgtactactatcg

SEQ ID NO: 80550 - DNA, 25 bp, Probe sequence
atgaattcgtgtactactatcgttt

SEQ ID NO: 80551 - DNA, 25 bp, Probe sequence
ttattatgaatgttggtaacgctca

SEQ ID NO: 80552 - DNA, 25 bp, Probe sequence
attatgaatgttggtaacgctcatg

SEQ ID NO: 80553 - DNA, 25 bp, Probe sequence
tattatgaatgttggtaacgctcat

SEQ ID NO: 80554 - DNA, 25 bp, Probe sequence
tttattatgaatgttggtaacgctc

SEQ ID NO: 80555 - DNA, 25 bp, Probe sequence
aacgatagtagtacacgaattcatt

SEQ ID NO: 80556 - DNA, 25 bp, Probe sequence
acgatagtagtacacgaattcatta

SEQ ID NO: 80557 - DNA, 25 bp, Probe sequence
atagtagtacacgaattcattaacg

SEQ ID NO: 80558 - DNA, 25 bp, Probe sequence
cgatagtagtacacgaattcattaa

SEQ ID NO: 80559 - DNA, 25 bp, Probe sequence
aaacgatagtagtacacgaattcat

SEQ ID NO: 80560 - DNA, 25 bp, Probe sequence
caatggatggcccttgttcattatg

SEQ ID NO: 80561 - DNA, 25 bp, Probe sequence
aatggatggcccttgttcattatga

SEQ ID NO: 80562 - DNA, 25 bp, Probe sequence
atggatggcccttgttcattatgaa

SEQ ID NO: 80563 - DNA, 25 bp, Probe sequence
tggatggcccttgttcattatgaag

SEQ ID NO: 80564 - DNA, 25 bp, Probe sequence
gcaatggatggcccttgttcattat

SEQ ID NO: 80565 - DNA, 25 bp, Probe sequence
gatggcccttgttcattatgaagca

SEQ ID NO: 80566 - DNA, 25 bp, Probe sequence
ggatggcccttgttcattatgaagc

SEQ ID NO: 80567 - DNA, 25 bp, Probe sequence
cataatgaacaagggccatccattg

SEQ ID NO: 80568 - DNA, 25 bp, Probe sequence
tcataatgaacaagggccatccatt

SEQ ID NO: 80569 - DNA, 25 bp, Probe sequence
ttcataatgaacaagggccatccat

SEQ ID NO: 80570 - DNA, 25 bp, Probe sequence
cttcataatgaacaagggccatcca

SEQ ID NO: 80571 - DNA, 25 bp, Probe sequence
ataatgaacaagggccatccattgc

SEQ ID NO: 80572 - DNA, 25 bp, Probe sequence
tgcttcataatgaacaagggccatc

SEQ ID NO: 80573 - DNA, 25 bp, Probe sequence
gcttcataatgaacaagggccatcc

SEQ ID NO: 80574 - DNA, 25 bp, Probe sequence
ttaaaatttatatgggtcgcaactg

SEQ ID NO: 80575 - DNA, 25 bp, Probe sequence
tttaaaatttatatgggtcgcaact

SEQ ID NO: 80576 - DNA, 25 bp, Probe sequence
ctcaagtattttgaaattgattggt

SEQ ID NO: 80577 - DNA, 25 bp, Probe sequence
tctcaagtattttgaaattgattgg

SEQ ID NO: 80578 - DNA, 25 bp, Probe sequence
ttttaaaatttatatgggtcgcaac

SEQ ID NO: 80579 - DNA, 25 bp, Probe sequence
tcaagtattttgaaattgattggtt

SEQ ID NO: 80580 - DNA, 25 bp, Probe sequence
agtattttgaaattgattggttact

SEQ ID NO: 80581 - DNA, 25 bp, Probe sequence
cagttgcgacccatataaattttaa

SEQ ID NO: 80582 - DNA, 25 bp, Probe sequence
agttgcgacccatataaattttaaa

SEQ ID NO: 80583 - DNA, 25 bp, Probe sequence
accaatcaatttcaaaatacttgag

SEQ ID NO: 80584 - DNA, 25 bp, Probe sequence
ccaatcaatttcaaaatacttgaga

SEQ ID NO: 80585 - DNA, 25 bp, Probe sequence
aaccaatcaatttcaaaatacttga

SEQ ID NO: 80586 - DNA, 25 bp, Probe sequence
gttgcgacccatataaattttaaaa

SEQ ID NO: 80587 - DNA, 25 bp, Probe sequence
agtaaccaatcaatttcaaaatact

SEQ ID NO: 80588 - DNA, 25 bp, Probe sequence
attcaatactacagacgcattcatt

SEQ ID NO: 80589 - DNA, 25 bp, Probe sequence
aattcaatactacagacgcattcat

SEQ ID NO: 80590 - DNA, 25 bp, Probe sequence
ccttatctatacaattctcgcatca

SEQ ID NO: 80591 - DNA, 25 bp, Probe sequence
gcctatgcaactaatacgctataac

SEQ ID NO: 80592 - DNA, 25 bp, Probe sequence
cgcctatgcaactaatacgctataa

SEQ ID NO: 80593 - DNA, 25 bp, Probe sequence
cacccttatctatacaattctcgca

SEQ ID NO: 80594 - DNA, 25 bp, Probe sequence
tcacccttatctatacaattctcgc

SEQ ID NO: 80595 - DNA, 25 bp, Probe sequence
ttcaatactacagacgcattcattt

SEQ ID NO: 80596 - DNA, 25 bp, Probe sequence
acccttatctatacaattctcgcat

SEQ ID NO: 80597 - DNA, 25 bp, Probe sequence
aatgaatgcgtctgtagtattgaat

SEQ ID NO: 80598 - DNA, 25 bp, Probe sequence
atgaatgcgtctgtagtattgaatt

SEQ ID NO: 80599 - DNA, 25 bp, Probe sequence
tgatgcgagaattgtatagataagg

SEQ ID NO: 80600 - DNA, 25 bp, Probe sequence
gttatagcgtattagttgcataggc

SEQ ID NO: 80601 - DNA, 25 bp, Probe sequence
ttatagcgtattagttgcataggcg

SEQ ID NO: 80602 - DNA, 25 bp, Probe sequence
gcgagaattgtatagataagggtga

SEQ ID NO: 80603 - DNA, 25 bp, Probe sequence
tgcgagaattgtatagataagggtg

SEQ ID NO: 80604 - DNA, 25 bp, Probe sequence
aaatgaatgcgtctgtagtattgaa

SEQ ID NO: 80605 - DNA, 25 bp, Probe sequence
atgcgagaattgtatagataagggt

SEQ ID NO: 80606 - DNA, 25 bp, Probe sequence
acgcaacgattgacttatataccta

SEQ ID NO: 80607 - DNA, 25 bp, Probe sequence
aacgcaacgattgacttatatacct

SEQ ID NO: 80608 - DNA, 25 bp, Probe sequence
cgcaacgattgacttatatacctag

SEQ ID NO: 80609 - DNA, 25 bp, Probe sequence
gcaacgattgacttatatacctaga

SEQ ID NO: 80610 - DNA, 25 bp, Probe sequence
atgctaaatagagagattgttgtgc

SEQ ID NO: 80611 - DNA, 25 bp, Probe sequence
aacgattgacttatatacctagagg

SEQ ID NO: 80612 - DNA, 25 bp, Probe sequence
caatgaatcacagggaggcaataat

SEQ ID NO: 80613 - DNA, 25 bp, Probe sequence
aaacgcaacgattgacttatatacc

SEQ ID NO: 80614 - DNA, 25 bp, Probe sequence
acgattgacttatatacctagaggg

SEQ ID NO: 80615 - DNA, 25 bp, Probe sequence
taggtatataagtcaatcgttgcgt

SEQ ID NO: 80616 - DNA, 25 bp, Probe sequence
aggtatataagtcaatcgttgcgtt

SEQ ID NO: 80617 - DNA, 25 bp, Probe sequence
ctaggtatataagtcaatcgttgcg

SEQ ID NO: 80618 - DNA, 25 bp, Probe sequence
tctaggtatataagtcaatcgttgc

SEQ ID NO: 80619 - DNA, 25 bp, Probe sequence
gcacaacaatctctctatttagcat

SEQ ID NO: 80620 - DNA, 25 bp, Probe sequence
cctctaggtatataagtcaatcgtt

SEQ ID NO: 80621 - DNA, 25 bp, Probe sequence
attattgcctccctgtgattcattg

SEQ ID NO: 80622 - DNA, 25 bp, Probe sequence
ggtatataagtcaatcgttgcgttt

SEQ ID NO: 80623 - DNA, 25 bp, Probe sequence
ccctctaggtatataagtcaatcgt

SEQ ID NO: 80624 - DNA, 25 bp, Probe sequence
taatgaaggattcgttggtgattct

SEQ ID NO: 80625 - DNA, 25 bp, Probe sequence
cttggcgaattagtgtatcttacct

SEQ ID NO: 80626 - DNA, 25 bp, Probe sequence
ataatgaaggattcgttggtgattc

SEQ ID NO: 80627 - DNA, 25 bp, Probe sequence
ttggcgaattagtgtatcttaccta

SEQ ID NO: 80628 - DNA, 25 bp, Probe sequence
gattcgttggtgattctgagatagg

SEQ ID NO: 80629 - DNA, 25 bp, Probe sequence
ggattcgttggtgattctgagatag

SEQ ID NO: 80630 - DNA, 25 bp, Probe sequence
gattctgagataggctagtgattgg

SEQ ID NO: 80631 - DNA, 25 bp, Probe sequence
tgattctgagataggctagtgattg

SEQ ID NO: 80632 - DNA, 25 bp, Probe sequence
gtgattctgagataggctagtgatt

SEQ ID NO: 80633 - DNA, 25 bp, Probe sequence
agaatcaccaacgaatccttcatta

SEQ ID NO: 80634 - DNA, 25 bp, Probe sequence
aggtaagatacactaattcgccaag

SEQ ID NO: 80635 - DNA, 25 bp, Probe sequence
gaatcaccaacgaatccttcattat

SEQ ID NO: 80636 - DNA, 25 bp, Probe sequence
ctatctcagaatcaccaacgaatcc

SEQ ID NO: 80637 - DNA, 25 bp, Probe sequence
cctatctcagaatcaccaacgaatc

SEQ ID NO: 80638 - DNA, 25 bp, Probe sequence
taggtaagatacactaattcgccaa

SEQ ID NO: 80639 - DNA, 25 bp, Probe sequence
aatcactagcctatctcagaatcac

SEQ ID NO: 80640 - DNA, 25 bp, Probe sequence
caatcactagcctatctcagaatca

SEQ ID NO: 80641 - DNA, 25 bp, Probe sequence
ccaatcactagcctatctcagaatc

SEQ ID NO: 80642 - DNA, 25 bp, Probe sequence
ttaggcaatattcaacgtcatcaac

SEQ ID NO: 80643 - DNA, 25 bp, Probe sequence
caatattcaacgtcatcaacaccaa

SEQ ID NO: 80644 - DNA, 25 bp, Probe sequence
taggcaatattcaacgtcatcaaca

SEQ ID NO: 80645 - DNA, 25 bp, Probe sequence
tgatgagaatcccaacaatccaaat

SEQ ID NO: 80646 - DNA, 25 bp, Probe sequence
gatgagaatcccaacaatccaaatt

SEQ ID NO: 80647 - DNA, 25 bp, Probe sequence
cccaacaatccaaattatctcatca

SEQ ID NO: 80648 - DNA, 25 bp, Probe sequence
tcccaacaatccaaattatctcatc

SEQ ID NO: 80649 - DNA, 25 bp, Probe sequence
ctgatgagaatcccaacaatccaaa

SEQ ID NO: 80650 - DNA, 25 bp, Probe sequence
aatcccaacaatccaaattatctca

SEQ ID NO: 80651 - DNA, 25 bp, Probe sequence
gttgatgacgttgaatattgcctaa

SEQ ID NO: 80652 - DNA, 25 bp, Probe sequence
ttggtgttgatgacgttgaatattg

SEQ ID NO: 80653 - DNA, 25 bp, Probe sequence
tgttgatgacgttgaatattgccta

SEQ ID NO: 80654 - DNA, 25 bp, Probe sequence
atttggattgttgggattctcatca

SEQ ID NO: 80655 - DNA, 25 bp, Probe sequence
aatttggattgttgggattctcatc

SEQ ID NO: 80656 - DNA, 25 bp, Probe sequence
tgatgagataatttggattgttggg

SEQ ID NO: 80657 - DNA, 25 bp, Probe sequence
gatgagataatttggattgttggga

SEQ ID NO: 80658 - DNA, 25 bp, Probe sequence
tttggattgttgggattctcatcag

SEQ ID NO: 80659 - DNA, 25 bp, Probe sequence
taatttggattgttgggattctcat

SEQ ID NO: 80660 - DNA, 25 bp, Probe sequence
cacatctttctcttagactactccc

SEQ ID NO: 80661 - DNA, 25 bp, Probe sequence
tcacatctttctcttagactactcc

SEQ ID NO: 80662 - DNA, 25 bp, Probe sequence
tgacacacgttgtattgaatgaatt

SEQ ID NO: 80663 - DNA, 25 bp, Probe sequence
tctcacatctttctcttagactact

SEQ ID NO: 80664 - DNA, 25 bp, Probe sequence
ctcacatctttctcttagactactc

SEQ ID NO: 80665 - DNA, 25 bp, Probe sequence
cgcaaccagttagatatgcttatat

SEQ ID NO: 80666 - DNA, 25 bp, Probe sequence
tcagattaatatgcactcaatcgtt

SEQ ID NO: 80667 - DNA, 25 bp, Probe sequence
ttcagattaatatgcactcaatcgt

SEQ ID NO: 80668 - DNA, 25 bp, Probe sequence
ttctcacatctttctcttagactac

SEQ ID NO: 80669 - DNA, 25 bp, Probe sequence
gggagtagtctaagagaaagatgtg

SEQ ID NO: 80670 - DNA, 25 bp, Probe sequence
ggagtagtctaagagaaagatgtga

SEQ ID NO: 80671 - DNA, 25 bp, Probe sequence
aattcattcaatacaacgtgtgtca

SEQ ID NO: 80672 - DNA, 25 bp, Probe sequence
agtagtctaagagaaagatgtgaga

SEQ ID NO: 80673 - DNA, 25 bp, Probe sequence
gagtagtctaagagaaagatgtgag

SEQ ID NO: 80674 - DNA, 25 bp, Probe sequence
atataagcatatctaactggttgcg

SEQ ID NO: 80675 - DNA, 25 bp, Probe sequence
acgattgagtgcatattaatctgaa

SEQ ID NO: 80676 - DNA, 25 bp, Probe sequence
aacgattgagtgcatattaatctga

SEQ ID NO: 80677 - DNA, 25 bp, Probe sequence
gtagtctaagagaaagatgtgagaa

SEQ ID NO: 80678 - DNA, 25 bp, Probe sequence
tgaatcactctcaatcatactgaca

SEQ ID NO: 80679 - DNA, 25 bp, Probe sequence
tcactctcaatcatactgacatagt

SEQ ID NO: 80680 - DNA, 25 bp, Probe sequence
gaatcactctcaatcatactgacat

SEQ ID NO: 80681 - DNA, 25 bp, Probe sequence
atcactctcaatcatactgacatag

SEQ ID NO: 80682 - DNA, 25 bp, Probe sequence
aatcactctcaatcatactgacata

SEQ ID NO: 80683 - DNA, 25 bp, Probe sequence
tcagtgaataaaccgctctcattta

SEQ ID NO: 80684 - DNA, 25 bp, Probe sequence
ctaaagatcagtgaataaaccgctc

SEQ ID NO: 80685 - DNA, 25 bp, Probe sequence
tccctaaagatcagtgaataaaccg

SEQ ID NO: 80686 - DNA, 25 bp, Probe sequence
atcagtgaataaaccgctctcattt

SEQ ID NO: 80687 - DNA, 25 bp, Probe sequence
tgtcagtatgattgagagtgattca

SEQ ID NO: 80688 - DNA, 25 bp, Probe sequence
actatgtcagtatgattgagagtga

SEQ ID NO: 80689 - DNA, 25 bp, Probe sequence
atgtcagtatgattgagagtgattc

SEQ ID NO: 80690 - DNA, 25 bp, Probe sequence
ctatgtcagtatgattgagagtgat

SEQ ID NO: 80691 - DNA, 25 bp, Probe sequence
tatgtcagtatgattgagagtgatt

SEQ ID NO: 80692 - DNA, 25 bp, Probe sequence
taaatgagagcggtttattcactga

SEQ ID NO: 80693 - DNA, 25 bp, Probe sequence
gagcggtttattcactgatctttag

SEQ ID NO: 80694 - DNA, 25 bp, Probe sequence
cggtttattcactgatctttaggga

SEQ ID NO: 80695 - DNA, 25 bp, Probe sequence
aaatgagagcggtttattcactgat

SEQ ID NO: 80696 - DNA, 25 bp, Probe sequence
tataacagagattaggtgtcttgcg

SEQ ID NO: 80697 - DNA, 25 bp, Probe sequence
ctataacagagattaggtgtcttgc

SEQ ID NO: 80698 - DNA, 25 bp, Probe sequence
gcgggctttgttatcataatgtaat

SEQ ID NO: 80699 - DNA, 25 bp, Probe sequence
ataacagagattaggtgtcttgcgg

SEQ ID NO: 80700 - DNA, 25 bp, Probe sequence
actataacagagattaggtgtcttg

SEQ ID NO: 80701 - DNA, 25 bp, Probe sequence
tgcgggctttgttatcataatgtaa

SEQ ID NO: 80702 - DNA, 25 bp, Probe sequence
ttgcgggctttgttatcataatgta

SEQ ID NO: 80703 - DNA, 25 bp, Probe sequence
cgggctttgttatcataatgtaatc

SEQ ID NO: 80704 - DNA, 25 bp, Probe sequence
tcttgcgggctttgttatcataatg

SEQ ID NO: 80705 - DNA, 25 bp, Probe sequence
cgcaagacacctaatctctgttata

SEQ ID NO: 80706 - DNA, 25 bp, Probe sequence
gcaagacacctaatctctgttatag

SEQ ID NO: 80707 - DNA, 25 bp, Probe sequence
attacattatgataacaaagcccgc

SEQ ID NO: 80708 - DNA, 25 bp, Probe sequence
caagacacctaatctctgttatagt

SEQ ID NO: 80709 - DNA, 25 bp, Probe sequence
ccgcaagacacctaatctctgttat

SEQ ID NO: 80710 - DNA, 25 bp, Probe sequence
tacattatgataacaaagcccgcaa

SEQ ID NO: 80711 - DNA, 25 bp, Probe sequence
ttacattatgataacaaagcccgca

SEQ ID NO: 80712 - DNA, 25 bp, Probe sequence
gattacattatgataacaaagcccg

SEQ ID NO: 80713 - DNA, 25 bp, Probe sequence
attatgataacaaagcccgcaagac

SEQ ID NO: 80714 - DNA, 25 bp, Probe sequence
tgcatcttactgtaacagaatcatt

SEQ ID NO: 80715 - DNA, 25 bp, Probe sequence
gcctatcctctaatttaaaccaagc

SEQ ID NO: 80716 - DNA, 25 bp, Probe sequence
cctatcctctaatttaaaccaagcg

SEQ ID NO: 80717 - DNA, 25 bp, Probe sequence
gcagcctatcctctaatttaaacca

SEQ ID NO: 80718 - DNA, 25 bp, Probe sequence
ctatcctctaatttaaaccaagcga

SEQ ID NO: 80719 - DNA, 25 bp, Probe sequence
cagcctatcctctaatttaaaccaa

SEQ ID NO: 80720 - DNA, 25 bp, Probe sequence
tcataccaattattcattgcatcga

SEQ ID NO: 80721 - DNA, 25 bp, Probe sequence
gtcataccaattattcattgcatcg

SEQ ID NO: 80722 - DNA, 25 bp, Probe sequence
tgcagcctatcctctaatttaaacc

SEQ ID NO: 80723 - DNA, 25 bp, Probe sequence
aatgattctgttacagtaagatgca

SEQ ID NO: 80724 - DNA, 25 bp, Probe sequence
gcttggtttaaattagaggataggc

SEQ ID NO: 80725 - DNA, 25 bp, Probe sequence
cgcttggtttaaattagaggatagg

SEQ ID NO: 80726 - DNA, 25 bp, Probe sequence
tggtttaaattagaggataggctgc

SEQ ID NO: 80727 - DNA, 25 bp, Probe sequence
tcgcttggtttaaattagaggatag

SEQ ID NO: 80728 - DNA, 25 bp, Probe sequence
ttggtttaaattagaggataggctg

SEQ ID NO: 80729 - DNA, 25 bp, Probe sequence
ggtttaaattagaggataggctgca

SEQ ID NO: 80730 - DNA, 25 bp, Probe sequence
cgatgcaatgaataattggtatgac

SEQ ID NO: 80731 - DNA, 25 bp, Probe sequence
tcgatgcaatgaataattggtatga

SEQ ID NO: 80732 - DNA, 25 bp, Probe sequence
attccacttggcacttaataaagac

SEQ ID NO: 80733 - DNA, 25 bp, Probe sequence
ttccacttggcacttaataaagaca

SEQ ID NO: 80734 - DNA, 25 bp, Probe sequence
tccacttggcacttaataaagacaa

SEQ ID NO: 80735 - DNA, 25 bp, Probe sequence
tttccctaacttcaatatccacttt

SEQ ID NO: 80736 - DNA, 25 bp, Probe sequence
atttccctaacttcaatatccactt

SEQ ID NO: 80737 - DNA, 25 bp, Probe sequence
aatttccctaacttcaatatccact

SEQ ID NO: 80738 - DNA, 25 bp, Probe sequence
tattccacttggcacttaataaaga

SEQ ID NO: 80739 - DNA, 25 bp, Probe sequence
ctcagtacagcctcaaatgaagttt

SEQ ID NO: 80740 - DNA, 25 bp, Probe sequence
gcgtttagtttgtatctagtgtact

SEQ ID NO: 80741 - DNA, 25 bp, Probe sequence
gtctttattaagtgccaagtggaat

SEQ ID NO: 80742 - DNA, 25 bp, Probe sequence
tgtctttattaagtgccaagtggaa

SEQ ID NO: 80743 - DNA, 25 bp, Probe sequence
ttgtctttattaagtgccaagtgga

SEQ ID NO: 80744 - DNA, 25 bp, Probe sequence
aaagtggatattgaagttagggaaa

SEQ ID NO: 80745 - DNA, 25 bp, Probe sequence
aagtggatattgaagttagggaaat

SEQ ID NO: 80746 - DNA, 25 bp, Probe sequence
agtggatattgaagttagggaaatt

SEQ ID NO: 80747 - DNA, 25 bp, Probe sequence
tctttattaagtgccaagtggaata

SEQ ID NO: 80748 - DNA, 25 bp, Probe sequence
aaacttcatttgaggctgtactgag

SEQ ID NO: 80749 - DNA, 25 bp, Probe sequence
agtacactagatacaaactaaacgc

SEQ ID NO: 80750 - DNA, 25 bp, Probe sequence
ttcaacggtactcactatatcacaa

SEQ ID NO: 80751 - DNA, 25 bp, Probe sequence
ttctcgcaattcacaataacattaa

SEQ ID NO: 80752 - DNA, 25 bp, Probe sequence
attctcgcaattcacaataacatta

SEQ ID NO: 80753 - DNA, 25 bp, Probe sequence
tattctcgcaattcacaataacatt

SEQ ID NO: 80754 - DNA, 25 bp, Probe sequence
tatgtgccctttagaatccaatcaa

SEQ ID NO: 80755 - DNA, 25 bp, Probe sequence
atatgtgccctttagaatccaatca

SEQ ID NO: 80756 - DNA, 25 bp, Probe sequence
gtgaaatatgtgccctttagaatcc

SEQ ID NO: 80757 - DNA, 25 bp, Probe sequence
tactgtaatgtgaaatatgtgccct

SEQ ID NO: 80758 - DNA, 25 bp, Probe sequence
tgaaatatgtgccctttagaatcca

SEQ ID NO: 80759 - DNA, 25 bp, Probe sequence
ttgtgatatagtgagtaccgttgaa

SEQ ID NO: 80760 - DNA, 25 bp, Probe sequence
ttaatgttattgtgaattgcgagaa

SEQ ID NO: 80761 - DNA, 25 bp, Probe sequence
taatgttattgtgaattgcgagaat

SEQ ID NO: 80762 - DNA, 25 bp, Probe sequence
aatgttattgtgaattgcgagaata

SEQ ID NO: 80763 - DNA, 25 bp, Probe sequence
ttgattggattctaaagggcacata

SEQ ID NO: 80764 - DNA, 25 bp, Probe sequence
agggcacatatttcacattacagta

SEQ ID NO: 80765 - DNA, 25 bp, Probe sequence
ggattctaaagggcacatatttcac

SEQ ID NO: 80766 - DNA, 25 bp, Probe sequence
tgattggattctaaagggcacatat

SEQ ID NO: 80767 - DNA, 25 bp, Probe sequence
aaagggcacatatttcacattacag

SEQ ID NO: 80768 - DNA, 25 bp, Probe sequence
gcagtatcatctataactcaagact

SEQ ID NO: 80769 - DNA, 25 bp, Probe sequence
agcagtatcatctataactcaagac

SEQ ID NO: 80770 - DNA, 25 bp, Probe sequence
tagcagtatcatctataactcaaga

SEQ ID NO: 80771 - DNA, 25 bp, Probe sequence
ctagcagtatcatctataactcaag

SEQ ID NO: 80772 - DNA, 25 bp, Probe sequence
cagtatcatctataactcaagacta

SEQ ID NO: 80773 - DNA, 25 bp, Probe sequence
gccgatgttgttatatttaggctag

SEQ ID NO: 80774 - DNA, 25 bp, Probe sequence
gtcttgagttatagatgatactgct

SEQ ID NO: 80775 - DNA, 25 bp, Probe sequence
agtcttgagttatagatgatactgc

SEQ ID NO: 80776 - DNA, 25 bp, Probe sequence
tcttgagttatagatgatactgcta

SEQ ID NO: 80777 - DNA, 25 bp, Probe sequence
cttgagttatagatgatactgctag

SEQ ID NO: 80778 - DNA, 25 bp, Probe sequence
tagtcttgagttatagatgatactg

SEQ ID NO: 80779 - DNA, 25 bp, Probe sequence
ctagcctaaatataacaacatcggc

SEQ ID NO: 80780 - DNA, 25 bp, Probe sequence
agtgttaaaacaacagatgttaggt

SEQ ID NO: 80781 - DNA, 25 bp, Probe sequence
aagtgttaaaacaacagatgttagg

SEQ ID NO: 80782 - DNA, 25 bp, Probe sequence
aataagtgttaaaacaacagatgtt

SEQ ID NO: 80783 - DNA, 25 bp, Probe sequence
taagtgttaaaacaacagatgttag

SEQ ID NO: 80784 - DNA, 25 bp, Probe sequence
ataagtgttaaaacaacagatgtta

SEQ ID NO: 80785 - DNA, 25 bp, Probe sequence
taataagtgttaaaacaacagatgt

SEQ ID NO: 80786 - DNA, 25 bp, Probe sequence
actgataataagtgttaaaacaaca

SEQ ID NO: 80787 - DNA, 25 bp, Probe sequence
tgttcactacctaacatctgttgtt

SEQ ID NO: 80788 - DNA, 25 bp, Probe sequence
ttgttcactacctaacatctgttgt

SEQ ID NO: 80789 - DNA, 25 bp, Probe sequence
gttcactacctaacatctgttgttt

SEQ ID NO: 80790 - DNA, 25 bp, Probe sequence
acctaacatctgttgttttaacact

SEQ ID NO: 80791 - DNA, 25 bp, Probe sequence
ttcactacctaacatctgttgtttt

SEQ ID NO: 80792 - DNA, 25 bp, Probe sequence
cctaacatctgttgttttaacactt

SEQ ID NO: 80793 - DNA, 25 bp, Probe sequence
tcactacctaacatctgttgtttta

SEQ ID NO: 80794 - DNA, 25 bp, Probe sequence
tacctaacatctgttgttttaacac

SEQ ID NO: 80795 - DNA, 25 bp, Probe sequence
ctacctaacatctgttgttttaaca

SEQ ID NO: 80796 - DNA, 25 bp, Probe sequence
ttaacatattacgattgattagccg

SEQ ID NO: 80797 - DNA, 25 bp, Probe sequence
atgtgacttaggttcatacttgtac

SEQ ID NO: 80798 - DNA, 25 bp, Probe sequence
ctatgtgacttaggttcatacttgt

SEQ ID NO: 80799 - DNA, 25 bp, Probe sequence
actatgtgacttaggttcatacttg

SEQ ID NO: 80800 - DNA, 25 bp, Probe sequence
cactatgtgacttaggttcatactt

SEQ ID NO: 80801 - DNA, 25 bp, Probe sequence
atattacgattgattagccgtgtct

SEQ ID NO: 80802 - DNA, 25 bp, Probe sequence
catattacgattgattagccgtgtc

SEQ ID NO: 80803 - DNA, 25 bp, Probe sequence
aacatattacgattgattagccgtg

SEQ ID NO: 80804 - DNA, 25 bp, Probe sequence
tattacgattgattagccgtgtcta

SEQ ID NO: 80805 - DNA, 25 bp, Probe sequence
cggctaatcaatcgtaatatgttaa

SEQ ID NO: 80806 - DNA, 25 bp, Probe sequence
gtacaagtatgaacctaagtcacat

SEQ ID NO: 80807 - DNA, 25 bp, Probe sequence
aagtatgaacctaagtcacatagtg

SEQ ID NO: 80808 - DNA, 25 bp, Probe sequence
caagtatgaacctaagtcacatagt

SEQ ID NO: 80809 - DNA, 25 bp, Probe sequence
acaagtatgaacctaagtcacatag

SEQ ID NO: 80810 - DNA, 25 bp, Probe sequence
gacacggctaatcaatcgtaatatg

SEQ ID NO: 80811 - DNA, 25 bp, Probe sequence
agacacggctaatcaatcgtaatat

SEQ ID NO: 80812 - DNA, 25 bp, Probe sequence
cacggctaatcaatcgtaatatgtt

SEQ ID NO: 80813 - DNA, 25 bp, Probe sequence
acacggctaatcaatcgtaatatgt

SEQ ID NO: 80814 - DNA, 25 bp, Probe sequence
acttgattctaaggaggatatgaca

SEQ ID NO: 80815 - DNA, 25 bp, Probe sequence
acacttgattctaaggaggatatga

SEQ ID NO: 80816 - DNA, 25 bp, Probe sequence
cacttgattctaaggaggatatgac

SEQ ID NO: 80817 - DNA, 25 bp, Probe sequence
aacacttgattctaaggaggatatg

SEQ ID NO: 80818 - DNA, 25 bp, Probe sequence
caacacttgattctaaggaggatat

SEQ ID NO: 80819 - DNA, 25 bp, Probe sequence
cttgattctaaggaggatatgacaa

SEQ ID NO: 80820 - DNA, 25 bp, Probe sequence
caaacgacacttcaataacatcact

SEQ ID NO: 80821 - DNA, 25 bp, Probe sequence
tcaaacgacacttcaataacatcac

SEQ ID NO: 80822 - DNA, 25 bp, Probe sequence
aacgacacttcaataacatcacttt

SEQ ID NO: 80823 - DNA, 25 bp, Probe sequence
tcatatcctccttagaatcaagtgt

SEQ ID NO: 80824 - DNA, 25 bp, Probe sequence
tgtcatatcctccttagaatcaagt

SEQ ID NO: 80825 - DNA, 25 bp, Probe sequence
gtcatatcctccttagaatcaagtg

SEQ ID NO: 80826 - DNA, 25 bp, Probe sequence
catatcctccttagaatcaagtgtt

SEQ ID NO: 80827 - DNA, 25 bp, Probe sequence
atatcctccttagaatcaagtgttg

SEQ ID NO: 80828 - DNA, 25 bp, Probe sequence
ttgtcatatcctccttagaatcaag

SEQ ID NO: 80829 - DNA, 25 bp, Probe sequence
gtgatgttattgaagtgtcgtttga

SEQ ID NO: 80830 - DNA, 25 bp, Probe sequence
agtgatgttattgaagtgtcgtttg

SEQ ID NO: 80831 - DNA, 25 bp, Probe sequence
aagtgatgttattgaagtgtcgttt

SEQ ID NO: 80832 - DNA, 25 bp, Probe sequence
cataaacaaagcccatactgattga

SEQ ID NO: 80833 - DNA, 25 bp, Probe sequence
taaacaaagcccatactgattgaag

SEQ ID NO: 80834 - DNA, 25 bp, Probe sequence
tcataaacaaagcccatactgattg

SEQ ID NO: 80835 - DNA, 25 bp, Probe sequence
aaacaaagcccatactgattgaaga

SEQ ID NO: 80836 - DNA, 25 bp, Probe sequence
gacctcataaacaaagcccatactg

SEQ ID NO: 80837 - DNA, 25 bp, Probe sequence
ctcataaacaaagcccatactgatt

SEQ ID NO: 80838 - DNA, 25 bp, Probe sequence
cctcataaacaaagcccatactgat

SEQ ID NO: 80839 - DNA, 25 bp, Probe sequence
ataaacaaagcccatactgattgaa

SEQ ID NO: 80840 - DNA, 25 bp, Probe sequence
ctgacctcataaacaaagcccatac

SEQ ID NO: 80841 - DNA, 25 bp, Probe sequence
tcaatcagtatgggctttgtttatg

SEQ ID NO: 80842 - DNA, 25 bp, Probe sequence
cttcaatcagtatgggctttgttta

SEQ ID NO: 80843 - DNA, 25 bp, Probe sequence
caatcagtatgggctttgtttatga

SEQ ID NO: 80844 - DNA, 25 bp, Probe sequence
cagtatgggctttgtttatgaggtc

SEQ ID NO: 80845 - DNA, 25 bp, Probe sequence
tcttcaatcagtatgggctttgttt

SEQ ID NO: 80846 - DNA, 25 bp, Probe sequence
aatcagtatgggctttgtttatgag

SEQ ID NO: 80847 - DNA, 25 bp, Probe sequence
atcagtatgggctttgtttatgagg

SEQ ID NO: 80848 - DNA, 25 bp, Probe sequence
ttcaatcagtatgggctttgtttat

SEQ ID NO: 80849 - DNA, 25 bp, Probe sequence
gtatgggctttgtttatgaggtcag

SEQ ID NO: 80850 - DNA, 25 bp, Probe sequence
actcccacattaaacttcatctctg

SEQ ID NO: 80851 - DNA, 25 bp, Probe sequence
cactcccacattaaacttcatctct

SEQ ID NO: 80852 - DNA, 25 bp, Probe sequence
taaacttcatctctgtatgggcttt

SEQ ID NO: 80853 - DNA, 25 bp, Probe sequence
ttaaacttcatctctgtatgggctt

SEQ ID NO: 80854 - DNA, 25 bp, Probe sequence
attaaacttcatctctgtatgggct

SEQ ID NO: 80855 - DNA, 25 bp, Probe sequence
cattaaacttcatctctgtatgggc

SEQ ID NO: 80856 - DNA, 25 bp, Probe sequence
ccactcccacattaaacttcatctc

SEQ ID NO: 80857 - DNA, 25 bp, Probe sequence
ctcccacattaaacttcatctctgt

SEQ ID NO: 80858 - DNA, 25 bp, Probe sequence
tcccacattaaacttcatctctgta

SEQ ID NO: 80859 - DNA, 25 bp, Probe sequence
agagatgaagtttaatgtgggagtg

SEQ ID NO: 80860 - DNA, 25 bp, Probe sequence
cagagatgaagtttaatgtgggagt

SEQ ID NO: 80861 - DNA, 25 bp, Probe sequence
aaagcccatacagagatgaagttta

SEQ ID NO: 80862 - DNA, 25 bp, Probe sequence
aagcccatacagagatgaagtttaa

SEQ ID NO: 80863 - DNA, 25 bp, Probe sequence
gcccatacagagatgaagtttaatg

SEQ ID NO: 80864 - DNA, 25 bp, Probe sequence
agcccatacagagatgaagtttaat

SEQ ID NO: 80865 - DNA, 25 bp, Probe sequence
gagatgaagtttaatgtgggagtgg

SEQ ID NO: 80866 - DNA, 25 bp, Probe sequence
acagagatgaagtttaatgtgggag

SEQ ID NO: 80867 - DNA, 25 bp, Probe sequence
tacagagatgaagtttaatgtggga

SEQ ID NO: 80868 - DNA, 25 bp, Probe sequence
attcattgctaactttcttaacacg

SEQ ID NO: 80869 - DNA, 25 bp, Probe sequence
ttcattgctaactttcttaacacgt

SEQ ID NO: 80870 - DNA, 25 bp, Probe sequence
tcattgctaactttcttaacacgtt

SEQ ID NO: 80871 - DNA, 25 bp, Probe sequence
cattgctaactttcttaacacgttt

SEQ ID NO: 80872 - DNA, 25 bp, Probe sequence
aattcattgctaactttcttaacac

SEQ ID NO: 80873 - DNA, 25 bp, Probe sequence
gttatccgtttgtcaattttagaga

SEQ ID NO: 80874 - DNA, 25 bp, Probe sequence
agttatccgtttgtcaattttagag

SEQ ID NO: 80875 - DNA, 25 bp, Probe sequence
aaattcattgctaactttcttaaca

SEQ ID NO: 80876 - DNA, 25 bp, Probe sequence
tccgtttgtcaattttagagaattt

SEQ ID NO: 80877 - DNA, 25 bp, Probe sequence
cgtgttaagaaagttagcaatgaat

SEQ ID NO: 80878 - DNA, 25 bp, Probe sequence
acgtgttaagaaagttagcaatgaa

SEQ ID NO: 80879 - DNA, 25 bp, Probe sequence
aacgtgttaagaaagttagcaatga

SEQ ID NO: 80880 - DNA, 25 bp, Probe sequence
aaacgtgttaagaaagttagcaatg

SEQ ID NO: 80881 - DNA, 25 bp, Probe sequence
gtgttaagaaagttagcaatgaatt

SEQ ID NO: 80882 - DNA, 25 bp, Probe sequence
tctctaaaattgacaaacggataac

SEQ ID NO: 80883 - DNA, 25 bp, Probe sequence
ctctaaaattgacaaacggataact

SEQ ID NO: 80884 - DNA, 25 bp, Probe sequence
tgttaagaaagttagcaatgaattt

SEQ ID NO: 80885 - DNA, 25 bp, Probe sequence
gttaagaaagttagcaatgaatttg

SEQ ID NO: 80886 - DNA, 25 bp, Probe sequence
caactcgttattatacatgaaggca

SEQ ID NO: 80887 - DNA, 25 bp, Probe sequence
tcaactcgttattatacatgaaggc

SEQ ID NO: 80888 - DNA, 25 bp, Probe sequence
aactcgttattatacatgaaggcat

SEQ ID NO: 80889 - DNA, 25 bp, Probe sequence
atgttaaccattctcttccactgaa

SEQ ID NO: 80890 - DNA, 25 bp, Probe sequence
catgttaaccattctcttccactga

SEQ ID NO: 80891 - DNA, 25 bp, Probe sequence
atgaaggcatgttaaccattctctt

SEQ ID NO: 80892 - DNA, 25 bp, Probe sequence
atcaactcgttattatacatgaagg

SEQ ID NO: 80893 - DNA, 25 bp, Probe sequence
gcatgttaaccattctcttccactg

SEQ ID NO: 80894 - DNA, 25 bp, Probe sequence
actcgttattatacatgaaggcatg

SEQ ID NO: 80895 - DNA, 25 bp, Probe sequence
tgccttcatgtataataacgagttg

SEQ ID NO: 80896 - DNA, 25 bp, Probe sequence
gccttcatgtataataacgagttga

SEQ ID NO: 80897 - DNA, 25 bp, Probe sequence
atgccttcatgtataataacgagtt

SEQ ID NO: 80898 - DNA, 25 bp, Probe sequence
ttcagtggaagagaatggttaacat

SEQ ID NO: 80899 - DNA, 25 bp, Probe sequence
aagagaatggttaacatgccttcat

SEQ ID NO: 80900 - DNA, 25 bp, Probe sequence
tcagtggaagagaatggttaacatg

SEQ ID NO: 80901 - DNA, 25 bp, Probe sequence
ccttcatgtataataacgagttgat

SEQ ID NO: 80902 - DNA, 25 bp, Probe sequence
cagtggaagagaatggttaacatgc

SEQ ID NO: 80903 - DNA, 25 bp, Probe sequence
catgccttcatgtataataacgagt

SEQ ID NO: 80904 - DNA, 25 bp, Probe sequence
tgcgactctcctcttatacttcata

SEQ ID NO: 80905 - DNA, 25 bp, Probe sequence
gcgactctcctcttatacttcatat

SEQ ID NO: 80906 - DNA, 25 bp, Probe sequence
ctgcgactctcctcttatacttcat

SEQ ID NO: 80907 - DNA, 25 bp, Probe sequence
tctcctattgactgacatgactcta

SEQ ID NO: 80908 - DNA, 25 bp, Probe sequence
gatctcctattgactgacatgactc

SEQ ID NO: 80909 - DNA, 25 bp, Probe sequence
atctcctattgactgacatgactct

SEQ ID NO: 80910 - DNA, 25 bp, Probe sequence
ctcctattgactgacatgactctat

SEQ ID NO: 80911 - DNA, 25 bp, Probe sequence
tcctattgactgacatgactctata

SEQ ID NO: 80912 - DNA, 25 bp, Probe sequence
cctattgactgacatgactctatat

SEQ ID NO: 80913 - DNA, 25 bp, Probe sequence
tatgaagtataagaggagagtcgca

SEQ ID NO: 80914 - DNA, 25 bp, Probe sequence
atatgaagtataagaggagagtcgc

SEQ ID NO: 80915 - DNA, 25 bp, Probe sequence
atgaagtataagaggagagtcgcag

SEQ ID NO: 80916 - DNA, 25 bp, Probe sequence
tagagtcatgtcagtcaataggaga

SEQ ID NO: 80917 - DNA, 25 bp, Probe sequence
gagtcatgtcagtcaataggagatc

SEQ ID NO: 80918 - DNA, 25 bp, Probe sequence
agagtcatgtcagtcaataggagat

SEQ ID NO: 80919 - DNA, 25 bp, Probe sequence
atagagtcatgtcagtcaataggag

SEQ ID NO: 80920 - DNA, 25 bp, Probe sequence
tatagagtcatgtcagtcaatagga

SEQ ID NO: 80921 - DNA, 25 bp, Probe sequence
atatagagtcatgtcagtcaatagg

SEQ ID NO: 80922 - DNA, 25 bp, Probe sequence
ttaatggtatcatccagcctcagta

SEQ ID NO: 80923 - DNA, 25 bp, Probe sequence
taaggatgctacggttagttcaaat

SEQ ID NO: 80924 - DNA, 25 bp, Probe sequence
atttaaggatgctacggttagttca

SEQ ID NO: 80925 - DNA, 25 bp, Probe sequence
tcatctacatttcggaagttggtat

SEQ ID NO: 80926 - DNA, 25 bp, Probe sequence
ttaaggatgctacggttagttcaaa

SEQ ID NO: 80927 - DNA, 25 bp, Probe sequence
tttaaggatgctacggttagttcaa

SEQ ID NO: 80928 - DNA, 25 bp, Probe sequence
gatgctacggttagttcaaatgatt

SEQ ID NO: 80929 - DNA, 25 bp, Probe sequence
ttcatctacatttcggaagttggta

SEQ ID NO: 80930 - DNA, 25 bp, Probe sequence
catctacatttcggaagttggtatg

SEQ ID NO: 80931 - DNA, 25 bp, Probe sequence
tactgaggctggatgataccattaa

SEQ ID NO: 80932 - DNA, 25 bp, Probe sequence
atttgaactaaccgtagcatcctta

SEQ ID NO: 80933 - DNA, 25 bp, Probe sequence
ataccaacttccgaaatgtagatga

SEQ ID NO: 80934 - DNA, 25 bp, Probe sequence
tgaactaaccgtagcatccttaaat

SEQ ID NO: 80935 - DNA, 25 bp, Probe sequence
ttgaactaaccgtagcatccttaaa

SEQ ID NO: 80936 - DNA, 25 bp, Probe sequence
tttgaactaaccgtagcatccttaa

SEQ ID NO: 80937 - DNA, 25 bp, Probe sequence
aatcatttgaactaaccgtagcatc

SEQ ID NO: 80938 - DNA, 25 bp, Probe sequence
taccaacttccgaaatgtagatgaa

SEQ ID NO: 80939 - DNA, 25 bp, Probe sequence
cataccaacttccgaaatgtagatg

SEQ ID NO: 80940 - DNA, 25 bp, Probe sequence
acacctcttcccatttaaattattt

SEQ ID NO: 80941 - DNA, 25 bp, Probe sequence
tttacacctcttcccatttaaatta

SEQ ID NO: 80942 - DNA, 25 bp, Probe sequence
tacacctcttcccatttaaattatt

SEQ ID NO: 80943 - DNA, 25 bp, Probe sequence
ttacacctcttcccatttaaattat

SEQ ID NO: 80944 - DNA, 25 bp, Probe sequence
atttacacctcttcccatttaaatt

SEQ ID NO: 80945 - DNA, 25 bp, Probe sequence
tatttacacctcttcccatttaaat

SEQ ID NO: 80946 - DNA, 25 bp, Probe sequence
cacctcttcccatttaaattatttt

SEQ ID NO: 80947 - DNA, 25 bp, Probe sequence
taaaatcacttttattgcaactcaa

SEQ ID NO: 80948 - DNA, 25 bp, Probe sequence
ataaaatcacttttattgcaactca

SEQ ID NO: 80949 - DNA, 25 bp, Probe sequence
aaataatttaaatgggaagaggtgt

SEQ ID NO: 80950 - DNA, 25 bp, Probe sequence
taatttaaatgggaagaggtgtaaa

SEQ ID NO: 80951 - DNA, 25 bp, Probe sequence
ataatttaaatgggaagaggtgtaa

SEQ ID NO: 80952 - DNA, 25 bp, Probe sequence
aataatttaaatgggaagaggtgta

SEQ ID NO: 80953 - DNA, 25 bp, Probe sequence
aatttaaatgggaagaggtgtaaat

SEQ ID NO: 80954 - DNA, 25 bp, Probe sequence
atttaaatgggaagaggtgtaaata

SEQ ID NO: 80955 - DNA, 25 bp, Probe sequence
aaaataatttaaatgggaagaggtg

SEQ ID NO: 80956 - DNA, 25 bp, Probe sequence
ttgagttgcaataaaagtgatttta

SEQ ID NO: 80957 - DNA, 25 bp, Probe sequence
tgagttgcaataaaagtgattttat

SEQ ID NO: 80958 - DNA, 25 bp, Probe sequence
ccttctcttcataaaatatctgtgc

SEQ ID NO: 80959 - DNA, 25 bp, Probe sequence
gccttctcttcataaaatatctgtg

SEQ ID NO: 80960 - DNA, 25 bp, Probe sequence
ggccttctcttcataaaatatctgt

SEQ ID NO: 80961 - DNA, 25 bp, Probe sequence
cttctcttcataaaatatctgtgca

SEQ ID NO: 80962 - DNA, 25 bp, Probe sequence
tctatttatctcaatctaacgtctt

SEQ ID NO: 80963 - DNA, 25 bp, Probe sequence
ttctcttcataaaatatctgtgcat

SEQ ID NO: 80964 - DNA, 25 bp, Probe sequence
atctatttatctcaatctaacgtct

SEQ ID NO: 80965 - DNA, 25 bp, Probe sequence
tctcttcataaaatatctgtgcata

SEQ ID NO: 80966 - DNA, 25 bp, Probe sequence
ctcttcataaaatatctgtgcatat

SEQ ID NO: 80967 - DNA, 25 bp, Probe sequence
cacagatattttatgaagagaaggc

SEQ ID NO: 80968 - DNA, 25 bp, Probe sequence
gcacagatattttatgaagagaagg

SEQ ID NO: 80969 - DNA, 25 bp, Probe sequence
acagatattttatgaagagaaggcc

SEQ ID NO: 80970 - DNA, 25 bp, Probe sequence
tgcacagatattttatgaagagaag

SEQ ID NO: 80971 - DNA, 25 bp, Probe sequence
aagacgttagattgagataaataga

SEQ ID NO: 80972 - DNA, 25 bp, Probe sequence
atgcacagatattttatgaagagaa

SEQ ID NO: 80973 - DNA, 25 bp, Probe sequence
agacgttagattgagataaatagat

SEQ ID NO: 80974 - DNA, 25 bp, Probe sequence
tatgcacagatattttatgaagaga

SEQ ID NO: 80975 - DNA, 25 bp, Probe sequence
atatgcacagatattttatgaagag

SEQ ID NO: 80976 - DNA, 25 bp, Probe sequence
acaaacaccttccaatctacttact

SEQ ID NO: 80977 - DNA, 25 bp, Probe sequence
caaacaccttccaatctacttactt

SEQ ID NO: 80978 - DNA, 25 bp, Probe sequence
aaacaccttccaatctacttacttt

SEQ ID NO: 80979 - DNA, 25 bp, Probe sequence
ggaaattatgtagggaaatgctagt

SEQ ID NO: 80980 - DNA, 25 bp, Probe sequence
actaggaaattatgtagggaaatgc

SEQ ID NO: 80981 - DNA, 25 bp, Probe sequence
aggaaattatgtagggaaatgctag

SEQ ID NO: 80982 - DNA, 25 bp, Probe sequence
ctaggaaattatgtagggaaatgct

SEQ ID NO: 80983 - DNA, 25 bp, Probe sequence
aacaccttccaatctacttacttta

SEQ ID NO: 80984 - DNA, 25 bp, Probe sequence
acaccttccaatctacttactttat

SEQ ID NO: 80985 - DNA, 25 bp, Probe sequence
agtaagtagattggaaggtgtttgt

SEQ ID NO: 80986 - DNA, 25 bp, Probe sequence
aagtaagtagattggaaggtgtttg

SEQ ID NO: 80987 - DNA, 25 bp, Probe sequence
aaagtaagtagattggaaggtgttt

SEQ ID NO: 80988 - DNA, 25 bp, Probe sequence
gcatttccctacataatttcctagt

SEQ ID NO: 80989 - DNA, 25 bp, Probe sequence
actagcatttccctacataatttcc

SEQ ID NO: 80990 - DNA, 25 bp, Probe sequence
agcatttccctacataatttcctag

SEQ ID NO: 80991 - DNA, 25 bp, Probe sequence
ctagcatttccctacataatttcct

SEQ ID NO: 80992 - DNA, 25 bp, Probe sequence
taaagtaagtagattggaaggtgtt

SEQ ID NO: 80993 - DNA, 25 bp, Probe sequence
ataaagtaagtagattggaaggtgt

SEQ ID NO: 80994 - DNA, 25 bp, Probe sequence
aaacttgctgaatcgtcttattaaa

SEQ ID NO: 80995 - DNA, 25 bp, Probe sequence
tccaacgtagtcaaataacacttta

SEQ ID NO: 80996 - DNA, 25 bp, Probe sequence
ccaacgtagtcaaataacactttaa

SEQ ID NO: 80997 - DNA, 25 bp, Probe sequence
aacactttaaaacttgctgaatcgt

SEQ ID NO: 80998 - DNA, 25 bp, Probe sequence
actttaaaacttgctgaatcgtctt

SEQ ID NO: 80999 - DNA, 25 bp, Probe sequence
cactttaaaacttgctgaatcgtct

SEQ ID NO: 81000 - DNA, 25 bp, Probe sequence
acactttaaaacttgctgaatcgtc

SEQ ID NO: 81001 - DNA, 25 bp, Probe sequence
aacttgctgaatcgtcttattaaaa

SEQ ID NO: 81002 - DNA, 25 bp, Probe sequence
aaaacttgctgaatcgtcttattaa

SEQ ID NO: 81003 - DNA, 25 bp, Probe sequence
tttaataagacgattcagcaagttt

SEQ ID NO: 81004 - DNA, 25 bp, Probe sequence
taaagtgttatttgactacgttgga

SEQ ID NO: 81005 - DNA, 25 bp, Probe sequence
ttaaagtgttatttgactacgttgg

SEQ ID NO: 81006 - DNA, 25 bp, Probe sequence
acgattcagcaagttttaaagtgtt

SEQ ID NO: 81007 - DNA, 25 bp, Probe sequence
agacgattcagcaagttttaaagtg

SEQ ID NO: 81008 - DNA, 25 bp, Probe sequence
aagacgattcagcaagttttaaagt

SEQ ID NO: 81009 - DNA, 25 bp, Probe sequence
gacgattcagcaagttttaaagtgt

SEQ ID NO: 81010 - DNA, 25 bp, Probe sequence
aataagacgattcagcaagttttaa

SEQ ID NO: 81011 - DNA, 25 bp, Probe sequence
ttaataagacgattcagcaagtttt

SEQ ID NO: 81012 - DNA, 25 bp, Probe sequence
acctcccacatttaatcattaactt

SEQ ID NO: 81013 - DNA, 25 bp, Probe sequence
aacctcccacatttaatcattaact

SEQ ID NO: 81014 - DNA, 25 bp, Probe sequence
aaacactaaacaacacatacgtctc

SEQ ID NO: 81015 - DNA, 25 bp, Probe sequence
aacactaaacaacacatacgtctct

SEQ ID NO: 81016 - DNA, 25 bp, Probe sequence
cctcccacatttaatcattaacttc

SEQ ID NO: 81017 - DNA, 25 bp, Probe sequence
acactaaacaacacatacgtctctg

SEQ ID NO: 81018 - DNA, 25 bp, Probe sequence
atttaacctcccacatttaatcatt

SEQ ID NO: 81019 - DNA, 25 bp, Probe sequence
cactaaacaacacatacgtctctgt

SEQ ID NO: 81020 - DNA, 25 bp, Probe sequence
ctcccacatttaatcattaacttct

SEQ ID NO: 81021 - DNA, 25 bp, Probe sequence
agttaatgattaaatgtgggaggtt

SEQ ID NO: 81022 - DNA, 25 bp, Probe sequence
aagttaatgattaaatgtgggaggt

SEQ ID NO: 81023 - DNA, 25 bp, Probe sequence
gagacgtatgtgttgtttagtgttt

SEQ ID NO: 81024 - DNA, 25 bp, Probe sequence
agagacgtatgtgttgtttagtgtt

SEQ ID NO: 81025 - DNA, 25 bp, Probe sequence
gaagttaatgattaaatgtgggagg

SEQ ID NO: 81026 - DNA, 25 bp, Probe sequence
cagagacgtatgtgttgtttagtgt

SEQ ID NO: 81027 - DNA, 25 bp, Probe sequence
aatgattaaatgtgggaggttaaat

SEQ ID NO: 81028 - DNA, 25 bp, Probe sequence
acagagacgtatgtgttgtttagtg

SEQ ID NO: 81029 - DNA, 25 bp, Probe sequence
gttaatgattaaatgtgggaggtta

SEQ ID NO: 81030 - DNA, 25 bp, Probe sequence
cttatgttatttagcaaggcaagcc

SEQ ID NO: 81031 - DNA, 25 bp, Probe sequence
ttatgttatttagcaaggcaagcca

SEQ ID NO: 81032 - DNA, 25 bp, Probe sequence
tatgttatttagcaaggcaagccac

SEQ ID NO: 81033 - DNA, 25 bp, Probe sequence
ctctcgattcatggcttgccttatt

SEQ ID NO: 81034 - DNA, 25 bp, Probe sequence
agcttatgttatttagcaaggcaag

SEQ ID NO: 81035 - DNA, 25 bp, Probe sequence
atgttatttagcaaggcaagccact

SEQ ID NO: 81036 - DNA, 25 bp, Probe sequence
ttatttagcaaggcaagccactctc

SEQ ID NO: 81037 - DNA, 25 bp, Probe sequence
actctcgattcatggcttgccttat

SEQ ID NO: 81038 - DNA, 25 bp, Probe sequence
gttatttagcaaggcaagccactct

SEQ ID NO: 81039 - DNA, 25 bp, Probe sequence
ggcttgccttgctaaataacataag

SEQ ID NO: 81040 - DNA, 25 bp, Probe sequence
tggcttgccttgctaaataacataa

SEQ ID NO: 81041 - DNA, 25 bp, Probe sequence
gtggcttgccttgctaaataacata

SEQ ID NO: 81042 - DNA, 25 bp, Probe sequence
aataaggcaagccatgaatcgagag

SEQ ID NO: 81043 - DNA, 25 bp, Probe sequence
cttgccttgctaaataacataagct

SEQ ID NO: 81044 - DNA, 25 bp, Probe sequence
agtggcttgccttgctaaataacat

SEQ ID NO: 81045 - DNA, 25 bp, Probe sequence
gagagtggcttgccttgctaaataa

SEQ ID NO: 81046 - DNA, 25 bp, Probe sequence
ataaggcaagccatgaatcgagagt

SEQ ID NO: 81047 - DNA, 25 bp, Probe sequence
agagtggcttgccttgctaaataac

SEQ ID NO: 81048 - DNA, 25 bp, Probe sequence
gtgacatagtgatagaagagaaggc

SEQ ID NO: 81049 - DNA, 25 bp, Probe sequence
agtgacatagtgatagaagagaagg

SEQ ID NO: 81050 - DNA, 25 bp, Probe sequence
aagtgacatagtgatagaagagaag

SEQ ID NO: 81051 - DNA, 25 bp, Probe sequence
gacatagtgatagaagagaaggcca

SEQ ID NO: 81052 - DNA, 25 bp, Probe sequence
tgacatagtgatagaagagaaggcc

SEQ ID NO: 81053 - DNA, 25 bp, Probe sequence
aaagtgacatagtgatagaagagaa

SEQ ID NO: 81054 - DNA, 25 bp, Probe sequence
atagtgatagaagagaaggccacac

SEQ ID NO: 81055 - DNA, 25 bp, Probe sequence
catagtgatagaagagaaggccaca

SEQ ID NO: 81056 - DNA, 25 bp, Probe sequence
acatagtgatagaagagaaggccac

SEQ ID NO: 81057 - DNA, 25 bp, Probe sequence
gccttctcttctatcactatgtcac

SEQ ID NO: 81058 - DNA, 25 bp, Probe sequence
ccttctcttctatcactatgtcact

SEQ ID NO: 81059 - DNA, 25 bp, Probe sequence
cttctcttctatcactatgtcactt

SEQ ID NO: 81060 - DNA, 25 bp, Probe sequence
ggccttctcttctatcactatgtca

SEQ ID NO: 81061 - DNA, 25 bp, Probe sequence
tggccttctcttctatcactatgtc

SEQ ID NO: 81062 - DNA, 25 bp, Probe sequence
ttctcttctatcactatgtcacttt

SEQ ID NO: 81063 - DNA, 25 bp, Probe sequence
gtggccttctcttctatcactatgt

SEQ ID NO: 81064 - DNA, 25 bp, Probe sequence
tgtggccttctcttctatcactatg

SEQ ID NO: 81065 - DNA, 25 bp, Probe sequence
gtgtggccttctcttctatcactat

SEQ ID NO: 81066 - DNA, 25 bp, Probe sequence
tcttcttttgtaggagcattttatt

SEQ ID NO: 81067 - DNA, 25 bp, Probe sequence
gtaggagcattttattatcaagagt

SEQ ID NO: 81068 - DNA, 25 bp, Probe sequence
tgtaggagcattttattatcaagag

SEQ ID NO: 81069 - DNA, 25 bp, Probe sequence
atcttcttttgtaggagcattttat

SEQ ID NO: 81070 - DNA, 25 bp, Probe sequence
ttgtaggagcattttattatcaaga

SEQ ID NO: 81071 - DNA, 25 bp, Probe sequence
aggagcattttattatcaagagtaa

SEQ ID NO: 81072 - DNA, 25 bp, Probe sequence
cttttgtaggagcattttattatca

SEQ ID NO: 81073 - DNA, 25 bp, Probe sequence
cttcttttgtaggagcattttatta

SEQ ID NO: 81074 - DNA, 25 bp, Probe sequence
tttgtaggagcattttattatcaag

SEQ ID NO: 81075 - DNA, 25 bp, Probe sequence
aataaaatgctcctacaaaagaaga

SEQ ID NO: 81076 - DNA, 25 bp, Probe sequence
ataaaatgctcctacaaaagaagat

SEQ ID NO: 81077 - DNA, 25 bp, Probe sequence
ctcttgataataaaatgctcctaca

SEQ ID NO: 81078 - DNA, 25 bp, Probe sequence
actcttgataataaaatgctcctac

SEQ ID NO: 81079 - DNA, 25 bp, Probe sequence
tcttgataataaaatgctcctacaa

SEQ ID NO: 81080 - DNA, 25 bp, Probe sequence
ttactcttgataataaaatgctcct

SEQ ID NO: 81081 - DNA, 25 bp, Probe sequence
tgataataaaatgctcctacaaaag

SEQ ID NO: 81082 - DNA, 25 bp, Probe sequence
taataaaatgctcctacaaaagaag

SEQ ID NO: 81083 - DNA, 25 bp, Probe sequence
cttgataataaaatgctcctacaaa

SEQ ID NO: 81084 - DNA, 25 bp, Probe sequence
cctttacttctattacgctaaccca

SEQ ID NO: 81085 - DNA, 25 bp, Probe sequence
acctttacttctattacgctaaccc

SEQ ID NO: 81086 - DNA, 25 bp, Probe sequence
ctttacttctattacgctaacccaa

SEQ ID NO: 81087 - DNA, 25 bp, Probe sequence
tttacttctattacgctaacccaat

SEQ ID NO: 81088 - DNA, 25 bp, Probe sequence
tacctttacttctattacgctaacc

SEQ ID NO: 81089 - DNA, 25 bp, Probe sequence
ttacttctattacgctaacccaatt

SEQ ID NO: 81090 - DNA, 25 bp, Probe sequence
ttacttcacgaaactaaacaacatg

SEQ ID NO: 81091 - DNA, 25 bp, Probe sequence
tttacttcacgaaactaaacaacat

SEQ ID NO: 81092 - DNA, 25 bp, Probe sequence
actacattgttatctactagaggtt

SEQ ID NO: 81093 - DNA, 25 bp, Probe sequence
gggttagcgtaatagaagtaaaggt

SEQ ID NO: 81094 - DNA, 25 bp, Probe sequence
tgggttagcgtaatagaagtaaagg

SEQ ID NO: 81095 - DNA, 25 bp, Probe sequence
ttgggttagcgtaatagaagtaaag

SEQ ID NO: 81096 - DNA, 25 bp, Probe sequence
attgggttagcgtaatagaagtaaa

SEQ ID NO: 81097 - DNA, 25 bp, Probe sequence
ggttagcgtaatagaagtaaaggta

SEQ ID NO: 81098 - DNA, 25 bp, Probe sequence
aattgggttagcgtaatagaagtaa

SEQ ID NO: 81099 - DNA, 25 bp, Probe sequence
catgttgtttagtttcgtgaagtaa

SEQ ID NO: 81100 - DNA, 25 bp, Probe sequence
atgttgtttagtttcgtgaagtaaa

SEQ ID NO: 81101 - DNA, 25 bp, Probe sequence
acctctagtagataacaatgtagtt

SEQ ID NO: 81102 - DNA, 25 bp, Probe sequence
aaccacctgttcctaatatcgctaa

SEQ ID NO: 81103 - DNA, 25 bp, Probe sequence
accacctgttcctaatatcgctaag

SEQ ID NO: 81104 - DNA, 25 bp, Probe sequence
ctgttcctaatatcgctaaggtctt

SEQ ID NO: 81105 - DNA, 25 bp, Probe sequence
cctgttcctaatatcgctaaggtct

SEQ ID NO: 81106 - DNA, 25 bp, Probe sequence
ccacctgttcctaatatcgctaagg

SEQ ID NO: 81107 - DNA, 25 bp, Probe sequence
tgttcctaatatcgctaaggtcttt

SEQ ID NO: 81108 - DNA, 25 bp, Probe sequence
ttagaaccacctgttcctaatatcg

SEQ ID NO: 81109 - DNA, 25 bp, Probe sequence
gaaccacctgttcctaatatcgcta

SEQ ID NO: 81110 - DNA, 25 bp, Probe sequence
tagaaccacctgttcctaatatcgc

SEQ ID NO: 81111 - DNA, 25 bp, Probe sequence
ttagcgatattaggaacaggtggtt

SEQ ID NO: 81112 - DNA, 25 bp, Probe sequence
cttagcgatattaggaacaggtggt

SEQ ID NO: 81113 - DNA, 25 bp, Probe sequence
aagaccttagcgatattaggaacag

SEQ ID NO: 81114 - DNA, 25 bp, Probe sequence
agaccttagcgatattaggaacagg

SEQ ID NO: 81115 - DNA, 25 bp, Probe sequence
ccttagcgatattaggaacaggtgg

SEQ ID NO: 81116 - DNA, 25 bp, Probe sequence
aaagaccttagcgatattaggaaca

SEQ ID NO: 81117 - DNA, 25 bp, Probe sequence
cgatattaggaacaggtggttctaa

SEQ ID NO: 81118 - DNA, 25 bp, Probe sequence
gcgatattaggaacaggtggttcta

SEQ ID NO: 81119 - DNA, 25 bp, Probe sequence
tagcgatattaggaacaggtggttc

SEQ ID NO: 81120 - DNA, 25 bp, Probe sequence
gcaacactaatagatcctcttacca

SEQ ID NO: 81121 - DNA, 25 bp, Probe sequence
tatagttattcctcgttgtcatgct

SEQ ID NO: 81122 - DNA, 25 bp, Probe sequence
atagttattcctcgttgtcatgctc

SEQ ID NO: 81123 - DNA, 25 bp, Probe sequence
tattcctcgttgtcatgctctactt

SEQ ID NO: 81124 - DNA, 25 bp, Probe sequence
ttattcctcgttgtcatgctctact

SEQ ID NO: 81125 - DNA, 25 bp, Probe sequence
gttattcctcgttgtcatgctctac

SEQ ID NO: 81126 - DNA, 25 bp, Probe sequence
agttattcctcgttgtcatgctcta

SEQ ID NO: 81127 - DNA, 25 bp, Probe sequence
tagttattcctcgttgtcatgctct

SEQ ID NO: 81128 - DNA, 25 bp, Probe sequence
ctatagttattcctcgttgtcatgc

SEQ ID NO: 81129 - DNA, 25 bp, Probe sequence
agcatgacaacgaggaataactata

SEQ ID NO: 81130 - DNA, 25 bp, Probe sequence
tggtaagaggatctattagtgttgc

SEQ ID NO: 81131 - DNA, 25 bp, Probe sequence
gagcatgacaacgaggaataactat

SEQ ID NO: 81132 - DNA, 25 bp, Probe sequence
agagcatgacaacgaggaataacta

SEQ ID NO: 81133 - DNA, 25 bp, Probe sequence
tagagcatgacaacgaggaataact

SEQ ID NO: 81134 - DNA, 25 bp, Probe sequence
gtagagcatgacaacgaggaataac

SEQ ID NO: 81135 - DNA, 25 bp, Probe sequence
agtagagcatgacaacgaggaataa

SEQ ID NO: 81136 - DNA, 25 bp, Probe sequence
aagtagagcatgacaacgaggaata

SEQ ID NO: 81137 - DNA, 25 bp, Probe sequence
gcatgacaacgaggaataactatag

SEQ ID NO: 81138 - DNA, 25 bp, Probe sequence
atggatgttatcaagacaagtcatt

SEQ ID NO: 81139 - DNA, 25 bp, Probe sequence
ctatggatgttatcaagacaagtca

SEQ ID NO: 81140 - DNA, 25 bp, Probe sequence
tctatggatgttatcaagacaagtc

SEQ ID NO: 81141 - DNA, 25 bp, Probe sequence
tggatgttatcaagacaagtcatta

SEQ ID NO: 81142 - DNA, 25 bp, Probe sequence
gtttatgaatgtttgggaggaaagt

SEQ ID NO: 81143 - DNA, 25 bp, Probe sequence
tgtttatgaatgtttgggaggaaag

SEQ ID NO: 81144 - DNA, 25 bp, Probe sequence
ttgtttatgaatgtttgggaggaaa

SEQ ID NO: 81145 - DNA, 25 bp, Probe sequence
tatggatgttatcaagacaagtcat

SEQ ID NO: 81146 - DNA, 25 bp, Probe sequence
attgtttatgaatgtttgggaggaa

SEQ ID NO: 81147 - DNA, 25 bp, Probe sequence
aatgacttgtcttgataacatccat

SEQ ID NO: 81148 - DNA, 25 bp, Probe sequence
tgacttgtcttgataacatccatag

SEQ ID NO: 81149 - DNA, 25 bp, Probe sequence
gacttgtcttgataacatccataga

SEQ ID NO: 81150 - DNA, 25 bp, Probe sequence
taatgacttgtcttgataacatcca

SEQ ID NO: 81151 - DNA, 25 bp, Probe sequence
ctttcctcccaaacattcataaaca

SEQ ID NO: 81152 - DNA, 25 bp, Probe sequence
actttcctcccaaacattcataaac

SEQ ID NO: 81153 - DNA, 25 bp, Probe sequence
tttcctcccaaacattcataaacaa

SEQ ID NO: 81154 - DNA, 25 bp, Probe sequence
atgacttgtcttgataacatccata

SEQ ID NO: 81155 - DNA, 25 bp, Probe sequence
ttcctcccaaacattcataaacaat

SEQ ID NO: 81156 - DNA, 25 bp, Probe sequence
tcatttcccatctgattaacatcca

SEQ ID NO: 81157 - DNA, 25 bp, Probe sequence
catttcccatctgattaacatccag

SEQ ID NO: 81158 - DNA, 25 bp, Probe sequence
atcatttcccatctgattaacatcc

SEQ ID NO: 81159 - DNA, 25 bp, Probe sequence
atttcccatctgattaacatccaga

SEQ ID NO: 81160 - DNA, 25 bp, Probe sequence
tctgattaacatccagatgtggaaa

SEQ ID NO: 81161 - DNA, 25 bp, Probe sequence
tgattaacatccagatgtggaaatg

SEQ ID NO: 81162 - DNA, 25 bp, Probe sequence
gattaacatccagatgtggaaatga

SEQ ID NO: 81163 - DNA, 25 bp, Probe sequence
ctgattaacatccagatgtggaaat

SEQ ID NO: 81164 - DNA, 25 bp, Probe sequence
taacatccagatgtggaaatgattt

SEQ ID NO: 81165 - DNA, 25 bp, Probe sequence
tggatgttaatcagatgggaaatga

SEQ ID NO: 81166 - DNA, 25 bp, Probe sequence
ctggatgttaatcagatgggaaatg

SEQ ID NO: 81167 - DNA, 25 bp, Probe sequence
ggatgttaatcagatgggaaatgat

SEQ ID NO: 81168 - DNA, 25 bp, Probe sequence
tctggatgttaatcagatgggaaat

SEQ ID NO: 81169 - DNA, 25 bp, Probe sequence
tttccacatctggatgttaatcaga

SEQ ID NO: 81170 - DNA, 25 bp, Probe sequence
catttccacatctggatgttaatca

SEQ ID NO: 81171 - DNA, 25 bp, Probe sequence
atttccacatctggatgttaatcag

SEQ ID NO: 81172 - DNA, 25 bp, Probe sequence
tcatttccacatctggatgttaatc

SEQ ID NO: 81173 - DNA, 25 bp, Probe sequence
aatcatttccacatctggatgttaa

SEQ ID NO: 81174 - DNA, 25 bp, Probe sequence
catgcctctatgaatactatccaat

SEQ ID NO: 81175 - DNA, 25 bp, Probe sequence
attccatttgactctgaggtgatac

SEQ ID NO: 81176 - DNA, 25 bp, Probe sequence
atattccatttgactctgaggtgat

SEQ ID NO: 81177 - DNA, 25 bp, Probe sequence
tattccatttgactctgaggtgata

SEQ ID NO: 81178 - DNA, 25 bp, Probe sequence
tatattccatttgactctgaggtga

SEQ ID NO: 81179 - DNA, 25 bp, Probe sequence
actatattccatttgactctgaggt

SEQ ID NO: 81180 - DNA, 25 bp, Probe sequence
ctatattccatttgactctgaggtg

SEQ ID NO: 81181 - DNA, 25 bp, Probe sequence
atgcctctatgaatactatccaata

SEQ ID NO: 81182 - DNA, 25 bp, Probe sequence
tgcctctatgaatactatccaatat

SEQ ID NO: 81183 - DNA, 25 bp, Probe sequence
attggatagtattcatagaggcatg

SEQ ID NO: 81184 - DNA, 25 bp, Probe sequence
gtatcacctcagagtcaaatggaat

SEQ ID NO: 81185 - DNA, 25 bp, Probe sequence
atcacctcagagtcaaatggaatat

SEQ ID NO: 81186 - DNA, 25 bp, Probe sequence
tcacctcagagtcaaatggaatata

SEQ ID NO: 81187 - DNA, 25 bp, Probe sequence
acctcagagtcaaatggaatatagt

SEQ ID NO: 81188 - DNA, 25 bp, Probe sequence
cacctcagagtcaaatggaatatag

SEQ ID NO: 81189 - DNA, 25 bp, Probe sequence
tattggatagtattcatagaggcat

SEQ ID NO: 81190 - DNA, 25 bp, Probe sequence
atattggatagtattcatagaggca

SEQ ID NO: 81191 - DNA, 25 bp, Probe sequence
gtattcatagaggcatgacggtatt

SEQ ID NO: 81192 - DNA, 25 bp, Probe sequence
aaggtttatgacttgagaaatgttc

SEQ ID NO: 81193 - DNA, 25 bp, Probe sequence
ggtgtattgaaaagttaaggagtgg

SEQ ID NO: 81194 - DNA, 25 bp, Probe sequence
tggaggtgtattgaaaagttaagga

SEQ ID NO: 81195 - DNA, 25 bp, Probe sequence
ctggaggtgtattgaaaagttaagg

SEQ ID NO: 81196 - DNA, 25 bp, Probe sequence
ggaggtgtattgaaaagttaaggag

SEQ ID NO: 81197 - DNA, 25 bp, Probe sequence
ttatcatactggaggtgtattgaaa

SEQ ID NO: 81198 - DNA, 25 bp, Probe sequence
tttatcatactggaggtgtattgaa

SEQ ID NO: 81199 - DNA, 25 bp, Probe sequence
gtgtattgaaaagttaaggagtgga

SEQ ID NO: 81200 - DNA, 25 bp, Probe sequence
aggtgtattgaaaagttaaggagtg

SEQ ID NO: 81201 - DNA, 25 bp, Probe sequence
gaacatttctcaagtcataaacctt

SEQ ID NO: 81202 - DNA, 25 bp, Probe sequence
tccttaacttttcaatacacctcca

SEQ ID NO: 81203 - DNA, 25 bp, Probe sequence
ccactccttaacttttcaatacacc

SEQ ID NO: 81204 - DNA, 25 bp, Probe sequence
ccttaacttttcaatacacctccag

SEQ ID NO: 81205 - DNA, 25 bp, Probe sequence
ttcaatacacctccagtatgataaa

SEQ ID NO: 81206 - DNA, 25 bp, Probe sequence
tttcaatacacctccagtatgataa

SEQ ID NO: 81207 - DNA, 25 bp, Probe sequence
ctccttaacttttcaatacacctcc

SEQ ID NO: 81208 - DNA, 25 bp, Probe sequence
tccactccttaacttttcaatacac

SEQ ID NO: 81209 - DNA, 25 bp, Probe sequence
cactccttaacttttcaatacacct

SEQ ID NO: 81210 - DNA, 25 bp, Probe sequence
ctttaagatttctcagttgtccgat

SEQ ID NO: 81211 - DNA, 25 bp, Probe sequence
ttaagggcattgtgtatgagtcttt

SEQ ID NO: 81212 - DNA, 25 bp, Probe sequence
tttaagggcattgtgtatgagtctt

SEQ ID NO: 81213 - DNA, 25 bp, Probe sequence
ctttaagggcattgtgtatgagtct

SEQ ID NO: 81214 - DNA, 25 bp, Probe sequence
ttaagatttctcagttgtccgattt

SEQ ID NO: 81215 - DNA, 25 bp, Probe sequence
tttaagatttctcagttgtccgatt

SEQ ID NO: 81216 - DNA, 25 bp, Probe sequence
gattaaagttgaatttgccgtatgt

SEQ ID NO: 81217 - DNA, 25 bp, Probe sequence
tgattaaagttgaatttgccgtatg

SEQ ID NO: 81218 - DNA, 25 bp, Probe sequence
agttgaatttgccgtatgtattaga

SEQ ID NO: 81219 - DNA, 25 bp, Probe sequence
aagactcatacacaatgcccttaaa

SEQ ID NO: 81220 - DNA, 25 bp, Probe sequence
aaagactcatacacaatgcccttaa

SEQ ID NO: 81221 - DNA, 25 bp, Probe sequence
atcggacaactgagaaatcttaaag

SEQ ID NO: 81222 - DNA, 25 bp, Probe sequence
agactcatacacaatgcccttaaag

SEQ ID NO: 81223 - DNA, 25 bp, Probe sequence
aatcggacaactgagaaatcttaaa

SEQ ID NO: 81224 - DNA, 25 bp, Probe sequence
aaatcggacaactgagaaatcttaa

SEQ ID NO: 81225 - DNA, 25 bp, Probe sequence
catacggcaaattcaactttaatca

SEQ ID NO: 81226 - DNA, 25 bp, Probe sequence
acatacggcaaattcaactttaatc

SEQ ID NO: 81227 - DNA, 25 bp, Probe sequence
tctaatacatacggcaaattcaact

SEQ ID NO: 81228 - DNA, 25 bp, Probe sequence
aaagcaagcagtggtaaatgtaaat

SEQ ID NO: 81229 - DNA, 25 bp, Probe sequence
taaagcaagcagtggtaaatgtaaa

SEQ ID NO: 81230 - DNA, 25 bp, Probe sequence
gttaaagcaagcagtggtaaatgta

SEQ ID NO: 81231 - DNA, 25 bp, Probe sequence
atgtatatgttaaagcaagcagtgg

SEQ ID NO: 81232 - DNA, 25 bp, Probe sequence
aagcaagcagtggtaaatgtaaatt

SEQ ID NO: 81233 - DNA, 25 bp, Probe sequence
ttaaagcaagcagtggtaaatgtaa

SEQ ID NO: 81234 - DNA, 25 bp, Probe sequence
atgttaaagcaagcagtggtaaatg

SEQ ID NO: 81235 - DNA, 25 bp, Probe sequence
tgtatatgttaaagcaagcagtggt

SEQ ID NO: 81236 - DNA, 25 bp, Probe sequence
tatgttaaagcaagcagtggtaaat

SEQ ID NO: 81237 - DNA, 25 bp, Probe sequence
atttacatttaccactgcttgcttt

SEQ ID NO: 81238 - DNA, 25 bp, Probe sequence
tacatttaccactgcttgctttaac

SEQ ID NO: 81239 - DNA, 25 bp, Probe sequence
tttacatttaccactgcttgcttta

SEQ ID NO: 81240 - DNA, 25 bp, Probe sequence
ccactgcttgctttaacatatacat

SEQ ID NO: 81241 - DNA, 25 bp, Probe sequence
catttaccactgcttgctttaacat

SEQ ID NO: 81242 - DNA, 25 bp, Probe sequence
ttacatttaccactgcttgctttaa

SEQ ID NO: 81243 - DNA, 25 bp, Probe sequence
aatttacatttaccactgcttgctt

SEQ ID NO: 81244 - DNA, 25 bp, Probe sequence
accactgcttgctttaacatataca

SEQ ID NO: 81245 - DNA, 25 bp, Probe sequence
taccactgcttgctttaacatatac

SEQ ID NO: 81246 - DNA, 25 bp, Probe sequence
tatcatcataccttacgcattggac

SEQ ID NO: 81247 - DNA, 25 bp, Probe sequence
atcatcataccttacgcattggact

SEQ ID NO: 81248 - DNA, 25 bp, Probe sequence
gtatcatcataccttacgcattgga

SEQ ID NO: 81249 - DNA, 25 bp, Probe sequence
tcatcataccttacgcattggactg

SEQ ID NO: 81250 - DNA, 25 bp, Probe sequence
tccagtgcgtatcatcataccttac

SEQ ID NO: 81251 - DNA, 25 bp, Probe sequence
gtccagtgcgtatcatcatacctta

SEQ ID NO: 81252 - DNA, 25 bp, Probe sequence
agtccagtgcgtatcatcatacctt

SEQ ID NO: 81253 - DNA, 25 bp, Probe sequence
cagtccagtgcgtatcatcatacct

SEQ ID NO: 81254 - DNA, 25 bp, Probe sequence
cgtatcatcataccttacgcattgg

SEQ ID NO: 81255 - DNA, 25 bp, Probe sequence
gtccaatgcgtaaggtatgatgata

SEQ ID NO: 81256 - DNA, 25 bp, Probe sequence
agtccaatgcgtaaggtatgatgat

SEQ ID NO: 81257 - DNA, 25 bp, Probe sequence
tccaatgcgtaaggtatgatgatac

SEQ ID NO: 81258 - DNA, 25 bp, Probe sequence
cagtccaatgcgtaaggtatgatga

SEQ ID NO: 81259 - DNA, 25 bp, Probe sequence
taaggtatgatgatacgcactggac

SEQ ID NO: 81260 - DNA, 25 bp, Probe sequence
gtaaggtatgatgatacgcactgga

SEQ ID NO: 81261 - DNA, 25 bp, Probe sequence
aaggtatgatgatacgcactggact

SEQ ID NO: 81262 - DNA, 25 bp, Probe sequence
aggtatgatgatacgcactggactg

SEQ ID NO: 81263 - DNA, 25 bp, Probe sequence
ccaatgcgtaaggtatgatgatacg

SEQ ID NO: 81264 - DNA, 25 bp, Probe sequence
ctttccctgtgatgaacattgtaat

SEQ ID NO: 81265 - DNA, 25 bp, Probe sequence
actttccctgtgatgaacattgtaa

SEQ ID NO: 81266 - DNA, 25 bp, Probe sequence
ttccctgtgatgaacattgtaattt

SEQ ID NO: 81267 - DNA, 25 bp, Probe sequence
tttccctgtgatgaacattgtaatt

SEQ ID NO: 81268 - DNA, 25 bp, Probe sequence
ttaaataccaaagtcctcggcacta

SEQ ID NO: 81269 - DNA, 25 bp, Probe sequence
tcatacgcctatctttacagaattt

SEQ ID NO: 81270 - DNA, 25 bp, Probe sequence
atcatacgcctatctttacagaatt

SEQ ID NO: 81271 - DNA, 25 bp, Probe sequence
cactttccctgtgatgaacattgta

SEQ ID NO: 81272 - DNA, 25 bp, Probe sequence
atagggttaaataccaaagtcctcg

SEQ ID NO: 81273 - DNA, 25 bp, Probe sequence
attacaatgttcatcacagggaaag

SEQ ID NO: 81274 - DNA, 25 bp, Probe sequence
ttacaatgttcatcacagggaaagt

SEQ ID NO: 81275 - DNA, 25 bp, Probe sequence
aattacaatgttcatcacagggaaa

SEQ ID NO: 81276 - DNA, 25 bp, Probe sequence
aaattacaatgttcatcacagggaa

SEQ ID NO: 81277 - DNA, 25 bp, Probe sequence
tagtgccgaggactttggtatttaa

SEQ ID NO: 81278 - DNA, 25 bp, Probe sequence
aaattctgtaaagataggcgtatga

SEQ ID NO: 81279 - DNA, 25 bp, Probe sequence
aattctgtaaagataggcgtatgat

SEQ ID NO: 81280 - DNA, 25 bp, Probe sequence
tacaatgttcatcacagggaaagtg

SEQ ID NO: 81281 - DNA, 25 bp, Probe sequence
cgaggactttggtatttaaccctat

SEQ ID NO: 81282 - DNA, 25 bp, Probe sequence
attacaatcatagtttggcttcttt

SEQ ID NO: 81283 - DNA, 25 bp, Probe sequence
aaatagccgacaacttcatctgtga

SEQ ID NO: 81284 - DNA, 25 bp, Probe sequence
aattacaatcatagtttggcttctt

SEQ ID NO: 81285 - DNA, 25 bp, Probe sequence
aatagccgacaacttcatctgtgaa

SEQ ID NO: 81286 - DNA, 25 bp, Probe sequence
tgactaattcattcccgtatttatt

SEQ ID NO: 81287 - DNA, 25 bp, Probe sequence
gaaaatagccgacaacttcatctgt

SEQ ID NO: 81288 - DNA, 25 bp, Probe sequence
taattacaatcatagtttggcttct

SEQ ID NO: 81289 - DNA, 25 bp, Probe sequence
aaaatagccgacaacttcatctgtg

SEQ ID NO: 81290 - DNA, 25 bp, Probe sequence
tctatgactaattcattcccgtatt

SEQ ID NO: 81291 - DNA, 25 bp, Probe sequence
aaagaagccaaactatgattgtaat

SEQ ID NO: 81292 - DNA, 25 bp, Probe sequence
tcacagatgaagttgtcggctattt

SEQ ID NO: 81293 - DNA, 25 bp, Probe sequence
aagaagccaaactatgattgtaatt

SEQ ID NO: 81294 - DNA, 25 bp, Probe sequence
ttcacagatgaagttgtcggctatt

SEQ ID NO: 81295 - DNA, 25 bp, Probe sequence
aataaatacgggaatgaattagtca

SEQ ID NO: 81296 - DNA, 25 bp, Probe sequence
acagatgaagttgtcggctattttc

SEQ ID NO: 81297 - DNA, 25 bp, Probe sequence
agaagccaaactatgattgtaatta

SEQ ID NO: 81298 - DNA, 25 bp, Probe sequence
cacagatgaagttgtcggctatttt

SEQ ID NO: 81299 - DNA, 25 bp, Probe sequence
aatacgggaatgaattagtcataga

SEQ ID NO: 81300 - DNA, 25 bp, Probe sequence
caccaatacaatagatgccagacta

SEQ ID NO: 81301 - DNA, 25 bp, Probe sequence
accaatacaatagatgccagactaa

SEQ ID NO: 81302 - DNA, 25 bp, Probe sequence
ccaatacaatagatgccagactaag

SEQ ID NO: 81303 - DNA, 25 bp, Probe sequence
aagtctggcaccaatacaatagatg

SEQ ID NO: 81304 - DNA, 25 bp, Probe sequence
caatacaatagatgccagactaaga

SEQ ID NO: 81305 - DNA, 25 bp, Probe sequence
atacaatagatgccagactaagagt

SEQ ID NO: 81306 - DNA, 25 bp, Probe sequence
aatacaatagatgccagactaagag

SEQ ID NO: 81307 - DNA, 25 bp, Probe sequence
aatgtctgccaattaggtcaattaa

SEQ ID NO: 81308 - DNA, 25 bp, Probe sequence
ttaatgtctgccaattaggtcaatt

SEQ ID NO: 81309 - DNA, 25 bp, Probe sequence
tagtctggcatctattgtattggtg

SEQ ID NO: 81310 - DNA, 25 bp, Probe sequence
ttagtctggcatctattgtattggt

SEQ ID NO: 81311 - DNA, 25 bp, Probe sequence
cttagtctggcatctattgtattgg

SEQ ID NO: 81312 - DNA, 25 bp, Probe sequence
catctattgtattggtgccagactt

SEQ ID NO: 81313 - DNA, 25 bp, Probe sequence
tcttagtctggcatctattgtattg

SEQ ID NO: 81314 - DNA, 25 bp, Probe sequence
actcttagtctggcatctattgtat

SEQ ID NO: 81315 - DNA, 25 bp, Probe sequence
ctcttagtctggcatctattgtatt

SEQ ID NO: 81316 - DNA, 25 bp, Probe sequence
aattgacctaattggcagacattaa

SEQ ID NO: 81317 - DNA, 25 bp, Probe sequence
ttaattgacctaattggcagacatt

SEQ ID NO: 81318 - DNA, 25 bp, Probe sequence
cttacaatggcactcaccttatcta

SEQ ID NO: 81319 - DNA, 25 bp, Probe sequence
ttacaatggcactcaccttatctaa

SEQ ID NO: 81320 - DNA, 25 bp, Probe sequence
tacaatggcactcaccttatctaat

SEQ ID NO: 81321 - DNA, 25 bp, Probe sequence
ttcttacaatggcactcaccttatc

SEQ ID NO: 81322 - DNA, 25 bp, Probe sequence
acaatggcactcaccttatctaatt

SEQ ID NO: 81323 - DNA, 25 bp, Probe sequence
gttcttacaatggcactcaccttat

SEQ ID NO: 81324 - DNA, 25 bp, Probe sequence
tcttacaatggcactcaccttatct

SEQ ID NO: 81325 - DNA, 25 bp, Probe sequence
caatcaacatttcgccacttataca

SEQ ID NO: 81326 - DNA, 25 bp, Probe sequence
tcaatcaacatttcgccacttatac

SEQ ID NO: 81327 - DNA, 25 bp, Probe sequence
tagataaggtgagtgccattgtaag

SEQ ID NO: 81328 - DNA, 25 bp, Probe sequence
ttagataaggtgagtgccattgtaa

SEQ ID NO: 81329 - DNA, 25 bp, Probe sequence
attagataaggtgagtgccattgta

SEQ ID NO: 81330 - DNA, 25 bp, Probe sequence
gataaggtgagtgccattgtaagaa

SEQ ID NO: 81331 - DNA, 25 bp, Probe sequence
aattagataaggtgagtgccattgt

SEQ ID NO: 81332 - DNA, 25 bp, Probe sequence
ataaggtgagtgccattgtaagaac

SEQ ID NO: 81333 - DNA, 25 bp, Probe sequence
agataaggtgagtgccattgtaaga

SEQ ID NO: 81334 - DNA, 25 bp, Probe sequence
aagtggcgaaatgttgattgataat

SEQ ID NO: 81335 - DNA, 25 bp, Probe sequence
gtataagtggcgaaatgttgattga

SEQ ID NO: 81336 - DNA, 25 bp, Probe sequence
caacctccgttaagtttgttaaatt

SEQ ID NO: 81337 - DNA, 25 bp, Probe sequence
aacctccgttaagtttgttaaattt

SEQ ID NO: 81338 - DNA, 25 bp, Probe sequence
acaacctccgttaagtttgttaaat

SEQ ID NO: 81339 - DNA, 25 bp, Probe sequence
acctccgttaagtttgttaaatttt

SEQ ID NO: 81340 - DNA, 25 bp, Probe sequence
cgaattttacaaacttatgttagca

SEQ ID NO: 81341 - DNA, 25 bp, Probe sequence
acgaattttacaaacttatgttagc

SEQ ID NO: 81342 - DNA, 25 bp, Probe sequence
aatttaacaaacttaacggaggttg

SEQ ID NO: 81343 - DNA, 25 bp, Probe sequence
aaatttaacaaacttaacggaggtt

SEQ ID NO: 81344 - DNA, 25 bp, Probe sequence
atttaacaaacttaacggaggttgt

SEQ ID NO: 81345 - DNA, 25 bp, Probe sequence
aaaatttaacaaacttaacggaggt

SEQ ID NO: 81346 - DNA, 25 bp, Probe sequence
gctaacataagtttgtaaaattcgt

SEQ ID NO: 81347 - DNA, 25 bp, Probe sequence
tgctaacataagtttgtaaaattcg

SEQ ID NO: 81348 - DNA, 25 bp, Probe sequence
gtgaacaaaatgatgtacggaggtg

SEQ ID NO: 81349 - DNA, 25 bp, Probe sequence
ttaacgtgaacaaaatgatgtacgg

SEQ ID NO: 81350 - DNA, 25 bp, Probe sequence
taacgtgaacaaaatgatgtacgga

SEQ ID NO: 81351 - DNA, 25 bp, Probe sequence
tttaacgtgaacaaaatgatgtacg

SEQ ID NO: 81352 - DNA, 25 bp, Probe sequence
ttttaacgtgaacaaaatgatgtac

SEQ ID NO: 81353 - DNA, 25 bp, Probe sequence
tgaacaaaatgatgtacggaggtgc

SEQ ID NO: 81354 - DNA, 25 bp, Probe sequence
aacgtgaacaaaatgatgtacggag

SEQ ID NO: 81355 - DNA, 25 bp, Probe sequence
gaacaaaatgatgtacggaggtgca

SEQ ID NO: 81356 - DNA, 25 bp, Probe sequence
cgtgaacaaaatgatgtacggaggt

SEQ ID NO: 81357 - DNA, 25 bp, Probe sequence
cacctccgtacatcattttgttcac

SEQ ID NO: 81358 - DNA, 25 bp, Probe sequence
ccgtacatcattttgttcacgttaa

SEQ ID NO: 81359 - DNA, 25 bp, Probe sequence
cgtacatcattttgttcacgttaaa

SEQ ID NO: 81360 - DNA, 25 bp, Probe sequence
tccgtacatcattttgttcacgtta

SEQ ID NO: 81361 - DNA, 25 bp, Probe sequence
gtacatcattttgttcacgttaaaa

SEQ ID NO: 81362 - DNA, 25 bp, Probe sequence
gcacctccgtacatcattttgttca

SEQ ID NO: 81363 - DNA, 25 bp, Probe sequence
ctccgtacatcattttgttcacgtt

SEQ ID NO: 81364 - DNA, 25 bp, Probe sequence
acctccgtacatcattttgttcacg

SEQ ID NO: 81365 - DNA, 25 bp, Probe sequence
tgcacctccgtacatcattttgttc

SEQ ID NO: 81366 - DNA, 25 bp, Probe sequence
ataggtccacgaaataaacggtaat

SEQ ID NO: 81367 - DNA, 25 bp, Probe sequence
aataggtccacgaaataaacggtaa

SEQ ID NO: 81368 - DNA, 25 bp, Probe sequence
atacaataggtccacgaaataaacg

SEQ ID NO: 81369 - DNA, 25 bp, Probe sequence
taggtccacgaaataaacggtaatt

SEQ ID NO: 81370 - DNA, 25 bp, Probe sequence
caataggtccacgaaataaacggta

SEQ ID NO: 81371 - DNA, 25 bp, Probe sequence
tacaataggtccacgaaataaacgg

SEQ ID NO: 81372 - DNA, 25 bp, Probe sequence
aaacaatacaataggtccacgaaat

SEQ ID NO: 81373 - DNA, 25 bp, Probe sequence
acaatacaataggtccacgaaataa

SEQ ID NO: 81374 - DNA, 25 bp, Probe sequence
aacaatacaataggtccacgaaata

SEQ ID NO: 81375 - DNA, 25 bp, Probe sequence
attaccgtttatttcgtggacctat

SEQ ID NO: 81376 - DNA, 25 bp, Probe sequence
ttaccgtttatttcgtggacctatt

SEQ ID NO: 81377 - DNA, 25 bp, Probe sequence
cgtttatttcgtggacctattgtat

SEQ ID NO: 81378 - DNA, 25 bp, Probe sequence
ccgtttatttcgtggacctattgta

SEQ ID NO: 81379 - DNA, 25 bp, Probe sequence
taccgtttatttcgtggacctattg

SEQ ID NO: 81380 - DNA, 25 bp, Probe sequence
aattaccgtttatttcgtggaccta

SEQ ID NO: 81381 - DNA, 25 bp, Probe sequence
atttcgtggacctattgtattgttt

SEQ ID NO: 81382 - DNA, 25 bp, Probe sequence
tatttcgtggacctattgtattgtt

SEQ ID NO: 81383 - DNA, 25 bp, Probe sequence
ttatttcgtggacctattgtattgt

SEQ ID NO: 81384 - DNA, 25 bp, Probe sequence
tgaatcctgtttcgatttatctcaa

SEQ ID NO: 81385 - DNA, 25 bp, Probe sequence
atgaatcctgtttcgatttatctca

SEQ ID NO: 81386 - DNA, 25 bp, Probe sequence
gaatcctgtttcgatttatctcaaa

SEQ ID NO: 81387 - DNA, 25 bp, Probe sequence
tatgaatcctgtttcgatttatctc

SEQ ID NO: 81388 - DNA, 25 bp, Probe sequence
cctgtttcgatttatctcaaaatgt

SEQ ID NO: 81389 - DNA, 25 bp, Probe sequence
tcctgtttcgatttatctcaaaatg

SEQ ID NO: 81390 - DNA, 25 bp, Probe sequence
ttatgaatcctgtttcgatttatct

SEQ ID NO: 81391 - DNA, 25 bp, Probe sequence
atcctgtttcgatttatctcaaaat

SEQ ID NO: 81392 - DNA, 25 bp, Probe sequence
ttgattcacaaaattgacaataact

SEQ ID NO: 81393 - DNA, 25 bp, Probe sequence
ttgagataaatcgaaacaggattca

SEQ ID NO: 81394 - DNA, 25 bp, Probe sequence
tgagataaatcgaaacaggattcat

SEQ ID NO: 81395 - DNA, 25 bp, Probe sequence
tttgagataaatcgaaacaggattc

SEQ ID NO: 81396 - DNA, 25 bp, Probe sequence
gagataaatcgaaacaggattcata

SEQ ID NO: 81397 - DNA, 25 bp, Probe sequence
acattttgagataaatcgaaacagg

SEQ ID NO: 81398 - DNA, 25 bp, Probe sequence
cattttgagataaatcgaaacagga

SEQ ID NO: 81399 - DNA, 25 bp, Probe sequence
agataaatcgaaacaggattcataa

SEQ ID NO: 81400 - DNA, 25 bp, Probe sequence
attttgagataaatcgaaacaggat

SEQ ID NO: 81401 - DNA, 25 bp, Probe sequence
agttattgtcaattttgtgaatcaa

SEQ ID NO: 81402 - DNA, 25 bp, Probe sequence
aagttagacttccttcccactaaag

SEQ ID NO: 81403 - DNA, 25 bp, Probe sequence
aaagttagacttccttcccactaaa

SEQ ID NO: 81404 - DNA, 25 bp, Probe sequence
ttagacttccttcccactaaagtac

SEQ ID NO: 81405 - DNA, 25 bp, Probe sequence
gttagacttccttcccactaaagta

SEQ ID NO: 81406 - DNA, 25 bp, Probe sequence
agttagacttccttcccactaaagt

SEQ ID NO: 81407 - DNA, 25 bp, Probe sequence
tagacttccttcccactaaagtacc

SEQ ID NO: 81408 - DNA, 25 bp, Probe sequence
cttccttcccactaaagtaccactt

SEQ ID NO: 81409 - DNA, 25 bp, Probe sequence
gacttccttcccactaaagtaccac

SEQ ID NO: 81410 - DNA, 25 bp, Probe sequence
agacttccttcccactaaagtacca

SEQ ID NO: 81411 - DNA, 25 bp, Probe sequence
ctttagtgggaaggaagtctaactt

SEQ ID NO: 81412 - DNA, 25 bp, Probe sequence
tttagtgggaaggaagtctaacttt

SEQ ID NO: 81413 - DNA, 25 bp, Probe sequence
tactttagtgggaaggaagtctaac

SEQ ID NO: 81414 - DNA, 25 bp, Probe sequence
gtactttagtgggaaggaagtctaa

SEQ ID NO: 81415 - DNA, 25 bp, Probe sequence
actttagtgggaaggaagtctaact

SEQ ID NO: 81416 - DNA, 25 bp, Probe sequence
ggtactttagtgggaaggaagtcta

SEQ ID NO: 81417 - DNA, 25 bp, Probe sequence
aagtggtactttagtgggaaggaag

SEQ ID NO: 81418 - DNA, 25 bp, Probe sequence
tggtactttagtgggaaggaagtct

SEQ ID NO: 81419 - DNA, 25 bp, Probe sequence
gtggtactttagtgggaaggaagtc

SEQ ID NO: 81420 - DNA, 25 bp, Probe sequence
caacgaatgttaccttgacttctaa

SEQ ID NO: 81421 - DNA, 25 bp, Probe sequence
gcaacgaatgttaccttgacttcta

SEQ ID NO: 81422 - DNA, 25 bp, Probe sequence
aacgaatgttaccttgacttctaat

SEQ ID NO: 81423 - DNA, 25 bp, Probe sequence
acgaatgttaccttgacttctaata

SEQ ID NO: 81424 - DNA, 25 bp, Probe sequence
cgaatgttaccttgacttctaatac

SEQ ID NO: 81425 - DNA, 25 bp, Probe sequence
ggcaacgaatgttaccttgacttct

SEQ ID NO: 81426 - DNA, 25 bp, Probe sequence
gaatgttaccttgacttctaataca

SEQ ID NO: 81427 - DNA, 25 bp, Probe sequence
aggcaacgaatgttaccttgacttc

SEQ ID NO: 81428 - DNA, 25 bp, Probe sequence
aagaagccaaggcaacgaatgttac

SEQ ID NO: 81429 - DNA, 25 bp, Probe sequence
ttagaagtcaaggtaacattcgttg

SEQ ID NO: 81430 - DNA, 25 bp, Probe sequence
tagaagtcaaggtaacattcgttgc

SEQ ID NO: 81431 - DNA, 25 bp, Probe sequence
attagaagtcaaggtaacattcgtt

SEQ ID NO: 81432 - DNA, 25 bp, Probe sequence
tattagaagtcaaggtaacattcgt

SEQ ID NO: 81433 - DNA, 25 bp, Probe sequence
gtattagaagtcaaggtaacattcg

SEQ ID NO: 81434 - DNA, 25 bp, Probe sequence
agaagtcaaggtaacattcgttgcc

SEQ ID NO: 81435 - DNA, 25 bp, Probe sequence
tgtattagaagtcaaggtaacattc

SEQ ID NO: 81436 - DNA, 25 bp, Probe sequence
gaagtcaaggtaacattcgttgcct

SEQ ID NO: 81437 - DNA, 25 bp, Probe sequence
gtaacattcgttgccttggcttctt

SEQ ID NO: 81438 - DNA, 25 bp, Probe sequence
tgtgtctactcattacgttatacca

SEQ ID NO: 81439 - DNA, 25 bp, Probe sequence
tgtctactcattacgttataccact

SEQ ID NO: 81440 - DNA, 25 bp, Probe sequence
ttgtgtctactcattacgttatacc

SEQ ID NO: 81441 - DNA, 25 bp, Probe sequence
gtgtctactcattacgttataccac

SEQ ID NO: 81442 - DNA, 25 bp, Probe sequence
gtctactcattacgttataccacta

SEQ ID NO: 81443 - DNA, 25 bp, Probe sequence
ccttcttcctatatattgtgtctac

SEQ ID NO: 81444 - DNA, 25 bp, Probe sequence
tcttcctatatattgtgtctactca

SEQ ID NO: 81445 - DNA, 25 bp, Probe sequence
attgtgtctactcattacgttatac

SEQ ID NO: 81446 - DNA, 25 bp, Probe sequence
cccttcttcctatatattgtgtcta

SEQ ID NO: 81447 - DNA, 25 bp, Probe sequence
tggtataacgtaatgagtagacaca

SEQ ID NO: 81448 - DNA, 25 bp, Probe sequence
agtggtataacgtaatgagtagaca

SEQ ID NO: 81449 - DNA, 25 bp, Probe sequence
ggtataacgtaatgagtagacacaa

SEQ ID NO: 81450 - DNA, 25 bp, Probe sequence
gtggtataacgtaatgagtagacac

SEQ ID NO: 81451 - DNA, 25 bp, Probe sequence
tagtggtataacgtaatgagtagac

SEQ ID NO: 81452 - DNA, 25 bp, Probe sequence
gtagacacaatatataggaagaagg

SEQ ID NO: 81453 - DNA, 25 bp, Probe sequence
tgagtagacacaatatataggaaga

SEQ ID NO: 81454 - DNA, 25 bp, Probe sequence
gtataacgtaatgagtagacacaat

SEQ ID NO: 81455 - DNA, 25 bp, Probe sequence
tagacacaatatataggaagaaggg

SEQ ID NO: 81456 - DNA, 25 bp, Probe sequence
ctaatccttgtatatcctgtcctgt

SEQ ID NO: 81457 - DNA, 25 bp, Probe sequence
actaatccttgtatatcctgtcctg

SEQ ID NO: 81458 - DNA, 25 bp, Probe sequence
tgatagtaacgacttcaaccagatt

SEQ ID NO: 81459 - DNA, 25 bp, Probe sequence
atccttgtatatcctgtcctgtatt

SEQ ID NO: 81460 - DNA, 25 bp, Probe sequence
aatccttgtatatcctgtcctgtat

SEQ ID NO: 81461 - DNA, 25 bp, Probe sequence
atgatagtaacgacttcaaccagat

SEQ ID NO: 81462 - DNA, 25 bp, Probe sequence
gctatgatagtaacgacttcaacca

SEQ ID NO: 81463 - DNA, 25 bp, Probe sequence
tatgatagtaacgacttcaaccaga

SEQ ID NO: 81464 - DNA, 25 bp, Probe sequence
tggcatgactaatccttgtatatcc

SEQ ID NO: 81465 - DNA, 25 bp, Probe sequence
caggacaggatatacaaggattagt

SEQ ID NO: 81466 - DNA, 25 bp, Probe sequence
acaggacaggatatacaaggattag

SEQ ID NO: 81467 - DNA, 25 bp, Probe sequence
aatctggttgaagtcgttactatca

SEQ ID NO: 81468 - DNA, 25 bp, Probe sequence
atacaggacaggatatacaaggatt

SEQ ID NO: 81469 - DNA, 25 bp, Probe sequence
aatacaggacaggatatacaaggat

SEQ ID NO: 81470 - DNA, 25 bp, Probe sequence
atctggttgaagtcgttactatcat

SEQ ID NO: 81471 - DNA, 25 bp, Probe sequence
tggttgaagtcgttactatcatagc

SEQ ID NO: 81472 - DNA, 25 bp, Probe sequence
tctggttgaagtcgttactatcata

SEQ ID NO: 81473 - DNA, 25 bp, Probe sequence
ggatatacaaggattagtcatgcca

SEQ ID NO: 81474 - DNA, 25 bp, Probe sequence
gaagacttaccttagacggttagac

SEQ ID NO: 81475 - DNA, 25 bp, Probe sequence
agaagacttaccttagacggttaga

SEQ ID NO: 81476 - DNA, 25 bp, Probe sequence
aagaagacttaccttagacggttag

SEQ ID NO: 81477 - DNA, 25 bp, Probe sequence
ataagaagacttaccttagacggtt

SEQ ID NO: 81478 - DNA, 25 bp, Probe sequence
aataagaagacttaccttagacggt

SEQ ID NO: 81479 - DNA, 25 bp, Probe sequence
aagacttaccttagacggttagacg

SEQ ID NO: 81480 - DNA, 25 bp, Probe sequence
taagaagacttaccttagacggtta

SEQ ID NO: 81481 - DNA, 25 bp, Probe sequence
aaataagaagacttaccttagacgg

SEQ ID NO: 81482 - DNA, 25 bp, Probe sequence
agacttaccttagacggttagacgg

SEQ ID NO: 81483 - DNA, 25 bp, Probe sequence
tctaaccgtctaaggtaagtcttct

SEQ ID NO: 81484 - DNA, 25 bp, Probe sequence
gtctaaccgtctaaggtaagtcttc

SEQ ID NO: 81485 - DNA, 25 bp, Probe sequence
ctaaccgtctaaggtaagtcttctt

SEQ ID NO: 81486 - DNA, 25 bp, Probe sequence
accgtctaaggtaagtcttcttatt

SEQ ID NO: 81487 - DNA, 25 bp, Probe sequence
aaccgtctaaggtaagtcttcttat

SEQ ID NO: 81488 - DNA, 25 bp, Probe sequence
taaccgtctaaggtaagtcttctta

SEQ ID NO: 81489 - DNA, 25 bp, Probe sequence
cgtctaaccgtctaaggtaagtctt

SEQ ID NO: 81490 - DNA, 25 bp, Probe sequence
ccgtctaaggtaagtcttcttattt

SEQ ID NO: 81491 - DNA, 25 bp, Probe sequence
ccgtctaaccgtctaaggtaagtct

SEQ ID NO: 81492 - DNA, 25 bp, Probe sequence
gttgagcaacatcctttatatcttt

SEQ ID NO: 81493 - DNA, 25 bp, Probe sequence
ttgagcaacatcctttatatctttt

SEQ ID NO: 81494 - DNA, 25 bp, Probe sequence
accttaaaatatttaacaccaatcg

SEQ ID NO: 81495 - DNA, 25 bp, Probe sequence
acaccttaaaatatttaacaccaat

SEQ ID NO: 81496 - DNA, 25 bp, Probe sequence
caccttaaaatatttaacaccaatc

SEQ ID NO: 81497 - DNA, 25 bp, Probe sequence
aaagatataaaggatgttgctcaac

SEQ ID NO: 81498 - DNA, 25 bp, Probe sequence
aaaagatataaaggatgttgctcaa

SEQ ID NO: 81499 - DNA, 25 bp, Probe sequence
cgattggtgttaaatattttaaggt

SEQ ID NO: 81500 - DNA, 25 bp, Probe sequence
attggtgttaaatattttaaggtgt

SEQ ID NO: 81501 - DNA, 25 bp, Probe sequence
gattggtgttaaatattttaaggtg

SEQ ID NO: 81502 - DNA, 25 bp, Probe sequence
gttgcttgaatgacattatcagtaa

SEQ ID NO: 81503 - DNA, 25 bp, Probe sequence
ttatgtcgtgtcagttattaatgca

SEQ ID NO: 81504 - DNA, 25 bp, Probe sequence
aatgcctcctaatgacatactatta

SEQ ID NO: 81505 - DNA, 25 bp, Probe sequence
attatgtcgtgtcagttattaatgc

SEQ ID NO: 81506 - DNA, 25 bp, Probe sequence
tgcttgaatgacattatcagtaatt

SEQ ID NO: 81507 - DNA, 25 bp, Probe sequence
ttgcttgaatgacattatcagtaat

SEQ ID NO: 81508 - DNA, 25 bp, Probe sequence
actttgattatgtcgtgtcagttat

SEQ ID NO: 81509 - DNA, 25 bp, Probe sequence
aaatgcctcctaatgacatactatt

SEQ ID NO: 81510 - DNA, 25 bp, Probe sequence
ttgattatgtcgtgtcagttattaa

SEQ ID NO: 81511 - DNA, 25 bp, Probe sequence
ttactgataatgtcattcaagcaac

SEQ ID NO: 81512 - DNA, 25 bp, Probe sequence
tgcattaataactgacacgacataa

SEQ ID NO: 81513 - DNA, 25 bp, Probe sequence
taatagtatgtcattaggaggcatt

SEQ ID NO: 81514 - DNA, 25 bp, Probe sequence
gcattaataactgacacgacataat

SEQ ID NO: 81515 - DNA, 25 bp, Probe sequence
actgaaaggctgatttggtacataa

SEQ ID NO: 81516 - DNA, 25 bp, Probe sequence
tactgaaaggctgatttggtacata

SEQ ID NO: 81517 - DNA, 25 bp, Probe sequence
ttactgaaaggctgatttggtacat

SEQ ID NO: 81518 - DNA, 25 bp, Probe sequence
tttactgaaaggctgatttggtaca

SEQ ID NO: 81519 - DNA, 25 bp, Probe sequence
ctgaaaggctgatttggtacataat

SEQ ID NO: 81520 - DNA, 25 bp, Probe sequence
gcgaacatacattatatagcgtgat

SEQ ID NO: 81521 - DNA, 25 bp, Probe sequence
ctgacacactcatacattgttacac

SEQ ID NO: 81522 - DNA, 25 bp, Probe sequence
actgacacactcatacattgttaca

SEQ ID NO: 81523 - DNA, 25 bp, Probe sequence
aactgacacactcatacattgttac

SEQ ID NO: 81524 - DNA, 25 bp, Probe sequence
tgacacactcatacattgttacacg

SEQ ID NO: 81525 - DNA, 25 bp, Probe sequence
aactcatacatactgataccatacg

SEQ ID NO: 81526 - DNA, 25 bp, Probe sequence
atgtgattgtttattaagccctcct

SEQ ID NO: 81527 - DNA, 25 bp, Probe sequence
gtgcgaccgaatacatattaaatca

SEQ ID NO: 81528 - DNA, 25 bp, Probe sequence
gctgcccaactcatataatccttaa

SEQ ID NO: 81529 - DNA, 25 bp, Probe sequence
atcacgctatataatgtatgttcgc

SEQ ID NO: 81530 - DNA, 25 bp, Probe sequence
tgtaacaatgtatgagtgtgtcagt

SEQ ID NO: 81531 - DNA, 25 bp, Probe sequence
gtgtaacaatgtatgagtgtgtcag

SEQ ID NO: 81532 - DNA, 25 bp, Probe sequence
gtaacaatgtatgagtgtgtcagtt

SEQ ID NO: 81533 - DNA, 25 bp, Probe sequence
cgtgtaacaatgtatgagtgtgtca

SEQ ID NO: 81534 - DNA, 25 bp, Probe sequence
cgtatggtatcagtatgtatgagtt

SEQ ID NO: 81535 - DNA, 25 bp, Probe sequence
aggagggcttaataaacaatcacat

SEQ ID NO: 81536 - DNA, 25 bp, Probe sequence
tgatttaatatgtattcggtcgcac

SEQ ID NO: 81537 - DNA, 25 bp, Probe sequence
ttaaggattatatgagttgggcagc

SEQ ID NO: 81538 - DNA, 25 bp, Probe sequence
tgcgtagtaatcaatcgttatcatt

SEQ ID NO: 81539 - DNA, 25 bp, Probe sequence
ttgcgtagtaatcaatcgttatcat

SEQ ID NO: 81540 - DNA, 25 bp, Probe sequence
agtatcagtatgtatttcgggcttc

SEQ ID NO: 81541 - DNA, 25 bp, Probe sequence
gagtatcagtatgtatttcgggctt

SEQ ID NO: 81542 - DNA, 25 bp, Probe sequence
atgatttcgtgatgttagttaccca

SEQ ID NO: 81543 - DNA, 25 bp, Probe sequence
catcgcttcatcagtgtaacaacaa

SEQ ID NO: 81544 - DNA, 25 bp, Probe sequence
tatgtatttcgggcttcgtttgata

SEQ ID NO: 81545 - DNA, 25 bp, Probe sequence
aatgatttcgtgatgttagttaccc

SEQ ID NO: 81546 - DNA, 25 bp, Probe sequence
tgatttcgtgatgttagttacccat

SEQ ID NO: 81547 - DNA, 25 bp, Probe sequence
aatgataacgattgattactacgca

SEQ ID NO: 81548 - DNA, 25 bp, Probe sequence
atgataacgattgattactacgcaa

SEQ ID NO: 81549 - DNA, 25 bp, Probe sequence
aagcccgaaatacatactgatactc

SEQ ID NO: 81550 - DNA, 25 bp, Probe sequence
gaagcccgaaatacatactgatact

SEQ ID NO: 81551 - DNA, 25 bp, Probe sequence
ttgttgttacactgatgaagcgatg

SEQ ID NO: 81552 - DNA, 25 bp, Probe sequence
tgggtaactaacatcacgaaatcat

SEQ ID NO: 81553 - DNA, 25 bp, Probe sequence
tatcaaacgaagcccgaaatacata

SEQ ID NO: 81554 - DNA, 25 bp, Probe sequence
gggtaactaacatcacgaaatcatt

SEQ ID NO: 81555 - DNA, 25 bp, Probe sequence
atgggtaactaacatcacgaaatca

SEQ ID NO: 81556 - DNA, 25 bp, Probe sequence
gcacctcatttctttgttagttcta

SEQ ID NO: 81557 - DNA, 25 bp, Probe sequence
tgcacctcatttctttgttagttct

SEQ ID NO: 81558 - DNA, 25 bp, Probe sequence
atgcacctcatttctttgttagttc

SEQ ID NO: 81559 - DNA, 25 bp, Probe sequence
catgcacctcatttctttgttagtt

SEQ ID NO: 81560 - DNA, 25 bp, Probe sequence
cacctcatttctttgttagttctat

SEQ ID NO: 81561 - DNA, 25 bp, Probe sequence
acctcatttctttgttagttctata

SEQ ID NO: 81562 - DNA, 25 bp, Probe sequence
tagaactaacaaagaaatgaggtgc

SEQ ID NO: 81563 - DNA, 25 bp, Probe sequence
agaactaacaaagaaatgaggtgca

SEQ ID NO: 81564 - DNA, 25 bp, Probe sequence
gaactaacaaagaaatgaggtgcat

SEQ ID NO: 81565 - DNA, 25 bp, Probe sequence
aactaacaaagaaatgaggtgcatg

SEQ ID NO: 81566 - DNA, 25 bp, Probe sequence
atagaactaacaaagaaatgaggtg

SEQ ID NO: 81567 - DNA, 25 bp, Probe sequence
tatagaactaacaaagaaatgaggt

SEQ ID NO: 81568 - DNA, 25 bp, Probe sequence
catagtcatatactcaggaggatgt

SEQ ID NO: 81569 - DNA, 25 bp, Probe sequence
acatagtcatatactcaggaggatg

SEQ ID NO: 81570 - DNA, 25 bp, Probe sequence
agacatagtcatatactcaggagga

SEQ ID NO: 81571 - DNA, 25 bp, Probe sequence
aagacatagtcatatactcaggagg

SEQ ID NO: 81572 - DNA, 25 bp, Probe sequence
gacatagtcatatactcaggaggat

SEQ ID NO: 81573 - DNA, 25 bp, Probe sequence
acgcttctattctaacgctttctat

SEQ ID NO: 81574 - DNA, 25 bp, Probe sequence
ttcacacgcttctattctaacgctt

SEQ ID NO: 81575 - DNA, 25 bp, Probe sequence
tgaagacatagtcatatactcagga

SEQ ID NO: 81576 - DNA, 25 bp, Probe sequence
cacgcttctattctaacgctttcta

SEQ ID NO: 81577 - DNA, 25 bp, Probe sequence
catcctcctgagtatatgactatgt

SEQ ID NO: 81578 - DNA, 25 bp, Probe sequence
acatcctcctgagtatatgactatg

SEQ ID NO: 81579 - DNA, 25 bp, Probe sequence
tcctcctgagtatatgactatgtct

SEQ ID NO: 81580 - DNA, 25 bp, Probe sequence
cctcctgagtatatgactatgtctt

SEQ ID NO: 81581 - DNA, 25 bp, Probe sequence
atcctcctgagtatatgactatgtc

SEQ ID NO: 81582 - DNA, 25 bp, Probe sequence
aagcgttagaatagaagcgtgtgaa

SEQ ID NO: 81583 - DNA, 25 bp, Probe sequence
atagaaagcgttagaatagaagcgt

SEQ ID NO: 81584 - DNA, 25 bp, Probe sequence
tcctgagtatatgactatgtcttca

SEQ ID NO: 81585 - DNA, 25 bp, Probe sequence
tagaaagcgttagaatagaagcgtg

SEQ ID NO: 81586 - DNA, 25 bp, Probe sequence
aaattcccgagcactataacaaggt

SEQ ID NO: 81587 - DNA, 25 bp, Probe sequence
aattcccgagcactataacaaggtg

SEQ ID NO: 81588 - DNA, 25 bp, Probe sequence
aaaattcccgagcactataacaagg

SEQ ID NO: 81589 - DNA, 25 bp, Probe sequence
actataacaaggtgttcgggaattt

SEQ ID NO: 81590 - DNA, 25 bp, Probe sequence
cactataacaaggtgttcgggaatt

SEQ ID NO: 81591 - DNA, 25 bp, Probe sequence
attcccgagcactataacaaggtgt

SEQ ID NO: 81592 - DNA, 25 bp, Probe sequence
gcactataacaaggtgttcgggaat

SEQ ID NO: 81593 - DNA, 25 bp, Probe sequence
ctataacaaggtgttcgggaatttt

SEQ ID NO: 81594 - DNA, 25 bp, Probe sequence
agcactataacaaggtgttcgggaa

SEQ ID NO: 81595 - DNA, 25 bp, Probe sequence
accttgttatagtgctcgggaattt

SEQ ID NO: 81596 - DNA, 25 bp, Probe sequence
caccttgttatagtgctcgggaatt

SEQ ID NO: 81597 - DNA, 25 bp, Probe sequence
ccttgttatagtgctcgggaatttt

SEQ ID NO: 81598 - DNA, 25 bp, Probe sequence
aaattcccgaacaccttgttatagt

SEQ ID NO: 81599 - DNA, 25 bp, Probe sequence
aattcccgaacaccttgttatagtg

SEQ ID NO: 81600 - DNA, 25 bp, Probe sequence
acaccttgttatagtgctcgggaat

SEQ ID NO: 81601 - DNA, 25 bp, Probe sequence
attcccgaacaccttgttatagtgc

SEQ ID NO: 81602 - DNA, 25 bp, Probe sequence
aaaattcccgaacaccttgttatag

SEQ ID NO: 81603 - DNA, 25 bp, Probe sequence
aacaccttgttatagtgctcgggaa

SEQ ID NO: 81604 - DNA, 25 bp, Probe sequence
agatgtgttgaaactgagttcaatt

SEQ ID NO: 81605 - DNA, 25 bp, Probe sequence
aagatgtgttgaaactgagttcaat

SEQ ID NO: 81606 - DNA, 25 bp, Probe sequence
taagatgtgttgaaactgagttcaa

SEQ ID NO: 81607 - DNA, 25 bp, Probe sequence
gatgtgttgaaactgagttcaatta

SEQ ID NO: 81608 - DNA, 25 bp, Probe sequence
tgtgttgaaactgagttcaattaaa

SEQ ID NO: 81609 - DNA, 25 bp, Probe sequence
atgtgttgaaactgagttcaattaa

SEQ ID NO: 81610 - DNA, 25 bp, Probe sequence
gtgttgaaactgagttcaattaaat

SEQ ID NO: 81611 - DNA, 25 bp, Probe sequence
tgttgaaactgagttcaattaaatt

SEQ ID NO: 81612 - DNA, 25 bp, Probe sequence
attgaactcagtttcaacacatctt

SEQ ID NO: 81613 - DNA, 25 bp, Probe sequence
aattgaactcagtttcaacacatct

SEQ ID NO: 81614 - DNA, 25 bp, Probe sequence
ttgaactcagtttcaacacatctta

SEQ ID NO: 81615 - DNA, 25 bp, Probe sequence
taattgaactcagtttcaacacatc

SEQ ID NO: 81616 - DNA, 25 bp, Probe sequence
tttaattgaactcagtttcaacaca

SEQ ID NO: 81617 - DNA, 25 bp, Probe sequence
ttaattgaactcagtttcaacacat

SEQ ID NO: 81618 - DNA, 25 bp, Probe sequence
atttaattgaactcagtttcaacac

SEQ ID NO: 81619 - DNA, 25 bp, Probe sequence
aatttaattgaactcagtttcaaca

SEQ ID NO: 81620 - DNA, 25 bp, Probe sequence
cgtgcgtaaatagtttgtatctctc

SEQ ID NO: 81621 - DNA, 25 bp, Probe sequence
atgttagtcgtgcgtaaatagtttg

SEQ ID NO: 81622 - DNA, 25 bp, Probe sequence
gaaatgttagtcgtgcgtaaatagt

SEQ ID NO: 81623 - DNA, 25 bp, Probe sequence
cagaaatgttagtcgtgcgtaaata

SEQ ID NO: 81624 - DNA, 25 bp, Probe sequence
tcgtgcgtaaatagtttgtatctct

SEQ ID NO: 81625 - DNA, 25 bp, Probe sequence
gtcgtgcgtaaatagtttgtatctc

SEQ ID NO: 81626 - DNA, 25 bp, Probe sequence
agtcgtgcgtaaatagtttgtatct

SEQ ID NO: 81627 - DNA, 25 bp, Probe sequence
gttagtcgtgcgtaaatagtttgta

SEQ ID NO: 81628 - DNA, 25 bp, Probe sequence
agaaatgttagtcgtgcgtaaatag

SEQ ID NO: 81629 - DNA, 25 bp, Probe sequence
tatttacgcacgactaacatttctg

SEQ ID NO: 81630 - DNA, 25 bp, Probe sequence
actatttacgcacgactaacatttc

SEQ ID NO: 81631 - DNA, 25 bp, Probe sequence
caaactatttacgcacgactaacat

SEQ ID NO: 81632 - DNA, 25 bp, Probe sequence
gagagatacaaactatttacgcacg

SEQ ID NO: 81633 - DNA, 25 bp, Probe sequence
gagatacaaactatttacgcacgac

SEQ ID NO: 81634 - DNA, 25 bp, Probe sequence
agagatacaaactatttacgcacga

SEQ ID NO: 81635 - DNA, 25 bp, Probe sequence
agatacaaactatttacgcacgact

SEQ ID NO: 81636 - DNA, 25 bp, Probe sequence
ctatttacgcacgactaacatttct

SEQ ID NO: 81637 - DNA, 25 bp, Probe sequence
tacaaactatttacgcacgactaac

SEQ ID NO: 81638 - DNA, 25 bp, Probe sequence
acattttacgcttaatcaattcact

SEQ ID NO: 81639 - DNA, 25 bp, Probe sequence
catgacccctttctaattctacttt

SEQ ID NO: 81640 - DNA, 25 bp, Probe sequence
aacattttacgcttaatcaattcac

SEQ ID NO: 81641 - DNA, 25 bp, Probe sequence
caacattttacgcttaatcaattca

SEQ ID NO: 81642 - DNA, 25 bp, Probe sequence
tctactttatcaacattttacgctt

SEQ ID NO: 81643 - DNA, 25 bp, Probe sequence
ttctactttatcaacattttacgct

SEQ ID NO: 81644 - DNA, 25 bp, Probe sequence
tttacgcttaatcaattcactttaa

SEQ ID NO: 81645 - DNA, 25 bp, Probe sequence
acccctttctaattctactttatca

SEQ ID NO: 81646 - DNA, 25 bp, Probe sequence
tgacccctttctaattctactttat

SEQ ID NO: 81647 - DNA, 25 bp, Probe sequence
agtgaattgattaagcgtaaaatgt

SEQ ID NO: 81648 - DNA, 25 bp, Probe sequence
aaagtagaattagaaaggggtcatg

SEQ ID NO: 81649 - DNA, 25 bp, Probe sequence
tgaattgattaagcgtaaaatgttg

SEQ ID NO: 81650 - DNA, 25 bp, Probe sequence
gtgaattgattaagcgtaaaatgtt

SEQ ID NO: 81651 - DNA, 25 bp, Probe sequence
agcgtaaaatgttgataaagtagaa

SEQ ID NO: 81652 - DNA, 25 bp, Probe sequence
aagcgtaaaatgttgataaagtaga

SEQ ID NO: 81653 - DNA, 25 bp, Probe sequence
ttaaagtgaattgattaagcgtaaa

SEQ ID NO: 81654 - DNA, 25 bp, Probe sequence
taaagtagaattagaaaggggtcat

SEQ ID NO: 81655 - DNA, 25 bp, Probe sequence
ataaagtagaattagaaaggggtca

SEQ ID NO: 81656 - DNA, 25 bp, Probe sequence
cgttagacctcatgttcaacttatt

SEQ ID NO: 81657 - DNA, 25 bp, Probe sequence
agacctcatgttcaacttattcatt

SEQ ID NO: 81658 - DNA, 25 bp, Probe sequence
ttagacctcatgttcaacttattca

SEQ ID NO: 81659 - DNA, 25 bp, Probe sequence
aatgtacgttagacctcatgttcaa

SEQ ID NO: 81660 - DNA, 25 bp, Probe sequence
acgttagacctcatgttcaacttat

SEQ ID NO: 81661 - DNA, 25 bp, Probe sequence
tacgttagacctcatgttcaactta

SEQ ID NO: 81662 - DNA, 25 bp, Probe sequence
gtacgttagacctcatgttcaactt

SEQ ID NO: 81663 - DNA, 25 bp, Probe sequence
tagacctcatgttcaacttattcat

SEQ ID NO: 81664 - DNA, 25 bp, Probe sequence
atgtacgttagacctcatgttcaac

SEQ ID NO: 81665 - DNA, 25 bp, Probe sequence
aataagttgaacatgaggtctaacg

SEQ ID NO: 81666 - DNA, 25 bp, Probe sequence
aatgaataagttgaacatgaggtct

SEQ ID NO: 81667 - DNA, 25 bp, Probe sequence
tgaataagttgaacatgaggtctaa

SEQ ID NO: 81668 - DNA, 25 bp, Probe sequence
ttgaacatgaggtctaacgtacatt

SEQ ID NO: 81669 - DNA, 25 bp, Probe sequence
ataagttgaacatgaggtctaacgt

SEQ ID NO: 81670 - DNA, 25 bp, Probe sequence
taagttgaacatgaggtctaacgta

SEQ ID NO: 81671 - DNA, 25 bp, Probe sequence
aagttgaacatgaggtctaacgtac

SEQ ID NO: 81672 - DNA, 25 bp, Probe sequence
gttgaacatgaggtctaacgtacat

SEQ ID NO: 81673 - DNA, 25 bp, Probe sequence
atgaataagttgaacatgaggtcta

SEQ ID NO: 81674 - DNA, 25 bp, Probe sequence
ttcatttgaatcaacggagaaacat

SEQ ID NO: 81675 - DNA, 25 bp, Probe sequence
tcatttgaatcaacggagaaacata

SEQ ID NO: 81676 - DNA, 25 bp, Probe sequence
catttgaatcaacggagaaacatat

SEQ ID NO: 81677 - DNA, 25 bp, Probe sequence
tttgaatcaacggagaaacatattt

SEQ ID NO: 81678 - DNA, 25 bp, Probe sequence
tgaatcaacggagaaacatatttaa

SEQ ID NO: 81679 - DNA, 25 bp, Probe sequence
atttgaatcaacggagaaacatatt

SEQ ID NO: 81680 - DNA, 25 bp, Probe sequence
tttcatttgaatcaacggagaaaca

SEQ ID NO: 81681 - DNA, 25 bp, Probe sequence
aagttaaactccttcaaaccttgca

SEQ ID NO: 81682 - DNA, 25 bp, Probe sequence
ttgaatcaacggagaaacatattta

SEQ ID NO: 81683 - DNA, 25 bp, Probe sequence
atgtttctccgttgattcaaatgaa

SEQ ID NO: 81684 - DNA, 25 bp, Probe sequence
tatgtttctccgttgattcaaatga

SEQ ID NO: 81685 - DNA, 25 bp, Probe sequence
atatgtttctccgttgattcaaatg

SEQ ID NO: 81686 - DNA, 25 bp, Probe sequence
aaatatgtttctccgttgattcaaa

SEQ ID NO: 81687 - DNA, 25 bp, Probe sequence
ttaaatatgtttctccgttgattca

SEQ ID NO: 81688 - DNA, 25 bp, Probe sequence
tgtttctccgttgattcaaatgaaa

SEQ ID NO: 81689 - DNA, 25 bp, Probe sequence
aatatgtttctccgttgattcaaat

SEQ ID NO: 81690 - DNA, 25 bp, Probe sequence
tgcaaggtttgaaggagtttaactt

SEQ ID NO: 81691 - DNA, 25 bp, Probe sequence
taaatatgtttctccgttgattcaa

SEQ ID NO: 81692 - DNA, 25 bp, Probe sequence
gacacatcatattcatatcgttcca

SEQ ID NO: 81693 - DNA, 25 bp, Probe sequence
agacacatcatattcatatcgttcc

SEQ ID NO: 81694 - DNA, 25 bp, Probe sequence
acacatcatattcatatcgttccat

SEQ ID NO: 81695 - DNA, 25 bp, Probe sequence
gacacttatatcatcagacacatca

SEQ ID NO: 81696 - DNA, 25 bp, Probe sequence
tcagacacatcatattcatatcgtt

SEQ ID NO: 81697 - DNA, 25 bp, Probe sequence
cagacacatcatattcatatcgttc

SEQ ID NO: 81698 - DNA, 25 bp, Probe sequence
atcagacacatcatattcatatcgt

SEQ ID NO: 81699 - DNA, 25 bp, Probe sequence
tgacacttatatcatcagacacatc

SEQ ID NO: 81700 - DNA, 25 bp, Probe sequence
catcagacacatcatattcatatcg

SEQ ID NO: 81701 - DNA, 25 bp, Probe sequence
tggaacgatatgaatatgatgtgtc

SEQ ID NO: 81702 - DNA, 25 bp, Probe sequence
ggaacgatatgaatatgatgtgtct

SEQ ID NO: 81703 - DNA, 25 bp, Probe sequence
tgatgtgtctgatgatataagtgtc

SEQ ID NO: 81704 - DNA, 25 bp, Probe sequence
atggaacgatatgaatatgatgtgt

SEQ ID NO: 81705 - DNA, 25 bp, Probe sequence
aacgatatgaatatgatgtgtctga

SEQ ID NO: 81706 - DNA, 25 bp, Probe sequence
acgatatgaatatgatgtgtctgat

SEQ ID NO: 81707 - DNA, 25 bp, Probe sequence
gaacgatatgaatatgatgtgtctg

SEQ ID NO: 81708 - DNA, 25 bp, Probe sequence
gatgtgtctgatgatataagtgtca

SEQ ID NO: 81709 - DNA, 25 bp, Probe sequence
atgatgtgtctgatgatataagtgt

SEQ ID NO: 81710 - DNA, 25 bp, Probe sequence
agagtatagacaatcttcaaacgct

SEQ ID NO: 81711 - DNA, 25 bp, Probe sequence
gagtatagacaatcttcaaacgctt

SEQ ID NO: 81712 - DNA, 25 bp, Probe sequence
atagacaatcttcaaacgcttacat

SEQ ID NO: 81713 - DNA, 25 bp, Probe sequence
tagagtatagacaatcttcaaacgc

SEQ ID NO: 81714 - DNA, 25 bp, Probe sequence
tatagacaatcttcaaacgcttaca

SEQ ID NO: 81715 - DNA, 25 bp, Probe sequence
tagacaatcttcaaacgcttacatg

SEQ ID NO: 81716 - DNA, 25 bp, Probe sequence
gtatagacaatcttcaaacgcttac

SEQ ID NO: 81717 - DNA, 25 bp, Probe sequence
agtatagacaatcttcaaacgctta

SEQ ID NO: 81718 - DNA, 25 bp, Probe sequence
gcgtacacaagttaatatttggtaa

SEQ ID NO: 81719 - DNA, 25 bp, Probe sequence
agcgtttgaagattgtctatactct

SEQ ID NO: 81720 - DNA, 25 bp, Probe sequence
aagcgtttgaagattgtctatactc

SEQ ID NO: 81721 - DNA, 25 bp, Probe sequence
atgtaagcgtttgaagattgtctat

SEQ ID NO: 81722 - DNA, 25 bp, Probe sequence
gcgtttgaagattgtctatactcta

SEQ ID NO: 81723 - DNA, 25 bp, Probe sequence
tgtaagcgtttgaagattgtctata

SEQ ID NO: 81724 - DNA, 25 bp, Probe sequence
gtaagcgtttgaagattgtctatac

SEQ ID NO: 81725 - DNA, 25 bp, Probe sequence
catgtaagcgtttgaagattgtcta

SEQ ID NO: 81726 - DNA, 25 bp, Probe sequence
taagcgtttgaagattgtctatact

SEQ ID NO: 81727 - DNA, 25 bp, Probe sequence
ttaccaaatattaacttgtgtacgc

SEQ ID NO: 81728 - DNA, 25 bp, Probe sequence
cctcacactcctctcatctaattac

SEQ ID NO: 81729 - DNA, 25 bp, Probe sequence
ctcacactcctctcatctaattaca

SEQ ID NO: 81730 - DNA, 25 bp, Probe sequence
tcacactcctctcatctaattacaa

SEQ ID NO: 81731 - DNA, 25 bp, Probe sequence
ccctcacactcctctcatctaatta

SEQ ID NO: 81732 - DNA, 25 bp, Probe sequence
aaccctcacactcctctcatctaat

SEQ ID NO: 81733 - DNA, 25 bp, Probe sequence
accctcacactcctctcatctaatt

SEQ ID NO: 81734 - DNA, 25 bp, Probe sequence
cacactcctctcatctaattacaaa

SEQ ID NO: 81735 - DNA, 25 bp, Probe sequence
acactcctctcatctaattacaaag

SEQ ID NO: 81736 - DNA, 25 bp, Probe sequence
cactcctctcatctaattacaaaga

SEQ ID NO: 81737 - DNA, 25 bp, Probe sequence
gtaattagatgagaggagtgtgagg

SEQ ID NO: 81738 - DNA, 25 bp, Probe sequence
tgtaattagatgagaggagtgtgag

SEQ ID NO: 81739 - DNA, 25 bp, Probe sequence
ttgtaattagatgagaggagtgtga

SEQ ID NO: 81740 - DNA, 25 bp, Probe sequence
taattagatgagaggagtgtgaggg

SEQ ID NO: 81741 - DNA, 25 bp, Probe sequence
attagatgagaggagtgtgagggtt

SEQ ID NO: 81742 - DNA, 25 bp, Probe sequence
aattagatgagaggagtgtgagggt

SEQ ID NO: 81743 - DNA, 25 bp, Probe sequence
tttgtaattagatgagaggagtgtg

SEQ ID NO: 81744 - DNA, 25 bp, Probe sequence
ctttgtaattagatgagaggagtgt

SEQ ID NO: 81745 - DNA, 25 bp, Probe sequence
tctttgtaattagatgagaggagtg

SEQ ID NO: 81746 - DNA, 25 bp, Probe sequence
ctcctcacactctagccttaatatg

SEQ ID NO: 81747 - DNA, 25 bp, Probe sequence
tctcctcacactctagccttaatat

SEQ ID NO: 81748 - DNA, 25 bp, Probe sequence
ctctcctcacactctagccttaata

SEQ ID NO: 81749 - DNA, 25 bp, Probe sequence
cacactctagccttaatatgccatt

SEQ ID NO: 81750 - DNA, 25 bp, Probe sequence
tatctctcctcacactctagcctta

SEQ ID NO: 81751 - DNA, 25 bp, Probe sequence
acactctagccttaatatgccatta

SEQ ID NO: 81752 - DNA, 25 bp, Probe sequence
tcacactctagccttaatatgccat

SEQ ID NO: 81753 - DNA, 25 bp, Probe sequence
acaactatgtaagacgcaataatcg

SEQ ID NO: 81754 - DNA, 25 bp, Probe sequence
tcctcacactctagccttaatatgc

SEQ ID NO: 81755 - DNA, 25 bp, Probe sequence
atattaaggctagagtgtgaggaga

SEQ ID NO: 81756 - DNA, 25 bp, Probe sequence
catattaaggctagagtgtgaggag

SEQ ID NO: 81757 - DNA, 25 bp, Probe sequence
tattaaggctagagtgtgaggagag

SEQ ID NO: 81758 - DNA, 25 bp, Probe sequence
aatggcatattaaggctagagtgtg

SEQ ID NO: 81759 - DNA, 25 bp, Probe sequence
taaggctagagtgtgaggagagata

SEQ ID NO: 81760 - DNA, 25 bp, Probe sequence
taatggcatattaaggctagagtgt

SEQ ID NO: 81761 - DNA, 25 bp, Probe sequence
atggcatattaaggctagagtgtga

SEQ ID NO: 81762 - DNA, 25 bp, Probe sequence
cgattattgcgtcttacatagttgt

SEQ ID NO: 81763 - DNA, 25 bp, Probe sequence
gcatattaaggctagagtgtgagga

SEQ ID NO: 81764 - DNA, 25 bp, Probe sequence
tttagcttcacgtatcaactacttt

SEQ ID NO: 81765 - DNA, 25 bp, Probe sequence
tttcattaacatggaggcgttatat

SEQ ID NO: 81766 - DNA, 25 bp, Probe sequence
atttagcttcacgtatcaactactt

SEQ ID NO: 81767 - DNA, 25 bp, Probe sequence
tatttagcttcacgtatcaactact

SEQ ID NO: 81768 - DNA, 25 bp, Probe sequence
aactacttttcattaacatggaggc

SEQ ID NO: 81769 - DNA, 25 bp, Probe sequence
ttatttagcttcacgtatcaactac

SEQ ID NO: 81770 - DNA, 25 bp, Probe sequence
tacttttcattaacatggaggcgtt

SEQ ID NO: 81771 - DNA, 25 bp, Probe sequence
ctacttttcattaacatggaggcgt

SEQ ID NO: 81772 - DNA, 25 bp, Probe sequence
actacttttcattaacatggaggcg

SEQ ID NO: 81773 - DNA, 25 bp, Probe sequence
aaagtagttgatacgtgaagctaaa

SEQ ID NO: 81774 - DNA, 25 bp, Probe sequence
atataacgcctccatgttaatgaaa

SEQ ID NO: 81775 - DNA, 25 bp, Probe sequence
aagtagttgatacgtgaagctaaat

SEQ ID NO: 81776 - DNA, 25 bp, Probe sequence
agtagttgatacgtgaagctaaata

SEQ ID NO: 81777 - DNA, 25 bp, Probe sequence
gcctccatgttaatgaaaagtagtt

SEQ ID NO: 81778 - DNA, 25 bp, Probe sequence
gtagttgatacgtgaagctaaataa

SEQ ID NO: 81779 - DNA, 25 bp, Probe sequence
aacgcctccatgttaatgaaaagta

SEQ ID NO: 81780 - DNA, 25 bp, Probe sequence
cgcctccatgttaatgaaaagtagt

SEQ ID NO: 81781 - DNA, 25 bp, Probe sequence
acgcctccatgttaatgaaaagtag

SEQ ID NO: 81782 - DNA, 25 bp, Probe sequence
tgacgtatgtataagctctcatgtt

SEQ ID NO: 81783 - DNA, 25 bp, Probe sequence
ttgacgtatgtataagctctcatgt

SEQ ID NO: 81784 - DNA, 25 bp, Probe sequence
tcattgacgtatgtataagctctca

SEQ ID NO: 81785 - DNA, 25 bp, Probe sequence
tgtcattgacgtatgtataagctct

SEQ ID NO: 81786 - DNA, 25 bp, Probe sequence
attgacgtatgtataagctctcatg

SEQ ID NO: 81787 - DNA, 25 bp, Probe sequence
cattgacgtatgtataagctctcat

SEQ ID NO: 81788 - DNA, 25 bp, Probe sequence
gtcattgacgtatgtataagctctc

SEQ ID NO: 81789 - DNA, 25 bp, Probe sequence
atgtcattgacgtatgtataagctc

SEQ ID NO: 81790 - DNA, 25 bp, Probe sequence
tatcttactgctgttctttatttgc

SEQ ID NO: 81791 - DNA, 25 bp, Probe sequence
acatgagagcttatacatacgtcaa

SEQ ID NO: 81792 - DNA, 25 bp, Probe sequence
aacatgagagcttatacatacgtca

SEQ ID NO: 81793 - DNA, 25 bp, Probe sequence
tgagagcttatacatacgtcaatga

SEQ ID NO: 81794 - DNA, 25 bp, Probe sequence
agagcttatacatacgtcaatgaca

SEQ ID NO: 81795 - DNA, 25 bp, Probe sequence
atgagagcttatacatacgtcaatg

SEQ ID NO: 81796 - DNA, 25 bp, Probe sequence
catgagagcttatacatacgtcaat

SEQ ID NO: 81797 - DNA, 25 bp, Probe sequence
gagagcttatacatacgtcaatgac

SEQ ID NO: 81798 - DNA, 25 bp, Probe sequence
gagcttatacatacgtcaatgacat

SEQ ID NO: 81799 - DNA, 25 bp, Probe sequence
gcaaataaagaacagcagtaagata

SEQ ID NO: 81800 - DNA, 25 bp, Probe sequence
gctataaccctaatgtgtggattta

SEQ ID NO: 81801 - DNA, 25 bp, Probe sequence
atccacacattaaggagctataacc

SEQ ID NO: 81802 - DNA, 25 bp, Probe sequence
tagcaatgataacaaccgtcccata

SEQ ID NO: 81803 - DNA, 25 bp, Probe sequence
gcaatgataacaaccgtcccataaa

SEQ ID NO: 81804 - DNA, 25 bp, Probe sequence
aatccacacattaaggagctataac

SEQ ID NO: 81805 - DNA, 25 bp, Probe sequence
gagctataaccctaatgtgtggatt

SEQ ID NO: 81806 - DNA, 25 bp, Probe sequence
agctataaccctaatgtgtggattt

SEQ ID NO: 81807 - DNA, 25 bp, Probe sequence
agcaatgataacaaccgtcccataa

SEQ ID NO: 81808 - DNA, 25 bp, Probe sequence
ggagctataaccctaatgtgtggat

SEQ ID NO: 81809 - DNA, 25 bp, Probe sequence
taaatccacacattagggttatagc

SEQ ID NO: 81810 - DNA, 25 bp, Probe sequence
ggttatagctccttaatgtgtggat

SEQ ID NO: 81811 - DNA, 25 bp, Probe sequence
tatgggacggttgttatcattgcta

SEQ ID NO: 81812 - DNA, 25 bp, Probe sequence
tttatgggacggttgttatcattgc

SEQ ID NO: 81813 - DNA, 25 bp, Probe sequence
gttatagctccttaatgtgtggatt

SEQ ID NO: 81814 - DNA, 25 bp, Probe sequence
aatccacacattagggttatagctc

SEQ ID NO: 81815 - DNA, 25 bp, Probe sequence
aaatccacacattagggttatagct

SEQ ID NO: 81816 - DNA, 25 bp, Probe sequence
ttatgggacggttgttatcattgct

SEQ ID NO: 81817 - DNA, 25 bp, Probe sequence
atccacacattagggttatagctcc

SEQ ID NO: 81818 - DNA, 25 bp, Probe sequence
ttgcgttgtgaattagtataatcaa

SEQ ID NO: 81819 - DNA, 25 bp, Probe sequence
tgcgttgtgaattagtataatcaat

SEQ ID NO: 81820 - DNA, 25 bp, Probe sequence
gcgttgtgaattagtataatcaatt

SEQ ID NO: 81821 - DNA, 25 bp, Probe sequence
tttgcgttgtgaattagtataatca

SEQ ID NO: 81822 - DNA, 25 bp, Probe sequence
acctatcaactattttcagcatacg

SEQ ID NO: 81823 - DNA, 25 bp, Probe sequence
cctatcaactattttcagcatacga

SEQ ID NO: 81824 - DNA, 25 bp, Probe sequence
actggaagatatttagtcgattgat

SEQ ID NO: 81825 - DNA, 25 bp, Probe sequence
ggaagatatttagtcgattgatacc

SEQ ID NO: 81826 - DNA, 25 bp, Probe sequence
tactggaagatatttagtcgattga

SEQ ID NO: 81827 - DNA, 25 bp, Probe sequence
ttgattatactaattcacaacgcaa

SEQ ID NO: 81828 - DNA, 25 bp, Probe sequence
attgattatactaattcacaacgca

SEQ ID NO: 81829 - DNA, 25 bp, Probe sequence
aattgattatactaattcacaacgc

SEQ ID NO: 81830 - DNA, 25 bp, Probe sequence
tgattatactaattcacaacgcaaa

SEQ ID NO: 81831 - DNA, 25 bp, Probe sequence
cgtatgctgaaaatagttgataggt

SEQ ID NO: 81832 - DNA, 25 bp, Probe sequence
tcgtatgctgaaaatagttgatagg

SEQ ID NO: 81833 - DNA, 25 bp, Probe sequence
atcaatcgactaaatatcttccagt

SEQ ID NO: 81834 - DNA, 25 bp, Probe sequence
ggtatcaatcgactaaatatcttcc

SEQ ID NO: 81835 - DNA, 25 bp, Probe sequence
tcaatcgactaaatatcttccagta

SEQ ID NO: 81836 - DNA, 25 bp, Probe sequence
tgttcctcatcatatccgtttcaat

SEQ ID NO: 81837 - DNA, 25 bp, Probe sequence
gttcaaatgttcctcatcatatccg

SEQ ID NO: 81838 - DNA, 25 bp, Probe sequence
atgttcctcatcatatccgtttcaa

SEQ ID NO: 81839 - DNA, 25 bp, Probe sequence
aatgttcctcatcatatccgtttca

SEQ ID NO: 81840 - DNA, 25 bp, Probe sequence
caaatgttcctcatcatatccgttt

SEQ ID NO: 81841 - DNA, 25 bp, Probe sequence
tcaaatgttcctcatcatatccgtt

SEQ ID NO: 81842 - DNA, 25 bp, Probe sequence
ttcaaatgttcctcatcatatccgt

SEQ ID NO: 81843 - DNA, 25 bp, Probe sequence
gttcctcatcatatccgtttcaatt

SEQ ID NO: 81844 - DNA, 25 bp, Probe sequence
aaatgttcctcatcatatccgtttc

SEQ ID NO: 81845 - DNA, 25 bp, Probe sequence
attgaaacggatatgatgaggaaca

SEQ ID NO: 81846 - DNA, 25 bp, Probe sequence
cggatatgatgaggaacatttgaac

SEQ ID NO: 81847 - DNA, 25 bp, Probe sequence
acggatatgatgaggaacatttgaa

SEQ ID NO: 81848 - DNA, 25 bp, Probe sequence
aacggatatgatgaggaacatttga

SEQ ID NO: 81849 - DNA, 25 bp, Probe sequence
aaacggatatgatgaggaacatttg

SEQ ID NO: 81850 - DNA, 25 bp, Probe sequence
tgaaacggatatgatgaggaacatt

SEQ ID NO: 81851 - DNA, 25 bp, Probe sequence
ttgaaacggatatgatgaggaacat

SEQ ID NO: 81852 - DNA, 25 bp, Probe sequence
aattgaaacggatatgatgaggaac

SEQ ID NO: 81853 - DNA, 25 bp, Probe sequence
gaaacggatatgatgaggaacattt

SEQ ID NO: 81854 - DNA, 25 bp, Probe sequence
cattctcctttacttctgtagttct

SEQ ID NO: 81855 - DNA, 25 bp, Probe sequence
tcattctcctttacttctgtagttc

SEQ ID NO: 81856 - DNA, 25 bp, Probe sequence
cttcattctcctttacttctgtagt

SEQ ID NO: 81857 - DNA, 25 bp, Probe sequence
tgatggacaatctattcattgcatt

SEQ ID NO: 81858 - DNA, 25 bp, Probe sequence
ttcattctcctttacttctgtagtt

SEQ ID NO: 81859 - DNA, 25 bp, Probe sequence
tctcctttacttctgtagttctaag

SEQ ID NO: 81860 - DNA, 25 bp, Probe sequence
atgatggacaatctattcattgcat

SEQ ID NO: 81861 - DNA, 25 bp, Probe sequence
ctgtagttctaagtcgttaaattca

SEQ ID NO: 81862 - DNA, 25 bp, Probe sequence
tctgtagttctaagtcgttaaattc

SEQ ID NO: 81863 - DNA, 25 bp, Probe sequence
actacagaagtaaaggagaatgaag

SEQ ID NO: 81864 - DNA, 25 bp, Probe sequence
gaactacagaagtaaaggagaatga

SEQ ID NO: 81865 - DNA, 25 bp, Probe sequence
agaactacagaagtaaaggagaatg

SEQ ID NO: 81866 - DNA, 25 bp, Probe sequence
aatgcaatgaatagattgtccatca

SEQ ID NO: 81867 - DNA, 25 bp, Probe sequence
aactacagaagtaaaggagaatgaa

SEQ ID NO: 81868 - DNA, 25 bp, Probe sequence
cttagaactacagaagtaaaggaga

SEQ ID NO: 81869 - DNA, 25 bp, Probe sequence
atgcaatgaatagattgtccatcat

SEQ ID NO: 81870 - DNA, 25 bp, Probe sequence
tgaatttaacgacttagaactacag

SEQ ID NO: 81871 - DNA, 25 bp, Probe sequence
gaatttaacgacttagaactacaga

SEQ ID NO: 81872 - DNA, 25 bp, Probe sequence
cgtaatatcatattgtccatgtcgc

SEQ ID NO: 81873 - DNA, 25 bp, Probe sequence
atatcatattgtccatgtcgctaac

SEQ ID NO: 81874 - DNA, 25 bp, Probe sequence
gtaatatcatattgtccatgtcgct

SEQ ID NO: 81875 - DNA, 25 bp, Probe sequence
tatcatattgtccatgtcgctaaca

SEQ ID NO: 81876 - DNA, 25 bp, Probe sequence
aatatcatattgtccatgtcgctaa

SEQ ID NO: 81877 - DNA, 25 bp, Probe sequence
ctcctttctcacttacttccttcaa

SEQ ID NO: 81878 - DNA, 25 bp, Probe sequence
tcctttctcacttacttccttcaaa

SEQ ID NO: 81879 - DNA, 25 bp, Probe sequence
acatactcctttctcacttacttcc

SEQ ID NO: 81880 - DNA, 25 bp, Probe sequence
catactcctttctcacttacttcct

SEQ ID NO: 81881 - DNA, 25 bp, Probe sequence
gcgacatggacaatatgatattacg

SEQ ID NO: 81882 - DNA, 25 bp, Probe sequence
gttagcgacatggacaatatgatat

SEQ ID NO: 81883 - DNA, 25 bp, Probe sequence
agcgacatggacaatatgatattac

SEQ ID NO: 81884 - DNA, 25 bp, Probe sequence
tgttagcgacatggacaatatgata

SEQ ID NO: 81885 - DNA, 25 bp, Probe sequence
ttagcgacatggacaatatgatatt

SEQ ID NO: 81886 - DNA, 25 bp, Probe sequence
ttgaaggaagtaagtgagaaaggag

SEQ ID NO: 81887 - DNA, 25 bp, Probe sequence
ggaagtaagtgagaaaggagtatgt

SEQ ID NO: 81888 - DNA, 25 bp, Probe sequence
tttgaaggaagtaagtgagaaagga

SEQ ID NO: 81889 - DNA, 25 bp, Probe sequence
aggaagtaagtgagaaaggagtatg

SEQ ID NO: 81890 - DNA, 25 bp, Probe sequence
aaagactaagggttcatcactaatt

SEQ ID NO: 81891 - DNA, 25 bp, Probe sequence
ttctagtgattggtgcctcagtctt

SEQ ID NO: 81892 - DNA, 25 bp, Probe sequence
aagactaagggttcatcactaatta

SEQ ID NO: 81893 - DNA, 25 bp, Probe sequence
agactaagggttcatcactaattat

SEQ ID NO: 81894 - DNA, 25 bp, Probe sequence
tctagtgattggtgcctcagtcttt

SEQ ID NO: 81895 - DNA, 25 bp, Probe sequence
tttctagtgattggtgcctcagtct

SEQ ID NO: 81896 - DNA, 25 bp, Probe sequence
aaaagactaagggttcatcactaat

SEQ ID NO: 81897 - DNA, 25 bp, Probe sequence
gactaagggttcatcactaattatt

SEQ ID NO: 81898 - DNA, 25 bp, Probe sequence
ctagtgattggtgcctcagtctttt

SEQ ID NO: 81899 - DNA, 25 bp, Probe sequence
aattagtgatgaacccttagtcttt

SEQ ID NO: 81900 - DNA, 25 bp, Probe sequence
aagactgaggcaccaatcactagaa

SEQ ID NO: 81901 - DNA, 25 bp, Probe sequence
taattagtgatgaacccttagtctt

SEQ ID NO: 81902 - DNA, 25 bp, Probe sequence
ataattagtgatgaacccttagtct

SEQ ID NO: 81903 - DNA, 25 bp, Probe sequence
agactgaggcaccaatcactagaaa

SEQ ID NO: 81904 - DNA, 25 bp, Probe sequence
aaagactgaggcaccaatcactaga

SEQ ID NO: 81905 - DNA, 25 bp, Probe sequence
attagtgatgaacccttagtctttt

SEQ ID NO: 81906 - DNA, 25 bp, Probe sequence
aataattagtgatgaacccttagtc

SEQ ID NO: 81907 - DNA, 25 bp, Probe sequence
gactgaggcaccaatcactagaaaa

SEQ ID NO: 81908 - DNA, 25 bp, Probe sequence
ggctaattggctttatgtttaatca

SEQ ID NO: 81909 - DNA, 25 bp, Probe sequence
tggctaattggctttatgtttaatc

SEQ ID NO: 81910 - DNA, 25 bp, Probe sequence
tttggctaattggctttatgtttaa

SEQ ID NO: 81911 - DNA, 25 bp, Probe sequence
ttggctaattggctttatgtttaat

SEQ ID NO: 81912 - DNA, 25 bp, Probe sequence
atttggctaattggctttatgttta

SEQ ID NO: 81913 - DNA, 25 bp, Probe sequence
aatttggctaattggctttatgttt

SEQ ID NO: 81914 - DNA, 25 bp, Probe sequence
tttctcgtttatgcgtataatcttt

SEQ ID NO: 81915 - DNA, 25 bp, Probe sequence
tgccactattcaatttaatacaact

SEQ ID NO: 81916 - DNA, 25 bp, Probe sequence
aaatttggctaattggctttatgtt

SEQ ID NO: 81917 - DNA, 25 bp, Probe sequence
gattaaacataaagccaattagcca

SEQ ID NO: 81918 - DNA, 25 bp, Probe sequence
tgattaaacataaagccaattagcc

SEQ ID NO: 81919 - DNA, 25 bp, Probe sequence
ttaaacataaagccaattagccaaa

SEQ ID NO: 81920 - DNA, 25 bp, Probe sequence
taaacataaagccaattagccaaat

SEQ ID NO: 81921 - DNA, 25 bp, Probe sequence
attaaacataaagccaattagccaa

SEQ ID NO: 81922 - DNA, 25 bp, Probe sequence
aaacataaagccaattagccaaatt

SEQ ID NO: 81923 - DNA, 25 bp, Probe sequence
aaagattatacgcataaacgagaaa

SEQ ID NO: 81924 - DNA, 25 bp, Probe sequence
agttgtattaaattgaatagtggca

SEQ ID NO: 81925 - DNA, 25 bp, Probe sequence
aacataaagccaattagccaaattt

SEQ ID NO: 81926 - DNA, 25 bp, Probe sequence
gccctctttacataagcgtctaata

SEQ ID NO: 81927 - DNA, 25 bp, Probe sequence
gcttataatttgcgttcttgattcg

SEQ ID NO: 81928 - DNA, 25 bp, Probe sequence
ggttgcttataatttgcgttcttga

SEQ ID NO: 81929 - DNA, 25 bp, Probe sequence
tggttgcttataatttgcgttcttg

SEQ ID NO: 81930 - DNA, 25 bp, Probe sequence
gtggttgcttataatttgcgttctt

SEQ ID NO: 81931 - DNA, 25 bp, Probe sequence
ccctctttacataagcgtctaatat

SEQ ID NO: 81932 - DNA, 25 bp, Probe sequence
gttgcttataatttgcgttcttgat

SEQ ID NO: 81933 - DNA, 25 bp, Probe sequence
taaggttacgccctctttacataag

SEQ ID NO: 81934 - DNA, 25 bp, Probe sequence
ttaaggttacgccctctttacataa

SEQ ID NO: 81935 - DNA, 25 bp, Probe sequence
tattagacgcttatgtaaagagggc

SEQ ID NO: 81936 - DNA, 25 bp, Probe sequence
cgaatcaagaacgcaaattataagc

SEQ ID NO: 81937 - DNA, 25 bp, Probe sequence
tcaagaacgcaaattataagcaacc

SEQ ID NO: 81938 - DNA, 25 bp, Probe sequence
aagaacgcaaattataagcaaccac

SEQ ID NO: 81939 - DNA, 25 bp, Probe sequence
caagaacgcaaattataagcaacca

SEQ ID NO: 81940 - DNA, 25 bp, Probe sequence
atattagacgcttatgtaaagaggg

SEQ ID NO: 81941 - DNA, 25 bp, Probe sequence
cttatgtaaagagggcgtaacctta

SEQ ID NO: 81942 - DNA, 25 bp, Probe sequence
atcaagaacgcaaattataagcaac

SEQ ID NO: 81943 - DNA, 25 bp, Probe sequence
agagggcgtaaccttaaatgtaatt

SEQ ID NO: 81944 - DNA, 25 bp, Probe sequence
aatccaaagattgggaggaattaaa

SEQ ID NO: 81945 - DNA, 25 bp, Probe sequence
aaatccaaagattgggaggaattaa

SEQ ID NO: 81946 - DNA, 25 bp, Probe sequence
atccaaagattgggaggaattaaat

SEQ ID NO: 81947 - DNA, 25 bp, Probe sequence
aaaatccaaagattgggaggaatta

SEQ ID NO: 81948 - DNA, 25 bp, Probe sequence
tgataaagtaatcatctttcacaaa

SEQ ID NO: 81949 - DNA, 25 bp, Probe sequence
ttaattcctcccaatctttggattt

SEQ ID NO: 81950 - DNA, 25 bp, Probe sequence
tttaattcctcccaatctttggatt

SEQ ID NO: 81951 - DNA, 25 bp, Probe sequence
atttaattcctcccaatctttggat

SEQ ID NO: 81952 - DNA, 25 bp, Probe sequence
taattcctcccaatctttggatttt

SEQ ID NO: 81953 - DNA, 25 bp, Probe sequence
tttgtgaaagatgattactttatca

SEQ ID NO: 81954 - DNA, 25 bp, Probe sequence
tctaggtatttctccgattttggtt

SEQ ID NO: 81955 - DNA, 25 bp, Probe sequence
atctaggtatttctccgattttggt

SEQ ID NO: 81956 - DNA, 25 bp, Probe sequence
aggtatttctccgattttggttaat

SEQ ID NO: 81957 - DNA, 25 bp, Probe sequence
ctaggtatttctccgattttggtta

SEQ ID NO: 81958 - DNA, 25 bp, Probe sequence
taggtatttctccgattttggttaa

SEQ ID NO: 81959 - DNA, 25 bp, Probe sequence
ggtatttctccgattttggttaatt

SEQ ID NO: 81960 - DNA, 25 bp, Probe sequence
agtatatctaggtatttctccgatt

SEQ ID NO: 81961 - DNA, 25 bp, Probe sequence
tatctaggtatttctccgattttgg

SEQ ID NO: 81962 - DNA, 25 bp, Probe sequence
ttagtatatctaggtatttctccga

SEQ ID NO: 81963 - DNA, 25 bp, Probe sequence
aaccaaaatcggagaaatacctaga

SEQ ID NO: 81964 - DNA, 25 bp, Probe sequence
accaaaatcggagaaatacctagat

SEQ ID NO: 81965 - DNA, 25 bp, Probe sequence
attaaccaaaatcggagaaatacct

SEQ ID NO: 81966 - DNA, 25 bp, Probe sequence
taaccaaaatcggagaaatacctag

SEQ ID NO: 81967 - DNA, 25 bp, Probe sequence
ttaaccaaaatcggagaaataccta

SEQ ID NO: 81968 - DNA, 25 bp, Probe sequence
aattaaccaaaatcggagaaatacc

SEQ ID NO: 81969 - DNA, 25 bp, Probe sequence
aatcggagaaatacctagatatact

SEQ ID NO: 81970 - DNA, 25 bp, Probe sequence
ccaaaatcggagaaatacctagata

SEQ ID NO: 81971 - DNA, 25 bp, Probe sequence
tcggagaaatacctagatatactaa

SEQ ID NO: 81972 - DNA, 25 bp, Probe sequence
ccattcgccttaatcaattagacaa

SEQ ID NO: 81973 - DNA, 25 bp, Probe sequence
aagccattcgccttaatcaattaga

SEQ ID NO: 81974 - DNA, 25 bp, Probe sequence
tcgccttaatcaattagacaagttg

SEQ ID NO: 81975 - DNA, 25 bp, Probe sequence
ttcgccttaatcaattagacaagtt

SEQ ID NO: 81976 - DNA, 25 bp, Probe sequence
attcgccttaatcaattagacaagt

SEQ ID NO: 81977 - DNA, 25 bp, Probe sequence
agccattcgccttaatcaattagac

SEQ ID NO: 81978 - DNA, 25 bp, Probe sequence
cattcgccttaatcaattagacaag

SEQ ID NO: 81979 - DNA, 25 bp, Probe sequence
gccattcgccttaatcaattagaca

SEQ ID NO: 81980 - DNA, 25 bp, Probe sequence
cgccttaatcaattagacaagttgt

SEQ ID NO: 81981 - DNA, 25 bp, Probe sequence
ttgtctaattgattaaggcgaatgg

SEQ ID NO: 81982 - DNA, 25 bp, Probe sequence
tctaattgattaaggcgaatggctt

SEQ ID NO: 81983 - DNA, 25 bp, Probe sequence
caacttgtctaattgattaaggcga

SEQ ID NO: 81984 - DNA, 25 bp, Probe sequence
aacttgtctaattgattaaggcgaa

SEQ ID NO: 81985 - DNA, 25 bp, Probe sequence
acttgtctaattgattaaggcgaat

SEQ ID NO: 81986 - DNA, 25 bp, Probe sequence
gtctaattgattaaggcgaatggct

SEQ ID NO: 81987 - DNA, 25 bp, Probe sequence
cttgtctaattgattaaggcgaatg

SEQ ID NO: 81988 - DNA, 25 bp, Probe sequence
tgtctaattgattaaggcgaatggc

SEQ ID NO: 81989 - DNA, 25 bp, Probe sequence
acaacttgtctaattgattaaggcg

SEQ ID NO: 81990 - DNA, 25 bp, Probe sequence
cgagtagaagcatcatcattacttg

SEQ ID NO: 81991 - DNA, 25 bp, Probe sequence
aatcgagtagaagcatcatcattac

SEQ ID NO: 81992 - DNA, 25 bp, Probe sequence
tgtccaacttcaaatatccaaacct

SEQ ID NO: 81993 - DNA, 25 bp, Probe sequence
ggtttcctccacataatcaatcatt

SEQ ID NO: 81994 - DNA, 25 bp, Probe sequence
ttcctccacataatcaatcattgta

SEQ ID NO: 81995 - DNA, 25 bp, Probe sequence
gtccaacttcaaatatccaaaccta

SEQ ID NO: 81996 - DNA, 25 bp, Probe sequence
gttaatgataataaagcccacacct

SEQ ID NO: 81997 - DNA, 25 bp, Probe sequence
gagtagaagcatcatcattacttga

SEQ ID NO: 81998 - DNA, 25 bp, Probe sequence
tcaaagacaaacttaaccattcaca

SEQ ID NO: 81999 - DNA, 25 bp, Probe sequence
caagtaatgatgatgcttctactcg

SEQ ID NO: 82000 - DNA, 25 bp, Probe sequence
gtaatgatgatgcttctactcgatt

SEQ ID NO: 82001 - DNA, 25 bp, Probe sequence
aatgattgattatgtggaggaaacc

SEQ ID NO: 82002 - DNA, 25 bp, Probe sequence
aggtttggatatttgaagttggaca

SEQ ID NO: 82003 - DNA, 25 bp, Probe sequence
tacaatgattgattatgtggaggaa

SEQ ID NO: 82004 - DNA, 25 bp, Probe sequence
taggtttggatatttgaagttggac

SEQ ID NO: 82005 - DNA, 25 bp, Probe sequence
aggtgtgggctttattatcattaac

SEQ ID NO: 82006 - DNA, 25 bp, Probe sequence
tcaagtaatgatgatgcttctactc

SEQ ID NO: 82007 - DNA, 25 bp, Probe sequence
tgtgaatggttaagtttgtctttga

SEQ ID NO: 82008 - DNA, 25 bp, Probe sequence
tatggcttacaacctaactaacgaa

SEQ ID NO: 82009 - DNA, 25 bp, Probe sequence
atatggcttacaacctaactaacga

SEQ ID NO: 82010 - DNA, 25 bp, Probe sequence
atggcttacaacctaactaacgaaa

SEQ ID NO: 82011 - DNA, 25 bp, Probe sequence
tggcttacaacctaactaacgaaag

SEQ ID NO: 82012 - DNA, 25 bp, Probe sequence
catatggcttacaacctaactaacg

SEQ ID NO: 82013 - DNA, 25 bp, Probe sequence
aactaacgaaaggtaggtaaagaaa

SEQ ID NO: 82014 - DNA, 25 bp, Probe sequence
ctaactaacgaaaggtaggtaaaga

SEQ ID NO: 82015 - DNA, 25 bp, Probe sequence
taactaacgaaaggtaggtaaagaa

SEQ ID NO: 82016 - DNA, 25 bp, Probe sequence
ggcttacaacctaactaacgaaagg

SEQ ID NO: 82017 - DNA, 25 bp, Probe sequence
ttcgttagttaggttgtaagccata

SEQ ID NO: 82018 - DNA, 25 bp, Probe sequence
tcgttagttaggttgtaagccatat

SEQ ID NO: 82019 - DNA, 25 bp, Probe sequence
tttcgttagttaggttgtaagccat

SEQ ID NO: 82020 - DNA, 25 bp, Probe sequence
ctttcgttagttaggttgtaagcca

SEQ ID NO: 82021 - DNA, 25 bp, Probe sequence
cgttagttaggttgtaagccatatg

SEQ ID NO: 82022 - DNA, 25 bp, Probe sequence
tttctttacctacctttcgttagtt

SEQ ID NO: 82023 - DNA, 25 bp, Probe sequence
tctttacctacctttcgttagttag

SEQ ID NO: 82024 - DNA, 25 bp, Probe sequence
ttctttacctacctttcgttagtta

SEQ ID NO: 82025 - DNA, 25 bp, Probe sequence
cctttcgttagttaggttgtaagcc

SEQ ID NO: 82026 - DNA, 25 bp, Probe sequence
ttaaacttcgtaaatgccaatggga

SEQ ID NO: 82027 - DNA, 25 bp, Probe sequence
taaacttcgtaaatgccaatgggag

SEQ ID NO: 82028 - DNA, 25 bp, Probe sequence
tttaaacttcgtaaatgccaatggg

SEQ ID NO: 82029 - DNA, 25 bp, Probe sequence
ttctaattgcacatttaaacttcgt

SEQ ID NO: 82030 - DNA, 25 bp, Probe sequence
ttgaattgactgacttcgttttacc

SEQ ID NO: 82031 - DNA, 25 bp, Probe sequence
aaacttcgtaaatgccaatgggagt

SEQ ID NO: 82032 - DNA, 25 bp, Probe sequence
gtgggcgaaatcagtttgaattgac

SEQ ID NO: 82033 - DNA, 25 bp, Probe sequence
agtttgaattgactgacttcgtttt

SEQ ID NO: 82034 - DNA, 25 bp, Probe sequence
tgggcgaaatcagtttgaattgact

SEQ ID NO: 82035 - DNA, 25 bp, Probe sequence
tcccattggcatttacgaagtttaa

SEQ ID NO: 82036 - DNA, 25 bp, Probe sequence
ctcccattggcatttacgaagttta

SEQ ID NO: 82037 - DNA, 25 bp, Probe sequence
cccattggcatttacgaagtttaaa

SEQ ID NO: 82038 - DNA, 25 bp, Probe sequence
acgaagtttaaatgtgcaattagaa

SEQ ID NO: 82039 - DNA, 25 bp, Probe sequence
ggtaaaacgaagtcagtcaattcaa

SEQ ID NO: 82040 - DNA, 25 bp, Probe sequence
actcccattggcatttacgaagttt

SEQ ID NO: 82041 - DNA, 25 bp, Probe sequence
gtcaattcaaactgatttcgcccac

SEQ ID NO: 82042 - DNA, 25 bp, Probe sequence
aaaacgaagtcagtcaattcaaact

SEQ ID NO: 82043 - DNA, 25 bp, Probe sequence
agtcaattcaaactgatttcgccca

SEQ ID NO: 82044 - DNA, 25 bp, Probe sequence
ttaaccaagcactcataatgaccat

SEQ ID NO: 82045 - DNA, 25 bp, Probe sequence
taaccaagcactcataatgaccatc

SEQ ID NO: 82046 - DNA, 25 bp, Probe sequence
cttaaccaagcactcataatgacca

SEQ ID NO: 82047 - DNA, 25 bp, Probe sequence
acttaaccaagcactcataatgacc

SEQ ID NO: 82048 - DNA, 25 bp, Probe sequence
tacttaaccaagcactcataatgac

SEQ ID NO: 82049 - DNA, 25 bp, Probe sequence
ttacttaaccaagcactcataatga

SEQ ID NO: 82050 - DNA, 25 bp, Probe sequence
gttattatgtttgctggtgtcgtat

SEQ ID NO: 82051 - DNA, 25 bp, Probe sequence
agttattatgtttgctggtgtcgta

SEQ ID NO: 82052 - DNA, 25 bp, Probe sequence
ggatgcacatcttagttctaatgga

SEQ ID NO: 82053 - DNA, 25 bp, Probe sequence
atggtcattatgagtgcttggttaa

SEQ ID NO: 82054 - DNA, 25 bp, Probe sequence
gatggtcattatgagtgcttggtta

SEQ ID NO: 82055 - DNA, 25 bp, Probe sequence
ggtcattatgagtgcttggttaagt

SEQ ID NO: 82056 - DNA, 25 bp, Probe sequence
tggtcattatgagtgcttggttaag

SEQ ID NO: 82057 - DNA, 25 bp, Probe sequence
gtcattatgagtgcttggttaagta

SEQ ID NO: 82058 - DNA, 25 bp, Probe sequence
tcattatgagtgcttggttaagtaa

SEQ ID NO: 82059 - DNA, 25 bp, Probe sequence
atacgacaccagcaaacataataac

SEQ ID NO: 82060 - DNA, 25 bp, Probe sequence
tacgacaccagcaaacataataact

SEQ ID NO: 82061 - DNA, 25 bp, Probe sequence
tccattagaactaagatgtgcatcc

SEQ ID NO: 82062 - DNA, 25 bp, Probe sequence
agtaccatcacagcattcatagtta

SEQ ID NO: 82063 - DNA, 25 bp, Probe sequence
tagtaccatcacagcattcatagtt

SEQ ID NO: 82064 - DNA, 25 bp, Probe sequence
ttagtaccatcacagcattcatagt

SEQ ID NO: 82065 - DNA, 25 bp, Probe sequence
ttgtaagtgtataagccatgatcct

SEQ ID NO: 82066 - DNA, 25 bp, Probe sequence
gtaccatcacagcattcatagttaa

SEQ ID NO: 82067 - DNA, 25 bp, Probe sequence
tgtaagtgtataagccatgatcctt

SEQ ID NO: 82068 - DNA, 25 bp, Probe sequence
tacttatctataacgagttcgcaac

SEQ ID NO: 82069 - DNA, 25 bp, Probe sequence
ccttatatcttagtccatacttgct

SEQ ID NO: 82070 - DNA, 25 bp, Probe sequence
tccttatatcttagtccatacttgc

SEQ ID NO: 82071 - DNA, 25 bp, Probe sequence
actatgaatgctgtgatggtactaa

SEQ ID NO: 82072 - DNA, 25 bp, Probe sequence
aactatgaatgctgtgatggtacta

SEQ ID NO: 82073 - DNA, 25 bp, Probe sequence
taactatgaatgctgtgatggtact

SEQ ID NO: 82074 - DNA, 25 bp, Probe sequence
aggatcatggcttatacacttacaa

SEQ ID NO: 82075 - DNA, 25 bp, Probe sequence
ttaactatgaatgctgtgatggtac

SEQ ID NO: 82076 - DNA, 25 bp, Probe sequence
aaggatcatggcttatacacttaca

SEQ ID NO: 82077 - DNA, 25 bp, Probe sequence
gttgcgaactcgttatagataagta

SEQ ID NO: 82078 - DNA, 25 bp, Probe sequence
gcaagtatggactaagatataagga

SEQ ID NO: 82079 - DNA, 25 bp, Probe sequence
agcaagtatggactaagatataagg

SEQ ID NO: 82080 - DNA, 25 bp, Probe sequence
accaccctttactttcaatactgta

SEQ ID NO: 82081 - DNA, 25 bp, Probe sequence
gaccaccctttactttcaatactgt

SEQ ID NO: 82082 - DNA, 25 bp, Probe sequence
cgttgtttactttacttctctacca

SEQ ID NO: 82083 - DNA, 25 bp, Probe sequence
tgtgcttgccttattatgtaaagtt

SEQ ID NO: 82084 - DNA, 25 bp, Probe sequence
ttgtgcttgccttattatgtaaagt

SEQ ID NO: 82085 - DNA, 25 bp, Probe sequence
atattgtgcttgccttattatgtaa

SEQ ID NO: 82086 - DNA, 25 bp, Probe sequence
tcgttgtttactttacttctctacc

SEQ ID NO: 82087 - DNA, 25 bp, Probe sequence
cgaccaccctttactttcaatactg

SEQ ID NO: 82088 - DNA, 25 bp, Probe sequence
gtttactttacttctctaccacact

SEQ ID NO: 82089 - DNA, 25 bp, Probe sequence
tacagtattgaaagtaaagggtggt

SEQ ID NO: 82090 - DNA, 25 bp, Probe sequence
acagtattgaaagtaaagggtggtc

SEQ ID NO: 82091 - DNA, 25 bp, Probe sequence
tggtagagaagtaaagtaaacaacg

SEQ ID NO: 82092 - DNA, 25 bp, Probe sequence
actttacataataaggcaagcacaa

SEQ ID NO: 82093 - DNA, 25 bp, Probe sequence
aactttacataataaggcaagcaca

SEQ ID NO: 82094 - DNA, 25 bp, Probe sequence
ttacataataaggcaagcacaatat

SEQ ID NO: 82095 - DNA, 25 bp, Probe sequence
ggtagagaagtaaagtaaacaacga

SEQ ID NO: 82096 - DNA, 25 bp, Probe sequence
cagtattgaaagtaaagggtggtcg

SEQ ID NO: 82097 - DNA, 25 bp, Probe sequence
agtgtggtagagaagtaaagtaaac

SEQ ID NO: 82098 - DNA, 25 bp, Probe sequence
tctccctatgttttattatgcacaa

SEQ ID NO: 82099 - DNA, 25 bp, Probe sequence
ttctccctatgttttattatgcaca

SEQ ID NO: 82100 - DNA, 25 bp, Probe sequence
aagaaactgttgggattttaatttt

SEQ ID NO: 82101 - DNA, 25 bp, Probe sequence
attctccctatgttttattatgcac

SEQ ID NO: 82102 - DNA, 25 bp, Probe sequence
cattctccctatgttttattatgca

SEQ ID NO: 82103 - DNA, 25 bp, Probe sequence
ctccctatgttttattatgcacaat

SEQ ID NO: 82104 - DNA, 25 bp, Probe sequence
tccctatgttttattatgcacaatt

SEQ ID NO: 82105 - DNA, 25 bp, Probe sequence
ttttaagaaactgttgggattttaa

SEQ ID NO: 82106 - DNA, 25 bp, Probe sequence
acattctccctatgttttattatgc

SEQ ID NO: 82107 - DNA, 25 bp, Probe sequence
tgtgcataataaaacatagggagaa

SEQ ID NO: 82108 - DNA, 25 bp, Probe sequence
ttgtgcataataaaacatagggaga

SEQ ID NO: 82109 - DNA, 25 bp, Probe sequence
aaaattaaaatcccaacagtttctt

SEQ ID NO: 82110 - DNA, 25 bp, Probe sequence
gtgcataataaaacatagggagaat

SEQ ID NO: 82111 - DNA, 25 bp, Probe sequence
tgcataataaaacatagggagaatg

SEQ ID NO: 82112 - DNA, 25 bp, Probe sequence
attgtgcataataaaacatagggag

SEQ ID NO: 82113 - DNA, 25 bp, Probe sequence
aattgtgcataataaaacataggga

SEQ ID NO: 82114 - DNA, 25 bp, Probe sequence
ttaaaatcccaacagtttcttaaaa

SEQ ID NO: 82115 - DNA, 25 bp, Probe sequence
gcataataaaacatagggagaatgt

SEQ ID NO: 82116 - DNA, 25 bp, Probe sequence
cattacctttctacattcatttaca

SEQ ID NO: 82117 - DNA, 25 bp, Probe sequence
tcattacctttctacattcatttac

SEQ ID NO: 82118 - DNA, 25 bp, Probe sequence
tcatttacatatctgattcaacaaa

SEQ ID NO: 82119 - DNA, 25 bp, Probe sequence
ttcatttacatatctgattcaacaa

SEQ ID NO: 82120 - DNA, 25 bp, Probe sequence
ttacatatctgattcaacaaaatga

SEQ ID NO: 82121 - DNA, 25 bp, Probe sequence
tgtaaatgaatgtagaaaggtaatg

SEQ ID NO: 82122 - DNA, 25 bp, Probe sequence
gtaaatgaatgtagaaaggtaatga

SEQ ID NO: 82123 - DNA, 25 bp, Probe sequence
ttgttgaatcagatatgtaaatgaa

SEQ ID NO: 82124 - DNA, 25 bp, Probe sequence
tttgttgaatcagatatgtaaatga

SEQ ID NO: 82125 - DNA, 25 bp, Probe sequence
tcattttgttgaatcagatatgtaa

SEQ ID NO: 82126 - DNA, 25 bp, Probe sequence
tcacggacttgtaatcacttcttta

SEQ ID NO: 82127 - DNA, 25 bp, Probe sequence
atttcacggacttgtaatcacttct

SEQ ID NO: 82128 - DNA, 25 bp, Probe sequence
ttcacggacttgtaatcacttcttt

SEQ ID NO: 82129 - DNA, 25 bp, Probe sequence
tttcacggacttgtaatcacttctt

SEQ ID NO: 82130 - DNA, 25 bp, Probe sequence
aatttcacggacttgtaatcacttc

SEQ ID NO: 82131 - DNA, 25 bp, Probe sequence
cggacttgtaatcacttctttatgt

SEQ ID NO: 82132 - DNA, 25 bp, Probe sequence
acggacttgtaatcacttctttatg

SEQ ID NO: 82133 - DNA, 25 bp, Probe sequence
cacggacttgtaatcacttctttat

SEQ ID NO: 82134 - DNA, 25 bp, Probe sequence
aggtggtattgtatgtatatcaagt

SEQ ID NO: 82135 - DNA, 25 bp, Probe sequence
taaagaagtgattacaagtccgtga

SEQ ID NO: 82136 - DNA, 25 bp, Probe sequence
agaagtgattacaagtccgtgaaat

SEQ ID NO: 82137 - DNA, 25 bp, Probe sequence
aagaagtgattacaagtccgtgaaa

SEQ ID NO: 82138 - DNA, 25 bp, Probe sequence
aaagaagtgattacaagtccgtgaa

SEQ ID NO: 82139 - DNA, 25 bp, Probe sequence
gaagtgattacaagtccgtgaaatt

SEQ ID NO: 82140 - DNA, 25 bp, Probe sequence
ataaagaagtgattacaagtccgtg

SEQ ID NO: 82141 - DNA, 25 bp, Probe sequence
cataaagaagtgattacaagtccgt

SEQ ID NO: 82142 - DNA, 25 bp, Probe sequence
acataaagaagtgattacaagtccg

SEQ ID NO: 82143 - DNA, 25 bp, Probe sequence
acttgatatacatacaataccacct

SEQ ID NO: 82144 - DNA, 25 bp, Probe sequence
aactcatgtgtaacaagcactaact

SEQ ID NO: 82145 - DNA, 25 bp, Probe sequence
taactcatgtgtaacaagcactaac

SEQ ID NO: 82146 - DNA, 25 bp, Probe sequence
agcactaactgttcaccctaattta

SEQ ID NO: 82147 - DNA, 25 bp, Probe sequence
cgaaatgccaactatatcatcccta

SEQ ID NO: 82148 - DNA, 25 bp, Probe sequence
aagcactaactgttcaccctaattt

SEQ ID NO: 82149 - DNA, 25 bp, Probe sequence
tacgaaatgccaactatatcatccc

SEQ ID NO: 82150 - DNA, 25 bp, Probe sequence
gcactaactgttcaccctaatttaa

SEQ ID NO: 82151 - DNA, 25 bp, Probe sequence
ctcatgtgtaacaagcactaactgt

SEQ ID NO: 82152 - DNA, 25 bp, Probe sequence
actcatgtgtaacaagcactaactg

SEQ ID NO: 82153 - DNA, 25 bp, Probe sequence
agttagtgcttgttacacatgagtt

SEQ ID NO: 82154 - DNA, 25 bp, Probe sequence
gttagtgcttgttacacatgagtta

SEQ ID NO: 82155 - DNA, 25 bp, Probe sequence
taaattagggtgaacagttagtgct

SEQ ID NO: 82156 - DNA, 25 bp, Probe sequence
tagggatgatatagttggcatttcg

SEQ ID NO: 82157 - DNA, 25 bp, Probe sequence
aaattagggtgaacagttagtgctt

SEQ ID NO: 82158 - DNA, 25 bp, Probe sequence
gggatgatatagttggcatttcgta

SEQ ID NO: 82159 - DNA, 25 bp, Probe sequence
ttaaattagggtgaacagttagtgc

SEQ ID NO: 82160 - DNA, 25 bp, Probe sequence
ttagtgcttgttacacatgagttaa

SEQ ID NO: 82161 - DNA, 25 bp, Probe sequence
cagttagtgcttgttacacatgagt

SEQ ID NO: 82162 - DNA, 25 bp, Probe sequence
ttatcggtctagtggctgatttcaa

SEQ ID NO: 82163 - DNA, 25 bp, Probe sequence
tttatcggtctagtggctgatttca

SEQ ID NO: 82164 - DNA, 25 bp, Probe sequence
ttgaatgacaatacaactctgttaa

SEQ ID NO: 82165 - DNA, 25 bp, Probe sequence
tatcggtctagtggctgatttcaag

SEQ ID NO: 82166 - DNA, 25 bp, Probe sequence
aatgatggacgtagataaatatgcg

SEQ ID NO: 82167 - DNA, 25 bp, Probe sequence
attgaatgacaatacaactctgtta

SEQ ID NO: 82168 - DNA, 25 bp, Probe sequence
atctattttatcggtctagtggctg

SEQ ID NO: 82169 - DNA, 25 bp, Probe sequence
ctattttatcggtctagtggctgat

SEQ ID NO: 82170 - DNA, 25 bp, Probe sequence
attttatcggtctagtggctgattt

SEQ ID NO: 82171 - DNA, 25 bp, Probe sequence
tgaaatcagccactagaccgataaa

SEQ ID NO: 82172 - DNA, 25 bp, Probe sequence
ttgaaatcagccactagaccgataa

SEQ ID NO: 82173 - DNA, 25 bp, Probe sequence
ttaacagagttgtattgtcattcaa

SEQ ID NO: 82174 - DNA, 25 bp, Probe sequence
cttgaaatcagccactagaccgata

SEQ ID NO: 82175 - DNA, 25 bp, Probe sequence
cgcatatttatctacgtccatcatt

SEQ ID NO: 82176 - DNA, 25 bp, Probe sequence
taacagagttgtattgtcattcaat

SEQ ID NO: 82177 - DNA, 25 bp, Probe sequence
cagccactagaccgataaaatagat

SEQ ID NO: 82178 - DNA, 25 bp, Probe sequence
atcagccactagaccgataaaatag

SEQ ID NO: 82179 - DNA, 25 bp, Probe sequence
aaatcagccactagaccgataaaat

SEQ ID NO: 82180 - DNA, 25 bp, Probe sequence
aattttaatactgcggggtgtctta

SEQ ID NO: 82181 - DNA, 25 bp, Probe sequence
attttaatactgcggggtgtcttaa

SEQ ID NO: 82182 - DNA, 25 bp, Probe sequence
ttaaatacctttcaaaacacgcttt

SEQ ID NO: 82183 - DNA, 25 bp, Probe sequence
attaaatacctttcaaaacacgctt

SEQ ID NO: 82184 - DNA, 25 bp, Probe sequence
aattaaatacctttcaaaacacgct

SEQ ID NO: 82185 - DNA, 25 bp, Probe sequence
taaattttaatactgcggggtgtct

SEQ ID NO: 82186 - DNA, 25 bp, Probe sequence
aacacgctttgaaaatccgatttat

SEQ ID NO: 82187 - DNA, 25 bp, Probe sequence
acacgctttgaaaatccgatttata

SEQ ID NO: 82188 - DNA, 25 bp, Probe sequence
aaacacgctttgaaaatccgattta

SEQ ID NO: 82189 - DNA, 25 bp, Probe sequence
taagacaccccgcagtattaaaatt

SEQ ID NO: 82190 - DNA, 25 bp, Probe sequence
ttaagacaccccgcagtattaaaat

SEQ ID NO: 82191 - DNA, 25 bp, Probe sequence
aaagcgtgttttgaaaggtatttaa

SEQ ID NO: 82192 - DNA, 25 bp, Probe sequence
aagcgtgttttgaaaggtatttaat

SEQ ID NO: 82193 - DNA, 25 bp, Probe sequence
agcgtgttttgaaaggtatttaatt

SEQ ID NO: 82194 - DNA, 25 bp, Probe sequence
agacaccccgcagtattaaaattta

SEQ ID NO: 82195 - DNA, 25 bp, Probe sequence
ataaatcggattttcaaagcgtgtt

SEQ ID NO: 82196 - DNA, 25 bp, Probe sequence
taaatcggattttcaaagcgtgttt

SEQ ID NO: 82197 - DNA, 25 bp, Probe sequence
tataaatcggattttcaaagcgtgt

SEQ ID NO: 82198 - DNA, 25 bp, Probe sequence
agcaccctaatttgttagtttaagt

SEQ ID NO: 82199 - DNA, 25 bp, Probe sequence
gcaccctaatttgttagtttaagtc

SEQ ID NO: 82200 - DNA, 25 bp, Probe sequence
aagcaccctaatttgttagtttaag

SEQ ID NO: 82201 - DNA, 25 bp, Probe sequence
taactttagggtgcttttggatgat

SEQ ID NO: 82202 - DNA, 25 bp, Probe sequence
aaagcaccctaatttgttagtttaa

SEQ ID NO: 82203 - DNA, 25 bp, Probe sequence
aactttagggtgcttttggatgatt

SEQ ID NO: 82204 - DNA, 25 bp, Probe sequence
agtttaagtctaactttagggtgct

SEQ ID NO: 82205 - DNA, 25 bp, Probe sequence
ctaactttagggtgcttttggatga

SEQ ID NO: 82206 - DNA, 25 bp, Probe sequence
tctaactttagggtgcttttggatg

SEQ ID NO: 82207 - DNA, 25 bp, Probe sequence
acttaaactaacaaattagggtgct

SEQ ID NO: 82208 - DNA, 25 bp, Probe sequence
gacttaaactaacaaattagggtgc

SEQ ID NO: 82209 - DNA, 25 bp, Probe sequence
cttaaactaacaaattagggtgctt

SEQ ID NO: 82210 - DNA, 25 bp, Probe sequence
atcatccaaaagcaccctaaagtta

SEQ ID NO: 82211 - DNA, 25 bp, Probe sequence
ttaaactaacaaattagggtgcttt

SEQ ID NO: 82212 - DNA, 25 bp, Probe sequence
aatcatccaaaagcaccctaaagtt

SEQ ID NO: 82213 - DNA, 25 bp, Probe sequence
agcaccctaaagttagacttaaact

SEQ ID NO: 82214 - DNA, 25 bp, Probe sequence
atccaaaagcaccctaaagttagac

SEQ ID NO: 82215 - DNA, 25 bp, Probe sequence
catccaaaagcaccctaaagttaga

SEQ ID NO: 82216 - DNA, 25 bp, Probe sequence
gtaaggtagttgttgtacacattcc

SEQ ID NO: 82217 - DNA, 25 bp, Probe sequence
ggtagttgttgtacacattccttaa

SEQ ID NO: 82218 - DNA, 25 bp, Probe sequence
aggtagttgttgtacacattcctta

SEQ ID NO: 82219 - DNA, 25 bp, Probe sequence
taaggtagttgttgtacacattcct

SEQ ID NO: 82220 - DNA, 25 bp, Probe sequence
acggaagtatgttttatttatgggg

SEQ ID NO: 82221 - DNA, 25 bp, Probe sequence
acacattccttaaatgactaacaac

SEQ ID NO: 82222 - DNA, 25 bp, Probe sequence
ttccttaaatgactaacaactttgt

SEQ ID NO: 82223 - DNA, 25 bp, Probe sequence
tgttaatagggtaatacttacggaa

SEQ ID NO: 82224 - DNA, 25 bp, Probe sequence
ttgttaatagggtaatacttacgga

SEQ ID NO: 82225 - DNA, 25 bp, Probe sequence
ggaatgtgtacaacaactaccttac

SEQ ID NO: 82226 - DNA, 25 bp, Probe sequence
ttaaggaatgtgtacaacaactacc

SEQ ID NO: 82227 - DNA, 25 bp, Probe sequence
aggaatgtgtacaacaactacctta

SEQ ID NO: 82228 - DNA, 25 bp, Probe sequence
taaggaatgtgtacaacaactacct

SEQ ID NO: 82229 - DNA, 25 bp, Probe sequence
ccccataaataaaacatacttccgt

SEQ ID NO: 82230 - DNA, 25 bp, Probe sequence
gttgttagtcatttaaggaatgtgt

SEQ ID NO: 82231 - DNA, 25 bp, Probe sequence
acaaagttgttagtcatttaaggaa

SEQ ID NO: 82232 - DNA, 25 bp, Probe sequence
aaagatagttgacgaaaagttctca

SEQ ID NO: 82233 - DNA, 25 bp, Probe sequence
tccgtaagtattaccctattaacaa

SEQ ID NO: 82234 - DNA, 25 bp, Probe sequence
aacaccatctataccagttcttcac

SEQ ID NO: 82235 - DNA, 25 bp, Probe sequence
acaccatctataccagttcttcacc

SEQ ID NO: 82236 - DNA, 25 bp, Probe sequence
atctataccagttcttcaccgcttc

SEQ ID NO: 82237 - DNA, 25 bp, Probe sequence
catctataccagttcttcaccgctt

SEQ ID NO: 82238 - DNA, 25 bp, Probe sequence
ctataccagttcttcaccgcttctc

SEQ ID NO: 82239 - DNA, 25 bp, Probe sequence
caccatctataccagttcttcaccg

SEQ ID NO: 82240 - DNA, 25 bp, Probe sequence
tctataccagttcttcaccgcttct

SEQ ID NO: 82241 - DNA, 25 bp, Probe sequence
aaacaccatctataccagttcttca

SEQ ID NO: 82242 - DNA, 25 bp, Probe sequence
taaacaccatctataccagttcttc

SEQ ID NO: 82243 - DNA, 25 bp, Probe sequence
gtgaagaactggtatagatggtgtt

SEQ ID NO: 82244 - DNA, 25 bp, Probe sequence
ggtgaagaactggtatagatggtgt

SEQ ID NO: 82245 - DNA, 25 bp, Probe sequence
gaagcggtgaagaactggtatagat

SEQ ID NO: 82246 - DNA, 25 bp, Probe sequence
aagcggtgaagaactggtatagatg

SEQ ID NO: 82247 - DNA, 25 bp, Probe sequence
cggtgaagaactggtatagatggtg

SEQ ID NO: 82248 - DNA, 25 bp, Probe sequence
gagaagcggtgaagaactggtatag

SEQ ID NO: 82249 - DNA, 25 bp, Probe sequence
agaagcggtgaagaactggtataga

SEQ ID NO: 82250 - DNA, 25 bp, Probe sequence
tgaagaactggtatagatggtgttt

SEQ ID NO: 82251 - DNA, 25 bp, Probe sequence
gaagaactggtatagatggtgttta

SEQ ID NO: 82252 - DNA, 25 bp, Probe sequence
atcaacctttgctaaatcaagactc

SEQ ID NO: 82253 - DNA, 25 bp, Probe sequence
aatcaacctttgctaaatcaagact

SEQ ID NO: 82254 - DNA, 25 bp, Probe sequence
cctttgctaaatcaagactcccttt

SEQ ID NO: 82255 - DNA, 25 bp, Probe sequence
tcaacctttgctaaatcaagactcc

SEQ ID NO: 82256 - DNA, 25 bp, Probe sequence
aaatcaacctttgctaaatcaagac

SEQ ID NO: 82257 - DNA, 25 bp, Probe sequence
aattagtgctcgaatctcattgatt

SEQ ID NO: 82258 - DNA, 25 bp, Probe sequence
caacctttgctaaatcaagactccc

SEQ ID NO: 82259 - DNA, 25 bp, Probe sequence
tatcctttaaatcattgcgtgcttc

SEQ ID NO: 82260 - DNA, 25 bp, Probe sequence
ttatcctttaaatcattgcgtgctt

SEQ ID NO: 82261 - DNA, 25 bp, Probe sequence
gagtcttgatttagcaaaggttgat

SEQ ID NO: 82262 - DNA, 25 bp, Probe sequence
agtcttgatttagcaaaggttgatt

SEQ ID NO: 82263 - DNA, 25 bp, Probe sequence
ggagtcttgatttagcaaaggttga

SEQ ID NO: 82264 - DNA, 25 bp, Probe sequence
aaagggagtcttgatttagcaaagg

SEQ ID NO: 82265 - DNA, 25 bp, Probe sequence
gtcttgatttagcaaaggttgattt

SEQ ID NO: 82266 - DNA, 25 bp, Probe sequence
aatcaatgagattcgagcactaatt

SEQ ID NO: 82267 - DNA, 25 bp, Probe sequence
gggagtcttgatttagcaaaggttg

SEQ ID NO: 82268 - DNA, 25 bp, Probe sequence
aagcacgcaatgatttaaaggataa

SEQ ID NO: 82269 - DNA, 25 bp, Probe sequence
gaagcacgcaatgatttaaaggata

SEQ ID NO: 82270 - DNA, 25 bp, Probe sequence
acatacctcagtctcaccttatcat

SEQ ID NO: 82271 - DNA, 25 bp, Probe sequence
cacatacctcagtctcaccttatca

SEQ ID NO: 82272 - DNA, 25 bp, Probe sequence
acacatacctcagtctcaccttatc

SEQ ID NO: 82273 - DNA, 25 bp, Probe sequence
cacacatacctcagtctcaccttat

SEQ ID NO: 82274 - DNA, 25 bp, Probe sequence
catacctcagtctcaccttatcatg

SEQ ID NO: 82275 - DNA, 25 bp, Probe sequence
gcacacatacctcagtctcacctta

SEQ ID NO: 82276 - DNA, 25 bp, Probe sequence
atacctcagtctcaccttatcatga

SEQ ID NO: 82277 - DNA, 25 bp, Probe sequence
tacctcagtctcaccttatcatgac

SEQ ID NO: 82278 - DNA, 25 bp, Probe sequence
tgacacaaaggatattgaaaacacg

SEQ ID NO: 82279 - DNA, 25 bp, Probe sequence
atgataaggtgagactgaggtatgt

SEQ ID NO: 82280 - DNA, 25 bp, Probe sequence
gataaggtgagactgaggtatgtgt

SEQ ID NO: 82281 - DNA, 25 bp, Probe sequence
tgataaggtgagactgaggtatgtg

SEQ ID NO: 82282 - DNA, 25 bp, Probe sequence
ataaggtgagactgaggtatgtgtg

SEQ ID NO: 82283 - DNA, 25 bp, Probe sequence
catgataaggtgagactgaggtatg

SEQ ID NO: 82284 - DNA, 25 bp, Probe sequence
taaggtgagactgaggtatgtgtgc

SEQ ID NO: 82285 - DNA, 25 bp, Probe sequence
tcatgataaggtgagactgaggtat

SEQ ID NO: 82286 - DNA, 25 bp, Probe sequence
gtcatgataaggtgagactgaggta

SEQ ID NO: 82287 - DNA, 25 bp, Probe sequence
cgtgttttcaatatcctttgtgtca

SEQ ID NO: 82288 - DNA, 25 bp, Probe sequence
ttacgctcacttggttatgctaata

SEQ ID NO: 82289 - DNA, 25 bp, Probe sequence
acgctcacttggttatgctaatata

SEQ ID NO: 82290 - DNA, 25 bp, Probe sequence
tacgctcacttggttatgctaatat

SEQ ID NO: 82291 - DNA, 25 bp, Probe sequence
gttacgctcacttggttatgctaat

SEQ ID NO: 82292 - DNA, 25 bp, Probe sequence
cgctcacttggttatgctaatataa

SEQ ID NO: 82293 - DNA, 25 bp, Probe sequence
atgttacgctcacttggttatgcta

SEQ ID NO: 82294 - DNA, 25 bp, Probe sequence
tgttacgctcacttggttatgctaa

SEQ ID NO: 82295 - DNA, 25 bp, Probe sequence
tacatacctccttactctcccaaat

SEQ ID NO: 82296 - DNA, 25 bp, Probe sequence
ttacatacctccttactctcccaaa

SEQ ID NO: 82297 - DNA, 25 bp, Probe sequence
tattagcataaccaagtgagcgtaa

SEQ ID NO: 82298 - DNA, 25 bp, Probe sequence
atattagcataaccaagtgagcgta

SEQ ID NO: 82299 - DNA, 25 bp, Probe sequence
tatattagcataaccaagtgagcgt

SEQ ID NO: 82300 - DNA, 25 bp, Probe sequence
attagcataaccaagtgagcgtaac

SEQ ID NO: 82301 - DNA, 25 bp, Probe sequence
ttatattagcataaccaagtgagcg

SEQ ID NO: 82302 - DNA, 25 bp, Probe sequence
tagcataaccaagtgagcgtaacat

SEQ ID NO: 82303 - DNA, 25 bp, Probe sequence
ttagcataaccaagtgagcgtaaca

SEQ ID NO: 82304 - DNA, 25 bp, Probe sequence
atttgggagagtaaggaggtatgta

SEQ ID NO: 82305 - DNA, 25 bp, Probe sequence
tttgggagagtaaggaggtatgtaa

SEQ ID NO: 82306 - DNA, 25 bp, Probe sequence
tgcacattgaacatacagtatgatt

SEQ ID NO: 82307 - DNA, 25 bp, Probe sequence
gcacattgaacatacagtatgatta

SEQ ID NO: 82308 - DNA, 25 bp, Probe sequence
cacattgaacatacagtatgattaa

SEQ ID NO: 82309 - DNA, 25 bp, Probe sequence
tgactcataatctataacgctaaaa

SEQ ID NO: 82310 - DNA, 25 bp, Probe sequence
aatcatactgtatgttcaatgtgca

SEQ ID NO: 82311 - DNA, 25 bp, Probe sequence
taatcatactgtatgttcaatgtgc

SEQ ID NO: 82312 - DNA, 25 bp, Probe sequence
ttaatcatactgtatgttcaatgtg

SEQ ID NO: 82313 - DNA, 25 bp, Probe sequence
ttttagcgttatagattatgagtca

SEQ ID NO: 82314 - DNA, 25 bp, Probe sequence
gtcttgcaactacctttgtattgtt

SEQ ID NO: 82315 - DNA, 25 bp, Probe sequence
ttgtcttgcaactacctttgtattg

SEQ ID NO: 82316 - DNA, 25 bp, Probe sequence
cttgtcttgcaactacctttgtatt

SEQ ID NO: 82317 - DNA, 25 bp, Probe sequence
acttgtcttgcaactacctttgtat

SEQ ID NO: 82318 - DNA, 25 bp, Probe sequence
gtaacttgtcttgcaactacctttg

SEQ ID NO: 82319 - DNA, 25 bp, Probe sequence
tgtcttgcaactacctttgtattgt

SEQ ID NO: 82320 - DNA, 25 bp, Probe sequence
aacttgtcttgcaactacctttgta

SEQ ID NO: 82321 - DNA, 25 bp, Probe sequence
taacttgtcttgcaactacctttgt

SEQ ID NO: 82322 - DNA, 25 bp, Probe sequence
agtaacttgtcttgcaactaccttt

SEQ ID NO: 82323 - DNA, 25 bp, Probe sequence
caatacaaaggtagttgcaagacaa

SEQ ID NO: 82324 - DNA, 25 bp, Probe sequence
aacaatacaaaggtagttgcaagac

SEQ ID NO: 82325 - DNA, 25 bp, Probe sequence
aatacaaaggtagttgcaagacaag

SEQ ID NO: 82326 - DNA, 25 bp, Probe sequence
caaaggtagttgcaagacaagttac

SEQ ID NO: 82327 - DNA, 25 bp, Probe sequence
atacaaaggtagttgcaagacaagt

SEQ ID NO: 82328 - DNA, 25 bp, Probe sequence
aaaggtagttgcaagacaagttact

SEQ ID NO: 82329 - DNA, 25 bp, Probe sequence
acaaaggtagttgcaagacaagtta

SEQ ID NO: 82330 - DNA, 25 bp, Probe sequence
tacaaaggtagttgcaagacaagtt

SEQ ID NO: 82331 - DNA, 25 bp, Probe sequence
acaatacaaaggtagttgcaagaca

SEQ ID NO: 82332 - DNA, 25 bp, Probe sequence
tataatctttaatacaggaggcgct

SEQ ID NO: 82333 - DNA, 25 bp, Probe sequence
ttataatctttaatacaggaggcgc

SEQ ID NO: 82334 - DNA, 25 bp, Probe sequence
attataatctttaatacaggaggcg

SEQ ID NO: 82335 - DNA, 25 bp, Probe sequence
cgaatttaaaatttcagcatttctg

SEQ ID NO: 82336 - DNA, 25 bp, Probe sequence
tcgaatttaaaatttcagcatttct

SEQ ID NO: 82337 - DNA, 25 bp, Probe sequence
gaatttaaaatttcagcatttctgt

SEQ ID NO: 82338 - DNA, 25 bp, Probe sequence
gctttcgaatttaaaatttcagcat

SEQ ID NO: 82339 - DNA, 25 bp, Probe sequence
atgctttcgaatttaaaatttcagc

SEQ ID NO: 82340 - DNA, 25 bp, Probe sequence
aaaatttcagcatttctgtttaaaa

SEQ ID NO: 82341 - DNA, 25 bp, Probe sequence
agcgcctcctgtattaaagattata

SEQ ID NO: 82342 - DNA, 25 bp, Probe sequence
gcgcctcctgtattaaagattataa

SEQ ID NO: 82343 - DNA, 25 bp, Probe sequence
cgcctcctgtattaaagattataat

SEQ ID NO: 82344 - DNA, 25 bp, Probe sequence
cagaaatgctgaaattttaaattcg

SEQ ID NO: 82345 - DNA, 25 bp, Probe sequence
agaaatgctgaaattttaaattcga

SEQ ID NO: 82346 - DNA, 25 bp, Probe sequence
acagaaatgctgaaattttaaattc

SEQ ID NO: 82347 - DNA, 25 bp, Probe sequence
gctgaaattttaaattcgaaagcat

SEQ ID NO: 82348 - DNA, 25 bp, Probe sequence
atgctgaaattttaaattcgaaagc

SEQ ID NO: 82349 - DNA, 25 bp, Probe sequence
ttttaaacagaaatgctgaaatttt

SEQ ID NO: 82350 - DNA, 25 bp, Probe sequence
gcgtatcttacttattgtaggtagc

SEQ ID NO: 82351 - DNA, 25 bp, Probe sequence
cgtatcttacttattgtaggtagcg

SEQ ID NO: 82352 - DNA, 25 bp, Probe sequence
ggcgtatcttacttattgtaggtag

SEQ ID NO: 82353 - DNA, 25 bp, Probe sequence
atgggcgtatcttacttattgtagg

SEQ ID NO: 82354 - DNA, 25 bp, Probe sequence
gggcgtatcttacttattgtaggta

SEQ ID NO: 82355 - DNA, 25 bp, Probe sequence
tgggcgtatcttacttattgtaggt

SEQ ID NO: 82356 - DNA, 25 bp, Probe sequence
tatgggcgtatcttacttattgtag

SEQ ID NO: 82357 - DNA, 25 bp, Probe sequence
aatatgggcgtatcttacttattgt

SEQ ID NO: 82358 - DNA, 25 bp, Probe sequence
caaacttcatgtcacacccttcttt

SEQ ID NO: 82359 - DNA, 25 bp, Probe sequence
gctacctacaataagtaagatacgc

SEQ ID NO: 82360 - DNA, 25 bp, Probe sequence
cgctacctacaataagtaagatacg

SEQ ID NO: 82361 - DNA, 25 bp, Probe sequence
ctacctacaataagtaagatacgcc

SEQ ID NO: 82362 - DNA, 25 bp, Probe sequence
cctacaataagtaagatacgcccat

SEQ ID NO: 82363 - DNA, 25 bp, Probe sequence
tacctacaataagtaagatacgccc

SEQ ID NO: 82364 - DNA, 25 bp, Probe sequence
acctacaataagtaagatacgccca

SEQ ID NO: 82365 - DNA, 25 bp, Probe sequence
ctacaataagtaagatacgcccata

SEQ ID NO: 82366 - DNA, 25 bp, Probe sequence
acaataagtaagatacgcccatatt

SEQ ID NO: 82367 - DNA, 25 bp, Probe sequence
aaagaagggtgtgacatgaagtttg

SEQ ID NO: 82368 - DNA, 25 bp, Probe sequence
tcaactctgtaaggttcattcattg

SEQ ID NO: 82369 - DNA, 25 bp, Probe sequence
caactctgtaaggttcattcattga

SEQ ID NO: 82370 - DNA, 25 bp, Probe sequence
ttcaactctgtaaggttcattcatt

SEQ ID NO: 82371 - DNA, 25 bp, Probe sequence
agataaaggctactactccaaacat

SEQ ID NO: 82372 - DNA, 25 bp, Probe sequence
acaaacatcatcacttagaaagcac

SEQ ID NO: 82373 - DNA, 25 bp, Probe sequence
cacaaacatcatcacttagaaagca

SEQ ID NO: 82374 - DNA, 25 bp, Probe sequence
acacaaacatcatcacttagaaagc

SEQ ID NO: 82375 - DNA, 25 bp, Probe sequence
catcatcacttagaaagcaccattg

SEQ ID NO: 82376 - DNA, 25 bp, Probe sequence
acatcatcacttagaaagcaccatt

SEQ ID NO: 82377 - DNA, 25 bp, Probe sequence
caatgaatgaaccttacagagttga

SEQ ID NO: 82378 - DNA, 25 bp, Probe sequence
tcaatgaatgaaccttacagagttg

SEQ ID NO: 82379 - DNA, 25 bp, Probe sequence
aatgaatgaaccttacagagttgaa

SEQ ID NO: 82380 - DNA, 25 bp, Probe sequence
atgtttggagtagtagcctttatct

SEQ ID NO: 82381 - DNA, 25 bp, Probe sequence
gctttctaagtgatgatgtttgtgt

SEQ ID NO: 82382 - DNA, 25 bp, Probe sequence
tgctttctaagtgatgatgtttgtg

SEQ ID NO: 82383 - DNA, 25 bp, Probe sequence
gtgctttctaagtgatgatgtttgt

SEQ ID NO: 82384 - DNA, 25 bp, Probe sequence
caatggtgctttctaagtgatgatg

SEQ ID NO: 82385 - DNA, 25 bp, Probe sequence
ggtgctttctaagtgatgatgtttg

SEQ ID NO: 82386 - DNA, 25 bp, Probe sequence
acgattaaaagatgcttcattgaga

SEQ ID NO: 82387 - DNA, 25 bp, Probe sequence
aagcaatgcagtataactattaact

SEQ ID NO: 82388 - DNA, 25 bp, Probe sequence
cgattaaaagatgcttcattgagat

SEQ ID NO: 82389 - DNA, 25 bp, Probe sequence
cacttacgattaaaagatgcttcat

SEQ ID NO: 82390 - DNA, 25 bp, Probe sequence
tacgattaaaagatgcttcattgag

SEQ ID NO: 82391 - DNA, 25 bp, Probe sequence
agatgcttcattgagattttgattt

SEQ ID NO: 82392 - DNA, 25 bp, Probe sequence
aagatgcttcattgagattttgatt

SEQ ID NO: 82393 - DNA, 25 bp, Probe sequence
aaagatgcttcattgagattttgat

SEQ ID NO: 82394 - DNA, 25 bp, Probe sequence
acttacgattaaaagatgcttcatt

SEQ ID NO: 82395 - DNA, 25 bp, Probe sequence
tctcaatgaagcatcttttaatcgt

SEQ ID NO: 82396 - DNA, 25 bp, Probe sequence
agttaatagttatactgcattgctt

SEQ ID NO: 82397 - DNA, 25 bp, Probe sequence
atctcaatgaagcatcttttaatcg

SEQ ID NO: 82398 - DNA, 25 bp, Probe sequence
atgaagcatcttttaatcgtaagtg

SEQ ID NO: 82399 - DNA, 25 bp, Probe sequence
ctcaatgaagcatcttttaatcgta

SEQ ID NO: 82400 - DNA, 25 bp, Probe sequence
atcaaaatctcaatgaagcatcttt

SEQ ID NO: 82401 - DNA, 25 bp, Probe sequence
aatcaaaatctcaatgaagcatctt

SEQ ID NO: 82402 - DNA, 25 bp, Probe sequence
aaatcaaaatctcaatgaagcatct

SEQ ID NO: 82403 - DNA, 25 bp, Probe sequence
aatgaagcatcttttaatcgtaagt

SEQ ID NO: 82404 - DNA, 25 bp, Probe sequence
cacattccatcggcatataacattg

SEQ ID NO: 82405 - DNA, 25 bp, Probe sequence
cattatgccaatatgagcgtatagt

SEQ ID NO: 82406 - DNA, 25 bp, Probe sequence
acattatgccaatatgagcgtatag

SEQ ID NO: 82407 - DNA, 25 bp, Probe sequence
ttatgccaatatgagcgtatagttg

SEQ ID NO: 82408 - DNA, 25 bp, Probe sequence
attatgccaatatgagcgtatagtt

SEQ ID NO: 82409 - DNA, 25 bp, Probe sequence
aatatgagcgtatagttggtcttac

SEQ ID NO: 82410 - DNA, 25 bp, Probe sequence
gtacattatgccaatatgagcgtat

SEQ ID NO: 82411 - DNA, 25 bp, Probe sequence
gcacattccatcggcatataacatt

SEQ ID NO: 82412 - DNA, 25 bp, Probe sequence
caatatgagcgtatagttggtctta

SEQ ID NO: 82413 - DNA, 25 bp, Probe sequence
caatgttatatgccgatggaatgtg

SEQ ID NO: 82414 - DNA, 25 bp, Probe sequence
ctatacgctcatattggcataatgt

SEQ ID NO: 82415 - DNA, 25 bp, Probe sequence
actatacgctcatattggcataatg

SEQ ID NO: 82416 - DNA, 25 bp, Probe sequence
caactatacgctcatattggcataa

SEQ ID NO: 82417 - DNA, 25 bp, Probe sequence
aactatacgctcatattggcataat

SEQ ID NO: 82418 - DNA, 25 bp, Probe sequence
gtaagaccaactatacgctcatatt

SEQ ID NO: 82419 - DNA, 25 bp, Probe sequence
atacgctcatattggcataatgtac

SEQ ID NO: 82420 - DNA, 25 bp, Probe sequence
aatgttatatgccgatggaatgtgc

SEQ ID NO: 82421 - DNA, 25 bp, Probe sequence
taagaccaactatacgctcatattg

SEQ ID NO: 82422 - DNA, 25 bp, Probe sequence
tggataatatgagacaatacgatga

SEQ ID NO: 82423 - DNA, 25 bp, Probe sequence
ttggataatatgagacaatacgatg

SEQ ID NO: 82424 - DNA, 25 bp, Probe sequence
ggataatatgagacaatacgatgat

SEQ ID NO: 82425 - DNA, 25 bp, Probe sequence
aatgaatcgctttgattaccaacaa

SEQ ID NO: 82426 - DNA, 25 bp, Probe sequence
aaatgaatcgctttgattaccaaca

SEQ ID NO: 82427 - DNA, 25 bp, Probe sequence
gctttgattaccaacaaggttctaa

SEQ ID NO: 82428 - DNA, 25 bp, Probe sequence
atgaatcgctttgattaccaacaag

SEQ ID NO: 82429 - DNA, 25 bp, Probe sequence
cgctttgattaccaacaaggttcta

SEQ ID NO: 82430 - DNA, 25 bp, Probe sequence
taaatgaatcgctttgattaccaac

SEQ ID NO: 82431 - DNA, 25 bp, Probe sequence
tcatcgtattgtctcatattatcca

SEQ ID NO: 82432 - DNA, 25 bp, Probe sequence
catcgtattgtctcatattatccaa

SEQ ID NO: 82433 - DNA, 25 bp, Probe sequence
tgttggtaatcaaagcgattcattt

SEQ ID NO: 82434 - DNA, 25 bp, Probe sequence
ttgttggtaatcaaagcgattcatt

SEQ ID NO: 82435 - DNA, 25 bp, Probe sequence
atcatcgtattgtctcatattatcc

SEQ ID NO: 82436 - DNA, 25 bp, Probe sequence
ttagaaccttgttggtaatcaaagc

SEQ ID NO: 82437 - DNA, 25 bp, Probe sequence
cttgttggtaatcaaagcgattcat

SEQ ID NO: 82438 - DNA, 25 bp, Probe sequence
gttggtaatcaaagcgattcattta

SEQ ID NO: 82439 - DNA, 25 bp, Probe sequence
tagaaccttgttggtaatcaaagcg

SEQ ID NO: 82440 - DNA, 25 bp, Probe sequence
tacatacgcctccagtcaattagta

SEQ ID NO: 82441 - DNA, 25 bp, Probe sequence
gcctccagtcaattagtacaatcat

SEQ ID NO: 82442 - DNA, 25 bp, Probe sequence
ttacatacgcctccagtcaattagt

SEQ ID NO: 82443 - DNA, 25 bp, Probe sequence
cctccagtcaattagtacaatcatt

SEQ ID NO: 82444 - DNA, 25 bp, Probe sequence
tacgcctccagtcaattagtacaat

SEQ ID NO: 82445 - DNA, 25 bp, Probe sequence
atacgcctccagtcaattagtacaa

SEQ ID NO: 82446 - DNA, 25 bp, Probe sequence
catacgcctccagtcaattagtaca

SEQ ID NO: 82447 - DNA, 25 bp, Probe sequence
acatacgcctccagtcaattagtac

SEQ ID NO: 82448 - DNA, 25 bp, Probe sequence
tcctagttaagagattacgttcaca

SEQ ID NO: 82449 - DNA, 25 bp, Probe sequence
tactaattgactggaggcgtatgta

SEQ ID NO: 82450 - DNA, 25 bp, Probe sequence
atgattgtactaattgactggaggc

SEQ ID NO: 82451 - DNA, 25 bp, Probe sequence
actaattgactggaggcgtatgtaa

SEQ ID NO: 82452 - DNA, 25 bp, Probe sequence
aatgattgtactaattgactggagg

SEQ ID NO: 82453 - DNA, 25 bp, Probe sequence
ttgtactaattgactggaggcgtat

SEQ ID NO: 82454 - DNA, 25 bp, Probe sequence
attgtactaattgactggaggcgta

SEQ ID NO: 82455 - DNA, 25 bp, Probe sequence
gtactaattgactggaggcgtatgt

SEQ ID NO: 82456 - DNA, 25 bp, Probe sequence
tgtactaattgactggaggcgtatg

SEQ ID NO: 82457 - DNA, 25 bp, Probe sequence
tgtgaacgtaatctcttaactagga

SEQ ID NO: 82458 - DNA, 25 bp, Probe sequence
actgaatacaactaattatcacgca

SEQ ID NO: 82459 - DNA, 25 bp, Probe sequence
aactgaatacaactaattatcacgc

SEQ ID NO: 82460 - DNA, 25 bp, Probe sequence
ctgaatacaactaattatcacgcat

SEQ ID NO: 82461 - DNA, 25 bp, Probe sequence
tgaatacaactaattatcacgcatt

SEQ ID NO: 82462 - DNA, 25 bp, Probe sequence
acaactaattatcacgcattttcca

SEQ ID NO: 82463 - DNA, 25 bp, Probe sequence
caactaattatcacgcattttccaa

SEQ ID NO: 82464 - DNA, 25 bp, Probe sequence
gaatacaactaattatcacgcattt

SEQ ID NO: 82465 - DNA, 25 bp, Probe sequence
aactaattatcacgcattttccaaa

SEQ ID NO: 82466 - DNA, 25 bp, Probe sequence
tacaactaattatcacgcattttcc

SEQ ID NO: 82467 - DNA, 25 bp, Probe sequence
tgcgtgataattagttgtattcagt

SEQ ID NO: 82468 - DNA, 25 bp, Probe sequence
gcgtgataattagttgtattcagtt

SEQ ID NO: 82469 - DNA, 25 bp, Probe sequence
atgcgtgataattagttgtattcag

SEQ ID NO: 82470 - DNA, 25 bp, Probe sequence
aatgcgtgataattagttgtattca

SEQ ID NO: 82471 - DNA, 25 bp, Probe sequence
tggaaaatgcgtgataattagttgt

SEQ ID NO: 82472 - DNA, 25 bp, Probe sequence
ttggaaaatgcgtgataattagttg

SEQ ID NO: 82473 - DNA, 25 bp, Probe sequence
aaatgcgtgataattagttgtattc

SEQ ID NO: 82474 - DNA, 25 bp, Probe sequence
tttggaaaatgcgtgataattagtt

SEQ ID NO: 82475 - DNA, 25 bp, Probe sequence
ggaaaatgcgtgataattagttgta

SEQ ID NO: 82476 - DNA, 25 bp, Probe sequence
tttctactgtaaaggcaactcaagc

SEQ ID NO: 82477 - DNA, 25 bp, Probe sequence
agggttcaaatgaaggtatatccag

SEQ ID NO: 82478 - DNA, 25 bp, Probe sequence
gcaataaagggttcaaatgaaggta

SEQ ID NO: 82479 - DNA, 25 bp, Probe sequence
aagggttcaaatgaaggtatatcca

SEQ ID NO: 82480 - DNA, 25 bp, Probe sequence
tagcaataaagggttcaaatgaagg

SEQ ID NO: 82481 - DNA, 25 bp, Probe sequence
aaggcaactcaagcgatgttcataa

SEQ ID NO: 82482 - DNA, 25 bp, Probe sequence
aactagcaataaagggttcaaatga

SEQ ID NO: 82483 - DNA, 25 bp, Probe sequence
agcaataaagggttcaaatgaaggt

SEQ ID NO: 82484 - DNA, 25 bp, Probe sequence
actagcaataaagggttcaaatgaa

SEQ ID NO: 82485 - DNA, 25 bp, Probe sequence
gcttgagttgcctttacagtagaaa

SEQ ID NO: 82486 - DNA, 25 bp, Probe sequence
ctggatataccttcatttgaaccct

SEQ ID NO: 82487 - DNA, 25 bp, Probe sequence
taccttcatttgaaccctttattgc

SEQ ID NO: 82488 - DNA, 25 bp, Probe sequence
tggatataccttcatttgaaccctt

SEQ ID NO: 82489 - DNA, 25 bp, Probe sequence
ccttcatttgaaccctttattgcta

SEQ ID NO: 82490 - DNA, 25 bp, Probe sequence
ttatgaacatcgcttgagttgcctt

SEQ ID NO: 82491 - DNA, 25 bp, Probe sequence
tcatttgaaccctttattgctagtt

SEQ ID NO: 82492 - DNA, 25 bp, Probe sequence
ttcatttgaaccctttattgctagt

SEQ ID NO: 82493 - DNA, 25 bp, Probe sequence
accttcatttgaaccctttattgct

SEQ ID NO: 82494 - DNA, 25 bp, Probe sequence
tgtgttagtcatcatgtatacgaca

SEQ ID NO: 82495 - DNA, 25 bp, Probe sequence
atgtgttagtcatcatgtatacgac

SEQ ID NO: 82496 - DNA, 25 bp, Probe sequence
tatgtgttagtcatcatgtatacga

SEQ ID NO: 82497 - DNA, 25 bp, Probe sequence
gtcatcatgtatacgacatcctact

SEQ ID NO: 82498 - DNA, 25 bp, Probe sequence
agtcatcatgtatacgacatcctac

SEQ ID NO: 82499 - DNA, 25 bp, Probe sequence
gttagtcatcatgtatacgacatcc

SEQ ID NO: 82500 - DNA, 25 bp, Probe sequence
ttagtcatcatgtatacgacatcct

SEQ ID NO: 82501 - DNA, 25 bp, Probe sequence
ctgttatgatcttagctttgtcttt

SEQ ID NO: 82502 - DNA, 25 bp, Probe sequence
gtgttagtcatcatgtatacgacat

SEQ ID NO: 82503 - DNA, 25 bp, Probe sequence
tgtcgtatacatgatgactaacaca

SEQ ID NO: 82504 - DNA, 25 bp, Probe sequence
gtcgtatacatgatgactaacacat

SEQ ID NO: 82505 - DNA, 25 bp, Probe sequence
tcgtatacatgatgactaacacata

SEQ ID NO: 82506 - DNA, 25 bp, Probe sequence
gtaggatgtcgtatacatgatgact

SEQ ID NO: 82507 - DNA, 25 bp, Probe sequence
agtaggatgtcgtatacatgatgac

SEQ ID NO: 82508 - DNA, 25 bp, Probe sequence
ggatgtcgtatacatgatgactaac

SEQ ID NO: 82509 - DNA, 25 bp, Probe sequence
aggatgtcgtatacatgatgactaa

SEQ ID NO: 82510 - DNA, 25 bp, Probe sequence
aaagacaaagctaagatcataacag

SEQ ID NO: 82511 - DNA, 25 bp, Probe sequence
atgtcgtatacatgatgactaacac

SEQ ID NO: 82512 - DNA, 25 bp, Probe sequence
tccttatttgatatcttactagcct

SEQ ID NO: 82513 - DNA, 25 bp, Probe sequence
ctccttatttgatatcttactagcc

SEQ ID NO: 82514 - DNA, 25 bp, Probe sequence
cctccttatttgatatcttactagc

SEQ ID NO: 82515 - DNA, 25 bp, Probe sequence
ttgatatcttactagccttcttaag

SEQ ID NO: 82516 - DNA, 25 bp, Probe sequence
ccttatttgatatcttactagcctt

SEQ ID NO: 82517 - DNA, 25 bp, Probe sequence
aaacctccttatttgatatcttact

SEQ ID NO: 82518 - DNA, 25 bp, Probe sequence
tttgatatcttactagccttcttaa

SEQ ID NO: 82519 - DNA, 25 bp, Probe sequence
acctccttatttgatatcttactag

SEQ ID NO: 82520 - DNA, 25 bp, Probe sequence
atttgatatcttactagccttctta

SEQ ID NO: 82521 - DNA, 25 bp, Probe sequence
aggctagtaagatatcaaataagga

SEQ ID NO: 82522 - DNA, 25 bp, Probe sequence
gctagtaagatatcaaataaggagg

SEQ ID NO: 82523 - DNA, 25 bp, Probe sequence
ggctagtaagatatcaaataaggag

SEQ ID NO: 82524 - DNA, 25 bp, Probe sequence
cttaagaaggctagtaagatatcaa

SEQ ID NO: 82525 - DNA, 25 bp, Probe sequence
aaggctagtaagatatcaaataagg

SEQ ID NO: 82526 - DNA, 25 bp, Probe sequence
agtaagatatcaaataaggaggttt

SEQ ID NO: 82527 - DNA, 25 bp, Probe sequence
ttaagaaggctagtaagatatcaaa

SEQ ID NO: 82528 - DNA, 25 bp, Probe sequence
ctagtaagatatcaaataaggaggt

SEQ ID NO: 82529 - DNA, 25 bp, Probe sequence
agaaggctagtaagatatcaaataa

SEQ ID NO: 82530 - DNA, 25 bp, Probe sequence
cctccttcaacgatgtgaatacatt

SEQ ID NO: 82531 - DNA, 25 bp, Probe sequence
gtcttaaccctaaggtcagtcttac

SEQ ID NO: 82532 - DNA, 25 bp, Probe sequence
agtcttaaccctaaggtcagtctta

SEQ ID NO: 82533 - DNA, 25 bp, Probe sequence
taaggtcagtcttaaccctaaggtc

SEQ ID NO: 82534 - DNA, 25 bp, Probe sequence
ctaaggtcagtcttaaccctaaggt

SEQ ID NO: 82535 - DNA, 25 bp, Probe sequence
tataaccctaaggtcagtcttaacc

SEQ ID NO: 82536 - DNA, 25 bp, Probe sequence
ataaccctaaggtcagtcttaaccc

SEQ ID NO: 82537 - DNA, 25 bp, Probe sequence
tcttaaccctaaggtcagtcttacg

SEQ ID NO: 82538 - DNA, 25 bp, Probe sequence
cagtcttaaccctaaggtcagtctt

SEQ ID NO: 82539 - DNA, 25 bp, Probe sequence
aatgtattcacatcgttgaaggagg

SEQ ID NO: 82540 - DNA, 25 bp, Probe sequence
taagactgaccttagggttaagact

SEQ ID NO: 82541 - DNA, 25 bp, Probe sequence
gtaagactgaccttagggttaagac

SEQ ID NO: 82542 - DNA, 25 bp, Probe sequence
accttagggttaagactgaccttag

SEQ ID NO: 82543 - DNA, 25 bp, Probe sequence
gaccttagggttaagactgacctta

SEQ ID NO: 82544 - DNA, 25 bp, Probe sequence
ggttaagactgaccttagggttata

SEQ ID NO: 82545 - DNA, 25 bp, Probe sequence
gggttaagactgaccttagggttat

SEQ ID NO: 82546 - DNA, 25 bp, Probe sequence
cgtaagactgaccttagggttaaga

SEQ ID NO: 82547 - DNA, 25 bp, Probe sequence
aagactgaccttagggttaagactg

SEQ ID NO: 82548 - DNA, 25 bp, Probe sequence
aacatcactcgcttatttatcgttt

SEQ ID NO: 82549 - DNA, 25 bp, Probe sequence
taacatcactcgcttatttatcgtt

SEQ ID NO: 82550 - DNA, 25 bp, Probe sequence
acatcactcgcttatttatcgtttt

SEQ ID NO: 82551 - DNA, 25 bp, Probe sequence
gctatatttaaacttctattgagct

SEQ ID NO: 82552 - DNA, 25 bp, Probe sequence
agctatatttaaacttctattgagc

SEQ ID NO: 82553 - DNA, 25 bp, Probe sequence
aaacgataaataagcgagtgatgtt

SEQ ID NO: 82554 - DNA, 25 bp, Probe sequence
aacgataaataagcgagtgatgtta

SEQ ID NO: 82555 - DNA, 25 bp, Probe sequence
aaaacgataaataagcgagtgatgt

SEQ ID NO: 82556 - DNA, 25 bp, Probe sequence
gctcaatagaagtttaaatatagct

SEQ ID NO: 82557 - DNA, 25 bp, Probe sequence
agctcaatagaagtttaaatatagc

SEQ ID NO: 82558 - DNA, 25 bp, Probe sequence
aaataaatgggtacgtggacgaaca

SEQ ID NO: 82559 - DNA, 25 bp, Probe sequence
aatgaaaataaatgggtacgtggac

SEQ ID NO: 82560 - DNA, 25 bp, Probe sequence
aaatgaaaataaatgggtacgtgga

SEQ ID NO: 82561 - DNA, 25 bp, Probe sequence
aaaatgaaaataaatgggtacgtgg

SEQ ID NO: 82562 - DNA, 25 bp, Probe sequence
ctgaaaatgaaaataaatgggtacg

SEQ ID NO: 82563 - DNA, 25 bp, Probe sequence
gaaaataaatgggtacgtggacgaa

SEQ ID NO: 82564 - DNA, 25 bp, Probe sequence
atgaaaataaatgggtacgtggacg

SEQ ID NO: 82565 - DNA, 25 bp, Probe sequence
aaaataaatgggtacgtggacgaac

SEQ ID NO: 82566 - DNA, 25 bp, Probe sequence
aataaatgggtacgtggacgaacac

SEQ ID NO: 82567 - DNA, 25 bp, Probe sequence
caccagtatcgcagtagtagaaatt

SEQ ID NO: 82568 - DNA, 25 bp, Probe sequence
accagtatcgcagtagtagaaatta

SEQ ID NO: 82569 - DNA, 25 bp, Probe sequence
ccagtatcgcagtagtagaaattac

SEQ ID NO: 82570 - DNA, 25 bp, Probe sequence
gcaccagtatcgcagtagtagaaat

SEQ ID NO: 82571 - DNA, 25 bp, Probe sequence
cagtatcgcagtagtagaaattact

SEQ ID NO: 82572 - DNA, 25 bp, Probe sequence
agtatcgcagtagtagaaattactt

SEQ ID NO: 82573 - DNA, 25 bp, Probe sequence
gtatcgcagtagtagaaattacttt

SEQ ID NO: 82574 - DNA, 25 bp, Probe sequence
cgcagtagtagaaattactttatct

SEQ ID NO: 82575 - DNA, 25 bp, Probe sequence
tcgcagtagtagaaattactttatc

SEQ ID NO: 82576 - DNA, 25 bp, Probe sequence
caagaaattgttccagatgactcaa

SEQ ID NO: 82577 - DNA, 25 bp, Probe sequence
ctcaagaaattgttccagatgactc

SEQ ID NO: 82578 - DNA, 25 bp, Probe sequence
actcaagaaattgttccagatgact

SEQ ID NO: 82579 - DNA, 25 bp, Probe sequence
aactcaagaaattgttccagatgac

SEQ ID NO: 82580 - DNA, 25 bp, Probe sequence
tcaagaaattgttccagatgactca

SEQ ID NO: 82581 - DNA, 25 bp, Probe sequence
agtttctgaatttgcttatcaacga

SEQ ID NO: 82582 - DNA, 25 bp, Probe sequence
aagaaattgttccagatgactcaaa

SEQ ID NO: 82583 - DNA, 25 bp, Probe sequence
agaaattgttccagatgactcaaat

SEQ ID NO: 82584 - DNA, 25 bp, Probe sequence
cacacatgaagaaagttggttaagt

SEQ ID NO: 82585 - DNA, 25 bp, Probe sequence
atgattattggctatgcgagagtat

SEQ ID NO: 82586 - DNA, 25 bp, Probe sequence
gattattggctatgcgagagtatca

SEQ ID NO: 82587 - DNA, 25 bp, Probe sequence
tgattattggctatgcgagagtatc

SEQ ID NO: 82588 - DNA, 25 bp, Probe sequence
attattggctatgcgagagtatcat

SEQ ID NO: 82589 - DNA, 25 bp, Probe sequence
ttattggctatgcgagagtatcatc

SEQ ID NO: 82590 - DNA, 25 bp, Probe sequence
ctatgatgaacgaggttattggcaa

SEQ ID NO: 82591 - DNA, 25 bp, Probe sequence
tatgatgaacgaggttattggcaat

SEQ ID NO: 82592 - DNA, 25 bp, Probe sequence
atgatgaacgaggttattggcaatc

SEQ ID NO: 82593 - DNA, 25 bp, Probe sequence
cttgcctatgatgaacgaggttatt

SEQ ID NO: 82594 - DNA, 25 bp, Probe sequence
tgaactcgtggaattatgatgtagc

SEQ ID NO: 82595 - DNA, 25 bp, Probe sequence
ttgaactcgtggaattatgatgtag

SEQ ID NO: 82596 - DNA, 25 bp, Probe sequence
agaatgttattaagttggcagatgt

SEQ ID NO: 82597 - DNA, 25 bp, Probe sequence
gaggaatggctagaaggataagttg

SEQ ID NO: 82598 - DNA, 25 bp, Probe sequence
agaggaatggctagaaggataagtt

SEQ ID NO: 82599 - DNA, 25 bp, Probe sequence
aagaggaatggctagaaggataagt

SEQ ID NO: 82600 - DNA, 25 bp, Probe sequence
gaatgttattaagttggcagatgtt

SEQ ID NO: 82601 - DNA, 25 bp, Probe sequence
gaactcgtggaattatgatgtagcg

SEQ ID NO: 82602 - DNA, 25 bp, Probe sequence
aagaatgttattaagttggcagatg

SEQ ID NO: 82603 - DNA, 25 bp, Probe sequence
aattgttactggagaagaagatgct

SEQ ID NO: 82604 - DNA, 25 bp, Probe sequence
attgttactggagaagaagatgctt

SEQ ID NO: 82605 - DNA, 25 bp, Probe sequence
agttggttatgattatgatgttgct

SEQ ID NO: 82606 - DNA, 25 bp, Probe sequence
cagttggttatgattatgatgttgc

SEQ ID NO: 82607 - DNA, 25 bp, Probe sequence
tgattatgatgttgctaaggatgat

SEQ ID NO: 82608 - DNA, 25 bp, Probe sequence
atgattatgatgttgctaaggatga

SEQ ID NO: 82609 - DNA, 25 bp, Probe sequence
ccagttggttatgattatgatgttg

SEQ ID NO: 82610 - DNA, 25 bp, Probe sequence
ggttatgattatgatgttgctaagg

SEQ ID NO: 82611 - DNA, 25 bp, Probe sequence
tccagttggttatgattatgatgtt

SEQ ID NO: 82612 - DNA, 25 bp, Probe sequence
tatagagtttatagcgaagaaggcg

SEQ ID NO: 82613 - DNA, 25 bp, Probe sequence
gtatagagtttatagcgaagaaggc

SEQ ID NO: 82614 - DNA, 25 bp, Probe sequence
tggtcagtatagagtttatagcgaa

SEQ ID NO: 82615 - DNA, 25 bp, Probe sequence
ctggtcagtatagagtttatagcga

SEQ ID NO: 82616 - DNA, 25 bp, Probe sequence
ggtcagtatagagtttatagcgaag

SEQ ID NO: 82617 - DNA, 25 bp, Probe sequence
cattgctggtcagtatagagtttat

SEQ ID NO: 82618 - DNA, 25 bp, Probe sequence
gtcagtatagagtttatagcgaaga

SEQ ID NO: 82619 - DNA, 25 bp, Probe sequence
ttgctggtcagtatagagtttatag

SEQ ID NO: 82620 - DNA, 25 bp, Probe sequence
agtatagagtttatagcgaagaagg

SEQ ID NO: 82621 - DNA, 25 bp, Probe sequence
acatttcaatcataacatacggtgc

SEQ ID NO: 82622 - DNA, 25 bp, Probe sequence
ttcaatcataacatacggtgcaatg

SEQ ID NO: 82623 - DNA, 25 bp, Probe sequence
gacatttcaaatcaatcacatcggt

SEQ ID NO: 82624 - DNA, 25 bp, Probe sequence
gacatttcaatcataacatacggtg

SEQ ID NO: 82625 - DNA, 25 bp, Probe sequence
aatcataacatacggtgcaatggtt

SEQ ID NO: 82626 - DNA, 25 bp, Probe sequence
tgacatttcaaatcaatcacatcgg

SEQ ID NO: 82627 - DNA, 25 bp, Probe sequence
gcaaatggttcaagaaatcaaatga

SEQ ID NO: 82628 - DNA, 25 bp, Probe sequence
tcaatcataacatacggtgcaatgg

SEQ ID NO: 82629 - DNA, 25 bp, Probe sequence
atcataacatacggtgcaatggttc

SEQ ID NO: 82630 - DNA, 25 bp, Probe sequence
acgaatatagcaaagacctttcaag

SEQ ID NO: 82631 - DNA, 25 bp, Probe sequence
cgaatatagcaaagacctttcaaga

SEQ ID NO: 82632 - DNA, 25 bp, Probe sequence
aacgaatatagcaaagacctttcaa

SEQ ID NO: 82633 - DNA, 25 bp, Probe sequence
agcaaagacctttcaagagaattaa

SEQ ID NO: 82634 - DNA, 25 bp, Probe sequence
atagcaaagacctttcaagagaatt

SEQ ID NO: 82635 - DNA, 25 bp, Probe sequence
tctatggagacatgaaaggaaatga

SEQ ID NO: 82636 - DNA, 25 bp, Probe sequence
tggagacatgaaaggaaatgaattt

SEQ ID NO: 82637 - DNA, 25 bp, Probe sequence
atggagacatgaaaggaaatgaatt

SEQ ID NO: 82638 - DNA, 25 bp, Probe sequence
taacgaatatagcaaagacctttca

SEQ ID NO: 82639 - DNA, 25 bp, Probe sequence
agtcataatttcaatggaggaacga

SEQ ID NO: 82640 - DNA, 25 bp, Probe sequence
gtcataatttcaatggaggaacgat

SEQ ID NO: 82641 - DNA, 25 bp, Probe sequence
tagtcataatttcaatggaggaacg

SEQ ID NO: 82642 - DNA, 25 bp, Probe sequence
tcataatttcaatggaggaacgatt

SEQ ID NO: 82643 - DNA, 25 bp, Probe sequence
tggctttagtcataatttcaatgga

SEQ ID NO: 82644 - DNA, 25 bp, Probe sequence
gctttagtcataatttcaatggagg

SEQ ID NO: 82645 - DNA, 25 bp, Probe sequence
ggctttagtcataatttcaatggag

SEQ ID NO: 82646 - DNA, 25 bp, Probe sequence
ttggctttagtcataatttcaatgg

SEQ ID NO: 82647 - DNA, 25 bp, Probe sequence
ttagtcataatttcaatggaggaac

SEQ ID NO: 82648 - DNA, 25 bp, Probe sequence
agtcaagtagagcaaggtgttaata

SEQ ID NO: 82649 - DNA, 25 bp, Probe sequence
tagtcaagtagagcaaggtgttaat

SEQ ID NO: 82650 - DNA, 25 bp, Probe sequence
gttggttctatcttaacactgcttg

SEQ ID NO: 82651 - DNA, 25 bp, Probe sequence
ctagtcaagtagagcaaggtgttaa

SEQ ID NO: 82652 - DNA, 25 bp, Probe sequence
gtcaagtagagcaaggtgttaatat

SEQ ID NO: 82653 - DNA, 25 bp, Probe sequence
aggacaatgtggttgacaatactaa

SEQ ID NO: 82654 - DNA, 25 bp, Probe sequence
ttggttctatcttaacactgcttgc

SEQ ID NO: 82655 - DNA, 25 bp, Probe sequence
aggaatatggtactgatgaagactt

SEQ ID NO: 82656 - DNA, 25 bp, Probe sequence
aaggaatatggtactgatgaagact

SEQ ID NO: 82657 - DNA, 25 bp, Probe sequence
tgtaagcaagatggttatgtatgga

SEQ ID NO: 82658 - DNA, 25 bp, Probe sequence
aacaagcagagtcctacattaagag

SEQ ID NO: 82659 - DNA, 25 bp, Probe sequence
caagcagagtcctacattaagagta

SEQ ID NO: 82660 - DNA, 25 bp, Probe sequence
gaacacacgattacacaggaattac

SEQ ID NO: 82661 - DNA, 25 bp, Probe sequence
agaacacacgattacacaggaatta

SEQ ID NO: 82662 - DNA, 25 bp, Probe sequence
cacgattacacaggaattacacatt

SEQ ID NO: 82663 - DNA, 25 bp, Probe sequence
tggagaccttcaatatgttacagtt

SEQ ID NO: 82664 - DNA, 25 bp, Probe sequence
acacgattacacaggaattacacat

SEQ ID NO: 82665 - DNA, 25 bp, Probe sequence
atggagaccttcaatatgttacagt

SEQ ID NO: 82666 - DNA, 25 bp, Probe sequence
ttaacggttatcacgattctgtagt

SEQ ID NO: 82667 - DNA, 25 bp, Probe sequence
taataataagaagatgagtgccagc

SEQ ID NO: 82668 - DNA, 25 bp, Probe sequence
gctaataataagaagatgagtgcca

SEQ ID NO: 82669 - DNA, 25 bp, Probe sequence
tggtgtaagttggtataatgctagt

SEQ ID NO: 82670 - DNA, 25 bp, Probe sequence
aacaagaacggcattaagtgataat

SEQ ID NO: 82671 - DNA, 25 bp, Probe sequence
attatcgttgacaataaggcttgga

SEQ ID NO: 82672 - DNA, 25 bp, Probe sequence
ggtgtaagttggtataatgctagtg

SEQ ID NO: 82673 - DNA, 25 bp, Probe sequence
acaagaacggcattaagtgataatt

SEQ ID NO: 82674 - DNA, 25 bp, Probe sequence
tattatcgttgacaataaggcttgg

SEQ ID NO: 82675 - DNA, 25 bp, Probe sequence
tctaaggtatcattacacataggcg

SEQ ID NO: 82676 - DNA, 25 bp, Probe sequence
ttctaaggtatcattacacataggc

SEQ ID NO: 82677 - DNA, 25 bp, Probe sequence
ctttagtttgggtttggtcacttta

SEQ ID NO: 82678 - DNA, 25 bp, Probe sequence
tttagtttgggtttggtcactttaa

SEQ ID NO: 82679 - DNA, 25 bp, Probe sequence
cttgtctcctttagtttgggtttgg

SEQ ID NO: 82680 - DNA, 25 bp, Probe sequence
acttgtctcctttagtttgggtttg

SEQ ID NO: 82681 - DNA, 25 bp, Probe sequence
cacttgtctcctttagtttgggttt

SEQ ID NO: 82682 - DNA, 25 bp, Probe sequence
atacgttagtacagcattaaccact

SEQ ID NO: 82683 - DNA, 25 bp, Probe sequence
tacgttagtacagcattaaccactg

SEQ ID NO: 82684 - DNA, 25 bp, Probe sequence
attgaacgaactaactctggtctta

SEQ ID NO: 82685 - DNA, 25 bp, Probe sequence
tattgaacgaactaactctggtctt

SEQ ID NO: 82686 - DNA, 25 bp, Probe sequence
ttattgaacgaactaactctggtct

SEQ ID NO: 82687 - DNA, 25 bp, Probe sequence
ttgaacgaactaactctggtcttaa

SEQ ID NO: 82688 - DNA, 25 bp, Probe sequence
attattgaacgaactaactctggtc

SEQ ID NO: 82689 - DNA, 25 bp, Probe sequence
tattattgaacgaactaactctggt

SEQ ID NO: 82690 - DNA, 25 bp, Probe sequence
tggaacgggatattattattgaacg

SEQ ID NO: 82691 - DNA, 25 bp, Probe sequence
ctactacgtgaaggagattctgttg

SEQ ID NO: 82692 - DNA, 25 bp, Probe sequence
gcagaactggaacgggatattatta

SEQ ID NO: 82693 - DNA, 25 bp, Probe sequence
atggttcttcttcacaagcaagtat

SEQ ID NO: 82694 - DNA, 25 bp, Probe sequence
tggttcttcttcacaagcaagtatt

SEQ ID NO: 82695 - DNA, 25 bp, Probe sequence
aatggttcttcttcacaagcaagta

SEQ ID NO: 82696 - DNA, 25 bp, Probe sequence
gaagaattaacaacaacgattgctg

SEQ ID NO: 82697 - DNA, 25 bp, Probe sequence
agaagaattaacaacaacgattgct

SEQ ID NO: 82698 - DNA, 25 bp, Probe sequence
gctcctcgtgaagaattaagtcaat

SEQ ID NO: 82699 - DNA, 25 bp, Probe sequence
aagaattaacaacaacgattgctgc

SEQ ID NO: 82700 - DNA, 25 bp, Probe sequence
tagaagaattaacaacaacgattgc

SEQ ID NO: 82701 - DNA, 25 bp, Probe sequence
cttagtagcagaagtgttagaatca

SEQ ID NO: 82702 - DNA, 25 bp, Probe sequence
atatagtcagcttacaacaatgtgc

SEQ ID NO: 82703 - DNA, 25 bp, Probe sequence
tatagtcagcttacaacaatgtgcc

SEQ ID NO: 82704 - DNA, 25 bp, Probe sequence
ccaacacagaagctgacatatagtc

SEQ ID NO: 82705 - DNA, 25 bp, Probe sequence
catatagtcagcttacaacaatgtg

SEQ ID NO: 82706 - DNA, 25 bp, Probe sequence
gacatatagtcagcttacaacaatg

SEQ ID NO: 82707 - DNA, 25 bp, Probe sequence
acatatagtcagcttacaacaatgt

SEQ ID NO: 82708 - DNA, 25 bp, Probe sequence
atagtcagcttacaacaatgtgccg

SEQ ID NO: 82709 - DNA, 25 bp, Probe sequence
cccaacacagaagctgacatatagt

SEQ ID NO: 82710 - DNA, 25 bp, Probe sequence
caacacagaagctgacatatagtca

SEQ ID NO: 82711 - DNA, 25 bp, Probe sequence
ttatgctattacctggttgattgga

SEQ ID NO: 82712 - DNA, 25 bp, Probe sequence
tatgctattacctggttgattggac

SEQ ID NO: 82713 - DNA, 25 bp, Probe sequence
ctattacctggttgattggactgtt

SEQ ID NO: 82714 - DNA, 25 bp, Probe sequence
atgctattacctggttgattggact

SEQ ID NO: 82715 - DNA, 25 bp, Probe sequence
gctattacctggttgattggactgt

SEQ ID NO: 82716 - DNA, 25 bp, Probe sequence
tgctattacctggttgattggactg

SEQ ID NO: 82717 - DNA, 25 bp, Probe sequence
ctggttgattggactgtttgtatta

SEQ ID NO: 82718 - DNA, 25 bp, Probe sequence
tattacctggttgattggactgttt

SEQ ID NO: 82719 - DNA, 25 bp, Probe sequence
tggttgattggactgtttgtattaa

SEQ ID NO: 82720 - DNA, 25 bp, Probe sequence
gagacgattccttcagatattacgg

SEQ ID NO: 82721 - DNA, 25 bp, Probe sequence
ctcagatagcgattcagattcagaa

SEQ ID NO: 82722 - DNA, 25 bp, Probe sequence
gatagcgattcagactcagatagtg

SEQ ID NO: 82723 - DNA, 25 bp, Probe sequence
agatagcgattcagactcagatagt

SEQ ID NO: 82724 - DNA, 25 bp, Probe sequence
tagcgattcagactcagatagtgat

SEQ ID NO: 82725 - DNA, 25 bp, Probe sequence
atagcgattcagactcagatagtga

SEQ ID NO: 82726 - DNA, 25 bp, Probe sequence
aagaagatacatcagacagcgactc

SEQ ID NO: 82727 - DNA, 25 bp, Probe sequence
gaagaagatacatcagacagcgact

SEQ ID NO: 82728 - DNA, 25 bp, Probe sequence
cgattccttcagatattacggatga

SEQ ID NO: 82729 - DNA, 25 bp, Probe sequence
cggtatggaaggtatgttagttgat

SEQ ID NO: 82730 - DNA, 25 bp, Probe sequence
tacggtatggaaggtatgttagttg

SEQ ID NO: 82731 - DNA, 25 bp, Probe sequence
agtgtaattggttgtcgtgatgata

SEQ ID NO: 82732 - DNA, 25 bp, Probe sequence
atacacttattccgccgttcatatc

SEQ ID NO: 82733 - DNA, 25 bp, Probe sequence
gatacacttattccgccgttcatat

SEQ ID NO: 82734 - DNA, 25 bp, Probe sequence
gtgtaattggttgtcgtgatgatat

SEQ ID NO: 82735 - DNA, 25 bp, Probe sequence
acggtatggaaggtatgttagttga

SEQ ID NO: 82736 - DNA, 25 bp, Probe sequence
atcattgaaggcgatacacttattc

SEQ ID NO: 82737 - DNA, 25 bp, Probe sequence
tagcgacaatgactgagattactga

SEQ ID NO: 82738 - DNA, 1049 bp, Control sequence
atggctcaccgcccacgctggacattgtcgcaagtcacagaattatttgaaaaaccgttgctggatctgctgtttgaagcgcagcaggtgcatcgccagcatttcgatcctcgtcaggtgcaggtcagcacgttgctgtcgattaagaccggagcttgtccggaagattgcaaatactgcccgcaaacgtcgcgctacaaaaccgggctggaagccgagcggttgatggaagttgaacaggtgctggagtcggcgcgcaaagcgaaagcggcaggatcgacgcgcttctgtatgggcgcggcgtggaagaatccccacgaacgcgatatgccgtacctggaacaaatggtgcagggggtaaaagcgatggggctggaggcgtgtatgacgctgggcacgttgagtgaatctcaggcgcagcgcctcgcgaacgccgggctggattactacaaccacaacctggacacctcgccggagttttacggcaatatcatcaccacacgcacttatcaggaacgcctcgatacgctggaaaaagtgcgcgatgccgggatcaaagtctgttctggcggcattgtgggcttaggcgaaacggtaaaagatcgcgccggattattgctgcaactggcaaacctgccgacgccgccggaaagcgtgccaatcaacatgctggtgaaggtgaaaggcacgccgcttgccgataacgatgatgtcgatgcctttgattttattcgcaccattgcggtcgcgcggatcatgatgccaacctcttacgtgcgcctttctgccggacgcgagcagatgaacgaacagactcaggcgatgtgctttatggcaggcgcaaactcgattttctacggttgcaaactgctgaccacgccgaatccggaagaagataaagacctgcaactgttccgcaaactggggctaaatccgcagcaaactgccgtgctggcaggggataacgaacaacagcaacgtcttgaacaggcgctgatgaccccggacaccgacgaatattacaacgcggcagcattatgagctggcag

SEQ ID NO: 82739 - DNA, 1049 bp, Control sequence; identical to SEQ ID NO: 82738

SEQ ID NO: 82740 - DNA, 1049 bp, Control sequence; identical to SEQ ID NO: 82738

SEQ ID NO: 82741 - DNA, 748 bp, Control sequence
atggcaacggttaataaacaagccattgcagcggcatttggtcgggcagccgcacactatgagcaacatgcagatctacagcgccagagtgctgacgccttactggcaatgcttccacagcgtaaatacacccacgtactggacgcgggttgtggacctggctggatgagccgccactggcgggaacgtcacgcgcaggtgacggccttagatctctcgccgccaatgcttgttcaggcacgccagaaggatgccgcagaccattatctggcgggagatatcgaatccctgccgttagcgactgcgacgttcgatcttgcatggagcaatctcgcagtgcagtggtgcggtaatttatccacggcactccgcgagctgtatcgggtggtgcgccccaaaggcgtggtcgcgtttaccacgctggtgcagggatcgttacccgaacgtcatcaggcgtggcaggcggtggacgagcgtccgcatgctaatcgctttttaccgccagatgaaatcgaacagtcgctgaacggcgtgcattatcaacatcatattcagcccatcacgctgtggtttgatgatgcgctcagtgccatgcgttcgctgaaaggcatcggtgccacgcatcttcatgaagggcgcgacccgcgaatattaacgcgttcgcagttgcagcgattgcaactggcctggccgcaacagcaggggcgatatcctctgacgtatcatctttttttgggagtgattgctc

SEQ ID NO: 82742 - DNA, 748 bp, Control sequence; identical to SEQ ID NO: 82741

SEQ ID NO: 82743 - DNA, 652 bp, Control sequence
aaacgttattttgtcaccggaacggataccgaagtggggaaaactgtcgccagttgtgcacttttacaagccgcaaaggcagcaggctaccggacggcaggttataaaccggtcgcctctggcagcgaaaagaccccggaaggtttacgcaatagcgacgcgctggcgttacagcgcaacagcagcctgcagctggattacgcaacagtaaatccttacaccttcgcagaacccacttcgccgcacatcatcagcgcgcaagagggcagaccgatagaatcattggtaatgagcgccggattacgcgcgcttgaacaacaggctgactgggtgttagtggaaggtgctggcggctggtttacgccgctttctgacactttcacttttgcagattgggtaacacaggaacaactgccggtgatactggtagttggtgtgaaactcggctgtattaatcacgcgatgttgactgcacaggtaatacaacacgccggactgactctggcgggttgggtggcgaacgatgttacgcctccgggaaaacgtcacgctgaatatatgaccacgctcacccgcatgattcccgcgccgctgctgggagagatcccctggcttgcagaaaatccagaaaatgcggcaaccggaaagtaca

SEQ ID NO: 82744 - DNA, 652 bp, Control sequence; identical to SEQ ID NO: 82743

SEQ ID NO: 82745 - DNA, 1032 bp, Control sequence
atgtccaatttactgaccgtacaccaaaatttgcctgcattaccggtcgatgcaacgagtgatgaggttcgcaagaacctgatggacatgttcagggatcgccaggcgttttctgagcatacctggaaaatgcttctgtccgtttgccggtcgtgggcggcatggtgcaagttgaataaccggaaatggtttcccgcagaacctgaagatgttcgcgattatcttctatatcttcaggcgcgcggtctggcagtaaaaactatccagcaacatttgggccagctaaacatgcttcatcgtcggtccgggctgccacgaccaagtgacagcaatgctgtttcactggttatgcggcggatccgaaaagaaaacgttgatgccggtgaacgtgcaaaacaggctctagcgttcgaacgcactgatttcgaccaggttcgttcactcatggaaaatagcgatcgctgccaggatatacgtaatctggcatttctggggattgcttataacaccctgttacgtatagccgaaattgccaggatcagggttaaagatatctcacgtactgacggtgggagaatgttaatccatattggcagaacgaaaacgctggttagcaccgcaggtgtagagaaggcacttagcctgggggtaactaaactggtcgagcgatggatttccgtctctggtgtagctgatgatccgaataactacctgttttgccgggtcagaaaaaatggtgttgccgcgccatctgccaccagccagctatcaactcgcgccctggaagggatttttgaagcaactcatcgattgatttacggcgctaaggatgactctggtcagagatacctggcctggtctggacacagtgcccgtgtcggagccgcgcgagatatggcccgcgctggagtttcaataccggagatcatgcaagctggtggctggaccaatgtaaatattgtcatgaactatatccgtaacctggatagtgaaacaggggcaatggtgcgcctgctggaagatggcgattag

SEQ ID NO: 82746 - DNA, 1032 bp, Control sequence; identical to SEQ ID NO: 82745

SEQ ID NO: 82747 - DNA, 6540 bp, Control sequence
gggactaccctaaataaggatgaggggcggcggtcagccgccttttttctattacatgtcagcgcggaagcggatttttattttcatcaagcgtaaatccttctccgagcacatcgtgaacatcgcttaccgctacaaaggcatggggatcaatggagttaatcacgcttttcagcatcaccaattcatttttcggcaccacacaataaagtacatctatatcctcttttgtgtaggaaccttgtcctttcaaaatggtgacgccccgttccatttcttcaagaatctttttctgaatcaggtcgtttttcgaagagatgatcgtagcgcctttagcagcgtatccgccttcctgaataaaatcgattaatcttgccgctacaaatacagctaccagcgtatacatcgcttctttataggagagataagtaagcaaagacaaaatgatgacgcaggcatcgaaagcaaacatcgttctgcccatcggaatcccaaaatacttattcactaaacgtgcgatgatatcaacaccgcctgtcgtaccgccgaacttaaaaataatacccagtccggctccgatgaatacgccggcaaataaagcggcgagcgctaagtcgtgctgaaggggcatatggatttcatatcgctgaaagatgctgaggaacaaagacaaggctacagtgccgacaagggtataaacaaacattgtcctgccgagcatgtggaaaagggcataaagcaaaagtgtaatacctgtaaaaccgccctcagccagattgttctgcatattgaaatgaaccaagccaaatgaaaaaattgccgctccgattaaaataaaaaatatgttttttaatctaatttctccaagcatcacacaaaaccccttttccttccattagatagcgtttatattatagtggatgaaaaagaaaacagcaaacgtgcttaaacatttgtcaaacgtatctgaattagctaacatgtaagaggatgataggaggtttcgttcagtgagtgataaaacaatgaaagacatacaggctgaagtagaccgttacataggccaatttaaagaaggatattttagcccgctggccatgatggcgaggctgactgaagaactgggcgagcttgccagagaagtgaatcaccgttatggagaaaaaccaaaaaaagcgactgaagatgataaaagcatggaagaggaaataggcgatgtgctatttgtattggtttgtttagccaactctcttgatatctctttagaggaagctcacgaccgagtcatgcataaatttaatacaagagataaagatcgctggaccagaaaagaagaaggaaagtagaggagatcaagatgtcaaacgaaacaattaaattagtcattgcgggaccgcgtggaagaatggggcaggaagctgttaaattggcagaacgaacaccacattttgaccttgtaggggccatagaccatacatacgatcagcaaaaattatctgatgtgatgcctgttgagtcagatgctttcatttacacagatatccatgcctgttttacagaaacacaaccggatgtcttgattgatttaacaacgcccgaaatcggaaaagtacatacaaaaattgcattagagcacggagtccgtccagttgtcggaacaaccggtttctcagaagctgatttaaaagagctcacatctttaacagaagaaaaagggatcggagccatcatcgcgccaaattttgcgctcggtgcgatactgatgatgaaattttcaaaaatggctgccaactattttgaggatgttgagattattgagcttcatcatgaccagaagcttgacgcaccaagcggaactgcgcttaaaacagcggaaatgatttcagaagtccgtaaagaaaagcagcaaggacatccggatgaaaaagaaattctcccaggagcaagaggagcggagcaaaacggtattcgcttgcacaggcttcagatacgccatgattcttataaccgtgcttctttcatgtcaggcgttaaactgtcagtcgaacaagtcatgaagattgatcagcttgtgtatggtttagaaaatatcattgattagacggggggataaacaatgaaaattgctttgatcgcgcatgacaagaaaaaacaggatatggttcaatttacgactgcctatcgggatattttaaagaatcatgatctatacgcaaccggaaccacagggttgaaaattcatgaggcgacaggtcttcaaattgaacgttttcaatccggccctttagggggagaccagcaaatcggtgcactgatcgctgccaatgcactcgatcttgtcatttttttgcgcgacccgctgaccgcgcagccgcatgaaccggatgtctcggcattaatccgtttatgtgatgtgtattccattccgctcgccacaaatatgggtactgcggaaattcttgtgcgcacacttgatgaaggtgttttcgaattccgtgaccttcttcggggagaagagccgaatgtataatgctgacgttcttgcttttggcgcccacagtgatgatgtcgagatcggaatgggcggcacaatagcgaagtttgtcaaacaggaaaaaaaagtaatgatatgcgatttgacagaagcggaactctcttctaacggtacggtcagtttgcgtaaagaagaagcagctgaagcagcccgcatattaggcgcagataaaagaattcagctaacgcttccagaccgcggcctaataatgagtgatcaggcaattcggtcaattgtcactgtcatcagaatctgtcggccaaaagcggtttttatgccgtataaaaaggatcgccatccggatcacggcaatgcggctgcactggtggaagaagcgatcttttccgccggaatccataaatataaagacgaaaaaagccttccggcgcataaagtcagcaaggtttactattatatgataaatggttttcatcagccggattttgttattgatatctcggatacaatagaggcaaagaaacaaagcctcaacgcctacaaaagccagtttatcccgtcaaaggattccgtttctactcctctgacgaatgggtatattgaaatcgttgaagcgagagaaaagctttacggtaaagaagcgggcgtggagtatgccgaagtttcttttccaaacggatgctgatgcttgatcatgatgtgcttgggggcgaacaatgagaaaactagggaagcagcttgctgaaaagggacatgaaatccatttcatcacatcaagcattccgtttagactgaatacatatcatcccaatattcattttcatgaagttgaggttaatcaatatgctgtttttaagtatcctccgtatgatttgacattggcaagcaaaatcgctgaggtggcggaacgggagaatttagacattatccatgctcactatgctctcccgcatgccgtttgcgcctatcttgcaaaacaaatgctgaaacgcaatatcggcattgttaccactttgcatggcacggatatcacggtgttaggttatgatccgtctctaaaagatctgatccgttttgctattgagtcatcagacagggtgacggccgtctcctcagcgcttgcggctgaaacatacgatttaattaaaccggagaaaaaaattgaaacgatttataactttatagacgagcgcgtgtatctgaagaaaaacacagcggcaattaaagagaaacatggaattttaccagatgaaaaagtcgtcatccatgtgtccaacttcagaaaagttaaacgcgtgcaggatgtcatccgtgtgttccgcaatatcgctggcaaaacgaaagcgaagctgcttttagtcggagacggtccggagaaatcgacagcctgcgagcttatcagaaaatatggcttggaagaccaagtcttaatgcttggaaatcaagaccgtgttgaagatctttattctattagcgatttgaagctgctgctatctgaaaaagaaagctttggccttgtcctgcttgaagcgatggcttgcggagtgccttgtattggaacaaacattggcggtatccctgaggttataaaaaacaatgtgagcggatttttggtggatgtcggtgatgttacggccgcaacagcccgcgcgatgagcattttagaagatgaacagctaagcaatcgttttacaaaggcggcaatagagatgcttgaaaatgaattttcttctaaaaaaattgtcagccagtatgaacagatttatgccgatttagcagaaccggagtgatcacatggaaaaagtttttatcaaagcacttcccgtgctccgcatcttaatcgaagcgggccatcaggcttattttgtcgggggcgcagttcgtgacagctatatgaaacgaacgatcggagatgtcgatatcgcgacagatgcggcacctgatcaagtagaacggctgtttcagcggactgttgatgtaggcaaagatgaatctgattatgttgatttcagaagaccgtcagaagtgcaatttatctcatcattagaagaggatctaaaacgcagagatttaacgatcaatgcgatggccatgacagcggacgggaaggtgcttgattattttggcggcaagaaagatattgatcagaaagtgattcgaaccgttggaaagcctgaggatagatttcaagaggatgcgcttcgtatgctgagagccgtacgctttatgagccagcttggctttacgctttcaccggaaacagaagaagccattgcgaaagaaaaatcactcctctcccatgtttcagtcgaacgaaaaactatagagtttgagaaattgctgcagggaagagcttctcgccaggcgcttcaaacactcattcaaacgagattgtatgaagagcttcctggtttttatcataaacgagaaaacctgatttcaacgagtgagtttccattcttctctttaacatcccgtgaggagctttgggctgctcttttaattaaccttggcatagttttgaaagacgcgccccttttcctgaaagcctggaagctcccgggaaaagtgatcaaggaagccattcacattgccgatacgtttggccagagccttgacgcaatgacaatgtacagagctgggaaaaaagcactgctctcagcggccaaaatatcgcagcttcggcaaaacgaaaaactggatgaaaagaaactgaaggacattcagtacgcttatcaaaacctgccgatcaaaagccttaaggatcttgatatcacgggtaaggacttgcttgcgcttcgaaaccggccggccggaaaatgggtgtcagaagaattacagtggatcgagcaggctgttgtgacagggaagctctccaatcaaaagaaacacatagaggagtggctgaagacatgcggtcaacattaagaaaagaccttattgaattattttctcaggccggcaatgaatttatttccggccaaaaaatcagtgatgctctcggctgttcaagaactgctgtgtggaagcatattgaagagcttcggaaagagggttatgaagtagaagccgttagaagaaaaggatatcggctcatcaaaaaacccggaaaactcagtgaaagcgaaattcgttttggattaaaaacggaagtgatgggccagcatcttatttaccatgacgttctttcaagcacgcaaaaaacggctcatgagctcgcgaataataacgcaccggaaggcacccttgaaggaaacggtgtttggatgagcctgattttgcggcctgacattccgctccaaaaaacaccgcagctgactctgcttgctgcagtagctgttgtgcagggaatagaagaggcagcaggcatccaaacggatattaaatggccaaatgatattttgattaacggaaaaaaaacagtcggtatcctaacggaaatgcaggctgaagaagaccgcgtacgttcagtgatcattgggatcggcattaacgttaaccagcagcctaatgattttccagatgaattgaaggacatcgcgacaagcctcagccaagctgctggggaaaaaattgatcgggccggcgtcatccagcatattttactatgctttgagaaacggtaccgggattatatgacgcacggatttacgccgattaagcttttatgggaaagctatgcgctcggtattggcactaatatgagagccagaacgttaaacggaaccttttacggtaaggcgttaggtatagatgatgaaggcgttctgcttttagaaacgaacgaaggcattaaaaaaatctattctgccgatatcgaattgggctaatgtgttggtacaagcccgttgattttggtatacttccattgggcagtatcgcctgcgaactgcacctattattaaaatagatagacattgcagcagtctgccttgatccaaaaaaggactgggacagagggatgaaactcgccgaactttagaaagtgaagaatccttctcgttgtaacggaaggttttttggcttgc

SEQ ID NO: 82748 - DNA, 6540 bp, Control sequence; identical to SEQ ID NO: 82747

SEQ ID NO: 82749 - DNA, 6540 bp, Control sequence; identical to SEQ ID NO: 82747

SEQ ID NO: 82750 - DNA, 1612 bp, Control sequence
aagcttggcaacaaatgagccgtcttgtcctcatgatactcgttgctttatttcatataaaagggctcgtcatcggatttacagtgctaattatgccatggcaagcatcaaatcccttcagacaccgtacttatggccgctgattccctttaacggaaaggcgctgtggcaggtgcttgtcccgacagcgaaacctggcgcaaaagtaagacccagcatcgttcaccccaaaaatcgcttaaggcagcctaccaattcataatcgcattgaaactgactgaagagtatgataatgtatgtcttaattatgaagggacagtccataaaactgtcctttcatccataagcggagaaagagggaatgacattgttcttacacggcacaagcagacaaaatcaacatggtcatttagaaatcggaggtgtggatgctctctatttagcggagaaatatggtacacctctttacgtatatgatgtggctttaatacgtgagcgtgctaaaagctttaagcaggcgtttatttctgcagggctgaaagcacaggtggcatatgcgagcaaagcattctcatcagtcgcaatgattcagctcgctgaggaagagggactttctttagatgtcgtatccggaggagagctatatacggctgttgcagcaggctttccggcagaacgcatccactttcatggaaacaataagagcagggaagaactgcggatggcgcttgagcaccgcatcggctgcattgtggtggataatttctatgaaatcgcgcttcttgaagacctatgtaaagaaacgggtcactccatcgatgttcttcttcggatcacgcccggagtagaagcgcatacgcatgactacattacaacgggccaggaagattcaaagtttggtttcgatcttcataacggacaaactgaacgggccattgaacaagtattacaatcggaacacattcagctgctgggtgtccattgccatatcggctcgcaaatctttgatacggccggttttgtgttagcagcggaaaaaatcttcaaaaaactagacgaatggagagattcatattcatttgtatccaaggtgctgaatcttggaggaggtttcggtattcgttatacggaagatgatgaaccgcttcatgccactgaatacgttgaaaaaattatcgaagctgtgaaagaaaatgcttcccgttacggttttgacattccggaaatttggatcgaaccgggccgttctctcgtgggagacgcaggcacaactctttatacggttggctctcaaaaagaagtggataagctgtacaatcgtttcatcattcggcgtgcgaattaagaaaggtctcattgcgcctgtaaagcttacgcgtatttctgctccttcaagcacctttagtgcatccagcatatattttggactaaaagagatatttaattcctcaccttcaatttgatccgcaacaattgcttccacaactttaccgatttctggcgaattggaagaaatttcaatggattcagccggttttgcggacagttttacaacgttgttgcgtccctctctagctaaaagagatgcacgatcaatggcctgaaggaattc

SEQ ID NO: 82751 - DNA, 1612 bp, Control sequence; identical to SEQ ID NO: 82750

SEQ ID NO: 82752 - DNA, 1612 bp, Control sequence; identical to SEQ ID NO: 82750

SEQ ID NO: 82753 - DNA, 3360 bp, Control sequence
  misc_feature (2982)..(2982): n is a, c, g, or t
ataatacacacttatacagactcctaaataagaaattaaatgattgggagtgcgaaaatgaaggatgtttcaaaaaatcaagaagaaaatataagcgacacggcattaacaaacgaactgattcatctgcttggccattcccggcatgattggatgaataagctgcagctgattaaaggaaacttaagcttacagaagtatgaccgtgtctttgaaatgattgaagaaatggttatagacgcaaagcacgaatcaaagctctcaaacctgaaaacaccgcatttggcgtttgattttcttacgtttaattggaaaacccattatatgacgcttgaatatgaagttctcggagaaattaaggatttgtcggcttatgatcaaaagctggcgaaactgatgagaaagctgtttcatctgtttgatcaagcagtcagcagagagagtgaaaatcatttaacggtttcgcttcaaacggatcatcctgacagacagctgattctgtaccttgattttcacggcgcctttgccgatccatctgcttttgatgatattcggcagaatggatatgaggacgttgatatcatgcgttttgaaatcacgagtcacgaatgtctgattgaaattgggttggactagcggagtttttaacggtttagaacggaggacattatgtttgtagatcaggtcaaagtatatgtaaaaggcggcgacggcggcaacggtatggttgcgtttcgccgtgaaaaatatgtgccgaaaggcggccctgccggcggtgacggaggaaagggaggagacgtcgtttttgaagtagatgaaggtctccgcaccctgatggattttagatacaaaaaacactttaaagcgattcgcggcgagcatggcatgtccaaaaaccagcacgggcgaaatgctgatgatatggtcattaaagttccgccgggcaccgttgtgacagacgatgatacaaaacaggtcatcgctgatttaacagagcacggacagcgggctgtcattgcaagaggcggaagaggcggaagaggaaatagccgctttgctacaccggctaatcccgcgcctcagctttcagaaaacggcgagccgggaaaagaacgctacattgttcttgaattaaaagtgcttgcagatgtcggacttgtcgggttcccgagtgtgggaaaatctactttgctgtctgttgtctcatctgcaaaaccgaaaattgcggactatcactttacaacgcttgtcccgaatctcggcatggttgaaacggatgacggacgcagctttgtcatggctgatttgccagggctgattgaaggcgcacaccaaggcgtcggactgggccaccagtttttgcgccatattgaacggacgagggttattgttcatgtcattgacatgtcaggcttagaaggccgtgatccatatgatgattatcttacgattaaccaggagctgagcgagtacaatctgcgtctcactgagcgtccgcaaattatcgttgcaaataaaatggacatgccggaggctgcggaaaatctcgaagcctttaaagaaaagctgacggatgattatccggtattcccgatcagtgcggtgacaagagaaggtctgcgtgagcttctgtttgaggttgccaatcagcttgagaacacaccggaattcccgctgtatgacgaggaagagcttacacaaaaccgtgtcatgtacacgatggaaaatgaagaagtgccatttaacattacacgcgatccagacggtgtatttgtgctttcaggagacagccttgagcggttattcaagatgactgatttctcacgtgatgaatcggttaaacggtttgcaagacagatgcgcggaatgggtgttgatgaagcactcagagaacgcggagccaaggatggagatataatcaggcttctggaatttgaatttgaatttattgattaatcaatgttggctgaaaagagagcctggtgccaggctctctattttaaaggggggatgcaaatgaaagaggagacattttatcttgtccgtgaagatgtattgcccgatgcaatgagaaaaacattagaagtcaaaaagctgcttgatcgacaaaaagcagattcagtagcagatgccgttcaaaaggtcgatttaagtagaagtgcgttttataaatacagggatgctgtttttccattctacaccatggtaaaagaacaaattatcacacttttctttcatttggaggataggtcaggtgcgttatctcagcttcttcaggcggtagctgattctggaagcaacgttctttccattcaccagaccattccgcttcaaggcagagcaaatgtgacactgtctatcagtacgtcggcaatggaagaagacattcatacattaatgaataagctcaggaagtttgattttgtagaaaaggttgaaatattaggttcaggtgcataagggagagaaaatcgtcatgaaagtcggttatttaggtccagcagctacatttacacatctagcagtcagttcttgttttcaaaacggcgccgaacatgttgcttaccgcaccattccggagtgtatagatgcagccgttgcaggcgaagttgattttgcttttgttcctttggaaaatgctttagaaggatctgttaatctaacaatagactatttaatacatgaacagcctttgccaatcgtgggtgaaatgacgttgccgattcaccagcacttgctcgtccatccctcaagagagaatgcatggaaagagctcgacaaaatttactcacattcacacgcgattgcgcaatgccataaatttcttcatcgacattttccttccgttccatatgaatacgccaattctaccggggcggcagcaaagtttgtcagtgaccatcccgagctgaatatcggggtcattgccaatgatatggcagcttctacatacgaattaaaaatcgtgaaacgggatatacnggattatagggacaatcatacaagatttattatcctgtctcccgatgaaaacatatcttttgaagtgaattcaaaattgagctctaggcccaaaacgaccttaatggtcatgctgccgcaggatgatcagtccggggcgctgcatagagtgctgtctgcattttcttggagaaatttaaacctgtcaaaaattgagtcacgtccgactaaaaccggattaggccattatttctttattattgatattgagaaagcgtttgatgatgtattgattccaggggccatgcaggagcttgaagcactcggctgcaaagtgaggcttctgggtgcataccagtcttaccaattataaaaaaagcccactagagggcttttttt

SEQ ID NO: 82754 - DNA, 3360 bp, Control sequence; identical to SEQ ID NO: 82753
  misc_feature (2982)..(2982): n is a, c, g, or t

SEQ ID NO: 82755 - DNA, 3360 bp, Control sequence; identical to SEQ ID NO: 82753
  misc_feature (2982)..(2982): n is a, c, g, or t

SEQ ID NO: 82756 - DNA, 2403 bp, Control sequence
gaattcatgtaaaagatgaggttggttcattctcgaaaattacatctgtgttctcagagcggggcgtgacgtttgaaaaaatccttcagctgccaattaaaggccatgatgagttagctgaaatcgtaattgtcacacatcatacatcagaagctgatttcagtgatatcctgcaaaacctaaatgatttggaagtcgttcaagaagtcaaaagcacatatcgtgtagaagggaacggttggagctaatgtggaaaggacttatccatcaatataaagaatttttacctgtaacagatcaaacaccggcgctaactttacatgaaggaaacacacctcttattcacctgccgaagctgtctgagcagctcggaattgagcttcatgtcaaaacggaaggcgtcaatcctacgggatcatttaaagatcgcggaatggttatggctgtggcaaaggcaaaagaagaaggcaatgacacgattatgtgcgcgtcaacaggtaacacttccgctgctgcggcagcatatgcagcccgtgctaacatgaaatgcattgtcatcatcccgaacggaaaaattgcatttggaaaactcgctcaagctgtcatgtacggagccgagattatcgcaattgacggaaactttgacgatgcgcttaaaattgtccgttccatctgtgagaaatcaccgattgcccttgtcaactcagtcaacccttaccgcattgaaggccaaaaaactgctgccttcgaagtgtgcgaacagctgggggaagcgcctgatgttttagcgatcccggtcggaaatgctggaaacatcactgcgtactggaagggcttcaaggaatatcatgagaaaaacggcacaggccttccgaaaatgcgcggctttgaagctgagggtgcggcggcaatcgtgcgcaatgaagtgattgaaaatccggaaacaatagcgacagccattcgtatcggaaacccggcaagctgggacaaagctgtaaaggcagccgaggaatccaatgggaaaattgacgaagtcactgatgatgaaatccttcacgcatatcagctgatcgcccgtgtagaaggcgtgtttgcagaaccaggttcttgcgcgtctatcgcaggagtgctgaaacaggtgaaatccggagaaattccgaaaggcagcaaggtcgtagctgtgttaacaggaaacggactgaaagatccgaacacagcggtcgacatttcagaaatcaagcctgtcacattgccgactgatgaagacagcatccttgaatatgtaaaaggagcggcccgtgtatgaacgaagccgacatgctgttctctgtcactgttcccggaagcacagctaacctaggccccggctttgattcagtcggaatggcgctcagcagatatttgaagctgaccgtctttgaaagcgacaaatggtcttttgaggctgaaacagaaacagtcgccggaattccgggcggtacagataacctgatctaccaagtggctaaacggaccgcagatttgtacggaaaagaaatgcctcctgtccatgtgaaggtgtggagcgacatcccgcttgcacgcggccttggcagcagcgccgcagcgattgtagcggccattgaactggctgatgaattatgcggcttaaagctgtctgaagcggacaagctgcatttagcgagtctagaagaaggacacccggacaatgctggcgcttctctcgtcggcggacttgtgatcggcctgcatgaggatgacgagacccaaatgatccgcgtcccgaatgctgacattgacgtagtcgttgtcattcctttttatgaagtgctgacaagagacgcgagagacgtgcttccgaaggagtttccatatgccgatgccgtaaaagcaagtgctgtcagcaatatcctcattgctgcgatcatgtccaaggattggccgcttgtcgggaaaatcatgaagaaggatatgttccatcagccgtaccgggcgatgcttgtgcctgagctgtcaaaagtagagcacgtcgccgagatgaagggcgcatatggaacggctctcagcggagcaggcccaacgattctcgtcatgaccgaaaaaggaaagggagaagagctaaaagaacagctcgcgcttcatttccctcattgtgaagtagacgctttgaccgttccgaaagagggaagtataatagagcgaaatcctttatatcaagtaaaaagtgtatagatcatgccaagcgttcctcagcgtcagcggagggcgcctttttttgctggagataaaggagttttattagaaacgaatacatgtaaaggaggagatgaatatgaaaagctgataaccgcagacgacatcacagcgattgtctctgtgaccagtcctcaatacgccccagac

SEQ ID NO: 82757 - DNA, 2403 bp, Control sequence; identical to SEQ ID NO: 82756

SEQ ID NO: 82758 - DNA, 2403 bp, Control sequence; identical to SEQ ID NO: 82756

SEQ ID NO: 82759 - DNA, 2525 bp, Control sequence
ctcgagccaacaccgagagagacatacggcgggtgtattgcctacattgggtttgacgggaatatcgactcttgtattacgattcgcacgatgagtgtaaagaacggtgttgcatcgatacaggcaggtgctggcattgttgctgattctgttccggaagccgaatacgaagaaagctgtaataaagccggtgcgctgctgaaaacgattcatattgcagaagacatgtttcatagcaaggaggataaagctgatgaacagatttctacaattgtgcgttgacggaaaaacccttactgccggtgaggctgaaacgctgatgaatatgatgatggcagcggaaatgactccttctgaaatgggggggatattgtcaattcttgctcatcggggggagacgccagaagagcttgcgggttttgtgaaggcaatgcgggcacacgctcttacagtcgatggacttcctgatattgttgatacatgcggaacagggggagacggtatttccacttttaatatctcaacggcctcggcaattgttgcctcggcagctggtgcgaaaatcgctaagcatggcaatcgctctgtctcttctaaaagcggaagcgctgatgttttagaggagctagaggtttctattcaaaccactcccgaaaaggtcaaaagcagcattgaaacaaacaacatgggatttctttttgcgccgctttaccattcgtctatgaaacatgtagcaggtactagaaaagagctaggtttcagaacggtatttaatctgcttgggccgctcagcaatcctttacaggcgaagcgtcaggtgattggggtctattctgttgaaaaagctggactgatggcaagcgcactggagacgtttcagccgaagcacgtcatgtttgtatcaagccgtgacggtttagatgagctttcaattacagcaccgaccgacgtgattgaattaaaggacggagagcgccgggaatataccgtttcacccgaagatttcggtttcacaaatggcagacttgaagatttacaggtgcagtcaccgaaagagagcgcctatctcattcagaatatttttgaaaataaaagcagcagttccgctttatctattacggcttttaatgcgggagctgcgatttacacggcgggaattaccgcctcactgaaggaaggaacggagctggcgttagagacgattacaagcggaggcgctgccgcgcagcttgaacgactaaagcagaaagaggaagagatctatgcttgaaaaaatcatcaaacaaaagaaagaagaagtgaaaacactggttttgccggtagagcagcctttcgagaaacgttcatttaaggaggcgctggcaagcccgaatcggtttatcgggttgattgccgaagtgaagaaagcatcgccgtcaaaagggcttattaaagaggattttgtgcctgtgcagattgcaatagactatgaggctgcgaaggcagatgcgatttccgttttaacagacaccccgttttttcaaggggaaaacagttatttatcagacgtaaagcgtgctgtttcgattcctgtacttagaaaagattttattcttgattctcttcaagtagaggaatcaagaagaatcggagcggatgccatattgttaatcggcgaggtgcttgatcccttacaccttcatgaattatatcttgaagcaggtgaaaaggggatggacgtgttagtggaggttcatgatgcatcaacgctagaacaaatattgaaagtgttcacacccgacattctcggcgtaaataatcgaaacctaaaaacgtttgaaacatctgtaaagcagacagaacaaatcgcatctctcgttccgaaagaatccttgcttgtcagcgaaagcggaatcggttctttagaacatttaacatttgtcaatgaacatggggcgcgagctgtacttatcggtgaatcattgatgagacaaacttctcagcgtaaagcaatccatgctttgtttagggagtgaggttgtgaagaaaccggcattaaaatattgcggtattcggtcactaaaggatttgcagcttgcggcggaatcacaggctgattacctaggatttatttttgctaaaagcaaacgaaaagtatctccggaagatgtgaaaaaatggctgaaccaagttcgtgtcgaaaaacaggttgcaggtgtttttgttaatgaatcaatagagacgatgtcacgtattgccaagagcttgaagctcgacgtcattcagcttcacggtgatgaaaaaccggcggatgctgctgctcttcgcaagctgacaggctgtgaaatatggaaggcgcttcaccatcaagataacacaactcaagaaatagcccgctttaaagataatgttgacggctttgtgattgattcatctgtaaaagggtctagaggcggaactggtgttgcattttcttgggaatgtgtgccggaatatcagcaggcggctattggtaaacgctgttttatcgcaggcggcgtggatcc

SEQ ID NO: 82760 - DNA, 2525 bp, Control sequence; identical to SEQ ID NO: 82759

SEQ ID NO: 82761 - DNA, 2525 bp, Control sequence; identical to SEQ ID NO: 82759

SEQ ID NO: 82762 - DNA, 6540 bp, Control sequence; identical to SEQ ID NO: 82747

SEQ ID NO: 82763 - DNA, 6540 bp, Control sequence; identical to SEQ ID NO: 82747

SEQ ID NO: 82764 - DNA, 6540 bp, Control sequence; identical to SEQ ID NO: 82747

SEQ ID NO: 82765 - DNA, 1612 bp, Control sequence; identical to SEQ ID NO: 82750

SEQ ID NO: 82766 - DNA, 1612 bp, Control sequence; identical to SEQ ID NO: 82750

SEQ ID NO: 82767 - DNA, 1612 bp, Control sequence; identical to SEQ ID NO: 82750

SEQ ID NO: 82768 - DNA, 3360 bp, Control sequence; identical to SEQ ID NO: 82753
  misc_feature (2982)..(2982): n is a, c, g, or t

SEQ ID NO: 82769 - DNA, 3360 bp, Control sequence; identical to SEQ ID NO: 82753
  misc_feature (2982)..(2982): n is a, c, g, or t

SEQ ID NO: 82770 - DNA, 3360 bp, Control sequence; identical to SEQ ID NO: 82753
  misc_feature (2982)..(2982): n is a, c, g, or t

SEQ ID NO: 82771 - DNA, 2400 bp, Control sequence
gaattcatgtaaaagatgaggttggttcattctcgaaaattacatctgtgttctcagagcggggcgtgacgtttgaaaaaatccttcagctgccaattaaaggccatgatgagttagctgaaatcgtaattgtcacacatcatacatcagaagctgatttcagtgatatcctgcaaaacctaaatgatttggaagtcgttcaagaagtcaaaagcacatatcgtgtagaagggaacggttggagctaatgtggaaaggacttatccatcaatataaagaatttttacctgtaacagatcaaacaccggcgctaactttacatgaaggaaacacacctcttattcacctgccgaagctgtctgagcagctcggaattgagcttcatgtcaaaacggaaggcgtcaatcctacgggatcatttaaagatcgcggaatggttatggctgtggcaaaggcaaaagaagaaggcaatgacacgattatgtgcgcgtcaacaggtaacacttccgctgctgcggcagcatatgcagcccgtgctaacatgaaatgcattgtcatcatcccgaacggaaaaattgcatttggaaaactcgctcaagctgtcatgtacggagccgagattatcgcaattgacggaaactttgacgatgcgcttaaaattgtccgttccatctgtgagaaatcaccgattgcccttgtcaactcagtcaacccttaccgcattgaaggccaaaaaactgctgccttcgaagtgtgcgaacagctgggggaagcgcctgatgttttagcgatcccggtcggaaatgctggaaacatcactgcgtactggaagggcttcaaggaatatcatgagaaaaacggcacaggccttccgaaaatgcgcggctttgaagctgagggtgcggcggcaatcgtgcgcaatgaagtgattgaaaatccggaaacaatagcgacagccattcgtatcggaaacccggcaagctgggacaaagctgtaaaggcagccgaggaatccaatgggaaaattgacgaagtcactgatgatgaaatccttcacgcatatcagctgatcgcccgtgtagaaggcgtgtttgcagaaccaggttcttgcgcgtctatcgcaggagtgctgaaacaggtgaaatccggagaaattccgaaaggcagcaaggtcgtagctgtgttaacaggaaacggactgaaagatccgaacacagcggtcgacatttcagaaatcaagcctgtcacattgccgactgatgaagacagcatccttgaatatgtaaaaggagcggcccgtgtatgaacgaagccgacatgctgttctctgtcactgttcccggaagcacagctaacctaggccccggctttgattcagtcggaatggcgctcagcagatatttgaagctgaccgtctttgaaagcgacaaatggtcttttgaggctgaaacagaaacagtcgccggaattcgcggtacagataacctgatctaccaagtggctaaacggaccgcagatttgtacggaaaagaaatgcctcctgtccatgtgaaggtgtggagcgacatcccgcttgcacgcggccttggcagcagcgccgcagcgattgtagcggccattgaactggctgatgaattatgcggcttaaagctgtctgaagcggacaagctgcatttagcgagtctagaagaaggacacccggacaatgctggcgcttctctcgtcggcggacttgtgatcggcctgcatgaggatgacgagacccaaatgatccgcgtcccgaatgctgacattgacgtagtcgttgtcattcctttttatgaagtgctgacaagagacgcgagagacgtgcttccgaaggagtttccatatgccgatgccgtaaaagcaagtgctgtcagcaatatcctcattgctgcgatcatgtccaaggattggccgcttgtcgggaaaatcatgaagaaggatatgttccatcagccgtaccgggcgatgcttgtgcctgagctgtcaaaagtagagcacgtcgccgagatgaagggcgcatatggaacggctctcagcggagcaggcccaacgattctcgtcatgaccgaaaaaggaaagggagaagagctaaaagaacagctcgcgcttcatttccctcattgtgaagtagacgctttgaccgttccgaaagagggaagtataatagagcgaaatcctttatatcaagtaaaaagtgtatagatcatgccaagcgttcctcagcgtcagcggagggcgcctttttttgctggagataaaggagttttattagaaacgaatacatgtaaaggaggagatgaatatgaaaagctgataaccgcagacgacatcacagcgattgtctctgtgaccagtcctcaatacgccccagac

SEQ ID NO: 82772 - DNA, 2400 bp, Control sequence; identical to SEQ ID NO: 82771

SEQ ID NO: 82773 - DNA, 2400 bp, Control sequence; identical to SEQ ID NO: 82771

SEQ ID NO: 82774 - DNA, 1049 bp, Control sequence; identical to SEQ ID NO: 82738

SEQ ID NO: 82775 - DNA, 1049 bp, Control sequence; identical to SEQ ID NO: 82738

SEQ ID NO: 82776 - DNA, 1049 bp, Control sequence; identical to SEQ ID NO: 82738

SEQ ID NO: 82777 - DNA, 748 bp, Control sequence; identical to SEQ ID NO: 82741

SEQ ID NO: 82778 - DNA, 748 bp, Control sequence; identical to SEQ ID NO: 82741

SEQ ID NO: 82779 - DNA, 652 bp, Control sequence; identical to SEQ ID NO: 82743

SEQ ID NO: 82780 - DNA, 652 bp, Control sequence; identical to SEQ ID NO: 82743

SEQ ID NO: 82781 - DNA, 1032 bp, Control sequence; identical to SEQ ID NO: 82745

SEQ ID NO: 82782 - DNA, 1032 bp, Control sequence; identical to SEQ ID NO: 82745

SEQ ID NO: 82783 - DNA, 1049 bp, Control sequence
atggctcaccgcccacgctggacattgtcgcaagtcacagaattatttgaaaaaccgttgctggatctgctgtttgaagcgcagcaggtgcatcgccagcatttcgatcctcgtcaggtgcaggtcagcacgttgctgtcgattaagaccggagcttgtccggaagattgcaaatactgcccgcaaagctcgcgctacaaaaccgggctggaagccgagcggttgatggaagttgaacaggtgctggagtcggcgcgcaaagcgaaagcggcaggatcgacgcgcttctgtatgggcgcggcgtggaagaatccccacgaacgcgatatgccgtacctggaacaaatggtgcagggggtaaaagcgatggggctggaggcgtgtatgacgctgggcacgttgagtgaatctcaggcgcagcgcctcgcgaacgccgggctggattactacaaccacaacctggacacctcgccggagttttacggcaatatcatcaccacacgcacttatcaggaacgcctcgatacgctggaaaaagtgcgcgatgccgggatcaaagtctgttctggcggcattgtgggcttaggcgaaacggtaaaagatcgcgccggattattgctgcaactggcaaacctgccgacgccgccggaaagcgtgccaatcaacatgctggtgaaggtgaaaggcacgccgcttgccgataacgatgatgtcgatgcctttgattttattcgcaccattgcggtcgcgcggatcatgatgccaacctcttacgtgcgcctttctgccggacgcgagcagatgaacgaacagactcaggcgatgtgctttatggcaggcgcaaactcgattttctacggttgcaaactgctgaccacgccgaatccggaagaagataaagacctgcaactgttccgcaaactggggctaaatccgcagcaaactgccgtgctggcaggggataacgaacaacagcaacgtcttgaacaggcgctgatgaccccggacaccgacgaatattacaacgcggcagcattatgagctggcag

SEQ ID NO: 82784 - DNA, 1049 bp, Control sequence; identical to SEQ ID NO: 82783

SEQ ID NO: 82785 - DNA, 1049 bp, Control sequence; identical to SEQ ID NO: 82783

SEQ ID NO: 82786 - DNA, 751 bp, Control sequence
atggcaacggttaataaacaagccattgcagcggcatttggtcgggcagccgcacactatgagcaacatgcagatctacagcgccagagtgctgacgccttactggcaatgcttccacagcgtaaatacacccacgtactggacgcgggttgtggacctggctggatgagccgccactggcgggaacgtcacgcgcaggtgacggccttagatctctcgccgccaatgcttgttcaggcacgccagaaggatgccgcagaccattatctggcgggagatatcgaatccctgccgttagcgactgcgacgttcgatcttgcatggagcaatctcgcagtgcagtggtgcggtaatttatccacggcactccgcgagctgtatcgggtggtgcgccccaaaggcgtggtcgcgtttaccacgctggtgcagggatcgttacccgaactgcatcaggcgtggcaggcggtggacgagcgtccgcatgctaatcgctttttaccgccagatgaaatcgaacagtcgctgaacggcgtgcattatcaacatcatattcagcccatcacgctgtggtttgatgatgcgctcagtgccatgcgttcgctgaaaggcatcggtgccacgcatcttcatgaagggcgcgacccgcgaatattaacgcgttcgcagttgcagcgattgcaactggcctggccgcaacagcaggggcgatatcctctgacgtatcatctttttttgggagtgattgctcgtg

SEQ ID NO: 82787 - DNA, 751 bp, Control sequence; identical to SEQ ID NO: 82786

SEQ ID NO: 82788 - DNA, 661 bp, Control sequence
gtgagtaaacgttattttgtcaccggaacggataccgaagtggggaaaactgtcgccagttgtgcacttttacaagccgcaaaggcagcaggctaccggacggcaggttataaaccggtcgcctctggcagcgaaaagaccccggaaggtttacgcaatagcgacgcgctggcgttacagcgcaacagcagcctgcagctggattacgcaacagtaaatccttacaccttcgcagaacccacttcgccgcacatcatcagcgcgcaagagggcagaccgatagaatcattggtaatgagcgccggattacgcgcgcttgaacaacaggctgactgggtgttagtggaaggtgctggcggctggtttacgccgctttctgacactttcacttttgcagattgggtaacacaggaacaactgccggtgatactggtagttggtgtgaaactcggctgtattaatcacgcgatgttgactgcacaggtaatacaacacgccggactgactctggcgggttgggtggcgaacgatgttacgcctccgggaaaacgtcacgctgaatatatgaccacgctcacccgcatgattcccgcgccgctgctgggagagatcccctggcttgcagaaaatccagaaaatgcggcaaccggaaagtacataa

SEQ ID NO: 82789 - DNA, 661 bp, Control sequence; identical to SEQ ID NO: 82788

SEQ ID NO: 82790 - DNA, 1032 bp, Control sequence
atgtccaatttactgaccgtacaccaaaatttgcctgcattaccggtcgatgcaacgagtgatgaggttcgcaagaacctgatggacatgttcagggatcgccaggcgttttctgagcatacctggaaaatgcttctgtccgtttgccggtcgtgggcggcatggtgcaagttgaataaccggaaatggtttcccgcagaacctgaagatgttcgcgattatcttctatatcttcaggcgcgcggtctggcagtaaaaactatccagcaacatttgggccagctaaacatgcttcatcgtcggtccgggctgccacgaccaagtgacagcaatgctgtttcactggttatgcggcggatccgaaaagaaaacgttgatgccggtgaacgtgcaaaacaggctctagcgttcgaacgcactgatttcgaccaggttcgttcactcatggaaaatagcgatcgctgccaggatatacgtaatctggcatttctggggattgcttataacaccctgttacgtatagccgaaattgccaggatcagggttaaagatatctcacgtactgacggtgggagaatgttaatccatattggcagaacgaaaacgctggttagcaccgcaggtgtagagaaggcacttagcctgggggtaactaaactggtcgagcgatggatttccgtctctggtgtagctgatgatccgaataactacctgttttgccgggtcagaaaaaatggtgttgccgcgccatctgccaccagccagctatcaactcgcgccctggaagggatttttgaagcaactcatcgattgatttacggcgctaaggatgactctggtcagagatacctggcctggtctggacacagtgcccgtgtcggagccgcgcgagatatggcccgcgctggagtttcaataccggagatcatgcaagctggtggctggaccaatgtaaatattgtcatgaactatatccgtaacctggatagtgaaacaggggcaatggtgcgcctgctggaagatgccgattag

SEQ ID NO: 82791 - DNA, 1032 bp, Control sequence; identical to SEQ ID NO: 82790

SEQ ID NO: 82792 - DNA, 1840 bp, Control sequence
atgtcaaacgaaacaattaaattagtcattgcgggaccgcgtggaagaatggggcaggaagctgttaaattggcagaacgaacaccacattttgaccttgtaggggccatagaccatacatacgatcagcaaaaattatctgatgtgatgcctgttgagtcagatgctttcatttacacagatatccatgcctgttttacagaaacacaaccggatgtcttgattgatttaacaacgcccgaaatcggaaaagtacatacaaaaattgcattagagcacggagtccgtccagttgtcggaacaaccggtttctcagaagctgatttaaaagagctcacatctttaacagaagaaaaagggatcggagccatcatcgcgccaaattttgcgctcggtgcgatactgatgatgaaattttcaaaaatggctgccaactattttgaggatgttgagattattgagcttcatcatgaccagaagcttgacgcaccaagcggaactgcgcttaaaacagcggaaatgatttcagaagtccgtaaagaaaagcagcaaggacatccggatgaaaaagaaattctcccaggagcaagaggagcggagcaaaacggtattcgcttgcacaggcttcagatacgccatgattcttataaccgtgcttctttcatgtcaggcgttaaactgtcagtcgaacaagtcatgaagattgatcagcttgtgtatggtttagaaaatatcattgattagacggggggataaacaatgaaaattgctttgatcgcgcatgacaagaaaaaacaggatatggttcaatttacgactgcctatcgggatattttaaagaatcatgatctatacgcaaccggaaccacagggttgaaaattcatgaggcgacaggtcttcaaattgaacgttttcaatccggccctttagggggagaccagcaaatcggtgcactgatcgctgccaatgcactcgatcttgtcatttttttgcgcgacccgctgaccgcgcagccgcatgaaccggatgtctcggcattaatccgtttatgtgatgtgtattccattccgctcgccacaaatatgggtactgcggaaattcttgtgcgcacacttgatgaaggtgttttcgaattccgtgaccttcttcggggagaagagccgaatgtataatgctgacgttcttgcttttggcgcccacagtgatgatgtcgagatcggaatgggcggcacaatagcgaagtttgtcaaacaggaaaaaaaagtaatgatatgcgatttgacagaagcggaactctcttctaacggtacggtcagtttgcgtaaagaagaagcagctgaagcagcccgcatattaggcgcagataaaagaattcagctaacgcttccagaccgcggcctaataatgagtgatcaggcaattcggtcaattgtcactgtcatcagaatctgtcggccaaaagcggtttttatgccgtataaaaaggatcgccatccggatcacggcaatgcggctgcactggtggaagaagcgatcttttccgccggaatccataaatataaagacgaaaaaagccttccggcgcataaagtcagcaaggtttactattatatgataaatggttttcatcagccggattttgttattgatatctcggatacaatagaggcaaagaaacaaagcctcaacgcctacaaaagccagtttatcccgtcaaaggattccgtttctactcctctgacgaatgggtatattgaaatcgttgaagcgagagaaaagctttacggtaaagaagcgggcgtggagtatgccgaagtttcttttccaaacggatgctga

SEQ ID NO: 82793 - DNA, 1840 bp, Control sequence; identical to SEQ ID NO: 82792

SEQ ID NO: 82794 - DNA, 1840 bp, Control sequence; identical to SEQ ID NO: 82792

SEQ ID NO: 82795 - DNA, 984 bp, Control sequence
atgacattgttcttacacggcacaagcagacaaaatcaacatggtcatttagaaatcggaggtgtggatgctctctatttagcggagaaatatggtacacctctttacgtatatgatgtggctttaatacgtgagcgtgctaaaagctttaagcaggcgtttatttctgcagggctgaaagcacaggtggcatatgcgagcaaagcattctcatcagtcgcaatgattcagctcgctgaggaagagggactttctttagatgtcgtatccggagagagctatatacggctgttgcagcaggctttccggcagaacgcatccactttcatggaaacaataagagcagggaagaactgcggatggcgcttgagcaccgcatcggctgcattgtggtggataatttctatgaaatcgtcgcttcttgaagacctatgtaaagaaacgggtcactccatcgatgttcttcttcggatcacgcccggagtagaagcgcatacgcatgactacattacaacgggccaggaagattcaaagtttggtttcgatcttcataacggacaaactgaacgggccattgaacaagtattacaatcggaacacattcagctgctgggtgtccattgccatatcggctcgcaaatctttgatacggccggttttgtgttagcagcggaaaaaatcttcaaaaaactagacgaatggagagattcatattcatttgtatccaaggtgctgaatcttggaggaggtttcggcattcgttatacggaagatgatgaaccgcttcatgccactgaatacgttgaaaaaattatcgaagctgtgaaagaaaatgcttcccgttacggttttgacattccggaaatttggatcgaaccgggccgttctctcgtgggagacgcaggcacaactctttatacggttggctctcaaaaagaagtggataagctgtacaatcgtttcatcattcggcgtgcgaattaa

SEQ ID NO: 82796 - DNA, 984 bp, Control sequence; identical to SEQ ID NO: 82795

SEQ ID NO: 82797 - DNA, 984 bp, Control sequence; identical to SEQ ID NO: 82795

SEQ ID NO: 82798 - DNA, 1318 bp, Control sequence
atgaaagaggagacattttatcttgtccgtgaagatgtattgcccgatgcaatgagaaaaacattagaagtcaaaaagctgcttgatcgaaaaaaagcagattcagtagcagatgccgttcaaaaggtcgatttaagtagaagtgcgttttataaatacagggatgctgtttttccattctacaccatggtaaaagaacaaattatcacacttttctttcatttggaggataggtcaggtgcgttatctcagcttcttcaggcggtagctgattctggaagcaacgttctttccattcaccagaccattccgcttcaaggcagagcaaatgtgacactgtctatcagtacgtcggcaatggaagaagacattcatacattaatgaataagctcaggaagtttgattttgtagaaaaggttgaaatattaggttcaggtgcataagggagagaaaatcgtcatgaaagtcggttatttaggtccagcagctacatttacacatctagcagtcagttcttgttttcaaaacggcgccgaacatgttgcttaccgcaccattccggagtgtatagatgcagccgttgcaggcgaagttgattttgcttttgttcctttggaaaatgctttagaaggatctgttaatctaacaatagactatttaatacatgaacagcctttgccaatcgtgggtgaaatgacgttgccgattcaccagcacttgctcgtccatccctcaagagagaatgcatggaaagagctcgacaaaatttactcacattcacacgcgattgcgcaatgccataaatttcttcatcgacattttccttccgttccatatgaatacgccaattctaccggggcggcagcaaagtttgtcagtgaccatcccgagctgaatatcggggtcattgccaatgatatggcagcttctacatacgaattaaaaatcgtgaaacgggatatacaggattatagggacaatcatacaagatttgttatcctgtctcccgatgaaaacatatcttttgaagtgaattcaaaattgagctctaggcccaaaacgaccttaatggtcatgctgccgcaggatgatcagtccggggcgctgcatagagtgctgtctgcattttcttggagaaatttaaacctgtcaaaaattgagtcacgtccgactaaaaccggattaggccattatttctttattattgatattgagaaagcgtttgatgatgtattgattccaggggccatgcaggagcttgaagcactcggctgcaaagtgaggcttctgggtgcataccagtcttaccaattataa

SEQ ID NO: 82799 - DNA, 1318 bp, Control sequence; identical to SEQ ID NO: 82798

SEQ ID NO: 82800 - DNA, 1318 bp, Control sequence; identical to SEQ ID NO: 82798

SEQ ID NO: 82801 - DNA, 1982 bp, Control sequence
atgtggaaaggacttatccatcaatataaagaatttttacctgtaacagatcaaacaccggcgctaactttacatgaaggaaacacacctcttattcacctgccgaagctgtctgagcagctcggaattgagcttcatgtcaaaacggaaggcgtcaatcctacgggatcatttaaagatcgcggaatggttatggctgtggcaaaggcaaaagaagaaggcaatgacacgattatgtgcgcgtcaacaggtaacacttccgctgctgcggcagcatatgcagcccgtgctaacatgaaatgcattgtcatcatcccgaacggaaaaattgcatttggaaaactcgctcaagctgtcatgtacggagccgagattatcgcaattgacggaaactttgacgatgcgcttaaaattgtccgttccatctgtgagaaatcaccgattgcccttgtcaactcagtcaacccttaccgcattgaaggccaaaaaactgctgccttcgaagtgtgcgaacagctgggggaagcgcctgatgttttagcgatcccggtcggaaatgctggaaacatcactgcgtactggaagggcttcaaggaatatcatgagaaaaacggcacaggccttccgaaaatgcgcggctttgaagctgagggtgcggcggcaatcgtgcgcaatgaagtgattgaaaatccggaaacaatagcgacagccattcgtatcggaaacccggcaagctgggacaaagctgtaaaggcagccgaggaatccaatgggaaaattgacgaagtcactgatgatgaaatccttcacgcatatcagctgatcgcccgtgtagaaggcgtgtttgcagaaccaggttcttgcgcgtctatcgcaggagtgctgaaacaggtgaaatccggagaaattccgaaaggcagcaaggtcgtagctgtgttaacaggaaacggactgaaagatccgaacacagcggtcgacatttcagaaatcaagcctgtcacattgccgactgatgaagacagcatccttgaatatgtaaaaggagcggcccgtgtatgaacgaagccgacatgctgttctctgtcactgttcccggaagcacagctaacctaggccccggctttgattcagtcggaatggcgctcagcagatatttgaagctgaccgtctttgaaagcgacaaatggtcttttgaggctgaaacagaaacagtcgccggaattcgcggtacagataacctgatctaccaagtggctaaacggaccgcagatttgtacggaaaagaaatgcctcctgtccatgtgaaggtgtggagcgacatcccgcttgcacgcggccttggcagcagcgccgcagcgattgtagcggccattgaactggctgatgaattatgcggcttaaagctgtctgaagcggacaagctgcatttagcgagtctagaagaaggacacccggacaatgctggcgcttctctcgtcggcggacttgtgatcggcctgcatgaggatgacgagacccaaatgatccgcgtcccgaatgctgacattgacgtagtcgttgtcattcctttttatgaagtgctgacaagagacgcgagagacgtgcttccgaaggagtttccatatgccgatgccgtaaaagcaagtgctgtcagcaatatcctcattgctgcgatcatgtccaaggattggccgcttgtcgggaaaatcatgaagaaggatatgttccatcagccgtaccgggcgatgcttgtgcctgagctgtcaaaagtagagcacgtcgccgagatgaagggcgcatatggaacggctctcagcggagcaggcccaacgattctcgtcatgaccgaaaaaggaaagggagaagagctaaaagaacagctcgcgcttcatttccctcattgtgaagtagacgctttgaccgttccgaaagagggaagtataatagagcgaaatcctttatatcaagtaaaaagtgtatag

SEQ ID NO: 82802 - DNA, 1982 bp, Control sequence; identical to SEQ ID NO: 82801

SEQ ID NO: 82803 - DNA, 1982 bp, Control sequence; identical to SEQ ID NO: 82801

SEQ ID NO: 82804 - DNA, 2525 bp, Control sequence; identical to SEQ ID NO: 82759

SEQ ID NO: 82805 - DNA, 2525 bp, Control sequence; identical to SEQ ID NO: 82759

SEQ ID NO: 82806 - DNA, 2525 bp, Control sequence; identical to SEQ ID NO: 82759

SEQ ID NO: 82807 - DNA, 25 bp, Probe sequence
agcttggcactgcgccagaagaagc

SEQ ID NO: 82808 - DNA, 25 bp, Probe sequence
actttctttgcgaattcgtcactaa

SEQ ID NO: 82809 - DNA, 25 bp, Probe sequence
acttcttatgggtgacagattggcc

SEQ ID NO: 82810 - DNA, 25 bp, Probe sequence
acatcatccatttacatctccaaaa

SEQ ID NO: 82811 - DNA, 25 bp, Probe sequence
acagcatctgctacatgtttattaa

SEQ ID NO: 82812 - DNA, 25 bp, Probe sequence
aaatgtcgttgcacaaagtttaggt

SEQ ID NO: 82813 - DNA, 25 bp, Probe sequence
aaattaaacttcttatgggtgacag

SEQ ID NO: 82814 - DNA, 25 bp, Probe sequence
aaagtttaggtgcattacgtgtcaa

SEQ ID NO: 82815 - DNA, 25 bp, Probe sequence
aatggttatgaattaggtggcggtt

SEQ ID NO: 82816 - DNA, 25 bp, Probe sequence
aatgttcgaagttcttggatttact

SEQ ID NO: 82817 - DNA, 25 bp, Probe sequence
catggcggtattgcattaggattag

SEQ ID NO: 82818 - DNA, 25 bp, Probe sequence
gcattccctaaaacagcatctgcta

SEQ ID NO: 82819 - DNA, 25 bp, Probe sequence
gcagacaaaccaaatgtcgttgcac

SEQ ID NO: 82820 - DNA, 25 bp, Probe sequence
gaagaactttctttgcgaattcgtc

SEQ ID NO: 82821 - DNA, 25 bp, Probe sequence
gaagctgaggcaaatgcttatgaca

SEQ ID NO: 82822 - DNA, 25 bp, Probe sequence
gaaacgttacgttgcagcacatcat

SEQ ID NO: 82823 - DNA, 25 bp, Probe sequence
gaggcaaatgcttatgacatagtat

SEQ ID NO: 82824 - DNA, 25 bp, Probe sequence
gatgaagatgcgaaacgttacgttg

SEQ ID NO: 82825 - DNA, 25 bp, Probe sequence
gatgcatttaaatatggtgcaccac

SEQ ID NO: 82826 - DNA, 25 bp, Probe sequence
gatattgctaagcttggcactgcgc

SEQ ID NO: 82827 - DNA, 25 bp, Probe sequence
gttgcagcacatcatccatttacat

SEQ ID NO: 82828 - DNA, 25 bp, Probe sequence
gttacgttgcagcacatcatccatt

SEQ ID NO: 82829 - DNA, 25 bp, Probe sequence
ggtggcggttcaatcagaattcatg

SEQ ID NO: 82830 - DNA, 25 bp, Probe sequence
ggtgcattacgtgtcaaattagcta

SEQ ID NO: 82831 - DNA, 25 bp, Probe sequence
ggattagaccgattagtcatgttat

SEQ ID NO: 82832 - DNA, 25 bp, Probe sequence
ggcactgcgccagaagaagctgagg

SEQ ID NO: 82833 - DNA, 25 bp, Probe sequence
tgcagcacatcatccatttacatct

SEQ ID NO: 82834 - DNA, 25 bp, Probe sequence
tgctaagcttggcactgcgccagaa

SEQ ID NO: 82835 - DNA, 25 bp, Probe sequence
tcatccatttacatctccaaaagaa

SEQ ID NO: 82836 - DNA, 25 bp, Probe sequence
tacatgtttattaacgaatgcgcct

SEQ ID NO: 82837 - DNA, 25 bp, Probe sequence
tatgggtgacagattggccattatt

SEQ ID NO: 82838 - DNA, 25 bp, Probe sequence
tattgctaagcttggcactgcgcca

SEQ ID NO: 82839 - DNA, 25 bp, Probe sequence
ttcggcttcttactagatgcattta

SEQ ID NO: 82840 - DNA, 25 bp, Probe sequence
ttcgaagttcttggatttactaaag

SEQ ID NO: 82841 - DNA, 25 bp, Probe sequence
actggccaagttgaagtacaagtta

SEQ ID NO: 82842 - DNA, 25 bp, Probe sequence
attacacgttctattcgtcaatatt

SEQ ID NO: 82843 - DNA, 25 bp, Probe sequence
atatttggatgatgaagggttcttt

SEQ ID NO: 82844 - DNA, 25 bp, Probe sequence
ataaatctgagacaccaccattttc

SEQ ID NO: 82845 - DNA, 25 bp, Probe sequence
atctgagacaccaccattttctata

SEQ ID NO: 82846 - DNA, 25 bp, Probe sequence
acctgagggtgcacgtgactattta

SEQ ID NO: 82847 - DNA, 25 bp, Probe sequence
acgttctattcgtcaatatttggat

SEQ ID NO: 82848 - DNA, 25 bp, Probe sequence
aacaacttattgtggattagttact

SEQ ID NO: 82849 - DNA, 25 bp, Probe sequence
aatcctgcattttcagaagaggcat

SEQ ID NO: 82850 - DNA, 25 bp, Probe sequence
aattgctgaaacagtacgttctgaa

SEQ ID NO: 82851 - DNA, 25 bp, Probe sequence
cagttacgaagcgtgaccctgaaac

SEQ ID NO: 82852 - DNA, 25 bp, Probe sequence
cagtacgttctgaatatgttgtaga

SEQ ID NO: 82853 - DNA, 25 bp, Probe sequence
catgatggtgaattttatgcattac

SEQ ID NO: 82854 - DNA, 25 bp, Probe sequence
cgttatttagatttacgtcgtcaag

SEQ ID NO: 82855 - DNA, 25 bp, Probe sequence
gcacgtgactatttagtaccatctc

SEQ ID NO: 82856 - DNA, 25 bp, Probe sequence
gaagtcaacacctgagggtgcacgt

SEQ ID NO: 82857 - DNA, 25 bp, Probe sequence
gaaacaccagtactaacgaagtcaa

SEQ ID NO: 82858 - DNA, 25 bp, Probe sequence
gacatcaaattacacgttctattcg

SEQ ID NO: 82859 - DNA, 25 bp, Probe sequence
gatgggttaacaatcgtcgtgacct

SEQ ID NO: 82860 - DNA, 25 bp, Probe sequence
gagggtgcacgtgactatttagtac

SEQ ID NO: 82861 - DNA, 25 bp, Probe sequence
gagatagagaaggaattgtacaagt

SEQ ID NO: 82862 - DNA, 25 bp, Probe sequence
gagttagcgcaaacatttaaaatga

SEQ ID NO: 82863 - DNA, 25 bp, Probe sequence
gatttacgtcgtcaagagttagcgc

SEQ ID NO: 82864 - DNA, 25 bp, Probe sequence
gattttcgttgatttaagagataga

SEQ ID NO: 82865 - DNA, 25 bp, Probe sequence
gtagaagttcaaggtacagttacga

SEQ ID NO: 82866 - DNA, 25 bp, Probe sequence
gtactaacgaagtcaacacctgagg

SEQ ID NO: 82867 - DNA, 25 bp, Probe sequence
gtgactatttagtaccatctcgtgt

SEQ ID NO: 82868 - DNA, 25 bp, Probe sequence
gtgtttaatcctgcattttcagaag

SEQ ID NO: 82869 - DNA, 25 bp, Probe sequence
gggttctttgacatcgaaacaccag

SEQ ID NO: 82870 - DNA, 25 bp, Probe sequence
ggtggattgattttcgttgatttaa

SEQ ID NO: 82871 - DNA, 25 bp, Probe sequence
ggtacagttacgaagcgtgaccctg

SEQ ID NO: 82872 - DNA, 25 bp, Probe sequence
tgagacaccaccattttctataaat

SEQ ID NO: 82873 - DNA, 25 bp, Probe sequence
tacgtcgtcaagagttagcgcaaac

SEQ ID NO: 82874 - DNA, 25 bp, Probe sequence
ttgacatcgaaacaccagtactaac

SEQ ID NO: 82875 - DNA, 25 bp, Probe sequence
attacttacattaactggtgctgaa

SEQ ID NO: 82876 - DNA, 25 bp, Probe sequence
atgcgtcgctatggttctgataaac

SEQ ID NO: 82877 - DNA, 25 bp, Probe sequence
agatatggatgctttaacagaattt

SEQ ID NO: 82878 - DNA, 25 bp, Probe sequence
agcgatgcgtcgctatggttctgat

SEQ ID NO: 82879 - DNA, 25 bp, Probe sequence
aaatggaattaattgacgtttctca

SEQ ID NO: 82880 - DNA, 25 bp, Probe sequence
aaacatctatggtgctaaaggatta

SEQ ID NO: 82881 - DNA, 25 bp, Probe sequence
aagtcgatattgaaatgagttttgt

SEQ ID NO: 82882 - DNA, 25 bp, Probe sequence
caattaggacgtgatatggacttta

SEQ ID NO: 82883 - DNA, 25 bp, Probe sequence
caggtccaattggacgtttctttga

SEQ ID NO: 82884 - DNA, 25 bp, Probe sequence
ctaaaggtgcagctgaacaatatac

SEQ ID NO: 82885 - DNA, 25 bp, Probe sequence
gcttccgtgacgaagatttacgtgc

SEQ ID NO: 82886 - DNA, 25 bp, Probe sequence
gcaattgtcgctaaaggtgcagctg

SEQ ID NO: 82887 - DNA, 25 bp, Probe sequence
gaatttgtaaacatctatggtgcta

SEQ ID NO: 82888 - DNA, 25 bp, Probe sequence
gaagcgatgcgtcgctatggttctg

SEQ ID NO: 82889 - DNA, 25 bp, Probe sequence
gaagatgtgatgcaaatgggtgaag

SEQ ID NO: 82890 - DNA, 25 bp, Probe sequence
gaaacattacttacattaactggtg

SEQ ID NO: 82891 - DNA, 25 bp, Probe sequence
gacaggtccaattggacgtttcttt

SEQ ID NO: 82892 - DNA, 25 bp, Probe sequence
gacatataaagaagcgatgcgtcgc

SEQ ID NO: 82893 - DNA, 25 bp, Probe sequence
gatggtttgacaggtccaattggac

SEQ ID NO: 82894 - DNA, 25 bp, Probe sequence
gatactgttgaaaatgatggtgaaa

SEQ ID NO: 82895 - DNA, 25 bp, Probe sequence
gatttacgtgcagatcgtcaacctg

SEQ ID NO: 82896 - DNA, 25 bp, Probe sequence
gtaaaatgcttccgtgacgaagatt

SEQ ID NO: 82897 - DNA, 25 bp, Probe sequence
gtcgctatggttctgataaaccaga

SEQ ID NO: 82898 - DNA, 25 bp, Probe sequence
gtgaaattaaagcaattgtcgctaa

SEQ ID NO: 82899 - DNA, 25 bp, Probe sequence
tgggttaaagttgtggaagatggtt

SEQ ID NO: 82900 - DNA, 25 bp, Probe sequence
ggcgttgaaattaatggcgctttcc

SEQ ID NO: 82901 - DNA, 25 bp, Probe sequence
taactggtgctgaagctggtgactt

SEQ ID NO: 82902 - DNA, 25 bp, Probe sequence
tacgtgcagatcgtcaacctgaatt

SEQ ID NO: 82903 - DNA, 25 bp, Probe sequence
tatggatgctttaacagaatttgta

SEQ ID NO: 82904 - DNA, 25 bp, Probe sequence
tttacgtgcagatcgtcaacctgaa

SEQ ID NO: 82905 - DNA, 25 bp, Probe sequence
ttacattaactggtgctgaagctgg

SEQ ID NO: 82906 - DNA, 25 bp, Probe sequence
ttgacgtttctcaattaggacgtga

SEQ ID NO: 82907 - DNA, 25 bp, Probe sequence
ttgaaattaatggcgctttcccacg

SEQ ID NO: 82908 - DNA, 25 bp, Probe sequence
ttgtcgctaaaggtgcagctgaaca

SEQ ID NO: 82909 - DNA, 25 bp, Probe sequence
attgtcacaatatgatttagtatct

SEQ ID NO: 82910 - DNA, 25 bp, Probe sequence
aggtggtacgacacaagctggcctt

SEQ ID NO: 82911 - DNA, 25 bp, Probe sequence
agaatctatacgcaaccttattata

SEQ ID NO: 82912 - DNA, 25 bp, Probe sequence
agctggccttgatacattgtcacaa

SEQ ID NO: 82913 - DNA, 25 bp, Probe sequence
acgcaaccttattataggtacaagt

SEQ ID NO: 82914 - DNA, 25 bp, Probe sequence
acgacacaagctggccttgatacat

SEQ ID NO: 82915 - DNA, 25 bp, Probe sequence
aacgttcagatttgagcatggctca

SEQ ID NO: 82916 - DNA, 25 bp, Probe sequence
aagctggccttgatacattgtcaca

SEQ ID NO: 82917 - DNA, 25 bp, Probe sequence
aaggtggtacgacacaagctggcct

SEQ ID NO: 82918 - DNA, 25 bp, Probe sequence
caagctggccttgatacattgtcac

SEQ ID NO: 82919 - DNA, 25 bp, Probe sequence
cacaagctggccttgatacattgtc

SEQ ID NO: 82920 - DNA, 25 bp, Probe sequence
ctgccgtcgaccgtagtattgaact

SEQ ID NO: 82921 - DNA, 25 bp, Probe sequence
ctggccttgatacattgtcacaata

SEQ ID NO: 82922 - DNA, 25 bp, Probe sequence
cgaccgtagtattgaactttctaat

SEQ ID NO: 82923 - DNA, 25 bp, Probe sequence
gccgtcgaccgtagtattgaacttt

SEQ ID NO: 82924 - DNA, 25 bp, Probe sequence
gctggccttgatacattgtcacaat

SEQ ID NO: 82925 - DNA, 25 bp, Probe sequence
gctgccgtcgaccgtagtattgaac

SEQ ID NO: 82926 - DNA, 25 bp, Probe sequence
gaagaatctatacgcaaccttatta

SEQ ID NO: 82927 - DNA, 25 bp, Probe sequence
gaacgttcagatttgagcatggctc

SEQ ID NO: 82928 - DNA, 25 bp, Probe sequence
gaacaagttgaagaatctatacgca

SEQ ID NO: 82929 - DNA, 25 bp, Probe sequence
gacacaagctggccttgatacattg

SEQ ID NO: 82930 - DNA, 25 bp, Probe sequence
gagcatggctcaattaagaaaaaat

SEQ ID NO: 82931 - DNA, 25 bp, Probe sequence
gtcgaccgtagtattgaactttcta

SEQ ID NO: 82932 - DNA, 25 bp, Probe sequence
gattgaacgttcagatttgagcatg

SEQ ID NO: 82933 - DNA, 25 bp, Probe sequence
gtatctattttcgaagattgtctaa

SEQ ID NO: 82934 - DNA, 25 bp, Probe sequence
gtacgacacaagctggccttgatac

SEQ ID NO: 82935 - DNA, 25 bp, Probe sequence
gtacaagtaagatgattgaacgttc

SEQ ID NO: 82936 - DNA, 25 bp, Probe sequence
gtggtacgacacaagctggccttga

SEQ ID NO: 82937 - DNA, 25 bp, Probe sequence
ggtacgacacaagctggccttgata

SEQ ID NO: 82938 - DNA, 25 bp, Probe sequence
ggccttgatacattgtcacaatatg

SEQ ID NO: 82939 - DNA, 25 bp, Probe sequence
tgccgtcgaccgtagtattgaactt

SEQ ID NO: 82940 - DNA, 25 bp, Probe sequence
tatgatttagtatctattttcgaag

SEQ ID NO: 82941 - DNA, 25 bp, Probe sequence
tatacgcaaccttattataggtaca

SEQ ID NO: 82942 - DNA, 25 bp, Probe sequence
tattacctctaaaggtggtacgaca

SEQ ID NO: 82943 - DNA, 25 bp, Probe sequence
atagttatgatgatgcgacattatt

SEQ ID NO: 82944 - DNA, 25 bp, Probe sequence
atgctctagcaacacgcatcaaacc

SEQ ID NO: 82945 - DNA, 25 bp, Probe sequence
atgatgatgcgacattattaaaaga

SEQ ID NO: 82946 - DNA, 25 bp, Probe sequence
atggcacaagctatatttacaggaa

SEQ ID NO: 82947 - DNA, 25 bp, Probe sequence
aggaattattaactcaagcaactta

SEQ ID NO: 82948 - DNA, 25 bp, Probe sequence
actatagttatgatgatgcgacatt

SEQ ID NO: 82949 - DNA, 25 bp, Probe sequence
acaaaagacaattgcttcatttcaa

SEQ ID NO: 82950 - DNA, 25 bp, Probe sequence
acaagctatatttacaggaattatt

SEQ ID NO: 82951 - DNA, 25 bp, Probe sequence
aaaagacaattgcttcatttcaatt

SEQ ID NO: 82952 - DNA, 25 bp, Probe sequence
aactcaagcaacttagatgccaatg

SEQ ID NO: 82953 - DNA, 25 bp, Probe sequence
aagcattcgctgaaaaactaggtgt

SEQ ID NO: 82954 - DNA, 25 bp, Probe sequence
aattgcttcatttcaattatggcag

SEQ ID NO: 82955 - DNA, 25 bp, Probe sequence
caattgcttcatttcaattatggca

SEQ ID NO: 82956 - DNA, 25 bp, Probe sequence
caagctttaaaagcattcgctgaaa

SEQ ID NO: 82957 - DNA, 25 bp, Probe sequence
caaataaatctaatgaacaagcttt

SEQ ID NO: 82958 - DNA, 25 bp, Probe sequence
ctagcaacacgcatcaaaccacata

SEQ ID NO: 82959 - DNA, 25 bp, Probe sequence
ctcaagcaacttagatgccaatgat

SEQ ID NO: 82960 - DNA, 25 bp, Probe sequence
ctctagcaacacgcatcaaaccaca

SEQ ID NO: 82961 - DNA, 25 bp, Probe sequence
gctgaaaaactaggtgttaactata

SEQ ID NO: 82962 - DNA, 25 bp, Probe sequence
gctctagcaacacgcatcaaaccac

SEQ ID NO: 82963 - DNA, 25 bp, Probe sequence
gctttaaaagcattcgctgaaaaac

SEQ ID NO: 82964 - DNA, 25 bp, Probe sequence
gcattcgctgaaaaactaggtgtta

SEQ ID NO: 82965 - DNA, 25 bp, Probe sequence
gatgctctagcaacacgcatcaaac

SEQ ID NO: 82966 - DNA, 25 bp, Probe sequence
gatgccaatgatatatatttaacaa

SEQ ID NO: 82967 - DNA, 25 bp, Probe sequence
gttatgatgatgcgacattattaaa

SEQ ID NO: 82968 - DNA, 25 bp, Probe sequence
ggcacaagctatatttacaggaatt

SEQ ID NO: 82969 - DNA, 25 bp, Probe sequence
tgctctagcaacacgcatcaaacca

SEQ ID NO: 82970 - DNA, 25 bp, Probe sequence
tctagcaacacgcatcaaaccacat

SEQ ID NO: 82971 - DNA, 25 bp, Probe sequence
tacaggaattattaactcaagcaac

SEQ ID NO: 82972 - DNA, 25 bp, Probe sequence
tagcaacacgcatcaaaccacatat

SEQ ID NO: 82973 - DNA, 25 bp, Probe sequence
tttgatgctctagcaacacgcatca

SEQ ID NO: 82974 - DNA, 25 bp, Probe sequence
ttaactcaagcaacttagatgccaa

SEQ ID NO: 82975 - DNA, 25 bp, Probe sequence
ttaactatagttatgatgatgcgac

SEQ ID NO: 82976 - DNA, 25 bp, Probe sequence
ttcgctgaaaaactaggtgttaact

SEQ ID NO: 82977 - DNA, 25 bp, Probe sequence
attagaatgccaaaatccagttgct

SEQ ID NO: 82978 - DNA, 25 bp, Probe sequence
atcaagtaacagctatcaccggaag

SEQ ID NO: 82979 - DNA, 25 bp, Probe sequence
atgccaaaatccagttgctagaatt

SEQ ID NO: 82980 - DNA, 25 bp, Probe sequence
agaattatgccaaacacaaatgcgc

SEQ ID NO: 82981 - DNA, 25 bp, Probe sequence
agcggcccagcatttttatatcatg

SEQ ID NO: 82982 - DNA, 25 bp, Probe sequence
actggcattagtttttcaaacaact

SEQ ID NO: 82983 - DNA, 25 bp, Probe sequence
actttgaccctaaatctaaagatga

SEQ ID NO: 82984 - DNA, 25 bp, Probe sequence
acatcaagtaacagctatcaccgga

SEQ ID NO: 82985 - DNA, 25 bp, Probe sequence
aaatccagttgctagaattatgcca

SEQ ID NO: 82986 - DNA, 25 bp, Probe sequence
aagtaacagctatcaccggaagcgg

SEQ ID NO: 82987 - DNA, 25 bp, Probe sequence
aagcggcccagcatttttatatcat

SEQ ID NO: 82988 - DNA, 25 bp, Probe sequence
caactttgaccctaaatctaaagat

SEQ ID NO: 82989 - DNA, 25 bp, Probe sequence
cggaagcggcccagcatttttatat

SEQ ID NO: 82990 - DNA, 25 bp, Probe sequence
ccagcatttttatatcatgtattcg

SEQ ID NO: 82991 - DNA, 25 bp, Probe sequence
gccaaaatccagttgctagaattat

SEQ ID NO: 82992 - DNA, 25 bp, Probe sequence
gcggcccagcatttttatatcatgt

SEQ ID NO: 82993 - DNA, 25 bp, Probe sequence
gcatttttatatcatgtattcgagc

SEQ ID NO: 82994 - DNA, 25 bp, Probe sequence
gaatgccaaaatccagttgctagaa

SEQ ID NO: 82995 - DNA, 25 bp, Probe sequence
gaagcggcccagcatttttatatca

SEQ ID NO: 82996 - DNA, 25 bp, Probe sequence
gatcatttacatcaagtaacagcta

SEQ ID NO: 82997 - DNA, 25 bp, Probe sequence
gtaacagctatcaccggaagcggcc

SEQ ID NO: 82998 - DNA, 25 bp, Probe sequence
gttgctagaattatgccaaacacaa

SEQ ID NO: 82999 - DNA, 25 bp, Probe sequence
gttactggcattagtttttcaaaca

SEQ ID NO: 83000 - DNA, 25 bp, Probe sequence
ggaagcggcccagcatttttatatc

SEQ ID NO: 83001 - DNA, 25 bp, Probe sequence
ggcattagtttttcaaacaactttg

SEQ ID NO: 83002 - DNA, 25 bp, Probe sequence
ggcccagcatttttatatcatgtat

SEQ ID NO: 83003 - DNA, 25 bp, Probe sequence
tccagttgctagaattatgccaaac

SEQ ID NO: 83004 - DNA, 25 bp, Probe sequence
tcaaacaactttgaccctaaatcta

SEQ ID NO: 83005 - DNA, 25 bp, Probe sequence
taacgatttagttaaagcatttggt

SEQ ID NO: 83006 - DNA, 25 bp, Probe sequence
taacagctatcaccggaagcggccc

SEQ ID NO: 83007 - DNA, 25 bp, Probe sequence
tacatcaagtaacagctatcaccgg

SEQ ID NO: 83008 - DNA, 25 bp, Probe sequence
tagaatgccaaaatccagttgctag

SEQ ID NO: 83009 - DNA, 25 bp, Probe sequence
ttttatatcatgtattcgagcaata

SEQ ID NO: 83010 - DNA, 25 bp, Probe sequence
ttatgccaaacacaaatgcgcaagt

SEQ ID NO: 83011 - DNA, 25 bp, Probe sequence
attgttgcagccatcgaagagtatc

SEQ ID NO: 83012 - DNA, 25 bp, Probe sequence
attgttgaagaagactttgatttat

SEQ ID NO: 83013 - DNA, 25 bp, Probe sequence
atttagattcattaactgcttttca

SEQ ID NO: 83014 - DNA, 25 bp, Probe sequence
atattcgtttgccaatgttatgcaa

SEQ ID NO: 83015 - DNA, 25 bp, Probe sequence
atgtgacacatgttgattatgagtt

SEQ ID NO: 83016 - DNA, 25 bp, Probe sequence
aaagcacgttataatgtgacacatg

SEQ ID NO: 83017 - DNA, 25 bp, Probe sequence
agagcatttagaccgcataagaatt

SEQ ID NO: 83018 - DNA, 25 bp, Probe sequence
accatttagagcatttagaccgcat

SEQ ID NO: 83019 - DNA, 25 bp, Probe sequence
acatttcagcatgagttaataaatc

SEQ ID NO: 83020 - DNA, 25 bp, Probe sequence
aacaatttcctattacaaatcaaat

SEQ ID NO: 83021 - DNA, 25 bp, Probe sequence
aacggaatattcgtttgccaatgtt

SEQ ID NO: 83022 - DNA, 25 bp, Probe sequence
aagaattagctttttcacatatcat

SEQ ID NO: 83023 - DNA, 25 bp, Probe sequence
gccatcgaagagtatcgacaccatt

SEQ ID NO: 83024 - DNA, 25 bp, Probe sequence
gctagcctttctaaaaaagcacgtt

SEQ ID NO: 83025 - DNA, 25 bp, Probe sequence
gcatttagaccgcataagaattagc

SEQ ID NO: 83026 - DNA, 25 bp, Probe sequence
gcagccatcgaagagtatcgacacc

SEQ ID NO: 83027 - DNA, 25 bp, Probe sequence
gcaaattgttgcagccatcgaagag

SEQ ID NO: 83028 - DNA, 25 bp, Probe sequence
gcaaattttagctagcctttctaaa

SEQ ID NO: 83029 - DNA, 25 bp, Probe sequence
gaattagctttttcacatatcatag

SEQ ID NO: 83030 - DNA, 25 bp, Probe sequence
gaatattcgtttgccaatgttatgc

SEQ ID NO: 83031 - DNA, 25 bp, Probe sequence
gaagagtatcgacaccatttagagc

SEQ ID NO: 83032 - DNA, 25 bp, Probe sequence
gacacatgttgattatgagttagat

SEQ ID NO: 83033 - DNA, 25 bp, Probe sequence
gacaccatttagagcatttagaccg

SEQ ID NO: 83034 - DNA, 25 bp, Probe sequence
gaccgcataagaattagctttttca

SEQ ID NO: 83035 - DNA, 25 bp, Probe sequence
gagcaaattttagctagcctttcta

SEQ ID NO: 83036 - DNA, 25 bp, Probe sequence
gagtatcgacaccatttagagcatt

SEQ ID NO: 83037 - DNA, 25 bp, Probe sequence
gagttagataatccgcagaaaaaag

SEQ ID NO: 83038 - DNA, 25 bp, Probe sequence
gatgcagacattgaaattgttgaag

SEQ ID NO: 83039 - DNA, 25 bp, Probe sequence
gatttagattcattaactgcttttc

SEQ ID NO: 83040 - DNA, 25 bp, Probe sequence
gttgcagccatcgaagagtatcgac

SEQ ID NO: 83041 - DNA, 25 bp, Probe sequence
gtatcgacaccatttagagcattta

SEQ ID NO: 83042 - DNA, 25 bp, Probe sequence
tatttacttaataacaatttcctat

SEQ ID NO: 83043 - DNA, 25 bp, Probe sequence
tttagagcatttagaccgcataaga

SEQ ID NO: 83044 - DNA, 25 bp, Probe sequence
ttgccaatgttatgcaaattgttgc

SEQ ID NO: 83045 - DNA, 25 bp, Probe sequence
attttatcattatgggtgttaccgt

SEQ ID NO: 83046 - DNA, 25 bp, Probe sequence
attttagctatgtctatcgcttctt

SEQ ID NO: 83047 - DNA, 25 bp, Probe sequence
atcgttcatttaaaacagtttctga

SEQ ID NO: 83048 - DNA, 25 bp, Probe sequence
atgggacaacataccggttctttct

SEQ ID NO: 83049 - DNA, 25 bp, Probe sequence
atgggtgttaccgtcatagtactta

SEQ ID NO: 83050 - DNA, 25 bp, Probe sequence
agcacatgttgctactttggcgagt

SEQ ID NO: 83051 - DNA, 25 bp, Probe sequence
agctggtgtcagtgctgttgttgca

SEQ ID NO: 83052 - DNA, 25 bp, Probe sequence
agccattattttagctatgtctatc

SEQ ID NO: 83053 - DNA, 25 bp, Probe sequence
acatgttgctactttggcgagtgta

SEQ ID NO: 83054 - DNA, 25 bp, Probe sequence
acagcattaatcattatgggacaac

SEQ ID NO: 83055 - DNA, 25 bp, Probe sequence
acaatggtaacaatttttagtgata

SEQ ID NO: 83056 - DNA, 25 bp, Probe sequence
aaaactggtatagccattattttag

SEQ ID NO: 83057 - DNA, 25 bp, Probe sequence
caacataccggttctttctatatta

SEQ ID NO: 83058 - DNA, 25 bp, Probe sequence
gccttagctggtgtcagtgctgttg

SEQ ID NO: 83059 - DNA, 25 bp, Probe sequence
gcgagtgtaacagcattaatcatta

SEQ ID NO: 83060 - DNA, 25 bp, Probe sequence
gcttctttactaccggatgatgttg

SEQ ID NO: 83061 - DNA, 25 bp, Probe sequence
gcaacctagtatttatcgttcattt

SEQ ID NO: 83062 - DNA, 25 bp, Probe sequence
gaaagccttagctggtgtcagtgct

SEQ ID NO: 83063 - DNA, 25 bp, Probe sequence
gacaacataccggttctttctatat

SEQ ID NO: 83064 - DNA, 25 bp, Probe sequence
gatgttggtctgaaagccttagctg

SEQ ID NO: 83065 - DNA, 25 bp, Probe sequence
gttgcaatgcaacctagtatttatc

SEQ ID NO: 83066 - DNA, 25 bp, Probe sequence
gttgctactttggcgagtgtaacag

SEQ ID NO: 83067 - DNA, 25 bp, Probe sequence
gttaccgtcatagtacttattgcta

SEQ ID NO: 83068 - DNA, 25 bp, Probe sequence
gtcatagtacttattgctattttat

SEQ ID NO: 83069 - DNA, 25 bp, Probe sequence
gtgtcagtgctgttgttgcaatgca

SEQ ID NO: 83070 - DNA, 25 bp, Probe sequence
ggtctgaaagccttagctggtgtca

SEQ ID NO: 83071 - DNA, 25 bp, Probe sequence
tcgcttctttactaccggatgatgt

SEQ ID NO: 83072 - DNA, 25 bp, Probe sequence
tcagtgctgttgttgcaatgcaacc

SEQ ID NO: 83073 - DNA, 25 bp, Probe sequence
taaatttaatttagcacatgttgct

SEQ ID NO: 83074 - DNA, 25 bp, Probe sequence
tactttggcgagtgtaacagcatta

SEQ ID NO: 83075 - DNA, 25 bp, Probe sequence
tactaccggatgatgttggtctgaa

SEQ ID NO: 83076 - DNA, 25 bp, Probe sequence
tagctatgtctatcgcttctttact

SEQ ID NO: 83077 - DNA, 25 bp, Probe sequence
tatgtctatcgcttctttactaccg

SEQ ID NO: 83078 - DNA, 25 bp, Probe sequence
tatcgcttctttactaccggatgat

SEQ ID NO: 83079 - DNA, 25 bp, Probe sequence
ataattcattaaatatatcctcaga

SEQ ID NO: 83080 - DNA, 25 bp, Probe sequence
atctctagttaactttgtgtttcta

SEQ ID NO: 83081 - DNA, 25 bp, Probe sequence
agtagttcagacgactagacaagct

SEQ ID NO: 83082 - DNA, 25 bp, Probe sequence
actatagcgaagaacgtcctattac

SEQ ID NO: 83083 - DNA, 25 bp, Probe sequence
acaggtttgtacttgtaatgattgg

SEQ ID NO: 83084 - DNA, 25 bp, Probe sequence
acaaaaaaacatattcaccaacaga

SEQ ID NO: 83085 - DNA, 25 bp, Probe sequence
aaacatattcaccaacagaatagaa

SEQ ID NO: 83086 - DNA, 25 bp, Probe sequence
cagacgactagacaagcttatgaag

SEQ ID NO: 83087 - DNA, 25 bp, Probe sequence
gaaaatttatgattactatagcgaa

SEQ ID NO: 83088 - DNA, 25 bp, Probe sequence
gagaagtagttcagacgactagaca

SEQ ID NO: 83089 - DNA, 25 bp, Probe sequence
gactagacaagcttatgaagtatta

SEQ ID NO: 83090 - DNA, 25 bp, Probe sequence
gacgactagacaagcttatgaagta

SEQ ID NO: 83091 - DNA, 25 bp, Probe sequence
gatacgacggagtttaataatatta

SEQ ID NO: 83092 - DNA, 25 bp, Probe sequence
gattactatagcgaagaacgtccta

SEQ ID NO: 83093 - DNA, 25 bp, Probe sequence
gattggtgtcataagttcatctcta

SEQ ID NO: 83094 - DNA, 25 bp, Probe sequence
gttcagacgactagacaagcttatg

SEQ ID NO: 83095 - DNA, 25 bp, Probe sequence
gttcatctctagttaactttgtgtt

SEQ ID NO: 83096 - DNA, 25 bp, Probe sequence
gtattaaacaaattgtcgcgttatc

SEQ ID NO: 83097 - DNA, 25 bp, Probe sequence
gtattaaatgatacgacggagttta

SEQ ID NO: 83098 - DNA, 25 bp, Probe sequence
gtcataagttcatctctagttaact

SEQ ID NO: 83099 - DNA, 25 bp, Probe sequence
gtcataatttaaaacaacgtgtcga

SEQ ID NO: 83100 - DNA, 25 bp, Probe sequence
gtgtcataagttcatctctagttaa

SEQ ID NO: 83101 - DNA, 25 bp, Probe sequence
tgtgtttctaccacctaaatttgaa

SEQ ID NO: 83102 - DNA, 25 bp, Probe sequence
tggtgtcataagttcatctctagtt

SEQ ID NO: 83103 - DNA, 25 bp, Probe sequence
tcctcagatatttttatgtggttta

SEQ ID NO: 83104 - DNA, 25 bp, Probe sequence
tctagttaactttgtgtttctacca

SEQ ID NO: 83105 - DNA, 25 bp, Probe sequence
tcatctctagttaactttgtgtttc

SEQ ID NO: 83106 - DNA, 25 bp, Probe sequence
tagcgaagaacgtcctattacaaaa

SEQ ID NO: 83107 - DNA, 25 bp, Probe sequence
tatcctcagatatttttatgtggtt

SEQ ID NO: 83108 - DNA, 25 bp, Probe sequence
tttgtgtttctaccacctaaatttg

SEQ ID NO: 83109 - DNA, 25 bp, Probe sequence
tttgtacttgtaatgattggtgtca

SEQ ID NO: 83110 - DNA, 25 bp, Probe sequence
ttttcagagaagtagttcagacgac

SEQ ID NO: 83111 - DNA, 25 bp, Probe sequence
ttgtgtttctaccacctaaatttga

SEQ ID NO: 83112 - DNA, 25 bp, Probe sequence
ttggtgtcataagttcatctctagt

SEQ ID NO: 83113 - DNA, 25 bp, Probe sequence
attccctaggatatacgaatgtacc

SEQ ID NO: 83114 - DNA, 25 bp, Probe sequence
attcgcgtacacacagttgaacaat

SEQ ID NO: 83115 - DNA, 25 bp, Probe sequence
atacgaatgtacctgttaaattaga

SEQ ID NO: 83116 - DNA, 25 bp, Probe sequence
aggtacaattcgcgtacacacagtt

SEQ ID NO: 83117 - DNA, 25 bp, Probe sequence
agaagttgaaggtacaattcgcgta

SEQ ID NO: 83118 - DNA, 25 bp, Probe sequence
acgaatgtacctgttaaattagata

SEQ ID NO: 83119 - DNA, 25 bp, Probe sequence
acaattcgcgtacacacagttgaac

SEQ ID NO: 83120 - DNA, 25 bp, Probe sequence
aaaagcacaacatgatattaaaatt

SEQ ID NO: 83121 - DNA, 25 bp, Probe sequence
aagcactaaaagcacaacatgatat

SEQ ID NO: 83122 - DNA, 25 bp, Probe sequence
aaggtacaattcgcgtacacacagt

SEQ ID NO: 83123 - DNA, 25 bp, Probe sequence
aatggatttaccaaatggaattcat

SEQ ID NO: 83124 - DNA, 25 bp, Probe sequence
aattcattccctaggatatacgaat

SEQ ID NO: 83125 - DNA, 25 bp, Probe sequence
aattcgcgtacacacagttgaacaa

SEQ ID NO: 83126 - DNA, 25 bp, Probe sequence
caattcgcgtacacacagttgaaca

SEQ ID NO: 83127 - DNA, 25 bp, Probe sequence
cctaggatatacgaatgtacctgtt

SEQ ID NO: 83128 - DNA, 25 bp, Probe sequence
ccaaatggaattcattccctaggat

SEQ ID NO: 83129 - DNA, 25 bp, Probe sequence
gcactaaaagcacaacatgatatta

SEQ ID NO: 83130 - DNA, 25 bp, Probe sequence
gaattcattccctaggatatacgaa

SEQ ID NO: 83131 - DNA, 25 bp, Probe sequence
gaatgtacctgttaaattagataaa

SEQ ID NO: 83132 - DNA, 25 bp, Probe sequence
gaaggtacaattcgcgtacacacag

SEQ ID NO: 83133 - DNA, 25 bp, Probe sequence
gatatacgaatgtacctgttaaatt

SEQ ID NO: 83134 - DNA, 25 bp, Probe sequence
gatttaccaaatggaattcattccc

SEQ ID NO: 83135 - DNA, 25 bp, Probe sequence
gttgaaggtacaattcgcgtacaca

SEQ ID NO: 83136 - DNA, 25 bp, Probe sequence
gtacaattcgcgtacacacagttga

SEQ ID NO: 83137 - DNA, 25 bp, Probe sequence
ggtacaattcgcgtacacacagttg

SEQ ID NO: 83138 - DNA, 25 bp, Probe sequence
ggatatacgaatgtacctgttaaat

SEQ ID NO: 83139 - DNA, 25 bp, Probe sequence
ggaattcattccctaggatatacga

SEQ ID NO: 83140 - DNA, 25 bp, Probe sequence
tggaattcattccctaggatatacg

SEQ ID NO: 83141 - DNA, 25 bp, Probe sequence
tgaaggtacaattcgcgtacacaca

SEQ ID NO: 83142 - DNA, 25 bp, Probe sequence
tcgcgtacacacagttgaacaataa

SEQ ID NO: 83143 - DNA, 25 bp, Probe sequence
tccctaggatatacgaatgtacctg

SEQ ID NO: 83144 - DNA, 25 bp, Probe sequence
tacaattcgcgtacacacagttgaa

SEQ ID NO: 83145 - DNA, 25 bp, Probe sequence
taccaaatggaattcattccctagg

SEQ ID NO: 83146 - DNA, 25 bp, Probe sequence
ttcgcgtacacacagttgaacaata

SEQ ID NO: 83147 - DNA, 25 bp, Probe sequence
attatgctgtagaagcaacaccagg

SEQ ID NO: 83148 - DNA, 25 bp, Probe sequence
atgctgtagaagcaacaccaggtaa

SEQ ID NO: 83149 - DNA, 25 bp, Probe sequence
aggttatgcaaataacttcttattg

SEQ ID NO: 83150 - DNA, 25 bp, Probe sequence
agtaccagtaggttatgcaaataac

SEQ ID NO: 83151 - DNA, 25 bp, Probe sequence
agtaggttatgcaaataacttctta

SEQ ID NO: 83152 - DNA, 25 bp, Probe sequence
agaattatgctgtagaagcaacacc

SEQ ID NO: 83153 - DNA, 25 bp, Probe sequence
agaagtaccagtaggttatgcaaat

SEQ ID NO: 83154 - DNA, 25 bp, Probe sequence
accagtaggttatgcaaataacttc

SEQ ID NO: 83155 - DNA, 25 bp, Probe sequence
aaagaagtaccagtaggttatgcaa

SEQ ID NO: 83156 - DNA, 25 bp, Probe sequence
aagaagtaccagtaggttatgcaaa

SEQ ID NO: 83157 - DNA, 25 bp, Probe sequence
aagtaccagtaggttatgcaaataa

SEQ ID NO: 83158 - DNA, 25 bp, Probe sequence
aattatgctgtagaagcaacaccag

SEQ ID NO: 83159 - DNA, 25 bp, Probe sequence
cagtaggttatgcaaataacttctt

SEQ ID NO: 83160 - DNA, 25 bp, Probe sequence
ctgtagaagcaacaccaggtaacct

SEQ ID NO: 83161 - DNA, 25 bp, Probe sequence
gctgtagaagcaacaccaggtaacc

SEQ ID NO: 83162 - DNA, 25 bp, Probe sequence
gcaaataacttcttattgaaaaaga

SEQ ID NO: 83163 - DNA, 25 bp, Probe sequence
gaattatgctgtagaagcaacacca

SEQ ID NO: 83164 - DNA, 25 bp, Probe sequence
gaagtaccagtaggttatgcaaata

SEQ ID NO: 83165 - DNA, 25 bp, Probe sequence
gaaagtaatttttacacaagatgtt

SEQ ID NO: 83166 - DNA, 25 bp, Probe sequence
gttatgcaaataacttcttattgaa

SEQ ID NO: 83167 - DNA, 25 bp, Probe sequence
gtaggttatgcaaataacttcttat

SEQ ID NO: 83168 - DNA, 25 bp, Probe sequence
gtaccagtaggttatgcaaataact

SEQ ID NO: 83169 - DNA, 25 bp, Probe sequence
gtaatttttacacaagatgttaaag

SEQ ID NO: 83170 - DNA, 25 bp, Probe sequence
gtgaagttaaagaagtaccagtagg

SEQ ID NO: 83171 - DNA, 25 bp, Probe sequence
ggttatgcaaataacttcttattga

SEQ ID NO: 83172 - DNA, 25 bp, Probe sequence
tgaaaaagaattatgctgtagaagc

SEQ ID NO: 83173 - DNA, 25 bp, Probe sequence
tgaagttaaagaagtaccagtaggt

SEQ ID NO: 83174 - DNA, 25 bp, Probe sequence
tgctgtagaagcaacaccaggtaac

SEQ ID NO: 83175 - DNA, 25 bp, Probe sequence
taaagaagtaccagtaggttatgca

SEQ ID NO: 83176 - DNA, 25 bp, Probe sequence
taggttatgcaaataacttcttatt

SEQ ID NO: 83177 - DNA, 25 bp, Probe sequence
tatgctgtagaagcaacaccaggta

SEQ ID NO: 83178 - DNA, 25 bp, Probe sequence
tatgcaaataacttcttattgaaaa

SEQ ID NO: 83179 - DNA, 25 bp, Probe sequence
ttatgctgtagaagcaacaccaggt

SEQ ID NO: 83180 - DNA, 25 bp, Probe sequence
ttatgcaaataacttcttattgaaa

SEQ ID NO: 83181 - DNA, 25 bp, Probe sequence
attgaagttgaagtatcagcaaaaa

SEQ ID NO: 83182 - DNA, 25 bp, Probe sequence
atcagcaaaaactggtgaaggtggt

SEQ ID NO: 83183 - DNA, 25 bp, Probe sequence
agtatcagcaaaaactggtgaaggt

SEQ ID NO: 83184 - DNA, 25 bp, Probe sequence
agttgaagtatcagcaaaaactggt

SEQ ID NO: 83185 - DNA, 25 bp, Probe sequence
actggtgaaggtggtaaattgtttg

SEQ ID NO: 83186 - DNA, 25 bp, Probe sequence
acgtgcaaaacaagaacgccaacaa

SEQ ID NO: 83187 - DNA, 25 bp, Probe sequence
acattgaagttgaagtatcagcaaa

SEQ ID NO: 83188 - DNA, 25 bp, Probe sequence
acaagaacgccaacaagaaattgaa

SEQ ID NO: 83189 - DNA, 25 bp, Probe sequence
aaacattgaagttgaagtatcagca

SEQ ID NO: 83190 - DNA, 25 bp, Probe sequence
aaacaagaacgccaacaagaaattg

SEQ ID NO: 83191 - DNA, 25 bp, Probe sequence
aacaagaacgccaacaagaaattga

SEQ ID NO: 83192 - DNA, 25 bp, Probe sequence
aacattgaagttgaagtatcagcaa

SEQ ID NO: 83193 - DNA, 25 bp, Probe sequence
aacgtgcaaaacaagaacgccaaca

SEQ ID NO: 83194 - DNA, 25 bp, Probe sequence
aagtatcagcaaaaactggtgaagg

SEQ ID NO: 83195 - DNA, 25 bp, Probe sequence
aagttgaagtatcagcaaaaactgg

SEQ ID NO: 83196 - DNA, 25 bp, Probe sequence
caagaacgccaacaagaaattgaag

SEQ ID NO: 83197 - DNA, 25 bp, Probe sequence
caaaacaagaacgccaacaagaaat

SEQ ID NO: 83198 - DNA, 25 bp, Probe sequence
caaacattgaagttgaagtatcagc

SEQ ID NO: 83199 - DNA, 25 bp, Probe sequence
cagcaaaaactggtgaaggtggtaa

SEQ ID NO: 83200 - DNA, 25 bp, Probe sequence
cattgaagttgaagtatcagcaaaa

SEQ ID NO: 83201 - DNA, 25 bp, Probe sequence
ctggtgaaggtggtaaattgtttgg

SEQ ID NO: 83202 - DNA, 25 bp, Probe sequence
cgtgcaaaacaagaacgccaacaag

SEQ ID NO: 83203 - DNA, 25 bp, Probe sequence
gcaaaacaagaacgccaacaagaaa

SEQ ID NO: 83204 - DNA, 25 bp, Probe sequence
gaagttgaagtatcagcaaaaactg

SEQ ID NO: 83205 - DNA, 25 bp, Probe sequence
gaagtatcagcaaaaactggtgaag

SEQ ID NO: 83206 - DNA, 25 bp, Probe sequence
gttgaagtatcagcaaaaactggtg

SEQ ID NO: 83207 - DNA, 25 bp, Probe sequence
gtatcagcaaaaactggtgaaggtg

SEQ ID NO: 83208 - DNA, 25 bp, Probe sequence
gtgcaaaacaagaacgccaacaaga

SEQ ID NO: 83209 - DNA, 25 bp, Probe sequence
tgaagtatcagcaaaaactggtgaa

SEQ ID NO: 83210 - DNA, 25 bp, Probe sequence
tgcaaaacaagaacgccaacaagaa

SEQ ID NO: 83211 - DNA, 25 bp, Probe sequence
tcagcaaaaactggtgaaggtggta

SEQ ID NO: 83212 - DNA, 25 bp, Probe sequence
tatcagcaaaaactggtgaaggtgg

SEQ ID NO: 83213 - DNA, 25 bp, Probe sequence
ttgaagtatcagcaaaaactggtga

SEQ ID NO: 83214 - DNA, 25 bp, Probe sequence
ttgaagttgaagtatcagcaaaaac

SEQ ID NO: 83215 - DNA, 25 bp, Probe sequence
attcgttacatggttattcgtgaag

SEQ ID NO: 83216 - DNA, 25 bp, Probe sequence
atatcattcgttacatggttattcg

SEQ ID NO: 83217 - DNA, 25 bp, Probe sequence
atcagtgacgatatcattcgttaca

SEQ ID NO: 83218 - DNA, 25 bp, Probe sequence
atcattcgttacatggttattcgtg

SEQ ID NO: 83219 - DNA, 25 bp, Probe sequence
agctactgacgaattccaacgtcta

SEQ ID NO: 83220 - DNA, 25 bp, Probe sequence
acgaattccaacgtctagctaaaat

SEQ ID NO: 83221 - DNA, 25 bp, Probe sequence
actgacgaattccaacgtctagcta

SEQ ID NO: 83222 - DNA, 25 bp, Probe sequence
acaaagctactgacgaattccaacg

SEQ ID NO: 83223 - DNA, 25 bp, Probe sequence
acaacaaagctactgacgaattcca

SEQ ID NO: 83224 - DNA, 25 bp, Probe sequence
aacaaagctactgacgaattccaac

SEQ ID NO: 83225 - DNA, 25 bp, Probe sequence
aacaacaaagctactgacgaattcc

SEQ ID NO: 83226 - DNA, 25 bp, Probe sequence
aagctactgacgaattccaacgtct

SEQ ID NO: 83227 - DNA, 25 bp, Probe sequence
aatcagtgacgatatcattcgttac

SEQ ID NO: 83228 - DNA, 25 bp, Probe sequence
aattccaacgtctagctaaaatcag

SEQ ID NO: 83229 - DNA, 25 bp, Probe sequence
caaagctactgacgaattccaacgt

SEQ ID NO: 83230 - DNA, 25 bp, Probe sequence
cagtgacgatatcattcgttacatg

SEQ ID NO: 83231 - DNA, 25 bp, Probe sequence
ctactgacgaattccaacgtctagc

SEQ ID NO: 83232 - DNA, 25 bp, Probe sequence
ctgacgaattccaacgtctagctaa

SEQ ID NO: 83233 - DNA, 25 bp, Probe sequence
cgaattccaacgtctagctaaaatc

SEQ ID NO: 83234 - DNA, 25 bp, Probe sequence
ccaacgtctagctaaaatcagtgac

SEQ ID NO: 83235 - DNA, 25 bp, Probe sequence
gctaaaatcagtgacgatatcattc

SEQ ID NO: 83236 - DNA, 25 bp, Probe sequence
gctactgacgaattccaacgtctag

SEQ ID NO: 83237 - DNA, 25 bp, Probe sequence
gaattccaacgtctagctaaaatca

SEQ ID NO: 83238 - DNA, 25 bp, Probe sequence
gacgatatcattcgttacatggtta

SEQ ID NO: 83239 - DNA, 25 bp, Probe sequence
gatatcattcgttacatggttattc

SEQ ID NO: 83240 - DNA, 25 bp, Probe sequence
gttacatggttattcgtgaagacga

SEQ ID NO: 83241 - DNA, 25 bp, Probe sequence
gtctagctaaaatcagtgacgatat

SEQ ID NO: 83242 - DNA, 25 bp, Probe sequence
gtgacgatatcattcgttacatggt

SEQ ID NO: 83243 - DNA, 25 bp, Probe sequence
ggttattcgtgaagacgaagacaag

SEQ ID NO: 83244 - DNA, 25 bp, Probe sequence
tccaacgtctagctaaaatcagtga

SEQ ID NO: 83245 - DNA, 25 bp, Probe sequence
tcgttacatggttattcgtgaagac

SEQ ID NO: 83246 - DNA, 25 bp, Probe sequence
tcattcgttacatggttattcgtga

SEQ ID NO: 83247 - DNA, 25 bp, Probe sequence
tactgacgaattccaacgtctagct

SEQ ID NO: 83248 - DNA, 25 bp, Probe sequence
ttccaacgtctagctaaaatcagtg

SEQ ID NO: 83249 - DNA, 25 bp, Probe sequence
atgctaaaaaagcgttagttgaacg

SEQ ID NO: 83250 - DNA, 25 bp, Probe sequence
atcttagctactgaaggtgcagaag

SEQ ID NO: 83251 - DNA, 25 bp, Probe sequence
atcgtacgcccaaacattgaggaag

SEQ ID NO: 83252 - DNA, 25 bp, Probe sequence
atgtacatcgtacgcccaaacattg

SEQ ID NO: 83253 - DNA, 25 bp, Probe sequence
aggaagatgctaaaaaagcgttagt

SEQ ID NO: 83254 - DNA, 25 bp, Probe sequence
agatgctaaaaaagcgttagttgaa

SEQ ID NO: 83255 - DNA, 25 bp, Probe sequence
acgcccaaacattgaggaagatgct

SEQ ID NO: 83256 - DNA, 25 bp, Probe sequence
acattgaggaagatgctaaaaaagc

SEQ ID NO: 83257 - DNA, 25 bp, Probe sequence
acatcgtacgcccaaacattgagga

SEQ ID NO: 83258 - DNA, 25 bp, Probe sequence
aaacattgaggaagatgctaaaaaa

SEQ ID NO: 83259 - DNA, 25 bp, Probe sequence
aacattgaggaagatgctaaaaaag

SEQ ID NO: 83260 - DNA, 25 bp, Probe sequence
aagatgctaaaaaagcgttagttga

SEQ ID NO: 83261 - DNA, 25 bp, Probe sequence
caaacattgaggaagatgctaaaaa

SEQ ID NO: 83262 - DNA, 25 bp, Probe sequence
catcgtacgcccaaacattgaggaa

SEQ ID NO: 83263 - DNA, 25 bp, Probe sequence
cattgaggaagatgctaaaaaagcg

SEQ ID NO: 83264 - DNA, 25 bp, Probe sequence
cgtacgcccaaacattgaggaagat

SEQ ID NO: 83265 - DNA, 25 bp, Probe sequence
cgcccaaacattgaggaagatgcta

SEQ ID NO: 83266 - DNA, 25 bp, Probe sequence
cccaaacattgaggaagatgctaaa

SEQ ID NO: 83267 - DNA, 25 bp, Probe sequence
ccaaacattgaggaagatgctaaaa

SEQ ID NO: 83268 - DNA, 25 bp, Probe sequence
gcccaaacattgaggaagatgctaa

SEQ ID NO: 83269 - DNA, 25 bp, Probe sequence
gaagatgctaaaaaagcgttagttg

SEQ ID NO: 83270 - DNA, 25 bp, Probe sequence
gaggaagatgctaaaaaagcgttag

SEQ ID NO: 83271 - DNA, 25 bp, Probe sequence
gatgctaaaaaagcgttagttgaac

SEQ ID NO: 83272 - DNA, 25 bp, Probe sequence
gtacgcccaaacattgaggaagatg

SEQ ID NO: 83273 - DNA, 25 bp, Probe sequence
gtacatcgtacgcccaaacattgag

SEQ ID NO: 83274 - DNA, 25 bp, Probe sequence
ggaagatgctaaaaaagcgttagtt

SEQ ID NO: 83275 - DNA, 25 bp, Probe sequence
tgctaaaaaagcgttagttgaacgt

SEQ ID NO: 83276 - DNA, 25 bp, Probe sequence
tgtacatcgtacgcccaaacattga

SEQ ID NO: 83277 - DNA, 25 bp, Probe sequence
tgaggaagatgctaaaaaagcgtta

SEQ ID NO: 83278 - DNA, 25 bp, Probe sequence
tcgtacgcccaaacattgaggaaga

SEQ ID NO: 83279 - DNA, 25 bp, Probe sequence
tcttagctactgaaggtgcagaagt

SEQ ID NO: 83280 - DNA, 25 bp, Probe sequence
tacatcgtacgcccaaacattgagg

SEQ ID NO: 83281 - DNA, 25 bp, Probe sequence
tacgcccaaacattgaggaagatgc

SEQ ID NO: 83282 - DNA, 25 bp, Probe sequence
agactggggtaaacgtcgcctagct

SEQ ID NO: 83283 - DNA, 25 bp, Probe sequence
atttcaaagatggcttctacaacat

SEQ ID NO: 83284 - DNA, 25 bp, Probe sequence
atcaatgatttcaaagatggcttct

SEQ ID NO: 83285 - DNA, 25 bp, Probe sequence
atggcttctacaacatcgtacgtgt

SEQ ID NO: 83286 - DNA, 25 bp, Probe sequence
agatggcttctacaacatcgtacgt

SEQ ID NO: 83287 - DNA, 25 bp, Probe sequence
acgtcgcctagcttatgaaatcaat

SEQ ID NO: 83288 - DNA, 25 bp, Probe sequence
acaacatcgtacgtgttaaatctga

SEQ ID NO: 83289 - DNA, 25 bp, Probe sequence
aaagatggcttctacaacatcgtac

SEQ ID NO: 83290 - DNA, 25 bp, Probe sequence
aaacgtcgcctagcttatgaaatca

SEQ ID NO: 83291 - DNA, 25 bp, Probe sequence
aacgtcgcctagcttatgaaatcaa

SEQ ID NO: 83292 - DNA, 25 bp, Probe sequence
aagatggcttctacaacatcgtacg

SEQ ID NO: 83293 - DNA, 25 bp, Probe sequence
aatgatttcaaagatggcttctaca

SEQ ID NO: 83294 - DNA, 25 bp, Probe sequence
caatgatttcaaagatggcttctac

SEQ ID NO: 83295 - DNA, 25 bp, Probe sequence
caacatcgtacgtgttaaatctgat

SEQ ID NO: 83296 - DNA, 25 bp, Probe sequence
caaagatggcttctacaacatcgta

SEQ ID NO: 83297 - DNA, 25 bp, Probe sequence
cttctacaacatcgtacgtgttaaa

SEQ ID NO: 83298 - DNA, 25 bp, Probe sequence
cgtcgcctagcttatgaaatcaatg

SEQ ID NO: 83299 - DNA, 25 bp, Probe sequence
gcctagcttatgaaatcaatgattt

SEQ ID NO: 83300 - DNA, 25 bp, Probe sequence
gcttctacaacatcgtacgtgttaa

SEQ ID NO: 83301 - DNA, 25 bp, Probe sequence
gatggcttctacaacatcgtacgtg

SEQ ID NO: 83302 - DNA, 25 bp, Probe sequence
gatttcaaagatggcttctacaaca

SEQ ID NO: 83303 - DNA, 25 bp, Probe sequence
gtaaacgtcgcctagcttatgaaat

SEQ ID NO: 83304 - DNA, 25 bp, Probe sequence
gtcgcctagcttatgaaatcaatga

SEQ ID NO: 83305 - DNA, 25 bp, Probe sequence
ggtaaacgtcgcctagcttatgaaa

SEQ ID NO: 83306 - DNA, 25 bp, Probe sequence
ggcttctacaacatcgtacgtgtta

SEQ ID NO: 83307 - DNA, 25 bp, Probe sequence
tggcttctacaacatcgtacgtgtt

SEQ ID NO: 83308 - DNA, 25 bp, Probe sequence
tgatttcaaagatggcttctacaac

SEQ ID NO: 83309 - DNA, 25 bp, Probe sequence
tcgcctagcttatgaaatcaatgat

SEQ ID NO: 83310 - DNA, 25 bp, Probe sequence
tctacaacatcgtacgtgttaaatc

SEQ ID NO: 83311 - DNA, 25 bp, Probe sequence
tcaaagatggcttctacaacatcgt

SEQ ID NO: 83312 - DNA, 25 bp, Probe sequence
taaacgtcgcctagcttatgaaatc

SEQ ID NO: 83313 - DNA, 25 bp, Probe sequence
tagaagcaaaagactggggtaaacg

SEQ ID NO: 83314 - DNA, 25 bp, Probe sequence
tacaacatcgtacgtgttaaatctg

SEQ ID NO: 83315 - DNA, 25 bp, Probe sequence
ttcaaagatggcttctacaacatcg

SEQ ID NO: 83316 - DNA, 25 bp, Probe sequence
atggaaggcgaacaacaaactgaag

SEQ ID NO: 83317 - DNA, 25 bp, Probe sequence
agtaactggcgacttcaaaatcgaa

SEQ ID NO: 83318 - DNA, 25 bp, Probe sequence
actggcgacttcaaaatcgaaaacg

SEQ ID NO: 83319 - DNA, 25 bp, Probe sequence
actgaagaaccagaagttgttggcg

SEQ ID NO: 83320 - DNA, 25 bp, Probe sequence
aaagtaactggcgacttcaaaatcg

SEQ ID NO: 83321 - DNA, 25 bp, Probe sequence
aacagtagttgctccaactgaagaa

SEQ ID NO: 83322 - DNA, 25 bp, Probe sequence
aactgaagaaccaactgaagaagaa

SEQ ID NO: 83323 - DNA, 25 bp, Probe sequence
aactgttgctgatgttaaagtaact

SEQ ID NO: 83324 - DNA, 25 bp, Probe sequence
gaaccagaagttgttggcgaaagca

SEQ ID NO: 83325 - DNA, 25 bp, Probe sequence
aagctatggaaggcgaacaacaaac

SEQ ID NO: 83326 - DNA, 25 bp, Probe sequence
aatcgaaaacgattcagctgaatca

SEQ ID NO: 83327 - DNA, 25 bp, Probe sequence
cagtagttgctccaactgaagaacc

SEQ ID NO: 83328 - DNA, 25 bp, Probe sequence
cagaagttgttggcgaaagcaaaga

SEQ ID NO: 83329 - DNA, 25 bp, Probe sequence
cgaagctatggaaggcgaacaacaa

SEQ ID NO: 83330 - DNA, 25 bp, Probe sequence
gctccaactgaagaaccaactgaag

SEQ ID NO: 83331 - DNA, 25 bp, Probe sequence
gctgatgttaaagtaactggcgact

SEQ ID NO: 83332 - DNA, 25 bp, Probe sequence
gctatggaaggcgaacaacaaactg

SEQ ID NO: 83333 - DNA, 25 bp, Probe sequence
gaaggcgaacaacaaactgaagaac

SEQ ID NO: 83334 - DNA, 25 bp, Probe sequence
gaagaaccagaagttgttggcgaaa

SEQ ID NO: 83335 - DNA, 25 bp, Probe sequence
gaagaaatcgaagctatggaaggcg

SEQ ID NO: 83336 - DNA, 25 bp, Probe sequence
gaaatcgaagctatggaaggcgaac

SEQ ID NO: 83337 - DNA, 25 bp, Probe sequence
gatgttaaagtaactggcgacttca

SEQ ID NO: 83338 - DNA, 25 bp, Probe sequence
gttggcgaaagcaaagaagacgaag

SEQ ID NO: 83339 - DNA, 25 bp, Probe sequence
gttgttggcgaaagcaaagaagacg

SEQ ID NO: 83340 - DNA, 25 bp, Probe sequence
gttgctccaactgaagaaccaactg

SEQ ID NO: 83341 - DNA, 25 bp, Probe sequence
gtaacagtagttgctccaactgaag

SEQ ID NO: 83342 - DNA, 25 bp, Probe sequence
gtaactggcgacttcaaaatcgaaa

SEQ ID NO: 83343 - DNA, 25 bp, Probe sequence
ggcgacttcaaaatcgaaaacgatt

SEQ ID NO: 83344 - DNA, 25 bp, Probe sequence
ggcgaacaacaaactgaagaaccag

SEQ ID NO: 83345 - DNA, 25 bp, Probe sequence
tgttaaagtaactggcgacttcaaa

SEQ ID NO: 83346 - DNA, 25 bp, Probe sequence
tgctccaactgaagaaccaactgaa

SEQ ID NO: 83347 - DNA, 25 bp, Probe sequence
tccaactgaagaaccaactgaagaa

SEQ ID NO: 83348 - DNA, 25 bp, Probe sequence
tagttgctccaactgaagaaccaac

SEQ ID NO: 83349 - DNA, 25 bp, Probe sequence
ttgctccaactgaagaaccaactga

SEQ ID NO: 83350 - DNA, 25 bp, Probe sequence
accagcagtagtatacggttacggt

SEQ ID NO: 83351 - DNA, 25 bp, Probe sequence
attaaagtcaatcatccgtcaaggt

SEQ ID NO: 83352 - DNA, 25 bp, Probe sequence
attcatcaaagttatccgtgaagta

SEQ ID NO: 83353 - DNA, 25 bp, Probe sequence
atcatccgtcaaggtaaacaaacac

SEQ ID NO: 83354 - DNA, 25 bp, Probe sequence
atggcttcattaaagtcaatcatcc

SEQ ID NO: 83355 - DNA, 25 bp, Probe sequence
acgtgtcagttaaagttgatgaagt

SEQ ID NO: 83356 - DNA, 25 bp, Probe sequence
acacgttcagatcttaaacaattaa

SEQ ID NO: 83357 - DNA, 25 bp, Probe sequence
aaagtaccagcagtagtatacggtt

SEQ ID NO: 83358 - DNA, 25 bp, Probe sequence
aaacacgttcagatcttaaacaatt

SEQ ID NO: 83359 - DNA, 25 bp, Probe sequence
aaaacgtgtcagttaaagttgatga

SEQ ID NO: 83360 - DNA, 25 bp, Probe sequence
aacaaacacgttcagatcttaaaca

SEQ ID NO: 83361 - DNA, 25 bp, Probe sequence
aagtcaatcatccgtcaaggtaaac

SEQ ID NO: 83362 - DNA, 25 bp, Probe sequence
cagcagtagtatacggttacggtac

SEQ ID NO: 83363 - DNA, 25 bp, Probe sequence
gcagtagtatacggttacggtacta

SEQ ID NO: 83364 - DNA, 25 bp, Probe sequence
cggtgttatcgaattaggcgttggt

SEQ ID NO: 83365 - DNA, 25 bp, Probe sequence
cgtaacggtgttatcgaattaggcg

SEQ ID NO: 83366 - DNA, 25 bp, Probe sequence
gcgttggttctaaaactatcaaagt

SEQ ID NO: 83367 - DNA, 25 bp, Probe sequence
gcttcattaaagtcaatcatccgtc

SEQ ID NO: 83368 - DNA, 25 bp, Probe sequence
gaattcatcaaagttatccgtgaag

SEQ ID NO: 83369 - DNA, 25 bp, Probe sequence
gaagtagaattcatcaaagttatcc

SEQ ID NO: 83370 - DNA, 25 bp, Probe sequence
gttatcgaattaggcgttggttcta

SEQ ID NO: 83371 - DNA, 25 bp, Probe sequence
gtagaattcatcaaagttatccgtg

SEQ ID NO: 83372 - DNA, 25 bp, Probe sequence
gtaccagcagtagtatacggttacg

SEQ ID NO: 83373 - DNA, 25 bp, Probe sequence
gtcaaggtaaacaaacacgttcaga

SEQ ID NO: 83374 - DNA, 25 bp, Probe sequence
gtcaatcatccgtcaaggtaaacaa

SEQ ID NO: 83375 - DNA, 25 bp, Probe sequence
gtgttatcgaattaggcgttggttc

SEQ ID NO: 83376 - DNA, 25 bp, Probe sequence
ggtaaacaaacacgttcagatctta

SEQ ID NO: 83377 - DNA, 25 bp, Probe sequence
ggtaaagtaccagcagtagtatacg

SEQ ID NO: 83378 - DNA, 25 bp, Probe sequence
ggcttcattaaagtcaatcatccgt

SEQ ID NO: 83379 - DNA, 25 bp, Probe sequence
taaagtcaatcatccgtcaaggtaa

SEQ ID NO: 83380 - DNA, 25 bp, Probe sequence
tatcgaattaggcgttggttctaaa

SEQ ID NO: 83381 - DNA, 25 bp, Probe sequence
taggcgttggttctaaaactatcaa

SEQ ID NO: 83382 - DNA, 25 bp, Probe sequence
ttaaagtcaatcatccgtcaaggta

SEQ ID NO: 83383 - DNA, 25 bp, Probe sequence
ttcattaaagtcaatcatccgtcaa

SEQ ID NO: 83384 - DNA, 25 bp, Probe sequence
attactcacattgacttcttagcaa

SEQ ID NO: 83385 - DNA, 25 bp, Probe sequence
atatgagtgaagaacgtactgttga

SEQ ID NO: 83386 - DNA, 25 bp, Probe sequence
accaaattactcacattgacttctt

SEQ ID NO: 83387 - DNA, 25 bp, Probe sequence
actccagacaatattccagaagcaa

SEQ ID NO: 83388 - DNA, 25 bp, Probe sequence
actgctactccagacaatattccag

SEQ ID NO: 83389 - DNA, 25 bp, Probe sequence
aaattactcacattgacttcttagc

SEQ ID NO: 83390 - DNA, 25 bp, Probe sequence
aaaccaaattactcacattgacttc

SEQ ID NO: 83391 - DNA, 25 bp, Probe sequence
aacttagaagtaactgctactccag

SEQ ID NO: 83392 - DNA, 25 bp, Probe sequence
aactgctactccagacaatattcca

SEQ ID NO: 83393 - DNA, 25 bp, Probe sequence
aattagttggtgaagcagtaggcgc

SEQ ID NO: 83394 - DNA, 25 bp, Probe sequence
cacttaaaaaccaaattactcacat

SEQ ID NO: 83395 - DNA, 25 bp, Probe sequence
ctactccagacaatattccagaagc

SEQ ID NO: 83396 - DNA, 25 bp, Probe sequence
ctcacattgacttcttagcaatcaa

SEQ ID NO: 83397 - DNA, 25 bp, Probe sequence
gcagtaggcgctaaagaaggcggcg

SEQ ID NO: 83398 - DNA, 25 bp, Probe sequence
gaaggcggcgtagttgaacaaccat

SEQ ID NO: 83399 - DNA, 25 bp, Probe sequence
gaagtaccagttcaattagttggtg

SEQ ID NO: 83400 - DNA, 25 bp, Probe sequence
gaagtaactgctactccagacaata

SEQ ID NO: 83401 - DNA, 25 bp, Probe sequence
gaacgtactgttgaagtaccagttc

SEQ ID NO: 83402 - DNA, 25 bp, Probe sequence
gaacaaccattattcaacttagaag

SEQ ID NO: 83403 - DNA, 25 bp, Probe sequence
gacaatattccagaagcaatcgaag

SEQ ID NO: 83404 - DNA, 25 bp, Probe sequence
gacttcttagcaatcaatatgagtg

SEQ ID NO: 83405 - DNA, 25 bp, Probe sequence
gttggtgaagcagtaggcgctaaag

SEQ ID NO: 83406 - DNA, 25 bp, Probe sequence
gttgcagactaccaattcgatccac

SEQ ID NO: 83407 - DNA, 25 bp, Probe sequence
gtaactgctactccagacaatattc

SEQ ID NO: 83408 - DNA, 25 bp, Probe sequence
ggcggcgtagttgaacaaccattat

SEQ ID NO: 83409 - DNA, 25 bp, Probe sequence
ggttgcagactaccaattcgatcca

SEQ ID NO: 83410 - DNA, 25 bp, Probe sequence
ggcgctaaagaaggcggcgtagttg

SEQ ID NO: 83411 - DNA, 25 bp, Probe sequence
ggcgtagttgaacaaccattattca

SEQ ID NO: 83412 - DNA, 25 bp, Probe sequence
tgctactccagacaatattccagaa

SEQ ID NO: 83413 - DNA, 25 bp, Probe sequence
tccagaagcaatcgaagtagacatt

SEQ ID NO: 83414 - DNA, 25 bp, Probe sequence
tactcacattgacttcttagcaatc

SEQ ID NO: 83415 - DNA, 25 bp, Probe sequence
taggcgctaaagaaggcggcgtagt

SEQ ID NO: 83416 - DNA, 25 bp, Probe sequence
ttagaagtaactgctactccagaca

SEQ ID NO: 83417 - DNA, 25 bp, Probe sequence
ttgcagactaccaattcgatccact

SEQ ID NO: 83418 - DNA, 25 bp, Probe sequence
attcttctcaaactatcgtccacaa

SEQ ID NO: 83419 - DNA, 25 bp, Probe sequence
atttccgtactactgacgtaactgg

SEQ ID NO: 83420 - DNA, 25 bp, Probe sequence
attattagactacgctgaagctggt

SEQ ID NO: 83421 - DNA, 25 bp, Probe sequence
atcgctccaatcgcgattgaagacg

SEQ ID NO: 83422 - DNA, 25 bp, Probe sequence
atgacagtagaattaatcgctccaa

SEQ ID NO: 83423 - DNA, 25 bp, Probe sequence
aggcgttgttactgaaatcattaaa

SEQ ID NO: 83424 - DNA, 25 bp, Probe sequence
aagacggtactcgtttctcaatccg

SEQ ID NO: 83425 - DNA, 25 bp, Probe sequence
acgtggtcaagtattagctgctcct

SEQ ID NO: 83426 - DNA, 25 bp, Probe sequence
acaattctatttccgtactactgac

SEQ ID NO: 83427 - DNA, 25 bp, Probe sequence
aaagcagaagtatacgtattatcaa

SEQ ID NO: 83428 - DNA, 25 bp, Probe sequence
aacattggtgcattattacgtggtg

SEQ ID NO: 83429 - DNA, 25 bp, Probe sequence
cgaaggtggacgtcacactccattc

SEQ ID NO: 83430 - DNA, 25 bp, Probe sequence
cagtagaattaatcgctccaatcgc

SEQ ID NO: 83431 - DNA, 25 bp, Probe sequence
ctatcgtccacaattctatttccgt

SEQ ID NO: 83432 - DNA, 25 bp, Probe sequence
gcctggtgataacgttgaaatgaca

SEQ ID NO: 83433 - DNA, 25 bp, Probe sequence
gctcgtgaagacgtacaacgtggtc

SEQ ID NO: 83434 - DNA, 25 bp, Probe sequence
gcattattacgtggtgttgctcgtg

SEQ ID NO: 83435 - DNA, 25 bp, Probe sequence
gacgtaactggtgttgttcacttac

SEQ ID NO: 83436 - DNA, 25 bp, Probe sequence
gaaggtggacgtactgtaggatcag

SEQ ID NO: 83437 - DNA, 25 bp, Probe sequence
gaagctggtgacaacattggtgcat

SEQ ID NO: 83438 - DNA, 25 bp, Probe sequence
gactacgctgaagctggtgacaaca

SEQ ID NO: 83439 - DNA, 25 bp, Probe sequence
gattgaagacggtactcgtttctca

SEQ ID NO: 83440 - DNA, 25 bp, Probe sequence
gttcaattacaccacatactgaatt

SEQ ID NO: 83441 - DNA, 25 bp, Probe sequence
gtgttgttcacttaccagaaggtac

SEQ ID NO: 83442 - DNA, 25 bp, Probe sequence
gtactgtaggatcaggcgttgttac

SEQ ID NO: 83443 - DNA, 25 bp, Probe sequence
gtactactgacgtaactggtgttgt

SEQ ID NO: 83444 - DNA, 25 bp, Probe sequence
gtcaagtattagctgctcctggttc

SEQ ID NO: 83445 - DNA, 25 bp, Probe sequence
gtccacaattctatttccgtactac

SEQ ID NO: 83446 - DNA, 25 bp, Probe sequence
gtggtgttgctcgtgaagacgtaca

SEQ ID NO: 83447 - DNA, 25 bp, Probe sequence
ggtactgaaatggtaatgcctggtg

SEQ ID NO: 83448 - DNA, 25 bp, Probe sequence
ggtaatgcctggtgataacgttgaa

SEQ ID NO: 83449 - DNA, 25 bp, Probe sequence
tgctcctggttcaattacaccacat

SEQ ID NO: 83450 - DNA, 25 bp, Probe sequence
tctcaaactatcgtccacaattcta

SEQ ID NO: 83451 - DNA, 25 bp, Probe sequence
ttagctgctcctggttcaattacac

SEQ ID NO: 83452 - DNA, 25 bp, Probe sequence
atcttagtagtatctgctgctgacg

SEQ ID NO: 83453 - DNA, 25 bp, Probe sequence
aacgtcactacgctcacgttgactg

SEQ ID NO: 83454 - DNA, 25 bp, Probe sequence
atcggtactatcggtcacgttgacc

SEQ ID NO: 83455 - DNA, 25 bp, Probe sequence
atggtgactcagttgcacaatcata

SEQ ID NO: 83456 - DNA, 25 bp, Probe sequence
agaacatgccaatatcggtactatc

SEQ ID NO: 83457 - DNA, 25 bp, Probe sequence
acggtccaatgccacaaactcgtga

SEQ ID NO: 83458 - DNA, 25 bp, Probe sequence
aatatcggtactatcggtcacgttg

SEQ ID NO: 83459 - DNA, 25 bp, Probe sequence
gccaatatcggtactatcggtcacg

SEQ ID NO: 83460 - DNA, 25 bp, Probe sequence
acatgatcactggtgctgctcaaat

SEQ ID NO: 83461 - DNA, 25 bp, Probe sequence
acaaacgtcactacgctcacgttga

SEQ ID NO: 83462 - DNA, 25 bp, Probe sequence
aaatggtgactcagttgcacaatca

SEQ ID NO: 83463 - DNA, 25 bp, Probe sequence
aaacaacattaacagcagcaatcgc

SEQ ID NO: 83464 - DNA, 25 bp, Probe sequence
aaaacatgatcactggtgctgctca

SEQ ID NO: 83465 - DNA, 25 bp, Probe sequence
aactcgtgaacacattcttttatca

SEQ ID NO: 83466 - DNA, 25 bp, Probe sequence
cacattcttttatcacgtaacgttg

SEQ ID NO: 83467 - DNA, 25 bp, Probe sequence
catgccaatatcggtactatcggtc

SEQ ID NO: 83468 - DNA, 25 bp, Probe sequence
ctgacaaacgtcactacgctcacgt

SEQ ID NO: 83469 - DNA, 25 bp, Probe sequence
gccacaaactcgtgaacacattctt

SEQ ID NO: 83470 - DNA, 25 bp, Probe sequence
gcagcaatcgctactgtattagcaa

SEQ ID NO: 83471 - DNA, 25 bp, Probe sequence
gaacgtggtatcacaatcaatactt

SEQ ID NO: 83472 - DNA, 25 bp, Probe sequence
gaacacattcttttatcacgtaacg

SEQ ID NO: 83473 - DNA, 25 bp, Probe sequence
gacaacgctccagaagaaaaagaac

SEQ ID NO: 83474 - DNA, 25 bp, Probe sequence
gacatgattgacaacgctccagaag

SEQ ID NO: 83475 - DNA, 25 bp, Probe sequence
gatcactggtgctgctcaaatggac

SEQ ID NO: 83476 - DNA, 25 bp, Probe sequence
gtactatcggtcacgttgaccatgg

SEQ ID NO: 83477 - DNA, 25 bp, Probe sequence
gattgacaacgctccagaagaaaaa

SEQ ID NO: 83478 - DNA, 25 bp, Probe sequence
gtaacgttggtgtaccagcattagt

SEQ ID NO: 83479 - DNA, 25 bp, Probe sequence
gtccaatgccacaaactcgtgaaca

SEQ ID NO: 83480 - DNA, 25 bp, Probe sequence
ggtatcttagtagtatctgctgctg

SEQ ID NO: 83481 - DNA, 25 bp, Probe sequence
tgagtaccaaactgacaaacgtcac

SEQ ID NO: 83482 - DNA, 25 bp, Probe sequence
tcactggtgctgctcaaatggacgg

SEQ ID NO: 83483 - DNA, 25 bp, Probe sequence
taacagcagcaatcgctactgtatt

SEQ ID NO: 83484 - DNA, 25 bp, Probe sequence
tagtagtatctgctgctgacggtcc

SEQ ID NO: 83485 - DNA, 25 bp, Probe sequence
tatcacgtaacgttggtgtaccagc

SEQ ID NO: 83486 - DNA, 25 bp, Probe sequence
atgacttcccaggtgacgatgtacc

SEQ ID NO: 83487 - DNA, 25 bp, Probe sequence
attaagcgaatatgacttcccaggt

SEQ ID NO: 83488 - DNA, 25 bp, Probe sequence
attctcaatcactggtcgtggtact

SEQ ID NO: 83489 - DNA, 25 bp, Probe sequence
atgatgccagttgaggacgtattct

SEQ ID NO: 83490 - DNA, 25 bp, Probe sequence
aggccgtgttgaacgtggtcaaatc

SEQ ID NO: 83491 - DNA, 25 bp, Probe sequence
agaattaatggaagctgtagatact

SEQ ID NO: 83492 - DNA, 25 bp, Probe sequence
actgttgctacaggccgtgttgaac

SEQ ID NO: 83493 - DNA, 25 bp, Probe sequence
acttacattccaactccagaacgtg

SEQ ID NO: 83494 - DNA, 25 bp, Probe sequence
aaagctttagaaggcgatgctcaat

SEQ ID NO: 83495 - DNA, 25 bp, Probe sequence
aacaaagttgacatggttgacgatg

SEQ ID NO: 83496 - DNA, 25 bp, Probe sequence
aaccattcatgatgccagttgagga

SEQ ID NO: 83497 - DNA, 25 bp, Probe sequence
catcggtttacatgacacatctaaa

SEQ ID NO: 83498 - DNA, 25 bp, Probe sequence
cattccaactccagaacgtgattct

SEQ ID NO: 83499 - DNA, 25 bp, Probe sequence
gcgaatatgacttcccaggtgacga

SEQ ID NO: 83500 - DNA, 25 bp, Probe sequence
gctggttcagcattaaaagctttag

SEQ ID NO: 83501 - DNA, 25 bp, Probe sequence
gctacaggccgtgttgaacgtggtc

SEQ ID NO: 83502 - DNA, 25 bp, Probe sequence
gaaggcgatgctcaatacgaagaaa

SEQ ID NO: 83503 - DNA, 25 bp, Probe sequence
gaagaagttgaaatcatcggtttac

SEQ ID NO: 83504 - DNA, 25 bp, Probe sequence
gaacgtggtcaaatcaaagttggtg

SEQ ID NO: 83505 - DNA, 25 bp, Probe sequence
gaacgtgattctgacaaaccattca

SEQ ID NO: 83506 - DNA, 25 bp, Probe sequence
gacaaaccattcatgatgccagttg

SEQ ID NO: 83507 - DNA, 25 bp, Probe sequence
gacgtattctcaatcactggtcgtg

SEQ ID NO: 83508 - DNA, 25 bp, Probe sequence
gaggacgtattctcaatcactggtc

SEQ ID NO: 83509 - DNA, 25 bp, Probe sequence
gatgtacctgtaatcgctggttcag

SEQ ID NO: 83510 - DNA, 25 bp, Probe sequence
gatacttacattccaactccagaac

SEQ ID NO: 83511 - DNA, 25 bp, Probe sequence
gttacaggtgttgaaatgttccgta

SEQ ID NO: 83512 - DNA, 25 bp, Probe sequence
gtagatacttacattccaactccag

SEQ ID NO: 83513 - DNA, 25 bp, Probe sequence
gtacctgtaatcgctggttcagcat

SEQ ID NO: 83514 - DNA, 25 bp, Probe sequence
gtcgtggtactgttgctacaggccg

SEQ ID NO: 83515 - DNA, 25 bp, Probe sequence
ggtgacgatgtacctgtaatcgctg

SEQ ID NO: 83516 - DNA, 25 bp, Probe sequence
ggttgacgatgaagaattattagaa

SEQ ID NO: 83517 - DNA, 25 bp, Probe sequence
tggaagttcgtgacttattaagcga

SEQ ID NO: 83518 - DNA, 25 bp, Probe sequence
tgacacatctaaaacaactgttaca

SEQ ID NO: 83519 - DNA, 25 bp, Probe sequence
tcactggtcgtggtactgttgctac

SEQ ID NO: 83520 - DNA, 25 bp, Probe sequence
attgggtagtgtactagcaatcaaa

SEQ ID NO: 83521 - DNA, 25 bp, Probe sequence
attattttattgggtagtgtactag

SEQ ID NO: 83522 - DNA, 25 bp, Probe sequence
atttaaacgtgttatgcaagatcgt

SEQ ID NO: 83523 - DNA, 25 bp, Probe sequence
atcatcattattttattgggtagtg

SEQ ID NO: 83524 - DNA, 25 bp, Probe sequence
atcattattttattgggtagtgtac

SEQ ID NO: 83525 - DNA, 25 bp, Probe sequence
agtgtactagcaatcaaagtagatt

SEQ ID NO: 83526 - DNA, 25 bp, Probe sequence
agattggaaaaaagtgttcacaggt

SEQ ID NO: 83527 - DNA, 25 bp, Probe sequence
agcgatttaaacgtgttatgcaaga

SEQ ID NO: 83528 - DNA, 25 bp, Probe sequence
accatcatcattattttattgggta

SEQ ID NO: 83529 - DNA, 25 bp, Probe sequence
acgaagcgatttaaacgtgttatgc

SEQ ID NO: 83530 - DNA, 25 bp, Probe sequence
aagcgatttaaacgtgttatgcaag

SEQ ID NO: 83531 - DNA, 25 bp, Probe sequence
aagtgttcacaggtaaaattagaca

SEQ ID NO: 83532 - DNA, 25 bp, Probe sequence
catcattattttattgggtagtgta

SEQ ID NO: 83533 - DNA, 25 bp, Probe sequence
catcatcattattttattgggtagt

SEQ ID NO: 83534 - DNA, 25 bp, Probe sequence
cattattttattgggtagtgtacta

SEQ ID NO: 83535 - DNA, 25 bp, Probe sequence
ctacgaagcgatttaaacgtgttat

SEQ ID NO: 83536 - DNA, 25 bp, Probe sequence
cgaagcgatttaaacgtgttatgca

SEQ ID NO: 83537 - DNA, 25 bp, Probe sequence
gcgatttaaacgtgttatgcaagat

SEQ ID NO: 83538 - DNA, 25 bp, Probe sequence
gaagcgatttaaacgtgttatgcaa

SEQ ID NO: 83539 - DNA, 25 bp, Probe sequence
gtagtgtactagcaatcaaagtaga

SEQ ID NO: 83540 - DNA, 25 bp, Probe sequence
gggtagtgtactagcaatcaaagta

SEQ ID NO: 83541 - DNA, 25 bp, Probe sequence
ggtagtgtactagcaatcaaagtag

SEQ ID NO: 83542 - DNA, 25 bp, Probe sequence
ggaggggacaagatgaaagagaatg

SEQ ID NO: 83543 - DNA, 25 bp, Probe sequence
tgggtagtgtactagcaatcaaagt

SEQ ID NO: 83544 - DNA, 25 bp, Probe sequence
tcattattttattgggtagtgtact

SEQ ID NO: 83545 - DNA, 25 bp, Probe sequence
tcatcattattttattgggtagtgt

SEQ ID NO: 83546 - DNA, 25 bp, Probe sequence
tacgaagcgatttaaacgtgttatg

SEQ ID NO: 83547 - DNA, 25 bp, Probe sequence
taggtatttacacattattaaatta

SEQ ID NO: 83548 - DNA, 25 bp, Probe sequence
tattttattgggtagtgtactagca

SEQ ID NO: 83549 - DNA, 25 bp, Probe sequence
tattgggtagtgtactagcaatcaa

SEQ ID NO: 83550 - DNA, 25 bp, Probe sequence
tttattgggtagtgtactagcaatc

SEQ ID NO: 83551 - DNA, 25 bp, Probe sequence
ttattgggtagtgtactagcaatca

SEQ ID NO: 83552 - DNA, 25 bp, Probe sequence
ttaaacgtgttatgcaagatcgttt

SEQ ID NO: 83553 - DNA, 25 bp, Probe sequence
ttgggtagtgtactagcaatcaaag

SEQ ID NO: 83554 - DNA, 25 bp, Probe sequence
attaatggtgctagtacctgtaatc

SEQ ID NO: 83555 - DNA, 25 bp, Probe sequence
atgtttcgcaatggcatggatttaa

SEQ ID NO: 83556 - DNA, 25 bp, Probe sequence
atggtgctagtacctgtaatctttt

SEQ ID NO: 83557 - DNA, 25 bp, Probe sequence
atggatttaacataccgcttctttt

SEQ ID NO: 83558 - DNA, 25 bp, Probe sequence
atggcatggatttaacataccgctt

SEQ ID NO: 83559 - DNA, 25 bp, Probe sequence
accacatgtttcgcaatggcatgga

SEQ ID NO: 83560 - DNA, 25 bp, Probe sequence
aaaatatccacgaaccatggttgtt

SEQ ID NO: 83561 - DNA, 25 bp, Probe sequence
aacaccaacaagacgcaatagcatc

SEQ ID NO: 83562 - DNA, 25 bp, Probe sequence
aagacgcaatagcatctatttatgt

SEQ ID NO: 83563 - DNA, 25 bp, Probe sequence
aatatccacgaaccatggttgttta

SEQ ID NO: 83564 - DNA, 25 bp, Probe sequence
caatagcatctatttatgtatttgt

SEQ ID NO: 83565 - DNA, 25 bp, Probe sequence
caacaccaacaagacgcaatagcat

SEQ ID NO: 83566 - DNA, 25 bp, Probe sequence
caacaagacgcaatagcatctattt

SEQ ID NO: 83567 - DNA, 25 bp, Probe sequence
cacatgtttcgcaatggcatggatt

SEQ ID NO: 83568 - DNA, 25 bp, Probe sequence
caccaacaagacgcaatagcatcta

SEQ ID NO: 83569 - DNA, 25 bp, Probe sequence
gctcaacaccaacaagacgcaatag

SEQ ID NO: 83570 - DNA, 25 bp, Probe sequence
gcatggatttaacataccgcttctt

SEQ ID NO: 83571 - DNA, 25 bp, Probe sequence
gatatgctcaacaccaacaagacgc

SEQ ID NO: 83572 - DNA, 25 bp, Probe sequence
gtttcgcaatggcatggatttaaca

SEQ ID NO: 83573 - DNA, 25 bp, Probe sequence
ggtgctagtacctgtaatctttttt

SEQ ID NO: 83574 - DNA, 25 bp, Probe sequence
ggatatgctcaacaccaacaagacg

SEQ ID NO: 83575 - DNA, 25 bp, Probe sequence
ggcatggatttaacataccgcttct

SEQ ID NO: 83576 - DNA, 25 bp, Probe sequence
tggatttaacataccgcttctttta

SEQ ID NO: 83577 - DNA, 25 bp, Probe sequence
tgtatcaggtggtaatcatcaaatt

SEQ ID NO: 83578 - DNA, 25 bp, Probe sequence
tgctagtacctgtaatcttttttgt

SEQ ID NO: 83579 - DNA, 25 bp, Probe sequence
tccacgaaccatggttgtttagttt

SEQ ID NO: 83580 - DNA, 25 bp, Probe sequence
tcccaatttagtttgatttcaatga

SEQ ID NO: 83581 - DNA, 25 bp, Probe sequence
tctcttatattaatggtgctagtac

SEQ ID NO: 83582 - DNA, 25 bp, Probe sequence
tcaggtggtaatcatcaaattgatc

SEQ ID NO: 83583 - DNA, 25 bp, Probe sequence
taatggtgctagtacctgtaatctt

SEQ ID NO: 83584 - DNA, 25 bp, Probe sequence
tatccacgaaccatggttgtttagt

SEQ ID NO: 83585 - DNA, 25 bp, Probe sequence
tagatcatgaagcaggttcaaggga

SEQ ID NO: 83586 - DNA, 25 bp, Probe sequence
tatatttgggaaggggattatcgtt

SEQ ID NO: 83587 - DNA, 25 bp, Probe sequence
tatgctcaacaccaacaagacgcaa

SEQ ID NO: 83588 - DNA, 25 bp, Probe sequence
attactcggtttaccttatgatgaa

SEQ ID NO: 83589 - DNA, 25 bp, Probe sequence
atttcatttgcaaacttctcaacga

SEQ ID NO: 83590 - DNA, 25 bp, Probe sequence
atttgcgctattactcggtttacct

SEQ ID NO: 83591 - DNA, 25 bp, Probe sequence
atccatttgcgctattactcggttt

SEQ ID NO: 83592 - DNA, 25 bp, Probe sequence
atgatgaagcgtggttggtagcaca

SEQ ID NO: 83593 - DNA, 25 bp, Probe sequence
accacaccatcgtgcggttattaca

SEQ ID NO: 83594 - DNA, 25 bp, Probe sequence
acagcagctttcgttggtttatttg

SEQ ID NO: 83595 - DNA, 25 bp, Probe sequence
aaatgaatttgttgttatgggtgaa

SEQ ID NO: 83596 - DNA, 25 bp, Probe sequence
aagacatcagactttgtatctaaat

SEQ ID NO: 83597 - DNA, 25 bp, Probe sequence
cagctttcgttggtttatttgcatg

SEQ ID NO: 83598 - DNA, 25 bp, Probe sequence
catttgcaaacttctcaacgattgg

SEQ ID NO: 83599 - DNA, 25 bp, Probe sequence
ccatcgtgcggttattacaacattc

SEQ ID NO: 83600 - DNA, 25 bp, Probe sequence
gcgctattactcggtttaccttatg

SEQ ID NO: 83601 - DNA, 25 bp, Probe sequence
gcaaacttctcaacgattggtatga

SEQ ID NO: 83602 - DNA, 25 bp, Probe sequence
gataggcataaaaggtagtttcggt

SEQ ID NO: 83603 - DNA, 25 bp, Probe sequence
gaagcgtggttggtagcacaacaaa

SEQ ID NO: 83604 - DNA, 25 bp, Probe sequence
gatattgcatcttatacaccacacc

SEQ ID NO: 83605 - DNA, 25 bp, Probe sequence
gattggtatgattatcggtacattg

SEQ ID NO: 83606 - DNA, 25 bp, Probe sequence
gtatccatttgcgctattactcggt

SEQ ID NO: 83607 - DNA, 25 bp, Probe sequence
gtatgattatcggtacattgaaagg

SEQ ID NO: 83608 - DNA, 25 bp, Probe sequence
gtgtttatgtatccatttgcgctat

SEQ ID NO: 83609 - DNA, 25 bp, Probe sequence
ggtgtgtttatgtatccatttgcgc

SEQ ID NO: 83610 - DNA, 25 bp, Probe sequence
ggttggtagcacaacaaatggctaa

SEQ ID NO: 83611 - DNA, 25 bp, Probe sequence
tgttgttatgggtgaaatttctaaa

SEQ ID NO: 83612 - DNA, 25 bp, Probe sequence
tgatgctattatcaggtatcctagt

SEQ ID NO: 83613 - DNA, 25 bp, Probe sequence
tcgtgcggttattacaacattctta

SEQ ID NO: 83614 - DNA, 25 bp, Probe sequence
tcattattaacagcagctttcgttg

SEQ ID NO: 83615 - DNA, 25 bp, Probe sequence
tacaacattcttaatttcatttgca

SEQ ID NO: 83616 - DNA, 25 bp, Probe sequence
tatgtatccatttgcgctattactc

SEQ ID NO: 83617 - DNA, 25 bp, Probe sequence
tatacaccacaccatcgtgcggtta

SEQ ID NO: 83618 - DNA, 25 bp, Probe sequence
tttcgttggtttatttgcatggtaa

SEQ ID NO: 83619 - DNA, 25 bp, Probe sequence
ttttaggtgtgtttatgtatccatt

SEQ ID NO: 83620 - DNA, 25 bp, Probe sequence
ttgcgctattactcggtttacctta

SEQ ID NO: 83621 - DNA, 25 bp, Probe sequence
ttaacagcagctttcgttggtttat

SEQ ID NO: 83622 - DNA, 25 bp, Probe sequence
cttgggtagttcagtcagcgcatgc

SEQ ID NO: 83623 - DNA, 25 bp, Probe sequence
attggtctaattgtatttcttggta

SEQ ID NO: 83624 - DNA, 25 bp, Probe sequence
attaatcaacattattggtctaatt

SEQ ID NO: 83625 - DNA, 25 bp, Probe sequence
atagtgccattatttgatatcttaa

SEQ ID NO: 83626 - DNA, 25 bp, Probe sequence
atggctgttgcagccttattcccaa

SEQ ID NO: 83627 - DNA, 25 bp, Probe sequence
atggtatcgcttgggtagttcagtc

SEQ ID NO: 83628 - DNA, 25 bp, Probe sequence
agcatggttctttatttattttgat

SEQ ID NO: 83629 - DNA, 25 bp, Probe sequence
agcgcatgctggtacaggttttgca

SEQ ID NO: 83630 - DNA, 25 bp, Probe sequence
actagctaaagtaacaagacaacct

SEQ ID NO: 83631 - DNA, 25 bp, Probe sequence
aaatgatggatatggctgttgcagc

SEQ ID NO: 83632 - DNA, 25 bp, Probe sequence
aaagcagtaagaggagcagccaatg

SEQ ID NO: 83633 - DNA, 25 bp, Probe sequence
cagtcagcgcatgctggtacaggtt

SEQ ID NO: 83634 - DNA, 25 bp, Probe sequence
cggtattattttcaagagatcgcaa

SEQ ID NO: 83635 - DNA, 25 bp, Probe sequence
cctgtttttagcatggttctttatt

SEQ ID NO: 83636 - DNA, 25 bp, Probe sequence
gctggtacaggttttgcatttgcaa

SEQ ID NO: 83637 - DNA, 25 bp, Probe sequence
gcagccaatggtatcgcttgggtag

SEQ ID NO: 83638 - DNA, 25 bp, Probe sequence
gagcagccaatggtatcgcttgggt

SEQ ID NO: 83639 - DNA, 25 bp, Probe sequence
gagatcgcaaaaatatccaatggca

SEQ ID NO: 83640 - DNA, 25 bp, Probe sequence
gaggagcagccaatggtatcgcttg

SEQ ID NO: 83641 - DNA, 25 bp, Probe sequence
gatatggctgttgcagccttattcc

SEQ ID NO: 83642 - DNA, 25 bp, Probe sequence
gatatcttaatgtactttaatattt

SEQ ID NO: 83643 - DNA, 25 bp, Probe sequence
gttcagtcagcgcatgctggtacag

SEQ ID NO: 83644 - DNA, 25 bp, Probe sequence
gtattggttggttactagctaaagt

SEQ ID NO: 83645 - DNA, 25 bp, Probe sequence
gtatttcttggtattgcggtattat

SEQ ID NO: 83646 - DNA, 25 bp, Probe sequence
ggtatcgcttgggtagttcagtcag

SEQ ID NO: 83647 - DNA, 25 bp, Probe sequence
ggtagttcagtcagcgcatgctggt

SEQ ID NO: 83648 - DNA, 25 bp, Probe sequence
ggtattgcggtattattttcaagag

SEQ ID NO: 83649 - DNA, 25 bp, Probe sequence
ggttttgcatttgcaagtttgacaa

SEQ ID NO: 83650 - DNA, 25 bp, Probe sequence
ggaggtattggttggttactagcta

SEQ ID NO: 83651 - DNA, 25 bp, Probe sequence
ggcaatcaattgggatcttagttgt

SEQ ID NO: 83652 - DNA, 25 bp, Probe sequence
tgggatcttagttgttttaaacctg

SEQ ID NO: 83653 - DNA, 25 bp, Probe sequence
taaacctgtttttagcatggttctt

SEQ ID NO: 83654 - DNA, 25 bp, Probe sequence
ttagcatggttctttatttattttg

SEQ ID NO: 83655 - DNA, 25 bp, Probe sequence
ttcttggtattgcggtattattttc

SEQ ID NO: 83656 - DNA, 25 bp, Probe sequence
attgtgtcatgcttgttgaatccag

SEQ ID NO: 83657 - DNA, 25 bp, Probe sequence
attccactaaatatcgttaacgcga

SEQ ID NO: 83658 - DNA, 25 bp, Probe sequence
attaatcatcatcgcatttgttatt

SEQ ID NO: 83659 - DNA, 25 bp, Probe sequence
attagccgtatcaagtgagcaacta

SEQ ID NO: 83660 - DNA, 25 bp, Probe sequence
atcgcaatgatgtcaatgagctctg

SEQ ID NO: 83661 - DNA, 25 bp, Probe sequence
acgcgattattgtgtcatgcttgtt

SEQ ID NO: 83662 - DNA, 25 bp, Probe sequence
aaccattcttctcattccttggaga

SEQ ID NO: 83663 - DNA, 25 bp, Probe sequence
gaactggtactaacggcaattccac

SEQ ID NO: 83664 - DNA, 25 bp, Probe sequence
aattagtattaatcatcatcgcatt

SEQ ID NO: 83665 - DNA, 25 bp, Probe sequence
caatgatgtcaatgagctctgtatc

SEQ ID NO: 83666 - DNA, 25 bp, Probe sequence
ctaacggcaattccactaaatatcg

SEQ ID NO: 83667 - DNA, 25 bp, Probe sequence
caggagaactggtactaacggcaat

SEQ ID NO: 83668 - DNA, 25 bp, Probe sequence
cattcttctcattccttggagattc

SEQ ID NO: 83669 - DNA, 25 bp, Probe sequence
cattccttggagattctgtattagc

SEQ ID NO: 83670 - DNA, 25 bp, Probe sequence
gcgtgtattaacaatcgcaatgatg

SEQ ID NO: 83671 - DNA, 25 bp, Probe sequence
gaagcattagccgtatcaagtgagc

SEQ ID NO: 83672 - DNA, 25 bp, Probe sequence
gatctatttgatcgttttatcaatt

SEQ ID NO: 83673 - DNA, 25 bp, Probe sequence
gatattatttacagtcttaaaaaca

SEQ ID NO: 83674 - DNA, 25 bp, Probe sequence
gttgaatccagtaagtgttgaagag

SEQ ID NO: 83675 - DNA, 25 bp, Probe sequence
gttaacgcgattattgtgtcatgct

SEQ ID NO: 83676 - DNA, 25 bp, Probe sequence
gtattagcagcaggtaaattagtat

SEQ ID NO: 83677 - DNA, 25 bp, Probe sequence
gtatgaatgaaatgcgtgtattaac

SEQ ID NO: 83678 - DNA, 25 bp, Probe sequence
gtaggtgcgtatgtacaaatggtac

SEQ ID NO: 83679 - DNA, 25 bp, Probe sequence
gtacaaatggtaccaggagaactgg

SEQ ID NO: 83680 - DNA, 25 bp, Probe sequence
gtgagcaactaaaacgtatgaatga

SEQ ID NO: 83681 - DNA, 25 bp, Probe sequence
gtgtcatgcttgttgaatccagtaa

SEQ ID NO: 83682 - DNA, 25 bp, Probe sequence
ggtactaacggcaattccactaaat

SEQ ID NO: 83683 - DNA, 25 bp, Probe sequence
ggagattctgtattagcagcaggta

SEQ ID NO: 83684 - DNA, 25 bp, Probe sequence
ggagctattgtaggtgcgtatgtac

SEQ ID NO: 83685 - DNA, 25 bp, Probe sequence
ggcaattccactaaatatcgttaac

SEQ ID NO: 83686 - DNA, 25 bp, Probe sequence
tcttctcattccttggagattctgt

SEQ ID NO: 83687 - DNA, 25 bp, Probe sequence
taggaaatactgaagcattagccgt

SEQ ID NO: 83688 - DNA, 25 bp, Probe sequence
ttagctgatctatttgatcgtttta

SEQ ID NO: 83689 - DNA, 25 bp, Probe sequence
ttgaacgtcaaccattcttctcatt

SEQ ID NO: 83690 - DNA, 25 bp, Probe sequence
attatatctatccttgttgctgctg

SEQ ID NO: 83691 - DNA, 25 bp, Probe sequence
atcctggtcatatcaaggtgacagt

SEQ ID NO: 83692 - DNA, 25 bp, Probe sequence
aggtgacagttgttcgagagactag

SEQ ID NO: 83693 - DNA, 25 bp, Probe sequence
agctgctgagctaggcgaagatgag

SEQ ID NO: 83694 - DNA, 25 bp, Probe sequence
acctacatctattatatctatcctt

SEQ ID NO: 83695 - DNA, 25 bp, Probe sequence
acaatatcctggtcatatcaaggtg

SEQ ID NO: 83696 - DNA, 25 bp, Probe sequence
aaatcttatcgattggctagagata

SEQ ID NO: 83697 - DNA, 25 bp, Probe sequence
aaagcatttgcgattcaggcaggta

SEQ ID NO: 83698 - DNA, 25 bp, Probe sequence
aagatgagacattagcgaaacgagc

SEQ ID NO: 83699 - DNA, 25 bp, Probe sequence
aagatgaattacaatatcctggtca

SEQ ID NO: 83700 - DNA, 25 bp, Probe sequence
cagttattaatgcaatccattctca

SEQ ID NO: 83701 - DNA, 25 bp, Probe sequence
catggtgatgttgaacctacatcta

SEQ ID NO: 83702 - DNA, 25 bp, Probe sequence
ctatccttgttgctgctgcagatgc

SEQ ID NO: 83703 - DNA, 25 bp, Probe sequence
cggctcgtccaggtgcaagaaaaga

SEQ ID NO: 83704 - DNA, 25 bp, Probe sequence
gcgaaacgagctggacttttacatg

SEQ ID NO: 83705 - DNA, 25 bp, Probe sequence
gcatttgcgattcaggcaggtagag

SEQ ID NO: 83706 - DNA, 25 bp, Probe sequence
gcagatgcattgtctgcggctcgtc

SEQ ID NO: 83707 - DNA, 25 bp, Probe sequence
gaagtagaaggtagtcatgttgaaa

SEQ ID NO: 83708 - DNA, 25 bp, Probe sequence
gaaacagttattaatgcaatccatt

SEQ ID NO: 83709 - DNA, 25 bp, Probe sequence
gaaatccgagtgattgtatctcctg

SEQ ID NO: 83710 - DNA, 25 bp, Probe sequence
gagctggacttttacatgatgttgg

SEQ ID NO: 83711 - DNA, 25 bp, Probe sequence
gagactagagcagtagaatatgcga

SEQ ID NO: 83712 - DNA, 25 bp, Probe sequence
gagaattatattcgtcgattagaac

SEQ ID NO: 83713 - DNA, 25 bp, Probe sequence
gatgttggtaaagcaattgatcatg

SEQ ID NO: 83714 - DNA, 25 bp, Probe sequence
gattgtatctcctgaagaaattgat

SEQ ID NO: 83715 - DNA, 25 bp, Probe sequence
gttgttcgagagactagagcagtag

SEQ ID NO: 83716 - DNA, 25 bp, Probe sequence
gttgctgctgcagatgcattgtctg

SEQ ID NO: 83717 - DNA, 25 bp, Probe sequence
gttgaacctacatctattatatcta

SEQ ID NO: 83718 - DNA, 25 bp, Probe sequence
ggtagtcatgttgaaatcggtgtag

SEQ ID NO: 83719 - DNA, 25 bp, Probe sequence
ggcaggtagagaaatccgagtgatt

SEQ ID NO: 83720 - DNA, 25 bp, Probe sequence
tgagctaggcgaagatgagacatta

SEQ ID NO: 83721 - DNA, 25 bp, Probe sequence
tccgagtgattgtatctcctgaaga

SEQ ID NO: 83722 - DNA, 25 bp, Probe sequence
tatgttagctgctgagctaggcgaa

SEQ ID NO: 83723 - DNA, 25 bp, Probe sequence
tattcgtcgattagaacgtttagaa

SEQ ID NO: 83724 - DNA, 25 bp, Probe sequence
atttattaagcctcctactcatttt

SEQ ID NO: 83725 - DNA, 25 bp, Probe sequence
atctccggtctcactcaagaagaag

SEQ ID NO: 83726 - DNA, 25 bp, Probe sequence
agaattagaacgcatctccggtctc

SEQ ID NO: 83727 - DNA, 25 bp, Probe sequence
agctagacaaactgccgaagatatt

SEQ ID NO: 83728 - DNA, 25 bp, Probe sequence
actgtcacaagatattgcagtactt

SEQ ID NO: 83729 - DNA, 25 bp, Probe sequence
aaccaaatcctaagagaacaaactg

SEQ ID NO: 83730 - DNA, 25 bp, Probe sequence
aagctattaatgagcaacttcaaag

SEQ ID NO: 83731 - DNA, 25 bp, Probe sequence
aatcaagcacataaagaagctgaca

SEQ ID NO: 83732 - DNA, 25 bp, Probe sequence
ctcattttgctggggatcattctag

SEQ ID NO: 83733 - DNA, 25 bp, Probe sequence
ctccggtctcactcaagaagaagct

SEQ ID NO: 83734 - DNA, 25 bp, Probe sequence
cctactcattttgctggggatcatt

SEQ ID NO: 83735 - DNA, 25 bp, Probe sequence
cctcctactcattttgctggggatc

SEQ ID NO: 83736 - DNA, 25 bp, Probe sequence
gcccgaaatttgttgcttcaaaagc

SEQ ID NO: 83737 - DNA, 25 bp, Probe sequence
gccgaagatattgtaaatcaagcac

SEQ ID NO: 83738 - DNA, 25 bp, Probe sequence
gctggggatcattctaggagttgtt

SEQ ID NO: 83739 - DNA, 25 bp, Probe sequence
gaatttattaagcctcctactcatt

SEQ ID NO: 83740 - DNA, 25 bp, Probe sequence
gaaaaacaacaacaagtagatgcaa

SEQ ID NO: 83741 - DNA, 25 bp, Probe sequence
gagaacaaactgaagcagaactacg

SEQ ID NO: 83742 - DNA, 25 bp, Probe sequence
gagagtagtgttcaaacgttaataa

SEQ ID NO: 83743 - DNA, 25 bp, Probe sequence
gttggagggtatgttgttgcccgaa

SEQ ID NO: 83744 - DNA, 25 bp, Probe sequence
gttgttgcccgaaatttgttgcttc

SEQ ID NO: 83745 - DNA, 25 bp, Probe sequence
gtagatgcaaaagagagtagtgttc

SEQ ID NO: 83746 - DNA, 25 bp, Probe sequence
gtgaatttattaagcctcctactca

SEQ ID NO: 83747 - DNA, 25 bp, Probe sequence
ggtctcactcaagaagaagctatta

SEQ ID NO: 83748 - DNA, 25 bp, Probe sequence
ggtatgttgttgcccgaaatttgtt

SEQ ID NO: 83749 - DNA, 25 bp, Probe sequence
ggatcattctaggagttgttggagg

SEQ ID NO: 83750 - DNA, 25 bp, Probe sequence
ggagttgttggagggtatgttgttg

SEQ ID NO: 83751 - DNA, 25 bp, Probe sequence
ggaagaactgtcacaagatattgca

SEQ ID NO: 83752 - DNA, 25 bp, Probe sequence
tgttgcccgaaatttgttgcttcaa

SEQ ID NO: 83753 - DNA, 25 bp, Probe sequence
tgcttcaaaagcaatcacaagctag

SEQ ID NO: 83754 - DNA, 25 bp, Probe sequence
tcaaagacaagaaacccgacttctt

SEQ ID NO: 83755 - DNA, 25 bp, Probe sequence
tcacaagctagacaaactgccgaag

SEQ ID NO: 83756 - DNA, 25 bp, Probe sequence
tattaagcctcctactcattttgct

SEQ ID NO: 83757 - DNA, 25 bp, Probe sequence
ttttgctggggatcattctaggagt

SEQ ID NO: 83758 - DNA, 25 bp, Probe sequence
atcacacaagtgaatcaacggtatc

SEQ ID NO: 83759 - DNA, 25 bp, Probe sequence
atctggttttgatccaataagaaga

SEQ ID NO: 83760 - DNA, 25 bp, Probe sequence
agaattattagctacagcagtacaa

SEQ ID NO: 83761 - DNA, 25 bp, Probe sequence
agctacatttgaagtgaacgcacat

SEQ ID NO: 83762 - DNA, 25 bp, Probe sequence
acataatatgcatcctgacttagta

SEQ ID NO: 83763 - DNA, 25 bp, Probe sequence
acattcaattgaagttgcgcatctt

SEQ ID NO: 83764 - DNA, 25 bp, Probe sequence
acagcacttgttaacttagtatctg

SEQ ID NO: 83765 - DNA, 25 bp, Probe sequence
acagcagtacaaagattagcagcag

SEQ ID NO: 83766 - DNA, 25 bp, Probe sequence
acacttgaaactttaactggcattg

SEQ ID NO: 83767 - DNA, 25 bp, Probe sequence
aactggcattgatttaattattgat

SEQ ID NO: 83768 - DNA, 25 bp, Probe sequence
aatatgcatcctgacttagtaaaaa

SEQ ID NO: 83769 - DNA, 25 bp, Probe sequence
caattgaagttgcgcatcttgctag

SEQ ID NO: 83770 - DNA, 25 bp, Probe sequence
cagtagttaacttacctaatgatga

SEQ ID NO: 83771 - DNA, 25 bp, Probe sequence
cgcacataatatgcatcctgactta

SEQ ID NO: 83772 - DNA, 25 bp, Probe sequence
gctagaacagcacttgttaacttag

SEQ ID NO: 83773 - DNA, 25 bp, Probe sequence
gcaggtgaacaagctacatttgaag

SEQ ID NO: 83774 - DNA, 25 bp, Probe sequence
gcacttgttaacttagtatctgatg

SEQ ID NO: 83775 - DNA, 25 bp, Probe sequence
gaatcaacggtatcagtagttaact

SEQ ID NO: 83776 - DNA, 25 bp, Probe sequence
gaagatatggtcgaaaaagctagaa

SEQ ID NO: 83777 - DNA, 25 bp, Probe sequence
gaacgcacataatatgcatcctgac

SEQ ID NO: 83778 - DNA, 25 bp, Probe sequence
gagaagcaggtgaacaagctacatt

SEQ ID NO: 83779 - DNA, 25 bp, Probe sequence
gagaaattgctagaacagcacttgt

SEQ ID NO: 83780 - DNA, 25 bp, Probe sequence
gagatgaaaggtcgaatcattggac

SEQ ID NO: 83781 - DNA, 25 bp, Probe sequence
gattagcagcagatcacacaagtga

SEQ ID NO: 83782 - DNA, 25 bp, Probe sequence
gttaacttagtatctgatggacgta

SEQ ID NO: 83783 - DNA, 25 bp, Probe sequence
gttaacttacctaatgatgagatga

SEQ ID NO: 83784 - DNA, 25 bp, Probe sequence
gttatattatctggttttgatccaa

SEQ ID NO: 83785 - DNA, 25 bp, Probe sequence
gtatctgatggacgtattcatccag

SEQ ID NO: 83786 - DNA, 25 bp, Probe sequence
gtatcagtagttaacttacctaatg

SEQ ID NO: 83787 - DNA, 25 bp, Probe sequence
tgacttagtaaaaattgtagggcgt

SEQ ID NO: 83788 - DNA, 25 bp, Probe sequence
tgaaactttaactggcattgattta

SEQ ID NO: 83789 - DNA, 25 bp, Probe sequence
taattattgatgacacaccagaagc

SEQ ID NO: 83790 - DNA, 25 bp, Probe sequence
ttacggtcaaaatgtacttaaacat

SEQ ID NO: 83791 - DNA, 25 bp, Probe sequence
tattatctggttttgatccaataag

SEQ ID NO: 83792 - DNA, 25 bp, Probe sequence
atatgatcttttggtttgcattacc

SEQ ID NO: 83793 - DNA, 25 bp, Probe sequence
atgtcacattacattaccgtgatgg

SEQ ID NO: 83794 - DNA, 25 bp, Probe sequence
atggtagtgacattgcagatgcaac

SEQ ID NO: 83795 - DNA, 25 bp, Probe sequence
agtgcctggattgcgaaataacatt

SEQ ID NO: 83796 - DNA, 25 bp, Probe sequence
agtcaaatgaacgcaggcacgcagt

SEQ ID NO: 83797 - DNA, 25 bp, Probe sequence
accagttgtgaaacctgaataccaa

SEQ ID NO: 83798 - DNA, 25 bp, Probe sequence
accatataactgctacaaatgcgta

SEQ ID NO: 83799 - DNA, 25 bp, Probe sequence
attgcagatgcaactattacatggg

SEQ ID NO: 83800 - DNA, 25 bp, Probe sequence
acgacattgccgaatggttggacat

SEQ ID NO: 83801 - DNA, 25 bp, Probe sequence
actttagaacgactggttattcaca

SEQ ID NO: 83802 - DNA, 25 bp, Probe sequence
aaacgcgttcggttgagtcaagagc

SEQ ID NO: 83803 - DNA, 25 bp, Probe sequence
aaaagcaacaactacagtgcctgga

SEQ ID NO: 83804 - DNA, 25 bp, Probe sequence
aagtgtcagcgacagacaatgtcaa

SEQ ID NO: 83805 - DNA, 25 bp, Probe sequence
aatgccaatgtcacagtaactgtta

SEQ ID NO: 83806 - DNA, 25 bp, Probe sequence
aattacgcttgccgaaggtgatatt

SEQ ID NO: 83807 - DNA, 25 bp, Probe sequence
ctggagcgacacctgctactaaagc

SEQ ID NO: 83808 - DNA, 25 bp, Probe sequence
gcaaatactaatgcttttagaccgg

SEQ ID NO: 83809 - DNA, 25 bp, Probe sequence
gcgacacctgctactaaagcttttg

SEQ ID NO: 83810 - DNA, 25 bp, Probe sequence
gctaatgatggttcgggctatcctg

SEQ ID NO: 83811 - DNA, 25 bp, Probe sequence
gcaggcacgcagttataccatataa

SEQ ID NO: 83812 - DNA, 25 bp, Probe sequence
gaataccaaactgtcaatgctgcta

SEQ ID NO: 83813 - DNA, 25 bp, Probe sequence
gaagctggcggaagacctaacttta

SEQ ID NO: 83814 - DNA, 25 bp, Probe sequence
gagaacgcaatattgaacttgttgg

SEQ ID NO: 83815 - DNA, 25 bp, Probe sequence
gattcaagtgttagacatcatcaac

SEQ ID NO: 83816 - DNA, 25 bp, Probe sequence
gtcaacagactagccgacgttcaaa

SEQ ID NO: 83817 - DNA, 25 bp, Probe sequence
ggacaacctattccaagtggcacat

SEQ ID NO: 83818 - DNA, 25 bp, Probe sequence
tggagacgggtaccaatgggttatt

SEQ ID NO: 83819 - DNA, 25 bp, Probe sequence
tgatgctacattaggtactcaaatt

SEQ ID NO: 83820 - DNA, 25 bp, Probe sequence
taatggctcattatctattacaggt

SEQ ID NO: 83821 - DNA, 25 bp, Probe sequence
tacaagcggcaatacagctacaact

SEQ ID NO: 83822 - DNA, 25 bp, Probe sequence
taccgtgatggctcatcgacaacgc

SEQ ID NO: 83823 - DNA, 25 bp, Probe sequence
tagaccgggtggagcccaacaatta

SEQ ID NO: 83824 - DNA, 25 bp, Probe sequence
tagacctaataatgccagagaacgc

SEQ ID NO: 83825 - DNA, 25 bp, Probe sequence
ttcgggctatcctgttggtacatat

SEQ ID NO: 83826 - DNA, 25 bp, Probe sequence
attgacgcaaactctgtgacatata

SEQ ID NO: 83827 - DNA, 25 bp, Probe sequence
agtgcaatctgcgttaacaaatgta

SEQ ID NO: 83828 - DNA, 25 bp, Probe sequence
agcacgtaatggcttaacagtcgat

SEQ ID NO: 83829 - DNA, 25 bp, Probe sequence
agccggcaagtattactgcttacaa

SEQ ID NO: 83830 - DNA, 25 bp, Probe sequence
actgcagatacacatgccttagagc

SEQ ID NO: 83831 - DNA, 25 bp, Probe sequence
aaatattactcatggtagcggtttt

SEQ ID NO: 83832 - DNA, 25 bp, Probe sequence
aactgcagctcaacgtgttattgac

SEQ ID NO: 83833 - DNA, 25 bp, Probe sequence
aacgactggtaagaagccggcaagt

SEQ ID NO: 83834 - DNA, 25 bp, Probe sequence
aacgagttcctgttactgttaatgt

SEQ ID NO: 83835 - DNA, 25 bp, Probe sequence
aagcgaatactgcattaggtcattt

SEQ ID NO: 83836 - DNA, 25 bp, Probe sequence
cttaacagtcgataaagcgccttta

SEQ ID NO: 83837 - DNA, 25 bp, Probe sequence
cggttgtgacagtaagtgacgcgtt

SEQ ID NO: 83838 - DNA, 25 bp, Probe sequence
gcgaatgccgctaaatcagcacttg

SEQ ID NO: 83839 - DNA, 25 bp, Probe sequence
gcaggttcaccgactgtagaacaaa

SEQ ID NO: 83840 - DNA, 25 bp, Probe sequence
gaatgtggctaaagtcgttaacgca

SEQ ID NO: 83841 - DNA, 25 bp, Probe sequence
gaactgtaccgaaacatgtctttga

SEQ ID NO: 83842 - DNA, 25 bp, Probe sequence
gacaagcgcatctattgcagcattt

SEQ ID NO: 83843 - DNA, 25 bp, Probe sequence
gacaacggttggaggcactttagca

SEQ ID NO: 83844 - DNA, 25 bp, Probe sequence
gacagtgagtgatgagcaacgtagt

SEQ ID NO: 83845 - DNA, 25 bp, Probe sequence
gacgtcatctataacggacatactt

SEQ ID NO: 83846 - DNA, 25 bp, Probe sequence
gacgcaaactggtcagctatgaata

SEQ ID NO: 83847 - DNA, 25 bp, Probe sequence
gatgttgcgacaatacgtcaaaacg

SEQ ID NO: 83848 - DNA, 25 bp, Probe sequence
gtgacgtatacgacgcaagacgaac

SEQ ID NO: 83849 - DNA, 25 bp, Probe sequence
gtgacgcgttaccaaatggcggaat

SEQ ID NO: 83850 - DNA, 25 bp, Probe sequence
gtgatgcgactgaccaacaaattgc

SEQ ID NO: 83851 - DNA, 25 bp, Probe sequence
tcaaactacttatacgacaacggtt

SEQ ID NO: 83852 - DNA, 25 bp, Probe sequence
tgatcgtgtattagcctcacatcca

SEQ ID NO: 83853 - DNA, 25 bp, Probe sequence
taaacctgacccacctagaattgac

SEQ ID NO: 83854 - DNA, 25 bp, Probe sequence
tgcaacagtaacagtgacaccacaa

SEQ ID NO: 83855 - DNA, 25 bp, Probe sequence
tacacgtcgcaataatacgagtcca

SEQ ID NO: 83856 - DNA, 25 bp, Probe sequence
tagcggttttagttcggttgtgaca

SEQ ID NO: 83857 - DNA, 25 bp, Probe sequence
tagcctcacatccagatgttgcgac

SEQ ID NO: 83858 - DNA, 25 bp, Probe sequence
taggcatatctactcgtcttattag

SEQ ID NO: 83859 - DNA, 25 bp, Probe sequence
ttgacaatggcgatgcaactgcaca

SEQ ID NO: 83860 - DNA, 25 bp, Probe sequence
atacgcaaatgggtaacttggaaca

SEQ ID NO: 83861 - DNA, 25 bp, Probe sequence
atatcactacagctcaacgtaatga

SEQ ID NO: 83862 - DNA, 25 bp, Probe sequence
atatgttaatgccgatagcactaaa

SEQ ID NO: 83863 - DNA, 25 bp, Probe sequence
agagctgaagcaattctgaataaaa

SEQ ID NO: 83864 - DNA, 25 bp, Probe sequence
acagctcaacgtaatgatttaacaa

SEQ ID NO: 83865 - DNA, 25 bp, Probe sequence
aagctgtatcagcagccgaaaccat

SEQ ID NO: 83866 - DNA, 25 bp, Probe sequence
aagatgtacagcacaatgcgactga

SEQ ID NO: 83867 - DNA, 25 bp, Probe sequence
aagtgttaaatttactgatgcagat

SEQ ID NO: 83868 - DNA, 25 bp, Probe sequence
aatcaagctgtatcagcagccgaaa

SEQ ID NO: 83869 - DNA, 25 bp, Probe sequence
cttagctgctgcaaaacaaaatgcg

SEQ ID NO: 83870 - DNA, 25 bp, Probe sequence
gcggtaagcagagctgaagcaattc

SEQ ID NO: 83871 - DNA, 25 bp, Probe sequence
gctgtatctaatacgagtacacaat

SEQ ID NO: 83872 - DNA, 25 bp, Probe sequence
gctatggctagcttacagaatggta

SEQ ID NO: 83873 - DNA, 25 bp, Probe sequence
gcatatcactacagctcaacgtaat

SEQ ID NO: 83874 - DNA, 25 bp, Probe sequence
gcaactgagttgaatacgcaaatgg

SEQ ID NO: 83875 - DNA, 25 bp, Probe sequence
gaagcagcattacaacgtgttaata

SEQ ID NO: 83876 - DNA, 25 bp, Probe sequence
gaagctgtatctaatacgagtacac

SEQ ID NO: 83877 - DNA, 25 bp, Probe sequence
gaacacggcaatgggcacattaaaa

SEQ ID NO: 83878 - DNA, 25 bp, Probe sequence
gatgaaaacttagctgctgcaaaac

SEQ ID NO: 83879 - DNA, 25 bp, Probe sequence
gataaaacaaatacactagcaagtg

SEQ ID NO: 83880 - DNA, 25 bp, Probe sequence
gttgaatctgttaaacaaaatgcga

SEQ ID NO: 83881 - DNA, 25 bp, Probe sequence
gtaaatatgttaatgccgatagcac

SEQ ID NO: 83882 - DNA, 25 bp, Probe sequence
gtaactgctactaaaaatgcagcaa

SEQ ID NO: 83883 - DNA, 25 bp, Probe sequence
gtgaggtaactgctactaaaaatgc

SEQ ID NO: 83884 - DNA, 25 bp, Probe sequence
ggtgttgaagctgtatctaatacga

SEQ ID NO: 83885 - DNA, 25 bp, Probe sequence
ggcacattaaaacatgccatcgcag

SEQ ID NO: 83886 - DNA, 25 bp, Probe sequence
tggctagcttacagaatggtattaa

SEQ ID NO: 83887 - DNA, 25 bp, Probe sequence
tgtacagcacaatgcgactgaactg

SEQ ID NO: 83888 - DNA, 25 bp, Probe sequence
tgtcgctggtgttcaaacggttcaa

SEQ ID NO: 83889 - DNA, 25 bp, Probe sequence
tgtgagtgaggtaactgctactaaa

SEQ ID NO: 83890 - DNA, 25 bp, Probe sequence
tgtatcagcagccgaaaccatttta

SEQ ID NO: 83891 - DNA, 25 bp, Probe sequence
tgcacaagatgtacagcacaatgcg

SEQ ID NO: 83892 - DNA, 25 bp, Probe sequence
tcgctggtgttcaaacggttcaatc

SEQ ID NO: 83893 - DNA, 25 bp, Probe sequence
tcactacagctcaacgtaatgattt

SEQ ID NO: 83894 - DNA, 25 bp, Probe sequence
atcagctatagcaaataaagatcaa

SEQ ID NO: 83895 - DNA, 25 bp, Probe sequence
atgccggtactttagatcaagcaat

SEQ ID NO: 83896 - DNA, 25 bp, Probe sequence
atggtgacgagcgattaaatgaagc

SEQ ID NO: 83897 - DNA, 25 bp, Probe sequence
agcaaaagagtcagcgaaacgtgca

SEQ ID NO: 83898 - DNA, 25 bp, Probe sequence
agcagcactaaaccaattgaatcaa

SEQ ID NO: 83899 - DNA, 25 bp, Probe sequence
acgattacaatcagctatagcaaat

SEQ ID NO: 83900 - DNA, 25 bp, Probe sequence
acatcgcaaatcgaaagtggtacga

SEQ ID NO: 83901 - DNA, 25 bp, Probe sequence
acaagttcaagcagcactaaaccaa

SEQ ID NO: 83902 - DNA, 25 bp, Probe sequence
aaatggtgacgagcgattaaatgaa

SEQ ID NO: 83903 - DNA, 25 bp, Probe sequence
aaaagagtcagcgaaacgtgcatta

SEQ ID NO: 83904 - DNA, 25 bp, Probe sequence
aagcagcactaaaccaattgaatca

SEQ ID NO: 83905 - DNA, 25 bp, Probe sequence
aagcaaaagagtcagcgaaacgtgc

SEQ ID NO: 83906 - DNA, 25 bp, Probe sequence
aatggtgacgagcgattaaatgaag

SEQ ID NO: 83907 - DNA, 25 bp, Probe sequence
aatgccggtactttagatcaagcaa

SEQ ID NO: 83908 - DNA, 25 bp, Probe sequence
aatcgaaagtggtacgactgttgca

SEQ ID NO: 83909 - DNA, 25 bp, Probe sequence
caagttcaagcagcactaaaccaat

SEQ ID NO: 83910 - DNA, 25 bp, Probe sequence
caagcaaaagagtcagcgaaacgtg

SEQ ID NO: 83911 - DNA, 25 bp, Probe sequence
caaaagagtcagcgaaacgtgcatt

SEQ ID NO: 83912 - DNA, 25 bp, Probe sequence
cgattacaatcagctatagcaaata

SEQ ID NO: 83913 - DNA, 25 bp, Probe sequence
cgcaaatcgaaagtggtacgactgt

SEQ ID NO: 83914 - DNA, 25 bp, Probe sequence
gctcaagcaaaagagtcagcgaaac

SEQ ID NO: 83915 - DNA, 25 bp, Probe sequence
gcaaaagagtcagcgaaacgtgcat

SEQ ID NO: 83916 - DNA, 25 bp, Probe sequence
gttgctcaagcaaaagagtcagcga

SEQ ID NO: 83917 - DNA, 25 bp, Probe sequence
gttcaagcagcactaaaccaattga

SEQ ID NO: 83918 - DNA, 25 bp, Probe sequence
gtgacgagcgattaaatgaagcgaa

SEQ ID NO: 83919 - DNA, 25 bp, Probe sequence
ggtgacgagcgattaaatgaagcga

SEQ ID NO: 83920 - DNA, 25 bp, Probe sequence
tggtgacgagcgattaaatgaagcg

SEQ ID NO: 83921 - DNA, 25 bp, Probe sequence
tgacgagcgattaaatgaagcgaag

SEQ ID NO: 83922 - DNA, 25 bp, Probe sequence
tgctcaagcaaaagagtcagcgaaa

SEQ ID NO: 83923 - DNA, 25 bp, Probe sequence
tcaagcaaaagagtcagcgaaacgt

SEQ ID NO: 83924 - DNA, 25 bp, Probe sequence
tacaatcagctatagcaaataaaga

SEQ ID NO: 83925 - DNA, 25 bp, Probe sequence
tactgatgcagatagagaaaaacaa

SEQ ID NO: 83926 - DNA, 25 bp, Probe sequence
ttcaagcagcactaaaccaattgaa

SEQ ID NO: 83927 - DNA, 25 bp, Probe sequence
ttgctcaagcaaaagagtcagcgaa

SEQ ID NO: 83928 - DNA, 25 bp, Probe sequence
atgatcaagctgttcaagccgcaaa

SEQ ID NO: 83929 - DNA, 25 bp, Probe sequence
atggcgcgcatactgttgatgaagc

SEQ ID NO: 83930 - DNA, 25 bp, Probe sequence
agtcgatgctgcgcaaactgttgca

SEQ ID NO: 83931 - DNA, 25 bp, Probe sequence
agcgccacttgttacagatgtcact

SEQ ID NO: 83932 - DNA, 25 bp, Probe sequence
acacctagcgaaattactgcagcgt

SEQ ID NO: 83933 - DNA, 25 bp, Probe sequence
acaaatccaacgcttaacccagatg

SEQ ID NO: 83934 - DNA, 25 bp, Probe sequence
aaatgcagtgtctcaagcggaaggt

SEQ ID NO: 83935 - DNA, 25 bp, Probe sequence
aaagcagcgcttaatggtactcaaa

SEQ ID NO: 83936 - DNA, 25 bp, Probe sequence
aacagcaacgagcctagatcaagca

SEQ ID NO: 83937 - DNA, 25 bp, Probe sequence
aatgctgtcacaactgcacaaggta

SEQ ID NO: 83938 - DNA, 25 bp, Probe sequence
aataatgcaacaactcgtggcgaag

SEQ ID NO: 83939 - DNA, 25 bp, Probe sequence
aatagctctaatgaccttaaccaag

SEQ ID NO: 83940 - DNA, 25 bp, Probe sequence
aattagtgctacgcctgatgttgtc

SEQ ID NO: 83941 - DNA, 25 bp, Probe sequence
caacgtggtaacttcatcaatgctg

SEQ ID NO: 83942 - DNA, 25 bp, Probe sequence
cattaatcaaactacatcgcctacg

SEQ ID NO: 83943 - DNA, 25 bp, Probe sequence
gcctgatgttgtcgttacacctagc

SEQ ID NO: 83944 - DNA, 25 bp, Probe sequence
gcgaacagtcaagtaccacagtcag

SEQ ID NO: 83945 - DNA, 25 bp, Probe sequence
gcgattgcagatcatcaagccgttg

SEQ ID NO: 83946 - DNA, 25 bp, Probe sequence
gcggcgacaacgcttaatgacgcga

SEQ ID NO: 83947 - DNA, 25 bp, Probe sequence
gcaacacgtgcgagcagtgcatatg

SEQ ID NO: 83948 - DNA, 25 bp, Probe sequence
gacaacacttggtacactagatcat

SEQ ID NO: 83949 - DNA, 25 bp, Probe sequence
gactgttatcaatcaagctgctgga

SEQ ID NO: 83950 - DNA, 25 bp, Probe sequence
gatgcttatactaatgcggtttcac

SEQ ID NO: 83951 - DNA, 25 bp, Probe sequence
gatcaattaacaccagctcaacaac

SEQ ID NO: 83952 - DNA, 25 bp, Probe sequence
gtccaactttagatccgactgttat

SEQ ID NO: 83953 - DNA, 25 bp, Probe sequence
gtaccaaacgtcaatgctattcaac

SEQ ID NO: 83954 - DNA, 25 bp, Probe sequence
gtaactttgtcaatgcagatcctga

SEQ ID NO: 83955 - DNA, 25 bp, Probe sequence
gtcagttgactttacacaagcggat

SEQ ID NO: 83956 - DNA, 25 bp, Probe sequence
gtgatgaaaaccttgcagcagctaa

SEQ ID NO: 83957 - DNA, 25 bp, Probe sequence
gtgtcgcatgcagaacttgttacag

SEQ ID NO: 83958 - DNA, 25 bp, Probe sequence
ggtaatgccaacgttcaacatgcaa

SEQ ID NO: 83959 - DNA, 25 bp, Probe sequence
ggcagcgaaacaacaagcgtcacaa

SEQ ID NO: 83960 - DNA, 25 bp, Probe sequence
tggcggcaatgcaacacaagctgaa

SEQ ID NO: 83961 - DNA, 25 bp, Probe sequence
taccaacacctgtattgacgcctga

SEQ ID NO: 83962 - DNA, 25 bp, Probe sequence
atatattgacgaacagcaccttggt

SEQ ID NO: 83963 - DNA, 25 bp, Probe sequence
agtcatcgatacaccatcaactgca

SEQ ID NO: 83964 - DNA, 25 bp, Probe sequence
agcgattcaacgtgcgcaaagcatc

SEQ ID NO: 83965 - DNA, 25 bp, Probe sequence
actagctagtttctggttcttcatt

SEQ ID NO: 83966 - DNA, 25 bp, Probe sequence
acaacgcagcaactcgtggcgaagt

SEQ ID NO: 83967 - DNA, 25 bp, Probe sequence
aaatcatccatttaacagttcgact

SEQ ID NO: 83968 - DNA, 25 bp, Probe sequence
aaatgcagcgcctacaagaacagag

SEQ ID NO: 83969 - DNA, 25 bp, Probe sequence
aaacgctattggtgtggtgggtatc

SEQ ID NO: 83970 - DNA, 25 bp, Probe sequence
aaacttcgatgatgccaaacgtcta

SEQ ID NO: 83971 - DNA, 25 bp, Probe sequence
aactgctactgaacttgatcacgcg

SEQ ID NO: 83972 - DNA, 25 bp, Probe sequence
aagccaaagcacaacttgcgcaagc

SEQ ID NO: 83973 - DNA, 25 bp, Probe sequence
aagcaacacctgagcaaatcctagt

SEQ ID NO: 83974 - DNA, 25 bp, Probe sequence
aagaacgtttagcgcaagcattgca

SEQ ID NO: 83975 - DNA, 25 bp, Probe sequence
caactgcaacgatttctgatagctt

SEQ ID NO: 83976 - DNA, 25 bp, Probe sequence
cgaagcttcaaatgcgacggatcaa

SEQ ID NO: 83977 - DNA, 25 bp, Probe sequence
gcgacgaaacttcaaccaattgctg

SEQ ID NO: 83978 - DNA, 25 bp, Probe sequence
gcaccttggtgttatcagcagcaca

SEQ ID NO: 83979 - DNA, 25 bp, Probe sequence
gaggacgttcctttattattggcta

SEQ ID NO: 83980 - DNA, 25 bp, Probe sequence
gaggttgcacaacatgttcaaactg

SEQ ID NO: 83981 - DNA, 25 bp, Probe sequence
gatcagctttcagcagaagtcatcg

SEQ ID NO: 83982 - DNA, 25 bp, Probe sequence
gataacgaacattcaccactcttat

SEQ ID NO: 83983 - DNA, 25 bp, Probe sequence
gtaatcaggctgtatctcaagttca

SEQ ID NO: 83984 - DNA, 25 bp, Probe sequence
ggtgggtatctctggtttactagct

SEQ ID NO: 83985 - DNA, 25 bp, Probe sequence
ggtaatccaacactcgacaaatcac

SEQ ID NO: 83986 - DNA, 25 bp, Probe sequence
ggagaccaaaaccttgcaaatgcca

SEQ ID NO: 83987 - DNA, 25 bp, Probe sequence
ggcaaacagcatcatcaacaacatt

SEQ ID NO: 83988 - DNA, 25 bp, Probe sequence
tgatccacttcatatgcgtcacttt

SEQ ID NO: 83989 - DNA, 25 bp, Probe sequence
tcaaacagcaggcaaccacgcgatt

SEQ ID NO: 83990 - DNA, 25 bp, Probe sequence
tcaccactcttattcgcaaaacgac

SEQ ID NO: 83991 - DNA, 25 bp, Probe sequence
tcaatggcgcaatccaagcagtcaa

SEQ ID NO: 83992 - DNA, 25 bp, Probe sequence
taatccgcaacgtcaagcacttgaa

SEQ ID NO: 83993 - DNA, 25 bp, Probe sequence
taaacatacgccgttcttcttacca

SEQ ID NO: 83994 - DNA, 25 bp, Probe sequence
taccacttttatttgcgaaacgtcg

SEQ ID NO: 83995 - DNA, 25 bp, Probe sequence
ttcttcattgccaaacgtcgtcgta

SEQ ID NO: 83996 - DNA, 25 bp, Probe sequence
atttacctactacgccatggaatac

SEQ ID NO: 83997 - DNA, 25 bp, Probe sequence
atattccattggatccatctgcatt

SEQ ID NO: 83998 - DNA, 25 bp, Probe sequence
agtataccgttggaacattctcgac

SEQ ID NO: 83999 - DNA, 25 bp, Probe sequence
agaacatgaccaaccagtatctcaa

SEQ ID NO: 84000 - DNA, 25 bp, Probe sequence
acaggcagctagaactggcagccca

SEQ ID NO: 84001 - DNA, 25 bp, Probe sequence
acaagggcaagacttcccaacaggt

SEQ ID NO: 84002 - DNA, 25 bp, Probe sequence
aaatccgactgctttaactggtgat

SEQ ID NO: 84003 - DNA, 25 bp, Probe sequence
aaagcgacaacaacggtgcctggat

SEQ ID NO: 84004 - DNA, 25 bp, Probe sequence
aattgcgacgggtacacctgatggg

SEQ ID NO: 84005 - DNA, 25 bp, Probe sequence
aacgactcacgttcgtgggactaca

SEQ ID NO: 84006 - DNA, 25 bp, Probe sequence
aagccacatacgcctagaattacta

SEQ ID NO: 84007 - DNA, 25 bp, Probe sequence
aagcgcagttatacttatcgccata

SEQ ID NO: 84008 - DNA, 25 bp, Probe sequence
aagcgattccaagcagttcatttac

SEQ ID NO: 84009 - DNA, 25 bp, Probe sequence
caagctggacatccggttttctatg

SEQ ID NO: 84010 - DNA, 25 bp, Probe sequence
ctgctacgccaacacaatcggctaa

SEQ ID NO: 84011 - DNA, 25 bp, Probe sequence
cattctcgacggtcattgcgacgtt

SEQ ID NO: 84012 - DNA, 25 bp, Probe sequence
gccggacaaactccagttggtcgaa

SEQ ID NO: 84013 - DNA, 25 bp, Probe sequence
gaagctggagcaacacctgctacaa

SEQ ID NO: 84014 - DNA, 25 bp, Probe sequence
gaaagatacggcagctgctacgcca

SEQ ID NO: 84015 - DNA, 25 bp, Probe sequence
gatggttctgggtatcctgtaggta

SEQ ID NO: 84016 - DNA, 25 bp, Probe sequence
gatgatgcgcatccaattgtcttag

SEQ ID NO: 84017 - DNA, 25 bp, Probe sequence
gatagaacgattccaactgcgcaag

SEQ ID NO: 84018 - DNA, 25 bp, Probe sequence
gtagagtctctatgaatcaggccta

SEQ ID NO: 84019 - DNA, 25 bp, Probe sequence
gtaacggtgcaggagccggtgcgaa

SEQ ID NO: 84020 - DNA, 25 bp, Probe sequence
gtaacagtaccaacgacatcacaat

SEQ ID NO: 84021 - DNA, 25 bp, Probe sequence
gtccgtgcgaaccacagtaactcga

SEQ ID NO: 84022 - DNA, 25 bp, Probe sequence
gtgatgggtcatcaactacgcttga

SEQ ID NO: 84023 - DNA, 25 bp, Probe sequence
gggggcaccatataatttacctact

SEQ ID NO: 84024 - DNA, 25 bp, Probe sequence
ggccgacagaatcacctggtgtacc

SEQ ID NO: 84025 - DNA, 25 bp, Probe sequence
tgatctactggtttgcactaccggc

SEQ ID NO: 84026 - DNA, 25 bp, Probe sequence
tagtgccattccagatgcgacgata

SEQ ID NO: 84027 - DNA, 25 bp, Probe sequence
tagcttcatcaaatccagttacagt

SEQ ID NO: 84028 - DNA, 25 bp, Probe sequence
tttacctgatgatattccaccgaca

SEQ ID NO: 84029 - DNA, 25 bp, Probe sequence
ttgggttaacttccctcaagattat

SEQ ID NO: 84030 - DNA, 25 bp, Probe sequence
attgacggaaactctgtgacataca

SEQ ID NO: 84031 - DNA, 25 bp, Probe sequence
attccctcaaacttcttatacaaca

SEQ ID NO: 84032 - DNA, 25 bp, Probe sequence
attacagcagctcaacgtgtcattg

SEQ ID NO: 84033 - DNA, 25 bp, Probe sequence
agtgcttctgtacatgtgacacctc

SEQ ID NO: 84034 - DNA, 25 bp, Probe sequence
agcaggtactggtcactcagcaagc

SEQ ID NO: 84035 - DNA, 25 bp, Probe sequence
agctggtactttcaatcctgctgat

SEQ ID NO: 84036 - DNA, 25 bp, Probe sequence
aagttaagcctgatccaccgagaat

SEQ ID NO: 84037 - DNA, 25 bp, Probe sequence
aatgaccgattaacgctagctatta

SEQ ID NO: 84038 - DNA, 25 bp, Probe sequence
aattcagcaatcaccattacaccga

SEQ ID NO: 84039 - DNA, 25 bp, Probe sequence
gcctaataacccgtctggacattta

SEQ ID NO: 84040 - DNA, 25 bp, Probe sequence
gctgcaccaaatcatgctgcacttg

SEQ ID NO: 84041 - DNA, 25 bp, Probe sequence
gctattgccggattaacaccagact

SEQ ID NO: 84042 - DNA, 25 bp, Probe sequence
gcaaaacgtgtacctgttactgtga

SEQ ID NO: 84043 - DNA, 25 bp, Probe sequence
gcaacatctctaccagcgaagtttg

SEQ ID NO: 84044 - DNA, 25 bp, Probe sequence
gaagcgaacacagcattaggtcaat

SEQ ID NO: 84045 - DNA, 25 bp, Probe sequence
gacaagtgcatcagttgctgcattt

SEQ ID NO: 84046 - DNA, 25 bp, Probe sequence
gacaaccagcgtttacaacattaca

SEQ ID NO: 84047 - DNA, 25 bp, Probe sequence
gacacttaatgctgttcgtggtcaa

SEQ ID NO: 84048 - DNA, 25 bp, Probe sequence
gagtaattacgattgcacctggagc

SEQ ID NO: 84049 - DNA, 25 bp, Probe sequence
gtagtacaacgacgatccctgtgac

SEQ ID NO: 84050 - DNA, 25 bp, Probe sequence
gatttggatcatgcgcgtcaagctt

SEQ ID NO: 84051 - DNA, 25 bp, Probe sequence
gttgctaatgccaaagcgccatctc

SEQ ID NO: 84052 - DNA, 25 bp, Probe sequence
gtattagctggttcacctactgtag

SEQ ID NO: 84053 - DNA, 25 bp, Probe sequence
gtaacgctagatgcacatactggta

SEQ ID NO: 84054 - DNA, 25 bp, Probe sequence
gtgccaacgctattattcagaagcc

SEQ ID NO: 84055 - DNA, 25 bp, Probe sequence
gtgacacctcaattacaagcgacta

SEQ ID NO: 84056 - DNA, 25 bp, Probe sequence
ggtgcgcatcaaatcgagacagtta

SEQ ID NO: 84057 - DNA, 25 bp, Probe sequence
ggacaatcgccaataaacctgacta

SEQ ID NO: 84058 - DNA, 25 bp, Probe sequence
tgatcgcgtactagcatcgcatcca

SEQ ID NO: 84059 - DNA, 25 bp, Probe sequence
tcaaaatccaccacatggggcaacg

SEQ ID NO: 84060 - DNA, 25 bp, Probe sequence
taatagcgccgtttcaagtgctgaa

SEQ ID NO: 84061 - DNA, 25 bp, Probe sequence
tacactgacgcaacaacggctaata

SEQ ID NO: 84062 - DNA, 25 bp, Probe sequence
ttgatcaaccaacgagcacgacagg

SEQ ID NO: 84063 - DNA, 25 bp, Probe sequence
ttggcaccattacaagctgcgaaaa

SEQ ID NO: 84064 - DNA, 25 bp, Probe sequence
attgatggcttagcgcaattgaata

SEQ ID NO: 84065 - DNA, 25 bp, Probe sequence
atacgcctaaacaagatgtagaagc

SEQ ID NO: 84066 - DNA, 25 bp, Probe sequence
agtgttactagcgctaaaaatgcat

SEQ ID NO: 84067 - DNA, 25 bp, Probe sequence
agtgaatgcagctaaaacagtatta

SEQ ID NO: 84068 - DNA, 25 bp, Probe sequence
acgaatactttagcgagcgaaaact

SEQ ID NO: 84069 - DNA, 25 bp, Probe sequence
agcagcattgcaacgtgtgaaaact

SEQ ID NO: 84070 - DNA, 25 bp, Probe sequence
acggctcaatcaaatgcgaatacat

SEQ ID NO: 84071 - DNA, 25 bp, Probe sequence
acaagtgacaaatgcgaaaggtgcc

SEQ ID NO: 84072 - DNA, 25 bp, Probe sequence
aaatatcgtgatgcagagcaaagta

SEQ ID NO: 84073 - DNA, 25 bp, Probe sequence
aaatgcgattgatggtgctactaac

SEQ ID NO: 84074 - DNA, 25 bp, Probe sequence
aaacttcctagatgctgatgagcaa

SEQ ID NO: 84075 - DNA, 25 bp, Probe sequence
aagcggctattcaaagtgttactag

SEQ ID NO: 84076 - DNA, 25 bp, Probe sequence
aatcaagctgtatcaaatgccgaaa

SEQ ID NO: 84077 - DNA, 25 bp, Probe sequence
gcgagccaaaacttcctagatgctg

SEQ ID NO: 84078 - DNA, 25 bp, Probe sequence
gcggtaagcagagcagaaacaattc

SEQ ID NO: 84079 - DNA, 25 bp, Probe sequence
gctatggctagcttgcaaaatggta

SEQ ID NO: 84080 - DNA, 25 bp, Probe sequence
gcatatcactacagcacaacgcaat

SEQ ID NO: 84081 - DNA, 25 bp, Probe sequence
gcaagcagtaaatttgttaacgccg

SEQ ID NO: 84082 - DNA, 25 bp, Probe sequence
gaattgaacggcgcgatgacagtac

SEQ ID NO: 84083 - DNA, 25 bp, Probe sequence
gaaacaattctgaacaaaacgcaag

SEQ ID NO: 84084 - DNA, 25 bp, Probe sequence
gaaactgtcaaagcaactgaattaa

SEQ ID NO: 84085 - DNA, 25 bp, Probe sequence
gacgtaaatagtgcaacttcacaag

SEQ ID NO: 84086 - DNA, 25 bp, Probe sequence
gatgaaaacttagctacggcaaaac

SEQ ID NO: 84087 - DNA, 25 bp, Probe sequence
gatcaagcaacaacagtatctggtg

SEQ ID NO: 84088 - DNA, 25 bp, Probe sequence
gttgaatctgttaagcaaagtgcga

SEQ ID NO: 84089 - DNA, 25 bp, Probe sequence
gtatctggtgttgaagcggtatcta

SEQ ID NO: 84090 - DNA, 25 bp, Probe sequence
gtgcaacttcacaagtgaatgcagc

SEQ ID NO: 84091 - DNA, 25 bp, Probe sequence
ggcgcgatgacagtacttaaagcag

SEQ ID NO: 84092 - DNA, 25 bp, Probe sequence
tggtgttcatacggctcaatcaaat

SEQ ID NO: 84093 - DNA, 25 bp, Probe sequence
tggggatgctaaactggcagaagcg

SEQ ID NO: 84094 - DNA, 25 bp, Probe sequence
taaatttgttaacgccgatagcact

SEQ ID NO: 84095 - DNA, 25 bp, Probe sequence
tacagcacaacgcaatgatttaaca

SEQ ID NO: 84096 - DNA, 25 bp, Probe sequence
tagtactaagacagcgttgaacggt

SEQ ID NO: 84097 - DNA, 25 bp, Probe sequence
tttagcgagcgaaaactatcatgat

SEQ ID NO: 84098 - DNA, 25 bp, Probe sequence
agcattgcgaatgaggcgacgatta

SEQ ID NO: 84099 - DNA, 25 bp, Probe sequence
agcagcgcttaaccaattgaatcaa

SEQ ID NO: 84100 - DNA, 25 bp, Probe sequence
acggtgacgcaaacttacaacgtgc

SEQ ID NO: 84101 - DNA, 25 bp, Probe sequence
acatcgcaaatcgaacgcggtacga

SEQ ID NO: 84102 - DNA, 25 bp, Probe sequence
acaagttcaagcagcgcttaaccaa

SEQ ID NO: 84103 - DNA, 25 bp, Probe sequence
aaatctacaggtacaaacgtgtcta

SEQ ID NO: 84104 - DNA, 25 bp, Probe sequence
aaacgaagcgttgaaatcacaaatt

SEQ ID NO: 84105 - DNA, 25 bp, Probe sequence
aaactacacggatgcaagtcctaat

SEQ ID NO: 84106 - DNA, 25 bp, Probe sequence
aagcgcaaaataatgcggacgcatt

SEQ ID NO: 84107 - DNA, 25 bp, Probe sequence
aagtgacagctgcagaaaatatcgt

SEQ ID NO: 84108 - DNA, 25 bp, Probe sequence
aatgcatacaacacagctgttacaa

SEQ ID NO: 84109 - DNA, 25 bp, Probe sequence
aatcgaacgcggtacgactgttgca

SEQ ID NO: 84110 - DNA, 25 bp, Probe sequence
caagtccaacaatgaatgctcaaga

SEQ ID NO: 84111 - DNA, 25 bp, Probe sequence
caacacagctgttacaagtgctgaa

SEQ ID NO: 84112 - DNA, 25 bp, Probe sequence
ctgttcaaattgataatgcgacaca

SEQ ID NO: 84113 - DNA, 25 bp, Probe sequence
gccattcaaacagctcaggaactaa

SEQ ID NO: 84114 - DNA, 25 bp, Probe sequence
gccatcacacaagcagaatcatact

SEQ ID NO: 84115 - DNA, 25 bp, Probe sequence
gcgaaatcagacatcggtcgtttaa

SEQ ID NO: 84116 - DNA, 25 bp, Probe sequence
gcaaacttacaacgtgctaaaactg

SEQ ID NO: 84117 - DNA, 25 bp, Probe sequence
gaaacaactgccaacatcaaccaat

SEQ ID NO: 84118 - DNA, 25 bp, Probe sequence
gacaatgttgaatctgcgttacaaa

SEQ ID NO: 84119 - DNA, 25 bp, Probe sequence
gacatcggtcgtttaacagacttga

SEQ ID NO: 84120 - DNA, 25 bp, Probe sequence
gactaaagcgagcgaagattatcat

SEQ ID NO: 84121 - DNA, 25 bp, Probe sequence
gaggcgacgattaaagcagaacaaa

SEQ ID NO: 84122 - DNA, 25 bp, Probe sequence
gatgcaagtcctaataatcgtagtg

SEQ ID NO: 84123 - DNA, 25 bp, Probe sequence
gatgcagcaaaacgccaaatcgaag

SEQ ID NO: 84124 - DNA, 25 bp, Probe sequence
gttgctcaagctaaagaaactgcga

SEQ ID NO: 84125 - DNA, 25 bp, Probe sequence
ggtgacgcgcgattaaatcaagcga

SEQ ID NO: 84126 - DNA, 25 bp, Probe sequence
tgaatacgatagtgcagtcactgca

SEQ ID NO: 84127 - DNA, 25 bp, Probe sequence
tcattggtcaaacatcaagtccaac

SEQ ID NO: 84128 - DNA, 25 bp, Probe sequence
tcatgatgcgaatacagatttacaa

SEQ ID NO: 84129 - DNA, 25 bp, Probe sequence
tcaagaaaacttaacaaacgcacaa

SEQ ID NO: 84130 - DNA, 25 bp, Probe sequence
tcaattgagacaaagcattgcttct

SEQ ID NO: 84131 - DNA, 25 bp, Probe sequence
ttgataatgccatcacacaagcaga

SEQ ID NO: 84132 - DNA, 25 bp, Probe sequence
atatgcgtcatttcggtgaccgaat

SEQ ID NO: 84133 - DNA, 25 bp, Probe sequence
atagttcgcctattggacataagaa

SEQ ID NO: 84134 - DNA, 25 bp, Probe sequence
atcaattcaggcgattcaacgtgcg

SEQ ID NO: 84135 - DNA, 25 bp, Probe sequence
atcaatttctgatgctatccaacat

SEQ ID NO: 84136 - DNA, 25 bp, Probe sequence
atcatccattcaatagttcgcctat

SEQ ID NO: 84137 - DNA, 25 bp, Probe sequence
agaagctgcgattgcggaagttaat

SEQ ID NO: 84138 - DNA, 25 bp, Probe sequence
acattcaccggtcttaatcgcaaaa

SEQ ID NO: 84139 - DNA, 25 bp, Probe sequence
aaaagcggccaatccatttgctaaa

SEQ ID NO: 84140 - DNA, 25 bp, Probe sequence
aacgcagcagatgttcatacggtgg

SEQ ID NO: 84141 - DNA, 25 bp, Probe sequence
aatgcgcaaacgccacaacaagttg

SEQ ID NO: 84142 - DNA, 25 bp, Probe sequence
caattcaaaccctgatttaacactt

SEQ ID NO: 84143 - DNA, 25 bp, Probe sequence
aatcacgcaacattaacacctgaac

SEQ ID NO: 84144 - DNA, 25 bp, Probe sequence
caagatgatgaaatcgatccacttc

SEQ ID NO: 84145 - DNA, 25 bp, Probe sequence
caaatccttgtaaatggcgaactca

SEQ ID NO: 84146 - DNA, 25 bp, Probe sequence
cgcacttggcgttgttggtatttct

SEQ ID NO: 84147 - DNA, 25 bp, Probe sequence
gaaatttttgacgcaactcctgaac

SEQ ID NO: 84148 - DNA, 25 bp, Probe sequence
gacgcaactcctgaacaaatccttg

SEQ ID NO: 84149 - DNA, 25 bp, Probe sequence
gaccaagccaaatcaaatgccatta

SEQ ID NO: 84150 - DNA, 25 bp, Probe sequence
gatacaccgtcaactgcaacaattt

SEQ ID NO: 84151 - DNA, 25 bp, Probe sequence
gtcatttacacgttggttatggcac

SEQ ID NO: 84152 - DNA, 25 bp, Probe sequence
ggtatcgcacgaattttagcagtac

SEQ ID NO: 84153 - DNA, 25 bp, Probe sequence
ggtatttctggattacttgctagct

SEQ ID NO: 84154 - DNA, 25 bp, Probe sequence
ggaagttgatgcacaacctgctgta

SEQ ID NO: 84155 - DNA, 25 bp, Probe sequence
ggcactgtaaatcatccattcaata

SEQ ID NO: 84156 - DNA, 25 bp, Probe sequence
ttcaccggtcttaatcgcaaaacga

SEQ ID NO: 84157 - DNA, 25 bp, Probe sequence
tggcgaactcattgtccatcgtgat

SEQ ID NO: 84158 - DNA, 25 bp, Probe sequence
tcttcttacctaaacgtcgcagaaa

SEQ ID NO: 84159 - DNA, 25 bp, Probe sequence
tcatagcaaaccttcatcaaattca

SEQ ID NO: 84160 - DNA, 25 bp, Probe sequence
tcaacaccaagaacaggcgcatatt

SEQ ID NO: 84161 - DNA, 25 bp, Probe sequence
taacgaacattcaccggtcttaatc

SEQ ID NO: 84162 - DNA, 25 bp, Probe sequence
ttacttgctagcttctggttcttca

SEQ ID NO: 84163 - DNA, 25 bp, Probe sequence
ttaacggcgcaattcaaacagtcaa

SEQ ID NO: 84164 - DNA, 25 bp, Probe sequence
ttcttcttacctaaacgtcgcagaa

SEQ ID NO: 84165 - DNA, 25 bp, Probe sequence
ttgagcatgccaaagcgcagcttgc

SEQ ID NO: 84166 - DNA, 25 bp, Probe sequence
agtcgtaaaaacatagatttggcga

SEQ ID NO: 84167 - DNA, 25 bp, Probe sequence
atcttgtcacattagtatatagaaa

SEQ ID NO: 84168 - DNA, 25 bp, Probe sequence
atgacttttaaacattatccacaaa

SEQ ID NO: 84169 - DNA, 25 bp, Probe sequence
agttcttagtaatagtagtaggtgc

SEQ ID NO: 84170 - DNA, 25 bp, Probe sequence
actccttccagtcgtttatatataa

SEQ ID NO: 84171 - DNA, 25 bp, Probe sequence
cagttattattagtgctgttatata

SEQ ID NO: 84172 - DNA, 25 bp, Probe sequence
gctgtggattggtggataagtcgta

SEQ ID NO: 84173 - DNA, 25 bp, Probe sequence
gatttggcgaagttatacacatgtt

SEQ ID NO: 84174 - DNA, 25 bp, Probe sequence
gttgataacttgtgtatggtgtgta

SEQ ID NO: 84175 - DNA, 25 bp, Probe sequence
gtgtatggtgtgtatgacttttaaa

SEQ ID NO: 84176 - DNA, 25 bp, Probe sequence
tgagttttgctcatcttgtcacatt

SEQ ID NO: 84177 - DNA, 25 bp, Probe sequence
taaaactccttccagtcgtttatat

SEQ ID NO: 84178 - DNA, 25 bp, Probe sequence
tagtaggtgctgtggattggtggat

SEQ ID NO: 84179 - DNA, 25 bp, Probe sequence
tataacagattacatttcccaaagt

SEQ ID NO: 84180 - DNA, 25 bp, Probe sequence
ttggcgaagttatacacatgttgat

SEQ ID NO: 84181 - DNA, 25 bp, Probe sequence
agcacacttattaaattttggatac

SEQ ID NO: 84182 - DNA, 25 bp, Probe sequence
cgttttaattaatcacgtcatcctt

SEQ ID NO: 84183 - DNA, 25 bp, Probe sequence
cgtcatcctttatttatatttattt

SEQ ID NO: 84184 - DNA, 25 bp, Probe sequence
gcgtttaactttaatattcaacttg

SEQ ID NO: 84185 - DNA, 25 bp, Probe sequence
gtcaaatttattttacatacgcatc

SEQ ID NO: 84186 - DNA, 25 bp, Probe sequence
gtcataaatttaattggcgtctttt

SEQ ID NO: 84187 - DNA, 25 bp, Probe sequence
gtcattttcaattttttaacgctat

SEQ ID NO: 84188 - DNA, 25 bp, Probe sequence
tggcgtcttttatttgctgtttaaa

SEQ ID NO: 84189 - DNA, 25 bp, Probe sequence
tccatttctttgtgtgtcattaata

SEQ ID NO: 84190 - DNA, 25 bp, Probe sequence
tagaggtagaaaccgtttacatata

SEQ ID NO: 84191 - DNA, 25 bp, Probe sequence
tacgcatctagaattatttttgcca

SEQ ID NO: 84192 - DNA, 25 bp, Probe sequence
tattatacctttttttgtcacaaat

SEQ ID NO: 84193 - DNA, 25 bp, Probe sequence
ttttttggcaatactgtcattttca

SEQ ID NO: 84194 - DNA, 25 bp, Probe sequence
ttaaagggcatataagcacacttat

SEQ ID NO: 84195 - DNA, 25 bp, Probe sequence
ttgctgtttaaaatgctgtcaaatt

SEQ ID NO: 84196 - DNA, 25 bp, Probe sequence
ataaaaataagactcccctacatat

SEQ ID NO: 84197 - DNA, 25 bp, Probe sequence
ataagactcccctacatatagggaa

SEQ ID NO: 84198 - DNA, 25 bp, Probe sequence
agcattactttctagcataaaaata

SEQ ID NO: 84199 - DNA, 25 bp, Probe sequence
acagcattactttctagcataaaaa

SEQ ID NO: 84200 - DNA, 25 bp, Probe sequence
aaaataagactcccctacatatagg

SEQ ID NO: 84201 - DNA, 25 bp, Probe sequence
aagactcccctacatatagggaagt

SEQ ID NO: 84202 - DNA, 25 bp, Probe sequence
cctacatatagggaagtcttatttt

SEQ ID NO: 84203 - DNA, 25 bp, Probe sequence
gcataaaaataagactcccctacat

SEQ ID NO: 84204 - DNA, 25 bp, Probe sequence
gactcccctacatatagggaagtct

SEQ ID NO: 84205 - DNA, 25 bp, Probe sequence
gtacagcattactttctagcataaa

SEQ ID NO: 84206 - DNA, 25 bp, Probe sequence
taatcattgaatatagtacagcatt

SEQ ID NO: 84207 - DNA, 25 bp, Probe sequence
taaaaataagactcccctacatata

SEQ ID NO: 84208 - DNA, 25 bp, Probe sequence
tacatatagggaagtcttatttttt

SEQ ID NO: 84209 - DNA, 25 bp, Probe sequence
tagtacagcattactttctagcata

SEQ ID NO: 84210 - DNA, 25 bp, Probe sequence
tatagtacagcattactttctagca

SEQ ID NO: 84211 - DNA, 25 bp, Probe sequence
attgacgaattgcatatacaggtat

SEQ ID NO: 84212 - DNA, 25 bp, Probe sequence
attaagtaacccatccttcttgaag

SEQ ID NO: 84213 - DNA, 25 bp, Probe sequence
atttatctattgacgaattgcatat

SEQ ID NO: 84214 - DNA, 25 bp, Probe sequence
atacaggtatagtattttctattgt

SEQ ID NO: 84215 - DNA, 25 bp, Probe sequence
acccatccttcttgaagtatacgtt

SEQ ID NO: 84216 - DNA, 25 bp, Probe sequence
aacctattatcagagcactattgta

SEQ ID NO: 84217 - DNA, 25 bp, Probe sequence
aagtaacccatccttcttgaagtat

SEQ ID NO: 84218 - DNA, 25 bp, Probe sequence
cactattgtagtgcgttaaaggata

SEQ ID NO: 84219 - DNA, 25 bp, Probe sequence
gaagtatacgttttcatttttattg

SEQ ID NO: 84220 - DNA, 25 bp, Probe sequence
gtattttctattgtatttaacgaca

SEQ ID NO: 84221 - DNA, 25 bp, Probe sequence
gtaacccatccttcttgaagtatac

SEQ ID NO: 84222 - DNA, 25 bp, Probe sequence
tgaaacaatggttttacgtacattt

SEQ ID NO: 84223 - DNA, 25 bp, Probe sequence
taagattgttgtaagcatatttaat

SEQ ID NO: 84224 - DNA, 25 bp, Probe sequence
tataacctattatcagagcactatt

SEQ ID NO: 84225 - DNA, 25 bp, Probe sequence
ttacgtacatttataacctattatc

SEQ ID NO: 84226 - DNA, 25 bp, Probe sequence
acttgtcctacgaacaatgtcttat

SEQ ID NO: 84227 - DNA, 25 bp, Probe sequence
acaagggacgtggtctacgcgttgc

SEQ ID NO: 84228 - DNA, 25 bp, Probe sequence
aagaccacatccctacaagggacgt

SEQ ID NO: 84229 - DNA, 25 bp, Probe sequence
caagctctctgatatcgaacactat

SEQ ID NO: 84230 - DNA, 25 bp, Probe sequence
caaactatatttgctttttcaagta

SEQ ID NO: 84231 - DNA, 25 bp, Probe sequence
cactaaacctaaattgcacttcact

SEQ ID NO: 84232 - DNA, 25 bp, Probe sequence
cactaaccacaagctctctgatatc

SEQ ID NO: 84233 - DNA, 25 bp, Probe sequence
ccttcatcctttcccaaataattat

SEQ ID NO: 84234 - DNA, 25 bp, Probe sequence
gcacttcactaaaataacggttatc

SEQ ID NO: 84235 - DNA, 25 bp, Probe sequence
gaacactatatattacttgtcctac

SEQ ID NO: 84236 - DNA, 25 bp, Probe sequence
gttgattcttgttcacactaaccac

SEQ ID NO: 84237 - DNA, 25 bp, Probe sequence
gttatcaccgattgttcttttaaat

SEQ ID NO: 84238 - DNA, 25 bp, Probe sequence
gtaacgatttcaaacatcactcatg

SEQ ID NO: 84239 - DNA, 25 bp, Probe sequence
tggaatgacgtacgtctttattttt

SEQ ID NO: 84240 - DNA, 25 bp, Probe sequence
ttgccaccctatttaacaatttaag

SEQ ID NO: 84241 - DNA, 25 bp, Probe sequence
atattactcatactacatcaacgaa

SEQ ID NO: 84242 - DNA, 25 bp, Probe sequence
ataattatcccgtattgttgctata

SEQ ID NO: 84243 - DNA, 25 bp, Probe sequence
agtatcttgcccttgctttaagtat

SEQ ID NO: 84244 - DNA, 25 bp, Probe sequence
acatactggcgtcttcaatcatctt

SEQ ID NO: 84245 - DNA, 25 bp, Probe sequence
aaaaagtggcgacagcttcgtcacc

SEQ ID NO: 84246 - DNA, 25 bp, Probe sequence
aagactacctccatattttctacgg

SEQ ID NO: 84247 - DNA, 25 bp, Probe sequence
aatacagttctataccctaagcaat

SEQ ID NO: 84248 - DNA, 25 bp, Probe sequence
caatcatcttcatatcaacttttta

SEQ ID NO: 84249 - DNA, 25 bp, Probe sequence
cagcttcgtcaccactttttaaaat

SEQ ID NO: 84250 - DNA, 25 bp, Probe sequence
gcattggctcactattatactttta

SEQ ID NO: 84251 - DNA, 25 bp, Probe sequence
tgaaatgcgttcaccccattaaacc

SEQ ID NO: 84252 - DNA, 25 bp, Probe sequence
taacactcccttataatcatcatcc

SEQ ID NO: 84253 - DNA, 25 bp, Probe sequence
tacctcctttgccactttatattta

SEQ ID NO: 84254 - DNA, 25 bp, Probe sequence
taccctactccatcgatattactca

SEQ ID NO: 84255 - DNA, 25 bp, Probe sequence
tattgattcatgtaacactccctta

SEQ ID NO: 84256 - DNA, 25 bp, Probe sequence
atacgattcccagtcataccataga

SEQ ID NO: 84257 - DNA, 25 bp, Probe sequence
atctgttcaatgattttcagttatt

SEQ ID NO: 84258 - DNA, 25 bp, Probe sequence
agtccctcaacttctcacaataaga

SEQ ID NO: 84259 - DNA, 25 bp, Probe sequence
agtatcacagggccaagtccctcaa

SEQ ID NO: 84260 - DNA, 25 bp, Probe sequence
acctaagtttaaatatctgttcaat

SEQ ID NO: 84261 - DNA, 25 bp, Probe sequence
aatattgttatcattgtcatacgtt

SEQ ID NO: 84262 - DNA, 25 bp, Probe sequence
cgtgctataaagtcggttgctgaag

SEQ ID NO: 84263 - DNA, 25 bp, Probe sequence
gacgatttgtatatcagaattttct

SEQ ID NO: 84264 - DNA, 25 bp, Probe sequence
gattcccagtcataccatagacgat

SEQ ID NO: 84265 - DNA, 25 bp, Probe sequence
gttatgtgttagttgagattcagtg

SEQ ID NO: 84266 - DNA, 25 bp, Probe sequence
gtcatacgttagccaaatcgctttc

SEQ ID NO: 84267 - DNA, 25 bp, Probe sequence
gtcggttgctgaagtatcacagggc

SEQ ID NO: 84268 - DNA, 25 bp, Probe sequence
tagccaaatcgctttcgtgtatacg

SEQ ID NO: 84269 - DNA, 25 bp, Probe sequence
ttcgtgtatacgattcccagtcata

SEQ ID NO: 84270 - DNA, 25 bp, Probe sequence
ttctgattactaacagtttacctaa

SEQ ID NO: 84271 - DNA, 25 bp, Probe sequence
atttccactctcatgtactctagat

SEQ ID NO: 84272 - DNA, 25 bp, Probe sequence
atcaagcttgatttagatttacaat

SEQ ID NO: 84273 - DNA, 25 bp, Probe sequence
agatgtctttgaatatgataactgt

SEQ ID NO: 84274 - DNA, 25 bp, Probe sequence
actctcatgtactctagatgtcttt

SEQ ID NO: 84275 - DNA, 25 bp, Probe sequence
acaattcatttccactctcatgtac

SEQ ID NO: 84276 - DNA, 25 bp, Probe sequence
aacatactcatttgaatcgcttttg

SEQ ID NO: 84277 - DNA, 25 bp, Probe sequence
aatcccactacatagcaatcaagct

SEQ ID NO: 84278 - DNA, 25 bp, Probe sequence
aatcgcttttgtgtgctttcatttt

SEQ ID NO: 84279 - DNA, 25 bp, Probe sequence
gaataataactttcatgttttataa

SEQ ID NO: 84280 - DNA, 25 bp, Probe sequence
gataactgtgatttagtagcttcat

SEQ ID NO: 84281 - DNA, 25 bp, Probe sequence
gatttacaattcatttccactctca

SEQ ID NO: 84282 - DNA, 25 bp, Probe sequence
gattatttaatcccactacatagca

SEQ ID NO: 84283 - DNA, 25 bp, Probe sequence
gtatgcttctatttcatttaattga

SEQ ID NO: 84284 - DNA, 25 bp, Probe sequence
gtgatttagtagcttcattctttaa

SEQ ID NO: 84285 - DNA, 25 bp, Probe sequence
gtgtgctttcattttcaacatgatt

SEQ ID NO: 84286 - DNA, 25 bp, Probe sequence
atatcaacccgttcagaacaaaata

SEQ ID NO: 84287 - DNA, 25 bp, Probe sequence
atcatcttaatgattattgtacgga

SEQ ID NO: 84288 - DNA, 25 bp, Probe sequence
atcttaatgattattgtacggaaaa

SEQ ID NO: 84289 - DNA, 25 bp, Probe sequence
accgtacaattttatcatcttaatg

SEQ ID NO: 84290 - DNA, 25 bp, Probe sequence
acaattttatcatcttaatgattat

SEQ ID NO: 84291 - DNA, 25 bp, Probe sequence
aaccgtacaattttatcatcttaat

SEQ ID NO: 84292 - DNA, 25 bp, Probe sequence
catcttaatgattattgtacggaaa

SEQ ID NO: 84293 - DNA, 25 bp, Probe sequence
cgtacaattttatcatcttaatgat

SEQ ID NO: 84294 - DNA, 25 bp, Probe sequence
ccgtacaattttatcatcttaatga

SEQ ID NO: 84295 - DNA, 25 bp, Probe sequence
gtacaattttatcatcttaatgatt

SEQ ID NO: 84296 - DNA, 25 bp, Probe sequence
tcatcttaatgattattgtacggaa

SEQ ID NO: 84297 - DNA, 25 bp, Probe sequence
taatgattattgtacggaaaaactt

SEQ ID NO: 84298 - DNA, 25 bp, Probe sequence
taaaaaccgtacaattttatcatct

SEQ ID NO: 84299 - DNA, 25 bp, Probe sequence
tatcaacccgttcagaacaaaataa

SEQ ID NO: 84300 - DNA, 25 bp, Probe sequence
tatatcaacccgttcagaacaaaat

SEQ ID NO: 84301 - DNA, 25 bp, Probe sequence
aatcgaacattgattttcggccttt

SEQ ID NO: 84302 - DNA, 25 bp, Probe sequence
caagtttttctcatttaaccatttg

SEQ ID NO: 84303 - DNA, 25 bp, Probe sequence
catttaaccatttgatattctacca

SEQ ID NO: 84304 - DNA, 25 bp, Probe sequence
ctccaagtttttctcatttaaccat

SEQ ID NO: 84305 - DNA, 25 bp, Probe sequence
ctaccaatatcgagaccataatgca

SEQ ID NO: 84306 - DNA, 25 bp, Probe sequence
ccaatatcgagaccataatgcaaat

SEQ ID NO: 84307 - DNA, 25 bp, Probe sequence
gagaccataatgcaaataaaaatcg

SEQ ID NO: 84308 - DNA, 25 bp, Probe sequence
gtttttctcatttaaccatttgata

SEQ ID NO: 84309 - DNA, 25 bp, Probe sequence
gtgagcacctccaagtttttctcat

SEQ ID NO: 84310 - DNA, 25 bp, Probe sequence
tgagcacctccaagtttttctcatt

SEQ ID NO: 84311 - DNA, 25 bp, Probe sequence
tccaagtttttctcatttaaccatt

SEQ ID NO: 84312 - DNA, 25 bp, Probe sequence
tcgaacattgattttcggccttttt

SEQ ID NO: 84313 - DNA, 25 bp, Probe sequence
tattctaccaatatcgagaccataa

SEQ ID NO: 84314 - DNA, 25 bp, Probe sequence
ttttctcatttaaccatttgatatt

SEQ ID NO: 84315 - DNA, 25 bp, Probe sequence
ttaaccatttgatattctaccaata

SEQ ID NO: 84316 - DNA, 25 bp, Probe sequence
atagctattttcgacatcagactta

SEQ ID NO: 84317 - DNA, 25 bp, Probe sequence
aatcgaatcgatacagaagcaaaca

SEQ ID NO: 84318 - DNA, 25 bp, Probe sequence
caaatatcacctttacgttagtaat

SEQ ID NO: 84319 - DNA, 25 bp, Probe sequence
gcattttattggcagtctatttatt

SEQ ID NO: 84320 - DNA, 25 bp, Probe sequence
gcacaagatagattatagcacagcc

SEQ ID NO: 84321 - DNA, 25 bp, Probe sequence
gcaaacaaagcaaaagcctcctacc

SEQ ID NO: 84322 - DNA, 25 bp, Probe sequence
gcaaaagcctcctaccaataaagat

SEQ ID NO: 84323 - DNA, 25 bp, Probe sequence
gactagcaaatatcacctttacgtt

SEQ ID NO: 84324 - DNA, 25 bp, Probe sequence
tagcacagccaatcttgccatgaca

SEQ ID NO: 84325 - DNA, 25 bp, Probe sequence
ggtactttcatttacacttacgtct

SEQ ID NO: 84326 - DNA, 25 bp, Probe sequence
tcaagtatttcttcttaattttgtt

SEQ ID NO: 84327 - DNA, 25 bp, Probe sequence
tacacttacgtctactctattttaa

SEQ ID NO: 84328 - DNA, 25 bp, Probe sequence
tacgctatttttgaaatttttctat

SEQ ID NO: 84329 - DNA, 25 bp, Probe sequence
tagaaggctcatgtatttataatca

SEQ ID NO: 84330 - DNA, 25 bp, Probe sequence
ttgccatgacaagatattttttaca

SEQ ID NO: 84331 - DNA, 25 bp, Probe sequence
atcattattcgttattcgttacttt

SEQ ID NO: 84332 - DNA, 25 bp, Probe sequence
aacttctagttgcacgtcattgctc

SEQ ID NO: 84333 - DNA, 25 bp, Probe sequence
caggatgtcgcttactatttttgtt

SEQ ID NO: 84334 - DNA, 25 bp, Probe sequence
gcaaaaaaatgcctatcctcttgga

SEQ ID NO: 84335 - DNA, 25 bp, Probe sequence
gacagtagcatatgtttgtacgtct

SEQ ID NO: 84336 - DNA, 25 bp, Probe sequence
gattatcattcgtccatatatcttt

SEQ ID NO: 84337 - DNA, 25 bp, Probe sequence
gttctttatcgtttatgtttgtgta

SEQ ID NO: 84338 - DNA, 25 bp, Probe sequence
ggaggattggtggcatatcacaacg

SEQ ID NO: 84339 - DNA, 25 bp, Probe sequence
tgtctacgtttatctttcatatcca

SEQ ID NO: 84340 - DNA, 25 bp, Probe sequence
tgatgaggtctctattccaataata

SEQ ID NO: 84341 - DNA, 25 bp, Probe sequence
tcatatccaaccactaagttacttg

SEQ ID NO: 84342 - DNA, 25 bp, Probe sequence
taagctattaattctattttccaat

SEQ ID NO: 84343 - DNA, 25 bp, Probe sequence
ttattagtttctcacggcggattat

SEQ ID NO: 84344 - DNA, 25 bp, Probe sequence
ttatcattttttgttctttatcgtt

SEQ ID NO: 84345 - DNA, 25 bp, Probe sequence
ttgtgcgcattttccgtcttataac

SEQ ID NO: 84346 - DNA, 25 bp, Probe sequence
attagctgttttgtatacctttcct

SEQ ID NO: 84347 - DNA, 25 bp, Probe sequence
aaaatgcggttctacttaaaatatg

SEQ ID NO: 84348 - DNA, 25 bp, Probe sequence
gcaaaaagctagcaccgcttctcac

SEQ ID NO: 84349 - DNA, 25 bp, Probe sequence
gcaatactagcttattacgattcat

SEQ ID NO: 84350 - DNA, 25 bp, Probe sequence
gagacgcagaaatgtcatccatgaa

SEQ ID NO: 84351 - DNA, 25 bp, Probe sequence
gataatcacgtgcaatgaatttctt

SEQ ID NO: 84352 - DNA, 25 bp, Probe sequence
gattttccctacagaaactatcagt

SEQ ID NO: 84353 - DNA, 25 bp, Probe sequence
gttcatcgaccggtttcttatattt

SEQ ID NO: 84354 - DNA, 25 bp, Probe sequence
gtatacctttcctattatgtaactt

SEQ ID NO: 84355 - DNA, 25 bp, Probe sequence
gtcatccatgaaaacccataccagc

SEQ ID NO: 84356 - DNA, 25 bp, Probe sequence
gtgcaaatatacgattttccctaca

SEQ ID NO: 84357 - DNA, 25 bp, Probe sequence
tgtaactttagttcatcgaccggtt

SEQ ID NO: 84358 - DNA, 25 bp, Probe sequence
tcaatctctctatatgactgcaata

SEQ ID NO: 84359 - DNA, 25 bp, Probe sequence
tagcaccgcttctcacatatgatga

SEQ ID NO: 84360 - DNA, 25 bp, Probe sequence
ttctctttaaacagtcaatctctct

SEQ ID NO: 84361 - DNA, 25 bp, Probe sequence
ataaagtcgtctcacagcagtgccg

SEQ ID NO: 84362 - DNA, 25 bp, Probe sequence
agccatttcccaccaataacataaa

SEQ ID NO: 84363 - DNA, 25 bp, Probe sequence
aaagcacccgataaagtcgtctcac

SEQ ID NO: 84364 - DNA, 25 bp, Probe sequence
ctcacagcagtgccgaactttatag

SEQ ID NO: 84365 - DNA, 25 bp, Probe sequence
ccgaactttatagggtgactctcat

SEQ ID NO: 84366 - DNA, 25 bp, Probe sequence
ccgataaagtcgtctcacagcagtg

SEQ ID NO: 84367 - DNA, 25 bp, Probe sequence
gcagtgccgaactttatagggtgac

SEQ ID NO: 84368 - DNA, 25 bp, Probe sequence
gcacccgataaagtcgtctcacagc

SEQ ID NO: 84369 - DNA, 25 bp, Probe sequence
gaaccttaattccaacaacagccat

SEQ ID NO: 84370 - DNA, 25 bp, Probe sequence
gtctcacagcagtgccgaactttat

SEQ ID NO: 84371 - DNA, 25 bp, Probe sequence
gtgccgaactttatagggtgactct

SEQ ID NO: 84372 - DNA, 25 bp, Probe sequence
tatcgaattattttttacatttcaa

SEQ ID NO: 84373 - DNA, 25 bp, Probe sequence
tttacatttcaaatagaaccttaat

SEQ ID NO: 84374 - DNA, 25 bp, Probe sequence
ttaattccaacaacagccatttccc

SEQ ID NO: 84375 - DNA, 25 bp, Probe sequence
ttcccaccaataacataaaaaagca

SEQ ID NO: 84376 - DNA, 25 bp, Probe sequence
attgtacacaattctggataactat

SEQ ID NO: 84377 - DNA, 25 bp, Probe sequence
atatcccatgtttatcaacgtttat

SEQ ID NO: 84378 - DNA, 25 bp, Probe sequence
atcaacgtttatagcttttttccat

SEQ ID NO: 84379 - DNA, 25 bp, Probe sequence
aactatccccatttctgtggataaa

SEQ ID NO: 84380 - DNA, 25 bp, Probe sequence
cttgatgtcttattacttatccccg

SEQ ID NO: 84381 - DNA, 25 bp, Probe sequence
cgtacctcttatttaagaaatacag

SEQ ID NO: 84382 - DNA, 25 bp, Probe sequence
ccgtttttatatcccatgtttatca

SEQ ID NO: 84383 - DNA, 25 bp, Probe sequence
gaaatacagtagtattgttttcaat

SEQ ID NO: 84384 - DNA, 25 bp, Probe sequence
gataactatccccatttctgtggat

SEQ ID NO: 84385 - DNA, 25 bp, Probe sequence
gtggataaacaccttgatgtcttat

SEQ ID NO: 84386 - DNA, 25 bp, Probe sequence
tggataactatccccatttctgtgg

SEQ ID NO: 84387 - DNA, 25 bp, Probe sequence
tgatgtcttattacttatccccgtt

SEQ ID NO: 84388 - DNA, 25 bp, Probe sequence
tccccatttctgtggataaacacct

SEQ ID NO: 84389 - DNA, 25 bp, Probe sequence
taaacaccttgatgtcttattactt

SEQ ID NO: 84390 - DNA, 25 bp, Probe sequence
ttttatatcccatgtttatcaacgt

SEQ ID NO: 84391 - DNA, 25 bp, Probe sequence
agctagaactttgcttcactataag

SEQ ID NO: 84392 - DNA, 25 bp, Probe sequence
aaatccctttatgaagcggctgaaa

SEQ ID NO: 84393 - DNA, 25 bp, Probe sequence
aaacctcatatgttctgatacattc

SEQ ID NO: 84394 - DNA, 25 bp, Probe sequence
aaaatcatgaacctcattacttatg

SEQ ID NO: 84395 - DNA, 25 bp, Probe sequence
aacagcaattcacataaacctcata

SEQ ID NO: 84396 - DNA, 25 bp, Probe sequence
aagaattttctcaaagctagaactt

SEQ ID NO: 84397 - DNA, 25 bp, Probe sequence
gcggaggctaactatgtcaaaaatc

SEQ ID NO: 84398 - DNA, 25 bp, Probe sequence
gaaagactgcggaggctaactatgt

SEQ ID NO: 84399 - DNA, 25 bp, Probe sequence
gaatatttcgctattatttacttga

SEQ ID NO: 84400 - DNA, 25 bp, Probe sequence
gaacctcattacttatgataagctt

SEQ ID NO: 84401 - DNA, 25 bp, Probe sequence
gataagcttcttaaaaacataacag

SEQ ID NO: 84402 - DNA, 25 bp, Probe sequence
gttctgatacattcaaaatcccttt

SEQ ID NO: 84403 - DNA, 25 bp, Probe sequence
tatattttaccgtaatttactatat

SEQ ID NO: 84404 - DNA, 25 bp, Probe sequence
tttgcttcactataagtattcagta

SEQ ID NO: 84405 - DNA, 25 bp, Probe sequence
tttcttcaatatgtacttatttata

SEQ ID NO: 84406 - DNA, 25 bp, Probe sequence
atcagttagcttatttagaaagttt

SEQ ID NO: 84407 - DNA, 25 bp, Probe sequence
atcttgtttcagactgtggacaaac

SEQ ID NO: 84408 - DNA, 25 bp, Probe sequence
atctgctctttatcaccataaaaat

SEQ ID NO: 84409 - DNA, 25 bp, Probe sequence
aggaatcttgtttcagactgtggac

SEQ ID NO: 84410 - DNA, 25 bp, Probe sequence
agatcacaattttattttagctctt

SEQ ID NO: 84411 - DNA, 25 bp, Probe sequence
aattttattttagctcttgttcaag

SEQ ID NO: 84412 - DNA, 25 bp, Probe sequence
cttatctgctctttatcaccataaa

SEQ ID NO: 84413 - DNA, 25 bp, Probe sequence
ctatttttattagatcacaatttta

SEQ ID NO: 84414 - DNA, 25 bp, Probe sequence
gaatataggaatcttgtttcagact

SEQ ID NO: 84415 - DNA, 25 bp, Probe sequence
gactgtggacaaactgattttttat

SEQ ID NO: 84416 - DNA, 25 bp, Probe sequence
gattttttatcagttagcttattta

SEQ ID NO: 84417 - DNA, 25 bp, Probe sequence
tcttatctgctctttatcaccataa

SEQ ID NO: 84418 - DNA, 25 bp, Probe sequence
tatcttatctgctctttatcaccat

SEQ ID NO: 84419 - DNA, 25 bp, Probe sequence
tttattttagctcttgttcaagtaa

SEQ ID NO: 84420 - DNA, 25 bp, Probe sequence
ttatcttatctgctctttatcacca

SEQ ID NO: 84421 - DNA, 25 bp, Probe sequence
atagactaattatcttcatcattgt

SEQ ID NO: 84422 - DNA, 25 bp, Probe sequence
atcttcatcattgtaaaacaaatta

SEQ ID NO: 84423 - DNA, 25 bp, Probe sequence
actcaacttaaatatcgacaaatta

SEQ ID NO: 84424 - DNA, 25 bp, Probe sequence
aactcaacttaaatatcgacaaatt

SEQ ID NO: 84425 - DNA, 25 bp, Probe sequence
ccctttcttttgatagactaattat

SEQ ID NO: 84426 - DNA, 25 bp, Probe sequence
cctttcttttgatagactaattatc

SEQ ID NO: 84427 - DNA, 25 bp, Probe sequence
gatagactaattatcttcatcattg

SEQ ID NO: 84428 - DNA, 25 bp, Probe sequence
tgatagactaattatcttcatcatt

SEQ ID NO: 84429 - DNA, 25 bp, Probe sequence
tcattgtaaaacaaattacaccctt

SEQ ID NO: 84430 - DNA, 25 bp, Probe sequence
tcttttgatagactaattatcttca

SEQ ID NO: 84431 - DNA, 25 bp, Probe sequence
taactcaacttaaatatcgacaaat

SEQ ID NO: 84432 - DNA, 25 bp, Probe sequence
tttgatagactaattatcttcatca

SEQ ID NO: 84433 - DNA, 25 bp, Probe sequence
ttttgatagactaattatcttcatc

SEQ ID NO: 84434 - DNA, 25 bp, Probe sequence
ttcttttgatagactaattatcttc

SEQ ID NO: 84435 - DNA, 25 bp, Probe sequence
ttgatagactaattatcttcatcat

SEQ ID NO: 84436 - DNA, 25 bp, Probe sequence
acgggccagtttgttgaagattaga

SEQ ID NO: 84437 - DNA, 25 bp, Probe sequence
acaaacgggccagtttgttgaagat

SEQ ID NO: 84438 - DNA, 25 bp, Probe sequence
aacgggccagtttgttgaagattag

SEQ ID NO: 84439 - DNA, 25 bp, Probe sequence
caaacgggccagtttgttgaagatt

SEQ ID NO: 84440 - DNA, 25 bp, Probe sequence
cagtttgttgaagattagatggttc

SEQ ID NO: 84441 - DNA, 25 bp, Probe sequence
cgggccagtttgttgaagattagat

SEQ ID NO: 84442 - DNA, 25 bp, Probe sequence
gccagtttgttgaagattagatggt

SEQ ID NO: 84443 - DNA, 25 bp, Probe sequence
gaagattagatggttctgttgcaaa

SEQ ID NO: 84444 - DNA, 25 bp, Probe sequence
gttgaagattagatggttctgttgc

SEQ ID NO: 84445 - DNA, 25 bp, Probe sequence
gtttgttgaagattagatggttctg

SEQ ID NO: 84446 - DNA, 25 bp, Probe sequence
gggccagtttgttgaagattagatg

SEQ ID NO: 84447 - DNA, 25 bp, Probe sequence
ggccagtttgttgaagattagatgg

SEQ ID NO: 84448 - DNA, 25 bp, Probe sequence
tgaagattagatggttctgttgcaa

SEQ ID NO: 84449 - DNA, 25 bp, Probe sequence
tttgttgaagattagatggttctgt

SEQ ID NO: 84450 - DNA, 25 bp, Probe sequence
ttgaagattagatggttctgttgca

SEQ ID NO: 84451 - DNA, 25 bp, Probe sequence
attttagttgctgaaaggtgcgttg

SEQ ID NO: 84452 - DNA, 25 bp, Probe sequence
acgtcatttttattttagttgctga

SEQ ID NO: 84453 - DNA, 25 bp, Probe sequence
aacttgttctttcttatcttgatac

SEQ ID NO: 84454 - DNA, 25 bp, Probe sequence
cttgttctttcttatcttgatacat

SEQ ID NO: 84455 - DNA, 25 bp, Probe sequence
gcacctgaaaaggtgtctttttttg

SEQ ID NO: 84456 - DNA, 25 bp, Probe sequence
gatacatatagaaataacgtcattt

SEQ ID NO: 84457 - DNA, 25 bp, Probe sequence
gttctttcttatcttgatacatata

SEQ ID NO: 84458 - DNA, 25 bp, Probe sequence
gtcatttttattttagttgctgaaa

SEQ ID NO: 84459 - DNA, 25 bp, Probe sequence
tgtctttttttgatggttttgaact

SEQ ID NO: 84460 - DNA, 25 bp, Probe sequence
tgaacttgttctttcttatcttgat

SEQ ID NO: 84461 - DNA, 25 bp, Probe sequence
tctttcttatcttgatacatataga

SEQ ID NO: 84462 - DNA, 25 bp, Probe sequence
tttgaacttgttctttcttatcttg

SEQ ID NO: 84463 - DNA, 25 bp, Probe sequence
tttagttgctgaaaggtgcgttgaa

SEQ ID NO: 84464 - DNA, 25 bp, Probe sequence
tttttgatggttttgaacttgttct

SEQ ID NO: 84465 - DNA, 25 bp, Probe sequence
ttgaacttgttctttcttatcttga

SEQ ID NO: 84466 - DNA, 25 bp, Probe sequence
acgatgacctctaataattgttaat

SEQ ID NO: 84467 - DNA, 25 bp, Probe sequence
aattgttaatcatgttggttacgta

SEQ ID NO: 84468 - DNA, 25 bp, Probe sequence
aagggtgtgcttaaatcgggccatt

SEQ ID NO: 84469 - DNA, 25 bp, Probe sequence
aatcgggccattttgcgtaataaga

SEQ ID NO: 84470 - DNA, 25 bp, Probe sequence
catggctgtcatggcgcattaacgg

SEQ ID NO: 84471 - DNA, 25 bp, Probe sequence
gcttaaatcgggccattttgcgtaa

SEQ ID NO: 84472 - DNA, 25 bp, Probe sequence
gtattagtaattatcatggctgtca

SEQ ID NO: 84473 - DNA, 25 bp, Probe sequence
gtatttattaacttctcctagtatt

SEQ ID NO: 84474 - DNA, 25 bp, Probe sequence
gtgtgcttaaatcgggccattttgc

SEQ ID NO: 84475 - DNA, 25 bp, Probe sequence
ggcgcattaacggaataaagggtgt

SEQ ID NO: 84476 - DNA, 25 bp, Probe sequence
ggctgtcatggcgcattaacggaat

SEQ ID NO: 84477 - DNA, 25 bp, Probe sequence
taatcatgttggttacgtatttatt

SEQ ID NO: 84478 - DNA, 25 bp, Probe sequence
tacgtatttattaacttctcctagt

SEQ ID NO: 84479 - DNA, 25 bp, Probe sequence
ttatcatggctgtcatggcgcatta

SEQ ID NO: 84480 - DNA, 25 bp, Probe sequence
ttaacttctcctagtattagtaatt

SEQ ID NO: 84481 - DNA, 25 bp, Probe sequence
aggattggaggatgcttaggaagac

SEQ ID NO: 84482 - DNA, 25 bp, Probe sequence
acagaaccgattagatgctataatt

SEQ ID NO: 84483 - DNA, 25 bp, Probe sequence
caacagaaccgattagatgctataa

SEQ ID NO: 84484 - DNA, 25 bp, Probe sequence
ctgacatgataaattagtggttagc

SEQ ID NO: 84485 - DNA, 25 bp, Probe sequence
gcgaacactgacatgataaattagt

SEQ ID NO: 84486 - DNA, 25 bp, Probe sequence
gcttaggaagacgagttattaatag

SEQ ID NO: 84487 - DNA, 25 bp, Probe sequence
gaaccgattagatgctataattgtt

SEQ ID NO: 84488 - DNA, 25 bp, Probe sequence
gaggatgcttaggaagacgagttat

SEQ ID NO: 84489 - DNA, 25 bp, Probe sequence
gatgcttaggaagacgagttattaa

SEQ ID NO: 84490 - DNA, 25 bp, Probe sequence
gattagatgctataattgttattaa

SEQ ID NO: 84491 - DNA, 25 bp, Probe sequence
ggattggaggatgcttaggaagacg

SEQ ID NO: 84492 - DNA, 25 bp, Probe sequence
tggaggatgcttaggaagacgagtt

SEQ ID NO: 84493 - DNA, 25 bp, Probe sequence
tgcaacagaaccgattagatgctat

SEQ ID NO: 84494 - DNA, 25 bp, Probe sequence
tagtggttagctatatttttttact

SEQ ID NO: 84495 - DNA, 25 bp, Probe sequence
tttgcaacagaaccgattagatgct

SEQ ID NO: 84496 - DNA, 25 bp, Probe sequence
atctctattccataatacggttctg

SEQ ID NO: 84497 - DNA, 25 bp, Probe sequence
accaacatctctattccataatacg

SEQ ID NO: 84498 - DNA, 25 bp, Probe sequence
acatctctattccataatacggttc

SEQ ID NO: 84499 - DNA, 25 bp, Probe sequence
aacatctctattccataatacggtt

SEQ ID NO: 84500 - DNA, 25 bp, Probe sequence
caacatctctattccataatacggt

SEQ ID NO: 84501 - DNA, 25 bp, Probe sequence
catctctattccataatacggttct

SEQ ID NO: 84502 - DNA, 25 bp, Probe sequence
ctattccataatacggttctgttgc

SEQ ID NO: 84503 - DNA, 25 bp, Probe sequence
ctctattccataatacggttctgtt

SEQ ID NO: 84504 - DNA, 25 bp, Probe sequence
ccaacatctctattccataatacgg

SEQ ID NO: 84505 - DNA, 25 bp, Probe sequence
gttaccaacatctctattccataat

SEQ ID NO: 84506 - DNA, 25 bp, Probe sequence
tctctattccataatacggttctgt

SEQ ID NO: 84507 - DNA, 25 bp, Probe sequence
tctattccataatacggttctgttg

SEQ ID NO: 84508 - DNA, 25 bp, Probe sequence
taccaacatctctattccataatac

SEQ ID NO: 84509 - DNA, 25 bp, Probe sequence
tattccataatacggttctgttgca

SEQ ID NO: 84510 - DNA, 25 bp, Probe sequence
ttaccaacatctctattccataata

SEQ ID NO: 84511 - DNA, 25 bp, Probe sequence
atgtcccaagctcatcaagcacaat

SEQ ID NO: 84512 - DNA, 25 bp, Probe sequence
agcatatcactgtaaactttaaaaa

SEQ ID NO: 84513 - DNA, 25 bp, Probe sequence
aaatcagtttagtgatatgcttatt

SEQ ID NO: 84514 - DNA, 25 bp, Probe sequence
aagctcatcaagcacaatcggccac

SEQ ID NO: 84515 - DNA, 25 bp, Probe sequence
aataagcatatcactgtaaacttta

SEQ ID NO: 84516 - DNA, 25 bp, Probe sequence
ctcatcaagcacaatcggccactag

SEQ ID NO: 84517 - DNA, 25 bp, Probe sequence
cccaagctcatcaagcacaatcggc

SEQ ID NO: 84518 - DNA, 25 bp, Probe sequence
ccaagctcatcaagcacaatcggcc

SEQ ID NO: 84519 - DNA, 25 bp, Probe sequence
gtcccaagctcatcaagcacaatcg

SEQ ID NO: 84520 - DNA, 25 bp, Probe sequence
gtgatatgcttatttatttcgagtt

SEQ ID NO: 84521 - DNA, 25 bp, Probe sequence
tcgagttaggatttatgtcccaagc

SEQ ID NO: 84522 - DNA, 25 bp, Probe sequence
tcatcaagcacaatcggccactagt

SEQ ID NO: 84523 - DNA, 25 bp, Probe sequence
tatgtcccaagctcatcaagcacaa

SEQ ID NO: 84524 - DNA, 25 bp, Probe sequence
tatgcttatttatttcgagttagga

SEQ ID NO: 84525 - DNA, 25 bp, Probe sequence
ttatgtcccaagctcatcaagcaca

SEQ ID NO: 84526 - DNA, 25 bp, Probe sequence
atctacgtctcatctcatttttaaa

SEQ ID NO: 84527 - DNA, 25 bp, Probe sequence
atggagttaatctacgtctcatctc

SEQ ID NO: 84528 - DNA, 25 bp, Probe sequence
agattcgtattgattatggagttaa

SEQ ID NO: 84529 - DNA, 25 bp, Probe sequence
agctccattttgtaatcaagtctag

SEQ ID NO: 84530 - DNA, 25 bp, Probe sequence
aagtcgatagattcgtattgattat

SEQ ID NO: 84531 - DNA, 25 bp, Probe sequence
aattaacgtaactgtattatcacat

SEQ ID NO: 84532 - DNA, 25 bp, Probe sequence
cattaatcgcacttttatttccatt

SEQ ID NO: 84533 - DNA, 25 bp, Probe sequence
gtattatcacattaatcgcactttt

SEQ ID NO: 84534 - DNA, 25 bp, Probe sequence
gtcccaagctccattttgtaatcaa

SEQ ID NO: 84535 - DNA, 25 bp, Probe sequence
tcaagtctagtttttctgtacccct

SEQ ID NO: 84536 - DNA, 25 bp, Probe sequence
taatcgcacttttatttccattaaa

SEQ ID NO: 84537 - DNA, 25 bp, Probe sequence
tacgtctcatctcatttttaaaaaa

SEQ ID NO: 84538 - DNA, 25 bp, Probe sequence
ttatgtcccaagctccattttgtaa

SEQ ID NO: 84539 - DNA, 25 bp, Probe sequence
ttaaaaaatcatttatgtcccaagc

SEQ ID NO: 84540 - DNA, 25 bp, Probe sequence
ttaatctacgtctcatctcattttt

SEQ ID NO: 84541 - DNA, 25 bp, Probe sequence
aagtctaccgtcactgaaacgtaag

SEQ ID NO: 84542 - DNA, 25 bp, Probe sequence
agtctaccgtcactgaaacgtaaga

SEQ ID NO: 84543 - DNA, 25 bp, Probe sequence
aggtaagtctaccgtcactgaaacg

SEQ ID NO: 84544 - DNA, 25 bp, Probe sequence
accgtcactgaaacgtaagactcac

SEQ ID NO: 84545 - DNA, 25 bp, Probe sequence
cactgaaacgtaagactcacctcta

SEQ ID NO: 84546 - DNA, 25 bp, Probe sequence
ctaccgtcactgaaacgtaagactc

SEQ ID NO: 84547 - DNA, 25 bp, Probe sequence
ctgaaacgtaagactcacctctaac

SEQ ID NO: 84548 - DNA, 25 bp, Probe sequence
gttaaaggtaagtctaccgtcactg

SEQ ID NO: 84549 - DNA, 25 bp, Probe sequence
gaaacgtaagactcacctctaactt

SEQ ID NO: 84550 - DNA, 25 bp, Probe sequence
gtaagtctaccgtcactgaaacgta

SEQ ID NO: 84551 - DNA, 25 bp, Probe sequence
gtcactgaaacgtaagactcacctc

SEQ ID NO: 84552 - DNA, 25 bp, Probe sequence
gtctaccgtcactgaaacgtaagac

SEQ ID NO: 84553 - DNA, 25 bp, Probe sequence
ggtaagtctaccgtcactgaaacgt

SEQ ID NO: 84554 - DNA, 25 bp, Probe sequence
taaaggtaagtctaccgtcactgaa

SEQ ID NO: 84555 - DNA, 25 bp, Probe sequence
ttaattttttagtatgtaacatgtt

SEQ ID NO: 84556 - DNA, 25 bp, Probe sequence
attataacattattttgacataaat

SEQ ID NO: 84557 - DNA, 25 bp, Probe sequence
atactacatttgtaatatactacaa

SEQ ID NO: 84558 - DNA, 25 bp, Probe sequence
aaattataacattattttgacataa

SEQ ID NO: 84559 - DNA, 25 bp, Probe sequence
aaatactacatttgtaatatactac

SEQ ID NO: 84560 - DNA, 25 bp, Probe sequence
aatgtagtcttatataaggaggata

SEQ ID NO: 84561 - DNA, 25 bp, Probe sequence
aatactacatttgtaatatactaca

SEQ ID NO: 84562 - DNA, 25 bp, Probe sequence
aattataacattattttgacataaa

SEQ ID NO: 84563 - DNA, 25 bp, Probe sequence
ctacacctccatatcacaaaaatta

SEQ ID NO: 84564 - DNA, 25 bp, Probe sequence
ctacaaatgtagtcttatataagga

SEQ ID NO: 84565 - DNA, 25 bp, Probe sequence
gacataaatactacatttgtaatat

SEQ ID NO: 84566 - DNA, 25 bp, Probe sequence
tgacataaatactacatttgtaata

SEQ ID NO: 84567 - DNA, 25 bp, Probe sequence
tctacacctccatatcacaaaaatt

SEQ ID NO: 84568 - DNA, 25 bp, Probe sequence
tacaaatgtagtcttatataaggag

SEQ ID NO: 84569 - DNA, 25 bp, Probe sequence
ttctacacctccatatcacaaaaat

SEQ ID NO: 84570 - DNA, 25 bp, Probe sequence
ttgacataaatactacatttgtaat

SEQ ID NO: 84571 - DNA, 25 bp, Probe sequence
aacagaggaaatattcaacgacttg

SEQ ID NO: 84572 - DNA, 25 bp, Probe sequence
aacgacttgattgtttcctctgttt

SEQ ID NO: 84573 - DNA, 25 bp, Probe sequence
caacgacttgattgtttcctctgtt

SEQ ID NO: 84574 - DNA, 25 bp, Probe sequence
ctctgttttctatgtattgttgtaa

SEQ ID NO: 84575 - DNA, 25 bp, Probe sequence
cctctgttttctatgtattgttgta

SEQ ID NO: 84576 - DNA, 25 bp, Probe sequence
gtttcctctgttttctatgtattgt

SEQ ID NO: 84577 - DNA, 25 bp, Probe sequence
tgtttcctctgttttctatgtattg

SEQ ID NO: 84578 - DNA, 25 bp, Probe sequence
tcctctgttttctatgtattgttgt

SEQ ID NO: 84579 - DNA, 25 bp, Probe sequence
tctgttttctatgtattgttgtaaa

SEQ ID NO: 84580 - DNA, 25 bp, Probe sequence
tcaacgacttgattgtttcctctgt

SEQ ID NO: 84581 - DNA, 25 bp, Probe sequence
tttcctctgttttctatgtattgtt

SEQ ID NO: 84582 - DNA, 25 bp, Probe sequence
ttttctatgtattgttgtaaacaca

SEQ ID NO: 84583 - DNA, 25 bp, Probe sequence
ttcaacgacttgattgtttcctctg

SEQ ID NO: 84584 - DNA, 25 bp, Probe sequence
ttcctctgttttctatgtattgttg

SEQ ID NO: 84585 - DNA, 25 bp, Probe sequence
ttgtttcctctgttttctatgtatt

SEQ ID NO: 84586 - DNA, 25 bp, Probe sequence
attgcctaccccataagttattttg

SEQ ID NO: 84587 - DNA, 25 bp, Probe sequence
cacttaggttatcatcttcgttctt

SEQ ID NO: 84588 - DNA, 25 bp, Probe sequence
catgtatttttataccaactatttt

SEQ ID NO: 84589 - DNA, 25 bp, Probe sequence
cataattgcctaccccataagttat

SEQ ID NO: 84590 - DNA, 25 bp, Probe sequence
cttaggttatcatcttcgttctttt

SEQ ID NO: 84591 - DNA, 25 bp, Probe sequence
cctcacttaggttatcatcttcgtt

SEQ ID NO: 84592 - DNA, 25 bp, Probe sequence
gaatttagtttatagtttatcatgt

SEQ ID NO: 84593 - DNA, 25 bp, Probe sequence
gttatcatcttcgttcttttatttt

SEQ ID NO: 84594 - DNA, 25 bp, Probe sequence
gtttatcatgtatttttataccaac

SEQ ID NO: 84595 - DNA, 25 bp, Probe sequence
tgcctaccccataagttattttgaa

SEQ ID NO: 84596 - DNA, 25 bp, Probe sequence
taattgcctaccccataagttattt

SEQ ID NO: 84597 - DNA, 25 bp, Probe sequence
tagaacaacttaaaacctcacttag

SEQ ID NO: 84598 - DNA, 25 bp, Probe sequence
taggttatcatcttcgttcttttat

SEQ ID NO: 84599 - DNA, 25 bp, Probe sequence
tatcatcttcgttcttttatttttt

SEQ ID NO: 84600 - DNA, 25 bp, Probe sequence
tataccaactattttaacataaatt

SEQ ID NO: 84601 - DNA, 25 bp, Probe sequence
atagaactataaaaatccctcaatc

SEQ ID NO: 84602 - DNA, 25 bp, Probe sequence
atccctcaatccgaaaattcaattc

SEQ ID NO: 84603 - DNA, 25 bp, Probe sequence
acgaactttgattattcatttgaat

SEQ ID NO: 84604 - DNA, 25 bp, Probe sequence
aagacaattacgaactttgattatt

SEQ ID NO: 84605 - DNA, 25 bp, Probe sequence
aattacgaactttgattattcattt

SEQ ID NO: 84606 - DNA, 25 bp, Probe sequence
caattacgaactttgattattcatt

SEQ ID NO: 84607 - DNA, 25 bp, Probe sequence
ccctcaatccgaaaattcaattcgg

SEQ ID NO: 84608 - DNA, 25 bp, Probe sequence
gcaatagaactataaaaatccctca

SEQ ID NO: 84609 - DNA, 25 bp, Probe sequence
gaaaattcaattcggattgagggat

SEQ ID NO: 84610 - DNA, 25 bp, Probe sequence
gacaattacgaactttgattattca

SEQ ID NO: 84611 - DNA, 25 bp, Probe sequence
tgagggatttttttataaagacaat

SEQ ID NO: 84612 - DNA, 25 bp, Probe sequence
tccctcaatccgaaaattcaattcg

SEQ ID NO: 84613 - DNA, 25 bp, Probe sequence
tacgaactttgattattcatttgaa

SEQ ID NO: 84614 - DNA, 25 bp, Probe sequence
ttttcttctgcaatagaactataaa

SEQ ID NO: 84615 - DNA, 25 bp, Probe sequence
ttacgaactttgattattcatttga

SEQ ID NO: 84616 - DNA, 25 bp, Probe sequence
attcatttcctccacataaattgat

SEQ ID NO: 84617 - DNA, 25 bp, Probe sequence
atccgttttattataccctcatagg

SEQ ID NO: 84618 - DNA, 25 bp, Probe sequence
acccctataggtatttggcaaatga

SEQ ID NO: 84619 - DNA, 25 bp, Probe sequence
aattgtcaaatacccctataggtat

SEQ ID NO: 84620 - DNA, 25 bp, Probe sequence
caaaattgtcaaatacccctatagg

SEQ ID NO: 84621 - DNA, 25 bp, Probe sequence
caaatgattctatccgttttattat

SEQ ID NO: 84622 - DNA, 25 bp, Probe sequence
catttcctccacataaattgattaa

SEQ ID NO: 84623 - DNA, 25 bp, Probe sequence
ctatccgttttattataccctcata

SEQ ID NO: 84624 - DNA, 25 bp, Probe sequence
gtatttggcaaatgattctatccgt

SEQ ID NO: 84625 - DNA, 25 bp, Probe sequence
ggcaaatgattctatccgttttatt

SEQ ID NO: 84626 - DNA, 25 bp, Probe sequence
tccgttttattataccctcataggt

SEQ ID NO: 84627 - DNA, 25 bp, Probe sequence
taccctcataggtatttataggagg

SEQ ID NO: 84628 - DNA, 25 bp, Probe sequence
tattataccctcataggtatttata

SEQ ID NO: 84629 - DNA, 25 bp, Probe sequence
ttctatccgttttattataccctca

SEQ ID NO: 84630 - DNA, 25 bp, Probe sequence
ttggcaaatgattctatccgtttta

SEQ ID NO: 84631 - DNA, 25 bp, Probe sequence
atcacaccttctccaggagatatca

SEQ ID NO: 84632 - DNA, 25 bp, Probe sequence
actcttgataagacatcacaccttc

SEQ ID NO: 84633 - DNA, 25 bp, Probe sequence
acatcacaccttctccaggagatat

SEQ ID NO: 84634 - DNA, 25 bp, Probe sequence
acaccttctccaggagatatcaaaa

SEQ ID NO: 84635 - DNA, 25 bp, Probe sequence
cacaccttctccaggagatatcaaa

SEQ ID NO: 84636 - DNA, 25 bp, Probe sequence
catcacaccttctccaggagatatc

SEQ ID NO: 84637 - DNA, 25 bp, Probe sequence
cttgataagacatcacaccttctcc

SEQ ID NO: 84638 - DNA, 25 bp, Probe sequence
ctcttgataagacatcacaccttct

SEQ ID NO: 84639 - DNA, 25 bp, Probe sequence
gatatcaaaataactcagagaataa

SEQ ID NO: 84640 - DNA, 25 bp, Probe sequence
tcttgataagacatcacaccttctc

SEQ ID NO: 84641 - DNA, 25 bp, Probe sequence
tcacaccttctccaggagatatcaa

SEQ ID NO: 84642 - DNA, 25 bp, Probe sequence
tactcttgataagacatcacacctt

SEQ ID NO: 84643 - DNA, 25 bp, Probe sequence
ttactcttgataagacatcacacct

SEQ ID NO: 84644 - DNA, 25 bp, Probe sequence
ttctccaggagatatcaaaataact

SEQ ID NO: 84645 - DNA, 25 bp, Probe sequence
ttgataagacatcacaccttctcca

SEQ ID NO: 84646 - DNA, 25 bp, Probe sequence
attgagtatcaatataaactttata

SEQ ID NO: 84647 - DNA, 25 bp, Probe sequence
atctagggtaagtaaattgagtatc

SEQ ID NO: 84648 - DNA, 25 bp, Probe sequence
attaatctgtagacaaattgtgaaa

SEQ ID NO: 84649 - DNA, 25 bp, Probe sequence
acgctaacggtcagctttattgaac

SEQ ID NO: 84650 - DNA, 25 bp, Probe sequence
aaacgctaacggtcagctttattga

SEQ ID NO: 84651 - DNA, 25 bp, Probe sequence
aacggtcagctttattgaacagtaa

SEQ ID NO: 84652 - DNA, 25 bp, Probe sequence
cttaaacgctaacggtcagctttat

SEQ ID NO: 84653 - DNA, 25 bp, Probe sequence
gctaacggtcagctttattgaacag

SEQ ID NO: 84654 - DNA, 25 bp, Probe sequence
gaaaggatgtacttaaacgctaacg

SEQ ID NO: 84655 - DNA, 25 bp, Probe sequence
gtatatgtccaatctagggtaagta

SEQ ID NO: 84656 - DNA, 25 bp, Probe sequence
gtacttaaacgctaacggtcagctt

SEQ ID NO: 84657 - DNA, 25 bp, Probe sequence
gtaatttaagtatatgtccaatcta

SEQ ID NO: 84658 - DNA, 25 bp, Probe sequence
ggtcagctttattgaacagtaattt

SEQ ID NO: 84659 - DNA, 25 bp, Probe sequence
ggatgtacttaaacgctaacggtca

SEQ ID NO: 84660 - DNA, 25 bp, Probe sequence
tgaacataatcaacgaggtgaaatc

SEQ ID NO: 84661 - DNA, 25 bp, Probe sequence
atttcgggatttccttgtcatacca

SEQ ID NO: 84662 - DNA, 25 bp, Probe sequence
agccccaccctaacatcaatagtta

SEQ ID NO: 84663 - DNA, 25 bp, Probe sequence
aaactacatcactataacactatct

SEQ ID NO: 84664 - DNA, 25 bp, Probe sequence
cacaatcccaaaatcccgttattct

SEQ ID NO: 84665 - DNA, 25 bp, Probe sequence
cagtcattgtcgtaatttttttcat

SEQ ID NO: 84666 - DNA, 25 bp, Probe sequence
ctcattctcaccgggatgcgtaata

SEQ ID NO: 84667 - DNA, 25 bp, Probe sequence
gaacatcccacaatgattttttatc

SEQ ID NO: 84668 - DNA, 25 bp, Probe sequence
gattgggatttgcagattcgaagaa

SEQ ID NO: 84669 - DNA, 25 bp, Probe sequence
gtcataccaaggtttgaagcggttt

SEQ ID NO: 84670 - DNA, 25 bp, Probe sequence
tgtgcaagcacaatcccaaaatccc

SEQ ID NO: 84671 - DNA, 25 bp, Probe sequence
tgaaattgctaaagaacatcccaca

SEQ ID NO: 84672 - DNA, 25 bp, Probe sequence
tataagaaagcagagccccacccta

SEQ ID NO: 84673 - DNA, 25 bp, Probe sequence
tatggaattttctctcattctcacc

SEQ ID NO: 84674 - DNA, 25 bp, Probe sequence
ttttttcataactacacgatgctta

SEQ ID NO: 84675 - DNA, 25 bp, Probe sequence
ttctttcatttattttatctaacca

SEQ ID NO: 84676 - DNA, 25 bp, Probe sequence
attttcctatcttagttcattagta

SEQ ID NO: 84677 - DNA, 25 bp, Probe sequence
atttaattttcctatcttagttcat

SEQ ID NO: 84678 - DNA, 25 bp, Probe sequence
atcagcgttttttattttgtcaaca

SEQ ID NO: 84679 - DNA, 25 bp, Probe sequence
aaatgataacttcttggctaaaatg

SEQ ID NO: 84680 - DNA, 25 bp, Probe sequence
aaagcgctgttaaatcagcgttttt

SEQ ID NO: 84681 - DNA, 25 bp, Probe sequence
aacatatttttacaagctttcaaat

SEQ ID NO: 84682 - DNA, 25 bp, Probe sequence
aagaaagttaattgtgcgcatattt

SEQ ID NO: 84683 - DNA, 25 bp, Probe sequence
aatccatcttaatttagtacggaat

SEQ ID NO: 84684 - DNA, 25 bp, Probe sequence
ctatcttagttcattagtaggagga

SEQ ID NO: 84685 - DNA, 25 bp, Probe sequence
gcgcatatttaattttcctatctta

SEQ ID NO: 84686 - DNA, 25 bp, Probe sequence
gctttcaaatgataacttcttggct

SEQ ID NO: 84687 - DNA, 25 bp, Probe sequence
tgtgcgcatatttaattttcctatc

SEQ ID NO: 84688 - DNA, 25 bp, Probe sequence
taacttcttggctaaaatgaactta

SEQ ID NO: 84689 - DNA, 25 bp, Probe sequence
tagtacggaatttctaacatatttt

SEQ ID NO: 84690 - DNA, 25 bp, Probe sequence
tttgtcaacaaaaatccatcttaat

SEQ ID NO: 84691 - DNA, 25 bp, Probe sequence
cgttttaggggttcagtgcctatcg

SEQ ID NO: 84692 - DNA, 25 bp, Probe sequence
attctttttattcttcatggtatta

SEQ ID NO: 84693 - DNA, 25 bp, Probe sequence
atttgaatcattctttttattcttc

SEQ ID NO: 84694 - DNA, 25 bp, Probe sequence
atagcagccaactatggattaaata

SEQ ID NO: 84695 - DNA, 25 bp, Probe sequence
aggggttcagtgcctatcgatgata

SEQ ID NO: 84696 - DNA, 25 bp, Probe sequence
agtacactaaccatagcagccaact

SEQ ID NO: 84697 - DNA, 25 bp, Probe sequence
aaaactagactagtacactaaccat

SEQ ID NO: 84698 - DNA, 25 bp, Probe sequence
aatcattctttttattcttcatggt

SEQ ID NO: 84699 - DNA, 25 bp, Probe sequence
gactagtacactaaccatagcagcc

SEQ ID NO: 84700 - DNA, 25 bp, Probe sequence
ggggttcagtgcctatcgatgatag

SEQ ID NO: 84701 - DNA, 25 bp, Probe sequence
tgataggtgttcttttttataattt

SEQ ID NO: 84702 - DNA, 25 bp, Probe sequence
tacactaaccatagcagccaactat

SEQ ID NO: 84703 - DNA, 25 bp, Probe sequence
tatcgatgataggtgttctttttta

SEQ ID NO: 84704 - DNA, 25 bp, Probe sequence
tttattcttcatggtattaggttta

SEQ ID NO: 84705 - DNA, 25 bp, Probe sequence
ttgagtactgttttatatactagta

SEQ ID NO: 84706 - DNA, 25 bp, Probe sequence
agcgaattgtcccatagaagtatta

SEQ ID NO: 84707 - DNA, 25 bp, Probe sequence
acaaccgatattacttatttaccat

SEQ ID NO: 84708 - DNA, 25 bp, Probe sequence
aaagcgaattgtcccatagaagtat

SEQ ID NO: 84709 - DNA, 25 bp, Probe sequence
aagcgaattgtcccatagaagtatt

SEQ ID NO: 84710 - DNA, 25 bp, Probe sequence
caaccgatattacttatttaccatt

SEQ ID NO: 84711 - DNA, 25 bp, Probe sequence
cgaattgtcccatagaagtattaac

SEQ ID NO: 84712 - DNA, 25 bp, Probe sequence
cccatagaagtattaacaaccgata

SEQ ID NO: 84713 - DNA, 25 bp, Probe sequence
gcgaattgtcccatagaagtattaa

SEQ ID NO: 84714 - DNA, 25 bp, Probe sequence
gaattgtcccatagaagtattaaca

SEQ ID NO: 84715 - DNA, 25 bp, Probe sequence
gtattaacaaccgatattacttatt

SEQ ID NO: 84716 - DNA, 25 bp, Probe sequence
gtcccatagaagtattaacaaccga

SEQ ID NO: 84717 - DNA, 25 bp, Probe sequence
taaagcgaattgtcccatagaagta

SEQ ID NO: 84718 - DNA, 25 bp, Probe sequence
tagaagtattaacaaccgatattac

SEQ ID NO: 84719 - DNA, 25 bp, Probe sequence
tttaaagcgaattgtcccatagaag

SEQ ID NO: 84720 - DNA, 25 bp, Probe sequence
ttaaagcgaattgtcccatagaagt

SEQ ID NO: 84721 - DNA, 25 bp, Probe sequence
atagtagactgaccccaattagtgg

SEQ ID NO: 84722 - DNA, 25 bp, Probe sequence
attatagcttctttccctctatatc

SEQ ID NO: 84723 - DNA, 25 bp, Probe sequence
actttcgttgaattcatattaaaat

SEQ ID NO: 84724 - DNA, 25 bp, Probe sequence
aaatgaatcatacggaggtgttttt

SEQ ID NO: 84725 - DNA, 25 bp, Probe sequence
aaaaaccgtatcatatagtagactg

SEQ ID NO: 84726 - DNA, 25 bp, Probe sequence
aatatcattatagcttctttccctc

SEQ ID NO: 84727 - DNA, 25 bp, Probe sequence
ctttccctctatatccaattattat

SEQ ID NO: 84728 - DNA, 25 bp, Probe sequence
gaattatataaaaacactttcgttg

SEQ ID NO: 84729 - DNA, 25 bp, Probe sequence
gactgaccccaattagtgggaatta

SEQ ID NO: 84730 - DNA, 25 bp, Probe sequence
gtatcatatagtagactgaccccaa

SEQ ID NO: 84731 - DNA, 25 bp, Probe sequence
tgaatcatacggaggtgttttttct

SEQ ID NO: 84732 - DNA, 25 bp, Probe sequence
tcattatagcttctttccctctata

SEQ ID NO: 84733 - DNA, 25 bp, Probe sequence
tatcattatagcttctttccctcta

SEQ ID NO: 84734 - DNA, 25 bp, Probe sequence
ttctttccctctatatccaattatt

SEQ ID NO: 84735 - DNA, 25 bp, Probe sequence
ttccctctatatccaattattattg

SEQ ID NO: 84736 - DNA, 25 bp, Probe sequence
atatattgttagaaaattgctacta

SEQ ID NO: 84737 - DNA, 25 bp, Probe sequence
atctaatttttaaactatctctaat

SEQ ID NO: 84738 - DNA, 25 bp, Probe sequence
atctctaattaatatatacttctta

SEQ ID NO: 84739 - DNA, 25 bp, Probe sequence
agaggatatggaaaaccatcgtttt

SEQ ID NO: 84740 - DNA, 25 bp, Probe sequence
aactatctctaattaatatatactt

SEQ ID NO: 84741 - DNA, 25 bp, Probe sequence
aatatatacttcttaattattctta

SEQ ID NO: 84742 - DNA, 25 bp, Probe sequence
gaaaattgctactaaagaggatatg

SEQ ID NO: 84743 - DNA, 25 bp, Probe sequence
gaaaaccatcgttttcgataaattg

SEQ ID NO: 84744 - DNA, 25 bp, Probe sequence
gaaatctaatttttaaactatctct

SEQ ID NO: 84745 - DNA, 25 bp, Probe sequence
gatatggaaaaccatcgttttcgat

SEQ ID NO: 84746 - DNA, 25 bp, Probe sequence
gtataaattaatagtctaacctgtt

SEQ ID NO: 84747 - DNA, 25 bp, Probe sequence
gtctaacctgttttaattaattgat

SEQ ID NO: 84748 - DNA, 25 bp, Probe sequence
taacctgttttaattaattgattga

SEQ ID NO: 84749 - DNA, 25 bp, Probe sequence
tacttcttaattattcttaatttgt

SEQ ID NO: 84750 - DNA, 25 bp, Probe sequence
tagtctaacctgttttaattaattg

SEQ ID NO: 84751 - DNA, 25 bp, Probe sequence
aaaatcccagcagtgagtcgtctca

SEQ ID NO: 84752 - DNA, 25 bp, Probe sequence
cctgtaactacaataatcctctctt

SEQ ID NO: 84753 - DNA, 25 bp, Probe sequence
gcatgtacacctaatacttcatttt

SEQ ID NO: 84754 - DNA, 25 bp, Probe sequence
gcaattccattctatgtttctttat

SEQ ID NO: 84755 - DNA, 25 bp, Probe sequence
gtttacctattcattctgtcatcgt

SEQ ID NO: 84756 - DNA, 25 bp, Probe sequence
gtcgtctcaaccgctgggatatatt

SEQ ID NO: 84757 - DNA, 25 bp, Probe sequence
gtcttactttcggtgcaattttctt

SEQ ID NO: 84758 - DNA, 25 bp, Probe sequence
ggagcaacttaacacctgtaactac

SEQ ID NO: 84759 - DNA, 25 bp, Probe sequence
tgacttcttgtcatagtttacctat

SEQ ID NO: 84760 - DNA, 25 bp, Probe sequence
tcgtatacttcccaattgcaattcc

SEQ ID NO: 84761 - DNA, 25 bp, Probe sequence
tatgcttactatttacacttcttgt

SEQ ID NO: 84762 - DNA, 25 bp, Probe sequence
tatctttgtgtttacctttcttgtt

SEQ ID NO: 84763 - DNA, 25 bp, Probe sequence
tatattataattatcctcccctaaa

SEQ ID NO: 84764 - DNA, 25 bp, Probe sequence
ttaaaccttattatctttcccatag

SEQ ID NO: 84765 - DNA, 25 bp, Probe sequence
ttgataaccttgatgacttcttgtc

SEQ ID NO: 84766 - DNA, 25 bp, Probe sequence
atctaatcgaagtattaacatttaa

SEQ ID NO: 84767 - DNA, 25 bp, Probe sequence
actttcatcaaaatcttaacaagag

SEQ ID NO: 84768 - DNA, 25 bp, Probe sequence
acagctaatagtgtaatcattgcgc

SEQ ID NO: 84769 - DNA, 25 bp, Probe sequence
acaagagttatctaatcgaagtatt

SEQ ID NO: 84770 - DNA, 25 bp, Probe sequence
aacgacagctaatagtgtaatcatt

SEQ ID NO: 84771 - DNA, 25 bp, Probe sequence
cttactttcatcaaaatcttaacaa

SEQ ID NO: 84772 - DNA, 25 bp, Probe sequence
ctaatagtgtaatcattgcgctccc

SEQ ID NO: 84773 - DNA, 25 bp, Probe sequence
cgatgacaacgacagctaatagtgt

SEQ ID NO: 84774 - DNA, 25 bp, Probe sequence
ccctccttactttcatcaaaatctt

SEQ ID NO: 84775 - DNA, 25 bp, Probe sequence
cctccttactttcatcaaaatctta

SEQ ID NO: 84776 - DNA, 25 bp, Probe sequence
gctaatagtgtaatcattgcgctcc

SEQ ID NO: 84777 - DNA, 25 bp, Probe sequence
gacaacgacagctaatagtgtaatc

SEQ ID NO: 84778 - DNA, 25 bp, Probe sequence
tccttactttcatcaaaatcttaac

SEQ ID NO: 84779 - DNA, 25 bp, Probe sequence
tccctccttactttcatcaaaatct

SEQ ID NO: 84780 - DNA, 25 bp, Probe sequence
taatagtgtaatcattgcgctccct

SEQ ID NO: 84781 - DNA, 25 bp, Probe sequence
agagaattcttctctaatctcccct

SEQ ID NO: 84782 - DNA, 25 bp, Probe sequence
atctcaagatgactgtactattaat

SEQ ID NO: 84783 - DNA, 25 bp, Probe sequence
aagttatcactgtagttggcgtcac

SEQ ID NO: 84784 - DNA, 25 bp, Probe sequence
aatctcccctaataattatcctcaa

SEQ ID NO: 84785 - DNA, 25 bp, Probe sequence
aatctccttcactttctttaaatct

SEQ ID NO: 84786 - DNA, 25 bp, Probe sequence
catccaattcatattgttttgcgtg

SEQ ID NO: 84787 - DNA, 25 bp, Probe sequence
cccttctctattacatccaattcat

SEQ ID NO: 84788 - DNA, 25 bp, Probe sequence
gccaagttacattgcttaatctcct

SEQ ID NO: 84789 - DNA, 25 bp, Probe sequence
gaaaccaatgattacaactgttaaa

SEQ ID NO: 84790 - DNA, 25 bp, Probe sequence
gttttgcgtgaagttgtcatgtttt

SEQ ID NO: 84791 - DNA, 25 bp, Probe sequence
gggaaatgaagctttgccttaataa

SEQ ID NO: 84792 - DNA, 25 bp, Probe sequence
tgagtatttcttggtactcccttct

SEQ ID NO: 84793 - DNA, 25 bp, Probe sequence
tgaaccacatggatgtctcacctca

SEQ ID NO: 84794 - DNA, 25 bp, Probe sequence
tcacgatttcatttgcttattcaga

SEQ ID NO: 84795 - DNA, 25 bp, Probe sequence
ttggcgtcacgatttcatttgctta

SEQ ID NO: 84796 - DNA, 25 bp, Probe sequence
atacgaacaactacatctaagtaat

SEQ ID NO: 84797 - DNA, 25 bp, Probe sequence
ataagacaaatggtcacgatgattt

SEQ ID NO: 84798 - DNA, 25 bp, Probe sequence
atggtcacgatgatttttcaaagac

SEQ ID NO: 84799 - DNA, 25 bp, Probe sequence
agacaaatggtcacgatgatttttc

SEQ ID NO: 84800 - DNA, 25 bp, Probe sequence
acaaatggtcacgatgatttttcaa

SEQ ID NO: 84801 - DNA, 25 bp, Probe sequence
aaatggtcacgatgatttttcaaag

SEQ ID NO: 84802 - DNA, 25 bp, Probe sequence
aagacaaatggtcacgatgattttt

SEQ ID NO: 84803 - DNA, 25 bp, Probe sequence
aatggtcacgatgatttttcaaaga

SEQ ID NO: 84804 - DNA, 25 bp, Probe sequence
aatacgaacaactacatctaagtaa

SEQ ID NO: 84805 - DNA, 25 bp, Probe sequence
caaatggtcacgatgatttttcaaa

SEQ ID NO: 84806 - DNA, 25 bp, Probe sequence
gacaaatggtcacgatgatttttca

SEQ ID NO: 84807 - DNA, 25 bp, Probe sequence
gtaataagacaaatggtcacgatga

SEQ ID NO: 84808 - DNA, 25 bp, Probe sequence
gtcacgatgatttttcaaagaccaa

SEQ ID NO: 84809 - DNA, 25 bp, Probe sequence
tcacgatgatttttcaaagaccaag

SEQ ID NO: 84810 - DNA, 25 bp, Probe sequence
tacgaacaactacatctaagtaata

SEQ ID NO: 84811 - DNA, 25 bp, Probe sequence
ataacctctcttcatagaaatcagc

SEQ ID NO: 84812 - DNA, 25 bp, Probe sequence
atccataacctctcttcatagaaat

SEQ ID NO: 84813 - DNA, 25 bp, Probe sequence
acctctcttcatagaaatcagctaa

SEQ ID NO: 84814 - DNA, 25 bp, Probe sequence
aacctctcttcatagaaatcagcta

SEQ ID NO: 84815 - DNA, 25 bp, Probe sequence
aatcagctaaataagaacgtacgtt

SEQ ID NO: 84816 - DNA, 25 bp, Probe sequence
ctctcttcatagaaatcagctaaat

SEQ ID NO: 84817 - DNA, 25 bp, Probe sequence
ccataacctctcttcatagaaatca

SEQ ID NO: 84818 - DNA, 25 bp, Probe sequence
gaacgtacgttccctttatgataat

SEQ ID NO: 84819 - DNA, 25 bp, Probe sequence
gataataactactttagcttatatt

SEQ ID NO: 84820 - DNA, 25 bp, Probe sequence
gttccctttatgataataactactt

SEQ ID NO: 84821 - DNA, 25 bp, Probe sequence
gtacgttccctttatgataataact

SEQ ID NO: 84822 - DNA, 25 bp, Probe sequence
tccataacctctcttcatagaaatc

SEQ ID NO: 84823 - DNA, 25 bp, Probe sequence
taactactttagcttatatttgttt

SEQ ID NO: 84824 - DNA, 25 bp, Probe sequence
tacgttccctttatgataataacta

SEQ ID NO: 84825 - DNA, 25 bp, Probe sequence
tatccataacctctcttcatagaaa

SEQ ID NO: 84826 - DNA, 25 bp, Probe sequence
ataaaccaatttgatagggcctaat

SEQ ID NO: 84827 - DNA, 25 bp, Probe sequence
attacttagctacgtcaatgactgt

SEQ ID NO: 84828 - DNA, 25 bp, Probe sequence
atctcctcatacagaattttttagt

SEQ ID NO: 84829 - DNA, 25 bp, Probe sequence
agggcctaatttcaactgttagcta

SEQ ID NO: 84830 - DNA, 25 bp, Probe sequence
agttttacttatgatacgcctctgc

SEQ ID NO: 84831 - DNA, 25 bp, Probe sequence
agttatatgcgcaattatcgtgata

SEQ ID NO: 84832 - DNA, 25 bp, Probe sequence
acgcctctgcgtatcagttaatgat

SEQ ID NO: 84833 - DNA, 25 bp, Probe sequence
caccatttaacaccctccaaattat

SEQ ID NO: 84834 - DNA, 25 bp, Probe sequence
ctgtttctattgcaaagttactttt

SEQ ID NO: 84835 - DNA, 25 bp, Probe sequence
gctacgtcaatgactgttgattatg

SEQ ID NO: 84836 - DNA, 25 bp, Probe sequence
gaagcattctatattaatcatttta

SEQ ID NO: 84837 - DNA, 25 bp, Probe sequence
gattatttatcattacttagctacg

SEQ ID NO: 84838 - DNA, 25 bp, Probe sequence
tccaaattattatctcctcatacag

SEQ ID NO: 84839 - DNA, 25 bp, Probe sequence
ttaatgtccaccatttaacaccctc

SEQ ID NO: 84840 - DNA, 25 bp, Probe sequence
ttcaactgttagctactacttaagt

SEQ ID NO: 84841 - DNA, 25 bp, Probe sequence
attaaaaaactacatctttcttgat

SEQ ID NO: 84842 - DNA, 25 bp, Probe sequence
attaatcttcatattacacccctta

SEQ ID NO: 84843 - DNA, 25 bp, Probe sequence
attttacatctatttccattattac

SEQ ID NO: 84844 - DNA, 25 bp, Probe sequence
atctatttccattattacattttat

SEQ ID NO: 84845 - DNA, 25 bp, Probe sequence
atctttcttgattgatactctttca

SEQ ID NO: 84846 - DNA, 25 bp, Probe sequence
atgagtctcgcaaattgtcagtttt

SEQ ID NO: 84847 - DNA, 25 bp, Probe sequence
actacatctttcttgattgatactc

SEQ ID NO: 84848 - DNA, 25 bp, Probe sequence
aatcttcatattacaccccttaatt

SEQ ID NO: 84849 - DNA, 25 bp, Probe sequence
aattatattttacatctatttccat

SEQ ID NO: 84850 - DNA, 25 bp, Probe sequence
catattacaccccttaattatattt

SEQ ID NO: 84851 - DNA, 25 bp, Probe sequence
gtctcgcaaattgtcagtttttaaa

SEQ ID NO: 84852 - DNA, 25 bp, Probe sequence
tcttcatattacaccccttaattat

SEQ ID NO: 84853 - DNA, 25 bp, Probe sequence
tacatctatttccattattacattt

SEQ ID NO: 84854 - DNA, 25 bp, Probe sequence
tattacattttatgagtctcgcaaa

SEQ ID NO: 84855 - DNA, 25 bp, Probe sequence
ttgattgatactctttcaaatctta

SEQ ID NO: 84856 - DNA, 25 bp, Probe sequence
agtcttttaggtatgaactagggtg

SEQ ID NO: 84857 - DNA, 25 bp, Probe sequence
ctcctttgtttgtttgtgtgaaagt

SEQ ID NO: 84858 - DNA, 25 bp, Probe sequence
cctcctttgtttgtttgtgtgaaag

SEQ ID NO: 84859 - DNA, 25 bp, Probe sequence
gtcttttaggtatgaactagggtga

SEQ ID NO: 84860 - DNA, 25 bp, Probe sequence
gaaagtcttttaggtatgaactagg

SEQ ID NO: 84861 - DNA, 25 bp, Probe sequence
gtttgtttgtgtgaaagtcttttag

SEQ ID NO: 84862 - DNA, 25 bp, Probe sequence
gtttgtgtgaaagtcttttaggtat

SEQ ID NO: 84863 - DNA, 25 bp, Probe sequence
gtgaaagtcttttaggtatgaacta

SEQ ID NO: 84864 - DNA, 25 bp, Probe sequence
ggtatgaactagggtgatttaaaat

SEQ ID NO: 84865 - DNA, 25 bp, Probe sequence
tgtttgtttgtgtgaaagtctttta

SEQ ID NO: 84866 - DNA, 25 bp, Probe sequence
tcctttgtttgtttgtgtgaaagtc

SEQ ID NO: 84867 - DNA, 25 bp, Probe sequence
tcctcctttgtttgtttgtgtgaaa

SEQ ID NO: 84868 - DNA, 25 bp, Probe sequence
tttcctcctttgtttgtttgtgtga

SEQ ID NO: 84869 - DNA, 25 bp, Probe sequence
ttaggtatgaactagggtgatttaa

SEQ ID NO: 84870 - DNA, 25 bp, Probe sequence
ttcctcctttgtttgtttgtgtgaa

SEQ ID NO: 84871 - DNA, 25 bp, Probe sequence
atacctcttatttcaacaaatatgt

SEQ ID NO: 84872 - DNA, 25 bp, Probe sequence
ataactcagacagcaatttcccgaa

SEQ ID NO: 84873 - DNA, 25 bp, Probe sequence
ataatacctcttatttcaacaaata

SEQ ID NO: 84874 - DNA, 25 bp, Probe sequence
atgcagttcggatttatatgattaa

SEQ ID NO: 84875 - DNA, 25 bp, Probe sequence
actcagacagcaatttcccgaaaaa

SEQ ID NO: 84876 - DNA, 25 bp, Probe sequence
aacaaatatgtatgcagttcggatt

SEQ ID NO: 84877 - DNA, 25 bp, Probe sequence
aactaatacttataactcagacagc

SEQ ID NO: 84878 - DNA, 25 bp, Probe sequence
aactcagacagcaatttcccgaaaa

SEQ ID NO: 84879 - DNA, 25 bp, Probe sequence
aatacttataactcagacagcaatt

SEQ ID NO: 84880 - DNA, 25 bp, Probe sequence
aatatgtatgcagttcggatttata

SEQ ID NO: 84881 - DNA, 25 bp, Probe sequence
ctcagacagcaatttcccgaaaaat

SEQ ID NO: 84882 - DNA, 25 bp, Probe sequence
gacagcaatttcccgaaaaataata

SEQ ID NO: 84883 - DNA, 25 bp, Probe sequence
gtatgcagttcggatttatatgatt

SEQ ID NO: 84884 - DNA, 25 bp, Probe sequence
tataactcagacagcaatttcccga

SEQ ID NO: 84885 - DNA, 25 bp, Probe sequence
taactcagacagcaatttcccgaaa

SEQ ID NO: 84886 - DNA, 25 bp, Probe sequence
atggaacttgtcaaatacctctagg

SEQ ID NO: 84887 - DNA, 25 bp, Probe sequence
aggggtatttgacacatttgtgttt

SEQ ID NO: 84888 - DNA, 25 bp, Probe sequence
acctctaggggtatttgacacattt

SEQ ID NO: 84889 - DNA, 25 bp, Probe sequence
acttgtcaaatacctctaggggtat

SEQ ID NO: 84890 - DNA, 25 bp, Probe sequence
cacatttgtgtttatctattaatat

SEQ ID NO: 84891 - DNA, 25 bp, Probe sequence
ctaggggtatttgacacatttgtgt

SEQ ID NO: 84892 - DNA, 25 bp, Probe sequence
ctaaacggttgaatggaacttgtca

SEQ ID NO: 84893 - DNA, 25 bp, Probe sequence
ctctaggggtatttgacacatttgt

SEQ ID NO: 84894 - DNA, 25 bp, Probe sequence
cctctaggggtatttgacacatttg

SEQ ID NO: 84895 - DNA, 25 bp, Probe sequence
gaatggaacttgtcaaatacctcta

SEQ ID NO: 84896 - DNA, 25 bp, Probe sequence
gaacttgtcaaatacctctaggggt

SEQ ID NO: 84897 - DNA, 25 bp, Probe sequence
gacacatttgtgtttatctattaat

SEQ ID NO: 84898 - DNA, 25 bp, Probe sequence
gtgtttatctattaatatattttta

SEQ ID NO: 84899 - DNA, 25 bp, Probe sequence
ggaacttgtcaaatacctctagggg

SEQ ID NO: 84900 - DNA, 25 bp, Probe sequence
ttattcaattaaaagtggaggtatg

SEQ ID NO: 84901 - DNA, 25 bp, Probe sequence
attcttattgaatgacttcatcgtg

SEQ ID NO: 84902 - DNA, 25 bp, Probe sequence
attcacgacatataaacacaacact

SEQ ID NO: 84903 - DNA, 25 bp, Probe sequence
ataaacacaacactgacacgtcatt

SEQ ID NO: 84904 - DNA, 25 bp, Probe sequence
acagtaacaactttttcaatcttat

SEQ ID NO: 84905 - DNA, 25 bp, Probe sequence
acagcagtgagatgattttcaatta

SEQ ID NO: 84906 - DNA, 25 bp, Probe sequence
aacaactttttcaatcttatactat

SEQ ID NO: 84907 - DNA, 25 bp, Probe sequence
aacacaacactgacacgtcatttaa

SEQ ID NO: 84908 - DNA, 25 bp, Probe sequence
ctgctgtttctattttcataatcat

SEQ ID NO: 84909 - DNA, 25 bp, Probe sequence
ctgacacgtcatttaaatacttaat

SEQ ID NO: 84910 - DNA, 25 bp, Probe sequence
gacttcatcgtgatcatttaaaaca

SEQ ID NO: 84911 - DNA, 25 bp, Probe sequence
gtttctattttcataatcattctta

SEQ ID NO: 84912 - DNA, 25 bp, Probe sequence
tcattaaaaatttattcttttctgt

SEQ ID NO: 84913 - DNA, 25 bp, Probe sequence
taaacctttaaaaaacagcagtgag

SEQ ID NO: 84914 - DNA, 25 bp, Probe sequence
ttagagctaaaaattcacgacatat

SEQ ID NO: 84915 - DNA, 25 bp, Probe sequence
ttcaatcttatactatttagagcta

SEQ ID NO: 84916 - DNA, 25 bp, Probe sequence
aggataactcccgatgatgcctttt

SEQ ID NO: 84917 - DNA, 25 bp, Probe sequence
acttatgtcacttatccttttggaa

SEQ ID NO: 84918 - DNA, 25 bp, Probe sequence
acatcaggatatcgtttaactcaga

SEQ ID NO: 84919 - DNA, 25 bp, Probe sequence
aacacggattgaacactttctactt

SEQ ID NO: 84920 - DNA, 25 bp, Probe sequence
aattgctcttagtgttcaacagaca

SEQ ID NO: 84921 - DNA, 25 bp, Probe sequence
gaacactttctacttaggtattatc

SEQ ID NO: 84922 - DNA, 25 bp, Probe sequence
gaaattaaaattgctcttagtgttc

SEQ ID NO: 84923 - DNA, 25 bp, Probe sequence
gaaattactattggaggtacatacc

SEQ ID NO: 84924 - DNA, 25 bp, Probe sequence
gatgatatttcccaatttaacacgg

SEQ ID NO: 84925 - DNA, 25 bp, Probe sequence
gatgcctttttacttatgtcactta

SEQ ID NO: 84926 - DNA, 25 bp, Probe sequence
ggttttcctgataggataactcccg

SEQ ID NO: 84927 - DNA, 25 bp, Probe sequence
tggaggtacataccaagctatcatt

SEQ ID NO: 84928 - DNA, 25 bp, Probe sequence
tcccgatgatgcctttttacttatg

SEQ ID NO: 84929 - DNA, 25 bp, Probe sequence
taactcagaaaaaaactccaatcaa

SEQ ID NO: 84930 - DNA, 25 bp, Probe sequence
taggtattatcttggttttcctgat

SEQ ID NO: 84931 - DNA, 25 bp, Probe sequence
atcacctttataaatttgtctttgt

SEQ ID NO: 84932 - DNA, 25 bp, Probe sequence
atctttgtattgatcaacttaccac

SEQ ID NO: 84933 - DNA, 25 bp, Probe sequence
atcgctttactgtaaaagtagccaa

SEQ ID NO: 84934 - DNA, 25 bp, Probe sequence
acttccctttcaaatggttgcaact

SEQ ID NO: 84935 - DNA, 25 bp, Probe sequence
acaacatttattttagactactctt

SEQ ID NO: 84936 - DNA, 25 bp, Probe sequence
aatactataatccttgatctttgta

SEQ ID NO: 84937 - DNA, 25 bp, Probe sequence
cttttgtataagttaggcttttgtg

SEQ ID NO: 84938 - DNA, 25 bp, Probe sequence
gcaactattgaaattccttttgtat

SEQ ID NO: 84939 - DNA, 25 bp, Probe sequence
gaatcatattcataagtagtgtatc

SEQ ID NO: 84940 - DNA, 25 bp, Probe sequence
ggttgcaactattgaaattcctttt

SEQ ID NO: 84941 - DNA, 25 bp, Probe sequence
ggcttttgtggtaatatcatcatgc

SEQ ID NO: 84942 - DNA, 25 bp, Probe sequence
tgatcaacttaccacaacatttatt

SEQ ID NO: 84943 - DNA, 25 bp, Probe sequence
tactcttagacttccctttcaaatg

SEQ ID NO: 84944 - DNA, 25 bp, Probe sequence
tagacttccctttcaaatggttgca

SEQ ID NO: 84945 - DNA, 25 bp, Probe sequence
ttagactactcttagacttcccttt

SEQ ID NO: 84946 - DNA, 25 bp, Probe sequence
attgaatcattctagttttgtaaag

SEQ ID NO: 84947 - DNA, 25 bp, Probe sequence
atatttattaactctatcatagcaa

SEQ ID NO: 84948 - DNA, 25 bp, Probe sequence
ataacaataaatcgagatactcaat

SEQ ID NO: 84949 - DNA, 25 bp, Probe sequence
aaatcgagatactcaataatttgat

SEQ ID NO: 84950 - DNA, 25 bp, Probe sequence
aactctatcatagcaaaaatactgt

SEQ ID NO: 84951 - DNA, 25 bp, Probe sequence
aatagttgagtatggcaatttatga

SEQ ID NO: 84952 - DNA, 25 bp, Probe sequence
ctgctcacctctattttcaaataat

SEQ ID NO: 84953 - DNA, 25 bp, Probe sequence
gctcacctctattttcaaataattg

SEQ ID NO: 84954 - DNA, 25 bp, Probe sequence
gcaaaaatactgtttgtgtataaca

SEQ ID NO: 84955 - DNA, 25 bp, Probe sequence
gaatcattctagttttgtaaagtta

SEQ ID NO: 84956 - DNA, 25 bp, Probe sequence
gaaattgatacttttcaaaatagtt

SEQ ID NO: 84957 - DNA, 25 bp, Probe sequence
tgtaaagttacttattcaatttatt

SEQ ID NO: 84958 - DNA, 25 bp, Probe sequence
tcattctagttttgtaaagttactt

SEQ ID NO: 84959 - DNA, 25 bp, Probe sequence
tcacctctattttcaaataattgtg

SEQ ID NO: 84960 - DNA, 25 bp, Probe sequence
tattatatttattaactctatcata

SEQ ID NO: 84961 - DNA, 25 bp, Probe sequence
atttgcaactaaatttggacatcaa

SEQ ID NO: 84962 - DNA, 25 bp, Probe sequence
atattcatatattatcattaccata

SEQ ID NO: 84963 - DNA, 25 bp, Probe sequence
atgccttcatttgcaactaaatttg

SEQ ID NO: 84964 - DNA, 25 bp, Probe sequence
atgtttgtaaaatcctcactaataa

SEQ ID NO: 84965 - DNA, 25 bp, Probe sequence
acaaatgtttgtaaaatcctcacta

SEQ ID NO: 84966 - DNA, 25 bp, Probe sequence
aaatttcttctatgccttcatttgc

SEQ ID NO: 84967 - DNA, 25 bp, Probe sequence
aagagcactcctgaatgagcactcc

SEQ ID NO: 84968 - DNA, 25 bp, Probe sequence
ctatttgttttttacttaatgctat

SEQ ID NO: 84969 - DNA, 25 bp, Probe sequence
gactataaaaatttcttctatgcct

SEQ ID NO: 84970 - DNA, 25 bp, Probe sequence
gatatgaccataatttattatccaa

SEQ ID NO: 84971 - DNA, 25 bp, Probe sequence
ggacatcaaaaaagagcactcctga

SEQ ID NO: 84972 - DNA, 25 bp, Probe sequence
taatcatattagtgttttttcaaaa

SEQ ID NO: 84973 - DNA, 25 bp, Probe sequence
tatcattaccatatttattcaacaa

SEQ ID NO: 84974 - DNA, 25 bp, Probe sequence
ttcttctatgccttcatttgcaact

SEQ ID NO: 84975 - DNA, 25 bp, Probe sequence
ttctatgccttcatttgcaactaaa

SEQ ID NO: 84976 - DNA, 25 bp, Probe sequence
attcaattttgctccttttaaaatg

SEQ ID NO: 84977 - DNA, 25 bp, Probe sequence
ataacttcctctatatacttttttg

SEQ ID NO: 84978 - DNA, 25 bp, Probe sequence
atgtataacttcctctatatacttt

SEQ ID NO: 84979 - DNA, 25 bp, Probe sequence
acttcctctatatacttttttgtat

SEQ ID NO: 84980 - DNA, 25 bp, Probe sequence
aaatgtataacttcctctatatact

SEQ ID NO: 84981 - DNA, 25 bp, Probe sequence
cttcctctatatacttttttgtatg

SEQ ID NO: 84982 - DNA, 25 bp, Probe sequence
gtataacttcctctatatacttttt

SEQ ID NO: 84983 - DNA, 25 bp, Probe sequence
tgctccttttaaaatgtataacttc

SEQ ID NO: 84984 - DNA, 25 bp, Probe sequence
tcaattttgctccttttaaaatgta

SEQ ID NO: 84985 - DNA, 25 bp, Probe sequence
taacttcctctatatacttttttgt

SEQ ID NO: 84986 - DNA, 25 bp, Probe sequence
taaaatgtataacttcctctatata

SEQ ID NO: 84987 - DNA, 25 bp, Probe sequence
tataacttcctctatatactttttt

SEQ ID NO: 84988 - DNA, 25 bp, Probe sequence
tattcaattttgctccttttaaaat

SEQ ID NO: 84989 - DNA, 25 bp, Probe sequence
tttgctccttttaaaatgtataact

SEQ ID NO: 84990 - DNA, 25 bp, Probe sequence
ttttaaaatgtataacttcctctat

SEQ ID NO: 84991 - DNA, 25 bp, Probe sequence
attgacatatgattaaagaccctta

SEQ ID NO: 84992 - DNA, 25 bp, Probe sequence
agacccttaggatagtgctttacat

SEQ ID NO: 84993 - DNA, 25 bp, Probe sequence
agctttataatcgccagctccttat

SEQ ID NO: 84994 - DNA, 25 bp, Probe sequence
agctagctttataatcgccagctcc

SEQ ID NO: 84995 - DNA, 25 bp, Probe sequence
aaggagctagctttataatcgccag

SEQ ID NO: 84996 - DNA, 25 bp, Probe sequence
aatacattaattatacatctttttt

SEQ ID NO: 84997 - DNA, 25 bp, Probe sequence
cattaattatacatcttttttaaat

SEQ ID NO: 84998 - DNA, 25 bp, Probe sequence
ctagctttataatcgccagctcctt

SEQ ID NO: 84999 - DNA, 25 bp, Probe sequence
cccttaggatagtgctttacatata

SEQ ID NO: 85000 - DNA, 25 bp, Probe sequence
gctagctttataatcgccagctcct

SEQ ID NO: 85001 - DNA, 25 bp, Probe sequence
gacatatgattaaagacccttagga

SEQ ID NO: 85002 - DNA, 25 bp, Probe sequence
gacccttaggatagtgctttacata

SEQ ID NO: 85003 - DNA, 25 bp, Probe sequence
ggagctagctttataatcgccagct

SEQ ID NO: 85004 - DNA, 25 bp, Probe sequence
ggatagtgctttacatatataagtt

SEQ ID NO: 85005 - DNA, 25 bp, Probe sequence
tatcaacttctttctatatttaata

SEQ ID NO: 85006 - DNA, 25 bp, Probe sequence
attttcatactcgtcttaatatcat

SEQ ID NO: 85007 - DNA, 25 bp, Probe sequence
atttcacaaacaatctgttcaattt

SEQ ID NO: 85008 - DNA, 25 bp, Probe sequence
atctaactattttcatactcgtctt

SEQ ID NO: 85009 - DNA, 25 bp, Probe sequence
actctcttctttttaaaatgatttg

SEQ ID NO: 85010 - DNA, 25 bp, Probe sequence
acactttttcactttaatattatca

SEQ ID NO: 85011 - DNA, 25 bp, Probe sequence
aaaaatttcacaaacaatctgttca

SEQ ID NO: 85012 - DNA, 25 bp, Probe sequence
aacaatctgttcaatttataatatt

SEQ ID NO: 85013 - DNA, 25 bp, Probe sequence
gaatctaactattttcatactcgtc

SEQ ID NO: 85014 - DNA, 25 bp, Probe sequence
gatttgtttttgttaattacatata

SEQ ID NO: 85015 - DNA, 25 bp, Probe sequence
tcgtcttaatatcattattgaatcc

SEQ ID NO: 85016 - DNA, 25 bp, Probe sequence
tcatactcgtcttaatatcattatt

SEQ ID NO: 85017 - DNA, 25 bp, Probe sequence
tcaatttataacactttttcacttt

SEQ ID NO: 85018 - DNA, 25 bp, Probe sequence
taactattttcatactcgtcttaat

SEQ ID NO: 85019 - DNA, 25 bp, Probe sequence
tatcaatttataacactttttcact

SEQ ID NO: 85020 - DNA, 25 bp, Probe sequence
tataacactttttcactttaatatt

SEQ ID NO: 85021 - DNA, 25 bp, Probe sequence
attgtttttcctggatcgatttcat

SEQ ID NO: 85022 - DNA, 25 bp, Probe sequence
cacaatcctatttctttttattgtt

SEQ ID NO: 85023 - DNA, 25 bp, Probe sequence
ctggatcgatttcataatttgatcg

SEQ ID NO: 85024 - DNA, 25 bp, Probe sequence
gatttcataatttgatcgaatcatg

SEQ ID NO: 85025 - DNA, 25 bp, Probe sequence
gtttttcctggatcgatttcataat

SEQ ID NO: 85026 - DNA, 25 bp, Probe sequence
tctttttattgtttttcctggatcg

SEQ ID NO: 85027 - DNA, 25 bp, Probe sequence
tattgtttttcctggatcgatttca

SEQ ID NO: 85028 - DNA, 25 bp, Probe sequence
tttcacaatcctatttctttttatt

SEQ ID NO: 85029 - DNA, 25 bp, Probe sequence
tttattgtttttcctggatcgattt

SEQ ID NO: 85030 - DNA, 25 bp, Probe sequence
tttttcctggatcgatttcataatt

SEQ ID NO: 85031 - DNA, 25 bp, Probe sequence
tttttattgtttttcctggatcgat

SEQ ID NO: 85032 - DNA, 25 bp, Probe sequence
ttttcctggatcgatttcataattt

SEQ ID NO: 85033 - DNA, 25 bp, Probe sequence
ttcacaatcctatttctttttattg

SEQ ID NO: 85034 - DNA, 25 bp, Probe sequence
ttcctggatcgatttcataatttga

SEQ ID NO: 85035 - DNA, 25 bp, Probe sequence
ttgtttttcctggatcgatttcata

SEQ ID NO: 85036 - DNA, 25 bp, Probe sequence
attttgtttccttgaatcgatttca

SEQ ID NO: 85037 - DNA, 25 bp, Probe sequence
atttcatactctttattagtcacga

SEQ ID NO: 85038 - DNA, 25 bp, Probe sequence
atcgatttcatactctttattagtc

SEQ ID NO: 85039 - DNA, 25 bp, Probe sequence
gaatcgatttcatactctttattag

SEQ ID NO: 85040 - DNA, 25 bp, Probe sequence
gatttcatactctttattagtcacg

SEQ ID NO: 85041 - DNA, 25 bp, Probe sequence
gtttccttgaatcgatttcatactc

SEQ ID NO: 85042 - DNA, 25 bp, Probe sequence
tccttgaatcgatttcatactcttt

SEQ ID NO: 85043 - DNA, 25 bp, Probe sequence
tacaactctcttctttttattttgt

SEQ ID NO: 85044 - DNA, 25 bp, Probe sequence
tattttgtttccttgaatcgatttc

SEQ ID NO: 85045 - DNA, 25 bp, Probe sequence
tttccttgaatcgatttcatactct

SEQ ID NO: 85046 - DNA, 25 bp, Probe sequence
tttattttgtttccttgaatcgatt

SEQ ID NO: 85047 - DNA, 25 bp, Probe sequence
ttttattttgtttccttgaatcgat

SEQ ID NO: 85048 - DNA, 25 bp, Probe sequence
ttttgtttccttgaatcgatttcat

SEQ ID NO: 85049 - DNA, 25 bp, Probe sequence
ttacaactctcttctttttattttg

SEQ ID NO: 85050 - DNA, 25 bp, Probe sequence
ttgtttccttgaatcgatttcatac

SEQ ID NO: 85051 - DNA, 25 bp, Probe sequence
atttcatattttaatcgagtcatga

SEQ ID NO: 85052 - DNA, 25 bp, Probe sequence
atctttcctggattgatttcatatt

SEQ ID NO: 85053 - DNA, 25 bp, Probe sequence
atcctattcttattattatctttcc

SEQ ID NO: 85054 - DNA, 25 bp, Probe sequence
acaatcctattcttattattatctt

SEQ ID NO: 85055 - DNA, 25 bp, Probe sequence
ctttcctggattgatttcatatttt

SEQ ID NO: 85056 - DNA, 25 bp, Probe sequence
ctattcttattattatctttcctgg

SEQ ID NO: 85057 - DNA, 25 bp, Probe sequence
cctattcttattattatctttcctg

SEQ ID NO: 85058 - DNA, 25 bp, Probe sequence
tcacaatcctattcttattattatc

SEQ ID NO: 85059 - DNA, 25 bp, Probe sequence
tattatctttcctggattgatttca

SEQ ID NO: 85060 - DNA, 25 bp, Probe sequence
tattcttattattatctttcctgga

SEQ ID NO: 85061 - DNA, 25 bp, Probe sequence
tttcacaatcctattcttattatta

SEQ ID NO: 85062 - DNA, 25 bp, Probe sequence
ttattattatctttcctggattgat

SEQ ID NO: 85063 - DNA, 25 bp, Probe sequence
ttatctttcctggattgatttcata

SEQ ID NO: 85064 - DNA, 25 bp, Probe sequence
ttcttattattatctttcctggatt

SEQ ID NO: 85065 - DNA, 25 bp, Probe sequence
ttcctggattgatttcatattttaa

SEQ ID NO: 85066 - DNA, 25 bp, Probe sequence
attcgtgttgaatcgtgtgggaggc

SEQ ID NO: 85067 - DNA, 25 bp, Probe sequence
attttacattattttacagcaacat

SEQ ID NO: 85068 - DNA, 25 bp, Probe sequence
cgtgttgaatcgtgtgggaggcagg

SEQ ID NO: 85069 - DNA, 25 bp, Probe sequence
actatccctcaattcagtaatatga

SEQ ID NO: 85070 - DNA, 25 bp, Probe sequence
acagcaacatatttgaaattcgtgt

SEQ ID NO: 85071 - DNA, 25 bp, Probe sequence
ctatccctcaattcagtaatatgaa

SEQ ID NO: 85072 - DNA, 25 bp, Probe sequence
gaaattcgtgttgaatcgtgtggga

SEQ ID NO: 85073 - DNA, 25 bp, Probe sequence
gttgaatcgtgtgggaggcaggaga

SEQ ID NO: 85074 - DNA, 25 bp, Probe sequence
gtaatatgaatacgtttattttaca

SEQ ID NO: 85075 - DNA, 25 bp, Probe sequence
gtgttgaatcgtgtgggaggcagga

SEQ ID NO: 85076 - DNA, 25 bp, Probe sequence
tgaatacgtttattttacattattt

SEQ ID NO: 85077 - DNA, 25 bp, Probe sequence
tcgtgttgaatcgtgtgggaggcag

SEQ ID NO: 85078 - DNA, 25 bp, Probe sequence
ttattttacattattttacagcaac

SEQ ID NO: 85079 - DNA, 25 bp, Probe sequence
ttacattattttacagcaacatatt

SEQ ID NO: 85080 - DNA, 25 bp, Probe sequence
ttcgtgttgaatcgtgtgggaggca

SEQ ID NO: 85081 - DNA, 25 bp, Probe sequence
attttttgcaattttagctttgaat

SEQ ID NO: 85082 - DNA, 25 bp, Probe sequence
atttatattgccaacaacagagatg

SEQ ID NO: 85083 - DNA, 25 bp, Probe sequence
atcattatttatattgccaacaaca

SEQ ID NO: 85084 - DNA, 25 bp, Probe sequence
atctccttagttacatcataaatga

SEQ ID NO: 85085 - DNA, 25 bp, Probe sequence
aaaatcacaaattatgtatatcaaa

SEQ ID NO: 85086 - DNA, 25 bp, Probe sequence
cttcatctccttagttacatcataa

SEQ ID NO: 85087 - DNA, 25 bp, Probe sequence
ccttcatctccttagttacatcata

SEQ ID NO: 85088 - DNA, 25 bp, Probe sequence
gccaacaacagagatgttaaccatt

SEQ ID NO: 85089 - DNA, 25 bp, Probe sequence
gagatgttaaccattaattttttgc

SEQ ID NO: 85090 - DNA, 25 bp, Probe sequence
gattaatcattatttatattgccaa

SEQ ID NO: 85091 - DNA, 25 bp, Probe sequence
tgttaaccattaattttttgcaatt

SEQ ID NO: 85092 - DNA, 25 bp, Probe sequence
tccttcatctccttagttacatcat

SEQ ID NO: 85093 - DNA, 25 bp, Probe sequence
tcatctccttagttacatcataaat

SEQ ID NO: 85094 - DNA, 25 bp, Probe sequence
tcaaaatttgtgatttgtgatcatt

SEQ ID NO: 85095 - DNA, 25 bp, Probe sequence
tttgcaattttagctttgaatataa

SEQ ID NO: 85096 - DNA, 25 bp, Probe sequence
atttcctcatttaatttgctttact

SEQ ID NO: 85097 - DNA, 25 bp, Probe sequence
atacatttcctcatttaatttgctt

SEQ ID NO: 85098 - DNA, 25 bp, Probe sequence
atcattatcaaaacacttggcgtgt

SEQ ID NO: 85099 - DNA, 25 bp, Probe sequence
caaaacacttggcgtgtcatcgtta

SEQ ID NO: 85100 - DNA, 25 bp, Probe sequence
ctgctctatacatttcctcatttaa

SEQ ID NO: 85101 - DNA, 25 bp, Probe sequence
gctctatacatttcctcatttaatt

SEQ ID NO: 85102 - DNA, 25 bp, Probe sequence
gatttatctatatgcactgctctat

SEQ ID NO: 85103 - DNA, 25 bp, Probe sequence
gttaatccaatcatagatttatcta

SEQ ID NO: 85104 - DNA, 25 bp, Probe sequence
ggatggtttttcatttatatttata

SEQ ID NO: 85105 - DNA, 25 bp, Probe sequence
tcctcatttaatttgctttactttc

SEQ ID NO: 85106 - DNA, 25 bp, Probe sequence
tatgcactgctctatacatttcctc

SEQ ID NO: 85107 - DNA, 25 bp, Probe sequence
tattagtgttaatccaatcatagat

SEQ ID NO: 85108 - DNA, 25 bp, Probe sequence
tttgctttactttcatttatatcat

SEQ ID NO: 85109 - DNA, 25 bp, Probe sequence
tttactttcatttatatcattatca

SEQ ID NO: 85110 - DNA, 25 bp, Probe sequence
ttaagtggatggtttttcatttata

SEQ ID NO: 85111 - DNA, 25 bp, Probe sequence
atacaaggtcaatccaacatcaatg

SEQ ID NO: 85112 - DNA, 25 bp, Probe sequence
atcttaaatcggctataaacactga

SEQ ID NO: 85113 - DNA, 25 bp, Probe sequence
atgacggacactgttctcggagtct

SEQ ID NO: 85114 - DNA, 25 bp, Probe sequence
aacactgatataataatgcttcatt

SEQ ID NO: 85115 - DNA, 25 bp, Probe sequence
cactgttctcggagtctgacatcga

SEQ ID NO: 85116 - DNA, 25 bp, Probe sequence
catcaatggattggcttttttgttt

SEQ ID NO: 85117 - DNA, 25 bp, Probe sequence
gcggtaagcatgacggacactgttc

SEQ ID NO: 85118 - DNA, 25 bp, Probe sequence
gagattcagaggcatatacaaggtc

SEQ ID NO: 85119 - DNA, 25 bp, Probe sequence
gaggcatatacaaggtcaatccaac

SEQ ID NO: 85120 - DNA, 25 bp, Probe sequence
gattggcttttttgtttagcaaact

SEQ ID NO: 85121 - DNA, 25 bp, Probe sequence
gttctcggagtctgacatcgaatca

SEQ ID NO: 85122 - DNA, 25 bp, Probe sequence
ggacactgttctcggagtctgacat

SEQ ID NO: 85123 - DNA, 25 bp, Probe sequence
tgtttagcaaactttattatcttaa

SEQ ID NO: 85124 - DNA, 25 bp, Probe sequence
taatgcttcattagtatgcggtaag

SEQ ID NO: 85125 - DNA, 25 bp, Probe sequence
taagcatgacggacactgttctcgg

SEQ ID NO: 85126 - DNA, 25 bp, Probe sequence
attaaatttacaattataagcgata

SEQ ID NO: 85127 - DNA, 25 bp, Probe sequence
atataaagcttatttgaggtgaaat

SEQ ID NO: 85128 - DNA, 25 bp, Probe sequence
atcttaacattaaatttacaattat

SEQ ID NO: 85129 - DNA, 25 bp, Probe sequence
agcgataatctaaatataaagctta

SEQ ID NO: 85130 - DNA, 25 bp, Probe sequence
aacattaaatttacaattataagcg

SEQ ID NO: 85131 - DNA, 25 bp, Probe sequence
aatataaagcttatttgaggtgaaa

SEQ ID NO: 85132 - DNA, 25 bp, Probe sequence
aatttacaattataagcgataatct

SEQ ID NO: 85133 - DNA, 25 bp, Probe sequence
catatattgttaaataattttacct

SEQ ID NO: 85134 - DNA, 25 bp, Probe sequence
cattaaatttacaattataagcgat

SEQ ID NO: 85135 - DNA, 25 bp, Probe sequence
ctaatcttaacattaaatttacaat

SEQ ID NO: 85136 - DNA, 25 bp, Probe sequence
gcgataatctaaatataaagcttat

SEQ ID NO: 85137 - DNA, 25 bp, Probe sequence
taatcttaacattaaatttacaatt

SEQ ID NO: 85138 - DNA, 25 bp, Probe sequence
taagcgataatctaaatataaagct

SEQ ID NO: 85139 - DNA, 25 bp, Probe sequence
tataaagcttatttgaggtgaaata

SEQ ID NO: 85140 - DNA, 25 bp, Probe sequence
ttaaatttacaattataagcgataa

SEQ ID NO: 85141 - DNA, 25 bp, Probe sequence
atttcaaatcatggagtgggataga

SEQ ID NO: 85142 - DNA, 25 bp, Probe sequence
atttggtgatttcaaatcatggagt

SEQ ID NO: 85143 - DNA, 25 bp, Probe sequence
atagatttttatttggtgatttcaa

SEQ ID NO: 85144 - DNA, 25 bp, Probe sequence
aatagatttttatttggtgatttca

SEQ ID NO: 85145 - DNA, 25 bp, Probe sequence
ccattaatagatttttatttggtga

SEQ ID NO: 85146 - DNA, 25 bp, Probe sequence
gatttcaaatcatggagtgggatag

SEQ ID NO: 85147 - DNA, 25 bp, Probe sequence
gatttttatttggtgatttcaaatc

SEQ ID NO: 85148 - DNA, 25 bp, Probe sequence
gtgatttcaaatcatggagtgggat

SEQ ID NO: 85149 - DNA, 25 bp, Probe sequence
ggtgatttcaaatcatggagtggga

SEQ ID NO: 85150 - DNA, 25 bp, Probe sequence
tgatttcaaatcatggagtgggata

SEQ ID NO: 85151 - DNA, 25 bp, Probe sequence
taatagatttttatttggtgatttc

SEQ ID NO: 85152 - DNA, 25 bp, Probe sequence
tagatttttatttggtgatttcaaa

SEQ ID NO: 85153 - DNA, 25 bp, Probe sequence
tatttggtgatttcaaatcatggag

SEQ ID NO: 85154 - DNA, 25 bp, Probe sequence
tttcaaatcatggagtgggatagaa

SEQ ID NO: 85155 - DNA, 25 bp, Probe sequence
ttttatttggtgatttcaaatcatg

SEQ ID NO: 85156 - DNA, 25 bp, Probe sequence
aggggtatagtctgagtgtattcta

SEQ ID NO: 85157 - DNA, 25 bp, Probe sequence
acctcagaatccaaaaacattcgag

SEQ ID NO: 85158 - DNA, 25 bp, Probe sequence
acaattcacaaaggggtatagtctg

SEQ ID NO: 85159 - DNA, 25 bp, Probe sequence
aaaggggtatagtctgagtgtattc

SEQ ID NO: 85160 - DNA, 25 bp, Probe sequence
aaaaatgatctaatttcgtcaaatt

SEQ ID NO: 85161 - DNA, 25 bp, Probe sequence
aatccaaaaacattcgagtgataaa

SEQ ID NO: 85162 - DNA, 25 bp, Probe sequence
aatactaatatttacaattcacaaa

SEQ ID NO: 85163 - DNA, 25 bp, Probe sequence
cccgcacctcagaatccaaaaacat

SEQ ID NO: 85164 - DNA, 25 bp, Probe sequence
ccgcacctcagaatccaaaaacatt

SEQ ID NO: 85165 - DNA, 25 bp, Probe sequence
gcacctcagaatccaaaaacattcg

SEQ ID NO: 85166 - DNA, 25 bp, Probe sequence
gtattctaatacgaaaggacttggt

SEQ ID NO: 85167 - DNA, 25 bp, Probe sequence
gggtatagtctgagtgtattctaat

SEQ ID NO: 85168 - DNA, 25 bp, Probe sequence
tctaatacgaaaggacttggtggat

SEQ ID NO: 85169 - DNA, 25 bp, Probe sequence
tatagtctgagtgtattctaatacg

SEQ ID NO: 85170 - DNA, 25 bp, Probe sequence
tttcgtcaaatttaccaatataaat

SEQ ID NO: 85171 - DNA, 25 bp, Probe sequence
attgcgtcaggagtatccgcttgtt

SEQ ID NO: 85172 - DNA, 25 bp, Probe sequence
acattttatgtataacactctgcct

SEQ ID NO: 85173 - DNA, 25 bp, Probe sequence
aacatgccacataatgattcgaatt

SEQ ID NO: 85174 - DNA, 25 bp, Probe sequence
cactctgcctattttaccttttaat

SEQ ID NO: 85175 - DNA, 25 bp, Probe sequence
gtataacactctgcctattttacct

SEQ ID NO: 85176 - DNA, 25 bp, Probe sequence
gtatccgcttgttaaatgtgcatag

SEQ ID NO: 85177 - DNA, 25 bp, Probe sequence
gtaatgatactataattgcgtcagg

SEQ ID NO: 85178 - DNA, 25 bp, Probe sequence
gtgcatagcttatatttagctgttt

SEQ ID NO: 85179 - DNA, 25 bp, Probe sequence
tgcctattttaccttttaattacat

SEQ ID NO: 85180 - DNA, 25 bp, Probe sequence
tccgcttgttaaatgtgcatagctt

SEQ ID NO: 85181 - DNA, 25 bp, Probe sequence
tcgcctctttctttacattttatgt

SEQ ID NO: 85182 - DNA, 25 bp, Probe sequence
tcaggagtatccgcttgttaaatgt

SEQ ID NO: 85183 - DNA, 25 bp, Probe sequence
tagctgtttaacatgccacataatg

SEQ ID NO: 85184 - DNA, 25 bp, Probe sequence
ttaccccaaacgattaaacaatatg

SEQ ID NO: 85185 - DNA, 25 bp, Probe sequence
tatttagctgtttaacatgccacat

SEQ ID NO: 85186 - DNA, 25 bp, Probe sequence
attttgcgatgatcacatatttaaa

SEQ ID NO: 85187 - DNA, 25 bp, Probe sequence
atatttaaaatgtaacactcctata

SEQ ID NO: 85188 - DNA, 25 bp, Probe sequence
atcattctgattaatctacaaccta

SEQ ID NO: 85189 - DNA, 25 bp, Probe sequence
aaatgcatcatgacagtttatattt

SEQ ID NO: 85190 - DNA, 25 bp, Probe sequence
aaaagttcacaaaatatacacaata

SEQ ID NO: 85191 - DNA, 25 bp, Probe sequence
aacttatattttgcgatgatcacat

SEQ ID NO: 85192 - DNA, 25 bp, Probe sequence
aatgactccctctctttatataaaa

SEQ ID NO: 85193 - DNA, 25 bp, Probe sequence
aataatatcaggaatccgcttcaaa

SEQ ID NO: 85194 - DNA, 25 bp, Probe sequence
cactcctatatgtgacaggcaatcg

SEQ ID NO: 85195 - DNA, 25 bp, Probe sequence
gaatccgcttcaaaaatgcatcatg

SEQ ID NO: 85196 - DNA, 25 bp, Probe sequence
gactccctctctttatataaaatat

SEQ ID NO: 85197 - DNA, 25 bp, Probe sequence
gtaacactcctatatgtgacaggca

SEQ ID NO: 85198 - DNA, 25 bp, Probe sequence
gtgacaggcaatcgaatttttacaa

SEQ ID NO: 85199 - DNA, 25 bp, Probe sequence
taatctacaacctatttcaacttat

SEQ ID NO: 85200 - DNA, 25 bp, Probe sequence
tacaacctatttcaacttatatttt

SEQ ID NO: 85201 - DNA, 25 bp, Probe sequence
attgcatttcgtactagttcgattc

SEQ ID NO: 85202 - DNA, 25 bp, Probe sequence
atttcgtactagttcgattcatgaa

SEQ ID NO: 85203 - DNA, 25 bp, Probe sequence
atccaagtgacaacattatttatat

SEQ ID NO: 85204 - DNA, 25 bp, Probe sequence
aaatcgaactagacaagatgctcat

SEQ ID NO: 85205 - DNA, 25 bp, Probe sequence
aagatgctcattgcatttcgtacta

SEQ ID NO: 85206 - DNA, 25 bp, Probe sequence
catttgaatccaagtgacaacatta

SEQ ID NO: 85207 - DNA, 25 bp, Probe sequence
cgtactagttcgattcatgaataat

SEQ ID NO: 85208 - DNA, 25 bp, Probe sequence
gctcattgcatttcgtactagttcg

SEQ ID NO: 85209 - DNA, 25 bp, Probe sequence
gcatttcgtactagttcgattcatg

SEQ ID NO: 85210 - DNA, 25 bp, Probe sequence
gaatccaagtgacaacattatttat

SEQ ID NO: 85211 - DNA, 25 bp, Probe sequence
gaactagacaagatgctcattgcat

SEQ ID NO: 85212 - DNA, 25 bp, Probe sequence
gacaagatgctcattgcatttcgta

SEQ ID NO: 85213 - DNA, 25 bp, Probe sequence
gatgctcattgcatttcgtactagt

SEQ ID NO: 85214 - DNA, 25 bp, Probe sequence
tgctcattgcatttcgtactagttc

SEQ ID NO: 85215 - DNA, 25 bp, Probe sequence
taaaatgtcatttgaatccaagtga

SEQ ID NO: 85216 - DNA, 25 bp, Probe sequence
atatacgttgattaacacattctta

SEQ ID NO: 85217 - DNA, 25 bp, Probe sequence
atatcattttatccaaaccaatttt

SEQ ID NO: 85218 - DNA, 25 bp, Probe sequence
atacgttgattaacacattcttatt

SEQ ID NO: 85219 - DNA, 25 bp, Probe sequence
agatatcattttatccaaaccaatt

SEQ ID NO: 85220 - DNA, 25 bp, Probe sequence
acgttgattaacacattcttatttg

SEQ ID NO: 85221 - DNA, 25 bp, Probe sequence
acaacgatagatatcattttatcca

SEQ ID NO: 85222 - DNA, 25 bp, Probe sequence
aaacaaacaatacacaacgatagat

SEQ ID NO: 85223 - DNA, 25 bp, Probe sequence
aacaatacacaacgatagatatcat

SEQ ID NO: 85224 - DNA, 25 bp, Probe sequence
ccaattttaacttatatacgttgat

SEQ ID NO: 85225 - DNA, 25 bp, Probe sequence
gatagatatcattttatccaaacca

SEQ ID NO: 85226 - DNA, 25 bp, Probe sequence
gttgattaacacattcttatttgaa

SEQ ID NO: 85227 - DNA, 25 bp, Probe sequence
tgattaacacattcttatttgaaat

SEQ ID NO: 85228 - DNA, 25 bp, Probe sequence
taacacattcttatttgaaatgata

SEQ ID NO: 85229 - DNA, 25 bp, Probe sequence
tatccaaaccaattttaacttatat

SEQ ID NO: 85230 - DNA, 25 bp, Probe sequence
tatcattttatccaaaccaatttta

SEQ ID NO: 85231 - DNA, 25 bp, Probe sequence
atatctctatattttatctgttttt

SEQ ID NO: 85232 - DNA, 25 bp, Probe sequence
atgtattaaaccgctttcattataa

SEQ ID NO: 85233 - DNA, 25 bp, Probe sequence
acgcaagtgtgctgtattctaaagt

SEQ ID NO: 85234 - DNA, 25 bp, Probe sequence
acaactttctattttctatatcact

SEQ ID NO: 85235 - DNA, 25 bp, Probe sequence
aaacctcagcacataatgaacaact

SEQ ID NO: 85236 - DNA, 25 bp, Probe sequence
aactcatatgtattaaaccgctttc

SEQ ID NO: 85237 - DNA, 25 bp, Probe sequence
cattcaaagccccactttattctta

SEQ ID NO: 85238 - DNA, 25 bp, Probe sequence
ctatatcacttaaaaccatttccga

SEQ ID NO: 85239 - DNA, 25 bp, Probe sequence
ccatttccgaaattaaacctcagca

SEQ ID NO: 85240 - DNA, 25 bp, Probe sequence
gcgtgattttgcggttttaagcctt

SEQ ID NO: 85241 - DNA, 25 bp, Probe sequence
gtgcacttgtgttttctatttttta

SEQ ID NO: 85242 - DNA, 25 bp, Probe sequence
tgctgtattctaaagtgcacttgtg

SEQ ID NO: 85243 - DNA, 25 bp, Probe sequence
taagccttttacttcctgaataaat

SEQ ID NO: 85244 - DNA, 25 bp, Probe sequence
taaacctcagcacattcaaagcccc

SEQ ID NO: 85245 - DNA, 25 bp, Probe sequence
tatctctattacgcaagtgtgctgt

SEQ ID NO: 85246 - DNA, 25 bp, Probe sequence
attgttaacaagcgtcgactttctt

SEQ ID NO: 85247 - DNA, 25 bp, Probe sequence
atacatatagttgttgttattgtta

SEQ ID NO: 85248 - DNA, 25 bp, Probe sequence
atcaatattcttcgatttttcaaat

SEQ ID NO: 85249 - DNA, 25 bp, Probe sequence
acagttgcgaggtttttttatacat

SEQ ID NO: 85250 - DNA, 25 bp, Probe sequence
aaaatgacctcacaacgaagttagc

SEQ ID NO: 85251 - DNA, 25 bp, Probe sequence
aagcgtcgactttcttaattacata

SEQ ID NO: 85252 - DNA, 25 bp, Probe sequence
aatatcgataactatttcttattta

SEQ ID NO: 85253 - DNA, 25 bp, Probe sequence
aattatggattatttttcttattat

SEQ ID NO: 85254 - DNA, 25 bp, Probe sequence
gaagttagctaaatgattcagttaa

SEQ ID NO: 85255 - DNA, 25 bp, Probe sequence
gacctcacaacgaagttagctaaat

SEQ ID NO: 85256 - DNA, 25 bp, Probe sequence
gattcagttaactaacagttgcgag

SEQ ID NO: 85257 - DNA, 25 bp, Probe sequence
gtgtttgataatgtcatttattcaa

SEQ ID NO: 85258 - DNA, 25 bp, Probe sequence
taacaccgactcatattctataata

SEQ ID NO: 85259 - DNA, 25 bp, Probe sequence
tatatacaaataacaccgactcata

SEQ ID NO: 85260 - DNA, 25 bp, Probe sequence
tatttttcttattatattgtgttat

SEQ ID NO: 85261 - DNA, 25 bp, Probe sequence
attttttatgcatttatatgtcaaa

SEQ ID NO: 85262 - DNA, 25 bp, Probe sequence
acctaattgataatgattctcacta

SEQ ID NO: 85263 - DNA, 25 bp, Probe sequence
aatcgtgataatgattctcattgtc

SEQ ID NO: 85264 - DNA, 25 bp, Probe sequence
aatattgtgtgttacctaattgata

SEQ ID NO: 85265 - DNA, 25 bp, Probe sequence
aattataagttgcatgtaaatcata

SEQ ID NO: 85266 - DNA, 25 bp, Probe sequence
aattctataatattgtgtgttacct

SEQ ID NO: 85267 - DNA, 25 bp, Probe sequence
catcacgaaggaggctaattagtca

SEQ ID NO: 85268 - DNA, 25 bp, Probe sequence
cattgtcatacatcacgaaggaggc

SEQ ID NO: 85269 - DNA, 25 bp, Probe sequence
gcgcttcctcctcaaatttaaaatt

SEQ ID NO: 85270 - DNA, 25 bp, Probe sequence
gattctcactatcaagtaattagga

SEQ ID NO: 85271 - DNA, 25 bp, Probe sequence
gataatgattctcactatcaagtaa

SEQ ID NO: 85272 - DNA, 25 bp, Probe sequence
gattctcattgtcatacatcacgaa

SEQ ID NO: 85273 - DNA, 25 bp, Probe sequence
gtcatacatcacgaaggaggctaat

SEQ ID NO: 85274 - DNA, 25 bp, Probe sequence
taggattatattttttatgcattta

SEQ ID NO: 85275 - DNA, 25 bp, Probe sequence
ttaattcatactaaatcgtgataat

SEQ ID NO: 85276 - DNA, 25 bp, Probe sequence
attgttttattatattttcgctatc

SEQ ID NO: 85277 - DNA, 25 bp, Probe sequence
atcatatttccctcaacatcacagt

SEQ ID NO: 85278 - DNA, 25 bp, Probe sequence
atggagaacttcaatatttataaaa

SEQ ID NO: 85279 - DNA, 25 bp, Probe sequence
aaatatcaaaagttctccacactat

SEQ ID NO: 85280 - DNA, 25 bp, Probe sequence
aaatcatcatatttccctcaacatc

SEQ ID NO: 85281 - DNA, 25 bp, Probe sequence
aaagttctccacactatattgtttt

SEQ ID NO: 85282 - DNA, 25 bp, Probe sequence
catatttccctcaacatcacagtaa

SEQ ID NO: 85283 - DNA, 25 bp, Probe sequence
gctaaatcatcatatttccctcaac

SEQ ID NO: 85284 - DNA, 25 bp, Probe sequence
gttctccacactatattgttttatt

SEQ ID NO: 85285 - DNA, 25 bp, Probe sequence
gtctattccccatttatttaatatt

SEQ ID NO: 85286 - DNA, 25 bp, Probe sequence
tcgctatcaatacgctaaatcatca

SEQ ID NO: 85287 - DNA, 25 bp, Probe sequence
tacgctaaatcatcatatttccctc

SEQ ID NO: 85288 - DNA, 25 bp, Probe sequence
tatactttaccttaatataccttat

SEQ ID NO: 85289 - DNA, 25 bp, Probe sequence
tatattttcgctatcaatacgctaa

SEQ ID NO: 85290 - DNA, 25 bp, Probe sequence
tatttccctcaacatcacagtaaaa

SEQ ID NO: 85291 - DNA, 25 bp, Probe sequence
atagtacaacaaaggtagctccatt

SEQ ID NO: 85292 - DNA, 25 bp, Probe sequence
aggtatagttaaacgcactaccatt

SEQ ID NO: 85293 - DNA, 25 bp, Probe sequence
agatcactcctcaaatttctttcct

SEQ ID NO: 85294 - DNA, 25 bp, Probe sequence
aacgcactaccattagtgattggca

SEQ ID NO: 85295 - DNA, 25 bp, Probe sequence
caaaggtagctccatttaacaaaat

SEQ ID NO: 85296 - DNA, 25 bp, Probe sequence
cattttactcctcttcatttgaata

SEQ ID NO: 85297 - DNA, 25 bp, Probe sequence
gaatattatttttttaagtctctcg

SEQ ID NO: 85298 - DNA, 25 bp, Probe sequence
gattggcaatgcgtttaaatgtcgt

SEQ ID NO: 85299 - DNA, 25 bp, Probe sequence
ggcaatgcgtttaaatgtcgtttta

SEQ ID NO: 85300 - DNA, 25 bp, Probe sequence
tgtcgttttaaaagttcttatgttg

SEQ ID NO: 85301 - DNA, 25 bp, Probe sequence
ttacattttactcctcttcatttga

SEQ ID NO: 85302 - DNA, 25 bp, Probe sequence
tcaaatttctttcctttaattacat

SEQ ID NO: 85303 - DNA, 25 bp, Probe sequence
tactcctcttcatttgaatagtaca

SEQ ID NO: 85304 - DNA, 25 bp, Probe sequence
tttaagtctctcgattagtttgtca

SEQ ID NO: 85305 - DNA, 25 bp, Probe sequence
ttaattacattttactcctcttcat

SEQ ID NO: 85306 - DNA, 25 bp, Probe sequence
attgtaagctttttatctatatttt

SEQ ID NO: 85307 - DNA, 25 bp, Probe sequence
atcttccacctcatttatacattaa

SEQ ID NO: 85308 - DNA, 25 bp, Probe sequence
agtattgtaagctttttatctatat

SEQ ID NO: 85309 - DNA, 25 bp, Probe sequence
aagtattgtaagctttttatctata

SEQ ID NO: 85310 - DNA, 25 bp, Probe sequence
cacctcatttatacattaaaaatat

SEQ ID NO: 85311 - DNA, 25 bp, Probe sequence
cttccacctcatttatacattaaaa

SEQ ID NO: 85312 - DNA, 25 bp, Probe sequence
ccacctcatttatacattaaaaata

SEQ ID NO: 85313 - DNA, 25 bp, Probe sequence
gtattgtaagctttttatctatatt

SEQ ID NO: 85314 - DNA, 25 bp, Probe sequence
tgtaagctttttatctatatttttt

SEQ ID NO: 85315 - DNA, 25 bp, Probe sequence
tccacctcatttatacattaaaaat

SEQ ID NO: 85316 - DNA, 25 bp, Probe sequence
tcttccacctcatttatacattaaa

SEQ ID NO: 85317 - DNA, 25 bp, Probe sequence
taagctttttatctatattttttat

SEQ ID NO: 85318 - DNA, 25 bp, Probe sequence
tattgtaagctttttatctatattt

SEQ ID NO: 85319 - DNA, 25 bp, Probe sequence
ttccacctcatttatacattaaaaa

SEQ ID NO: 85320 - DNA, 25 bp, Probe sequence
ttgtaagctttttatctatattttt

SEQ ID NO: 85321 - DNA, 25 bp, Probe sequence
atgctatactttcaatttcttaaca

SEQ ID NO: 85322 - DNA, 25 bp, Probe sequence
acccctttaatgctatactttcaat

SEQ ID NO: 85323 - DNA, 25 bp, Probe sequence
aacatggctatctcatcagatgaat

SEQ ID NO: 85324 - DNA, 25 bp, Probe sequence
aattggtcacaatctttaaaatata

SEQ ID NO: 85325 - DNA, 25 bp, Probe sequence
caagggattcctcgttatactgtaa

SEQ ID NO: 85326 - DNA, 25 bp, Probe sequence
ctgttacaaacccctttaatgctat

SEQ ID NO: 85327 - DNA, 25 bp, Probe sequence
gcacatatttcttaatgccatttga

SEQ ID NO: 85328 - DNA, 25 bp, Probe sequence
gcaaatcaatgatggcacatatttc

SEQ ID NO: 85329 - DNA, 25 bp, Probe sequence
gatactgtctcaagggattcctcgt

SEQ ID NO: 85330 - DNA, 25 bp, Probe sequence
gtctcaagggattcctcgttatact

SEQ ID NO: 85331 - DNA, 25 bp, Probe sequence
ggattcctcgttatactgtaacaat

SEQ ID NO: 85332 - DNA, 25 bp, Probe sequence
tgaatagtatttatagccatgcaaa

SEQ ID NO: 85333 - DNA, 25 bp, Probe sequence
tcttaatgccatttgatactgtctc

SEQ ID NO: 85334 - DNA, 25 bp, Probe sequence
tcaatttcttaacatggctatctca

SEQ ID NO: 85335 - DNA, 25 bp, Probe sequence
tatactgtaacaattggtcacaatc

SEQ ID NO: 85336 - DNA, 25 bp, Probe sequence
atttctaaagtatagcgttaccgat

SEQ ID NO: 85337 - DNA, 25 bp, Probe sequence
attatttatttgttatatccaatta

SEQ ID NO: 85338 - DNA, 25 bp, Probe sequence
atttcgggtgtgttttgcaataatt

SEQ ID NO: 85339 - DNA, 25 bp, Probe sequence
aagacaacttccatttttcaataag

SEQ ID NO: 85340 - DNA, 25 bp, Probe sequence
aagtatattcctccttttatgaata

SEQ ID NO: 85341 - DNA, 25 bp, Probe sequence
gcatttaactgcttttgtttcccgc

SEQ ID NO: 85342 - DNA, 25 bp, Probe sequence
gacaacttccatttttcaataagaa

SEQ ID NO: 85343 - DNA, 25 bp, Probe sequence
gaaattgccttttcttcttaatctt

SEQ ID NO: 85344 - DNA, 25 bp, Probe sequence
ggcatttaactgcttttgtttcccg

SEQ ID NO: 85345 - DNA, 25 bp, Probe sequence
gggtgtgttttgcaataattattat

SEQ ID NO: 85346 - DNA, 25 bp, Probe sequence
tgccttttcttcttaatcttaaatt

SEQ ID NO: 85347 - DNA, 25 bp, Probe sequence
tcctccttttatgaatatactttta

SEQ ID NO: 85348 - DNA, 25 bp, Probe sequence
tcttcttaatcttaaatttctaaag

SEQ ID NO: 85349 - DNA, 25 bp, Probe sequence
taattaatttcgggtgtgttttgca

SEQ ID NO: 85350 - DNA, 25 bp, Probe sequence
ttgccttttcttcttaatcttaaat

SEQ ID NO: 85351 - DNA, 25 bp, Probe sequence
atttatcttattattttgccacttt

SEQ ID NO: 85352 - DNA, 25 bp, Probe sequence
ataattacttattttgtcaatttat

SEQ ID NO: 85353 - DNA, 25 bp, Probe sequence
acttttacgtgctatcccattacac

SEQ ID NO: 85354 - DNA, 25 bp, Probe sequence
aaaatttcactttagattcacaata

SEQ ID NO: 85355 - DNA, 25 bp, Probe sequence
aacatttaggtcatcattatagtca

SEQ ID NO: 85356 - DNA, 25 bp, Probe sequence
gctccacctcaattatattaagtta

SEQ ID NO: 85357 - DNA, 25 bp, Probe sequence
gtaaatgctccacctcaattatatt

SEQ ID NO: 85358 - DNA, 25 bp, Probe sequence
gtcttttcccttatattacaatttg

SEQ ID NO: 85359 - DNA, 25 bp, Probe sequence
ggaacaccttgtaaatgctccacct

SEQ ID NO: 85360 - DNA, 25 bp, Probe sequence
tgctatcccattacacaaaaacaaa

SEQ ID NO: 85361 - DNA, 25 bp, Probe sequence
tacatttacattatcatatgattac

SEQ ID NO: 85362 - DNA, 25 bp, Probe sequence
taggtcatcattatagtcaacaata

SEQ ID NO: 85363 - DNA, 25 bp, Probe sequence
tttacgtgctatcccattacacaaa

SEQ ID NO: 85364 - DNA, 25 bp, Probe sequence
ttttgccacttttacgtgctatccc

SEQ ID NO: 85365 - DNA, 25 bp, Probe sequence
ttaatagtgttgtctgatgtatata

SEQ ID NO: 85366 - DNA, 25 bp, Probe sequence
aggctcgctcagataatcacacgat

SEQ ID NO: 85367 - DNA, 25 bp, Probe sequence
agataatcacacgatttttctatta

SEQ ID NO: 85368 - DNA, 25 bp, Probe sequence
cagataatcacacgatttttctatt

SEQ ID NO: 85369 - DNA, 25 bp, Probe sequence
ctaggctcgctcagataatcacacg

SEQ ID NO: 85370 - DNA, 25 bp, Probe sequence
ctcgctcagataatcacacgatttt

SEQ ID NO: 85371 - DNA, 25 bp, Probe sequence
ctcagataatcacacgatttttcta

SEQ ID NO: 85372 - DNA, 25 bp, Probe sequence
cgctcagataatcacacgatttttc

SEQ ID NO: 85373 - DNA, 25 bp, Probe sequence
gctcgctcagataatcacacgattt

SEQ ID NO: 85374 - DNA, 25 bp, Probe sequence
gctcagataatcacacgatttttct

SEQ ID NO: 85375 - DNA, 25 bp, Probe sequence
gataatcacacgatttttctattat

SEQ ID NO: 85376 - DNA, 25 bp, Probe sequence
ggctcgctcagataatcacacgatt

SEQ ID NO: 85377 - DNA, 25 bp, Probe sequence
tcgctcagataatcacacgattttt

SEQ ID NO: 85378 - DNA, 25 bp, Probe sequence
taatcacacgatttttctattatta

SEQ ID NO: 85379 - DNA, 25 bp, Probe sequence
taggctcgctcagataatcacacga

SEQ ID NO: 85380 - DNA, 25 bp, Probe sequence
ttttctattattaatcgtattatgt

SEQ ID NO: 85381 - DNA, 25 bp, Probe sequence
attttttgatgactatttagggagt

SEQ ID NO: 85382 - DNA, 25 bp, Probe sequence
atataagaaattttttgatgactat

SEQ ID NO: 85383 - DNA, 25 bp, Probe sequence
atgactatttagggagttggtaaga

SEQ ID NO: 85384 - DNA, 25 bp, Probe sequence
agaaattttttgatgactatttagg

SEQ ID NO: 85385 - DNA, 25 bp, Probe sequence
aattttttgatgactatttagggag

SEQ ID NO: 85386 - DNA, 25 bp, Probe sequence
gaaattttttgatgactatttaggg

SEQ ID NO: 85387 - DNA, 25 bp, Probe sequence
gatgactatttagggagttggtaag

SEQ ID NO: 85388 - DNA, 25 bp, Probe sequence
tgactatttagggagttggtaagaa

SEQ ID NO: 85389 - DNA, 25 bp, Probe sequence
tgatgactatttagggagttggtaa

SEQ ID NO: 85390 - DNA, 25 bp, Probe sequence
tataagaaattttttgatgactatt

SEQ ID NO: 85391 - DNA, 25 bp, Probe sequence
tttgatgactatttagggagttggt

SEQ ID NO: 85392 - DNA, 25 bp, Probe sequence
ttttttgatgactatttagggagtt

SEQ ID NO: 85393 - DNA, 25 bp, Probe sequence
tttttgatgactatttagggagttg

SEQ ID NO: 85394 - DNA, 25 bp, Probe sequence
ttttgatgactatttagggagttgg

SEQ ID NO: 85395 - DNA, 25 bp, Probe sequence
ttgatgactatttagggagttggta

SEQ ID NO: 85396 - DNA, 25 bp, Probe sequence
agaacattttacagttacagctact

SEQ ID NO: 85397 - DNA, 25 bp, Probe sequence
agcattacattttgacaatattaag

SEQ ID NO: 85398 - DNA, 25 bp, Probe sequence
acagctactaaccttgtataaaact

SEQ ID NO: 85399 - DNA, 25 bp, Probe sequence
aaaattattgtatgatgagagtgat

SEQ ID NO: 85400 - DNA, 25 bp, Probe sequence
aacattttacagttacagctactaa

SEQ ID NO: 85401 - DNA, 25 bp, Probe sequence
aactaattttcaaagcctatctata

SEQ ID NO: 85402 - DNA, 25 bp, Probe sequence
aattttcaaagcctatctatattta

SEQ ID NO: 85403 - DNA, 25 bp, Probe sequence
cagttacagctactaaccttgtata

SEQ ID NO: 85404 - DNA, 25 bp, Probe sequence
gctactaaccttgtataaaactaat

SEQ ID NO: 85405 - DNA, 25 bp, Probe sequence
gatgagagtgattaagtaactttat

SEQ ID NO: 85406 - DNA, 25 bp, Probe sequence
gttacagctactaaccttgtataaa

SEQ ID NO: 85407 - DNA, 25 bp, Probe sequence
tcaaagcctatctatatttaatttt

SEQ ID NO: 85408 - DNA, 25 bp, Probe sequence
taagtaactttatggaggttgtcta

SEQ ID NO: 85409 - DNA, 25 bp, Probe sequence
taaaactaattttcaaagcctatct

SEQ ID NO: 85410 - DNA, 25 bp, Probe sequence
tacagttacagctactaaccttgta

SEQ ID NO: 85411 - DNA, 25 bp, Probe sequence
atatatctcgcgaatttatatctat

SEQ ID NO: 85412 - DNA, 25 bp, Probe sequence
actcctcgtgttatataatctcttt

SEQ ID NO: 85413 - DNA, 25 bp, Probe sequence
actactcctcgtgttatataatctc

SEQ ID NO: 85414 - DNA, 25 bp, Probe sequence
acttactactcctcgtgttatataa

SEQ ID NO: 85415 - DNA, 25 bp, Probe sequence
aatacgaatatatctcgcgaattta

SEQ ID NO: 85416 - DNA, 25 bp, Probe sequence
cttactactcctcgtgttatataat

SEQ ID NO: 85417 - DNA, 25 bp, Probe sequence
ctactcctcgtgttatataatctct

SEQ ID NO: 85418 - DNA, 25 bp, Probe sequence
ctcgtgttatataatctctttattt

SEQ ID NO: 85419 - DNA, 25 bp, Probe sequence
ctcctcgtgttatataatctcttta

SEQ ID NO: 85420 - DNA, 25 bp, Probe sequence
tcctcgtgttatataatctctttat

SEQ ID NO: 85421 - DNA, 25 bp, Probe sequence
tactactcctcgtgttatataatct

SEQ ID NO: 85422 - DNA, 25 bp, Probe sequence
tactcctcgtgttatataatctctt

SEQ ID NO: 85423 - DNA, 25 bp, Probe sequence
tacgaatatatctcgcgaatttata

SEQ ID NO: 85424 - DNA, 25 bp, Probe sequence
tatataatctctttatttaatttta

SEQ ID NO: 85425 - DNA, 25 bp, Probe sequence
ttactactcctcgtgttatataatc

SEQ ID NO: 85426 - DNA, 25 bp, Probe sequence
ctaaataagaggtcctaccgtcacg

SEQ ID NO: 85427 - DNA, 25 bp, Probe sequence
accgtcacgtttctctattataata

SEQ ID NO: 85428 - DNA, 25 bp, Probe sequence
acagcagtgaagaaaactattgtta

SEQ ID NO: 85429 - DNA, 25 bp, Probe sequence
cattaaatcaggatactcctaaata

SEQ ID NO: 85430 - DNA, 25 bp, Probe sequence
ctattgttatagttaacttcactgc

SEQ ID NO: 85431 - DNA, 25 bp, Probe sequence
ctaccgtcacgtttctctattataa

SEQ ID NO: 85432 - DNA, 25 bp, Probe sequence
ccgtcacgtttctctattataataa

SEQ ID NO: 85433 - DNA, 25 bp, Probe sequence
gctgtttttataatatctaaattta

SEQ ID NO: 85434 - DNA, 25 bp, Probe sequence
gttatagttaacttcactgctgttt

SEQ ID NO: 85435 - DNA, 25 bp, Probe sequence
gtcacgtttctctattataataaaa

SEQ ID NO: 85436 - DNA, 25 bp, Probe sequence
ggatactcctaaataagaggtccta

SEQ ID NO: 85437 - DNA, 25 bp, Probe sequence
taaataagaggtcctaccgtcacgt

SEQ ID NO: 85438 - DNA, 25 bp, Probe sequence
tactcctaaataagaggtcctaccg

SEQ ID NO: 85439 - DNA, 25 bp, Probe sequence
taccgtcacgtttctctattataat

SEQ ID NO: 85440 - DNA, 25 bp, Probe sequence
ttatagttaacttcactgctgtttt

SEQ ID NO: 85441 - DNA, 25 bp, Probe sequence
agatatagaaaggtgtcgctgtaca

SEQ ID NO: 85442 - DNA, 25 bp, Probe sequence
agctaggcgctaaactgaaacagat

SEQ ID NO: 85443 - DNA, 25 bp, Probe sequence
aaacccaatgtctatgatatttcag

SEQ ID NO: 85444 - DNA, 25 bp, Probe sequence
aaaagctttcgttcaatagatatat

SEQ ID NO: 85445 - DNA, 25 bp, Probe sequence
gctttcgttcaatagatatattcta

SEQ ID NO: 85446 - DNA, 25 bp, Probe sequence
gaaaggtgtcgctgtacatttgaaa

SEQ ID NO: 85447 - DNA, 25 bp, Probe sequence
gaaaccatttgtacacagaaaccca

SEQ ID NO: 85448 - DNA, 25 bp, Probe sequence
gataaatattgaaaagctaggcgct

SEQ ID NO: 85449 - DNA, 25 bp, Probe sequence
gatatttcagtttaccttggctttt

SEQ ID NO: 85450 - DNA, 25 bp, Probe sequence
gtacacagaaacccaatgtctatga

SEQ ID NO: 85451 - DNA, 25 bp, Probe sequence
gtcgctgtacatttgaaaccatttg

SEQ ID NO: 85452 - DNA, 25 bp, Probe sequence
ggtgtcgctgtacatttgaaaccat

SEQ ID NO: 85453 - DNA, 25 bp, Probe sequence
tcagtttaccttggcttttctttat

SEQ ID NO: 85454 - DNA, 25 bp, Probe sequence
tatttcagtttaccttggcttttct

SEQ ID NO: 85455 - DNA, 25 bp, Probe sequence
ttggtattaaaagctttcgttcaat

SEQ ID NO: 85456 - DNA, 25 bp, Probe sequence
atttcattgcatacatattacacga

SEQ ID NO: 85457 - DNA, 25 bp, Probe sequence
agaatgtgaaggggacagttatcaa

SEQ ID NO: 85458 - DNA, 25 bp, Probe sequence
acgctataagtgtaatttcattgca

SEQ ID NO: 85459 - DNA, 25 bp, Probe sequence
acatttaaatgtggtacgctataag

SEQ ID NO: 85460 - DNA, 25 bp, Probe sequence
acaaaatcttatcaaactcttaaag

SEQ ID NO: 85461 - DNA, 25 bp, Probe sequence
aaattcgttgcatatgagcaattta

SEQ ID NO: 85462 - DNA, 25 bp, Probe sequence
aaatttgttcttgaattataggata

SEQ ID NO: 85463 - DNA, 25 bp, Probe sequence
gcatatgagcaatttaacgaaaagt

SEQ ID NO: 85464 - DNA, 25 bp, Probe sequence
gcatacatattacacgattaagaat

SEQ ID NO: 85465 - DNA, 25 bp, Probe sequence
gtggtacgctataagtgtaatttca

SEQ ID NO: 85466 - DNA, 25 bp, Probe sequence
ggataaaaattcgttgcatatgagc

SEQ ID NO: 85467 - DNA, 25 bp, Probe sequence
tgtgaggctccttttaaaataaatt

SEQ ID NO: 85468 - DNA, 25 bp, Probe sequence
tcattgcatacatattacacgatta

SEQ ID NO: 85469 - DNA, 25 bp, Probe sequence
taaaatactttttcacatttaaatg

SEQ ID NO: 85470 - DNA, 25 bp, Probe sequence
tttacaaaatcttatcaaactctta

SEQ ID NO: 85471 - DNA, 25 bp, Probe sequence
atcacaaacatctttcttatttcta

SEQ ID NO: 85472 - DNA, 25 bp, Probe sequence
actccttcaatcacaaacatctttc

SEQ ID NO: 85473 - DNA, 25 bp, Probe sequence
aacatctttcttatttctattatat

SEQ ID NO: 85474 - DNA, 25 bp, Probe sequence
aatcacaaacatctttcttatttct

SEQ ID NO: 85475 - DNA, 25 bp, Probe sequence
caatcacaaacatctttcttatttc

SEQ ID NO: 85476 - DNA, 25 bp, Probe sequence
cacaaacatctttcttatttctatt

SEQ ID NO: 85477 - DNA, 25 bp, Probe sequence
cactccttcaatcacaaacatcttt

SEQ ID NO: 85478 - DNA, 25 bp, Probe sequence
catctttcttatttctattatatat

SEQ ID NO: 85479 - DNA, 25 bp, Probe sequence
cttcaatcacaaacatctttcttat

SEQ ID NO: 85480 - DNA, 25 bp, Probe sequence
ctccttcaatcacaaacatctttct

SEQ ID NO: 85481 - DNA, 25 bp, Probe sequence
ccttcaatcacaaacatctttctta

SEQ ID NO: 85482 - DNA, 25 bp, Probe sequence
tccttcaatcacaaacatctttctt

SEQ ID NO: 85483 - DNA, 25 bp, Probe sequence
tcactccttcaatcacaaacatctt

SEQ ID NO: 85484 - DNA, 25 bp, Probe sequence
tcacaaacatctttcttatttctat

SEQ ID NO: 85485 - DNA, 25 bp, Probe sequence
ttcaatcacaaacatctttcttatt

SEQ ID NO: 85486 - DNA, 25 bp, Probe sequence
atataagcctcattttttgtaaaat

SEQ ID NO: 85487 - DNA, 25 bp, Probe sequence
ataagcctcattttttgtaaaatca

SEQ ID NO: 85488 - DNA, 25 bp, Probe sequence
atcaagtaagtttttcatatatccg

SEQ ID NO: 85489 - DNA, 25 bp, Probe sequence
agtatattgacgtttaagagtggtt

SEQ ID NO: 85490 - DNA, 25 bp, Probe sequence
agcctcattttttgtaaaatcaaca

SEQ ID NO: 85491 - DNA, 25 bp, Probe sequence
acatttttcttaaagtatattgacg

SEQ ID NO: 85492 - DNA, 25 bp, Probe sequence
aatcaacatttttcttaaagtatat

SEQ ID NO: 85493 - DNA, 25 bp, Probe sequence
aatcaagtaagtttttcatatatcc

SEQ ID NO: 85494 - DNA, 25 bp, Probe sequence
gcctcattttttgtaaaatcaacat

SEQ ID NO: 85495 - DNA, 25 bp, Probe sequence
gtatattgacgtttaagagtggtta

SEQ ID NO: 85496 - DNA, 25 bp, Probe sequence
tcaacatttttcttaaagtatattg

SEQ ID NO: 85497 - DNA, 25 bp, Probe sequence
taatcacttcataatattaagttat

SEQ ID NO: 85498 - DNA, 25 bp, Probe sequence
taagcctcattttttgtaaaatcaa

SEQ ID NO: 85499 - DNA, 25 bp, Probe sequence
taaaatataagcctcattttttgta

SEQ ID NO: 85500 - DNA, 25 bp, Probe sequence
tattgacgtttaagagtggttagtt

SEQ ID NO: 85501 - DNA, 25 bp, Probe sequence
attatagtacatgtctctcaggata

SEQ ID NO: 85502 - DNA, 25 bp, Probe sequence
atacaaccactcctttatactttgt

SEQ ID NO: 85503 - DNA, 25 bp, Probe sequence
atcattgttatttcggtgtttttag

SEQ ID NO: 85504 - DNA, 25 bp, Probe sequence
agtacatgtctctcaggatataaag

SEQ ID NO: 85505 - DNA, 25 bp, Probe sequence
agctcgagttttaaatattggtgcc

SEQ ID NO: 85506 - DNA, 25 bp, Probe sequence
accactcctttatactttgtgaatt

SEQ ID NO: 85507 - DNA, 25 bp, Probe sequence
aaactcgaactgaaatgatgatctt

SEQ ID NO: 85508 - DNA, 25 bp, Probe sequence
aattctgaatattctttaatagcct

SEQ ID NO: 85509 - DNA, 25 bp, Probe sequence
gcctaaaaagcttgttatatcgcac

SEQ ID NO: 85510 - DNA, 25 bp, Probe sequence
gaattatttcacaaacattatagta

SEQ ID NO: 85511 - DNA, 25 bp, Probe sequence
gatgatcttttcagctcgagtttta

SEQ ID NO: 85512 - DNA, 25 bp, Probe sequence
gtcgctacctatcaacagatgttac

SEQ ID NO: 85513 - DNA, 25 bp, Probe sequence
taaaaggtccttgtcgctacctatc

SEQ ID NO: 85514 - DNA, 25 bp, Probe sequence
tccttgtcgctacctatcaacagat

SEQ ID NO: 85515 - DNA, 25 bp, Probe sequence
tatatcgcacaaaacacaacattaa

SEQ ID NO: 85516 - DNA, 25 bp, Probe sequence
atcgacttaaagtttatgtggcatt

SEQ ID NO: 85517 - DNA, 25 bp, Probe sequence
atgtggcattttttacttttgtaat

SEQ ID NO: 85518 - DNA, 25 bp, Probe sequence
actctaaagtagtaatagtttgcga

SEQ ID NO: 85519 - DNA, 25 bp, Probe sequence
aaaccgcattatttacgcatattca

SEQ ID NO: 85520 - DNA, 25 bp, Probe sequence
aagccgataaccgtaaaatgattat

SEQ ID NO: 85521 - DNA, 25 bp, Probe sequence
aatgattgtctagtttgtatctctg

SEQ ID NO: 85522 - DNA, 25 bp, Probe sequence
cttttaaaccgcattatttacgcat

SEQ ID NO: 85523 - DNA, 25 bp, Probe sequence
gcattatttacgcatattcatttat

SEQ ID NO: 85524 - DNA, 25 bp, Probe sequence
gcaataaataaaagccgataaccgt

SEQ ID NO: 85525 - DNA, 25 bp, Probe sequence
gattgtctagtttgtatctctgaag

SEQ ID NO: 85526 - DNA, 25 bp, Probe sequence
gtttgtatctctgaagatttggcaa

SEQ ID NO: 85527 - DNA, 25 bp, Probe sequence
gtttgcgaaatgagtatcaatctta

SEQ ID NO: 85528 - DNA, 25 bp, Probe sequence
gtatttacatattacatatcgttta

SEQ ID NO: 85529 - DNA, 25 bp, Probe sequence
tacttttgtaatttcaggtgagtta

SEQ ID NO: 85530 - DNA, 25 bp, Probe sequence
ttatgtggcattttttacttttgta

SEQ ID NO: 85531 - DNA, 25 bp, Probe sequence
atttgtatgttgattttatttaata

SEQ ID NO: 85532 - DNA, 25 bp, Probe sequence
ataaaacgatttgtatgttgatttt

SEQ ID NO: 85533 - DNA, 25 bp, Probe sequence
acctccaaataaaacgatttgtatg

SEQ ID NO: 85534 - DNA, 25 bp, Probe sequence
acgatttgtatgttgattttattta

SEQ ID NO: 85535 - DNA, 25 bp, Probe sequence
aaacgatttgtatgttgattttatt

SEQ ID NO: 85536 - DNA, 25 bp, Probe sequence
aaaacgatttgtatgttgattttat

SEQ ID NO: 85537 - DNA, 25 bp, Probe sequence
aacgatttgtatgttgattttattt

SEQ ID NO: 85538 - DNA, 25 bp, Probe sequence
aataaaacgatttgtatgttgattt

SEQ ID NO: 85539 - DNA, 25 bp, Probe sequence
cgatttgtatgttgattttatttaa

SEQ ID NO: 85540 - DNA, 25 bp, Probe sequence
gatttgtatgttgattttatttaat

SEQ ID NO: 85541 - DNA, 25 bp, Probe sequence
gtatgttgattttatttaatagatg

SEQ ID NO: 85542 - DNA, 25 bp, Probe sequence
tgtatgttgattttatttaatagat

SEQ ID NO: 85543 - DNA, 25 bp, Probe sequence
tataacctccaaataaaacgatttg

SEQ ID NO: 85544 - DNA, 25 bp, Probe sequence
tttgtatgttgattttatttaatag

SEQ ID NO: 85545 - DNA, 25 bp, Probe sequence
ttgtatgttgattttatttaataga

SEQ ID NO: 85546 - DNA, 25 bp, Probe sequence
agtcaccgctggttgtctaaaccaa

SEQ ID NO: 85547 - DNA, 25 bp, Probe sequence
caccgctggttgtctaaaccaactt

SEQ ID NO: 85548 - DNA, 25 bp, Probe sequence
ctagtcaccgctggttgtctaaacc

SEQ ID NO: 85549 - DNA, 25 bp, Probe sequence
cctagtcaccgctggttgtctaaac

SEQ ID NO: 85550 - DNA, 25 bp, Probe sequence
ctggttgtctaaaccaacttcatga

SEQ ID NO: 85551 - DNA, 25 bp, Probe sequence
cgctggttgtctaaaccaacttcat

SEQ ID NO: 85552 - DNA, 25 bp, Probe sequence
ccgctggttgtctaaaccaacttca

SEQ ID NO: 85553 - DNA, 25 bp, Probe sequence
gctggttgtctaaaccaacttcatg

SEQ ID NO: 85554 - DNA, 25 bp, Probe sequence
gtcaccgctggttgtctaaaccaac

SEQ ID NO: 85555 - DNA, 25 bp, Probe sequence
gtctaaaccaacttcatgattaggg

SEQ ID NO: 85556 - DNA, 25 bp, Probe sequence
ggttgtctaaaccaacttcatgatt

SEQ ID NO: 85557 - DNA, 25 bp, Probe sequence
tcaccgctggttgtctaaaccaact

SEQ ID NO: 85558 - DNA, 25 bp, Probe sequence
taaaccaacttcatgattaggggtt

SEQ ID NO: 85559 - DNA, 25 bp, Probe sequence
tagtcaccgctggttgtctaaacca

SEQ ID NO: 85560 - DNA, 25 bp, Probe sequence
ttgtctaaaccaacttcatgattag

SEQ ID NO: 85561 - DNA, 25 bp, Probe sequence
attatctctcctttgtttattggct

SEQ ID NO: 85562 - DNA, 25 bp, Probe sequence
atattacatgcgcattagtactaga

SEQ ID NO: 85563 - DNA, 25 bp, Probe sequence
ataatataaatctcttagcatcata

SEQ ID NO: 85564 - DNA, 25 bp, Probe sequence
atgcttttaaacgatatgattcaca

SEQ ID NO: 85565 - DNA, 25 bp, Probe sequence
agctcacagaagtctcatttttaaa

SEQ ID NO: 85566 - DNA, 25 bp, Probe sequence
aacttttgcgtcgtttttgcacata

SEQ ID NO: 85567 - DNA, 25 bp, Probe sequence
aataatcagctcacagaagtctcat

SEQ ID NO: 85568 - DNA, 25 bp, Probe sequence
gattcacattatatagtaagcgttt

SEQ ID NO: 85569 - DNA, 25 bp, Probe sequence
gtttcattttactgagtcattgcac

SEQ ID NO: 85570 - DNA, 25 bp, Probe sequence
gtcattgcacttatcatacacatta

SEQ ID NO: 85571 - DNA, 25 bp, Probe sequence
gtcgcgcttaaaatgcgttaatggg

SEQ ID NO: 85572 - DNA, 25 bp, Probe sequence
tctctcctttgtttattggctataa

SEQ ID NO: 85573 - DNA, 25 bp, Probe sequence
tattttcgaaaacatattgcacttt

SEQ ID NO: 85574 - DNA, 25 bp, Probe sequence
ttcaacaacgtttcattttactgag

SEQ ID NO: 85575 - DNA, 25 bp, Probe sequence
ttggttgttatgaaagtcgcgctta

SEQ ID NO: 85576 - DNA, 25 bp, Probe sequence
attaaaaaccatcctactgctatta

SEQ ID NO: 85577 - DNA, 25 bp, Probe sequence
accgctagactgacctacaaacacg

SEQ ID NO: 85578 - DNA, 25 bp, Probe sequence
acttaccgctagactgacctacaaa

SEQ ID NO: 85579 - DNA, 25 bp, Probe sequence
aaaccatcctactgctattatttta

SEQ ID NO: 85580 - DNA, 25 bp, Probe sequence
aacacgcttcagaaacgatatttat

SEQ ID NO: 85581 - DNA, 25 bp, Probe sequence
gacctacaaacacgcttcagaaacg

SEQ ID NO: 85582 - DNA, 25 bp, Probe sequence
gatacgtgttcctatatattttgtt

SEQ ID NO: 85583 - DNA, 25 bp, Probe sequence
gttaagacttaccgctagactgacc

SEQ ID NO: 85584 - DNA, 25 bp, Probe sequence
gtgttcctatatattttgttttgct

SEQ ID NO: 85585 - DNA, 25 bp, Probe sequence
tgcttaaaatctaaacaacgccgtt

SEQ ID NO: 85586 - DNA, 25 bp, Probe sequence
taatatcatgatacgtgttcctata

SEQ ID NO: 85587 - DNA, 25 bp, Probe sequence
tactgctattattttagtcattata

SEQ ID NO: 85588 - DNA, 25 bp, Probe sequence
tagactgacctacaaacacgcttca

SEQ ID NO: 85589 - DNA, 25 bp, Probe sequence
tagtcattatatcctaatatcatga

SEQ ID NO: 85590 - DNA, 25 bp, Probe sequence
ttcctatatattttgttttgcttaa

SEQ ID NO: 85591 - DNA, 25 bp, Probe sequence
atttatacatcatcgtcctttacat

SEQ ID NO: 85592 - DNA, 25 bp, Probe sequence
atcatcgtcctttacatgacaacta

SEQ ID NO: 85593 - DNA, 25 bp, Probe sequence
atgtacgagattattgtgttagtta

SEQ ID NO: 85594 - DNA, 25 bp, Probe sequence
aaacttttacagcacattcgctctt

SEQ ID NO: 85595 - DNA, 25 bp, Probe sequence
aactttaatgattgttccacatatt

SEQ ID NO: 85596 - DNA, 25 bp, Probe sequence
aagtatctcaaatttattgtttagt

SEQ ID NO: 85597 - DNA, 25 bp, Probe sequence
cagcacattcgctctttactttatc

SEQ ID NO: 85598 - DNA, 25 bp, Probe sequence
ctctttactttatccctatcatata

SEQ ID NO: 85599 - DNA, 25 bp, Probe sequence
cgatgactttgcatattgaacttca

SEQ ID NO: 85600 - DNA, 25 bp, Probe sequence
tgacaactaattaatctttaccctt

SEQ ID NO: 85601 - DNA, 25 bp, Probe sequence
tcaccttggaaaaacttttacagca

SEQ ID NO: 85602 - DNA, 25 bp, Probe sequence
taccctttatacctttatgtaatat

SEQ ID NO: 85603 - DNA, 25 bp, Probe sequence
tacctttatgtaatatcaccttgga

SEQ ID NO: 85604 - DNA, 25 bp, Probe sequence
tattgtttagtttcattaagttcaa

SEQ ID NO: 85605 - DNA, 25 bp, Probe sequence
tttacagcacattcgctctttactt

SEQ ID NO: 85606 - DNA, 25 bp, Probe sequence
atattactataattcttatcggatt

SEQ ID NO: 85607 - DNA, 25 bp, Probe sequence
ataaacatatatatagggggctatc

SEQ ID NO: 85608 - DNA, 25 bp, Probe sequence
aggatattgagcgatttttttaaat

SEQ ID NO: 85609 - DNA, 25 bp, Probe sequence
acaaggatattgagcgattttttta

SEQ ID NO: 85610 - DNA, 25 bp, Probe sequence
aaatcatgttagggtataagtaaat

SEQ ID NO: 85611 - DNA, 25 bp, Probe sequence
aacatatatatagggggctatcatt

SEQ ID NO: 85612 - DNA, 25 bp, Probe sequence
aagacctcctataacaatggttgaa

SEQ ID NO: 85613 - DNA, 25 bp, Probe sequence
aataagacctcctataacaatggtt

SEQ ID NO: 85614 - DNA, 25 bp, Probe sequence
aattcttatcggattacaaggatat

SEQ ID NO: 85615 - DNA, 25 bp, Probe sequence
ctataattcttatcggattacaagg

SEQ ID NO: 85616 - DNA, 25 bp, Probe sequence
gacctcctataacaatggttgaaaa

SEQ ID NO: 85617 - DNA, 25 bp, Probe sequence
gagcgatttttttaaatatttagat

SEQ ID NO: 85618 - DNA, 25 bp, Probe sequence
gagtataaaaatcatgttagggtat

SEQ ID NO: 85619 - DNA, 25 bp, Probe sequence
taagacctcctataacaatggttga

SEQ ID NO: 85620 - DNA, 25 bp, Probe sequence
ttactataattcttatcggattaca

SEQ ID NO: 85621 - DNA, 25 bp, Probe sequence
acgttatattaatttcagctctact

SEQ ID NO: 85622 - DNA, 25 bp, Probe sequence
actacttacatttatagcattgagc

SEQ ID NO: 85623 - DNA, 25 bp, Probe sequence
acacagcccttatatcgtgaattgt

SEQ ID NO: 85624 - DNA, 25 bp, Probe sequence
aatccacgtcaaacctatatacata

SEQ ID NO: 85625 - DNA, 25 bp, Probe sequence
catatatctcatcaacttgttgtct

SEQ ID NO: 85626 - DNA, 25 bp, Probe sequence
gaaaatacttgcatttagttcatta

SEQ ID NO: 85627 - DNA, 25 bp, Probe sequence
gagctattctaattaactgcaatcg

SEQ ID NO: 85628 - DNA, 25 bp, Probe sequence
gagtgctcttataacataagcgtta

SEQ ID NO: 85629 - DNA, 25 bp, Probe sequence
tgcaatcgaaatccacgtcaaacct

SEQ ID NO: 85630 - DNA, 25 bp, Probe sequence
gtgtatatctaaagggctatgccaa

SEQ ID NO: 85631 - DNA, 25 bp, Probe sequence
ggctatgccaaacacagcccttata

SEQ ID NO: 85632 - DNA, 25 bp, Probe sequence
tttcttcatatcaactacttacatt

SEQ ID NO: 85633 - DNA, 25 bp, Probe sequence
tttcagctctactaaatttcaataa

SEQ ID NO: 85634 - DNA, 25 bp, Probe sequence
ttatggtttggtatgagtgctctta

SEQ ID NO: 85635 - DNA, 25 bp, Probe sequence
ttagttcattagtttcttcatatca

SEQ ID NO: 85636 - DNA, 25 bp, Probe sequence
agaagttcattaattgttcacattt

SEQ ID NO: 85637 - DNA, 25 bp, Probe sequence
accttattaacactttttcaatgat

SEQ ID NO: 85638 - DNA, 25 bp, Probe sequence
aaaatgtttcaacaaacgcatctaa

SEQ ID NO: 85639 - DNA, 25 bp, Probe sequence
aacactttttcaatgataacgatta

SEQ ID NO: 85640 - DNA, 25 bp, Probe sequence
aacgattattattattacgaaatgt

SEQ ID NO: 85641 - DNA, 25 bp, Probe sequence
cattttcattatacaccttattaac

SEQ ID NO: 85642 - DNA, 25 bp, Probe sequence
gttcattaattgttcacattttcat

SEQ ID NO: 85643 - DNA, 25 bp, Probe sequence
gttcacattttcattatacacctta

SEQ ID NO: 85644 - DNA, 25 bp, Probe sequence
tcacattttcattatacaccttatt

SEQ ID NO: 85645 - DNA, 25 bp, Probe sequence
taaacaaaaaatcagcttatcacac

SEQ ID NO: 85646 - DNA, 25 bp, Probe sequence
tacaccttattaacactttttcaat

SEQ ID NO: 85647 - DNA, 25 bp, Probe sequence
tacgaaatgtatattttcctagtta

SEQ ID NO: 85648 - DNA, 25 bp, Probe sequence
tatacaccttattaacactttttca

SEQ ID NO: 85649 - DNA, 25 bp, Probe sequence
ttcaacaaacgcatctaaacaaaaa

SEQ ID NO: 85650 - DNA, 25 bp, Probe sequence
ttcattatacaccttattaacactt

SEQ ID NO: 85651 - DNA, 25 bp, Probe sequence
atcataaaaaaactactgccatctt

SEQ ID NO: 85652 - DNA, 25 bp, Probe sequence
agtagtgcttatatgattcatttat

SEQ ID NO: 85653 - DNA, 25 bp, Probe sequence
agcagtagtgcttatatgattcatt

SEQ ID NO: 85654 - DNA, 25 bp, Probe sequence
aaatcattgtcctaacatagccgtg

SEQ ID NO: 85655 - DNA, 25 bp, Probe sequence
aaaaactactgccatctttacaaca

SEQ ID NO: 85656 - DNA, 25 bp, Probe sequence
aactactgccatctttacaacagca

SEQ ID NO: 85657 - DNA, 25 bp, Probe sequence
aagcgttaatcgctagcccagcatc

SEQ ID NO: 85658 - DNA, 25 bp, Probe sequence
cattgtcctaacatagccgtgacta

SEQ ID NO: 85659 - DNA, 25 bp, Probe sequence
gccatctttacaacagcagtagtgc

SEQ ID NO: 85660 - DNA, 25 bp, Probe sequence
gcgtaaatgttaaatcattgtccta

SEQ ID NO: 85661 - DNA, 25 bp, Probe sequence
gaaagcgttaatcgctagcccagca

SEQ ID NO: 85662 - DNA, 25 bp, Probe sequence
gtcctaacatagccgtgactatact

SEQ ID NO: 85663 - DNA, 25 bp, Probe sequence
gtgaacacatatgtgcgtaaatgtt

SEQ ID NO: 85664 - DNA, 25 bp, Probe sequence
gtgactatacttagatgtaatcata

SEQ ID NO: 85665 - DNA, 25 bp, Probe sequence
tagccgtgactatacttagatgtaa

SEQ ID NO: 85666 - DNA, 25 bp, Probe sequence
atacacactaccatttatataaaat

SEQ ID NO: 85667 - DNA, 25 bp, Probe sequence
atccacatatatacacactaccatt

SEQ ID NO: 85668 - DNA, 25 bp, Probe sequence
acccctatccacatatatacacact

SEQ ID NO: 85669 - DNA, 25 bp, Probe sequence
acatatatacacactaccatttata

SEQ ID NO: 85670 - DNA, 25 bp, Probe sequence
aacaaacaaatgcatcgattttaca

SEQ ID NO: 85671 - DNA, 25 bp, Probe sequence
cacactaccatttatataaaatcta

SEQ ID NO: 85672 - DNA, 25 bp, Probe sequence
cacatatatacacactaccatttat

SEQ ID NO: 85673 - DNA, 25 bp, Probe sequence
ctattattagattatacgttgaaac

SEQ ID NO: 85674 - DNA, 25 bp, Probe sequence
ctatccacatatatacacactacca

SEQ ID NO: 85675 - DNA, 25 bp, Probe sequence
ccctatccacatatatacacactac

SEQ ID NO: 85676 - DNA, 25 bp, Probe sequence
cccctatccacatatatacacacta

SEQ ID NO: 85677 - DNA, 25 bp, Probe sequence
cctatccacatatatacacactacc

SEQ ID NO: 85678 - DNA, 25 bp, Probe sequence
ccacatatatacacactaccattta

SEQ ID NO: 85679 - DNA, 25 bp, Probe sequence
tccacatatatacacactaccattt

SEQ ID NO: 85680 - DNA, 25 bp, Probe sequence
tatccacatatatacacactaccat

SEQ ID NO: 85681 - DNA, 25 bp, Probe sequence
attctaccctaaaatacatcttgta

SEQ ID NO: 85682 - DNA, 25 bp, Probe sequence
atgagcgatatattctaccctaaaa

SEQ ID NO: 85683 - DNA, 25 bp, Probe sequence
actcgttaatcactttctgttgttc

SEQ ID NO: 85684 - DNA, 25 bp, Probe sequence
acatcttcgataaatagcacactac

SEQ ID NO: 85685 - DNA, 25 bp, Probe sequence
aaaacaccattcgcaacatatgagc

SEQ ID NO: 85686 - DNA, 25 bp, Probe sequence
aacaaacaactcgcataaaacaatt

SEQ ID NO: 85687 - DNA, 25 bp, Probe sequence
aagtccttctttcatatcataatac

SEQ ID NO: 85688 - DNA, 25 bp, Probe sequence
aatagcacactacaactcgttaatc

SEQ ID NO: 85689 - DNA, 25 bp, Probe sequence
aatactcattacttactaaaattgc

SEQ ID NO: 85690 - DNA, 25 bp, Probe sequence
cactttctgttgttcatatctcatt

SEQ ID NO: 85691 - DNA, 25 bp, Probe sequence
gatgatatgataaccgacgaaatgt

SEQ ID NO: 85692 - DNA, 25 bp, Probe sequence
gttgttacaaaatatccatgaagca

SEQ ID NO: 85693 - DNA, 25 bp, Probe sequence
gtatcatcgttacaattggtatatt

SEQ ID NO: 85694 - DNA, 25 bp, Probe sequence
tgttcatatctcattgcaaattcaa

SEQ ID NO: 85695 - DNA, 25 bp, Probe sequence
tatctctattttaattacgaccaaa

SEQ ID NO: 85696 - DNA, 25 bp, Probe sequence
attgatgctcacgttattttattaa

SEQ ID NO: 85697 - DNA, 25 bp, Probe sequence
atcacttacattaatctcgtcatga

SEQ ID NO: 85698 - DNA, 25 bp, Probe sequence
atgccatcgtgtattcacctttcat

SEQ ID NO: 85699 - DNA, 25 bp, Probe sequence
acgtgagttttaaatcatcgtttga

SEQ ID NO: 85700 - DNA, 25 bp, Probe sequence
actgcgcaatgatactgtcagacgt

SEQ ID NO: 85701 - DNA, 25 bp, Probe sequence
catgattttgaatgatgccatcgtg

SEQ ID NO: 85702 - DNA, 25 bp, Probe sequence
gacatgatatgattccagccaactt

SEQ ID NO: 85703 - DNA, 25 bp, Probe sequence
gagtatgatgattgatgctcacgtt

SEQ ID NO: 85704 - DNA, 25 bp, Probe sequence
gtatagtttaaaatcactgcgcaat

SEQ ID NO: 85705 - DNA, 25 bp, Probe sequence
tgtattcacctttcatttttccaat

SEQ ID NO: 85706 - DNA, 25 bp, Probe sequence
taaagtctcaaatgcgtcgtaacaa

SEQ ID NO: 85707 - DNA, 25 bp, Probe sequence
tacactgactaacattaacgtgagt

SEQ ID NO: 85708 - DNA, 25 bp, Probe sequence
tattttcaccttatcacttacatta

SEQ ID NO: 85709 - DNA, 25 bp, Probe sequence
tattgctcagtatattttcacctta

SEQ ID NO: 85710 - DNA, 25 bp, Probe sequence
ttccagccaacttacgtgagcatta

SEQ ID NO: 85711 - DNA, 25 bp, Probe sequence
accgttcatctcgttaacaattttg

SEQ ID NO: 85712 - DNA, 25 bp, Probe sequence
aacaattttgaatacagtacgatac

SEQ ID NO: 85713 - DNA, 25 bp, Probe sequence
aacatttatttaccgttcatctcgt

SEQ ID NO: 85714 - DNA, 25 bp, Probe sequence
aagttttgcaaagctttttattgtg

SEQ ID NO: 85715 - DNA, 25 bp, Probe sequence
aaggcctaacaagttttgacacgcg

SEQ ID NO: 85716 - DNA, 25 bp, Probe sequence
gcaaagctttttattgtgattattt

SEQ ID NO: 85717 - DNA, 25 bp, Probe sequence
gacacgcgagatgattccagttcga

SEQ ID NO: 85718 - DNA, 25 bp, Probe sequence
gagatgattccagttcgattatcca

SEQ ID NO: 85719 - DNA, 25 bp, Probe sequence
gatagtaaatagagaggagtcctta

SEQ ID NO: 85720 - DNA, 25 bp, Probe sequence
gattccagttcgattatccattgcg

SEQ ID NO: 85721 - DNA, 25 bp, Probe sequence
gttcgattatccattgcgctaaaac

SEQ ID NO: 85722 - DNA, 25 bp, Probe sequence
tccagttcgattatccattgcgcta

SEQ ID NO: 85723 - DNA, 25 bp, Probe sequence
tatccattgcgctaaaacatttatt

SEQ ID NO: 85724 - DNA, 25 bp, Probe sequence
tatttaccgttcatctcgttaacaa

SEQ ID NO: 85725 - DNA, 25 bp, Probe sequence
ttgacacgcgagatgattccagttc

SEQ ID NO: 85726 - DNA, 25 bp, Probe sequence
atcacattaatacaaacacaacctt

SEQ ID NO: 85727 - DNA, 25 bp, Probe sequence
atcgtatacatacatatcactgatt

SEQ ID NO: 85728 - DNA, 25 bp, Probe sequence
actatgccacagtcatatgttaaac

SEQ ID NO: 85729 - DNA, 25 bp, Probe sequence
agtactttcattttacaaatcacat

SEQ ID NO: 85730 - DNA, 25 bp, Probe sequence
acatatcactgattatccacaaaaa

SEQ ID NO: 85731 - DNA, 25 bp, Probe sequence
aaatttacatttgacacttatattg

SEQ ID NO: 85732 - DNA, 25 bp, Probe sequence
aacacaaccttatctttatattatt

SEQ ID NO: 85733 - DNA, 25 bp, Probe sequence
aatacaaacacaaccttatctttat

SEQ ID NO: 85734 - DNA, 25 bp, Probe sequence
gcttgtggcattttttattcatact

SEQ ID NO: 85735 - DNA, 25 bp, Probe sequence
gcataatactatgccacagtcatat

SEQ ID NO: 85736 - DNA, 25 bp, Probe sequence
gacacttatattgaacaactgtaat

SEQ ID NO: 85737 - DNA, 25 bp, Probe sequence
gtggcattttttattcatactacat

SEQ ID NO: 85738 - DNA, 25 bp, Probe sequence
tcatactacattaaactgcaatcgt

SEQ ID NO: 85739 - DNA, 25 bp, Probe sequence
tatgttaaacatatgcttgtggcat

SEQ ID NO: 85740 - DNA, 25 bp, Probe sequence
ttaaactgcaatcgtatacatacat

SEQ ID NO: 85741 - DNA, 25 bp, Probe sequence
cttacccccttcgatcatgttgaag

SEQ ID NO: 85742 - DNA, 25 bp, Probe sequence
atctataaacttagcctatatctat

SEQ ID NO: 85743 - DNA, 25 bp, Probe sequence
agcctatatctattaaatcgttctt

SEQ ID NO: 85744 - DNA, 25 bp, Probe sequence
aaacttagcctatatctattaaatc

SEQ ID NO: 85745 - DNA, 25 bp, Probe sequence
catgttgaagggggtatctttattt

SEQ ID NO: 85746 - DNA, 25 bp, Probe sequence
cgatcatgttgaagggggtatcttt

SEQ ID NO: 85747 - DNA, 25 bp, Probe sequence
cctcctatctataaacttagcctat

SEQ ID NO: 85748 - DNA, 25 bp, Probe sequence
tacgtcgggttgtctaacctcctat

SEQ ID NO: 85749 - DNA, 25 bp, Probe sequence
gttgtctaacctcctatctataaac

SEQ ID NO: 85750 - DNA, 25 bp, Probe sequence
gtctaacctcctatctataaactta

SEQ ID NO: 85751 - DNA, 25 bp, Probe sequence
tctattaaatcgttcttaacttacg

SEQ ID NO: 85752 - DNA, 25 bp, Probe sequence
taacctcctatctataaacttagcc

SEQ ID NO: 85753 - DNA, 25 bp, Probe sequence
tacaaagtattaatacgtcgggttg

SEQ ID NO: 85754 - DNA, 25 bp, Probe sequence
tacccccttcgatcatgttgaaggg

SEQ ID NO: 85755 - DNA, 25 bp, Probe sequence
ttgtctaacctcctatctataaact

SEQ ID NO: 85756 - DNA, 25 bp, Probe sequence
attaaacgaaaaggactctgatata

SEQ ID NO: 85757 - DNA, 25 bp, Probe sequence
atacagggtataagtttaagcgaat

SEQ ID NO: 85758 - DNA, 25 bp, Probe sequence
cagggtataagtttaagcgaatact

SEQ ID NO: 85759 - DNA, 25 bp, Probe sequence
gtataagtttaagcgaatactttat

SEQ ID NO: 85760 - DNA, 25 bp, Probe sequence
gtatacagggtataagtttaagcga

SEQ ID NO: 85761 - DNA, 25 bp, Probe sequence
tcatcgtatacagggtataagttta

SEQ ID NO: 85762 - DNA, 25 bp, Probe sequence
taaacgaaaaggactctgatataag

SEQ ID NO: 85763 - DNA, 25 bp, Probe sequence
tacagggtataagtttaagcgaata

SEQ ID NO: 85764 - DNA, 25 bp, Probe sequence
tataagtttaagcgaatactttatt

SEQ ID NO: 85765 - DNA, 25 bp, Probe sequence
tatacagggtataagtttaagcgaa

SEQ ID NO: 85766 - DNA, 25 bp, Probe sequence
tattaaacgaaaaggactctgatat

SEQ ID NO: 85767 - DNA, 25 bp, Probe sequence
ttcatcgtatacagggtataagttt

SEQ ID NO: 85768 - DNA, 25 bp, Probe sequence
ttattaaacgaaaaggactctgata

SEQ ID NO: 85769 - DNA, 25 bp, Probe sequence
tttcatcgtatacagggtataagtt

SEQ ID NO: 85770 - DNA, 25 bp, Probe sequence
ttaaacgaaaaggactctgatataa

SEQ ID NO: 85771 - DNA, 25 bp, Probe sequence
attgcttcttttacattaattacat

SEQ ID NO: 85772 - DNA, 25 bp, Probe sequence
attacatacaccaacgtgttactaa

SEQ ID NO: 85773 - DNA, 25 bp, Probe sequence
atagttgagttgtgtaatcgcttac

SEQ ID NO: 85774 - DNA, 25 bp, Probe sequence
atactacttagtcaattgcttcttt

SEQ ID NO: 85775 - DNA, 25 bp, Probe sequence
atcagttaaagcctgttcattgtaa

SEQ ID NO: 85776 - DNA, 25 bp, Probe sequence
agtagccctccttatcaatataatt

SEQ ID NO: 85777 - DNA, 25 bp, Probe sequence
aaattaagctgtgatggttaccaac

SEQ ID NO: 85778 - DNA, 25 bp, Probe sequence
aagtgctgataatagctgctactgc

SEQ ID NO: 85779 - DNA, 25 bp, Probe sequence
aatcttacatatttctgtcacaagt

SEQ ID NO: 85780 - DNA, 25 bp, Probe sequence
ctatttgctcgtgtcttttttattg

SEQ ID NO: 85781 - DNA, 25 bp, Probe sequence
gctgctactgctggattattacaac

SEQ ID NO: 85782 - DNA, 25 bp, Probe sequence
gaaaacgcatacttcaccatgctaa

SEQ ID NO: 85783 - DNA, 25 bp, Probe sequence
gattatcctttcttttaagtgctga

SEQ ID NO: 85784 - DNA, 25 bp, Probe sequence
ggttaccaacacagtctatttgctc

SEQ ID NO: 85785 - DNA, 25 bp, Probe sequence
tacaacaacttttatacattttatt

SEQ ID NO: 85786 - DNA, 25 bp, Probe sequence
atttgtcacgcctttatcattttca

SEQ ID NO: 85787 - DNA, 25 bp, Probe sequence
aaatagcctctatgccagttttaca

SEQ ID NO: 85788 - DNA, 25 bp, Probe sequence
aaaagcaaagctcaaacctgaactt

SEQ ID NO: 85789 - DNA, 25 bp, Probe sequence
aacttcaattgtttacgttgcaact

SEQ ID NO: 85790 - DNA, 25 bp, Probe sequence
aactttatattagaacgctcacaat

SEQ ID NO: 85791 - DNA, 25 bp, Probe sequence
aagctcaaacctgaactttgcttta

SEQ ID NO: 85792 - DNA, 25 bp, Probe sequence
gccagttttacaaacttgtagcaac

SEQ ID NO: 85793 - DNA, 25 bp, Probe sequence
gaatcacatcaaaaacttcaattgt

SEQ ID NO: 85794 - DNA, 25 bp, Probe sequence
gaactttgctttaatttgtcacgcc

SEQ ID NO: 85795 - DNA, 25 bp, Probe sequence
gtttacgttgcaactaactttatat

SEQ ID NO: 85796 - DNA, 25 bp, Probe sequence
gtagcaacaatttttcatcaaacaa

SEQ ID NO: 85797 - DNA, 25 bp, Probe sequence
gtcacgcctttatcattttcaaaat

SEQ ID NO: 85798 - DNA, 25 bp, Probe sequence
tgctttaatttgtcacgcctttatc

SEQ ID NO: 85799 - DNA, 25 bp, Probe sequence
tcatcaaacaactgaatcacatcaa

SEQ ID NO: 85800 - DNA, 25 bp, Probe sequence
tagcctctatgccagttttacaaac

SEQ ID NO: 85801 - DNA, 25 bp, Probe sequence
attgctctaaatatatcataaactt

SEQ ID NO: 85802 - DNA, 25 bp, Probe sequence
atatttgtctttgaggtaagtcgta

SEQ ID NO: 85803 - DNA, 25 bp, Probe sequence
atcattgataaattttttgtctacg

SEQ ID NO: 85804 - DNA, 25 bp, Probe sequence
atcttttaatatttgtctttgaggt

SEQ ID NO: 85805 - DNA, 25 bp, Probe sequence
cttccatacactttctattgctcta

SEQ ID NO: 85806 - DNA, 25 bp, Probe sequence
ccatacactttctattgctctaaat

SEQ ID NO: 85807 - DNA, 25 bp, Probe sequence
gaggtaagtcgtatactaaaatttg

SEQ ID NO: 85808 - DNA, 25 bp, Probe sequence
gataaattttttgtctacgattaat

SEQ ID NO: 85809 - DNA, 25 bp, Probe sequence
gtctacgattaatggagggacttga

SEQ ID NO: 85810 - DNA, 25 bp, Probe sequence
gtctttgaggtaagtcgtatactaa

SEQ ID NO: 85811 - DNA, 25 bp, Probe sequence
gtcttatcttttaatatttgtcttt

SEQ ID NO: 85812 - DNA, 25 bp, Probe sequence
tacactttctattgctctaaatata

SEQ ID NO: 85813 - DNA, 25 bp, Probe sequence
ttttttgtctacgattaatggaggg

SEQ ID NO: 85814 - DNA, 25 bp, Probe sequence
tatcttcaaacgtaaatttattcta

SEQ ID NO: 85815 - DNA, 25 bp, Probe sequence
tattctaattttattgtcttatctt

SEQ ID NO: 85816 - DNA, 25 bp, Probe sequence
atgttaaatactcttcaaaccattt

SEQ ID NO: 85817 - DNA, 25 bp, Probe sequence
atgtcctcctataaatgttaaatac

SEQ ID NO: 85818 - DNA, 25 bp, Probe sequence
aggagaattatatcattaggaggtc

SEQ ID NO: 85819 - DNA, 25 bp, Probe sequence
agaattatatcattaggaggtctat

SEQ ID NO: 85820 - DNA, 25 bp, Probe sequence
aaatgttaaatactcttcaaaccat

SEQ ID NO: 85821 - DNA, 25 bp, Probe sequence
ctcctataaatgttaaatactcttc

SEQ ID NO: 85822 - DNA, 25 bp, Probe sequence
gtcctcctataaatgttaaatactc

SEQ ID NO: 85823 - DNA, 25 bp, Probe sequence
tgtcctcctataaatgttaaatact

SEQ ID NO: 85824 - DNA, 25 bp, Probe sequence
tgttaaatactcttcaaaccatttt

SEQ ID NO: 85825 - DNA, 25 bp, Probe sequence
tcctcctataaatgttaaatactct

SEQ ID NO: 85826 - DNA, 25 bp, Probe sequence
tcttcaaaccattttttatacttag

SEQ ID NO: 85827 - DNA, 25 bp, Probe sequence
tactcttcaaaccattttttatact

SEQ ID NO: 85828 - DNA, 25 bp, Probe sequence
tatgtcctcctataaatgttaaata

SEQ ID NO: 85829 - DNA, 25 bp, Probe sequence
tttatgtcctcctataaatgttaaa

SEQ ID NO: 85830 - DNA, 25 bp, Probe sequence
ttatgtcctcctataaatgttaaat

SEQ ID NO: 85831 - DNA, 25 bp, Probe sequence
attagtcttcagtacttttaccatt

SEQ ID NO: 85832 - DNA, 25 bp, Probe sequence
atttccatcgttggtgttgatagtc

SEQ ID NO: 85833 - DNA, 25 bp, Probe sequence
atatcttacttttattctaatacgc

SEQ ID NO: 85834 - DNA, 25 bp, Probe sequence
atatgttattttttgcgtaaattca

SEQ ID NO: 85835 - DNA, 25 bp, Probe sequence
acgcatttccatcgttggtgttgat

SEQ ID NO: 85836 - DNA, 25 bp, Probe sequence
aatacgcatttccatcgttggtgtt

SEQ ID NO: 85837 - DNA, 25 bp, Probe sequence
cacctccttctcaaaaatattatat

SEQ ID NO: 85838 - DNA, 25 bp, Probe sequence
ccatcgttggtgttgatagtcagtt

SEQ ID NO: 85839 - DNA, 25 bp, Probe sequence
gataattagtcttcagtacttttac

SEQ ID NO: 85840 - DNA, 25 bp, Probe sequence
gttggtgttgatagtcagtttaata

SEQ ID NO: 85841 - DNA, 25 bp, Probe sequence
gtaatacatatcttacttttattct

SEQ ID NO: 85842 - DNA, 25 bp, Probe sequence
tctaatacgcatttccatcgttggt

SEQ ID NO: 85843 - DNA, 25 bp, Probe sequence
tagtcttcagtacttttaccatttt

SEQ ID NO: 85844 - DNA, 25 bp, Probe sequence
tttattctaatacgcatttccatcg

SEQ ID NO: 85845 - DNA, 25 bp, Probe sequence
ttccacctccttctcaaaaatatta

SEQ ID NO: 85846 - DNA, 25 bp, Probe sequence
attgtcgacttttagattatctttc

SEQ ID NO: 85847 - DNA, 25 bp, Probe sequence
atttgctagctccttttgagtcata

SEQ ID NO: 85848 - DNA, 25 bp, Probe sequence
ataatgctatatttcggtattttaa

SEQ ID NO: 85849 - DNA, 25 bp, Probe sequence
atgacatttaatacttttctcgatt

SEQ ID NO: 85850 - DNA, 25 bp, Probe sequence
agctcttttattgtggtttctctcc

SEQ ID NO: 85851 - DNA, 25 bp, Probe sequence
catccaaatttttattcaacaccga

SEQ ID NO: 85852 - DNA, 25 bp, Probe sequence
gaaactctagctattttcaaattat

SEQ ID NO: 85853 - DNA, 25 bp, Probe sequence
gatattgtttgtctagttactccaa

SEQ ID NO: 85854 - DNA, 25 bp, Probe sequence
gattatctttcaataagctctttta

SEQ ID NO: 85855 - DNA, 25 bp, Probe sequence
gttactccaactttatttgctagct

SEQ ID NO: 85856 - DNA, 25 bp, Probe sequence
ggttatgtacacccttttctataag

SEQ ID NO: 85857 - DNA, 25 bp, Probe sequence
tcaacaccgaacaaatatttttaca

SEQ ID NO: 85858 - DNA, 25 bp, Probe sequence
tataatacgtgtgttttcttttcaa

SEQ ID NO: 85859 - DNA, 25 bp, Probe sequence
ttctctccaaatatctcatccaaat

SEQ ID NO: 85860 - DNA, 25 bp, Probe sequence
ttgtggtttctctccaaatatctca

SEQ ID NO: 85861 - DNA, 25 bp, Probe sequence
ctaagttagggctcggcaccatatc

SEQ ID NO: 85862 - DNA, 25 bp, Probe sequence
atcgggcaacctctgatgtgttatg

SEQ ID NO: 85863 - DNA, 25 bp, Probe sequence
agtcatgcgttgtgtaactttatca

SEQ ID NO: 85864 - DNA, 25 bp, Probe sequence
aagttttaagtgccttgccatgatt

SEQ ID NO: 85865 - DNA, 25 bp, Probe sequence
ccatactctgggcattttgacgcca

SEQ ID NO: 85866 - DNA, 25 bp, Probe sequence
gaagtgcgggggattatttatattt

SEQ ID NO: 85867 - DNA, 25 bp, Probe sequence
gactttgtcatactaactatattgt

SEQ ID NO: 85868 - DNA, 25 bp, Probe sequence
gtaactttatcactgtatggtctgg

SEQ ID NO: 85869 - DNA, 25 bp, Probe sequence
gtcacacccatactctgggcatttt

SEQ ID NO: 85870 - DNA, 25 bp, Probe sequence
gtctggaataaatcgggcaacctct

SEQ ID NO: 85871 - DNA, 25 bp, Probe sequence
ggctcggcaccatatcaagttttaa

SEQ ID NO: 85872 - DNA, 25 bp, Probe sequence
tgtgttatgttagatgactttgtca

SEQ ID NO: 85873 - DNA, 25 bp, Probe sequence
tgccatgatttaagggtcacaccca

SEQ ID NO: 85874 - DNA, 25 bp, Probe sequence
tcccccgccactatgtgaagtgcgg

SEQ ID NO: 85875 - DNA, 25 bp, Probe sequence
ttttgacgccagaataaatcccccg

SEQ ID NO: 85876 - DNA, 25 bp, Probe sequence
atcacacattataaaaacgcctcac

SEQ ID NO: 85877 - DNA, 25 bp, Probe sequence
actacactcaagcatcactctaaag

SEQ ID NO: 85878 - DNA, 25 bp, Probe sequence
acattactacactcaagcatcactc

SEQ ID NO: 85879 - DNA, 25 bp, Probe sequence
aaatccacttcaaactatatatcaa

SEQ ID NO: 85880 - DNA, 25 bp, Probe sequence
aacaacttcaacattactacactca

SEQ ID NO: 85881 - DNA, 25 bp, Probe sequence
aacgcctcacatcattcatttaatt

SEQ ID NO: 85882 - DNA, 25 bp, Probe sequence
aattgtaccgaatcacatcaagtta

SEQ ID NO: 85883 - DNA, 25 bp, Probe sequence
caaaaatcaaaatccacttcaaact

SEQ ID NO: 85884 - DNA, 25 bp, Probe sequence
cacatcattcatttaattgtaccga

SEQ ID NO: 85885 - DNA, 25 bp, Probe sequence
ccaaatcatttattatcgtttaaca

SEQ ID NO: 85886 - DNA, 25 bp, Probe sequence
gcatcactctaaagtttgaaatcga

SEQ ID NO: 85887 - DNA, 25 bp, Probe sequence
gactaactattgtggtgtacatcaa

SEQ ID NO: 85888 - DNA, 25 bp, Probe sequence
gactagcgtttcttataacaacttc

SEQ ID NO: 85889 - DNA, 25 bp, Probe sequence
tgaaatcgaaccctttcgttcaaca

SEQ ID NO: 85890 - DNA, 25 bp, Probe sequence
tacaaaggcgactagcgtttcttat

SEQ ID NO: 85891 - DNA, 25 bp, Probe sequence
actcctcaacgtcatgcagtttttt

SEQ ID NO: 85892 - DNA, 25 bp, Probe sequence
aaatttgatattcactttaatactg

SEQ ID NO: 85893 - DNA, 25 bp, Probe sequence
aatatctattattttcataaattta

SEQ ID NO: 85894 - DNA, 25 bp, Probe sequence
aattacactgtgtgactcctcaacg

SEQ ID NO: 85895 - DNA, 25 bp, Probe sequence
gcagttttttattgtatctcttttc

SEQ ID NO: 85896 - DNA, 25 bp, Probe sequence
gatattcactttaatactgatgtaa

SEQ ID NO: 85897 - DNA, 25 bp, Probe sequence
gtcatgcagttttttattgtatctc

SEQ ID NO: 85898 - DNA, 25 bp, Probe sequence
tgtgactcctcaacgtcatgcagtt

SEQ ID NO: 85899 - DNA, 25 bp, Probe sequence
tgaagtattttgagaaacggtggga

SEQ ID NO: 85900 - DNA, 25 bp, Probe sequence
tcctcaacgtcatgcagttttttat

SEQ ID NO: 85901 - DNA, 25 bp, Probe sequence
tctcttttccgctttttataaatat

SEQ ID NO: 85902 - DNA, 25 bp, Probe sequence
tacactgtgtgactcctcaacgtca

SEQ ID NO: 85903 - DNA, 25 bp, Probe sequence
tatctcttttccgctttttataaat

SEQ ID NO: 85904 - DNA, 25 bp, Probe sequence
tttccgctttttataaatatctatt

SEQ ID NO: 85905 - DNA, 25 bp, Probe sequence
ttttttattgtatctcttttccgct

SEQ ID NO: 85906 - DNA, 25 bp, Probe sequence
atatattctaaatcaactatttcat

SEQ ID NO: 85907 - DNA, 25 bp, Probe sequence
atccatccttcatatattttgggta

SEQ ID NO: 85908 - DNA, 25 bp, Probe sequence
actcatactttagtagtactgccaa

SEQ ID NO: 85909 - DNA, 25 bp, Probe sequence
actatttcataattaaatgcactca

SEQ ID NO: 85910 - DNA, 25 bp, Probe sequence
aatgatggtaatttgaatattttga

SEQ ID NO: 85911 - DNA, 25 bp, Probe sequence
aattaaatgcactcatactttagta

SEQ ID NO: 85912 - DNA, 25 bp, Probe sequence
catccttcatatattttgggtatta

SEQ ID NO: 85913 - DNA, 25 bp, Probe sequence
catactttagtagtactgccaaata

SEQ ID NO: 85914 - DNA, 25 bp, Probe sequence
gcatccatccttcatatattttggg

SEQ ID NO: 85915 - DNA, 25 bp, Probe sequence
gcactcatactttagtagtactgcc

SEQ ID NO: 85916 - DNA, 25 bp, Probe sequence
gtagtactgccaaatatagatgaag

SEQ ID NO: 85917 - DNA, 25 bp, Probe sequence
gggtattaagtatatattctaaatc

SEQ ID NO: 85918 - DNA, 25 bp, Probe sequence
tggcatccatccttcatatattttg

SEQ ID NO: 85919 - DNA, 25 bp, Probe sequence
tccttcatatattttgggtattaag

SEQ ID NO: 85920 - DNA, 25 bp, Probe sequence
taaatgcactcatactttagtagta

SEQ ID NO: 85921 - DNA, 25 bp, Probe sequence
atacactttgtgaaaacgtttgcac

SEQ ID NO: 85922 - DNA, 25 bp, Probe sequence
atgcctcccatactttgtttacagt

SEQ ID NO: 85923 - DNA, 25 bp, Probe sequence
acgtttgcacaaatacttacataaa

SEQ ID NO: 85924 - DNA, 25 bp, Probe sequence
acagtttgattgtgcaatacacttt

SEQ ID NO: 85925 - DNA, 25 bp, Probe sequence
aaagcaaccattatgtaagtatcat

SEQ ID NO: 85926 - DNA, 25 bp, Probe sequence
aaacgtttacattactgtcagaatt

SEQ ID NO: 85927 - DNA, 25 bp, Probe sequence
aatgtttttttatgtgcgatatttc

SEQ ID NO: 85928 - DNA, 25 bp, Probe sequence
ctgccaatgctaacaaccttgtctt

SEQ ID NO: 85929 - DNA, 25 bp, Probe sequence
gcgatatttcactgccaatgctaac

SEQ ID NO: 85930 - DNA, 25 bp, Probe sequence
gacttagcattacgattttcattga

SEQ ID NO: 85931 - DNA, 25 bp, Probe sequence
gattgcttaattttttagactgcgg

SEQ ID NO: 85932 - DNA, 25 bp, Probe sequence
gtacacaactattttctagtgtgac

SEQ ID NO: 85933 - DNA, 25 bp, Probe sequence
tcatactcacacaatgattgcttaa

SEQ ID NO: 85934 - DNA, 25 bp, Probe sequence
taacaaccttgtcttacattttaag

SEQ ID NO: 85935 - DNA, 25 bp, Probe sequence
ttagactgcgggcactcttctataa

SEQ ID NO: 85936 - DNA, 25 bp, Probe sequence
atctttatcgtcattagtggttctt

SEQ ID NO: 85937 - DNA, 25 bp, Probe sequence
aatctttatcgtcattagtggttct

SEQ ID NO: 85938 - DNA, 25 bp, Probe sequence
cttttaatctttatcgtcattagtg

SEQ ID NO: 85939 - DNA, 25 bp, Probe sequence
ctccttttaatctttatcgtcatta

SEQ ID NO: 85940 - DNA, 25 bp, Probe sequence
cctccttttaatctttatcgtcatt

SEQ ID NO: 85941 - DNA, 25 bp, Probe sequence
ccttttaatctttatcgtcattagt

SEQ ID NO: 85942 - DNA, 25 bp, Probe sequence
tcctccttttaatctttatcgtcat

SEQ ID NO: 85943 - DNA, 25 bp, Probe sequence
tccttttaatctttatcgtcattag

SEQ ID NO: 85944 - DNA, 25 bp, Probe sequence
taatctttatcgtcattagtggttc

SEQ ID NO: 85945 - DNA, 25 bp, Probe sequence
tttaatctttatcgtcattagtggt

SEQ ID NO: 85946 - DNA, 25 bp, Probe sequence
ttttaatctttatcgtcattagtgg

SEQ ID NO: 85947 - DNA, 25 bp, Probe sequence
ttaatctttatcgtcattagtggtt

SEQ ID NO: 85948 - DNA, 25 bp, Probe sequence
agcactccttctttttatattgaga

SEQ ID NO: 85949 - DNA, 25 bp, Probe sequence
actccttctttttatattgagaatt

SEQ ID NO: 85950 - DNA, 25 bp, Probe sequence
aaagcactccttctttttatattga

SEQ ID NO: 85951 - DNA, 25 bp, Probe sequence
aaaagcactccttctttttatattg

SEQ ID NO: 85952 - DNA, 25 bp, Probe sequence
aagcactccttctttttatattgag

SEQ ID NO: 85953 - DNA, 25 bp, Probe sequence
cactccttctttttatattgagaat

SEQ ID NO: 85954 - DNA, 25 bp, Probe sequence
ctttttatattgagaattttgtatt

SEQ ID NO: 85955 - DNA, 25 bp, Probe sequence
ctccttctttttatattgagaattt

SEQ ID NO: 85956 - DNA, 25 bp, Probe sequence
ccttctttttatattgagaattttg

SEQ ID NO: 85957 - DNA, 25 bp, Probe sequence
gcactccttctttttatattgagaa

SEQ ID NO: 85958 - DNA, 25 bp, Probe sequence
gaaaagcactccttctttttatatt

SEQ ID NO: 85959 - DNA, 25 bp, Probe sequence
tgaaaagcactccttctttttatat

SEQ ID NO: 85960 - DNA, 25 bp, Probe sequence
tccttctttttatattgagaatttt

SEQ ID NO: 85961 - DNA, 25 bp, Probe sequence
tattgagaattttgtattatatata

SEQ ID NO: 85962 - DNA, 25 bp, Probe sequence
ttgagaattttgtattatatataat

SEQ ID NO: 85963 - DNA, 25 bp, Probe sequence
atgcattcattcaacactgccacca

SEQ ID NO: 85964 - DNA, 25 bp, Probe sequence
atgtcgtgtctatgaccattgtgac

SEQ ID NO: 85965 - DNA, 25 bp, Probe sequence
acttcagactaacctcgagttcgta

SEQ ID NO: 85966 - DNA, 25 bp, Probe sequence
aagcctttaaagtatgtcgtgtcta

SEQ ID NO: 85967 - DNA, 25 bp, Probe sequence
aatttttggcaatggcttggcgaca

SEQ ID NO: 85968 - DNA, 25 bp, Probe sequence
ctgccaccagtcttacttcagacaa

SEQ ID NO: 85969 - DNA, 25 bp, Probe sequence
gaaagcctgtcatcacattagtcga

SEQ ID NO: 85970 - DNA, 25 bp, Probe sequence
gacaacaggctttttttattatcat

SEQ ID NO: 85971 - DNA, 25 bp, Probe sequence
gacgtccatctttaaagtgcgttct

SEQ ID NO: 85972 - DNA, 25 bp, Probe sequence
gtacaccttctttacaaacaatgac

SEQ ID NO: 85973 - DNA, 25 bp, Probe sequence
gggtatgaccatcgctaaacactta

SEQ ID NO: 85974 - DNA, 25 bp, Probe sequence
ggttatatactcttttcaatggtga

SEQ ID NO: 85975 - DNA, 25 bp, Probe sequence
ggcttggcgacatatgcattcattc

SEQ ID NO: 85976 - DNA, 25 bp, Probe sequence
tagtcgacatcgacgtccatcttta

SEQ ID NO: 85977 - DNA, 25 bp, Probe sequence
tattatcatatacctcactatcgaa

SEQ ID NO: 85978 - DNA, 25 bp, Probe sequence
atatcacgtcggtgtaagcgcttaa

SEQ ID NO: 85979 - DNA, 25 bp, Probe sequence
atatatcacgtcggtgtaagcgctt

SEQ ID NO: 85980 - DNA, 25 bp, Probe sequence
atcacgtcggtgtaagcgcttaata

SEQ ID NO: 85981 - DNA, 25 bp, Probe sequence
acctcaatcattttcgttaagccaa

SEQ ID NO: 85982 - DNA, 25 bp, Probe sequence
aacacatacttagaaacatatttat

SEQ ID NO: 85983 - DNA, 25 bp, Probe sequence
aagcgcttaatatccttaaaattat

SEQ ID NO: 85984 - DNA, 25 bp, Probe sequence
aagccaaatatatcacgtcggtgta

SEQ ID NO: 85985 - DNA, 25 bp, Probe sequence
caatcattttcgttaagccaaatat

SEQ ID NO: 85986 - DNA, 25 bp, Probe sequence
ctgtcacctcaatcattttcgttaa

SEQ ID NO: 85987 - DNA, 25 bp, Probe sequence
gtcacctcaatcattttcgttaagc

SEQ ID NO: 85988 - DNA, 25 bp, Probe sequence
gtcggtgtaagcgcttaatatcctt

SEQ ID NO: 85989 - DNA, 25 bp, Probe sequence
ggtgtaagcgcttaatatccttaaa

SEQ ID NO: 85990 - DNA, 25 bp, Probe sequence
tctgtcacctcaatcattttcgtta

SEQ ID NO: 85991 - DNA, 25 bp, Probe sequence
taaattatccaaaatactgaacata

SEQ ID NO: 85992 - DNA, 25 bp, Probe sequence
tactgaacataaacacatacttaga

SEQ ID NO: 85993 - DNA, 25 bp, Probe sequence
ataactaatgattatggcgcctaca

SEQ ID NO: 85994 - DNA, 25 bp, Probe sequence
atggcgcctacattttgttctatga

SEQ ID NO: 85995 - DNA, 25 bp, Probe sequence
acagggaattatgatctgccccgag

SEQ ID NO: 85996 - DNA, 25 bp, Probe sequence
gcacatgccgtcggggcaggattgc

SEQ ID NO: 85997 - DNA, 25 bp, Probe sequence
gaagcagtatctttcatctcttcac

SEQ ID NO: 85998 - DNA, 25 bp, Probe sequence
gacaccgctatatgtctttattgta

SEQ ID NO: 85999 - DNA, 25 bp, Probe sequence
gagaagttttcacttttctttcagt

SEQ ID NO: 86000 - DNA, 25 bp, Probe sequence
gatctgccccgagacatagagatga

SEQ ID NO: 86001 - DNA, 25 bp, Probe sequence
gggcaggattgccaactatattgca

SEQ ID NO: 86002 - DNA, 25 bp, Probe sequence
tgagtcaccctaagtcgggcaaata

SEQ ID NO: 86003 - DNA, 25 bp, Probe sequence
ggagtaaattcattgagtcacccta

SEQ ID NO: 86004 - DNA, 25 bp, Probe sequence
ggcgatacttttaatccgatttata

SEQ ID NO: 86005 - DNA, 25 bp, Probe sequence
tactccctacaatattgacaccgct

SEQ ID NO: 86006 - DNA, 25 bp, Probe sequence
ttttctttcagtccgctttttagag

SEQ ID NO: 86007 - DNA, 25 bp, Probe sequence
ttcagtccgctttttagagagttta

SEQ ID NO: 86008 - DNA, 25 bp, Probe sequence
agaaactgtactaatttgtgtaaca

SEQ ID NO: 86009 - DNA, 25 bp, Probe sequence
acgcctccatctgtataatgttgtg

SEQ ID NO: 86010 - DNA, 25 bp, Probe sequence
actaaacgcctccatctgtataatg

SEQ ID NO: 86011 - DNA, 25 bp, Probe sequence
acagttataatgttcactattttca

SEQ ID NO: 86012 - DNA, 25 bp, Probe sequence
aacagtttgattttacagcctcggt

SEQ ID NO: 86013 - DNA, 25 bp, Probe sequence
aacgttttcatagtcattgtagcat

SEQ ID NO: 86014 - DNA, 25 bp, Probe sequence
gctaattgcattctgttacacaaca

SEQ ID NO: 86015 - DNA, 25 bp, Probe sequence
gaatttgaaatgctatgttaacgtt

SEQ ID NO: 86016 - DNA, 25 bp, Probe sequence
gaaccgttcaatatcttgccgattt

SEQ ID NO: 86017 - DNA, 25 bp, Probe sequence
gactggattaaatacttttattgac

SEQ ID NO: 86018 - DNA, 25 bp, Probe sequence
gattttacagcctcggtaaatcgtc

SEQ ID NO: 86019 - DNA, 25 bp, Probe sequence
gtagcatgtttgttgtgattttttt

SEQ ID NO: 86020 - DNA, 25 bp, Probe sequence
gtgtaacagtaatatgctaattgca

SEQ ID NO: 86021 - DNA, 25 bp, Probe sequence
tgttcactattttcattgctttaaa

SEQ ID NO: 86022 - DNA, 25 bp, Probe sequence
tgccgatttttatataacagctaca

SEQ ID NO: 86023 - DNA, 25 bp, Probe sequence
atatgccccttcactcttgaagttg

SEQ ID NO: 86024 - DNA, 25 bp, Probe sequence
atgccccttcactcttgaagttgca

SEQ ID NO: 86025 - DNA, 25 bp, Probe sequence
agttgcatatgctttcttttcggtc

SEQ ID NO: 86026 - DNA, 25 bp, Probe sequence
acgtcttgctaatactcaatactca

SEQ ID NO: 86027 - DNA, 25 bp, Probe sequence
actacgtcttgctaatactcaatac

SEQ ID NO: 86028 - DNA, 25 bp, Probe sequence
acttactacgtcttgctaatactca

SEQ ID NO: 86029 - DNA, 25 bp, Probe sequence
aaaagaagcatatgccccttcactc

SEQ ID NO: 86030 - DNA, 25 bp, Probe sequence
cactcttgaagttgcatatgctttc

SEQ ID NO: 86031 - DNA, 25 bp, Probe sequence
catatgctttcttttcggtctgaat

SEQ ID NO: 86032 - DNA, 25 bp, Probe sequence
cttgctaatactcaatactcaattg

SEQ ID NO: 86033 - DNA, 25 bp, Probe sequence
gccccttcactcttgaagttgcata

SEQ ID NO: 86034 - DNA, 25 bp, Probe sequence
gctttcttttcggtctgaattgtat

SEQ ID NO: 86035 - DNA, 25 bp, Probe sequence
tgcatatgctttcttttcggtctga

SEQ ID NO: 86036 - DNA, 25 bp, Probe sequence
tatgctttcttttcggtctgaattg

SEQ ID NO: 86037 - DNA, 25 bp, Probe sequence
tatacttactacgtcttgctaatac

SEQ ID NO: 86038 - DNA, 25 bp, Probe sequence
attgccatacaaatacttgtcatat

SEQ ID NO: 86039 - DNA, 25 bp, Probe sequence
atcatgtaagtgtttgtgacgccaa

SEQ ID NO: 86040 - DNA, 25 bp, Probe sequence
atcatcttgataactttagaggtct

SEQ ID NO: 86041 - DNA, 25 bp, Probe sequence
aaacgaatgaaacgattgcctatcc

SEQ ID NO: 86042 - DNA, 25 bp, Probe sequence
aacgattgcctatcccatagatggc

SEQ ID NO: 86043 - DNA, 25 bp, Probe sequence
gcctatcccatagatggcaacatta

SEQ ID NO: 86044 - DNA, 25 bp, Probe sequence
gaatgaaacgattgcctatcccata

SEQ ID NO: 86045 - DNA, 25 bp, Probe sequence
gacgccaaattgccatacaaatact

SEQ ID NO: 86046 - DNA, 25 bp, Probe sequence
gacctctgaaggtatcatcttgata

SEQ ID NO: 86047 - DNA, 25 bp, Probe sequence
gatggcaacattaaaaagacctctg

SEQ ID NO: 86048 - DNA, 25 bp, Probe sequence
gataactttagaggtctttgtttat

SEQ ID NO: 86049 - DNA, 25 bp, Probe sequence
gtgtttgtgacgccaaattgccata

SEQ ID NO: 86050 - DNA, 25 bp, Probe sequence
tgtgacgccaaattgccatacaaat

SEQ ID NO: 86051 - DNA, 25 bp, Probe sequence
tgaaacgattgcctatcccatagat

SEQ ID NO: 86052 - DNA, 25 bp, Probe sequence
taattcaccaataaatcatgtaagt

SEQ ID NO: 86053 - DNA, 25 bp, Probe sequence
attcctccaaaatgtaattgcccaa

SEQ ID NO: 86054 - DNA, 25 bp, Probe sequence
atctttttgttatagttaattagct

SEQ ID NO: 86055 - DNA, 25 bp, Probe sequence
acaatagtgtataatttttttgatt

SEQ ID NO: 86056 - DNA, 25 bp, Probe sequence
aaacaaagcattaactatctttttg

SEQ ID NO: 86057 - DNA, 25 bp, Probe sequence
aagcattaactatctttttgttata

SEQ ID NO: 86058 - DNA, 25 bp, Probe sequence
aattgcccaatctacattaaagaaa

SEQ ID NO: 86059 - DNA, 25 bp, Probe sequence
ccaaaatgtaattgcccaatctaca

SEQ ID NO: 86060 - DNA, 25 bp, Probe sequence
gattaatgtacatcaaaggagtaac

SEQ ID NO: 86061 - DNA, 25 bp, Probe sequence
gttatagttaattagctttgcaata

SEQ ID NO: 86062 - DNA, 25 bp, Probe sequence
gtaattgcccaatctacattaaaga

SEQ ID NO: 86063 - DNA, 25 bp, Probe sequence
tgcccaatctacattaaagaaacaa

SEQ ID NO: 86064 - DNA, 25 bp, Probe sequence
tcctccaaaatgtaattgcccaatc

SEQ ID NO: 86065 - DNA, 25 bp, Probe sequence
taattcctccaaaatgtaattgccc

SEQ ID NO: 86066 - DNA, 25 bp, Probe sequence
tagttaattagctttgcaatataca

SEQ ID NO: 86067 - DNA, 25 bp, Probe sequence
ttagctttgcaatatacaatagtgt

SEQ ID NO: 86068 - DNA, 25 bp, Probe sequence
atatgcttccgattgttcgatgctt

SEQ ID NO: 86069 - DNA, 25 bp, Probe sequence
atagaatgcatgattactgttgtat

SEQ ID NO: 86070 - DNA, 25 bp, Probe sequence
atgcttccgattgttcgatgcttta

SEQ ID NO: 86071 - DNA, 25 bp, Probe sequence
acataattctttgtattgactgtat

SEQ ID NO: 86072 - DNA, 25 bp, Probe sequence
aattctttgtattgactgtatgtct

SEQ ID NO: 86073 - DNA, 25 bp, Probe sequence
gcatgattactgttgtatagataca

SEQ ID NO: 86074 - DNA, 25 bp, Probe sequence
gactgtatgtctttggatagagtta

SEQ ID NO: 86075 - DNA, 25 bp, Probe sequence
gattgttcgatgctttaattcagtt

SEQ ID NO: 86076 - DNA, 25 bp, Probe sequence
gtattgactgtatgtctttggatag

SEQ ID NO: 86077 - DNA, 25 bp, Probe sequence
gtaatatattaggtcatgttatgtt

SEQ ID NO: 86078 - DNA, 25 bp, Probe sequence
ggtcatgttatgtttaagactataa

SEQ ID NO: 86079 - DNA, 25 bp, Probe sequence
tgttcgatgctttaattcagttaga

SEQ ID NO: 86080 - DNA, 25 bp, Probe sequence
taattcagttagaagcatcatagaa

SEQ ID NO: 86081 - DNA, 25 bp, Probe sequence
tagaaatatgcttccgattgttcga

SEQ ID NO: 86082 - DNA, 25 bp, Probe sequence
ttccgattgttcgatgctttaattc

SEQ ID NO: 86083 - DNA, 25 bp, Probe sequence
atttacacgtctaattttaatcatt

SEQ ID NO: 86084 - DNA, 25 bp, Probe sequence
agtggtttaatgggatggtggttat

SEQ ID NO: 86085 - DNA, 25 bp, Probe sequence
acatttacacgtctaattttaatca

SEQ ID NO: 86086 - DNA, 25 bp, Probe sequence
acacgtctaattttaatcattgttt

SEQ ID NO: 86087 - DNA, 25 bp, Probe sequence
cacgtctaattttaatcattgtttt

SEQ ID NO: 86088 - DNA, 25 bp, Probe sequence
catttacacgtctaattttaatcat

SEQ ID NO: 86089 - DNA, 25 bp, Probe sequence
gtggtttaatgggatggtggttatt

SEQ ID NO: 86090 - DNA, 25 bp, Probe sequence
tggtttaatgggatggtggttattt

SEQ ID NO: 86091 - DNA, 25 bp, Probe sequence
taatgggatggtggttatttccgtt

SEQ ID NO: 86092 - DNA, 25 bp, Probe sequence
taacatttacacgtctaattttaat

SEQ ID NO: 86093 - DNA, 25 bp, Probe sequence
tacacgtctaattttaatcattgtt

SEQ ID NO: 86094 - DNA, 25 bp, Probe sequence
tttaatgggatggtggttatttccg

SEQ ID NO: 86095 - DNA, 25 bp, Probe sequence
tttacacgtctaattttaatcattg

SEQ ID NO: 86096 - DNA, 25 bp, Probe sequence
ttacacgtctaattttaatcattgt

SEQ ID NO: 86097 - DNA, 25 bp, Probe sequence
ttaatgggatggtggttatttccgt

SEQ ID NO: 86098 - DNA, 25 bp, Probe sequence
atatgagatgcattaatttcactaa

SEQ ID NO: 86099 - DNA, 25 bp, Probe sequence
atagcaacgttattccaattatctt

SEQ ID NO: 86100 - DNA, 25 bp, Probe sequence
ataagaggctaagatgactgtcaaa

SEQ ID NO: 86101 - DNA, 25 bp, Probe sequence
atggttatcttatcctcaactaaat

SEQ ID NO: 86102 - DNA, 25 bp, Probe sequence
acgttattccaattatcttaatggt

SEQ ID NO: 86103 - DNA, 25 bp, Probe sequence
aagacttattttaagcataaagctt

SEQ ID NO: 86104 - DNA, 25 bp, Probe sequence
gcataaagctttttccttaaataag

SEQ ID NO: 86105 - DNA, 25 bp, Probe sequence
gcaacgttattccaattatcttaat

SEQ ID NO: 86106 - DNA, 25 bp, Probe sequence
gagatgcattaatttcactaaaaaa

SEQ ID NO: 86107 - DNA, 25 bp, Probe sequence
gatgactgtcaaagatacttaatta

SEQ ID NO: 86108 - DNA, 25 bp, Probe sequence
gttatcttatcctcaactaaattgg

SEQ ID NO: 86109 - DNA, 25 bp, Probe sequence
tcttaatggttatcttatcctcaac

SEQ ID NO: 86110 - DNA, 25 bp, Probe sequence
taatggttatcttatcctcaactaa

SEQ ID NO: 86111 - DNA, 25 bp, Probe sequence
tatcttatcctcaactaaattggag

SEQ ID NO: 86112 - DNA, 25 bp, Probe sequence
tatcttaatggttatcttatcctca

SEQ ID NO: 86113 - DNA, 25 bp, Probe sequence
atttttgacatttagtgtaagcgtt

SEQ ID NO: 86114 - DNA, 25 bp, Probe sequence
agcgtttacaaataaagcgtgttgt

SEQ ID NO: 86115 - DNA, 25 bp, Probe sequence
aagcgtttacaaataaagcgtgttg

SEQ ID NO: 86116 - DNA, 25 bp, Probe sequence
aatttttgacatttagtgtaagcgt

SEQ ID NO: 86117 - DNA, 25 bp, Probe sequence
caaataaagcgtgttgtttttgaat

SEQ ID NO: 86118 - DNA, 25 bp, Probe sequence
gcgtttacaaataaagcgtgttgtt

SEQ ID NO: 86119 - DNA, 25 bp, Probe sequence
gacatttagtgtaagcgtttacaaa

SEQ ID NO: 86120 - DNA, 25 bp, Probe sequence
gtaagcgtttacaaataaagcgtgt

SEQ ID NO: 86121 - DNA, 25 bp, Probe sequence
ggtgataaaaatttttgacatttag

SEQ ID NO: 86122 - DNA, 25 bp, Probe sequence
taagcgtttacaaataaagcgtgtt

SEQ ID NO: 86123 - DNA, 25 bp, Probe sequence
tacaaataaagcgtgttgtttttga

SEQ ID NO: 86124 - DNA, 25 bp, Probe sequence
tttgacatttagtgtaagcgtttac

SEQ ID NO: 86125 - DNA, 25 bp, Probe sequence
tttttgacatttagtgtaagcgttt

SEQ ID NO: 86126 - DNA, 25 bp, Probe sequence
ttttgacatttagtgtaagcgttta

SEQ ID NO: 86127 - DNA, 25 bp, Probe sequence
ttgacatttagtgtaagcgtttaca

SEQ ID NO: 86128 - DNA, 25 bp, Probe sequence
attacaattgttatcaaccattaaa

SEQ ID NO: 86129 - DNA, 25 bp, Probe sequence
atcaaatgtgatggaggtgacttgc

SEQ ID NO: 86130 - DNA, 25 bp, Probe sequence
atggattttccatattttaatataa

SEQ ID NO: 86131 - DNA, 25 bp, Probe sequence
acgtcgttatgttatatttcttgta

SEQ ID NO: 86132 - DNA, 25 bp, Probe sequence
aaaacgctatattttatcaaatgtg

SEQ ID NO: 86133 - DNA, 25 bp, Probe sequence
aaaatgtgtctatactgtgtctatt

SEQ ID NO: 86134 - DNA, 25 bp, Probe sequence
aatactttgttcgattgggcgcttt

SEQ ID NO: 86135 - DNA, 25 bp, Probe sequence
caaacccttgatattacaattgtta

SEQ ID NO: 86136 - DNA, 25 bp, Probe sequence
gatattcaattcattacaaaccctt

SEQ ID NO: 86137 - DNA, 25 bp, Probe sequence
gtctatactgtgtctattatcagaa

SEQ ID NO: 86138 - DNA, 25 bp, Probe sequence
tgttcgattgggcgctttgtatttc

SEQ ID NO: 86139 - DNA, 25 bp, Probe sequence
tctaattgattttaaacgtcgttat

SEQ ID NO: 86140 - DNA, 25 bp, Probe sequence
tattccgagcaatatttttatataa

SEQ ID NO: 86141 - DNA, 25 bp, Probe sequence
tttaactttttatattccgagcaat

SEQ ID NO: 86142 - DNA, 25 bp, Probe sequence
ttgggcgctttgtatttcatattta

SEQ ID NO: 86143 - DNA, 25 bp, Probe sequence
accacgccgaagtcatccaatatga

SEQ ID NO: 86144 - DNA, 25 bp, Probe sequence
acatactttcaatgaatcatgttca

SEQ ID NO: 86145 - DNA, 25 bp, Probe sequence
aaaaaccacgccgaagtcatccaat

SEQ ID NO: 86146 - DNA, 25 bp, Probe sequence
aaaatgattattacatactttcaat

SEQ ID NO: 86147 - DNA, 25 bp, Probe sequence
caaaaagtattcctattccactctt

SEQ ID NO: 86148 - DNA, 25 bp, Probe sequence
gccctgcttcaactataaaaaccac

SEQ ID NO: 86149 - DNA, 25 bp, Probe sequence
gattgtattaatttctgtttgatga

SEQ ID NO: 86150 - DNA, 25 bp, Probe sequence
gtcatccaatatgattatggcgtgg

SEQ ID NO: 86151 - DNA, 25 bp, Probe sequence
gggagtgtgggacattgatttatgt

SEQ ID NO: 86152 - DNA, 25 bp, Probe sequence
tgtcactatttgtttaacgtgaaac

SEQ ID NO: 86153 - DNA, 25 bp, Probe sequence
tctcagccctgcttcaactataaaa

SEQ ID NO: 86154 - DNA, 25 bp, Probe sequence
taaaaatagcttatgtcacaaacat

SEQ ID NO: 86155 - DNA, 25 bp, Probe sequence
tatggcgtggtttaatttgcttata

SEQ ID NO: 86156 - DNA, 25 bp, Probe sequence
tataaatctaattgtcactatttgt

SEQ ID NO: 86157 - DNA, 25 bp, Probe sequence
tattcctattccactcttttaaaga

SEQ ID NO: 86158 - DNA, 25 bp, Probe sequence
ataaatgtcgctaacttcatttcta

SEQ ID NO: 86159 - DNA, 25 bp, Probe sequence
atcactataaatgtcgctaacttca

SEQ ID NO: 86160 - DNA, 25 bp, Probe sequence
aatgtcgctaacttcatttctaata

SEQ ID NO: 86161 - DNA, 25 bp, Probe sequence
aataattactaaacttgaacaacat

SEQ ID NO: 86162 - DNA, 25 bp, Probe sequence
gctaacttcatttctaatatttatt

SEQ ID NO: 86163 - DNA, 25 bp, Probe sequence
gaatcactataaatgtcgctaactt

SEQ ID NO: 86164 - DNA, 25 bp, Probe sequence
gtcgctaacttcatttctaatattt

SEQ ID NO: 86165 - DNA, 25 bp, Probe sequence
gtgaatcactataaatgtcgctaac

SEQ ID NO: 86166 - DNA, 25 bp, Probe sequence
tgtcgctaacttcatttctaatatt

SEQ ID NO: 86167 - DNA, 25 bp, Probe sequence
tcgtgaatcactataaatgtcgcta

SEQ ID NO: 86168 - DNA, 25 bp, Probe sequence
taattgttgggttttacatagtaat

SEQ ID NO: 86169 - DNA, 25 bp, Probe sequence
tactaaacttgaacaacattttact

SEQ ID NO: 86170 - DNA, 25 bp, Probe sequence
tatatatgtttatcgtgaatcacta

SEQ ID NO: 86171 - DNA, 25 bp, Probe sequence
tattaattgttgggttttacatagt

SEQ ID NO: 86172 - DNA, 25 bp, Probe sequence
tttaaaaagcataattactacaatt

SEQ ID NO: 86173 - DNA, 25 bp, Probe sequence
ataccaaaacagctatgactttact

SEQ ID NO: 86174 - DNA, 25 bp, Probe sequence
atgactttactttgtcatggctgtt

SEQ ID NO: 86175 - DNA, 25 bp, Probe sequence
accaaaacagctatgactttacttt

SEQ ID NO: 86176 - DNA, 25 bp, Probe sequence
actttactttgtcatggctgttttt

SEQ ID NO: 86177 - DNA, 25 bp, Probe sequence
acagctatgactttactttgtcatg

SEQ ID NO: 86178 - DNA, 25 bp, Probe sequence
aaacagctatgactttactttgtca

SEQ ID NO: 86179 - DNA, 25 bp, Probe sequence
aaaacagctatgactttactttgtc

SEQ ID NO: 86180 - DNA, 25 bp, Probe sequence
catctataccaaaacagctatgact

SEQ ID NO: 86181 - DNA, 25 bp, Probe sequence
ctttactttgtcatggctgtttttt

SEQ ID NO: 86182 - DNA, 25 bp, Probe sequence
gctatgactttactttgtcatggct

SEQ ID NO: 86183 - DNA, 25 bp, Probe sequence
gactttactttgtcatggctgtttt

SEQ ID NO: 86184 - DNA, 25 bp, Probe sequence
tctataccaaaacagctatgacttt

SEQ ID NO: 86185 - DNA, 25 bp, Probe sequence
tactttgtcatggctgttttttaat

SEQ ID NO: 86186 - DNA, 25 bp, Probe sequence
tttactttgtcatggctgtttttta

SEQ ID NO: 86187 - DNA, 25 bp, Probe sequence
ttactttgtcatggctgttttttaa

SEQ ID NO: 86188 - DNA, 25 bp, Probe sequence
attgtacacaatgcttattgataag

SEQ ID NO: 86189 - DNA, 25 bp, Probe sequence
attatcaaatttgccattttattta

SEQ ID NO: 86190 - DNA, 25 bp, Probe sequence
atcaaatttgccattttatttatat

SEQ ID NO: 86191 - DNA, 25 bp, Probe sequence
acacaatgcttattgataagtattt

SEQ ID NO: 86192 - DNA, 25 bp, Probe sequence
acaattatcaaatttgccattttat

SEQ ID NO: 86193 - DNA, 25 bp, Probe sequence
aattatcaaatttgccattttattt

SEQ ID NO: 86194 - DNA, 25 bp, Probe sequence
caattatcaaatttgccattttatt

SEQ ID NO: 86195 - DNA, 25 bp, Probe sequence
caaatttgccattttatttatattt

SEQ ID NO: 86196 - DNA, 25 bp, Probe sequence
tgtacacaatgcttattgataagta

SEQ ID NO: 86197 - DNA, 25 bp, Probe sequence
tcaaatttgccattttatttatatt

SEQ ID NO: 86198 - DNA, 25 bp, Probe sequence
tacaattatcaaatttgccatttta

SEQ ID NO: 86199 - DNA, 25 bp, Probe sequence
tatcaaatttgccattttatttata

SEQ ID NO: 86200 - DNA, 25 bp, Probe sequence
ttatcaaatttgccattttatttat

SEQ ID NO: 86201 - DNA, 25 bp, Probe sequence
ttaaaaatgtcatacaattatcaaa

SEQ ID NO: 86202 - DNA, 25 bp, Probe sequence
ttgtacacaatgcttattgataagt

SEQ ID NO: 86203 - DNA, 25 bp, Probe sequence
acgtgtagcttcaaatatgttagtt

SEQ ID NO: 86204 - DNA, 25 bp, Probe sequence
aaaggtcatgtgtcatccgctttta

SEQ ID NO: 86205 - DNA, 25 bp, Probe sequence
aaacatctcttttattttcaacgca

SEQ ID NO: 86206 - DNA, 25 bp, Probe sequence
aaaactcccttatgattaattcact

SEQ ID NO: 86207 - DNA, 25 bp, Probe sequence
aatgctgcttattggcgatacaaaa

SEQ ID NO: 86208 - DNA, 25 bp, Probe sequence
aattcactaacatacgtgtagcttc

SEQ ID NO: 86209 - DNA, 25 bp, Probe sequence
cttaggtgtctttagtcttcgtact

SEQ ID NO: 86210 - DNA, 25 bp, Probe sequence
gatttatttcacattttattttaat

SEQ ID NO: 86211 - DNA, 25 bp, Probe sequence
gttagtttaatgctgcttattggcg

SEQ ID NO: 86212 - DNA, 25 bp, Probe sequence
gtatacgattacatcttaggtgtct

SEQ ID NO: 86213 - DNA, 25 bp, Probe sequence
gtgtcatccgcttttaagtttgtga

SEQ ID NO: 86214 - DNA, 25 bp, Probe sequence
tcttcgtacttcgccagtgattatt

SEQ ID NO: 86215 - DNA, 25 bp, Probe sequence
taacatgcattaagtactgggtcaa

SEQ ID NO: 86216 - DNA, 25 bp, Probe sequence
tacacctttttaatttgtatacgat

SEQ ID NO: 86217 - DNA, 25 bp, Probe sequence
tttcaacgcataacttaaaaggtca

SEQ ID NO: 86218 - DNA, 25 bp, Probe sequence
atttcaacaacgactttcactacat

SEQ ID NO: 86219 - DNA, 25 bp, Probe sequence
atagggctactcgacacatatagtt

SEQ ID NO: 86220 - DNA, 25 bp, Probe sequence
acaatttttggaatggtatagattt

SEQ ID NO: 86221 - DNA, 25 bp, Probe sequence
aaaatagggctactcgacacatata

SEQ ID NO: 86222 - DNA, 25 bp, Probe sequence
aagcttaagtgccagatttgaattt

SEQ ID NO: 86223 - DNA, 25 bp, Probe sequence
aagtgccagatttgaatttaatttc

SEQ ID NO: 86224 - DNA, 25 bp, Probe sequence
caacgactttcactacattaaaaat

SEQ ID NO: 86225 - DNA, 25 bp, Probe sequence
caacaacgactttcactacattaaa

SEQ ID NO: 86226 - DNA, 25 bp, Probe sequence
gctactcgacacatatagttgtatc

SEQ ID NO: 86227 - DNA, 25 bp, Probe sequence
gctatgattaaagcttaagtgccag

SEQ ID NO: 86228 - DNA, 25 bp, Probe sequence
gggctactcgacacatatagttgta

SEQ ID NO: 86229 - DNA, 25 bp, Probe sequence
tcaaatagccctttatacaattttt

SEQ ID NO: 86230 - DNA, 25 bp, Probe sequence
tagttgtatcaaatagccctttata

SEQ ID NO: 86231 - DNA, 25 bp, Probe sequence
tttaatttcaacaacgactttcact

SEQ ID NO: 86232 - DNA, 25 bp, Probe sequence
ttcaacaacgactttcactacatta

SEQ ID NO: 86233 - DNA, 25 bp, Probe sequence
atatatccacctttcttaagttgtt

SEQ ID NO: 86234 - DNA, 25 bp, Probe sequence
atctataccgacttttgtcaactca

SEQ ID NO: 86235 - DNA, 25 bp, Probe sequence
atgtggtgaatcatgtttattttga

SEQ ID NO: 86236 - DNA, 25 bp, Probe sequence
agttgttatcgatagcttatgtata

SEQ ID NO: 86237 - DNA, 25 bp, Probe sequence
acactatttatctattttatggctt

SEQ ID NO: 86238 - DNA, 25 bp, Probe sequence
aactttctcatatttttggatacaa

SEQ ID NO: 86239 - DNA, 25 bp, Probe sequence
cttatcaacctacctcgctaaaaat

SEQ ID NO: 86240 - DNA, 25 bp, Probe sequence
ccgacttttgtcaactcattttcac

SEQ ID NO: 86241 - DNA, 25 bp, Probe sequence
ggatgtctacatatctataccgact

SEQ ID NO: 86242 - DNA, 25 bp, Probe sequence
ggcttataaatttatccgatatgcc

SEQ ID NO: 86243 - DNA, 25 bp, Probe sequence
tccgatatgccttatcaacctacct

SEQ ID NO: 86244 - DNA, 25 bp, Probe sequence
tccacctttcttaagttgttatcga

SEQ ID NO: 86245 - DNA, 25 bp, Probe sequence
tagttttaactttctcatatttttg

SEQ ID NO: 86246 - DNA, 25 bp, Probe sequence
tatatgattgttacatgattcaaac

SEQ ID NO: 86247 - DNA, 25 bp, Probe sequence
ttgtcaactcattttcacaacaata

SEQ ID NO: 86248 - DNA, 25 bp, Probe sequence
atatcaggcgccttagggttaactg

SEQ ID NO: 86249 - DNA, 25 bp, Probe sequence
aggcgccttagggttaactgtatct

SEQ ID NO: 86250 - DNA, 25 bp, Probe sequence
agcaattgaaatttttacatatatt

SEQ ID NO: 86251 - DNA, 25 bp, Probe sequence
aaaaccctaaggacgcttatatcag

SEQ ID NO: 86252 - DNA, 25 bp, Probe sequence
aacatacatatctcaatcattatca

SEQ ID NO: 86253 - DNA, 25 bp, Probe sequence
aaggacgcttatatcaggcgcctta

SEQ ID NO: 86254 - DNA, 25 bp, Probe sequence
aatcattatcaaattgtcatgacca

SEQ ID NO: 86255 - DNA, 25 bp, Probe sequence
gcgccttagggttaactgtatctat

SEQ ID NO: 86256 - DNA, 25 bp, Probe sequence
gacgcttatatcaggcgccttaggg

SEQ ID NO: 86257 - DNA, 25 bp, Probe sequence
tgtaatccactataaaaaccctaag

SEQ ID NO: 86258 - DNA, 25 bp, Probe sequence
tcatgaccaatgtaatccactataa

SEQ ID NO: 86259 - DNA, 25 bp, Probe sequence
tagggttaactgtatctatttaatt

SEQ ID NO: 86260 - DNA, 25 bp, Probe sequence
tttgtgttttatgttttttgaagca

SEQ ID NO: 86261 - DNA, 25 bp, Probe sequence
ttttgaagcatttttaacatacata

SEQ ID NO: 86262 - DNA, 25 bp, Probe sequence
ttgtcatgaccaatgtaatccacta

SEQ ID NO: 86263 - DNA, 25 bp, Probe sequence
attgacccacgttacatatcaattc

SEQ ID NO: 86264 - DNA, 25 bp, Probe sequence
atatgttattgacccacgttacata

SEQ ID NO: 86265 - DNA, 25 bp, Probe sequence
atagtcatttatatgcaatttgcat

SEQ ID NO: 86266 - DNA, 25 bp, Probe sequence
atgcaatttgcatatatttatatgt

SEQ ID NO: 86267 - DNA, 25 bp, Probe sequence
atgttattgacccacgttacatatc

SEQ ID NO: 86268 - DNA, 25 bp, Probe sequence
gatagtcatttatatgcaatttgca

SEQ ID NO: 86269 - DNA, 25 bp, Probe sequence
gttattgacccacgttacatatcaa

SEQ ID NO: 86270 - DNA, 25 bp, Probe sequence
gtgatagtcatttatatgcaatttg

SEQ ID NO: 86271 - DNA, 25 bp, Probe sequence
tgttattgacccacgttacatatca

SEQ ID NO: 86272 - DNA, 25 bp, Probe sequence
tgacccacgttacatatcaattccg

SEQ ID NO: 86273 - DNA, 25 bp, Probe sequence
tatatgttattgacccacgttacat

SEQ ID NO: 86274 - DNA, 25 bp, Probe sequence
tattgacccacgttacatatcaatt

SEQ ID NO: 86275 - DNA, 25 bp, Probe sequence
ttatatgttattgacccacgttaca

SEQ ID NO: 86276 - DNA, 25 bp, Probe sequence
ttattgacccacgttacatatcaat

SEQ ID NO: 86277 - DNA, 25 bp, Probe sequence
ttgacccacgttacatatcaattcc

SEQ ID NO: 86278 - DNA, 25 bp, Probe sequence
attactgccatcattttaccatata

SEQ ID NO: 86279 - DNA, 25 bp, Probe sequence
accgattcacaagcatatttcacac

SEQ ID NO: 86280 - DNA, 25 bp, Probe sequence
acggcattcgcactttcatagctat

SEQ ID NO: 86281 - DNA, 25 bp, Probe sequence
aaaccggctatttatcaacgtatat

SEQ ID NO: 86282 - DNA, 25 bp, Probe sequence
taactataccagcgttttcgtcctc

SEQ ID NO: 86283 - DNA, 25 bp, Probe sequence
aatattgccatctcattttaagtat

SEQ ID NO: 86284 - DNA, 25 bp, Probe sequence
ctcacttgcctcttttattaatcca

SEQ ID NO: 86285 - DNA, 25 bp, Probe sequence
gcgttttcgtcctcaaaggtgcata

SEQ ID NO: 86286 - DNA, 25 bp, Probe sequence
gtcattacatcatttccatttatac

SEQ ID NO: 86287 - DNA, 25 bp, Probe sequence
gtggctgtacttgattttcacttta

SEQ ID NO: 86288 - DNA, 25 bp, Probe sequence
tgaccattctaagttgttttgccat

SEQ ID NO: 86289 - DNA, 25 bp, Probe sequence
tcctccattctgtcattacatcatt

SEQ ID NO: 86290 - DNA, 25 bp, Probe sequence
tctgtagaccagacggcattcgcac

SEQ ID NO: 86291 - DNA, 25 bp, Probe sequence
taagcctaacctattgctcacttgc

SEQ ID NO: 86292 - DNA, 25 bp, Probe sequence
ttatacattactgacctatgcccgc

SEQ ID NO: 86293 - DNA, 25 bp, Probe sequence
atagtcctgcttctcatcatgacat

SEQ ID NO: 86294 - DNA, 25 bp, Probe sequence
acatgttgctcacttcattgtcaga

SEQ ID NO: 86295 - DNA, 25 bp, Probe sequence
aaactatgccttatgactcatttgc

SEQ ID NO: 86296 - DNA, 25 bp, Probe sequence
cacttcattgtcagaacccttcttg

SEQ ID NO: 86297 - DNA, 25 bp, Probe sequence
cttatgactcatttgcatggcaagt

SEQ ID NO: 86298 - DNA, 25 bp, Probe sequence
cctgcttctcatcatgacatgttgc

SEQ ID NO: 86299 - DNA, 25 bp, Probe sequence
gaatcgccttatgcatgaaaaatca

SEQ ID NO: 86300 - DNA, 25 bp, Probe sequence
gaacccttcttgaaaactatgcctt

SEQ ID NO: 86301 - DNA, 25 bp, Probe sequence
gttgctcacttcattgtcagaaccc

SEQ ID NO: 86302 - DNA, 25 bp, Probe sequence
ggtgattgcttttgattgaatcgcc

SEQ ID NO: 86303 - DNA, 25 bp, Probe sequence
ggttattctcattgtatagtcctgc

SEQ ID NO: 86304 - DNA, 25 bp, Probe sequence
tcattgtatagtcctgcttctcatc

SEQ ID NO: 86305 - DNA, 25 bp, Probe sequence
tcatcatgacatgttgctcacttca

SEQ ID NO: 86306 - DNA, 25 bp, Probe sequence
tttgattgaatcgccttatgcatga

SEQ ID NO: 86307 - DNA, 25 bp, Probe sequence
ttctcattgtatagtcctgcttctc

SEQ ID NO: 86308 - DNA, 25 bp, Probe sequence
atagcatttcatcataaaatacatt

SEQ ID NO: 86309 - DNA, 25 bp, Probe sequence
accattacacttgtcgttaattatc

SEQ ID NO: 86310 - DNA, 25 bp, Probe sequence
acatttaaccattacacttgtcgtt

SEQ ID NO: 86311 - DNA, 25 bp, Probe sequence
acatgattaatgtaccactttaaca

SEQ ID NO: 86312 - DNA, 25 bp, Probe sequence
aaaaatcgttatccattcataacgt

SEQ ID NO: 86313 - DNA, 25 bp, Probe sequence
aacaaaaaatcgttatccattcata

SEQ ID NO: 86314 - DNA, 25 bp, Probe sequence
aatacatttaaccattacacttgtc

SEQ ID NO: 86315 - DNA, 25 bp, Probe sequence
cacttgtcgttaattatcatacgaa

SEQ ID NO: 86316 - DNA, 25 bp, Probe sequence
catttaaccattacacttgtcgtta

SEQ ID NO: 86317 - DNA, 25 bp, Probe sequence
cgttaattatcatacgaaatacatg

SEQ ID NO: 86318 - DNA, 25 bp, Probe sequence
gattaatgtaccactttaacataac

SEQ ID NO: 86319 - DNA, 25 bp, Probe sequence
tgcctattatagcatttcatcataa

SEQ ID NO: 86320 - DNA, 25 bp, Probe sequence
taaccattacacttgtcgttaatta

SEQ ID NO: 86321 - DNA, 25 bp, Probe sequence
taatgtaccactttaacataacaaa

SEQ ID NO: 86322 - DNA, 25 bp, Probe sequence
ttacacttgtcgttaattatcatac

SEQ ID NO: 86323 - DNA, 25 bp, Probe sequence
attacattatatcagacgttttcat

SEQ ID NO: 86324 - DNA, 25 bp, Probe sequence
atatcagacgttttcatacacaaat

SEQ ID NO: 86325 - DNA, 25 bp, Probe sequence
atacatattttgcttatattttagc

SEQ ID NO: 86326 - DNA, 25 bp, Probe sequence
acatttcgtttattatttatatcac

SEQ ID NO: 86327 - DNA, 25 bp, Probe sequence
aaatttcgttgcattttccaattga

SEQ ID NO: 86328 - DNA, 25 bp, Probe sequence
aaatcaaaactctaaatgtctgtgt

SEQ ID NO: 86329 - DNA, 25 bp, Probe sequence
aaaatacttcctccattcaactata

SEQ ID NO: 86330 - DNA, 25 bp, Probe sequence
aactctaaatgtctgtgtattactt

SEQ ID NO: 86331 - DNA, 25 bp, Probe sequence
gttgcattttccaattgaaaactca

SEQ ID NO: 86332 - DNA, 25 bp, Probe sequence
gtttattatttatatcacttaacta

SEQ ID NO: 86333 - DNA, 25 bp, Probe sequence
tcctccattcaactatatctatatt

SEQ ID NO: 86334 - DNA, 25 bp, Probe sequence
taacatacaagcaaacatttcgttt

SEQ ID NO: 86335 - DNA, 25 bp, Probe sequence
tacttcctccattcaactatatcta

SEQ ID NO: 86336 - DNA, 25 bp, Probe sequence
tttgtttaaacctatattacattat

SEQ ID NO: 86337 - DNA, 25 bp, Probe sequence
ttagcatattttgtttaaacctata

SEQ ID NO: 86338 - DNA, 25 bp, Probe sequence
atgtcataatcatttcataaatagc

SEQ ID NO: 86339 - DNA, 25 bp, Probe sequence
agttcacatagatttgagggcattt

SEQ ID NO: 86340 - DNA, 25 bp, Probe sequence
accctcaaattatgttagttcacat

SEQ ID NO: 86341 - DNA, 25 bp, Probe sequence
acatagatttgagggcatttattat

SEQ ID NO: 86342 - DNA, 25 bp, Probe sequence
aaccctcaaattatgttagttcaca

SEQ ID NO: 86343 - DNA, 25 bp, Probe sequence
cacatagatttgagggcatttatta

SEQ ID NO: 86344 - DNA, 25 bp, Probe sequence
gcaaaataaaaccctcaaattatgt

SEQ ID NO: 86345 - DNA, 25 bp, Probe sequence
gttcacatagatttgagggcattta

SEQ ID NO: 86346 - DNA, 25 bp, Probe sequence
gttagttcacatagatttgagggca

SEQ ID NO: 86347 - DNA, 25 bp, Probe sequence
gtcataatcatttcataaatagcaa

SEQ ID NO: 86348 - DNA, 25 bp, Probe sequence
tcacatagatttgagggcatttatt

SEQ ID NO: 86349 - DNA, 25 bp, Probe sequence
tagcaaaataaaaccctcaaattat

SEQ ID NO: 86350 - DNA, 25 bp, Probe sequence
tagttcacatagatttgagggcatt

SEQ ID NO: 86351 - DNA, 25 bp, Probe sequence
ttagttcacatagatttgagggcat

SEQ ID NO: 86352 - DNA, 25 bp, Probe sequence
ttcacatagatttgagggcatttat

SEQ ID NO: 86353 - DNA, 25 bp, Probe sequence
atctataccattaaattttcatatc

SEQ ID NO: 86354 - DNA, 25 bp, Probe sequence
atgctgttcatatcactaaatttct

SEQ ID NO: 86355 - DNA, 25 bp, Probe sequence
actttgccaacagtttctaatcgcg

SEQ ID NO: 86356 - DNA, 25 bp, Probe sequence
aaaacacgctactatttaattatct

SEQ ID NO: 86357 - DNA, 25 bp, Probe sequence
aactgctgacattactttgccaaca

SEQ ID NO: 86358 - DNA, 25 bp, Probe sequence
caatttttatgctaagttgaccatt

SEQ ID NO: 86359 - DNA, 25 bp, Probe sequence
gctaagttgaccatttttcttttca

SEQ ID NO: 86360 - DNA, 25 bp, Probe sequence
gctactatttaattatctataccat

SEQ ID NO: 86361 - DNA, 25 bp, Probe sequence
gaaaaactgctgacattactttgcc

SEQ ID NO: 86362 - DNA, 25 bp, Probe sequence
gaccatttttcttttcaaataatgc

SEQ ID NO: 86363 - DNA, 25 bp, Probe sequence
gatagcacctcagtgaattataatt

SEQ ID NO: 86364 - DNA, 25 bp, Probe sequence
gttcatatcactaaatttctgttaa

SEQ ID NO: 86365 - DNA, 25 bp, Probe sequence
gtttattttatcataatagtgcatg

SEQ ID NO: 86366 - DNA, 25 bp, Probe sequence
tgccaacagtttctaatcgcgttat

SEQ ID NO: 86367 - DNA, 25 bp, Probe sequence
tttcttttcaaataatgctgttcat

SEQ ID NO: 86368 - DNA, 25 bp, Probe sequence
attgcctcctacgtttgatttaact

SEQ ID NO: 86369 - DNA, 25 bp, Probe sequence
atagatggctcacttcgatttgcgt

SEQ ID NO: 86370 - DNA, 25 bp, Probe sequence
atggctcacttcgatttgcgtgatt

SEQ ID NO: 86371 - DNA, 25 bp, Probe sequence
cattgcctcctacgtttgatttaac

SEQ ID NO: 86372 - DNA, 25 bp, Probe sequence
cttcgatttgcgtgatttttagtcc

SEQ ID NO: 86373 - DNA, 25 bp, Probe sequence
gcgtgatttttagtccgaaatacaa

SEQ ID NO: 86374 - DNA, 25 bp, Probe sequence
gctcacttcgatttgcgtgattttt

SEQ ID NO: 86375 - DNA, 25 bp, Probe sequence
gatggctcacttcgatttgcgtgat

SEQ ID NO: 86376 - DNA, 25 bp, Probe sequence
gatttgcgtgatttttagtccgaaa

SEQ ID NO: 86377 - DNA, 25 bp, Probe sequence
gtatagatggctcacttcgatttgc

SEQ ID NO: 86378 - DNA, 25 bp, Probe sequence
gtccgaaatacaaaatatcataggt

SEQ ID NO: 86379 - DNA, 25 bp, Probe sequence
ggctcacttcgatttgcgtgatttt

SEQ ID NO: 86380 - DNA, 25 bp, Probe sequence
tgcctcctacgtttgatttaactaa

SEQ ID NO: 86381 - DNA, 25 bp, Probe sequence
tagatggctcacttcgatttgcgtg

SEQ ID NO: 86382 - DNA, 25 bp, Probe sequence
tttgcgtgatttttagtccgaaata

SEQ ID NO: 86383 - DNA, 25 bp, Probe sequence
attgctattatcttgcttaggtttt

SEQ ID NO: 86384 - DNA, 25 bp, Probe sequence
atggctcaaattgctattatcttgc

SEQ ID NO: 86385 - DNA, 25 bp, Probe sequence
acgtctatatcccagttataaactg

SEQ ID NO: 86386 - DNA, 25 bp, Probe sequence
aaattgctattatcttgcttaggtt

SEQ ID NO: 86387 - DNA, 25 bp, Probe sequence
aacgtctatatcccagttataaact

SEQ ID NO: 86388 - DNA, 25 bp, Probe sequence
cataaaaacgtctatatcccagtta

SEQ ID NO: 86389 - DNA, 25 bp, Probe sequence
gctcaaattgctattatcttgctta

SEQ ID NO: 86390 - DNA, 25 bp, Probe sequence
gctattatcttgcttaggtttttcg

SEQ ID NO: 86391 - DNA, 25 bp, Probe sequence
ggctcaaattgctattatcttgctt

SEQ ID NO: 86392 - DNA, 25 bp, Probe sequence
tcaaattgctattatcttgcttagg

SEQ ID NO: 86393 - DNA, 25 bp, Probe sequence
taaaaacgtctatatcccagttata

SEQ ID NO: 86394 - DNA, 25 bp, Probe sequence
tacataaaaacgtctatatcccagt

SEQ ID NO: 86395 - DNA, 25 bp, Probe sequence
tataaactggagtatagacgttttt

SEQ ID NO: 86396 - DNA, 25 bp, Probe sequence
tattatcttgcttaggtttttcgtt

SEQ ID NO: 86397 - DNA, 25 bp, Probe sequence
tttacgataataacaatggctcaaa

SEQ ID NO: 86398 - DNA, 25 bp, Probe sequence
atttacttacctccaattataattg

SEQ ID NO: 86399 - DNA, 25 bp, Probe sequence
accccctcaacttgatagtagaatg

SEQ ID NO: 86400 - DNA, 25 bp, Probe sequence
acagacaaagtgaaacgaggacaga

SEQ ID NO: 86401 - DNA, 25 bp, Probe sequence
aatattaccccctcaacttgatagt

SEQ ID NO: 86402 - DNA, 25 bp, Probe sequence
aacgccgatacaattataatatttt

SEQ ID NO: 86403 - DNA, 25 bp, Probe sequence
aatgtatttacttacctccaattat

SEQ ID NO: 86404 - DNA, 25 bp, Probe sequence
gaaaatgtatttacttacctccaat

SEQ ID NO: 86405 - DNA, 25 bp, Probe sequence
gtatttacttacctccaattataat

SEQ ID NO: 86406 - DNA, 25 bp, Probe sequence
gtaaacgccgatacaattataatat

SEQ ID NO: 86407 - DNA, 25 bp, Probe sequence
ggttcaatttgtaaacgccgataca

SEQ ID NO: 86408 - DNA, 25 bp, Probe sequence
tacctccaattataattgtaccggt

SEQ ID NO: 86409 - DNA, 25 bp, Probe sequence
tattaccccctcaacttgatagtag

SEQ ID NO: 86410 - DNA, 25 bp, Probe sequence
tataattgtaccggttcaatttgta

SEQ ID NO: 86411 - DNA, 25 bp, Probe sequence
ttttgtgctataataattacagaca

SEQ ID NO: 86412 - DNA, 25 bp, Probe sequence
ttaccccctcaacttgatagtagaa

SEQ ID NO: 86413 - DNA, 25 bp, Probe sequence
atattaatttatgtctcgggctcta

SEQ ID NO: 86414 - DNA, 25 bp, Probe sequence
ataacactgtaggtcctactatatt

SEQ ID NO: 86415 - DNA, 25 bp, Probe sequence
aatttatgtctcgggctctaaccct

SEQ ID NO: 86416 - DNA, 25 bp, Probe sequence
cattataacactgtaggtcctacta

SEQ ID NO: 86417 - DNA, 25 bp, Probe sequence
ctgtaggtcctactatattaattta

SEQ ID NO: 86418 - DNA, 25 bp, Probe sequence
ccgccattataacactgtaggtcct

SEQ ID NO: 86419 - DNA, 25 bp, Probe sequence
gccattataacactgtaggtcctac

SEQ ID NO: 86420 - DNA, 25 bp, Probe sequence
gcccgccattataacactgtaggtc

SEQ ID NO: 86421 - DNA, 25 bp, Probe sequence
gctctaaccctaaaatacttataat

SEQ ID NO: 86422 - DNA, 25 bp, Probe sequence
tgtctcgggctctaaccctaaaata

SEQ ID NO: 86423 - DNA, 25 bp, Probe sequence
ggtcctactatattaatttatgtct

SEQ ID NO: 86424 - DNA, 25 bp, Probe sequence
tctcgggctctaaccctaaaatact

SEQ ID NO: 86425 - DNA, 25 bp, Probe sequence
tatgtctcgggctctaaccctaaaa

SEQ ID NO: 86426 - DNA, 25 bp, Probe sequence
tttatgtctcgggctctaaccctaa

SEQ ID NO: 86427 - DNA, 25 bp, Probe sequence
ttaatttatgtctcgggctctaacc

SEQ ID NO: 86428 - DNA, 25 bp, Probe sequence
atcaatttgggttaaagactttcat

SEQ ID NO: 86429 - DNA, 25 bp, Probe sequence
atataatgccactaactgtactttg

SEQ ID NO: 86430 - DNA, 25 bp, Probe sequence
atctatgtttgactgctactttaat

SEQ ID NO: 86431 - DNA, 25 bp, Probe sequence
atgccactaactgtactttgtatct

SEQ ID NO: 86432 - DNA, 25 bp, Probe sequence
acactcaaacattaacactatactt

SEQ ID NO: 86433 - DNA, 25 bp, Probe sequence
acaatatcgttatcgttgattagta

SEQ ID NO: 86434 - DNA, 25 bp, Probe sequence
aagactttcataaacactcaaacat

SEQ ID NO: 86435 - DNA, 25 bp, Probe sequence
gctactttaatttctttgtgacact

SEQ ID NO: 86436 - DNA, 25 bp, Probe sequence
gattagtaagtcatcaatttgggtt

SEQ ID NO: 86437 - DNA, 25 bp, Probe sequence
gtactttgtatctatgtttgactgc

SEQ ID NO: 86438 - DNA, 25 bp, Probe sequence
taatcatctacttaacaatatcgtt

SEQ ID NO: 86439 - DNA, 25 bp, Probe sequence
tacttagttagtggcattatttttt

SEQ ID NO: 86440 - DNA, 25 bp, Probe sequence
ttaacatcacgggattggaacagaa

SEQ ID NO: 86441 - DNA, 25 bp, Probe sequence
ttgactgctactttaatttctttgt

SEQ ID NO: 86442 - DNA, 25 bp, Probe sequence
ttgtgacactaatcatctacttaac

SEQ ID NO: 86443 - DNA, 25 bp, Probe sequence
attcgtatatcatggctgtgctttt

SEQ ID NO: 86444 - DNA, 25 bp, Probe sequence
atatcatggctgtgcttttttatct

SEQ ID NO: 86445 - DNA, 25 bp, Probe sequence
ataacatgcaacattcgtatatcat

SEQ ID NO: 86446 - DNA, 25 bp, Probe sequence
atcatggctgtgcttttttatcttt

SEQ ID NO: 86447 - DNA, 25 bp, Probe sequence
atgaatcaaacacagctatgatatg

SEQ ID NO: 86448 - DNA, 25 bp, Probe sequence
aacacagctatgatatgaaggttta

SEQ ID NO: 86449 - DNA, 25 bp, Probe sequence
aacattcgtatatcatggctgtgct

SEQ ID NO: 86450 - DNA, 25 bp, Probe sequence
catggctgtgcttttttatctttat

SEQ ID NO: 86451 - DNA, 25 bp, Probe sequence
gcaacattcgtatatcatggctgtg

SEQ ID NO: 86452 - DNA, 25 bp, Probe sequence
gaaggtttagcatataacatgcaac

SEQ ID NO: 86453 - DNA, 25 bp, Probe sequence
gtatatcatggctgtgcttttttat

SEQ ID NO: 86454 - DNA, 25 bp, Probe sequence
ggctgtgcttttttatctttataaa

SEQ ID NO: 86455 - DNA, 25 bp, Probe sequence
tggctgtgcttttttatctttataa

SEQ ID NO: 86456 - DNA, 25 bp, Probe sequence
tcgtatatcatggctgtgctttttt

SEQ ID NO: 86457 - DNA, 25 bp, Probe sequence
ttatctttataaaacatcatctatt

SEQ ID NO: 86458 - DNA, 25 bp, Probe sequence
atatactcatcattgttaggccctt

SEQ ID NO: 86459 - DNA, 25 bp, Probe sequence
atcttccgaaatatactcatcattg

SEQ ID NO: 86460 - DNA, 25 bp, Probe sequence
taggcccttagcgttgctttaatgc

SEQ ID NO: 86461 - DNA, 25 bp, Probe sequence
aatgctgagggtttttaatcataat

SEQ ID NO: 86462 - DNA, 25 bp, Probe sequence
ctacgtatcttccgaaatatactca

SEQ ID NO: 86463 - DNA, 25 bp, Probe sequence
cccttagcgttgctttaatgctgag

SEQ ID NO: 86464 - DNA, 25 bp, Probe sequence
gcgttgctttaatgctgagggtttt

SEQ ID NO: 86465 - DNA, 25 bp, Probe sequence
gttgctttaatgctgagggttttta

SEQ ID NO: 86466 - DNA, 25 bp, Probe sequence
gttaggcccttagcgttgctttaat

SEQ ID NO: 86467 - DNA, 25 bp, Probe sequence
ggtttttaatcataattatttcact

SEQ ID NO: 86468 - DNA, 25 bp, Probe sequence
ggcccttagcgttgctttaatgctg

SEQ ID NO: 86469 - DNA, 25 bp, Probe sequence
ttgttaggcccttagcgttgcttta

SEQ ID NO: 86470 - DNA, 25 bp, Probe sequence
tcattgttaggcccttagcgttgct

SEQ ID NO: 86471 - DNA, 25 bp, Probe sequence
tcatcattgttaggcccttagcgtt

SEQ ID NO: 86472 - DNA, 25 bp, Probe sequence
tactcatcattgttaggcccttagc

SEQ ID NO: 86473 - DNA, 25 bp, Probe sequence
ataaaagtcattcacgtcttcatat

SEQ ID NO: 86474 - DNA, 25 bp, Probe sequence
ataactgtatgattaattacacaat

SEQ ID NO: 86475 - DNA, 25 bp, Probe sequence
aaagtcattcacgtcttcatatgtc

SEQ ID NO: 86476 - DNA, 25 bp, Probe sequence
aagtcattcacgtcttcatatgtca

SEQ ID NO: 86477 - DNA, 25 bp, Probe sequence
aataatcgggtatataactgtatga

SEQ ID NO: 86478 - DNA, 25 bp, Probe sequence
cacgtcttcatatgtcatcaaatgt

SEQ ID NO: 86479 - DNA, 25 bp, Probe sequence
catatgtcatcaaatgtttatcatg

SEQ ID NO: 86480 - DNA, 25 bp, Probe sequence
cattcacgtcttcatatgtcatcaa

SEQ ID NO: 86481 - DNA, 25 bp, Probe sequence
gacaataaaagtcattcacgtcttc

SEQ ID NO: 86482 - DNA, 25 bp, Probe sequence
gtcattcacgtcttcatatgtcatc

SEQ ID NO: 86483 - DNA, 25 bp, Probe sequence
gtcttcatatgtcatcaaatgttta

SEQ ID NO: 86484 - DNA, 25 bp, Probe sequence
tcgggtatataactgtatgattaat

SEQ ID NO: 86485 - DNA, 25 bp, Probe sequence
tcagacgtctgtttgtagacaataa

SEQ ID NO: 86486 - DNA, 25 bp, Probe sequence
tacttcagacgtctgtttgtagaca

SEQ ID NO: 86487 - DNA, 25 bp, Probe sequence
ttcacgtcttcatatgtcatcaaat

SEQ ID NO: 86488 - DNA, 25 bp, Probe sequence
agaacgtttttctctgttcttcgct

SEQ ID NO: 86489 - DNA, 25 bp, Probe sequence
agaagaattatgtttcgaaatatct

SEQ ID NO: 86490 - DNA, 25 bp, Probe sequence
agcgaagaacgtttttctctgttct

SEQ ID NO: 86491 - DNA, 25 bp, Probe sequence
cttcgcttactctaattatattcac

SEQ ID NO: 86492 - DNA, 25 bp, Probe sequence
ctgttcttcgcttactctaattata

SEQ ID NO: 86493 - DNA, 25 bp, Probe sequence
gcttactctaattatattcactatc

SEQ ID NO: 86494 - DNA, 25 bp, Probe sequence
gaaatatctttatcactttaaaatg

SEQ ID NO: 86495 - DNA, 25 bp, Probe sequence
gttcttcgcttactctaattatatt

SEQ ID NO: 86496 - DNA, 25 bp, Probe sequence
gtttcgaaatatctttatcacttta

SEQ ID NO: 86497 - DNA, 25 bp, Probe sequence
tgttcttcgcttactctaattatat

SEQ ID NO: 86498 - DNA, 25 bp, Probe sequence
tcgcttactctaattatattcacta

SEQ ID NO: 86499 - DNA, 25 bp, Probe sequence
taagcgaagaacgtttttctctgtt

SEQ ID NO: 86500 - DNA, 25 bp, Probe sequence
tatgtttcgaaatatctttatcact

SEQ ID NO: 86501 - DNA, 25 bp, Probe sequence
ttactctaattatattcactatcaa

SEQ ID NO: 86502 - DNA, 25 bp, Probe sequence
ttcttcgcttactctaattatattc

SEQ ID NO: 86503 - DNA, 25 bp, Probe sequence
attcattctcaataactgtggtatg

SEQ ID NO: 86504 - DNA, 25 bp, Probe sequence
agcaattaattgatattcattctca

SEQ ID NO: 86505 - DNA, 25 bp, Probe sequence
aaatcaatcatacaagcaattaatt

SEQ ID NO: 86506 - DNA, 25 bp, Probe sequence
aagctgtttcacttaaacatactat

SEQ ID NO: 86507 - DNA, 25 bp, Probe sequence
ctttcaaataaagctgtttcactta

SEQ ID NO: 86508 - DNA, 25 bp, Probe sequence
cgttcacttcatctcatgactttct

SEQ ID NO: 86509 - DNA, 25 bp, Probe sequence
gatcatctatacatccgttcacttc

SEQ ID NO: 86510 - DNA, 25 bp, Probe sequence
gtaccttcatttactttaatcactt

SEQ ID NO: 86511 - DNA, 25 bp, Probe sequence
gtgtgagtgaacgatcatctataca

SEQ ID NO: 86512 - DNA, 25 bp, Probe sequence
ggaaatcatgacttatgtgtgagtg

SEQ ID NO: 86513 - DNA, 25 bp, Probe sequence
tcctctgtaccttcatttactttaa

SEQ ID NO: 86514 - DNA, 25 bp, Probe sequence
tcatctatacatccgttcacttcat

SEQ ID NO: 86515 - DNA, 25 bp, Probe sequence
tcatctcatgactttctatatttaa

SEQ ID NO: 86516 - DNA, 25 bp, Probe sequence
ttaatttttacaaggagtgacatct

SEQ ID NO: 86517 - DNA, 25 bp, Probe sequence
ttcatttactttaatcactttcaaa

SEQ ID NO: 86518 - DNA, 25 bp, Probe sequence
attaaaatgacatctctcactgcat

SEQ ID NO: 86519 - DNA, 25 bp, Probe sequence
atttaattctcattttccaactatt

SEQ ID NO: 86520 - DNA, 25 bp, Probe sequence
atcaaccaaattccattctcaatcg

SEQ ID NO: 86521 - DNA, 25 bp, Probe sequence
atcatatcaaccaaattccattctc

SEQ ID NO: 86522 - DNA, 25 bp, Probe sequence
atctctcactgcattcgcttaagct

SEQ ID NO: 86523 - DNA, 25 bp, Probe sequence
agtaatcatccatcaaatcatatca

SEQ ID NO: 86524 - DNA, 25 bp, Probe sequence
aactaatcattcgtccatgttcgcg

SEQ ID NO: 86525 - DNA, 25 bp, Probe sequence
aattaaactgtactgcacatactaa

SEQ ID NO: 86526 - DNA, 25 bp, Probe sequence
cactgcattcgcttaagcttttata

SEQ ID NO: 86527 - DNA, 25 bp, Probe sequence
gcggttcaacgctaatgtatgatag

SEQ ID NO: 86528 - DNA, 25 bp, Probe sequence
gtataaaacatcctccattaaagtt

SEQ ID NO: 86529 - DNA, 25 bp, Probe sequence
tccatgttcgcggttcaacgctaat

SEQ ID NO: 86530 - DNA, 25 bp, Probe sequence
tcccgaaatgttttactaaactcat

SEQ ID NO: 86531 - DNA, 25 bp, Probe sequence
tccaactatttaatattcccgaaat

SEQ ID NO: 86532 - DNA, 25 bp, Probe sequence
tactaaactcattacattgtcatta

SEQ ID NO: 86533 - DNA, 25 bp, Probe sequence
atattgtaacttgggatttactgta

SEQ ID NO: 86534 - DNA, 25 bp, Probe sequence
atcccaagttgcgtatgatattgta

SEQ ID NO: 86535 - DNA, 25 bp, Probe sequence
acgaaaaaatcccaagttgcgtatg

SEQ ID NO: 86536 - DNA, 25 bp, Probe sequence
aaatcccaagttgcgtatgatattg

SEQ ID NO: 86537 - DNA, 25 bp, Probe sequence
aaaaaatcccaagttgcgtatgata

SEQ ID NO: 86538 - DNA, 25 bp, Probe sequence
aaaaatcccaagttgcgtatgatat

SEQ ID NO: 86539 - DNA, 25 bp, Probe sequence
aaaatcccaagttgcgtatgatatt

SEQ ID NO: 86540 - DNA, 25 bp, Probe sequence
aatcccaagttgcgtatgatattgt

SEQ ID NO: 86541 - DNA, 25 bp, Probe sequence
cccaagttgcgtatgatattgtaac

SEQ ID NO: 86542 - DNA, 25 bp, Probe sequence
gcgtatgatattgtaacttgggatt

SEQ ID NO: 86543 - DNA, 25 bp, Probe sequence
gaaaaaatcccaagttgcgtatgat

SEQ ID NO: 86544 - DNA, 25 bp, Probe sequence
gatattgtaacttgggatttactgt

SEQ ID NO: 86545 - DNA, 25 bp, Probe sequence
gttgcgtatgatattgtaacttggg

SEQ ID NO: 86546 - DNA, 25 bp, Probe sequence
gtatgatattgtaacttgggattta

SEQ ID NO: 86547 - DNA, 25 bp, Probe sequence
ttgcgtatgatattgtaacttggga

SEQ ID NO: 86548 - DNA, 25 bp, Probe sequence
atcttgcctttcaatcttatcattg

SEQ ID NO: 86549 - DNA, 25 bp, Probe sequence
atcttatcattggaggagtggttaa

SEQ ID NO: 86550 - DNA, 25 bp, Probe sequence
aggtcatcttgcctttcaatcttat

SEQ ID NO: 86551 - DNA, 25 bp, Probe sequence
aaaggtcatcttgcctttcaatctt

SEQ ID NO: 86552 - DNA, 25 bp, Probe sequence
aagattgaaaggtcatcttgccttt

SEQ ID NO: 86553 - DNA, 25 bp, Probe sequence
aaggtcatcttgcctttcaatctta

SEQ ID NO: 86554 - DNA, 25 bp, Probe sequence
aatcttatcattggaggagtggtta

SEQ ID NO: 86555 - DNA, 25 bp, Probe sequence
catcttgcctttcaatcttatcatt

SEQ ID NO: 86556 - DNA, 25 bp, Probe sequence
cttgcctttcaatcttatcattgga

SEQ ID NO: 86557 - DNA, 25 bp, Probe sequence
ctttcaatcttatcattggaggagt

SEQ ID NO: 86558 - DNA, 25 bp, Probe sequence
gcctttcaatcttatcattggagga

SEQ ID NO: 86559 - DNA, 25 bp, Probe sequence
gtcatcttgcctttcaatcttatca

SEQ ID NO: 86560 - DNA, 25 bp, Probe sequence
tcttgcctttcaatcttatcattgg

SEQ ID NO: 86561 - DNA, 25 bp, Probe sequence
tcatcttgcctttcaatcttatcat

SEQ ID NO: 86562 - DNA, 25 bp, Probe sequence
ttgcctttcaatcttatcattggag

SEQ ID NO: 86563 - DNA, 25 bp, Probe sequence
atcattatgtaatcaaactattttt

SEQ ID NO: 86564 - DNA, 25 bp, Probe sequence
atgatgtttaccttcaaaattgcaa

SEQ ID NO: 86565 - DNA, 25 bp, Probe sequence
aaagcgaccagttcgcagtttacaa

SEQ ID NO: 86566 - DNA, 25 bp, Probe sequence
aaaattgcaataacttgtcacctta

SEQ ID NO: 86567 - DNA, 25 bp, Probe sequence
gacatcaataaaaagcgaccagttc

SEQ ID NO: 86568 - DNA, 25 bp, Probe sequence
gaccagttcgcagtttacaattcgt

SEQ ID NO: 86569 - DNA, 25 bp, Probe sequence
gttaaccgacatttttcaagaatca

SEQ ID NO: 86570 - DNA, 25 bp, Probe sequence
gtattgttctgatatgattaactca

SEQ ID NO: 86571 - DNA, 25 bp, Probe sequence
gtaacactgcaaaattggtcgcttt

SEQ ID NO: 86572 - DNA, 25 bp, Probe sequence
gtcgctttattttgtatgttattcg

SEQ ID NO: 86573 - DNA, 25 bp, Probe sequence
tattttgtatgttattcgattatta

SEQ ID NO: 86574 - DNA, 25 bp, Probe sequence
ttttgtagtttattagattttcaat

SEQ ID NO: 86575 - DNA, 25 bp, Probe sequence
ttgtcaccttaaagttaaccgacat

SEQ ID NO: 86576 - DNA, 25 bp, Probe sequence
ttcgcagtttacaattcgtaacact

SEQ ID NO: 86577 - DNA, 25 bp, Probe sequence
ttggtcgctttattttgtatgttat

SEQ ID NO: 86578 - DNA, 25 bp, Probe sequence
aaagtgctccttactcaaataatat

SEQ ID NO: 86579 - DNA, 25 bp, Probe sequence
aaaaagtgctccttactcaaataat

SEQ ID NO: 86580 - DNA, 25 bp, Probe sequence
aaaagtgctccttactcaaataata

SEQ ID NO: 86581 - DNA, 25 bp, Probe sequence
aagtgctccttactcaaataatata

SEQ ID NO: 86582 - DNA, 25 bp, Probe sequence
gctccttactcaaataatatataaa

SEQ ID NO: 86583 - DNA, 25 bp, Probe sequence
gaaaaagtgctccttactcaaataa

SEQ ID NO: 86584 - DNA, 25 bp, Probe sequence
gtatatgtatatagttttttaagta

SEQ ID NO: 86585 - DNA, 25 bp, Probe sequence
gtgctccttactcaaataatatata

SEQ ID NO: 86586 - DNA, 25 bp, Probe sequence
tgaaaaagtgctccttactcaaata

SEQ ID NO: 86587 - DNA, 25 bp, Probe sequence
taaccattcatttttgtaatataaa

SEQ ID NO: 86588 - DNA, 25 bp, Probe sequence
tacccatatatttttaattaaccat

SEQ ID NO: 86589 - DNA, 25 bp, Probe sequence
tatatttttaattaaccattcattt

SEQ ID NO: 86590 - DNA, 25 bp, Probe sequence
tttttgaaaaagtgctccttactca

SEQ ID NO: 86591 - DNA, 25 bp, Probe sequence
ttaaccattcatttttgtaatataa

SEQ ID NO: 86592 - DNA, 25 bp, Probe sequence
ttaattaaccattcatttttgtaat

SEQ ID NO: 86593 - DNA, 25 bp, Probe sequence
attagaaaatgtgactttgccaatt

SEQ ID NO: 86594 - DNA, 25 bp, Probe sequence
ataagcaaagccacattagaaaatg

SEQ ID NO: 86595 - DNA, 25 bp, Probe sequence
atgataagcaaagccacattagaaa

SEQ ID NO: 86596 - DNA, 25 bp, Probe sequence
atgtgactttgccaatttcagaatg

SEQ ID NO: 86597 - DNA, 25 bp, Probe sequence
agaaaatgtgactttgccaatttca

SEQ ID NO: 86598 - DNA, 25 bp, Probe sequence
aaatgtgactttgccaatttcagaa

SEQ ID NO: 86599 - DNA, 25 bp, Probe sequence
aaaatgtgactttgccaatttcaga

SEQ ID NO: 86600 - DNA, 25 bp, Probe sequence
aatgtgactttgccaatttcagaat

SEQ ID NO: 86601 - DNA, 25 bp, Probe sequence
cattagaaaatgtgactttgccaat

SEQ ID NO: 86602 - DNA, 25 bp, Probe sequence
gcttatttcctttcagttgttttct

SEQ ID NO: 86603 - DNA, 25 bp, Probe sequence
gaaaatgtgactttgccaatttcag

SEQ ID NO: 86604 - DNA, 25 bp, Probe sequence
gataagcaaagccacattagaaaat

SEQ ID NO: 86605 - DNA, 25 bp, Probe sequence
tgtgactttgccaatttcagaatgc

SEQ ID NO: 86606 - DNA, 25 bp, Probe sequence
tagaaaatgtgactttgccaatttc

SEQ ID NO: 86607 - DNA, 25 bp, Probe sequence
ttcagttgttttcttaaaaaatgat

SEQ ID NO: 86608 - DNA, 25 bp, Probe sequence
atagcatattacgtatttaaagtta

SEQ ID NO: 86609 - DNA, 25 bp, Probe sequence
atctgtctcctatacattatctttt

SEQ ID NO: 86610 - DNA, 25 bp, Probe sequence
caactttacggtatctattgctttt

SEQ ID NO: 86611 - DNA, 25 bp, Probe sequence
caaagctttattgtttagtctcaca

SEQ ID NO: 86612 - DNA, 25 bp, Probe sequence
gctttattgtttagtctcacattaa

SEQ ID NO: 86613 - DNA, 25 bp, Probe sequence
gcatcaactttacggtatctattgc

SEQ ID NO: 86614 - DNA, 25 bp, Probe sequence
gacgagcatcaactttacggtatct

SEQ ID NO: 86615 - DNA, 25 bp, Probe sequence
gtctcctatacattatcttttaaat

SEQ ID NO: 86616 - DNA, 25 bp, Probe sequence
tctattgctttttacttaaccgcca

SEQ ID NO: 86617 - DNA, 25 bp, Probe sequence
tacattatcttttaaatagcatatt

SEQ ID NO: 86618 - DNA, 25 bp, Probe sequence
tacggtatctattgctttttactta

SEQ ID NO: 86619 - DNA, 25 bp, Probe sequence
taggtttttatctatacaaagcata

SEQ ID NO: 86620 - DNA, 25 bp, Probe sequence
tataagtacttaggtttttatctat

SEQ ID NO: 86621 - DNA, 25 bp, Probe sequence
ttatattattatttgacgagcatca

SEQ ID NO: 86622 - DNA, 25 bp, Probe sequence
ttgtttagtctcacattaagattgt

SEQ ID NO: 86623 - DNA, 25 bp, Probe sequence
attcgcacctcaatattccataact

SEQ ID NO: 86624 - DNA, 25 bp, Probe sequence
atccacttaaatccattcacatcat

SEQ ID NO: 86625 - DNA, 25 bp, Probe sequence
aatccattcacatcattgagtataa

SEQ ID NO: 86626 - DNA, 25 bp, Probe sequence
aatatggtgatatacgttgaagttg

SEQ ID NO: 86627 - DNA, 25 bp, Probe sequence
caatccacttaaatccattcacatc

SEQ ID NO: 86628 - DNA, 25 bp, Probe sequence
cacttaaatccattcacatcattga

SEQ ID NO: 86629 - DNA, 25 bp, Probe sequence
cttttactttaatatcaatccactt

SEQ ID NO: 86630 - DNA, 25 bp, Probe sequence
gcacctcaatattccataactttta

SEQ ID NO: 86631 - DNA, 25 bp, Probe sequence
gatatacgttgaagttgattttctt

SEQ ID NO: 86632 - DNA, 25 bp, Probe sequence
tgaagttgattttcttaatttaagt

SEQ ID NO: 86633 - DNA, 25 bp, Probe sequence
tcgcacctcaatattccataacttt

SEQ ID NO: 86634 - DNA, 25 bp, Probe sequence
tcaatattccataacttttacttta

SEQ ID NO: 86635 - DNA, 25 bp, Probe sequence
tacttcacagtatttacaaaatcat

SEQ ID NO: 86636 - DNA, 25 bp, Probe sequence
tatcaatccacttaaatccattcac

SEQ ID NO: 86637 - DNA, 25 bp, Probe sequence
ttaagtatacttcacagtatttaca

SEQ ID NO: 86638 - DNA, 25 bp, Probe sequence
attaactcctactcattattttgtc

SEQ ID NO: 86639 - DNA, 25 bp, Probe sequence
atatactttttcatcatttcataaa

SEQ ID NO: 86640 - DNA, 25 bp, Probe sequence
atagtatatactttttcatcatttc

SEQ ID NO: 86641 - DNA, 25 bp, Probe sequence
agtatatactttttcatcatttcat

SEQ ID NO: 86642 - DNA, 25 bp, Probe sequence
actcctactcattattttgtctttc

SEQ ID NO: 86643 - DNA, 25 bp, Probe sequence
aataaaatttacccacacctatatg

SEQ ID NO: 86644 - DNA, 25 bp, Probe sequence
aatttacccacacctatatgtaata

SEQ ID NO: 86645 - DNA, 25 bp, Probe sequence
cattattttgtctttcaatttattt

SEQ ID NO: 86646 - DNA, 25 bp, Probe sequence
ctcattaactcctactcattatttt

SEQ ID NO: 86647 - DNA, 25 bp, Probe sequence
tcctactcattattttgtctttcaa

SEQ ID NO: 86648 - DNA, 25 bp, Probe sequence
taactcctactcattattttgtctt

SEQ ID NO: 86649 - DNA, 25 bp, Probe sequence
taaaatttacccacacctatatgta

SEQ ID NO: 86650 - DNA, 25 bp, Probe sequence
tactttttcatcatttcataaataa

SEQ ID NO: 86651 - DNA, 25 bp, Probe sequence
tactcattattttgtctttcaattt

SEQ ID NO: 86652 - DNA, 25 bp, Probe sequence
ttacccacacctatatgtaatacaa

SEQ ID NO: 86653 - DNA, 25 bp, Probe sequence
attaaacaacacccaaatgtcgctt

SEQ ID NO: 86654 - DNA, 25 bp, Probe sequence
atttattctctacacttatttccgt

SEQ ID NO: 86655 - DNA, 25 bp, Probe sequence
atgtgttcgaaatatctcttgatta

SEQ ID NO: 86656 - DNA, 25 bp, Probe sequence
acacccaaatgtcgcttaatgcttc

SEQ ID NO: 86657 - DNA, 25 bp, Probe sequence
acaacacccaaatgtcgcttaatgc

SEQ ID NO: 86658 - DNA, 25 bp, Probe sequence
aaatgtcgcttaatgcttcttcaaa

SEQ ID NO: 86659 - DNA, 25 bp, Probe sequence
aaactattaatttattctctacact

SEQ ID NO: 86660 - DNA, 25 bp, Probe sequence
cgcccctatgtgttcgaaatatctc

SEQ ID NO: 86661 - DNA, 25 bp, Probe sequence
cccaaatgtcgcttaatgcttcttc

SEQ ID NO: 86662 - DNA, 25 bp, Probe sequence
gaaatatctcttgattaaactatta

SEQ ID NO: 86663 - DNA, 25 bp, Probe sequence
gttatcgcccctatgtgttcgaaat

SEQ ID NO: 86664 - DNA, 25 bp, Probe sequence
gtcgcttaatgcttcttcaaattcg

SEQ ID NO: 86665 - DNA, 25 bp, Probe sequence
taatgcttcttcaaattcgttttac

SEQ ID NO: 86666 - DNA, 25 bp, Probe sequence
tattctctacacttatttccgttaa

SEQ ID NO: 86667 - DNA, 25 bp, Probe sequence
ttctctacacttatttccgttaaat

SEQ ID NO: 86668 - DNA, 25 bp, Probe sequence
atatgctttatcattgtgatgtttg

SEQ ID NO: 86669 - DNA, 25 bp, Probe sequence
atctttacattgctatgtatctcta

SEQ ID NO: 86670 - DNA, 25 bp, Probe sequence
acatctatttcagtgttaatttaca

SEQ ID NO: 86671 - DNA, 25 bp, Probe sequence
aactatttgatatctttacattgct

SEQ ID NO: 86672 - DNA, 25 bp, Probe sequence
aagtcttcttaatataaacatctat

SEQ ID NO: 86673 - DNA, 25 bp, Probe sequence
aataaccttttcaattaatggcaat

SEQ ID NO: 86674 - DNA, 25 bp, Probe sequence
aatacactacaataaccttttcaat

SEQ ID NO: 86675 - DNA, 25 bp, Probe sequence
catttttctccttagatggctgtca

SEQ ID NO: 86676 - DNA, 25 bp, Probe sequence
gcctcccacacatttatttcataac

SEQ ID NO: 86677 - DNA, 25 bp, Probe sequence
gttaatttacaactatctactgaaa

SEQ ID NO: 86678 - DNA, 25 bp, Probe sequence
gtatctctaaaaattgcctcccaca

SEQ ID NO: 86679 - DNA, 25 bp, Probe sequence
gtcgatgtgcatcaactttataaaa

SEQ ID NO: 86680 - DNA, 25 bp, Probe sequence
tagatggctgtcattttccacacac

SEQ ID NO: 86681 - DNA, 25 bp, Probe sequence
tatacttttctcatatttttttgat

SEQ ID NO: 86682 - DNA, 25 bp, Probe sequence
ttttccacacactacaatactgata

SEQ ID NO: 86683 - DNA, 25 bp, Probe sequence
attattgtcgctaaagctcatttac

SEQ ID NO: 86684 - DNA, 25 bp, Probe sequence
agctcatttactttttgaaactggt

SEQ ID NO: 86685 - DNA, 25 bp, Probe sequence
acgtttgtgttcttatatataaatg

SEQ ID NO: 86686 - DNA, 25 bp, Probe sequence
acttacgtttgtgttcttatatata

SEQ ID NO: 86687 - DNA, 25 bp, Probe sequence
aaattattgtcgctaaagctcattt

SEQ ID NO: 86688 - DNA, 25 bp, Probe sequence
aaaaattattgtcgctaaagctcat

SEQ ID NO: 86689 - DNA, 25 bp, Probe sequence
caaacttacgtttgtgttcttatat

SEQ ID NO: 86690 - DNA, 25 bp, Probe sequence
gctcatttactttttgaaactggtt

SEQ ID NO: 86691 - DNA, 25 bp, Probe sequence
gctaaagctcatttactttttgaaa

SEQ ID NO: 86692 - DNA, 25 bp, Probe sequence
gtcgctaaagctcatttactttttg

SEQ ID NO: 86693 - DNA, 25 bp, Probe sequence
tgacttactcctttattattattta

SEQ ID NO: 86694 - DNA, 25 bp, Probe sequence
tcgctaaagctcatttactttttga

SEQ ID NO: 86695 - DNA, 25 bp, Probe sequence
tattgtcgctaaagctcatttactt

SEQ ID NO: 86696 - DNA, 25 bp, Probe sequence
ttacgtttgtgttcttatatataaa

SEQ ID NO: 86697 - DNA, 25 bp, Probe sequence
ttgtcgctaaagctcatttactttt

SEQ ID NO: 86698 - DNA, 25 bp, Probe sequence
aaatctacttctaagagagcacttt

SEQ ID NO: 86699 - DNA, 25 bp, Probe sequence
caatgcgttagtcgatgccttaaat

SEQ ID NO: 86700 - DNA, 25 bp, Probe sequence
gcgttagtcgatgccttaaatattt

SEQ ID NO: 86701 - DNA, 25 bp, Probe sequence
gctctcttaaaagcagttattgact

SEQ ID NO: 86702 - DNA, 25 bp, Probe sequence
gaagtgcattgtctaacgtattttt

SEQ ID NO: 86703 - DNA, 25 bp, Probe sequence
gaacaatgcgttagtcgatgcctta

SEQ ID NO: 86704 - DNA, 25 bp, Probe sequence
gagagcactttatttaattacttaa

SEQ ID NO: 86705 - DNA, 25 bp, Probe sequence
gatgccttaaatatttagaagtgca

SEQ ID NO: 86706 - DNA, 25 bp, Probe sequence
gttattgactgaaaatctacttcta

SEQ ID NO: 86707 - DNA, 25 bp, Probe sequence
gtcaatggtttttgtccgatgctat

SEQ ID NO: 86708 - DNA, 25 bp, Probe sequence
gtgcattgtctaacgtatttttttt

SEQ ID NO: 86709 - DNA, 25 bp, Probe sequence
tggtttttgtccgatgctatgagca

SEQ ID NO: 86710 - DNA, 25 bp, Probe sequence
tgtccgatgctatgagcattatcaa

SEQ ID NO: 86711 - DNA, 25 bp, Probe sequence
taagttcgtcaatggtttttgtccg

SEQ ID NO: 86712 - DNA, 25 bp, Probe sequence
tatcaaatacaaaatgctctcttaa

SEQ ID NO: 86713 - DNA, 25 bp, Probe sequence
atagtatactctgattaacaaatga

SEQ ID NO: 86714 - DNA, 25 bp, Probe sequence
actgtctgtctattgattattttaa

SEQ ID NO: 86715 - DNA, 25 bp, Probe sequence
aaatcctatcagttattcaaaaata

SEQ ID NO: 86716 - DNA, 25 bp, Probe sequence
aattcatggattttcagcgatactg

SEQ ID NO: 86717 - DNA, 25 bp, Probe sequence
ctcgttactaggcttttttatatga

SEQ ID NO: 86718 - DNA, 25 bp, Probe sequence
gcgatactgtctgtctattgattat

SEQ ID NO: 86719 - DNA, 25 bp, Probe sequence
gctcactgcctagtaatgattgccc

SEQ ID NO: 86720 - DNA, 25 bp, Probe sequence
gacgattcatagtatactctgatta

SEQ ID NO: 86721 - DNA, 25 bp, Probe sequence
ggattttcagcgatactgtctgtct

SEQ ID NO: 86722 - DNA, 25 bp, Probe sequence
tcactgcctagtaatgattgccccc

SEQ ID NO: 86723 - DNA, 25 bp, Probe sequence
tcagcgatactgtctgtctattgat

SEQ ID NO: 86724 - DNA, 25 bp, Probe sequence
taaatgctcactgcctagtaatgat

SEQ ID NO: 86725 - DNA, 25 bp, Probe sequence
taggcttttttatatgaaattcatg

SEQ ID NO: 86726 - DNA, 25 bp, Probe sequence
tttaccaaaaaatcctatcagttat

SEQ ID NO: 86727 - DNA, 25 bp, Probe sequence
tattcacaaataagacgattcatag

SEQ ID NO: 86728 - DNA, 25 bp, Probe sequence
ataaatagcagtcctcactcataca

SEQ ID NO: 86729 - DNA, 25 bp, Probe sequence
atgggagacctatcacatgagagag

SEQ ID NO: 86730 - DNA, 25 bp, Probe sequence
actcatccatagtttaccttttata

SEQ ID NO: 86731 - DNA, 25 bp, Probe sequence
acaacgctccaacgtatttccaact

SEQ ID NO: 86732 - DNA, 25 bp, Probe sequence
catttgagtgactaggccttcctat

SEQ ID NO: 86733 - DNA, 25 bp, Probe sequence
cttactttcacctattttaattcat

SEQ ID NO: 86734 - DNA, 25 bp, Probe sequence
gccttcctatcagacatattcactc

SEQ ID NO: 86735 - DNA, 25 bp, Probe sequence
gaacaaccataaactcatccatagt

SEQ ID NO: 86736 - DNA, 25 bp, Probe sequence
gacgttattattgcaatctttttta

SEQ ID NO: 86737 - DNA, 25 bp, Probe sequence
gtatttccaacttactttcacctat

SEQ ID NO: 86738 - DNA, 25 bp, Probe sequence
gtcctcactcatacaatttctcata

SEQ ID NO: 86739 - DNA, 25 bp, Probe sequence
gtgctatctcttatttacctattgg

SEQ ID NO: 86740 - DNA, 25 bp, Probe sequence
tgtgtacagtgtgctatctcttatt

SEQ ID NO: 86741 - DNA, 25 bp, Probe sequence
tattcactcatccacgtatcattat

SEQ ID NO: 86742 - DNA, 25 bp, Probe sequence
ttctcataaaaatcacaacgctcca

SEQ ID NO: 86743 - DNA, 25 bp, Probe sequence
accggcacatgatgtaccggcttaa

SEQ ID NO: 86744 - DNA, 25 bp, Probe sequence
aataccggcacatgatgtaccggct

SEQ ID NO: 86745 - DNA, 25 bp, Probe sequence
aatattgaatacttagaggccattt

SEQ ID NO: 86746 - DNA, 25 bp, Probe sequence
cacggaatatttctaattttcgata

SEQ ID NO: 86747 - DNA, 25 bp, Probe sequence
cacatgatgtaccggcttaataaaa

SEQ ID NO: 86748 - DNA, 25 bp, Probe sequence
cataaacataaaaataccggcacat

SEQ ID NO: 86749 - DNA, 25 bp, Probe sequence
gcacatgatgtaccggcttaataaa

SEQ ID NO: 86750 - DNA, 25 bp, Probe sequence
gaatacttagaggccattttactac

SEQ ID NO: 86751 - DNA, 25 bp, Probe sequence
gaggccattttactacaaaaaatat

SEQ ID NO: 86752 - DNA, 25 bp, Probe sequence
ggaatatttctaattttcgataata

SEQ ID NO: 86753 - DNA, 25 bp, Probe sequence
ggcacatgatgtaccggcttaataa

SEQ ID NO: 86754 - DNA, 25 bp, Probe sequence
taaaaataccggcacatgatgtacc

SEQ ID NO: 86755 - DNA, 25 bp, Probe sequence
taccggcacatgatgtaccggctta

SEQ ID NO: 86756 - DNA, 25 bp, Probe sequence
tacttagaggccattttactacaaa

SEQ ID NO: 86757 - DNA, 25 bp, Probe sequence
tttcacggaatatttctaattttcg

SEQ ID NO: 86758 - DNA, 25 bp, Probe sequence
atttttatgtcttatatttttctat

SEQ ID NO: 86759 - DNA, 25 bp, Probe sequence
atttgtttttactattcaatatgat

SEQ ID NO: 86760 - DNA, 25 bp, Probe sequence
atcacgttactatgttttatttgtt

SEQ ID NO: 86761 - DNA, 25 bp, Probe sequence
acatccctcctcatattgacttaaa

SEQ ID NO: 86762 - DNA, 25 bp, Probe sequence
aaagtaagttcattccatcgtgtaa

SEQ ID NO: 86763 - DNA, 25 bp, Probe sequence
aacgtgactcattatcgattttttc

SEQ ID NO: 86764 - DNA, 25 bp, Probe sequence
aatatcgtagcatgctgttatttct

SEQ ID NO: 86765 - DNA, 25 bp, Probe sequence
cattccatcgtgtaaaaggtacttg

SEQ ID NO: 86766 - DNA, 25 bp, Probe sequence
cgattttttcatcgactgaatcacg

SEQ ID NO: 86767 - DNA, 25 bp, Probe sequence
cgcttacatttgccgttatatcaat

SEQ ID NO: 86768 - DNA, 25 bp, Probe sequence
gctgttatttctgttgtaaacgctt

SEQ ID NO: 86769 - DNA, 25 bp, Probe sequence
gactgaatcacgttactatgtttta

SEQ ID NO: 86770 - DNA, 25 bp, Probe sequence
gtagcatgctgttatttctgttgta

SEQ ID NO: 86771 - DNA, 25 bp, Probe sequence
gtaaacgcttacatttgccgttata

SEQ ID NO: 86772 - DNA, 25 bp, Probe sequence
tatacagtatgatatttgtcgacaa

SEQ ID NO: 86773 - DNA, 25 bp, Probe sequence
atcccatcaccaagttatgatgcgc

SEQ ID NO: 86774 - DNA, 25 bp, Probe sequence
atgcgctgttgcgccaacttggtga

SEQ ID NO: 86775 - DNA, 25 bp, Probe sequence
accaagttatgatgcgctgttgcgc

SEQ ID NO: 86776 - DNA, 25 bp, Probe sequence
cttggtgatggggtttagctttgcc

SEQ ID NO: 86777 - DNA, 25 bp, Probe sequence
gccaacttggtgatggggtttagct

SEQ ID NO: 86778 - DNA, 25 bp, Probe sequence
gctgttgcgccaacttggtgatggg

SEQ ID NO: 86779 - DNA, 25 bp, Probe sequence
gataaaatcccatcaccaagttatg

SEQ ID NO: 86780 - DNA, 25 bp, Probe sequence
gttatgatgcgctgttgcgccaact

SEQ ID NO: 86781 - DNA, 25 bp, Probe sequence
gttatgataaaatcccatcaccaag

SEQ ID NO: 86782 - DNA, 25 bp, Probe sequence
ggggtttagctttgccatgaattta

SEQ ID NO: 86783 - DNA, 25 bp, Probe sequence
ggtgatggggtttagctttgccatg

SEQ ID NO: 86784 - DNA, 25 bp, Probe sequence
tgatgcgctgttgcgccaacttggt

SEQ ID NO: 86785 - DNA, 25 bp, Probe sequence
tgcgccaacttggtgatggggttta

SEQ ID NO: 86786 - DNA, 25 bp, Probe sequence
tgaatttaatttagatacttcgatt

SEQ ID NO: 86787 - DNA, 25 bp, Probe sequence
tagctttgccatgaatttaatttag

SEQ ID NO: 86788 - DNA, 25 bp, Probe sequence
attgttacattttatgatagcgttt

SEQ ID NO: 86789 - DNA, 25 bp, Probe sequence
attttatgatagcgtttacaattat

SEQ ID NO: 86790 - DNA, 25 bp, Probe sequence
atatgactacaattttcaaaaagat

SEQ ID NO: 86791 - DNA, 25 bp, Probe sequence
atagcgtttacaattatagctgtaa

SEQ ID NO: 86792 - DNA, 25 bp, Probe sequence
atcaaatgatttttggagggacttc

SEQ ID NO: 86793 - DNA, 25 bp, Probe sequence
acataaatatgactacaattttcaa

SEQ ID NO: 86794 - DNA, 25 bp, Probe sequence
acattttatgatagcgtttacaatt

SEQ ID NO: 86795 - DNA, 25 bp, Probe sequence
aaatgatttttggagggacttcata

SEQ ID NO: 86796 - DNA, 25 bp, Probe sequence
gctgtaaactatattatcaaatgat

SEQ ID NO: 86797 - DNA, 25 bp, Probe sequence
gatagcgtttacaattatagctgta

SEQ ID NO: 86798 - DNA, 25 bp, Probe sequence
gatattgttacattttatgatagcg

SEQ ID NO: 86799 - DNA, 25 bp, Probe sequence
gttacattttatgatagcgtttaca

SEQ ID NO: 86800 - DNA, 25 bp, Probe sequence
tacattttatgatagcgtttacaat

SEQ ID NO: 86801 - DNA, 25 bp, Probe sequence
tagctgtaaactatattatcaaatg

SEQ ID NO: 86802 - DNA, 25 bp, Probe sequence
ttatgatagcgtttacaattatagc

SEQ ID NO: 86803 - DNA, 25 bp, Probe sequence
atacttttttacatttttgagatct

SEQ ID NO: 86804 - DNA, 25 bp, Probe sequence
aaccgtcttcaatttaatatgcccg

SEQ ID NO: 86805 - DNA, 25 bp, Probe sequence
aatccacctgcaactgtagacaatc

SEQ ID NO: 86806 - DNA, 25 bp, Probe sequence
aatatgcccgtggcacactgttggt

SEQ ID NO: 86807 - DNA, 25 bp, Probe sequence
ctctcatctctcgtaacggtttcaa

SEQ ID NO: 86808 - DNA, 25 bp, Probe sequence
cgtgattgtcctaacgagttgctag

SEQ ID NO: 86809 - DNA, 25 bp, Probe sequence
cccgtggcacactgttggttgatat

SEQ ID NO: 86810 - DNA, 25 bp, Probe sequence
gcaactgtagacaatcatcgtgatt

SEQ ID NO: 86811 - DNA, 25 bp, Probe sequence
gagatctatacgttcaaccgtcttc

SEQ ID NO: 86812 - DNA, 25 bp, Probe sequence
gttgctaggtgcttttttaatttca

SEQ ID NO: 86813 - DNA, 25 bp, Probe sequence
gtagtatattcaaatccacctgcaa

SEQ ID NO: 86814 - DNA, 25 bp, Probe sequence
ggtcctagatagagtgtgatgtgtg

SEQ ID NO: 86815 - DNA, 25 bp, Probe sequence
ggttgatatagtttagattggtcct

SEQ ID NO: 86816 - DNA, 25 bp, Probe sequence
tggaactaacaacagctctcatctc

SEQ ID NO: 86817 - DNA, 25 bp, Probe sequence
ttagaatgactccttctttcaacta

SEQ ID NO: 86818 - DNA, 25 bp, Probe sequence
attcctcactccataagtcgttttt

SEQ ID NO: 86819 - DNA, 25 bp, Probe sequence
atcaatgctttttactatcttgaaa

SEQ ID NO: 86820 - DNA, 25 bp, Probe sequence
atcattaagatgaaggggtgacaca

SEQ ID NO: 86821 - DNA, 25 bp, Probe sequence
aatgctttttactatcttgaaaata

SEQ ID NO: 86822 - DNA, 25 bp, Probe sequence
cactccataagtcgttttttcacgt

SEQ ID NO: 86823 - DNA, 25 bp, Probe sequence
ctcactccataagtcgttttttcac

SEQ ID NO: 86824 - DNA, 25 bp, Probe sequence
cctcactccataagtcgttttttca

SEQ ID NO: 86825 - DNA, 25 bp, Probe sequence
gctttttactatcttgaaaatattt

SEQ ID NO: 86826 - DNA, 25 bp, Probe sequence
tcctcactccataagtcgttttttc

SEQ ID NO: 86827 - DNA, 25 bp, Probe sequence
tcactccataagtcgttttttcacg

SEQ ID NO: 86828 - DNA, 25 bp, Probe sequence
tattcctcactccataagtcgtttt

SEQ ID NO: 86829 - DNA, 25 bp, Probe sequence
tttttcacgtaaagtcatttacaat

SEQ ID NO: 86830 - DNA, 25 bp, Probe sequence
ttttatcaatgctttttactatctt

SEQ ID NO: 86831 - DNA, 25 bp, Probe sequence
ttatcaatgctttttactatcttga

SEQ ID NO: 86832 - DNA, 25 bp, Probe sequence
ttcctcactccataagtcgtttttt

SEQ ID NO: 86833 - DNA, 25 bp, Probe sequence
attacattcattcagccacctaaga

SEQ ID NO: 86834 - DNA, 25 bp, Probe sequence
aaaacgagatgaacccattacattc

SEQ ID NO: 86835 - DNA, 25 bp, Probe sequence
aatgatggtcatctcgtttttttat

SEQ ID NO: 86836 - DNA, 25 bp, Probe sequence
catctcgtttttttatcgttatcat

SEQ ID NO: 86837 - DNA, 25 bp, Probe sequence
cattcattcagccacctaagataat

SEQ ID NO: 86838 - DNA, 25 bp, Probe sequence
gccacctaagataattaggtacctt

SEQ ID NO: 86839 - DNA, 25 bp, Probe sequence
gaacccattacattcattcagccac

SEQ ID NO: 86840 - DNA, 25 bp, Probe sequence
gatggtcatctcgtttttttatcgt

SEQ ID NO: 86841 - DNA, 25 bp, Probe sequence
gtcatctcgtttttttatcgttatc

SEQ ID NO: 86842 - DNA, 25 bp, Probe sequence
tggtcatctcgtttttttatcgtta

SEQ ID NO: 86843 - DNA, 25 bp, Probe sequence
taaaatcactatcgtaaacaaacaa

SEQ ID NO: 86844 - DNA, 25 bp, Probe sequence
acaaacaaaacgagatgaacccatt

SEQ ID NO: 86845 - DNA, 25 bp, Probe sequence
tacattcattcagccacctaagata

SEQ ID NO: 86846 - DNA, 25 bp, Probe sequence
taggtacctttaattaatgatggtc

SEQ ID NO: 86847 - DNA, 25 bp, Probe sequence
ttcattcagccacctaagataatta

SEQ ID NO: 86848 - DNA, 25 bp, Probe sequence
atatgtgcatttccaaataatttat

SEQ ID NO: 86849 - DNA, 25 bp, Probe sequence
acaactgcaccttcaatataacatg

SEQ ID NO: 86850 - DNA, 25 bp, Probe sequence
aaatcgatactaatcatttacaaat

SEQ ID NO: 86851 - DNA, 25 bp, Probe sequence
aaaacaactgcaccttcaatataac

SEQ ID NO: 86852 - DNA, 25 bp, Probe sequence
aacatgacatatattattttttgat

SEQ ID NO: 86853 - DNA, 25 bp, Probe sequence
catttacaaatatgtgcatttccaa

SEQ ID NO: 86854 - DNA, 25 bp, Probe sequence
ctgcaccttcaatataacatgacat

SEQ ID NO: 86855 - DNA, 25 bp, Probe sequence
gaatcaacacaacaacatttaagat

SEQ ID NO: 86856 - DNA, 25 bp, Probe sequence
gagaatgaaaaacaactgcaccttc

SEQ ID NO: 86857 - DNA, 25 bp, Probe sequence
gtggcgttgaatcaacacaacaaca

SEQ ID NO: 86858 - DNA, 25 bp, Probe sequence
taatcacctcaaaagtatttttttg

SEQ ID NO: 86859 - DNA, 25 bp, Probe sequence
taaacacttttagttgtggcgttga

SEQ ID NO: 86860 - DNA, 25 bp, Probe sequence
tttgaccccctcttgagaatgaaaa

SEQ ID NO: 86861 - DNA, 25 bp, Probe sequence
ttttttgaccccctcttgagaatga

SEQ ID NO: 86862 - DNA, 25 bp, Probe sequence
ttatagtaagttttcagatttttct

SEQ ID NO: 86863 - DNA, 25 bp, Probe sequence
aaacagatacgcctgtccctttagt

SEQ ID NO: 86864 - DNA, 25 bp, Probe sequence
aacagcacgatttacatagcctatt

SEQ ID NO: 86865 - DNA, 25 bp, Probe sequence
cctgtccctttagttttcgctaatg

SEQ ID NO: 86866 - DNA, 25 bp, Probe sequence
gcgctttatttcactttactatttt

SEQ ID NO: 86867 - DNA, 25 bp, Probe sequence
gaaattcaacactgtgatgctactt

SEQ ID NO: 86868 - DNA, 25 bp, Probe sequence
gagacaggcgctttatttcacttta

SEQ ID NO: 86869 - DNA, 25 bp, Probe sequence
gatgtgccatgataacagcacgatt

SEQ ID NO: 86870 - DNA, 25 bp, Probe sequence
gatgctacttatatctgatgtgcca

SEQ ID NO: 86871 - DNA, 25 bp, Probe sequence
gataaacagttattcgatcaaccat

SEQ ID NO: 86872 - DNA, 25 bp, Probe sequence
taaaaaactcaatttatcatcatga

SEQ ID NO: 86873 - DNA, 25 bp, Probe sequence
tacatagcctattaaattcagaaga

SEQ ID NO: 86874 - DNA, 25 bp, Probe sequence
tattcatacaatttattaagctcat

SEQ ID NO: 86875 - DNA, 25 bp, Probe sequence
tttcgctaatgagacaggcgcttta

SEQ ID NO: 86876 - DNA, 25 bp, Probe sequence
ttaagctcataaacagatacgcctg

SEQ ID NO: 86877 - DNA, 25 bp, Probe sequence
ttcgatcaaccatattattcataca

SEQ ID NO: 86878 - DNA, 25 bp, Probe sequence
agtgttataatgacatcaatatcaa

SEQ ID NO: 86879 - DNA, 25 bp, Probe sequence
agacagtgttataatgacatcaata

SEQ ID NO: 86880 - DNA, 25 bp, Probe sequence
acagtgttataatgacatcaatatc

SEQ ID NO: 86881 - DNA, 25 bp, Probe sequence
aagacagtgttataatgacatcaat

SEQ ID NO: 86882 - DNA, 25 bp, Probe sequence
cagtgttataatgacatcaatatca

SEQ ID NO: 86883 - DNA, 25 bp, Probe sequence
catggaaatttaagacagtgttata

SEQ ID NO: 86884 - DNA, 25 bp, Probe sequence
gacagtgttataatgacatcaatat

SEQ ID NO: 86885 - DNA, 25 bp, Probe sequence
gactatttttcatggaaatttaaga

SEQ ID NO: 86886 - DNA, 25 bp, Probe sequence
gttataatgacatcaatatcaaaaa

SEQ ID NO: 86887 - DNA, 25 bp, Probe sequence
gtgttataatgacatcaatatcaaa

SEQ ID NO: 86888 - DNA, 25 bp, Probe sequence
tcaaaaataaggagcctattaaatc

SEQ ID NO: 86889 - DNA, 25 bp, Probe sequence
tcaatatcaaaaataaggagcctat

SEQ ID NO: 86890 - DNA, 25 bp, Probe sequence
taagacagtgttataatgacatcaa

SEQ ID NO: 86891 - DNA, 25 bp, Probe sequence
ttttcatggaaatttaagacagtgt

SEQ ID NO: 86892 - DNA, 25 bp, Probe sequence
ttcatggaaatttaagacagtgtta

SEQ ID NO: 86893 - DNA, 25 bp, Probe sequence
attcattctttccatggtactttga

SEQ ID NO: 86894 - DNA, 25 bp, Probe sequence
attctatcaagactgttcatcattg

SEQ ID NO: 86895 - DNA, 25 bp, Probe sequence
accaattctattctatcaagactgt

SEQ ID NO: 86896 - DNA, 25 bp, Probe sequence
aattctattctatcaagactgttca

SEQ ID NO: 86897 - DNA, 25 bp, Probe sequence
caagactgttcatcattgattattc

SEQ ID NO: 86898 - DNA, 25 bp, Probe sequence
gactgttcatcattgattattcatt

SEQ ID NO: 86899 - DNA, 25 bp, Probe sequence
gattattcattctttccatggtact

SEQ ID NO: 86900 - DNA, 25 bp, Probe sequence
gtaccaattctattctatcaagact

SEQ ID NO: 86901 - DNA, 25 bp, Probe sequence
tgtaccaattctattctatcaagac

SEQ ID NO: 86902 - DNA, 25 bp, Probe sequence
tgttcatcattgattattcattctt

SEQ ID NO: 86903 - DNA, 25 bp, Probe sequence
tctattctatcaagactgttcatca

SEQ ID NO: 86904 - DNA, 25 bp, Probe sequence
tcattctttccatggtactttgaaa

SEQ ID NO: 86905 - DNA, 25 bp, Probe sequence
ttattcattctttccatggtacttt

SEQ ID NO: 86906 - DNA, 25 bp, Probe sequence
ttctttccatggtactttgaaaaca

SEQ ID NO: 86907 - DNA, 25 bp, Probe sequence
ttccatggtactttgaaaacaatat

SEQ ID NO: 86908 - DNA, 25 bp, Probe sequence
atttttctttttcatattcatattt

SEQ ID NO: 86909 - DNA, 25 bp, Probe sequence
atacccacgtatatgataacgtttt

SEQ ID NO: 86910 - DNA, 25 bp, Probe sequence
atctccaaacttatcctgtcatgtc

SEQ ID NO: 86911 - DNA, 25 bp, Probe sequence
accgacataacattttagcgttctt

SEQ ID NO: 86912 - DNA, 25 bp, Probe sequence
aacttatcctgtcatgtcaaaccga

SEQ ID NO: 86913 - DNA, 25 bp, Probe sequence
ctccaaacttatcctgtcatgtcaa

SEQ ID NO: 86914 - DNA, 25 bp, Probe sequence
gtcaaaccgacataacattttagcg

SEQ ID NO: 86915 - DNA, 25 bp, Probe sequence
tccctcttcatatacccacgtatat

SEQ ID NO: 86916 - DNA, 25 bp, Probe sequence
tcgcctttatttttctttttcatat

SEQ ID NO: 86917 - DNA, 25 bp, Probe sequence
tcatctccaaacttatcctgtcatg

SEQ ID NO: 86918 - DNA, 25 bp, Probe sequence
tcaattaacttttatatcttttcgc

SEQ ID NO: 86919 - DNA, 25 bp, Probe sequence
tatgataacgtttttcaattaactt

SEQ ID NO: 86920 - DNA, 25 bp, Probe sequence
tatcctgtcatgtcaaaccgacata

SEQ ID NO: 86921 - DNA, 25 bp, Probe sequence
tatatcttttcgcctttatttttct

SEQ ID NO: 86922 - DNA, 25 bp, Probe sequence
tttagcgttcttaataccattccct

SEQ ID NO: 86923 - DNA, 25 bp, Probe sequence
attacataactacatagtcaccatt

SEQ ID NO: 86924 - DNA, 25 bp, Probe sequence
accattttcaaatacccaatcacta

SEQ ID NO: 86925 - DNA, 25 bp, Probe sequence
acataatctcctctttgtgtctatt

SEQ ID NO: 86926 - DNA, 25 bp, Probe sequence
aaactatcattaaccattttcaaat

SEQ ID NO: 86927 - DNA, 25 bp, Probe sequence
aacgctataaatatgatgtctttgc

SEQ ID NO: 86928 - DNA, 25 bp, Probe sequence
aatacccaatcactaataaacacaa

SEQ ID NO: 86929 - DNA, 25 bp, Probe sequence
aattcattttcaatcgtataatcaa

SEQ ID NO: 86930 - DNA, 25 bp, Probe sequence
gcaaatacacatattcattgagggt

SEQ ID NO: 86931 - DNA, 25 bp, Probe sequence
gagggtgtgacattaacgcctaaac

SEQ ID NO: 86932 - DNA, 25 bp, Probe sequence
gattactcattatagcagtcattat

SEQ ID NO: 86933 - DNA, 25 bp, Probe sequence
gtagctagtatttaatcttacttat

SEQ ID NO: 86934 - DNA, 25 bp, Probe sequence
tctcctctttgtgtctattgattac

SEQ ID NO: 86935 - DNA, 25 bp, Probe sequence
tctttgtgtctattgattactcatt

SEQ ID NO: 86936 - DNA, 25 bp, Probe sequence
tacatagtcaccattttaaaagcaa

SEQ ID NO: 86937 - DNA, 25 bp, Probe sequence
tatgatgtctttgctaattaactaa

SEQ ID NO: 86938 - DNA, 25 bp, Probe sequence
atcaagaggaaagccacttacttat

SEQ ID NO: 86939 - DNA, 25 bp, Probe sequence
aaacaccgtcacatattgagtgaat

SEQ ID NO: 86940 - DNA, 25 bp, Probe sequence
aagccacttacttatggacggtgtt

SEQ ID NO: 86941 - DNA, 25 bp, Probe sequence
cacttacttatggacggtgtttttg

SEQ ID NO: 86942 - DNA, 25 bp, Probe sequence
cacatattgagtgaatgcctctttt

SEQ ID NO: 86943 - DNA, 25 bp, Probe sequence
caccgtcacatattgagtgaatgcc

SEQ ID NO: 86944 - DNA, 25 bp, Probe sequence
gccacttacttatggacggtgtttt

SEQ ID NO: 86945 - DNA, 25 bp, Probe sequence
gaaagccacttacttatggacggtg

SEQ ID NO: 86946 - DNA, 25 bp, Probe sequence
gaggaaagccacttacttatggacg

SEQ ID NO: 86947 - DNA, 25 bp, Probe sequence
gtaaatatataaaacaccgtcacat

SEQ ID NO: 86948 - DNA, 25 bp, Probe sequence
gtgaatgcctcttttatcaagagga

SEQ ID NO: 86949 - DNA, 25 bp, Probe sequence
ggaaagccacttacttatggacggt

SEQ ID NO: 86950 - DNA, 25 bp, Probe sequence
tgagtgaatgcctcttttatcaaga

SEQ ID NO: 86951 - DNA, 25 bp, Probe sequence
tataaaacaccgtcacatattgagt

SEQ ID NO: 86952 - DNA, 25 bp, Probe sequence
tattgagtgaatgcctcttttatca

SEQ ID NO: 86953 - DNA, 25 bp, Probe sequence
agttcctataaaatcttgcgccata

SEQ ID NO: 86954 - DNA, 25 bp, Probe sequence
agatgtctaactaaatatactgcga

SEQ ID NO: 86955 - DNA, 25 bp, Probe sequence
accaccatttcgttagatgtctaac

SEQ ID NO: 86956 - DNA, 25 bp, Probe sequence
actgcgacatttttaaattgtcaac

SEQ ID NO: 86957 - DNA, 25 bp, Probe sequence
aaatcttgcgccataaacattttga

SEQ ID NO: 86958 - DNA, 25 bp, Probe sequence
aatatactgcgacatttttaaattg

SEQ ID NO: 86959 - DNA, 25 bp, Probe sequence
gaaagagattgcatatctacgtttt

SEQ ID NO: 86960 - DNA, 25 bp, Probe sequence
gaaatcgcttacaattacaaatagg

SEQ ID NO: 86961 - DNA, 25 bp, Probe sequence
gattgcatatctacgtttttaagaa

SEQ ID NO: 86962 - DNA, 25 bp, Probe sequence
tgcaccaccatttcgttagatgtct

SEQ ID NO: 86963 - DNA, 25 bp, Probe sequence
tcttgcgccataaacattttgatat

SEQ ID NO: 86964 - DNA, 25 bp, Probe sequence
tatctacgtttttaagaaatcgctt

SEQ ID NO: 86965 - DNA, 25 bp, Probe sequence
tttgatatgcaatttttcggattaa

SEQ ID NO: 86966 - DNA, 25 bp, Probe sequence
ttattgcaccaccatttcgttagat

SEQ ID NO: 86967 - DNA, 25 bp, Probe sequence
ttgtcaacatgaatatctaatttat

SEQ ID NO: 86968 - DNA, 25 bp, Probe sequence
atactccttgtcttttccaataatt

SEQ ID NO: 86969 - DNA, 25 bp, Probe sequence
actgatttctaccagtcacacttac

SEQ ID NO: 86970 - DNA, 25 bp, Probe sequence
actccttgtcttttccaataattag

SEQ ID NO: 86971 - DNA, 25 bp, Probe sequence
aagataaagtgactgatttctacca

SEQ ID NO: 86972 - DNA, 25 bp, Probe sequence
aatactccttgtcttttccaataat

SEQ ID NO: 86973 - DNA, 25 bp, Probe sequence
caatactccttgtcttttccaataa

SEQ ID NO: 86974 - DNA, 25 bp, Probe sequence
ctccttgtcttttccaataattagc

SEQ ID NO: 86975 - DNA, 25 bp, Probe sequence
ccttgtcttttccaataattagctt

SEQ ID NO: 86976 - DNA, 25 bp, Probe sequence
tgtcttttccaataattagcttact

SEQ ID NO: 86977 - DNA, 25 bp, Probe sequence
tgatttctaccagtcacacttacca

SEQ ID NO: 86978 - DNA, 25 bp, Probe sequence
tccaataattagcttactaacaatt

SEQ ID NO: 86979 - DNA, 25 bp, Probe sequence
tcttttccaataattagcttactaa

SEQ ID NO: 86980 - DNA, 25 bp, Probe sequence
tcaatactccttgtcttttccaata

SEQ ID NO: 86981 - DNA, 25 bp, Probe sequence
tactccttgtcttttccaataatta

SEQ ID NO: 86982 - DNA, 25 bp, Probe sequence
ttcaatactccttgtcttttccaat

SEQ ID NO: 86983 - DNA, 25 bp, Probe sequence
atgccaatctcactttattttttca

SEQ ID NO: 86984 - DNA, 25 bp, Probe sequence
actcagccagaagtgtacgaaatat

SEQ ID NO: 86985 - DNA, 25 bp, Probe sequence
aatctcactttattttttcataatc

SEQ ID NO: 86986 - DNA, 25 bp, Probe sequence
cttccgaccgaaatatactcagcca

SEQ ID NO: 86987 - DNA, 25 bp, Probe sequence
ctcactttattttttcataatcgta

SEQ ID NO: 86988 - DNA, 25 bp, Probe sequence
cccttccgaccgaaatatactcagc

SEQ ID NO: 86989 - DNA, 25 bp, Probe sequence
ccgaccgaaatatactcagccagaa

SEQ ID NO: 86990 - DNA, 25 bp, Probe sequence
gccaatctcactttattttttcata

SEQ ID NO: 86991 - DNA, 25 bp, Probe sequence
gaaatatactcagccagaagtgtac

SEQ ID NO: 86992 - DNA, 25 bp, Probe sequence
gaccgaaatatactcagccagaagt

SEQ ID NO: 86993 - DNA, 25 bp, Probe sequence
gtatcatatatttatttttttcgaa

SEQ ID NO: 86994 - DNA, 25 bp, Probe sequence
tccgaccgaaatatactcagccaga

SEQ ID NO: 86995 - DNA, 25 bp, Probe sequence
tacccttccgaccgaaatatactca

SEQ ID NO: 86996 - DNA, 25 bp, Probe sequence
tatactcagccagaagtgtacgaaa

SEQ ID NO: 86997 - DNA, 25 bp, Probe sequence
tattttttcataatcgtatcatata

SEQ ID NO: 86998 - DNA, 25 bp, Probe sequence
atatggttatcttatcgaaagatga

SEQ ID NO: 86999 - DNA, 25 bp, Probe sequence
ataaagtcatatggttatcttatcg

SEQ ID NO: 87000 - DNA, 25 bp, Probe sequence
atggttatcttatcgaaagatgata

SEQ ID NO: 87001 - DNA, 25 bp, Probe sequence
agtcatatggttatcttatcgaaag

SEQ ID NO: 87002 - DNA, 25 bp, Probe sequence
aaagtcatatggttatcttatcgaa

SEQ ID NO: 87003 - DNA, 25 bp, Probe sequence
aaagatgatatattcatctcttata

SEQ ID NO: 87004 - DNA, 25 bp, Probe sequence
aagtcatatggttatcttatcgaaa

SEQ ID NO: 87005 - DNA, 25 bp, Probe sequence
aataaagtcatatggttatcttatc

SEQ ID NO: 87006 - DNA, 25 bp, Probe sequence
catatggttatcttatcgaaagatg

SEQ ID NO: 87007 - DNA, 25 bp, Probe sequence
gaaagatgatatattcatctcttat

SEQ ID NO: 87008 - DNA, 25 bp, Probe sequence
gatgatatattcatctcttataagt

SEQ ID NO: 87009 - DNA, 25 bp, Probe sequence
gtcatatggttatcttatcgaaaga

SEQ ID NO: 87010 - DNA, 25 bp, Probe sequence
tcatatggttatcttatcgaaagat

SEQ ID NO: 87011 - DNA, 25 bp, Probe sequence
taaagtcatatggttatcttatcga

SEQ ID NO: 87012 - DNA, 25 bp, Probe sequence
tatggttatcttatcgaaagatgat

SEQ ID NO: 87013 - DNA, 25 bp, Probe sequence
atgtctaatataagtttatcgcaca

SEQ ID NO: 87014 - DNA, 25 bp, Probe sequence
atgtgtagcaatttattttttctaa

SEQ ID NO: 87015 - DNA, 25 bp, Probe sequence
agtttatcgcacaaaatgcatataa

SEQ ID NO: 87016 - DNA, 25 bp, Probe sequence
acacagctagtatgtataacgacat

SEQ ID NO: 87017 - DNA, 25 bp, Probe sequence
acaaaagtatattgacaacgctttc

SEQ ID NO: 87018 - DNA, 25 bp, Probe sequence
acaacgctttcatacatgtctaata

SEQ ID NO: 87019 - DNA, 25 bp, Probe sequence
aaatatgtttgtactcattcgtaga

SEQ ID NO: 87020 - DNA, 25 bp, Probe sequence
aacgctttcatacatgtctaatata

SEQ ID NO: 87021 - DNA, 25 bp, Probe sequence
aatacttcaataactaaatatgcaa

SEQ ID NO: 87022 - DNA, 25 bp, Probe sequence
aatatgcaagatttcacaaaagtat

SEQ ID NO: 87023 - DNA, 25 bp, Probe sequence
ctcattcgtagatacacagctagta

SEQ ID NO: 87024 - DNA, 25 bp, Probe sequence
ccccttttctgcaaataaaaatatg

SEQ ID NO: 87025 - DNA, 25 bp, Probe sequence
gtttgtactcattcgtagatacaca

SEQ ID NO: 87026 - DNA, 25 bp, Probe sequence
gtataacgacataataattgcataa

SEQ ID NO: 87027 - DNA, 25 bp, Probe sequence
gtactcattcgtagatacacagcta

SEQ ID NO: 87028 - DNA, 25 bp, Probe sequence
atttagtgtgccgagcgtcttattt

SEQ ID NO: 87029 - DNA, 25 bp, Probe sequence
atacaaatttagtgtgccgagcgtc

SEQ ID NO: 87030 - DNA, 25 bp, Probe sequence
agtgtgccgagcgtcttatttttat

SEQ ID NO: 87031 - DNA, 25 bp, Probe sequence
acatacaaatttagtgtgccgagcg

SEQ ID NO: 87032 - DNA, 25 bp, Probe sequence
acaaatttagtgtgccgagcgtctt

SEQ ID NO: 87033 - DNA, 25 bp, Probe sequence
aaatttagtgtgccgagcgtcttat

SEQ ID NO: 87034 - DNA, 25 bp, Probe sequence
aatttagtgtgccgagcgtcttatt

SEQ ID NO: 87035 - DNA, 25 bp, Probe sequence
gtgccgagcgtcttatttttatact

SEQ ID NO: 87036 - DNA, 25 bp, Probe sequence
gtgtgccgagcgtcttatttttata

SEQ ID NO: 87037 - DNA, 25 bp, Probe sequence
tgtgccgagcgtcttatttttatac

SEQ ID NO: 87038 - DNA, 25 bp, Probe sequence
taaaagacgctcaaacacatacaaa

SEQ ID NO: 87039 - DNA, 25 bp, Probe sequence
tagtgtgccgagcgtcttattttta

SEQ ID NO: 87040 - DNA, 25 bp, Probe sequence
tataaaagacgctcaaacacataca

SEQ ID NO: 87041 - DNA, 25 bp, Probe sequence
ttagtgtgccgagcgtcttattttt

SEQ ID NO: 87042 - DNA, 25 bp, Probe sequence
tttagtgtgccgagcgtcttatttt

SEQ ID NO: 87043 - DNA, 25 bp, Probe sequence
atcacatcctcattcatttttcata

SEQ ID NO: 87044 - DNA, 25 bp, Probe sequence
atcctcattcatttttcatataatt

SEQ ID NO: 87045 - DNA, 25 bp, Probe sequence
acatcctcattcatttttcatataa

SEQ ID NO: 87046 - DNA, 25 bp, Probe sequence
aacatattaatattacgcattgtat

SEQ ID NO: 87047 - DNA, 25 bp, Probe sequence
aatattacgcattgtatcttaaatt

SEQ ID NO: 87048 - DNA, 25 bp, Probe sequence
cacatcctcattcatttttcatata

SEQ ID NO: 87049 - DNA, 25 bp, Probe sequence
catcctcattcatttttcatataat

SEQ ID NO: 87050 - DNA, 25 bp, Probe sequence
catttttcatataattctgtaaatt

SEQ ID NO: 87051 - DNA, 25 bp, Probe sequence
cattcatttttcatataattctgta

SEQ ID NO: 87052 - DNA, 25 bp, Probe sequence
ctcattcatttttcatataattctg

SEQ ID NO: 87053 - DNA, 25 bp, Probe sequence
cctcattcatttttcatataattct

SEQ ID NO: 87054 - DNA, 25 bp, Probe sequence
tcctcattcatttttcatataattc

SEQ ID NO: 87055 - DNA, 25 bp, Probe sequence
tcacatcctcattcatttttcatat

SEQ ID NO: 87056 - DNA, 25 bp, Probe sequence
tattaatattacgcattgtatctta

SEQ ID NO: 87057 - DNA, 25 bp, Probe sequence
ttcatttttcatataattctgtaaa

SEQ ID NO: 87058 - DNA, 25 bp, Probe sequence
atagacatgccctcattcgtactat

SEQ ID NO: 87059 - DNA, 25 bp, Probe sequence
atacgtggctcttaaaatgatgatt

SEQ ID NO: 87060 - DNA, 25 bp, Probe sequence
atcactcttttgtaagtctaatttg

SEQ ID NO: 87061 - DNA, 25 bp, Probe sequence
atcctcccatgaacattatctagtt

SEQ ID NO: 87062 - DNA, 25 bp, Probe sequence
atgccaagataatacgtggctctta

SEQ ID NO: 87063 - DNA, 25 bp, Probe sequence
atgattttaaggcatcctcccatga

SEQ ID NO: 87064 - DNA, 25 bp, Probe sequence
atgtcatcactcttttgtaagtcta

SEQ ID NO: 87065 - DNA, 25 bp, Probe sequence
aaagagcgatgccattttaaatgtc

SEQ ID NO: 87066 - DNA, 25 bp, Probe sequence
gccattttaaatgtcatcactcttt

SEQ ID NO: 87067 - DNA, 25 bp, Probe sequence
gaaattctattatccccatagacat

SEQ ID NO: 87068 - DNA, 25 bp, Probe sequence
tctattatccccatagacatgccct

SEQ ID NO: 87069 - DNA, 25 bp, Probe sequence
tctcacactccctaaatgccaagat

SEQ ID NO: 87070 - DNA, 25 bp, Probe sequence
taaggcatcctcccatgaacattat

SEQ ID NO: 87071 - DNA, 25 bp, Probe sequence
tactgtcaacaaccttttattttca

SEQ ID NO: 87072 - DNA, 25 bp, Probe sequence
ttgacacctcattatagaaattcta

SEQ ID NO: 87073 - DNA, 25 bp, Probe sequence
atgctacgataatccgcaatacagc

SEQ ID NO: 87074 - DNA, 25 bp, Probe sequence
atccacatctcaacaatgctacgat

SEQ ID NO: 87075 - DNA, 25 bp, Probe sequence
atgtagcacctcagattatatcaat

SEQ ID NO: 87076 - DNA, 25 bp, Probe sequence
actgcacttgcgttaattagaatac

SEQ ID NO: 87077 - DNA, 25 bp, Probe sequence
aaagaacaatgtagcacctcagatt

SEQ ID NO: 87078 - DNA, 25 bp, Probe sequence
caaccatgcagcgatatccacatct

SEQ ID NO: 87079 - DNA, 25 bp, Probe sequence
ctgcaatacaacgagaaccaaccat

SEQ ID NO: 87080 - DNA, 25 bp, Probe sequence
gcgatatccacatctcaacaatgct

SEQ ID NO: 87081 - DNA, 25 bp, Probe sequence
gcaacaaaaaaacaggcactcggcc

SEQ ID NO: 87082 - DNA, 25 bp, Probe sequence
gaatcggattaaaccgtgatatctg

SEQ ID NO: 87083 - DNA, 25 bp, Probe sequence
gaaccaaccatgcagcgatatccac

SEQ ID NO: 87084 - DNA, 25 bp, Probe sequence
gataatccgcaatacagcaacaaaa

SEQ ID NO: 87085 - DNA, 25 bp, Probe sequence
tgcagcgatatccacatctcaacaa

SEQ ID NO: 87086 - DNA, 25 bp, Probe sequence
taaaccgtgatatctgcaatacaac

SEQ ID NO: 87087 - DNA, 25 bp, Probe sequence
ttatatcaatactgcacttgcgtta

SEQ ID NO: 87088 - DNA, 25 bp, Probe sequence
agcgagctacgtcatcgtttagtta

SEQ ID NO: 87089 - DNA, 25 bp, Probe sequence
accacaccttactagttcattttag

SEQ ID NO: 87090 - DNA, 25 bp, Probe sequence
actgaccacaccttactagttcatt

SEQ ID NO: 87091 - DNA, 25 bp, Probe sequence
actagttcattttagcgagctacgt

SEQ ID NO: 87092 - DNA, 25 bp, Probe sequence
cactgaccacaccttactagttcat

SEQ ID NO: 87093 - DNA, 25 bp, Probe sequence
cacaccttactagttcattttagcg

SEQ ID NO: 87094 - DNA, 25 bp, Probe sequence
caccttactagttcattttagcgag

SEQ ID NO: 87095 - DNA, 25 bp, Probe sequence
cttactagttcattttagcgagcta

SEQ ID NO: 87096 - DNA, 25 bp, Probe sequence
ctgaccacaccttactagttcattt

SEQ ID NO: 87097 - DNA, 25 bp, Probe sequence
cgagctacgtcatcgtttagttaaa

SEQ ID NO: 87098 - DNA, 25 bp, Probe sequence
gaccacaccttactagttcatttta

SEQ ID NO: 87099 - DNA, 25 bp, Probe sequence
gttcattttagcgagctacgtcatc

SEQ ID NO: 87100 - DNA, 25 bp, Probe sequence
tcattttagcgagctacgtcatcgt

SEQ ID NO: 87101 - DNA, 25 bp, Probe sequence
ttttagcgagctacgtcatcgttta

SEQ ID NO: 87102 - DNA, 25 bp, Probe sequence
ttagcgagctacgtcatcgtttagt

SEQ ID NO: 87103 - DNA, 25 bp, Probe sequence
atatactacttatgagtgaggttga

SEQ ID NO: 87104 - DNA, 25 bp, Probe sequence
atactacttatgagtgaggttgatt

SEQ ID NO: 87105 - DNA, 25 bp, Probe sequence
actatatactacttatgagtgaggt

SEQ ID NO: 87106 - DNA, 25 bp, Probe sequence
aatcattatcgttcggtataaagta

SEQ ID NO: 87107 - DNA, 25 bp, Probe sequence
aatactatatactacttatgagtga

SEQ ID NO: 87108 - DNA, 25 bp, Probe sequence
ctacttatgagtgaggttgattatc

SEQ ID NO: 87109 - DNA, 25 bp, Probe sequence
gataatcattatcgttcggtataaa

SEQ ID NO: 87110 - DNA, 25 bp, Probe sequence
gtatttacagcaacattttaattat

SEQ ID NO: 87111 - DNA, 25 bp, Probe sequence
gtaaatactatatactacttatgag

SEQ ID NO: 87112 - DNA, 25 bp, Probe sequence
tgataatcattatcgttcggtataa

SEQ ID NO: 87113 - DNA, 25 bp, Probe sequence
tcattatcgttcggtataaagtaaa

SEQ ID NO: 87114 - DNA, 25 bp, Probe sequence
taatcattatcgttcggtataaagt

SEQ ID NO: 87115 - DNA, 25 bp, Probe sequence
tatcgttcggtataaagtaaatact

SEQ ID NO: 87116 - DNA, 25 bp, Probe sequence
tttgtatttacagcaacattttaat

SEQ ID NO: 87117 - DNA, 25 bp, Probe sequence
tttacagcaacattttaattatttt

SEQ ID NO: 87118 - DNA, 25 bp, Probe sequence
aaatcaaaccattcaaaggagacta

SEQ ID NO: 87119 - DNA, 25 bp, Probe sequence
aaaatatgattgtccacctatgtat

SEQ ID NO: 87120 - DNA, 25 bp, Probe sequence
caactccttagtcctaatgtaaatg

SEQ ID NO: 87121 - DNA, 25 bp, Probe sequence
cacctcaacgcctacaagtcataat

SEQ ID NO: 87122 - DNA, 25 bp, Probe sequence
caccttcctgcataattaacagcat

SEQ ID NO: 87123 - DNA, 25 bp, Probe sequence
cgcatcaactccttagtcctaatgt

SEQ ID NO: 87124 - DNA, 25 bp, Probe sequence
gcattttcactaaatcaaaccattc

SEQ ID NO: 87125 - DNA, 25 bp, Probe sequence
gatgcacgcattttcactaaatcaa

SEQ ID NO: 87126 - DNA, 25 bp, Probe sequence
gattgtccacctatgtatgacattt

SEQ ID NO: 87127 - DNA, 25 bp, Probe sequence
gtatgacattttgaaacaacacctc

SEQ ID NO: 87128 - DNA, 25 bp, Probe sequence
gtaaatgatatttgtctttttgaca

SEQ ID NO: 87129 - DNA, 25 bp, Probe sequence
gtcataattgtttactttcgttaca

SEQ ID NO: 87130 - DNA, 25 bp, Probe sequence
tcgttacaccttcctgcataattaa

SEQ ID NO: 87131 - DNA, 25 bp, Probe sequence
tttgaaacaacacctcaacgcctac

SEQ ID NO: 87132 - DNA, 25 bp, Probe sequence
ttctaattttagtatgatgcacgca

SEQ ID NO: 87133 - DNA, 25 bp, Probe sequence
atttcaatgactagcttcacaccaa

SEQ ID NO: 87134 - DNA, 25 bp, Probe sequence
atatatacacgttaatcctcactat

SEQ ID NO: 87135 - DNA, 25 bp, Probe sequence
atagtattcacctcggtcaaagtat

SEQ ID NO: 87136 - DNA, 25 bp, Probe sequence
atcacctgctctaaatattatttca

SEQ ID NO: 87137 - DNA, 25 bp, Probe sequence
atcgtattgatttatcacctgctct

SEQ ID NO: 87138 - DNA, 25 bp, Probe sequence
atcgttagcctatacaatcatcaaa

SEQ ID NO: 87139 - DNA, 25 bp, Probe sequence
aaaggatgcaattcccacataacct

SEQ ID NO: 87140 - DNA, 25 bp, Probe sequence
cttttggattcagttatgctacatg

SEQ ID NO: 87141 - DNA, 25 bp, Probe sequence
gcatttcattccacaacaccaaaaa

SEQ ID NO: 87142 - DNA, 25 bp, Probe sequence
gaatccaaaagtgtcgaacttcaca

SEQ ID NO: 87143 - DNA, 25 bp, Probe sequence
gaacttcacattatacttttggatt

SEQ ID NO: 87144 - DNA, 25 bp, Probe sequence
gactagcttcacaccaagaatattg

SEQ ID NO: 87145 - DNA, 25 bp, Probe sequence
gttatgctacatgatcgaggttttt

SEQ ID NO: 87146 - DNA, 25 bp, Probe sequence
tagagatgtcacctcaacctatcat

SEQ ID NO: 87147 - DNA, 25 bp, Probe sequence
ttcccacataacctaatcttctaaa

SEQ ID NO: 87148 - DNA, 25 bp, Probe sequence
attccgcaattaccttgcagtcacc

SEQ ID NO: 87149 - DNA, 25 bp, Probe sequence
attctatctatcattgcatcgctat

SEQ ID NO: 87150 - DNA, 25 bp, Probe sequence
atcgctgatgattgttaattccgca

SEQ ID NO: 87151 - DNA, 25 bp, Probe sequence
atgctctatcatcctcatctatagt

SEQ ID NO: 87152 - DNA, 25 bp, Probe sequence
aaatctgcccctattcactagaaaa

SEQ ID NO: 87153 - DNA, 25 bp, Probe sequence
aaccaattgctacgtatgttacatt

SEQ ID NO: 87154 - DNA, 25 bp, Probe sequence
aatacgccactaacatccaatttat

SEQ ID NO: 87155 - DNA, 25 bp, Probe sequence
gcatcgctattcacagctggtttca

SEQ ID NO: 87156 - DNA, 25 bp, Probe sequence
gttacattttcattcttgttatgca

SEQ ID NO: 87157 - DNA, 25 bp, Probe sequence
gtttcaccatcaatttctcatcaat

SEQ ID NO: 87158 - DNA, 25 bp, Probe sequence
gtctaatgaaccaatacgccactaa

SEQ ID NO: 87159 - DNA, 25 bp, Probe sequence
gtctccagtcaaatattaaatcgct

SEQ ID NO: 87160 - DNA, 25 bp, Probe sequence
tttcactttaacatttcacactctt

SEQ ID NO: 87161 - DNA, 25 bp, Probe sequence
tttttattaccatgacgtctccagt

SEQ ID NO: 87162 - DNA, 25 bp, Probe sequence
ttcacactcttaaatatgctctatc

SEQ ID NO: 87163 - DNA, 25 bp, Probe sequence
atactgttgtgataacctgttttct

SEQ ID NO: 87164 - DNA, 25 bp, Probe sequence
actgttgtgataacctgttttctta

SEQ ID NO: 87165 - DNA, 25 bp, Probe sequence
acaggttatgccaacatgtaattaa

SEQ ID NO: 87166 - DNA, 25 bp, Probe sequence
aaacaggttatgccaacatgtaatt

SEQ ID NO: 87167 - DNA, 25 bp, Probe sequence
aaaacaggttatgccaacatgtaat

SEQ ID NO: 87168 - DNA, 25 bp, Probe sequence
aacaggttatgccaacatgtaatta

SEQ ID NO: 87169 - DNA, 25 bp, Probe sequence
aatactgttgtgataacctgttttc

SEQ ID NO: 87170 - DNA, 25 bp, Probe sequence
caggttatgccaacatgtaattaat

SEQ ID NO: 87171 - DNA, 25 bp, Probe sequence
ggttatgccaacatgtaattaatac

SEQ ID NO: 87172 - DNA, 25 bp, Probe sequence
taaaaacaggttatgccaacatgta

SEQ ID NO: 87173 - DNA, 25 bp, Probe sequence
tactgttgtgataacctgttttctt

SEQ ID NO: 87174 - DNA, 25 bp, Probe sequence
tacccaataaatccataaacaaata

SEQ ID NO: 87175 - DNA, 25 bp, Probe sequence
tatgccaacatgtaattaatactgt

SEQ ID NO: 87176 - DNA, 25 bp, Probe sequence
tattacccaataaatccataaacaa

SEQ ID NO: 87177 - DNA, 25 bp, Probe sequence
ttaatactgttgtgataacctgttt

SEQ ID NO: 87178 - DNA, 25 bp, Probe sequence
attcatttttcaacttcaagatacc

SEQ ID NO: 87179 - DNA, 25 bp, Probe sequence
atatccttacttactgactttaatt

SEQ ID NO: 87180 - DNA, 25 bp, Probe sequence
agcacattactatatccttacttac

SEQ ID NO: 87181 - DNA, 25 bp, Probe sequence
aatatgaggtgtctacgggttcgcc

SEQ ID NO: 87182 - DNA, 25 bp, Probe sequence
cacaccctgcttatacagagagtct

SEQ ID NO: 87183 - DNA, 25 bp, Probe sequence
ggaaagtaaaacacaccctgcttat

SEQ ID NO: 87184 - DNA, 25 bp, Probe sequence
cgggttcgcccgttatagcgataca

SEQ ID NO: 87185 - DNA, 25 bp, Probe sequence
gaaaatggccttggagtgttgatgc

SEQ ID NO: 87186 - DNA, 25 bp, Probe sequence
gacaaccattaaccacactttattt

SEQ ID NO: 87187 - DNA, 25 bp, Probe sequence
gttgacaaatctttttttactctgt

SEQ ID NO: 87188 - DNA, 25 bp, Probe sequence
ggtggtaccgcgaaacataagcttt

SEQ ID NO: 87189 - DNA, 25 bp, Probe sequence
tttatccgattcattcgggtacgaa

SEQ ID NO: 87190 - DNA, 25 bp, Probe sequence
taagctttcgtcctttttatccgat

SEQ ID NO: 87191 - DNA, 25 bp, Probe sequence
tactggattctttacgcacgatttt

SEQ ID NO: 87192 - DNA, 25 bp, Probe sequence
ttcactcacatcactttttatttga

SEQ ID NO: 87193 - DNA, 25 bp, Probe sequence
attcttccaacctactgaagtcgca

SEQ ID NO: 87194 - DNA, 25 bp, Probe sequence
attgttgtattcttccaacctactg

SEQ ID NO: 87195 - DNA, 25 bp, Probe sequence
atctatagattcacaaagagttatt

SEQ ID NO: 87196 - DNA, 25 bp, Probe sequence
aatattgttgtattcttccaaccta

SEQ ID NO: 87197 - DNA, 25 bp, Probe sequence
caacctactgaagtcgcatcatctt

SEQ ID NO: 87198 - DNA, 25 bp, Probe sequence
cccttctatatagtctcaaataatt

SEQ ID NO: 87199 - DNA, 25 bp, Probe sequence
cctactgaagtcgcatcatcttcaa

SEQ ID NO: 87200 - DNA, 25 bp, Probe sequence
gaagtcgcatcatcttcaaagaata

SEQ ID NO: 87201 - DNA, 25 bp, Probe sequence
gttgtattcttccaacctactgaag

SEQ ID NO: 87202 - DNA, 25 bp, Probe sequence
gttactcccttctatatagtctcaa

SEQ ID NO: 87203 - DNA, 25 bp, Probe sequence
gtattcttccaacctactgaagtcg

SEQ ID NO: 87204 - DNA, 25 bp, Probe sequence
gtcgcatcatcttcaaagaatatag

SEQ ID NO: 87205 - DNA, 25 bp, Probe sequence
tactcccttctatatagtctcaaat

SEQ ID NO: 87206 - DNA, 25 bp, Probe sequence
ttagcgttactcccttctatatagt

SEQ ID NO: 87207 - DNA, 25 bp, Probe sequence
ttccaacctactgaagtcgcatcat

SEQ ID NO: 87208 - DNA, 25 bp, Probe sequence
atactatttaattaacttcactcta

SEQ ID NO: 87209 - DNA, 25 bp, Probe sequence
aggcgaacaattgattccgcctctt

SEQ ID NO: 87210 - DNA, 25 bp, Probe sequence
actatttaattaacttcactctatc

SEQ ID NO: 87211 - DNA, 25 bp, Probe sequence
aagaggcgaacaattgattccgcct

SEQ ID NO: 87212 - DNA, 25 bp, Probe sequence
aaaagaggcgaacaattgattccgc

SEQ ID NO: 87213 - DNA, 25 bp, Probe sequence
ctatttaattaacttcactctatcg

SEQ ID NO: 87214 - DNA, 25 bp, Probe sequence
ctcttctacatatatactatttaat

SEQ ID NO: 87215 - DNA, 25 bp, Probe sequence
cgcctcttctacatatatactattt

SEQ ID NO: 87216 - DNA, 25 bp, Probe sequence
ccgcctcttctacatatatactatt

SEQ ID NO: 87217 - DNA, 25 bp, Probe sequence
gcctcttctacatatatactattta

SEQ ID NO: 87218 - DNA, 25 bp, Probe sequence
gaggcgaacaattgattccgcctct

SEQ ID NO: 87219 - DNA, 25 bp, Probe sequence
ggcgaacaattgattccgcctcttc

SEQ ID NO: 87220 - DNA, 25 bp, Probe sequence
tccgcctcttctacatatatactat

SEQ ID NO: 87221 - DNA, 25 bp, Probe sequence
tatactatttaattaacttcactct

SEQ ID NO: 87222 - DNA, 25 bp, Probe sequence
tatttaattaacttcactctatcgt

SEQ ID NO: 87223 - DNA, 25 bp, Probe sequence
ataataattcaaactactcttcata

SEQ ID NO: 87224 - DNA, 25 bp, Probe sequence
atcatgcgccattactttttacaat

SEQ ID NO: 87225 - DNA, 25 bp, Probe sequence
ctccttgtggtctatacggcttatc

SEQ ID NO: 87226 - DNA, 25 bp, Probe sequence
gaattatatcatgcgccattacttt

SEQ ID NO: 87227 - DNA, 25 bp, Probe sequence
gaacgcatgttctataatggttgtg

SEQ ID NO: 87228 - DNA, 25 bp, Probe sequence
gttctataatggttgtgaggtggta

SEQ ID NO: 87229 - DNA, 25 bp, Probe sequence
gtggtctatacggcttatcaatctt

SEQ ID NO: 87230 - DNA, 25 bp, Probe sequence
ggaataattttcattactcacaata

SEQ ID NO: 87231 - DNA, 25 bp, Probe sequence
tgcgccattactttttacaataata

SEQ ID NO: 87232 - DNA, 25 bp, Probe sequence
tacacttcacaaaagcgaacgcatg

SEQ ID NO: 87233 - DNA, 25 bp, Probe sequence
tacggcttatcaatcttaaaacaga

SEQ ID NO: 87234 - DNA, 25 bp, Probe sequence
tactcttcatatcatttttgacatt

SEQ ID NO: 87235 - DNA, 25 bp, Probe sequence
tatttgcacctccttgtggtctata

SEQ ID NO: 87236 - DNA, 25 bp, Probe sequence
ttatatttgcacctccttgtggtct

SEQ ID NO: 87237 - DNA, 25 bp, Probe sequence
ttcaaactactcttcatatcatttt

SEQ ID NO: 87238 - DNA, 25 bp, Probe sequence
atatctttgtgcaaattccgaacac

SEQ ID NO: 87239 - DNA, 25 bp, Probe sequence
atgcctacgagggttataatatatt

SEQ ID NO: 87240 - DNA, 25 bp, Probe sequence
ccccataagcctatgcctacgaggg

SEQ ID NO: 87241 - DNA, 25 bp, Probe sequence
aacacaaaacattcacatcatcctt

SEQ ID NO: 87242 - DNA, 25 bp, Probe sequence
aacattcacatcatccttttttgcc

SEQ ID NO: 87243 - DNA, 25 bp, Probe sequence
gcgtagttctttttttatgcatcta

SEQ ID NO: 87244 - DNA, 25 bp, Probe sequence
gcatctaaattcatattatttttgc

SEQ ID NO: 87245 - DNA, 25 bp, Probe sequence
gcaatataaacatatctttgtgcaa

SEQ ID NO: 87246 - DNA, 25 bp, Probe sequence
gaagagctatgcattttatttaaaa

SEQ ID NO: 87247 - DNA, 25 bp, Probe sequence
gacttataggtctcgcgagttattt

SEQ ID NO: 87248 - DNA, 25 bp, Probe sequence
gagttattttaattcgtatgcaaga

SEQ ID NO: 87249 - DNA, 25 bp, Probe sequence
ggtctcgcgagttattttaattcgt

SEQ ID NO: 87250 - DNA, 25 bp, Probe sequence
tcccttttctatatcccaaacataa

SEQ ID NO: 87251 - DNA, 25 bp, Probe sequence
taagcctatgcctacgagggttata

SEQ ID NO: 87252 - DNA, 25 bp, Probe sequence
taaaaaaatcccccataagcctatg

SEQ ID NO: 87253 - DNA, 25 bp, Probe sequence
atttaattacctccttgatgtaaag

SEQ ID NO: 87254 - DNA, 25 bp, Probe sequence
atttgctaccactctgaatttaata

SEQ ID NO: 87255 - DNA, 25 bp, Probe sequence
actttaatttgctaccactctgaat

SEQ ID NO: 87256 - DNA, 25 bp, Probe sequence
aaaataatagacgtgttcatgaatt

SEQ ID NO: 87257 - DNA, 25 bp, Probe sequence
ctataaatcgtctacacataattgg

SEQ ID NO: 87258 - DNA, 25 bp, Probe sequence
gctaccactctgaatttaataacta

SEQ ID NO: 87259 - DNA, 25 bp, Probe sequence
gcaagcaattcaaagttatatgtgt

SEQ ID NO: 87260 - DNA, 25 bp, Probe sequence
gatatccctatagtgatgcgttact

SEQ ID NO: 87261 - DNA, 25 bp, Probe sequence
gattaactttaatttgctaccactc

SEQ ID NO: 87262 - DNA, 25 bp, Probe sequence
gtaaagctttatttgctacaattat

SEQ ID NO: 87263 - DNA, 25 bp, Probe sequence
gtgatgcgttactagctaaacatag

SEQ ID NO: 87264 - DNA, 25 bp, Probe sequence
tgaattaaattcatcttaactcttg

SEQ ID NO: 87265 - DNA, 25 bp, Probe sequence
taataactataaatcgtctacacat

SEQ ID NO: 87266 - DNA, 25 bp, Probe sequence
taactttaatttgctaccactctga

SEQ ID NO: 87267 - DNA, 25 bp, Probe sequence
tacctccttgatgtaaagctttatt

SEQ ID NO: 87268 - DNA, 25 bp, Probe sequence
agctaggcacctttagatacctaac

SEQ ID NO: 87269 - DNA, 25 bp, Probe sequence
actgtatatactaattcaacttaat

SEQ ID NO: 87270 - DNA, 25 bp, Probe sequence
aaagctaggcacctttagataccta

SEQ ID NO: 87271 - DNA, 25 bp, Probe sequence
aacaaagaaagctaggcacctttag

SEQ ID NO: 87272 - DNA, 25 bp, Probe sequence
aacactgtatatactaattcaactt

SEQ ID NO: 87273 - DNA, 25 bp, Probe sequence
gctaggcacctttagatacctaact

SEQ ID NO: 87274 - DNA, 25 bp, Probe sequence
gcacctttagatacctaactttcaa

SEQ ID NO: 87275 - DNA, 25 bp, Probe sequence
gaaagctaggcacctttagatacct

SEQ ID NO: 87276 - DNA, 25 bp, Probe sequence
ggcacctttagatacctaactttca

SEQ ID NO: 87277 - DNA, 25 bp, Probe sequence
gatacctaactttcaaagtattagc

SEQ ID NO: 87278 - DNA, 25 bp, Probe sequence
gatagtgctaatcataacaaagaaa

SEQ ID NO: 87279 - DNA, 25 bp, Probe sequence
gtattagcaataaaacactgtatat

SEQ ID NO: 87280 - DNA, 25 bp, Probe sequence
taactttcaaagtattagcaataaa

SEQ ID NO: 87281 - DNA, 25 bp, Probe sequence
taggcacctttagatacctaacttt

SEQ ID NO: 87282 - DNA, 25 bp, Probe sequence
ttagatacctaactttcaaagtatt

SEQ ID NO: 87283 - DNA, 25 bp, Probe sequence
atttgaacctgaaagatacgaatcg

SEQ ID NO: 87284 - DNA, 25 bp, Probe sequence
ataggatgcctctgaaaacaactta

SEQ ID NO: 87285 - DNA, 25 bp, Probe sequence
atgcctctgaaaacaacttacataa

SEQ ID NO: 87286 - DNA, 25 bp, Probe sequence
aggatgcctctgaaaacaacttaca

SEQ ID NO: 87287 - DNA, 25 bp, Probe sequence
aagatcacctctgacaaaatataaa

SEQ ID NO: 87288 - DNA, 25 bp, Probe sequence
aataggatgcctctgaaaacaactt

SEQ ID NO: 87289 - DNA, 25 bp, Probe sequence
gcctctgaaaacaacttacataatt

SEQ ID NO: 87290 - DNA, 25 bp, Probe sequence
gaacctgaaagatacgaatcgtttt

SEQ ID NO: 87291 - DNA, 25 bp, Probe sequence
gaaaatgatggtatttgaacctgaa

SEQ ID NO: 87292 - DNA, 25 bp, Probe sequence
gatgcctctgaaaacaacttacata

SEQ ID NO: 87293 - DNA, 25 bp, Probe sequence
gatcacctctgacaaaatataaaat

SEQ ID NO: 87294 - DNA, 25 bp, Probe sequence
ggatgcctctgaaaacaacttacat

SEQ ID NO: 87295 - DNA, 25 bp, Probe sequence
tgatggtatttgaacctgaaagata

SEQ ID NO: 87296 - DNA, 25 bp, Probe sequence
taagttattttatagagactttatt

SEQ ID NO: 87297 - DNA, 25 bp, Probe sequence
taggatgcctctgaaaacaacttac

SEQ ID NO: 87298 - DNA, 25 bp, Probe sequence
attaatcgtcatgcgttactttcgt

SEQ ID NO: 87299 - DNA, 25 bp, Probe sequence
atcgtcatgcgttactttcgttcgt

SEQ ID NO: 87300 - DNA, 25 bp, Probe sequence
atgctatatagattgtattacccct

SEQ ID NO: 87301 - DNA, 25 bp, Probe sequence
actccttttataaatgaaccatgta

SEQ ID NO: 87302 - DNA, 25 bp, Probe sequence
actctctcttcctatttttgaaact

SEQ ID NO: 87303 - DNA, 25 bp, Probe sequence
aaattaatcgtcatgcgttactttc

SEQ ID NO: 87304 - DNA, 25 bp, Probe sequence
aactcataacaaaagcttatatgct

SEQ ID NO: 87305 - DNA, 25 bp, Probe sequence
ctctcttcctatttttgaaactcat

SEQ ID NO: 87306 - DNA, 25 bp, Probe sequence
tgaaccatgtaatataagcatgcta

SEQ ID NO: 87307 - DNA, 25 bp, Probe sequence
tcgtactccttttataaatgaacca

SEQ ID NO: 87308 - DNA, 25 bp, Probe sequence
tcttcctatttttgaaactcataac

SEQ ID NO: 87309 - DNA, 25 bp, Probe sequence
tcactctctcttcctatttttgaaa

SEQ ID NO: 87310 - DNA, 25 bp, Probe sequence
taatcgtcatgcgttactttcgttc

SEQ ID NO: 87311 - DNA, 25 bp, Probe sequence
tatagattgtattaccccttgtttt

SEQ ID NO: 87312 - DNA, 25 bp, Probe sequence
ttcgttcgtactccttttataaatg

SEQ ID NO: 87313 - DNA, 25 bp, Probe sequence
atgcaattaaaccctcacaacacgt

SEQ ID NO: 87314 - DNA, 25 bp, Probe sequence
acacgtttggcatatatcctttcac

SEQ ID NO: 87315 - DNA, 25 bp, Probe sequence
acaacacgtttggcatatatccttt

SEQ ID NO: 87316 - DNA, 25 bp, Probe sequence
acaagcgttaatgcaacgaatcttt

SEQ ID NO: 87317 - DNA, 25 bp, Probe sequence
aaccctcacaacacgtttggcatat

SEQ ID NO: 87318 - DNA, 25 bp, Probe sequence
cttatgcataagtattgtgagggta

SEQ ID NO: 87319 - DNA, 25 bp, Probe sequence
ccctcacaacacgtttggcatatat

SEQ ID NO: 87320 - DNA, 25 bp, Probe sequence
gcatatatcctttcacgtcaaacag

SEQ ID NO: 87321 - DNA, 25 bp, Probe sequence
gaattaagacattttacaagcgtta

SEQ ID NO: 87322 - DNA, 25 bp, Probe sequence
gtttggcatatatcctttcacgtca

SEQ ID NO: 87323 - DNA, 25 bp, Probe sequence
gtattgtgagggtattttattaatt

SEQ ID NO: 87324 - DNA, 25 bp, Probe sequence
tcacgtcaaacaggacttatgcata

SEQ ID NO: 87325 - DNA, 25 bp, Probe sequence
tatcctttcacgtcaaacaggactt

SEQ ID NO: 87326 - DNA, 25 bp, Probe sequence
ttaaaccctcacaacacgtttggca

SEQ ID NO: 87327 - DNA, 25 bp, Probe sequence
ttggcatatatcctttcacgtcaaa

SEQ ID NO: 87328 - DNA, 25 bp, Probe sequence
aattttattcaatgtagctatcgtt

SEQ ID NO: 87329 - DNA, 25 bp, Probe sequence
catttacattattttttctgccgaa

SEQ ID NO: 87330 - DNA, 25 bp, Probe sequence
gccgaattcatagcttgattatttt

SEQ ID NO: 87331 - DNA, 25 bp, Probe sequence
gcttgattattttatgttataggac

SEQ ID NO: 87332 - DNA, 25 bp, Probe sequence
gttatttaaagtctctgtactggca

SEQ ID NO: 87333 - DNA, 25 bp, Probe sequence
gtagctatcgttatttaaagtctct

SEQ ID NO: 87334 - DNA, 25 bp, Probe sequence
gtctctgtactggcaatatcatata

SEQ ID NO: 87335 - DNA, 25 bp, Probe sequence
gtctcctttttctatttattttgcg

SEQ ID NO: 87336 - DNA, 25 bp, Probe sequence
ggcaatatcatatacatttacatta

SEQ ID NO: 87337 - DNA, 25 bp, Probe sequence
tgcgttattctaagtagtacccctt

SEQ ID NO: 87338 - DNA, 25 bp, Probe sequence
tacacatattattagagcatctttg

SEQ ID NO: 87339 - DNA, 25 bp, Probe sequence
tttctatttattttgcgttattcta

SEQ ID NO: 87340 - DNA, 25 bp, Probe sequence
ttttctgccgaattcatagcttgat

SEQ ID NO: 87341 - DNA, 25 bp, Probe sequence
ttttcagtctcctttttctatttat

SEQ ID NO: 87342 - DNA, 25 bp, Probe sequence
ttagagcatctttgaattttaaatc

SEQ ID NO: 87343 - DNA, 25 bp, Probe sequence
atatctaccataacactttgactac

SEQ ID NO: 87344 - DNA, 25 bp, Probe sequence
ataacactttgactactaattcgat

SEQ ID NO: 87345 - DNA, 25 bp, Probe sequence
atcaatcttaatattctattctaaa

SEQ ID NO: 87346 - DNA, 25 bp, Probe sequence
atctaccataacactttgactacta

SEQ ID NO: 87347 - DNA, 25 bp, Probe sequence
atgactctaaaaatagtattgtctt

SEQ ID NO: 87348 - DNA, 25 bp, Probe sequence
accataacactttgactactaattc

SEQ ID NO: 87349 - DNA, 25 bp, Probe sequence
acactttgactactaattcgatatc

SEQ ID NO: 87350 - DNA, 25 bp, Probe sequence
caagtgatgtgttactatatgggtg

SEQ ID NO: 87351 - DNA, 25 bp, Probe sequence
ctaccataacactttgactactaat

SEQ ID NO: 87352 - DNA, 25 bp, Probe sequence
gactactaattcgatatcaatctta

SEQ ID NO: 87353 - DNA, 25 bp, Probe sequence
gttactatatgggtgtagttcttaa

SEQ ID NO: 87354 - DNA, 25 bp, Probe sequence
gtattgtctttaatcaagtgatgtg

SEQ ID NO: 87355 - DNA, 25 bp, Probe sequence
gtgatgtgttactatatgggtgtag

SEQ ID NO: 87356 - DNA, 25 bp, Probe sequence
tactaattcgatatcaatcttaata

SEQ ID NO: 87357 - DNA, 25 bp, Probe sequence
ttcatatctaccataacactttgac

SEQ ID NO: 87358 - DNA, 25 bp, Probe sequence
ccaaaaaggttctgaaggccactat

SEQ ID NO: 87359 - DNA, 25 bp, Probe sequence
ataaaacacagcttttcagaacctc

SEQ ID NO: 87360 - DNA, 25 bp, Probe sequence
atgccaaaaaggttctgaaggccac

SEQ ID NO: 87361 - DNA, 25 bp, Probe sequence
aggccactataaaacacagcttttc

SEQ ID NO: 87362 - DNA, 25 bp, Probe sequence
acagcttttcagaacctctatactt

SEQ ID NO: 87363 - DNA, 25 bp, Probe sequence
acacagcttttcagaacctctatac

SEQ ID NO: 87364 - DNA, 25 bp, Probe sequence
aaacacagcttttcagaacctctat

SEQ ID NO: 87365 - DNA, 25 bp, Probe sequence
aaaacacagcttttcagaacctcta

SEQ ID NO: 87366 - DNA, 25 bp, Probe sequence
aacacagcttttcagaacctctata

SEQ ID NO: 87367 - DNA, 25 bp, Probe sequence
caaaaaggttctgaaggccactata

SEQ ID NO: 87368 - DNA, 25 bp, Probe sequence
cacagcttttcagaacctctatact

SEQ ID NO: 87369 - DNA, 25 bp, Probe sequence
gccactataaaacacagcttttcag

SEQ ID NO: 87370 - DNA, 25 bp, Probe sequence
gaaggccactataaaacacagcttt

SEQ ID NO: 87371 - DNA, 25 bp, Probe sequence
gttctgaaggccactataaaacaca

SEQ ID NO: 87372 - DNA, 25 bp, Probe sequence
ggttctgaaggccactataaaacac

SEQ ID NO: 87373 - DNA, 25 bp, Probe sequence
attgcgacatgtaacacatcattac

SEQ ID NO: 87374 - DNA, 25 bp, Probe sequence
attcatgacaattctttatctttaa

SEQ ID NO: 87375 - DNA, 25 bp, Probe sequence
accaataccttaccattttgcatca

SEQ ID NO: 87376 - DNA, 25 bp, Probe sequence
accttaccattttgcatcaagcagc

SEQ ID NO: 87377 - DNA, 25 bp, Probe sequence
accattttgcatcaagcagcatatt

SEQ ID NO: 87378 - DNA, 25 bp, Probe sequence
acatcattacatgagctttaattca

SEQ ID NO: 87379 - DNA, 25 bp, Probe sequence
aagtgactaatctttgagacaatac

SEQ ID NO: 87380 - DNA, 25 bp, Probe sequence
aataccttaccattttgcatcaagc

SEQ ID NO: 87381 - DNA, 25 bp, Probe sequence
ctgaaagccatcattgcgacatgta

SEQ ID NO: 87382 - DNA, 25 bp, Probe sequence
gccatcattgcgacatgtaacacat

SEQ ID NO: 87383 - DNA, 25 bp, Probe sequence
gaaagccatcattgcgacatgtaac

SEQ ID NO: 87384 - DNA, 25 bp, Probe sequence
gagctttaattcatgacaattcttt

SEQ ID NO: 87385 - DNA, 25 bp, Probe sequence
gagacaatacaatttaaccaatacc

SEQ ID NO: 87386 - DNA, 25 bp, Probe sequence
gtaacacatcattacatgagcttta

SEQ ID NO: 87387 - DNA, 25 bp, Probe sequence
ttaaccaataccttaccattttgca

SEQ ID NO: 87388 - DNA, 25 bp, Probe sequence
atacatattttttcaattaaagata

SEQ ID NO: 87389 - DNA, 25 bp, Probe sequence
acatgaatacatattttttcaatta

SEQ ID NO: 87390 - DNA, 25 bp, Probe sequence
aaacatgaatacatattttttcaat

SEQ ID NO: 87391 - DNA, 25 bp, Probe sequence
aacatgaatacatattttttcaatt

SEQ ID NO: 87392 - DNA, 25 bp, Probe sequence
aatacatattttttcaattaaagat

SEQ ID NO: 87393 - DNA, 25 bp, Probe sequence
caatgttactctattaaacatgaat

SEQ ID NO: 87394 - DNA, 25 bp, Probe sequence
catgaatacatattttttcaattaa

SEQ ID NO: 87395 - DNA, 25 bp, Probe sequence
gaatacatattttttcaattaaaga

SEQ ID NO: 87396 - DNA, 25 bp, Probe sequence
gataaactaaggagttatattacat

SEQ ID NO: 87397 - DNA, 25 bp, Probe sequence
gttactctattaaacatgaatacat

SEQ ID NO: 87398 - DNA, 25 bp, Probe sequence
tcaatgttactctattaaacatgaa

SEQ ID NO: 87399 - DNA, 25 bp, Probe sequence
taaacatgaatacatattttttcaa

SEQ ID NO: 87400 - DNA, 25 bp, Probe sequence
tacatattttttcaattaaagataa

SEQ ID NO: 87401 - DNA, 25 bp, Probe sequence
tactctattaaacatgaatacatat

SEQ ID NO: 87402 - DNA, 25 bp, Probe sequence
ttcaatgttactctattaaacatga

SEQ ID NO: 87403 - DNA, 25 bp, Probe sequence
atgctgttatttttttatcccgaca

SEQ ID NO: 87404 - DNA, 25 bp, Probe sequence
agttttcacagtttcactgacagta

SEQ ID NO: 87405 - DNA, 25 bp, Probe sequence
actgacagtatcttacatttgttaa

SEQ ID NO: 87406 - DNA, 25 bp, Probe sequence
aagatgctgttatttttttatcccg

SEQ ID NO: 87407 - DNA, 25 bp, Probe sequence
cacagtttcactgacagtatcttac

SEQ ID NO: 87408 - DNA, 25 bp, Probe sequence
cagtttcactgacagtatcttacat

SEQ ID NO: 87409 - DNA, 25 bp, Probe sequence
gctgttatttttttatcccgacata

SEQ ID NO: 87410 - DNA, 25 bp, Probe sequence
gatgctgttatttttttatcccgac

SEQ ID NO: 87411 - DNA, 25 bp, Probe sequence
gttttcacagtttcactgacagtat

SEQ ID NO: 87412 - DNA, 25 bp, Probe sequence
tgctgttatttttttatcccgacat

SEQ ID NO: 87413 - DNA, 25 bp, Probe sequence
tcactgacagtatcttacatttgtt

SEQ ID NO: 87414 - DNA, 25 bp, Probe sequence
tttcactgacagtatcttacatttg

SEQ ID NO: 87415 - DNA, 25 bp, Probe sequence
ttttatcccgacataaaatcatgtt

SEQ ID NO: 87416 - DNA, 25 bp, Probe sequence
ttacatttgttaagatgctgttatt

SEQ ID NO: 87417 - DNA, 25 bp, Probe sequence
ttcacagtttcactgacagtatctt

SEQ ID NO: 87418 - DNA, 25 bp, Probe sequence
attgtctcgtacttgaaaattccag

SEQ ID NO: 87419 - DNA, 25 bp, Probe sequence
attccagtttctcactaatcacctt

SEQ ID NO: 87420 - DNA, 25 bp, Probe sequence
attcatacttaaattcttaggagga

SEQ ID NO: 87421 - DNA, 25 bp, Probe sequence
atcatcaactacaaaatccattatc

SEQ ID NO: 87422 - DNA, 25 bp, Probe sequence
agcactttatattatctttctttat

SEQ ID NO: 87423 - DNA, 25 bp, Probe sequence
aaaatccattatcaaagcactttat

SEQ ID NO: 87424 - DNA, 25 bp, Probe sequence
aattgatagttctaattcatactta

SEQ ID NO: 87425 - DNA, 25 bp, Probe sequence
caaagttatccagttgactattctg

SEQ ID NO: 87426 - DNA, 25 bp, Probe sequence
caccttcatccatctcgaacaaata

SEQ ID NO: 87427 - DNA, 25 bp, Probe sequence
gaatacaaatcttctttttttacat

SEQ ID NO: 87428 - DNA, 25 bp, Probe sequence
gaacaaatattctcacaccattatc

SEQ ID NO: 87429 - DNA, 25 bp, Probe sequence
gacacaaccttttaaatcatcaact

SEQ ID NO: 87430 - DNA, 25 bp, Probe sequence
gtaatcgttcactttacaaagttat

SEQ ID NO: 87431 - DNA, 25 bp, Probe sequence
tgtacacgtccaaacttttttatag

SEQ ID NO: 87432 - DNA, 25 bp, Probe sequence
ttctcacaccattatcaataaggtt

SEQ ID NO: 87433 - DNA, 25 bp, Probe sequence
atacttatcattttaagctagaggg

SEQ ID NO: 87434 - DNA, 25 bp, Probe sequence
agctatacttatcattttaagctag

SEQ ID NO: 87435 - DNA, 25 bp, Probe sequence
acttatcattttaagctagaggggg

SEQ ID NO: 87436 - DNA, 25 bp, Probe sequence
ctagctatacttatcattttaagct

SEQ ID NO: 87437 - DNA, 25 bp, Probe sequence
ctatacttatcattttaagctagag

SEQ ID NO: 87438 - DNA, 25 bp, Probe sequence
ctctagctatacttatcattttaag

SEQ ID NO: 87439 - DNA, 25 bp, Probe sequence
cccctctagctatacttatcatttt

SEQ ID NO: 87440 - DNA, 25 bp, Probe sequence
ccctctagctatacttatcatttta

SEQ ID NO: 87441 - DNA, 25 bp, Probe sequence
cctctagctatacttatcattttaa

SEQ ID NO: 87442 - DNA, 25 bp, Probe sequence
gctatacttatcattttaagctaga

SEQ ID NO: 87443 - DNA, 25 bp, Probe sequence
tctagctatacttatcattttaagc

SEQ ID NO: 87444 - DNA, 25 bp, Probe sequence
tatcattttaagctagagggggcgg

SEQ ID NO: 87445 - DNA, 25 bp, Probe sequence
tacttatcattttaagctagagggg

SEQ ID NO: 87446 - DNA, 25 bp, Probe sequence
tatacttatcattttaagctagagg

SEQ ID NO: 87447 - DNA, 25 bp, Probe sequence
ttatcattttaagctagagggggcg

SEQ ID NO: 87448 - DNA, 25 bp, Probe sequence
attattcttagcatactagtcggaa

SEQ ID NO: 87449 - DNA, 25 bp, Probe sequence
atattattcttagcatactagtcgg

SEQ ID NO: 87450 - DNA, 25 bp, Probe sequence
atgccctcttgaaatattttaaaat

SEQ ID NO: 87451 - DNA, 25 bp, Probe sequence
agcatactagtcggaattatattca

SEQ ID NO: 87452 - DNA, 25 bp, Probe sequence
aatattattcttagcatactagtcg

SEQ ID NO: 87453 - DNA, 25 bp, Probe sequence
aattaatattattcttagcatacta

SEQ ID NO: 87454 - DNA, 25 bp, Probe sequence
cttagcatactagtcggaattatat

SEQ ID NO: 87455 - DNA, 25 bp, Probe sequence
gcatactagtcggaattatattcaa

SEQ ID NO: 87456 - DNA, 25 bp, Probe sequence
gtcggaattatattcaaaaatttga

SEQ ID NO: 87457 - DNA, 25 bp, Probe sequence
tgccctcttgaaatattttaaaatt

SEQ ID NO: 87458 - DNA, 25 bp, Probe sequence
tattattcttagcatactagtcgga

SEQ ID NO: 87459 - DNA, 25 bp, Probe sequence
tattcttagcatactagtcggaatt

SEQ ID NO: 87460 - DNA, 25 bp, Probe sequence
ttcttagcatactagtcggaattat

SEQ ID NO: 87461 - DNA, 25 bp, Probe sequence
ttcaaaaatttgaggagtgacgttc

SEQ ID NO: 87462 - DNA, 25 bp, Probe sequence
ttaatattattcttagcatactagt

SEQ ID NO: 87463 - DNA, 25 bp, Probe sequence
acaacgtgtttgttcgaagcgtctt

SEQ ID NO: 87464 - DNA, 25 bp, Probe sequence
aatattcatcacttttttcctgtta

SEQ ID NO: 87465 - DNA, 25 bp, Probe sequence
cgaagcgtcttttcaaggttgatca

SEQ ID NO: 87466 - DNA, 25 bp, Probe sequence
gcatttaatgccctgcttcattttc

SEQ ID NO: 87467 - DNA, 25 bp, Probe sequence
gcatttgttttctcatatcttatct

SEQ ID NO: 87468 - DNA, 25 bp, Probe sequence
gacgaatcacacaagggcacactca

SEQ ID NO: 87469 - DNA, 25 bp, Probe sequence
gattcatcttaataagcccattcaa

SEQ ID NO: 87470 - DNA, 25 bp, Probe sequence
gtagcttttgaactaccacctgcac

SEQ ID NO: 87471 - DNA, 25 bp, Probe sequence
gtcatagccacatctcgattcaagg

SEQ ID NO: 87472 - DNA, 25 bp, Probe sequence
ggatggctcctgtgtattcctaaat

SEQ ID NO: 87473 - DNA, 25 bp, Probe sequence
ggcacactcatattcacatttacta

SEQ ID NO: 87474 - DNA, 25 bp, Probe sequence
tgcacacacgaaccctcaaaagatg

SEQ ID NO: 87475 - DNA, 25 bp, Probe sequence
tcacatttactacaaacgccttttt

SEQ ID NO: 87476 - DNA, 25 bp, Probe sequence
tcttatctcttatgacagtgcacga

SEQ ID NO: 87477 - DNA, 25 bp, Probe sequence
tttatcaaaccgtcatagccacatc

SEQ ID NO: 87478 - DNA, 25 bp, Probe sequence
atatcaaactaatttgtttcaggtt

SEQ ID NO: 87479 - DNA, 25 bp, Probe sequence
atatctactttgaagagagcatatc

SEQ ID NO: 87480 - DNA, 25 bp, Probe sequence
atagaactgtaatttactttcaaat

SEQ ID NO: 87481 - DNA, 25 bp, Probe sequence
atagctttgatttaaaaactgattt

SEQ ID NO: 87482 - DNA, 25 bp, Probe sequence
acaagctgatatactccattcaata

SEQ ID NO: 87483 - DNA, 25 bp, Probe sequence
aacctgaaacaagctgatatactcc

SEQ ID NO: 87484 - DNA, 25 bp, Probe sequence
aatactcaattcataaaacctgaaa

SEQ ID NO: 87485 - DNA, 25 bp, Probe sequence
aatactcaattcatatatagctttg

SEQ ID NO: 87486 - DNA, 25 bp, Probe sequence
gaagagagcatatcaaactaatttg

SEQ ID NO: 87487 - DNA, 25 bp, Probe sequence
gaacacaaatttaatactcaattca

SEQ ID NO: 87488 - DNA, 25 bp, Probe sequence
gaaacaagctgatatactccattca

SEQ ID NO: 87489 - DNA, 25 bp, Probe sequence
gattttttataaacctatagaactg

SEQ ID NO: 87490 - DNA, 25 bp, Probe sequence
tgtttcaggttttttaattattcat

SEQ ID NO: 87491 - DNA, 25 bp, Probe sequence
tatactccattcaatatctactttg

SEQ ID NO: 87492 - DNA, 25 bp, Probe sequence
tttactttcaaatttaatactcaat

SEQ ID NO: 87493 - DNA, 25 bp, Probe sequence
acgtttcactgcccgtagacaaacg

SEQ ID NO: 87494 - DNA, 25 bp, Probe sequence
acaaacttgaaatcactaacaataa

SEQ ID NO: 87495 - DNA, 25 bp, Probe sequence
aactatgtatgaagcaagactgacg

SEQ ID NO: 87496 - DNA, 25 bp, Probe sequence
aagcaagactgacgtttcactgccc

SEQ ID NO: 87497 - DNA, 25 bp, Probe sequence
cactgcccgtagacaaacgtcagta

SEQ ID NO: 87498 - DNA, 25 bp, Probe sequence
ctgcccgtagacaaacgtcagtata

SEQ ID NO: 87499 - DNA, 25 bp, Probe sequence
gcccgtagacaaacgtcagtataca

SEQ ID NO: 87500 - DNA, 25 bp, Probe sequence
gaagcaagactgacgtttcactgcc

SEQ ID NO: 87501 - DNA, 25 bp, Probe sequence
gacaaacgtcagtatacataaagta

SEQ ID NO: 87502 - DNA, 25 bp, Probe sequence
gtttcactgcccgtagacaaacgtc

SEQ ID NO: 87503 - DNA, 25 bp, Probe sequence
gtatatgcagaaaggactttaaagt

SEQ ID NO: 87504 - DNA, 25 bp, Probe sequence
tgaaatcactaacaataacgtttaa

SEQ ID NO: 87505 - DNA, 25 bp, Probe sequence
taacgtttaaactatgtatgaagca

SEQ ID NO: 87506 - DNA, 25 bp, Probe sequence
tttcactgcccgtagacaaacgtca

SEQ ID NO: 87507 - DNA, 25 bp, Probe sequence
ttcactgcccgtagacaaacgtcag

SEQ ID NO: 87508 - DNA, 25 bp, Probe sequence
atgaacaatcttttacagcaggcga

SEQ ID NO: 87509 - DNA, 25 bp, Probe sequence
atgagattactgtactgtctaattt

SEQ ID NO: 87510 - DNA, 25 bp, Probe sequence
actgtactgtctaatttaagatagt

SEQ ID NO: 87511 - DNA, 25 bp, Probe sequence
acagcaggcgattatgctataatat

SEQ ID NO: 87512 - DNA, 25 bp, Probe sequence
acaatcttttacagcaggcgattat

SEQ ID NO: 87513 - DNA, 25 bp, Probe sequence
aatcttttacagcaggcgattatgc

SEQ ID NO: 87514 - DNA, 25 bp, Probe sequence
caaaatgagattactgtactgtcta

SEQ ID NO: 87515 - DNA, 25 bp, Probe sequence
gcaggcgattatgctataatattat

SEQ ID NO: 87516 - DNA, 25 bp, Probe sequence
gaacaatcttttacagcaggcgatt

SEQ ID NO: 87517 - DNA, 25 bp, Probe sequence
gagattactgtactgtctaatttaa

SEQ ID NO: 87518 - DNA, 25 bp, Probe sequence
gatagtacagttttttataccattt

SEQ ID NO: 87519 - DNA, 25 bp, Probe sequence
gattactgtactgtctaatttaaga

SEQ ID NO: 87520 - DNA, 25 bp, Probe sequence
gtttatgaacaatcttttacagcag

SEQ ID NO: 87521 - DNA, 25 bp, Probe sequence
tttacagcaggcgattatgctataa

SEQ ID NO: 87522 - DNA, 25 bp, Probe sequence
ttatcacactgaattcaaaatgaga

SEQ ID NO: 87523 - DNA, 25 bp, Probe sequence
attttcggcattttttcaataactg

SEQ ID NO: 87524 - DNA, 25 bp, Probe sequence
ataactgcttaggtaatcttttaat

SEQ ID NO: 87525 - DNA, 25 bp, Probe sequence
atcaaataaactgtgaccatcatat

SEQ ID NO: 87526 - DNA, 25 bp, Probe sequence
agaaacttctaaagccatattcttt

SEQ ID NO: 87527 - DNA, 25 bp, Probe sequence
aaatcacccaccatggttacaattt

SEQ ID NO: 87528 - DNA, 25 bp, Probe sequence
aacgaatttgtcatgcaatcaatgt

SEQ ID NO: 87529 - DNA, 25 bp, Probe sequence
aatggctgaagctactcctagtatt

SEQ ID NO: 87530 - DNA, 25 bp, Probe sequence
cttaaaacctcctcagatttgtgtg

SEQ ID NO: 87531 - DNA, 25 bp, Probe sequence
gctactcctagtattgtgttgttac

SEQ ID NO: 87532 - DNA, 25 bp, Probe sequence
gagacgtttaatgcgaatgaagact

SEQ ID NO: 87533 - DNA, 25 bp, Probe sequence
gatttgtgtgaaacattttgctctt

SEQ ID NO: 87534 - DNA, 25 bp, Probe sequence
gtgaacgaacatgcataacgaattt

SEQ ID NO: 87535 - DNA, 25 bp, Probe sequence
gtgttgttactcatagtcatgtcgt

SEQ ID NO: 87536 - DNA, 25 bp, Probe sequence
tcatagtcatgtcgttcaaggcaac

SEQ ID NO: 87537 - DNA, 25 bp, Probe sequence
ttttgctcttaaattggtgctagat

SEQ ID NO: 87538 - DNA, 25 bp, Probe sequence
attgtaattttccaactactcaaat

SEQ ID NO: 87539 - DNA, 25 bp, Probe sequence
caaacaggtggttttattatatata

SEQ ID NO: 87540 - DNA, 25 bp, Probe sequence
cacccgtgcaaacaggtggttttat

SEQ ID NO: 87541 - DNA, 25 bp, Probe sequence
cttattgtaattttccaactactca

SEQ ID NO: 87542 - DNA, 25 bp, Probe sequence
cgtgcaaacaggtggttttattata

SEQ ID NO: 87543 - DNA, 25 bp, Probe sequence
ccgtgcaaacaggtggttttattat

SEQ ID NO: 87544 - DNA, 25 bp, Probe sequence
gcaaacaggtggttttattatatat

SEQ ID NO: 87545 - DNA, 25 bp, Probe sequence
gtgcaaacaggtggttttattatat

SEQ ID NO: 87546 - DNA, 25 bp, Probe sequence
tgtaattttccaactactcaaatta

SEQ ID NO: 87547 - DNA, 25 bp, Probe sequence
tgaattaaaacgcaaacttagaaca

SEQ ID NO: 87548 - DNA, 25 bp, Probe sequence
tccttattgtaattttccaactact

SEQ ID NO: 87549 - DNA, 25 bp, Probe sequence
taaaaaccacccgtgcaaacaggtg

SEQ ID NO: 87550 - DNA, 25 bp, Probe sequence
tattgtaattttccaactactcaaa

SEQ ID NO: 87551 - DNA, 25 bp, Probe sequence
ttattgtaattttccaactactcaa

SEQ ID NO: 87552 - DNA, 25 bp, Probe sequence
ttgtaattttccaactactcaaatt

SEQ ID NO: 87553 - DNA, 25 bp, Probe sequence
attccaatcataatattactctgca

SEQ ID NO: 87554 - DNA, 25 bp, Probe sequence
atgacatattctcagcgttttagct

SEQ ID NO: 87555 - DNA, 25 bp, Probe sequence
agatgatacgtcatctggcctcttt

SEQ ID NO: 87556 - DNA, 25 bp, Probe sequence
acacagccctgtatccgagtaaatg

SEQ ID NO: 87557 - DNA, 25 bp, Probe sequence
ctgcaaccaatatagacatcacaaa

SEQ ID NO: 87558 - DNA, 25 bp, Probe sequence
ccattccggcttcattctcttgaag

SEQ ID NO: 87559 - DNA, 25 bp, Probe sequence
gccacatgtcattattatcgtagct

SEQ ID NO: 87560 - DNA, 25 bp, Probe sequence
gctgcgtcactcaaaacgaatacgg

SEQ ID NO: 87561 - DNA, 25 bp, Probe sequence
gaaatatacaacaatctgcaaccaa

SEQ ID NO: 87562 - DNA, 25 bp, Probe sequence
ggaacgcgttggttattccaatcat

SEQ ID NO: 87563 - DNA, 25 bp, Probe sequence
tgatttacaaattcccggtaaccat

SEQ ID NO: 87564 - DNA, 25 bp, Probe sequence
tcccggtaaccattccggcttcatt

SEQ ID NO: 87565 - DNA, 25 bp, Probe sequence
tcatctggcctctttttttatataa

SEQ ID NO: 87566 - DNA, 25 bp, Probe sequence
tatcgtagctagctgcgtcactcaa

SEQ ID NO: 87567 - DNA, 25 bp, Probe sequence
ttactctgcaaatacacagccctgt

SEQ ID NO: 87568 - DNA, 25 bp, Probe sequence
attcgcttataattagatgttcaat

SEQ ID NO: 87569 - DNA, 25 bp, Probe sequence
atacaaaattgatgagttccaccta

SEQ ID NO: 87570 - DNA, 25 bp, Probe sequence
atctattttcgtaccattcatgtta

SEQ ID NO: 87571 - DNA, 25 bp, Probe sequence
agatgttcaatatagacttttttac

SEQ ID NO: 87572 - DNA, 25 bp, Probe sequence
agacttttttacacatacatgaact

SEQ ID NO: 87573 - DNA, 25 bp, Probe sequence
agaaggtcattgcgaaatttgctaa

SEQ ID NO: 87574 - DNA, 25 bp, Probe sequence
aaattgatgagttccacctaataaa

SEQ ID NO: 87575 - DNA, 25 bp, Probe sequence
aagtaagttagattgcttttagcat

SEQ ID NO: 87576 - DNA, 25 bp, Probe sequence
aattgttggttttatagtaacatct

SEQ ID NO: 87577 - DNA, 25 bp, Probe sequence
gagttccacctaataaaaattgttg

SEQ ID NO: 87578 - DNA, 25 bp, Probe sequence
gtaccattcatgttaatttcagtgc

SEQ ID NO: 87579 - DNA, 25 bp, Probe sequence
ggtcattgcgaaatttgctaaatac

SEQ ID NO: 87580 - DNA, 25 bp, Probe sequence
tgttaatttcagtgctaataatgct

SEQ ID NO: 87581 - DNA, 25 bp, Probe sequence
taacatctattttcgtaccattcat

SEQ ID NO: 87582 - DNA, 25 bp, Probe sequence
tttagcattaggaattcgcttataa

SEQ ID NO: 87583 - DNA, 25 bp, Probe sequence
atcgtctacacttaattgaacaaat

SEQ ID NO: 87584 - DNA, 25 bp, Probe sequence
atgatgtgtcagtgaatcgtctaca

SEQ ID NO: 87585 - DNA, 25 bp, Probe sequence
atgtgtcagtgaatcgtctacactt

SEQ ID NO: 87586 - DNA, 25 bp, Probe sequence
acacttaattgaacaaattctatga

SEQ ID NO: 87587 - DNA, 25 bp, Probe sequence
cttatgatgtgtcagtgaatcgtct

SEQ ID NO: 87588 - DNA, 25 bp, Probe sequence
gaatcgtctacacttaattgaacaa

SEQ ID NO: 87589 - DNA, 25 bp, Probe sequence
gatgtgtcagtgaatcgtctacact

SEQ ID NO: 87590 - DNA, 25 bp, Probe sequence
gtgaatcgtctacacttaattgaac

SEQ ID NO: 87591 - DNA, 25 bp, Probe sequence
gtcagtgaatcgtctacacttaatt

SEQ ID NO: 87592 - DNA, 25 bp, Probe sequence
gtctacacttaattgaacaaattct

SEQ ID NO: 87593 - DNA, 25 bp, Probe sequence
gtgtcagtgaatcgtctacacttaa

SEQ ID NO: 87594 - DNA, 25 bp, Probe sequence
tgtgtcagtgaatcgtctacactta

SEQ ID NO: 87595 - DNA, 25 bp, Probe sequence
tgaatcgtctacacttaattgaaca

SEQ ID NO: 87596 - DNA, 25 bp, Probe sequence
tatgatgtgtcagtgaatcgtctac

SEQ ID NO: 87597 - DNA, 25 bp, Probe sequence
ttatgatgtgtcagtgaatcgtcta

SEQ ID NO: 87598 - DNA, 25 bp, Probe sequence
atttcatcctaattatttcaagcag

SEQ ID NO: 87599 - DNA, 25 bp, Probe sequence
agaacttcggtgttgattggcatta

SEQ ID NO: 87600 - DNA, 25 bp, Probe sequence
acccatgatttcgaaattcccgtat

SEQ ID NO: 87601 - DNA, 25 bp, Probe sequence
aaactcagagtatttcatcctaatt

SEQ ID NO: 87602 - DNA, 25 bp, Probe sequence
caagcagaggtgacagtagcgtttc

SEQ ID NO: 87603 - DNA, 25 bp, Probe sequence
cccatatctgttttaatttttagct

SEQ ID NO: 87604 - DNA, 25 bp, Probe sequence
gagtgttttgggtgtggacgttcat

SEQ ID NO: 87605 - DNA, 25 bp, Probe sequence
gagtttggagggtttgagtgttttg

SEQ ID NO: 87606 - DNA, 25 bp, Probe sequence
gaggacatgagaacttcggtgttga

SEQ ID NO: 87607 - DNA, 25 bp, Probe sequence
gggtgtggacgttcataaactcaga

SEQ ID NO: 87608 - DNA, 25 bp, Probe sequence
ggtgtttgggggtttggagatgtag

SEQ ID NO: 87609 - DNA, 25 bp, Probe sequence
ggttcctactctcatggatctatta

SEQ ID NO: 87610 - DNA, 25 bp, Probe sequence
ggagatgtagtctggggttgagagt

SEQ ID NO: 87611 - DNA, 25 bp, Probe sequence
ggctactttatctattgcatcaatc

SEQ ID NO: 87612 - DNA, 25 bp, Probe sequence
tgacagtagcgtttcctctgtttcc

SEQ ID NO: 87613 - DNA, 25 bp, Probe sequence
atcgaataagtattatgttatgtat

SEQ ID NO: 87614 - DNA, 25 bp, Probe sequence
acaatcgaataagtattatgttatg

SEQ ID NO: 87615 - DNA, 25 bp, Probe sequence
aaacaatcgaataagtattatgtta

SEQ ID NO: 87616 - DNA, 25 bp, Probe sequence
aaaacaatcgaataagtattatgtt

SEQ ID NO: 87617 - DNA, 25 bp, Probe sequence
aacaatcgaataagtattatgttat

SEQ ID NO: 87618 - DNA, 25 bp, Probe sequence
aatcgaataagtattatgttatgta

SEQ ID NO: 87619 - DNA, 25 bp, Probe sequence
aataagtattatgttatgtatataa

SEQ ID NO: 87620 - DNA, 25 bp, Probe sequence
caatcgaataagtattatgttatgt

SEQ ID NO: 87621 - DNA, 25 bp, Probe sequence
cgaataagtattatgttatgtatat

SEQ ID NO: 87622 - DNA, 25 bp, Probe sequence
gaataagtattatgttatgtatata

SEQ ID NO: 87623 - DNA, 25 bp, Probe sequence
gaaaacaatcgaataagtattatgt

SEQ ID NO: 87624 - DNA, 25 bp, Probe sequence
tgttttgaaaacaatcgaataagta

SEQ ID NO: 87625 - DNA, 25 bp, Probe sequence
tgaaaacaatcgaataagtattatg

SEQ ID NO: 87626 - DNA, 25 bp, Probe sequence
tcgaataagtattatgttatgtata

SEQ ID NO: 87627 - DNA, 25 bp, Probe sequence
ttttgaaaacaatcgaataagtatt

SEQ ID NO: 87628 - DNA, 25 bp, Probe sequence
attatattgaggcgctatccccttt

SEQ ID NO: 87629 - DNA, 25 bp, Probe sequence
atccgtcgagactcttttttataca

SEQ ID NO: 87630 - DNA, 25 bp, Probe sequence
atgctaactgttattaatcaattct

SEQ ID NO: 87631 - DNA, 25 bp, Probe sequence
atgaacaatctacctacattatatt

SEQ ID NO: 87632 - DNA, 25 bp, Probe sequence
actaaacttgaatcattgttaaggt

SEQ ID NO: 87633 - DNA, 25 bp, Probe sequence
aacagacatcatattgtcgtagtac

SEQ ID NO: 87634 - DNA, 25 bp, Probe sequence
aactttcagacacaaaacagacatc

SEQ ID NO: 87635 - DNA, 25 bp, Probe sequence
aatcaattcttatccgtcgagactc

SEQ ID NO: 87636 - DNA, 25 bp, Probe sequence
aatcacactttataccatttttatt

SEQ ID NO: 87637 - DNA, 25 bp, Probe sequence
aattcttatccgtcgagactctttt

SEQ ID NO: 87638 - DNA, 25 bp, Probe sequence
gactcttttttatacaaatcacact

SEQ ID NO: 87639 - DNA, 25 bp, Probe sequence
tacgtaatatgaacaatctacctac

SEQ ID NO: 87640 - DNA, 25 bp, Probe sequence
tatcccctttcaaattaaacctcat

SEQ ID NO: 87641 - DNA, 25 bp, Probe sequence
tttgatttttcaattacgtaatatg

SEQ ID NO: 87642 - DNA, 25 bp, Probe sequence
ttagccccaatctatttaaatttga

SEQ ID NO: 87643 - DNA, 25 bp, Probe sequence
attatttcgtcgtcaagtatgtgta

SEQ ID NO: 87644 - DNA, 25 bp, Probe sequence
atatagcgtttctatgtgcctttga

SEQ ID NO: 87645 - DNA, 25 bp, Probe sequence
agcaacgtttgatcgtcacttaacc

SEQ ID NO: 87646 - DNA, 25 bp, Probe sequence
agcgtttctatgtgcctttgaaatg

SEQ ID NO: 87647 - DNA, 25 bp, Probe sequence
acttaacctctctatttcaatttca

SEQ ID NO: 87648 - DNA, 25 bp, Probe sequence
aacgtttgatcgtcacttaacctct

SEQ ID NO: 87649 - DNA, 25 bp, Probe sequence
aacctctctatttcaatttcaaatt

SEQ ID NO: 87650 - DNA, 25 bp, Probe sequence
gttaagcaacgtttgatcgtcactt

SEQ ID NO: 87651 - DNA, 25 bp, Probe sequence
gtgcctttgaaatgatttttaagca

SEQ ID NO: 87652 - DNA, 25 bp, Probe sequence
tctatgtgcctttgaaatgattttt

SEQ ID NO: 87653 - DNA, 25 bp, Probe sequence
tcacttaacctctctatttcaattt

SEQ ID NO: 87654 - DNA, 25 bp, Probe sequence
tcaatttcaaattatttcgtcgtca

SEQ ID NO: 87655 - DNA, 25 bp, Probe sequence
tttcaaattatttcgtcgtcaagta

SEQ ID NO: 87656 - DNA, 25 bp, Probe sequence
ttatgaggttaatatagcgtttcta

SEQ ID NO: 87657 - DNA, 25 bp, Probe sequence
ttaacctctctatttcaatttcaaa

SEQ ID NO: 87658 - DNA, 25 bp, Probe sequence
agcaacatgtaaaccgttgtcactt

SEQ ID NO: 87659 - DNA, 25 bp, Probe sequence
acttcttgttttaccgatgtcagct

SEQ ID NO: 87660 - DNA, 25 bp, Probe sequence
acatgtaaaccgttgtcacttaact

SEQ ID NO: 87661 - DNA, 25 bp, Probe sequence
taaaccgttgtcacttaacttcttg

SEQ ID NO: 87662 - DNA, 25 bp, Probe sequence
cacttaacttcttgttttaccgatg

SEQ ID NO: 87663 - DNA, 25 bp, Probe sequence
cttgttttaccgatgtcagcttcta

SEQ ID NO: 87664 - DNA, 25 bp, Probe sequence
gaatattcgtcttttacatcattac

SEQ ID NO: 87665 - DNA, 25 bp, Probe sequence
gtcttttacatcattacgcataata

SEQ ID NO: 87666 - DNA, 25 bp, Probe sequence
tgtcacttaacttcttgttttaccg

SEQ ID NO: 87667 - DNA, 25 bp, Probe sequence
tgtaaaccgttgtcacttaacttct

SEQ ID NO: 87668 - DNA, 25 bp, Probe sequence
tgttttaccgatgtcagcttctatt

SEQ ID NO: 87669 - DNA, 25 bp, Probe sequence
taacttcttgttttaccgatgtcag

SEQ ID NO: 87670 - DNA, 25 bp, Probe sequence
tattcgtcttttacatcattacgca

SEQ ID NO: 87671 - DNA, 25 bp, Probe sequence
ttcttgttttaccgatgtcagcttc

SEQ ID NO: 87672 - DNA, 25 bp, Probe sequence
ttcgtcttttacatcattacgcata

SEQ ID NO: 87673 - DNA, 25 bp, Probe sequence
attgctccattcacattaaaccttg

SEQ ID NO: 87674 - DNA, 25 bp, Probe sequence
attagatttgttcgattacattcat

SEQ ID NO: 87675 - DNA, 25 bp, Probe sequence
atagatggcgtattgctccattcac

SEQ ID NO: 87676 - DNA, 25 bp, Probe sequence
atggcgtattgctccattcacatta

SEQ ID NO: 87677 - DNA, 25 bp, Probe sequence
agatggcgtattgctccattcacat

SEQ ID NO: 87678 - DNA, 25 bp, Probe sequence
cattcacattaaaccttgtttaact

SEQ ID NO: 87679 - DNA, 25 bp, Probe sequence
ctccattcacattaaaccttgttta

SEQ ID NO: 87680 - DNA, 25 bp, Probe sequence
gcgtattgctccattcacattaaac

SEQ ID NO: 87681 - DNA, 25 bp, Probe sequence
gctttattatagatggcgtattgct

SEQ ID NO: 87682 - DNA, 25 bp, Probe sequence
gatttgttcgattacattcattgaa

SEQ ID NO: 87683 - DNA, 25 bp, Probe sequence
gattacattcattgaatcatacagc

SEQ ID NO: 87684 - DNA, 25 bp, Probe sequence
gtattgctccattcacattaaacct

SEQ ID NO: 87685 - DNA, 25 bp, Probe sequence
tggcgtattgctccattcacattaa

SEQ ID NO: 87686 - DNA, 25 bp, Probe sequence
tgttcgattacattcattgaatcat

SEQ ID NO: 87687 - DNA, 25 bp, Probe sequence
tgctccattcacattaaaccttgtt

SEQ ID NO: 87688 - DNA, 25 bp, Probe sequence
agcaacatgtaggccgttgtcactg

SEQ ID NO: 87689 - DNA, 25 bp, Probe sequence
catgtaggccgttgtcactgaactt

SEQ ID NO: 87690 - DNA, 25 bp, Probe sequence
acttcttgtttttccgatgacagct

SEQ ID NO: 87691 - DNA, 25 bp, Probe sequence
ctgaacttcttgtttttccgatgac

SEQ ID NO: 87692 - DNA, 25 bp, Probe sequence
ccgatagatagggatttacagataa

SEQ ID NO: 87693 - DNA, 25 bp, Probe sequence
ccacgtcatatttggacccatcgaa

SEQ ID NO: 87694 - DNA, 25 bp, Probe sequence
gacccatcgaaaattcgggttctca

SEQ ID NO: 87695 - DNA, 25 bp, Probe sequence
gaaaattcgggttctcaaatcatcg

SEQ ID NO: 87696 - DNA, 25 bp, Probe sequence
gactcttccacgtcatatttggacc

SEQ ID NO: 87697 - DNA, 25 bp, Probe sequence
gataaattcaggactcttccacgtc

SEQ ID NO: 87698 - DNA, 25 bp, Probe sequence
gtttttccgatgacagcttctattt

SEQ ID NO: 87699 - DNA, 25 bp, Probe sequence
gtcactgaacttcttgtttttccga

SEQ ID NO: 87700 - DNA, 25 bp, Probe sequence
gggttctcaaatcatcgaacataac

SEQ ID NO: 87701 - DNA, 25 bp, Probe sequence
taaattcaggactcttccacgtcat

SEQ ID NO: 87702 - DNA, 25 bp, Probe sequence
tttccgatgacagcttctatttaga

SEQ ID NO: 87703 - DNA, 25 bp, Probe sequence
atttgttcgcttacgtctattgaat

SEQ ID NO: 87704 - DNA, 25 bp, Probe sequence
agatttgttcgcttacgtctattga

SEQ ID NO: 87705 - DNA, 25 bp, Probe sequence
cgcttacgtctattgaatcatacag

SEQ ID NO: 87706 - DNA, 25 bp, Probe sequence
gctttattataattggcgtatttga

SEQ ID NO: 87707 - DNA, 25 bp, Probe sequence
gcttacgtctattgaatcatacagc

SEQ ID NO: 87708 - DNA, 25 bp, Probe sequence
gatttgttcgcttacgtctattgaa

SEQ ID NO: 87709 - DNA, 25 bp, Probe sequence
gttcgcttacgtctattgaatcata

SEQ ID NO: 87710 - DNA, 25 bp, Probe sequence
tgttcgcttacgtctattgaatcat

SEQ ID NO: 87711 - DNA, 25 bp, Probe sequence
tcgcttacgtctattgaatcataca

SEQ ID NO: 87712 - DNA, 25 bp, Probe sequence
tataattggcgtatttgacctttca

SEQ ID NO: 87713 - DNA, 25 bp, Probe sequence
tattagatttgttcgcttacgtcta

SEQ ID NO: 87714 - DNA, 25 bp, Probe sequence
tttgttcgcttacgtctattgaatc

SEQ ID NO: 87715 - DNA, 25 bp, Probe sequence
ttataattggcgtatttgacctttc

SEQ ID NO: 87716 - DNA, 25 bp, Probe sequence
ttagatttgttcgcttacgtctatt

SEQ ID NO: 87717 - DNA, 25 bp, Probe sequence
ttgttcgcttacgtctattgaatca

SEQ ID NO: 87718 - DNA, 25 bp, Probe sequence
attggtgtttttattattcatcgat

SEQ ID NO: 87719 - DNA, 25 bp, Probe sequence
attcatcgatacgcttcattttcat

SEQ ID NO: 87720 - DNA, 25 bp, Probe sequence
agtactattctcccaatctatttat

SEQ ID NO: 87721 - DNA, 25 bp, Probe sequence
actgcgctatgaattaacctctttt

SEQ ID NO: 87722 - DNA, 25 bp, Probe sequence
ctaactcctctatactatccatatt

SEQ ID NO: 87723 - DNA, 25 bp, Probe sequence
gcgacatcacgcatctataagtatc

SEQ ID NO: 87724 - DNA, 25 bp, Probe sequence
gctaattttttaactattcacactt

SEQ ID NO: 87725 - DNA, 25 bp, Probe sequence
gcaacttatgttgcctaactcctct

SEQ ID NO: 87726 - DNA, 25 bp, Probe sequence
gttttccacattgtttcatgtcact

SEQ ID NO: 87727 - DNA, 25 bp, Probe sequence
gtatcaactatttccacaagtttta

SEQ ID NO: 87728 - DNA, 25 bp, Probe sequence
gtaatacgaacaatctactatcatt

SEQ ID NO: 87729 - DNA, 25 bp, Probe sequence
gtcactaaagcgacatcacgcatct

SEQ ID NO: 87730 - DNA, 25 bp, Probe sequence
tcattttcatctcgccaacacaaaa

SEQ ID NO: 87731 - DNA, 25 bp, Probe sequence
tatccatattttactattatccata

SEQ ID NO: 87732 - DNA, 25 bp, Probe sequence
ttcacactttccctcaatttaatta

SEQ ID NO: 87733 - DNA, 25 bp, Probe sequence
attggattgcttttattacgtaatt

SEQ ID NO: 87734 - DNA, 25 bp, Probe sequence
atattcaatggacatcactttcaga

SEQ ID NO: 87735 - DNA, 25 bp, Probe sequence
agctgcttcaaatttattactttaa

SEQ ID NO: 87736 - DNA, 25 bp, Probe sequence
acatttcatcgttaagctgcttcaa

SEQ ID NO: 87737 - DNA, 25 bp, Probe sequence
aacataaaaacagcctaacgacact

SEQ ID NO: 87738 - DNA, 25 bp, Probe sequence
aagggcattgagacagactgacatt

SEQ ID NO: 87739 - DNA, 25 bp, Probe sequence
cagcctaacgacactgttgatttag

SEQ ID NO: 87740 - DNA, 25 bp, Probe sequence
cagactgacattaacactcgtttaa

SEQ ID NO: 87741 - DNA, 25 bp, Probe sequence
gctcataccctgcgttataaaacat

SEQ ID NO: 87742 - DNA, 25 bp, Probe sequence
gaatttttagtacgctcataccctg

SEQ ID NO: 87743 - DNA, 25 bp, Probe sequence
gtacgtatttattcaacatttcatc

SEQ ID NO: 87744 - DNA, 25 bp, Probe sequence
ggacatcactttcagaagtaatgtg

SEQ ID NO: 87745 - DNA, 25 bp, Probe sequence
tgatttagatacgcccctttttgga

SEQ ID NO: 87746 - DNA, 25 bp, Probe sequence
tacgcccctttttggaggatgtacg

SEQ ID NO: 87747 - DNA, 25 bp, Probe sequence
tagtacgctcataccctgcgttata

SEQ ID NO: 87748 - DNA, 25 bp, Probe sequence
attggattgttatgattacgtaatt

SEQ ID NO: 87749 - DNA, 25 bp, Probe sequence
atcaaacgtattttaacattcgtat

SEQ ID NO: 87750 - DNA, 25 bp, Probe sequence
atctgtctttattataaggtgcatc

SEQ ID NO: 87751 - DNA, 25 bp, Probe sequence
accgcttcttaagcttttattctat

SEQ ID NO: 87752 - DNA, 25 bp, Probe sequence
acatgggattattaaaccgcttctt

SEQ ID NO: 87753 - DNA, 25 bp, Probe sequence
aaagcagcttaataacgtagtcaat

SEQ ID NO: 87754 - DNA, 25 bp, Probe sequence
aaggtgcatcaaaacagactgacat

SEQ ID NO: 87755 - DNA, 25 bp, Probe sequence
cagactgacattaacgctcatttaa

SEQ ID NO: 87756 - DNA, 25 bp, Probe sequence
cgtagtcaatgttcgatatgttttt

SEQ ID NO: 87757 - DNA, 25 bp, Probe sequence
gttctttccgattagttttagatct

SEQ ID NO: 87758 - DNA, 25 bp, Probe sequence
gggggaatcattgttctttccgatt

SEQ ID NO: 87759 - DNA, 25 bp, Probe sequence
taagcttttattctatatatcattg

SEQ ID NO: 87760 - DNA, 25 bp, Probe sequence
taacattcgtattaactgattttta

SEQ ID NO: 87761 - DNA, 25 bp, Probe sequence
tacgtaatttgaactatctgtcttt

SEQ ID NO: 87762 - DNA, 25 bp, Probe sequence
ttagatcttaagttattcgatacaa

SEQ ID NO: 87763 - DNA, 25 bp, Probe sequence
attggattgttttcattacgtaatt

SEQ ID NO: 87764 - DNA, 25 bp, Probe sequence
atgttcaggttaaatgactttcatt

SEQ ID NO: 87765 - DNA, 25 bp, Probe sequence
actctgttctgctctttgaattaca

SEQ ID NO: 87766 - DNA, 25 bp, Probe sequence
aagtcgcttcttaagctattatgct

SEQ ID NO: 87767 - DNA, 25 bp, Probe sequence
cacattttgtcgttaagtcgcttct

SEQ ID NO: 87768 - DNA, 25 bp, Probe sequence
gactttcattatttcatttagttgt

SEQ ID NO: 87769 - DNA, 25 bp, Probe sequence
gtttcatacgataattaacctcgat

SEQ ID NO: 87770 - DNA, 25 bp, Probe sequence
ggattatcgtttactacaactgatg

SEQ ID NO: 87771 - DNA, 25 bp, Probe sequence
ggacacagatgtcaattcacatttt

SEQ ID NO: 87772 - DNA, 25 bp, Probe sequence
tgatgatgttactctgttctgctct

SEQ ID NO: 87773 - DNA, 25 bp, Probe sequence
taacctcgatttaaatatacttgaa

SEQ ID NO: 87774 - DNA, 25 bp, Probe sequence
tagttgttttactggattatcgttt

SEQ ID NO: 87775 - DNA, 25 bp, Probe sequence
tatttaacacagttccttatataag

SEQ ID NO: 87776 - DNA, 25 bp, Probe sequence
ttataacgtgcatcgtttcatacga

SEQ ID NO: 87777 - DNA, 25 bp, Probe sequence
ttaagctattatgctattaactcaa

SEQ ID NO: 87778 - DNA, 25 bp, Probe sequence
attcaattcctatcgatctactctc

SEQ ID NO: 87779 - DNA, 25 bp, Probe sequence
atctttatttaactacttattctgt

SEQ ID NO: 87780 - DNA, 25 bp, Probe sequence
atcgatctactctcttttatttacg

SEQ ID NO: 87781 - DNA, 25 bp, Probe sequence
agttaactaatatcattcaattcct

SEQ ID NO: 87782 - DNA, 25 bp, Probe sequence
agacactgcgctttcacagtgccta

SEQ ID NO: 87783 - DNA, 25 bp, Probe sequence
aacactttatctcaacttaatcttt

SEQ ID NO: 87784 - DNA, 25 bp, Probe sequence
aattttattcttatgcaatctatgt

SEQ ID NO: 87785 - DNA, 25 bp, Probe sequence
gcaatacgaacaatcctcattcatt

SEQ ID NO: 87786 - DNA, 25 bp, Probe sequence
gatttattctattacgcaatacgaa

SEQ ID NO: 87787 - DNA, 25 bp, Probe sequence
gtcgtgcttcacattaaacttactt

SEQ ID NO: 87788 - DNA, 25 bp, Probe sequence
tgagcaatggtcgtgcttcacatta

SEQ ID NO: 87789 - DNA, 25 bp, Probe sequence
tcactttacttttacaacttttatg

SEQ ID NO: 87790 - DNA, 25 bp, Probe sequence
tatgctcccaatttttagtctattt

SEQ ID NO: 87791 - DNA, 25 bp, Probe sequence
ttcgacacaaaaaagacactgcgct

SEQ ID NO: 87792 - DNA, 25 bp, Probe sequence
tattctgtacacaatttcgacacaa

SEQ ID NO: 87793 - DNA, 25 bp, Probe sequence
attcaataatgctttgtaacgaagc

SEQ ID NO: 87794 - DNA, 25 bp, Probe sequence
attaactcactaatttcattacatc

SEQ ID NO: 87795 - DNA, 25 bp, Probe sequence
attacatcattaagctgttttattt

SEQ ID NO: 87796 - DNA, 25 bp, Probe sequence
ataaaaaacagctcaatgacgttga

SEQ ID NO: 87797 - DNA, 25 bp, Probe sequence
atcattaagctgttttattttatta

SEQ ID NO: 87798 - DNA, 25 bp, Probe sequence
agctcaatgacgttgaagtcagtga

SEQ ID NO: 87799 - DNA, 25 bp, Probe sequence
acagctcaatgacgttgaagtcagt

SEQ ID NO: 87800 - DNA, 25 bp, Probe sequence
aaaacagctcaatgacgttgaagtc

SEQ ID NO: 87801 - DNA, 25 bp, Probe sequence
aactcactaatttcattacatcatt

SEQ ID NO: 87802 - DNA, 25 bp, Probe sequence
aatttcattacatcattaagctgtt

SEQ ID NO: 87803 - DNA, 25 bp, Probe sequence
ctcactaatttcattacatcattaa

SEQ ID NO: 87804 - DNA, 25 bp, Probe sequence
gaagtcagtgattaactcactaatt

SEQ ID NO: 87805 - DNA, 25 bp, Probe sequence
gacgttgaagtcagtgattaactca

SEQ ID NO: 87806 - DNA, 25 bp, Probe sequence
gtgattaactcactaatttcattac

SEQ ID NO: 87807 - DNA, 25 bp, Probe sequence
ttcattacatcattaagctgtttta

SEQ ID NO: 87808 - DNA, 25 bp, Probe sequence
attatgttgcattattttttattat

SEQ ID NO: 87809 - DNA, 25 bp, Probe sequence
attttttattattgtttcatttgat

SEQ ID NO: 87810 - DNA, 25 bp, Probe sequence
atttgtacttattattatgttgcat

SEQ ID NO: 87811 - DNA, 25 bp, Probe sequence
atattctcttttcatataaataatt

SEQ ID NO: 87812 - DNA, 25 bp, Probe sequence
atacaatcaatttaatttcttaatt

SEQ ID NO: 87813 - DNA, 25 bp, Probe sequence
acatatacaatcaatttaatttctt

SEQ ID NO: 87814 - DNA, 25 bp, Probe sequence
tgtatatttctcttttacgttacca

SEQ ID NO: 87815 - DNA, 25 bp, Probe sequence
tgtacttattattatgttgcattat

SEQ ID NO: 87816 - DNA, 25 bp, Probe sequence
taattattttgtatatttctctttt

SEQ ID NO: 87817 - DNA, 25 bp, Probe sequence
tagtaggaaaaatccataaacaccg

SEQ ID NO: 87818 - DNA, 25 bp, Probe sequence
tatgttgcattattttttattattg

SEQ ID NO: 87819 - DNA, 25 bp, Probe sequence
tattttgtatatttctcttttacgt

SEQ ID NO: 87820 - DNA, 25 bp, Probe sequence
tattgtttcatttgatttaaaccct

SEQ ID NO: 87821 - DNA, 25 bp, Probe sequence
ttttattattgtttcatttgattta

SEQ ID NO: 87822 - DNA, 25 bp, Probe sequence
ttacgttaccaaaatatacatatac

SEQ ID NO: 87823 - DNA, 25 bp, Probe sequence
atatttgttgagtactatcaacctt

SEQ ID NO: 87824 - DNA, 25 bp, Probe sequence
agtactatcaacctttgtgttattt

SEQ ID NO: 87825 - DNA, 25 bp, Probe sequence
cacttctctctatcatgttaatatt

SEQ ID NO: 87826 - DNA, 25 bp, Probe sequence
gagtactatcaacctttgtgttatt

SEQ ID NO: 87827 - DNA, 25 bp, Probe sequence
gttgagtactatcaacctttgtgtt

SEQ ID NO: 87828 - DNA, 25 bp, Probe sequence
tgttgagtactatcaacctttgtgt

SEQ ID NO: 87829 - DNA, 25 bp, Probe sequence
tgttaatatttgttgagtactatca

SEQ ID NO: 87830 - DNA, 25 bp, Probe sequence
tgagtactatcaacctttgtgttat

SEQ ID NO: 87831 - DNA, 25 bp, Probe sequence
tcacttctctctatcatgttaatat

SEQ ID NO: 87832 - DNA, 25 bp, Probe sequence
tttgttgagtactatcaacctttgt

SEQ ID NO: 87833 - DNA, 25 bp, Probe sequence
tttcacttctctctatcatgttaat

SEQ ID NO: 87834 - DNA, 25 bp, Probe sequence
tttttcacttctctctatcatgtta

SEQ ID NO: 87835 - DNA, 25 bp, Probe sequence
ttttcacttctctctatcatgttaa

SEQ ID NO: 87836 - DNA, 25 bp, Probe sequence
ttcacttctctctatcatgttaata

SEQ ID NO: 87837 - DNA, 25 bp, Probe sequence
ttgagtactatcaacctttgtgtta

SEQ ID NO: 87838 - DNA, 25 bp, Probe sequence
actctctttattctcaatatttgct

SEQ ID NO: 87839 - DNA, 25 bp, Probe sequence
acaactctctttattctcaatattt

SEQ ID NO: 87840 - DNA, 25 bp, Probe sequence
aactctctttattctcaatatttgc

SEQ ID NO: 87841 - DNA, 25 bp, Probe sequence
caatatttgcttttgttgactaata

SEQ ID NO: 87842 - DNA, 25 bp, Probe sequence
caactctctttattctcaatatttg

SEQ ID NO: 87843 - DNA, 25 bp, Probe sequence
cacaactctctttattctcaatatt

SEQ ID NO: 87844 - DNA, 25 bp, Probe sequence
ctttattctcaatatttgcttttgt

SEQ ID NO: 87845 - DNA, 25 bp, Probe sequence
ctctttattctcaatatttgctttt

SEQ ID NO: 87846 - DNA, 25 bp, Probe sequence
ctctctttattctcaatatttgctt

SEQ ID NO: 87847 - DNA, 25 bp, Probe sequence
gcttttgttgactaatatcaacttt

SEQ ID NO: 87848 - DNA, 25 bp, Probe sequence
tcacaactctctttattctcaatat

SEQ ID NO: 87849 - DNA, 25 bp, Probe sequence
tatttgcttttgttgactaatatca

SEQ ID NO: 87850 - DNA, 25 bp, Probe sequence
ttattctcaatatttgcttttgttg

SEQ ID NO: 87851 - DNA, 25 bp, Probe sequence
ttctcaatatttgcttttgttgact

SEQ ID NO: 87852 - DNA, 25 bp, Probe sequence
ttcacaactctctttattctcaata

SEQ ID NO: 87853 - DNA, 25 bp, Probe sequence
attcaatttaatacatgtaattcat

SEQ ID NO: 87854 - DNA, 25 bp, Probe sequence
atgttctaacgtcattttttataat

SEQ ID NO: 87855 - DNA, 25 bp, Probe sequence
atgtaattcatttaactttattatt

SEQ ID NO: 87856 - DNA, 25 bp, Probe sequence
aatacatgtaattcatttaacttta

SEQ ID NO: 87857 - DNA, 25 bp, Probe sequence
aatagtgattattcaacttttatgt

SEQ ID NO: 87858 - DNA, 25 bp, Probe sequence
gtgattattcaacttttatgttatc

SEQ ID NO: 87859 - DNA, 25 bp, Probe sequence
tgttctaacgtcattttttataata

SEQ ID NO: 87860 - DNA, 25 bp, Probe sequence
tcaacttttatgttatcaaacaaaa

SEQ ID NO: 87861 - DNA, 25 bp, Probe sequence
taaatgttctaacgtcattttttat

SEQ ID NO: 87862 - DNA, 25 bp, Probe sequence
tacatgtaattcatttaactttatt

SEQ ID NO: 87863 - DNA, 25 bp, Probe sequence
tagtgattattcaacttttatgtta

SEQ ID NO: 87864 - DNA, 25 bp, Probe sequence
tatcaaacaaaactaacttattcaa

SEQ ID NO: 87865 - DNA, 25 bp, Probe sequence
tattaaatgttctaacgtcattttt

SEQ ID NO: 87866 - DNA, 25 bp, Probe sequence
tttattattaaatgttctaacgtca

SEQ ID NO: 87867 - DNA, 25 bp, Probe sequence
ttattattaaatgttctaacgtcat

SEQ ID NO: 87868 - DNA, 25 bp, Probe sequence
aaagaagcggcctagtgtcagttgt

SEQ ID NO: 87869 - DNA, 25 bp, Probe sequence
aagcggcctagtgtcagttgtgaat

SEQ ID NO: 87870 - DNA, 25 bp, Probe sequence
gcgggacagtaatttaagttgtgtt

SEQ ID NO: 87871 - DNA, 25 bp, Probe sequence
gaatatactgaacattggtcgcttt

SEQ ID NO: 87872 - DNA, 25 bp, Probe sequence
gaatgtagatatgtttaatgcggga

SEQ ID NO: 87873 - DNA, 25 bp, Probe sequence
gagagcgttactttacatggaaata

SEQ ID NO: 87874 - DNA, 25 bp, Probe sequence
gtgagtgtggtatttcgattaagag

SEQ ID NO: 87875 - DNA, 25 bp, Probe sequence
gtggtcatagcttttggtacttgag

SEQ ID NO: 87876 - DNA, 25 bp, Probe sequence
ggtgatgatgatctatagcgggtag

SEQ ID NO: 87877 - DNA, 25 bp, Probe sequence
ggtacttgaggattttgttgttgct

SEQ ID NO: 87878 - DNA, 25 bp, Probe sequence
ggttaacttgcgttgattttgataa

SEQ ID NO: 87879 - DNA, 25 bp, Probe sequence
tatagcgggtagttcgggagaggtt

SEQ ID NO: 87880 - DNA, 25 bp, Probe sequence
ttttgttgttgctgtttggaatgta

SEQ ID NO: 87881 - DNA, 25 bp, Probe sequence
ttcgggagaggttaacttgcgttga

SEQ ID NO: 87882 - DNA, 25 bp, Probe sequence
ttggtcgctttatttagtagtatga

SEQ ID NO: 87883 - DNA, 25 bp, Probe sequence
atataggagcgtttcctctttcgca

SEQ ID NO: 87884 - DNA, 25 bp, Probe sequence
atatataccctcacttcaatttatt

SEQ ID NO: 87885 - DNA, 25 bp, Probe sequence
atataccctcacttcaatttatttg

SEQ ID NO: 87886 - DNA, 25 bp, Probe sequence
ataccctcacttcaatttatttgta

SEQ ID NO: 87887 - DNA, 25 bp, Probe sequence
aattccgttttacattatataggag

SEQ ID NO: 87888 - DNA, 25 bp, Probe sequence
ccctcacttcaatttatttgtaaat

SEQ ID NO: 87889 - DNA, 25 bp, Probe sequence
cctctttcgcaatcttcgataataa

SEQ ID NO: 87890 - DNA, 25 bp, Probe sequence
ggaataattccgttttacattatat

SEQ ID NO: 87891 - DNA, 25 bp, Probe sequence
tcctctttcgcaatcttcgataata

SEQ ID NO: 87892 - DNA, 25 bp, Probe sequence
tctttcgcaatcttcgataataaaa

SEQ ID NO: 87893 - DNA, 25 bp, Probe sequence
taccctcacttcaatttatttgtaa

SEQ ID NO: 87894 - DNA, 25 bp, Probe sequence
tatataggagcgtttcctctttcgc

SEQ ID NO: 87895 - DNA, 25 bp, Probe sequence
tataccctcacttcaatttatttgt

SEQ ID NO: 87896 - DNA, 25 bp, Probe sequence
tttcctctttcgcaatcttcgataa

SEQ ID NO: 87897 - DNA, 25 bp, Probe sequence
ttcctctttcgcaatcttcgataat

SEQ ID NO: 87898 - DNA, 25 bp, Probe sequence
attgcaaacaattaagccacaattc

SEQ ID NO: 87899 - DNA, 25 bp, Probe sequence
acaattaagccacaattcaaaaatg

SEQ ID NO: 87900 - DNA, 25 bp, Probe sequence
acaattcaaaaatgattatacttca

SEQ ID NO: 87901 - DNA, 25 bp, Probe sequence
aacaattaagccacaattcaaaaat

SEQ ID NO: 87902 - DNA, 25 bp, Probe sequence
aattaagccacaattcaaaaatgat

SEQ ID NO: 87903 - DNA, 25 bp, Probe sequence
caattaagccacaattcaaaaatga

SEQ ID NO: 87904 - DNA, 25 bp, Probe sequence
caaaaatgattatacttcattcaac

SEQ ID NO: 87905 - DNA, 25 bp, Probe sequence
caaacaattaagccacaattcaaaa

SEQ ID NO: 87906 - DNA, 25 bp, Probe sequence
cacaattcaaaaatgattatacttc

SEQ ID NO: 87907 - DNA, 25 bp, Probe sequence
gcaaacaattaagccacaattcaaa

SEQ ID NO: 87908 - DNA, 25 bp, Probe sequence
tgcaaacaattaagccacaattcaa

SEQ ID NO: 87909 - DNA, 25 bp, Probe sequence
tcctaagaacatcttaactttttat

SEQ ID NO: 87910 - DNA, 25 bp, Probe sequence
taactttttattaattgtcataaat

SEQ ID NO: 87911 - DNA, 25 bp, Probe sequence
tattaattgtcataaattgcaaaca

SEQ ID NO: 87912 - DNA, 25 bp, Probe sequence
ttgcaaacaattaagccacaattca

SEQ ID NO: 87913 - DNA, 25 bp, Probe sequence
atttctaatctctcgcataattgct

SEQ ID NO: 87914 - DNA, 25 bp, Probe sequence
ataacctccttatttctaatctctc

SEQ ID NO: 87915 - DNA, 25 bp, Probe sequence
actagacactgcatcacggtacgtt

SEQ ID NO: 87916 - DNA, 25 bp, Probe sequence
acagttaggcagtatttcccgtcct

SEQ ID NO: 87917 - DNA, 25 bp, Probe sequence
aaattctcaggccactataccaata

SEQ ID NO: 87918 - DNA, 25 bp, Probe sequence
aagcgtgctcccatgcacatatgta

SEQ ID NO: 87919 - DNA, 25 bp, Probe sequence
aatatgctttgcctagacgagacct

SEQ ID NO: 87920 - DNA, 25 bp, Probe sequence
gcagtgttctctttaagcgtgctcc

SEQ ID NO: 87921 - DNA, 25 bp, Probe sequence
gaagggggccattcacatggaattc

SEQ ID NO: 87922 - DNA, 25 bp, Probe sequence
gatggtggctttgctttgtgttgat

SEQ ID NO: 87923 - DNA, 25 bp, Probe sequence
gatataccttgttgcagtgttctct

SEQ ID NO: 87924 - DNA, 25 bp, Probe sequence
gttacttctgtctgttcaattcatc

SEQ ID NO: 87925 - DNA, 25 bp, Probe sequence
gtaaacgcacctgtacagttaggca

SEQ ID NO: 87926 - DNA, 25 bp, Probe sequence
ggaggtctttcacatgggtatcatt

SEQ ID NO: 87927 - DNA, 25 bp, Probe sequence
tgggtatcatcgctggcatcattaa

SEQ ID NO: 87928 - DNA, 25 bp, Probe sequence
attgattacttcatctttgtatcgt

SEQ ID NO: 87929 - DNA, 25 bp, Probe sequence
attacattaagtttatcatttttag

SEQ ID NO: 87930 - DNA, 25 bp, Probe sequence
atcacgacatcaactattacattaa

SEQ ID NO: 87931 - DNA, 25 bp, Probe sequence
atctttgtatcgttatcacgacatc

SEQ ID NO: 87932 - DNA, 25 bp, Probe sequence
atcgttatcacgacatcaactatta

SEQ ID NO: 87933 - DNA, 25 bp, Probe sequence
acttcatctttgtatcgttatcacg

SEQ ID NO: 87934 - DNA, 25 bp, Probe sequence
aattacttagcatcgcaacatatca

SEQ ID NO: 87935 - DNA, 25 bp, Probe sequence
cttcatctttgtatcgttatcacga

SEQ ID NO: 87936 - DNA, 25 bp, Probe sequence
gaagctagaacattgtagatatgat

SEQ ID NO: 87937 - DNA, 25 bp, Probe sequence
gattacttcatctttgtatcgttat

SEQ ID NO: 87938 - DNA, 25 bp, Probe sequence
gtatattttaagaagctagaacatt

SEQ ID NO: 87939 - DNA, 25 bp, Probe sequence
taagtttatcatttttagtatattt

SEQ ID NO: 87940 - DNA, 25 bp, Probe sequence
taaaattgattacttcatctttgta

SEQ ID NO: 87941 - DNA, 25 bp, Probe sequence
tacttagcatcgcaacatatcatcg

SEQ ID NO: 87942 - DNA, 25 bp, Probe sequence
tatattaattacttagcatcgcaac

SEQ ID NO: 87943 - DNA, 25 bp, Probe sequence
attcgcaaattttatgacatacgcc

SEQ ID NO: 87944 - DNA, 25 bp, Probe sequence
atccacgtaataaacacatcatgta

SEQ ID NO: 87945 - DNA, 25 bp, Probe sequence
aggatagtgggcatgtctcgcaaca

SEQ ID NO: 87946 - DNA, 25 bp, Probe sequence
acgggctatattcagacccacgcat

SEQ ID NO: 87947 - DNA, 25 bp, Probe sequence
aagccagcagaagcatacctaacct

SEQ ID NO: 87948 - DNA, 25 bp, Probe sequence
aatatgcttgcgttgacttgtcacc

SEQ ID NO: 87949 - DNA, 25 bp, Probe sequence
cacacccaaatatatggcgttgcgc

SEQ ID NO: 87950 - DNA, 25 bp, Probe sequence
ccacgcattcatccacgtaataaac

SEQ ID NO: 87951 - DNA, 25 bp, Probe sequence
gcatacttctatagctttaataagc

SEQ ID NO: 87952 - DNA, 25 bp, Probe sequence
gacatacgcctttcacgggctatat

SEQ ID NO: 87953 - DNA, 25 bp, Probe sequence
gttgacttgtcaccattcgcaaatt

SEQ ID NO: 87954 - DNA, 25 bp, Probe sequence
gtttaaccaagcatacttctatagc

SEQ ID NO: 87955 - DNA, 25 bp, Probe sequence
gtaatagaaaaacagcacacccaaa

SEQ ID NO: 87956 - DNA, 25 bp, Probe sequence
gtgggcatgtctcgcaacaaatatg

SEQ ID NO: 87957 - DNA, 25 bp, Probe sequence
ggcgttgcgctgtttaaccaagcat

SEQ ID NO: 87958 - DNA, 25 bp, Probe sequence
atataataacatcgtcactcaagtg

SEQ ID NO: 87959 - DNA, 25 bp, Probe sequence
ataacatcgtcactcaagtgttaat

SEQ ID NO: 87960 - DNA, 25 bp, Probe sequence
atcacgccacaaaaaacactcaaat

SEQ ID NO: 87961 - DNA, 25 bp, Probe sequence
acatcgtcactcaagtgttaatatt

SEQ ID NO: 87962 - DNA, 25 bp, Probe sequence
acaaatataataacatcgtcactca

SEQ ID NO: 87963 - DNA, 25 bp, Probe sequence
cacgccacaaaaaacactcaaatga

SEQ ID NO: 87964 - DNA, 25 bp, Probe sequence
ctatcacgccacaaaaaacactcaa

SEQ ID NO: 87965 - DNA, 25 bp, Probe sequence
ctaagttccctatactatcacgcca

SEQ ID NO: 87966 - DNA, 25 bp, Probe sequence
ccctatactatcacgccacaaaaaa

SEQ ID NO: 87967 - DNA, 25 bp, Probe sequence
gccacaaaaaacactcaaatgacaa

SEQ ID NO: 87968 - DNA, 25 bp, Probe sequence
gtcactcaagtgttaatatttaaaa

SEQ ID NO: 87969 - DNA, 25 bp, Probe sequence
gtctaagttccctatactatcacgc

SEQ ID NO: 87970 - DNA, 25 bp, Probe sequence
tactatcacgccacaaaaaacactc

SEQ ID NO: 87971 - DNA, 25 bp, Probe sequence
tatactatcacgccacaaaaaacac

SEQ ID NO: 87972 - DNA, 25 bp, Probe sequence
ttgtctaagttccctatactatcac

SEQ ID NO: 87973 - DNA, 25 bp, Probe sequence
attgtttcattaatacggtagcgcc

SEQ ID NO: 87974 - DNA, 25 bp, Probe sequence
ataacatgcaatacacctgcatcaa

SEQ ID NO: 87975 - DNA, 25 bp, Probe sequence
agtaacactctaacatgtatgtaaa

SEQ ID NO: 87976 - DNA, 25 bp, Probe sequence
acacctgcatcaaaattgtttcatt

SEQ ID NO: 87977 - DNA, 25 bp, Probe sequence
aatacacctgcatcaaaattgtttc

SEQ ID NO: 87978 - DNA, 25 bp, Probe sequence
aatatagtcaactcttgtaatgtgt

SEQ ID NO: 87979 - DNA, 25 bp, Probe sequence
cggtagcgcctgtatttatcataat

SEQ ID NO: 87980 - DNA, 25 bp, Probe sequence
gcgcctgtatttatcataatatagt

SEQ ID NO: 87981 - DNA, 25 bp, Probe sequence
gcgtctacgtgtttaagtaacactc

SEQ ID NO: 87982 - DNA, 25 bp, Probe sequence
gtttcattaatacggtagcgcctgt

SEQ ID NO: 87983 - DNA, 25 bp, Probe sequence
gtagcgcctgtatttatcataatat

SEQ ID NO: 87984 - DNA, 25 bp, Probe sequence
gtcaactcttgtaatgtgttgtcat

SEQ ID NO: 87985 - DNA, 25 bp, Probe sequence
taagtaacactctaacatgtatgta

SEQ ID NO: 87986 - DNA, 25 bp, Probe sequence
tacggtagcgcctgtatttatcata

SEQ ID NO: 87987 - DNA, 25 bp, Probe sequence
tatcataatatagtcaactcttgta

SEQ ID NO: 87988 - DNA, 25 bp, Probe sequence
attcagaaccagtactaacttttca

SEQ ID NO: 87989 - DNA, 25 bp, Probe sequence
attttgttattttgcaattatctaa

SEQ ID NO: 87990 - DNA, 25 bp, Probe sequence
attttgcaattatctaagtttcgat

SEQ ID NO: 87991 - DNA, 25 bp, Probe sequence
atacttgtgtgtcagatgcttctat

SEQ ID NO: 87992 - DNA, 25 bp, Probe sequence
acacctgagcaacacaaatacttgt

SEQ ID NO: 87993 - DNA, 25 bp, Probe sequence
aaatacttgtgtgtcagatgcttct

SEQ ID NO: 87994 - DNA, 25 bp, Probe sequence
aaaacacctgagcaacacaaatact

SEQ ID NO: 87995 - DNA, 25 bp, Probe sequence
aagtttcgattaattcagaaccagt

SEQ ID NO: 87996 - DNA, 25 bp, Probe sequence
cagaaccagtactaacttttcaatt

SEQ ID NO: 87997 - DNA, 25 bp, Probe sequence
cttgtgtgtcagatgcttctatata

SEQ ID NO: 87998 - DNA, 25 bp, Probe sequence
ctcaattttaattcttacttttcag

SEQ ID NO: 87999 - DNA, 25 bp, Probe sequence
gaattataaacgacattttgttatt

SEQ ID NO: 88000 - DNA, 25 bp, Probe sequence
tgtctcaattttaattcttactttt

SEQ ID NO: 88001 - DNA, 25 bp, Probe sequence
tcaattccaaacaaaaaaacacctg

SEQ ID NO: 88002 - DNA, 25 bp, Probe sequence
ttttaattcttacttttcagataag

SEQ ID NO: 88003 - DNA, 25 bp, Probe sequence
atcacgaatgattaacatcgcacaa

SEQ ID NO: 88004 - DNA, 25 bp, Probe sequence
aaatatatgctagtgctgctattat

SEQ ID NO: 88005 - DNA, 25 bp, Probe sequence
aaagcactagcattttcaaaatcaa

SEQ ID NO: 88006 - DNA, 25 bp, Probe sequence
aacatcgcacaaaaaagcactagca

SEQ ID NO: 88007 - DNA, 25 bp, Probe sequence
aacctccataactcaatcacgaatg

SEQ ID NO: 88008 - DNA, 25 bp, Probe sequence
aatccactaggaataagagcattat

SEQ ID NO: 88009 - DNA, 25 bp, Probe sequence
caatacaatttgccgaattttctaa

SEQ ID NO: 88010 - DNA, 25 bp, Probe sequence
ctcctacaaattcttattaatccac

SEQ ID NO: 88011 - DNA, 25 bp, Probe sequence
ccaaacctccataactcaatcacga

SEQ ID NO: 88012 - DNA, 25 bp, Probe sequence
gcccctcctacaaattcttattaat

SEQ ID NO: 88013 - DNA, 25 bp, Probe sequence
gtaaaattgcatatatcgtcaatac

SEQ ID NO: 88014 - DNA, 25 bp, Probe sequence
gtgagactactatgacatttatcaa

SEQ ID NO: 88015 - DNA, 25 bp, Probe sequence
tgatgaattgtgagactactatgac

SEQ ID NO: 88016 - DNA, 25 bp, Probe sequence
tccatacaaatgtccaccaaacctc

SEQ ID NO: 88017 - DNA, 25 bp, Probe sequence
tatcgtcaatacaatttgccgaatt

SEQ ID NO: 88018 - DNA, 25 bp, Probe sequence
attgtcaaacaataacgccctacaa

SEQ ID NO: 88019 - DNA, 25 bp, Probe sequence
attacattccctttctctattggaa

SEQ ID NO: 88020 - DNA, 25 bp, Probe sequence
acattccctttctctattggaaata

SEQ ID NO: 88021 - DNA, 25 bp, Probe sequence
aaatgattacattccctttctctat

SEQ ID NO: 88022 - DNA, 25 bp, Probe sequence
caaacaataacgccctacaaacata

SEQ ID NO: 88023 - DNA, 25 bp, Probe sequence
gccctacaaacataagcatgaactt

SEQ ID NO: 88024 - DNA, 25 bp, Probe sequence
gcatgaactttgcttgtaggacgca

SEQ ID NO: 88025 - DNA, 25 bp, Probe sequence
gaactttgcttgtaggacgcaatat

SEQ ID NO: 88026 - DNA, 25 bp, Probe sequence
tgattacattccctttctctattgg

SEQ ID NO: 88027 - DNA, 25 bp, Probe sequence
tcatcaaattttataattacccctt

SEQ ID NO: 88028 - DNA, 25 bp, Probe sequence
tcatatactgtatcatcaaatttta

SEQ ID NO: 88029 - DNA, 25 bp, Probe sequence
taacgccctacaaacataagcatga

SEQ ID NO: 88030 - DNA, 25 bp, Probe sequence
tacaatttcataatatttcactata

SEQ ID NO: 88031 - DNA, 25 bp, Probe sequence
tattacaacttattagattttacaa

SEQ ID NO: 88032 - DNA, 25 bp, Probe sequence
ttccctttctctattggaaataatt

SEQ ID NO: 88033 - DNA, 25 bp, Probe sequence
atagccccgccataaagtttaggat

SEQ ID NO: 88034 - DNA, 25 bp, Probe sequence
atgaagttcattcgaccaatccttt

SEQ ID NO: 88035 - DNA, 25 bp, Probe sequence
aggattcaatccaacttttcagctt

SEQ ID NO: 88036 - DNA, 25 bp, Probe sequence
aggattggtcgaacatagaacatga

SEQ ID NO: 88037 - DNA, 25 bp, Probe sequence
acatgaagttcattcgaccaatcct

SEQ ID NO: 88038 - DNA, 25 bp, Probe sequence
acaatcacgactttgatagccccgc

SEQ ID NO: 88039 - DNA, 25 bp, Probe sequence
aattcctattacaacaatcacgact

SEQ ID NO: 88040 - DNA, 25 bp, Probe sequence
gccccgccataaagtttaggattca

SEQ ID NO: 88041 - DNA, 25 bp, Probe sequence
gactttgatagccccgccataaagt

SEQ ID NO: 88042 - DNA, 25 bp, Probe sequence
gattcaatccaacttttcagcttgt

SEQ ID NO: 88043 - DNA, 25 bp, Probe sequence
tttgatagccccgccataaagttta

SEQ ID NO: 88044 - DNA, 25 bp, Probe sequence
tcgaccaatcctttttcttatacaa

SEQ ID NO: 88045 - DNA, 25 bp, Probe sequence
tcagcttgtgaaatgtaataggaat

SEQ ID NO: 88046 - DNA, 25 bp, Probe sequence
tcaatccaacttttcagcttgtgaa

SEQ ID NO: 88047 - DNA, 25 bp, Probe sequence
ttcttatacaaaaattcctattaca

SEQ ID NO: 88048 - DNA, 25 bp, Probe sequence
atataaacagaagatactaggggga

SEQ ID NO: 88049 - DNA, 25 bp, Probe sequence
atactgtacaattatgttatcatat

SEQ ID NO: 88050 - DNA, 25 bp, Probe sequence
atcatatatgagtagttatagcgca

SEQ ID NO: 88051 - DNA, 25 bp, Probe sequence
acccaacttttcatataaacagaag

SEQ ID NO: 88052 - DNA, 25 bp, Probe sequence
aaaacgttagcaattcagcgcaccc

SEQ ID NO: 88053 - DNA, 25 bp, Probe sequence
aatttttcaaattatactgtacaat

SEQ ID NO: 88054 - DNA, 25 bp, Probe sequence
caccccaactttgtgaaatcaattt

SEQ ID NO: 88055 - DNA, 25 bp, Probe sequence
ctttgacaccccaactttgtgaaat

SEQ ID NO: 88056 - DNA, 25 bp, Probe sequence
gcgcacccaacttttcatataaaca

SEQ ID NO: 88057 - DNA, 25 bp, Probe sequence
gcacccaacttttcatataaacaga

SEQ ID NO: 88058 - DNA, 25 bp, Probe sequence
gcaaaacgttagcaattcagcgcac

SEQ ID NO: 88059 - DNA, 25 bp, Probe sequence
gacaccccaactttgtgaaatcaat

SEQ ID NO: 88060 - DNA, 25 bp, Probe sequence
gtagttatagcgcaaaacgttagca

SEQ ID NO: 88061 - DNA, 25 bp, Probe sequence
tagcgcaaaacgttagcaattcagc

SEQ ID NO: 88062 - DNA, 25 bp, Probe sequence
ttgacaccccaactttgtgaaatca

SEQ ID NO: 88063 - DNA, 25 bp, Probe sequence
attgttcactaggtcgctttttact

SEQ ID NO: 88064 - DNA, 25 bp, Probe sequence
attaaattgtccggtgatctataac

SEQ ID NO: 88065 - DNA, 25 bp, Probe sequence
atgtcaattgttcactaggtcgctt

SEQ ID NO: 88066 - DNA, 25 bp, Probe sequence
agcacctttattcatcattaattgt

SEQ ID NO: 88067 - DNA, 25 bp, Probe sequence
acttaagttaagcgacctgtggata

SEQ ID NO: 88068 - DNA, 25 bp, Probe sequence
actatattaaattgtccggtgatct

SEQ ID NO: 88069 - DNA, 25 bp, Probe sequence
aaaaagcacctttattcatcattaa

SEQ ID NO: 88070 - DNA, 25 bp, Probe sequence
cactaggtcgctttttactatatta

SEQ ID NO: 88071 - DNA, 25 bp, Probe sequence
gcgacctgtggatatatgtcaattg

SEQ ID NO: 88072 - DNA, 25 bp, Probe sequence
gttcactaggtcgctttttactata

SEQ ID NO: 88073 - DNA, 25 bp, Probe sequence
gtccggtgatctataacaaaaagca

SEQ ID NO: 88074 - DNA, 25 bp, Probe sequence
ggtcgacgatgagtaaagatgcttt

SEQ ID NO: 88075 - DNA, 25 bp, Probe sequence
tcgcaactagcaatataacttaagt

SEQ ID NO: 88076 - DNA, 25 bp, Probe sequence
tcatcattaattgttgtggtcgacg

SEQ ID NO: 88077 - DNA, 25 bp, Probe sequence
ttaattgttgtggtcgacgatgagt

SEQ ID NO: 88078 - DNA, 25 bp, Probe sequence
ataatcaccatattaattcattcat

SEQ ID NO: 88079 - DNA, 25 bp, Probe sequence
atcaccatattaattcattcataga

SEQ ID NO: 88080 - DNA, 25 bp, Probe sequence
acttagcagtaatatctttgaaaat

SEQ ID NO: 88081 - DNA, 25 bp, Probe sequence
aattaagggcgtataatcaccatat

SEQ ID NO: 88082 - DNA, 25 bp, Probe sequence
caatgatgattttcgttttacactt

SEQ ID NO: 88083 - DNA, 25 bp, Probe sequence
cattcatagaattggggttttgttt

SEQ ID NO: 88084 - DNA, 25 bp, Probe sequence
gatgattttcgttttacacttagca

SEQ ID NO: 88085 - DNA, 25 bp, Probe sequence
gatgctatcaatgatgattttcgtt

SEQ ID NO: 88086 - DNA, 25 bp, Probe sequence
gattttcgttttacacttagcagta

SEQ ID NO: 88087 - DNA, 25 bp, Probe sequence
gtaattcgatgctatcaatgatgat

SEQ ID NO: 88088 - DNA, 25 bp, Probe sequence
gggcgtataatcaccatattaattc

SEQ ID NO: 88089 - DNA, 25 bp, Probe sequence
tgattttcgttttacacttagcagt

SEQ ID NO: 88090 - DNA, 25 bp, Probe sequence
taagggcgtataatcaccatattaa

SEQ ID NO: 88091 - DNA, 25 bp, Probe sequence
tacacttagcagtaatatctttgaa

SEQ ID NO: 88092 - DNA, 25 bp, Probe sequence
ttttcgttttacacttagcagtaat

SEQ ID NO: 88093 - DNA, 25 bp, Probe sequence
atgcacaccccttttttagaatatt

SEQ ID NO: 88094 - DNA, 25 bp, Probe sequence
agaacatttatcaataatattgcta

SEQ ID NO: 88095 - DNA, 25 bp, Probe sequence
actcattttcggaggtgcctatatc

SEQ ID NO: 88096 - DNA, 25 bp, Probe sequence
acactcattttcggaggtgcctata

SEQ ID NO: 88097 - DNA, 25 bp, Probe sequence
aaaacactcattttcggaggtgcct

SEQ ID NO: 88098 - DNA, 25 bp, Probe sequence
aaaaaatttatctgttcaatatata

SEQ ID NO: 88099 - DNA, 25 bp, Probe sequence
aacactcattttcggaggtgcctat

SEQ ID NO: 88100 - DNA, 25 bp, Probe sequence
aatagttacaaaacactcattttcg

SEQ ID NO: 88101 - DNA, 25 bp, Probe sequence
aatattctgatattagttattaatg

SEQ ID NO: 88102 - DNA, 25 bp, Probe sequence
caccccttttttagaatattctgat

SEQ ID NO: 88103 - DNA, 25 bp, Probe sequence
cattttcggaggtgcctatatcgct

SEQ ID NO: 88104 - DNA, 25 bp, Probe sequence
gcacaccccttttttagaatattct

SEQ ID NO: 88105 - DNA, 25 bp, Probe sequence
gatgcacaccccttttttagaatat

SEQ ID NO: 88106 - DNA, 25 bp, Probe sequence
gttacaaaacactcattttcggagg

SEQ ID NO: 88107 - DNA, 25 bp, Probe sequence
tgcacaccccttttttagaatattc

SEQ ID NO: 88108 - DNA, 25 bp, Probe sequence
attgtcttccactacagttgaccta

SEQ ID NO: 88109 - DNA, 25 bp, Probe sequence
aggttacaaagatggcatgtgacgt

SEQ ID NO: 88110 - DNA, 25 bp, Probe sequence
agtcaatattgtttttaagcattac

SEQ ID NO: 88111 - DNA, 25 bp, Probe sequence
actcgattcagcatgacacaacgtc

SEQ ID NO: 88112 - DNA, 25 bp, Probe sequence
cgtaaccaccatttccatacaaaga

SEQ ID NO: 88113 - DNA, 25 bp, Probe sequence
gaacgttctgtaaaagtcaatattg

SEQ ID NO: 88114 - DNA, 25 bp, Probe sequence
gacacaacgtcaacgtaaccaccat

SEQ ID NO: 88115 - DNA, 25 bp, Probe sequence
tccactacagttgacctataaacga

SEQ ID NO: 88116 - DNA, 25 bp, Probe sequence
gatttgttgtcttacaaacctttgt

SEQ ID NO: 88117 - DNA, 25 bp, Probe sequence
gattatttcaaactcgattcagcat

SEQ ID NO: 88118 - DNA, 25 bp, Probe sequence
ggcatgtgacgttgatagatactag

SEQ ID NO: 88119 - DNA, 25 bp, Probe sequence
tcaacgtaaccaccatttccataca

SEQ ID NO: 88120 - DNA, 25 bp, Probe sequence
taattaatcgatttgttgtcttaca

SEQ ID NO: 88121 - DNA, 25 bp, Probe sequence
taagcattacatgattaccacaaat

SEQ ID NO: 88122 - DNA, 25 bp, Probe sequence
taccacaaatcattgtcttccacta

SEQ ID NO: 88123 - DNA, 25 bp, Probe sequence
atatttcactcccttaatgtcttaa

SEQ ID NO: 88124 - DNA, 25 bp, Probe sequence
atagcaaacttgcccacacaagcca

SEQ ID NO: 88125 - DNA, 25 bp, Probe sequence
agtgtagatgcatggccaactccta

SEQ ID NO: 88126 - DNA, 25 bp, Probe sequence
accacgctctcaccattataaagtg

SEQ ID NO: 88127 - DNA, 25 bp, Probe sequence
acacaagccatccatcatatttcac

SEQ ID NO: 88128 - DNA, 25 bp, Probe sequence
aaatttgagcacttaccttcattat

SEQ ID NO: 88129 - DNA, 25 bp, Probe sequence
aaaatcaataggccataacgacata

SEQ ID NO: 88130 - DNA, 25 bp, Probe sequence
aactcctcgctacaattgcgtgatt

SEQ ID NO: 88131 - DNA, 25 bp, Probe sequence
aatgccctatcatttctatagctaa

SEQ ID NO: 88132 - DNA, 25 bp, Probe sequence
gccatccatcatatttcacaaaaca

SEQ ID NO: 88133 - DNA, 25 bp, Probe sequence
gacatatgtagcaataactcctcgc

SEQ ID NO: 88134 - DNA, 25 bp, Probe sequence
gatgcatggccaactcctaaattga

SEQ ID NO: 88135 - DNA, 25 bp, Probe sequence
tattgcacaagccaaatgcccttcc

SEQ ID NO: 88136 - DNA, 25 bp, Probe sequence
tttgtcacatgatctgatacagcta

SEQ ID NO: 88137 - DNA, 25 bp, Probe sequence
ttccaatctcaatgccctatcattt

SEQ ID NO: 88138 - DNA, 25 bp, Probe sequence
aggaattaagcctcgcataaagcgg

SEQ ID NO: 88139 - DNA, 25 bp, Probe sequence
aaccgtgcacctaagcatcgaacgt

SEQ ID NO: 88140 - DNA, 25 bp, Probe sequence
aagcatcgaacgtaattcacgaacg

SEQ ID NO: 88141 - DNA, 25 bp, Probe sequence
ctacgtgctttgggcagacttcgca

SEQ ID NO: 88142 - DNA, 25 bp, Probe sequence
gcataaagcggatttcgagtacagg

SEQ ID NO: 88143 - DNA, 25 bp, Probe sequence
cgaaatcttcaaacactacgtgctt

SEQ ID NO: 88144 - DNA, 25 bp, Probe sequence
gctgcttccgtcaggacctgacatg

SEQ ID NO: 88145 - DNA, 25 bp, Probe sequence
gctaccctacggcacatatgatgat

SEQ ID NO: 88146 - DNA, 25 bp, Probe sequence
gacttcgcaaaaatacggcctcaac

SEQ ID NO: 88147 - DNA, 25 bp, Probe sequence
gttagctaaatctcggctaccctac

SEQ ID NO: 88148 - DNA, 25 bp, Probe sequence
ggacctgacatggttcatgggttca

SEQ ID NO: 88149 - DNA, 25 bp, Probe sequence
tgggttcatattgcataggaccgaa

SEQ ID NO: 88150 - DNA, 25 bp, Probe sequence
tgatgatccacttaatgctgcttcc

SEQ ID NO: 88151 - DNA, 25 bp, Probe sequence
ttcgagtacagggaaccgctacctc

SEQ ID NO: 88152 - DNA, 25 bp, Probe sequence
tccccacctagcacggcaagatata

SEQ ID NO: 88153 - DNA, 25 bp, Probe sequence
attctattgtaagatactccccctc

SEQ ID NO: 88154 - DNA, 25 bp, Probe sequence
atttcaccatcatttctttatcatc

SEQ ID NO: 88155 - DNA, 25 bp, Probe sequence
ataacttcttacttttcattgacac

SEQ ID NO: 88156 - DNA, 25 bp, Probe sequence
ataacgtatctcattaataattcta

SEQ ID NO: 88157 - DNA, 25 bp, Probe sequence
atcatcaaattataacttcttactt

SEQ ID NO: 88158 - DNA, 25 bp, Probe sequence
atgtcctccgtaggcatttgattgt

SEQ ID NO: 88159 - DNA, 25 bp, Probe sequence
accatcatttctttatcatcaaatt

SEQ ID NO: 88160 - DNA, 25 bp, Probe sequence
aacttcttacttttcattgacacaa

SEQ ID NO: 88161 - DNA, 25 bp, Probe sequence
cttacttttcattgacacaaaaatc

SEQ ID NO: 88162 - DNA, 25 bp, Probe sequence
ctcatttcaccatcatttctttatc

SEQ ID NO: 88163 - DNA, 25 bp, Probe sequence
cgtaggcatttgattgtcaataatc

SEQ ID NO: 88164 - DNA, 25 bp, Probe sequence
cctccgtaggcatttgattgtcaat

SEQ ID NO: 88165 - DNA, 25 bp, Probe sequence
gtcaataatcataacgtatctcatt

SEQ ID NO: 88166 - DNA, 25 bp, Probe sequence
gtcctccgtaggcatttgattgtca

SEQ ID NO: 88167 - DNA, 25 bp, Probe sequence
ttcaccatcatttctttatcatcaa

SEQ ID NO: 88168 - DNA, 25 bp, Probe sequence
attatagcatgataatacctttact

SEQ ID NO: 88169 - DNA, 25 bp, Probe sequence
agcacctccataaacaattacctct

SEQ ID NO: 88170 - DNA, 25 bp, Probe sequence
acctccataaacaattacctctcat

SEQ ID NO: 88171 - DNA, 25 bp, Probe sequence
acaattacctctcattatagcatga

SEQ ID NO: 88172 - DNA, 25 bp, Probe sequence
aaacaattacctctcattatagcat

SEQ ID NO: 88173 - DNA, 25 bp, Probe sequence
aacaattacctctcattatagcatg

SEQ ID NO: 88174 - DNA, 25 bp, Probe sequence
cacctccataaacaattacctctca

SEQ ID NO: 88175 - DNA, 25 bp, Probe sequence
ctccataaacaattacctctcatta

SEQ ID NO: 88176 - DNA, 25 bp, Probe sequence
cctccataaacaattacctctcatt

SEQ ID NO: 88177 - DNA, 25 bp, Probe sequence
ccataaacaattacctctcattata

SEQ ID NO: 88178 - DNA, 25 bp, Probe sequence
gcacctccataaacaattacctctc

SEQ ID NO: 88179 - DNA, 25 bp, Probe sequence
gttagcacctccataaacaattacc

SEQ ID NO: 88180 - DNA, 25 bp, Probe sequence
taaacaattacctctcattatagca

SEQ ID NO: 88181 - DNA, 25 bp, Probe sequence
tagcacctccataaacaattacctc

SEQ ID NO: 88182 - DNA, 25 bp, Probe sequence
ttagcacctccataaacaattacct

SEQ ID NO: 88183 - DNA, 25 bp, Probe sequence
attccatttcctccttgaaaatcaa

SEQ ID NO: 88184 - DNA, 25 bp, Probe sequence
atttcctccttgaaaatcaataaat

SEQ ID NO: 88185 - DNA, 25 bp, Probe sequence
atacgattatatcgcttgtcatgta

SEQ ID NO: 88186 - DNA, 25 bp, Probe sequence
atcaataaaatgatgtttctttcat

SEQ ID NO: 88187 - DNA, 25 bp, Probe sequence
atgatgtttctttcattatacatac

SEQ ID NO: 88188 - DNA, 25 bp, Probe sequence
acatacgattatatcgcttgtcatg

SEQ ID NO: 88189 - DNA, 25 bp, Probe sequence
catacgattatatcgcttgtcatgt

SEQ ID NO: 88190 - DNA, 25 bp, Probe sequence
ccatttcctccttgaaaatcaataa

SEQ ID NO: 88191 - DNA, 25 bp, Probe sequence
gatgtttctttcattatacatacga

SEQ ID NO: 88192 - DNA, 25 bp, Probe sequence
gtttctttcattatacatacgatta

SEQ ID NO: 88193 - DNA, 25 bp, Probe sequence
tccatttcctccttgaaaatcaata

SEQ ID NO: 88194 - DNA, 25 bp, Probe sequence
tacatacgattatatcgcttgtcat

SEQ ID NO: 88195 - DNA, 25 bp, Probe sequence
tatacatacgattatatcgcttgtc

SEQ ID NO: 88196 - DNA, 25 bp, Probe sequence
tttctttcattatacatacgattat

SEQ ID NO: 88197 - DNA, 25 bp, Probe sequence
ttccatttcctccttgaaaatcaat

SEQ ID NO: 88198 - DNA, 25 bp, Probe sequence
agtaacaaatcacaaccaacggctt

SEQ ID NO: 88199 - DNA, 25 bp, Probe sequence
agattacccatccctcagtaaaact

SEQ ID NO: 88200 - DNA, 25 bp, Probe sequence
acaccacaccataaaaaaagccaca

SEQ ID NO: 88201 - DNA, 25 bp, Probe sequence
aagccacaatgattacactgtaact

SEQ ID NO: 88202 - DNA, 25 bp, Probe sequence
caaatcacaaccaacggcttgcttc

SEQ ID NO: 88203 - DNA, 25 bp, Probe sequence
cactgtaacttttcttactatagta

SEQ ID NO: 88204 - DNA, 25 bp, Probe sequence
caccgccacaccgcaaataaagtag

SEQ ID NO: 88205 - DNA, 25 bp, Probe sequence
ccaacggcttgcttcctaaagatta

SEQ ID NO: 88206 - DNA, 25 bp, Probe sequence
gattacactgtaacttttcttacta

SEQ ID NO: 88207 - DNA, 25 bp, Probe sequence
ggcttgcttcctaaagattacccat

SEQ ID NO: 88208 - DNA, 25 bp, Probe sequence
tgcttcctaaagattacccatccct

SEQ ID NO: 88209 - DNA, 25 bp, Probe sequence
tacccatccctcagtaaaactaggt

SEQ ID NO: 88210 - DNA, 25 bp, Probe sequence
taaagtagtacatcacaccacacca

SEQ ID NO: 88211 - DNA, 25 bp, Probe sequence
taaagattacccatccctcagtaaa

SEQ ID NO: 88212 - DNA, 25 bp, Probe sequence
tacatcacaccacaccataaaaaaa

SEQ ID NO: 88213 - DNA, 25 bp, Probe sequence
agtacaactactaagccagcatcta

SEQ ID NO: 88214 - DNA, 25 bp, Probe sequence
accatatcaatcaaaaaaaccgcaa

SEQ ID NO: 88215 - DNA, 25 bp, Probe sequence
acaggctttcaaactgcttaacaac

SEQ ID NO: 88216 - DNA, 25 bp, Probe sequence
aaacaccgctatacaggctgattta

SEQ ID NO: 88217 - DNA, 25 bp, Probe sequence
aagccagcatctatcatttcaatta

SEQ ID NO: 88218 - DNA, 25 bp, Probe sequence
cagatttttctctaaccatatcaat

SEQ ID NO: 88219 - DNA, 25 bp, Probe sequence
ctttgtcatctgtactgaacgccct

SEQ ID NO: 88220 - DNA, 25 bp, Probe sequence
gctgatttaataagctttagaccaa

SEQ ID NO: 88221 - DNA, 25 bp, Probe sequence
tgaacgcccttatcctaaaaatcga

SEQ ID NO: 88222 - DNA, 25 bp, Probe sequence
gtaaaaattacacctttgtcatctg

SEQ ID NO: 88223 - DNA, 25 bp, Probe sequence
tgagttgttttgtttgcctcaacaa

SEQ ID NO: 88224 - DNA, 25 bp, Probe sequence
tcgttagtaattcaagttatttctt

SEQ ID NO: 88225 - DNA, 25 bp, Probe sequence
tcaatgttcattttttcttaccgac

SEQ ID NO: 88226 - DNA, 25 bp, Probe sequence
taatctctcaaaacaccgctataca

SEQ ID NO: 88227 - DNA, 25 bp, Probe sequence
taaatactatacaggctttcaaact

SEQ ID NO: 88228 - DNA, 25 bp, Probe sequence
attccgcatcttcttcagaagatgt

SEQ ID NO: 88229 - DNA, 25 bp, Probe sequence
atacaatatgtcacgttattccgca

SEQ ID NO: 88230 - DNA, 25 bp, Probe sequence
acaatatgtcacgttattccgcatc

SEQ ID NO: 88231 - DNA, 25 bp, Probe sequence
aaaactgaatacaatatgtcacgtt

SEQ ID NO: 88232 - DNA, 25 bp, Probe sequence
aactgaatacaatatgtcacgttat

SEQ ID NO: 88233 - DNA, 25 bp, Probe sequence
aatgaacaaacattcaaaactgaat

SEQ ID NO: 88234 - DNA, 25 bp, Probe sequence
aatacaatatgtcacgttattccgc

SEQ ID NO: 88235 - DNA, 25 bp, Probe sequence
aatatgtcacgttattccgcatctt

SEQ ID NO: 88236 - DNA, 25 bp, Probe sequence
caatatgtcacgttattccgcatct

SEQ ID NO: 88237 - DNA, 25 bp, Probe sequence
cagaagatgttccgaatatatcctt

SEQ ID NO: 88238 - DNA, 25 bp, Probe sequence
gttattccgcatcttcttcagaaga

SEQ ID NO: 88239 - DNA, 25 bp, Probe sequence
tcttcttcagaagatgttccgaata

SEQ ID NO: 88240 - DNA, 25 bp, Probe sequence
tacaatatgtcacgttattccgcat

SEQ ID NO: 88241 - DNA, 25 bp, Probe sequence
ttattccgcatcttcttcagaagat

SEQ ID NO: 88242 - DNA, 25 bp, Probe sequence
ttcttcagaagatgttccgaatata

SEQ ID NO: 88243 - DNA, 25 bp, Probe sequence
aaatctatattttacttacttatct

SEQ ID NO: 88244 - DNA, 25 bp, Probe sequence
aaacgcgttattaatcttgtgagtg

SEQ ID NO: 88245 - DNA, 25 bp, Probe sequence
aactctttattcactcggttttgct

SEQ ID NO: 88246 - DNA, 25 bp, Probe sequence
cactcggttttgcttggtaaaatct

SEQ ID NO: 88247 - DNA, 25 bp, Probe sequence
cactagcgattatttcttatgaatt

SEQ ID NO: 88248 - DNA, 25 bp, Probe sequence
ctctttattcactcggttttgcttg

SEQ ID NO: 88249 - DNA, 25 bp, Probe sequence
gattatttcttatgaattcaagctt

SEQ ID NO: 88250 - DNA, 25 bp, Probe sequence
ggttttgcttggtaaaatctatatt

SEQ ID NO: 88251 - DNA, 25 bp, Probe sequence
tgttctttcgaacactagcgattat

SEQ ID NO: 88252 - DNA, 25 bp, Probe sequence
taatcttgtgagtgttctttcgaac

SEQ ID NO: 88253 - DNA, 25 bp, Probe sequence
tacttatctagttttcaatgtacaa

SEQ ID NO: 88254 - DNA, 25 bp, Probe sequence
tattcactcggttttgcttggtaaa

SEQ ID NO: 88255 - DNA, 25 bp, Probe sequence
tttacttacttatctagttttcaat

SEQ ID NO: 88256 - DNA, 25 bp, Probe sequence
tttattcactcggttttgcttggta

SEQ ID NO: 88257 - DNA, 25 bp, Probe sequence
ttcaagcttatttaaaactctttat

SEQ ID NO: 88258 - DNA, 25 bp, Probe sequence
attttgattaagtcttcgatcgatt

SEQ ID NO: 88259 - DNA, 25 bp, Probe sequence
atcgattagtattcgtcagctccac

SEQ ID NO: 88260 - DNA, 25 bp, Probe sequence
acatttattttgattaagtcttcga

SEQ ID NO: 88261 - DNA, 25 bp, Probe sequence
aacctattaacctcatcatctttga

SEQ ID NO: 88262 - DNA, 25 bp, Probe sequence
aagtaaaagtgattttgcttcgcaa

SEQ ID NO: 88263 - DNA, 25 bp, Probe sequence
aagtcttcgatcgattagtattcgt

SEQ ID NO: 88264 - DNA, 25 bp, Probe sequence
aagtgattttgcttcgcaaaacatt

SEQ ID NO: 88265 - DNA, 25 bp, Probe sequence
cgattagtattcgtcagctccacat

SEQ ID NO: 88266 - DNA, 25 bp, Probe sequence
cctattaacctcatcatctttgagg

SEQ ID NO: 88267 - DNA, 25 bp, Probe sequence
gatcgattagtattcgtcagctcca

SEQ ID NO: 88268 - DNA, 25 bp, Probe sequence
gattaagtcttcgatcgattagtat

SEQ ID NO: 88269 - DNA, 25 bp, Probe sequence
gtcttcgatcgattagtattcgtca

SEQ ID NO: 88270 - DNA, 25 bp, Probe sequence
tcgatcgattagtattcgtcagctc

SEQ ID NO: 88271 - DNA, 25 bp, Probe sequence
ttttgcttcgcaaaacatttatttt

SEQ ID NO: 88272 - DNA, 25 bp, Probe sequence
ttatacattcaaaactagatagtaa

SEQ ID NO: 88273 - DNA, 25 bp, Probe sequence
acctttcttgacttgtgacaatcgc

SEQ ID NO: 88274 - DNA, 25 bp, Probe sequence
catttagctctactaaactcgttgc

SEQ ID NO: 88275 - DNA, 25 bp, Probe sequence
cttgacttgtgacaatcgcttgctt

SEQ ID NO: 88276 - DNA, 25 bp, Probe sequence
ctttcttgacttgtgacaatcgctt

SEQ ID NO: 88277 - DNA, 25 bp, Probe sequence
ctcatttagctctactaaactcgtt

SEQ ID NO: 88278 - DNA, 25 bp, Probe sequence
ctctcgcttactcatttagctctac

SEQ ID NO: 88279 - DNA, 25 bp, Probe sequence
ctcgcttactcatttagctctacta

SEQ ID NO: 88280 - DNA, 25 bp, Probe sequence
gcttactcatttagctctactaaac

SEQ ID NO: 88281 - DNA, 25 bp, Probe sequence
ttcttgacttgtgacaatcgcttgc

SEQ ID NO: 88282 - DNA, 25 bp, Probe sequence
tgacttgtgacaatcgcttgcttct

SEQ ID NO: 88283 - DNA, 25 bp, Probe sequence
tcgcttactcatttagctctactaa

SEQ ID NO: 88284 - DNA, 25 bp, Probe sequence
tctcgcttactcatttagctctact

SEQ ID NO: 88285 - DNA, 25 bp, Probe sequence
tcttgacttgtgacaatcgcttgct

SEQ ID NO: 88286 - DNA, 25 bp, Probe sequence
tactcatttagctctactaaactcg

SEQ ID NO: 88287 - DNA, 25 bp, Probe sequence
ttgacttgtgacaatcgcttgcttc

SEQ ID NO: 88288 - DNA, 25 bp, Probe sequence
agagacctcacggtctcaatgcggc

SEQ ID NO: 88289 - DNA, 25 bp, Probe sequence
agacataaaaaaagagacctcacgg

SEQ ID NO: 88290 - DNA, 25 bp, Probe sequence
aaagagacctcacggtctcaatgcg

SEQ ID NO: 88291 - DNA, 25 bp, Probe sequence
aaaaagagacctcacggtctcaatg

SEQ ID NO: 88292 - DNA, 25 bp, Probe sequence
aaaaaagagacctcacggtctcaat

SEQ ID NO: 88293 - DNA, 25 bp, Probe sequence
aaaagagacctcacggtctcaatgc

SEQ ID NO: 88294 - DNA, 25 bp, Probe sequence
aagagacctcacggtctcaatgcgg

SEQ ID NO: 88295 - DNA, 25 bp, Probe sequence
aatgcggctcatcgcatccattttt

SEQ ID NO: 88296 - DNA, 25 bp, Probe sequence
caatgcggctcatcgcatccatttt

SEQ ID NO: 88297 - DNA, 25 bp, Probe sequence
cataaaaaaagagacctcacggtct

SEQ ID NO: 88298 - DNA, 25 bp, Probe sequence
ctcaatgcggctcatcgcatccatt

SEQ ID NO: 88299 - DNA, 25 bp, Probe sequence
gacataaaaaaagagacctcacggt

SEQ ID NO: 88300 - DNA, 25 bp, Probe sequence
gagacctcacggtctcaatgcggct

SEQ ID NO: 88301 - DNA, 25 bp, Probe sequence
tcaatgcggctcatcgcatccattt

SEQ ID NO: 88302 - DNA, 25 bp, Probe sequence
tagacataaaaaaagagacctcacg

SEQ ID NO: 88303 - DNA, 25 bp, Probe sequence
ctcatcgcattcatttcttgtctag

SEQ ID NO: 88304 - DNA, 25 bp, Probe sequence
cgcttcctttatttacactgttttg

SEQ ID NO: 88305 - DNA, 25 bp, Probe sequence
gctgttcactttttataatacttct

SEQ ID NO: 88306 - DNA, 25 bp, Probe sequence
gaatgtcttcacttatacttctagt

SEQ ID NO: 88307 - DNA, 25 bp, Probe sequence
gatatacgcttcctttatttacact

SEQ ID NO: 88308 - DNA, 25 bp, Probe sequence
gtcttcacttatacttctagtcaca

SEQ ID NO: 88309 - DNA, 25 bp, Probe sequence
tgcggctcatcgcattcatttcttg

SEQ ID NO: 88310 - DNA, 25 bp, Probe sequence
tcgcattcatttcttgtctagcaac

SEQ ID NO: 88311 - DNA, 25 bp, Probe sequence
taatacttctgaatgtcttcactta

SEQ ID NO: 88312 - DNA, 25 bp, Probe sequence
tacactgttttggaattagttactt

SEQ ID NO: 88313 - DNA, 25 bp, Probe sequence
tatcaatttcacactcaatgcggct

SEQ ID NO: 88314 - DNA, 25 bp, Probe sequence
tatatagtaacacttctttgacaaa

SEQ ID NO: 88315 - DNA, 25 bp, Probe sequence
ttatacttctagtcacagatttaaa

SEQ ID NO: 88316 - DNA, 25 bp, Probe sequence
ttcttgtctagcaacgttctactct

SEQ ID NO: 88317 - DNA, 25 bp, Probe sequence
ttactgctgttcactttttataata

SEQ ID NO: 88318 - DNA, 25 bp, Probe sequence
attggcatctgaactagtcgcagtc

SEQ ID NO: 88319 - DNA, 25 bp, Probe sequence
agtcgcagtcaagcaacccaaaatt

SEQ ID NO: 88320 - DNA, 25 bp, Probe sequence
actagtcgcagtcaagcaacccaaa

SEQ ID NO: 88321 - DNA, 25 bp, Probe sequence
aaatctattggcatctgaactagtc

SEQ ID NO: 88322 - DNA, 25 bp, Probe sequence
aagtatctctaattgatgattgtat

SEQ ID NO: 88323 - DNA, 25 bp, Probe sequence
aatcaaatctattggcatctgaact

SEQ ID NO: 88324 - DNA, 25 bp, Probe sequence
catctgaactagtcgcagtcaagca

SEQ ID NO: 88325 - DNA, 25 bp, Probe sequence
ctagtcgcagtcaagcaacccaaaa

SEQ ID NO: 88326 - DNA, 25 bp, Probe sequence
cgcagtcaagcaacccaaaattgtt

SEQ ID NO: 88327 - DNA, 25 bp, Probe sequence
gaaccacaaaaatcaaatctattgg

SEQ ID NO: 88328 - DNA, 25 bp, Probe sequence
gtcaagcaacccaaaattgttaata

SEQ ID NO: 88329 - DNA, 25 bp, Probe sequence
ggcatctgaactagtcgcagtcaag

SEQ ID NO: 88330 - DNA, 25 bp, Probe sequence
tgaactagtcgcagtcaagcaaccc

SEQ ID NO: 88331 - DNA, 25 bp, Probe sequence
tctattggcatctgaactagtcgca

SEQ ID NO: 88332 - DNA, 25 bp, Probe sequence
tacactattttaagtatctctaatt

SEQ ID NO: 88333 - DNA, 25 bp, Probe sequence
attgtctcagacttatccaaaccat

SEQ ID NO: 88334 - DNA, 25 bp, Probe sequence
atttttgacttttaacagctacatt

SEQ ID NO: 88335 - DNA, 25 bp, Probe sequence
ataacatttagtaccgccatctctt

SEQ ID NO: 88336 - DNA, 25 bp, Probe sequence
aaagcctgaaacatgcattgtctca

SEQ ID NO: 88337 - DNA, 25 bp, Probe sequence
ctgcgtgcacacttaataataacat

SEQ ID NO: 88338 - DNA, 25 bp, Probe sequence
gccatctcttatgcaatcaccaaaa

SEQ ID NO: 88339 - DNA, 25 bp, Probe sequence
gcaatcaccaaaactttatacacaa

SEQ ID NO: 88340 - DNA, 25 bp, Probe sequence
gaagacaacctttttctattgagta

SEQ ID NO: 88341 - DNA, 25 bp, Probe sequence
gacttatccaaaccatattcattta

SEQ ID NO: 88342 - DNA, 25 bp, Probe sequence
gagtaattgaaatctctttttatat

SEQ ID NO: 88343 - DNA, 25 bp, Probe sequence
taactaatgatactgcgtgcacact

SEQ ID NO: 88344 - DNA, 25 bp, Probe sequence
tacattcgatgtatttttgactttt

SEQ ID NO: 88345 - DNA, 25 bp, Probe sequence
tatatgcctaactacattcgatgta

SEQ ID NO: 88346 - DNA, 25 bp, Probe sequence
ttttaactcctatgaagacaacctt

SEQ ID NO: 88347 - DNA, 25 bp, Probe sequence
ttaacagctacattttataactaat

SEQ ID NO: 88348 - DNA, 25 bp, Probe sequence
atgtctcacttcaaataatatctaa

SEQ ID NO: 88349 - DNA, 25 bp, Probe sequence
acgcgaacatttatctcgtcatctc

SEQ ID NO: 88350 - DNA, 25 bp, Probe sequence
aacatttatctcgtcatctcatttt

SEQ ID NO: 88351 - DNA, 25 bp, Probe sequence
aatatctaagatttctatgcatttc

SEQ ID NO: 88352 - DNA, 25 bp, Probe sequence
caacggacgcgaacatttatctcgt

SEQ ID NO: 88353 - DNA, 25 bp, Probe sequence
ctcctcgtaatgtctcacttcaaat

SEQ ID NO: 88354 - DNA, 25 bp, Probe sequence
cgtcatctcattttcatcttattca

SEQ ID NO: 88355 - DNA, 25 bp, Probe sequence
cctcgtaatgtctcacttcaaataa

SEQ ID NO: 88356 - DNA, 25 bp, Probe sequence
gcgaacatttatctcgtcatctcat

SEQ ID NO: 88357 - DNA, 25 bp, Probe sequence
gcatttcaacggacgcgaacattta

SEQ ID NO: 88358 - DNA, 25 bp, Probe sequence
gatttctatgcatttcaacggacgc

SEQ ID NO: 88359 - DNA, 25 bp, Probe sequence
gtaatgtctcacttcaaataatatc

SEQ ID NO: 88360 - DNA, 25 bp, Probe sequence
tcgtcatctcattttcatcttattc

SEQ ID NO: 88361 - DNA, 25 bp, Probe sequence
tatgcatttcaacggacgcgaacat

SEQ ID NO: 88362 - DNA, 25 bp, Probe sequence
ttctatgcatttcaacggacgcgaa

SEQ ID NO: 88363 - DNA, 25 bp, Probe sequence
agaaccatagcatattaaacgaata

SEQ ID NO: 88364 - DNA, 25 bp, Probe sequence
accatctctatcgtacgtattgcac

SEQ ID NO: 88365 - DNA, 25 bp, Probe sequence
aagtgagaaagaaccatagcatatt

SEQ ID NO: 88366 - DNA, 25 bp, Probe sequence
ctctatcgtacgtattgcacatgta

SEQ ID NO: 88367 - DNA, 25 bp, Probe sequence
cgaatatagcatcgtttacatttat

SEQ ID NO: 88368 - DNA, 25 bp, Probe sequence
cgccttcctacaattcttaatttca

SEQ ID NO: 88369 - DNA, 25 bp, Probe sequence
gcggtgatctttctcacttttaact

SEQ ID NO: 88370 - DNA, 25 bp, Probe sequence
gcatcgtttacatttatggcggtga

SEQ ID NO: 88371 - DNA, 25 bp, Probe sequence
gcacatgtacgatattttaatttaa

SEQ ID NO: 88372 - DNA, 25 bp, Probe sequence
gtattgcacatgtacgatattttaa

SEQ ID NO: 88373 - DNA, 25 bp, Probe sequence
tctaaccatctctatcgtacgtatt

SEQ ID NO: 88374 - DNA, 25 bp, Probe sequence
tcaaagctctaaccatctctatcgt

SEQ ID NO: 88375 - DNA, 25 bp, Probe sequence
taatttcaaagctctaaccatctct

SEQ ID NO: 88376 - DNA, 25 bp, Probe sequence
tacatttatggcggtgatctttctc

SEQ ID NO: 88377 - DNA, 25 bp, Probe sequence
tatggcggtgatctttctcactttt

SEQ ID NO: 88378 - DNA, 25 bp, Probe sequence
ataccatatttgcagcgttttcgtc

SEQ ID NO: 88379 - DNA, 25 bp, Probe sequence
attttaacaatagtgctttgctttg

SEQ ID NO: 88380 - DNA, 25 bp, Probe sequence
ataataccatatttgcagcgttttc

SEQ ID NO: 88381 - DNA, 25 bp, Probe sequence
accatatttgcagcgttttcgtcaa

SEQ ID NO: 88382 - DNA, 25 bp, Probe sequence
acctcgctacaagttacataatacc

SEQ ID NO: 88383 - DNA, 25 bp, Probe sequence
aacaatagtgctttgctttgtcaat

SEQ ID NO: 88384 - DNA, 25 bp, Probe sequence
aatagtgctttgctttgtcaatcat

SEQ ID NO: 88385 - DNA, 25 bp, Probe sequence
catatttgcagcgttttcgtcaaac

SEQ ID NO: 88386 - DNA, 25 bp, Probe sequence
ctccacctcgctacaagttacataa

SEQ ID NO: 88387 - DNA, 25 bp, Probe sequence
ctcgctacaagttacataataccat

SEQ ID NO: 88388 - DNA, 25 bp, Probe sequence
ccacctcgctacaagttacataata

SEQ ID NO: 88389 - DNA, 25 bp, Probe sequence
gcagcgttttcgtcaaacaaaattt

SEQ ID NO: 88390 - DNA, 25 bp, Probe sequence
tccacctcgctacaagttacataat

SEQ ID NO: 88391 - DNA, 25 bp, Probe sequence
tatttgcagcgttttcgtcaaacaa

SEQ ID NO: 88392 - DNA, 25 bp, Probe sequence
tttgcagcgttttcgtcaaacaaaa

SEQ ID NO: 88393 - DNA, 25 bp, Probe sequence
atcataatatttacttcttatacta

SEQ ID NO: 88394 - DNA, 25 bp, Probe sequence
agtatttacttgtatttgtgtttat

SEQ ID NO: 88395 - DNA, 25 bp, Probe sequence
aatctataagcgaaacatcagtgtt

SEQ ID NO: 88396 - DNA, 25 bp, Probe sequence
aatacaattatccatttactgaaaa

SEQ ID NO: 88397 - DNA, 25 bp, Probe sequence
aattttctccatctaattacttagt

SEQ ID NO: 88398 - DNA, 25 bp, Probe sequence
cgcctaacatctctatatgtcttat

SEQ ID NO: 88399 - DNA, 25 bp, Probe sequence
gccctcttttcgttatcttaatatg

SEQ ID NO: 88400 - DNA, 25 bp, Probe sequence
gaacataatgcccaacactcaaata

SEQ ID NO: 88401 - DNA, 25 bp, Probe sequence
gaaacatcagtgttaaacattttgt

SEQ ID NO: 88402 - DNA, 25 bp, Probe sequence
gaaacgcctaacatctctatatgtc

SEQ ID NO: 88403 - DNA, 25 bp, Probe sequence
gagtattgaacataatgcccaacac

SEQ ID NO: 88404 - DNA, 25 bp, Probe sequence
tgacattttaatttgttttttagtg

SEQ ID NO: 88405 - DNA, 25 bp, Probe sequence
tgcccaacactcaaataattatcat

SEQ ID NO: 88406 - DNA, 25 bp, Probe sequence
tactaagaaacgcctaacatctcta

SEQ ID NO: 88407 - DNA, 25 bp, Probe sequence
ttctccatctaattacttagtattt

SEQ ID NO: 88408 - DNA, 25 bp, Probe sequence
atttttatcagcaatgaatcaataa

SEQ ID NO: 88409 - DNA, 25 bp, Probe sequence
atatcatcataatctgttaacgtat

SEQ ID NO: 88410 - DNA, 25 bp, Probe sequence
agctttatgctttatcgacagtatc

SEQ ID NO: 88411 - DNA, 25 bp, Probe sequence
aaatgtattacatcgctaaatataa

SEQ ID NO: 88412 - DNA, 25 bp, Probe sequence
aaactgccgacaaagctttatgctt

SEQ ID NO: 88413 - DNA, 25 bp, Probe sequence
aaaaactgccgacaaagctttatgc

SEQ ID NO: 88414 - DNA, 25 bp, Probe sequence
aacgtatatatttattagcctttca

SEQ ID NO: 88415 - DNA, 25 bp, Probe sequence
aattttcatatcatcataatctgtt

SEQ ID NO: 88416 - DNA, 25 bp, Probe sequence
caacttattgcaaatgtattacatc

SEQ ID NO: 88417 - DNA, 25 bp, Probe sequence
gaatcaataattttcatatcatcat

SEQ ID NO: 88418 - DNA, 25 bp, Probe sequence
gacagtatcaaatcaacttattgca

SEQ ID NO: 88419 - DNA, 25 bp, Probe sequence
gtatatatttattagcctttcatta

SEQ ID NO: 88420 - DNA, 25 bp, Probe sequence
tcatcataatctgttaacgtatata

SEQ ID NO: 88421 - DNA, 25 bp, Probe sequence
tatttattagcctttcattaaaaat

SEQ ID NO: 88422 - DNA, 25 bp, Probe sequence
ttatcgacagtatcaaatcaactta

SEQ ID NO: 88423 - DNA, 25 bp, Probe sequence
attatccttttatcctagccatttt

SEQ ID NO: 88424 - DNA, 25 bp, Probe sequence
aaaatgtaactccattactatgcga

SEQ ID NO: 88425 - DNA, 25 bp, Probe sequence
gattatccttttatcctagccattt

SEQ ID NO: 88426 - DNA, 25 bp, Probe sequence
gtaactccattactatgcgaatcat

SEQ ID NO: 88427 - DNA, 25 bp, Probe sequence
gtcctccaattatttacttacgcaa

SEQ ID NO: 88428 - DNA, 25 bp, Probe sequence
tccttttatcctagccattttaaat

SEQ ID NO: 88429 - DNA, 25 bp, Probe sequence
tcctccaattatttacttacgcaat

SEQ ID NO: 88430 - DNA, 25 bp, Probe sequence
taactccattactatgcgaatcatt

SEQ ID NO: 88431 - DNA, 25 bp, Probe sequence
tacttacgcaattactattatatat

SEQ ID NO: 88432 - DNA, 25 bp, Probe sequence
tagtcctccaattatttacttacgc

SEQ ID NO: 88433 - DNA, 25 bp, Probe sequence
tatcctagccattttaaatacgtaa

SEQ ID NO: 88434 - DNA, 25 bp, Probe sequence
tatccttttatcctagccattttaa

SEQ ID NO: 88435 - DNA, 25 bp, Probe sequence
tatagtcctccaattatttacttac

SEQ ID NO: 88436 - DNA, 25 bp, Probe sequence
ttatttacttacgcaattactatta

SEQ ID NO: 88437 - DNA, 25 bp, Probe sequence
ttaatattacataggattatccttt

SEQ ID NO: 88438 - DNA, 25 bp, Probe sequence
atcatcgttgcttgcaagtgtttat

SEQ ID NO: 88439 - DNA, 25 bp, Probe sequence
aacatcatcgttgcttgcaagtgtt

SEQ ID NO: 88440 - DNA, 25 bp, Probe sequence
aatcacgaacgaaactattatacac

SEQ ID NO: 88441 - DNA, 25 bp, Probe sequence
cacttacccatcaacatcatcgttg

SEQ ID NO: 88442 - DNA, 25 bp, Probe sequence
ccatcaacatcatcgttgcttgcaa

SEQ ID NO: 88443 - DNA, 25 bp, Probe sequence
ccacctttcatttttgctcaaaacg

SEQ ID NO: 88444 - DNA, 25 bp, Probe sequence
gctcaaaacgagcacctcacttacc

SEQ ID NO: 88445 - DNA, 25 bp, Probe sequence
gcttgcaagtgtttatttattcgta

SEQ ID NO: 88446 - DNA, 25 bp, Probe sequence
gaacgaaactattatacacgtttgg

SEQ ID NO: 88447 - DNA, 25 bp, Probe sequence
gtgtttatttattcgtataatcacg

SEQ ID NO: 88448 - DNA, 25 bp, Probe sequence
ggaatatgttcgtcaaacgcctttt

SEQ ID NO: 88449 - DNA, 25 bp, Probe sequence
tacacgtttggaatatgttcgtcaa

SEQ ID NO: 88450 - DNA, 25 bp, Probe sequence
tacccatcaacatcatcgttgcttg

SEQ ID NO: 88451 - DNA, 25 bp, Probe sequence
tatgttcgtcaaacgccttttaaat

SEQ ID NO: 88452 - DNA, 25 bp, Probe sequence
ttccacctttcatttttgctcaaaa

SEQ ID NO: 88453 - DNA, 25 bp, Probe sequence
attgccatcaattatcattattctt

SEQ ID NO: 88454 - DNA, 25 bp, Probe sequence
attatcattattctttagcttagta

SEQ ID NO: 88455 - DNA, 25 bp, Probe sequence
ataataacacaaaaagcaccatgct

SEQ ID NO: 88456 - DNA, 25 bp, Probe sequence
aagcacagtgcttgttaaacaaagt

SEQ ID NO: 88457 - DNA, 25 bp, Probe sequence
aagcaccatgcttatattaaaataa

SEQ ID NO: 88458 - DNA, 25 bp, Probe sequence
gcgtgtttacctccaacataattgt

SEQ ID NO: 88459 - DNA, 25 bp, Probe sequence
gagtttaatatcttttactcactaa

SEQ ID NO: 88460 - DNA, 25 bp, Probe sequence
tgacaacatctattttccgccattg

SEQ ID NO: 88461 - DNA, 25 bp, Probe sequence
tccgccattgccatcaattatcatt

SEQ ID NO: 88462 - DNA, 25 bp, Probe sequence
taatgacaacatctattttccgcca

SEQ ID NO: 88463 - DNA, 25 bp, Probe sequence
tacctccaacataattgtttcattt

SEQ ID NO: 88464 - DNA, 25 bp, Probe sequence
tatgatgtatcattgttgagtttaa

SEQ ID NO: 88465 - DNA, 25 bp, Probe sequence
tattttccgccattgccatcaatta

SEQ ID NO: 88466 - DNA, 25 bp, Probe sequence
ttttccgccattgccatcaattatc

SEQ ID NO: 88467 - DNA, 25 bp, Probe sequence
ttagcttagtaagtatgtattttaa

SEQ ID NO: 88468 - DNA, 25 bp, Probe sequence
attcgatacgcatcattctaaatat

SEQ ID NO: 88469 - DNA, 25 bp, Probe sequence
acagtcttagattgtctaacgctgc

SEQ ID NO: 88470 - DNA, 25 bp, Probe sequence
aacatcacctcacttttacaatttt

SEQ ID NO: 88471 - DNA, 25 bp, Probe sequence
catcacctcacttttacaattttca

SEQ ID NO: 88472 - DNA, 25 bp, Probe sequence
gagactgctccttatttaagaaaca

SEQ ID NO: 88473 - DNA, 25 bp, Probe sequence
gtctaacgctgcaatcgattattcg

SEQ ID NO: 88474 - DNA, 25 bp, Probe sequence
tgctccttatttaagaaacagtctt

SEQ ID NO: 88475 - DNA, 25 bp, Probe sequence
tcgattattcgatacgcatcattct

SEQ ID NO: 88476 - DNA, 25 bp, Probe sequence
tcattctaaatatattccttatcga

SEQ ID NO: 88477 - DNA, 25 bp, Probe sequence
tcacctcacttttacaattttcaaa

SEQ ID NO: 88478 - DNA, 25 bp, Probe sequence
taagtcttagttatatcattacaaa

SEQ ID NO: 88479 - DNA, 25 bp, Probe sequence
taaaagagactgctccttatttaag

SEQ ID NO: 88480 - DNA, 25 bp, Probe sequence
tatcgaaacagtctttatttatttt

SEQ ID NO: 88481 - DNA, 25 bp, Probe sequence
tattccttatcgaaacagtctttat

SEQ ID NO: 88482 - DNA, 25 bp, Probe sequence
ttcaaaaatggtataagtcttagtt

SEQ ID NO: 88483 - DNA, 25 bp, Probe sequence
attatttctcaaacgcatagtaata

SEQ ID NO: 88484 - DNA, 25 bp, Probe sequence
atatgacatgttttataagctagta

SEQ ID NO: 88485 - DNA, 25 bp, Probe sequence
atacatttttcatatttttgagtct

SEQ ID NO: 88486 - DNA, 25 bp, Probe sequence
atctctatatttttcaacttttcaa

SEQ ID NO: 88487 - DNA, 25 bp, Probe sequence
atgtcattcacacccgtattagttt

SEQ ID NO: 88488 - DNA, 25 bp, Probe sequence
acatatgtcttgtctaaaattaaat

SEQ ID NO: 88489 - DNA, 25 bp, Probe sequence
cacccgtattagttttatcaatctc

SEQ ID NO: 88490 - DNA, 25 bp, Probe sequence
catcaatgtcattcacacccgtatt

SEQ ID NO: 88491 - DNA, 25 bp, Probe sequence
cattcacacccgtattagttttatc

SEQ ID NO: 88492 - DNA, 25 bp, Probe sequence
gttttatcaatctctatatttttca

SEQ ID NO: 88493 - DNA, 25 bp, Probe sequence
gtctacactattatttctcaaacgc

SEQ ID NO: 88494 - DNA, 25 bp, Probe sequence
tgagcttaacatcaatgtcattcac

SEQ ID NO: 88495 - DNA, 25 bp, Probe sequence
tcctcctacttcccataataaaact

SEQ ID NO: 88496 - DNA, 25 bp, Probe sequence
tttcaacttttcaagacatatgtct

SEQ ID NO: 88497 - DNA, 25 bp, Probe sequence
tttcatatttttgagtctacactat

SEQ ID NO: 88498 - DNA, 25 bp, Probe sequence
attactttacttcataaaatgcaac

SEQ ID NO: 88499 - DNA, 25 bp, Probe sequence
agaaagaggtactgaatataatcga

SEQ ID NO: 88500 - DNA, 25 bp, Probe sequence
aatgacttaaaatctaatacgtatt

SEQ ID NO: 88501 - DNA, 25 bp, Probe sequence
aatgcaacaattgtacttattctac

SEQ ID NO: 88502 - DNA, 25 bp, Probe sequence
caattgtacttattctacacccatc

SEQ ID NO: 88503 - DNA, 25 bp, Probe sequence
cttgttttacaattattttctgcta

SEQ ID NO: 88504 - DNA, 25 bp, Probe sequence
cttattctacacccatcattctaaa

SEQ ID NO: 88505 - DNA, 25 bp, Probe sequence
gataaaagtacctctttctataact

SEQ ID NO: 88506 - DNA, 25 bp, Probe sequence
gtacctctttctataactttatcat

SEQ ID NO: 88507 - DNA, 25 bp, Probe sequence
tgtacttattctacacccatcattc

SEQ ID NO: 88508 - DNA, 25 bp, Probe sequence
tctcctctattactctatattttaa

SEQ ID NO: 88509 - DNA, 25 bp, Probe sequence
tcaatctcctctattactctatatt

SEQ ID NO: 88510 - DNA, 25 bp, Probe sequence
tatttcaatctcctctattactcta

SEQ ID NO: 88511 - DNA, 25 bp, Probe sequence
ttttctgctataacaattcaatgac

SEQ ID NO: 88512 - DNA, 25 bp, Probe sequence
ttctacacccatcattctaaataat

SEQ ID NO: 88513 - DNA, 25 bp, Probe sequence
ataaacattttagcgtattgattta

SEQ ID NO: 88514 - DNA, 25 bp, Probe sequence
atcactaaggattatacaactattt

SEQ ID NO: 88515 - DNA, 25 bp, Probe sequence
agttctacatttcactaaaccgcta

SEQ ID NO: 88516 - DNA, 25 bp, Probe sequence
acattttagcgtattgatttaaatt

SEQ ID NO: 88517 - DNA, 25 bp, Probe sequence
caactatttagttctacatttcact

SEQ ID NO: 88518 - DNA, 25 bp, Probe sequence
gaaagcaaacaaaatcactaaggat

SEQ ID NO: 88519 - DNA, 25 bp, Probe sequence
gaaatcttagtttatttatcggata

SEQ ID NO: 88520 - DNA, 25 bp, Probe sequence
gttctacatttcactaaaccgctaa

SEQ ID NO: 88521 - DNA, 25 bp, Probe sequence
gttagttgttgaaatcttagtttat

SEQ ID NO: 88522 - DNA, 25 bp, Probe sequence
tctacatttcactaaaccgctaaaa

SEQ ID NO: 88523 - DNA, 25 bp, Probe sequence
tcttagtttatttatcggatataga

SEQ ID NO: 88524 - DNA, 25 bp, Probe sequence
tcactaaaccgctaaaaataaacat

SEQ ID NO: 88525 - DNA, 25 bp, Probe sequence
tacatttcactaaaccgctaaaaat

SEQ ID NO: 88526 - DNA, 25 bp, Probe sequence
ttagttagttgttgaaatcttagtt

SEQ ID NO: 88527 - DNA, 25 bp, Probe sequence
ttctacatttcactaaaccgctaaa

SEQ ID NO: 88528 - DNA, 25 bp, Probe sequence
attatcttatcattcactggatgtt

SEQ ID NO: 88529 - DNA, 25 bp, Probe sequence
atgtttaatttaacgctcatatttt

SEQ ID NO: 88530 - DNA, 25 bp, Probe sequence
actagttattaatatgtacgtttat

SEQ ID NO: 88531 - DNA, 25 bp, Probe sequence
aactctaataaaatttactcctgcg

SEQ ID NO: 88532 - DNA, 25 bp, Probe sequence
aactcactcttttaaatgacattaa

SEQ ID NO: 88533 - DNA, 25 bp, Probe sequence
aatttactcctgcgatttactagtt

SEQ ID NO: 88534 - DNA, 25 bp, Probe sequence
ctcctgcgatttactagttattaat

SEQ ID NO: 88535 - DNA, 25 bp, Probe sequence
cgtttattatcttatcattcactgg

SEQ ID NO: 88536 - DNA, 25 bp, Probe sequence
gataactcactcttttaaatgacat

SEQ ID NO: 88537 - DNA, 25 bp, Probe sequence
gtacgtttattatcttatcattcac

SEQ ID NO: 88538 - DNA, 25 bp, Probe sequence
taaccaccctttaattatgtattgt

SEQ ID NO: 88539 - DNA, 25 bp, Probe sequence
tatcattcactggatgtttttatca

SEQ ID NO: 88540 - DNA, 25 bp, Probe sequence
ttatgtattgtttaactctaataaa

SEQ ID NO: 88541 - DNA, 25 bp, Probe sequence
ttactcctgcgatttactagttatt

SEQ ID NO: 88542 - DNA, 25 bp, Probe sequence
ttcactggatgtttttatcagaaaa

SEQ ID NO: 88543 - DNA, 25 bp, Probe sequence
atactaattcgtaatcaaatgcatt

SEQ ID NO: 88544 - DNA, 25 bp, Probe sequence
ataatcaatcatctattcccaataa

SEQ ID NO: 88545 - DNA, 25 bp, Probe sequence
atcaaaatgcggaaacatctccaat

SEQ ID NO: 88546 - DNA, 25 bp, Probe sequence
atcatcatatactaattcgtaatca

SEQ ID NO: 88547 - DNA, 25 bp, Probe sequence
acatctccaataatcaatcatctat

SEQ ID NO: 88548 - DNA, 25 bp, Probe sequence
aaatatgaatgttctcaacaataca

SEQ ID NO: 88549 - DNA, 25 bp, Probe sequence
aacatctccaataatcaatcatcta

SEQ ID NO: 88550 - DNA, 25 bp, Probe sequence
aatgcggaaacatctccaataatca

SEQ ID NO: 88551 - DNA, 25 bp, Probe sequence
aatcaatcatctattcccaataaat

SEQ ID NO: 88552 - DNA, 25 bp, Probe sequence
caatcatctattcccaataaatatg

SEQ ID NO: 88553 - DNA, 25 bp, Probe sequence
ctaaatcatcatatactaattcgta

SEQ ID NO: 88554 - DNA, 25 bp, Probe sequence
gaaacatctccaataatcaatcatc

SEQ ID NO: 88555 - DNA, 25 bp, Probe sequence
tccaataatcaatcatctattccca

SEQ ID NO: 88556 - DNA, 25 bp, Probe sequence
taattcgtaatcaaatgcatttaga

SEQ ID NO: 88557 - DNA, 25 bp, Probe sequence
ttcccaataaatatgaatgttctca

SEQ ID NO: 88558 - DNA, 25 bp, Probe sequence
atacgattatcattaatacaaccct

SEQ ID NO: 88559 - DNA, 25 bp, Probe sequence
atgatgtggcatgttttcttatatt

SEQ ID NO: 88560 - DNA, 25 bp, Probe sequence
acatcaattttatcacttttttaat

SEQ ID NO: 88561 - DNA, 25 bp, Probe sequence
aagcaatttctgttttcgtttatga

SEQ ID NO: 88562 - DNA, 25 bp, Probe sequence
gcaatttctgttttcgtttatgaat

SEQ ID NO: 88563 - DNA, 25 bp, Probe sequence
gatgtggcatgttttcttatattca

SEQ ID NO: 88564 - DNA, 25 bp, Probe sequence
gattatcattaatacaaccctaagt

SEQ ID NO: 88565 - DNA, 25 bp, Probe sequence
gttttcttatattcataacatcaat

SEQ ID NO: 88566 - DNA, 25 bp, Probe sequence
gtaataaagcaatttctgttttcgt

SEQ ID NO: 88567 - DNA, 25 bp, Probe sequence
gtggcatgttttcttatattcataa

SEQ ID NO: 88568 - DNA, 25 bp, Probe sequence
tgttttcgtttatgaattacttatt

SEQ ID NO: 88569 - DNA, 25 bp, Probe sequence
tcacttttttaattttacaagagct

SEQ ID NO: 88570 - DNA, 25 bp, Probe sequence
taacatcaattttatcactttttta

SEQ ID NO: 88571 - DNA, 25 bp, Probe sequence
tacaccttaaagttatgatgtggca

SEQ ID NO: 88572 - DNA, 25 bp, Probe sequence
ttctgttttcgtttatgaattactt

SEQ ID NO: 88573 - DNA, 25 bp, Probe sequence
acatgttgtatacacgagagctctt

SEQ ID NO: 88574 - DNA, 25 bp, Probe sequence
aaaccatacacattctatacaattt

SEQ ID NO: 88575 - DNA, 25 bp, Probe sequence
aacatttctcatccgaactactcta

SEQ ID NO: 88576 - DNA, 25 bp, Probe sequence
ctatcagccaactaccttgtttaac

SEQ ID NO: 88577 - DNA, 25 bp, Probe sequence
gcttttagtgtgtttcgtctgtttt

SEQ ID NO: 88578 - DNA, 25 bp, Probe sequence
gaactttgtcacatcagcttttagt

SEQ ID NO: 88579 - DNA, 25 bp, Probe sequence
gaactactctatatacgtatcgtca

SEQ ID NO: 88580 - DNA, 25 bp, Probe sequence
gaaaaccctcgcatacacatgttgt

SEQ ID NO: 88581 - DNA, 25 bp, Probe sequence
gacttttatatattacttcattcaa

SEQ ID NO: 88582 - DNA, 25 bp, Probe sequence
gagctcttactaacaatcaacgtca

SEQ ID NO: 88583 - DNA, 25 bp, Probe sequence
gtatcgtcattttcatctatcagcc

SEQ ID NO: 88584 - DNA, 25 bp, Probe sequence
gtaccactatcgttaactattacta

SEQ ID NO: 88585 - DNA, 25 bp, Probe sequence
gtctatcgttaacatttctcatccg

SEQ ID NO: 88586 - DNA, 25 bp, Probe sequence
tcaaaactgacatttctcgtgctct

SEQ ID NO: 88587 - DNA, 25 bp, Probe sequence
ttctcgtgctctctaattcataaca

SEQ ID NO: 88588 - DNA, 25 bp, Probe sequence
atacaatatgtcacgttattccgca

SEQ ID NO: 88589 - DNA, 25 bp, Probe sequence
acgttattccgcatcttctgaagaa

SEQ ID NO: 88590 - DNA, 25 bp, Probe sequence
acaatatgtcacgttattccgcatc

SEQ ID NO: 88591 - DNA, 25 bp, Probe sequence
aaaactgaatacaatatgtcacgtt

SEQ ID NO: 88592 - DNA, 25 bp, Probe sequence
aactgaatacaatatgtcacgttat

SEQ ID NO: 88593 - DNA, 25 bp, Probe sequence
aagaagatgttccgaatatatcctt

SEQ ID NO: 88594 - DNA, 25 bp, Probe sequence
aatacaatatgtcacgttattccgc

SEQ ID NO: 88595 - DNA, 25 bp, Probe sequence
aatatgtcacgttattccgcatctt

SEQ ID NO: 88596 - DNA, 25 bp, Probe sequence
caatatgtcacgttattccgcatct

SEQ ID NO: 88597 - DNA, 25 bp, Probe sequence
cgttattccgcatcttctgaagaag

SEQ ID NO: 88598 - DNA, 25 bp, Probe sequence
gaagaagatgttccgaatatatcct

SEQ ID NO: 88599 - DNA, 25 bp, Probe sequence
gttattccgcatcttctgaagaaga

SEQ ID NO: 88600 - DNA, 25 bp, Probe sequence
tcttctgaagaagatgttccgaata

SEQ ID NO: 88601 - DNA, 25 bp, Probe sequence
tacaatatgtcacgttattccgcat

SEQ ID NO: 88602 - DNA, 25 bp, Probe sequence
ttattccgcatcttctgaagaagat

SEQ ID NO: 88603 - DNA, 25 bp, Probe sequence
ctactctagcggaacgtaagttggc

SEQ ID NO: 88604 - DNA, 25 bp, Probe sequence
acctttcttgacttgtgacaatcgc

SEQ ID NO: 88605 - DNA, 25 bp, Probe sequence
catcctcgctaagaacctttcttga

SEQ ID NO: 88606 - DNA, 25 bp, Probe sequence
aagaacctttcttgacttgtgacaa

SEQ ID NO: 88607 - DNA, 25 bp, Probe sequence
tccagttctactctagcggaacgta

SEQ ID NO: 88608 - DNA, 25 bp, Probe sequence
ctctcgcttactcatttagctctac

SEQ ID NO: 88609 - DNA, 25 bp, Probe sequence
cgctaagaacctttcttgacttgtg

SEQ ID NO: 88610 - DNA, 25 bp, Probe sequence
gcggaacgtaagttggctaccatcc

SEQ ID NO: 88611 - DNA, 25 bp, Probe sequence
gaacgtaagttggctaccatcctcg

SEQ ID NO: 88612 - DNA, 25 bp, Probe sequence
gaacctttcttgacttgtgacaatc

SEQ ID NO: 88613 - DNA, 25 bp, Probe sequence
tgacttgtgacaatcgcttgcttct

SEQ ID NO: 88614 - DNA, 25 bp, Probe sequence
tcctcgctaagaacctttcttgact

SEQ ID NO: 88615 - DNA, 25 bp, Probe sequence
tcgcttactcatttagctctactaa

SEQ ID NO: 88616 - DNA, 25 bp, Probe sequence
tcttgacttgtgacaatcgcttgct

SEQ ID NO: 88617 - DNA, 25 bp, Probe sequence
tagctctactaaactcgttgcgctc

SEQ ID NO: 88618 - DNA, 25 bp, Probe sequence
attttcaattagataccgtcttact

SEQ ID NO: 88619 - DNA, 25 bp, Probe sequence
attttgttttcgatgatatcatttt

SEQ ID NO: 88620 - DNA, 25 bp, Probe sequence
atttatacaatattttgttttcgat

SEQ ID NO: 88621 - DNA, 25 bp, Probe sequence
atattttgttttcgatgatatcatt

SEQ ID NO: 88622 - DNA, 25 bp, Probe sequence
agagcagtaagatcattttcaatta

SEQ ID NO: 88623 - DNA, 25 bp, Probe sequence
aagagcagtaagatcattttcaatt

SEQ ID NO: 88624 - DNA, 25 bp, Probe sequence
aattagataccgtcttactgctctt

SEQ ID NO: 88625 - DNA, 25 bp, Probe sequence
caattagataccgtcttactgctct

SEQ ID NO: 88626 - DNA, 25 bp, Probe sequence
gatcattttcaattagataccgtct

SEQ ID NO: 88627 - DNA, 25 bp, Probe sequence
gttttcgatgatatcattttaaatt

SEQ ID NO: 88628 - DNA, 25 bp, Probe sequence
tcctttttgtatttcaataaagtat

SEQ ID NO: 88629 - DNA, 25 bp, Probe sequence
tcattttcaattagataccgtctta

SEQ ID NO: 88630 - DNA, 25 bp, Probe sequence
tcaattagataccgtcttactgctc

SEQ ID NO: 88631 - DNA, 25 bp, Probe sequence
tttcaattagataccgtcttactgc

SEQ ID NO: 88632 - DNA, 25 bp, Probe sequence
ttcaattagataccgtcttactgct

SEQ ID NO: 88633 - DNA, 25 bp, Probe sequence
ataagataaatttaggaggtcagtt

SEQ ID NO: 88634 - DNA, 25 bp, Probe sequence
agataaatttaggaggtcagttata

SEQ ID NO: 88635 - DNA, 25 bp, Probe sequence
acattgtaatgtataaactgatatt

SEQ ID NO: 88636 - DNA, 25 bp, Probe sequence
aagataaatttaggaggtcagttat

SEQ ID NO: 88637 - DNA, 25 bp, Probe sequence
aagttgattaaatacattgtaatgt

SEQ ID NO: 88638 - DNA, 25 bp, Probe sequence
caagttgattaaatacattgtaatg

SEQ ID NO: 88639 - DNA, 25 bp, Probe sequence
cattgtaatgtataaactgatattt

SEQ ID NO: 88640 - DNA, 25 bp, Probe sequence
cttttcaagttgattaaatacattg

SEQ ID NO: 88641 - DNA, 25 bp, Probe sequence
cccttttcaagttgattaaatacat

SEQ ID NO: 88642 - DNA, 25 bp, Probe sequence
gataaatttaggaggtcagttataa

SEQ ID NO: 88643 - DNA, 25 bp, Probe sequence
taagataaatttaggaggtcagtta

SEQ ID NO: 88644 - DNA, 25 bp, Probe sequence
tcaagttgattaaatacattgtaat

SEQ ID NO: 88645 - DNA, 25 bp, Probe sequence
tttcaagttgattaaatacattgta

SEQ ID NO: 88646 - DNA, 25 bp, Probe sequence
ttttcaagttgattaaatacattgt

SEQ ID NO: 88647 - DNA, 25 bp, Probe sequence
ttcaagttgattaaatacattgtaa

SEQ ID NO: 88648 - DNA, 25 bp, Probe sequence
atacatcaacatcgaattaatccct

SEQ ID NO: 88649 - DNA, 25 bp, Probe sequence
ataattcgttgatttagcatacatt

SEQ ID NO: 88650 - DNA, 25 bp, Probe sequence
actattctcagtctctttgaagggg

SEQ ID NO: 88651 - DNA, 25 bp, Probe sequence
aactcctccaaagctaagtttgaag

SEQ ID NO: 88652 - DNA, 25 bp, Probe sequence
aattttgactattctcagtctcttt

SEQ ID NO: 88653 - DNA, 25 bp, Probe sequence
gaaggagatattttcttctcaacaa

SEQ ID NO: 88654 - DNA, 25 bp, Probe sequence
gacataaaaaataactcctccaaag

SEQ ID NO: 88655 - DNA, 25 bp, Probe sequence
gatattttcttctcaacaaatctat

SEQ ID NO: 88656 - DNA, 25 bp, Probe sequence
ggttttttcttatgtatatctttat

SEQ ID NO: 88657 - DNA, 25 bp, Probe sequence
tgaaggggttttttcttatgtatat

SEQ ID NO: 88658 - DNA, 25 bp, Probe sequence
tctcagtctctttgaaggggttttt

SEQ ID NO: 88659 - DNA, 25 bp, Probe sequence
tcttctcaacaaatctataaatatc

SEQ ID NO: 88660 - DNA, 25 bp, Probe sequence
tcaacatcgaattaatcccttcaaa

SEQ ID NO: 88661 - DNA, 25 bp, Probe sequence
taatcccttcaaaattttgactatt

SEQ ID NO: 88662 - DNA, 25 bp, Probe sequence
ttatgtatatctttattttttatca

SEQ ID NO: 88663 - DNA, 25 bp, Probe sequence
attatatgacctattttgacctttt

SEQ ID NO: 88664 - DNA, 25 bp, Probe sequence
atttatgatgttagcccttccattt

SEQ ID NO: 88665 - DNA, 25 bp, Probe sequence
atatgacctattttgacctttttca

SEQ ID NO: 88666 - DNA, 25 bp, Probe sequence
atgttagcccttccattttattgta

SEQ ID NO: 88667 - DNA, 25 bp, Probe sequence
aaaatttatgatgttagcccttcca

SEQ ID NO: 88668 - DNA, 25 bp, Probe sequence
cctttttgaccttctttgactatat

SEQ ID NO: 88669 - DNA, 25 bp, Probe sequence
gcccttccattttattgtatgatag

SEQ ID NO: 88670 - DNA, 25 bp, Probe sequence
gaccttctttgactatattatatga

SEQ ID NO: 88671 - DNA, 25 bp, Probe sequence
gttagcccttccattttattgtatg

SEQ ID NO: 88672 - DNA, 25 bp, Probe sequence
tgatgttagcccttccattttattg

SEQ ID NO: 88673 - DNA, 25 bp, Probe sequence
tgacctattttgacctttttcaatt

SEQ ID NO: 88674 - DNA, 25 bp, Probe sequence
tagcccttccattttattgtatgat

SEQ ID NO: 88675 - DNA, 25 bp, Probe sequence
tatgatgttagcccttccattttat

SEQ ID NO: 88676 - DNA, 25 bp, Probe sequence
tttgaccttctttgactatattata

SEQ ID NO: 88677 - DNA, 25 bp, Probe sequence
tttttgaccttctttgactatatta

SEQ ID NO: 88678 - DNA, 25 bp, Probe sequence
ataattcttaactatcctttgatga

SEQ ID NO: 88679 - DNA, 25 bp, Probe sequence
atctattttaaacgcacattcccat

SEQ ID NO: 88680 - DNA, 25 bp, Probe sequence
atcgctgtaggctcattaacttgtt

SEQ ID NO: 88681 - DNA, 25 bp, Probe sequence
acgcaaactgttttaccagatttat

SEQ ID NO: 88682 - DNA, 25 bp, Probe sequence
aactcttttctctagatttatcaca

SEQ ID NO: 88683 - DNA, 25 bp, Probe sequence
aacgcacattcccattatgacaaat

SEQ ID NO: 88684 - DNA, 25 bp, Probe sequence
cctccactttcctttgaacaaatct

SEQ ID NO: 88685 - DNA, 25 bp, Probe sequence
gacgtaagttgctagtatcttcaaa

SEQ ID NO: 88686 - DNA, 25 bp, Probe sequence
gattgtttcgttgatggatactttc

SEQ ID NO: 88687 - DNA, 25 bp, Probe sequence
gttgatagtcggtatctttcaaaga

SEQ ID NO: 88688 - DNA, 25 bp, Probe sequence
ggatactttcacgaatttctatagt

SEQ ID NO: 88689 - DNA, 25 bp, Probe sequence
tcatacctttatgctatcgctgtag

SEQ ID NO: 88690 - DNA, 25 bp, Probe sequence
tatagacctattttattttgacgta

SEQ ID NO: 88691 - DNA, 25 bp, Probe sequence
tttcttagtaaactcttttctctag

SEQ ID NO: 88692 - DNA, 25 bp, Probe sequence
ttaacatgactactaacgcaaactg

SEQ ID NO: 88693 - DNA, 25 bp, Probe sequence
attagcactatttgtattttttgat

SEQ ID NO: 88694 - DNA, 25 bp, Probe sequence
atatcagattttcaagttagttcat

SEQ ID NO: 88695 - DNA, 25 bp, Probe sequence
atctattttgttttcgtcaactaca

SEQ ID NO: 88696 - DNA, 25 bp, Probe sequence
aaagctatccctaagaatcaagact

SEQ ID NO: 88697 - DNA, 25 bp, Probe sequence
aacaatgctttttaacatgacctta

SEQ ID NO: 88698 - DNA, 25 bp, Probe sequence
aacaaatgtctaactcgtcttattg

SEQ ID NO: 88699 - DNA, 25 bp, Probe sequence
aagaatcaagactgcactacataag

SEQ ID NO: 88700 - DNA, 25 bp, Probe sequence
aattcactgggtaatatgcttaaat

SEQ ID NO: 88701 - DNA, 25 bp, Probe sequence
cttcgccatttcatataccttttaa

SEQ ID NO: 88702 - DNA, 25 bp, Probe sequence
gcactacataagcatttcaacgact

SEQ ID NO: 88703 - DNA, 25 bp, Probe sequence
gaaagcagttgttttttcaacactt

SEQ ID NO: 88704 - DNA, 25 bp, Probe sequence
tgattctaattttgtatgtcttgat

SEQ ID NO: 88705 - DNA, 25 bp, Probe sequence
tacttcaaattacaaacttcgccat

SEQ ID NO: 88706 - DNA, 25 bp, Probe sequence
ttattcatttgctatcttcgaccgt

SEQ ID NO: 88707 - DNA, 25 bp, Probe sequence
ttgctatcttcgaccgtcataacaa

SEQ ID NO: 88708 - DNA, 25 bp, Probe sequence
atactttattcatattgttgtaatt

SEQ ID NO: 88709 - DNA, 25 bp, Probe sequence
acaactttatcatatgtggttacgt

SEQ ID NO: 88710 - DNA, 25 bp, Probe sequence
aatttctacgttgtactcacagcaa

SEQ ID NO: 88711 - DNA, 25 bp, Probe sequence
aattcattttacgaaggtgcattca

SEQ ID NO: 88712 - DNA, 25 bp, Probe sequence
cattaataatattgcgggcgcttcc

SEQ ID NO: 88713 - DNA, 25 bp, Probe sequence
cgtacactctctgcatcgtataaat

SEQ ID NO: 88714 - DNA, 25 bp, Probe sequence
gcgggcgcttccaaattatcaagga

SEQ ID NO: 88715 - DNA, 25 bp, Probe sequence
gtatatactaccttgatcttgtcta

SEQ ID NO: 88716 - DNA, 25 bp, Probe sequence
gtcaacttaatgctcatcactctca

SEQ ID NO: 88717 - DNA, 25 bp, Probe sequence
ggtgcattcattaatttctacgttg

SEQ ID NO: 88718 - DNA, 25 bp, Probe sequence
tgtactcacagcaaccgtacactct

SEQ ID NO: 88719 - DNA, 25 bp, Probe sequence
tgctcatcactctcattatatattt

SEQ ID NO: 88720 - DNA, 25 bp, Probe sequence
taattactaatccttcgttttatat

SEQ ID NO: 88721 - DNA, 25 bp, Probe sequence
tactaccttgatcttgtctatttca

SEQ ID NO: 88722 - DNA, 25 bp, Probe sequence
tattgcgggcgcttccaaattatca

SEQ ID NO: 88723 - DNA, 25 bp, Probe sequence
attgttacattcaaaatttcaagat

SEQ ID NO: 88724 - DNA, 25 bp, Probe sequence
atattgttacattcaaaatttcaag

SEQ ID NO: 88725 - DNA, 25 bp, Probe sequence
agtttaatattgttacattcaaaat

SEQ ID NO: 88726 - DNA, 25 bp, Probe sequence
acattcaaaatttcaagatgacgga

SEQ ID NO: 88727 - DNA, 25 bp, Probe sequence
aatattgttacattcaaaatttcaa

SEQ ID NO: 88728 - DNA, 25 bp, Probe sequence
cattcaaaatttcaagatgacggaa

SEQ ID NO: 88729 - DNA, 25 bp, Probe sequence
gttacattcaaaatttcaagatgac

SEQ ID NO: 88730 - DNA, 25 bp, Probe sequence
gttagtttaatattgttacattcaa

SEQ ID NO: 88731 - DNA, 25 bp, Probe sequence
gtttaatattgttacattcaaaatt

SEQ ID NO: 88732 - DNA, 25 bp, Probe sequence
ggttagtttaatattgttacattca

SEQ ID NO: 88733 - DNA, 25 bp, Probe sequence
taatattgttacattcaaaatttca

SEQ ID NO: 88734 - DNA, 25 bp, Probe sequence
taaggttagtttaatattgttacat

SEQ ID NO: 88735 - DNA, 25 bp, Probe sequence
tacattcaaaatttcaagatgacgg

SEQ ID NO: 88736 - DNA, 25 bp, Probe sequence
tattgttacattcaaaatttcaaga

SEQ ID NO: 88737 - DNA, 25 bp, Probe sequence
ttagtttaatattgttacattcaaa

SEQ ID NO: 88738 - DNA, 25 bp, Probe sequence
attcaattcacgtcctaaggcgctt

SEQ ID NO: 88739 - DNA, 25 bp, Probe sequence
agtaacacgttataattcaattcac

SEQ ID NO: 88740 - DNA, 25 bp, Probe sequence
accatcagtaagtaacacgttataa

SEQ ID NO: 88741 - DNA, 25 bp, Probe sequence
acacgttataattcaattcacgtcc

SEQ ID NO: 88742 - DNA, 25 bp, Probe sequence
aaaccatcagtaagtaacacgttat

SEQ ID NO: 88743 - DNA, 25 bp, Probe sequence
aacaaatgtcaaaccatcagtaagt

SEQ ID NO: 88744 - DNA, 25 bp, Probe sequence
aattcaattcacgtcctaaggcgct

SEQ ID NO: 88745 - DNA, 25 bp, Probe sequence
cgttataattcaattcacgtcctaa

SEQ ID NO: 88746 - DNA, 25 bp, Probe sequence
gtcaaaccatcagtaagtaacacgt

SEQ ID NO: 88747 - DNA, 25 bp, Probe sequence
taattcaattcacgtcctaaggcgc

SEQ ID NO: 88748 - DNA, 25 bp, Probe sequence
tataattcaattcacgtcctaaggc

SEQ ID NO: 88749 - DNA, 25 bp, Probe sequence
ttcaattcacgtcctaaggcgcttt

SEQ ID NO: 88750 - DNA, 25 bp, Probe sequence
ttattcattataataccagtatact

SEQ ID NO: 88751 - DNA, 25 bp, Probe sequence
ttataacaaatgtcaaaccatcagt

SEQ ID NO: 88752 - DNA, 25 bp, Probe sequence
ttataataccagtatactatacata

SEQ ID NO: 88753 - DNA, 25 bp, Probe sequence
attatcaaagtattatttcgaatgt

SEQ ID NO: 88754 - DNA, 25 bp, Probe sequence
acctccaaatcctttgaacatatta

SEQ ID NO: 88755 - DNA, 25 bp, Probe sequence
acatattatcaaagtattatttcga

SEQ ID NO: 88756 - DNA, 25 bp, Probe sequence
aacctccaaatcctttgaacatatt

SEQ ID NO: 88757 - DNA, 25 bp, Probe sequence
caacctccaaatcctttgaacatat

SEQ ID NO: 88758 - DNA, 25 bp, Probe sequence
ctcaacctccaaatcctttgaacat

SEQ ID NO: 88759 - DNA, 25 bp, Probe sequence
ctccaaatcctttgaacatattatc

SEQ ID NO: 88760 - DNA, 25 bp, Probe sequence
gctcaacctccaaatcctttgaaca

SEQ ID NO: 88761 - DNA, 25 bp, Probe sequence
cctccaaatcctttgaacatattat

SEQ ID NO: 88762 - DNA, 25 bp, Probe sequence
ccaaatcctttgaacatattatcaa

SEQ ID NO: 88763 - DNA, 25 bp, Probe sequence
gaacatattatcaaagtattatttc

SEQ ID NO: 88764 - DNA, 25 bp, Probe sequence
tgctcaacctccaaatcctttgaac

SEQ ID NO: 88765 - DNA, 25 bp, Probe sequence
tccaaatcctttgaacatattatca

SEQ ID NO: 88766 - DNA, 25 bp, Probe sequence
tcaacctccaaatcctttgaacata

SEQ ID NO: 88767 - DNA, 25 bp, Probe sequence
tatcaaagtattatttcgaatgtat

SEQ ID NO: 88768 - DNA, 25 bp, Probe sequence
atgggcgctctaaaagcgcgaccac

SEQ ID NO: 88769 - DNA, 25 bp, Probe sequence
aagcgcgaccacataattttaacac

SEQ ID NO: 88770 - DNA, 25 bp, Probe sequence
aatcaatactcttttttatcttttg

SEQ ID NO: 88771 - DNA, 25 bp, Probe sequence
cacataattttaacacttttctaat

SEQ ID NO: 88772 - DNA, 25 bp, Probe sequence
ctcccactcttaacatttcgtgacg

SEQ ID NO: 88773 - DNA, 25 bp, Probe sequence
cccactcttaacatttcgtgacgaa

SEQ ID NO: 88774 - DNA, 25 bp, Probe sequence
cctcccactcttaacatttcgtgac

SEQ ID NO: 88775 - DNA, 25 bp, Probe sequence
gcgcgaccacataattttaacactt

SEQ ID NO: 88776 - DNA, 25 bp, Probe sequence
gctctaaaagcgcgaccacataatt

SEQ ID NO: 88777 - DNA, 25 bp, Probe sequence
gaccacataattttaacacttttct

SEQ ID NO: 88778 - DNA, 25 bp, Probe sequence
gtgacgaaatgggcgctctaaaagc

SEQ ID NO: 88779 - DNA, 25 bp, Probe sequence
gggcgctctaaaagcgcgaccacat

SEQ ID NO: 88780 - DNA, 25 bp, Probe sequence
tcgtgacgaaatgggcgctctaaaa

SEQ ID NO: 88781 - DNA, 25 bp, Probe sequence
tcaatactcttttttatcttttggt

SEQ ID NO: 88782 - DNA, 25 bp, Probe sequence
tttcgtgacgaaatgggcgctctaa

SEQ ID NO: 88783 - DNA, 25 bp, Probe sequence
attcatcattattatctctgttatc

SEQ ID NO: 88784 - DNA, 25 bp, Probe sequence
atctgcttcatcgtttaaatcatgt

SEQ ID NO: 88785 - DNA, 25 bp, Probe sequence
aagagcagacaacagaagaattaat

SEQ ID NO: 88786 - DNA, 25 bp, Probe sequence
aatcaatcattaatctagtcattca

SEQ ID NO: 88787 - DNA, 25 bp, Probe sequence
cattattatctctgttatctgcttc

SEQ ID NO: 88788 - DNA, 25 bp, Probe sequence
ctagtcattcagattatatttataa

SEQ ID NO: 88789 - DNA, 25 bp, Probe sequence
ctctgttatctgcttcatcgtttaa

SEQ ID NO: 88790 - DNA, 25 bp, Probe sequence
ctcccacattacttgctatatgcaa

SEQ ID NO: 88791 - DNA, 25 bp, Probe sequence
gctatatgcaagttaagagcagaca

SEQ ID NO: 88792 - DNA, 25 bp, Probe sequence
gcttcatcgtttaaatcatgtaatc

SEQ ID NO: 88793 - DNA, 25 bp, Probe sequence
gttatctgcttcatcgtttaaatca

SEQ ID NO: 88794 - DNA, 25 bp, Probe sequence
tcctcccacattacttgctatatgc

SEQ ID NO: 88795 - DNA, 25 bp, Probe sequence
tattatctctgttatctgcttcatc

SEQ ID NO: 88796 - DNA, 25 bp, Probe sequence
ttttagcggaatttcctcccacatt

SEQ ID NO: 88797 - DNA, 25 bp, Probe sequence
ttatctctgttatctgcttcatcgt

SEQ ID NO: 88798 - DNA, 25 bp, Probe sequence
agatcatcacgttcaagtcaatttt

SEQ ID NO: 88799 - DNA, 25 bp, Probe sequence
agcctcggcaggataaattttaagt

SEQ ID NO: 88800 - DNA, 25 bp, Probe sequence
aacttggaaattacttattgtcaat

SEQ ID NO: 88801 - DNA, 25 bp, Probe sequence
aagatatttctttcagcctgtaatt

SEQ ID NO: 88802 - DNA, 25 bp, Probe sequence
aagtgcttgaaagatcatagatcat

SEQ ID NO: 88803 - DNA, 25 bp, Probe sequence
caagtcaattttagcctcggcagga

SEQ ID NO: 88804 - DNA, 25 bp, Probe sequence
cagcctgtaattgtttatatcattt

SEQ ID NO: 88805 - DNA, 25 bp, Probe sequence
gcactttctacccacggcaaaaagt

SEQ ID NO: 88806 - DNA, 25 bp, Probe sequence
gatcatagatcatcacgttcaagtc

SEQ ID NO: 88807 - DNA, 25 bp, Probe sequence
gttcaagtcaattttagcctcggca

SEQ ID NO: 88808 - DNA, 25 bp, Probe sequence
gttataaataactcctactgtctta

SEQ ID NO: 88809 - DNA, 25 bp, Probe sequence
tctacccacggcaaaaagtgcttga

SEQ ID NO: 88810 - DNA, 25 bp, Probe sequence
tcagacacctccatttaaatttttg

SEQ ID NO: 88811 - DNA, 25 bp, Probe sequence
taactcctactgtcttaggtaaaat

SEQ ID NO: 88812 - DNA, 25 bp, Probe sequence
ttgtcaatatatttttacagactga

SEQ ID NO: 88813 - DNA, 25 bp, Probe sequence
gggttttaacttctcaaagaatcat

SEQ ID NO: 88814 - DNA, 25 bp, Probe sequence
atttcactcagtctttaaatgaata

SEQ ID NO: 88815 - DNA, 25 bp, Probe sequence
ataacatttcactcagtctttaaat

SEQ ID NO: 88816 - DNA, 25 bp, Probe sequence
agcaatacttgctataaaactttga

SEQ ID NO: 88817 - DNA, 25 bp, Probe sequence
acctcatcttcactttgtaactcgt

SEQ ID NO: 88818 - DNA, 25 bp, Probe sequence
aatacttgctataaaactttgatta

SEQ ID NO: 88819 - DNA, 25 bp, Probe sequence
aattataacatttcactcagtcttt

SEQ ID NO: 88820 - DNA, 25 bp, Probe sequence
cactttgtaactcgtcattataatt

SEQ ID NO: 88821 - DNA, 25 bp, Probe sequence
catcttcactttgtaactcgtcatt

SEQ ID NO: 88822 - DNA, 25 bp, Probe sequence
cctcatcttcactttgtaactcgtc

SEQ ID NO: 88823 - DNA, 25 bp, Probe sequence
gaatcattatattatagcaatactt

SEQ ID NO: 88824 - DNA, 25 bp, Probe sequence
tgtaactcgtcattataattataac

SEQ ID NO: 88825 - DNA, 25 bp, Probe sequence
tcttcactttgtaactcgtcattat

SEQ ID NO: 88826 - DNA, 25 bp, Probe sequence
tcatcttcactttgtaactcgtcat

SEQ ID NO: 88827 - DNA, 25 bp, Probe sequence
ttcactttgtaactcgtcattataa

SEQ ID NO: 88828 - DNA, 25 bp, Probe sequence
atatttattcttaattaacttatct

SEQ ID NO: 88829 - DNA, 25 bp, Probe sequence
accattttcgattctatatttattc

SEQ ID NO: 88830 - DNA, 25 bp, Probe sequence
acggcaacactaatgatgacaccat

SEQ ID NO: 88831 - DNA, 25 bp, Probe sequence
actataacagaatatccatttcatt

SEQ ID NO: 88832 - DNA, 25 bp, Probe sequence
acagattcacccctcaaaaattatg

SEQ ID NO: 88833 - DNA, 25 bp, Probe sequence
aaagtacacacttattgaacataaa

SEQ ID NO: 88834 - DNA, 25 bp, Probe sequence
aaacggcaacactaatgatgacacc

SEQ ID NO: 88835 - DNA, 25 bp, Probe sequence
aattatgtgatccgcttttagctaa

SEQ ID NO: 88836 - DNA, 25 bp, Probe sequence
cacccctcaaaaattatgtgatccg

SEQ ID NO: 88837 - DNA, 25 bp, Probe sequence
gacaccattttcgattctatattta

SEQ ID NO: 88838 - DNA, 25 bp, Probe sequence
gatccgcttttagctaaataccata

SEQ ID NO: 88839 - DNA, 25 bp, Probe sequence
gtgatccgcttttagctaaatacca

SEQ ID NO: 88840 - DNA, 25 bp, Probe sequence
tgatgacaccattttcgattctata

SEQ ID NO: 88841 - DNA, 25 bp, Probe sequence
tattcttaattaacttatctattta

SEQ ID NO: 88842 - DNA, 25 bp, Probe sequence
ttagctaaataccataagcatatta

SEQ ID NO: 88843 - DNA, 25 bp, Probe sequence
agcttagtatctttttgcctgtttt

SEQ ID NO: 88844 - DNA, 25 bp, Probe sequence
agcctacctccttcaatttagatta

SEQ ID NO: 88845 - DNA, 25 bp, Probe sequence
acctccttcaatttagattagctgt

SEQ ID NO: 88846 - DNA, 25 bp, Probe sequence
aaagtactaaactgaatcatcaata

SEQ ID NO: 88847 - DNA, 25 bp, Probe sequence
aatggcttaaagtactaaactgaat

SEQ ID NO: 88848 - DNA, 25 bp, Probe sequence
aatcatcaataaaattcagcttagt

SEQ ID NO: 88849 - DNA, 25 bp, Probe sequence
aattcagcttagtatctttttgcct

SEQ ID NO: 88850 - DNA, 25 bp, Probe sequence
cctacctccttcaatttagattagc

SEQ ID NO: 88851 - DNA, 25 bp, Probe sequence
gctatttgattgatttgcatttatt

SEQ ID NO: 88852 - DNA, 25 bp, Probe sequence
gtatctttttgcctgttttgtaaat

SEQ ID NO: 88853 - DNA, 25 bp, Probe sequence
tccttcaatttagattagctgtgct

SEQ ID NO: 88854 - DNA, 25 bp, Probe sequence
tctttttgcctgttttgtaaattgc

SEQ ID NO: 88855 - DNA, 25 bp, Probe sequence
ttttgcctgttttgtaaattgcgta

SEQ ID NO: 88856 - DNA, 25 bp, Probe sequence
ttagtatctttttgcctgttttgta

SEQ ID NO: 88857 - DNA, 25 bp, Probe sequence
ttagctgtgctatttgattgatttg

SEQ ID NO: 88858 - DNA, 25 bp, Probe sequence
aggctaaagcattagcctctgttat

SEQ ID NO: 88859 - DNA, 25 bp, Probe sequence
agaggctaaagcattagcctctgtt

SEQ ID NO: 88860 - DNA, 25 bp, Probe sequence
agcattagcctctgttatatacttg

SEQ ID NO: 88861 - DNA, 25 bp, Probe sequence
aaataacaagaggctaaagcattag

SEQ ID NO: 88862 - DNA, 25 bp, Probe sequence
aaaaataacaagaggctaaagcatt

SEQ ID NO: 88863 - DNA, 25 bp, Probe sequence
aaagcattagcctctgttatatact

SEQ ID NO: 88864 - DNA, 25 bp, Probe sequence
aaaataacaagaggctaaagcatta

SEQ ID NO: 88865 - DNA, 25 bp, Probe sequence
aagcattagcctctgttatatactt

SEQ ID NO: 88866 - DNA, 25 bp, Probe sequence
aagaggctaaagcattagcctctgt

SEQ ID NO: 88867 - DNA, 25 bp, Probe sequence
aataacaagaggctaaagcattagc

SEQ ID NO: 88868 - DNA, 25 bp, Probe sequence
ctaaagcattagcctctgttatata

SEQ ID NO: 88869 - DNA, 25 bp, Probe sequence
gctaaagcattagcctctgttatat

SEQ ID NO: 88870 - DNA, 25 bp, Probe sequence
gaggctaaagcattagcctctgtta

SEQ ID NO: 88871 - DNA, 25 bp, Probe sequence
ggctaaagcattagcctctgttata

SEQ ID NO: 88872 - DNA, 25 bp, Probe sequence
taaagcattagcctctgttatatac

SEQ ID NO: 88873 - DNA, 25 bp, Probe sequence
ctttttaatcccacacatccaggtg

SEQ ID NO: 88874 - DNA, 25 bp, Probe sequence
atcccacacatccaggtggttcatt

SEQ ID NO: 88875 - DNA, 25 bp, Probe sequence
actttttaatcccacacatccaggt

SEQ ID NO: 88876 - DNA, 25 bp, Probe sequence
acatccaggtggttcatttttaggt

SEQ ID NO: 88877 - DNA, 25 bp, Probe sequence
acacatccaggtggttcatttttag

SEQ ID NO: 88878 - DNA, 25 bp, Probe sequence
ttttaatcccacacatccaggtggt

SEQ ID NO: 88879 - DNA, 25 bp, Probe sequence
aatcccacacatccaggtggttcat

SEQ ID NO: 88880 - DNA, 25 bp, Probe sequence
cacacatccaggtggttcattttta

SEQ ID NO: 88881 - DNA, 25 bp, Probe sequence
cactttttaatcccacacatccagg

SEQ ID NO: 88882 - DNA, 25 bp, Probe sequence
catccaggtggttcatttttaggtt

SEQ ID NO: 88883 - DNA, 25 bp, Probe sequence
cccacacatccaggtggttcatttt

SEQ ID NO: 88884 - DNA, 25 bp, Probe sequence
tcccacacatccaggtggttcattt

SEQ ID NO: 88885 - DNA, 25 bp, Probe sequence
taatcccacacatccaggtggttca

SEQ ID NO: 88886 - DNA, 25 bp, Probe sequence
tttaatcccacacatccaggtggtt

SEQ ID NO: 88887 - DNA, 25 bp, Probe sequence
ttaatcccacacatccaggtggttc

SEQ ID NO: 88888 - DNA, 25 bp, Probe sequence
attaatatagaacacactcagggta

SEQ ID NO: 88889 - DNA, 25 bp, Probe sequence
atagaacacactcagggtaaaagct

SEQ ID NO: 88890 - DNA, 25 bp, Probe sequence
atatagaacacactcagggtaaaag

SEQ ID NO: 88891 - DNA, 25 bp, Probe sequence
agaacacactcagggtaaaagcttt

SEQ ID NO: 88892 - DNA, 25 bp, Probe sequence
acacactcagggtaaaagcttttat

SEQ ID NO: 88893 - DNA, 25 bp, Probe sequence
aatatagaacacactcagggtaaaa

SEQ ID NO: 88894 - DNA, 25 bp, Probe sequence
aattcattaatatagaacacactca

SEQ ID NO: 88895 - DNA, 25 bp, Probe sequence
cacactcagggtaaaagcttttatc

SEQ ID NO: 88896 - DNA, 25 bp, Probe sequence
cattaatatagaacacactcagggt

SEQ ID NO: 88897 - DNA, 25 bp, Probe sequence
gaacacactcagggtaaaagctttt

SEQ ID NO: 88898 - DNA, 25 bp, Probe sequence
tcattaatatagaacacactcaggg

SEQ ID NO: 88899 - DNA, 25 bp, Probe sequence
taatatagaacacactcagggtaaa

SEQ ID NO: 88900 - DNA, 25 bp, Probe sequence
tagaacacactcagggtaaaagctt

SEQ ID NO: 88901 - DNA, 25 bp, Probe sequence
tatagaacacactcagggtaaaagc

SEQ ID NO: 88902 - DNA, 25 bp, Probe sequence
ttaatatagaacacactcagggtaa

SEQ ID NO: 88903 - DNA, 25 bp, Probe sequence
cttgtattttaacctaggctagcta

SEQ ID NO: 88904 - DNA, 25 bp, Probe sequence
atctctcatgatagtttctcaccat

SEQ ID NO: 88905 - DNA, 25 bp, Probe sequence
atgatagtttctcaccatcatgaga

SEQ ID NO: 88906 - DNA, 25 bp, Probe sequence
aagctcaccttgtattttaacctag

SEQ ID NO: 88907 - DNA, 25 bp, Probe sequence
aatctctcctattctaattaaaaat

SEQ ID NO: 88908 - DNA, 25 bp, Probe sequence
aatatttaaatttatctctcatgat

SEQ ID NO: 88909 - DNA, 25 bp, Probe sequence
aattcttttataatgcattcacccc

SEQ ID NO: 88910 - DNA, 25 bp, Probe sequence
ctctcatgatagtttctcaccatca

SEQ ID NO: 88911 - DNA, 25 bp, Probe sequence
gcttacatttaagctcaccttgtat

SEQ ID NO: 88912 - DNA, 25 bp, Probe sequence
gcattcaccccaaaaaatcaaacta

SEQ ID NO: 88913 - DNA, 25 bp, Probe sequence
tgagaaattatttatagcgatgcaa

SEQ ID NO: 88914 - DNA, 25 bp, Probe sequence
tcttttataatgcattcaccccaaa

SEQ ID NO: 88915 - DNA, 25 bp, Probe sequence
taatgcattcaccccaaaaaatcaa

SEQ ID NO: 88916 - DNA, 25 bp, Probe sequence
taggctagctagtcaaaacaagtta

SEQ ID NO: 88917 - DNA, 25 bp, Probe sequence
tataaaatctctcctattctaatta

SEQ ID NO: 88918 - DNA, 25 bp, Probe sequence
atagccattacaaaatttacacatt

SEQ ID NO: 88919 - DNA, 25 bp, Probe sequence
atcaattattgttcttctaaatcga

SEQ ID NO: 88920 - DNA, 25 bp, Probe sequence
aagacccctcgattgagggatcttc

SEQ ID NO: 88921 - DNA, 25 bp, Probe sequence
aacagtattatcagttataagtttt

SEQ ID NO: 88922 - DNA, 25 bp, Probe sequence
cataaactaatgaaatgctcccttc

SEQ ID NO: 88923 - DNA, 25 bp, Probe sequence
cctcgattgagggatcttcttttta

SEQ ID NO: 88924 - DNA, 25 bp, Probe sequence
gaagggagcattttacaatgtccaa

SEQ ID NO: 88925 - DNA, 25 bp, Probe sequence
gagcattttacaatgtccaagactc

SEQ ID NO: 88926 - DNA, 25 bp, Probe sequence
gatatgaatctgggacataaactaa

SEQ ID NO: 88927 - DNA, 25 bp, Probe sequence
gttttattagtcagtctttcatcaa

SEQ ID NO: 88928 - DNA, 25 bp, Probe sequence
gtcagtctttcatcaattattgttc

SEQ ID NO: 88929 - DNA, 25 bp, Probe sequence
gtctttcatcaattattgttcttct

SEQ ID NO: 88930 - DNA, 25 bp, Probe sequence
gtccaagactcaacaattttattta

SEQ ID NO: 88931 - DNA, 25 bp, Probe sequence
ttcttctaaatcgaatagccattac

SEQ ID NO: 88932 - DNA, 25 bp, Probe sequence
ttgagggatcttctttttatataaa

SEQ ID NO: 88933 - DNA, 25 bp, Probe sequence
attttcctctaaaaactcatgtaat

SEQ ID NO: 88934 - DNA, 25 bp, Probe sequence
ataacttgaaagccttatcattcat

SEQ ID NO: 88935 - DNA, 25 bp, Probe sequence
atctcaaagcaatcatttagtacga

SEQ ID NO: 88936 - DNA, 25 bp, Probe sequence
actcatgtaatgattgaaccacagt

SEQ ID NO: 88937 - DNA, 25 bp, Probe sequence
cagtatataatcccccttaagtatt

SEQ ID NO: 88938 - DNA, 25 bp, Probe sequence
ccacagtatataatcccccttaagt

SEQ ID NO: 88939 - DNA, 25 bp, Probe sequence
gcaatcatttagtacgataatttca

SEQ ID NO: 88940 - DNA, 25 bp, Probe sequence
gataaaatatctcaaagcaatcatt

SEQ ID NO: 88941 - DNA, 25 bp, Probe sequence
gtttggtaatacctttatcatacag

SEQ ID NO: 88942 - DNA, 25 bp, Probe sequence
gtaattctacataacttgaaagcct

SEQ ID NO: 88943 - DNA, 25 bp, Probe sequence
ggtaatacctttatcatacagtaat

SEQ ID NO: 88944 - DNA, 25 bp, Probe sequence
tgaaccacagtatataatccccctt

SEQ ID NO: 88945 - DNA, 25 bp, Probe sequence
tacctttatcatacagtaattctac

SEQ ID NO: 88946 - DNA, 25 bp, Probe sequence
tataatcccccttaagtattgtttg

SEQ ID NO: 88947 - DNA, 25 bp, Probe sequence
ttgaaagccttatcattcatagata

SEQ ID NO: 88948 - DNA, 25 bp, Probe sequence
attcctactttctctatatagttac

SEQ ID NO: 88949 - DNA, 25 bp, Probe sequence
attctacaagatgcttttaaaattc

SEQ ID NO: 88950 - DNA, 25 bp, Probe sequence
agttactactagtatagacatatac

SEQ ID NO: 88951 - DNA, 25 bp, Probe sequence
agtttattcctactttctctatata

SEQ ID NO: 88952 - DNA, 25 bp, Probe sequence
acgacaatatttgccgtgggaataa

SEQ ID NO: 88953 - DNA, 25 bp, Probe sequence
actttctctatatagttactactag

SEQ ID NO: 88954 - DNA, 25 bp, Probe sequence
acaactaaattctacaagatgcttt

SEQ ID NO: 88955 - DNA, 25 bp, Probe sequence
aaagcccacgacaatatttgccgtg

SEQ ID NO: 88956 - DNA, 25 bp, Probe sequence
aaaaagcccacgacaatatttgccg

SEQ ID NO: 88957 - DNA, 25 bp, Probe sequence
aacattgttataagaacttactgtt

SEQ ID NO: 88958 - DNA, 25 bp, Probe sequence
cacactataaacatgtattactatt

SEQ ID NO: 88959 - DNA, 25 bp, Probe sequence
tactattaaaatactcattatcaaa

SEQ ID NO: 88960 - DNA, 25 bp, Probe sequence
tagacatatactacacactataaac

SEQ ID NO: 88961 - DNA, 25 bp, Probe sequence
ttcaaacttcaattttggggagcac

SEQ ID NO: 88962 - DNA, 25 bp, Probe sequence
ttggggagcactaaacattgttata

SEQ ID NO: 88963 - DNA, 25 bp, Probe sequence
atatcgctagttgcggttattagtt

SEQ ID NO: 88964 - DNA, 25 bp, Probe sequence
ataggttctattttacaagtatcac

SEQ ID NO: 88965 - DNA, 25 bp, Probe sequence
atgaggctcctctaattaatattta

SEQ ID NO: 88966 - DNA, 25 bp, Probe sequence
agcgttttcttaaatcatactcata

SEQ ID NO: 88967 - DNA, 25 bp, Probe sequence
aaagagtcctcatacatttacatat

SEQ ID NO: 88968 - DNA, 25 bp, Probe sequence
aatcatactcataataggttctatt

SEQ ID NO: 88969 - DNA, 25 bp, Probe sequence
caagtatcacttaaattttgccaaa

SEQ ID NO: 88970 - DNA, 25 bp, Probe sequence
cctccatatcgctagttgcggttat

SEQ ID NO: 88971 - DNA, 25 bp, Probe sequence
gcggttattagttttgcaagcgttt

SEQ ID NO: 88972 - DNA, 25 bp, Probe sequence
gcaagcgttttcttaaatcatactc

SEQ ID NO: 88973 - DNA, 25 bp, Probe sequence
gttttgcaagcgttttcttaaatca

SEQ ID NO: 88974 - DNA, 25 bp, Probe sequence
tacatttacatatgaggctcctcta

SEQ ID NO: 88975 - DNA, 25 bp, Probe sequence
tattagttttgcaagcgttttctta

SEQ ID NO: 88976 - DNA, 25 bp, Probe sequence
tttcctccatatcgctagttgcggt

SEQ ID NO: 88977 - DNA, 25 bp, Probe sequence
ttgccaaaaaaaagagtcctcatac

SEQ ID NO: 88978 - DNA, 25 bp, Probe sequence
attctagttgtattaattgatttta

SEQ ID NO: 88979 - DNA, 25 bp, Probe sequence
ataaaagcgctttcttgtatatatg

SEQ ID NO: 88980 - DNA, 25 bp, Probe sequence
atgttgctgatgtttctgtaaatgg

SEQ ID NO: 88981 - DNA, 25 bp, Probe sequence
atgtacatgttgctgatgtttctgt

SEQ ID NO: 88982 - DNA, 25 bp, Probe sequence
agcgctttcttgtatatatgacatg

SEQ ID NO: 88983 - DNA, 25 bp, Probe sequence
aaatggaaattctagttgtattaat

SEQ ID NO: 88984 - DNA, 25 bp, Probe sequence
aaagcgctttcttgtatatatgaca

SEQ ID NO: 88985 - DNA, 25 bp, Probe sequence
aattataatataaaagcgctttctt

SEQ ID NO: 88986 - DNA, 25 bp, Probe sequence
aattgattttagtaatttatagcgt

SEQ ID NO: 88987 - DNA, 25 bp, Probe sequence
gcgtttattattgctaattactgtc

SEQ ID NO: 88988 - DNA, 25 bp, Probe sequence
gctttcttgtatatatgacatgtac

SEQ ID NO: 88989 - DNA, 25 bp, Probe sequence
gacatgtacatgttgctgatgtttc

SEQ ID NO: 88990 - DNA, 25 bp, Probe sequence
gttgctgatgtttctgtaaatggaa

SEQ ID NO: 88991 - DNA, 25 bp, Probe sequence
gtacatgttgctgatgtttctgtaa

SEQ ID NO: 88992 - DNA, 25 bp, Probe sequence
tattattgctaattactgtcaaatt

SEQ ID NO: 88993 - DNA, 25 bp, Probe sequence
attagaattcatgcactagtttatt

SEQ ID NO: 88994 - DNA, 25 bp, Probe sequence
atatcattccgtgtattaaagtgaa

SEQ ID NO: 88995 - DNA, 25 bp, Probe sequence
aacgtattaatttcacagagacaag

SEQ ID NO: 88996 - DNA, 25 bp, Probe sequence
gaattcatgcactagtttattaaaa

SEQ ID NO: 88997 - DNA, 25 bp, Probe sequence
gactatatcttttagtataaacgta

SEQ ID NO: 88998 - DNA, 25 bp, Probe sequence
gagacaagtaatctgtgttttacta

SEQ ID NO: 88999 - DNA, 25 bp, Probe sequence
gattgcctcctaataatattgtata

SEQ ID NO: 89000 - DNA, 25 bp, Probe sequence
gtaatttaaaatatcattccgtgta

SEQ ID NO: 89001 - DNA, 25 bp, Probe sequence
ggtgattgcctcctaataatattgt

SEQ ID NO: 89002 - DNA, 25 bp, Probe sequence
tctgtgttttactaatatactttac

SEQ ID NO: 89003 - DNA, 25 bp, Probe sequence
taagctcgcgaattcaatatgtata

SEQ ID NO: 89004 - DNA, 25 bp, Probe sequence
taacaatccatattttgctgttcaa

SEQ ID NO: 89005 - DNA, 25 bp, Probe sequence
taaaatgaactaagctcgcgaattc

SEQ ID NO: 89006 - DNA, 25 bp, Probe sequence
tatactttacatacaaaaaactctt

SEQ ID NO: 89007 - DNA, 25 bp, Probe sequence
tttgctgttcaataaattttctaaa

SEQ ID NO: 89008 - DNA, 25 bp, Probe sequence
atcccctgaaaatgaactcgtagta

SEQ ID NO: 89009 - DNA, 25 bp, Probe sequence
atgaactcgtagtattgttctattt

SEQ ID NO: 89010 - DNA, 25 bp, Probe sequence
actcgtagtattgttctatttaaat

SEQ ID NO: 89011 - DNA, 25 bp, Probe sequence
caatactcctatttatttatttcgt

SEQ ID NO: 89012 - DNA, 25 bp, Probe sequence
ctcctatttatttatttcgtattat

SEQ ID NO: 89013 - DNA, 25 bp, Probe sequence
gatattcgttatcccctgaaaatga

SEQ ID NO: 89014 - DNA, 25 bp, Probe sequence
gattctatgatattcgttatcccct

SEQ ID NO: 89015 - DNA, 25 bp, Probe sequence
gttatcccctgaaaatgaactcgta

SEQ ID NO: 89016 - DNA, 25 bp, Probe sequence
gtattatgctgattctatgatattc

SEQ ID NO: 89017 - DNA, 25 bp, Probe sequence
tgatatcaatactcctatttattta

SEQ ID NO: 89018 - DNA, 25 bp, Probe sequence
tctatgatattcgttatcccctgaa

SEQ ID NO: 89019 - DNA, 25 bp, Probe sequence
tatgctgattctatgatattcgtta

SEQ ID NO: 89020 - DNA, 25 bp, Probe sequence
tatttcgtattatgctgattctatg

SEQ ID NO: 89021 - DNA, 25 bp, Probe sequence
tttcgtattatgctgattctatgat

SEQ ID NO: 89022 - DNA, 25 bp, Probe sequence
ttcgttatcccctgaaaatgaactc

SEQ ID NO: 89023 - DNA, 25 bp, Probe sequence
attccatagatatcatcgattacat

SEQ ID NO: 89024 - DNA, 25 bp, Probe sequence
attacattatcaattctatcgaata

SEQ ID NO: 89025 - DNA, 25 bp, Probe sequence
atatcatcgattacattatcaattc

SEQ ID NO: 89026 - DNA, 25 bp, Probe sequence
atacattaattcacatatacactat

SEQ ID NO: 89027 - DNA, 25 bp, Probe sequence
agactaaagacatagcgtatatgtt

SEQ ID NO: 89028 - DNA, 25 bp, Probe sequence
aattcacatatacactatgtctttc

SEQ ID NO: 89029 - DNA, 25 bp, Probe sequence
aattctatcgaatacattaattcac

SEQ ID NO: 89030 - DNA, 25 bp, Probe sequence
catcgattacattatcaattctatc

SEQ ID NO: 89031 - DNA, 25 bp, Probe sequence
cattatcaattctatcgaatacatt

SEQ ID NO: 89032 - DNA, 25 bp, Probe sequence
gattacattatcaattctatcgaat

SEQ ID NO: 89033 - DNA, 25 bp, Probe sequence
gtttatattcaatgtatattccata

SEQ ID NO: 89034 - DNA, 25 bp, Probe sequence
gtatattccatagatatcatcgatt

SEQ ID NO: 89035 - DNA, 25 bp, Probe sequence
tccatagatatcatcgattacatta

SEQ ID NO: 89036 - DNA, 25 bp, Probe sequence
tcacatatacactatgtctttcttt

SEQ ID NO: 89037 - DNA, 25 bp, Probe sequence
tagcgtatatgtttatattcaatgt

SEQ ID NO: 89038 - DNA, 25 bp, Probe sequence
atatatactcagcgcacatactttt

SEQ ID NO: 89039 - DNA, 25 bp, Probe sequence
atatactcagcgcacatacttttct

SEQ ID NO: 89040 - DNA, 25 bp, Probe sequence
atacttttctattaacatttatatt

SEQ ID NO: 89041 - DNA, 25 bp, Probe sequence
ataagaatatatactcagcgcacat

SEQ ID NO: 89042 - DNA, 25 bp, Probe sequence
actcagcgcacatacttttctatta

SEQ ID NO: 89043 - DNA, 25 bp, Probe sequence
cagcgcacatacttttctattaaca

SEQ ID NO: 89044 - DNA, 25 bp, Probe sequence
ctcagcgcacatacttttctattaa

SEQ ID NO: 89045 - DNA, 25 bp, Probe sequence
gcgcacatacttttctattaacatt

SEQ ID NO: 89046 - DNA, 25 bp, Probe sequence
gcacatacttttctattaacattta

SEQ ID NO: 89047 - DNA, 25 bp, Probe sequence
gaatatatactcagcgcacatactt

SEQ ID NO: 89048 - DNA, 25 bp, Probe sequence
taacatttatattgtcattaattta

SEQ ID NO: 89049 - DNA, 25 bp, Probe sequence
tactcagcgcacatacttttctatt

SEQ ID NO: 89050 - DNA, 25 bp, Probe sequence
tatactcagcgcacatacttttcta

SEQ ID NO: 89051 - DNA, 25 bp, Probe sequence
tttatcatataatgtaattctaaca

SEQ ID NO: 89052 - DNA, 25 bp, Probe sequence
tttatattgtcattaatttatcata

SEQ ID NO: 89053 - DNA, 25 bp, Probe sequence
attttacaatgttatttgctacaaa

SEQ ID NO: 89054 - DNA, 25 bp, Probe sequence
ataaatttctgcattactatcgtaa

SEQ ID NO: 89055 - DNA, 25 bp, Probe sequence
atcacagtttaagaattgcaatttt

SEQ ID NO: 89056 - DNA, 25 bp, Probe sequence
atctcaaaggcttactattggtgca

SEQ ID NO: 89057 - DNA, 25 bp, Probe sequence
aaaagcattctcaatgaaatacctt

SEQ ID NO: 89058 - DNA, 25 bp, Probe sequence
aacattgctcacaacagtaatctca

SEQ ID NO: 89059 - DNA, 25 bp, Probe sequence
aactctcttttaatctaagcttgtt

SEQ ID NO: 89060 - DNA, 25 bp, Probe sequence
aattcgctattacatcttattttaa

SEQ ID NO: 89061 - DNA, 25 bp, Probe sequence
ctaagcttgttttcaattcgctatt

SEQ ID NO: 89062 - DNA, 25 bp, Probe sequence
gctcacaacagtaatctcaaaggct

SEQ ID NO: 89063 - DNA, 25 bp, Probe sequence
gaaataccttaagctacatacctat

SEQ ID NO: 89064 - DNA, 25 bp, Probe sequence
ggcatgtgacttaaaagcattctca

SEQ ID NO: 89065 - DNA, 25 bp, Probe sequence
ggcttactattggtgcattagaaca

SEQ ID NO: 89066 - DNA, 25 bp, Probe sequence
taccttaagctacatacctattttt

SEQ ID NO: 89067 - DNA, 25 bp, Probe sequence
tatctatatttttaaaactctcttt

SEQ ID NO: 89068 - DNA, 25 bp, Probe sequence
attcatagacaattacatttctgta

SEQ ID NO: 89069 - DNA, 25 bp, Probe sequence
atcttagcttttctaattcatagac

SEQ ID NO: 89070 - DNA, 25 bp, Probe sequence
atgagttttgtaatctttatttaat

SEQ ID NO: 89071 - DNA, 25 bp, Probe sequence
aggccacatggacctggttaagtta

SEQ ID NO: 89072 - DNA, 25 bp, Probe sequence
acaaattaaattgcatctattcctt

SEQ ID NO: 89073 - DNA, 25 bp, Probe sequence
catggacctggttaagttaatcata

SEQ ID NO: 89074 - DNA, 25 bp, Probe sequence
gcatctattccttaaagattttttg

SEQ ID NO: 89075 - DNA, 25 bp, Probe sequence
gacaattacatttctgtaacaaatt

SEQ ID NO: 89076 - DNA, 25 bp, Probe sequence
gattttttgttttatatctgggaat

SEQ ID NO: 89077 - DNA, 25 bp, Probe sequence
taatatcttagcttttctaattcat

SEQ ID NO: 89078 - DNA, 25 bp, Probe sequence
tactcctaattcatcaaatttttaa

SEQ ID NO: 89079 - DNA, 25 bp, Probe sequence
tagattactcctaattcatcaaatt

SEQ ID NO: 89080 - DNA, 25 bp, Probe sequence
tatttgcccttaaaattaatatctt

SEQ ID NO: 89081 - DNA, 25 bp, Probe sequence
ttaaattgcatctattccttaaaga

SEQ ID NO: 89082 - DNA, 25 bp, Probe sequence
ttgttttatatctgggaatttctaa

SEQ ID NO: 89083 - DNA, 25 bp, Probe sequence
attgcttttcttattcgtttgtact

SEQ ID NO: 89084 - DNA, 25 bp, Probe sequence
attcccatcgtaatacatttttaga

SEQ ID NO: 89085 - DNA, 25 bp, Probe sequence
aggcctcacggacctggtataagct

SEQ ID NO: 89086 - DNA, 25 bp, Probe sequence
aatttatttatctaagactgttatt

SEQ ID NO: 89087 - DNA, 25 bp, Probe sequence
aattgcactatttaatctcaaacat

SEQ ID NO: 89088 - DNA, 25 bp, Probe sequence
cctcacggacctggtataagctgta

SEQ ID NO: 89089 - DNA, 25 bp, Probe sequence
gactgttattttacactttggtttg

SEQ ID NO: 89090 - DNA, 25 bp, Probe sequence
gatactgtgtttaattgcttttctt

SEQ ID NO: 89091 - DNA, 25 bp, Probe sequence
gttttaaatggtttgatactgtgtt

SEQ ID NO: 89092 - DNA, 25 bp, Probe sequence
tgcttttcttattcgtttgtacttt

SEQ ID NO: 89093 - DNA, 25 bp, Probe sequence
tctcaaacataagatacatttcata

SEQ ID NO: 89094 - DNA, 25 bp, Probe sequence
tcttattcgtttgtacttttaatgt

SEQ ID NO: 89095 - DNA, 25 bp, Probe sequence
taaaaaaccaggcctcacggacctg

SEQ ID NO: 89096 - DNA, 25 bp, Probe sequence
taaaaatttgtattcccatcgtaat

SEQ ID NO: 89097 - DNA, 25 bp, Probe sequence
tattcgtttgttttttatatcaatt

SEQ ID NO: 89098 - DNA, 25 bp, Probe sequence
attatcgcctcatataagttttatt

SEQ ID NO: 89099 - DNA, 25 bp, Probe sequence
atacatctattgcatgtgtaatcat

SEQ ID NO: 89100 - DNA, 25 bp, Probe sequence
atcgcctcatataagttttattccg

SEQ ID NO: 89101 - DNA, 25 bp, Probe sequence
accaggccacaaggacctgggtcat

SEQ ID NO: 89102 - DNA, 25 bp, Probe sequence
caggccacaaggacctgggtcatat

SEQ ID NO: 89103 - DNA, 25 bp, Probe sequence
catctattgcatgtgtaatcataaa

SEQ ID NO: 89104 - DNA, 25 bp, Probe sequence
ccacaaggacctgggtcatattgta

SEQ ID NO: 89105 - DNA, 25 bp, Probe sequence
gcctcatataagttttattccgtat

SEQ ID NO: 89106 - DNA, 25 bp, Probe sequence
gaaaaatacatctattgcatgtgta

SEQ ID NO: 89107 - DNA, 25 bp, Probe sequence
gtatctttattgtttattttatatg

SEQ ID NO: 89108 - DNA, 25 bp, Probe sequence
ggccacaaggacctgggtcatattg

SEQ ID NO: 89109 - DNA, 25 bp, Probe sequence
tccgtatctttattgtttattttat

SEQ ID NO: 89110 - DNA, 25 bp, Probe sequence
taagttttattccgtatctttattg

SEQ ID NO: 89111 - DNA, 25 bp, Probe sequence
tattccgtatctttattgtttattt

SEQ ID NO: 89112 - DNA, 25 bp, Probe sequence
tttattccgtatctttattgtttat

SEQ ID NO: 89113 - DNA, 25 bp, Probe sequence
agcgttttcctatgtcatttaacta

SEQ ID NO: 89114 - DNA, 25 bp, Probe sequence
aagcgttttcctatgtcatttaact

SEQ ID NO: 89115 - DNA, 25 bp, Probe sequence
ctaaacatgtaagttcgtatgaacg

SEQ ID NO: 89116 - DNA, 25 bp, Probe sequence
gcgttttcctatgtcatttaactaa

SEQ ID NO: 89117 - DNA, 25 bp, Probe sequence
gaacgttgtttgttaaatagatgat

SEQ ID NO: 89118 - DNA, 25 bp, Probe sequence
gatgattctaggaaaatgctttttt

SEQ ID NO: 89119 - DNA, 25 bp, Probe sequence
gattctaggaaaatgcttttttctt

SEQ ID NO: 89120 - DNA, 25 bp, Probe sequence
gttgtttgttaaatagatgattcta

SEQ ID NO: 89121 - DNA, 25 bp, Probe sequence
gtatgaacgttgtttgttaaataga

SEQ ID NO: 89122 - DNA, 25 bp, Probe sequence
gtaagttcgtatgaacgttgtttgt

SEQ ID NO: 89123 - DNA, 25 bp, Probe sequence
tcctatgtcatttaactaaacatgt

SEQ ID NO: 89124 - DNA, 25 bp, Probe sequence
tctaggaaaatgcttttttcttttg

SEQ ID NO: 89125 - DNA, 25 bp, Probe sequence
taagttcgtatgaacgttgtttgtt

SEQ ID NO: 89126 - DNA, 25 bp, Probe sequence
ttttcctatgtcatttaactaaaca

SEQ ID NO: 89127 - DNA, 25 bp, Probe sequence
ttcgtatgaacgttgtttgttaaat

SEQ ID NO: 89128 - DNA, 25 bp, Probe sequence
atatgattaattcaaacgcgtaaca

SEQ ID NO: 89129 - DNA, 25 bp, Probe sequence
atcatatgattaattcaaacgcgta

SEQ ID NO: 89130 - DNA, 25 bp, Probe sequence
atgattaattcaaacgcgtaacatt

SEQ ID NO: 89131 - DNA, 25 bp, Probe sequence
acattagttgcgcgtttttattata

SEQ ID NO: 89132 - DNA, 25 bp, Probe sequence
aattcaaacgcgtaacattagttgc

SEQ ID NO: 89133 - DNA, 25 bp, Probe sequence
cattagttgcgcgtttttattatac

SEQ ID NO: 89134 - DNA, 25 bp, Probe sequence
cgtaacattagttgcgcgtttttat

SEQ ID NO: 89135 - DNA, 25 bp, Probe sequence
gcgtaacattagttgcgcgttttta

SEQ ID NO: 89136 - DNA, 25 bp, Probe sequence
gttgcgcgtttttattataccttct

SEQ ID NO: 89137 - DNA, 25 bp, Probe sequence
gtaacattagttgcgcgtttttatt

SEQ ID NO: 89138 - DNA, 25 bp, Probe sequence
taacattagttgcgcgtttttatta

SEQ ID NO: 89139 - DNA, 25 bp, Probe sequence
tagttgcgcgtttttattatacctt

SEQ ID NO: 89140 - DNA, 25 bp, Probe sequence
ttagttgcgcgtttttattatacct

SEQ ID NO: 89141 - DNA, 25 bp, Probe sequence
ttcaaacgcgtaacattagttgcgc

SEQ ID NO: 89142 - DNA, 25 bp, Probe sequence
ttgcgcgtttttattataccttcta

SEQ ID NO: 89143 - DNA, 25 bp, Probe sequence
attgatagtgtaaggagtgaacgtg

SEQ ID NO: 89144 - DNA, 25 bp, Probe sequence
atacaattatcgaatagtttttagt

SEQ ID NO: 89145 - DNA, 25 bp, Probe sequence
acaccattaatatagcatcattttt

SEQ ID NO: 89146 - DNA, 25 bp, Probe sequence
aaaactaatgctgtatgattacgta

SEQ ID NO: 89147 - DNA, 25 bp, Probe sequence
aatcctgagtaattacccttcatga

SEQ ID NO: 89148 - DNA, 25 bp, Probe sequence
aatatagcatcatttttaatgttta

SEQ ID NO: 89149 - DNA, 25 bp, Probe sequence
gcctccacaaatttaatacatttta

SEQ ID NO: 89150 - DNA, 25 bp, Probe sequence
gctgtatgattacgtaatcctgagt

SEQ ID NO: 89151 - DNA, 25 bp, Probe sequence
gaattcattcatacaccattaatat

SEQ ID NO: 89152 - DNA, 25 bp, Probe sequence
gagcaatcgtatacaattatcgaat

SEQ ID NO: 89153 - DNA, 25 bp, Probe sequence
gagtaattacccttcatgaaaatta

SEQ ID NO: 89154 - DNA, 25 bp, Probe sequence
tgtttacatgcctccacaaatttaa

SEQ ID NO: 89155 - DNA, 25 bp, Probe sequence
tcctgagtaattacccttcatgaaa

SEQ ID NO: 89156 - DNA, 25 bp, Probe sequence
tcaaattccaacaaatttttgattt

SEQ ID NO: 89157 - DNA, 25 bp, Probe sequence
tacatgcctccacaaatttaataca

SEQ ID NO: 89158 - DNA, 25 bp, Probe sequence
atccttccaatgctttttatctttc

SEQ ID NO: 89159 - DNA, 25 bp, Probe sequence
aaaatcatccttccaatgcttttta

SEQ ID NO: 89160 - DNA, 25 bp, Probe sequence
aatgctttttatctttctattggaa

SEQ ID NO: 89161 - DNA, 25 bp, Probe sequence
aatcatccttccaatgctttttatc

SEQ ID NO: 89162 - DNA, 25 bp, Probe sequence
ccttccaatgctttttatctttcta

SEQ ID NO: 89163 - DNA, 25 bp, Probe sequence
gctttttatctttctattggaacct

SEQ ID NO: 89164 - DNA, 25 bp, Probe sequence
ggcatttcttaattaaacattgcaa

SEQ ID NO: 89165 - DNA, 25 bp, Probe sequence
tcccgaggcatttcttaattaaaca

SEQ ID NO: 89166 - DNA, 25 bp, Probe sequence
tctttctattggaacctttcccgag

SEQ ID NO: 89167 - DNA, 25 bp, Probe sequence
tcatccttccaatgctttttatctt

SEQ ID NO: 89168 - DNA, 25 bp, Probe sequence
taaaaatcatccttccaatgctttt

SEQ ID NO: 89169 - DNA, 25 bp, Probe sequence
tatctttctattggaacctttcccg

SEQ ID NO: 89170 - DNA, 25 bp, Probe sequence
tattggaacctttcccgaggcattt

SEQ ID NO: 89171 - DNA, 25 bp, Probe sequence
ttctattggaacctttcccgaggca

SEQ ID NO: 89172 - DNA, 25 bp, Probe sequence
ttccaatgctttttatctttctatt

SEQ ID NO: 89173 - DNA, 25 bp, Probe sequence
attcgtttattattgatattatact

SEQ ID NO: 89174 - DNA, 25 bp, Probe sequence
atcgataatatttctgcctaggcat

SEQ ID NO: 89175 - DNA, 25 bp, Probe sequence
acacccctattcgtttattattgat

SEQ ID NO: 89176 - DNA, 25 bp, Probe sequence
aatatttctgcctaggcatcatatt

SEQ ID NO: 89177 - DNA, 25 bp, Probe sequence
cacccctattcgtttattattgata

SEQ ID NO: 89178 - DNA, 25 bp, Probe sequence
catcatattatcgactatctttatt

SEQ ID NO: 89179 - DNA, 25 bp, Probe sequence
ctgcctaggcatcatattatcgact

SEQ ID NO: 89180 - DNA, 25 bp, Probe sequence
cgataatatttctgcctaggcatca

SEQ ID NO: 89181 - DNA, 25 bp, Probe sequence
cccctattcgtttattattgatatt

SEQ ID NO: 89182 - DNA, 25 bp, Probe sequence
gcctaggcatcatattatcgactat

SEQ ID NO: 89183 - DNA, 25 bp, Probe sequence
ggcatcatattatcgactatcttta

SEQ ID NO: 89184 - DNA, 25 bp, Probe sequence
tctgcctaggcatcatattatcgac

SEQ ID NO: 89185 - DNA, 25 bp, Probe sequence
taatcgataatatttctgcctaggc

SEQ ID NO: 89186 - DNA, 25 bp, Probe sequence
taacacccctattcgtttattattg

SEQ ID NO: 89187 - DNA, 25 bp, Probe sequence
taggcatcatattatcgactatctt

SEQ ID NO: 89188 - DNA, 25 bp, Probe sequence
attcgatttacttcaataactttgt

SEQ ID NO: 89189 - DNA, 25 bp, Probe sequence
atcactactttcctcatcatattaa

SEQ ID NO: 89190 - DNA, 25 bp, Probe sequence
agcacacaacttcatgtaagtcata

SEQ ID NO: 89191 - DNA, 25 bp, Probe sequence
accatggtattctctgttttaacaa

SEQ ID NO: 89192 - DNA, 25 bp, Probe sequence
aatagcgatagcacacaacttcatg

SEQ ID NO: 89193 - DNA, 25 bp, Probe sequence
cactccctcttgtatgtttcataat

SEQ ID NO: 89194 - DNA, 25 bp, Probe sequence
gaattcatacactccctcttgtatg

SEQ ID NO: 89195 - DNA, 25 bp, Probe sequence
gacatcactctttaaacatacacga

SEQ ID NO: 89196 - DNA, 25 bp, Probe sequence
gatcaacgaatcagacatcactctt

SEQ ID NO: 89197 - DNA, 25 bp, Probe sequence
gtcatatgctatcactactttcctc

SEQ ID NO: 89198 - DNA, 25 bp, Probe sequence
tgattttataccctcatacatttga

SEQ ID NO: 89199 - DNA, 25 bp, Probe sequence
tcatcgaacgattaactttttggaa

SEQ ID NO: 89200 - DNA, 25 bp, Probe sequence
tatgcattttaaccatggtattctc

SEQ ID NO: 89201 - DNA, 25 bp, Probe sequence
ttttacattcctaatctaaagcgaa

SEQ ID NO: 89202 - DNA, 25 bp, Probe sequence
ttgttcaaaaatttcactttatcga

SEQ ID NO: 89203 - DNA, 25 bp, Probe sequence
attacggctaattacagttctcaat

SEQ ID NO: 89204 - DNA, 25 bp, Probe sequence
atacgattgatttatactttttatt

SEQ ID NO: 89205 - DNA, 25 bp, Probe sequence
aaagtgcttatatacgattgattta

SEQ ID NO: 89206 - DNA, 25 bp, Probe sequence
aacatatgctttaagtcccctcttt

SEQ ID NO: 89207 - DNA, 25 bp, Probe sequence
aagttagcagaacctactagcttta

SEQ ID NO: 89208 - DNA, 25 bp, Probe sequence
gcgataatcattgcagtgggggttt

SEQ ID NO: 89209 - DNA, 25 bp, Probe sequence
gcagtgggggtttatgtatatacaa

SEQ ID NO: 89210 - DNA, 25 bp, Probe sequence
gaacctactagctttaaagtgctta

SEQ ID NO: 89211 - DNA, 25 bp, Probe sequence
gagtctcaatattaattgcgttgga

SEQ ID NO: 89212 - DNA, 25 bp, Probe sequence
taagtcacccaatctatttaagttt

SEQ ID NO: 89213 - DNA, 25 bp, Probe sequence
tgcgttggacaaaatactctaagac

SEQ ID NO: 89214 - DNA, 25 bp, Probe sequence
taagtttgtgttctctataataata

SEQ ID NO: 89215 - DNA, 25 bp, Probe sequence
tactctaagacatatttacatccta

SEQ ID NO: 89216 - DNA, 25 bp, Probe sequence
tttcccccattgcgataatcattgc

SEQ ID NO: 89217 - DNA, 25 bp, Probe sequence
ttacatcctaacatttcaatagcaa

SEQ ID NO: 89218 - DNA, 25 bp, Probe sequence
attttagattaatgcatccccgtgc

SEQ ID NO: 89219 - DNA, 25 bp, Probe sequence
atctcctaattaatatgcgttcatg

SEQ ID NO: 89220 - DNA, 25 bp, Probe sequence
aaacgtaacctatattcatctctgt

SEQ ID NO: 89221 - DNA, 25 bp, Probe sequence
aatcgttccaataatccagaattta

SEQ ID NO: 89222 - DNA, 25 bp, Probe sequence
cataactgatattagctgtcctttc

SEQ ID NO: 89223 - DNA, 25 bp, Probe sequence
ctatattcatctctgttcccaataa

SEQ ID NO: 89224 - DNA, 25 bp, Probe sequence
gcatccccgtgcaaagaaagaaacg

SEQ ID NO: 89225 - DNA, 25 bp, Probe sequence
gattaatgcatccccgtgcaaagaa

SEQ ID NO: 89226 - DNA, 25 bp, Probe sequence
tgtcctttcatctcctaattaatat

SEQ ID NO: 89227 - DNA, 25 bp, Probe sequence
tgatattagctgtcctttcatctcc

SEQ ID NO: 89228 - DNA, 25 bp, Probe sequence
tgactaatcgttccaataatccaga

SEQ ID NO: 89229 - DNA, 25 bp, Probe sequence
taacctatattcatctctgttccca

SEQ ID NO: 89230 - DNA, 25 bp, Probe sequence
tagttgttattattattttagatta

SEQ ID NO: 89231 - DNA, 25 bp, Probe sequence
tatgcgttcatgcagctaatatcgg

SEQ ID NO: 89232 - DNA, 25 bp, Probe sequence
ttcatctctgttcccaataataata

SEQ ID NO: 89233 - DNA, 25 bp, Probe sequence
attcttttgcgatagatgcctctct

SEQ ID NO: 89234 - DNA, 25 bp, Probe sequence
atatttcctatacatctacatctat

SEQ ID NO: 89235 - DNA, 25 bp, Probe sequence
atcaacattattagccacaccactt

SEQ ID NO: 89236 - DNA, 25 bp, Probe sequence
atcatcatgctctgtatataattta

SEQ ID NO: 89237 - DNA, 25 bp, Probe sequence
atctatatgctcaatacctctatca

SEQ ID NO: 89238 - DNA, 25 bp, Probe sequence
aggcggttcatctataaatcaacat

SEQ ID NO: 89239 - DNA, 25 bp, Probe sequence
agatgcctctctaatcatatatgtt

SEQ ID NO: 89240 - DNA, 25 bp, Probe sequence
acctctatcattatcattcttttgc

SEQ ID NO: 89241 - DNA, 25 bp, Probe sequence
gaacttaaactcatctatatgctca

SEQ ID NO: 89242 - DNA, 25 bp, Probe sequence
gactgccaggcgactctataaatat

SEQ ID NO: 89243 - DNA, 25 bp, Probe sequence
gatacttaaggttgatgtcacacat

SEQ ID NO: 89244 - DNA, 25 bp, Probe sequence
gtaaatcatacgttctatgtctgat

SEQ ID NO: 89245 - DNA, 25 bp, Probe sequence
tacatctatgactaaataacccttt

SEQ ID NO: 89246 - DNA, 25 bp, Probe sequence
tagccacaccacttaaattgggtat

SEQ ID NO: 89247 - DNA, 25 bp, Probe sequence
tatttcccaaatgactgccaggcga

SEQ ID NO: 89248 - DNA, 25 bp, Probe sequence
attttaacatatcacacttatctaa

SEQ ID NO: 89249 - DNA, 25 bp, Probe sequence
agttacaatagtatgaatgattcat

SEQ ID NO: 89250 - DNA, 25 bp, Probe sequence
acttatctaaagtgaatgacatttt

SEQ ID NO: 89251 - DNA, 25 bp, Probe sequence
caatctcacctcaggacatatttta

SEQ ID NO: 89252 - DNA, 25 bp, Probe sequence
caatcatcaaatattgaatgcttaa

SEQ ID NO: 89253 - DNA, 25 bp, Probe sequence
gaatgcttaatatttttcaattagg

SEQ ID NO: 89254 - DNA, 25 bp, Probe sequence
gaatgacattttcaaaagttacaat

SEQ ID NO: 89255 - DNA, 25 bp, Probe sequence
gaatgattcatttcaacaatcatca

SEQ ID NO: 89256 - DNA, 25 bp, Probe sequence
gacattttcaaaagttacaatagta

SEQ ID NO: 89257 - DNA, 25 bp, Probe sequence
gattcatttcaacaatcatcaaata

SEQ ID NO: 89258 - DNA, 25 bp, Probe sequence
gtgaatgacattttcaaaagttaca

SEQ ID NO: 89259 - DNA, 25 bp, Probe sequence
tgcttaatatttttcaattaggtta

SEQ ID NO: 89260 - DNA, 25 bp, Probe sequence
tcaatctcacctcaggacatatttt

SEQ ID NO: 89261 - DNA, 25 bp, Probe sequence
tattttaacatatcacacttatcta

SEQ ID NO: 89262 - DNA, 25 bp, Probe sequence
ttcatttcaacaatcatcaaatatt

SEQ ID NO: 89263 - DNA, 25 bp, Probe sequence
atgtttaaatccgaacactcgaata

SEQ ID NO: 89264 - DNA, 25 bp, Probe sequence
agtaattatgtttcattgttgcttt

SEQ ID NO: 89265 - DNA, 25 bp, Probe sequence
accaacatacttaacaagctattaa

SEQ ID NO: 89266 - DNA, 25 bp, Probe sequence
aaaagtatatgcgtcttgattatta

SEQ ID NO: 89267 - DNA, 25 bp, Probe sequence
aatccgaacactcgaataaaagtat

SEQ ID NO: 89268 - DNA, 25 bp, Probe sequence
cctctccttatataattcagtatta

SEQ ID NO: 89269 - DNA, 25 bp, Probe sequence
gcgtcttgattattaaccaacatac

SEQ ID NO: 89270 - DNA, 25 bp, Probe sequence
gctacctctccttatataattcagt

SEQ ID NO: 89271 - DNA, 25 bp, Probe sequence
gtatatgcgtcttgattattaacca

SEQ ID NO: 89272 - DNA, 25 bp, Probe sequence
tgctacctctccttatataattcag

SEQ ID NO: 89273 - DNA, 25 bp, Probe sequence
tcttgattattaaccaacatactta

SEQ ID NO: 89274 - DNA, 25 bp, Probe sequence
taaccaacatacttaacaagctatt

SEQ ID NO: 89275 - DNA, 25 bp, Probe sequence
taaatgtttaaatccgaacactcga

SEQ ID NO: 89276 - DNA, 25 bp, Probe sequence
tacctctccttatataattcagtat

SEQ ID NO: 89277 - DNA, 25 bp, Probe sequence
tatgcgtcttgattattaaccaaca

SEQ ID NO: 89278 - DNA, 25 bp, Probe sequence
cacctcgaaggtattctatacccaa

SEQ ID NO: 89279 - DNA, 25 bp, Probe sequence
aaaactcacctcgaaggtattctat

SEQ ID NO: 89280 - DNA, 25 bp, Probe sequence
aactcacctcgaaggtattctatac

SEQ ID NO: 89281 - DNA, 25 bp, Probe sequence
aatgtttagttacataggtaatcta

SEQ ID NO: 89282 - DNA, 25 bp, Probe sequence
ctcacctcgaaggtattctataccc

SEQ ID NO: 89283 - DNA, 25 bp, Probe sequence
ctcgaaggtattctatacccaaaag

SEQ ID NO: 89284 - DNA, 25 bp, Probe sequence
gagtttgtaactctttttcttgatt

SEQ ID NO: 89285 - DNA, 25 bp, Probe sequence
gatgagtttgtaactctttttcttg

SEQ ID NO: 89286 - DNA, 25 bp, Probe sequence
gtttgtaactctttttcttgattat

SEQ ID NO: 89287 - DNA, 25 bp, Probe sequence
ggtattctatacccaaaagatgagt

SEQ ID NO: 89288 - DNA, 25 bp, Probe sequence
tgtaactctttttcttgattatttt

SEQ ID NO: 89289 - DNA, 25 bp, Probe sequence
taaaaactcacctcgaaggtattct

SEQ ID NO: 89290 - DNA, 25 bp, Probe sequence
tattctatacccaaaagatgagttt

SEQ ID NO: 89291 - DNA, 25 bp, Probe sequence
tttgtaactctttttcttgattatt

SEQ ID NO: 89292 - DNA, 25 bp, Probe sequence
ttgtaactctttttcttgattattt

SEQ ID NO: 89293 - DNA, 25 bp, Probe sequence
atataaggttcagctgcctcgtctt

SEQ ID NO: 89294 - DNA, 25 bp, Probe sequence
atattgttagaaatggctcagccca

SEQ ID NO: 89295 - DNA, 25 bp, Probe sequence
acgcctccgaatgaagaaggtatat

SEQ ID NO: 89296 - DNA, 25 bp, Probe sequence
aaaaaatcgcacgatacgcctccga

SEQ ID NO: 89297 - DNA, 25 bp, Probe sequence
cagctgcctcgtcttaaatgtcaat

SEQ ID NO: 89298 - DNA, 25 bp, Probe sequence
gcctcgtcttaaatgtcaatttata

SEQ ID NO: 89299 - DNA, 25 bp, Probe sequence
gcccaaactcttagcaattatatat

SEQ ID NO: 89300 - DNA, 25 bp, Probe sequence
gctgcctcgtcttaaatgtcaattt

SEQ ID NO: 89301 - DNA, 25 bp, Probe sequence
gctcagcccaaactcttagcaatta

SEQ ID NO: 89302 - DNA, 25 bp, Probe sequence
gcacgatacgcctccgaatgaagaa

SEQ ID NO: 89303 - DNA, 25 bp, Probe sequence
gaaggtatattgtgcgattctttta

SEQ ID NO: 89304 - DNA, 25 bp, Probe sequence
gaaatggctcagcccaaactcttag

SEQ ID NO: 89305 - DNA, 25 bp, Probe sequence
gatacgcctccgaatgaagaaggta

SEQ ID NO: 89306 - DNA, 25 bp, Probe sequence
tcagcccaaactcttagcaattata

SEQ ID NO: 89307 - DNA, 25 bp, Probe sequence
tcagctgcctcgtcttaaatgtcaa

SEQ ID NO: 89308 - DNA, 25 bp, Probe sequence
atcactacatataaacgttaacctc

SEQ ID NO: 89309 - DNA, 25 bp, Probe sequence
atcttcagtatattcccgtatacat

SEQ ID NO: 89310 - DNA, 25 bp, Probe sequence
agaactttaactactatcactacat

SEQ ID NO: 89311 - DNA, 25 bp, Probe sequence
acaaagtacactttgctcatagcaa

SEQ ID NO: 89312 - DNA, 25 bp, Probe sequence
aacaacttatcaaaaagctcatgtg

SEQ ID NO: 89313 - DNA, 25 bp, Probe sequence
gtacccgagtagtcttccttgggag

SEQ ID NO: 89314 - DNA, 25 bp, Probe sequence
aagctcatgtggttattttatagtg

SEQ ID NO: 89315 - DNA, 25 bp, Probe sequence
aattccaagcttatcggtttaagct

SEQ ID NO: 89316 - DNA, 25 bp, Probe sequence
cagtcgctactctatacaatttttg

SEQ ID NO: 89317 - DNA, 25 bp, Probe sequence
gcttggaatttttcgtttatcttca

SEQ ID NO: 89318 - DNA, 25 bp, Probe sequence
gaaattatacagtcgctactctata

SEQ ID NO: 89319 - DNA, 25 bp, Probe sequence
gagtagtcttccttgggagaacttt

SEQ ID NO: 89320 - DNA, 25 bp, Probe sequence
tgctcatagcaaagtgtacccgagt

SEQ ID NO: 89321 - DNA, 25 bp, Probe sequence
tattcccgtatacataagacgtgat

SEQ ID NO: 89322 - DNA, 25 bp, Probe sequence
ttccctttttatacttcaagagaat

SEQ ID NO: 89323 - DNA, 25 bp, Probe sequence
atttcataatgccacgtcaccaatt

SEQ ID NO: 89324 - DNA, 25 bp, Probe sequence
aaatcttattaatcattcacggtat

SEQ ID NO: 89325 - DNA, 25 bp, Probe sequence
aagaactgatgatttttgaaaagga

SEQ ID NO: 89326 - DNA, 25 bp, Probe sequence
aatgtcctcctgtaatataaatctt

SEQ ID NO: 89327 - DNA, 25 bp, Probe sequence
aatgccacgtcaccaatttgtaatc

SEQ ID NO: 89328 - DNA, 25 bp, Probe sequence
cataatgccacgtcaccaatttgta

SEQ ID NO: 89329 - DNA, 25 bp, Probe sequence
cattcacggtataattatacgccat

SEQ ID NO: 89330 - DNA, 25 bp, Probe sequence
gccacgtcaccaatttgtaatcata

SEQ ID NO: 89331 - DNA, 25 bp, Probe sequence
gtcaccaatttgtaatcataatttt

SEQ ID NO: 89332 - DNA, 25 bp, Probe sequence
gtcctcctgtaatataaatcttatt

SEQ ID NO: 89333 - DNA, 25 bp, Probe sequence
tcataattttatcgttacccctttg

SEQ ID NO: 89334 - DNA, 25 bp, Probe sequence
taattatacgccattttatttcata

SEQ ID NO: 89335 - DNA, 25 bp, Probe sequence
tacgccattttatttcataatgcca

SEQ ID NO: 89336 - DNA, 25 bp, Probe sequence
tttatttcataatgccacgtcacca

SEQ ID NO: 89337 - DNA, 25 bp, Probe sequence
ttacccctttgctttatgataaaat

SEQ ID NO: 89338 - DNA, 25 bp, Probe sequence
atttatcctatacttgattcattat

SEQ ID NO: 89339 - DNA, 25 bp, Probe sequence
atttcattgcagtctttatctcaca

SEQ ID NO: 89340 - DNA, 25 bp, Probe sequence
atttccatcatatcattacttttaa

SEQ ID NO: 89341 - DNA, 25 bp, Probe sequence
atatcaccttttatatttatcctat

SEQ ID NO: 89342 - DNA, 25 bp, Probe sequence
ataacagccccaaacgataacttga

SEQ ID NO: 89343 - DNA, 25 bp, Probe sequence
gcagtctttatctcacattattcat

SEQ ID NO: 89344 - DNA, 25 bp, Probe sequence
gaaggtcgtttctttcatagtcata

SEQ ID NO: 89345 - DNA, 25 bp, Probe sequence
gatatttcagattctttatcttttt

SEQ ID NO: 89346 - DNA, 25 bp, Probe sequence
gtcatacgcattatatataccctat

SEQ ID NO: 89347 - DNA, 25 bp, Probe sequence
tctaagttgcatacgcattcgcgtt

SEQ ID NO: 89348 - DNA, 25 bp, Probe sequence
tacgcattcgcgttaaatttcattg

SEQ ID NO: 89349 - DNA, 25 bp, Probe sequence
tagccctacaatttataattttcca

SEQ ID NO: 89350 - DNA, 25 bp, Probe sequence
tataccctattctcaatctatttaa

SEQ ID NO: 89351 - DNA, 25 bp, Probe sequence
tttccaccctaactataatactaca

SEQ ID NO: 89352 - DNA, 25 bp, Probe sequence
ttatgctttttatggatactttcaa

SEQ ID NO: 89353 - DNA, 25 bp, Probe sequence
atacgtaacacggctggcaataaaa

SEQ ID NO: 89354 - DNA, 25 bp, Probe sequence
acctttctttatcatatctatatcg

SEQ ID NO: 89355 - DNA, 25 bp, Probe sequence
acacggctggcaataaaaaatggag

SEQ ID NO: 89356 - DNA, 25 bp, Probe sequence
aaatggagcatttatcttctaatta

SEQ ID NO: 89357 - DNA, 25 bp, Probe sequence
ctctatctattttactctttttaat

SEQ ID NO: 89358 - DNA, 25 bp, Probe sequence
cccacctttctttatcatatctata

SEQ ID NO: 89359 - DNA, 25 bp, Probe sequence
gatgattgctcccctatcaaatcat

SEQ ID NO: 89360 - DNA, 25 bp, Probe sequence
gttaactctatctattttactcttt

SEQ ID NO: 89361 - DNA, 25 bp, Probe sequence
tcaagatacgtaacacggctggcaa

SEQ ID NO: 89362 - DNA, 25 bp, Probe sequence
taattttttcgttaactctatctat

SEQ ID NO: 89363 - DNA, 25 bp, Probe sequence
taaattagatgattgctcccctatc

SEQ ID NO: 89364 - DNA, 25 bp, Probe sequence
tagatgattgctcccctatcaaatc

SEQ ID NO: 89365 - DNA, 25 bp, Probe sequence
tatcatatctatatcgtcgatttca

SEQ ID NO: 89366 - DNA, 25 bp, Probe sequence
tatcgtcgatttcattaattttttc

SEQ ID NO: 89367 - DNA, 25 bp, Probe sequence
tatttttttcaagatacgtaacacg

SEQ ID NO: 89368 - DNA, 25 bp, Probe sequence
ataaaaacctggtggcacgcattga

SEQ ID NO: 89369 - DNA, 25 bp, Probe sequence
acctggtggcacgcattgaatgatg

SEQ ID NO: 89370 - DNA, 25 bp, Probe sequence
aacataaaaacctggtggcacgcat

SEQ ID NO: 89371 - DNA, 25 bp, Probe sequence
aaacctggtggcacgcattgaatga

SEQ ID NO: 89372 - DNA, 25 bp, Probe sequence
aaaaacctggtggcacgcattgaat

SEQ ID NO: 89373 - DNA, 25 bp, Probe sequence
aaaacctggtggcacgcattgaatg

SEQ ID NO: 89374 - DNA, 25 bp, Probe sequence
aacctggtggcacgcattgaatgat

SEQ ID NO: 89375 - DNA, 25 bp, Probe sequence
cacgcattgaatgatgctgccatca

SEQ ID NO: 89376 - DNA, 25 bp, Probe sequence
cattgaatgatgctgccatcaggtt

SEQ ID NO: 89377 - DNA, 25 bp, Probe sequence
ctggtggcacgcattgaatgatgct

SEQ ID NO: 89378 - DNA, 25 bp, Probe sequence
cgcattgaatgatgctgccatcagg

SEQ ID NO: 89379 - DNA, 25 bp, Probe sequence
gcacgcattgaatgatgctgccatc

SEQ ID NO: 89380 - DNA, 25 bp, Probe sequence
gtggcacgcattgaatgatgctgcc

SEQ ID NO: 89381 - DNA, 25 bp, Probe sequence
ggtggcacgcattgaatgatgctgc

SEQ ID NO: 89382 - DNA, 25 bp, Probe sequence
ggcacgcattgaatgatgctgccat

SEQ ID NO: 89383 - DNA, 25 bp, Probe sequence
attcatttcatatctatcagttcat

SEQ ID NO: 89384 - DNA, 25 bp, Probe sequence
atcacacaacatcatcattcaaaat

SEQ ID NO: 89385 - DNA, 25 bp, Probe sequence
atggtgtctttgtatattcgcaatt

SEQ ID NO: 89386 - DNA, 25 bp, Probe sequence
aaaggagtctagatgcaggtaaatt

SEQ ID NO: 89387 - DNA, 25 bp, Probe sequence
aactcggcgatgattatttcttatg

SEQ ID NO: 89388 - DNA, 25 bp, Probe sequence
aatcaaatgctttttacatctacaa

SEQ ID NO: 89389 - DNA, 25 bp, Probe sequence
cattcaaaattttattgctctcatt

SEQ ID NO: 89390 - DNA, 25 bp, Probe sequence
cggcatgctcctttttcaaaaatat

SEQ ID NO: 89391 - DNA, 25 bp, Probe sequence
gagataacatgtcgccttttttctt

SEQ ID NO: 89392 - DNA, 25 bp, Probe sequence
gttaaaagtatttcctcatcatgcg

SEQ ID NO: 89393 - DNA, 25 bp, Probe sequence
gtcgccttttttcttattttagcat

SEQ ID NO: 89394 - DNA, 25 bp, Probe sequence
tgctctcattttcaatattcatttc

SEQ ID NO: 89395 - DNA, 25 bp, Probe sequence
tcctcatcatgcgaaatatcaaaac

SEQ ID NO: 89396 - DNA, 25 bp, Probe sequence
tattgcgacaacatccttaacatta

SEQ ID NO: 89397 - DNA, 25 bp, Probe sequence
ttatacaatcacacaacatcatcat

SEQ ID NO: 89398 - DNA, 25 bp, Probe sequence
atttttcgatacttcaaaagacatt

SEQ ID NO: 89399 - DNA, 25 bp, Probe sequence
atttgcatatctttaatctgaattt

SEQ ID NO: 89400 - DNA, 25 bp, Probe sequence
atcaacttactatcattaaaaattt

SEQ ID NO: 89401 - DNA, 25 bp, Probe sequence
aaaatattatcaacttactatcatt

SEQ ID NO: 89402 - DNA, 25 bp, Probe sequence
catccctttaattttatgtgtaata

SEQ ID NO: 89403 - DNA, 25 bp, Probe sequence
cattgttatttgcatatctttaatc

SEQ ID NO: 89404 - DNA, 25 bp, Probe sequence
gttatttgcatatctttaatctgaa

SEQ ID NO: 89405 - DNA, 25 bp, Probe sequence
gtaatacatttttcgatacttcaaa

SEQ ID NO: 89406 - DNA, 25 bp, Probe sequence
gtctccacatccctttaattttatg

SEQ ID NO: 89407 - DNA, 25 bp, Probe sequence
gtgtaatacatttttcgatacttca

SEQ ID NO: 89408 - DNA, 25 bp, Probe sequence
tctccacatccctttaattttatgt

SEQ ID NO: 89409 - DNA, 25 bp, Probe sequence
tacatttttcgatacttcaaaagac

SEQ ID NO: 89410 - DNA, 25 bp, Probe sequence
tattatcaacttactatcattaaaa

SEQ ID NO: 89411 - DNA, 25 bp, Probe sequence
tattcattgttatttgcatatcttt

SEQ ID NO: 89412 - DNA, 25 bp, Probe sequence
tttaatctgaatttattaccaccat

SEQ ID NO: 89413 - DNA, 25 bp, Probe sequence
atattaacatgggatatccattata

SEQ ID NO: 89414 - DNA, 25 bp, Probe sequence
ataatgttttgatttgcataacaaa

SEQ ID NO: 89415 - DNA, 25 bp, Probe sequence
atgttttgatttgcataacaaagaa

SEQ ID NO: 89416 - DNA, 25 bp, Probe sequence
aatgttttgatttgcataacaaaga

SEQ ID NO: 89417 - DNA, 25 bp, Probe sequence
aatattaacatgggatatccattat

SEQ ID NO: 89418 - DNA, 25 bp, Probe sequence
gttaatattaacatgggatatccat

SEQ ID NO: 89419 - DNA, 25 bp, Probe sequence
gttttgatttgcataacaaagaaat

SEQ ID NO: 89420 - DNA, 25 bp, Probe sequence
tgttaatattaacatgggatatcca

SEQ ID NO: 89421 - DNA, 25 bp, Probe sequence
tgttttgatttgcataacaaagaaa

SEQ ID NO: 89422 - DNA, 25 bp, Probe sequence
taatattaacatgggatatccatta

SEQ ID NO: 89423 - DNA, 25 bp, Probe sequence
taatgttttgatttgcataacaaag

SEQ ID NO: 89424 - DNA, 25 bp, Probe sequence
ttttgatttgcataacaaagaaatt

SEQ ID NO: 89425 - DNA, 25 bp, Probe sequence
ttaatattaacatgggatatccatt

SEQ ID NO: 89426 - DNA, 25 bp, Probe sequence
atctttataacttttccactatcac

SEQ ID NO: 89427 - DNA, 25 bp, Probe sequence
agtattgcttaagttgatatgcata

SEQ ID NO: 89428 - DNA, 25 bp, Probe sequence
acccagctccttatctttataactt

SEQ ID NO: 89429 - DNA, 25 bp, Probe sequence
acttttccactatcacactatcatg

SEQ ID NO: 89430 - DNA, 25 bp, Probe sequence
acaacttccaaatgttagaattagg

SEQ ID NO: 89431 - DNA, 25 bp, Probe sequence
aaatgttatgtagaactcagttaaa

SEQ ID NO: 89432 - DNA, 25 bp, Probe sequence
ctatcacactatcatgatttaatac

SEQ ID NO: 89433 - DNA, 25 bp, Probe sequence
gctccttatctttataacttttcca

SEQ ID NO: 89434 - DNA, 25 bp, Probe sequence
gatatgcatatagcgcgattgctcg

SEQ ID NO: 89435 - DNA, 25 bp, Probe sequence
gatttaatacaacttccaaatgtta

SEQ ID NO: 89436 - DNA, 25 bp, Probe sequence
tgcatatagcgcgattgctcgttga

SEQ ID NO: 89437 - DNA, 25 bp, Probe sequence
taaggcggtgtattagaaaaatgtt

SEQ ID NO: 89438 - DNA, 25 bp, Probe sequence
taacttttccactatcacactatca

SEQ ID NO: 89439 - DNA, 25 bp, Probe sequence
tagggtttgaattaaggcggtgtat

SEQ ID NO: 89440 - DNA, 25 bp, Probe sequence
ttccactatcacactatcatgattt

SEQ ID NO: 89441 - DNA, 25 bp, Probe sequence
atatctgtgtttttcgttacctaat

SEQ ID NO: 89442 - DNA, 25 bp, Probe sequence
atactatcataagctttgcctaccg

SEQ ID NO: 89443 - DNA, 25 bp, Probe sequence
actatcataagctttgcctaccgaa

SEQ ID NO: 89444 - DNA, 25 bp, Probe sequence
ctaacctcacttttgattaataaat

SEQ ID NO: 89445 - DNA, 25 bp, Probe sequence
gcctaacctcacttttgattaataa

SEQ ID NO: 89446 - DNA, 25 bp, Probe sequence
gctttgcctaccgaatagtaaaacg

SEQ ID NO: 89447 - DNA, 25 bp, Probe sequence
tgcctaccgaatagtaaaacgctta

SEQ ID NO: 89448 - DNA, 25 bp, Probe sequence
tctgtgtttttcgttacctaattat

SEQ ID NO: 89449 - DNA, 25 bp, Probe sequence
tcataagctttgcctaccgaatagt

SEQ ID NO: 89450 - DNA, 25 bp, Probe sequence
taagctttgcctaccgaatagtaaa

SEQ ID NO: 89451 - DNA, 25 bp, Probe sequence
taaatatctgtgtttttcgttacct

SEQ ID NO: 89452 - DNA, 25 bp, Probe sequence
tagcctaacctcacttttgattaat

SEQ ID NO: 89453 - DNA, 25 bp, Probe sequence
tatcataagctttgcctaccgaata

SEQ ID NO: 89454 - DNA, 25 bp, Probe sequence
tttagcctaacctcacttttgatta

SEQ ID NO: 89455 - DNA, 25 bp, Probe sequence
ttcgttacctaattatactatcata

SEQ ID NO: 89456 - DNA, 25 bp, Probe sequence
ataccacaacttgctcaatacttaa

SEQ ID NO: 89457 - DNA, 25 bp, Probe sequence
accacaacttgctcaatacttaata

SEQ ID NO: 89458 - DNA, 25 bp, Probe sequence
acggcattataccacaacttgctca

SEQ ID NO: 89459 - DNA, 25 bp, Probe sequence
aaatcacttcgtttagtatgaggta

SEQ ID NO: 89460 - DNA, 25 bp, Probe sequence
aaacaatgattgtctattcaattta

SEQ ID NO: 89461 - DNA, 25 bp, Probe sequence
aacggcattataccacaacttgctc

SEQ ID NO: 89462 - DNA, 25 bp, Probe sequence
caatttatatatttatattttccgt

SEQ ID NO: 89463 - DNA, 25 bp, Probe sequence
caacttgctcaatacttaataaaca

SEQ ID NO: 89464 - DNA, 25 bp, Probe sequence
cacttcgtttagtatgaggtatgtc

SEQ ID NO: 89465 - DNA, 25 bp, Probe sequence
cattataccacaacttgctcaatac

SEQ ID NO: 89466 - DNA, 25 bp, Probe sequence
gcaaaaaatcacttcgtttagtatg

SEQ ID NO: 89467 - DNA, 25 bp, Probe sequence
gattgtctattcaatttatatattt

SEQ ID NO: 89468 - DNA, 25 bp, Probe sequence
ggcattataccacaacttgctcaat

SEQ ID NO: 89469 - DNA, 25 bp, Probe sequence
taacaagttttaataacggcattat

SEQ ID NO: 89470 - DNA, 25 bp, Probe sequence
ttataccacaacttgctcaatactt

SEQ ID NO: 89471 - DNA, 25 bp, Probe sequence
atctaagactttattttcacctcaa

SEQ ID NO: 89472 - DNA, 25 bp, Probe sequence
agacgccagattaaaacatactact

SEQ ID NO: 89473 - DNA, 25 bp, Probe sequence
actcccaaccaatctaagactttat

SEQ ID NO: 89474 - DNA, 25 bp, Probe sequence
acatactactgtgactttgttttta

SEQ ID NO: 89475 - DNA, 25 bp, Probe sequence
aatgtgtcagttattcaaatttttt

SEQ ID NO: 89476 - DNA, 25 bp, Probe sequence
aatcgatatgctaacgtgtaatttt

SEQ ID NO: 89477 - DNA, 25 bp, Probe sequence
aataatgtcctccttatagtcactc

SEQ ID NO: 89478 - DNA, 25 bp, Probe sequence
gatattaattggcgattactttcaa

SEQ ID NO: 89479 - DNA, 25 bp, Probe sequence
gtgtaatttttacttcacatatatt

SEQ ID NO: 89480 - DNA, 25 bp, Probe sequence
tgtttttagttagatatcaaccgtt

SEQ ID NO: 89481 - DNA, 25 bp, Probe sequence
tcctccttatagtcactccagtatg

SEQ ID NO: 89482 - DNA, 25 bp, Probe sequence
tcacctcaagatttacgtcgtcatt

SEQ ID NO: 89483 - DNA, 25 bp, Probe sequence
tactcttatcttcactcttattata

SEQ ID NO: 89484 - DNA, 25 bp, Probe sequence
tagtcactccagtatgtatgatatt

SEQ ID NO: 89485 - DNA, 25 bp, Probe sequence
tataatactcttatcttcactctta

SEQ ID NO: 89486 - DNA, 25 bp, Probe sequence
agtgttcagagcactaccttcttta

SEQ ID NO: 89487 - DNA, 25 bp, Probe sequence
agagcactaccttctttatctatat

SEQ ID NO: 89488 - DNA, 25 bp, Probe sequence
agcactaccttctttatctatatag

SEQ ID NO: 89489 - DNA, 25 bp, Probe sequence
accttctttatctatatagtcagtt

SEQ ID NO: 89490 - DNA, 25 bp, Probe sequence
aacctcgtgtttgattataatgata

SEQ ID NO: 89491 - DNA, 25 bp, Probe sequence
cagagcactaccttctttatctata

SEQ ID NO: 89492 - DNA, 25 bp, Probe sequence
ctaccttctttatctatatagtcag

SEQ ID NO: 89493 - DNA, 25 bp, Probe sequence
gcactaccttctttatctatatagt

SEQ ID NO: 89494 - DNA, 25 bp, Probe sequence
gaaaacctcgtgtttgattataatg

SEQ ID NO: 89495 - DNA, 25 bp, Probe sequence
gatagtgttcagagcactaccttct

SEQ ID NO: 89496 - DNA, 25 bp, Probe sequence
gtgtttgattataatgatagtgttc

SEQ ID NO: 89497 - DNA, 25 bp, Probe sequence
tgttcagagcactaccttctttatc

SEQ ID NO: 89498 - DNA, 25 bp, Probe sequence
tcagagcactaccttctttatctat

SEQ ID NO: 89499 - DNA, 25 bp, Probe sequence
ttcagagcactaccttctttatcta

SEQ ID NO: 89500 - DNA, 25 bp, Probe sequence
ttctttatctatatagtcagttgat

SEQ ID NO: 89501 - DNA, 25 bp, Probe sequence
ataaggtcatcttgttatgccttct

SEQ ID NO: 89502 - DNA, 25 bp, Probe sequence
atcttgttatgccttcttaaagcta

SEQ ID NO: 89503 - DNA, 25 bp, Probe sequence
aggtcatcttgttatgccttcttaa

SEQ ID NO: 89504 - DNA, 25 bp, Probe sequence
aaaataaggtcatcttgttatgcct

SEQ ID NO: 89505 - DNA, 25 bp, Probe sequence
aaggtcatcttgttatgccttctta

SEQ ID NO: 89506 - DNA, 25 bp, Probe sequence
catcttgttatgccttcttaaagct

SEQ ID NO: 89507 - DNA, 25 bp, Probe sequence
cttgttatgccttcttaaagctaaa

SEQ ID NO: 89508 - DNA, 25 bp, Probe sequence
cttaatcttcgcataatagaaatat

SEQ ID NO: 89509 - DNA, 25 bp, Probe sequence
gccttcttaaagctaaataggttca

SEQ ID NO: 89510 - DNA, 25 bp, Probe sequence
gtcatcttgttatgccttcttaaag

SEQ ID NO: 89511 - DNA, 25 bp, Probe sequence
ggtcatcttgttatgccttcttaaa

SEQ ID NO: 89512 - DNA, 25 bp, Probe sequence
tgttatgccttcttaaagctaaata

SEQ ID NO: 89513 - DNA, 25 bp, Probe sequence
tcatcttgttatgccttcttaaagc

SEQ ID NO: 89514 - DNA, 25 bp, Probe sequence
taaggtcatcttgttatgccttctt

SEQ ID NO: 89515 - DNA, 25 bp, Probe sequence
tatgccttcttaaagctaaataggt

SEQ ID NO: 89516 - DNA, 25 bp, Probe sequence
agctttagcgatttaggctctctta

SEQ ID NO: 89517 - DNA, 25 bp, Probe sequence
agcattccccaatatgtcacatacc

SEQ ID NO: 89518 - DNA, 25 bp, Probe sequence
cacatacctaattaaaaacactcca

SEQ ID NO: 89519 - DNA, 25 bp, Probe sequence
gcgatttaggctctcttatgcagtt

SEQ ID NO: 89520 - DNA, 25 bp, Probe sequence
gaaactctacgttggagtgtatata

SEQ ID NO: 89521 - DNA, 25 bp, Probe sequence
gtatctttcgagaaactctacgttg

SEQ ID NO: 89522 - DNA, 25 bp, Probe sequence
tccaacacaaagtatctttcgagaa

SEQ ID NO: 89523 - DNA, 25 bp, Probe sequence
tccctcttaaccttattcacatact

SEQ ID NO: 89524 - DNA, 25 bp, Probe sequence
tcttatgcagttgtgcagtagcatc

SEQ ID NO: 89525 - DNA, 25 bp, Probe sequence
taattaaaaacactccaacacaaag

SEQ ID NO: 89526 - DNA, 25 bp, Probe sequence
tactaagcattccccaatatgtcac

SEQ ID NO: 89527 - DNA, 25 bp, Probe sequence
tactccccttgagctttagcgattt

SEQ ID NO: 89528 - DNA, 25 bp, Probe sequence
tattcacatactaagcattccccaa

SEQ ID NO: 89529 - DNA, 25 bp, Probe sequence
ttaggctctcttatgcagttgtgca

SEQ ID NO: 89530 - DNA, 25 bp, Probe sequence
ttccccaatatgtcacatacctaat

SEQ ID NO: 89531 - DNA, 25 bp, Probe sequence
attatcacatctcctttttaatccc

SEQ ID NO: 89532 - DNA, 25 bp, Probe sequence
atttatgcagttgtgccttagcatc

SEQ ID NO: 89533 - DNA, 25 bp, Probe sequence
actcatctatctaacttcacagcgt

SEQ ID NO: 89534 - DNA, 25 bp, Probe sequence
acaactgtttttttctttatatgct

SEQ ID NO: 89535 - DNA, 25 bp, Probe sequence
cgttcctcttcacctttagtgatta

SEQ ID NO: 89536 - DNA, 25 bp, Probe sequence
gcttctatttattatataagtccac

SEQ ID NO: 89537 - DNA, 25 bp, Probe sequence
gagggatttatgcagttgtgcctta

SEQ ID NO: 89538 - DNA, 25 bp, Probe sequence
gttgctgcacaaacaaacaactgtt

SEQ ID NO: 89539 - DNA, 25 bp, Probe sequence
tgtttttttctttatatgcttctat

SEQ ID NO: 89540 - DNA, 25 bp, Probe sequence
tcgctttagcgattagagggattta

SEQ ID NO: 89541 - DNA, 25 bp, Probe sequence
tcacctttagtgattagaggctttt

SEQ ID NO: 89542 - DNA, 25 bp, Probe sequence
taatcccacttttcgctttagcgat

SEQ ID NO: 89543 - DNA, 25 bp, Probe sequence
tataaactcatctatctaacttcac

SEQ ID NO: 89544 - DNA, 25 bp, Probe sequence
tattatataagtccacatactaaaa

SEQ ID NO: 89545 - DNA, 25 bp, Probe sequence
ttttctttatatgcttctatttatt

SEQ ID NO: 89546 - DNA, 25 bp, Probe sequence
aaaaccccttatctcaaacatgtat

SEQ ID NO: 89547 - DNA, 25 bp, Probe sequence
aaaccccttatctcaaacatgtatt

SEQ ID NO: 89548 - DNA, 25 bp, Probe sequence
aaccccttatctcaaacatgtattt

SEQ ID NO: 89549 - DNA, 25 bp, Probe sequence
ctcgcgttgctatcattcactaaat

SEQ ID NO: 89550 - DNA, 25 bp, Probe sequence
ccccttatctcaaacatgtattttt

SEQ ID NO: 89551 - DNA, 25 bp, Probe sequence
gcgttgctatcattcactaaatata

SEQ ID NO: 89552 - DNA, 25 bp, Probe sequence
gctatcattcactaaatatatttta

SEQ ID NO: 89553 - DNA, 25 bp, Probe sequence
gttgctatcattcactaaatatatt

SEQ ID NO: 89554 - DNA, 25 bp, Probe sequence
gtagcaataaggggcataattagaa

SEQ ID NO: 89555 - DNA, 25 bp, Probe sequence
tgtatttttttacatgtagcaataa

SEQ ID NO: 89556 - DNA, 25 bp, Probe sequence
tcgcgttgctatcattcactaaata

SEQ ID NO: 89557 - DNA, 25 bp, Probe sequence
taaaaaccccttatctcaaacatgt

SEQ ID NO: 89558 - DNA, 25 bp, Probe sequence
tttttacatgtagcaataaggggca

SEQ ID NO: 89559 - DNA, 25 bp, Probe sequence
ttatctcaaacatgtatttttttac

SEQ ID NO: 89560 - DNA, 25 bp, Probe sequence
ttaaaaaccccttatctcaaacatg

SEQ ID NO: 89561 - DNA, 25 bp, Probe sequence
atttttattttagcaaatgtcatgt

SEQ ID NO: 89562 - DNA, 25 bp, Probe sequence
atgccctctttatgtttatagttat

SEQ ID NO: 89563 - DNA, 25 bp, Probe sequence
cttatgccctctttatgtttatagt

SEQ ID NO: 89564 - DNA, 25 bp, Probe sequence
gccctctttatgtttatagttattt

SEQ ID NO: 89565 - DNA, 25 bp, Probe sequence
gcttatgccctctttatgtttatag

SEQ ID NO: 89566 - DNA, 25 bp, Probe sequence
tgccctctttatgtttatagttatt

SEQ ID NO: 89567 - DNA, 25 bp, Probe sequence
tctttatgtttatagttatttttat

SEQ ID NO: 89568 - DNA, 25 bp, Probe sequence
tatgccctctttatgtttatagtta

SEQ ID NO: 89569 - DNA, 25 bp, Probe sequence
tatttttattttagcaaatgtcatg

SEQ ID NO: 89570 - DNA, 25 bp, Probe sequence
tttttattttagcaaatgtcatgtg

SEQ ID NO: 89571 - DNA, 25 bp, Probe sequence
ttatttttattttagcaaatgtcat

SEQ ID NO: 89572 - DNA, 25 bp, Probe sequence
ttatgccctctttatgtttatagtt

SEQ ID NO: 89573 - DNA, 25 bp, Probe sequence
atttatatcgtcttgtgctcacaac

SEQ ID NO: 89574 - DNA, 25 bp, Probe sequence
atatcgtcttgtgctcacaaccatt

SEQ ID NO: 89575 - DNA, 25 bp, Probe sequence
atcgtcttgtgctcacaaccattat

SEQ ID NO: 89576 - DNA, 25 bp, Probe sequence
actacttttatatttcacttatcac

SEQ ID NO: 89577 - DNA, 25 bp, Probe sequence
acttttatatttcacttatcactaa

SEQ ID NO: 89578 - DNA, 25 bp, Probe sequence
aaacaacagtcatattacaattata

SEQ ID NO: 89579 - DNA, 25 bp, Probe sequence
aaccattatacaacaatcatttcta

SEQ ID NO: 89580 - DNA, 25 bp, Probe sequence
caatcatttctaaaacaacagtcat

SEQ ID NO: 89581 - DNA, 25 bp, Probe sequence
gctcacaaccattatacaacaatca

SEQ ID NO: 89582 - DNA, 25 bp, Probe sequence
gtgctcacaaccattatacaacaat

SEQ ID NO: 89583 - DNA, 25 bp, Probe sequence
tccttttatttatatcgtcttgtgc

SEQ ID NO: 89584 - DNA, 25 bp, Probe sequence
tcttgtgctcacaaccattatacaa

SEQ ID NO: 89585 - DNA, 25 bp, Probe sequence
taattactacttttatatttcactt

SEQ ID NO: 89586 - DNA, 25 bp, Probe sequence
tttatatttcacttatcactaaaaa

SEQ ID NO: 89587 - DNA, 25 bp, Probe sequence
ttatttatatcgtcttgtgctcaca

SEQ ID NO: 89588 - DNA, 25 bp, Probe sequence
atattcactgtattatgccatgtaa

SEQ ID NO: 89589 - DNA, 25 bp, Probe sequence
agtattgcgatttaacttgtcggtt

SEQ ID NO: 89590 - DNA, 25 bp, Probe sequence
aaataaccgacaagtattgcgattt

SEQ ID NO: 89591 - DNA, 25 bp, Probe sequence
aacttgtcggttaagcacgattaat

SEQ ID NO: 89592 - DNA, 25 bp, Probe sequence
aaccgacaagtattgcgatttaact

SEQ ID NO: 89593 - DNA, 25 bp, Probe sequence
gcgatttaacttgtcggttaagcac

SEQ ID NO: 89594 - DNA, 25 bp, Probe sequence
gaaacatctttatttattgtattgg

SEQ ID NO: 89595 - DNA, 25 bp, Probe sequence
gtagtactcctttaaaatgaaacat

SEQ ID NO: 89596 - DNA, 25 bp, Probe sequence
gtactcctttaaaatgaaacatctt

SEQ ID NO: 89597 - DNA, 25 bp, Probe sequence
gtcggttaagcacgattaatttaat

SEQ ID NO: 89598 - DNA, 25 bp, Probe sequence
tccccttcgcaaatcataaaaatta

SEQ ID NO: 89599 - DNA, 25 bp, Probe sequence
taatttccccttcgcaaatcataaa

SEQ ID NO: 89600 - DNA, 25 bp, Probe sequence
tatgccatgtaataaaataaccgac

SEQ ID NO: 89601 - DNA, 25 bp, Probe sequence
tttaatttccccttcgcaaatcata

SEQ ID NO: 89602 - DNA, 25 bp, Probe sequence
tttccccttcgcaaatcataaaaat

SEQ ID NO: 89603 - DNA, 25 bp, Probe sequence
atacgcttccattttataaacaatt

SEQ ID NO: 89604 - DNA, 25 bp, Probe sequence
atacccaaccttcattctatatacg

SEQ ID NO: 89605 - DNA, 25 bp, Probe sequence
actatatacccaaccttcattctat

SEQ ID NO: 89606 - DNA, 25 bp, Probe sequence
actattcatctcaattaatacaatt

SEQ ID NO: 89607 - DNA, 25 bp, Probe sequence
aaactatatacccaaccttcattct

SEQ ID NO: 89608 - DNA, 25 bp, Probe sequence
aaaaaaactattcatctcaattaat

SEQ ID NO: 89609 - DNA, 25 bp, Probe sequence
aaccttcattctatatacgcttcca

SEQ ID NO: 89610 - DNA, 25 bp, Probe sequence
aataaactatatacccaaccttcat

SEQ ID NO: 89611 - DNA, 25 bp, Probe sequence
aatcaagtgaatagttttatcatat

SEQ ID NO: 89612 - DNA, 25 bp, Probe sequence
cttcattctatatacgcttccattt

SEQ ID NO: 89613 - DNA, 25 bp, Probe sequence
cccaaccttcattctatatacgctt

SEQ ID NO: 89614 - DNA, 25 bp, Probe sequence
cctccctcaataaactatataccca

SEQ ID NO: 89615 - DNA, 25 bp, Probe sequence
gacacctccctcaataaactatata

SEQ ID NO: 89616 - DNA, 25 bp, Probe sequence
tcattctatatacgcttccatttta

SEQ ID NO: 89617 - DNA, 25 bp, Probe sequence
ttctatatacgcttccattttataa

SEQ ID NO: 89618 - DNA, 25 bp, Probe sequence
attgcctaaggactttatgccctag

SEQ ID NO: 89619 - DNA, 25 bp, Probe sequence
atcagctttttcacattgcctaagg

SEQ ID NO: 89620 - DNA, 25 bp, Probe sequence
atgccctaggtttatatatcacata

SEQ ID NO: 89621 - DNA, 25 bp, Probe sequence
aagaggttttgcactaatggcactt

SEQ ID NO: 89622 - DNA, 25 bp, Probe sequence
ctaattgttaagaggttttgcacta

SEQ ID NO: 89623 - DNA, 25 bp, Probe sequence
gccgcataacgagcagtatatatca

SEQ ID NO: 89624 - DNA, 25 bp, Probe sequence
gctttttcacattgcctaaggactt

SEQ ID NO: 89625 - DNA, 25 bp, Probe sequence
gaatagtaatcagctttttcacatt

SEQ ID NO: 89626 - DNA, 25 bp, Probe sequence
gatacattctattaaacttcctttt

SEQ ID NO: 89627 - DNA, 25 bp, Probe sequence
gatagccgcataacgagcagtatat

SEQ ID NO: 89628 - DNA, 25 bp, Probe sequence
gtttagcgcaatttggtgaagtttg

SEQ ID NO: 89629 - DNA, 25 bp, Probe sequence
ggtgaagtttgatagatgatacatt

SEQ ID NO: 89630 - DNA, 25 bp, Probe sequence
ggttttgcactaatggcacttaata

SEQ ID NO: 89631 - DNA, 25 bp, Probe sequence
ggactttatgccctaggtttatata

SEQ ID NO: 89632 - DNA, 25 bp, Probe sequence
ggaagatagccgcataacgagcagt

SEQ ID NO: 89633 - DNA, 25 bp, Probe sequence
attatcgggcaaatgtatcgagcaa

SEQ ID NO: 89634 - DNA, 25 bp, Probe sequence
atattatcgggcaaatgtatcgagc

SEQ ID NO: 89635 - DNA, 25 bp, Probe sequence
atatcaatatattatcgggcaaatg

SEQ ID NO: 89636 - DNA, 25 bp, Probe sequence
atcgggcaaatgtatcgagcaagat

SEQ ID NO: 89637 - DNA, 25 bp, Probe sequence
aagatgcatcaaatagggaggtttt

SEQ ID NO: 89638 - DNA, 25 bp, Probe sequence
aatgtatcgagcaagatgcatcaaa

SEQ ID NO: 89639 - DNA, 25 bp, Probe sequence
aatatattatcgggcaaatgtatcg

SEQ ID NO: 89640 - DNA, 25 bp, Probe sequence
cgggcaaatgtatcgagcaagatgc

SEQ ID NO: 89641 - DNA, 25 bp, Probe sequence
gcaaatgtatcgagcaagatgcatc

SEQ ID NO: 89642 - DNA, 25 bp, Probe sequence
gcaagatgcatcaaatagggaggtt

SEQ ID NO: 89643 - DNA, 25 bp, Probe sequence
gatgcatcaaatagggaggttttaa

SEQ ID NO: 89644 - DNA, 25 bp, Probe sequence
gtatcgagcaagatgcatcaaatag

SEQ ID NO: 89645 - DNA, 25 bp, Probe sequence
tgcatcaaatagggaggttttaaac

SEQ ID NO: 89646 - DNA, 25 bp, Probe sequence
tatgactaacatatctataataaat

SEQ ID NO: 89647 - DNA, 25 bp, Probe sequence
ttatcgggcaaatgtatcgagcaag

SEQ ID NO: 89648 - DNA, 25 bp, Probe sequence
atatcgaaacatttaattgcgctaa

SEQ ID NO: 89649 - DNA, 25 bp, Probe sequence
aaatgcacaactttttataattcat

SEQ ID NO: 89650 - DNA, 25 bp, Probe sequence
aaagtgctttaatgcatgatcaatt

SEQ ID NO: 89651 - DNA, 25 bp, Probe sequence
aaaactgcactgagaattactaaat

SEQ ID NO: 89652 - DNA, 25 bp, Probe sequence
aagaatctctttagacacacattga

SEQ ID NO: 89653 - DNA, 25 bp, Probe sequence
aattaccttgtattggcgattaaat

SEQ ID NO: 89654 - DNA, 25 bp, Probe sequence
aattgcgctaaatcgtttcattaaa

SEQ ID NO: 89655 - DNA, 25 bp, Probe sequence
ctaaattaatgtgtttttcttatca

SEQ ID NO: 89656 - DNA, 25 bp, Probe sequence
gacacacattgaatatcgaaacatt

SEQ ID NO: 89657 - DNA, 25 bp, Probe sequence
gatcaattatcgtactttctattat

SEQ ID NO: 89658 - DNA, 25 bp, Probe sequence
gtatatacactttaacgtgctatag

SEQ ID NO: 89659 - DNA, 25 bp, Probe sequence
tgttacccgttatcaatcggaataa

SEQ ID NO: 89660 - DNA, 25 bp, Probe sequence
taacgtgctatagattggttttaat

SEQ ID NO: 89661 - DNA, 25 bp, Probe sequence
tttcttatcattaaaactgcactga

SEQ ID NO: 89662 - DNA, 25 bp, Probe sequence
ttctattatttgttacccgttatca

SEQ ID NO: 89663 - DNA, 25 bp, Probe sequence
agtgataagctatttttttgtggtc

SEQ ID NO: 89664 - DNA, 25 bp, Probe sequence
agcttatcattttaacttgtaatta

SEQ ID NO: 89665 - DNA, 25 bp, Probe sequence
acttttagcttatcattttaacttg

SEQ ID NO: 89666 - DNA, 25 bp, Probe sequence
aaagtgataagctatttttttgtgg

SEQ ID NO: 89667 - DNA, 25 bp, Probe sequence
cttttagcttatcattttaacttgt

SEQ ID NO: 89668 - DNA, 25 bp, Probe sequence
gcttatcattttaacttgtaattat

SEQ ID NO: 89669 - DNA, 25 bp, Probe sequence
gataagctatttttttgtggtctaa

SEQ ID NO: 89670 - DNA, 25 bp, Probe sequence
gtgataagctatttttttgtggtct

SEQ ID NO: 89671 - DNA, 25 bp, Probe sequence
tgataagctatttttttgtggtcta

SEQ ID NO: 89672 - DNA, 25 bp, Probe sequence
taacttttagcttatcattttaact

SEQ ID NO: 89673 - DNA, 25 bp, Probe sequence
tagcttatcattttaacttgtaatt

SEQ ID NO: 89674 - DNA, 25 bp, Probe sequence
tatcattttaacttgtaattatttt

SEQ ID NO: 89675 - DNA, 25 bp, Probe sequence
tttagcttatcattttaacttgtaa

SEQ ID NO: 89676 - DNA, 25 bp, Probe sequence
ttttagcttatcattttaacttgta

SEQ ID NO: 89677 - DNA, 25 bp, Probe sequence
ttagcttatcattttaacttgtaat

SEQ ID NO: 89678 - DNA, 25 bp, Probe sequence
atattttctctataatgataatgta

SEQ ID NO: 89679 - DNA, 25 bp, Probe sequence
actttcatcatgattgtctagggtg

SEQ ID NO: 89680 - DNA, 25 bp, Probe sequence
aaatgagttgtatattttctctata

SEQ ID NO: 89681 - DNA, 25 bp, Probe sequence
aacaccctagactttcatcatgatt

SEQ ID NO: 89682 - DNA, 25 bp, Probe sequence
aagaaagcgcaattaatttagtata

SEQ ID NO: 89683 - DNA, 25 bp, Probe sequence
aatactaacaccctagactttcatc

SEQ ID NO: 89684 - DNA, 25 bp, Probe sequence
caccctagactttcatcatgattgt

SEQ ID NO: 89685 - DNA, 25 bp, Probe sequence
ctaacaccctagactttcatcatga

SEQ ID NO: 89686 - DNA, 25 bp, Probe sequence
gataatgtcctgtttttttcaacat

SEQ ID NO: 89687 - DNA, 25 bp, Probe sequence
gattgtctagggtgattttgttatg

SEQ ID NO: 89688 - DNA, 25 bp, Probe sequence
gttatgataatgtcctgtttttttc

SEQ ID NO: 89689 - DNA, 25 bp, Probe sequence
gtattcatatgattttattattaac

SEQ ID NO: 89690 - DNA, 25 bp, Probe sequence
gtataaatactaacaccctagactt

SEQ ID NO: 89691 - DNA, 25 bp, Probe sequence
gtctagggtgattttgttatgataa

SEQ ID NO: 89692 - DNA, 25 bp, Probe sequence
gtcctgtttttttcaacattattgt

SEQ ID NO: 89693 - DNA, 25 bp, Probe sequence
atctattgccttttttatagatttt

SEQ ID NO: 89694 - DNA, 25 bp, Probe sequence
agttacatatatctattgccttttt

SEQ ID NO: 89695 - DNA, 25 bp, Probe sequence
agctattttatattttagttacata

SEQ ID NO: 89696 - DNA, 25 bp, Probe sequence
aagtgtcttaatcatagctatttta

SEQ ID NO: 89697 - DNA, 25 bp, Probe sequence
catatatctattgccttttttatag

SEQ ID NO: 89698 - DNA, 25 bp, Probe sequence
ctccccttgctttaagtgtcttaat

SEQ ID NO: 89699 - DNA, 25 bp, Probe sequence
cgatatatagtgtgaaaggaggttt

SEQ ID NO: 89700 - DNA, 25 bp, Probe sequence
cccttgctttaagtgtcttaatcat

SEQ ID NO: 89701 - DNA, 25 bp, Probe sequence
gttacatatatctattgcctttttt

SEQ ID NO: 89702 - DNA, 25 bp, Probe sequence
gtcttaatcatagctattttatatt

SEQ ID NO: 89703 - DNA, 25 bp, Probe sequence
gtgtcttaatcatagctattttata

SEQ ID NO: 89704 - DNA, 25 bp, Probe sequence
tccccttgctttaagtgtcttaatc

SEQ ID NO: 89705 - DNA, 25 bp, Probe sequence
tacatatatctattgccttttttat

SEQ ID NO: 89706 - DNA, 25 bp, Probe sequence
tttattattttatttcgatatatag

SEQ ID NO: 89707 - DNA, 25 bp, Probe sequence
ttaagtgtcttaatcatagctattt

SEQ ID NO: 89708 - DNA, 25 bp, Probe sequence
atagatatatgtctacgattgcagt

SEQ ID NO: 89709 - DNA, 25 bp, Probe sequence
atcacatctcgttgtaattatactt

SEQ ID NO: 89710 - DNA, 25 bp, Probe sequence
aaacaacttgctttcacataacaac

SEQ ID NO: 89711 - DNA, 25 bp, Probe sequence
caaagtactcttttaatgattaatt

SEQ ID NO: 89712 - DNA, 25 bp, Probe sequence
cagattttcaaaagcattgttatgc

SEQ ID NO: 89713 - DNA, 25 bp, Probe sequence
gctttcacataacaacattaactta

SEQ ID NO: 89714 - DNA, 25 bp, Probe sequence
gcagtacttaaatttgcaattattt

SEQ ID NO: 89715 - DNA, 25 bp, Probe sequence
gaaaattaagtatcacatctcgttg

SEQ ID NO: 89716 - DNA, 25 bp, Probe sequence
gactaaccaatttcaaagtactctt

SEQ ID NO: 89717 - DNA, 25 bp, Probe sequence
gaggataaattgagttagcgaccac

SEQ ID NO: 89718 - DNA, 25 bp, Probe sequence
gagcaccttaaaatcgactaaccaa

SEQ ID NO: 89719 - DNA, 25 bp, Probe sequence
gttagcgaccacaaaagcactttaa

SEQ ID NO: 89720 - DNA, 25 bp, Probe sequence
tatgcttaacaatttagccaacact

SEQ ID NO: 89721 - DNA, 25 bp, Probe sequence
tattttatcactaattgtttgtata

SEQ ID NO: 89722 - DNA, 25 bp, Probe sequence
tttcacctctctaaaaagtattgtt

SEQ ID NO: 89723 - DNA, 25 bp, Probe sequence
agattgttcaattgtatgccccttt

SEQ ID NO: 89724 - DNA, 25 bp, Probe sequence
aaactgcgaacagctgcttctcttt

SEQ ID NO: 89725 - DNA, 25 bp, Probe sequence
aagccacactcatccgatgtcatat

SEQ ID NO: 89726 - DNA, 25 bp, Probe sequence
aatatatataccgttcccgatcgca

SEQ ID NO: 89727 - DNA, 25 bp, Probe sequence
cattccctacacactcttataaaag

SEQ ID NO: 89728 - DNA, 25 bp, Probe sequence
ccatagatccttaagccacactcat

SEQ ID NO: 89729 - DNA, 25 bp, Probe sequence
gcccttcagtttttcaggttcttca

SEQ ID NO: 89730 - DNA, 25 bp, Probe sequence
gctaatagtcccatatcgtgcgtta

SEQ ID NO: 89731 - DNA, 25 bp, Probe sequence
gttctccctactagacttttagcat

SEQ ID NO: 89732 - DNA, 25 bp, Probe sequence
gtgattggacaactgttctccctac

SEQ ID NO: 89733 - DNA, 25 bp, Probe sequence
ggcataccacttttgcatcaagcta

SEQ ID NO: 89734 - DNA, 25 bp, Probe sequence
taattaaactgtcgttcccttcatc

SEQ ID NO: 89735 - DNA, 25 bp, Probe sequence
taaaactatctattcaattccccta

SEQ ID NO: 89736 - DNA, 25 bp, Probe sequence
tatgcccctttcctttgaacggaat

SEQ ID NO: 89737 - DNA, 25 bp, Probe sequence
ttcgattaatctatctcctccaatt

SEQ ID NO: 89738 - DNA, 25 bp, Probe sequence
atattctcagtttattatacaatta

SEQ ID NO: 89739 - DNA, 25 bp, Probe sequence
atcacgaatttacttgacatgataa

SEQ ID NO: 89740 - DNA, 25 bp, Probe sequence
acctcacatacattgtctatattat

SEQ ID NO: 89741 - DNA, 25 bp, Probe sequence
actttcacctcacatacattgtcta

SEQ ID NO: 89742 - DNA, 25 bp, Probe sequence
acttgacatgataaatattctcagt

SEQ ID NO: 89743 - DNA, 25 bp, Probe sequence
acattgtctatattatatcacgaat

SEQ ID NO: 89744 - DNA, 25 bp, Probe sequence
acatacattgtctatattatatcac

SEQ ID NO: 89745 - DNA, 25 bp, Probe sequence
cacctcacatacattgtctatatta

SEQ ID NO: 89746 - DNA, 25 bp, Probe sequence
ctttcacctcacatacattgtctat

SEQ ID NO: 89747 - DNA, 25 bp, Probe sequence
gtctatattatatcacgaatttact

SEQ ID NO: 89748 - DNA, 25 bp, Probe sequence
tcacctcacatacattgtctatatt

SEQ ID NO: 89749 - DNA, 25 bp, Probe sequence
tatatcacgaatttacttgacatga

SEQ ID NO: 89750 - DNA, 25 bp, Probe sequence
tttcacctcacatacattgtctata

SEQ ID NO: 89751 - DNA, 25 bp, Probe sequence
ttatacaattaattaggttagccta

SEQ ID NO: 89752 - DNA, 25 bp, Probe sequence
ttcacctcacatacattgtctatat

SEQ ID NO: 89753 - DNA, 25 bp, Probe sequence
attatccatatgtctttatcagttc

SEQ ID NO: 89754 - DNA, 25 bp, Probe sequence
atatgtctttatcagttcaatcatg

SEQ ID NO: 89755 - DNA, 25 bp, Probe sequence
atcagttcaatcatggatatcttta

SEQ ID NO: 89756 - DNA, 25 bp, Probe sequence
atcatggatatctttatggcttctt

SEQ ID NO: 89757 - DNA, 25 bp, Probe sequence
atggatatctttatggcttctttat

SEQ ID NO: 89758 - DNA, 25 bp, Probe sequence
aaagaagcctaaagcaattatccat

SEQ ID NO: 89759 - DNA, 25 bp, Probe sequence
aagcaattatccatatgtctttatc

SEQ ID NO: 89760 - DNA, 25 bp, Probe sequence
gcctaaagcaattatccatatgtct

SEQ ID NO: 89761 - DNA, 25 bp, Probe sequence
gcaattatccatatgtctttatcag

SEQ ID NO: 89762 - DNA, 25 bp, Probe sequence
gaagcctaaagcaattatccatatg

SEQ ID NO: 89763 - DNA, 25 bp, Probe sequence
gttcaatcatggatatctttatggc

SEQ ID NO: 89764 - DNA, 25 bp, Probe sequence
tggatatctttatggcttctttatt

SEQ ID NO: 89765 - DNA, 25 bp, Probe sequence
tgtctttatcagttcaatcatggat

SEQ ID NO: 89766 - DNA, 25 bp, Probe sequence
tccatatgtctttatcagttcaatc

SEQ ID NO: 89767 - DNA, 25 bp, Probe sequence
tatccatatgtctttatcagttcaa

SEQ ID NO: 89768 - DNA, 25 bp, Probe sequence
attttgctttattttaacacatatt

SEQ ID NO: 89769 - DNA, 25 bp, Probe sequence
attttaacacatattcaccttttca

SEQ ID NO: 89770 - DNA, 25 bp, Probe sequence
atattcatcctatttatatcgaaat

SEQ ID NO: 89771 - DNA, 25 bp, Probe sequence
atatcgaaatgattttgctttattt

SEQ ID NO: 89772 - DNA, 25 bp, Probe sequence
aggtaagtctaaagtctaacgctat

SEQ ID NO: 89773 - DNA, 25 bp, Probe sequence
agtgctaagcaaactttaaattaat

SEQ ID NO: 89774 - DNA, 25 bp, Probe sequence
acaggaatctcctatcttatttcat

SEQ ID NO: 89775 - DNA, 25 bp, Probe sequence
aaagtctaacgctattgatgccaat

SEQ ID NO: 89776 - DNA, 25 bp, Probe sequence
aacagtatttatattcatcctattt

SEQ ID NO: 89777 - DNA, 25 bp, Probe sequence
aacgctattgatgccaatatcattt

SEQ ID NO: 89778 - DNA, 25 bp, Probe sequence
cacatattcaccttttcaaaaatta

SEQ ID NO: 89779 - DNA, 25 bp, Probe sequence
ctcctatcttatttcattattatgt

SEQ ID NO: 89780 - DNA, 25 bp, Probe sequence
gaatctcctatcttatttcattatt

SEQ ID NO: 89781 - DNA, 25 bp, Probe sequence
gatgccaatatcatttataataagt

SEQ ID NO: 89782 - DNA, 25 bp, Probe sequence
ttaacacatattcaccttttcaaaa

SEQ ID NO: 89783 - DNA, 25 bp, Probe sequence
atctccatttaaggatttcctcggt

SEQ ID NO: 89784 - DNA, 25 bp, Probe sequence
agaatctccatttaaggatttcctc

SEQ ID NO: 89785 - DNA, 25 bp, Probe sequence
accgagaatctccatttaaggattt

SEQ ID NO: 89786 - DNA, 25 bp, Probe sequence
aaaccgagaatctccatttaaggat

SEQ ID NO: 89787 - DNA, 25 bp, Probe sequence
aaccgagaatctccatttaaggatt

SEQ ID NO: 89788 - DNA, 25 bp, Probe sequence
aatctccatttaaggatttcctcgg

SEQ ID NO: 89789 - DNA, 25 bp, Probe sequence
ctcggttttatttttatcatcatga

SEQ ID NO: 89790 - DNA, 25 bp, Probe sequence
cgagaatctccatttaaggatttcc

SEQ ID NO: 89791 - DNA, 25 bp, Probe sequence
ccgagaatctccatttaaggatttc

SEQ ID NO: 89792 - DNA, 25 bp, Probe sequence
cctcggttttatttttatcatcatg

SEQ ID NO: 89793 - DNA, 25 bp, Probe sequence
gaatctccatttaaggatttcctcg

SEQ ID NO: 89794 - DNA, 25 bp, Probe sequence
gagaatctccatttaaggatttcct

SEQ ID NO: 89795 - DNA, 25 bp, Probe sequence
tcctcggttttatttttatcatcat

SEQ ID NO: 89796 - DNA, 25 bp, Probe sequence
tctccatttaaggatttcctcggtt

SEQ ID NO: 89797 - DNA, 25 bp, Probe sequence
ttcctcggttttatttttatcatca

SEQ ID NO: 89798 - DNA, 25 bp, Probe sequence
attgttgtaaatactatcactatac

SEQ ID NO: 89799 - DNA, 25 bp, Probe sequence
atactatcactatacatggatgcta

SEQ ID NO: 89800 - DNA, 25 bp, Probe sequence
atcactatacatggatgctatcaaa

SEQ ID NO: 89801 - DNA, 25 bp, Probe sequence
agtttttaaatatcattgttatcat

SEQ ID NO: 89802 - DNA, 25 bp, Probe sequence
aaacaccaactctgataataacaaa

SEQ ID NO: 89803 - DNA, 25 bp, Probe sequence
aatcttctatacactttacaacagg

SEQ ID NO: 89804 - DNA, 25 bp, Probe sequence
aataacaaaatcttctatacacttt

SEQ ID NO: 89805 - DNA, 25 bp, Probe sequence
gatgattaacattttgtgtcaaaac

SEQ ID NO: 89806 - DNA, 25 bp, Probe sequence
gtgtcaaaacaccaactctgataat

SEQ ID NO: 89807 - DNA, 25 bp, Probe sequence
ggatgctatcaaaattattgtctag

SEQ ID NO: 89808 - DNA, 25 bp, Probe sequence
tgtttaactatttctctacttaact

SEQ ID NO: 89809 - DNA, 25 bp, Probe sequence
tctatacactttacaacaggtttta

SEQ ID NO: 89810 - DNA, 25 bp, Probe sequence
tcaaaattattgtctagttctttaa

SEQ ID NO: 89811 - DNA, 25 bp, Probe sequence
taactatttctctacttaactaaat

SEQ ID NO: 89812 - DNA, 25 bp, Probe sequence
taacaactgttgagtagtatattat

SEQ ID NO: 89813 - DNA, 25 bp, Probe sequence
atgaaccccacttccatttattaat

SEQ ID NO: 89814 - DNA, 25 bp, Probe sequence
atggttagcggggtttcgtcatata

SEQ ID NO: 89815 - DNA, 25 bp, Probe sequence
agcggggtttcgtcatataaatata

SEQ ID NO: 89816 - DNA, 25 bp, Probe sequence
aatggttagcggggtttcgtcatat

SEQ ID NO: 89817 - DNA, 25 bp, Probe sequence
aatacaccaacttaatatgttattt

SEQ ID NO: 89818 - DNA, 25 bp, Probe sequence
ttaatggttagcggggtttcgtcat

SEQ ID NO: 89819 - DNA, 25 bp, Probe sequence
caccaacttaatatgttatttactt

SEQ ID NO: 89820 - DNA, 25 bp, Probe sequence
cccacttccatttattaatggttag

SEQ ID NO: 89821 - DNA, 25 bp, Probe sequence
gaaccccacttccatttattaatgg

SEQ ID NO: 89822 - DNA, 25 bp, Probe sequence
gttagcggggtttcgtcatataaat

SEQ ID NO: 89823 - DNA, 25 bp, Probe sequence
tggttagcggggtttcgtcatataa

SEQ ID NO: 89824 - DNA, 25 bp, Probe sequence
tgaaccccacttccatttattaatg

SEQ ID NO: 89825 - DNA, 25 bp, Probe sequence
taatggttagcggggtttcgtcata

SEQ ID NO: 89826 - DNA, 25 bp, Probe sequence
tagcggggtttcgtcatataaatat

SEQ ID NO: 89827 - DNA, 25 bp, Probe sequence
ttagcggggtttcgtcatataaata

SEQ ID NO: 89828 - DNA, 25 bp, Probe sequence
ataggattgcagtttatggtcatca

SEQ ID NO: 89829 - DNA, 25 bp, Probe sequence
aggattgcagtttatggtcatcaat

SEQ ID NO: 89830 - DNA, 25 bp, Probe sequence
cagtttatggtcatcaatatacacg

SEQ ID NO: 89831 - DNA, 25 bp, Probe sequence
catattgtcacatcataggattgca

SEQ ID NO: 89832 - DNA, 25 bp, Probe sequence
ctcctcatattgtcacatcatagga

SEQ ID NO: 89833 - DNA, 25 bp, Probe sequence
cctcatattgtcacatcataggatt

SEQ ID NO: 89834 - DNA, 25 bp, Probe sequence
cctcctcatattgtcacatcatagg

SEQ ID NO: 89835 - DNA, 25 bp, Probe sequence
gcagtttatggtcatcaatatacac

SEQ ID NO: 89836 - DNA, 25 bp, Probe sequence
gattgcagtttatggtcatcaatat

SEQ ID NO: 89837 - DNA, 25 bp, Probe sequence
gtcacatcataggattgcagtttat

SEQ ID NO: 89838 - DNA, 25 bp, Probe sequence
tcctcctcatattgtcacatcatag

SEQ ID NO: 89839 - DNA, 25 bp, Probe sequence
taggattgcagtttatggtcatcaa

SEQ ID NO: 89840 - DNA, 25 bp, Probe sequence
tattgtcacatcataggattgcagt

SEQ ID NO: 89841 - DNA, 25 bp, Probe sequence
ttgcagtttatggtcatcaatatac

SEQ ID NO: 89842 - DNA, 25 bp, Probe sequence
ttgtcacatcataggattgcagttt

SEQ ID NO: 89843 - DNA, 25 bp, Probe sequence
ataaagctgcgaaacttgtccgttt

SEQ ID NO: 89844 - DNA, 25 bp, Probe sequence
atcgtttagtatcgatagttctata

SEQ ID NO: 89845 - DNA, 25 bp, Probe sequence
agctgcgaaacttgtccgttttata

SEQ ID NO: 89846 - DNA, 25 bp, Probe sequence
acggacaagttgcacattataaagc

SEQ ID NO: 89847 - DNA, 25 bp, Probe sequence
actaaaaacggacaagttgcacatt

SEQ ID NO: 89848 - DNA, 25 bp, Probe sequence
aaaacggacaagttgcacattataa

SEQ ID NO: 89849 - DNA, 25 bp, Probe sequence
aagctgcgaaacttgtccgttttat

SEQ ID NO: 89850 - DNA, 25 bp, Probe sequence
caagttgcacattataaagctgcga

SEQ ID NO: 89851 - DNA, 25 bp, Probe sequence
gctgcgaaacttgtccgttttatat

SEQ ID NO: 89852 - DNA, 25 bp, Probe sequence
gttgcacattataaagctgcgaaac

SEQ ID NO: 89853 - DNA, 25 bp, Probe sequence
ggacaagttgcacattataaagctg

SEQ ID NO: 89854 - DNA, 25 bp, Probe sequence
tgcgaaacttgtccgttttatattt

SEQ ID NO: 89855 - DNA, 25 bp, Probe sequence
taagttaatttatcgtttagtatcg

SEQ ID NO: 89856 - DNA, 25 bp, Probe sequence
taaagctgcgaaacttgtccgtttt

SEQ ID NO: 89857 - DNA, 25 bp, Probe sequence
tataaagctgcgaaacttgtccgtt

SEQ ID NO: 89858 - DNA, 25 bp, Probe sequence
attgcattttttgtaataacttctc

SEQ ID NO: 89859 - DNA, 25 bp, Probe sequence
ataacacctttagctacacacgtaa

SEQ ID NO: 89860 - DNA, 25 bp, Probe sequence
aataacttctcaaagtctttatatt

SEQ ID NO: 89861 - DNA, 25 bp, Probe sequence
catatactttctcccaacaaaactt

SEQ ID NO: 89862 - DNA, 25 bp, Probe sequence
cttcgtacaaacattataacacctt

SEQ ID NO: 89863 - DNA, 25 bp, Probe sequence
gctacacacgtaatatatttgcatt

SEQ ID NO: 89864 - DNA, 25 bp, Probe sequence
gcattatttttcaaattaactgcag

SEQ ID NO: 89865 - DNA, 25 bp, Probe sequence
gaattagcaatgatttccgtaagta

SEQ ID NO: 89866 - DNA, 25 bp, Probe sequence
gatacatgcatttctatcatatact

SEQ ID NO: 89867 - DNA, 25 bp, Probe sequence
gtaggaataaccattgcttttaggg

SEQ ID NO: 89868 - DNA, 25 bp, Probe sequence
tgccccaaaataccgctcataacat

SEQ ID NO: 89869 - DNA, 25 bp, Probe sequence
taaagtgttgccccaaaataccgct

SEQ ID NO: 89870 - DNA, 25 bp, Probe sequence
tttacctcttctgtttgaaatttat

SEQ ID NO: 89871 - DNA, 25 bp, Probe sequence
ttgagtaagtttgctcttcgtacaa

SEQ ID NO: 89872 - DNA, 25 bp, Probe sequence
ttctatcatatactttctcccaaca

SEQ ID NO: 89873 - DNA, 25 bp, Probe sequence
atttcctcgatggtatatgtgtatt

SEQ ID NO: 89874 - DNA, 25 bp, Probe sequence
atgtgtatttgctccaagcttactt

SEQ ID NO: 89875 - DNA, 25 bp, Probe sequence
caatgtgccacactttaatttcctc

SEQ ID NO: 89876 - DNA, 25 bp, Probe sequence
cacactttaatttcctcgatggtat

SEQ ID NO: 89877 - DNA, 25 bp, Probe sequence
cactttaatttcctcgatggtatat

SEQ ID NO: 89878 - DNA, 25 bp, Probe sequence
gccacactttaatttcctcgatggt

SEQ ID NO: 89879 - DNA, 25 bp, Probe sequence
gctccaagcttacttatatataaaa

SEQ ID NO: 89880 - DNA, 25 bp, Probe sequence
gtatttgctccaagcttacttatat

SEQ ID NO: 89881 - DNA, 25 bp, Probe sequence
gtgtatttgctccaagcttacttat

SEQ ID NO: 89882 - DNA, 25 bp, Probe sequence
ggtatatgtgtatttgctccaagct

SEQ ID NO: 89883 - DNA, 25 bp, Probe sequence
tgccacactttaatttcctcgatgg

SEQ ID NO: 89884 - DNA, 25 bp, Probe sequence
tcgatggtatatgtgtatttgctcc

SEQ ID NO: 89885 - DNA, 25 bp, Probe sequence
taatttcctcgatggtatatgtgta

SEQ ID NO: 89886 - DNA, 25 bp, Probe sequence
tatatgtgtatttgctccaagctta

SEQ ID NO: 89887 - DNA, 25 bp, Probe sequence
tttgctccaagcttacttatatata

SEQ ID NO: 89888 - DNA, 25 bp, Probe sequence
ataccatgagcatttttttcttaaa

SEQ ID NO: 89889 - DNA, 25 bp, Probe sequence
atcaaacttctgtaccgtggactct

SEQ ID NO: 89890 - DNA, 25 bp, Probe sequence
acttctgtaccgtggactctaaaat

SEQ ID NO: 89891 - DNA, 25 bp, Probe sequence
aaatatcaaacttctgtaccgtgga

SEQ ID NO: 89892 - DNA, 25 bp, Probe sequence
aaatcagttaaattgctatgtaaaa

SEQ ID NO: 89893 - DNA, 25 bp, Probe sequence
caaacttctgtaccgtggactctaa

SEQ ID NO: 89894 - DNA, 25 bp, Probe sequence
cttgtattataccatgagcattttt

SEQ ID NO: 89895 - DNA, 25 bp, Probe sequence
gcacccacctatgatttaatttttt

SEQ ID NO: 89896 - DNA, 25 bp, Probe sequence
gaagaattatgactcgtggctacag

SEQ ID NO: 89897 - DNA, 25 bp, Probe sequence
gactcgtggctacagtatttaatat

SEQ ID NO: 89898 - DNA, 25 bp, Probe sequence
gtatttaatatatgtatgtttgctt

SEQ ID NO: 89899 - DNA, 25 bp, Probe sequence
gtatgtttgcttataacttgtatta

SEQ ID NO: 89900 - DNA, 25 bp, Probe sequence
gtaccgtggactctaaaatcagtta

SEQ ID NO: 89901 - DNA, 25 bp, Probe sequence
ttatgactcgtggctacagtattta

SEQ ID NO: 89902 - DNA, 25 bp, Probe sequence
ttagcacccacctatgatttaattt

SEQ ID NO: 89903 - DNA, 25 bp, Probe sequence
atatcaatagacgacatgcctggac

SEQ ID NO: 89904 - DNA, 25 bp, Probe sequence
actgtacctagtccttactgtcata

SEQ ID NO: 89905 - DNA, 25 bp, Probe sequence
aaaaagtccaagcatctcacctata

SEQ ID NO: 89906 - DNA, 25 bp, Probe sequence
aagccaagtgtattaccatgtgcac

SEQ ID NO: 89907 - DNA, 25 bp, Probe sequence
aattttgctcgaagtactatgactg

SEQ ID NO: 89908 - DNA, 25 bp, Probe sequence
gcacttggtttttataatgcttcaa

SEQ ID NO: 89909 - DNA, 25 bp, Probe sequence
gacgacatgcctggacatatttatt

SEQ ID NO: 89910 - DNA, 25 bp, Probe sequence
gtattaccatgtgcacttggttttt

SEQ ID NO: 89911 - DNA, 25 bp, Probe sequence
gtattatcatagtcactcttcgaca

SEQ ID NO: 89912 - DNA, 25 bp, Probe sequence
gtactatgactgtacctagtcctta

SEQ ID NO: 89913 - DNA, 25 bp, Probe sequence
gtacaataatattcatttcccataa

SEQ ID NO: 89914 - DNA, 25 bp, Probe sequence
tccaagcatctcacctatatcaata

SEQ ID NO: 89915 - DNA, 25 bp, Probe sequence
taatgcttcaatttcggtaacttta

SEQ ID NO: 89916 - DNA, 25 bp, Probe sequence
tagtccttactgtcatatgtacaat

SEQ ID NO: 89917 - DNA, 25 bp, Probe sequence
ttcatttcccataaaagccaagtgt

SEQ ID NO: 89918 - DNA, 25 bp, Probe sequence
atatgaagaatagctttccctaata

SEQ ID NO: 89919 - DNA, 25 bp, Probe sequence
atagctttccctaataaatatcact

SEQ ID NO: 89920 - DNA, 25 bp, Probe sequence
atcccctttatatatttattagact

SEQ ID NO: 89921 - DNA, 25 bp, Probe sequence
atgctgtcacaactctatggaaaga

SEQ ID NO: 89922 - DNA, 25 bp, Probe sequence
accatcccctttatatatttattag

SEQ ID NO: 89923 - DNA, 25 bp, Probe sequence
acaaaaatgctgtcacaactctatg

SEQ ID NO: 89924 - DNA, 25 bp, Probe sequence
aaaatgctgtcacaactctatggaa

SEQ ID NO: 89925 - DNA, 25 bp, Probe sequence
gctttccctaataaatatcactcac

SEQ ID NO: 89926 - DNA, 25 bp, Probe sequence
gaagaatagctttccctaataaata

SEQ ID NO: 89927 - DNA, 25 bp, Probe sequence
gaaaccatcccctttatatatttat

SEQ ID NO: 89928 - DNA, 25 bp, Probe sequence
gagttctaacaaagatttactattt

SEQ ID NO: 89929 - DNA, 25 bp, Probe sequence
gatttactatttaactaatttatat

SEQ ID NO: 89930 - DNA, 25 bp, Probe sequence
gtagcacaacaaaaatgctgtcaca

SEQ ID NO: 89931 - DNA, 25 bp, Probe sequence
tatcactcacaatataataattaaa

SEQ ID NO: 89932 - DNA, 25 bp, Probe sequence
ttccctaataaatatcactcacaat

SEQ ID NO: 89933 - DNA, 25 bp, Probe sequence
aaaggcatcccaattgataatgatt

SEQ ID NO: 89934 - DNA, 25 bp, Probe sequence
aaaacgcccacagataagtcttcat

SEQ ID NO: 89935 - DNA, 25 bp, Probe sequence
aagtatgtgtgctcataccatttat

SEQ ID NO: 89936 - DNA, 25 bp, Probe sequence
aatcttattgactaacattactttt

SEQ ID NO: 89937 - DNA, 25 bp, Probe sequence
catgaacatcattataacatttttc

SEQ ID NO: 89938 - DNA, 25 bp, Probe sequence
cttgtccgtggacttctatttaagt

SEQ ID NO: 89939 - DNA, 25 bp, Probe sequence
cttctatttaagtatgtgtgctcat

SEQ ID NO: 89940 - DNA, 25 bp, Probe sequence
cctactttcaataaaattctttctg

SEQ ID NO: 89941 - DNA, 25 bp, Probe sequence
gcccacagataagtcttcatagttc

SEQ ID NO: 89942 - DNA, 25 bp, Probe sequence
gctcgatttgtcatgtcttgtatat

SEQ ID NO: 89943 - DNA, 25 bp, Probe sequence
gtcatgtcttgtatattacttttat

SEQ ID NO: 89944 - DNA, 25 bp, Probe sequence
ggatagctcgatttgtcatgtcttg

SEQ ID NO: 89945 - DNA, 25 bp, Probe sequence
tagttcaaaaacttgtccgtggact

SEQ ID NO: 89946 - DNA, 25 bp, Probe sequence
ttatcaattttcaaaggcatcccaa

SEQ ID NO: 89947 - DNA, 25 bp, Probe sequence
ttactttttaaattggatagctcga

SEQ ID NO: 89948 - DNA, 25 bp, Probe sequence
atatttttgataagatcctcttgat

SEQ ID NO: 89949 - DNA, 25 bp, Probe sequence
atgcgctatcataaagaattaacct

SEQ ID NO: 89950 - DNA, 25 bp, Probe sequence
aaataaatagtcttgagtggctcat

SEQ ID NO: 89951 - DNA, 25 bp, Probe sequence
aaatgctatgaaaagccttataata

SEQ ID NO: 89952 - DNA, 25 bp, Probe sequence
aaacagaataaatgaatgcgctatc

SEQ ID NO: 89953 - DNA, 25 bp, Probe sequence
aagccttataataaagtgcctttca

SEQ ID NO: 89954 - DNA, 25 bp, Probe sequence
aagtgcctttcatagcaataagttg

SEQ ID NO: 89955 - DNA, 25 bp, Probe sequence
aatagtcttgagtggctcattaaat

SEQ ID NO: 89956 - DNA, 25 bp, Probe sequence
catgttgtacctccttggtattatc

SEQ ID NO: 89957 - DNA, 25 bp, Probe sequence
gaattaacctgataccgttatcaaa

SEQ ID NO: 89958 - DNA, 25 bp, Probe sequence
gatcctcttgataacttaatggttc

SEQ ID NO: 89959 - DNA, 25 bp, Probe sequence
gataccgttatcaaatatatttttg

SEQ ID NO: 89960 - DNA, 25 bp, Probe sequence
tccttggtattatcagtcatagtat

SEQ ID NO: 89961 - DNA, 25 bp, Probe sequence
tacctccttggtattatcagtcata

SEQ ID NO: 89962 - DNA, 25 bp, Probe sequence
tagcaataagttgtgtcctttgaca

SEQ ID NO: 89963 - DNA, 25 bp, Probe sequence
attaaacatttacatatatactatc

SEQ ID NO: 89964 - DNA, 25 bp, Probe sequence
atttctccagattttattaaacatt

SEQ ID NO: 89965 - DNA, 25 bp, Probe sequence
acatatatactatcatattttttat

SEQ ID NO: 89966 - DNA, 25 bp, Probe sequence
aaacatttacatatatactatcata

SEQ ID NO: 89967 - DNA, 25 bp, Probe sequence
catattttttataaagtttcatttg

SEQ ID NO: 89968 - DNA, 25 bp, Probe sequence
catttacatatatactatcatattt

SEQ ID NO: 89969 - DNA, 25 bp, Probe sequence
ctatttctccagattttattaaaca

SEQ ID NO: 89970 - DNA, 25 bp, Probe sequence
ctcctatttctccagattttattaa

SEQ ID NO: 89971 - DNA, 25 bp, Probe sequence
ctccagattttattaaacatttaca

SEQ ID NO: 89972 - DNA, 25 bp, Probe sequence
cctcctatttctccagattttatta

SEQ ID NO: 89973 - DNA, 25 bp, Probe sequence
tcctcctatttctccagattttatt

SEQ ID NO: 89974 - DNA, 25 bp, Probe sequence
tcctatttctccagattttattaaa

SEQ ID NO: 89975 - DNA, 25 bp, Probe sequence
tatttctccagattttattaaacat

SEQ ID NO: 89976 - DNA, 25 bp, Probe sequence
ttacatttttcattattagtaaatt

SEQ ID NO: 89977 - DNA, 25 bp, Probe sequence
ttctccagattttattaaacattta

SEQ ID NO: 89978 - DNA, 25 bp, Probe sequence
atccattcacattatcacgttcaat

SEQ ID NO: 89979 - DNA, 25 bp, Probe sequence
aggctggaacatatgtcccaaccca

SEQ ID NO: 89980 - DNA, 25 bp, Probe sequence
aaaccatatatcgtatgttctttat

SEQ ID NO: 89981 - DNA, 25 bp, Probe sequence
aaaattgctcaatccattcacatta

SEQ ID NO: 89982 - DNA, 25 bp, Probe sequence
caaaatctctcagttaacaaggttt

SEQ ID NO: 89983 - DNA, 25 bp, Probe sequence
gaataatagacctccttaattttgc

SEQ ID NO: 89984 - DNA, 25 bp, Probe sequence
gcataggttatttttcactttttca

SEQ ID NO: 89985 - DNA, 25 bp, Probe sequence
gcaagtcgcataggttatttttcac

SEQ ID NO: 89986 - DNA, 25 bp, Probe sequence
gaatacatatcaaaatctctcagtt

SEQ ID NO: 89987 - DNA, 25 bp, Probe sequence
gacctccttaattttgcacagtgtg

SEQ ID NO: 89988 - DNA, 25 bp, Probe sequence
gtataaaaaccatttgtgcacacaa

SEQ ID NO: 89989 - DNA, 25 bp, Probe sequence
gtgcacacaagtatacttcgttagt

SEQ ID NO: 89990 - DNA, 25 bp, Probe sequence
tgcacagtgtgcattataacgtact

SEQ ID NO: 89991 - DNA, 25 bp, Probe sequence
taatgcagtcatacgaacttttgta

SEQ ID NO: 89992 - DNA, 25 bp, Probe sequence
ttattgtgcttcttgaatttcgtaa

SEQ ID NO: 89993 - DNA, 25 bp, Probe sequence
atcgtacctctctatttgttagacg

SEQ ID NO: 89994 - DNA, 25 bp, Probe sequence
acctctctatttgttagacgctcat

SEQ ID NO: 89995 - DNA, 25 bp, Probe sequence
aaaagcaattcgcccgataagagta

SEQ ID NO: 89996 - DNA, 25 bp, Probe sequence
aagtttcggatatccatcatatgat

SEQ ID NO: 89997 - DNA, 25 bp, Probe sequence
aatataaaaagcaattcgcccgata

SEQ ID NO: 89998 - DNA, 25 bp, Probe sequence
caattcgcccgataagagtagagac

SEQ ID NO: 89999 - DNA, 25 bp, Probe sequence
aattgtaaagtttcggatatccatc

SEQ ID NO: 90000 - DNA, 25 bp, Probe sequence
gacgctcatattaatagactgaata

SEQ ID NO: 90001 - DNA, 25 bp, Probe sequence
gagtagagacgaattgcttttaagg

SEQ ID NO: 90002 - DNA, 25 bp, Probe sequence
gttagacgctcatattaatagactg

SEQ ID NO: 90003 - DNA, 25 bp, Probe sequence
gtacctctctatttgttagacgctc

SEQ ID NO: 90004 - DNA, 25 bp, Probe sequence
gtgattcaattgtaaagtttcggat

SEQ ID NO: 90005 - DNA, 25 bp, Probe sequence
tctatttgttagacgctcatattaa

SEQ ID NO: 90006 - DNA, 25 bp, Probe sequence
tacatcgtacctctctatttgttag

SEQ ID NO: 90007 - DNA, 25 bp, Probe sequence
tagagacgaattgcttttaaggtta

SEQ ID NO: 90008 - DNA, 25 bp, Probe sequence
attatatctcagactcttacacatt

SEQ ID NO: 90009 - DNA, 25 bp, Probe sequence
atcacttcgtgctcaatctatattt

SEQ ID NO: 90010 - DNA, 25 bp, Probe sequence
aaatttattatatcatgtacacact

SEQ ID NO: 90011 - DNA, 25 bp, Probe sequence
cactgtttttcgacaatttagttgt

SEQ ID NO: 90012 - DNA, 25 bp, Probe sequence
ccttatttcaaatcacttcgtgctc

SEQ ID NO: 90013 - DNA, 25 bp, Probe sequence
gccccacatgttttaaattcttcgt

SEQ ID NO: 90014 - DNA, 25 bp, Probe sequence
gctcaatctatattttattttttct

SEQ ID NO: 90015 - DNA, 25 bp, Probe sequence
gaaccgctaacaatttattatatct

SEQ ID NO: 90016 - DNA, 25 bp, Probe sequence
gtacacactgtttttcgacaattta

SEQ ID NO: 90017 - DNA, 25 bp, Probe sequence
tcttacacattagccccacatgttt

SEQ ID NO: 90018 - DNA, 25 bp, Probe sequence
taaattcttcgttttcaatttgaag

SEQ ID NO: 90019 - DNA, 25 bp, Probe sequence
tatcatgtacacactgtttttcgac

SEQ ID NO: 90020 - DNA, 25 bp, Probe sequence
tttgaagatcttaaatgttgcttaa

SEQ ID NO: 90021 - DNA, 25 bp, Probe sequence
tttcacaaccttatttcaaatcact

SEQ ID NO: 90022 - DNA, 25 bp, Probe sequence
ttcttttgaattcttttcaatttat

SEQ ID NO: 90023 - DNA, 25 bp, Probe sequence
atactcttattcatttatcaaattt

SEQ ID NO: 90024 - DNA, 25 bp, Probe sequence
atcgcataacaacgaatttaatggt

SEQ ID NO: 90025 - DNA, 25 bp, Probe sequence
atgcgtatactcttattcatttatc

SEQ ID NO: 90026 - DNA, 25 bp, Probe sequence
atggttacctaatacattactcata

SEQ ID NO: 90027 - DNA, 25 bp, Probe sequence
agctattttatcataatcttgtatc

SEQ ID NO: 90028 - DNA, 25 bp, Probe sequence
accactaatgtgtaattgatcaact

SEQ ID NO: 90029 - DNA, 25 bp, Probe sequence
acctaatacattactcatacttatc

SEQ ID NO: 90030 - DNA, 25 bp, Probe sequence
aaattcaaaataaagcaccactaat

SEQ ID NO: 90031 - DNA, 25 bp, Probe sequence
aaagcaccactaatgtgtaattgat

SEQ ID NO: 90032 - DNA, 25 bp, Probe sequence
aatcttgtatcagaatcgcataaca

SEQ ID NO: 90033 - DNA, 25 bp, Probe sequence
gatcaactatcaactacgattagta

SEQ ID NO: 90034 - DNA, 25 bp, Probe sequence
gattagtagtgctttatatatgttg

SEQ ID NO: 90035 - DNA, 25 bp, Probe sequence
tctaatcttaaatgaatgcgtatac

SEQ ID NO: 90036 - DNA, 25 bp, Probe sequence
tacttatcaatgtcatctaatctta

SEQ ID NO: 90037 - DNA, 25 bp, Probe sequence
tactcatacttatcaatgtcatcta

SEQ ID NO: 90038 - DNA, 25 bp, Probe sequence
attactccaccttttagttacatat

SEQ ID NO: 90039 - DNA, 25 bp, Probe sequence
attataatagtagcaaatgttttaa

SEQ ID NO: 90040 - DNA, 25 bp, Probe sequence
atattactccaccttttagttacat

SEQ ID NO: 90041 - DNA, 25 bp, Probe sequence
atattataatagtagcaaatgtttt

SEQ ID NO: 90042 - DNA, 25 bp, Probe sequence
ataatagtagcaaatgttttaaaat

SEQ ID NO: 90043 - DNA, 25 bp, Probe sequence
catattactccaccttttagttaca

SEQ ID NO: 90044 - DNA, 25 bp, Probe sequence
gttacatatatattataatagtagc

SEQ ID NO: 90045 - DNA, 25 bp, Probe sequence
tgtaaccaaaaaacatattactcca

SEQ ID NO: 90046 - DNA, 25 bp, Probe sequence
taatagtagcaaatgttttaaaatt

SEQ ID NO: 90047 - DNA, 25 bp, Probe sequence
taaaatttcaaaatactggaggctt

SEQ ID NO: 90048 - DNA, 25 bp, Probe sequence
tagtagcaaatgttttaaaatttca

SEQ ID NO: 90049 - DNA, 25 bp, Probe sequence
tataatagtagcaaatgttttaaaa

SEQ ID NO: 90050 - DNA, 25 bp, Probe sequence
tattactccaccttttagttacata

SEQ ID NO: 90051 - DNA, 25 bp, Probe sequence
ttataatagtagcaaatgttttaaa

SEQ ID NO: 90052 - DNA, 25 bp, Probe sequence
ttactccaccttttagttacatata

SEQ ID NO: 90053 - DNA, 25 bp, Probe sequence
attataacgttgaagctgcattgat

SEQ ID NO: 90054 - DNA, 25 bp, Probe sequence
ataacgttgaagctgcattgatgta

SEQ ID NO: 90055 - DNA, 25 bp, Probe sequence
acgttgaagctgcattgatgtatca

SEQ ID NO: 90056 - DNA, 25 bp, Probe sequence
acatctatcttattataacgttgaa

SEQ ID NO: 90057 - DNA, 25 bp, Probe sequence
aacatatgactaacatctatcttat

SEQ ID NO: 90058 - DNA, 25 bp, Probe sequence
aacgttgaagctgcattgatgtatc

SEQ ID NO: 90059 - DNA, 25 bp, Probe sequence
ctaacatctatcttattataacgtt

SEQ ID NO: 90060 - DNA, 25 bp, Probe sequence
gctgcattgatgtatcaattctaag

SEQ ID NO: 90061 - DNA, 25 bp, Probe sequence
gaagctgcattgatgtatcaattct

SEQ ID NO: 90062 - DNA, 25 bp, Probe sequence
gactaacatctatcttattataacg

SEQ ID NO: 90063 - DNA, 25 bp, Probe sequence
gttgaagctgcattgatgtatcaat

SEQ ID NO: 90064 - DNA, 25 bp, Probe sequence
gtatcaattctaagtaacaaaacgc

SEQ ID NO: 90065 - DNA, 25 bp, Probe sequence
tcaattctaagtaacaaaacgcatg

SEQ ID NO: 90066 - DNA, 25 bp, Probe sequence
ttaacatatgactaacatctatctt

SEQ ID NO: 90067 - DNA, 25 bp, Probe sequence
ttgatgtatcaattctaagtaacaa

SEQ ID NO: 90068 - DNA, 25 bp, Probe sequence
attgtcaccaatcacattcagttat

SEQ ID NO: 90069 - DNA, 25 bp, Probe sequence
atttcaaaaatgcctcacagtaaac

SEQ ID NO: 90070 - DNA, 25 bp, Probe sequence
atatacttttattttctcacattta

SEQ ID NO: 90071 - DNA, 25 bp, Probe sequence
atcactcatacctttacttcattat

SEQ ID NO: 90072 - DNA, 25 bp, Probe sequence
aaaaagcttccagtatagttcgtga

SEQ ID NO: 90073 - DNA, 25 bp, Probe sequence
aacactttcataatcactcatacct

SEQ ID NO: 90074 - DNA, 25 bp, Probe sequence
aacgatcattgactcatatatctca

SEQ ID NO: 90075 - DNA, 25 bp, Probe sequence
aacccagtattcaactatacatgct

SEQ ID NO: 90076 - DNA, 25 bp, Probe sequence
aagttgaatcctgttaatcttttca

SEQ ID NO: 90077 - DNA, 25 bp, Probe sequence
aatttactgtatttgcccttatatg

SEQ ID NO: 90078 - DNA, 25 bp, Probe sequence
cactactctactgaaagccatctgt

SEQ ID NO: 90079 - DNA, 25 bp, Probe sequence
tgaattcgaatccactactctactg

SEQ ID NO: 90080 - DNA, 25 bp, Probe sequence
tgctaaaaatataacttctcttcat

SEQ ID NO: 90081 - DNA, 25 bp, Probe sequence
tcctccatttaagcgattgtcacca

SEQ ID NO: 90082 - DNA, 25 bp, Probe sequence
ttacaatcccacaattcaatttaca

SEQ ID NO: 90083 - DNA, 25 bp, Probe sequence
atatactagcaattcacatcatgtg

SEQ ID NO: 90084 - DNA, 25 bp, Probe sequence
atgacctaactgtttatgttccatg

SEQ ID NO: 90085 - DNA, 25 bp, Probe sequence
acccttccctatcatacttatttat

SEQ ID NO: 90086 - DNA, 25 bp, Probe sequence
acgcttacttatattttaatgacct

SEQ ID NO: 90087 - DNA, 25 bp, Probe sequence
aactatttaattattccttcattga

SEQ ID NO: 90088 - DNA, 25 bp, Probe sequence
aatgaacttcaataccaccatatgt

SEQ ID NO: 90089 - DNA, 25 bp, Probe sequence
ccaccatatgtttgtgatactgaag

SEQ ID NO: 90090 - DNA, 25 bp, Probe sequence
gccccctaattaaaatgctttgtct

SEQ ID NO: 90091 - DNA, 25 bp, Probe sequence
gagattgctagttttttatttttga

SEQ ID NO: 90092 - DNA, 25 bp, Probe sequence
ggtcattctacgtaaattctataaa

SEQ ID NO: 90093 - DNA, 25 bp, Probe sequence
tggtacaaaaaattatctcaccctt

SEQ ID NO: 90094 - DNA, 25 bp, Probe sequence
tgctttgtcttggtcattctacgta

SEQ ID NO: 90095 - DNA, 25 bp, Probe sequence
taaatcattattttacgcttactta

SEQ ID NO: 90096 - DNA, 25 bp, Probe sequence
tacgctttttcttctacatatacaa

SEQ ID NO: 90097 - DNA, 25 bp, Probe sequence
tataccagtattttacgctttttct

SEQ ID NO: 90098 - DNA, 25 bp, Probe sequence
accacacaaagctacttatttttga

SEQ ID NO: 90099 - DNA, 25 bp, Probe sequence
acaagataataacaaaccacacaaa

SEQ ID NO: 90100 - DNA, 25 bp, Probe sequence
aaagctacttatttttgataatatg

SEQ ID NO: 90101 - DNA, 25 bp, Probe sequence
aaacgcttttatacactatcaaatc

SEQ ID NO: 90102 - DNA, 25 bp, Probe sequence
aacaaaccacacaaagctacttatt

SEQ ID NO: 90103 - DNA, 25 bp, Probe sequence
aatcactaaaacgcttttatacact

SEQ ID NO: 90104 - DNA, 25 bp, Probe sequence
aatatgaaccgatatcctaaaatgt

SEQ ID NO: 90105 - DNA, 25 bp, Probe sequence
cttctaccgtcgttttatgcgtcaa

SEQ ID NO: 90106 - DNA, 25 bp, Probe sequence
gcttttatacactatcaaatcagca

SEQ ID NO: 90107 - DNA, 25 bp, Probe sequence
gaaccgatatcctaaaatgttaata

SEQ ID NO: 90108 - DNA, 25 bp, Probe sequence
gttttatgcgtcaaattttacagta

SEQ ID NO: 90109 - DNA, 25 bp, Probe sequence
tctaccgtcgttttatgcgtcaaat

SEQ ID NO: 90110 - DNA, 25 bp, Probe sequence
taccgtcgttttatgcgtcaaattt

SEQ ID NO: 90111 - DNA, 25 bp, Probe sequence
tacactatcaaatcagcatttataa

SEQ ID NO: 90112 - DNA, 25 bp, Probe sequence
tttacagtaaattttgcttcatcaa

SEQ ID NO: 90113 - DNA, 25 bp, Probe sequence
atcattccctataatatttaactta

SEQ ID NO: 90114 - DNA, 25 bp, Probe sequence
acttcttcctattaatatttcgatt

SEQ ID NO: 90115 - DNA, 25 bp, Probe sequence
aaatgaccacatctacaacgtatta

SEQ ID NO: 90116 - DNA, 25 bp, Probe sequence
aacacttatttaaatcacattctac

SEQ ID NO: 90117 - DNA, 25 bp, Probe sequence
caacgtattactattatcttttgtt

SEQ ID NO: 90118 - DNA, 25 bp, Probe sequence
cacattctacttttgagatgagctc

SEQ ID NO: 90119 - DNA, 25 bp, Probe sequence
ctatccaattgaaaacacactactt

SEQ ID NO: 90120 - DNA, 25 bp, Probe sequence
gaaaggcaagtacacctgtttaaag

SEQ ID NO: 90121 - DNA, 25 bp, Probe sequence
gacaatcgctccaatttaaggttga

SEQ ID NO: 90122 - DNA, 25 bp, Probe sequence
gtaaaatctctatctaaatttctaa

SEQ ID NO: 90123 - DNA, 25 bp, Probe sequence
taagtaccacttttatcattcccta

SEQ ID NO: 90124 - DNA, 25 bp, Probe sequence
tacacctgtttaaagtttatcttct

SEQ ID NO: 90125 - DNA, 25 bp, Probe sequence
tacgtagctatactttacttttcta

SEQ ID NO: 90126 - DNA, 25 bp, Probe sequence
tatattatctatacttcttcctatt

SEQ ID NO: 90127 - DNA, 25 bp, Probe sequence
ttctaatttatgacaatcgctccaa

SEQ ID NO: 90128 - DNA, 25 bp, Probe sequence
attaccaacaaatgcaaattaaatt

SEQ ID NO: 90129 - DNA, 25 bp, Probe sequence
aaattaaattttgcaatacatatca

SEQ ID NO: 90130 - DNA, 25 bp, Probe sequence
aaattttgcaatacatatcaaggtg

SEQ ID NO: 90131 - DNA, 25 bp, Probe sequence
ctcatttgtttttaatacgttgtca

SEQ ID NO: 90132 - DNA, 25 bp, Probe sequence
cgttgtcaaaattaccaacaaatgc

SEQ ID NO: 90133 - DNA, 25 bp, Probe sequence
gtcaaaattaccaacaaatgcaaat

SEQ ID NO: 90134 - DNA, 25 bp, Probe sequence
gtctttctcatttgtttttaatacg

SEQ ID NO: 90135 - DNA, 25 bp, Probe sequence
tgtctttctcatttgtttttaatac

SEQ ID NO: 90136 - DNA, 25 bp, Probe sequence
tctcatttgtttttaatacgttgtc

SEQ ID NO: 90137 - DNA, 25 bp, Probe sequence
tctttctcatttgtttttaatacgt

SEQ ID NO: 90138 - DNA, 25 bp, Probe sequence
tcatttgtttttaatacgttgtcaa

SEQ ID NO: 90139 - DNA, 25 bp, Probe sequence
taatacgttgtcaaaattaccaaca

SEQ ID NO: 90140 - DNA, 25 bp, Probe sequence
tacgttgtcaaaattaccaacaaat

SEQ ID NO: 90141 - DNA, 25 bp, Probe sequence
tttctcatttgtttttaatacgttg

SEQ ID NO: 90142 - DNA, 25 bp, Probe sequence
ttctcatttgtttttaatacgttgt

SEQ ID NO: 90143 - DNA, 25 bp, Probe sequence
atacattttcacaattaacattatt

SEQ ID NO: 90144 - DNA, 25 bp, Probe sequence
atgttattccatttacgtcccataa

SEQ ID NO: 90145 - DNA, 25 bp, Probe sequence
actacgattccttcaaactgttact

SEQ ID NO: 90146 - DNA, 25 bp, Probe sequence
aaatgtgccgataagcaaattctat

SEQ ID NO: 90147 - DNA, 25 bp, Probe sequence
aacattattgaactacgattccttc

SEQ ID NO: 90148 - DNA, 25 bp, Probe sequence
aatgtcatctcgctttcgaactgtt

SEQ ID NO: 90149 - DNA, 25 bp, Probe sequence
ctatgctttcgacactcaatttcaa

SEQ ID NO: 90150 - DNA, 25 bp, Probe sequence
cgattccttcaaactgttacttagt

SEQ ID NO: 90151 - DNA, 25 bp, Probe sequence
ccataatgtcatctcgctttcgaac

SEQ ID NO: 90152 - DNA, 25 bp, Probe sequence
gcaaattctatgctttcgacactca

SEQ ID NO: 90153 - DNA, 25 bp, Probe sequence
gtttatatacattttcacaattaac

SEQ ID NO: 90154 - DNA, 25 bp, Probe sequence
gtcatctcgctttcgaactgtttaa

SEQ ID NO: 90155 - DNA, 25 bp, Probe sequence
tcccataatgtcatctcgctttcga

SEQ ID NO: 90156 - DNA, 25 bp, Probe sequence
tcgctttcgaactgtttaattaaca

SEQ ID NO: 90157 - DNA, 25 bp, Probe sequence
ttacgtcccataatgtcatctcgct

SEQ ID NO: 90158 - DNA, 25 bp, Probe sequence
attaacaaccttcaaaccacttcat

SEQ ID NO: 90159 - DNA, 25 bp, Probe sequence
accttcaaaccacttcattgatcat

SEQ ID NO: 90160 - DNA, 25 bp, Probe sequence
aaatgaagtgactcaaaggtttatt

SEQ ID NO: 90161 - DNA, 25 bp, Probe sequence
acaaccttcaaaccacttcattgat

SEQ ID NO: 90162 - DNA, 25 bp, Probe sequence
aacaaccttcaaaccacttcattga

SEQ ID NO: 90163 - DNA, 25 bp, Probe sequence
aaccttcaaaccacttcattgatca

SEQ ID NO: 90164 - DNA, 25 bp, Probe sequence
aatctattctgattcaatcaagaat

SEQ ID NO: 90165 - DNA, 25 bp, Probe sequence
caaccttcaaaccacttcattgatc

SEQ ID NO: 90166 - DNA, 25 bp, Probe sequence
cttcaaaccacttcattgatcattt

SEQ ID NO: 90167 - DNA, 25 bp, Probe sequence
ccttcaaaccacttcattgatcatt

SEQ ID NO: 90168 - DNA, 25 bp, Probe sequence
gaagtgactcaaaggtttattaaca

SEQ ID NO: 90169 - DNA, 25 bp, Probe sequence
taacaaccttcaaaccacttcattg

SEQ ID NO: 90170 - DNA, 25 bp, Probe sequence
tattaacaaccttcaaaccacttca

SEQ ID NO: 90171 - DNA, 25 bp, Probe sequence
ttaacaaccttcaaaccacttcatt

SEQ ID NO: 90172 - DNA, 25 bp, Probe sequence
ttctgattcaatcaagaatacatat

SEQ ID NO: 90173 - DNA, 25 bp, Probe sequence
attattttactacaactcgcttcaa

SEQ ID NO: 90174 - DNA, 25 bp, Probe sequence
attattattttactacaactcgctt

SEQ ID NO: 90175 - DNA, 25 bp, Probe sequence
accaactccttgtcattattatata

SEQ ID NO: 90176 - DNA, 25 bp, Probe sequence
actacaactcgcttcaatttactta

SEQ ID NO: 90177 - DNA, 25 bp, Probe sequence
aactacataaatgatgtcatgtcat

SEQ ID NO: 90178 - DNA, 25 bp, Probe sequence
aactccttgtcattattatataaaa

SEQ ID NO: 90179 - DNA, 25 bp, Probe sequence
caactcgcttcaatttacttaaaat

SEQ ID NO: 90180 - DNA, 25 bp, Probe sequence
ccaccaactccttgtcattattata

SEQ ID NO: 90181 - DNA, 25 bp, Probe sequence
gttttatagtttttgttaatcatat

SEQ ID NO: 90182 - DNA, 25 bp, Probe sequence
gtcatgatacagttttatagttttt

SEQ ID NO: 90183 - DNA, 25 bp, Probe sequence
tgtcatgtcatgatacagttttata

SEQ ID NO: 90184 - DNA, 25 bp, Probe sequence
tacaactcgcttcaatttacttaaa

SEQ ID NO: 90185 - DNA, 25 bp, Probe sequence
tattttactacaactcgcttcaatt

SEQ ID NO: 90186 - DNA, 25 bp, Probe sequence
ttttactacaactcgcttcaattta

SEQ ID NO: 90187 - DNA, 25 bp, Probe sequence
ttactacaactcgcttcaatttact

SEQ ID NO: 90188 - DNA, 25 bp, Probe sequence
attactaacgaataatttcaccaat

SEQ ID NO: 90189 - DNA, 25 bp, Probe sequence
attttattggcatggctgcagcttg

SEQ ID NO: 90190 - DNA, 25 bp, Probe sequence
atggctacaagcattcatgagttca

SEQ ID NO: 90191 - DNA, 25 bp, Probe sequence
agcattcatgagttcattactaacg

SEQ ID NO: 90192 - DNA, 25 bp, Probe sequence
aactttcatggctacaagcattcat

SEQ ID NO: 90193 - DNA, 25 bp, Probe sequence
ctacaagcattcatgagttcattac

SEQ ID NO: 90194 - DNA, 25 bp, Probe sequence
ccaattttattggcatggctgcagc

SEQ ID NO: 90195 - DNA, 25 bp, Probe sequence
gaataatttcaccaattttattggc

SEQ ID NO: 90196 - DNA, 25 bp, Probe sequence
ggctacaagcattcatgagttcatt

SEQ ID NO: 90197 - DNA, 25 bp, Probe sequence
tgaactttcatggctacaagcattc

SEQ ID NO: 90198 - DNA, 25 bp, Probe sequence
tattgaactttcatggctacaagca

SEQ ID NO: 90199 - DNA, 25 bp, Probe sequence
tattggcatggctgcagcttgaatt

SEQ ID NO: 90200 - DNA, 25 bp, Probe sequence
tttattggcatggctgcagcttgaa

SEQ ID NO: 90201 - DNA, 25 bp, Probe sequence
ttcatgagttcattactaacgaata

SEQ ID NO: 90202 - DNA, 25 bp, Probe sequence
ttggcatggctgcagcttgaattac

SEQ ID NO: 90203 - DNA, 25 bp, Probe sequence
atatgcgaatttggtactgttaatg

SEQ ID NO: 90204 - DNA, 25 bp, Probe sequence
atcatatgcgaatttggtactgtta

SEQ ID NO: 90205 - DNA, 25 bp, Probe sequence
atgcgaatttggtactgttaatgat

SEQ ID NO: 90206 - DNA, 25 bp, Probe sequence
aaaagcttattacatcatatgcgaa

SEQ ID NO: 90207 - DNA, 25 bp, Probe sequence
aacatattttgcaataagcttttta

SEQ ID NO: 90208 - DNA, 25 bp, Probe sequence
aagcttattacatcatatgcgaatt

SEQ ID NO: 90209 - DNA, 25 bp, Probe sequence
caaaaagcttattacatcatatgcg

SEQ ID NO: 90210 - DNA, 25 bp, Probe sequence
cagttaccgaaaaacatattttgca

SEQ ID NO: 90211 - DNA, 25 bp, Probe sequence
catcatatgcgaatttggtactgtt

SEQ ID NO: 90212 - DNA, 25 bp, Probe sequence
gcgaatttggtactgttaatgataa

SEQ ID NO: 90213 - DNA, 25 bp, Probe sequence
gcttattacatcatatgcgaatttg

SEQ ID NO: 90214 - DNA, 25 bp, Probe sequence
gttaccgaaaaacatattttgcaat

SEQ ID NO: 90215 - DNA, 25 bp, Probe sequence
tcatatgcgaatttggtactgttaa

SEQ ID NO: 90216 - DNA, 25 bp, Probe sequence
taaaatcactaaattacagttaccg

SEQ ID NO: 90217 - DNA, 25 bp, Probe sequence
ttggtactgttaatgataaaatcac

SEQ ID NO: 90218 - DNA, 25 bp, Probe sequence
attaatcgttatatttatgcgttta

SEQ ID NO: 90219 - DNA, 25 bp, Probe sequence
attaatactataaaatcatttccat

SEQ ID NO: 90220 - DNA, 25 bp, Probe sequence
atttatgcgtttaatatgatatgat

SEQ ID NO: 90221 - DNA, 25 bp, Probe sequence
atatgatatgattgactttattaat

SEQ ID NO: 90222 - DNA, 25 bp, Probe sequence
aatcgttatatttatgcgtttaata

SEQ ID NO: 90223 - DNA, 25 bp, Probe sequence
aatcatttccattttaattaggaat

SEQ ID NO: 90224 - DNA, 25 bp, Probe sequence
aatactataaaatcatttccatttt

SEQ ID NO: 90225 - DNA, 25 bp, Probe sequence
cctctccaatattaatcgttatatt

SEQ ID NO: 90226 - DNA, 25 bp, Probe sequence
gatatgattgactttattaatacta

SEQ ID NO: 90227 - DNA, 25 bp, Probe sequence
tcctctccaatattaatcgttatat

SEQ ID NO: 90228 - DNA, 25 bp, Probe sequence
taatcgttatatttatgcgtttaat

SEQ ID NO: 90229 - DNA, 25 bp, Probe sequence
tatgattgactttattaatactata

SEQ ID NO: 90230 - DNA, 25 bp, Probe sequence
tattaatcgttatatttatgcgttt

SEQ ID NO: 90231 - DNA, 25 bp, Probe sequence
tttcctctccaatattaatcgttat

SEQ ID NO: 90232 - DNA, 25 bp, Probe sequence
ttcctctccaatattaatcgttata

SEQ ID NO: 90233 - DNA, 25 bp, Probe sequence
acgttctgtttcaatcatgaccaca

SEQ ID NO: 90234 - DNA, 25 bp, Probe sequence
aacgctgtacctttcatctataaca

SEQ ID NO: 90235 - DNA, 25 bp, Probe sequence
ctatttttacgttctgtttcaatca

SEQ ID NO: 90236 - DNA, 25 bp, Probe sequence
ctcctttattaattacgttgtctat

SEQ ID NO: 90237 - DNA, 25 bp, Probe sequence
gctgtacctttcatctataacaagt

SEQ ID NO: 90238 - DNA, 25 bp, Probe sequence
gttctgtttcaatcatgaccacatt

SEQ ID NO: 90239 - DNA, 25 bp, Probe sequence
gtttaaaacgctgtacctttcatct

SEQ ID NO: 90240 - DNA, 25 bp, Probe sequence
gtttcaatcatgaccacattttaat

SEQ ID NO: 90241 - DNA, 25 bp, Probe sequence
gtacctttcatctataacaagtaag

SEQ ID NO: 90242 - DNA, 25 bp, Probe sequence
tcatgaccacattttaattaataca

SEQ ID NO: 90243 - DNA, 25 bp, Probe sequence
taaaacgctgtacctttcatctata

SEQ ID NO: 90244 - DNA, 25 bp, Probe sequence
tacgttgtctatttttacgttctgt

SEQ ID NO: 90245 - DNA, 25 bp, Probe sequence
tttctctcctttattaattacgttg

SEQ ID NO: 90246 - DNA, 25 bp, Probe sequence
tttacgttctgtttcaatcatgacc

SEQ ID NO: 90247 - DNA, 25 bp, Probe sequence
ttgtctatttttacgttctgtttca

SEQ ID NO: 90248 - DNA, 25 bp, Probe sequence
attgacactcctatataatttctca

SEQ ID NO: 90249 - DNA, 25 bp, Probe sequence
attttgatcaactttgcgttttaga

SEQ ID NO: 90250 - DNA, 25 bp, Probe sequence
atattttgatcaactttgcgtttta

SEQ ID NO: 90251 - DNA, 25 bp, Probe sequence
atcgatattttgatcaactttgcgt

SEQ ID NO: 90252 - DNA, 25 bp, Probe sequence
actcctatataatttctcaataaaa

SEQ ID NO: 90253 - DNA, 25 bp, Probe sequence
acactcctatataatttctcaataa

SEQ ID NO: 90254 - DNA, 25 bp, Probe sequence
aaatcgatattttgatcaactttgc

SEQ ID NO: 90255 - DNA, 25 bp, Probe sequence
gacactcctatataatttctcaata

SEQ ID NO: 90256 - DNA, 25 bp, Probe sequence
gatcaactttgcgttttagatagca

SEQ ID NO: 90257 - DNA, 25 bp, Probe sequence
gatattttgatcaactttgcgtttt

SEQ ID NO: 90258 - DNA, 25 bp, Probe sequence
gattgacactcctatataatttctc

SEQ ID NO: 90259 - DNA, 25 bp, Probe sequence
tgatcaactttgcgttttagatagc

SEQ ID NO: 90260 - DNA, 25 bp, Probe sequence
tgacactcctatataatttctcaat

SEQ ID NO: 90261 - DNA, 25 bp, Probe sequence
tcaactttgcgttttagatagcagt

SEQ ID NO: 90262 - DNA, 25 bp, Probe sequence
tttgatcaactttgcgttttagata

SEQ ID NO: 90263 - DNA, 25 bp, Probe sequence
atcatcagctaaacaatgttagggg

SEQ ID NO: 90264 - DNA, 25 bp, Probe sequence
acccctaatattgttatcatcagct

SEQ ID NO: 90265 - DNA, 25 bp, Probe sequence
acacccctaatattgttatcatcag

SEQ ID NO: 90266 - DNA, 25 bp, Probe sequence
acaaacacccctaatattgttatca

SEQ ID NO: 90267 - DNA, 25 bp, Probe sequence
aaacacccctaatattgttatcatc

SEQ ID NO: 90268 - DNA, 25 bp, Probe sequence
caatgttaggggtgtttgttacgat

SEQ ID NO: 90269 - DNA, 25 bp, Probe sequence
cacccctaatattgttatcatcagc

SEQ ID NO: 90270 - DNA, 25 bp, Probe sequence
ctaatattgttatcatcagctaaac

SEQ ID NO: 90271 - DNA, 25 bp, Probe sequence
ccctaatattgttatcatcagctaa

SEQ ID NO: 90272 - DNA, 25 bp, Probe sequence
cccctaatattgttatcatcagcta

SEQ ID NO: 90273 - DNA, 25 bp, Probe sequence
gttaggggtgtttgttacgattatg

SEQ ID NO: 90274 - DNA, 25 bp, Probe sequence
gttatcatcagctaaacaatgttag

SEQ ID NO: 90275 - DNA, 25 bp, Probe sequence
ggggtgtttgttacgattatgtata

SEQ ID NO: 90276 - DNA, 25 bp, Probe sequence
ggtgtttgttacgattatgtataaa

SEQ ID NO: 90277 - DNA, 25 bp, Probe sequence
taggggtgtttgttacgattatgta

SEQ ID NO: 90278 - DNA, 25 bp, Probe sequence
attataactataactagcatgtctt

SEQ ID NO: 90279 - DNA, 25 bp, Probe sequence
atatatacatctttagtctagtatt

SEQ ID NO: 90280 - DNA, 25 bp, Probe sequence
atatcacctaaacctattataaaag

SEQ ID NO: 90281 - DNA, 25 bp, Probe sequence
ataactagcatgtctttaaatgaat

SEQ ID NO: 90282 - DNA, 25 bp, Probe sequence
ataactataactagcatgtctttaa

SEQ ID NO: 90283 - DNA, 25 bp, Probe sequence
acatctttagtctagtattataact

SEQ ID NO: 90284 - DNA, 25 bp, Probe sequence
aaaatcaaattaaatagctcaataa

SEQ ID NO: 90285 - DNA, 25 bp, Probe sequence
aactataactagcatgtctttaaat

SEQ ID NO: 90286 - DNA, 25 bp, Probe sequence
aattatatcacctaaacctattata

SEQ ID NO: 90287 - DNA, 25 bp, Probe sequence
aattgagtaatgaaagtgggtacat

SEQ ID NO: 90288 - DNA, 25 bp, Probe sequence
catgtctttaaatgaatatgctatc

SEQ ID NO: 90289 - DNA, 25 bp, Probe sequence
gaatatgctatcatgatatggtaat

SEQ ID NO: 90290 - DNA, 25 bp, Probe sequence
tgaatatatacatctttagtctagt

SEQ ID NO: 90291 - DNA, 25 bp, Probe sequence
tgctatcatgatatggtaattttga

SEQ ID NO: 90292 - DNA, 25 bp, Probe sequence
tatacatctttagtctagtattata

SEQ ID NO: 90293 - DNA, 25 bp, Probe sequence
attagcacgcgtaagcttgttagtt

SEQ ID NO: 90294 - DNA, 25 bp, Probe sequence
agaaaaacaattagcacgcgtaagc

SEQ ID NO: 90295 - DNA, 25 bp, Probe sequence
aactgcttgaaaggtttcttagcct

SEQ ID NO: 90296 - DNA, 25 bp, Probe sequence
aaacaattagcacgcgtaagcttgt

SEQ ID NO: 90297 - DNA, 25 bp, Probe sequence
aaggtttcttagcctatcaagcagt

SEQ ID NO: 90298 - DNA, 25 bp, Probe sequence
caattagcacgcgtaagcttgttag

SEQ ID NO: 90299 - DNA, 25 bp, Probe sequence
gcttgaaaggtttcttagcctatca

SEQ ID NO: 90300 - DNA, 25 bp, Probe sequence
gcttgttagttaaaaaactgcttga

SEQ ID NO: 90301 - DNA, 25 bp, Probe sequence
gcacgcgtaagcttgttagttaaaa

SEQ ID NO: 90302 - DNA, 25 bp, Probe sequence
gaaaggtttcttagcctatcaagca

SEQ ID NO: 90303 - DNA, 25 bp, Probe sequence
gtttcttagcctatcaagcagtttt

SEQ ID NO: 90304 - DNA, 25 bp, Probe sequence
ggtttcttagcctatcaagcagttt

SEQ ID NO: 90305 - DNA, 25 bp, Probe sequence
tagcacgcgtaagcttgttagttaa

SEQ ID NO: 90306 - DNA, 25 bp, Probe sequence
tttcttagcctatcaagcagttttt

SEQ ID NO: 90307 - DNA, 25 bp, Probe sequence
ttaacttttgtcatgacaattaaag

SEQ ID NO: 90308 - DNA, 25 bp, Probe sequence
atatcttctaaactttaaacatact

SEQ ID NO: 90309 - DNA, 25 bp, Probe sequence
atagtatgtctggaggagaacttta

SEQ ID NO: 90310 - DNA, 25 bp, Probe sequence
aaaacggatagtatgtctggaggag

SEQ ID NO: 90311 - DNA, 25 bp, Probe sequence
aacatactttaattttagcatggca

SEQ ID NO: 90312 - DNA, 25 bp, Probe sequence
caactttttaatgattaccaatccg

SEQ ID NO: 90313 - DNA, 25 bp, Probe sequence
gtgaattaataaacaatcaactttt

SEQ ID NO: 90314 - DNA, 25 bp, Probe sequence
tgattaccaatccgaaaagagaaaa

SEQ ID NO: 90315 - DNA, 25 bp, Probe sequence
tctcttttctattacagttattttt

SEQ ID NO: 90316 - DNA, 25 bp, Probe sequence
taatcaaaaatatcttctaaacttt

SEQ ID NO: 90317 - DNA, 25 bp, Probe sequence
tactttaattttagcatggcattga

SEQ ID NO: 90318 - DNA, 25 bp, Probe sequence
tatattaaattatctttttgcttga

SEQ ID NO: 90319 - DNA, 25 bp, Probe sequence
tattctcttttctattacagttatt

SEQ ID NO: 90320 - DNA, 25 bp, Probe sequence
tttatattctcttttctattacagt

SEQ ID NO: 90321 - DNA, 25 bp, Probe sequence
ttttagcatggcattgaatcaaaga

SEQ ID NO: 90322 - DNA, 25 bp, Probe sequence
ttatctttttgcttgatttaatcaa

SEQ ID NO: 90323 - DNA, 25 bp, Probe sequence
attaatgtgctatttccgttaaatt

SEQ ID NO: 90324 - DNA, 25 bp, Probe sequence
atccctcaatgtcacaaaatattca

SEQ ID NO: 90325 - DNA, 25 bp, Probe sequence
aaattgaaacaacacattttctgat

SEQ ID NO: 90326 - DNA, 25 bp, Probe sequence
aatgtgctatttccgttaaattgaa

SEQ ID NO: 90327 - DNA, 25 bp, Probe sequence
aatgtcacaaaatattcacaataaa

SEQ ID NO: 90328 - DNA, 25 bp, Probe sequence
aattaatgtgctatttccgttaaat

SEQ ID NO: 90329 - DNA, 25 bp, Probe sequence
catccctcaatgtcacaaaatattc

SEQ ID NO: 90330 - DNA, 25 bp, Probe sequence
ctcaatgtcacaaaatattcacaat

SEQ ID NO: 90331 - DNA, 25 bp, Probe sequence
ctccatccctcaatgtcacaaaata

SEQ ID NO: 90332 - DNA, 25 bp, Probe sequence
ccctcaatgtcacaaaatattcaca

SEQ ID NO: 90333 - DNA, 25 bp, Probe sequence
ccatccctcaatgtcacaaaatatt

SEQ ID NO: 90334 - DNA, 25 bp, Probe sequence
gtgctatttccgttaaattgaaaca

SEQ ID NO: 90335 - DNA, 25 bp, Probe sequence
tccatccctcaatgtcacaaaatat

SEQ ID NO: 90336 - DNA, 25 bp, Probe sequence
taatgtgctatttccgttaaattga

SEQ ID NO: 90337 - DNA, 25 bp, Probe sequence
ttccgttaaattgaaacaacacatt

SEQ ID NO: 90338 - DNA, 25 bp, Probe sequence
attgtagatagtctctttttaatat

SEQ ID NO: 90339 - DNA, 25 bp, Probe sequence
attgctaggtgatgagttatctcgg

SEQ ID NO: 90340 - DNA, 25 bp, Probe sequence
atatcctcatagcatcatttttcta

SEQ ID NO: 90341 - DNA, 25 bp, Probe sequence
atctcggttaattacaaaacgatat

SEQ ID NO: 90342 - DNA, 25 bp, Probe sequence
atctactgaatatcctcatagcatc

SEQ ID NO: 90343 - DNA, 25 bp, Probe sequence
agattattgtagatagtctcttttt

SEQ ID NO: 90344 - DNA, 25 bp, Probe sequence
aaaaactatctactgaatatcctca

SEQ ID NO: 90345 - DNA, 25 bp, Probe sequence
aatacacaattttatcgaaatattt

SEQ ID NO: 90346 - DNA, 25 bp, Probe sequence
gctaggtgatgagttatctcggtta

SEQ ID NO: 90347 - DNA, 25 bp, Probe sequence
gcatcatttttctaagcaaaagtta

SEQ ID NO: 90348 - DNA, 25 bp, Probe sequence
gaatatcctcatagcatcatttttc

SEQ ID NO: 90349 - DNA, 25 bp, Probe sequence
gatgagttatctcggttaattacaa

SEQ ID NO: 90350 - DNA, 25 bp, Probe sequence
tcctcatagcatcatttttctaagc

SEQ ID NO: 90351 - DNA, 25 bp, Probe sequence
tcatagcatcatttttctaagcaaa

SEQ ID NO: 90352 - DNA, 25 bp, Probe sequence
tactgaatatcctcatagcatcatt

SEQ ID NO: 90353 - DNA, 25 bp, Probe sequence
ataacctagattcttatttatattt

SEQ ID NO: 90354 - DNA, 25 bp, Probe sequence
aaataacctagattcttatttatat

SEQ ID NO: 90355 - DNA, 25 bp, Probe sequence
aataacctagattcttatttatatt

SEQ ID NO: 90356 - DNA, 25 bp, Probe sequence
gtcactttaaaataacctagattct

SEQ ID NO: 90357 - DNA, 25 bp, Probe sequence
tgtcactttaaaataacctagattc

SEQ ID NO: 90358 - DNA, 25 bp, Probe sequence
tcactttaaaataacctagattctt

SEQ ID NO: 90359 - DNA, 25 bp, Probe sequence
taacctagattcttatttatatttt

SEQ ID NO: 90360 - DNA, 25 bp, Probe sequence
taaaataacctagattcttatttat

SEQ ID NO: 90361 - DNA, 25 bp, Probe sequence
tattttattaagctttttgtcactt

SEQ ID NO: 90362 - DNA, 25 bp, Probe sequence
tttgtcactttaaaataacctagat

SEQ ID NO: 90363 - DNA, 25 bp, Probe sequence
ttattttattaagctttttgtcact

SEQ ID NO: 90364 - DNA, 25 bp, Probe sequence
ttgtcactttaaaataacctagatt

SEQ ID NO: 90365 - DNA, 25 bp, Probe sequence
attttactcatgccagatctatcaa

SEQ ID NO: 90366 - DNA, 25 bp, Probe sequence
agaactttatattctgctccagatt

SEQ ID NO: 90367 - DNA, 25 bp, Probe sequence
aactttatattctgctccagatttt

SEQ ID NO: 90368 - DNA, 25 bp, Probe sequence
catgccagatctatcaattgagccg

SEQ ID NO: 90369 - DNA, 25 bp, Probe sequence
gctccagattttactcatgccagat

SEQ ID NO: 90370 - DNA, 25 bp, Probe sequence
gattttactcatgccagatctatca

SEQ ID NO: 90371 - DNA, 25 bp, Probe sequence
tgctccagattttactcatgccaga

SEQ ID NO: 90372 - DNA, 25 bp, Probe sequence
tgccagatctatcaattgagccgaa

SEQ ID NO: 90373 - DNA, 25 bp, Probe sequence
tccagattttactcatgccagatct

SEQ ID NO: 90374 - DNA, 25 bp, Probe sequence
tctgctccagattttactcatgcca

SEQ ID NO: 90375 - DNA, 25 bp, Probe sequence
tactcatgccagatctatcaattga

SEQ ID NO: 90376 - DNA, 25 bp, Probe sequence
tatattctgctccagattttactca

SEQ ID NO: 90377 - DNA, 25 bp, Probe sequence
tttactcatgccagatctatcaatt

SEQ ID NO: 90378 - DNA, 25 bp, Probe sequence
ttaagaactttatattctgctccag

SEQ ID NO: 90379 - DNA, 25 bp, Probe sequence
ttctgctccagattttactcatgcc

SEQ ID NO: 90380 - DNA, 25 bp, Probe sequence
atacaacttatatatttgaggaaag

SEQ ID NO: 90381 - DNA, 25 bp, Probe sequence
agaaaactaaatacaacttatatat

SEQ ID NO: 90382 - DNA, 25 bp, Probe sequence
actaaatacaacttatatatttgag

SEQ ID NO: 90383 - DNA, 25 bp, Probe sequence
acaacttatatatttgaggaaagcc

SEQ ID NO: 90384 - DNA, 25 bp, Probe sequence
aaatacaacttatatatttgaggaa

SEQ ID NO: 90385 - DNA, 25 bp, Probe sequence
aaactaaatacaacttatatatttg

SEQ ID NO: 90386 - DNA, 25 bp, Probe sequence
aactaaatacaacttatatatttga

SEQ ID NO: 90387 - DNA, 25 bp, Probe sequence
aatacaacttatatatttgaggaaa

SEQ ID NO: 90388 - DNA, 25 bp, Probe sequence
caacttatatatttgaggaaagcca

SEQ ID NO: 90389 - DNA, 25 bp, Probe sequence
ctaaatacaacttatatatttgagg

SEQ ID NO: 90390 - DNA, 25 bp, Probe sequence
gaaaactaaatacaacttatatatt

SEQ ID NO: 90391 - DNA, 25 bp, Probe sequence
tacaacttatatatttgaggaaagc

SEQ ID NO: 90392 - DNA, 25 bp, Probe sequence
taaatacaacttatatatttgagga

SEQ ID NO: 90393 - DNA, 25 bp, Probe sequence
attctcgtttattaatatacttcaa

SEQ ID NO: 90394 - DNA, 25 bp, Probe sequence
aggaattgaatgcgtttataactat

SEQ ID NO: 90395 - DNA, 25 bp, Probe sequence
agtgcttaatcataaatgcattctc

SEQ ID NO: 90396 - DNA, 25 bp, Probe sequence
aatgcattctcgtttattaatatac

SEQ ID NO: 90397 - DNA, 25 bp, Probe sequence
aatcataaatgcattctcgtttatt

SEQ ID NO: 90398 - DNA, 25 bp, Probe sequence
gcgtttataactatcacatttgaat

SEQ ID NO: 90399 - DNA, 25 bp, Probe sequence
gcttaatcataaatgcattctcgtt

SEQ ID NO: 90400 - DNA, 25 bp, Probe sequence
gcattctcgtttattaatatacttc

SEQ ID NO: 90401 - DNA, 25 bp, Probe sequence
gaatgcgtttataactatcacattt

SEQ ID NO: 90402 - DNA, 25 bp, Probe sequence
gtttattaatatacttcaacgagtt

SEQ ID NO: 90403 - DNA, 25 bp, Probe sequence
tcacatttgaatgaataactttttc

SEQ ID NO: 90404 - DNA, 25 bp, Probe sequence
taatatacttcaacgagttaaatta

SEQ ID NO: 90405 - DNA, 25 bp, Probe sequence
tacaagttatcataagtgcttaatc

SEQ ID NO: 90406 - DNA, 25 bp, Probe sequence
ttttcattagaaagtagtgtttatt

SEQ ID NO: 90407 - DNA, 25 bp, Probe sequence
ttagttgaatcaaattttattacaa

SEQ ID NO: 90408 - DNA, 25 bp, Probe sequence
atattttttctttgtaattatcact

SEQ ID NO: 90409 - DNA, 25 bp, Probe sequence
atcactattttccatttaattgtat

SEQ ID NO: 90410 - DNA, 25 bp, Probe sequence
aaagtttctatattgtattacaaca

SEQ ID NO: 90411 - DNA, 25 bp, Probe sequence
aaagctgttattcttcttttccacg

SEQ ID NO: 90412 - DNA, 25 bp, Probe sequence
cttttccacgacagattgcaattca

SEQ ID NO: 90413 - DNA, 25 bp, Probe sequence
gctacatttgacaatattttttctt

SEQ ID NO: 90414 - DNA, 25 bp, Probe sequence
gcaattcatgctaaatattcgtaaa

SEQ ID NO: 90415 - DNA, 25 bp, Probe sequence
gattgcaattcatgctaaatattcg

SEQ ID NO: 90416 - DNA, 25 bp, Probe sequence
gttattcttcttttccacgacagat

SEQ ID NO: 90417 - DNA, 25 bp, Probe sequence
gtattacaacattgctacatttgac

SEQ ID NO: 90418 - DNA, 25 bp, Probe sequence
gtaattatcactattttccatttaa

SEQ ID NO: 90419 - DNA, 25 bp, Probe sequence
tccacgacagattgcaattcatgct

SEQ ID NO: 90420 - DNA, 25 bp, Probe sequence
tctccatgtcatgcttaaagctgtt

SEQ ID NO: 90421 - DNA, 25 bp, Probe sequence
tcttttttctccatgtcatgcttaa

SEQ ID NO: 90422 - DNA, 25 bp, Probe sequence
ttcttcttttccacgacagattgca

SEQ ID NO: 90423 - DNA, 25 bp, Probe sequence
attaggtatgtggattgcaatttaa

SEQ ID NO: 90424 - DNA, 25 bp, Probe sequence
atttccttactcattttttatcatc

SEQ ID NO: 90425 - DNA, 25 bp, Probe sequence
ataatattacgctttactttatatc

SEQ ID NO: 90426 - DNA, 25 bp, Probe sequence
atcaatatacaccaaaatacttatg

SEQ ID NO: 90427 - DNA, 25 bp, Probe sequence
atcattcataatattacgctttact

SEQ ID NO: 90428 - DNA, 25 bp, Probe sequence
acgctttactttatatcaatataca

SEQ ID NO: 90429 - DNA, 25 bp, Probe sequence
actcattttttatcatcttaacaca

SEQ ID NO: 90430 - DNA, 25 bp, Probe sequence
aaatcattttttgttacatataaca

SEQ ID NO: 90431 - DNA, 25 bp, Probe sequence
aacatgtttattactcaaaatcatt

SEQ ID NO: 90432 - DNA, 25 bp, Probe sequence
ccacatttccttactcattttttat

SEQ ID NO: 90433 - DNA, 25 bp, Probe sequence
gaaaaacgatgctaatcattcataa

SEQ ID NO: 90434 - DNA, 25 bp, Probe sequence
gtaaagcatcgaattttcttaataa

SEQ ID NO: 90435 - DNA, 25 bp, Probe sequence
tccttactcattttttatcatctta

SEQ ID NO: 90436 - DNA, 25 bp, Probe sequence
tagtcaatcgaatctttttaaatgt

SEQ ID NO: 90437 - DNA, 25 bp, Probe sequence
tttatcatcttaacacattaacgtt

SEQ ID NO: 90438 - DNA, 25 bp, Probe sequence
attacggattggttgattttgacat

SEQ ID NO: 90439 - DNA, 25 bp, Probe sequence
acctcatttatacttcttcagaact

SEQ ID NO: 90440 - DNA, 25 bp, Probe sequence
acttcttcagaactatattaacatt

SEQ ID NO: 90441 - DNA, 25 bp, Probe sequence
acacctcatttatacttcttcagaa

SEQ ID NO: 90442 - DNA, 25 bp, Probe sequence
aacatttacatcattttataagttg

SEQ ID NO: 90443 - DNA, 25 bp, Probe sequence
aataaaaacagtatatccaattaga

SEQ ID NO: 90444 - DNA, 25 bp, Probe sequence
aatacattacggattggttgatttt

SEQ ID NO: 90445 - DNA, 25 bp, Probe sequence
caattagaatacactgttccatcta

SEQ ID NO: 90446 - DNA, 25 bp, Probe sequence
caacacctcatttatacttcttcag

SEQ ID NO: 90447 - DNA, 25 bp, Probe sequence
cattttataagttgatttcaccttt

SEQ ID NO: 90448 - DNA, 25 bp, Probe sequence
ggattggttgattttgacataacat

SEQ ID NO: 90449 - DNA, 25 bp, Probe sequence
tccaattagaatacactgttccatc

SEQ ID NO: 90450 - DNA, 25 bp, Probe sequence
tcttcagaactatattaacatttta

SEQ ID NO: 90451 - DNA, 25 bp, Probe sequence
ttcaacacctcatttatacttcttc

SEQ ID NO: 90452 - DNA, 25 bp, Probe sequence
ttgacataacatttacatcatttta

SEQ ID NO: 90453 - DNA, 25 bp, Probe sequence
ataaaaatttcatctctgccacact

SEQ ID NO: 90454 - DNA, 25 bp, Probe sequence
aggagtgtggcagaaatgaatttta

SEQ ID NO: 90455 - DNA, 25 bp, Probe sequence
accccatctcactttgtattataat

SEQ ID NO: 90456 - DNA, 25 bp, Probe sequence
acatttttatgttcaaatactcaat

SEQ ID NO: 90457 - DNA, 25 bp, Probe sequence
acaaacacccaaattgtgacgataa

SEQ ID NO: 90458 - DNA, 25 bp, Probe sequence
aatactcaattataatgactgttta

SEQ ID NO: 90459 - DNA, 25 bp, Probe sequence
gactgtttatgatcgtaaaatgcta

SEQ ID NO: 90460 - DNA, 25 bp, Probe sequence
gatcgtaaaatgctaattcaatcaa

SEQ ID NO: 90461 - DNA, 25 bp, Probe sequence
gtacgctttcacttttcaatcataa

SEQ ID NO: 90462 - DNA, 25 bp, Probe sequence
tgccccatactttttgttgttatta

SEQ ID NO: 90463 - DNA, 25 bp, Probe sequence
tcttgccccatactttttgttgtta

SEQ ID NO: 90464 - DNA, 25 bp, Probe sequence
tcaccccatctcactttgtattata

SEQ ID NO: 90465 - DNA, 25 bp, Probe sequence
taatgagtacgctttcacttttcaa

SEQ ID NO: 90466 - DNA, 25 bp, Probe sequence
taccaaaaacaatcacaaacaccca

SEQ ID NO: 90467 - DNA, 25 bp, Probe sequence
ttcacttttcaatcataaattacca

SEQ ID NO: 90468 - DNA, 25 bp, Probe sequence
atattcattgaacttacaacttaat

SEQ ID NO: 90469 - DNA, 25 bp, Probe sequence
acaacttaatatgaagctctttgct

SEQ ID NO: 90470 - DNA, 25 bp, Probe sequence
aaattttcactttaagacactcata

SEQ ID NO: 90471 - DNA, 25 bp, Probe sequence
aaaaacaccttcatatcaattcata

SEQ ID NO: 90472 - DNA, 25 bp, Probe sequence
aagtctatacatttgtggtgtctat

SEQ ID NO: 90473 - DNA, 25 bp, Probe sequence
gctaacaatcattttacatcattaa

SEQ ID NO: 90474 - DNA, 25 bp, Probe sequence
gctttgtataagctaccgttaacac

SEQ ID NO: 90475 - DNA, 25 bp, Probe sequence
gcttcgtttggcataactttttgca

SEQ ID NO: 90476 - DNA, 25 bp, Probe sequence
gaagctctttgctaacaatcatttt

SEQ ID NO: 90477 - DNA, 25 bp, Probe sequence
gaaagtgtttttacagctttgtata

SEQ ID NO: 90478 - DNA, 25 bp, Probe sequence
gacactcatattttactatatctgc

SEQ ID NO: 90479 - DNA, 25 bp, Probe sequence
gtctatttcttcattcatttatcta

SEQ ID NO: 90480 - DNA, 25 bp, Probe sequence
tgtggtgtctatttcttcattcatt

SEQ ID NO: 90481 - DNA, 25 bp, Probe sequence
taagctaccgttaacacgatgtata

SEQ ID NO: 90482 - DNA, 25 bp, Probe sequence
tactatatctgcttcgtttggcata

SEQ ID NO: 90483 - DNA, 25 bp, Probe sequence
atttctagggattcacctccatgtt

SEQ ID NO: 90484 - DNA, 25 bp, Probe sequence
atgttattgcttctattttatcata

SEQ ID NO: 90485 - DNA, 25 bp, Probe sequence
acctccatgttatatgtgtcactca

SEQ ID NO: 90486 - DNA, 25 bp, Probe sequence
acagattaaatctattgcatacatt

SEQ ID NO: 90487 - DNA, 25 bp, Probe sequence
aaatctattgcatacatttaattat

SEQ ID NO: 90488 - DNA, 25 bp, Probe sequence
cactatggcttaaattacaactaca

SEQ ID NO: 90489 - DNA, 25 bp, Probe sequence
cctatttctagggattcacctccat

SEQ ID NO: 90490 - DNA, 25 bp, Probe sequence
gcattcaaatttatcactatggctt

SEQ ID NO: 90491 - DNA, 25 bp, Probe sequence
gattcacctccatgttatatgtgtc

SEQ ID NO: 90492 - DNA, 25 bp, Probe sequence
gttatatgtgtcactcatgggtaac

SEQ ID NO: 90493 - DNA, 25 bp, Probe sequence
gtaacacgcattcaaatttatcact

SEQ ID NO: 90494 - DNA, 25 bp, Probe sequence
gtcactcatgggtaacacgcattca

SEQ ID NO: 90495 - DNA, 25 bp, Probe sequence
tctagggattcacctccatgttata

SEQ ID NO: 90496 - DNA, 25 bp, Probe sequence
tacaactacatgttatcgccttccc

SEQ ID NO: 90497 - DNA, 25 bp, Probe sequence
taaagtgcttatgttaacagattaa

SEQ ID NO: 90498 - DNA, 25 bp, Probe sequence
attgagttccaatactattttcact

SEQ ID NO: 90499 - DNA, 25 bp, Probe sequence
attaatgcgaattatcgctttcaat

SEQ ID NO: 90500 - DNA, 25 bp, Probe sequence
atatctctccaatctatgtatcttt

SEQ ID NO: 90501 - DNA, 25 bp, Probe sequence
atcattcttagttggtttatatatt

SEQ ID NO: 90502 - DNA, 25 bp, Probe sequence
atcttttatatctttacattaccct

SEQ ID NO: 90503 - DNA, 25 bp, Probe sequence
ctttatatctctccaatctatgtat

SEQ ID NO: 90504 - DNA, 25 bp, Probe sequence
ccaatctatgtatcttttatatctt

SEQ ID NO: 90505 - DNA, 25 bp, Probe sequence
gcgaattatcgctttcaataaaaaa

SEQ ID NO: 90506 - DNA, 25 bp, Probe sequence
gagttccaatactattttcactttt

SEQ ID NO: 90507 - DNA, 25 bp, Probe sequence
tccaatactattttcacttttcatt

SEQ ID NO: 90508 - DNA, 25 bp, Probe sequence
tctctccaatctatgtatcttttat

SEQ ID NO: 90509 - DNA, 25 bp, Probe sequence
tcacttttcattaattttagtcaaa

SEQ ID NO: 90510 - DNA, 25 bp, Probe sequence
tactattttcacttttcattaattt

SEQ ID NO: 90511 - DNA, 25 bp, Probe sequence
tatatctttacattaccctaaattt

SEQ ID NO: 90512 - DNA, 25 bp, Probe sequence
ttttcaacaaactcaattaatgcga

SEQ ID NO: 90513 - DNA, 25 bp, Probe sequence
atcaaatagtaaaaaccaactcatt

SEQ ID NO: 90514 - DNA, 25 bp, Probe sequence
atgtacctgagtattgttttatcaa

SEQ ID NO: 90515 - DNA, 25 bp, Probe sequence
atgtacacattaaaaggcattcata

SEQ ID NO: 90516 - DNA, 25 bp, Probe sequence
acattaaaaggcattcataaacgta

SEQ ID NO: 90517 - DNA, 25 bp, Probe sequence
aaaagattttgaatgtacctgagta

SEQ ID NO: 90518 - DNA, 25 bp, Probe sequence
aagattttgaatgtacctgagtatt

SEQ ID NO: 90519 - DNA, 25 bp, Probe sequence
aatgtacctgagtattgttttatca

SEQ ID NO: 90520 - DNA, 25 bp, Probe sequence
cataaacgtaaaatttaacatccag

SEQ ID NO: 90521 - DNA, 25 bp, Probe sequence
gaatgtacctgagtattgttttatc

SEQ ID NO: 90522 - DNA, 25 bp, Probe sequence
gattttgaatgtacctgagtattgt

SEQ ID NO: 90523 - DNA, 25 bp, Probe sequence
gtacctgagtattgttttatcaaat

SEQ ID NO: 90524 - DNA, 25 bp, Probe sequence
gtacacattaaaaggcattcataaa

SEQ ID NO: 90525 - DNA, 25 bp, Probe sequence
tgtccatcctttttatttaaaagat

SEQ ID NO: 90526 - DNA, 25 bp, Probe sequence
taaaaggcattcataaacgtaaaat

SEQ ID NO: 90527 - DNA, 25 bp, Probe sequence
tatgtccatcctttttatttaaaag

SEQ ID NO: 90528 - DNA, 25 bp, Probe sequence
agactaaaaagaagctcccattaat

SEQ ID NO: 90529 - DNA, 25 bp, Probe sequence
agaagctcccattaatgagggcttc

SEQ ID NO: 90530 - DNA, 25 bp, Probe sequence
agctcccattaatgagggcttcttt

SEQ ID NO: 90531 - DNA, 25 bp, Probe sequence
actaaaaagaagctcccattaatga

SEQ ID NO: 90532 - DNA, 25 bp, Probe sequence
aaagaagctcccattaatgagggct

SEQ ID NO: 90533 - DNA, 25 bp, Probe sequence
aaaagaagctcccattaatgagggc

SEQ ID NO: 90534 - DNA, 25 bp, Probe sequence
aagctcccattaatgagggcttctt

SEQ ID NO: 90535 - DNA, 25 bp, Probe sequence
aagaagctcccattaatgagggctt

SEQ ID NO: 90536 - DNA, 25 bp, Probe sequence
cattaatgagggcttctttttttgt

SEQ ID NO: 90537 - DNA, 25 bp, Probe sequence
ctcccattaatgagggcttcttttt

SEQ ID NO: 90538 - DNA, 25 bp, Probe sequence
ccattaatgagggcttctttttttg

SEQ ID NO: 90539 - DNA, 25 bp, Probe sequence
gctcccattaatgagggcttctttt

SEQ ID NO: 90540 - DNA, 25 bp, Probe sequence
gaagctcccattaatgagggcttct

SEQ ID NO: 90541 - DNA, 25 bp, Probe sequence
gactaaaaagaagctcccattaatg

SEQ ID NO: 90542 - DNA, 25 bp, Probe sequence
tcccattaatgagggcttctttttt

SEQ ID NO: 90543 - DNA, 25 bp, Probe sequence
atatacattacactcattactcaat

SEQ ID NO: 90544 - DNA, 25 bp, Probe sequence
atacaactattaaatcccataagat

SEQ ID NO: 90545 - DNA, 25 bp, Probe sequence
atgttgcttaatcttatgtttatat

SEQ ID NO: 90546 - DNA, 25 bp, Probe sequence
agcaacccatgagctcaaacacttc

SEQ ID NO: 90547 - DNA, 25 bp, Probe sequence
agctcaaacacttcctgttcacata

SEQ ID NO: 90548 - DNA, 25 bp, Probe sequence
agcccccctagcttgtagaaatcat

SEQ ID NO: 90549 - DNA, 25 bp, Probe sequence
acaacatactattactatacattac

SEQ ID NO: 90550 - DNA, 25 bp, Probe sequence
aaatcgcattatgttgcttaatctt

SEQ ID NO: 90551 - DNA, 25 bp, Probe sequence
aacacttcctgttcacataacacta

SEQ ID NO: 90552 - DNA, 25 bp, Probe sequence
gaaagcgtatgatttcacagccccc

SEQ ID NO: 90553 - DNA, 25 bp, Probe sequence
gaaatcatactttccttttttcaat

SEQ ID NO: 90554 - DNA, 25 bp, Probe sequence
gtttgtttagcttaagcaacccatg

SEQ ID NO: 90555 - DNA, 25 bp, Probe sequence
tactttccttttttcaatatatata

SEQ ID NO: 90556 - DNA, 25 bp, Probe sequence
tttttagagcttgaggtttgtttag

SEQ ID NO: 90557 - DNA, 25 bp, Probe sequence
ttcacataacactacaaatcgcatt

SEQ ID NO: 90558 - DNA, 25 bp, Probe sequence
atcagacaattattttcattttcaa

SEQ ID NO: 90559 - DNA, 25 bp, Probe sequence
aacacttctgatattcttagttcaa

SEQ ID NO: 90560 - DNA, 25 bp, Probe sequence
cattttcaaattattctttcttcaa

SEQ ID NO: 90561 - DNA, 25 bp, Probe sequence
ctcacctaaaaaaatgccctcctct

SEQ ID NO: 90562 - DNA, 25 bp, Probe sequence
ctcctcttattttgactcctattta

SEQ ID NO: 90563 - DNA, 25 bp, Probe sequence
gcatattatttgccttcattttaaa

SEQ ID NO: 90564 - DNA, 25 bp, Probe sequence
gactcctatttatttaaatcagaca

SEQ ID NO: 90565 - DNA, 25 bp, Probe sequence
gttcagataaatattttctcaccta

SEQ ID NO: 90566 - DNA, 25 bp, Probe sequence
gttaatggcatattatttgccttca

SEQ ID NO: 90567 - DNA, 25 bp, Probe sequence
gtgttttatagtgttatctagttca

SEQ ID NO: 90568 - DNA, 25 bp, Probe sequence
tgccttcattttaaacttaacttat

SEQ ID NO: 90569 - DNA, 25 bp, Probe sequence
tcttattttgactcctatttattta

SEQ ID NO: 90570 - DNA, 25 bp, Probe sequence
ttctcacctaaaaaaatgccctcct

SEQ ID NO: 90571 - DNA, 25 bp, Probe sequence
tattatttgccttcattttaaactt

SEQ ID NO: 90572 - DNA, 25 bp, Probe sequence
ttctttcttcaatattagttaagcg

SEQ ID NO: 90573 - DNA, 25 bp, Probe sequence
attttactttttacaagtcatatct

SEQ ID NO: 90574 - DNA, 25 bp, Probe sequence
agtcatatctaatgaataacaatat

SEQ ID NO: 90575 - DNA, 25 bp, Probe sequence
actttttacaagtcatatctaatga

SEQ ID NO: 90576 - DNA, 25 bp, Probe sequence
aattgatataatagttgattgaagt

SEQ ID NO: 90577 - DNA, 25 bp, Probe sequence
ctttttacaagtcatatctaatgaa

SEQ ID NO: 90578 - DNA, 25 bp, Probe sequence
gaagtataacgaacaggagtccatc

SEQ ID NO: 90579 - DNA, 25 bp, Probe sequence
gattgaagtataacgaacaggagtc

SEQ ID NO: 90580 - DNA, 25 bp, Probe sequence
tgaagtataacgaacaggagtccat

SEQ ID NO: 90581 - DNA, 25 bp, Probe sequence
tattttactttttacaagtcatatc

SEQ ID NO: 90582 - DNA, 25 bp, Probe sequence
tttactttttacaagtcatatctaa

SEQ ID NO: 90583 - DNA, 25 bp, Probe sequence
ttttactttttacaagtcatatcta

SEQ ID NO: 90584 - DNA, 25 bp, Probe sequence
ttattttactttttacaagtcatat

SEQ ID NO: 90585 - DNA, 25 bp, Probe sequence
ttactttttacaagtcatatctaat

SEQ ID NO: 90586 - DNA, 25 bp, Probe sequence
ttacaagtcatatctaatgaataac

SEQ ID NO: 90587 - DNA, 25 bp, Probe sequence
ttgaagtataacgaacaggagtcca

SEQ ID NO: 90588 - DNA, 25 bp, Probe sequence
atttctttcgtctatcttttatgga

SEQ ID NO: 90589 - DNA, 25 bp, Probe sequence
atcaatgccattaacctctttatta

SEQ ID NO: 90590 - DNA, 25 bp, Probe sequence
acgggcttatcaatgccattaacct

SEQ ID NO: 90591 - DNA, 25 bp, Probe sequence
aagcattgtcattatcctgaccttg

SEQ ID NO: 90592 - DNA, 25 bp, Probe sequence
aatgaatatcagaggtttctagctg

SEQ ID NO: 90593 - DNA, 25 bp, Probe sequence
cattatcctgaccttgattttaact

SEQ ID NO: 90594 - DNA, 25 bp, Probe sequence
gctgaaaccctctataaaaaactag

SEQ ID NO: 90595 - DNA, 25 bp, Probe sequence
gtattggatgtagctaaaactttaa

SEQ ID NO: 90596 - DNA, 25 bp, Probe sequence
gtatactccgttctaaatgtgtttt

SEQ ID NO: 90597 - DNA, 25 bp, Probe sequence
ggtatattctattcatcgtacataa

SEQ ID NO: 90598 - DNA, 25 bp, Probe sequence
tggagataggctttttttattttat

SEQ ID NO: 90599 - DNA, 25 bp, Probe sequence
tgaaatttcaaacattcgttggtaa

SEQ ID NO: 90600 - DNA, 25 bp, Probe sequence
tcctgaccttgattttaactaatat

SEQ ID NO: 90601 - DNA, 25 bp, Probe sequence
tataggagcaacccatttctttcgt

SEQ ID NO: 90602 - DNA, 25 bp, Probe sequence
tttctagctgaaaccctctataaaa

SEQ ID NO: 90603 - DNA, 25 bp, Probe sequence
atttttaaatttgttttcacatcat

SEQ ID NO: 90604 - DNA, 25 bp, Probe sequence
attttctactttattatcatactaa

SEQ ID NO: 90605 - DNA, 25 bp, Probe sequence
atcattttctactttattatcatac

SEQ ID NO: 90606 - DNA, 25 bp, Probe sequence
acatcattttctactttattatcat

SEQ ID NO: 90607 - DNA, 25 bp, Probe sequence
aatttgttttcacatcattttctac

SEQ ID NO: 90608 - DNA, 25 bp, Probe sequence
gttttcacatcattttctactttat

SEQ ID NO: 90609 - DNA, 25 bp, Probe sequence
tgttttcacatcattttctacttta

SEQ ID NO: 90610 - DNA, 25 bp, Probe sequence
tcattttctactttattatcatact

SEQ ID NO: 90611 - DNA, 25 bp, Probe sequence
tcacatcattttctactttattatc

SEQ ID NO: 90612 - DNA, 25 bp, Probe sequence
tttgttttcacatcattttctactt

SEQ ID NO: 90613 - DNA, 25 bp, Probe sequence
tttctactttattatcatactaatt

SEQ ID NO: 90614 - DNA, 25 bp, Probe sequence
tttcacatcattttctactttatta

SEQ ID NO: 90615 - DNA, 25 bp, Probe sequence
ttttcacatcattttctactttatt

SEQ ID NO: 90616 - DNA, 25 bp, Probe sequence
ttcacatcattttctactttattat

SEQ ID NO: 90617 - DNA, 25 bp, Probe sequence
ttgttttcacatcattttctacttt

SEQ ID NO: 90618 - DNA, 25 bp, Probe sequence
actttcatttttaattatagaatcg

SEQ ID NO: 90619 - DNA, 25 bp, Probe sequence
acacctcttcaatatttggttactt

SEQ ID NO: 90620 - DNA, 25 bp, Probe sequence
caatatttggttactttactttcat

SEQ ID NO: 90621 - DNA, 25 bp, Probe sequence
cacctcttcaatatttggttacttt

SEQ ID NO: 90622 - DNA, 25 bp, Probe sequence
gaatagttcgttttacctactcact

SEQ ID NO: 90623 - DNA, 25 bp, Probe sequence
ctcttcaatatttggttactttact

SEQ ID NO: 90624 - DNA, 25 bp, Probe sequence
gaatcgattgaatagttcgttttac

SEQ ID NO: 90625 - DNA, 25 bp, Probe sequence
gattgaatagttcgttttacctact

SEQ ID NO: 90626 - DNA, 25 bp, Probe sequence
gtacacctcttcaatatttggttac

SEQ ID NO: 90627 - DNA, 25 bp, Probe sequence
tgaatagttcgttttacctactcac

SEQ ID NO: 90628 - DNA, 25 bp, Probe sequence
tcgattgaatagttcgttttaccta

SEQ ID NO: 90629 - DNA, 25 bp, Probe sequence
tcaatatttggttactttactttca

SEQ ID NO: 90630 - DNA, 25 bp, Probe sequence
tacacctcttcaatatttggttact

SEQ ID NO: 90631 - DNA, 25 bp, Probe sequence
ttgaatagttcgttttacctactca

SEQ ID NO: 90632 - DNA, 25 bp, Probe sequence
ttgtacacctcttcaatatttggtt

SEQ ID NO: 90633 - DNA, 25 bp, Probe sequence
atttgcttgtgtaagtttctttatt

SEQ ID NO: 90634 - DNA, 25 bp, Probe sequence
acaagtattttgggctacaactcat

SEQ ID NO: 90635 - DNA, 25 bp, Probe sequence
cacactttatcttttcattttactg

SEQ ID NO: 90636 - DNA, 25 bp, Probe sequence
gcatcggactcgagtatgagctacg

SEQ ID NO: 90637 - DNA, 25 bp, Probe sequence
gatacatttcgcagataaaacacag

SEQ ID NO: 90638 - DNA, 25 bp, Probe sequence
gattcaagtttataattttcattac

SEQ ID NO: 90639 - DNA, 25 bp, Probe sequence
gtagctttcaactttgatttaacaa

SEQ ID NO: 90640 - DNA, 25 bp, Probe sequence
gtaaaaacacactttatcttttcat

SEQ ID NO: 90641 - DNA, 25 bp, Probe sequence
gggctacaactcatatttgcttgtg

SEQ ID NO: 90642 - DNA, 25 bp, Probe sequence
ggaaattatttgcatcggactcgag

SEQ ID NO: 90643 - DNA, 25 bp, Probe sequence
tcgagtatgagctacgtaccaaata

SEQ ID NO: 90644 - DNA, 25 bp, Probe sequence
taaaacacagtattatttcattata

SEQ ID NO: 90645 - DNA, 25 bp, Probe sequence
taaatcttgcgaaagtacttgaata

SEQ ID NO: 90646 - DNA, 25 bp, Probe sequence
tatagtaattactttcagattcaag

SEQ ID NO: 90647 - DNA, 25 bp, Probe sequence
ttttcattacttgtagctttcaact

SEQ ID NO: 90648 - DNA, 25 bp, Probe sequence
atttaatatattgttgcttcaacta

SEQ ID NO: 90649 - DNA, 25 bp, Probe sequence
atattttatcaatccgagttcgtgt

SEQ ID NO: 90650 - DNA, 25 bp, Probe sequence
atcaatccgagttcgtgtttaaata

SEQ ID NO: 90651 - DNA, 25 bp, Probe sequence
atcagttctatacattatacacctt

SEQ ID NO: 90652 - DNA, 25 bp, Probe sequence
atctctacgtacttaaatcagttct

SEQ ID NO: 90653 - DNA, 25 bp, Probe sequence
acattatacacctttttgaaatcaa

SEQ ID NO: 90654 - DNA, 25 bp, Probe sequence
ccatcttccttcttctgttgaaatc

SEQ ID NO: 90655 - DNA, 25 bp, Probe sequence
gaacataataaaacccggattgata

SEQ ID NO: 90656 - DNA, 25 bp, Probe sequence
gaaatcgataccgttaagtgtcata

SEQ ID NO: 90657 - DNA, 25 bp, Probe sequence
gatgactatgctaatgatttttata

SEQ ID NO: 90658 - DNA, 25 bp, Probe sequence
tctgttgaaatctctacgtacttaa

SEQ ID NO: 90659 - DNA, 25 bp, Probe sequence
taatatacctttttatcaacacata

SEQ ID NO: 90660 - DNA, 25 bp, Probe sequence
taaggctttgatgactatgctaatg

SEQ ID NO: 90661 - DNA, 25 bp, Probe sequence
tacctttttatcaacacatatactg

SEQ ID NO: 90662 - DNA, 25 bp, Probe sequence
ttccttcttctgttgaaatctctac

SEQ ID NO: 90663 - DNA, 25 bp, Probe sequence
atagtgttattttaccttgaattca

SEQ ID NO: 90664 - DNA, 25 bp, Probe sequence
atgtatgtattccctatttaaccac

SEQ ID NO: 90665 - DNA, 25 bp, Probe sequence
acctctttttttctcatagcataaa

SEQ ID NO: 90666 - DNA, 25 bp, Probe sequence
accgagattatatgtatgtattccc

SEQ ID NO: 90667 - DNA, 25 bp, Probe sequence
aacacccagtaaaacaaggaatgct

SEQ ID NO: 90668 - DNA, 25 bp, Probe sequence
aaggaatgcttactaggtgccttca

SEQ ID NO: 90669 - DNA, 25 bp, Probe sequence
cacctctttttttctcatagcataa

SEQ ID NO: 90670 - DNA, 25 bp, Probe sequence
gaataataggtaatctccagttaag

SEQ ID NO: 90671 - DNA, 25 bp, Probe sequence
gattatatgtatgtattccctattt

SEQ ID NO: 90672 - DNA, 25 bp, Probe sequence
gtatgtattccctatttaaccacgt

SEQ ID NO: 90673 - DNA, 25 bp, Probe sequence
ggtaatctccagttaagaaatagtg

SEQ ID NO: 90674 - DNA, 25 bp, Probe sequence
taaatgatttatccttgaacttttt

SEQ ID NO: 90675 - DNA, 25 bp, Probe sequence
tatgtattccctatttaaccacgtt

SEQ ID NO: 90676 - DNA, 25 bp, Probe sequence
tagtgttattttaccttgaattcaa

SEQ ID NO: 90677 - DNA, 25 bp, Probe sequence
ttttttctcatagcataaaaccgag

SEQ ID NO: 90678 - DNA, 25 bp, Probe sequence
attgtgtttaacatgtcatattttt

SEQ ID NO: 90679 - DNA, 25 bp, Probe sequence
atttggtgttacgcatcttatgtgg

SEQ ID NO: 90680 - DNA, 25 bp, Probe sequence
atataatttggtgttacgcatctta

SEQ ID NO: 90681 - DNA, 25 bp, Probe sequence
aacgccacataagatataatttggt

SEQ ID NO: 90682 - DNA, 25 bp, Probe sequence
aatagcttacattgtgtttaacatg

SEQ ID NO: 90683 - DNA, 25 bp, Probe sequence
catcataatagcttacattgtgttt

SEQ ID NO: 90684 - DNA, 25 bp, Probe sequence
gcttacattgtgtttaacatgtcat

SEQ ID NO: 90685 - DNA, 25 bp, Probe sequence
gatttaaatataacaacgccacata

SEQ ID NO: 90686 - DNA, 25 bp, Probe sequence
ggtgttacgcatcttatgtggcgtt

SEQ ID NO: 90687 - DNA, 25 bp, Probe sequence
tgtcatattttttaatcattattgc

SEQ ID NO: 90688 - DNA, 25 bp, Probe sequence
taatttggtgttacgcatcttatgt

SEQ ID NO: 90689 - DNA, 25 bp, Probe sequence
taacatgtcatattttttaatcatt

SEQ ID NO: 90690 - DNA, 25 bp, Probe sequence
tttggtgttacgcatcttatgtggc

SEQ ID NO: 90691 - DNA, 25 bp, Probe sequence
tttttaatcattattgcatgtttaa

SEQ ID NO: 90692 - DNA, 25 bp, Probe sequence
ttaaatataacaacgccacataaga

SEQ ID NO: 90693 - DNA, 25 bp, Probe sequence
atcattcacactgcattgagcttga

SEQ ID NO: 90694 - DNA, 25 bp, Probe sequence
atcatctattgttgctttttacact

SEQ ID NO: 90695 - DNA, 25 bp, Probe sequence
atcttctcctcaaaatatcagtatt

SEQ ID NO: 90696 - DNA, 25 bp, Probe sequence
atctattgttgctttttacactgaa

SEQ ID NO: 90697 - DNA, 25 bp, Probe sequence
aatatcatctattgttgctttttac

SEQ ID NO: 90698 - DNA, 25 bp, Probe sequence
cacctcatcattcacactgcattga

SEQ ID NO: 90699 - DNA, 25 bp, Probe sequence
ctgaatactctcacctcatcattca

SEQ ID NO: 90700 - DNA, 25 bp, Probe sequence
gctttttacactgaatactctcacc

SEQ ID NO: 90701 - DNA, 25 bp, Probe sequence
gttgctttttacactgaatactctc

SEQ ID NO: 90702 - DNA, 25 bp, Probe sequence
tgaatactctcacctcatcattcac

SEQ ID NO: 90703 - DNA, 25 bp, Probe sequence
tcatcattcacactgcattgagctt

SEQ ID NO: 90704 - DNA, 25 bp, Probe sequence
taatcttctcctcaaaatatcagta

SEQ ID NO: 90705 - DNA, 25 bp, Probe sequence
tatcagtattgattcagtatagcaa

SEQ ID NO: 90706 - DNA, 25 bp, Probe sequence
tttacactgaatactctcacctcat

SEQ ID NO: 90707 - DNA, 25 bp, Probe sequence
tttaatcttctcctcaaaatatcag

SEQ ID NO: 90708 - DNA, 25 bp, Probe sequence
attactttatagcctatccatcatc

SEQ ID NO: 90709 - DNA, 25 bp, Probe sequence
atagtgttgtagtgtctaagacata

SEQ ID NO: 90710 - DNA, 25 bp, Probe sequence
atcttttctacatgaaatttttcaa

SEQ ID NO: 90711 - DNA, 25 bp, Probe sequence
atccatcatcttttctacatgaaat

SEQ ID NO: 90712 - DNA, 25 bp, Probe sequence
agttcatctcagtcacaattacttt

SEQ ID NO: 90713 - DNA, 25 bp, Probe sequence
actgccaatatagtgttgtagtgtc

SEQ ID NO: 90714 - DNA, 25 bp, Probe sequence
acataaaagttcatctcagtcacaa

SEQ ID NO: 90715 - DNA, 25 bp, Probe sequence
aaaagttcatctcagtcacaattac

SEQ ID NO: 90716 - DNA, 25 bp, Probe sequence
cacaattactttatagcctatccat

SEQ ID NO: 90717 - DNA, 25 bp, Probe sequence
ctttatagcctatccatcatctttt

SEQ ID NO: 90718 - DNA, 25 bp, Probe sequence
cctatccatcatcttttctacatga

SEQ ID NO: 90719 - DNA, 25 bp, Probe sequence
gtcacaattactttatagcctatcc

SEQ ID NO: 90720 - DNA, 25 bp, Probe sequence
tcatctcagtcacaattactttata

SEQ ID NO: 90721 - DNA, 25 bp, Probe sequence
tatagcctatccatcatcttttcta

SEQ ID NO: 90722 - DNA, 25 bp, Probe sequence
ttatagcctatccatcatcttttct

SEQ ID NO: 90723 - DNA, 25 bp, Probe sequence
atagtggtttatgcgtctttttcaa

SEQ ID NO: 90724 - DNA, 25 bp, Probe sequence
atctgccatagattaacacattcat

SEQ ID NO: 90725 - DNA, 25 bp, Probe sequence
atcggatgacgtgtaatctgccata

SEQ ID NO: 90726 - DNA, 25 bp, Probe sequence
aagattcaacgcaccttatattcgt

SEQ ID NO: 90727 - DNA, 25 bp, Probe sequence
gcatccggaatgatcttgacccgat

SEQ ID NO: 90728 - DNA, 25 bp, Probe sequence
gctttaagctattaccctgtttcaa

SEQ ID NO: 90729 - DNA, 25 bp, Probe sequence
gcaccttatattcgtttttattagc

SEQ ID NO: 90730 - DNA, 25 bp, Probe sequence
gacatataattttggcgcatgccac

SEQ ID NO: 90731 - DNA, 25 bp, Probe sequence
gactaacatttattgagagcgggac

SEQ ID NO: 90732 - DNA, 25 bp, Probe sequence
gatcttgacccgatattatattagg

SEQ ID NO: 90733 - DNA, 25 bp, Probe sequence
gattaacacattcatccgatttata

SEQ ID NO: 90734 - DNA, 25 bp, Probe sequence
ggtttggagtgtaatcataagattc

SEQ ID NO: 90735 - DNA, 25 bp, Probe sequence
ggcgcatgccactaaaatgattgat

SEQ ID NO: 90736 - DNA, 25 bp, Probe sequence
tatgcgtctttttcaaattctataa

SEQ ID NO: 90737 - DNA, 25 bp, Probe sequence
tattcgtttttattagctttaagct

SEQ ID NO: 90738 - DNA, 25 bp, Probe sequence
attgttggcctaattcaaaaaacag

SEQ ID NO: 90739 - DNA, 25 bp, Probe sequence
agtcatttaaatggcttactgtttt

SEQ ID NO: 90740 - DNA, 25 bp, Probe sequence
agacatcaatgtcagttattaccat

SEQ ID NO: 90741 - DNA, 25 bp, Probe sequence
agctataactatattttctcgtccc

SEQ ID NO: 90742 - DNA, 25 bp, Probe sequence
aaagcttaatatgctcgttatagac

SEQ ID NO: 90743 - DNA, 25 bp, Probe sequence
aatatgctcgttatagacagctata

SEQ ID NO: 90744 - DNA, 25 bp, Probe sequence
cagttattaccattttctctattta

SEQ ID NO: 90745 - DNA, 25 bp, Probe sequence
ctcgtcccactctatagacatcaat

SEQ ID NO: 90746 - DNA, 25 bp, Probe sequence
gtcccactctatagacatcaatgtc

SEQ ID NO: 90747 - DNA, 25 bp, Probe sequence
tgtcagttattaccattttctctat

SEQ ID NO: 90748 - DNA, 25 bp, Probe sequence
tgaaccaatttttagaaagtaggct

SEQ ID NO: 90749 - DNA, 25 bp, Probe sequence
taaatggcttactgtttttttatag

SEQ ID NO: 90750 - DNA, 25 bp, Probe sequence
tataactatattttctcgtcccact

SEQ ID NO: 90751 - DNA, 25 bp, Probe sequence
tataggtttctattaattaaattca

SEQ ID NO: 90752 - DNA, 25 bp, Probe sequence
ttctcgtcccactctatagacatca

SEQ ID NO: 90753 - DNA, 25 bp, Probe sequence
atctctaattaattgtgcgcgctta

SEQ ID NO: 90754 - DNA, 25 bp, Probe sequence
agaaacctattgcactttaacgtca

SEQ ID NO: 90755 - DNA, 25 bp, Probe sequence
acaccaaaagaatattagtacacga

SEQ ID NO: 90756 - DNA, 25 bp, Probe sequence
aattgtgcgcgcttaataacagaat

SEQ ID NO: 90757 - DNA, 25 bp, Probe sequence
cacaccaataagttgattttcctaa

SEQ ID NO: 90758 - DNA, 25 bp, Probe sequence
gcgcgcttaataacagaatattctc

SEQ ID NO: 90759 - DNA, 25 bp, Probe sequence
gtatatttttatattatctctaatt

SEQ ID NO: 90760 - DNA, 25 bp, Probe sequence
gtatcatttaataaacacaccaata

SEQ ID NO: 90761 - DNA, 25 bp, Probe sequence
ggggaagaaaggatgggatgtatac

SEQ ID NO: 90762 - DNA, 25 bp, Probe sequence
ggcacaatcaaatttacttaaacta

SEQ ID NO: 90763 - DNA, 25 bp, Probe sequence
tgattttcctaacttattggtgtgt

SEQ ID NO: 90764 - DNA, 25 bp, Probe sequence
taacattttataccaaagtacacca

SEQ ID NO: 90765 - DNA, 25 bp, Probe sequence
tttagcatacataataggttacatt

SEQ ID NO: 90766 - DNA, 25 bp, Probe sequence
ttatttttttgtgatttgttggaat

SEQ ID NO: 90767 - DNA, 25 bp, Probe sequence
ttggtgtgtttttcatttagcatac

SEQ ID NO: 90768 - DNA, 25 bp, Probe sequence
atttcaactatttatgcacaacatg

SEQ ID NO: 90769 - DNA, 25 bp, Probe sequence
agaacgtttgttcggtacagtctat

SEQ ID NO: 90770 - DNA, 25 bp, Probe sequence
agtagatatcacttgatttttttaa

SEQ ID NO: 90771 - DNA, 25 bp, Probe sequence
agcttattagcttgatactgaattg

SEQ ID NO: 90772 - DNA, 25 bp, Probe sequence
aagtgtaatgccctattattccgac

SEQ ID NO: 90773 - DNA, 25 bp, Probe sequence
gttccaactaggcaccaatactaaa

SEQ ID NO: 90774 - DNA, 25 bp, Probe sequence
gcacaacatgttgttttatgctaat

SEQ ID NO: 90775 - DNA, 25 bp, Probe sequence
gtttcattatacataagacacacta

SEQ ID NO: 90776 - DNA, 25 bp, Probe sequence
gtgccattttctaatcgaatgttcg

SEQ ID NO: 90777 - DNA, 25 bp, Probe sequence
gtgtcaatctcaattgtatcaacag

SEQ ID NO: 90778 - DNA, 25 bp, Probe sequence
ggtacagtctattatagtcttttta

SEQ ID NO: 90779 - DNA, 25 bp, Probe sequence
taatgccctattattccgacaaata

SEQ ID NO: 90780 - DNA, 25 bp, Probe sequence
taaaacgttccaactaggcaccaat

SEQ ID NO: 90781 - DNA, 25 bp, Probe sequence
tatgatttaaagtgccattttctaa

SEQ ID NO: 90782 - DNA, 25 bp, Probe sequence
tttttttaaatctgtgtcaatctca

SEQ ID NO: 90783 - DNA, 25 bp, Probe sequence
atttgctcagtacattttctaaaaa

SEQ ID NO: 90784 - DNA, 25 bp, Probe sequence
atctcagcattgtattaactataat

SEQ ID NO: 90785 - DNA, 25 bp, Probe sequence
acatggttactatggttatctcagc

SEQ ID NO: 90786 - DNA, 25 bp, Probe sequence
aaaatgctttaacaacatggttact

SEQ ID NO: 90787 - DNA, 25 bp, Probe sequence
aaccaattgcatagatttatatttg

SEQ ID NO: 90788 - DNA, 25 bp, Probe sequence
gctacttattttctcaaatgtaaac

SEQ ID NO: 90789 - DNA, 25 bp, Probe sequence
gttactatggttatctcagcattgt

SEQ ID NO: 90790 - DNA, 25 bp, Probe sequence
gtatttacatcattggatatcttcc

SEQ ID NO: 90791 - DNA, 25 bp, Probe sequence
ggatatcttccatttgctcagtaca

SEQ ID NO: 90792 - DNA, 25 bp, Probe sequence
taatgaagctacttattttctcaaa

SEQ ID NO: 90793 - DNA, 25 bp, Probe sequence
tagtagcttatatgggttgaatgta

SEQ ID NO: 90794 - DNA, 25 bp, Probe sequence
tatggttatctcagcattgtattaa

SEQ ID NO: 90795 - DNA, 25 bp, Probe sequence
tatcttccatttgctcagtacattt

SEQ ID NO: 90796 - DNA, 25 bp, Probe sequence
ttttctcaaatgtaaaccaattgca

SEQ ID NO: 90797 - DNA, 25 bp, Probe sequence
ttccatttgctcagtacattttcta

SEQ ID NO: 90798 - DNA, 25 bp, Probe sequence
atttcctcctgtaatgttactcaat

SEQ ID NO: 90799 - DNA, 25 bp, Probe sequence
ataatttcctcctgtaatgttactc

SEQ ID NO: 90800 - DNA, 25 bp, Probe sequence
agaccagatgattagctgtttgtca

SEQ ID NO: 90801 - DNA, 25 bp, Probe sequence
aattgacaaatacagacatagcagt

SEQ ID NO: 90802 - DNA, 25 bp, Probe sequence
cagacatagcagtctaatcatctgc

SEQ ID NO: 90803 - DNA, 25 bp, Probe sequence
cctgtaatgttactcaataattgac

SEQ ID NO: 90804 - DNA, 25 bp, Probe sequence
gctgtttgtcattttcaacatttaa

SEQ ID NO: 90805 - DNA, 25 bp, Probe sequence
gcagtctaatcatctgctaattcag

SEQ ID NO: 90806 - DNA, 25 bp, Probe sequence
gaatataatttcctcctgtaatgtt

SEQ ID NO: 90807 - DNA, 25 bp, Probe sequence
gtctaatcatctgctaattcagacc

SEQ ID NO: 90808 - DNA, 25 bp, Probe sequence
tgattagctgtttgtcattttcaac

SEQ ID NO: 90809 - DNA, 25 bp, Probe sequence
tctgctaattcagaccagatgatta

SEQ ID NO: 90810 - DNA, 25 bp, Probe sequence
taatcatctgctaattcagaccaga

SEQ ID NO: 90811 - DNA, 25 bp, Probe sequence
ttagctgtttgtcattttcaacatt

SEQ ID NO: 90812 - DNA, 25 bp, Probe sequence
ttcctcctgtaatgttactcaataa

SEQ ID NO: 90813 - DNA, 25 bp, Probe sequence
atttccctttacatgtgaaggtctt

SEQ ID NO: 90814 - DNA, 25 bp, Probe sequence
atcgctatttccctttacatgtgaa

SEQ ID NO: 90815 - DNA, 25 bp, Probe sequence
atgcatacgcttttaagcatagaga

SEQ ID NO: 90816 - DNA, 25 bp, Probe sequence
atgtgaaggtcttttaatttaattg

SEQ ID NO: 90817 - DNA, 25 bp, Probe sequence
agacgaaacgaatcgctatttccct

SEQ ID NO: 90818 - DNA, 25 bp, Probe sequence
actttttcaaaatatgcatacgctt

SEQ ID NO: 90819 - DNA, 25 bp, Probe sequence
aaaagaccttcaacatgtaggagac

SEQ ID NO: 90820 - DNA, 25 bp, Probe sequence
caaaatatgcatacgcttttaagca

SEQ ID NO: 90821 - DNA, 25 bp, Probe sequence
tccctttacatgtgaaggtctttta

SEQ ID NO: 90822 - DNA, 25 bp, Probe sequence
gcatagagaaaagaccttcaacatg

SEQ ID NO: 90823 - DNA, 25 bp, Probe sequence
gctatttccctttacatgtgaaggt

SEQ ID NO: 90824 - DNA, 25 bp, Probe sequence
gacgaaacgaatcgctatttccctt

SEQ ID NO: 90825 - DNA, 25 bp, Probe sequence
gaccttcaacatgtaggagacaaga

SEQ ID NO: 90826 - DNA, 25 bp, Probe sequence
ggagacaagacgaaacgaatcgcta

SEQ ID NO: 90827 - DNA, 25 bp, Probe sequence
tcgctatttccctttacatgtgaag

SEQ ID NO: 90828 - DNA, 25 bp, Probe sequence
acccttctttaattggcgcatcacc

SEQ ID NO: 90829 - DNA, 25 bp, Probe sequence
aatataatattctcctcttttggct

SEQ ID NO: 90830 - DNA, 25 bp, Probe sequence
cttttggcttaatctgtgtgcttga

SEQ ID NO: 90831 - DNA, 25 bp, Probe sequence
ctcctcttttggcttaatctgtgtg

SEQ ID NO: 90832 - DNA, 25 bp, Probe sequence
ctgtgtgcttgatgtgaaatataaa

SEQ ID NO: 90833 - DNA, 25 bp, Probe sequence
cctcttttggcttaatctgtgtgct

SEQ ID NO: 90834 - DNA, 25 bp, Probe sequence
gcgcatcacccctttaaagtgtctc

SEQ ID NO: 90835 - DNA, 25 bp, Probe sequence
gcatcacccctttaaagtgtctcca

SEQ ID NO: 90836 - DNA, 25 bp, Probe sequence
ggcttaatctgtgtgcttgatgtga

SEQ ID NO: 90837 - DNA, 25 bp, Probe sequence
tcacccctttaaagtgtctccaaat

SEQ ID NO: 90838 - DNA, 25 bp, Probe sequence
taatattctcctcttttggcttaat

SEQ ID NO: 90839 - DNA, 25 bp, Probe sequence
taacccttctttaattggcgcatca

SEQ ID NO: 90840 - DNA, 25 bp, Probe sequence
tataatattctcctcttttggctta

SEQ ID NO: 90841 - DNA, 25 bp, Probe sequence
tttaacccttctttaattggcgcat

SEQ ID NO: 90842 - DNA, 25 bp, Probe sequence
ttctcctcttttggcttaatctgtg

SEQ ID NO: 90843 - DNA, 25 bp, Probe sequence
attgattgacgtcccagatttcctt

SEQ ID NO: 90844 - DNA, 25 bp, Probe sequence
atgtttggagcccactggtattgaa

SEQ ID NO: 90845 - DNA, 25 bp, Probe sequence
accaacgactgacaacagaacattt

SEQ ID NO: 90846 - DNA, 25 bp, Probe sequence
acttgttacaagtacatgttcattc

SEQ ID NO: 90847 - DNA, 25 bp, Probe sequence
aacagaacattttagagtctaggac

SEQ ID NO: 90848 - DNA, 25 bp, Probe sequence
aatttctctatgtttggagcccact

SEQ ID NO: 90849 - DNA, 25 bp, Probe sequence
cattcaaccaacgactgacaacaga

SEQ ID NO: 90850 - DNA, 25 bp, Probe sequence
gcccactggtattgaaatgaacttg

SEQ ID NO: 90851 - DNA, 25 bp, Probe sequence
gttcattcaaccaacgactgacaac

SEQ ID NO: 90852 - DNA, 25 bp, Probe sequence
gtacatgttcattcaaccaacgact

SEQ ID NO: 90853 - DNA, 25 bp, Probe sequence
ggggagcaatgattaagacctttaa

SEQ ID NO: 90854 - DNA, 25 bp, Probe sequence
ggagcccactggtattgaaatgaac

SEQ ID NO: 90855 - DNA, 25 bp, Probe sequence
tgattaagacctttaaccattgttc

SEQ ID NO: 90856 - DNA, 25 bp, Probe sequence
tctctatgtttggagcccactggta

SEQ ID NO: 90857 - DNA, 25 bp, Probe sequence
tctaggacattgattgacgtcccag

SEQ ID NO: 90858 - DNA, 25 bp, Probe sequence
atagggagtgggtcagacatgataa

SEQ ID NO: 90859 - DNA, 25 bp, Probe sequence
attatagggagtgggtcagacatga

SEQ ID NO: 90860 - DNA, 25 bp, Probe sequence
acattatagggagtgggtcagacat

SEQ ID NO: 90861 - DNA, 25 bp, Probe sequence
acaacatagtcaaaacattataggg

SEQ ID NO: 90862 - DNA, 25 bp, Probe sequence
aacattatagggagtgggtcagaca

SEQ ID NO: 90863 - DNA, 25 bp, Probe sequence
aaaacattatagggagtgggtcaga

SEQ ID NO: 90864 - DNA, 25 bp, Probe sequence
gagtgggtcagacatgataaagcac

SEQ ID NO: 90865 - DNA, 25 bp, Probe sequence
gggagtgggtcagacatgataaagc

SEQ ID NO: 90866 - DNA, 25 bp, Probe sequence
gtcaaaacattatagggagtgggtc

SEQ ID NO: 90867 - DNA, 25 bp, Probe sequence
gtcagacatgataaagcaccacttc

SEQ ID NO: 90868 - DNA, 25 bp, Probe sequence
gtgggtcagacatgataaagcacca

SEQ ID NO: 90869 - DNA, 25 bp, Probe sequence
gggtcagacatgataaagcaccact

SEQ ID NO: 90870 - DNA, 25 bp, Probe sequence
ggtcagacatgataaagcaccactt

SEQ ID NO: 90871 - DNA, 25 bp, Probe sequence
tagggagtgggtcagacatgataaa

SEQ ID NO: 90872 - DNA, 25 bp, Probe sequence
ttatagggagtgggtcagacatgat

SEQ ID NO: 90873 - DNA, 25 bp, Probe sequence
actttcttttcaattttcgcaaatg

SEQ ID NO: 90874 - DNA, 25 bp, Probe sequence
aatgccgtattttataattatacta

SEQ ID NO: 90875 - DNA, 25 bp, Probe sequence
ctttcttttcaattttcgcaaatga

SEQ ID NO: 90876 - DNA, 25 bp, Probe sequence
ctaattctaatactttcttttcaat

SEQ ID NO: 90877 - DNA, 25 bp, Probe sequence
gacaataatgccgtattttataatt

SEQ ID NO: 90878 - DNA, 25 bp, Probe sequence
gacatgagaaaggatgtactgagaa

SEQ ID NO: 90879 - DNA, 25 bp, Probe sequence
tctaatactttcttttcaattttcg

SEQ ID NO: 90880 - DNA, 25 bp, Probe sequence
taattctaatactttcttttcaatt

SEQ ID NO: 90881 - DNA, 25 bp, Probe sequence
taatactttcttttcaattttcgca

SEQ ID NO: 90882 - DNA, 25 bp, Probe sequence
tactaattctaatactttcttttca

SEQ ID NO: 90883 - DNA, 25 bp, Probe sequence
tactttcttttcaattttcgcaaat

SEQ ID NO: 90884 - DNA, 25 bp, Probe sequence
tatactaattctaatactttctttt

SEQ ID NO: 90885 - DNA, 25 bp, Probe sequence
ttatactaattctaatactttcttt

SEQ ID NO: 90886 - DNA, 25 bp, Probe sequence
ttcaattttcgcaaatgaattttaa

SEQ ID NO: 90887 - DNA, 25 bp, Probe sequence
ttcttttcaattttcgcaaatgaat

SEQ ID NO: 90888 - DNA, 25 bp, Probe sequence
attgcactccttaacagattcatta

SEQ ID NO: 90889 - DNA, 25 bp, Probe sequence
attccagactttatcgtgattaaat

SEQ ID NO: 90890 - DNA, 25 bp, Probe sequence
atagtattccagactttatcgtgat

SEQ ID NO: 90891 - DNA, 25 bp, Probe sequence
actccttaacagattcattatacaa

SEQ ID NO: 90892 - DNA, 25 bp, Probe sequence
acagattcattatacaaaaacatgt

SEQ ID NO: 90893 - DNA, 25 bp, Probe sequence
aattatgttatagtattccagactt

SEQ ID NO: 90894 - DNA, 25 bp, Probe sequence
gcactccttaacagattcattatac

SEQ ID NO: 90895 - DNA, 25 bp, Probe sequence
gattgcactccttaacagattcatt

SEQ ID NO: 90896 - DNA, 25 bp, Probe sequence
gttatagtattccagactttatcgt

SEQ ID NO: 90897 - DNA, 25 bp, Probe sequence
gtattccagactttatcgtgattaa

SEQ ID NO: 90898 - DNA, 25 bp, Probe sequence
tgcactccttaacagattcattata

SEQ ID NO: 90899 - DNA, 25 bp, Probe sequence
tccagactttatcgtgattaaatta

SEQ ID NO: 90900 - DNA, 25 bp, Probe sequence
taattttcaatatcaaaggagttta

SEQ ID NO: 90901 - DNA, 25 bp, Probe sequence
tagtattccagactttatcgtgatt

SEQ ID NO: 90902 - DNA, 25 bp, Probe sequence
ttgcactccttaacagattcattat

SEQ ID NO: 90903 - DNA, 25 bp, Probe sequence
atatcaatgtttaccattatacaca

SEQ ID NO: 90904 - DNA, 25 bp, Probe sequence
atagttaatatcaatgtttaccatt

SEQ ID NO: 90905 - DNA, 25 bp, Probe sequence
atctgcgtgacatttttatacatat

SEQ ID NO: 90906 - DNA, 25 bp, Probe sequence
agttgacatgttaaccataaattca

SEQ ID NO: 90907 - DNA, 25 bp, Probe sequence
aatagcatctgcgtgacatttttat

SEQ ID NO: 90908 - DNA, 25 bp, Probe sequence
caatgtttaccattatacacatagt

SEQ ID NO: 90909 - DNA, 25 bp, Probe sequence
catagtaagttgacatgttaaccat

SEQ ID NO: 90910 - DNA, 25 bp, Probe sequence
ctgcgtgacatttttatacatatag

SEQ ID NO: 90911 - DNA, 25 bp, Probe sequence
gcatctgcgtgacatttttatacat

SEQ ID NO: 90912 - DNA, 25 bp, Probe sequence
gacatgttaaccataaattcaaaat

SEQ ID NO: 90913 - DNA, 25 bp, Probe sequence
gtttaccattatacacatagtaagt

SEQ ID NO: 90914 - DNA, 25 bp, Probe sequence
tctattcacctctaaaaatatttat

SEQ ID NO: 90915 - DNA, 25 bp, Probe sequence
tagcatctgcgtgacatttttatac

SEQ ID NO: 90916 - DNA, 25 bp, Probe sequence
tatcacatttaaatagcatctgcgt

SEQ ID NO: 90917 - DNA, 25 bp, Probe sequence
ttcacctctaaaaatatttatcaca

SEQ ID NO: 90918 - DNA, 25 bp, Probe sequence
atagccaaactactctgattcacac

SEQ ID NO: 90919 - DNA, 25 bp, Probe sequence
atgcgaacatttaacatgacatgat

SEQ ID NO: 90920 - DNA, 25 bp, Probe sequence
agtactaacttaactgcttctaaag

SEQ ID NO: 90921 - DNA, 25 bp, Probe sequence
agattttatctcgtgattatatgcg

SEQ ID NO: 90922 - DNA, 25 bp, Probe sequence
acagtatgcttcttttggtttatca

SEQ ID NO: 90923 - DNA, 25 bp, Probe sequence
aactactctgattcacacgaattta

SEQ ID NO: 90924 - DNA, 25 bp, Probe sequence
cttgaccaccttactttattatttg

SEQ ID NO: 90925 - DNA, 25 bp, Probe sequence
gcaaaatgttccaacctatagtttc

SEQ ID NO: 90926 - DNA, 25 bp, Probe sequence
gttgtgatacgttttttattcataa

SEQ ID NO: 90927 - DNA, 25 bp, Probe sequence
gtgctattcacgtctagtagtgtaa

SEQ ID NO: 90928 - DNA, 25 bp, Probe sequence
ggtcagaacatcattatagccaaac

SEQ ID NO: 90929 - DNA, 25 bp, Probe sequence
tggattcgtcgttttccaaaatatt

SEQ ID NO: 90930 - DNA, 25 bp, Probe sequence
taagttgtgctattcacgtctagta

SEQ ID NO: 90931 - DNA, 25 bp, Probe sequence
taaattttcttattggattcgtcgt

SEQ ID NO: 90932 - DNA, 25 bp, Probe sequence
ttggtttatcatatatttcctatta

SEQ ID NO: 90933 - DNA, 25 bp, Probe sequence
acgtatactttcgatcttctaattc

SEQ ID NO: 90934 - DNA, 25 bp, Probe sequence
acgattatatactagttcaactcag

SEQ ID NO: 90935 - DNA, 25 bp, Probe sequence
actagttcaactcaggcttaattaa

SEQ ID NO: 90936 - DNA, 25 bp, Probe sequence
acagcatcatcaatttagtccttct

SEQ ID NO: 90937 - DNA, 25 bp, Probe sequence
aaatcacgctaacattcagtgcaat

SEQ ID NO: 90938 - DNA, 25 bp, Probe sequence
aaatgttattaaccatcatgacagc

SEQ ID NO: 90939 - DNA, 25 bp, Probe sequence
aattcgttttgctaaccatcataaa

SEQ ID NO: 90940 - DNA, 25 bp, Probe sequence
cagtgcaatgatagcgtgatttttc

SEQ ID NO: 90941 - DNA, 25 bp, Probe sequence
gcatcatcaatttagtccttcttta

SEQ ID NO: 90942 - DNA, 25 bp, Probe sequence
gatcttctaattcgttttgctaacc

SEQ ID NO: 90943 - DNA, 25 bp, Probe sequence
gttcaactcaggcttaattaataaa

SEQ ID NO: 90944 - DNA, 25 bp, Probe sequence
gtgatttttcatattttttacgtat

SEQ ID NO: 90945 - DNA, 25 bp, Probe sequence
tcgttttgctaaccatcataaatgt

SEQ ID NO: 90946 - DNA, 25 bp, Probe sequence
ttttacgtatactttcgatcttcta

SEQ ID NO: 90947 - DNA, 25 bp, Probe sequence
ttaaccatcatgacagcatcatcaa

SEQ ID NO: 90948 - DNA, 25 bp, Probe sequence
atacaagttcatcatactaacacaa

SEQ ID NO: 90949 - DNA, 25 bp, Probe sequence
agttgtaaacttcaattgttcaaat

SEQ ID NO: 90950 - DNA, 25 bp, Probe sequence
acgacaaaactgttaatcctttgct

SEQ ID NO: 90951 - DNA, 25 bp, Probe sequence
actaacacaaagtctcactattgaa

SEQ ID NO: 90952 - DNA, 25 bp, Probe sequence
aacacatatcattggaggtgaattg

SEQ ID NO: 90953 - DNA, 25 bp, Probe sequence
aaccatacaagttcatcatactaac

SEQ ID NO: 90954 - DNA, 25 bp, Probe sequence
aagtctcactattgaaagttgtaac

SEQ ID NO: 90955 - DNA, 25 bp, Probe sequence
aatcctttgctattattaaatcata

SEQ ID NO: 90956 - DNA, 25 bp, Probe sequence
catcatactaacacaaagtctcact

SEQ ID NO: 90957 - DNA, 25 bp, Probe sequence
catactaacacaaagtctcactatt

SEQ ID NO: 90958 - DNA, 25 bp, Probe sequence
gcaaagattaacagtttttcttatt

SEQ ID NO: 90959 - DNA, 25 bp, Probe sequence
gttcatcatactaacacaaagtctc

SEQ ID NO: 90960 - DNA, 25 bp, Probe sequence
gtaaacttcaattgttcaaataaat

SEQ ID NO: 90961 - DNA, 25 bp, Probe sequence
gtctcactattgaaagttgtaacaa

SEQ ID NO: 90962 - DNA, 25 bp, Probe sequence
ttcttatttaaatttgaaccataca

SEQ ID NO: 90963 - DNA, 25 bp, Probe sequence
attcatttcttatatatcgcctatt

SEQ ID NO: 90964 - DNA, 25 bp, Probe sequence
attcattttttcatcatatcattta

SEQ ID NO: 90965 - DNA, 25 bp, Probe sequence
attaattcgctcaatcaatgatatc

SEQ ID NO: 90966 - DNA, 25 bp, Probe sequence
atttacaactatacgattcatttct

SEQ ID NO: 90967 - DNA, 25 bp, Probe sequence
atcgcctattattcattttttcatc

SEQ ID NO: 90968 - DNA, 25 bp, Probe sequence
accttcatcgatattaattgttttt

SEQ ID NO: 90969 - DNA, 25 bp, Probe sequence
acttacaatagctagtggtcaatta

SEQ ID NO: 90970 - DNA, 25 bp, Probe sequence
aacatcaaagtctatatcatacatt

SEQ ID NO: 90971 - DNA, 25 bp, Probe sequence
aaggcaacattttaacatcaaagtc

SEQ ID NO: 90972 - DNA, 25 bp, Probe sequence
aatgatatatctattttctacgtat

SEQ ID NO: 90973 - DNA, 25 bp, Probe sequence
aatgacaaattgtaagttttcactt

SEQ ID NO: 90974 - DNA, 25 bp, Probe sequence
gtcaattaaaggagtcgattcagac

SEQ ID NO: 90975 - DNA, 25 bp, Probe sequence
tttctacgtatatcttatagcttta

SEQ ID NO: 90976 - DNA, 25 bp, Probe sequence
ttattcaccttcatcgatattaatt

SEQ ID NO: 90977 - DNA, 25 bp, Probe sequence
ttcatcatatcatttaaggcaacat

SEQ ID NO: 90978 - DNA, 25 bp, Probe sequence
atgtcttcctttataacaacataaa

SEQ ID NO: 90979 - DNA, 25 bp, Probe sequence
aacactagcttaggagggctaactc

SEQ ID NO: 90980 - DNA, 25 bp, Probe sequence
ctctaattgcgtattgttactttgc

SEQ ID NO: 90981 - DNA, 25 bp, Probe sequence
cgttccatgctagtgttttttgtga

SEQ ID NO: 90982 - DNA, 25 bp, Probe sequence
gcgtattgttactttgcaatttgga

SEQ ID NO: 90983 - DNA, 25 bp, Probe sequence
gcacgttccatgctagtgttttttg

SEQ ID NO: 90984 - DNA, 25 bp, Probe sequence
gagtatgtcttcctttataacaaca

SEQ ID NO: 90985 - DNA, 25 bp, Probe sequence
gagggctaactctaattgcgtattg

SEQ ID NO: 90986 - DNA, 25 bp, Probe sequence
gttactttgcaatttggaaagcacg

SEQ ID NO: 90987 - DNA, 25 bp, Probe sequence
gttttttgtgagtatgtcttccttt

SEQ ID NO: 90988 - DNA, 25 bp, Probe sequence
gtacagacatcatttttttatttta

SEQ ID NO: 90989 - DNA, 25 bp, Probe sequence
gggctaactctaattgcgtattgtt

SEQ ID NO: 90990 - DNA, 25 bp, Probe sequence
ggaaagcacgttccatgctagtgtt

SEQ ID NO: 90991 - DNA, 25 bp, Probe sequence
tccatgctagtgttttttgtgagta

SEQ ID NO: 90992 - DNA, 25 bp, Probe sequence
ttgtgagtatgtcttcctttataac

SEQ ID NO: 90993 - DNA, 25 bp, Probe sequence
agtcgtcctcctaaaatatactcat

SEQ ID NO: 90994 - DNA, 25 bp, Probe sequence
acgatttatagtcatgtcattttca

SEQ ID NO: 90995 - DNA, 25 bp, Probe sequence
aaataatcttaagcttatgaattaa

SEQ ID NO: 90996 - DNA, 25 bp, Probe sequence
aaaagaaaatggcaatcaaacgatt

SEQ ID NO: 90997 - DNA, 25 bp, Probe sequence
aacgatttatagtcatgtcattttc

SEQ ID NO: 90998 - DNA, 25 bp, Probe sequence
aatatactcatagcaatgatacaat

SEQ ID NO: 90999 - DNA, 25 bp, Probe sequence
cgtcctcctaaaatatactcatagc

SEQ ID NO: 91000 - DNA, 25 bp, Probe sequence
gcaatgatacaatatttcagttaaa

SEQ ID NO: 91001 - DNA, 25 bp, Probe sequence
gatttatagtcatgtcattttcagt

SEQ ID NO: 91002 - DNA, 25 bp, Probe sequence
gtcatgtcattttcagtgtataatg

SEQ ID NO: 91003 - DNA, 25 bp, Probe sequence
gtcgtcctcctaaaatatactcata

SEQ ID NO: 91004 - DNA, 25 bp, Probe sequence
tcctcctaaaatatactcatagcaa

SEQ ID NO: 91005 - DNA, 25 bp, Probe sequence
tcaaacgatttatagtcatgtcatt

SEQ ID NO: 91006 - DNA, 25 bp, Probe sequence
tagtcatgtcattttcagtgtataa

SEQ ID NO: 91007 - DNA, 25 bp, Probe sequence
tatagtcatgtcattttcagtgtat

SEQ ID NO: 91008 - DNA, 25 bp, Probe sequence
atttaaagccatgtatacgagagat

SEQ ID NO: 91009 - DNA, 25 bp, Probe sequence
atgcttaaaacctcatttcaacgta

SEQ ID NO: 91010 - DNA, 25 bp, Probe sequence
atgattttcttatatctttagcatt

SEQ ID NO: 91011 - DNA, 25 bp, Probe sequence
gcattttgactttcaaatgatgaac

SEQ ID NO: 91012 - DNA, 25 bp, Probe sequence
gagcctaatattataatgattttct

SEQ ID NO: 91013 - DNA, 25 bp, Probe sequence
gaggatgaattaatttcccgtaatg

SEQ ID NO: 91014 - DNA, 25 bp, Probe sequence
gatgaacatttaaagccatgtatac

SEQ ID NO: 91015 - DNA, 25 bp, Probe sequence
gtatacgagagataatttccaatta

SEQ ID NO: 91016 - DNA, 25 bp, Probe sequence
tgcttaaaacctcatttcaacgtaa

SEQ ID NO: 91017 - DNA, 25 bp, Probe sequence
tccaattacaatatagactctttta

SEQ ID NO: 91018 - DNA, 25 bp, Probe sequence
taatttcccgtaatgtttaatgctt

SEQ ID NO: 91019 - DNA, 25 bp, Probe sequence
tatctttagcattttgactttcaaa

SEQ ID NO: 91020 - DNA, 25 bp, Probe sequence
tatatctttagcattttgactttca

SEQ ID NO: 91021 - DNA, 25 bp, Probe sequence
ttttcttatatctttagcattttga

SEQ ID NO: 91022 - DNA, 25 bp, Probe sequence
ttcaacgtaaaaaagagcctaatat

SEQ ID NO: 91023 - DNA, 25 bp, Probe sequence
atagtcataatttgcttttggagta

SEQ ID NO: 91024 - DNA, 25 bp, Probe sequence
agactgacatactattattaactta

SEQ ID NO: 91025 - DNA, 25 bp, Probe sequence
acttatttactcatttgtggaatca

SEQ ID NO: 91026 - DNA, 25 bp, Probe sequence
aaaactgtttggcctacaacaatat

SEQ ID NO: 91027 - DNA, 25 bp, Probe sequence
cttcattcacattctgttgtcaaca

SEQ ID NO: 91028 - DNA, 25 bp, Probe sequence
ctcaatacgcaattatacttcctaa

SEQ ID NO: 91029 - DNA, 25 bp, Probe sequence
gcatagtcactatgtttcattcaac

SEQ ID NO: 91030 - DNA, 25 bp, Probe sequence
gacatacttcattcacattctgttg

SEQ ID NO: 91031 - DNA, 25 bp, Probe sequence
gttgtcaacaagtttatcactaata

SEQ ID NO: 91032 - DNA, 25 bp, Probe sequence
gttcgctcctttagctaaaaaactg

SEQ ID NO: 91033 - DNA, 25 bp, Probe sequence
gtttcattcaacaaattacattatc

SEQ ID NO: 91034 - DNA, 25 bp, Probe sequence
ggcctacaacaatatatcttatcat

SEQ ID NO: 91035 - DNA, 25 bp, Probe sequence
tatatacatccattaacattagcat

SEQ ID NO: 91036 - DNA, 25 bp, Probe sequence
tattttacgattttcgactcggact

SEQ ID NO: 91037 - DNA, 25 bp, Probe sequence
ttttcgactcggactatacaataga

SEQ ID NO: 91038 - DNA, 25 bp, Probe sequence
tctaagtcaaagagaccccctaatt

SEQ ID NO: 91039 - DNA, 25 bp, Probe sequence
atttcgtttgatttctgataattcc

SEQ ID NO: 91040 - DNA, 25 bp, Probe sequence
catagccttcgctcctatttaaatt

SEQ ID NO: 91041 - DNA, 25 bp, Probe sequence
catttcttcatattcttggatatta

SEQ ID NO: 91042 - DNA, 25 bp, Probe sequence
ctgacaattagtttatgcttttatt

SEQ ID NO: 91043 - DNA, 25 bp, Probe sequence
gccttcgctcctatttaaatttcaa

SEQ ID NO: 91044 - DNA, 25 bp, Probe sequence
gaaatataagcacactgacaattag

SEQ ID NO: 91045 - DNA, 25 bp, Probe sequence
gattatacttatctatatttcgttt

SEQ ID NO: 91046 - DNA, 25 bp, Probe sequence
tgatttgtatcttttataatgctaa

SEQ ID NO: 91047 - DNA, 25 bp, Probe sequence
tcaaagagaccccctaatttgtgtt

SEQ ID NO: 91048 - DNA, 25 bp, Probe sequence
tcaagtcattgatttgtatctttta

SEQ ID NO: 91049 - DNA, 25 bp, Probe sequence
taaaaatcagtacatttatcatcga

SEQ ID NO: 91050 - DNA, 25 bp, Probe sequence
ttagtttctttgttctctaagtcaa

SEQ ID NO: 91051 - DNA, 25 bp, Probe sequence
ttctgataattccatagccttcgct

SEQ ID NO: 91052 - DNA, 25 bp, Probe sequence
ttggatattagtttctttgttctct

SEQ ID NO: 91053 - DNA, 25 bp, Probe sequence
atattctaactctatctaccgaatt

SEQ ID NO: 91054 - DNA, 25 bp, Probe sequence
atatattctaactctatctaccgaa

SEQ ID NO: 91055 - DNA, 25 bp, Probe sequence
accgaattgtacttaaatattcata

SEQ ID NO: 91056 - DNA, 25 bp, Probe sequence
aaatatattctaactctatctaccg

SEQ ID NO: 91057 - DNA, 25 bp, Probe sequence
aacaaatcatattccaaaatctaat

SEQ ID NO: 91058 - DNA, 25 bp, Probe sequence
aactctatctaccgaattgtactta

SEQ ID NO: 91059 - DNA, 25 bp, Probe sequence
aatcatattccaaaatctaatttac

SEQ ID NO: 91060 - DNA, 25 bp, Probe sequence
ctatctaccgaattgtacttaaata

SEQ ID NO: 91061 - DNA, 25 bp, Probe sequence
ctaactctatctaccgaattgtact

SEQ ID NO: 91062 - DNA, 25 bp, Probe sequence
ctctatctaccgaattgtacttaaa

SEQ ID NO: 91063 - DNA, 25 bp, Probe sequence
taatttacaatttatttagctacct

SEQ ID NO: 91064 - DNA, 25 bp, Probe sequence
tagagcctcggttttaaaatatata

SEQ ID NO: 91065 - DNA, 25 bp, Probe sequence
tattcataaacaaatcatattccaa

SEQ ID NO: 91066 - DNA, 25 bp, Probe sequence
ttagagcctcggttttaaaatatat

SEQ ID NO: 91067 - DNA, 25 bp, Probe sequence
ttctaactctatctaccgaattgta

SEQ ID NO: 91068 - DNA, 25 bp, Probe sequence
agcacaatacattttgtcaaaagct

SEQ ID NO: 91069 - DNA, 25 bp, Probe sequence
acgatgtaatcaaatggttaacaat

SEQ ID NO: 91070 - DNA, 25 bp, Probe sequence
actatagcacaatacattttgtcaa

SEQ ID NO: 91071 - DNA, 25 bp, Probe sequence
acattttgtcaaaagctattgttat

SEQ ID NO: 91072 - DNA, 25 bp, Probe sequence
aagctattgttataacgatgtaatc

SEQ ID NO: 91073 - DNA, 25 bp, Probe sequence
aagaatacaaccttttatcatagtg

SEQ ID NO: 91074 - DNA, 25 bp, Probe sequence
cattcctttgctgttagtattttaa

SEQ ID NO: 91075 - DNA, 25 bp, Probe sequence
ctgtcattcctttgctgttagtatt

SEQ ID NO: 91076 - DNA, 25 bp, Probe sequence
gctgttagtattttaagtatgcaaa

SEQ ID NO: 91077 - DNA, 25 bp, Probe sequence
gaatacaaccttttatcatagtgta

SEQ ID NO: 91078 - DNA, 25 bp, Probe sequence
gtatgcaaatactatagcacaatac

SEQ ID NO: 91079 - DNA, 25 bp, Probe sequence
gtcattcctttgctgttagtatttt

SEQ ID NO: 91080 - DNA, 25 bp, Probe sequence
tgtcattcctttgctgttagtattt

SEQ ID NO: 91081 - DNA, 25 bp, Probe sequence
tacaaccttttatcatagtgtaaaa

SEQ ID NO: 91082 - DNA, 25 bp, Probe sequence
ttcctttgctgttagtattttaagt

SEQ ID NO: 91083 - DNA, 25 bp, Probe sequence
attacctcctccattaattaatcat

SEQ ID NO: 91084 - DNA, 25 bp, Probe sequence
atatcatttaaatatcttctttata

SEQ ID NO: 91085 - DNA, 25 bp, Probe sequence
atcctctcaacctgttacttaaaca

SEQ ID NO: 91086 - DNA, 25 bp, Probe sequence
acctcctccattaattaatcataaa

SEQ ID NO: 91087 - DNA, 25 bp, Probe sequence
aaatatcttctttatataactctga

SEQ ID NO: 91088 - DNA, 25 bp, Probe sequence
aacaggctaagaggatagtcttgtc

SEQ ID NO: 91089 - DNA, 25 bp, Probe sequence
aattaatcataaattatactttctt

SEQ ID NO: 91090 - DNA, 25 bp, Probe sequence
caaaaaatcctctcaacctgttact

SEQ ID NO: 91091 - DNA, 25 bp, Probe sequence
ctcaacctgttacttaaacaggcta

SEQ ID NO: 91092 - DNA, 25 bp, Probe sequence
gaggatagtcttgtcttgatatatt

SEQ ID NO: 91093 - DNA, 25 bp, Probe sequence
gataccaaaaaatcctctcaacctg

SEQ ID NO: 91094 - DNA, 25 bp, Probe sequence
ggatagtcttgtcttgatatattac

SEQ ID NO: 91095 - DNA, 25 bp, Probe sequence
ggctaagaggatagtcttgtcttga

SEQ ID NO: 91096 - DNA, 25 bp, Probe sequence
taccaaaaaatcctctcaacctgtt

SEQ ID NO: 91097 - DNA, 25 bp, Probe sequence
ttcaattacctcctccattaattaa

SEQ ID NO: 91098 - DNA, 25 bp, Probe sequence
attaatcatcgttttgtttcaacaa

SEQ ID NO: 91099 - DNA, 25 bp, Probe sequence
atattttagcaaagtagccacacaa

SEQ ID NO: 91100 - DNA, 25 bp, Probe sequence
atgcttgccttaaatcaaatcgttt

SEQ ID NO: 91101 - DNA, 25 bp, Probe sequence
actatgcttgccttaaatcaaatcg

SEQ ID NO: 91102 - DNA, 25 bp, Probe sequence
acattatattaatcatcgttttgtt

SEQ ID NO: 91103 - DNA, 25 bp, Probe sequence
aaatcaaatcgtttatcttgttatt

SEQ ID NO: 91104 - DNA, 25 bp, Probe sequence
cttcgctttctcattacatatttta

SEQ ID NO: 91105 - DNA, 25 bp, Probe sequence
ctttctcattacatattttagcaaa

SEQ ID NO: 91106 - DNA, 25 bp, Probe sequence
ctcttcgctttctcattacatattt

SEQ ID NO: 91107 - DNA, 25 bp, Probe sequence
gctaactatgcttgccttaaatcaa

SEQ ID NO: 91108 - DNA, 25 bp, Probe sequence
gaaaaacaaacatagttgtgctaac

SEQ ID NO: 91109 - DNA, 25 bp, Probe sequence
gttgtgctaactatgcttgccttaa

SEQ ID NO: 91110 - DNA, 25 bp, Probe sequence
gtttatcttgttatttttagtatgt

SEQ ID NO: 91111 - DNA, 25 bp, Probe sequence
gtagccacacaaaaagcaaacgttt

SEQ ID NO: 91112 - DNA, 25 bp, Probe sequence
gtgctaactatgcttgccttaaatc

SEQ ID NO: 91113 - DNA, 25 bp, Probe sequence
cactctcagtttcgatttatgttta

SEQ ID NO: 91114 - DNA, 25 bp, Probe sequence
catcttttctttctactattcatta

SEQ ID NO: 91115 - DNA, 25 bp, Probe sequence
ctttctactattcattactaaatta

SEQ ID NO: 91116 - DNA, 25 bp, Probe sequence
gctaatgacaaagaaccactacata

SEQ ID NO: 91117 - DNA, 25 bp, Probe sequence
gcactcatgcattcctatttttaag

SEQ ID NO: 91118 - DNA, 25 bp, Probe sequence
gcaactctagattgaccctatctta

SEQ ID NO: 91119 - DNA, 25 bp, Probe sequence
gaccctatcttaacataattctttt

SEQ ID NO: 91120 - DNA, 25 bp, Probe sequence
gattgaccctatcttaacataattc

SEQ ID NO: 91121 - DNA, 25 bp, Probe sequence
gtttagcaactctagattgacccta

SEQ ID NO: 91122 - DNA, 25 bp, Probe sequence
gtttcgatttatgtttagcaactct

SEQ ID NO: 91123 - DNA, 25 bp, Probe sequence
gtacacaatagctgtggctaatgac

SEQ ID NO: 91124 - DNA, 25 bp, Probe sequence
tgagttgcactcatgcattcctatt

SEQ ID NO: 91125 - DNA, 25 bp, Probe sequence
tcccactctcagtttcgatttatgt

SEQ ID NO: 91126 - DNA, 25 bp, Probe sequence
taattctttttacgcatcttttctt

SEQ ID NO: 91127 - DNA, 25 bp, Probe sequence
ttttctttctactattcattactaa

SEQ ID NO: 91128 - DNA, 25 bp, Probe sequence
attgcttgcttaatttacatggttc

SEQ ID NO: 91129 - DNA, 25 bp, Probe sequence
attttacaagtcaatatcaatcatt

SEQ ID NO: 91130 - DNA, 25 bp, Probe sequence
atatcgccataaaagtccgagccat

SEQ ID NO: 91131 - DNA, 25 bp, Probe sequence
atcaatcattaatttattgcttgct

SEQ ID NO: 91132 - DNA, 25 bp, Probe sequence
acctcaattgtatttatccctactc

SEQ ID NO: 91133 - DNA, 25 bp, Probe sequence
aaaaatataacaccaatctacattg

SEQ ID NO: 91134 - DNA, 25 bp, Probe sequence
aatcaatgacctaagctctacaatg

SEQ ID NO: 91135 - DNA, 25 bp, Probe sequence
aatttacatggttcatatcgccata

SEQ ID NO: 91136 - DNA, 25 bp, Probe sequence
catctcttcttatcatatcaaaaat

SEQ ID NO: 91137 - DNA, 25 bp, Probe sequence
cttacatctcttcttatcatatcaa

SEQ ID NO: 91138 - DNA, 25 bp, Probe sequence
gacctaagctctacaatgatatatt

SEQ ID NO: 91139 - DNA, 25 bp, Probe sequence
gtccgagccataaatcaatgaccta

SEQ ID NO: 91140 - DNA, 25 bp, Probe sequence
gggttcacctcaattgtatttatcc

SEQ ID NO: 91141 - DNA, 25 bp, Probe sequence
tgtatttatccctactcttacatct

SEQ ID NO: 91142 - DNA, 25 bp, Probe sequence
tactcttacatctcttcttatcata

SEQ ID NO: 91143 - DNA, 25 bp, Probe sequence
attaatcattatgcgcattatataa

SEQ ID NO: 91144 - DNA, 25 bp, Probe sequence
attaacgcctcctcattattaatca

SEQ ID NO: 91145 - DNA, 25 bp, Probe sequence
attattaatcattatgcgcattata

SEQ ID NO: 91146 - DNA, 25 bp, Probe sequence
atataataaatctaacttttcataa

SEQ ID NO: 91147 - DNA, 25 bp, Probe sequence
ataataaatctaacttttcataaat

SEQ ID NO: 91148 - DNA, 25 bp, Probe sequence
atgcgcattatataataaatctaac

SEQ ID NO: 91149 - DNA, 25 bp, Probe sequence
taatcattatgcgcattatataata

SEQ ID NO: 91150 - DNA, 25 bp, Probe sequence
taacgcctcctcattattaatcatt

SEQ ID NO: 91151 - DNA, 25 bp, Probe sequence
tattaacgcctcctcattattaatc

SEQ ID NO: 91152 - DNA, 25 bp, Probe sequence
tattaatcattatgcgcattatata

SEQ ID NO: 91153 - DNA, 25 bp, Probe sequence
tttattaacgcctcctcattattaa

SEQ ID NO: 91154 - DNA, 25 bp, Probe sequence
ttattaatcattatgcgcattatat

SEQ ID NO: 91155 - DNA, 25 bp, Probe sequence
ttattaacgcctcctcattattaat

SEQ ID NO: 91156 - DNA, 25 bp, Probe sequence
ttatgcgcattatataataaatcta

SEQ ID NO: 91157 - DNA, 25 bp, Probe sequence
ttaacgcctcctcattattaatcat

SEQ ID NO: 91158 - DNA, 25 bp, Probe sequence
acaactcaacatcttaattcgacct

SEQ ID NO: 91159 - DNA, 25 bp, Probe sequence
aaatatccaaataacttacaactca

SEQ ID NO: 91160 - DNA, 25 bp, Probe sequence
aaactagaactcattgaaacgcaca

SEQ ID NO: 91161 - DNA, 25 bp, Probe sequence
aacttacaactcaacatcttaattc

SEQ ID NO: 91162 - DNA, 25 bp, Probe sequence
aactcaacatcttaattcgacctcg

SEQ ID NO: 91163 - DNA, 25 bp, Probe sequence
caaataacttacaactcaacatctt

SEQ ID NO: 91164 - DNA, 25 bp, Probe sequence
ctagttttctatataatttgcttta

SEQ ID NO: 91165 - DNA, 25 bp, Probe sequence
ctcaacatcttaattcgacctcgaa

SEQ ID NO: 91166 - DNA, 25 bp, Probe sequence
gcacaaatgatacgtactaagttct

SEQ ID NO: 91167 - DNA, 25 bp, Probe sequence
gaaacgcacaaatgatacgtactaa

SEQ ID NO: 91168 - DNA, 25 bp, Probe sequence
gatacgtactaagttctagttttct

SEQ ID NO: 91169 - DNA, 25 bp, Probe sequence
gtaagacattattttaacaaggtga

SEQ ID NO: 91170 - DNA, 25 bp, Probe sequence
tgtcccactcccataaagttataag

SEQ ID NO: 91171 - DNA, 25 bp, Probe sequence
tcccactcccataaagttataagtt

SEQ ID NO: 91172 - DNA, 25 bp, Probe sequence
ttaacaaggtgatgacactattaaa

SEQ ID NO: 91173 - DNA, 25 bp, Probe sequence
accgccaaaacgaatttcatgatgt

SEQ ID NO: 91174 - DNA, 25 bp, Probe sequence
aaacgaatttcatgatgttaattta

SEQ ID NO: 91175 - DNA, 25 bp, Probe sequence
ccaactatgtctagattaaatttct

SEQ ID NO: 91176 - DNA, 25 bp, Probe sequence
gccaaaacgaatttcatgatgttaa

SEQ ID NO: 91177 - DNA, 25 bp, Probe sequence
gcaacgatgttttatatttatttcc

SEQ ID NO: 91178 - DNA, 25 bp, Probe sequence
gatgttaatttaaatgttctatgac

SEQ ID NO: 91179 - DNA, 25 bp, Probe sequence
tcaccgccaaaacgaatttcatgat

SEQ ID NO: 91180 - DNA, 25 bp, Probe sequence
tacatcatttaaaggagcttgggac

SEQ ID NO: 91181 - DNA, 25 bp, Probe sequence
tatttccaactatgtctagattaaa

SEQ ID NO: 91182 - DNA, 25 bp, Probe sequence
tatttatttccaactatgtctagat

SEQ ID NO: 91183 - DNA, 25 bp, Probe sequence
tttccaactatgtctagattaaatt

SEQ ID NO: 91184 - DNA, 25 bp, Probe sequence
ttttcaccgccaaaacgaatttcat

SEQ ID NO: 91185 - DNA, 25 bp, Probe sequence
tttatttccaactatgtctagatta

SEQ ID NO: 91186 - DNA, 25 bp, Probe sequence
ttcaccgccaaaacgaatttcatga

SEQ ID NO: 91187 - DNA, 25 bp, Probe sequence
ttctatgacaaaattaagcaacgat

SEQ ID NO: 91188 - DNA, 25 bp, Probe sequence
atgattcaccttagaaccactgtct

SEQ ID NO: 91189 - DNA, 25 bp, Probe sequence
agaaccactgtctattttcattttt

SEQ ID NO: 91190 - DNA, 25 bp, Probe sequence
accttagaaccactgtctattttca

SEQ ID NO: 91191 - DNA, 25 bp, Probe sequence
aacatgattcaccttagaaccactg

SEQ ID NO: 91192 - DNA, 25 bp, Probe sequence
cacagctctattatcatatcataat

SEQ ID NO: 91193 - DNA, 25 bp, Probe sequence
gaaccactgtctattttcatttttt

SEQ ID NO: 91194 - DNA, 25 bp, Probe sequence
gattcaccttagaaccactgtctat

SEQ ID NO: 91195 - DNA, 25 bp, Probe sequence
tcttatttaaaacatgattcacctt

SEQ ID NO: 91196 - DNA, 25 bp, Probe sequence
tcatttttttacacagctctattat

SEQ ID NO: 91197 - DNA, 25 bp, Probe sequence
tacacagctctattatcatatcata

SEQ ID NO: 91198 - DNA, 25 bp, Probe sequence
tatcataatatgattacgttctata

SEQ ID NO: 91199 - DNA, 25 bp, Probe sequence
tttcatttttttacacagctctatt

SEQ ID NO: 91200 - DNA, 25 bp, Probe sequence
tttttttacacagctctattatcat

SEQ ID NO: 91201 - DNA, 25 bp, Probe sequence
ttttacacagctctattatcatatc

SEQ ID NO: 91202 - DNA, 25 bp, Probe sequence
ttcaccttagaaccactgtctattt

SEQ ID NO: 91203 - DNA, 25 bp, Probe sequence
atttccttcattaaactttccagct

SEQ ID NO: 91204 - DNA, 25 bp, Probe sequence
acgcttggttattgaatttccttca

SEQ ID NO: 91205 - DNA, 25 bp, Probe sequence
aatacagagaatcccgcaaagtcgg

SEQ ID NO: 91206 - DNA, 25 bp, Probe sequence
aatacaatacttttcaatacagaga

SEQ ID NO: 91207 - DNA, 25 bp, Probe sequence
catattttcttatgaccaaattgat

SEQ ID NO: 91208 - DNA, 25 bp, Probe sequence
gatacatatgatgctacttaatgag

SEQ ID NO: 91209 - DNA, 25 bp, Probe sequence
gttagtcgactattattcattaaac

SEQ ID NO: 91210 - DNA, 25 bp, Probe sequence
gtctatgatcagtgactcaattaat

SEQ ID NO: 91211 - DNA, 25 bp, Probe sequence
gtcgggattcttatttatgctgatt

SEQ ID NO: 91212 - DNA, 25 bp, Probe sequence
tgagaaaattaggtaacgcttggtt

SEQ ID NO: 91213 - DNA, 25 bp, Probe sequence
tccagctcaatttaatagttagtcg

SEQ ID NO: 91214 - DNA, 25 bp, Probe sequence
taattcactaccaaaaacaccttct

SEQ ID NO: 91215 - DNA, 25 bp, Probe sequence
taattatcacattcatattttctta

SEQ ID NO: 91216 - DNA, 25 bp, Probe sequence
tatgctgattttgtttttgtctatg

SEQ ID NO: 91217 - DNA, 25 bp, Probe sequence
ttcattaaactttccagctcaattt

SEQ ID NO: 91218 - DNA, 25 bp, Probe sequence
attttacttctcatagtacagagat

SEQ ID NO: 91219 - DNA, 25 bp, Probe sequence
agttacattgtttgacgcttttctc

SEQ ID NO: 91220 - DNA, 25 bp, Probe sequence
acttattttacttctcatagtacag

SEQ ID NO: 91221 - DNA, 25 bp, Probe sequence
acactttgactttaaatagttacat

SEQ ID NO: 91222 - DNA, 25 bp, Probe sequence
aactgttactcattattttacatat

SEQ ID NO: 91223 - DNA, 25 bp, Probe sequence
aagtcaaatttggtcaaacactttg

SEQ ID NO: 91224 - DNA, 25 bp, Probe sequence
ctatatttcctccttgtaataactg

SEQ ID NO: 91225 - DNA, 25 bp, Probe sequence
tcctccttgtaataactgttactca

SEQ ID NO: 91226 - DNA, 25 bp, Probe sequence
tacattgtttgacgcttttctcttt

SEQ ID NO: 91227 - DNA, 25 bp, Probe sequence
tagattgtacttattttacttctca

SEQ ID NO: 91228 - DNA, 25 bp, Probe sequence
tatttcctccttgtaataactgtta

SEQ ID NO: 91229 - DNA, 25 bp, Probe sequence
ttttctctttcctttgtaaactgat

SEQ ID NO: 91230 - DNA, 25 bp, Probe sequence
ttctctttcctttgtaaactgataa

SEQ ID NO: 91231 - DNA, 25 bp, Probe sequence
ttcctttgtaaactgataatatcta

SEQ ID NO: 91232 - DNA, 25 bp, Probe sequence
ttgtacttattttacttctcatagt

SEQ ID NO: 91233 - DNA, 25 bp, Probe sequence
attcaatcatatttccgctcaaagt

SEQ ID NO: 91234 - DNA, 25 bp, Probe sequence
agagcagactgcttagtctactctt

SEQ ID NO: 91235 - DNA, 25 bp, Probe sequence
actgcttagtctactctttactttg

SEQ ID NO: 91236 - DNA, 25 bp, Probe sequence
cacctcggtttactcatacaaaaag

SEQ ID NO: 91237 - DNA, 25 bp, Probe sequence
gcttcattcaatcatatttccgctc

SEQ ID NO: 91238 - DNA, 25 bp, Probe sequence
gaaatgttcctttcaatgtctactt

SEQ ID NO: 91239 - DNA, 25 bp, Probe sequence
gagcgacttacaaacaaaggattga

SEQ ID NO: 91240 - DNA, 25 bp, Probe sequence
gtaaacaatttattgacacctcggt

SEQ ID NO: 91241 - DNA, 25 bp, Probe sequence
gtaatgtctagagcgacttacaaac

SEQ ID NO: 91242 - DNA, 25 bp, Probe sequence
gggaacatttcatatagttacggtt

SEQ ID NO: 91243 - DNA, 25 bp, Probe sequence
ggttcaactagcttcattcaatcat

SEQ ID NO: 91244 - DNA, 25 bp, Probe sequence
tgcttagtctactctttactttgaa

SEQ ID NO: 91245 - DNA, 25 bp, Probe sequence
tcatatttccgctcaaagtatagta

SEQ ID NO: 91246 - DNA, 25 bp, Probe sequence
ttacggttcaactagcttcattcaa

SEQ ID NO: 91247 - DNA, 25 bp, Probe sequence
ttgacacctcggtttactcatacaa

SEQ ID NO: 91248 - DNA, 25 bp, Probe sequence
attttcacaactaatttgcttacct

SEQ ID NO: 91249 - DNA, 25 bp, Probe sequence
atcacgcaaccattaacattttcac

SEQ ID NO: 91250 - DNA, 25 bp, Probe sequence
aaagcattggtttaagtgttgtgtt

SEQ ID NO: 91251 - DNA, 25 bp, Probe sequence
caaacatattttgagcctttttttg

SEQ ID NO: 91252 - DNA, 25 bp, Probe sequence
catgcagcgttttacacatactttt

SEQ ID NO: 91253 - DNA, 25 bp, Probe sequence
gcacgattaacgtacgggtccacta

SEQ ID NO: 91254 - DNA, 25 bp, Probe sequence
ggtccactactaaagggagtcaaat

SEQ ID NO: 91255 - DNA, 25 bp, Probe sequence
tgccttcttcaacttaaaactgcct

SEQ ID NO: 91256 - DNA, 25 bp, Probe sequence
tctccctcacttcaaactaatttaa

SEQ ID NO: 91257 - DNA, 25 bp, Probe sequence
taatttgcttacctagtttctacaa

SEQ ID NO: 91258 - DNA, 25 bp, Probe sequence
taaaactgccttcactattactcac

SEQ ID NO: 91259 - DNA, 25 bp, Probe sequence
taaacatttactctttttgccttct

SEQ ID NO: 91260 - DNA, 25 bp, Probe sequence
tactcactcgtaaatcggattcatt

SEQ ID NO: 91261 - DNA, 25 bp, Probe sequence
taccttcgtttgtatcatgcagcgt

SEQ ID NO: 91262 - DNA, 25 bp, Probe sequence
tattcgttatcgaaggtacaccttt

SEQ ID NO: 91263 - DNA, 25 bp, Probe sequence
atctctcccctaattaacaattata

SEQ ID NO: 91264 - DNA, 25 bp, Probe sequence
acctaattaattgtgttgtctgtca

SEQ ID NO: 91265 - DNA, 25 bp, Probe sequence
aactatttaagtatcatctctcccc

SEQ ID NO: 91266 - DNA, 25 bp, Probe sequence
aatattcgagacaacctaattaatt

SEQ ID NO: 91267 - DNA, 25 bp, Probe sequence
aattgtgttgtctgtcatactggtt

SEQ ID NO: 91268 - DNA, 25 bp, Probe sequence
ctatttaagtatcatctctccccta

SEQ ID NO: 91269 - DNA, 25 bp, Probe sequence
gaaccaatattcgagacaacctaat

SEQ ID NO: 91270 - DNA, 25 bp, Probe sequence
gttgtctgtcatactggttcatttt

SEQ ID NO: 91271 - DNA, 25 bp, Probe sequence
gtctgtcatactggttcatttttgt

SEQ ID NO: 91272 - DNA, 25 bp, Probe sequence
gtgttgtctgtcatactggttcatt

SEQ ID NO: 91273 - DNA, 25 bp, Probe sequence
tgtcatactggttcatttttgtttg

SEQ ID NO: 91274 - DNA, 25 bp, Probe sequence
tcatctctcccctaattaacaatta

SEQ ID NO: 91275 - DNA, 25 bp, Probe sequence
tcaaaataaatttcactatccgtaa

SEQ ID NO: 91276 - DNA, 25 bp, Probe sequence
tactggttcatttttgtttgactaa

SEQ ID NO: 91277 - DNA, 25 bp, Probe sequence
ttcactatccgtaaaataaacaact

SEQ ID NO: 91278 - DNA, 25 bp, Probe sequence
atcatttgcttattatttgagacta

SEQ ID NO: 91279 - DNA, 25 bp, Probe sequence
acctctttacacttgcaatagtact

SEQ ID NO: 91280 - DNA, 25 bp, Probe sequence
actgactcgctaatcatttgcttat

SEQ ID NO: 91281 - DNA, 25 bp, Probe sequence
aaattaacctctttacacttgcaat

SEQ ID NO: 91282 - DNA, 25 bp, Probe sequence
aagcgcttgcaatacattttcgatt

SEQ ID NO: 91283 - DNA, 25 bp, Probe sequence
aaggatatgtcacaaccagtggttg

SEQ ID NO: 91284 - DNA, 25 bp, Probe sequence
cacaaccagtggttgcctttttaag

SEQ ID NO: 91285 - DNA, 25 bp, Probe sequence
cataaaacaatgctctagaatccga

SEQ ID NO: 91286 - DNA, 25 bp, Probe sequence
cgttttattttattcgctgtagtca

SEQ ID NO: 91287 - DNA, 25 bp, Probe sequence
cgctgtagtcaaatgtataccctta

SEQ ID NO: 91288 - DNA, 25 bp, Probe sequence
gtactattctatttcaaaaattgca

SEQ ID NO: 91289 - DNA, 25 bp, Probe sequence
tgctctagaatccgaaaagtcacat

SEQ ID NO: 91290 - DNA, 25 bp, Probe sequence
tacattttcgatttgttattcaaca

SEQ ID NO: 91291 - DNA, 25 bp, Probe sequence
tactacctcctccttatatttataa

SEQ ID NO: 91292 - DNA, 25 bp, Probe sequence
tatacccttatactgactcgctaat

SEQ ID NO: 91293 - DNA, 25 bp, Probe sequence
atagttctgagcactagcgtatttg

SEQ ID NO: 91294 - DNA, 25 bp, Probe sequence
agttctgagcactagcgtatttgaa

SEQ ID NO: 91295 - DNA, 25 bp, Probe sequence
aaatagttctgagcactagcgtatt

SEQ ID NO: 91296 - DNA, 25 bp, Probe sequence
aaaataagcggagaagcgtttgtgc

SEQ ID NO: 91297 - DNA, 25 bp, Probe sequence
aagcggagaagcgtttgtgctcccc

SEQ ID NO: 91298 - DNA, 25 bp, Probe sequence
ctccccgcttactcataagctttaa

SEQ ID NO: 91299 - DNA, 25 bp, Probe sequence
cccgcttactcataagctttaatta

SEQ ID NO: 91300 - DNA, 25 bp, Probe sequence
gctaaatagttctgagcactagcgt

SEQ ID NO: 91301 - DNA, 25 bp, Probe sequence
gttctgagcactagcgtatttgaat

SEQ ID NO: 91302 - DNA, 25 bp, Probe sequence
tgtttcctccttgtaattaggaaat

SEQ ID NO: 91303 - DNA, 25 bp, Probe sequence
tgagcactagcgtatttgaataaaa

SEQ ID NO: 91304 - DNA, 25 bp, Probe sequence
tccccgcttactcataagctttaat

SEQ ID NO: 91305 - DNA, 25 bp, Probe sequence
tctgagcactagcgtatttgaataa

SEQ ID NO: 91306 - DNA, 25 bp, Probe sequence
taatgctaaatagttctgagcacta

SEQ ID NO: 91307 - DNA, 25 bp, Probe sequence
tactcataagctttaattaatgcta

SEQ ID NO: 91308 - DNA, 25 bp, Probe sequence
attattatagctttattctttcatt

SEQ ID NO: 91309 - DNA, 25 bp, Probe sequence
atagctttattctttcatttaacaa

SEQ ID NO: 91310 - DNA, 25 bp, Probe sequence
atctcctttaaatagttattctata

SEQ ID NO: 91311 - DNA, 25 bp, Probe sequence
aaataagtgtcattaagcgtttact

SEQ ID NO: 91312 - DNA, 25 bp, Probe sequence
aattattatagctttattctttcat

SEQ ID NO: 91313 - DNA, 25 bp, Probe sequence
gcgtttacttaacatcttttacaat

SEQ ID NO: 91314 - DNA, 25 bp, Probe sequence
gctttattctttcatttaacaaaat

SEQ ID NO: 91315 - DNA, 25 bp, Probe sequence
gatattactattattttcaaaaaat

SEQ ID NO: 91316 - DNA, 25 bp, Probe sequence
gtcattaagcgtttacttaacatct

SEQ ID NO: 91317 - DNA, 25 bp, Probe sequence
gtgtcattaagcgtttacttaacat

SEQ ID NO: 91318 - DNA, 25 bp, Probe sequence
taatctcctttaaatagttattcta

SEQ ID NO: 91319 - DNA, 25 bp, Probe sequence
tagctttattctttcatttaacaaa

SEQ ID NO: 91320 - DNA, 25 bp, Probe sequence
tatagctttattctttcatttaaca

SEQ ID NO: 91321 - DNA, 25 bp, Probe sequence
tattatagctttattctttcattta

SEQ ID NO: 91322 - DNA, 25 bp, Probe sequence
ttatagctttattctttcatttaac

SEQ ID NO: 91323 - DNA, 25 bp, Probe sequence
actttattcaatttataccgacata

SEQ ID NO: 91324 - DNA, 25 bp, Probe sequence
acaagcgtgaactttttaagcgtga

SEQ ID NO: 91325 - DNA, 25 bp, Probe sequence
aaaagtgaataccctgtcatacaat

SEQ ID NO: 91326 - DNA, 25 bp, Probe sequence
aacctaccacagtctcaactctgtg

SEQ ID NO: 91327 - DNA, 25 bp, Probe sequence
aatcctcaactaaaattatggcagt

SEQ ID NO: 91328 - DNA, 25 bp, Probe sequence
aatatgtgttattagttacctcatg

SEQ ID NO: 91329 - DNA, 25 bp, Probe sequence
cagtctcaactctgtggcaggttat

SEQ ID NO: 91330 - DNA, 25 bp, Probe sequence
gttacctcatgattattagtctgtt

SEQ ID NO: 91331 - DNA, 25 bp, Probe sequence
gtcatacaatattcatttcaacata

SEQ ID NO: 91332 - DNA, 25 bp, Probe sequence
gtggcaggttataaatacaagcgtg

SEQ ID NO: 91333 - DNA, 25 bp, Probe sequence
tgaactttttaagcgtgaactcaaa

SEQ ID NO: 91334 - DNA, 25 bp, Probe sequence
taaaaaacctaccacagtctcaact

SEQ ID NO: 91335 - DNA, 25 bp, Probe sequence
taccgacataataatcctcaactaa

SEQ ID NO: 91336 - DNA, 25 bp, Probe sequence
taccctgtcatacaatattcatttc

SEQ ID NO: 91337 - DNA, 25 bp, Probe sequence
ttgtttactcctcatatatttaaat

SEQ ID NO: 91338 - DNA, 25 bp, Probe sequence
attgttaaactattacattcttaat

SEQ ID NO: 91339 - DNA, 25 bp, Probe sequence
atatattttacatagcttattgtta

SEQ ID NO: 91340 - DNA, 25 bp, Probe sequence
aaaaagcccgacatttacatcgccg

SEQ ID NO: 91341 - DNA, 25 bp, Probe sequence
aaaagcccgacatttacatcgccgg

SEQ ID NO: 91342 - DNA, 25 bp, Probe sequence
ctttgcatacttaactaggctatat

SEQ ID NO: 91343 - DNA, 25 bp, Probe sequence
ctccctttgcatacttaactaggct

SEQ ID NO: 91344 - DNA, 25 bp, Probe sequence
ccctttgcatacttaactaggctat

SEQ ID NO: 91345 - DNA, 25 bp, Probe sequence
cgctccctttgcatacttaactagg

SEQ ID NO: 91346 - DNA, 25 bp, Probe sequence
gctccctttgcatacttaactaggc

SEQ ID NO: 91347 - DNA, 25 bp, Probe sequence
gcttattgttaaactattacattct

SEQ ID NO: 91348 - DNA, 25 bp, Probe sequence
gcatacttaactaggctatatattt

SEQ ID NO: 91349 - DNA, 25 bp, Probe sequence
tccctttgcatacttaactaggcta

SEQ ID NO: 91350 - DNA, 25 bp, Probe sequence
taaactattacattcttaattataa

SEQ ID NO: 91351 - DNA, 25 bp, Probe sequence
ttaactaggctatatattttacata

SEQ ID NO: 91352 - DNA, 25 bp, Probe sequence
ttgcatacttaactaggctatatat

SEQ ID NO: 91353 - DNA, 25 bp, Probe sequence
atatagcccgattaagcaactaaat

SEQ ID NO: 91354 - DNA, 25 bp, Probe sequence
atatcaaatatagcccgattaagca

SEQ ID NO: 91355 - DNA, 25 bp, Probe sequence
atcaaacaaatcatacttttgtaat

SEQ ID NO: 91356 - DNA, 25 bp, Probe sequence
atcaaatatagcccgattaagcaac

SEQ ID NO: 91357 - DNA, 25 bp, Probe sequence
aaatatagcccgattaagcaactaa

SEQ ID NO: 91358 - DNA, 25 bp, Probe sequence
acaaaagcacatataactatatcaa

SEQ ID NO: 91359 - DNA, 25 bp, Probe sequence
aatatagcccgattaagcaactaaa

SEQ ID NO: 91360 - DNA, 25 bp, Probe sequence
caaatatagcccgattaagcaacta

SEQ ID NO: 91361 - DNA, 25 bp, Probe sequence
caaatcatacttttgtaatttacaa

SEQ ID NO: 91362 - DNA, 25 bp, Probe sequence
gtaatttacaaaagcacatataact

SEQ ID NO: 91363 - DNA, 25 bp, Probe sequence
tcaaatatagcccgattaagcaact

SEQ ID NO: 91364 - DNA, 25 bp, Probe sequence
tagcccgattaagcaactaaatcgc

SEQ ID NO: 91365 - DNA, 25 bp, Probe sequence
tatcaaatatagcccgattaagcaa

SEQ ID NO: 91366 - DNA, 25 bp, Probe sequence
tatagcccgattaagcaactaaatc

SEQ ID NO: 91367 - DNA, 25 bp, Probe sequence
ttacaaaagcacatataactatatc

SEQ ID NO: 91368 - DNA, 25 bp, Probe sequence
attactctttcctccatcaaataaa

SEQ ID NO: 91369 - DNA, 25 bp, Probe sequence
atactcacaacaaattctgcaatgc

SEQ ID NO: 91370 - DNA, 25 bp, Probe sequence
ataatcacttattactctttcctcc

SEQ ID NO: 91371 - DNA, 25 bp, Probe sequence
actgtccccttatatctcaaaaact

SEQ ID NO: 91372 - DNA, 25 bp, Probe sequence
acatccacaaaggttgtaggctaca

SEQ ID NO: 91373 - DNA, 25 bp, Probe sequence
acacataataaaaaagcctacatcc

SEQ ID NO: 91374 - DNA, 25 bp, Probe sequence
aaaagcctacatccacaaaggttgt

SEQ ID NO: 91375 - DNA, 25 bp, Probe sequence
aacactgctatatcaatactcacaa

SEQ ID NO: 91376 - DNA, 25 bp, Probe sequence
ctttcctccatcaaataaacaccta

SEQ ID NO: 91377 - DNA, 25 bp, Probe sequence
gcaatgcattatcccctgaaaaaca

SEQ ID NO: 91378 - DNA, 25 bp, Probe sequence
gtccccttatatctcaaaaactaat

SEQ ID NO: 91379 - DNA, 25 bp, Probe sequence
tgcattatcccctgaaaaacacata

SEQ ID NO: 91380 - DNA, 25 bp, Probe sequence
tcactgtccccttatatctcaaaaa

SEQ ID NO: 91381 - DNA, 25 bp, Probe sequence
taaacacctatacaaacactgctat

SEQ ID NO: 91382 - DNA, 25 bp, Probe sequence
ttctgcaatgcattatcccctgaaa

SEQ ID NO: 91383 - DNA, 25 bp, Probe sequence
agtagtctgttctgactcttggatt

SEQ ID NO: 91384 - DNA, 25 bp, Probe sequence
agtatgttgggttcttaaaatcgtg

SEQ ID NO: 91385 - DNA, 25 bp, Probe sequence
agaggagtagtctgttctgactctt

SEQ ID NO: 91386 - DNA, 25 bp, Probe sequence
aacaagtaagctttactctcgcctt

SEQ ID NO: 91387 - DNA, 25 bp, Probe sequence
caatggagaattttttatcgattac

SEQ ID NO: 91388 - DNA, 25 bp, Probe sequence
caagtaagctttactctcgcctttt

SEQ ID NO: 91389 - DNA, 25 bp, Probe sequence
gactcttggattttaaatctgtata

SEQ ID NO: 91390 - DNA, 25 bp, Probe sequence
gttgggttcttaaaatcgtgaatag

SEQ ID NO: 91391 - DNA, 25 bp, Probe sequence
gttctgactcttggattttaaatct

SEQ ID NO: 91392 - DNA, 25 bp, Probe sequence
gtttttaacttctcatttattcaat

SEQ ID NO: 91393 - DNA, 25 bp, Probe sequence
gtctgttctgactcttggattttaa

SEQ ID NO: 91394 - DNA, 25 bp, Probe sequence
ggagtagtctgttctgactcttgga

SEQ ID NO: 91395 - DNA, 25 bp, Probe sequence
tcgtttgtagtatgttgggttctta

SEQ ID NO: 91396 - DNA, 25 bp, Probe sequence
taaaattcgtttgtagtatgttggg

SEQ ID NO: 91397 - DNA, 25 bp, Probe sequence
ttaacttctcatttattcaatggag

SEQ ID NO: 91398 - DNA, 25 bp, Probe sequence
tgttaaagaaatcagtccccgtgcc

SEQ ID NO: 91399 - DNA, 25 bp, Probe sequence
atttggtttgttgattgtcttacat

SEQ ID NO: 91400 - DNA, 25 bp, Probe sequence
atcagtccccgtgccggaaaatcat

SEQ ID NO: 91401 - DNA, 25 bp, Probe sequence
atgggataaatttgtaaatcccgca

SEQ ID NO: 91402 - DNA, 25 bp, Probe sequence
cagtccccgtgccggaaaatcataa

SEQ ID NO: 91403 - DNA, 25 bp, Probe sequence
agccaacatgatactataaaactat

SEQ ID NO: 91404 - DNA, 25 bp, Probe sequence
acattcagttatttaatttttagag

SEQ ID NO: 91405 - DNA, 25 bp, Probe sequence
aaatctgtgtttaatggtgttaaag

SEQ ID NO: 91406 - DNA, 25 bp, Probe sequence
ctgacttatttatagcttagccaac

SEQ ID NO: 91407 - DNA, 25 bp, Probe sequence
gaaactgacttatttatagcttagc

SEQ ID NO: 91408 - DNA, 25 bp, Probe sequence
ggtgttaaagaaatcagtccccgtg

SEQ ID NO: 91409 - DNA, 25 bp, Probe sequence
gttgattgtcttacattcagttatt

SEQ ID NO: 91410 - DNA, 25 bp, Probe sequence
ggtttgttgattgtcttacattcag

SEQ ID NO: 91411 - DNA, 25 bp, Probe sequence
tagcttagccaacatgatactataa

SEQ ID NO: 91412 - DNA, 25 bp, Probe sequence
ttatagcttagccaacatgatacta

SEQ ID NO: 91413 - DNA, 25 bp, Probe sequence
attcatctcatacaaataagttgat

SEQ ID NO: 91414 - DNA, 25 bp, Probe sequence
attttacatttaaatctttcgatat

SEQ ID NO: 91415 - DNA, 25 bp, Probe sequence
ataacgcttttaagagctcccatct

SEQ ID NO: 91416 - DNA, 25 bp, Probe sequence
acacatcttcttcaatacatattca

SEQ ID NO: 91417 - DNA, 25 bp, Probe sequence
aatctttcgatatattacaagtttt

SEQ ID NO: 91418 - DNA, 25 bp, Probe sequence
aataacacatcttcttcaatacata

SEQ ID NO: 91419 - DNA, 25 bp, Probe sequence
caaattaataacacatcttcttcaa

SEQ ID NO: 91420 - DNA, 25 bp, Probe sequence
ctcccatctttgaccagtattttcc

SEQ ID NO: 91421 - DNA, 25 bp, Probe sequence
cccatctttgaccagtattttccaa

SEQ ID NO: 91422 - DNA, 25 bp, Probe sequence
gcttttaagagctcccatctttgac

SEQ ID NO: 91423 - DNA, 25 bp, Probe sequence
gtacgattattattacggcaatcta

SEQ ID NO: 91424 - DNA, 25 bp, Probe sequence
tacggcaatctatttgcattgacta

SEQ ID NO: 91425 - DNA, 25 bp, Probe sequence
tttaagagctcccatctttgaccag

SEQ ID NO: 91426 - DNA, 25 bp, Probe sequence
ttcaatacatattcatctcatacaa

SEQ ID NO: 91427 - DNA, 25 bp, Probe sequence
ttgaccagtattttccaaattaata

SEQ ID NO: 91428 - DNA, 25 bp, Probe sequence
atagtaatgacgccattatttcatt

SEQ ID NO: 91429 - DNA, 25 bp, Probe sequence
aaattgaatgatatttttcgcaata

SEQ ID NO: 91430 - DNA, 25 bp, Probe sequence
aatgacgccattatttcattaaaat

SEQ ID NO: 91431 - DNA, 25 bp, Probe sequence
aatattttatagtaatgacgccatt

SEQ ID NO: 91432 - DNA, 25 bp, Probe sequence
ctatcttatagaaaaatgcattaca

SEQ ID NO: 91433 - DNA, 25 bp, Probe sequence
ctccttttagttctatcttatagaa

SEQ ID NO: 91434 - DNA, 25 bp, Probe sequence
ccctccttttagttctatcttatag

SEQ ID NO: 91435 - DNA, 25 bp, Probe sequence
cctccttttagttctatcttataga

SEQ ID NO: 91436 - DNA, 25 bp, Probe sequence
gcaataaacaactaccctcttaaat

SEQ ID NO: 91437 - DNA, 25 bp, Probe sequence
gtaatgacgccattatttcattaaa

SEQ ID NO: 91438 - DNA, 25 bp, Probe sequence
tcgcaataaacaactaccctcttaa

SEQ ID NO: 91439 - DNA, 25 bp, Probe sequence
taaacaactaccctcttaaatcaat

SEQ ID NO: 91440 - DNA, 25 bp, Probe sequence
tttcgcaataaacaactaccctctt

SEQ ID NO: 91441 - DNA, 25 bp, Probe sequence
ttttcgcaataaacaactaccctct

SEQ ID NO: 91442 - DNA, 25 bp, Probe sequence
ttcgcaataaacaactaccctctta

SEQ ID NO: 91443 - DNA, 25 bp, Probe sequence
atttattgctattttaagaattaca

SEQ ID NO: 91444 - DNA, 25 bp, Probe sequence
atagcaattaatttgtatcgatatt

SEQ ID NO: 91445 - DNA, 25 bp, Probe sequence
atctctgttaatggaattatacact

SEQ ID NO: 91446 - DNA, 25 bp, Probe sequence
actaacaaacattttatttattgct

SEQ ID NO: 91447 - DNA, 25 bp, Probe sequence
gaattacaaacgacaacgtacgatt

SEQ ID NO: 91448 - DNA, 25 bp, Probe sequence
gaactctacctaatgtaatcctagc

SEQ ID NO: 91449 - DNA, 25 bp, Probe sequence
gacaacgtacgatttgattgcaaac

SEQ ID NO: 91450 - DNA, 25 bp, Probe sequence
gatatatttaatctctgttaatgga

SEQ ID NO: 91451 - DNA, 25 bp, Probe sequence
gtatcgatattttattatccacaat

SEQ ID NO: 91452 - DNA, 25 bp, Probe sequence
tgattgcaaacattttttattatta

SEQ ID NO: 91453 - DNA, 25 bp, Probe sequence
tacctaatgtaatcctagctttaaa

SEQ ID NO: 91454 - DNA, 25 bp, Probe sequence
tatccacaataatactttactaaca

SEQ ID NO: 91455 - DNA, 25 bp, Probe sequence
tatacactaaaattgcattatagca

SEQ ID NO: 91456 - DNA, 25 bp, Probe sequence
tattaactatataccctttaaagat

SEQ ID NO: 91457 - DNA, 25 bp, Probe sequence
ttattattaatatgaactctaccta

SEQ ID NO: 91458 - DNA, 25 bp, Probe sequence
aggtggcttcttcatgaatcatatg

SEQ ID NO: 91459 - DNA, 25 bp, Probe sequence
accttttaaggtggcttcttcatga

SEQ ID NO: 91460 - DNA, 25 bp, Probe sequence
aactgttgatgaattaattattaat

SEQ ID NO: 91461 - DNA, 25 bp, Probe sequence
caaattatataacatctaccttttt

SEQ ID NO: 91462 - DNA, 25 bp, Probe sequence
ctattttttcgccaagccaaattat

SEQ ID NO: 91463 - DNA, 25 bp, Probe sequence
ccttttaaggtggcttcttcatgaa

SEQ ID NO: 91464 - DNA, 25 bp, Probe sequence
gccaaattatataacatctaccttt

SEQ ID NO: 91465 - DNA, 25 bp, Probe sequence
gtggcttcttcatgaatcatatgat

SEQ ID NO: 91466 - DNA, 25 bp, Probe sequence
ggcttcttcatgaatcatatgatta

SEQ ID NO: 91467 - DNA, 25 bp, Probe sequence
tcgccaagccaaattatataacatc

SEQ ID NO: 91468 - DNA, 25 bp, Probe sequence
taaggtggcttcttcatgaatcata

SEQ ID NO: 91469 - DNA, 25 bp, Probe sequence
tatataacatctacctttttaaaat

SEQ ID NO: 91470 - DNA, 25 bp, Probe sequence
ttttttcgccaagccaaattatata

SEQ ID NO: 91471 - DNA, 25 bp, Probe sequence
ttttaaggtggcttcttcatgaatc

SEQ ID NO: 91472 - DNA, 25 bp, Probe sequence
ttttcgccaagccaaattatataac

SEQ ID NO: 91473 - DNA, 25 bp, Probe sequence
atttgctttgcagccatgcattaat

SEQ ID NO: 91474 - DNA, 25 bp, Probe sequence
ataatttccctgttatattcactaa

SEQ ID NO: 91475 - DNA, 25 bp, Probe sequence
agcattatataccagaattttcagt

SEQ ID NO: 91476 - DNA, 25 bp, Probe sequence
aaagtaatagtccacacctgtttag

SEQ ID NO: 91477 - DNA, 25 bp, Probe sequence
aactcattatttgctttgcagccat

SEQ ID NO: 91478 - DNA, 25 bp, Probe sequence
aatagtccacacctgtttagaatgt

SEQ ID NO: 91479 - DNA, 25 bp, Probe sequence
gatgactttgatattatttattgct

SEQ ID NO: 91480 - DNA, 25 bp, Probe sequence
gttatttttacgacaaactcattat

SEQ ID NO: 91481 - DNA, 25 bp, Probe sequence
gttatttctcctttatatagactca

SEQ ID NO: 91482 - DNA, 25 bp, Probe sequence
gtggactatactagattgcatcatt

SEQ ID NO: 91483 - DNA, 25 bp, Probe sequence
tgaagtaaacgttgtcttaacattt

SEQ ID NO: 91484 - DNA, 25 bp, Probe sequence
taagcataataattttttcgtaata

SEQ ID NO: 91485 - DNA, 25 bp, Probe sequence
taacatttttattgtttttcagctt

SEQ ID NO: 91486 - DNA, 25 bp, Probe sequence
tataaccaatataatttccctgtta

SEQ ID NO: 91487 - DNA, 25 bp, Probe sequence
tattcactaacagcattatatacca

SEQ ID NO: 91488 - DNA, 25 bp, Probe sequence
attaacttgcgatgaacaaactatt

SEQ ID NO: 91489 - DNA, 25 bp, Probe sequence
atttgttgatgggtgtttattgata

SEQ ID NO: 91490 - DNA, 25 bp, Probe sequence
atacagcctacaaccacatagattg

SEQ ID NO: 91491 - DNA, 25 bp, Probe sequence
atcatatctcgtaaacttagtgcca

SEQ ID NO: 91492 - DNA, 25 bp, Probe sequence
acggtataatttgttgatgggtgtt

SEQ ID NO: 91493 - DNA, 25 bp, Probe sequence
acaaccacatagattgtagactata

SEQ ID NO: 91494 - DNA, 25 bp, Probe sequence
aaaaaatacagcctacaaccacata

SEQ ID NO: 91495 - DNA, 25 bp, Probe sequence
aagattatgttacttccaactttca

SEQ ID NO: 91496 - DNA, 25 bp, Probe sequence
aataggtatttatcatatctcgtaa

SEQ ID NO: 91497 - DNA, 25 bp, Probe sequence
gagtcttatatttatcttaattaat

SEQ ID NO: 91498 - DNA, 25 bp, Probe sequence
gattatgttacttccaactttcaaa

SEQ ID NO: 91499 - DNA, 25 bp, Probe sequence
tgttacttccaactttcaaagtaga

SEQ ID NO: 91500 - DNA, 25 bp, Probe sequence
tgcgatgaacaaactattaacaata

SEQ ID NO: 91501 - DNA, 25 bp, Probe sequence
taatcttgagtcttatatttatctt

SEQ ID NO: 91502 - DNA, 25 bp, Probe sequence
tatctcgtaaacttagtgccaattt

SEQ ID NO: 91503 - DNA, 25 bp, Probe sequence
attagcgtctctatatctatgcgga

SEQ ID NO: 91504 - DNA, 25 bp, Probe sequence
agcgtctctatatctatgcggaatt

SEQ ID NO: 91505 - DNA, 25 bp, Probe sequence
acttatatatttagccttatttgta

SEQ ID NO: 91506 - DNA, 25 bp, Probe sequence
aaagcctacaacatgaatcgttgca

SEQ ID NO: 91507 - DNA, 25 bp, Probe sequence
aattataattctacatttttacaat

SEQ ID NO: 91508 - DNA, 25 bp, Probe sequence
cgttgcagactatcatatcgagaca

SEQ ID NO: 91509 - DNA, 25 bp, Probe sequence
gaatcgttgcagactatcatatcga

SEQ ID NO: 91510 - DNA, 25 bp, Probe sequence
gactatcatatcgagacaaagaggt

SEQ ID NO: 91511 - DNA, 25 bp, Probe sequence
gaggtttattagcgtctctatatct

SEQ ID NO: 91512 - DNA, 25 bp, Probe sequence
gattatttattatatttacggggat

SEQ ID NO: 91513 - DNA, 25 bp, Probe sequence
gtattttctatattttaggtgtcag

SEQ ID NO: 91514 - DNA, 25 bp, Probe sequence
gtctctatatctatgcggaatttga

SEQ ID NO: 91515 - DNA, 25 bp, Probe sequence
ggtgtcagaacttatatatttagcc

SEQ ID NO: 91516 - DNA, 25 bp, Probe sequence
tgtataacttataatttactttgga

SEQ ID NO: 91517 - DNA, 25 bp, Probe sequence
tacgtacttttatgtattttctata

SEQ ID NO: 91518 - DNA, 25 bp, Probe sequence
attacttaactttcattatacactt

SEQ ID NO: 91519 - DNA, 25 bp, Probe sequence
agcagtgacacttttacaatgagca

SEQ ID NO: 91520 - DNA, 25 bp, Probe sequence
aaagcattattttattttctgtgat

SEQ ID NO: 91521 - DNA, 25 bp, Probe sequence
aataactcacatttttcttcacgct

SEQ ID NO: 91522 - DNA, 25 bp, Probe sequence
cacgctctttattacttaactttca

SEQ ID NO: 91523 - DNA, 25 bp, Probe sequence
cctccgtcgtgcttttgcactaaat

SEQ ID NO: 91524 - DNA, 25 bp, Probe sequence
gaactatatagtaacattccatttt

SEQ ID NO: 91525 - DNA, 25 bp, Probe sequence
gtaacattccattttaatactaaat

SEQ ID NO: 91526 - DNA, 25 bp, Probe sequence
gtgcttttgcactaaatattttgta

SEQ ID NO: 91527 - DNA, 25 bp, Probe sequence
gtgataatacacattgaactatata

SEQ ID NO: 91528 - DNA, 25 bp, Probe sequence
gggccactagcagcagtgacacttt

SEQ ID NO: 91529 - DNA, 25 bp, Probe sequence
tacacttacttttgatactatttac

SEQ ID NO: 91530 - DNA, 25 bp, Probe sequence
ttataaaagggccactagcagcagt

SEQ ID NO: 91531 - DNA, 25 bp, Probe sequence
tttacttttttaattctgaattgat

SEQ ID NO: 91532 - DNA, 25 bp, Probe sequence
ttttcttcacgctctttattactta

SEQ ID NO: 91533 - DNA, 25 bp, Probe sequence
atatattgttagatctccacaattt

SEQ ID NO: 91534 - DNA, 25 bp, Probe sequence
acaccaactgttatcgatttaaagc

SEQ ID NO: 91535 - DNA, 25 bp, Probe sequence
aataacggctagtgcttttaccaca

SEQ ID NO: 91536 - DNA, 25 bp, Probe sequence
cagccctataataaggactgtttga

SEQ ID NO: 91537 - DNA, 25 bp, Probe sequence
ctagtgcttttaccacaccaactgt

SEQ ID NO: 91538 - DNA, 25 bp, Probe sequence
ccaactgttatcgatttaaagcata

SEQ ID NO: 91539 - DNA, 25 bp, Probe sequence
gcttttaccacaccaactgttatcg

SEQ ID NO: 91540 - DNA, 25 bp, Probe sequence
gatctccacaatttattggacaaaa

SEQ ID NO: 91541 - DNA, 25 bp, Probe sequence
gttagatctccacaatttattggac

SEQ ID NO: 91542 - DNA, 25 bp, Probe sequence
gtgcttttaccacaccaactgttat

SEQ ID NO: 91543 - DNA, 25 bp, Probe sequence
taacggctagtgcttttaccacacc

SEQ ID NO: 91544 - DNA, 25 bp, Probe sequence
taaagcataaaaaaacagccctata

SEQ ID NO: 91545 - DNA, 25 bp, Probe sequence
taccacaccaactgttatcgattta

SEQ ID NO: 91546 - DNA, 25 bp, Probe sequence
tagtgcttttaccacaccaactgtt

SEQ ID NO: 91547 - DNA, 25 bp, Probe sequence
tttaccacaccaactgttatcgatt

SEQ ID NO: 91548 - DNA, 25 bp, Probe sequence
attacttcttgttatcgccatatac

SEQ ID NO: 91549 - DNA, 25 bp, Probe sequence
atacagactttaattctcgtcatta

SEQ ID NO: 91550 - DNA, 25 bp, Probe sequence
agttctgtattggcgctttttttat

SEQ ID NO: 91551 - DNA, 25 bp, Probe sequence
acttcttgttatcgccatatacaga

SEQ ID NO: 91552 - DNA, 25 bp, Probe sequence
acattacttcttgttatcgccatat

SEQ ID NO: 91553 - DNA, 25 bp, Probe sequence
cagactttaattctcgtcattatta

SEQ ID NO: 91554 - DNA, 25 bp, Probe sequence
gatgtggtatcctattattgttaaa

SEQ ID NO: 91555 - DNA, 25 bp, Probe sequence
gttatcgccatatacagactttaat

SEQ ID NO: 91556 - DNA, 25 bp, Probe sequence
gtagtaagatattatgcgatgtggt

SEQ ID NO: 91557 - DNA, 25 bp, Probe sequence
ggtatcctattattgttaaacattt

SEQ ID NO: 91558 - DNA, 25 bp, Probe sequence
tctgtattggcgctttttttattca

SEQ ID NO: 91559 - DNA, 25 bp, Probe sequence
tatgcgatgtggtatcctattattg

SEQ ID NO: 91560 - DNA, 25 bp, Probe sequence
tattctcaataattaatcagtctta

SEQ ID NO: 91561 - DNA, 25 bp, Probe sequence
tattggcgctttttttattcaaaat

SEQ ID NO: 91562 - DNA, 25 bp, Probe sequence
ttctcgtcattattaaagttctgta

SEQ ID NO: 91563 - DNA, 25 bp, Probe sequence
atgatatttcaggaggcccaatatt

SEQ ID NO: 91564 - DNA, 25 bp, Probe sequence
acaaatgatatttcaggaggcccaa

SEQ ID NO: 91565 - DNA, 25 bp, Probe sequence
aaatgatatttcaggaggcccaata

SEQ ID NO: 91566 - DNA, 25 bp, Probe sequence
aatgatatttcaggaggcccaatat

SEQ ID NO: 91567 - DNA, 25 bp, Probe sequence
aattagtttgtgttttgcaataaat

SEQ ID NO: 91568 - DNA, 25 bp, Probe sequence
caaatgatatttcaggaggcccaat

SEQ ID NO: 91569 - DNA, 25 bp, Probe sequence
cacagtttcatcaaatagttaaatt

SEQ ID NO: 91570 - DNA, 25 bp, Probe sequence
gttaaattagtttgtgttttgcaat

SEQ ID NO: 91571 - DNA, 25 bp, Probe sequence
gtttgtgttttgcaataaattgggt

SEQ ID NO: 91572 - DNA, 25 bp, Probe sequence
gtgttttgcaataaattgggtatag

SEQ ID NO: 91573 - DNA, 25 bp, Probe sequence
gggtatagattacaaatgatatttc

SEQ ID NO: 91574 - DNA, 25 bp, Probe sequence
taaattagtttgtgttttgcaataa

SEQ ID NO: 91575 - DNA, 25 bp, Probe sequence
tacaaatgatatttcaggaggccca

SEQ ID NO: 91576 - DNA, 25 bp, Probe sequence
tagtttgtgttttgcaataaattgg

SEQ ID NO: 91577 - DNA, 25 bp, Probe sequence
tagttaaattagtttgtgttttgca

SEQ ID NO: 91578 - DNA, 25 bp, Probe sequence
atatttcttcaacaaggagctttta

SEQ ID NO: 91579 - DNA, 25 bp, Probe sequence
atatccagtctgaaacgtctcaatg

SEQ ID NO: 91580 - DNA, 25 bp, Probe sequence
agattacaattctaatttaagacta

SEQ ID NO: 91581 - DNA, 25 bp, Probe sequence
agacatttcacactctcatacttta

SEQ ID NO: 91582 - DNA, 25 bp, Probe sequence
acgtctcaatgatgtttcagactgt

SEQ ID NO: 91583 - DNA, 25 bp, Probe sequence
aatagacatttcacactctcatact

SEQ ID NO: 91584 - DNA, 25 bp, Probe sequence
cacactctcatactttaatatttaa

SEQ ID NO: 91585 - DNA, 25 bp, Probe sequence
cagtctgaaacgtctcaatgatgtt

SEQ ID NO: 91586 - DNA, 25 bp, Probe sequence
catttcacactctcatactttaata

SEQ ID NO: 91587 - DNA, 25 bp, Probe sequence
gactgttttttattcttaatagaca

SEQ ID NO: 91588 - DNA, 25 bp, Probe sequence
gatatgttttagtcttacaagctta

SEQ ID NO: 91589 - DNA, 25 bp, Probe sequence
tgtttcagactgttttttattctta

SEQ ID NO: 91590 - DNA, 25 bp, Probe sequence
tgttttagtcttacaagcttattaa

SEQ ID NO: 91591 - DNA, 25 bp, Probe sequence
tgaaattcattttatatccagtctg

SEQ ID NO: 91592 - DNA, 25 bp, Probe sequence
taagactatttacatatatttcttc

SEQ ID NO: 91593 - DNA, 25 bp, Probe sequence
atttttatactagtaggtgtcagtc

SEQ ID NO: 91594 - DNA, 25 bp, Probe sequence
atatgctcacttgtttgaattaata

SEQ ID NO: 91595 - DNA, 25 bp, Probe sequence
atacatccctatatatgctcacttg

SEQ ID NO: 91596 - DNA, 25 bp, Probe sequence
atcttatcagaaaactagtatttgt

SEQ ID NO: 91597 - DNA, 25 bp, Probe sequence
atccctatatatgctcacttgtttg

SEQ ID NO: 91598 - DNA, 25 bp, Probe sequence
aagtgttattattaatcttatcaga

SEQ ID NO: 91599 - DNA, 25 bp, Probe sequence
aataaactttagcattctacaaata

SEQ ID NO: 91600 - DNA, 25 bp, Probe sequence
gcacatttttttgatatctgattct

SEQ ID NO: 91601 - DNA, 25 bp, Probe sequence
gaagctatttttatactagtaggtg

SEQ ID NO: 91602 - DNA, 25 bp, Probe sequence
gtatgtaaatattcttttcatatta

SEQ ID NO: 91603 - DNA, 25 bp, Probe sequence
gtgattttgcacatttttttgatat

SEQ ID NO: 91604 - DNA, 25 bp, Probe sequence
gtgttatcatatttattaagaagct

SEQ ID NO: 91605 - DNA, 25 bp, Probe sequence
taacgaattatacaactttaagagt

SEQ ID NO: 91606 - DNA, 25 bp, Probe sequence
taagcgctatttaaagtgttattat

SEQ ID NO: 91607 - DNA, 25 bp, Probe sequence
ttcatattaatactatacatcccta

SEQ ID NO: 91608 - DNA, 25 bp, Probe sequence
atgtattctctttttattaaaatga

SEQ ID NO: 91609 - DNA, 25 bp, Probe sequence
acctttgcttttgatgtacattttt

SEQ ID NO: 91610 - DNA, 25 bp, Probe sequence
aaacctttgcttttgatgtacattt

SEQ ID NO: 91611 - DNA, 25 bp, Probe sequence
aacgcaatgaagagtacagaatttt

SEQ ID NO: 91612 - DNA, 25 bp, Probe sequence
caataacacctcttcaataaaaagt

SEQ ID NO: 91613 - DNA, 25 bp, Probe sequence
gcgaaaacctttgcttttgatgtac

SEQ ID NO: 91614 - DNA, 25 bp, Probe sequence
gctcaaaatgtattctctttttatt

SEQ ID NO: 91615 - DNA, 25 bp, Probe sequence
gcttttgatgtacatttttttcata

SEQ ID NO: 91616 - DNA, 25 bp, Probe sequence
gagtaccaaatatattaaaccatta

SEQ ID NO: 91617 - DNA, 25 bp, Probe sequence
gatgtacatttttttcataagtaat

SEQ ID NO: 91618 - DNA, 25 bp, Probe sequence
gataatgtgacggggtaaaacgcaa

SEQ ID NO: 91619 - DNA, 25 bp, Probe sequence
gtagcgaaaacctttgcttttgatg

SEQ ID NO: 91620 - DNA, 25 bp, Probe sequence
gtgacggggtaaaacgcaatgaaga

SEQ ID NO: 91621 - DNA, 25 bp, Probe sequence
tgatagctcaaaatgtattctcttt

SEQ ID NO: 91622 - DNA, 25 bp, Probe sequence
tcggtagcgaaaacctttgcttttg

SEQ ID NO: 91623 - DNA, 25 bp, Probe sequence
atacttgtgtctatgtataacgctt

SEQ ID NO: 91624 - DNA, 25 bp, Probe sequence
acttgtgtctatgtataacgcttta

SEQ ID NO: 91625 - DNA, 25 bp, Probe sequence
aaagacatacttgtgtctatgtata

SEQ ID NO: 91626 - DNA, 25 bp, Probe sequence
aaaagcgttatacaaaagacatact

SEQ ID NO: 91627 - DNA, 25 bp, Probe sequence
aagcgttatacaaaagacatacttg

SEQ ID NO: 91628 - DNA, 25 bp, Probe sequence
aagacatacttgtgtctatgtataa

SEQ ID NO: 91629 - DNA, 25 bp, Probe sequence
catacttgtgtctatgtataacgct

SEQ ID NO: 91630 - DNA, 25 bp, Probe sequence
cttgtgtctatgtataacgctttat

SEQ ID NO: 91631 - DNA, 25 bp, Probe sequence
gcgttatgtagttgtattttaaaag

SEQ ID NO: 91632 - DNA, 25 bp, Probe sequence
gacatacttgtgtctatgtataacg

SEQ ID NO: 91633 - DNA, 25 bp, Probe sequence
gtgtctatgtataacgctttattta

SEQ ID NO: 91634 - DNA, 25 bp, Probe sequence
tgtgtctatgtataacgctttattt

SEQ ID NO: 91635 - DNA, 25 bp, Probe sequence
tgtagttgtattttaaaagcgttat

SEQ ID NO: 91636 - DNA, 25 bp, Probe sequence
tacttgtgtctatgtataacgcttt

SEQ ID NO: 91637 - DNA, 25 bp, Probe sequence
ttgtgtctatgtataacgctttatt

SEQ ID NO: 91638 - DNA, 25 bp, Probe sequence
attctacatttctcataaattcaaa

SEQ ID NO: 91639 - DNA, 25 bp, Probe sequence
ataggttctatttttcatacaacta

SEQ ID NO: 91640 - DNA, 25 bp, Probe sequence
ataagttttttcagaatattctatg

SEQ ID NO: 91641 - DNA, 25 bp, Probe sequence
acagttttatatattctacatttct

SEQ ID NO: 91642 - DNA, 25 bp, Probe sequence
aaattcaaatcatataggttctatt

SEQ ID NO: 91643 - DNA, 25 bp, Probe sequence
ctatttttcatacaactactctact

SEQ ID NO: 91644 - DNA, 25 bp, Probe sequence
ctattgagtagttgttttttatttg

SEQ ID NO: 91645 - DNA, 25 bp, Probe sequence
gaatattctatgttttaggggtgtc

SEQ ID NO: 91646 - DNA, 25 bp, Probe sequence
gttttatatattctacatttctcat

SEQ ID NO: 91647 - DNA, 25 bp, Probe sequence
ggttctatttttcatacaactactc

SEQ ID NO: 91648 - DNA, 25 bp, Probe sequence
tatatattctacatttctcataaat

SEQ ID NO: 91649 - DNA, 25 bp, Probe sequence
tattctatgttttaggggtgtcaaa

SEQ ID NO: 91650 - DNA, 25 bp, Probe sequence
tttttcatacaactactctactatt

SEQ ID NO: 91651 - DNA, 25 bp, Probe sequence
ttcatacaactactctactattgag

SEQ ID NO: 91652 - DNA, 25 bp, Probe sequence
ttgagtagttgttttttatttgata

SEQ ID NO: 91653 - DNA, 25 bp, Probe sequence
agtgtcgatcaataaccaattccat

SEQ ID NO: 91654 - DNA, 25 bp, Probe sequence
aaaagtccagtgtcgatcaataacc

SEQ ID NO: 91655 - DNA, 25 bp, Probe sequence
aacgtctccaaataaaagtccagtg

SEQ ID NO: 91656 - DNA, 25 bp, Probe sequence
aaccaattccataatttcctgaact

SEQ ID NO: 91657 - DNA, 25 bp, Probe sequence
aagtccagtgtcgatcaataaccaa

SEQ ID NO: 91658 - DNA, 25 bp, Probe sequence
aataaccaattccataatttcctga

SEQ ID NO: 91659 - DNA, 25 bp, Probe sequence
caattccataatttcctgaacttaa

SEQ ID NO: 91660 - DNA, 25 bp, Probe sequence
gaatgtgcatataaatcagtgattg

SEQ ID NO: 91661 - DNA, 25 bp, Probe sequence
gataatccatttacaagaatgtgca

SEQ ID NO: 91662 - DNA, 25 bp, Probe sequence
gtctccaaataaaagtccagtgtcg

SEQ ID NO: 91663 - DNA, 25 bp, Probe sequence
gtcgatcaataaccaattccataat

SEQ ID NO: 91664 - DNA, 25 bp, Probe sequence
gtccagtgtcgatcaataaccaatt

SEQ ID NO: 91665 - DNA, 25 bp, Probe sequence
gtgattgcaaaattttaataaacat

SEQ ID NO: 91666 - DNA, 25 bp, Probe sequence
tccataatttcctgaacttaaaaat

SEQ ID NO: 91667 - DNA, 25 bp, Probe sequence
tagtacaaaatctttcttaataatg

SEQ ID NO: 91668 - DNA, 25 bp, Probe sequence
attcgtgactgaaatttctggcaat

SEQ ID NO: 91669 - DNA, 25 bp, Probe sequence
atttctggcaatatttaactgaaaa

SEQ ID NO: 91670 - DNA, 25 bp, Probe sequence
cataaaattcaaatttgccaaccaa

SEQ ID NO: 91671 - DNA, 25 bp, Probe sequence
gaaatttctggcaatatttaactga

SEQ ID NO: 91672 - DNA, 25 bp, Probe sequence
gttattttttctattcgtgactgaa

SEQ ID NO: 91673 - DNA, 25 bp, Probe sequence
gtgactgaaatttctggcaatattt

SEQ ID NO: 91674 - DNA, 25 bp, Probe sequence
ggttattttttctattcgtgactga

SEQ ID NO: 91675 - DNA, 25 bp, Probe sequence
tggttattttttctattcgtgactg

SEQ ID NO: 91676 - DNA, 25 bp, Probe sequence
tctattcgtgactgaaatttctggc

SEQ ID NO: 91677 - DNA, 25 bp, Probe sequence
tcgtgactgaaatttctggcaatat

SEQ ID NO: 91678 - DNA, 25 bp, Probe sequence
tcaacgttattaataaaattcacat

SEQ ID NO: 91679 - DNA, 25 bp, Probe sequence
taaagagattattcaacgttattaa

SEQ ID NO: 91680 - DNA, 25 bp, Probe sequence
tattttttctattcgtgactgaaat

SEQ ID NO: 91681 - DNA, 25 bp, Probe sequence
tattcgtgactgaaatttctggcaa

SEQ ID NO: 91682 - DNA, 25 bp, Probe sequence
ttggttattttttctattcgtgact

SEQ ID NO: 91683 - DNA, 25 bp, Probe sequence
atgattaaggtattttcgaatgggt

SEQ ID NO: 91684 - DNA, 25 bp, Probe sequence
actttttatccttcaatcaaacaat

SEQ ID NO: 91685 - DNA, 25 bp, Probe sequence
acaacaactttttatccttcaatca

SEQ ID NO: 91686 - DNA, 25 bp, Probe sequence
aaatccctcatttcagatactcatt

SEQ ID NO: 91687 - DNA, 25 bp, Probe sequence
aatccctcatttcagatactcatta

SEQ ID NO: 91688 - DNA, 25 bp, Probe sequence
caactttttatccttcaatcaaaca

SEQ ID NO: 91689 - DNA, 25 bp, Probe sequence
caacaactttttatccttcaatcaa

SEQ ID NO: 91690 - DNA, 25 bp, Probe sequence
ctcatttcagatactcattattttt

SEQ ID NO: 91691 - DNA, 25 bp, Probe sequence
gatactcattatttttattgtaaac

SEQ ID NO: 91692 - DNA, 25 bp, Probe sequence
gtaaatccctcatttcagatactca

SEQ ID NO: 91693 - DNA, 25 bp, Probe sequence
ggtattttcgaatgggtaaagcata

SEQ ID NO: 91694 - DNA, 25 bp, Probe sequence
tccttcaatcaaacaatgctataaa

SEQ ID NO: 91695 - DNA, 25 bp, Probe sequence
tccctcatttcagatactcattatt

SEQ ID NO: 91696 - DNA, 25 bp, Probe sequence
ttatccttcaatcaaacaatgctat

SEQ ID NO: 91697 - DNA, 25 bp, Probe sequence
ttcagatactcattatttttattgt

SEQ ID NO: 91698 - DNA, 25 bp, Probe sequence
atacttctcaattataagacagcac

SEQ ID NO: 91699 - DNA, 25 bp, Probe sequence
atcgctcctccacgaacaatgataa

SEQ ID NO: 91700 - DNA, 25 bp, Probe sequence
acgaacaatgataatacttctcaat

SEQ ID NO: 91701 - DNA, 25 bp, Probe sequence
acttctcaattataagacagcactt

SEQ ID NO: 91702 - DNA, 25 bp, Probe sequence
aagacagcacttacacaaaagcaac

SEQ ID NO: 91703 - DNA, 25 bp, Probe sequence
aatcgctcctccacgaacaatgata

SEQ ID NO: 91704 - DNA, 25 bp, Probe sequence
cacaaaagcaacctaattcatttta

SEQ ID NO: 91705 - DNA, 25 bp, Probe sequence
cagcacttacacaaaagcaacctaa

SEQ ID NO: 91706 - DNA, 25 bp, Probe sequence
cgctcctccacgaacaatgataata

SEQ ID NO: 91707 - DNA, 25 bp, Probe sequence
gctcctccacgaacaatgataatac

SEQ ID NO: 91708 - DNA, 25 bp, Probe sequence
gcacttacacaaaagcaacctaatt

SEQ ID NO: 91709 - DNA, 25 bp, Probe sequence
gacagcacttacacaaaagcaacct

SEQ ID NO: 91710 - DNA, 25 bp, Probe sequence
tccacgaacaatgataatacttctc

SEQ ID NO: 91711 - DNA, 25 bp, Probe sequence
tcctccacgaacaatgataatactt

SEQ ID NO: 91712 - DNA, 25 bp, Probe sequence
tacacaaaagcaacctaattcattt

SEQ ID NO: 91713 - DNA, 25 bp, Probe sequence
atacttcacaataaaaagctgagac

SEQ ID NO: 91714 - DNA, 25 bp, Probe sequence
atctctaactcgatagatgtccatc

SEQ ID NO: 91715 - DNA, 25 bp, Probe sequence
aagctgagactgtgattgtaccgac

SEQ ID NO: 91716 - DNA, 25 bp, Probe sequence
aattcatgtctcagcttttattaat

SEQ ID NO: 91717 - DNA, 25 bp, Probe sequence
catcaattcatgtctcagcttttat

SEQ ID NO: 91718 - DNA, 25 bp, Probe sequence
gactgtgattgtaccgactctagta

SEQ ID NO: 91719 - DNA, 25 bp, Probe sequence
gagactgtgattgtaccgactctag

SEQ ID NO: 91720 - DNA, 25 bp, Probe sequence
gatgtccatcaattcatgtctcagc

SEQ ID NO: 91721 - DNA, 25 bp, Probe sequence
gtaccgactctagtaaattagatta

SEQ ID NO: 91722 - DNA, 25 bp, Probe sequence
gtctcagcttttattaatgttttct

SEQ ID NO: 91723 - DNA, 25 bp, Probe sequence
gtccatcaattcatgtctcagcttt

SEQ ID NO: 91724 - DNA, 25 bp, Probe sequence
gtgattgtaccgactctagtaaatt

SEQ ID NO: 91725 - DNA, 25 bp, Probe sequence
tcagcttttattaatgttttctata

SEQ ID NO: 91726 - DNA, 25 bp, Probe sequence
tacaaatgtgtatatacttcacaat

SEQ ID NO: 91727 - DNA, 25 bp, Probe sequence
tagattaaatctctaactcgataga

SEQ ID NO: 91728 - DNA, 25 bp, Probe sequence
attttccatagcaaaaggctttcat

SEQ ID NO: 91729 - DNA, 25 bp, Probe sequence
atatcattttccatagcaaaaggct

SEQ ID NO: 91730 - DNA, 25 bp, Probe sequence
atcattttccatagcaaaaggcttt

SEQ ID NO: 91731 - DNA, 25 bp, Probe sequence
agcaaaaggctttcattttgaagct

SEQ ID NO: 91732 - DNA, 25 bp, Probe sequence
aaattattaaactatctagaggagt

SEQ ID NO: 91733 - DNA, 25 bp, Probe sequence
aaggctttcattttgaagctaaaat

SEQ ID NO: 91734 - DNA, 25 bp, Probe sequence
aatatatcattttccatagcaaaag

SEQ ID NO: 91735 - DNA, 25 bp, Probe sequence
cattttccatagcaaaaggctttca

SEQ ID NO: 91736 - DNA, 25 bp, Probe sequence
ccatagcaaaaggctttcattttga

SEQ ID NO: 91737 - DNA, 25 bp, Probe sequence
gcaaaaggctttcattttgaagcta

SEQ ID NO: 91738 - DNA, 25 bp, Probe sequence
gactgcaacctcctttatgtattta

SEQ ID NO: 91739 - DNA, 25 bp, Probe sequence
ggctttcattttgaagctaaaattt

SEQ ID NO: 91740 - DNA, 25 bp, Probe sequence
taaactatctagaggagttgttaca

SEQ ID NO: 91741 - DNA, 25 bp, Probe sequence
ttttccatagcaaaaggctttcatt

SEQ ID NO: 91742 - DNA, 25 bp, Probe sequence
ttccatagcaaaaggctttcatttt

SEQ ID NO: 91743 - DNA, 25 bp, Probe sequence
atctttacatcattaatgatgccat

SEQ ID NO: 91744 - DNA, 25 bp, Probe sequence
atcccctcctaattaatctttacat

SEQ ID NO: 91745 - DNA, 25 bp, Probe sequence
acatgtaatgaatctaaatatcgag

SEQ ID NO: 91746 - DNA, 25 bp, Probe sequence
aacaattgtatagcttatttcattt

SEQ ID NO: 91747 - DNA, 25 bp, Probe sequence
aaggctagatgctattcaactatat

SEQ ID NO: 91748 - DNA, 25 bp, Probe sequence
cccctcctaattaatctttacatca

SEQ ID NO: 91749 - DNA, 25 bp, Probe sequence
cctcctaattaatctttacatcatt

SEQ ID NO: 91750 - DNA, 25 bp, Probe sequence
gccataaggctagatgctattcaac

SEQ ID NO: 91751 - DNA, 25 bp, Probe sequence
gctagatgctattcaactatattta

SEQ ID NO: 91752 - DNA, 25 bp, Probe sequence
gagaatcccctcctaattaatcttt

SEQ ID NO: 91753 - DNA, 25 bp, Probe sequence
gatgccataaggctagatgctattc

SEQ ID NO: 91754 - DNA, 25 bp, Probe sequence
gtatagcttatttcattttacatgt

SEQ ID NO: 91755 - DNA, 25 bp, Probe sequence
tcccctcctaattaatctttacatc

SEQ ID NO: 91756 - DNA, 25 bp, Probe sequence
tcgagatatttagtaaacgtttaca

SEQ ID NO: 91757 - DNA, 25 bp, Probe sequence
tagcttatttcattttacatgtaat

SEQ ID NO: 91758 - DNA, 25 bp, Probe sequence
ataaactcctcaatcttagattaag

SEQ ID NO: 91759 - DNA, 25 bp, Probe sequence
aaataaactcctcaatcttagatta

SEQ ID NO: 91760 - DNA, 25 bp, Probe sequence
aaactcctcaatcttagattaagga

SEQ ID NO: 91761 - DNA, 25 bp, Probe sequence
aaaaataaactcctcaatcttagat

SEQ ID NO: 91762 - DNA, 25 bp, Probe sequence
aaaataaactcctcaatcttagatt

SEQ ID NO: 91763 - DNA, 25 bp, Probe sequence
aataaactcctcaatcttagattaa

SEQ ID NO: 91764 - DNA, 25 bp, Probe sequence
cttagattaaggagttacacggtga

SEQ ID NO: 91765 - DNA, 25 bp, Probe sequence
cagactaaaaataaactcctcaatc

SEQ ID NO: 91766 - DNA, 25 bp, Probe sequence
ctcagactaaaaataaactcctcaa

SEQ ID NO: 91767 - DNA, 25 bp, Probe sequence
gactaaaaataaactcctcaatctt

SEQ ID NO: 91768 - DNA, 25 bp, Probe sequence
taaactcctcaatcttagattaagg

SEQ ID NO: 91769 - DNA, 25 bp, Probe sequence
taaaaataaactcctcaatcttaga

SEQ ID NO: 91770 - DNA, 25 bp, Probe sequence
tactcagactaaaaataaactcctc

SEQ ID NO: 91771 - DNA, 25 bp, Probe sequence
tattatttacttactcagactaaaa

SEQ ID NO: 91772 - DNA, 25 bp, Probe sequence
ttatttacttactcagactaaaaat

SEQ ID NO: 91773 - DNA, 25 bp, Probe sequence
attttgaagaaaacgtccatctgaa

SEQ ID NO: 91774 - DNA, 25 bp, Probe sequence
acgtccatctgaagtgtcaagtgca

SEQ ID NO: 91775 - DNA, 25 bp, Probe sequence
cattctttcattacttaccacttta

SEQ ID NO: 91776 - DNA, 25 bp, Probe sequence
cccattcctactttatcgacattct

SEQ ID NO: 91777 - DNA, 25 bp, Probe sequence
gacaatacaacagtgcaactttatt

SEQ ID NO: 91778 - DNA, 25 bp, Probe sequence
gacagtggcttctcttatcaagttt

SEQ ID NO: 91779 - DNA, 25 bp, Probe sequence
gatacaatcatattcagttacataa

SEQ ID NO: 91780 - DNA, 25 bp, Probe sequence
gtaaagacagtggcttctcttatca

SEQ ID NO: 91781 - DNA, 25 bp, Probe sequence
ggcttctcttatcaagtttcaaaac

SEQ ID NO: 91782 - DNA, 25 bp, Probe sequence
tccctttagacaattttatccaaag

SEQ ID NO: 91783 - DNA, 25 bp, Probe sequence
tcgacattctttcattacttaccac

SEQ ID NO: 91784 - DNA, 25 bp, Probe sequence
tcagttacataaggaggtttcaatt

SEQ ID NO: 91785 - DNA, 25 bp, Probe sequence
taaagtcactgtcctttatcgcagc

SEQ ID NO: 91786 - DNA, 25 bp, Probe sequence
taccactttagatgttttttcgttg

SEQ ID NO: 91787 - DNA, 25 bp, Probe sequence
ttatcgcagcctttactttttagta

SEQ ID NO: 91788 - DNA, 25 bp, Probe sequence
attcatcatatccaccaaacatcgt

SEQ ID NO: 91789 - DNA, 25 bp, Probe sequence
atatccaccaaacatcgtacatctt

SEQ ID NO: 91790 - DNA, 25 bp, Probe sequence
atcatatccaccaaacatcgtacat

SEQ ID NO: 91791 - DNA, 25 bp, Probe sequence
atccaccaaacatcgtacatcttat

SEQ ID NO: 91792 - DNA, 25 bp, Probe sequence
accaaacatcgtacatcttatcaag

SEQ ID NO: 91793 - DNA, 25 bp, Probe sequence
acatcgtacatcttatcaagagtaa

SEQ ID NO: 91794 - DNA, 25 bp, Probe sequence
aattcatcatatccaccaaacatcg

SEQ ID NO: 91795 - DNA, 25 bp, Probe sequence
caaacatcgtacatcttatcaagag

SEQ ID NO: 91796 - DNA, 25 bp, Probe sequence
catatccaccaaacatcgtacatct

SEQ ID NO: 91797 - DNA, 25 bp, Probe sequence
ccaccaaacatcgtacatcttatca

SEQ ID NO: 91798 - DNA, 25 bp, Probe sequence
tccaccaaacatcgtacatcttatc

SEQ ID NO: 91799 - DNA, 25 bp, Probe sequence
tcatatccaccaaacatcgtacatc

SEQ ID NO: 91800 - DNA, 25 bp, Probe sequence
tcatcatatccaccaaacatcgtac

SEQ ID NO: 91801 - DNA, 25 bp, Probe sequence
taattcatcatatccaccaaacatc

SEQ ID NO: 91802 - DNA, 25 bp, Probe sequence
tatccaccaaacatcgtacatctta

SEQ ID NO: 91803 - DNA, 25 bp, Probe sequence
atctatagatactacacttattaaa

SEQ ID NO: 91804 - DNA, 25 bp, Probe sequence
agatactacacttattaaagtaata

SEQ ID NO: 91805 - DNA, 25 bp, Probe sequence
actccctagattgatctatagatac

SEQ ID NO: 91806 - DNA, 25 bp, Probe sequence
aaagtaatatatttttatgattctc

SEQ ID NO: 91807 - DNA, 25 bp, Probe sequence
cactccctagattgatctatagata

SEQ ID NO: 91808 - DNA, 25 bp, Probe sequence
ctatagatactacacttattaaagt

SEQ ID NO: 91809 - DNA, 25 bp, Probe sequence
ctccctagattgatctatagatact

SEQ ID NO: 91810 - DNA, 25 bp, Probe sequence
cccactccctagattgatctataga

SEQ ID NO: 91811 - DNA, 25 bp, Probe sequence
ccactccctagattgatctatagat

SEQ ID NO: 91812 - DNA, 25 bp, Probe sequence
gatctatagatactacacttattaa

SEQ ID NO: 91813 - DNA, 25 bp, Probe sequence
gattgatctatagatactacactta

SEQ ID NO: 91814 - DNA, 25 bp, Probe sequence
tgatctatagatactacacttatta

SEQ ID NO: 91815 - DNA, 25 bp, Probe sequence
tcccactccctagattgatctatag

SEQ ID NO: 91816 - DNA, 25 bp, Probe sequence
tagattgatctatagatactacact

SEQ ID NO: 91817 - DNA, 25 bp, Probe sequence
ttgatctatagatactacacttatt

SEQ ID NO: 91818 - DNA, 25 bp, Probe sequence
attagtatttcttatgcatgagttt

SEQ ID NO: 91819 - DNA, 25 bp, Probe sequence
atttcttatgcatgagttttactca

SEQ ID NO: 91820 - DNA, 25 bp, Probe sequence
atacacattagctgtggcttatgaa

SEQ ID NO: 91821 - DNA, 25 bp, Probe sequence
agttttactcatgtattcctatttt

SEQ ID NO: 91822 - DNA, 25 bp, Probe sequence
aaattagtatttcttatgcatgagt

SEQ ID NO: 91823 - DNA, 25 bp, Probe sequence
aaatacacattagctgtggcttatg

SEQ ID NO: 91824 - DNA, 25 bp, Probe sequence
gagttttactcatgtattcctattt

SEQ ID NO: 91825 - DNA, 25 bp, Probe sequence
gttttactcatgtattcctattttt

SEQ ID NO: 91826 - DNA, 25 bp, Probe sequence
gtattcctatttttaaatacacatt

SEQ ID NO: 91827 - DNA, 25 bp, Probe sequence
tgagttttactcatgtattcctatt

SEQ ID NO: 91828 - DNA, 25 bp, Probe sequence
tactcatgtattcctatttttaaat

SEQ ID NO: 91829 - DNA, 25 bp, Probe sequence
tagtatttcttatgcatgagtttta

SEQ ID NO: 91830 - DNA, 25 bp, Probe sequence
tatttcttatgcatgagttttactc

SEQ ID NO: 91831 - DNA, 25 bp, Probe sequence
tttactcatgtattcctatttttaa

SEQ ID NO: 91832 - DNA, 25 bp, Probe sequence
ttactcatgtattcctatttttaaa

SEQ ID NO: 91833 - DNA, 25 bp, Probe sequence
atacacctataacaaacttttcaat

SEQ ID NO: 91834 - DNA, 25 bp, Probe sequence
atctgtcactgtatcatttcacaaa

SEQ ID NO: 91835 - DNA, 25 bp, Probe sequence
acataagcagacaaaggctaagtca

SEQ ID NO: 91836 - DNA, 25 bp, Probe sequence
aaatcaataaacatctgtcactgta

SEQ ID NO: 91837 - DNA, 25 bp, Probe sequence
aaatcaacatcctaaaatctacaat

SEQ ID NO: 91838 - DNA, 25 bp, Probe sequence
aacatctgtcactgtatcatttcac

SEQ ID NO: 91839 - DNA, 25 bp, Probe sequence
aactcaatgtttgactagctggaac

SEQ ID NO: 91840 - DNA, 25 bp, Probe sequence
aataaacatctgtcactgtatcatt

SEQ ID NO: 91841 - DNA, 25 bp, Probe sequence
catcctaaaatctacaatgttatat

SEQ ID NO: 91842 - DNA, 25 bp, Probe sequence
catcatcaccctttaaaatcaataa

SEQ ID NO: 91843 - DNA, 25 bp, Probe sequence
gtatcatttcacaaaattggtatga

SEQ ID NO: 91844 - DNA, 25 bp, Probe sequence
gtcactgtatcatttcacaaaattg

SEQ ID NO: 91845 - DNA, 25 bp, Probe sequence
ggaacatttaacataagcagacaaa

SEQ ID NO: 91846 - DNA, 25 bp, Probe sequence
ggctaagtcaaaaatcaacatccta

SEQ ID NO: 91847 - DNA, 25 bp, Probe sequence
ttgactagctggaacatttaacata

SEQ ID NO: 91848 - DNA, 25 bp, Probe sequence
ataagacggttgccgggcttcgtag

SEQ ID NO: 91849 - DNA, 25 bp, Probe sequence
atagtagtattgtttctctcatctt

SEQ ID NO: 91850 - DNA, 25 bp, Probe sequence
atgtgaattggcaccatttctatat

SEQ ID NO: 91851 - DNA, 25 bp, Probe sequence
agtagtattgtttctctcatcttca

SEQ ID NO: 91852 - DNA, 25 bp, Probe sequence
agagtttacgcatcatttaatttgt

SEQ ID NO: 91853 - DNA, 25 bp, Probe sequence
ctctcgataagagtttacgcatcat

SEQ ID NO: 91854 - DNA, 25 bp, Probe sequence
ctccaccactctcgataagagttta

SEQ ID NO: 91855 - DNA, 25 bp, Probe sequence
ctccctgtgttgcttaataaaataa

SEQ ID NO: 91856 - DNA, 25 bp, Probe sequence
gtttctctcatcttcaaaagttaaa

SEQ ID NO: 91857 - DNA, 25 bp, Probe sequence
gtattgtttctctcatcttcaaaag

SEQ ID NO: 91858 - DNA, 25 bp, Probe sequence
tgtattaatcctaacaccttagtaa

SEQ ID NO: 91859 - DNA, 25 bp, Probe sequence
taatttgtattaatcctaacacctt

SEQ ID NO: 91860 - DNA, 25 bp, Probe sequence
taaaaaatgctttctcaatatcgat

SEQ ID NO: 91861 - DNA, 25 bp, Probe sequence
ttggcaccatttctatataagacgg

SEQ ID NO: 91862 - DNA, 25 bp, Probe sequence
ttcctccctgtgttgcttaataaaa

SEQ ID NO: 91863 - DNA, 25 bp, Probe sequence
atttttgatattgatttgacgtcat

SEQ ID NO: 91864 - DNA, 25 bp, Probe sequence
atcacgttactgagccattaatatg

SEQ ID NO: 91865 - DNA, 25 bp, Probe sequence
aaaagcccagcaacatcacgttact

SEQ ID NO: 91866 - DNA, 25 bp, Probe sequence
aataaatgcctcctcggaataatta

SEQ ID NO: 91867 - DNA, 25 bp, Probe sequence
gcatctcattcctaaatatcatata

SEQ ID NO: 91868 - DNA, 25 bp, Probe sequence
gcacgcatgcatataggattttact

SEQ ID NO: 91869 - DNA, 25 bp, Probe sequence
gcaacatcacgttactgagccatta

SEQ ID NO: 91870 - DNA, 25 bp, Probe sequence
gaataaatgagtagcacgcatgcat

SEQ ID NO: 91871 - DNA, 25 bp, Probe sequence
gatgtagtagtcactatccatgtga

SEQ ID NO: 91872 - DNA, 25 bp, Probe sequence
gattcatcattaacttgagggagtg

SEQ ID NO: 91873 - DNA, 25 bp, Probe sequence
gttatatataatacttacccactga

SEQ ID NO: 91874 - DNA, 25 bp, Probe sequence
ggattttactttatccgtaatagca

SEQ ID NO: 91875 - DNA, 25 bp, Probe sequence
tacttacccactgaaaaattatcta

SEQ ID NO: 91876 - DNA, 25 bp, Probe sequence
ttatccgtaatagcatctcattcct

SEQ ID NO: 91877 - DNA, 25 bp, Probe sequence
ttgacgtcattttataactagcgaa

SEQ ID NO: 91878 - DNA, 25 bp, Probe sequence
ccacctagccgatggttataccgac

SEQ ID NO: 91879 - DNA, 25 bp, Probe sequence
atgcaatatatgtctcgttttgtat

SEQ ID NO: 91880 - DNA, 25 bp, Probe sequence
aaatatattcagtatctcgttaatc

SEQ ID NO: 91881 - DNA, 25 bp, Probe sequence
cgatggttataccgactaagtggca

SEQ ID NO: 91882 - DNA, 25 bp, Probe sequence
cctagccgatggttataccgactaa

SEQ ID NO: 91883 - DNA, 25 bp, Probe sequence
gttataccgactaagtggcatgtgc

SEQ ID NO: 91884 - DNA, 25 bp, Probe sequence
gtatctcgttaatcatatgcaatat

SEQ ID NO: 91885 - DNA, 25 bp, Probe sequence
gtctcgttttgtatacatattattg

SEQ ID NO: 91886 - DNA, 25 bp, Probe sequence
gtggcatgtgcagtgtattaggaat

SEQ ID NO: 91887 - DNA, 25 bp, Probe sequence
tcattagcgagtttttatttagttt

SEQ ID NO: 91888 - DNA, 25 bp, Probe sequence
taccgactaagtggcatgtgcagtg

SEQ ID NO: 91889 - DNA, 25 bp, Probe sequence
tattaataaattttggtatccactt

SEQ ID NO: 91890 - DNA, 25 bp, Probe sequence
tattggatatcattagcgagttttt

SEQ ID NO: 91891 - DNA, 25 bp, Probe sequence
ttaatacaaaaaccacctagccgat

SEQ ID NO: 91892 - DNA, 25 bp, Probe sequence
ttcagtatctcgttaatcatatgca

SEQ ID NO: 91893 - DNA, 25 bp, Probe sequence
atgcgttcagttaattataacttac

SEQ ID NO: 91894 - DNA, 25 bp, Probe sequence
atggtatgatgctatttatgatttt

SEQ ID NO: 91895 - DNA, 25 bp, Probe sequence
actctaatccgctctctttaaaaat

SEQ ID NO: 91896 - DNA, 25 bp, Probe sequence
aaagactttgtaataatgcgttcag

SEQ ID NO: 91897 - DNA, 25 bp, Probe sequence
aatatgttatcatttcactaggaca

SEQ ID NO: 91898 - DNA, 25 bp, Probe sequence
gcacataatttctcaatggatttta

SEQ ID NO: 91899 - DNA, 25 bp, Probe sequence
gataataagtgcacataatttctca

SEQ ID NO: 91900 - DNA, 25 bp, Probe sequence
ggacatttgtaatatggtatgatgc

SEQ ID NO: 91901 - DNA, 25 bp, Probe sequence
taatccgctctctttaaaaatataa

SEQ ID NO: 91902 - DNA, 25 bp, Probe sequence
taaagtacaactctaatccgctctc

SEQ ID NO: 91903 - DNA, 25 bp, Probe sequence
tatattccctccgtaaaatataaag

SEQ ID NO: 91904 - DNA, 25 bp, Probe sequence
tataacttacttataccttaatata

SEQ ID NO: 91905 - DNA, 25 bp, Probe sequence
ttatcatttcactaggacatttgta

SEQ ID NO: 91906 - DNA, 25 bp, Probe sequence
ttatgattttattccaatcgtttga

SEQ ID NO: 91907 - DNA, 25 bp, Probe sequence
ttccaatcgtttgaaaggagttatt

SEQ ID NO: 91908 - DNA, 25 bp, Probe sequence
atagatgaacatctcatggatactg

SEQ ID NO: 91909 - DNA, 25 bp, Probe sequence
ataaatgttcattttcatcatatat

SEQ ID NO: 91910 - DNA, 25 bp, Probe sequence
atctcatggatactgtattaataag

SEQ ID NO: 91911 - DNA, 25 bp, Probe sequence
atgttcattttcatcatatatagat

SEQ ID NO: 91912 - DNA, 25 bp, Probe sequence
actttttcctcctacttgatgaaat

SEQ ID NO: 91913 - DNA, 25 bp, Probe sequence
aaatgttcattttcatcatatatag

SEQ ID NO: 91914 - DNA, 25 bp, Probe sequence
aacatctcatggatactgtattaat

SEQ ID NO: 91915 - DNA, 25 bp, Probe sequence
ctttttcctcctacttgatgaaatt

SEQ ID NO: 91916 - DNA, 25 bp, Probe sequence
cctcctacttgatgaaatttactat

SEQ ID NO: 91917 - DNA, 25 bp, Probe sequence
gatgaacatctcatggatactgtat

SEQ ID NO: 91918 - DNA, 25 bp, Probe sequence
tgaacatctcatggatactgtatta

SEQ ID NO: 91919 - DNA, 25 bp, Probe sequence
tcctcctacttgatgaaatttacta

SEQ ID NO: 91920 - DNA, 25 bp, Probe sequence
tcctacttgatgaaatttactattt

SEQ ID NO: 91921 - DNA, 25 bp, Probe sequence
tttactatttcgtataaatgttcat

SEQ ID NO: 91922 - DNA, 25 bp, Probe sequence
ttttcctcctacttgatgaaattta

SEQ ID NO: 91923 - DNA, 25 bp, Probe sequence
atttttatacttttatatgtctaat

SEQ ID NO: 91924 - DNA, 25 bp, Probe sequence
ataacaatgacatgacatcttataa

SEQ ID NO: 91925 - DNA, 25 bp, Probe sequence
atgtctaatatcaaaatcatctatg

SEQ ID NO: 91926 - DNA, 25 bp, Probe sequence
aaatatatttacaacggcgtgcgta

SEQ ID NO: 91927 - DNA, 25 bp, Probe sequence
aaaatcatctatgattaacagcatt

SEQ ID NO: 91928 - DNA, 25 bp, Probe sequence
aattcatgatgtaaaccatattata

SEQ ID NO: 91929 - DNA, 25 bp, Probe sequence
cggcgtgcgtaagtttttaattcat

SEQ ID NO: 91930 - DNA, 25 bp, Probe sequence
gcgtgcgtaagtttttaattcatga

SEQ ID NO: 91931 - DNA, 25 bp, Probe sequence
gcgtaagtttttaattcatgatgta

SEQ ID NO: 91932 - DNA, 25 bp, Probe sequence
gacatgacatcttataaaaattttt

SEQ ID NO: 91933 - DNA, 25 bp, Probe sequence
tatttacaacggcgtgcgtaagttt

SEQ ID NO: 91934 - DNA, 25 bp, Probe sequence
taaaccatattataacaatgacatg

SEQ ID NO: 91935 - DNA, 25 bp, Probe sequence
tatacttttatatgtctaatatcaa

SEQ ID NO: 91936 - DNA, 25 bp, Probe sequence
tatatttacaacggcgtgcgtaagt

SEQ ID NO: 91937 - DNA, 25 bp, Probe sequence
ttcaatcactccttaaaaatatatt

SEQ ID NO: 91938 - DNA, 25 bp, Probe sequence
atttccggaagtcaagaatggctta

SEQ ID NO: 91939 - DNA, 25 bp, Probe sequence
atacccatttccggaagtcaagaat

SEQ ID NO: 91940 - DNA, 25 bp, Probe sequence
atgattattttttacaccaatcaaa

SEQ ID NO: 91941 - DNA, 25 bp, Probe sequence
agcttatctatcaatccgatttagt

SEQ ID NO: 91942 - DNA, 25 bp, Probe sequence
aaagcttatctatcaatccgattta

SEQ ID NO: 91943 - DNA, 25 bp, Probe sequence
aatggcttaacaacgctgtttaaag

SEQ ID NO: 91944 - DNA, 25 bp, Probe sequence
caagaatggcttaacaacgctgttt

SEQ ID NO: 91945 - DNA, 25 bp, Probe sequence
cacagtaatgtggctttttgttata

SEQ ID NO: 91946 - DNA, 25 bp, Probe sequence
gtatcaatacccatttccggaagtc

SEQ ID NO: 91947 - DNA, 25 bp, Probe sequence
gtacaaagcttatctatcaatccga

SEQ ID NO: 91948 - DNA, 25 bp, Probe sequence
gtggctttttgttatattcagtatc

SEQ ID NO: 91949 - DNA, 25 bp, Probe sequence
tggtatcaatacccatttccggaag

SEQ ID NO: 91950 - DNA, 25 bp, Probe sequence
tcaatacccatttccggaagtcaag

SEQ ID NO: 91951 - DNA, 25 bp, Probe sequence
tatctatcaatccgatttagttata

SEQ ID NO: 91952 - DNA, 25 bp, Probe sequence
tattcagtatcaaaatggtatcaat

SEQ ID NO: 91953 - DNA, 25 bp, Probe sequence
attctaattatcttttaaatatctt

SEQ ID NO: 91954 - DNA, 25 bp, Probe sequence
atcatagttactttaatgcattcat

SEQ ID NO: 91955 - DNA, 25 bp, Probe sequence
agttcgagctgtttgttattaataa

SEQ ID NO: 91956 - DNA, 25 bp, Probe sequence
aaatatctttagacaagtacttgtt

SEQ ID NO: 91957 - DNA, 25 bp, Probe sequence
aaccagtttctcataaatttattct

SEQ ID NO: 91958 - DNA, 25 bp, Probe sequence
aatgatgctatagttcgagctgttt

SEQ ID NO: 91959 - DNA, 25 bp, Probe sequence
cgtgtagtctccttattgtcatatc

SEQ ID NO: 91960 - DNA, 25 bp, Probe sequence
gctatagttcgagctgtttgttatt

SEQ ID NO: 91961 - DNA, 25 bp, Probe sequence
gacaagtacttgtttatattcaaat

SEQ ID NO: 91962 - DNA, 25 bp, Probe sequence
gacatagttataatcatttgaaacc

SEQ ID NO: 91963 - DNA, 25 bp, Probe sequence
gtagtctccttattgtcatatctta

SEQ ID NO: 91964 - DNA, 25 bp, Probe sequence
gtcatatcttatttttattgtagtt

SEQ ID NO: 91965 - DNA, 25 bp, Probe sequence
gtctccttattgtcatatcttattt

SEQ ID NO: 91966 - DNA, 25 bp, Probe sequence
taatgataacaaccagtttctcata

SEQ ID NO: 91967 - DNA, 25 bp, Probe sequence
tattgtagttacttaattcccgacg

SEQ ID NO: 91968 - DNA, 25 bp, Probe sequence
atttcggtgaccttcagctcgataa

SEQ ID NO: 91969 - DNA, 25 bp, Probe sequence
atttcgtttgatcataatcatttca

SEQ ID NO: 91970 - DNA, 25 bp, Probe sequence
atttcgtttaattataatcatttcg

SEQ ID NO: 91971 - DNA, 25 bp, Probe sequence
cagctcgataatttcgtttgatcat

SEQ ID NO: 91972 - DNA, 25 bp, Probe sequence
cgataatttcgtttgatcataatca

SEQ ID NO: 91973 - DNA, 25 bp, Probe sequence
ccttcagctcgataatttcgtttga

SEQ ID NO: 91974 - DNA, 25 bp, Probe sequence
gaccttcagctcgataatttcgttt

SEQ ID NO: 91975 - DNA, 25 bp, Probe sequence
gtgaactttagctcgataatttcgt

SEQ ID NO: 91976 - DNA, 25 bp, Probe sequence
gtgaccttcagctcgataatttcgt

SEQ ID NO: 91977 - DNA, 25 bp, Probe sequence
ttcggtgaccttcagctcgataatt

SEQ ID NO: 91978 - DNA, 25 bp, Probe sequence
tcatttcggtgaccttcagctcgat

SEQ ID NO: 91979 - DNA, 25 bp, Probe sequence
tcatttcagtgaactttagctcgat

SEQ ID NO: 91980 - DNA, 25 bp, Probe sequence
taatcatttcggtgaccttcagctc

SEQ ID NO: 91981 - DNA, 25 bp, Probe sequence
tttagctcgataatttcgtttaatt

SEQ ID NO: 91982 - DNA, 25 bp, Probe sequence
ttcagtgaactttagctcgataatt

SEQ ID NO: 91983 - DNA, 25 bp, Probe sequence
atatatcaccaatgtcatcatacca

SEQ ID NO: 91984 - DNA, 25 bp, Probe sequence
atatcaccaatgtcatcataccata

SEQ ID NO: 91985 - DNA, 25 bp, Probe sequence
ataccatataacttttatcataatc

SEQ ID NO: 91986 - DNA, 25 bp, Probe sequence
atcaccaatgtcatcataccatata

SEQ ID NO: 91987 - DNA, 25 bp, Probe sequence
atcataccatataacttttatcata

SEQ ID NO: 91988 - DNA, 25 bp, Probe sequence
accaatgtcatcataccatataact

SEQ ID NO: 91989 - DNA, 25 bp, Probe sequence
accatataacttttatcataatcat

SEQ ID NO: 91990 - DNA, 25 bp, Probe sequence
aatgtcatcataccatataactttt

SEQ ID NO: 91991 - DNA, 25 bp, Probe sequence
caccaatgtcatcataccatataac

SEQ ID NO: 91992 - DNA, 25 bp, Probe sequence
ccaatgtcatcataccatataactt

SEQ ID NO: 91993 - DNA, 25 bp, Probe sequence
gtcatcataccatataacttttatc

SEQ ID NO: 91994 - DNA, 25 bp, Probe sequence
tcatcataccatataacttttatca

SEQ ID NO: 91995 - DNA, 25 bp, Probe sequence
tcaccaatgtcatcataccatataa

SEQ ID NO: 91996 - DNA, 25 bp, Probe sequence
tatcaccaatgtcatcataccatat

SEQ ID NO: 91997 - DNA, 25 bp, Probe sequence
tatatcaccaatgtcatcataccat

SEQ ID NO: 91998 - DNA, 25 bp, Probe sequence
attcttcacctatctatgacaatga

SEQ ID NO: 91999 - DNA, 25 bp, Probe sequence
atgacacgttcgttttgtacaaact

SEQ ID NO: 92000 - DNA, 25 bp, Probe sequence
acaaactaagcctttatgccttatt

SEQ ID NO: 92001 - DNA, 25 bp, Probe sequence
aactaagcctttatgccttattaat

SEQ ID NO: 92002 - DNA, 25 bp, Probe sequence
aagcctttatgccttattaattgtt

SEQ ID NO: 92003 - DNA, 25 bp, Probe sequence
aaggctcagtttatacttttagtgt

SEQ ID NO: 92004 - DNA, 25 bp, Probe sequence
aatgattacttctatgacacgttcg

SEQ ID NO: 92005 - DNA, 25 bp, Probe sequence
cagtttatacttttagtgtttcata

SEQ ID NO: 92006 - DNA, 25 bp, Probe sequence
gcctttatgccttattaattgttaa

SEQ ID NO: 92007 - DNA, 25 bp, Probe sequence
gacaatgaaaggctcagtttatact

SEQ ID NO: 92008 - DNA, 25 bp, Probe sequence
gattacttctatgacacgttcgttt

SEQ ID NO: 92009 - DNA, 25 bp, Probe sequence
tgtacaaactaagcctttatgcctt

SEQ ID NO: 92010 - DNA, 25 bp, Probe sequence
tcttcacctatctatgacaatgaaa

SEQ ID NO: 92011 - DNA, 25 bp, Probe sequence
ttacttctatgacacgttcgttttg

SEQ ID NO: 92012 - DNA, 25 bp, Probe sequence
ttctatgacacgttcgttttgtaca

SEQ ID NO: 92013 - DNA, 25 bp, Probe sequence
acccctaactagattacaggtccat

SEQ ID NO: 92014 - DNA, 25 bp, Probe sequence
attgcatgattcccattttcaatct

SEQ ID NO: 92015 - DNA, 25 bp, Probe sequence
attcccattttcaatctagctaagg

SEQ ID NO: 92016 - DNA, 25 bp, Probe sequence
atgattcccattttcaatctagcta

SEQ ID NO: 92017 - DNA, 25 bp, Probe sequence
aactagattacaggtccatgcttga

SEQ ID NO: 92018 - DNA, 25 bp, Probe sequence
cattttcaatctagctaagggtttt

SEQ ID NO: 92019 - DNA, 25 bp, Probe sequence
ctagattacaggtccatgcttgaat

SEQ ID NO: 92020 - DNA, 25 bp, Probe sequence
ctaactagattacaggtccatgctt

SEQ ID NO: 92021 - DNA, 25 bp, Probe sequence
gcttgaattgcatgattcccatttt

SEQ ID NO: 92022 - DNA, 25 bp, Probe sequence
gcatgattcccattttcaatctagc

SEQ ID NO: 92023 - DNA, 25 bp, Probe sequence
gaattgcatgattcccattttcaat

SEQ ID NO: 92024 - DNA, 25 bp, Probe sequence
gattacaggtccatgcttgaattgc

SEQ ID NO: 92025 - DNA, 25 bp, Probe sequence
ggtccatgcttgaattgcatgattc

SEQ ID NO: 92026 - DNA, 25 bp, Probe sequence
tgaagaaccttcattaaagataaaa

SEQ ID NO: 92027 - DNA, 25 bp, Probe sequence
ttacaggtccatgcttgaattgcat

SEQ ID NO: 92028 - DNA, 25 bp, Probe sequence
attcgcaagtcaagcataacatatt

SEQ ID NO: 92029 - DNA, 25 bp, Probe sequence
ataacatatttaacaattgctttgc

SEQ ID NO: 92030 - DNA, 25 bp, Probe sequence
atgttattgaattatcatcagcgca

SEQ ID NO: 92031 - DNA, 25 bp, Probe sequence
acaattgctttgcttgttttaccaa

SEQ ID NO: 92032 - DNA, 25 bp, Probe sequence
aaacaattacagtctatataacaat

SEQ ID NO: 92033 - DNA, 25 bp, Probe sequence
aactcatcacattaatatgacgagt

SEQ ID NO: 92034 - DNA, 25 bp, Probe sequence
aatgatacactttgttgagaacatc

SEQ ID NO: 92035 - DNA, 25 bp, Probe sequence
gctttgcttgttttaccaatgatta

SEQ ID NO: 92036 - DNA, 25 bp, Probe sequence
gtcaaaatcaaataaactcatcaca

SEQ ID NO: 92037 - DNA, 25 bp, Probe sequence
tcatcagcgcaaatatatacattcg

SEQ ID NO: 92038 - DNA, 25 bp, Probe sequence
taacaattttgttatatacgtcaaa

SEQ ID NO: 92039 - DNA, 25 bp, Probe sequence
taccaatgattaaaaaccatactta

SEQ ID NO: 92040 - DNA, 25 bp, Probe sequence
tatgacgagtttataatgttattga

SEQ ID NO: 92041 - DNA, 25 bp, Probe sequence
tatacattcgcaagtcaagcataac

SEQ ID NO: 92042 - DNA, 25 bp, Probe sequence
ttgttgagaacatcattcattttaa

SEQ ID NO: 92043 - DNA, 25 bp, Probe sequence
attggactgatgggaaagttatttt

SEQ ID NO: 92044 - DNA, 25 bp, Probe sequence
attactattctattctatgaaattt

SEQ ID NO: 92045 - DNA, 25 bp, Probe sequence
attattttattattgccacatatcc

SEQ ID NO: 92046 - DNA, 25 bp, Probe sequence
ataatcagttattacctgtcttttt

SEQ ID NO: 92047 - DNA, 25 bp, Probe sequence
atccaagcacatattactattctat

SEQ ID NO: 92048 - DNA, 25 bp, Probe sequence
agcacatattactattctattctat

SEQ ID NO: 92049 - DNA, 25 bp, Probe sequence
aaaatagcacatacgctcaatcaaa

SEQ ID NO: 92050 - DNA, 25 bp, Probe sequence
aatcaaaatcgttgagttatgtgct

SEQ ID NO: 92051 - DNA, 25 bp, Probe sequence
cagttattacctgtcttttttcgct

SEQ ID NO: 92052 - DNA, 25 bp, Probe sequence
ctgtcttttttcgctgtcaaattgg

SEQ ID NO: 92053 - DNA, 25 bp, Probe sequence
gccacatatccaagcacatattact

SEQ ID NO: 92054 - DNA, 25 bp, Probe sequence
gcacatacgctcaatcaaaatcgtt

SEQ ID NO: 92055 - DNA, 25 bp, Probe sequence
gttattttatactatttatctgatt

SEQ ID NO: 92056 - DNA, 25 bp, Probe sequence
gtcttttttcgctgtcaaattggac

SEQ ID NO: 92057 - DNA, 25 bp, Probe sequence
tattgccacatatccaagcacatat

SEQ ID NO: 92058 - DNA, 25 bp, Probe sequence
attactgacattgctttttgttatg

SEQ ID NO: 92059 - DNA, 25 bp, Probe sequence
agcaatgtcagttcacactattact

SEQ ID NO: 92060 - DNA, 25 bp, Probe sequence
actattactgacattgctttttgtt

SEQ ID NO: 92061 - DNA, 25 bp, Probe sequence
acactattactgacattgctttttg

SEQ ID NO: 92062 - DNA, 25 bp, Probe sequence
aaagcaatgtcagttcacactatta

SEQ ID NO: 92063 - DNA, 25 bp, Probe sequence
aaaagcaatgtcagttcacactatt

SEQ ID NO: 92064 - DNA, 25 bp, Probe sequence
aagcaatgtcagttcacactattac

SEQ ID NO: 92065 - DNA, 25 bp, Probe sequence
cacactattactgacattgcttttt

SEQ ID NO: 92066 - DNA, 25 bp, Probe sequence
ctattactgacattgctttttgtta

SEQ ID NO: 92067 - DNA, 25 bp, Probe sequence
ctgacattgctttttgttatgtgta

SEQ ID NO: 92068 - DNA, 25 bp, Probe sequence
gcaatgtcagttcacactattactg

SEQ ID NO: 92069 - DNA, 25 bp, Probe sequence
gacattgctttttgttatgtgtata

SEQ ID NO: 92070 - DNA, 25 bp, Probe sequence
gttcacactattactgacattgctt

SEQ ID NO: 92071 - DNA, 25 bp, Probe sequence
tcacactattactgacattgctttt

SEQ ID NO: 92072 - DNA, 25 bp, Probe sequence
ttcacactattactgacattgcttt

SEQ ID NO: 92073 - DNA, 25 bp, Probe sequence
attatagcattttaaaactggtatt

SEQ ID NO: 92074 - DNA, 25 bp, Probe sequence
atatctatgcactttgatcttttca

SEQ ID NO: 92075 - DNA, 25 bp, Probe sequence
atcccagttatgtaatagtgcctta

SEQ ID NO: 92076 - DNA, 25 bp, Probe sequence
acttcaccttcttatttcatttgtt

SEQ ID NO: 92077 - DNA, 25 bp, Probe sequence
aacatgatgtgctcaattaccaaca

SEQ ID NO: 92078 - DNA, 25 bp, Probe sequence
aactggtattttaacatgatgtgct

SEQ ID NO: 92079 - DNA, 25 bp, Probe sequence
aatagtgccttagttagtacaaata

SEQ ID NO: 92080 - DNA, 25 bp, Probe sequence
aatatttatttgtagtcattttcaa

SEQ ID NO: 92081 - DNA, 25 bp, Probe sequence
caacaactgatgtttcttatcccag

SEQ ID NO: 92082 - DNA, 25 bp, Probe sequence
cacttgcattttataactgttcatt

SEQ ID NO: 92083 - DNA, 25 bp, Probe sequence
caccttcttatttcatttgttacaa

SEQ ID NO: 92084 - DNA, 25 bp, Probe sequence
gatgtgctcaattaccaacaactga

SEQ ID NO: 92085 - DNA, 25 bp, Probe sequence
gatgaatcaaagacacttgcatttt

SEQ ID NO: 92086 - DNA, 25 bp, Probe sequence
tgatgtttcttatcccagttatgta

SEQ ID NO: 92087 - DNA, 25 bp, Probe sequence
ttttttaggggttattgatgaatca

SEQ ID NO: 92088 - DNA, 25 bp, Probe sequence
attgatatcaatttgtatcccaaaa

SEQ ID NO: 92089 - DNA, 25 bp, Probe sequence
atatctttacgtaaaaataggacat

SEQ ID NO: 92090 - DNA, 25 bp, Probe sequence
atatgtccctaatcataattgatat

SEQ ID NO: 92091 - DNA, 25 bp, Probe sequence
atcaaatatgtccctaatcataatt

SEQ ID NO: 92092 - DNA, 25 bp, Probe sequence
atgtccctaatcataattgatatca

SEQ ID NO: 92093 - DNA, 25 bp, Probe sequence
aaatatgtccctaatcataattgat

SEQ ID NO: 92094 - DNA, 25 bp, Probe sequence
aattgatatcaatttgtatcccaaa

SEQ ID NO: 92095 - DNA, 25 bp, Probe sequence
caaatatgtccctaatcataattga

SEQ ID NO: 92096 - DNA, 25 bp, Probe sequence
cataatcaaatatgtccctaatcat

SEQ ID NO: 92097 - DNA, 25 bp, Probe sequence
gatatcaatttgtatcccaaaaatt

SEQ ID NO: 92098 - DNA, 25 bp, Probe sequence
gattcttaattttcaataagctttt

SEQ ID NO: 92099 - DNA, 25 bp, Probe sequence
gtccctaatcataattgatatcaat

SEQ ID NO: 92100 - DNA, 25 bp, Probe sequence
tcaatttgtatcccaaaaattgggt

SEQ ID NO: 92101 - DNA, 25 bp, Probe sequence
taatcaaatatgtccctaatcataa

SEQ ID NO: 92102 - DNA, 25 bp, Probe sequence
ttgatatcaatttgtatcccaaaaa

SEQ ID NO: 92103 - DNA, 25 bp, Probe sequence
actaattctatagcttttatgttat

SEQ ID NO: 92104 - DNA, 25 bp, Probe sequence
actacttttaccacaatgtatacta

SEQ ID NO: 92105 - DNA, 25 bp, Probe sequence
aaccaaatgctgataattactagta

SEQ ID NO: 92106 - DNA, 25 bp, Probe sequence
aagacatttttaatccaatactaat

SEQ ID NO: 92107 - DNA, 25 bp, Probe sequence
aatccaatactaattctatagcttt

SEQ ID NO: 92108 - DNA, 25 bp, Probe sequence
aattactagtaacaactggtcatta

SEQ ID NO: 92109 - DNA, 25 bp, Probe sequence
gctttcatatttttttaaccaaatg

SEQ ID NO: 92110 - DNA, 25 bp, Probe sequence
gtatactagtttatcatcattttgt

SEQ ID NO: 92111 - DNA, 25 bp, Probe sequence
ggtcattactacttttaccacaatg

SEQ ID NO: 92112 - DNA, 25 bp, Probe sequence
taacaactggtcattactactttta

SEQ ID NO: 92113 - DNA, 25 bp, Probe sequence
tatgtaaaaacctgtgatgttcaca

SEQ ID NO: 92114 - DNA, 25 bp, Probe sequence
tatcatcattttgttatttaagtct

SEQ ID NO: 92115 - DNA, 25 bp, Probe sequence
tatattttcaagcaagattcagtca

SEQ ID NO: 92116 - DNA, 25 bp, Probe sequence
ttaatttcacctaagctttcatatt

SEQ ID NO: 92117 - DNA, 25 bp, Probe sequence
ttcacctaagctttcatattttttt

SEQ ID NO: 92118 - DNA, 25 bp, Probe sequence
attttatgtgtttagctgaaacttt

SEQ ID NO: 92119 - DNA, 25 bp, Probe sequence
atttaattttatgtgtttagctgaa

SEQ ID NO: 92120 - DNA, 25 bp, Probe sequence
atgtgtttagctgaaactttattta

SEQ ID NO: 92121 - DNA, 25 bp, Probe sequence
aatttaattttatgtgtttagctga

SEQ ID NO: 92122 - DNA, 25 bp, Probe sequence
aattttatgtgtttagctgaaactt

SEQ ID NO: 92123 - DNA, 25 bp, Probe sequence
gaaggactttataaatgaataattt

SEQ ID NO: 92124 - DNA, 25 bp, Probe sequence
tgtgtttagctgaaactttatttaa

SEQ ID NO: 92125 - DNA, 25 bp, Probe sequence
tgtttagctgaaactttatttaaag

SEQ ID NO: 92126 - DNA, 25 bp, Probe sequence
taatttaattttatgtgtttagctg

SEQ ID NO: 92127 - DNA, 25 bp, Probe sequence
tatgtgtttagctgaaactttattt

SEQ ID NO: 92128 - DNA, 25 bp, Probe sequence
tttaattttatgtgtttagctgaaa

SEQ ID NO: 92129 - DNA, 25 bp, Probe sequence
tttatgtgtttagctgaaactttat

SEQ ID NO: 92130 - DNA, 25 bp, Probe sequence
ttttatgtgtttagctgaaacttta

SEQ ID NO: 92131 - DNA, 25 bp, Probe sequence
ttatgtgtttagctgaaactttatt

SEQ ID NO: 92132 - DNA, 25 bp, Probe sequence
ttaattttatgtgtttagctgaaac

SEQ ID NO: 92133 - DNA, 25 bp, Probe sequence
atgcgatttatattttcttacaaca

SEQ ID NO: 92134 - DNA, 25 bp, Probe sequence
agacacaagttgtatcaggcaaata

SEQ ID NO: 92135 - DNA, 25 bp, Probe sequence
acaccaatcaaaatcctaagttcta

SEQ ID NO: 92136 - DNA, 25 bp, Probe sequence
aatgcctgatacaatgcgatccttt

SEQ ID NO: 92137 - DNA, 25 bp, Probe sequence
aatcaagttgatttatgctcacaag

SEQ ID NO: 92138 - DNA, 25 bp, Probe sequence
aattttacaagcctggaacaccaat

SEQ ID NO: 92139 - DNA, 25 bp, Probe sequence
catcctttatcgctctatcgaacta

SEQ ID NO: 92140 - DNA, 25 bp, Probe sequence
gcgatcctttatactttcaagagtt

SEQ ID NO: 92141 - DNA, 25 bp, Probe sequence
gctctatcgaactaaagcgtttata

SEQ ID NO: 92142 - DNA, 25 bp, Probe sequence
gcaaactatacccataatctttatt

SEQ ID NO: 92143 - DNA, 25 bp, Probe sequence
gataaccatcctttatcgctctatc

SEQ ID NO: 92144 - DNA, 25 bp, Probe sequence
gtatcagtagctttaacacctgtca

SEQ ID NO: 92145 - DNA, 25 bp, Probe sequence
tagtcgttgactgaatgagcatatg

SEQ ID NO: 92146 - DNA, 25 bp, Probe sequence
tatgctcacaaggatatgcgattta

SEQ ID NO: 92147 - DNA, 25 bp, Probe sequence
ttaacacctgtcaatagcaaactat

SEQ ID NO: 92148 - DNA, 25 bp, Probe sequence
atatctcataacatttcagctagca

SEQ ID NO: 92149 - DNA, 25 bp, Probe sequence
atctcataacatttcagctagcagt

SEQ ID NO: 92150 - DNA, 25 bp, Probe sequence
actgctagccgtagttatgaatatc

SEQ ID NO: 92151 - DNA, 25 bp, Probe sequence
aaaactgctagccgtagttatgaat

SEQ ID NO: 92152 - DNA, 25 bp, Probe sequence
aaaaactgctagccgtagttatgaa

SEQ ID NO: 92153 - DNA, 25 bp, Probe sequence
aatatctcataacatttcagctagc

SEQ ID NO: 92154 - DNA, 25 bp, Probe sequence
cataacatttcagctagcagttctt

SEQ ID NO: 92155 - DNA, 25 bp, Probe sequence
ctagccgtagttatgaatatctcat

SEQ ID NO: 92156 - DNA, 25 bp, Probe sequence
ctcataacatttcagctagcagttc

SEQ ID NO: 92157 - DNA, 25 bp, Probe sequence
gctagccgtagttatgaatatctca

SEQ ID NO: 92158 - DNA, 25 bp, Probe sequence
gaatatctcataacatttcagctag

SEQ ID NO: 92159 - DNA, 25 bp, Probe sequence
tgctagccgtagttatgaatatctc

SEQ ID NO: 92160 - DNA, 25 bp, Probe sequence
tctcataacatttcagctagcagtt

SEQ ID NO: 92161 - DNA, 25 bp, Probe sequence
tcataacatttcagctagcagttct

SEQ ID NO: 92162 - DNA, 25 bp, Probe sequence
tatctcataacatttcagctagcag

SEQ ID NO: 92163 - DNA, 25 bp, Probe sequence
ataaatcaacaacaaacagcagtaa

SEQ ID NO: 92164 - DNA, 25 bp, Probe sequence
actgctgttttcttttgacattgtt

SEQ ID NO: 92165 - DNA, 25 bp, Probe sequence
aatgattttactgctgttttctttt

SEQ ID NO: 92166 - DNA, 25 bp, Probe sequence
aattgcctttcatgtcgttatgtat

SEQ ID NO: 92167 - DNA, 25 bp, Probe sequence
gcctttcatgtcgttatgtattatg

SEQ ID NO: 92168 - DNA, 25 bp, Probe sequence
gccctatctacgtatatctctttaa

SEQ ID NO: 92169 - DNA, 25 bp, Probe sequence
gcagtaagatgattccaaattagga

SEQ ID NO: 92170 - DNA, 25 bp, Probe sequence
gattttactgctgttttcttttgac

SEQ ID NO: 92171 - DNA, 25 bp, Probe sequence
gttttcttttgacattgttacctct

SEQ ID NO: 92172 - DNA, 25 bp, Probe sequence
tgttacctctttttcaatgattttt

SEQ ID NO: 92173 - DNA, 25 bp, Probe sequence
tctacgtatatctctttaatttaat

SEQ ID NO: 92174 - DNA, 25 bp, Probe sequence
taatttaattgcctttcatgtcgtt

SEQ ID NO: 92175 - DNA, 25 bp, Probe sequence
tacctctttttcaatgattttttct

SEQ ID NO: 92176 - DNA, 25 bp, Probe sequence
ttttttctttgactacatcttcgcc

SEQ ID NO: 92177 - DNA, 25 bp, Probe sequence
ttttgacattgttacctctttttca

SEQ ID NO: 92178 - DNA, 25 bp, Probe sequence
atgacgtgtttcttcttatttaaat

SEQ ID NO: 92179 - DNA, 25 bp, Probe sequence
aggagtgtgtacgtttttcagaact

SEQ ID NO: 92180 - DNA, 25 bp, Probe sequence
agaactatatcattcatgtataatg

SEQ ID NO: 92181 - DNA, 25 bp, Probe sequence
aaagcacaacaaggagtgtgtacgt

SEQ ID NO: 92182 - DNA, 25 bp, Probe sequence
aatacttctgaaaataaagcacaac

SEQ ID NO: 92183 - DNA, 25 bp, Probe sequence
caaggagtgtgtacgtttttcagaa

SEQ ID NO: 92184 - DNA, 25 bp, Probe sequence
gagtgtgtacgtttttcagaactat

SEQ ID NO: 92185 - DNA, 25 bp, Probe sequence
gtttttcagaactatatcattcatg

SEQ ID NO: 92186 - DNA, 25 bp, Probe sequence
gtttcttcttatttaaatacttctg

SEQ ID NO: 92187 - DNA, 25 bp, Probe sequence
gtacgtttttcagaactatatcatt

SEQ ID NO: 92188 - DNA, 25 bp, Probe sequence
gtgtacgtttttcagaactatatca

SEQ ID NO: 92189 - DNA, 25 bp, Probe sequence
gtgtgtacgtttttcagaactatat

SEQ ID NO: 92190 - DNA, 25 bp, Probe sequence
tgacgtgtttcttcttatttaaata

SEQ ID NO: 92191 - DNA, 25 bp, Probe sequence
tcttcttatttaaatacttctgaaa

SEQ ID NO: 92192 - DNA, 25 bp, Probe sequence
ttcagaactatatcattcatgtata

SEQ ID NO: 92193 - DNA, 25 bp, Probe sequence
attctccattcatgttatgatacat

SEQ ID NO: 92194 - DNA, 25 bp, Probe sequence
atatattaacatacttttaagggag

SEQ ID NO: 92195 - DNA, 25 bp, Probe sequence
atattctccattcatgttatgatac

SEQ ID NO: 92196 - DNA, 25 bp, Probe sequence
atacatatatattaacatactttta

SEQ ID NO: 92197 - DNA, 25 bp, Probe sequence
acatatatattaacatacttttaag

SEQ ID NO: 92198 - DNA, 25 bp, Probe sequence
ctccattcatgttatgatacatata

SEQ ID NO: 92199 - DNA, 25 bp, Probe sequence
ccattcatgttatgatacatatata

SEQ ID NO: 92200 - DNA, 25 bp, Probe sequence
gatacatatatattaacatactttt

SEQ ID NO: 92201 - DNA, 25 bp, Probe sequence
tccattcatgttatgatacatatat

SEQ ID NO: 92202 - DNA, 25 bp, Probe sequence
tctccattcatgttatgatacatat

SEQ ID NO: 92203 - DNA, 25 bp, Probe sequence
tatattaacatacttttaagggagg

SEQ ID NO: 92204 - DNA, 25 bp, Probe sequence
tatattctccattcatgttatgata

SEQ ID NO: 92205 - DNA, 25 bp, Probe sequence
tattctccattcatgttatgataca

SEQ ID NO: 92206 - DNA, 25 bp, Probe sequence
ttatattctccattcatgttatgat

SEQ ID NO: 92207 - DNA, 25 bp, Probe sequence
ttctccattcatgttatgatacata

SEQ ID NO: 92208 - DNA, 25 bp, Probe sequence
attagctttatccgagtttaaaatg

SEQ ID NO: 92209 - DNA, 25 bp, Probe sequence
atctatttaaaaactgtgctttctt

SEQ ID NO: 92210 - DNA, 25 bp, Probe sequence
atccagctactttgttttcaattta

SEQ ID NO: 92211 - DNA, 25 bp, Probe sequence
agaattctacaaacttggatttaca

SEQ ID NO: 92212 - DNA, 25 bp, Probe sequence
actattatcatagcacaaatcgaaa

SEQ ID NO: 92213 - DNA, 25 bp, Probe sequence
aaaactgtgctttcttgataaatat

SEQ ID NO: 92214 - DNA, 25 bp, Probe sequence
aaaattagcaacaaactcctatcta

SEQ ID NO: 92215 - DNA, 25 bp, Probe sequence
aatatatactaatccattcataaat

SEQ ID NO: 92216 - DNA, 25 bp, Probe sequence
catgttagtttatttgtttcgttgg

SEQ ID NO: 92217 - DNA, 25 bp, Probe sequence
gcaacaaactcctatctaaatcaat

SEQ ID NO: 92218 - DNA, 25 bp, Probe sequence
gaatagcaattctctttaaaaacat

SEQ ID NO: 92219 - DNA, 25 bp, Probe sequence
aagcaacctcaactattatctttag

SEQ ID NO: 92220 - DNA, 25 bp, Probe sequence
gagattgctcatcatgttagtttat

SEQ ID NO: 92221 - DNA, 25 bp, Probe sequence
tatgatatccagctactttgttttc

SEQ ID NO: 92222 - DNA, 25 bp, Probe sequence
tttcgtttacttaacactattatca

SEQ ID NO: 92223 - DNA, 25 bp, Probe sequence
attcctccttaaaattattgagttg

SEQ ID NO: 92224 - DNA, 25 bp, Probe sequence
atctgtttatatagttgcaattcgt

SEQ ID NO: 92225 - DNA, 25 bp, Probe sequence
atgtcaccttaaaccatttgtacgt

SEQ ID NO: 92226 - DNA, 25 bp, Probe sequence
acatgtaattttttcattctccaat

SEQ ID NO: 92227 - DNA, 25 bp, Probe sequence
aacaaatccacatacaatattgcaa

SEQ ID NO: 92228 - DNA, 25 bp, Probe sequence
aactttcatttcagaccctttgtat

SEQ ID NO: 92229 - DNA, 25 bp, Probe sequence
gaccctttgtatgattttcggtacg

SEQ ID NO: 92230 - DNA, 25 bp, Probe sequence
gcaaatcaacgattctatctaacaa

SEQ ID NO: 92231 - DNA, 25 bp, Probe sequence
gaatcaatcatattacgttatcgta

SEQ ID NO: 92232 - DNA, 25 bp, Probe sequence
gataatggatatgtcaccttaaacc

SEQ ID NO: 92233 - DNA, 25 bp, Probe sequence
gttgcaattcgtttaatactttaag

SEQ ID NO: 92234 - DNA, 25 bp, Probe sequence
tactaatctcttttatagtctaaga

SEQ ID NO: 92235 - DNA, 25 bp, Probe sequence
ttttcggtacgatttatctgttcct

SEQ ID NO: 92236 - DNA, 25 bp, Probe sequence
ttaagttgtagttctcatttctaaa

SEQ ID NO: 92237 - DNA, 25 bp, Probe sequence
ttcattctccaattatctgtttata

SEQ ID NO: 92238 - DNA, 25 bp, Probe sequence
attatacatgaaacattatccaaat

SEQ ID NO: 92239 - DNA, 25 bp, Probe sequence
agaattgataattttacacttaatc

SEQ ID NO: 92240 - DNA, 25 bp, Probe sequence
agcagatacttttccaccaaaaaag

SEQ ID NO: 92241 - DNA, 25 bp, Probe sequence
aaccactaacaaattgcatacacaa

SEQ ID NO: 92242 - DNA, 25 bp, Probe sequence
ctaagtttcattaaatttgtctatt

SEQ ID NO: 92243 - DNA, 25 bp, Probe sequence
ccccttttcatcatttataactatt

SEQ ID NO: 92244 - DNA, 25 bp, Probe sequence
gaaataatcactaagtttcattaaa

SEQ ID NO: 92245 - DNA, 25 bp, Probe sequence
tgaaaacccttacatttataatgac

SEQ ID NO: 92246 - DNA, 25 bp, Probe sequence
tgaaaaccactaacaaattgcatac

SEQ ID NO: 92247 - DNA, 25 bp, Probe sequence
tctccccttttcatcatttataact

SEQ ID NO: 92248 - DNA, 25 bp, Probe sequence
tatccaaataattacattagttttc

SEQ ID NO: 92249 - DNA, 25 bp, Probe sequence
tatcattagtggtaacagttaaaca

SEQ ID NO: 92250 - DNA, 25 bp, Probe sequence
ttcaaagcagatacttttccaccaa

SEQ ID NO: 92251 - DNA, 25 bp, Probe sequence
ttgcatacacaatatcattagtggt

SEQ ID NO: 92252 - DNA, 25 bp, Probe sequence
ttgtctattttgaaaacccttacat

SEQ ID NO: 92253 - DNA, 25 bp, Probe sequence
atattgtaacataacgtattccttt

SEQ ID NO: 92254 - DNA, 25 bp, Probe sequence
agcccttacaaactgattgttacaa

SEQ ID NO: 92255 - DNA, 25 bp, Probe sequence
acaaactgattgttacaactttttg

SEQ ID NO: 92256 - DNA, 25 bp, Probe sequence
aactgattgttacaactttttgaca

SEQ ID NO: 92257 - DNA, 25 bp, Probe sequence
cccttacaaactgattgttacaact

SEQ ID NO: 92258 - DNA, 25 bp, Probe sequence
aagcccttacaaactgattgttaca

SEQ ID NO: 92259 - DNA, 25 bp, Probe sequence
caaactgattgttacaactttttga

SEQ ID NO: 92260 - DNA, 25 bp, Probe sequence
tattgtaacataacgtattcctttt

SEQ ID NO: 92261 - DNA, 25 bp, Probe sequence
catattgtaacataacgtattcctt

SEQ ID NO: 92262 - DNA, 25 bp, Probe sequence
gcccttacaaactgattgttacaac

SEQ ID NO: 92263 - DNA, 25 bp, Probe sequence
taaagcccttacaaactgattgtta

SEQ ID NO: 92264 - DNA, 25 bp, Probe sequence
tttaaagcccttacaaactgattgt

SEQ ID NO: 92265 - DNA, 25 bp, Probe sequence
ttttaaagcccttacaaactgattg

SEQ ID NO: 92266 - DNA, 25 bp, Probe sequence
ttaaagcccttacaaactgattgtt

SEQ ID NO: 92267 - DNA, 25 bp, Probe sequence
ttacaaactgattgttacaactttt

SEQ ID NO: 92268 - DNA, 25 bp, Probe sequence
attgttttacagtcaactgctgcta

SEQ ID NO: 92269 - DNA, 25 bp, Probe sequence
atttttgaaaagagcgtgttacacg

SEQ ID NO: 92270 - DNA, 25 bp, Probe sequence
acacgggcattgttttacagtcaac

SEQ ID NO: 92271 - DNA, 25 bp, Probe sequence
gcttagggctttgttttctgtccca

SEQ ID NO: 92272 - DNA, 25 bp, Probe sequence
ccaagctcgttaaatcacatatgat

SEQ ID NO: 92273 - DNA, 25 bp, Probe sequence
gcgtgttacacgggcattgttttac

SEQ ID NO: 92274 - DNA, 25 bp, Probe sequence
gagcttagggctttgttttctgtcc

SEQ ID NO: 92275 - DNA, 25 bp, Probe sequence
gttacacgggcattgttttacagtc

SEQ ID NO: 92276 - DNA, 25 bp, Probe sequence
gttttacagtcaactgctgctaaaa

SEQ ID NO: 92277 - DNA, 25 bp, Probe sequence
gtcaactgctgctaaaataaaatta

SEQ ID NO: 92278 - DNA, 25 bp, Probe sequence
gtcccaagctcgttaaatcacatat

SEQ ID NO: 92279 - DNA, 25 bp, Probe sequence
gggcattgttttacagtcaactgct

SEQ ID NO: 92280 - DNA, 25 bp, Probe sequence
tctgtcccaagctcgttaaatcaca

SEQ ID NO: 92281 - DNA, 25 bp, Probe sequence
taacgagcttagggctttgttttct

SEQ ID NO: 92282 - DNA, 25 bp, Probe sequence
tttctgtcccaagctcgttaaatca

SEQ ID NO: 92283 - DNA, 25 bp, Probe sequence
attgaaattatcctactgctgtctt

SEQ ID NO: 92284 - DNA, 25 bp, Probe sequence
agctattactataaaaaacagcagt

SEQ ID NO: 92285 - DNA, 25 bp, Probe sequence
actgctgtctttttgatcaactata

SEQ ID NO: 92286 - DNA, 25 bp, Probe sequence
actatatatagttgagcgtttaatt

SEQ ID NO: 92287 - DNA, 25 bp, Probe sequence
aaattatcctactgctgtctttttg

SEQ ID NO: 92288 - DNA, 25 bp, Probe sequence
aattatcctactgctgtctttttga

SEQ ID NO: 92289 - DNA, 25 bp, Probe sequence
cctactgctgtctttttgatcaact

SEQ ID NO: 92290 - DNA, 25 bp, Probe sequence
ccaaattgaaattatcctactgctg

SEQ ID NO: 92291 - DNA, 25 bp, Probe sequence
gctgtctttttgatcaactatatat

SEQ ID NO: 92292 - DNA, 25 bp, Probe sequence
gaaattatcctactgctgtcttttt

SEQ ID NO: 92293 - DNA, 25 bp, Probe sequence
gttgagcgtttaattagaaattctc

SEQ ID NO: 92294 - DNA, 25 bp, Probe sequence
tcctactgctgtctttttgatcaac

SEQ ID NO: 92295 - DNA, 25 bp, Probe sequence
tactgctgtctttttgatcaactat

SEQ ID NO: 92296 - DNA, 25 bp, Probe sequence
tatcctactgctgtctttttgatca

SEQ ID NO: 92297 - DNA, 25 bp, Probe sequence
ttatcctactgctgtctttttgatc

SEQ ID NO: 92298 - DNA, 25 bp, Probe sequence
atctacctacccacaatgtctatta

SEQ ID NO: 92299 - DNA, 25 bp, Probe sequence
atgctctcttcgtcttgttgaacat

SEQ ID NO: 92300 - DNA, 25 bp, Probe sequence
aagcgttttcacaagcaggtttttg

SEQ ID NO: 92301 - DNA, 25 bp, Probe sequence
cacaagcaggtttttgtagtatttt

SEQ ID NO: 92302 - DNA, 25 bp, Probe sequence
ctacctacccacaatgtctattaaa

SEQ ID NO: 92303 - DNA, 25 bp, Probe sequence
ctctcttcgtcttgttgaacatcac

SEQ ID NO: 92304 - DNA, 25 bp, Probe sequence
gaacatcacatttttaagattccta

SEQ ID NO: 92305 - DNA, 25 bp, Probe sequence
gtgtaaagcgttttcacaagcaggt

SEQ ID NO: 92306 - DNA, 25 bp, Probe sequence
tgggtattttaatgctctcttcgtc

SEQ ID NO: 92307 - DNA, 25 bp, Probe sequence
taagattcctaaaatgtttgataat

SEQ ID NO: 92308 - DNA, 25 bp, Probe sequence
tacccacaatgtctattaaaattac

SEQ ID NO: 92309 - DNA, 25 bp, Probe sequence
ttaatgctctcttcgtcttgttgaa

SEQ ID NO: 92310 - DNA, 25 bp, Probe sequence
ttaatctacctacccacaatgtcta

SEQ ID NO: 92311 - DNA, 25 bp, Probe sequence
ttcgtcttgttgaacatcacatttt

SEQ ID NO: 92312 - DNA, 25 bp, Probe sequence
ttgtgggtattttaatgctctcttc

SEQ ID NO: 92313 - DNA, 25 bp, Probe sequence
atctctatcgcattttatgaataaa

SEQ ID NO: 92314 - DNA, 25 bp, Probe sequence
actctaactatctctatcgcatttt

SEQ ID NO: 92315 - DNA, 25 bp, Probe sequence
actatctctatcgcattttatgaat

SEQ ID NO: 92316 - DNA, 25 bp, Probe sequence
acttacaactctaactatctctatc

SEQ ID NO: 92317 - DNA, 25 bp, Probe sequence
aactctaactatctctatcgcattt

SEQ ID NO: 92318 - DNA, 25 bp, Probe sequence
aagcatttatacttacaactctaac

SEQ ID NO: 92319 - DNA, 25 bp, Probe sequence
caactctaactatctctatcgcatt

SEQ ID NO: 92320 - DNA, 25 bp, Probe sequence
ctctaactatctctatcgcatttta

SEQ ID NO: 92321 - DNA, 25 bp, Probe sequence
ctaactatctctatcgcattttatg

SEQ ID NO: 92322 - DNA, 25 bp, Probe sequence
gcatttatacttacaactctaacta

SEQ ID NO: 92323 - DNA, 25 bp, Probe sequence
taactatctctatcgcattttatga

SEQ ID NO: 92324 - DNA, 25 bp, Probe sequence
tacaactctaactatctctatcgca

SEQ ID NO: 92325 - DNA, 25 bp, Probe sequence
tacttacaactctaactatctctat

SEQ ID NO: 92326 - DNA, 25 bp, Probe sequence
tatacttacaactctaactatctct

SEQ ID NO: 92327 - DNA, 25 bp, Probe sequence
ttacaactctaactatctctatcgc

SEQ ID NO: 92328 - DNA, 25 bp, Probe sequence
ataaaagcctcctgtttcatttaat

SEQ ID NO: 92329 - DNA, 25 bp, Probe sequence
agcctcctgtttcatttaatatctt

SEQ ID NO: 92330 - DNA, 25 bp, Probe sequence
actaagtttacgtttgcgattcaat

SEQ ID NO: 92331 - DNA, 25 bp, Probe sequence
aaagcctcctgtttcatttaatatc

SEQ ID NO: 92332 - DNA, 25 bp, Probe sequence
aaaagcctcctgtttcatttaatat

SEQ ID NO: 92333 - DNA, 25 bp, Probe sequence
aagcctcctgtttcatttaatatct

SEQ ID NO: 92334 - DNA, 25 bp, Probe sequence
aagtttacgtttgcgattcaattca

SEQ ID NO: 92335 - DNA, 25 bp, Probe sequence
ctataaaagcctcctgtttcattta

SEQ ID NO: 92336 - DNA, 25 bp, Probe sequence
ctcctgtttcatttaatatcttaat

SEQ ID NO: 92337 - DNA, 25 bp, Probe sequence
gcctcctgtttcatttaatatctta

SEQ ID NO: 92338 - DNA, 25 bp, Probe sequence
gtttacgtttgcgattcaattcaca

SEQ ID NO: 92339 - DNA, 25 bp, Probe sequence
tacgtttgcgattcaattcacaagt

SEQ ID NO: 92340 - DNA, 25 bp, Probe sequence
ttacgtttgcgattcaattcacaag

SEQ ID NO: 92341 - DNA, 25 bp, Probe sequence
ttactaagtttacgtttgcgattca

SEQ ID NO: 92342 - DNA, 25 bp, Probe sequence
ttcatttaatatcttaattttacta

SEQ ID NO: 92343 - DNA, 25 bp, Probe sequence
atatgctttaaatagttaacgtcta

SEQ ID NO: 92344 - DNA, 25 bp, Probe sequence
atcatcaatccctttctttggttga

SEQ ID NO: 92345 - DNA, 25 bp, Probe sequence
atcttgtcacattagctagtaacct

SEQ ID NO: 92346 - DNA, 25 bp, Probe sequence
atcttttcaaacttcactaatcatt

SEQ ID NO: 92347 - DNA, 25 bp, Probe sequence
aatgacaacctcgaaaatatgcttt

SEQ ID NO: 92348 - DNA, 25 bp, Probe sequence
aatcagtctctagtagtataacaat

SEQ ID NO: 92349 - DNA, 25 bp, Probe sequence
caatccctttctttggttgaagata

SEQ ID NO: 92350 - DNA, 25 bp, Probe sequence
gctagtaacctagttcttgcatata

SEQ ID NO: 92351 - DNA, 25 bp, Probe sequence
gacagatgttattttttctttaatt

SEQ ID NO: 92352 - DNA, 25 bp, Probe sequence
gaggttgtcattacatttttacatt

SEQ ID NO: 92353 - DNA, 25 bp, Probe sequence
gttctatcttttcaaacttcactaa

SEQ ID NO: 92354 - DNA, 25 bp, Probe sequence
gttaacgtctagttctatcttttca

SEQ ID NO: 92355 - DNA, 25 bp, Probe sequence
gtaacctagttcttgcatataaata

SEQ ID NO: 92356 - DNA, 25 bp, Probe sequence
gtaatcatgctaataaatcagtctc

SEQ ID NO: 92357 - DNA, 25 bp, Probe sequence
taattttctcttaacatcttgtcac

SEQ ID NO: 92358 - DNA, 25 bp, Probe sequence
aaaccgacaaacgatgttgtatttg

SEQ ID NO: 92359 - DNA, 25 bp, Probe sequence
aagtgattgtgattgatttattata

SEQ ID NO: 92360 - DNA, 25 bp, Probe sequence
caaacgatgttgtatttgtttcata

SEQ ID NO: 92361 - DNA, 25 bp, Probe sequence
cacttcctttgacacatattttaac

SEQ ID NO: 92362 - DNA, 25 bp, Probe sequence
catttcgaacttagcttttattgtg

SEQ ID NO: 92363 - DNA, 25 bp, Probe sequence
cctcacttcctttgacacatatttt

SEQ ID NO: 92364 - DNA, 25 bp, Probe sequence
gaacttagcttttattgtggtacta

SEQ ID NO: 92365 - DNA, 25 bp, Probe sequence
gacacatattttaacacaaagtgat

SEQ ID NO: 92366 - DNA, 25 bp, Probe sequence
gatttattataagttcatttcgaac

SEQ ID NO: 92367 - DNA, 25 bp, Probe sequence
gttcatttcgaacttagcttttatt

SEQ ID NO: 92368 - DNA, 25 bp, Probe sequence
tcgaacttagcttttattgtggtac

SEQ ID NO: 92369 - DNA, 25 bp, Probe sequence
taaaacatcgtttatcagtattaaa

SEQ ID NO: 92370 - DNA, 25 bp, Probe sequence
tagcttttattgtggtactaacaaa

SEQ ID NO: 92371 - DNA, 25 bp, Probe sequence
ttatcagtattaaaaccgacaaacg

SEQ ID NO: 92372 - DNA, 25 bp, Probe sequence
ttcctttgacacatattttaacaca

SEQ ID NO: 92373 - DNA, 25 bp, Probe sequence
actcctcatctttatcttaattcac

SEQ ID NO: 92374 - DNA, 25 bp, Probe sequence
aactcctcatctttatcttaattca

SEQ ID NO: 92375 - DNA, 25 bp, Probe sequence
caactcctcatctttatcttaattc

SEQ ID NO: 92376 - DNA, 25 bp, Probe sequence
cacattataacttttttcgttatca

SEQ ID NO: 92377 - DNA, 25 bp, Probe sequence
catctttatcttaattcacattata

SEQ ID NO: 92378 - DNA, 25 bp, Probe sequence
ctcatctttatcttaattcacatta

SEQ ID NO: 92379 - DNA, 25 bp, Probe sequence
ctcctcatctttatcttaattcaca

SEQ ID NO: 92380 - DNA, 25 bp, Probe sequence
cctcatctttatcttaattcacatt

SEQ ID NO: 92381 - DNA, 25 bp, Probe sequence
tcctcatctttatcttaattcacat

SEQ ID NO: 92382 - DNA, 25 bp, Probe sequence
tcatctttatcttaattcacattat

SEQ ID NO: 92383 - DNA, 25 bp, Probe sequence
tcacattataacttttttcgttatc

SEQ ID NO: 92384 - DNA, 25 bp, Probe sequence
tcaactcctcatctttatcttaatt

SEQ ID NO: 92385 - DNA, 25 bp, Probe sequence
taattcacattataacttttttcgt

SEQ ID NO: 92386 - DNA, 25 bp, Probe sequence
ttcacattataacttttttcgttat

SEQ ID NO: 92387 - DNA, 25 bp, Probe sequence
aagcttcttgggattaatacccact

SEQ ID NO: 92388 - DNA, 25 bp, Probe sequence
attctaccacacttctatatttgag

SEQ ID NO: 92389 - DNA, 25 bp, Probe sequence
atatcaatatttcactttcatctca

SEQ ID NO: 92390 - DNA, 25 bp, Probe sequence
ataatcaactacttcttaatatcaa

SEQ ID NO: 92391 - DNA, 25 bp, Probe sequence
atcatgatttgattatacacgaata

SEQ ID NO: 92392 - DNA, 25 bp, Probe sequence
agactggttagctttttaaatgata

SEQ ID NO: 92393 - DNA, 25 bp, Probe sequence
accacacttctatatttgagaggaa

SEQ ID NO: 92394 - DNA, 25 bp, Probe sequence
acccacttgcttgtaatttaatcat

SEQ ID NO: 92395 - DNA, 25 bp, Probe sequence
acatgacattttattccttattaga

SEQ ID NO: 92396 - DNA, 25 bp, Probe sequence
gaatattgtgaatctgctgtaaaat

SEQ ID NO: 92397 - DNA, 25 bp, Probe sequence
gaatatatattctaccacacttcta

SEQ ID NO: 92398 - DNA, 25 bp, Probe sequence
gaatctgctgtaaaataatcaacta

SEQ ID NO: 92399 - DNA, 25 bp, Probe sequence
gaagaacatgacattttattcctta

SEQ ID NO: 92400 - DNA, 25 bp, Probe sequence
gggattaatacccacttgcttgtaa

SEQ ID NO: 92401 - DNA, 25 bp, Probe sequence
ttcactttcatctcaaaatggtaac

SEQ ID NO: 92402 - DNA, 25 bp, Probe sequence
attattttggactggtactactatc

SEQ ID NO: 92403 - DNA, 25 bp, Probe sequence
aatctaatcttaattgtctaggtta

SEQ ID NO: 92404 - DNA, 25 bp, Probe sequence
aataattgtccatgccttatgtcat

SEQ ID NO: 92405 - DNA, 25 bp, Probe sequence
aattgtccatgccttatgtcatata

SEQ ID NO: 92406 - DNA, 25 bp, Probe sequence
catgccttatgtcatatactatatg

SEQ ID NO: 92407 - DNA, 25 bp, Probe sequence
ctggtactactatccagtccttttt

SEQ ID NO: 92408 - DNA, 25 bp, Probe sequence
gaatcatgcgattcaatctaatctt

SEQ ID NO: 92409 - DNA, 25 bp, Probe sequence
gacataaggtcttggactaataatt

SEQ ID NO: 92410 - DNA, 25 bp, Probe sequence
gactaataattgtccatgccttatg

SEQ ID NO: 92411 - DNA, 25 bp, Probe sequence
gttagaattattttggactggtact

SEQ ID NO: 92412 - DNA, 25 bp, Probe sequence
gtccatgccttatgtcatatactat

SEQ ID NO: 92413 - DNA, 25 bp, Probe sequence
tgtcatatactatatgtcttatcaa

SEQ ID NO: 92414 - DNA, 25 bp, Probe sequence
tactatccagtcctttttttatgtt

SEQ ID NO: 92415 - DNA, 25 bp, Probe sequence
tactactatccagtcctttttttat

SEQ ID NO: 92416 - DNA, 25 bp, Probe sequence
ttgtccatgccttatgtcatatact

SEQ ID NO: 92417 - DNA, 25 bp, Probe sequence
atatccgacaaaacgccaataaaat

SEQ ID NO: 92418 - DNA, 25 bp, Probe sequence
atatatcaaatatccgacaaaacgc

SEQ ID NO: 92419 - DNA, 25 bp, Probe sequence
atatcacctctttaatgtcatatta

SEQ ID NO: 92420 - DNA, 25 bp, Probe sequence
atcaaatatccgacaaaacgccaat

SEQ ID NO: 92421 - DNA, 25 bp, Probe sequence
atcacctctttaatgtcatattatt

SEQ ID NO: 92422 - DNA, 25 bp, Probe sequence
atctatatgaactaagcaacttatg

SEQ ID NO: 92423 - DNA, 25 bp, Probe sequence
acctctttaatgtcatattattcat

SEQ ID NO: 92424 - DNA, 25 bp, Probe sequence
actaagcaacttatgaggagagaga

SEQ ID NO: 92425 - DNA, 25 bp, Probe sequence
aacgccaataaaatgctatgatgta

SEQ ID NO: 92426 - DNA, 25 bp, Probe sequence
aatgctatgatgtatctatatgaac

SEQ ID NO: 92427 - DNA, 25 bp, Probe sequence
caaatatccgacaaaacgccaataa

SEQ ID NO: 92428 - DNA, 25 bp, Probe sequence
ccatatcacctctttaatgtcatat

SEQ ID NO: 92429 - DNA, 25 bp, Probe sequence
gacaaaacgccaataaaatgctatg

SEQ ID NO: 92430 - DNA, 25 bp, Probe sequence
gatgtatctatatgaactaagcaac

SEQ ID NO: 92431 - DNA, 25 bp, Probe sequence
gtatctatatgaactaagcaactta

SEQ ID NO: 92432 - DNA, 25 bp, Probe sequence
attcttacttcgaaatccaatttgt

SEQ ID NO: 92433 - DNA, 25 bp, Probe sequence
atccaatttgtaatgcaactcggca

SEQ ID NO: 92434 - DNA, 25 bp, Probe sequence
actgttcttcttagatgcttaatta

SEQ ID NO: 92435 - DNA, 25 bp, Probe sequence
cataaataaggctcccttcaaaatt

SEQ ID NO: 92436 - DNA, 25 bp, Probe sequence
aatgaaatcagaacctagaacataa

SEQ ID NO: 92437 - DNA, 25 bp, Probe sequence
cactcttggaagtgcaagtcactgt

SEQ ID NO: 92438 - DNA, 25 bp, Probe sequence
gaattacgacatcatcaaaatcata

SEQ ID NO: 92439 - DNA, 25 bp, Probe sequence
gaaaatgaattgtgcactcttggaa

SEQ ID NO: 92440 - DNA, 25 bp, Probe sequence
gtgcaagtcactgtcttaattcata

SEQ ID NO: 92441 - DNA, 25 bp, Probe sequence
tgcattcttcccttttaaaactgtt

SEQ ID NO: 92442 - DNA, 25 bp, Probe sequence
tgcaactcggcaacttaaaaactat

SEQ ID NO: 92443 - DNA, 25 bp, Probe sequence
taaaactgttcttcttagatgctta

SEQ ID NO: 92444 - DNA, 25 bp, Probe sequence
tagaacataaataaggctcccttca

SEQ ID NO: 92445 - DNA, 25 bp, Probe sequence
tttgcattcttcccttttaaaactg

SEQ ID NO: 92446 - DNA, 25 bp, Probe sequence
ttaccaatgatgattcttacttcga

SEQ ID NO: 92447 - DNA, 25 bp, Probe sequence
atcatttatcaactcttttacactt

SEQ ID NO: 92448 - DNA, 25 bp, Probe sequence
aaatctagctaatgttacgttacac

SEQ ID NO: 92449 - DNA, 25 bp, Probe sequence
aatttcacctctaatttgtagagtt

SEQ ID NO: 92450 - DNA, 25 bp, Probe sequence
gcacttttgactttgactttctttg

SEQ ID NO: 92451 - DNA, 25 bp, Probe sequence
gactttgactttctttgaccttaat

SEQ ID NO: 92452 - DNA, 25 bp, Probe sequence
gactttctttgaccttaattatatt

SEQ ID NO: 92453 - DNA, 25 bp, Probe sequence
gaccttaattatattatagtcccaa

SEQ ID NO: 92454 - DNA, 25 bp, Probe sequence
gttgcacttttgactttgactttct

SEQ ID NO: 92455 - DNA, 25 bp, Probe sequence
gttacgttacacattaactagactt

SEQ ID NO: 92456 - DNA, 25 bp, Probe sequence
gttacacattaactagacttattaa

SEQ ID NO: 92457 - DNA, 25 bp, Probe sequence
gtagagttggtcaagttgcactttt

SEQ ID NO: 92458 - DNA, 25 bp, Probe sequence
tacacttaaatttcctaatatttgt

SEQ ID NO: 92459 - DNA, 25 bp, Probe sequence
tatcaactcttttacacttaaattt

SEQ ID NO: 92460 - DNA, 25 bp, Probe sequence
tatagtcccaatataatcatttatc

SEQ ID NO: 92461 - DNA, 25 bp, Probe sequence
tttgactttgactttctttgacctt

SEQ ID NO: 92462 - DNA, 25 bp, Probe sequence
attaatcatcacattcttggttcaa

SEQ ID NO: 92463 - DNA, 25 bp, Probe sequence
atgcgattaatcatcacattcttgg

SEQ ID NO: 92464 - DNA, 25 bp, Probe sequence
accaagaatgcgattaatcatcaca

SEQ ID NO: 92465 - DNA, 25 bp, Probe sequence
aaaaccaagaatgcgattaatcatc

SEQ ID NO: 92466 - DNA, 25 bp, Probe sequence
aaccaagaatgcgattaatcatcac

SEQ ID NO: 92467 - DNA, 25 bp, Probe sequence
aatgcgattaatcatcacattcttg

SEQ ID NO: 92468 - DNA, 25 bp, Probe sequence
caagaatgcgattaatcatcacatt

SEQ ID NO: 92469 - DNA, 25 bp, Probe sequence
cgattaatcatcacattcttggttc

SEQ ID NO: 92470 - DNA, 25 bp, Probe sequence
ccaagaatgcgattaatcatcacat

SEQ ID NO: 92471 - DNA, 25 bp, Probe sequence
gcgattaatcatcacattcttggtt

SEQ ID NO: 92472 - DNA, 25 bp, Probe sequence
gaatgcgattaatcatcacattctt

SEQ ID NO: 92473 - DNA, 25 bp, Probe sequence
gattaatcatcacattcttggttca

SEQ ID NO: 92474 - DNA, 25 bp, Probe sequence
tgcgattaatcatcacattcttggt

SEQ ID NO: 92475 - DNA, 25 bp, Probe sequence
taatcatcacattcttggttcaatt

SEQ ID NO: 92476 - DNA, 25 bp, Probe sequence
ttaatcatcacattcttggttcaat

SEQ ID NO: 92477 - DNA, 25 bp, Probe sequence
attatctaatgaattattaactttt

SEQ ID NO: 92478 - DNA, 25 bp, Probe sequence
ataacctctgatataatattaatat

SEQ ID NO: 92479 - DNA, 25 bp, Probe sequence
atctaatgaattattaacttttttg

SEQ ID NO: 92480 - DNA, 25 bp, Probe sequence
ctcgataacctctgatataatatta

SEQ ID NO: 92481 - DNA, 25 bp, Probe sequence
cgataacctctgatataatattaat

SEQ ID NO: 92482 - DNA, 25 bp, Probe sequence
ccctcgataacctctgatataatat

SEQ ID NO: 92483 - DNA, 25 bp, Probe sequence
cccctcgataacctctgatataata

SEQ ID NO: 92484 - DNA, 25 bp, Probe sequence
cctcgataacctctgatataatatt

SEQ ID NO: 92485 - DNA, 25 bp, Probe sequence
gataacctctgatataatattaata

SEQ ID NO: 92486 - DNA, 25 bp, Probe sequence
tgaattattaacttttttgaaagag

SEQ ID NO: 92487 - DNA, 25 bp, Probe sequence
tcgataacctctgatataatattaa

SEQ ID NO: 92488 - DNA, 25 bp, Probe sequence
tatctaatgaattattaactttttt

SEQ ID NO: 92489 - DNA, 25 bp, Probe sequence
ttatctaatgaattattaacttttt

SEQ ID NO: 92490 - DNA, 25 bp, Probe sequence
ataaattaaatctcttgtttctttg

SEQ ID NO: 92491 - DNA, 25 bp, Probe sequence
ataatctctctcctttgtgagttaa

SEQ ID NO: 92492 - DNA, 25 bp, Probe sequence
atctctctcctttgtgagttaaagt

SEQ ID NO: 92493 - DNA, 25 bp, Probe sequence
acttctttgcattatagcgaacgcc

SEQ ID NO: 92494 - DNA, 25 bp, Probe sequence
aattcacattacaataactaagttt

SEQ ID NO: 92495 - DNA, 25 bp, Probe sequence
gcgaacgccgtacctaatatataaa

SEQ ID NO: 92496 - DNA, 25 bp, Probe sequence
gctataattgttaatactttctatt

SEQ ID NO: 92497 - DNA, 25 bp, Probe sequence
gcattatagcgaacgccgtacctaa

SEQ ID NO: 92498 - DNA, 25 bp, Probe sequence
gaacgccgtacctaatatataaatt

SEQ ID NO: 92499 - DNA, 25 bp, Probe sequence
gtatcttacaaaatcaatataacac

SEQ ID NO: 92500 - DNA, 25 bp, Probe sequence
tctcttgtttctttgtacttttaat

SEQ ID NO: 92501 - DNA, 25 bp, Probe sequence
tcttgtttctttgtacttttaattg

SEQ ID NO: 92502 - DNA, 25 bp, Probe sequence
taaatctcttgtttctttgtacttt

SEQ ID NO: 92503 - DNA, 25 bp, Probe sequence
tatagcgaacgccgtacctaatata

SEQ ID NO: 92504 - DNA, 25 bp, Probe sequence
ttaattacttctttgcattatagcg

SEQ ID NO: 92505 - DNA, 25 bp, Probe sequence
attatattataatcatcactgtaaa

SEQ ID NO: 92506 - DNA, 25 bp, Probe sequence
aaagccttaatacaaagatgtcatt

SEQ ID NO: 92507 - DNA, 25 bp, Probe sequence
aatgaaatatgtctttcttattatt

SEQ ID NO: 92508 - DNA, 25 bp, Probe sequence
aatgcttcatgttgaatttgataat

SEQ ID NO: 92509 - DNA, 25 bp, Probe sequence
cggcttttatttttggccattaatg

SEQ ID NO: 92510 - DNA, 25 bp, Probe sequence
gctgcccagataaaggcggctttta

SEQ ID NO: 92511 - DNA, 25 bp, Probe sequence
gaagctgcccagataaaggcggctt

SEQ ID NO: 92512 - DNA, 25 bp, Probe sequence
gagtaatctttgtatcaaggcaatt

SEQ ID NO: 92513 - DNA, 25 bp, Probe sequence
gatgtcatttacgagtaatctttgt

SEQ ID NO: 92514 - DNA, 25 bp, Probe sequence
gtctttcttattattgaagctgccc

SEQ ID NO: 92515 - DNA, 25 bp, Probe sequence
tggccattaatgttttgtattttga

SEQ ID NO: 92516 - DNA, 25 bp, Probe sequence
tctaacccatcacttttaaatttag

SEQ ID NO: 92517 - DNA, 25 bp, Probe sequence
tcttattattgaagctgcccagata

SEQ ID NO: 92518 - DNA, 25 bp, Probe sequence
tcactgtaaaattaaatgcttcatg

SEQ ID NO: 92519 - DNA, 25 bp, Probe sequence
taaagctcaataacctctaacccat

SEQ ID NO: 92520 - DNA, 25 bp, Probe sequence
attatcgtcaaatttcagtatgaaa

SEQ ID NO: 92521 - DNA, 25 bp, Probe sequence
atttaaactgtataatatggtcaaa

SEQ ID NO: 92522 - DNA, 25 bp, Probe sequence
atgaaattggttttaatgcgcttaa

SEQ ID NO: 92523 - DNA, 25 bp, Probe sequence
actatacaaatttctaactttcact

SEQ ID NO: 92524 - DNA, 25 bp, Probe sequence
aatgcgcttaaatttgaatagccat

SEQ ID NO: 92525 - DNA, 25 bp, Probe sequence
aataccaggtattaatttaacatag

SEQ ID NO: 92526 - DNA, 25 bp, Probe sequence
gctttattatcgtcaaatttcagta

SEQ ID NO: 92527 - DNA, 25 bp, Probe sequence
gaatagccattcagataaaatcatt

SEQ ID NO: 92528 - DNA, 25 bp, Probe sequence
gagatgttactatacaaatttctaa

SEQ ID NO: 92529 - DNA, 25 bp, Probe sequence
gaggtaggaatattgactagttaat

SEQ ID NO: 92530 - DNA, 25 bp, Probe sequence
gattactttttaaactcaagtcaga

SEQ ID NO: 92531 - DNA, 25 bp, Probe sequence
gtatgaaattggttttaatgcgctt

SEQ ID NO: 92532 - DNA, 25 bp, Probe sequence
taatgctttattatcgtcaaatttc

SEQ ID NO: 92533 - DNA, 25 bp, Probe sequence
tatacaaatttctaactttcactta

SEQ ID NO: 92534 - DNA, 25 bp, Probe sequence
tttaaactcaagtcagaggtaggaa

SEQ ID NO: 92535 - DNA, 25 bp, Probe sequence
attcctcaatgtctcattttaatgt

SEQ ID NO: 92536 - DNA, 25 bp, Probe sequence
atcattcctcaatgtctcattttaa

SEQ ID NO: 92537 - DNA, 25 bp, Probe sequence
actatgcgtaagagttttctataag

SEQ ID NO: 92538 - DNA, 25 bp, Probe sequence
aaatcattcctcaatgtctcatttt

SEQ ID NO: 92539 - DNA, 25 bp, Probe sequence
aaaaatcattcctcaatgtctcatt

SEQ ID NO: 92540 - DNA, 25 bp, Probe sequence
aatgtctcattttaatgtaaactat

SEQ ID NO: 92541 - DNA, 25 bp, Probe sequence
aattttctgaaatcttaactaatat

SEQ ID NO: 92542 - DNA, 25 bp, Probe sequence
cctcctctaacaaattccgatttct

SEQ ID NO: 92543 - DNA, 25 bp, Probe sequence
gagttttctataagtgggagtgatc

SEQ ID NO: 92544 - DNA, 25 bp, Probe sequence
tccgatttctaaatttccattccct

SEQ ID NO: 92545 - DNA, 25 bp, Probe sequence
tcctctaacaaattccgatttctaa

SEQ ID NO: 92546 - DNA, 25 bp, Probe sequence
tctaaatttccattcccttcaaaat

SEQ ID NO: 92547 - DNA, 25 bp, Probe sequence
tatcaatatttttttgctttaaact

SEQ ID NO: 92548 - DNA, 25 bp, Probe sequence
tatatatcaatatttttttgcttta

SEQ ID NO: 92549 - DNA, 25 bp, Probe sequence
ttagaatttcaataaagctgcagaa

SEQ ID NO: 92550 - DNA, 25 bp, Probe sequence
atatgcctcctactttcaatctaat

SEQ ID NO: 92551 - DNA, 25 bp, Probe sequence
atatgtctccagcctaatttacaaa

SEQ ID NO: 92552 - DNA, 25 bp, Probe sequence
atgcctcctactttcaatctaattt

SEQ ID NO: 92553 - DNA, 25 bp, Probe sequence
atgtctccagcctaatttacaaagc

SEQ ID NO: 92554 - DNA, 25 bp, Probe sequence
agatatgtctccagcctaatttaca

SEQ ID NO: 92555 - DNA, 25 bp, Probe sequence
caagtttatttttagaatattcagt

SEQ ID NO: 92556 - DNA, 25 bp, Probe sequence
gcctcctactttcaatctaattttt

SEQ ID NO: 92557 - DNA, 25 bp, Probe sequence
gagatatgtctccagcctaatttac

SEQ ID NO: 92558 - DNA, 25 bp, Probe sequence
gatatgtctccagcctaatttacaa

SEQ ID NO: 92559 - DNA, 25 bp, Probe sequence
gtctccagcctaatttacaaagcat

SEQ ID NO: 92560 - DNA, 25 bp, Probe sequence
tgcctcctactttcaatctaatttt

SEQ ID NO: 92561 - DNA, 25 bp, Probe sequence
tcctactttcaatctaattttttct

SEQ ID NO: 92562 - DNA, 25 bp, Probe sequence
tctccagcctaatttacaaagcata

SEQ ID NO: 92563 - DNA, 25 bp, Probe sequence
tatgcctcctactttcaatctaatt

SEQ ID NO: 92564 - DNA, 25 bp, Probe sequence
tatccaacacaaaaagactggagat

SEQ ID NO: 92565 - DNA, 25 bp, Probe sequence
atataagtaaacctcgacaaaatcg

SEQ ID NO: 92566 - DNA, 25 bp, Probe sequence
agtaaacctcgacaaaatcgtcgag

SEQ ID NO: 92567 - DNA, 25 bp, Probe sequence
catataagtaaacctcgacaaaatc

SEQ ID NO: 92568 - DNA, 25 bp, Probe sequence
ctcgacaaaatcgtcgaggttacat

SEQ ID NO: 92569 - DNA, 25 bp, Probe sequence
cgacaaaatcgtcgaggttacatta

SEQ ID NO: 92570 - DNA, 25 bp, Probe sequence
cctcgacaaaatcgtcgaggttaca

SEQ ID NO: 92571 - DNA, 25 bp, Probe sequence
ccatataagtaaacctcgacaaaat

SEQ ID NO: 92572 - DNA, 25 bp, Probe sequence
gtaaacctcgacaaaatcgtcgagg

SEQ ID NO: 92573 - DNA, 25 bp, Probe sequence
taagtaaacctcgacaaaatcgtcg

SEQ ID NO: 92574 - DNA, 25 bp, Probe sequence
tcgacaaaatcgtcgaggttacatt

SEQ ID NO: 92575 - DNA, 25 bp, Probe sequence
taaacctcgacaaaatcgtcgaggt

SEQ ID NO: 92576 - DNA, 25 bp, Probe sequence
tataagtaaacctcgacaaaatcgt

SEQ ID NO: 92577 - DNA, 25 bp, Probe sequence
attctaacacatcttacatttttaa

SEQ ID NO: 92578 - DNA, 25 bp, Probe sequence
attcttaatcgttactatttattat

SEQ ID NO: 92579 - DNA, 25 bp, Probe sequence
atattctaacacatcttacattttt

SEQ ID NO: 92580 - DNA, 25 bp, Probe sequence
atctcactctcctatttgaatgaat

SEQ ID NO: 92581 - DNA, 25 bp, Probe sequence
acgtatattctaacacatcttacat

SEQ ID NO: 92582 - DNA, 25 bp, Probe sequence
acatctcactctcctatttgaatga

SEQ ID NO: 92583 - DNA, 25 bp, Probe sequence
aatttttcagataagtttctacact

SEQ ID NO: 92584 - DNA, 25 bp, Probe sequence
aattcattgcttaaaatttagttat

SEQ ID NO: 92585 - DNA, 25 bp, Probe sequence
ctatttattataactatctaacatt

SEQ ID NO: 92586 - DNA, 25 bp, Probe sequence
ctcactctcctatttgaatgaataa

SEQ ID NO: 92587 - DNA, 25 bp, Probe sequence
gattattaatcctttgttagtagta

SEQ ID NO: 92588 - DNA, 25 bp, Probe sequence
taatcctttgttagtagtaagttat

SEQ ID NO: 92589 - DNA, 25 bp, Probe sequence
tatacgtatattctaacacatctta

SEQ ID NO: 92590 - DNA, 25 bp, Probe sequence
ttcagataagtttctacacttataa

SEQ ID NO: 92591 - DNA, 25 bp, Probe sequence
ttctaaaattcttaatcgttactat

SEQ ID NO: 92592 - DNA, 25 bp, Probe sequence
atcatctcactccttacagtcgatg

SEQ ID NO: 92593 - DNA, 25 bp, Probe sequence
atctcactccttacagtcgatgaat

SEQ ID NO: 92594 - DNA, 25 bp, Probe sequence
agagctatattaacaattgcacatt

SEQ ID NO: 92595 - DNA, 25 bp, Probe sequence
acatattcgttgtagcaaaactatt

SEQ ID NO: 92596 - DNA, 25 bp, Probe sequence
aacaattgcacatttgatttaaaag

SEQ ID NO: 92597 - DNA, 25 bp, Probe sequence
aagcattaaagcactttcttaattt

SEQ ID NO: 92598 - DNA, 25 bp, Probe sequence
aatttaattttaccttatcatagca

SEQ ID NO: 92599 - DNA, 25 bp, Probe sequence
gaaatagtgttgcttgacatatctt

SEQ ID NO: 92600 - DNA, 25 bp, Probe sequence
gatttctttctctaaaatattttgg

SEQ ID NO: 92601 - DNA, 25 bp, Probe sequence
gttgcttgacatatcttttagtaaa

SEQ ID NO: 92602 - DNA, 25 bp, Probe sequence
gtatccacattgtattaaagcatca

SEQ ID NO: 92603 - DNA, 25 bp, Probe sequence
gtcgatgaatagtatccacattgta

SEQ ID NO: 92604 - DNA, 25 bp, Probe sequence
tttcatccaaaacactctaatatag

SEQ ID NO: 92605 - DNA, 25 bp, Probe sequence
ttatttgtttgatttctttctctaa

SEQ ID NO: 92606 - DNA, 25 bp, Probe sequence
ttatcatagcaaatgtttcatccaa

SEQ ID NO: 92607 - DNA, 25 bp, Probe sequence
atagtgcgttgcttaattaatatcg

SEQ ID NO: 92608 - DNA, 25 bp, Probe sequence
atcttcacctcaaaatattacacgt

SEQ ID NO: 92609 - DNA, 25 bp, Probe sequence
actccaaagagtctcctttcatagt

SEQ ID NO: 92610 - DNA, 25 bp, Probe sequence
actactattactttttcagcttttg

SEQ ID NO: 92611 - DNA, 25 bp, Probe sequence
aagagtctcctttcatagtgcgttg

SEQ ID NO: 92612 - DNA, 25 bp, Probe sequence
ctcctttcatagtgcgttgcttaat

SEQ ID NO: 92613 - DNA, 25 bp, Probe sequence
cctttcatagtgcgttgcttaatta

SEQ ID NO: 92614 - DNA, 25 bp, Probe sequence
gactccaaagagtctcctttcatag

SEQ ID NO: 92615 - DNA, 25 bp, Probe sequence
tccaaagagtctcctttcatagtgc

SEQ ID NO: 92616 - DNA, 25 bp, Probe sequence
tctcctttcatagtgcgttgcttaa

SEQ ID NO: 92617 - DNA, 25 bp, Probe sequence
tcacctcaaaatattacacgtaagt

SEQ ID NO: 92618 - DNA, 25 bp, Probe sequence
taactactattactttttcagcttt

SEQ ID NO: 92619 - DNA, 25 bp, Probe sequence
tactattactttttcagcttttgaa

SEQ ID NO: 92620 - DNA, 25 bp, Probe sequence
tactttttcagcttttgaaatcaat

SEQ ID NO: 92621 - DNA, 25 bp, Probe sequence
tattacacgtaagtttaactactat

SEQ ID NO: 92622 - DNA, 25 bp, Probe sequence
ataacatgctatctctaccatttca

SEQ ID NO: 92623 - DNA, 25 bp, Probe sequence
acacgacgctaaacaaaggggatgg

SEQ ID NO: 92624 - DNA, 25 bp, Probe sequence
aaggggtatgtttgttatgtgatta

SEQ ID NO: 92625 - DNA, 25 bp, Probe sequence
aattgtcacaatctgttcataatgt

SEQ ID NO: 92626 - DNA, 25 bp, Probe sequence
caacttcacttctctcttattaaaa

SEQ ID NO: 92627 - DNA, 25 bp, Probe sequence
gaacgtaatgttacacatcgatcta

SEQ ID NO: 92628 - DNA, 25 bp, Probe sequence
gacctcgtacaccataaatgtaacg

SEQ ID NO: 92629 - DNA, 25 bp, Probe sequence
gtgatatttttcgaatttaaccagt

SEQ ID NO: 92630 - DNA, 25 bp, Probe sequence
gtgtctgaatacacgacgctaaaca

SEQ ID NO: 92631 - DNA, 25 bp, Probe sequence
ggatgggagaaatttttcacttcaa

SEQ ID NO: 92632 - DNA, 25 bp, Probe sequence
taacgaggtctttttactgactctt

SEQ ID NO: 92633 - DNA, 25 bp, Probe sequence
taaattaaagacctcgtacaccata

SEQ ID NO: 92634 - DNA, 25 bp, Probe sequence
tactgactcttaattttgcaacatt

SEQ ID NO: 92635 - DNA, 25 bp, Probe sequence
tatctctaccatttcaaccttttaa

SEQ ID NO: 92636 - DNA, 25 bp, Probe sequence
tttttatacaacttcacttctctct

SEQ ID NO: 92637 - DNA, 25 bp, Probe sequence
atttcttccaaatgtttaaaatcat

SEQ ID NO: 92638 - DNA, 25 bp, Probe sequence
atatgcatatttcttccaaatgttt

SEQ ID NO: 92639 - DNA, 25 bp, Probe sequence
atgcatatttcttccaaatgtttaa

SEQ ID NO: 92640 - DNA, 25 bp, Probe sequence
aaatatgcatatttcttccaaatgt

SEQ ID NO: 92641 - DNA, 25 bp, Probe sequence
aatatgcatatttcttccaaatgtt

SEQ ID NO: 92642 - DNA, 25 bp, Probe sequence
catatttcttccaaatgtttaaaat

SEQ ID NO: 92643 - DNA, 25 bp, Probe sequence
gcatatttcttccaaatgtttaaaa

SEQ ID NO: 92644 - DNA, 25 bp, Probe sequence
gcaaatatgcatatttcttccaaat

SEQ ID NO: 92645 - DNA, 25 bp, Probe sequence
ggcaaatatgcatatttcttccaaa

SEQ ID NO: 92646 - DNA, 25 bp, Probe sequence
tgcatatttcttccaaatgtttaaa

SEQ ID NO: 92647 - DNA, 25 bp, Probe sequence
tcttccaaatgtttaaaatcatgtt

SEQ ID NO: 92648 - DNA, 25 bp, Probe sequence
tatgcatatttcttccaaatgttta

SEQ ID NO: 92649 - DNA, 25 bp, Probe sequence
ttatatattaacttaagttcgtaat

SEQ ID NO: 92650 - DNA, 25 bp, Probe sequence
ttaaaatcatgttatattagttata

SEQ ID NO: 92651 - DNA, 25 bp, Probe sequence
ttggcaaatatgcatatttcttcca

SEQ ID NO: 92652 - DNA, 25 bp, Probe sequence
attccataacattttaacacaattc

SEQ ID NO: 92653 - DNA, 25 bp, Probe sequence
atttgatacgaggtgtatacatatc

SEQ ID NO: 92654 - DNA, 25 bp, Probe sequence
acacttacgaacactatttttaatg

SEQ ID NO: 92655 - DNA, 25 bp, Probe sequence
aaaattcaactttgtcattcataat

SEQ ID NO: 92656 - DNA, 25 bp, Probe sequence
aattcaactttgtcattcataatat

SEQ ID NO: 92657 - DNA, 25 bp, Probe sequence
ctcctcttattccataacattttaa

SEQ ID NO: 92658 - DNA, 25 bp, Probe sequence
gcttttaaaattcaactttgtcatt

SEQ ID NO: 92659 - DNA, 25 bp, Probe sequence
gaacactatttttaatggtcaaatt

SEQ ID NO: 92660 - DNA, 25 bp, Probe sequence
tcctcctcttattccataacatttt

SEQ ID NO: 92661 - DNA, 25 bp, Probe sequence
taatacaaaacacttacgaacacta

SEQ ID NO: 92662 - DNA, 25 bp, Probe sequence
tcttattccataacattttaacaca

SEQ ID NO: 92663 - DNA, 25 bp, Probe sequence
tcaactttgtcattcataatatagt

SEQ ID NO: 92664 - DNA, 25 bp, Probe sequence
taacattttaacacaattcaataat

SEQ ID NO: 92665 - DNA, 25 bp, Probe sequence
taaattgaatttgatacgaggtgta

SEQ ID NO: 92666 - DNA, 25 bp, Probe sequence
tacgaacactatttttaatggtcaa

SEQ ID NO: 92667 - DNA, 25 bp, Probe sequence
atcatatacatactagcattttaaa

SEQ ID NO: 92668 - DNA, 25 bp, Probe sequence
acgtctgcattttaatatcattatt

SEQ ID NO: 92669 - DNA, 25 bp, Probe sequence
actaactttttattcgtcaatacat

SEQ ID NO: 92670 - DNA, 25 bp, Probe sequence
acattttaacactattatgactttt

SEQ ID NO: 92671 - DNA, 25 bp, Probe sequence
aaatgtttgatttagtcctttctgt

SEQ ID NO: 92672 - DNA, 25 bp, Probe sequence
aaagcatttatttatcaaaatcata

SEQ ID NO: 92673 - DNA, 25 bp, Probe sequence
aacgtattacaacgataaatgtttg

SEQ ID NO: 92674 - DNA, 25 bp, Probe sequence
aatacgtctgcattttaatatcatt

SEQ ID NO: 92675 - DNA, 25 bp, Probe sequence
gatttagtcctttctgtatcaaact

SEQ ID NO: 92676 - DNA, 25 bp, Probe sequence
gtaagataactccttataataatta

SEQ ID NO: 92677 - DNA, 25 bp, Probe sequence
tacgtcgtactaaaatacgtctgca

SEQ ID NO: 92678 - DNA, 25 bp, Probe sequence
tagaatatctaatcccagttttaac

SEQ ID NO: 92679 - DNA, 25 bp, Probe sequence
tagtcctttctgtatcaaacttgat

SEQ ID NO: 92680 - DNA, 25 bp, Probe sequence
tatctaatcccagttttaactaact

SEQ ID NO: 92681 - DNA, 25 bp, Probe sequence
tattcgtcaatacattttaacacta

SEQ ID NO: 92682 - DNA, 25 bp, Probe sequence
ataagatactatctcctcaaaagtt

SEQ ID NO: 92683 - DNA, 25 bp, Probe sequence
actacagcttttgaggagatttttt

SEQ ID NO: 92684 - DNA, 25 bp, Probe sequence
aaatcagtcagatgaaatatcaaat

SEQ ID NO: 92685 - DNA, 25 bp, Probe sequence
aagttgaaactacagcttttgagga

SEQ ID NO: 92686 - DNA, 25 bp, Probe sequence
ctttgctcacatatatgataacgtg

SEQ ID NO: 92687 - DNA, 25 bp, Probe sequence
gcttttgaggagatttttttgtgca

SEQ ID NO: 92688 - DNA, 25 bp, Probe sequence
gaatataagatactatctcctcaaa

SEQ ID NO: 92689 - DNA, 25 bp, Probe sequence
gaaactacagcttttgaggagattt

SEQ ID NO: 92690 - DNA, 25 bp, Probe sequence
gataacgtgaacaaagctgttgaat

SEQ ID NO: 92691 - DNA, 25 bp, Probe sequence
tgtgcataaaaaaaatcagtcagat

SEQ ID NO: 92692 - DNA, 25 bp, Probe sequence
tctcctcaaaagttgaaactacagc

SEQ ID NO: 92693 - DNA, 25 bp, Probe sequence
tcagtccgattattataaaagcaaa

SEQ ID NO: 92694 - DNA, 25 bp, Probe sequence
tatcaaataattttccatcagtccg

SEQ ID NO: 92695 - DNA, 25 bp, Probe sequence
ttctgtggatgtcttttaagaatat

SEQ ID NO: 92696 - DNA, 25 bp, Probe sequence
ttgaggagatttttttgtgcataaa

SEQ ID NO: 92697 - DNA, 25 bp, Probe sequence
attaacctttttaagcactgctatt

SEQ ID NO: 92698 - DNA, 25 bp, Probe sequence
aactggtgctgtttgatccaattgc

SEQ ID NO: 92699 - DNA, 25 bp, Probe sequence
aacctttttaagcactgctatttag

SEQ ID NO: 92700 - DNA, 25 bp, Probe sequence
aagcactgctatttaggatatacta

SEQ ID NO: 92701 - DNA, 25 bp, Probe sequence
aagtctcacaaactattgaaagtaa

SEQ ID NO: 92702 - DNA, 25 bp, Probe sequence
aatattaacctttttaagcactgct

SEQ ID NO: 92703 - DNA, 25 bp, Probe sequence
aattgcagacttacgagtcattgaa

SEQ ID NO: 92704 - DNA, 25 bp, Probe sequence
gaaaagtctcacaaactattgaaag

SEQ ID NO: 92705 - DNA, 25 bp, Probe sequence
gaaagtgaatggttaatttaagtat

SEQ ID NO: 92706 - DNA, 25 bp, Probe sequence
gagtcattgaaaagtctcacaaact

SEQ ID NO: 92707 - DNA, 25 bp, Probe sequence
gatcatttcattatttaaacacgtt

SEQ ID NO: 92708 - DNA, 25 bp, Probe sequence
gttattcatataaactggtgctgtt

SEQ ID NO: 92709 - DNA, 25 bp, Probe sequence
gtttgatccaattgcagacttacga

SEQ ID NO: 92710 - DNA, 25 bp, Probe sequence
ggtgctgtttgatccaattgcagac

SEQ ID NO: 92711 - DNA, 25 bp, Probe sequence
tgatccaattgcagacttacgagtc

SEQ ID NO: 92712 - DNA, 25 bp, Probe sequence
atcaaatgatcactacatatactat

SEQ ID NO: 92713 - DNA, 25 bp, Probe sequence
atgctgtttctttttttatcaaatg

SEQ ID NO: 92714 - DNA, 25 bp, Probe sequence
atgatcactacatatactataaaca

SEQ ID NO: 92715 - DNA, 25 bp, Probe sequence
agtgccccctagtagttgtattgtt

SEQ ID NO: 92716 - DNA, 25 bp, Probe sequence
aaagtgccccctagtagttgtattg

SEQ ID NO: 92717 - DNA, 25 bp, Probe sequence
aaaattcaaatttctgagcacctaa

SEQ ID NO: 92718 - DNA, 25 bp, Probe sequence
aattatcaatgctgtttcttttttt

SEQ ID NO: 92719 - DNA, 25 bp, Probe sequence
gccccctagtagttgtattgttatt

SEQ ID NO: 92720 - DNA, 25 bp, Probe sequence
gtattgttattgtaccaagagacac

SEQ ID NO: 92721 - DNA, 25 bp, Probe sequence
gtttctttttttatcaaatgatcac

SEQ ID NO: 92722 - DNA, 25 bp, Probe sequence
gtagttgtattgttattgtaccaag

SEQ ID NO: 92723 - DNA, 25 bp, Probe sequence
gtaccaagagacactatatttttaa

SEQ ID NO: 92724 - DNA, 25 bp, Probe sequence
tcaatgctgtttctttttttatcaa

SEQ ID NO: 92725 - DNA, 25 bp, Probe sequence
tatcaatgctgtttctttttttatc

SEQ ID NO: 92726 - DNA, 25 bp, Probe sequence
tttctgagcacctaaaattatcaat

SEQ ID NO: 92727 - DNA, 25 bp, Probe sequence
attcatactaaatctactaatgtaa

SEQ ID NO: 92728 - DNA, 25 bp, Probe sequence
attcattatacatcttttgcaattt

SEQ ID NO: 92729 - DNA, 25 bp, Probe sequence
acatcttttgcaatttcgacaaatt

SEQ ID NO: 92730 - DNA, 25 bp, Probe sequence
aagacaattcatactaaatctacta

SEQ ID NO: 92731 - DNA, 25 bp, Probe sequence
aataattcattatacatcttttgca

SEQ ID NO: 92732 - DNA, 25 bp, Probe sequence
ctcctttgtttaacctattgctatt

SEQ ID NO: 92733 - DNA, 25 bp, Probe sequence
cctttgtttaacctattgctattat

SEQ ID NO: 92734 - DNA, 25 bp, Probe sequence
gacaattcatactaaatctactaat

SEQ ID NO: 92735 - DNA, 25 bp, Probe sequence
gaccaaactatatgaagacaattca

SEQ ID NO: 92736 - DNA, 25 bp, Probe sequence
tgtttaacctattgctattatatca

SEQ ID NO: 92737 - DNA, 25 bp, Probe sequence
tcctcctttgtttaacctattgcta

SEQ ID NO: 92738 - DNA, 25 bp, Probe sequence
tcttttgcaatttcgacaaatttaa

SEQ ID NO: 92739 - DNA, 25 bp, Probe sequence
ttatacatcttttgcaatttcgaca

SEQ ID NO: 92740 - DNA, 25 bp, Probe sequence
ttcctcctttgtttaacctattgct

SEQ ID NO: 92741 - DNA, 25 bp, Probe sequence
ttgctattatatcaaatttctttga

SEQ ID NO: 92742 - DNA, 25 bp, Probe sequence
attttcttattaattcaaacatact

SEQ ID NO: 92743 - DNA, 25 bp, Probe sequence
atactacgattaacaatactattat

SEQ ID NO: 92744 - DNA, 25 bp, Probe sequence
atgaccattttcttattaattcaaa

SEQ ID NO: 92745 - DNA, 25 bp, Probe sequence
atggtcatttttattacattcaata

SEQ ID NO: 92746 - DNA, 25 bp, Probe sequence
accattttcttattaattcaaacat

SEQ ID NO: 92747 - DNA, 25 bp, Probe sequence
actacgattaacaatactattatgt

SEQ ID NO: 92748 - DNA, 25 bp, Probe sequence
acatactacgattaacaatactatt

SEQ ID NO: 92749 - DNA, 25 bp, Probe sequence
aatgaccattttcttattaattcaa

SEQ ID NO: 92750 - DNA, 25 bp, Probe sequence
aattcaaacatactacgattaacaa

SEQ ID NO: 92751 - DNA, 25 bp, Probe sequence
caaacatactacgattaacaatact

SEQ ID NO: 92752 - DNA, 25 bp, Probe sequence
gaccattttcttattaattcaaaca

SEQ ID NO: 92753 - DNA, 25 bp, Probe sequence
tggtcatttttattacattcaataa

SEQ ID NO: 92754 - DNA, 25 bp, Probe sequence
tgaccattttcttattaattcaaac

SEQ ID NO: 92755 - DNA, 25 bp, Probe sequence
tcttattaattcaaacatactacga

SEQ ID NO: 92756 - DNA, 25 bp, Probe sequence
ttcaaacatactacgattaacaata

SEQ ID NO: 92757 - DNA, 25 bp, Probe sequence
attatggctcatcttaaattattaa

SEQ ID NO: 92758 - DNA, 25 bp, Probe sequence
atatcctactaatcagcattttcta

SEQ ID NO: 92759 - DNA, 25 bp, Probe sequence
atatgtttattatacacgttttgtt

SEQ ID NO: 92760 - DNA, 25 bp, Probe sequence
atcagcattttctaatttctactat

SEQ ID NO: 92761 - DNA, 25 bp, Probe sequence
accgctcctttttctacaatatgtt

SEQ ID NO: 92762 - DNA, 25 bp, Probe sequence
aattattaaaaccatcttgtaacat

SEQ ID NO: 92763 - DNA, 25 bp, Probe sequence
gactttgcgtctttatttcttttat

SEQ ID NO: 92764 - DNA, 25 bp, Probe sequence
gttttattttgtatcaattcatcta

SEQ ID NO: 92765 - DNA, 25 bp, Probe sequence
gtctttatttcttttataatgccgt

SEQ ID NO: 92766 - DNA, 25 bp, Probe sequence
ggtataatatcataattgtttccaa

SEQ ID NO: 92767 - DNA, 25 bp, Probe sequence
taatttcactgttatatcctactaa

SEQ ID NO: 92768 - DNA, 25 bp, Probe sequence
taaatgtaacgactttgcgtcttta

SEQ ID NO: 92769 - DNA, 25 bp, Probe sequence
ttcaaactaacggagggtggctatt

SEQ ID NO: 92770 - DNA, 25 bp, Probe sequence
tagttttacaattatggctcatctt

SEQ ID NO: 92771 - DNA, 25 bp, Probe sequence
tatacacgttttgttgatgttaata

SEQ ID NO: 92772 - DNA, 25 bp, Probe sequence
atacggtcatgattcttaagttact

SEQ ID NO: 92773 - DNA, 25 bp, Probe sequence
atgccataggttattcatttgatac

SEQ ID NO: 92774 - DNA, 25 bp, Probe sequence
agtgtcgaatcatttatacggtcat

SEQ ID NO: 92775 - DNA, 25 bp, Probe sequence
acatcatagtatacctttttctttt

SEQ ID NO: 92776 - DNA, 25 bp, Probe sequence
aaatagcaaaggtctcactaagcaa

SEQ ID NO: 92777 - DNA, 25 bp, Probe sequence
aattgcccactttaccggaagatat

SEQ ID NO: 92778 - DNA, 25 bp, Probe sequence
caaattcgattatacaattgagctg

SEQ ID NO: 92779 - DNA, 25 bp, Probe sequence
ctcccctctgacaaaatgccatagg

SEQ ID NO: 92780 - DNA, 25 bp, Probe sequence
gcccactttaccggaagatatcttc

SEQ ID NO: 92781 - DNA, 25 bp, Probe sequence
gcaaaggtctcactaagcaatttaa

SEQ ID NO: 92782 - DNA, 25 bp, Probe sequence
gcaatttaaattgcccactttaccg

SEQ ID NO: 92783 - DNA, 25 bp, Probe sequence
gtacaaacaaaaagacctatgctaa

SEQ ID NO: 92784 - DNA, 25 bp, Probe sequence
ggaagatatcttcgtaatgacgata

SEQ ID NO: 92785 - DNA, 25 bp, Probe sequence
tcatgattcttaagttactcccctc

SEQ ID NO: 92786 - DNA, 25 bp, Probe sequence
tatacaatttatttttcttcaacga

SEQ ID NO: 92787 - DNA, 25 bp, Probe sequence
atgacacattaacacctaatttgct

SEQ ID NO: 92788 - DNA, 25 bp, Probe sequence
atgtccactccattcaataaaatca

SEQ ID NO: 92789 - DNA, 25 bp, Probe sequence
actccattcaataaaatcacttatc

SEQ ID NO: 92790 - DNA, 25 bp, Probe sequence
aaatcacttatcattatgacacatt

SEQ ID NO: 92791 - DNA, 25 bp, Probe sequence
cacattaacacctaatttgctttaa

SEQ ID NO: 92792 - DNA, 25 bp, Probe sequence
cacctaatttgctttaaaatctata

SEQ ID NO: 92793 - DNA, 25 bp, Probe sequence
cattatgacacattaacacctaatt

SEQ ID NO: 92794 - DNA, 25 bp, Probe sequence
ccactccattcaataaaatcactta

SEQ ID NO: 92795 - DNA, 25 bp, Probe sequence
gacacattaacacctaatttgcttt

SEQ ID NO: 92796 - DNA, 25 bp, Probe sequence
gtccactccattcaataaaatcact

SEQ ID NO: 92797 - DNA, 25 bp, Probe sequence
tgtccactccattcaataaaatcac

SEQ ID NO: 92798 - DNA, 25 bp, Probe sequence
taatgtccactccattcaataaaat

SEQ ID NO: 92799 - DNA, 25 bp, Probe sequence
taacacctaatttgctttaaaatct

SEQ ID NO: 92800 - DNA, 25 bp, Probe sequence
taaaatcacttatcattatgacaca

SEQ ID NO: 92801 - DNA, 25 bp, Probe sequence
tatcattatgacacattaacaccta

SEQ ID NO: 92802 - DNA, 25 bp, Probe sequence
acctctcattgttactagtttacca

SEQ ID NO: 92803 - DNA, 25 bp, Probe sequence
aagcaatctaagttccagttaaaat

SEQ ID NO: 92804 - DNA, 25 bp, Probe sequence
cacctctcattgttactagtttacc

SEQ ID NO: 92805 - DNA, 25 bp, Probe sequence
cattttgaaaaccaatcgtcttata

SEQ ID NO: 92806 - DNA, 25 bp, Probe sequence
cattgttactagtttaccattttga

SEQ ID NO: 92807 - DNA, 25 bp, Probe sequence
ctcattgttactagtttaccatttt

SEQ ID NO: 92808 - DNA, 25 bp, Probe sequence
ctctcattgttactagtttaccatt

SEQ ID NO: 92809 - DNA, 25 bp, Probe sequence
gcaatctaagttccagttaaaatct

SEQ ID NO: 92810 - DNA, 25 bp, Probe sequence
taaaaaagcaatctaagttccagtt

SEQ ID NO: 92811 - DNA, 25 bp, Probe sequence
gttacacctctcattgttactagtt

SEQ ID NO: 92812 - DNA, 25 bp, Probe sequence
tgaaaaccaatcgtcttataaaata

SEQ ID NO: 92813 - DNA, 25 bp, Probe sequence
taagttccagttaaaatctatatta

SEQ ID NO: 92814 - DNA, 25 bp, Probe sequence
taactaaacttagattgctattata

SEQ ID NO: 92815 - DNA, 25 bp, Probe sequence
tacacctctcattgttactagttta

SEQ ID NO: 92816 - DNA, 25 bp, Probe sequence
taccattttgaaaaccaatcgtctt

SEQ ID NO: 92817 - DNA, 25 bp, Probe sequence
atttcactgttcttttatatcaatt

SEQ ID NO: 92818 - DNA, 25 bp, Probe sequence
acctttcctagataatcttctctaa

SEQ ID NO: 92819 - DNA, 25 bp, Probe sequence
aaacctttcctagataatcttctct

SEQ ID NO: 92820 - DNA, 25 bp, Probe sequence
aacctttcctagataatcttctcta

SEQ ID NO: 92821 - DNA, 25 bp, Probe sequence
cctttcctagataatcttctctaag

SEQ ID NO: 92822 - DNA, 25 bp, Probe sequence
gaatttcactgttcttttatatcaa

SEQ ID NO: 92823 - DNA, 25 bp, Probe sequence
gaatgagaatttcactgttctttta

SEQ ID NO: 92824 - DNA, 25 bp, Probe sequence
gagaatttcactgttcttttatatc

SEQ ID NO: 92825 - DNA, 25 bp, Probe sequence
gataatcttctctaagaaaggtttt

SEQ ID NO: 92826 - DNA, 25 bp, Probe sequence
tctctaagaaaggtttttatacttg

SEQ ID NO: 92827 - DNA, 25 bp, Probe sequence
tcactgttcttttatatcaatttta

SEQ ID NO: 92828 - DNA, 25 bp, Probe sequence
tacttgttgaacttataattaattt

SEQ ID NO: 92829 - DNA, 25 bp, Probe sequence
tttcctagataatcttctctaagaa

SEQ ID NO: 92830 - DNA, 25 bp, Probe sequence
ttttttgtttacttatatataatga

SEQ ID NO: 92831 - DNA, 25 bp, Probe sequence
ttcactgttcttttatatcaatttt

SEQ ID NO: 92832 - DNA, 25 bp, Probe sequence
attgcaaattaacttaatcttgtta

SEQ ID NO: 92833 - DNA, 25 bp, Probe sequence
atatttgtgcttgatattcaaacac

SEQ ID NO: 92834 - DNA, 25 bp, Probe sequence
atagtgtaaatgttctgcatatttt

SEQ ID NO: 92835 - DNA, 25 bp, Probe sequence
atgcggaatgttttataaatatagt

SEQ ID NO: 92836 - DNA, 25 bp, Probe sequence
aaatatgcggaatgttttataaata

SEQ ID NO: 92837 - DNA, 25 bp, Probe sequence
aaatatagtgtaaatgttctgcata

SEQ ID NO: 92838 - DNA, 25 bp, Probe sequence
aacttaatcttgttataataatatt

SEQ ID NO: 92839 - DNA, 25 bp, Probe sequence
aatgttctgcatatttttttaaggt

SEQ ID NO: 92840 - DNA, 25 bp, Probe sequence
gttctgcatatttttttaaggtatc

SEQ ID NO: 92841 - DNA, 25 bp, Probe sequence
gtaaatgttctgcatatttttttaa

SEQ ID NO: 92842 - DNA, 25 bp, Probe sequence
gtgcttgatattcaaacacatacaa

SEQ ID NO: 92843 - DNA, 25 bp, Probe sequence
gtgtaaatgttctgcatattttttt

SEQ ID NO: 92844 - DNA, 25 bp, Probe sequence
tctgcatatttttttaaggtatcta

SEQ ID NO: 92845 - DNA, 25 bp, Probe sequence
tatttttttaaggtatctattgcaa

SEQ ID NO: 92846 - DNA, 25 bp, Probe sequence
tttttaaggtatctattgcaaatta

SEQ ID NO: 92847 - DNA, 25 bp, Probe sequence
atatcattaattgtatttttatatt

SEQ ID NO: 92848 - DNA, 25 bp, Probe sequence
atcaatgaatattctgactattagt

SEQ ID NO: 92849 - DNA, 25 bp, Probe sequence
atctttatatcattaattgtatttt

SEQ ID NO: 92850 - DNA, 25 bp, Probe sequence
atgaatattctgactattagttaaa

SEQ ID NO: 92851 - DNA, 25 bp, Probe sequence
acatttttctaattttgaaatcaat

SEQ ID NO: 92852 - DNA, 25 bp, Probe sequence
aataacttgacaactcagaatttta

SEQ ID NO: 92853 - DNA, 25 bp, Probe sequence
aataataacttgacaactcagaatt

SEQ ID NO: 92854 - DNA, 25 bp, Probe sequence
aatatctttatatcattaattgtat

SEQ ID NO: 92855 - DNA, 25 bp, Probe sequence
caatgaatattctgactattagtta

SEQ ID NO: 92856 - DNA, 25 bp, Probe sequence
gaatattctgactattagttaaaaa

SEQ ID NO: 92857 - DNA, 25 bp, Probe sequence
gaaatcaatgaatattctgactatt

SEQ ID NO: 92858 - DNA, 25 bp, Probe sequence
gtatacatttttctaattttgaaat

SEQ ID NO: 92859 - DNA, 25 bp, Probe sequence
taataacttgacaactcagaatttt

SEQ ID NO: 92860 - DNA, 25 bp, Probe sequence
taaaaattattgtacattttcacca

SEQ ID NO: 92861 - DNA, 25 bp, Probe sequence
ttttcaccaaaataataacttgaca

SEQ ID NO: 92862 - DNA, 25 bp, Probe sequence
atagtccttttatgattgcgttatg

SEQ ID NO: 92863 - DNA, 25 bp, Probe sequence
agaatagtccttttatgattgcgtt

SEQ ID NO: 92864 - DNA, 25 bp, Probe sequence
acgattaaaggactattcttacatg

SEQ ID NO: 92865 - DNA, 25 bp, Probe sequence
aagaatagtccttttatgattgcgt

SEQ ID NO: 92866 - DNA, 25 bp, Probe sequence
aatagtccttttatgattgcgttat

SEQ ID NO: 92867 - DNA, 25 bp, Probe sequence
gaatagtccttttatgattgcgtta

SEQ ID NO: 92868 - DNA, 25 bp, Probe sequence
gactattcttacatgtatgagatgt

SEQ ID NO: 92869 - DNA, 25 bp, Probe sequence
gagatgttaagaatagtccttttat

SEQ ID NO: 92870 - DNA, 25 bp, Probe sequence
gattgcgttatggaattcgaatcaa

SEQ ID NO: 92871 - DNA, 25 bp, Probe sequence
gtccttttatgattgcgttatggaa

SEQ ID NO: 92872 - DNA, 25 bp, Probe sequence
tatgattgcgttatggaattcgaat

SEQ ID NO: 92873 - DNA, 25 bp, Probe sequence
tagtccttttatgattgcgttatgg

SEQ ID NO: 92874 - DNA, 25 bp, Probe sequence
tattcttacatgtatgagatgttaa

SEQ ID NO: 92875 - DNA, 25 bp, Probe sequence
tttatgattgcgttatggaattcga

SEQ ID NO: 92876 - DNA, 25 bp, Probe sequence
ttgcgttatggaattcgaatcaatg

SEQ ID NO: 92877 - DNA, 25 bp, Probe sequence
atcataactaaattatattgtacta

SEQ ID NO: 92878 - DNA, 25 bp, Probe sequence
agtcctccttaaatcataactaaat

SEQ ID NO: 92879 - DNA, 25 bp, Probe sequence
aagccgatatttagaatgatttgtg

SEQ ID NO: 92880 - DNA, 25 bp, Probe sequence
aatgtaactttaagccgatatttag

SEQ ID NO: 92881 - DNA, 25 bp, Probe sequence
gccgatatttagaatgatttgtgag

SEQ ID NO: 92882 - DNA, 25 bp, Probe sequence
gagtatataattggcattttgagca

SEQ ID NO: 92883 - DNA, 25 bp, Probe sequence
gatttgtgagtatataattggcatt

SEQ ID NO: 92884 - DNA, 25 bp, Probe sequence
gtaactttaagccgatatttagaat

SEQ ID NO: 92885 - DNA, 25 bp, Probe sequence
gtcctccttaaatcataactaaatt

SEQ ID NO: 92886 - DNA, 25 bp, Probe sequence
ggcattttgagcaaagttaaggcat

SEQ ID NO: 92887 - DNA, 25 bp, Probe sequence
tgtactaaaattcacttaacaaata

SEQ ID NO: 92888 - DNA, 25 bp, Probe sequence
taagtcctccttaaatcataactaa

SEQ ID NO: 92889 - DNA, 25 bp, Probe sequence
taaaatgtaactttaagccgatatt

SEQ ID NO: 92890 - DNA, 25 bp, Probe sequence
tataattggcattttgagcaaagtt

SEQ ID NO: 92891 - DNA, 25 bp, Probe sequence
ttttgagcaaagttaaggcataaat

SEQ ID NO: 92892 - DNA, 25 bp, Probe sequence
atagccaccatcaattcaacttgcc

SEQ ID NO: 92893 - DNA, 25 bp, Probe sequence
actgcttgccgttaaaaatgtatac

SEQ ID NO: 92894 - DNA, 25 bp, Probe sequence
acttgcccacaaaatattatactat

SEQ ID NO: 92895 - DNA, 25 bp, Probe sequence
aaagcatgccttgaatcttcgtatt

SEQ ID NO: 92896 - DNA, 25 bp, Probe sequence
aactgactaaaatataacctcaata

SEQ ID NO: 92897 - DNA, 25 bp, Probe sequence
aacctcaataataactgcttgccgt

SEQ ID NO: 92898 - DNA, 25 bp, Probe sequence
aagcttttcttagaacacagacgtc

SEQ ID NO: 92899 - DNA, 25 bp, Probe sequence
caattcaacttgcccacaaaatatt

SEQ ID NO: 92900 - DNA, 25 bp, Probe sequence
cttgccgttaaaaatgtatacacta

SEQ ID NO: 92901 - DNA, 25 bp, Probe sequence
ccatcaattcaacttgcccacaaaa

SEQ ID NO: 92902 - DNA, 25 bp, Probe sequence
gccttgaatcttcgtattgcttttc

SEQ ID NO: 92903 - DNA, 25 bp, Probe sequence
gcatgccttgaatcttcgtattgct

SEQ ID NO: 92904 - DNA, 25 bp, Probe sequence
gaatcttcgtattgcttttctaaag

SEQ ID NO: 92905 - DNA, 25 bp, Probe sequence
gaacacagacgtctaagaaaagctt

SEQ ID NO: 92906 - DNA, 25 bp, Probe sequence
gtatacactataataaagcatgcct

SEQ ID NO: 92907 - DNA, 25 bp, Probe sequence
attttcctttcaaatctgacatgtt

SEQ ID NO: 92908 - DNA, 25 bp, Probe sequence
atcataattgatttctaccacagta

SEQ ID NO: 92909 - DNA, 25 bp, Probe sequence
atgcaggaacatgtcgcctaatgag

SEQ ID NO: 92910 - DNA, 25 bp, Probe sequence
accacagtatgattttcctttcaaa

SEQ ID NO: 92911 - DNA, 25 bp, Probe sequence
aaatctgacatgtttagcaggcaat

SEQ ID NO: 92912 - DNA, 25 bp, Probe sequence
aagtactaccatataatcataattg

SEQ ID NO: 92913 - DNA, 25 bp, Probe sequence
caggaacatgtcgcctaatgagccc

SEQ ID NO: 92914 - DNA, 25 bp, Probe sequence
cctttcaaatctgacatgtttagca

SEQ ID NO: 92915 - DNA, 25 bp, Probe sequence
gcaggcaatatacggaaaatacttc

SEQ ID NO: 92916 - DNA, 25 bp, Probe sequence
gaacttcattacatattcaatagaa

SEQ ID NO: 92917 - DNA, 25 bp, Probe sequence
gacatgtttagcaggcaatatacgg

SEQ ID NO: 92918 - DNA, 25 bp, Probe sequence
gatttctaccacagtatgattttcc

SEQ ID NO: 92919 - DNA, 25 bp, Probe sequence
gtatgattttcctttcaaatctgac

SEQ ID NO: 92920 - DNA, 25 bp, Probe sequence
tctaccacagtatgattttcctttc

SEQ ID NO: 92921 - DNA, 25 bp, Probe sequence
ttcaaaattttgttacacatctaat

SEQ ID NO: 92922 - DNA, 25 bp, Probe sequence
attgtattattgttaaattgcgcag

SEQ ID NO: 92923 - DNA, 25 bp, Probe sequence
attattgttaaattgcgcagtgcat

SEQ ID NO: 92924 - DNA, 25 bp, Probe sequence
atgcaggaacatgtcccctattgaa

SEQ ID NO: 92925 - DNA, 25 bp, Probe sequence
accactttatgttaaatggacatca

SEQ ID NO: 92926 - DNA, 25 bp, Probe sequence
caggaacatgtcccctattgaaccc

SEQ ID NO: 92927 - DNA, 25 bp, Probe sequence
gcgcagtgcataaatagacgacatg

SEQ ID NO: 92928 - DNA, 25 bp, Probe sequence
gcaggaacatgtcccctattgaacc

SEQ ID NO: 92929 - DNA, 25 bp, Probe sequence
gtattattgttaaattgcgcagtgc

SEQ ID NO: 92930 - DNA, 25 bp, Probe sequence
gtgcataaatagacgacatgcagga

SEQ ID NO: 92931 - DNA, 25 bp, Probe sequence
tggacatcaaagtataattgtatta

SEQ ID NO: 92932 - DNA, 25 bp, Probe sequence
tgcaggaacatgtcccctattgaac

SEQ ID NO: 92933 - DNA, 25 bp, Probe sequence
tgcgcagtgcataaatagacgacat

SEQ ID NO: 92934 - DNA, 25 bp, Probe sequence
tattgttaaattgcgcagtgcataa

SEQ ID NO: 92935 - DNA, 25 bp, Probe sequence
ttgcgcagtgcataaatagacgaca

SEQ ID NO: 92936 - DNA, 25 bp, Probe sequence
ttgttaaattgcgcagtgcataaat

SEQ ID NO: 92937 - DNA, 25 bp, Probe sequence
agtcaacatttcccattgattggct

SEQ ID NO: 92938 - DNA, 25 bp, Probe sequence
aacatttcccattgattggctttta

SEQ ID NO: 92939 - DNA, 25 bp, Probe sequence
caacatttcccattgattggctttt

SEQ ID NO: 92940 - DNA, 25 bp, Probe sequence
catttcccattgattggcttttaat

SEQ ID NO: 92941 - DNA, 25 bp, Probe sequence
gccaatcaaacggagtgttgaagtc

SEQ ID NO: 92942 - DNA, 25 bp, Probe sequence
gaagtcaacatttcccattgattgg

SEQ ID NO: 92943 - DNA, 25 bp, Probe sequence
gattggcttttaattttatcttttg

SEQ ID NO: 92944 - DNA, 25 bp, Probe sequence
gttgaagtcaacatttcccattgat

SEQ ID NO: 92945 - DNA, 25 bp, Probe sequence
gtaacacattataaaagccaatcaa

SEQ ID NO: 92946 - DNA, 25 bp, Probe sequence
gtcaacatttcccattgattggctt

SEQ ID NO: 92947 - DNA, 25 bp, Probe sequence
tggcttttaattttatcttttggat

SEQ ID NO: 92948 - DNA, 25 bp, Probe sequence
tgttgaagtcaacatttcccattga

SEQ ID NO: 92949 - DNA, 25 bp, Probe sequence
tcccattgattggcttttaatttta

SEQ ID NO: 92950 - DNA, 25 bp, Probe sequence
taaaagccaatcaaacggagtgttg

SEQ ID NO: 92951 - DNA, 25 bp, Probe sequence
tttcccattgattggcttttaattt

SEQ ID NO: 92952 - DNA, 25 bp, Probe sequence
atttcaaattcttctaccgcacaat

SEQ ID NO: 92953 - DNA, 25 bp, Probe sequence
aattcttctaccgcacaatttaatt

SEQ ID NO: 92954 - DNA, 25 bp, Probe sequence
aatttcaaattcttctaccgcacaa

SEQ ID NO: 92955 - DNA, 25 bp, Probe sequence
caaattcttctaccgcacaatttaa

SEQ ID NO: 92956 - DNA, 25 bp, Probe sequence
cttctaccgcacaatttaattttat

SEQ ID NO: 92957 - DNA, 25 bp, Probe sequence
ccttttaatcaagccaattcaattt

SEQ ID NO: 92958 - DNA, 25 bp, Probe sequence
tcttctaccgcacaatttaatttta

SEQ ID NO: 92959 - DNA, 25 bp, Probe sequence
tctaccgcacaatttaattttattg

SEQ ID NO: 92960 - DNA, 25 bp, Probe sequence
taatttcaaattcttctaccgcaca

SEQ ID NO: 92961 - DNA, 25 bp, Probe sequence
tttcaaattcttctaccgcacaatt

SEQ ID NO: 92962 - DNA, 25 bp, Probe sequence
ttttaatcaagccaattcaatttaa

SEQ ID NO: 92963 - DNA, 25 bp, Probe sequence
ttaatttcaaattcttctaccgcac

SEQ ID NO: 92964 - DNA, 25 bp, Probe sequence
ttcttctaccgcacaatttaatttt

SEQ ID NO: 92965 - DNA, 25 bp, Probe sequence
ttcaaattcttctaccgcacaattt

SEQ ID NO: 92966 - DNA, 25 bp, Probe sequence
ttaattttattgtatgatgtattta

SEQ ID NO: 92967 - DNA, 25 bp, Probe sequence
atctcaaaccatcattctaattatc

SEQ ID NO: 92968 - DNA, 25 bp, Probe sequence
aatctttactttccacatgtttaca

SEQ ID NO: 92969 - DNA, 25 bp, Probe sequence
aatactcatttatctcaaaccatca

SEQ ID NO: 92970 - DNA, 25 bp, Probe sequence
gacttaaacatctttctacaacaat

SEQ ID NO: 92971 - DNA, 25 bp, Probe sequence
gacgcactggttaataatactcatt

SEQ ID NO: 92972 - DNA, 25 bp, Probe sequence
gatgcaatagttaattcatttccct

SEQ ID NO: 92973 - DNA, 25 bp, Probe sequence
gtttattatcaaatcttcttattat

SEQ ID NO: 92974 - DNA, 25 bp, Probe sequence
ggcctctaattttgaagatgacgca

SEQ ID NO: 92975 - DNA, 25 bp, Probe sequence
tccatactactctcgcaatttcata

SEQ ID NO: 92976 - DNA, 25 bp, Probe sequence
tctaattatccatactactctcgca

SEQ ID NO: 92977 - DNA, 25 bp, Probe sequence
tcatttccctataatctttgcacta

SEQ ID NO: 92978 - DNA, 25 bp, Probe sequence
tataaacagcaaatggcctctaatt

SEQ ID NO: 92979 - DNA, 25 bp, Probe sequence
tatttggtatgctattattttttct

SEQ ID NO: 92980 - DNA, 25 bp, Probe sequence
tattttttcttatcatagtttatta

SEQ ID NO: 92981 - DNA, 25 bp, Probe sequence
tttgcactatgctgtactaatcttt

SEQ ID NO: 92982 - DNA, 25 bp, Probe sequence
attgtgacaatgacgtttaaaaagc

SEQ ID NO: 92983 - DNA, 25 bp, Probe sequence
atgaatgggtatatagttcgtaaga

SEQ ID NO: 92984 - DNA, 25 bp, Probe sequence
atgggtatatagttcgtaagatata

SEQ ID NO: 92985 - DNA, 25 bp, Probe sequence
aatgggtatatagttcgtaagatat

SEQ ID NO: 92986 - DNA, 25 bp, Probe sequence
caatgacgtttaaaaagcatatatg

SEQ ID NO: 92987 - DNA, 25 bp, Probe sequence
gaatgggtatatagttcgtaagata

SEQ ID NO: 92988 - DNA, 25 bp, Probe sequence
gacaatgacgtttaaaaagcatata

SEQ ID NO: 92989 - DNA, 25 bp, Probe sequence
gacgtttaaaaagcatatatgaatg

SEQ ID NO: 92990 - DNA, 25 bp, Probe sequence
gtgacaatgacgtttaaaaagcata

SEQ ID NO: 92991 - DNA, 25 bp, Probe sequence
gggtatatagttcgtaagatataga

SEQ ID NO: 92992 - DNA, 25 bp, Probe sequence
tgtgacaatgacgtttaaaaagcat

SEQ ID NO: 92993 - DNA, 25 bp, Probe sequence
tgacaatgacgtttaaaaagcatat

SEQ ID NO: 92994 - DNA, 25 bp, Probe sequence
tgaatgggtatatagttcgtaagat

SEQ ID NO: 92995 - DNA, 25 bp, Probe sequence
tatgaatgggtatatagttcgtaag

SEQ ID NO: 92996 - DNA, 25 bp, Probe sequence
ttgtgacaatgacgtttaaaaagca

SEQ ID NO: 92997 - DNA, 25 bp, Probe sequence
atactactcggcaatcgacttacat

SEQ ID NO: 92998 - DNA, 25 bp, Probe sequence
actcggcaatcgacttacatcgaac

SEQ ID NO: 92999 - DNA, 25 bp, Probe sequence
actactcggcaatcgacttacatcg

SEQ ID NO: 93000 - DNA, 25 bp, Probe sequence
acttacatcgaactgtcgagttttt

SEQ ID NO: 93001 - DNA, 25 bp, Probe sequence
aatgatactactcggcaatcgactt

SEQ ID NO: 93002 - DNA, 25 bp, Probe sequence
aatcgacttacatcgaactgtcgag

SEQ ID NO: 93003 - DNA, 25 bp, Probe sequence
ctactcggcaatcgacttacatcga

SEQ ID NO: 93004 - DNA, 25 bp, Probe sequence
gcaatcgacttacatcgaactgtcg

SEQ ID NO: 93005 - DNA, 25 bp, Probe sequence
gaaaatgatactactcggcaatcga

SEQ ID NO: 93006 - DNA, 25 bp, Probe sequence
gacttacatcgaactgtcgagtttt

SEQ ID NO: 93007 - DNA, 25 bp, Probe sequence
gatactactcggcaatcgacttaca

SEQ ID NO: 93008 - DNA, 25 bp, Probe sequence
ggcaatcgacttacatcgaactgtc

SEQ ID NO: 93009 - DNA, 25 bp, Probe sequence
tgatactactcggcaatcgacttac

SEQ ID NO: 93010 - DNA, 25 bp, Probe sequence
tcggcaatcgacttacatcgaactg

SEQ ID NO: 93011 - DNA, 25 bp, Probe sequence
tactactcggcaatcgacttacatc

SEQ ID NO: 93012 - DNA, 25 bp, Probe sequence
attgtgttacaagaattgcttaaac

SEQ ID NO: 93013 - DNA, 25 bp, Probe sequence
atcatttttggataattgtgttaca

SEQ ID NO: 93014 - DNA, 25 bp, Probe sequence
acgtcaattgacctttatgctactt

SEQ ID NO: 93015 - DNA, 25 bp, Probe sequence
aacttatcttgcaatttttcacgtc

SEQ ID NO: 93016 - DNA, 25 bp, Probe sequence
aagaattgcttaaacttatcttgca

SEQ ID NO: 93017 - DNA, 25 bp, Probe sequence
aattgacctttatgctactttctat

SEQ ID NO: 93018 - DNA, 25 bp, Probe sequence
gcaatttttcacgtcaattgacctt

SEQ ID NO: 93019 - DNA, 25 bp, Probe sequence
gtcaattgacctttatgctactttc

SEQ ID NO: 93020 - DNA, 25 bp, Probe sequence
gtcttttttcactcattattatatt

SEQ ID NO: 93021 - DNA, 25 bp, Probe sequence
tgacctttatgctactttctattaa

SEQ ID NO: 93022 - DNA, 25 bp, Probe sequence
tcttcgtcttttttcactcattatt

SEQ ID NO: 93023 - DNA, 25 bp, Probe sequence
tatgctactttctattaaaatatct

SEQ ID NO: 93024 - DNA, 25 bp, Probe sequence
ttatcttgcaatttttcacgtcaat

SEQ ID NO: 93025 - DNA, 25 bp, Probe sequence
ttcactcattattatattgtatcat

SEQ ID NO: 93026 - DNA, 25 bp, Probe sequence
ttcgtcttttttcactcattattat

SEQ ID NO: 93027 - DNA, 25 bp, Probe sequence
attctttctctattaatttactcaa

SEQ ID NO: 93028 - DNA, 25 bp, Probe sequence
ataaaaaagccacctatcgtcgcta

SEQ ID NO: 93029 - DNA, 25 bp, Probe sequence
agaattcaatttctcaccagctcgt

SEQ ID NO: 93030 - DNA, 25 bp, Probe sequence
agcgggttggcgagaattcaatttc

SEQ ID NO: 93031 - DNA, 25 bp, Probe sequence
acgcaagtgacttaatatcatattc

SEQ ID NO: 93032 - DNA, 25 bp, Probe sequence
aacatttattctttctctattaatt

SEQ ID NO: 93033 - DNA, 25 bp, Probe sequence
aatttactcaaaccatcttatcttt

SEQ ID NO: 93034 - DNA, 25 bp, Probe sequence
cagctcgttttttcattgtaataat

SEQ ID NO: 93035 - DNA, 25 bp, Probe sequence
ctttaacatttattctttctctatt

SEQ ID NO: 93036 - DNA, 25 bp, Probe sequence
ctcaaaccatcttatctttatgata

SEQ ID NO: 93037 - DNA, 25 bp, Probe sequence
gctaataaacgacgcaagtgactta

SEQ ID NO: 93038 - DNA, 25 bp, Probe sequence
gatttcacttcataaagcgggttgg

SEQ ID NO: 93039 - DNA, 25 bp, Probe sequence
tcacttcataaagcgggttggcgag

SEQ ID NO: 93040 - DNA, 25 bp, Probe sequence
tcaccagctcgttttttcattgtaa

SEQ ID NO: 93041 - DNA, 25 bp, Probe sequence
taatctttaacatttattctttctc

SEQ ID NO: 93042 - DNA, 25 bp, Probe sequence
atattttgatttaaatggagggtat

SEQ ID NO: 93043 - DNA, 25 bp, Probe sequence
atagaagcaaagtcttagcaacgca

SEQ ID NO: 93044 - DNA, 25 bp, Probe sequence
agaagcaaagtcttagcaacgcaaa

SEQ ID NO: 93045 - DNA, 25 bp, Probe sequence
agcaaagtcttagcaacgcaaaata

SEQ ID NO: 93046 - DNA, 25 bp, Probe sequence
acttcatcttaatttagatttagta

SEQ ID NO: 93047 - DNA, 25 bp, Probe sequence
aaagtcttagcaacgcaaaatattt

SEQ ID NO: 93048 - DNA, 25 bp, Probe sequence
aagcaaagtcttagcaacgcaaaat

SEQ ID NO: 93049 - DNA, 25 bp, Probe sequence
aatagaagcaaagtcttagcaacgc

SEQ ID NO: 93050 - DNA, 25 bp, Probe sequence
caaagtcttagcaacgcaaaatatt

SEQ ID NO: 93051 - DNA, 25 bp, Probe sequence
cttcatcttaatttagatttagtaa

SEQ ID NO: 93052 - DNA, 25 bp, Probe sequence
gcaaagtcttagcaacgcaaaatat

SEQ ID NO: 93053 - DNA, 25 bp, Probe sequence
gaagcaaagtcttagcaacgcaaaa

SEQ ID NO: 93054 - DNA, 25 bp, Probe sequence
tagaagcaaagtcttagcaacgcaa

SEQ ID NO: 93055 - DNA, 25 bp, Probe sequence
ttttgatttaaatggagggtattat

SEQ ID NO: 93056 - DNA, 25 bp, Probe sequence
ttcatcttaatttagatttagtaaa

SEQ ID NO: 93057 - DNA, 25 bp, Probe sequence
atcaccattcatattaatctacctt

SEQ ID NO: 93058 - DNA, 25 bp, Probe sequence
atgctaacttataattgttcttcga

SEQ ID NO: 93059 - DNA, 25 bp, Probe sequence
agagactgtaaatactaccgagtta

SEQ ID NO: 93060 - DNA, 25 bp, Probe sequence
acacctcactcaaaatgattctatc

SEQ ID NO: 93061 - DNA, 25 bp, Probe sequence
aaacaaatactttccattcgctctc

SEQ ID NO: 93062 - DNA, 25 bp, Probe sequence
ctcctttaaacacctcactcaaaat

SEQ ID NO: 93063 - DNA, 25 bp, Probe sequence
gacgatcttatcaatttaactcaat

SEQ ID NO: 93064 - DNA, 25 bp, Probe sequence
gatatgttgaactggacgtcgtgaa

SEQ ID NO: 93065 - DNA, 25 bp, Probe sequence
gtacgttcagttttttatattctat

SEQ ID NO: 93066 - DNA, 25 bp, Probe sequence
ggacgtcgtgaactaaattcatagt

SEQ ID NO: 93067 - DNA, 25 bp, Probe sequence
tgttcttcgaaacttaagcactcaa

SEQ ID NO: 93068 - DNA, 25 bp, Probe sequence
tcctttcttatttattcttttagat

SEQ ID NO: 93069 - DNA, 25 bp, Probe sequence
taagcactcaaataatatatcacca

SEQ ID NO: 93070 - DNA, 25 bp, Probe sequence
taccgagttatattcctctccttta

SEQ ID NO: 93071 - DNA, 25 bp, Probe sequence
tattaatctacctttggccaaacaa

SEQ ID NO: 93072 - DNA, 25 bp, Probe sequence
atagtgtctaagtacattaactgta

SEQ ID NO: 93073 - DNA, 25 bp, Probe sequence
actgtaaccactttattcattttga

SEQ ID NO: 93074 - DNA, 25 bp, Probe sequence
actacagtgtatttagacatttttc

SEQ ID NO: 93075 - DNA, 25 bp, Probe sequence
aactgtaaccactttattcattttg

SEQ ID NO: 93076 - DNA, 25 bp, Probe sequence
cagtgtatttagacatttttcgttt

SEQ ID NO: 93077 - DNA, 25 bp, Probe sequence
cattaactgtaaccactttattcat

SEQ ID NO: 93078 - DNA, 25 bp, Probe sequence
ctgtaaccactttattcattttgaa

SEQ ID NO: 93079 - DNA, 25 bp, Probe sequence
gtagttactacagtgtatttagaca

SEQ ID NO: 93080 - DNA, 25 bp, Probe sequence
gtctaagtacattaactgtaaccac

SEQ ID NO: 93081 - DNA, 25 bp, Probe sequence
tgtaaccactttattcattttgaaa

SEQ ID NO: 93082 - DNA, 25 bp, Probe sequence
taaccactttattcattttgaaaag

SEQ ID NO: 93083 - DNA, 25 bp, Probe sequence
tacattaactgtaaccactttattc

SEQ ID NO: 93084 - DNA, 25 bp, Probe sequence
ttaactgtaaccactttattcattt

SEQ ID NO: 93085 - DNA, 25 bp, Probe sequence
ttcattttgaaaagtagttactaca

SEQ ID NO: 93086 - DNA, 25 bp, Probe sequence
ttgatttatatttgaggtgtcacaa

SEQ ID NO: 93087 - DNA, 25 bp, Probe sequence
atctactccactacatattatttat

SEQ ID NO: 93088 - DNA, 25 bp, Probe sequence
acaatactattcgacacaatagaca

SEQ ID NO: 93089 - DNA, 25 bp, Probe sequence
aatttttacaatactattcgacaca

SEQ ID NO: 93090 - DNA, 25 bp, Probe sequence
gacaaatttgttgcataactaatac

SEQ ID NO: 93091 - DNA, 25 bp, Probe sequence
gacacaatagacaaatttgttgcat

SEQ ID NO: 93092 - DNA, 25 bp, Probe sequence
gatctactccactacatattattta

SEQ ID NO: 93093 - DNA, 25 bp, Probe sequence
gttgatctactccactacatattat

SEQ ID NO: 93094 - DNA, 25 bp, Probe sequence
tgatctactccactacatattattt

SEQ ID NO: 93095 - DNA, 25 bp, Probe sequence
tctactccactacatattatttata

SEQ ID NO: 93096 - DNA, 25 bp, Probe sequence
tactccactacatattatttataat

SEQ ID NO: 93097 - DNA, 25 bp, Probe sequence
tagtaagagtcttatggacataaag

SEQ ID NO: 93098 - DNA, 25 bp, Probe sequence
tataatttttacaatactattcgac

SEQ ID NO: 93099 - DNA, 25 bp, Probe sequence
ttttacaatactattcgacacaata

SEQ ID NO: 93100 - DNA, 25 bp, Probe sequence
ttataatattatatgctttttttat

SEQ ID NO: 93101 - DNA, 25 bp, Probe sequence
ttgatctactccactacatattatt

SEQ ID NO: 93102 - DNA, 25 bp, Probe sequence
ataggatcaaaagtcatcccccact

SEQ ID NO: 93103 - DNA, 25 bp, Probe sequence
atcaatcatgggggatgacctttga

SEQ ID NO: 93104 - DNA, 25 bp, Probe sequence
atgggggatgacctttgatcccttt

SEQ ID NO: 93105 - DNA, 25 bp, Probe sequence
aatcatgggggatgacctttgatcc

SEQ ID NO: 93106 - DNA, 25 bp, Probe sequence
caatcatgggggatgacctttgatc

SEQ ID NO: 93107 - DNA, 25 bp, Probe sequence
catcccccactatcaatcatggggg

SEQ ID NO: 93108 - DNA, 25 bp, Probe sequence
catgggggatgacctttgatccctt

SEQ ID NO: 93109 - DNA, 25 bp, Probe sequence
ctatcaatcatgggggatgaccttt

SEQ ID NO: 93110 - DNA, 25 bp, Probe sequence
ccactatcaatcatgggggatgacc

SEQ ID NO: 93111 - DNA, 25 bp, Probe sequence
gcaacatgaacataggatcaaaagt

SEQ ID NO: 93112 - DNA, 25 bp, Probe sequence
gtcatcccccactatcaatcatggg

SEQ ID NO: 93113 - DNA, 25 bp, Probe sequence
tgggggatgacctttgatccctttt

SEQ ID NO: 93114 - DNA, 25 bp, Probe sequence
tcatgggggatgacctttgatccct

SEQ ID NO: 93115 - DNA, 25 bp, Probe sequence
tcatcccccactatcaatcatgggg

SEQ ID NO: 93116 - DNA, 25 bp, Probe sequence
taggatcaaaagtcatcccccacta

SEQ ID NO: 93117 - DNA, 25 bp, Probe sequence
attctatttgatttgtcacgtcacc

SEQ ID NO: 93118 - DNA, 25 bp, Probe sequence
atttgtcacgtcaccattgagattc

SEQ ID NO: 93119 - DNA, 25 bp, Probe sequence
atttgatttgtcacgtcaccattga

SEQ ID NO: 93120 - DNA, 25 bp, Probe sequence
acaaattggttaaatacgcacaggt

SEQ ID NO: 93121 - DNA, 25 bp, Probe sequence
aaaccaattcttaaattgacatcaa

SEQ ID NO: 93122 - DNA, 25 bp, Probe sequence
aagttgtatctattttagaaacatt

SEQ ID NO: 93123 - DNA, 25 bp, Probe sequence
aattgacatcaattctatttgattt

SEQ ID NO: 93124 - DNA, 25 bp, Probe sequence
ctatttgatttgtcacgtcaccatt

SEQ ID NO: 93125 - DNA, 25 bp, Probe sequence
gaaacatttgtaataaaccaattct

SEQ ID NO: 93126 - DNA, 25 bp, Probe sequence
gatttgtcacgtcaccattgagatt

SEQ ID NO: 93127 - DNA, 25 bp, Probe sequence
gtcacgtcaccattgagattcaaaa

SEQ ID NO: 93128 - DNA, 25 bp, Probe sequence
tacgcacaggtatataaaacaggta

SEQ ID NO: 93129 - DNA, 25 bp, Probe sequence
ttgtcacgtcaccattgagattcaa

SEQ ID NO: 93130 - DNA, 25 bp, Probe sequence
ttgatttgtcacgtcaccattgaga

SEQ ID NO: 93131 - DNA, 25 bp, Probe sequence
ttgagattcaaaatttttttcattt

SEQ ID NO: 93132 - DNA, 25 bp, Probe sequence
atagcttttttatgtctaattattt

SEQ ID NO: 93133 - DNA, 25 bp, Probe sequence
atcatctttatagcttttttatgtc

SEQ ID NO: 93134 - DNA, 25 bp, Probe sequence
atcgttattctatgttattattagt

SEQ ID NO: 93135 - DNA, 25 bp, Probe sequence
atgattttgttaggatgtggaggaa

SEQ ID NO: 93136 - DNA, 25 bp, Probe sequence
acaatcgttattctatgttattatt

SEQ ID NO: 93137 - DNA, 25 bp, Probe sequence
aaatgattttgttaggatgtggagg

SEQ ID NO: 93138 - DNA, 25 bp, Probe sequence
caatcgttattctatgttattatta

SEQ ID NO: 93139 - DNA, 25 bp, Probe sequence
catctttatagcttttttatgtcta

SEQ ID NO: 93140 - DNA, 25 bp, Probe sequence
gcttttttatgtctaattatttttg

SEQ ID NO: 93141 - DNA, 25 bp, Probe sequence
tgattcttgtgaatcatctttatag

SEQ ID NO: 93142 - DNA, 25 bp, Probe sequence
tctttatagcttttttatgtctaat

SEQ ID NO: 93143 - DNA, 25 bp, Probe sequence
tatgtctaattatttttgaggaaaa

SEQ ID NO: 93144 - DNA, 25 bp, Probe sequence
tttatagcttttttatgtctaatta

SEQ ID NO: 93145 - DNA, 25 bp, Probe sequence
ttttatgtctaattatttttgagga

SEQ ID NO: 93146 - DNA, 25 bp, Probe sequence
ttttgttaggatgtggaggaatttt

SEQ ID NO: 93147 - DNA, 25 bp, Probe sequence
atcactcgaatttatattacgcctt

SEQ ID NO: 93148 - DNA, 25 bp, Probe sequence
agtttttctaatatgttatctatac

SEQ ID NO: 93149 - DNA, 25 bp, Probe sequence
agatgcctaataatacaacttacaa

SEQ ID NO: 93150 - DNA, 25 bp, Probe sequence
aagtactacaatttaaggctataat

SEQ ID NO: 93151 - DNA, 25 bp, Probe sequence
aattaacttatcattcatttatgct

SEQ ID NO: 93152 - DNA, 25 bp, Probe sequence
aattaattataccttatcactttgt

SEQ ID NO: 93153 - DNA, 25 bp, Probe sequence
cattcatttatgctttacgctacat

SEQ ID NO: 93154 - DNA, 25 bp, Probe sequence
gacatcatactaaagtcgcattata

SEQ ID NO: 93155 - DNA, 25 bp, Probe sequence
gataattgcctcacaatgtattcat

SEQ ID NO: 93156 - DNA, 25 bp, Probe sequence
ggaactttgacataacatttgtatt

SEQ ID NO: 93157 - DNA, 25 bp, Probe sequence
tgcctcacaatgtattcattttata

SEQ ID NO: 93158 - DNA, 25 bp, Probe sequence
taaaaatttgaacctagatgcctaa

SEQ ID NO: 93159 - DNA, 25 bp, Probe sequence
tatgctttacgctacatagtaataa

SEQ ID NO: 93160 - DNA, 25 bp, Probe sequence
tatcgttcaactaattatattttaa

SEQ ID NO: 93161 - DNA, 25 bp, Probe sequence
tatcactttgtataaatcactcgaa

SEQ ID NO: 93162 - DNA, 25 bp, Probe sequence
attcgtcttcattcattttagtctg

SEQ ID NO: 93163 - DNA, 25 bp, Probe sequence
aggtcgatgccttaatgccatatac

SEQ ID NO: 93164 - DNA, 25 bp, Probe sequence
agaaaacattcacaccacgcatgga

SEQ ID NO: 93165 - DNA, 25 bp, Probe sequence
aacgtattcgtcttcattcatttta

SEQ ID NO: 93166 - DNA, 25 bp, Probe sequence
cacaccacgcatggaccaacgtatt

SEQ ID NO: 93167 - DNA, 25 bp, Probe sequence
gatgccttaatgccatatacatgtt

SEQ ID NO: 93168 - DNA, 25 bp, Probe sequence
gatataactcgtatactggtcagat

SEQ ID NO: 93169 - DNA, 25 bp, Probe sequence
ggaccaacgtattcgtcttcattca

SEQ ID NO: 93170 - DNA, 25 bp, Probe sequence
tttccccttttatcagttaacacat

SEQ ID NO: 93171 - DNA, 25 bp, Probe sequence
tgccaactcaccaaatgatttcccc

SEQ ID NO: 93172 - DNA, 25 bp, Probe sequence
tcaccaaatgatttccccttttatc

SEQ ID NO: 93173 - DNA, 25 bp, Probe sequence
tactggtcagataaggtcgatgcct

SEQ ID NO: 93174 - DNA, 25 bp, Probe sequence
tatacatgttatatcttctatatta

SEQ ID NO: 93175 - DNA, 25 bp, Probe sequence
tatttttaaactcatccttcttcaa

SEQ ID NO: 93176 - DNA, 25 bp, Probe sequence
ttttagtctgatgccaactcaccaa

SEQ ID NO: 93177 - DNA, 25 bp, Probe sequence
attaatacattaacaaccacaacta

SEQ ID NO: 93178 - DNA, 25 bp, Probe sequence
atctcaatgttgttcacgtcaataa

SEQ ID NO: 93179 - DNA, 25 bp, Probe sequence
atgtaaagtttaaccagctaacact

SEQ ID NO: 93180 - DNA, 25 bp, Probe sequence
cacgtcaataaaattatccctaggt

SEQ ID NO: 93181 - DNA, 25 bp, Probe sequence
aacttcaaaatccatatttatgtct

SEQ ID NO: 93182 - DNA, 25 bp, Probe sequence
aagtccccttctatatcttataaga

SEQ ID NO: 93183 - DNA, 25 bp, Probe sequence
aatggttaagtccccttctatatct

SEQ ID NO: 93184 - DNA, 25 bp, Probe sequence
gacaatcattataatcaattcaatt

SEQ ID NO: 93185 - DNA, 25 bp, Probe sequence
gataatctcaatgttgttcacgtca

SEQ ID NO: 93186 - DNA, 25 bp, Probe sequence
gttaagtccccttctatatcttata

SEQ ID NO: 93187 - DNA, 25 bp, Probe sequence
gtccccttctatatcttataagaca

SEQ ID NO: 93188 - DNA, 25 bp, Probe sequence
taaatggttaagtccccttctatat

SEQ ID NO: 93189 - DNA, 25 bp, Probe sequence
tagctggtttttattttccttcaat

SEQ ID NO: 93190 - DNA, 25 bp, Probe sequence
tatagtaacttcaaaatccatattt

SEQ ID NO: 93191 - DNA, 25 bp, Probe sequence
tttaaccagctaacacttttgttag

SEQ ID NO: 93192 - DNA, 25 bp, Probe sequence
attctcaactttccttttaaatatg

SEQ ID NO: 93193 - DNA, 25 bp, Probe sequence
aaacgctattagtcacaaaatgtac

SEQ ID NO: 93194 - DNA, 25 bp, Probe sequence
aacctttaattgaaagctattctca

SEQ ID NO: 93195 - DNA, 25 bp, Probe sequence
aagcccttgtaaatattgtgtaata

SEQ ID NO: 93196 - DNA, 25 bp, Probe sequence
aattaatgttaagccctacatttgt

SEQ ID NO: 93197 - DNA, 25 bp, Probe sequence
caactttccttttaaatatgaagca

SEQ ID NO: 93198 - DNA, 25 bp, Probe sequence
ccacgtcacaccttgatttatcaac

SEQ ID NO: 93199 - DNA, 25 bp, Probe sequence
gctattctcaactttccttttaaat

SEQ ID NO: 93200 - DNA, 25 bp, Probe sequence
gaagcaattttttcaaaaacgctat

SEQ ID NO: 93201 - DNA, 25 bp, Probe sequence
gtcacaccttgatttatcaacattt

SEQ ID NO: 93202 - DNA, 25 bp, Probe sequence
tgtgtgaacccacgtcacaccttga

SEQ ID NO: 93203 - DNA, 25 bp, Probe sequence
taagccctacatttgtagtattagg

SEQ ID NO: 93204 - DNA, 25 bp, Probe sequence
tattttcattcaattaacctttaat

SEQ ID NO: 93205 - DNA, 25 bp, Probe sequence
ttttcccataagcccttgtaaatat

SEQ ID NO: 93206 - DNA, 25 bp, Probe sequence
ttaacaaatgtgtgaacccacgtca

SEQ ID NO: 93207 - DNA, 25 bp, Probe sequence
atattgtattttttctgtataccaa

SEQ ID NO: 93208 - DNA, 25 bp, Probe sequence
accaaaggactacctatcaaattat

SEQ ID NO: 93209 - DNA, 25 bp, Probe sequence
aacttcatctgcaactttaacctaa

SEQ ID NO: 93210 - DNA, 25 bp, Probe sequence
cttcatctgcaactttaacctaaat

SEQ ID NO: 93211 - DNA, 25 bp, Probe sequence
ccaacttcatctgcaactttaacct

SEQ ID NO: 93212 - DNA, 25 bp, Probe sequence
gcaactttaacctaaatattgtatt

SEQ ID NO: 93213 - DNA, 25 bp, Probe sequence
gactacctatcaaattattaaaact

SEQ ID NO: 93214 - DNA, 25 bp, Probe sequence
gttattccaacttcatctgcaactt

SEQ ID NO: 93215 - DNA, 25 bp, Probe sequence
gtataccaaaggactacctatcaaa

SEQ ID NO: 93216 - DNA, 25 bp, Probe sequence
tatttgttattccaacttcatctgc

SEQ ID NO: 93217 - DNA, 25 bp, Probe sequence
tattttttctgtataccaaaggact

SEQ ID NO: 93218 - DNA, 25 bp, Probe sequence
tattccaacttcatctgcaacttta

SEQ ID NO: 93219 - DNA, 25 bp, Probe sequence
ttctgtataccaaaggactacctat

SEQ ID NO: 93220 - DNA, 25 bp, Probe sequence
ttccaacttcatctgcaactttaac

SEQ ID NO: 93221 - DNA, 25 bp, Probe sequence
ttgttattccaacttcatctgcaac

SEQ ID NO: 93222 - DNA, 25 bp, Probe sequence
atttcattctttatagggtaagatt

SEQ ID NO: 93223 - DNA, 25 bp, Probe sequence
atttcctcattatttataaatttat

SEQ ID NO: 93224 - DNA, 25 bp, Probe sequence
atgacttatcattcggaggttacat

SEQ ID NO: 93225 - DNA, 25 bp, Probe sequence
agctaactcagaaatgacttatcat

SEQ ID NO: 93226 - DNA, 25 bp, Probe sequence
aaagctaactcagaaatgacttatc

SEQ ID NO: 93227 - DNA, 25 bp, Probe sequence
aattttacaattgtggcagattttc

SEQ ID NO: 93228 - DNA, 25 bp, Probe sequence
aattgtggcagattttcaaaataat

SEQ ID NO: 93229 - DNA, 25 bp, Probe sequence
gggtaagattaggactatagtatga

SEQ ID NO: 93230 - DNA, 25 bp, Probe sequence
tgacttatcattcggaggttacatt

SEQ ID NO: 93231 - DNA, 25 bp, Probe sequence
taattatttcctcattatttataaa

SEQ ID NO: 93232 - DNA, 25 bp, Probe sequence
taaggtatagtaaagctaactcaga

SEQ ID NO: 93233 - DNA, 25 bp, Probe sequence
taaatttcattctttatagggtaag

SEQ ID NO: 93234 - DNA, 25 bp, Probe sequence
taggactatagtatgatgtgtaaat

SEQ ID NO: 93235 - DNA, 25 bp, Probe sequence
tttacaattgtggcagattttcaaa

SEQ ID NO: 93236 - DNA, 25 bp, Probe sequence
ttatatttaaatttcattctttata

SEQ ID NO: 93237 - DNA, 25 bp, Probe sequence
atttcactttgttcttggctcaaca

SEQ ID NO: 93238 - DNA, 25 bp, Probe sequence
agcatttcactttgttcttggctca

SEQ ID NO: 93239 - DNA, 25 bp, Probe sequence
aaaacctgggacattaatcgatcaa

SEQ ID NO: 93240 - DNA, 25 bp, Probe sequence
cactccctaataactgagttttaat

SEQ ID NO: 93241 - DNA, 25 bp, Probe sequence
catttcactttgttcttggctcaac

SEQ ID NO: 93242 - DNA, 25 bp, Probe sequence
gaataacaagaaaaacctgggacat

SEQ ID NO: 93243 - DNA, 25 bp, Probe sequence
gaagggagcatttcactttgttctt

SEQ ID NO: 93244 - DNA, 25 bp, Probe sequence
gtcccactccctaataactgagttt

SEQ ID NO: 93245 - DNA, 25 bp, Probe sequence
ggagcatttcactttgttcttggct

SEQ ID NO: 93246 - DNA, 25 bp, Probe sequence
tgaactcttttaacccacattaaat

SEQ ID NO: 93247 - DNA, 25 bp, Probe sequence
tcactttgttcttggctcaacaatt

SEQ ID NO: 93248 - DNA, 25 bp, Probe sequence
taaatgaaggctttgaagggagcat

SEQ ID NO: 93249 - DNA, 25 bp, Probe sequence
tttaatgaactcttttaacccacat

SEQ ID NO: 93250 - DNA, 25 bp, Probe sequence
ttaaatattattttgcaattgcaat

SEQ ID NO: 93251 - DNA, 25 bp, Probe sequence
ttaatcgatcaaatgctcccttcaa

SEQ ID NO: 93252 - DNA, 25 bp, Probe sequence
attgacaataggaggagaagttttt

SEQ ID NO: 93253 - DNA, 25 bp, Probe sequence
atttctgctttttcaatcaaaaatc

SEQ ID NO: 93254 - DNA, 25 bp, Probe sequence
agtttgaattgtgaattactttagt

SEQ ID NO: 93255 - DNA, 25 bp, Probe sequence
agcaatttctgctttttcaatcaaa

SEQ ID NO: 93256 - DNA, 25 bp, Probe sequence
gcaatttctgctttttcaatcaaaa

SEQ ID NO: 93257 - DNA, 25 bp, Probe sequence
gaattactttagttgtatattatag

SEQ ID NO: 93258 - DNA, 25 bp, Probe sequence
gatatagcataacaagcaatttctg

SEQ ID NO: 93259 - DNA, 25 bp, Probe sequence
gtttgaatttacgtcttttgctatg

SEQ ID NO: 93260 - DNA, 25 bp, Probe sequence
gtcttttgctatgtaaattagtttt

SEQ ID NO: 93261 - DNA, 25 bp, Probe sequence
tgtacaccctttcaaaagtttgaat

SEQ ID NO: 93262 - DNA, 25 bp, Probe sequence
tgattttttgtttgaatttacgtct

SEQ ID NO: 93263 - DNA, 25 bp, Probe sequence
tacgtcttttgctatgtaaattagt

SEQ ID NO: 93264 - DNA, 25 bp, Probe sequence
tttcaatcaaaaatcgaactttatt

SEQ ID NO: 93265 - DNA, 25 bp, Probe sequence
ttgaatttacgtcttttgctatgta

SEQ ID NO: 93266 - DNA, 25 bp, Probe sequence
ttgtttgaatttacgtcttttgcta

SEQ ID NO: 93267 - DNA, 25 bp, Probe sequence
atttcttcatagctaatcttagtat

SEQ ID NO: 93268 - DNA, 25 bp, Probe sequence
atatgcataatcacaaatttggtac

SEQ ID NO: 93269 - DNA, 25 bp, Probe sequence
atccaaacatgttgtggcgcctctt

SEQ ID NO: 93270 - DNA, 25 bp, Probe sequence
atgtcctagactctacaactaaaaa

SEQ ID NO: 93271 - DNA, 25 bp, Probe sequence
agaggtgccacaaacatgttatttt

SEQ ID NO: 93272 - DNA, 25 bp, Probe sequence
agactctacaactaaaaaagctatg

SEQ ID NO: 93273 - DNA, 25 bp, Probe sequence
acaaacatgttattttgttcatcca

SEQ ID NO: 93274 - DNA, 25 bp, Probe sequence
catactaaacaaaagaggtgccaca

SEQ ID NO: 93275 - DNA, 25 bp, Probe sequence
ccatttattccatactaaacaaaag

SEQ ID NO: 93276 - DNA, 25 bp, Probe sequence
gcctcttttgtattacatatgcata

SEQ ID NO: 93277 - DNA, 25 bp, Probe sequence
gttcatccaaacatgttgtggcgcc

SEQ ID NO: 93278 - DNA, 25 bp, Probe sequence
tggcgcctcttttgtattacatatg

SEQ ID NO: 93279 - DNA, 25 bp, Probe sequence
tagctaatcttagtattttttaaat

SEQ ID NO: 93280 - DNA, 25 bp, Probe sequence
tatcgttatagatttcttcatagct

SEQ ID NO: 93281 - DNA, 25 bp, Probe sequence
ttggtacagaaatcaatgtcctaga

SEQ ID NO: 93282 - DNA, 25 bp, Probe sequence
agctcaatcttattacatgtcacat

SEQ ID NO: 93283 - DNA, 25 bp, Probe sequence
acctgatctagcttgaactagcgta

SEQ ID NO: 93284 - DNA, 25 bp, Probe sequence
aaatcgcacacactaggggtgtttt

SEQ ID NO: 93285 - DNA, 25 bp, Probe sequence
caaaccctttgaacctgatctagct

SEQ ID NO: 93286 - DNA, 25 bp, Probe sequence
aactttcctatggatggttgtgcgt

SEQ ID NO: 93287 - DNA, 25 bp, Probe sequence
cctcttcatttatcagctcaatctt

SEQ ID NO: 93288 - DNA, 25 bp, Probe sequence
gacaacctattgacataagtttaca

SEQ ID NO: 93289 - DNA, 25 bp, Probe sequence
gatggttgtgcgtttttttattagg

SEQ ID NO: 93290 - DNA, 25 bp, Probe sequence
gtttacaaacgtcttacagtataat

SEQ ID NO: 93291 - DNA, 25 bp, Probe sequence
ggggtgttttatactgagatgaggc

SEQ ID NO: 93292 - DNA, 25 bp, Probe sequence
tgagatgaggcttgccctcaaaccc

SEQ ID NO: 93293 - DNA, 25 bp, Probe sequence
taagtatccctcttcatttatcagc

SEQ ID NO: 93294 - DNA, 25 bp, Probe sequence
tactaacattcctactacatcttca

SEQ ID NO: 93295 - DNA, 25 bp, Probe sequence
tactacatcttcaatttaaatccaa

SEQ ID NO: 93296 - DNA, 25 bp, Probe sequence
tattgtgaacgcataactttcctat

SEQ ID NO: 93297 - DNA, 25 bp, Probe sequence
attaatctaatgttgttgtctttag

SEQ ID NO: 93298 - DNA, 25 bp, Probe sequence
atattaatctaatgttgttgtcttt

SEQ ID NO: 93299 - DNA, 25 bp, Probe sequence
ataaataattatccaatttgggagg

SEQ ID NO: 93300 - DNA, 25 bp, Probe sequence
aatgttgttgtctttagataaatga

SEQ ID NO: 93301 - DNA, 25 bp, Probe sequence
aatagtgctatagacttagaaaagt

SEQ ID NO: 93302 - DNA, 25 bp, Probe sequence
cacctcaaaatcattatatattaat

SEQ ID NO: 93303 - DNA, 25 bp, Probe sequence
gttgttgtctttagataaatgaata

SEQ ID NO: 93304 - DNA, 25 bp, Probe sequence
gttcacctcaaaatcattatatatt

SEQ ID NO: 93305 - DNA, 25 bp, Probe sequence
gtacaaccgggtaagatttatatat

SEQ ID NO: 93306 - DNA, 25 bp, Probe sequence
tgttcacctcaaaatcattatatat

SEQ ID NO: 93307 - DNA, 25 bp, Probe sequence
tacaaccgggtaagatttatatata

SEQ ID NO: 93308 - DNA, 25 bp, Probe sequence
tatgttcacctcaaaatcattatat

SEQ ID NO: 93309 - DNA, 25 bp, Probe sequence
tattaatctaatgttgttgtcttta

SEQ ID NO: 93310 - DNA, 25 bp, Probe sequence
ttatccaatttgggaggaattaatc

SEQ ID NO: 93311 - DNA, 25 bp, Probe sequence
ttcacctcaaaatcattatatatta

SEQ ID NO: 93312 - DNA, 25 bp, Probe sequence
atatgtcgcttcaactatttactag

SEQ ID NO: 93313 - DNA, 25 bp, Probe sequence
acatcacctgaatcaatcaaatcta

SEQ ID NO: 93314 - DNA, 25 bp, Probe sequence
acaacttcctttctgtgtttcgttg

SEQ ID NO: 93315 - DNA, 25 bp, Probe sequence
acaaatggataacttttcaactatt

SEQ ID NO: 93316 - DNA, 25 bp, Probe sequence
aaatactatatatcgtttcgcaaat

SEQ ID NO: 93317 - DNA, 25 bp, Probe sequence
aaacttcattgacctgtatctaaat

SEQ ID NO: 93318 - DNA, 25 bp, Probe sequence
gccaaatttcaatatcatctacttc

SEQ ID NO: 93319 - DNA, 25 bp, Probe sequence
gatagtacttttataatgcttttaa

SEQ ID NO: 93320 - DNA, 25 bp, Probe sequence
gtttcgcaaattccatatgtcgctt

SEQ ID NO: 93321 - DNA, 25 bp, Probe sequence
gtactatccataaacttcattgacc

SEQ ID NO: 93322 - DNA, 25 bp, Probe sequence
tctaacttatagcgtacacatcaaa

SEQ ID NO: 93323 - DNA, 25 bp, Probe sequence
tcatctacttctaatcttactgttg

SEQ ID NO: 93324 - DNA, 25 bp, Probe sequence
ttatttgcactaaaactttgtatac

SEQ ID NO: 93325 - DNA, 25 bp, Probe sequence
ttcaatacttaattcacatcacctg

SEQ ID NO: 93326 - DNA, 25 bp, Probe sequence
ttctgtgtttcgttgtagttttata

SEQ ID NO: 93327 - DNA, 25 bp, Probe sequence
attacatttctccttcgtatagtta

SEQ ID NO: 93328 - DNA, 25 bp, Probe sequence
atttctccttcgtatagttagaatc

SEQ ID NO: 93329 - DNA, 25 bp, Probe sequence
aaaccatgctttaaattcaattcgt

SEQ ID NO: 93330 - DNA, 25 bp, Probe sequence
aattacatttctccttcgtatagtt

SEQ ID NO: 93331 - DNA, 25 bp, Probe sequence
caatactaacttagttttatacatt

SEQ ID NO: 93332 - DNA, 25 bp, Probe sequence
cattaactttaccaaaaccatgctt

SEQ ID NO: 93333 - DNA, 25 bp, Probe sequence
ccatgctttaaattcaattcgttta

SEQ ID NO: 93334 - DNA, 25 bp, Probe sequence
gcaaattgcaaaactattatagcac

SEQ ID NO: 93335 - DNA, 25 bp, Probe sequence
gttagaatcttcaatattattacaa

SEQ ID NO: 93336 - DNA, 25 bp, Probe sequence
tccttcgtatagttagaatcttcaa

SEQ ID NO: 93337 - DNA, 25 bp, Probe sequence
tctccttcgtatagttagaatcttc

SEQ ID NO: 93338 - DNA, 25 bp, Probe sequence
tacatttctccttcgtatagttaga

SEQ ID NO: 93339 - DNA, 25 bp, Probe sequence
ttaccaaaaccatgctttaaattca

SEQ ID NO: 93340 - DNA, 25 bp, Probe sequence
tatacattaactttaccaaaaccat

SEQ ID NO: 93341 - DNA, 25 bp, Probe sequence
tattattacaatactaacttagttt

SEQ ID NO: 93342 - DNA, 25 bp, Probe sequence
attactcacaatgaatacttcgggt

SEQ ID NO: 93343 - DNA, 25 bp, Probe sequence
attagttagcaacaacattccattg

SEQ ID NO: 93344 - DNA, 25 bp, Probe sequence
atttataattctgtctttcgaaaga

SEQ ID NO: 93345 - DNA, 25 bp, Probe sequence
atagctatcataaattaaatatcga

SEQ ID NO: 93346 - DNA, 25 bp, Probe sequence
atcaacttcatcatttatagctatc

SEQ ID NO: 93347 - DNA, 25 bp, Probe sequence
acccgaagtattcataattactcac

SEQ ID NO: 93348 - DNA, 25 bp, Probe sequence
acacatagttgtttaattagttagc

SEQ ID NO: 93349 - DNA, 25 bp, Probe sequence
acaacattccattgaaattaacata

SEQ ID NO: 93350 - DNA, 25 bp, Probe sequence
aacttcatcatttatagctatcata

SEQ ID NO: 93351 - DNA, 25 bp, Probe sequence
cattttgttaatgacacatagttgt

SEQ ID NO: 93352 - DNA, 25 bp, Probe sequence
gcaacaacattccattgaaattaac

SEQ ID NO: 93353 - DNA, 25 bp, Probe sequence
gttagcaacaacattccattgaaat

SEQ ID NO: 93354 - DNA, 25 bp, Probe sequence
ggtttatttataattctgtctttcg

SEQ ID NO: 93355 - DNA, 25 bp, Probe sequence
tgaatacttcgggtttatttataat

SEQ ID NO: 93356 - DNA, 25 bp, Probe sequence
ttttcatctaaatcaacttcatcat

SEQ ID NO: 93357 - DNA, 25 bp, Probe sequence
atttatgtcagttcacaatgtgttc

SEQ ID NO: 93358 - DNA, 25 bp, Probe sequence
ataattgctataatgtgtattttta

SEQ ID NO: 93359 - DNA, 25 bp, Probe sequence
atgtcagttcacaatgtgttcacaa

SEQ ID NO: 93360 - DNA, 25 bp, Probe sequence
acatcacctttttctttttttgatg

SEQ ID NO: 93361 - DNA, 25 bp, Probe sequence
aacattatgcgctatgaaattgtgt

SEQ ID NO: 93362 - DNA, 25 bp, Probe sequence
aataaagcacgaaggagcatgatac

SEQ ID NO: 93363 - DNA, 25 bp, Probe sequence
gatgacaacacaatgaacttaatta

SEQ ID NO: 93364 - DNA, 25 bp, Probe sequence
gttcacaatgtgttcacaaatttga

SEQ ID NO: 93365 - DNA, 25 bp, Probe sequence
gtcagttcacaatgtgttcacaaat

SEQ ID NO: 93366 - DNA, 25 bp, Probe sequence
gtgttcacaaatttgaatttcaatg

SEQ ID NO: 93367 - DNA, 25 bp, Probe sequence
gtgtatttttaaaacattatgcgct

SEQ ID NO: 93368 - DNA, 25 bp, Probe sequence
gtgtataatttatgtcagttcacaa

SEQ ID NO: 93369 - DNA, 25 bp, Probe sequence
tcacctttttctttttttgatgaca

SEQ ID NO: 93370 - DNA, 25 bp, Probe sequence
tatgcgctatgaaattgtgtataat

SEQ ID NO: 93371 - DNA, 25 bp, Probe sequence
tttttctttttttgatgacaacaca

SEQ ID NO: 93372 - DNA, 25 bp, Probe sequence
attattataaatgagtaccccaact

SEQ ID NO: 93373 - DNA, 25 bp, Probe sequence
atgaaagttggggtatcgtctcaac

SEQ ID NO: 93374 - DNA, 25 bp, Probe sequence
accccaactaaattatctaaatgca

SEQ ID NO: 93375 - DNA, 25 bp, Probe sequence
actcgccctccattaaatgattttc

SEQ ID NO: 93376 - DNA, 25 bp, Probe sequence
aaatgattttcatcaattcattgaa

SEQ ID NO: 93377 - DNA, 25 bp, Probe sequence
aatgaaagttggggtatcgtctcaa

SEQ ID NO: 93378 - DNA, 25 bp, Probe sequence
aatgagtaccccaactaaattatct

SEQ ID NO: 93379 - DNA, 25 bp, Probe sequence
ctcgccctccattaaatgattttca

SEQ ID NO: 93380 - DNA, 25 bp, Probe sequence
cgccctccattaaatgattttcatc

SEQ ID NO: 93381 - DNA, 25 bp, Probe sequence
gccctccattaaatgattttcatca

SEQ ID NO: 93382 - DNA, 25 bp, Probe sequence
gtaccccaactaaattatctaaatg

SEQ ID NO: 93383 - DNA, 25 bp, Probe sequence
tgagtaccccaactaaattatctaa

SEQ ID NO: 93384 - DNA, 25 bp, Probe sequence
taaatgaaagttggggtatcgtctc

SEQ ID NO: 93385 - DNA, 25 bp, Probe sequence
taaattatctaaatgcagtaatgca

SEQ ID NO: 93386 - DNA, 25 bp, Probe sequence
ttataaatgagtaccccaactaaat

SEQ ID NO: 93387 - DNA, 25 bp, Probe sequence
attaaactcaccacccattgttagt

SEQ ID NO: 93388 - DNA, 25 bp, Probe sequence
aaagctactaactttgaagtgaagt

SEQ ID NO: 93389 - DNA, 25 bp, Probe sequence
aaactcaccacccattgttagtagc

SEQ ID NO: 93390 - DNA, 25 bp, Probe sequence
aactcaccacccattgttagtagct

SEQ ID NO: 93391 - DNA, 25 bp, Probe sequence
cacccattgttagtagctttttctt

SEQ ID NO: 93392 - DNA, 25 bp, Probe sequence
caccacccattgttagtagcttttt

SEQ ID NO: 93393 - DNA, 25 bp, Probe sequence
ctcaccacccattgttagtagcttt

SEQ ID NO: 93394 - DNA, 25 bp, Probe sequence
ccattgttagtagctttttctttat

SEQ ID NO: 93395 - DNA, 25 bp, Probe sequence
ccacccattgttagtagctttttct

SEQ ID NO: 93396 - DNA, 25 bp, Probe sequence
tcaccacccattgttagtagctttt

SEQ ID NO: 93397 - DNA, 25 bp, Probe sequence
taattaaactcaccacccattgtta

SEQ ID NO: 93398 - DNA, 25 bp, Probe sequence
taaactcaccacccattgttagtag

SEQ ID NO: 93399 - DNA, 25 bp, Probe sequence
ttttaattaaactcaccacccattg

SEQ ID NO: 93400 - DNA, 25 bp, Probe sequence
ttttctttatatatgatgagcttga

SEQ ID NO: 93401 - DNA, 25 bp, Probe sequence
ttgttagtagctttttctttatata

SEQ ID NO: 93402 - DNA, 25 bp, Probe sequence
actgctttatttattatcattcatc

SEQ ID NO: 93403 - DNA, 25 bp, Probe sequence
aatatgatgtcctaagctttttctt

SEQ ID NO: 93404 - DNA, 25 bp, Probe sequence
aatttataatctctacatttatttt

SEQ ID NO: 93405 - DNA, 25 bp, Probe sequence
catataaaatcctttaattctttct

SEQ ID NO: 93406 - DNA, 25 bp, Probe sequence
gctttatttattatcattcatcatg

SEQ ID NO: 93407 - DNA, 25 bp, Probe sequence
gcacatttttactaattatcaaagc

SEQ ID NO: 93408 - DNA, 25 bp, Probe sequence
gaactgcacatttattcgaaatact

SEQ ID NO: 93409 - DNA, 25 bp, Probe sequence
gatgtcctaagctttttcttgtaca

SEQ ID NO: 93410 - DNA, 25 bp, Probe sequence
gatttctagtgagataaactgcttt

SEQ ID NO: 93411 - DNA, 25 bp, Probe sequence
gttaaatatattcacctttctacca

SEQ ID NO: 93412 - DNA, 25 bp, Probe sequence
tcctaagctttttcttgtacaactt

SEQ ID NO: 93413 - DNA, 25 bp, Probe sequence
tcatttaaattttaccgtttcatat

SEQ ID NO: 93414 - DNA, 25 bp, Probe sequence
taattctttcttaacattaatttat

SEQ ID NO: 93415 - DNA, 25 bp, Probe sequence
tacaactttttcgaataaacaacag

SEQ ID NO: 93416 - DNA, 25 bp, Probe sequence
tatattcacctttctaccaaacttt

SEQ ID NO: 93417 - DNA, 25 bp, Probe sequence
attacattacacatcttcattacta

SEQ ID NO: 93418 - DNA, 25 bp, Probe sequence
atctgaaaatttacatatactatct

SEQ ID NO: 93419 - DNA, 25 bp, Probe sequence
acacatcttcattactaagtatatc

SEQ ID NO: 93420 - DNA, 25 bp, Probe sequence
aaatttctaaagtatcattgcttgg

SEQ ID NO: 93421 - DNA, 25 bp, Probe sequence
aaatctgcttggaaatcaattttaa

SEQ ID NO: 93422 - DNA, 25 bp, Probe sequence
aaacattggcagtagttggttaact

SEQ ID NO: 93423 - DNA, 25 bp, Probe sequence
aaacaattacattacacatcttcat

SEQ ID NO: 93424 - DNA, 25 bp, Probe sequence
aagtatcattgcttggaaccaacac

SEQ ID NO: 93425 - DNA, 25 bp, Probe sequence
aatcattttttaagcaattagcata

SEQ ID NO: 93426 - DNA, 25 bp, Probe sequence
cttgtacctccacttgctatttaaa

SEQ ID NO: 93427 - DNA, 25 bp, Probe sequence
gcttggaaccaacactttaatcatt

SEQ ID NO: 93428 - DNA, 25 bp, Probe sequence
gacagttacgtcatttataatataa

SEQ ID NO: 93429 - DNA, 25 bp, Probe sequence
gtatatctgttgacagttacgtcat

SEQ ID NO: 93430 - DNA, 25 bp, Probe sequence
gtacctccacttgctatttaaatta

SEQ ID NO: 93431 - DNA, 25 bp, Probe sequence
ggcagtagttggttaactttgtaga

SEQ ID NO: 93432 - DNA, 25 bp, Probe sequence
attagttgtttcctaccatctgtat

SEQ ID NO: 93433 - DNA, 25 bp, Probe sequence
atacctttcccataattgtatagaa

SEQ ID NO: 93434 - DNA, 25 bp, Probe sequence
accatacctttcccataattgtata

SEQ ID NO: 93435 - DNA, 25 bp, Probe sequence
aactgtattagttgtttcctaccat

SEQ ID NO: 93436 - DNA, 25 bp, Probe sequence
aattgtatagaaattcattttatcc

SEQ ID NO: 93437 - DNA, 25 bp, Probe sequence
cattttatccttactaattgtacca

SEQ ID NO: 93438 - DNA, 25 bp, Probe sequence
gttgtttcctaccatctgtattata

SEQ ID NO: 93439 - DNA, 25 bp, Probe sequence
gtttcctaccatctgtattatatta

SEQ ID NO: 93440 - DNA, 25 bp, Probe sequence
gtattagttgtttcctaccatctgt

SEQ ID NO: 93441 - DNA, 25 bp, Probe sequence
gtaccacaaataaatgggactgtta

SEQ ID NO: 93442 - DNA, 25 bp, Probe sequence
tcaccatacctttcccataattgta

SEQ ID NO: 93443 - DNA, 25 bp, Probe sequence
taaatgggactgttaaaccatttga

SEQ ID NO: 93444 - DNA, 25 bp, Probe sequence
tagttgtttcctaccatctgtatta

SEQ ID NO: 93445 - DNA, 25 bp, Probe sequence
tatccttactaattgtaccacaaat

SEQ ID NO: 93446 - DNA, 25 bp, Probe sequence
ttcaccatacctttcccataattgt

SEQ ID NO: 93447 - DNA, 25 bp, Probe sequence
atgagactaaaatacgctaacttcg

SEQ ID NO: 93448 - DNA, 25 bp, Probe sequence
atcaatgagactaaaatacgctaac

SEQ ID NO: 93449 - DNA, 25 bp, Probe sequence
agatttcgtaaattaaacatttcat

SEQ ID NO: 93450 - DNA, 25 bp, Probe sequence
aacatttcattttaatcaatgagac

SEQ ID NO: 93451 - DNA, 25 bp, Probe sequence
aatgagactaaaatacgctaacttc

SEQ ID NO: 93452 - DNA, 25 bp, Probe sequence
aatcaatgagactaaaatacgctaa

SEQ ID NO: 93453 - DNA, 25 bp, Probe sequence
caatgagactaaaatacgctaactt

SEQ ID NO: 93454 - DNA, 25 bp, Probe sequence
gagactaaaatacgctaacttcgtt

SEQ ID NO: 93455 - DNA, 25 bp, Probe sequence
gatttcgtaaattaaacatttcatt

SEQ ID NO: 93456 - DNA, 25 bp, Probe sequence
tgagactaaaatacgctaacttcgt

SEQ ID NO: 93457 - DNA, 25 bp, Probe sequence
tgccctcctaagatttcgtaaatta

SEQ ID NO: 93458 - DNA, 25 bp, Probe sequence
tcaatgagactaaaatacgctaact

SEQ ID NO: 93459 - DNA, 25 bp, Probe sequence
taaacatttcattttaatcaatgag

SEQ ID NO: 93460 - DNA, 25 bp, Probe sequence
ttgccctcctaagatttcgtaaatt

SEQ ID NO: 93461 - DNA, 25 bp, Probe sequence
tttgccctcctaagatttcgtaaat

SEQ ID NO: 93462 - DNA, 25 bp, Probe sequence
attcttttgttagcatcgctagtat

SEQ ID NO: 93463 - DNA, 25 bp, Probe sequence
atcgctagtataacatgcatgtcac

SEQ ID NO: 93464 - DNA, 25 bp, Probe sequence
aaaacaaaaaagccgtagcatatgc

SEQ ID NO: 93465 - DNA, 25 bp, Probe sequence
aagccgtagcatatgctacagcttt

SEQ ID NO: 93466 - DNA, 25 bp, Probe sequence
ccctccatttcaattcttttgttag

SEQ ID NO: 93467 - DNA, 25 bp, Probe sequence
gctacagcttttaatgactgaatct

SEQ ID NO: 93468 - DNA, 25 bp, Probe sequence
gcttttaatgactgaatctttatag

SEQ ID NO: 93469 - DNA, 25 bp, Probe sequence
gcatatgctacagcttttaatgact

SEQ ID NO: 93470 - DNA, 25 bp, Probe sequence
gcatgtcacatgttaacgatatctc

SEQ ID NO: 93471 - DNA, 25 bp, Probe sequence
gatatctcaaatcaatttccttaca

SEQ ID NO: 93472 - DNA, 25 bp, Probe sequence
gtcacatgttaacgatatctcaaat

SEQ ID NO: 93473 - DNA, 25 bp, Probe sequence
tgttgaaccctccatttcaattctt

SEQ ID NO: 93474 - DNA, 25 bp, Probe sequence
tgaaccctccatttcaattcttttg

SEQ ID NO: 93475 - DNA, 25 bp, Probe sequence
tctcaaatcaatttccttacattac

SEQ ID NO: 93476 - DNA, 25 bp, Probe sequence
tcaattcttttgttagcatcgctag

SEQ ID NO: 93477 - DNA, 25 bp, Probe sequence
atagctttattagcaatagttttaa

SEQ ID NO: 93478 - DNA, 25 bp, Probe sequence
atcctattaaattgtgttaatttcg

SEQ ID NO: 93479 - DNA, 25 bp, Probe sequence
acattttgtttaacacttgataaag

SEQ ID NO: 93480 - DNA, 25 bp, Probe sequence
aatatagctttattagcaatagttt

SEQ ID NO: 93481 - DNA, 25 bp, Probe sequence
caaacattttgtttaacacttgata

SEQ ID NO: 93482 - DNA, 25 bp, Probe sequence
cattttgtttaacacttgataaagg

SEQ ID NO: 93483 - DNA, 25 bp, Probe sequence
gtatcaaaatatagctttattagca

SEQ ID NO: 93484 - DNA, 25 bp, Probe sequence
ggtatcaaaatatagctttattagc

SEQ ID NO: 93485 - DNA, 25 bp, Probe sequence
tccacctaaaaaagctatattaagt

SEQ ID NO: 93486 - DNA, 25 bp, Probe sequence
tagctttattagcaatagttttaaa

SEQ ID NO: 93487 - DNA, 25 bp, Probe sequence
tatagctttattagcaatagtttta

SEQ ID NO: 93488 - DNA, 25 bp, Probe sequence
tattaaattgtgttaatttcgaacg

SEQ ID NO: 93489 - DNA, 25 bp, Probe sequence
tattaagtttacttttatcaaacat

SEQ ID NO: 93490 - DNA, 25 bp, Probe sequence
ttgtttaacacttgataaaggtatc

SEQ ID NO: 93491 - DNA, 25 bp, Probe sequence
ttccacctaaaaaagctatattaag

SEQ ID NO: 93492 - DNA, 25 bp, Probe sequence
acaactccttatagtacttatcccg

SEQ ID NO: 93493 - DNA, 25 bp, Probe sequence
aatatacagtaaataactactattt

SEQ ID NO: 93494 - DNA, 25 bp, Probe sequence
caactccttatagtacttatcccgt

SEQ ID NO: 93495 - DNA, 25 bp, Probe sequence
ctccttatagtacttatcccgttat

SEQ ID NO: 93496 - DNA, 25 bp, Probe sequence
cttatagtacttatcccgttattat

SEQ ID NO: 93497 - DNA, 25 bp, Probe sequence
cgttacaactccttatagtacttat

SEQ ID NO: 93498 - DNA, 25 bp, Probe sequence
gttacaactccttatagtacttatc

SEQ ID NO: 93499 - DNA, 25 bp, Probe sequence
tccttatagtacttatcccgttatt

SEQ ID NO: 93500 - DNA, 25 bp, Probe sequence
tcgttacaactccttatagtactta

SEQ ID NO: 93501 - DNA, 25 bp, Probe sequence
tacaactccttatagtacttatccc

SEQ ID NO: 93502 - DNA, 25 bp, Probe sequence
tagtacttatcccgttattataact

SEQ ID NO: 93503 - DNA, 25 bp, Probe sequence
tatagtacttatcccgttattataa

SEQ ID NO: 93504 - DNA, 25 bp, Probe sequence
ttatagtacttatcccgttattata

SEQ ID NO: 93505 - DNA, 25 bp, Probe sequence
ttatcccgttattataactaaatat

SEQ ID NO: 93506 - DNA, 25 bp, Probe sequence
ttacaactccttatagtacttatcc

SEQ ID NO: 93507 - DNA, 25 bp, Probe sequence
atcgtcatttaaaattttgacacct

SEQ ID NO: 93508 - DNA, 25 bp, Probe sequence
aggtgtatggtaatgagaaatcgtc

SEQ ID NO: 93509 - DNA, 25 bp, Probe sequence
acgagcctatagatatacgcacatt

SEQ ID NO: 93510 - DNA, 25 bp, Probe sequence
acttactaatctgggtatcatcaat

SEQ ID NO: 93511 - DNA, 25 bp, Probe sequence
aaagacctctacttactaatctggg

SEQ ID NO: 93512 - DNA, 25 bp, Probe sequence
aacatatttttcatctaatttttat

SEQ ID NO: 93513 - DNA, 25 bp, Probe sequence
aacgttatcgatgattaacctcata

SEQ ID NO: 93514 - DNA, 25 bp, Probe sequence
cactttaattaaacgttatcgatga

SEQ ID NO: 93515 - DNA, 25 bp, Probe sequence
gacctctacttactaatctgggtat

SEQ ID NO: 93516 - DNA, 25 bp, Probe sequence
gattaataagcaaaagacctctact

SEQ ID NO: 93517 - DNA, 25 bp, Probe sequence
gattgatgataatttaggtgtatgg

SEQ ID NO: 93518 - DNA, 25 bp, Probe sequence
taataagtatactacgagcctatag

SEQ ID NO: 93519 - DNA, 25 bp, Probe sequence
taacctcatataaaaacccagatta

SEQ ID NO: 93520 - DNA, 25 bp, Probe sequence
tacgcacattaaattacttgtatat

SEQ ID NO: 93521 - DNA, 25 bp, Probe sequence
tagatatacgcacattaaattactt

SEQ ID NO: 93522 - DNA, 25 bp, Probe sequence
atcacatccatgatttcgtgctctt

SEQ ID NO: 93523 - DNA, 25 bp, Probe sequence
acatccatgatttcgtgctcttttt

SEQ ID NO: 93524 - DNA, 25 bp, Probe sequence
aacgttcaacataataattcatact

SEQ ID NO: 93525 - DNA, 25 bp, Probe sequence
aatagagcacgtaatcacatccatg

SEQ ID NO: 93526 - DNA, 25 bp, Probe sequence
aatattaaatcgaacgttcaacata

SEQ ID NO: 93527 - DNA, 25 bp, Probe sequence
gcacgtaatcacatccatgatttcg

SEQ ID NO: 93528 - DNA, 25 bp, Probe sequence
gatttcgtgctcttttttcttaata

SEQ ID NO: 93529 - DNA, 25 bp, Probe sequence
gtccataagaagtagaggtgagtca

SEQ ID NO: 93530 - DNA, 25 bp, Probe sequence
tgatttcgtgctcttttttcttaat

SEQ ID NO: 93531 - DNA, 25 bp, Probe sequence
tcaacataataattcatacttttaa

SEQ ID NO: 93532 - DNA, 25 bp, Probe sequence
taactttgtttaaataatagagcac

SEQ ID NO: 93533 - DNA, 25 bp, Probe sequence
tagagcacgtaatcacatccatgat

SEQ ID NO: 93534 - DNA, 25 bp, Probe sequence
taggttgacctaaacattttattag

SEQ ID NO: 93535 - DNA, 25 bp, Probe sequence
tttcgtgctcttttttcttaatatt

SEQ ID NO: 93536 - DNA, 25 bp, Probe sequence
ttattaggttattatattgtccata

SEQ ID NO: 93537 - DNA, 25 bp, Probe sequence
atctttattatacatcaacatttta

SEQ ID NO: 93538 - DNA, 25 bp, Probe sequence
atgagagcgtcttaagccgcaattg

SEQ ID NO: 93539 - DNA, 25 bp, Probe sequence
agcgtcttaagccgcaattgataaa

SEQ ID NO: 93540 - DNA, 25 bp, Probe sequence
aacatctttattatacatcaacatt

SEQ ID NO: 93541 - DNA, 25 bp, Probe sequence
aacatcatctcctaacatctttatt

SEQ ID NO: 93542 - DNA, 25 bp, Probe sequence
aatactaattttaatgagagcgtct

SEQ ID NO: 93543 - DNA, 25 bp, Probe sequence
catcatctcctaacatctttattat

SEQ ID NO: 93544 - DNA, 25 bp, Probe sequence
gagagcgtcttaagccgcaattgat

SEQ ID NO: 93545 - DNA, 25 bp, Probe sequence
gtcttaagccgcaattgataaaaca

SEQ ID NO: 93546 - DNA, 25 bp, Probe sequence
tctcctaacatctttattatacatc

SEQ ID NO: 93547 - DNA, 25 bp, Probe sequence
tcatctcctaacatctttattatac

SEQ ID NO: 93548 - DNA, 25 bp, Probe sequence
taagccgcaattgataaaacatatg

SEQ ID NO: 93549 - DNA, 25 bp, Probe sequence
tatgctacaatatttttaaacacta

SEQ ID NO: 93550 - DNA, 25 bp, Probe sequence
ttaaacactatacaggaggtactct

SEQ ID NO: 93551 - DNA, 25 bp, Probe sequence
ttaatgagagcgtcttaagccgcaa

SEQ ID NO: 93552 - DNA, 25 bp, Probe sequence
atgttacctaattgttaggactaca

SEQ ID NO: 93553 - DNA, 25 bp, Probe sequence
aaatggttttatattggcgcgtgtt

SEQ ID NO: 93554 - DNA, 25 bp, Probe sequence
aacacgcgttgatttaagaccacac

SEQ ID NO: 93555 - DNA, 25 bp, Probe sequence
aagcgtaatatgttacctaattgtt

SEQ ID NO: 93556 - DNA, 25 bp, Probe sequence
aagaccacacatgttcattatgaac

SEQ ID NO: 93557 - DNA, 25 bp, Probe sequence
cacgcgttgatttaagaccacacat

SEQ ID NO: 93558 - DNA, 25 bp, Probe sequence
gcgttgatttaagaccacacatgtt

SEQ ID NO: 93559 - DNA, 25 bp, Probe sequence
gatttaagaccacacatgttcatta

SEQ ID NO: 93560 - DNA, 25 bp, Probe sequence
gttaggactacatattacgcttttg

SEQ ID NO: 93561 - DNA, 25 bp, Probe sequence
ggactacatattacgcttttggtaa

SEQ ID NO: 93562 - DNA, 25 bp, Probe sequence
tggcgcgtgtttttattatttaagg

SEQ ID NO: 93563 - DNA, 25 bp, Probe sequence
tggttttatattggcgcgtgttttt

SEQ ID NO: 93564 - DNA, 25 bp, Probe sequence
taggactacatattacgcttttggt

SEQ ID NO: 93565 - DNA, 25 bp, Probe sequence
tatatcgacaataacacgcgttgat

SEQ ID NO: 93566 - DNA, 25 bp, Probe sequence
tattggcgcgtgtttttattattta

SEQ ID NO: 93567 - DNA, 25 bp, Probe sequence
atataaattctcaagtcttactaaa

SEQ ID NO: 93568 - DNA, 25 bp, Probe sequence
ctatataaattctcaagtcttacta

SEQ ID NO: 93569 - DNA, 25 bp, Probe sequence
ctctatataaattctcaagtcttac

SEQ ID NO: 93570 - DNA, 25 bp, Probe sequence
ctccccctctatataaattctcaag

SEQ ID NO: 93571 - DNA, 25 bp, Probe sequence
ccctctatataaattctcaagtctt

SEQ ID NO: 93572 - DNA, 25 bp, Probe sequence
cccctctatataaattctcaagtct

SEQ ID NO: 93573 - DNA, 25 bp, Probe sequence
ccccctctatataaattctcaagtc

SEQ ID NO: 93574 - DNA, 25 bp, Probe sequence
cctctatataaattctcaagtctta

SEQ ID NO: 93575 - DNA, 25 bp, Probe sequence
tccccctctatataaattctcaagt

SEQ ID NO: 93576 - DNA, 25 bp, Probe sequence
tctatataaattctcaagtcttact

SEQ ID NO: 93577 - DNA, 25 bp, Probe sequence
tcaagtcttactaaaagtttatctt

SEQ ID NO: 93578 - DNA, 25 bp, Probe sequence
taaattctcaagtcttactaaaagt

SEQ ID NO: 93579 - DNA, 25 bp, Probe sequence
tataaattctcaagtcttactaaaa

SEQ ID NO: 93580 - DNA, 25 bp, Probe sequence
tatataaattctcaagtcttactaa

SEQ ID NO: 93581 - DNA, 25 bp, Probe sequence
ttctcaagtcttactaaaagtttat

SEQ ID NO: 93582 - DNA, 25 bp, Probe sequence
ataacagccactttaatcagtaatt

SEQ ID NO: 93583 - DNA, 25 bp, Probe sequence
atctcacgccattttaatatgctta

SEQ ID NO: 93584 - DNA, 25 bp, Probe sequence
atgacacagtcataatcacaaatat

SEQ ID NO: 93585 - DNA, 25 bp, Probe sequence
agacaacataacagccactttaatc

SEQ ID NO: 93586 - DNA, 25 bp, Probe sequence
aaatattaacaggtctcttgaggta

SEQ ID NO: 93587 - DNA, 25 bp, Probe sequence
aaaacccaataaaagtgactgacat

SEQ ID NO: 93588 - DNA, 25 bp, Probe sequence
aaaatccatgttacttattatatac

SEQ ID NO: 93589 - DNA, 25 bp, Probe sequence
gcgcagctcaattgtcgatatctca

SEQ ID NO: 93590 - DNA, 25 bp, Probe sequence
gtcgatatctcacgccattttaata

SEQ ID NO: 93591 - DNA, 25 bp, Probe sequence
gtgactgacatgtcatcaagaagac

SEQ ID NO: 93592 - DNA, 25 bp, Probe sequence
tccaattctacaatttatacttcaa

SEQ ID NO: 93593 - DNA, 25 bp, Probe sequence
tcaaatgatttcgttttatacttta

SEQ ID NO: 93594 - DNA, 25 bp, Probe sequence
tcaattgtcgatatctcacgccatt

SEQ ID NO: 93595 - DNA, 25 bp, Probe sequence
taatatcgtgaattgctaaaaccca

SEQ ID NO: 93596 - DNA, 25 bp, Probe sequence
taaaatcggcgcagctcaattgtcg

SEQ ID NO: 93597 - DNA, 25 bp, Probe sequence
atagccaatgtttagcattgcttaa

SEQ ID NO: 93598 - DNA, 25 bp, Probe sequence
atgacagaagtcatctcgtactaaa

SEQ ID NO: 93599 - DNA, 25 bp, Probe sequence
agcattgcttaatgacagaagtcat

SEQ ID NO: 93600 - DNA, 25 bp, Probe sequence
acagaagtcatctcgtactaaatat

SEQ ID NO: 93601 - DNA, 25 bp, Probe sequence
aaatagccaatgtttagcattgctt

SEQ ID NO: 93602 - DNA, 25 bp, Probe sequence
aatgtttagcattgcttaatgacag

SEQ ID NO: 93603 - DNA, 25 bp, Probe sequence
ctcgtactaaatattggctagtatt

SEQ ID NO: 93604 - DNA, 25 bp, Probe sequence
gccaatgtttagcattgcttaatga

SEQ ID NO: 93605 - DNA, 25 bp, Probe sequence
gacagaagtcatctcgtactaaata

SEQ ID NO: 93606 - DNA, 25 bp, Probe sequence
gtttagcattgcttaatgacagaag

SEQ ID NO: 93607 - DNA, 25 bp, Probe sequence
gtatataaatagccaatgtttagca

SEQ ID NO: 93608 - DNA, 25 bp, Probe sequence
gtactaaatattggctagtattttt

SEQ ID NO: 93609 - DNA, 25 bp, Probe sequence
tgacagaagtcatctcgtactaaat

SEQ ID NO: 93610 - DNA, 25 bp, Probe sequence
tagccaatgtttagcattgcttaat

SEQ ID NO: 93611 - DNA, 25 bp, Probe sequence
ttagcattgcttaatgacagaagtc

SEQ ID NO: 93612 - DNA, 25 bp, Probe sequence
atgattctaatttcgccaccacatt

SEQ ID NO: 93613 - DNA, 25 bp, Probe sequence
agacaattaaaacctccgcttcaga

SEQ ID NO: 93614 - DNA, 25 bp, Probe sequence
acaggtagttcacgtttttgttgtg

SEQ ID NO: 93615 - DNA, 25 bp, Probe sequence
aaacctccgcttcagaaataataat

SEQ ID NO: 93616 - DNA, 25 bp, Probe sequence
aacattttcgatttctacaactcta

SEQ ID NO: 93617 - DNA, 25 bp, Probe sequence
gcgctctgttttgctatagttatgt

SEQ ID NO: 93618 - DNA, 25 bp, Probe sequence
gcaaaacatcaacatttattatcaa

SEQ ID NO: 93619 - DNA, 25 bp, Probe sequence
gactatgcaacaacaggtagttcac

SEQ ID NO: 93620 - DNA, 25 bp, Probe sequence
gagtaatctcgtaatatcaaaacaa

SEQ ID NO: 93621 - DNA, 25 bp, Probe sequence
tcatcatgattctaatttcgccacc

SEQ ID NO: 93622 - DNA, 25 bp, Probe sequence
taactttatcttatcatcatgattc

SEQ ID NO: 93623 - DNA, 25 bp, Probe sequence
tacactcctcaaactattagaattt

SEQ ID NO: 93624 - DNA, 25 bp, Probe sequence
tagcgatacactcctcaaactatta

SEQ ID NO: 93625 - DNA, 25 bp, Probe sequence
tttatcttaaagcgctctgttttgc

SEQ ID NO: 93626 - DNA, 25 bp, Probe sequence
ttcgccaccacatttagtaattttt

SEQ ID NO: 93627 - DNA, 25 bp, Probe sequence
attgttgtgtaatctcgttttattt

SEQ ID NO: 93628 - DNA, 25 bp, Probe sequence
acctaagccatgtaaaaacgagatt

SEQ ID NO: 93629 - DNA, 25 bp, Probe sequence
acgtcaattgttgtgtaatctcgtt

SEQ ID NO: 93630 - DNA, 25 bp, Probe sequence
acgagattacacgtcaattgttgtg

SEQ ID NO: 93631 - DNA, 25 bp, Probe sequence
aaaacgagattacacgtcaattgtt

SEQ ID NO: 93632 - DNA, 25 bp, Probe sequence
aacgagattacacgtcaattgttgt

SEQ ID NO: 93633 - DNA, 25 bp, Probe sequence
aatggcacgcccattaaaattacgg

SEQ ID NO: 93634 - DNA, 25 bp, Probe sequence
caattgttgtgtaatctcgttttat

SEQ ID NO: 93635 - DNA, 25 bp, Probe sequence
ccgtaattttaatggcacgcccatt

SEQ ID NO: 93636 - DNA, 25 bp, Probe sequence
gtcaattgttgtgtaatctcgtttt

SEQ ID NO: 93637 - DNA, 25 bp, Probe sequence
tgtgtaatctcgttttattttaatc

SEQ ID NO: 93638 - DNA, 25 bp, Probe sequence
tgtaatctcgttttattttaatcat

SEQ ID NO: 93639 - DNA, 25 bp, Probe sequence
tgttgtgtaatctcgttttatttta

SEQ ID NO: 93640 - DNA, 25 bp, Probe sequence
taaacctaagccatgtaaaaacgag

SEQ ID NO: 93641 - DNA, 25 bp, Probe sequence
tatttaaaattaaacctaagccatg

SEQ ID NO: 93642 - DNA, 25 bp, Probe sequence
atcccaataaaaaaatcattacgat

SEQ ID NO: 93643 - DNA, 25 bp, Probe sequence
agattatgatatcttagattgcata

SEQ ID NO: 93644 - DNA, 25 bp, Probe sequence
aaatgtgacaaattaacgacaagag

SEQ ID NO: 93645 - DNA, 25 bp, Probe sequence
aacgtggattacataattatcccaa

SEQ ID NO: 93646 - DNA, 25 bp, Probe sequence
aatttattgctataatgtatatgtt

SEQ ID NO: 93647 - DNA, 25 bp, Probe sequence
ccctccttaaatttgttcatataag

SEQ ID NO: 93648 - DNA, 25 bp, Probe sequence
gcttcaaatttgagtaaacgtggat

SEQ ID NO: 93649 - DNA, 25 bp, Probe sequence
gaatcatgcatctaaaagagattaa

SEQ ID NO: 93650 - DNA, 25 bp, Probe sequence
gaaaatgtcaattttgtgacacaaa

SEQ ID NO: 93651 - DNA, 25 bp, Probe sequence
gagattaatatttaagcttcaaatt

SEQ ID NO: 93652 - DNA, 25 bp, Probe sequence
gattacataattatcccaataaaaa

SEQ ID NO: 93653 - DNA, 25 bp, Probe sequence
gattgcataaaaagactaggtttaa

SEQ ID NO: 93654 - DNA, 25 bp, Probe sequence
gtgacacaaataacatttaatttat

SEQ ID NO: 93655 - DNA, 25 bp, Probe sequence
gtggattacataattatcccaataa

SEQ ID NO: 93656 - DNA, 25 bp, Probe sequence
taataagtagaatcatgcatctaaa

SEQ ID NO: 93657 - DNA, 25 bp, Probe sequence
attgccttatcagattagtatcatt

SEQ ID NO: 93658 - DNA, 25 bp, Probe sequence
atcaactgtccgactattcttcatc

SEQ ID NO: 93659 - DNA, 25 bp, Probe sequence
acgtcataaagattttccctacact

SEQ ID NO: 93660 - DNA, 25 bp, Probe sequence
actgtccgactattcttcatcaaaa

SEQ ID NO: 93661 - DNA, 25 bp, Probe sequence
aaagattttccctacactctatatc

SEQ ID NO: 93662 - DNA, 25 bp, Probe sequence
aaacaaattgccttatcagattagt

SEQ ID NO: 93663 - DNA, 25 bp, Probe sequence
aatgaataccatcaactgtccgact

SEQ ID NO: 93664 - DNA, 25 bp, Probe sequence
aataccatcaactgtccgactattc

SEQ ID NO: 93665 - DNA, 25 bp, Probe sequence
cactctatatcataacctatcttta

SEQ ID NO: 93666 - DNA, 25 bp, Probe sequence
ctatctttatgttttcaggttgaat

SEQ ID NO: 93667 - DNA, 25 bp, Probe sequence
ccgactattcttcatcaaaaaacct

SEQ ID NO: 93668 - DNA, 25 bp, Probe sequence
gattagtatcatttgtataagcata

SEQ ID NO: 93669 - DNA, 25 bp, Probe sequence
gttttcaggttgaatttcattatta

SEQ ID NO: 93670 - DNA, 25 bp, Probe sequence
tggacagttaaggtatcaaatgaat

SEQ ID NO: 93671 - DNA, 25 bp, Probe sequence
tttccctacactctatatcataacc

SEQ ID NO: 93672 - DNA, 25 bp, Probe sequence
atcgagtcagatgctagttagtggt

SEQ ID NO: 93673 - DNA, 25 bp, Probe sequence
atgctagttagtggtttcaataacc

SEQ ID NO: 93674 - DNA, 25 bp, Probe sequence
agtcagatgctagttagtggtttca

SEQ ID NO: 93675 - DNA, 25 bp, Probe sequence
agatgctagttagtggtttcaataa

SEQ ID NO: 93676 - DNA, 25 bp, Probe sequence
aaacatcgagtcagatgctagttag

SEQ ID NO: 93677 - DNA, 25 bp, Probe sequence
cagatgctagttagtggtttcaata

SEQ ID NO: 93678 - DNA, 25 bp, Probe sequence
ccacctttttctgactcgatgtttt

SEQ ID NO: 93679 - DNA, 25 bp, Probe sequence
gagtcagatgctagttagtggtttc

SEQ ID NO: 93680 - DNA, 25 bp, Probe sequence
gtcagatgctagttagtggtttcaa

SEQ ID NO: 93681 - DNA, 25 bp, Probe sequence
tggtttcaataaccacctttttctg

SEQ ID NO: 93682 - DNA, 25 bp, Probe sequence
tcgagtcagatgctagttagtggtt

SEQ ID NO: 93683 - DNA, 25 bp, Probe sequence
tcagatgctagttagtggtttcaat

SEQ ID NO: 93684 - DNA, 25 bp, Probe sequence
tcaataaccacctttttctgactcg

SEQ ID NO: 93685 - DNA, 25 bp, Probe sequence
tttcaataaccacctttttctgact

SEQ ID NO: 93686 - DNA, 25 bp, Probe sequence
ttcaataaccacctttttctgactc

SEQ ID NO: 93687 - DNA, 25 bp, Probe sequence
atcatatcatgtctttattaatttt

SEQ ID NO: 93688 - DNA, 25 bp, Probe sequence
agaactatgattttgttaagctata

SEQ ID NO: 93689 - DNA, 25 bp, Probe sequence
acctcactccatttattttcagcat

SEQ ID NO: 93690 - DNA, 25 bp, Probe sequence
acatcattatattaattcaattctc

SEQ ID NO: 93691 - DNA, 25 bp, Probe sequence
aaacctcactccatttattttcagc

SEQ ID NO: 93692 - DNA, 25 bp, Probe sequence
aaccacacatttcgctgtagtcaga

SEQ ID NO: 93693 - DNA, 25 bp, Probe sequence
aagctaccttaattatgtcttatgt

SEQ ID NO: 93694 - DNA, 25 bp, Probe sequence
aattcaattctcaagagcatcacta

SEQ ID NO: 93695 - DNA, 25 bp, Probe sequence
cactccatttattttcagcattaat

SEQ ID NO: 93696 - DNA, 25 bp, Probe sequence
catttcgctgtagtcagaactatga

SEQ ID NO: 93697 - DNA, 25 bp, Probe sequence
gagcatcactatatgattaaccaca

SEQ ID NO: 93698 - DNA, 25 bp, Probe sequence
gattaaccacacatttcgctgtagt

SEQ ID NO: 93699 - DNA, 25 bp, Probe sequence
gtaattgctcgataaatgtatttag

SEQ ID NO: 93700 - DNA, 25 bp, Probe sequence
tcagcattaatcatatcatgtcttt

SEQ ID NO: 93701 - DNA, 25 bp, Probe sequence
ttatgtcttatgtaattgctcgata

SEQ ID NO: 93702 - DNA, 25 bp, Probe sequence
acacttccaattcatttagttattt

SEQ ID NO: 93703 - DNA, 25 bp, Probe sequence
aattcatttagttatttaatataat

SEQ ID NO: 93704 - DNA, 25 bp, Probe sequence
caattcatttagttatttaatataa

SEQ ID NO: 93705 - DNA, 25 bp, Probe sequence
cacttccaattcatttagttattta

SEQ ID NO: 93706 - DNA, 25 bp, Probe sequence
cacacttccaattcatttagttatt

SEQ ID NO: 93707 - DNA, 25 bp, Probe sequence
cttccaattcatttagttatttaat

SEQ ID NO: 93708 - DNA, 25 bp, Probe sequence
ccaattcatttagttatttaatata

SEQ ID NO: 93709 - DNA, 25 bp, Probe sequence
gttgttcacacttccaattcattta

SEQ ID NO: 93710 - DNA, 25 bp, Probe sequence
gttcacacttccaattcatttagtt

SEQ ID NO: 93711 - DNA, 25 bp, Probe sequence
tgttcacacttccaattcatttagt

SEQ ID NO: 93712 - DNA, 25 bp, Probe sequence
tccaattcatttagttatttaatat

SEQ ID NO: 93713 - DNA, 25 bp, Probe sequence
tcacacttccaattcatttagttat

SEQ ID NO: 93714 - DNA, 25 bp, Probe sequence
ttcacacttccaattcatttagtta

SEQ ID NO: 93715 - DNA, 25 bp, Probe sequence
ttccaattcatttagttatttaata

SEQ ID NO: 93716 - DNA, 25 bp, Probe sequence
ttgttcacacttccaattcatttag

SEQ ID NO: 93717 - DNA, 25 bp, Probe sequence
atgaaaacagtattttaggattgta

SEQ ID NO: 93718 - DNA, 25 bp, Probe sequence
atgataaacctaaaatactgttatt

SEQ ID NO: 93719 - DNA, 25 bp, Probe sequence
agtattttaggattgtaaaccatga

SEQ ID NO: 93720 - DNA, 25 bp, Probe sequence
accatgataaacctaaaatactgtt

SEQ ID NO: 93721 - DNA, 25 bp, Probe sequence
acagtattttaggattgtaaaccat

SEQ ID NO: 93722 - DNA, 25 bp, Probe sequence
aaaccatgataaacctaaaatactg

SEQ ID NO: 93723 - DNA, 25 bp, Probe sequence
aaccatgataaacctaaaatactgt

SEQ ID NO: 93724 - DNA, 25 bp, Probe sequence
cagtattttaggattgtaaaccatg

SEQ ID NO: 93725 - DNA, 25 bp, Probe sequence
gattgtaaaccatgataaacctaaa

SEQ ID NO: 93726 - DNA, 25 bp, Probe sequence
gtattttaggattgtaaaccatgat

SEQ ID NO: 93727 - DNA, 25 bp, Probe sequence
ggattgtaaaccatgataaacctaa

SEQ ID NO: 93728 - DNA, 25 bp, Probe sequence
tgtaaaccatgataaacctaaaata

SEQ ID NO: 93729 - DNA, 25 bp, Probe sequence
taaaccatgataaacctaaaatact

SEQ ID NO: 93730 - DNA, 25 bp, Probe sequence
ttaggattgtaaaccatgataaacc

SEQ ID NO: 93731 - DNA, 25 bp, Probe sequence
ttgtaaaccatgataaacctaaaat

SEQ ID NO: 93732 - DNA, 25 bp, Probe sequence
atggcttcacctctaacaagcacaa

SEQ ID NO: 93733 - DNA, 25 bp, Probe sequence
agttgtcaagattttttcttaacat

SEQ ID NO: 93734 - DNA, 25 bp, Probe sequence
acctctaacaagcacaaaatttatt

SEQ ID NO: 93735 - DNA, 25 bp, Probe sequence
cacctctaacaagcacaaaatttat

SEQ ID NO: 93736 - DNA, 25 bp, Probe sequence
cttcacctctaacaagcacaaaatt

SEQ ID NO: 93737 - DNA, 25 bp, Probe sequence
gcttcacctctaacaagcacaaaat

SEQ ID NO: 93738 - DNA, 25 bp, Probe sequence
gaacaagttgtcaagattttttctt

SEQ ID NO: 93739 - DNA, 25 bp, Probe sequence
gttgtcaagattttttcttaacata

SEQ ID NO: 93740 - DNA, 25 bp, Probe sequence
ggcttcacctctaacaagcacaaaa

SEQ ID NO: 93741 - DNA, 25 bp, Probe sequence
tggcttcacctctaacaagcacaaa

SEQ ID NO: 93742 - DNA, 25 bp, Probe sequence
tgtcaagattttttcttaacatatc

SEQ ID NO: 93743 - DNA, 25 bp, Probe sequence
tctaacaagcacaaaatttatttta

SEQ ID NO: 93744 - DNA, 25 bp, Probe sequence
tcacctctaacaagcacaaaattta

SEQ ID NO: 93745 - DNA, 25 bp, Probe sequence
ttaactttctaagaacaagttgtca

SEQ ID NO: 93746 - DNA, 25 bp, Probe sequence
ttcacctctaacaagcacaaaattt

SEQ ID NO: 93747 - DNA, 25 bp, Probe sequence
atatatcctccttagattataaacg

SEQ ID NO: 93748 - DNA, 25 bp, Probe sequence
atatcctccttagattataaacgaa

SEQ ID NO: 93749 - DNA, 25 bp, Probe sequence
acaacattatatcattaattaaact

SEQ ID NO: 93750 - DNA, 25 bp, Probe sequence
aacaacattatatcattaattaaac

SEQ ID NO: 93751 - DNA, 25 bp, Probe sequence
aacattatatcattaattaaactac

SEQ ID NO: 93752 - DNA, 25 bp, Probe sequence
caacattatatcattaattaaacta

SEQ ID NO: 93753 - DNA, 25 bp, Probe sequence
gatatatcctccttagattataaac

SEQ ID NO: 93754 - DNA, 25 bp, Probe sequence
taattaacaacattatatcattaat

SEQ ID NO: 93755 - DNA, 25 bp, Probe sequence
taacaacattatatcattaattaaa

SEQ ID NO: 93756 - DNA, 25 bp, Probe sequence
tatcctccttagattataaacgaaa

SEQ ID NO: 93757 - DNA, 25 bp, Probe sequence
tatatcctccttagattataaacga

SEQ ID NO: 93758 - DNA, 25 bp, Probe sequence
tttaattaacaacattatatcatta

SEQ ID NO: 93759 - DNA, 25 bp, Probe sequence
ttaacaacattatatcattaattaa

SEQ ID NO: 93760 - DNA, 25 bp, Probe sequence
ttaattaacaacattatatcattaa

SEQ ID NO: 93761 - DNA, 25 bp, Probe sequence
aattttaattggcggatgaggtatc

SEQ ID NO: 93762 - DNA, 25 bp, Probe sequence
ctcgttcgccaattatttttcgcaa

SEQ ID NO: 93763 - DNA, 25 bp, Probe sequence
cgttcgccaattatttttcgcaata

SEQ ID NO: 93764 - DNA, 25 bp, Probe sequence
cctcgttcgccaattatttttcgca

SEQ ID NO: 93765 - DNA, 25 bp, Probe sequence
gccaattatttttcgcaatataaaa

SEQ ID NO: 93766 - DNA, 25 bp, Probe sequence
gcggatgaggtatccagttacctcg

SEQ ID NO: 93767 - DNA, 25 bp, Probe sequence
gaggtatccagttacctcgttcgcc

SEQ ID NO: 93768 - DNA, 25 bp, Probe sequence
gatgaggtatccagttacctcgttc

SEQ ID NO: 93769 - DNA, 25 bp, Probe sequence
gttcgccaattatttttcgcaatat

SEQ ID NO: 93770 - DNA, 25 bp, Probe sequence
tgaggtatccagttacctcgttcgc

SEQ ID NO: 93771 - DNA, 25 bp, Probe sequence
tcgccaattatttttcgcaatataa

SEQ ID NO: 93772 - DNA, 25 bp, Probe sequence
tcgttcgccaattatttttcgcaat

SEQ ID NO: 93773 - DNA, 25 bp, Probe sequence
tcattttaagcgggactttttatat

SEQ ID NO: 93774 - DNA, 25 bp, Probe sequence
tacctcgttcgccaattatttttcg

SEQ ID NO: 93775 - DNA, 25 bp, Probe sequence
ttggcggatgaggtatccagttacc

SEQ ID NO: 93776 - DNA, 25 bp, Probe sequence
attaactaccatttcaatgtacaat

SEQ ID NO: 93777 - DNA, 25 bp, Probe sequence
attttatttaacctatgtcatagat

SEQ ID NO: 93778 - DNA, 25 bp, Probe sequence
atcatcgtcacactcataacttaat

SEQ ID NO: 93779 - DNA, 25 bp, Probe sequence
atcgtcacactcataacttaatata

SEQ ID NO: 93780 - DNA, 25 bp, Probe sequence
atgttgcaattaactaccatttcaa

SEQ ID NO: 93781 - DNA, 25 bp, Probe sequence
accatttcaatgtacaatacaagta

SEQ ID NO: 93782 - DNA, 25 bp, Probe sequence
acactcataacttaatatatttttt

SEQ ID NO: 93783 - DNA, 25 bp, Probe sequence
aactaccatttcaatgtacaataca

SEQ ID NO: 93784 - DNA, 25 bp, Probe sequence
aacctatgtcatagatatttcataa

SEQ ID NO: 93785 - DNA, 25 bp, Probe sequence
gcaattaactaccatttcaatgtac

SEQ ID NO: 93786 - DNA, 25 bp, Probe sequence
gatatttcataatctataacatagg

SEQ ID NO: 93787 - DNA, 25 bp, Probe sequence
gttgcaattaactaccatttcaatg

SEQ ID NO: 93788 - DNA, 25 bp, Probe sequence
gtcacactcataacttaatatattt

SEQ ID NO: 93789 - DNA, 25 bp, Probe sequence
tcatcgtcacactcataacttaata

SEQ ID NO: 93790 - DNA, 25 bp, Probe sequence
tacaattaggagttgtttctacaac

SEQ ID NO: 93791 - DNA, 25 bp, Probe sequence
attgcaatggttaatcatctcatat

SEQ ID NO: 93792 - DNA, 25 bp, Probe sequence
ataatcctcctttttatgattgctt

SEQ ID NO: 93793 - DNA, 25 bp, Probe sequence
atgattgcttttaagtctttagtaa

SEQ ID NO: 93794 - DNA, 25 bp, Probe sequence
aacataatcctcctttttatgattg

SEQ ID NO: 93795 - DNA, 25 bp, Probe sequence
aatcctcctttttatgattgctttt

SEQ ID NO: 93796 - DNA, 25 bp, Probe sequence
aatcaatttattattgttatacgga

SEQ ID NO: 93797 - DNA, 25 bp, Probe sequence
caacacataatttgtatccttagga

SEQ ID NO: 93798 - DNA, 25 bp, Probe sequence
cacataatttgtatccttaggagga

SEQ ID NO: 93799 - DNA, 25 bp, Probe sequence
gatgtgctagtataattgataacca

SEQ ID NO: 93800 - DNA, 25 bp, Probe sequence
gattatcattgtcaatatttatttt

SEQ ID NO: 93801 - DNA, 25 bp, Probe sequence
gttatacggaaatagatgtgctagt

SEQ ID NO: 93802 - DNA, 25 bp, Probe sequence
tgataaccattatcaattgcaatgg

SEQ ID NO: 93803 - DNA, 25 bp, Probe sequence
tcctttttatgattgcttttaagtc

SEQ ID NO: 93804 - DNA, 25 bp, Probe sequence
tcctcctttttatgattgcttttaa

SEQ ID NO: 93805 - DNA, 25 bp, Probe sequence
taatcatctcatataacaacacata

SEQ ID NO: 93806 - DNA, 25 bp, Probe sequence
acgacgtttcttcagtcatcactaa

SEQ ID NO: 93807 - DNA, 25 bp, Probe sequence
acgtttcttcagtcatcactaaacc

SEQ ID NO: 93808 - DNA, 25 bp, Probe sequence
aacgacgtttcttcagtcatcacta

SEQ ID NO: 93809 - DNA, 25 bp, Probe sequence
cagtcatcactaaaccagttgttgt

SEQ ID NO: 93810 - DNA, 25 bp, Probe sequence
catcactaaaccagttgttgtaccg

SEQ ID NO: 93811 - DNA, 25 bp, Probe sequence
cgacgtttcttcagtcatcactaaa

SEQ ID NO: 93812 - DNA, 25 bp, Probe sequence
gtttcttcagtcatcactaaaccag

SEQ ID NO: 93813 - DNA, 25 bp, Probe sequence
gtcatcactaaaccagttgttgtac

SEQ ID NO: 93814 - DNA, 25 bp, Probe sequence
tcactaaaccagttgttgtaccgtt

SEQ ID NO: 93815 - DNA, 25 bp, Probe sequence
tcttttattaacgacgtttcttcag

SEQ ID NO: 93816 - DNA, 25 bp, Probe sequence
taacgacgtttcttcagtcatcact

SEQ ID NO: 93817 - DNA, 25 bp, Probe sequence
tattaacgacgtttcttcagtcatc

SEQ ID NO: 93818 - DNA, 25 bp, Probe sequence
ttaacgacgtttcttcagtcatcac

SEQ ID NO: 93819 - DNA, 25 bp, Probe sequence
ttcttcagtcatcactaaaccagtt

SEQ ID NO: 93820 - DNA, 25 bp, Probe sequence
ttcagtcatcactaaaccagttgtt

SEQ ID NO: 93821 - DNA, 25 bp, Probe sequence
atttcttttatcgatactactacta

SEQ ID NO: 93822 - DNA, 25 bp, Probe sequence
atcactcataatatttcaaattgca

SEQ ID NO: 93823 - DNA, 25 bp, Probe sequence
atcattattaattcttttcttcttc

SEQ ID NO: 93824 - DNA, 25 bp, Probe sequence
actactataaatcatacgccccaaa

SEQ ID NO: 93825 - DNA, 25 bp, Probe sequence
actactactataaatcatacgcccc

SEQ ID NO: 93826 - DNA, 25 bp, Probe sequence
aaatcatacgccccaaaatatcatt

SEQ ID NO: 93827 - DNA, 25 bp, Probe sequence
aatcgcttttatcactcataatatt

SEQ ID NO: 93828 - DNA, 25 bp, Probe sequence
aattgcataaatttcttttatcgat

SEQ ID NO: 93829 - DNA, 25 bp, Probe sequence
catacgccccaaaatatcattatta

SEQ ID NO: 93830 - DNA, 25 bp, Probe sequence
cattattaattcttttcttcttcaa

SEQ ID NO: 93831 - DNA, 25 bp, Probe sequence
gaaaacatttgattgtatagttaat

SEQ ID NO: 93832 - DNA, 25 bp, Probe sequence
gatgattattttcaaagcacattca

SEQ ID NO: 93833 - DNA, 25 bp, Probe sequence
tgatagctcctcgctttatttttaa

SEQ ID NO: 93834 - DNA, 25 bp, Probe sequence
taattaatcgcttttatcactcata

SEQ ID NO: 93835 - DNA, 25 bp, Probe sequence
ttcttttcttcttcaaaataaatca

SEQ ID NO: 93836 - DNA, 25 bp, Probe sequence
attgatcatatttgttgtttaacta

SEQ ID NO: 93837 - DNA, 25 bp, Probe sequence
attcaattgtgtatgcattcacgta

SEQ ID NO: 93838 - DNA, 25 bp, Probe sequence
atgcctaagcatacacttgtttaat

SEQ ID NO: 93839 - DNA, 25 bp, Probe sequence
aacttgcagtcacgattattctccc

SEQ ID NO: 93840 - DNA, 25 bp, Probe sequence
aatgtccatgcctttttattggttt

SEQ ID NO: 93841 - DNA, 25 bp, Probe sequence
aatgactttcatcctcttaaaaata

SEQ ID NO: 93842 - DNA, 25 bp, Probe sequence
gtcatttccgtggtaccacccaaat

SEQ ID NO: 93843 - DNA, 25 bp, Probe sequence
gcattcacgtagaaatgttctgtta

SEQ ID NO: 93844 - DNA, 25 bp, Probe sequence
gacgaaagtcatttccgtggtacca

SEQ ID NO: 93845 - DNA, 25 bp, Probe sequence
gaactattcattttctattgatcat

SEQ ID NO: 93846 - DNA, 25 bp, Probe sequence
gataacggattgtctttccgactta

SEQ ID NO: 93847 - DNA, 25 bp, Probe sequence
gtaccacccaaatttatgcctaagc

SEQ ID NO: 93848 - DNA, 25 bp, Probe sequence
gtcacgattattctccctaaaacaa

SEQ ID NO: 93849 - DNA, 25 bp, Probe sequence
tgacctccctattcgaactattcat

SEQ ID NO: 93850 - DNA, 25 bp, Probe sequence
tgtctttccgacttaaatctcttta

SEQ ID NO: 93851 - DNA, 25 bp, Probe sequence
agaagcatcatctgtattccgctgt

SEQ ID NO: 93852 - DNA, 25 bp, Probe sequence
aaaccccatgttaaggatatcaatc

SEQ ID NO: 93853 - DNA, 25 bp, Probe sequence
cagatatccttatacatggggttta

SEQ ID NO: 93854 - DNA, 25 bp, Probe sequence
cgctgtgcctctttgatttttaaat

SEQ ID NO: 93855 - DNA, 25 bp, Probe sequence
ccgctgttcctctttgatttataaa

SEQ ID NO: 93856 - DNA, 25 bp, Probe sequence
gcttttatgcagttgtgcgaagcat

SEQ ID NO: 93857 - DNA, 25 bp, Probe sequence
gaatcgaaacctaattggtgaatcc

SEQ ID NO: 93858 - DNA, 25 bp, Probe sequence
gaagcatcatctgtaatccactgtg

SEQ ID NO: 93859 - DNA, 25 bp, Probe sequence
gactttatatgcagttgtgagaagc

SEQ ID NO: 93860 - DNA, 25 bp, Probe sequence
gactttatatgcagtgatgcgaagc

SEQ ID NO: 93861 - DNA, 25 bp, Probe sequence
gtgaatccaaaaataaaaccccatg

SEQ ID NO: 93862 - DNA, 25 bp, Probe sequence
gtgcgaagcatcatctgtattccgc

SEQ ID NO: 93863 - DNA, 25 bp, Probe sequence
tccactgtgcctctatgatttataa

SEQ ID NO: 93864 - DNA, 25 bp, Probe sequence
tctgtaatccactgtgcctctatga

SEQ ID NO: 93865 - DNA, 25 bp, Probe sequence
tatcaatctacttcagatatcctta

SEQ ID NO: 93866 - DNA, 25 bp, Probe sequence
atatgactggatagtttgtctgaat

SEQ ID NO: 93867 - DNA, 25 bp, Probe sequence
ataaacattatacatgaccactatg

SEQ ID NO: 93868 - DNA, 25 bp, Probe sequence
atgtattttgtaagtatccgcaatt

SEQ ID NO: 93869 - DNA, 25 bp, Probe sequence
aaacaacaacacaatctctatagat

SEQ ID NO: 93870 - DNA, 25 bp, Probe sequence
catgaccactatgtattttgtaagt

SEQ ID NO: 93871 - DNA, 25 bp, Probe sequence
catacataaatgtttctgacgttat

SEQ ID NO: 93872 - DNA, 25 bp, Probe sequence
gcaattaattctttacaacatacat

SEQ ID NO: 93873 - DNA, 25 bp, Probe sequence
gatgacttaatgttctttttataat

SEQ ID NO: 93874 - DNA, 25 bp, Probe sequence
gtttctgacgttattatcatttatg

SEQ ID NO: 93875 - DNA, 25 bp, Probe sequence
gtttgtctgaatttgatactaatat

SEQ ID NO: 93876 - DNA, 25 bp, Probe sequence
gtatccgcaattaattctttacaac

SEQ ID NO: 93877 - DNA, 25 bp, Probe sequence
gtgtcactataacattttcataaac

SEQ ID NO: 93878 - DNA, 25 bp, Probe sequence
tctcctgatcctttttttaaaatct

SEQ ID NO: 93879 - DNA, 25 bp, Probe sequence
tatcatgtttaaattgtgtcactat

SEQ ID NO: 93880 - DNA, 25 bp, Probe sequence
tataatttctcctgatccttttttt

SEQ ID NO: 93881 - DNA, 25 bp, Probe sequence
attaatatatacctttgtcctgacc

SEQ ID NO: 93882 - DNA, 25 bp, Probe sequence
ataacactccataaaaagaagacca

SEQ ID NO: 93883 - DNA, 25 bp, Probe sequence
agaagaccaggacgtatcattaata

SEQ ID NO: 93884 - DNA, 25 bp, Probe sequence
aaaagaagaccaggacgtatcatta

SEQ ID NO: 93885 - DNA, 25 bp, Probe sequence
aacactccataaaaagaagaccagg

SEQ ID NO: 93886 - DNA, 25 bp, Probe sequence
aagaagaccaggacgtatcattaat

SEQ ID NO: 93887 - DNA, 25 bp, Probe sequence
aagaccaggacgtatcattaatata

SEQ ID NO: 93888 - DNA, 25 bp, Probe sequence
cattaatatatacctttgtcctgac

SEQ ID NO: 93889 - DNA, 25 bp, Probe sequence
ctttgtcctgacctcttatgataat

SEQ ID NO: 93890 - DNA, 25 bp, Probe sequence
cctttgtcctgacctcttatgataa

SEQ ID NO: 93891 - DNA, 25 bp, Probe sequence
gaagaccaggacgtatcattaatat

SEQ ID NO: 93892 - DNA, 25 bp, Probe sequence
gaccaggacgtatcattaatatata

SEQ ID NO: 93893 - DNA, 25 bp, Probe sequence
taatatatacctttgtcctgacctc

SEQ ID NO: 93894 - DNA, 25 bp, Probe sequence
tatatacctttgtcctgacctctta

SEQ ID NO: 93895 - DNA, 25 bp, Probe sequence
ttaatatatacctttgtcctgacct

SEQ ID NO: 93896 - DNA, 25 bp, Probe sequence
atgccaatcctccttaattattatt

SEQ ID NO: 93897 - DNA, 25 bp, Probe sequence
atgcttcatgtatttctatttgctc

SEQ ID NO: 93898 - DNA, 25 bp, Probe sequence
aaatgccaatcctccttaattatta

SEQ ID NO: 93899 - DNA, 25 bp, Probe sequence
aatcctccttaattattattatgat

SEQ ID NO: 93900 - DNA, 25 bp, Probe sequence
catgtatttctatttgctcaatttt

SEQ ID NO: 93901 - DNA, 25 bp, Probe sequence
ctatttgctcaatttttatgcttat

SEQ ID NO: 93902 - DNA, 25 bp, Probe sequence
gccaatcctccttaattattattat

SEQ ID NO: 93903 - DNA, 25 bp, Probe sequence
gctcaatttttatgcttatttcaaa

SEQ ID NO: 93904 - DNA, 25 bp, Probe sequence
gcttcatgtatttctatttgctcaa

SEQ ID NO: 93905 - DNA, 25 bp, Probe sequence
gttgctttacattattttaactgca

SEQ ID NO: 93906 - DNA, 25 bp, Probe sequence
gtttgaaatgtattcttgttgcttt

SEQ ID NO: 93907 - DNA, 25 bp, Probe sequence
gtattcttgttgctttacattattt

SEQ ID NO: 93908 - DNA, 25 bp, Probe sequence
tgctttacattattttaactgcagc

SEQ ID NO: 93909 - DNA, 25 bp, Probe sequence
tttgctcaatttttatgcttatttc

SEQ ID NO: 93910 - DNA, 25 bp, Probe sequence
ttatatcagataacatgcttcatgt

SEQ ID NO: 93911 - DNA, 25 bp, Probe sequence
attaaagaaatgccccagtcgtcat

SEQ ID NO: 93912 - DNA, 25 bp, Probe sequence
atgccccagtcgtcattggttataa

SEQ ID NO: 93913 - DNA, 25 bp, Probe sequence
acacaaacaaaaactggagcaattc

SEQ ID NO: 93914 - DNA, 25 bp, Probe sequence
acaaaaactggagcaattcattaaa

SEQ ID NO: 93915 - DNA, 25 bp, Probe sequence
aaatgccccagtcgtcattggttat

SEQ ID NO: 93916 - DNA, 25 bp, Probe sequence
aaagaaatgccccagtcgtcattgg

SEQ ID NO: 93917 - DNA, 25 bp, Probe sequence
aaacacaaacaaaaactggagcaat

SEQ ID NO: 93918 - DNA, 25 bp, Probe sequence
aaaactggagcaattcattaaagaa

SEQ ID NO: 93919 - DNA, 25 bp, Probe sequence
aacaaaaactggagcaattcattaa

SEQ ID NO: 93920 - DNA, 25 bp, Probe sequence
caaaaactggagcaattcattaaag

SEQ ID NO: 93921 - DNA, 25 bp, Probe sequence
caaacaaaaactggagcaattcatt

SEQ ID NO: 93922 - DNA, 25 bp, Probe sequence
cattaaagaaatgccccagtcgtca

SEQ ID NO: 93923 - DNA, 25 bp, Probe sequence
tgccccagtcgtcattggttataac

SEQ ID NO: 93924 - DNA, 25 bp, Probe sequence
taaagaaatgccccagtcgtcattg

SEQ ID NO: 93925 - DNA, 25 bp, Probe sequence
ttaaagaaatgccccagtcgtcatt

SEQ ID NO: 93926 - DNA, 25 bp, Probe sequence
acatcttcgagtatgacttttcatg

SEQ ID NO: 93927 - DNA, 25 bp, Probe sequence
aaaagtgcttcaaatttatcaccac

SEQ ID NO: 93928 - DNA, 25 bp, Probe sequence
aaccaactgctacaaatctatcagc

SEQ ID NO: 93929 - DNA, 25 bp, Probe sequence
aatcaacatcttcgagtatgacttt

SEQ ID NO: 93930 - DNA, 25 bp, Probe sequence
gctcataatcaacatcttcgagtat

SEQ ID NO: 93931 - DNA, 25 bp, Probe sequence
gaatgatgctacaaaagtgcttcaa

SEQ ID NO: 93932 - DNA, 25 bp, Probe sequence
gacttttcatgcacatcatgtaata

SEQ ID NO: 93933 - DNA, 25 bp, Probe sequence
gagtatgacttttcatgcacatcat

SEQ ID NO: 93934 - DNA, 25 bp, Probe sequence
gttttatcaaaccaactgctacaaa

SEQ ID NO: 93935 - DNA, 25 bp, Probe sequence
gtgcttcaaatttatcaccactaat

SEQ ID NO: 93936 - DNA, 25 bp, Probe sequence
tgtaatattgaacatggttttatca

SEQ ID NO: 93937 - DNA, 25 bp, Probe sequence
tctagctcataatcaacatcttcga

SEQ ID NO: 93938 - DNA, 25 bp, Probe sequence
tcaccactaattctagctcataatc

SEQ ID NO: 93939 - DNA, 25 bp, Probe sequence
tcaaaccaactgctacaaatctatc

SEQ ID NO: 93940 - DNA, 25 bp, Probe sequence
ttatcaccactaattctagctcata

SEQ ID NO: 93941 - DNA, 25 bp, Probe sequence
attgcttgtgatgataaactttctc

SEQ ID NO: 93942 - DNA, 25 bp, Probe sequence
agcgttgtcattatcattaagcgaa

SEQ ID NO: 93943 - DNA, 25 bp, Probe sequence
aagtgatatcgtttctagcgttgtc

SEQ ID NO: 93944 - DNA, 25 bp, Probe sequence
cacactgtacgatcaccaaactgca

SEQ ID NO: 93945 - DNA, 25 bp, Probe sequence
cgcttccacgtacattcaaaaaaat

SEQ ID NO: 93946 - DNA, 25 bp, Probe sequence
gaaaacgcttccacgtacattcaaa

SEQ ID NO: 93947 - DNA, 25 bp, Probe sequence
gacaaatacacactgtacgatcacc

SEQ ID NO: 93948 - DNA, 25 bp, Probe sequence
gagctatttatattaaacgtacgct

SEQ ID NO: 93949 - DNA, 25 bp, Probe sequence
gatcaccaaactgcatgtcgaacaa

SEQ ID NO: 93950 - DNA, 25 bp, Probe sequence
tgagaatgattctcacgcccagtaa

SEQ ID NO: 93951 - DNA, 25 bp, Probe sequence
tcccccctgtgaacgaatatttaat

SEQ ID NO: 93952 - DNA, 25 bp, Probe sequence
tcgtttctagcgttgtcattatcat

SEQ ID NO: 93953 - DNA, 25 bp, Probe sequence
taaccatattgtaacattatttcat

SEQ ID NO: 93954 - DNA, 25 bp, Probe sequence
tacgcttaaccccctaaagtgatat

SEQ ID NO: 93955 - DNA, 25 bp, Probe sequence
ttctcatttagaaaacgcttccacg

SEQ ID NO: 93956 - DNA, 25 bp, Probe sequence
atctatatttgttaaatgcgatgta

SEQ ID NO: 93957 - DNA, 25 bp, Probe sequence
actcccctaaattttcaatctatat

SEQ ID NO: 93958 - DNA, 25 bp, Probe sequence
aattttcaatctatatttgttaaat

SEQ ID NO: 93959 - DNA, 25 bp, Probe sequence
caatctatatttgttaaatgcgatg

SEQ ID NO: 93960 - DNA, 25 bp, Probe sequence
cactcccctaaattttcaatctata

SEQ ID NO: 93961 - DNA, 25 bp, Probe sequence
ctaaattttcaatctatatttgtta

SEQ ID NO: 93962 - DNA, 25 bp, Probe sequence
ctcccctaaattttcaatctatatt

SEQ ID NO: 93963 - DNA, 25 bp, Probe sequence
cccctaaattttcaatctatatttg

SEQ ID NO: 93964 - DNA, 25 bp, Probe sequence
ccctaaattttcaatctatatttgt

SEQ ID NO: 93965 - DNA, 25 bp, Probe sequence
tcccctaaattttcaatctatattt

SEQ ID NO: 93966 - DNA, 25 bp, Probe sequence
tcactcccctaaattttcaatctat

SEQ ID NO: 93967 - DNA, 25 bp, Probe sequence
tttcactcccctaaattttcaatct

SEQ ID NO: 93968 - DNA, 25 bp, Probe sequence
ttttcaatctatatttgttaaatgc

SEQ ID NO: 93969 - DNA, 25 bp, Probe sequence
ttcactcccctaaattttcaatcta

SEQ ID NO: 93970 - DNA, 25 bp, Probe sequence
ttcaatctatatttgttaaatgcga

SEQ ID NO: 93971 - DNA, 25 bp, Probe sequence
atttattttaaatcagcccactatc

SEQ ID NO: 93972 - DNA, 25 bp, Probe sequence
atcagcccactatcatattgtcatg

SEQ ID NO: 93973 - DNA, 25 bp, Probe sequence
agcccactatcatattgtcatgtaa

SEQ ID NO: 93974 - DNA, 25 bp, Probe sequence
aaatcagcccactatcatattgtca

SEQ ID NO: 93975 - DNA, 25 bp, Probe sequence
aaatcccttccaagttattgtgtat

SEQ ID NO: 93976 - DNA, 25 bp, Probe sequence
catattgtcatgtaatctgcttatt

SEQ ID NO: 93977 - DNA, 25 bp, Probe sequence
ctgtgtttaccatttttgtcattat

SEQ ID NO: 93978 - DNA, 25 bp, Probe sequence
gttattgtgtatctccattcaattt

SEQ ID NO: 93979 - DNA, 25 bp, Probe sequence
gtttaccatttttgtcattataata

SEQ ID NO: 93980 - DNA, 25 bp, Probe sequence
gtgtatctccattcaatttaatttt

SEQ ID NO: 93981 - DNA, 25 bp, Probe sequence
ggattttagtattatgcactgtgtt

SEQ ID NO: 93982 - DNA, 25 bp, Probe sequence
tgcactgtgtttaccatttttgtca

SEQ ID NO: 93983 - DNA, 25 bp, Probe sequence
tccaagttattgtgtatctccattc

SEQ ID NO: 93984 - DNA, 25 bp, Probe sequence
taatctgcttattaaaaaaatccct

SEQ ID NO: 93985 - DNA, 25 bp, Probe sequence
tatcataactaagcattggatttta

SEQ ID NO: 93986 - DNA, 25 bp, Probe sequence
acgacctcctagttaaatcagtcta

SEQ ID NO: 93987 - DNA, 25 bp, Probe sequence
acaaacattcatgacacgacctcct

SEQ ID NO: 93988 - DNA, 25 bp, Probe sequence
acaattcttttcataacataaatgt

SEQ ID NO: 93989 - DNA, 25 bp, Probe sequence
aaattacaattcttttcataacata

SEQ ID NO: 93990 - DNA, 25 bp, Probe sequence
aacataaatgtgttattcattccaa

SEQ ID NO: 93991 - DNA, 25 bp, Probe sequence
cacattctccaaaattacaattctt

SEQ ID NO: 93992 - DNA, 25 bp, Probe sequence
catgacacgacctcctagttaaatc

SEQ ID NO: 93993 - DNA, 25 bp, Probe sequence
ctcctagttaaatcagtctataaac

SEQ ID NO: 93994 - DNA, 25 bp, Probe sequence
gacacgacctcctagttaaatcagt

SEQ ID NO: 93995 - DNA, 25 bp, Probe sequence
gaaatacttttaaacaaacattcat

SEQ ID NO: 93996 - DNA, 25 bp, Probe sequence
gacctcctagttaaatcagtctata

SEQ ID NO: 93997 - DNA, 25 bp, Probe sequence
tgtgttattcattccaattatctta

SEQ ID NO: 93998 - DNA, 25 bp, Probe sequence
taaaaaaagccatagctacttctat

SEQ ID NO: 93999 - DNA, 25 bp, Probe sequence
ttcatgacacgacctcctagttaaa

SEQ ID NO: 94000 - DNA, 25 bp, Probe sequence
ttctccaaaattacaattcttttca

SEQ ID NO: 94001 - DNA, 25 bp, Probe sequence
attttgctactccatattttaacca

SEQ ID NO: 94002 - DNA, 25 bp, Probe sequence
ataatttatgactttagaaatcctt

SEQ ID NO: 94003 - DNA, 25 bp, Probe sequence
actccatattttaaccatcaaatta

SEQ ID NO: 94004 - DNA, 25 bp, Probe sequence
acacctatcctcaaatatttatttt

SEQ ID NO: 94005 - DNA, 25 bp, Probe sequence
caagaattttgctactccatatttt

SEQ ID NO: 94006 - DNA, 25 bp, Probe sequence
gctactccatattttaaccatcaaa

SEQ ID NO: 94007 - DNA, 25 bp, Probe sequence
gaatttcaagaattttgctactcca

SEQ ID NO: 94008 - DNA, 25 bp, Probe sequence
gacagatacaaaaaactacattaac

SEQ ID NO: 94009 - DNA, 25 bp, Probe sequence
gtcactacatttctgaatttcaaga

SEQ ID NO: 94010 - DNA, 25 bp, Probe sequence
gtgtcactacatttctgaatttcaa

SEQ ID NO: 94011 - DNA, 25 bp, Probe sequence
taacacctatcctcaaatatttatt

SEQ ID NO: 94012 - DNA, 25 bp, Probe sequence
taaacattaatatttgtgtcactac

SEQ ID NO: 94013 - DNA, 25 bp, Probe sequence
tatttgtgtcactacatttctgaat

SEQ ID NO: 94014 - DNA, 25 bp, Probe sequence
ttaataacacctatcctcaaatatt

SEQ ID NO: 94015 - DNA, 25 bp, Probe sequence
ttgctactccatattttaaccatca

SEQ ID NO: 94016 - DNA, 25 bp, Probe sequence
ataagctcaccattcaaataaacac

SEQ ID NO: 94017 - DNA, 25 bp, Probe sequence
ataattatacctttggatatagcaa

SEQ ID NO: 94018 - DNA, 25 bp, Probe sequence
atcccaataagctcaccattcaaat

SEQ ID NO: 94019 - DNA, 25 bp, Probe sequence
agctcaccattcaaataaacacaat

SEQ ID NO: 94020 - DNA, 25 bp, Probe sequence
actattgcattcacttttaagtaat

SEQ ID NO: 94021 - DNA, 25 bp, Probe sequence
acataaacaactattgcattcactt

SEQ ID NO: 94022 - DNA, 25 bp, Probe sequence
aacaactattgcattcacttttaag

SEQ ID NO: 94023 - DNA, 25 bp, Probe sequence
cactctatagcatggcttctatcaa

SEQ ID NO: 94024 - DNA, 25 bp, Probe sequence
gccacactctatagcatggcttcta

SEQ ID NO: 94025 - DNA, 25 bp, Probe sequence
cctcgcttgttcaaaacataaacaa

SEQ ID NO: 94026 - DNA, 25 bp, Probe sequence
gcaaaaagccacactctatagcatg

SEQ ID NO: 94027 - DNA, 25 bp, Probe sequence
gatttatcccaataagctcaccatt

SEQ ID NO: 94028 - DNA, 25 bp, Probe sequence
gtaattatttatatgatttatccca

SEQ ID NO: 94029 - DNA, 25 bp, Probe sequence
ggatatagcaaaaagccacactcta

SEQ ID NO: 94030 - DNA, 25 bp, Probe sequence
ttatcccaataagctcaccattcaa

SEQ ID NO: 94031 - DNA, 25 bp, Probe sequence
ataccatcaaattcatcattattct

SEQ ID NO: 94032 - DNA, 25 bp, Probe sequence
atacatattaattacttctctacta

SEQ ID NO: 94033 - DNA, 25 bp, Probe sequence
agtgttgaattatgtttacttcgaa

SEQ ID NO: 94034 - DNA, 25 bp, Probe sequence
agaatatatctcttatttctttata

SEQ ID NO: 94035 - DNA, 25 bp, Probe sequence
aaaatagcagtgtactcgcattagt

SEQ ID NO: 94036 - DNA, 25 bp, Probe sequence
gccaataatactcaatgcctactct

SEQ ID NO: 94037 - DNA, 25 bp, Probe sequence
gcacgtgattttacactattttatc

SEQ ID NO: 94038 - DNA, 25 bp, Probe sequence
gttgagtgacgtttactactattat

SEQ ID NO: 94039 - DNA, 25 bp, Probe sequence
gtctacccaacattgcaaacaaaat

SEQ ID NO: 94040 - DNA, 25 bp, Probe sequence
ggtaaatgcatgaaaccgtttgtaa

SEQ ID NO: 94041 - DNA, 25 bp, Probe sequence
ggagtgtttgtctacccaacattgc

SEQ ID NO: 94042 - DNA, 25 bp, Probe sequence
tcattattctttttcgattgcatta

SEQ ID NO: 94043 - DNA, 25 bp, Probe sequence
tactctatagtaatcttggcacgtg

SEQ ID NO: 94044 - DNA, 25 bp, Probe sequence
tacttctctactatgaatcatttct

SEQ ID NO: 94045 - DNA, 25 bp, Probe sequence
ttatatctttattattgaccacgaa

SEQ ID NO: 94046 - DNA, 25 bp, Probe sequence
atcttacatttattaagttatccta

SEQ ID NO: 94047 - DNA, 25 bp, Probe sequence
agttatcctatttatacaacttttg

SEQ ID NO: 94048 - DNA, 25 bp, Probe sequence
acatttattaagttatcctatttat

SEQ ID NO: 94049 - DNA, 25 bp, Probe sequence
caaaatatagttatctatcttgtga

SEQ ID NO: 94050 - DNA, 25 bp, Probe sequence
gacaaaatatagttatctatcttgt

SEQ ID NO: 94051 - DNA, 25 bp, Probe sequence
gttatcctatttatacaacttttga

SEQ ID NO: 94052 - DNA, 25 bp, Probe sequence
tccaaattattatcttacatttatt

SEQ ID NO: 94053 - DNA, 25 bp, Probe sequence
tcctatttatacaacttttgaaatt

SEQ ID NO: 94054 - DNA, 25 bp, Probe sequence
tatcctatttatacaacttttgaaa

SEQ ID NO: 94055 - DNA, 25 bp, Probe sequence
tatacaacttttgaaattaactaat

SEQ ID NO: 94056 - DNA, 25 bp, Probe sequence
tattaattaactataaacactttat

SEQ ID NO: 94057 - DNA, 25 bp, Probe sequence
tattaagttatcctatttatacaac

SEQ ID NO: 94058 - DNA, 25 bp, Probe sequence
tttattaagttatcctatttataca

SEQ ID NO: 94059 - DNA, 25 bp, Probe sequence
ttatcctatttatacaacttttgaa

SEQ ID NO: 94060 - DNA, 25 bp, Probe sequence
ttacatttattaagttatcctattt

SEQ ID NO: 94061 - DNA, 25 bp, Probe sequence
atagtcaattttaggaaagttacat

SEQ ID NO: 94062 - DNA, 25 bp, Probe sequence
atagcatagtcgttttattaataaa

SEQ ID NO: 94063 - DNA, 25 bp, Probe sequence
acctggcattaaatagcatagtcgt

SEQ ID NO: 94064 - DNA, 25 bp, Probe sequence
acattaacctggcattaaatagcat

SEQ ID NO: 94065 - DNA, 25 bp, Probe sequence
aacgattatatagtcaattttagga

SEQ ID NO: 94066 - DNA, 25 bp, Probe sequence
aagttacattaacctggcattaaat

SEQ ID NO: 94067 - DNA, 25 bp, Probe sequence
ctctccttaaaattgatacttaacg

SEQ ID NO: 94068 - DNA, 25 bp, Probe sequence
gaaagttacattaacctggcattaa

SEQ ID NO: 94069 - DNA, 25 bp, Probe sequence
gatacttaacgattatatagtcaat

SEQ ID NO: 94070 - DNA, 25 bp, Probe sequence
gttacattaacctggcattaaatag

SEQ ID NO: 94071 - DNA, 25 bp, Probe sequence
ggaaagttacattaacctggcatta

SEQ ID NO: 94072 - DNA, 25 bp, Probe sequence
tggcattaaatagcatagtcgtttt

SEQ ID NO: 94073 - DNA, 25 bp, Probe sequence
tgtaaactctccttaaaattgatac

SEQ ID NO: 94074 - DNA, 25 bp, Probe sequence
taacctggcattaaatagcatagtc

SEQ ID NO: 94075 - DNA, 25 bp, Probe sequence
taaactctccttaaaattgatactt

SEQ ID NO: 94076 - DNA, 25 bp, Probe sequence
attgtatttatatttgtctccccta

SEQ ID NO: 94077 - DNA, 25 bp, Probe sequence
aagaccattttttgtctcaacctgt

SEQ ID NO: 94078 - DNA, 25 bp, Probe sequence
caggttaagaccattttttgtctca

SEQ ID NO: 94079 - DNA, 25 bp, Probe sequence
cattttttgtctcaacctgttttat

SEQ ID NO: 94080 - DNA, 25 bp, Probe sequence
ctcccctacttttaaatgtcattca

SEQ ID NO: 94081 - DNA, 25 bp, Probe sequence
cccctacttttaaatgtcattcatt

SEQ ID NO: 94082 - DNA, 25 bp, Probe sequence
gaccattttttgtctcaacctgttt

SEQ ID NO: 94083 - DNA, 25 bp, Probe sequence
gagagtaatcctaggaactattgta

SEQ ID NO: 94084 - DNA, 25 bp, Probe sequence
gatatagaatttatcacatatgcaa

SEQ ID NO: 94085 - DNA, 25 bp, Probe sequence
gtaatcctaggaactattgtattta

SEQ ID NO: 94086 - DNA, 25 bp, Probe sequence
gtctcccctacttttaaatgtcatt

SEQ ID NO: 94087 - DNA, 25 bp, Probe sequence
tgtatttatatttgtctcccctact

SEQ ID NO: 94088 - DNA, 25 bp, Probe sequence
tcattatacataagcattttgatat

SEQ ID NO: 94089 - DNA, 25 bp, Probe sequence
tagttattttgagagtaatcctagg

SEQ ID NO: 94090 - DNA, 25 bp, Probe sequence
ttgtctcccctacttttaaatgtca

SEQ ID NO: 94091 - DNA, 25 bp, Probe sequence
agctaatgtctacttaaaaaatgaa

SEQ ID NO: 94092 - DNA, 25 bp, Probe sequence
actcatgcataagaaatactaattt

SEQ ID NO: 94093 - DNA, 25 bp, Probe sequence
aaactcatgcataagaaatactaat

SEQ ID NO: 94094 - DNA, 25 bp, Probe sequence
aaaactcatgcataagaaatactaa

SEQ ID NO: 94095 - DNA, 25 bp, Probe sequence
aaaatgaatacatgagtaaaactca

SEQ ID NO: 94096 - DNA, 25 bp, Probe sequence
aactcatgcataagaaatactaatt

SEQ ID NO: 94097 - DNA, 25 bp, Probe sequence
ctgtagctaatgtctacttaaaaaa

SEQ ID NO: 94098 - DNA, 25 bp, Probe sequence
gctgtagctaatgtctacttaaaaa

SEQ ID NO: 94099 - DNA, 25 bp, Probe sequence
gctaatgtctacttaaaaaatgaat

SEQ ID NO: 94100 - DNA, 25 bp, Probe sequence
gagtaaaactcatgcataagaaata

SEQ ID NO: 94101 - DNA, 25 bp, Probe sequence
gtaaaactcatgcataagaaatact

SEQ ID NO: 94102 - DNA, 25 bp, Probe sequence
gtctacttaaaaaatgaatacatga

SEQ ID NO: 94103 - DNA, 25 bp, Probe sequence
taatgtctacttaaaaaatgaatac

SEQ ID NO: 94104 - DNA, 25 bp, Probe sequence
taaaactcatgcataagaaatacta

SEQ ID NO: 94105 - DNA, 25 bp, Probe sequence
tagctaatgtctacttaaaaaatga

SEQ ID NO: 94106 - DNA, 25 bp, Probe sequence
attcatttatgtattctagtgcttc

SEQ ID NO: 94107 - DNA, 25 bp, Probe sequence
attatagtcccattattaacaacaa

SEQ ID NO: 94108 - DNA, 25 bp, Probe sequence
aacatccttactttagctttatatc

SEQ ID NO: 94109 - DNA, 25 bp, Probe sequence
aacatatttaacgttatactttcat

SEQ ID NO: 94110 - DNA, 25 bp, Probe sequence
gccttaattattctatactgtgcac

SEQ ID NO: 94111 - DNA, 25 bp, Probe sequence
gctttatatctttatttcaagtcat

SEQ ID NO: 94112 - DNA, 25 bp, Probe sequence
gaaacaattgaacatccttacttta

SEQ ID NO: 94113 - DNA, 25 bp, Probe sequence
gagcatactatatatagccttttac

SEQ ID NO: 94114 - DNA, 25 bp, Probe sequence
gatgcggattttgtatggacttctt

SEQ ID NO: 94115 - DNA, 25 bp, Probe sequence
gatagcttacagttaacgatattta

SEQ ID NO: 94116 - DNA, 25 bp, Probe sequence
gattcttcttacgtcgattatccta

SEQ ID NO: 94117 - DNA, 25 bp, Probe sequence
tggacttcttcatcattaatatata

SEQ ID NO: 94118 - DNA, 25 bp, Probe sequence
tcaagtcatgttttcaactatttta

SEQ ID NO: 94119 - DNA, 25 bp, Probe sequence
tactgtgcaccattactattcattt

SEQ ID NO: 94120 - DNA, 25 bp, Probe sequence
tagcatgcatgattaatttcggatt

SEQ ID NO: 94121 - DNA, 25 bp, Probe sequence
attatgtgttaatatatttgcagaa

SEQ ID NO: 94122 - DNA, 25 bp, Probe sequence
atcaatttaaatgttcaaggaggtt

SEQ ID NO: 94123 - DNA, 25 bp, Probe sequence
agatgaagaacctaatttttatact

SEQ ID NO: 94124 - DNA, 25 bp, Probe sequence
acttgatttgctttcctgacttaaa

SEQ ID NO: 94125 - DNA, 25 bp, Probe sequence
aactatgtacttgatttgctttcct

SEQ ID NO: 94126 - DNA, 25 bp, Probe sequence
aagaaatttgaattccatgttgtca

SEQ ID NO: 94127 - DNA, 25 bp, Probe sequence
gaattccatgttgtcaaacccttta

SEQ ID NO: 94128 - DNA, 25 bp, Probe sequence
caaaactttttgaacacattatgtg

SEQ ID NO: 94129 - DNA, 25 bp, Probe sequence
ccatgttgtcaaaccctttatataa

SEQ ID NO: 94130 - DNA, 25 bp, Probe sequence
gctttcctgacttaaaaattagact

SEQ ID NO: 94131 - DNA, 25 bp, Probe sequence
gactaaacatgacactatatgaggt

SEQ ID NO: 94132 - DNA, 25 bp, Probe sequence
gatttgctttcctgacttaaaaatt

SEQ ID NO: 94133 - DNA, 25 bp, Probe sequence
tgtacttgatttgctttcctgactt

SEQ ID NO: 94134 - DNA, 25 bp, Probe sequence
tcatctagatattgtacgaagttgt

SEQ ID NO: 94135 - DNA, 25 bp, Probe sequence
taatgttcatctagatattgtacga

SEQ ID NO: 94136 - DNA, 25 bp, Probe sequence
ataactttagccgataacttcagaa

SEQ ID NO: 94137 - DNA, 25 bp, Probe sequence
actttagccgataacttcagaaatg

SEQ ID NO: 94138 - DNA, 25 bp, Probe sequence
acttcagaaatgatgtttttcggct

SEQ ID NO: 94139 - DNA, 25 bp, Probe sequence
aactttagccgataacttcagaaat

SEQ ID NO: 94140 - DNA, 25 bp, Probe sequence
ctttagccgataacttcagaaatga

SEQ ID NO: 94141 - DNA, 25 bp, Probe sequence
gccgataacttcagaaatgatgttt

SEQ ID NO: 94142 - DNA, 25 bp, Probe sequence
tgtaaattatttgttcatgtacaaa

SEQ ID NO: 94143 - DNA, 25 bp, Probe sequence
tttataactttagccgataacttca

SEQ ID NO: 94144 - DNA, 25 bp, Probe sequence
taatttataactttagccgataact

SEQ ID NO: 94145 - DNA, 25 bp, Probe sequence
taactttagccgataacttcagaaa

SEQ ID NO: 94146 - DNA, 25 bp, Probe sequence
tagccgataacttcagaaatgatgt

SEQ ID NO: 94147 - DNA, 25 bp, Probe sequence
tataactttagccgataacttcaga

SEQ ID NO: 94148 - DNA, 25 bp, Probe sequence
tttagccgataacttcagaaatgat

SEQ ID NO: 94149 - DNA, 25 bp, Probe sequence
ttataactttagccgataacttcag

SEQ ID NO: 94150 - DNA, 25 bp, Probe sequence
ttcagaaatgatgtttttcggctaa

SEQ ID NO: 94151 - DNA, 25 bp, Probe sequence
ataatgcctctaactaaaaatctac

SEQ ID NO: 94152 - DNA, 25 bp, Probe sequence
atgtctcaactgcaatattctaaat

SEQ ID NO: 94153 - DNA, 25 bp, Probe sequence
aaattttcttataatgcctctaact

SEQ ID NO: 94154 - DNA, 25 bp, Probe sequence
aaccctcgaaattgaaatgcttcct

SEQ ID NO: 94155 - DNA, 25 bp, Probe sequence
aataatcactcatcatcactcagta

SEQ ID NO: 94156 - DNA, 25 bp, Probe sequence
aatacatacgatactttttcattat

SEQ ID NO: 94157 - DNA, 25 bp, Probe sequence
cactcagtaatttatcagttgctac

SEQ ID NO: 94158 - DNA, 25 bp, Probe sequence
gctaacctatactcaaaattttctt

SEQ ID NO: 94159 - DNA, 25 bp, Probe sequence
tattcccgacgaaattccaaacata

SEQ ID NO: 94160 - DNA, 25 bp, Probe sequence
tgacatattgattattgtttcctca

SEQ ID NO: 94161 - DNA, 25 bp, Probe sequence
taataccctttttctctatttctat

SEQ ID NO: 94162 - DNA, 25 bp, Probe sequence
taatggcaaaaattattcccgacga

SEQ ID NO: 94163 - DNA, 25 bp, Probe sequence
tattcaactttgactaaccctcgaa

SEQ ID NO: 94164 - DNA, 25 bp, Probe sequence
tttaatcccctatcatatatttatt

SEQ ID NO: 94165 - DNA, 25 bp, Probe sequence
ttagctatgtcttttccttgtttca

SEQ ID NO: 94166 - DNA, 25 bp, Probe sequence
atacttcatgcactttaattccaaa

SEQ ID NO: 94167 - DNA, 25 bp, Probe sequence
atgcactttaattccaaatcagatt

SEQ ID NO: 94168 - DNA, 25 bp, Probe sequence
aggtgacttatacttcatgcacttt

SEQ ID NO: 94169 - DNA, 25 bp, Probe sequence
acttcatgcactttaattccaaatc

SEQ ID NO: 94170 - DNA, 25 bp, Probe sequence
aataggtgaaattttctatatattt

SEQ ID NO: 94171 - DNA, 25 bp, Probe sequence
cttatacttcatgcactttaattcc

SEQ ID NO: 94172 - DNA, 25 bp, Probe sequence
cttcatgcactttaattccaaatca

SEQ ID NO: 94173 - DNA, 25 bp, Probe sequence
gcactttaattccaaatcagattat

SEQ ID NO: 94174 - DNA, 25 bp, Probe sequence
gaaggtgacttatacttcatgcact

SEQ ID NO: 94175 - DNA, 25 bp, Probe sequence
gacttatacttcatgcactttaatt

SEQ ID NO: 94176 - DNA, 25 bp, Probe sequence
gtgacttatacttcatgcactttaa

SEQ ID NO: 94177 - DNA, 25 bp, Probe sequence
gtgtatgatgtatataataggtgaa

SEQ ID NO: 94178 - DNA, 25 bp, Probe sequence
ggtgacttatacttcatgcacttta

SEQ ID NO: 94179 - DNA, 25 bp, Probe sequence
tcatgcactttaattccaaatcaga

SEQ ID NO: 94180 - DNA, 25 bp, Probe sequence
tatacttcatgcactttaattccaa

SEQ ID NO: 94181 - DNA, 25 bp, Probe sequence
attaaacattccaacaatactcaaa

SEQ ID NO: 94182 - DNA, 25 bp, Probe sequence
ataattaaacattccaacaatactc

SEQ ID NO: 94183 - DNA, 25 bp, Probe sequence
aacaatactcaaaggagaaattcga

SEQ ID NO: 94184 - DNA, 25 bp, Probe sequence
aacattccaacaatactcaaaggag

SEQ ID NO: 94185 - DNA, 25 bp, Probe sequence
aattaaacattccaacaatactcaa

SEQ ID NO: 94186 - DNA, 25 bp, Probe sequence
cattccaacaatactcaaaggagaa

SEQ ID NO: 94187 - DNA, 25 bp, Probe sequence
ctattaccttttgtaaatgcggata

SEQ ID NO: 94188 - DNA, 25 bp, Probe sequence
cctattaccttttgtaaatgcggat

SEQ ID NO: 94189 - DNA, 25 bp, Probe sequence
ccttttgtaaatgcggataatttca

SEQ ID NO: 94190 - DNA, 25 bp, Probe sequence
gataatttcaattatctaattaacc

SEQ ID NO: 94191 - DNA, 25 bp, Probe sequence
tgtaaatgcggataatttcaattat

SEQ ID NO: 94192 - DNA, 25 bp, Probe sequence
taattaaacattccaacaatactca

SEQ ID NO: 94193 - DNA, 25 bp, Probe sequence
taaacattccaacaatactcaaagg

SEQ ID NO: 94194 - DNA, 25 bp, Probe sequence
ttaccttttgtaaatgcggataatt

SEQ ID NO: 94195 - DNA, 25 bp, Probe sequence
ttaaacattccaacaatactcaaag

SEQ ID NO: 94196 - DNA, 25 bp, Probe sequence
agagaataattgtaacgtgtcgttt

SEQ ID NO: 94197 - DNA, 25 bp, Probe sequence
ctcccgcctactttattaagtactg

SEQ ID NO: 94198 - DNA, 25 bp, Probe sequence
gcgcatacaaaataaacacaaccta

SEQ ID NO: 94199 - DNA, 25 bp, Probe sequence
gtaatagcttatatactttgggtaa

SEQ ID NO: 94200 - DNA, 25 bp, Probe sequence
taagtactgtttctgtccaaaactt

SEQ ID NO: 94201 - DNA, 25 bp, Probe sequence
taagttttgcttaaataacactact

SEQ ID NO: 94202 - DNA, 25 bp, Probe sequence
taaagtataactatttttcaagtag

SEQ ID NO: 94203 - DNA, 25 bp, Probe sequence
taaataacactactaactgtttaag

SEQ ID NO: 94204 - DNA, 25 bp, Probe sequence
tacacctaaattgtaagcgcataca

SEQ ID NO: 94205 - DNA, 25 bp, Probe sequence
tagcttttatttaattccgaatcgg

SEQ ID NO: 94206 - DNA, 25 bp, Probe sequence
tatttaacatagttttagcttttat

SEQ ID NO: 94207 - DNA, 25 bp, Probe sequence
ttattaagtactgtttctgtccaaa

SEQ ID NO: 94208 - DNA, 25 bp, Probe sequence
ttttaatatataactcccgcctact

SEQ ID NO: 94209 - DNA, 25 bp, Probe sequence
ttatatactttgggtaattcacgca

SEQ ID NO: 94210 - DNA, 25 bp, Probe sequence
ttccgaatcggtgtaatagcttata

SEQ ID NO: 94211 - DNA, 25 bp, Probe sequence
attaagaaagtgcaccccgcatcaa

SEQ ID NO: 94212 - DNA, 25 bp, Probe sequence
atagaggcattattttcagggggtg

SEQ ID NO: 94213 - DNA, 25 bp, Probe sequence
agaaagtgcaccccgcatcaaaata

SEQ ID NO: 94214 - DNA, 25 bp, Probe sequence
agcatttctaccttaaagattttat

SEQ ID NO: 94215 - DNA, 25 bp, Probe sequence
aaatcatgcatttgacatatagtaa

SEQ ID NO: 94216 - DNA, 25 bp, Probe sequence
catttaacctagcatttctacctta

SEQ ID NO: 94217 - DNA, 25 bp, Probe sequence
gcattattttcagggggtgcacata

SEQ ID NO: 94218 - DNA, 25 bp, Probe sequence
gcaccccgcatcaaaatagaggcat

SEQ ID NO: 94219 - DNA, 25 bp, Probe sequence
gtttcatctccttcgacatttaacc

SEQ ID NO: 94220 - DNA, 25 bp, Probe sequence
gtgcaccccgcatcaaaatagaggc

SEQ ID NO: 94221 - DNA, 25 bp, Probe sequence
tcgacatttaacctagcatttctac

SEQ ID NO: 94222 - DNA, 25 bp, Probe sequence
tctccttcgacatttaacctagcat

SEQ ID NO: 94223 - DNA, 25 bp, Probe sequence
tcatctccttcgacatttaacctag

SEQ ID NO: 94224 - DNA, 25 bp, Probe sequence
taacctagcatttctaccttaaaga

SEQ ID NO: 94225 - DNA, 25 bp, Probe sequence
ttttcagggggtgcacataaataat

SEQ ID NO: 94226 - DNA, 25 bp, Probe sequence
ataccatagatctaacattacatta

SEQ ID NO: 94227 - DNA, 25 bp, Probe sequence
aaacctacgagatgcataaaaccca

SEQ ID NO: 94228 - DNA, 25 bp, Probe sequence
agccatcctttatatatgctatttt

SEQ ID NO: 94229 - DNA, 25 bp, Probe sequence
acttactagtgttatcattaccgtc

SEQ ID NO: 94230 - DNA, 25 bp, Probe sequence
acagcaaatacatatttaccacgat

SEQ ID NO: 94231 - DNA, 25 bp, Probe sequence
acaaccatatgtgtcatgtgttaca

SEQ ID NO: 94232 - DNA, 25 bp, Probe sequence
aataataatgcacctcgcttagttt

SEQ ID NO: 94233 - DNA, 25 bp, Probe sequence
cattaccgtcattattttcttaatc

SEQ ID NO: 94234 - DNA, 25 bp, Probe sequence
gcattgtatcaattacttactagtg

SEQ ID NO: 94235 - DNA, 25 bp, Probe sequence
gcacctcgcttagtttagtatttct

SEQ ID NO: 94236 - DNA, 25 bp, Probe sequence
gatgcataaaacccaattagtattt

SEQ ID NO: 94237 - DNA, 25 bp, Probe sequence
gttatcattaccgtcattattttct

SEQ ID NO: 94238 - DNA, 25 bp, Probe sequence
gtatttctacaaacctacgagatgc

SEQ ID NO: 94239 - DNA, 25 bp, Probe sequence
gtgtcatgtgttacaaaaactgttt

SEQ ID NO: 94240 - DNA, 25 bp, Probe sequence
tatgctattttcacaaccatatgtg

SEQ ID NO: 94241 - DNA, 25 bp, Probe sequence
attaccaagaattaacacgcatatt

SEQ ID NO: 94242 - DNA, 25 bp, Probe sequence
ataagcagcaaacgccaaggctaat

SEQ ID NO: 94243 - DNA, 25 bp, Probe sequence
atcttgcctctttttagtgtatatc

SEQ ID NO: 94244 - DNA, 25 bp, Probe sequence
atgcctctttgatttaatatgatct

SEQ ID NO: 94245 - DNA, 25 bp, Probe sequence
aaacgccaaggctaatataccaata

SEQ ID NO: 94246 - DNA, 25 bp, Probe sequence
aattttatcacctctaaatatcgat

SEQ ID NO: 94247 - DNA, 25 bp, Probe sequence
cataaacacgtttcactctaacctt

SEQ ID NO: 94248 - DNA, 25 bp, Probe sequence
cttatcaatgataccttctgactaa

SEQ ID NO: 94249 - DNA, 25 bp, Probe sequence
ctagaacgtctagttcataaacacg

SEQ ID NO: 94250 - DNA, 25 bp, Probe sequence
gctgtagtaactatactagaacgtc

SEQ ID NO: 94251 - DNA, 25 bp, Probe sequence
gataccttctgactaaagctgtagt

SEQ ID NO: 94252 - DNA, 25 bp, Probe sequence
ggcaggtaatcttgcctctttttag

SEQ ID NO: 94253 - DNA, 25 bp, Probe sequence
tcactctaacctttatttaaataat

SEQ ID NO: 94254 - DNA, 25 bp, Probe sequence
tagttgacaaattttatcacctcta

SEQ ID NO: 94255 - DNA, 25 bp, Probe sequence
ttttagtgtatatcaatgcctcttt

SEQ ID NO: 94256 - DNA, 25 bp, Probe sequence
ataattacttttccacatattccaa

SEQ ID NO: 94257 - DNA, 25 bp, Probe sequence
acccccttgtaaatcttcaatcatc

SEQ ID NO: 94258 - DNA, 25 bp, Probe sequence
aacgtaatagtacacactcttctta

SEQ ID NO: 94259 - DNA, 25 bp, Probe sequence
aagcatacctcaaatatcattaatt

SEQ ID NO: 94260 - DNA, 25 bp, Probe sequence
aatccaatatacatactctaataac

SEQ ID NO: 94261 - DNA, 25 bp, Probe sequence
aatcttcaatcatcatttaaattaa

SEQ ID NO: 94262 - DNA, 25 bp, Probe sequence
aattggccatagctatcatgatata

SEQ ID NO: 94263 - DNA, 25 bp, Probe sequence
cactcttcttattaattggccatag

SEQ ID NO: 94264 - DNA, 25 bp, Probe sequence
catattccaatatttaggttgcaaa

SEQ ID NO: 94265 - DNA, 25 bp, Probe sequence
gtacacactcttcttattaattggc

SEQ ID NO: 94266 - DNA, 25 bp, Probe sequence
gtcaattatgtgtctatcaatccaa

SEQ ID NO: 94267 - DNA, 25 bp, Probe sequence
gtgtctatcaatccaatatacatac

SEQ ID NO: 94268 - DNA, 25 bp, Probe sequence
ggttgcaaagcatacctcaaatatc

SEQ ID NO: 94269 - DNA, 25 bp, Probe sequence
tgtacacccccttgtaaatcttcaa

SEQ ID NO: 94270 - DNA, 25 bp, Probe sequence
ttacttttccacatattccaatatt

SEQ ID NO: 94271 - DNA, 25 bp, Probe sequence
aacactcaccatttgcatgcgtaga

SEQ ID NO: 94272 - DNA, 25 bp, Probe sequence
aacaagcatgcttattcgtcataga

SEQ ID NO: 94273 - DNA, 25 bp, Probe sequence
caccaagatttttaacactcaccat

SEQ ID NO: 94274 - DNA, 25 bp, Probe sequence
ctacaccaacactacaccaagattt

SEQ ID NO: 94275 - DNA, 25 bp, Probe sequence
ccgcataagccccgaaaatacagta

SEQ ID NO: 94276 - DNA, 25 bp, Probe sequence
gacacacaattgacacgcgtctgac

SEQ ID NO: 94277 - DNA, 25 bp, Probe sequence
gacacgcgtctgacacttgtttata

SEQ ID NO: 94278 - DNA, 25 bp, Probe sequence
gagttccgtgattacggggctcttt

SEQ ID NO: 94279 - DNA, 25 bp, Probe sequence
gtccatcgagacgtggttttttaat

SEQ ID NO: 94280 - DNA, 25 bp, Probe sequence
gggctctttttgttttgaatttcag

SEQ ID NO: 94281 - DNA, 25 bp, Probe sequence
tgtgctcaaatttcatctatactgc

SEQ ID NO: 94282 - DNA, 25 bp, Probe sequence
tctatactgcacctgaactacacca

SEQ ID NO: 94283 - DNA, 25 bp, Probe sequence
taaaaaaataaccacgtccatcgag

SEQ ID NO: 94284 - DNA, 25 bp, Probe sequence
tatgatgcgtcaccaaaacgtcccc

SEQ ID NO: 94285 - DNA, 25 bp, Probe sequence
ttcaggggcccgaaatcctataatt

SEQ ID NO: 94286 - DNA, 25 bp, Probe sequence
aggcattcaaaactgtatttaacac

SEQ ID NO: 94287 - DNA, 25 bp, Probe sequence
agtttgtttatccgcacaacatctt

SEQ ID NO: 94288 - DNA, 25 bp, Probe sequence
acgtgcgtagcttttaaatcaccga

SEQ ID NO: 94289 - DNA, 25 bp, Probe sequence
acacaattaagttgcctgaattcgc

SEQ ID NO: 94290 - DNA, 25 bp, Probe sequence
aaatcaccgaaatgttattcgctta

SEQ ID NO: 94291 - DNA, 25 bp, Probe sequence
aaagaaatacagttaggcattcaaa

SEQ ID NO: 94292 - DNA, 25 bp, Probe sequence
caaggtattgctaatttaagttcat

SEQ ID NO: 94293 - DNA, 25 bp, Probe sequence
catcttataatgtacttaactgtat

SEQ ID NO: 94294 - DNA, 25 bp, Probe sequence
gcctgaattcgcatttaagtcttat

SEQ ID NO: 94295 - DNA, 25 bp, Probe sequence
taataattcttgtgttgttaaacgt

SEQ ID NO: 94296 - DNA, 25 bp, Probe sequence
gaagataacaaaaacgtgcgtagct

SEQ ID NO: 94297 - DNA, 25 bp, Probe sequence
gatgcaattagtttgtttatccgca

SEQ ID NO: 94298 - DNA, 25 bp, Probe sequence
gtttatccgcacaacatcttataat

SEQ ID NO: 94299 - DNA, 25 bp, Probe sequence
taagtcttattgaacctttttagat

SEQ ID NO: 94300 - DNA, 25 bp, Probe sequence
tattcgcttaacgttttgttgttgt

SEQ ID NO: 94301 - DNA, 25 bp, Probe sequence
atactgattacttacataacatatt

SEQ ID NO: 94302 - DNA, 25 bp, Probe sequence
ataatactgattacttacataacat

SEQ ID NO: 94303 - DNA, 25 bp, Probe sequence
actgattacttacataacatattga

SEQ ID NO: 94304 - DNA, 25 bp, Probe sequence
aatactgattacttacataacatat

SEQ ID NO: 94305 - DNA, 25 bp, Probe sequence
ctctccctcacctttgaaataatac

SEQ ID NO: 94306 - DNA, 25 bp, Probe sequence
ctccctcacctttgaaataatactg

SEQ ID NO: 94307 - DNA, 25 bp, Probe sequence
ccctcacctttgaaataatactgat

SEQ ID NO: 94308 - DNA, 25 bp, Probe sequence
cctcacctttgaaataatactgatt

SEQ ID NO: 94309 - DNA, 25 bp, Probe sequence
tgattacttacataacatattgaaa

SEQ ID NO: 94310 - DNA, 25 bp, Probe sequence
tccctcacctttgaaataatactga

SEQ ID NO: 94311 - DNA, 25 bp, Probe sequence
tctccctcacctttgaaataatact

SEQ ID NO: 94312 - DNA, 25 bp, Probe sequence
tctctccctcacctttgaaataata

SEQ ID NO: 94313 - DNA, 25 bp, Probe sequence
tcacctttgaaataatactgattac

SEQ ID NO: 94314 - DNA, 25 bp, Probe sequence
taatactgattacttacataacata

SEQ ID NO: 94315 - DNA, 25 bp, Probe sequence
tactgattacttacataacatattg

SEQ ID NO: 94316 - DNA, 25 bp, Probe sequence
attgtctatgtatctaaatcttaac

SEQ ID NO: 94317 - DNA, 25 bp, Probe sequence
ataaactgagtgcataacattaaag

SEQ ID NO: 94318 - DNA, 25 bp, Probe sequence
atgctcacccagtttattttaaaga

SEQ ID NO: 94319 - DNA, 25 bp, Probe sequence
aaatcttaacagaggctcaaatttc

SEQ ID NO: 94320 - DNA, 25 bp, Probe sequence
aaagtatgctcacccagtttatttt

SEQ ID NO: 94321 - DNA, 25 bp, Probe sequence
aacagaggctcaaatttctgcaaat

SEQ ID NO: 94322 - DNA, 25 bp, Probe sequence
aacattaaagtatgctcacccagtt

SEQ ID NO: 94323 - DNA, 25 bp, Probe sequence
aagtatgctcacccagtttatttta

SEQ ID NO: 94324 - DNA, 25 bp, Probe sequence
ccatctcctatattgtctatgtatc

SEQ ID NO: 94325 - DNA, 25 bp, Probe sequence
gctcacccagtttattttaaagaat

SEQ ID NO: 94326 - DNA, 25 bp, Probe sequence
gaggctcaaatttctgcaaataaaa

SEQ ID NO: 94327 - DNA, 25 bp, Probe sequence
gtatctaaatcttaacagaggctca

SEQ ID NO: 94328 - DNA, 25 bp, Probe sequence
gtatgctcacccagtttattttaaa

SEQ ID NO: 94329 - DNA, 25 bp, Probe sequence
tccccatctcctatattgtctatgt

SEQ ID NO: 94330 - DNA, 25 bp, Probe sequence
tctcctatattgtctatgtatctaa

SEQ ID NO: 94331 - DNA, 25 bp, Probe sequence
ataatattcgacactacgagcatga

SEQ ID NO: 94332 - DNA, 25 bp, Probe sequence
atgcatcttttcgtagtgtcgtttt

SEQ ID NO: 94333 - DNA, 25 bp, Probe sequence
acaattactttcttaagctaatata

SEQ ID NO: 94334 - DNA, 25 bp, Probe sequence
aaatgcatcttttcgtagtgtcgtt

SEQ ID NO: 94335 - DNA, 25 bp, Probe sequence
aatgcatcttttcgtagtgtcgttt

SEQ ID NO: 94336 - DNA, 25 bp, Probe sequence
aatattcgacactacgagcatgaaa

SEQ ID NO: 94337 - DNA, 25 bp, Probe sequence
cactacgagcatgaaaatgcatctt

SEQ ID NO: 94338 - DNA, 25 bp, Probe sequence
gctaatataagtaaatcattttcaa

SEQ ID NO: 94339 - DNA, 25 bp, Probe sequence
gcatcttttcgtagtgtcgttttta

SEQ ID NO: 94340 - DNA, 25 bp, Probe sequence
gataataatattcgacactacgagc

SEQ ID NO: 94341 - DNA, 25 bp, Probe sequence
tgcatcttttcgtagtgtcgttttt

SEQ ID NO: 94342 - DNA, 25 bp, Probe sequence
tcgtagtgtcgtttttacaattact

SEQ ID NO: 94343 - DNA, 25 bp, Probe sequence
tcgacactacgagcatgaaaatgca

SEQ ID NO: 94344 - DNA, 25 bp, Probe sequence
tattcgacactacgagcatgaaaat

SEQ ID NO: 94345 - DNA, 25 bp, Probe sequence
tttacaattactttcttaagctaat

SEQ ID NO: 94346 - DNA, 25 bp, Probe sequence
ataaagtctataccggtgattgaca

SEQ ID NO: 94347 - DNA, 25 bp, Probe sequence
atggaaaatttataatgttcattgt

SEQ ID NO: 94348 - DNA, 25 bp, Probe sequence
accggtgattgacaattttacggct

SEQ ID NO: 94349 - DNA, 25 bp, Probe sequence
aacacaagtggtttaatgtataata

SEQ ID NO: 94350 - DNA, 25 bp, Probe sequence
aagtctataccggtgattgacaatt

SEQ ID NO: 94351 - DNA, 25 bp, Probe sequence
ctccttaagtacgcgattacaaact

SEQ ID NO: 94352 - DNA, 25 bp, Probe sequence
gattgacaattttacggcttgaaaa

SEQ ID NO: 94353 - DNA, 25 bp, Probe sequence
gtacgcgattacaaactatagtata

SEQ ID NO: 94354 - DNA, 25 bp, Probe sequence
ggtgattgacaattttacggcttga

SEQ ID NO: 94355 - DNA, 25 bp, Probe sequence
tgttcattgttttacattttcaaat

SEQ ID NO: 94356 - DNA, 25 bp, Probe sequence
tctataccggtgattgacaatttta

SEQ ID NO: 94357 - DNA, 25 bp, Probe sequence
tcattgttttacattttcaaatcaa

SEQ ID NO: 94358 - DNA, 25 bp, Probe sequence
tacggcttgaaaatcaatttaatca

SEQ ID NO: 94359 - DNA, 25 bp, Probe sequence
ttttctccttaagtacgcgattaca

SEQ ID NO: 94360 - DNA, 25 bp, Probe sequence
ttctccttaagtacgcgattacaaa

SEQ ID NO: 94361 - DNA, 25 bp, Probe sequence
atatataatttaccacatctcccca

SEQ ID NO: 94362 - DNA, 25 bp, Probe sequence
atccaccactatttatacaaaattt

SEQ ID NO: 94363 - DNA, 25 bp, Probe sequence
aaatgcccgatttatcattaagata

SEQ ID NO: 94364 - DNA, 25 bp, Probe sequence
aaaaatgcccgatttatcattaaga

SEQ ID NO: 94365 - DNA, 25 bp, Probe sequence
aacaaaaaaatgcccgatttatcat

SEQ ID NO: 94366 - DNA, 25 bp, Probe sequence
cactatccaccactatttatacaaa

SEQ ID NO: 94367 - DNA, 25 bp, Probe sequence
caccactatttatacaaaatttgtg

SEQ ID NO: 94368 - DNA, 25 bp, Probe sequence
cacctcaccttatatataatttacc

SEQ ID NO: 94369 - DNA, 25 bp, Probe sequence
ctatccaccactatttatacaaaat

SEQ ID NO: 94370 - DNA, 25 bp, Probe sequence
ccactatccaccactatttatacaa

SEQ ID NO: 94371 - DNA, 25 bp, Probe sequence
taagataaatcgggctaaacccttg

SEQ ID NO: 94372 - DNA, 25 bp, Probe sequence
tatcacctcaccttatatataattt

SEQ ID NO: 94373 - DNA, 25 bp, Probe sequence
tttatcacctcaccttatatataat

SEQ ID NO: 94374 - DNA, 25 bp, Probe sequence
tttttatcacctcaccttatatata

SEQ ID NO: 94375 - DNA, 25 bp, Probe sequence
ttttatcacctcaccttatatataa

SEQ ID NO: 94376 - DNA, 25 bp, Probe sequence
acacccttatttaatgtagccattc

SEQ ID NO: 94377 - DNA, 25 bp, Probe sequence
aaaattctctatcaacacttattta

SEQ ID NO: 94378 - DNA, 25 bp, Probe sequence
aagttaatctgacctcgtctacctt

SEQ ID NO: 94379 - DNA, 25 bp, Probe sequence
aatagtgacaatacacccttattta

SEQ ID NO: 94380 - DNA, 25 bp, Probe sequence
caaacaagttaatctgacctcgtct

SEQ ID NO: 94381 - DNA, 25 bp, Probe sequence
ctcctcttcttaatccagacttttt

SEQ ID NO: 94382 - DNA, 25 bp, Probe sequence
gaagatgtttttttctatcacagca

SEQ ID NO: 94383 - DNA, 25 bp, Probe sequence
gacctcgtctaccttaaaattctct

SEQ ID NO: 94384 - DNA, 25 bp, Probe sequence
gtttttttctatcacagcattactt

SEQ ID NO: 94385 - DNA, 25 bp, Probe sequence
gtctaccttaaaattctctatcaac

SEQ ID NO: 94386 - DNA, 25 bp, Probe sequence
ggccagtataaaaagtttgcctata

SEQ ID NO: 94387 - DNA, 25 bp, Probe sequence
tccagacttttttaaccactaatat

SEQ ID NO: 94388 - DNA, 25 bp, Probe sequence
tcttttttacggcataagaggccag

SEQ ID NO: 94389 - DNA, 25 bp, Probe sequence
taatctgacctcgtctaccttaaaa

SEQ ID NO: 94390 - DNA, 25 bp, Probe sequence
ttctatcacagcattactttagtaa

SEQ ID NO: 94391 - DNA, 25 bp, Probe sequence
aggcacctcctgacaaattactatt

SEQ ID NO: 94392 - DNA, 25 bp, Probe sequence
agataggcacctcctgacaaattac

SEQ ID NO: 94393 - DNA, 25 bp, Probe sequence
agtttacaatacgttgaatggcttg

SEQ ID NO: 94394 - DNA, 25 bp, Probe sequence
aaatacactatccttagtttacaat

SEQ ID NO: 94395 - DNA, 25 bp, Probe sequence
caatacgttgaatggcttgtgaact

SEQ ID NO: 94396 - DNA, 25 bp, Probe sequence
cactatccttagtttacaatacgtt

SEQ ID NO: 94397 - DNA, 25 bp, Probe sequence
cacctcctgacaaattactattaaa

SEQ ID NO: 94398 - DNA, 25 bp, Probe sequence
gcacctcctgacaaattactattaa

SEQ ID NO: 94399 - DNA, 25 bp, Probe sequence
gaatggcttgtgaactataaacata

SEQ ID NO: 94400 - DNA, 25 bp, Probe sequence
gataggcacctcctgacaaattact

SEQ ID NO: 94401 - DNA, 25 bp, Probe sequence
ggcacctcctgacaaattactatta

SEQ ID NO: 94402 - DNA, 25 bp, Probe sequence
ggcttgtgaactataaacatagaca

SEQ ID NO: 94403 - DNA, 25 bp, Probe sequence
tacgttgaatggcttgtgaactata

SEQ ID NO: 94404 - DNA, 25 bp, Probe sequence
taggcacctcctgacaaattactat

SEQ ID NO: 94405 - DNA, 25 bp, Probe sequence
tatccttagtttacaatacgttgaa

SEQ ID NO: 94406 - DNA, 25 bp, Probe sequence
atcgtcaccatcatttcatttaaat

SEQ ID NO: 94407 - DNA, 25 bp, Probe sequence
atgttgcgcaaataatttttgactt

SEQ ID NO: 94408 - DNA, 25 bp, Probe sequence
aaattatcttcgtctaactgtacaa

SEQ ID NO: 94409 - DNA, 25 bp, Probe sequence
gaaaaacttaaatgtccttctacat

SEQ ID NO: 94410 - DNA, 25 bp, Probe sequence
tacttaaacacttttaatgacttcg

SEQ ID NO: 94411 - DNA, 25 bp, Probe sequence
gatatgttatctgatgatttgtgtt

SEQ ID NO: 94412 - DNA, 25 bp, Probe sequence
gatttgtgttgaattatttgtgtat

SEQ ID NO: 94413 - DNA, 25 bp, Probe sequence
tgtccttctacatgttctaaaaatt

SEQ ID NO: 94414 - DNA, 25 bp, Probe sequence
tcgatcgtcaccatcatttcattta

SEQ ID NO: 94415 - DNA, 25 bp, Probe sequence
ttttgacttaattttgacacgatac

SEQ ID NO: 94416 - DNA, 25 bp, Probe sequence
ttatttgtgtatatatattaaccga

SEQ ID NO: 94417 - DNA, 25 bp, Probe sequence
ttatcttcgtctaactgtacaaagt

SEQ ID NO: 94418 - DNA, 25 bp, Probe sequence
ttcatttaaattatcttcgtctaac

SEQ ID NO: 94419 - DNA, 25 bp, Probe sequence
ttaaatgtccttctacatgttctaa

SEQ ID NO: 94420 - DNA, 25 bp, Probe sequence
ttgacacgatacttaaacactttta

SEQ ID NO: 94421 - DNA, 25 bp, Probe sequence
attgcccttatattcagaaaaatac

SEQ ID NO: 94422 - DNA, 25 bp, Probe sequence
aggctaaagtatcatgtacccttgc

SEQ ID NO: 94423 - DNA, 25 bp, Probe sequence
acgaggctaaagtatcatgtaccct

SEQ ID NO: 94424 - DNA, 25 bp, Probe sequence
aaaacgaggctaaagtatcatgtac

SEQ ID NO: 94425 - DNA, 25 bp, Probe sequence
aacgaggctaaagtatcatgtaccc

SEQ ID NO: 94426 - DNA, 25 bp, Probe sequence
aatacatatcaaaaacgaggctaaa

SEQ ID NO: 94427 - DNA, 25 bp, Probe sequence
ctaaagtatcatgtacccttgcctc

SEQ ID NO: 94428 - DNA, 25 bp, Probe sequence
ctattgcccttatattcagaaaaat

SEQ ID NO: 94429 - DNA, 25 bp, Probe sequence
cgaggctaaagtatcatgtaccctt

SEQ ID NO: 94430 - DNA, 25 bp, Probe sequence
gctaaagtatcatgtacccttgcct

SEQ ID NO: 94431 - DNA, 25 bp, Probe sequence
gaggctaaagtatcatgtacccttg

SEQ ID NO: 94432 - DNA, 25 bp, Probe sequence
ggctaaagtatcatgtacccttgcc

SEQ ID NO: 94433 - DNA, 25 bp, Probe sequence
tgcccttatattcagaaaaatacat

SEQ ID NO: 94434 - DNA, 25 bp, Probe sequence
tctattgcccttatattcagaaaaa

SEQ ID NO: 94435 - DNA, 25 bp, Probe sequence
taaagtatcatgtacccttgcctcg

SEQ ID NO: 94436 - DNA, 25 bp, Probe sequence
attacctaattcgctgtgaaaagtt

SEQ ID NO: 94437 - DNA, 25 bp, Probe sequence
actcaacttagagttctctcattac

SEQ ID NO: 94438 - DNA, 25 bp, Probe sequence
acatacatgcttttactaggctctc

SEQ ID NO: 94439 - DNA, 25 bp, Probe sequence
aaagccagtgatataacatacatgc

SEQ ID NO: 94440 - DNA, 25 bp, Probe sequence
aatgtatattacgcgtctgtcttta

SEQ ID NO: 94441 - DNA, 25 bp, Probe sequence
caccattacctaattcgctgtgaaa

SEQ ID NO: 94442 - DNA, 25 bp, Probe sequence
gtatattacgcgtctgtctttattt

SEQ ID NO: 94443 - DNA, 25 bp, Probe sequence
tctcaccattacctaattcgctgtg

SEQ ID NO: 94444 - DNA, 25 bp, Probe sequence
taaaagggacgattgctcgcggtac

SEQ ID NO: 94445 - DNA, 25 bp, Probe sequence
tacatgcttttactaggctctcacc

SEQ ID NO: 94446 - DNA, 25 bp, Probe sequence
tactaggctctcaccattacctaat

SEQ ID NO: 94447 - DNA, 25 bp, Probe sequence
tagagttctctcattacattattta

SEQ ID NO: 94448 - DNA, 25 bp, Probe sequence
taggctctcaccattacctaattcg

SEQ ID NO: 94449 - DNA, 25 bp, Probe sequence
ttttactaggctctcaccattacct

SEQ ID NO: 94450 - DNA, 25 bp, Probe sequence
ttacgcgtctgtctttatttaattc

SEQ ID NO: 94451 - DNA, 25 bp, Probe sequence
attaactcctatcaaattcaatatc

SEQ ID NO: 94452 - DNA, 25 bp, Probe sequence
atatctgtgcttacttttacttaaa

SEQ ID NO: 94453 - DNA, 25 bp, Probe sequence
aaattacacattttttaacacatat

SEQ ID NO: 94454 - DNA, 25 bp, Probe sequence
aaaaaactctcttcatcatgtcaac

SEQ ID NO: 94455 - DNA, 25 bp, Probe sequence
aactctcttcatcatgtcaacaaaa

SEQ ID NO: 94456 - DNA, 25 bp, Probe sequence
aattcaatatctgtgcttactttta

SEQ ID NO: 94457 - DNA, 25 bp, Probe sequence
gcttcagagaatttgtaccattcct

SEQ ID NO: 94458 - DNA, 25 bp, Probe sequence
gaatttgtaccattcctgaataatt

SEQ ID NO: 94459 - DNA, 25 bp, Probe sequence
gagaatagcaactataacgcattta

SEQ ID NO: 94460 - DNA, 25 bp, Probe sequence
taacgcatttataagcttcagagaa

SEQ ID NO: 94461 - DNA, 25 bp, Probe sequence
taacttggtcatttttttattcaca

SEQ ID NO: 94462 - DNA, 25 bp, Probe sequence
tatatcatctgtataagtactttat

SEQ ID NO: 94463 - DNA, 25 bp, Probe sequence
tattcacaaaaaaactctcttcatc

SEQ ID NO: 94464 - DNA, 25 bp, Probe sequence
tttacttaaaattatcgcgaacata

SEQ ID NO: 94465 - DNA, 25 bp, Probe sequence
ttaacacatataaccagtaacttgg

SEQ ID NO: 94466 - DNA, 25 bp, Probe sequence
attcattatatggttcgtccattca

SEQ ID NO: 94467 - DNA, 25 bp, Probe sequence
attatatggttcgtccattcaaagt

SEQ ID NO: 94468 - DNA, 25 bp, Probe sequence
atatggttcgtccattcaaagtata

SEQ ID NO: 94469 - DNA, 25 bp, Probe sequence
atggttcgtccattcaaagtatata

SEQ ID NO: 94470 - DNA, 25 bp, Probe sequence
acgattcattatatggttcgtccat

SEQ ID NO: 94471 - DNA, 25 bp, Probe sequence
aaacgattcattatatggttcgtcc

SEQ ID NO: 94472 - DNA, 25 bp, Probe sequence
aaaagatcattaaaaacgattcatt

SEQ ID NO: 94473 - DNA, 25 bp, Probe sequence
aacgattcattatatggttcgtcca

SEQ ID NO: 94474 - DNA, 25 bp, Probe sequence
cattatatggttcgtccattcaaag

SEQ ID NO: 94475 - DNA, 25 bp, Probe sequence
cgattcattatatggttcgtccatt

SEQ ID NO: 94476 - DNA, 25 bp, Probe sequence
gattcattatatggttcgtccattc

SEQ ID NO: 94477 - DNA, 25 bp, Probe sequence
tcattatatggttcgtccattcaaa

SEQ ID NO: 94478 - DNA, 25 bp, Probe sequence
tatatggttcgtccattcaaagtat

SEQ ID NO: 94479 - DNA, 25 bp, Probe sequence
ttatatggttcgtccattcaaagta

SEQ ID NO: 94480 - DNA, 25 bp, Probe sequence
ttcattatatggttcgtccattcaa

SEQ ID NO: 94481 - DNA, 25 bp, Probe sequence
ataagacatgaatcgtctacactta

SEQ ID NO: 94482 - DNA, 25 bp, Probe sequence
atcgtctacacttaattggacaaat

SEQ ID NO: 94483 - DNA, 25 bp, Probe sequence
atgaatcgtctacacttaattggac

SEQ ID NO: 94484 - DNA, 25 bp, Probe sequence
acttaattggacaaattctatgaga

SEQ ID NO: 94485 - DNA, 25 bp, Probe sequence
acatgaatcgtctacacttaattgg

SEQ ID NO: 94486 - DNA, 25 bp, Probe sequence
aaataagacatgaatcgtctacact

SEQ ID NO: 94487 - DNA, 25 bp, Probe sequence
aagacatgaatcgtctacacttaat

SEQ ID NO: 94488 - DNA, 25 bp, Probe sequence
aatcgtctacacttaattggacaaa

SEQ ID NO: 94489 - DNA, 25 bp, Probe sequence
catgaatcgtctacacttaattgga

SEQ ID NO: 94490 - DNA, 25 bp, Probe sequence
gaatcgtctacacttaattggacaa

SEQ ID NO: 94491 - DNA, 25 bp, Probe sequence
gacatgaatcgtctacacttaattg

SEQ ID NO: 94492 - DNA, 25 bp, Probe sequence
gagaatagatattgttaatttaaga

SEQ ID NO: 94493 - DNA, 25 bp, Probe sequence
gtctacacttaattggacaaattct

SEQ ID NO: 94494 - DNA, 25 bp, Probe sequence
tgaatcgtctacacttaattggaca

SEQ ID NO: 94495 - DNA, 25 bp, Probe sequence
tacacttaattggacaaattctatg

SEQ ID NO: 94496 - DNA, 25 bp, Probe sequence
attaaatctaatgttactcactcaa

SEQ ID NO: 94497 - DNA, 25 bp, Probe sequence
atattatagcttacacctgctaata

SEQ ID NO: 94498 - DNA, 25 bp, Probe sequence
atcaatcgtccataagacaactctt

SEQ ID NO: 94499 - DNA, 25 bp, Probe sequence
atctaatgttactcactcaatactt

SEQ ID NO: 94500 - DNA, 25 bp, Probe sequence
atcgtccataagacaactctttata

SEQ ID NO: 94501 - DNA, 25 bp, Probe sequence
agcttacacctgctaataaaaaaag

SEQ ID NO: 94502 - DNA, 25 bp, Probe sequence
actcaatacttgataaactactatg

SEQ ID NO: 94503 - DNA, 25 bp, Probe sequence
aatgttactcactcaatacttgata

SEQ ID NO: 94504 - DNA, 25 bp, Probe sequence
cctccaatcaatcgtccataagaca

SEQ ID NO: 94505 - DNA, 25 bp, Probe sequence
gaacttaattattcatttatcatat

SEQ ID NO: 94506 - DNA, 25 bp, Probe sequence
gaaagcaggctggaacataaatccc

SEQ ID NO: 94507 - DNA, 25 bp, Probe sequence
gacaactctttatattatagcttac

SEQ ID NO: 94508 - DNA, 25 bp, Probe sequence
gataaactactatgttttgacatta

SEQ ID NO: 94509 - DNA, 25 bp, Probe sequence
tctttatattatagcttacacctgc

SEQ ID NO: 94510 - DNA, 25 bp, Probe sequence
ttcctccaatcaatcgtccataaga

SEQ ID NO: 94511 - DNA, 25 bp, Probe sequence
atatatctatattttcatgtctttg

SEQ ID NO: 94512 - DNA, 25 bp, Probe sequence
aatactaatcaggcgctttgtcaat

SEQ ID NO: 94513 - DNA, 25 bp, Probe sequence
aattaaccgatctcagtaaaaatgt

SEQ ID NO: 94514 - DNA, 25 bp, Probe sequence
ctggacgctcaattaaagactcttt

SEQ ID NO: 94515 - DNA, 25 bp, Probe sequence
gaaagtgttatgatcattttagtat

SEQ ID NO: 94516 - DNA, 25 bp, Probe sequence
gactctttatgttgtacttaaactg

SEQ ID NO: 94517 - DNA, 25 bp, Probe sequence
gttatcgtaattatagcacaacaca

SEQ ID NO: 94518 - DNA, 25 bp, Probe sequence
gtattactacttattcttgcatatg

SEQ ID NO: 94519 - DNA, 25 bp, Probe sequence
gtatatacaatcagcctatttacat

SEQ ID NO: 94520 - DNA, 25 bp, Probe sequence
gtctttaatatcgacatgaggttta

SEQ ID NO: 94521 - DNA, 25 bp, Probe sequence
tgttaaccttaatctattttataat

SEQ ID NO: 94522 - DNA, 25 bp, Probe sequence
tcaggcgctttgtcaatctatattg

SEQ ID NO: 94523 - DNA, 25 bp, Probe sequence
tagaaacaaaaaacctcatgtcttt

SEQ ID NO: 94524 - DNA, 25 bp, Probe sequence
ttcatgtctttgacgtctctctgga

SEQ ID NO: 94525 - DNA, 25 bp, Probe sequence
ttgacgtctctctggacgctcaatt

SEQ ID NO: 94526 - DNA, 25 bp, Probe sequence
agttgtcgaacatgagggtattatt

SEQ ID NO: 94527 - DNA, 25 bp, Probe sequence
aaaaaaatctctttacatcagtata

SEQ ID NO: 94528 - DNA, 25 bp, Probe sequence
aaaatctctttacatcagtatatgt

SEQ ID NO: 94529 - DNA, 25 bp, Probe sequence
aagttgctacaagtcattttcgtcc

SEQ ID NO: 94530 - DNA, 25 bp, Probe sequence
aatattcatttcctccgataataaa

SEQ ID NO: 94531 - DNA, 25 bp, Probe sequence
cacctttttcagtctctcgtactga

SEQ ID NO: 94532 - DNA, 25 bp, Probe sequence
cctttttcagtctctcgtactgaat

SEQ ID NO: 94533 - DNA, 25 bp, Probe sequence
gctacaagtcattttcgtccataga

SEQ ID NO: 94534 - DNA, 25 bp, Probe sequence
gaaaacttatttatcattcaactcc

SEQ ID NO: 94535 - DNA, 25 bp, Probe sequence
gaaattgacttatagttgtcgaaca

SEQ ID NO: 94536 - DNA, 25 bp, Probe sequence
gacaaaaagtgtgacaagttgctac

SEQ ID NO: 94537 - DNA, 25 bp, Probe sequence
gtcattttcgtccatagaaattgac

SEQ ID NO: 94538 - DNA, 25 bp, Probe sequence
gtctctcgtactgaattaaaagggg

SEQ ID NO: 94539 - DNA, 25 bp, Probe sequence
gtcgaacatgagggtattattagat

SEQ ID NO: 94540 - DNA, 25 bp, Probe sequence
ttgctacaagtcattttcgtccata

SEQ ID NO: 94541 - DNA, 25 bp, Probe sequence
atatgtctccctttatattaagaaa

SEQ ID NO: 94542 - DNA, 25 bp, Probe sequence
atgaggctgtaatataaacttcttt

SEQ ID NO: 94543 - DNA, 25 bp, Probe sequence
atgtctccctttatattaagaaatt

SEQ ID NO: 94544 - DNA, 25 bp, Probe sequence
agccccaccgatacagtttgattga

SEQ ID NO: 94545 - DNA, 25 bp, Probe sequence
aatggttaattacagccccaccgat

SEQ ID NO: 94546 - DNA, 25 bp, Probe sequence
aatgaggctgtaatataaacttctt

SEQ ID NO: 94547 - DNA, 25 bp, Probe sequence
catatatgtctccctttatattaag

SEQ ID NO: 94548 - DNA, 25 bp, Probe sequence
ctccctttatattaagaaattcatt

SEQ ID NO: 94549 - DNA, 25 bp, Probe sequence
gccccaccgatacagtttgattgat

SEQ ID NO: 94550 - DNA, 25 bp, Probe sequence
gaggctgtaatataaacttctttaa

SEQ ID NO: 94551 - DNA, 25 bp, Probe sequence
gtctccctttatattaagaaattca

SEQ ID NO: 94552 - DNA, 25 bp, Probe sequence
ggctgtaatataaacttctttaagt

SEQ ID NO: 94553 - DNA, 25 bp, Probe sequence
taaatggttaattacagccccaccg

SEQ ID NO: 94554 - DNA, 25 bp, Probe sequence
tatgtctccctttatattaagaaat

SEQ ID NO: 94555 - DNA, 25 bp, Probe sequence
tatatgtctccctttatattaagaa

SEQ ID NO: 94556 - DNA, 25 bp, Probe sequence
attcggatgcggttaagcagcccct

SEQ ID NO: 94557 - DNA, 25 bp, Probe sequence
attagtcctattactcgtattctta

SEQ ID NO: 94558 - DNA, 25 bp, Probe sequence
atgtgcacgaatgacaaacgtctta

SEQ ID NO: 94559 - DNA, 25 bp, Probe sequence
atgtgattccagtattagtcctatt

SEQ ID NO: 94560 - DNA, 25 bp, Probe sequence
agtgtttgtaatattcggatgcggt

SEQ ID NO: 94561 - DNA, 25 bp, Probe sequence
aagcagcccctgatattaaacacta

SEQ ID NO: 94562 - DNA, 25 bp, Probe sequence
aaggagggacgttatgttacattat

SEQ ID NO: 94563 - DNA, 25 bp, Probe sequence
cgcgtcataccgttatgtgcacgaa

SEQ ID NO: 94564 - DNA, 25 bp, Probe sequence
gctatgcctcctatagatcgaactt

SEQ ID NO: 94565 - DNA, 25 bp, Probe sequence
gacaaacgtcttattggcctgttga

SEQ ID NO: 94566 - DNA, 25 bp, Probe sequence
gacaaaagcgcgtcataccgttatg

SEQ ID NO: 94567 - DNA, 25 bp, Probe sequence
gatcgaacttctataactactatta

SEQ ID NO: 94568 - DNA, 25 bp, Probe sequence
gtcttattggcctgttgattaaatc

SEQ ID NO: 94569 - DNA, 25 bp, Probe sequence
ggtattaatgttttgacttattgtc

SEQ ID NO: 94570 - DNA, 25 bp, Probe sequence
tactcgtattcttaattggttggat

SEQ ID NO: 94571 - DNA, 25 bp, Probe sequence
atcattcaacgctgtgcgaatcctt

SEQ ID NO: 94572 - DNA, 25 bp, Probe sequence
agtgtttctttatcattcaacgctg

SEQ ID NO: 94573 - DNA, 25 bp, Probe sequence
acataggtaaaacgcatgcataaga

SEQ ID NO: 94574 - DNA, 25 bp, Probe sequence
aaagtgtttctttatcattcaacgc

SEQ ID NO: 94575 - DNA, 25 bp, Probe sequence
aaaacgcatgcataagaaaaagtgt

SEQ ID NO: 94576 - DNA, 25 bp, Probe sequence
aagtgtttctttatcattcaacgct

SEQ ID NO: 94577 - DNA, 25 bp, Probe sequence
aatacataggtaaaacgcatgcata

SEQ ID NO: 94578 - DNA, 25 bp, Probe sequence
ctttatcattcaacgctgtgcgaat

SEQ ID NO: 94579 - DNA, 25 bp, Probe sequence
gtttctttatcattcaacgctgtgc

SEQ ID NO: 94580 - DNA, 25 bp, Probe sequence
gtgtttctttatcattcaacgctgt

SEQ ID NO: 94581 - DNA, 25 bp, Probe sequence
tctttatcattcaacgctgtgcgaa

SEQ ID NO: 94582 - DNA, 25 bp, Probe sequence
tatcattcaacgctgtgcgaatcct

SEQ ID NO: 94583 - DNA, 25 bp, Probe sequence
tttctttatcattcaacgctgtgcg

SEQ ID NO: 94584 - DNA, 25 bp, Probe sequence
ttatcattcaacgctgtgcgaatcc

SEQ ID NO: 94585 - DNA, 25 bp, Probe sequence
ttctttatcattcaacgctgtgcga

SEQ ID NO: 94586 - DNA, 25 bp, Probe sequence
agaaaggactactttcttttgcgag

SEQ ID NO: 94587 - DNA, 25 bp, Probe sequence
agttgtcgacaaataaacacctcac

SEQ ID NO: 94588 - DNA, 25 bp, Probe sequence
acctcaccataagaaaggactactt

SEQ ID NO: 94589 - DNA, 25 bp, Probe sequence
acacctcaccataagaaaggactac

SEQ ID NO: 94590 - DNA, 25 bp, Probe sequence
acaaataaacacctcaccataagaa

SEQ ID NO: 94591 - DNA, 25 bp, Probe sequence
aaataaacacctcaccataagaaag

SEQ ID NO: 94592 - DNA, 25 bp, Probe sequence
aacacctcaccataagaaaggacta

SEQ ID NO: 94593 - DNA, 25 bp, Probe sequence
cgacaaataaacacctcaccataag

SEQ ID NO: 94594 - DNA, 25 bp, Probe sequence
gacaaataaacacctcaccataaga

SEQ ID NO: 94595 - DNA, 25 bp, Probe sequence
gttgtcgacaaataaacacctcacc

SEQ ID NO: 94596 - DNA, 25 bp, Probe sequence
gtcgacaaataaacacctcaccata

SEQ ID NO: 94597 - DNA, 25 bp, Probe sequence
tgtcgacaaataaacacctcaccat

SEQ ID NO: 94598 - DNA, 25 bp, Probe sequence
tcgacaaataaacacctcaccataa

SEQ ID NO: 94599 - DNA, 25 bp, Probe sequence
taaacacctcaccataagaaaggac

SEQ ID NO: 94600 - DNA, 25 bp, Probe sequence
ttgtcgacaaataaacacctcacca

SEQ ID NO: 94601 - DNA, 25 bp, Probe sequence
ataccgaaaagttacaatcatgtta

SEQ ID NO: 94602 - DNA, 25 bp, Probe sequence
atgtgtggcataatgtatggttcaa

SEQ ID NO: 94603 - DNA, 25 bp, Probe sequence
aaatatgatatcacattgttcttta

SEQ ID NO: 94604 - DNA, 25 bp, Probe sequence
aattgaattgcgaacttttagataa

SEQ ID NO: 94605 - DNA, 25 bp, Probe sequence
catatttgaaattgcatgccataat

SEQ ID NO: 94606 - DNA, 25 bp, Probe sequence
cattgttctttatattgtatagcat

SEQ ID NO: 94607 - DNA, 25 bp, Probe sequence
ccttacgacctctctaagctaatct

SEQ ID NO: 94608 - DNA, 25 bp, Probe sequence
gcatgccataatttctattaagtct

SEQ ID NO: 94609 - DNA, 25 bp, Probe sequence
gacctctctaagctaatcttctatt

SEQ ID NO: 94610 - DNA, 25 bp, Probe sequence
gatatcacattgttctttatattgt

SEQ ID NO: 94611 - DNA, 25 bp, Probe sequence
gttatattgcacgattaattttaat

SEQ ID NO: 94612 - DNA, 25 bp, Probe sequence
tctaagctaatcttctattatttaa

SEQ ID NO: 94613 - DNA, 25 bp, Probe sequence
tacgacctctctaagctaatcttct

SEQ ID NO: 94614 - DNA, 25 bp, Probe sequence
tatggttcaataactataccgaaaa

SEQ ID NO: 94615 - DNA, 25 bp, Probe sequence
ttaagtctaacaatatcgttatatt

SEQ ID NO: 94616 - DNA, 25 bp, Probe sequence
atcactatgacatttacgctttaca

SEQ ID NO: 94617 - DNA, 25 bp, Probe sequence
atctcccttaaatatcactatgaca

SEQ ID NO: 94618 - DNA, 25 bp, Probe sequence
atgcgcacaaatgctcattactttt

SEQ ID NO: 94619 - DNA, 25 bp, Probe sequence
acctacataggtgcgtttgatttgg

SEQ ID NO: 94620 - DNA, 25 bp, Probe sequence
catcatcatatgcgcacaaatgctc

SEQ ID NO: 94621 - DNA, 25 bp, Probe sequence
gctttacatcatcatatgcgcacaa

SEQ ID NO: 94622 - DNA, 25 bp, Probe sequence
gcttcacatatttttaatggtcgaa

SEQ ID NO: 94623 - DNA, 25 bp, Probe sequence
gacatttacgctttacatcatcata

SEQ ID NO: 94624 - DNA, 25 bp, Probe sequence
gatttggatatgccttgacgtattt

SEQ ID NO: 94625 - DNA, 25 bp, Probe sequence
gtatttgatgtacgtctagcttcac

SEQ ID NO: 94626 - DNA, 25 bp, Probe sequence
gtacgtctagcttcacatattttta

SEQ ID NO: 94627 - DNA, 25 bp, Probe sequence
ggtgcgtttgatttggatatgcctt

SEQ ID NO: 94628 - DNA, 25 bp, Probe sequence
ggatatgccttgacgtatttgatgt

SEQ ID NO: 94629 - DNA, 25 bp, Probe sequence
tgctcattacttttttatagataca

SEQ ID NO: 94630 - DNA, 25 bp, Probe sequence
ttcaatctcccttaaatatcactat

SEQ ID NO: 94631 - DNA, 25 bp, Probe sequence
atttgcactatttcaatttaccatt

SEQ ID NO: 94632 - DNA, 25 bp, Probe sequence
aacactggttcaaatactcgtacat

SEQ ID NO: 94633 - DNA, 25 bp, Probe sequence
aacagttgtatattctgcccttttt

SEQ ID NO: 94634 - DNA, 25 bp, Probe sequence
aatcacgtaagttataaagccatat

SEQ ID NO: 94635 - DNA, 25 bp, Probe sequence
aatcattagtacttttattcatcag

SEQ ID NO: 94636 - DNA, 25 bp, Probe sequence
aatactcgtacatactgaacttgtt

SEQ ID NO: 94637 - DNA, 25 bp, Probe sequence
aattccttatcaaaccaaaatcacg

SEQ ID NO: 94638 - DNA, 25 bp, Probe sequence
gcactatttcaatttaccatttaaa

SEQ ID NO: 94639 - DNA, 25 bp, Probe sequence
gtatggcgcttgcattaaaatcaga

SEQ ID NO: 94640 - DNA, 25 bp, Probe sequence
gtacatactgaacttgtttctaata

SEQ ID NO: 94641 - DNA, 25 bp, Probe sequence
gtaaatattcaaacactggttcaaa

SEQ ID NO: 94642 - DNA, 25 bp, Probe sequence
tttacattaaccatcaatattttta

SEQ ID NO: 94643 - DNA, 25 bp, Probe sequence
ttcatcagtaagtatggcgcttgca

SEQ ID NO: 94644 - DNA, 25 bp, Probe sequence
ttctgccctttttctgtacttaaag

SEQ ID NO: 94645 - DNA, 25 bp, Probe sequence
ttctcctcttaagttattttgtttg

SEQ ID NO: 94646 - DNA, 25 bp, Probe sequence
attgcgattatttaatgtagtacac

SEQ ID NO: 94647 - DNA, 25 bp, Probe sequence
attatttgcgaatcatagagttata

SEQ ID NO: 94648 - DNA, 25 bp, Probe sequence
atagttattacgaactctatatgat

SEQ ID NO: 94649 - DNA, 25 bp, Probe sequence
agtacactatttatttttcacacag

SEQ ID NO: 94650 - DNA, 25 bp, Probe sequence
acactatttatttttcacacagtaa

SEQ ID NO: 94651 - DNA, 25 bp, Probe sequence
aaataaatcccgatgacaatcattt

SEQ ID NO: 94652 - DNA, 25 bp, Probe sequence
aaatcccgatgacaatcatttatta

SEQ ID NO: 94653 - DNA, 25 bp, Probe sequence
aagcagtaatgctgattgtttatcg

SEQ ID NO: 94654 - DNA, 25 bp, Probe sequence
gaatcatagagttatagttattacg

SEQ ID NO: 94655 - DNA, 25 bp, Probe sequence
gacaatcatttattatttgcgaatc

SEQ ID NO: 94656 - DNA, 25 bp, Probe sequence
gatgacaatcatttattatttgcga

SEQ ID NO: 94657 - DNA, 25 bp, Probe sequence
gtagtacactatttatttttcacac

SEQ ID NO: 94658 - DNA, 25 bp, Probe sequence
gtaatgctgattgtttatcgggatt

SEQ ID NO: 94659 - DNA, 25 bp, Probe sequence
tgctgattgtttatcgggattatta

SEQ ID NO: 94660 - DNA, 25 bp, Probe sequence
tacgaactctatatgataagcagta

SEQ ID NO: 94661 - DNA, 25 bp, Probe sequence
agaatgtatatttttcaatttgaag

SEQ ID NO: 94662 - DNA, 25 bp, Probe sequence
actcctcaataaaattcatcaaact

SEQ ID NO: 94663 - DNA, 25 bp, Probe sequence
acaatgcaactgaagtgtaatccta

SEQ ID NO: 94664 - DNA, 25 bp, Probe sequence
aaatgcgaccttacatcatagaatg

SEQ ID NO: 94665 - DNA, 25 bp, Probe sequence
aactcttactcctcaataaaattca

SEQ ID NO: 94666 - DNA, 25 bp, Probe sequence
aattcatcaaactattataacgtaa

SEQ ID NO: 94667 - DNA, 25 bp, Probe sequence
cttactcctcaataaaattcatcaa

SEQ ID NO: 94668 - DNA, 25 bp, Probe sequence
gcgaccttacatcatagaatgtata

SEQ ID NO: 94669 - DNA, 25 bp, Probe sequence
gcaactgaagtgtaatcctaaattt

SEQ ID NO: 94670 - DNA, 25 bp, Probe sequence
gaagtgtaatcctaaatttattgta

SEQ ID NO: 94671 - DNA, 25 bp, Probe sequence
gaagattgtcatgtgattcattacg

SEQ ID NO: 94672 - DNA, 25 bp, Probe sequence
gattcattacgtatatttcacacgt

SEQ ID NO: 94673 - DNA, 25 bp, Probe sequence
gattgtcatgtgattcattacgtat

SEQ ID NO: 94674 - DNA, 25 bp, Probe sequence
gtcatgtgattcattacgtatattt

SEQ ID NO: 94675 - DNA, 25 bp, Probe sequence
tattaaaaatgcgaccttacatcat

SEQ ID NO: 94676 - DNA, 25 bp, Probe sequence
agcattttaaaactaccgcaatctc

SEQ ID NO: 94677 - DNA, 25 bp, Probe sequence
acctcggtacatttacttcaattat

SEQ ID NO: 94678 - DNA, 25 bp, Probe sequence
acctctcgattaattttactgcatt

SEQ ID NO: 94679 - DNA, 25 bp, Probe sequence
actgcatttattatatcaaagactg

SEQ ID NO: 94680 - DNA, 25 bp, Probe sequence
actaccgcaatctcaacataaaaat

SEQ ID NO: 94681 - DNA, 25 bp, Probe sequence
aatggcacctctcgattaattttac

SEQ ID NO: 94682 - DNA, 25 bp, Probe sequence
aatgctcaactgtaaatgatgacat

SEQ ID NO: 94683 - DNA, 25 bp, Probe sequence
aattttactgcatttattatatcaa

SEQ ID NO: 94684 - DNA, 25 bp, Probe sequence
caacataaaaataccgagacttcca

SEQ ID NO: 94685 - DNA, 25 bp, Probe sequence
gagacttccaaatagaaacctcggt

SEQ ID NO: 94686 - DNA, 25 bp, Probe sequence
gaaacctcggtacatttacttcaat

SEQ ID NO: 94687 - DNA, 25 bp, Probe sequence
gagagtgatacagaattgatagaca

SEQ ID NO: 94688 - DNA, 25 bp, Probe sequence
gatagacaatgctcaactgtaaatg

SEQ ID NO: 94689 - DNA, 25 bp, Probe sequence
ggcacctctcgattaattttactgc

SEQ ID NO: 94690 - DNA, 25 bp, Probe sequence
taaaactaccgcaatctcaacataa

SEQ ID NO: 94691 - DNA, 25 bp, Probe sequence
ataaatcacgccataatcttcatta

SEQ ID NO: 94692 - DNA, 25 bp, Probe sequence
agagctcaacctcttagttcttttt

SEQ ID NO: 94693 - DNA, 25 bp, Probe sequence
acttaagaactaagagctcaacctc

SEQ ID NO: 94694 - DNA, 25 bp, Probe sequence
aaatgtgaccttatgtggaggacac

SEQ ID NO: 94695 - DNA, 25 bp, Probe sequence
aataatggttctctgtcaaattgga

SEQ ID NO: 94696 - DNA, 25 bp, Probe sequence
cataaatcaatgtactaggacctac

SEQ ID NO: 94697 - DNA, 25 bp, Probe sequence
gctcaacctcttagttctttttttg

SEQ ID NO: 94698 - DNA, 25 bp, Probe sequence
gacctacaattttccttccaataat

SEQ ID NO: 94699 - DNA, 25 bp, Probe sequence
gtgaaattcgaactatcaatataat

SEQ ID NO: 94700 - DNA, 25 bp, Probe sequence
gtggaggacacatttacttaagaac

SEQ ID NO: 94701 - DNA, 25 bp, Probe sequence
ggttcaatatcgattttggcacata

SEQ ID NO: 94702 - DNA, 25 bp, Probe sequence
tggacttatgggttcaatatcgatt

SEQ ID NO: 94703 - DNA, 25 bp, Probe sequence
taggacctacaattttccttccaat

SEQ ID NO: 94704 - DNA, 25 bp, Probe sequence
tacgtttaataatggttctctgtca

SEQ ID NO: 94705 - DNA, 25 bp, Probe sequence
ttccttccaataataaatcacgcca

SEQ ID NO: 94706 - DNA, 25 bp, Probe sequence
atttctctaaaatatcatactacat

SEQ ID NO: 94707 - DNA, 25 bp, Probe sequence
atgtttcattcacttatttctctaa

SEQ ID NO: 94708 - DNA, 25 bp, Probe sequence
accacttagtgtagtcataaacgct

SEQ ID NO: 94709 - DNA, 25 bp, Probe sequence
acttcacagtctacaattatatcac

SEQ ID NO: 94710 - DNA, 25 bp, Probe sequence
acaacttatcagaatgacttacgct

SEQ ID NO: 94711 - DNA, 25 bp, Probe sequence
aactgaatttacactcatgacgatt

SEQ ID NO: 94712 - DNA, 25 bp, Probe sequence
aacgctttaagtttcattgattatt

SEQ ID NO: 94713 - DNA, 25 bp, Probe sequence
catactacataacttcacagtctac

SEQ ID NO: 94714 - DNA, 25 bp, Probe sequence
gacttacgcttaaatcacctattat

SEQ ID NO: 94715 - DNA, 25 bp, Probe sequence
tattattcgttttccctaatcactt

SEQ ID NO: 94716 - DNA, 25 bp, Probe sequence
gattatctataggcgttttctttta

SEQ ID NO: 94717 - DNA, 25 bp, Probe sequence
tctttgtccctcctaaatttcaaag

SEQ ID NO: 94718 - DNA, 25 bp, Probe sequence
tcaaatgaaactatgctatcttaat

SEQ ID NO: 94719 - DNA, 25 bp, Probe sequence
taggcgttttcttttaatagatgta

SEQ ID NO: 94720 - DNA, 25 bp, Probe sequence
tttacactcatgacgattatctata

SEQ ID NO: 94721 - DNA, 25 bp, Probe sequence
ataaatcacctatgttttatttgat

SEQ ID NO: 94722 - DNA, 25 bp, Probe sequence
atgactaagttgaacatgacattgt

SEQ ID NO: 94723 - DNA, 25 bp, Probe sequence
atgatttatcattggtagtttttta

SEQ ID NO: 94724 - DNA, 25 bp, Probe sequence
acatgacattgttagcaactcgaga

SEQ ID NO: 94725 - DNA, 25 bp, Probe sequence
aaaaactaccaactgatgatttatc

SEQ ID NO: 94726 - DNA, 25 bp, Probe sequence
cacctatgttttatttgattttacg

SEQ ID NO: 94727 - DNA, 25 bp, Probe sequence
catttagtatgttatttattttatc

SEQ ID NO: 94728 - DNA, 25 bp, Probe sequence
ctcgagaatgatacttttaacccgc

SEQ ID NO: 94729 - DNA, 25 bp, Probe sequence
gaatgatacttttaacccgcaataa

SEQ ID NO: 94730 - DNA, 25 bp, Probe sequence
gagaatgatacttttaacccgcaat

SEQ ID NO: 94731 - DNA, 25 bp, Probe sequence
gatacttttaacccgcaataacact

SEQ ID NO: 94732 - DNA, 25 bp, Probe sequence
gattttacgtatcatttagtatgtt

SEQ ID NO: 94733 - DNA, 25 bp, Probe sequence
gttagcaactcgagaatgatacttt

SEQ ID NO: 94734 - DNA, 25 bp, Probe sequence
gttatttattttatcatgactaagt

SEQ ID NO: 94735 - DNA, 25 bp, Probe sequence
taacccgcaataacactaaaatagc

SEQ ID NO: 94736 - DNA, 25 bp, Probe sequence
atagttcaagtgtcatatcactcaa

SEQ ID NO: 94737 - DNA, 25 bp, Probe sequence
actcaattaacgaagtgttgcactc

SEQ ID NO: 94738 - DNA, 25 bp, Probe sequence
aacattcctcacatatcataacact

SEQ ID NO: 94739 - DNA, 25 bp, Probe sequence
aactgtattatttagctattattta

SEQ ID NO: 94740 - DNA, 25 bp, Probe sequence
aaccgactcaacaaataactgtatt

SEQ ID NO: 94741 - DNA, 25 bp, Probe sequence
cactttctatttaaccgactcaaca

SEQ ID NO: 94742 - DNA, 25 bp, Probe sequence
gcactcaaattgacaaatcagcatg

SEQ ID NO: 94743 - DNA, 25 bp, Probe sequence
gaagtgttgcactcaaattgacaaa

SEQ ID NO: 94744 - DNA, 25 bp, Probe sequence
gtacctagtcttaaacattcctcac

SEQ ID NO: 94745 - DNA, 25 bp, Probe sequence
gtgtcatatcactcaattaacgaag

SEQ ID NO: 94746 - DNA, 25 bp, Probe sequence
tcctcacatatcataacactttcta

SEQ ID NO: 94747 - DNA, 25 bp, Probe sequence
tcacccctcattttttagtacctag

SEQ ID NO: 94748 - DNA, 25 bp, Probe sequence
taacactttctatttaaccgactca

SEQ ID NO: 94749 - DNA, 25 bp, Probe sequence
taccactttacatttaaatagttca

SEQ ID NO: 94750 - DNA, 25 bp, Probe sequence
tagtcttaaacattcctcacatatc

SEQ ID NO: 94751 - DNA, 25 bp, Probe sequence
attgatttctgcgtctttatcttga

SEQ ID NO: 94752 - DNA, 25 bp, Probe sequence
atgaccagtcaaccactgcgtcaat

SEQ ID NO: 94753 - DNA, 25 bp, Probe sequence
atgagctttagctcaggtgtacctc

SEQ ID NO: 94754 - DNA, 25 bp, Probe sequence
ccactgcgtcaatgagctttagctc

SEQ ID NO: 94755 - DNA, 25 bp, Probe sequence
gactaggtcagacaattctccattg

SEQ ID NO: 94756 - DNA, 25 bp, Probe sequence
gagaaattctggaaccttatctagg

SEQ ID NO: 94757 - DNA, 25 bp, Probe sequence
gttcctctaatcttcttatcaattt

SEQ ID NO: 94758 - DNA, 25 bp, Probe sequence
tgagctttagctcaagcgttcctct

SEQ ID NO: 94759 - DNA, 25 bp, Probe sequence
ttcccccgcaaagttgactaggtca

SEQ ID NO: 94760 - DNA, 25 bp, Probe sequence
tctgcgtctttatcttgagctttag

SEQ ID NO: 94761 - DNA, 25 bp, Probe sequence
tctaggttgcttagaatttcccccg

SEQ ID NO: 94762 - DNA, 25 bp, Probe sequence
tcaagcgttcctctaatcttcttat

SEQ ID NO: 94763 - DNA, 25 bp, Probe sequence
tactgcgtctttatcttgagcttta

SEQ ID NO: 94764 - DNA, 25 bp, Probe sequence
ttctccattggatgaccagtcaacc

SEQ ID NO: 94765 - DNA, 25 bp, Probe sequence
ttgagctttagctcaggcgtacctc

SEQ ID NO: 94766 - DNA, 25 bp, Probe sequence
atgtgttgctcttgaatcatcttta

SEQ ID NO: 94767 - DNA, 25 bp, Probe sequence
actgacgacccagatgtaagattta

SEQ ID NO: 94768 - DNA, 25 bp, Probe sequence
aaaactgagtcgacaatactgacga

SEQ ID NO: 94769 - DNA, 25 bp, Probe sequence
aatactgacgacccagatgtaagat

SEQ ID NO: 94770 - DNA, 25 bp, Probe sequence
gctcttgaatcatctttaattttac

SEQ ID NO: 94771 - DNA, 25 bp, Probe sequence
gacaatactgacgacccagatgtaa

SEQ ID NO: 94772 - DNA, 25 bp, Probe sequence
gagtcgacaatactgacgacccaga

SEQ ID NO: 94773 - DNA, 25 bp, Probe sequence
gttgctcttgaatcatctttaattt

SEQ ID NO: 94774 - DNA, 25 bp, Probe sequence
gtgttgctcttgaatcatctttaat

SEQ ID NO: 94775 - DNA, 25 bp, Probe sequence
tcctttatgtgttgctcttgaatca

SEQ ID NO: 94776 - DNA, 25 bp, Probe sequence
tcgacaatactgacgacccagatgt

SEQ ID NO: 94777 - DNA, 25 bp, Probe sequence
tctcctttatgtgttgctcttgaat

SEQ ID NO: 94778 - DNA, 25 bp, Probe sequence
tatctcctttatgtgttgctcttga

SEQ ID NO: 94779 - DNA, 25 bp, Probe sequence
ttatgtgttgctcttgaatcatctt

SEQ ID NO: 94780 - DNA, 25 bp, Probe sequence
ttgaatcatctttaattttacgtta

SEQ ID NO: 94781 - DNA, 25 bp, Probe sequence
atgcaccccataaagttatattctt

SEQ ID NO: 94782 - DNA, 25 bp, Probe sequence
aaaattcatagtagccttcaccacc

SEQ ID NO: 94783 - DNA, 25 bp, Probe sequence
aacctcatgttctagcaaatccgca

SEQ ID NO: 94784 - DNA, 25 bp, Probe sequence
gccttcaccacctacgtgttaagtt

SEQ ID NO: 94785 - DNA, 25 bp, Probe sequence
gcacatgttccaccaatataactta

SEQ ID NO: 94786 - DNA, 25 bp, Probe sequence
gttctagcaaatccgcaatttcagt

SEQ ID NO: 94787 - DNA, 25 bp, Probe sequence
gtaaggacatgaatggtaccacttc

SEQ ID NO: 94788 - DNA, 25 bp, Probe sequence
gtgttaagttaatttatctcgtaag

SEQ ID NO: 94789 - DNA, 25 bp, Probe sequence
tgtatctaaaaatatgcaccccata

SEQ ID NO: 94790 - DNA, 25 bp, Probe sequence
tgaatggtaccacttctaacgcaca

SEQ ID NO: 94791 - DNA, 25 bp, Probe sequence
tcgggatgcacatctcattgcaaca

SEQ ID NO: 94792 - DNA, 25 bp, Probe sequence
taaaatctcctttaagtcatgtttt

SEQ ID NO: 94793 - DNA, 25 bp, Probe sequence
tattctttagtataactttcgggat

SEQ ID NO: 94794 - DNA, 25 bp, Probe sequence
ttagcaacaataacctcatgttcta

SEQ ID NO: 94795 - DNA, 25 bp, Probe sequence
ttctaacgcacatgttccaccaata

SEQ ID NO: 94796 - DNA, 25 bp, Probe sequence
attacctccaactctatgctttgaa

SEQ ID NO: 94797 - DNA, 25 bp, Probe sequence
attatggtacccaatacgttctata

SEQ ID NO: 94798 - DNA, 25 bp, Probe sequence
atattcccaacgtatcattgagtaa

SEQ ID NO: 94799 - DNA, 25 bp, Probe sequence
atacgttctatattactaacatgtg

SEQ ID NO: 94800 - DNA, 25 bp, Probe sequence
atcattgagtaataactgtcagtgt

SEQ ID NO: 94801 - DNA, 25 bp, Probe sequence
acctccaactctatgctttgaacac

SEQ ID NO: 94802 - DNA, 25 bp, Probe sequence
actgtcagtgtaaacgagttattct

SEQ ID NO: 94803 - DNA, 25 bp, Probe sequence
actaacatgtgatattcccaacgta

SEQ ID NO: 94804 - DNA, 25 bp, Probe sequence
aaagggcaccattatggtacccaat

SEQ ID NO: 94805 - DNA, 25 bp, Probe sequence
aactctatgctttgaacacttctat

SEQ ID NO: 94806 - DNA, 25 bp, Probe sequence
ctattacctccaactctatgctttg

SEQ ID NO: 94807 - DNA, 25 bp, Probe sequence
gctttgaacacttctattttaattg

SEQ ID NO: 94808 - DNA, 25 bp, Probe sequence
gcaccattatggtacccaatacgtt

SEQ ID NO: 94809 - DNA, 25 bp, Probe sequence
gtaaacgagttattcttattgttag

SEQ ID NO: 94810 - DNA, 25 bp, Probe sequence
ggtacccaatacgttctatattact

SEQ ID NO: 94811 - DNA, 25 bp, Probe sequence
acactcagaatatgttagcacaata

SEQ ID NO: 94812 - DNA, 25 bp, Probe sequence
cctatgttcttgcctcgacaaatat

SEQ ID NO: 94813 - DNA, 25 bp, Probe sequence
gcctcgacaaatatatagcagcgga

SEQ ID NO: 94814 - DNA, 25 bp, Probe sequence
gcagcggatcatagtgatttttgtg

SEQ ID NO: 94815 - DNA, 25 bp, Probe sequence
gatcatagtgatttttgtgtttcca

SEQ ID NO: 94816 - DNA, 25 bp, Probe sequence
gatttttgtgtttccacactcagaa

SEQ ID NO: 94817 - DNA, 25 bp, Probe sequence
gttcttgcctcgacaaatatatagc

SEQ ID NO: 94818 - DNA, 25 bp, Probe sequence
gtttccacactcagaatatgttagc

SEQ ID NO: 94819 - DNA, 25 bp, Probe sequence
gtgatttttgtgtttccacactcag

SEQ ID NO: 94820 - DNA, 25 bp, Probe sequence
gtgtttccacactcagaatatgtta

SEQ ID NO: 94821 - DNA, 25 bp, Probe sequence
tccacactcagaatatgttagcaca

SEQ ID NO: 94822 - DNA, 25 bp, Probe sequence
tcgacaaatatatagcagcggatca

SEQ ID NO: 94823 - DNA, 25 bp, Probe sequence
tatgttcttgcctcgacaaatatat

SEQ ID NO: 94824 - DNA, 25 bp, Probe sequence
tatatagcagcggatcatagtgatt

SEQ ID NO: 94825 - DNA, 25 bp, Probe sequence
ttttgtgtttccacactcagaatat

SEQ ID NO: 94826 - DNA, 25 bp, Probe sequence
ataaatctactaagtccttttcaat

SEQ ID NO: 94827 - DNA, 25 bp, Probe sequence
actaagtccttttcaatggcactta

SEQ ID NO: 94828 - DNA, 25 bp, Probe sequence
aaatctactaagtccttttcaatgg

SEQ ID NO: 94829 - DNA, 25 bp, Probe sequence
aagtccttttcaatggcacttagta

SEQ ID NO: 94830 - DNA, 25 bp, Probe sequence
aatctactaagtccttttcaatggc

SEQ ID NO: 94831 - DNA, 25 bp, Probe sequence
ctactaagtccttttcaatggcact

SEQ ID NO: 94832 - DNA, 25 bp, Probe sequence
gtagatttttgtttatataagcatt

SEQ ID NO: 94833 - DNA, 25 bp, Probe sequence
gtccttttcaatggcacttagtaga

SEQ ID NO: 94834 - DNA, 25 bp, Probe sequence
tgttgctacgcatatatttaataaa

SEQ ID NO: 94835 - DNA, 25 bp, Probe sequence
tccttttcaatggcacttagtagat

SEQ ID NO: 94836 - DNA, 25 bp, Probe sequence
tctactaagtccttttcaatggcac

SEQ ID NO: 94837 - DNA, 25 bp, Probe sequence
taataaatctactaagtccttttca

SEQ ID NO: 94838 - DNA, 25 bp, Probe sequence
tactaagtccttttcaatggcactt

SEQ ID NO: 94839 - DNA, 25 bp, Probe sequence
tttcaatggcacttagtagattttt

SEQ ID NO: 94840 - DNA, 25 bp, Probe sequence
ttgctacgcatatatttaataaatc

SEQ ID NO: 94841 - DNA, 25 bp, Probe sequence
atcagtatgacatttttattattca

SEQ ID NO: 94842 - DNA, 25 bp, Probe sequence
atgataaggtatctgttccacagtc

SEQ ID NO: 94843 - DNA, 25 bp, Probe sequence
aagtgacattcatctttatcagtat

SEQ ID NO: 94844 - DNA, 25 bp, Probe sequence
gtcacacttcttaacaatgctttag

SEQ ID NO: 94845 - DNA, 25 bp, Probe sequence
gtgattatttcaagttttctacaat

SEQ ID NO: 94846 - DNA, 25 bp, Probe sequence
tcgtcaattcttttctcattattaa

SEQ ID NO: 94847 - DNA, 25 bp, Probe sequence
tcatttgttaaatctaagttactta

SEQ ID NO: 94848 - DNA, 25 bp, Probe sequence
tcatcttcgtctttacctatcaaga

SEQ ID NO: 94849 - DNA, 25 bp, Probe sequence
tcaagaacctcattaactttagttt

SEQ ID NO: 94850 - DNA, 25 bp, Probe sequence
tcaattcaccttactttcgtcaatt

SEQ ID NO: 94851 - DNA, 25 bp, Probe sequence
tatctgttccacagtcatcttcgtc

SEQ ID NO: 94852 - DNA, 25 bp, Probe sequence
ttattttaacattgtcacacttctt

SEQ ID NO: 94853 - DNA, 25 bp, Probe sequence
ttacctatcaagaacctcattaact

SEQ ID NO: 94854 - DNA, 25 bp, Probe sequence
ttactttcgtcaattcttttctcat

SEQ ID NO: 94855 - DNA, 25 bp, Probe sequence
ttcaccttactttcgtcaattcttt

SEQ ID NO: 94856 - DNA, 25 bp, Probe sequence
atgtaagcgctattgtaaacttaaa

SEQ ID NO: 94857 - DNA, 25 bp, Probe sequence
agcgctattgtaaacttaaatgcta

SEQ ID NO: 94858 - DNA, 25 bp, Probe sequence
acttaaatgctacttttttatcatt

SEQ ID NO: 94859 - DNA, 25 bp, Probe sequence
aaaaatgtaagcgctattgtaaact

SEQ ID NO: 94860 - DNA, 25 bp, Probe sequence
aacttaaatgctacttttttatcat

SEQ ID NO: 94861 - DNA, 25 bp, Probe sequence
aatgctacttttttatcatttaatt

SEQ ID NO: 94862 - DNA, 25 bp, Probe sequence
catcctcctgttacttaggttaagt

SEQ ID NO: 94863 - DNA, 25 bp, Probe sequence
ccatcctcctgttacttaggttaag

SEQ ID NO: 94864 - DNA, 25 bp, Probe sequence
gcgctattgtaaacttaaatgctac

SEQ ID NO: 94865 - DNA, 25 bp, Probe sequence
gctacttttttatcatttaattgaa

SEQ ID NO: 94866 - DNA, 25 bp, Probe sequence
tgctacttttttatcatttaattga

SEQ ID NO: 94867 - DNA, 25 bp, Probe sequence
tccatcctcctgttacttaggttaa

SEQ ID NO: 94868 - DNA, 25 bp, Probe sequence
tattgtaaacttaaatgctactttt

SEQ ID NO: 94869 - DNA, 25 bp, Probe sequence
ttatcatttaattgaattttacgat

SEQ ID NO: 94870 - DNA, 25 bp, Probe sequence
ttccatcctcctgttacttaggtta

SEQ ID NO: 94871 - DNA, 25 bp, Probe sequence
atagccatttatatcatcttttaac

SEQ ID NO: 94872 - DNA, 25 bp, Probe sequence
ataaagtatggaatgggctatagcc

SEQ ID NO: 94873 - DNA, 25 bp, Probe sequence
atgggctatagccatttatatcatc

SEQ ID NO: 94874 - DNA, 25 bp, Probe sequence
atggaatgggctatagccatttata

SEQ ID NO: 94875 - DNA, 25 bp, Probe sequence
aaagtatggaatgggctatagccat

SEQ ID NO: 94876 - DNA, 25 bp, Probe sequence
ctatagccatttatatcatctttta

SEQ ID NO: 94877 - DNA, 25 bp, Probe sequence
gctatagccatttatatcatctttt

SEQ ID NO: 94878 - DNA, 25 bp, Probe sequence
gaatgggctatagccatttatatca

SEQ ID NO: 94879 - DNA, 25 bp, Probe sequence
gtatggaatgggctatagccattta

SEQ ID NO: 94880 - DNA, 25 bp, Probe sequence
gggctatagccatttatatcatctt

SEQ ID NO: 94881 - DNA, 25 bp, Probe sequence
ggaatgggctatagccatttatatc

SEQ ID NO: 94882 - DNA, 25 bp, Probe sequence
ggctatagccatttatatcatcttt

SEQ ID NO: 94883 - DNA, 25 bp, Probe sequence
tgggctatagccatttatatcatct

SEQ ID NO: 94884 - DNA, 25 bp, Probe sequence
tagccatttatatcatcttttaact

SEQ ID NO: 94885 - DNA, 25 bp, Probe sequence
tatagccatttatatcatcttttaa

SEQ ID NO: 94886 - DNA, 25 bp, Probe sequence
attgtcgatgtaatgttattttaag

SEQ ID NO: 94887 - DNA, 25 bp, Probe sequence
atcaactcctttttgtaatcataca

SEQ ID NO: 94888 - DNA, 25 bp, Probe sequence
atcatattctatttttgttttacat

SEQ ID NO: 94889 - DNA, 25 bp, Probe sequence
aatcaactcctttttgtaatcatac

SEQ ID NO: 94890 - DNA, 25 bp, Probe sequence
aatacaaaaacattgtcgatgtaat

SEQ ID NO: 94891 - DNA, 25 bp, Probe sequence
aatttcaatttccaacatactttat

SEQ ID NO: 94892 - DNA, 25 bp, Probe sequence
catattctatttttgttttacattt

SEQ ID NO: 94893 - DNA, 25 bp, Probe sequence
gtaatcatacaaaatcatattctat

SEQ ID NO: 94894 - DNA, 25 bp, Probe sequence
gtcgatgtaatgttattttaaggag

SEQ ID NO: 94895 - DNA, 25 bp, Probe sequence
tctatttttgttttacatttctaat

SEQ ID NO: 94896 - DNA, 25 bp, Probe sequence
tcaactcctttttgtaatcatacaa

SEQ ID NO: 94897 - DNA, 25 bp, Probe sequence
taaatcaactcctttttgtaatcat

SEQ ID NO: 94898 - DNA, 25 bp, Probe sequence
tattctatttttgttttacatttct

SEQ ID NO: 94899 - DNA, 25 bp, Probe sequence
tttcaatttccaacatactttataa

SEQ ID NO: 94900 - DNA, 25 bp, Probe sequence
tttacatttctaatacaaaaacatt

SEQ ID NO: 94901 - DNA, 25 bp, Probe sequence
atcattttccctgtctattttttat

SEQ ID NO: 94902 - DNA, 25 bp, Probe sequence
atctaaacaaatcattttccctgtc

SEQ ID NO: 94903 - DNA, 25 bp, Probe sequence
acaaatcattttccctgtctatttt

SEQ ID NO: 94904 - DNA, 25 bp, Probe sequence
aaagaaatatgaagcaactcgttat

SEQ ID NO: 94905 - DNA, 25 bp, Probe sequence
aaacaaatcattttccctgtctatt

SEQ ID NO: 94906 - DNA, 25 bp, Probe sequence
cattttccctgtctattttttatag

SEQ ID NO: 94907 - DNA, 25 bp, Probe sequence
cccctcgctaatctaattactaaag

SEQ ID NO: 94908 - DNA, 25 bp, Probe sequence
gcttaattttgcttttgtcaacgtt

SEQ ID NO: 94909 - DNA, 25 bp, Probe sequence
gataaacgcttaattttgcttttgt

SEQ ID NO: 94910 - DNA, 25 bp, Probe sequence
tgcttttgtcaacgttttatatcta

SEQ ID NO: 94911 - DNA, 25 bp, Probe sequence
tccccctcgctaatctaattactaa

SEQ ID NO: 94912 - DNA, 25 bp, Probe sequence
taaacgcttaattttgcttttgtca

SEQ ID NO: 94913 - DNA, 25 bp, Probe sequence
tatgaagcaactcgttatttttagt

SEQ ID NO: 94914 - DNA, 25 bp, Probe sequence
ttgtcaacgttttatatctaaacaa

SEQ ID NO: 94915 - DNA, 25 bp, Probe sequence
ttccctgtctattttttatagattt

SEQ ID NO: 94916 - DNA, 25 bp, Probe sequence
attgtcatttatgtcttttaattat

SEQ ID NO: 94917 - DNA, 25 bp, Probe sequence
atattatccgcacttatttagatta

SEQ ID NO: 94918 - DNA, 25 bp, Probe sequence
ataagattcactaatgattctattt

SEQ ID NO: 94919 - DNA, 25 bp, Probe sequence
atgtcttttaattatgttgttatgt

SEQ ID NO: 94920 - DNA, 25 bp, Probe sequence
agattaatccattactatctttaaa

SEQ ID NO: 94921 - DNA, 25 bp, Probe sequence
aatcttaaaatgtctctagggaata

SEQ ID NO: 94922 - DNA, 25 bp, Probe sequence
ctccttttattgtcatttatgtctt

SEQ ID NO: 94923 - DNA, 25 bp, Probe sequence
gttgttatgtttatattatccgcac

SEQ ID NO: 94924 - DNA, 25 bp, Probe sequence
gttatgtttatattatccgcactta

SEQ ID NO: 94925 - DNA, 25 bp, Probe sequence
gtttatattatccgcacttatttag

SEQ ID NO: 94926 - DNA, 25 bp, Probe sequence
tccgcacttatttagattaatccat

SEQ ID NO: 94927 - DNA, 25 bp, Probe sequence
taacaatcttaaaatgtctctaggg

SEQ ID NO: 94928 - DNA, 25 bp, Probe sequence
tactccttttattgtcatttatgtc

SEQ ID NO: 94929 - DNA, 25 bp, Probe sequence
ttcactaatgattctatttaacaat

SEQ ID NO: 94930 - DNA, 25 bp, Probe sequence
ttctatactccttttattgtcattt

SEQ ID NO: 94931 - DNA, 25 bp, Probe sequence
atagccttgccatttattatttcat

SEQ ID NO: 94932 - DNA, 25 bp, Probe sequence
agaaagtcattacttactcgttgat

SEQ ID NO: 94933 - DNA, 25 bp, Probe sequence
actaggataagtattttccatttag

SEQ ID NO: 94934 - DNA, 25 bp, Probe sequence
acttattgcgtgttatttatttaga

SEQ ID NO: 94935 - DNA, 25 bp, Probe sequence
aagtctttattaatagccttgccat

SEQ ID NO: 94936 - DNA, 25 bp, Probe sequence
cattacttactcgttgatgacttaa

SEQ ID NO: 94937 - DNA, 25 bp, Probe sequence
cattctcttacatgttacatcaatc

SEQ ID NO: 94938 - DNA, 25 bp, Probe sequence
gaatagcatatctagtctttctaac

SEQ ID NO: 94939 - DNA, 25 bp, Probe sequence
gttacatcaatcaacttattgcgtg

SEQ ID NO: 94940 - DNA, 25 bp, Probe sequence
gtttatttaaaacattctcttacat

SEQ ID NO: 94941 - DNA, 25 bp, Probe sequence
gtagcatatacagcaaagggcttac

SEQ ID NO: 94942 - DNA, 25 bp, Probe sequence
gtcagaaatacgtaacaattccaaa

SEQ ID NO: 94943 - DNA, 25 bp, Probe sequence
gggcttacagtaatttgataatcaa

SEQ ID NO: 94944 - DNA, 25 bp, Probe sequence
tgccatttattatttcattgtcttt

SEQ ID NO: 94945 - DNA, 25 bp, Probe sequence
tacatttaccctccatcaataagaa

SEQ ID NO: 94946 - DNA, 25 bp, Probe sequence
attggtcgtaattatttatcgtgct

SEQ ID NO: 94947 - DNA, 25 bp, Probe sequence
attaattggtcgtaattatttatcg

SEQ ID NO: 94948 - DNA, 25 bp, Probe sequence
aattggtcgtaattatttatcgtgc

SEQ ID NO: 94949 - DNA, 25 bp, Probe sequence
cgtaattatttatcgtgctctgatt

SEQ ID NO: 94950 - DNA, 25 bp, Probe sequence
gtaattatttatcgtgctctgatta

SEQ ID NO: 94951 - DNA, 25 bp, Probe sequence
gtcgtaattatttatcgtgctctga

SEQ ID NO: 94952 - DNA, 25 bp, Probe sequence
ggtcgtaattatttatcgtgctctg

SEQ ID NO: 94953 - DNA, 25 bp, Probe sequence
tggtcgtaattatttatcgtgctct

SEQ ID NO: 94954 - DNA, 25 bp, Probe sequence
tcgtaattatttatcgtgctctgat

SEQ ID NO: 94955 - DNA, 25 bp, Probe sequence
taattggtcgtaattatttatcgtg

SEQ ID NO: 94956 - DNA, 25 bp, Probe sequence
ttaattggtcgtaattatttatcgt

SEQ ID NO: 94957 - DNA, 25 bp, Probe sequence
ttggtcgtaattatttatcgtgctc

SEQ ID NO: 94958 - DNA, 25 bp, Probe sequence
atcgtcacgactaggacattgaatt

SEQ ID NO: 94959 - DNA, 25 bp, Probe sequence
agttgactactgccaagataacatc

SEQ ID NO: 94960 - DNA, 25 bp, Probe sequence
actgccaagataacatcgtcacgac

SEQ ID NO: 94961 - DNA, 25 bp, Probe sequence
acatcgtcacgactaggacattgaa

SEQ ID NO: 94962 - DNA, 25 bp, Probe sequence
aacatcgtcacgactaggacattga

SEQ ID NO: 94963 - DNA, 25 bp, Probe sequence
aagataacatcgtcacgactaggac

SEQ ID NO: 94964 - DNA, 25 bp, Probe sequence
cattgaattatgtcccagactcatc

SEQ ID NO: 94965 - DNA, 25 bp, Probe sequence
ctactgccaagataacatcgtcacg

SEQ ID NO: 94966 - DNA, 25 bp, Probe sequence
ctgccaagataacatcgtcacgact

SEQ ID NO: 94967 - DNA, 25 bp, Probe sequence
gccaagataacatcgtcacgactag

SEQ ID NO: 94968 - DNA, 25 bp, Probe sequence
gactactgccaagataacatcgtca

SEQ ID NO: 94969 - DNA, 25 bp, Probe sequence
gataacatcgtcacgactaggacat

SEQ ID NO: 94970 - DNA, 25 bp, Probe sequence
gtcacgactaggacattgaattatg

SEQ ID NO: 94971 - DNA, 25 bp, Probe sequence
tgaattatgtcccagactcatcgac

SEQ ID NO: 94972 - DNA, 25 bp, Probe sequence
ttgactactgccaagataacatcgt

SEQ ID NO: 94973 - DNA, 25 bp, Probe sequence
attgcaccctttacacaatcacgtt

SEQ ID NO: 94974 - DNA, 25 bp, Probe sequence
attacctccatagcaaactattgta

SEQ ID NO: 94975 - DNA, 25 bp, Probe sequence
atataaatattgcaccctttacaca

SEQ ID NO: 94976 - DNA, 25 bp, Probe sequence
atatgtgtgtattggctttatagcc

SEQ ID NO: 94977 - DNA, 25 bp, Probe sequence
acctccatagcaaactattgtaaag

SEQ ID NO: 94978 - DNA, 25 bp, Probe sequence
accctttacacaatcacgtttgata

SEQ ID NO: 94979 - DNA, 25 bp, Probe sequence
acgtttgatatgtgtgtattggctt

SEQ ID NO: 94980 - DNA, 25 bp, Probe sequence
aatattgcaccctttacacaatcac

SEQ ID NO: 94981 - DNA, 25 bp, Probe sequence
cctattggttaattacctccatagc

SEQ ID NO: 94982 - DNA, 25 bp, Probe sequence
gcaccctttacacaatcacgtttga

SEQ ID NO: 94983 - DNA, 25 bp, Probe sequence
gtgtattggctttatagccgaaaat

SEQ ID NO: 94984 - DNA, 25 bp, Probe sequence
tggttaattacctccatagcaaact

SEQ ID NO: 94985 - DNA, 25 bp, Probe sequence
tcctcctattggttaattacctcca

SEQ ID NO: 94986 - DNA, 25 bp, Probe sequence
tataaattcctcctattggttaatt

SEQ ID NO: 94987 - DNA, 25 bp, Probe sequence
ttaattacctccatagcaaactatt

SEQ ID NO: 94988 - DNA, 25 bp, Probe sequence
agcaacattaaaggtgtcttcttcc

SEQ ID NO: 94989 - DNA, 25 bp, Probe sequence
acattaaaggtgtcttcttccttgt

SEQ ID NO: 94990 - DNA, 25 bp, Probe sequence
aaagcaacattaaaggtgtcttctt

SEQ ID NO: 94991 - DNA, 25 bp, Probe sequence
aacattaaaggtgtcttcttccttg

SEQ ID NO: 94992 - DNA, 25 bp, Probe sequence
cagttgtcgttttattagaatgatt

SEQ ID NO: 94993 - DNA, 25 bp, Probe sequence
cattaaaggtgtcttcttccttgtt

SEQ ID NO: 94994 - DNA, 25 bp, Probe sequence
cttccttgttttactttatgacaga

SEQ ID NO: 94995 - DNA, 25 bp, Probe sequence
gcaacattaaaggtgtcttcttcct

SEQ ID NO: 94996 - DNA, 25 bp, Probe sequence
gatttacattttaataaagcaacat

SEQ ID NO: 94997 - DNA, 25 bp, Probe sequence
gtcttcttccttgttttactttatg

SEQ ID NO: 94998 - DNA, 25 bp, Probe sequence
gtcgttttattagaatgatttacat

SEQ ID NO: 94999 - DNA, 25 bp, Probe sequence
tgtcttcttccttgttttactttat

SEQ ID NO: 95000 - DNA, 25 bp, Probe sequence
tcttcttccttgttttactttatga

SEQ ID NO: 95001 - DNA, 25 bp, Probe sequence
tcttccttgttttactttatgacag

SEQ ID NO: 95002 - DNA, 25 bp, Probe sequence
ttcttccttgttttactttatgaca

SEQ ID NO: 95003 - DNA, 25 bp, Probe sequence
acatgcccattttaaatgttacatt

SEQ ID NO: 95004 - DNA, 25 bp, Probe sequence
aaaactgtaccaaagtctgactcgg

SEQ ID NO: 95005 - DNA, 25 bp, Probe sequence
aacaccatttttatgctcattgtga

SEQ ID NO: 95006 - DNA, 25 bp, Probe sequence
gcaatatacctaatgcctattattt

SEQ ID NO: 95007 - DNA, 25 bp, Probe sequence
gaatttaaattatcacatgcatctt

SEQ ID NO: 95008 - DNA, 25 bp, Probe sequence
gactcggtacagtttacaccagaaa

SEQ ID NO: 95009 - DNA, 25 bp, Probe sequence
gttacattatcgtttaatactggca

SEQ ID NO: 95010 - DNA, 25 bp, Probe sequence
gtttacaccagaaatgtgacataca

SEQ ID NO: 95011 - DNA, 25 bp, Probe sequence
gtctgactcggtacagtttacacca

SEQ ID NO: 95012 - DNA, 25 bp, Probe sequence
tgtgacatacatactgaggttaaaa

SEQ ID NO: 95013 - DNA, 25 bp, Probe sequence
tgatttaattaaacatgcccatttt

SEQ ID NO: 95014 - DNA, 25 bp, Probe sequence
tcattatcattttatcatactcatt

SEQ ID NO: 95015 - DNA, 25 bp, Probe sequence
taatactggcattttaatatgtcat

SEQ ID NO: 95016 - DNA, 25 bp, Probe sequence
tatcatactcatttaatgcattgaa

SEQ ID NO: 95017 - DNA, 25 bp, Probe sequence
ttatcacatgcatctttgatttaat

SEQ ID NO: 95018 - DNA, 25 bp, Probe sequence
attaaattatctcagcaactcctct

SEQ ID NO: 95019 - DNA, 25 bp, Probe sequence
actcctctttacgtttattgatttg

SEQ ID NO: 95020 - DNA, 25 bp, Probe sequence
aaatcacaaaatataacgtctaatt

SEQ ID NO: 95021 - DNA, 25 bp, Probe sequence
cacctcgattgtttataaatttctt

SEQ ID NO: 95022 - DNA, 25 bp, Probe sequence
gcaactcctctttacgtttattgat

SEQ ID NO: 95023 - DNA, 25 bp, Probe sequence
gttaatattgcgtataattttcaaa

SEQ ID NO: 95024 - DNA, 25 bp, Probe sequence
gtctaattttcaaagttaatattgc

SEQ ID NO: 95025 - DNA, 25 bp, Probe sequence
ggagttctgagattcattaaattat

SEQ ID NO: 95026 - DNA, 25 bp, Probe sequence
tgctgtatacgtaacataagtcatt

SEQ ID NO: 95027 - DNA, 25 bp, Probe sequence
tcgctacacctcgattgtttataaa

SEQ ID NO: 95028 - DNA, 25 bp, Probe sequence
tcagcaactcctctttacgtttatt

SEQ ID NO: 95029 - DNA, 25 bp, Probe sequence
taaaattgattgctgtatacgtaac

SEQ ID NO: 95030 - DNA, 25 bp, Probe sequence
taaattatctcagcaactcctcttt

SEQ ID NO: 95031 - DNA, 25 bp, Probe sequence
tacgtttattgatttgttctcagca

SEQ ID NO: 95032 - DNA, 25 bp, Probe sequence
ttcaaaaggagttctgagattcatt

SEQ ID NO: 95033 - DNA, 25 bp, Probe sequence
atttggctaatcataatattgttaa

SEQ ID NO: 95034 - DNA, 25 bp, Probe sequence
actcttataattcattcgatcttaa

SEQ ID NO: 95035 - DNA, 25 bp, Probe sequence
aatgctttatatttggctaatcata

SEQ ID NO: 95036 - DNA, 25 bp, Probe sequence
aattatactatgtcttcagtcattt

SEQ ID NO: 95037 - DNA, 25 bp, Probe sequence
ctatgtcttcagtcatttttcatcg

SEQ ID NO: 95038 - DNA, 25 bp, Probe sequence
gctttttcctactcttataattcat

SEQ ID NO: 95039 - DNA, 25 bp, Probe sequence
gcatcagatttctttcagctttttc

SEQ ID NO: 95040 - DNA, 25 bp, Probe sequence
gacaattaccaccttaaatagaaat

SEQ ID NO: 95041 - DNA, 25 bp, Probe sequence
gagcaggacataagcatcagatttc

SEQ ID NO: 95042 - DNA, 25 bp, Probe sequence
gtcatttttcatcgaataatcatta

SEQ ID NO: 95043 - DNA, 25 bp, Probe sequence
gtcttcagtcatttttcatcgaata

SEQ ID NO: 95044 - DNA, 25 bp, Probe sequence
tcagctttttcctactcttataatt

SEQ ID NO: 95045 - DNA, 25 bp, Probe sequence
tcagatttctttcagctttttccta

SEQ ID NO: 95046 - DNA, 25 bp, Probe sequence
tttcctactcttataattcattcga

SEQ ID NO: 95047 - DNA, 25 bp, Probe sequence
ttacttttacgtgttcgaacaatat

SEQ ID NO: 95048 - DNA, 25 bp, Probe sequence
atgcttgaaacaaatgacttcacta

SEQ ID NO: 95049 - DNA, 25 bp, Probe sequence
aaaagagcgggaatctcccactctt

SEQ ID NO: 95050 - DNA, 25 bp, Probe sequence
aagtttgttcatttatttcaccatt

SEQ ID NO: 95051 - DNA, 25 bp, Probe sequence
cactcttctgcctgagttcactaat

SEQ ID NO: 95052 - DNA, 25 bp, Probe sequence
caggcctccctttttggcaaataga

SEQ ID NO: 95053 - DNA, 25 bp, Probe sequence
gcctgagttcactaatttttaagca

SEQ ID NO: 95054 - DNA, 25 bp, Probe sequence
gcataattttatgtccagcaccaat

SEQ ID NO: 95055 - DNA, 25 bp, Probe sequence
gaatagactcgtaagacgttgaaaa

SEQ ID NO: 95056 - DNA, 25 bp, Probe sequence
gacttcactattaatcagagattct

SEQ ID NO: 95057 - DNA, 25 bp, Probe sequence
gagattcttgtaaaagtttgttcat

SEQ ID NO: 95058 - DNA, 25 bp, Probe sequence
gttcatttatttcaccattacattc

SEQ ID NO: 95059 - DNA, 25 bp, Probe sequence
gtccagcaccaattttgtatttctt

SEQ ID NO: 95060 - DNA, 25 bp, Probe sequence
tcaccattacattcgaatagactcg

SEQ ID NO: 95061 - DNA, 25 bp, Probe sequence
taactacgccatacgcattaaataa

SEQ ID NO: 95062 - DNA, 25 bp, Probe sequence
tatttctttaactacgccatacgca

SEQ ID NO: 95063 - DNA, 25 bp, Probe sequence
atgctccctataaagtagacactta

SEQ ID NO: 95064 - DNA, 25 bp, Probe sequence
actatacttttagcttgtaatttat

SEQ ID NO: 95065 - DNA, 25 bp, Probe sequence
acaattattttagctcacacgttat

SEQ ID NO: 95066 - DNA, 25 bp, Probe sequence
aaattttccaataatagtcgacatt

SEQ ID NO: 95067 - DNA, 25 bp, Probe sequence
aatcatgtccatataacgtaacttt

SEQ ID NO: 95068 - DNA, 25 bp, Probe sequence
aatcattctaggccaccacaaaatt

SEQ ID NO: 95069 - DNA, 25 bp, Probe sequence
caatcttaactatacttttagcttg

SEQ ID NO: 95070 - DNA, 25 bp, Probe sequence
ccgtaagataggcatttcaacagaa

SEQ ID NO: 95071 - DNA, 25 bp, Probe sequence
gctagtatcaaatatgctccctata

SEQ ID NO: 95072 - DNA, 25 bp, Probe sequence
gtgtaacaatgcttaaacaattatt

SEQ ID NO: 95073 - DNA, 25 bp, Probe sequence
gggagcatatcaatcttaactatac

SEQ ID NO: 95074 - DNA, 25 bp, Probe sequence
tctaggccaccacaaaattttatac

SEQ ID NO: 95075 - DNA, 25 bp, Probe sequence
taaaaatcattctaggccaccacaa

SEQ ID NO: 95076 - DNA, 25 bp, Probe sequence
tagtcgacattatattttgtcatta

SEQ ID NO: 95077 - DNA, 25 bp, Probe sequence
ttagctcacacgttattttaataaa

SEQ ID NO: 95078 - DNA, 25 bp, Probe sequence
attatcaaacattttccagatacct

SEQ ID NO: 95079 - DNA, 25 bp, Probe sequence
attttaatagcgtatcaactgaatt

SEQ ID NO: 95080 - DNA, 25 bp, Probe sequence
atttctacacatctatgtattaact

SEQ ID NO: 95081 - DNA, 25 bp, Probe sequence
atatattttaatagcgtatcaactg

SEQ ID NO: 95082 - DNA, 25 bp, Probe sequence
acattttccagatacctaacactaa

SEQ ID NO: 95083 - DNA, 25 bp, Probe sequence
acacatctatgtattaactgtttaa

SEQ ID NO: 95084 - DNA, 25 bp, Probe sequence
aacattttccagatacctaacacta

SEQ ID NO: 95085 - DNA, 25 bp, Probe sequence
aaacattttccagatacctaacact

SEQ ID NO: 95086 - DNA, 25 bp, Probe sequence
aactatttctacacatctatgtatt

SEQ ID NO: 95087 - DNA, 25 bp, Probe sequence
cattttccagatacctaacactaaa

SEQ ID NO: 95088 - DNA, 25 bp, Probe sequence
gttaactatttctacacatctatgt

SEQ ID NO: 95089 - DNA, 25 bp, Probe sequence
ggaaaatgttaactatttctacaca

SEQ ID NO: 95090 - DNA, 25 bp, Probe sequence
tgtttaatgttaatataccgatatt

SEQ ID NO: 95091 - DNA, 25 bp, Probe sequence
tcaaacattttccagatacctaaca

SEQ ID NO: 95092 - DNA, 25 bp, Probe sequence
tagcgtatcaactgaatttattcat

SEQ ID NO: 95093 - DNA, 25 bp, Probe sequence
atcaatttcctccttaaaatgtttg

SEQ ID NO: 95094 - DNA, 25 bp, Probe sequence
aaaaggtgtggtatagattgtttat

SEQ ID NO: 95095 - DNA, 25 bp, Probe sequence
aatccgagttaggcgttggagattc

SEQ ID NO: 95096 - DNA, 25 bp, Probe sequence
aatgtttgaatactccttaatccga

SEQ ID NO: 95097 - DNA, 25 bp, Probe sequence
gcgttggagattcgacctactaaga

SEQ ID NO: 95098 - DNA, 25 bp, Probe sequence
gaatactccttaatccgagttaggc

SEQ ID NO: 95099 - DNA, 25 bp, Probe sequence
gagttaggcgttggagattcgacct

SEQ ID NO: 95100 - DNA, 25 bp, Probe sequence
ggcgttggagattcgacctactaag

SEQ ID NO: 95101 - DNA, 25 bp, Probe sequence
gattgtttatataactatacgcaac

SEQ ID NO: 95102 - DNA, 25 bp, Probe sequence
gttggagattcgacctactaagaaa

SEQ ID NO: 95103 - DNA, 25 bp, Probe sequence
gtttgaatactccttaatccgagtt

SEQ ID NO: 95104 - DNA, 25 bp, Probe sequence
ggagattcgacctactaagaaaaag

SEQ ID NO: 95105 - DNA, 25 bp, Probe sequence
tccttaatccgagttaggcgttgga

SEQ ID NO: 95106 - DNA, 25 bp, Probe sequence
tcctccttaaaatgtttgaatactc

SEQ ID NO: 95107 - DNA, 25 bp, Probe sequence
tactccttaatccgagttaggcgtt

SEQ ID NO: 95108 - DNA, 25 bp, Probe sequence
atatcatatcatttattatcgtatt

SEQ ID NO: 95109 - DNA, 25 bp, Probe sequence
atatcttgattattactctaggtgt

SEQ ID NO: 95110 - DNA, 25 bp, Probe sequence
atcatctttatctcattgtaacctt

SEQ ID NO: 95111 - DNA, 25 bp, Probe sequence
atctcctctcttgaatctaatagtt

SEQ ID NO: 95112 - DNA, 25 bp, Probe sequence
actctaggtgtacttatatcatctt

SEQ ID NO: 95113 - DNA, 25 bp, Probe sequence
aagagagcgggatatccatctatta

SEQ ID NO: 95114 - DNA, 25 bp, Probe sequence
caaaatagacttatcgtcccaccct

SEQ ID NO: 95115 - DNA, 25 bp, Probe sequence
cgtcccacccttatcagtataaata

SEQ ID NO: 95116 - DNA, 25 bp, Probe sequence
gcgggatatccatctattatttaca

SEQ ID NO: 95117 - DNA, 25 bp, Probe sequence
gaacataaatatgccccaacctcaa

SEQ ID NO: 95118 - DNA, 25 bp, Probe sequence
ggtgtacttatatcatctttatctc

SEQ ID NO: 95119 - DNA, 25 bp, Probe sequence
tcattgtaaccttattattcactca

SEQ ID NO: 95120 - DNA, 25 bp, Probe sequence
tatgccccaacctcaaagacgttat

SEQ ID NO: 95121 - DNA, 25 bp, Probe sequence
tataaatctcctctcttgaatctaa

SEQ ID NO: 95122 - DNA, 25 bp, Probe sequence
tattcactcaatattagcttaacat

SEQ ID NO: 95123 - DNA, 25 bp, Probe sequence
atacaggataattaacagttgcact

SEQ ID NO: 95124 - DNA, 25 bp, Probe sequence
acattgtcgtcatatgactttaaat

SEQ ID NO: 95125 - DNA, 25 bp, Probe sequence
acaaattcaaaatggatcacttcgt

SEQ ID NO: 95126 - DNA, 25 bp, Probe sequence
aaacacttgatgtacactattaatc

SEQ ID NO: 95127 - DNA, 25 bp, Probe sequence
aaaatcacatgacgatacattgtcg

SEQ ID NO: 95128 - DNA, 25 bp, Probe sequence
aatcactatacatacaggataatta

SEQ ID NO: 95129 - DNA, 25 bp, Probe sequence
aattcaaaatggatcacttcgtaaa

SEQ ID NO: 95130 - DNA, 25 bp, Probe sequence
cactattaatcactatacatacagg

SEQ ID NO: 95131 - DNA, 25 bp, Probe sequence
cgatacattgtcgtcatatgacttt

SEQ ID NO: 95132 - DNA, 25 bp, Probe sequence
gcgttttaaaatgttcaatacaaca

SEQ ID NO: 95133 - DNA, 25 bp, Probe sequence
gataattaacagttgcactcaaaat

SEQ ID NO: 95134 - DNA, 25 bp, Probe sequence
gttgcactcaaaataataaagcgtt

SEQ ID NO: 95135 - DNA, 25 bp, Probe sequence
gttaaaaaacacttgatgtacacta

SEQ ID NO: 95136 - DNA, 25 bp, Probe sequence
gtacactattaatcactatacatac

SEQ ID NO: 95137 - DNA, 25 bp, Probe sequence
ggatcacttcgtaaaaaatggcata

SEQ ID NO: 95138 - DNA, 25 bp, Probe sequence
atttcggtgacttgttctgacctct

SEQ ID NO: 95139 - DNA, 25 bp, Probe sequence
atcatctatgtatcaatttacttaa

SEQ ID NO: 95140 - DNA, 25 bp, Probe sequence
agaacaatatcatctatgtatcaat

SEQ ID NO: 95141 - DNA, 25 bp, Probe sequence
acccctttcaattgaccatcataaa

SEQ ID NO: 95142 - DNA, 25 bp, Probe sequence
aaatataagtaaattgtccatgaca

SEQ ID NO: 95143 - DNA, 25 bp, Probe sequence
gaatatgtagtccaaacagacgatg

SEQ ID NO: 95144 - DNA, 25 bp, Probe sequence
gacaaccattatatttcggtgactt

SEQ ID NO: 95145 - DNA, 25 bp, Probe sequence
gacctcttttatgttaatgactttt

SEQ ID NO: 95146 - DNA, 25 bp, Probe sequence
gataacagattaatcgttacccctt

SEQ ID NO: 95147 - DNA, 25 bp, Probe sequence
gtccatgacaaccattatatttcgg

SEQ ID NO: 95148 - DNA, 25 bp, Probe sequence
tgttctgacctcttttatgttaatg

SEQ ID NO: 95149 - DNA, 25 bp, Probe sequence
tgacttgttctgacctcttttatgt

SEQ ID NO: 95150 - DNA, 25 bp, Probe sequence
tatgttgccttagttaaaacgacgt

SEQ ID NO: 95151 - DNA, 25 bp, Probe sequence
tatataatttcctatttgatgttta

SEQ ID NO: 95152 - DNA, 25 bp, Probe sequence
ttacccctttcaattgaccatcata

SEQ ID NO: 95153 - DNA, 25 bp, Probe sequence
atcaatcataaaaacatttgctcat

SEQ ID NO: 95154 - DNA, 25 bp, Probe sequence
atcataaaaacatttgctcataaaa

SEQ ID NO: 95155 - DNA, 25 bp, Probe sequence
acatttgctcataaaaatagttcta

SEQ ID NO: 95156 - DNA, 25 bp, Probe sequence
acatcaatcataaaaacatttgctc

SEQ ID NO: 95157 - DNA, 25 bp, Probe sequence
aaacatttgctcataaaaatagttc

SEQ ID NO: 95158 - DNA, 25 bp, Probe sequence
aacatcaatcataaaaacatttgct

SEQ ID NO: 95159 - DNA, 25 bp, Probe sequence
aacatttgctcataaaaatagttct

SEQ ID NO: 95160 - DNA, 25 bp, Probe sequence
aatcataaaaacatttgctcataaa

SEQ ID NO: 95161 - DNA, 25 bp, Probe sequence
caatcataaaaacatttgctcataa

SEQ ID NO: 95162 - DNA, 25 bp, Probe sequence
catcaatcataaaaacatttgctca

SEQ ID NO: 95163 - DNA, 25 bp, Probe sequence
catttgctcataaaaatagttctat

SEQ ID NO: 95164 - DNA, 25 bp, Probe sequence
tcataaaaacatttgctcataaaaa

SEQ ID NO: 95165 - DNA, 25 bp, Probe sequence
tcaatcataaaaacatttgctcata

SEQ ID NO: 95166 - DNA, 25 bp, Probe sequence
tttgctcataaaaatagttctatat

SEQ ID NO: 95167 - DNA, 25 bp, Probe sequence
ttgctcataaaaatagttctatatt

SEQ ID NO: 95168 - DNA, 25 bp, Probe sequence
atatcattataaacaattgcgtggc

SEQ ID NO: 95169 - DNA, 25 bp, Probe sequence
aattcacatcaattttagattcaat

SEQ ID NO: 95170 - DNA, 25 bp, Probe sequence
aattcttttttcatgtattccattt

SEQ ID NO: 95171 - DNA, 25 bp, Probe sequence
aattgcgtggctaatttctaaaatt

SEQ ID NO: 95172 - DNA, 25 bp, Probe sequence
catgtattccatttaaaaattcaca

SEQ ID NO: 95173 - DNA, 25 bp, Probe sequence
ttaattcttttttcatgtattccat

SEQ ID NO: 95174 - DNA, 25 bp, Probe sequence
gcgtggctaatttctaaaattggga

SEQ ID NO: 95175 - DNA, 25 bp, Probe sequence
gctacaacacatttgcctaaaaaat

SEQ ID NO: 95176 - DNA, 25 bp, Probe sequence
gatgctacaacacatttgcctaaaa

SEQ ID NO: 95177 - DNA, 25 bp, Probe sequence
gattaaaaaaactagattccatatg

SEQ ID NO: 95178 - DNA, 25 bp, Probe sequence
tcttttttcatgtattccatttaaa

SEQ ID NO: 95179 - DNA, 25 bp, Probe sequence
tcagatgctacaacacatttgccta

SEQ ID NO: 95180 - DNA, 25 bp, Probe sequence
taaacaattgcgtggctaatttcta

SEQ ID NO: 95181 - DNA, 25 bp, Probe sequence
tatcgtttaattcttttttcatgta

SEQ ID NO: 95182 - DNA, 25 bp, Probe sequence
ttagattcaatgtatcagatgctac

SEQ ID NO: 95183 - DNA, 25 bp, Probe sequence
attgctatcttttaattatcttatc

SEQ ID NO: 95184 - DNA, 25 bp, Probe sequence
atcttttaattatcttatcaatact

SEQ ID NO: 95185 - DNA, 25 bp, Probe sequence
agcgagacctcctaattgaaattgc

SEQ ID NO: 95186 - DNA, 25 bp, Probe sequence
aaacgtgcttatatttttatcgata

SEQ ID NO: 95187 - DNA, 25 bp, Probe sequence
aatacaagtgttttgcgaatatttg

SEQ ID NO: 95188 - DNA, 25 bp, Probe sequence
gcgagacctcctaattgaaattgct

SEQ ID NO: 95189 - DNA, 25 bp, Probe sequence
gctatcttttaattatcttatcaat

SEQ ID NO: 95190 - DNA, 25 bp, Probe sequence
gcaaaaacgaacaaacgtgcttata

SEQ ID NO: 95191 - DNA, 25 bp, Probe sequence
gaacaaacgtgcttatatttttatc

SEQ ID NO: 95192 - DNA, 25 bp, Probe sequence
gacctcctaattgaaattgctatct

SEQ ID NO: 95193 - DNA, 25 bp, Probe sequence
gagacctcctaattgaaattgctat

SEQ ID NO: 95194 - DNA, 25 bp, Probe sequence
gtgttttgcgaatatttgttcgtat

SEQ ID NO: 95195 - DNA, 25 bp, Probe sequence
ttatcttatcaatactatacaagga

SEQ ID NO: 95196 - DNA, 25 bp, Probe sequence
ttatcaatactatacaaggattcaa

SEQ ID NO: 95197 - DNA, 25 bp, Probe sequence
ttgttcgtataaaatcttgaaatca

SEQ ID NO: 95198 - DNA, 25 bp, Probe sequence
attttctaaagttttgaagctcgat

SEQ ID NO: 95199 - DNA, 25 bp, Probe sequence
atcaatttgcacttttgcactatat

SEQ ID NO: 95200 - DNA, 25 bp, Probe sequence
agtctcgatttgtagtgtatcccat

SEQ ID NO: 95201 - DNA, 25 bp, Probe sequence
aaaaccttatagtctcgatttgtag

SEQ ID NO: 95202 - DNA, 25 bp, Probe sequence
aaggatatttgctaagtttaactat

SEQ ID NO: 95203 - DNA, 25 bp, Probe sequence
gcacttttgcactatattgaatgct

SEQ ID NO: 95204 - DNA, 25 bp, Probe sequence
gaatatcactttcaatcaatcctat

SEQ ID NO: 95205 - DNA, 25 bp, Probe sequence
gaatgctatttctactattttctaa

SEQ ID NO: 95206 - DNA, 25 bp, Probe sequence
gaagctcgattataaaactattgat

SEQ ID NO: 95207 - DNA, 25 bp, Probe sequence
gatattattctagctttatgagatg

SEQ ID NO: 95208 - DNA, 25 bp, Probe sequence
gtgtcaagttatcaatttgcacttt

SEQ ID NO: 95209 - DNA, 25 bp, Probe sequence
gggtttgctctttatatgaaattca

SEQ ID NO: 95210 - DNA, 25 bp, Probe sequence
tccttttctagggtttgctctttat

SEQ ID NO: 95211 - DNA, 25 bp, Probe sequence
tcactttcaatcaatcctataagga

SEQ ID NO: 95212 - DNA, 25 bp, Probe sequence
ttgtagtgtatcccataaagttaga

SEQ ID NO: 95213 - DNA, 25 bp, Probe sequence
agtgctgtctaattagattgagact

SEQ ID NO: 95214 - DNA, 25 bp, Probe sequence
agatgtgttacatcttctcttcttt

SEQ ID NO: 95215 - DNA, 25 bp, Probe sequence
agcactcatctttataggtttacat

SEQ ID NO: 95216 - DNA, 25 bp, Probe sequence
acatcttctcttcttttttattggt

SEQ ID NO: 95217 - DNA, 25 bp, Probe sequence
aaatcctaattaatattgcagaaga

SEQ ID NO: 95218 - DNA, 25 bp, Probe sequence
aaaaaagctccctcactaatttgtg

SEQ ID NO: 95219 - DNA, 25 bp, Probe sequence
cactgtttactatagttattaccga

SEQ ID NO: 95220 - DNA, 25 bp, Probe sequence
tccgtcttactttcaaataaccact

SEQ ID NO: 95221 - DNA, 25 bp, Probe sequence
tcttctcttcttttttattggttag

SEQ ID NO: 95222 - DNA, 25 bp, Probe sequence
taatataaggtccgtcttactttca

SEQ ID NO: 95223 - DNA, 25 bp, Probe sequence
tacaacttaaaaaagctccctcact

SEQ ID NO: 95224 - DNA, 25 bp, Probe sequence
tactttcaaataaccactgtttact

SEQ ID NO: 95225 - DNA, 25 bp, Probe sequence
tagtaaatacgaagcctaaaacatt

SEQ ID NO: 95226 - DNA, 25 bp, Probe sequence
tattggttagaaaagcactcatctt

SEQ ID NO: 95227 - DNA, 25 bp, Probe sequence
ttattaccgataaagtgctgtctaa

SEQ ID NO: 95228 - DNA, 25 bp, Probe sequence
attcatacgttctaatatttaaagt

SEQ ID NO: 95229 - DNA, 25 bp, Probe sequence
atttttcttcaattatagagagaca

SEQ ID NO: 95230 - DNA, 25 bp, Probe sequence
atagagagacattactttgtctgaa

SEQ ID NO: 95231 - DNA, 25 bp, Probe sequence
actagtttaattcatacgttctaat

SEQ ID NO: 95232 - DNA, 25 bp, Probe sequence
acattactttgtctgaaaacttcaa

SEQ ID NO: 95233 - DNA, 25 bp, Probe sequence
aatactagtttaattcatacgttct

SEQ ID NO: 95234 - DNA, 25 bp, Probe sequence
gaattatttttcttcaattatagag

SEQ ID NO: 95235 - DNA, 25 bp, Probe sequence
gaaaacttcaatatgttagtattaa

SEQ ID NO: 95236 - DNA, 25 bp, Probe sequence
gttcatcctctcataaatactagtt

SEQ ID NO: 95237 - DNA, 25 bp, Probe sequence
gttttgttcatcctctcataaatac

SEQ ID NO: 95238 - DNA, 25 bp, Probe sequence
gtttaattcatacgttctaatattt

SEQ ID NO: 95239 - DNA, 25 bp, Probe sequence
tcatcctctcataaatactagttta

SEQ ID NO: 95240 - DNA, 25 bp, Probe sequence
ttttgttcatcctctcataaatact

SEQ ID NO: 95241 - DNA, 25 bp, Probe sequence
ttactttgtctgaaaacttcaatat

SEQ ID NO: 95242 - DNA, 25 bp, Probe sequence
ttgttcatcctctcataaatactag

SEQ ID NO: 95243 - DNA, 25 bp, Probe sequence
attcatactaatggacgatagggtc

SEQ ID NO: 95244 - DNA, 25 bp, Probe sequence
atagggtccaattcgaatgtttact

SEQ ID NO: 95245 - DNA, 25 bp, Probe sequence
accaccgatttactatgtaaacagt

SEQ ID NO: 95246 - DNA, 25 bp, Probe sequence
actatgtaaacagtggtactatatt

SEQ ID NO: 95247 - DNA, 25 bp, Probe sequence
aaacagtggtactatattaaattca

SEQ ID NO: 95248 - DNA, 25 bp, Probe sequence
caattcgaatgtttacttacgtaat

SEQ ID NO: 95249 - DNA, 25 bp, Probe sequence
gaaccaccgatttactatgtaaaca

SEQ ID NO: 95250 - DNA, 25 bp, Probe sequence
gacgatagggtccaattcgaatgtt

SEQ ID NO: 95251 - DNA, 25 bp, Probe sequence
gatagggtccaattcgaatgtttac

SEQ ID NO: 95252 - DNA, 25 bp, Probe sequence
tccaattcgaatgtttacttacgta

SEQ ID NO: 95253 - DNA, 25 bp, Probe sequence
gtccaattcgaatgtttacttacgt

SEQ ID NO: 95254 - DNA, 25 bp, Probe sequence
ggtccaattcgaatgtttacttacg

SEQ ID NO: 95255 - DNA, 25 bp, Probe sequence
ggtactatattaaattcatactaat

SEQ ID NO: 95256 - DNA, 25 bp, Probe sequence
tagggtccaattcgaatgtttactt

SEQ ID NO: 95257 - DNA, 25 bp, Probe sequence
tttactatgtaaacagtggtactat

SEQ ID NO: 95258 - DNA, 25 bp, Probe sequence
ataccatataatcacgaagcatctt

SEQ ID NO: 95259 - DNA, 25 bp, Probe sequence
aaaatgtgtcaatagcatgtttaga

SEQ ID NO: 95260 - DNA, 25 bp, Probe sequence
aacgcctcaaacctaataaaatgtg

SEQ ID NO: 95261 - DNA, 25 bp, Probe sequence
aacctattcataccatataatcacg

SEQ ID NO: 95262 - DNA, 25 bp, Probe sequence
aatcacgaagcatcttaaatgtata

SEQ ID NO: 95263 - DNA, 25 bp, Probe sequence
aatatattcgtttgtaagctttcta

SEQ ID NO: 95264 - DNA, 25 bp, Probe sequence
aattctaacattcaagacatttaat

SEQ ID NO: 95265 - DNA, 25 bp, Probe sequence
gaacaatgactctgtttgaaatcat

SEQ ID NO: 95266 - DNA, 25 bp, Probe sequence
gactctgtttgaaatcatatatcat

SEQ ID NO: 95267 - DNA, 25 bp, Probe sequence
tgtataagaaaacgcctcaaaccta

SEQ ID NO: 95268 - DNA, 25 bp, Probe sequence
tcgtttgtaagctttctaattatta

SEQ ID NO: 95269 - DNA, 25 bp, Probe sequence
taattaagtaagggcgttcaatatt

SEQ ID NO: 95270 - DNA, 25 bp, Probe sequence
tacttttacaaacctattcatacca

SEQ ID NO: 95271 - DNA, 25 bp, Probe sequence
tatacattttaacatacttactttt

SEQ ID NO: 95272 - DNA, 25 bp, Probe sequence
tttgtctttacaatatattcgtttg

SEQ ID NO: 95273 - DNA, 25 bp, Probe sequence
atcaatccgcactaatttatttatg

SEQ ID NO: 95274 - DNA, 25 bp, Probe sequence
agtttggctcgtagaaatctcccgt

SEQ ID NO: 95275 - DNA, 25 bp, Probe sequence
aaaactagaaatatcaatccgcact

SEQ ID NO: 95276 - DNA, 25 bp, Probe sequence
aagacaaagagattcctacactagc

SEQ ID NO: 95277 - DNA, 25 bp, Probe sequence
ctcccgtctctattctatgtattaa

SEQ ID NO: 95278 - DNA, 25 bp, Probe sequence
cgcactaatttatttatgacgccat

SEQ ID NO: 95279 - DNA, 25 bp, Probe sequence
gaaagcgttgtcaatggtttttgta

SEQ ID NO: 95280 - DNA, 25 bp, Probe sequence
gacattcttcagccatattttttat

SEQ ID NO: 95281 - DNA, 25 bp, Probe sequence
gatactatcgatatgaaagcgttgt

SEQ ID NO: 95282 - DNA, 25 bp, Probe sequence
gattcctacactagcagtttggctc

SEQ ID NO: 95283 - DNA, 25 bp, Probe sequence
gtttaattgacattcttcagccata

SEQ ID NO: 95284 - DNA, 25 bp, Probe sequence
gtctctattctatgtattaactttt

SEQ ID NO: 95285 - DNA, 25 bp, Probe sequence
taaatgtcctcccaaaaagacaaag

SEQ ID NO: 95286 - DNA, 25 bp, Probe sequence
tatgacgccattttgtttaattgac

SEQ ID NO: 95287 - DNA, 25 bp, Probe sequence
ttatatttgttatgatactatcgat

SEQ ID NO: 95288 - DNA, 25 bp, Probe sequence
atctctcgtttctcgattcaaatat

SEQ ID NO: 95289 - DNA, 25 bp, Probe sequence
atccttcaattgtacatgttcgaac

SEQ ID NO: 95290 - DNA, 25 bp, Probe sequence
atgttcgaacaaatctctcgtttct

SEQ ID NO: 95291 - DNA, 25 bp, Probe sequence
acaaatctctcgtttctcgattcaa

SEQ ID NO: 95292 - DNA, 25 bp, Probe sequence
aaatctctcgtttctcgattcaaat

SEQ ID NO: 95293 - DNA, 25 bp, Probe sequence
aacaatccttcaattgtacatgttc

SEQ ID NO: 95294 - DNA, 25 bp, Probe sequence
ctcgtttctcgattcaaatattaac

SEQ ID NO: 95295 - DNA, 25 bp, Probe sequence
ctctcgtttctcgattcaaatatta

SEQ ID NO: 95296 - DNA, 25 bp, Probe sequence
gaacaaatctctcgtttctcgattc

SEQ ID NO: 95297 - DNA, 25 bp, Probe sequence
gttcgaacaaatctctcgtttctcg

SEQ ID NO: 95298 - DNA, 25 bp, Probe sequence
gtttatacaaaagtctaatctacaa

SEQ ID NO: 95299 - DNA, 25 bp, Probe sequence
gtttctcgattcaaatattaactta

SEQ ID NO: 95300 - DNA, 25 bp, Probe sequence
gtacatgttcgaacaaatctctcgt

SEQ ID NO: 95301 - DNA, 25 bp, Probe sequence
tattaacttaaattgattgtatcac

SEQ ID NO: 95302 - DNA, 25 bp, Probe sequence
ttgattgtatcacaatgtttataca

SEQ ID NO: 95303 - DNA, 25 bp, Probe sequence
actgatgcccttaaaacaggacacc

SEQ ID NO: 95304 - DNA, 25 bp, Probe sequence
acaggacaccagtttatgattgtac

SEQ ID NO: 95305 - DNA, 25 bp, Probe sequence
aattgactaatgtatctcgtataaa

SEQ ID NO: 95306 - DNA, 25 bp, Probe sequence
caccagtttatgattgtacaaatta

SEQ ID NO: 95307 - DNA, 25 bp, Probe sequence
catctcacacctttaataacaacgt

SEQ ID NO: 95308 - DNA, 25 bp, Probe sequence
catacatttagtgatgcatagtttc

SEQ ID NO: 95309 - DNA, 25 bp, Probe sequence
ctcgtataaaaaaactgatgccctt

SEQ ID NO: 95310 - DNA, 25 bp, Probe sequence
gatgcccttaaaacaggacaccagt

SEQ ID NO: 95311 - DNA, 25 bp, Probe sequence
gtttcaattgactaatgtatctcgt

SEQ ID NO: 95312 - DNA, 25 bp, Probe sequence
ggacaccagtttatgattgtacaaa

SEQ ID NO: 95313 - DNA, 25 bp, Probe sequence
tgcccttaaaacaggacaccagttt

SEQ ID NO: 95314 - DNA, 25 bp, Probe sequence
tcgcttttattattatcatacattt

SEQ ID NO: 95315 - DNA, 25 bp, Probe sequence
tctcacacctttaataacaacgttt

SEQ ID NO: 95316 - DNA, 25 bp, Probe sequence
taataacaacgtttttatattcgct

SEQ ID NO: 95317 - DNA, 25 bp, Probe sequence
tagtgatgcatagtttcaattgact

SEQ ID NO: 95318 - DNA, 25 bp, Probe sequence
attcctctattgtatcttgtcattt

SEQ ID NO: 95319 - DNA, 25 bp, Probe sequence
atctatttatcatacttcaaacgtt

SEQ ID NO: 95320 - DNA, 25 bp, Probe sequence
acgcttcatataaagtcgtatcata

SEQ ID NO: 95321 - DNA, 25 bp, Probe sequence
acttcaaacgttatgtacacgagtc

SEQ ID NO: 95322 - DNA, 25 bp, Probe sequence
aaacgttatgtacacgagtcattaa

SEQ ID NO: 95323 - DNA, 25 bp, Probe sequence
aaacattcctctattgtatcttgtc

SEQ ID NO: 95324 - DNA, 25 bp, Probe sequence
cgagtcattaaatcgtgcccatatg

SEQ ID NO: 95325 - DNA, 25 bp, Probe sequence
gcgtttttattacaaacattcctct

SEQ ID NO: 95326 - DNA, 25 bp, Probe sequence
gctcatagcaaataaaacgcttcat

SEQ ID NO: 95327 - DNA, 25 bp, Probe sequence
gactttatttctatatctatttatc

SEQ ID NO: 95328 - DNA, 25 bp, Probe sequence
gtatcatatattgactcgaccttta

SEQ ID NO: 95329 - DNA, 25 bp, Probe sequence
gtatcttgtcatttgaacatcattt

SEQ ID NO: 95330 - DNA, 25 bp, Probe sequence
tgtcacatatgactttatttctata

SEQ ID NO: 95331 - DNA, 25 bp, Probe sequence
taaatcgtgcccatatgattacaac

SEQ ID NO: 95332 - DNA, 25 bp, Probe sequence
ttgactcgacctttatatgaagcgt

SEQ ID NO: 95333 - DNA, 25 bp, Probe sequence
attacacgattttatggtacatttt

SEQ ID NO: 95334 - DNA, 25 bp, Probe sequence
atacatctccttaataaaatcctac

SEQ ID NO: 95335 - DNA, 25 bp, Probe sequence
acatctccttaataaaatcctactc

SEQ ID NO: 95336 - DNA, 25 bp, Probe sequence
aaagactattacacgattttatggt

SEQ ID NO: 95337 - DNA, 25 bp, Probe sequence
aaaatcctactcaaagtattctatc

SEQ ID NO: 95338 - DNA, 25 bp, Probe sequence
aagtattctatcatagagttttagt

SEQ ID NO: 95339 - DNA, 25 bp, Probe sequence
aatcctactcaaagtattctatcat

SEQ ID NO: 95340 - DNA, 25 bp, Probe sequence
cacgattttatggtacattttaagt

SEQ ID NO: 95341 - DNA, 25 bp, Probe sequence
catctccttaataaaatcctactca

SEQ ID NO: 95342 - DNA, 25 bp, Probe sequence
cctactcaaagtattctatcataga

SEQ ID NO: 95343 - DNA, 25 bp, Probe sequence
gactattacacgattttatggtaca

SEQ ID NO: 95344 - DNA, 25 bp, Probe sequence
gagttttagtaaagactattacacg

SEQ ID NO: 95345 - DNA, 25 bp, Probe sequence
gttatacatctccttaataaaatcc

SEQ ID NO: 95346 - DNA, 25 bp, Probe sequence
tctccttaataaaatcctactcaaa

SEQ ID NO: 95347 - DNA, 25 bp, Probe sequence
tatggtacattttaagtaaatcgaa

SEQ ID NO: 95348 - DNA, 25 bp, Probe sequence
atttcacccaagacacattatcatt

SEQ ID NO: 95349 - DNA, 25 bp, Probe sequence
atctccgcaaaaaatttcacccaag

SEQ ID NO: 95350 - DNA, 25 bp, Probe sequence
aactgcgatttcgacttctaaaacg

SEQ ID NO: 95351 - DNA, 25 bp, Probe sequence
aaataatctgataaatctccgcaaa

SEQ ID NO: 95352 - DNA, 25 bp, Probe sequence
aacattgatataactgcgatttcga

SEQ ID NO: 95353 - DNA, 25 bp, Probe sequence
aacgacataaaacaatctacagcta

SEQ ID NO: 95354 - DNA, 25 bp, Probe sequence
caatctacagctaaaatattttttc

SEQ ID NO: 95355 - DNA, 25 bp, Probe sequence
cacccaagacacattatcatttagg

SEQ ID NO: 95356 - DNA, 25 bp, Probe sequence
ctcctctacttttgaacttgttaat

SEQ ID NO: 95357 - DNA, 25 bp, Probe sequence
gcgatttcgacttctaaaacgacat

SEQ ID NO: 95358 - DNA, 25 bp, Probe sequence
gaacttgttaataacttatcataat

SEQ ID NO: 95359 - DNA, 25 bp, Probe sequence
gacacattatcatttagggtgaaat

SEQ ID NO: 95360 - DNA, 25 bp, Probe sequence
gatataactgcgatttcgacttcta

SEQ ID NO: 95361 - DNA, 25 bp, Probe sequence
gtcaggttttctaacataaagctta

SEQ ID NO: 95362 - DNA, 25 bp, Probe sequence
ggatttcaaaaatatgtcaggtttt

SEQ ID NO: 95363 - DNA, 25 bp, Probe sequence
attactgatttcccatcattgttta

SEQ ID NO: 95364 - DNA, 25 bp, Probe sequence
agcaaaacgctctagcccttgatat

SEQ ID NO: 95365 - DNA, 25 bp, Probe sequence
aaagcaaaacgctctagcccttgat

SEQ ID NO: 95366 - DNA, 25 bp, Probe sequence
aaacgctctagcccttgatattact

SEQ ID NO: 95367 - DNA, 25 bp, Probe sequence
ctaaagcaaaacgctctagcccttg

SEQ ID NO: 95368 - DNA, 25 bp, Probe sequence
cgctctagcccttgatattactgat

SEQ ID NO: 95369 - DNA, 25 bp, Probe sequence
gcccttgatattactgatttcccat

SEQ ID NO: 95370 - DNA, 25 bp, Probe sequence
gctctagcccttgatattactgatt

SEQ ID NO: 95371 - DNA, 25 bp, Probe sequence
gcaaaacgctctagcccttgatatt

SEQ ID NO: 95372 - DNA, 25 bp, Probe sequence
gagctaaagcaaaacgctctagccc

SEQ ID NO: 95373 - DNA, 25 bp, Probe sequence
gatattactgatttcccatcattgt

SEQ ID NO: 95374 - DNA, 25 bp, Probe sequence
tgatttcccatcattgtttagcgta

SEQ ID NO: 95375 - DNA, 25 bp, Probe sequence
tctagcccttgatattactgatttc

SEQ ID NO: 95376 - DNA, 25 bp, Probe sequence
tactgatttcccatcattgtttagc

SEQ ID NO: 95377 - DNA, 25 bp, Probe sequence
tagcccttgatattactgatttccc

SEQ ID NO: 95378 - DNA, 25 bp, Probe sequence
atgaaaataccgatcgataaacaaa

SEQ ID NO: 95379 - DNA, 25 bp, Probe sequence
aataatgcgtagtaaggtccctctt

SEQ ID NO: 95380 - DNA, 25 bp, Probe sequence
caagtaatactcaacgttttcgcga

SEQ ID NO: 95381 - DNA, 25 bp, Probe sequence
ctcttttcatatagtattaccccct

SEQ ID NO: 95382 - DNA, 25 bp, Probe sequence
gaatatggctattttcaagtaatac

SEQ ID NO: 95383 - DNA, 25 bp, Probe sequence
gaacgttctgcaaatgaattcgatg

SEQ ID NO: 95384 - DNA, 25 bp, Probe sequence
gtattacccccttaataatgcgtag

SEQ ID NO: 95385 - DNA, 25 bp, Probe sequence
gggtcttaccttagaacgttctgca

SEQ ID NO: 95386 - DNA, 25 bp, Probe sequence
tctcatcacctccaaatatattaaa

SEQ ID NO: 95387 - DNA, 25 bp, Probe sequence
tcatctcatcacctccaaatatatt

SEQ ID NO: 95388 - DNA, 25 bp, Probe sequence
taatgcgtagtaaggtccctctttt

SEQ ID NO: 95389 - DNA, 25 bp, Probe sequence
tactcaacgttttcgcgacgttctt

SEQ ID NO: 95390 - DNA, 25 bp, Probe sequence
tttcgcgacgttcttttatcgcctc

SEQ ID NO: 95391 - DNA, 25 bp, Probe sequence
tttgttttgtttctcttttcatata

SEQ ID NO: 95392 - DNA, 25 bp, Probe sequence
tttcatatagtattacccccttaat

SEQ ID NO: 95393 - DNA, 25 bp, Probe sequence
attaagctcgtcacagctattcgaa

SEQ ID NO: 95394 - DNA, 25 bp, Probe sequence
aaataccacctccctatttaatgtg

SEQ ID NO: 95395 - DNA, 25 bp, Probe sequence
aaacatgatttctttcacttttaga

SEQ ID NO: 95396 - DNA, 25 bp, Probe sequence
aacacccactcagtcactagtttgg

SEQ ID NO: 95397 - DNA, 25 bp, Probe sequence
aaccattcttatcattttttctcct

SEQ ID NO: 95398 - DNA, 25 bp, Probe sequence
gaactcccatatccactggcaagat

SEQ ID NO: 95399 - DNA, 25 bp, Probe sequence
gttattgtatgcctattgaactcaa

SEQ ID NO: 95400 - DNA, 25 bp, Probe sequence
gtgacatgttgaactcccatatcca

SEQ ID NO: 95401 - DNA, 25 bp, Probe sequence
tttctcctttcctctttatagttat

SEQ ID NO: 95402 - DNA, 25 bp, Probe sequence
tctttttctttaaccattcttatca

SEQ ID NO: 95403 - DNA, 25 bp, Probe sequence
taatgtggtaaaggtcttttgccct

SEQ ID NO: 95404 - DNA, 25 bp, Probe sequence
taattttgctattcgttctttttct

SEQ ID NO: 95405 - DNA, 25 bp, Probe sequence
ttttttccttaattctcttgtcata

SEQ ID NO: 95406 - DNA, 25 bp, Probe sequence
ttaacatccatctaagagcacctaa

SEQ ID NO: 95407 - DNA, 25 bp, Probe sequence
ttctcttgtcataaataccacctcc

SEQ ID NO: 95408 - DNA, 25 bp, Probe sequence
atttcttgtcttcatatattctata

SEQ ID NO: 95409 - DNA, 25 bp, Probe sequence
ataatcctaatgcagtaactacgtt

SEQ ID NO: 95410 - DNA, 25 bp, Probe sequence
aagctatccatatttaatatacttt

SEQ ID NO: 95411 - DNA, 25 bp, Probe sequence
aaggctcactccatgatatttcaaa

SEQ ID NO: 95412 - DNA, 25 bp, Probe sequence
aatacattgtttctttgtagttgcc

SEQ ID NO: 95413 - DNA, 25 bp, Probe sequence
cacgctctctttctatttataatta

SEQ ID NO: 95414 - DNA, 25 bp, Probe sequence
gatttaaaaggctcactccatgata

SEQ ID NO: 95415 - DNA, 25 bp, Probe sequence
gttaattcataaactaatacctaat

SEQ ID NO: 95416 - DNA, 25 bp, Probe sequence
gtttctttgtagttgccaaacttgt

SEQ ID NO: 95417 - DNA, 25 bp, Probe sequence
gtaactacgtttagcaatacattgt

SEQ ID NO: 95418 - DNA, 25 bp, Probe sequence
tagttgccaaacttgttaattcata

SEQ ID NO: 95419 - DNA, 25 bp, Probe sequence
tatttataaaatttcttgtcttcat

SEQ ID NO: 95420 - DNA, 25 bp, Probe sequence
tttcaaaagatatggccttatttta

SEQ ID NO: 95421 - DNA, 25 bp, Probe sequence
ttatattcacattaagctatccata

SEQ ID NO: 95422 - DNA, 25 bp, Probe sequence
ttaatcacgctctctttctatttat

SEQ ID NO: 95423 - DNA, 25 bp, Probe sequence
atatgcatttttgattatttaacca

SEQ ID NO: 95424 - DNA, 25 bp, Probe sequence
agagattatcttattgaggtggaca

SEQ ID NO: 95425 - DNA, 25 bp, Probe sequence
actgtgttcagcctttaatatcatc

SEQ ID NO: 95426 - DNA, 25 bp, Probe sequence
aacttatttactgtgttcagccttt

SEQ ID NO: 95427 - DNA, 25 bp, Probe sequence
aattcgcacaaacattattacaaaa

SEQ ID NO: 95428 - DNA, 25 bp, Probe sequence
gaggtggacaaaacgtggacagaca

SEQ ID NO: 95429 - DNA, 25 bp, Probe sequence
gattatttaaccatgtacaatttct

SEQ ID NO: 95430 - DNA, 25 bp, Probe sequence
gttcagcctttaatatcatcactta

SEQ ID NO: 95431 - DNA, 25 bp, Probe sequence
ggacagacaaccatgaaatcattag

SEQ ID NO: 95432 - DNA, 25 bp, Probe sequence
ggaatcataaaccaaatgctatatt

SEQ ID NO: 95433 - DNA, 25 bp, Probe sequence
tcttgtccacctaacctaacaaaat

SEQ ID NO: 95434 - DNA, 25 bp, Probe sequence
tcatcatatatgccaattacacaat

SEQ ID NO: 95435 - DNA, 25 bp, Probe sequence
taaccatgtacaatttctaaaacta

SEQ ID NO: 95436 - DNA, 25 bp, Probe sequence
tagaaatttaatttcttgtccacct

SEQ ID NO: 95437 - DNA, 25 bp, Probe sequence
tatcacaaatcatcatatatgccaa

SEQ ID NO: 95438 - DNA, 25 bp, Probe sequence
atagtcctaccagaattgaaatcaa

SEQ ID NO: 95439 - DNA, 25 bp, Probe sequence
accacacgattctttacactcgaaa

SEQ ID NO: 95440 - DNA, 25 bp, Probe sequence
acctcacattcttattagattgcaa

SEQ ID NO: 95441 - DNA, 25 bp, Probe sequence
actttaatagtcatcttcattttac

SEQ ID NO: 95442 - DNA, 25 bp, Probe sequence
aaattatgtttaccacacgattctt

SEQ ID NO: 95443 - DNA, 25 bp, Probe sequence
aaatcaaacctcacattcttattag

SEQ ID NO: 95444 - DNA, 25 bp, Probe sequence
ccattttcacctccttataatctat

SEQ ID NO: 95445 - DNA, 25 bp, Probe sequence
gacttcatattaaatcaaacctcac

SEQ ID NO: 95446 - DNA, 25 bp, Probe sequence
gtttaccacacgattctttacactc

SEQ ID NO: 95447 - DNA, 25 bp, Probe sequence
gtcatcttcattttactaatggtga

SEQ ID NO: 95448 - DNA, 25 bp, Probe sequence
tatcgttttaacttcctcgaccatt

SEQ ID NO: 95449 - DNA, 25 bp, Probe sequence
ttttcacctccttataatctatata

SEQ ID NO: 95450 - DNA, 25 bp, Probe sequence
ttatttgtttttcgcactttaatag

SEQ ID NO: 95451 - DNA, 25 bp, Probe sequence
ttcgcactttaatagtcatcttcat

SEQ ID NO: 95452 - DNA, 25 bp, Probe sequence
ttgcaaattcaatagtcctaccaga

SEQ ID NO: 95453 - DNA, 25 bp, Probe sequence
atattcattgaagtttacaaccact

SEQ ID NO: 95454 - DNA, 25 bp, Probe sequence
acgacttttcatcatcaattacttt

SEQ ID NO: 95455 - DNA, 25 bp, Probe sequence
aagacaaacgattgcttttatacct

SEQ ID NO: 95456 - DNA, 25 bp, Probe sequence
gattgcttttataccttacgccttt

SEQ ID NO: 95457 - DNA, 25 bp, Probe sequence
gattagagtctttcaatattcaaac

SEQ ID NO: 95458 - DNA, 25 bp, Probe sequence
tcaatattcaaactactaactccag

SEQ ID NO: 95459 - DNA, 25 bp, Probe sequence
taatggctatcatcacttcataata

SEQ ID NO: 95460 - DNA, 25 bp, Probe sequence
taactccagtagtcttttagatttt

SEQ ID NO: 95461 - DNA, 25 bp, Probe sequence
tagactttaatttttccggagtcat

SEQ ID NO: 95462 - DNA, 25 bp, Probe sequence
tagccttctcaaatactatacattt

SEQ ID NO: 95463 - DNA, 25 bp, Probe sequence
ttacgccttttactaaacttcaatg

SEQ ID NO: 95464 - DNA, 25 bp, Probe sequence
tattatcaatttttctttcaacata

SEQ ID NO: 95465 - DNA, 25 bp, Probe sequence
ttatttttctattcattaatggcta

SEQ ID NO: 95466 - DNA, 25 bp, Probe sequence
ttcaacatattaacgacttttcatc

SEQ ID NO: 95467 - DNA, 25 bp, Probe sequence
ttccggagtcatatagccttctcaa

SEQ ID NO: 95468 - DNA, 25 bp, Probe sequence
atcattataatatccatttaccata

SEQ ID NO: 95469 - DNA, 25 bp, Probe sequence
actcattttcccttattcgatgcta

SEQ ID NO: 95470 - DNA, 25 bp, Probe sequence
acaaatcactccttgtacagtgttg

SEQ ID NO: 95471 - DNA, 25 bp, Probe sequence
aacaatttggtacatttgagctttt

SEQ ID NO: 95472 - DNA, 25 bp, Probe sequence
cctcctgactgattaacgctcgaat

SEQ ID NO: 95473 - DNA, 25 bp, Probe sequence
gaatgtccattcaatctttataaag

SEQ ID NO: 95474 - DNA, 25 bp, Probe sequence
gaaacgacatactcctttttcacaa

SEQ ID NO: 95475 - DNA, 25 bp, Probe sequence
gacatactcctttttcacaaattgg

SEQ ID NO: 95476 - DNA, 25 bp, Probe sequence
gagcatttcaagacgatccattcca

SEQ ID NO: 95477 - DNA, 25 bp, Probe sequence
gatccattccaatctattttatcat

SEQ ID NO: 95478 - DNA, 25 bp, Probe sequence
gtaggagtgaaattccctcctgact

SEQ ID NO: 95479 - DNA, 25 bp, Probe sequence
ggaaatgccccttcgaagtagacat

SEQ ID NO: 95480 - DNA, 25 bp, Probe sequence
tgattaacgctcgaatgtccattca

SEQ ID NO: 95481 - DNA, 25 bp, Probe sequence
tgagcttttttatttccttcactct

SEQ ID NO: 95482 - DNA, 25 bp, Probe sequence
ttcactctcatcttcttaaacttat

SEQ ID NO: 95483 - DNA, 25 bp, Probe sequence
atggagatgtttgtgacttttcgat

SEQ ID NO: 95484 - DNA, 25 bp, Probe sequence
agatcagttgagtagttgtgtttat

SEQ ID NO: 95485 - DNA, 25 bp, Probe sequence
acattattccaaaacaagatactac

SEQ ID NO: 95486 - DNA, 25 bp, Probe sequence
aatgctgttatgtgtcatctgacaa

SEQ ID NO: 95487 - DNA, 25 bp, Probe sequence
gaagccgttgatgatataaaattac

SEQ ID NO: 95488 - DNA, 25 bp, Probe sequence
gaaactactcatttgaagccgttga

SEQ ID NO: 95489 - DNA, 25 bp, Probe sequence
gaaatgcactatttaagtttttaat

SEQ ID NO: 95490 - DNA, 25 bp, Probe sequence
gagtagttgtgtttattgatttata

SEQ ID NO: 95491 - DNA, 25 bp, Probe sequence
gatgtttgtgacttttcgatgatta

SEQ ID NO: 95492 - DNA, 25 bp, Probe sequence
gatgtattaacaatcgaattactaa

SEQ ID NO: 95493 - DNA, 25 bp, Probe sequence
gttaatttgtgctgtatttacttta

SEQ ID NO: 95494 - DNA, 25 bp, Probe sequence
gtgctgtatttactttaatttgacg

SEQ ID NO: 95495 - DNA, 25 bp, Probe sequence
gtgtcatctgacaaatcatttatta

SEQ ID NO: 95496 - DNA, 25 bp, Probe sequence
tattgagtatcttgttttattttat

SEQ ID NO: 95497 - DNA, 25 bp, Probe sequence
tttttataggtgtgcatcatttcaa

SEQ ID NO: 95498 - DNA, 25 bp, Probe sequence
attaatatatgtgttccagcatgaa

SEQ ID NO: 95499 - DNA, 25 bp, Probe sequence
atttattcaacttcgcgataatgcg

SEQ ID NO: 95500 - DNA, 25 bp, Probe sequence
atacattttaaatatcgaactagtt

SEQ ID NO: 95501 - DNA, 25 bp, Probe sequence
actttaacaattcacaatacatttt

SEQ ID NO: 95502 - DNA, 25 bp, Probe sequence
cctcttttctctatttcctaaatca

SEQ ID NO: 95503 - DNA, 25 bp, Probe sequence
gcgataatgcgatacaaactttaac

SEQ ID NO: 95504 - DNA, 25 bp, Probe sequence
gaaaagtcgctatgattaaaaatta

SEQ ID NO: 95505 - DNA, 25 bp, Probe sequence
gatacaaactttaacaattcacaat

SEQ ID NO: 95506 - DNA, 25 bp, Probe sequence
gtgttccagcatgaaaagtcgctat

SEQ ID NO: 95507 - DNA, 25 bp, Probe sequence
tccagcatgaaaagtcgctatgatt

SEQ ID NO: 95508 - DNA, 25 bp, Probe sequence
tcttttctctatttcctaaatcata

SEQ ID NO: 95509 - DNA, 25 bp, Probe sequence
taatatatttattcaacttcgcgat

SEQ ID NO: 95510 - DNA, 25 bp, Probe sequence
taattttcttaatgtattgtttgat

SEQ ID NO: 95511 - DNA, 25 bp, Probe sequence
tatttcctaaatcatagaactttta

SEQ ID NO: 95512 - DNA, 25 bp, Probe sequence
ttcaacttcgcgataatgcgataca

SEQ ID NO: 95513 - DNA, 25 bp, Probe sequence
ataatcgagactccttacaaataaa

SEQ ID NO: 95514 - DNA, 25 bp, Probe sequence
agagcctctataatcgagactcctt

SEQ ID NO: 95515 - DNA, 25 bp, Probe sequence
agcctctataatcgagactccttac

SEQ ID NO: 95516 - DNA, 25 bp, Probe sequence
aaagagcctctataatcgagactcc

SEQ ID NO: 95517 - DNA, 25 bp, Probe sequence
aatagaacactttgtcatagatttg

SEQ ID NO: 95518 - DNA, 25 bp, Probe sequence
ctataatcgagactccttacaaata

SEQ ID NO: 95519 - DNA, 25 bp, Probe sequence
ctctataatcgagactccttacaaa

SEQ ID NO: 95520 - DNA, 25 bp, Probe sequence
gcctctataatcgagactccttaca

SEQ ID NO: 95521 - DNA, 25 bp, Probe sequence
gaacactttgtcatagatttgaaat

SEQ ID NO: 95522 - DNA, 25 bp, Probe sequence
gacaaatgtcattattaggtttaca

SEQ ID NO: 95523 - DNA, 25 bp, Probe sequence
gagcctctataatcgagactcctta

SEQ ID NO: 95524 - DNA, 25 bp, Probe sequence
gatttaaaatagaacactttgtcat

SEQ ID NO: 95525 - DNA, 25 bp, Probe sequence
ggtttacataatatatttatcgtta

SEQ ID NO: 95526 - DNA, 25 bp, Probe sequence
taatcacctctatttttttcttaat

SEQ ID NO: 95527 - DNA, 25 bp, Probe sequence
tatatttatcgttattttaattttg

SEQ ID NO: 95528 - DNA, 25 bp, Probe sequence
attgactcactttccaagtctctta

SEQ ID NO: 95529 - DNA, 25 bp, Probe sequence
acactcaatacttttttgtttgtat

SEQ ID NO: 95530 - DNA, 25 bp, Probe sequence
aacaaatctaaattgcgagtaccaa

SEQ ID NO: 95531 - DNA, 25 bp, Probe sequence
aatctaaattgcgagtaccaaaata

SEQ ID NO: 95532 - DNA, 25 bp, Probe sequence
cactttccaagtctcttaaatcaaa

SEQ ID NO: 95533 - DNA, 25 bp, Probe sequence
ctcactttccaagtctcttaaatca

SEQ ID NO: 95534 - DNA, 25 bp, Probe sequence
ccaagtctcttaaatcaaaacactc

SEQ ID NO: 95535 - DNA, 25 bp, Probe sequence
gactcactttccaagtctcttaaat

SEQ ID NO: 95536 - DNA, 25 bp, Probe sequence
gattattgactcactttccaagtct

SEQ ID NO: 95537 - DNA, 25 bp, Probe sequence
gattttgattattgactcactttcc

SEQ ID NO: 95538 - DNA, 25 bp, Probe sequence
gtctcttaaatcaaaacactcaata

SEQ ID NO: 95539 - DNA, 25 bp, Probe sequence
ttattgactcactttccaagtctct

SEQ ID NO: 95540 - DNA, 25 bp, Probe sequence
ttttgattattgactcactttccaa

SEQ ID NO: 95541 - DNA, 25 bp, Probe sequence
ttgattattgactcactttccaagt

SEQ ID NO: 95542 - DNA, 25 bp, Probe sequence
ttgactcactttccaagtctcttaa

SEQ ID NO: 95543 - DNA, 25 bp, Probe sequence
attacgctcgatacgcactatggtt

SEQ ID NO: 95544 - DNA, 25 bp, Probe sequence
atcgatgcttcaagtatattttact

SEQ ID NO: 95545 - DNA, 25 bp, Probe sequence
aaggcataataatccattacgctcg

SEQ ID NO: 95546 - DNA, 25 bp, Probe sequence
aataatccattacgctcgatacgca

SEQ ID NO: 95547 - DNA, 25 bp, Probe sequence
cactatggttattatgcctttaaat

SEQ ID NO: 95548 - DNA, 25 bp, Probe sequence
gctcgatacgcactatggttattat

SEQ ID NO: 95549 - DNA, 25 bp, Probe sequence
gttattatgcctttaaattatttct

SEQ ID NO: 95550 - DNA, 25 bp, Probe sequence
ggtaataataaatcgatgcttcaag

SEQ ID NO: 95551 - DNA, 25 bp, Probe sequence
ggcataataatccattacgctcgat

SEQ ID NO: 95552 - DNA, 25 bp, Probe sequence
tccattacgctcgatacgcactatg

SEQ ID NO: 95553 - DNA, 25 bp, Probe sequence
taatccattacgctcgatacgcact

SEQ ID NO: 95554 - DNA, 25 bp, Probe sequence
tactttaatatatataatcacctat

SEQ ID NO: 95555 - DNA, 25 bp, Probe sequence
tacgcactatggttattatgccttt

SEQ ID NO: 95556 - DNA, 25 bp, Probe sequence
tacgctcgatacgcactatggttat

SEQ ID NO: 95557 - DNA, 25 bp, Probe sequence
tatgcctttaaattatttctttata

SEQ ID NO: 95558 - DNA, 25 bp, Probe sequence
attcgacataaacttgaattcacga

SEQ ID NO: 95559 - DNA, 25 bp, Probe sequence
attcacgaatctttcacgtcatatt

SEQ ID NO: 95560 - DNA, 25 bp, Probe sequence
atatctgtcagtttataatttgatt

SEQ ID NO: 95561 - DNA, 25 bp, Probe sequence
atacacctcctaagcaagcgctttc

SEQ ID NO: 95562 - DNA, 25 bp, Probe sequence
acctcctaagcaagcgctttcacaa

SEQ ID NO: 95563 - DNA, 25 bp, Probe sequence
aagcaagcgctttcacaaatatcat

SEQ ID NO: 95564 - DNA, 25 bp, Probe sequence
aatactatgagtgacctaattctgt

SEQ ID NO: 95565 - DNA, 25 bp, Probe sequence
gcgctttcacaaatatcattataca

SEQ ID NO: 95566 - DNA, 25 bp, Probe sequence
gaattcacgaatctttcacgtcata

SEQ ID NO: 95567 - DNA, 25 bp, Probe sequence
gaattcaatcttcaaaatactatga

SEQ ID NO: 95568 - DNA, 25 bp, Probe sequence
gaatctttcacgtcatattcattga

SEQ ID NO: 95569 - DNA, 25 bp, Probe sequence
gaccgttataacataaattcgacat

SEQ ID NO: 95570 - DNA, 25 bp, Probe sequence
gagtgacctaattctgtcatttaaa

SEQ ID NO: 95571 - DNA, 25 bp, Probe sequence
tgaacatcaatatctgtcagtttat

SEQ ID NO: 95572 - DNA, 25 bp, Probe sequence
ttcacgtcatattcattgaacatca

SEQ ID NO: 95573 - DNA, 25 bp, Probe sequence
attcgtaacacatgtattcaactgc

SEQ ID NO: 95574 - DNA, 25 bp, Probe sequence
ataaaagcaattcgtaacacatgta

SEQ ID NO: 95575 - DNA, 25 bp, Probe sequence
acacatgtattcaactgcgttatga

SEQ ID NO: 95576 - DNA, 25 bp, Probe sequence
aaagcaattcgtaacacatgtattc

SEQ ID NO: 95577 - DNA, 25 bp, Probe sequence
aacacatgtattcaactgcgttatg

SEQ ID NO: 95578 - DNA, 25 bp, Probe sequence
aagcaattcgtaacacatgtattca

SEQ ID NO: 95579 - DNA, 25 bp, Probe sequence
aattcgtaacacatgtattcaactg

SEQ ID NO: 95580 - DNA, 25 bp, Probe sequence
caactgcgttatgaattgctttttc

SEQ ID NO: 95581 - DNA, 25 bp, Probe sequence
cacatgtattcaactgcgttatgaa

SEQ ID NO: 95582 - DNA, 25 bp, Probe sequence
cgtaacacatgtattcaactgcgtt

SEQ ID NO: 95583 - DNA, 25 bp, Probe sequence
gcaattcgtaacacatgtattcaac

SEQ ID NO: 95584 - DNA, 25 bp, Probe sequence
gtattcaactgcgttatgaattgct

SEQ ID NO: 95585 - DNA, 25 bp, Probe sequence
gtaacacatgtattcaactgcgtta

SEQ ID NO: 95586 - DNA, 25 bp, Probe sequence
tcgtaacacatgtattcaactgcgt

SEQ ID NO: 95587 - DNA, 25 bp, Probe sequence
tcaactgcgttatgaattgcttttt

SEQ ID NO: 95588 - DNA, 25 bp, Probe sequence
attattgaaaaacactagatgatag

SEQ ID NO: 95589 - DNA, 25 bp, Probe sequence
aaacactagatgatagtatagtata

SEQ ID NO: 95590 - DNA, 25 bp, Probe sequence
aaaaacactagatgatagtatagta

SEQ ID NO: 95591 - DNA, 25 bp, Probe sequence
aaaacactagatgatagtatagtat

SEQ ID NO: 95592 - DNA, 25 bp, Probe sequence
aacactagatgatagtatagtatag

SEQ ID NO: 95593 - DNA, 25 bp, Probe sequence
gtacctccgtttgtgcttttgagaa

SEQ ID NO: 95594 - DNA, 25 bp, Probe sequence
gaaaaacactagatgatagtatagt

SEQ ID NO: 95595 - DNA, 25 bp, Probe sequence
gtttgtgcttttgagaaaaacaaat

SEQ ID NO: 95596 - DNA, 25 bp, Probe sequence
gtattattgaaaaacactagatgat

SEQ ID NO: 95597 - DNA, 25 bp, Probe sequence
tgtgcttttgagaaaaacaaatgta

SEQ ID NO: 95598 - DNA, 25 bp, Probe sequence
tgtacctccgtttgtgcttttgaga

SEQ ID NO: 95599 - DNA, 25 bp, Probe sequence
tccgtttgtgcttttgagaaaaaca

SEQ ID NO: 95600 - DNA, 25 bp, Probe sequence
tacctccgtttgtgcttttgagaaa

SEQ ID NO: 95601 - DNA, 25 bp, Probe sequence
tattattgaaaaacactagatgata

SEQ ID NO: 95602 - DNA, 25 bp, Probe sequence
ttgtgcttttgagaaaaacaaatgt

SEQ ID NO: 95603 - DNA, 25 bp, Probe sequence
attctgcatttaatactattttaca

SEQ ID NO: 95604 - DNA, 25 bp, Probe sequence
aatactattttacaatataaagcgt

SEQ ID NO: 95605 - DNA, 25 bp, Probe sequence
ctattctgcatttaatactatttta

SEQ ID NO: 95606 - DNA, 25 bp, Probe sequence
ctctattctgcatttaatactattt

SEQ ID NO: 95607 - DNA, 25 bp, Probe sequence
ctctctattctgcatttaatactat

SEQ ID NO: 95608 - DNA, 25 bp, Probe sequence
ctcctctctattctgcatttaatac

SEQ ID NO: 95609 - DNA, 25 bp, Probe sequence
cctctctattctgcatttaatacta

SEQ ID NO: 95610 - DNA, 25 bp, Probe sequence
tgcatttaatactattttacaatat

SEQ ID NO: 95611 - DNA, 25 bp, Probe sequence
tcctctctattctgcatttaatact

SEQ ID NO: 95612 - DNA, 25 bp, Probe sequence
tctgcatttaatactattttacaat

SEQ ID NO: 95613 - DNA, 25 bp, Probe sequence
tctcctctctattctgcatttaata

SEQ ID NO: 95614 - DNA, 25 bp, Probe sequence
tctctattctgcatttaatactatt

SEQ ID NO: 95615 - DNA, 25 bp, Probe sequence
tctattctgcatttaatactatttt

SEQ ID NO: 95616 - DNA, 25 bp, Probe sequence
tattctgcatttaatactattttac

SEQ ID NO: 95617 - DNA, 25 bp, Probe sequence
ttctgcatttaatactattttacaa

SEQ ID NO: 95618 - DNA, 25 bp, Probe sequence
atatacatttactctattcgtttga

SEQ ID NO: 95619 - DNA, 25 bp, Probe sequence
atatcttattcaaatatcatgtgtt

SEQ ID NO: 95620 - DNA, 25 bp, Probe sequence
atgtatttcaaatcctccatagtat

SEQ ID NO: 95621 - DNA, 25 bp, Probe sequence
accttccgtgactagttaatacttg

SEQ ID NO: 95622 - DNA, 25 bp, Probe sequence
aagccttaaccacaagatatcttat

SEQ ID NO: 95623 - DNA, 25 bp, Probe sequence
aatcctccatagtataactgaagtc

SEQ ID NO: 95624 - DNA, 25 bp, Probe sequence
aatatcatgtgttaaggcttatttt

SEQ ID NO: 95625 - DNA, 25 bp, Probe sequence
gatgcttgcagtgattttaacaatt

SEQ ID NO: 95626 - DNA, 25 bp, Probe sequence
gttagattgtcactgcattttttaa

SEQ ID NO: 95627 - DNA, 25 bp, Probe sequence
gtataactgaagtcattttcacata

SEQ ID NO: 95628 - DNA, 25 bp, Probe sequence
tgatcaaatttatttacctaccttc

SEQ ID NO: 95629 - DNA, 25 bp, Probe sequence
tactctattcgtttgatatcattac

SEQ ID NO: 95630 - DNA, 25 bp, Probe sequence
tacctaccttccgtgactagttaat

SEQ ID NO: 95631 - DNA, 25 bp, Probe sequence
tttaatgcattcgttattattcaga

SEQ ID NO: 95632 - DNA, 25 bp, Probe sequence
ttcgtttgatatcattactaatcta

SEQ ID NO: 95633 - DNA, 25 bp, Probe sequence
attcttacacggcagatgctttaga

SEQ ID NO: 95634 - DNA, 25 bp, Probe sequence
atatactttaatatctttttctagt

SEQ ID NO: 95635 - DNA, 25 bp, Probe sequence
atagcatttgccgctttttaatggt

SEQ ID NO: 95636 - DNA, 25 bp, Probe sequence
ataaattcttacacggcagatgctt

SEQ ID NO: 95637 - DNA, 25 bp, Probe sequence
agtattctgtttatattttattatt

SEQ ID NO: 95638 - DNA, 25 bp, Probe sequence
aactagtattctgtttatattttat

SEQ ID NO: 95639 - DNA, 25 bp, Probe sequence
aagtgtattaactagtattctgttt

SEQ ID NO: 95640 - DNA, 25 bp, Probe sequence
aatatctttttctagtataaagtgt

SEQ ID NO: 95641 - DNA, 25 bp, Probe sequence
gcatttgccgctttttaatggtgta

SEQ ID NO: 95642 - DNA, 25 bp, Probe sequence
gattatctatagcatttgccgcttt

SEQ ID NO: 95643 - DNA, 25 bp, Probe sequence
tctatagcatttgccgctttttaat

SEQ ID NO: 95644 - DNA, 25 bp, Probe sequence
tacacggcagatgctttagattatc

SEQ ID NO: 95645 - DNA, 25 bp, Probe sequence
tatctatagcatttgccgcttttta

SEQ ID NO: 95646 - DNA, 25 bp, Probe sequence
tttgccgctttttaatggtgtaaag

SEQ ID NO: 95647 - DNA, 25 bp, Probe sequence
ttagattatctatagcatttgccgc

SEQ ID NO: 95648 - DNA, 25 bp, Probe sequence
atagtacacttaaaaagcttacaat

SEQ ID NO: 95649 - DNA, 25 bp, Probe sequence
atacatattataatttaaccccatc

SEQ ID NO: 95650 - DNA, 25 bp, Probe sequence
acatattataatttaaccccatcaa

SEQ ID NO: 95651 - DNA, 25 bp, Probe sequence
aaatagttattgaatagtacactta

SEQ ID NO: 95652 - DNA, 25 bp, Probe sequence
aaagcttacaataatgggtatattt

SEQ ID NO: 95653 - DNA, 25 bp, Probe sequence
aattacaattaaacatgctcaagat

SEQ ID NO: 95654 - DNA, 25 bp, Probe sequence
catattataatttaaccccatcaaa

SEQ ID NO: 95655 - DNA, 25 bp, Probe sequence
gaatagtacacttaaaaagcttaca

SEQ ID NO: 95656 - DNA, 25 bp, Probe sequence
gggtatatttaaatagatgggagac

SEQ ID NO: 95657 - DNA, 25 bp, Probe sequence
tcgctttacagtactaaatagttat

SEQ ID NO: 95658 - DNA, 25 bp, Probe sequence
tacatattataatttaaccccatca

SEQ ID NO: 95659 - DNA, 25 bp, Probe sequence
tattataatttaaccccatcaaaat

SEQ ID NO: 95660 - DNA, 25 bp, Probe sequence
tttcgctttacagtactaaatagtt

SEQ ID NO: 95661 - DNA, 25 bp, Probe sequence
tttttcgctttacagtactaaatag

SEQ ID NO: 95662 - DNA, 25 bp, Probe sequence
ttacaattaaacatgctcaagatga

SEQ ID NO: 95663 - DNA, 25 bp, Probe sequence
atcataaactgctcaactacgcaat

SEQ ID NO: 95664 - DNA, 25 bp, Probe sequence
acaccctctcttgttaggaatcttt

SEQ ID NO: 95665 - DNA, 25 bp, Probe sequence
aaacaccctctcttgttaggaatct

SEQ ID NO: 95666 - DNA, 25 bp, Probe sequence
aacaccctctcttgttaggaatctt

SEQ ID NO: 95667 - DNA, 25 bp, Probe sequence
aactgctcaactacgcaatatagaa

SEQ ID NO: 95668 - DNA, 25 bp, Probe sequence
aatctttacgatttattatgatatc

SEQ ID NO: 95669 - DNA, 25 bp, Probe sequence
caccctctcttgttaggaatcttta

SEQ ID NO: 95670 - DNA, 25 bp, Probe sequence
cataaactgctcaactacgcaatat

SEQ ID NO: 95671 - DNA, 25 bp, Probe sequence
ctctcttgttaggaatctttacgat

SEQ ID NO: 95672 - DNA, 25 bp, Probe sequence
gctcaactacgcaatatagaaacta

SEQ ID NO: 95673 - DNA, 25 bp, Probe sequence
gatatcataaactgctcaactacgc

SEQ ID NO: 95674 - DNA, 25 bp, Probe sequence
gttaggaatctttacgatttattat

SEQ ID NO: 95675 - DNA, 25 bp, Probe sequence
taaactgctcaactacgcaatatag

SEQ ID NO: 95676 - DNA, 25 bp, Probe sequence
tacgcaatatagaaactacatatca

SEQ ID NO: 95677 - DNA, 25 bp, Probe sequence
ttaaacaccctctcttgttaggaat

SEQ ID NO: 95678 - DNA, 25 bp, Probe sequence
atcagtaatctatttccttctataa

SEQ ID NO: 95679 - DNA, 25 bp, Probe sequence
tacttcgtacttattaaattccgct

SEQ ID NO: 95680 - DNA, 25 bp, Probe sequence
actcaatccattaatcactcttcac

SEQ ID NO: 95681 - DNA, 25 bp, Probe sequence
acatacccagaattacttcgtactt

SEQ ID NO: 95682 - DNA, 25 bp, Probe sequence
aaatactctttcaagcattcgctaa

SEQ ID NO: 95683 - DNA, 25 bp, Probe sequence
aaatcattttctaaaccatcatatt

SEQ ID NO: 95684 - DNA, 25 bp, Probe sequence
aaaaagcgagctccccaatataata

SEQ ID NO: 95685 - DNA, 25 bp, Probe sequence
aacacaatcctcacataattcaaca

SEQ ID NO: 95686 - DNA, 25 bp, Probe sequence
aagtttcatttctttgttaaatcat

SEQ ID NO: 95687 - DNA, 25 bp, Probe sequence
gcattcgctaacaaagtgactttat

SEQ ID NO: 95688 - DNA, 25 bp, Probe sequence
gttacctcactttttatcaaatcgt

SEQ ID NO: 95689 - DNA, 25 bp, Probe sequence
gtaagcccgctttattttcaaatcg

SEQ ID NO: 95690 - DNA, 25 bp, Probe sequence
tgttctaccgatgaaactcaatcca

SEQ ID NO: 95691 - DNA, 25 bp, Probe sequence
tccccaatataataggtaagcccgc

SEQ ID NO: 95692 - DNA, 25 bp, Probe sequence
taatcactcttcacaaaaatttcat

SEQ ID NO: 95693 - DNA, 25 bp, Probe sequence
attcgtatatactgtacattgtttt

SEQ ID NO: 95694 - DNA, 25 bp, Probe sequence
atagcattcgtatatactgtacatt

SEQ ID NO: 95695 - DNA, 25 bp, Probe sequence
atgggctaaagtgcgaaatttgatt

SEQ ID NO: 95696 - DNA, 25 bp, Probe sequence
agcattcgtatatactgtacattgt

SEQ ID NO: 95697 - DNA, 25 bp, Probe sequence
actgtacattgttttattgatattg

SEQ ID NO: 95698 - DNA, 25 bp, Probe sequence
aaacattcagtttatagcattcgta

SEQ ID NO: 95699 - DNA, 25 bp, Probe sequence
aacattcagtttatagcattcgtat

SEQ ID NO: 95700 - DNA, 25 bp, Probe sequence
aaccgaatgtttccttattaatatg

SEQ ID NO: 95701 - DNA, 25 bp, Probe sequence
cagtttatagcattcgtatatactg

SEQ ID NO: 95702 - DNA, 25 bp, Probe sequence
cattcagtttatagcattcgtatat

SEQ ID NO: 95703 - DNA, 25 bp, Probe sequence
ccgaatgtttccttattaatatgag

SEQ ID NO: 95704 - DNA, 25 bp, Probe sequence
gcattcgtatatactgtacattgtt

SEQ ID NO: 95705 - DNA, 25 bp, Probe sequence
gaatgtttccttattaatatgagaa

SEQ ID NO: 95706 - DNA, 25 bp, Probe sequence
gatattgtaaatgggctaaagtgcg

SEQ ID NO: 95707 - DNA, 25 bp, Probe sequence
gtatatactgtacattgttttattg

SEQ ID NO: 95708 - DNA, 25 bp, Probe sequence
attctaatctaaattcagttcaaac

SEQ ID NO: 95709 - DNA, 25 bp, Probe sequence
aatttacaggagcgagccattatta

SEQ ID NO: 95710 - DNA, 25 bp, Probe sequence
cagattcctgcaaaatgttacacaa

SEQ ID NO: 95711 - DNA, 25 bp, Probe sequence
gacaaacattaccctttaaactcat

SEQ ID NO: 95712 - DNA, 25 bp, Probe sequence
gacgcgttcaagtatatccgcatct

SEQ ID NO: 95713 - DNA, 25 bp, Probe sequence
gagccattattatttttttctttct

SEQ ID NO: 95714 - DNA, 25 bp, Probe sequence
gttagataatctcattctttaatat

SEQ ID NO: 95715 - DNA, 25 bp, Probe sequence
gtcatcatgtttatctacttcctta

SEQ ID NO: 95716 - DNA, 25 bp, Probe sequence
ggtttatctgttgtcatcatgttta

SEQ ID NO: 95717 - DNA, 25 bp, Probe sequence
tcgcccccgtaataatttacaggag

SEQ ID NO: 95718 - DNA, 25 bp, Probe sequence
taaaccgttatatattatcgtaatt

SEQ ID NO: 95719 - DNA, 25 bp, Probe sequence
tacttccttacagacaaacattacc

SEQ ID NO: 95720 - DNA, 25 bp, Probe sequence
tatccgcatcttttggtttatctgt

SEQ ID NO: 95721 - DNA, 25 bp, Probe sequence
tatcgtaattgttaaaccctcattt

SEQ ID NO: 95722 - DNA, 25 bp, Probe sequence
ttaagtatatctttgacgcgttcaa

SEQ ID NO: 95723 - DNA, 25 bp, Probe sequence
atgtttgttttggttgtgaattaat

SEQ ID NO: 95724 - DNA, 25 bp, Probe sequence
aaattaatttagggagtgcctatat

SEQ ID NO: 95725 - DNA, 25 bp, Probe sequence
gatatactgtatttaaattaattta

SEQ ID NO: 95726 - DNA, 25 bp, Probe sequence
gttgtgaattaatgatatactgtat

SEQ ID NO: 95727 - DNA, 25 bp, Probe sequence
gttttggttgtgaattaatgatata

SEQ ID NO: 95728 - DNA, 25 bp, Probe sequence
gtttgttttggttgtgaattaatga

SEQ ID NO: 95729 - DNA, 25 bp, Probe sequence
gtgaattaatgatatactgtattta

SEQ ID NO: 95730 - DNA, 25 bp, Probe sequence
ggttgtgaattaatgatatactgta

SEQ ID NO: 95731 - DNA, 25 bp, Probe sequence
tggttgtgaattaatgatatactgt

SEQ ID NO: 95732 - DNA, 25 bp, Probe sequence
tgtttgttttggttgtgaattaatg

SEQ ID NO: 95733 - DNA, 25 bp, Probe sequence
tgttttggttgtgaattaatgatat

SEQ ID NO: 95734 - DNA, 25 bp, Probe sequence
tttgttttggttgtgaattaatgat

SEQ ID NO: 95735 - DNA, 25 bp, Probe sequence
tttggttgtgaattaatgatatact

SEQ ID NO: 95736 - DNA, 25 bp, Probe sequence
ttgttttggttgtgaattaatgata

SEQ ID NO: 95737 - DNA, 25 bp, Probe sequence
ttggttgtgaattaatgatatactg

SEQ ID NO: 95738 - DNA, 25 bp, Probe sequence
attcaatcattataatactttaaca

SEQ ID NO: 95739 - DNA, 25 bp, Probe sequence
ataggcaaaataacgttgtgacaat

SEQ ID NO: 95740 - DNA, 25 bp, Probe sequence
accttcaatttgtttattcaatcat

SEQ ID NO: 95741 - DNA, 25 bp, Probe sequence
aaataggcaaaataacgttgtgaca

SEQ ID NO: 95742 - DNA, 25 bp, Probe sequence
aaacgctatttcgcaaaaataggca

SEQ ID NO: 95743 - DNA, 25 bp, Probe sequence
aacgctatttcgcaaaaataggcaa

SEQ ID NO: 95744 - DNA, 25 bp, Probe sequence
aatataacaaatttaagaccagcaa

SEQ ID NO: 95745 - DNA, 25 bp, Probe sequence
caatcattataatactttaacaaaa

SEQ ID NO: 95746 - DNA, 25 bp, Probe sequence
cttcaatttgtttattcaatcatta

SEQ ID NO: 95747 - DNA, 25 bp, Probe sequence
ctaccttcaatttgtttattcaatc

SEQ ID NO: 95748 - DNA, 25 bp, Probe sequence
cctaccttcaatttgtttattcaat

SEQ ID NO: 95749 - DNA, 25 bp, Probe sequence
ccttcaatttgtttattcaatcatt

SEQ ID NO: 95750 - DNA, 25 bp, Probe sequence
ggcaaaataacgttgtgacaatgta

SEQ ID NO: 95751 - DNA, 25 bp, Probe sequence
taccttcaatttgtttattcaatca

SEQ ID NO: 95752 - DNA, 25 bp, Probe sequence
tataacaaatttaagaccagcaaaa

SEQ ID NO: 95753 - DNA, 25 bp, Probe sequence
atcaaatacattataacttatttta

SEQ ID NO: 95754 - DNA, 25 bp, Probe sequence
agaaaattctttacagatttgtgat

SEQ ID NO: 95755 - DNA, 25 bp, Probe sequence
acttatttcaagttataatgtcaga

SEQ ID NO: 95756 - DNA, 25 bp, Probe sequence
aatgtcagaaaattctttacagatt

SEQ ID NO: 95757 - DNA, 25 bp, Probe sequence
aatacttatttcaagttataatgtc

SEQ ID NO: 95758 - DNA, 25 bp, Probe sequence
aattttatcaaatacattataactt

SEQ ID NO: 95759 - DNA, 25 bp, Probe sequence
cttcccttcttcaattttatcaaat

SEQ ID NO: 95760 - DNA, 25 bp, Probe sequence
cttcttcaattttatcaaatacatt

SEQ ID NO: 95761 - DNA, 25 bp, Probe sequence
cccttcttcaattttatcaaataca

SEQ ID NO: 95762 - DNA, 25 bp, Probe sequence
ccttcttcaattttatcaaatacat

SEQ ID NO: 95763 - DNA, 25 bp, Probe sequence
gtcagaaaattctttacagatttgt

SEQ ID NO: 95764 - DNA, 25 bp, Probe sequence
tcccttcttcaattttatcaaatac

SEQ ID NO: 95765 - DNA, 25 bp, Probe sequence
tcttcaattttatcaaatacattat

SEQ ID NO: 95766 - DNA, 25 bp, Probe sequence
tcttcccttcttcaattttatcaaa

SEQ ID NO: 95767 - DNA, 25 bp, Probe sequence
ttcccttcttcaattttatcaaata

SEQ ID NO: 95768 - DNA, 25 bp, Probe sequence
aacatactcgctttataaattattc

SEQ ID NO: 95769 - DNA, 25 bp, Probe sequence
aacttatcacttatgatgtagttta

SEQ ID NO: 95770 - DNA, 25 bp, Probe sequence
aagattatgcatcctagacttctaa

SEQ ID NO: 95771 - DNA, 25 bp, Probe sequence
aagtgctatactctaaatttcaaca

SEQ ID NO: 95772 - DNA, 25 bp, Probe sequence
caagaactagtttattcaagtattt

SEQ ID NO: 95773 - DNA, 25 bp, Probe sequence
cctagacttctaaacatactcgctt

SEQ ID NO: 95774 - DNA, 25 bp, Probe sequence
gctgttataacagagcttttaaaga

SEQ ID NO: 95775 - DNA, 25 bp, Probe sequence
gctatactctaaatttcaacacttt

SEQ ID NO: 95776 - DNA, 25 bp, Probe sequence
gaagcctaagattatgcatcctaga

SEQ ID NO: 95777 - DNA, 25 bp, Probe sequence
gacttctaaacatactcgctttata

SEQ ID NO: 95778 - DNA, 25 bp, Probe sequence
gatgtagtttaagtgctatactcta

SEQ ID NO: 95779 - DNA, 25 bp, Probe sequence
gattatgcatcctagacttctaaac

SEQ ID NO: 95780 - DNA, 25 bp, Probe sequence
tagtatactttcataacttatcact

SEQ ID NO: 95781 - DNA, 25 bp, Probe sequence
tatactttcataacttatcacttat

SEQ ID NO: 95782 - DNA, 25 bp, Probe sequence
ttcaacactttaaaagaagcctaag

SEQ ID NO: 95783 - DNA, 25 bp, Probe sequence
atttctcagtctattcgtcattttg

SEQ ID NO: 95784 - DNA, 25 bp, Probe sequence
atgaattatagcatttctcagtcta

SEQ ID NO: 95785 - DNA, 25 bp, Probe sequence
agcatttctcagtctattcgtcatt

SEQ ID NO: 95786 - DNA, 25 bp, Probe sequence
accttctcgttaaataaactctctg

SEQ ID NO: 95787 - DNA, 25 bp, Probe sequence
aaactctctgtaaatcatacaaaat

SEQ ID NO: 95788 - DNA, 25 bp, Probe sequence
ctcagtctattcgtcattttgttaa

SEQ ID NO: 95789 - DNA, 25 bp, Probe sequence
gcatttctcagtctattcgtcattt

SEQ ID NO: 95790 - DNA, 25 bp, Probe sequence
gcagacaccttctcgttaaataaac

SEQ ID NO: 95791 - DNA, 25 bp, Probe sequence
gacaccttctcgttaaataaactct

SEQ ID NO: 95792 - DNA, 25 bp, Probe sequence
gtctattcgtcattttgttaacttt

SEQ ID NO: 95793 - DNA, 25 bp, Probe sequence
taaataaactctctgtaaatcatac

SEQ ID NO: 95794 - DNA, 25 bp, Probe sequence
tatagcatttctcagtctattcgtc

SEQ ID NO: 95795 - DNA, 25 bp, Probe sequence
tattcgtcattttgttaactttaat

SEQ ID NO: 95796 - DNA, 25 bp, Probe sequence
ttctcagtctattcgtcattttgtt

SEQ ID NO: 95797 - DNA, 25 bp, Probe sequence
ttctcgttaaataaactctctgtaa

SEQ ID NO: 95798 - DNA, 25 bp, Probe sequence
atttagaagtcgatcacaagtggtt

SEQ ID NO: 95799 - DNA, 25 bp, Probe sequence
accactcattgactgatttagaagt

SEQ ID NO: 95800 - DNA, 25 bp, Probe sequence
aaaaccactcattgactgatttaga

SEQ ID NO: 95801 - DNA, 25 bp, Probe sequence
aatataatcatttcaccttttcaag

SEQ ID NO: 95802 - DNA, 25 bp, Probe sequence
aattaaaaccactcattgactgatt

SEQ ID NO: 95803 - DNA, 25 bp, Probe sequence
catttgttcgcttttattttaatat

SEQ ID NO: 95804 - DNA, 25 bp, Probe sequence
ctgcctccatatagaacatttgttc

SEQ ID NO: 95805 - DNA, 25 bp, Probe sequence
gcctccatatagaacatttgttcgc

SEQ ID NO: 95806 - DNA, 25 bp, Probe sequence
gaagtcgatcacaagtggttttaaa

SEQ ID NO: 95807 - DNA, 25 bp, Probe sequence
gtaaaattaaaaccactcattgact

SEQ ID NO: 95808 - DNA, 25 bp, Probe sequence
tcatttcaccttttcaagtaaaatt

SEQ ID NO: 95809 - DNA, 25 bp, Probe sequence
taatcatttcaccttttcaagtaaa

SEQ ID NO: 95810 - DNA, 25 bp, Probe sequence
tactgcctccatatagaacatttgt

SEQ ID NO: 95811 - DNA, 25 bp, Probe sequence
tagaacatttgttcgcttttatttt

SEQ ID NO: 95812 - DNA, 25 bp, Probe sequence
tataatcatttcaccttttcaagta

SEQ ID NO: 95813 - DNA, 25 bp, Probe sequence
attcaataactcacgcacctttata

SEQ ID NO: 95814 - DNA, 25 bp, Probe sequence
attactcccttcaattctatattta

SEQ ID NO: 95815 - DNA, 25 bp, Probe sequence
ataactcacgcacctttataggata

SEQ ID NO: 95816 - DNA, 25 bp, Probe sequence
aactcacgcacctttataggataac

SEQ ID NO: 95817 - DNA, 25 bp, Probe sequence
aataactcacgcacctttataggat

SEQ ID NO: 95818 - DNA, 25 bp, Probe sequence
aattaattactcccttcaattctat

SEQ ID NO: 95819 - DNA, 25 bp, Probe sequence
cacgcacctttataggataacaaag

SEQ ID NO: 95820 - DNA, 25 bp, Probe sequence
ctcacgcacctttataggataacaa

SEQ ID NO: 95821 - DNA, 25 bp, Probe sequence
ctcccttcaattctatatttaattt

SEQ ID NO: 95822 - DNA, 25 bp, Probe sequence
gataacaaaggtctttgcgataatc

SEQ ID NO: 95823 - DNA, 25 bp, Probe sequence
tcaataactcacgcacctttatagg

SEQ ID NO: 95824 - DNA, 25 bp, Probe sequence
taattactcccttcaattctatatt

SEQ ID NO: 95825 - DNA, 25 bp, Probe sequence
tactcccttcaattctatatttaat

SEQ ID NO: 95826 - DNA, 25 bp, Probe sequence
tttattcaataactcacgcaccttt

SEQ ID NO: 95827 - DNA, 25 bp, Probe sequence
ttattcaataactcacgcaccttta

SEQ ID NO: 95828 - DNA, 25 bp, Probe sequence
ataacgaaattctcgttcttatcct

SEQ ID NO: 95829 - DNA, 25 bp, Probe sequence
agtatatctgttctagctactagaa

SEQ ID NO: 95830 - DNA, 25 bp, Probe sequence
acaagtagtatatctgttctagcta

SEQ ID NO: 95831 - DNA, 25 bp, Probe sequence
aacctctttctattaagttgtcaga

SEQ ID NO: 95832 - DNA, 25 bp, Probe sequence
aattctcgttcttatccttttgaat

SEQ ID NO: 95833 - DNA, 25 bp, Probe sequence
cttcactttagctttgtcaaacctc

SEQ ID NO: 95834 - DNA, 25 bp, Probe sequence
gctactagaatgacatactacttgt

SEQ ID NO: 95835 - DNA, 25 bp, Probe sequence
gctttgtcaaacctctttctattaa

SEQ ID NO: 95836 - DNA, 25 bp, Probe sequence
gaatatactcaattttccacaaaaa

SEQ ID NO: 95837 - DNA, 25 bp, Probe sequence
gaatgacatactacttgttatttaa

SEQ ID NO: 95838 - DNA, 25 bp, Probe sequence
gttgtcagaaataaacctatcttaa

SEQ ID NO: 95839 - DNA, 25 bp, Probe sequence
gttcttatccttttgaatatactca

SEQ ID NO: 95840 - DNA, 25 bp, Probe sequence
gtcgtacttcactttagctttgtca

SEQ ID NO: 95841 - DNA, 25 bp, Probe sequence
tagctttgtcaaacctctttctatt

SEQ ID NO: 95842 - DNA, 25 bp, Probe sequence
tttataccgtcgtacttcactttag

SEQ ID NO: 95843 - DNA, 25 bp, Probe sequence
atatgccttgattaaattgtattat

SEQ ID NO: 95844 - DNA, 25 bp, Probe sequence
atcccccttgatacatttttatatt

SEQ ID NO: 95845 - DNA, 25 bp, Probe sequence
atgatcccccttgatacatttttat

SEQ ID NO: 95846 - DNA, 25 bp, Probe sequence
actttaatatttcttttcaatgtca

SEQ ID NO: 95847 - DNA, 25 bp, Probe sequence
aactcatcatgcttagaaaacgctt

SEQ ID NO: 95848 - DNA, 25 bp, Probe sequence
caaacgtattatttcattgagcaga

SEQ ID NO: 95849 - DNA, 25 bp, Probe sequence
catgcttagaaaacgcttaatttag

SEQ ID NO: 95850 - DNA, 25 bp, Probe sequence
gcaaaacttatcatacaggtaaggt

SEQ ID NO: 95851 - DNA, 25 bp, Probe sequence
gagcagaaagaaaattgtggcgcca

SEQ ID NO: 95852 - DNA, 25 bp, Probe sequence
gataaacaactcatcatgcttagaa

SEQ ID NO: 95853 - DNA, 25 bp, Probe sequence
gattcaattcaattttcaaacgtat

SEQ ID NO: 95854 - DNA, 25 bp, Probe sequence
gtggcgccaaactttaatatttctt

SEQ ID NO: 95855 - DNA, 25 bp, Probe sequence
ttatcaatttcgtgaatgattcaat

SEQ ID NO: 95856 - DNA, 25 bp, Probe sequence
ttaggttttgactttttaatcagag

SEQ ID NO: 95857 - DNA, 25 bp, Probe sequence
ttaatgatcccccttgatacatttt

SEQ ID NO: 95858 - DNA, 25 bp, Probe sequence
atatctcattctaacataaaataca

SEQ ID NO: 95859 - DNA, 25 bp, Probe sequence
ataccgattgaaattttactgtgat

SEQ ID NO: 95860 - DNA, 25 bp, Probe sequence
atcaaagtgcctcaaataccgattg

SEQ ID NO: 95861 - DNA, 25 bp, Probe sequence
aaaatacaagaagaggccggccaag

SEQ ID NO: 95862 - DNA, 25 bp, Probe sequence
aagaggccggccaagaacacaaagg

SEQ ID NO: 95863 - DNA, 25 bp, Probe sequence
aagtgcctcaaataccgattgaaat

SEQ ID NO: 95864 - DNA, 25 bp, Probe sequence
cactatcaaagtgcctcaaataccg

SEQ ID NO: 95865 - DNA, 25 bp, Probe sequence
gaggccggccaagaacacaaaggtt

SEQ ID NO: 95866 - DNA, 25 bp, Probe sequence
gccggccaagaacacaaaggttttg

SEQ ID NO: 95867 - DNA, 25 bp, Probe sequence
gccttctttcagtttaactttatat

SEQ ID NO: 95868 - DNA, 25 bp, Probe sequence
gaaccgacctattatatcataaagt

SEQ ID NO: 95869 - DNA, 25 bp, Probe sequence
gaaattttactgtgatatctatttt

SEQ ID NO: 95870 - DNA, 25 bp, Probe sequence
ggttttgaaccgacctattatatca

SEQ ID NO: 95871 - DNA, 25 bp, Probe sequence
taactttatatctcattctaacata

SEQ ID NO: 95872 - DNA, 25 bp, Probe sequence
tagaagtatttttgagcactatcaa

SEQ ID NO: 95873 - DNA, 25 bp, Probe sequence
attaattgttaatattgcctctcca

SEQ ID NO: 95874 - DNA, 25 bp, Probe sequence
agcacatctgatgttgtatgaacaa

SEQ ID NO: 95875 - DNA, 25 bp, Probe sequence
agcttatcttcacgctaattacatt

SEQ ID NO: 95876 - DNA, 25 bp, Probe sequence
actttggtttagcacatctgatgtt

SEQ ID NO: 95877 - DNA, 25 bp, Probe sequence
acattctgatgtgtcctgaacctcg

SEQ ID NO: 95878 - DNA, 25 bp, Probe sequence
aacgaacttgtttacacattctgat

SEQ ID NO: 95879 - DNA, 25 bp, Probe sequence
aatattgcctctccaaacatttaca

SEQ ID NO: 95880 - DNA, 25 bp, Probe sequence
gctatatattagcttatcttcacgc

SEQ ID NO: 95881 - DNA, 25 bp, Probe sequence
gaacaagttcgtttttgctatatat

SEQ ID NO: 95882 - DNA, 25 bp, Probe sequence
gatgtgtcctgaacctcggaagttg

SEQ ID NO: 95883 - DNA, 25 bp, Probe sequence
gttgtactttggtttagcacatctg

SEQ ID NO: 95884 - DNA, 25 bp, Probe sequence
gttaacgtattggctatttcttata

SEQ ID NO: 95885 - DNA, 25 bp, Probe sequence
gtcctgaacctcggaagttgtactt

SEQ ID NO: 95886 - DNA, 25 bp, Probe sequence
tgcctctccaaacatttacagtaac

SEQ ID NO: 95887 - DNA, 25 bp, Probe sequence
tcttcacgctaattacattaatgtt

SEQ ID NO: 95888 - DNA, 25 bp, Probe sequence
attagtccatcattgcatatttttt

SEQ ID NO: 95889 - DNA, 25 bp, Probe sequence
atttttttgcagttgatggattatt

SEQ ID NO: 95890 - DNA, 25 bp, Probe sequence
atcattgcatatttttttgcagttg

SEQ ID NO: 95891 - DNA, 25 bp, Probe sequence
acattagtccatcattgcatatttt

SEQ ID NO: 95892 - DNA, 25 bp, Probe sequence
caattttttgacattagtccatcat

SEQ ID NO: 95893 - DNA, 25 bp, Probe sequence
gcatatttttttgcagttgatggat

SEQ ID NO: 95894 - DNA, 25 bp, Probe sequence
gacattagtccatcattgcatattt

SEQ ID NO: 95895 - DNA, 25 bp, Probe sequence
gtccatcattgcatatttttttgca

SEQ ID NO: 95896 - DNA, 25 bp, Probe sequence
taacttaaaattcaactatacttag

SEQ ID NO: 95897 - DNA, 25 bp, Probe sequence
tagtccatcattgcatatttttttg

SEQ ID NO: 95898 - DNA, 25 bp, Probe sequence
ttttgacattagtccatcattgcat

SEQ ID NO: 95899 - DNA, 25 bp, Probe sequence
ttttttgcagttgatggattatttt

SEQ ID NO: 95900 - DNA, 25 bp, Probe sequence
ttttttgacattagtccatcattgc

SEQ ID NO: 95901 - DNA, 25 bp, Probe sequence
ttacaagaacatttgagaccgagac

SEQ ID NO: 95902 - DNA, 25 bp, Probe sequence
ttgacattagtccatcattgcatat

SEQ ID NO: 95903 - DNA, 25 bp, Probe sequence
attaactttcatagcttaattccat

SEQ ID NO: 95904 - DNA, 25 bp, Probe sequence
atagtcctaagatattaaaggatgt

SEQ ID NO: 95905 - DNA, 25 bp, Probe sequence
atgataaaatagtcctaagatatta

SEQ ID NO: 95906 - DNA, 25 bp, Probe sequence
agcttaattccatatattaatcccc

SEQ ID NO: 95907 - DNA, 25 bp, Probe sequence
agccgtaatttaaatgaatatgata

SEQ ID NO: 95908 - DNA, 25 bp, Probe sequence
aatatgataaaatagtcctaagata

SEQ ID NO: 95909 - DNA, 25 bp, Probe sequence
cttaattccatatattaatccccgt

SEQ ID NO: 95910 - DNA, 25 bp, Probe sequence
gcttaattccatatattaatccccg

SEQ ID NO: 95911 - DNA, 25 bp, Probe sequence
gaatatgataaaatagtcctaagat

SEQ ID NO: 95912 - DNA, 25 bp, Probe sequence
gataaaatagtcctaagatattaaa

SEQ ID NO: 95913 - DNA, 25 bp, Probe sequence
taattccatatattaatccccgttt

SEQ ID NO: 95914 - DNA, 25 bp, Probe sequence
taaaatagtcctaagatattaaagg

SEQ ID NO: 95915 - DNA, 25 bp, Probe sequence
tagccgtaatttaaatgaatatgat

SEQ ID NO: 95916 - DNA, 25 bp, Probe sequence
ttagccgtaatttaaatgaatatga

SEQ ID NO: 95917 - DNA, 25 bp, Probe sequence
ttaattccatatattaatccccgtt

SEQ ID NO: 95918 - DNA, 25 bp, Probe sequence
atttaacattactgtattttatcat

SEQ ID NO: 95919 - DNA, 25 bp, Probe sequence
atataaatcccttgaatttagtcaa

SEQ ID NO: 95920 - DNA, 25 bp, Probe sequence
agtttggtcaaagtctatcgctaat

SEQ ID NO: 95921 - DNA, 25 bp, Probe sequence
aacattactgtattttatcatttaa

SEQ ID NO: 95922 - DNA, 25 bp, Probe sequence
aacgataagtacttggtcagcattt

SEQ ID NO: 95923 - DNA, 25 bp, Probe sequence
aagtacttggtcagcatttaatata

SEQ ID NO: 95924 - DNA, 25 bp, Probe sequence
gataagtacttggtcagcatttaat

SEQ ID NO: 95925 - DNA, 25 bp, Probe sequence
gtttggtcaaagtctatcgctaatt

SEQ ID NO: 95926 - DNA, 25 bp, Probe sequence
gtacttggtcagcatttaatataaa

SEQ ID NO: 95927 - DNA, 25 bp, Probe sequence
gtcaaagtctatcgctaatttaacg

SEQ ID NO: 95928 - DNA, 25 bp, Probe sequence
gtctatcgctaatttaacgataagt

SEQ ID NO: 95929 - DNA, 25 bp, Probe sequence
tcatttaatttcgtgattgcatata

SEQ ID NO: 95930 - DNA, 25 bp, Probe sequence
taaatcccttgaatttagtcaaaat

SEQ ID NO: 95931 - DNA, 25 bp, Probe sequence
ttaatttcgtgattgcatatagttt

SEQ ID NO: 95932 - DNA, 25 bp, Probe sequence
ttggtcaaagtctatcgctaattta

SEQ ID NO: 95933 - DNA, 25 bp, Probe sequence
atatatcggaaatgtctaacttgaa

SEQ ID NO: 95934 - DNA, 25 bp, Probe sequence
atacttgtgttctattacacgccta

SEQ ID NO: 95935 - DNA, 25 bp, Probe sequence
ataaatttatattcatctatccaac

SEQ ID NO: 95936 - DNA, 25 bp, Probe sequence
accctgagattttcgctttaatttg

SEQ ID NO: 95937 - DNA, 25 bp, Probe sequence
aatctgactcccatatttacaaata

SEQ ID NO: 95938 - DNA, 25 bp, Probe sequence
cttaatttaatttcgatgtctctca

SEQ ID NO: 95939 - DNA, 25 bp, Probe sequence
ctattacacgcctatcctatatgat

SEQ ID NO: 95940 - DNA, 25 bp, Probe sequence
cgatgtctctcaaagtggaataact

SEQ ID NO: 95941 - DNA, 25 bp, Probe sequence
gaaataaatctcaaccttactatat

SEQ ID NO: 95942 - DNA, 25 bp, Probe sequence
gagtacaaatttaaaaccctgagat

SEQ ID NO: 95943 - DNA, 25 bp, Probe sequence
gtatagtctttgcacaccaatggag

SEQ ID NO: 95944 - DNA, 25 bp, Probe sequence
tcatctatccaacaatatgtcttat

SEQ ID NO: 95945 - DNA, 25 bp, Probe sequence
tactcaatacaaactaaaacgcact

SEQ ID NO: 95946 - DNA, 25 bp, Probe sequence
tatcatcacctatttttctattatt

SEQ ID NO: 95947 - DNA, 25 bp, Probe sequence
ttcgctttaatttgaaaacctcagg

SEQ ID NO: 95948 - DNA, 25 bp, Probe sequence
atcaattctaattatttctgttata

SEQ ID NO: 95949 - DNA, 25 bp, Probe sequence
atgcatgtgctttataaacggctaa

SEQ ID NO: 95950 - DNA, 25 bp, Probe sequence
agaaaatatttctatctcaaacaga

SEQ ID NO: 95951 - DNA, 25 bp, Probe sequence
acctttgatttatataacacttttg

SEQ ID NO: 95952 - DNA, 25 bp, Probe sequence
aacacttttgtcatattgatatctg

SEQ ID NO: 95953 - DNA, 25 bp, Probe sequence
aacagccgattatgagtgcttctta

SEQ ID NO: 95954 - DNA, 25 bp, Probe sequence
aacatatagtcattggtatttttta

SEQ ID NO: 95955 - DNA, 25 bp, Probe sequence
aactgcccaacattataagcaccat

SEQ ID NO: 95956 - DNA, 25 bp, Probe sequence
aatagcatatcatttacctttgatt

SEQ ID NO: 95957 - DNA, 25 bp, Probe sequence
aatatggttatctatactgattcat

SEQ ID NO: 95958 - DNA, 25 bp, Probe sequence
gctaaacatgtgctgataatcataa

SEQ ID NO: 95959 - DNA, 25 bp, Probe sequence
tcaagtggcaaatactcgtttcatt

SEQ ID NO: 95960 - DNA, 25 bp, Probe sequence
taatcataaatgtaactgcccaaca

SEQ ID NO: 95961 - DNA, 25 bp, Probe sequence
taagcaccataaaaaataccaacaa

SEQ ID NO: 95962 - DNA, 25 bp, Probe sequence
tactcgtttcattatgcatgtgctt

SEQ ID NO: 95963 - DNA, 25 bp, Probe sequence
atacctcttagcacttggattttaa

SEQ ID NO: 95964 - DNA, 25 bp, Probe sequence
acttaacttaagctcatttcaatat

SEQ ID NO: 95965 - DNA, 25 bp, Probe sequence
acttgatgaaactgattgggctgat

SEQ ID NO: 95966 - DNA, 25 bp, Probe sequence
acttaaatattcttatctgtaccgt

SEQ ID NO: 95967 - DNA, 25 bp, Probe sequence
aaaccaaaaaatccaagcgcttcag

SEQ ID NO: 95968 - DNA, 25 bp, Probe sequence
aactgtatacctcttagcacttgga

SEQ ID NO: 95969 - DNA, 25 bp, Probe sequence
aatccaagcgcttcaggcataactg

SEQ ID NO: 95970 - DNA, 25 bp, Probe sequence
gcgcttcaggcataactgtatacct

SEQ ID NO: 95971 - DNA, 25 bp, Probe sequence
gttaggcgacttaacttaagctcat

SEQ ID NO: 95972 - DNA, 25 bp, Probe sequence
gtatacctcttagcacttggatttt

SEQ ID NO: 95973 - DNA, 25 bp, Probe sequence
gggctgataataaaagttaggcgac

SEQ ID NO: 95974 - DNA, 25 bp, Probe sequence
ggcataactgtatacctcttagcac

SEQ ID NO: 95975 - DNA, 25 bp, Probe sequence
tgtaccgttttttataaatcattct

SEQ ID NO: 95976 - DNA, 25 bp, Probe sequence
tacggtacagataggaaacttaaat

SEQ ID NO: 95977 - DNA, 25 bp, Probe sequence
tattcttatctgtaccgttttttat

SEQ ID NO: 95978 - DNA, 25 bp, Probe sequence
ataaatcgtactaaggtctaatgaa

SEQ ID NO: 95979 - DNA, 25 bp, Probe sequence
atcgtactaaggtctaatgaaagga

SEQ ID NO: 95980 - DNA, 25 bp, Probe sequence
agtgatttcttaataaatcgtacta

SEQ ID NO: 95981 - DNA, 25 bp, Probe sequence
acctaccttatatcttcaaaaatag

SEQ ID NO: 95982 - DNA, 25 bp, Probe sequence
aaatcgtactaaggtctaatgaaag

SEQ ID NO: 95983 - DNA, 25 bp, Probe sequence
aaaagcaagtgatttcttaataaat

SEQ ID NO: 95984 - DNA, 25 bp, Probe sequence
aataaatcgtactaaggtctaatga

SEQ ID NO: 95985 - DNA, 25 bp, Probe sequence
aataatcacatattaacgttatata

SEQ ID NO: 95986 - DNA, 25 bp, Probe sequence
aattcaaaaagcaagtgatttctta

SEQ ID NO: 95987 - DNA, 25 bp, Probe sequence
cctaccttatatcttcaaaaataga

SEQ ID NO: 95988 - DNA, 25 bp, Probe sequence
gatttttgtgtactataataatcac

SEQ ID NO: 95989 - DNA, 25 bp, Probe sequence
taaggtctaatgaaaggatgtcaaa

SEQ ID NO: 95990 - DNA, 25 bp, Probe sequence
tactaaggtctaatgaaaggatgtc

SEQ ID NO: 95991 - DNA, 25 bp, Probe sequence
tacctaccttatatcttcaaaaata

SEQ ID NO: 95992 - DNA, 25 bp, Probe sequence
ttacctaccttatatcttcaaaaat

SEQ ID NO: 95993 - DNA, 25 bp, Probe sequence
acgtgttctatttcaactattttag

SEQ ID NO: 95994 - DNA, 25 bp, Probe sequence
acttgaaccttattatatacgaaca

SEQ ID NO: 95995 - DNA, 25 bp, Probe sequence
acacgtgttctatttcaactatttt

SEQ ID NO: 95996 - DNA, 25 bp, Probe sequence
aatgttctgttattttgcaaatgaa

SEQ ID NO: 95997 - DNA, 25 bp, Probe sequence
aatgaatttttaagtattacatgat

SEQ ID NO: 95998 - DNA, 25 bp, Probe sequence
cttacttgaaccttattatatacga

SEQ ID NO: 95999 - DNA, 25 bp, Probe sequence
ctatttcaactattttagaacaaat

SEQ ID NO: 96000 - DNA, 25 bp, Probe sequence
ctcccttacttgaaccttattatat

SEQ ID NO: 96001 - DNA, 25 bp, Probe sequence
cgaacacgtgttctatttcaactat

SEQ ID NO: 96002 - DNA, 25 bp, Probe sequence
gaaccttattatatacgaacacgtg

SEQ ID NO: 96003 - DNA, 25 bp, Probe sequence
gaacaaatgttctgttattttgcaa

SEQ ID NO: 96004 - DNA, 25 bp, Probe sequence
gaacacgtgttctatttcaactatt

SEQ ID NO: 96005 - DNA, 25 bp, Probe sequence
gttctgttattttgcaaatgaattt

SEQ ID NO: 96006 - DNA, 25 bp, Probe sequence
gtattacatgatatactcaaattaa

SEQ ID NO: 96007 - DNA, 25 bp, Probe sequence
tcccttacttgaaccttattatata

SEQ ID NO: 96008 - DNA, 25 bp, Probe sequence
atatattccttaaaccgtatagtca

SEQ ID NO: 96009 - DNA, 25 bp, Probe sequence
atctttagagacttattttatacga

SEQ ID NO: 96010 - DNA, 25 bp, Probe sequence
aagtctcttttgataaattcccatg

SEQ ID NO: 96011 - DNA, 25 bp, Probe sequence
aattcccatgtattcttagatatta

SEQ ID NO: 96012 - DNA, 25 bp, Probe sequence
cacagttatatattccttaaaccgt

SEQ ID NO: 96013 - DNA, 25 bp, Probe sequence
cagttatatattccttaaaccgtat

SEQ ID NO: 96014 - DNA, 25 bp, Probe sequence
gaaatatttatctttagagacttat

SEQ ID NO: 96015 - DNA, 25 bp, Probe sequence
gagacttattttatacgaatcacag

SEQ ID NO: 96016 - DNA, 25 bp, Probe sequence
gataaattcccatgtattcttagat

SEQ ID NO: 96017 - DNA, 25 bp, Probe sequence
gatattattgtgaaatctattgtga

SEQ ID NO: 96018 - DNA, 25 bp, Probe sequence
gtctcttttgataaattcccatgta

SEQ ID NO: 96019 - DNA, 25 bp, Probe sequence
tcccatgtattcttagatattattg

SEQ ID NO: 96020 - DNA, 25 bp, Probe sequence
tcttttgataaattcccatgtattc

SEQ ID NO: 96021 - DNA, 25 bp, Probe sequence
tacgaatcacagttatatattcctt

SEQ ID NO: 96022 - DNA, 25 bp, Probe sequence
ttaagtctcttttgataaattccca

SEQ ID NO: 96023 - DNA, 25 bp, Probe sequence
attgcactgtgtcaacagctcattt

SEQ ID NO: 96024 - DNA, 25 bp, Probe sequence
atcgatttttatttactattgcact

SEQ ID NO: 96025 - DNA, 25 bp, Probe sequence
atgctattatcgatttttatttact

SEQ ID NO: 96026 - DNA, 25 bp, Probe sequence
actgtgtcaacagctcatttacaat

SEQ ID NO: 96027 - DNA, 25 bp, Probe sequence
catttacaatgttattattctgaaa

SEQ ID NO: 96028 - DNA, 25 bp, Probe sequence
ccgtttatctattaatgctattatc

SEQ ID NO: 96029 - DNA, 25 bp, Probe sequence
cctccgttgccattgtgttactata

SEQ ID NO: 96030 - DNA, 25 bp, Probe sequence
gccattgtgttactatactctttat

SEQ ID NO: 96031 - DNA, 25 bp, Probe sequence
gatttatctccgtttatctattaat

SEQ ID NO: 96032 - DNA, 25 bp, Probe sequence
gttgccattgtgttactatactctt

SEQ ID NO: 96033 - DNA, 25 bp, Probe sequence
gttactatactctttattgtagatg

SEQ ID NO: 96034 - DNA, 25 bp, Probe sequence
gtagatgatttatctccgtttatct

SEQ ID NO: 96035 - DNA, 25 bp, Probe sequence
gtcaacagctcatttacaatgttat

SEQ ID NO: 96036 - DNA, 25 bp, Probe sequence
tatctccgtttatctattaatgcta

SEQ ID NO: 96037 - DNA, 25 bp, Probe sequence
ttttatttactattgcactgtgtca

SEQ ID NO: 96038 - DNA, 25 bp, Probe sequence
atatggcgtgctaattcccatcacc

SEQ ID NO: 96039 - DNA, 25 bp, Probe sequence
aggtcgttcacatttgtcaacacta

SEQ ID NO: 96040 - DNA, 25 bp, Probe sequence
agacaccacataacgcatatacctg

SEQ ID NO: 96041 - DNA, 25 bp, Probe sequence
ctgtaaggacgcgttaccgtggtgc

SEQ ID NO: 96042 - DNA, 25 bp, Probe sequence
acatcatccactaactttctgttgc

SEQ ID NO: 96043 - DNA, 25 bp, Probe sequence
aaatattcatagttcactctttact

SEQ ID NO: 96044 - DNA, 25 bp, Probe sequence
aacccaatttcattaatctcggtgt

SEQ ID NO: 96045 - DNA, 25 bp, Probe sequence
cgtggtgccaccttagttaacataa

SEQ ID NO: 96046 - DNA, 25 bp, Probe sequence
ccatcacccattagctttctatttg

SEQ ID NO: 96047 - DNA, 25 bp, Probe sequence
gctttctatttgctacgtttcatat

SEQ ID NO: 96048 - DNA, 25 bp, Probe sequence
gttttccaaagtccaattcacaaga

SEQ ID NO: 96049 - DNA, 25 bp, Probe sequence
gtttcatatctgctactatttcttt

SEQ ID NO: 96050 - DNA, 25 bp, Probe sequence
tctcggtgttagttcacatcatcca

SEQ ID NO: 96051 - DNA, 25 bp, Probe sequence
tcatgttcactttcaaaactcattc

SEQ ID NO: 96052 - DNA, 25 bp, Probe sequence
taactttctgttgctacctttaatt

SEQ ID NO: 96053 - DNA, 25 bp, Probe sequence
attacttttgtatcatttctattca

SEQ ID NO: 96054 - DNA, 25 bp, Probe sequence
aacgtttgggtttgctcatattact

SEQ ID NO: 96055 - DNA, 25 bp, Probe sequence
ctaaaacataaacgctttaattgcg

SEQ ID NO: 96056 - DNA, 25 bp, Probe sequence
ctttttcaaacagtattcgcctaat

SEQ ID NO: 96057 - DNA, 25 bp, Probe sequence
gctttaattgcgtatacttttatag

SEQ ID NO: 96058 - DNA, 25 bp, Probe sequence
gtttgggtttgctcatattactttt

SEQ ID NO: 96059 - DNA, 25 bp, Probe sequence
gtatcatttctattcaattttataa

SEQ ID NO: 96060 - DNA, 25 bp, Probe sequence
gtaatatgaacgtttgggtttgctc

SEQ ID NO: 96061 - DNA, 25 bp, Probe sequence
gtaatatttagatttttgcatacaa

SEQ ID NO: 96062 - DNA, 25 bp, Probe sequence
ggtttgctcatattacttttgtatc

SEQ ID NO: 96063 - DNA, 25 bp, Probe sequence
tgggtttgctcatattacttttgta

SEQ ID NO: 96064 - DNA, 25 bp, Probe sequence
tcaaacagtattcgcctaatttttt

SEQ ID NO: 96065 - DNA, 25 bp, Probe sequence
tattcaattttataattcaccgttt

SEQ ID NO: 96066 - DNA, 25 bp, Probe sequence
tttagatttttgcatacaatttcaa

SEQ ID NO: 96067 - DNA, 25 bp, Probe sequence
ttcactttttcaaacagtattcgcc

SEQ ID NO: 96068 - DNA, 25 bp, Probe sequence
acttacttgcatttcatactcagat

SEQ ID NO: 96069 - DNA, 25 bp, Probe sequence
aaaaagagcctatagtatcaataac

SEQ ID NO: 96070 - DNA, 25 bp, Probe sequence
aaaactcaaatatgacgctatatat

SEQ ID NO: 96071 - DNA, 25 bp, Probe sequence
catactcagataaccattattttat

SEQ ID NO: 96072 - DNA, 25 bp, Probe sequence
ctataagccctaacatcatttacat

SEQ ID NO: 96073 - DNA, 25 bp, Probe sequence
ctacctcacttacttgcatttcata

SEQ ID NO: 96074 - DNA, 25 bp, Probe sequence
cctcacttacttgcatttcatactc

SEQ ID NO: 96075 - DNA, 25 bp, Probe sequence
gacaaatacatactagtttttctta

SEQ ID NO: 96076 - DNA, 25 bp, Probe sequence
gacgctatatattttatgttttgca

SEQ ID NO: 96077 - DNA, 25 bp, Probe sequence
gtatcaataactataagccctaaca

SEQ ID NO: 96078 - DNA, 25 bp, Probe sequence
tgttttgcataatcttttaatcata

SEQ ID NO: 96079 - DNA, 25 bp, Probe sequence
tgcatttcatactcagataaccatt

SEQ ID NO: 96080 - DNA, 25 bp, Probe sequence
tacatactagtttttcttagtgtga

SEQ ID NO: 96081 - DNA, 25 bp, Probe sequence
tttttaactacctcacttacttgca

SEQ ID NO: 96082 - DNA, 25 bp, Probe sequence
ttaactacctcacttacttgcattt

SEQ ID NO: 96083 - DNA, 25 bp, Probe sequence
atgtagggtaccttttgcgtcacac

SEQ ID NO: 96084 - DNA, 25 bp, Probe sequence
agtatgtttgtagttactattaact

SEQ ID NO: 96085 - DNA, 25 bp, Probe sequence
acacacattacttcctataatatat

SEQ ID NO: 96086 - DNA, 25 bp, Probe sequence
aaatcactccaaacaatataatacc

SEQ ID NO: 96087 - DNA, 25 bp, Probe sequence
cactccaaacaatataataccatga

SEQ ID NO: 96088 - DNA, 25 bp, Probe sequence
cgtcacacacattacttcctataat

SEQ ID NO: 96089 - DNA, 25 bp, Probe sequence
gacttatataacttcgattttgtat

SEQ ID NO: 96090 - DNA, 25 bp, Probe sequence
gatgtagggtaccttttgcgtcaca

SEQ ID NO: 96091 - DNA, 25 bp, Probe sequence
gataatgattatgatgtagggtacc

SEQ ID NO: 96092 - DNA, 25 bp, Probe sequence
gattttgtataagtcgttttgatta

SEQ ID NO: 96093 - DNA, 25 bp, Probe sequence
gtaagttatgtgacgatattagata

SEQ ID NO: 96094 - DNA, 25 bp, Probe sequence
ggggacttatataacttcgattttg

SEQ ID NO: 96095 - DNA, 25 bp, Probe sequence
tgtgaaattccataaggggacttat

SEQ ID NO: 96096 - DNA, 25 bp, Probe sequence
taataccatgattatagcataagta

SEQ ID NO: 96097 - DNA, 25 bp, Probe sequence
taagtcgttttgattattagtaaag

SEQ ID NO: 96098 - DNA, 25 bp, Probe sequence
attaatctagacacttatcgatttt

SEQ ID NO: 96099 - DNA, 25 bp, Probe sequence
atctagacacttatcgattttattt

SEQ ID NO: 96100 - DNA, 25 bp, Probe sequence
atgcgataattctagacttgttata

SEQ ID NO: 96101 - DNA, 25 bp, Probe sequence
aattctagacttgttataaaatata

SEQ ID NO: 96102 - DNA, 25 bp, Probe sequence
cacttatcgattttattttctttat

SEQ ID NO: 96103 - DNA, 25 bp, Probe sequence
ctagacacttatcgattttattttc

SEQ ID NO: 96104 - DNA, 25 bp, Probe sequence
gcgataattctagacttgttataaa

SEQ ID NO: 96105 - DNA, 25 bp, Probe sequence
gaatcaagtatattaatctagacac

SEQ ID NO: 96106 - DNA, 25 bp, Probe sequence
gaatgcgataattctagacttgtta

SEQ ID NO: 96107 - DNA, 25 bp, Probe sequence
gacacttatcgattttattttcttt

SEQ ID NO: 96108 - DNA, 25 bp, Probe sequence
gtatattaatctagacacttatcga

SEQ ID NO: 96109 - DNA, 25 bp, Probe sequence
tctagacacttatcgattttatttt

SEQ ID NO: 96110 - DNA, 25 bp, Probe sequence
taatctagacacttatcgattttat

SEQ ID NO: 96111 - DNA, 25 bp, Probe sequence
tagacacttatcgattttattttct

SEQ ID NO: 96112 - DNA, 25 bp, Probe sequence
tatattaatctagacacttatcgat

SEQ ID NO: 96113 - DNA, 25 bp, Probe sequence
atatgcacaaaatcatcgactttta

SEQ ID NO: 96114 - DNA, 25 bp, Probe sequence
ataatactataatgaacgttggttc

SEQ ID NO: 96115 - DNA, 25 bp, Probe sequence
atcatcgacttttaagttacactgc

SEQ ID NO: 96116 - DNA, 25 bp, Probe sequence
agtgctatagttgtttttgttttga

SEQ ID NO: 96117 - DNA, 25 bp, Probe sequence
acttcaatttctttatggataatac

SEQ ID NO: 96118 - DNA, 25 bp, Probe sequence
aatatacttcaatttctttatggat

SEQ ID NO: 96119 - DNA, 25 bp, Probe sequence
gctatagttgtttttgttttgactt

SEQ ID NO: 96120 - DNA, 25 bp, Probe sequence
gagatggaatacagtgctatagttg

SEQ ID NO: 96121 - DNA, 25 bp, Probe sequence
tgaacgttggttcttaatatgtaag

SEQ ID NO: 96122 - DNA, 25 bp, Probe sequence
tcgacttttaagttacactgcagta

SEQ ID NO: 96123 - DNA, 25 bp, Probe sequence
tacactgcagtaacaattatttcga

SEQ ID NO: 96124 - DNA, 25 bp, Probe sequence
tacatggttgacttgattcaaaata

SEQ ID NO: 96125 - DNA, 25 bp, Probe sequence
tattttacatggttgacttgattca

SEQ ID NO: 96126 - DNA, 25 bp, Probe sequence
tattcgacaactatatgcacaaaat

SEQ ID NO: 96127 - DNA, 25 bp, Probe sequence
ttgacttttttatattttacatggt

SEQ ID NO: 96128 - DNA, 25 bp, Probe sequence
attgcttgaaactgactgctattgt

SEQ ID NO: 96129 - DNA, 25 bp, Probe sequence
ataatcactcctttggtataataca

SEQ ID NO: 96130 - DNA, 25 bp, Probe sequence
acataattttgtctcctaaacgata

SEQ ID NO: 96131 - DNA, 25 bp, Probe sequence
atcactcctttggtataatacattc

SEQ ID NO: 96132 - DNA, 25 bp, Probe sequence
acgatttccatgtcgcaaggaacaa

SEQ ID NO: 96133 - DNA, 25 bp, Probe sequence
actgactgctattgtttaagttttt

SEQ ID NO: 96134 - DNA, 25 bp, Probe sequence
actcctttggtataatacattcatt

SEQ ID NO: 96135 - DNA, 25 bp, Probe sequence
aattttgtctcctaaacgataatgt

SEQ ID NO: 96136 - DNA, 25 bp, Probe sequence
cattatacataattttgtctcctaa

SEQ ID NO: 96137 - DNA, 25 bp, Probe sequence
gataatgttacgatttccatgtcgc

SEQ ID NO: 96138 - DNA, 25 bp, Probe sequence
gatagaatattgcttgaaactgact

SEQ ID NO: 96139 - DNA, 25 bp, Probe sequence
gtctcctaaacgataatgttacgat

SEQ ID NO: 96140 - DNA, 25 bp, Probe sequence
gtcgcaaggaacaatgatttttcta

SEQ ID NO: 96141 - DNA, 25 bp, Probe sequence
ggaacaatgatttttctaatagtag

SEQ ID NO: 96142 - DNA, 25 bp, Probe sequence
tgttacgatttccatgtcgcaagga

SEQ ID NO: 96143 - DNA, 25 bp, Probe sequence
atttctatcattcataaaccctcaa

SEQ ID NO: 96144 - DNA, 25 bp, Probe sequence
atatttctatcattcataaaccctc

SEQ ID NO: 96145 - DNA, 25 bp, Probe sequence
atcttggtttatattgttctactat

SEQ ID NO: 96146 - DNA, 25 bp, Probe sequence
agtaatgtgaaaatcttggtttata

SEQ ID NO: 96147 - DNA, 25 bp, Probe sequence
accaagattctcacaattagtaatg

SEQ ID NO: 96148 - DNA, 25 bp, Probe sequence
aaatcttggtttatattgttctact

SEQ ID NO: 96149 - DNA, 25 bp, Probe sequence
aaaaaccaagattctcacaattagt

SEQ ID NO: 96150 - DNA, 25 bp, Probe sequence
aatcccttacgataaatatatattt

SEQ ID NO: 96151 - DNA, 25 bp, Probe sequence
cctcaaaaaaaccaagattctcaca

SEQ ID NO: 96152 - DNA, 25 bp, Probe sequence
gttctactataaattgtctcgcatc

SEQ ID NO: 96153 - DNA, 25 bp, Probe sequence
tactataaaatcccttacgataaat

SEQ ID NO: 96154 - DNA, 25 bp, Probe sequence
tatcattcataaaccctcaaaaaaa

SEQ ID NO: 96155 - DNA, 25 bp, Probe sequence
ttattactataaaatcccttacgat

SEQ ID NO: 96156 - DNA, 25 bp, Probe sequence
ttctatcattcataaaccctcaaaa

SEQ ID NO: 96157 - DNA, 25 bp, Probe sequence
ttgttctactataaattgtctcgca

SEQ ID NO: 96158 - DNA, 25 bp, Probe sequence
atttgttgttcatacagggaggata

SEQ ID NO: 96159 - DNA, 25 bp, Probe sequence
aatactatttgttgttcatacaggg

SEQ ID NO: 96160 - DNA, 25 bp, Probe sequence
caaatactatttgttgttcatacag

SEQ ID NO: 96161 - DNA, 25 bp, Probe sequence
ctatttgttgttcatacagggagga

SEQ ID NO: 96162 - DNA, 25 bp, Probe sequence
gaggttaataattcaaggttaagat

SEQ ID NO: 96163 - DNA, 25 bp, Probe sequence
gatgtaatcaatacaaatactattt

SEQ ID NO: 96164 - DNA, 25 bp, Probe sequence
gttgttcatacagggaggatatttc

SEQ ID NO: 96165 - DNA, 25 bp, Probe sequence
tgtaacatttacagtttctaaaaat

SEQ ID NO: 96166 - DNA, 25 bp, Probe sequence
taattttactaatgaagcaatattt

SEQ ID NO: 96167 - DNA, 25 bp, Probe sequence
taatatttacattttcttaacaaat

SEQ ID NO: 96168 - DNA, 25 bp, Probe sequence
tacagtttctaaaaatgaggttaat

SEQ ID NO: 96169 - DNA, 25 bp, Probe sequence
tacattttcttaacaaatttttatg

SEQ ID NO: 96170 - DNA, 25 bp, Probe sequence
tactatttgttgttcatacagggag

SEQ ID NO: 96171 - DNA, 25 bp, Probe sequence
tttatgtaacatttacagtttctaa

SEQ ID NO: 96172 - DNA, 25 bp, Probe sequence
ttgttcatacagggaggatatttca

SEQ ID NO: 96173 - DNA, 25 bp, Probe sequence
aaagcgaagccattcaatacgaagt

SEQ ID NO: 96174 - DNA, 25 bp, Probe sequence
aattatcttactgctgtttttttag

SEQ ID NO: 96175 - DNA, 25 bp, Probe sequence
aattgaaaattatcttactgctgtt

SEQ ID NO: 96176 - DNA, 25 bp, Probe sequence
gccagacgggcaaagcgaagccatt

SEQ ID NO: 96177 - DNA, 25 bp, Probe sequence
gcgaagccattcaatacgaagtatt

SEQ ID NO: 96178 - DNA, 25 bp, Probe sequence
gcaaagcgaagccattcaatacgaa

SEQ ID NO: 96179 - DNA, 25 bp, Probe sequence
gaacagcagtaagatattttctaat

SEQ ID NO: 96180 - DNA, 25 bp, Probe sequence
gaaaattatcttactgctgtttttt

SEQ ID NO: 96181 - DNA, 25 bp, Probe sequence
gacgggcaaagcgaagccattcaat

SEQ ID NO: 96182 - DNA, 25 bp, Probe sequence
tgtgccagacgggcaaagcgaagcc

SEQ ID NO: 96183 - DNA, 25 bp, Probe sequence
tgctgtttttttagggatttatgtc

SEQ ID NO: 96184 - DNA, 25 bp, Probe sequence
tcttactgctgtttttttagggatt

SEQ ID NO: 96185 - DNA, 25 bp, Probe sequence
tactgctgtttttttagggatttat

SEQ ID NO: 96186 - DNA, 25 bp, Probe sequence
tttttagggatttatgtcccagcct

SEQ ID NO: 96187 - DNA, 25 bp, Probe sequence
ttatcttactgctgtttttttaggg

SEQ ID NO: 96188 - DNA, 25 bp, Probe sequence
attcaaacgaataggctgggacatt

SEQ ID NO: 96189 - DNA, 25 bp, Probe sequence
ataattcaaacgaataggctgggac

SEQ ID NO: 96190 - DNA, 25 bp, Probe sequence
acgaataggctgggacattaagttc

SEQ ID NO: 96191 - DNA, 25 bp, Probe sequence
aaacgaataggctgggacattaagt

SEQ ID NO: 96192 - DNA, 25 bp, Probe sequence
aaataattcaaacgaataggctggg

SEQ ID NO: 96193 - DNA, 25 bp, Probe sequence
aacgaataggctgggacattaagtt

SEQ ID NO: 96194 - DNA, 25 bp, Probe sequence
aattcaaacgaataggctgggacat

SEQ ID NO: 96195 - DNA, 25 bp, Probe sequence
aataattcaaacgaataggctggga

SEQ ID NO: 96196 - DNA, 25 bp, Probe sequence
caaacgaataggctgggacattaag

SEQ ID NO: 96197 - DNA, 25 bp, Probe sequence
taattcaaacgaataggctgggaca

SEQ ID NO: 96198 - DNA, 25 bp, Probe sequence
tcaaacgaataggctgggacattaa

SEQ ID NO: 96199 - DNA, 25 bp, Probe sequence
ttcaaacgaataggctgggacatta

SEQ ID NO: 96200 - DNA, 25 bp, Probe sequence
attatcgtcacagtttcgacctcat

SEQ ID NO: 96201 - DNA, 25 bp, Probe sequence
atattatcgtcacagtttcgacctc

SEQ ID NO: 96202 - DNA, 25 bp, Probe sequence
aattatatcatattatcgtcacagt

SEQ ID NO: 96203 - DNA, 25 bp, Probe sequence
cacagtttcgacctcatataagttg

SEQ ID NO: 96204 - DNA, 25 bp, Probe sequence
cattttctcctttttttcattcgat

SEQ ID NO: 96205 - DNA, 25 bp, Probe sequence
gaatgactcacacatgttataataa

SEQ ID NO: 96206 - DNA, 25 bp, Probe sequence
gatagaatgactcacacatgttata

SEQ ID NO: 96207 - DNA, 25 bp, Probe sequence
gtttcgacctcatataagttgtaat

SEQ ID NO: 96208 - DNA, 25 bp, Probe sequence
gtaatgatagaatgactcacacatg

SEQ ID NO: 96209 - DNA, 25 bp, Probe sequence
tcctttttttcattcgatattctaa

SEQ ID NO: 96210 - DNA, 25 bp, Probe sequence
tcgtcacagtttcgacctcatataa

SEQ ID NO: 96211 - DNA, 25 bp, Probe sequence
tatcgtcacagtttcgacctcatat

SEQ ID NO: 96212 - DNA, 25 bp, Probe sequence
tttcattcgatattctaacggaaga

SEQ ID NO: 96213 - DNA, 25 bp, Probe sequence
ttttctcctttttttcattcgatat

SEQ ID NO: 96214 - DNA, 25 bp, Probe sequence
ttctcctttttttcattcgatattc

SEQ ID NO: 96215 - DNA, 25 bp, Probe sequence
agaaggtgacagtaagccaacttac

SEQ ID NO: 96216 - DNA, 25 bp, Probe sequence
agtaagccaacttacaataatgtgc

SEQ ID NO: 96217 - DNA, 25 bp, Probe sequence
agttggtcgggcctcaatacagaga

SEQ ID NO: 96218 - DNA, 25 bp, Probe sequence
aagtcccaatatagaaggtgacagt

SEQ ID NO: 96219 - DNA, 25 bp, Probe sequence
cgggcctcaatacagagattttcga

SEQ ID NO: 96220 - DNA, 25 bp, Probe sequence
gcctcaatacagagattttcgaaaa

SEQ ID NO: 96221 - DNA, 25 bp, Probe sequence
gcggaataagtcccaatatagaagg

SEQ ID NO: 96222 - DNA, 25 bp, Probe sequence
gaataagtcccaatatagaaggtga

SEQ ID NO: 96223 - DNA, 25 bp, Probe sequence
gttggtcgggcctcaatacagagat

SEQ ID NO: 96224 - DNA, 25 bp, Probe sequence
gtcgggcctcaatacagagattttc

SEQ ID NO: 96225 - DNA, 25 bp, Probe sequence
ggtcgggcctcaatacagagatttt

SEQ ID NO: 96226 - DNA, 25 bp, Probe sequence
ggtgacagtaagccaacttacaata

SEQ ID NO: 96227 - DNA, 25 bp, Probe sequence
ggcctcaatacagagattttcgaaa

SEQ ID NO: 96228 - DNA, 25 bp, Probe sequence
taatgtgcaagttggtcgggcctca

SEQ ID NO: 96229 - DNA, 25 bp, Probe sequence
ttggtcgggcctcaatacagagatt

SEQ ID NO: 96230 - DNA, 25 bp, Probe sequence
atatagtctcgggcatgaatcaatg

SEQ ID NO: 96231 - DNA, 25 bp, Probe sequence
agcctcacgaccagttaatgtctat

SEQ ID NO: 96232 - DNA, 25 bp, Probe sequence
aattgaatatagtctcgggcatgaa

SEQ ID NO: 96233 - DNA, 25 bp, Probe sequence
cacgaccagttaatgtctattaaat

SEQ ID NO: 96234 - DNA, 25 bp, Probe sequence
cagcctcacgaccagttaatgtcta

SEQ ID NO: 96235 - DNA, 25 bp, Probe sequence
ctcacgaccagttaatgtctattaa

SEQ ID NO: 96236 - DNA, 25 bp, Probe sequence
cctcacgaccagttaatgtctatta

SEQ ID NO: 96237 - DNA, 25 bp, Probe sequence
ccagcctcacgaccagttaatgtct

SEQ ID NO: 96238 - DNA, 25 bp, Probe sequence
gcctcacgaccagttaatgtctatt

SEQ ID NO: 96239 - DNA, 25 bp, Probe sequence
gcatgaatcaatgccctagaccctg

SEQ ID NO: 96240 - DNA, 25 bp, Probe sequence
gaatatagtctcgggcatgaatcaa

SEQ ID NO: 96241 - DNA, 25 bp, Probe sequence
gaccagttaatgtctattaaattga

SEQ ID NO: 96242 - DNA, 25 bp, Probe sequence
gtctcgggcatgaatcaatgcccta

SEQ ID NO: 96243 - DNA, 25 bp, Probe sequence
taaattgaatatagtctcgggcatg

SEQ ID NO: 96244 - DNA, 25 bp, Probe sequence
ttgaatatagtctcgggcatgaatc

SEQ ID NO: 96245 - DNA, 25 bp, Probe sequence
atgacaaactctcagctcttaacca

SEQ ID NO: 96246 - DNA, 25 bp, Probe sequence
actttactcatgattgatgcgcctc

SEQ ID NO: 96247 - DNA, 25 bp, Probe sequence
aaattcaagttatagcgttgcttat

SEQ ID NO: 96248 - DNA, 25 bp, Probe sequence
aaaaggacacgaggctgggatatta

SEQ ID NO: 96249 - DNA, 25 bp, Probe sequence
aatgtactcttttaatgcggtgata

SEQ ID NO: 96250 - DNA, 25 bp, Probe sequence
caagtgatgcactccattattttta

SEQ ID NO: 96251 - DNA, 25 bp, Probe sequence
gcaccctttcaaattcagctgttag

SEQ ID NO: 96252 - DNA, 25 bp, Probe sequence
gaatgcgaacttgctcttaatctat

SEQ ID NO: 96253 - DNA, 25 bp, Probe sequence
gagaaggggtgttcactgtgctgat

SEQ ID NO: 96254 - DNA, 25 bp, Probe sequence
gaggctgggatattaagttcttagg

SEQ ID NO: 96255 - DNA, 25 bp, Probe sequence
gatgcgcctcatcaaaatattatta

SEQ ID NO: 96256 - DNA, 25 bp, Probe sequence
gggtgttcactgtgctgatgtgcta

SEQ ID NO: 96257 - DNA, 25 bp, Probe sequence
tcagctcttaaccaaaaagtccaac

SEQ ID NO: 96258 - DNA, 25 bp, Probe sequence
taactgctattataatcgcttcggc

SEQ ID NO: 96259 - DNA, 25 bp, Probe sequence
tattataatcgcttcggcatcgcac

SEQ ID NO: 96260 - DNA, 25 bp, Probe sequence
atagtgtaacgtatttcgaaatttg

SEQ ID NO: 96261 - DNA, 25 bp, Probe sequence
atcaatcctttgtgttaaattacta

SEQ ID NO: 96262 - DNA, 25 bp, Probe sequence
atcgtatctcaaccttgaaattatt

SEQ ID NO: 96263 - DNA, 25 bp, Probe sequence
aatcctttgtgttaaattactatat

SEQ ID NO: 96264 - DNA, 25 bp, Probe sequence
aataaggttgagacataatcgtatc

SEQ ID NO: 96265 - DNA, 25 bp, Probe sequence
aattatcaatcctttgtgttaaatt

SEQ ID NO: 96266 - DNA, 25 bp, Probe sequence
cataatcgtatctcaaccttgaaat

SEQ ID NO: 96267 - DNA, 25 bp, Probe sequence
cgtatttcgaaatttgtgatcataa

SEQ ID NO: 96268 - DNA, 25 bp, Probe sequence
gaaatttgtgatcataagtttattc

SEQ ID NO: 96269 - DNA, 25 bp, Probe sequence
gacataatcgtatctcaaccttgaa

SEQ ID NO: 96270 - DNA, 25 bp, Probe sequence
gtaacgtatttcgaaatttgtgatc

SEQ ID NO: 96271 - DNA, 25 bp, Probe sequence
tctcaaccttgaaattattatacgt

SEQ ID NO: 96272 - DNA, 25 bp, Probe sequence
taatcgtatctcaaccttgaaatta

SEQ ID NO: 96273 - DNA, 25 bp, Probe sequence
tttgtgatcataagtttattcaatg

SEQ ID NO: 96274 - DNA, 25 bp, Probe sequence
ttgaaattattatacgttgacgtca

SEQ ID NO: 96275 - DNA, 25 bp, Probe sequence
attttctgtgcttcggggattactt

SEQ ID NO: 96276 - DNA, 25 bp, Probe sequence
actaaaaatgtgctgttcttccttt

SEQ ID NO: 96277 - DNA, 25 bp, Probe sequence
aagcatgttttctacagtcatctat

SEQ ID NO: 96278 - DNA, 25 bp, Probe sequence
aatgcataaaaattccccgagtcac

SEQ ID NO: 96279 - DNA, 25 bp, Probe sequence
catgatgcttgtttaaagtgtggta

SEQ ID NO: 96280 - DNA, 25 bp, Probe sequence
cttccttttttagagtatatgtcca

SEQ ID NO: 96281 - DNA, 25 bp, Probe sequence
gtataattttctgtgcttcggggat

SEQ ID NO: 96282 - DNA, 25 bp, Probe sequence
gtatatgtccaagcatgttttctac

SEQ ID NO: 96283 - DNA, 25 bp, Probe sequence
gtgcttcggggattactttgtttat

SEQ ID NO: 96284 - DNA, 25 bp, Probe sequence
gtccaagcatgttttctacagtcat

SEQ ID NO: 96285 - DNA, 25 bp, Probe sequence
gtgctgttcttccttttttagagta

SEQ ID NO: 96286 - DNA, 25 bp, Probe sequence
gtgtggtatgtatatgatgctttaa

SEQ ID NO: 96287 - DNA, 25 bp, Probe sequence
tgttttctacagtcatctataatgc

SEQ ID NO: 96288 - DNA, 25 bp, Probe sequence
taaaaattccccgagtcacagtata

SEQ ID NO: 96289 - DNA, 25 bp, Probe sequence
ttccccgagtcacagtataattttc

SEQ ID NO: 96290 - DNA, 25 bp, Probe sequence
agaagtaaggtgtttttatatgctt

SEQ ID NO: 96291 - DNA, 25 bp, Probe sequence
aactctttttttatatcaccaacat

SEQ ID NO: 96292 - DNA, 25 bp, Probe sequence
aacgcgatgagtttctcagccaaat

SEQ ID NO: 96293 - DNA, 25 bp, Probe sequence
aattatggtgtacaacgacgaggtg

SEQ ID NO: 96294 - DNA, 25 bp, Probe sequence
ctctttttttatatcaccaacattg

SEQ ID NO: 96295 - DNA, 25 bp, Probe sequence
gcgatgagtttctcagccaaattga

SEQ ID NO: 96296 - DNA, 25 bp, Probe sequence
gaatcattgattttaactaacacct

SEQ ID NO: 96297 - DNA, 25 bp, Probe sequence
ggtgtttttatatgcttattacaaa

SEQ ID NO: 96298 - DNA, 25 bp, Probe sequence
tggtgtacaacgacgaggtgatttt

SEQ ID NO: 96299 - DNA, 25 bp, Probe sequence
tgattttaactaacaccttaccaag

SEQ ID NO: 96300 - DNA, 25 bp, Probe sequence
tgcttattacaaatacttaacgcga

SEQ ID NO: 96301 - DNA, 25 bp, Probe sequence
tcagccaaattgagaactctttttt

SEQ ID NO: 96302 - DNA, 25 bp, Probe sequence
tacttaacgcgatgagtttctcagc

SEQ ID NO: 96303 - DNA, 25 bp, Probe sequence
tatcaccaacattgtttgcaataga

SEQ ID NO: 96304 - DNA, 25 bp, Probe sequence
ttttatatcaccaacattgtttgca

SEQ ID NO: 96305 - DNA, 25 bp, Probe sequence
attttagtcttggaggtttcagatt

SEQ ID NO: 96306 - DNA, 25 bp, Probe sequence
attttttgtaatatgcgaataagca

SEQ ID NO: 96307 - DNA, 25 bp, Probe sequence
atttgcatgtattttttgtaatatg

SEQ ID NO: 96308 - DNA, 25 bp, Probe sequence
agcagatgattattccatattgcaa

SEQ ID NO: 96309 - DNA, 25 bp, Probe sequence
actgcactataatacaagttaagca

SEQ ID NO: 96310 - DNA, 25 bp, Probe sequence
acaagttaagcagatgattattcca

SEQ ID NO: 96311 - DNA, 25 bp, Probe sequence
caatttggtaataactgcactataa

SEQ ID NO: 96312 - DNA, 25 bp, Probe sequence
gcatattgaatgaattttagtcttg

SEQ ID NO: 96313 - DNA, 25 bp, Probe sequence
gaattttagtcttggaggtttcaga

SEQ ID NO: 96314 - DNA, 25 bp, Probe sequence
gaatatttgagtgaaatttgcatgt

SEQ ID NO: 96315 - DNA, 25 bp, Probe sequence
gaatgaattttagtcttggaggttt

SEQ ID NO: 96316 - DNA, 25 bp, Probe sequence
gatgattattccatattgcaaagaa

SEQ ID NO: 96317 - DNA, 25 bp, Probe sequence
gtgaaatttgcatgtattttttgta

SEQ ID NO: 96318 - DNA, 25 bp, Probe sequence
ggtaataactgcactataatacaag

SEQ ID NO: 96319 - DNA, 25 bp, Probe sequence
tttattattgtattgcaatttggta

SEQ ID NO: 96320 - DNA, 25 bp, Probe sequence
accacctcataatgttattatacgt

SEQ ID NO: 96321 - DNA, 25 bp, Probe sequence
acttgattttcagaggataaaggta

SEQ ID NO: 96322 - DNA, 25 bp, Probe sequence
aagtcgtcaaacttgattttcagag

SEQ ID NO: 96323 - DNA, 25 bp, Probe sequence
gtcgtcaaacttgattttcagagga

SEQ ID NO: 96324 - DNA, 25 bp, Probe sequence
gtcaaacttgattttcagaggataa

SEQ ID NO: 96325 - DNA, 25 bp, Probe sequence
tgtttgtttcaagtcgtcaaacttg

SEQ ID NO: 96326 - DNA, 25 bp, Probe sequence
tgaagtatggaaggggtctttaata

SEQ ID NO: 96327 - DNA, 25 bp, Probe sequence
taattactatagttactactttgtt

SEQ ID NO: 96328 - DNA, 25 bp, Probe sequence
taatgttattatacgtagttttact

SEQ ID NO: 96329 - DNA, 25 bp, Probe sequence
tactttgtttgtttcaagtcgtcaa

SEQ ID NO: 96330 - DNA, 25 bp, Probe sequence
tactactttgtttgtttcaagtcgt

SEQ ID NO: 96331 - DNA, 25 bp, Probe sequence
tagagtttttgaagtatggaagggg

SEQ ID NO: 96332 - DNA, 25 bp, Probe sequence
tagttactactttgtttgtttcaag

SEQ ID NO: 96333 - DNA, 25 bp, Probe sequence
tatagttactactttgtttgtttca

SEQ ID NO: 96334 - DNA, 25 bp, Probe sequence
ttttaccacctcataatgttattat

SEQ ID NO: 96335 - DNA, 25 bp, Probe sequence
ataaaaggaagcatctccaatttaa

SEQ ID NO: 96336 - DNA, 25 bp, Probe sequence
atctccaatttaatcgtaggatgct

SEQ ID NO: 96337 - DNA, 25 bp, Probe sequence
atgcttcctttttgttatatctaat

SEQ ID NO: 96338 - DNA, 25 bp, Probe sequence
agcatctccaatttaatcgtaggat

SEQ ID NO: 96339 - DNA, 25 bp, Probe sequence
aatcgtaggatgcttcctttttgtt

SEQ ID NO: 96340 - DNA, 25 bp, Probe sequence
ctttttgttatatctaattcgtaat

SEQ ID NO: 96341 - DNA, 25 bp, Probe sequence
ccaatttaatcgtaggatgcttcct

SEQ ID NO: 96342 - DNA, 25 bp, Probe sequence
gcttcctttttgttatatctaattc

SEQ ID NO: 96343 - DNA, 25 bp, Probe sequence
gaagcatctccaatttaatcgtagg

SEQ ID NO: 96344 - DNA, 25 bp, Probe sequence
ggatgcttcctttttgttatatcta

SEQ ID NO: 96345 - DNA, 25 bp, Probe sequence
ggaagcatctccaatttaatcgtag

SEQ ID NO: 96346 - DNA, 25 bp, Probe sequence
tcctttttgttatatctaattcgta

SEQ ID NO: 96347 - DNA, 25 bp, Probe sequence
tcgtaggatgcttcctttttgttat

SEQ ID NO: 96348 - DNA, 25 bp, Probe sequence
taggatgcttcctttttgttatatc

SEQ ID NO: 96349 - DNA, 25 bp, Probe sequence
ttaatcgtaggatgcttcctttttg

SEQ ID NO: 96350 - DNA, 25 bp, Probe sequence
attttattttctggcataatttgat

SEQ ID NO: 96351 - DNA, 25 bp, Probe sequence
attttctggcataatttgatttaaa

SEQ ID NO: 96352 - DNA, 25 bp, Probe sequence
agaattttattttctggcataattt

SEQ ID NO: 96353 - DNA, 25 bp, Probe sequence
aagtcatcagttactatttaaaaag

SEQ ID NO: 96354 - DNA, 25 bp, Probe sequence
gcataatttgatttaaacaacacat

SEQ ID NO: 96355 - DNA, 25 bp, Probe sequence
gaattttattttctggcataatttg

SEQ ID NO: 96356 - DNA, 25 bp, Probe sequence
gaataaaagtcatcagttactattt

SEQ ID NO: 96357 - DNA, 25 bp, Probe sequence
gaagaattttattttctggcataat

SEQ ID NO: 96358 - DNA, 25 bp, Probe sequence
gtcatcagttactatttaaaaagtg

SEQ ID NO: 96359 - DNA, 25 bp, Probe sequence
gtgaataaaagtcatcagttactat

SEQ ID NO: 96360 - DNA, 25 bp, Probe sequence
tctggcataatttgatttaaacaac

SEQ ID NO: 96361 - DNA, 25 bp, Probe sequence
taaaagtcatcagttactatttaaa

SEQ ID NO: 96362 - DNA, 25 bp, Probe sequence
tattttctggcataatttgatttaa

SEQ ID NO: 96363 - DNA, 25 bp, Probe sequence
tttctggcataatttgatttaaaca

SEQ ID NO: 96364 - DNA, 25 bp, Probe sequence
ttgaagaattttattttctggcata

SEQ ID NO: 96365 - DNA, 25 bp, Probe sequence
attgcgttttatatcagaatagaat

SEQ ID NO: 96366 - DNA, 25 bp, Probe sequence
aagaacttattccatgtcttagttt

SEQ ID NO: 96367 - DNA, 25 bp, Probe sequence
aatataaacaattcgcatactaagt

SEQ ID NO: 96368 - DNA, 25 bp, Probe sequence
caattcgcatactaagtattgcgtt

SEQ ID NO: 96369 - DNA, 25 bp, Probe sequence
gcatactaagtattgcgttttatat

SEQ ID NO: 96370 - DNA, 25 bp, Probe sequence
gcataattattgaaatgaagcctaa

SEQ ID NO: 96371 - DNA, 25 bp, Probe sequence
gaagcctaatatgagattttcaatt

SEQ ID NO: 96372 - DNA, 25 bp, Probe sequence
gaacttattccatgtcttagttttt

SEQ ID NO: 96373 - DNA, 25 bp, Probe sequence
gagattttcaattagtaaatttggt

SEQ ID NO: 96374 - DNA, 25 bp, Probe sequence
gtaaactaaggcatttgaagaactt

SEQ ID NO: 96375 - DNA, 25 bp, Probe sequence
tgaagaacttattccatgtcttagt

SEQ ID NO: 96376 - DNA, 25 bp, Probe sequence
tccatgtcttagttttttaatttat

SEQ ID NO: 96377 - DNA, 25 bp, Probe sequence
taagtattgcgttttatatcagaat

SEQ ID NO: 96378 - DNA, 25 bp, Probe sequence
tactaagtattgcgttttatatcag

SEQ ID NO: 96379 - DNA, 25 bp, Probe sequence
ttattccatgtcttagttttttaat

SEQ ID NO: 96380 - DNA, 25 bp, Probe sequence
atacatttttcacatattaatctat

SEQ ID NO: 96381 - DNA, 25 bp, Probe sequence
atcaaaatcaactgaccgatattct

SEQ ID NO: 96382 - DNA, 25 bp, Probe sequence
agaaatataggtggaatggcgtgtt

SEQ ID NO: 96383 - DNA, 25 bp, Probe sequence
aatggcgtgtttcaatatgctaatg

SEQ ID NO: 96384 - DNA, 25 bp, Probe sequence
aatgcttcgtattaaaatgtgagtt

SEQ ID NO: 96385 - DNA, 25 bp, Probe sequence
gaattctataagcgcctttagttaa

SEQ ID NO: 96386 - DNA, 25 bp, Probe sequence
aattcactttatggatacgacatgt

SEQ ID NO: 96387 - DNA, 25 bp, Probe sequence
caattgctatatacagatactcatt

SEQ ID NO: 96388 - DNA, 25 bp, Probe sequence
catgtatatgttttttatgtactac

SEQ ID NO: 96389 - DNA, 25 bp, Probe sequence
cttactgctgtactttatttttata

SEQ ID NO: 96390 - DNA, 25 bp, Probe sequence
gacatactcaatagcaaccataaca

SEQ ID NO: 96391 - DNA, 25 bp, Probe sequence
gatactcattaatgacatactcaat

SEQ ID NO: 96392 - DNA, 25 bp, Probe sequence
gtactttatttttataatgcttcgt

SEQ ID NO: 96393 - DNA, 25 bp, Probe sequence
tcaactgaccgatattctataattt

SEQ ID NO: 96394 - DNA, 25 bp, Probe sequence
ttttctagtcgaaatatcttactgc

SEQ ID NO: 96395 - DNA, 25 bp, Probe sequence
attacattgtaagcgtttcaacatt

SEQ ID NO: 96396 - DNA, 25 bp, Probe sequence
ataggatcaattttttaagtacaca

SEQ ID NO: 96397 - DNA, 25 bp, Probe sequence
atcatttctgttgtactcccaaaat

SEQ ID NO: 96398 - DNA, 25 bp, Probe sequence
aacctagaagaatcaacgcttttgt

SEQ ID NO: 96399 - DNA, 25 bp, Probe sequence
caataaaatacatctataaacctag

SEQ ID NO: 96400 - DNA, 25 bp, Probe sequence
ctttatcatttctgttgtactccca

SEQ ID NO: 96401 - DNA, 25 bp, Probe sequence
cgcttttgttgattcttctttttag

SEQ ID NO: 96402 - DNA, 25 bp, Probe sequence
gcgtttcaacatttttgtggagggt

SEQ ID NO: 96403 - DNA, 25 bp, Probe sequence
gctgtgactaatgtataagaacaac

SEQ ID NO: 96404 - DNA, 25 bp, Probe sequence
gacgtcaatcaaagtcataggatca

SEQ ID NO: 96405 - DNA, 25 bp, Probe sequence
gttgattcttctttttagcagataa

SEQ ID NO: 96406 - DNA, 25 bp, Probe sequence
gtaagcgtttcaacatttttgtgga

SEQ ID NO: 96407 - DNA, 25 bp, Probe sequence
tcatgtctgagacgtcaatcaaagt

SEQ ID NO: 96408 - DNA, 25 bp, Probe sequence
tcaacatttttgtggagggtgtaaa

SEQ ID NO: 96409 - DNA, 25 bp, Probe sequence
ttctgttgtactcccaaaatttaca

SEQ ID NO: 96410 - DNA, 25 bp, Probe sequence
attatgaaatgttacttccaagttc

SEQ ID NO: 96411 - DNA, 25 bp, Probe sequence
atgtttaaactacggtcattttgtg

SEQ ID NO: 96412 - DNA, 25 bp, Probe sequence
acttccaagttcaaaatcgcacatt

SEQ ID NO: 96413 - DNA, 25 bp, Probe sequence
acagaatgccattaactgattatta

SEQ ID NO: 96414 - DNA, 25 bp, Probe sequence
aaaagtcgtaatatgaggtgtacaa

SEQ ID NO: 96415 - DNA, 25 bp, Probe sequence
aaaacatggttattgatttgtgata

SEQ ID NO: 96416 - DNA, 25 bp, Probe sequence
aattatattgtttacatactccttt

SEQ ID NO: 96417 - DNA, 25 bp, Probe sequence
catactccttttgaatttatacatt

SEQ ID NO: 96418 - DNA, 25 bp, Probe sequence
gataataactattcattttacaata

SEQ ID NO: 96419 - DNA, 25 bp, Probe sequence
ggccttgtgttacagtattctatat

SEQ ID NO: 96420 - DNA, 25 bp, Probe sequence
tgcggtaaggccttgtgttacagta

SEQ ID NO: 96421 - DNA, 25 bp, Probe sequence
taaactacggtcattttgtgaaaat

SEQ ID NO: 96422 - DNA, 25 bp, Probe sequence
ttaagtactgcaatcagaattaaca

SEQ ID NO: 96423 - DNA, 25 bp, Probe sequence
ttaatattgcggtaaggccttgtgt

SEQ ID NO: 96424 - DNA, 25 bp, Probe sequence
ttgtttacatactccttttgaattt

SEQ ID NO: 96425 - DNA, 25 bp, Probe sequence
atattgtcttttacgggcatataaa

SEQ ID NO: 96426 - DNA, 25 bp, Probe sequence
agcagtaaacctaaagtgtcgtaag

SEQ ID NO: 96427 - DNA, 25 bp, Probe sequence
acgtatattgtcttttacgggcata

SEQ ID NO: 96428 - DNA, 25 bp, Probe sequence
aacgtatattgtcttttacgggcat

SEQ ID NO: 96429 - DNA, 25 bp, Probe sequence
caaaagcagtaaacctaaagtgtcg

SEQ ID NO: 96430 - DNA, 25 bp, Probe sequence
cgtatattgtcttttacgggcatat

SEQ ID NO: 96431 - DNA, 25 bp, Probe sequence
gcagtaaacctaaagtgtcgtaagg

SEQ ID NO: 96432 - DNA, 25 bp, Probe sequence
gttgttataacgtatattgtctttt

SEQ ID NO: 96433 - DNA, 25 bp, Probe sequence
gtatattgtcttttacgggcatata

SEQ ID NO: 96434 - DNA, 25 bp, Probe sequence
tgtcgtaagggtttactgcttttat

SEQ ID NO: 96435 - DNA, 25 bp, Probe sequence
tgttataacgtatattgtcttttac

SEQ ID NO: 96436 - DNA, 25 bp, Probe sequence
taaagtgtcgtaagggtttactgct

SEQ ID NO: 96437 - DNA, 25 bp, Probe sequence
taacgtatattgtcttttacgggca

SEQ ID NO: 96438 - DNA, 25 bp, Probe sequence
tattgtcttttacgggcatataaaa

SEQ ID NO: 96439 - DNA, 25 bp, Probe sequence
ttacgggcatataaaaggggaatat

SEQ ID NO: 96440 - DNA, 25 bp, Probe sequence
attggttattttcatcccatagtgt

SEQ ID NO: 96441 - DNA, 25 bp, Probe sequence
attatgttaatgacacgcttcctaa

SEQ ID NO: 96442 - DNA, 25 bp, Probe sequence
attttcatcccatagtgtgataatt

SEQ ID NO: 96443 - DNA, 25 bp, Probe sequence
atcgctgttaacaattcatgcttta

SEQ ID NO: 96444 - DNA, 25 bp, Probe sequence
aataacgcaatttctatcatcgctg

SEQ ID NO: 96445 - DNA, 25 bp, Probe sequence
gcaatttctatcatcgctgttaaca

SEQ ID NO: 96446 - DNA, 25 bp, Probe sequence
gacacgcttcctaaatttgcaaaga

SEQ ID NO: 96447 - DNA, 25 bp, Probe sequence
gatagcaatttaggaggcgtgttta

SEQ ID NO: 96448 - DNA, 25 bp, Probe sequence
gtattattcactagttttaacaatc

SEQ ID NO: 96449 - DNA, 25 bp, Probe sequence
gtgataattactatttttcattcat

SEQ ID NO: 96450 - DNA, 25 bp, Probe sequence
gtgtgtaagattaacatgtactgaa

SEQ ID NO: 96451 - DNA, 25 bp, Probe sequence
ggtatatgatacttttattggttat

SEQ ID NO: 96452 - DNA, 25 bp, Probe sequence
ggcgtgtttatttttattgacgtct

SEQ ID NO: 96453 - DNA, 25 bp, Probe sequence
tactatgagcatatactttttaaat

SEQ ID NO: 96454 - DNA, 25 bp, Probe sequence
tattgacgtctaaccctaaaagata

SEQ ID NO: 96455 - DNA, 25 bp, Probe sequence
agtgaaatatggtgcgctatcttgc

SEQ ID NO: 96456 - DNA, 25 bp, Probe sequence
accagggtgatgcaattcgttatcc

SEQ ID NO: 96457 - DNA, 25 bp, Probe sequence
aaattgatatgattaactacacaga

SEQ ID NO: 96458 - DNA, 25 bp, Probe sequence
aatatggtgcgctatcttgcataaa

SEQ ID NO: 96459 - DNA, 25 bp, Probe sequence
gcgctatcttgcataaattgatatg

SEQ ID NO: 96460 - DNA, 25 bp, Probe sequence
gcaattcgttatcctggttttaatt

SEQ ID NO: 96461 - DNA, 25 bp, Probe sequence
gaaccagggtgatgcaattcgttat

SEQ ID NO: 96462 - DNA, 25 bp, Probe sequence
gaaatatggtgcgctatcttgcata

SEQ ID NO: 96463 - DNA, 25 bp, Probe sequence
gatgcaattcgttatcctggtttta

SEQ ID NO: 96464 - DNA, 25 bp, Probe sequence
gttagaaccagggtgatgcaattcg

SEQ ID NO: 96465 - DNA, 25 bp, Probe sequence
gatatgattaactacacagaattta

SEQ ID NO: 96466 - DNA, 25 bp, Probe sequence
gtgatgcaattcgttatcctggttt

SEQ ID NO: 96467 - DNA, 25 bp, Probe sequence
gggtgatgcaattcgttatcctggt

SEQ ID NO: 96468 - DNA, 25 bp, Probe sequence
ggtgcgctatcttgcataaattgat

SEQ ID NO: 96469 - DNA, 25 bp, Probe sequence
tatggtgcgctatcttgcataaatt

SEQ ID NO: 96470 - DNA, 25 bp, Probe sequence
attacttccatttcaatcctttata

SEQ ID NO: 96471 - DNA, 25 bp, Probe sequence
atcttttcagtgttaattacttcca

SEQ ID NO: 96472 - DNA, 25 bp, Probe sequence
acttccatttcaatcctttatagac

SEQ ID NO: 96473 - DNA, 25 bp, Probe sequence
aattacttccatttcaatcctttat

SEQ ID NO: 96474 - DNA, 25 bp, Probe sequence
cttccatttcaatcctttatagact

SEQ ID NO: 96475 - DNA, 25 bp, Probe sequence
ccatttcaatcctttatagactaaa

SEQ ID NO: 96476 - DNA, 25 bp, Probe sequence
gttaattacttccatttcaatcctt

SEQ ID NO: 96477 - DNA, 25 bp, Probe sequence
gtgttaattacttccatttcaatcc

SEQ ID NO: 96478 - DNA, 25 bp, Probe sequence
tcagtgttaattacttccatttcaa

SEQ ID NO: 96479 - DNA, 25 bp, Probe sequence
taattacttccatttcaatccttta

SEQ ID NO: 96480 - DNA, 25 bp, Probe sequence
tacttccatttcaatcctttataga

SEQ ID NO: 96481 - DNA, 25 bp, Probe sequence
tttcagtgttaattacttccatttc

SEQ ID NO: 96482 - DNA, 25 bp, Probe sequence
ttacttccatttcaatcctttatag

SEQ ID NO: 96483 - DNA, 25 bp, Probe sequence
ttcaatcctttatagactaaattta

SEQ ID NO: 96484 - DNA, 25 bp, Probe sequence
ttccatttcaatcctttatagacta

SEQ ID NO: 96485 - DNA, 25 bp, Probe sequence
atagttagctaaccatatagacatc

SEQ ID NO: 96486 - DNA, 25 bp, Probe sequence
atagacatcaaaatgacatcatagt

SEQ ID NO: 96487 - DNA, 25 bp, Probe sequence
atcatagtattttcaagtgcaaaaa

SEQ ID NO: 96488 - DNA, 25 bp, Probe sequence
atcattatttctatcacactttatg

SEQ ID NO: 96489 - DNA, 25 bp, Probe sequence
aaaatcattatttctatcacacttt

SEQ ID NO: 96490 - DNA, 25 bp, Probe sequence
aatcattatttctatcacactttat

SEQ ID NO: 96491 - DNA, 25 bp, Probe sequence
cattatttctatcacactttatgat

SEQ ID NO: 96492 - DNA, 25 bp, Probe sequence
gcaaaatcattatttctatcacact

SEQ ID NO: 96493 - DNA, 25 bp, Probe sequence
gacatcatagtattttcaagtgcaa

SEQ ID NO: 96494 - DNA, 25 bp, Probe sequence
gttaaacgttttcataaattatgca

SEQ ID NO: 96495 - DNA, 25 bp, Probe sequence
gttagctaaccatatagacatcaaa

SEQ ID NO: 96496 - DNA, 25 bp, Probe sequence
tgtgttaaacgttttcataaattat

SEQ ID NO: 96497 - DNA, 25 bp, Probe sequence
tcattgcatagttagctaaccatat

SEQ ID NO: 96498 - DNA, 25 bp, Probe sequence
tatgcaaaatcattatttctatcac

SEQ ID NO: 96499 - DNA, 25 bp, Probe sequence
tatttctatcacactttatgataaa

SEQ ID NO: 96500 - DNA, 25 bp, Probe sequence
ataaagtaacggaattcatgatatt

SEQ ID NO: 96501 - DNA, 25 bp, Probe sequence
aggtacttaatcagcattttataaa

SEQ ID NO: 96502 - DNA, 25 bp, Probe sequence
aaagtaacggaattcatgatattaa

SEQ ID NO: 96503 - DNA, 25 bp, Probe sequence
aagtaacggaattcatgatattaat

SEQ ID NO: 96504 - DNA, 25 bp, Probe sequence
gatattaatatcatattcctaaaat

SEQ ID NO: 96505 - DNA, 25 bp, Probe sequence
gtaggtacttaatcagcattttata

SEQ ID NO: 96506 - DNA, 25 bp, Probe sequence
gtacttaatcagcattttataaata

SEQ ID NO: 96507 - DNA, 25 bp, Probe sequence
gtaacggaattcatgatattaatat

SEQ ID NO: 96508 - DNA, 25 bp, Probe sequence
gtggtaggtacttaatcagcatttt

SEQ ID NO: 96509 - DNA, 25 bp, Probe sequence
ggtaggtacttaatcagcattttat

SEQ ID NO: 96510 - DNA, 25 bp, Probe sequence
ggtacttaatcagcattttataaat

SEQ ID NO: 96511 - DNA, 25 bp, Probe sequence
tggtaggtacttaatcagcatttta

SEQ ID NO: 96512 - DNA, 25 bp, Probe sequence
taacggaattcatgatattaatatc

SEQ ID NO: 96513 - DNA, 25 bp, Probe sequence
tacttaatcagcattttataaataa

SEQ ID NO: 96514 - DNA, 25 bp, Probe sequence
taggtacttaatcagcattttataa

SEQ ID NO: 96515 - DNA, 25 bp, Probe sequence
ataatattaaaaatggtgtctgtca

SEQ ID NO: 96516 - DNA, 25 bp, Probe sequence
atggtgtctgtcattgaaaatagag

SEQ ID NO: 96517 - DNA, 25 bp, Probe sequence
aggtcaacacattttataatattaa

SEQ ID NO: 96518 - DNA, 25 bp, Probe sequence
aaaggtcaacacattttataatatt

SEQ ID NO: 96519 - DNA, 25 bp, Probe sequence
aaaaatggtgtctgtcattgaaaat

SEQ ID NO: 96520 - DNA, 25 bp, Probe sequence
aatatagttgtattctatttgttaa

SEQ ID NO: 96521 - DNA, 25 bp, Probe sequence
aatattcaaatcatgtgttaacctc

SEQ ID NO: 96522 - DNA, 25 bp, Probe sequence
ggtgtctgtcattgaaaatagagaa

SEQ ID NO: 96523 - DNA, 25 bp, Probe sequence
taccaactatattttctagaaattt

SEQ ID NO: 96524 - DNA, 25 bp, Probe sequence
tagttgtattctatttgttaaataa

SEQ ID NO: 96525 - DNA, 25 bp, Probe sequence
taggacatcaaacataatattcaaa

SEQ ID NO: 96526 - DNA, 25 bp, Probe sequence
tattcaaatcatgtgttaacctctt

SEQ ID NO: 96527 - DNA, 25 bp, Probe sequence
tttaccaactatattttctagaaat

SEQ ID NO: 96528 - DNA, 25 bp, Probe sequence
ttaactgttttaataggacatcaaa

SEQ ID NO: 96529 - DNA, 25 bp, Probe sequence
ttcaaatcatgtgttaacctctttt

SEQ ID NO: 96530 - DNA, 25 bp, Probe sequence
atttacaaggttgcaatattttgaa

SEQ ID NO: 96531 - DNA, 25 bp, Probe sequence
atgcgggtgtttagaaaccgctcaa

SEQ ID NO: 96532 - DNA, 25 bp, Probe sequence
accgctcaataaataacttactcat

SEQ ID NO: 96533 - DNA, 25 bp, Probe sequence
aaatcgtttgcgatgcaatagcatt

SEQ ID NO: 96534 - DNA, 25 bp, Probe sequence
aaatgtcctcctaaattttgatcat

SEQ ID NO: 96535 - DNA, 25 bp, Probe sequence
aattttgatcatgcgggtgtttaga

SEQ ID NO: 96536 - DNA, 25 bp, Probe sequence
ctcctaaattttgatcatgcgggtg

SEQ ID NO: 96537 - DNA, 25 bp, Probe sequence
gaaaccgctcaataaataacttact

SEQ ID NO: 96538 - DNA, 25 bp, Probe sequence
gtttgcgatgcaatagcatttgaat

SEQ ID NO: 96539 - DNA, 25 bp, Probe sequence
gtaaaaggtttcattcaaatcttag

SEQ ID NO: 96540 - DNA, 25 bp, Probe sequence
gtaacacttatttacaaggttgcaa

SEQ ID NO: 96541 - DNA, 25 bp, Probe sequence
gtcctcctaaattttgatcatgcgg

SEQ ID NO: 96542 - DNA, 25 bp, Probe sequence
ggtttcattcaaatcttagggtcaa

SEQ ID NO: 96543 - DNA, 25 bp, Probe sequence
tcaaatcttagggtcaaaaatgtta

SEQ ID NO: 96544 - DNA, 25 bp, Probe sequence
taaataacttactcattttactgaa

SEQ ID NO: 96545 - DNA, 25 bp, Probe sequence
acgtgtttaaaatactcgctgattc

SEQ ID NO: 96546 - DNA, 25 bp, Probe sequence
actcgctgattcaaagatgattttc

SEQ ID NO: 96547 - DNA, 25 bp, Probe sequence
acacgtgtttaaaatactcgctgat

SEQ ID NO: 96548 - DNA, 25 bp, Probe sequence
aacacgtgtttaaaatactcgctga

SEQ ID NO: 96549 - DNA, 25 bp, Probe sequence
aatactcgctgattcaaagatgatt

SEQ ID NO: 96550 - DNA, 25 bp, Probe sequence
gctgattcaaagatgattttctaat

SEQ ID NO: 96551 - DNA, 25 bp, Probe sequence
gatgattttctaatacgtagtactg

SEQ ID NO: 96552 - DNA, 25 bp, Probe sequence
gattttctaatacgtagtactgtaa

SEQ ID NO: 96553 - DNA, 25 bp, Probe sequence
gtttaaaatactcgctgattcaaag

SEQ ID NO: 96554 - DNA, 25 bp, Probe sequence
gtagtactgtaatatacttcctaaa

SEQ ID NO: 96555 - DNA, 25 bp, Probe sequence
gtaacacgtgtttaaaatactcgct

SEQ ID NO: 96556 - DNA, 25 bp, Probe sequence
gtgtttaaaatactcgctgattcaa

SEQ ID NO: 96557 - DNA, 25 bp, Probe sequence
tacgtagtactgtaatatacttcct

SEQ ID NO: 96558 - DNA, 25 bp, Probe sequence
tactgtaatatacttcctaaaaaat

SEQ ID NO: 96559 - DNA, 25 bp, Probe sequence
ttaaaatactcgctgattcaaagat

SEQ ID NO: 96560 - DNA, 25 bp, Probe sequence
attgacatcacatcagtcggtgctc

SEQ ID NO: 96561 - DNA, 25 bp, Probe sequence
atagaggagcaccgattgacatcac

SEQ ID NO: 96562 - DNA, 25 bp, Probe sequence
aggagcaccgattgacatcacatca

SEQ ID NO: 96563 - DNA, 25 bp, Probe sequence
agaggagcaccgattgacatcacat

SEQ ID NO: 96564 - DNA, 25 bp, Probe sequence
agcaccgattgacatcacatcagtc

SEQ ID NO: 96565 - DNA, 25 bp, Probe sequence
caccgattgacatcacatcagtcgg

SEQ ID NO: 96566 - DNA, 25 bp, Probe sequence
ctttgataaatagaggagcaccgat

SEQ ID NO: 96567 - DNA, 25 bp, Probe sequence
cgattgacatcacatcagtcggtgc

SEQ ID NO: 96568 - DNA, 25 bp, Probe sequence
gcaccgattgacatcacatcagtcg

SEQ ID NO: 96569 - DNA, 25 bp, Probe sequence
gagcaccgattgacatcacatcagt

SEQ ID NO: 96570 - DNA, 25 bp, Probe sequence
gaggagcaccgattgacatcacatc

SEQ ID NO: 96571 - DNA, 25 bp, Probe sequence
gattgacatcacatcagtcggtgct

SEQ ID NO: 96572 - DNA, 25 bp, Probe sequence
tgacatcacatcagtcggtgctcct

SEQ ID NO: 96573 - DNA, 25 bp, Probe sequence
tagaggagcaccgattgacatcaca

SEQ ID NO: 96574 - DNA, 25 bp, Probe sequence
ttgacatcacatcagtcggtgctcc

SEQ ID NO: 96575 - DNA, 25 bp, Probe sequence
ataaattgttcaacacatagttgta

SEQ ID NO: 96576 - DNA, 25 bp, Probe sequence
acaaattcaatttaccttacaatat

SEQ ID NO: 96577 - DNA, 25 bp, Probe sequence
aaccgattcttatgtgtcattattt

SEQ ID NO: 96578 - DNA, 25 bp, Probe sequence
gattcttatgtgtcattattttaaa

SEQ ID NO: 96579 - DNA, 25 bp, Probe sequence
ggagcataaataaattgttcaacac

SEQ ID NO: 96580 - DNA, 25 bp, Probe sequence
tgaaatcatacaagtcgctacaata

SEQ ID NO: 96581 - DNA, 25 bp, Probe sequence
tgaacatagggattggttttttatt

SEQ ID NO: 96582 - DNA, 25 bp, Probe sequence
tcttttacgctactttatttataat

SEQ ID NO: 96583 - DNA, 25 bp, Probe sequence
tcaatttaccttacaatatattttg

SEQ ID NO: 96584 - DNA, 25 bp, Probe sequence
taaaccgattcttatgtgtcattat

SEQ ID NO: 96585 - DNA, 25 bp, Probe sequence
tacaagtcgctacaatattaaacaa

SEQ ID NO: 96586 - DNA, 25 bp, Probe sequence
tactcttttacgctactttatttat

SEQ ID NO: 96587 - DNA, 25 bp, Probe sequence
ttgtcacaaattcaatttaccttac

SEQ ID NO: 96588 - DNA, 25 bp, Probe sequence
ttattactcttttacgctactttat

SEQ ID NO: 96589 - DNA, 25 bp, Probe sequence
ttgtgttattatattctggagcata

SEQ ID NO: 96590 - DNA, 25 bp, Probe sequence
atagtctttttgcgtatttggatat

SEQ ID NO: 96591 - DNA, 25 bp, Probe sequence
agtggtataattgcacataatattt

SEQ ID NO: 96592 - DNA, 25 bp, Probe sequence
aagactatttctatcgatgcaaggt

SEQ ID NO: 96593 - DNA, 25 bp, Probe sequence
cgatgcaaggtagaaatagtctttt

SEQ ID NO: 96594 - DNA, 25 bp, Probe sequence
gacgaattttgatagatacatattt

SEQ ID NO: 96595 - DNA, 25 bp, Probe sequence
gtttttgagtcaatgtattaataca

SEQ ID NO: 96596 - DNA, 25 bp, Probe sequence
gtatttacatattcataaccaaagg

SEQ ID NO: 96597 - DNA, 25 bp, Probe sequence
gtctttttgcgtatttggatatgtc

SEQ ID NO: 96598 - DNA, 25 bp, Probe sequence
tgcgtatttggatatgtcagagtga

SEQ ID NO: 96599 - DNA, 25 bp, Probe sequence
taatggtatttacatattcataacc

SEQ ID NO: 96600 - DNA, 25 bp, Probe sequence
taaattaccatacactacaaaatag

SEQ ID NO: 96601 - DNA, 25 bp, Probe sequence
tacagttacaactttattaatctaa

SEQ ID NO: 96602 - DNA, 25 bp, Probe sequence
tatttgattaattagtttttgagtc

SEQ ID NO: 96603 - DNA, 25 bp, Probe sequence
ttaaagaattatatttcatccaaat

SEQ ID NO: 96604 - DNA, 25 bp, Probe sequence
ttcatccaaataaattaccatacac

SEQ ID NO: 96605 - DNA, 25 bp, Probe sequence
attcgttttaacaagcaagcatttc

SEQ ID NO: 96606 - DNA, 25 bp, Probe sequence
attcgtatgttttatcaagcagcta

SEQ ID NO: 96607 - DNA, 25 bp, Probe sequence
atttccctcccaattggctattata

SEQ ID NO: 96608 - DNA, 25 bp, Probe sequence
acatcgatattgtatgaattcgttt

SEQ ID NO: 96609 - DNA, 25 bp, Probe sequence
aactgtgacaatatttattttctag

SEQ ID NO: 96610 - DNA, 25 bp, Probe sequence
cctcccaattggctattatacggtg

SEQ ID NO: 96611 - DNA, 25 bp, Probe sequence
gcgagccatttaacgatctatgttt

SEQ ID NO: 96612 - DNA, 25 bp, Probe sequence
gcaagcatttctatgtgaacgaacc

SEQ ID NO: 96613 - DNA, 25 bp, Probe sequence
gatctatgtttaaatggacatcgat

SEQ ID NO: 96614 - DNA, 25 bp, Probe sequence
gtgacgtgtgtgaacaaactgtgac

SEQ ID NO: 96615 - DNA, 25 bp, Probe sequence
ggctattatacggtgtcaattctgt

SEQ ID NO: 96616 - DNA, 25 bp, Probe sequence
tctatgtgaacgaaccaaaggggaa

SEQ ID NO: 96617 - DNA, 25 bp, Probe sequence
taaacataatacaatgcgagccatt

SEQ ID NO: 96618 - DNA, 25 bp, Probe sequence
tacggtgtcaattctgtgacgtgtg

SEQ ID NO: 96619 - DNA, 25 bp, Probe sequence
ttaacgatgatttgtgatttttaga

SEQ ID NO: 96620 - DNA, 25 bp, Probe sequence
actttccatcagtacgatttattat

SEQ ID NO: 96621 - DNA, 25 bp, Probe sequence
aaaactttccatcagtacgatttat

SEQ ID NO: 96622 - DNA, 25 bp, Probe sequence
aagcatctataacgtaattttgaag

SEQ ID NO: 96623 - DNA, 25 bp, Probe sequence
aagtagagttatcttcttatgcgtt

SEQ ID NO: 96624 - DNA, 25 bp, Probe sequence
gagagacgagaatcattttgtaaat

SEQ ID NO: 96625 - DNA, 25 bp, Probe sequence
gagttatcttcttatgcgttttaga

SEQ ID NO: 96626 - DNA, 25 bp, Probe sequence
gatgcttttttatcttcaaattcaa

SEQ ID NO: 96627 - DNA, 25 bp, Probe sequence
gtagagttatcttcttatgcgtttt

SEQ ID NO: 96628 - DNA, 25 bp, Probe sequence
gtaaaaactttccatcagtacgatt

SEQ ID NO: 96629 - DNA, 25 bp, Probe sequence
tgtaaatttcgtcagttcaaaactt

SEQ ID NO: 96630 - DNA, 25 bp, Probe sequence
tcgtcagttcaaaactttaagtgca

SEQ ID NO: 96631 - DNA, 25 bp, Probe sequence
tcattttgtaaatttcgtcagttca

SEQ ID NO: 96632 - DNA, 25 bp, Probe sequence
tcttcttatgcgttttagatgcttt

SEQ ID NO: 96633 - DNA, 25 bp, Probe sequence
tatgcgttttagatgcttttttatc

SEQ ID NO: 96634 - DNA, 25 bp, Probe sequence
tttatcttcaaattcaaaaaatctg

SEQ ID NO: 96635 - DNA, 25 bp, Probe sequence
atttttgaaaaatggaggagtctat

SEQ ID NO: 96636 - DNA, 25 bp, Probe sequence
agtgtttctaatgcgtgactaaaat

SEQ ID NO: 96637 - DNA, 25 bp, Probe sequence
agtaataattaagttctcatgataa

SEQ ID NO: 96638 - DNA, 25 bp, Probe sequence
agttctcatgataataggtattttt

SEQ ID NO: 96639 - DNA, 25 bp, Probe sequence
aagttctcatgataataggtatttt

SEQ ID NO: 96640 - DNA, 25 bp, Probe sequence
gttctcatgataataggtatttttg

SEQ ID NO: 96641 - DNA, 25 bp, Probe sequence
gtttctaatgcgtgactaaaattag

SEQ ID NO: 96642 - DNA, 25 bp, Probe sequence
gtaataattaagttctcatgataat

SEQ ID NO: 96643 - DNA, 25 bp, Probe sequence
gtgtttctaatgcgtgactaaaatt

SEQ ID NO: 96644 - DNA, 25 bp, Probe sequence
tgtttctaatgcgtgactaaaatta

SEQ ID NO: 96645 - DNA, 25 bp, Probe sequence
tctcatgataataggtatttttgaa

SEQ ID NO: 96646 - DNA, 25 bp, Probe sequence
taagttctcatgataataggtattt

SEQ ID NO: 96647 - DNA, 25 bp, Probe sequence
tagtaataattaagttctcatgata

SEQ ID NO: 96648 - DNA, 25 bp, Probe sequence
ttagtaataattaagttctcatgat

SEQ ID NO: 96649 - DNA, 25 bp, Probe sequence
ttaagttctcatgataataggtatt

SEQ ID NO: 96650 - DNA, 25 bp, Probe sequence
agtgccacagtgacgtagcttttat

SEQ ID NO: 96651 - DNA, 25 bp, Probe sequence
aaacgagacacacttcgcgaaatga

SEQ ID NO: 96652 - DNA, 25 bp, Probe sequence
aaaattaacgccttgtcttgatata

SEQ ID NO: 96653 - DNA, 25 bp, Probe sequence
cacctgagtaccagtgtgactagtg

SEQ ID NO: 96654 - DNA, 25 bp, Probe sequence
gcggatgcgttaatgtatcagcgat

SEQ ID NO: 96655 - DNA, 25 bp, Probe sequence
gacagatggttatcacctgagtacc

SEQ ID NO: 96656 - DNA, 25 bp, Probe sequence
gatgatggagagcttttttcatgaa

SEQ ID NO: 96657 - DNA, 25 bp, Probe sequence
gatataatgacactgccttgtttta

SEQ ID NO: 96658 - DNA, 25 bp, Probe sequence
gtaccagtgtgactagtgcacgtga

SEQ ID NO: 96659 - DNA, 25 bp, Probe sequence
gtgcacgtgatgagtacgatggaac

SEQ ID NO: 96660 - DNA, 25 bp, Probe sequence
ggtaaacccctcgagtgagcaatcc

SEQ ID NO: 96661 - DNA, 25 bp, Probe sequence
ggtaggagcacttgtttaacggaat

SEQ ID NO: 96662 - DNA, 25 bp, Probe sequence
ggaacagaacatggcttatagaaat

SEQ ID NO: 96663 - DNA, 25 bp, Probe sequence
tagtttagctctcctagatgatgga

SEQ ID NO: 96664 - DNA, 25 bp, Probe sequence
tatcactactagtttagctctccta

SEQ ID NO: 96665 - DNA, 25 bp, Probe sequence
agtttaactgtcttactaataatga

SEQ ID NO: 96666 - DNA, 25 bp, Probe sequence
actgtcttactaataatgactatgt

SEQ ID NO: 96667 - DNA, 25 bp, Probe sequence
aactgtcttactaataatgactatg

SEQ ID NO: 96668 - DNA, 25 bp, Probe sequence
aagtttaactgtcttactaataatg

SEQ ID NO: 96669 - DNA, 25 bp, Probe sequence
cttactaataatgactatgttataa

SEQ ID NO: 96670 - DNA, 25 bp, Probe sequence
ctgtcttactaataatgactatgtt

SEQ ID NO: 96671 - DNA, 25 bp, Probe sequence
gtttaactgtcttactaataatgac

SEQ ID NO: 96672 - DNA, 25 bp, Probe sequence
gtcttactaataatgactatgttat

SEQ ID NO: 96673 - DNA, 25 bp, Probe sequence
tgtcttactaataatgactatgtta

SEQ ID NO: 96674 - DNA, 25 bp, Probe sequence
tcttactaataatgactatgttata

SEQ ID NO: 96675 - DNA, 25 bp, Probe sequence
taatgactatgttataattttaaaa

SEQ ID NO: 96676 - DNA, 25 bp, Probe sequence
taactgtcttactaataatgactat

SEQ ID NO: 96677 - DNA, 25 bp, Probe sequence
tttaactgtcttactaataatgact

SEQ ID NO: 96678 - DNA, 25 bp, Probe sequence
ttactaataatgactatgttataat

SEQ ID NO: 96679 - DNA, 25 bp, Probe sequence
ttaactgtcttactaataatgacta

SEQ ID NO: 96680 - DNA, 25 bp, Probe sequence
attttaacgtgatttcagcattaac

SEQ ID NO: 96681 - DNA, 25 bp, Probe sequence
atactcattacaatatttttgaatt

SEQ ID NO: 96682 - DNA, 25 bp, Probe sequence
atacatttaccgttaatgttggaat

SEQ ID NO: 96683 - DNA, 25 bp, Probe sequence
aaaagtcaaatcatgatcagtaatt

SEQ ID NO: 96684 - DNA, 25 bp, Probe sequence
aacgtgatttcagcattaacacaat

SEQ ID NO: 96685 - DNA, 25 bp, Probe sequence
aagcttattttaacgtgatttcagc

SEQ ID NO: 96686 - DNA, 25 bp, Probe sequence
aatgaatactcattacaatattttt

SEQ ID NO: 96687 - DNA, 25 bp, Probe sequence
aatcatgatcagtaatttttatttt

SEQ ID NO: 96688 - DNA, 25 bp, Probe sequence
cagtaatttttatttttgaggcaag

SEQ ID NO: 96689 - DNA, 25 bp, Probe sequence
cgtgatttcagcattaacacaataa

SEQ ID NO: 96690 - DNA, 25 bp, Probe sequence
gatcagtaatttttatttttgaggc

SEQ ID NO: 96691 - DNA, 25 bp, Probe sequence
gatttcagcattaacacaataatat

SEQ ID NO: 96692 - DNA, 25 bp, Probe sequence
tggaattttacacacaattttaatt

SEQ ID NO: 96693 - DNA, 25 bp, Probe sequence
taatattataatacatttaccgtta

SEQ ID NO: 96694 - DNA, 25 bp, Probe sequence
tttatttttgaggcaagtacaagta

SEQ ID NO: 96695 - DNA, 25 bp, Probe sequence
atcgtaggtggatttcttatatcta

SEQ ID NO: 96696 - DNA, 25 bp, Probe sequence
atgactgattttacggtttctacta

SEQ ID NO: 96697 - DNA, 25 bp, Probe sequence
aaatcctcagctacaccataaatat

SEQ ID NO: 96698 - DNA, 25 bp, Probe sequence
aaaactgtccatctacatcataatg

SEQ ID NO: 96699 - DNA, 25 bp, Probe sequence
aacagcgtctaagatgactatgaga

SEQ ID NO: 96700 - DNA, 25 bp, Probe sequence
aacatttcaatttaaaacagcgtct

SEQ ID NO: 96701 - DNA, 25 bp, Probe sequence
gaacctaaaaaaatcctcagctaca

SEQ ID NO: 96702 - DNA, 25 bp, Probe sequence
gatatttcactgattaacgtacaca

SEQ ID NO: 96703 - DNA, 25 bp, Probe sequence
gttgcaaacatcttgatatttcact

SEQ ID NO: 96704 - DNA, 25 bp, Probe sequence
gtaaaactaattcatgcacacatat

SEQ ID NO: 96705 - DNA, 25 bp, Probe sequence
gggaacaaccacttattcaaattca

SEQ ID NO: 96706 - DNA, 25 bp, Probe sequence
ggtgtcgtgtcattacaacgtctta

SEQ ID NO: 96707 - DNA, 25 bp, Probe sequence
tacggtttctactaatatagcatta

SEQ ID NO: 96708 - DNA, 25 bp, Probe sequence
tatgctttaagatacctatttcgaa

SEQ ID NO: 96709 - DNA, 25 bp, Probe sequence
ttgtatttatgttaggtgtcgtgtc

SEQ ID NO: 96710 - DNA, 25 bp, Probe sequence
atattaatcatgaacaaacttttgt

SEQ ID NO: 96711 - DNA, 25 bp, Probe sequence
atagctgggcgatttatgcttgcaa

SEQ ID NO: 96712 - DNA, 25 bp, Probe sequence
agcctatattaatagctgggcgatt

SEQ ID NO: 96713 - DNA, 25 bp, Probe sequence
aaatgaagattgataacggcttata

SEQ ID NO: 96714 - DNA, 25 bp, Probe sequence
aatatattaagcattttagtcgaaa

SEQ ID NO: 96715 - DNA, 25 bp, Probe sequence
aatttgtttgctactagttaaatat

SEQ ID NO: 96716 - DNA, 25 bp, Probe sequence
gctgggcgatttatgcttgcaaaat

SEQ ID NO: 96717 - DNA, 25 bp, Probe sequence
gaatcgtccagcctatattaatagc

SEQ ID NO: 96718 - DNA, 25 bp, Probe sequence
gattatccataaagttcattgttaa

SEQ ID NO: 96719 - DNA, 25 bp, Probe sequence
gttcatctgattatccataaagttc

SEQ ID NO: 96720 - DNA, 25 bp, Probe sequence
gggcgatttatgcttgcaaaatgaa

SEQ ID NO: 96721 - DNA, 25 bp, Probe sequence
taacggcttatattaatcatgaaca

SEQ ID NO: 96722 - DNA, 25 bp, Probe sequence
taaaaagaatcgtccagcctatatt

SEQ ID NO: 96723 - DNA, 25 bp, Probe sequence
taaagttcattgttaaaatctagtt

SEQ ID NO: 96724 - DNA, 25 bp, Probe sequence
taaatagttcatctgattatccata

SEQ ID NO: 96725 - DNA, 25 bp, Probe sequence
atattttgtctgaaactgatgattg

SEQ ID NO: 96726 - DNA, 25 bp, Probe sequence
atcattaccatttacacgttatctt

SEQ ID NO: 96727 - DNA, 25 bp, Probe sequence
agttctagaacttgaaagcggattt

SEQ ID NO: 96728 - DNA, 25 bp, Probe sequence
acatgtgctatgttctgttacaaga

SEQ ID NO: 96729 - DNA, 25 bp, Probe sequence
acacgttatcttttagtctagttct

SEQ ID NO: 96730 - DNA, 25 bp, Probe sequence
aaaattcttgtgacatgacatgtgc

SEQ ID NO: 96731 - DNA, 25 bp, Probe sequence
aacgaccttcatactaataatattg

SEQ ID NO: 96732 - DNA, 25 bp, Probe sequence
aatctgtgcgtaaatcattaccatt

SEQ ID NO: 96733 - DNA, 25 bp, Probe sequence
aattaatgttcaaatctgtgcgtaa

SEQ ID NO: 96734 - DNA, 25 bp, Probe sequence
gaaactgatgattgtattgtcttaa

SEQ ID NO: 96735 - DNA, 25 bp, Probe sequence
gacatgacatgtgctatgttctgtt

SEQ ID NO: 96736 - DNA, 25 bp, Probe sequence
gaggctttattatatattttgtctg

SEQ ID NO: 96737 - DNA, 25 bp, Probe sequence
gttatcttttagtctagttctagaa

SEQ ID NO: 96738 - DNA, 25 bp, Probe sequence
tacaagaatttttgtttggtcgtca

SEQ ID NO: 96739 - DNA, 25 bp, Probe sequence
ttagcacaaaaaacgaccttcatac

SEQ ID NO: 96740 - DNA, 25 bp, Probe sequence
attgcatcgcatgaaattatattat

SEQ ID NO: 96741 - DNA, 25 bp, Probe sequence
atagaaagaaaggatgggcaagcga

SEQ ID NO: 96742 - DNA, 25 bp, Probe sequence
acaacacctgttttttagatatttg

SEQ ID NO: 96743 - DNA, 25 bp, Probe sequence
aacaattatctacgcatcgagaata

SEQ ID NO: 96744 - DNA, 25 bp, Probe sequence
aatgattatatatacaacacctgtt

SEQ ID NO: 96745 - DNA, 25 bp, Probe sequence
cacctgttttttagatatttgaaat

SEQ ID NO: 96746 - DNA, 25 bp, Probe sequence
catagaccaatgaattgcatcgcat

SEQ ID NO: 96747 - DNA, 25 bp, Probe sequence
gaaattataaactcaacattactat

SEQ ID NO: 96748 - DNA, 25 bp, Probe sequence
gaccaatgaattgcatcgcatgaaa

SEQ ID NO: 96749 - DNA, 25 bp, Probe sequence
gattatatatacaacacctgttttt

SEQ ID NO: 96750 - DNA, 25 bp, Probe sequence
gattaagattaaaaacatagaccaa

SEQ ID NO: 96751 - DNA, 25 bp, Probe sequence
taaactcaacattactataaactta

SEQ ID NO: 96752 - DNA, 25 bp, Probe sequence
tatatgctttatttggatttgatta

SEQ ID NO: 96753 - DNA, 25 bp, Probe sequence
tttaaacaattatctacgcatcgag

SEQ ID NO: 96754 - DNA, 25 bp, Probe sequence
ttatctacgcatcgagaataataga

SEQ ID NO: 96755 - DNA, 25 bp, Probe sequence
acttctaaaataaacaacttgtcat

SEQ ID NO: 96756 - DNA, 25 bp, Probe sequence
acttgtcatctagtttagctagagt

SEQ ID NO: 96757 - DNA, 25 bp, Probe sequence
acaacttgtcatctagtttagctag

SEQ ID NO: 96758 - DNA, 25 bp, Probe sequence
aaacaacttgtcatctagtttagct

SEQ ID NO: 96759 - DNA, 25 bp, Probe sequence
aatgcattacatttatataaactga

SEQ ID NO: 96760 - DNA, 25 bp, Probe sequence
cactaaacatgcatgagacttcaaa

SEQ ID NO: 96761 - DNA, 25 bp, Probe sequence
gctagagtcagtagattgcactaaa

SEQ ID NO: 96762 - DNA, 25 bp, Probe sequence
gcactaaacatgcatgagacttcaa

SEQ ID NO: 96763 - DNA, 25 bp, Probe sequence
gagtcagtagattgcactaaacatg

SEQ ID NO: 96764 - DNA, 25 bp, Probe sequence
gtttagctagagtcagtagattgca

SEQ ID NO: 96765 - DNA, 25 bp, Probe sequence
gtagattgcactaaacatgcatgag

SEQ ID NO: 96766 - DNA, 25 bp, Probe sequence
gtcatctagtttagctagagtcagt

SEQ ID NO: 96767 - DNA, 25 bp, Probe sequence
tagctagagtcagtagattgcacta

SEQ ID NO: 96768 - DNA, 25 bp, Probe sequence
tagttaggaatgcattacatttata

SEQ ID NO: 96769 - DNA, 25 bp, Probe sequence
tataaactgaattattaaacttcta

SEQ ID NO: 96770 - DNA, 25 bp, Probe sequence
attttgtgtgattgctagttttttt

SEQ ID NO: 96771 - DNA, 25 bp, Probe sequence
agacacttattaactagctaatcac

SEQ ID NO: 96772 - DNA, 25 bp, Probe sequence
acttattaactagctaatcacattt

SEQ ID NO: 96773 - DNA, 25 bp, Probe sequence
acattttgtgtgattgctagttttt

SEQ ID NO: 96774 - DNA, 25 bp, Probe sequence
acacttattaactagctaatcacat

SEQ ID NO: 96775 - DNA, 25 bp, Probe sequence
aaattagacacttattaactagcta

SEQ ID NO: 96776 - DNA, 25 bp, Probe sequence
aactagctaatcacattttgtgtga

SEQ ID NO: 96777 - DNA, 25 bp, Probe sequence
caattaacttaaattagacacttat

SEQ ID NO: 96778 - DNA, 25 bp, Probe sequence
cacttattaactagctaatcacatt

SEQ ID NO: 96779 - DNA, 25 bp, Probe sequence
cattttgtgtgattgctagtttttt

SEQ ID NO: 96780 - DNA, 25 bp, Probe sequence
gacacttattaactagctaatcaca

SEQ ID NO: 96781 - DNA, 25 bp, Probe sequence
taactagctaatcacattttgtgtg

SEQ ID NO: 96782 - DNA, 25 bp, Probe sequence
tagacacttattaactagctaatca

SEQ ID NO: 96783 - DNA, 25 bp, Probe sequence
tattaactagctaatcacattttgt

SEQ ID NO: 96784 - DNA, 25 bp, Probe sequence
ttaactagctaatcacattttgtgt

SEQ ID NO: 96785 - DNA, 25 bp, Probe sequence
atgagatgtcatccattttcttaat

SEQ ID NO: 96786 - DNA, 25 bp, Probe sequence
atgtagtcagtatattatttgctaa

SEQ ID NO: 96787 - DNA, 25 bp, Probe sequence
aaacaaacatttatgaatccacaat

SEQ ID NO: 96788 - DNA, 25 bp, Probe sequence
aacggctaatcatttttaattaatg

SEQ ID NO: 96789 - DNA, 25 bp, Probe sequence
aatgattatatgatgcaactgttta

SEQ ID NO: 96790 - DNA, 25 bp, Probe sequence
aattcatgatacttttctacagacg

SEQ ID NO: 96791 - DNA, 25 bp, Probe sequence
gcgatacgattatattaaaacggct

SEQ ID NO: 96792 - DNA, 25 bp, Probe sequence
gatgcaactgtttagaaattcatga

SEQ ID NO: 96793 - DNA, 25 bp, Probe sequence
gatacttttctacagacgaatatat

SEQ ID NO: 96794 - DNA, 25 bp, Probe sequence
gtcatccattttcttaattaagctt

SEQ ID NO: 96795 - DNA, 25 bp, Probe sequence
ggaagtatgaaaggagcgagtgtgt

SEQ ID NO: 96796 - DNA, 25 bp, Probe sequence
tcataatttttttaaacggactgat

SEQ ID NO: 96797 - DNA, 25 bp, Probe sequence
taataattaacagttcgttcttttg

SEQ ID NO: 96798 - DNA, 25 bp, Probe sequence
taacagttcgttcttttgtattaag

SEQ ID NO: 96799 - DNA, 25 bp, Probe sequence
tatttgctaaagttgcgatacgatt

SEQ ID NO: 96800 - DNA, 25 bp, Probe sequence
ataagtaatcttaatgcttcaaaag

SEQ ID NO: 96801 - DNA, 25 bp, Probe sequence
atgagattaattgttagcgttgaat

SEQ ID NO: 96802 - DNA, 25 bp, Probe sequence
agtgataatatcgtgaggtgtagac

SEQ ID NO: 96803 - DNA, 25 bp, Probe sequence
aacattcattgtttaagcgttcaaa

SEQ ID NO: 96804 - DNA, 25 bp, Probe sequence
aagcgttcaaaatattacatgacat

SEQ ID NO: 96805 - DNA, 25 bp, Probe sequence
aagctacataaattactgttagttt

SEQ ID NO: 96806 - DNA, 25 bp, Probe sequence
aaggtaaccatgtctactatagtat

SEQ ID NO: 96807 - DNA, 25 bp, Probe sequence
gattttaatttcttacatataatgt

SEQ ID NO: 96808 - DNA, 25 bp, Probe sequence
gtttttaatctttggaacattcatt

SEQ ID NO: 96809 - DNA, 25 bp, Probe sequence
tgttagcgttgaatttacttaaaag

SEQ ID NO: 96810 - DNA, 25 bp, Probe sequence
tgttcttctaagtttttaatctttg

SEQ ID NO: 96811 - DNA, 25 bp, Probe sequence
tgaataagggctttttattttgctt

SEQ ID NO: 96812 - DNA, 25 bp, Probe sequence
taatttgtaatgttcttctaagttt

SEQ ID NO: 96813 - DNA, 25 bp, Probe sequence
tacttacaacctgtacataatttgt

SEQ ID NO: 96814 - DNA, 25 bp, Probe sequence
ttttgcttttaatacttacaacctg

SEQ ID NO: 96815 - DNA, 25 bp, Probe sequence
attcaacgtttttgccacataaatg

SEQ ID NO: 96816 - DNA, 25 bp, Probe sequence
atatcattatcaaacctcaggaggt

SEQ ID NO: 96817 - DNA, 25 bp, Probe sequence
aaacatatcattatcaaacctcagg

SEQ ID NO: 96818 - DNA, 25 bp, Probe sequence
aacgtttttgccacataaatgattg

SEQ ID NO: 96819 - DNA, 25 bp, Probe sequence
aatgcttgtgttaaagttttaccat

SEQ ID NO: 96820 - DNA, 25 bp, Probe sequence
gcgatttatgtaatgcttgtgttaa

SEQ ID NO: 96821 - DNA, 25 bp, Probe sequence
gcttaaattcaacgtttttgccaca

SEQ ID NO: 96822 - DNA, 25 bp, Probe sequence
gattgcgatttatgtaatgcttgtg

SEQ ID NO: 96823 - DNA, 25 bp, Probe sequence
gttaaagttttaccataatgatata

SEQ ID NO: 96824 - DNA, 25 bp, Probe sequence
gtgtattattacacatatacggcta

SEQ ID NO: 96825 - DNA, 25 bp, Probe sequence
tcaaacctcaggaggtgaatgtcta

SEQ ID NO: 96826 - DNA, 25 bp, Probe sequence
taaattcaacgtttttgccacataa

SEQ ID NO: 96827 - DNA, 25 bp, Probe sequence
tacacatatacggctaataattacg

SEQ ID NO: 96828 - DNA, 25 bp, Probe sequence
tagaaatggcttaaattcaacgttt

SEQ ID NO: 96829 - DNA, 25 bp, Probe sequence
ttttgccacataaatgattgcgatt

SEQ ID NO: 96830 - DNA, 25 bp, Probe sequence
atgattgcatgtggagtatttttat

SEQ ID NO: 96831 - DNA, 25 bp, Probe sequence
agtgctgatttttatcattacagta

SEQ ID NO: 96832 - DNA, 25 bp, Probe sequence
acagtctcatgtgatattattaaaa

SEQ ID NO: 96833 - DNA, 25 bp, Probe sequence
aactcattttgaatacacagtctca

SEQ ID NO: 96834 - DNA, 25 bp, Probe sequence
aatagtcaactccacatgtttatga

SEQ ID NO: 96835 - DNA, 25 bp, Probe sequence
aatatttaatagtcaactccacatg

SEQ ID NO: 96836 - DNA, 25 bp, Probe sequence
caactccacatgtttatgattgcat

SEQ ID NO: 96837 - DNA, 25 bp, Probe sequence
gcatgtggagtatttttatgtaaca

SEQ ID NO: 96838 - DNA, 25 bp, Probe sequence
gaatacacagtctcatgtgatatta

SEQ ID NO: 96839 - DNA, 25 bp, Probe sequence
gataacgtggacaaatttaactaag

SEQ ID NO: 96840 - DNA, 25 bp, Probe sequence
gataaagttttaagtgctgattttt

SEQ ID NO: 96841 - DNA, 25 bp, Probe sequence
gtcaactccacatgtttatgattgc

SEQ ID NO: 96842 - DNA, 25 bp, Probe sequence
tcattacagtaataaactcattttg

SEQ ID NO: 96843 - DNA, 25 bp, Probe sequence
tcattttgaatacacagtctcatgt

SEQ ID NO: 96844 - DNA, 25 bp, Probe sequence
tatactcggaatgataacgtggaca

SEQ ID NO: 96845 - DNA, 25 bp, Probe sequence
atatatgtccaactaatttacagaa

SEQ ID NO: 96846 - DNA, 25 bp, Probe sequence
acttgtttgaatatatggttgtaat

SEQ ID NO: 96847 - DNA, 25 bp, Probe sequence
aagttgcttatttgcgtggcttttt

SEQ ID NO: 96848 - DNA, 25 bp, Probe sequence
aatgtcctatgtaataattcgagaa

SEQ ID NO: 96849 - DNA, 25 bp, Probe sequence
aattcattacattcataaagcattt

SEQ ID NO: 96850 - DNA, 25 bp, Probe sequence
caattctgtcagtttataagatgtt

SEQ ID NO: 96851 - DNA, 25 bp, Probe sequence
catagcggactttattacttgtttg

SEQ ID NO: 96852 - DNA, 25 bp, Probe sequence
gaatttcttgacaattctgtcagtt

SEQ ID NO: 96853 - DNA, 25 bp, Probe sequence
gacatatttatggatacaactaatt

SEQ ID NO: 96854 - DNA, 25 bp, Probe sequence
gagtgttacaaatctaaatattgca

SEQ ID NO: 96855 - DNA, 25 bp, Probe sequence
gatgcactatatacggtcttcttac

SEQ ID NO: 96856 - DNA, 25 bp, Probe sequence
gatttagtcacaaaaaatgtcctat

SEQ ID NO: 96857 - DNA, 25 bp, Probe sequence
gtaagctatgctaatttttatacaa

SEQ ID NO: 96858 - DNA, 25 bp, Probe sequence
tacggtcttcttactattcaaatgt

SEQ ID NO: 96859 - DNA, 25 bp, Probe sequence
tatttgcgtggctttttgttttata

SEQ ID NO: 96860 - DNA, 25 bp, Probe sequence
attattcataaaacgacaaggaagg

SEQ ID NO: 96861 - DNA, 25 bp, Probe sequence
atattattcataaaacgacaaggaa

SEQ ID NO: 96862 - DNA, 25 bp, Probe sequence
aaatattattcataaaacgacaagg

SEQ ID NO: 96863 - DNA, 25 bp, Probe sequence
aatattattcataaaacgacaagga

SEQ ID NO: 96864 - DNA, 25 bp, Probe sequence
aatttacctaattatgataaaatat

SEQ ID NO: 96865 - DNA, 25 bp, Probe sequence
ctatatttaatttacctaattatga

SEQ ID NO: 96866 - DNA, 25 bp, Probe sequence
cctatatttaatttacctaattatg

SEQ ID NO: 96867 - DNA, 25 bp, Probe sequence
tcctatatttaatttacctaattat

SEQ ID NO: 96868 - DNA, 25 bp, Probe sequence
tcctcctatatttaatttacctaat

SEQ ID NO: 96869 - DNA, 25 bp, Probe sequence
tcataaaacgacaaggaagggaaat

SEQ ID NO: 96870 - DNA, 25 bp, Probe sequence
tattattcataaaacgacaaggaag

SEQ ID NO: 96871 - DNA, 25 bp, Probe sequence
ttattcataaaacgacaaggaaggg

SEQ ID NO: 96872 - DNA, 25 bp, Probe sequence
tatatttaatttacctaattatgat

SEQ ID NO: 96873 - DNA, 25 bp, Probe sequence
tatttaatttacctaattatgataa

SEQ ID NO: 96874 - DNA, 25 bp, Probe sequence
tattcataaaacgacaaggaaggga

SEQ ID NO: 96875 - DNA, 25 bp, Probe sequence
ataaaggtctatgtactaaataact

SEQ ID NO: 96876 - DNA, 25 bp, Probe sequence
acttagttttacaacgactgacatt

SEQ ID NO: 96877 - DNA, 25 bp, Probe sequence
acattcatgatatgtcaaatgaggt

SEQ ID NO: 96878 - DNA, 25 bp, Probe sequence
aaggtctatgtactaaataacttag

SEQ ID NO: 96879 - DNA, 25 bp, Probe sequence
aattattgtacatagacctttttat

SEQ ID NO: 96880 - DNA, 25 bp, Probe sequence
caacgactgacattcatgatatgtc

SEQ ID NO: 96881 - DNA, 25 bp, Probe sequence
gactaattattgtacatagaccttt

SEQ ID NO: 96882 - DNA, 25 bp, Probe sequence
gaggttgatgactaattattgtaca

SEQ ID NO: 96883 - DNA, 25 bp, Probe sequence
gttttacaacgactgacattcatga

SEQ ID NO: 96884 - DNA, 25 bp, Probe sequence
gtacatagacctttttatgttacgt

SEQ ID NO: 96885 - DNA, 25 bp, Probe sequence
taacttagttttacaacgactgaca

SEQ ID NO: 96886 - DNA, 25 bp, Probe sequence
tacaacgactgacattcatgatatg

SEQ ID NO: 96887 - DNA, 25 bp, Probe sequence
tagacctttttatgttacgtattca

SEQ ID NO: 96888 - DNA, 25 bp, Probe sequence
tttacaacgactgacattcatgata

SEQ ID NO: 96889 - DNA, 25 bp, Probe sequence
ttagttttacaacgactgacattca

SEQ ID NO: 96890 - DNA, 25 bp, Probe sequence
acgtgcatattataagtatctctaa

SEQ ID NO: 96891 - DNA, 25 bp, Probe sequence
actgctatatacaaacgtgcatatt

SEQ ID NO: 96892 - DNA, 25 bp, Probe sequence
actgaactgctatatacaaacgtgc

SEQ ID NO: 96893 - DNA, 25 bp, Probe sequence
aaacgtgcatattataagtatctct

SEQ ID NO: 96894 - DNA, 25 bp, Probe sequence
gaactgctatatacaaacgtgcata

SEQ ID NO: 96895 - DNA, 25 bp, Probe sequence
gtaactgaactgctatatacaaacg

SEQ ID NO: 96896 - DNA, 25 bp, Probe sequence
gtgcatattataagtatctctaaat

SEQ ID NO: 96897 - DNA, 25 bp, Probe sequence
tggagaacttaaattgcgcttataa

SEQ ID NO: 96898 - DNA, 25 bp, Probe sequence
taagtatgtagcggttttttcattt

SEQ ID NO: 96899 - DNA, 25 bp, Probe sequence
taaattgcgcttataagtatgtagc

SEQ ID NO: 96900 - DNA, 25 bp, Probe sequence
taaattgtaactgaactgctatata

SEQ ID NO: 96901 - DNA, 25 bp, Probe sequence
tatgtagcggttttttcatttttca

SEQ ID NO: 96902 - DNA, 25 bp, Probe sequence
tataagtatctctaaatattttgga

SEQ ID NO: 96903 - DNA, 25 bp, Probe sequence
ttttggagaacttaaattgcgctta

SEQ ID NO: 96904 - DNA, 25 bp, Probe sequence
ttataagtatgtagcggttttttca

SEQ ID NO: 96905 - DNA, 25 bp, Probe sequence
atatgtcatgtgggtatattttatg

SEQ ID NO: 96906 - DNA, 25 bp, Probe sequence
atgtcatgtgggtatattttatgta

SEQ ID NO: 96907 - DNA, 25 bp, Probe sequence
acataaacatatgtcatgtgggtat

SEQ ID NO: 96908 - DNA, 25 bp, Probe sequence
acatatgtcatgtgggtatatttta

SEQ ID NO: 96909 - DNA, 25 bp, Probe sequence
aaacatatgtcatgtgggtatattt

SEQ ID NO: 96910 - DNA, 25 bp, Probe sequence
aacatatgtcatgtgggtatatttt

SEQ ID NO: 96911 - DNA, 25 bp, Probe sequence
aagctataattagtgtatacacaat

SEQ ID NO: 96912 - DNA, 25 bp, Probe sequence
catgtgggtatattttatgtaaaat

SEQ ID NO: 96913 - DNA, 25 bp, Probe sequence
gaaaattgacaagctataattagtg

SEQ ID NO: 96914 - DNA, 25 bp, Probe sequence
gacaagctataattagtgtatacac

SEQ ID NO: 96915 - DNA, 25 bp, Probe sequence
gtcatgtgggtatattttatgtaaa

SEQ ID NO: 96916 - DNA, 25 bp, Probe sequence
tgtcatgtgggtatattttatgtaa

SEQ ID NO: 96917 - DNA, 25 bp, Probe sequence
taaacatatgtcatgtgggtatatt

SEQ ID NO: 96918 - DNA, 25 bp, Probe sequence
tatgtcatgtgggtatattttatgt

SEQ ID NO: 96919 - DNA, 25 bp, Probe sequence
ttagtgtatacacaattgaaaaatg

SEQ ID NO: 96920 - DNA, 25 bp, Probe sequence
attatccgttttacagagtgagggt

SEQ ID NO: 96921 - DNA, 25 bp, Probe sequence
aattttagacagcatcatttttatt

SEQ ID NO: 96922 - DNA, 25 bp, Probe sequence
caaattatccgttttacagagtgag

SEQ ID NO: 96923 - DNA, 25 bp, Probe sequence
cttcgcctcctttgataaaaatgct

SEQ ID NO: 96924 - DNA, 25 bp, Probe sequence
gcctcctttgataaaaatgctaaaa

SEQ ID NO: 96925 - DNA, 25 bp, Probe sequence
gacagcatcatttttattttcaaat

SEQ ID NO: 96926 - DNA, 25 bp, Probe sequence
gtcttcgcctcctttgataaaaatg

SEQ ID NO: 96927 - DNA, 25 bp, Probe sequence
tgtcttcgcctcctttgataaaaat

SEQ ID NO: 96928 - DNA, 25 bp, Probe sequence
tcgcctcctttgataaaaatgctaa

SEQ ID NO: 96929 - DNA, 25 bp, Probe sequence
tcttcgcctcctttgataaaaatgc

SEQ ID NO: 96930 - DNA, 25 bp, Probe sequence
tatccgttttacagagtgagggtta

SEQ ID NO: 96931 - DNA, 25 bp, Probe sequence
tagacagcatcatttttattttcaa

SEQ ID NO: 96932 - DNA, 25 bp, Probe sequence
tattttcaaattatccgttttacag

SEQ ID NO: 96933 - DNA, 25 bp, Probe sequence
tttcaaattatccgttttacagagt

SEQ ID NO: 96934 - DNA, 25 bp, Probe sequence
tttagacagcatcatttttattttc

SEQ ID NO: 96935 - DNA, 25 bp, Probe sequence
atagcttgcctgctttttctataga

SEQ ID NO: 96936 - DNA, 25 bp, Probe sequence
atcaataaacgatagcttgcctgct

SEQ ID NO: 96937 - DNA, 25 bp, Probe sequence
agcttgcctgctttttctatagaac

SEQ ID NO: 96938 - DNA, 25 bp, Probe sequence
aaacgatagcttgcctgctttttct

SEQ ID NO: 96939 - DNA, 25 bp, Probe sequence
aacgatagcttgcctgctttttcta

SEQ ID NO: 96940 - DNA, 25 bp, Probe sequence
aagcaggtgactatcaataaacgat

SEQ ID NO: 96941 - DNA, 25 bp, Probe sequence
aataaaaagcaggtgactatcaata

SEQ ID NO: 96942 - DNA, 25 bp, Probe sequence
aataaacgatagcttgcctgctttt

SEQ ID NO: 96943 - DNA, 25 bp, Probe sequence
cttgcctgctttttctatagaacat

SEQ ID NO: 96944 - DNA, 25 bp, Probe sequence
gcctgctttttctatagaacatttg

SEQ ID NO: 96945 - DNA, 25 bp, Probe sequence
gctttttctatagaacatttgtcta

SEQ ID NO: 96946 - DNA, 25 bp, Probe sequence
gcttgcctgctttttctatagaaca

SEQ ID NO: 96947 - DNA, 25 bp, Probe sequence
taaacgatagcttgcctgctttttc

SEQ ID NO: 96948 - DNA, 25 bp, Probe sequence
tagcttgcctgctttttctatagaa

SEQ ID NO: 96949 - DNA, 25 bp, Probe sequence
ttgcctgctttttctatagaacatt

SEQ ID NO: 96950 - DNA, 25 bp, Probe sequence
agcatagttattgaggttttgtgat

SEQ ID NO: 96951 - DNA, 25 bp, Probe sequence
accacaaaccaatcaaacctatcca

SEQ ID NO: 96952 - DNA, 25 bp, Probe sequence
accaatcaaacctatccaaccaatg

SEQ ID NO: 96953 - DNA, 25 bp, Probe sequence
accaatgaactcaaatcaccaatgt

SEQ ID NO: 96954 - DNA, 25 bp, Probe sequence
aaacctatccaaccaatgaactcaa

SEQ ID NO: 96955 - DNA, 25 bp, Probe sequence
aaaaagccatctcaacaacagttaa

SEQ ID NO: 96956 - DNA, 25 bp, Probe sequence
aatcctcctattcttacgagatgaa

SEQ ID NO: 96957 - DNA, 25 bp, Probe sequence
cctgcgacctgctagtatgtatcat

SEQ ID NO: 96958 - DNA, 25 bp, Probe sequence
gcgacctgctagtatgtatcatatt

SEQ ID NO: 96959 - DNA, 25 bp, Probe sequence
gaagatggaggttttttgttgtgca

SEQ ID NO: 96960 - DNA, 25 bp, Probe sequence
gtatcactctccaataatgtaacta

SEQ ID NO: 96961 - DNA, 25 bp, Probe sequence
gtgcaataatcctcctattcttacg

SEQ ID NO: 96962 - DNA, 25 bp, Probe sequence
tgtaaaattcatcttcggggtcggg

SEQ ID NO: 96963 - DNA, 25 bp, Probe sequence
tcatcttcggggtcgggtgtaattc

SEQ ID NO: 96964 - DNA, 25 bp, Probe sequence
ttgttgtgcaataatcctcctattc

SEQ ID NO: 96965 - DNA, 25 bp, Probe sequence
atttctctatattctaaacaaacac

SEQ ID NO: 96966 - DNA, 25 bp, Probe sequence
atcagctaatttctctatattctaa

SEQ ID NO: 96967 - DNA, 25 bp, Probe sequence
agctaatttctctatattctaaaca

SEQ ID NO: 96968 - DNA, 25 bp, Probe sequence
aaatcagctaatttctctatattct

SEQ ID NO: 96969 - DNA, 25 bp, Probe sequence
aatcagctaatttctctatattcta

SEQ ID NO: 96970 - DNA, 25 bp, Probe sequence
cagctaatttctctatattctaaac

SEQ ID NO: 96971 - DNA, 25 bp, Probe sequence
cttgaaatcagctaatttctctata

SEQ ID NO: 96972 - DNA, 25 bp, Probe sequence
ctaatttctctatattctaaacaaa

SEQ ID NO: 96973 - DNA, 25 bp, Probe sequence
ctctatattctaaacaaacacataa

SEQ ID NO: 96974 - DNA, 25 bp, Probe sequence
gctaatttctctatattctaaacaa

SEQ ID NO: 96975 - DNA, 25 bp, Probe sequence
gaaatcagctaatttctctatattc

SEQ ID NO: 96976 - DNA, 25 bp, Probe sequence
tcagctaatttctctatattctaaa

SEQ ID NO: 96977 - DNA, 25 bp, Probe sequence
taatttctctatattctaaacaaac

SEQ ID NO: 96978 - DNA, 25 bp, Probe sequence
tatattctaaacaaacacataaatg

SEQ ID NO: 96979 - DNA, 25 bp, Probe sequence
ttctctatattctaaacaaacacat

SEQ ID NO: 96980 - DNA, 25 bp, Probe sequence
attaaatgctacttgttttctttga

SEQ ID NO: 96981 - DNA, 25 bp, Probe sequence
atgctacttgttttctttgagaata

SEQ ID NO: 96982 - DNA, 25 bp, Probe sequence
acttgttttctttgagaataagtag

SEQ ID NO: 96983 - DNA, 25 bp, Probe sequence
aaatgctacttgttttctttgagaa

SEQ ID NO: 96984 - DNA, 25 bp, Probe sequence
aatgctacttgttttctttgagaat

SEQ ID NO: 96985 - DNA, 25 bp, Probe sequence
cttgttttctttgagaataagtagt

SEQ ID NO: 96986 - DNA, 25 bp, Probe sequence
ctacttgttttctttgagaataagt

SEQ ID NO: 96987 - DNA, 25 bp, Probe sequence
gctacttgttttctttgagaataag

SEQ ID NO: 96988 - DNA, 25 bp, Probe sequence
tgagaataagtagtttttttaacat

SEQ ID NO: 96989 - DNA, 25 bp, Probe sequence
tgctacttgttttctttgagaataa

SEQ ID NO: 96990 - DNA, 25 bp, Probe sequence
taaatgctacttgttttctttgaga

SEQ ID NO: 96991 - DNA, 25 bp, Probe sequence
taaaagttttacaaacacataaatg

SEQ ID NO: 96992 - DNA, 25 bp, Probe sequence
tacttgttttctttgagaataagta

SEQ ID NO: 96993 - DNA, 25 bp, Probe sequence
tattaaatgctacttgttttctttg

SEQ ID NO: 96994 - DNA, 25 bp, Probe sequence
ttaaatgctacttgttttctttgag

SEQ ID NO: 96995 - DNA, 25 bp, Probe sequence
atttaagaacgcatgttattgatta

SEQ ID NO: 96996 - DNA, 25 bp, Probe sequence
atatagttatttaagaacgcatgtt

SEQ ID NO: 96997 - DNA, 25 bp, Probe sequence
atagttatttaagaacgcatgttat

SEQ ID NO: 96998 - DNA, 25 bp, Probe sequence
agttatttaagaacgcatgttattg

SEQ ID NO: 96999 - DNA, 25 bp, Probe sequence
agaacgcatgttattgattagagac

SEQ ID NO: 97000 - DNA, 25 bp, Probe sequence
acgcatgttattgattagagactct

SEQ ID NO: 97001 - DNA, 25 bp, Probe sequence
aacgcatgttattgattagagactc

SEQ ID NO: 97002 - DNA, 25 bp, Probe sequence
catgttattgattagagactctaat

SEQ ID NO: 97003 - DNA, 25 bp, Probe sequence
cgcatgttattgattagagactcta

SEQ ID NO: 97004 - DNA, 25 bp, Probe sequence
gcatgttattgattagagactctaa

SEQ ID NO: 97005 - DNA, 25 bp, Probe sequence
gaatatagttatttaagaacgcatg

SEQ ID NO: 97006 - DNA, 25 bp, Probe sequence
gaacgcatgttattgattagagact

SEQ ID NO: 97007 - DNA, 25 bp, Probe sequence
gttatttaagaacgcatgttattga

SEQ ID NO: 97008 - DNA, 25 bp, Probe sequence
taagaacgcatgttattgattagag

SEQ ID NO: 97009 - DNA, 25 bp, Probe sequence
ttaagaacgcatgttattgattaga

SEQ ID NO: 97010 - DNA, 25 bp, Probe sequence
atgcgctttcctgtgatataatact

SEQ ID NO: 97011 - DNA, 25 bp, Probe sequence
aggtttttaataactgtatgcgctt

SEQ ID NO: 97012 - DNA, 25 bp, Probe sequence
agcatgtgtgggaggtatgacctgt

SEQ ID NO: 97013 - DNA, 25 bp, Probe sequence
aaagcatgtgtgggaggtatgacct

SEQ ID NO: 97014 - DNA, 25 bp, Probe sequence
aaatatgtatttatcacaaagtttg

SEQ ID NO: 97015 - DNA, 25 bp, Probe sequence
cacaaagtttgagaattttttcaca

SEQ ID NO: 97016 - DNA, 25 bp, Probe sequence
ctgtatgcgctttcctgtgatataa

SEQ ID NO: 97017 - DNA, 25 bp, Probe sequence
gcgctttcctgtgatataatacttt

SEQ ID NO: 97018 - DNA, 25 bp, Probe sequence
gctttcctgtgatataatacttttg

SEQ ID NO: 97019 - DNA, 25 bp, Probe sequence
gtatgcgctttcctgtgatataata

SEQ ID NO: 97020 - DNA, 25 bp, Probe sequence
tgtatgcgctttcctgtgatataat

SEQ ID NO: 97021 - DNA, 25 bp, Probe sequence
tcctgtgatataatacttttgtaaa

SEQ ID NO: 97022 - DNA, 25 bp, Probe sequence
taataactgtatgcgctttcctgtg

SEQ ID NO: 97023 - DNA, 25 bp, Probe sequence
ttttaataactgtatgcgctttcct

SEQ ID NO: 97024 - DNA, 25 bp, Probe sequence
ttaataactgtatgcgctttcctgt

SEQ ID NO: 97025 - DNA, 25 bp, Probe sequence
atgtctgtgctattgtggctttttt

SEQ ID NO: 97026 - DNA, 25 bp, Probe sequence
acacatgactaaaaatgtctgtgct

SEQ ID NO: 97027 - DNA, 25 bp, Probe sequence
aaatgtctgtgctattgtggctttt

SEQ ID NO: 97028 - DNA, 25 bp, Probe sequence
aaaaatgtctgtgctattgtggctt

SEQ ID NO: 97029 - DNA, 25 bp, Probe sequence
aaaatgtctgtgctattgtggcttt

SEQ ID NO: 97030 - DNA, 25 bp, Probe sequence
aatgtctgtgctattgtggcttttt

SEQ ID NO: 97031 - DNA, 25 bp, Probe sequence
ctgtgctattgtggcttttttaaat

SEQ ID NO: 97032 - DNA, 25 bp, Probe sequence
gctattgtggcttttttaaattggt

SEQ ID NO: 97033 - DNA, 25 bp, Probe sequence
gtctgtgctattgtggcttttttaa

SEQ ID NO: 97034 - DNA, 25 bp, Probe sequence
gtgctattgtggcttttttaaattg

SEQ ID NO: 97035 - DNA, 25 bp, Probe sequence
gtgaaccataacttaaaagtcacaa

SEQ ID NO: 97036 - DNA, 25 bp, Probe sequence
tgtctgtgctattgtggctttttta

SEQ ID NO: 97037 - DNA, 25 bp, Probe sequence
tctgtgctattgtggcttttttaaa

SEQ ID NO: 97038 - DNA, 25 bp, Probe sequence
taacttaaaagtcacaatacacatg

SEQ ID NO: 97039 - DNA, 25 bp, Probe sequence
tattgtggcttttttaaattggttg

SEQ ID NO: 97040 - DNA, 25 bp, Probe sequence
attgtgaagtttgaaataatttgta

SEQ ID NO: 97041 - DNA, 25 bp, Probe sequence
attattagtaggggagtggacatcg

SEQ ID NO: 97042 - DNA, 25 bp, Probe sequence
atgagaaaagcttgcattttattga

SEQ ID NO: 97043 - DNA, 25 bp, Probe sequence
agaaaagcttgcattttattgagaa

SEQ ID NO: 97044 - DNA, 25 bp, Probe sequence
agcttgcattttattgagaaaactg

SEQ ID NO: 97045 - DNA, 25 bp, Probe sequence
aaagcttgcattttattgagaaaac

SEQ ID NO: 97046 - DNA, 25 bp, Probe sequence
aagcttgcattttattgagaaaact

SEQ ID NO: 97047 - DNA, 25 bp, Probe sequence
aattattagtaggggagtggacatc

SEQ ID NO: 97048 - DNA, 25 bp, Probe sequence
gcttgcattttattgagaaaactgt

SEQ ID NO: 97049 - DNA, 25 bp, Probe sequence
gcattttattgagaaaactgttagt

SEQ ID NO: 97050 - DNA, 25 bp, Probe sequence
gaaaagcttgcattttattgagaaa

SEQ ID NO: 97051 - DNA, 25 bp, Probe sequence
gagaaaagcttgcattttattgaga

SEQ ID NO: 97052 - DNA, 25 bp, Probe sequence
tgttagttttaattgtgaagtttga

SEQ ID NO: 97053 - DNA, 25 bp, Probe sequence
tgagaaaagcttgcattttattgag

SEQ ID NO: 97054 - DNA, 25 bp, Probe sequence
tagttttaattgtgaagtttgaaat

SEQ ID NO: 97055 - DNA, 25 bp, Probe sequence
atacactttagctaacaagcatagt

SEQ ID NO: 97056 - DNA, 25 bp, Probe sequence
atgaatttaaaggaacgtgattata

SEQ ID NO: 97057 - DNA, 25 bp, Probe sequence
agctaacaagcatagtgtatcaata

SEQ ID NO: 97058 - DNA, 25 bp, Probe sequence
acaagcatagtgtatcaatatataa

SEQ ID NO: 97059 - DNA, 25 bp, Probe sequence
ctttcgatacactttagctaacaag

SEQ ID NO: 97060 - DNA, 25 bp, Probe sequence
ctcctttcgatacactttagctaac

SEQ ID NO: 97061 - DNA, 25 bp, Probe sequence
ctgttctcctttcgatacactttag

SEQ ID NO: 97062 - DNA, 25 bp, Probe sequence
cctttcgatacactttagctaacaa

SEQ ID NO: 97063 - DNA, 25 bp, Probe sequence
tgttctcctttcgatacactttagc

SEQ ID NO: 97064 - DNA, 25 bp, Probe sequence
tcctttcgatacactttagctaaca

SEQ ID NO: 97065 - DNA, 25 bp, Probe sequence
tcgatacactttagctaacaagcat

SEQ ID NO: 97066 - DNA, 25 bp, Probe sequence
tctcctttcgatacactttagctaa

SEQ ID NO: 97067 - DNA, 25 bp, Probe sequence
ttagctaacaagcatagtgtatcaa

SEQ ID NO: 97068 - DNA, 25 bp, Probe sequence
ttctcctttcgatacactttagcta

SEQ ID NO: 97069 - DNA, 25 bp, Probe sequence
ttcgatacactttagctaacaagca

SEQ ID NO: 97070 - DNA, 25 bp, Probe sequence
atttctatcataagtgagtaatcat

SEQ ID NO: 97071 - DNA, 25 bp, Probe sequence
aaacaacagcagtaaggcattttta

SEQ ID NO: 97072 - DNA, 25 bp, Probe sequence
aacagcagtaaggcatttttataat

SEQ ID NO: 97073 - DNA, 25 bp, Probe sequence
gccgcaaggcgaaattactaaatac

SEQ ID NO: 97074 - DNA, 25 bp, Probe sequence
gcgaattgtacataaacaacagcag

SEQ ID NO: 97075 - DNA, 25 bp, Probe sequence
gctgctgtttttattactgaaaatg

SEQ ID NO: 97076 - DNA, 25 bp, Probe sequence
gaagtttgcttaaggcaatgccgca

SEQ ID NO: 97077 - DNA, 25 bp, Probe sequence
gaagtggcagaagtttgcttaaggc

SEQ ID NO: 97078 - DNA, 25 bp, Probe sequence
gaggacaacgctttaatttctatca

SEQ ID NO: 97079 - DNA, 25 bp, Probe sequence
ggcaatgccgcaaggcgaaattact

SEQ ID NO: 97080 - DNA, 25 bp, Probe sequence
tgcttaaggcaatgccgcaaggcga

SEQ ID NO: 97081 - DNA, 25 bp, Probe sequence
tactgatgcgtgaggacaacgcttt

SEQ ID NO: 97082 - DNA, 25 bp, Probe sequence
taatgaaacgcctcatgctgctgtt

SEQ ID NO: 97083 - DNA, 25 bp, Probe sequence
tactaaatactgatgcgtgaggaca

SEQ ID NO: 97084 - DNA, 25 bp, Probe sequence
tataatgaaacgcctcatgctgctg

SEQ ID NO: 97085 - DNA, 25 bp, Probe sequence
acgtcacatccctttagtttttgat

SEQ ID NO: 97086 - DNA, 25 bp, Probe sequence
aatcaacttgtctcaattatacaga

SEQ ID NO: 97087 - DNA, 25 bp, Probe sequence
cacatccctttagtttttgatttgt

SEQ ID NO: 97088 - DNA, 25 bp, Probe sequence
gagacgataaattgcattctatata

SEQ ID NO: 97089 - DNA, 25 bp, Probe sequence
gataaattgcattctatataattga

SEQ ID NO: 97090 - DNA, 25 bp, Probe sequence
gatttgtatgttatattttcttatt

SEQ ID NO: 97091 - DNA, 25 bp, Probe sequence
gttatattttcttattattgtatat

SEQ ID NO: 97092 - DNA, 25 bp, Probe sequence
gtatgttatattttcttattattgt

SEQ ID NO: 97093 - DNA, 25 bp, Probe sequence
gtcacatccctttagtttttgattt

SEQ ID NO: 97094 - DNA, 25 bp, Probe sequence
ggaaagataatcaacttgtctcaat

SEQ ID NO: 97095 - DNA, 25 bp, Probe sequence
tccctttagtttttgatttgtatgt

SEQ ID NO: 97096 - DNA, 25 bp, Probe sequence
tcaacttgtctcaattatacagaga

SEQ ID NO: 97097 - DNA, 25 bp, Probe sequence
taacgtcacatccctttagtttttg

SEQ ID NO: 97098 - DNA, 25 bp, Probe sequence
tacagagacgataaattgcattcta

SEQ ID NO: 97099 - DNA, 25 bp, Probe sequence
tagtttttgatttgtatgttatatt

SEQ ID NO: 97100 - DNA, 25 bp, Probe sequence
ataagataatccattcagcaggtca

SEQ ID NO: 97101 - DNA, 25 bp, Probe sequence
atccattcagcaggtcattcaatat

SEQ ID NO: 97102 - DNA, 25 bp, Probe sequence
aggtcattcaatatgctcgacagta

SEQ ID NO: 97103 - DNA, 25 bp, Probe sequence
aaacctcaattcttaattagatata

SEQ ID NO: 97104 - DNA, 25 bp, Probe sequence
caatatgctcgacagtatgcagtgt

SEQ ID NO: 97105 - DNA, 25 bp, Probe sequence
cagtatgcagtgtcttaaatgaaat

SEQ ID NO: 97106 - DNA, 25 bp, Probe sequence
gctcgacagtatgcagtgtcttaaa

SEQ ID NO: 97107 - DNA, 25 bp, Probe sequence
gcaggtcattcaatatgctcgacag

SEQ ID NO: 97108 - DNA, 25 bp, Probe sequence
gcagtgtcttaaatgaaatatcgat

SEQ ID NO: 97109 - DNA, 25 bp, Probe sequence
gataatccattcagcaggtcattca

SEQ ID NO: 97110 - DNA, 25 bp, Probe sequence
gattaaaacctcaattcttaattag

SEQ ID NO: 97111 - DNA, 25 bp, Probe sequence
gtcattcaatatgctcgacagtatg

SEQ ID NO: 97112 - DNA, 25 bp, Probe sequence
tcagcaggtcattcaatatgctcga

SEQ ID NO: 97113 - DNA, 25 bp, Probe sequence
taatccattcagcaggtcattcaat

SEQ ID NO: 97114 - DNA, 25 bp, Probe sequence
tatgctcgacagtatgcagtgtctt

SEQ ID NO: 97115 - DNA, 25 bp, Probe sequence
atccttgtcattcgctcatttattt

SEQ ID NO: 97116 - DNA, 25 bp, Probe sequence
agaacaattgatttacttgattcgt

SEQ ID NO: 97117 - DNA, 25 bp, Probe sequence
aaattatacacccatttgttcaatg

SEQ ID NO: 97118 - DNA, 25 bp, Probe sequence
aactttcactccaattaattcaatc

SEQ ID NO: 97119 - DNA, 25 bp, Probe sequence
cgtaatcaatccttgtcattcgctc

SEQ ID NO: 97120 - DNA, 25 bp, Probe sequence
aatagttttgggcattgtaaaatat

SEQ ID NO: 97121 - DNA, 25 bp, Probe sequence
ccttgtcattcgctcatttattttt

SEQ ID NO: 97122 - DNA, 25 bp, Probe sequence
gattcgtaatcaatccttgtcattc

SEQ ID NO: 97123 - DNA, 25 bp, Probe sequence
gtttaacatgtgcgttttaattcaa

SEQ ID NO: 97124 - DNA, 25 bp, Probe sequence
gtcattcgctcatttatttttgttt

SEQ ID NO: 97125 - DNA, 25 bp, Probe sequence
tcactccaattaattcaatcattta

SEQ ID NO: 97126 - DNA, 25 bp, Probe sequence
tacacccatttgttcaatgattatt

SEQ ID NO: 97127 - DNA, 25 bp, Probe sequence
tatttttattctacattatttctat

SEQ ID NO: 97128 - DNA, 25 bp, Probe sequence
ttcaatcatttatttttattctaca

SEQ ID NO: 97129 - DNA, 25 bp, Probe sequence
ttcgctcatttatttttgtttaaca

SEQ ID NO: 97130 - DNA, 25 bp, Probe sequence
atgccccctaatagaatctaaggcc

SEQ ID NO: 97131 - DNA, 25 bp, Probe sequence
attaatatgccccctaatagaatct

SEQ ID NO: 97132 - DNA, 25 bp, Probe sequence
atatgccccctaatagaatctaagg

SEQ ID NO: 97133 - DNA, 25 bp, Probe sequence
atctaaggccatttgtagacctata

SEQ ID NO: 97134 - DNA, 25 bp, Probe sequence
aaggccatttgtagacctatagata

SEQ ID NO: 97135 - DNA, 25 bp, Probe sequence
aatatgccccctaatagaatctaag

SEQ ID NO: 97136 - DNA, 25 bp, Probe sequence
catattaatatgccccctaatagaa

SEQ ID NO: 97137 - DNA, 25 bp, Probe sequence
ctaaggccatttgtagacctataga

SEQ ID NO: 97138 - DNA, 25 bp, Probe sequence
ccatttgtagacctatagatatatt

SEQ ID NO: 97139 - DNA, 25 bp, Probe sequence
gccccctaatagaatctaaggccat

SEQ ID NO: 97140 - DNA, 25 bp, Probe sequence
gaatctaaggccatttgtagaccta

SEQ ID NO: 97141 - DNA, 25 bp, Probe sequence
gatatattagggggcttctttgttt

SEQ ID NO: 97142 - DNA, 25 bp, Probe sequence
ggccatttgtagacctatagatata

SEQ ID NO: 97143 - DNA, 25 bp, Probe sequence
tgccccctaatagaatctaaggcca

SEQ ID NO: 97144 - DNA, 25 bp, Probe sequence
taatatgccccctaatagaatctaa

SEQ ID NO: 97145 - DNA, 25 bp, Probe sequence
atttttatcgttttatgcaatcgtt

SEQ ID NO: 97146 - DNA, 25 bp, Probe sequence
atcgtttgcacaaatcttttgactt

SEQ ID NO: 97147 - DNA, 25 bp, Probe sequence
aacctttatattgattttcggattg

SEQ ID NO: 97148 - DNA, 25 bp, Probe sequence
aatgcagaaattaacaggaggtgat

SEQ ID NO: 97149 - DNA, 25 bp, Probe sequence
cagtatgaaggttttatttttatcg

SEQ ID NO: 97150 - DNA, 25 bp, Probe sequence
gcacaaatcttttgacttttttaga

SEQ ID NO: 97151 - DNA, 25 bp, Probe sequence
gcaatcgtttgcacaaatcttttga

SEQ ID NO: 97152 - DNA, 25 bp, Probe sequence
gaaagagtaactaaactgttattat

SEQ ID NO: 97153 - DNA, 25 bp, Probe sequence
gaggttggaagcgttttccaatgca

SEQ ID NO: 97154 - DNA, 25 bp, Probe sequence
gtttgcacaaatcttttgacttttt

SEQ ID NO: 97155 - DNA, 25 bp, Probe sequence
ggaagcgttttccaatgcagaaatt

SEQ ID NO: 97156 - DNA, 25 bp, Probe sequence
tgattttcggattgaatttcagtat

SEQ ID NO: 97157 - DNA, 25 bp, Probe sequence
tcgattttaatatttatacaaacct

SEQ ID NO: 97158 - DNA, 25 bp, Probe sequence
tacaaacctttatattgattttcgg

SEQ ID NO: 97159 - DNA, 25 bp, Probe sequence
tttatcgttttatgcaatcgtttgc

SEQ ID NO: 97160 - DNA, 25 bp, Probe sequence
atgatgtacgtttaattaattttat

SEQ ID NO: 97161 - DNA, 25 bp, Probe sequence
atggacaatgtgagctacacccagt

SEQ ID NO: 97162 - DNA, 25 bp, Probe sequence
aaagcatcccgccatatttttaagc

SEQ ID NO: 97163 - DNA, 25 bp, Probe sequence
ccgccatatttttaagcattttgtg

SEQ ID NO: 97164 - DNA, 25 bp, Probe sequence
gcatcccgccatatttttaagcatt

SEQ ID NO: 97165 - DNA, 25 bp, Probe sequence
gaagtatttcattgatatatgtccc

SEQ ID NO: 97166 - DNA, 25 bp, Probe sequence
gttagttatacattctaatggacaa

SEQ ID NO: 97167 - DNA, 25 bp, Probe sequence
gtgagctacacccagttaagttgac

SEQ ID NO: 97168 - DNA, 25 bp, Probe sequence
gtcccagacgacatgtttgattaat

SEQ ID NO: 97169 - DNA, 25 bp, Probe sequence
taatgaagttctatgtggctacaaa

SEQ ID NO: 97170 - DNA, 25 bp, Probe sequence
tacacaagcaatatctattacctta

SEQ ID NO: 97171 - DNA, 25 bp, Probe sequence
tacacccagttaagttgacatagaa

SEQ ID NO: 97172 - DNA, 25 bp, Probe sequence
tactgtgttatgatagcatgtacta

SEQ ID NO: 97173 - DNA, 25 bp, Probe sequence
tattaccttaaaagcatcccgccat

SEQ ID NO: 97174 - DNA, 25 bp, Probe sequence
ttcattgatatatgtcccagacgac

SEQ ID NO: 97175 - DNA, 25 bp, Probe sequence
attgtctctttccttatgtatttat

SEQ ID NO: 97176 - DNA, 25 bp, Probe sequence
atttatcgaaattttctacgcatga

SEQ ID NO: 97177 - DNA, 25 bp, Probe sequence
agtgtagacgttttacttacatact

SEQ ID NO: 97178 - DNA, 25 bp, Probe sequence
agattacgttttattatttgatgaa

SEQ ID NO: 97179 - DNA, 25 bp, Probe sequence
agaaattgtctctttccttatgtat

SEQ ID NO: 97180 - DNA, 25 bp, Probe sequence
acgcatgatatattcaatgattttc

SEQ ID NO: 97181 - DNA, 25 bp, Probe sequence
aattaacgatatctatcctcataga

SEQ ID NO: 97182 - DNA, 25 bp, Probe sequence
caatgattttctttctcttgtcaaa

SEQ ID NO: 97183 - DNA, 25 bp, Probe sequence
gaaattttctacgcatgatatattc

SEQ ID NO: 97184 - DNA, 25 bp, Probe sequence
gaccattgagcctgagaccttatga

SEQ ID NO: 97185 - DNA, 25 bp, Probe sequence
gattttctttctcttgtcaaattaa

SEQ ID NO: 97186 - DNA, 25 bp, Probe sequence
gtctctttccttatgtatttatcga

SEQ ID NO: 97187 - DNA, 25 bp, Probe sequence
tgagcctgagaccttatgaatttag

SEQ ID NO: 97188 - DNA, 25 bp, Probe sequence
tagacgttttacttacatactatta

SEQ ID NO: 97189 - DNA, 25 bp, Probe sequence
tattgaccattgagcctgagacctt

SEQ ID NO: 97190 - DNA, 25 bp, Probe sequence
atgtctattttgtgatacaatacta

SEQ ID NO: 97191 - DNA, 25 bp, Probe sequence
agtgtagtgtatgtctattttgtga

SEQ ID NO: 97192 - DNA, 25 bp, Probe sequence
agtgtatgtctattttgtgatacaa

SEQ ID NO: 97193 - DNA, 25 bp, Probe sequence
aaaatcaacaagtgaggtaagtaat

SEQ ID NO: 97194 - DNA, 25 bp, Probe sequence
gtatgtctattttgtgatacaatac

SEQ ID NO: 97195 - DNA, 25 bp, Probe sequence
gtagtgtatgtctattttgtgatac

SEQ ID NO: 97196 - DNA, 25 bp, Probe sequence
gtctattttgtgatacaatactaat

SEQ ID NO: 97197 - DNA, 25 bp, Probe sequence
gtgtatgtctattttgtgatacaat

SEQ ID NO: 97198 - DNA, 25 bp, Probe sequence
gtgtagtgtatgtctattttgtgat

SEQ ID NO: 97199 - DNA, 25 bp, Probe sequence
tgtagtgtatgtctattttgtgata

SEQ ID NO: 97200 - DNA, 25 bp, Probe sequence
tagtgtagtgtatgtctattttgtg

SEQ ID NO: 97201 - DNA, 25 bp, Probe sequence
tagtgtatgtctattttgtgataca

SEQ ID NO: 97202 - DNA, 25 bp, Probe sequence
tttgtgatacaatactaatgaaaaa

SEQ ID NO: 97203 - DNA, 25 bp, Probe sequence
tttagtgtagtgtatgtctattttg

SEQ ID NO: 97204 - DNA, 25 bp, Probe sequence
ttagtgtagtgtatgtctattttgt

SEQ ID NO: 97205 - DNA, 25 bp, Probe sequence
atgtcattttcctcattatacgata

SEQ ID NO: 97206 - DNA, 25 bp, Probe sequence
agtttgcttatgtcattttcctcat

SEQ ID NO: 97207 - DNA, 25 bp, Probe sequence
aaacatgagtaagtttgcttatgtc

SEQ ID NO: 97208 - DNA, 25 bp, Probe sequence
aagtttgcttatgtcattttcctca

SEQ ID NO: 97209 - DNA, 25 bp, Probe sequence
aatcaatatatttttgacaaagctt

SEQ ID NO: 97210 - DNA, 25 bp, Probe sequence
cattttcctcattatacgatatctt

SEQ ID NO: 97211 - DNA, 25 bp, Probe sequence
gcttatgtcattttcctcattatac

SEQ ID NO: 97212 - DNA, 25 bp, Probe sequence
gacaaagcttagtttgagttacaat

SEQ ID NO: 97213 - DNA, 25 bp, Probe sequence
gtttgcttatgtcattttcctcatt

SEQ ID NO: 97214 - DNA, 25 bp, Probe sequence
gtaagtttgcttatgtcattttcct

SEQ ID NO: 97215 - DNA, 25 bp, Probe sequence
gtcattttcctcattatacgatatc

SEQ ID NO: 97216 - DNA, 25 bp, Probe sequence
tcctcattatacgatatctttgaaa

SEQ ID NO: 97217 - DNA, 25 bp, Probe sequence
ttttcctcattatacgatatctttg

SEQ ID NO: 97218 - DNA, 25 bp, Probe sequence
ttatgtcattttcctcattatacga

SEQ ID NO: 97219 - DNA, 25 bp, Probe sequence
ttgcttatgtcattttcctcattat

SEQ ID NO: 97220 - DNA, 25 bp, Probe sequence
atacatgcgtttataacggatggat

SEQ ID NO: 97221 - DNA, 25 bp, Probe sequence
atccgtatgacccatgtttgaaagt

SEQ ID NO: 97222 - DNA, 25 bp, Probe sequence
atgattttgtataggtagttgagat

SEQ ID NO: 97223 - DNA, 25 bp, Probe sequence
aaaataatccatccgtatgacccat

SEQ ID NO: 97224 - DNA, 25 bp, Probe sequence
aacggatggatttttaattgtatga

SEQ ID NO: 97225 - DNA, 25 bp, Probe sequence
aataatccatccgtatgacccatgt

SEQ ID NO: 97226 - DNA, 25 bp, Probe sequence
cgttgcaatacgataacttattaat

SEQ ID NO: 97227 - DNA, 25 bp, Probe sequence
ccatccgtatgacccatgtttgaaa

SEQ ID NO: 97228 - DNA, 25 bp, Probe sequence
tccatccgtatgacccatgtttgaa

SEQ ID NO: 97229 - DNA, 25 bp, Probe sequence
gacccatgtttgaaagtaatcgttg

SEQ ID NO: 97230 - DNA, 25 bp, Probe sequence
gtttgaaagtaatcgttgcaatacg

SEQ ID NO: 97231 - DNA, 25 bp, Probe sequence
gtatgacccatgtttgaaagtaatc

SEQ ID NO: 97232 - DNA, 25 bp, Probe sequence
ggatttttaattgtatgattttgta

SEQ ID NO: 97233 - DNA, 25 bp, Probe sequence
taatccatccgtatgacccatgttt

SEQ ID NO: 97234 - DNA, 25 bp, Probe sequence
taacttattaatacatgcgtttata

SEQ ID NO: 97235 - DNA, 25 bp, Probe sequence
atataaagggataggtgattgaact

SEQ ID NO: 97236 - DNA, 25 bp, Probe sequence
atatgttattaattagtagaatgag

SEQ ID NO: 97237 - DNA, 25 bp, Probe sequence
agtagaatgaggatagtttaaatat

SEQ ID NO: 97238 - DNA, 25 bp, Probe sequence
acaatatgttattaattagtagaat

SEQ ID NO: 97239 - DNA, 25 bp, Probe sequence
aatatgttattaattagtagaatga

SEQ ID NO: 97240 - DNA, 25 bp, Probe sequence
caatatgttattaattagtagaatg

SEQ ID NO: 97241 - DNA, 25 bp, Probe sequence
gaatgaggatagtttaaatataaag

SEQ ID NO: 97242 - DNA, 25 bp, Probe sequence
gaacaatatgttattaattagtaga

SEQ ID NO: 97243 - DNA, 25 bp, Probe sequence
gtagaatgaggatagtttaaatata

SEQ ID NO: 97244 - DNA, 25 bp, Probe sequence
tagtagaatgaggatagtttaaata

SEQ ID NO: 97245 - DNA, 25 bp, Probe sequence
tatgttattaattagtagaatgagg

SEQ ID NO: 97246 - DNA, 25 bp, Probe sequence
tataaagggataggtgattgaactt

SEQ ID NO: 97247 - DNA, 25 bp, Probe sequence
ataatacatcatactggaaacatat

SEQ ID NO: 97248 - DNA, 25 bp, Probe sequence
acttgttttatcttgttcttgtcga

SEQ ID NO: 97249 - DNA, 25 bp, Probe sequence
acatctatcgacaacttgttttatc

SEQ ID NO: 97250 - DNA, 25 bp, Probe sequence
aaagaacaataatcaacatggttga

SEQ ID NO: 97251 - DNA, 25 bp, Probe sequence
caacatggttgaatgcatttttgca

SEQ ID NO: 97252 - DNA, 25 bp, Probe sequence
gaatgcatttttgcagtaaagtcaa

SEQ ID NO: 97253 - DNA, 25 bp, Probe sequence
gacaacttgttttatcttgttcttg

SEQ ID NO: 97254 - DNA, 25 bp, Probe sequence
gatggatgtatttttttgggcaata

SEQ ID NO: 97255 - DNA, 25 bp, Probe sequence
gataacatggatacatctatcgaca

SEQ ID NO: 97256 - DNA, 25 bp, Probe sequence
gttttatcttgttcttgtcgatgga

SEQ ID NO: 97257 - DNA, 25 bp, Probe sequence
gtcaaaataatacatcatactggaa

SEQ ID NO: 97258 - DNA, 25 bp, Probe sequence
ggatacatctatcgacaacttgttt

SEQ ID NO: 97259 - DNA, 25 bp, Probe sequence
tgtcgatggatgtatttttttgggc

SEQ ID NO: 97260 - DNA, 25 bp, Probe sequence
tcttgttcttgtcgatggatgtatt

SEQ ID NO: 97261 - DNA, 25 bp, Probe sequence
ttatcttgttcttgtcgatggatgt

SEQ ID NO: 97262 - DNA, 25 bp, Probe sequence
atttatttatgtgcattcaaactaa

SEQ ID NO: 97263 - DNA, 25 bp, Probe sequence
ataaattttcaatggatatatatca

SEQ ID NO: 97264 - DNA, 25 bp, Probe sequence
agacaatcatgtaaaataggtaatt

SEQ ID NO: 97265 - DNA, 25 bp, Probe sequence
aaataggtaattaatggacatgaaa

SEQ ID NO: 97266 - DNA, 25 bp, Probe sequence
aactatgtattaataaattttcaat

SEQ ID NO: 97267 - DNA, 25 bp, Probe sequence
aagtgtgttgaatactcatttatgg

SEQ ID NO: 97268 - DNA, 25 bp, Probe sequence
gttgaatactcatttatggatttat

SEQ ID NO: 97269 - DNA, 25 bp, Probe sequence
gtgcattcaaactaaatagacaatc

SEQ ID NO: 97270 - DNA, 25 bp, Probe sequence
gtgtgttgaatactcatttatggat

SEQ ID NO: 97271 - DNA, 25 bp, Probe sequence
ggatttatttatgtgcattcaaact

SEQ ID NO: 97272 - DNA, 25 bp, Probe sequence
ggatatatatcattagttaggagta

SEQ ID NO: 97273 - DNA, 25 bp, Probe sequence
tccaaagtgtgttgaatactcattt

SEQ ID NO: 97274 - DNA, 25 bp, Probe sequence
tatggatttatttatgtgcattcaa

SEQ ID NO: 97275 - DNA, 25 bp, Probe sequence
tttccaaagtgtgttgaatactcat

SEQ ID NO: 97276 - DNA, 25 bp, Probe sequence
ttatgtgcattcaaactaaatagac

SEQ ID NO: 97277 - DNA, 25 bp, Probe sequence
attacacatatattcatttttatac

SEQ ID NO: 97278 - DNA, 25 bp, Probe sequence
atatgttcaaacaattgacgcttat

SEQ ID NO: 97279 - DNA, 25 bp, Probe sequence
actgacgttgtttgttaatcgattt

SEQ ID NO: 97280 - DNA, 25 bp, Probe sequence
acaattgacgcttattaaatctaat

SEQ ID NO: 97281 - DNA, 25 bp, Probe sequence
aaatattcgtaatcagaggtgttta

SEQ ID NO: 97282 - DNA, 25 bp, Probe sequence
aatatatcgattagcaacaattgta

SEQ ID NO: 97283 - DNA, 25 bp, Probe sequence
aattagcaagtttattacacatata

SEQ ID NO: 97284 - DNA, 25 bp, Probe sequence
cgacaatattcgtatctgtgacatc

SEQ ID NO: 97285 - DNA, 25 bp, Probe sequence
gaattttcaatttctatacgacaat

SEQ ID NO: 97286 - DNA, 25 bp, Probe sequence
gatagataaaccatgtttacccttt

SEQ ID NO: 97287 - DNA, 25 bp, Probe sequence
gtagtcgtaaatcagtgcatgtgtt

SEQ ID NO: 97288 - DNA, 25 bp, Probe sequence
gtctcaaaaggcatattcaactgac

SEQ ID NO: 97289 - DNA, 25 bp, Probe sequence
tgttaatcgatttttctcatgttga

SEQ ID NO: 97290 - DNA, 25 bp, Probe sequence
taagcaattgttatgcgtaatatga

SEQ ID NO: 97291 - DNA, 25 bp, Probe sequence
ttcgtatctgtgacatcaatgtgat

SEQ ID NO: 97292 - DNA, 25 bp, Probe sequence
ataagtctcataaagctattgccta

SEQ ID NO: 97293 - DNA, 25 bp, Probe sequence
atctacatatcatattgttgaggat

SEQ ID NO: 97294 - DNA, 25 bp, Probe sequence
atgcttgaattgaagagttgtctca

SEQ ID NO: 97295 - DNA, 25 bp, Probe sequence
aaacgaatcgtctaattggtagtga

SEQ ID NO: 97296 - DNA, 25 bp, Probe sequence
aaagctattgcctaaaatgattata

SEQ ID NO: 97297 - DNA, 25 bp, Probe sequence
aaggtatatatctacatatcatatt

SEQ ID NO: 97298 - DNA, 25 bp, Probe sequence
aatagcttgtattcactatactgat

SEQ ID NO: 97299 - DNA, 25 bp, Probe sequence
gacttataatgtcgccagcaatatg

SEQ ID NO: 97300 - DNA, 25 bp, Probe sequence
gacgggtagatgaaaacaaactgaa

SEQ ID NO: 97301 - DNA, 25 bp, Probe sequence
gtattcactatactgatttaacgta

SEQ ID NO: 97302 - DNA, 25 bp, Probe sequence
gtcgccagcaatatgaacatgcttg

SEQ ID NO: 97303 - DNA, 25 bp, Probe sequence
gggatagacttataatgtcgccagc

SEQ ID NO: 97304 - DNA, 25 bp, Probe sequence
ggttatatgctgatatgaggctttt

SEQ ID NO: 97305 - DNA, 25 bp, Probe sequence
tgtggttttattataactttgggat

SEQ ID NO: 97306 - DNA, 25 bp, Probe sequence
tgctgatatgaggctttttattttt

SEQ ID NO: 97307 - DNA, 25 bp, Probe sequence
attttttatccttattatgatatta

SEQ ID NO: 97308 - DNA, 25 bp, Probe sequence
atctccctaaaatcaatatctatta

SEQ ID NO: 97309 - DNA, 25 bp, Probe sequence
atgcacaaacgtttcactaggaggt

SEQ ID NO: 97310 - DNA, 25 bp, Probe sequence
aaatgcacaaacgtttcactaggag

SEQ ID NO: 97311 - DNA, 25 bp, Probe sequence
aatgcacaaacgtttcactaggagg

SEQ ID NO: 97312 - DNA, 25 bp, Probe sequence
aatatctattattttttatccttat

SEQ ID NO: 97313 - DNA, 25 bp, Probe sequence
gcacaaacgtttcactaggaggtaa

SEQ ID NO: 97314 - DNA, 25 bp, Probe sequence
cacaaacgtttcactaggaggtaat

SEQ ID NO: 97315 - DNA, 25 bp, Probe sequence
ctatctccctaaaatcaatatctat

SEQ ID NO: 97316 - DNA, 25 bp, Probe sequence
gttgaaatgcacaaacgtttcacta

SEQ ID NO: 97317 - DNA, 25 bp, Probe sequence
tgcacaaacgtttcactaggaggta

SEQ ID NO: 97318 - DNA, 25 bp, Probe sequence
tctattattttttatccttattatg

SEQ ID NO: 97319 - DNA, 25 bp, Probe sequence
tactatctccctaaaatcaatatct

SEQ ID NO: 97320 - DNA, 25 bp, Probe sequence
tatctattattttttatccttatta

SEQ ID NO: 97321 - DNA, 25 bp, Probe sequence
tattattttttatccttattatgat

SEQ ID NO: 97322 - DNA, 25 bp, Probe sequence
atggaagcacgtagactattttacc

SEQ ID NO: 97323 - DNA, 25 bp, Probe sequence
agcacgtagactattttacctacaa

SEQ ID NO: 97324 - DNA, 25 bp, Probe sequence
agactattttacctacaagtgcttc

SEQ ID NO: 97325 - DNA, 25 bp, Probe sequence
acgtagactattttacctacaagtg

SEQ ID NO: 97326 - DNA, 25 bp, Probe sequence
actattttacctacaagtgcttccg

SEQ ID NO: 97327 - DNA, 25 bp, Probe sequence
aaaaaatggaagcacgtagactatt

SEQ ID NO: 97328 - DNA, 25 bp, Probe sequence
aagcacgtagactattttacctaca

SEQ ID NO: 97329 - DNA, 25 bp, Probe sequence
ctattttacctacaagtgcttccgt

SEQ ID NO: 97330 - DNA, 25 bp, Probe sequence
gcacgtagactattttacctacaag

SEQ ID NO: 97331 - DNA, 25 bp, Probe sequence
gaagcacgtagactattttacctac

SEQ ID NO: 97332 - DNA, 25 bp, Probe sequence
gactattttacctacaagtgcttcc

SEQ ID NO: 97333 - DNA, 25 bp, Probe sequence
tggaagcacgtagactattttacct

SEQ ID NO: 97334 - DNA, 25 bp, Probe sequence
ggaagcacgtagactattttaccta

SEQ ID NO: 97335 - DNA, 25 bp, Probe sequence
tagactattttacctacaagtgctt

SEQ ID NO: 97336 - DNA, 25 bp, Probe sequence
tattttacctacaagtgcttccgtt

SEQ ID NO: 97337 - DNA, 25 bp, Probe sequence
attgcaattattattcatttagtta

SEQ ID NO: 97338 - DNA, 25 bp, Probe sequence
attagcgaatcaaatattatacatt

SEQ ID NO: 97339 - DNA, 25 bp, Probe sequence
attatcaaaatatttcactaaagaa

SEQ ID NO: 97340 - DNA, 25 bp, Probe sequence
attttgctgataggagttcttgaat

SEQ ID NO: 97341 - DNA, 25 bp, Probe sequence
atatttcactaaagaattgcaatta

SEQ ID NO: 97342 - DNA, 25 bp, Probe sequence
atacattttgctgataggagttctt

SEQ ID NO: 97343 - DNA, 25 bp, Probe sequence
atcctccctaattaaacgataatat

SEQ ID NO: 97344 - DNA, 25 bp, Probe sequence
acattttgctgataggagttcttga

SEQ ID NO: 97345 - DNA, 25 bp, Probe sequence
aatataattataagactgttaggtc

SEQ ID NO: 97346 - DNA, 25 bp, Probe sequence
aatattatacattttgctgatagga

SEQ ID NO: 97347 - DNA, 25 bp, Probe sequence
cttgcatcctccctaattaaacgat

SEQ ID NO: 97348 - DNA, 25 bp, Probe sequence
gcatcctccctaattaaacgataat

SEQ ID NO: 97349 - DNA, 25 bp, Probe sequence
gactgttaggtcaaattatcaaaat

SEQ ID NO: 97350 - DNA, 25 bp, Probe sequence
tgcatcctccctaattaaacgataa

SEQ ID NO: 97351 - DNA, 25 bp, Probe sequence
ttgcatcctccctaattaaacgata

SEQ ID NO: 97352 - DNA, 25 bp, Probe sequence
attgcggtaattgaatcgtattgaa

SEQ ID NO: 97353 - DNA, 25 bp, Probe sequence
atctgagtattgttattgatgatca

SEQ ID NO: 97354 - DNA, 25 bp, Probe sequence
aggataatggtttcaaaatcaattg

SEQ ID NO: 97355 - DNA, 25 bp, Probe sequence
aaatgagctgaactttctttattat

SEQ ID NO: 97356 - DNA, 25 bp, Probe sequence
aaagacaatttctatttgaacaaga

SEQ ID NO: 97357 - DNA, 25 bp, Probe sequence
ctaagtttaatgatcagtgaagcta

SEQ ID NO: 97358 - DNA, 25 bp, Probe sequence
gctgaactttctttattatgctgaa

SEQ ID NO: 97359 - DNA, 25 bp, Probe sequence
gaattattattctaactttgtatga

SEQ ID NO: 97360 - DNA, 25 bp, Probe sequence
gagaaatatagtaacaggctttgtt

SEQ ID NO: 97361 - DNA, 25 bp, Probe sequence
gatcaattaacactcagattttatt

SEQ ID NO: 97362 - DNA, 25 bp, Probe sequence
gtattaaacacatattccgagaatt

SEQ ID NO: 97363 - DNA, 25 bp, Probe sequence
gtcttttcattttttagattgcggt

SEQ ID NO: 97364 - DNA, 25 bp, Probe sequence
gggtttggtattattctttcataga

SEQ ID NO: 97365 - DNA, 25 bp, Probe sequence
tagaaattgtcttttcattttttag

SEQ ID NO: 97366 - DNA, 25 bp, Probe sequence
ttagggtttggtattattctttcat

SEQ ID NO: 97367 - DNA, 25 bp, Probe sequence
attacgaaactctcaggcaaaagga

SEQ ID NO: 97368 - DNA, 25 bp, Probe sequence
atcgccgaaggtgcaagtaatttat

SEQ ID NO: 97369 - DNA, 25 bp, Probe sequence
agagcgttaagactctatcgccgaa

SEQ ID NO: 97370 - DNA, 25 bp, Probe sequence
aactctcaggcaaaaggataatact

SEQ ID NO: 97371 - DNA, 25 bp, Probe sequence
cgttaagactctatcgccgaaggtg

SEQ ID NO: 97372 - DNA, 25 bp, Probe sequence
cgcgttcctgaattggtgatttata

SEQ ID NO: 97373 - DNA, 25 bp, Probe sequence
gcgattgctatcctgtttttataat

SEQ ID NO: 97374 - DNA, 25 bp, Probe sequence
gctatcctgtttttataattttaag

SEQ ID NO: 97375 - DNA, 25 bp, Probe sequence
gactctatcgccgaaggtgcaagta

SEQ ID NO: 97376 - DNA, 25 bp, Probe sequence
gataatactgtaacgcgttcctgaa

SEQ ID NO: 97377 - DNA, 25 bp, Probe sequence
gtaatttattacgaaactctcaggc

SEQ ID NO: 97378 - DNA, 25 bp, Probe sequence
gtaacgcgttcctgaattggtgatt

SEQ ID NO: 97379 - DNA, 25 bp, Probe sequence
gggtagcgattgctatcctgttttt

SEQ ID NO: 97380 - DNA, 25 bp, Probe sequence
ggtgatttataaacagggtagcgat

SEQ ID NO: 97381 - DNA, 25 bp, Probe sequence
tactgtaacgcgttcctgaattggt

SEQ ID NO: 97382 - DNA, 25 bp, Probe sequence
ataaaaacacctcctacgtgattat

SEQ ID NO: 97383 - DNA, 25 bp, Probe sequence
acctcctacgtgattatatgtagga

SEQ ID NO: 97384 - DNA, 25 bp, Probe sequence
acacctcctacgtgattatatgtag

SEQ ID NO: 97385 - DNA, 25 bp, Probe sequence
aaacacctcctacgtgattatatgt

SEQ ID NO: 97386 - DNA, 25 bp, Probe sequence
aaaaacacctcctacgtgattatat

SEQ ID NO: 97387 - DNA, 25 bp, Probe sequence
aaaacacctcctacgtgattatatg

SEQ ID NO: 97388 - DNA, 25 bp, Probe sequence
aacacctcctacgtgattatatgta

SEQ ID NO: 97389 - DNA, 25 bp, Probe sequence
cacctcctacgtgattatatgtagg

SEQ ID NO: 97390 - DNA, 25 bp, Probe sequence
cctcctacgtgattatatgtaggag

SEQ ID NO: 97391 - DNA, 25 bp, Probe sequence
gtaataaaaacacctcctacgtgat

SEQ ID NO: 97392 - DNA, 25 bp, Probe sequence
tgaagtaataaaaacacctcctacg

SEQ ID NO: 97393 - DNA, 25 bp, Probe sequence
taataaaaacacctcctacgtgatt

SEQ ID NO: 97394 - DNA, 25 bp, Probe sequence
taaaaacacctcctacgtgattata

SEQ ID NO: 97395 - DNA, 25 bp, Probe sequence
acctttttaattatgcacacgtatg

SEQ ID NO: 97396 - DNA, 25 bp, Probe sequence
aatctcaaaataagaggtttcacct

SEQ ID NO: 97397 - DNA, 25 bp, Probe sequence
aattatgcacacgtatgaaatgata

SEQ ID NO: 97398 - DNA, 25 bp, Probe sequence
ctttttaattatgcacacgtatgaa

SEQ ID NO: 97399 - DNA, 25 bp, Probe sequence
gaattgtcgcataattcatcatgac

SEQ ID NO: 97400 - DNA, 25 bp, Probe sequence
gaggtttcacctttttaattatgca

SEQ ID NO: 97401 - DNA, 25 bp, Probe sequence
gtttcacctttttaattatgcacac

SEQ ID NO: 97402 - DNA, 25 bp, Probe sequence
gtcgcataattcatcatgacaacat

SEQ ID NO: 97403 - DNA, 25 bp, Probe sequence
ggtttcacctttttaattatgcaca

SEQ ID NO: 97404 - DNA, 25 bp, Probe sequence
tcgcataattcatcatgacaacata

SEQ ID NO: 97405 - DNA, 25 bp, Probe sequence
tcacctttttaattatgcacacgta

SEQ ID NO: 97406 - DNA, 25 bp, Probe sequence
taaattttagaattgtcgcataatt

SEQ ID NO: 97407 - DNA, 25 bp, Probe sequence
tatgcacacgtatgaaatgataaaa

SEQ ID NO: 97408 - DNA, 25 bp, Probe sequence
tttcacctttttaattatgcacacg

SEQ ID NO: 97409 - DNA, 25 bp, Probe sequence
ttcacctttttaattatgcacacgt

SEQ ID NO: 97410 - DNA, 25 bp, Probe sequence
acgattgtgtagcgcatggttgtaa

SEQ ID NO: 97411 - DNA, 25 bp, Probe sequence
aacctgacgattgtgtagcgcatgg

SEQ ID NO: 97412 - DNA, 25 bp, Probe sequence
aatttaacctgacgattgtgtagcg

SEQ ID NO: 97413 - DNA, 25 bp, Probe sequence
ctgacgattgtgtagcgcatggttg

SEQ ID NO: 97414 - DNA, 25 bp, Probe sequence
cctgacgattgtgtagcgcatggtt

SEQ ID NO: 97415 - DNA, 25 bp, Probe sequence
gcatggttgtaaaattttaactttg

SEQ ID NO: 97416 - DNA, 25 bp, Probe sequence
gacgattgtgtagcgcatggttgta

SEQ ID NO: 97417 - DNA, 25 bp, Probe sequence
gatgttggtataataataaagtcgt

SEQ ID NO: 97418 - DNA, 25 bp, Probe sequence
gattgtgtagcgcatggttgtaaaa

SEQ ID NO: 97419 - DNA, 25 bp, Probe sequence
gtagcgcatggttgtaaaattttaa

SEQ ID NO: 97420 - DNA, 25 bp, Probe sequence
taacctgacgattgtgtagcgcatg

SEQ ID NO: 97421 - DNA, 25 bp, Probe sequence
tttaacctgacgattgtgtagcgca

SEQ ID NO: 97422 - DNA, 25 bp, Probe sequence
ttaacctgacgattgtgtagcgcat

SEQ ID NO: 97423 - DNA, 25 bp, Probe sequence
ttaactttgcaaatattatagatgt

SEQ ID NO: 97424 - DNA, 25 bp, Probe sequence
ttgtgtagcgcatggttgtaaaatt

SEQ ID NO: 97425 - DNA, 25 bp, Probe sequence
attacttgttcggtctcttaaatga

SEQ ID NO: 97426 - DNA, 25 bp, Probe sequence
ataatttctaaattcatatatgatt

SEQ ID NO: 97427 - DNA, 25 bp, Probe sequence
atgattacttgttcggtctcttaaa

SEQ ID NO: 97428 - DNA, 25 bp, Probe sequence
agtatgattacttgttcggtctctt

SEQ ID NO: 97429 - DNA, 25 bp, Probe sequence
agactttgaatagaggtaggtagtt

SEQ ID NO: 97430 - DNA, 25 bp, Probe sequence
acttgttcggtctcttaaatgagac

SEQ ID NO: 97431 - DNA, 25 bp, Probe sequence
gaaagactttgaatagaggtaggta

SEQ ID NO: 97432 - DNA, 25 bp, Probe sequence
gattacttgttcggtctcttaaatg

SEQ ID NO: 97433 - DNA, 25 bp, Probe sequence
gttcggtctcttaaatgagaccgtt

SEQ ID NO: 97434 - DNA, 25 bp, Probe sequence
gtatgattacttgttcggtctctta

SEQ ID NO: 97435 - DNA, 25 bp, Probe sequence
tgattacttgttcggtctcttaaat

SEQ ID NO: 97436 - DNA, 25 bp, Probe sequence
tctcttaaatgagaccgttattttt

SEQ ID NO: 97437 - DNA, 25 bp, Probe sequence
tacttgttcggtctcttaaatgaga

SEQ ID NO: 97438 - DNA, 25 bp, Probe sequence
tatgattacttgttcggtctcttaa

SEQ ID NO: 97439 - DNA, 25 bp, Probe sequence
ttacttgttcggtctcttaaatgag

SEQ ID NO: 97440 - DNA, 25 bp, Probe sequence
atttacttacagacattttaggagg

SEQ ID NO: 97441 - DNA, 25 bp, Probe sequence
atgcacatttggtcagatgtatgca

SEQ ID NO: 97442 - DNA, 25 bp, Probe sequence
accagtcactgcttgttattattta

SEQ ID NO: 97443 - DNA, 25 bp, Probe sequence
actccgttcgtatgattttatggca

SEQ ID NO: 97444 - DNA, 25 bp, Probe sequence
aaggttcatttcatactccgttcgt

SEQ ID NO: 97445 - DNA, 25 bp, Probe sequence
gcaaattctttgttgaaccagtcac

SEQ ID NO: 97446 - DNA, 25 bp, Probe sequence
gcaaatctgttaactttttatatac

SEQ ID NO: 97447 - DNA, 25 bp, Probe sequence
gagatttatgcacatttggtcagat

SEQ ID NO: 97448 - DNA, 25 bp, Probe sequence
gataaaggttcatttcatactccgt

SEQ ID NO: 97449 - DNA, 25 bp, Probe sequence
gttgaaccagtcactgcttgttatt

SEQ ID NO: 97450 - DNA, 25 bp, Probe sequence
gttcatttcatactccgttcgtatg

SEQ ID NO: 97451 - DNA, 25 bp, Probe sequence
gtcactgcttgttattatttactta

SEQ ID NO: 97452 - DNA, 25 bp, Probe sequence
gtcagatgtatgcataaatctcatt

SEQ ID NO: 97453 - DNA, 25 bp, Probe sequence
ttttatggcaaatctgttaactttt

SEQ ID NO: 97454 - DNA, 25 bp, Probe sequence
ttctttgttgaaccagtcactgctt

SEQ ID NO: 97455 - DNA, 25 bp, Probe sequence
agggggcatatctctttattttgtc

SEQ ID NO: 97456 - DNA, 25 bp, Probe sequence
aaacttgaagggggcatatctcttt

SEQ ID NO: 97457 - DNA, 25 bp, Probe sequence
aatgataatgctctcttcaagaaat

SEQ ID NO: 97458 - DNA, 25 bp, Probe sequence
aatgctctcttcaagaaatgcgata

SEQ ID NO: 97459 - DNA, 25 bp, Probe sequence
cattactgtttacatatgttactag

SEQ ID NO: 97460 - DNA, 25 bp, Probe sequence
gctctcttcaagaaatgcgataaat

SEQ ID NO: 97461 - DNA, 25 bp, Probe sequence
gcatatctctttattttgtctaatt

SEQ ID NO: 97462 - DNA, 25 bp, Probe sequence
gaagggggcatatctctttattttg

SEQ ID NO: 97463 - DNA, 25 bp, Probe sequence
gtttacatatgttactaggagttgt

SEQ ID NO: 97464 - DNA, 25 bp, Probe sequence
gtatagttgaatgcgaggtgagaat

SEQ ID NO: 97465 - DNA, 25 bp, Probe sequence
ggggcatatctctttattttgtcta

SEQ ID NO: 97466 - DNA, 25 bp, Probe sequence
ggagttgtatagttgaatgcgaggt

SEQ ID NO: 97467 - DNA, 25 bp, Probe sequence
tgtctaattttgagtcgtaaacatt

SEQ ID NO: 97468 - DNA, 25 bp, Probe sequence
ttttgagtcgtaaacattactgttt

SEQ ID NO: 97469 - DNA, 25 bp, Probe sequence
ttattttgtctaattttgagtcgta

SEQ ID NO: 97470 - DNA, 25 bp, Probe sequence
atagcacatttatactttataatag

SEQ ID NO: 97471 - DNA, 25 bp, Probe sequence
agatgaacatataaggaggccaaat

SEQ ID NO: 97472 - DNA, 25 bp, Probe sequence
agcacatttatactttataatagta

SEQ ID NO: 97473 - DNA, 25 bp, Probe sequence
aaatagcacatttatactttataat

SEQ ID NO: 97474 - DNA, 25 bp, Probe sequence
aaagatgaacatataaggaggccaa

SEQ ID NO: 97475 - DNA, 25 bp, Probe sequence
aaaatagcacatttatactttataa

SEQ ID NO: 97476 - DNA, 25 bp, Probe sequence
aagatgaacatataaggaggccaaa

SEQ ID NO: 97477 - DNA, 25 bp, Probe sequence
aatagcacatttatactttataata

SEQ ID NO: 97478 - DNA, 25 bp, Probe sequence
gcacatttatactttataatagtaa

SEQ ID NO: 97479 - DNA, 25 bp, Probe sequence
gatgaacatataaggaggccaaatc

SEQ ID NO: 97480 - DNA, 25 bp, Probe sequence
taaaatagcacatttatactttata

SEQ ID NO: 97481 - DNA, 25 bp, Probe sequence
tagcacatttatactttataatagt

SEQ ID NO: 97482 - DNA, 25 bp, Probe sequence
attttaatgattgataccaagacat

SEQ ID NO: 97483 - DNA, 25 bp, Probe sequence
ataatgttcaacctcttttttcata

SEQ ID NO: 97484 - DNA, 25 bp, Probe sequence
atgttcaacctcttttttcataaag

SEQ ID NO: 97485 - DNA, 25 bp, Probe sequence
accaagacatgaataagcgcttatt

SEQ ID NO: 97486 - DNA, 25 bp, Probe sequence
acttgagtgaggttggtacattgaa

SEQ ID NO: 97487 - DNA, 25 bp, Probe sequence
aataatgttcaacctcttttttcat

SEQ ID NO: 97488 - DNA, 25 bp, Probe sequence
gaataatgttcaacctcttttttca

SEQ ID NO: 97489 - DNA, 25 bp, Probe sequence
gagtgaggttggtacattgaataat

SEQ ID NO: 97490 - DNA, 25 bp, Probe sequence
gataccaagacatgaataagcgctt

SEQ ID NO: 97491 - DNA, 25 bp, Probe sequence
gatttaacttgagtgaggttggtac

SEQ ID NO: 97492 - DNA, 25 bp, Probe sequence
tgttcaacctcttttttcataaagg

SEQ ID NO: 97493 - DNA, 25 bp, Probe sequence
tgaataatgttcaacctcttttttc

SEQ ID NO: 97494 - DNA, 25 bp, Probe sequence
tcaacctcttttttcataaaggaga

SEQ ID NO: 97495 - DNA, 25 bp, Probe sequence
taatgttcaacctcttttttcataa

SEQ ID NO: 97496 - DNA, 25 bp, Probe sequence
taagcgcttatttatttttagatta

SEQ ID NO: 97497 - DNA, 25 bp, Probe sequence
atagttaccgcatttaaacaacact

SEQ ID NO: 97498 - DNA, 25 bp, Probe sequence
agttaccgcatttaaacaacactat

SEQ ID NO: 97499 - DNA, 25 bp, Probe sequence
accgcatttaaacaacactattgaa

SEQ ID NO: 97500 - DNA, 25 bp, Probe sequence
aagggtaaatgatagttaccgcatt

SEQ ID NO: 97501 - DNA, 25 bp, Probe sequence
aatattgggattagttccaatttgt

SEQ ID NO: 97502 - DNA, 25 bp, Probe sequence
cgcatttaaacaacactattgaaaa

SEQ ID NO: 97503 - DNA, 25 bp, Probe sequence
gaataaatttcgaatgttcatattt

SEQ ID NO: 97504 - DNA, 25 bp, Probe sequence
gatagttaccgcatttaaacaacac

SEQ ID NO: 97505 - DNA, 25 bp, Probe sequence
gttcatatttaaaatcgggaggccg

SEQ ID NO: 97506 - DNA, 25 bp, Probe sequence
gttaccgcatttaaacaacactatt

SEQ ID NO: 97507 - DNA, 25 bp, Probe sequence
tgggattagttccaatttgtaaaat

SEQ ID NO: 97508 - DNA, 25 bp, Probe sequence
tgatagttaccgcatttaaacaaca

SEQ ID NO: 97509 - DNA, 25 bp, Probe sequence
tcatatttaaaatcgggaggccgtt

SEQ ID NO: 97510 - DNA, 25 bp, Probe sequence
taccgcatttaaacaacactattga

SEQ ID NO: 97511 - DNA, 25 bp, Probe sequence
ttaccgcatttaaacaacactattg

SEQ ID NO: 97512 - DNA, 25 bp, Probe sequence
gctttacttccatgggacgagttaa

SEQ ID NO: 97513 - DNA, 25 bp, Probe sequence
attttaaaatgattcgttgcgccaa

SEQ ID NO: 97514 - DNA, 25 bp, Probe sequence
agcttacactatccttaactcgctg

SEQ ID NO: 97515 - DNA, 25 bp, Probe sequence
aacgccccatggaaaataacagcat

SEQ ID NO: 97516 - DNA, 25 bp, Probe sequence
aatatgctttacttccatgggacga

SEQ ID NO: 97517 - DNA, 25 bp, Probe sequence
aattacctctcctcatacatgaaaa

SEQ ID NO: 97518 - DNA, 25 bp, Probe sequence
ctatccttaactcgctgtacgttta

SEQ ID NO: 97519 - DNA, 25 bp, Probe sequence
ctcctcatacatgaaaacgccccat

SEQ ID NO: 97520 - DNA, 25 bp, Probe sequence
ctcgctgtacgtttattctaattga

SEQ ID NO: 97521 - DNA, 25 bp, Probe sequence
cgcggttccacccaaattagtgtag

SEQ ID NO: 97522 - DNA, 25 bp, Probe sequence
gattcgttgcgccaatcttattgtt

SEQ ID NO: 97523 - DNA, 25 bp, Probe sequence
gttgcgccaatcttattgttaagct

SEQ ID NO: 97524 - DNA, 25 bp, Probe sequence
gttccacccaaattagtgtagtcac

SEQ ID NO: 97525 - DNA, 25 bp, Probe sequence
gtgtagtcactcgcttttattttaa

SEQ ID NO: 97526 - DNA, 25 bp, Probe sequence
ttattgttaagcttacactatcctt

SEQ ID NO: 97527 - DNA, 25 bp, Probe sequence
ataaaaggtattcaagtagccacat

SEQ ID NO: 97528 - DNA, 25 bp, Probe sequence
agtatctctttttataaattatata

SEQ ID NO: 97529 - DNA, 25 bp, Probe sequence
accagtatctctttttataaattat

SEQ ID NO: 97530 - DNA, 25 bp, Probe sequence
aaattatatagccaccacatatggt

SEQ ID NO: 97531 - DNA, 25 bp, Probe sequence
aagagatactggcaattttactaac

SEQ ID NO: 97532 - DNA, 25 bp, Probe sequence
aagtagccacatagatgtgtttatt

SEQ ID NO: 97533 - DNA, 25 bp, Probe sequence
aaggtattcaagtagccacatagat

SEQ ID NO: 97534 - DNA, 25 bp, Probe sequence
cacatatggtggaaagtctttttaa

SEQ ID NO: 97535 - DNA, 25 bp, Probe sequence
ctaaccagtatctctttttataaat

SEQ ID NO: 97536 - DNA, 25 bp, Probe sequence
gagatactggcaattttactaacca

SEQ ID NO: 97537 - DNA, 25 bp, Probe sequence
gatgtgtttatttgaataccttttt

SEQ ID NO: 97538 - DNA, 25 bp, Probe sequence
gtattcaagtagccacatagatgtg

SEQ ID NO: 97539 - DNA, 25 bp, Probe sequence
ggcaattttactaaccagtatctct

SEQ ID NO: 97540 - DNA, 25 bp, Probe sequence
ttatttgaatacctttttgaataga

SEQ ID NO: 97541 - DNA, 25 bp, Probe sequence
ttactaaccagtatctctttttata

SEQ ID NO: 97542 - DNA, 25 bp, Probe sequence
attgaaactgcttttatgacaaggt

SEQ ID NO: 97543 - DNA, 25 bp, Probe sequence
atgagtaagtcaatgcaaagatgtt

SEQ ID NO: 97544 - DNA, 25 bp, Probe sequence
atgatatatgaaaaggagcgcgtgt

SEQ ID NO: 97545 - DNA, 25 bp, Probe sequence
agatgtttaaatcaatcaattgcat

SEQ ID NO: 97546 - DNA, 25 bp, Probe sequence
aaattgaaactgcttttatgacaag

SEQ ID NO: 97547 - DNA, 25 bp, Probe sequence
aaatcaatcaattgcatgatataat

SEQ ID NO: 97548 - DNA, 25 bp, Probe sequence
aaactgcttttatgacaaggtgaaa

SEQ ID NO: 97549 - DNA, 25 bp, Probe sequence
aactgcttttatgacaaggtgaaaa

SEQ ID NO: 97550 - DNA, 25 bp, Probe sequence
aagtagatattaaagcatcatagaa

SEQ ID NO: 97551 - DNA, 25 bp, Probe sequence
aagtcaatgcaaagatgtttaaatc

SEQ ID NO: 97552 - DNA, 25 bp, Probe sequence
gaaactgcttttatgacaaggtgaa

SEQ ID NO: 97553 - DNA, 25 bp, Probe sequence
gagtaagtcaatgcaaagatgttta

SEQ ID NO: 97554 - DNA, 25 bp, Probe sequence
gtttaaatcaatcaattgcatgata

SEQ ID NO: 97555 - DNA, 25 bp, Probe sequence
tgaaactgcttttatgacaaggtga

SEQ ID NO: 97556 - DNA, 25 bp, Probe sequence
ttgaaactgcttttatgacaaggtg

SEQ ID NO: 97557 - DNA, 25 bp, Probe sequence
attaatgtgagggcgaggtgaaatt

SEQ ID NO: 97558 - DNA, 25 bp, Probe sequence
ataaagtatattcaatttcatgtat

SEQ ID NO: 97559 - DNA, 25 bp, Probe sequence
atgtgatgtttttttgttgtcaatt

SEQ ID NO: 97560 - DNA, 25 bp, Probe sequence
acatcacaagttagtgtctgacact

SEQ ID NO: 97561 - DNA, 25 bp, Probe sequence
aaattgatattctataggttcttat

SEQ ID NO: 97562 - DNA, 25 bp, Probe sequence
cactaatatgtgatgtttttttgtt

SEQ ID NO: 97563 - DNA, 25 bp, Probe sequence
ctctgttgactccctcaacacgaat

SEQ ID NO: 97564 - DNA, 25 bp, Probe sequence
ctccctcaacacgaatattaattat

SEQ ID NO: 97565 - DNA, 25 bp, Probe sequence
gactccctcaacacgaatattaatt

SEQ ID NO: 97566 - DNA, 25 bp, Probe sequence
gatattctataggttcttataacta

SEQ ID NO: 97567 - DNA, 25 bp, Probe sequence
gtatattcaatttcatgtataatta

SEQ ID NO: 97568 - DNA, 25 bp, Probe sequence
gtataattaatgtgagggcgaggtg

SEQ ID NO: 97569 - DNA, 25 bp, Probe sequence
gtgtctgacactaatatgtgatgtt

SEQ ID NO: 97570 - DNA, 25 bp, Probe sequence
tgatgtttttttgttgtcaattttt

SEQ ID NO: 97571 - DNA, 25 bp, Probe sequence
ttgactccctcaacacgaatattaa

SEQ ID NO: 97572 - DNA, 25 bp, Probe sequence
attgaccataaattacagatatatt

SEQ ID NO: 97573 - DNA, 25 bp, Probe sequence
agttttactgtgcaattgactataa

SEQ ID NO: 97574 - DNA, 25 bp, Probe sequence
aaagtctttgtgattttgatgtgaa

SEQ ID NO: 97575 - DNA, 25 bp, Probe sequence
aacggcttcacaatttactatataa

SEQ ID NO: 97576 - DNA, 25 bp, Probe sequence
aagcaactcttctcattaaataaat

SEQ ID NO: 97577 - DNA, 25 bp, Probe sequence
gcatagttttactgtgcaattgact

SEQ ID NO: 97578 - DNA, 25 bp, Probe sequence
gcaattgactataaagttccgttga

SEQ ID NO: 97579 - DNA, 25 bp, Probe sequence
gactataaagttccgttgatatttg

SEQ ID NO: 97580 - DNA, 25 bp, Probe sequence
gattcataccataaggttccgtatt

SEQ ID NO: 97581 - DNA, 25 bp, Probe sequence
gttccgttgatatttggagggaggg

SEQ ID NO: 97582 - DNA, 25 bp, Probe sequence
gtattccttgattcataccataagg

SEQ ID NO: 97583 - DNA, 25 bp, Probe sequence
tgttttaacggcttcacaatttact

SEQ ID NO: 97584 - DNA, 25 bp, Probe sequence
taccataaggttccgtattaaagat

SEQ ID NO: 97585 - DNA, 25 bp, Probe sequence
taaagatataggttttgtaacgttg

SEQ ID NO: 97586 - DNA, 25 bp, Probe sequence
tactatataagcaactcttctcatt

SEQ ID NO: 97587 - DNA, 25 bp, Probe sequence
attacgttaaactatatgagttaat

SEQ ID NO: 97588 - DNA, 25 bp, Probe sequence
atagaacattggctttggcttttta

SEQ ID NO: 97589 - DNA, 25 bp, Probe sequence
atgttgtcatgatctgaaaagtcaa

SEQ ID NO: 97590 - DNA, 25 bp, Probe sequence
agaacattggctttggctttttatt

SEQ ID NO: 97591 - DNA, 25 bp, Probe sequence
aacattggctttggctttttatttg

SEQ ID NO: 97592 - DNA, 25 bp, Probe sequence
aatagaacattggctttggcttttt

SEQ ID NO: 97593 - DNA, 25 bp, Probe sequence
caattagaatgttgtcatgatctga

SEQ ID NO: 97594 - DNA, 25 bp, Probe sequence
gaatgttgtcatgatctgaaaagtc

SEQ ID NO: 97595 - DNA, 25 bp, Probe sequence
gaacattggctttggctttttattt

SEQ ID NO: 97596 - DNA, 25 bp, Probe sequence
gaaaagtcaaagtcaatagaacatt

SEQ ID NO: 97597 - DNA, 25 bp, Probe sequence
gtatgacatattacgttaaactata

SEQ ID NO: 97598 - DNA, 25 bp, Probe sequence
gtcaatagaacattggctttggctt

SEQ ID NO: 97599 - DNA, 25 bp, Probe sequence
gtcatgatctgaaaagtcaaagtca

SEQ ID NO: 97600 - DNA, 25 bp, Probe sequence
ggctttttatttggatagtatgaca

SEQ ID NO: 97601 - DNA, 25 bp, Probe sequence
tagaacattggctttggctttttat

SEQ ID NO: 97602 - DNA, 25 bp, Probe sequence
aacattgacttactttgaccaattt

SEQ ID NO: 97603 - DNA, 25 bp, Probe sequence
aagtgagtgctaatgaggtgaaaac

SEQ ID NO: 97604 - DNA, 25 bp, Probe sequence
aatttcgagtctttaacattgactt

SEQ ID NO: 97605 - DNA, 25 bp, Probe sequence
aattgaaatttcgagtctttaacat

SEQ ID NO: 97606 - DNA, 25 bp, Probe sequence
cattgacttactttgaccaatttga

SEQ ID NO: 97607 - DNA, 25 bp, Probe sequence
cttactttgaccaatttgataaatt

SEQ ID NO: 97608 - DNA, 25 bp, Probe sequence
gacttactttgaccaatttgataaa

SEQ ID NO: 97609 - DNA, 25 bp, Probe sequence
gagataagtgagtgctaatgaggtg

SEQ ID NO: 97610 - DNA, 25 bp, Probe sequence
gagtctttaacattgacttactttg

SEQ ID NO: 97611 - DNA, 25 bp, Probe sequence
tgaaatttcgagtctttaacattga

SEQ ID NO: 97612 - DNA, 25 bp, Probe sequence
tctttaacattgacttactttgacc

SEQ ID NO: 97613 - DNA, 25 bp, Probe sequence
taaattataattagcacttgagata

SEQ ID NO: 97614 - DNA, 25 bp, Probe sequence
tttaacattgacttactttgaccaa

SEQ ID NO: 97615 - DNA, 25 bp, Probe sequence
ttcgagtctttaacattgacttact

SEQ ID NO: 97616 - DNA, 25 bp, Probe sequence
ttgacttactttgaccaatttgata

SEQ ID NO: 97617 - DNA, 25 bp, Probe sequence
attagacaaccattgattaaacgtt

SEQ ID NO: 97618 - DNA, 25 bp, Probe sequence
caacaggatgtagccgattggataa

SEQ ID NO: 97619 - DNA, 25 bp, Probe sequence
gccgattggataaacagtctgagaa

SEQ ID NO: 97620 - DNA, 25 bp, Probe sequence
gaataacagcagatagtccaacagg

SEQ ID NO: 97621 - DNA, 25 bp, Probe sequence
gaatcgatatattagacaaccattg

SEQ ID NO: 97622 - DNA, 25 bp, Probe sequence
gacatattacatctggctaatgtgt

SEQ ID NO: 97623 - DNA, 25 bp, Probe sequence
gatagtccaacaggatgtagccgat

SEQ ID NO: 97624 - DNA, 25 bp, Probe sequence
gtagccgattggataaacagtctga

SEQ ID NO: 97625 - DNA, 25 bp, Probe sequence
tgtaattttatttttaaggacatat

SEQ ID NO: 97626 - DNA, 25 bp, Probe sequence
tctcactccctctaaacaagaataa

SEQ ID NO: 97627 - DNA, 25 bp, Probe sequence
tcactccctctaaacaagaataaat

SEQ ID NO: 97628 - DNA, 25 bp, Probe sequence
taacagcagatagtccaacaggatg

SEQ ID NO: 97629 - DNA, 25 bp, Probe sequence
tagtccaacaggatgtagccgattg

SEQ ID NO: 97630 - DNA, 25 bp, Probe sequence
tatctcactccctctaaacaagaat

SEQ ID NO: 97631 - DNA, 25 bp, Probe sequence
ttaaggacatattacatctggctaa

SEQ ID NO: 97632 - DNA, 25 bp, Probe sequence
attaacgtcctgggctttacaatgt

SEQ ID NO: 97633 - DNA, 25 bp, Probe sequence
agtcatcgacagagttaaaatgagc

SEQ ID NO: 97634 - DNA, 25 bp, Probe sequence
agcctaggataaattaacgtcctgg

SEQ ID NO: 97635 - DNA, 25 bp, Probe sequence
aacgtcctgggctttacaatgttat

SEQ ID NO: 97636 - DNA, 25 bp, Probe sequence
aattaacgtcctgggctttacaatg

SEQ ID NO: 97637 - DNA, 25 bp, Probe sequence
ctaggataaattaacgtcctgggct

SEQ ID NO: 97638 - DNA, 25 bp, Probe sequence
gcctaggataaattaacgtcctggg

SEQ ID NO: 97639 - DNA, 25 bp, Probe sequence
gagcctaggataaattaacgtcctg

SEQ ID NO: 97640 - DNA, 25 bp, Probe sequence
gagggagcctaggataaattaacgt

SEQ ID NO: 97641 - DNA, 25 bp, Probe sequence
ggagcctaggataaattaacgtcct

SEQ ID NO: 97642 - DNA, 25 bp, Probe sequence
tgttatattggcagtcatcgacaga

SEQ ID NO: 97643 - DNA, 25 bp, Probe sequence
taacgtcctgggctttacaatgtta

SEQ ID NO: 97644 - DNA, 25 bp, Probe sequence
taactaaaaagagggagcctaggat

SEQ ID NO: 97645 - DNA, 25 bp, Probe sequence
taggataaattaacgtcctgggctt

SEQ ID NO: 97646 - DNA, 25 bp, Probe sequence
ttaacgtcctgggctttacaatgtt

SEQ ID NO: 97647 - DNA, 25 bp, Probe sequence
attaacatattaacatatcgcaagt

SEQ ID NO: 97648 - DNA, 25 bp, Probe sequence
atggcgtttgcatttacctattaaa

SEQ ID NO: 97649 - DNA, 25 bp, Probe sequence
agatgcgaaagataatacgggttta

SEQ ID NO: 97650 - DNA, 25 bp, Probe sequence
acctcctaaaagtgagttcatctta

SEQ ID NO: 97651 - DNA, 25 bp, Probe sequence
aaagtctaaccgttgtgcaatcatt

SEQ ID NO: 97652 - DNA, 25 bp, Probe sequence
aaaacgttattatatcaaagatgcg

SEQ ID NO: 97653 - DNA, 25 bp, Probe sequence
aaccgttgtgcaatcatttatttga

SEQ ID NO: 97654 - DNA, 25 bp, Probe sequence
catttatttgatggggttagcttaa

SEQ ID NO: 97655 - DNA, 25 bp, Probe sequence
gagttcatcttatcaaaattttatt

SEQ ID NO: 97656 - DNA, 25 bp, Probe sequence
gattatggcgtttgcatttacctat

SEQ ID NO: 97657 - DNA, 25 bp, Probe sequence
gttcatccaagattatggcgtttgc

SEQ ID NO: 97658 - DNA, 25 bp, Probe sequence
gtgttggaaacacaatcaatacgtt

SEQ ID NO: 97659 - DNA, 25 bp, Probe sequence
ggggttagcttaaaattttgcagat

SEQ ID NO: 97660 - DNA, 25 bp, Probe sequence
tataatttcaaagttcatccaagat

SEQ ID NO: 97661 - DNA, 25 bp, Probe sequence
ttctgtcacctcctaaaagtgagtt

SEQ ID NO: 97662 - DNA, 25 bp, Probe sequence
attgatgtgtcaaacgaatgaaagg

SEQ ID NO: 97663 - DNA, 25 bp, Probe sequence
ataatctattgatgtgtcaaacgaa

SEQ ID NO: 97664 - DNA, 25 bp, Probe sequence
atctattgatgtgtcaaacgaatga

SEQ ID NO: 97665 - DNA, 25 bp, Probe sequence
atgatataatctattgatgtgtcaa

SEQ ID NO: 97666 - DNA, 25 bp, Probe sequence
acagaaacatgatataatctattga

SEQ ID NO: 97667 - DNA, 25 bp, Probe sequence
aatctattgatgtgtcaaacgaatg

SEQ ID NO: 97668 - DNA, 25 bp, Probe sequence
catgatataatctattgatgtgtca

SEQ ID NO: 97669 - DNA, 25 bp, Probe sequence
gatgtgtcaaacgaatgaaagggtg

SEQ ID NO: 97670 - DNA, 25 bp, Probe sequence
gatataatctattgatgtgtcaaac

SEQ ID NO: 97671 - DNA, 25 bp, Probe sequence
gtcaaacgaatgaaagggtgtaatg

SEQ ID NO: 97672 - DNA, 25 bp, Probe sequence
gtgtcaaacgaatgaaagggtgtaa

SEQ ID NO: 97673 - DNA, 25 bp, Probe sequence
tgatataatctattgatgtgtcaaa

SEQ ID NO: 97674 - DNA, 25 bp, Probe sequence
tctattgatgtgtcaaacgaatgaa

SEQ ID NO: 97675 - DNA, 25 bp, Probe sequence
taatctattgatgtgtcaaacgaat

SEQ ID NO: 97676 - DNA, 25 bp, Probe sequence
tataatctattgatgtgtcaaacga

SEQ ID NO: 97677 - DNA, 25 bp, Probe sequence
attgcaaattttattttttgtgatt

SEQ ID NO: 97678 - DNA, 25 bp, Probe sequence
attttaagtatggaaggtgaacatc

SEQ ID NO: 97679 - DNA, 25 bp, Probe sequence
aattgcaaattttattttttgtgat

SEQ ID NO: 97680 - DNA, 25 bp, Probe sequence
gcaaattttattttttgtgattaat

SEQ ID NO: 97681 - DNA, 25 bp, Probe sequence
gattaatcttatattattagaaaat

SEQ ID NO: 97682 - DNA, 25 bp, Probe sequence
gtgattaatcttatattattagaaa

SEQ ID NO: 97683 - DNA, 25 bp, Probe sequence
tgtgattaatcttatattattagaa

SEQ ID NO: 97684 - DNA, 25 bp, Probe sequence
tgcaaattttattttttgtgattaa

SEQ ID NO: 97685 - DNA, 25 bp, Probe sequence
taattgcaaattttattttttgtga

SEQ ID NO: 97686 - DNA, 25 bp, Probe sequence
tttgtgattaatcttatattattag

SEQ ID NO: 97687 - DNA, 25 bp, Probe sequence
tttttgtgattaatcttatattatt

SEQ ID NO: 97688 - DNA, 25 bp, Probe sequence
ttttgtgattaatcttatattatta

SEQ ID NO: 97689 - DNA, 25 bp, Probe sequence
ttaattgcaaattttattttttgtg

SEQ ID NO: 97690 - DNA, 25 bp, Probe sequence
ttgcaaattttattttttgtgatta

SEQ ID NO: 97691 - DNA, 25 bp, Probe sequence
ttgtgattaatcttatattattaga

SEQ ID NO: 97692 - DNA, 25 bp, Probe sequence
atttcatcattattattttaaacat

SEQ ID NO: 97693 - DNA, 25 bp, Probe sequence
ataaagtttcttgacacgattggtt

SEQ ID NO: 97694 - DNA, 25 bp, Probe sequence
atcattttcctgttatttaataaag

SEQ ID NO: 97695 - DNA, 25 bp, Probe sequence
atcctcttatttcatcattattatt

SEQ ID NO: 97696 - DNA, 25 bp, Probe sequence
agtttcttgacacgattggttgatg

SEQ ID NO: 97697 - DNA, 25 bp, Probe sequence
acatatcattttcctgttatttaat

SEQ ID NO: 97698 - DNA, 25 bp, Probe sequence
aaagtttcttgacacgattggttga

SEQ ID NO: 97699 - DNA, 25 bp, Probe sequence
aaaatcctcttatttcatcattatt

SEQ ID NO: 97700 - DNA, 25 bp, Probe sequence
ctcttatttcatcattattatttta

SEQ ID NO: 97701 - DNA, 25 bp, Probe sequence
gacacgattggttgatgtaattgat

SEQ ID NO: 97702 - DNA, 25 bp, Probe sequence
gattggttgatgtaattgatatgat

SEQ ID NO: 97703 - DNA, 25 bp, Probe sequence
tgtaaaatcctcttatttcatcatt

SEQ ID NO: 97704 - DNA, 25 bp, Probe sequence
taaacatatcattttcctgttattt

SEQ ID NO: 97705 - DNA, 25 bp, Probe sequence
ttattttaaacatatcattttcctg

SEQ ID NO: 97706 - DNA, 25 bp, Probe sequence
ttcttgacacgattggttgatgtaa

SEQ ID NO: 97707 - DNA, 25 bp, Probe sequence
atctttaatgcacacaggaattcga

SEQ ID NO: 97708 - DNA, 25 bp, Probe sequence
agtcttactgctattttctattaga

SEQ ID NO: 97709 - DNA, 25 bp, Probe sequence
aaagtcttactgctattttctatta

SEQ ID NO: 97710 - DNA, 25 bp, Probe sequence
aacagcagtaaggatgctaacactt

SEQ ID NO: 97711 - DNA, 25 bp, Probe sequence
aagtacctgacattatattgttaca

SEQ ID NO: 97712 - DNA, 25 bp, Probe sequence
aatcattaataatctttgacagtga

SEQ ID NO: 97713 - DNA, 25 bp, Probe sequence
aatatgattaactgtgtaattacaa

SEQ ID NO: 97714 - DNA, 25 bp, Probe sequence
aattcgatacgaaacaaatatgatt

SEQ ID NO: 97715 - DNA, 25 bp, Probe sequence
cacttagaaaagtcttactgctatt

SEQ ID NO: 97716 - DNA, 25 bp, Probe sequence
gcagtaaggatgctaacacttagaa

SEQ ID NO: 97717 - DNA, 25 bp, Probe sequence
gtacctgacattatattgttacaaa

SEQ ID NO: 97718 - DNA, 25 bp, Probe sequence
gtgaaatataaagtacctgacatta

SEQ ID NO: 97719 - DNA, 25 bp, Probe sequence
tgcacacaggaattcgatacgaaac

SEQ ID NO: 97720 - DNA, 25 bp, Probe sequence
taatgcacacaggaattcgatacga

SEQ ID NO: 97721 - DNA, 25 bp, Probe sequence
tagaattatctttaatgcacacagg

SEQ ID NO: 97722 - DNA, 25 bp, Probe sequence
ataattgcgaacagggtatttcaaa

SEQ ID NO: 97723 - DNA, 25 bp, Probe sequence
acataatcaaaattgtaggctcaag

SEQ ID NO: 97724 - DNA, 25 bp, Probe sequence
acactgtattggttgatataactca

SEQ ID NO: 97725 - DNA, 25 bp, Probe sequence
aaatgattatcattttttctgatat

SEQ ID NO: 97726 - DNA, 25 bp, Probe sequence
aactcaactaataattgcgaacagg

SEQ ID NO: 97727 - DNA, 25 bp, Probe sequence
aattggaaagtattatgaacgtgat

SEQ ID NO: 97728 - DNA, 25 bp, Probe sequence
gcgaacagggtatttcaaattggaa

SEQ ID NO: 97729 - DNA, 25 bp, Probe sequence
gaatttttatgtttacactgtattg

SEQ ID NO: 97730 - DNA, 25 bp, Probe sequence
gatataactcaactaataattgcga

SEQ ID NO: 97731 - DNA, 25 bp, Probe sequence
gtttacactgtattggttgatataa

SEQ ID NO: 97732 - DNA, 25 bp, Probe sequence
gtttggaatttttatgtttacactg

SEQ ID NO: 97733 - DNA, 25 bp, Probe sequence
tgatatactgttaaacggtttggaa

SEQ ID NO: 97734 - DNA, 25 bp, Probe sequence
tcattttttctgatatactgttaaa

SEQ ID NO: 97735 - DNA, 25 bp, Probe sequence
ttgtaggctcaagggagtgggacag

SEQ ID NO: 97736 - DNA, 25 bp, Probe sequence
ttttctgatatactgttaaacggtt

SEQ ID NO: 97737 - DNA, 25 bp, Probe sequence
attttaaatgagtagaggaggctgc

SEQ ID NO: 97738 - DNA, 25 bp, Probe sequence
ataatatttagctaatctaatgaaa

SEQ ID NO: 97739 - DNA, 25 bp, Probe sequence
agtgataatatttagctaatctaat

SEQ ID NO: 97740 - DNA, 25 bp, Probe sequence
aaatctttttctattgattgagaaa

SEQ ID NO: 97741 - DNA, 25 bp, Probe sequence
aaagtgataatatttagctaatcta

SEQ ID NO: 97742 - DNA, 25 bp, Probe sequence
aaaaatctttttctattgattgaga

SEQ ID NO: 97743 - DNA, 25 bp, Probe sequence
aaaatctttttctattgattgagaa

SEQ ID NO: 97744 - DNA, 25 bp, Probe sequence
aagtgataatatttagctaatctaa

SEQ ID NO: 97745 - DNA, 25 bp, Probe sequence
aatctttttctattgattgagaaaa

SEQ ID NO: 97746 - DNA, 25 bp, Probe sequence
aatatttagctaatctaatgaaaat

SEQ ID NO: 97747 - DNA, 25 bp, Probe sequence
gaaaaatctttttctattgattgag

SEQ ID NO: 97748 - DNA, 25 bp, Probe sequence
gataatatttagctaatctaatgaa

SEQ ID NO: 97749 - DNA, 25 bp, Probe sequence
gtgataatatttagctaatctaatg

SEQ ID NO: 97750 - DNA, 25 bp, Probe sequence
tttaaatgagtagaggaggctgcaa

SEQ ID NO: 97751 - DNA, 25 bp, Probe sequence
ttttaaatgagtagaggaggctgca

SEQ ID NO: 97752 - DNA, 25 bp, Probe sequence
attttgatttccggtgattcattta

SEQ ID NO: 97753 - DNA, 25 bp, Probe sequence
atattttgatttccggtgattcatt

SEQ ID NO: 97754 - DNA, 25 bp, Probe sequence
atagcatcactgtaaatgttgttag

SEQ ID NO: 97755 - DNA, 25 bp, Probe sequence
aaatgttgttagtattaggcaagat

SEQ ID NO: 97756 - DNA, 25 bp, Probe sequence
aagacatttcgactaatagcatcac

SEQ ID NO: 97757 - DNA, 25 bp, Probe sequence
catttcgactaatagcatcactgta

SEQ ID NO: 97758 - DNA, 25 bp, Probe sequence
gcatcactgtaaatgttgttagtat

SEQ ID NO: 97759 - DNA, 25 bp, Probe sequence
gacatttcgactaatagcatcactg

SEQ ID NO: 97760 - DNA, 25 bp, Probe sequence
gactaatagcatcactgtaaatgtt

SEQ ID NO: 97761 - DNA, 25 bp, Probe sequence
gatatattttgatttccggtgattc

SEQ ID NO: 97762 - DNA, 25 bp, Probe sequence
gatttccggtgattcatttataaag

SEQ ID NO: 97763 - DNA, 25 bp, Probe sequence
ggcaagatatattttgatttccggt

SEQ ID NO: 97764 - DNA, 25 bp, Probe sequence
tccggtgattcatttataaagcata

SEQ ID NO: 97765 - DNA, 25 bp, Probe sequence
tttgatttccggtgattcatttata

SEQ ID NO: 97766 - DNA, 25 bp, Probe sequence
ttcgactaatagcatcactgtaaat

SEQ ID NO: 97767 - DNA, 25 bp, Probe sequence
attgtatgcgatttgaattacttat

SEQ ID NO: 97768 - DNA, 25 bp, Probe sequence
aacaacttgtgcttctcaatgatac

SEQ ID NO: 97769 - DNA, 25 bp, Probe sequence
aatgatacttcggtcgtgctttttt

SEQ ID NO: 97770 - DNA, 25 bp, Probe sequence
aatactggtttattgcaatacaaag

SEQ ID NO: 97771 - DNA, 25 bp, Probe sequence
aatagattgtttaattgcgcgattg

SEQ ID NO: 97772 - DNA, 25 bp, Probe sequence
aattgcgcgattgaagtgtgttaat

SEQ ID NO: 97773 - DNA, 25 bp, Probe sequence
cagaccgaatgatagcagaacctaa

SEQ ID NO: 97774 - DNA, 25 bp, Probe sequence
gaattacttattaaacaacttgtgc

SEQ ID NO: 97775 - DNA, 25 bp, Probe sequence
gattatcatttgttattgtatgcga

SEQ ID NO: 97776 - DNA, 25 bp, Probe sequence
gtaaaaattttccatcagaccgaat

SEQ ID NO: 97777 - DNA, 25 bp, Probe sequence
gtgtgttaatgatacttcggtcgtg

SEQ ID NO: 97778 - DNA, 25 bp, Probe sequence
tgtgcttctcaatgatacaatgaaa

SEQ ID NO: 97779 - DNA, 25 bp, Probe sequence
tcggtcgtgcttttttatattcaaa

SEQ ID NO: 97780 - DNA, 25 bp, Probe sequence
tacttcggtcgtgcttttttatatt

SEQ ID NO: 97781 - DNA, 25 bp, Probe sequence
ttacaatattaactactccatttta

SEQ ID NO: 97782 - DNA, 25 bp, Probe sequence
atatgaatgattcgcttctataaat

SEQ ID NO: 97783 - DNA, 25 bp, Probe sequence
atagctttgcgtctaacaagaaatc

SEQ ID NO: 97784 - DNA, 25 bp, Probe sequence
atcagtcatttaattggttggcaaa

SEQ ID NO: 97785 - DNA, 25 bp, Probe sequence
agattttactcttgctaaccttaag

SEQ ID NO: 97786 - DNA, 25 bp, Probe sequence
aataaaatagctttgcgtctaacaa

SEQ ID NO: 97787 - DNA, 25 bp, Probe sequence
gctaaccttaagatgggtaggcaag

SEQ ID NO: 97788 - DNA, 25 bp, Probe sequence
gcaagagtatttttttaagtcaagc

SEQ ID NO: 97789 - DNA, 25 bp, Probe sequence
gaatgattcgcttctataaataaaa

SEQ ID NO: 97790 - DNA, 25 bp, Probe sequence
gatgggtaggcaagagtattttttt

SEQ ID NO: 97791 - DNA, 25 bp, Probe sequence
gatttattttattgtcataatcata

SEQ ID NO: 97792 - DNA, 25 bp, Probe sequence
gtatttttttaagtcaagcaatgta

SEQ ID NO: 97793 - DNA, 25 bp, Probe sequence
tgcgtctaacaagaaatcagtcatt

SEQ ID NO: 97794 - DNA, 25 bp, Probe sequence
tcaattgtgaaggctgatttatttt

SEQ ID NO: 97795 - DNA, 25 bp, Probe sequence
taatcatattgacttattttacata

SEQ ID NO: 97796 - DNA, 25 bp, Probe sequence
tactcttgctaaccttaagatgggt

SEQ ID NO: 97797 - DNA, 25 bp, Probe sequence
attgtatgatgatagtgagttatat

SEQ ID NO: 97798 - DNA, 25 bp, Probe sequence
atttgtaattaaaggagtgtcgcaa

SEQ ID NO: 97799 - DNA, 25 bp, Probe sequence
atatttgtaattaaaggagtgtcgc

SEQ ID NO: 97800 - DNA, 25 bp, Probe sequence
atgatgatagtgagttatatttgta

SEQ ID NO: 97801 - DNA, 25 bp, Probe sequence
atgatagtgagttatatttgtaatt

SEQ ID NO: 97802 - DNA, 25 bp, Probe sequence
aaagccataatattgtatgatgata

SEQ ID NO: 97803 - DNA, 25 bp, Probe sequence
aatattgtatgatgatagtgagtta

SEQ ID NO: 97804 - DNA, 25 bp, Probe sequence
gatgatagtgagttatatttgtaat

SEQ ID NO: 97805 - DNA, 25 bp, Probe sequence
gatagtgagttatatttgtaattaa

SEQ ID NO: 97806 - DNA, 25 bp, Probe sequence
gtatgatgatagtgagttatatttg

SEQ ID NO: 97807 - DNA, 25 bp, Probe sequence
gtgagttatatttgtaattaaagga

SEQ ID NO: 97808 - DNA, 25 bp, Probe sequence
taaagccataatattgtatgatgat

SEQ ID NO: 97809 - DNA, 25 bp, Probe sequence
tagtgagttatatttgtaattaaag

SEQ ID NO: 97810 - DNA, 25 bp, Probe sequence
tatttgtaattaaaggagtgtcgca

SEQ ID NO: 97811 - DNA, 25 bp, Probe sequence
tattgtatgatgatagtgagttata

SEQ ID NO: 97812 - DNA, 25 bp, Probe sequence
agtttttcaaatcgactatctgtgt

SEQ ID NO: 97813 - DNA, 25 bp, Probe sequence
aaatcgactatctgtgtcatcaatt

SEQ ID NO: 97814 - DNA, 25 bp, Probe sequence
aagatgagtagttaatgatttgttt

SEQ ID NO: 97815 - DNA, 25 bp, Probe sequence
cgttcgtcccttttgaggatgggcg

SEQ ID NO: 97816 - DNA, 25 bp, Probe sequence
gaattgcatttataactagggtggt

SEQ ID NO: 97817 - DNA, 25 bp, Probe sequence
gactatctgtgtcatcaatttttat

SEQ ID NO: 97818 - DNA, 25 bp, Probe sequence
gataacgttcgtcccttttgaggat

SEQ ID NO: 97819 - DNA, 25 bp, Probe sequence
gatattgatttatactagtttttca

SEQ ID NO: 97820 - DNA, 25 bp, Probe sequence
gtacaacaaacattagtgaacgcta

SEQ ID NO: 97821 - DNA, 25 bp, Probe sequence
gtgtcatcaatttttatggaatggt

SEQ ID NO: 97822 - DNA, 25 bp, Probe sequence
tcgtcccttttgaggatgggcgttt

SEQ ID NO: 97823 - DNA, 25 bp, Probe sequence
tgaacgctactttatgcacaactgt

SEQ ID NO: 97824 - DNA, 25 bp, Probe sequence
tagggtggtaccgcgataacgttcg

SEQ ID NO: 97825 - DNA, 25 bp, Probe sequence
tatgcacaactgtatagtcgattta

SEQ ID NO: 97826 - DNA, 25 bp, Probe sequence
ttatcagagatgtactggttggtga

SEQ ID NO: 97827 - DNA, 25 bp, Probe sequence
attcgttgttaagtgattcgagaca

SEQ ID NO: 97828 - DNA, 25 bp, Probe sequence
attcccgctttttcatgaatgaaaa

SEQ ID NO: 97829 - DNA, 25 bp, Probe sequence
attagattatattttattcgttgtt

SEQ ID NO: 97830 - DNA, 25 bp, Probe sequence
agtgattcgagacatacaatttatc

SEQ ID NO: 97831 - DNA, 25 bp, Probe sequence
aattgatgagaaatgaggttcgtaa

SEQ ID NO: 97832 - DNA, 25 bp, Probe sequence
cattcccgctttttcatgaatgaaa

SEQ ID NO: 97833 - DNA, 25 bp, Probe sequence
ccattcccgctttttcatgaatgaa

SEQ ID NO: 97834 - DNA, 25 bp, Probe sequence
gagacatacaatttatcaagatgtt

SEQ ID NO: 97835 - DNA, 25 bp, Probe sequence
gattcgagacatacaatttatcaag

SEQ ID NO: 97836 - DNA, 25 bp, Probe sequence
gttgttaagtgattcgagacataca

SEQ ID NO: 97837 - DNA, 25 bp, Probe sequence
gttaagtgattcgagacatacaatt

SEQ ID NO: 97838 - DNA, 25 bp, Probe sequence
tccattcccgctttttcatgaatga

SEQ ID NO: 97839 - DNA, 25 bp, Probe sequence
ttcgttgttaagtgattcgagacat

SEQ ID NO: 97840 - DNA, 25 bp, Probe sequence
ttcgagacatacaatttatcaagat

SEQ ID NO: 97841 - DNA, 25 bp, Probe sequence
ttccattcccgctttttcatgaatg

SEQ ID NO: 97842 - DNA, 25 bp, Probe sequence
atgcatgaatctaattatgtattcc

SEQ ID NO: 97843 - DNA, 25 bp, Probe sequence
atgaatctaattatgtattcctatt

SEQ ID NO: 97844 - DNA, 25 bp, Probe sequence
agtacataatagtggtggctaatgt

SEQ ID NO: 97845 - DNA, 25 bp, Probe sequence
aagtacataatagtggtggctaatg

SEQ ID NO: 97846 - DNA, 25 bp, Probe sequence
catgaatctaattatgtattcctat

SEQ ID NO: 97847 - DNA, 25 bp, Probe sequence
gcatgaatctaattatgtattccta

SEQ ID NO: 97848 - DNA, 25 bp, Probe sequence
gaatctaattatgtattcctatttt

SEQ ID NO: 97849 - DNA, 25 bp, Probe sequence
gtacataatagtggtggctaatgtg

SEQ ID NO: 97850 - DNA, 25 bp, Probe sequence
tgaatctaattatgtattcctattt

SEQ ID NO: 97851 - DNA, 25 bp, Probe sequence
tgcatgaatctaattatgtattcct

SEQ ID NO: 97852 - DNA, 25 bp, Probe sequence
taagtacataatagtggtggctaat

SEQ ID NO: 97853 - DNA, 25 bp, Probe sequence
tacataatagtggtggctaatgtgg

SEQ ID NO: 97854 - DNA, 25 bp, Probe sequence
tttaagtacataatagtggtggcta

SEQ ID NO: 97855 - DNA, 25 bp, Probe sequence
ttttaagtacataatagtggtggct

SEQ ID NO: 97856 - DNA, 25 bp, Probe sequence
ttaagtacataatagtggtggctaa

SEQ ID NO: 97857 - DNA, 25 bp, Probe sequence
atcacaatgtcctaggctctacaat

SEQ ID NO: 97858 - DNA, 25 bp, Probe sequence
atgtcctaggctctacaatgttata

SEQ ID NO: 97859 - DNA, 25 bp, Probe sequence
acatcacaatgtcctaggctctaca

SEQ ID NO: 97860 - DNA, 25 bp, Probe sequence
acaatgtcctaggctctacaatgtt

SEQ ID NO: 97861 - DNA, 25 bp, Probe sequence
aaatgacgaaagacagtttttgatg

SEQ ID NO: 97862 - DNA, 25 bp, Probe sequence
aagacagtttttgatgagaataatt

SEQ ID NO: 97863 - DNA, 25 bp, Probe sequence
caatgtcctaggctctacaatgtta

SEQ ID NO: 97864 - DNA, 25 bp, Probe sequence
aattcatgatgatagagtctgggac

SEQ ID NO: 97865 - DNA, 25 bp, Probe sequence
cacaatgtcctaggctctacaatgt

SEQ ID NO: 97866 - DNA, 25 bp, Probe sequence
catcacaatgtcctaggctctacaa

SEQ ID NO: 97867 - DNA, 25 bp, Probe sequence
gaagtttcaacgtcgaaaatgacga

SEQ ID NO: 97868 - DNA, 25 bp, Probe sequence
gacatcacaatgtcctaggctctac

SEQ ID NO: 97869 - DNA, 25 bp, Probe sequence
gatgatagagtctgggacatcacaa

SEQ ID NO: 97870 - DNA, 25 bp, Probe sequence
gatagagtctgggacatcacaatgt

SEQ ID NO: 97871 - DNA, 25 bp, Probe sequence
tacttatttgaagtttcaacgtcga

SEQ ID NO: 97872 - DNA, 25 bp, Probe sequence
atatctgcaaatactaaaatttata

SEQ ID NO: 97873 - DNA, 25 bp, Probe sequence
atagtacgttacattttacaaatga

SEQ ID NO: 97874 - DNA, 25 bp, Probe sequence
ataaaattgtgaggagtgtccaaac

SEQ ID NO: 97875 - DNA, 25 bp, Probe sequence
aggtgctattattggaacattgata

SEQ ID NO: 97876 - DNA, 25 bp, Probe sequence
aaagcctatcgaaaagcatgtgtag

SEQ ID NO: 97877 - DNA, 25 bp, Probe sequence
aaaagcctatcgaaaagcatgtgta

SEQ ID NO: 97878 - DNA, 25 bp, Probe sequence
aagcctatcgaaaagcatgtgtaga

SEQ ID NO: 97879 - DNA, 25 bp, Probe sequence
aaggtgctattattggaacattgat

SEQ ID NO: 97880 - DNA, 25 bp, Probe sequence
aatagtacgttacattttacaaatg

SEQ ID NO: 97881 - DNA, 25 bp, Probe sequence
gcctatcgaaaagcatgtgtagaaa

SEQ ID NO: 97882 - DNA, 25 bp, Probe sequence
gaaaaaatatctgcaaatactaaaa

SEQ ID NO: 97883 - DNA, 25 bp, Probe sequence
gtatgtaaggtgctattattggaac

SEQ ID NO: 97884 - DNA, 25 bp, Probe sequence
gtaaggtgctattattggaacattg

SEQ ID NO: 97885 - DNA, 25 bp, Probe sequence
gtgctattattggaacattgataaa

SEQ ID NO: 97886 - DNA, 25 bp, Probe sequence
ttgataaaattgtgaggagtgtcca

SEQ ID NO: 97887 - DNA, 25 bp, Probe sequence
atttctttaaattttggatatgctt

SEQ ID NO: 97888 - DNA, 25 bp, Probe sequence
agcgccccatcaaataaacactaac

SEQ ID NO: 97889 - DNA, 25 bp, Probe sequence
actttcacttagtttatttatcaca

SEQ ID NO: 97890 - DNA, 25 bp, Probe sequence
aatgctgttactgtttatttttatt

SEQ ID NO: 97891 - DNA, 25 bp, Probe sequence
cacagtgtaaagttgaaggggcgct

SEQ ID NO: 97892 - DNA, 25 bp, Probe sequence
gccccatcaaataaacactaacaca

SEQ ID NO: 97893 - DNA, 25 bp, Probe sequence
gaaggggcgctttcatatttgcttt

SEQ ID NO: 97894 - DNA, 25 bp, Probe sequence
gaaagcgccccatcaaataaacact

SEQ ID NO: 97895 - DNA, 25 bp, Probe sequence
gacatcttttattcaaaatgctgtt

SEQ ID NO: 97896 - DNA, 25 bp, Probe sequence
gtgaatttgaatcattactaaaaca

SEQ ID NO: 97897 - DNA, 25 bp, Probe sequence
gggcgctttcatatttgctttagaa

SEQ ID NO: 97898 - DNA, 25 bp, Probe sequence
ggatacatactttcacttagtttat

SEQ ID NO: 97899 - DNA, 25 bp, Probe sequence
tcaatattttgaaagcgccccatca

SEQ ID NO: 97900 - DNA, 25 bp, Probe sequence
ttatggatacatactttcacttagt

SEQ ID NO: 97901 - DNA, 25 bp, Probe sequence
ttggatatgcttttcaatattttga

SEQ ID NO: 97902 - DNA, 25 bp, Probe sequence
gtttagcgaacctccttagtggtat

SEQ ID NO: 97903 - DNA, 25 bp, Probe sequence
ataatgtttagcgaacctccttagt

SEQ ID NO: 97904 - DNA, 25 bp, Probe sequence
atgtttagcgaacctccttagtggt

SEQ ID NO: 97905 - DNA, 25 bp, Probe sequence
acctccttagtggtatataaatata

SEQ ID NO: 97906 - DNA, 25 bp, Probe sequence
aacttcatattataatgtttagcga

SEQ ID NO: 97907 - DNA, 25 bp, Probe sequence
aatgtttagcgaacctccttagtgg

SEQ ID NO: 97908 - DNA, 25 bp, Probe sequence
gcgaacctccttagtggtatataaa

SEQ ID NO: 97909 - DNA, 25 bp, Probe sequence
gaacctccttagtggtatataaata

SEQ ID NO: 97910 - DNA, 25 bp, Probe sequence
tgtttagcgaacctccttagtggta

SEQ ID NO: 97911 - DNA, 25 bp, Probe sequence
taatgtttagcgaacctccttagtg

SEQ ID NO: 97912 - DNA, 25 bp, Probe sequence
tagcgaacctccttagtggtatata

SEQ ID NO: 97913 - DNA, 25 bp, Probe sequence
tatatacatccaaggaggtttcact

SEQ ID NO: 97914 - DNA, 25 bp, Probe sequence
tatactataacataaaaacttcata

SEQ ID NO: 97915 - DNA, 25 bp, Probe sequence
tttagcgaacctccttagtggtata

SEQ ID NO: 97916 - DNA, 25 bp, Probe sequence
ttataatgtttagcgaacctcctta

SEQ ID NO: 97917 - DNA, 25 bp, Probe sequence
atattcgaattaagtgaggttatac

SEQ ID NO: 97918 - DNA, 25 bp, Probe sequence
atttgtcacacctttcttatactat

SEQ ID NO: 97919 - DNA, 25 bp, Probe sequence
atactatcttaactcaaaaaatgct

SEQ ID NO: 97920 - DNA, 25 bp, Probe sequence
acctttcttatactatcttaactca

SEQ ID NO: 97921 - DNA, 25 bp, Probe sequence
acacctttcttatactatcttaact

SEQ ID NO: 97922 - DNA, 25 bp, Probe sequence
aatgctaaaatgggaatatcaatat

SEQ ID NO: 97923 - DNA, 25 bp, Probe sequence
cacacctttcttatactatcttaac

SEQ ID NO: 97924 - DNA, 25 bp, Probe sequence
cacctttcttatactatcttaactc

SEQ ID NO: 97925 - DNA, 25 bp, Probe sequence
ctttcttatactatcttaactcaaa

SEQ ID NO: 97926 - DNA, 25 bp, Probe sequence
gtcacacctttcttatactatctta

SEQ ID NO: 97927 - DNA, 25 bp, Probe sequence
tgtcacacctttcttatactatctt

SEQ ID NO: 97928 - DNA, 25 bp, Probe sequence
tcacacctttcttatactatcttaa

SEQ ID NO: 97929 - DNA, 25 bp, Probe sequence
tttgtcacacctttcttatactatc

SEQ ID NO: 97930 - DNA, 25 bp, Probe sequence
ttcttatactatcttaactcaaaaa

SEQ ID NO: 97931 - DNA, 25 bp, Probe sequence
ttgtcacacctttcttatactatct

SEQ ID NO: 97932 - DNA, 25 bp, Probe sequence
atatgcctcgtgtactagtcagttt

SEQ ID NO: 97933 - DNA, 25 bp, Probe sequence
atgcctcgtgtactagtcagttttg

SEQ ID NO: 97934 - DNA, 25 bp, Probe sequence
aaactgactagttcgcaagcatagt

SEQ ID NO: 97935 - DNA, 25 bp, Probe sequence
aagtcataattttcaacgtaaggca

SEQ ID NO: 97936 - DNA, 25 bp, Probe sequence
caacgtaaggcaagtgtaaccacac

SEQ ID NO: 97937 - DNA, 25 bp, Probe sequence
cacaccataaaactaaaactgacta

SEQ ID NO: 97938 - DNA, 25 bp, Probe sequence
gcctcgtgtactagtcagttttgat

SEQ ID NO: 97939 - DNA, 25 bp, Probe sequence
gaatatgcctcgtgtactagtcagt

SEQ ID NO: 97940 - DNA, 25 bp, Probe sequence
gactagttcgcaagcatagtagaat

SEQ ID NO: 97941 - DNA, 25 bp, Probe sequence
gtagaatatgcctcgtgtactagtc

SEQ ID NO: 97942 - DNA, 25 bp, Probe sequence
gtaaggcaagtgtaaccacaccata

SEQ ID NO: 97943 - DNA, 25 bp, Probe sequence
gtcagttttgatttgattatagcta

SEQ ID NO: 97944 - DNA, 25 bp, Probe sequence
gtgtactagtcagttttgatttgat

SEQ ID NO: 97945 - DNA, 25 bp, Probe sequence
ggcaagtgtaaccacaccataaaac

SEQ ID NO: 97946 - DNA, 25 bp, Probe sequence
tcaaaggtaatcgatttaatcttat

SEQ ID NO: 97947 - DNA, 25 bp, Probe sequence
acggcaatacggactctatcgatac

SEQ ID NO: 97948 - DNA, 25 bp, Probe sequence
aagactttgtcttgcgtatttttat

SEQ ID NO: 97949 - DNA, 25 bp, Probe sequence
aatacggactctatcgatacgcaag

SEQ ID NO: 97950 - DNA, 25 bp, Probe sequence
ctatcgatacgcaagactttgtctt

SEQ ID NO: 97951 - DNA, 25 bp, Probe sequence
ctacggcaatacggactctatcgat

SEQ ID NO: 97952 - DNA, 25 bp, Probe sequence
cggactctatcgatacgcaagactt

SEQ ID NO: 97953 - DNA, 25 bp, Probe sequence
gcgtatttttatgcgtttctttaag

SEQ ID NO: 97954 - DNA, 25 bp, Probe sequence
gcaatacggactctatcgatacgca

SEQ ID NO: 97955 - DNA, 25 bp, Probe sequence
gactctatcgatacgcaagactttg

SEQ ID NO: 97956 - DNA, 25 bp, Probe sequence
gactttgtcttgcgtatttttatgc

SEQ ID NO: 97957 - DNA, 25 bp, Probe sequence
gtcttgcgtatttttatgcgtttct

SEQ ID NO: 97958 - DNA, 25 bp, Probe sequence
ggcaatacggactctatcgatacgc

SEQ ID NO: 97959 - DNA, 25 bp, Probe sequence
tacggactctatcgatacgcaagac

SEQ ID NO: 97960 - DNA, 25 bp, Probe sequence
tttgtcttgcgtatttttatgcgtt

SEQ ID NO: 97961 - DNA, 25 bp, Probe sequence
ttgcgtatttttatgcgtttcttta

SEQ ID NO: 97962 - DNA, 25 bp, Probe sequence
atagtcatctgagttgttcgtaagt

SEQ ID NO: 97963 - DNA, 25 bp, Probe sequence
atctgagttgttcgtaagtttgctt

SEQ ID NO: 97964 - DNA, 25 bp, Probe sequence
aacactctttgatcaagggagccca

SEQ ID NO: 97965 - DNA, 25 bp, Probe sequence
aagatagtcatctgagttgttcgta

SEQ ID NO: 97966 - DNA, 25 bp, Probe sequence
aatttgggcctaacactctttgatc

SEQ ID NO: 97967 - DNA, 25 bp, Probe sequence
gcctaacactctttgatcaagggag

SEQ ID NO: 97968 - DNA, 25 bp, Probe sequence
gtcatctgagttgttcgtaagtttg

SEQ ID NO: 97969 - DNA, 25 bp, Probe sequence
gggcctaacactctttgatcaaggg

SEQ ID NO: 97970 - DNA, 25 bp, Probe sequence
tgagttgttcgtaagtttgcttttt

SEQ ID NO: 97971 - DNA, 25 bp, Probe sequence
tgctttttaatttgggcctaacact

SEQ ID NO: 97972 - DNA, 25 bp, Probe sequence
tcaataaactttggtttgttataat

SEQ ID NO: 97973 - DNA, 25 bp, Probe sequence
tataacatcataagatagtcatctg

SEQ ID NO: 97974 - DNA, 25 bp, Probe sequence
tttgggcctaacactctttgatcaa

SEQ ID NO: 97975 - DNA, 25 bp, Probe sequence
ttaatttgggcctaacactctttga

SEQ ID NO: 97976 - DNA, 25 bp, Probe sequence
ttgggcctaacactctttgatcaag

SEQ ID NO: 97977 - DNA, 25 bp, Probe sequence
aaccaatgagggtggcaacacggat

SEQ ID NO: 97978 - DNA, 25 bp, Probe sequence
aatagtttgccgagggagatgtcaa

SEQ ID NO: 97979 - DNA, 25 bp, Probe sequence
caacacggatattcgtcccttgtgc

SEQ ID NO: 97980 - DNA, 25 bp, Probe sequence
caggctgtgcaagggctttttcttt

SEQ ID NO: 97981 - DNA, 25 bp, Probe sequence
gaacacaagaagaggtgctttatga

SEQ ID NO: 97982 - DNA, 25 bp, Probe sequence
gaaagattatgctgagtagtttata

SEQ ID NO: 97983 - DNA, 25 bp, Probe sequence
gaaataggtagcaatctaactaaga

SEQ ID NO: 97984 - DNA, 25 bp, Probe sequence
gtggcaacacggatattcgtccctt

SEQ ID NO: 97985 - DNA, 25 bp, Probe sequence
gatgattacaattaggcatgttttt

SEQ ID NO: 97986 - DNA, 25 bp, Probe sequence
gtgatcgtatatagttttagtttta

SEQ ID NO: 97987 - DNA, 25 bp, Probe sequence
tgggtttatttaatgcacgcttata

SEQ ID NO: 97988 - DNA, 25 bp, Probe sequence
tgcaagggctttttcttttgctttt

SEQ ID NO: 97989 - DNA, 25 bp, Probe sequence
tcccttgtgcagtttcaggctgtgc

SEQ ID NO: 97990 - DNA, 25 bp, Probe sequence
taaaaccgttagtattcttgaaatg

SEQ ID NO: 97991 - DNA, 25 bp, Probe sequence
taggcatgttttttaaaccaatgag

SEQ ID NO: 97992 - DNA, 25 bp, Probe sequence
ataacatcgtttatttatttcataa

SEQ ID NO: 97993 - DNA, 25 bp, Probe sequence
agatgattgagcattataccttaat

SEQ ID NO: 97994 - DNA, 25 bp, Probe sequence
actattcaacaagagtacctaaatc

SEQ ID NO: 97995 - DNA, 25 bp, Probe sequence
gacggacgtatgattggtgtgggac

SEQ ID NO: 97996 - DNA, 25 bp, Probe sequence
gaaacagtagatttaggtcgaattt

SEQ ID NO: 97997 - DNA, 25 bp, Probe sequence
gaaatccttcatcaaatgtataaga

SEQ ID NO: 97998 - DNA, 25 bp, Probe sequence
gagcattataccttaataacatcgt

SEQ ID NO: 97999 - DNA, 25 bp, Probe sequence
gatgttaggattttttatttactga

SEQ ID NO: 98000 - DNA, 25 bp, Probe sequence
gataaatatttatcgtcgacggacg

SEQ ID NO: 98001 - DNA, 25 bp, Probe sequence
gtatacaaattaaactcgctcaagt

SEQ ID NO: 98002 - DNA, 25 bp, Probe sequence
gtacctaaatcattgtttaaggcga

SEQ ID NO: 98003 - DNA, 25 bp, Probe sequence
gtcgacggacgtatgattggtgtgg

SEQ ID NO: 98004 - DNA, 25 bp, Probe sequence
tggtgtgggacaaatactattcaac

SEQ ID NO: 98005 - DNA, 25 bp, Probe sequence
tattacgattaatgacgacaggata

SEQ ID NO: 98006 - DNA, 25 bp, Probe sequence
ttaagttttcttaacatgagatgtt

SEQ ID NO: 98007 - DNA, 25 bp, Probe sequence
atatataaataagttcccgcattca

SEQ ID NO: 98008 - DNA, 25 bp, Probe sequence
atataaataagttcccgcattcatt

SEQ ID NO: 98009 - DNA, 25 bp, Probe sequence
agagttcacataccgctttttactt

SEQ ID NO: 98010 - DNA, 25 bp, Probe sequence
acaataaagagttcacataccgctt

SEQ ID NO: 98011 - DNA, 25 bp, Probe sequence
aaatggtataattaaagtcttgatt

SEQ ID NO: 98012 - DNA, 25 bp, Probe sequence
aagagttcacataccgctttttact

SEQ ID NO: 98013 - DNA, 25 bp, Probe sequence
aatgaattaagcggtatgtgaaaca

SEQ ID NO: 98014 - DNA, 25 bp, Probe sequence
gaattaagcggtatgtgaaacaata

SEQ ID NO: 98015 - DNA, 25 bp, Probe sequence
gagttcacataccgctttttacttt

SEQ ID NO: 98016 - DNA, 25 bp, Probe sequence
gttcacataccgctttttactttat

SEQ ID NO: 98017 - DNA, 25 bp, Probe sequence
tcacataccgctttttactttattt

SEQ ID NO: 98018 - DNA, 25 bp, Probe sequence
taaagagttcacataccgcttttta

SEQ ID NO: 98019 - DNA, 25 bp, Probe sequence
taaataagttcccgcattcattttt

SEQ ID NO: 98020 - DNA, 25 bp, Probe sequence
ttcacataccgctttttactttatt

SEQ ID NO: 98021 - DNA, 25 bp, Probe sequence
ttcccgcattcatttttaaaaaatg

SEQ ID NO: 98022 - DNA, 25 bp, Probe sequence
atatctatgactatttttactccct

SEQ ID NO: 98023 - DNA, 25 bp, Probe sequence
agtagtatgtagaatagcttatttt

SEQ ID NO: 98024 - DNA, 25 bp, Probe sequence
aacttgcgttataaaatagtattca

SEQ ID NO: 98025 - DNA, 25 bp, Probe sequence
catacgtaaataatgaggtgttcat

SEQ ID NO: 98026 - DNA, 25 bp, Probe sequence
ctccctgctctagtatgttaatatg

SEQ ID NO: 98027 - DNA, 25 bp, Probe sequence
ccctgctctagtatgttaatatgta

SEQ ID NO: 98028 - DNA, 25 bp, Probe sequence
gaaacgaatagcgtttcatcctttt

SEQ ID NO: 98029 - DNA, 25 bp, Probe sequence
gtataaggctaataaattttgtaag

SEQ ID NO: 98030 - DNA, 25 bp, Probe sequence
gtagaatagcttatttttattccaa

SEQ ID NO: 98031 - DNA, 25 bp, Probe sequence
gtaagaaagatttaacttgcgttat

SEQ ID NO: 98032 - DNA, 25 bp, Probe sequence
tctatgactatttttactccctgct

SEQ ID NO: 98033 - DNA, 25 bp, Probe sequence
tactccctgctctagtatgttaata

SEQ ID NO: 98034 - DNA, 25 bp, Probe sequence
tttactccctgctctagtatgttaa

SEQ ID NO: 98035 - DNA, 25 bp, Probe sequence
tttttactccctgctctagtatgtt

SEQ ID NO: 98036 - DNA, 25 bp, Probe sequence
ttcatcctttttaagttataagtag

SEQ ID NO: 98037 - DNA, 25 bp, Probe sequence
atttacaatatataaggggctctaa

SEQ ID NO: 98038 - DNA, 25 bp, Probe sequence
atttggtattcggaaatatcagcaa

SEQ ID NO: 98039 - DNA, 25 bp, Probe sequence
ataaggggctctaatatgctataat

SEQ ID NO: 98040 - DNA, 25 bp, Probe sequence
agtaaatttaaaagcaactgcataa

SEQ ID NO: 98041 - DNA, 25 bp, Probe sequence
agagcccctaattatttacaatata

SEQ ID NO: 98042 - DNA, 25 bp, Probe sequence
aaaagtatcatatttggtattcgga

SEQ ID NO: 98043 - DNA, 25 bp, Probe sequence
aagagcccctaattatttacaatat

SEQ ID NO: 98044 - DNA, 25 bp, Probe sequence
aagtatcatatttggtattcggaaa

SEQ ID NO: 98045 - DNA, 25 bp, Probe sequence
aatatcagcaatttgagtaaagtaa

SEQ ID NO: 98046 - DNA, 25 bp, Probe sequence
cataagagcccctaattatttacaa

SEQ ID NO: 98047 - DNA, 25 bp, Probe sequence
gctctaatatgctataattattggg

SEQ ID NO: 98048 - DNA, 25 bp, Probe sequence
ggggctctaatatgctataattatt

SEQ ID NO: 98049 - DNA, 25 bp, Probe sequence
ggtattcggaaatatcagcaatttg

SEQ ID NO: 98050 - DNA, 25 bp, Probe sequence
taaggggctctaatatgctataatt

SEQ ID NO: 98051 - DNA, 25 bp, Probe sequence
taagagcccctaattatttacaata

SEQ ID NO: 98052 - DNA, 25 bp, Probe sequence
agtgaatcttctggtgttttttact

SEQ ID NO: 98053 - DNA, 25 bp, Probe sequence
agttaacaccagaagtgaatcttct

SEQ ID NO: 98054 - DNA, 25 bp, Probe sequence
ctagttaacaccagaagtgaatctt

SEQ ID NO: 98055 - DNA, 25 bp, Probe sequence
gaattttagacgttatactaaatgt

SEQ ID NO: 98056 - DNA, 25 bp, Probe sequence
gaagtgaatcttctggtgtttttta

SEQ ID NO: 98057 - DNA, 25 bp, Probe sequence
gtctagttaacaccagaagtgaatc

SEQ ID NO: 98058 - DNA, 25 bp, Probe sequence
gtgaatcttctggtgttttttactt

SEQ ID NO: 98059 - DNA, 25 bp, Probe sequence
ggaattttagacgttatactaaatg

SEQ ID NO: 98060 - DNA, 25 bp, Probe sequence
tgtctagttaacaccagaagtgaat

SEQ ID NO: 98061 - DNA, 25 bp, Probe sequence
tgaatcttctggtgttttttacttt

SEQ ID NO: 98062 - DNA, 25 bp, Probe sequence
tctagttaacaccagaagtgaatct

SEQ ID NO: 98063 - DNA, 25 bp, Probe sequence
tagttaacaccagaagtgaatcttc

SEQ ID NO: 98064 - DNA, 25 bp, Probe sequence
tttgtctagttaacaccagaagtga

SEQ ID NO: 98065 - DNA, 25 bp, Probe sequence
ttttgtctagttaacaccagaagtg

SEQ ID NO: 98066 - DNA, 25 bp, Probe sequence
ttgtctagttaacaccagaagtgaa

SEQ ID NO: 98067 - DNA, 25 bp, Probe sequence
atgactcgagttgcgaccgaaacaa

SEQ ID NO: 98068 - DNA, 25 bp, Probe sequence
atgtcacctatgtatggcgtgactt

SEQ ID NO: 98069 - DNA, 25 bp, Probe sequence
acctatgtatggcgtgacttattat

SEQ ID NO: 98070 - DNA, 25 bp, Probe sequence
acaacgtagagtgcaaacgcttgac

SEQ ID NO: 98071 - DNA, 25 bp, Probe sequence
aacgaaatgtcacctatgtatggcg

SEQ ID NO: 98072 - DNA, 25 bp, Probe sequence
caaacgcttgactcaataacgaaat

SEQ ID NO: 98073 - DNA, 25 bp, Probe sequence
cgagttgcgaccgaaacaacgtaga

SEQ ID NO: 98074 - DNA, 25 bp, Probe sequence
cgaaatgtcacctatgtatggcgtg

SEQ ID NO: 98075 - DNA, 25 bp, Probe sequence
gcgaccgaaacaacgtagagtgcaa

SEQ ID NO: 98076 - DNA, 25 bp, Probe sequence
gactcgagttgcgaccgaaacaacg

SEQ ID NO: 98077 - DNA, 25 bp, Probe sequence
gactcaataacgaaatgtcacctat

SEQ ID NO: 98078 - DNA, 25 bp, Probe sequence
gaccgaaacaacgtagagtgcaaac

SEQ ID NO: 98079 - DNA, 25 bp, Probe sequence
gtgacttattatacaggaggtgcaa

SEQ ID NO: 98080 - DNA, 25 bp, Probe sequence
ggcgtgacttattatacaggaggtg

SEQ ID NO: 98081 - DNA, 25 bp, Probe sequence
tatggcgtgacttattatacaggag

SEQ ID NO: 98082 - DNA, 25 bp, Probe sequence
ataagtagctacatacaaccgctca

SEQ ID NO: 98083 - DNA, 25 bp, Probe sequence
atacaaccgctcaaatataggttca

SEQ ID NO: 98084 - DNA, 25 bp, Probe sequence
agtagctacatacaaccgctcaaat

SEQ ID NO: 98085 - DNA, 25 bp, Probe sequence
agctacatacaaccgctcaaatata

SEQ ID NO: 98086 - DNA, 25 bp, Probe sequence
acaaccgctcaaatataggttcaag

SEQ ID NO: 98087 - DNA, 25 bp, Probe sequence
aagtagctacatacaaccgctcaaa

SEQ ID NO: 98088 - DNA, 25 bp, Probe sequence
ctacatacaaccgctcaaatatagg

SEQ ID NO: 98089 - DNA, 25 bp, Probe sequence
ccgctcaaatataggttcaagaaca

SEQ ID NO: 98090 - DNA, 25 bp, Probe sequence
gctacatacaaccgctcaaatatag

SEQ ID NO: 98091 - DNA, 25 bp, Probe sequence
gatgcaatagttgagtagttataag

SEQ ID NO: 98092 - DNA, 25 bp, Probe sequence
gttataagtagctacatacaaccgc

SEQ ID NO: 98093 - DNA, 25 bp, Probe sequence
gtagctacatacaaccgctcaaata

SEQ ID NO: 98094 - DNA, 25 bp, Probe sequence
taagtagctacatacaaccgctcaa

SEQ ID NO: 98095 - DNA, 25 bp, Probe sequence
tacatacaaccgctcaaatataggt

SEQ ID NO: 98096 - DNA, 25 bp, Probe sequence
tataggttcaagaacatttttaatg

SEQ ID NO: 98097 - DNA, 25 bp, Probe sequence
attcgtagttagtgctttatttcat

SEQ ID NO: 98098 - DNA, 25 bp, Probe sequence
atgccacaaattttttacggagttg

SEQ ID NO: 98099 - DNA, 25 bp, Probe sequence
agtaattcgtagttagtgctttatt

SEQ ID NO: 98100 - DNA, 25 bp, Probe sequence
actactagtgactggaatgtttgct

SEQ ID NO: 98101 - DNA, 25 bp, Probe sequence
aaatcgattatttaaactactagtg

SEQ ID NO: 98102 - DNA, 25 bp, Probe sequence
aaaggatatacaatattttgacata

SEQ ID NO: 98103 - DNA, 25 bp, Probe sequence
gaatgtttgctagtagttttttgtt

SEQ ID NO: 98104 - DNA, 25 bp, Probe sequence
gttcattttcaaagtaattcgtagt

SEQ ID NO: 98105 - DNA, 25 bp, Probe sequence
gttagtgctttatttcataatggga

SEQ ID NO: 98106 - DNA, 25 bp, Probe sequence
gtagttagtgctttatttcataatg

SEQ ID NO: 98107 - DNA, 25 bp, Probe sequence
gtgctttatttcataatgggagtaa

SEQ ID NO: 98108 - DNA, 25 bp, Probe sequence
gtgactggaatgtttgctagtagtt

SEQ ID NO: 98109 - DNA, 25 bp, Probe sequence
ggagttgttcattttcaaagtaatt

SEQ ID NO: 98110 - DNA, 25 bp, Probe sequence
tttacggagttgttcattttcaaag

SEQ ID NO: 98111 - DNA, 25 bp, Probe sequence
ttttgacataatagaggtgttctgg

SEQ ID NO: 98112 - DNA, 25 bp, Probe sequence
attttagttatcctgtcactagaat

SEQ ID NO: 98113 - DNA, 25 bp, Probe sequence
atattttagttatcctgtcactaga

SEQ ID NO: 98114 - DNA, 25 bp, Probe sequence
atatattttagttatcctgtcacta

SEQ ID NO: 98115 - DNA, 25 bp, Probe sequence
atcctgtcactagaataaatttaaa

SEQ ID NO: 98116 - DNA, 25 bp, Probe sequence
agttatcctgtcactagaataaatt

SEQ ID NO: 98117 - DNA, 25 bp, Probe sequence
aaatatattttagttatcctgtcac

SEQ ID NO: 98118 - DNA, 25 bp, Probe sequence
aatatattttagttatcctgtcact

SEQ ID NO: 98119 - DNA, 25 bp, Probe sequence
gaaatatattttagttatcctgtca

SEQ ID NO: 98120 - DNA, 25 bp, Probe sequence
gttatcctgtcactagaataaattt

SEQ ID NO: 98121 - DNA, 25 bp, Probe sequence
tagttatcctgtcactagaataaat

SEQ ID NO: 98122 - DNA, 25 bp, Probe sequence
tatattttagttatcctgtcactag

SEQ ID NO: 98123 - DNA, 25 bp, Probe sequence
tattttagttatcctgtcactagaa

SEQ ID NO: 98124 - DNA, 25 bp, Probe sequence
tttagttatcctgtcactagaataa

SEQ ID NO: 98125 - DNA, 25 bp, Probe sequence
ttttagttatcctgtcactagaata

SEQ ID NO: 98126 - DNA, 25 bp, Probe sequence
ttagttatcctgtcactagaataaa

SEQ ID NO: 98127 - DNA, 25 bp, Probe sequence
atgaacgtgcatcagtcctaagata

SEQ ID NO: 98128 - DNA, 25 bp, Probe sequence
acgtgcatcagtcctaagatatatc

SEQ ID NO: 98129 - DNA, 25 bp, Probe sequence
aaatgaacgtgcatcagtcctaaga

SEQ ID NO: 98130 - DNA, 25 bp, Probe sequence
aagctattttaaatgaacgtgcatc

SEQ ID NO: 98131 - DNA, 25 bp, Probe sequence
catgattaaggctgaagactgagga

SEQ ID NO: 98132 - DNA, 25 bp, Probe sequence
cctcctcatacgcttttaaatcata

SEQ ID NO: 98133 - DNA, 25 bp, Probe sequence
gcatcagtcctaagatatatcatga

SEQ ID NO: 98134 - DNA, 25 bp, Probe sequence
gaacgtgcatcagtcctaagatata

SEQ ID NO: 98135 - DNA, 25 bp, Probe sequence
gtgcatcagtcctaagatatatcat

SEQ ID NO: 98136 - DNA, 25 bp, Probe sequence
ggctgaagactgaggaaaatataca

SEQ ID NO: 98137 - DNA, 25 bp, Probe sequence
tcctcatacgcttttaaatcataac

SEQ ID NO: 98138 - DNA, 25 bp, Probe sequence
tcatacgcttttaaatcataacaaa

SEQ ID NO: 98139 - DNA, 25 bp, Probe sequence
tcagtcctaagatatatcatgatta

SEQ ID NO: 98140 - DNA, 25 bp, Probe sequence
tagatgaagacattggaggcgaact

SEQ ID NO: 98141 - DNA, 25 bp, Probe sequence
ttaaatgaacgtgcatcagtcctaa

SEQ ID NO: 98142 - DNA, 25 bp, Probe sequence
agtagtatccgtgcttgaaaccaaa

SEQ ID NO: 98143 - DNA, 25 bp, Probe sequence
agtatccgtgcttgaaaccaaatta

SEQ ID NO: 98144 - DNA, 25 bp, Probe sequence
aagtagtatccgtgcttgaaaccaa

SEQ ID NO: 98145 - DNA, 25 bp, Probe sequence
aatctgttcatcaagtagtatccgt

SEQ ID NO: 98146 - DNA, 25 bp, Probe sequence
aattctaaactagtacattaggagt

SEQ ID NO: 98147 - DNA, 25 bp, Probe sequence
ctgttcatcaagtagtatccgtgct

SEQ ID NO: 98148 - DNA, 25 bp, Probe sequence
gttcatcaagtagtatccgtgcttg

SEQ ID NO: 98149 - DNA, 25 bp, Probe sequence
gtagtatccgtgcttgaaaccaaat

SEQ ID NO: 98150 - DNA, 25 bp, Probe sequence
gtacattaggagttttgttatgcag

SEQ ID NO: 98151 - DNA, 25 bp, Probe sequence
gtaatctgttcatcaagtagtatcc

SEQ ID NO: 98152 - DNA, 25 bp, Probe sequence
tgaaaccaaattaaaactcctaatg

SEQ ID NO: 98153 - DNA, 25 bp, Probe sequence
tctgttcatcaagtagtatccgtgc

SEQ ID NO: 98154 - DNA, 25 bp, Probe sequence
taaaactcctaatgtggaactagtt

SEQ ID NO: 98155 - DNA, 25 bp, Probe sequence
tatccgtgcttgaaaccaaattaaa

SEQ ID NO: 98156 - DNA, 25 bp, Probe sequence
ttaggagttttgttatgcagaataa

SEQ ID NO: 98157 - DNA, 25 bp, Probe sequence
attgtctttggataaaattgtctaa

SEQ ID NO: 98158 - DNA, 25 bp, Probe sequence
atgtcgataaagtaggaatggggga

SEQ ID NO: 98159 - DNA, 25 bp, Probe sequence
agttgcactgttgtattgtctttgg

SEQ ID NO: 98160 - DNA, 25 bp, Probe sequence
aaggctgcgataaaggacagtgact

SEQ ID NO: 98161 - DNA, 25 bp, Probe sequence
aattgaaacctccttatgtaactga

SEQ ID NO: 98162 - DNA, 25 bp, Probe sequence
gcactgttgtattgtctttggataa

SEQ ID NO: 98163 - DNA, 25 bp, Probe sequence
gaaacctccttatgtaactgaatat

SEQ ID NO: 98164 - DNA, 25 bp, Probe sequence
gacacttcagatggacgttttcttc

SEQ ID NO: 98165 - DNA, 25 bp, Probe sequence
gagaagccactgtctttactaaaaa

SEQ ID NO: 98166 - DNA, 25 bp, Probe sequence
gatggacgttttcttcaaaataata

SEQ ID NO: 98167 - DNA, 25 bp, Probe sequence
gataagagaagccactgtctttact

SEQ ID NO: 98168 - DNA, 25 bp, Probe sequence
gattgtatcatcttttcattttaga

SEQ ID NO: 98169 - DNA, 25 bp, Probe sequence
gtaattttgcacttgacacttcaga

SEQ ID NO: 98170 - DNA, 25 bp, Probe sequence
tgcacttgacacttcagatggacgt

SEQ ID NO: 98171 - DNA, 25 bp, Probe sequence
taaacctttatatgtaattttgcac

SEQ ID NO: 98172 - DNA, 25 bp, Probe sequence
ataaggttcaatttcttgccattat

SEQ ID NO: 98173 - DNA, 25 bp, Probe sequence
ataatttacataaggaggttgtcat

SEQ ID NO: 98174 - DNA, 25 bp, Probe sequence
aaatcgtatgtgtttataaggttca

SEQ ID NO: 98175 - DNA, 25 bp, Probe sequence
aatcaataggtagagcttcatggtt

SEQ ID NO: 98176 - DNA, 25 bp, Probe sequence
gccattattaattttgccgagcagt

SEQ ID NO: 98177 - DNA, 25 bp, Probe sequence
gcttcatggttattttttatgctct

SEQ ID NO: 98178 - DNA, 25 bp, Probe sequence
gtatccatcaattatgcttagcaat

SEQ ID NO: 98179 - DNA, 25 bp, Probe sequence
ggtagagcttcatggttatttttta

SEQ ID NO: 98180 - DNA, 25 bp, Probe sequence
ggttcaatttcttgccattattaat

SEQ ID NO: 98181 - DNA, 25 bp, Probe sequence
tgggttgttaaagtatccatcaatt

SEQ ID NO: 98182 - DNA, 25 bp, Probe sequence
tgaaaaagcggttcaattcttgaaa

SEQ ID NO: 98183 - DNA, 25 bp, Probe sequence
tacattttggtaataactaactata

SEQ ID NO: 98184 - DNA, 25 bp, Probe sequence
tagccatgaagaatctatttaatca

SEQ ID NO: 98185 - DNA, 25 bp, Probe sequence
tttgccgagcagtaatgggttgtta

SEQ ID NO: 98186 - DNA, 25 bp, Probe sequence
tttatgctctaaatcgtatgtgttt

SEQ ID NO: 98187 - DNA, 25 bp, Probe sequence
aacatccttcttgaatataggtggt

SEQ ID NO: 98188 - DNA, 25 bp, Probe sequence
gaatttgatattaaacatccttctt

SEQ ID NO: 98189 - DNA, 25 bp, Probe sequence
gaagcatttcaaatttcacgatgat

SEQ ID NO: 98190 - DNA, 25 bp, Probe sequence
gacttattttgtcaatcattatact

SEQ ID NO: 98191 - DNA, 25 bp, Probe sequence
gagcgttaatcataatctagagtgc

SEQ ID NO: 98192 - DNA, 25 bp, Probe sequence
gagagcatatgatttggtgtgagta

SEQ ID NO: 98193 - DNA, 25 bp, Probe sequence
gtatcttagctgaacgtgattaata

SEQ ID NO: 98194 - DNA, 25 bp, Probe sequence
gtaggctaagacgtgtttgagcgtt

SEQ ID NO: 98195 - DNA, 25 bp, Probe sequence
ggtggtaccacggaatatccgtcct

SEQ ID NO: 98196 - DNA, 25 bp, Probe sequence
ggtagcccacagagtatcttagctg

SEQ ID NO: 98197 - DNA, 25 bp, Probe sequence
ggtatgattattccaattatgttaa

SEQ ID NO: 98198 - DNA, 25 bp, Probe sequence
ggaatatccgtcctatttgtatata

SEQ ID NO: 98199 - DNA, 25 bp, Probe sequence
tgatttttactgaaggtagcccaca

SEQ ID NO: 98200 - DNA, 25 bp, Probe sequence
tcccacctatacattgacttatttt

SEQ ID NO: 98201 - DNA, 25 bp, Probe sequence
tttattcccacctatacattgactt

SEQ ID NO: 98202 - DNA, 25 bp, Probe sequence
agttgaattatgcttaggatagaat

SEQ ID NO: 98203 - DNA, 25 bp, Probe sequence
agatatctaatattagcagtgcatt

SEQ ID NO: 98204 - DNA, 25 bp, Probe sequence
agcagtgcattaacttggaacttta

SEQ ID NO: 98205 - DNA, 25 bp, Probe sequence
acgagacagtctattagttaaaaat

SEQ ID NO: 98206 - DNA, 25 bp, Probe sequence
actatcatccatttaagttgaatta

SEQ ID NO: 98207 - DNA, 25 bp, Probe sequence
aaatagatgatgtctcgtttacttt

SEQ ID NO: 98208 - DNA, 25 bp, Probe sequence
gcaaaggttgtacatctatttttag

SEQ ID NO: 98209 - DNA, 25 bp, Probe sequence
gatgtctcgtttactttatgatgct

SEQ ID NO: 98210 - DNA, 25 bp, Probe sequence
gatgatgtctcgtttactttatgat

SEQ ID NO: 98211 - DNA, 25 bp, Probe sequence
gtttactttatgatgctatagcaaa

SEQ ID NO: 98212 - DNA, 25 bp, Probe sequence
gtctcgtttactttatgatgctata

SEQ ID NO: 98213 - DNA, 25 bp, Probe sequence
ggatagaattcattattaaggttta

SEQ ID NO: 98214 - DNA, 25 bp, Probe sequence
ggaactttaacttatgatttgaata

SEQ ID NO: 98215 - DNA, 25 bp, Probe sequence
taacttggaactttaacttatgatt

SEQ ID NO: 98216 - DNA, 25 bp, Probe sequence
ttcacatcaaaaaacgagacagtct

SEQ ID NO: 98217 - DNA, 25 bp, Probe sequence
atatacggacaaattgagagcctga

SEQ ID NO: 98218 - DNA, 25 bp, Probe sequence
atgtatatcaggcatgggcggcgac

SEQ ID NO: 98219 - DNA, 25 bp, Probe sequence
acggacaaattgagagcctgaactt

SEQ ID NO: 98220 - DNA, 25 bp, Probe sequence
actttgttcaggctctttttaaatg

SEQ ID NO: 98221 - DNA, 25 bp, Probe sequence
aaattgagagcctgaactttgttca

SEQ ID NO: 98222 - DNA, 25 bp, Probe sequence
aatgtatatcaggcatgggcggcga

SEQ ID NO: 98223 - DNA, 25 bp, Probe sequence
aattgagagcctgaactttgttcag

SEQ ID NO: 98224 - DNA, 25 bp, Probe sequence
cggacaaattgagagcctgaacttt

SEQ ID NO: 98225 - DNA, 25 bp, Probe sequence
ctttgttcaggctctttttaaatgt

SEQ ID NO: 98226 - DNA, 25 bp, Probe sequence
gttcaggctctttttaaatgtatat

SEQ ID NO: 98227 - DNA, 25 bp, Probe sequence
ggctctttttaaatgtatatcaggc

SEQ ID NO: 98228 - DNA, 25 bp, Probe sequence
tgaactttgttcaggctctttttaa

SEQ ID NO: 98229 - DNA, 25 bp, Probe sequence
tcaggctctttttaaatgtatatca

SEQ ID NO: 98230 - DNA, 25 bp, Probe sequence
tttgttcaggctctttttaaatgta

SEQ ID NO: 98231 - DNA, 25 bp, Probe sequence
ttgttcaggctctttttaaatgtat

SEQ ID NO: 98232 - DNA, 25 bp, Probe sequence
atttttcaacgttcatcattttgtc

SEQ ID NO: 98233 - DNA, 25 bp, Probe sequence
acatttttcaacgttcatcattttg

SEQ ID NO: 98234 - DNA, 25 bp, Probe sequence
aacgttcatcattttgtcaaaaact

SEQ ID NO: 98235 - DNA, 25 bp, Probe sequence
aagcatcgtacttaattggatttta

SEQ ID NO: 98236 - DNA, 25 bp, Probe sequence
gcacgaaacttttaattagtacaca

SEQ ID NO: 98237 - DNA, 25 bp, Probe sequence
gataacatttttcaacgttcatcat

SEQ ID NO: 98238 - DNA, 25 bp, Probe sequence
gttcatcattttgtcaaaaactcaa

SEQ ID NO: 98239 - DNA, 25 bp, Probe sequence
gtattgttagtatatatgggggcgt

SEQ ID NO: 98240 - DNA, 25 bp, Probe sequence
gttagtatatatgggggcgtttcaa

SEQ ID NO: 98241 - DNA, 25 bp, Probe sequence
taatgtaagcacgaaacttttaatt

SEQ ID NO: 98242 - DNA, 25 bp, Probe sequence
taacatttttcaacgttcatcattt

SEQ ID NO: 98243 - DNA, 25 bp, Probe sequence
tagtacacaattgataacatttttc

SEQ ID NO: 98244 - DNA, 25 bp, Probe sequence
ttttcaacgttcatcattttgtcaa

SEQ ID NO: 98245 - DNA, 25 bp, Probe sequence
ttataatttatttaagcatcgtact

SEQ ID NO: 98246 - DNA, 25 bp, Probe sequence
ttcaacgttcatcattttgtcaaaa

SEQ ID NO: 98247 - DNA, 25 bp, Probe sequence
atcggagcttttttataatgtatac

SEQ ID NO: 98248 - DNA, 25 bp, Probe sequence
actttgatcggagcttttttataat

SEQ ID NO: 98249 - DNA, 25 bp, Probe sequence
aagctccaatcaaagttgacgctca

SEQ ID NO: 98250 - DNA, 25 bp, Probe sequence
aatgtataccgaaaggttcaaatat

SEQ ID NO: 98251 - DNA, 25 bp, Probe sequence
aatagtttaactttgatcggagctt

SEQ ID NO: 98252 - DNA, 25 bp, Probe sequence
ccgaaaggttcaaatattatataat

SEQ ID NO: 98253 - DNA, 25 bp, Probe sequence
gctccaatcaaagttgacgctcaaa

SEQ ID NO: 98254 - DNA, 25 bp, Probe sequence
gaaaagctccaatcaaagttgacgc

SEQ ID NO: 98255 - DNA, 25 bp, Probe sequence
gttgacgctcaaatagtttaacttt

SEQ ID NO: 98256 - DNA, 25 bp, Probe sequence
gttataaaagtgaaaagctccaatc

SEQ ID NO: 98257 - DNA, 25 bp, Probe sequence
ggagcttttttataatgtataccga

SEQ ID NO: 98258 - DNA, 25 bp, Probe sequence
tgatcggagcttttttataatgtat

SEQ ID NO: 98259 - DNA, 25 bp, Probe sequence
tagtttaactttgatcggagctttt

SEQ ID NO: 98260 - DNA, 25 bp, Probe sequence
tttgatcggagcttttttataatgt

SEQ ID NO: 98261 - DNA, 25 bp, Probe sequence
ttaactttgatcggagcttttttat

SEQ ID NO: 98262 - DNA, 25 bp, Probe sequence
atatgttgcattgtaatatccaatc

SEQ ID NO: 98263 - DNA, 25 bp, Probe sequence
atctgctactattctttaagcaaaa

SEQ ID NO: 98264 - DNA, 25 bp, Probe sequence
atgtatctgctactattctttaagc

SEQ ID NO: 98265 - DNA, 25 bp, Probe sequence
aaagtttgtatgttaatatgttgca

SEQ ID NO: 98266 - DNA, 25 bp, Probe sequence
aatgagtagcagatgcatagcttat

SEQ ID NO: 98267 - DNA, 25 bp, Probe sequence
gcttatgtatctgctactattcttt

SEQ ID NO: 98268 - DNA, 25 bp, Probe sequence
gcatagcttatgtatctgctactat

SEQ ID NO: 98269 - DNA, 25 bp, Probe sequence
gatgcatagcttatgtatctgctac

SEQ ID NO: 98270 - DNA, 25 bp, Probe sequence
tccaatctagtatagtctttaacga

SEQ ID NO: 98271 - DNA, 25 bp, Probe sequence
gttgcattgtaatatccaatctagt

SEQ ID NO: 98272 - DNA, 25 bp, Probe sequence
gtatagtctttaacgaataggggtg

SEQ ID NO: 98273 - DNA, 25 bp, Probe sequence
gtatctgctactattctttaagcaa

SEQ ID NO: 98274 - DNA, 25 bp, Probe sequence
gtagcagatgcatagcttatgtatc

SEQ ID NO: 98275 - DNA, 25 bp, Probe sequence
gtaatatccaatctagtatagtctt

SEQ ID NO: 98276 - DNA, 25 bp, Probe sequence
ttatgtatctgctactattctttaa

SEQ ID NO: 98277 - DNA, 25 bp, Probe sequence
attgttgcaaaataatactcagcat

SEQ ID NO: 98278 - DNA, 25 bp, Probe sequence
atataaacgttgtgatttcaatgtt

SEQ ID NO: 98279 - DNA, 25 bp, Probe sequence
agggaatagacctatgatataatag

SEQ ID NO: 98280 - DNA, 25 bp, Probe sequence
acgttgtgatttcaatgtttgtata

SEQ ID NO: 98281 - DNA, 25 bp, Probe sequence
aaattagttaatcatggaggtatat

SEQ ID NO: 98282 - DNA, 25 bp, Probe sequence
aacgttgtgatttcaatgtttgtat

SEQ ID NO: 98283 - DNA, 25 bp, Probe sequence
aataatactcagcattttaatatag

SEQ ID NO: 98284 - DNA, 25 bp, Probe sequence
aatactcagcattttaatatagttt

SEQ ID NO: 98285 - DNA, 25 bp, Probe sequence
cagcattttaatatagttttgacga

SEQ ID NO: 98286 - DNA, 25 bp, Probe sequence
gcattttaatatagttttgacgaaa

SEQ ID NO: 98287 - DNA, 25 bp, Probe sequence
gttgtgatttcaatgtttgtatagg

SEQ ID NO: 98288 - DNA, 25 bp, Probe sequence
gtgatttcaatgtttgtatagggaa

SEQ ID NO: 98289 - DNA, 25 bp, Probe sequence
tgttgcaaaataatactcagcattt

SEQ ID NO: 98290 - DNA, 25 bp, Probe sequence
tcaatgtttgtatagggaatagacc

SEQ ID NO: 98291 - DNA, 25 bp, Probe sequence
tagttaatcatggaggtatatatac

SEQ ID NO: 98292 - DNA, 25 bp, Probe sequence
atgacatatttgctaaaatgcattt

SEQ ID NO: 98293 - DNA, 25 bp, Probe sequence
atggcattgtcatctcttttttatt

SEQ ID NO: 98294 - DNA, 25 bp, Probe sequence
aaaatgccacatttaatcgctaaaa

SEQ ID NO: 98295 - DNA, 25 bp, Probe sequence
aagcaaaatgccacatttaatcgct

SEQ ID NO: 98296 - DNA, 25 bp, Probe sequence
aatgccacatttaatcgctaaaata

SEQ ID NO: 98297 - DNA, 25 bp, Probe sequence
cattgtcatctcttttttatttttt

SEQ ID NO: 98298 - DNA, 25 bp, Probe sequence
gcattgtcatctcttttttattttt

SEQ ID NO: 98299 - DNA, 25 bp, Probe sequence
gacatatttgctaaaatgcatttaa

SEQ ID NO: 98300 - DNA, 25 bp, Probe sequence
gagaacaaacattaaagtgaggagt

SEQ ID NO: 98301 - DNA, 25 bp, Probe sequence
gagatggcattgtcatctctttttt

SEQ ID NO: 98302 - DNA, 25 bp, Probe sequence
gatggcattgtcatctcttttttat

SEQ ID NO: 98303 - DNA, 25 bp, Probe sequence
ggcattgtcatctcttttttatttt

SEQ ID NO: 98304 - DNA, 25 bp, Probe sequence
tggcattgtcatctcttttttattt

SEQ ID NO: 98305 - DNA, 25 bp, Probe sequence
tgccacatttaatcgctaaaatatg

SEQ ID NO: 98306 - DNA, 25 bp, Probe sequence
tttaatcgctaaaatatgacatatt

SEQ ID NO: 98307 - DNA, 25 bp, Probe sequence
aaagcagttggcaggttaatcacat

SEQ ID NO: 98308 - DNA, 25 bp, Probe sequence
aacgaaccaagtagaagcacccgct

SEQ ID NO: 98309 - DNA, 25 bp, Probe sequence
caagtagaagcacccgcttctcacc

SEQ ID NO: 98310 - DNA, 25 bp, Probe sequence
cttctcacctgtagcgacgcataaa

SEQ ID NO: 98311 - DNA, 25 bp, Probe sequence
ctcacctgtagcgacgcataaagca

SEQ ID NO: 98312 - DNA, 25 bp, Probe sequence
cgaaccaagtagaagcacccgcttc

SEQ ID NO: 98313 - DNA, 25 bp, Probe sequence
gcgacgcataaagcagttggcaggt

SEQ ID NO: 98314 - DNA, 25 bp, Probe sequence
gcaggttaatcacattacacataac

SEQ ID NO: 98315 - DNA, 25 bp, Probe sequence
gcagttggcaggttaatcacattac

SEQ ID NO: 98316 - DNA, 25 bp, Probe sequence
gttgaatacgaaacgaaccaagtag

SEQ ID NO: 98317 - DNA, 25 bp, Probe sequence
gatatgattaacaacgttgaatacg

SEQ ID NO: 98318 - DNA, 25 bp, Probe sequence
gttggcaggttaatcacattacaca

SEQ ID NO: 98319 - DNA, 25 bp, Probe sequence
gttatagtgttgacttaaatgtgaa

SEQ ID NO: 98320 - DNA, 25 bp, Probe sequence
gtagcgacgcataaagcagttggca

SEQ ID NO: 98321 - DNA, 25 bp, Probe sequence
taattacagttatagtgttgactta

SEQ ID NO: 98322 - DNA, 25 bp, Probe sequence
attgcgtatcaagttttacagggtt

SEQ ID NO: 98323 - DNA, 25 bp, Probe sequence
atatctattgggacagttttcgaat

SEQ ID NO: 98324 - DNA, 25 bp, Probe sequence
atatcttaaaggtatgtagccactt

SEQ ID NO: 98325 - DNA, 25 bp, Probe sequence
acttttaatatcactatgttctgta

SEQ ID NO: 98326 - DNA, 25 bp, Probe sequence
aattgagttagaggttgcatgttta

SEQ ID NO: 98327 - DNA, 25 bp, Probe sequence
aattgccaaagtggttgcatatctt

SEQ ID NO: 98328 - DNA, 25 bp, Probe sequence
cagaatgtgatgtgctaccttatat

SEQ ID NO: 98329 - DNA, 25 bp, Probe sequence
gcgtgatgaatcctgtatattacaa

SEQ ID NO: 98330 - DNA, 25 bp, Probe sequence
gcatgtttaattagtaacttgtcag

SEQ ID NO: 98331 - DNA, 25 bp, Probe sequence
gtgctaccttatatagataattgcc

SEQ ID NO: 98332 - DNA, 25 bp, Probe sequence
ggaactgtactgtcacagaatgtga

SEQ ID NO: 98333 - DNA, 25 bp, Probe sequence
tgctttaaaacttttattgcgtatc

SEQ ID NO: 98334 - DNA, 25 bp, Probe sequence
tatttcttggcctctaaaacatgga

SEQ ID NO: 98335 - DNA, 25 bp, Probe sequence
tacagggttgattatgcgtgatgaa

SEQ ID NO: 98336 - DNA, 25 bp, Probe sequence
ttcgaataggaactgtactgtcaca

SEQ ID NO: 98337 - DNA, 25 bp, Probe sequence
atctcgtcccttgtataggggcggg

SEQ ID NO: 98338 - DNA, 25 bp, Probe sequence
ggtgtcatatattccctgtttattg

SEQ ID NO: 98339 - DNA, 25 bp, Probe sequence
acgatctcgtcccttgtataggggc

SEQ ID NO: 98340 - DNA, 25 bp, Probe sequence
aactagggtggtaccacgacgatct

SEQ ID NO: 98341 - DNA, 25 bp, Probe sequence
cacgacgatctcgtcccttgtatag

SEQ ID NO: 98342 - DNA, 25 bp, Probe sequence
gatgattgttgttcaattttttaac

SEQ ID NO: 98343 - DNA, 25 bp, Probe sequence
gttggtgtcatatattccctgttta

SEQ ID NO: 98344 - DNA, 25 bp, Probe sequence
gttaaaacgatgattgttgttcaat

SEQ ID NO: 98345 - DNA, 25 bp, Probe sequence
gtttgttggtgtcatatattccctg

SEQ ID NO: 98346 - DNA, 25 bp, Probe sequence
gtcatatattccctgtttattgtta

SEQ ID NO: 98347 - DNA, 25 bp, Probe sequence
tcgtcccttgtataggggcgggatt

SEQ ID NO: 98348 - DNA, 25 bp, Probe sequence
tagggtggtaccacgacgatctcgt

SEQ ID NO: 98349 - DNA, 25 bp, Probe sequence
tattccctgtttattgttaataggt

SEQ ID NO: 98350 - DNA, 25 bp, Probe sequence
tttttgtttttttcagacataaatg

SEQ ID NO: 98351 - DNA, 25 bp, Probe sequence
ttcaattttttaacgaggtcagata

SEQ ID NO: 98352 - DNA, 25 bp, Probe sequence
attttaaaatgattggtgtataatg

SEQ ID NO: 98353 - DNA, 25 bp, Probe sequence
atacaaatctaaatcgtttaaatga

SEQ ID NO: 98354 - DNA, 25 bp, Probe sequence
atcgtttaaatgattgaagacaaga

SEQ ID NO: 98355 - DNA, 25 bp, Probe sequence
atgaatacaaatctaaatcgtttaa

SEQ ID NO: 98356 - DNA, 25 bp, Probe sequence
atgatctaatcaatattacacagaa

SEQ ID NO: 98357 - DNA, 25 bp, Probe sequence
aatgaatacaaatctaaatcgttta

SEQ ID NO: 98358 - DNA, 25 bp, Probe sequence
ctaatcaatattacacagaaagcca

SEQ ID NO: 98359 - DNA, 25 bp, Probe sequence
gaatacaaatctaaatcgtttaaat

SEQ ID NO: 98360 - DNA, 25 bp, Probe sequence
gaagacaagatgatctaatcaatat

SEQ ID NO: 98361 - DNA, 25 bp, Probe sequence
gacaagatgatctaatcaatattac

SEQ ID NO: 98362 - DNA, 25 bp, Probe sequence
gatgatctaatcaatattacacaga

SEQ ID NO: 98363 - DNA, 25 bp, Probe sequence
gatctaatcaatattacacagaaag

SEQ ID NO: 98364 - DNA, 25 bp, Probe sequence
gattgaagacaagatgatctaatca

SEQ ID NO: 98365 - DNA, 25 bp, Probe sequence
tgatctaatcaatattacacagaaa

SEQ ID NO: 98366 - DNA, 25 bp, Probe sequence
tgaatacaaatctaaatcgtttaaa

SEQ ID NO: 98367 - DNA, 25 bp, Probe sequence
atttatagcctaactctgacttcgg

SEQ ID NO: 98368 - DNA, 25 bp, Probe sequence
atagcctaactctgacttcggagtt

SEQ ID NO: 98369 - DNA, 25 bp, Probe sequence
aaattgagggattcttttttcatct

SEQ ID NO: 98370 - DNA, 25 bp, Probe sequence
aatattgtcatgcaaattacttaat

SEQ ID NO: 98371 - DNA, 25 bp, Probe sequence
gagggattcttttttcatctctaga

SEQ ID NO: 98372 - DNA, 25 bp, Probe sequence
gattcttttttcatctctagattta

SEQ ID NO: 98373 - DNA, 25 bp, Probe sequence
gtaacgatataatgttttttattgt

SEQ ID NO: 98374 - DNA, 25 bp, Probe sequence
gggattcttttttcatctctagatt

SEQ ID NO: 98375 - DNA, 25 bp, Probe sequence
tgttttttattgtttcattatttgg

SEQ ID NO: 98376 - DNA, 25 bp, Probe sequence
taactctgacttcggagttaggttt

SEQ ID NO: 98377 - DNA, 25 bp, Probe sequence
tacaattaatttatagcctaactct

SEQ ID NO: 98378 - DNA, 25 bp, Probe sequence
ttatagcctaactctgacttcggag

SEQ ID NO: 98379 - DNA, 25 bp, Probe sequence
ttattgtttcattatttggttaaat

SEQ ID NO: 98380 - DNA, 25 bp, Probe sequence
ttcatctctagatttatagtataat

SEQ ID NO: 98381 - DNA, 25 bp, Probe sequence
ttgagggattcttttttcatctcta

SEQ ID NO: 98382 - DNA, 25 bp, Probe sequence
attactttacgtacgcgttgatgta

SEQ ID NO: 98383 - DNA, 25 bp, Probe sequence
atataatatgctatactaattccat

SEQ ID NO: 98384 - DNA, 25 bp, Probe sequence
acgcgttgatgtatgtaagtaatga

SEQ ID NO: 98385 - DNA, 25 bp, Probe sequence
actttacgtacgcgttgatgtatgt

SEQ ID NO: 98386 - DNA, 25 bp, Probe sequence
aacatataaaaatcaaggggtgctt

SEQ ID NO: 98387 - DNA, 25 bp, Probe sequence
aacgctttcaaaattcatataatat

SEQ ID NO: 98388 - DNA, 25 bp, Probe sequence
aagtcattactttacgtacgcgttg

SEQ ID NO: 98389 - DNA, 25 bp, Probe sequence
aatatatcaacggaaaacgctttca

SEQ ID NO: 98390 - DNA, 25 bp, Probe sequence
gtcattactttacgtacgcgttgat

SEQ ID NO: 98391 - DNA, 25 bp, Probe sequence
ggaaaacgctttcaaaattcatata

SEQ ID NO: 98392 - DNA, 25 bp, Probe sequence
tgtaagtaatgactattttttataa

SEQ ID NO: 98393 - DNA, 25 bp, Probe sequence
taagtcattactttacgtacgcgtt

SEQ ID NO: 98394 - DNA, 25 bp, Probe sequence
tacgtacgcgttgatgtatgtaagt

SEQ ID NO: 98395 - DNA, 25 bp, Probe sequence
tatgctatactaattccataaagta

SEQ ID NO: 98396 - DNA, 25 bp, Probe sequence
ttacactataaataagtcattactt

SEQ ID NO: 98397 - DNA, 25 bp, Probe sequence
atgtgcatctcaaaagttggacttt

SEQ ID NO: 98398 - DNA, 25 bp, Probe sequence
agtctatataggcacttgttttatt

SEQ ID NO: 98399 - DNA, 25 bp, Probe sequence
aacaatcatgattatgtctttttta

SEQ ID NO: 98400 - DNA, 25 bp, Probe sequence
aacctgactttatggagtgctcatc

SEQ ID NO: 98401 - DNA, 25 bp, Probe sequence
aatactctatgagatagtttcttta

SEQ ID NO: 98402 - DNA, 25 bp, Probe sequence
catgaaatgataatgtgcatctcaa

SEQ ID NO: 98403 - DNA, 25 bp, Probe sequence
gacatcacagtcgaatatgctaaaa

SEQ ID NO: 98404 - DNA, 25 bp, Probe sequence
gagatagtttctttaattacgacat

SEQ ID NO: 98405 - DNA, 25 bp, Probe sequence
gttggacttttaacctgactttatg

SEQ ID NO: 98406 - DNA, 25 bp, Probe sequence
gtttctttaattacgacatcacagt

SEQ ID NO: 98407 - DNA, 25 bp, Probe sequence
ggcacttgttttatttgaaattagg

SEQ ID NO: 98408 - DNA, 25 bp, Probe sequence
tggagtgctcatcaagaacaatcat

SEQ ID NO: 98409 - DNA, 25 bp, Probe sequence
taggtcgtgtataaatactctatga

SEQ ID NO: 98410 - DNA, 25 bp, Probe sequence
tatataaattagttctggaggttaa

SEQ ID NO: 98411 - DNA, 25 bp, Probe sequence
ttttattttttagctaagtctatat

SEQ ID NO: 98412 - DNA, 25 bp, Probe sequence
atttcgttcaaatctctattggtat

SEQ ID NO: 98413 - DNA, 25 bp, Probe sequence
aaataccttgtttatctaatttgat

SEQ ID NO: 98414 - DNA, 25 bp, Probe sequence
aatcttaatttgaacacttgaatac

SEQ ID NO: 98415 - DNA, 25 bp, Probe sequence
gaaaaagacgaggggcgatttagat

SEQ ID NO: 98416 - DNA, 25 bp, Probe sequence
gattgaggaaacatgcataggtgaa

SEQ ID NO: 98417 - DNA, 25 bp, Probe sequence
gattgttgtgaatcaagcaatttta

SEQ ID NO: 98418 - DNA, 25 bp, Probe sequence
gttgttgctgcttttttatttcgtt

SEQ ID NO: 98419 - DNA, 25 bp, Probe sequence
gttgctgcttttttatttcgttcaa

SEQ ID NO: 98420 - DNA, 25 bp, Probe sequence
gtatttttcacgaagttgttgctgc

SEQ ID NO: 98421 - DNA, 25 bp, Probe sequence
gtaatgcgcttaaaatagatgctta

SEQ ID NO: 98422 - DNA, 25 bp, Probe sequence
gtggtaacagcgcgtgtatttttca

SEQ ID NO: 98423 - DNA, 25 bp, Probe sequence
tgtcattagcatatatcgttttgta

SEQ ID NO: 98424 - DNA, 25 bp, Probe sequence
tacacaagtgtaatcattcgtcata

SEQ ID NO: 98425 - DNA, 25 bp, Probe sequence
ttaatttttcgacctacaagttgag

SEQ ID NO: 98426 - DNA, 25 bp, Probe sequence
ttcggttgtcaattttgtcattagc

SEQ ID NO: 98427 - DNA, 25 bp, Probe sequence
atagttcggttataatgtaaatata

SEQ ID NO: 98428 - DNA, 25 bp, Probe sequence
atgtgtaggatgttatttttataaa

SEQ ID NO: 98429 - DNA, 25 bp, Probe sequence
taaatagttcggttataatgtaaat

SEQ ID NO: 98430 - DNA, 25 bp, Probe sequence
aaatgtgtaaagataatgtgtagga

SEQ ID NO: 98431 - DNA, 25 bp, Probe sequence
aatgtgtaggatgttatttttataa

SEQ ID NO: 98432 - DNA, 25 bp, Probe sequence
aatagttcggttataatgtaaatat

SEQ ID NO: 98433 - DNA, 25 bp, Probe sequence
gaagtattttatttatatgtaaagt

SEQ ID NO: 98434 - DNA, 25 bp, Probe sequence
gagtaagtcatgcaaatgatagaag

SEQ ID NO: 98435 - DNA, 25 bp, Probe sequence
gtaagtcatgcaaatgatagaagga

SEQ ID NO: 98436 - DNA, 25 bp, Probe sequence
gtgtaggatgttatttttataaata

SEQ ID NO: 98437 - DNA, 25 bp, Probe sequence
gtgtaaagataatgtgtaggatgtt

SEQ ID NO: 98438 - DNA, 25 bp, Probe sequence
ggatgttatttttataaatagttcg

SEQ ID NO: 98439 - DNA, 25 bp, Probe sequence
taattataagttagggaggcatacc

SEQ ID NO: 98440 - DNA, 25 bp, Probe sequence
taatgtgtaggatgttatttttata

SEQ ID NO: 98441 - DNA, 25 bp, Probe sequence
taagaagtattttatttatatgtaa

SEQ ID NO: 98442 - DNA, 25 bp, Probe sequence
attgctaggttcgcctttttaaatg

SEQ ID NO: 98443 - DNA, 25 bp, Probe sequence
attacacattagacaaagcgaattt

SEQ ID NO: 98444 - DNA, 25 bp, Probe sequence
atgattgattatgtagtgtttatta

SEQ ID NO: 98445 - DNA, 25 bp, Probe sequence
aaattaggtgagtctagcaacttta

SEQ ID NO: 98446 - DNA, 25 bp, Probe sequence
aaatgaattgaagttggcaacagga

SEQ ID NO: 98447 - DNA, 25 bp, Probe sequence
aaagagtcaccaatgattgattatg

SEQ ID NO: 98448 - DNA, 25 bp, Probe sequence
caactttaattgctaggttcgcctt

SEQ ID NO: 98449 - DNA, 25 bp, Probe sequence
gcgaatttgtacataagcttaggaa

SEQ ID NO: 98450 - DNA, 25 bp, Probe sequence
gctaggttcgcctttttaaatgaat

SEQ ID NO: 98451 - DNA, 25 bp, Probe sequence
gaagttggcaacaggatagaaataa

SEQ ID NO: 98452 - DNA, 25 bp, Probe sequence
gaaataataaagagtcaccaatgat

SEQ ID NO: 98453 - DNA, 25 bp, Probe sequence
gttcgcctttttaaatgaattgaag

SEQ ID NO: 98454 - DNA, 25 bp, Probe sequence
gtgtttattacacattagacaaagc

SEQ ID NO: 98455 - DNA, 25 bp, Probe sequence
taggtgagtctagcaactttaattg

SEQ ID NO: 98456 - DNA, 25 bp, Probe sequence
taggttcgcctttttaaatgaattg

SEQ ID NO: 98457 - DNA, 25 bp, Probe sequence
atactttggtttttataatcatata

SEQ ID NO: 98458 - DNA, 25 bp, Probe sequence
acgaaatgcgtttagctataatatt

SEQ ID NO: 98459 - DNA, 25 bp, Probe sequence
aatgccagtttttatatttcacaaa

SEQ ID NO: 98460 - DNA, 25 bp, Probe sequence
aatacatctcccttaaatatagata

SEQ ID NO: 98461 - DNA, 25 bp, Probe sequence
aattccatgttaatatactttggtt

SEQ ID NO: 98462 - DNA, 25 bp, Probe sequence
aattcatggattattcacatcttga

SEQ ID NO: 98463 - DNA, 25 bp, Probe sequence
aattgttgcacatataatgccagtt

SEQ ID NO: 98464 - DNA, 25 bp, Probe sequence
gctttaatggtgctatttgtggcta

SEQ ID NO: 98465 - DNA, 25 bp, Probe sequence
gagatatatacaattattttcggta

SEQ ID NO: 98466 - DNA, 25 bp, Probe sequence
gtgacatttacatagatttacaaaa

SEQ ID NO: 98467 - DNA, 25 bp, Probe sequence
gtggctattctgtgacatttacata

SEQ ID NO: 98468 - DNA, 25 bp, Probe sequence
ggtgctatttgtggctattctgtga

SEQ ID NO: 98469 - DNA, 25 bp, Probe sequence
tagatatgtttattatgcacttata

SEQ ID NO: 98470 - DNA, 25 bp, Probe sequence
tataatattagttgaaagccatttc

SEQ ID NO: 98471 - DNA, 25 bp, Probe sequence
ttcacatcttgaaaaagctttaatg

SEQ ID NO: 98472 - DNA, 25 bp, Probe sequence
atcaccttcaaactttcactcatat

SEQ ID NO: 98473 - DNA, 25 bp, Probe sequence
agttgcatataaaaacccctgttga

SEQ ID NO: 98474 - DNA, 25 bp, Probe sequence
acatgtacattatcaccttcaaact

SEQ ID NO: 98475 - DNA, 25 bp, Probe sequence
aaagttttgagccaagtacgcaatt

SEQ ID NO: 98476 - DNA, 25 bp, Probe sequence
aaactttcactcatattactttgga

SEQ ID NO: 98477 - DNA, 25 bp, Probe sequence
aaacgtctttccatttatcaacaat

SEQ ID NO: 98478 - DNA, 25 bp, Probe sequence
cattatcaccttcaaactttcactc

SEQ ID NO: 98479 - DNA, 25 bp, Probe sequence
cccctgttgaactttagtatattca

SEQ ID NO: 98480 - DNA, 25 bp, Probe sequence
gaatggcaatctatataaatgttta

SEQ ID NO: 98481 - DNA, 25 bp, Probe sequence
gaagtatggatgtatttctgaaatg

SEQ ID NO: 98482 - DNA, 25 bp, Probe sequence
gagccaagtacgcaatttaatatta

SEQ ID NO: 98483 - DNA, 25 bp, Probe sequence
gtttatatcttttatacatgtacat

SEQ ID NO: 98484 - DNA, 25 bp, Probe sequence
ggttcatctggtattttatgacgta

SEQ ID NO: 98485 - DNA, 25 bp, Probe sequence
ggaaaggcgttttttggttcatctg

SEQ ID NO: 98486 - DNA, 25 bp, Probe sequence
ggcgttttttggttcatctggtatt

SEQ ID NO: 98487 - DNA, 25 bp, Probe sequence
attagttttgatggaatgacatatc

SEQ ID NO: 98488 - DNA, 25 bp, Probe sequence
atcagttatagaaaggtatgtcgtc

SEQ ID NO: 98489 - DNA, 25 bp, Probe sequence
agattagtagtcaaaattgtggcta

SEQ ID NO: 98490 - DNA, 25 bp, Probe sequence
acgtttacatcaattcaatacatta

SEQ ID NO: 98491 - DNA, 25 bp, Probe sequence
acatcaattcaatacattagttttg

SEQ ID NO: 98492 - DNA, 25 bp, Probe sequence
aaaacgtttacatcaattcaataca

SEQ ID NO: 98493 - DNA, 25 bp, Probe sequence
gaatgacatatcaatttgtggtaat

SEQ ID NO: 98494 - DNA, 25 bp, Probe sequence
gagcatttttatgttaaatcgatac

SEQ ID NO: 98495 - DNA, 25 bp, Probe sequence
gatactgggttttaccataaattga

SEQ ID NO: 98496 - DNA, 25 bp, Probe sequence
gatactgaattttaactaagattag

SEQ ID NO: 98497 - DNA, 25 bp, Probe sequence
gtcaaaattgtggctactaatcttt

SEQ ID NO: 98498 - DNA, 25 bp, Probe sequence
ggttttaccataaattgaagtacat

SEQ ID NO: 98499 - DNA, 25 bp, Probe sequence
tgtggctactaatctttttttaatt

SEQ ID NO: 98500 - DNA, 25 bp, Probe sequence
tcaacttgagcatttttatgttaaa

SEQ ID NO: 98501 - DNA, 25 bp, Probe sequence
taaatcgatactgggttttaccata

SEQ ID NO: 98502 - DNA, 25 bp, Probe sequence
agttcagtttaaggctctaaatggt

SEQ ID NO: 98503 - DNA, 25 bp, Probe sequence
aaagttagcaataaagagtcattaa

SEQ ID NO: 98504 - DNA, 25 bp, Probe sequence
aacattcaacagtcaaacgaatata

SEQ ID NO: 98505 - DNA, 25 bp, Probe sequence
caagttcagtttaaggctctaaatg

SEQ ID NO: 98506 - DNA, 25 bp, Probe sequence
gataaacattcaacagtcaaacgaa

SEQ ID NO: 98507 - DNA, 25 bp, Probe sequence
gttcagtttaaggctctaaatggtt

SEQ ID NO: 98508 - DNA, 25 bp, Probe sequence
gtttatgataaacattcaacagtca

SEQ ID NO: 98509 - DNA, 25 bp, Probe sequence
gtcaagttcagtttaaggctctaaa

SEQ ID NO: 98510 - DNA, 25 bp, Probe sequence
ggttagaacagaggttatttggagg

SEQ ID NO: 98511 - DNA, 25 bp, Probe sequence
ggtcaagttcagtttaaggctctaa

SEQ ID NO: 98512 - DNA, 25 bp, Probe sequence
tggtcaagttcagtttaaggctcta

SEQ ID NO: 98513 - DNA, 25 bp, Probe sequence
tcagtttaaggctctaaatggttag

SEQ ID NO: 98514 - DNA, 25 bp, Probe sequence
tcaacagtcaaacgaatataaatca

SEQ ID NO: 98515 - DNA, 25 bp, Probe sequence
taaggctctaaatggttagaacaga

SEQ ID NO: 98516 - DNA, 25 bp, Probe sequence
tagaacagaggttatttggaggttt

SEQ ID NO: 98517 - DNA, 25 bp, Probe sequence
atagtatggtttaatgtatctttat

SEQ ID NO: 98518 - DNA, 25 bp, Probe sequence
atcgtttatcgctatttgtgttaca

SEQ ID NO: 98519 - DNA, 25 bp, Probe sequence
atgagtttcactttacattattgat

SEQ ID NO: 98520 - DNA, 25 bp, Probe sequence
aaaaccataaattcttactcattca

SEQ ID NO: 98521 - DNA, 25 bp, Probe sequence
cttactcattcagatttacccaata

SEQ ID NO: 98522 - DNA, 25 bp, Probe sequence
ccatcagtttgcgtttatattagtt

SEQ ID NO: 98523 - DNA, 25 bp, Probe sequence
gaattttgtcgatatatcgtgcgga

SEQ ID NO: 98524 - DNA, 25 bp, Probe sequence
gatattttttaaccatcagtttgcg

SEQ ID NO: 98525 - DNA, 25 bp, Probe sequence
gatatattggtttttgctatccatt

SEQ ID NO: 98526 - DNA, 25 bp, Probe sequence
gtaatgcgttttatccaagttattt

SEQ ID NO: 98527 - DNA, 25 bp, Probe sequence
ggtttttgctatccattataataat

SEQ ID NO: 98528 - DNA, 25 bp, Probe sequence
tcagatttacccaatatttttactt

SEQ ID NO: 98529 - DNA, 25 bp, Probe sequence
tatattagttttttatgcttattat

SEQ ID NO: 98530 - DNA, 25 bp, Probe sequence
tattattttattatcgtttatcgct

SEQ ID NO: 98531 - DNA, 25 bp, Probe sequence
ttgtgttacataatcaaaaccataa

SEQ ID NO: 98532 - DNA, 25 bp, Probe sequence
atatggcagtaacaatttttataat

SEQ ID NO: 98533 - DNA, 25 bp, Probe sequence
atagtttaatatggcagtaacaatt

SEQ ID NO: 98534 - DNA, 25 bp, Probe sequence
acgggcaaatagtttaatatggcag

SEQ ID NO: 98535 - DNA, 25 bp, Probe sequence
aatagtttaatatggcagtaacaat

SEQ ID NO: 98536 - DNA, 25 bp, Probe sequence
aatatggcagtaacaatttttataa

SEQ ID NO: 98537 - DNA, 25 bp, Probe sequence
aatagtatggaaatatatatatcta

SEQ ID NO: 98538 - DNA, 25 bp, Probe sequence
cgggcaaatagtttaatatggcagt

SEQ ID NO: 98539 - DNA, 25 bp, Probe sequence
gtttaatatggcagtaacaattttt

SEQ ID NO: 98540 - DNA, 25 bp, Probe sequence
gggcaaatagtttaatatggcagta

SEQ ID NO: 98541 - DNA, 25 bp, Probe sequence
ggcaaatagtttaatatggcagtaa

SEQ ID NO: 98542 - DNA, 25 bp, Probe sequence
tggcagtaacaatttttataattta

SEQ ID NO: 98543 - DNA, 25 bp, Probe sequence
taatatggcagtaacaatttttata

SEQ ID NO: 98544 - DNA, 25 bp, Probe sequence
tatggcagtaacaatttttataatt

SEQ ID NO: 98545 - DNA, 25 bp, Probe sequence
tatatctaaataattaaaacgggca

SEQ ID NO: 98546 - DNA, 25 bp, Probe sequence
ttaatatggcagtaacaatttttat

SEQ ID NO: 98547 - DNA, 25 bp, Probe sequence
atttcgcacaaacgttggagcccaa

SEQ ID NO: 98548 - DNA, 25 bp, Probe sequence
ataggcataagatagatttcgcaca

SEQ ID NO: 98549 - DNA, 25 bp, Probe sequence
agatttcgcacaaacgttggagccc

SEQ ID NO: 98550 - DNA, 25 bp, Probe sequence
acgttggagcccaacttacattgtt

SEQ ID NO: 98551 - DNA, 25 bp, Probe sequence
acaaacgttggagcccaacttacat

SEQ ID NO: 98552 - DNA, 25 bp, Probe sequence
aaacgttggagcccaacttacattg

SEQ ID NO: 98553 - DNA, 25 bp, Probe sequence
aagatagatttcgcacaaacgttgg

SEQ ID NO: 98554 - DNA, 25 bp, Probe sequence
gcacaaacgttggagcccaacttac

SEQ ID NO: 98555 - DNA, 25 bp, Probe sequence
gaacttagcagagaaaataggcata

SEQ ID NO: 98556 - DNA, 25 bp, Probe sequence
gatagatttcgcacaaacgttggag

SEQ ID NO: 98557 - DNA, 25 bp, Probe sequence
gatttcgcacaaacgttggagccca

SEQ ID NO: 98558 - DNA, 25 bp, Probe sequence
ggcataagatagatttcgcacaaac

SEQ ID NO: 98559 - DNA, 25 bp, Probe sequence
tagatttcgcacaaacgttggagcc

SEQ ID NO: 98560 - DNA, 25 bp, Probe sequence
tttcgcacaaacgttggagcccaac

SEQ ID NO: 98561 - DNA, 25 bp, Probe sequence
ttcgcacaaacgttggagcccaact

SEQ ID NO: 98562 - DNA, 25 bp, Probe sequence
atttcacttcaatgctttttatcca

SEQ ID NO: 98563 - DNA, 25 bp, Probe sequence
atttcatttcacttcaatgcttttt

SEQ ID NO: 98564 - DNA, 25 bp, Probe sequence
acttcaatgctttttatccaaaata

SEQ ID NO: 98565 - DNA, 25 bp, Probe sequence
aacgatcattatttcatttcacttc

SEQ ID NO: 98566 - DNA, 25 bp, Probe sequence
cattatttcatttcacttcaatgct

SEQ ID NO: 98567 - DNA, 25 bp, Probe sequence
cgatcattatttcatttcacttcaa

SEQ ID NO: 98568 - DNA, 25 bp, Probe sequence
ccctcctcacttacattctaataaa

SEQ ID NO: 98569 - DNA, 25 bp, Probe sequence
gattttgtgatctttgtgtttgttg

SEQ ID NO: 98570 - DNA, 25 bp, Probe sequence
gtagttaatactgttcgaaaagaag

SEQ ID NO: 98571 - DNA, 25 bp, Probe sequence
gtgatctttgtgtttgttgtatatt

SEQ ID NO: 98572 - DNA, 25 bp, Probe sequence
tcctcacttacattctaataaataa

SEQ ID NO: 98573 - DNA, 25 bp, Probe sequence
tctttgtgtttgttgtatattttca

SEQ ID NO: 98574 - DNA, 25 bp, Probe sequence
tataatgtagttaatactgttcgaa

SEQ ID NO: 98575 - DNA, 25 bp, Probe sequence
ttttgtgatctttgtgtttgttgta

SEQ ID NO: 98576 - DNA, 25 bp, Probe sequence
ttcacttcaatgctttttatccaaa

SEQ ID NO: 98577 - DNA, 25 bp, Probe sequence
atctatgtggaagttatcgtctgca

SEQ ID NO: 98578 - DNA, 25 bp, Probe sequence
atcgtctgcatatttttagtgggtg

SEQ ID NO: 98579 - DNA, 25 bp, Probe sequence
aaaacacctcgctaatctatgtgga

SEQ ID NO: 98580 - DNA, 25 bp, Probe sequence
aaaatccagaaccacagtcataatc

SEQ ID NO: 98581 - DNA, 25 bp, Probe sequence
aaccacagtcataatcatttcttgt

SEQ ID NO: 98582 - DNA, 25 bp, Probe sequence
catttcttgtgtttactcagtcgtt

SEQ ID NO: 98583 - DNA, 25 bp, Probe sequence
cgggggacatcagtggttctttatc

SEQ ID NO: 98584 - DNA, 25 bp, Probe sequence
gttacgacgtggacgggggacatca

SEQ ID NO: 98585 - DNA, 25 bp, Probe sequence
gtcgtttgagactgcatcatgattg

SEQ ID NO: 98586 - DNA, 25 bp, Probe sequence
gtgggtgtttttatattctactgat

SEQ ID NO: 98587 - DNA, 25 bp, Probe sequence
tgacctactctcgtaattttagttt

SEQ ID NO: 98588 - DNA, 25 bp, Probe sequence
tctttatcatttctgacctactctc

SEQ ID NO: 98589 - DNA, 25 bp, Probe sequence
tcatttctgacctactctcgtaatt

SEQ ID NO: 98590 - DNA, 25 bp, Probe sequence
tacactaaaaaacacctcgctaatc

SEQ ID NO: 98591 - DNA, 25 bp, Probe sequence
tactgattcagttacgacgtggacg

SEQ ID NO: 98592 - DNA, 25 bp, Probe sequence
atgacgttatcatctccttggttat

SEQ ID NO: 98593 - DNA, 25 bp, Probe sequence
agaatgacgttatcatctccttggt

SEQ ID NO: 98594 - DNA, 25 bp, Probe sequence
acgttatcatctccttggttattaa

SEQ ID NO: 98595 - DNA, 25 bp, Probe sequence
aaagggaatggattacagcgtacta

SEQ ID NO: 98596 - DNA, 25 bp, Probe sequence
aaagaatgacgttatcatctccttg

SEQ ID NO: 98597 - DNA, 25 bp, Probe sequence
aaagctagaaacaatgcgaagaaat

SEQ ID NO: 98598 - DNA, 25 bp, Probe sequence
aaacaatgcgaagaaatcatcgaac

SEQ ID NO: 98599 - DNA, 25 bp, Probe sequence
gaatgacgttatcatctccttggtt

SEQ ID NO: 98600 - DNA, 25 bp, Probe sequence
gacgttatcatctccttggttatta

SEQ ID NO: 98601 - DNA, 25 bp, Probe sequence
gttatcatctccttggttattaaaa

SEQ ID NO: 98602 - DNA, 25 bp, Probe sequence
gggaatggattacagcgtactaaag

SEQ ID NO: 98603 - DNA, 25 bp, Probe sequence
ggattacagcgtactaaagaatgac

SEQ ID NO: 98604 - DNA, 25 bp, Probe sequence
tgacgttatcatctccttggttatt

SEQ ID NO: 98605 - DNA, 25 bp, Probe sequence
tcatctccttggttattaaaattaa

SEQ ID NO: 98606 - DNA, 25 bp, Probe sequence
tatcatctccttggttattaaaatt

SEQ ID NO: 98607 - DNA, 25 bp, Probe sequence
agtcagtgtaataacctttacaatt

SEQ ID NO: 98608 - DNA, 25 bp, Probe sequence
accacaattttcggaaaagtcagtg

SEQ ID NO: 98609 - DNA, 25 bp, Probe sequence
aagtcagtgtaataacctttacaat

SEQ ID NO: 98610 - DNA, 25 bp, Probe sequence
caattttcggaaaagtcagtgtaat

SEQ ID NO: 98611 - DNA, 25 bp, Probe sequence
cagtgtaataacctttacaattttg

SEQ ID NO: 98612 - DNA, 25 bp, Probe sequence
ctccttgttctttcttaattatatt

SEQ ID NO: 98613 - DNA, 25 bp, Probe sequence
cctccttgttctttcttaattatat

SEQ ID NO: 98614 - DNA, 25 bp, Probe sequence
taataacctttacaattttgtggat

SEQ ID NO: 98615 - DNA, 25 bp, Probe sequence
gtcagtgtaataacctttacaattt

SEQ ID NO: 98616 - DNA, 25 bp, Probe sequence
gtgtaataacctttacaattttgtg

SEQ ID NO: 98617 - DNA, 25 bp, Probe sequence
tccttgttctttcttaattatattt

SEQ ID NO: 98618 - DNA, 25 bp, Probe sequence
tcggaaaagtcagtgtaataacctt

SEQ ID NO: 98619 - DNA, 25 bp, Probe sequence
taccacaattttcggaaaagtcagt

SEQ ID NO: 98620 - DNA, 25 bp, Probe sequence
ttaccacaattttcggaaaagtcag

SEQ ID NO: 98621 - DNA, 25 bp, Probe sequence
ttcggaaaagtcagtgtaataacct

SEQ ID NO: 98622 - DNA, 25 bp, Probe sequence
attaagcgtctatctccgctacaat

SEQ ID NO: 98623 - DNA, 25 bp, Probe sequence
atatgtaggaggtagacgctttttg

SEQ ID NO: 98624 - DNA, 25 bp, Probe sequence
atgtctcttttcacgaatatcttaa

SEQ ID NO: 98625 - DNA, 25 bp, Probe sequence
agtagttatctaatgatcatctata

SEQ ID NO: 98626 - DNA, 25 bp, Probe sequence
agttgcacttggttcataatgatca

SEQ ID NO: 98627 - DNA, 25 bp, Probe sequence
aagcgtctatctccgctacaattat

SEQ ID NO: 98628 - DNA, 25 bp, Probe sequence
aataaatattaagcgtctatctccg

SEQ ID NO: 98629 - DNA, 25 bp, Probe sequence
gcagaaagttgcacttggttcataa

SEQ ID NO: 98630 - DNA, 25 bp, Probe sequence
gacgctttttgtattgtttgaaaat

SEQ ID NO: 98631 - DNA, 25 bp, Probe sequence
gtctatctccgctacaattatatgt

SEQ ID NO: 98632 - DNA, 25 bp, Probe sequence
ggtagacgctttttgtattgtttga

SEQ ID NO: 98633 - DNA, 25 bp, Probe sequence
ggttcataatgatcaagtagttatc

SEQ ID NO: 98634 - DNA, 25 bp, Probe sequence
ggaggtagacgctttttgtattgtt

SEQ ID NO: 98635 - DNA, 25 bp, Probe sequence
tgtaatgtctcttttcacgaatatc

SEQ ID NO: 98636 - DNA, 25 bp, Probe sequence
ttaactagtgtaatgtctcttttca

SEQ ID NO: 98637 - DNA, 25 bp, Probe sequence
ataaaaagcaaacgatggaggatca

SEQ ID NO: 98638 - DNA, 25 bp, Probe sequence
agtataaaaagcaaacgatggagga

SEQ ID NO: 98639 - DNA, 25 bp, Probe sequence
agcaaacgatggaggatcattactt

SEQ ID NO: 98640 - DNA, 25 bp, Probe sequence
aaagcaaacgatggaggatcattac

SEQ ID NO: 98641 - DNA, 25 bp, Probe sequence
aaaaagcaaacgatggaggatcatt

SEQ ID NO: 98642 - DNA, 25 bp, Probe sequence
aaaagcaaacgatggaggatcatta

SEQ ID NO: 98643 - DNA, 25 bp, Probe sequence
aagcaaacgatggaggatcattact

SEQ ID NO: 98644 - DNA, 25 bp, Probe sequence
aatagtataaaaagcaaacgatgga

SEQ ID NO: 98645 - DNA, 25 bp, Probe sequence
aatagtatagtcataaaactgtatg

SEQ ID NO: 98646 - DNA, 25 bp, Probe sequence
gtataaaaagcaaacgatggaggat

SEQ ID NO: 98647 - DNA, 25 bp, Probe sequence
gtatagtcataaaactgtatgaatg

SEQ ID NO: 98648 - DNA, 25 bp, Probe sequence
gtaatagtatagtcataaaactgta

SEQ ID NO: 98649 - DNA, 25 bp, Probe sequence
taatagtatagtcataaaactgtat

SEQ ID NO: 98650 - DNA, 25 bp, Probe sequence
taaaaagcaaacgatggaggatcat

SEQ ID NO: 98651 - DNA, 25 bp, Probe sequence
tataaaaagcaaacgatggaggatc

SEQ ID NO: 98652 - DNA, 25 bp, Probe sequence
atacatcgtgtccatcgttgtcaac

SEQ ID NO: 98653 - DNA, 25 bp, Probe sequence
atgtatacatcgtgtccatcgttgt

SEQ ID NO: 98654 - DNA, 25 bp, Probe sequence
aaatgtatacatcgtgtccatcgtt

SEQ ID NO: 98655 - DNA, 25 bp, Probe sequence
aaaatgtatacatcgtgtccatcgt

SEQ ID NO: 98656 - DNA, 25 bp, Probe sequence
aatgtatacatcgtgtccatcgttg

SEQ ID NO: 98657 - DNA, 25 bp, Probe sequence
catcgttgtcaacagcattaaaata

SEQ ID NO: 98658 - DNA, 25 bp, Probe sequence
cgtgtccatcgttgtcaacagcatt

SEQ ID NO: 98659 - DNA, 25 bp, Probe sequence
gtatacatcgtgtccatcgttgtca

SEQ ID NO: 98660 - DNA, 25 bp, Probe sequence
gtccatcgttgtcaacagcattaaa

SEQ ID NO: 98661 - DNA, 25 bp, Probe sequence
gtgtccatcgttgtcaacagcatta

SEQ ID NO: 98662 - DNA, 25 bp, Probe sequence
tgtatacatcgtgtccatcgttgtc

SEQ ID NO: 98663 - DNA, 25 bp, Probe sequence
tcgttgtcaacagcattaaaataga

SEQ ID NO: 98664 - DNA, 25 bp, Probe sequence
tcgtgtccatcgttgtcaacagcat

SEQ ID NO: 98665 - DNA, 25 bp, Probe sequence
tacatcgtgtccatcgttgtcaaca

SEQ ID NO: 98666 - DNA, 25 bp, Probe sequence
tatacatcgtgtccatcgttgtcaa

SEQ ID NO: 98667 - DNA, 25 bp, Probe sequence
ataaattgtcgtatgatgtagttag

SEQ ID NO: 98668 - DNA, 25 bp, Probe sequence
atcaaaccataaattgtcgtatgat

SEQ ID NO: 98669 - DNA, 25 bp, Probe sequence
aaattgtcgtatgatgtagttagaa

SEQ ID NO: 98670 - DNA, 25 bp, Probe sequence
aaccataaattgtcgtatgatgtag

SEQ ID NO: 98671 - DNA, 25 bp, Probe sequence
aatttgcttttgattaaagcatgaa

SEQ ID NO: 98672 - DNA, 25 bp, Probe sequence
aattgtcgtatgatgtagttagaat

SEQ ID NO: 98673 - DNA, 25 bp, Probe sequence
caaaccataaattgtcgtatgatgt

SEQ ID NO: 98674 - DNA, 25 bp, Probe sequence
gcatgaaaattgtaatcaaaccata

SEQ ID NO: 98675 - DNA, 25 bp, Probe sequence
gaattttaaaatgcaggaggtcaag

SEQ ID NO: 98676 - DNA, 25 bp, Probe sequence
gtaatcaaaccataaattgtcgtat

SEQ ID NO: 98677 - DNA, 25 bp, Probe sequence
gtcgtatgatgtagttagaatttta

SEQ ID NO: 98678 - DNA, 25 bp, Probe sequence
tgtcgtatgatgtagttagaatttt

SEQ ID NO: 98679 - DNA, 25 bp, Probe sequence
tcgtatgatgtagttagaattttaa

SEQ ID NO: 98680 - DNA, 25 bp, Probe sequence
ttttaaaatgcaggaggtcaagtat

SEQ ID NO: 98681 - DNA, 25 bp, Probe sequence
ttgtcgtatgatgtagttagaattt

SEQ ID NO: 98682 - DNA, 25 bp, Probe sequence
attattttgcgctataacctttatt

SEQ ID NO: 98683 - DNA, 25 bp, Probe sequence
attttttgtcggataatagtataat

SEQ ID NO: 98684 - DNA, 25 bp, Probe sequence
ataagattattttgcgctataacct

SEQ ID NO: 98685 - DNA, 25 bp, Probe sequence
agattattttgcgctataaccttta

SEQ ID NO: 98686 - DNA, 25 bp, Probe sequence
agagtgaaatagtctaattcttatt

SEQ ID NO: 98687 - DNA, 25 bp, Probe sequence
acagctgtttaaatagagtgaaata

SEQ ID NO: 98688 - DNA, 25 bp, Probe sequence
aagattattttgcgctataaccttt

SEQ ID NO: 98689 - DNA, 25 bp, Probe sequence
aatagtctaattcttatttaataag

SEQ ID NO: 98690 - DNA, 25 bp, Probe sequence
gcgctataacctttattttttgtcg

SEQ ID NO: 98691 - DNA, 25 bp, Probe sequence
gattattttgcgctataacctttat

SEQ ID NO: 98692 - DNA, 25 bp, Probe sequence
tgcgctataacctttattttttgtc

SEQ ID NO: 98693 - DNA, 25 bp, Probe sequence
tattttgcgctataacctttatttt

SEQ ID NO: 98694 - DNA, 25 bp, Probe sequence
tttgcgctataacctttattttttg

SEQ ID NO: 98695 - DNA, 25 bp, Probe sequence
ttttgtcggataatagtataatgct

SEQ ID NO: 98696 - DNA, 25 bp, Probe sequence
ttattttgcgctataacctttattt

SEQ ID NO: 98697 - DNA, 25 bp, Probe sequence
attggactgatgagtttaataattg

SEQ ID NO: 98698 - DNA, 25 bp, Probe sequence
atacttaaataatatgagcactctg

SEQ ID NO: 98699 - DNA, 25 bp, Probe sequence
ataatatgagcactctgtcaaattg

SEQ ID NO: 98700 - DNA, 25 bp, Probe sequence
acttaaataatatgagcactctgtc

SEQ ID NO: 98701 - DNA, 25 bp, Probe sequence
aaataatatgagcactctgtcaaat

SEQ ID NO: 98702 - DNA, 25 bp, Probe sequence
aactagtatgtagttatacttaaat

SEQ ID NO: 98703 - DNA, 25 bp, Probe sequence
aataatatgagcactctgtcaaatt

SEQ ID NO: 98704 - DNA, 25 bp, Probe sequence
aatatgagcactctgtcaaattgga

SEQ ID NO: 98705 - DNA, 25 bp, Probe sequence
caaattggactgatgagtttaataa

SEQ ID NO: 98706 - DNA, 25 bp, Probe sequence
cttaaataatatgagcactctgtca

SEQ ID NO: 98707 - DNA, 25 bp, Probe sequence
ggactgatgagtttaataattgaag

SEQ ID NO: 98708 - DNA, 25 bp, Probe sequence
taatatgagcactctgtcaaattgg

SEQ ID NO: 98709 - DNA, 25 bp, Probe sequence
taaataatatgagcactctgtcaaa

SEQ ID NO: 98710 - DNA, 25 bp, Probe sequence
tacttaaataatatgagcactctgt

SEQ ID NO: 98711 - DNA, 25 bp, Probe sequence
ttaaataatatgagcactctgtcaa

SEQ ID NO: 98712 - DNA, 25 bp, Probe sequence
attcattttataatttatccttaag

SEQ ID NO: 98713 - DNA, 25 bp, Probe sequence
attttcatagattttataatagtat

SEQ ID NO: 98714 - DNA, 25 bp, Probe sequence
acctcttattttcatagattttata

SEQ ID NO: 98715 - DNA, 25 bp, Probe sequence
aacctcttattttcatagattttat

SEQ ID NO: 98716 - DNA, 25 bp, Probe sequence
cattttataatttatccttaagcaa

SEQ ID NO: 98717 - DNA, 25 bp, Probe sequence
cctcttattttcatagattttataa

SEQ ID NO: 98718 - DNA, 25 bp, Probe sequence
tccttaagcaaaattacgttataat

SEQ ID NO: 98719 - DNA, 25 bp, Probe sequence
tcattttataatttatccttaagca

SEQ ID NO: 98720 - DNA, 25 bp, Probe sequence
taaaacctcttattttcatagattt

SEQ ID NO: 98721 - DNA, 25 bp, Probe sequence
tatccttaagcaaaattacgttata

SEQ ID NO: 98722 - DNA, 25 bp, Probe sequence
tttaaaacctcttattttcatagat

SEQ ID NO: 98723 - DNA, 25 bp, Probe sequence
ttatccttaagcaaaattacgttat

SEQ ID NO: 98724 - DNA, 25 bp, Probe sequence
ttatggcaataaattcattttataa

SEQ ID NO: 98725 - DNA, 25 bp, Probe sequence
ttaaaacctcttattttcatagatt

SEQ ID NO: 98726 - DNA, 25 bp, Probe sequence
ttcattttataatttatccttaagc

SEQ ID NO: 98727 - DNA, 25 bp, Probe sequence
attttcctgctaactgtcaacactt

SEQ ID NO: 98728 - DNA, 25 bp, Probe sequence
atagcgacagttacgtgacacgtcc

SEQ ID NO: 98729 - DNA, 25 bp, Probe sequence
acaactgctactttcgttaattcac

SEQ ID NO: 98730 - DNA, 25 bp, Probe sequence
aagagtgttgcatgcttactaagat

SEQ ID NO: 98731 - DNA, 25 bp, Probe sequence
ctttattgaaaatgctgatgtcctt

SEQ ID NO: 98732 - DNA, 25 bp, Probe sequence
cctgctaactgtcaacactttattg

SEQ ID NO: 98733 - DNA, 25 bp, Probe sequence
gcgctcaataatatacaactgctac

SEQ ID NO: 98734 - DNA, 25 bp, Probe sequence
gacacgtccgcattgggaacaacat

SEQ ID NO: 98735 - DNA, 25 bp, Probe sequence
gggaacaacatagcgctcaataata

SEQ ID NO: 98736 - DNA, 25 bp, Probe sequence
tgctactttcgttaattcacacaaa

SEQ ID NO: 98737 - DNA, 25 bp, Probe sequence
tcttcaccttatagcgacagttacg

SEQ ID NO: 98738 - DNA, 25 bp, Probe sequence
ttacgtgacacgtccgcattgggaa

SEQ ID NO: 98739 - DNA, 25 bp, Probe sequence
tatattgttttatgtgtcttcacct

SEQ ID NO: 98740 - DNA, 25 bp, Probe sequence
tattgtaacattttcctgctaactg

SEQ ID NO: 98741 - DNA, 25 bp, Probe sequence
ttatgtgtcttcaccttatagcgac

SEQ ID NO: 98742 - DNA, 25 bp, Probe sequence
attgtgggtgtttgtattgaacgta

SEQ ID NO: 98743 - DNA, 25 bp, Probe sequence
agaaccataattttgaatctatcat

SEQ ID NO: 98744 - DNA, 25 bp, Probe sequence
accataattttgaatctatcatttt

SEQ ID NO: 98745 - DNA, 25 bp, Probe sequence
aaccataattttgaatctatcattt

SEQ ID NO: 98746 - DNA, 25 bp, Probe sequence
aagaaccataattttgaatctatca

SEQ ID NO: 98747 - DNA, 25 bp, Probe sequence
aattgtgggtgtttgtattgaacgt

SEQ ID NO: 98748 - DNA, 25 bp, Probe sequence
cataattttgaatctatcattttta

SEQ ID NO: 98749 - DNA, 25 bp, Probe sequence
cccacaattgtgggtgtttgtattg

SEQ ID NO: 98750 - DNA, 25 bp, Probe sequence
gaatctatcatttttaaattaataa

SEQ ID NO: 98751 - DNA, 25 bp, Probe sequence
gaagaaccataattttgaatctatc

SEQ ID NO: 98752 - DNA, 25 bp, Probe sequence
gaaccataattttgaatctatcatt

SEQ ID NO: 98753 - DNA, 25 bp, Probe sequence
gatgaagaaccataattttgaatct

SEQ ID NO: 98754 - DNA, 25 bp, Probe sequence
taattttgaatctatcatttttaaa

SEQ ID NO: 98755 - DNA, 25 bp, Probe sequence
tttgaatctatcatttttaaattaa

SEQ ID NO: 98756 - DNA, 25 bp, Probe sequence
ttttgaatctatcatttttaaatta

SEQ ID NO: 98757 - DNA, 25 bp, Probe sequence
atgaggattcgtatatcgcaattga

SEQ ID NO: 98758 - DNA, 25 bp, Probe sequence
aaatagggtagctccatataatttt

SEQ ID NO: 98759 - DNA, 25 bp, Probe sequence
aagacttgtaaattctaagttgatt

SEQ ID NO: 98760 - DNA, 25 bp, Probe sequence
cttgtaaattctaagttgattgtaa

SEQ ID NO: 98761 - DNA, 25 bp, Probe sequence
gaatggtaatttgatagagggatga

SEQ ID NO: 98762 - DNA, 25 bp, Probe sequence
gaggattcgtatatcgcaattgata

SEQ ID NO: 98763 - DNA, 25 bp, Probe sequence
gagggatgaggattcgtatatcgca

SEQ ID NO: 98764 - DNA, 25 bp, Probe sequence
gattgtaaaatagggtagctccata

SEQ ID NO: 98765 - DNA, 25 bp, Probe sequence
gttgattgtaaaatagggtagctcc

SEQ ID NO: 98766 - DNA, 25 bp, Probe sequence
gtaaaatagggtagctccatataat

SEQ ID NO: 98767 - DNA, 25 bp, Probe sequence
gggatgaggattcgtatatcgcaat

SEQ ID NO: 98768 - DNA, 25 bp, Probe sequence
ggattcgtatatcgcaattgataat

SEQ ID NO: 98769 - DNA, 25 bp, Probe sequence
ggatgaggattcgtatatcgcaatt

SEQ ID NO: 98770 - DNA, 25 bp, Probe sequence
tgaggattcgtatatcgcaattgat

SEQ ID NO: 98771 - DNA, 25 bp, Probe sequence
tcgtatatcgcaattgataatttta

SEQ ID NO: 98772 - DNA, 25 bp, Probe sequence
attgtcgaataaacgttatcacgta

SEQ ID NO: 98773 - DNA, 25 bp, Probe sequence
atatgcctcctataaataagatttc

SEQ ID NO: 98774 - DNA, 25 bp, Probe sequence
atgcctcctataaataagatttcac

SEQ ID NO: 98775 - DNA, 25 bp, Probe sequence
aaaagtgataacgctatattgtcga

SEQ ID NO: 98776 - DNA, 25 bp, Probe sequence
aagtgataacgctatattgtcgaat

SEQ ID NO: 98777 - DNA, 25 bp, Probe sequence
aataagatttcactattttagcaaa

SEQ ID NO: 98778 - DNA, 25 bp, Probe sequence
cactattttagcaaattttctgaaa

SEQ ID NO: 98779 - DNA, 25 bp, Probe sequence
gcctcctataaataagatttcacta

SEQ ID NO: 98780 - DNA, 25 bp, Probe sequence
gaataaacgttatcacgtaacgatt

SEQ ID NO: 98781 - DNA, 25 bp, Probe sequence
gataacgctatattgtcgaataaac

SEQ ID NO: 98782 - DNA, 25 bp, Probe sequence
gatttcactattttagcaaattttc

SEQ ID NO: 98783 - DNA, 25 bp, Probe sequence
gtgataacgctatattgtcgaataa

SEQ ID NO: 98784 - DNA, 25 bp, Probe sequence
tgtcgaataaacgttatcacgtaac

SEQ ID NO: 98785 - DNA, 25 bp, Probe sequence
taacgctatattgtcgaataaacgt

SEQ ID NO: 98786 - DNA, 25 bp, Probe sequence
ttcactattttagcaaattttctga

SEQ ID NO: 98787 - DNA, 25 bp, Probe sequence
attgttgtttgacagcataacttga

SEQ ID NO: 98788 - DNA, 25 bp, Probe sequence
agtgaatgattgaaccaaaggtttc

SEQ ID NO: 98789 - DNA, 25 bp, Probe sequence
accaaaggtttcatattgagttaca

SEQ ID NO: 98790 - DNA, 25 bp, Probe sequence
gaatgattgaaccaaaggtttcata

SEQ ID NO: 98791 - DNA, 25 bp, Probe sequence
gaaccaaaggtttcatattgagtta

SEQ ID NO: 98792 - DNA, 25 bp, Probe sequence
gacagcataacttgaagtgaatgat

SEQ ID NO: 98793 - DNA, 25 bp, Probe sequence
gattgttgtttgacagcataacttg

SEQ ID NO: 98794 - DNA, 25 bp, Probe sequence
gttgtttgacagcataacttgaagt

SEQ ID NO: 98795 - DNA, 25 bp, Probe sequence
gtttgacagcataacttgaagtgaa

SEQ ID NO: 98796 - DNA, 25 bp, Probe sequence
tgattgttgtttgacagcataactt

SEQ ID NO: 98797 - DNA, 25 bp, Probe sequence
taacttgaagtgaatgattgaacca

SEQ ID NO: 98798 - DNA, 25 bp, Probe sequence
tttgattgttgtttgacagcataac

SEQ ID NO: 98799 - DNA, 25 bp, Probe sequence
ttgttgtttgacagcataacttgaa

SEQ ID NO: 98800 - DNA, 25 bp, Probe sequence
ttgtttgacagcataacttgaagtg

SEQ ID NO: 98801 - DNA, 25 bp, Probe sequence
ttgattgttgtttgacagcataact

SEQ ID NO: 98802 - DNA, 25 bp, Probe sequence
atctaacttcaatagggtttgcgct

SEQ ID NO: 98803 - DNA, 25 bp, Probe sequence
agcgcaaatctaacttcaatagggt

SEQ ID NO: 98804 - DNA, 25 bp, Probe sequence
acagctaaagcgcaaatctaacttc

SEQ ID NO: 98805 - DNA, 25 bp, Probe sequence
aaagcgcaaatctaacttcaatagg

SEQ ID NO: 98806 - DNA, 25 bp, Probe sequence
aattttcagaaatggagtggggatt

SEQ ID NO: 98807 - DNA, 25 bp, Probe sequence
aatttaaacagctaaagcgcaaatc

SEQ ID NO: 98808 - DNA, 25 bp, Probe sequence
ctaacttcaatagggtttgcgcttt

SEQ ID NO: 98809 - DNA, 25 bp, Probe sequence
cgcaaatctaacttcaatagggttt

SEQ ID NO: 98810 - DNA, 25 bp, Probe sequence
gcgctttttttagtcaaatagtaga

SEQ ID NO: 98811 - DNA, 25 bp, Probe sequence
gctaaagcgcaaatctaacttcaat

SEQ ID NO: 98812 - DNA, 25 bp, Probe sequence
gaatgatttatatctgaattttcag

SEQ ID NO: 98813 - DNA, 25 bp, Probe sequence
gtttgcgctttttttagtcaaatag

SEQ ID NO: 98814 - DNA, 25 bp, Probe sequence
tcaatagggtttgcgctttttttag

SEQ ID NO: 98815 - DNA, 25 bp, Probe sequence
taacttcaatagggtttgcgctttt

SEQ ID NO: 98816 - DNA, 25 bp, Probe sequence
ttgcgctttttttagtcaaatagta

SEQ ID NO: 98817 - DNA, 25 bp, Probe sequence
atagctggttagtatgcctaggtga

SEQ ID NO: 98818 - DNA, 25 bp, Probe sequence
agctggttagtatgcctaggtgact

SEQ ID NO: 98819 - DNA, 25 bp, Probe sequence
aatatagctggttagtatgcctagg

SEQ ID NO: 98820 - DNA, 25 bp, Probe sequence
gcctaggtgactataacggagtatc

SEQ ID NO: 98821 - DNA, 25 bp, Probe sequence
gaagtagttattctagttacattag

SEQ ID NO: 98822 - DNA, 25 bp, Probe sequence
gaggtagaaatatagctggttagta

SEQ ID NO: 98823 - DNA, 25 bp, Probe sequence
gttattctagttacattagtaatct

SEQ ID NO: 98824 - DNA, 25 bp, Probe sequence
gtatgcctaggtgactataacggag

SEQ ID NO: 98825 - DNA, 25 bp, Probe sequence
gtatcgaagtagttattctagttac

SEQ ID NO: 98826 - DNA, 25 bp, Probe sequence
ggtgactataacggagtatcgaagt

SEQ ID NO: 98827 - DNA, 25 bp, Probe sequence
ggttagtatgcctaggtgactataa

SEQ ID NO: 98828 - DNA, 25 bp, Probe sequence
ggagtatcgaagtagttattctagt

SEQ ID NO: 98829 - DNA, 25 bp, Probe sequence
taatctttatatttctaccttattt

SEQ ID NO: 98830 - DNA, 25 bp, Probe sequence
tagtaatctttatatttctacctta

SEQ ID NO: 98831 - DNA, 25 bp, Probe sequence
tatatttctaccttattttaagaag

SEQ ID NO: 98832 - DNA, 25 bp, Probe sequence
attgctagtaatacactatacaact

SEQ ID NO: 98833 - DNA, 25 bp, Probe sequence
attttcagactatcttgttctagta

SEQ ID NO: 98834 - DNA, 25 bp, Probe sequence
atgtattttcagactatcttgttct

SEQ ID NO: 98835 - DNA, 25 bp, Probe sequence
acttaacctccattatatgatttat

SEQ ID NO: 98836 - DNA, 25 bp, Probe sequence
acaaataagttaagtaggtggcaca

SEQ ID NO: 98837 - DNA, 25 bp, Probe sequence
acaactttagatgtattttcagact

SEQ ID NO: 98838 - DNA, 25 bp, Probe sequence
cagactatcttgttctagtaaaaat

SEQ ID NO: 98839 - DNA, 25 bp, Probe sequence
gatgtattttcagactatcttgttc

SEQ ID NO: 98840 - DNA, 25 bp, Probe sequence
gatttatatatgctttaattatgtc

SEQ ID NO: 98841 - DNA, 25 bp, Probe sequence
gtattttcagactatcttgttctag

SEQ ID NO: 98842 - DNA, 25 bp, Probe sequence
gtaatacactatacaactttagatg

SEQ ID NO: 98843 - DNA, 25 bp, Probe sequence
gtgataaaatctagttgttataaac

SEQ ID NO: 98844 - DNA, 25 bp, Probe sequence
tgtcttttttttataattattgcta

SEQ ID NO: 98845 - DNA, 25 bp, Probe sequence
tttcagactatcttgttctagtaaa

SEQ ID NO: 98846 - DNA, 25 bp, Probe sequence
ttaacctccattatatgatttatat

SEQ ID NO: 98847 - DNA, 25 bp, Probe sequence
attagagcctactcatattcattcc

SEQ ID NO: 98848 - DNA, 25 bp, Probe sequence
aggctcttaatgtacttttctgtct

SEQ ID NO: 98849 - DNA, 25 bp, Probe sequence
agcctactcatattcattcctaaga

SEQ ID NO: 98850 - DNA, 25 bp, Probe sequence
aataaattagagcctactcatattc

SEQ ID NO: 98851 - DNA, 25 bp, Probe sequence
cttaatgtacttttctgtctgtaaa

SEQ ID NO: 98852 - DNA, 25 bp, Probe sequence
ctactcatattcattcctaagaatg

SEQ ID NO: 98853 - DNA, 25 bp, Probe sequence
ctcttaatgtacttttctgtctgta

SEQ ID NO: 98854 - DNA, 25 bp, Probe sequence
gctcttaatgtacttttctgtctgt

SEQ ID NO: 98855 - DNA, 25 bp, Probe sequence
gaatgtaatgagtaggctcttaatg

SEQ ID NO: 98856 - DNA, 25 bp, Probe sequence
gagtaggctcttaatgtacttttct

SEQ ID NO: 98857 - DNA, 25 bp, Probe sequence
gtaggctcttaatgtacttttctgt

SEQ ID NO: 98858 - DNA, 25 bp, Probe sequence
gcctactcatattcattcctaagaa

SEQ ID NO: 98859 - DNA, 25 bp, Probe sequence
ggctcttaatgtacttttctgtctg

SEQ ID NO: 98860 - DNA, 25 bp, Probe sequence
tagagcctactcatattcattccta

SEQ ID NO: 98861 - DNA, 25 bp, Probe sequence
taggctcttaatgtacttttctgtc

SEQ ID NO: 98862 - DNA, 25 bp, Probe sequence
atgattatgtttaagtttggtggta

SEQ ID NO: 98863 - DNA, 25 bp, Probe sequence
acatgtcctacgtttattaatgaac

SEQ ID NO: 98864 - DNA, 25 bp, Probe sequence
aatcgcgcccttacatatttgttgt

SEQ ID NO: 98865 - DNA, 25 bp, Probe sequence
cacctttataactaacatgtcctac

SEQ ID NO: 98866 - DNA, 25 bp, Probe sequence
gaacgtatcattaatagagtgaaca

SEQ ID NO: 98867 - DNA, 25 bp, Probe sequence
gaaatcatcagagagctagtggtcg

SEQ ID NO: 98868 - DNA, 25 bp, Probe sequence
gagagctagtggtcgctgtgaacta

SEQ ID NO: 98869 - DNA, 25 bp, Probe sequence
gagtgaacattatcttatgattatg

SEQ ID NO: 98870 - DNA, 25 bp, Probe sequence
gtataccatatttaagcaatttgac

SEQ ID NO: 98871 - DNA, 25 bp, Probe sequence
gtcgctgtgaactagtgtttttaat

SEQ ID NO: 98872 - DNA, 25 bp, Probe sequence
gtggtcgctgtgaactagtgttttt

SEQ ID NO: 98873 - DNA, 25 bp, Probe sequence
taatatgaatacacctttataacta

SEQ ID NO: 98874 - DNA, 25 bp, Probe sequence
taacctcctaaattacgtatagtat

SEQ ID NO: 98875 - DNA, 25 bp, Probe sequence
taactaacatgtcctacgtttatta

SEQ ID NO: 98876 - DNA, 25 bp, Probe sequence
tttggtggtaacgtgcaatcgcgcc

SEQ ID NO: 98877 - DNA, 25 bp, Probe sequence
attgattggtttaatggctttcctt

SEQ ID NO: 98878 - DNA, 25 bp, Probe sequence
agaacagcagtgagaaattttctaa

SEQ ID NO: 98879 - DNA, 25 bp, Probe sequence
agcatatgtatggttaactttgtaa

SEQ ID NO: 98880 - DNA, 25 bp, Probe sequence
aacaatgtgaaagcaattaatttat

SEQ ID NO: 98881 - DNA, 25 bp, Probe sequence
aactattgattggtttaatggcttt

SEQ ID NO: 98882 - DNA, 25 bp, Probe sequence
gaaagcaattaatttataaactatt

SEQ ID NO: 98883 - DNA, 25 bp, Probe sequence
gattggtttaatggctttcctttag

SEQ ID NO: 98884 - DNA, 25 bp, Probe sequence
gtatggttaactttgtaaacaatgt

SEQ ID NO: 98885 - DNA, 25 bp, Probe sequence
tggtttaatggctttcctttagagt

SEQ ID NO: 98886 - DNA, 25 bp, Probe sequence
tgattggtttaatggctttccttta

SEQ ID NO: 98887 - DNA, 25 bp, Probe sequence
taatggctttcctttagagtaaata

SEQ ID NO: 98888 - DNA, 25 bp, Probe sequence
tattgattggtttaatggctttcct

SEQ ID NO: 98889 - DNA, 25 bp, Probe sequence
ttaatggctttcctttagagtaaat

SEQ ID NO: 98890 - DNA, 25 bp, Probe sequence
ttgattggtttaatggctttccttt

SEQ ID NO: 98891 - DNA, 25 bp, Probe sequence
ttggtttaatggctttcctttagag

SEQ ID NO: 98892 - DNA, 25 bp, Probe sequence
aatagtttaatagaccggactgttg

SEQ ID NO: 98893 - DNA, 25 bp, Probe sequence
agaccggactgttggagatgcatta

SEQ ID NO: 98894 - DNA, 25 bp, Probe sequence
agcagttcggttttttgctgtgcta

SEQ ID NO: 98895 - DNA, 25 bp, Probe sequence
accggactgttggagatgcattatt

SEQ ID NO: 98896 - DNA, 25 bp, Probe sequence
aaatcatgtcaattgtttaataaag

SEQ ID NO: 98897 - DNA, 25 bp, Probe sequence
aatagaccggactgttggagatgca

SEQ ID NO: 98898 - DNA, 25 bp, Probe sequence
cagttcggttttttgctgtgctaaa

SEQ ID NO: 98899 - DNA, 25 bp, Probe sequence
cattatttcagcagttcggtttttt

SEQ ID NO: 98900 - DNA, 25 bp, Probe sequence
gatgcattatttcagcagttcggtt

SEQ ID NO: 98901 - DNA, 25 bp, Probe sequence
gtttaatagaccggactgttggaga

SEQ ID NO: 98902 - DNA, 25 bp, Probe sequence
ggagatgcattatttcagcagttcg

SEQ ID NO: 98903 - DNA, 25 bp, Probe sequence
ggactgttggagatgcattatttca

SEQ ID NO: 98904 - DNA, 25 bp, Probe sequence
ttcggttttttgctgtgctaaaaat

SEQ ID NO: 98905 - DNA, 25 bp, Probe sequence
ttttgctgtgctaaaaatagattcc

SEQ ID NO: 98906 - DNA, 25 bp, Probe sequence
ttatttcagcagttcggttttttgc

SEQ ID NO: 98907 - DNA, 25 bp, Probe sequence
agcgctaacccgatttagtcgacaa

SEQ ID NO: 98908 - DNA, 25 bp, Probe sequence
atagttatcaatagtatcaagcgct

SEQ ID NO: 98909 - DNA, 25 bp, Probe sequence
atggcatatctttatattgcttttt

SEQ ID NO: 98910 - DNA, 25 bp, Probe sequence
agtatcaagcgctaaaagttttata

SEQ ID NO: 98911 - DNA, 25 bp, Probe sequence
agagctgttaacttgtgtcatatca

SEQ ID NO: 98912 - DNA, 25 bp, Probe sequence
acttgtgtcatatcatttcgtagaa

SEQ ID NO: 98913 - DNA, 25 bp, Probe sequence
aaaatttcttagctacaacttacat

SEQ ID NO: 98914 - DNA, 25 bp, Probe sequence
aacagttcgttattatatgaatgta

SEQ ID NO: 98915 - DNA, 25 bp, Probe sequence
cgtttactttacgataagcaatata

SEQ ID NO: 98916 - DNA, 25 bp, Probe sequence
gcaaaaatgaaagcgctaacccgat

SEQ ID NO: 98917 - DNA, 25 bp, Probe sequence
gaatgttattgaagatttttttcga

SEQ ID NO: 98918 - DNA, 25 bp, Probe sequence
tcttagctacaacttacatattata

SEQ ID NO: 98919 - DNA, 25 bp, Probe sequence
taaagggtgacaacatatttcatgt

SEQ ID NO: 98920 - DNA, 25 bp, Probe sequence
tagtcgacaagtttttaacagttcg

SEQ ID NO: 98921 - DNA, 25 bp, Probe sequence
ttatttttaatatgatctttggaag

SEQ ID NO: 98922 - DNA, 25 bp, Probe sequence
actcctcaatcgacgtcgtgattgt

SEQ ID NO: 98923 - DNA, 25 bp, Probe sequence
aactcctcaatcgacgtcgtgattg

SEQ ID NO: 98924 - DNA, 25 bp, Probe sequence
caactcctcaatcgacgtcgtgatt

SEQ ID NO: 98925 - DNA, 25 bp, Probe sequence
ctcaatcgacgtcgtgattgtatta

SEQ ID NO: 98926 - DNA, 25 bp, Probe sequence
ctcctcaatcgacgtcgtgattgta

SEQ ID NO: 98927 - DNA, 25 bp, Probe sequence
gcgttttcacataacaaagggggag

SEQ ID NO: 98928 - DNA, 25 bp, Probe sequence
gaaagcgttttcacataacaaaggg

SEQ ID NO: 98929 - DNA, 25 bp, Probe sequence
gaaagaaagcgttttcacataacaa

SEQ ID NO: 98930 - DNA, 25 bp, Probe sequence
gacgtcgtgattgtattaaattcat

SEQ ID NO: 98931 - DNA, 25 bp, Probe sequence
gagaaagaaagcgttttcacataac

SEQ ID NO: 98932 - DNA, 25 bp, Probe sequence
gattgtattaaattcattatataga

SEQ ID NO: 98933 - DNA, 25 bp, Probe sequence
gtcgtgattgtattaaattcattat

SEQ ID NO: 98934 - DNA, 25 bp, Probe sequence
tcctcaatcgacgtcgtgattgtat

SEQ ID NO: 98935 - DNA, 25 bp, Probe sequence
tcgacgtcgtgattgtattaaattc

SEQ ID NO: 98936 - DNA, 25 bp, Probe sequence
ttcacataacaaagggggagtttca

SEQ ID NO: 98937 - DNA, 25 bp, Probe sequence
attcacaaaattaggcattcatcta

SEQ ID NO: 98938 - DNA, 25 bp, Probe sequence
attaggcattcatctaacgacccaa

SEQ ID NO: 98939 - DNA, 25 bp, Probe sequence
atatgggtgttggaagaatgccttt

SEQ ID NO: 98940 - DNA, 25 bp, Probe sequence
atgggtgttggaagaatgcctttta

SEQ ID NO: 98941 - DNA, 25 bp, Probe sequence
aacgacccaaattatatgggtgttg

SEQ ID NO: 98942 - DNA, 25 bp, Probe sequence
aattaggcattcatctaacgaccca

SEQ ID NO: 98943 - DNA, 25 bp, Probe sequence
cattcatctaacgacccaaattata

SEQ ID NO: 98944 - DNA, 25 bp, Probe sequence
gcattcatctaacgacccaaattat

SEQ ID NO: 98945 - DNA, 25 bp, Probe sequence
gaagaatgccttttatttatctttt

SEQ ID NO: 98946 - DNA, 25 bp, Probe sequence
gttggaagaatgccttttatttatc

SEQ ID NO: 98947 - DNA, 25 bp, Probe sequence
gggtgttggaagaatgccttttatt

SEQ ID NO: 98948 - DNA, 25 bp, Probe sequence
ggcattcatctaacgacccaaatta

SEQ ID NO: 98949 - DNA, 25 bp, Probe sequence
taggcattcatctaacgacccaaat

SEQ ID NO: 98950 - DNA, 25 bp, Probe sequence
ttaaaatcgttgcagattaggttac

SEQ ID NO: 98951 - DNA, 25 bp, Probe sequence
ttcatctaacgacccaaattatatg

SEQ ID NO: 98952 - DNA, 25 bp, Probe sequence
attaaagattatgactgatagcagt

SEQ ID NO: 98953 - DNA, 25 bp, Probe sequence
atcgacaattttaaacttacagcca

SEQ ID NO: 98954 - DNA, 25 bp, Probe sequence
atgtcatgttgaagtagaatattat

SEQ ID NO: 98955 - DNA, 25 bp, Probe sequence
acgattgttataatacttcgacact

SEQ ID NO: 98956 - DNA, 25 bp, Probe sequence
acttcgacacttgttcaatttcaca

SEQ ID NO: 98957 - DNA, 25 bp, Probe sequence
caattttaaacttacagccattcta

SEQ ID NO: 98958 - DNA, 25 bp, Probe sequence
gaatattatctttgaatcgacaatt

SEQ ID NO: 98959 - DNA, 25 bp, Probe sequence
gacacttgttcaatttcacaattat

SEQ ID NO: 98960 - DNA, 25 bp, Probe sequence
gactacttaactaatatgtcatgtt

SEQ ID NO: 98961 - DNA, 25 bp, Probe sequence
gagtatattacttttagagtggcta

SEQ ID NO: 98962 - DNA, 25 bp, Probe sequence
gttataatacttcgacacttgttca

SEQ ID NO: 98963 - DNA, 25 bp, Probe sequence
ggtatactgcacttaacgattgtta

SEQ ID NO: 98964 - DNA, 25 bp, Probe sequence
tacagccattctaagagtatattac

SEQ ID NO: 98965 - DNA, 25 bp, Probe sequence
tattccaaggaaactatagactact

SEQ ID NO: 98966 - DNA, 25 bp, Probe sequence
ttagagtggctattattttttgtat

SEQ ID NO: 98967 - DNA, 25 bp, Probe sequence
atagccgctcatgttggtgagtgat

SEQ ID NO: 98968 - DNA, 25 bp, Probe sequence
aaggcaacgcgatcatttcatgtat

SEQ ID NO: 98969 - DNA, 25 bp, Probe sequence
agtgatgttcactatagatttatat

SEQ ID NO: 98970 - DNA, 25 bp, Probe sequence
cactaattcaaatatagccgctcat

SEQ ID NO: 98971 - DNA, 25 bp, Probe sequence
gctgtttgaaacatcgttagataac

SEQ ID NO: 98972 - DNA, 25 bp, Probe sequence
gaataatcaatcatagcagtaagct

SEQ ID NO: 98973 - DNA, 25 bp, Probe sequence
gaaatgtcagtctcgaatcatataa

SEQ ID NO: 98974 - DNA, 25 bp, Probe sequence
gatcatttcatgtatttatgctgtt

SEQ ID NO: 98975 - DNA, 25 bp, Probe sequence
gattattttctgtcaatttagggtt

SEQ ID NO: 98976 - DNA, 25 bp, Probe sequence
gttatattgcacattttaagctgaa

SEQ ID NO: 98977 - DNA, 25 bp, Probe sequence
gtgcttaccttttttgatatcatca

SEQ ID NO: 98978 - DNA, 25 bp, Probe sequence
ggtacaatgacgttcactaattcaa

SEQ ID NO: 98979 - DNA, 25 bp, Probe sequence
ggtaggcattcaggtgcttaccttt

SEQ ID NO: 98980 - DNA, 25 bp, Probe sequence
taagcgttaggttgaatgtatgaga

SEQ ID NO: 98981 - DNA, 25 bp, Probe sequence
tataactttccaataatgactgaga

SEQ ID NO: 98982 - DNA, 25 bp, Probe sequence
atgcacttaaatgaggttgttactt

SEQ ID NO: 98983 - DNA, 25 bp, Probe sequence
atgaggttgttacttatttaagtgc

SEQ ID NO: 98984 - DNA, 25 bp, Probe sequence
aaatgcacttaaatgaggttgttac

SEQ ID NO: 98985 - DNA, 25 bp, Probe sequence
aagtgcatttgttataggaggatat

SEQ ID NO: 98986 - DNA, 25 bp, Probe sequence
aatgaggttgttacttatttaagtg

SEQ ID NO: 98987 - DNA, 25 bp, Probe sequence
aatgcacttaaatgaggttgttact

SEQ ID NO: 98988 - DNA, 25 bp, Probe sequence
cacttaaatgaggttgttacttatt

SEQ ID NO: 98989 - DNA, 25 bp, Probe sequence
gcacttaaatgaggttgttacttat

SEQ ID NO: 98990 - DNA, 25 bp, Probe sequence
gaggttgttacttatttaagtgcat

SEQ ID NO: 98991 - DNA, 25 bp, Probe sequence
gttgttacttatttaagtgcatttg

SEQ ID NO: 98992 - DNA, 25 bp, Probe sequence
gtgcatttgttataggaggatatac

SEQ ID NO: 98993 - DNA, 25 bp, Probe sequence
ggttgttacttatttaagtgcattt

SEQ ID NO: 98994 - DNA, 25 bp, Probe sequence
tgcacttaaatgaggttgttactta

SEQ ID NO: 98995 - DNA, 25 bp, Probe sequence
taagtgcatttgttataggaggata

SEQ ID NO: 98996 - DNA, 25 bp, Probe sequence
ttaagtgcatttgttataggaggat

SEQ ID NO: 98997 - DNA, 25 bp, Probe sequence
attacatgttaattaggaggcgttt

SEQ ID NO: 98998 - DNA, 25 bp, Probe sequence
atgacattattacatgttaattagg

SEQ ID NO: 98999 - DNA, 25 bp, Probe sequence
agtagtatgggtatttattattaat

SEQ ID NO: 99000 - DNA, 25 bp, Probe sequence
agagtagtatgggtatttattatta

SEQ ID NO: 99001 - DNA, 25 bp, Probe sequence
cattattacatgttaattaggaggc

SEQ ID NO: 99002 - DNA, 25 bp, Probe sequence
gacattattacatgttaattaggag

SEQ ID NO: 99003 - DNA, 25 bp, Probe sequence
gagtagtatgggtatttattattaa

SEQ ID NO: 99004 - DNA, 25 bp, Probe sequence
gtagtatgggtatttattattaatg

SEQ ID NO: 99005 - DNA, 25 bp, Probe sequence
tgacattattacatgttaattagga

SEQ ID NO: 99006 - DNA, 25 bp, Probe sequence
taatgacattattacatgttaatta

SEQ ID NO: 99007 - DNA, 25 bp, Probe sequence
tacatgttaattaggaggcgttttt

SEQ ID NO: 99008 - DNA, 25 bp, Probe sequence
tagagtagtatgggtatttattatt

SEQ ID NO: 99009 - DNA, 25 bp, Probe sequence
tattaatgacattattacatgttaa

SEQ ID NO: 99010 - DNA, 25 bp, Probe sequence
ttacatgttaattaggaggcgtttt

SEQ ID NO: 99011 - DNA, 25 bp, Probe sequence
ttaatgacattattacatgttaatt

SEQ ID NO: 99012 - DNA, 25 bp, Probe sequence
attgtaaactattataaggtgcgaa

SEQ ID NO: 99013 - DNA, 25 bp, Probe sequence
atactcgtttttctctgttactatg

SEQ ID NO: 99014 - DNA, 25 bp, Probe sequence
aggtgcgaaattaggagtgttacat

SEQ ID NO: 99015 - DNA, 25 bp, Probe sequence
actcgtttttctctgttactatgtg

SEQ ID NO: 99016 - DNA, 25 bp, Probe sequence
actatgtgttgatttattgtaaact

SEQ ID NO: 99017 - DNA, 25 bp, Probe sequence
aatactcgtttttctctgttactat

SEQ ID NO: 99018 - DNA, 25 bp, Probe sequence
ctcgtttttctctgttactatgtgt

SEQ ID NO: 99019 - DNA, 25 bp, Probe sequence
ctgttactatgtgttgatttattgt

SEQ ID NO: 99020 - DNA, 25 bp, Probe sequence
cgtttttctctgttactatgtgttg

SEQ ID NO: 99021 - DNA, 25 bp, Probe sequence
gtttttctctgttactatgtgttga

SEQ ID NO: 99022 - DNA, 25 bp, Probe sequence
gtaatactcgtttttctctgttact

SEQ ID NO: 99023 - DNA, 25 bp, Probe sequence
taatactcgtttttctctgttacta

SEQ ID NO: 99024 - DNA, 25 bp, Probe sequence
tactcgtttttctctgttactatgt

SEQ ID NO: 99025 - DNA, 25 bp, Probe sequence
ttttctctgttactatgtgttgatt

SEQ ID NO: 99026 - DNA, 25 bp, Probe sequence
ttctctgttactatgtgttgattta

SEQ ID NO: 99027 - DNA, 25 bp, Probe sequence
attatctctaaatagttatatataa

SEQ ID NO: 99028 - DNA, 25 bp, Probe sequence
ataacaactattatctctaaatagt

SEQ ID NO: 99029 - DNA, 25 bp, Probe sequence
atctctaaatagttatatataatca

SEQ ID NO: 99030 - DNA, 25 bp, Probe sequence
acaactattatctctaaatagttat

SEQ ID NO: 99031 - DNA, 25 bp, Probe sequence
aataacaactattatctctaaatag

SEQ ID NO: 99032 - DNA, 25 bp, Probe sequence
cgggtaataacaactattatctcta

SEQ ID NO: 99033 - DNA, 25 bp, Probe sequence
gtaataacaactattatctctaaat

SEQ ID NO: 99034 - DNA, 25 bp, Probe sequence
gggtaataacaactattatctctaa

SEQ ID NO: 99035 - DNA, 25 bp, Probe sequence
ggtaataacaactattatctctaaa

SEQ ID NO: 99036 - DNA, 25 bp, Probe sequence
tcgggtaataacaactattatctct

SEQ ID NO: 99037 - DNA, 25 bp, Probe sequence
taatcattaattaaggagacataaa

SEQ ID NO: 99038 - DNA, 25 bp, Probe sequence
taataacaactattatctctaaata

SEQ ID NO: 99039 - DNA, 25 bp, Probe sequence
taacaactattatctctaaatagtt

SEQ ID NO: 99040 - DNA, 25 bp, Probe sequence
tatctctaaatagttatatataatc

SEQ ID NO: 99041 - DNA, 25 bp, Probe sequence
tattatctctaaatagttatatata

SEQ ID NO: 99042 - DNA, 25 bp, Probe sequence
attcatatcattagtttaccatatt

SEQ ID NO: 99043 - DNA, 25 bp, Probe sequence
attagtttaccatattgaagatgat

SEQ ID NO: 99044 - DNA, 25 bp, Probe sequence
atatcattagtttaccatattgaag

SEQ ID NO: 99045 - DNA, 25 bp, Probe sequence
atcattagtttaccatattgaagat

SEQ ID NO: 99046 - DNA, 25 bp, Probe sequence
agtttaccatattgaagatgatata

SEQ ID NO: 99047 - DNA, 25 bp, Probe sequence
aaattcatatcattagtttaccata

SEQ ID NO: 99048 - DNA, 25 bp, Probe sequence
aattcatatcattagtttaccatat

SEQ ID NO: 99049 - DNA, 25 bp, Probe sequence
caaattcatatcattagtttaccat

SEQ ID NO: 99050 - DNA, 25 bp, Probe sequence
catatcattagtttaccatattgaa

SEQ ID NO: 99051 - DNA, 25 bp, Probe sequence
tcattagtttaccatattgaagatg

SEQ ID NO: 99052 - DNA, 25 bp, Probe sequence
tcatatcattagtttaccatattga

SEQ ID NO: 99053 - DNA, 25 bp, Probe sequence
tcaaattcatatcattagtttacca

SEQ ID NO: 99054 - DNA, 25 bp, Probe sequence
taacttataaggagtgagaactttt

SEQ ID NO: 99055 - DNA, 25 bp, Probe sequence
tatcattagtttaccatattgaaga

SEQ ID NO: 99056 - DNA, 25 bp, Probe sequence
ttcatatcattagtttaccatattg

SEQ ID NO: 99057 - DNA, 25 bp, Probe sequence
attagggtgtggctcatttttaagt

SEQ ID NO: 99058 - DNA, 25 bp, Probe sequence
atgagccacatccaatcttactaat

SEQ ID NO: 99059 - DNA, 25 bp, Probe sequence
actaattagggtgtggctcattttt

SEQ ID NO: 99060 - DNA, 25 bp, Probe sequence
acatccaatcttactaattagggtg

SEQ ID NO: 99061 - DNA, 25 bp, Probe sequence
aaaatgagccacatccaatcttact

SEQ ID NO: 99062 - DNA, 25 bp, Probe sequence
aatgagccacatccaatcttactaa

SEQ ID NO: 99063 - DNA, 25 bp, Probe sequence
aatcttactaattagggtgtggctc

SEQ ID NO: 99064 - DNA, 25 bp, Probe sequence
gccacatccaatcttactaattagg

SEQ ID NO: 99065 - DNA, 25 bp, Probe sequence
gctcatttttaagttttacgatcca

SEQ ID NO: 99066 - DNA, 25 bp, Probe sequence
gagccacatccaatcttactaatta

SEQ ID NO: 99067 - DNA, 25 bp, Probe sequence
gatgtattactaaacaaattttcaa

SEQ ID NO: 99068 - DNA, 25 bp, Probe sequence
gtgtggctcatttttaagttttacg

SEQ ID NO: 99069 - DNA, 25 bp, Probe sequence
gtggctcatttttaagttttacgat

SEQ ID NO: 99070 - DNA, 25 bp, Probe sequence
taagttttacgatccaaatcaaata

SEQ ID NO: 99071 - DNA, 25 bp, Probe sequence
tagggtgtggctcatttttaagttt

SEQ ID NO: 99072 - DNA, 25 bp, Probe sequence
ataagtgttttttcgtactataatg

SEQ ID NO: 99073 - DNA, 25 bp, Probe sequence
atcataagtgttttttcgtactata

SEQ ID NO: 99074 - DNA, 25 bp, Probe sequence
aacacttatgagggtatgtacacat

SEQ ID NO: 99075 - DNA, 25 bp, Probe sequence
caatcataagtgttttttcgtacta

SEQ ID NO: 99076 - DNA, 25 bp, Probe sequence
cacttatgagggtatgtacacatac

SEQ ID NO: 99077 - DNA, 25 bp, Probe sequence
cacatacaatcataagtgttttttc

SEQ ID NO: 99078 - DNA, 25 bp, Probe sequence
gagggtatgtacacatacaatcata

SEQ ID NO: 99079 - DNA, 25 bp, Probe sequence
gtatgtacacatacaatcataagtg

SEQ ID NO: 99080 - DNA, 25 bp, Probe sequence
tgttttttcgtactataatggttct

SEQ ID NO: 99081 - DNA, 25 bp, Probe sequence
tcataagtgttttttcgtactataa

SEQ ID NO: 99082 - DNA, 25 bp, Probe sequence
taatggttctatagataaaggttct

SEQ ID NO: 99083 - DNA, 25 bp, Probe sequence
taagtgttttttcgtactataatgg

SEQ ID NO: 99084 - DNA, 25 bp, Probe sequence
tacaatcataagtgttttttcgtac

SEQ ID NO: 99085 - DNA, 25 bp, Probe sequence
ttttttcgtactataatggttctat

SEQ ID NO: 99086 - DNA, 25 bp, Probe sequence
tttttcgtactataatggttctata

SEQ ID NO: 99087 - DNA, 25 bp, Probe sequence
agtacgtaaatgttacagttcataa

SEQ ID NO: 99088 - DNA, 25 bp, Probe sequence
acatgtagttttagacacggtaaca

SEQ ID NO: 99089 - DNA, 25 bp, Probe sequence
aaacctatttctagagccattttct

SEQ ID NO: 99090 - DNA, 25 bp, Probe sequence
aaaactagagtttatcgcctacaga

SEQ ID NO: 99091 - DNA, 25 bp, Probe sequence
aattagtcgtgtaatgtaggcattg

SEQ ID NO: 99092 - DNA, 25 bp, Probe sequence
gacacggtaacattatatgtcaagt

SEQ ID NO: 99093 - DNA, 25 bp, Probe sequence
gagtttatcgcctacagagattcaa

SEQ ID NO: 99094 - DNA, 25 bp, Probe sequence
gaggatttacaataattatctggac

SEQ ID NO: 99095 - DNA, 25 bp, Probe sequence
gtaggcattggttgaggatttacaa

SEQ ID NO: 99096 - DNA, 25 bp, Probe sequence
gtgtcaatgacagacattacgattt

SEQ ID NO: 99097 - DNA, 25 bp, Probe sequence
tcgcctacagagattcaaaaacatg

SEQ ID NO: 99098 - DNA, 25 bp, Probe sequence
tagaatgtatggtgtcaatgacaga

SEQ ID NO: 99099 - DNA, 25 bp, Probe sequence
tatatggctcttgaaaaacctattt

SEQ ID NO: 99100 - DNA, 25 bp, Probe sequence
tttctagagccattttctaattgaa

SEQ ID NO: 99101 - DNA, 25 bp, Probe sequence
ttatctggacataatatttgtacca

SEQ ID NO: 99102 - DNA, 25 bp, Probe sequence
atttatcaactttcgtaagtgaatt

SEQ ID NO: 99103 - DNA, 25 bp, Probe sequence
atcaactttcgtaagtgaattatgt

SEQ ID NO: 99104 - DNA, 25 bp, Probe sequence
actttcgtaagtgaattatgttata

SEQ ID NO: 99105 - DNA, 25 bp, Probe sequence
aactttcgtaagtgaattatgttat

SEQ ID NO: 99106 - DNA, 25 bp, Probe sequence
aagtgttgtttagaaaacacatatt

SEQ ID NO: 99107 - DNA, 25 bp, Probe sequence
aatttatcaactttcgtaagtgaat

SEQ ID NO: 99108 - DNA, 25 bp, Probe sequence
ctttcgtaagtgaattatgttataa

SEQ ID NO: 99109 - DNA, 25 bp, Probe sequence
tcaactttcgtaagtgaattatgtt

SEQ ID NO: 99110 - DNA, 25 bp, Probe sequence
taaatttatcaactttcgtaagtga

SEQ ID NO: 99111 - DNA, 25 bp, Probe sequence
tatgttataatttaaaacgaagctt

SEQ ID NO: 99112 - DNA, 25 bp, Probe sequence
tatcaactttcgtaagtgaattatg

SEQ ID NO: 99113 - DNA, 25 bp, Probe sequence
tttcgtaagtgaattatgttataat

SEQ ID NO: 99114 - DNA, 25 bp, Probe sequence
tttatcaactttcgtaagtgaatta

SEQ ID NO: 99115 - DNA, 25 bp, Probe sequence
ttatcaactttcgtaagtgaattat

SEQ ID NO: 99116 - DNA, 25 bp, Probe sequence
ttaaatttatcaactttcgtaagtg

SEQ ID NO: 99117 - DNA, 25 bp, Probe sequence
atttgtgtcatatcaatagcatcgt

SEQ ID NO: 99118 - DNA, 25 bp, Probe sequence
atagcatcgttttgttcctttttat

SEQ ID NO: 99119 - DNA, 25 bp, Probe sequence
atctcgagctcttgaatatgtgtat

SEQ ID NO: 99120 - DNA, 25 bp, Probe sequence
aagcagctatttatgatttgtgtca

SEQ ID NO: 99121 - DNA, 25 bp, Probe sequence
aattgtgtgcctagtacattgactt

SEQ ID NO: 99122 - DNA, 25 bp, Probe sequence
cattgacttatatctcgagctcttg

SEQ ID NO: 99123 - DNA, 25 bp, Probe sequence
cgttcggttaattactgtcaatatt

SEQ ID NO: 99124 - DNA, 25 bp, Probe sequence
cctttttattattttctgacatctt

SEQ ID NO: 99125 - DNA, 25 bp, Probe sequence
gcgcattttcgttcggttaattact

SEQ ID NO: 99126 - DNA, 25 bp, Probe sequence
gcatcgttttgttcctttttattat

SEQ ID NO: 99127 - DNA, 25 bp, Probe sequence
gacttatatctcgagctcttgaata

SEQ ID NO: 99128 - DNA, 25 bp, Probe sequence
gtacattgacttatatctcgagctc

SEQ ID NO: 99129 - DNA, 25 bp, Probe sequence
tgtagtttttatatcttttcatgta

SEQ ID NO: 99130 - DNA, 25 bp, Probe sequence
tttcgttcggttaattactgtcaat

SEQ ID NO: 99131 - DNA, 25 bp, Probe sequence
ttttctgacatcttattgtagtttt

SEQ ID NO: 99132 - DNA, 25 bp, Probe sequence
atacatgcgtgaaactcattcataa

SEQ ID NO: 99133 - DNA, 25 bp, Probe sequence
agtggttctttatcgttagtcatag

SEQ ID NO: 99134 - DNA, 25 bp, Probe sequence
acatgcgtgaaactcattcataaga

SEQ ID NO: 99135 - DNA, 25 bp, Probe sequence
aagaagaatacatgcgtgaaactca

SEQ ID NO: 99136 - DNA, 25 bp, Probe sequence
gcgtgaaactcattcataagaaata

SEQ ID NO: 99137 - DNA, 25 bp, Probe sequence
gaatacatgcgtgaaactcattcat

SEQ ID NO: 99138 - DNA, 25 bp, Probe sequence
gatgtgagtaggacagaaatgataa

SEQ ID NO: 99139 - DNA, 25 bp, Probe sequence
gttagtcatagctaatatgcatata

SEQ ID NO: 99140 - DNA, 25 bp, Probe sequence
gtggttctttatcgttagtcatagc

SEQ ID NO: 99141 - DNA, 25 bp, Probe sequence
ggttctttatcgttagtcatagcta

SEQ ID NO: 99142 - DNA, 25 bp, Probe sequence
tggttctttatcgttagtcatagct

SEQ ID NO: 99143 - DNA, 25 bp, Probe sequence
tagtggttctttatcgttagtcata

SEQ ID NO: 99144 - DNA, 25 bp, Probe sequence
tatcgttagtcatagctaatatgca

SEQ ID NO: 99145 - DNA, 25 bp, Probe sequence
tatttctttatcttttcgaaattct

SEQ ID NO: 99146 - DNA, 25 bp, Probe sequence
ttctttatcgttagtcatagctaat

SEQ ID NO: 99147 - DNA, 25 bp, Probe sequence
aaagttttgtgatatattcataata

SEQ ID NO: 99148 - DNA, 25 bp, Probe sequence
caatgcgttgataattttgttatga

SEQ ID NO: 99149 - DNA, 25 bp, Probe sequence
cagagaaatagcttttagtttacaa

SEQ ID NO: 99150 - DNA, 25 bp, Probe sequence
ctttgctatatctcttgtgttatga

SEQ ID NO: 99151 - DNA, 25 bp, Probe sequence
ctactgttatgcgatgttcatctca

SEQ ID NO: 99152 - DNA, 25 bp, Probe sequence
gcgatgttcatctcaaatagtagta

SEQ ID NO: 99153 - DNA, 25 bp, Probe sequence
gaatgatttttctactgttatgcga

SEQ ID NO: 99154 - DNA, 25 bp, Probe sequence
gaaatttcgtaatattctaatcaaa

SEQ ID NO: 99155 - DNA, 25 bp, Probe sequence
gatttttctactgttatgcgatgtt

SEQ ID NO: 99156 - DNA, 25 bp, Probe sequence
tcgagtattcaatgacaatgcgttg

SEQ ID NO: 99157 - DNA, 25 bp, Probe sequence
tctcttgtgttatgagatgacaatt

SEQ ID NO: 99158 - DNA, 25 bp, Probe sequence
taaacatgagatagggagattcgta

SEQ ID NO: 99159 - DNA, 25 bp, Probe sequence
taaactttgctatatctcttgtgtt

SEQ ID NO: 99160 - DNA, 25 bp, Probe sequence
tattctaatcaaaatcgagtattca

SEQ ID NO: 99161 - DNA, 25 bp, Probe sequence
tttttaaactttgctatatctcttg

SEQ ID NO: 99162 - DNA, 25 bp, Probe sequence
atattaaggtcatttttaattgaat

SEQ ID NO: 99163 - DNA, 25 bp, Probe sequence
atataacgacactttttagtgactc

SEQ ID NO: 99164 - DNA, 25 bp, Probe sequence
ataacgacactttttagtgactcag

SEQ ID NO: 99165 - DNA, 25 bp, Probe sequence
acgacactttttagtgactcagtta

SEQ ID NO: 99166 - DNA, 25 bp, Probe sequence
aacgacactttttagtgactcagtt

SEQ ID NO: 99167 - DNA, 25 bp, Probe sequence
aattgaatgaaaaagttgatctact

SEQ ID NO: 99168 - DNA, 25 bp, Probe sequence
cactttttagtgactcagttatatt

SEQ ID NO: 99169 - DNA, 25 bp, Probe sequence
cttaatataacgacactttttagtg

SEQ ID NO: 99170 - DNA, 25 bp, Probe sequence
ctttttagtgactcagttatattaa

SEQ ID NO: 99171 - DNA, 25 bp, Probe sequence
gacactttttagtgactcagttata

SEQ ID NO: 99172 - DNA, 25 bp, Probe sequence
gagaatcgaaccaaattttatacta

SEQ ID NO: 99173 - DNA, 25 bp, Probe sequence
gatctactaaagagaatcgaaccaa

SEQ ID NO: 99174 - DNA, 25 bp, Probe sequence
gttgatctactaaagagaatcgaac

SEQ ID NO: 99175 - DNA, 25 bp, Probe sequence
tgaccttaatataacgacacttttt

SEQ ID NO: 99176 - DNA, 25 bp, Probe sequence
ttagtgactcagttatattaaggtc

SEQ ID NO: 99177 - DNA, 25 bp, Probe sequence
attactttctgttacaaaacaatct

SEQ ID NO: 99178 - DNA, 25 bp, Probe sequence
agcataattctaaacaacacagcag

SEQ ID NO: 99179 - DNA, 25 bp, Probe sequence
acatttgtaatgacaccaagtaacg

SEQ ID NO: 99180 - DNA, 25 bp, Probe sequence
aacacagcagagaacagacaaccag

SEQ ID NO: 99181 - DNA, 25 bp, Probe sequence
caagtaacgtttcggttgcttggtg

SEQ ID NO: 99182 - DNA, 25 bp, Probe sequence
caatctaaagcgttcttgttatgtt

SEQ ID NO: 99183 - DNA, 25 bp, Probe sequence
gcttggtgttttttggtatgaatta

SEQ ID NO: 99184 - DNA, 25 bp, Probe sequence
gcagagaacagacaaccaggaggaa

SEQ ID NO: 99185 - DNA, 25 bp, Probe sequence
gacaccaagtaacgtttcggttgct

SEQ ID NO: 99186 - DNA, 25 bp, Probe sequence
gagcgtatatttttagcataattct

SEQ ID NO: 99187 - DNA, 25 bp, Probe sequence
gagagagcgtatatttttagcataa

SEQ ID NO: 99188 - DNA, 25 bp, Probe sequence
gagtgaacttaaaatattgtacaaa

SEQ ID NO: 99189 - DNA, 25 bp, Probe sequence
ggtatgaattactttctgttacaaa

SEQ ID NO: 99190 - DNA, 25 bp, Probe sequence
ggttgcttggtgttttttggtatga

SEQ ID NO: 99191 - DNA, 25 bp, Probe sequence
taaagcgttcttgttatgttttatt

SEQ ID NO: 99192 - DNA, 25 bp, Probe sequence
atagttagaggtgtcttttttattg

SEQ ID NO: 99193 - DNA, 25 bp, Probe sequence
atgtcgtccctatgtaaatagaata

SEQ ID NO: 99194 - DNA, 25 bp, Probe sequence
aatttcgtttggagcttttctacag

SEQ ID NO: 99195 - DNA, 25 bp, Probe sequence
gaattaacgttatagacttgaaata

SEQ ID NO: 99196 - DNA, 25 bp, Probe sequence
gaatgacatctcttactattaaaat

SEQ ID NO: 99197 - DNA, 25 bp, Probe sequence
gaatgaatgacatctcttactatta

SEQ ID NO: 99198 - DNA, 25 bp, Probe sequence
taacgcggcaaatgtcgtccctatg

SEQ ID NO: 99199 - DNA, 25 bp, Probe sequence
gatgctgagagctagtgttaaggac

SEQ ID NO: 99200 - DNA, 25 bp, Probe sequence
gtataatttaatttcgtttggagct

SEQ ID NO: 99201 - DNA, 25 bp, Probe sequence
gtgaaatagggtggtaacgcggcaa

SEQ ID NO: 99202 - DNA, 25 bp, Probe sequence
gtggtaacgcggcaaatgtcgtccc

SEQ ID NO: 99203 - DNA, 25 bp, Probe sequence
ggcaaatgtcgtccctatgtaaata

SEQ ID NO: 99204 - DNA, 25 bp, Probe sequence
tctacagaaagctagtgatgctgag

SEQ ID NO: 99205 - DNA, 25 bp, Probe sequence
taaaatgagtgcacaatttttgtga

SEQ ID NO: 99206 - DNA, 25 bp, Probe sequence
ttcgtttggagcttttctacagaaa

SEQ ID NO: 99207 - DNA, 25 bp, Probe sequence
atattttaatgttatagtgtttatt

SEQ ID NO: 99208 - DNA, 25 bp, Probe sequence
atagtgtttattatagtttgacaaa

SEQ ID NO: 99209 - DNA, 25 bp, Probe sequence
agtacagattttaacatattttaat

SEQ ID NO: 99210 - DNA, 25 bp, Probe sequence
agttctaagtacagattttaacata

SEQ ID NO: 99211 - DNA, 25 bp, Probe sequence
catattttaatgttatagtgtttat

SEQ ID NO: 99212 - DNA, 25 bp, Probe sequence
ctaagtacagattttaacatatttt

SEQ ID NO: 99213 - DNA, 25 bp, Probe sequence
gagttctaagtacagattttaacat

SEQ ID NO: 99214 - DNA, 25 bp, Probe sequence
gttctaagtacagattttaacatat

SEQ ID NO: 99215 - DNA, 25 bp, Probe sequence
gttatagtgtttattatagtttgac

SEQ ID NO: 99216 - DNA, 25 bp, Probe sequence
gtacagattttaacatattttaatg

SEQ ID NO: 99217 - DNA, 25 bp, Probe sequence
tgtttattatagtttgacaaaaaag

SEQ ID NO: 99218 - DNA, 25 bp, Probe sequence
tctaagtacagattttaacatattt

SEQ ID NO: 99219 - DNA, 25 bp, Probe sequence
taagtacagattttaacatatttta

SEQ ID NO: 99220 - DNA, 25 bp, Probe sequence
tagtgtttattatagtttgacaaaa

SEQ ID NO: 99221 - DNA, 25 bp, Probe sequence
ttctaagtacagattttaacatatt

SEQ ID NO: 99222 - DNA, 25 bp, Probe sequence
ataaatagtatagcgcagcaaatgc

SEQ ID NO: 99223 - DNA, 25 bp, Probe sequence
atgttgactactcaatcctaaatta

SEQ ID NO: 99224 - DNA, 25 bp, Probe sequence
actactcaatcctaaattataaata

SEQ ID NO: 99225 - DNA, 25 bp, Probe sequence
aatgttgactactcaatcctaaatt

SEQ ID NO: 99226 - DNA, 25 bp, Probe sequence
caaatgttgactactcaatcctaaa

SEQ ID NO: 99227 - DNA, 25 bp, Probe sequence
gcataaaaagaggttttcattaagt

SEQ ID NO: 99228 - DNA, 25 bp, Probe sequence
gactactcaatcctaaattataaat

SEQ ID NO: 99229 - DNA, 25 bp, Probe sequence
gttgttggtattaatttttcaaatg

SEQ ID NO: 99230 - DNA, 25 bp, Probe sequence
gttgactactcaatcctaaattata

SEQ ID NO: 99231 - DNA, 25 bp, Probe sequence
tgaaaacctctttttgttgttgttg

SEQ ID NO: 99232 - DNA, 25 bp, Probe sequence
tctttttgttgttgttggtattaat

SEQ ID NO: 99233 - DNA, 25 bp, Probe sequence
tcattaagttgaaaacctctttttg

SEQ ID NO: 99234 - DNA, 25 bp, Probe sequence
ttttcaaatgttgactactcaatcc

SEQ ID NO: 99235 - DNA, 25 bp, Probe sequence
ttcaaatgttgactactcaatccta

SEQ ID NO: 99236 - DNA, 25 bp, Probe sequence
ttgactactcaatcctaaattataa

SEQ ID NO: 99237 - DNA, 25 bp, Probe sequence
attaactctattgattattggtttt

SEQ ID NO: 99238 - DNA, 25 bp, Probe sequence
atttacacttgtagttttatgcata

SEQ ID NO: 99239 - DNA, 25 bp, Probe sequence
agagtgatttgttttatgtactatt

SEQ ID NO: 99240 - DNA, 25 bp, Probe sequence
accaatttagcctcattcggtttga

SEQ ID NO: 99241 - DNA, 25 bp, Probe sequence
aaataaccaatttagcctcattcgg

SEQ ID NO: 99242 - DNA, 25 bp, Probe sequence
aaaattcaatgcgtatcttttttga

SEQ ID NO: 99243 - DNA, 25 bp, Probe sequence
aagttagcacatacaagttttggga

SEQ ID NO: 99244 - DNA, 25 bp, Probe sequence
aatattgatatattttctttgtata

SEQ ID NO: 99245 - DNA, 25 bp, Probe sequence
gcctcattcggtttgatttaatttg

SEQ ID NO: 99246 - DNA, 25 bp, Probe sequence
gtttaatcaattttcatgagagtta

SEQ ID NO: 99247 - DNA, 25 bp, Probe sequence
gtagttttatgcataagttagcaca

SEQ ID NO: 99248 - DNA, 25 bp, Probe sequence
tgattattggtttttatacttattt

SEQ ID NO: 99249 - DNA, 25 bp, Probe sequence
tatacttatttaattttattcaact

SEQ ID NO: 99250 - DNA, 25 bp, Probe sequence
tatatcacattttatacacatttga

SEQ ID NO: 99251 - DNA, 25 bp, Probe sequence
tttatgtactattatcttatttcta

SEQ ID NO: 99252 - DNA, 25 bp, Probe sequence
atattcgagaaagcgttttcataaa

SEQ ID NO: 99253 - DNA, 25 bp, Probe sequence
aaatattcgagaaagcgttttcata

SEQ ID NO: 99254 - DNA, 25 bp, Probe sequence
aaaatattcgagaaagcgttttcat

SEQ ID NO: 99255 - DNA, 25 bp, Probe sequence
aatattcgagaaagcgttttcataa

SEQ ID NO: 99256 - DNA, 25 bp, Probe sequence
cttgtgtttacaataagtttagcat

SEQ ID NO: 99257 - DNA, 25 bp, Probe sequence
ccttgtgtttacaataagtttagca

SEQ ID NO: 99258 - DNA, 25 bp, Probe sequence
gtttacaataagtttagcatgaaaa

SEQ ID NO: 99259 - DNA, 25 bp, Probe sequence
gtgtttacaataagtttagcatgaa

SEQ ID NO: 99260 - DNA, 25 bp, Probe sequence
tgtgtttacaataagtttagcatga

SEQ ID NO: 99261 - DNA, 25 bp, Probe sequence
tgtttacaataagtttagcatgaaa

SEQ ID NO: 99262 - DNA, 25 bp, Probe sequence
tccaaacccttgtgtttacaataag

SEQ ID NO: 99263 - DNA, 25 bp, Probe sequence
tcctccaaacccttgtgtttacaat

SEQ ID NO: 99264 - DNA, 25 bp, Probe sequence
tattcgagaaagcgttttcataaaa

SEQ ID NO: 99265 - DNA, 25 bp, Probe sequence
tttacaataagtttagcatgaaaaa

SEQ ID NO: 99266 - DNA, 25 bp, Probe sequence
ttgtgtttacaataagtttagcatg

SEQ ID NO: 99267 - DNA, 25 bp, Probe sequence
attgttccagactcctaaattattg

SEQ ID NO: 99268 - DNA, 25 bp, Probe sequence
ataaatgtttcagaactgccaatat

SEQ ID NO: 99269 - DNA, 25 bp, Probe sequence
agcgctgttgtgagttcataatcaa

SEQ ID NO: 99270 - DNA, 25 bp, Probe sequence
aatgtttcagaactgccaatataac

SEQ ID NO: 99271 - DNA, 25 bp, Probe sequence
cattgattattgttccagactccta

SEQ ID NO: 99272 - DNA, 25 bp, Probe sequence
cctaaattattgtttatgccatgct

SEQ ID NO: 99273 - DNA, 25 bp, Probe sequence
gctgttgtgagttcataatcaaaga

SEQ ID NO: 99274 - DNA, 25 bp, Probe sequence
gactcctaaattattgtttatgcca

SEQ ID NO: 99275 - DNA, 25 bp, Probe sequence
gattattgttccagactcctaaatt

SEQ ID NO: 99276 - DNA, 25 bp, Probe sequence
gatttataaatgtttcagaactgcc

SEQ ID NO: 99277 - DNA, 25 bp, Probe sequence
gttccagactcctaaattattgttt

SEQ ID NO: 99278 - DNA, 25 bp, Probe sequence
tgccaatataacatttaggagccta

SEQ ID NO: 99279 - DNA, 25 bp, Probe sequence
ttattgttccagactcctaaattat

SEQ ID NO: 99280 - DNA, 25 bp, Probe sequence
ttaggagcctagaacattgattatt

SEQ ID NO: 99281 - DNA, 25 bp, Probe sequence
ttgattattgttccagactcctaaa

SEQ ID NO: 99282 - DNA, 25 bp, Probe sequence
atataattctttcggggcagggtga

SEQ ID NO: 99283 - DNA, 25 bp, Probe sequence
atttttctccttgcatcttaattca

SEQ ID NO: 99284 - DNA, 25 bp, Probe sequence
actacgtactcaaataatctataac

SEQ ID NO: 99285 - DNA, 25 bp, Probe sequence
gcctgcgacctgctaatatgtttca

SEQ ID NO: 99286 - DNA, 25 bp, Probe sequence
gaatcatatcaatgagatgcctata

SEQ ID NO: 99287 - DNA, 25 bp, Probe sequence
gagccgacagttaaagtctggatgg

SEQ ID NO: 99288 - DNA, 25 bp, Probe sequence
gagaacgctctatagagacgaattg

SEQ ID NO: 99289 - DNA, 25 bp, Probe sequence
gagatgcctatagtactcagattat

SEQ ID NO: 99290 - DNA, 25 bp, Probe sequence
gaggatttttgtttatagaggtgat

SEQ ID NO: 99291 - DNA, 25 bp, Probe sequence
ggtttgattttaatgtctgttagta

SEQ ID NO: 99292 - DNA, 25 bp, Probe sequence
tcatgatgtgaggatttttgtttat

SEQ ID NO: 99293 - DNA, 25 bp, Probe sequence
taacgataaatttttctccttgcat

SEQ ID NO: 99294 - DNA, 25 bp, Probe sequence
tagttgacatactacgtactcaaat

SEQ ID NO: 99295 - DNA, 25 bp, Probe sequence
tttcatatataattctttcggggca

SEQ ID NO: 99296 - DNA, 25 bp, Probe sequence
ttctccttgcatcttaattcatgat

SEQ ID NO: 99297 - DNA, 25 bp, Probe sequence
atcttgagtgtatggccaatcacct

SEQ ID NO: 99298 - DNA, 25 bp, Probe sequence
aacatacctcctagacgttaaatag

SEQ ID NO: 99299 - DNA, 25 bp, Probe sequence
aatatactctttgttttgcattgaa

SEQ ID NO: 99300 - DNA, 25 bp, Probe sequence
gatgaatgtctatattcctttggta

SEQ ID NO: 99301 - DNA, 25 bp, Probe sequence
gattaatatctttgctataaatttc

SEQ ID NO: 99302 - DNA, 25 bp, Probe sequence
gtgaaataatagcttaccttaataa

SEQ ID NO: 99303 - DNA, 25 bp, Probe sequence
gtgtatggccaatcaccttagttga

SEQ ID NO: 99304 - DNA, 25 bp, Probe sequence
ggtgattagccatatcttgagtgta

SEQ ID NO: 99305 - DNA, 25 bp, Probe sequence
ggtatattacacgatatgactatgt

SEQ ID NO: 99306 - DNA, 25 bp, Probe sequence
ggaaataccaaattgctataattat

SEQ ID NO: 99307 - DNA, 25 bp, Probe sequence
ggccaatcaccttagttgaatttat

SEQ ID NO: 99308 - DNA, 25 bp, Probe sequence
tgattaagaagctttgtttttacga

SEQ ID NO: 99309 - DNA, 25 bp, Probe sequence
taacacaaacactaaggttgatatt

SEQ ID NO: 99310 - DNA, 25 bp, Probe sequence
taaatttcaatttaattcacctcgt

SEQ ID NO: 99311 - DNA, 25 bp, Probe sequence
tattcctttggtatattacacgata

SEQ ID NO: 99312 - DNA, 25 bp, Probe sequence
atcgcaataaatagaaagcgtcttt

SEQ ID NO: 99313 - DNA, 25 bp, Probe sequence
atgatataacttgctcaagtataaa

SEQ ID NO: 99314 - DNA, 25 bp, Probe sequence
agacgctttctatcgcaataaatag

SEQ ID NO: 99315 - DNA, 25 bp, Probe sequence
acttgctcaagtataaaaagacgct

SEQ ID NO: 99316 - DNA, 25 bp, Probe sequence
aaagacgctttctatcgcaataaat

SEQ ID NO: 99317 - DNA, 25 bp, Probe sequence
aacttgctcaagtataaaaagacgc

SEQ ID NO: 99318 - DNA, 25 bp, Probe sequence
aagacgctttctatcgcaataaata

SEQ ID NO: 99319 - DNA, 25 bp, Probe sequence
cttgctcaagtataaaaagacgctt

SEQ ID NO: 99320 - DNA, 25 bp, Probe sequence
ctatcgcaataaatagaaagcgtct

SEQ ID NO: 99321 - DNA, 25 bp, Probe sequence
gacgctttctatcgcaataaataga

SEQ ID NO: 99322 - DNA, 25 bp, Probe sequence
gttatgatataacttgctcaagtat

SEQ ID NO: 99323 - DNA, 25 bp, Probe sequence
tatgatataacttgctcaagtataa

SEQ ID NO: 99324 - DNA, 25 bp, Probe sequence
tttgatagagttaagttatgatata

SEQ ID NO: 99325 - DNA, 25 bp, Probe sequence
ttatgatataacttgctcaagtata

SEQ ID NO: 99326 - DNA, 25 bp, Probe sequence
ttgctcaagtataaaaagacgcttt

SEQ ID NO: 99327 - DNA, 25 bp, Probe sequence
attatcgtagtcaaactgaatgtat

SEQ ID NO: 99328 - DNA, 25 bp, Probe sequence
ataaaacatttatgattcgtagatc

SEQ ID NO: 99329 - DNA, 25 bp, Probe sequence
atgttaaactttattatcgtagtca

SEQ ID NO: 99330 - DNA, 25 bp, Probe sequence
acgtttcatttacattactgtttat

SEQ ID NO: 99331 - DNA, 25 bp, Probe sequence
actttattatcgtagtcaaactgaa

SEQ ID NO: 99332 - DNA, 25 bp, Probe sequence
acatttatgattcgtagatcaacgt

SEQ ID NO: 99333 - DNA, 25 bp, Probe sequence
caacaatgacctaagaggtgtggat

SEQ ID NO: 99334 - DNA, 25 bp, Probe sequence
cgtaaagtaatgttgataaatggtt

SEQ ID NO: 99335 - DNA, 25 bp, Probe sequence
gattcgtagatcaacgtaaagtaat

SEQ ID NO: 99336 - DNA, 25 bp, Probe sequence
gtttcatttacattactgtttattt

SEQ ID NO: 99337 - DNA, 25 bp, Probe sequence
gtataacaacaatgacctaagaggt

SEQ ID NO: 99338 - DNA, 25 bp, Probe sequence
tgataaatggtttaaaacgtttcat

SEQ ID NO: 99339 - DNA, 25 bp, Probe sequence
taaactttattatcgtagtcaaact

SEQ ID NO: 99340 - DNA, 25 bp, Probe sequence
tagtcaaactgaatgtataacaaca

SEQ ID NO: 99341 - DNA, 25 bp, Probe sequence
tttacattactgtttatttatgaat

SEQ ID NO: 99342 - DNA, 25 bp, Probe sequence
attaatttaatgtgatatgatgtat

SEQ ID NO: 99343 - DNA, 25 bp, Probe sequence
atatgatgtattattactttgctaa

SEQ ID NO: 99344 - DNA, 25 bp, Probe sequence
atgatgtattattactttgctaaat

SEQ ID NO: 99345 - DNA, 25 bp, Probe sequence
actttgctaaatagtagatagaaca

SEQ ID NO: 99346 - DNA, 25 bp, Probe sequence
aatgtgatatgatgtattattactt

SEQ ID NO: 99347 - DNA, 25 bp, Probe sequence
gcgtaatcgctaaattaagtgttaa

SEQ ID NO: 99348 - DNA, 25 bp, Probe sequence
gatatgatgtattattactttgcta

SEQ ID NO: 99349 - DNA, 25 bp, Probe sequence
gtaatcgctaaattaagtgttaaat

SEQ ID NO: 99350 - DNA, 25 bp, Probe sequence
gtgatatgatgtattattactttgc

SEQ ID NO: 99351 - DNA, 25 bp, Probe sequence
tgatatgatgtattattactttgct

SEQ ID NO: 99352 - DNA, 25 bp, Probe sequence
tgcgtaatcgctaaattaagtgtta

SEQ ID NO: 99353 - DNA, 25 bp, Probe sequence
tagaacaaaatttgtaatcgggagg

SEQ ID NO: 99354 - DNA, 25 bp, Probe sequence
tatgatgtattattactttgctaaa

SEQ ID NO: 99355 - DNA, 25 bp, Probe sequence
tttgcgtaatcgctaaattaagtgt

SEQ ID NO: 99356 - DNA, 25 bp, Probe sequence
ttgcgtaatcgctaaattaagtgtt

SEQ ID NO: 99357 - DNA, 25 bp, Probe sequence
atttatatgaagatgttagggtgtt

SEQ ID NO: 99358 - DNA, 25 bp, Probe sequence
atatagtactcctcgtataataagt

SEQ ID NO: 99359 - DNA, 25 bp, Probe sequence
agtactcctcgtataataagttgtt

SEQ ID NO: 99360 - DNA, 25 bp, Probe sequence
agatgttagggtgtttcaacatcac

SEQ ID NO: 99361 - DNA, 25 bp, Probe sequence
acatcactaacacatcgaccgaaat

SEQ ID NO: 99362 - DNA, 25 bp, Probe sequence
acatcgaccgaaatttcacaataaa

SEQ ID NO: 99363 - DNA, 25 bp, Probe sequence
aacacatcgaccgaaatttcacaat

SEQ ID NO: 99364 - DNA, 25 bp, Probe sequence
aacatcactaacacatcgaccgaaa

SEQ ID NO: 99365 - DNA, 25 bp, Probe sequence
caacatcactaacacatcgaccgaa

SEQ ID NO: 99366 - DNA, 25 bp, Probe sequence
catcactaacacatcgaccgaaatt

SEQ ID NO: 99367 - DNA, 25 bp, Probe sequence
ctaacacatcgaccgaaatttcaca

SEQ ID NO: 99368 - DNA, 25 bp, Probe sequence
tcactaacacatcgaccgaaatttc

SEQ ID NO: 99369 - DNA, 25 bp, Probe sequence
tcaacatcactaacacatcgaccga

SEQ ID NO: 99370 - DNA, 25 bp, Probe sequence
tactcctcgtataataagttgttaa

SEQ ID NO: 99371 - DNA, 25 bp, Probe sequence
tttcaacatcactaacacatcgacc

SEQ ID NO: 99372 - DNA, 25 bp, Probe sequence
attagcagactgtattttagcgtca

SEQ ID NO: 99373 - DNA, 25 bp, Probe sequence
actttcaattgacgctaatgtttaa

SEQ ID NO: 99374 - DNA, 25 bp, Probe sequence
cattgtacctacctaaaaagcatta

SEQ ID NO: 99375 - DNA, 25 bp, Probe sequence
gcagactgtattttagcgtcaaatc

SEQ ID NO: 99376 - DNA, 25 bp, Probe sequence
gaatgcaatatggttaaggctagat

SEQ ID NO: 99377 - DNA, 25 bp, Probe sequence
gactgtattttagcgtcaaatcacc

SEQ ID NO: 99378 - DNA, 25 bp, Probe sequence
gacgctaatgtttaaaattacgtca

SEQ ID NO: 99379 - DNA, 25 bp, Probe sequence
gtattttagcgtcaaatcaccataa

SEQ ID NO: 99380 - DNA, 25 bp, Probe sequence
gtagatttgatacatatatttctgt

SEQ ID NO: 99381 - DNA, 25 bp, Probe sequence
gtaatatggatttttgtagatttga

SEQ ID NO: 99382 - DNA, 25 bp, Probe sequence
ggttaaggctagattcattatatat

SEQ ID NO: 99383 - DNA, 25 bp, Probe sequence
taaaatacactttcaattgacgcta

SEQ ID NO: 99384 - DNA, 25 bp, Probe sequence
tacactttcaattgacgctaatgtt

SEQ ID NO: 99385 - DNA, 25 bp, Probe sequence
ttatcattgtacctacctaaaaagc

SEQ ID NO: 99386 - DNA, 25 bp, Probe sequence
ttagcgtcaaatcaccataaatgaa

SEQ ID NO: 99387 - DNA, 25 bp, Probe sequence
attagtctcgcatattttagaaaat

SEQ ID NO: 99388 - DNA, 25 bp, Probe sequence
attagttctaaattattttgcactt

SEQ ID NO: 99389 - DNA, 25 bp, Probe sequence
attttgcacttgatgacacgtattt

SEQ ID NO: 99390 - DNA, 25 bp, Probe sequence
aaaccctcataggcattgtgcttat

SEQ ID NO: 99391 - DNA, 25 bp, Probe sequence
aaacatatttaaaccctcataggca

SEQ ID NO: 99392 - DNA, 25 bp, Probe sequence
aaaacaattactatatgcaactcaa

SEQ ID NO: 99393 - DNA, 25 bp, Probe sequence
gcattgtgcttatgggggtttttcc

SEQ ID NO: 99394 - DNA, 25 bp, Probe sequence
gaaaaggaaattagtctcgcatatt

SEQ ID NO: 99395 - DNA, 25 bp, Probe sequence
gatgacacgtatttttgagtttaag

SEQ ID NO: 99396 - DNA, 25 bp, Probe sequence
gtttaagtggtgactcaagttcaat

SEQ ID NO: 99397 - DNA, 25 bp, Probe sequence
gtatgtgacttttgattttaagcgt

SEQ ID NO: 99398 - DNA, 25 bp, Probe sequence
gtacttatatctaggtatgtgactt

SEQ ID NO: 99399 - DNA, 25 bp, Probe sequence
gggtttttccatcatagttattaat

SEQ ID NO: 99400 - DNA, 25 bp, Probe sequence
taagccacatacttattagagtaca

SEQ ID NO: 99401 - DNA, 25 bp, Probe sequence
ttcagctaagtaaaagcccgagtta

SEQ ID NO: 99402 - DNA, 25 bp, Probe sequence
ataagaatcaaggaggctatattat

SEQ ID NO: 99403 - DNA, 25 bp, Probe sequence
atcatttacatatcgtatcataaac

SEQ ID NO: 99404 - DNA, 25 bp, Probe sequence
agttttattaacttgtagacacaat

SEQ ID NO: 99405 - DNA, 25 bp, Probe sequence
acatatcgtatcataaacaatcata

SEQ ID NO: 99406 - DNA, 25 bp, Probe sequence
caatgtttgctaaagtcatttttaa

SEQ ID NO: 99407 - DNA, 25 bp, Probe sequence
catgcagatgttgttaaaattttaa

SEQ ID NO: 99408 - DNA, 25 bp, Probe sequence
cttgtagacacaatgtttgctaaag

SEQ ID NO: 99409 - DNA, 25 bp, Probe sequence
gctagacctcctggatgattatcat

SEQ ID NO: 99410 - DNA, 25 bp, Probe sequence
gaaaaagacatgcagatgttgttaa

SEQ ID NO: 99411 - DNA, 25 bp, Probe sequence
gacctcctggatgattatcatttac

SEQ ID NO: 99412 - DNA, 25 bp, Probe sequence
gatgattatcatttacatatcgtat

SEQ ID NO: 99413 - DNA, 25 bp, Probe sequence
gattatcatttacatatcgtatcat

SEQ ID NO: 99414 - DNA, 25 bp, Probe sequence
taacttgtagacacaatgtttgcta

SEQ ID NO: 99415 - DNA, 25 bp, Probe sequence
tagacctcctggatgattatcattt

SEQ ID NO: 99416 - DNA, 25 bp, Probe sequence
tagacacaatgtttgctaaagtcat

SEQ ID NO: 99417 - DNA, 25 bp, Probe sequence
atcaaacctcattatatgttatatc

SEQ ID NO: 99418 - DNA, 25 bp, Probe sequence
atgcatagttatgatttcgaaaatc

SEQ ID NO: 99419 - DNA, 25 bp, Probe sequence
acctcattatatgttatatcttgtt

SEQ ID NO: 99420 - DNA, 25 bp, Probe sequence
acgctacattgacattttatctttt

SEQ ID NO: 99421 - DNA, 25 bp, Probe sequence
aaattgttttactcattatagcatg

SEQ ID NO: 99422 - DNA, 25 bp, Probe sequence
aacgtcatcaaattgttttactcat

SEQ ID NO: 99423 - DNA, 25 bp, Probe sequence
aatctaatattttttatacgcaaca

SEQ ID NO: 99424 - DNA, 25 bp, Probe sequence
cattatagcatgatacattgtattg

SEQ ID NO: 99425 - DNA, 25 bp, Probe sequence
gtattaacgctacattgacatttta

SEQ ID NO: 99426 - DNA, 25 bp, Probe sequence
gtcatcaaattgttttactcattat

SEQ ID NO: 99427 - DNA, 25 bp, Probe sequence
tatcttgttgtataactatagcgat

SEQ ID NO: 99428 - DNA, 25 bp, Probe sequence
tatagcgattagatgcatagttatg

SEQ ID NO: 99429 - DNA, 25 bp, Probe sequence
tatacgcaacaacgtcatcaaattg

SEQ ID NO: 99430 - DNA, 25 bp, Probe sequence
tttttatacgcaacaacgtcatcaa

SEQ ID NO: 99431 - DNA, 25 bp, Probe sequence
ttgtattgttttgtattaacgctac

SEQ ID NO: 99432 - DNA, 25 bp, Probe sequence
agattgttttattttgataggcatt

SEQ ID NO: 99433 - DNA, 25 bp, Probe sequence
aatgcttcgttcaggaaggtgtcgt

SEQ ID NO: 99434 - DNA, 25 bp, Probe sequence
aatttacctatttgctgaatgaagc

SEQ ID NO: 99435 - DNA, 25 bp, Probe sequence
ccagcctgttttattttcgactagt

SEQ ID NO: 99436 - DNA, 25 bp, Probe sequence
gcctgttttattttcgactagtttg

SEQ ID NO: 99437 - DNA, 25 bp, Probe sequence
gacattcacattatttaaacggcaa

SEQ ID NO: 99438 - DNA, 25 bp, Probe sequence
gtcgtaatttacctatttgctgaat

SEQ ID NO: 99439 - DNA, 25 bp, Probe sequence
ggtgtcgtaatttacctatttgctg

SEQ ID NO: 99440 - DNA, 25 bp, Probe sequence
ggagaatttattgacattcacatta

SEQ ID NO: 99441 - DNA, 25 bp, Probe sequence
tgtcccagcctgttttattttcgac

SEQ ID NO: 99442 - DNA, 25 bp, Probe sequence
tcccagcctgttttattttcgacta

SEQ ID NO: 99443 - DNA, 25 bp, Probe sequence
tcgactagtttggagaatttattga

SEQ ID NO: 99444 - DNA, 25 bp, Probe sequence
ttcacattatttaaacggcaacaaa

SEQ ID NO: 99445 - DNA, 25 bp, Probe sequence
ttcgttcaggaaggtgtcgtaattt

SEQ ID NO: 99446 - DNA, 25 bp, Probe sequence
ttgataggcattatatggtgttaaa

SEQ ID NO: 99447 - DNA, 25 bp, Probe sequence
attgtcagggcttgggacattaagt

SEQ ID NO: 99448 - DNA, 25 bp, Probe sequence
attaaaatcactcaactgatgaaaa

SEQ ID NO: 99449 - DNA, 25 bp, Probe sequence
atgaattgtcagggcttgggacatt

SEQ ID NO: 99450 - DNA, 25 bp, Probe sequence
aggttagatgaattgtcagggcttg

SEQ ID NO: 99451 - DNA, 25 bp, Probe sequence
aaatcactcaactgatgaaaaggtt

SEQ ID NO: 99452 - DNA, 25 bp, Probe sequence
aaggttagatgaattgtcagggctt

SEQ ID NO: 99453 - DNA, 25 bp, Probe sequence
aattgtcagggcttgggacattaag

SEQ ID NO: 99454 - DNA, 25 bp, Probe sequence
gaattgtcagggcttgggacattaa

SEQ ID NO: 99455 - DNA, 25 bp, Probe sequence
gatgaattgtcagggcttgggacat

SEQ ID NO: 99456 - DNA, 25 bp, Probe sequence
gttagatgaattgtcagggcttggg

SEQ ID NO: 99457 - DNA, 25 bp, Probe sequence
ggttagatgaattgtcagggcttgg

SEQ ID NO: 99458 - DNA, 25 bp, Probe sequence
tgtcagggcttgggacattaagttc

SEQ ID NO: 99459 - DNA, 25 bp, Probe sequence
tgaattgtcagggcttgggacatta

SEQ ID NO: 99460 - DNA, 25 bp, Probe sequence
tagatgaattgtcagggcttgggac

SEQ ID NO: 99461 - DNA, 25 bp, Probe sequence
ttagatgaattgtcagggcttggga

SEQ ID NO: 99462 - DNA, 25 bp, Probe sequence
atgttaggctgaagtgatgactata

SEQ ID NO: 99463 - DNA, 25 bp, Probe sequence
acatcaaaaaggtgaggcgatattt

SEQ ID NO: 99464 - DNA, 25 bp, Probe sequence
gctctaagtgttttttctcatgtat

SEQ ID NO: 99465 - DNA, 25 bp, Probe sequence
gacttcggcttttttagtttgtcat

SEQ ID NO: 99466 - DNA, 25 bp, Probe sequence
gactatatgttgtgacttcggcttt

SEQ ID NO: 99467 - DNA, 25 bp, Probe sequence
gatgactatatgttgtgacttcggc

SEQ ID NO: 99468 - DNA, 25 bp, Probe sequence
gattgctctaagtgttttttctcat

SEQ ID NO: 99469 - DNA, 25 bp, Probe sequence
gtattcaactcagatttgttatgat

SEQ ID NO: 99470 - DNA, 25 bp, Probe sequence
gtgttttttctcatgtattcaactc

SEQ ID NO: 99471 - DNA, 25 bp, Probe sequence
gtggttgattgctctaagtgttttt

SEQ ID NO: 99472 - DNA, 25 bp, Probe sequence
tcggcttttttagtttgtcataaat

SEQ ID NO: 99473 - DNA, 25 bp, Probe sequence
tagaattttagtggttgattgctct

SEQ ID NO: 99474 - DNA, 25 bp, Probe sequence
tatgttgtgacttcggcttttttag

SEQ ID NO: 99475 - DNA, 25 bp, Probe sequence
ttttctcatgtattcaactcagatt

SEQ ID NO: 99476 - DNA, 25 bp, Probe sequence
ttgcttttacaatttgattaatgtt

SEQ ID NO: 99477 - DNA, 25 bp, Probe sequence
atatgtatcgaaaatctttagcttt

SEQ ID NO: 99478 - DNA, 25 bp, Probe sequence
atctttagcttttctattataatta

SEQ ID NO: 99479 - DNA, 25 bp, Probe sequence
atcgaaaatctttagcttttctatt

SEQ ID NO: 99480 - DNA, 25 bp, Probe sequence
aaatctttagcttttctattataat

SEQ ID NO: 99481 - DNA, 25 bp, Probe sequence
aaagattttcggtatataaatgata

SEQ ID NO: 99482 - DNA, 25 bp, Probe sequence
aatctttagcttttctattataatt

SEQ ID NO: 99483 - DNA, 25 bp, Probe sequence
aatatgtatcgaaaatctttagctt

SEQ ID NO: 99484 - DNA, 25 bp, Probe sequence
gaaaatctttagcttttctattata

SEQ ID NO: 99485 - DNA, 25 bp, Probe sequence
gtatcgaaaatctttagcttttcta

SEQ ID NO: 99486 - DNA, 25 bp, Probe sequence
tcgaaaatctttagcttttctatta

SEQ ID NO: 99487 - DNA, 25 bp, Probe sequence
tctttagcttttctattataattaa

SEQ ID NO: 99488 - DNA, 25 bp, Probe sequence
tcatatattaaaaaggagcgttgtt

SEQ ID NO: 99489 - DNA, 25 bp, Probe sequence
tatgtatcgaaaatctttagctttt

SEQ ID NO: 99490 - DNA, 25 bp, Probe sequence
tatcgaaaatctttagcttttctat

SEQ ID NO: 99491 - DNA, 25 bp, Probe sequence
ttagcttttctattataattaaagt

SEQ ID NO: 99492 - DNA, 25 bp, Probe sequence
ataattaatctacaatattttactg

SEQ ID NO: 99493 - DNA, 25 bp, Probe sequence
agcgataatttaaatgtaagccttt

SEQ ID NO: 99494 - DNA, 25 bp, Probe sequence
aaataggtctgaacgataagagcga

SEQ ID NO: 99495 - DNA, 25 bp, Probe sequence
aaaccgtttgcagacaaataggtct

SEQ ID NO: 99496 - DNA, 25 bp, Probe sequence
aagaaaggtgccaaaccgtttgcag

SEQ ID NO: 99497 - DNA, 25 bp, Probe sequence
aacggattctcttatcctgagtggt

SEQ ID NO: 99498 - DNA, 25 bp, Probe sequence
cctaaatccctccaaagcgataatt

SEQ ID NO: 99499 - DNA, 25 bp, Probe sequence
gacatggacccaatgaaacccagca

SEQ ID NO: 99500 - DNA, 25 bp, Probe sequence
gagtggtggagggacatggacccaa

SEQ ID NO: 99501 - DNA, 25 bp, Probe sequence
gagggacatggacccaatgaaaccc

SEQ ID NO: 99502 - DNA, 25 bp, Probe sequence
gattctcttatcctgagtggtggag

SEQ ID NO: 99503 - DNA, 25 bp, Probe sequence
gtaagcctttacatttaattagtat

SEQ ID NO: 99504 - DNA, 25 bp, Probe sequence
ggtgccaaaccgtttgcagacaaat

SEQ ID NO: 99505 - DNA, 25 bp, Probe sequence
tggacccaatgaaacccagcaacct

SEQ ID NO: 99506 - DNA, 25 bp, Probe sequence
tactattatttttaacggattctct

SEQ ID NO: 99507 - DNA, 25 bp, Probe sequence
aaaataagaggagccaaccattgtt

SEQ ID NO: 99508 - DNA, 25 bp, Probe sequence
aagaggagccaaccattgttagact

SEQ ID NO: 99509 - DNA, 25 bp, Probe sequence
aattgcctataaatttttagcacat

SEQ ID NO: 99510 - DNA, 25 bp, Probe sequence
caacggttggctctttaattagtat

SEQ ID NO: 99511 - DNA, 25 bp, Probe sequence
cggttggctctttaattagtattca

SEQ ID NO: 99512 - DNA, 25 bp, Probe sequence
gcattgttgtaataaaattgcctat

SEQ ID NO: 99513 - DNA, 25 bp, Probe sequence
gaaggtcaccttaaatgtgcattgt

SEQ ID NO: 99514 - DNA, 25 bp, Probe sequence
gactataacaacggttggctcttta

SEQ ID NO: 99515 - DNA, 25 bp, Probe sequence
gagccaaccattgttagactataac

SEQ ID NO: 99516 - DNA, 25 bp, Probe sequence
gaggagccaaccattgttagactat

SEQ ID NO: 99517 - DNA, 25 bp, Probe sequence
gttggctctttaattagtattcaaa

SEQ ID NO: 99518 - DNA, 25 bp, Probe sequence
gttagactataacaacggttggctc

SEQ ID NO: 99519 - DNA, 25 bp, Probe sequence
gtcaccttaaatgtgcattgttgta

SEQ ID NO: 99520 - DNA, 25 bp, Probe sequence
taacaacggttggctctttaattag

SEQ ID NO: 99521 - DNA, 25 bp, Probe sequence
ttgcctataaatttttagcacataa

SEQ ID NO: 99522 - DNA, 25 bp, Probe sequence
atgtgtgatatacgttgaatgaggg

SEQ ID NO: 99523 - DNA, 25 bp, Probe sequence
acgtggtgtgcgcatgggaactatc

SEQ ID NO: 99524 - DNA, 25 bp, Probe sequence
aacgtggtgtgcgcatgggaactat

SEQ ID NO: 99525 - DNA, 25 bp, Probe sequence
caagctttgaagatgtgtgatatac

SEQ ID NO: 99526 - DNA, 25 bp, Probe sequence
gcgcatgggaactatcaagctttga

SEQ ID NO: 99527 - DNA, 25 bp, Probe sequence
gcatgggaactatcaagctttgaag

SEQ ID NO: 99528 - DNA, 25 bp, Probe sequence
gaagatgtgtgatatacgttgaatg

SEQ ID NO: 99529 - DNA, 25 bp, Probe sequence
gaaacgtggtgtgcgcatgggaact

SEQ ID NO: 99530 - DNA, 25 bp, Probe sequence
gtgcgcatgggaactatcaagcttt

SEQ ID NO: 99531 - DNA, 25 bp, Probe sequence
gtgtgcgcatgggaactatcaagct

SEQ ID NO: 99532 - DNA, 25 bp, Probe sequence
gtggtgtgcgcatgggaactatcaa

SEQ ID NO: 99533 - DNA, 25 bp, Probe sequence
gggaactatcaagctttgaagatgt

SEQ ID NO: 99534 - DNA, 25 bp, Probe sequence
ggtgtgcgcatgggaactatcaagc

SEQ ID NO: 99535 - DNA, 25 bp, Probe sequence
tacgttgaatgaggggtatgcgctt

SEQ ID NO: 99536 - DNA, 25 bp, Probe sequence
tatgaaacgtggtgtgcgcatggga

SEQ ID NO: 99537 - DNA, 25 bp, Probe sequence
atatttttaaacataaccactgcta

SEQ ID NO: 99538 - DNA, 25 bp, Probe sequence
atatcaatgaatcaattcgtctact

SEQ ID NO: 99539 - DNA, 25 bp, Probe sequence
ataaccactgctagaatgtcataaa

SEQ ID NO: 99540 - DNA, 25 bp, Probe sequence
atgaatcaattcgtctactttttta

SEQ ID NO: 99541 - DNA, 25 bp, Probe sequence
actgctagaatgtcataaaatcgtt

SEQ ID NO: 99542 - DNA, 25 bp, Probe sequence
aacataaccactgctagaatgtcat

SEQ ID NO: 99543 - DNA, 25 bp, Probe sequence
aacgatatgtattgagcattataac

SEQ ID NO: 99544 - DNA, 25 bp, Probe sequence
aaccactgctagaatgtcataaaat

SEQ ID NO: 99545 - DNA, 25 bp, Probe sequence
aatcaattcgtctacttttttatat

SEQ ID NO: 99546 - DNA, 25 bp, Probe sequence
gaatcaattcgtctacttttttata

SEQ ID NO: 99547 - DNA, 25 bp, Probe sequence
gaatgtcataaaatcgttataatta

SEQ ID NO: 99548 - DNA, 25 bp, Probe sequence
gatataacgatatgtattgagcatt

SEQ ID NO: 99549 - DNA, 25 bp, Probe sequence
tgagcattataacaatcatatcaat

SEQ ID NO: 99550 - DNA, 25 bp, Probe sequence
tcaattcgtctacttttttatattt

SEQ ID NO: 99551 - DNA, 25 bp, Probe sequence
ttttaaacataaccactgctagaat

SEQ ID NO: 99552 - DNA, 25 bp, Probe sequence
attgtaaagttgtattacgactcaa

SEQ ID NO: 99553 - DNA, 25 bp, Probe sequence
atatttttggattgtagaagtgtta

SEQ ID NO: 99554 - DNA, 25 bp, Probe sequence
ataatcatattttaccaaattagta

SEQ ID NO: 99555 - DNA, 25 bp, Probe sequence
aaaacgctttcactatatcacataa

SEQ ID NO: 99556 - DNA, 25 bp, Probe sequence
aacctggatgcatttaagagggagt

SEQ ID NO: 99557 - DNA, 25 bp, Probe sequence
aacgctttcactatatcacataatc

SEQ ID NO: 99558 - DNA, 25 bp, Probe sequence
aataatttctatttgctataatata

SEQ ID NO: 99559 - DNA, 25 bp, Probe sequence
gctttcactatatcacataatcata

SEQ ID NO: 99560 - DNA, 25 bp, Probe sequence
gacacgaacatgacaacataattta

SEQ ID NO: 99561 - DNA, 25 bp, Probe sequence
gatttactacataaaacctggatgc

SEQ ID NO: 99562 - DNA, 25 bp, Probe sequence
gttgtattacgactcaaaatgacac

SEQ ID NO: 99563 - DNA, 25 bp, Probe sequence
gtatttatttttagaggtgttgctt

SEQ ID NO: 99564 - DNA, 25 bp, Probe sequence
gtaaaacgctttcactatatcacat

SEQ ID NO: 99565 - DNA, 25 bp, Probe sequence
tacgactcaaaatgacacgaacatg

SEQ ID NO: 99566 - DNA, 25 bp, Probe sequence
tatgttattttcatgatttactaca

SEQ ID NO: 99567 - DNA, 25 bp, Probe sequence
attgctatgtatatttatttttacc

SEQ ID NO: 99568 - DNA, 25 bp, Probe sequence
atctccttatattgctatgtatatt

SEQ ID NO: 99569 - DNA, 25 bp, Probe sequence
agggtagctgagctaccctgaaaat

SEQ ID NO: 99570 - DNA, 25 bp, Probe sequence
aatctccttatattgctatgtatat

SEQ ID NO: 99571 - DNA, 25 bp, Probe sequence
ctccttatattgctatgtatattta

SEQ ID NO: 99572 - DNA, 25 bp, Probe sequence
ccgaaaaagaagggtagctgagcta

SEQ ID NO: 99573 - DNA, 25 bp, Probe sequence
gctatgtatatttatttttaccgaa

SEQ ID NO: 99574 - DNA, 25 bp, Probe sequence
gaagggtagctgagctaccctgaaa

SEQ ID NO: 99575 - DNA, 25 bp, Probe sequence
tgctatgtatatttatttttaccga

SEQ ID NO: 99576 - DNA, 25 bp, Probe sequence
tctccttatattgctatgtatattt

SEQ ID NO: 99577 - DNA, 25 bp, Probe sequence
taatctccttatattgctatgtata

SEQ ID NO: 99578 - DNA, 25 bp, Probe sequence
tttaatctccttatattgctatgta

SEQ ID NO: 99579 - DNA, 25 bp, Probe sequence
tttttaatctccttatattgctatg

SEQ ID NO: 99580 - DNA, 25 bp, Probe sequence
ttttaatctccttatattgctatgt

SEQ ID NO: 99581 - DNA, 25 bp, Probe sequence
ttaatctccttatattgctatgtat

SEQ ID NO: 99582 - DNA, 25 bp, Probe sequence
attacaggtttaaacatctataaca

SEQ ID NO: 99583 - DNA, 25 bp, Probe sequence
atttaatacaattcaagaccatgca

SEQ ID NO: 99584 - DNA, 25 bp, Probe sequence
acaattcaagaccatgcaaactcat

SEQ ID NO: 99585 - DNA, 25 bp, Probe sequence
aaatgttgacataccactaagtgaa

SEQ ID NO: 99586 - DNA, 25 bp, Probe sequence
aaacatctataacaaaatctcaaca

SEQ ID NO: 99587 - DNA, 25 bp, Probe sequence
aacattgtccgtttatagataggta

SEQ ID NO: 99588 - DNA, 25 bp, Probe sequence
aactcatttataaacattgtccgtt

SEQ ID NO: 99589 - DNA, 25 bp, Probe sequence
gcaaaaaataaatctccattaatca

SEQ ID NO: 99590 - DNA, 25 bp, Probe sequence
gacataccactaagtgaactattaa

SEQ ID NO: 99591 - DNA, 25 bp, Probe sequence
gaccatgcaaactcatttataaaca

SEQ ID NO: 99592 - DNA, 25 bp, Probe sequence
gtatgcgtggtctattttataaaat

SEQ ID NO: 99593 - DNA, 25 bp, Probe sequence
gtccgtttatagataggtatgcgtg

SEQ ID NO: 99594 - DNA, 25 bp, Probe sequence
tctataacaaaatctcaacagcaaa

SEQ ID NO: 99595 - DNA, 25 bp, Probe sequence
tcaagaccatgcaaactcatttata

SEQ ID NO: 99596 - DNA, 25 bp, Probe sequence
taggtatgcgtggtctattttataa

SEQ ID NO: 99597 - DNA, 25 bp, Probe sequence
attgcgtctacttagccaataagaa

SEQ ID NO: 99598 - DNA, 25 bp, Probe sequence
ataagcatcaccttatacacctcct

SEQ ID NO: 99599 - DNA, 25 bp, Probe sequence
aggggatttttattggtgcggctat

SEQ ID NO: 99600 - DNA, 25 bp, Probe sequence
aatcccctcactatttgcggtagtg

SEQ ID NO: 99601 - DNA, 25 bp, Probe sequence
cctcctctctgcgtctaaattgacg

SEQ ID NO: 99602 - DNA, 25 bp, Probe sequence
gcctgagagataggcgactctacta

SEQ ID NO: 99603 - DNA, 25 bp, Probe sequence
gaaaaaaacgcaatggcacagccac

SEQ ID NO: 99604 - DNA, 25 bp, Probe sequence
gactggtgctatgatgtgaacgaaa

SEQ ID NO: 99605 - DNA, 25 bp, Probe sequence
gtatttacttatacaccaatcccct

SEQ ID NO: 99606 - DNA, 25 bp, Probe sequence
gtctaaattgacgcctgagagatag

SEQ ID NO: 99607 - DNA, 25 bp, Probe sequence
ggcacagccactgatgactggtgct

SEQ ID NO: 99608 - DNA, 25 bp, Probe sequence
ggcgactctactattatatcatcta

SEQ ID NO: 99609 - DNA, 25 bp, Probe sequence
tgtcacctattttgtattgcgtcta

SEQ ID NO: 99610 - DNA, 25 bp, Probe sequence
tgcggctatatgtcacctattttgt

SEQ ID NO: 99611 - DNA, 25 bp, Probe sequence
ttttgtattgcgtctacttagccaa

SEQ ID NO: 99612 - DNA, 25 bp, Probe sequence
agaggttaggcgattttattgtgac

SEQ ID NO: 99613 - DNA, 25 bp, Probe sequence
acaaaaccaaaatactgagtcattc

SEQ ID NO: 99614 - DNA, 25 bp, Probe sequence
aacatcattaactctctcaaattag

SEQ ID NO: 99615 - DNA, 25 bp, Probe sequence
aatctaacatcattaactctctcaa

SEQ ID NO: 99616 - DNA, 25 bp, Probe sequence
aatactgagtcattcaatcatcaag

SEQ ID NO: 99617 - DNA, 25 bp, Probe sequence
gagactgaagagcttttagtaaata

SEQ ID NO: 99618 - DNA, 25 bp, Probe sequence
gagtcattcaatcatcaagacagtt

SEQ ID NO: 99619 - DNA, 25 bp, Probe sequence
gtaagcctagaaacgaaattatacg

SEQ ID NO: 99620 - DNA, 25 bp, Probe sequence
gtgacaagagactgaagagctttta

SEQ ID NO: 99621 - DNA, 25 bp, Probe sequence
ggttaggcgattttattgtgacaag

SEQ ID NO: 99622 - DNA, 25 bp, Probe sequence
tgaaactattataatttgggattta

SEQ ID NO: 99623 - DNA, 25 bp, Probe sequence
tccagataacagcctattaattaaa

SEQ ID NO: 99624 - DNA, 25 bp, Probe sequence
tcaatcatcaagacagtttaactgg

SEQ ID NO: 99625 - DNA, 25 bp, Probe sequence
tttggagtttagtgaatcgtctaca

SEQ ID NO: 99626 - DNA, 25 bp, Probe sequence
ttaactctctcaaattagacaaaac

SEQ ID NO: 99627 - DNA, 25 bp, Probe sequence
attcacccaatcctgacaaaatata

SEQ ID NO: 99628 - DNA, 25 bp, Probe sequence
atcctgacaaaatatactataacta

SEQ ID NO: 99629 - DNA, 25 bp, Probe sequence
acccaatcctgacaaaatatactat

SEQ ID NO: 99630 - DNA, 25 bp, Probe sequence
acattcacccaatcctgacaaaata

SEQ ID NO: 99631 - DNA, 25 bp, Probe sequence
aaaacttagacattcacccaatcct

SEQ ID NO: 99632 - DNA, 25 bp, Probe sequence
aatatactataactaacatttatta

SEQ ID NO: 99633 - DNA, 25 bp, Probe sequence
caatcctgacaaaatatactataac

SEQ ID NO: 99634 - DNA, 25 bp, Probe sequence
cacccaatcctgacaaaatatacta

SEQ ID NO: 99635 - DNA, 25 bp, Probe sequence
cattcacccaatcctgacaaaatat

SEQ ID NO: 99636 - DNA, 25 bp, Probe sequence
gacattcacccaatcctgacaaaat

SEQ ID NO: 99637 - DNA, 25 bp, Probe sequence
tcacccaatcctgacaaaatatact

SEQ ID NO: 99638 - DNA, 25 bp, Probe sequence
taaaacttagacattcacccaatcc

SEQ ID NO: 99639 - DNA, 25 bp, Probe sequence
ttagacattcacccaatcctgacaa

SEQ ID NO: 99640 - DNA, 25 bp, Probe sequence
ttcacccaatcctgacaaaatatac

SEQ ID NO: 99641 - DNA, 25 bp, Probe sequence
ttaaaacttagacattcacccaatc

SEQ ID NO: 99642 - DNA, 25 bp, Probe sequence
attttaaacatctctgtgattctat

SEQ ID NO: 99643 - DNA, 25 bp, Probe sequence
atcatccatccatacattgataaat

SEQ ID NO: 99644 - DNA, 25 bp, Probe sequence
atctctgtgattctatttattcgaa

SEQ ID NO: 99645 - DNA, 25 bp, Probe sequence
aacatctctgtgattctatttattc

SEQ ID NO: 99646 - DNA, 25 bp, Probe sequence
caattttaaacatctctgtgattct

SEQ ID NO: 99647 - DNA, 25 bp, Probe sequence
caacaattttaaacatctctgtgat

SEQ ID NO: 99648 - DNA, 25 bp, Probe sequence
catccatccatacattgataaatga

SEQ ID NO: 99649 - DNA, 25 bp, Probe sequence
catctctgtgattctatttattcga

SEQ ID NO: 99650 - DNA, 25 bp, Probe sequence
ctaaccttatatttatacgaatact

SEQ ID NO: 99651 - DNA, 25 bp, Probe sequence
ctctgtgattctatttattcgaaat

SEQ ID NO: 99652 - DNA, 25 bp, Probe sequence
gtgattctatttattcgaaatgatt

SEQ ID NO: 99653 - DNA, 25 bp, Probe sequence
taaacatctctgtgattctatttat

SEQ ID NO: 99654 - DNA, 25 bp, Probe sequence
tacgaatacttagaggagcacaaaa

SEQ ID NO: 99655 - DNA, 25 bp, Probe sequence
tatacgaatacttagaggagcacaa

SEQ ID NO: 99656 - DNA, 25 bp, Probe sequence
tttaaacatctctgtgattctattt

SEQ ID NO: 99657 - DNA, 25 bp, Probe sequence
atacaccatgagcatgtgttcaata

SEQ ID NO: 99658 - DNA, 25 bp, Probe sequence
acgtctatatcaaaagcatcatgaa

SEQ ID NO: 99659 - DNA, 25 bp, Probe sequence
acaaatttaaatatacaccatgagc

SEQ ID NO: 99660 - DNA, 25 bp, Probe sequence
aaacgtctatatcaaaagcatcatg

SEQ ID NO: 99661 - DNA, 25 bp, Probe sequence
aaaacgtctatatcaaaagcatcat

SEQ ID NO: 99662 - DNA, 25 bp, Probe sequence
aacatcggtcgaatataacataaaa

SEQ ID NO: 99663 - DNA, 25 bp, Probe sequence
aatatacaccatgagcatgtgttca

SEQ ID NO: 99664 - DNA, 25 bp, Probe sequence
aatttaaatatacaccatgagcatg

SEQ ID NO: 99665 - DNA, 25 bp, Probe sequence
caaaagcatcatgaataaacagagg

SEQ ID NO: 99666 - DNA, 25 bp, Probe sequence
caccatgagcatgtgttcaataatt

SEQ ID NO: 99667 - DNA, 25 bp, Probe sequence
ccatgagcatgtgttcaataatttt

SEQ ID NO: 99668 - DNA, 25 bp, Probe sequence
gaaaaacatcggtcgaatataacat

SEQ ID NO: 99669 - DNA, 25 bp, Probe sequence
gagcatgtgttcaataattttaatg

SEQ ID NO: 99670 - DNA, 25 bp, Probe sequence
tatacaccatgagcatgtgttcaat

SEQ ID NO: 99671 - DNA, 25 bp, Probe sequence
tttaatgaaaaacatcggtcgaata

SEQ ID NO: 99672 - DNA, 25 bp, Probe sequence
atctcgaattgtaaaggagcttgaa

SEQ ID NO: 99673 - DNA, 25 bp, Probe sequence
agcgttgcaacatatctcgaattgt

SEQ ID NO: 99674 - DNA, 25 bp, Probe sequence
acgagcgttgcaacatatctcgaat

SEQ ID NO: 99675 - DNA, 25 bp, Probe sequence
acaaattgactttaaacgagcgttg

SEQ ID NO: 99676 - DNA, 25 bp, Probe sequence
aaattgactttaaacgagcgttgca

SEQ ID NO: 99677 - DNA, 25 bp, Probe sequence
aaacgagcgttgcaacatatctcga

SEQ ID NO: 99678 - DNA, 25 bp, Probe sequence
aacgagcgttgcaacatatctcgaa

SEQ ID NO: 99679 - DNA, 25 bp, Probe sequence
cgttgcaacatatctcgaattgtaa

SEQ ID NO: 99680 - DNA, 25 bp, Probe sequence
gcgttgcaacatatctcgaattgta

SEQ ID NO: 99681 - DNA, 25 bp, Probe sequence
gcaacatatctcgaattgtaaagga

SEQ ID NO: 99682 - DNA, 25 bp, Probe sequence
gactttaaacgagcgttgcaacata

SEQ ID NO: 99683 - DNA, 25 bp, Probe sequence
gagcgttgcaacatatctcgaattg

SEQ ID NO: 99684 - DNA, 25 bp, Probe sequence
gttgcaacatatctcgaattgtaaa

SEQ ID NO: 99685 - DNA, 25 bp, Probe sequence
ttaaacgagcgttgcaacatatctc

SEQ ID NO: 99686 - DNA, 25 bp, Probe sequence
ttgactttaaacgagcgttgcaaca

SEQ ID NO: 99687 - DNA, 25 bp, Probe sequence
attcattcgtgaagttgatttttta

SEQ ID NO: 99688 - DNA, 25 bp, Probe sequence
atcatcaattcattcgtgaagttga

SEQ ID NO: 99689 - DNA, 25 bp, Probe sequence
caattcattcgtgaagttgattttt

SEQ ID NO: 99690 - DNA, 25 bp, Probe sequence
cataaccaactaaatatactgaatt

SEQ ID NO: 99691 - DNA, 25 bp, Probe sequence
cattcgtgaagttgattttttaaag

SEQ ID NO: 99692 - DNA, 25 bp, Probe sequence
gaagttgattttttaaagagtgatt

SEQ ID NO: 99693 - DNA, 25 bp, Probe sequence
gagtgattaagaaaacggttacata

SEQ ID NO: 99694 - DNA, 25 bp, Probe sequence
gttacataaccaactaaatatactg

SEQ ID NO: 99695 - DNA, 25 bp, Probe sequence
gtatcatcaattcattcgtgaagtt

SEQ ID NO: 99696 - DNA, 25 bp, Probe sequence
ggttacataaccaactaaatatact

SEQ ID NO: 99697 - DNA, 25 bp, Probe sequence
tcatcaattcattcgtgaagttgat

SEQ ID NO: 99698 - DNA, 25 bp, Probe sequence
tacataaccaactaaatatactgaa

SEQ ID NO: 99699 - DNA, 25 bp, Probe sequence
tatcatcaattcattcgtgaagttg

SEQ ID NO: 99700 - DNA, 25 bp, Probe sequence
ttcgtgaagttgattttttaaagag

SEQ ID NO: 99701 - DNA, 25 bp, Probe sequence
ttcattcgtgaagttgattttttaa

SEQ ID NO: 99702 - DNA, 25 bp, Probe sequence
ataataggggaactaatcgctaata

SEQ ID NO: 99703 - DNA, 25 bp, Probe sequence
accattccgccatatattttcaatt

SEQ ID NO: 99704 - DNA, 25 bp, Probe sequence
acatgaattgttcaccattccgcca

SEQ ID NO: 99705 - DNA, 25 bp, Probe sequence
aatacattactagttccaaatatac

SEQ ID NO: 99706 - DNA, 25 bp, Probe sequence
aattgcgtgatattgagttttaagc

SEQ ID NO: 99707 - DNA, 25 bp, Probe sequence
gagtcaattcatgtataattattta

SEQ ID NO: 99708 - DNA, 25 bp, Probe sequence
gattgactgcatattgtcataaata

SEQ ID NO: 99709 - DNA, 25 bp, Probe sequence
gtttcattgattgactgcatattgt

SEQ ID NO: 99710 - DNA, 25 bp, Probe sequence
ggaactaatcgctaataatattgtt

SEQ ID NO: 99711 - DNA, 25 bp, Probe sequence
tccgccatatattttcaattaccta

SEQ ID NO: 99712 - DNA, 25 bp, Probe sequence
tcaccattccgccatatattttcaa

SEQ ID NO: 99713 - DNA, 25 bp, Probe sequence
tcaattacctaatttccgaataaat

SEQ ID NO: 99714 - DNA, 25 bp, Probe sequence
tacatgtttcattgattgactgcat

SEQ ID NO: 99715 - DNA, 25 bp, Probe sequence
tactagttccaaatatactcataca

SEQ ID NO: 99716 - DNA, 25 bp, Probe sequence
tatactcatacatacatgtttcatt

SEQ ID NO: 99717 - DNA, 25 bp, Probe sequence
atatcaaactagtctataggtaaaa

SEQ ID NO: 99718 - DNA, 25 bp, Probe sequence
atgttggatgtgaaagattgttgat

SEQ ID NO: 99719 - DNA, 25 bp, Probe sequence
aatgtattaactatctattaactaa

SEQ ID NO: 99720 - DNA, 25 bp, Probe sequence
catcgttttgttgttttgaattata

SEQ ID NO: 99721 - DNA, 25 bp, Probe sequence
gaattagcaggtgtcatactaagta

SEQ ID NO: 99722 - DNA, 25 bp, Probe sequence
gaaaagaatgtctcaaataatgttt

SEQ ID NO: 99723 - DNA, 25 bp, Probe sequence
gataaatatcaaactagtctatagg

SEQ ID NO: 99724 - DNA, 25 bp, Probe sequence
gttgatgagaattttgagatgtaga

SEQ ID NO: 99725 - DNA, 25 bp, Probe sequence
gtttgaattagcaggtgtcatacta

SEQ ID NO: 99726 - DNA, 25 bp, Probe sequence
ggatgtgaaagattgttgatgagaa

SEQ ID NO: 99727 - DNA, 25 bp, Probe sequence
tgctcctttttttatattgtaaacg

SEQ ID NO: 99728 - DNA, 25 bp, Probe sequence
taattgctcctttttttatattgta

SEQ ID NO: 99729 - DNA, 25 bp, Probe sequence
taatgtttgaattagcaggtgtcat

SEQ ID NO: 99730 - DNA, 25 bp, Probe sequence
tttaattgctcctttttttatattg

SEQ ID NO: 99731 - DNA, 25 bp, Probe sequence
ttaacatcgttttgttgttttgaat

SEQ ID NO: 99732 - DNA, 25 bp, Probe sequence
attatgggctaggtggtttgtaaga

SEQ ID NO: 99733 - DNA, 25 bp, Probe sequence
atatattatgggctaggtggtttgt

SEQ ID NO: 99734 - DNA, 25 bp, Probe sequence
atattatgggctaggtggtttgtaa

SEQ ID NO: 99735 - DNA, 25 bp, Probe sequence
atgacgttttaatatattatgggct

SEQ ID NO: 99736 - DNA, 25 bp, Probe sequence
atgggctaggtggtttgtaagaaag

SEQ ID NO: 99737 - DNA, 25 bp, Probe sequence
acttgccaaagttaatgcggaatgg

SEQ ID NO: 99738 - DNA, 25 bp, Probe sequence
aacttgccaaagttaatgcggaatg

SEQ ID NO: 99739 - DNA, 25 bp, Probe sequence
aatatattatgggctaggtggtttg

SEQ ID NO: 99740 - DNA, 25 bp, Probe sequence
gccaaagttaatgcggaatggtttt

SEQ ID NO: 99741 - DNA, 25 bp, Probe sequence
tgggctaggtggtttgtaagaaagg

SEQ ID NO: 99742 - DNA, 25 bp, Probe sequence
tccaacttgccaaagttaatgcgga

SEQ ID NO: 99743 - DNA, 25 bp, Probe sequence
tatgggctaggtggtttgtaagaaa

SEQ ID NO: 99744 - DNA, 25 bp, Probe sequence
tatattatgggctaggtggtttgta

SEQ ID NO: 99745 - DNA, 25 bp, Probe sequence
tattatgggctaggtggtttgtaag

SEQ ID NO: 99746 - DNA, 25 bp, Probe sequence
ttccaacttgccaaagttaatgcgg

SEQ ID NO: 99747 - DNA, 25 bp, Probe sequence
attttgtattcggacagcaggggta

SEQ ID NO: 99748 - DNA, 25 bp, Probe sequence
ataattttgtattcggacagcaggg

SEQ ID NO: 99749 - DNA, 25 bp, Probe sequence
atgtctggttaattaaacgtaatgt

SEQ ID NO: 99750 - DNA, 25 bp, Probe sequence
agattggggcgctaatggtaaaaga

SEQ ID NO: 99751 - DNA, 25 bp, Probe sequence
agcgatgaatattaggtgcaaagtt

SEQ ID NO: 99752 - DNA, 25 bp, Probe sequence
acagcaggggtattagacgcgattg

SEQ ID NO: 99753 - DNA, 25 bp, Probe sequence
aacgtaatgtttatttaagcgatga

SEQ ID NO: 99754 - DNA, 25 bp, Probe sequence
gcaggggtattagacgcgattgaca

SEQ ID NO: 99755 - DNA, 25 bp, Probe sequence
gacaatgtctggttaattaaacgta

SEQ ID NO: 99756 - DNA, 25 bp, Probe sequence
gacgcgattgacaatgtctggttaa

SEQ ID NO: 99757 - DNA, 25 bp, Probe sequence
gtattcggacagcaggggtattaga

SEQ ID NO: 99758 - DNA, 25 bp, Probe sequence
ggggtattagacgcgattgacaatg

SEQ ID NO: 99759 - DNA, 25 bp, Probe sequence
ggtgcaaagtttttgaatttgaatg

SEQ ID NO: 99760 - DNA, 25 bp, Probe sequence
ggacagcaggggtattagacgcgat

SEQ ID NO: 99761 - DNA, 25 bp, Probe sequence
tagacgcgattgacaatgtctggtt

SEQ ID NO: 99762 - DNA, 25 bp, Probe sequence
attcctttttagcgtcataatcgtt

SEQ ID NO: 99763 - DNA, 25 bp, Probe sequence
attattttcagtatttgtagtaagt

SEQ ID NO: 99764 - DNA, 25 bp, Probe sequence
attttacgatcttaaatccttatat

SEQ ID NO: 99765 - DNA, 25 bp, Probe sequence
ataattattcctttttagcgtcata

SEQ ID NO: 99766 - DNA, 25 bp, Probe sequence
atcgtttagcaatacatgacaatgg

SEQ ID NO: 99767 - DNA, 25 bp, Probe sequence
acagatgttttctataaacttaata

SEQ ID NO: 99768 - DNA, 25 bp, Probe sequence
aaatccttatattattttcagtatt

SEQ ID NO: 99769 - DNA, 25 bp, Probe sequence
gcgtcataatcgtttagcaatacat

SEQ ID NO: 99770 - DNA, 25 bp, Probe sequence
gtaagttatacagatgttttctata

SEQ ID NO: 99771 - DNA, 25 bp, Probe sequence
tctccttagtttagattttacgatc

SEQ ID NO: 99772 - DNA, 25 bp, Probe sequence
taaacatctccttagtttagatttt

SEQ ID NO: 99773 - DNA, 25 bp, Probe sequence
tagtaccgtcatttttaacattatt

SEQ ID NO: 99774 - DNA, 25 bp, Probe sequence
tatttagtaccgtcatttttaacat

SEQ ID NO: 99775 - DNA, 25 bp, Probe sequence
tattaatttatttagtaccgtcatt

SEQ ID NO: 99776 - DNA, 25 bp, Probe sequence
tttagcgtcataatcgtttagcaat

SEQ ID NO: 99777 - DNA, 25 bp, Probe sequence
attatttagaaacttccaacatata

SEQ ID NO: 99778 - DNA, 25 bp, Probe sequence
atttacacacatgataatttttagt

SEQ ID NO: 99779 - DNA, 25 bp, Probe sequence
agcagggtgctaaatttacgaaagt

SEQ ID NO: 99780 - DNA, 25 bp, Probe sequence
aaagtgcaattatttcaattatcaa

SEQ ID NO: 99781 - DNA, 25 bp, Probe sequence
aatcaacaaagtgcaattatttcaa

SEQ ID NO: 99782 - DNA, 25 bp, Probe sequence
aattatttcaattatcaaacggaat

SEQ ID NO: 99783 - DNA, 25 bp, Probe sequence
cacacatgataatttttagttaggg

SEQ ID NO: 99784 - DNA, 25 bp, Probe sequence
cagggtgctaaatttacgaaagtag

SEQ ID NO: 99785 - DNA, 25 bp, Probe sequence
gaattatttagaaacttccaacata

SEQ ID NO: 99786 - DNA, 25 bp, Probe sequence
gtgcaattatttcaattatcaaacg

SEQ ID NO: 99787 - DNA, 25 bp, Probe sequence
ggaaatgtagattactttgctaaat

SEQ ID NO: 99788 - DNA, 25 bp, Probe sequence
taatttttatttacacacatgataa

SEQ ID NO: 99789 - DNA, 25 bp, Probe sequence
tactttgctaaatagcagggtgcta

SEQ ID NO: 99790 - DNA, 25 bp, Probe sequence
tagaaacttccaacatataaaaaat

SEQ ID NO: 99791 - DNA, 25 bp, Probe sequence
tagggaaatgtagattactttgcta

SEQ ID NO: 99792 - DNA, 25 bp, Probe sequence
atgaccggttttcagcatcataaat

SEQ ID NO: 99793 - DNA, 25 bp, Probe sequence
accggttttcagcatcataaatgaa

SEQ ID NO: 99794 - DNA, 25 bp, Probe sequence
cggttttcagcatcataaatgaata

SEQ ID NO: 99795 - DNA, 25 bp, Probe sequence
ccggttttcagcatcataaatgaat

SEQ ID NO: 99796 - DNA, 25 bp, Probe sequence
gcattttatttttttaatgaacagt

SEQ ID NO: 99797 - DNA, 25 bp, Probe sequence
gcatcataaatgaataaattgtatc

SEQ ID NO: 99798 - DNA, 25 bp, Probe sequence
gaccggttttcagcatcataaatga

SEQ ID NO: 99799 - DNA, 25 bp, Probe sequence
gttttcagcatcataaatgaataaa

SEQ ID NO: 99800 - DNA, 25 bp, Probe sequence
ggttttcagcatcataaatgaataa

SEQ ID NO: 99801 - DNA, 25 bp, Probe sequence
tgaccggttttcagcatcataaatg

SEQ ID NO: 99802 - DNA, 25 bp, Probe sequence
taatattttatagcattttattttt

SEQ ID NO: 99803 - DNA, 25 bp, Probe sequence
taaattgtatcatttttaatatttt

SEQ ID NO: 99804 - DNA, 25 bp, Probe sequence
tagcattttatttttttaatgaaca

SEQ ID NO: 99805 - DNA, 25 bp, Probe sequence
tatagcattttatttttttaatgaa

SEQ ID NO: 99806 - DNA, 25 bp, Probe sequence
tttatagcattttatttttttaatg

SEQ ID NO: 99807 - DNA, 25 bp, Probe sequence
attgccatgagagtagaagcttcag

SEQ ID NO: 99808 - DNA, 25 bp, Probe sequence
agtacctcacaatataattttatac

SEQ ID NO: 99809 - DNA, 25 bp, Probe sequence
acatgcgaatgtagtagccgtttac

SEQ ID NO: 99810 - DNA, 25 bp, Probe sequence
aagtcaacgaccatgcgtggacagt

SEQ ID NO: 99811 - DNA, 25 bp, Probe sequence
gaagcttcagtttatgaagacttcg

SEQ ID NO: 99812 - DNA, 25 bp, Probe sequence
gaagctagcgatattacgaaatgat

SEQ ID NO: 99813 - DNA, 25 bp, Probe sequence
gataggtgagatgcatacacaacca

SEQ ID NO: 99814 - DNA, 25 bp, Probe sequence
gtatacgaagtaatcctctccgttt

SEQ ID NO: 99815 - DNA, 25 bp, Probe sequence
gtagccgtttactatgagactaggc

SEQ ID NO: 99816 - DNA, 25 bp, Probe sequence
tgaagacttcgaaatcatggttttt

SEQ ID NO: 99817 - DNA, 25 bp, Probe sequence
tcctttaacgttgtataggcattaa

SEQ ID NO: 99818 - DNA, 25 bp, Probe sequence
taatcctctccgtttaacggacaat

SEQ ID NO: 99819 - DNA, 25 bp, Probe sequence
tagttcatcaacattttcatagggg

SEQ ID NO: 99820 - DNA, 25 bp, Probe sequence
tatatcatcaatttagtacctcaca

SEQ ID NO: 99821 - DNA, 25 bp, Probe sequence
tatatatatgtttttaattcggcta

SEQ ID NO: 99822 - DNA, 25 bp, Probe sequence
atatatgttcttctgactcttgtca

SEQ ID NO: 99823 - DNA, 25 bp, Probe sequence
aaatccttaatatatgttcttctga

SEQ ID NO: 99824 - DNA, 25 bp, Probe sequence
aaatcgcctatccacatagtttaac

SEQ ID NO: 99825 - DNA, 25 bp, Probe sequence
aactatgtgtagacgattctgcatt

SEQ ID NO: 99826 - DNA, 25 bp, Probe sequence
gctatcttaagctgtttcgaaattt

SEQ ID NO: 99827 - DNA, 25 bp, Probe sequence
gaacaggggactatgttagtttact

SEQ ID NO: 99828 - DNA, 25 bp, Probe sequence
gaacatatatcatcacttattaagt

SEQ ID NO: 99829 - DNA, 25 bp, Probe sequence
gacatttttaattttgaactctaca

SEQ ID NO: 99830 - DNA, 25 bp, Probe sequence
gactattcaatttgctatcttaagc

SEQ ID NO: 99831 - DNA, 25 bp, Probe sequence
gacgattctgcattatctataagac

SEQ ID NO: 99832 - DNA, 25 bp, Probe sequence
gacccagtatttattcagttcgaga

SEQ ID NO: 99833 - DNA, 25 bp, Probe sequence
gagagtgttaaatcgtattcgcgta

SEQ ID NO: 99834 - DNA, 25 bp, Probe sequence
gagagtatctggttatatttgcaaa

SEQ ID NO: 99835 - DNA, 25 bp, Probe sequence
gtattcgcgtataatttcgattcta

SEQ ID NO: 99836 - DNA, 25 bp, Probe sequence
tcgattctagtcataccattttcat

SEQ ID NO: 99837 - DNA, 25 bp, Probe sequence
attctccgctaatttaatggaaata

SEQ ID NO: 99838 - DNA, 25 bp, Probe sequence
attcattctccgctaatttaatgga

SEQ ID NO: 99839 - DNA, 25 bp, Probe sequence
atatcattcattctccgctaattta

SEQ ID NO: 99840 - DNA, 25 bp, Probe sequence
atatgtgaatcgatagttttaaaat

SEQ ID NO: 99841 - DNA, 25 bp, Probe sequence
atagcgtgaaatattcagattctta

SEQ ID NO: 99842 - DNA, 25 bp, Probe sequence
atacgattcattcatacaattataa

SEQ ID NO: 99843 - DNA, 25 bp, Probe sequence
atcattcattctccgctaatttaat

SEQ ID NO: 99844 - DNA, 25 bp, Probe sequence
agatatcattcattctccgctaatt

SEQ ID NO: 99845 - DNA, 25 bp, Probe sequence
acctaagtgtatacgattcattcat

SEQ ID NO: 99846 - DNA, 25 bp, Probe sequence
gaaactttagtacaatgcattaatt

SEQ ID NO: 99847 - DNA, 25 bp, Probe sequence
gatttgactacctaagtgtatacga

SEQ ID NO: 99848 - DNA, 25 bp, Probe sequence
tccttttatttatatgtgaatcgat

SEQ ID NO: 99849 - DNA, 25 bp, Probe sequence
tctaaattcttagatttgactacct

SEQ ID NO: 99850 - DNA, 25 bp, Probe sequence
taaagatatcattcattctccgcta

SEQ ID NO: 99851 - DNA, 25 bp, Probe sequence
tacaatgcattaattttatacgtta

SEQ ID NO: 99852 - DNA, 25 bp, Probe sequence
atatttgatatcactatacaatcat

SEQ ID NO: 99853 - DNA, 25 bp, Probe sequence
atctaggtaatccgaattctccgtt

SEQ ID NO: 99854 - DNA, 25 bp, Probe sequence
atgacgtgcttttaaatgtattttt

SEQ ID NO: 99855 - DNA, 25 bp, Probe sequence
atggcggtttgaaaatgacgtgctt

SEQ ID NO: 99856 - DNA, 25 bp, Probe sequence
caatcataaagtgcgtttttcgaac

SEQ ID NO: 99857 - DNA, 25 bp, Probe sequence
gaggtaaatctatctaggtaatccg

SEQ ID NO: 99858 - DNA, 25 bp, Probe sequence
gtacaattttttaacactctagagg

SEQ ID NO: 99859 - DNA, 25 bp, Probe sequence
gtcgacatgattctccagtggaaat

SEQ ID NO: 99860 - DNA, 25 bp, Probe sequence
tgtaaatagttagtttattgccggt

SEQ ID NO: 99861 - DNA, 25 bp, Probe sequence
taacgtacatttatgattgtttaag

SEQ ID NO: 99862 - DNA, 25 bp, Probe sequence
tacttttataatcttttagtcgaca

SEQ ID NO: 99863 - DNA, 25 bp, Probe sequence
tacaatgaattgttagttttcttaa

SEQ ID NO: 99864 - DNA, 25 bp, Probe sequence
taggtaatccgaattctccgttaat

SEQ ID NO: 99865 - DNA, 25 bp, Probe sequence
tatattttatgtcaatagcggttta

SEQ ID NO: 99866 - DNA, 25 bp, Probe sequence
ttagtcgacatgattctccagtgga

SEQ ID NO: 99867 - DNA, 25 bp, Probe sequence
acaacctgaactatctataagcgtg

SEQ ID NO: 99868 - DNA, 25 bp, Probe sequence
aaaacaatgctatcgacacactaca

SEQ ID NO: 99869 - DNA, 25 bp, Probe sequence
aacaatgctatcgacacactacaac

SEQ ID NO: 99870 - DNA, 25 bp, Probe sequence
aattttaatttattctgctagtgaa

SEQ ID NO: 99871 - DNA, 25 bp, Probe sequence
ctatcgacacactacaacctgaact

SEQ ID NO: 99872 - DNA, 25 bp, Probe sequence
gaatttataataaggttcattgtca

SEQ ID NO: 99873 - DNA, 25 bp, Probe sequence
gaatcatgaaattaaaccattttat

SEQ ID NO: 99874 - DNA, 25 bp, Probe sequence
gacacactacaacctgaactatcta

SEQ ID NO: 99875 - DNA, 25 bp, Probe sequence
gactgaataagttagaggaggtttt

SEQ ID NO: 99876 - DNA, 25 bp, Probe sequence
gtgattgatgattatcaactgaatc

SEQ ID NO: 99877 - DNA, 25 bp, Probe sequence
tgaactatctataagcgtgaattta

SEQ ID NO: 99878 - DNA, 25 bp, Probe sequence
taaggttcattgtcaaatagactga

SEQ ID NO: 99879 - DNA, 25 bp, Probe sequence
tacggattcaaaattatttgttgta

SEQ ID NO: 99880 - DNA, 25 bp, Probe sequence
tatatattatcttgaatacggattc

SEQ ID NO: 99881 - DNA, 25 bp, Probe sequence
ttctgctagtgaatttttagtttta

SEQ ID NO: 99882 - DNA, 25 bp, Probe sequence
ctagggctaatgtgtacgttaaata

SEQ ID NO: 99883 - DNA, 25 bp, Probe sequence
atgtgtacgttaaatattccctgta

SEQ ID NO: 99884 - DNA, 25 bp, Probe sequence
aaatattccctgtaatacatcaaat

SEQ ID NO: 99885 - DNA, 25 bp, Probe sequence
aacactaaaatgcgaatttatacga

SEQ ID NO: 99886 - DNA, 25 bp, Probe sequence
aagtctctagggctaatgtgtacgt

SEQ ID NO: 99887 - DNA, 25 bp, Probe sequence
aatgtgtacgttaaatattccctgt

SEQ ID NO: 99888 - DNA, 25 bp, Probe sequence
aattttaaagtctctagggctaatg

SEQ ID NO: 99889 - DNA, 25 bp, Probe sequence
ctctagggctaatgtgtacgttaaa

SEQ ID NO: 99890 - DNA, 25 bp, Probe sequence
gttaaatattccctgtaatacatca

SEQ ID NO: 99891 - DNA, 25 bp, Probe sequence
gtctctagggctaatgtgtacgtta

SEQ ID NO: 99892 - DNA, 25 bp, Probe sequence
gtgtacgttaaatattccctgtaat

SEQ ID NO: 99893 - DNA, 25 bp, Probe sequence
tccctgtaatacatcaaatttataa

SEQ ID NO: 99894 - DNA, 25 bp, Probe sequence
taaagtctctagggctaatgtgtac

SEQ ID NO: 99895 - DNA, 25 bp, Probe sequence
tacgttaaatattccctgtaataca

SEQ ID NO: 99896 - DNA, 25 bp, Probe sequence
tattccctgtaatacatcaaattta

SEQ ID NO: 99897 - DNA, 25 bp, Probe sequence
attcaaatctaactttattactata

SEQ ID NO: 99898 - DNA, 25 bp, Probe sequence
atcaacttacaatcctataaagaac

SEQ ID NO: 99899 - DNA, 25 bp, Probe sequence
acaaagtagcttagtaaatgatgaa

SEQ ID NO: 99900 - DNA, 25 bp, Probe sequence
aaagaactatagatattaacatatt

SEQ ID NO: 99901 - DNA, 25 bp, Probe sequence
aaaagctttctattttagtatagat

SEQ ID NO: 99902 - DNA, 25 bp, Probe sequence
aacatatttttacaaagtagcttag

SEQ ID NO: 99903 - DNA, 25 bp, Probe sequence
aacttacaatcctataaagaactat

SEQ ID NO: 99904 - DNA, 25 bp, Probe sequence
caatctgaaagttgatggatatcaa

SEQ ID NO: 99905 - DNA, 25 bp, Probe sequence
gaacgaatagtgattcaaatctaac

SEQ ID NO: 99906 - DNA, 25 bp, Probe sequence
gataacaaaaccagattaacgagta

SEQ ID NO: 99907 - DNA, 25 bp, Probe sequence
gatggatatcaacttacaatcctat

SEQ ID NO: 99908 - DNA, 25 bp, Probe sequence
gatatcaacttacaatcctataaag

SEQ ID NO: 99909 - DNA, 25 bp, Probe sequence
gtgattcaaatctaactttattact

SEQ ID NO: 99910 - DNA, 25 bp, Probe sequence
taagtgggatagaatcatgatgatt

SEQ ID NO: 99911 - DNA, 25 bp, Probe sequence
tattactataaaaagctttctattt

SEQ ID NO: 99912 - DNA, 25 bp, Probe sequence
aggttttttgtctattatctgagtc

SEQ ID NO: 99913 - DNA, 25 bp, Probe sequence
ctattatctgagtcacttaatttaa

SEQ ID NO: 99914 - DNA, 25 bp, Probe sequence
gttttttgtctattatctgagtcac

SEQ ID NO: 99915 - DNA, 25 bp, Probe sequence
gtttaaaatcgtaatctaataatat

SEQ ID NO: 99916 - DNA, 25 bp, Probe sequence
gtctattatctgagtcacttaattt

SEQ ID NO: 99917 - DNA, 25 bp, Probe sequence
ggttttttgtctattatctgagtca

SEQ ID NO: 99918 - DNA, 25 bp, Probe sequence
taaggttttttgtctattatctgag

SEQ ID NO: 99919 - DNA, 25 bp, Probe sequence
tagcgcttaaaatggttttacccat

SEQ ID NO: 99920 - DNA, 25 bp, Probe sequence
tatctgagtcacttaatttaaaatt

SEQ ID NO: 99921 - DNA, 25 bp, Probe sequence
tttgtctattatctgagtcacttaa

SEQ ID NO: 99922 - DNA, 25 bp, Probe sequence
tttaaggttttttgtctattatctg

SEQ ID NO: 99923 - DNA, 25 bp, Probe sequence
ttttttgtctattatctgagtcact

SEQ ID NO: 99924 - DNA, 25 bp, Probe sequence
ttttgtctattatctgagtcactta

SEQ ID NO: 99925 - DNA, 25 bp, Probe sequence
ttgtctattatctgagtcacttaat

SEQ ID NO: 99926 - DNA, 25 bp, Probe sequence
ttgtttgttcaatagtaagtaggat

SEQ ID NO: 99927 - DNA, 25 bp, Probe sequence
atatcgcttctgtttttttattaca

SEQ ID NO: 99928 - DNA, 25 bp, Probe sequence
atcgcttctgtttttttattacata

SEQ ID NO: 99929 - DNA, 25 bp, Probe sequence
agtgaaatatcgcttctgttttttt

SEQ ID NO: 99930 - DNA, 25 bp, Probe sequence
aagtgaaatatcgcttctgtttttt

SEQ ID NO: 99931 - DNA, 25 bp, Probe sequence
cgcttctgtttttttattacatatt

SEQ ID NO: 99932 - DNA, 25 bp, Probe sequence
gcttctgtttttttattacatattt

SEQ ID NO: 99933 - DNA, 25 bp, Probe sequence
gaaatatcgcttctgtttttttatt

SEQ ID NO: 99934 - DNA, 25 bp, Probe sequence
gtgaaatatcgcttctgttttttta

SEQ ID NO: 99935 - DNA, 25 bp, Probe sequence
tgtttttttattacatatttattat

SEQ ID NO: 99936 - DNA, 25 bp, Probe sequence
tgaaatatcgcttctgtttttttat

SEQ ID NO: 99937 - DNA, 25 bp, Probe sequence
tcgcttctgtttttttattacatat

SEQ ID NO: 99938 - DNA, 25 bp, Probe sequence
tctgtttttttattacatatttatt

SEQ ID NO: 99939 - DNA, 25 bp, Probe sequence
tatcgcttctgtttttttattacat

SEQ ID NO: 99940 - DNA, 25 bp, Probe sequence
ttttttattacatatttattattga

SEQ ID NO: 99941 - DNA, 25 bp, Probe sequence
ttctgtttttttattacatatttat

SEQ ID NO: 99942 - DNA, 25 bp, Probe sequence
atagtttagaggtgtaggcattata

SEQ ID NO: 99943 - DNA, 25 bp, Probe sequence
atgtttggttgctatgtattgtgtt

SEQ ID NO: 99944 - DNA, 25 bp, Probe sequence
acatctttttcaatagttcatgagt

SEQ ID NO: 99945 - DNA, 25 bp, Probe sequence
aaaatgtcgttgacgtacactacaa

SEQ ID NO: 99946 - DNA, 25 bp, Probe sequence
aatttatgattcctacatctttttc

SEQ ID NO: 99947 - DNA, 25 bp, Probe sequence
gacaactattagacacttatattat

SEQ ID NO: 99948 - DNA, 25 bp, Probe sequence
gagaacatgttgctacgatatttaa

SEQ ID NO: 99949 - DNA, 25 bp, Probe sequence
gattcctacatctttttcaatagtt

SEQ ID NO: 99950 - DNA, 25 bp, Probe sequence
gtacgaagcatagcactttagtgaa

SEQ ID NO: 99951 - DNA, 25 bp, Probe sequence
gtcgttgacgtacactacaaaaatg

SEQ ID NO: 99952 - DNA, 25 bp, Probe sequence
gtgttatgtgtgtcagtacgaagca

SEQ ID NO: 99953 - DNA, 25 bp, Probe sequence
gtgtcagtacgaagcatagcacttt

SEQ ID NO: 99954 - DNA, 25 bp, Probe sequence
ggttgctatgtattgtgttatgtgt

SEQ ID NO: 99955 - DNA, 25 bp, Probe sequence
tcttgactttaggtttttaaatatg

SEQ ID NO: 99956 - DNA, 25 bp, Probe sequence
tatactaatatttgtgttcaacaga

SEQ ID NO: 99957 - DNA, 25 bp, Probe sequence
attataggtaatcagtcattttttt

SEQ ID NO: 99958 - DNA, 25 bp, Probe sequence
agtagtaagttgaaaggagagaatg

SEQ ID NO: 99959 - DNA, 25 bp, Probe sequence
agaagtagtaagttgaaaggagaga

SEQ ID NO: 99960 - DNA, 25 bp, Probe sequence
aagtagtaagttgaaaggagagaat

SEQ ID NO: 99961 - DNA, 25 bp, Probe sequence
acaattataggtaatcagtcatttt

SEQ ID NO: 99962 - DNA, 25 bp, Probe sequence
aattataggtaatcagtcatttttt

SEQ ID NO: 99963 - DNA, 25 bp, Probe sequence
caattataggtaatcagtcattttt

SEQ ID NO: 99964 - DNA, 25 bp, Probe sequence
gaagtagtaagttgaaaggagagaa

SEQ ID NO: 99965 - DNA, 25 bp, Probe sequence
gtagtaagttgaaaggagagaatga

SEQ ID NO: 99966 - DNA, 25 bp, Probe sequence
taatcagtcatttttttaaaaatag

SEQ ID NO: 99967 - DNA, 25 bp, Probe sequence
tacaattataggtaatcagtcattt

SEQ ID NO: 99968 - DNA, 25 bp, Probe sequence
tagtaagttgaaaggagagaatgag

SEQ ID NO: 99969 - DNA, 25 bp, Probe sequence
tataggtaatcagtcatttttttaa

SEQ ID NO: 99970 - DNA, 25 bp, Probe sequence
ttataggtaatcagtcattttttta

SEQ ID NO: 99971 - DNA, 25 bp, Probe sequence
ttacaattataggtaatcagtcatt

SEQ ID NO: 99972 - DNA, 25 bp, Probe sequence
attcatttaaaggaaggtattatca

SEQ ID NO: 99973 - DNA, 25 bp, Probe sequence
attacattgaagcacatgaaagata

SEQ ID NO: 99974 - DNA, 25 bp, Probe sequence
atagtattacattgaagcacatgaa

SEQ ID NO: 99975 - DNA, 25 bp, Probe sequence
agtattacattgaagcacatgaaag

SEQ ID NO: 99976 - DNA, 25 bp, Probe sequence
acattgaagcacatgaaagataatt

SEQ ID NO: 99977 - DNA, 25 bp, Probe sequence
catagtattacattgaagcacatga

SEQ ID NO: 99978 - DNA, 25 bp, Probe sequence
cattgaagcacatgaaagataattc

SEQ ID NO: 99979 - DNA, 25 bp, Probe sequence
gaagcacatgaaagataattcattt

SEQ ID NO: 99980 - DNA, 25 bp, Probe sequence
gataattcatttaaaggaaggtatt

SEQ ID NO: 99981 - DNA, 25 bp, Probe sequence
gtattacattgaagcacatgaaaga

SEQ ID NO: 99982 - DNA, 25 bp, Probe sequence
tcatagtattacattgaagcacatg

SEQ ID NO: 99983 - DNA, 25 bp, Probe sequence
tacattgaagcacatgaaagataat

SEQ ID NO: 99984 - DNA, 25 bp, Probe sequence
tagtattacattgaagcacatgaaa

SEQ ID NO: 99985 - DNA, 25 bp, Probe sequence
tattacattgaagcacatgaaagat

SEQ ID NO: 99986 - DNA, 25 bp, Probe sequence
ttacattgaagcacatgaaagataa

SEQ ID NO: 99987 - DNA, 25 bp, Probe sequence
attactataatgaatcttgcgagat

SEQ ID NO: 99988 - DNA, 25 bp, Probe sequence
atgataaactagtcattaccactat

SEQ ID NO: 99989 - DNA, 25 bp, Probe sequence
acgatgataaactagtcattaccac

SEQ ID NO: 99990 - DNA, 25 bp, Probe sequence
actagtcattaccactattaataat

SEQ ID NO: 99991 - DNA, 25 bp, Probe sequence
aaattactataatgaatcttgcgag

SEQ ID NO: 99992 - DNA, 25 bp, Probe sequence
aaactagtcattaccactattaata

SEQ ID NO: 99993 - DNA, 25 bp, Probe sequence
cattaccactattaataattgatta

SEQ ID NO: 99994 - DNA, 25 bp, Probe sequence
gcgagatatttagaagtaatgatac

SEQ ID NO: 99995 - DNA, 25 bp, Probe sequence
gaatcttgcgagatatttagaagta

SEQ ID NO: 99996 - DNA, 25 bp, Probe sequence
gatgataaactagtcattaccacta

SEQ ID NO: 99997 - DNA, 25 bp, Probe sequence
gataaactagtcattaccactatta

SEQ ID NO: 99998 - DNA, 25 bp, Probe sequence
gatacaaaataatggactttagaat

SEQ ID NO: 99999 - DNA, 25 bp, Probe sequence
gtcattaccactattaataattgat

SEQ ID NO: 100000 - DNA, 25 bp, Probe sequence
taaactagtcattaccactattaat

SEQ ID NO: 100001 - DNA, 25 bp, Probe sequence
tagtcattaccactattaataattg

SEQ ID NO: 100002 - DNA, 25 bp, Probe sequence
attagcatctatacgttaacagcat

SEQ ID NO: 100003 - DNA, 25 bp, Probe sequence
atacgttaacagcataaccaatgga

SEQ ID NO: 100004 - DNA, 25 bp, Probe sequence
acggcgttcagattacattagcatc

SEQ ID NO: 100005 - DNA, 25 bp, Probe sequence
acttccattggcatgtatgttgtaa

SEQ ID NO: 100006 - DNA, 25 bp, Probe sequence
aaaacttccattggcatgtatgttg

SEQ ID NO: 100007 - DNA, 25 bp, Probe sequence
taaccaatggaagttttcttcgagt

SEQ ID NO: 100008 - DNA, 25 bp, Probe sequence
aaggtgcatgtaatgttgaacgcca

SEQ ID NO: 100009 - DNA, 25 bp, Probe sequence
gccaaatgatacggcgttcagatta

SEQ ID NO: 100010 - DNA, 25 bp, Probe sequence
gcataaccaatggaagttttcttcg

SEQ ID NO: 100011 - DNA, 25 bp, Probe sequence
gcatctatacgttaacagcataacc

SEQ ID NO: 100012 - DNA, 25 bp, Probe sequence
gatacggcgttcagattacattagc

SEQ ID NO: 100013 - DNA, 25 bp, Probe sequence
gattacattagcatctatacgttaa

SEQ ID NO: 100014 - DNA, 25 bp, Probe sequence
gtaatgttgaacgccaaatgatacg

SEQ ID NO: 100015 - DNA, 25 bp, Probe sequence
gtgcatgtaatgttgaacgccaaat

SEQ ID NO: 100016 - DNA, 25 bp, Probe sequence
tggcatgtatgttgtaaaggtgcat

SEQ ID NO: 100017 - DNA, 25 bp, Probe sequence
atgactacactccttttcaactagt

SEQ ID NO: 100018 - DNA, 25 bp, Probe sequence
actagtattaccattcattataaca

SEQ ID NO: 100019 - DNA, 25 bp, Probe sequence
acaatataagtcatggaggtgcctt

SEQ ID NO: 100020 - DNA, 25 bp, Probe sequence
aacattgtcgctaaaaattcgatat

SEQ ID NO: 100021 - DNA, 25 bp, Probe sequence
aattcgatattaggacatgtgtatt

SEQ ID NO: 100022 - DNA, 25 bp, Probe sequence
cactccttttcaactagtattacca

SEQ ID NO: 100023 - DNA, 25 bp, Probe sequence
cattcattataacattgtcgctaaa

SEQ ID NO: 100024 - DNA, 25 bp, Probe sequence
ctacactccttttcaactagtatta

SEQ ID NO: 100025 - DNA, 25 bp, Probe sequence
gactacactccttttcaactagtat

SEQ ID NO: 100026 - DNA, 25 bp, Probe sequence
gagcattttataatttttggtacaa

SEQ ID NO: 100027 - DNA, 25 bp, Probe sequence
ggtacaatataagtcatggaggtgc

SEQ ID NO: 100028 - DNA, 25 bp, Probe sequence
ggacatgtgtatttaatatgagcat

SEQ ID NO: 100029 - DNA, 25 bp, Probe sequence
tccttttcaactagtattaccattc

SEQ ID NO: 100030 - DNA, 25 bp, Probe sequence
taccattcattataacattgtcgct

SEQ ID NO: 100031 - DNA, 25 bp, Probe sequence
ttcaactagtattaccattcattat

SEQ ID NO: 100032 - DNA, 25 bp, Probe sequence
attctcctcacttttaacatctgtt

SEQ ID NO: 100033 - DNA, 25 bp, Probe sequence
atattatacccgttcgagcttagat

SEQ ID NO: 100034 - DNA, 25 bp, Probe sequence
atcacttcaaacgcaattgttataa

SEQ ID NO: 100035 - DNA, 25 bp, Probe sequence
accttgatgttatcacttcaaacgc

SEQ ID NO: 100036 - DNA, 25 bp, Probe sequence
aatcatattatacccgttcgagctt

SEQ ID NO: 100037 - DNA, 25 bp, Probe sequence
gatgttatcacttcaaacgcaattg

SEQ ID NO: 100038 - DNA, 25 bp, Probe sequence
gttatcttgataactcattttgttt

SEQ ID NO: 100039 - DNA, 25 bp, Probe sequence
gtttaaaattgctaaccttgatgtt

SEQ ID NO: 100040 - DNA, 25 bp, Probe sequence
tgctaaccttgatgttatcacttca

SEQ ID NO: 100041 - DNA, 25 bp, Probe sequence
tctcctcacttttaacatctgttat

SEQ ID NO: 100042 - DNA, 25 bp, Probe sequence
tacccgttcgagcttagattaagca

SEQ ID NO: 100043 - DNA, 25 bp, Probe sequence
tcacttttaacatctgttatcttga

SEQ ID NO: 100044 - DNA, 25 bp, Probe sequence
tatattctcctcacttttaacatct

SEQ ID NO: 100045 - DNA, 25 bp, Probe sequence
ttatacccgttcgagcttagattaa

SEQ ID NO: 100046 - DNA, 25 bp, Probe sequence
ttaatcatattatacccgttcgagc

SEQ ID NO: 100047 - DNA, 25 bp, Probe sequence
atttctaatgtcatctcgtttattt

SEQ ID NO: 100048 - DNA, 25 bp, Probe sequence
atgtcatctcgtttatttggcattt

SEQ ID NO: 100049 - DNA, 25 bp, Probe sequence
aaatagttgtgatcgagaacgtaac

SEQ ID NO: 100050 - DNA, 25 bp, Probe sequence
aaataaatatgctgttactaataaa

SEQ ID NO: 100051 - DNA, 25 bp, Probe sequence
aatatctaatttctaatgtcatctc

SEQ ID NO: 100052 - DNA, 25 bp, Probe sequence
catctcgtttatttggcatttaatt

SEQ ID NO: 100053 - DNA, 25 bp, Probe sequence
gtcatctcgtttatttggcatttaa

SEQ ID NO: 100054 - DNA, 25 bp, Probe sequence
tgtcatctcgtttatttggcattta

SEQ ID NO: 100055 - DNA, 25 bp, Probe sequence
tctcgtttatttggcatttaattta

SEQ ID NO: 100056 - DNA, 25 bp, Probe sequence
tctaatttctaatgtcatctcgttt

SEQ ID NO: 100057 - DNA, 25 bp, Probe sequence
tctaatgtcatctcgtttatttggc

SEQ ID NO: 100058 - DNA, 25 bp, Probe sequence
taatttctaatgtcatctcgtttat

SEQ ID NO: 100059 - DNA, 25 bp, Probe sequence
taatgtcatctcgtttatttggcat

SEQ ID NO: 100060 - DNA, 25 bp, Probe sequence
tagttgtgatcgagaacgtaacgtg

SEQ ID NO: 100061 - DNA, 25 bp, Probe sequence
tatctaatttctaatgtcatctcgt

SEQ ID NO: 100062 - DNA, 25 bp, Probe sequence
atggcagggcatatgcaaaagcatc

SEQ ID NO: 100063 - DNA, 25 bp, Probe sequence
agcatcacttatgaaaaaggcgcgt

SEQ ID NO: 100064 - DNA, 25 bp, Probe sequence
acgcctcatctcttttcaatataag

SEQ ID NO: 100065 - DNA, 25 bp, Probe sequence
aaattggctgattgactagcgtaga

SEQ ID NO: 100066 - DNA, 25 bp, Probe sequence
aaaggcgcgtgtgacatgagtattt

SEQ ID NO: 100067 - DNA, 25 bp, Probe sequence
aaagcatcttttgaccaactaagtt

SEQ ID NO: 100068 - DNA, 25 bp, Probe sequence
aagtatgttgtttgtcgataatgat

SEQ ID NO: 100069 - DNA, 25 bp, Probe sequence
ctcaggttcagtaattcaatagtaa

SEQ ID NO: 100070 - DNA, 25 bp, Probe sequence
gaacacatcttcttgctaataaagc

SEQ ID NO: 100071 - DNA, 25 bp, Probe sequence
gaacaaatttctgcgaacacatctt

SEQ ID NO: 100072 - DNA, 25 bp, Probe sequence
gaaacgcgaaagtggagattggtaa

SEQ ID NO: 100073 - DNA, 25 bp, Probe sequence
gattataactaactcaggttcagta

SEQ ID NO: 100074 - DNA, 25 bp, Probe sequence
gtgtatataaggttcggctcaatga

SEQ ID NO: 100075 - DNA, 25 bp, Probe sequence
ggggagacacgtattgtttgatttg

SEQ ID NO: 100076 - DNA, 25 bp, Probe sequence
ttctgcgaacacatcttcttgctaa

SEQ ID NO: 100077 - DNA, 25 bp, Probe sequence
ataacaccttgctataattattttg

SEQ ID NO: 100078 - DNA, 25 bp, Probe sequence
ataacccatgacatcagactagagc

SEQ ID NO: 100079 - DNA, 25 bp, Probe sequence
atcaataacccatgacatcagacta

SEQ ID NO: 100080 - DNA, 25 bp, Probe sequence
atcaccaatcaataacccatgacat

SEQ ID NO: 100081 - DNA, 25 bp, Probe sequence
acccatgacatcagactagagcatt

SEQ ID NO: 100082 - DNA, 25 bp, Probe sequence
acatagttttatattatcaccaatc

SEQ ID NO: 100083 - DNA, 25 bp, Probe sequence
aaacaaataataacaccttgctata

SEQ ID NO: 100084 - DNA, 25 bp, Probe sequence
aacaaggtctatatacatttgattg

SEQ ID NO: 100085 - DNA, 25 bp, Probe sequence
aatcatcgtgaatataacatagttt

SEQ ID NO: 100086 - DNA, 25 bp, Probe sequence
ctcctttgtaagttaatcatcgtga

SEQ ID NO: 100087 - DNA, 25 bp, Probe sequence
gctattacatagcctaaaaacaaat

SEQ ID NO: 100088 - DNA, 25 bp, Probe sequence
gaaactcctttgtaagttaatcatc

SEQ ID NO: 100089 - DNA, 25 bp, Probe sequence
gacatcagactagagcattaggttt

SEQ ID NO: 100090 - DNA, 25 bp, Probe sequence
gattgtaagctattacatagcctaa

SEQ ID NO: 100091 - DNA, 25 bp, Probe sequence
tagagcattaggtttaggggtagaa

SEQ ID NO: 100092 - DNA, 25 bp, Probe sequence
atgatttttgaaccacggtcgctcg

SEQ ID NO: 100093 - DNA, 25 bp, Probe sequence
agctcctctgtccgatttttaatgc

SEQ ID NO: 100094 - DNA, 25 bp, Probe sequence
actgaaacatgagctcctctgtccg

SEQ ID NO: 100095 - DNA, 25 bp, Probe sequence
aaaaccgagcggccgtggtatgatt

SEQ ID NO: 100096 - DNA, 25 bp, Probe sequence
aaccgagcggccgtggtatgatttt

SEQ ID NO: 100097 - DNA, 25 bp, Probe sequence
ctcctctgtccgatttttaatgcga

SEQ ID NO: 100098 - DNA, 25 bp, Probe sequence
gaaaaaaccgagcggccgtggtatg

SEQ ID NO: 100099 - DNA, 25 bp, Probe sequence
ccgagcggccgtggtatgatttttg

SEQ ID NO: 100100 - DNA, 25 bp, Probe sequence
cctctgtccgatttttaatgcgaaa

SEQ ID NO: 100101 - DNA, 25 bp, Probe sequence
gcggccgtggtatgatttttgaacc

SEQ ID NO: 100102 - DNA, 25 bp, Probe sequence
gagcggccgtggtatgatttttgaa

SEQ ID NO: 100103 - DNA, 25 bp, Probe sequence
gatatcggacagatgagtatactga

SEQ ID NO: 100104 - DNA, 25 bp, Probe sequence
gtatactgaaacatgagctcctctg

SEQ ID NO: 100105 - DNA, 25 bp, Probe sequence
gtatgatttttgaaccacggtcgct

SEQ ID NO: 100106 - DNA, 25 bp, Probe sequence
taatgcgaaaaaaccgagcggccgt

SEQ ID NO: 100107 - DNA, 25 bp, Probe sequence
attgatgttagaacctttaattaag

SEQ ID NO: 100108 - DNA, 25 bp, Probe sequence
actaaagcactttattattgtgtag

SEQ ID NO: 100109 - DNA, 25 bp, Probe sequence
acatcacgatttgactaaagcactt

SEQ ID NO: 100110 - DNA, 25 bp, Probe sequence
aatggcgactggttttaataaatca

SEQ ID NO: 100111 - DNA, 25 bp, Probe sequence
aatgctttgtatagttggattttgc

SEQ ID NO: 100112 - DNA, 25 bp, Probe sequence
aatcagctaatgaatcactacacct

SEQ ID NO: 100113 - DNA, 25 bp, Probe sequence
aatttcatatgttcatcgacgatat

SEQ ID NO: 100114 - DNA, 25 bp, Probe sequence
gcgactggttttaataaatcagcta

SEQ ID NO: 100115 - DNA, 25 bp, Probe sequence
gctaatgaatcactacacctataag

SEQ ID NO: 100116 - DNA, 25 bp, Probe sequence
gaatatagtgattagaatgctttgt

SEQ ID NO: 100117 - DNA, 25 bp, Probe sequence
gaatcactacacctataagtatgaa

SEQ ID NO: 100118 - DNA, 25 bp, Probe sequence
gtgtctcaatttcatatgttcatcg

SEQ ID NO: 100119 - DNA, 25 bp, Probe sequence
tcgacgatatgaagcgtattatggt

SEQ ID NO: 100120 - DNA, 25 bp, Probe sequence
taaactgttataaatgtgtctcaat

SEQ ID NO: 100121 - DNA, 25 bp, Probe sequence
tttgcaaaattgatgttagaacctt

SEQ ID NO: 100122 - DNA, 25 bp, Probe sequence
agcgtttcacttttaatgactcatt

SEQ ID NO: 100123 - DNA, 25 bp, Probe sequence
actgccgagcaaatctagtagagta

SEQ ID NO: 100124 - DNA, 25 bp, Probe sequence
gctagtaaacgtgtcctaacttcct

SEQ ID NO: 100125 - DNA, 25 bp, Probe sequence
aatgactcattaagaacggcctgaa

SEQ ID NO: 100126 - DNA, 25 bp, Probe sequence
gaacggcctgaaaatgtttggcgta

SEQ ID NO: 100127 - DNA, 25 bp, Probe sequence
gatagttttgacatttagtttctaa

SEQ ID NO: 100128 - DNA, 25 bp, Probe sequence
gttcggtcatgtatcggactgatgg

SEQ ID NO: 100129 - DNA, 25 bp, Probe sequence
gtttctaattggtcattactgccga

SEQ ID NO: 100130 - DNA, 25 bp, Probe sequence
gtttggcgtattaagtgcaatgata

SEQ ID NO: 100131 - DNA, 25 bp, Probe sequence
gtagagtaatcatgtaaatctttaa

SEQ ID NO: 100132 - DNA, 25 bp, Probe sequence
ggactgatggaaaagcgtttcactt

SEQ ID NO: 100133 - DNA, 25 bp, Probe sequence
tggtcattactgccgagcaaatcta

SEQ ID NO: 100134 - DNA, 25 bp, Probe sequence
tcctaacttcctttttgcattttga

SEQ ID NO: 100135 - DNA, 25 bp, Probe sequence
tactattagttcggtcatgtatcgg

SEQ ID NO: 100136 - DNA, 25 bp, Probe sequence
ttcctttttgcattttgaagtgtaa

SEQ ID NO: 100137 - DNA, 25 bp, Probe sequence
agctctatgccaaaacgggcagatg

SEQ ID NO: 100138 - DNA, 25 bp, Probe sequence
aacatggctagctctatgccaaaac

SEQ ID NO: 100139 - DNA, 25 bp, Probe sequence
aatggacgacggaagctgggcaatc

SEQ ID NO: 100140 - DNA, 25 bp, Probe sequence
caatcaaacatggctagctctatgc

SEQ ID NO: 100141 - DNA, 25 bp, Probe sequence
ctagctttagctcagaatggacgac

SEQ ID NO: 100142 - DNA, 25 bp, Probe sequence
cgggcagatgagcttgataacggaa

SEQ ID NO: 100143 - DNA, 25 bp, Probe sequence
gccaaaacgggcagatgagcttgat

SEQ ID NO: 100144 - DNA, 25 bp, Probe sequence
gctttagctcagaatggacgacgga

SEQ ID NO: 100145 - DNA, 25 bp, Probe sequence
gcagatgagcttgataacggaagtt

SEQ ID NO: 100146 - DNA, 25 bp, Probe sequence
gaagctgggcaatcaaacatggcta

SEQ ID NO: 100147 - DNA, 25 bp, Probe sequence
gacggaagctgggcaatcaaacatg

SEQ ID NO: 100148 - DNA, 25 bp, Probe sequence
ggacgacggaagctgggcaatcaaa

SEQ ID NO: 100149 - DNA, 25 bp, Probe sequence
ggctagctctatgccaaaacgggca

SEQ ID NO: 100150 - DNA, 25 bp, Probe sequence
ggcaatcaaacatggctagctctat

SEQ ID NO: 100151 - DNA, 25 bp, Probe sequence
tgtcctagctttagctcagaatgga

SEQ ID NO: 100152 - DNA, 25 bp, Probe sequence
agagtccgagactttgtgggtagtt

SEQ ID NO: 100153 - DNA, 25 bp, Probe sequence
agactgccgacagagtccgagactt

SEQ ID NO: 100154 - DNA, 25 bp, Probe sequence
actgccgacagagtccgagactttg

SEQ ID NO: 100155 - DNA, 25 bp, Probe sequence
aatagactgccgacagagtccgaga

SEQ ID NO: 100156 - DNA, 25 bp, Probe sequence
aatagaggaatagactgccgacaga

SEQ ID NO: 100157 - DNA, 25 bp, Probe sequence
ctgccgacagagtccgagactttgt

SEQ ID NO: 100158 - DNA, 25 bp, Probe sequence
ccgacagagtccgagactttgtggg

SEQ ID NO: 100159 - DNA, 25 bp, Probe sequence
gccgacagagtccgagactttgtgg

SEQ ID NO: 100160 - DNA, 25 bp, Probe sequence
gacagagtccgagactttgtgggta

SEQ ID NO: 100161 - DNA, 25 bp, Probe sequence
gactgccgacagagtccgagacttt

SEQ ID NO: 100162 - DNA, 25 bp, Probe sequence
gagtccgagactttgtgggtagttt

SEQ ID NO: 100163 - DNA, 25 bp, Probe sequence
gaggaatagactgccgacagagtcc

SEQ ID NO: 100164 - DNA, 25 bp, Probe sequence
ggaatagactgccgacagagtccga

SEQ ID NO: 100165 - DNA, 25 bp, Probe sequence
taatatttttcaatcctttaaatag

SEQ ID NO: 100166 - DNA, 25 bp, Probe sequence
tagactgccgacagagtccgagact

SEQ ID NO: 100167 - DNA, 25 bp, Probe sequence
atcacaacaaaggagtgctataacc

SEQ ID NO: 100168 - DNA, 25 bp, Probe sequence
atgtggtaaagtaatatcgaacgtt

SEQ ID NO: 100169 - DNA, 25 bp, Probe sequence
acatcacaacaaaggagtgctataa

SEQ ID NO: 100170 - DNA, 25 bp, Probe sequence
aaagcgagatgtggtaaagtaatat

SEQ ID NO: 100171 - DNA, 25 bp, Probe sequence
aaacatcacaacaaaggagtgctat

SEQ ID NO: 100172 - DNA, 25 bp, Probe sequence
aaaagcgagatgtggtaaagtaata

SEQ ID NO: 100173 - DNA, 25 bp, Probe sequence
aacatcacaacaaaggagtgctata

SEQ ID NO: 100174 - DNA, 25 bp, Probe sequence
catcacaacaaaggagtgctataac

SEQ ID NO: 100175 - DNA, 25 bp, Probe sequence
cgttttaataaacatcacaacaaag

SEQ ID NO: 100176 - DNA, 25 bp, Probe sequence
gcgagatgtggtaaagtaatatcga

SEQ ID NO: 100177 - DNA, 25 bp, Probe sequence
gagatgtggtaaagtaatatcgaac

SEQ ID NO: 100178 - DNA, 25 bp, Probe sequence
gatgtggtaaagtaatatcgaacgt

SEQ ID NO: 100179 - DNA, 25 bp, Probe sequence
gttttaataaacatcacaacaaagg

SEQ ID NO: 100180 - DNA, 25 bp, Probe sequence
tgtggtaaagtaatatcgaacgttt

SEQ ID NO: 100181 - DNA, 25 bp, Probe sequence
taaacatcacaacaaaggagtgcta

SEQ ID NO: 100182 - DNA, 25 bp, Probe sequence
atcgctttttgtatgtaaactaata

SEQ ID NO: 100183 - DNA, 25 bp, Probe sequence
aactatgttgtcacaaaggagtcaa

SEQ ID NO: 100184 - DNA, 25 bp, Probe sequence
aagcgatgtaacacacctgtttcga

SEQ ID NO: 100185 - DNA, 25 bp, Probe sequence
cctgtttcgagaggtgaggcatcgc

SEQ ID NO: 100186 - DNA, 25 bp, Probe sequence
gcgatgtaacacacctgtttcgaga

SEQ ID NO: 100187 - DNA, 25 bp, Probe sequence
gagaggtgaggcatcgctttttgta

SEQ ID NO: 100188 - DNA, 25 bp, Probe sequence
gaggtgaggcatcgctttttgtatg

SEQ ID NO: 100189 - DNA, 25 bp, Probe sequence
gaggcatcgctttttgtatgtaaac

SEQ ID NO: 100190 - DNA, 25 bp, Probe sequence
gatgtaacacacctgtttcgagagg

SEQ ID NO: 100191 - DNA, 25 bp, Probe sequence
gtttcgagaggtgaggcatcgcttt

SEQ ID NO: 100192 - DNA, 25 bp, Probe sequence
gtataatgaataactatgttgtcac

SEQ ID NO: 100193 - DNA, 25 bp, Probe sequence
gtaacacacctgtttcgagaggtga

SEQ ID NO: 100194 - DNA, 25 bp, Probe sequence
ggtgaggcatcgctttttgtatgta

SEQ ID NO: 100195 - DNA, 25 bp, Probe sequence
ggcatcgctttttgtatgtaaacta

SEQ ID NO: 100196 - DNA, 25 bp, Probe sequence
taaaagcgatgtaacacacctgttt

SEQ ID NO: 100197 - DNA, 25 bp, Probe sequence
tgtccggataaaattccccaaacag

SEQ ID NO: 100198 - DNA, 25 bp, Probe sequence
agatgtaatctgtgtttcaagaaat

SEQ ID NO: 100199 - DNA, 25 bp, Probe sequence
aaacttaactcttgttgacttgatc

SEQ ID NO: 100200 - DNA, 25 bp, Probe sequence
aagtgtaagttttatcaaatctagt

SEQ ID NO: 100201 - DNA, 25 bp, Probe sequence
aatgagcttttaaatatttgtcgaa

SEQ ID NO: 100202 - DNA, 25 bp, Probe sequence
cagttttctttgtaaatttgatatc

SEQ ID NO: 100203 - DNA, 25 bp, Probe sequence
cttcatttactttcgcttcattata

SEQ ID NO: 100204 - DNA, 25 bp, Probe sequence
gaaattgactcttttcattttatta

SEQ ID NO: 100205 - DNA, 25 bp, Probe sequence
gatagggtttattatacagttttct

SEQ ID NO: 100206 - DNA, 25 bp, Probe sequence
gattgtgcataaaattttacttcat

SEQ ID NO: 100207 - DNA, 25 bp, Probe sequence
gtattattgcaatttcttgtgtccg

SEQ ID NO: 100208 - DNA, 25 bp, Probe sequence
tagacaatttttaatctgattttga

SEQ ID NO: 100209 - DNA, 25 bp, Probe sequence
tttacttcatttactttcgcttcat

SEQ ID NO: 100210 - DNA, 25 bp, Probe sequence
ttgatgaattttttatagcgatagg

SEQ ID NO: 100211 - DNA, 25 bp, Probe sequence
ttgcaatttcttgtgtccggataaa

SEQ ID NO: 100212 - DNA, 25 bp, Probe sequence
attgagtaatcaaggccattttatc

SEQ ID NO: 100213 - DNA, 25 bp, Probe sequence
atatcacaaatcagttctcctaaat

SEQ ID NO: 100214 - DNA, 25 bp, Probe sequence
atcaaggccattttatcatgttcac

SEQ ID NO: 100215 - DNA, 25 bp, Probe sequence
atcatgttcacgtctaagatttaaa

SEQ ID NO: 100216 - DNA, 25 bp, Probe sequence
atcatatcacaaatcagttctccta

SEQ ID NO: 100217 - DNA, 25 bp, Probe sequence
aaaatcctcctatagtctttaatat

SEQ ID NO: 100218 - DNA, 25 bp, Probe sequence
aaggccattttatcatgttcacgtc

SEQ ID NO: 100219 - DNA, 25 bp, Probe sequence
aatcctcctatagtctttaatatca

SEQ ID NO: 100220 - DNA, 25 bp, Probe sequence
cattttatcatgttcacgtctaaga

SEQ ID NO: 100221 - DNA, 25 bp, Probe sequence
gccattttatcatgttcacgtctaa

SEQ ID NO: 100222 - DNA, 25 bp, Probe sequence
gagtaatcaaggccattttatcatg

SEQ ID NO: 100223 - DNA, 25 bp, Probe sequence
gttctcctaaatataactattgagt

SEQ ID NO: 100224 - DNA, 25 bp, Probe sequence
tcctcctatagtctttaatatcata

SEQ ID NO: 100225 - DNA, 25 bp, Probe sequence
tcacaaatcagttctcctaaatata

SEQ ID NO: 100226 - DNA, 25 bp, Probe sequence
tacacgtaaaaatgaattggagcga

SEQ ID NO: 100227 - DNA, 25 bp, Probe sequence
attaataattttccatctatccgat

SEQ ID NO: 100228 - DNA, 25 bp, Probe sequence
atgatgtcatgtattgtccatagat

SEQ ID NO: 100229 - DNA, 25 bp, Probe sequence
agactacaagtcattatccaaggat

SEQ ID NO: 100230 - DNA, 25 bp, Probe sequence
aagtccgatttgatatagagccatg

SEQ ID NO: 100231 - DNA, 25 bp, Probe sequence
caagctttattttttgtctatgtca

SEQ ID NO: 100232 - DNA, 25 bp, Probe sequence
caaaatataaaatcctaagcatcgt

SEQ ID NO: 100233 - DNA, 25 bp, Probe sequence
cttttcatggagtccgttttattat

SEQ ID NO: 100234 - DNA, 25 bp, Probe sequence
gaattgttgtacatgtattggccaa

SEQ ID NO: 100235 - DNA, 25 bp, Probe sequence
gagtccgttttattatagaacctat

SEQ ID NO: 100236 - DNA, 25 bp, Probe sequence
gttacaatgcggtattgcatgttta

SEQ ID NO: 100237 - DNA, 25 bp, Probe sequence
gtattggccaaacaacctgtgataa

SEQ ID NO: 100238 - DNA, 25 bp, Probe sequence
gtccatagatacacgtaacgcagtt

SEQ ID NO: 100239 - DNA, 25 bp, Probe sequence
tgggcattatagtgttcaagcttta

SEQ ID NO: 100240 - DNA, 25 bp, Probe sequence
tacttgatttagttacaatgcggta

SEQ ID NO: 100241 - DNA, 25 bp, Probe sequence
tttccatctatccgatttaagttga

SEQ ID NO: 100242 - DNA, 25 bp, Probe sequence
atcgtatgaccgtatcactgtaata

SEQ ID NO: 100243 - DNA, 25 bp, Probe sequence
actaatcgtatgaccgtatcactgt

SEQ ID NO: 100244 - DNA, 25 bp, Probe sequence
aacacactaatcgtatgaccgtatc

SEQ ID NO: 100245 - DNA, 25 bp, Probe sequence
aacgttttaatcataaattgctcaa

SEQ ID NO: 100246 - DNA, 25 bp, Probe sequence
aagggtgagtacgtgcgattagtgt

SEQ ID NO: 100247 - DNA, 25 bp, Probe sequence
aataaagggtgagtacgtgcgatta

SEQ ID NO: 100248 - DNA, 25 bp, Probe sequence
cacactaatcgtatgaccgtatcac

SEQ ID NO: 100249 - DNA, 25 bp, Probe sequence
cgtgcgattagtgtatttttatttc

SEQ ID NO: 100250 - DNA, 25 bp, Probe sequence
cgtatgaccgtatcactgtaataaa

SEQ ID NO: 100251 - DNA, 25 bp, Probe sequence
gcgattagtgtatttttatttcaaa

SEQ ID NO: 100252 - DNA, 25 bp, Probe sequence
gagtacgtgcgattagtgtattttt

SEQ ID NO: 100253 - DNA, 25 bp, Probe sequence
gataacacactaatcgtatgaccgt

SEQ ID NO: 100254 - DNA, 25 bp, Probe sequence
gggtgagtacgtgcgattagtgtat

SEQ ID NO: 100255 - DNA, 25 bp, Probe sequence
tgaccgtatcactgtaataaagggt

SEQ ID NO: 100256 - DNA, 25 bp, Probe sequence
taatcgtatgaccgtatcactgtaa

SEQ ID NO: 100257 - DNA, 25 bp, Probe sequence
atcattaaaccgcgtttcttaatat

SEQ ID NO: 100258 - DNA, 25 bp, Probe sequence
atgaaatcattaaaccgcgtttctt

SEQ ID NO: 100259 - DNA, 25 bp, Probe sequence
accgcgtttcttaatatgccaagat

SEQ ID NO: 100260 - DNA, 25 bp, Probe sequence
aaaccgcgtttcttaatatgccaag

SEQ ID NO: 100261 - DNA, 25 bp, Probe sequence
aaccgcgtttcttaatatgccaaga

SEQ ID NO: 100262 - DNA, 25 bp, Probe sequence
aagaagtcatctatcagtaatattt

SEQ ID NO: 100263 - DNA, 25 bp, Probe sequence
aattgaaagaagtcatctatcagta

SEQ ID NO: 100264 - DNA, 25 bp, Probe sequence
ccgcgtttcttaatatgccaagatt

SEQ ID NO: 100265 - DNA, 25 bp, Probe sequence
gccaagattatgatatgctattgaa

SEQ ID NO: 100266 - DNA, 25 bp, Probe sequence
gcgtttcttaatatgccaagattat

SEQ ID NO: 100267 - DNA, 25 bp, Probe sequence
gaagtcatctatcagtaatattttt

SEQ ID NO: 100268 - DNA, 25 bp, Probe sequence
gtcatctatcagtaatatttttaat

SEQ ID NO: 100269 - DNA, 25 bp, Probe sequence
tgaaatcattaaaccgcgtttctta

SEQ ID NO: 100270 - DNA, 25 bp, Probe sequence
taaaccgcgtttcttaatatgccaa

SEQ ID NO: 100271 - DNA, 25 bp, Probe sequence
tatgccaagattatgatatgctatt

SEQ ID NO: 100272 - DNA, 25 bp, Probe sequence
ataattgtgtaatattcagttattt

SEQ ID NO: 100273 - DNA, 25 bp, Probe sequence
atgaagttaggtagcattttgttac

SEQ ID NO: 100274 - DNA, 25 bp, Probe sequence
acctagcttttttattatattcata

SEQ ID NO: 100275 - DNA, 25 bp, Probe sequence
aataggattgattatcttgaatatg

SEQ ID NO: 100276 - DNA, 25 bp, Probe sequence
cctagcttttttattatattcatag

SEQ ID NO: 100277 - DNA, 25 bp, Probe sequence
gcattttgttacctagcttttttat

SEQ ID NO: 100278 - DNA, 25 bp, Probe sequence
gttaggtagcattttgttacctagc

SEQ ID NO: 100279 - DNA, 25 bp, Probe sequence
gtagcattttgttacctagcttttt

SEQ ID NO: 100280 - DNA, 25 bp, Probe sequence
ggtagcattttgttacctagctttt

SEQ ID NO: 100281 - DNA, 25 bp, Probe sequence
ggattgattatcttgaatatgaagt

SEQ ID NO: 100282 - DNA, 25 bp, Probe sequence
tgttacctagcttttttattatatt

SEQ ID NO: 100283 - DNA, 25 bp, Probe sequence
tacctagcttttttattatattcat

SEQ ID NO: 100284 - DNA, 25 bp, Probe sequence
tagcattttgttacctagctttttt

SEQ ID NO: 100285 - DNA, 25 bp, Probe sequence
ttacctagcttttttattatattca

SEQ ID NO: 100286 - DNA, 25 bp, Probe sequence
ttgttacctagcttttttattatat

SEQ ID NO: 100287 - DNA, 25 bp, Probe sequence
attcgtctattttcattataaaaat

SEQ ID NO: 100288 - DNA, 25 bp, Probe sequence
attattaatatcgccgtttttatgt

SEQ ID NO: 100289 - DNA, 25 bp, Probe sequence
atatcgccgtttttatgtaaaatgc

SEQ ID NO: 100290 - DNA, 25 bp, Probe sequence
atcgccgtttttatgtaaaatgcaa

SEQ ID NO: 100291 - DNA, 25 bp, Probe sequence
agtgctatatttagagtataaccat

SEQ ID NO: 100292 - DNA, 25 bp, Probe sequence
aaatgcaaactaagaggagtgtaga

SEQ ID NO: 100293 - DNA, 25 bp, Probe sequence
aaagttaaatggtttgatatattga

SEQ ID NO: 100294 - DNA, 25 bp, Probe sequence
aaaatgatacttaagtgctatattt

SEQ ID NO: 100295 - DNA, 25 bp, Probe sequence
gctatatttagagtataaccatgtt

SEQ ID NO: 100296 - DNA, 25 bp, Probe sequence
gagtataaccatgttaaagttaaat

SEQ ID NO: 100297 - DNA, 25 bp, Probe sequence
gatacttaagtgctatatttagagt

SEQ ID NO: 100298 - DNA, 25 bp, Probe sequence
ggtttgatatattgaaagttagggt

SEQ ID NO: 100299 - DNA, 25 bp, Probe sequence
taattattaatatcgccgtttttat

SEQ ID NO: 100300 - DNA, 25 bp, Probe sequence
taatatcgccgtttttatgtaaaat

SEQ ID NO: 100301 - DNA, 25 bp, Probe sequence
tattaatatcgccgtttttatgtaa

SEQ ID NO: 100302 - DNA, 25 bp, Probe sequence
attatgtgaaatgaaacctcaatat

SEQ ID NO: 100303 - DNA, 25 bp, Probe sequence
atatatgatgcgcaccacaaagtta

SEQ ID NO: 100304 - DNA, 25 bp, Probe sequence
atatgatgcgcaccacaaagttata

SEQ ID NO: 100305 - DNA, 25 bp, Probe sequence
atagtattattttatggggggcata

SEQ ID NO: 100306 - DNA, 25 bp, Probe sequence
atgatgcgcaccacaaagttatatc

SEQ ID NO: 100307 - DNA, 25 bp, Probe sequence
acctcaatatgaataatggttgtgt

SEQ ID NO: 100308 - DNA, 25 bp, Probe sequence
caacctaacgaagcttgaatatatg

SEQ ID NO: 100309 - DNA, 25 bp, Probe sequence
catatattcaagctttttattatta

SEQ ID NO: 100310 - DNA, 25 bp, Probe sequence
gcttgaatatatgatgcgcaccaca

SEQ ID NO: 100311 - DNA, 25 bp, Probe sequence
gcaccacaaagttatatcatatatt

SEQ ID NO: 100312 - DNA, 25 bp, Probe sequence
gaatatatgatgcgcaccacaaagt

SEQ ID NO: 100313 - DNA, 25 bp, Probe sequence
gatgcgcaccacaaagttatatcat

SEQ ID NO: 100314 - DNA, 25 bp, Probe sequence
gtattattttatggggggcatacga

SEQ ID NO: 100315 - DNA, 25 bp, Probe sequence
tgcgcaccacaaagttatatcatat

SEQ ID NO: 100316 - DNA, 25 bp, Probe sequence
tatattcaagctttttattattaaa

SEQ ID NO: 100317 - DNA, 25 bp, Probe sequence
agatattgatagtagcgcttttttg

SEQ ID NO: 100318 - DNA, 25 bp, Probe sequence
aaaagaagcttttctttatattgat

SEQ ID NO: 100319 - DNA, 25 bp, Probe sequence
aacactattgcatcaaaatgtatta

SEQ ID NO: 100320 - DNA, 25 bp, Probe sequence
aatataggcgttactgtcaataaga

SEQ ID NO: 100321 - DNA, 25 bp, Probe sequence
gcggattttttatgtacagtctttt

SEQ ID NO: 100322 - DNA, 25 bp, Probe sequence
gaatattaattagggagggctgtat

SEQ ID NO: 100323 - DNA, 25 bp, Probe sequence
gagatttgttcacgtataatagcgg

SEQ ID NO: 100324 - DNA, 25 bp, Probe sequence
gataaatataggcgttactgtcaat

SEQ ID NO: 100325 - DNA, 25 bp, Probe sequence
gatagtagcgcttttttgattgatt

SEQ ID NO: 100326 - DNA, 25 bp, Probe sequence
gttcacgtataatagcggatttttt

SEQ ID NO: 100327 - DNA, 25 bp, Probe sequence
gtagcgcttttttgattgattttaa

SEQ ID NO: 100328 - DNA, 25 bp, Probe sequence
tacatttataaaacactattgcatc

SEQ ID NO: 100329 - DNA, 25 bp, Probe sequence
tagcggattttttatgtacagtctt

SEQ ID NO: 100330 - DNA, 25 bp, Probe sequence
tagtagcgcttttttgattgatttt

SEQ ID NO: 100331 - DNA, 25 bp, Probe sequence
taggcgttactgtcaataagatatt

SEQ ID NO: 100332 - DNA, 25 bp, Probe sequence
atctggggttatatatttgtttcaa

SEQ ID NO: 100333 - DNA, 25 bp, Probe sequence
actttattcattttgtggattgtta

SEQ ID NO: 100334 - DNA, 25 bp, Probe sequence
aagtcgattcaatttatctatctta

SEQ ID NO: 100335 - DNA, 25 bp, Probe sequence
gcatgacattgattagtgagtagat

SEQ ID NO: 100336 - DNA, 25 bp, Probe sequence
gattgtttaaatttactttattcat

SEQ ID NO: 100337 - DNA, 25 bp, Probe sequence
gtagtattttaagattagcatgaca

SEQ ID NO: 100338 - DNA, 25 bp, Probe sequence
gtcacaggatgtaattagtagtatt

SEQ ID NO: 100339 - DNA, 25 bp, Probe sequence
gtgctattttattgtgctttatacc

SEQ ID NO: 100340 - DNA, 25 bp, Probe sequence
tttgtttcaacttttctaataatat

SEQ ID NO: 100341 - DNA, 25 bp, Probe sequence
tttgtggattgttatatttagatta

SEQ ID NO: 100342 - DNA, 25 bp, Probe sequence
tttattacattattagtcacaggat

SEQ ID NO: 100343 - DNA, 25 bp, Probe sequence
ttagccaactaatcattgttaaagt

SEQ ID NO: 100344 - DNA, 25 bp, Probe sequence
ttaatgttcaaattggaggtcgttt

SEQ ID NO: 100345 - DNA, 25 bp, Probe sequence
ttctttttttggtattacattaatg

SEQ ID NO: 100346 - DNA, 25 bp, Probe sequence
ttgtgctttataccaagtcgattca

SEQ ID NO: 100347 - DNA, 25 bp, Probe sequence
ataaaagtggactcaaatggcacac

SEQ ID NO: 100348 - DNA, 25 bp, Probe sequence
agtggactcaaatggcacacgcttt

SEQ ID NO: 100349 - DNA, 25 bp, Probe sequence
agaaccataaaagtggactcaaatg

SEQ ID NO: 100350 - DNA, 25 bp, Probe sequence
actcaaatggcacacgctttaatag

SEQ ID NO: 100351 - DNA, 25 bp, Probe sequence
aaagtggactcaaatggcacacgct

SEQ ID NO: 100352 - DNA, 25 bp, Probe sequence
aaaagtggactcaaatggcacacgc

SEQ ID NO: 100353 - DNA, 25 bp, Probe sequence
aagtggactcaaatggcacacgctt

SEQ ID NO: 100354 - DNA, 25 bp, Probe sequence
ctcaaatggcacacgctttaataga

SEQ ID NO: 100355 - DNA, 25 bp, Probe sequence
gaagaaccataaaagtggactcaaa

SEQ ID NO: 100356 - DNA, 25 bp, Probe sequence
gactcaaatggcacacgctttaata

SEQ ID NO: 100357 - DNA, 25 bp, Probe sequence
gatgaagaaccataaaagtggactc

SEQ ID NO: 100358 - DNA, 25 bp, Probe sequence
gtggactcaaatggcacacgcttta

SEQ ID NO: 100359 - DNA, 25 bp, Probe sequence
ggactcaaatggcacacgctttaat

SEQ ID NO: 100360 - DNA, 25 bp, Probe sequence
tggactcaaatggcacacgctttaa

SEQ ID NO: 100361 - DNA, 25 bp, Probe sequence
taaaagtggactcaaatggcacacg

SEQ ID NO: 100362 - DNA, 25 bp, Probe sequence
atttacataacataacctattagaa

SEQ ID NO: 100363 - DNA, 25 bp, Probe sequence
atttctctctatacaatacaaataa

SEQ ID NO: 100364 - DNA, 25 bp, Probe sequence
ataacataacctattagaaaccttg

SEQ ID NO: 100365 - DNA, 25 bp, Probe sequence
cataacataacctattagaaacctt

SEQ ID NO: 100366 - DNA, 25 bp, Probe sequence
gtttctttttatttctctctataca

SEQ ID NO: 100367 - DNA, 25 bp, Probe sequence
taacataacctattagaaaccttgt

SEQ ID NO: 100368 - DNA, 25 bp, Probe sequence
tacataacataacctattagaaacc

SEQ ID NO: 100369 - DNA, 25 bp, Probe sequence
tatttctctctatacaatacaaata

SEQ ID NO: 100370 - DNA, 25 bp, Probe sequence
tatttacataacataacctattaga

SEQ ID NO: 100371 - DNA, 25 bp, Probe sequence
tttctctctatacaatacaaataaa

SEQ ID NO: 100372 - DNA, 25 bp, Probe sequence
tttacataacataacctattagaaa

SEQ ID NO: 100373 - DNA, 25 bp, Probe sequence
tttatttctctctatacaatacaaa

SEQ ID NO: 100374 - DNA, 25 bp, Probe sequence
ttttatttctctctatacaatacaa

SEQ ID NO: 100375 - DNA, 25 bp, Probe sequence
ttatttctctctatacaatacaaat

SEQ ID NO: 100376 - DNA, 25 bp, Probe sequence
ttctctctatacaatacaaataaaa

SEQ ID NO: 100377 - DNA, 25 bp, Probe sequence
ataggttcgaggtggaagcatggtg

SEQ ID NO: 100378 - DNA, 25 bp, Probe sequence
aaaatcacttttacttactatctag

SEQ ID NO: 100379 - DNA, 25 bp, Probe sequence
cttactatctagttttgaatgtata

SEQ ID NO: 100380 - DNA, 25 bp, Probe sequence
ctaatcgatcgaagacttaatcaaa

SEQ ID NO: 100381 - DNA, 25 bp, Probe sequence
gcatggtgacatgtggagctgacga

SEQ ID NO: 100382 - DNA, 25 bp, Probe sequence
gaagcaaaatcacttttacttacta

SEQ ID NO: 100383 - DNA, 25 bp, Probe sequence
gacatgtggagctgacgaatactaa

SEQ ID NO: 100384 - DNA, 25 bp, Probe sequence
gacgaatactaatcgatcgaagact

SEQ ID NO: 100385 - DNA, 25 bp, Probe sequence
gatgatgaggttaataggttcgagg

SEQ ID NO: 100386 - DNA, 25 bp, Probe sequence
tgaggttaataggttcgaggtggaa

SEQ ID NO: 100387 - DNA, 25 bp, Probe sequence
ggtgacatgtggagctgacgaatac

SEQ ID NO: 100388 - DNA, 25 bp, Probe sequence
ggagctgacgaatactaatcgatcg

SEQ ID NO: 100389 - DNA, 25 bp, Probe sequence
tcacttttacttactatctagtttt

SEQ ID NO: 100390 - DNA, 25 bp, Probe sequence
tttgcgaagcaaaatcacttttact

SEQ ID NO: 100391 - DNA, 25 bp, Probe sequence
ttcgaggtggaagcatggtgacatg

SEQ ID NO: 100392 - DNA, 25 bp, Probe sequence
atagattttaccaagcaaaaccgag

SEQ ID NO: 100393 - DNA, 25 bp, Probe sequence
ataatcgctagtgttcgaaagaaca

SEQ ID NO: 100394 - DNA, 25 bp, Probe sequence
agattttaccaagcaaaaccgagtg

SEQ ID NO: 100395 - DNA, 25 bp, Probe sequence
acactcacaagattaataacgcgtt

SEQ ID NO: 100396 - DNA, 25 bp, Probe sequence
aacactcacaagattaataacgcgt

SEQ ID NO: 100397 - DNA, 25 bp, Probe sequence
aagcaaaaccgagtgaataaagagt

SEQ ID NO: 100398 - DNA, 25 bp, Probe sequence
aattcataagaaataatcgctagtg

SEQ ID NO: 100399 - DNA, 25 bp, Probe sequence
cactcacaagattaataacgcgttt

SEQ ID NO: 100400 - DNA, 25 bp, Probe sequence
gattttaccaagcaaaaccgagtga

SEQ ID NO: 100401 - DNA, 25 bp, Probe sequence
gaacactcacaagattaataacgcg

SEQ ID NO: 100402 - DNA, 25 bp, Probe sequence
gagttttaaataagcttgaattcat

SEQ ID NO: 100403 - DNA, 25 bp, Probe sequence
gttcgaaagaacactcacaagatta

SEQ ID NO: 100404 - DNA, 25 bp, Probe sequence
tcgaaagaacactcacaagattaat

SEQ ID NO: 100405 - DNA, 25 bp, Probe sequence
taccaagcaaaaccgagtgaataaa

SEQ ID NO: 100406 - DNA, 25 bp, Probe sequence
tttaccaagcaaaaccgagtgaata

SEQ ID NO: 100407 - DNA, 25 bp, Probe sequence
attcagttttgaatgtttgttcatt

SEQ ID NO: 100408 - DNA, 25 bp, Probe sequence
atatattcggaacatcttctgaaga

SEQ ID NO: 100409 - DNA, 25 bp, Probe sequence
ataacgtgacatattgtattcagtt

SEQ ID NO: 100410 - DNA, 25 bp, Probe sequence
aggatatattcggaacatcttctga

SEQ ID NO: 100411 - DNA, 25 bp, Probe sequence
aacgtgacatattgtattcagtttt

SEQ ID NO: 100412 - DNA, 25 bp, Probe sequence
aaggatatattcggaacatcttctg

SEQ ID NO: 100413 - DNA, 25 bp, Probe sequence
gcggaataacgtgacatattgtatt

SEQ ID NO: 100414 - DNA, 25 bp, Probe sequence
gaagatgcggaataacgtgacatat

SEQ ID NO: 100415 - DNA, 25 bp, Probe sequence
gaagaagatgcggaataacgtgaca

SEQ ID NO: 100416 - DNA, 25 bp, Probe sequence
gatgcggaataacgtgacatattgt

SEQ ID NO: 100417 - DNA, 25 bp, Probe sequence
gatatattcggaacatcttctgaag

SEQ ID NO: 100418 - DNA, 25 bp, Probe sequence
gtgacatattgtattcagttttgaa

SEQ ID NO: 100419 - DNA, 25 bp, Probe sequence
ggatatattcggaacatcttctgaa

SEQ ID NO: 100420 - DNA, 25 bp, Probe sequence
atattcggaacatcttctgaagaag

SEQ ID NO: 100421 - DNA, 25 bp, Probe sequence
tattcggaacatcttctgaagaaga

SEQ ID NO: 100422 - DNA, 25 bp, Probe sequence
ttcttgacttacaaaaacttacgag

SEQ ID NO: 100423 - DNA, 25 bp, Probe sequence
ataaaagtcgtcaaacggcactaat

SEQ ID NO: 100424 - DNA, 25 bp, Probe sequence
agtgacaaacgaacattgaaaactg

SEQ ID NO: 100425 - DNA, 25 bp, Probe sequence
aaagcgttagcttacttcatataag

SEQ ID NO: 100426 - DNA, 25 bp, Probe sequence
aacttcttttttatgcttattctga

SEQ ID NO: 100427 - DNA, 25 bp, Probe sequence
aataactatccataaagtgagtata

SEQ ID NO: 100428 - DNA, 25 bp, Probe sequence
aatacatatagtacttacgaataga

SEQ ID NO: 100429 - DNA, 25 bp, Probe sequence
gaatattctaactacggaagtggta

SEQ ID NO: 100430 - DNA, 25 bp, Probe sequence
gaaggtctactaaataactatccat

SEQ ID NO: 100431 - DNA, 25 bp, Probe sequence
gaaaataatcccttcaacagtaatt

SEQ ID NO: 100432 - DNA, 25 bp, Probe sequence
gacatgaaagttgtttaacttcttt

SEQ ID NO: 100433 - DNA, 25 bp, Probe sequence
gactctactagaataacttgatatt

SEQ ID NO: 100434 - DNA, 25 bp, Probe sequence
gttttatgttgactctactagaata

SEQ ID NO: 100435 - DNA, 25 bp, Probe sequence
gtcgtcaaacggcactaatatttaa

SEQ ID NO: 100436 - DNA, 25 bp, Probe sequence
gtgttgttttatgttgactctacta

SEQ ID NO: 100437 - DNA, 25 bp, Probe sequence
attgacacgcgcgcaatactacagt

SEQ ID NO: 100438 - DNA, 25 bp, Probe sequence
atattgacacgcgcgcaatactaca

SEQ ID NO: 100439 - DNA, 25 bp, Probe sequence
acgcgcgcaatactacagttatatt

SEQ ID NO: 100440 - DNA, 25 bp, Probe sequence
acacgcgcgcaatactacagttata

SEQ ID NO: 100441 - DNA, 25 bp, Probe sequence
aaatattgacacgcgcgcaatacta

SEQ ID NO: 100442 - DNA, 25 bp, Probe sequence
cacgcgcgcaatactacagttatat

SEQ ID NO: 100443 - DNA, 25 bp, Probe sequence
catgtaaatattgacacgcgcgcaa

SEQ ID NO: 100444 - DNA, 25 bp, Probe sequence
cgcgcgcaatactacagttatattt

SEQ ID NO: 100445 - DNA, 25 bp, Probe sequence
gcgcgcaatactacagttatattta

SEQ ID NO: 100446 - DNA, 25 bp, Probe sequence
gcgcaatactacagttatatttata

SEQ ID NO: 100447 - DNA, 25 bp, Probe sequence
gtaaatattgacacgcgcgcaatac

SEQ ID NO: 100448 - DNA, 25 bp, Probe sequence
tgacacgcgcgcaatactacagtta

SEQ ID NO: 100449 - DNA, 25 bp, Probe sequence
tcatgtaaatattgacacgcgcgca

SEQ ID NO: 100450 - DNA, 25 bp, Probe sequence
tcatcatgtaaatattgacacgcgc

SEQ ID NO: 100451 - DNA, 25 bp, Probe sequence
ttgacacgcgcgcaatactacagtt

SEQ ID NO: 100452 - DNA, 25 bp, Probe sequence
attttcatctaatatcgtatcataa

SEQ ID NO: 100453 - DNA, 25 bp, Probe sequence
atttaatattttcatctaatatcgt

SEQ ID NO: 100454 - DNA, 25 bp, Probe sequence
atattttcatctaatatcgtatcat

SEQ ID NO: 100455 - DNA, 25 bp, Probe sequence
atatcaacctcttttaatttaatat

SEQ ID NO: 100456 - DNA, 25 bp, Probe sequence
aatattttcatctaatatcgtatca

SEQ ID NO: 100457 - DNA, 25 bp, Probe sequence
tcttttaatttaatattttcatcta

SEQ ID NO: 100458 - DNA, 25 bp, Probe sequence
taatattttcatctaatatcgtatc

SEQ ID NO: 100459 - DNA, 25 bp, Probe sequence
tatcaacctcttttaatttaatatt

SEQ ID NO: 100460 - DNA, 25 bp, Probe sequence
tatatcaacctcttttaatttaata

SEQ ID NO: 100461 - DNA, 25 bp, Probe sequence
tattttcatctaatatcgtatcata

SEQ ID NO: 100462 - DNA, 25 bp, Probe sequence
tttaatttaatattttcatctaata

SEQ ID NO: 100463 - DNA, 25 bp, Probe sequence
ttttaatttaatattttcatctaat

SEQ ID NO: 100464 - DNA, 25 bp, Probe sequence
ttttcatctaatatcgtatcataaa

SEQ ID NO: 100465 - DNA, 25 bp, Probe sequence
ttatatcaacctcttttaatttaat

SEQ ID NO: 100466 - DNA, 25 bp, Probe sequence
ttaatattttcatctaatatcgtat

SEQ ID NO: 100467 - DNA, 25 bp, Probe sequence
ataaaatgaatctactatgtgagca

SEQ ID NO: 100468 - DNA, 25 bp, Probe sequence
atctactatgtgagcatttgtttta

SEQ ID NO: 100469 - DNA, 25 bp, Probe sequence
atgaatctactatgtgagcatttgt

SEQ ID NO: 100470 - DNA, 25 bp, Probe sequence
agtgacatatcaagttaaacgttaa

SEQ ID NO: 100471 - DNA, 25 bp, Probe sequence
actcacatagtgacatatcaagtta

SEQ ID NO: 100472 - DNA, 25 bp, Probe sequence
aaaactcacatagtgacatatcaag

SEQ ID NO: 100473 - DNA, 25 bp, Probe sequence
aatcatacataatactgatagcgat

SEQ ID NO: 100474 - DNA, 25 bp, Probe sequence
ctatgtgagcatttgttttatttta

SEQ ID NO: 100475 - DNA, 25 bp, Probe sequence
ctactatgtgagcatttgttttatt

SEQ ID NO: 100476 - DNA, 25 bp, Probe sequence
ctgatagcgatgtaaaactttagtc

SEQ ID NO: 100477 - DNA, 25 bp, Probe sequence
gcgatgtaaaactttagtcagagat

SEQ ID NO: 100478 - DNA, 25 bp, Probe sequence
gaatctactatgtgagcatttgttt

SEQ ID NO: 100479 - DNA, 25 bp, Probe sequence
gacatatcaagttaaacgttaatag

SEQ ID NO: 100480 - DNA, 25 bp, Probe sequence
gatagcgatgtaaaactttagtcag

SEQ ID NO: 100481 - DNA, 25 bp, Probe sequence
tatgtgagcatttgttttattttaa

SEQ ID NO: 100482 - DNA, 25 bp, Probe sequence
atttcgagattcaatattactttat

SEQ ID NO: 100483 - DNA, 25 bp, Probe sequence
atctcattgtggtattaattacagg

SEQ ID NO: 100484 - DNA, 25 bp, Probe sequence
agttgtttgacttcagtacaatctt

SEQ ID NO: 100485 - DNA, 25 bp, Probe sequence
actttatctcattgtggtattaatt

SEQ ID NO: 100486 - DNA, 25 bp, Probe sequence
aaagcagtaagagattttcttcatt

SEQ ID NO: 100487 - DNA, 25 bp, Probe sequence
caggatggtggggtcataacataga

SEQ ID NO: 100488 - DNA, 25 bp, Probe sequence
gcagtaagagattttcttcattgaa

SEQ ID NO: 100489 - DNA, 25 bp, Probe sequence
gacttcagtacaatcttgtagggaa

SEQ ID NO: 100490 - DNA, 25 bp, Probe sequence
gatttgtaacaggatggtggggtca

SEQ ID NO: 100491 - DNA, 25 bp, Probe sequence
gtttgacttcagtacaatcttgtag

SEQ ID NO: 100492 - DNA, 25 bp, Probe sequence
gtattagttgtttgacttcagtaca

SEQ ID NO: 100493 - DNA, 25 bp, Probe sequence
gtaacaggatggtggggtcataaca

SEQ ID NO: 100494 - DNA, 25 bp, Probe sequence
ggtggggtcataacatagaaaagca

SEQ ID NO: 100495 - DNA, 25 bp, Probe sequence
ggtattaattacaggaattgcttta

SEQ ID NO: 100496 - DNA, 25 bp, Probe sequence
ttactttatctcattgtggtattaa

SEQ ID NO: 100497 - DNA, 25 bp, Probe sequence
atccaacctctattcatttttatgc

SEQ ID NO: 100498 - DNA, 25 bp, Probe sequence
acttttgctgtcgtgtggggacaca

SEQ ID NO: 100499 - DNA, 25 bp, Probe sequence
acaaattatgtatccaacctctatt

SEQ ID NO: 100500 - DNA, 25 bp, Probe sequence
aagacaacgtatttaatcacatgaa

SEQ ID NO: 100501 - DNA, 25 bp, Probe sequence
caacctctattcatttttatgctta

SEQ ID NO: 100502 - DNA, 25 bp, Probe sequence
gctgtcgtgtggggacacagtatcc

SEQ ID NO: 100503 - DNA, 25 bp, Probe sequence
gacagaggttgagatatcttaattt

SEQ ID NO: 100504 - DNA, 25 bp, Probe sequence
gataacttttgctgtcgtgtgggga

SEQ ID NO: 100505 - DNA, 25 bp, Probe sequence
gatagggcaatagattaggggggat

SEQ ID NO: 100506 - DNA, 25 bp, Probe sequence
gtatgataacttttgctgtcgtgtg

SEQ ID NO: 100507 - DNA, 25 bp, Probe sequence
gtggggacacagtatccatagatta

SEQ ID NO: 100508 - DNA, 25 bp, Probe sequence
tgtatccaacctctattcattttta

SEQ ID NO: 100509 - DNA, 25 bp, Probe sequence
taatcacatgaatatgacagaggtt

SEQ ID NO: 100510 - DNA, 25 bp, Probe sequence
taaatcatttatattgacttagtga

SEQ ID NO: 100511 - DNA, 25 bp, Probe sequence
tatgcttatgaataggatagggcaa

SEQ ID NO: 100512 - DNA, 25 bp, Probe sequence
atttatataatactatttctgaaat

SEQ ID NO: 100513 - DNA, 25 bp, Probe sequence
atttctgaaatatgctataatttat

SEQ ID NO: 100514 - DNA, 25 bp, Probe sequence
actatttctgaaatatgctataatt

SEQ ID NO: 100515 - DNA, 25 bp, Probe sequence
aaattaacagaaggtggtgtggagt

SEQ ID NO: 100516 - DNA, 25 bp, Probe sequence
aatcttatttcgtaaaaatatgtat

SEQ ID NO: 100517 - DNA, 25 bp, Probe sequence
aatactatttctgaaatatgctata

SEQ ID NO: 100518 - DNA, 25 bp, Probe sequence
aatatgctataatttataatggtta

SEQ ID NO: 100519 - DNA, 25 bp, Probe sequence
ctatttctgaaatatgctataattt

SEQ ID NO: 100520 - DNA, 25 bp, Probe sequence
gttaaattaacagaaggtggtgtgg

SEQ ID NO: 100521 - DNA, 25 bp, Probe sequence
ggttaaattaacagaaggtggtgtg

SEQ ID NO: 100522 - DNA, 25 bp, Probe sequence
taaattaacagaaggtggtgtggag

SEQ ID NO: 100523 - DNA, 25 bp, Probe sequence
tatttctgaaatatgctataattta

SEQ ID NO: 100524 - DNA, 25 bp, Probe sequence
tatttatataatactatttctgaaa

SEQ ID NO: 100525 - DNA, 25 bp, Probe sequence
tttctgaaatatgctataatttata

SEQ ID NO: 100526 - DNA, 25 bp, Probe sequence
tttatataatactatttctgaaata

SEQ ID NO: 100527 - DNA, 25 bp, Probe sequence
attggtaatattatcggaaaacata

SEQ ID NO: 100528 - DNA, 25 bp, Probe sequence
attatcggaaaacatagtgacatta

SEQ ID NO: 100529 - DNA, 25 bp, Probe sequence
atattatcggaaaacatagtgacat

SEQ ID NO: 100530 - DNA, 25 bp, Probe sequence
atcggaaaacatagtgacattaatt

SEQ ID NO: 100531 - DNA, 25 bp, Probe sequence
atgattggtaatattatcggaaaac

SEQ ID NO: 100532 - DNA, 25 bp, Probe sequence
aatattatcggaaaacatagtgaca

SEQ ID NO: 100533 - DNA, 25 bp, Probe sequence
gaaaacatagtgacattaattttaa

SEQ ID NO: 100534 - DNA, 25 bp, Probe sequence
gatgattggtaatattatcggaaaa

SEQ ID NO: 100535 - DNA, 25 bp, Probe sequence
gattggtaatattatcggaaaacat

SEQ ID NO: 100536 - DNA, 25 bp, Probe sequence
ggtaatattatcggaaaacatagtg

SEQ ID NO: 100537 - DNA, 25 bp, Probe sequence
ggaaaacatagtgacattaatttta

SEQ ID NO: 100538 - DNA, 25 bp, Probe sequence
tcggaaaacatagtgacattaattt

SEQ ID NO: 100539 - DNA, 25 bp, Probe sequence
tatcggaaaacatagtgacattaat

SEQ ID NO: 100540 - DNA, 25 bp, Probe sequence
tattatcggaaaacatagtgacatt

SEQ ID NO: 100541 - DNA, 25 bp, Probe sequence
ttatcggaaaacatagtgacattaa

SEQ ID NO: 100542 - DNA, 25 bp, Probe sequence
atactattataatccaatttcgcaa

SEQ ID NO: 100543 - DNA, 25 bp, Probe sequence
atcagttcactcatttcataatatt

SEQ ID NO: 100544 - DNA, 25 bp, Probe sequence
agttcactcatttcataatattata

SEQ ID NO: 100545 - DNA, 25 bp, Probe sequence
actattataatccaatttcgcaaat

SEQ ID NO: 100546 - DNA, 25 bp, Probe sequence
acttacatactaaccatgattttaa

SEQ ID NO: 100547 - DNA, 25 bp, Probe sequence
aaccatgattttaatgtacaataaa

SEQ ID NO: 100548 - DNA, 25 bp, Probe sequence
aatccaatttcgcaaataactaaat

SEQ ID NO: 100549 - DNA, 25 bp, Probe sequence
aattaacttacatactaaccatgat

SEQ ID NO: 100550 - DNA, 25 bp, Probe sequence
ctaaattaacttacatactaaccat

SEQ ID NO: 100551 - DNA, 25 bp, Probe sequence
gtaaagacaattaattttggtgagg

SEQ ID NO: 100552 - DNA, 25 bp, Probe sequence
tcagttcactcatttcataatatta

SEQ ID NO: 100553 - DNA, 25 bp, Probe sequence
taacttacatactaaccatgatttt

SEQ ID NO: 100554 - DNA, 25 bp, Probe sequence
tataatccaatttcgcaaataacta

SEQ ID NO: 100555 - DNA, 25 bp, Probe sequence
tatactattataatccaatttcgca

SEQ ID NO: 100556 - DNA, 25 bp, Probe sequence
ttcactcatttcataatattatata

SEQ ID NO: 100557 - DNA, 25 bp, Probe sequence
atcgttttgattttcattctgcccg

SEQ ID NO: 100558 - DNA, 25 bp, Probe sequence
agattttgtaaaagcattcatagtt

SEQ ID NO: 100559 - DNA, 25 bp, Probe sequence
agctgacctgttgtgtaaattaatc

SEQ ID NO: 100560 - DNA, 25 bp, Probe sequence
actgattttgatatttcgagtcatt

SEQ ID NO: 100561 - DNA, 25 bp, Probe sequence
aaagcattcatagttttacattaaa

SEQ ID NO: 100562 - DNA, 25 bp, Probe sequence
cggacagagtaaaaatcgttttgat

SEQ ID NO: 100563 - DNA, 25 bp, Probe sequence
gcccggttgttcattttttatagat

SEQ ID NO: 100564 - DNA, 25 bp, Probe sequence
gacctgttgtgtaaattaatctgtg

SEQ ID NO: 100565 - DNA, 25 bp, Probe sequence
gagtcattaaaggtagtttgttagc

SEQ ID NO: 100566 - DNA, 25 bp, Probe sequence
gatatttcgagtcattaaaggtagt

SEQ ID NO: 100567 - DNA, 25 bp, Probe sequence
gatattgttttcctatactgatttt

SEQ ID NO: 100568 - DNA, 25 bp, Probe sequence
gttttcctatactgattttgatatt

SEQ ID NO: 100569 - DNA, 25 bp, Probe sequence
tgtttagctgacctgttgtgtaaat

SEQ ID NO: 100570 - DNA, 25 bp, Probe sequence
tctgcccggttgttcattttttata

SEQ ID NO: 100571 - DNA, 25 bp, Probe sequence
tatcatctagatattgttttcctat

SEQ ID NO: 100572 - DNA, 25 bp, Probe sequence
attcatgtgtaagatgcttggaact

SEQ ID NO: 100573 - DNA, 25 bp, Probe sequence
atttgcttgtaatcacactttcatt

SEQ ID NO: 100574 - DNA, 25 bp, Probe sequence
atacttgcattcatgtgtaagatgc

SEQ ID NO: 100575 - DNA, 25 bp, Probe sequence
aaacatttgctataggaagtggctt

SEQ ID NO: 100576 - DNA, 25 bp, Probe sequence
cttgagaaagtaacggggtgatcca

SEQ ID NO: 100577 - DNA, 25 bp, Probe sequence
gctataggaagtggcttattgaata

SEQ ID NO: 100578 - DNA, 25 bp, Probe sequence
gcttgtaatcacactttcattttaa

SEQ ID NO: 100579 - DNA, 25 bp, Probe sequence
gatgatagtgtgattttttgttagc

SEQ ID NO: 100580 - DNA, 25 bp, Probe sequence
gatgcttggaactataatgtagaag

SEQ ID NO: 100581 - DNA, 25 bp, Probe sequence
gataaagttgaattgtttctgctta

SEQ ID NO: 100582 - DNA, 25 bp, Probe sequence
gttgaattgtttctgcttaataaat

SEQ ID NO: 100583 - DNA, 25 bp, Probe sequence
gtaagatgcttggaactataatgta

SEQ ID NO: 100584 - DNA, 25 bp, Probe sequence
gtgtgattttttgttagcatcgaaa

SEQ ID NO: 100585 - DNA, 25 bp, Probe sequence
taataaattttacagatttgcttgt

SEQ ID NO: 100586 - DNA, 25 bp, Probe sequence
ttgtaatcacactttcattttaaaa

SEQ ID NO: 100587 - DNA, 25 bp, Probe sequence
atacgattgtaagcccttggactga

SEQ ID NO: 100588 - DNA, 25 bp, Probe sequence
ataaaaggtcgtctctattggcatt

SEQ ID NO: 100589 - DNA, 25 bp, Probe sequence
aagtattgtggttatcgattgttaa

SEQ ID NO: 100590 - DNA, 25 bp, Probe sequence
aaggtcgtctctattggcatttaat

SEQ ID NO: 100591 - DNA, 25 bp, Probe sequence
aatgatttatctataatcttttcaa

SEQ ID NO: 100592 - DNA, 25 bp, Probe sequence
gcgtatacgattgtaagcccttgga

SEQ ID NO: 100593 - DNA, 25 bp, Probe sequence
gatagtactggtaaactcaaggtat

SEQ ID NO: 100594 - DNA, 25 bp, Probe sequence
gattttcccaaaaagtgtagcctat

SEQ ID NO: 100595 - DNA, 25 bp, Probe sequence
gtaagtatgatggcgtatacgattg

SEQ ID NO: 100596 - DNA, 25 bp, Probe sequence
gtaagcccttggactgattttccca

SEQ ID NO: 100597 - DNA, 25 bp, Probe sequence
gtgtagcctatttgtgatagtactg

SEQ ID NO: 100598 - DNA, 25 bp, Probe sequence
ggtaaactcaaggtatatactaagt

SEQ ID NO: 100599 - DNA, 25 bp, Probe sequence
ggcatttaatagggatggtctttta

SEQ ID NO: 100600 - DNA, 25 bp, Probe sequence
tggactgattttcccaaaaagtgta

SEQ ID NO: 100601 - DNA, 25 bp, Probe sequence
tataacaatatttggcatgattaat

SEQ ID NO: 100602 - DNA, 25 bp, Probe sequence
atattttttatatcttgtatgttta

SEQ ID NO: 100603 - DNA, 25 bp, Probe sequence
atcactgatttacttgtctatagta

SEQ ID NO: 100604 - DNA, 25 bp, Probe sequence
atgccacataagatgtgttagagtt

SEQ ID NO: 100605 - DNA, 25 bp, Probe sequence
atgtgttagagttagatatcgcgat

SEQ ID NO: 100606 - DNA, 25 bp, Probe sequence
acttgtctatagtaattatatcaat

SEQ ID NO: 100607 - DNA, 25 bp, Probe sequence
gcgatagtcgcttaatattttttat

SEQ ID NO: 100608 - DNA, 25 bp, Probe sequence
gagttagatatcgcgatagtcgctt

SEQ ID NO: 100609 - DNA, 25 bp, Probe sequence
gatatcgcgatagtcgcttaatatt

SEQ ID NO: 100610 - DNA, 25 bp, Probe sequence
gttagatatcgcgatagtcgcttaa

SEQ ID NO: 100611 - DNA, 25 bp, Probe sequence
gttagagttagatatcgcgatagtc

SEQ ID NO: 100612 - DNA, 25 bp, Probe sequence
tcgcgatagtcgcttaatatttttt

SEQ ID NO: 100613 - DNA, 25 bp, Probe sequence
tcttgtatgtttaatcactgattta

SEQ ID NO: 100614 - DNA, 25 bp, Probe sequence
taatcactgatttacttgtctatag

SEQ ID NO: 100615 - DNA, 25 bp, Probe sequence
tatatcttgtatgtttaatcactga

SEQ ID NO: 100616 - DNA, 25 bp, Probe sequence
ttaatcactgatttacttgtctata

SEQ ID NO: 100617 - DNA, 25 bp, Probe sequence
attatctcttaattttagttaattg

SEQ ID NO: 100618 - DNA, 25 bp, Probe sequence
atatcgctttaacgcaatttctgtt

SEQ ID NO: 100619 - DNA, 25 bp, Probe sequence
atcactcgtaacaaattatctctta

SEQ ID NO: 100620 - DNA, 25 bp, Probe sequence
accacttcgtattatcactcgtaac

SEQ ID NO: 100621 - DNA, 25 bp, Probe sequence
acttccttctttctatttggttcat

SEQ ID NO: 100622 - DNA, 25 bp, Probe sequence
acttcgtattatcactcgtaacaaa

SEQ ID NO: 100623 - DNA, 25 bp, Probe sequence
aacgcaatttctgttaggataataa

SEQ ID NO: 100624 - DNA, 25 bp, Probe sequence
gctaagattatatcgctttaacgca

SEQ ID NO: 100625 - DNA, 25 bp, Probe sequence
gaatgtcataaatatagctaagatt

SEQ ID NO: 100626 - DNA, 25 bp, Probe sequence
gataccacttcgtattatcactcgt

SEQ ID NO: 100627 - DNA, 25 bp, Probe sequence
gattatatcgctttaacgcaatttc

SEQ ID NO: 100628 - DNA, 25 bp, Probe sequence
ggttcatatcggtatgataccactt

SEQ ID NO: 100629 - DNA, 25 bp, Probe sequence
tcgctttaacgcaatttctgttagg

SEQ ID NO: 100630 - DNA, 25 bp, Probe sequence
tctttctatttggttcatatcggta

SEQ ID NO: 100631 - DNA, 25 bp, Probe sequence
tcttaaacttccttctttctatttg

SEQ ID NO: 100632 - DNA, 25 bp, Probe sequence
aaagtagagtactgccagcaattaa

SEQ ID NO: 100633 - DNA, 25 bp, Probe sequence
aatatgcggagactacttatcgata

SEQ ID NO: 100634 - DNA, 25 bp, Probe sequence
cttatcgataaagtgcttctccgca

SEQ ID NO: 100635 - DNA, 25 bp, Probe sequence
cgaatattccacctacaatctgtct

SEQ ID NO: 100636 - DNA, 25 bp, Probe sequence
gcacgtttatgcttttagttaaaat

SEQ ID NO: 100637 - DNA, 25 bp, Probe sequence
gactattagtcctattaaatgacct

SEQ ID NO: 100638 - DNA, 25 bp, Probe sequence
gataaagtgcttctccgcataatta

SEQ ID NO: 100639 - DNA, 25 bp, Probe sequence
gattatgcacgtttatgcttttagt

SEQ ID NO: 100640 - DNA, 25 bp, Probe sequence
gttatgttcgaatattccacctaca

SEQ ID NO: 100641 - DNA, 25 bp, Probe sequence
gtactgccagcaattaattgttttt

SEQ ID NO: 100642 - DNA, 25 bp, Probe sequence
gtgcttctccgcataattaagagtt

SEQ ID NO: 100643 - DNA, 25 bp, Probe sequence
tctgtctttttgattatgcacgttt

SEQ ID NO: 100644 - DNA, 25 bp, Probe sequence
taaggatgaattgaactgttatgtt

SEQ ID NO: 100645 - DNA, 25 bp, Probe sequence
taacctttttattatagactattag

SEQ ID NO: 100646 - DNA, 25 bp, Probe sequence
ttccacctacaatctgtctttttga

SEQ ID NO: 100647 - DNA, 25 bp, Probe sequence
atgaaacatgtatttaaaggtcaaa

SEQ ID NO: 100648 - DNA, 25 bp, Probe sequence
atgttattttgaggtgctgagtagg

SEQ ID NO: 100649 - DNA, 25 bp, Probe sequence
acgtgattaaagtatagattgggag

SEQ ID NO: 100650 - DNA, 25 bp, Probe sequence
aaatgttattttgaggtgctgagta

SEQ ID NO: 100651 - DNA, 25 bp, Probe sequence
aatgttattttgaggtgctgagtag

SEQ ID NO: 100652 - DNA, 25 bp, Probe sequence
gaggtgctgagtaggaaatgaaaca

SEQ ID NO: 100653 - DNA, 25 bp, Probe sequence
gttattttgaggtgctgagtaggaa

SEQ ID NO: 100654 - DNA, 25 bp, Probe sequence
gtgattaaagtatagattgggagat

SEQ ID NO: 100655 - DNA, 25 bp, Probe sequence
ggtgctgagtaggaaatgaaacatg

SEQ ID NO: 100656 - DNA, 25 bp, Probe sequence
tgttattttgaggtgctgagtagga

SEQ ID NO: 100657 - DNA, 25 bp, Probe sequence
tgctgagtaggaaatgaaacatgta

SEQ ID NO: 100658 - DNA, 25 bp, Probe sequence
taaaggtcaaatacgtgattaaagt

SEQ ID NO: 100659 - DNA, 25 bp, Probe sequence
taaatgttattttgaggtgctgagt

SEQ ID NO: 100660 - DNA, 25 bp, Probe sequence
ttttgaggtgctgagtaggaaatga

SEQ ID NO: 100661 - DNA, 25 bp, Probe sequence
ttattttgaggtgctgagtaggaaa

SEQ ID NO: 100662 - DNA, 25 bp, Probe sequence
atatccccattttatagcgacttta

SEQ ID NO: 100663 - DNA, 25 bp, Probe sequence
agtttattaaattgtgatactttga

SEQ ID NO: 100664 - DNA, 25 bp, Probe sequence
actatgtagttatatccccatttta

SEQ ID NO: 100665 - DNA, 25 bp, Probe sequence
acataactattattagaggtgaaca

SEQ ID NO: 100666 - DNA, 25 bp, Probe sequence
aaactatgtagttatatccccattt

SEQ ID NO: 100667 - DNA, 25 bp, Probe sequence
aagcagattatataaaattctatta

SEQ ID NO: 100668 - DNA, 25 bp, Probe sequence
ccattttatagcgactttaaacaat

SEQ ID NO: 100669 - DNA, 25 bp, Probe sequence
gattcctccaaactatgtagttata

SEQ ID NO: 100670 - DNA, 25 bp, Probe sequence
gttatatccccattttatagcgact

SEQ ID NO: 100671 - DNA, 25 bp, Probe sequence
gtagttatatccccattttatagcg

SEQ ID NO: 100672 - DNA, 25 bp, Probe sequence
gtgatactttgataacataactatt

SEQ ID NO: 100673 - DNA, 25 bp, Probe sequence
tatccccattttatagcgactttaa

SEQ ID NO: 100674 - DNA, 25 bp, Probe sequence
tatgtagttatatccccattttata

SEQ ID NO: 100675 - DNA, 25 bp, Probe sequence
ttatatccccattttatagcgactt

SEQ ID NO: 100676 - DNA, 25 bp, Probe sequence
ttgattcctccaaactatgtagtta

SEQ ID NO: 100677 - DNA, 25 bp, Probe sequence
atgtagtttggccaatcattgtatt

SEQ ID NO: 100678 - DNA, 25 bp, Probe sequence
acctttctctatgtaatgttttata

SEQ ID NO: 100679 - DNA, 25 bp, Probe sequence
actccttaacctttctctatgtaat

SEQ ID NO: 100680 - DNA, 25 bp, Probe sequence
acaccaaattgttaagtattgcctt

SEQ ID NO: 100681 - DNA, 25 bp, Probe sequence
aaacaaaggcaatactgaaacaatg

SEQ ID NO: 100682 - DNA, 25 bp, Probe sequence
aaaactaaacaatgatatgctttaa

SEQ ID NO: 100683 - DNA, 25 bp, Probe sequence
aatctttcataggctattttgattt

SEQ ID NO: 100684 - DNA, 25 bp, Probe sequence
gaaacaatgtagtttggccaatcat

SEQ ID NO: 100685 - DNA, 25 bp, Probe sequence
gaaaggcgtacaccaaattgttaag

SEQ ID NO: 100686 - DNA, 25 bp, Probe sequence
gtattgccttataaaaacaaaatca

SEQ ID NO: 100687 - DNA, 25 bp, Probe sequence
gtaactattagtatttatccaatta

SEQ ID NO: 100688 - DNA, 25 bp, Probe sequence
tgatttaaatctttcataggctatt

SEQ ID NO: 100689 - DNA, 25 bp, Probe sequence
tgataactatgaaaggcgtacacca

SEQ ID NO: 100690 - DNA, 25 bp, Probe sequence
tccttaacctttctctatgtaatgt

SEQ ID NO: 100691 - DNA, 25 bp, Probe sequence
ttggccaatcattgtattatcattt

SEQ ID NO: 100692 - DNA, 25 bp, Probe sequence
attagcgaaaacctctgttttgttg

SEQ ID NO: 100693 - DNA, 25 bp, Probe sequence
atataacatcaaatagacaccaaaa

SEQ ID NO: 100694 - DNA, 25 bp, Probe sequence
agttacttacgccaatcacaatata

SEQ ID NO: 100695 - DNA, 25 bp, Probe sequence
acagaggtcttcgcaatcattagcg

SEQ ID NO: 100696 - DNA, 25 bp, Probe sequence
aaagttacttacgccaatcacaata

SEQ ID NO: 100697 - DNA, 25 bp, Probe sequence
aaacagaggtcttcgcaatcattag

SEQ ID NO: 100698 - DNA, 25 bp, Probe sequence
aatcattagcgaaaacctctgtttt

SEQ ID NO: 100699 - DNA, 25 bp, Probe sequence
cgccaatcacaatataacatcaaat

SEQ ID NO: 100700 - DNA, 25 bp, Probe sequence
gcgaaaacctctgttttgttggtgt

SEQ ID NO: 100701 - DNA, 25 bp, Probe sequence
gacaccaaaaaacagaggtcttcgc

SEQ ID NO: 100702 - DNA, 25 bp, Probe sequence
gcaatcattagcgaaaacctctgtt

SEQ ID NO: 100703 - DNA, 25 bp, Probe sequence
gaaaagttacttacgccaatcacaa

SEQ ID NO: 100704 - DNA, 25 bp, Probe sequence
gaggtcttcgcaatcattagcgaaa

SEQ ID NO: 100705 - DNA, 25 bp, Probe sequence
tacttacgccaatcacaatataaca

SEQ ID NO: 100706 - DNA, 25 bp, Probe sequence
tacgccaatcacaatataacatcaa

SEQ ID NO: 100707 - DNA, 25 bp, Probe sequence
atcaacgaagatacatagcgcattt

SEQ ID NO: 100708 - DNA, 25 bp, Probe sequence
agttccggagcctattcatattggt

SEQ ID NO: 100709 - DNA, 25 bp, Probe sequence
agcaaacatatcatcgacatcaacg

SEQ ID NO: 100710 - DNA, 25 bp, Probe sequence
acacaatcaatgcgtcatttcaaaa

SEQ ID NO: 100711 - DNA, 25 bp, Probe sequence
aacatcatttagttccggagcctat

SEQ ID NO: 100712 - DNA, 25 bp, Probe sequence
aacatatcatcgacatcaacgaaga

SEQ ID NO: 100713 - DNA, 25 bp, Probe sequence
aagaacacaatcaatgcgtcatttc

SEQ ID NO: 100714 - DNA, 25 bp, Probe sequence
catttagttccggagcctattcata

SEQ ID NO: 100715 - DNA, 25 bp, Probe sequence
catattggtttcggaactgttttat

SEQ ID NO: 100716 - DNA, 25 bp, Probe sequence
gcctattcatattggtttcggaact

SEQ ID NO: 100717 - DNA, 25 bp, Probe sequence
gcgcatttggtattttaaaacttat

SEQ ID NO: 100718 - DNA, 25 bp, Probe sequence
ggagcctattcatattggtttcgga

SEQ ID NO: 100719 - DNA, 25 bp, Probe sequence
tccggagcctattcatattggtttc

SEQ ID NO: 100720 - DNA, 25 bp, Probe sequence
tacatagcgcatttggtattttaaa

SEQ ID NO: 100721 - DNA, 25 bp, Probe sequence
tttaagcaaacatatcatcgacatc

SEQ ID NO: 100722 - DNA, 25 bp, Probe sequence
atgtctcactcactttccaaaatac

SEQ ID NO: 100723 - DNA, 25 bp, Probe sequence
aagaatttttgctataataagttat

SEQ ID NO: 100724 - DNA, 25 bp, Probe sequence
ctttatcacactatgtctcactcac

SEQ ID NO: 100725 - DNA, 25 bp, Probe sequence
ctcactcactttccaaaatactaaa

SEQ ID NO: 100726 - DNA, 25 bp, Probe sequence
gaaatattttttctttatcacacta

SEQ ID NO: 100727 - DNA, 25 bp, Probe sequence
gtaacatctttagtatatcaaagaa

SEQ ID NO: 100728 - DNA, 25 bp, Probe sequence
gtctcactcactttccaaaatacta

SEQ ID NO: 100729 - DNA, 25 bp, Probe sequence
tgtctcactcactttccaaaatact

SEQ ID NO: 100730 - DNA, 25 bp, Probe sequence
tctcactcactttccaaaatactaa

SEQ ID NO: 100731 - DNA, 25 bp, Probe sequence
tctttatcacactatgtctcactca

SEQ ID NO: 100732 - DNA, 25 bp, Probe sequence
tattttttctttatcacactatgtc

SEQ ID NO: 100733 - DNA, 25 bp, Probe sequence
tttatcacactatgtctcactcact

SEQ ID NO: 100734 - DNA, 25 bp, Probe sequence
ttttttctttatcacactatgtctc

SEQ ID NO: 100735 - DNA, 25 bp, Probe sequence
ttttctttatcacactatgtctcac

SEQ ID NO: 100736 - DNA, 25 bp, Probe sequence
ttctttatcacactatgtctcactc

SEQ ID NO: 100737 - DNA, 25 bp, Probe sequence
ataatcatacttaagcattactttg

SEQ ID NO: 100738 - DNA, 25 bp, Probe sequence
atcaaagttctgggctccacaatgt

SEQ ID NO: 100739 - DNA, 25 bp, Probe sequence
atcgtaaaatcttagcgagcgcttt

SEQ ID NO: 100740 - DNA, 25 bp, Probe sequence
agtatcgtacattggaaaagttcat

SEQ ID NO: 100741 - DNA, 25 bp, Probe sequence
agttctgggctccacaatgttatat

SEQ ID NO: 100742 - DNA, 25 bp, Probe sequence
acttaagcattactttgattttcat

SEQ ID NO: 100743 - DNA, 25 bp, Probe sequence
aaatcttagcgagcgctttataata

SEQ ID NO: 100744 - DNA, 25 bp, Probe sequence
aaagttctgggctccacaatgttat

SEQ ID NO: 100745 - DNA, 25 bp, Probe sequence
cattaatcaaagttctgggctccac

SEQ ID NO: 100746 - DNA, 25 bp, Probe sequence
gcattactttgattttcatatacat

SEQ ID NO: 100747 - DNA, 25 bp, Probe sequence
gagcgctttataataatagtatcgt

SEQ ID NO: 100748 - DNA, 25 bp, Probe sequence
taacctctaatcatcgtaaaatctt

SEQ ID NO: 100749 - DNA, 25 bp, Probe sequence
ttaatcaaagttctgggctccacaa

SEQ ID NO: 100750 - DNA, 25 bp, Probe sequence
ttagcgagcgctttataataatagt

SEQ ID NO: 100751 - DNA, 25 bp, Probe sequence
ttctgggctccacaatgttatattg

SEQ ID NO: 100752 - DNA, 25 bp, Probe sequence
atcaaaaaagacagccacatccctc

SEQ ID NO: 100753 - DNA, 25 bp, Probe sequence
aggcgtgtggctatatttgagtctg

SEQ ID NO: 100754 - DNA, 25 bp, Probe sequence
acatccctccgtagtttaggcgtgt

SEQ ID NO: 100755 - DNA, 25 bp, Probe sequence
aaaagggacatgctatatacgataa

SEQ ID NO: 100756 - DNA, 25 bp, Probe sequence
catccctccgtagtttaggcgtgtg

SEQ ID NO: 100757 - DNA, 25 bp, Probe sequence
tccctccgtagtttaggcgtgtggc

SEQ ID NO: 100758 - DNA, 25 bp, Probe sequence
cctccgtagtttaggcgtgtggcta

SEQ ID NO: 100759 - DNA, 25 bp, Probe sequence
gcgtgtggctatatttgagtctgaa

SEQ ID NO: 100760 - DNA, 25 bp, Probe sequence
gagtctgaatatttatgcttgtaat

SEQ ID NO: 100761 - DNA, 25 bp, Probe sequence
gatttaaatctgatacataattaca

SEQ ID NO: 100762 - DNA, 25 bp, Probe sequence
gtagtttaggcgtgtggctatattt

SEQ ID NO: 100763 - DNA, 25 bp, Probe sequence
gtgtggctatatttgagtctgaata

SEQ ID NO: 100764 - DNA, 25 bp, Probe sequence
gggacatgctatatacgataaaaag

SEQ ID NO: 100765 - DNA, 25 bp, Probe sequence
tgaatatttatgcttgtaattttaa

SEQ ID NO: 100766 - DNA, 25 bp, Probe sequence
tccgtagtttaggcgtgtggctata

SEQ ID NO: 100767 - DNA, 25 bp, Probe sequence
atatatgtataaacacacacattat

SEQ ID NO: 100768 - DNA, 25 bp, Probe sequence
atcatatatgtataaacacacacat

SEQ ID NO: 100769 - DNA, 25 bp, Probe sequence
atcgcatcaatggatttaatattga

SEQ ID NO: 100770 - DNA, 25 bp, Probe sequence
atggatttaatattgataaacgatg

SEQ ID NO: 100771 - DNA, 25 bp, Probe sequence
acatcgcatcaatggatttaatatt

SEQ ID NO: 100772 - DNA, 25 bp, Probe sequence
aacatcgcatcaatggatttaatat

SEQ ID NO: 100773 - DNA, 25 bp, Probe sequence
aatcatatatgtataaacacacaca

SEQ ID NO: 100774 - DNA, 25 bp, Probe sequence
catcgcatcaatggatttaatattg

SEQ ID NO: 100775 - DNA, 25 bp, Probe sequence
ctctgaacatcgcatcaatggattt

SEQ ID NO: 100776 - DNA, 25 bp, Probe sequence
ctgaacatcgcatcaatggatttaa

SEQ ID NO: 100777 - DNA, 25 bp, Probe sequence
gaacatcgcatcaatggatttaata

SEQ ID NO: 100778 - DNA, 25 bp, Probe sequence
tgaacatcgcatcaatggatttaat

SEQ ID NO: 100779 - DNA, 25 bp, Probe sequence
tctgaacatcgcatcaatggattta

SEQ ID NO: 100780 - DNA, 25 bp, Probe sequence
tcatatatgtataaacacacacatt

SEQ ID NO: 100781 - DNA, 25 bp, Probe sequence
tatatgtataaacacacacattatt

SEQ ID NO: 100782 - DNA, 25 bp, Probe sequence
ataccttattttagcactctaattg

SEQ ID NO: 100783 - DNA, 25 bp, Probe sequence
ataacaaactcattctcaattgtaa

SEQ ID NO: 100784 - DNA, 25 bp, Probe sequence
atcatttagcgatatttaattgaga

SEQ ID NO: 100785 - DNA, 25 bp, Probe sequence
agtataacaaactcattctcaattg

SEQ ID NO: 100786 - DNA, 25 bp, Probe sequence
agcactctaattgagaaaatgtatc

SEQ ID NO: 100787 - DNA, 25 bp, Probe sequence
accttattttagcactctaattgag

SEQ ID NO: 100788 - DNA, 25 bp, Probe sequence
aaactcattctcaattgtaaataat

SEQ ID NO: 100789 - DNA, 25 bp, Probe sequence
aaaatgtatcatttagcgatattta

SEQ ID NO: 100790 - DNA, 25 bp, Probe sequence
aacttagtataacaaactcattctc

SEQ ID NO: 100791 - DNA, 25 bp, Probe sequence
gaatgattataatttagaaacactg

SEQ ID NO: 100792 - DNA, 25 bp, Probe sequence
gatacacctcttatttgtaaattaa

SEQ ID NO: 100793 - DNA, 25 bp, Probe sequence
taataccttattttagcactctaat

SEQ ID NO: 100794 - DNA, 25 bp, Probe sequence
tttgatacacctcttatttgtaaat

SEQ ID NO: 100795 - DNA, 25 bp, Probe sequence
ttagaaacactgtatcaatttgtga

SEQ ID NO: 100796 - DNA, 25 bp, Probe sequence
ttaataccttattttagcactctaa

SEQ ID NO: 100797 - DNA, 25 bp, Probe sequence
attgtaagtgacccaaatgcctatc

SEQ ID NO: 100798 - DNA, 25 bp, Probe sequence
atctgtctattgtagtgatgtttaa

SEQ ID NO: 100799 - DNA, 25 bp, Probe sequence
acccaaatgcctatcatgtcgtatg

SEQ ID NO: 100800 - DNA, 25 bp, Probe sequence
aagtgacccaaatgcctatcatgtc

SEQ ID NO: 100801 - DNA, 25 bp, Probe sequence
aatgcctatcatgtcgtatgatatt

SEQ ID NO: 100802 - DNA, 25 bp, Probe sequence
catgtcgtatgatatttatctgtct

SEQ ID NO: 100803 - DNA, 25 bp, Probe sequence
cccaaatgcctatcatgtcgtatga

SEQ ID NO: 100804 - DNA, 25 bp, Probe sequence
gacccaaatgcctatcatgtcgtat

SEQ ID NO: 100805 - DNA, 25 bp, Probe sequence
gatatttatctgtctattgtagtga

SEQ ID NO: 100806 - DNA, 25 bp, Probe sequence
gtaagtgacccaaatgcctatcatg

SEQ ID NO: 100807 - DNA, 25 bp, Probe sequence
gtcgtatgatatttatctgtctatt

SEQ ID NO: 100808 - DNA, 25 bp, Probe sequence
gtgacccaaatgcctatcatgtcgt

SEQ ID NO: 100809 - DNA, 25 bp, Probe sequence
ggttattgtaagtgacccaaatgcc

SEQ ID NO: 100810 - DNA, 25 bp, Probe sequence
tagacattgggttattgtaagtgac

SEQ ID NO: 100811 - DNA, 25 bp, Probe sequence
tttatctgtctattgtagtgatgtt

SEQ ID NO: 100812 - DNA, 25 bp, Probe sequence
attcaacatcaaatttagagttatt

SEQ ID NO: 100813 - DNA, 25 bp, Probe sequence
atttgcttacaaacgatacataata

SEQ ID NO: 100814 - DNA, 25 bp, Probe sequence
aacgtgaaatctatcatttggatgt

SEQ ID NO: 100815 - DNA, 25 bp, Probe sequence
aacgatacataatattatacgtgaa

SEQ ID NO: 100816 - DNA, 25 bp, Probe sequence
aatcggtcaaattaattcaacatca

SEQ ID NO: 100817 - DNA, 25 bp, Probe sequence
aatctatcatttggatgtaactctg

SEQ ID NO: 100818 - DNA, 25 bp, Probe sequence
gacttttagtcatttgcttacaaac

SEQ ID NO: 100819 - DNA, 25 bp, Probe sequence
gatatgctttaaaatcggtcaaatt

SEQ ID NO: 100820 - DNA, 25 bp, Probe sequence
gtatatattaatagacttttagtca

SEQ ID NO: 100821 - DNA, 25 bp, Probe sequence
gtagtcaatcctttcaattaattaa

SEQ ID NO: 100822 - DNA, 25 bp, Probe sequence
gtcaatcctttcaattaattaaatg

SEQ ID NO: 100823 - DNA, 25 bp, Probe sequence
gtgaaggtataacgtgaaatctatc

SEQ ID NO: 100824 - DNA, 25 bp, Probe sequence
tcatttggatgtaactctgattaaa

SEQ ID NO: 100825 - DNA, 25 bp, Probe sequence
tagagttattaacattagtagttta

SEQ ID NO: 100826 - DNA, 25 bp, Probe sequence
tagtcatttgcttacaaacgataca

SEQ ID NO: 100827 - DNA, 25 bp, Probe sequence
ataaagctccctgcaaagtttacat

SEQ ID NO: 100828 - DNA, 25 bp, Probe sequence
agctccctgcaaagtttacattttt

SEQ ID NO: 100829 - DNA, 25 bp, Probe sequence
aaagctccctgcaaagtttacattt

SEQ ID NO: 100830 - DNA, 25 bp, Probe sequence
aagctccctgcaaagtttacatttt

SEQ ID NO: 100831 - DNA, 25 bp, Probe sequence
aataaagctccctgcaaagtttaca

SEQ ID NO: 100832 - DNA, 25 bp, Probe sequence
aatgcttacttttgaagggagtatt

SEQ ID NO: 100833 - DNA, 25 bp, Probe sequence
catttttacaatgcttacttttgaa

SEQ ID NO: 100834 - DNA, 25 bp, Probe sequence
cctgcaaagtttacatttttacaat

SEQ ID NO: 100835 - DNA, 25 bp, Probe sequence
gctccctgcaaagtttacattttta

SEQ ID NO: 100836 - DNA, 25 bp, Probe sequence
gtttacatttttacaatgcttactt

SEQ ID NO: 100837 - DNA, 25 bp, Probe sequence
tccctgcaaagtttacatttttaca

SEQ ID NO: 100838 - DNA, 25 bp, Probe sequence
taaagctccctgcaaagtttacatt

SEQ ID NO: 100839 - DNA, 25 bp, Probe sequence
tacaatgcttacttttgaagggagt

SEQ ID NO: 100840 - DNA, 25 bp, Probe sequence
tacatttttacaatgcttacttttg

SEQ ID NO: 100841 - DNA, 25 bp, Probe sequence
tttacaatgcttacttttgaaggga

SEQ ID NO: 100842 - DNA, 25 bp, Probe sequence
attatttcagattacctatgttttc

SEQ ID NO: 100843 - DNA, 25 bp, Probe sequence
atcgtcttcatcatcatgcttaaat

SEQ ID NO: 100844 - DNA, 25 bp, Probe sequence
atgttttcttactcaatcgtcttca

SEQ ID NO: 100845 - DNA, 25 bp, Probe sequence
agttatctcaatatagttatcgcta

SEQ ID NO: 100846 - DNA, 25 bp, Probe sequence
agcaattgattttataacaacttgt

SEQ ID NO: 100847 - DNA, 25 bp, Probe sequence
acctatgttttcttactcaatcgtc

SEQ ID NO: 100848 - DNA, 25 bp, Probe sequence
actcaatcgtcttcatcatcatgct

SEQ ID NO: 100849 - DNA, 25 bp, Probe sequence
acaacttgtagttatctcaatatag

SEQ ID NO: 100850 - DNA, 25 bp, Probe sequence
aaatcgtacacagcgtataattatg

SEQ ID NO: 100851 - DNA, 25 bp, Probe sequence
gaatttgcttgaattatttcagatt

SEQ ID NO: 100852 - DNA, 25 bp, Probe sequence
gattacctatgttttcttactcaat

SEQ ID NO: 100853 - DNA, 25 bp, Probe sequence
gttatcgctaagtgcaagatttatg

SEQ ID NO: 100854 - DNA, 25 bp, Probe sequence
gtcttcatcatcatgcttaaatagc

SEQ ID NO: 100855 - DNA, 25 bp, Probe sequence
tatgttgagatatttttgtgcgtta

SEQ ID NO: 100856 - DNA, 25 bp, Probe sequence
ttcttactcaatcgtcttcatcatc

SEQ ID NO: 100857 - DNA, 25 bp, Probe sequence
attacagccaatttactttcttgat

SEQ ID NO: 100858 - DNA, 25 bp, Probe sequence
atttactttcttgatatgaactttt

SEQ ID NO: 100859 - DNA, 25 bp, Probe sequence
atttcgccttaataagtgaagaaag

SEQ ID NO: 100860 - DNA, 25 bp, Probe sequence
aagaatgtcatgatcgggagggttg

SEQ ID NO: 100861 - DNA, 25 bp, Probe sequence
aatgtgacattgtatactatattta

SEQ ID NO: 100862 - DNA, 25 bp, Probe sequence
aatgtcatgatcgggagggttggta

SEQ ID NO: 100863 - DNA, 25 bp, Probe sequence
cagccaatttactttcttgatatga

SEQ ID NO: 100864 - DNA, 25 bp, Probe sequence
gccaatttactttcttgatatgaac

SEQ ID NO: 100865 - DNA, 25 bp, Probe sequence
gaatgtcatgatcgggagggttggt

SEQ ID NO: 100866 - DNA, 25 bp, Probe sequence
gataaaatttcgccttaataagtga

SEQ ID NO: 100867 - DNA, 25 bp, Probe sequence
gatttgagataaaatttcgccttaa

SEQ ID NO: 100868 - DNA, 25 bp, Probe sequence
tacagccaatttactttcttgatat

SEQ ID NO: 100869 - DNA, 25 bp, Probe sequence
tactttcttgatatgaactttttaa

SEQ ID NO: 100870 - DNA, 25 bp, Probe sequence
aagtgaagaaagaagtcgtatatta

SEQ ID NO: 100871 - DNA, 25 bp, Probe sequence
ttttattacagccaatttactttct

SEQ ID NO: 100872 - DNA, 25 bp, Probe sequence
atataatggcaggttaggaagcgca

SEQ ID NO: 100873 - DNA, 25 bp, Probe sequence
ataattttgttcctaacctgttcat

SEQ ID NO: 100874 - DNA, 25 bp, Probe sequence
aggttaggaagcgcataattttgtt

SEQ ID NO: 100875 - DNA, 25 bp, Probe sequence
aatggcaggttaggaagcgcataat

SEQ ID NO: 100876 - DNA, 25 bp, Probe sequence
cataattttgttcctaacctgttca

SEQ ID NO: 100877 - DNA, 25 bp, Probe sequence
cgcataattttgttcctaacctgtt

SEQ ID NO: 100878 - DNA, 25 bp, Probe sequence
gcataattttgttcctaacctgttc

SEQ ID NO: 100879 - DNA, 25 bp, Probe sequence
gttcctaacctgttcattttggagg

SEQ ID NO: 100880 - DNA, 25 bp, Probe sequence
ggcaggttaggaagcgcataatttt

SEQ ID NO: 100881 - DNA, 25 bp, Probe sequence
tgttcctaacctgttcattttggag

SEQ ID NO: 100882 - DNA, 25 bp, Probe sequence
tcctaacctgttcattttggaggta

SEQ ID NO: 100883 - DNA, 25 bp, Probe sequence
taattttgttcctaacctgttcatt

SEQ ID NO: 100884 - DNA, 25 bp, Probe sequence
tttgttcctaacctgttcattttgg

SEQ ID NO: 100885 - DNA, 25 bp, Probe sequence
ttgttcctaacctgttcattttgga

SEQ ID NO: 100886 - DNA, 25 bp, Probe sequence
ttttgttcctaacctgttcattttg

SEQ ID NO: 100887 - DNA, 25 bp, Probe sequence
attgagatagtatttgtttaagata

SEQ ID NO: 100888 - DNA, 25 bp, Probe sequence
atagcataactgacgaagtctatat

SEQ ID NO: 100889 - DNA, 25 bp, Probe sequence
acattatatttacaacatcatttta

SEQ ID NO: 100890 - DNA, 25 bp, Probe sequence
caagttggtctttaacgatattaag

SEQ ID NO: 100891 - DNA, 25 bp, Probe sequence
caagctttgtacatattgagatagt

SEQ ID NO: 100892 - DNA, 25 bp, Probe sequence
gcataactgacgaagtctatataat

SEQ ID NO: 100893 - DNA, 25 bp, Probe sequence
gaagtctatataatgaagaacggca

SEQ ID NO: 100894 - DNA, 25 bp, Probe sequence
gaagaacggcaaaaaatgctgaata

SEQ ID NO: 100895 - DNA, 25 bp, Probe sequence
gatacaagttggtctttaacgatat

SEQ ID NO: 100896 - DNA, 25 bp, Probe sequence
gttggtctttaacgatattaagaat

SEQ ID NO: 100897 - DNA, 25 bp, Probe sequence
gtacatattgagatagtatttgttt

SEQ ID NO: 100898 - DNA, 25 bp, Probe sequence
gtaaaatagcataactgacgaagtc

SEQ ID NO: 100899 - DNA, 25 bp, Probe sequence
taacaagctttgtacatattgagat

SEQ ID NO: 100900 - DNA, 25 bp, Probe sequence
tacaagttggtctttaacgatatta

SEQ ID NO: 100901 - DNA, 25 bp, Probe sequence
tatttacaacatcattttaaaggta

SEQ ID NO: 100902 - DNA, 25 bp, Probe sequence
attgaattgggttgtctaatattaa

SEQ ID NO: 100903 - DNA, 25 bp, Probe sequence
attctttttgaaatacttgcatacc

SEQ ID NO: 100904 - DNA, 25 bp, Probe sequence
ataggaagcgctttcgtattttttg

SEQ ID NO: 100905 - DNA, 25 bp, Probe sequence
atcataatattgaattgggttgtct

SEQ ID NO: 100906 - DNA, 25 bp, Probe sequence
agttacttgaaaacattatacataa

SEQ ID NO: 100907 - DNA, 25 bp, Probe sequence
aagagtgttgttttcataaaaaatg

SEQ ID NO: 100908 - DNA, 25 bp, Probe sequence
gcgctttcgtattttttggatatga

SEQ ID NO: 100909 - DNA, 25 bp, Probe sequence
gcataccaatataggaagcgctttc

SEQ ID NO: 100910 - DNA, 25 bp, Probe sequence
gaagcgctttcgtattttttggata

SEQ ID NO: 100911 - DNA, 25 bp, Probe sequence
gaaatacttgcataccaatatagga

SEQ ID NO: 100912 - DNA, 25 bp, Probe sequence
gaaattaaagtagcacctcataaat

SEQ ID NO: 100913 - DNA, 25 bp, Probe sequence
gatgaatgacttaaaggaggctttt

SEQ ID NO: 100914 - DNA, 25 bp, Probe sequence
gataatgtttatacagtttatatga

SEQ ID NO: 100915 - DNA, 25 bp, Probe sequence
gatacaatttagtgatgaatgactt

SEQ ID NO: 100916 - DNA, 25 bp, Probe sequence
gtagcacctcataaatacttagatt

SEQ ID NO: 100917 - DNA, 25 bp, Probe sequence
ataaaaaggtaccaatgttagtcat

SEQ ID NO: 100918 - DNA, 25 bp, Probe sequence
ataattttgattaacattagtacct

SEQ ID NO: 100919 - DNA, 25 bp, Probe sequence
agtcataattttgattaacattagt

SEQ ID NO: 100920 - DNA, 25 bp, Probe sequence
aaaggtaccaatgttagtcataatt

SEQ ID NO: 100921 - DNA, 25 bp, Probe sequence
aaaaggtaccaatgttagtcataat

SEQ ID NO: 100922 - DNA, 25 bp, Probe sequence
cataattttgattaacattagtacc

SEQ ID NO: 100923 - DNA, 25 bp, Probe sequence
gtcataattttgattaacattagta

SEQ ID NO: 100924 - DNA, 25 bp, Probe sequence
tgattaacattagtacctttttaat

SEQ ID NO: 100925 - DNA, 25 bp, Probe sequence
tcataattttgattaacattagtac

SEQ ID NO: 100926 - DNA, 25 bp, Probe sequence
taattttgattaacattagtacctt

SEQ ID NO: 100927 - DNA, 25 bp, Probe sequence
taaaaaggtaccaatgttagtcata

SEQ ID NO: 100928 - DNA, 25 bp, Probe sequence
tagtcataattttgattaacattag

SEQ ID NO: 100929 - DNA, 25 bp, Probe sequence
ttagtcataattttgattaacatta

SEQ ID NO: 100930 - DNA, 25 bp, Probe sequence
attaagtctttagaactcgacactt

SEQ ID NO: 100931 - DNA, 25 bp, Probe sequence
atggttatctatctgcactaataag

SEQ ID NO: 100932 - DNA, 25 bp, Probe sequence
agaactcgacacttaaaaatgctat

SEQ ID NO: 100933 - DNA, 25 bp, Probe sequence
acaatggttatctatctgcactaat

SEQ ID NO: 100934 - DNA, 25 bp, Probe sequence
aaatgctataatcatatgtatgtta

SEQ ID NO: 100935 - DNA, 25 bp, Probe sequence
aaacaatggttatctatctgcacta

SEQ ID NO: 100936 - DNA, 25 bp, Probe sequence
aactcgacacttaaaaatgctataa

SEQ ID NO: 100937 - DNA, 25 bp, Probe sequence
aattcatattaagtctttagaactc

SEQ ID NO: 100938 - DNA, 25 bp, Probe sequence
caatggttatctatctgcactaata

SEQ ID NO: 100939 - DNA, 25 bp, Probe sequence
gataatcattgttttttcacgaaaa

SEQ ID NO: 100940 - DNA, 25 bp, Probe sequence
ggtagataatcattgttttttcacg

SEQ ID NO: 100941 - DNA, 25 bp, Probe sequence
ggttatctatctgcactaataaggt

SEQ ID NO: 100942 - DNA, 25 bp, Probe sequence
taagtctttagaactcgacacttaa

SEQ ID NO: 100943 - DNA, 25 bp, Probe sequence
tagataatcattgttttttcacgaa

SEQ ID NO: 100944 - DNA, 25 bp, Probe sequence
ttatctatctgcactaataaggtag

SEQ ID NO: 100945 - DNA, 25 bp, Probe sequence
atataaatcgctacactttaataga

SEQ ID NO: 100946 - DNA, 25 bp, Probe sequence
ataaatcgctacactttaatagatt

SEQ ID NO: 100947 - DNA, 25 bp, Probe sequence
atcgctacactttaatagattaatg

SEQ ID NO: 100948 - DNA, 25 bp, Probe sequence
aaatataaatcgctacactttaata

SEQ ID NO: 100949 - DNA, 25 bp, Probe sequence
aaatcgctacactttaatagattaa

SEQ ID NO: 100950 - DNA, 25 bp, Probe sequence
aaaatataaatcgctacactttaat

SEQ ID NO: 100951 - DNA, 25 bp, Probe sequence
aataaagtaacgattcagatttaat

SEQ ID NO: 100952 - DNA, 25 bp, Probe sequence
aataaaatataaatcgctacacttt

SEQ ID NO: 100953 - DNA, 25 bp, Probe sequence
aatataaatcgctacactttaatag

SEQ ID NO: 100954 - DNA, 25 bp, Probe sequence
gctacactttaatagattaatgcgt

SEQ ID NO: 100955 - DNA, 25 bp, Probe sequence
gattaatgcgttaaaatgacataaa

SEQ ID NO: 100956 - DNA, 25 bp, Probe sequence
gtaacgattcagatttaataaaata

SEQ ID NO: 100957 - DNA, 25 bp, Probe sequence
taataaaatataaatcgctacactt

SEQ ID NO: 100958 - DNA, 25 bp, Probe sequence
taaatcgctacactttaatagatta

SEQ ID NO: 100959 - DNA, 25 bp, Probe sequence
tataaatcgctacactttaatagat

SEQ ID NO: 100960 - DNA, 25 bp, Probe sequence
atttttctataatcagtttcgtatt

SEQ ID NO: 100961 - DNA, 25 bp, Probe sequence
aaattctggtattactaaagctatt

SEQ ID NO: 100962 - DNA, 25 bp, Probe sequence
aaagctattgattgtcctaattgtt

SEQ ID NO: 100963 - DNA, 25 bp, Probe sequence
aaccaattctgttaaactgtgaaga

SEQ ID NO: 100964 - DNA, 25 bp, Probe sequence
aatgccacacctatgcaatagaata

SEQ ID NO: 100965 - DNA, 25 bp, Probe sequence
aatctctgcgtatttttctataatc

SEQ ID NO: 100966 - DNA, 25 bp, Probe sequence
aatttttacacattatcagtttatg

SEQ ID NO: 100967 - DNA, 25 bp, Probe sequence
gaatatatattctttttgtgagtag

SEQ ID NO: 100968 - DNA, 25 bp, Probe sequence
gaagcgtagtcaatttatgtctttc

SEQ ID NO: 100969 - DNA, 25 bp, Probe sequence
gaaatcagtattaatctgccataga

SEQ ID NO: 100970 - DNA, 25 bp, Probe sequence
gttggatagtgtagttgaggggaga

SEQ ID NO: 100971 - DNA, 25 bp, Probe sequence
gtatttatacgattctggagttcaa

SEQ ID NO: 100972 - DNA, 25 bp, Probe sequence
tctggagttcaatattaatgtctta

SEQ ID NO: 100973 - DNA, 25 bp, Probe sequence
tactaaattgcaaacatctcattca

SEQ ID NO: 100974 - DNA, 25 bp, Probe sequence
tatatttaaaatgccacacctatgc

SEQ ID NO: 100975 - DNA, 25 bp, Probe sequence
atatatcgtcgctttttctaaaaca

SEQ ID NO: 100976 - DNA, 25 bp, Probe sequence
atagcctatttgtttatacatgcaa

SEQ ID NO: 100977 - DNA, 25 bp, Probe sequence
atacatgcaagatgctcgatccata

SEQ ID NO: 100978 - DNA, 25 bp, Probe sequence
aaagcatatgctgggggttcttaat

SEQ ID NO: 100979 - DNA, 25 bp, Probe sequence
aatagtttacttaatcatatctaga

SEQ ID NO: 100980 - DNA, 25 bp, Probe sequence
aattttactttgaatagcctatttg

SEQ ID NO: 100981 - DNA, 25 bp, Probe sequence
catcgcatgaaattttttcttccta

SEQ ID NO: 100982 - DNA, 25 bp, Probe sequence
catattgtatgagaaacccccagca

SEQ ID NO: 100983 - DNA, 25 bp, Probe sequence
gcaagatgctcgatccatattgtat

SEQ ID NO: 100984 - DNA, 25 bp, Probe sequence
gagaaacccccagcaagctatataa

SEQ ID NO: 100985 - DNA, 25 bp, Probe sequence
gaggaaaggctattcaaagtttgag

SEQ ID NO: 100986 - DNA, 25 bp, Probe sequence
gattatatatatcgtcgctttttct

SEQ ID NO: 100987 - DNA, 25 bp, Probe sequence
tttcttcctagagacctttaataag

SEQ ID NO: 100988 - DNA, 25 bp, Probe sequence
tatgctgggggttcttaatatttta

SEQ ID NO: 100989 - DNA, 25 bp, Probe sequence
tttctaaaacaatctcatcgcatga

SEQ ID NO: 100990 - DNA, 25 bp, Probe sequence
attcgctatttatttatgagagttt

SEQ ID NO: 100991 - DNA, 25 bp, Probe sequence
attcagctagactacttcagtgtat

SEQ ID NO: 100992 - DNA, 25 bp, Probe sequence
atttatgacaaattcgctatttatt

SEQ ID NO: 100993 - DNA, 25 bp, Probe sequence
atatgcattcattaaggttaggttg

SEQ ID NO: 100994 - DNA, 25 bp, Probe sequence
ataacattaaaccacattcagctag

SEQ ID NO: 100995 - DNA, 25 bp, Probe sequence
aaaccacattcagctagactacttc

SEQ ID NO: 100996 - DNA, 25 bp, Probe sequence
aagtaagtatgttcatttgagaata

SEQ ID NO: 100997 - DNA, 25 bp, Probe sequence
ccacattcagctagactacttcagt

SEQ ID NO: 100998 - DNA, 25 bp, Probe sequence
gctagactacttcagtgtataaatt

SEQ ID NO: 100999 - DNA, 25 bp, Probe sequence
gaagcagtttggtatttaaagtgta

SEQ ID NO: 101000 - DNA, 25 bp, Probe sequence
gagagttttcgtactatattatatt

SEQ ID NO: 101001 - DNA, 25 bp, Probe sequence
gtaattgaaagagagtggggcgcct

SEQ ID NO: 101002 - DNA, 25 bp, Probe sequence
ggttaggttgaagcagtttggtatt

SEQ ID NO: 101003 - DNA, 25 bp, Probe sequence
taattttttcttctaacgtgtgact

SEQ ID NO: 101004 - DNA, 25 bp, Probe sequence
tttcttctaacgtgtgacttaaatt

SEQ ID NO: 101005 - DNA, 25 bp, Probe sequence
acctcgctttatattatagtctaca

SEQ ID NO: 101006 - DNA, 25 bp, Probe sequence
actcttaaaaattatgtatatgtca

SEQ ID NO: 101007 - DNA, 25 bp, Probe sequence
acaacacctcgctttatattatagt

SEQ ID NO: 101008 - DNA, 25 bp, Probe sequence
aacaacacctcgctttatattatag

SEQ ID NO: 101009 - DNA, 25 bp, Probe sequence
aacacctcgctttatattatagtct

SEQ ID NO: 101010 - DNA, 25 bp, Probe sequence
caacacctcgctttatattatagtc

SEQ ID NO: 101011 - DNA, 25 bp, Probe sequence
cacctcgctttatattatagtctac

SEQ ID NO: 101012 - DNA, 25 bp, Probe sequence
ctcgctttatattatagtctacatt

SEQ ID NO: 101013 - DNA, 25 bp, Probe sequence
gctttatattatagtctacattatt

SEQ ID NO: 101014 - DNA, 25 bp, Probe sequence
gtatatgtcattaaattgttggttg

SEQ ID NO: 101015 - DNA, 25 bp, Probe sequence
gtatggaaattaaggggctcttatg

SEQ ID NO: 101016 - DNA, 25 bp, Probe sequence
gtcattaaattgttggttgatttta

SEQ ID NO: 101017 - DNA, 25 bp, Probe sequence
ggaaattaaggggctcttatgtata

SEQ ID NO: 101018 - DNA, 25 bp, Probe sequence
taaggggctcttatgtatataaaaa

SEQ ID NO: 101019 - DNA, 25 bp, Probe sequence
taacaacacctcgctttatattata

SEQ ID NO: 101020 - DNA, 25 bp, Probe sequence
atatagtgagttgaagtagcttgtc

SEQ ID NO: 101021 - DNA, 25 bp, Probe sequence
agacaactttctatactctaatata

SEQ ID NO: 101022 - DNA, 25 bp, Probe sequence
agcgcattcataaaacggtataaat

SEQ ID NO: 101023 - DNA, 25 bp, Probe sequence
aaagtttcgcatgacattaggatta

SEQ ID NO: 101024 - DNA, 25 bp, Probe sequence
aagatagacaactttctatactcta

SEQ ID NO: 101025 - DNA, 25 bp, Probe sequence
aataaacccaattatctgataaaag

SEQ ID NO: 101026 - DNA, 25 bp, Probe sequence
gcttgtcataatcatcatgaggggg

SEQ ID NO: 101027 - DNA, 25 bp, Probe sequence
gaagtagcttgtcataatcatcatg

SEQ ID NO: 101028 - DNA, 25 bp, Probe sequence
gaaagcgcattcataaaacggtata

SEQ ID NO: 101029 - DNA, 25 bp, Probe sequence
gataatttttgaaagcgcattcata

SEQ ID NO: 101030 - DNA, 25 bp, Probe sequence
gttgaagtagcttgtcataatcatc

SEQ ID NO: 101031 - DNA, 25 bp, Probe sequence
gtttcgcatgacattaggattaaga

SEQ ID NO: 101032 - DNA, 25 bp, Probe sequence
gtagcttgtcataatcatcatgagg

SEQ ID NO: 101033 - DNA, 25 bp, Probe sequence
ggggtattttgacggtaatgataat

SEQ ID NO: 101034 - DNA, 25 bp, Probe sequence
taaatatgctataataaacccaatt

SEQ ID NO: 101035 - DNA, 25 bp, Probe sequence
atctgctaaatcaacctaacacgat

SEQ ID NO: 101036 - DNA, 25 bp, Probe sequence
aaatgtgacaaacttagaactaata

SEQ ID NO: 101037 - DNA, 25 bp, Probe sequence
aactcccatctattcataaatgcta

SEQ ID NO: 101038 - DNA, 25 bp, Probe sequence
aacctaacacgattataatttgaat

SEQ ID NO: 101039 - DNA, 25 bp, Probe sequence
aatgctaatagatggcatcacgaga

SEQ ID NO: 101040 - DNA, 25 bp, Probe sequence
gcgatagttttaaaatagctgtaat

SEQ ID NO: 101041 - DNA, 25 bp, Probe sequence
gcaaatcacgcaatcaacaaataat

SEQ ID NO: 101042 - DNA, 25 bp, Probe sequence
gactatctgctaaatcaacctaaca

SEQ ID NO: 101043 - DNA, 25 bp, Probe sequence
gatggcatcacgagatttatgacta

SEQ ID NO: 101044 - DNA, 25 bp, Probe sequence
gattaatcaacttttttggaagagc

SEQ ID NO: 101045 - DNA, 25 bp, Probe sequence
ggaagagcaaatcacgcaatcaaca

SEQ ID NO: 101046 - DNA, 25 bp, Probe sequence
tcacgagatttatgactatctgcta

SEQ ID NO: 101047 - DNA, 25 bp, Probe sequence
tcaacatctctcctatataataaaa

SEQ ID NO: 101048 - DNA, 25 bp, Probe sequence
taaaataaactcccatctattcata

SEQ ID NO: 101049 - DNA, 25 bp, Probe sequence
tataagaagtttttgcgatagtttt

SEQ ID NO: 101050 - DNA, 25 bp, Probe sequence
atatctcccttgtaaattgtattct

SEQ ID NO: 101051 - DNA, 25 bp, Probe sequence
atctcccttgtaaattgtattcttt

SEQ ID NO: 101052 - DNA, 25 bp, Probe sequence
aaatatctcccttgtaaattgtatt

SEQ ID NO: 101053 - DNA, 25 bp, Probe sequence
aatatctcccttgtaaattgtattc

SEQ ID NO: 101054 - DNA, 25 bp, Probe sequence
caaatatctcccttgtaaattgtat

SEQ ID NO: 101055 - DNA, 25 bp, Probe sequence
ctcccttgtaaattgtattctttat

SEQ ID NO: 101056 - DNA, 25 bp, Probe sequence
ccttgtaaattgtattctttataat

SEQ ID NO: 101057 - DNA, 25 bp, Probe sequence
gtaaattgtattctttataattatt

SEQ ID NO: 101058 - DNA, 25 bp, Probe sequence
gtcaaatatctcccttgtaaattgt

SEQ ID NO: 101059 - DNA, 25 bp, Probe sequence
tgtcaaatatctcccttgtaaattg

SEQ ID NO: 101060 - DNA, 25 bp, Probe sequence
tcccttgtaaattgtattctttata

SEQ ID NO: 101061 - DNA, 25 bp, Probe sequence
tctcccttgtaaattgtattcttta

SEQ ID NO: 101062 - DNA, 25 bp, Probe sequence
tcaaatatctcccttgtaaattgta

SEQ ID NO: 101063 - DNA, 25 bp, Probe sequence
taaattgtattctttataattattt

SEQ ID NO: 101064 - DNA, 25 bp, Probe sequence
tatctcccttgtaaattgtattctt

SEQ ID NO: 101065 - DNA, 25 bp, Probe sequence
atcactaatctgtgggttaggatag

SEQ ID NO: 101066 - DNA, 25 bp, Probe sequence
atagaaatcactaatctgtgggtta

SEQ ID NO: 101067 - DNA, 25 bp, Probe sequence
ataaattctactttaatgaactgtt

SEQ ID NO: 101068 - DNA, 25 bp, Probe sequence
atctgtgggttaggatagctaaagg

SEQ ID NO: 101069 - DNA, 25 bp, Probe sequence
actaatctgtgggttaggatagcta

SEQ ID NO: 101070 - DNA, 25 bp, Probe sequence
aaatcactaatctgtgggttaggat

SEQ ID NO: 101071 - DNA, 25 bp, Probe sequence
acaacatgtctatgattagacagta

SEQ ID NO: 101072 - DNA, 25 bp, Probe sequence
aattctactttaatgaactgttagt

SEQ ID NO: 101073 - DNA, 25 bp, Probe sequence
aagaggaattgtatagaaatcacta

SEQ ID NO: 101074 - DNA, 25 bp, Probe sequence
gctaaaggaatgaaaactactattg

SEQ ID NO: 101075 - DNA, 25 bp, Probe sequence
gaaatcactaatctgtgggttagga

SEQ ID NO: 101076 - DNA, 25 bp, Probe sequence
gttagttaaatacaacatgtctatg

SEQ ID NO: 101077 - DNA, 25 bp, Probe sequence
tgaaaactactattgaaaaggttgt

SEQ ID NO: 101078 - DNA, 25 bp, Probe sequence
taaatacaacatgtctatgattaga

SEQ ID NO: 101079 - DNA, 25 bp, Probe sequence
ttctactttaatgaactgttagtta

SEQ ID NO: 101080 - DNA, 25 bp, Probe sequence
atgaaaagaacctccttatatgatt

SEQ ID NO: 101081 - DNA, 25 bp, Probe sequence
agaacctccttatatgattattttg

SEQ ID NO: 101082 - DNA, 25 bp, Probe sequence
acctccttatatgattattttggaa

SEQ ID NO: 101083 - DNA, 25 bp, Probe sequence
aaagaacctccttatatgattattt

SEQ ID NO: 101084 - DNA, 25 bp, Probe sequence
aaaagaacctccttatatgattatt

SEQ ID NO: 101085 - DNA, 25 bp, Probe sequence
aacctccttatatgattattttgga

SEQ ID NO: 101086 - DNA, 25 bp, Probe sequence
aagaacctccttatatgattatttt

SEQ ID NO: 101087 - DNA, 25 bp, Probe sequence
aatgaaaagaacctccttatatgat

SEQ ID NO: 101088 - DNA, 25 bp, Probe sequence
ctccttatatgattattttggaaaa

SEQ ID NO: 101089 - DNA, 25 bp, Probe sequence
cctccttatatgattattttggaaa

SEQ ID NO: 101090 - DNA, 25 bp, Probe sequence
ccttatatgattattttggaaaaag

SEQ ID NO: 101091 - DNA, 25 bp, Probe sequence
gaacctccttatatgattattttgg

SEQ ID NO: 101092 - DNA, 25 bp, Probe sequence
gaaaagaacctccttatatgattat

SEQ ID NO: 101093 - DNA, 25 bp, Probe sequence
tgaaaagaacctccttatatgatta

SEQ ID NO: 101094 - DNA, 25 bp, Probe sequence
tccttatatgattattttggaaaaa

SEQ ID NO: 101095 - DNA, 25 bp, Probe sequence
atggaagcatggtttatttttgtct

SEQ ID NO: 101096 - DNA, 25 bp, Probe sequence
agcatggtttatttttgtctcaaaa

SEQ ID NO: 101097 - DNA, 25 bp, Probe sequence
aagcatggtttatttttgtctcaaa

SEQ ID NO: 101098 - DNA, 25 bp, Probe sequence
aatttattgttttcaagaacatcaa

SEQ ID NO: 101099 - DNA, 25 bp, Probe sequence
gcatggtttatttttgtctcaaaaa

SEQ ID NO: 101100 - DNA, 25 bp, Probe sequence
gaagcatggtttatttttgtctcaa

SEQ ID NO: 101101 - DNA, 25 bp, Probe sequence
gaacatcaaattatggaagcatggt

SEQ ID NO: 101102 - DNA, 25 bp, Probe sequence
gaaatttattgttttcaagaacatc

SEQ ID NO: 101103 - DNA, 25 bp, Probe sequence
gtgtataccttgaaatttattgttt

SEQ ID NO: 101104 - DNA, 25 bp, Probe sequence
ggaagcatggtttatttttgtctca

SEQ ID NO: 101105 - DNA, 25 bp, Probe sequence
tggaagcatggtttatttttgtctc

SEQ ID NO: 101106 - DNA, 25 bp, Probe sequence
tgtataccttgaaatttattgtttt

SEQ ID NO: 101107 - DNA, 25 bp, Probe sequence
tacaaaaaatttgtgtataccttga

SEQ ID NO: 101108 - DNA, 25 bp, Probe sequence
tttgtgtataccttgaaatttattg

SEQ ID NO: 101109 - DNA, 25 bp, Probe sequence
tttattgttttcaagaacatcaaat

SEQ ID NO: 101110 - DNA, 25 bp, Probe sequence
attacattatacgaacatgtgttct

SEQ ID NO: 101111 - DNA, 25 bp, Probe sequence
atatcacagcaaatagttcttttaa

SEQ ID NO: 101112 - DNA, 25 bp, Probe sequence
acgaacatgtgttctgttttgcaac

SEQ ID NO: 101113 - DNA, 25 bp, Probe sequence
acatgtgttctgttttgcaacaaaa

SEQ ID NO: 101114 - DNA, 25 bp, Probe sequence
aaatgattgttaattctagctaaaa

SEQ ID NO: 101115 - DNA, 25 bp, Probe sequence
aataagactgacatggaggggtaaa

SEQ ID NO: 101116 - DNA, 25 bp, Probe sequence
aacgcgttaataattaatgctcgtg

SEQ ID NO: 101117 - DNA, 25 bp, Probe sequence
aatcgaataatgacatatcacagca

SEQ ID NO: 101118 - DNA, 25 bp, Probe sequence
aataattaatgctcgtgtaagtaaa

SEQ ID NO: 101119 - DNA, 25 bp, Probe sequence
aattcaccccaatctgataattaca

SEQ ID NO: 101120 - DNA, 25 bp, Probe sequence
aattttgtggaagcataaacgcgtt

SEQ ID NO: 101121 - DNA, 25 bp, Probe sequence
caccccaatctgataattacattat

SEQ ID NO: 101122 - DNA, 25 bp, Probe sequence
cagttttagcgttaaggaaatgata

SEQ ID NO: 101123 - DNA, 25 bp, Probe sequence
ccttaattcaccccaatctgataat

SEQ ID NO: 101124 - DNA, 25 bp, Probe sequence
ttgtggaagcataaacgcgttaata

SEQ ID NO: 101125 - DNA, 25 bp, Probe sequence
aatgaattttctgtgttgggtccct

SEQ ID NO: 101126 - DNA, 25 bp, Probe sequence
actttgcccaacttgcacataaatg

SEQ ID NO: 101127 - DNA, 25 bp, Probe sequence
aactaaattaacgaggtgccttatg

SEQ ID NO: 101128 - DNA, 25 bp, Probe sequence
aattaacgaggtgccttatgtataa

SEQ ID NO: 101129 - DNA, 25 bp, Probe sequence
cactttgcccaacttgcacataaat

SEQ ID NO: 101130 - DNA, 25 bp, Probe sequence
ctttgcccaacttgcacataaatgt

SEQ ID NO: 101131 - DNA, 25 bp, Probe sequence
ctgtgttgggtcccttcttataatt

SEQ ID NO: 101132 - DNA, 25 bp, Probe sequence
gcccaacttgcacataaatgtaaaa

SEQ ID NO: 101133 - DNA, 25 bp, Probe sequence
tgaattttctgtgttgggtcccttc

SEQ ID NO: 101134 - DNA, 25 bp, Probe sequence
tgtgttgggtcccttcttataattt

SEQ ID NO: 101135 - DNA, 25 bp, Probe sequence
tctgtgttgggtcccttcttataat

SEQ ID NO: 101136 - DNA, 25 bp, Probe sequence
ttttctgtgttgggtcccttcttat

SEQ ID NO: 101137 - DNA, 25 bp, Probe sequence
tttctgtgttgggtcccttcttata

SEQ ID NO: 101138 - DNA, 25 bp, Probe sequence
ttctgtgttgggtcccttcttataa

SEQ ID NO: 101139 - DNA, 25 bp, Probe sequence
ttgcccaacttgcacataaatgtaa

SEQ ID NO: 101140 - DNA, 25 bp, Probe sequence
atatcttactgctgttctctattta

SEQ ID NO: 101141 - DNA, 25 bp, Probe sequence
atcttactgctgttctctatttata

SEQ ID NO: 101142 - DNA, 25 bp, Probe sequence
actgctgttctctatttatacaata

SEQ ID NO: 101143 - DNA, 25 bp, Probe sequence
aacagcagtaagataattttcaatt

SEQ ID NO: 101144 - DNA, 25 bp, Probe sequence
aatacttcgtattgaatggcttcgc

SEQ ID NO: 101145 - DNA, 25 bp, Probe sequence
cttcgtattgaatggcttcgctttc

SEQ ID NO: 101146 - DNA, 25 bp, Probe sequence
cttactgctgttctctatttataca

SEQ ID NO: 101147 - DNA, 25 bp, Probe sequence
cgtattgaatggcttcgctttccta

SEQ ID NO: 101148 - DNA, 25 bp, Probe sequence
gaaaatatcttactgctgttctcta

SEQ ID NO: 101149 - DNA, 25 bp, Probe sequence
gaggctgggacataaatccctaaaa

SEQ ID NO: 101150 - DNA, 25 bp, Probe sequence
gttctctatttatacaatacttcgt

SEQ ID NO: 101151 - DNA, 25 bp, Probe sequence
ggacataaatccctaaaaaacagca

SEQ ID NO: 101152 - DNA, 25 bp, Probe sequence
taaatccctaaaaaacagcagtaag

SEQ ID NO: 101153 - DNA, 25 bp, Probe sequence
taacatttagaggctgggacataaa

SEQ ID NO: 101154 - DNA, 25 bp, Probe sequence
tattgaatggcttcgctttcctagg

SEQ ID NO: 101155 - DNA, 25 bp, Probe sequence
atcattagcttgctcactatataat

SEQ ID NO: 101156 - DNA, 25 bp, Probe sequence
agcatataaggtcatgtcacgttga

SEQ ID NO: 101157 - DNA, 25 bp, Probe sequence
agcattcacgataatagtcattgtt

SEQ ID NO: 101158 - DNA, 25 bp, Probe sequence
acagaggttcctcggcatttttgaa

SEQ ID NO: 101159 - DNA, 25 bp, Probe sequence
aaaacttaaaatcatcttatcataa

SEQ ID NO: 101160 - DNA, 25 bp, Probe sequence
aacaatcttaagttagcattcacga

SEQ ID NO: 101161 - DNA, 25 bp, Probe sequence
aagacttatcaatcagttaaaacat

SEQ ID NO: 101162 - DNA, 25 bp, Probe sequence
gcttgctcactatataatttgatga

SEQ ID NO: 101163 - DNA, 25 bp, Probe sequence
gaggttcctcggcatttttgaaaat

SEQ ID NO: 101164 - DNA, 25 bp, Probe sequence
gaaaataatcattagcttgctcact

SEQ ID NO: 101165 - DNA, 25 bp, Probe sequence
gtcacgttgaaacagaggttcctcg

SEQ ID NO: 101166 - DNA, 25 bp, Probe sequence
gatttctcggtgtataagacttatc

SEQ ID NO: 101167 - DNA, 25 bp, Probe sequence
gtttgaggtgatttctcggtgtata

SEQ ID NO: 101168 - DNA, 25 bp, Probe sequence
tagatggtggggatattaagttaaa

SEQ ID NO: 101169 - DNA, 25 bp, Probe sequence
tagtcattgttaacattagcatata

SEQ ID NO: 101170 - DNA, 25 bp, Probe sequence
ataaaggatgtaagcaccgatatta

SEQ ID NO: 101171 - DNA, 25 bp, Probe sequence
ataatttctctaatatcggtgttat

SEQ ID NO: 101172 - DNA, 25 bp, Probe sequence
agcaccgatattaggaagcataatt

SEQ ID NO: 101173 - DNA, 25 bp, Probe sequence
agcataatttctctaatatcggtgt

SEQ ID NO: 101174 - DNA, 25 bp, Probe sequence
aaaggatgtaagcaccgatattagg

SEQ ID NO: 101175 - DNA, 25 bp, Probe sequence
aagcataatttctctaatatcggtg

SEQ ID NO: 101176 - DNA, 25 bp, Probe sequence
aaggatgtaagcaccgatattagga

SEQ ID NO: 101177 - DNA, 25 bp, Probe sequence
cataatttctctaatatcggtgtta

SEQ ID NO: 101178 - DNA, 25 bp, Probe sequence
gcataatttctctaatatcggtgtt

SEQ ID NO: 101179 - DNA, 25 bp, Probe sequence
gaagcataatttctctaatatcggt

SEQ ID NO: 101180 - DNA, 25 bp, Probe sequence
gatgtaagcaccgatattaggaagc

SEQ ID NO: 101181 - DNA, 25 bp, Probe sequence
gtaagcaccgatattaggaagcata

SEQ ID NO: 101182 - DNA, 25 bp, Probe sequence
ggatgtaagcaccgatattaggaag

SEQ ID NO: 101183 - DNA, 25 bp, Probe sequence
ggaagcataatttctctaatatcgg

SEQ ID NO: 101184 - DNA, 25 bp, Probe sequence
taagcaccgatattaggaagcataa

SEQ ID NO: 101185 - DNA, 25 bp, Probe sequence
ataaattaattgcaaattctttgtt

SEQ ID NO: 101186 - DNA, 25 bp, Probe sequence
acctcctttagcatttacaacatta

SEQ ID NO: 101187 - DNA, 25 bp, Probe sequence
aaacctcctttagcatttacaacat

SEQ ID NO: 101188 - DNA, 25 bp, Probe sequence
aacctcctttagcatttacaacatt

SEQ ID NO: 101189 - DNA, 25 bp, Probe sequence
ctcctttagcatttacaacattata

SEQ ID NO: 101190 - DNA, 25 bp, Probe sequence
cctcctttagcatttacaacattat

SEQ ID NO: 101191 - DNA, 25 bp, Probe sequence
cctttagcatttacaacattatacc

SEQ ID NO: 101192 - DNA, 25 bp, Probe sequence
gcatttacaacattataccaattta

SEQ ID NO: 101193 - DNA, 25 bp, Probe sequence
gttaaggatgaaacgggaggcacct

SEQ ID NO: 101194 - DNA, 25 bp, Probe sequence
tgcaaattctttgttaatttttgtt

SEQ ID NO: 101195 - DNA, 25 bp, Probe sequence
tctttgttaatttttgttaaggatg

SEQ ID NO: 101196 - DNA, 25 bp, Probe sequence
tacaacattataccaatttatagta

SEQ ID NO: 101197 - DNA, 25 bp, Probe sequence
tagcatttacaacattataccaatt

SEQ ID NO: 101198 - DNA, 25 bp, Probe sequence
tttagcatttacaacattataccaa

SEQ ID NO: 101199 - DNA, 25 bp, Probe sequence
ttaaggatgaaacgggaggcacctt

SEQ ID NO: 101200 - DNA, 25 bp, Probe sequence
atgttgacgctacggttgtcacgta

SEQ ID NO: 101201 - DNA, 25 bp, Probe sequence
acgctacggttgtcacgtagagatt

SEQ ID NO: 101202 - DNA, 25 bp, Probe sequence
acggttgtcacgtagagattaaaga

SEQ ID NO: 101203 - DNA, 25 bp, Probe sequence
cgtagagattaaagacattcgtttt

SEQ ID NO: 101204 - DNA, 25 bp, Probe sequence
gctacggttgtcacgtagagattaa

SEQ ID NO: 101205 - DNA, 25 bp, Probe sequence
gactgtttaaaacgattgtttatgt

SEQ ID NO: 101206 - DNA, 25 bp, Probe sequence
gacgctacggttgtcacgtagagat

SEQ ID NO: 101207 - DNA, 25 bp, Probe sequence
gttgacgctacggttgtcacgtaga

SEQ ID NO: 101208 - DNA, 25 bp, Probe sequence
gtttatgttgacgctacggttgtca

SEQ ID NO: 101209 - DNA, 25 bp, Probe sequence
tgttgacgctacggttgtcacgtag

SEQ ID NO: 101210 - DNA, 25 bp, Probe sequence
tgacgctacggttgtcacgtagaga

SEQ ID NO: 101211 - DNA, 25 bp, Probe sequence
tagagattaaagacattcgttttag

SEQ ID NO: 101212 - DNA, 25 bp, Probe sequence
tatgttgacgctacggttgtcacgt

SEQ ID NO: 101213 - DNA, 25 bp, Probe sequence
ttatgttgacgctacggttgtcacg

SEQ ID NO: 101214 - DNA, 25 bp, Probe sequence
ttgacgctacggttgtcacgtagag

SEQ ID NO: 101215 - DNA, 25 bp, Probe sequence
atatatcgcaatcaataatcatttt

SEQ ID NO: 101216 - DNA, 25 bp, Probe sequence
ataattctgtggatacacttaaata

SEQ ID NO: 101217 - DNA, 25 bp, Probe sequence
atggttttgttgcgctattttagtt

SEQ ID NO: 101218 - DNA, 25 bp, Probe sequence
cacacataaataaccccaagtctgc

SEQ ID NO: 101219 - DNA, 25 bp, Probe sequence
ccccaagtctgctggtaccagactt

SEQ ID NO: 101220 - DNA, 25 bp, Probe sequence
gaacacaatatatcgcaatcaataa

SEQ ID NO: 101221 - DNA, 25 bp, Probe sequence
gatcctacacacataaataacccca

SEQ ID NO: 101222 - DNA, 25 bp, Probe sequence
gattagtaccttgaacttttgaaat

SEQ ID NO: 101223 - DNA, 25 bp, Probe sequence
gttgaaagtgattagtaccttgaac

SEQ ID NO: 101224 - DNA, 25 bp, Probe sequence
gttgcgctattttagttgaaagtga

SEQ ID NO: 101225 - DNA, 25 bp, Probe sequence
gttataatgtcgatgttgaggtgaa

SEQ ID NO: 101226 - DNA, 25 bp, Probe sequence
ggggttgtgtagtataattctgtgg

SEQ ID NO: 101227 - DNA, 25 bp, Probe sequence
ggtaccagacttggggttgtgtagt

SEQ ID NO: 101228 - DNA, 25 bp, Probe sequence
taaataaccccaagtctgctggtac

SEQ ID NO: 101229 - DNA, 25 bp, Probe sequence
ttgattgaatggttttgttgcgcta

SEQ ID NO: 101230 - DNA, 25 bp, Probe sequence
aaattgtatgcctatatattatctt

SEQ ID NO: 101231 - DNA, 25 bp, Probe sequence
aaatctgctgccaaaatacgaacat

SEQ ID NO: 101232 - DNA, 25 bp, Probe sequence
aaagataaagtgttgttggtgaatt

SEQ ID NO: 101233 - DNA, 25 bp, Probe sequence
aagtgttgttggtgaattaacgaat

SEQ ID NO: 101234 - DNA, 25 bp, Probe sequence
catatgttctgtttttatgttagaa

SEQ ID NO: 101235 - DNA, 25 bp, Probe sequence
gctgccaaaatacgaacatatgttc

SEQ ID NO: 101236 - DNA, 25 bp, Probe sequence
gaataggtgtaggtcatccttcagt

SEQ ID NO: 101237 - DNA, 25 bp, Probe sequence
gaataatatgtaaaatctgctgcca

SEQ ID NO: 101238 - DNA, 25 bp, Probe sequence
gatactttagtcgaacggaggtgta

SEQ ID NO: 101239 - DNA, 25 bp, Probe sequence
gtatgcctatatattatctttaatt

SEQ ID NO: 101240 - DNA, 25 bp, Probe sequence
gtaggtcatccttcagtatgatact

SEQ ID NO: 101241 - DNA, 25 bp, Probe sequence
ggtcatccttcagtatgatacttta

SEQ ID NO: 101242 - DNA, 25 bp, Probe sequence
tcagtatgatactttagtcgaacgg

SEQ ID NO: 101243 - DNA, 25 bp, Probe sequence
taggtgtaggtcatccttcagtatg

SEQ ID NO: 101244 - DNA, 25 bp, Probe sequence
tttagtcgaacggaggtgtagtgta

SEQ ID NO: 101245 - DNA, 25 bp, Probe sequence
aaaaccaataatccgagtcatactc

SEQ ID NO: 101246 - DNA, 25 bp, Probe sequence
aaggcatctcacaatcgtggggtgc

SEQ ID NO: 101247 - DNA, 25 bp, Probe sequence
caatcgtggggtgccttttacattt

SEQ ID NO: 101248 - DNA, 25 bp, Probe sequence
catactcatcagattattggttgaa

SEQ ID NO: 101249 - DNA, 25 bp, Probe sequence
gcttgaatgtttgaagtgatttgcc

SEQ ID NO: 101250 - DNA, 25 bp, Probe sequence
gcatctcacaatcgtggggtgcctt

SEQ ID NO: 101251 - DNA, 25 bp, Probe sequence
gaagtgatttgccaaaagttatata

SEQ ID NO: 101252 - DNA, 25 bp, Probe sequence
gagtcatactcatcagattattggt

SEQ ID NO: 101253 - DNA, 25 bp, Probe sequence
gtagagatgtgatgcttgaatgttt

SEQ ID NO: 101254 - DNA, 25 bp, Probe sequence
gtggggtgccttttacatttgtaga

SEQ ID NO: 101255 - DNA, 25 bp, Probe sequence
gtgtttgacaagttgctgaataaaa

SEQ ID NO: 101256 - DNA, 25 bp, Probe sequence
ggtgccttttacatttgtagagatg

SEQ ID NO: 101257 - DNA, 25 bp, Probe sequence
ggtatagtgtttgacaagttgctga

SEQ ID NO: 101258 - DNA, 25 bp, Probe sequence
taataaggcatctcacaatcgtggg

SEQ ID NO: 101259 - DNA, 25 bp, Probe sequence
taatccgagtcatactcatcagatt

SEQ ID NO: 101260 - DNA, 25 bp, Probe sequence
ataaagttgcaatcacgaattacat

SEQ ID NO: 101261 - DNA, 25 bp, Probe sequence
atcaaacaacattttaggtattgta

SEQ ID NO: 101262 - DNA, 25 bp, Probe sequence
aaatcaaacaacattttaggtattg

SEQ ID NO: 101263 - DNA, 25 bp, Probe sequence
aaagttgcaatcacgaattacataa

SEQ ID NO: 101264 - DNA, 25 bp, Probe sequence
aagttgcaatcacgaattacataaa

SEQ ID NO: 101265 - DNA, 25 bp, Probe sequence
aagtctggctataataaagttgcaa

SEQ ID NO: 101266 - DNA, 25 bp, Probe sequence
ctggctataataaagttgcaatcac

SEQ ID NO: 101267 - DNA, 25 bp, Probe sequence
gcaatcacgaattacataaaaaagg

SEQ ID NO: 101268 - DNA, 25 bp, Probe sequence
gaaagtctggctataataaagttgc

SEQ ID NO: 101269 - DNA, 25 bp, Probe sequence
gagaaagtctggctataataaagtt

SEQ ID NO: 101270 - DNA, 25 bp, Probe sequence
gttgcaatcacgaattacataaaaa

SEQ ID NO: 101271 - DNA, 25 bp, Probe sequence
gtctggctataataaagttgcaatc

SEQ ID NO: 101272 - DNA, 25 bp, Probe sequence
ggctataataaagttgcaatcacga

SEQ ID NO: 101273 - DNA, 25 bp, Probe sequence
tggtataaacaaaatcaaacaacat

SEQ ID NO: 101274 - DNA, 25 bp, Probe sequence
taaagttgcaatcacgaattacata

SEQ ID NO: 101275 - DNA, 25 bp, Probe sequence
atatagcttacaacaaaatagatgc

SEQ ID NO: 101276 - DNA, 25 bp, Probe sequence
atagatgcaaaattgattaactaaa

SEQ ID NO: 101277 - DNA, 25 bp, Probe sequence
atagcttacaacaaaatagatgcaa

SEQ ID NO: 101278 - DNA, 25 bp, Probe sequence
atcactccttttatatagcttacaa

SEQ ID NO: 101279 - DNA, 25 bp, Probe sequence
agcttacaacaaaatagatgcaaaa

SEQ ID NO: 101280 - DNA, 25 bp, Probe sequence
actccttttatatagcttacaacaa

SEQ ID NO: 101281 - DNA, 25 bp, Probe sequence
cactccttttatatagcttacaaca

SEQ ID NO: 101282 - DNA, 25 bp, Probe sequence
ctccttttatatagcttacaacaaa

SEQ ID NO: 101283 - DNA, 25 bp, Probe sequence
ccttttatatagcttacaacaaaat

SEQ ID NO: 101284 - DNA, 25 bp, Probe sequence
gcttacaacaaaatagatgcaaaat

SEQ ID NO: 101285 - DNA, 25 bp, Probe sequence
tccttttatatagcttacaacaaaa

SEQ ID NO: 101286 - DNA, 25 bp, Probe sequence
tcactccttttatatagcttacaac

SEQ ID NO: 101287 - DNA, 25 bp, Probe sequence
tagcttacaacaaaatagatgcaaa

SEQ ID NO: 101288 - DNA, 25 bp, Probe sequence
tatcactccttttatatagcttaca

SEQ ID NO: 101289 - DNA, 25 bp, Probe sequence
tatagcttacaacaaaatagatgca

SEQ ID NO: 101290 - DNA, 25 bp, Probe sequence
atgtgattattttgatgtttctatt

SEQ ID NO: 101291 - DNA, 25 bp, Probe sequence
agtactatctagtttgatatgtcaa

SEQ ID NO: 101292 - DNA, 25 bp, Probe sequence
agttgtctactctaatttattatat

SEQ ID NO: 101293 - DNA, 25 bp, Probe sequence
aaattggaattctgagttgtctact

SEQ ID NO: 101294 - DNA, 25 bp, Probe sequence
aaccttgatattatgctgttttact

SEQ ID NO: 101295 - DNA, 25 bp, Probe sequence
gcttttggggtgtacattccacaca

SEQ ID NO: 101296 - DNA, 25 bp, Probe sequence
gatttttcagtctagcttttggggt

SEQ ID NO: 101297 - DNA, 25 bp, Probe sequence
gatgtttctattaaacttgtaattt

SEQ ID NO: 101298 - DNA, 25 bp, Probe sequence
gtacattccacacaaacatgtgatt

SEQ ID NO: 101299 - DNA, 25 bp, Probe sequence
gtctagcttttggggtgtacattcc

SEQ ID NO: 101300 - DNA, 25 bp, Probe sequence
ggggtgtacattccacacaaacatg

SEQ ID NO: 101301 - DNA, 25 bp, Probe sequence
ggaattctgagttgtctactctaat

SEQ ID NO: 101302 - DNA, 25 bp, Probe sequence
tatgctgttttactttttgaatgat

SEQ ID NO: 101303 - DNA, 25 bp, Probe sequence
tatttacctataaaaatacacctca

SEQ ID NO: 101304 - DNA, 25 bp, Probe sequence
ttcagtctagcttttggggtgtaca

SEQ ID NO: 101305 - DNA, 25 bp, Probe sequence
atacataatcagcattagtcattaa

SEQ ID NO: 101306 - DNA, 25 bp, Probe sequence
atgaacgacatcttttgtttttata

SEQ ID NO: 101307 - DNA, 25 bp, Probe sequence
atggtgcagccattatgaaaaaatt

SEQ ID NO: 101308 - DNA, 25 bp, Probe sequence
actgtagtcataggcgtccatacat

SEQ ID NO: 101309 - DNA, 25 bp, Probe sequence
aaataaataacgtaactgtagtcat

SEQ ID NO: 101310 - DNA, 25 bp, Probe sequence
cataggcgtccatacataatcagca

SEQ ID NO: 101311 - DNA, 25 bp, Probe sequence
ttaggtaaataacaatacacaccct

SEQ ID NO: 101312 - DNA, 25 bp, Probe sequence
gacatcttttgtttttataaatatc

SEQ ID NO: 101313 - DNA, 25 bp, Probe sequence
gttaaatgaacgacatcttttgttt

SEQ ID NO: 101314 - DNA, 25 bp, Probe sequence
gtaactgtagtcataggcgtccata

SEQ ID NO: 101315 - DNA, 25 bp, Probe sequence
gtggttttaattttctagataatat

SEQ ID NO: 101316 - DNA, 25 bp, Probe sequence
ggcgtccatacataatcagcattag

SEQ ID NO: 101317 - DNA, 25 bp, Probe sequence
tagtcataggcgtccatacataatc

SEQ ID NO: 101318 - DNA, 25 bp, Probe sequence
tagtcattaagaatggtgcagccat

SEQ ID NO: 101319 - DNA, 25 bp, Probe sequence
taggcgtccatacataatcagcatt

SEQ ID NO: 101320 - DNA, 25 bp, Probe sequence
atttatttttgcgctttccaaatca

SEQ ID NO: 101321 - DNA, 25 bp, Probe sequence
atgcaatagtagccattttatgtta

SEQ ID NO: 101322 - DNA, 25 bp, Probe sequence
aaggagcgcctttcattttttatgt

SEQ ID NO: 101323 - DNA, 25 bp, Probe sequence
gccttcgggctagtttttttgtgct

SEQ ID NO: 101324 - DNA, 25 bp, Probe sequence
gcgctttccaaatcaatgtatatgt

SEQ ID NO: 101325 - DNA, 25 bp, Probe sequence
gatgttaattctccttaaattctat

SEQ ID NO: 101326 - DNA, 25 bp, Probe sequence
gtttttttgtgctatatatttgttt

SEQ ID NO: 101327 - DNA, 25 bp, Probe sequence
gtgttttgatgaatttggtcttgat

SEQ ID NO: 101328 - DNA, 25 bp, Probe sequence
gggaagtaggtaagcatttcggtgc

SEQ ID NO: 101329 - DNA, 25 bp, Probe sequence
tgggcgttttcaaggagcgcctttc

SEQ ID NO: 101330 - DNA, 25 bp, Probe sequence
tctattcataagctagccttcgggc

SEQ ID NO: 101331 - DNA, 25 bp, Probe sequence
taagcatttcggtgcttaccttttt

SEQ ID NO: 101332 - DNA, 25 bp, Probe sequence
tttttatgtattgctccttttcggg

SEQ ID NO: 101333 - DNA, 25 bp, Probe sequence
tatgttaatattaccttgggcgttt

SEQ ID NO: 101334 - DNA, 25 bp, Probe sequence
tattgctccttttcgggctagttta

SEQ ID NO: 101335 - DNA, 25 bp, Probe sequence
atgaaatgtctgccaaacctttata

SEQ ID NO: 101336 - DNA, 25 bp, Probe sequence
aggtttggcaagttatgaaatgtct

SEQ ID NO: 101337 - DNA, 25 bp, Probe sequence
agttatgaaatgtctgccaaacctt

SEQ ID NO: 101338 - DNA, 25 bp, Probe sequence
agaaatatctaccttttaatttatg

SEQ ID NO: 101339 - DNA, 25 bp, Probe sequence
aagttatgaaatgtctgccaaacct

SEQ ID NO: 101340 - DNA, 25 bp, Probe sequence
aaggtttggcaagttatgaaatgtc

SEQ ID NO: 101341 - DNA, 25 bp, Probe sequence
caagttatgaaatgtctgccaaacc

SEQ ID NO: 101342 - DNA, 25 bp, Probe sequence
gcaagttatgaaatgtctgccaaac

SEQ ID NO: 101343 - DNA, 25 bp, Probe sequence
gaaatatctaccttttaatttatgt

SEQ ID NO: 101344 - DNA, 25 bp, Probe sequence
gttatgaaatgtctgccaaaccttt

SEQ ID NO: 101345 - DNA, 25 bp, Probe sequence
gtttggcaagttatgaaatgtctgc

SEQ ID NO: 101346 - DNA, 25 bp, Probe sequence
ggtttggcaagttatgaaatgtctg

SEQ ID NO: 101347 - DNA, 25 bp, Probe sequence
tatgaaatgtctgccaaacctttat

SEQ ID NO: 101348 - DNA, 25 bp, Probe sequence
tatctaccttttaatttatgtaact

SEQ ID NO: 101349 - DNA, 25 bp, Probe sequence
ttatgaaatgtctgccaaaccttta

SEQ ID NO: 101350 - DNA, 25 bp, Probe sequence
atgactttagcattcccgtataata

SEQ ID NO: 101351 - DNA, 25 bp, Probe sequence
atgtgttacacatgcatcaactatt

SEQ ID NO: 101352 - DNA, 25 bp, Probe sequence
aggacgtctttttagattgtatgtt

SEQ ID NO: 101353 - DNA, 25 bp, Probe sequence
agcatagttttcatactactccccc

SEQ ID NO: 101354 - DNA, 25 bp, Probe sequence
agcctgttaagtggcctagtaacct

SEQ ID NO: 101355 - DNA, 25 bp, Probe sequence
actcccccgtagtatatatgacttt

SEQ ID NO: 101356 - DNA, 25 bp, Probe sequence
caactatttacatccttgttcaccc

SEQ ID NO: 101357 - DNA, 25 bp, Probe sequence
cttgttcacccaagcatgtcactgg

SEQ ID NO: 101358 - DNA, 25 bp, Probe sequence
gataatccttttttaggcaggtact

SEQ ID NO: 101359 - DNA, 25 bp, Probe sequence
gttataatctttctagacgtattca

SEQ ID NO: 101360 - DNA, 25 bp, Probe sequence
gtatgttatagctagccttccggtt

SEQ ID NO: 101361 - DNA, 25 bp, Probe sequence
gtacttgcctatttttttatgttat

SEQ ID NO: 101362 - DNA, 25 bp, Probe sequence
gtcactgggtgttttttcttatgat

SEQ ID NO: 101363 - DNA, 25 bp, Probe sequence
tacggggtgctttttatgttataat

SEQ ID NO: 101364 - DNA, 25 bp, Probe sequence
tatagctagccttccggttaatttt

SEQ ID NO: 101365 - DNA, 25 bp, Probe sequence
attatctttcatcaaattctcattc

SEQ ID NO: 101366 - DNA, 25 bp, Probe sequence
atctttcatcaaattctcattcatg

SEQ ID NO: 101367 - DNA, 25 bp, Probe sequence
aaattatctttcatcaaattctcat

SEQ ID NO: 101368 - DNA, 25 bp, Probe sequence
aatgtcttgattgaatatgtgtagt

SEQ ID NO: 101369 - DNA, 25 bp, Probe sequence
aattatctttcatcaaattctcatt

SEQ ID NO: 101370 - DNA, 25 bp, Probe sequence
ctttcatcaaattctcattcatgca

SEQ ID NO: 101371 - DNA, 25 bp, Probe sequence
gaaaattatctttcatcaaattctc

SEQ ID NO: 101372 - DNA, 25 bp, Probe sequence
gaaagcaatgtcttgattgaatatg

SEQ ID NO: 101373 - DNA, 25 bp, Probe sequence
gttgtttattatagaaagcaatgtc

SEQ ID NO: 101374 - DNA, 25 bp, Probe sequence
gtcttgattgaatatgtgtagtgaa

SEQ ID NO: 101375 - DNA, 25 bp, Probe sequence
gtgtagtgaaaattatctttcatca

SEQ ID NO: 101376 - DNA, 25 bp, Probe sequence
tctttcatcaaattctcattcatgc

SEQ ID NO: 101377 - DNA, 25 bp, Probe sequence
tatctttcatcaaattctcattcat

SEQ ID NO: 101378 - DNA, 25 bp, Probe sequence
tttcatcaaattctcattcatgcac

SEQ ID NO: 101379 - DNA, 25 bp, Probe sequence
ttatctttcatcaaattctcattca

SEQ ID NO: 101380 - DNA, 25 bp, Probe sequence
atttatcatcttaaataagtgtgtt

SEQ ID NO: 101381 - DNA, 25 bp, Probe sequence
agttgttgatatttatcatcttaaa

SEQ ID NO: 101382 - DNA, 25 bp, Probe sequence
aagttgttgatatttatcatcttaa

SEQ ID NO: 101383 - DNA, 25 bp, Probe sequence
cttgatttttaatattttctcaata

SEQ ID NO: 101384 - DNA, 25 bp, Probe sequence
gaagttgttgatatttatcatctta

SEQ ID NO: 101385 - DNA, 25 bp, Probe sequence
gttgttgatatttatcatcttaaat

SEQ ID NO: 101386 - DNA, 25 bp, Probe sequence
gttgatatttatcatcttaaataag

SEQ ID NO: 101387 - DNA, 25 bp, Probe sequence
tgttgatatttatcatcttaaataa

SEQ ID NO: 101388 - DNA, 25 bp, Probe sequence
tgaagttgttgatatttatcatctt

SEQ ID NO: 101389 - DNA, 25 bp, Probe sequence
tcttgatttttaatattttctcaat

SEQ ID NO: 101390 - DNA, 25 bp, Probe sequence
tttcttgatttttaatattttctca

SEQ ID NO: 101391 - DNA, 25 bp, Probe sequence
tttatcatcttaaataagtgtgtta

SEQ ID NO: 101392 - DNA, 25 bp, Probe sequence
ttcttgatttttaatattttctcaa

SEQ ID NO: 101393 - DNA, 25 bp, Probe sequence
ttgttgatatttatcatcttaaata

SEQ ID NO: 101394 - DNA, 25 bp, Probe sequence
ttgatttttaatattttctcaatat

SEQ ID NO: 101395 - DNA, 25 bp, Probe sequence
atcgctaactttggctggtttcgat

SEQ ID NO: 101396 - DNA, 25 bp, Probe sequence
catcgctaactttggctggtttcga

SEQ ID NO: 101397 - DNA, 25 bp, Probe sequence
ctttggctggtttcgatggttaaat

SEQ ID NO: 101398 - DNA, 25 bp, Probe sequence
ctaactttggctggtttcgatggtt

SEQ ID NO: 101399 - DNA, 25 bp, Probe sequence
cgctaactttggctggtttcgatgg

SEQ ID NO: 101400 - DNA, 25 bp, Probe sequence
ccatcgctaactttggctggtttcg

SEQ ID NO: 101401 - DNA, 25 bp, Probe sequence
gctggtttcgatggttaaatggtta

SEQ ID NO: 101402 - DNA, 25 bp, Probe sequence
gctaactttggctggtttcgatggt

SEQ ID NO: 101403 - DNA, 25 bp, Probe sequence
ggctggtttcgatggttaaatggtt

SEQ ID NO: 101404 - DNA, 25 bp, Probe sequence
tggctggtttcgatggttaaatggt

SEQ ID NO: 101405 - DNA, 25 bp, Probe sequence
tggtttcgatggttaaatggttatt

SEQ ID NO: 101406 - DNA, 25 bp, Probe sequence
tcgctaactttggctggtttcgatg

SEQ ID NO: 101407 - DNA, 25 bp, Probe sequence
tttggctggtttcgatggttaaatg

SEQ ID NO: 101408 - DNA, 25 bp, Probe sequence
taactttggctggtttcgatggtta

SEQ ID NO: 101409 - DNA, 25 bp, Probe sequence
ttggctggtttcgatggttaaatgg

SEQ ID NO: 101410 - DNA, 25 bp, Probe sequence
attcacttttttactgctgtttgta

SEQ ID NO: 101411 - DNA, 25 bp, Probe sequence
attactatacttaaaacattcactt

SEQ ID NO: 101412 - DNA, 25 bp, Probe sequence
acattcacttttttactgctgtttg

SEQ ID NO: 101413 - DNA, 25 bp, Probe sequence
aaatttctatagatagttttgaaca

SEQ ID NO: 101414 - DNA, 25 bp, Probe sequence
aaacattcacttttttactgctgtt

SEQ ID NO: 101415 - DNA, 25 bp, Probe sequence
aaaacattcacttttttactgctgt

SEQ ID NO: 101416 - DNA, 25 bp, Probe sequence
aaaagtatatgtgctataatatgct

SEQ ID NO: 101417 - DNA, 25 bp, Probe sequence
aacattcacttttttactgctgttt

SEQ ID NO: 101418 - DNA, 25 bp, Probe sequence
cacttttttactgctgtttgtaagt

SEQ ID NO: 101419 - DNA, 25 bp, Probe sequence
cattcacttttttactgctgtttgt

SEQ ID NO: 101420 - DNA, 25 bp, Probe sequence
gagaataatctgaaagtatacaagc

SEQ ID NO: 101421 - DNA, 25 bp, Probe sequence
gttttgaacaaagcgagaataatct

SEQ ID NO: 101422 - DNA, 25 bp, Probe sequence
tactgctgtttgtaagttttataaa

SEQ ID NO: 101423 - DNA, 25 bp, Probe sequence
ttttactgctgtttgtaagttttat

SEQ ID NO: 101424 - DNA, 25 bp, Probe sequence
ttcacttttttactgctgtttgtaa

SEQ ID NO: 101425 - DNA, 25 bp, Probe sequence
atttcggataataacaagtttatat

SEQ ID NO: 101426 - DNA, 25 bp, Probe sequence
atataactaataattactccaacaa

SEQ ID NO: 101427 - DNA, 25 bp, Probe sequence
atctattatacaaaaatttcggata

SEQ ID NO: 101428 - DNA, 25 bp, Probe sequence
agtttatatggaattatgctttaga

SEQ ID NO: 101429 - DNA, 25 bp, Probe sequence
acaagtttatatggaattatgcttt

SEQ ID NO: 101430 - DNA, 25 bp, Probe sequence
cattccataattattgtatataact

SEQ ID NO: 101431 - DNA, 25 bp, Probe sequence
gtttatatggaattatgctttagag

SEQ ID NO: 101432 - DNA, 25 bp, Probe sequence
gtatataactaataattactccaac

SEQ ID NO: 101433 - DNA, 25 bp, Probe sequence
taattactccaacaaaaataatcta

SEQ ID NO: 101434 - DNA, 25 bp, Probe sequence
taatctattatacaaaaatttcgga

SEQ ID NO: 101435 - DNA, 25 bp, Probe sequence
tactccaacaaaaataatctattat

SEQ ID NO: 101436 - DNA, 25 bp, Probe sequence
tatacaaaaatttcggataataaca

SEQ ID NO: 101437 - DNA, 25 bp, Probe sequence
tataactaataattactccaacaaa

SEQ ID NO: 101438 - DNA, 25 bp, Probe sequence
tatataactaataattactccaaca

SEQ ID NO: 101439 - DNA, 25 bp, Probe sequence
ttactccaacaaaaataatctatta

SEQ ID NO: 101440 - DNA, 25 bp, Probe sequence
attacgctcatagctttcttagaaa
